(19) United States
(12) Patent Application Publication
(10) Pub. No.: US 2022/0073565 A1
(43) Pub. Date: Mar. 10, 2022

(54) DE NOVO DESIGN OF PROTEIN SWITCHES FOR TUNABLE CONTROL OF PROTEIN DEGRADATION

(71) Applicants: University of Washington, Seattle, WA (US); The Regents of the University of California, Oakland, CA (US)

(72) Inventors: Robert LANGAN, Seattle, WA (US); Andrew NG, Oakland, CA (US); Scott BOYKEN, Seattle, WA (US); Marc LAJOIE, Seattle, WA (US); Hana EL-SAMAD, Oakland, CA (US); David BAKER, Seattle, WA (US)

(21) Appl. No.: 17/419,413

(22) PCT Filed: Jan. 6, 2020
(86) PCT No.: PCT/US2020/012372

§ 371 Date: Jun. 29, 2021

Related U.S. Application Data
(60) Provisional application No. 62/850,336, filed on May 20, 2019.
(60) Provisional application No. 62/789,351, filed on Jan. 7, 2019.

(51) Int. Cl. C07K 14/00

(52) U.S. Cl. CPC C07K 14/001; C07K 2319/00

(57) ABSTRACT

Disclosed herein are non-naturally occurring cage polypeptides, kits and degron LOCKRs including the cage polypep-tides, and uses thereof, wherein the cage polypeptides include (a) a helical bundle, comprising between 2 and 7 alpha-helices, wherein the helical bundle includes: (i) a structural region; and (ii) a latch region, wherein the latch region composes a degron located within the latch region, wherein the structural region interacts with the latch region to prevent activity of the degron; and (b) amino acid linkers connecting each alpha helix

### CROSS REFERENCE

[0001] This application claims priority to U.S. Provisional Patent Application Ser. Nos. 62/789,351 filed Jan. 7. 2019 and 62/850,336 filed May 20, 2019, each incorporated by reference herein in its entirety.

### FEDERAL FUNDING STATEMENT

[0002] This invention was made with government support under Grant No. HR0011-16-2-0045, awarded by the Defense Advanced Research Projects Agency. The government has certain rights in the invention.

### REFERENCE TO SEQUENCE LISTING SUBMITTED ELECTRONICALLY VIA EFS-WEB

[0003] The content of the electronically submitted sequence listing in ASCII text file (Name: 18-1783-PCT_Sequence-Listing_ST25.txt; Size: 34,384 kB kb; and Date of Creation: Jan. 6, 2020) filed with the application is herein incorporated by reference in its entirety.

### BACKGROUND

[0004] There has been considerable progress in the de novo design of stable protein structures based on the principle that proteins fold into their lowest free energy state. These efforts have focused on maximizing the free energy gap between the desired folded structure and all other structures. Designing proteins that can switch conformations is more challenging, as multiple states must have sufficiently low free energies to be populated relative to the unfolded state, and the free energy differences between the states must be small enough that the state occupancies can be toggled by an external input. The de novo design of a protein system which switches conformational state in the presence of an external input has not been achieved.

### SUMMARY

[0005] In one aspect, the disclosure provides non-naturally occurring cage polypeptides comprising:

[0006] (a) a helical bundle, comprising between 2 and 7 alpha-helices, wherein the helical bundle comprises:
[0007] (i) a structural region; and
[0008] (ii) a latch region, wherein the latch region comprises a degron located
   within the latch region, wherein the structural region interacts with the latch region to prevent activity of the degron; and

[0009] (b) amino acid linkers connecting each alpha helix.

[0010] In one embodiment, the latch region is C-terminal to the structural region, and the degron is located within about 100, 95, 90, 85, 80, 75, 70, 65, 60, 55, 50, 45, 40, 35, 30, 25, 20, 15, 10, 5, 4, 3, 2, 1, or 0 amino acid residues of the C-terminus of the latch region, and/or within about 100, 95, 90, 85, 80, 75, 70, 65, 60. 55, 50, 45, 40, 35, 30, 25, 20, 15, 10, 5, 4, 3, 2, 1, or 0 amino acid residues of the C-terminus of the cage polypeptide.

[0011] In one embodiment, the degron comprises a CA dipeptide located between 10-30 residues from the C-terminus of the cage polypeptide; in various embodiments, the degron comprises the peptide MSCAQES (SEQ ID NO: 28468) and/or L(X)MSCAQES (SEQ ID NO: 28467), wherein X can be any amino acid residue, wherein X is optionally not proline. In another embodiment, the degron comprises an amino acid residue or peptide selected from the group consisting of

[0012] (a) GG; RG; KG; QG; WG; PG; AG; RxxG; EE; R; Rxx; Vx; Ax; A, wherein “x” can be any amino acid residue, and wherein the degron is within 10-30 amino acids of a terminus of the latch region, and/or within 10-30 amino acids of a terminus of the cage polypeptide:

[0013] (b) an amino acid residue or peptide that recruits an ubiquitin ligase that ubiquitilates the cage polypeptide and/or the operably linked functional polypeptide;

[0014] (c) a proteolysis-targeting chimeric molecule (PROTAC); and

[0015] (d) any other degron described herein.

[0016] In a further embodiment, the latch region is N-terminal to the structural region, and wherein the degron is located within about 100, 95. 90, 85, 80. 75, 70, 65, 60, 55, 50, 45, 40, 35. 30, 25, 20, 15, 10, 5, 4, 3, 2, 1, or 0 amino acid residues of the N-terminus of the latch region, and/or within about 100, 95. 90, 85, 80, 75, 70, 65, 60, 55, 50, 45. 40, 35, 30, 25, 20, 15, 10, 5, 4, 3, 2, 1, or 0 amino acid residues of the N-terminus of the cage polypeptide.

[0017] In other embodiments, the degron comprises a peptide selected from the group consisting of the following (residues within brackets are optional):

| (SEQ ID NO: 28469) | |
|---|---|
| | [[KTRGVEEVAEGVVLL]]RRRG [[NK(FAM)KKK]], |
| (SEQ ID NO: 28470) | |
| | [[KPFLNGGPY]] HSREQSTDSG [[LGLGSYK(FAM)KKK]], |
| (SEQ ID NO: 28471) | |
| | ASADLDLEALAPYIPADDDFQLRK(FAM)KKK, |
| (SEQ ID NO: 28472) | |
| | [[K-(PEG)-KEEK]] DINNN [[VKKTK(FAM)KKK]], |
| (SEQ ID NO: 28487) | |
| | [[K-(PEG)]] DVQKADVSST [[GQGIDSK(FAM)KKK]], |
| (SEQ ID NO: 28473) | |
| | KAAEEEEVSLASTPTDVRDVDIK(FAM)KKK, |
| (SEQ ID NO: 28474) | |
| | [[KKYSSQTSQ]] DSGNYS [[NK(FAM)KKK]], |
| (SEQ ID NO: 28475) | |
| | KPLSSSVPSQKTYQGSYGFRLGK(FAM)KKK, |
| (SEQ ID NO: 28476) | |
| | [[KAWQQQSYL]] DSGIHSG [[ATTTAPK(FAM)KKK]], |
| (SEQ ID NO: 28488) | |
| | [[KTRGVEEVAEGVVLL]]RRRG[[NKKKK]], |
| (SEQ ID NO: 28489) | |
| | [[KPFLNGGPY]]HSREQSTDSG[[LGLGSYKKKK]], |
| (SEQ ID NO: 28490) | |
| | ASADLDLEALAPYIPADDDFQLRKKKK, |
| (SEQ ID NO: 28491) | |
| | [[KKEEK]]DINNN[[VKKTKKKK]], |
| (SEQ ID NO: 28492) | |
| | [[K]]DVQKADVSST[[GQGIDSKKKK]], |
| (SEQ ID NO: 28493) | |
| | KAAEEEEVSLASTPTDVRDVDIKKKK, |
| | (SEQ ID NO: 28494) |
| | [[KKYSSQTSQ]]DSGNYS [[NKKKK]], |
| (SEQ ID NO: 28495) | |
| | KPLSSSVPSQKTYQGSYGFRLGKKKK, |
| (SEQ ID NO: 28496) | |
| | [[KAWQQQSYL]]DSGIHSG[[ATTTAPKKKK]], |
| (SEQ ID NO: 28497) | |
| | RRRG; |
| (SEQ ID NO: 28498) | |
| | HSREQSTDSG; |
| (SEQ ID NO: 28499) | |
| | DINNN; |
| (SEQ ID NO: 28500) | |
| | DVQKADVSST; |
| (SEQ ID NO: 28501) | |
| | DSGNYS; |
| | and |
| (SEQ ID NO: 28502 | |
| | DSGIHSG. |

[0018] In a further embodiment, the cage polypeptides further comprise one or more functional polypeptide domains. In various embodiments, the one or more functional polypeptide domains may be located at the same terminus or different termini of the cage polypeptide as the latch region. In one embodiment, the one or more functional polypeptide domains are located at the N-terminus of the cage polypeptide and the latch region is located C-terminal to the structural region. In another embodiment, the one or more functional polypeptide domains are located at the C-terminus of the cage polypeptide and the latch region is located N-terminal to the structural region. In a further embodiment, the latch region comprises one or more additional bioactive peptides besides the degron, wherein the structural region interacts with the latch region to prevent activity of the one or more additional bioactive peptides.

[0019] In one embodiment, the cage polypeptide comprises the amino acid sequence having at least 45%, 50%, 55%, 60%, 65%, 70%. 75%. 80%, 85%, 90%. 91%, 92%, 93%, 94%, 95%, 96%, 97%, 98%, 99%, or 100% sequence identity, not including optional residues, along the full length of the amino acid sequence of a cage polypeptide selected from the group consisting of (a) SEQ ID NO: 27359-28465 or a cage polypeptide listed in Table 7 (in (a) embodiments, the degron is included within the polypeptide sequence), and (b) SEQ ID NOS:1-49, 51-52, 54-59, 61, 65, 67-91, 92.-2033, SEQ ID NOS:2034-14317, 27094-27117, 27120-27125, 27,278 to 27,321, and cage polypeptides listed in Table 2 (polypeptides with an even-numbered SEQ ID NO between SEQ ID NOS: 27126 and 27276), Table 3, and/or Table 4 ((i.e.: in (b) embodiments, the degron is not included in the amino acid sequence and would be added within the latch region, including but not limited to those degron amino acid sequences disclosed herein.

[0020] In another aspect, the disclosure provides kits or degron LOCKR switches comprising:

[0021] (a) the cage polypeptide of any embodiment or combination of embodiments disclosed herein; and

[0022] (b) a key polypeptide capable of binding to the cage polypeptide structural region, thereby displacing the latch region and activating the one or more degron.

[0023] In one embodiment of the kits or degron LOCKR switches, the key polypeptide comprises an amino acid sequence having at least 45%, 50%, 55%, 60%, 65%, 70%, 75%, 80%, 85%, 90%, 91%, 92%, 93%, 94%, 95%, 96%, 97%, 98%, 99%, or 100% sequence identity, not including optional residues, along the full length of the amino acid sequence of a key protein disclosed herein, or a key polypeptide selected from the group consisting of SEQ ID NOS: 26602-27050, and 27,322 to 27,358, and 28477-28486. In another embodiment of the kits or degron LOCKR switches, the cage polypeptide comprises an amino acid sequence having at least 45%, 50%, 55%, 60%, 65%, 70%, 75%, 80%, 85%. 90%, 91%, 92%, 93%, 94%, 95%, 96%, 97%, 98%, 99%, or 100% sequence identity, not including optional residues, along the full length of the amino acid sequence selected from the group consisting of SEQ ID NO: 27359-28465 or a cage polypeptide listed in Table 7. In a further embodiment of the kits or degron LOCKR switches the one or more cage polypeptide and the one or more key polypeptide comprise at least one cage polypeptide and at least one key polypeptide comprising an amino acid sequence having at least 40%, 45%. 50%, 55%, 60%, 65%, 70%. 75%, 80%, 85%. 90%, 91%, 92%, 93%. 94%, 95%, 96%, 97%, 98%, 99%, or 100% sequence identity, not including optional residues, along the full length of a cage polypeptide and a key polypeptide, respectively, the in the same row of Table 2, 3, 4, 5, 6, or 7.

[0024] In various aspects, the disclosure provides nucleic acids encoding the cage polypeptide of any embodiment or combination of embodiments of the disclosure; expression vectors comprising the nucleic acid operatively linked to a promoter; kits comprising

[0025] (a) one or more nucleic acids encoding the polypeptide of embodiment or combination of embodiments of the disclosure; and

[0026] (b) one or more nucleic acids encoding one or more key polypeptides capable of binding to the cage polypeptide structural region; kits comprising

[0027] (a) one or more expression vectors of the disclosure; and

[0028] (b) one or more expression vectors comprising one or more nucleic acids encoding one or more key polypeptides capable of binding to the cage polypeptide structural region, wherein the one or more nucleic acids encoding one or more key polypeptides are operatively linked to a promoter; and host cells comprising one or more nucleic acids encoding the polypeptide of any embodiment or combination of embodiments of the disclosure, and/or one or more of the expression vectors of the disclosure, optionally further comprising one or more nucleic acids encoding one or more key polypeptides capable of binding to the cage polypeptide structural region. In one embodiment, the one or more nucleic acids encoding the one or more key polypeptides comprise an amino acid sequence having at least 45%, 50%, 55%, 60%, 65%, 70%, 75%. 80%, 85%, 90%, 91%. 92%, 93%, 94%, 95%, 96%, 97%, 98%, 99%, or 100% sequence identity, not including optional residues, along the full length of the amino acid sequence of a key protein disclosed herein, or a key polypeptide selected from SEQ ID NOS: 26602-27050, 27,322-27.358, and 28477-28486, in particular SEQ ID NOS: 28477-28486. In a further embodiment of the kits or host cells, the one or more nucleic acids encoding the cage polypeptide of any embodiment or combination of embodiments, encodes a polypeptide that comprise an amino acid sequence having at least 45%, 50%, 55%, 60%, 65%, 70%, 75%. 80%, 85%, 90%, 91%, 92%, 93%, 94%, 95%, 96%, 97%, 98%, 99%, or 100% sequence identity, not including optional residues, along the full length of the amino acid sequence of a cage polypeptide selected from the group consisting of SEQ ID NOS: 27359-28465 or a cage polypeptide listed in Table 7. In a further embodiment of the kits and host cells, the one or more cage polypeptide and the one or more key polypeptide comprise at least one cage polypeptide and at least one key polypeptide comprising an amino acid sequence having at least 40%, 45%, 50%. 55%, 60%, 65%, 70%, 75%, 80%. 85%, 90%, 91%, 92%, 93%, 94%. 95%, 96%, 97%, 98%, 99%, or 100% sequence identity, not including optional residues, along the full length of a cage polypeptide and a key polypeptide, respectively, the in the same row of Table 2, 3, 4, 5, 6, or T in particular Table 6 or Table 7.

[0029] In another aspect, the disclosure provides uses of the cage polypeptides, LOCKR switches, nucleic acids, expression vectors, or host cells disclosed herein to sequester a degron in the cage polypeptide until a key is expressed and activates the cage polypeptide, and the degron targets the cage polypeptide and any functional peptide fused to it for degradation.

### DESCRIPTION OF THE FIGURES

[0030] FIGS. 1a-1f. Design of the LOCKR switch system. FIG. 1a shows thermodynamic model describing our design goal. The structural region and latch region in cage form the switch with some equilibrium in the. open and closed states. The key can bind the cage to promote the open state to allow target binding to the latch. FIG. 1b shows plots from the model in (a) for two values of K_{LT} showing how fraction target bound is affected by addition of key (K_{CK}=1 nM); the different colored curves show the effect of log-decreasing values of Kₒₚₑₙ=[open]/[closed]. FIG. 1c shows loops were added to homotrimer 5L6HC3_1⁵ to form monomeric five- and six-helix frameworks; double mutant V217S/1232S weakens the Latch allowing it to be displaced by key, resulting in a LOCKR system able to bind an exogenous key. FIG. 1d shows chemical denaturation with guanidinium chloride (Gdm) monitoring mean residue ellipticity (MRE) at 222 nm. FIG. 1e shows small-angle x-ray scattering (SAXS) shows that the monomeric frameworks exhibit spectra that are in close agreement to each other and the original homotrimer. FIG. 1f. Pulldown assay showing that Key binds to the truncated five-helix framework and LOCKR (V217S/I232S), but not the six-helix monomer; free GFP-Key was added to monomeric frameworks immobilized onto a plate via a hexahistidine tag; after a series of wash steps, binding was measured by GFP fluorescence (n=2, error bars indicate standard deviation).

[0031] FIGS. 2a-2d. BimLOCKR design and activity. FIG. 2a. The free energy of the latch-cage interface was tuned through sub-optimal Bim-cage interactions (left, shown as altered hydrophobic packing and a buried hydrogen bond) and by exposing hydrophobic residues at the end of the interface (right) as a toehold. FIG. 2b. Introduction of the toehold allows activation of 250 nM BimLOCKR with addition of 5 μM key (‘on’ bar) via Bio-laver interferometry. FIG. 2c. Bio-layer interferometry shows key-dependent binding to Bcl2 with 250 nM BimLOCKR. Association from 0-500 s. then dissociation from 500-1700 s. FIG. 2d. Each point is a result of fitting data in I and extracting the response at equilibrium. The curves show similar data with shorter keys demonstrating the ability to tune K_{CK} of LOCKR and effect its range of activation.

[0032] FIG. 3a-c. Design and validation of orthogonal BimLOCKR. FIG. 3a. Left: LOCKR in cartoon representation. Cage with three different latches superimposed and hydrogen bond networks marked by markers. Right: Hydrogen-bond networks across the orthogonal LOCKR interfaces. FIG. 3b. BimLOCKR binding to Bcl2 in response to its cognate key on Octet. One replicate. FIG. 3c. Response on Octet after 500 seconds for each switch (250 nM) and key (5 μM) pair. Average of two replicates.

[0033] FIG. 4a-b. Experimentally determined x-ray crystal structures of asymmetrized LOCKR switch designs. FIG. 4a. Crystal structure of design 1-fix-short-BIM-t0, which contains the encoded BIM peptide. FIG. 4b. Crystal structure of design 1fix-short-noBim(AYYA)-t0 is in very close agreement with the design model with respect to (left) Backbone, (middle) hydrogen bond network, and (right) hydrophobic packing; the region of the Latch where Bim and Gfp11 would be encoded is shown; the electron density map is shown for the network and hydrophobic cross-sections (middle and right).

[0034] FIG. 5a-d. LOCKR switch that can prevent split GFP11 from complementing GFP1-10 in the absence of Key. FIG. 5a. Crystal structure of GFP (pdb 2y0g) with strand 11 shown. FIG. 5b. Crystal structure of prototype switch with GFP 11 stabilized as a helix (mesh is electron density). FIG. 5c. The computational design model matches the crystal structure with a root-mean-square deviation of 0.87 Å. Experimentally determined x-ray crystal structure of designed LOCKR switch 1fix-short-GFP-t0, showing the encoded the 11^{th} strand of GFP (GFP11) is an alpha helix and in very close agreement to the design model.

[0035] FIG. 5d. GFP fluorescence is only observed in the presence of the Key peptide, demonstrating the switch is function (OFF in the absence of Key, and ON in the presence of Key).

[0036] FIG. 6a-c. Designed GFP11-LOCKR switch from FIG. 4, tuned to be colocalization-dependent. FIG. 6a. Schematic of test system, where colocalization-dependence is controlled by linked Spycatcher™/Spytag™ fusions. In this model, the Key should only activate the LOCKR switch (yield fluorescence) when fused to Spytag, which will colocalizing the Key to the Cage (right). When Key alone is added, it should not be able to activate the LOCKR switch (middle). FIG. 6b-c. Fluorescence data demonstrating colocalization-dependence of designed LOCKR switches following the schematic in FIG. 6a. Designs 1fix-latch and 1fix-short fused to Spycatcher™ show more activation when mixed with their cognate Keys fused to Spytag™; Keys lacking Spytag™ show markedly less activation.

[0037] FIG. 7a-b. Caged intein LOCKR switches. FIG. 7a. Designed LOCKR switch with Cage component encoding the V MAc Intein shows successful activation when mixed with designed Key fused to sfGFP and VMAn Intein. FIG. 7b. The SDS-PAGE shows successful VMAc-VMAn reaction, with bands corresponding to the correct molecular weight of the expected spliced protein products.

[0038] FIG. 8. Multiple sequence alignment (MSA) comparing the original LOCKR_a Cage scaffold design to its asymmetrized (1fix-short-noBim(AYYA)-t0) and orthogonal (LOCKRb-f) design counterparts. Only 150 (40.8%) of the sites are identical across the MSA, with a pairwise % identity of 69.4%. The Latch regions (the C-terminal region starting at position labeled 311 in this MSA) have very little sequence identity/similarity (from top to bottom SEQ ID NOs: 17, 39, 7, 8, 9, 10, 11).

[0039] FIG. 9. Superposition of the crystal structure (white) of 1fix-short-noBim(AYYA)-t0 (FIG. 4B) onto the x-ray crystal structure of the base scaffold 5L6HC3_1⁵ (dark) used to make LOCKRa (FIG. 1) demonstrates that the asymmetrizing mutations (variable positions shown in FIG. 8 MSA) do not affect the three-dimensional structure of the protein. The backbone RMSD between the two proteins is 0.85 Angstroms (from superposing of all backbone atoms between chains A).

[0040] FIG. 10: GFP Plate assay to find mutations for LOCKR. Different putative LOCKR constructs were adhered via 6x-His tag to a Ni coated 96-well plate, Key-GFP was applied, and excess washed. Resulting fluorescence represents Key-GFP bound to LOCKR constnicts. The truncation was used as a positive control, since the key binds to the open interface. The monomer as a negative control since it does not bind the key. Error bars represent the standard deviation of three replicates.

[0041] FIG. 11a-b: Orthogonal LOCKR GFP assays. FIG. 11a. The latch was truncated from the 6x-His tagged cage in the five redesigned LOCKR constructs (b through f). The corresponding keys were GFP tagged. Key-Cage binding was measured by Ni pulldown of the cage and measuring the resulting GFP fluorescence. Error bars are standard deviation of three replicates. FIG. 11b. Each full LOCKR construct that binds key from (a) was given a nine-residue toehold and tested for binding against all four functional keys (a through d) in the GFP pulldown assay. Error bars are standard deviation of five replicates. Key a is suspected to be promiscuous binding, but not activating, due to the pseudosymmetric generation of LOCKR from a homotrimer. LOCKRb shows no binding to its own key, which is attributable to latch strength given results from (a) and FIG. 3B.

[0042] FIG. 12a-d: Designed Mad1-SID LOCKR switches for key-dependent transcriptional repression. FIG. 12a. Crystal structure of the interaction between Mad1-SID domain (white) and the PAH2 domain of the mSin3A transcriptional repressor (black) (PDB ID: 1E91). Caging of the Mad1-SID domain should enable key-dependent recruitment of the transcriptional repressor mSin3A enabling precise epigenetic regulation. FIG. 12b. Designed Mad1-LOCKR switches, with Cage component encoding the Mad1-SID sequence at different positions (dark gray). FIG. 12c. SDS-PAGE gel showing successfully purified 1fix302Mad1 (1) , 1fix_309_Mad1 (2) and MBP_Mad1 (3). FIG. 12d. Biolayer interferometry analysis of key-activated binding of the Mad1-LOCKR switches to the purified rnSin3A-PAH2 domain. MBP-Mad1 is a positive control for mSin3a-PAH2 binding. 1fix_309Mad1 (309) shows successful activation when mixed with designed Keyₐ. 1fix_302_Mad1 (302) shows very tight caging of the Mad1-SID domain, but no activation in presence of Keyₐ. Kinetic assays were performed by immobilizing 0.1μg of Biotin-mSin3A-PAH2 protein on Streptavidin biosensor tips (ForteBio). Protein cages were tested at 50 nM in presence or absence of 500 nM Keyₐ.

[0043] FIG. 13a-d. Caged STREPII-tag LOCKR switches; demonstration of new 2plus1 and 3plus1 LOCKR switches. FIG. 13a. Designed 2+1. (left) and 3+1 (middle) LOCKR switches were designed to encode the STREPII sequence WSHPQFEK. (SEQ ID NO: 63). FIG. 13b-d. Biolayerinterferometry (Octet) Data demonstrating function of the STREPII-LOCKR designs: anti-strep antibody is immobilized onto Anti-mouse FC tips to assess binding of the STREPII tag: FIG. 13b. The designed proteins show less binding than positive control suggesting the STREPII has been at least partially sequestered as intended. FIG. 13c. Activation of design STREPII-3plus1_Lock_3 by 3plus1_Key_3: The curve is 250 nM of cage with no Key, compared to 250 nM Cage in the presence of increasing concentration of Key ranging from 121 nM to 6000 nM. FIG. 13d. 250 nM STREPII-3plus1_Lock_3 in the presence of Key at 370 nM, 1111 nM, and 3333 nM; 250 nM of Cage with no Key is 250 nM, and the other plots are Key at the same concentrations (370 nM, 1111 nM, and 3333 nM) but in the absence of Cage. In all Octet plots, the left half is the association (binding) step, and the right half is the dissociation step.

[0044] FIG. 14. 3plus1 LOCKR switches activate GFP fluorescence in response to expression of Key. LOCKR switches were designed in which 3plus1 Cages were used to sequester strand 11 of GFP (GFP11) in an inactive conformation, thereby preventing reconstitution of split GFP (comprised of GFP1-10 and GFP11), resulting in fluorescence. Expression plasmids were prepared for inducibly expressing the Cage (p15a origin of replication, spectinomycin resistance, arabinose-inducible promoter controlling expression of GFP1-10 and LOCKR-Caged. GFP11) and Key (colE1 origin of replication, kanamycin resistance, and IPTG-inducible promoter). Chemically competent E. coli Stellar cells (Takarabio) were transformed according to manufacturer's protocols either with the Cage plasmid alone or with both the Cage and Key plasmids. These transformations were grown overnight at 37 C in liquid LB media supplemented with spectinomycin (Cage alone) or spectinomycin±kanamycin (Cage and Key). The resulting cultures were diluted 1/100 into fresh LB media supplemented with appropriate antibiotics and either arabinose only (induce expression of Cage and GFP1-10) or both arabinose and IPTG (induce expression of Cage, GFP1-10, and Key), then allowed to grow at 37 C for 16 hours, 200 uL of each expression culture was washed once in 200 uL PBS. resuspended in 200 uL PBS, and transferred to a black-walled 96-well plate. GFP fluorescence was evaluated on a Biotek Synergy H1MF plate reader (excitation/emission 479/520 nm). Fluorescence was minimal for Cage alone, confirming that LOCKR proteins prevented activation of split GFP in the absence of Key. Induction of Key expression resulted in a large increase in fluorescence for SEQ ID NOs 27192, 27198, 27194, 27202, 27206, and 27210. These results demonstrate that the 3plus1 LOCKR architecture is able to control the function of bioactive peptide GFP11.

[0045] FIG. 15a-e. Design and in vivo testing of degronLOCKR. FIG. 15a. Schematic of dual inducible system used in S. cerevisiae to test functionality of degronLOCKR. Progesterone (Pg) induces production of Key-BFP, and estradiol (E2) induces production of YFP-degronSwitch. FIG. 15b. Heatmaps of YFP fluorescence as a function of E2 (0-50 nM) and Pg (0-100 nM) for full length Key (left) and a Key that was truncated by 12 residues (right) as measured by flow cytometry. FIG. 15c. Line plot comparing the fluorescence of the YFP-degronSwitchₐ (SEQ ID No: 27362) and Keyₐ-BFP (SEQ ID No: 28477) at a max dose of E2 (black rectangle in (b) as a function of Pg induction. YFP fluorescence was normalized to the no Pg value and BFP fluorescence was normalized to the maximum Pg value. Error bars represent s.d. of three biological replicates. FIG. 15d. Dynamic measurements of active degronLOCKR using an automated flow cytometry platform. E2 was induced to activate expression of YFP-degronSwitchₐ, and Pg was induced at t₄ₕᵣₛ to activate expression of Keyₐ-BFP. Measurements were taken every 24 minutes FIG. 15e. Coexpression of orthogonal LOCKRs in the same cell. YFP-degronSwitchₐ (SEQ ID No: 27362) and RFP-degronSwitch_{c} (SEQ ID No: 27376) were expressed using constitutive promoters and either Keyₐ-BFP (left) or Key_{c}-BFP (right) were expressed using the pZ3 inducible promoter. Normalized fluorescence of YFP-degronSwitchₐ(SEQ ID No: 27362), RFP-degronSwitch_{c} (SEQ ID No: 27376) and either Keyₐ-BFP (SEQ ID No: 28477) or Key_{c}-BFP (28483) are plotted as a function of Pg induction. Error bars represent s.d. of biological replicates.

[0046] FIG. 16a-f. Controlling gene expression using degronLOCKR. FIG. 16a. Schematic of dual induction assay to determine the effect of degronLOCKRₐ on a synthetic transcription factor (SynTF). Pg induces expression of Keyₐ-BFP, and E2 induces expression of SynTF-RFP-degronSwitchₐ fusion. The pSynTF promoter is activated by SynTF and expresses YFP. FIG. 16b. Heatmaps of YFP and RFP fluorescence as a function of E2 (0-125 nM) and Pg (0-100 nM) measured by flow cytometry. FIG. 16c. Line plot comparing the fluorescence of YFP, SynTF-RFP-degronSwitchₐ and Keyₐ-BFP at 31.25 nM E2 (black rectangle in 5b) as a function of Pg induction. YFP and RFP fluorescence was normalized to the no Pg value, and BFP fluorescence was normalized to the maximum Pg value. Error bars represent s.d. of three biological replicates. FIG. 16d. Schematic of dual induction assay to determine the effect of degronLOCKRₐ on a dCas9-VP64 targeted to the pTet7x promoter via a constitutively expressed sgRNA (not shown). Pg induces expression of Keyₐ-BFP, and E2 induces expression of dCas9-VP64-RFP-degronSwitchₐ fusion. The pTet7x promoter is activated by dCas9-VP64 and expresses YFP. FIG. 16e. Heatmaps of YFP and RFP fluorescence as a function of E2 (0-125 nM) and Pg (0-100 nM) measured by flow cytometry. FIG. 16f. Line plot comparing the fluorescence of YFP, dCas9-VP64-RFP-degronSwitchₐ and Keyₐ-BFP at 31.25 nM E2 (black rectangle in 5d) as a function of Pg induction. YFP and RFP fluorescence was normalized to the no Pg value, and BFP fluorescence was normalized to the maximum Pg value. Error bars represent s.d. of three biological replicates. Error bars represent s.d. of three biological replicates.

[0047] FIG. 17a-b. Caging cODC sequences. FIG. 17a. Three variations of the cODC degron to Cage (cODC Full is SEQ ID NO: 28466; and cODC noPro is SEQ ID NO: 28467). Variations meant to tune Kₒₚₑₙ by removing the destabilizing proline (noPro) and minimizing mutations to the Latch (CA only). FIG. 17b. Predicted models of the full and noPro cODC sequences (orange) threaded onto the Latch (dark blue). Thread position chosen such that the cysteine residue needed for degradation is sequestered against the Cage (light blue). Proline highlighted in red in the full cODC mutated to an isoleucine in the noPro variant.

[0048] FIG. 18. Comparing the stability of YFP fused to cODC variants caged in Switchₐ to an empty Switchₐ and to bimSwitchₐ. The dual inducible system from FIG. 15a was used to express the various YFP-Switchₐ fusions (solid lines and dots) via pGal1 and E2, and Keyₐ-BFP via pZ3 and Pg. YFP (Venus) alone, YFP fused to the WT cODC (cODC) or YFP fused to the proline removed cODC (cODC noPro), were also expressed using pGal1 and E2 (dashed lines). Cells were induced with a saturating dose of E2 (50 nM) and Pg was titrated in from 0-100 nM. Fluorescence was measured at steady-state using a flow cytometer and error bars represent s.d. of biological replicates. A moderate decrease in YFP fluorescence was observed as a function of Pg for the full cODC variant, whereas only a small decrease was observed for the proline removed and CA only. No decrease in fluorescence was observed as a function of Key induction for YFP alone, empty Switchₐ, or bimSwitchₐ.

[0049] FIG. 19a-b. Tuning toehold lengths of degronLOCKRₐ. The dual inducible system from FIG. 15a was used to express the various YFP-Switchₐ fusions via pGal1 and E2, and Keyₐ-BFP via pZ3 and Pg. YFP fused to the proline removed cODC (cODC no Pro) was also expressed using pGal1 and E2 (dashed line). Cells were induced with a saturating dose of E2 (50 nM) and Pg was titrated in from 0-100 nM. Fluorescence was measured at steady-state using a flow cytometer and error bars represent s.d. of biological replicates. FIG. 19a. cODC variants from FIG. 17 alone to show dynamic range of Full cODC. FIG. 19b. Extending toehold on proline removed version from 9 to 12 and 16aa. Proline removed with 12aa toehold shows the greatest dynamic range of all the switches tested.

[0050] FIG. 20a-b. BFP expression corresponding to FIG. 15b. E2 and Pg were used to induce expression of YFP-degronSwitchₐ and Keyₐ (Full length FIG. 20a or truncated FIG. 20b)-BFP, respectively. Fluorescence was measured at steady-state using a flow cytometer. BFP expression was not dependent on expression of the Switch, suggesting the Key does not co-degrade with the Switch.

[0051] FIG. 21a-b. Expression of orthogonal YFP-degronSwitch and Key-CFP. Four different switches (FIG. 21a) and Keys (A, B, C, D) (FIG. 21b) were expressed using the strong pTDH3 promoter. Fluorescence was measured at steady-state using a flow cytometer and error bars represent s.d. of biological replicates.

[0052] FIG. 22. degronLOCKR_{a-d} (SEQ ID NOs: 27376, 27374, 27376. 27383 for degronSwitches and SEQ ID NOs: 28477, 28482, 28483, 28484 for Keys) orthogonality. All combinations of pTD3-YFP-degronSwitch and pTDH3-Key-CFP were tested. Fluorescence was measured at steady-state using a flow cytometer. Percentage degradation was calculated by subtracting the YFP-degronSwitch fluorescence with the given Key-CFP coexpressed from the YFP-degronSwitch fluorescence without any Key expressed and normalizing by the YFP-degronSwitch fluorescence without any Key expressed. degronSwitchₐ (SEQ ID NO: 27376) is activated strongly by Keyₐ (SEQ ID NO: 28477) and weakly by Key_{b} (SEQ ID NO: 28482). degronSwitch_{c} (SEQ ID NO: 27376) is activated strongly by Key_{c} (SEQ ID NO: 28483) and weakly by Key_{b} (SEQ ID NO: 28482). Because degronSwitchₐ and degronSwitch_{c} are not activated by Key_{c} and Keyₐ respectively, we consider these two to be an orthogonal pair.

[0053] FIG. 23a-b. Individual degronLOCKR controls for FIG. 15e. FIG. 23a. YFP-degronSwitchₐ was expressed using the pTEF1 constitutive promoter and FIG. 23b. RFP-degronSwitch_{c} was expressed using the pTEF1 constitutive promoter. The respective Keys fused to BFP were expressed using pZ3 and Pg. Fluorescence was measured at steady-state using a flow cytometer and error bars represent s.d. of biological replicates.

[0054] FIG. 24 Exemplary cODC Variants encoded into the Latch summarized in a sequence logo.

[0055] FIG. 25a-b provides a comparison of different degronSwitch variants in HEK293T cells. degronSwitcha and the asymmetric 1fix-short_cODC switch each fused to mCherry™ RFP were expressed in human HEK293T cells, and RFP fluorescence was measured in the presence (blue) and absence (red) of Key. The length of the toehold is indicated (t5, t8, t9, t12). FIG. 25a. Mean fluorescence intensity of the LOCKR-mCherry™ RFP fusion protein. FIG. 25b. Raw mCherry™ RFP histograms used to generate the bar plot in panel A.

[0056] FIG. 26a-b detail an exemplary degronSwitch variant in human primary CD4+ T cells. FIG. 26a. Fluorescence histograms of tagBFP translationally fused to the Key. FIG. 26b. Fluorescence histograms of mCherry™ translationally fused to the asymmetric short scaffold degronSwitch with a t8 toehold and cODC degron embedded in the latch (1fix-short_cODC_t8 (SEQ ID NO: 27,372)). This data indicates that the Key is able to trigger the degronSwitch and activate degradation of mCherry™.

### DETAILED DESCRIPTION

[0057] All references cited are herein incorporated by reference in their entirety. Within this application, unless otherwise stated, the techniques utilized may be found in any of several well-known references such as: Molecular Cloning: A Laboratory Manual (Sambrook, et al., 1989, Cold Spring Harbor Laboratory Press), Gene Expression Technology (Methods in Enzymology, Vol. 185, edited by D. Goeddel, 1991. Academic Press, San Diego, Calif.), “Guide to Protein Purification” in Methods in Enzymology (M. P. Deutshcer, ed., (1990) Academic Press, Inc.); PCR Protocols: A Guide to Methods and Applications (Innis, et al. 1990. Academic Press, San Diego, Calif.), Culture of Animal Cells: A Manual of Basic Technique. 2^{nd} Ed. (R. I. Freshney. 1987. Liss, Inc. New York, N.Y.), Gene Transfer and Expression Protocols. pp. 109-128, ed. E. J. Murray, The Humana Press Inc., Clifton, N.J.), and the Ambion 1998 Catalog (Ambion, Austin, Tex.).

[0058] As used herein, the singular forms “a”, “an” and “the” include plural referents unless the context clearly dictates otherwise. “And” as used herein is interchangeably used with “or” unless expressly stated otherwise.

[0059] As used herein, the amino acid residues are abbreviated as follows: alanine (Ala; A), asparagine (Asn; N), aspartic acid (Asp; D), arginine (Arg; R), cysteine (Cys; C), glutamic acid (Glu; E), glutamine (Gin; Q), glycine (Gly; G), histidine (His; H), isoleucine (Ile; I), leucine (Leu; L), lysine (Lys; K), methionine (Met; M), phenylalanine (Phe; F), proline (Pro: P), serine (Ser; S), threonine (Thr, T), tryptophan (Trp; W), tyrosine (Tyr; Y), and valine (Val; V).

[0060] All embodiments of any aspect of the disclosure can be used in combination, unless the context clearly dictates otherwise.

[0061] Unless the context clearly requires otherwise, throughout the description and the claims, the words ‘comprise’, ‘comprising’, and the like are to be construed in an inclusive sense as opposed to an exclusive or exhaustive sense; that is to say, in the sense of “including, but not limited to”. Words using the singular or plural number also include the plural and singular number, respectively. Additionally, the words “herein,” “above,” and “below” and words of similar import, when used in this application, shall refer to this application as a whole and not to any particular portions of the application.

[0062] The description of embodiments of the disclosure is not intended to be exhaustive or to limit the disclosure to the precise form disclosed. While the specific embodiments of, and examples for, the disclosure are described herein for illustrative purposes, various equivalent modifications are possible within the scope of the disclosure, as those skilled in the relevant an will recomize.

[0063] In a first aspect, the disclosure provides non-naturally occurring cage polypeptides, comprising:
[0064] (a) a helical bundle, comprising between 2 and 7 alpha-helices, wherein the helical bundle comprises:
   [0065] (i) a structural region; and
   [0066] (ii) a latch region, wherein the latch region comprises a degron, wherein the structural region interacts with the latch region to prevent activity of the degron; and
   [0067] (b) amino acid linkers connecting each alpha helix.

[0068] The non-naturally occurring cage polypeptides of this first aspect of the disclosure (which may also be referred to here as the “lock”) can be used, for example, as a component of the novel protein switches disclosed in detail herein. The protein switches can be used, for example, to sequester bioactive peptides in the cage polypeptide, holding them in an inactive (“off”) state, until combined with a second component (the “key” polypeptide) of the novel protein switches disclosed herein; the key polypeptide induces a conformational change that activates (“on”) the bioactive peptide (see FIG. 1a). The polypeptides described herein comprise the first ever de novo designed polypeptides that can undergo conformational switching in response to protein binding. Furthermore, there are no known natural proteins that can switch in such a modular, tunable manner as the polypeptides disclosed herein. The combined use of the cage and key polypeptides is described in more detail herein in the examples that follow, and is referred to as a LOCKR switch. LOCKR stands for Latching Orthogonal Cage-Key pRotiens; each LOCKR design consists of a cage polypeptide and a key polypeptide, which are two separate polypeptide chains. Orthogonal LOCKR designs (see FIG. 3) are denoted by lowercase letter subscripts: LOCKRₐ consists of Cageₐ and Keyₐ, and LOCKR_{b} consists of Cage_{b} and Key_{b}, etc. such that Cageₐ is only activated by Keyₐ, and Cage_{b}is only activated by Key_{b}, etc. Prefixes in the polypeptide and LOCKR names denote the functional group that is encoded and controlled by the LOCKR switch. For example, BimLOCKR refers to designed switches that encode the Bim peptide, and GFP11-LOCKR refers to designed switches that encode GFP11 (the 11th strand of GFP). See FIG. 8 for a sequence alignment comparing the original LOCKR_a Cage scaffold design to its asymmetrized (1fix-short-noBim(AYYA)-t0) and orthogonal (LOCKRb-f) design counterparts. In another embodiment, the nomenclature for the cage is identified by 1fix-short and 1fix-latch, indicating similar, yet distinct, embodiments of Cageₐ as defined above. They are all activated by Keyₐ. The functional group encoded in the latch is identified by the third portion of the name while the suffix indicates the presence of a toehold. For example, 1fix-short-Bim-t0 encodes Bim on the 1fix-short scaffold with no toehold. In another example, 1fix-latch_Mad1SID_T0_2 indicates that the 1fix-latch scaffold was used to encode Mad1SID with no residues. The suffix 2 indicates that there are two versions where the functional sequence is encoded in different locations on the latch region.

[0069] As used herein, a “degron” is a single amino acid or peptide capable of targeting the cage polypeptide and any functional polypeptide domain fused for degradation. For example, degrons may target polypeptides for degradation through targeting to the proteasome (including ubiquitin-dependent degrons (ubiquitin protein is enzymatically attached to a protein, which marks it for degradation/targeting to proteasome), and ubiquitin-independent degrons (a degron that targets a protein to the proteasome without ubiquitin), targeting to lysosomes, or recruitment of protease enzymes.

[0070] As demonstrated in the examples that follow, when a key is expressed and activates the cage polypeptide by interacting with the structural region, the degron targets the cage polypeptide, and any functional polypeptide domains and/or additional bioactive domain fused to the cage polypeptide, for degradation. In this way, a functional polypeptide domain of interest fused to the cage polypeptide having a degron can be conditionally degraded in a titratable manner via expression of the key. This is sometimes referred to herein as degronLOCKR.

[0071] The polypeptides are “non-naturally occurring” in that the entire polypeptide is not found in any naturally occurring polypeptide. It will be understood that components of the polypeptide may be naturally occurring, including but not limited to bioactive peptides that may be included in some embodiments.

[0072] The cage polypeptides comprise a helical bundle comprising between 2 and 7 alpha-helices. In various embodiments, the helical bundle comprises 3-7, 4-7, 5-7, 6-7, 2-6, 3-6, 4-6, 5-6, 2-5, 3-5, 4-5, 2-4, 3-4, 2-3, 2, 3, 4, 5, 6, or 7 alpha helices.

[0073] Design of the helical bundle cage polypeptides of the disclosure may be carried out by any suitable means. In one non-limiting embodiment, a BundleGridSampler™ in the Rosetta™ program may be used to generate backbone geometry based on the Crick expression for a coiled-coil and allows efficient. parallel sampling of a regular grid of coiled-coil expression parameter values, which correspond to a continuum of peptide backbone conformations. This may be supplemented by design for hydrogen bond networks using any suitable means, including but not limited to as described in Boyken et. al., (Science 352, 680-687 (2016)), followed by Rosetta™ sidechain design. In a further non-limiting embodiment, best scoring designs, based on total score, number of unsatisfied hydrogen bonds, and lack of voids in the core of the protein may be selected for helical bundle cage polypeptide design.

[0074] Each alpha helix may be of any suitable length and amino acid composition as appropriate for an intended use. In one embodiment, each helix is independently 38 to 58 amino acids in length. in various embodiments, each helix is independently between 18-60, 18-55, 18-50, 18-45, 22-60, 22-55, 22-50, 22-45, 25-60, 25-55, 25-50, 25-45, 28-60, 28-55, 28-50, 28-45, 32-60, 32-55, 32-50, 32-45, 35-60, 35-55, 35-50, 35-45, 38-60, 38-55, 38-50, 38-45, 40-60, 40-58, 40-55, 40-50, or 40-45 amino acids in length.

[0075] In some aspects, one or more linkers are used to link two or more polypeptides, e.g., alpha helices, structural region, latch region, degron, or any combination thereof. The amino acid linkers connecting each alpha helix can be of any suitable length or amino acid composition as appropriate for an intended use. In one non-limiting embodiment, each amino acid linker is independently between 2 and 10 amino acids in length, not including any further functional sequences that may be fused to the linker. In various non-limiting embodiments, each amino acid linker is independently 3-10, 4-10, 5-10, 6-10, 7-10, 8-10, 9-10, 2-9, 3-9, 4-9, 5-9, 6-9, 7-9, 8-9, 2-8, 3-8, 4-8, 5-8, 6-8, 7-8, 2-7, 3-7, 4-7, 5-7, 6-7, 2-6, 3-6, 4-6, 5-6, 2-5, 3-5, 4-5, 2-4, 3-4, 2-3, 2, 3. 4, 5, 6, 7, 8, 9, or 10 amino acids in length. In all embodiments, the linkers may be structured or flexible (e.g. poly-GS). These linkers may encode further functional sequences, including but not limited to protease cleavage sites or one half of a split intein system (see sequences below). As described herein linkers may further comprise one or more functional polypeptide domains in this embodiment, the linkers may be of any size suitable to include the one or more functional polypeptide domains, while maintaining the ability of the structural region and the latch region to interact.

[0076] Suitable linkers can be readily selected and can be of any of a number of suitable lengths, such as from 1 amino acid (e.g., Gly) to 20 amino acids, from 2 amino acids to 15 amino acids, from 3 amino acids to 12 amino acids, including 4 amino acids to 10 amino acids, 5 amino acids to 9 amino acids, 6 amino acids to 8 amino acids, or 7 amino acids to 8 amino acids, and can be 1, 2, 3, 4, 5, 6, or 7 amino acids.

[0077] Exemplary linkers include glycine polymers (G)n, glycine-serine polymers (including, for example, (GS)n, (GSGGS)n (SEQ TD NO: 28503) and (GGGS)n (SEQ ID NO: 28504), where n is an integer of at least one), glycinealanine polymers, alanine-serine polymers, and other flexible linkers known in the art. Glycine and glycine-serine polymers can be used; both Gly and Ser are relatively unstructured, and therefore can serve as a neutral tether between components. Glycine polymers can be used; glycine accesses significantly more phi-psi space than even alanine, and is much less restricted than residues with longer side chains (see Scheraga, Rev. Computational Chem. 11173-142 (1992)). Exemplary linkers can comprise amino acid sequences including, but not limited to, GGSG (SEQ ID NO: 28505), GGSGG (SEQ ID NO: 28506), GSGSG (SEQ ID NO: 28507), GSGGG (SEQ ID NO: 28508), GGGSG (SEQ ID NO: 28509), GSSSG (SEQ ID NO: 28510), GSEGSE (SEQ ID NO: 28547), GSGSE (SEQ ID NO: 28548), GGGSGSE (SEQ ID NO: 28549), and the like.

[0078] The polypeptides of this first aspect include a region, termed the “latch region”, for insertion of a bioactive peptide. The cage polypeptide thus comprises a latch reg ion and a structural region (i.e.: the remainder of the cage polypeptide that is not the latch region). When the latch region is modified to include one or more bioactive peptides, the structural region of the cage polypeptide interacts with the latch region to prevent activity of the bioactive peptide. Upon activation by key polypeptide, the latch region dissociates from its interaction with the structural region to expose the bioactive peptide, allowing the peptide to function.

[0079] The latch region may be present near either terminus of the cage polypeptide. In one embodiment, the latch region is placed at the C-terminal helix so as to position the bioactive peptide for maximum burial of the functional residues that need to be sequestered to maintain the bioactive peptide in an inactive state while simultaneously burying hydrophobic residues and promoting solvent exposure/compensatory hydrogen bonds of polar residues.

[0080] In various embodiments, the latch region may comprise a part or all of a single alpha helix at the N-terminal or C-terminal portions of the cage polypeptide. In various other embodiments, the latch region may comprise a part or all of a first, second, third, fourth, fifth, sixth, or seventh alpha helix in the cage polypeptide. In other embodiments, the latch region may comprise all or part of two or more different alpha helices in the cage polypeptide; for example, a C-terminal part of one alpha helix and an N-terminal portion of the next alpha helix, or all of two consecutive alpha helices. In one embodiment, the latch region comprises a single alpha helix that interacts with the alpha-helices of the structural region in the absence of a key polypeptide; in one such embodiment, the structural region comprises five alpha-helices and the interaction with the latch region results in a six helix bundle cage polypeptide. In one embodiment, the alpha helices of the structural region and the latch region may interact with each other via a combination of hydrophobic contacts and hydrogen bond networks formed between helical interfaces.

[0081] Any suitable degron may be used as is deemed appropriate for an intended use based on the disclosure herein. Degrons include portions of proteins that signal and/or target for degradation (or otherwise increase the degradation rate of) the protein to which the degron is attached or otherwise associated (e.g., grafted onto). Non-limiting examples of degrons include short amino acid sequences, structural motifs, exposed amino acids, and the like. Degrons may be prokaryote or eukaryote derived and may be employed in naturally occurring or non-naturally occurring (i.e., recombinant) forms. Degrons may be post-translationally modified to target a protein for degradation where such post-translational modifications include but are not limited to e.g., ubiquitination, proteolytic cleavage, phosphorylation, methylation, ADP-ribosylation, ampylation, lipidation, alkylation, nitrosylation, succinylation, sumoylation, neddylation, isgylation, etc. Useful degrons include ubiquitin-dependent degrons and ubiquitin-independent degrons. For example, in some instances, a protein may be targeted for ubiquitin-independent proteasomal degradation by attachment of an ornithine decarboxylase (ODC) degron, including but not limited to e.g., a mammalian ODC such as e.g., a rodent ODC, including but not limited to e.g., the c-terminal mouse ODC (cODC). In some instances, useful degrons include those described in Takeuchi et al., Biochem. J (2008) 410:401-407 and/or Matsuzawa et al., PNAS (2005) 102(42):14982-7; the disclosures of which are incorporated herein by reference in their entirety. In some instances, a protein may be targeted for ubiquitin-independent proteasomal degradation by post-translational modification (including but not limited to e.g., proteolytic cleavage, phosphorylation, methylation, ADP-ribosylation, ampylation, lipidation, alkylation, nitrosylation, succinylation, sumoylation, neddylation, isgylation, etc.) of a degron, where such modification leads, directly or indirectly, to partial or complete unfolding of the protein or other mechanisms that lead to degradation of the protein.

[0082] The degron is present within the latch region. The latch region may be present near either terminus of the cage polypeptide. Thus, in various embodiments, the latch region may be C-terminal to the structural region or N-terminal to the structural region. Thus, in some embodiments, the degron may be present within about 100. 99, 98, 97, 96, 95, 94, 93, 92, 91, 90, 89, 88, 87, 86, 85, 84, 83, 82, 81, 80, 79, 78, 77, 76, 75, 74, 73, 72, 71, 70, 69, 68, 67, 66, 65, 64, 63, 62, 61, 60, 59, 58, 57, 56, 55, 54, 53, 52, 51, 50, 49, 48, 47, 46, 45, 44, 43, 42, 41, 40, 39, 38, 37, 36, 35, 34, 33, 32, 31, 30, 29, 28, 27, 26, 25, 24, 23, 22, 21, 20, 19, 18, 17, 16, 15, 14, 13, 12, 11, 10, 9, 8, 7, 6, 5, 4, 3, 2, 1, or 0 amino acids from either the N-terminus or the C-terminus of the latch region, and/or within about 100, 99, 98, 97, 96, 95, 94, 93, 92, 91, 90, 89, 88, 87, 86, 85, 84, 83, 82, 81, 80, 79, 78, 77, 76, 75, 74, 73, 72, 71, 70, 69, 68, 67, 66, 65, 64, 63, 62, 61, 60, 59, 58, 57, 56, 55, 54, 53, 52, 51, 50, 49, 48, 47, 46, 45, 44, 43, 42, 41, 40, 39, 38, 37, 36, 35, 34, 33, 32, 31, 30, 29, 28, 27, 26, 25, 24, 23, 22, 21, 20, 19, 18, 17, 16, 15, 14, 13, 12, 11, 10, 9, 8, 7, 6, 5, 4, 3, 2, 1, or 0 amino acids from either the N-terminus or the C-terminus of the cage polypeptide. In some embodiments where the latch region is at the terminus of the cage polypeptide, the recited distance in amino acids of the degron from that terminus and from the terminus of the latch region may both be met. In other embodiments, such as where one or more polypeptide functional domains are added to the N-terminus or C-terminus of the cage polypeptide (as described below), the degron may be within the recited distance in amino acids from the terminus of the latch region but not from the terminus of the cage polypeptide.

[0083] In one embodiment, the latch region is N-terminal to the structural region, and the degron may be located within about 100, 99, 98, 97, 96, 95, 94, 93, 92, 91, 90, 89, 88, 87, 86, 85, 84, 83, 82, 81, 80, 79, 78, 77, 76, 75, 74, 73, 72, 71, 70, 69, 68, 67, 66, 65, 64, 63, 62, 61, 60, 59, 58, 57, 56, 55, 54, 53, 52, 51, 50, 49, 48, 47, 46, 45, 44, 43, 42, 41, 40, 39, 38, 37, 36, 35, 34, 33, 32, 31, 30, 29, 28, 27, 26, 25, 24, 23, 22, 21, 20, 19, 18, 17, 16, 15, 14, 13, 12, 11, 10, 9, 8, 7, 6, 5, 4, 3, 2, 1, or 0 amino acid residues of the N-terminus of the latch region. In one such embodiment, the degron may be located within about 100, 99, 98, 97, 96, 95, 94, 93, 92, 91, 90, 89, 88, 87, 86, 85, 84, 83, 82, 81, 80, 79, 78, 77, 76, 75, 74, 73, 72, 71, 70, 69, 68, 67, 66, 65, 64, 63, 62, 61, 60, 59, 58, 57, 56, 55, 54, 53, 52, 51, 50, 49, 48, 47, 46, 45, 44, 43, 42, 41, 40, 39, 38, 37, 36, 35, 34, 33, 32, 31, 30, 29, 28, 27, 26, 25, 24, 23, 22, 21, 20, 19, 18, 17, 16, 15, 14, 13, 12, 11, 10, 9, 8, 7, 6, 5, 4, 3, 2, 1, or 0 amino acid residues of the N-terminus of the cage polypeptide.

[0084] In another embodiment, the latch region is C-terminal to the structural region, and the degron may be located within about 100, 99, 98, 97, 96, 95, 94, 93, 92, 91, 90, 89, 88, 87, 86, 85, 84, 83, 82, 81, 80, 79, 78, 77, 76, 75, 74, 73, 72, 71, 70, 69, 68, 67, 66, 65, 64, 63, 62, 61, 60, 59, 58, 57, 56, 55, 54, 53, 52, 51, 50, 49, 48, 47, 46, 45, 44, 43, 42, 41, 40, 39, 38, 37, 36, 35, 34, 33, 32, 31, 30, 29, 28, 27, 26, 25, 24, 23, 22, 21, 20, 19, 18, 17, 16, 15, 14, 13, 12, 11, 10, 9, 8, 7, 6, 5, 4, 3, 2, 1, or 0 amino acid residues or less of the C-terminus of the latch region. In one such embodiment, the degron may be located within about 100, 99, 98, 97, 96, 95, 94, 93, 92, 91, 90, 89, 88, 87, 86, 85, 84, 83, 82, 81, 80, 79, 78, 77, 76, 75, 74, 73, 72, 71, 70, 69, 68, 67, 66, 65, 64, 63, 62, 61, 60, 59, 58, 57, 56, 55, 54, 53, 52, 51, 50, 49, 48, 47, 46, 45, 44, 43, 42, 41, 40, 39, 38, 37, 36, 35, 34. 33, 32, 31, 30, 29, 28, 27, 26, 25, 24, 23, 22, 21, 20, 19, 18, 17, 16, 15, 14, 13, 12, 11, 10, 9, 8, 7, 6, 5, 4, 3, 2, 1, or 0 amino acid residues of the C-terminus of the cage polypeptide. In one embodiment, the degron may comprise a ubiquitin-independent degradation signal. In one embodiment, the degron comprises a CA dipeptide located between 10-30 residues from the C-terminus of the cage polypeptide; in this embodiment. the “C” residue in the CA dipeptide is between 10-30 residues from the C-terminus of the cage polypeptide. The CA dipeptide is the minimal domain for degradation activity of the murine ornithine decarboxylase (cODC) degron, as described in Example 2 below. In other embodiments of the cODC degron, the degron comprises the peptide MSCAQES (SEQ ID NO: 28468) or L(X)MSCAQES (SEQ ID NO: 28467) (“cODC noPro”), wherein X can be any amino acid residue, wherein X is optionally not proline.

[0085] In other non-limiting embodiments, the degron may comprise an amino acid residue or peptide selected from the group consisting of -GG; -RG; -KG; -QG; -WG; -PG; -AG; -RxxG; -EE; -R; -Rxx; -Vx; -Ax; -A, wherein “x” can be any amino acid residue. In one such embodiment, the degron may be located within about 10-30 amino acid residues, or within about 20 amino acid residues, of the C-terminus of the cage polypeptide.

[0086] In other non-limiting embodiments, the degron may comprise or consist of a peptide selected from the group consisting of the following (residues within brackets are optional):

| (SEQ ID NO: 28469) | |
|---|---|
| | [[KTRGVEEVAEGVVLL]]RRRG [[NK(FAM)KKK]], |
| (SEQ ID NO: 28470) | |
| | [[KPFLNGGPY]] HSREQSTDSG [[LGLGSYK(FAM)KKK]], |
| (SEQ ID NO: 28471) | |
| | ASADLDLEALAPYIPADDDFQLRK(FAM)KKK, |
| (SEQ ID NO: 28472) | |
| | [[K-(PEG)-KEEK]] DINNN [[VKKTK(FAM)KKK]], |
| (SEQ ID NO: 28487) | |
| | [[K-(PEG)]]DVQKADVSST [[GQGIDSK(FAM)KKK]] |
| (SEQ ID NO: 28473) | |
| | KAAEEEEVSLASTPTDVRDVDIK(FAM)KKK, |
| (SEQ ID NO: 28474) | |
| | [[KKYSSQTSQ]] DSGNYS [[NK(FAM)KKK]], |
| (SEQ ID NO: 28475) | |
| | KPLSSSVPSQKTYQGSYGFREGK(FAM)KKK, |
| (SEQ ID NO: 28476) | |
| | [[KAWQQQSYL]]DSGIHSG[[ATTTAPK(FAM)KKK]], |
| (SEQ ID NO: 28488) | |
| | [[KTRGVEEVAEGVVLL]]RRRG[[NKKKK]], |
| (SEQ ID NO: 28489) | |
| | [[KPFLNGGPY]]HSREQSTDSG[[LGLGSYKKKK]], |
| (SEQ ID NO: 28490) | |
| | ASADLDLEALAPYIPADDDFQLRKKKK, |
| (SEQ ID NO: 28491) | |
| | [[KKEEK]]DINNN[[VKKTKKKK]], |
| (SEQ ID NO: 28492) | |
| | [[K]]DVQKADVSST]]GQGIDSKKKK]], |
| (SEQ ID NO: 28493) | |
| | KAAEEEEVSLASTPTDVRDVDIKKKK, |
| (SEQ ID NO: 28494) | |
| | [[KKYSSQTSQ]]DSGNYS [[NKKKK]], |
| (SEQ ID NO: 28495) | |
| | KPLSSSVPSQKTYQGSYGFRLGKKKK, |
| (SEQ ID NO: 28496) | |
| | [[KAWQQQSYL]]DSGIHSG[[ATTTAPKKKK]]; |
| (SEQ ID NO: 28497) | |
| | RRRG; |
| (SEQ ID NO: 28498) | |
| | HSREQSTDSG; |
| (SEQ ID NO: 28499) | |
| | DINNN; |
| (SEQ ID NO: 28500) | |
| | DVQKADVSST; |
| (SEQ ID NO: 28501) | |
| | DSGNYS; |
| | and |
| (SEQ ID NO: 28502) | |
| | DSGIHSG. |

[0087] In other non-limiting embodiments, the degron may comprise a polypeptide sequence that recruits an ubiquitin ligase. Such degrons (e.g., proteolysis-targeting chimeric molecules. PROTACs) have been previously described by Sakamoto et al. (2001) PNAS (15) 8554-8559 and Schneekloth et al. (2004) JACS 126(12):3748-54.

[0088] Useful degrons include ubiquitin-dependent degrons and ubiquitin-independent degrons. For example, in some instances, a protein may be targeted for ubiquitin-independent proteasomal degradation by attachment of an ornithine decarboxylase (ODC) degron, including but not limited to e.g., a mammalian ODC such as e.g., a rodent ODC, including but not limited to e.g., the c-terminal mouse ODC (cODC). In some instances, useful degrons include those described in Takeuchi et al., Biochem. J (2008) 410:401-407 and/or Matsuzawa et al., PNAS (2005) 102(42):14982-7; the disclosures of which are incorporated herein by reference in their entirety. In some instances, a protein may be targeted for ubiquitin-independent proteasomal degradation by post-translational modification (including but not limited to e.g., proteoly tic cleavage, phosphorylation, methylation, ADP-ribosylation, ampylation, lipidation, alkylation, nitrosylation, succinylation, sumoylation, neddylation, isgylation, etc.) of a degron, where such modification leads, directly or indirectly, to partial or complete unfolding of the protein or other mechanisms that lead to degradation of the protein.

[0089] In some aspects, a degron may include a ubiquitin-independent degradation signal, where such signals may vary. For example, in some instances, a ubiquitin-independent degradation signal may include a dipeptide motif, such as, e.g., a cysteine-alanine (i.e., CA) dipeptide motif. In some instances, a ubiquitin-independent degradation signal may include only a dipeptide motif. In some instances, a ubiquitin UCSF independent degradation signal may include amino acid residues in addition to a dipeptide motif, such as but not limited to e.g., a LXMSCAQE (SEQ ID NO: 28,511) motif, where X may be any amino acid or a LXMSCAQES (SEQ ID NO: 28,467) motif, where X may be any amino acid. In some instances, a LXMSCAQE (SEQ ID NO: 28,511) motif or a LXMSCAQES (SEQ 11) NO: 28,467) motif may include where X is any amino acid except proline.

[0090] Accordingly, in some instances, a degradation signal of a degron can include a sequence selected from: LPMSCAQES (SEQ ID NO: 28,466) where the final S is present or absent, LAMSCAQES (SEQ ID NO: 28,512) where the final S is present or absent, LVMSCAQES (SEQ ID NO: 28,513) where the final S is present or absent, LSMSCAQES (SEQ ID NO: 28,514) where the final S is present or absent, LEMSCAQES (SEQ ID NO: 28,515) where the final S is present or absent, and LKMSCAQES (SEQ ID NO: 28,516) where the final S is present or absent. In some instances, a degradation signal of a degron may include a MSCAQE (SEQ ID NO: 28,517) sequence or a MSCAQES (SEQ ID NO: 28468) sequence.

[0091] Ubiquitin-dependent degrons include, but are not limited to, e.g., PEST (SEQ ID NO: 28,518) (proline (P). glutamic acid (E), serine (S), and threonine (T)) sequence-containing degrons, as well as those degrons described in Melvin et al. (PLoS One. (2013) 29;8(10):e78082); the disclosure of which is incorporated herein by reference in its entirety, including degrons identified as Bonger and those described as derived from TAZ, HIF-1α, iNOS, SRC3, Cyclin D1, IFNAR1, p53, and β-Catenin.

[0092] Useful degrons may also include E3 ubiquitin ligase domains. Such degrons are often defined as the substrate site that is recognized by E3 ubiquitin ligases and a variety of such degrons, including short peptide motifs and specific structural elements, have been characterized. Non-limiting examples of E3 ligase/degrons and the corresponding motif patterns include:
[0093] APC/C (DBOX), primary motif R.L.[LIVM].; (SEQ ID NO: 28,519)
[0094] APC/C (KEN), primary motif .KEN.; (SEQ ID NO: 28,520)
[0095] APC/C (ABBA), primary motif [FIVL].[ILMVP][FHY].[DE]. {0,3}[DEST]; (SEQ ID NO: 28,521)
[0096] APCC_TPR_1, primary motif [ILM]R$; (SEQ ID NO: 28,522)
[0097] CBL (PTK), primary motif [DN].Y[ST]..P; (SEQ ID NO: 28,523)
[0098] CBL (MET), primary motif DYR; (SEQ ID NO: 28,524)
[0099] COP1, primary motif [DE][DE].{2,3}VP[DE]; (SEQ II) NO: 28,525)
[0100] CRL4_CDT2_1, primary motif
[0101] [NQ]{0,1}..[ILMV][ST][DEN][FY][FY].{2,3}[KR]{2,3}[\hat{ }DE]; (SEQ ID NO: 28,526)
[0102] CRL4_CDT2_2, primary motif
[0103] [NQ]{0,1}..[ILMV]T[DEN][HMFY][FMY]. {2,3}[KR]{2,3}[\hat{ }DE]; (SEQ ID NO: 28,527)
[0104] Kelch_KEAP1_1, primary motif [DNS].[DES][TNS]GE; (SEQ ID NO: 28,528)
[0105] Kelch_KEAP1_2, primary motif QD.DLGV; (SEQ ID NO: 28,529)
[0106] Kelch_actinfilin, primary motif [AP]P[MV][IM]V; (SEQ ID NO: 28,530)
[0107] Kelch_KLHL3, primary motif E.EE.E[AV]DQH; (SEQ ID NO: 28,531)
[0108] MDM2_SWIB, primary motif F[\hat{ }P]{3}W[\hat{ }P]{2,3}[VIL]; (SEQ ID NO: 28,532)
[0109] Nend_Nbox_1, primary motif \hat{ }M{0, 1}[FYLIW][\textcircled{ }P]; (SEQ ID NO: 28,533)
[0110] Nend_UBRbox_1, primary motif \textcircled{ }M{0,1}[RK][\textcircled{ }P].; (SEQ ID NO: 28,534)
[0111] Nend_UBRbox_2, primary motif \textcircled{ }M{1,1}([ED]).; (SEQ ID NO: 28,535)
[0112] Nend_UBRbox_3, primary motif \textcircled{ }M{0,1}([NQ]).; (SEQ ID NO: 28,536)
[0113] Nend_UBRbox_4, primary motif \textcircled{ }M{0,1}(C).; (SEQ ID NO: 28,537)
[0114] ODPH_VHL_1, primary motif[IL]A(P). {6,8}[FLIVM].[FLIVM]; (SEQ ID NO: 28,538)
[0115] SCF_COI1_1, primary motif..[RK][RK].SL..F[FLM].[RK]R[HRK].[W].; (SEQ ID NO: 28,539)
[0116] SCF_FBW7_1, primary motif [LIVMP].{0,2}(T)P..([ST]); (SEQ NO: 28,540)
[0117] SCF_FBW7_2, primary motif [LIVMP]. {0,2}(T)P..E; (SEQ ID NO: 28,541)
[0118] SCF_SKP2-CKS1_1, primary motif..[DE].(T)P.K; (SEQ ID NO: 28,542)

[0119] SCF_TIR1_1, primary motif .[VLIA][VLI]GWPP[VLI] . . . R.; (SEQ ID NO: 28,543)
[0120] SCF-TRCP1, primary motif D(S)G.{2,3}([ST]), (SEQ ID NO: 28,544)
[0121] SIAH, primary motif .P.A.V.P[\textcircled{ }P](SEQ ID NO: 28,545); or
[0122] SPOP, primary motif [AVP].[ST][ST][ST] (SEQ ID NO: 28,546);

[0123] In all cases above, ‘.’ specifies any amino acid type. ‘[X]’ specifies the allowed amino acid type(s) at that position, ‘\textcircled{ }X’ at the beginning of the pattern specifies that the sequence starts with amino acid type X, ‘[\textcircled{ }X]’ means that the position can have any amino acid other than type X, numbers specified as the following ‘X{x,y}’, where x and y specify the minimum and maximum number of ‘X’ amino acid type required at that position. ‘$’ sign implies the C-terminal of the protein chain. Degrons that include E3 ubiquitin ligase domains are described in Guharoy et al., Nature Communications (2016) 7:10239: the disclosure of which is incorporated herein by reference in its entirety.

[0124] In some aspects, useful degrons can include those degrons that contain signals for ER-associated degradation (ERAD), including but not limited to e.g., those described in Maurer et al.. Genes Genomes & Genetics (2016) 6:1854-1866; the disclosure of which is incorporated herein by reference in its entirety. In some instances, useful degrons may also include drug-inducible degrons, such as but not limited to e.g., the auxin inducible degron (AID) which utilizes a specific E3 ubiquitin ligase (e.g., as described in Nishimura et al., Nature Methods (2009) 6(12):917-922, the disclosure of which is incorporated herein by reference in its entirety). As will be readily understood, degrons that include E3 ubiquitin ligase domains will vary and may not be limited to use of those E3 ubiquitin degrons specifically described herein.

[0125] Other useful examples of degrons that can be employed in inducible degradation strategies adapted for uses in the present disclosure include but are not limited to e.g., N-end degrons (such as but not limited to e.g., those described in Tasaki & Kwon, Trends in Biochemical Sciences (2007) 32(10:520-528, the disclosure of which is incorporated herein by reference in its entirety); unstructured regions (such as but not limited to e.g., those described in Chung et al., Nat Chem Biol. 2015; 11(9): 713-720, the disclosure of which is incorporated herein by reference in its entirety); ligand induced degradation (LID) and destabilization domain (DD) domains (such as but not limited to e.g., those described in Bonger et al., Nat Chem Biol. 2012; 7(8): 531-537; Grimley et al.. Bioorg. Med, Chem. Lett (2008) 18: 759-761; and Chu et al. Bioorg. Med. Chem. Lett. (2008) 18: 5941-5944; Iwamoto et al., Chemistry &. Biology (2010) 17: 981-988; the disclosures of which are incorporated herein by reference in their entirety); prokaryotic proteasome recognition sequences such as, e.g., ssrA and mf-Lon (such as those described in Cameron et al., (2014) Nature biotechnology 32(12): 1276-1281, the disclosure of which is incorporated herein by reference in its entirety); and the like.

[0126] In another embodiment. the cage polypeptide may further comprise one or more functional polypeptide domains, wherein the functional polypeptide domain may be fused to the N-terminus, the C-terminus, or inserted into a linker of the cage polypeptide. As noted above, when a key is expressed and activates the cage polypeptide by interacting with the structural region, the degron targets the cage polypeptide, and any functional polypeptide domains fused to the cage polypeptide, for degradation through, for example, targeting to lysosomes. targeting to the proteasome, or recruitment of protease enzymes. In this way, the functional polypeptide domain of interest fused to the cage polypeptide having a degron can be conditionally degraded in a titratable manner via expression of the key. In various embodiments:
[0127] one or more functional polypeptide domains may be located at the N-terminus of the cage polypeptide and the latch region may be located C-terminal or N-terminal to the structural region;
[0128] one or more functional polypeptide domains may be located at the C-terminus of the cage polypeptide and the latch region may be located N-terminal or C-terminal to the structural region; and/or
[0129] one or more functional polypeptide domains may be located in an amino acid linker and the latch region may be located N-terminal or C-terminal to the structural region.

[0130] Any functional polypeptide of interest, or domain thereof, can be expressed as a fusion protein with the cage polypeptide such that it can be conditionally degraded in a titratable manner via expression of the key. In non-limiting embodiments, the one or more functional polypeptide domains may include, but are not limited to metabolic enzymes, transcription factors, kinases, phosphatases, Chimeric Antigen Receptor (CAR), T Cell Receptor (TCR), SynNotch, TCR mimics, cytokine receptors, G-protein coupled receptors (GPCR), co-stimulatory receptors (including but not limited to CD28, CTLA-4, ICOS), co-inhibitory receptors (e.g. PD-1), endogenous signaling domains (including but not limited to Pleckstrin Homology (PH), Src Homology 2 (SH2), Src Homology 3 (SH3), WW, C1, PDZ, CARD, phosphotyrosine-binding, proline-rich region, coiled-coil, and pseudokinase domains), synthetic receptors or synthetic signaling proteins comprising one or more signaling domain (including but not limited to Pleckstrin Homology, (PH), Src Homology 2 (SH2), Src Homology 3 (SH3), WW, Cl, PDZ, CARD, phosphotyrosine-binding, proline-rich region, coiled-coil, and pseudokinase domains), engineered or endogenous receptors containing ITAM or ITIM motifs, JAK/STAT binding motifs, DNA binding domains (including but not limited to Cas9, dCas9, TALEs, and Zinc Fingers), vesicular trafficking domains, protein degradation domains (including but not limited to ubiquitin recruitment domains and proteasomal-targeting domains), cell death domains (including but not limited to those involved in the apoptosis, necroptosis, and pyroptosis), fluorescent proteins, de novo designed proteins, a second cage polypeptide described herein, such as one that binds to a key polypeptide different than a key polypeptide bound by the cage polypeptide), a key polypeptide described herein, such as one that does not bind to the cage polypeptide, and active domains thereof As used herein, a “domain” refers to a portion of a polypeptide that retains one or more particular functions. The functional polypeptide domains may be synthetic or naturally occurring, and may comprise a full protein or a domain of a protein that possesses a specific function.

[0131] In another embodiment, the cage polypeptide may further comprise one or more additional bioactive peptides besides the degron, wherein the structural region interacts with the latch region to prevent activity of the one or more additional bioactive peptides. As used herein, a “bioactive peptide” is any peptide of any length or amino acid composition that is capable of selectively binding to a defined target (i.e.: capable of binding to an “effector” polypeptide). Such bioactive peptides may comprise peptides of all three types of secondary structure in an inactive conformation: alpha helix, beta strand, and loop. The polypeptides of this aspect can be used to control the activity of a wide range of functional peptides. The ability to harness these biological functions with tight, inducible control is useful, for example, in engineering cells (inducible activation of function, engineering complex logic behavior and circuits, etc.), developing sensors, developing inducible protein-based therapeutics. and creating new biomaterials.

[0132] As will be understood by those of skill in the art, the degron is a “bioactive peptide”. Thus, this embodiment refers to the inclusion of one or more additional bioactive peptides in the latch region, as described above in earlier aspects of the disclosure. When the latch region is modified to include one or more additional bioactive peptides, the structural region of the cage polypeptide interacts with the latch region to prevent activity of the one or more additional bioactive peptides. Upon activation by key polypeptide, the latch region dissociates from its interaction with the structural region to expose the one or more additional bioactive peptides, allowing the one or more additional bioactive peptides to function. Thus, in embodiments in which there are no additional bioactive peptides, the degron only is activated upon key polypeptide binding to the cage polypeptide. In embodiments where there are one or more additional bioactive peptides in the latch, the degron and the one or more additional bioactive peptides are activated by binding of the key polypeptide to the cage polypeptide—in one exemplary such embodiment, the degron can act by modifying the one or more additional bioactive peptides by, for example, inducing degradation of the additional bioactive peptides and thus turning off their function. This embodiment can be particularly useful, for example, to pulse the function of the one or more additional bioactive peptides, and then rapidly degrade the one or more additional bioactive peptides so that the function is transient, or to make degradation of the one or more additional bioactive peptides dependent on binding of an effector protein.

[0133] In this embodiment, the one or more additional bioactive peptide(s) may replace one or more amino acids in the latch region, or may be added to the latch region without removal of any amino acid residues from the latch region. In various non-limiting embodiments, the bioactive peptides may comprise the amino acid sequence of SEQ ID NO: 50, 60, 62-64, 66, 27052-27093, and 27118-27119, or variants thereof:

GFP11 fluorescence peptide and binding peptide to
GFP1-10:
(SEQ ID NO: 27052)
RDHMVLHEYVNAAGIT.
BIM binding peptide and apoptotic peptide to
BCL-2:
(SEQ ID NO: 50)
IxxxLRxIGDxFxxxY,
where x is any amino acid;
in one embodiment, the peptide is
(SEQ ID NO: 60)
EIWIAQELRRIGDEFNAYYA
Designed peptide for binding to BCL-2:
(SEQ ID NO: 62)
KMAQELIDKVRAASLQINGDAFYAILRAL
StreptagII binding peptide to streptactin or an
antibody:
(SEQ ID NO: 63)
(N)WSHPQFEK
TEV protease cleavage site:
(SEQ ID NO: 64)
ENLYFQ(G)-X,
wherein (G) can also be S, last position, -X can
be anything except Proline
Thrombin protease cleavage site:
(SEQ ID NO: 66)
LVPRGS
Cathepsin cleavage site:
(SEQ ID NO: 27053)
RLVGFE
Spytag covalent crosslinking peptide to
spycatcher:
(SEQ ID NO: 27054)
AHIVMVDAYK(PTK)
NLS peptide to target the protein to the nucleus:
(SEQ ID NO: 27055)
ANNKRARTS
NES1 peptide to exclude the protein from the
nucleus:
(SEQ ID NO: 27056)
LALKLAGLDIN
NES2 peptide to exclude the protein from the
nucleus:
(SEQ ID NO: 27057)
ELAEKLAGLDIN
NES3 peptide to exclude the protein from the
nucleus:
(SEQ ID NO: 27058)
ELAEKLPAGLDIN
EZH2 binding peptide to recruit DNA-methylases:
(SEQ ID NO: 27059)
TMFSSNRQKILEPTETLNQEWKQRRIQ
MDM2 binding peptide to recruit p53:
(SEQ ID NO: 27060)
ETFSDLWKLL
C25 binding peptide:
(SEQ ID NO: 27061)
GELDELVYLLDGPGYDPIHSDVVTRGGSHLFNF
9aaTAD1 for transcriptional activation:
(SEQ ID 27062)
TMDDVYNYLFDD
9aaTAD2 for transcriptional activation:
(SEQ ID NO: 27063)
LLTGLEVQYLFDD
9aaTAD3 for transcriptional activation:
(SEQ ID NO: 27064)
DDAVVESFFSS
9aaTAD4 for transcriptional activation:
(SEQ ID NO: 27065)
GDFLSDLFD
9aaTAD5 for transcriptional activation:
(SEQ ID NO: 27066)
GDVLSDLVD
Mad1-SID - epigenetic modification:
(SEQ ID NO: 27067)
NIQMLLEAADYLE
Mad1-SID (3A mutant) - epigenetic modification:
(SEQ ID NO: 27068)
NIAMLLAAAAYLE
RHIM Domain 1 from ZBP1:
(SEQ ID NO: 27069)
IQIG
RHIM Domain 2 from ZBP1:
(SEQ ID NO: 27070)
VQLG
nanoBit Split Luciterase:
(SEQ ID NO: 27071)
VSGWPLFKKIS
CC-A:
(SEQ ID NO: 27072)
GLEQEIAALEKENAALEWEIAAEQGG
CC-B:
(SEQ ID NO: 27073)
GLKQKIAALKYKNAALKKKIAALKQGG
GCN4:
(SEQ ID NO: 27074)
RMKQLEDKVEELLSKNYHLENEVARLKKLVGER
CC-Di:
(SEQ ID NO: 27075)
GEIAALKQEIAALKKENAALKWEIAALKQG
Membrane-disrupting/cell-penetrating peptides:
GALA for membrane disruption:
(SEQ ID NO: 27076)
WEAALAFALNEALAEHLAEALAEALEALAA
Aurein 1.2:
(SEQ ID NO: 27077)
GLFDIIKKIAESF
Magainin-1:
(SEQ. ID NO: 27078)
GIGKFLHSAGKFGKAFVGEIMKS
Magainin-2:
(SEQ ID NO: 27079)
GIGKFLKSAKKFGKAFVGEIMNS
Melittin:
(SEQ ID NO: 27080)
GIGAVLKVETTGLPALISWINPKRQQ
Mastoparan X:
(SEQ ID NO: 27081)
INWKGIAAMAKKLL
Cecropin A:
(SEQ ID NO: 27082)
KWKLEKKIEKVGQNIRDGIIKAGPAVAVVGQATQIAK
Cecropin P1:
(SEQ ID NO: 27083)
SWLSKTAKKLENSAKKRISEGIAIAIQGGPR
Citropin 1.1:
(SEQ ID NO: 27084)
GLFDVIKKVASVIGGL
Temporin-1Lb:
(SEQ ID NO: 27085)
NFLGTLINLAKKIL
H2V33 L2 peptide:
(SEQ ID NO: 27086)
SYFILRRRRKRFPYFFTDVRVAA
Adenovirus pVI membrane fusion domain:
(SEQ ID NO: 27087)
AFSWGSLWSGIKNFGSTVKNY
Gamma-1 peptide from flock house virus:
(SEQ ID NO: 27088)
ASMWERVKSIIKSSLAAASNI
Poliovirus 2B pore-forming peptide:
(SEQ ID NO: 27089)
VTSTITEKLLKNLIKIISSLVIITRNYEDTTTVLATLALLGCDASPWQWL
Rhinovirus pore-forming peptide:
(SEQ ID NO: 27090)
IAQNPVENYIDEVLNEVLVVPNIN
Influenza HA2 pore-forming peptide:
(SEQ ID NO: 27091)
FLGIAEAIDIGNGWEGMEFG
Influenza HA2 derivative:
(SEQ ID NO: 27092)
GLFGAIAGFIENGWEGMIDG
HA-derived INF6:
(SEQ ID NO: 27093)
GLFGAIAGFIENGWEGMIDGWYG.
KRAB domain - epigenetic modification:
(SEQ ID NO: 27118)
MDAKSLTAWSRTLVTFKDVFVDFTREEWKLLDTAQQIVYRNVMLENYKNL
VSLGYQLTKPDVILRLEKGEEPWLV
Minimal Krab domain (KOX 11-55) - epigenetic
modification:
(SEQ ID NO: 21119)
RTLVTFKDVFVDFTREEWKLLDTAQQIVYRNVMLENYKNLVSLGY

[0134] In one embodiment, the dynamic range of activation by key polypeptides can be tuned by truncating the latch region length to be shorter than the alpha-helices in the structural region, simultaneously weakening the cage polypeptide-latch region interaction and opening an exposed region on the cage polypeptide that the key polypeptide can bind to as a “toehold” (FIG. 2). Similarly, the dynamic range of activation by key polypeptides can also be tuned in a similar manner by designing mutations into the Latch that weaken the cage polypeptide-latch region interaction (FIGS. 1-2, and 10). In other embodiments, the latch region can be one or more helices totaling in length between 18-150 amino acids, between 18-100 amino acids, between 18-58 amino acids, or any range encompassed by these ranges. In other embodiments the latch region could consist of helical secondary structure, beta strand secondary structure, loop secondary structure, or combinations thereof.

[0135] In another embodiment, the cage polypeptide comprises the amino acid sequence having at least 4.5%, 50%, 55%, 60%. 65%, 70%, 75%, 80%, 85%, 90%, 91%, 92%, 93%, 94%, 95%, 96%, 97%, 98%, 99%, or 100% sequence identity along the length of the amino acid sequence of a cage polypeptide selected from the group consisting of (a) SEQ ID NO: 27359-28465 or a cage polypeptide listed in Table 7 (in (a) embodiments, the degron is included within the polypeptide sequence), and (b) SEQ ID NOS: 1-49, 51-52, 54-59.61, 65, 67-91, 92 -2033, SEQ ID NOS: 2034-14317, 27094-27117, 27120-27125, 27,278 to 27,321, and cage polypeptides listed in Table 2 or 5 (polypeptides with an even-numbered SEQ ID NO between SEQ ID NOS: 27126 and 27276), Table 3, and/or Table 4 ((i.e.: in (b) embodiments, the degron is not included in the amino acid sequence and would be added within the latch region, including but not limited to those degron amino acid sequences disclosed herein.

Amino Acid Sequences of deGronLOCKR Switches
DeGron sequence underlined
Latch indicated by [brackets]
>degonLOCKR_a_327
(SEQ ID NO: 27359)
SKEAVTKZQALNIKLAEKLLEAVTKLQALNIKLAEKLLEALAPLQELNIALVYLAVELTDPKRIADEIKKVKDKS
KEIVERAEEEIARAAAESKKILDEAEEEIARAAAESKKILDEGSGSGSDAVAELQALNLKLAELLLEAVAELQAL
NLKLAELLLEAIAKLQELNIKLVELLTKLTDPATIREAIRKVKEDSERIVAEAERLIAAAKAESERIIREAERLI
AALKAESERIIPEGSGSGDPDVARLQELNIELARELLRDVARLQELNIELARELLRAAAELQELNIKLVELASEL
TDP[DEARKAIARVKRESKRIVEDAERLPMSCAQESEKISREAERLIREAA]
>degonLOCKR_a_327_noPro
(SEQ ID NO: 27360)
SKEAVTKLQALNIKLAEKLLEAVTKLQALNIKLAEKLLEALARLQELNIALVYLAVELTDPKRIADEIKKVKDKS
KEIVERAEEEIARAAAESKKILDEAEEEIARRAAESKKILDEGSGSGSDAVAELQALNLKLAELLLEAVAELQAL
NLKLAELLLEAIAKLQELNIKLVELLTKLTDPATIREAIRKVKEDSERIVAEAERLIAAAKAESERIIREAERLI
AAAKAESERIIREGSGSGDPDVARLQELNIELARELLRDVARLQELNIELARELLRAAAELQELNIKLVELASEL
TDP[DEARKAIARVKRESKRIVEDAERLAMSCAQESEKISREAERLIREAA]
>degonLOCKR_a_CAonly
(SEQ ID NO: 27361)
SKEAVTKLQALNIKLAEKLLEAVTKLQALNIKLAEKLLEALARLQELNIALVYLAVELTDPKRIADEIKKVKDKS
KEIVERAEEEIARAAAESKKILDEAEEEIARAAAESKKILDEGSGSGSDAVAELQALNLKLAELLLEAVAELQAL
NLKLNELLLEAIAYLQELNIKLVELLTKLTDPATIREAIRKVKEDSERIVAEAERLIAAAEAESERIIREAERLI
AAAKAESERIIREGSGSGDPDVARLQELNIELARELLRDVARLQELNIELARELLRAAAELQELNIKLVELASEL
TDP[DEARKAIARVKRESKRIVEDAERLIRECAAASEKISREAERLIREAA]
>degonLOCKR_a_324_t12
(SEQ ID NO: 27362)
SKEAVTKLQALNIKLAEKLLEAVTKLQALNIKLAEKLLEALARLQELNIALVYLAVELTDPKRIADEIKKVKDKS
KEIVEPAEEEIARAAAESKKILDEAEEEIARAAAESKKILDEGSGSGSDAVAELQALNLKLAELLLEAVAELQAL
NLKLAELLLEAIAKLQELNIKLVELLTKLTDPATIREAIRKVKEDSERIVAEAERLIAAAKAESERIIREAERLI
AAAKAESERIIREGSGSGDPDVARLQELNIELARELLPDVARLQELNIELARELLRAAAELQELNIKLVELASEL
TDP[DEARKAIARVKRESKRIVEDLIMSCAQESAASEKISREAEPLTR]
>degonLOCKR_a_320_t16
(SEQ ID NO: 27363)
SKEAVTKLQALNIKLAEKLLEAVTKLQALNIKLAEKLLEALARLQELNIALVYLAVELTDPKRIADEIKKVKDKS
KEIVERAEEEIARAAAESKKILDEAEEEIARAAAESKKILDEGSGSGSDAVAELQALNLKLAELLLEAVAELQAL
NLKLAELLLEAIAKLQELNIKLVELLTKLTDPATIREAIRKVKEDSERIVAEAERLIAAAKAESERIIREAERLI
AAAKAESERIIREGSGSGDPDVARLQELNIELARELLRDVARLQELNIELARELLRAAAELQELNIKLVELASEL
TDP[DKARKAIARVKRESKRLVMSCAQESREAAAASEKISREAE]
>degron-miniLOCKRa_l_t9
(SEQ ID NO: 27364)
NKEDATEAQKKAIRAAEELLKDVTRIQERAIRFAEKALERLARVQEEAIRRVYEAVESKNKEELKKVKEEIEELL
RRLKRELDELEREIRELLKEIKEKADRIEKEIRDLIERIRRDRNASDEVVPRLARLNEELIRELREDVRRLAELN
KELLPELERAARELARLNEKLLELADRVETE[EFARKAIARVKRESKRIVEDAERLAMSCAQESEKISPEAERLI
REAA]
>degron-miniLOCKRa_1_t12
(SEQ ID NO: 27365)
NKEDATEAQKKAIRAAEELLKDVTRIQERAIRENEKALERLARVQEEAIRRVYEAVESKNKEELKKVKEEIEELL
RRLKRELDELEREIRELLKEIKEKADRLEKEIRDLIERIRRDRNASDEVVTRLARLNEELIRELREDVRRLAELN
KELLPELERAARELARLNEKLLELADRVETE[EEARKAIARVKRESKRIVEDLIMSCAQESAASEKISREAERLI
R]
>degron-miniLOCKRa_2_t9
(SEQ ID NO: 2736)
DERLKRLNERLADELDKDLERLLRLNEELARELTRAAEELRELNEKLVELAKKLQGGRSREVAERAEKEREKIRR
KLEEIKKEIKEDADRIKKRADELRRRLEKTLEDAARELEKIKRERRTEELKRKATELQKEAIRRAEELLKEVTDV
QRRAIERAEELLEKLARLQEEAIRTVYLLVELNKV[DRARKAIARVKRESKRIVEDAERLAMSCAQESEKISREA
ERLIREAA]
>degron-miniLOCKRa_t12
(SEQ ID NO: 27367)
DERLKRLNERLADELDKDLEPLLRLNEELARELTRAAEELPELNEKLVELAKKLOGGRSREVAERAEKEREKTRR
KLEEIKKEIKEDADRIKKRADELRRRLEKTLEDAARELEKLKREPRTEELKRKATELQKENIRRAEELLKEVTDV
QRRNIERAEELLEKLARLQEENIRTVYLLVELNKV[DRARKAIARVKRESKRIVEDLIMSCAQESAASEKISREA
ERLIR]
>lfix-short_cODC_mut
(SEQ ID NO: 21368)
SKEAAKKLQDLNIELARKLLEASTKLQRLNIRLAEALLEAIARLQELNLELVYLAVELTDPKRIRDEIKEVKDKS
KEIIRRAEKEIDDAAKESKKILEEARKAIRDAAEESRKILEEGSGSGSDALDELQKLNLELAKLLLKAIAETQDL
NLRAAKAFLEAAAKLQELNIRAVELLVKLTDPATIRRALEHAKRRSKEIIDEAERAIRAAKRESERIIEEARRLI
EKAKEESERIIREGSGSGDPDIKKLQDLNIELARELLRAHAQLQRLNLELLRELLRALAQLQELNLDLLRLASEL
TDPDEARKAIARVKPESKRIVEDAERLSPEAAALSMSCAQESERSIREAAAASEKISRE]
>lfix-short_cODC_mut_t6
(SEQ ID NO: 27369)
SKEAAKKLQDLNIELARKLLEASTKLQRLNIRLAEALLEAIARLQELNLELVYLAVELTDPKRIRDEIKEVKDKS
KEIIRRAEKEIDDAAKESKKILEEARKAIPDAAEESRKILEEGSGSGSDALDELQKLNLELAKLLLKAIAETQDL
NLRAAKAELEAAAKLQELNIRAVELLVKLTDRATIRPALEHAKRRSKEIIDEAERAIRAAKRESERIIEEARRLI
EKAKEESERIIREGSGSGDRDIKKLQDLNIELARELLRAHAQLQRLNLELLRELLRALAQLQELNLDLLRLASEL
TDP[DEARKAIARVKRESKRIVEDAERLSMSCAQESEKISREAERSIRKAAAS]
>lfix-short_cODC
(SEQ ID NO: 27370)
SELARKLLEASTKLQRLNIPLAEALLFAIARLQELNLELVYLAVELTDPKRIRDEIKEVKDKSKEIIRRAEKEID
DAAKESEKILEEAREAISGSGSELAKLLLKAIAETQDLNLRAAKAFLEAAAKLQELNIRAVELLVKLTDPATIRE
ALEHAKRRSKEIIDEAERAIPAAKRESERIIEEARRLIEKGSGSGSELARELLRAHAQLQRLNLELLRELLRALA
QLQELNLDLLRLASELTDP[DEARKAIARVKRESKRIVEDLEMSCAQESAASEKISREAERLIR]
>lfix-short_cODC_t5
(SEQ ID NO: 27371)
SELARKLLEASTKLQRLNIRLAEALLEAIARLQELNLELVYLAVELTDPKRIRDEIKEVKDKSKEIIRRAEKEID
DAAKESEKILEEAREAISGSGSELAKLLLKAIAETQDLNLRAAKAFLEAAAKLQELNIRAVELLVKLTDPATIRE
ALEHAKRRSKEIIDEAERAIRAAKRESERIIEEARRLIEKGSGSGSELARELLRAHAQLQRLNLELLRELLRALA
QLQELNLDLLRLASELTDP[DEARKAIARVKRESKRLVMSCAQESREAAAASEKISREA]
>lfix-short_cODC_t8
(SEQ ID NO: 27372)
SELARKLLEASTKLQRLNIRLAEALLEAIARLQELNLELVYLAVELTDPKRIRDEIKEVKDKSKEIIRRAEKEID
DAAKESEKILEEAREAISGSGSELAKLLLKAIAETQDLNLRAAKAELKAAAKLQELNIRAVELLVKLTDPATIRE
ALEHAKRRSKEIIDEAERAIRAAKRESERIIEEARRLIEKGSGSGSELARELLRAHAQLQRLNLELLRELLRALA
QLQELNLDLLRLASELTDP[DEARKAIARVKRLSMSCAQESERLIREAAAASEKIK]
>lfix-short_cODC_t11
(SEQ ID NO: 21373)
SELARKLLEASTKLQRLNIRLAEALLEAIARLQELNLELVYLAVELTDPKRIRDEIKEVKDKSKEIIRRAEKEID
DAAKESEKILEEAREAISGSGSELAKLLLKAIAETQDLNLRAAKAFLEAAAKDQELNIRAVELLVKLTDPATIRE
ALEHAKRRSKEIIDEAERAIRAAKRESERIIEEARPLIEKGSGSGSELARELLRAHAQLQRLNLELLRELLRALA
QLQELNLDLLRLASELTDP[DEARKAIARLKMSCAQESEDAERLIREAAAASE]
>degonOCKRb
(SEQ ID NO: 27374)
SHAAVIKLSDLNIRLLDYLLQAVIKLTELNAELNRKLIEALQRLFDLNVALVHLAAELTDPKRIADEIKKVKDKS
KEIVERAEEEIARAAAESKKILDEAEEEIARAAAESKKILDEGSGSGSDAVAELQALNLKLAELLLEAVAELQAD
NLKLAELLLEAIAKLQELNIKLVELLTKLTDPATIREAIRKVKEDSERIVAEAERLIAAAKAESERIIREAERLI
AAAKAESERIIREGSGSNDPQVAQNQETFIELARDALRLVAENQEAFIEVARLTLRAAALAQEVAIKAVEAASEG
GSGSGP[NKEEIEKLAKEAREKLKKAEKEHKMSCAQERKKNKKAREDLKKKNDK]
>degonLOCKRb_t13
(SEQ ID NO: 27375)
SHAAVIKLSDLNIRLLDKLLQAVIKLTELNAELNRKLIEALQRLFDLNVALVHLAAELTDPKRIADEINKVKDKS
KEIVERNEEEIARAAAESKKILDEAEEEIARAAAESKKILDEGSGSGSDAVAELQALNLKLAELLLEAVAELQAL
NLKLAELLLEATAKLQELNIKLVELLTKLTDPATIPEAIRKVKEDSERIVAEAERLIAAAKAESERIIREAERLI
AAAKAESERIIREGSGSNDPQVAQNQETFIELARDALRLVAENQEAFIEVARLTLRAAALAQEVAIKAVEAASEG
GSCSGP[NKEEIEKLAKEAPEKLKKAEMSCAQEHDKDRKKNKKAREDLKK]
>degonLOCKRc_t9
(SEQ ID NO: 27376)
SLEAVLKLAELNLKLSDKLAEAVQKLAALLNKLLEKLSEALQRLFELNVALVTLAIELTDPKRIADEIKKVKDKS
KEIVERAEEEIARAAAESKKILDEAEEEIARAAAESKKILDEGSGSGSDAVAELQALNLKLAELLLEAVAELQAL
NLKLAELLLEAIAKLQELNIKLVELLTKLTDPATIREAIRKVKEDSERIVAEAERLIAAAKAESERIIREAERLI
AAAKAESERIIREGSGSNDPLVARLQELLIEHARELLRLVATSQEIFIELAPAFLANAAQLQEAAIKAVEAASEN
GSGSGP[SSEKVRRELKESLKENHKQNQKLLMSCAQEQEKLNRELEELKKKHKK]
>degonLOCKRc_t13
(SEQ ID NO: 27377)
SLEAVLKLAELNLKLSDKLAEAVQKLAALLNKLLEKLSEALQRLFELNVALVTLAIELTDPKRIADEIKKVKDKS
KEIVERAEEEIARAAAESKKILDEAEEEIARAAAESKKILDEGSGSGSDAVAELQALNLKLAELLLEAVAELQAL
NLKLAELLLEAIAKLQELNIKLVELLTKLTDPATIREAIRKVKEDSERIVAEAERLIAAAKAESERIIREAERLI
AAAKAESERIIREGSGSNDPLVARLQELLIEHARELLRLVATSQEIFIELARAFLANAAQLQEAAIKAVEAASEN
GSGSGP[SSEKVRRELKESLKENHKQNMSCAQEHKRAQEKLNRELEELKK]
>degron-miniLOCKRc_1_t9
(SEQ ID NO: 27378)
LIERLTRLEKEHVRELKRLLDTSLEILPPLVEAFETNLRQLKEALKRALEAANLHNEEVEEVLRKLEEDLRRLEE
ELRKTLDDVRKEVKRLKEELDKRIKEVEDELRKIKEKLKKGDKNEKRVLEEILRLAEDVLKKSDKLAKDVQERAR
ELNEILEELSRKLQELFERVVEEVTRNVPTTE[RIEKVRRELKESLKENHKQNQKLLMSCAQEQEKLNRELEELK
KKHKK]
>degron-miniLOCKRc_1_t13
(SEQ ID NO: 27379)
LIERLTRLEKEHVRELKRLLDTSLEILRRLVEAFETNLRQLKEALKRALEAANLHNEEVEEVLRKLEEDLRRLEE
ELRKTLDDVRKEVKRLKEELDKRIKEVEDELRKIKEKLKKGDKNEKRVLEEILRLAEDVLKKSDKLAKDVQERAR
ELNEILEELSRKLQELFERVVEEVTRNVPTTE[RIEKVRRELKESLKENHKLNMSCAQEHKRAQEKDNRELEELK
K]
>degron-miniLOCKRc_2_t9
(SEQ ID NO: 27380)
SEERVLELAEEALRLSDEAAKEIQELARRLNEELEKDSKELQDLFERIVETVTRLIDADEETLKRAAEEIKKRLE
DARKKAKEAADKAREELDRARKKLKELVDEIRKKAKDALEKAGADEELVARLLRLLEEHARELERLLRTSARIIE
RLLDAFRRNLEQLKEAADKAVEAAEEAVRRVEDVRV[WSEKVRRELKESLKENHKQNQKLLMSCAQEQEKLNREL
EELKKKHKK]
>dearon-miniLOCKRc_t13
(SEQ ID NO: 27381)
SEERVLELAEEALRLSDEAAKEIQELARRDNEELEKLSKELQDDFERIVETVTRLIDADEETLKRAAEEIKKRLE
DARKKAKEAADKAREELDRARKKLKELVDEIRKKAKDALEKAGADEELVARLLRLLEEHARELERLLRTSARIIE
RLLDAFRRNLEQLKEAADKAVEAAEEAVRRVEDVRV[WSEKVRRELKESLKENHKLNMSCAQEHKRAQEKLNREL
EELKK]
>degronLOCKRc_1fix_t13
(SEQ ID NO: 27382)
SLEAALKLAELNLKLSDKLAEASQKLAALLNKLLEKLSEAIQRLFELNLALVTLAIELTDPKRIADEIKKVKDKS
KEIIERAEEEIARAAAESKKILDEAEEEIARAAAESKKILDEGSGSGSDALAELQALNLKLAELLLEAIAETQAL
NLKAAEAFLEAAAKLQELNIKAVELLVKLTDPATIREALRKAKEDSERIIAEAERAIAAAKAESERIIREAERLI
AAAKAESERIIREGSGSNDPLIARLQELLIEHARELLRLHATSQEIFVELLRAFLANLAQLQEAALKALEAASEN
GSGSGP[SSEKVRRELKESLKENHKQNQKLLMSCAQEQEKLNREDELEELKKKHKK]
>degonLOCKRd
(SEQ ID NO: 27383)
SLEAVLKLFELNHKLSEKLLEAVLKLHALNQKLSQKLLEALARLLELNVALVELAIELTDPKRIADEIKKVKDKS
KEIVERAEEEIARAAAESKKILDEAEEEIARAAAESKKTLDEGSGSGSDAVAELQALNLKLAELLLEAVAELQAL
NLKLAELLLEAIAKLQELNIKLVELLTKLTDPATIREAIRKVKEDSERIVAEAERLIAAAKAESERIIREAERLI
AAAKAESERIIREGSGSGDPEVARLQEAFIEQAREILRNVAAAQEALIEQARRLLALAALAQEAAIKAVELASEH
GSGSGP[DTVKRILEELRRRFEKLAKDLDDIAMSCAQEHKKHNKELKDKQRKIK]

Other exemplary cage polypeptides (see also SEQ ID NOS: 92-14317, 27094-27117, 27120-27125, 27728-27321, and cage polypeptides listed in Table 2, Table 3, Table 4, and/or Table 5). In these embodiments, the degron is not included in the amino acid sequence and would be added within the latch region, including but not limited to those degron amino acid sequences disclosed herein.
1) Exemplary reference cage polypeptides; latch regions denoted by brackets [ ]
[0136] 6His-MBP-TEV, 6His-TEV, and flexible linker sequences are underlined text
[0137] fused functional domains (DARPins, components of the split intein, and fluorescent proteins) are bolded text
[0138] Functional peptide is italicized underlined text
[0139] Exemplary positions that have been mutated to any amino acid to tune responsiveness are underlined bolded text. These positions are exemplary, and not an exhaustive list of residues able to tune responsiveness.
[0140] C-terminal sequences that can be removed to tune responsiveness are contained within brackets. A range from one (1) to all residues encompassed within the brackets may be removed, starting from the C-terminus and removing successive residues therein.
[0141] All sequences in parentheses are optional

>SB76L
(SEQ ID NO: 1)
(MGSSHHHHHHSSGLVPRGSHM)SKEAVTKLQALNIKLASKLLFALARLQELNIALVYLAVELTDPKRIADEIKK
VKDKSKEIVERAEEEIARAAAESKKILDEGSGSGSDAVAELQALNLKLAELLLEAIAKLQELNIKLVELLTKLTD
PATIREAIRKVKEDSERIVAEAERLIAAAKAESERIIREGSGSGDPDVARLQELNIELARELLRAAAELQELNIK
LVELASELTDP[DFARKAIARVKRESKRIVEDAERLIREAAAASEKISRE]
>SB76L_17
(SEQ ID NO: 2)
(MGSSHHHHHHSSGLVPRGSHM)GSKEAVTKLMALNLKLAEKLLEAIARLQELNIALVYLATELTDPERIREEIR
KVKEESARIVEEAEEEIRRAAARSEDILREGSGSGSDAVAELQRLNLELAELLLRAAAKLQELNIDLVRLLTELT
DFKTIRDAIERVKAESERIVREAERLIREAKADSERILREG5G5GDPDVARLQELFIELARELLEALARLQELNI
DLVRLASELTDP[DTIRDAIRRVKEESARIVEDARRLIKEAAEEAEKISRE]
>SB76L_18
(SEQ ID NO: 3)
(MGSSHHHHHHSSGLVPRGSHM)GSKRAVTELQKLNIELARKLLRALAELMELNIALVYLAVELTDPRRIREEIR
KVKEKSDEIVKRAEDEIRKAAAESEKILREGSGSGSDAVAELQRLNLELAKLLLEAIAKLQALNIDLVRLLTELT
DPETIRRAIKRVKDESARIVEEAEKLIRAAKDKAREIIDKGSGSGDPDVARLQELNIELAPELLEAAARLQELFI
DLVRLASELTDP[DEARKAIERVKREAERIVREAERLIREAKRASKEISDE]
>LOCKR_extendb
(SEQ ID NO: 4)
(MGSSHHHHHHSSGLVPRGSHM)KLLEAVTKLQALNIKLAEKLLEALARLQELNIALVYLAVELTDPKRIADEIK
KVKDKSKEIVERAEEEIARAAAESKKILDEAEEEGSGSGSELLLEAVAELQALNLKLAELLLEAIAKLQELNIKL
VELLTKLTDPATIREAIRKVKEDSERIVAEAERLIAAAKAESERIIREAERLAGSGSGSRELLRDVARLQELNIE
LARELLRAAAELQELNIKLVELASELTDP[DEARKAIARVKRESKRIVEDAERLIREAAAASEKISREAERLI]
>LOCKR_extends
(SEQ ID NO: 5)
(MGSSHHHHHHSSGLVPRGSHM)KLAEKLLEAVTKLQALNIKLAEKLLEALARLQELNIALVYLAVELTDPKRIA
DEIKKVKDKSKEIVERAEEEIARAAAESKKILDEAEEEIARAGSGSGSLKLAELLLEAVAELQALNLKLAELLLE
AIAKLQELNIKLVELLTKLTDPATIREAIRKVKEDSERIVAEAERLIAAAKAESERIIREAERLIAAAAGSGSGS
IELARELLRDVARLQELNIELARELLRAAAELQELNIKLVELASELTDP[DEARKAIARVKRESKRIVEDAERLI
REAAAASEKISREAERLIREAA]
>LOCKR_excend18
(SEQ ID NO: 6)
(MGSSHHHHHHSSGLVPRGSHM)SKEAVTKLQALNIKLAEKLLEAVTKLQALNIKLAEKLLEALARLQELNIALV
YLAVELTDPKRIADEIKKVKDKSKEIVEPAEEEIARAAAESKKILDEAEEEIARAAAESKKILDEGSGSGSDAVA
ELQALNLKLAELLLEAVAELQALNLKLAELLLEAIAKLQELNIKLVELLTKLTDPATIREAIRKVKEDSERIVAE
AERLIAAAKAESERIIREAERLIAAAKAESERIIREGSGSGDPDVARLQELNIELARELLRDVARLQELNIELAR
ELLRAAAELQELNIKLVELASELTDP[DEARKAIARVKRESKRIVEDAERLIREAAAASEKISREAERLIREAAA
ASEKISRE]
>LOCKRb
(SEQ ID NO: 7)
(MGSSHHHHHHSSGLVPRGSHM)SHAAVIKLSDLNIRLLDKLLQAVIKLTELNAELNRKLIEALQRLFDLNVALV
HLAAELTDPKRIADEIKKVKDKSKEIVERAEEEIARAAAESKKILDEAEEEIARAAAESKKILDEGSGSGSDAVA
ELQALNLKIAELLLEAVAELQALNLKLAELLLEAIAKLQELNIKLVELLTKLTDPATIREAIRKVKEDSERIVAE
AERLIAAAKAESERIIREAERLIAAAKAESERIIREGSGSNDPQVAQNQETFIELARDALRLVAENQEAPIEVAR
LTLPAAALAQEVAIKAVEAASEGGSGSG[NKEEIEKLAKEAREKLKKAEKEHKEIHDKLRKKNKKAREDLKKKAD
ELRETNKRVN]
>LOCKRc
(SEQ ID NO: 8)
(MGSSHHHHHHSSGLVPRGSHM)SLEAVLKLAELNLKLSDKLAEAVQKLAALLNKLLEKLSEALQRLFELNVALV
TLAIELTDPKRIADEIKKVKDKSKEIVERAEEEIARAAAESKKI1DEAEEEIARAAAESKKILDEGSGSGSDAVA
ELQALNLKLAELLLEAVAELQALNLKLAELLLEAIAKLQELNIKLVELLTKLTDPATIREAIRKVKEDSERIVAE
AERLIAAAKAESERIIREAERLIAAAKAESERIIREGSGSNDPLVAPLQELLIEHARELLRLVATSQEIFIELAR
AFLANAAQLQEAAIKAVEAASENGSGSG[SSEKVRRELKSSLKENHKQNQKLIKDHKRAQEKLNRELEELKKKHK
KTLDDIRRES]
>LOCKRd
(SEQ ID NO: 9)
(MGSSHHHHHHSSGLVPRGSHM)SLEAVLKLFELNHKLSEKLLEAVLKLHALNQKLSQKLLEALARLLELNVALV
ELAIELTDPKRIADEIKKVKDKSKEIVERAEEEIARAAAESKKILDEAEEEIAPAAAESKKILDEGSGSGSDAVA
ELQALNLKLAELLLEAVAELQALNLKLAELLLEAIAKLQELNIKLVELLTKLTDPATIREAIRKVKEDSERIVAE
AERLIAAAKAESERIIREAERLIAAAKAESERIIREGSGSGDFEVARLQEAFIEQAREILRNVAAAQEALIEQAR
RLLALAALAQEAAIKAVELASEHGSGSG[DTVKRILEELRRRFEKLAKDLDDIARKLLEDKKKHNKELKDKQRKI
KKEADDAARS]
>LOCKRe
(SEQ ID NO: 10)
(MGSSHHHHHHSSGLVPRGSHM)SLEAVLKLQDLNSKLSEKLSEAQLKLQALNNKLLRKLLEALLRLQDLNQALV
NLALQLTDPKRIADEIKKVKDKSKEIVERASEEIARAAAESKKILDEAEEEIARAAAESKKILDEGSGSGSDAVA
ELQALNLKLAELLLEAVAELQALNLKLAELLLEAIAKLQELNIKLVELLTKLTDPATIREAIRKVKEDSERIVAE
AERLIAAAKAESERIIREAERLIAAAKAESERIIRECSGSGDPDVAKSQEHLIEHARELLRQVAKSQELFIELAR
QLLRLAAKSQELAIKAVELASEAGSGSG[DDVERRLRKANKESKKEAEELTEEAKKANEKTKEDSKELTKENRKT
NKTIKDEARS]
>LOCKRf
(SEQ ID NO: 11)
(MGSSHHHHHHSSGLVPRGSHM)SREAVEKLAELNHKLSHKLQQAQQKLQALNLKLLQKLLEALDRLQDLNNALV
KLAQRLTDPKRIADEIKKVKDKSKEIVERAEEEIARAAAESKKILDEAEEEIARAAAESKKILDEGSGSGSDAVA
ELQALNLKLAELLLEAVAELQALNLKLAELLLEAIAKLQSLNIKLVELLTKLTDPATIREAIRKVKEDSERIVAE
AERLIAAAKAESERIIREAERLIAAAKAESERIIREGSGSGDPDVARQQETLIEQARRLLRNVAESQELFIEAAR
TVLRLAAKLQEINIKQVELASEAGSGSGIDDEERRSEKTVQDAKREIKKVEDDLQRLNEEQKKKVKKQEDENQKT
LKKHKDDARS|
>miniLOCKRa_1
(SEQ ID NO: 12)
(MGSSHHHHHHSSGLVPRGSHM)NKEDATEAQKKAIRAAEELLKDVTRIQEPAIREAEKALERLARVQEEAIRRV
YEAVESKNKEELKKVKEEIEELLRRLKRELDELEREIRELLKEIKEKADRLEKEIRDLIERIRRDRNASDEVVTR
LARLNEELIRELREDVRRLAELNKELLRELERAARELARLNEKLLELADRVETEIEEARKAIARVKRESKRIVED
AERLIREAAAASEKISREAERLIREAAAASEKISRE]
>miniLOCKRa_2
(SEQ ID NO: 13)
(MGSSHHHHHHSSGLVPRGSHM)DERLKRLNERLADELDKDLERLLRLNEELARELTRAAEELRELNEKLVELAK
KLQGGRSREVAERAEKSRRKIRRKLEEIKKEIKEDADRIKKRADELRRRLEKTLEDAARELEKLKREPRTEELKR
KATELQKFAIRPAEELLKEVTDVQRRAIERAEELLEKLARLQEEAIRTVYLLVELNKV[DRARKAIARVKRESKR
IVEDAERLIREAAAASSKISREAERLIREAAAASEKISRE]
>miniLOCKRc_1
(SEQ ID NO: 14)
(MGSSHHHHHHSSGLVPRGSHM)LIERLTRLEKEHVRELKRLLDTSLEILRRLVEAFETNLPQLKEALKRALEAA
NLHNEEVEEVLRKLEEDLRRLEEELRKTLDDVRKEVKRLKEELDKRIKEVEDELRKIKEKLKKGDKNEKRVLEEI
LRLAEDVLKKSDKLAKDVQERARELNEILEELSRKLQELFERVVEEVTRNVPT[TERIEKVRRELKESLKENHKQ
NQKLLKDHKRAQEKLNRELEELKKKHKKTLDDIRRES]
>miniLOCKRc_2
(SEQ ID NO: 15)
(MGSSHHHHHHSSGLVPRGSHM)SEERVLELAEEALRLSDEAAKEIQELARRLNEELEKLSKELQDLFERIVETV
TRLIDADEETLKRAAEEIKKRLEDARKKAKEAADKAREELDRARKKLKELVDEIRKKAKDALEKAGADEELVARL
LRLLEEHARELERLLRTSARIIERLLDAFRRNLEQLKEAADKAVEAAEEAVRRVED[VRVWSEKVRRELKESEKE
NHKQNQKLLKDHKRAQEKLNEELEELKKKHKKTLDDIRRSS]
>lfix-short-noBim-t0
(SEQ ID NO: 16)
(MGSHHHHHHGSGSENLYFQGSGG)SELARKLLEASTKLQRLNIRLAEALLEAIARLQELNLELVYLAVELTDPK
RIRDEIKEVKDKSKEIIRRAEKEIDDAAKESEKILEEAREAISGSGSELAKLLLKAIAETQDLNLRAAKAFLEAA
AKEQELNIRAVELLVKLTDPATIREALEHAKRRSKEIIDEAERAIRAAKRESERIIEEARRLIEKGSGSGS[ELA
RELLRAHAQLQRLNLELLRELLRALAQLQELNLDLLR1A5ELTDPDEARKAIARVKRESKRIVEDAERLIREAAA
ASEKISREAERLIR]
>1fix-short-noBim(AYYA)-10
(SEQ ID NO: 17)
(MGSHHHHHHGSGSENLYFQGSGG)SELARKLLEASTKLQRLNIRLAEALLEAIARLQELNLELVYLAVELTDPK
RIRDEIKEVKDKSKEIIRRAEKEIDDAAKESEKILEEAREAISGSGSELAKLLLKAIAETQDLNLRAAKAFLEAA
AKLQELNIRAVELLVKLTDPATIREALEHAKRRSKEIIDEAERA1RAAKRESERIIEEARRLIEKGSGSGS[ELA
RELLRAHAQLQRLNLELLRELLRALAQLQELNLDLLPLASELTDPDEARKAIARVKRESNAYYADAERLIREAAA
ASEKISREAERLIR]
“(3) Functional LOCKR Cage designs with bioactive peptides encoded into the Latch”,
>aBc12L0CKR
(SEQ ID NO: 18)
(MGSSHHHHHHSSGLVPRGSHM)GSKFAVTKLQALNIKLAEKLLFALARLQELNIALVYIAVELTDPKRIADEIK
KVKDKSKEIVERAEEEIARAAAESKKILDEGSGSGSDAVAELQALNLKLAELLLEAIAKLQELNIKLVELLTKLT
DPATIREAIRKVKEDSERIVAEAERLIAAAKAESERIIREGSGSGDPDVARLQELNIELARELLRAAAELQELNI
KLVELASELT(GSGSGSG)[DPKMAQEL [symbol] DKVRAASLQI [symbol] GDAFYA [symbol] LRALAASEKLSKE]
>pBimLOCKR
(SEQ ID NO: 19)
(MGSSHHHHHHSSGLVPRGSHM)KEAVTKLQALNIKLAEKLLEALARLQELNIALVYLAVELTDRKRIADEIKKV
KDKSKEIVERAEEEIARAAAESKKILDEGSGSGSDAVASLQALNLKLAELLLEAIAKLQELNIKLVELLTKLTDP
ATIREAIRKVKEDSERIVAEAERLIAAAKAESERIIREGSGSGDPDVARLQELNIELARELLRAAAELQELNIKL
VELASEGSGSGS[EIAEALRAIGDV FNESYRIVEDAERLIREAAAASEKISRE]
> BimLOCKR_extend5
(SEQ ID NO: 20)
(MGSSHHHHHHSSGLVPRGSHM)KLLEAVTKLQALNIKLAEKLLEALARLQELNIALVYLAVELTDPKRIADEIK
KVKDKSKEIVERAEEEIARAAAESKKILDEAEEEGSGSGSELLLFAVAELQALNLKLAELLLEAIAKLQELNIKL
VELLTKLTDPATIEEAIRKVKEDSERIVAEAERLIAAAKAE3ERIIREAERLAGSGSGSRELLRDVARLQELNIE
LARELLRAAAELQELNIKLVELASELTD[EIWIAQELRRIGDEFNAYYADAERLIREAAAASEKISREAERLI]
>BimLOCKR_extend9
(SEQ ID NO: 21)
(MGSSHHHHHHSSGLVPRGSHM)KLAEKLLEAVTKLQALNIKLAEKLLEALARLQELNIALVYLAVELTDPKRIA
DEIKKVKDKSKELVERAEEEIARAAAESKKILDEAEEEIARAGSGSGSLKLAELLLEAVAELQALNLKLAELLLE
AIAKLQELNIKLVELLTKLTDPATIREAIRKVKEDSERIVAEAERLIAAAKAESERIIREAERLIAAAAGSGSGS
IELARELLRDVARLQELNIELARELLRAAAELQELNIKLVELASELTD[EIWIAQELRRIGDEFNAYYADAERLI
REAAAASEKISREAERLIRFAA]
>BimLOCKR_extend18
(SEQ ID NO: 22)
(MGSSHHHHHHSSGLVPRGSHM)SKEAVTKLQALNIKLAEKLLEAVTKLQALNIKLAEKLLFALARLQELNIALV
YLAVELTDPKRIADEIKKVKDKSKEIVERAEEEIARAAAESKKILDEAEEEIARAAAESKKILDEGSGSGSDAVA
ELQALNLKLAELLLEAVAELQALNLKLAELLLEAIAKLQELNIKLVELLTKLTDPATIREAIRKVKEDSERIVAE
AERLIAAAKAESERIIREAERLIAAAKAESERIIREGSGSGDPDVARLQELNIELARELLRDVARLQELNIELAR
ELLRAAAELQELNIKLVELASELTD[EIWIAQELRRIGDEFNAYYADAERLIREAAAASEKISREAERLIREAAA
ASEKISRE]
>BimLOCKRb
(SEQ ID NO: 23)
(MGSSHHHHHHSSGLVPRGSHM)SHAAVIKLSDLNIRLLDKLLQAVIKLTELNAELNRKLIEALQRLFDLNVALV
HLAAELTDPKRIADEIKKVKDKSKEIVERAEEEIARAAAESKKILDEAEEEIARAAAESKKILDEGSGSGSDAVA
ELQALNLKLAELLLEAVAELQALNLKLAELLLEAIAKLQELNIKLVELLTKLTDPATIREAIRKVKEDSERIVAE
AERLIAAAKAESERIIREAERLIAAAKAESERIIREGSGSNDPQVAQNQETFIELARDALRLVAENQEAFIEVAR
LTLRAAALAQEVAIKAVEAASEGGSGSG[NEIWIAQELRRIGDEFNAYYAEHKEIHDKLRKKNKKAREDLKKKAD
ELRETNKRVN]
>BimLOCKRc
(SEQ ID NO: 24)
(MGSSHHHHHHSSGLVPRGSHM)SLEAVLKLAELNLKLSDKLAEAVQKLAALLNKLLEKLSEALQRLFELNVALV
TLAIELTDPKRIADEIKKVKDKSKEIVERAEEEIARAAAESKKILDEAEEEIARAAAESKKILDEGSGSGSDAVA
ELQALNLKLAELLLEAVAELQALNLKLAELLLEAIAKLQELNIKLVELLTKLTDPATIREAIRKVKEDSERIVAE
AERLIAAAKAESERIIREAERLIAAAKAESERIIREGSGSNDPLVARLQELLIEHARELLRLVATSQEIFIELAR
AFLANAAQLQEAAIKAVEAASENGSG[EIWIAQELRRIGDEFNAYYAQNQKLLKDHKPAQEKLNRELEELKKKHK
KTLDDIRRES]
>BimLOCKRd
(SEQ ID NO: 25)
(MGSSHHHHHHSSGLVPRGSHM)SLEAVLKLFELNHKLSEKLLEAVLKLHALNQKLSQKLLEALARLLELNVALV
ELAIELTDPKRIADEIKKVKDKSKEIVERAEEEIARAAAESKKILDEAEEEIAPAAAESKKILDEGSGSGSDAVA
ELQALNLKLAELLLEAVAELQALNLKLAELLLEAIAKLQELNIKLVELLTKLTDPATIREAIRKVKEDSERIVAE
AERLIAAAKAESERIIREAERLIAAAKAESERIIREGSGSGDPEVARLQEAFIEQAREILRNVAAAQEALIEQAR
KLLALAALAQEAAIKAVELASEHGSGS[EIWIAQELRRIGDEFNAYYADLDDIARKLLEDHKKHNKELKDKQRKI
KTIKDEARS]
>StrepLOCKRa_300
(SEQ ID NO: 26)
(MGSSHHHHHHSSGLVPRGSHM)SKEAVTKLQALNIKLAEKLLEAVTKLQALNIKLAEKLLEALARLQELNIALV
YLAVELTDPKRIADEIKKVKDKSKEIVERAEEEIARAAAESKKILDEAEEEIARAAAESKKILDEGSGSGSDAVA
ELQALNLKLAELLLEAVAELQALNLKLAELLLEAIAKLQELNIKLVELLTKLTDPATIREAIRKVKEDSERIVAE
AERLIAAAKAESERIIREAERLIAAAKAESERIIREGSGSGDPDVARLQELNIELARELLRDVARLQELNIELAR
ELLRAAAELQELNIKLVELAS(GG)[NWSHPQFEKKAIARVKRESKRIVEDAERLIREAAAASEKISREAERLIR
EAAAASEKISPE]
>strepLOCKRa_306
(SEQ ID NO: 27)
(MGSSHHHHHHSSGLVPRGSHM)SKEAVTKLQALNIKLAEKLLEAVTKLQALNIKLAEKLLEALARLQELNIALV
YLAVELTDPKRIADEIKKVKDKSKEIVERAEEEIARAAAESKKILDEAEEEIARAAAESKKILDEGSGSGSDAVA
ELQALNLKLAELLLEAVAELQALNLKLAELLLEAIAKLQELNIKLVELLTKLTDPATIREAIRKVKEDSERIVAE
AERLIAAAKAESERIIREAERLIAAAKAESERIIREGSGSGDPDVARLQELNIELARELLRDVARLQELNIELAR
ELLRAAAELQELNIKLVELASELTDPD[ENWSHPQFEKRESKRIVEDAERLIREAAAASEKISREAERLIREAAA
ASEKISRE]
>strepLOCKRa_309
(SEQ ID NO: 28)
(MGSSHHHHHHSSGLVPRGSHM)SKEAVTKLQALNIKLAEKLLEAVTKLQALNIKLAEKLLEALARLQELNIALV
YLAVELTDPKRIADEIKKVKDKSKEIVERAEEEIARAAAESKKILDEAEEEIARAAAESKKILDEGSGSGSDAVA
ELQALNLKLAELLLEAVAELQALNLKLAELLLEAIAKLQELNIKLVELLTKLTDPATIREAIRKVKEDSERIVAE
AERLIAAAKAESERIIREAERLIAAAKAESERIIREGSGSGDPDVARLQELNIELARELLRDVARLQELNIELAR
ELLRAAAELQELNIKLVELASELTDPD[EARKNWSHPQFEKKRIVEDAERLIREAAAASEKISREAERLIREAAA
ASEKISRE]
>strepLOCKRa_312
(SEQ ID NO: 29)
(MGSSHHHHHHSSGLVPRGSHM)SKEAVTKLQALNIKLAEKLLEAVTKLQALNIKLAEKLLEALARLQELNIALV
YLAVELTDPKRIADEIKKVKDKSKEIVERAEEEIARAAAESKKILDEAEEEIARAAAESKKILDEGSGSGSDAVA
ELQALNLKLAELLLEAVAELQALNLKLAELLLEAIAKLQELNIKLVELLTKLTDPATIREAIRKVKEDSERIVAE
AERLIAAAKAESERIIREAERLIAAAKAESERIIREGSGSGDPDVARLQELNIELARELLRDVARLQELNIELAR
ELLRAAAELQELNIKLVELASELTDPD[EARKAIANWSHPQFEKEEDAERLIREAAAASEKISREAERLIREAAA
ASEKISRE]
>strepLOCKRa_313
(SEQ ID NO: 30)
(MGSSHHHHHHSSGLVPRGSHM)SKEAVTKLQALNIKLAEKLLEAVTKLQALNIKLAEKLLEALARLQELNIALV
YLAVELTDPKRIADEIKKVKDKSKEIVERAEEEIARAAAESKKILDEAEEEIARAAAESKKILDEGSGSGSDAVA
ELQALNLKLAELLLEAVAELQALNLKLAELLLEAIAKLQELNIKLVELLTKLTDPATIREAIRKVKEDSERIVAE
AERLIAAAKAESERIIREAERLIAAAKAESERIIREGSGSGDPDVARLQELNIELARELLRDVARLQELNIELAR
ELLRAAAELQELNIKLVELASELTDPD[EARKAIARNWSHPQFEKEDAERLIREAAAASEKISREAERLIREAAA
ASEKISRE]
>strepLOCKRa_317
(SEQ ID NO: 31)
(MGSSHHHHHHSSGLVPRGSHM)SKEAVTKLQALNIKLAEKLLEAVTKLQALNIKLAEKLLEALARLQELNIALV
YLAVELTDPKRIADEIKKVKDKSKEIVERAEEEIARAAAESKKILDEAEEEIARAAAESKKILDEGSGSGSDAVA
ELQALNLKLAELLLEAVAELQALNLKLAELLLEAIAKLQELNIKLVELLTKLTDPATIREAIRKVKEDSERIVAE
AERLIAAAKAESERIIREAERLIAAAKAESERIIREGSGSGDPDVARLQELNIELARELLRDVARLQELNIELAR
ELLRAAAELQELNIKLVELASELTDPD[EARKAIARVKRENWSHPQFEKRLIREAAAASEKISREAERLIREAAA
ASEKISRE]
>strepLOCKRa_320
(SEQ ID NO: 32)
(MGSSHHHHHHSSGLVPRGSHM)SKEAVTKLQALNIKLAEKLLEAVTKLQALNIKLAEKLLEALARLQELNIALV
YLAVELTDPKRIADEIKKVKDKSKEIVERAEEEIARAAAESKKILDEAEEEIARAAAESKKILDEGSGSGSDAVA
ELQALNLKLAELLLEAVAELQALNLKLAELLLEAIAKLQELNIKLVELLTKLTDPATIREAIRKVKEDSERIVAE
AERLIAAAKAESERIIREAERLIAAAKAESERIIREGSGSGDPDVARLQELNIELARELLRDVARLQELNIELAR
ELLRAAAELQELNIKLVELASELTDPD[EARKAIARVKRESKRNWSHPQFEKREAAAASEKISREAERLIREAAA
ASEKISRE]
>strepLOCKRa_323
(SEQ ID NO: 33)
(MGSSHHHHHHSSGLVPRGSHM)SKEAVTKLQALNIKLAEKLLEAVTKLQALNIKLAEKLLEALARLQELNIALV
YLAVELTDPKRIADEIKKVKDKSKEIVERAEEEIARAAAESKKILDEAEEEIARAAAESKKILDEGSGSGSDAVA
ELQALNLKLAELLLEAVAELQALNLKLAELLLEAIAKLQELNIKLVELLTKLTDPATIREAIRKVKEDSERIVAE
AERLIAAAKAESERIIREAERLIAAAKAESERIIREGSGSGDPDVARLQELNIELARELLRDVARLQELNIELAR
ELLRAAAELQELNIKLVELASELTDPD[EARKAIARVKRESKRIVENWSHPQFEKAAASEKISREAERLIREAAA
ASEKISRE]
>strepLOCKRa_329
(SEQ ID NO: 34)
(MGSSHHHHHHSSGLVPRGSHM)SKEAVTKLQALNIKLAEKLLEAVTKLQALNIKLAEKLLEALARLQELNIALV
YLAVELTDPKRIADEIKKVKDKSKEIVERAEEEIARAAAESKKILDEAEEEIARAAAESKKILDEGSGSGSDAVA
ELQALNLKLAELLLEAVAELQALNLKLAELLLEAIAKLQELNIKLVELLTKLTDPATIREAIRKVKEDSERIVAE
AERLIAAAKAESERIIREAERLIAAAKAESERIIREGSGSGDPDVARLQELNIELARELLRDVARLQELNIELAR
ELLRAAAELQELNIKLVELASELTDPD[EARKAIARVKRESKRIVEDAERLINWSHPQFEKISREAERLIREAAA
ASEKISRE]
>SB13_LOCKR
(SEQ ID NO: 35)
(MGSSHHHHHHSSGLVPRGSHM)GSKEAVTKLQALNIKLAEKLLEALARLQELNIALVYLAVELTDPKRIADEIK
KVKDKSKEIVERAEEEIARAAAESKKILDEGSGSGSDAVAELQALNLKLAELLLEAIAKLQELNIKLVELLTKLT
DPATIREAIRKVKEDSERIVAEAERLIAAAKAESERIIREGSGSGDPDVARLQELNIELARELLRAAAELQELNI
KLVELASEGSGSGSG[YELRRALEELEKALRELKKSLDEI [symbol] RSLEEL [symbol] KNPSEDALVENNRLNVENNKIIVEVLR
IIAEVLKINAS]
>ZCX12_LOCKR
(SEQ ID NO: 36)
(MGSSHHHHHHSSGLVPRGSHM)GSKEAVTKLQALNIKLAEKLLEALARLQELNIALVYLAVELTDPKRIADEIK
KVKDKSKEIVERAEEEIARAAAESKKILDEGSGSGSDAVAELQALNLKLAELLLEAIAKLQELNIKLVELLTKLT
DPATIREAIRKVKEDSERIVAEAERLIAAAKAESERIIREGSGSGDPDVARLQELNIELARELLRAAAELQELNI
KLVELASEGSGSGSG[KKLVEEVERALRELLKTSEDLVRKV [symbol] KALRELLELIRRGGTKDKIEEKIPRVLEEIKRE
LERQKRKIEDVLRQIKEELYRS]
>SB13_LOCKR_extend18
(SEQ ID NO: 37)
(MGSSHHHHHHSSGLVPRGSHM)SKEAVTKLQALNIKLAEKLLEAVTKLQALNIKLAEKLLEALARLQELNIALV
YLAVELTDPKRIADEIKKVKDKSKEIVERAEEEIARAAAESKKILDEAEEEIARAAAESKKILDEGSGSGSDAVA
ELQALNLKLAELLLEAVAELQALNLKLAELLLEAIAKLQELNIKLVELLTKLTDPATIREAIRKVKEDSERIVAE
AERLIAAAKAESERIIREAERLIAAAKAESERIIREGSGSGDPDVARLQELNIELARELLRDVARLQELNIELAR
ELLRAAAELQELNIKLVELASEGSGSGSG[YELRRALEELEKALRELKKSLDELERSLEELEKNFSEDALVENNR
LNVENNKIIVEVLRIIAEVIKLNAKS]
>ZCX12_LOCKR_extend18
(SEQ ID NO: 38)
(MGSSHHHHHHSSGLVPRGSHM)SKEAVTKLQALNIKLAEKLLEAVTKLQALNIKLAEKLLEALARLQELNIALV
YLAVELTDPKRIADEIKKVKDKSKEIVERAEEEIARAAAESKKILDEAEEEIARAAAESKKILDEGSGSGSDAVA
ELQALNLKLAELLLEAVAELQALNLKLAELLLEAIAKLQELNIKLVELLTKLTDPATIREAIRKVKEDSERIVAE
AERLIAAAKAESERIIREAERLIAAAKAESERIIREGSGSGDPDVARLQELNIELARELLRDVARLQELNIELAR
ELLRAAAELQELNIKLVELASEGSGSGSG[KKLVEEVERALRELLKTSEDLVRKVEKALRELLELIRRGGTKDKI
EEKIRRVLEEIKRELERQKRKIEDVLRQIKEELYRS]
>fretLOCKRa
(SEQ ID NO: 39)
(GHHHHHHHHHHGVSKGEELFTGVVPILVELDGDVNGHKFSVSGEGEGDATYGKLTLKFICTTGKLPVPWPTLVT
TLSWGVQCFARYPDHMKQHDFFKSAMPEGYVQERTIFFKDDGNYKTRAEVKFEGDTLVNRIELKGIDFKEDGNIL
GHKLEYNYFSDNVYITADKQKNGIKANFKIRHNIEDGGVQIADHYQQNTPIGDGPVLLPDNHYLSTQSKLSKDPN
EKRDHMVLLEFVTAAGITLGMDELYKGSGCSLQGM)SKEAVTKLQALNIKLAEKLLEAVTKLQALNIKLAEKLLE
ALARLQELNIALVYLAVELTDPKRIADEIKKVKDKSKEIVERAEEEIARAAAESKKILDEAEEEIARAAAESKKI
LDEGSGSGSDAVAELQALNLKLAELLLEAVAELQALNLKLAELLLEAIAKLQELNIKLVELLTKLTDPATIREAI
RKVKEDSERIVAEAERLIAAAKAESERIIREAERLIAAAKAESERIIREGSGSGDPDVARLQELNIELARELLRD
VARLQELNIELARELLRAAAELQELNIKLVELASELTDPD[EARKAIARVKRESKRIVEDAERLIREAAAASEKI
SREAERLIREAAAASEKISRE](VSKGEELFTGVVPILVELDGDVNGHKFSVSGEGEGDATYGKLTLKLICTTGK
LPVPWPTLVTTLGYGVQCFARYPDHMKQHDFFKSAMPEGYVQERTIFFKDDGNYKTRAEVKFEGDTLVNRIELKG
IDFKEDGNILGHKLEYNYNSHNVYITADKQKNGIKANFKIRHNIEDGGVQLADHYQQNTPIGDGPVLLPDNHYLS
YQSKLSKDPNEKRDHMVLLEFVTAAGITLGMDELYK)
>fretLOCKRb
(SEQ ID NO: 40)
(MGHHHHHHHHKHGVSKGEELFTGVVPILVELDGDVNGHKFSVSGEGEGDATYGKLTLKFICTTGKLPVPWPTLV
TTLSWGVQCFARYPDHMKQHDFFKSAMPEGYVQERTIFFKDDGNYKTRAEVKFEGDTLVNRIELKGIDFKEDGNI
LGHKLEYNYFSDNVYITADKQKNGIKANFKIRHNIEDGGVQLADHYQQNTPIGDGPVLLPDNHYLSTQSKLSKDP
NEKRDHMVLLEFVTAAGITLGMDELYKGSGCSLQGM)SHAAVIKLSDLNIRLLDKLLQAVIKLTELNAELNRKLI
EALQRLFDLNVALVHLAAELTDPKRIADEIKKVKDKSKEIVERAEEEIARAAAESKKILDEAEEELAPAAAESKK
ILDEGSGSGSDAVAELQALNLKLAELLLEAVAELQALNLKLAELLLEAIAKLQELNIKLVELLTKLTDPATIREA
IRKVKEDSERIVAEAERLIAAAKAESERIIREAERLIAAAKAESERIIREGSGSNDPQVAQNQETFIELARDALR
LVAENQEAFIEVARLTLRAAALAQEVAIKAVEAASEGGSGSGINKEEIEKLAKEAREKLKKAEKEHKEIHDKLRK
KNKKAREDLKKKADELRETNKRVN](VSKGEELFTGVVPILVELDGDVNGHKFSVSGEGEGDATYGKLTLKLICT
TGKLPVPWPTLVTTLGYGVQCFARYPDHMKQHDFFKSAMPEGYVQERTIFFKDDGNYKTRAEVKFEGDTLVNRIE
LKGIDFKEDGNILGHKLEYNYNSHNVYITADKQKNGIKANFKIRHNIEDGGVQLADHYQQNTPIGDGPVLLPDNH
YLSYQSKLSKDPNEKRDHMVLLEFVTAAGITLGMDELYK)
>fretLOCKRc
(SEQ ID NO: 41)
(GHHHHHHHHHHGVSKGEELFTGVVPILVELDGDVNGHKFSVSGEGEGDATYGKLTLKFICTTGKLPVPWPTLVT
TLSWGVQCFARYPDHMKQHDFFKSAMPEGYVQERTIFFKDDGNYKTRAEVKFEGDTLVNRIELKGIDFKEDGNIL
GHKLEYNYFSDNVYITADKQKNGIKANFKIRHNIEDGGVQLADHYQQNTPIGDGPVLLPDNHYLSTQSKLSKDPN
EKRDHMVLLEFVTAAGITLGMDELYKGSGCSLQGM)SLEAVLKLAELNLKLSDKLAEAVQKLAALLNKLLEKLSE
ALQRLFELNVALVTLAIELTDPKRIADEIKKVKDKSKEIVERAEEEIARAAAESKKILDEAEEEIARAAAESKKI
LDEGSGSGSDAVAELQALNLKLAELLLEAVAELQALNLKLAELLLEAIAKLQELNIKLVELLTKLTDPATIREAI
RKVKEDSERIVAEAERLIAAAKAESERIIREAERLIAAAKAESERIIREGSGSNDPLVARLQELLIEHARELLRL
VATSQEIFIELARAFLANAAQLQEAAIKAVEAASENGSGSGS[SEKVRRELKESLKENHKQNQKLLKDHKFAQEK
LNRELEELKKKHKKTLDDIRRES](VSKGEELFTGVVPILVELDGDVNGHKFSVSGEGEGDATYGKLTLKLICTT
GKLPVPWPTLVTTLGYGVQCFARYPDHMKQHDFFKSAMPEGYVQERTIFFKDDGNYKTRAEVKFEGDTLVNRIEL
KGIDFKEDGNILGHKLEYNYNSHNVYITADKQKNGIKANFKIRHNIEDGGVQLADHYQQNTPIGDGPVLLPDNHY
LSYQSKLSKDPNEKRDHMVLLEFVTAAGITLGMDELYK)
>fretLOCKRd
(SEQ ID NO: 42)
(GKHKHHHHHHHGVSKGEELFTGVVPILVELDGDVNGHKFSVSGEGEGDATYGKLTLKFICTTGKLPVPNPTLVT
TLSWGVQCFARYPDHMKQHDFFKSAMPEGYVQERTIFFKDDGNYKTRAEVKFEGDTLVNRIELKGIDFKEDGNIL
GHKLEYNYFSDNVYITADKQKNGIKANFKIRHNIEDGGVQLADHYQQNTPIGDGPVLLPDNHYLSTQSKLSKDPN
EKRDHMVLLEFVTAAGITLGMDELYKGSGCSLQGM)SLEAVLKLFELNHKLSEKLLEAVLKLKALNQKLSQKLLE
ALARLLELNVALVELAIELTDPKRIADEIKKVKDKSKEIVERAEEEIARAAAESKKILDEAEEEIARAAAESKKI
LDEGSGSGSDAVAELQALNLKLAELLLFAVAELQALNLKLAELLLEAIAKLQELNIKLVELLTKLTDPATIREAI
RKVKEDSERIVAEAERLIAAAKAESERIIREAERLIAAAKAESERIIREGSGSGDPEVARLQEAFIEQAREILRN
VAAAQEALIEQARRLLALAALAQEAAIKAVELASEHGSGSGIDTVKRILEELRRRFEKLAKDLDDIARKLLEDHK
KHNKELKDKQRKIKKEADDAARS](VSKGEELFTGVVPILVELDGDVNGHKFSVSGEGEGDATYGKLTLKLICTT
GKLPVPWPTLVTTLGYGVQCFARYPDHMKQHDFFKSAMPEGYVQERTIFFKDDGNYKTRAEVKFEGDTLVNRIEL
KGIDFKEDGNILGHKLEYNYNSHNVYITADKQKNGIKANFKIRHNIEDGGVQLADHYQQNTPIGDGPVLLPDNHY
LSYQSKLSKDPNEKRDHMVLLEFVTAAGITLGMDELYK)
>tevLOCKR
(SEQ ID NO: 43)
(MGSSHHHHHHSSGLVPRGSHM)SKEAVTKLQALNIKLAEKLLEAVTKLQALNIKLAEKLLEALARLQELNIALV
YLAVELTDPKRIADEIKKVKDKSKEIVERAEEEIARAAAESKKILDEAEEEIARAAAESKKILDEGSGSGSDAVA
ELQALNLKLAELLLEAVAELQALNLKLAELLLEAIAKLQELNIKLVELLTKLTDPATIREAIRKVKEDSERIVAE
AERLIAAAKAESERIIREAERLIAAAKAESERIIREGSGSGDPDVARLQELNIELARELLRDVARLQELNIELAR
ELLRAAAELQELNIKLVELASELTDPD[EARKAIARVKRESKRIVEDAEENLYFQGAASEKISREAERLIREAAA
ASEKISRE]
>spyLOCKR
(SEQ ID NO: 44)
(MGSSHHHHHHSSGLVPRGSHM)SKEAVTKLQALNIKLLEKLLEAVTKLQALNIKLAEKLLEALARLQELNIALV
YLAVELTDPKRIADEIKKVKDKSKEIVERAEEEIARAAAESKKILDEAEEEIARAAAESKKILDEGSGSGSDAVA
ELQALNLKLAELLLEAVAELQALNLKLAELLLEAIAKLQELNIKLVELLTKLTDPATIREAIRKVKEDSERIVAE
AERLIAAAKAESERIIREAERLIAAAKAESERIIREGSGSGDPDVARLQELNIELARELLRDVARLQELNIELAR
ELLRAAAELQELNIKLVELASELTDPD[EARAHIVMVDAYKKRIVEDAERLIREAAAASEKISREAERLIREAAA
ASEKISRE]
>1_nesLOCKR
(SEQ ID NO: 45)
SKEAVTKLQALNIKLAEKLLEAVTKLQALNIKLAEKLLEALARLQELNIALVYLAVELTDPKRIADEIKKVKDKS
KEIVERAEEEIARAAAESKKILDEAEEEIARAAAESKKILDEGSGSGSDAVAELQALNLKLAELLLEAVAELQAL
NLKLAELLLEAIAKLQELNIKLVELLTKLTDPATIREAIRKVKEDSERIVAEAERLIAAAKAESERIIREAERLI
AAAKAESERIIREGSGSGDPDVARLQELNIELARELLRDVARLQELNIELARELLRAAAELQELNIKLVELASEL
TDPD[EARKAIARVKRESKRIVEDLALKLAGLDINSEKISREAERLIREAAAASEKISRE]
>2_nesLOCKR
(SEQ ID NO: 46)
SKEAVTKLQALNIKLAEKLLEAVTKLQALNIKLAEKLLEALARLQELNIALVYLAVELTDPKRIADEIKKVKDKS
KEIVERAEEEIARAAAESKKILDEAEEEIARAAAESKKILDEGSGSGSDAVAELQALNLKLAELLLEAVAELQAL
NLKLAELLLEAIAKLQELNIKLVELLTKLTDPATIREAIRKVKEDSERIVAEAERLIAAAKAESERIIREAERLI
AAAKAESERIIREGSGSGDPDVARLQELNIELARELLRDVARLQELNIELARELLRAAAELQELNIKLVELASEL
TDPD[EARKAIARVKRESKRIVEDAERLIRELAEKLAGLDINAERLIREAAAASEKISRE]
>3_nesLOCKR
(SEQ ID NO: 47)
SKEAVTKLQALNIKLAEKLLEAVTKLQALNIKLAEKLLEALARLQELNIALVYLAVELTDPKRIADEIKKVKDKS
KEIVERAEEEIARAAAESKKILDEAEEEIARAAAESKKILDEGSGSGSDAVAELQALNLKLAELLLEAVAELQAL
NLKLAELLLEAIAKLQELNIKLVELLTKLTDPATIREAIRKVKEDSERIVAEAERLIAAAKAESERIIREAERLI
AAAKAESERIIREGSGSGDPDVARLQELNIELARELLRDVARLQELNIELARELLRAAAELQELNIKLVELASEL
TDPD[EARKAIARVKRESKELAEKLRAGLDLNAAAASEKISREAERLIREAAAASEKISRE]
>nlsLOCKR
(SEQ ID NO: 48)
SKEAVTKLQALNIKLAEKLLEAVTKLQALNIKLAEKLLEALARLQELNIALVYLAVELTDPKRIADEIKKVKDKS
KEIVERAEEEIARAAAESKKILDEAEEEIARAAAESKKILDEGSGSGSDAVAELQALNLKLAELLLEAVAELQAL
NLKLAELLLEAIAKLQELNIKLVELLTKLTDPATIREAIRKVKEDSERIVAEAERLIAAAKAESERIIREAERLI
AAAKAESERIIREGSGSGDPDVARLQELNIELARELLRDVARLQELNIELARELLRAAAELQELNIKLVELASEL
TDPD[EARKAIARVKRESKAAAKRARTSIREAAAASEKISREAERLIREAAAASEKISRE]
>ezh2LOCKR
(SEQ ID NO: 49)
(MGSSHHHHHHSSGLVPRGSHM)SKEAVTKLQALNIKLAEKLLEAVTKLQALNIKLAEKLLEALARLQELNIALV
YLAVELTDPKRIADEIKKVKDKSKEIVERAEEEIARAAAESKKILDEAEEEIARAAAESKKILDEGSGSGSDAVA
ELQALNLKLAELLLEAVAELQALNLKLAELLLEAIAKLQELNIKLVELLTKLTDPATIREAIRKVKEDSERIVAE
AERLIAAAKAESERIIREAERLIAAAKAESERIIREGSGSGDPDVARLQELNIELARELLRDVARLQELNIELAR
ELLRAAAELQELNIKLVELASELTDPD[EARKAIARVKTMFSSNRQKILERTETLNQEWKQRRIQAERLIREAAA
ASEKISRE]
>1fix_VMAc_C_BIMlatcht9
(SEQ ID NO: 51)
(MGSHHHHHHGSGSENLYFQG)SKEAAKKLQDLNIELARKLLEASTKLQRLNIRLAEALLEAIARLQELNLELVY
LAVELTDPKRIRDEIKEVKDKSKEIIRRAEKEIDDAAKESKKILEEARKAIRDAAEESRKILEEGSGSGSDALDE
LQKLNLELAKLLLKAIAETQDLNLRAAKAFLEAAAKLQELNIRAVELLVKLTDPATIRRALEHAKRRSKEIIDEA
ERAIRAAKRESERIIEEARRLIEKAKEESERIIREGSGSGDPDIKKLQDLNIELARELLRAHAQLQRLNLELLRE
LLRALAQLQELNLDLLRLASELTGGSGGSGGS(VLLNVLSKCAGSKKFRPAPAAAFARECRGFYFELQELKEDDY
YGITLSDDSDHQFLLANQVVVHNC)GGSGGS[DEIWIAQELRRIGDEFNAYYADAERLIREAAAASEKISREAER
LIREAA]
>sfGFP_VMAn_1fix_BIM_t0_latch
(SEQ ID NO: 52)
(MGSHHKHHHGSGSENLYFQG)HMSKGEELFTGVVPILVELDGDVNGHKFSVRGEGEGDATNGKLTLKFICTTGK
LPVPWPTLVTTLTYGVQCFARYPDHMKQHDFFKSAMPEGYVQERTISFKDDGTYKTRAEVKFEGDTLVNRIELKG
IDFKEDGNILGHKLEYNFNSHNVYITADKQKNGIKANFKIRHNVEDGSVQLADHYQQNTPIGDGPVLLPDNHYLS
TQSVLSKDPNEKRDHMVLLEFVTAAGITHGMDELYKSGSGSGCFAKGTNVLMADGSIECIENIEVGNKVMGKDGR
PREVIKLPRGRETMYSVVQKSQHRAHKSDSSREVPELLKFTCNATHELVVRTPRSVRRLSRTIKGVEYFEVITFE
MGQKKAPDGRIVELVKEVSKSYPISEGPERANELVESYRKASNKAYFEWTIEARDLSLLGSHVRKATYQTYAPIL
YGGSGGSGGGGSGGSGSKEAAKKLQDLNIELARKLLEASTKLQRLNIRLAEALLEAIARLQELNLELVYLAVELT
DPKRIRDEIKEVKDKSKEIIRRAEKEIDDAAKESKKILEEARKAIRDAAEESPKILEEGSGSGSDALDELQKLNL
ELAKLLLKAIAETQDLNLRAAKAFLEAAAKLQELNIRAVELLVKLTDPATIRRALEHAKRRSKEIIDEAERAIRA
AKRESERIIEEARRLIEKAKEESERIIREGSGSGDPDIKKLQDLNIELARELLRAHAQLQRLNLELLRELLRALA
QLQELNLDLLRLASELT[DEIWIAQELRRIGDEFNAYYADAERLSREAAAASEKISREAERSIREAAAASEKISR
E]
Asymmetrized functional Cages encoding Bim and GFP11 (i.e.: bioactive
peptides)
(6His-MBP-TEV, 6HIs-TEV, and flexible linker sequences are underlined text)
(Co-localization domain is bolded text)
(Functional peptide is italicized underlined text)
(Positions that can be mutated to any amino acid to tune responsiveness are
underlined bolded text)
(C-terminal sequences that can be removed to tune responsiveness are
italicized text)
(all sequences in parentheses are optional)
> 1fix-long-BIM-t0
(SEQ ID NO: 54)
(MGSHHHHHHGSGSENLYFQG)SKEAAKKLQDLNIELARKLLEASTKLQRLNIRLAEALLEAIARLQELNLELVY
LAVELTDPKRIRDEIKEVKDKSKEIIRRAEKEIDDAAKESKKILEEARKAIRDAAEESRKILEEGSGSGSDALDE
LQKLNLELAKLLLKAIAETQDLNLRAAKAFLEAAAKLQELNIRAVELLVKLTDPATIRRALEHAKRRSKEIIDEA
ERAIRAAKRESERIIEEARRLIEKAKEESERIIREGSGSGDPDIKKLQDLNIELARELLRAHAQLQRLNLELLRE
LLRALAQLQELNLDLLRLASEL(TD[EIWIAQELRRIGDEFNAYYA)DAERLIREAAAASEKISREAERLIREAA
AASEKISRE]
>1fix-long-GFP-t0
(SEQ ID NO: 55)
(MGSHHHHHHGSGSENLYFQG)SKEAAKKLQDLNIEIARKLLEASTKLQRLNIRLAEALIEAIARLQELNLELVY
LAVELTDPKRIRDEIKEVKDKSKEIIRRAEKEIDDAAKESKKIIEEARKAIRDAAEESRKILEEGSGSGSDALDE
LQKLNLELAKLLLKAIAETQDLNLRAAKAFLEAAAKLQELNIRAVELLVKLTDPATIRRALEHAKRRSKEIIDEA
ERAIRAAKRESERIIEEARRLIEKAKEESERIIREGSGSGDPDIKKLQDLNIELARELLRAHAQLQRLNLELLRE
LLRALAQLQELNLDLLRLASEL[(RDHMVLHEYVNAAGITFNAYYA)DAERLIREAAAASEKISREAERLIREAA
AASEKISRE]
>1fix-short-BIM-t0
(SEQ ID NO: 56)
(MGSHHHHHHGSGSENLYFQGSGG)SELARKLLEASTKLQRLNIRLAEALLEAIARLQELNLELVYLAVELTDPK
RIRDEIKEVKDKSKEIIRRAEKEIDDAAKESEKILEEAREAISGSGSELAKLLLKAIAETQDLNLRAAKAFLEAA
AKLQELNIRAVELLVKLTDPATIREALEHAKRRSKEIIDEAERAIRAAKRESERIIEEARRLIEKGSGSGSELAR
ELLRAHAQLQRLNLELLRELLRALAQLQELNLDLLRLASEL(TD[EIWIAQELRRIGDEFNAYYA)DAERLIREA
AAASEKISREAERLIR]
>1fix-short-GFP-t0
(SEQ ID NO: 57)
(MGSHHHHHHGSGSENLYFQGSGG)SELARKLLEASTKLQRLNIRLAEALLEAIARLQELNLELVYLAVELTDPK
RIRDEIKEVKDKSKEIIRRAEKEIDDAAKESEKILEEAREAISGSGSELAKLLLKAIAETQDLNLRAAKAFLEAA
AKLQELNIRAVELLVKLTDPATIREALEHAKRRSKEIIDEAERAIRAAKRESERIIEEARRLIEKGSGSGSELAR
ELLRAHAQLQRLNLELLRELLRALAQLQELNLDLLRLASEL[(RDHMVLHEYVNAAGITFNAYYA)DAERLIREA
AAASEKISREAERLIR]
>Spycatcher-1fix-long-GFP-t0
(SEQ ID NO: 58)
(MGSHHHHHHGSGSENLYFQGS)AMVDTLSGLSSEQGQSGDMTIEEDSATHIKFSKRDEDGKELAGATMELRDSS
GKTISTWISDGQVKDFYLYPGKYTFVETAAPDGYEVATAITFTVNEQGQVTVNGKATKGSGGSKEAAKKLQDLNI
ELARKLLEASTKLQRLNIRLAEALLEAIARLQELNLELVYLAVELTDPKRIRDEIKEVKDKSKEIIRRAEKEIDD
AAKESKKILEEARKAIRDAAEESRKILEEGSGSGSDALDELQKLNLELAKLLLKAIAETQDLNLRAAKAFLEAAA
KLQELNIRAVELLVKLTDPATIRRALEHAKRRSKEIIDEAERAIAAAKRESERIIEEARRLIEKAKEESERIIRE
GSGSGDPDIKKLQDLNIELARELLRAHAQLQRLNLELLRELLRALAQLQELNLDLLRLASELL(RDHMVLHEYVN
AAGITFNAYYA)DAERLIREAAAASEKISREAERLIREAAAASEKISRE]
>Spycatcher-1fix-short-GFP-t0
(SEQ ID NO: 59)
(MGSHHHHHHGSGSENLYFQGS)AMVDTLSGLSSEQGQSGDMTIEEDSATHIKFSKRDEDGKELAGATMELRDSS
GKTISTWISDGQVKDFYLYPGKYTFVETAAPDGYEVATAITFTVNEQGQVTVNGKATKGSGGSELARKLLEASTK
LQRLNIRLAEALLEAIARLQELNLELVYLAVELTDPKRIRDEIKEVKDKSKEIIRRAEKEIDDAAKESEKILEEA
REAISGSGSELAKLLLKAIAETQDLNLRAAKAFLEAAAKLQELNIRAVELLVKLTDPATIREALEHAKRRSKEII
DEAERAIRAAKRESERIIEEARRLIEKGSGSGSELARELLRAHAQLQRLNLELLRELLRALAQLQELNLDLLRLA
SEL[(RDHMVLHEYVNAAGITFNAYYA)DAERLIREAAAASEKISREAERLIR]
>1fix-latch_Mad1SID_t0_1
(SEQ ID NO: 61)
(MGSHHHHHHGSGSENLYFQG)SKEAAKKLQDLNIELARKLLEASTKLQRLNIRLAEALLEAIARLQELNLELVY
LAVELTDPKRIRDEIKEVKDKSKEIIRRAEKEIDDAAKESKKILEEARKAIRDAAEESRKILEEGSGSGSDALDE
LQKLNLELAKLLLKAIAETQDLNLRAAKAFLEAAAKLQELNIRAVELLVKLTDPATIRRALEHAKRRSKEIIDEA
ERAIRAAKRESERIIEEARRLIEKAKEESERIIREGSGSGDPDIKKLQDLNIELARELLRAHAQLQRLNLELLRE
LLRALAQLQELNLDLLRLASELT](NIQMLLEAADYLE)RESKRIVEDAERLIREAAAASEKISREAERSIREAA
AASEKISRE]
>1fix-latch_Mad1SID_T0_2
(SEQ ID NO: 65)
(MGSHHHHHHGSGSENLYFQG)SKEAAKKLQDLNIELARKLLEASTKLQRLNIRLAEALLEAIARLQELNLELVY
LAVELTDPKRIRDEIKEVKDKSKEIIRRAEKEIDDAAKESKKILEEARKAIRDAAEESRKILEEGSGSGSDALDE
LQKLNLELAKLLLKAIAETQDLNLRAAKAFLEAAAKLQELNIRAVELLVKLTDPATIRRALEHAKRRSKEIIDEA
ERAIRAAKRESERIIEEARRLIEKAKEESERIIREGSGSGDPDIKKLQDLNIELARELLRAHAQLQRLNLELLRE
LLRALAQLQELNLDLLRLASELTDP[DEARK(NIQMLLEAADYLE)EDAERLIREAAAASEKISREAERLIREAA
SEKISRE]
>1fix-short-Bim-t0-relooped
(SEQ ID NO: 67)
[MDEARKAIARVKRESKRI(EIWIAQELRRIGDEFNAYYA)EAEKIAP]DELWHRLLEASTKLQRLNIRLAEALL
EAIARLQELNLELVYLAVELTDPKRIRDEIKEVKDKSKEIIRRAEKEIDDAAKESEKILEEAREAISGSGSELAK
LLLKAIAETQDLNLRAAKAFLEAAAKLQELNIRAVELLVKLTDPATIREALEHAKRRSKEIIDEAERAIRAAKRE
SERIIEEARRLIEKGSGSGSELARELLRAHAQLQRLNLELLRELLRALAQLQELNLDLLRLASE
>1fix-short-spyzag-t0_2
(SEQ ID NO: 68)
(MGSSHHHHHHSSGLVPRGSHM)SELARKLLEASTKLQRLNIRLAEALLEAIARLQELNLELVYLAVELTDPKRI
RDEIKEVKDKSKEIIRRAEKEIDDAAKESEKILEEAREAISGSGSELAKLLLKAIAETQDLNLRAAKAFLEAAAK
LQELNIRAVELLVKLTDPATIREALEHAKRRSKEIIDEAERAIRAAKRESERIIEEARRLIEKGSGSGSELAREL
LRAHAQLQRLNLELLRELLRALAQLQELNLDLLRLASELTDPD[EAR(AHIVMVDAYK)KRIVEDAERLIREAAA
ASEKISREAERLIR]
>1fix-shorz-spyrag-t0_8
(SEQ ID NO: 69)
(MGSSHHHHHHSSGLVPRGSHM)SELARKLLEASTKLQRLNIRLAEALLEAIARLQELNLELVYLAVELTDPKRI
RDEIKEVKDKSKEIIRRAEKEIDDAAKESEKILEEAREAISGSGSELAKLLLKAIAETQDLNLRAAKAFLEAAAK
LQELNIRAVELLVKLTDPATIREALEHAKRRSKEIIDEAERAIRAAKRESERIIEEARRLIEKGSGSGSELAREL
LRAHAQLQRLNLELLRELLRALAQLQELNLDLLRLASELTDPD[EARKAIARVKRESK(AHIVMVDAYK)REAAA
ASEKISREAERLIR]
>1fix-short-TEV-t0_1
(SEQ ID NO: 70)
(MGSSHHHHHHSSGLVPRGSHM)SELARKLLEASTKLQRLNIRLAEALLEAIARLQELNLELVYLAVELTDPKRI
RDEIKEVKDKSKEIIRRAEKEIDDAAKESEKILEEAREAISGSGSELAKLLLKAIAETQDLNLRAAKAFLEAAAK
LQELNIRAVELLVKLTDPATIREALEHAKRRSKEIIDEAERAIRAAKRESERIIEEARRLIEKGSGSGSELAREL
LRAHAQLQRLNLELLRELLRALAQLQELNLDLLRLASELTDP[DEAR(ENLYFQGS)ESKRIVEDAERLIREAAA
ASEKISREAERLIR]
>1fix-short-TEV-t0_6
(SEQ ID NO: 71)
(MGSSHHHHHHSSGLVPRGSHM)SELARKLLEASTKLQRLNIPLAEALLEAIARLQELNLELVYLAVELTDPKRI
RDEIKEVKDKSKEIIRRAEKEIDDAAKESEKILEEAREAISGSGSELAKLLLKAIAETQDLNLRAAKAFLEAAAK
LQELNIRAVELLVKLTDPATIREALEHAKRRSKEIIDEAERAIRAAKRESERIIEEARRLIEKGSGSGSELAREL
LRAHAQLQRLNLELLRELLRALAQLQELNLDLLPLASELTDP[DEARKAIARVKRESKRIV(ENLYFQGS)EAAA
ASEKISREAERLIR]
>1fix-short-nanoBit-t0_1
(SEQ ID NO: 72)
(MGSSHHHHHHSSGLVPRGSHM)SELARKLLEASTKLQRLNIPLAEALLEAIARLQELNLELVYLAVELTDPKRI
RDEIKEVKDKSKEIIRRAEKEIDDAAKESEKILEEAREAISGSGSELAKLLLKAIAETQDLNLRAAKAFLEAAAK
LQELNIRAVELLVKLTDPATIREALEHAKRRSKEIIDEAERAIRAAKRESERIIEEARRLIEKGSGSGSELAREL
LRAHAQLQRLNLELLRELLRALAQLQELNLDLLRLASELTDP[DEAR(VSGWRLFKKIS)RIVEDAERLIREAAA
ASEKISREAERLIR]
>1fix-short-nanoBit-t0_3
(SEQ ID NO: 73)
(MGSSHHHHHHSSGLVPRGSHM)SELARKLLEASTKLQRLNIRLAEALLEAIARLQELNLELVYLAVELTDPKRI
RDEIKEVKDKSKEIIRRAEKEIDDAAKESEKILEEAREAISGSGSELAKLLLKAIAETQDLNLRAAKAFLEAAAK
LQELNIRAVELLVKLTDPATIREALEHAKRRSKEIIDEAERAIRAAKRESERIIEEARRLIEKGSGSGSELAREL
LRAHAQLQRLNLELLRELLRALAQLQELNLDLLRLASELTDP[DEARKAIARVKRESK(VSGWRLFKKIS)EAAA
ASEKISREAERLIR]
>1fix-short-RHIM-10_8
(SEQ ID NO: 74)
(MGSSHHHHHHSSGLVPRGSHM)SELARKLLEASTKLQRLNIRLAEALLEAIARLQELNLELVYLAVELTDPKRI
RDEIKEVKDKSKEIIRRAEKEIDDAAKESEKILEEAREAISGSGSELAKLLLKAIAETQDLNLRAAKAFLEAAAK
LQELNIRAVELLVKLTDPATIREALEHAKRRSKEIIDEAERAIRAAKRESERIIEEARRLIEKGSGSGSELAREL
LRAHAQLQRLNLELLRELLRALAQLQELNLDLLRLASELTDP[DEARKAI(IQIG)RESKRIVEDAERLIREAAA
ASEKIS(VQLG)RLIR)
>1fix-short-RHJLM-t0_19
(SEQ ID NO: 75)
(MGSSHHHHHHSSGLVPRGSHM)SELARKLLEASTKLQRLNIRLAEALLEAIARLQELNLELVYLAVELTDPKRI
RDEIKEVKDKSKEIIRRAEKEIDDAAKESEKILEEAREAISGSGSELAKLLLKAIAETQDLNLRAAKAFLEAAAK
LQELNIRAVELLVKLTDPATIREALEHAKRRSKEIIDEAERAIRAAKRESERIIEEARRLIEKGSGSGSELAREL
LRAHAQLQRLNLELLRELLRALAQLQELNLDLLRLASELTDP[DEARKAIARVKRESKRIV(IQIG)RLI(VQLG
)AASEKISREAERLIR]
>1fix-short-RHIM-t0_22
(SEQ ID NO: 76)
(MGSSHHHHHHSSGLVPRGSHM)SELARKLLEASTKLQRLNIRLAEALLEAIARLQELNLELVYLAVELTDPKRI
RDEIKEVKDKSKEIIRRAEKEIDDAAKESEKILEEAREAISGSGSELAKLLLKAIAETQDLNLRAAKAFLEAAAK
LQELNIRAVELLVKLTDPATIREALEHAKRRSKEIIDEAERAIRAAKRESERIIEEARRLIEKGSGSGSELAREL
LRAHAQLQRLNLELLRELLRALAQLQELNLDLLRLASELTDP[DEARKAIARVKRESKRIV(IQIG)RLIREAAA
ASEKIS(VQLFG)RLIR]
>1fix-short-gcn4-t0_4
(SEQ ID NO: 77)
(MGSSHHHHHHSSGLVPRGSHM)SELARKLLEASTKLQRLNIRLAEALLEAIARLQELNLELVYLAVELTDPKRI
RDEIKEVKDKSKEIIRRAEKEIDDAAKESEKILEEAREAISGSGSELAKLLLKAIAETQDLNLRAAKAFLEAAAK
LQELNIRAVELLVKLTDPATIREALEHAKRRSKEIIDEAERAIRAAKRESERIIEEARRLIEKGSGSGSELAREL
LRAHAQLQRLNLELLRELLRALAQLQELNLDLLRLASELTDP[DESVKE(LEDKVEELLSKNYHLEMEVARLKKL
VGER)SREAERLIR]
>1fix-short-ccDi-t0_6
(SEQ ID NO: 78)
(MGSSHHHHHHSSGLVPRGSHM)SELARKLLEASTKLQRLNIRLAEALLEAIARLQELNLELVYLAVELTDPKRI
RDEIKEVKDKSKEIIRRAEkEIDDAAKESEKILEEAREAISGSGSELAKLLLKAIAETQDLNLRAAKAFLEAAAK
LQELNIRAVELLVKLTDPATIREALEHAKRRSKEIIDEAERAIRAAKRESERIIEEARRLIEKGSGSGSELAREL
LRAHAQLQRLNLELLRELLRALAQLQELNLDLLRLASELTDP[DEARKAIA(GEIAALKQEIAALKKENAALKHE
IAALKQG)AERLIR]
>1fix-short-cc-a-t0_6
(SEQ ID NO: 79)
(MGSSHHHHHHSSGLVPRGSHM)SELARKLLEASTKLQRLNIRLAEALLEAIARLQELNLELVYLAVELTDPKRI
RDEIKEVKDKSKEIIRRAEkEIDDAAKESEKILEEAREAISGSGSELAKLLLKAIAETQDLNLRAAKAFLEAAAK
LQELNIRAVELLVKLTDPATIREALEHAKRRSKEIIDEAERAIRAAKRESERIIEEARRLIEKGSGSGSELAREL
LRAHAQLQRLNLELLRELLRALAQLQELNLDLLRLASELTDP[DEARKAIARVKR(GLKQEIAALEKSNAALEWE
IAALEQGG)EPLIR]
>1fix-short-cc-b-t0_6
(SEQ ID NO: 80)
(MGSSHHHHHHSSGLVPRGSHM)SELARKLLEASTKLQRLNIRLAEALLEAIARLQELNLELVYLAVELTDPKRI
RDEIKEVKDKSKEIIRRAEKEIDDAAKESEKILEEAREAISGSGSELAKLLLKAIAETQDLNLRAAKAFLEAAAK
LQELNIRAVELLVKLTDPATIREALEHAKRRSKEIIDEAERAIRAAKRESERIIEEARRLIEKGSGSGSELAREL
LRAHAQLQRLNLELLRELLRALAQLQELNLDLLRLASELTDP[DEARKAIARVKR(GLKQKIAALKYKNAALKKK
IAALKQGG)ERLIR
STREPII-LOCKR functional Cages:
>STREPII-2plus1_DOCK_1
(SEQ ID NO: 81)
SRVEEIIEDLRRLLEEIRKENADSIRASKELLDRVKEINDTIIAELERLLKD1EKEVREKGSESEEVKKALRRVL
EELEKLLRRVAEINEEVLRRNSKLVEEDARRNAEVLKELKRLVEELMREIGDED[KVRKVAEVAEKVLRDIDKLD
R(WSHPQFEK)TNGEISKLDEDTRRVAERVKKAIEDLAK]
>STREPII-2plus1_LOCK_2
(SEQ ID NO: 82)
[SEVDEIIADNERALDEVRREVEEIDKENAERLGE(WSHPQFEK)GDPLAKALEEIRK]GVRSRLVDELERAIRE
VEEVIRRVLERVRRLIEEVSKIITDVLREVERLHEEVTKELRKVEDGNSREALDALRPLIEKVVEDSARLIKKVD
EALKAVNKE1EDLSREVADLVRAVAEELDARVK
>STREPII-2plus1_LOCK_3
(SEQ ID NO: 83)
SSDEVLKEIEEIIRRDEAEVRRVNAEVNASTEDLAREVEEVLRATNELIEELERRVTGTEELKRVIDELRDRDRK
VRRRVERVIEESAKRDDESRKRLTRAVEKLRADLKKLADDGVPE[EALSKAIKDVRDIVKKVKDELKE(WSHPQF
EK)VDRLSEELKEWLKDVERVLKELTDKDR]
>STREPII-2plus1_LOCK_4C
(SEQ ID NO: 84)
SDAEELLKRVADLLKASIESLEKILRDSKELMDRWRKKLEDLLRESEELVDRAEKILRRGGSDKEVLDKIAEEVR
RTNDDSRRLDEELHRLSRDTLRKLEENLRRTEKEVREMDKRAAERGIVDERVREELKKLLTRVE(WSHFQFEK)G
DKKILKEAHKESKEVNDRRRELLERLEESVR]
>STREPII-2plus1_LOCK_4N
(SEQ ID NO: 85)
[SPASELLKRVADLLKASLESLEKILRDSKELMDR(WSHPQEEK)LGESEELVDPAEKILRR]GGSDKEVLDKIA
EEVRRTNDDSRRLDEELHRLSRDTLRKLEEMLRRTEKEVREMDKRAAERGVDERVREELKKLLTRVEEEHRKVLE
TDKKILKEAHKESKEVNDRDRELLERLEESVR
>STREPII-3plus1_LOCK_1
(SEQ ID NO: 86)
SEAEDLLERVKRVLDELIEIVDRNHELNARVVETSARLVERLLEEVERALETLEREIPGRELLDKAIKDLRDVLR
RVAEKVKRSIEELKEVLEESRRVLEEVVRALAEVIDRVRRLVEKGVDLRDLIRELKRVLEEAVSLIERLVRLNTR
AAEKDNESLRELVRAIKEALKRAVDMVRADGL[PSRLVKKLDEIVKEVAKKLEDVVRANEEL(WSHPQFEK)GSS
VARLPFAVSRVARDLEETAR]
>STREPII-3plus1_LOCK_2
(SEQ ID NO: 87)
[SDEERLEKVVKDVIEKVRRILEK(WSHPQFEK)GSELRRILEEWEKIIREVLDKVRR]GSGSADALVEVLEEIL
RLAEELSKRVEEVLREILKLAKALSDELVKVLAEIVEAAKRISRDDELRKAVEDVARELEDLAAKDRKILDDVRE
ALERIAKEDKDILREAEETLRRLADEMRRSGVDERLLKRVVDILARLLELNATTIERLLRILEELLKLNKELAER
VIRVLEKLLEEIKR
>STREPII-3plus1_LOCK_3
(SEQ ID NO: 88)
SVLETVKKALEDSSEKIERIVEEDERVAKESSDRIRRLVEEDKPVADEILDLIEKGGDTDTLAKLVEEWSRTSKK
LLDDVLKLHKDWSDDSRRLLEEILRVHEELIRAVKEILDRGGKPEEVVRELEKVLKESLDTLEEIIRRLDEANAR
TVKRVADVIRELEDANAKVLEEIERKGD[DKDAVIKVIEELIRANAAV(WSHPQFEK)GDLVRVNKTVWKELLRV
NEKLARDLERWK]
>STREPII-3plus1_LOCK_4
(SEQ ID NO: 89)
[SLVDELRKSLERNVRVSEEVARRLKFALGR(WSHPQFEK)GGDLIRLNEDVVRVVEKV]GVDESAIERVRRIIE
ELNRALDAVLKKNEDLVRRLTELLDKLLEENRRLVEELDEDLKRRGGTEEVIDTILELIERSIERLKRLLDELLR
IVREALKDNARVADENLKALKEILDELRKDGVSDEELKRVLEKAADLKARLKDAHRKLLEDLERIIRELKKKLDE
VVEENKRSVDELKR
>STREPII-3plus1_LOCK_3-relooped
(SEQ ID NO: 90)
[MKDAVIKVIEELIRANAAV(WSHFQFEK)GDLVRVNKTVWKELLRVNEKLARDLERAL]DERDVSAWETVKKAL
EDSSEKIERIVEEDERVAKESSDRIRRLVEEDKRVADEILDLIEKGGDTDTLAKLVEEWSRTSKKLLDDVLKLHK
DWSDDSRRLLEEILRVHEELIRAVKEILDRGGAPEEVVRELEKVLKESLDTLEEIIRRLDEANARTVKRVADVIR
ELEDANAKVLEEIERK
>STREPII-2plus1_LOCK_3-relooped
(SEQ ID NO: 91)
[MEEAASKAIKDVRDIVKKVKDSLKE(WSHFQFEK)VDRLSEELKEWLKDVERVLKELT]DREEASEEELKRVID
ELRDRDRKVRRRVERVIEESAKRDDESRKRLTRAVEKLRADLKKLSVEGASDEVLKEIEEIIRRLEAEVRRVNAE
VNASTEDLAREVEEVLRATNELIESLERR
>BimLOCKR_a_short_Nterm
(SEQ ID NO: 27094)
[MDEARKAIARVKRESKRI(EIWIAQELRRIGDEFNAYYA)EAEKLATDEL]WHRLLEASTKLQRLNIRLAEALL
EAIARLQELNLELYYLAVELTDPKRIRDEIKEVKDKSKEIIRRAEKEIDDAAKESEKILEEAREAISGSGSELAK
LLLKAIAETQDLNLRAAKAFLFAAAKLQELNIRAVELLVKLTDPATIREALEHAKRRSKEIIDEAERAIRAAKRE
SERIIEEARRLIEKGSGSGSELARELLRAHAQLQPLNLELLRELLRALAQLQELNLDLLRLASE
>BimLOCKR_g
(SEQ ID NO: 27095)
(M3LVDEL(EIWIAQELRRIGDEFNAYYA)ALKRWVDVVRKVVEDLIRLNEDVVRVVEKV]GVDESAIERVRRII
EELNRALDAVLKKNEDLVRRLTELLDKLLEENRRLVEELDEDLKRRGGTEEVIDTILELIERSIERLKRLLDELL
RIVREALKDNARVADENLKALKEILDELRKDGVSDEELKRVLEKAADLHARLKDAHRKLLEDLERIIRELKKKLD
EWEENKRSVDELKR
>reloop_strepLOCKRh
(SEQIDNO: 27096)
[MKDAVIKVIEELIRANAAV(WSHPQFEK)GDLVRVNKTVWKELLRVNEKLARDLERALDER)DVSAWETVKKAL
EDSSEKIERIVEEDERVAKESSDRIRRLVEEDKRVADEILDLIEKGGDTDTLAKLVEEWSRTSKKLLDDVLKLHK
DWSDDSRRLLEEILRVHEELIRAVKEILDRGGAPEEVVRELEKVLKESLDTLEEIIRRLDEANARTVKRVADVIR
ELEDANAKVLEEIERK
>reloop_strepLOCKRi
(SEQ ID NO: 27097)
[MEEAASKAIKDVRDIVKKVKDSLKE(WSHPQFEK)VDRLSEELKEWLKDVERVLKELTDREEA]SEEELKRVID
ELRDRDRKVRRRVERVIEESAKRDDESRKRLTRAVEKLRADLKKLSVEGASDEVLKEIEEIIRRLEAEVRRVNAE
VNASTEDLAREVEEVLRATNELIEELEPP
>spyLOCKRa_2
(SEQ ID NO: 27098)
MSELARKLLEASTKLQRLNIRLAEALLEAIARLQELNLELVYLAVELTDPKRIRDEIKEVKDKSKEIIRRAEKEI
DDAAKESEKILEEAREAISGSGSELAKLLLKAIAETQDLNLRAAKAFLEAAAKLQELNIRAVELLVKLTDPATIR
EALEHAKRRSKEIIDEAERAIRAAKRESERIIEEARRLIEKGSGSGSELARELLRAHAQLQRLNLELLRELLRAL
AQLQELNLDLLRLASELTDP[DEAR(AHIVMVDAYK)KRIVEDAERLIREAAAASEKISREAERLIR]
>spyLOCKRa_8
(SEQ ID NO: 27099)
MSELARKLLEASTKLQRLNIRLAEALLEAIARLQELNLELVYLAVELTDPKRIRDEIKEVKDKSKEIIRRAEKEI
DDAAKESEKILEEAREAISGSGSELAKLLLKAIAETQDLNLRAAKAFLEAAAKLQELNIRAVELLVKLTDPATIR
EALEHAKRRSKEIIDEAERAIRAAKRESERIIEEARRLIEKGSGSGSELARELLRAHAQLQRLNLELLRELLRAL
AQLQELNLDLLRLASELTDPDEARKAIARVKRESK(AHIVMVDAYK)REAAAASEKISREAERLIR]
>tevLOCKRa_1
(SEQ ID NO: 27100)
MSELARKLLEASTKLQRLNIRLAEALLEAIARLQELNLELVYLAVELTDPKRIRDEIKEVKDKSKEIIRRAEKEI
DDAAKESEKILEEAREAISGSGSELAKLLLKAIAETQDLNLRAAKAFLEAAAKLQELNIRAVELLVKLTDPATIR
EALEHAKRRSKEIIDEAERAIRAAKRESERIIEEARRLIEKGSGSGSELARELLRAHAQLQRLNLELLRELLRAL
AQLQELNLDLLRLASELTDP[DEAR(ENLYFQGS)ESKRIVEDAERLIREAAAASEKISREAERLIR]
>tevLOCKRa_6
(SEQ ID NO: 27101)
MSELARKLLEASTKLQRLNIRLAEALLEAIARLQELNLELVYLAVELTDPKRIRDEIKEVKDKSKEIIRRAEKEI
DDAAKESEKILEEAREAISGSGSELAKLLLKAIAETQDLNLRAAKAFLEAAAKLQELNIRAVELLVKLTDPATIR
EALEHAKRRSKEIIDEAERAIRAAKRESERIIEEARRLIEKGSGSGSELARELLRAHAQLQRLNLELLRELLRAL
AQLQELNLDLLRLASELTDP[DEARKAIARVKRESKRIV(ENLYFQGS)EAAAASEKISREAEPLIR]
>lucLOCKRa_l
(SEQ ID NO: 27102)
MSELARKLLEASTKLQRLNIRLAEALLEAIARLQELNLELVYLAVELTDPKRIRDEIKEVKDKSKEIIRRAEKEI
DDAAKESEKILEEAREAISGSGSELAKLLLKAIAETQDLNLRAAKAFLEAAAKLQELNIRAVELLVKLTDPATIR
EALEHAKRRSKEIIDEAERAIRAAKRESERIIEEARRLIEKGSGSGSELARELLRAHAQLQRLNLELLRELLRAL
AQLQELNLDLLRLASELTDP[DEAR(VSGWRLFKKIS)RIVEDAERLIREAAAASEKISREAERLIR)
>lucLOCKRa_3
(SEQ ID NO: 27103)
MSELARKLLEASTKLQRLNIRLAEALLEAIARLQELNLELVYLAVELTDPKRIRDEIKEVKDKSKEIIRRAEKEI
DDAAKESEKILEEAREAISGSGSELAKLLLKAIAETQDLNLRAAKAFLEAAAKLQELNIRAVELLVKLTDPATIR
EALEHAKRRSKEIIDEAERAIRAAKRESERIIEEARRLIEKGSGSGSELARELLRAHAQLQRLNLELLRELLRAL
AQLQELNLDLLRLASELTDP[DSARKAIARYKRESK(VSGWRLFKKIS)EAAAASEKISREAERLIR)
>rhimLOCKRa_8
(SEQ ID NO: 27104)
MSELARKLLEASTKLQRLNIRLAEALLEAIARLQELNLELVYLAVELTDPKRIRDEIKEVKDKSKEIIRRAEKEI
DDAAKESEKILEEAREAISGSGSELAKLLLKAIAETQDLNLRAAKAFLEAAAKLQELNIRAVELLVKLTDPATIR
EALEHAKRRSKEIIDEAERAIRAAKRESERIIEEARRLIEKGSGSGSELARELLRAHAQLQRLNLELLRELLRAL
AQLQELNLDLLRLASELTDP[DEARKAI(IQIG)RESKRIVEDAERLIREAAAASEKIS(VQLG)RLIR]
>rhimLOCKRa_19
(SEQ ID NO: 27105)
MSELARKLLEASTKLQRLNIRLAEALLEAIARLQELNLELVYLAVELTDPKRIRDEIKEVKDKSKEIIRRAEKEI
DDAAKESEKILEEAREAISGSGSELAKLLLKAIAETQDLNLRAAKAFLEAAAKLQELNIRAVELLVKLTDPATIR
EALEHAKRRSKEIIDEAERAIRAAKRESERIIEEARRLIEKGSGSGSELARELLRAHAQLQRLNLELLRELLRAL
AQLQELNLDLLRLASELTDP[DEARKAIARVKRESKRIV(IQIG)RLI(VQLG)AASEKISREAERLR]
>rhimLOCKRa_22
(SEQ ID NO: 27106)
MSELARKLLEASTKLQRLNIRLAEALLEAIARLQELNLELVYLAVELTDPKRIRDEIKEVKDKSKEIIRRAEKEI
DDAAKESEKILEEAREAISGSGSELAKLLLKAIAETQDLNLRAAKAFLEAAAKLQELNIRAVELLVKLTDPATIR
EALEHAKRRSKEIIDEAERAIRAAKRESERIIEEARRLIEKGSGSGSELARELLRAHAQLQRLNLELLRELLRAL
AQLQELNLDLLRLASELTDP(DEARKAIARVKRESKRIV(IQIG)RLIREAAAASEKIS(VQLG)RLIR]
>gcn4LOCKRa_4
(SEQ ID NO: 27107)
MSELARKLLEASTKLQRLNIRLAEALLEAIARLQELNLELVYLAVELTDPKRIRDEIKEVKDKSKEIIRRAEKEI
DDAAKESEKILEEAREAISGSGSELAKLLLKAIAETQDLNLRAAKAFLEAAAKLQELNIRAVELLVKLTDPATIR
EALEHAKRRSKEIIDEAERAIRAAKRESERIIEEARRLIEKGSGSGSELARELLRAHAQLQRLNLELLRELLRAL
AQLQELNLDLLRLASELTDP[DESVKE(LEDKVEELLSKNYHLENEVAPLKKLVGER)SREAERLIR]
>cc-DiLOCKRa_6
(SEQ ID NO: 27108)
MSELARKLLEASTKLQRLNIRLAEALLEAIARLQELNLELVYLAVELTDPKRIRDEIKEVKDKSKEIIRRAEKEI
DDAAKESEKILEEAREAISGSGSELAKLLLKAIAETQDLNLRAAKAFLEAAAKLQELNIRAVELLVKLTDPATIR
EALEHAKRRSKEIIDEAERAIRAAKRESERIIEEARRLIEKGSGSGSELARELLRAHAQLQRLNLELLRELLRAL
AQLQELNLDLLRLASELTDP[DEARKAIA(GEIAALKQEIAALKEENAALEWEIAALKQGG)ERLIR]
>cc-aLOCKRa_6
(SEQ ID NO: 27109)
MSELARKLLEASTKLQRLNIRLAEALLEAIARLQELNLELVYLAVELTDPKRIRDEIKEVKDKSKEIIRRAEKEI
DDAAKESEKILEEAREAISGSGSELAKLLLKAIAETQDLNLRAAKAFLEAAAKLQELNIRAVELLVKLTDPATIR
EALEHAKRRSKEIIDEAERAIRAAKRESERIIEEARRLIEKGSGSGSELARELLRAHAQLQRLNLELLRELLRAL
AQLQELNLDLLRLASELTDP[DFARKATARVKR(GLEQEIAALEKENAAIEWEIAALEQGG)ERLIR]
>cc-bLOCKRa_6
(SEQ ID NO: 27110)
MSELARKLLEASTKLQRLNIRLAEALLEAIARLQELNLELVYLAVELTDPKRIRDEIKEVKDKSKEIIRRAEKEI
DDAAKESEKILEEAREAISGSGSELAKLLLKAIAETQDLNLRAAKAFLEAAAKLQELNIRAVELLVKLTDPATIR
EALEHAKRRSKEIIDEAERAIRAAKRESERIIEEARRLIEKGSGSGSELARELLRAHAQLQRLNLELLRELLRAL
AQLQELNLDLLRLASELTDP[DEARKAIARVKR(GLKQKIAALKYKNAALKKKIAALKQGG)ERLIR]
>tev-spyLOCKRa_short_40
(SEQ ID NO: 27111)
SELARKLLEASTKLQRLNIRLAEALLEAIARLQELNLELVYLAVELTDPKRIRDEIKEVKDKSKEIIRRAEKEID
DAAKESEKILEEAREAISGSGSELAKLLLKAIAETQDLNLRAAKAFLEAAAKLQELNIRAVELLVKLTDPATIRE
ALEHAKRRSKEIIDEAERAIRAAKRESERIIEEARRLIEKGSGSGSELARELLRAHAQLQRLNLELLRELLRALA
QLQELNLDLLRLASELTDP[DEARKAI(ENLYFQGS)RIVEDAE(AHIVMVDAYK)EKISREAERLIR]
>tev-spyLOCKRa_short_57
(SEQ ID NO: 27112)
SELARKLLEASTKLQRLNIRLAEALLEAIARLQELNLELVYLAVELTDPKRIRDEIKEVKDKSKEIIRRAEKEID
DAAKESEKILEEAREAISGSGSELAKLLLKAIAETQDLNLRAAKAFLEAAAKLQELNIRAVELLVKLTDPATIRE
ALEHAKRRSKEIIDEAERAIRAAKRESERIIEEARRLIEKGSGSGSELARELLRAHAQLQRLNLELLRELLRALA
QLQELNLDLLRLASELTDP[DEARKAIARV(ENLYFQGS)EDAERLIREA(AHIVMVDAYK)AERLIR]
>tev-spyLOCKRa_short_63
(SEQ ID NO: 27113)
SELARKLLEASTKLQRLNIRLAEALLEAIARLQELNLELVYLAVELTDPKRIRDEIKEVKDKSKEIIRRAEKEID
DAAKESEKILEEAREAISGSGSELAKLLLKAIAETQDLNLRAAKAFLEAAAKLQELNIRAVELLVKLTDPATIRE
ALEHAKRRSKEIIDEAERAIRAAKRESERIIEEARRLIEKGSGSGSELARELLRAHAQLQRLNLELLRELLRALA
QLQELNLDLLRLASELTDP[DEARKAIARVK(ENLYFQGS)DAERLIREA(AHIVMVDAYK)AERLIR]
>tev-spyLOCKRa_29
(SEQ ID NO: 27114)
SKEAAKKLQDLNIELARKLLEASTKLQRLNIRLAEALLEAIARLQELNLELVYLAVELTDPKRIRDEIKEVKDKS
KEIIRRAEKEIDDAAKESKKILEEARKAIRDAAEESRKILEEGSGSGSDALDELQKLNLELAKLLLKAIAETQDL
NLRAAKAFLEAAAKLQELNIRAVELLVKLTDPATIRRALEHAKRRSKEIIDEAERAIRAAKRESERIIEEARRLI
EKAKEESERIIREGSGSGDP[DIKKLQDLNIELARELLRAHAQLQRLNLELLRELLRALAQLQELNLDLLRLASE
LTDPDEARKAIARVK(ENLYFQGS)DAERLIREAAAASE(AHIVMVDAYK)REAAAASEKISRE]
>tev-spyLOCKRa_32
(SEQ ID NO: 27115)
SKEAAKKLQDLNIELARKLLEASTKLQRLNIRLAEALLEAIARLQELNLELVYLAVELTDPKRIRDEIKEVKDKS
KEIIRRAEKEIDDAAKESKKILEEARKAIRDAAEESRKILEEGSGSGSDALDELQKLNLELAKLLLKAIAETQDL
NLRAAKAFLEAAAKLQELNIRAVELLVKLTDPATIRRALEHAKRRSKEIIDEAERAIRAAKRESERIIEEARRLI
EKAKEESERIIREGSGSGDP[DIKKLQDLNIELARELLRAHAQLQRLNLELLRELLRALAQLQELNLDLLRLASE
LTDPDEARKAIARVK(ENLYFQGS)DAERLIREAAAASEKISREAE(AHIVMVDAYK)EKISRE]
>Bim-fretLOCKRa_short
(SEQ ID NO: 27116)
(VSKGEELFTGVVPILVELDGDVNGHKFSVSGEGEGDATYGKLTLKFICTTGKLPVPWPTLVTTLSWGVQCFARY
PDHMKQHDFFKSAMPEGYVQERTIFFKDDGNYKTRAEVKFEGDTLVNRIELKGIDFKEDGNILGHKLEYNYFSDN
VYITADKQKNGIKANFKIRHNIEDGGVQLADHYQQNTPIGDGPVLLPDNHYLSTQSKLSKDFNEKRDHMVLLEFV
TAAGITLE)LARKLLEASTKLQRLNIRLAEALLEAIARLQELNLELVYLAVELTDPKRIRDEIKEVKDKSKEIIR
RAEKEIDDAAKESEKILEEAREAISGSGSELAKLLLKAIAETQD1NLRAAKAFLEAAAKLQELNIRAVELLVKLT
DPATIREALEHAKRRSKEIIDEAERAIRAAKRESERIIEEARRLIEKGSGSGSELARELLRAHAQLQRLNLELLR
ELLRALAQLQELNLDLLRLASELT[D(EIWIAQELRRIGDEFNAYYA)DAERLIREAAAASEKISREAERLIR](
VSKGEELFTGVVPILVELDGDVNGHKFSVSGEGEGDATYGKLTLKLICTTGKLPVPWPTLVTTLGYGVQCFARYP
DHMKQHDFFKSAMPEGYVQERTIFFKDDGNYKTRAEVKFEGDTLVNRIELKGIDFKEDGNILGHKLEYNYNSHNV
YITADKQKNGIKANFKIRHNIEDGGVQIADHYQQNTPIGDGPVLLPDNHYLSYQSKLSKDPNEKRDHMVLLEFVT
AAGITLGMDELYKGSGC)
>fretLOCKRa_short
(SEQ ID NO: 27117)
(VSKGEELFTGVVPILVELDGDVNGHKFSVSGEGEGDATYGKLTLKFICTTGKLPVPWPTLVTTLSWGVQCFARY
PDHMKQHDFFKSAMPEGYVQERTIFFKDDGNYKTRAEVKFEGDTLVNRIELKGIDFKEDGNILGHKLEYNYFSDN
VYITADKQKNGIKANFKIRHNIEDGGVQLADHYQQNTPIGDGPVLLPDNHYLSTQSKLSKDFNEKRDHMVLLEFV
TAAGITL)ELARKLLEASTKLQRLNIRLAEALLEAIARLQELNLELVYLAVELTDPKRIRDEIKEVKDKSKEIIR
RAEKEIDDAAKESEKIEEEAREAISGSGSELAKLLLKAIAETQDLNLRAAKAFLEAAAKLQELNIRAVELLVKLT
DPATIREALEHAKRRSKEIIDEAERAIRAAKRESERIIEEARRLIEKGSGSGSELARELLRAHAQLQRLNLELLR
ELLRALAQLQELNLDLLRLASELTDP[DEARKAIARVKRESNAYYADAERLIREAAAASEK](VSKGEELFTGVV
PILVELDGDVNGHKFSVSGEGEGDATYGKLTLKLICTTGKLPVPWPTLVTTLGYGVQCFARYPDHMKQHDFFKSA
MPEGYVQERTIFFKDDGNYKTRAEVKFEGDTLVNRIELKGIDFKEDGNILGHKLEYNYNSHNVYITADKQKNGIK
ANFKIRHNIEDGGVQLADHYQQNTPIGDGPVLLPDNHYLSYQSKLSKDPNEKRDHMVLLEFVTAAGITLGMDELY
KGSGC)
E18_KRAB_full
(SEQ ID NO: 27120)
MSKEAVTKLQALNIKLAEKLLEAVTKLQALNIKLAEKLLEALARLQELNIALVYLAVELTDPKRIADEIKKVKDK
SKEIVERAEEEIARAAAESKKILDEAEEEIARAAAESKKILDEGSGSGSDAVAELQALNLKLAELLLEAVAELQA
LNLKLAELLLEAIAKLQELNIKLVELLTKLTDPATIREAIRKVKEDSERIVAEAERLIAAAKAESERIIREAERL
IAAAKAESERIIREGSGSGDPDVARLQELNIELARELLRDVARLQELNIELARELLRAAAELQELNIKLVELASE
LTGS[(RTLVTFKDVFVDFTREEWKLLDTAQQIVYRNVMLENYKNLVSLGYG)SDEARKAIARVKRESKRIVEDA
ERLIREAAAASEKISREAERLIREAAAASEKISRE]
E18_KRAB_N13t
(SEQ ID NO: 27121)
MSKEAVTKLQALNIKLAEKLLEAVTKLQALNIKLAEKLLEALARLQELNIALVYLAVELTDPKRIADEIKKVKDK
SKEIVERAEEEIARAAAESKKILDEAEEEIARAAAESKKILDEGSGSGSDAVAELQALNLKLAELLLEAVAELQA
LNLKLAELLLEAIAKLQELNIKLVELLTKLTDPATIREAIRKVKEDSERIVAEAERLIAAAKAESERIIREAERL
IAAAKAESERIIREGSGSGDPDVARLQELNIELARELLRDVARLQELNIELARELLRAAAELQELNIKLVELASE
LTGS[(RTLVTFKDVFVDFTREEWKLLDTAQQIVYRNVMLENYKNLVSLGY)GSSKRIVEDAERLIREAAAASEK
ISREAERLIREAAAASEKISRE]
E18_KRAB_C9t
(SEQ ID NO: 27122)
MSKEAVTKLQALNIKLAEKLLEAVTKLQALNIKLAEKLLEALARLQELNIALVYLAVELTDPKRIADEIKKVKDK
SKEIVERAEEEIARAAAESKKILDEAEEEIARAAAESKKILDEGSGSGSDAVAELQALNLKLAELLLEAVAELQA
LNLKLAELLLEAIAKLQELNIKLVELLTKLTDPATIREAIRKVKEDSERIVAEAERLIAAAKAESERIIREAERL
IAAAKAESERIIREGSGSGDPDVARLQELNIELARELLRDVARLQELNIELARELLRAAAELQELNIKLVELASE
LTGS[(RTLVTFKDVFVDFTREEWKLLDTAQQIVYRNVMLENYKNLVSLGY)GSDEARKAIARVKRESKRIVEDA
ERLIREAAAASEKISREAERLIREAA]
E18_KRAB_Cterm1
(SEQ ID NO: 27123)
MSKEAVTKLQALNIKLAEKLLEAVTKLQALNIKLAEKLLEALARLQELNIALVYLAVELTDPKRIADEIKKVKDK
SKEIVERAEEEIARAAAESKKILDEAEEEIARAAAESKKILDEGSGSGSDAVAELQALNLKLAELLLEAVAELQA
LNLKLAELLLEAIAKLQELNIKLVELLTKLTDPATIREAIRKVKEDSERIVAEAERLIAAAKAESERIIREAERL
IAAAKAESERIIREGSGSGDPDVARLQELNIELARELLRDVARLQELNIELARELLRAAAELQELNIKLVELASE
LT[DEARKAIARVKRESKRIVEDAE(RTLVTFKDVFVDFTREEWKLLDTAQQIVYRNVMLENYKNLVSLGY)]
E18_KRAB_Cterm2
(SEQ ID NO: 27124)
MSKEAVTKLQALNIKLAEKLLEAVTKLQALNIKLAEKLLEALARLQELNIALVYLAVELTDPKRIADEIKKVKDK
SKEIVERAEEEIARAAAESKKILDEAEEEIARAAAESKKILDEGSGSGSDAVAELQALNLKLAELLLEAVAELQA
LNLKLAELLLEAIAKLQELNIKLVELLTKLTDPATIREAIRKVKEDSERIVAEAERLIAAAKAESERIIREAERL
IAAAKAESERIIREGSGSGDPDVARLQELNIELARELLRDVARLQELNIELARELLRAAAELQELNIKLVELASE
LT[DEARKAIAPVKRESKRIVEDAERLI(RTLVTFKDVFVDFTREEWKLLDTAQQIVYRNVMLENYKNLVSLGY)
E18_KRAB_Cterm3
(SEQ ID NO: 27125)
MSKEAVTKLQALNIKLAEKLLEAVTKLQALNIKLAEKLLEALARLQELNIALVYLAVELTDPKRIADEIKKVKDK
SKEIVERAEEEIARAAAESKKILDEAEEEIARAAAESKKILDEGSGSGSDAVAELQALNLKLAELLLEAVAELQA
LNLKLAELLLEAIAKLQELNIKLVELLTKLTDPATIREAIRKVKEDSERIVAEAERLIAAAKAESERIIREAERL
IAAAKAESERIIREGSGSGDPDVARLQELNIELARELLRDVARLQELNIELARELLRAAAELQELNIKLVELASE
LT[DEARKAIARVKRESKPIVEDAERLIREAAAASEKISRTLVTFKDVFVDFTREEWKLLDTAQQIVYRNVMLEN
YKNLVSLGY)]
>3plus1_Cage_Nterm_GFP11_668
(SEQ ID NO: 27278)
DEAKELLDEIRKAVKESEDRLEKLLRDYEKELRRDHMVLHEYVNAAGITLEELRRGSLDAKELLKTLEDLLREVL
EVARRVVETLKELNRRVLEVVREDIERNERLLRRVLDTLRRGGVDERRIKDLERLIRESLKKAEEVLREAAEKSR
EIVDEIREVLKRADEALKRIIKKIRETRGADALSRLLEELLRVVDDLIRVLKELIDKSRKVIEELLELLKRINEE
NLKVLAEIIK
>3plus1_Cage_Cterm_GFP11_668
(SEQ ID NO: 27279)
DEAKELLDEIRKAVKESEDRLEKLLRDYEKELRRLEKELRDLKRRIEEKLEELRRGSLDAKELLKTLEDLLREVL
EVARRVVETLKELNRRVLEVVREDIERNERLLRRVLDTLRRGGVDERRIKDLERLIRESLKKAEEVLREAAEKSR
EIVDEIREVLKRADEALKRIIKKIRETRGADADHMVLHEYVNAAGITIRVLKELIDKSRKVIEELLELLKRINEE
NLKVLAEIIK
>3plus1_Cage_Cterm_GFP11_668
(SEQ ID NO: 27280)
DEAKELLDEIRKAVKESEDRLEKLLRDYEKELRRLEKELRDLKRRIEEKLEELRRGSLDAKELLKTLEDLLREVL
EVARRVVETLKELNRRVLEVVREDIERNERLLRRVLDTLRRGGVDERRIKDLERLIRESLKKAEEVLREAAEKSR
EIVDEIREVLKRADEALKRIIKKIRETRGADARDHMVLHEYVNAAGITRVLKELIDKSRKVIEELLELLKRINEE
NLKVLAEIIK
>3plus1_Cage_Cterm_GFP11_668
(SEQ ID NO: 27281)
DEAKELLDEIRKAVKESEDRLEKLLRDYEKELRRLEKELRDLKRRIEEKLEELRRGSLDAKELLKTLEDLLREVL
EVARRVVETLKELNRRVLEVVREDIERNERLLRRVLDTLRRGGVDERRIKDLERLIRESLKKAEEVLREAAEKSR
EIVDEIREVLKRADEALKRIIKKIRETRGADALSRDHMVLHEYVNAAGITLKELIDKSRKVIEELLELLKRINEE
NLKVLAEIIK
>3plus1_Cage_Nterm_GFP11_668
(SEQ ID NO: 27282)
DEAKELLDEIRKAVKESEDRLEKLLRDYEKELRRLEKELRDLKRRIEEKLEELRRGSLDAKELLKTLEDLLREVL
EVARRVVETLKELNRRVLEVVREDIERNERLLRRVLDTLRRGGVDERRIKDLERLIRESLKKAEEVLREAAEKSR
EIVDEIREVDKRADEALKRIIKKIRDHMVLKEYVNAAGITLRVVDDLIRVLKELIDKSRKVIEELLELLKRINEE
NLKVLAEIIK
>3plus1_Cage_Nterm_GFP11_669
(SEQ ID NO: 27283)
SEKEKLLKESEEEVRRLRRTLEELLRKYREVLERLRDHMVLHEYVNAAGITRLKEVLDRSGLDIDTIIKEVEDLL
KTVLDRLRELLDKIARLTKEAIEVVREIIERIVRHAERVKDELRKGGADKRKLDRVDRLIKENTRHLKEILDRIE
DLVRRSEKKLRDIIREVRRLIEELRKKAEEIKKDPDERLVKTLIEDVERVIKRILELITRVAEDNERVLERIIRE
LTDNLEFHLKIVREIVK
>3plus1_Cage_Nterm_GFP11_670
(SEQ ID NO: 27284)
SEKEDLARKLRKLVEELTREYEELVKKLERLIEEIERDHMVLHEYVNAAGITISEEVRKLGTDERVLKRLLERLR
RIIEEDHELNTELLKRLLDLLKEILDTSRELLKRLLDILRKGVRDEEVLRDLERTLREVLEENERAIEEAERVLR
KVLEDSERAVRDARRVLAEVDKSPTGDEALRKLVELLVEVLRRLIRVNRELVKLLREVLERLLRILRESVKKLKR
LIEKVIKDAT
>3plus1_Cage_Cterm_GFP11_670
(SEQ ID NO: 27285)
SEKEDLARKLRKLVEELTREYEELVKKLERLIEEIEKVSEESVRKLEKLLREISEEVRKLGTDERVLKRLLERLR
RIIEEDHELNTELLKRLLDLLKEILDTSRELLKRLLDILRKGVRDEEVLRDLERTLREVLEENERAIEEAERVLR
KVLEDSERAVRDARRVLAEVDKSPTGDEARDHMVLHEYVNAAGITRVNRELVKLLREVLERLLRILRESVKKLKR
LIEKVIKDAT
>3plus1_Cage_Cterm_GFP11_670
(SEQ ID NO: 27286)
SEKEDLARKLRKLVEELTREYEELVKKLERLIEEIEKVSEESVRKLEKLLREISEEVRKLGTDERVLKRLLERLR
RIIEEDHELNTELLKRLLDLLKEILDTSRELLKRLLDILRKGVRDEEVLRDLERTLREVLEENERAIEEAERVLR
KVLEDSERAVRDARRVLAEVDKSPTGDERDHMVLHEYVNAAGITIRVNRELVKLLREVLERLLRILRESVKKLKR
LIEKVIKDAT
>3plus1_Cage_Cterm_GFP11_670
( SEQ ID NO: 27287)
SEKEDLARKLRKLVEELTREYEELVKKLERLIEEIEKVSEESVRKLEKLLREISEEVRKLGTDERVLKRLLERLR
RIIEEDHELNTELLKRLLDLLKEILDTSRELLKRLLDILRKGVRDEEVLRDLERTLREVLEENERAIEEAERVLR
KVLEDSERAVRDARRVLAEVDKSPTGRDHMVLHEYVNAAGITRLIRVNRELVKLLREVLERLLRILRESVKKLKR
LIEKVIKDAT
>3plus1_Cage_Nterm_GFP11_670
(SEQ ID NO: 27288)
SEKEDLARKLRKLVEELTREYEELVKKLERLIEEIRDHMVLHEYVNAAGITEISEEVRKLGTDERVLKRLLERLR
RIIEEDHELNTELLKRLLDLLKEILDTSRELLKRLLDILRKGVRDEEVLRDLERTLREVLEENERAIEEAERVLR
KVLEDSERAVRDARRVLAEVDKSPTGDEALRKLVELLVEVLRRLIRVNRELVKLLREVLERLLRILRESVKKLKR
LIEKVIKDAT
>3plus1_Cage_Cterm_GFP11_670
(SEQ ID NO: 27289)
SEKEDLARKLRKLVEELTREYEELVKKLERLIEEIEKVSEESVRKLEKLLREISEEVRKLGTDERVLKRLLERLR
RIIEEDHELNTELLKRLLDLLKEILDTSRELLKRLLDILRKGVRDEEVLRDLERTLREVLEENERAIEEAERVLR
KVLEDSERAVRDARRVLAEVDKSPTRDHMVLKEYVNAAGITRRLIRVNRELVKLLREVLERLLRILRESVKKLKR
LIEKVIKDAT
>3plus1_Cage_Nterm_GFP11_670
(SEQ ID NO: 27290)
SEKEDLARKLRKLVEELTREYEELVKKLERLIERDHMVLHEYVNAAGITLREISEEVRKLGTDERVLKRLLERLR
RIIEEDHELNTELLKRLLDLLKEILDTSRELLKRLLDILRKGVRDEEVLRDLERTLREVLEENERAIEEAERVLR
KVLEDSERAVRDARRVLAEVDKSPTGDEALRKLVELLVEVLRRLIRVNRELVKLLREVLERLLRILRESVKKLKR
LIEKVIKDAT
>3plus1_Cage_Nterm_GFP11_670
(SEQ ID NO: 27291)
SEKEDLARKLRKLVEELTREYEELVKKLERLIEEIEKRDHMVLHEYVNAAGITSEEVRKLGTDERVLKRLLERLR
RIIEEDHELNTELLKRLLDLLKEILDTSRELLKRLLDILRKGVRDEEVLRDLERTLREVLEENERAIEEAERVLR
KVLEDSERAVRDARRVLAEVDKSPTGDEALRKLVELLVEVLRRLIRVNRELVKLLREVLERLLRILRESVKKLKR
LIEKVIKDAT
>3plus1_Cage_Nterm_GFP11_670
(SEQ ID NO: 27292)
SEKEDLARKLRKLVEELTREYEELVKKLERLIEEIEKVSEESRDHMVLHEYVNAAGITKLGTDERVLKRLLERLR
RIIEEDHELNTELLKRLLDLLKEILDTSRELLKRLLDILRKGVRDEEVLRDLERTLREVLEENERAIEEAERVLR
KVLEDSERAVRDARRVLAEVDKSPTGDEALRKLVELLVEVLRRLIRVNRELVKLLREVLERLLRILRESVKKLKR
LIEKVIKDAT
>3plus1_Cage_Nterm_GFP11_670
(SEQ ID NO: 27293)
SEKEDLARKLRKLVEELTREYEELVKKLERLIEEIEKVSEESVRDHMVLHEYVNAAGITLGTDERVLKRLLERLR
RIIEEDHELNTELLKRLLDLLKEILDTSRELLKRLLDILRKGVRDEEVLRDLERTLREVLEENERAIEEAERVLR
KVLEDSERAVRDARRVLAEVDKSPTGDEALRKLVELLVEVLRRLIRVNRELVKLLREVLERLLRILRESVKKLKR
LIEKVIKDAT
>3plus1_Cage_Cterm_GFP11_671
(SEQ ID NO: 27294)
SEEEDLLERVKRVLDELIEIVDRNHELNRRVVETSAALVERLLEEVERALETLEREIPGSSLLDKAIKDLRDVLR
RVKEKVKRSIEELKEVLEESRRVLEEVVRKLREVIDRVRRLVEKGVDLRDLIRELKRVLEEAVKLIERLVRLNTR
AAEKDNESLRELVRAIKEALKRAVDAVRKGGLDSRAVKKLDRDHMVLHEYVNAAGITNEELWRALVELNKESVRR
LREIVERVARDLEETAR
>3plus1_Cage_Cterm_GFP11_671
(SEQ ID NO: 27295)
SEEEDLLERVKRVLDELIEIVDRNHELNRRVVETSAALVERLLEEVERALETLEREIPGSSLLDKAIKDLRDVLR
RVKEKVKRSIEELKEVLEESRRVLEEVVRKLREVIDRVRRLVEKGVDLRDLIRELKRVLEEAVKLIERLVRLNTR
AAEKDNESLRELVRAIKEALKRAVDAVRKGGLDSRARDHMVLHEYVNAAGITDVVRRNEELWRALVELNKESVRR
LREIVERVARDLEETAR
>3plus1_Cage_Cterm_GFP11_671
(SEQ ID NO: 27296)
SEEEDLLERVKRVLDELIEIVDRNHELNRRVVETSAALVERLLEEVERALETLEREIPGSSLLDKAIKDLRDVLR
RVKEKVKRSIEELKEVLEESRRVLEEVVRKLREVIDRVRRLVEKGVDLRDLIRELKRVLEEAVKLIERLVRLNTR
AAEKDNESLRELVRAIKEALKRAVDAVRKGGLDSRRDHMVLHEYVNAAGITEDVVRRNEELWRALVELNKESVRR
LREIVERVARDLEETAR
>3plus1_Cage_Cterm_GFP11__671
(SEQ ID NO: 27297)
SEEEDLLERVKRVLDELIEIVDRNHELNRRVVETSAALVERLLEEVERALETLEREIPGSSLLDKAIKDLRDVLR
RVKEKVKRSIEELKEVLEESRRVLEEVVRKLREVIDRVRRLVEKGVDLRDLIRELKRVLEEAVKLIERLVRLNTR
AAEKDNESLRELVRAIKEALKRAVDAVRKGGLRDHMVLHEYVNAAGITKKLEDVVRRNEELWRALVELNKESVRR
LREIVERVARDLEETAR
>3plus1_Cage_Cterm_GFP11_672
(SEQ ID NO: 27298)
DETEEVIKKIAKLIDELIETLKKIVEDSAKLIKELIDLLEEIIKRSADLIRELEKVSKRGDRDRLKKLIDRMRRE
TERALEELRRVIEELKEATEPALKTIEDLIREIEEAIRRELGDEDLAREILEVIRRILELLREDMELNLRALEEI
LRLLEEVIKLNKDAIDEILELLKRDHMVLHEYVNAAGITESKKLVRDVVEEAKRLLKENRDSTRKIIEDIRRLLR
KIEDSTR
>3plus1_Cage_Cterm_GFP11_672
(SEQ ID NO: 27299)
DETEEVIKKIAKLIDELIETLKKIVEDSAKLIKELIDLLEEIIKRSADLIRELEKVSKRGDRDRLKKLIDRMRRE
TERALEELRRVIEELKSATERALKTIEDLIREIEEAIRRSLGDEDLAREILEVIRRILELLREDMELNLRALEEI
LRLLEEVIKLNKDAIDEILELLKGRDHMVLHEYVNAAGITSKKLVRDVVEEAKRLLKENRDSTRKIIEDIRRLLR
KIEDSTR
>3plus1_Cage_Nterm_GFP11_67>3
(SEQ ID N0:27300)
SKEETLRKEAEDLLRRLEELTRRLEKKARELLERAKKLSRDLARDHMVLHEYVNAAGITEELIKVLEEVAKTSID
LNKEVIDVIRRVIEESLELNKRVLDVLRRVLDIAARKGRDKKAIRDVVREAARVIKEVIDEDEKVNRDLKRVIER
VIDDDRKALERLRKAVEEVASRGDDEAAKRLVEELLKAVTDLSRKNKRILEELLKAIETLSDENKKILTEILDAL
RRLVEKIEK
>3plus1_Cage_Nterm_GFP11_67>3
(SEQ IB NO: 27301)
SKEETLRKEAEDLLRRLEELTRRLEKKARELLERAKKLSRRDHMVLHEYVNAAGITGVPEELIKVLEEVAKTSID
LNKEVIDVIRRVIEESLELNKRVLDVLRRVLDIAARKGRDKKAIRDVVREAARVIKEVIDEDEKVNRDLKRVIER
VIDDDRKALERLRKAVEEVASRGDDEAAKRLVEELLKAVTDLSRKNKRILEELLKAIETLSDENKKILTEILDAL
RRLVEKIEK
>3plus1_Cage_Cterm_GFP11_67>3
(SEQ ID NO: 27302)
SKEETLRKEAEDLLRRLEELTRRLEKKARELLERAKKLSRDLAEELKRLLKELREKGVPEELIKVLEEVAKTSID
LNKEVIDVIRRVIEESLELNKRVLDVLRRVLDIAARKGRDKKAIRDVVREAARVIKEVIDEDEKVNRDLKRVIER
VIDDDRKALERLRKAVEEVASRGDDEARDHMVLHEYVNAAGITRKNKRILEELLKAIETLSDENKKILTEILDAL
RRLVEKIEK
>3plus1_Cage_Nterm_GFP11_67>3
(SEQ ID NO: 27303)
SKEETLRKEAEDLLRRLEELTRRLEKKARELLERARDHMVLHEYVNAAGITELREKGVPEELIKVLEEVAKTSID
LNKEVIDVIRRVIEESLELNKRVLDVLRRVLDIAARKGRDKKAIRDVVREAARVIKEVIDEDEKVNRDLKRVIER
VIDDDRKALERLRKAVEEVASRGDDEAAKRLVEELLKAVTDLSRKNKRILEELLKAIETLSDENKKILTEILDAL
RRLVEKIEK
>3plus1_Cage_Nterm_GFP11_67>3
(SEQ ID NO: 27304)
SKEETLRKEAEDLLRRLEELTRRLEKKARELLERAKKLSRDHMVLHEYVNAAGITKGVPEELIKVLEEVAKTSID
LNKEVIDVIRRVIEESLELNKRVLDVLRRVLDIAARKGRDKKAIRDVVREAARVIKEVIDEDEKVNRDLKRVIER
VIDDDRKALERLRKAVEEVASRGDDEAAKRLVEELLKAVTDLSRKNKRILEELLKAIETLSDENKKILTEILDAL
RRLVEKIEK
>3plus1_Cage_Nterm_GFP11_67>3
(SEQ ID NO: 27305)
SKEETLRKSAEDLLRRLEELTRRLEKKARELLERAKKLRDHMVLHEYVNAAGITEKGVPEELIKVLEEVAKTSID
LNKEVIDVIRRVIEESLELNKRVLDVLRRVLDIAARKGRDKKAIRDVVREAARVIKEVIDEDEKVNRDLKRVIER
VIDDDRKALERLRKAVEEVASRGDDEAAKRLVEELLKAVTDLSRKNKRILEELLKAIETLSDENKKILTEILDAL
RRLVEKIEK
>3plus1_Cage_Nterm_GFP11_67>3
(SEQ ID NO: 27306)
SKEETLRKEAEDLLRRLEELTRRLEKKARELLERAKKLSRDLPDHMVLHEYVNAAGITPEELIKVLEEVAKTSID
LNKEVIDVIRRVIEESLELNKRVLDVLRRVLDIAARKGRDKKAIRDVVREAARVIKEVIDEDEKVNRDLKRVIER
VIDDDRKALERLRKAVEEVASRGDDEAAKRLVEELLKAVTDLSRKNKRILEELLKAIETLSDENKKILTEILDAL
RRLVEKIEK
>3plus1_Cage_Nterm_GFP11_674
(SEQ ID NO: 27307)
SEREEVKEKLDRLLEEVEKTVRELKREHDELLKEVEKLVRDLKRDHMVLHEYVNAAGITKEILDVIREKVRTNKE
ILDRVLEVVEEHLRRNKEILDKLLDDIRKVVEDAKRILGIGDDETLRRAVRRILEELRKLVEDIRKKVKDSLETL
ERALEEAEERIRRSLEDLKRVLKEAKDKTKDKDRLDKVEELVKKLLEDTKRTVDRVRELVRKILKKSRETLEELE
RLIEKILRSLEKDAR
>3plus1_Cage_Cterm_GFP11_674
(SEQ ID NO: 27308)
SEREEVKEKLDRLLEEVEKTVRELKREHDELLKEVEKLVRDLKKEHDELLKKVKDDGVPKEILDVIREHVRTNKE
ILDRVLEVVEEHLRRNKEILDKLLDDIRKVVEDAKRILGIGDDETLRRAVRRILEELRKLVEDIRKKVKDSLETL
ERALEEAEERIRRSLEDLKRVLKEAKDKTKDKDRDHMVLHEYVNAAGITKRTVDRVRELVRKILKKSRETLEELE
RLIEKILRSLEKDAR
>3plus1_Cage_Nterm_GFP11_673
(SEQ ID NO: 27309)
SERETVKRRLEELLKEVKRTLDKLKEEHDRLLEDVRRVVSELRDHMVLHEYVNAAGITPEELLRVIAKVLETNKR
ILDDLLRVVKKHVDLNKEILDRILEMIKEIVERVKRVLGDGDEKTLRDKIRDIIRRLEDAAREAEERVRRSLEEL
KKAVEKIRKKIEDSLRELEEALKRVRDKEEDDKRLEDISRLVKRLLDESRRVLRELEETIRKRAEESKRVLEEVK
RLVEKLIRSLPKEAE
>3plus1_Cage_Nterm_GFP11_676
(SEQ ID NO: 27310)
SEDEIIKKIIEDLRRVLKEVEEIHKEVEERLDKRDHMVLHEYVNAAGITDRVLDEVKRIGDVETVLRIAIEAVRR
ALEIVRKVTEDLIRVVRKLLEIVDAVNKRVKKAVEDVLKLLRDTLKGSKDVERVLDEARRLLEKLHRDSRRILKR
IAELLDELKELSERILERIKRLLEEVERRGSDDERLLEELIEELKDLIRRHIELLRRLIERLKELLKKHIEDLRR
LLEEIEKLLEEARK
>3plus1_Cage_Nterm_GFP11_677
(SEQ ID NO: 27311)
SREEVLRELEEVIEDNRRLLEELIEKSKKVLDESLKLIDELLRRDHMVLHEYNNAAGITSKGDDEETARRIVTKI
RKELEDVLDEVRRIVKEILDRDRRVAEDLKRVVDENLEKLKKVLDELDKKLGDRRLVEILRDIVRLLIEINERAL
RELLKLHEEHTRIVAELLRELERVVEELRELVELIARGEISEDDLKRVVDEVEKKLRELKRRYKEALERIKEKIK
ELKDRYERAVREWAELRKTTK
>3plus1_Cage_Cterm_GFP11_677
(SEQ ID NO: 27312)
SREEVLRELEEVIEDNRRLLEELIEKSKKVLDESLKLIDELLRRLEEVLERVLRLLEELSKGDDEETARRIVTKI
RKELEDVLDEVRRIVKEILDRDRRVAEDLKRVVDENLEKLKKVLDELDKKLGDRRLVEILRDIVRLIIEINERAL
RELLKLHEEHTRIVAELLRELERVVEELRRLVELIARGEISEDDRDHMVLHEYVNAAGITRRYKEALERIKEKIK
ELKDRYERAVREWAELRKTTK
>3plus1_Cage_Cterm_GFP11_677
(SEQ ID NO: 27313)
SREEVLRELEEVIEDNRRLLEELIEKSKKVLDESLKLIDELLRRLEEVLERVLRLLEELSKGDDEETARRIVTKI
RKELEDVLDEVRRIVKEILDRDRRVAEDLKRVVDENLEKLKKVLDELDKKLGDRRLVEILRDIVRLLIEINERAL
RELLKLHEEHTRIVAELLRELERVVEELRRLVELIAPGERDHMVLHEYVNAAGITLRELKRRYKEALERIKEKIK
ELKDRYERAVREWAELRKTTK
>3plus1_Cage_Nterm_GFP11_678
(SEQ ID NO: 27314)
SKAEEIAEKLDRLLEENRRALEEITTRLDDLLRRDHMVLHEYVNAAGITLDDLRRGGIREELLKRIADVIRDIMR
LLKELHDHTAEVIKTIKKLLKELHDINKEIIERLKRLKDGNVPKEELLKPVEELVRTSARLTTEVLKTVEKLIRD
DKRLSEEILKRVKELISELKRGVDSERVKEILERILRVVEEAVRLNEESLRRILDVVRKAVKLDRESLKKILDVV
EEAVR
>3plus1_Cage_Cterm_GFP11_678
(SEQ ID NO: 27315)
SKAEEIAEKLDRLLEENRRALEEITTRLDDLLRRNKDALRKVMEKLKRLLDDLRRGGIREELLKRIADVIRDIMR
LLKELHDHTAEVIKTIKKLLKELHDINKEIIERLKRLKDGNVPKEELLKRVEELVRTSARLTTEVLKTVEKLIRD
DKRLSEEILKRVKELIEELRDHMVLHEYVNAAGITLRVVEEAVRLNEESLRRILDVVRKAVKLDRESLKKILDVV
EEAVR
>3plus1_Cage_Nterm_GFP11_678
(SEQ ID NO: 27316)
SKAEEIALKLDRLLEENRRALEEITTRLDDLLRRNKDRDHMVLHEYVNAAGITRRGGIREELLKRIADVIRDIMR
LLKELHDHTAEVIKTIKKLLKELHDINKEIIERLKRLKDGNVPKEELLKRVEELVRTSARLTTEVLKTVEKLIRD
DKRLSEEILKRVKELISELKRGVDSERVKEILERILRVVEEAVRLNEESLRRILDVVRKAVKLDRESLKKILDVV
EEAVR
>3plus1_Cage_Cterm_GFP11_678
(SEQ ID NO: 27317)
SKAEEIAEKLDRLLEENRRALEEITTRLDDLLRIWKDALRKVMEKLKRLLDDLRRGGIREELLKRIADVIRDIMR
LLKELHDHTAEVIKTIKKLLKELHDINKEIIERLKRLKDGNVPKEELLKRVEELVRTSARLTTEVLKTVEKLIRD
DKRLSEEILKRVKELIEELKFGRDHMVLHEYVNAAGITVEEAVRLNEESLRRILDVVRKAVKLDRESLKKILDVV
EEAVR
>3plus1_Cage_Nterm_GFP11_678
(SEQ ID NO: 27318)
SKAEEIAEKLDRLLEENRRALEEITTRLDDLLRRNKRDHMVLHEYVNAAGITLRRGGIREELLKRIADVIRDIMR
LLKELHDHTAEVIKTIKKLLKELHDINKEIIERLKRLKDGNVPKEELLKRVEELVRTSARLTTEVLKTVEKLIRD
DKRLSEEILKRVKELIEELKRGVDSERVKEILERILRVVEEAVRLNEESLRRILDVVRKAVKLDRESLKKILDVV
EEAVR
>3plus1_Cage_Nterm_GFP11_678
(SEQ ID NO: 27319)
SKAEEIAEKLDRLLEENRRALEEITTRLDDLLRRNKDALRDHMVLHEYVNAAGITGGIREELLKRIADVIRDIMR
LLKELHDHTAEVIKTIKKLLKELHDINKEIIERLKRLKDGNVPKEELLKRVEELVRTSARLTTEVLKTVEKLIRD
DKRLSEEILKRVKELIEELKRGVDSERVKEILERILRVVEEAVRLNEESLRRILDVVRKAVKLDRESLKKILDVV
EEAVR
>3plus1_Cage_Cterm_GFP11_679
(SEQ ID NO: 27320)
SPVEELKKLIEDILRISREVVERIKRVAEDIHRINRRVLDDLRKLIEDILRTVEEILARKVGDTEIAERLRDTIA
RVVDEIAKLLEEHEKRSRELLEEIRKLLEDILRRSERAVEEIRELLKKGVSTKDVLRILEEILREHLELLERVVR
RIEEILRELLKTIEEIVKRIKEILEELKEVLKRGRVKDDEVERDHMVLHEYVNAAGITYRRLLEEIKRKLEEILR
RVEELHRRLRRKLEEIDR
>3plus1_Cage_Nterm_GFP11_679
(SEQ ID NO: 27321)
SRVEELKKLIEDILRISREVVERIKRVAEDIKRINRRVRDHMVLHEYVNAAGITEILARKVGDTEIAERLRDTIA
RVVDEIAKLLEEHEKRSRELLEEIRKLLEDILRRSERAVEEIRELLKKGVSTKDVLRI1EEILREHLELLERVVR
RIEEILPELLKTIEEIVKRIKEILEELKEVLKRGRVKDDEVEREIRRVKEDLDRILEEYRRLLEEIKRKLEEILR
RVEELHRRLPRKLEEIDR

[0142] In each embodiment, the N-terminal and/or C-terminal 60 amino acids of each cage polypeptides may be optional, as the terminal 60 amino acid residues may comprise a latch region that can be modified, such as by replacing all or a portion of a latch with a bioactive peptide. In one embodiment, the N-terminal 60 amino acid residues are optional; in another embodiment, the C-terminal 60 amino acid residues are optional: in a further embodiment, each of the N-terminal 60 amino acid residues and the C-terminal 60 amino acid residues are optional. In one embodiment, these optional N-terminal and/or C-terminal 60 residues are not included in determining the percent sequence identity. In another embodiment, the optional residues may be included in determining percent sequence identity.

[0143] As disclosed herein, bioactive peptides to be sequestered by the polypeptides of the disclosure are located within the latch region. The latch region is denoted by brackets in the sequence of each cage polypeptide. The bioactive peptide may be added to the latch region without removing any residues of the latch region, or may replace one or more (1, 2, 3, 4, 5, 6, 7, 8, 9, 10, or more) amino acid residues in the cage scaffold latch region to produce the final polypeptide. Thus, the latch region may be significantly modified upon inclusion of the bioactive peptide. In one embodiment, the optional residues are not included in determining percent sequence identity. In another embodiment, the latch region residues may be included in determining percent sequence identity. In a further embodiment, each of the optional residues and the latch residues are not included in determining percent sequence identity.

[0144] The cage polypeptide including the degron may be a cage scaffold polypeptide (i.e.: without a bioactive peptide) For example, see SEQ ID NOS:1-17, 2034-14317, 27359 ,-28465 and certain cage polypeptides listed in Table 2, Table 3, Table 4, and/or Table 5 or may further include a sequestered bioactive peptide (present as a fusion with the cage scaffold polypeptide) in the latch region of the cage scaffold polypeptide, as described in more detail herein (for example, see SEQ ID NOS:18-49, 51-52, 54-59, 61. 65, 67-2033, 27094-27117, 27120-27125, and certain cage polypeptides listed in Table 2, 3, 4, and/or 5). In a specific embodiment, the cage polypeptides share 40%, 45%, 50% , 55%, 60%, 65%, 70%, 75%, 80%, 85%, 90%, 91%, 92%, 93%, 94%, 95%, 96%, 97%, 98%, 99%, or 100% sequence identity along their length to the amino acid sequence of a cage polypeptide in Table 2, Table 3, Table 4, and/or Table 5, and also comprise one or more degrons.

[0145] In another specific embodiment, the cage polypeptides comprise a polypeptide having at least 40%, 45%, 50%, 55%, 60%, 65%. 70%, 75%, 80%, 85%, 90%. 91%, 92%, 93%, 94%, 95%, 96%, 97%, 98%. 99%, or 100% sequence identity along their length to the amino acid sequence of a cage polypeptide in Table 3, and include one or more degrons. In another specific embodiment, the cage polypeptides share 40%, 45%, 50%, 55%, 60%, 65%, 70%, 75%, 80%, 85%, 90%. 91%, 92%, 93%, 94%, 95%, 96%, 97%, 98%, 99%, or 100% sequence identity along their length to the amino acid sequence of a cage polypeptide in. Table 4, and include one or more degrons. In one embodiment of each of these embodiments, the optional N-terminal and/or C-terminal 60 residues are not included in determining the percent sequence identity. In another embodiment, the optional residues may he included in determining percent sequence identity.

[0146] In another specific embodiment, the cage polypeptides comprise a polypeptide having at least 40%, 45%. 50%, 55%, 60%, 65%, 70%, 75%, 80%, 85%, 90%, 91%, 92%, 93%, 94%, 95%, 96%, 97%, 98%, 99%, or 100% sequence identity along their length to the amino acid sequence of a cage polypeptide selected from the group consisting of SEQ ID NOS: 27359 -28465 or a cage polypeptide listed in Table 7.

[0147] In some aspects, both a latch region and a key polypeptide can bind to or interact with a structural region in the corresponding cage polypeptide. The interaction between a latch region and a structural region in a cage polypeptide can be intramolecular interaction, and the interaction between a key polypeptide and a structural region of the corresponding cage polypeptide can be intermolecular interaction. However, in some aspects, the affinity of the latch region to the structural region of the cage polypeptide is higher than the affinity of the key polypeptide to the structural region of the cage polypeptide in the absence of an effector polypeptide.

[0148] In some aspects, the affinity of the latch region to the structural region of the cage polypeptide is at least about 1.5 fold, at least about 2 fold, at least about 3 fold, at least about 4 fold, at least about 5 fold, at least about 6 fold, at least about 7 fold, at least about 8 fold, at least about 9 fold, at least about 10 fold, at least about 11 fold, at least about 12 fold, at least about 13 fold, at least about 14 fold, at least about 15 fold, at least about 16 fold, at least about 17 fold, at least about 18 fold, at least about 19 fold, at least about 20 fold, at least about 21 fold, at least about 22 fold, at least about 23 fold, at least about 24 fold, at least about 25 fold, at least about 26 fold, at least about 27 fold, at least about 28 fold, at least about 29 fold, or at least about 30 fold higher than the affinity of the key polypeptide to the structural region of the cage polypeptide in the absence of an effector polypeptide. In some aspects, the affinity of the latch region to the structural region of the cage polypeptide is at least about 1.1 fold, at least about 1.2 fold, at least about 1.3 fold, at least about 1.4 fold, at least about 1.5 fold, at least about 1.6 fold, at least about 1.7 fold, at least about 1.8 fold, at least about 1.9 fold, at least about 2.0 fold, at least about 2.1 fold, at least about 2.2 fold, at least about 2.3 fold, at least about 2.4 fold, at least about 2.5 fold, at least about 2.6 fold, at least about 2.7 fold, at least about 2.8 fold, at least about 2.9 fold, or at least about 3.0 fold higher than the affinity of the key polypeptide to the structural region of the cage polypeptide in the absence of an effector polypeptide. In some aspects, the affinity of the latch region to the structural region of the cage polypeptide is at least about 30 fold, at least about 40 fold, at least about 50 fold, at least about 60 fold, at least about 70 fold, at least about 80 fold, at least about 90 fold. at least about 100 fold, at least about 110 fold, at least about 120 fold, at least about 130 fold, at least about 140 fold, at least about 150 fold, at least about 160 fold, at least about 170 fold, at least about 180 fold, at least about 190 fold, at least about 200 fold, at least about 210 fold, at least about 220 fold, at least about 230 fold, at least about 240 fold, at least about 250 fold, at least about 260 fold, at least about 270 fold, at least about 280 fold, at least about 290 fold, at least about 300 fold, e.g., about 30 fold to about 300 fold, e.g., about 100 fold to about 300 fold, about 50 fold to about 100 fold, higher than the affinity of the key polypeptide to the structural region of the cage polypeptide in the absence of an effector polypeptide.

[0149] In other embodiments, the intramolecular Latch-Cage affinity is higher than the intermolecular Key-Cage affinity, and in the presence of the Effector protein, the intermolecular Key-Cage affinity is higher than the intramolecular Latch-Cage affinity. As a result, the function of the bioactive peptide is dependent on the presence of Cage, Key, and Effector protein.

[0150] In certain embodiments, the intermolecular Key-Cage interaction may outcompete the Latch-Cage interaction in the absence of Effector protein. In the absence of Key, the Latch-Cage affinity is higher than the Latch-Effector protein affinity (via binding of the Bioactive peptide to the Effector protein), and in the presence of Key, the Latch-Effector protein affinity (via binding of the Bioactive peptide to the Effector protein) is higher than the Latch-Cage affinity. As a result, the function of the bioactive peptide is dependent on the presence of Cage, Key, and Effector protein.

[0151] As disclosed in the examples that follow, exemplary cage (and key) polypeptides of the disclosure have been identified and subjected to mutational analysis. Furthermore, different designs starting from the same exemplary cage and key polypeptides yield different amino acid sequences while maintaining the same intended function. In various embodiments, a given amino acid can be replaced by a residue having similar physiochemical characteristics, e.g., substituting one aliphatic residue for another (such as Ile, Val, Leu, or Ala for one another), or substitution of one polar residue for another (such as between Lys and Arg, Glu and Asp; or Gln and Asn). Other such conservative substitutions, e.g., substitutions of entire regions having similar hydrophobicity characteristics, are known. Polypeptides comprising conservative amino acid substitutions can be tested in any one of the assays described herein to confirm that the desired activity is retained. Amino acids can be grouped according to similarities in the properties of their side chains (in A. L, Lehninger, in Biochemistry, second ed., pp. 73-75, Worth Publishers, New York (1975)): (1) non-polar: Ala (A), Val (V). Leu (L), Ile (I), Pro (P), Phe (F), Trp (W), Met (M); (2) uncharged polar: Gly (G), Ser (S), Thr (T), Cys (C), Tyr (Y), Asn (N), Gin (Q); (3) acidic: Asp (D), Glu (E); (4) basic: Lys (K), Arg (R), His (H). Alternatively, naturally occurring residues can be divided into groups based on common side-chain properties: (1) hydrophobic: Norleucine, Met, Ala, Val, Leu, Ile; (2) neutral hydrophilic: Cys, Ser, Thr, Mn, Gin; (3) acidic: Asp, Glu, (4) basic: His, l.ys, Arg; (5) residues that influence chain orientation: Gly, Pro; (6) aromatic: Trp, Tyr, Phe. Non-conservative substitutions will entail exchanging a member of one of these classes for another class. Particular conservative substitutions include, for example; Ala into Gly or into Ser; Arg into Lys; Asn into Gin or into H is; Asp into Glu; Cys into Ser; Gin into Asn; Glu into Asp; Gly into Ala. or into Pro; His into Asn or into Gln; Ile into Leu or into Val; Leu into Ile or into Val; Lys into Arg, into Gln or into Glu; Met into Leu, into Tyr or into Ile; Phe into Met, into Leu or into Tyr; Ser into Thr; Thr into Ser; Trp into Tyr; Tyr into Trp; and/or Phe into Val, into Ile or into Leu.

[0152] In a second aspect, the disclosure provides kits comprising:
[0153] (a) the cage polypeptide of any embodiment or combination of embodiments of the first aspect; and
[0154] (b) a key polypeptide capable of binding to the cage polypeptide structural region, thereby displacing the latch region and activating the one or more degron.

[0155] In a third aspect, the disclosure provides degron LOCKR switches comprising:
[0156] (a) the cage polypeptide of any embodiment or combination of embodiments of the eleventh aspect; and
[0157] (b) a key polypeptide capable of binding to the cage polypeptide structural region, thereby displacing the latch region and activating the one or more degron.

[0158] As disclosed in detail herein, when a key is expressed and activates the cage polypeptide by interacting with the structural region and displacing the latch region from its interaction with the structural region (i.e.: via higher affinity binding than the latch region), the degron targets the cage polypeptide, and any functional polypeptide domains fused to the cage polypeptide, for degradation. In this way, a functional polypeptide domain of interest fused to the cage polypeptide having a degron can be conditionally degraded in a titratable manner via expression of the key.

[0159] In one embodiment of the kits and degron LOCKR switches of the second and third aspects, the key polypeptide comprises an amino acid sequence having at least 45%, 50%, 55%, 60%, 65%, 70%, 75%, 80%, 85%, 90%, 91%, 92%, 93%, 94%, 95%, 96%, 97%, 98%, 99%, or 100% sequence identity along the length of the amino acid sequence of a key protein selected from (not including optional amino acid residues) SEQ II) NOS: 14318-26601, 26602-27015, 27016-27050, 27322 to 27358, and key polypeptides in Table 2 or 5 (polypeptides with an odd-numbered SEQ ID NO between SEQ ID NOS: 27127 and 27277), Table 3, and/or Table 4, not including optional amino acid residues. As noted, key polypeptides may include residues that are optional; these residues are provided in parentheses and in one embodiment are not included in determining the percent sequence identity. In another embodiment, the optional residues may be included in determining percent sequence identity.

[0160] In another embodiment, the key polypeptides comprise a polypeptide having at least 40%, 45%, 50%, 55%, 60%, 65%, 70%, 75%, 80%, 85%, 90%, 91%, 92%, 93%. 94%, 95%, 96%, 97%, 98%. 99%, or 100% sequence identity along its length to the amino acid sequence of a key polypeptide selected from the group consisting of SEQ_{.} ID NOS: 26602-27050, and 27322-27358. and 28477-28486 as detailed below.

Amino Acid Sequences of Additional
Keys for degronLOCKRs
(SEQ ID NOs: 28477-28486)
>key_a
(SEQ ID NO: 28177)
EARKAIARVKRESKRIVEDAERLIREAAA
ASEKISREAERLIREAAAASEKISRE
>key_a_m4
(SEQ ID 240: 28478)
DEARKAIARVKRESKRIVEDAERLIREAA
AASEKISREAERLIREAAAASEK
>key_a_m9
(SEQ ID NO: 23479)
DEARKAIARVKRESKRIVEDAERLIREAA
AASEKISREAERLIREAAK
>key_a_m12
(SEQ ID NO: 28480)
DEARKAIARVKRESKRIVEDAERLIREAA
AASEKISREAERLIR
>key_a_m15
(SEQ ID NO: 28481)
DEARKAIARVKRESKRIVEDAERLIREAA
AASEKISREAER
>key_b
(SEQ ID NO: 28432)
NKEEIEKLAKEAREKLKKAEKEHKEIHDK
LRKKNKKAREDLKKKADELRETNKRVN
>key c
(SEQ ID NO: 28483)
SSEKVRRELKESLKENHKQNQKLLKDHKR
AQEKLNRELEELKKKHKKTLDDIRRES
>key_d
(SEQ ID NO: 28484)
DTVKRILEELRRRFEKLAKDLDDIARKLL
EDHKKHNKELKDKQRKIKKEADDAARS
>key_d_m4
(SEQ ID NO: 23485)
RILEELRRRFEKLAKDLDDIARKLLEDHK
KHNKELKDKQRKIKKEADDAARS
>key_d_m7
(SEQ ID NO: 28486)
EELRRRFEKLAKDLDDIARKLLEDHKKHN
KELKDKQRKIKKEADDAARS

[0161] Ley sequences are normal text
[0162] 6His-MBP-TEV. 6His-TEV, and flexible linker sequences are underlined text
[0163] sequence in bold, italics, are optional residues necessary for biotinylation of MBP_key
[0164] all sequences in parentheses are optional
[0165] Any number of consecutive amino acids from the N or C terminus in the non-optional key sequence may be removed to tune responsiveness

>SB76 C-helix
(SEQ ID NO: 27016)
DEARKAIAPNERESKRIVEDAERLIREAAAASEKIS
>SB73_C-helix-biotin
(SEQ ID NO: 27017)
DEARKAIARVKPESKRIVEDAERLIREAAAASEKIS
GSGK-Biotin
>pb_MBP
(SEQ ID NO: 27018)
(MDP)DEARKAIARVKRESKRIVEDAERLIREAAA
ASEKISREA(SSGLVPRGSHMKIEEGKLVIWINGD
KGYNGLAEVGKKFEKDTGIKVTVEHPDKLEEKFPQ
VAATGDGPDIIFWAHDREGGYAQSGELAEITEDKA
FQDKLYPFTWDAVRYNGKLIAYPIAVEALSLIYNK
DLLPNPPKTWEEIPALDKEDKAKGKSALMENLQEP
YFTWPLIAADGGYAFKYENGKYDIKDVGVDNAGAK
AGLTFLVDLIKNKHMNADTDYSIAEAAFNKGETAM
TINGPWAWSNIDTSKVNYGVTVLPTFKGQPSKPFV
GVLSAGINAASPNKELAKEFLENYLLTDEGLEAVN
KDKPLGAVADKSYEEELVKDPRIAATMENAQKGEI
MPNIPQMSAFWYAVRTAVINAASGRQTVDEALKDA
QTNSSGSGLNDIFEAQ [symbol] IEWHEDEHHHHHH)
> p9_1BP
(SEQ ID NO: 27019)
(MDP)DEARKAIARVKRESKRIVEDAERLIREAAA
ASEKISREAERLIREAA(SSGLVPRGSHMKIEEGK
LVIWINGDKGYNGLAEVGKKFEKDTGTKVTVEHPD
KLEEKFPQVAATGDGPDIIFWAHDRFGGYAQSGLL
AEITPDKAFQDKLYPFTWDAVPYNGKLIAYPIAVE
ALSLIYNKDLLPNPPKTWEEIPALDKELKAKGKSA
LMENLQEPYFTWPLIAADGGYAFKYENGKYDIKDV
GVDNAGAKAGLTFLVDLIKNKHMNADTDYSIAEAA
FNKGETAMTINGPWAWSNIDTSKVNYGVTVLPTFK
GQPSKPFVGVLSAGINAASPNKELAKEFDENYLLT
DEGLEAVNKDKPLGAVALKSYEEELVKDPRIAATM
ENAQKGEIMPNIPQMSAFWYAVRTAVINAASGRQT
VDEALKDAQTNSSGSGLNDIFEAQ [symbol] IEWHE
LEHHHHHH)
>p16MBP
(SEQ ID NO: 27020)
(MDP)DEARKAIARVKRESKRIVEDAERLIREAAA
ASEKISREAERLIREAAAASEKISRE(SSGLVPRG
SHMKIEEGKLVIWINGDKGYNGLAEVGKKFEKDTG
IKVTVEHPDKLEEKFPQVAATGDGPDIIFWAHDRF
GGYAQSGLLAEITPDKAFQDKLYPFTWDAVRYNGK
LIAYPIAVEALSLIYNKDLLPNPPKTWEEIPALDK
ELKAKGKSALMENLQEPYFTWPLIAADGGYAFKYE
NGKYDIKDVGVDNAGAKAGLTFLVDLIKNKHMNAD
TDYSIAEAAFNKGETAMTINGPWAWSNIDTSKVNY
GVTVLPTFKGQPSKPTVGVLSAGINAASPNKELAK
EFLENYLLTDEGLEAVNKDKPLGAVALKSYEEELV
KDPRIAATMENAQKGEIMPNIPQMSAFWYAVRTAV
INAASGRQTVDEALKDAQTNSSGSGLNDIFEA
Q [symbol] IEWHELEHHHHHH)
>MBP_p18 (aka. p76)
(SEQ ID 140: 27021)
(MGSSHHHHHASSGLVPRGSHMKIEEGKLVIWING
DKGYNGLAEVGKKFEKDTGIKVTVEHPDKLEEKFP
QVAATGDGETIIFWAHDREGGYAQSGLLAEITPDK
NFODKLYPFTWDAVRYNGKLIAYPIAVEALSLIYN
KDLLPNPPKTWEEIPALDKELKAKGKSALMENLQE
PYFTWPLIAADGGYAFKYENGKYDIKDVGVDNAGA
KAGLTFINDLIKNKHMNADTDYSTAEAAFNKGETA
MTINGPWAWSNIDTSKVNYGVTVLPTEKGQPSKPF
VGVLSAGINAASPNKELAKEFLENYLLTDEGLEAV
NKDKPLGAVALKSYEEELVKDPRIAATMENAQKGE
IMPNIPQMSAFWYAVRTAVINAASGRQTVDEALKD
AQTNSGSGSGENLYFQ)DEARKAIARVKRESKRIV
EDAERLIREAAAASEKISRE(AERLIREAAAASEK
ISRE)
>key_b
(SEQ ID NO: 27022)
(M)NKEEIEKLAKEAREKEKLKAEKEHKEIHDKLR
KKNKKAREDLKKKADELPETNKRVN(GSENLYFGS
GSGKIEEGKLVIWINGDKGYNGLAEVGKKFEKDTG
IKVTVEHPDKLEEKFPQVAATGDGPDIIFWAHDRF
GGYAQSGLLAEITPDKAFQDKLYPFTWDAVRYNGK
LIAYPIAVEALSLIYNKDLLPNPPKTWEEIPALDK
ELKAKGKSALMENLQEPYFTWPLIAADGGYAFKYE
NGKYDIKDVGVDNAGAKAGLTFLVDLIKNKHMNAD
TDYSIAEAAFNKGETAMTINGPWAWSNIDTSKVNY
GVTVLPTFKGQPSKPTVGVLSAGINAASPNKELAK
EFLENYLLTDEGLEAVNKDKPLGAVALKSYEEELV
KDPRIAATMENAQKGEIMPNIPQMSAFWYAVRTAV
INAASGRQTVDEALKDAQTNLEHHHHHH)
>key_c
(SEQ ID NO: 27023)
(M)SSEKVRRELKESLKENHKQNQKLLKDHKRAQE
KLNRELEELKKKHKKTLDDIRRES(GSENLYFQGS
GSGKIEEGKLVIWINGDKGYNGLAEVGKKFEKDTG
IKVTVEHPDKLEEKFPQVAATGDGPDIIFWAHDRF
GGYAQSGLLAEITPDKAFQDKLYPFTWDAVRYNGK
LIAYPIAVEALSLIYNKDLLPNPPKTWEEIPALDK
ELKAKGKSALMENLQEPYFTWPLIAADGGYAFKYE
NGKYDIKDVGVDNAGAKAGLTFLVDLIKNKHMNAD
TDYSIAEAAFNKGETAMTINGPWAWSNIDTSKVNY
GVTVLPTFKGQPSKPTVGVLSAGINAASPNKELAK
EFLENYLLTDEGLEAVNKDKPLGAVALKSYEEELV
KDPRIAATMENAQKGEIMPNIPQMSAFWYAVRTAV
INAASGRQTVDEALKDAQTNLEHHHHHH)
>key_d
(SEQ ID NO: 27024)
(M)DTVKRILEELRRRFEKLAKDLDDIARKLLEDH
KKHNKELKDKQRKIKKEADDAARS(GSENLYFQGS
GSGKIEEGKLVIWINGDKGYNGLAEVGKKFEKDTG
IKVTVEHPDKLEEKFPQVAATGDGPDIIFWAHDRF
GGYAQSGLLAEITPDKAFQDKLYPFTWDAVRYNGK
LIAYPIAVEALSLIYNKDLLPNPPKTWEEIPALDK
ELKAKGKSALMENLQEPYFTWPLIAADGGYAFKYE
NGKYDIKDVGVDNAGAKAGLTFLVDLIKNKHMNAD
TDYSIAEAAFNKGETAMTINGPWAWSNIDTSKVNY
GVTVLPTFKGQPSKPTVGVLSAGINAASPNKELAK
EFLENYLLTDEGLEAVNKDKPLGAVALKSYEEELV
KDPRIAATMENAQKGEIMPNIPQMSAFWYAVRTAV
INAASGRQTVDEALKDAQTNLEHHHHHH)
>key_e
(SEQ ID NO: 27025)
(M)DDVERRLEKANKESKKEAEELTEEAKKANEKTK
EDSKELTKENRKTNKTIKDEARS(GSENLYFQGSG
SGKIEEGKLVIWINGDKGYNGLAEVGKKFEKDTGI
KVTVEHPDKLEEKFPQVAATGDGPDIIFWAHDREG
GYAQSGLLAEITPDKAFQDKLYPFTWDAVRYNGKL
IAYPIAVEALSLIYNKDLLPNPPKTWEEIPALDKE
LKAKGKSALMENLQEPYFTWPLIAADGGYAFKYEN
GKYDIKDVGVDNAGAKAGLTFLVDLIKNKHMNADT
DYSIAEAAFNKGETAMTINGPWAWSNIDTSKVNYG
VTVLPTFKGQPSKPTVGVLSAGINAASPNKELAKE
FLENYLLTDEGLEAVNKDKPLGAVALKSYEEELVK
DPRIAATMENAQKGEIMPNIPQMSAFWYAVRTAVI
NAASGRQTVDEALKDAQTNLEHHHHHH)
>key_f
(SEQ ID NO: 27026)
(M)DDEERRSEKTVQDAKREIKKVEDDLQRLNEEQ
KKKVKKQEDENQKTLKKHKDDARS(GSENLYEQGS
GSGKIEEGKLVIWINGDKGYNGLAEVGKKFEKDTG
IKVTVEHPDKLEEKFPQVAATGDGPDIIFWAHDRF
GGYAQSGLLAEITPDKAFQDKLYPFTWDAVRYNGK
LIAYPIAVEALSLIYNKDLLPNPPKTWEEIPALDK
ELKAKGKSALMENLQEPYFTWPLIAADGGYAFKYE
NGKYDIKDVGVDNAGAKAGLTFLVDLIKNKHMNAD
TDYSIAEAAFNKGETAMTINGPWAWSNIDTSKVNY
GVTVLPTFKGQPSKPTVGVLSAGINAASPNKELAK
EFLENYLLTDEGLEAVNKDKPLGAVALKSYEEELV
KDPRIAATMENAQKGEIMPNIPQMSAFWYAVRTAV
INAASGRQTVDEALKDAQTNLEHHHHHH)

### Additional Keys:

[0166] Key Sequences are Normal Text
[0167] (6His-MBP-TEV, 6His-TEV, and flexible linker sequences are underlined text)
[0168] (Co-localization domain is bolded text)
[0169] (Positions that can be mutated to any amino acid to tune responsiveness are underlined bolded text. These are exemplary but not exhaustive.)
[0170] Any number of consecutive amino acids from the N or C terminus in the non-optional key sequence may be removed to tune responsiveness)

[0171] (all sequences in parentheses are optional)

>p76-long
(SEQ ID NO: 27027)
(MGSSHHHHHHSSGLVPRGSHMKIEEGKLVIWINGDKGYNGLAEVGKKFEKDTGIKVTVEHPDKLEEKFPQVAAT
GDGPDIIFWAHDRFGGYAQSGLLAEITPDKAFQDKLYPFTWDAVRYNGKLIAYPIAVEALSLIYNKDLLPNPPKT
WEEIPALDKELKAKGKSALMFNLQEPYFTWPLIAADGGYAFKYENGKYDIKDVGVDNAGAKAGLTFLVDLIKNKH
MNADTDYSIAEAAFNKGETAMTINGPWAWSNIDTSKVNYGVTVLPTFKGQPSKPFVGVLSAGINAASPNKELAKE
FLENYLLTDEGLEAVNKDKPLGAVALKSYEEELVKDPRIAATMENAQKGEIMPNIPQMSAFWYAVRTAVINAASG
RQTVDEALKDAQTNSGSGSGENLYFQ)DEARKAIARVKRESKRIVEDAERLIREAAAASEKISREAERLIREAAA
ASEKISPE
>p76-short
(SEQ ID NO: 27028)
(MGSSHHHHHHSSGLVPRGSHMKIEEGKLVIWINGDKGYNGLAEVGKKFEKDTGIKVTVEHPDKLEEKFPQVAAT
GDGPDIIFWAHDRFGGYAQSGLLAEITPDKAFQDKLYPFTWDAVRYNGKLIAYPIAVEALSLIYNKDLLPNPPKT
WEEIPALDKELKAKGKSALMFNLQEPYFTWPLIAADGGYAFKYENGKYDIKDVGVDNAGAKAGLTFLVDLIKNKH
MNADTDYSIAEAAFNKGETAMTINGPWAWSNIDTSKVNYGVTVLPTFKGQPSKPFVGVLSAGINAASPNKELAKE
FLENYLLTDEGLEAVNKDKPLGAVALKSYEEELVKDPRIAATMENAQKGEIMPNIPQMSAFWYAVRTAVINAASG
RQTVDEALKDAQTNSGSGSGENLYFQ)DEARKAIARVKRESKRIVEDAERLIREWASEKISREAERLIR
>k76-long
(SEQ ID NO: 27029)
(MGSSHHHHHHSSGLVPRGSHMKIEEGKLVIWINGDKGYNGLAEVGKKFEKDTGIKVTVEHPDKLEEKFPQVAAT
GDGPDIIFWAHDRFGGYAQSGLLAEITPDKAFQDKLYPFTWDAVRYNGKLIAYPIAVEALSLIYNKDLLPNPPKT
WEEIPALDKELKAKGKSALMFNLQEPYFTWPLIAADGGYAFKYENGKYDIKDVGVDNAGAKAGLTFLVDLIKNKH
MNADTDYSIAEAAFNKGETAMTINGPWAWSNIDTSKVNYGVTVLPTFKGQPSKPFVGVLSAGINAASPNKELAKE
FLENYLLTDEGLEAVNKDKPLGAVALKSYEEELVKDPRIAATMENAQKGEIMPNIPQMSAFWYAVRTAVINAASG
RQTVDEALKDAQTNSGSGSGENLYFQ)DEARKAIARVKRESKRIVEDAERLIREAAQASEKISREARELIERAAQ
ASEKISRE
>k76-short
(SEQ ID NO: 27030)
(MGSSHHHHHHSSGLVPRGSHMKIEEGKLVIWINGDKGYNGLAEVGKKFEKDTGIKVTVEHPDKLEEKFPQVAAT
GDGPDIIFWAHDRFGGYAQSGLLAEITPDKAFQDKLYPFTWDAVRYNGKLIAYPIAVEALSLIYNKDLLPNPPKT
WEEIPALDKELKAKGKSALMFNLQEPYFTWPLIAADGGYAFKYENGKYDIKDVGVDNAGAKAGLTFLVDLIKNKH
MNADTDYSIAEAAFNKGETAMTINGPWAWSNIDTSKVNYGVTVLPTFKGQPSKPFVGVLSAGINAASPNKELAKE
FLENYLLTDEGLEAVNKDKPLGAVALKSYEEELVKDPRIAATMENAQKGEIMPNIPQMSAFWYAVRTAVINAASG
RQTVDEALKDAQTNSGSGSGENLYFQ)DEARKAIARVKRESKRIVEDAERLIREAAQASEKISREAERLIR
>p76_GLISE
(SEQ ID NO: 27031)
(MGSHHHHHHGSGSENLYFQGSGGS)DEARKAIARVKRSSKRIVEDAEGLISEAAAASEKISREAERLIREAAAA
SEKISRE
>p76_GSSEKIS
(SEQ ID NO: 27032)
(MGSHHHHHHGSGSENLYFQGSGGS)DEARKAIARVKRSSRRIVEDAERLIREAAGSSEKISREAERLIREAAAA
SEKISRE
p76_R26G
(SEQ ID NO: 27033)
(MGSHHHHHHGSGSENLYFQGSGGS)DEARKAIARVKRESKRIVEDAERLIGEAAAASEKISREAERLIREAAAA
SEKISRE
>p76-short_E19G
(SEQ ID NO: 27034)
(MGSHHHHHHGSGSENLYFQGSGGS)DEARKAIARVKRESKRIVGDAERLIREANANSEKISREAERLIR
>p76-short_GLISE_E01_EGFR
(SEQ ID NO: 27035)
(MGSHHHHHHGSGSENLYFQGSGGS)DEARKAIAPVKRESKRIVEDAEGLISEPAAASEKISREAERLIR
>p76-short_AE_EGFP
(SEQ ID NO: 27036)
(MGSHHHHHHGSGSENLYFQGSGGS)DEARKNIARVAEESKRIVEDAERLIRENANASEKISREAERLIR
>p76-short_AAE_EGFR
(SEQ ID NO: 27037)
(MGSHHHHHHGSGSENLYFQGSGGS)DEAAKAIARVAEESKRIVEDAERLIREAAAASEKISREAERLIR
>p76-short_EE_EGFR
(SEQ ID NO: 27038)
(MGSHHHHHHGSGSENLYFQGSGGS)DEARKAIARVKRESKRIVEDAERLIREAAEASEEISREAERLIR
>p76-spytag
(SEQ ID NO: 27039)
(MGSHHHHHHGSGSENLYFQGSGGSMKIEEGKLVIWINGDKGYNGLAEVGKKFEKDTGIKVTVEHPDKLEEKFPQ
VAATGDGPDIIFWAHDRFGGYAQSGLLAEITPDKAFQDKLYPFTWDAVRYNGKLIAYPIAVEALSLIYNKDLLPN
PPKTWEEIPALDKELKAKGKSALMFNLQEPYFTWPLIAADGGYAFKYENGKYDIKDVGVDNAGAKAGLTFLVDLI
KNKHMNADTDYSIAEAAFNKGETAMTINGPWAWSNIDTSKVNYGVTVLPTFKGQPSKPFVGVLSAGINAASPNKE
LAKEFLENYLLTDEGLEAVNKDKPLGAVALKSYEEELVKDPRIAATMENAQKGEIMPNIPQMSAFWYAVRTAVIN
AASGRQTVDEALKDAQTNSGSGSGENLYFQ)DEARKAIARVKRESKRIVEDAERLIREAAAASEKISREAERLIR
EAAAASEKISRE(GGGSGSGSGSGKPGQASGS)AHIVMVDAYKPTK
>p76-short-3pytag
(SEQ ID NO: 27040)
(MGSHHHHHHGSGSENLYFQGSGGSMKIEEGKLVIWINGDKGYNGLAEVGKKFEKDTGIKVTVEHPDKLEEKFPQ
VAATGDGPDIIFWAHDRFGGYAQSGLLAEITPDKAFQDKLYPFTWDAVRYNGKLIAYPIAVEALSLIYNKDLLPN
PPKTWEEIPALDKELKAKGKSALMFNLQEPYFTWPLIAADGGYAFKYENGKYDIKDVGVDNAGAKAGLTFLVDLI
KNKHMNADTDYSIAEAAFNKGETAMTINGPWAWSNIDTSKVNYGVTVLPTFKGQPSKPFVGVLSAGINAASPNKE
LAKEFLENYLLTDEGLEAVNKDKPLGAVALKSYEEELVKDPRIAATMENAQKGEIMPNIPQMSAFWYAVRTAVIN
AASGRQTVDEALKDAQTNSGSGSGENLYFQ)DEARKAIARVKRESKRIVEDAERLIREAAAASEKISREAERLIR
(GGGSGSGSGSGKPGQASGS)AHIVMVDAYKPTK
>sfGFP_VMAn_p18
(SEQ ID NO: 27041)
(MGSSHHHHHHSSGLVPRGSHMSKGEELFTGVVPILVELDGDVNGHKFSVRGEGEGDATNGKLTLKFICTTGKLP
VPWPTLVTTLTYGVQCFARYPDHMKQHDFFKSAMPEGYVQERTISFKDDGTYKTRAEVKFEGDTLVNRIELKGID
FKEDGNILGHKLEYNFNSHNVYITADKQKNGIKANFKIRHNVEDGSVQLADHYQQNTPIGDGPVLLPDNHYLSTQ
SVLSKDPNEKRDHMVLLEFVTAAGITHGMDELYKSGSGSGCFAKGTNVLMADGSIECIENIEVGNKVMGKDGRPR
EVIKLPRGRETMYSVVQKSQHRAHKSDSSREVPELLKFTCNATHELVVRTPRSVRRLSRTIKGVEYFEVITFEMG
QKKAPDGRIVELVKEVSKSYPISEGPERANELVESYRKASNKAYFEWTIEARDLSLLGSHVRKATYQTYAPILYG
GSGGS)DEARKAIARVKRESKRIVEDAERLTREAAAASEKISREAERLIREAAAASEKISRE
>p18_VMAc_mCherry
(SEQ ID NO: 27042)
(MGSHHHHHHGSGSENLYFQGSG)DEARKAIARVKRESKRIVEDAERLIREAAAASEKISREAERLIREAAAASE
KISRE(GSGGSGSGGGVLLNVLSKCAGSKKFRPAPAAAFARECRGFYFELQELKEDDYYGITLSDDSDHQFLLAN
QVVVHNCGSGGSVSKGEEDNMAIIKEEKRFKVHMEGSVNGHEFEIEGEGEGRPYEGTQTAKLKVTKGGPLPFAWD
ILSPQFMYGSKAYVKHPADIPDYLKLSFPEGFKWERVMNFEDGGVVTVTQDSSLQDGEFIYKVKLRGTNFPSDGP
VMQKKTMGWEASSERHYPEDGALKGEIKQRLKIKDGGHYDAEVKTTYKAKKPVQLPGAYNVNIELDITSHNEDYT
IVEQYERAEGRHSTGGMDELYK)
(Cognate Keys for 2plus1 and 3plus1 STREPII-LOCKR functional Cage designs):
>2plus1_KEY_100000.fasta alt STREP_2plus1_1
(SEQ ID NO: 27043)
DKVRKVAEVAEKVLRDIDKLDRESKEAFRRTNGEISKLDEDTRRVAERVKKAIEDLAK
>2p1us1_KEY_2
(SEQ ID NO: 27044)
SEVDEIIADNERALDEVRREVEEIDKENAERLKEWVEEAREILDRLAKALEEIR
>2p1us1_KEY_3
(SEQ ID NO: 27045)
PEEALSKTIKDRDIVKKVKDELKEWRDRNKELVDRLSEELKEWLKDVERVLKELTDKDR
>2pius1_KEY_4
(SEQ ID NO: 27046)
DERVREELKKLLTRVEEEHRKVLETDKKILKEARKESKEVNDPDRELLERLEESVR
>3p1us1_KEY_1
(SEQ ID NO: 27047)
SRLVKKIDEIV-KEVAKKLEDVVRANEELWRKLVELNKESVARLREAVERVARDLEETAR
>3p1us1_KEY_2
(SEQ ID NO: 27048)
SDEEPLEKVVKEVIEKVRRILEKWKKDIDKVVKELRRILEEWEKIIREVLDKVR
>3pEus1_KEY_3
(SEQ ID NO: 27049)
DKDAVIKVIEKLIPANAAVWDAIIKINEDLVIWNKTVWKELLRVNEKLARDLERVVK
>3plus1_KEY_4
(SEQ ID NO: 27050)
SLVDELRKSLERNVRVSEEVARRLKEALKRWVDVVRKVVEDLIRLNEDVVRVVEK
SEQ ID NOs: 26,602-27,015:
>3plus1_GFP11_Key_Cterm_1
(SEQ ID NO: 26602)
SGSKEVDDILERAVEVVRRVIKALKEVLERHVDATREVIERVKRVNKRLLEAVREVVT
>3plus1_GFP11_Key_Cterm_2
(SEQ ID NO: 26603)
GVPEEIDRELKPVVEELRRLHEEIKERLDDVARRSEEELRRIIKKLKEVVKEIRKKLK
>3plus1_GFP11_Key_Cterm_3
(SEQ ID NO: 26604)
DLLRKLEEELRRIKEKLRKALEELEREHRELEKELDKLHDESRKEHERIEEELRR
>3plus1_GFP11_Key_Cterm_4
(SEQ ID NO: 26605)
DEDLLEKIKRVIREHIKALEKLARDLKEILRRHIEALKELARDLAEVIRKLLEDVKR
>3plus1_GFP11_Key_Cterm_5
(SEQ ID NO: 26606)
DLERLRRKVEELEDRLRRDLEKLARDSAELMRELERILDRYARESEELDRRDAE
>3plus1_GFP11_Key_Cterm_6
(SEQ ID NO: 26607)
DLEDILPKNLDRLRKLLERLREILRENLEALKKTLKRLEDVVRREIEDLKRERK
>3plus1_GFP11_Key_Cterm_7
(SEQ ID NO: 26608)
DLERLRRKVEELEDRLRRLLEKLARDSAELMRELERILDRYARESEELDRRLAE
>3plus1_GFP11_Key_Cterm_8
(SEQ ID NO: 26609)
SGSKEVLDILERAVEVVRRVIKALKEVLERHVDATREVIERVKRVNKRLLEAVREVVT
>3plus1_GFP11_Key_Cterm_9
(SEQ ID NO: 26610)
DIERLRRKVEELEDRLRRLLEKLARDSAELMRELERILDRYARESEELDRRLAE
>3plus1_GFP11_Key_Cterm_10
(SEQ ID NO: 26611)
RLIEEVVRLLRENLDVVRRILEALAKLIKELLEALEEVLRRNKELIRELLRVLDEALK
>3plus1_GFP11_Key_Cterm_11
(SEQ ID NO: 26612)
DIVRAMEEVIRRLIEILRRDVELNLDVAKKLLELLKEDSKLNLDVARELLELDDR
>3plus1_GFP11_Key_Cterm_12
(SEQ ID NO: 26613)
DIVRAMEEVIRRLIElLRRDVELNLDVAKKLLELLKEDSKLN1DVARELLELLDR
>3plus1_GFP11_Key_Cterm_13
(SEQ ID NO: 26614)
RLIEEVVRLLRENLDVVRRILEALAKLIKELLEALEEVLRRNKELIRELLRVLDEALK
>3plus1_GFP11_Key_Cterm_14
(SEQ ID NO: 26615)
RLIEEVVRLLRENLDVVRRILEALAKLIKELLEALEEVLRRNKELIRELLRVLDEALK
>3plus1_GFP11_Key_Cterm_15
(SEQ ID NO: 26616)
DLLRKLEEELRRIKEKLRKALEELEREHRELEKELDKLHDESRKEHERIEEELRR
>3plus1_GFP11_Key_Cterm_16
(SEQ ID NO: 26617)
DLLRKLEEELRRIKEKLRKALEELEREHRELEKELDKLHDESRKEHERIEEELRR
>3plus1_GFP11_Key_Cterm_17
(SEQ ID NO: 26618)
ELAREVERVIKELLDKSKEILERIERAIDELLKVSEEILKLSEDASEELLKILREFAK
>3plus1_GFP11_Key_Cterm_18
(SEQ ID NO: 26619)
DVKDIIRTILEVARDLLRLLEEDSRTNSEVVKRLLDLLREDSKANSEVVKRILDVLRE
>3plus1_GFP11_Key_Cterm_19
(SEQ ID NO: 26620)
DLERLRRKVEELEDRLRRLLEKLARDSAELMRELERILDRYARESEELDRRLAE
>3plus1_GFP11_Key_Cterm_20
(SEQ ID NO: 26621)
DLERLRRKVEELEDRLRRLLEKLARDSAELMRELERILDRYARESEELDRRLAE
>3plus1_GFP11_Key_Cterm_21
(SEQ ID NO: 26622)
RLIEEVVRLLRENLDVVRRILEALAKLIKELLEALEEVLRRNKELIRELLRVLDEALK
>3plus1_GFP11_Key_Cterm_22
(SEQ ID NO: 26623)
DLEDILRKNLDRLRKLLERLREILRENLEALKKTLKRLEDVVREILEDLKRERK
>3plus1_GFP11_Key_Cterm_23
(SEQ ID NO: 26624)
DLLRKLEESLPPIKEKLRKALEELEREHRELEKELDKLHDESPKEKERIEEELRR
>3plus1_GFP11_Key_Cterm_24
(SEQ ID NO: 26625)
DEDLLEKIKRVIREHIKALEKLARDLKEILRRHIEALKELARDLAEVIRKLLEDVKR
>3plus1_GFP11_Key_Cterm_25
(SEQ ID NO: 26626)
ELVRIAIEVLKPLLEIIEELVRLNNEILERLLKIVRELHKDNIKILEDLLRIIEEVLR
>3plus1_GFP11_Key_Cterm_26
(SEQ ID NO: 26627)
ELVRIAIEVLKRLLEIIEELVRLNNEILERLLKIVRELHKDNIKILEDLLRIIEEVLR
>3plus1_GFP11_Key_Cterm_27
(SEQ ID NO: 26628)
RLARLLKALADKILIRVLEEILKINEELNRKIIKFARENLERNRRVNKKVIEVLREAAR
>3plus1_GFP11_Key_Cterm__28
(SEQ ID NO: 26629)
DLERLRRKVEELEDRLRRLLEKLARDSAELMRELERILDRYARESEELDRRLAE
>3plus1_GFP11_Key_Cterm_29
(SEQ ID NO: 26630)
ELVRIAIEVLKRLLEIIEELVRLNNEILERLLKIVRELHKDNIKILEDLLRIIEEVLR
>3plus1_GFP11_Key_Cterm_30
(SEQ ID NO: 26631)
ELVRIAIEVLKRLLEIIEELVRLNNEILERLLKIVRELHKDNIKILEDLLRIIEEVLR
>3plus1_GFP11_Key_Cterm_31
(SEQ ID NO: 26632)
DIVRAMEEVIRRLIEILRRDVELNLDVAKKLLELLKEDSKLMLDVARELLELLDR
>3plus1_GFP11_Key_Cterm_32
(SEQ ID NO: 26633)
RKIAK1TEE1KRLLEDLARDTRRVIEEAKRLLKEWRDRNKEVADTLKKLLEDLIRKIR
>3plus1_GFP11_Key_Cterm_33
(SEQ ID NO: 26634)
DLLRKLEEELRRIKEKLRKALEELEREHRELEKELDKLHDESRKEKERIEEELRR
>3plus1_GFP11_Key_Cterm_34
(SEQ ID NO: 26635)
DLLRKLEEELRRIKEKLRKALEELEREHRELEKELDKLHDESRKEKERIEEELRR
>3plus1_GFP11_Key_Cterm_35
(SEQ ID NO: 26636)
RKIAKIIEELKRLLEDLARDTRRVIEEAKRLLKEWRDRNKEVADTLKKLLEDLIRKIR
>3plus1_GFP11_Key_Cterm_36
(SEQ ID NO: 26637)
ELVRIAIEVLKRLLEIIEELVRLNNEILERLLKIVRELHKDNIKILEDLLRIIEEVLR
>3plus1_GFP11_Key_Cterm_37
(SEQ ID NO: 26638)
TVRRLREALKKLEDDLRKIERDAEREYKKLKDELEELTERYRREIRKLKEELKADRK
>3plus1_GFP11_Key_Cterm_38
(SEQ ID NO: 26639)
DEAERRRRELKDKLDRLREEHEEVKRRLEEELTPLRETHKKIEKELREALKRVRDRST
>3plus1_GFP11_Key_Cterm_39
(SEQ ID NO: 26640)
DEAERRRRSLKDKLDRLREEHEEVKRRLEEELTRLRETKKKIEKELREALKPVRDRST
>3plus1_GFP11_Key_Cterm_40
(SEQ ID NO: 26641)
DLEDILRKNLDRLRKLLERLREILRENLEALKKTLKRLEDWREILEDLKRERK
>3plus1_GFP11_Key_Cterm_41
(SEQ ID NO: 26642)
DIERLRRKVEELEDRLRRLLEKLARDSAELMRELERIIDRYARESESLDRRIAE
>3p1us1_GFP11_Key_Cterm_42
(SEQ ID NO: 26643)
DEAERRRRELKDKLDRLREEHEEVKPRLEEELTRLRETHKKIEKELREALKRVRDRST
>3p1us1_GFP11_Key_Cterm_43
(SEQ ID NO: 26644)
DEAERRRRELKDKLDRLREEHEEVKPRLEEELTRLRETHKKIEKELREALKRVRDRST
>3p1us1_GFP11_Key_Cterm_44
(SEQ ID NO: 26645)
DEAERRRRELKDKLDRLREEHEEVKRPIEEELTRLRETHKKIEKELREALKRVRDRST
>3p1us1_GFP11_Key_Cterm_45
(SEQ ID NO: 26646)
DKAVEELEKALEEIKRRLKEVIDRYEDELRKLRKEYKEKIDKYERKLEEIERRERT
>3p1us1_GFP11_Key_Cterm_46
(SEQ ID NO: 26647)
DVKRALEELVSRLRKLLEDVKKASEDIVREVERIVRELAKRSDEILKKLEDIVEKLRE
>3p1us1_GFP11_Key_Cterm_47
(SEQ ID NO: 26648)
DVKRALEELVSRLRKLLEDVKKASEDIVREVERIVRELAKRSDEILKKLEDIVEKLRE
>3p1us1_GFP11_Key_Cterm_48
(SEQ ID NO: 26649)
DEAERRRRELKDKLDRLREEHEEVKRRLEEELTRLRETHKKIEKELREALKRVRDRST
>3p1us1_GFP11_Key_Cterm_49
(SEQ ID NO: 26650)
DVKRkLEELVSRLRKLLEDVKKk8EDIVREVERIVRELAKRSDEILKKLEDIVEKLRE
>3p1us1_GFP11_Key_Cterm_50
(SEQ ID NO: 26651)
EVKRRLEEKERRIRTRYEELRRRLRKRVKDYEDKLREIEKKVRRDAERIEEELERAKK
>3p1us1_GFP11_Key_Cterm_51
(SEQ ID NO: 26652)
DFAERRRRELKDKLDRLREEHEEVKRRLEEELTRLRETHKKIEKELREALKRVRDRST
>3p1us1_GFP11_Key_Cterm_52
(SEQ ID NO: 26653)
KIAEEIERELEELPRMIKRLHEDLERKIKESEDELREIEAPIEEKIPPLEEKLERKRR
>3p1us1_GFP11_Key_Cterm_53
(SEQ ID NO: 26654)
KIAEEIERELEELRRMIKRLHEDLERKLKESEDELREIEARIEEKIRRLEEKLERKRR
>3p1us1_GFP11_Key_Cterm_54
(SEQ ID NO: 26655)
DKAVEELEKNLEEIKRRLKEVIDRYEDELRKLRKEYKEKIDKYEPKLEEIERRERT
>3p1us1_GFP11_Key_Cterm_55
(SEQ ID NO: 26656)
KIAEEIERELEELRRMIKRLHEDLERKLKESEDELREIEARLEEKIRRLEEKIERKRP
>3p1us1_GFP11_Key_Cterm_56
(SEQ ID NO: 26657)
ELVRIAIEVLKRLLEIIEELVPLNNEILERLLKIVRELHKDNIKILEDLLRIIEEVLR
>3p1us1_GFP11_Key_Cterm_57
(SEQ ID NO: 26658)
DEVEREIRRVKEDLDRILEEYRRLLEEIKRKLEEILRRVEELHRRLRRKLEEIDR
>3p1us1_GFP11_Key_Cterm_58
(SEQ ID NO: 266591
DVKPALEELVSRLRKLLEDVKKASEDIVREVERIVRELAKRSDEILKKLEDIVEKLRE
>3p1us1_GFP11_Key_Cterm_59
(SEQ ID NO: 26660)
DEAERRRRELKDKLDRLREEHEEVKRRLEEELTRLRETHKKIEKELREALKRVRDRST
>3p1us1_GFP11_Key_Cterm_60
(SEQ ID NO: 26661)
DEAERRRRELKDKLDRLREEHEEVKRRLEEELTRLRETKKKIEKELREALKRVRDRST
>3p1us1_GFP11_Key_Cterm_61
(SEQ ID NO: 26662)
TLREVVRKVLEEAKRLLDELEEVHKRVKKELEDIIEENRRVVKRVRDELREIKRELDE
>3p1us1_GFP11_Key_Cterm_62
(SEQ ID NO: 26663)
DVKRALEELVSRLRKLLEDVKKASEDIVREVERIVRELAKRSDEILKKLEDIVEKLRE
>3p1us1_GFP11_Key_Cterm_63
(SEQ ID NO: 26664)
DVKRALEELVSPLRKLLEUVKKASEDIVREVERIVRELAKRSDEILKKLEDIVEKLRE
>3p1us1_GFP11_Key_Cterm_64
(SEQ ID NO: 26665)
DEAERRRRELKDKLDRLREEHEEVKRRLEEELTRLRETHKKIEKELREALKRVRDRST
>3p1us1_GFP11_Key_Cterm_65
(SEQ ID NO: 26666)
DEAEPPRRELKDKLDRLREEHEEVKRRLEEELTRLRETHKKIEKELREALKRVPDRST
>3p1us1_GFP11_Key_Cterm_66
(SEQ ID NO: 26667)
KIAEEIERELEELRRMIKRLHEDLERKLKESEDELREIEARLEEKIRRLEEKLERKRR
>3p1us1_GFP11_Key_Cterm_67
(SEQ ID NO: 26668)
DVKRALEELVSRLAKLLEDVKKASEDIVREVERIVREIAKRSDEILKKLEDIVEKLRE
>3p1us1_GFP11_Key_Nterm_68
(SEQ ID NO: 26669)
SEAERLADEVREAVKKSEEDNETLVREVEYAVRELKKNNKTWVDEVRKLMKRIVDLLR
>3p1us1_GFP11_Key_Nterm_69
(SEQ ID NO: 26670)
SEAERLADEVRKAVKKSEEDNETLVREVEKAVRELKKNNKTWVDEVRKLMKRIVDLLR
>3p1us1_GFP11_Key_Nterm_70
(SEQ ID NO: 26671)
DKDKRLEELLKRLKELNDKTFEELERILEELKRANEASLREAERILEELRARIEGGNL
>3p1us1_GFP11_Key_Nterm_71
(SEQ ID NO: 26672)
SEAEEDLEELIKELAELLKDVIRKEEKINRRINKTLEDIIRRLKEISKEAEELRKGTV
>3plus1_GFP11_Key_Nterm__72
(SEQ ID NO: 26673)
SDKEEIKRRVEKTARDLETEHDKIKKRLEDTVRDIKRELDELLEKYERVLRKIEKTLR
>3plus1_GFP11_Key_Nterm_73
(SEQ ID NO: 26674)
SEAEKIREALETNLRLLEELIKRLKEILDTHNELLRRVIETLERLLKELLELLEEGGL
>3plus1_GFP11_Key_Nterm_74
(SEQ ID NO: 26675)
SEAEKIREALETNLRLLEELIKRLKEILDTHNELLRRVIETLERLLKELLELLEEGGL
>3plus1_GFP11_Key_Nterm_75
(SEQ ID NO: 26676)
SKEERLREVAEKKKKDLEDIVKRVDEAAKETARRLEEILKRLEEVLKKILDDLEKGPD
>3plus1_GFP11_Key_Nterm_76
(SEQ ID NO: 26677)
SLEEITKRLLELVEENLARHEEILRELLELAKRLAKEDRDILEEVLKLIEELLKLLED
>3plus1_GFP11_Key_Nterm_77
(SEQ ID NO: 26678)
SKEETLKRLLDELEKRNRETVERLERLLKELEDRNRASLEELEAVLEELERKIEESGL
>3plus1_GFP11_Key_Nterm_78
(SEQ ID NO: 26679)
SKEETLKRLLDELEKRNRETVERLERLLKELEDRNRASLSELEAVLEELERKIEESGL
>3plus1_GFP11_Key_Nterm_79
(SEQ ID NO: 26680)
SKEETLKRLLDELEKRNRETVERLERLLKELEDRNRASLEELEAVLEELERKIEESGL
>3plus1_GFP11_Key_Nterm_80
(SEQ ID NO: 26681)
STREKAKKVLDTLRADNEDMKRVVEKILRALKRTNERAEKLAREITEEIKRILKEVGV
>3plus1_GFP11_Key_Nterm_81
(SEQ ID NO: 26602)
DAEEVVKRLADVLRENDETIRKVVEDLVRIAEENDRLKKKLVEDIAEILRRIVELLRR
>3plus1_GFP11_Key_Nterm_82
(SEQ ID NO: 26603)
SKEETLKRLLDELEKRNRETVERLERLLKELEDRNRASLEELEAVLEELERKIEESGL
>3plus1_GFP11_Key_Nterm_83
(SEQ ID NO: 26604)
STREKAKKVLDTLRADNEDMKRVVEKILRALKRTNERAEKLAPEITEEIKRILKEVGV
>3plus1_GFP11_Key_Nterm_84
(SEQ ID NO: 26685)
SKEEEVEKVLPKWEEILRRLIEENKRANDKIRREYEELVKEIRRVLEEIKEVAERLGV
>3plus1_GFP11_Key_Nterm_05
(SEQ ID NO: 26686)
DREKSVRDIEEDLKRVLDKLRRRVETSKEELKKVLKADKENADELEKTLRDVVRELDR
>3plus1_GFP11_Key_Nterm_86
(SEQ ID NO: 26687)
SDKEEIKRRVEKTARDLETEHDKIKKRLEDTVRDIKRELDELLEKYERVLRKIEKTLR
>3plus1_GFP11_Key_Nterm_87
(SEQ ID NO: 26688)
STREKAKKVLDTLRADNEDMKRVVEKILRALKRTNERAEKLAREITEEIKRLLKEVGV
>3plus1_GFP11_Key_Nterm_88
(SEQ ID NO: 26689)
SKDEELARLIEELVERWRKIVEDLERDHRRLVKEIRELVERIRKKLEELVDRIRKNGI
>3plus1_GFP11_Key_Nterm_89
(SEQ ID NO: 26690)
SEAERLADEVRKAVKKSEEDNETLVREVEKAVRELKKNNKTWVDEVRKLMKRLVDLLR
>3plus1_GFP11_Key_Nterm_90
(SEQ ID NO: 26691)
SKDEELARLLEELVERWRKIVEDLERDHRRLVKEIRELVSRIRKKLEELVDRIRKNGI
>3p1us1_GFP11_Key_Nterm_91
(SEQ ID NO: 26692)
KEIEETLKELEDLNREMVETNRRVLEETRRLNKETVDRVKATLDELAKMLKKLVDDVR
>3plus1_GFP11_Key_Nterm_92
(SEQ ID NO: 26693)
SEAERLADEVRKAVKKSEEDNETLVREVEKAVRELKKNNKTWVDEVRKLMKRLVDLLR
>3plus1_GFP11_Key_Nterm_93
(SEQ ID NO: 26694)
SKEETLKRLLDELEKRNRETVERLERLLKELEDRNRA3LSELEAVLEELERKIEESGL
>3plus1_GFP11_Key_Nterm_94
(SEQ ID NO: 26695)
DKAEVLREALKLLKDLLEELIKIHEESLKRILDLIDTLVKVHEDALRALKELLERSGL
>3plus1_GFP11_Key_Nterm_95
(SEQ ID NO: 26696)
SKEEEVEKVLRKWEEILRRLIEENKRANDKIRREYEELVKEIRRVLEEIKEVAERLGV
>3plus1_GFP11_Key_Nterm_96
(SEQ ID NO: 26697)
SKEETLKRLLDELEKRNRETVERLERLLKELEDRNRASLEELEAVLEELERKIEESGL
>3plus1_GFP11_Key_Cterm_97
(SEQ ID NO: 26698)
SERVKEILERILRVVEEAVRLNEESLRRILDVVRKAVKLDRESLKKILDVVEEAVR
>3plus1_GFP11_Key_Cterm_98
(SEQ ID NO: 26699)
SERVKEILERILRVVEEAVRLNEESLRRILDVVRKAVKLDRESLKKILDVVEEAVR
>3plus1_GFP11_Key_Cterm_99
(SEQ ID NO: 26700)
DERRIAERIRELLRESKKLVRDVVSEAKRLLKENRDSTRKIIEDIRRLLRKIEDSTR
>3plus1_GFP11_Key_Cterm_100
(SEQ ID NO: 26701)
DALSRLLEELLRVVDDLIRVLKELIDKSRKVIEELLELLKRINEENLKVLAEIIK
>3plus1_GFP11_Key_Cterm_101
(SEQ ID NO: 26702)
DERRIAERIRELLPESKKLVRDVVEEAKRLLKENRDSTRKIIEDIRRLLRKIEDSTR
>3plus1_GFP11_Key_Cterm_102
(SEQ ID NO: 26703)
EALRKLVELLVEVLRRLIRVNRELVKLLREVLERILRILRESVKKLKPLIEKVTKDAT
>3plus1_GFP11_Key_Cterm_103
(SEQ ID NO: 26704)
EALRKLVELLVEVLRRLIRVNRELVKLLREVLERLLRILRESVKKLKRLIEKVIKDAT
>3plus1_GFP11_Key_Cterm_104
(SEQ ID NO: 26706)
AAKRLVEELLKAVTDLSRKNKRILEELLKAIETLSDENKKIITEILDALRRLVEKIEK
>3plus1_GFP11_Key_Cterm_105
(SEQ ID NO: 26706)
EALRKLVELLVEVLRRLIRVNRELVKLLREVLERLLRILRESVKKLKRLIEKVIKDAT
>3plus1_GFP11_Key_Cterm_l06
(SEQ ID NO: 26707)
EALRKLVELLVEVLRRLIRVNRELVKLLREVLERLLRILRESVKKLKRLIEKVIKDAT
>3plus1_GFP11_Key_Cterm_107
(SEQ ID NO: 26708)
DALSRLLEELLRVVDDLIRVLKELIDKSRKVIEELLELLKRINEENLKVLAEIIK
>3plus1_GFP11_Key_Cterm_108
(SEQ ID NO: 26709)
DALSPLLESLLRVVDDLIRVLKELIDKSRKVIEELLELLKRINEENLKVLAEIIK
>3plus1_GFP11_Key_Cterm_109
(SEQ ID NO: 26710)
RAVKKLDEIVKEVAKKLEDVVRANEELWRALVELNKESVRRLREIVERVARDLEETAR
>3plus1_GFP11_Key_Cterm_110
(SEQ ID NO: 26711)
DRLDKVEELVKKLLEDTKRTVDRVRELVRKILKKSRETLEELERLISKILRELEKDAR
>3plus1_GFP11_Key_Cterm_111
(SEQ ID NO: 26712)
DALSRLLEELLRVVDDLIRVLKELIDKSRKVIEELLELLKRINEENLKVLAEIIK
>3plus1_GFP11_Key_Cterm_112
(SEQ ID NO: 26713)
RAVKKLDEIVKEVAKKLEDVVRANEELWRALVELNKESVRRLREIVERVARDLEETAR
>3plus1_GFP11_Key_Cterm_113
(SEQ ID NO: 26714)
RAVKKLDEIVKEVAKKLEDVVRANEELWRALVELNKESVRRLREIVERVARDLEETAR
>3plus1_GFP11_Key_Cterm_114
(SEQ ID NO: 26715)
SEDDLKRVVDEVEKKLRELKRRYAEALERIKEKIKELKDRYERAVREVVAELRKTTK
>3plus1_GFP11_Key_Cterm_115
(SEQ ID NO: 26716)
RAVKKLDEIVKEVAKKLEDVVRANEELWRALVELNKESVRPIREIVEPVARDLEETAR
>3plus1_GFP11_Key_Cterm_116
(SEQ ID NO: 26717)
DEVEREIRRVKEDLDRILEEYRRLLEEIKRKLEEILRRVSELHRRLRRKLEEIDR
>3plus1_GFP11_Key_Cterm_117
(SEQ ID NO: 26718)
SEDDLKRVVDEVEKKLRELKFRYAEALERIKEKIKELKDRYERAVREVVAELRKTTK
>3plus1_GFP11_Key_Nterm_118
(SEQ ID NO: 26719)
DEAKELLDEIRKAVKE5EDRLEKLLRDYEKELRPLEKELRDLKRRIEEKLEELRRGSL
>3plus1_GFP11_Key_Nterm_119
(SEQ ID NO: 26720)
SEKEDAARKLRKLVEELTREYEELVKKLERLIEEIEKVSEESVRKLEKLLAEISEEVR
>3plus1_GFP11_Key_Nterm_120
(SEQ ID NO: 26721)
SEDEIIKKIIEDLRRVLKEVEEIHKEVEERLDKVLKEAEEMHKEVLKELDRVLDEVKR
>3plus1_GFP11_Key_Nterm_121
(SEQ ID NO: 26722)
SKAEEIAEKLDRLLEENRRALEEITTRLDDLLRRNKDALRKVMEKLKRLLDDLRRGGI
>3plus1_GFP11_Key_Nterm_22
(SEQ ID NO: 26723)
SEKEKLLKESEEEVRRLRRTLEELLRKYREVLERLRKELRET.EEFVRDWRRLKEVLD
>3plus1_GFP11_Key_Nterm_123
(SEQ ID NO: 26724)
SEKEDAARKLRKLVEELTREYE2LVKKLERLIEEIEKVSEESVRKLEKLLAEISEEVR
>3plus1_GFP11_Key_Nterm_124
(SEQ ID NO: 26725)
SKEETLRKEAEDLLRRLEELTRRLEKKARELLERAKKLSRDLAEELKRLLKELREKGV
>3plus1_GFP11_Key_Nterm_125
(SEQ ID NO: 26726)
SEKEDAARKLRKLVEELTREYEELVKKLERLIEEIEKVSEESVRKLEKLIAEISEEVR
>3plus1_GFP11_Key_Nterm_126
(SEQ ID NO: 26727)
SKAEEIAEKLDRLLEENRRALEEITTRLDDLLRRNKDALRKVMEKLKRLLDDLRRGGI
>3plus1_GFP11_Key_Nterm_127
(SEQ ID NO: 26728)
SKAEEIAEKLDRLLEENRRALEEITTRLDDLLRRNKDALRKVMEKLKRLLDDLRRGGI
>3plus1_GFP11_Key_Nterm_128
(SEQ ID NO: 26729)
SKAEEIAEKLDRLLEENRPALEEITTRLDDLLRRNKDALRKVMEKLKRLLDDLRRGGI
>3plus1_GFP11_Key_Nterm_129
(SEQ ID NO: 26730)
SKEETLRKEAEDLLRRLEELTRRLEKKARELLERAKKLSRDLAEELKRLLKELREKGV
>3plus1_GFP11_Key_Nterm_130
(SEQ ID NO: 26731)
SRVEELKKLIEDILRISREVVERIKRVAEDIHRINRRVLDDLRKLIEDILRTVEEILA
>3plus1_GFP11_Key_Nterm_131
(SEQ ID NO: 26732)
SKEETLRKEAEDLLRRLEELTRRLEKKARELLERAKKLSRDLAEELKRLLKELREKGV
>3plus1_GFP11_Key_Nterm_132
(SEQ ID NO: 26733)
SKAEEIAEKLDRLLEENRRALEEITTRLDDLLRRNKDALRKVMEKLKRLLDDLRRGGI
>3plus1_GFP11_Key_Nterm_133
(SEQ ID NO: 26734)
SKEETLRKEAEDLLRRLEELTRRLEKKARELLERAKKLSRDLAEELKRLLKELREKGV
>3plus1_GFP11_Key_Nterm_134
(SEQ ID NO: 26735)
SEKEDAARKLRKLVEELTREYEELVKKLERLIEEIEKVSEESVRKLEKLLAEISEEVR
>3plus1_GFP11_Key_Nterm_l35
(SEQ ID NO: 26736)
SKEETLRKEAEDLLRRLEELTRRLEKKARELLERAKKLSRDLAEELKRLLKELREKGV
>3plus1_GFP11_Key_Nterm_136
(SEQ ID NO: 26737)
SERETVKRRLEELLKEVKRTLDKLKEEHDRLLEDVRRVVEELKREHDKLLKEVKDSGV
>3plus1_GFP11_Key_Nterm_137
(SEQ ID NO: 26738)
SEKEDAARKLRKLVEELTREYEELVKKLERLXEEIEKVSEESVRKLEKLLAEISEEVR
>3plus1_GFP11_Key_Nterm_138
(SEQ ID NO: 26739)
SKEETLRKEAEDLLRRLEELTRRLEKKARELLERAKKLSRDLAEELKRLLKELREKGV
>3plus1_GFP11_Key_Nterm_139
(SEQ ID NO: 26740)
KEREEVKEKLDRLLEEVEKTVRELKREHDELLKEVEKLVRDLKKEHDELLKKVKDDGV
>3plus1_GFP11_Key_Nterm_140
(SEQ ID NO: 26741)
SREEVLRELEEVIEDNRRLLEELIEKSKKVLDESLKLIDELLRRLEEVLERVLRLLEE
>2plus1_GFP11_Key_Cterm_1
(SEQ ID NO: 26742)
DEVVKRVRDLLDTVRRRNEKVNEDVKRMNDKLRRDNEDVIRRVEKLLRELEEKRRT
>2plus1_GFP11_Key_Cterm_2
(SEQ ID NO: 26743)
SEDSVERIARELERNLDDLARVLKESEDDLAEILRRLKEVLEESERDLERVEREVRK
>2plus1_GFP11_Key_Cterm_3
(SEQ ID NO: 26744)
SKELLEKAKAVVDEIKRIAEESLKRLEDLSRDHKRRAKELNDEIAKVVDELAKPAT
>2plus1_GFP11_Key_Cterm_4
(SEQ ID NO: 26745)
SKEKIDRIIRELERILEEAKKKHEDVLRRLEDSLRRVAELLKAALDRLREIVDRLRR
>2plus1_GFP11_Key_Cterm_5
(SEQ ID NO: 26746)
DEVVKRVRDLLDTVRRRNEKVNEDVKRMNDKLRRDNEDVIRRVEKLLRELEEKRRT
>2plus1_GFP11_Key_Cterm_6
(SEQ ID NO: 26747)
DIKTLLDRVRKLAEEDAERLDRLRRESEELNERVRRVDKKLLEEIRRKAKKVEDDTR
>2plus1_GFP11_Key_Cterm_7
(SEQ ID NO: 26748)
DAETLLRELEKLSRDNKELLKKIEKEIRDLIKEDKERNIELSERLPKLVEELKKKAT
>2plus1_GFP11_Key_Cterm_8
(SEQ ID NO: 26749)
DEWKRVRDLLDTVRRRNEKVNEDVKRMNDKLRRDNEDVIRRVEKLLRELEEKRRT
>2plus1_GFP11_Key_Cterm_9
(SEQ ID NO: 26750)
DIKTLLDRVRKLAEEDAERLDRLRRESEELNERVRRVDKXLIEEIRRKAKKVEDDTR
>2plus1_GFP11_Key_Cterm_10
(SEQ ID NO: 26751)
SEELSAEVKKLLDEVRKALARHKDENDKLLKEIEDSLRRHKEENDRLLEKLKESTR
>2plus1_GFP11_Key_Cterm_11
(SEQ ID NO: 26752)
DADDVLARVEELAKRAHDENERLIREVEELVRAHNKRNKELVDEVKRLVEKVIEEER
>2plus1_GFP11_Key_Cterm_12
(SEQ ID NO: 26753)
SKEKIDRIIRELERILEEAKKKHEDVLRRLEDSLRRVAELLKAALDRLREIVDRLRR
>2plus1_GFP11_Key_Cterm_13
(SEQ ID NO: 26754)
DEVVKRVRDLLDTVRRRNEKVNEDVKRMNDKLRPDNEDVIRRVEKLLRELEEKRRT
>2plus1_GFP11_Key_Cterm_14
(SEQ ID NO: 26755)
SEELSAEVKKLLDEVRKALARHKDENDKLLKEIEDSLRRHKEENDRLLEKLKESTR
>2plus1_GFP11_Key_Cterm_15
(SEQ ID NO: 26756)
DAETVLRSAEDIVAKNRKLAEEVLRRVKKIVEENRKIASEVLDDVRKLVEDVLARAS
>2plus1_GFP11_Key_Cterm_16
(SEQ ID NO: 26757)
DADDVLARVEELAKRAHDENERLIREVEELVRAHNKRNKELVDEVKRLVEKVIEEER
>2plus1_GFP11_Key_Cterm_17
(SEQ ID NO: 26768)
SKEKIDRIIPELERILEEAKKKHEDVLRRLEDSLRRVAELLKAALDRLREIVDRLRR
>2plus1_GFP11_Key_Cterm_18
(SEQ ID NO: 26759)
DEEKLKDLIPKLRDILRRAAEAHXKLIDDARESLERAKREHEKLIDRLKKIIEELER
>2plus1_GFP11_Key_Cterm_l9
(SEQ ID NO: 26760)
DIKTLLDRVRKLAEEDAERLDRLRRESEELNERVRRVDKKLLEEIRRKAKKVEDDTR
>2plus1_GFP11_Key_Cterm_20
(SEQ ID NO: 26761)
DATRVIEEAKRILDEARKLNEETIRRSEELVRRIERVIESIIKRSEKLLEDVARESK
>2plus1_GFP11_Key_Cterm_21
(SEQ ID NO: 26762)
SEELSAEVKKLLDEVRKALARHKDENDKLLKEIEDSLRRHKEENDRLLEKLKESTR
>2plus1_GFP11_Key_Cterm_22
(SEQ ID NO: 26763)
DAETVLPSAEDIVAKNRKLAEEVLRRVKKIVEENRKIASEVLDDVRKLVEDVLARAS
>2plus1_GFP11_Key_Cterm_23
(SEQ ID NO: 26764)
DADDVLARVEELAKRAHDENERlTrEVEELVRAHNKRNKELVDEVKRLVEKVIEEER
>2plus1_GFP11_Key_Cterm_24
(SEQ ID NO: 26766)
SKELLEKAKAVVDEIKRLAEESLKRLEDLSRDHKRRAKELNDEIAKVVDELAKRAT
>2plus1_GFP11_Key_Cterm_25
(SEQ ID NO: 26766)
DEEVLKKLAEIVRRVKEENRKVNEEVEKRLRELEEENKKVIEDLKSTVEELVERLR
>2plus1_GFP11_Key_Cterm_26
(SEQ ID NO: 26767)
DEEVLKKLAEIVRRVKEENRKVNESVEKRLRELEEENKKVIEDLKSTVEELVERLR
>2plus1_GFP11_Key_Cterm_27
(SEQ ID NO: 26768)
DKLLKEARDLIPEIEKRLEELLKRVEKLTEDAKRDLERSNREHKELADRIKETAR
>2plus1_GFP11_Key_Cterm_28
(SEQ ID NO: 26769)
DKDSARELERIVKENAELAERVFREVEKIVRENTKLAEDSVRELKRLVEELKKRAK
>2plus1_GFP11_Key_Cterm_29
(SEQ ID NO: 26770)
SKEKIDRIIRELERILEEAKKKHEDVLRRLEDSLRRVAELLKAALDRLREIVDRLRR
>2plus1_GFP11_Key_Cterm_30
(SEQ ID NO: 26771)
DEEKLKDLTRKLRDILRRAAEAHKKLIDDARESLERAKRSHEKLTDRLKKILEELER
>2plus1_GFP11_Key_Cterm_31
(SEQ ID NO:26772)
DEWKRVRDIiLDTVRRRNEKVNEDVKRMNDKLRRDNEDVIRRVEKLLRELEEKRRT
>2plus1_GFP11_Key_Cterm_32
(SEQ ID NO: 26773)
DEEVLRTLEEIIRRLTKELEDVLRSYERELRRLEEENKRVIDKTEEEIRRLADRLRR
>2plus1_GFP11_Key_Cterm_33
(SEQ ID NO: 26774)
DERILRELSERVKELEKEAREILKRSEDETDKLREKAERILEDLERANRRTMDEARR
>2plus1_GFP11_Key_Cterm_34
(SEQ ID NO: 26775)
SEELSAEVKKLLDEVRKALARHKDENDKLLKEIEDSLRRHKEENDRLLEKLKESTR
>2plus1_GFP11_Key_Cterm_35
(SEQ ID NO: 26776)
LPEEVLRELEELLKESEERIKRIEEEIKKIIDKSREDIKRVLEEIERLNAKAADDLRK
>2plus1_GFP11_Key_Cterm_36
(SEQ ID NO: 26777)
DADDVLARVEELAKRAHDENERLIREVEELVRAHNKRNKELVDEVKRLVEKVIEEER
>2plus1_GFP11_Key_Cterm_37
(SEQ ID NO: 26778)
DEEVLKKLAEIVRRVKEENRKVNEEVEKRLRELEEENKKVIEDLKSTVEEDVERLR
>2plus1_GFP11_Key_Cterm_38
(SEQ ID NO: 26779)
DKLLKEARDLIREIEKRLEELLKRVEKLTEDAKRDLERSNREHKELADRIKETAR
>2plus1_GFP11_Key_Cterm_39
(SEQ ID NO: 26780)
DEEVLRTLEEIIRRLTKELEDVLREYERELRRLEEENKRVIDKTEEEIRRLADRLRR
>2plus1_GFP11_Key_Cterm_40
(SEQ ID NO: 26781)
DRRIEKVLKEIEEKIREVIKEWERVHREVEELLKRLIDENRKVLDEIRKLLEEKSK
>2plus1_GFP11_Key_Cterm_41
(SEQ ID NO: 26782)
DERILRELEERVKELFIKEARElLKRSEDETDKLREKAERILEDLERANRRTMDEARR
>2plus1_GFP11_Key_Cterm_42
(SEQ ID NO: 26783)
SEELSAEVKKLLDEVRKALAPHKDENDKLLKEIEDSLERHKEENDRLLEKLKESTR
>2plus1_GFP11_Key_Cterm_43
(SEQ ID NO: 26784)
DEEVLKKLAEIVRRVKEENRKVNEEVEKRLRELEEENKKVIEDLKSTVEELVERLR
>2plus1_GFP11_Key_Cterm_44
(SEQ ID NO: 26785)
SKEKIDRIIRELERILSEAKKKHEDVLRRLEDSLRRVAELLKAALDRLREIVDRLRR
>2plus1_GFP11_Key_Cterm_45
(SEQ ID NO: 26786)
DRRIEKVLKEIEEKI.REVIKEWERVHREVESLLKRLIDENRKVLDEIRKLLEEKSK
>2plus1_GFP11_Key_Cterm_46
(SEQ ID NO: 26787)
TLRELARSIRKLSAENKERLKELLRELKKLSDENKERIKKLLSDAEKIIEDVARRAK
>2plus1_GFP11_Key_Cterm_47
(SEQ ID NO: 26788)
DERILRELEEPVKELEKEAREILKRSEDETDKLREKAERILEDLERANRRTMDEARR
>2plus1_GFP11_Key_Cterm_48
(SEQ ID NO: 26789)
EKLKELRDVIAEVAKRIDELDEYTRESIRPAKKEIERLNPETKKVIEEVVKRIEEERK
>2plus1_GFP11_Key_Cterm_49
(SEQ ID NO: 26790)
DERVREELKKLLTRVEEEHRKVLETDKKILKEAHKESKEVNDRDRELLERLEESVR
>2plus1_GFP11_Key_Cterm_50
(SEQ ID NO: 26791)
DADDVLARVEELAKRAHDENEPLIREVEELVRAHNKRNKELVDEVKRLVEKVIEEER
>2plus1_GFP11_Key_Cterm_51
(SEQ ID NO: 26792)
TVKRLLDELRELLERLKRTIEELLKRNRDLLADAEEKARRLLEENRKLLKAARDTAT
>2plus1_GFP11_Key_Cterm_52
(SEQ ID NO: 26793)
DEEVLKKLAEIVRRVKEENRKVNEEVEKRLRELEEENKKVIEDLKSTVEELVERLR
>2plus1_GFP11_Key_Cterm_53
(SEQ ID NO: 26794)
SKEKIDRIIRELER1LEEAKKKHEDVLRRLEDSLRRVAELLKAALDRLREIVDRLRR
>2plus1_GFP11_Key_Cterm_54
(SEQ ID NO: 26795)
DERILRELEERVKELEKEAREILKRSEDETDKLREKAERILEDLERANRRTMDEARR
>2plus1_GFP11_Key_Cterm_55
(SEQ ID NO: 26796)
DATRVIEEAKRILDEARKLNEETIRRSEELVRRIERVIEEIIKRSEKLLEDVARESK
>2plus1_GFP11_Key_Cterm_56
(SEQ ID NO: 26797)
EAAREIIKRLREVNKRTKEKLDELIKHSEEVLERVKRLIDELRKHSEEVLEDLRRRAK
>2plus1_GFP11_Key_Cterm_57
(SEQ ID NO: 26798)
EKLKELRDVIAEVAKRIDELDEYTRESIFRAKKEIERLNRETKKVIEEVVKRIEEERK
>2plus1_GFP11_Key_Cterm_58
(SEQ ID NO: 26799)
ELLRRIKKLLDEIKKAIEDSSREIKRLLEESERVMKRSSEDIKPTLDDTRRVVEEVRR
>2plus1_GFP11_Key_Cterm_59
(SEQ ID NO: 26800)
SKAIKDVRDIVKKVKDELKEWRDRNKELVDRLSEELKEWLKDVERVLKELTDKDR
>2plus1_GFP11_Key_Cterm_60
(SEQ ID NO: 26801)
DERVREELKKLLTRVEEEHRKVLETDKKILKEAHKESKEVNDRDRELLERLEESVR
>2plus1_GFP11_Key_Cterm_61
(SEQ ID NO: 26802)
DIDKLLKELRDLVEKIKKDLKELLERYEEIVRRIKELLKDLNREAEEVVRRLKEELR
>2plus1_GFP11_Key_Cterm_62
(SEQ ID NO: 26803)
DADDVLARVEELAKRAHDENERLIREVEELVRAHNKRNKELVDEVKRLVEKVIEEER
>2plus1_GFP11_Key_Cterm_63
(SEQ ID NO: 26804)
DEEVLKKLAEIVRRVKEENRKVNEEVEKRLRELEEENKKVIEDLKSTVEELVERLR
>2plus1_GFP11_Key_Cterm_64
(SEQ ID NO: 26805)
EREEELKEVADRVKEKLDRLNRENEKSSEELKRELDKINDENRETSERLKREIDETTR
>2plus1_GFP11_Key_Cterm_65
(SEQ ID NO: 26806)
SKEKIDRIIRELERILEEAKKKHEDVLRRLEDSLRRVAELLKAALDRLREIVDRLRR
>2plus1_GFP11_Key_Cterm_66
(SEQ ID NO: 26807)
SKEKIDRIIRELERILEEAKKKHEDVLRRLEDSLRRVAELLKAALDRLREIVDRLRR
>2plus1_GFP11_Key_Cterm_67
(SEQ ID NO: 26808)
TKDLLDENSKRSNEISREVKKDLERTVRENKKIVDEVAKALEDTVDKNRRIVEEVTT
>2plus1_GFP11_Key_Cterm_68
(SEQ ID NO: 26809)
DEWKRVRDLLDTVRRRNEKVNEDVKPMNDKLRRDNEDVIRRVEKLLRELEEKRRT
>2plus1_GFP11_Key_Cterm_69
(SEQ ID NO: 26810)
DRRIEKVLKEIEEKIREVIKEWERVHREVEELLKRLIDENRKVLDEIRKLLEEKSK
>2plus1_GFP11_Key_Cterm_70
(SEQ ID NO: 26811)
ELLRRIKKLLDETKKAIEDSSREIKRLLEESERVMKRSSEDIKRTLDDTRRWEEVRR
>2plus1_GFP11_Key_Cterm_71
(SEQ ID NO: 26812)
SEELSAEVKKLLDEVRKALARHKDENDKLLKEIEDSLRRHKEENDRLLEKLKESTR
>2plus1_GFP11_Key_Cterm_72
(SEQ ID NO: 26813)
DIDKLLKELRDLVEKIKKDLKELLERYEEIVRRIKELLKDLNREAEEWRRLKEELR
>2plus1_GFP11_Key_Cterm_73
(SEQ ID NO: 26814)
DADDVLARVEELAKRAHDENERLIREVEELVRAHNKRNKELVDEVKRLVEKVIEEER
>2plus1_GFP11_Key_Cterm_74
(SEQ ID NO: 26815)
DEEVLKKLAEIVRRVKSENRKVNEEVEKRLRELEEENKKVIEDLKSTVEELVERLR
>2plus1_GFP11_Key_Cterm_75
(SEQ ID NO: 26816)
DEEVLKKLAEIVRPVKSENRKVNEEVEKRLRELEEENKKVIEDLKSTVEELVERLR
>2plus1_GFP11_Key_Cterm_76
(SEQ ID NO: 26817)
SKEKIDRIIRELERILEEAKKKHEDVLRRLEDSLRRVAELLKAALDRLREIVDRLRR
>2plus1_GFP11_Key_Cterm_77
(SEQ ID NO: 26818)
SEELREELKKLERKIEKVAKEIHDHDKEVTERLEDLLRRITEHARKSDREIEETAR
>2plus1_GFP11_Key_Cterm_78
(SEQ ID NO: 26819)
DRRIEKVLKEIEEKIREVIKEWERVHREVEELLKRLIDENRKVLDEIRKLLEEKSK
>2plus1_GFP11_Key_Cterm_79
(SEQ ID NO: 26820)
DATRVIEEAKRILDEARKLNEETIRRSEELVRRIERVIEEIIKRSEKLLEDVARESK
>2plus1_GFP11_Key_Cterm_80
(SEQ ID NO: 26821)
EkLkELEDVIAEVAKRIDELDEYTRESIRRAKKEIERLNRETKKVIEEWKRIEEERK
>2plus1_GFP11_Key_Cterm_81
(SEQ ID NO: 26822)
ELLRRIKKLLDEIKKAIEDSSREIKRLLEESERVMKRSSEDIKRTLDDTRRVVEEVRR
>2plus1_GFP11_Key_Cterm_82
(SEQ ID NO: 26823)
DIDKLLKELRDLVEKIKKDLKELLERYEEIVRRIKELLKDLNREAEEVVRRLKEELR
>2plus1_GFP11_Key_Cterm_83
(SEQ ID NO: 26824)
EAKKKLDEVLERAKRTIDRLLETSDRSLEKVEADLRRLNEELDRSLERAERTIRELAK
>2plus1_GFP11_Key_Cterm_84
(SEQ ID NO: 26825)
DEEVLKKLAEIVRRVKEENRKVNEEVEKRLRELEEENKKVIEDLKSTVEELVERLR
>2plus1_GFP11_Key_Cterm_85
(SEQ ID NO: 26826)
DEEVLKKLAEIVRRVKEENRKVNEEVEKRLRELEEENKKVIEDLKSTVEELVERLR
>2plus1_GFP11_Key_Cterm_86
(SEQ ID NO: 26827)
DRRIEKVLKEIEEKIREVIKEWERVHREVEELLKRLIDENRKVLDEIRKLLEEKSK
>2plus1_GFP11_Key_Cterm_87
(SEQ ID NO: 26828)
DERILRELEERVKELEKEAREILKRSEDETDKLREKAERILEDLERANRRTMDEARR
>2plus1_GFP11_Key_Cterm_38
(SEQ ID NO: 26829)
DLKRVEEPAREVSRRNEESMRRVKEDADRVSEANKEVLDRVREEVKRLIEEVRETLR
>2plus1_GFP11_Key_Cterm_89
(SEQ ID NO: 26830)
EKLKELRDVIAEVAKRIDELDEYTRESIRRAKKEIERLNRETKKVIEEVVKRIEEERK
>2plus1_GFP11_Key_Cterm_90
(SEQ ID NO: 26831)
ELLRRIKKLLDEIKKAIEDSSREIKRLLEESERVMKRSSEDIKRTLDDTRRVVEEVRR
>2plus1_GFP11_Key_Cterm_91
(SEQ ID NO: 26832)
ELLRRIKKLLDEIKKAIEDSSREIKRLLEESERVMKRSSEDIKRTLDDTRRVVEEVRR
>2plus1_GFP11_Key_Cterm_92
(SEQ ID NO: 26833)
LPEEVLRELEELLKESEERIKRIEEEIKKIIDKSREDIKRVLEEIERLNAKAADDLRK
>2plus1_GFP11_Key_Cterm_93
(SEQ ID NO: 26834)
EAKKKLDEVLERAKRTIDRLLETSDRSLEKVEADLRRLNEELDRSLERAERTIRELAK
>2plus1_GFP11_Key_Cterm_94
(SEQ ID NO: 26835)
DEEVLKKLAEIVRRVKEENRKVNEEVEKRLRELEEENKKVIEDLKSTVEELVERLR
>2plus1_GFP11_Key_Cterm_95
(SEQ ID NO: 26836)
DKLLKEARDLIRETEKRLEELLKRVEKLTEDAKRDLERSNREHKELADRIKETAR
>2plus1_GFP11_Key_Cterm_96
(SEQ ID NO: 26637)
DKLLKEARDLIPEIEKRLEELLKRVEKLTEDAKRDLERSNREHKELADRIKETAR
>2plus1_GFP11_Key_Cterm_97
(SEQ ID NO: 26838)
DIVRKIERIVETIEREVRESVKKVEEIARDIRRKVDESVKNVEKLLRDVDKKARDRKK
>2plus1_GFP11_Key_Cterm_98
(SEQ ID NO: 26839)
DEIKRIVDEVPERLKRIVDENAKIVEDARRALEKIVKENSEILRRLKKELRELRK
>2plus1_GFP11_Key_Cterm_99
(SEQ ID NO: 26840)
DRRIEKVLKEIEEKIREVIKEWERVHREVEELLKRLIDENRKVLDEIRKLLEEKSK
>2plus1_GFP11_Key_Cterm_100
(SEQ ID NO: 26841)
DLKRVEEPAREVSRRNEESMRPVKEDADRVSEANKEVLDRVREEVKRLIEEVPETLR
>2plus1_GFP11_Key_Cterm_101
(SEQ ID NO: 26842)
DATRVIEEAKRILDEARKLNEETIRRSEELVRRIERVIEEIIKRSEKLLEDVAPESK
>2plus1_GFP11_Key_Cterm_102
(SEQ ID NO: 26843)
DAETIERVVRELLEENKEVLRKTEEAVKRSTETNKRLLEASKEVADRLRERIKEAAK
>2plus1_GFP11_Key_Cterm_103
(SEQ ID NO: 26844)
EKLKELRDVIAEVAKRIDELDEYTRESIRRAKKEIERLNRETKKVIEEVVKRIEEERK
>2plus1_GFP11_Key_Cterm_104
(SEQ ID NO: 26845)
ELLRRIKKLLDEIKKAIEDSSREIKRLLEESERVMKRSSEDIKRTLDDTRRVVEEVRR
>2plus1_GFP11_Key_Cterm_105
(SEQ ID NO: 26846)
DEVVERAERISEENKRRVEDVARKSKELVEDVRRHSEEVVRRVEELVKEVEERVR
>2plus1_GFP11_Key_Cterm_106
(SEQ ID NO: 26847)
EAKKKLDEVLERAKRTIDRLLETSDRSLEKVEADLKRLNEELDRSLERAERTIRELAK
>2plus1_GFP11_Key_Cterm_107
(SEQ ID NO: 26848)
TAERARETLKRLLDENRDRSKKVKEEIRRILEDLTRTTSRVKPEIAKLLKELEDTAR
>2plus1_GFP11_Key_Cterm_108
(SEQ ID NO: 26649)
EAVRRLKEILERLKEEVRRSLEELRKEVERLKKEVEDSLRELKKSLEEWVKSLEEATR
>2plus1_GFP11_Key_Cterm_109
(SEQ ID NO: 26850)
DERILRELEERVKELEKEAREILKRSEDETDKLREKAERILEDLERANRRTMDEARR
>2plus1_GFP11_Key_Cterm_110
(SEQ ID NO: 26851)
DATRVIEEAKRILDEARKLNEETIRRSEELVRRIERVIEEIIKRSEKLLEDVAPESK
>2plus1_GFP11_Key_Cterm_111
(SEQ ID NO: 26852)
DKARKVAEVAEKVLRDIDKLDRESKEAFRATNEEIAKLDEDTARVAERVKKAIEDLAK
>2plus1_GFP11_Key_Cterm_112
(SEQ ID NO: 26853)
EKLKELRDVIAEVAKRIDELDEYTRESIRRAKKEIERLNRETKKVIEEVVKRIEEERK
>2plus1_GFP11_Key_Cterm_113
(SEQ ID NO: 26854)
ELLRRIKKLLDEIKKAIEDSSREIKRLLEESERVMKRSSEDIKRTLDDTRRVVEEVRR
>2plus1_GFP11_Key_Cterm_114
(SEQ ID NO: 26855)
DKVERWREVEKLHEEDRKRLEESTRSVRKLLEELKRELEKSTRSVKALVDELRERVR
>2plus1_GFP11_Key_Cterm_l15
(SEQ ID NO: 26856)
DEWERAERISEENKRRVEDVARKSKELVEDVRRHSEEVVRRVEELVKEVEERVR
>2plus1_GFP11_Key_Cterm_116
(SEQ ID NO: 26857)
EAKKKLDEVLERAKRTIDRLLETSDRSLEKVFADLRRLNEELDRSLERAERTIRELAK
>2plus1_GFP11_Key_Cterm_117
(SEQ ID NO: 26858)
TAERARETLKRLLDENRDRSKKVKEEIRRILEDLTRTTERVKREIAKLLKELEDTAR
>2plus1_GFP11_Key_Cterm_118
(SEQ ID NO: 26859)
DERILRELSEPVKELEKEAREILKRSEDETDKLREKAERILEDLERANRRTMDEARR
>2plus1_GFP11_Key_Cterm_119
(SEQ ID NO: 26860)
DERILRELEERVKELEKEAREILKRSEDETDKLREKAERILEDLERANRRTMDEARR
>2plus1_GFP11_Key_Cterm_120
(SEQ ID NO: 26861)
DLKRVEERAREVSRRNEESMRRVKEDADRVSEANKEVLDRVREEVKRLIEEVRETLR
>2plus1_GFP11_Key_Cterm_21
(SEQ ID NO: 26862)
DKARKVAEVAEKVLRDIDKLDRESKEAFRATNEEIAKLDEDTARVAERVKKAIEDLAK
>2plus1_GFP11_Key_Cterm_122
(SEQ ID NO: 26863)
ELLRRIKKLLDEIKKAIEDSSREIKRLLEESERVMKRSSSDIKRTLDDTRRVVEEVRR
>2plus1_GFP11_Key_Cterm_123
(SEQ ID NO: 26864)
SKAIKDVRDIVKKVKDELKEWRDRNKELVDRLSEELKEWLKDVERVLKELTDKDR
>2plus1_GFP11_Key_Cterm_124
(SEQ ID NO: 26865)
DKVERVYREVEKLHEEDRKRLEESTRSVRKLLEELKRELEKSTRSVKALVDELRERVR
>2plus1_GFP11_Key_Cterm_125
(SEQ ID NO: 26866)
DIDKLLKELRDLVEKIKKDLKELLERYEEIVRRIKELLKDLNREAEEVVRRLKEELR
>2plus1_GFP11_Key_Cterm_126
(SEQ ID NO: 26867)
EAKKKLDEVLERAKRTIDRLLETSDRSLEKVEADLRRLNEELDRSLERAERTIRELAK
>2plus1_GFP11_Key_Cterm_127
(SEQ ID NO: 26868)
DKLLKEARDLIFEIEKRLEELLKRVEKLTEDAKRDLERSNREHKELADRIKETAR
>2plus1_GFP11_Key_Cterm_128
(SEQ ID NO: 26869)
TAERARETLKRLLDENRDRSKKVKEEIRRILEDLTRTTERVKREIAKLLKELEDTAR
>2plus1_GFP11_Key_Cterm_129
(SEQ ID NO: 26870)
DEIKRIVDEVRERLKRIVDENAKIVEDARRALEKIVKENEEILRRLKKELRELRK
>2plus1_GFP11_Key_Cterm_130
(SEQ ID NO: 26871)
DRIEEELKRLIDTIREKNREVEKRARDSNRDLKRTNDEIAKEVRELIKKLREDLK
>2plus1_GFP11_Key_Cterm_l31
(SEQ ID NO: 26872)
DERILRELEERVKELEKEAREILKRSEDETDKLREKAERILEDLERANRRTMDEARR
>2plus1_GFP11_Key_Cterm_132
(SEQ ID NO: 26873)
DAETIERVVRERELLENKEVLFKTEEAVKRSTETNKRLLEASKEVADRLRERIKEAAK
>2plus1_GFP11_Key_Cterm_133
(SEQ ID NO: 26871)
DKARKVAEVAEKVLRDIDKLDRESKEAFRATNEEIAKLDEDTARVAERVKKAIEDLAK
>2plus1_GFP11_Key_Cterm_l34
(SEQ ID NO: 26875)
DKVERVVRSVEKLHEEDRKRLEESTRSVRKLLEELKRELEKSTRSVKALVDELRERVR
>2plus1_GFP11_Key_Cterm_135
(SEQ ID NO: 26876)
DIERILRELEAVLKKLTDESERLNREVERVSRDTKKKSKELNEELKAVLDEVKRKAD
>2plus1_GFP11_Key_Cterm_136
(SEQ ID NO: 26877)
DEWERAERISEENKRRVEDVARKSKELVEDVRRHSEEVVRRVEELVKEVEERVR
>2plus1_GFP11_Key_Cterm_137
(SEQ ID NO: 26878)
EAKKKLDEVLERAKRTIDRLLETSDRSLEKVEADLRRLNEELDRSLERAERTIRELAK
>2plus1_GFP11_Key_Cterm_138
(SEQ ID NO: 26879)
TAERARETLKPLLDENRDRSKKVKSEIRRILEDLTRTTERVKREIAKLLKELEDTAR
>2plus1_GFP11_Key_Cterm_139
(SEQ ID NO: 26880)
DEIKRIVDEVRERLKRIVDENAKIVEDARRALEKIVKENEEILRRLKKELRELRK
>2plus1_GFP11_Key_Cterm_l40
(SEQ ID NO: 26881)
DPRIEKVLKEIEEKIREVIKEWERVHREVEELLKRLIDENRKVLDEIRKLLEEKSK
>2plus1_GFP11_Key_Cterm_l41
(SEQ ID NO: 26882)
DLKRVEERAREVSRRNEESMRRVKEDADRVSEANKEVLDRVREEVKRLIEEVRETLR
>2plus1_GFP11_Key_Cterm_142
(SEQ ID NO: 26883)
DAETIERVVRELLEENKEVLRKTEEAVKRSTETNKRLLSASKEVADRLRERIKEAAK
>2plus1_GFP11_Key_Cterm_143
(SEQ ID NO: 26884)
DKARKVAEVAEKVLRDIDKLDRESKEAFRATNEEIAKLDEDTARVAERVKKAIEDLAK
>2plus1_GFP11_Key_Cterm_144
(SEQ ID NO: 26885)
ELLRRIKKLLDEIKKAIEDSSREIKRLLEESERVMKRSSEDIKRTLDDTRRVVEEVRR
>2plus1_GFP11_Key_Cterm_115
(SEQ ID NO: 26886)
DKVERVVREVEKLHEEDRKRLEESTRSVRKLLEELKRELSKSTRSVKALVDELRERVR
>2plus1_GFP11_Key_Cterm_146
(SEQ ID NO: 26887)
EAKKKLDEVLERAKRTIDRLLETSDRSLEKVEADLRRLNEELDRSLERAERTIRELAK
>2plus1_GFP11_Key_Cterm_147
(SEQ ID NO: 26088)
TAERARETLKRLLDENRDRSKKVKEEIRRILEDLTRTTERVKREIAKLLKELEDTAR
>2plus1_GFP11_Key_Cterm_148
(SEQ ID NO: 26889)
DEIKRIVDEVRERLKRIVDENAKIVEDARRALEKIVKENEEILRRLKKELRELRK
>2plus1_GFP11_Key_Cterm_149
(SEQ ID NO: 26890)
DKARKVAEVAEKVLRDIDKLDRESKEAFRATNEEIAKLDEDTARVAEKVKKAIEDLAK
>2plus1_GFP11_Key_Cterm_150
(SEQ ID NO: 26891)
DEVTKVKKVADDVIAEIKKLDDETRRVIEDTNKKIADLDKATRDVVRKVLEEVKKLEK
>2plus1_GFP11_Key_Cterm_151
(SEQ ID NO: 26892)
DIDKLLKELRDLVEKIKKDLKELLERYEEIVRRIKELLKDLNREAEEVVRRLKEELR
>2plus1_GFP11_Key_Cterm_152
(SEQ ID NO: 26893)
TAERARETLKRLLDENRDRSKKVKEEIRRILEDLTRTTERVKREIAKLLKELEDTAR
>2plus1_GFP11_Key_Cterm_153
(SEQ ID NO: 26894)
DEIKRIVDEVRERLKRIVDENAKIVEDARRALEKIVKENEEILRRLKKELRELRK
>2plus1_GFP11_Key_Cterm_154
(SEQ ID NO: 26895)
RLVREVEDLVRRLVRRSEKSNEEVKRTVEELVRRMEESNDRVRDLVRRLVEELKRAVD
>2plus1_GFP11_Key_Cterm_155
(SEQ ID NO: 26896)
PKARKVAEVAEKVLRDIDKLDRESKEAFRATNEEIAKLDEDTARVAERVKKAIEDLAK
>2plus1_GFP11_Key_Cterm_156
(SEQ ID NO: 26897)
EAKKKLDEVLERAKETIDRLLETSDRSLEKVEADLRRLNEELDRSLERAERTIRELAK
>2plus1_GFP11_Key_Cterm_157
(SEQ ID NO: 26898)
RLVREVEDLVRRLVRRSEKSNEEVKRTVEELVRRMEESNDRVRDLVRRLVEELKRAVD
>2plus1_GFP11_Key_Cterm_158
(SEQ ID NO: 26899)
DKARKVAEVAEKVLRDIDKLDRESKEAFRATNEEIAKLDEDTARVAERVKKAIEDLAK
>2plus1_GFP11_Key_Cterm_159
(SEQ ID NO: 26900)
DEVTK7KKVADDVLAEIKKLDDETRRVIEDTNKKIADLDKATRDVVRKVLEEVKKLEK
>2plus1_GFP11_Key_Cterm_160
(SEQ ID NO: 26901)
TAERARETLKRLLDENRDRSKKVKEEIRRILEDLTRTTERVKREIAKLLKELEDTAR
>2plus1_GFP11_Key_Cterm_161
(SEQ ID NO: 26502)
DLKPVEERAREVSRRNEESMRRVKEDADRVSEANKEVLDRVREEVKRLIEEVRETLR
>2plus1_GFP11_Key_Cterm_162
(SEQ ID NO: 26903)
DKARKVAEVAEKVLRDIDKLDRESKEAFRATNEEIAKLDSDTARVAERVKKAIEDLAK
>2plus1_GFP11_Key_Cterm_163
(SEQ ID NO: 26904)
DEVTKVKKVADDVLAEIKKLDDETRRVIEDTNKKIADLDKATRDVVRKVLEEVKKLEK
>2plus1_GFP11_Key_Cterm_l64
(SEQ ID NO: 26905)
DKVERVVREVEKLHEEDRKRLEESTRSVRKLLEELKRELEKSTRSVKALVDELRERVR
>2plus1_GFP11_Key_Cterm_165
(SEQ ID NO: 26906)
EAKKKLDEVLERAKRTIDRLLETSDRSLEKVEADLRRLNEELDRSLERAERTIRELAK
>2plus1_GFP11_Key_Cterm_166
(SEQ ID NO: 26907)
TAERARETLKRLLDENRDRSKKVKEEIPRILEDLTRTTERVKREIAKLLKELEDTAR
>2plus1_GFP11_Key_Cterm_167
(SEQ ID NO: 26908)
TAERARETLKRLLDENRDRSKKVKEEIRRILEDLTRTTERVKREIAKLLKELEDTAR
>2plus1_GFP11_Key_Cterm_168
(SEQ ID NO: 26909)
DKARKVAEVAEKVLRDIDKLDRESKEAFRATNEEIAKLDEDTARVAERVKKAIEDLAK
>2plus1_GFP11_Key_Cterm_169
(SEQ ID NO: 26910)
DEVTKVKKVADDVLAEIKKLDDETRRVIEDTNKKIADLDKATRDVVRKVLEEVKKLEK
>2plus1_GFP11_Key_Cterm_170
(SEQ ID NO: 26911)
DKVERVVREVEKLHEEDRKRLEESTRSVRKLLEELKFELEK5TRSVKALVDELRERVR
>2plus1_GFP11_Key_Cterm_171
(SEQ ID NO: 26912)
TAERARETLKRLLDENRDRSKKVKEEIRRILEDLTRTTERVKREIAKLLKELEDTAR
>2plus1_GFP11_Key_Cterm_172
(SEQ ID NO: 26913)
DKARKVAEVAEKVLRDIDKLDRESKEAFRATNEEIAKLDEDTARVAERVKKAIEDLAK
>2plus1_GFP11_Key_Cterm_173
(SEQ ID NO: 26914)
RLVREVEDLVRRLVRRSEKSNEEVKRTVEELVRRMEESNDRVRDLVRRLVELLKRAVD
>2plus1_GFP11_Key_Nterm_174
(SEQ ID NO: 26915)
SESDEVIRDLARLLDELARHVDDSVRRMDEVVKRSTREADELAKRLDELVKEVEKKPG
>2plus1_GFP11_Key_Nterm_175
(SEQ ID NO: 26916)
SRAETVLKEVTDKIKKLADSSDELLRRNKENIDELKKSSEELLRRLTKAIEEIEKGSV
>2plus1_GFP11_Key_Nterm_176
(SEQ ID NO: 26917)
SVDEVLKEIEDALRRLKEEVERVLKENEDELRRLEEEVRRVLKEDEELLESLKRGVGE
>2plus1_GFP11_Key_Nterm_177
(SEQ ID NO: 26918)
SEVDEIIKELERLLAEIARENERIIRESRKLADEVRKRNEDAIRKLEELVARLADAVR
>2plus1_GFP11_Key_Nterm_178
(SEQ ID NO: 26919)
SEVDDVLPRLEELIKTLEDINAKSLEDIKKLIDDLAKILEDALRKHEKLIRELREAKK
>2plus1_GFP11_Key_Nterm_179
(SEQ ID NO: 26920)
SEVDDVLRRLEELIKTLEDTNAKSLEDIKKLIDDLAKILEDALRKHEKLIRELREAKK
>2plus1_GFP11_Key_Nterm_l80
(SEQ ID NO: 26921)
SRAETVLKEVTDKIKKLAD8SDELLRRNKENIDELKKSSEELLRRLTKAIEEIEKGSV
>2plus1_GFP11_Key_Nterm_181
(SEQ ID NO: 26922)
KEVEDAVKELEDLLRANEDKTRSIVEDMRASNKDLEDHSRASEEEVRKLLDDLRRAGV
>2plus1_GFP11_Key_Nterm_182
(SEQ ID NO: 26923)
SEVDDVLRRLEELIKTLEDINAKSLEDIKKLIDDLAKILEDALRKHEKLIRELREAKK
>2plus1_GFP11_Key_Nterm_183
(SEQ ID NO: 26924)
SESDEVIRDLARLLDELARHVDDSVRRMDEVVKRSTREADELAKRLDELVKEVEKKFG
>2plus1_GFP11_Key_Nterm_184
(SEQ ID NO: 26925)
SESDDVIRKLRELLEELRTHVEKSTRDLRKILEDSTRHAKRSIEELERLLEEVRKKPG
>2plus1_GFP11_Key_Nterm_185
(SEQ ID NO: 26926)
SRAETVLKEVTDKIKKLADSSDELLRRNKENIDELKKSSEELLRRLTKAIEEIEKGSV
>2plus1_GFP11_Key_Nterm_186
(SEQ ID NO: 26927)
SEAEKAKET1DRLADRVRKLLEEIKRSLDDSRRKSKETVEENEKTLDRMRKEVDAAKR
>2plus1_GFP11_Key_Nterm_187
(SEQ ID NO: 26928)
SEAEKAKETIDRIADRVRKLLEEIKRSLDDSRRKSKETVEENEKTLDRMRKEVDAAKR
>2plus1_GFP11_Key_Nterm_188
(SEQ ID NO: 26929)
SEVEELIKRLAKVLKELVDKVRKVIEDTKELLERLKRRSEDHIRKLREVLKEAKDQPI
>2plus1_GFP11_Key_Nterm_189
(SEQ ID NO: 26930)
SELEEIEKKVRELTKRHRELVERVRKTVKELIETNRRLLETLTERIKRVLEEVRDLER
>2plus1_GFP11_Key_Nterm_190
(SEQ ID NO: 26931)
SSEERLRAVIEDLKRLAEESRKRHKELIDELAKAVERISRRHKKLLDEIKAVVDDIRR
>2plus1_GFP11_Key_Nterm_191
(SEQ ID NO: 26932)
DEIRKVVKEITDLLKASNDKNRKVVEEIRDLLRKSKKLADELVERLRALVEDLRRRID
>2plus1_GFP11_Key_Nterm_192
(SEQ ID NO: 26933)
STAETVAESVERVLKHSDDLIKEVEDVNRRVEEEIKRVIRELEEENERLVAEVRKGVK
>2plus1_GFP11_Key_Nterm_193
(SEQ ID NO: 26931)
SEVDEIIKELERLLAEIAPENERIIRESRKLADEVRKRN2DAIRKLEELVARLADAVR
>2plus1_GFP11_Key_Nterm_194
(SEQ ID NO: 26935)
SEIDEVLTRLRKISKDLNETSDRVNERARKIIDDIKKESKRVNDEAREIVERLKREID
>2plus1_GFP11_Key_Nterm_195
(SEQ ID NO: 26936)
5EDEDLDRVAEKLAREHKKSVEEIKRVLKSADEE5KKLVRDTERVTEEIKREVEEARR
>2plus1_GFP11_Key_Nterm_196
(SEQ ID NO: 26937)
SSVEELLERLRRISEENKRRIEKLLREVEKVLRELKDRHRKLLKRVEEIIRKVKEEIK
>2plus1_GFP11_Key_Nterm_197
(SEQ ID NO: 26938)
SAADEVVERMKELVATVKRENDEVVKELKKLVKELEDDNRRVVEESKKSVEDLARRVG
>2plus1_GFP11_Key_Nterm_198
(SEQ ID NO: 26939)
SESDEVIRDLARLLDELARHVDDSVRRMDEVVKRSTREADELAKRLDELVKEVEKKPG
>2plus1_GFP11_Key_Nterm_199
(SEQ ID NO: 26940)
KEVEDAVKELEDLLRANEDKTRSIVEDMRASNKDLEDHSRASEEEVRKLLDDLRRAGV
>2plus1_GFP11_Key_Nterm_200
(SEQ ID NO: 26941)
DEIRKVVKEITDLLKASNDKNRKVVEEIRDLLRKSKKLADELVERLRALVEDLRRRID
>2plus1_GFP11_Key_Nterm_201
(SEQ ID NO: 26942)
SRVEEIIEDLRRLLEEIRKENEDSIRRSKELLDRVKEINDTIIAELERLLKDIEKEVR
>2plus1_GFP11_Key_Nterm_202
(SEQ ID NO: 26943)
SRVEEIIEDLRRLLEEIRKENEDSIRRSKELLDRVKEIKDTIIAELERLLKDIEKEVR
>2plus1_GFP11_Key_Nterm_203
(SEQ ID NO: 26944)
SEVDDVLRRLEELIKTLEDINAKSLEDIKKLIDDLAKILEDALRKHEKLIRELREAKK
>2plus1_GFP11_Key_Nterm_204
(SEQ ID NO: 26945)
SKLEEVEKAVRKVIEDSRRVNEEVNRRSEEVVRELEKVHREVNDASRRVVEKARRVLK
>2plus1_GFP11_Key_Nterm_205
(SEQ ID NO: 269746)
SESDEVTRDLARLLDELARHVDDSVRRMDEVVKRSTREADELAKRLDELVKEVEKKPG
>2plus1_GFP11_Key_Nterm_206
(SEQ ID NO: 26947)
SESDEVIRDLARLLDELARHVDDSVRRMDEVVKRSTREADELAKRLDELVKEVEKKPG
>2plus1_GFP11_Key_Nterm_207
(SEQ ID NO: 26948)
SESDDVIRKLRELLEELRTHVEKSIRDLRKILEDSTRHAKRSIEELERLLEEVRKKPG
>2plus1_GFP11_Key_Nterm_208
(SEQ ID NO: 26949)
DEVRELLERNPRLLEEIKKTVKDLIRANEELLKRIEDDAKRLIDRNEELLDELEKGLS
>2plus1_GFP11_Key_Nterm_209
(SEQ ID NO: 26950)
DEIRKVVKSITDLLKASNDKNRKVVEEIRDLLRKSKKLADELVERLRALVEDLRRRID
>2plus1_GFP11_Key_Nterm_210
(SEQ ID NO: 26951)
SRAETVLKEVTDKIKKLADSSDELLRRNKENTDELKKSSSELLRRLTKAIEEIEKGSV
>2plus1_GFP11_Key_Nterm_211
(SEQ ID NO: 26952)
DEEEDLERATKKLLDENRELLKRIAEELRRLLEELRRLTEESADRLRRLLKELKDRGV
>2plus1_GFP11_Key_Nterm_212
(SEQ ID NO: 26953)
DEIRKVVKEITDLLKASNDKNRKVVEEIRDLLRKSKKLADELVERLRALVEDLRRRID
>2plus1_GFP11_Key_Nterm_213
(SEQ ID NO: 26954)
SKEDRLREELKKLLARLAEEIERLKRALEESNKDLKRTIDASEKHLRDVNEDVKRGGV
>2plus1_GFP11_Key_Nterm_214
(SEQ ID NO: 26955)
SESDEVIRDLARLLDELARHVDDSVRRMDEVVKRSTREADELAKRLDELVKEVEKKPG
>2plus1_GFP11_Key_Nterm_215
(SEQ ID NO: 26956)
SESDEVIRDLARLLDELARHVDDSVRRMDEVVKRSTREADELAKRLDELVKEVEKKPG
>2plus1_GFP11_Key_Nterm_216
(SEQ ID NO: 26957)
SESDDVIRKLRELLEELRTHVEKSIRDLRKILEDSTRHAKRSIEELERLLEEVRKKPG
>2plus1_GFP11_Key_Nterm_217
(SEQ ID NO: 26958)
SRVEEIIEDLRRLLEEIRKENEDSIRRSKELLDRVKEIMDTIIAELERLLKDIEKEVR
>2plus1_GFP11_Key_Nterm_218
(SEQ ID NO: 26959)
SEVDEIIKELERLLAEIARENERIIRESRKLADEVRKRNSDAIRKLEELVARLADAVR
>2plus1_GFP11_Key_Nterm_219
(SEQ ID NO: 26960)
SSVEEL1ERLRRISEENKRRIEKLLREVEKVLRELKDRHRKLLKRVEEIIRKVKEEIK
>2plus1_GFP11_Key_Nterm_220
(SEQ ID NO: 26961)
SELEEVLRRIEALVRKAWKENEDVLREIERLVRTAHRLNKKVDDDSAKIAEDLKRGGR
>2plus1_GFP11_Key_Nterm_221
(SEQ ID NO: 26962)
SESDEVIRDLARLLDELARHVDDSVRRMDEVVKRSTREADELAKRLDELVKEVEKKPG
>2plus1_GFP11_Key_Nterm_222
(SEQ ID NO: 26963)
SESDDVIRKLRELLEELRTHVEKSIRDLRKILEDSTRHAKRSIEELERLLEEVRKKPG
>2plus1_GFP11_Key_Nterm_223
(SEQ ID NO: 26964)
SPAETVLKEVTDKIKKLADSSDELLRRNKENIDELKKS3EELLRRLTKAIEEIEKGSV
>2plus1_GFP11_Key_Nterm_224
(SEQ ID NO: 26965)
DEVRELLERNRRLLEEIKKTVKDLIRANEELLKRIEDDAKRLIDRNEELLDELEKGLS
>2plus1_GFP11_Key_Nterm_225
(SEQ ID NO: 26966)
5TEEVLDEIRKLHKTLTEDIKRVLREIEELHRRTIEENKEVLDKIAEDYKRVIDDVRT
>2plus1_GFP11_Key_Nterm_226
(SEQ ID NO: 26967)
SEIEKILKEIEDLARRDEEVSKKIVEDIRRLAKEVEDTSRDIVPKIEELAKRVLDRLR
>2plus1_GFP11_Key_Nterm_227
(SEQ ID NO: 26968)
SEAERLEARARELLRANEELMDDLRAKAEELLKRNDRLVKEIEKKVREVLAAIEELKR
>2plus1_GFP11_Key_Nterm_228
(SEQ ID NO: 26969)
DDLERAREEVADLIRKHEEKTRRILEESRRLNERHRELSARILDEIRKLAERIEELIK
>2plus1_GFP11_Key_Nterm_229
(SEQ ID NO: 26970)
DEEEDLEPAIKKLLDENRELLKRIAEELRRLLEELRRLTEESADRLRRLLKELKDRGV
>2plus1_GFP11_Key_Nterm_230
(SEQ ID NO: 26971)
DEIRKVVKEITDLLKASNDKNRKVVEEIRDLLRKSKKLADELVERLRALVEDLRRRID
>2plus1_GFP11_Key_Nterm_231
(SEQ ID NO: 26972)
DEIRKVVKEITDLLKASNDKNRKVVEEIRDLLRKSKKLADELVERLRALVEDLRRRID
>2plus1_GFP11_Key_Nterm_232
(SEQ ID NO: 26973)
STAETVEKKVEEVIRENEKSMRESEEKVDRSTKRIEDVLRRLEETIRKTSDDIAKGVK
>2plus1_GFP11_Key_Nterm_233
(SEQ ID NO: 26974)
SRVEEIIEDLRRLLEEIRKENEDSIRRSKELLDRVKEINDTIIAELERLLKDIEKEVR
>2plus1_GFP11_Key_Nterm_234
(SEQ ID NO: 26975)
SRVEE11EDLRRLLEEIRKENEDSIRRSKELLDRVKEINDTIIAELERLLKDIEKEVR
>2plus1_GFP11_Key_Nterm_235
(SEQ ID NO: 26976)
REVEEMIKELEELLKDLKEKNERASKRNRELVRRLEEENKRVIEELKKLVKELEDLVR
>2plus1_GFP11_Key_Nterm_236
(SEQ ID NO: 26977)
SEVDDVLRRLEELIKTLEDINAKSLEDIKKLIDDLAKILEDALRKHEKLIRELREAKK
>2plus1_GFP11_Key_Nterm_237
(SEQ ID NO: 26978)
SKLEEVEKAVRKVIEDSRRVNEEVNRRSEEVVRELEKVHREVNDASRRVVEKARRVLK
>2plus1_GFP11_Key_Nterm_238
(SEQ ID NO: 26979)
DEVEDVLRKIEKILDDHRKRIEKNSRDMARIIDEHRRKVEENSREMKKLVDDLKKAVD
>2plus1_GFP11_Key_Nterm_239
(SEQ ID NO: 26980)
SSVEELLERLRRISEENKRRIEKLLREVEKVLRELKDRHRKLLKRVEEIIRKVKEEIK
>2plus1_GFP11_Key_Nterm_240
(SEQ ID NO: 26981)
DEVEKVLEEIKRALDDLRKKVEESKREIKEALKAVEKHTRDSDTANKRTLAEIERGVK
>2plus1_GFP11_Key_Nterm_241
(SEQ ID NO: 26982)
SESDEVIRDLARLLDELARHVDDSVRRMDEVVKRSTREADELAKRLDELVKEVEKKPG
>2plus1_GFP11_Key_Nterm_242
(SEQ ID NO: 26983)
KEVEDAVKELEDLLRANEDKTRSIVEDMRASNKDLEDHSRASEEEVRKLLDDLRRAGV
>2plus1_GFP11_Key_Nterm_243
(SEQ ID NO: 26984)
DEIRKVVKEITDLLKASNDKNRKVVEEIRDLLRKSKKLADELVERLRALVEDLRRRID
>2plus1_GFP11_Key_Nterm_244
(SEQ ID NO: 26985)
STAETVAEEVERVLKHSDDLIKEVEDVNRRVEEEIKRVIRELEEENERLVAEVRKGVK
>2plus1_GFP11_Key_Nterm__245
(SEQ ID NO: 26986)
SRVEEIIEDLRRLLEEIRKENEDSIRRSKELLDRVKEINDTIIAELERLLKDIEKEVR
>2plus1_GFP11_Key_Nterm_246
(SEQ ID NO: 26987)
SEVDEIIKELEPLLAEIARENERIIRESFKLADEVRKRNEDAIRKLEELVARLADAVR
>2plus1_GFP11_Key_Nterm_247
(SEQ ID NO: 26988)
SEVDDVLRRLEELIKTLEDINAKSLEDIKKLIDDLAKILEDALRKHEKLIRELREAKK
>2plus1_GFP11_Key_Nterm_248
(SEQ ID NO: 26989)
SKLEEVEKAVRKViEDSRRVNEEVNRRSEEVVRELEKVHREVNDASRRVVEKARRVLK
>2plus1_GFP11_Key_Nterm_249
(SEQ ID NO: 26990)
SAEEVKEELKRIATKLKEEIKENIRRLEESVEKIAKELAENIKRLEDILRDVKRGLRD
>2plus1_GFP11_Key_Nterm_250
(SEQ ID NO: 26991)
SDVDRVLEEIRKLLEDLKRHSEKVSEENEDLLRANTELNKRVSEDNERLLEELKRLRE
>2plus1_GFP11_Key_Nterm_251
(SEQ ID NO: 26992)
DEVEDVLRKTEKILDDHRKRIEKNSRDMARIIDEHRPKVEENSREMKKLVDDLKKAVD
>2plus1_GFP11_Key_Nterm_252
(SEQ ID NO: 26993)
SSVEELLERLRRISEENKRRIEKLLREVEKVLRELKDRHRKLLKRVEEIIRKVKEEIK
>2plus1_GFP11_Key_Nterm_253
(SEQ ID NO: 26994)
DPEREVKKRLDEVRERIEPLLRRVEEESRRVAEEIRRLIEEVRRRNKKVTEEIRELLK
>2plus1_GFP11_Key_Nterm_254
(SEQ ID NO: 26995)
SRAETVLKEVTDKIKKLADSSDELLRRNKENIDELKKSSEELLRRLTKAIEEIEKGSV
>2plus1_GFP11_Key_Nterm_255
(SEQ ID NO: 26996)
SEIEKI1KEIEDLARRDEEVSKKIVEDIRRLAKEVEDTSRDIVRKIEELAKRVLDRLR
>2plus1_GFP11_Key_Nterm_256
(SEQ ID NO: 26997)
SEAEKAKETIDRIADRVRKLLEEIKRSLDDSRRKSKETVEENEKTLDRMRKEVDAAKR
>2plus1_GFP11_Key_Nterm_257
(SEQ ID NO: 26998)
SEVEELIXRLAKVLKELVDKVRKVIEDTKELLERLKRRSEDHIRKLREVLKEAKDQPI
>2plus1_GFP11_Key_Nterm_258
(SEQ ID NO: 26999)
DEIRKVVKEITDLLKASNDKNRKVVEEIRDLLRKSKKLADELVERLRALVEDLRRRID
>2plus1_GFP11_Key_Nterm_259
(SEQ ID NO: 27000)
DEIRKVVKEITDLLKASNDKNRKVVEEIRDLLRKSKKLADELVERLRALVEDLRRRID
>2plus1_GFP11_Key_Nterm_260
(SEQ ID NO: 27001)
STAETVEKKVEEVIRENEKSMRESEEKVDRSTKRIEDVLRRLEETIRKTSDDIAKGVK
>2plus1_GFP11_Key_Nterm_261
(SEQ ID NO: 27002)
SRVEEIIEDLRRLLEEIRKENEDSIRRSKELLDRVKEINDTIIAELERLLKDIEKEVR
>2plus1_GFP11_Key_Nterm_262
(SEQ ID NO: 27003)
REVEEMIKSLEELLKDLKEKNERASKRNRELVRRLEEENKRVTEELKKLVKELEDLVR
>2plus1_GFP11_Key_Nterm_263
(SEQ ID NO: 27004)
DAVEEAEKLIRKVIADSEKLLRDLADLNAKSIRRSEKLVEDDRRANEDVIRKLEELRR
>2plus1_GFP11_Key_Nterm_264
(SEQ ID NO: 27005)
SEVDDVLRRLEELIKTLEDINAKSLEDIKKLIDDLAKILEDALRKHEKLIRELREAKK
>2plus1_GFP11_Key_Nterm_265
(SEQ ID NO: 27006)
SEIERVKKRLEELLAEVEESTRRLEERLKRLLEEAKRSSEEVEKELRRLLEAVRRGLS
>2plus1_GFP11_Key_Nterm_266
(SEQ ID NO: 27007)
SDVDRVLEEIRKLLEDLKRHSEKVSEENEDLLRANTELNKRVSEDNERLLEELKRLRE
>2plus1_GFP11_Key_Nterm_267
(SEQ ID NO: 27008)
DEVEDVLRKIEKILDDHRKRIEKNSRDMARIIDEHRRKVEENSREMKKLVDDLKKAVD
>2plus1_GFP11_Key_Nterm_268
(SEQ ID NO: 27009)
SESDEVIRDLARLLDELARHVDDSVRRMDEVVKRSTREADELAKRLDELVKEVEKKPG
>2plus1_GFP11_Key_Nterm_269
(SEQ ID NO: 27010)
SRAETVLKEVTDKIKKLADSSDELLRRNKENIDELKKSSEELLRRLTKAIEEIEKGSV
>2p1us1_GFP11_Key_Nterm_270
(SEQ ID NO: 27011)
DEEEDDERAIKKLLDENRELLKRIAEELRRLLEELRRLTEESADRLRRLLKELKDRGV
>2plus1_GFP11_Key_Nterm_271
(SEQ ID NO: 27012)
DEIRKVVKEITDLLKASNDKNRKVVEEIRDLLRKSKKLADELVERLRALVEDLRRRID
>2plus1_GFP11_Key_Nterm_272
(SEQ ID NO: 27013)
DAVEEAEKLIRKVIADSEKLLRDLADLNAKSIRRSEKLVEDDRRANEDVIRKLEELRR
>2plus1_GFP11_Key_Nterm_m273
(SEQ ID NO: 27014)
SEDEDLDRVAEKLAREHKKSVEEIKRVLKSADEESKKLVRDTERVIEEIKREVEEARR
>2plus1_GFP11_Key_Nterm_274
(SEQ ID NO: 27015)
5KEDRLREELKKLLARLAEEIERLXRALEESNKDLKRTIDASEKHLRDVNEDVKRGGV
>3plus1_Key_668_Nterm
(SEQ ID NO: 27,322)
DEAKELLDEIRKAVKESEDRLEKLLRDYEKELRRLEKELRDLKRRIEEKLEELRRGSL
>3plus1_Key_668_Cterm
(SEQ ID NO: 27,323)
RGADALSRLLEELLRVVDDLIRVLKELIDKSRKVIEELLELLKRINEENLKVLAEIIK
>3plus1_Key_668_Cterm
(SEQ ID NO: 27,324)
SEKEKLLKESEEEVFRLRRTLEELLRKYREVLERLRKELREIEERVRDVVRRLKEVLD
>3plus1_Key_668_Cterm
(SEQ ID NO: 27,325)
SEKEDAARKLRKLVEELTREYEELVKKLERLIEEIEKVSEESVRKLEKLLAEISEEVR
>3plus1_Key_668_Cterm
(SEQ ID NO: 27,326)
EALRKLVELLVEVLRRLIRVNRELVKLLREVLERLLRILRESVKKLKRLIEKVIKDAT
>3plus1_Key_669_Nterm
(SEQ ID NO: 27,327)
RAVKKLDEIVKEVAKKLEDVVRANEELWRALVELNKESVRRLREIVERVARDLEETAR
>3plus1_Key_670_Nterm
(SEQ ID NO: 27,328)
SDERRIAERIRELLRESKKLVFDVVEEAKRLLKENRDSTRKIIEDIRRLLRKIEDSTR
3plus1_Key_670_Cterm
(SEQ ID NO: 27,329)
SKEETLRKEAEDLLRRLEELTRRLEKKARELLERAKKLSRDLAEELKRLLKELREKGV
3plus1_Key_670_Cterm
(SEQ ID NO: 27,330)
AAKRLVEELLKAVTDLSRKNKRILSELLKAIETLSDENKKILTEILDALRRLVEKIEK
3plus1_Key_670_Cterm
(SEQ ID NO: 27,331)
KEREEVKEKLDRLLEEVEKTVRELKREHDELLKEVEKLVRDLKKEHDELLKKVKDDGV
3plus1_Key_670_Nterm
(SEQ ID NO: 27,332)
DRLDKVEELVKKLLEDTKRTVDRVRELVRKILKKSRETLEELERLIEKILRELEKDAR
3plus1_Key_670_Cterm
(SEQ ID NO: 27,333)
SERETVKRRLEELLKEVKRTLDKLKEEHDRLLEDVRRVVEELKREHDKLLKEVKDSGV
3plus1_Key_670_Nterm
(SEQ ID NO: 27,334)
SEDEIIKKIIEDLRRVLKEVEEIHKEVEERLDKVLKEAEEMHKEVLKELDRVLDEVKR
3plus1_Key_670_Nterm
(SEQ ID NO: 27,335)
SREEVLRELEEVIEDNRRLLEELISKSKKVLDESLKLIDELLPRLEEVLERVLRLLEE
3plus1_Key_670_Nterm
(SEQ ID NO: 27,336)
ISEDDLKRVVDEVEKKLRELKRRYAEALERIKEKIKELKDRYEPAVREVVAELRKTTK
>3plus1_Key_670_Nterm
(SEQ ID NO: 27,337)
SKAEEIAEKLDRLLEENRRALEEITTRLDDLLRRNKDALRKVMEKLKRLLDDLRRGGI
>3plus1_Key_671_Cterm
(SEQ ID NO: 27,338)
VDSERVKEILERILRVVEEAVRLNEESLRRILDVVRKAVKLDRESLKKILDVVEEAVR
>3plus1_Key_671_Cterm
(SEQ ID NO: 27,339)
VKDDEVEREIRRVKEDLDRILEEYRRLLEEIKRKLEEILRRVEELKRRLRRKLEEIDR
>3plus1_Key_671_Cterm
(SEQ ID NO: 27,340)
SRVEELKKLIEDILRISREVVERIKRVAEDIHRINRRVLDDLRKLIEDILRTVEEILA
>3plus1_Key_671_Cterm
(SEQ ID NO: 27,341)
RGADALSRLLEELLRVVDDLIRVLKELIDKSRKVIEELLELLKRINEENLKVLAEIIK
>3plus1_Key_672_Cterm
(SEQ ID NO: 27,342)
RGADALSRLLEELLRVVDDLIRVLKELIDKSRKVIEELLSLLKRINEENLKVLAEIIK
>3plus1_Key_67>3_Nterm
(SEQ ID NO: 27,343)
EALRKLVELLVEVLRRLIRVNRELVKLLREVLERLLRILRESVKKLKRLIEKVIKDAT
>3plus1_Key_67>3_Nterm
(SEQ ID NO: 27,344)
SEKEDAARKLRKLVEELTREYEELVKKLEFLIEEIEKVSEESVRKLEKLLAEISEEVR
>3plus1_Key_67>3_Nterm
(SEQ ID NO: 27,345)
SEKEDAARKLPKLVEELTREYEELVKKLERLIEEIEKVSEESVRKLEKLLAEISEEVP
>3plus1Key_674_Nterm
(SEQ ID NO: 27,346)
SEKEDAARKLRKLVEELTREYEELVKKLERLIEEIEKVSEESVRKLEKLLAEISEEVR
>3plus1_Key_674_Cterm
(SEQ ID NO: 27,347)
RAVKKLDEIVKEVAKKLEDVVRANEELWRALVELNKESVRRLREIVERVARDLEETAR
>3plus1_Key_675_Nterm
(SEQ ID NO: 27,348)
RAVKKLDEIVKEVAKKLEDVVRANEELWRALVELNKESVRRLREIVERVARDLEETAR
>3plus1_Key_676_Nterm
(SEQ ID NO: 27,349)
RAVKKLDEIVKEVAKKLEDVVRANBELWRALVELNKESVRRLREIVERVARDLEETAR
>3plus1_Key_677_Nterm
(SEQ ID NO: 27,350)
SDERRIAERIRELLRESKKLVRDVVEEAKRLLKENRDSTRKIIEDIRRLLRKIEDSTR
>3plus1_Key_677_Cterm
(SEQ ID NO: 27,351)
SKEETLRKEAEDLLRRLEELTRRLSKKARELLERAKKLSRDLAEELKRLLKELREKGV
>3plus1_Key_678_Nterm
(SEQ ID NO: 27,352)
SKEETLRKEAEDLLRRLEELTRRLEKKARELLERAKKLSRDLAEELKRLLKELREKGV
>3plus1_Key_678_Cterm
(SEQ ID NO: 27,353)
SKEETLRKEAEDLLRRLEELTRRLEKKAPELLERAKKLSRDLAEELKRLLKELREKGV
>3plus1_Key_678_Cterm
(SEQ ID NO: 27,354)
ISEDDLKRVVDEVEKKLRELKRRYAEALERIKEKIKELKDRYERAVREVVAELRKTTK
>3plus1_Key_678_Nterm
(SEQ ID NO: 27,355)
SKAEEIAEKLDRLLEENRRALESITTPLDDLLRRNKDALRKVMEKLKRLLDDLRRGGI
>3plus1_Key_678_Nterm
(SEQ ID NO: 27,356)
VDSERVKEILERILRVVEEAVRLNEESLRRILDVVRKAVKLDRESLKKILDVVEEAVR
>3p1us1_Key_679_Cterm
(SEQ ID NO: 27,357)
SKAEEIAEKLDRLLEENRRALEEITTRLDDLLRRNKDALRKVMEKLKRLLDDLRRGGI
>3plus1_Key_679_Nterm
(SEQ ID NO: 27,358)
SKAEEIAEKLDRLLEENPRALEEITTRLDDLLRPNKDALRKVMEKLKRLLDDLRRGGI

[0172] In another specific embodiment, the key polypeptides comprise a polypeptide having at least 40%, 45%, 50%, 55%, 60%, 65%. 70%, 75%, 80%, 85%, 90%, 91%, 92%, 93%. 94%, 95%, 96%, 97%, 98%, 99%, or 100% sequence identity along their length to the amino acid sequence of a key polypeptide in Table 2 or 5 (polypeptides with an odd-numbered SEQ ID NO between SEQ ID NOS: 27127 and 27277), Table 3, and/or Table 4. in another specific embodiment, the key polypeptides comprise a polypeptide having at least 40%, 45%, 50%, 55%, 60%, 65%, 70%, 75%, 80%, 85%, 90%, 91%, 92%, 93%, 94%, 95%, 96%, 97%, 98%, 99%, or 100% sequence identity along their length to the amino acid sequence of a key polypeptide in Table 3. In another specific embodiment, the key polypeptides comprise a polypeptide having at least 40%, 45%, 50%, 55%, 60%, 65%, 70%. 75%, 80%, 85%, 90%. 91%, 92%, 93%, 94%, 95%, 96%, 97%, 98%, 99%, or 100% sequence identity along their length to the amino acid sequence of a key polypeptide in Table 4. In one embodiment of each of the above, the percent identify may be determined without the optional N- and C-terminal 60 amino acids; in another embodiment, the percent identify may be determined with the optional N- and C-terminal 60 amino acids.

[0173] In a specific embodiment, the polypeptides comprise a polypeptide having at least 40%. 45%, 50%, 55%. 60%, 65%, 70%, 75%, 80%, 85%, 90%, 91%, 92%, 93%, 94%, 95%, 96%, 97%, 98%, 99%, or 100% sequence identity along its length to the amino acid sequence of a key polypeptide selected from the group consisting of SEQ ID NOS: 28477-28486.

[0174] The polypeptides of the disclosure (i.e.: cage polypeptides and key polypeptides) may include additional residues at the N-terminus, C-terminus, internal to the polypeptide, or a combination thereof; these additional residues are not included in determining the percent identity of the polypeptides of the invention relative to the reference polypeptide. Such residues may be any residues suitable for an intended use, including but not limited to tags. As used herein, “tags” include general detectable moieties (i.e.: fluorescent proteins, antibody epitope tags, etc.), therapeutic agents, purification tags (His tags, etc.), linkers, ligands suitable-for purposes of purification, ligands to drive localization of the polypeptide, peptide domains that add functionality to the polypeptides. etc. Examples are provided herein.

[0175] In one embodiment, the polypeptides are fusion proteins that comprise a cage polypeptide disclosed herein fused to a key polypeptide disclosed herein. In one embodiment, the fusion protein comprises a cage polypeptide fused to a key polypeptide, wherein the cage polypeptide is not activated by the key polypeptide. As noted herein, orthogonal LOCKR designs (see FIG. 3) are denoted by lowercase letter subscripts: LOCKR, consists of Cageₐ and Keyₐ, and LOCKR_{b} consists of Cage_{b} and Key_{b}, etc. such that Cage₃ is only activated by Keyₐ, and Cage_{b} is only activated by Key_{b}, etc. Thus, for example, the fusion protein may comprise a cage, polypeptide fused to a key_{b} polypeptide. Such embodiments may be used, for example, in combinations to improve control of orthogonal LOCKR designs (ex: LOCKR 1 comprises a cageₐ-key_{b} fusion polypeptide, and LOCKR 2 comprises a cagey-key, fusion polypeptide, which can then be expressed in the same cell).

[0176] As used herein, “orthogonally” or “orthogonal” means that particular key polypeptides and cage polypeptides may function together, while others may not. Thus, two or more different orthogonal systems of key polypeptide and cage polypeptides may independently function in the same system, cell, or organism without interfering with each other. However, as clearly noted herein, multiple individual key polypeptides may function with a variety of different cage polypeptides, and, multiple individual cage polypeptides may function with a variety of different key polypeptides.

[0177] In one embodiment of the fusion proteins disclosed herein, the cage polypeptide and the key polypeptide components of the fusion protein comprise at least one cage polypeptide and at least one key polypeptide comprising an amino acid sequence having at least 45%, 50%, 55%, 60%, 65%, 70%, 75%, 80%, 85%, 90%. 91%, 92%, 93%, 94%, 95%, 96%, 97%, 98%, 99%. or 100% sequence identity along its length to a cage polypeptide and a key polypeptide, respectively, in different rows of Table 2, Table 3, Table 4, and/or Table 5 (i.e.: each cage polypeptide in row 1 column 1 of the table can be fused with any key polypeptide in row 1 column 2, and so on). In embodiments, relating to Tables 2, 3, 4, and 5, the degron is not included in the amino acid sequence of the cave polypeptide, arid would be added within the latch region, including but not limited to those degron amino acid sequences disclosed herein.

TABLE 2

| Row | | |
|---|---|---|
| number | Cage (column 1) | Key (column 2) |
| 1 | SB76L (SEQ ID NO: 1), | SB76_C-helix |
| | SB76L_17 (SEQ ID NO: 2), | (SEQ ID NO: 27016), |
| | SB76L_18 (SEQ ID NO: 3), | SB76_C-helix-biotin |
| | LOCKR_extend5 (SEQ ID NO: 4), | (SEQ ID NO: 27017), |
| | LOCKR_extend9 (SEQ ID NO: 5), | p5_MBP (SEQ ID NO: 27018), |
| | LOCKR_extend18 (SEQ ID NO: 6). | p9_MIBP (SEQ ID NO: 27019), |
| | miniLOCKRa_1 (SEQ ID NO: 12), | p18_MBP (SEQ ID NO: 27020), |
| | miniLOCKRa_2 (SEQ ID NO: 13), | p76-long (SEQ ID NO: 27027), |
| | aBcl2LOCKR (SEQ ID NO: 18), | p76-short (SEQ ID NO: 27028), |
| | pBimLOCKR (SEQ ID NO: 19), | k76-long (SEQ ID NO: 27029), |
| | BimLOCKR_extend5 (SEQ ID NO: 20), | k76-short (SEQ ID NO: 27030), |
| | BimLOCKR_extend9 (SEQ ID NO: 21), | p76_GLISE (SEQ ID NO: 27031), |
| | BimLOCKR_extend18 (SEQ ID NO: 22), | p76_GSSEKIS |
| | strepLOCKRa (all variants; SEQ ID NOs: 26-34), | (SEQ ID NO: 27032), |
| | SB13_LOCKR (SEQ ID NO: 35), | p76_R26G (SEQ ID NO: 27033), |
| | SB13_LOCKR_extend18 (SEQ ID NO: 37), | p76-short_E19G |
| | ZCX12_LOCKR (SEQ ID NO: 36), | (SEQ ID NO: 27034), |
| | ZCX12_LOCKR_extend18 (SEQ ID NO: 38) | p76-short_GLISE_E01_EGFR |
| | fretLOCKRa (SEQ ID NO: 39), | (SEQ ID NO: 27035), |
| | 1fix-latch_Mad1SID_t0_1 (SEQ ID NO: 61), | p76-short_AE_EGFR |
| | 1fix-latch_Mad1SID T0_2 (SEQ ID NO: 65), | (SEQ ID NO: 27036), |
| | 1fix-long-Bim-t0 (SEQ ID NO: 54), | p76-short_AAE_EGFR |
| | 1fix-long-GFP-t0 (SEQ ID NO: 55), | (SEQ ID NO: 27037), |
| | 1fix-short-BIM-t0 (SEQ ID NO: 56), | p76-short_EE_EGFR |
| | 1fix-short-GFP-t0 (SEQ ID NO: 57), | (SEQ ID NO: 27038) |
| | 1fix-short-noBim-t0 (SEQ ID NO: 16), | |
| | 1fix-short-noBim(AYYA)-t0 (SEQ ID NO: 17), | |
| | 1fix-short-Bim-t0-relooped (SEQ ID NO: 67), | |
| | 1fix-short-spytag-t0_2 (SEQ ID NO: 68), | |
| | 1fix-short-spytag-t0_8 (SEQ ID NO: 69), | |
| | 1fix-short-TEV-t0_1 (SEQ ID NO: 70), | |
| | 1fix-short-TEV-t0_6 (SEQ ID NO: 71). | |
| | 1fix-short-nanoBit-t0_1 (SEQ ID NO: 72), | |
| | 1fix-short-nanoBit-t0_3 (SEQ ID NO: 73), | |
| | 1fix-short-RHIM-t0_8 (SEQ ID NO: 74), | |
| | 1fix-short-RHIM-t0_19 (SEQ ID NO: 75). | |
| | 1fix-short-RHIM-t0_22 (SEQ ID NO: 76), | |
| | 1fix-short-gcn4-t0_4 (SEQ ID NO: 77), | |
| | 1fix-short-ccDi-t0_6 (SEQ ID NO: 78), | |
| | 1fix-short-cc-a-t0_6 (SEQ ID NO: 79), | |
| | 1fix-short-cc-b-t0_6 (SEQ ID NO: 80) | |
| 2 | LOCK-Rb (SEQ ID NO: 7), | key_b (SEQ ID NO: 27022) |
| | BimLOCKRb (SEQ ID NO: 23), | |
| | fretLOCKRb (SEQ ID NO: 40) | |
| 3 | LOCKRc (SEQ ID NO: 8), | key_c (SEQ ID NO: 27023) |
| | miniLOCKRc_1 (SEQ ID NO: 14). | |
| | miniLOCKRc_2 (SEQ ID NO: 15), | |
| | BimLOCKRc (SEQ ID NO: 24), | |
| | fretLOCKRc (SEQ ID NO: 41) | |
| 4 | LOCKRd (SEQ ID NO: 9), | key_d (SEQ ID NO: 27024) |
| | BimLOCKRd (SEQ ID NO: 25), | |
| | fretLOCKRd (SEQ ID NO: 42) | |
| 5 | LOCKRe (SEQ ID NO: 10) | key_e (SEQ ID NO: 27025) |
| 6 | LOCKRf (SEQ ID NO: 11) | key_f (SEQ ID NO: 27026) |
| 7 | 1fix_VMAc_C_BIMlatcht9 (SEQ ID 51) | sfGFP_VMAn_p18 |
| | sfGFP_VMAn_1fix_BIM_t0_latch | (SEQ ID NO: 27041) |
| | (SEQ ID NO: 52) | p18_VMAc_mCherry |
| | sfGFP_VMAn_1fix_BIM_t0_latch | (SEQ ID NO: 27042) |
| | (SEQ ID NO: 53) | |
| 8 | Spycatcher-1fix-long-GFP-t0 (SEQ ID NO: 58), | p76-spytag (SEQ ID NO: 27039), |
| | Spycatcher-1fix-short-GFP-t0 (SEQ ID NO: 59) | p76-short-spytag |
| | | (SEQ ID NO: 27040) |
| 9 | STREPII-2plus1_LOCK_1 (SEQ ID NO: 81) | 2plus1_Key_1 |
| | | (SEQ ID NO: 27043) |
| 10 | STREPII-2plus1_LOCK_2 (SEQ ID NO: 82) | 2plus1_Key_2 |
| | | (SEQ ID NO: 27044) |
| 11 | STREPII-2plus1_LOCK_3 (SEQ ID NO: 83) | 2plus1_Key_3 |
| | STREPII-2plus1_LOCK_3-relooped | (SEQ ID NO: 27045) |
| | (SEQ ID NO: 91) | |
| 12 | STREPII-2plus1_LOCK_4C (SEQ ID NO: 84) | 2plus1_Key_4C |
| | | (SEQ ID NO: 27046) |
| 13 | STREPII-3plus1_LOCK_1 (SEQ ID NO: 86) | 3plus1 _Key_1 |
| | | (SEQ ID NO: 27047) |
| 14 | STREPII-3plus1_LOCK_2 (SEQ ID NO: 87) | 3plus1_Key_2 |
| | | (SEQ ID NO: 27048) |
| 15 | STREPII-3plus1_LOCK_3 (SEQ ID NO: 88) | 3plus1_Key_3 |
| | STREPII-3plus1_LOCK_3-relooped | SEQ ID NO: 27049) |
| | (SEQ ID NO: 90) | |
| 16 | STREPII-3plus1_LOCK_4 (SEQ ID NO: 89) | 3plus1_Key_4 |
| | | (SEQ ID NO: 27050) |

[0178] In other embodiments of the kits and degron LOCKR switches of the second and third aspects, the one or more cage polypeptide and the one or more key polypeptide comprise at least one cage polypeptide and at least one key polypeptide comprising an amino acid sequence having at least 40%, 45%, 50%, 55%, 60%, 65%, 70%, 75%, 80%, 85%, 90%, 91%, 92%. 93%, 94%, 95%, 96%, 97%, 98%, 99%, or 100% sequence identity along the length of a cage polypeptide and a key poly⁻peptide, respectively, the in the same row of Table 6 or Table 7 (i.e.: all cage polypeptides listed in row #1 can be used together with all key polypeptides in row 1; etc.):

TABLE 3

| Cage Name | Cage Sequence | Key Name | Key Sequence |
|---|---|---|---|
| 2plus1_Cage_Cterm_2406 | SEVDEVVKEVEDLVRPNEELVEEVVRRVEKVVTDDRRLVEEVVREI | 2plus1_Key_Cterm_2406 | EKVLRKLEKVIREVRERSTRALRKVE |
| | RKIVKDVEDLARKLDKEELKPVLDEMRERIERLLEKLRRHSKKLDD | | EVIRRVREESERALRDLERVVKEVEK |
| | ELKRLLEELREHSRRVEKRLEDLLKELRERGVDEKVLRKLEKVIRE | | RMREAAR(SEQ ID NO: 27127) |
| | VRERSTRALRKVEEVIRRVREESERALRDLERVVKEVEKRMREAAR | | |
| | (SEQ ID NO: 27126) | | |
| 2plus1_Cage_Cterm_5398 | SVEELLRKLEEVLRKIREENERSLKELRDRAREIVKRNRETNRELE | 2Plus1_Key_Cterm_5398 | EDIVRKIERIVETIEREVRESVKKVE |
| | EVIKELEKRLSGADKEKVEELVRRIRRIVERVVEEDRRTVEEIEKI | | EIARDIRRKVDESVKNVEKLLRDVDK |
| | AREVVKRDRDSADPYRRTVEDVLRKATGSEDIVRKIERIVETIERE | | KARDRKK(SEQ ID NO: 27129) |
| | VRESVKKVEEIARDIRPKVDESVKNVEKLLRDVDKKARDRKK(SEQ | | |
| | ID NO: 27128) | | |
| 2plus1_Cage_Cterm_5405 | SESDDVIRKLRELLEELRTHVEKSIRDLRKILEDSTRHAKRSIEEL | 2plus1_Key_Cterm_5405 | EEKLKDLIRKLRDILRRAAEAHKKLI |
| | ERLLEEVRKKPGDEEVRKTVEEISRRVAENVKRLEDLYRRMEEEVK | | DDARESLERAKREHEKLIDRLKKILE |
| | KNLDRLRKRVEDIIREVEEARKKGVDEEKIKDLIRKLRDILRRAAE | | ELER(SEQ ID NO: 27131) |
| | AHKKLIDDARESDEPARPEHEKLIDRLKKILEELER(SEQ ID | | |
| | NO: 27130) | | |
| 2plus1_Cage_Cterm_5406 | DREREVKKRLDEVPERIERLLRRVEEESRRVAEEIRRLIEEVRRRN | 2plus1_Key_Cterm_5406 | EELREELKKLERKIEKVAKEIHDHDK |
| | KKVTEEIRELLKGLKDKEEVRRVLERLRKLNAESDELLERILERLR | | EVTERLEDLLRRITEHARKSDREIEE |
| | RLVEATNRLVKAIIEELRRLVEKIVREVPDSEELREELKKLERKIE | | TAR(SEQ ID NO: 27133) |
| | KVAKEIHDHDKEVTERLEDLLRRITEHARKSDREIEETAR(SEQ | | |
| | ID NO: 27132) | | |
| 2plus1_Cage_Cterm_5409 | SEAEELLKRLEDRAEEILRRLEEILRTSRKLAEDVLRELEKLLRES | 2plus1_Key_Cterm_5409 | KEVVDEIKRIVDEVRERLKRIVDENA |
| | ERRIREVLEELRGIKDKKELEDVIREVEKELDESLERSRELLKDVL | | KIVEDARRALEKIVKENEEILRRLKK |
| | KKLDDNLKESERLVEDIDRELAKILEDLKKAGVPKEVVDEIKRIVD | | ELRELRK(SEQ ID NO: 27135) |
| | EVRERLKRIVDENAKIVEDARRALEKIVKENEEILPRLKKELRELR | | |
| | K(SEQ ID NO: 27134) | | |
| 2plus1_Cage_Cterm_5410 | SRAETVLKEVTDKIKKLADSSDELLRRNKENIDELKKSSEELLRRL | 2plus1_Key_Cterm_5410 | DEVVKRVRDLLDTVRRRNEKVNEDVK |
| | TKAIEEIEKGSVDEETLEELIRRVEAELEAHHRELEKNSREDEKRN | | RMNDKLRRDNEDVIRRVEKLLRELEE |
| | RDHHAKLEEEMRRVEERLEREGIDDEVVKRVRDLLDTVRRRNEKVN | | KRRT(SEQ ID NO: 27137) |
| | EDVKRMNDKLRRDNEDVIRRVEKLLRELEEKRRT(SEQ ID | | |
| | NO: 27136) | | |
| 2plus1_Cage_Cterm_5413 | STEEVLDEIRKLHKTLTEDIKRVLREIEELHRRTIEENKEVLDKIA | 2plus1_Key_Cterm_5413 | AEELLRESKEAIKEVKRVLEELRKES |
| | EDYKRVIDDVRTKDTPNVEKLLKDLEKSAKENIEHNERTLREDDRV | | KRVVDETRKLSEENLEHSERVLRKVE |
| | LKEIRRRATELLKANEEMLRRIEEVARKGGVDAEELLRESKEAIKE | | EDLR(SEQ ID NO: 27139) |
| | VKRVLEELRKESKRVVDETRKLSEENLEHSERVLPKVEEDLR(SEQ | | |
| | ID NO: 27138) | | |
| 2plus1_Caqe_5414_GEP11_Cterm | SEIEKILKEIEDLARRDEEVSKKIVEDIRRLAKEVEDTSRDIVRKI | 2plus1_Key_Cterm_5414 | EDSERLVREVEDLVRRLVRRSEKSNE |
| | EELAKRVLDRLRKDGSKEELEKEVREVVKTLEELVKDNHRLIRRAV | | EVKRTVEELVRRMEESNDRVRDLVRR |
| | EEMKRLVEENHRHSREVVKELEDLVPELRKGSGSEDSERDHMVLHE | | LVEELKRAVD(SEQ ID |
| | YVNAAGITSEKSNEEVKRTVEELVRRMEESNDRVRDLVRRLVEELK | | NO: 27141) |
| | RAVD(SEQ ID NO: 27140) | | |
| 2plus1_Cage_5414_GFP11_Cterm | SEIEKILKEIEDLARRDEEVSKKIVEDIPPLAKEVEDTSRDIVRKI | 2plus1_Key_Cterm_5414 | EDSERLVREVEDIVRRLVRRSEKSNE |
| | EELAKRVLDRLRKDGSKEELEKEVREVVKTLEELVKDNHRLIRRAV | | EVKRTVEELVRRMEESNDRVRDLVRR |
| | EEMKRLVEENHPESREVVKELEDLVRELRKGSGSEDSERRDHMVLH | | IVEELKRAVD(SEQ ID |
| | EYVNAAGITEKSNEEVKRTVEELVRRMEESNDRVRDLVRRLVEELK | | NO: 27143) |
| | RAVD(SEQ ID NO: 27142) | | |
| 2plus1_Cage_5414_GFP11_Cterm | SEIEKILKEIEDLARRDEEVSKKIVEDIRRLAKEVEDTSRDIVRKI | 2plus1_Key_Cterm_5414 | EDSERLVREVEDLVRRLVRRSEKSNE |
| | EELAKRVLDRLRKDGSKEELEKEVREVVKTLEELVKDNHRLIRRAV | | EVKRTVEELVRRMEESNDRVRDLVRR |
| | EEMKRLVEENHRHSREVVKELEDLVRELRKGSGSEDSERLVREVRD | | LVEELKRAVD(SEQ ID |
| | HMVLHEYVNANGITEVKRTVEELVRRMEESNDRVRDLVRRLVEELK | | NO: 27145) |
| | RAVD(SEQ ID NO: 27144) | | |
| 2plus1_Cage_Cterm_5421 | SVDEVLKEIEDALRRIKEEVERVLKENEDELRRLEEEVRRVLKEDE | 2plus1_Key_Cterm_5421 | EKAIRDVAKEIRDRLKELEEEIEEVT |
| | ELLESLKRGVGESDEVDRVVDEIAKLSAEILEKVKKVVKEIRDSLE | | RRNLKLLADVEEEIRRVHEKTRRLLE |
| | TVKRRVDDVVRRLKELLDEIKRGSDEKAIRDVAKEIRDRLKELEEE | | TVLRRAT(SEQ ID NO: 27147 |
| | IEENTRRNLKLLADVEEEIRRVIIEKTRRLIZTVLRRAT (SEQ ID | | |
| | NO: 27146) | | |
| 2plus1_Cage_Cterm_5432 | DEIRKVVKEITDLLKASNDKNRKVVEEIRDLLRKSKKLADELVERL | 2plus1_Key_Cterm_5432 | SEDLKRVEERAREVSRRNEESMRRVK |
| | RALVEDLRRRIDKSGDKETAEDIVRRIIEELKPILKETEDLARRIN | | EDADRVSEANKEVLDRVREEVKRLIE |
| | REIERLVEEVERDNRDVNRAIEELLKDTARRGGSEDLKRVEEPARE | | EVRETLR(SEQ ID NO: 27149) |
| | VSRRNEESMRRVKEDADPVSEANKEVLDRVREEVKRLIEEVRETLR | | |
| | (SEQ ID NO: 27148) | | |
| 2plus1_Cage_Cterm_5435 | STAETVAEEVERVLKHSDDLIKEVEDVNRRVEEEIKRVIRELEEEN | 2plus1_Key_Cterm_5435 | EEAAREIIKRLREVNKRTKEKLDELI |
| | ERLVAEVRKGVKGEILAEIEKRLADNSEKVREVAERAKKLLEENTA | | KHSEEVLERVKRLIDELRKHSEEVLE |
| | RVKDILRESPKLVKDLLDEVRSTGSEEAAREIIKRLREVNKPTKEK | | DLRRRAK(SEQ ID NO: 27151) |
| | LDELIKHSEEVLERVKPLIDELRKHSEEVLEDLRRRAK(SEQ ID | | |
| | NO: 27150) | | |
| 2plus1_Caqe_Cterm_5437 | DEVREVAERLRRLVDESRKRNEEVIKESEALVDRVRKTNEEVMKRL | 2plus1_Key_Cterm_5437 | AETIERVVRELLEENKEVLRKTEEAV |
| | RELIDKLEKDIRRSGDKETVEKIIREVLSAIDELLKRVERTNAEIS | | KRSTETNKRLLEASKEVADRLRERIK |
| | KENARLLDEVRKTNEEISRRLAKLLEDIRROSODAETIERVVRELL | | EAAK(SEQ ID NO: 27153) |
| | EENKEVLRKTEEAVKRSTETNKRLLEASKEVADPLRERIKEAAK | | |
| | (SEQ ID NO: 27152) | | |
| 2plus1_Cage_Cterm_5439 | SRVEEIIEDLRRLLEEIRKENEDSIRRSKELLDRVKEINDTIIAEL | 2plus1_Key_Cterm_5439 | EDKARKVAEVAEKVLRDIDKLDRESK |
| | ERLLKDIEKEVREKGSESEEVKKALRAVLEELEKLLRRVAEINEEV | | EAFRATNEEIAKLDEDTARVAERVKK |
| | LRRNSKLVEEDERRNREVLKELARLVEELIREIGDEDKAPKVAEVA | | AIEDLAK(SEQ ID NO: 27155) |
| | EKVLRDIDKLDRESKEAFRATNEEIAKLDEDTARVAERVKKAIEDL | | |
| | AK(SEQ ID NO: 27154) | | |
| 2plus1_Cage_Cterm_5447 | SEADDVLKKLAETVKRIIERLKKLTDDSRRLVEEVHRRNDKLSKES | 2plus1_Key_Cterm_5447 | EELSAEVKKILDEVRKALARHKDEND |
| | AEAVRKAEERGlDEKDVRKLLEDLKKKSEEVAERNKRILDTLREIS | | KLLKEIEDSLRRHKEENDRLLEKLKE |
| | KRAEDEVRKVLKELEKTLKELEDRRPDSEELSAEVKKLLDEVRKAL | | STR(SEQ ID NO: 27157 |
| | ARHKDENDKLLKEIEDSLRRHKEENDRLLEKLKESTR(SEQ ID | | |
| | NO: 27156) | | |
| 2plus1_Cage_Cterm_5456 | SAEELLREVAELVKAVDEDLRRLLEEVRASNEEVIRRLEEILKRIE | 2plus1_Key_Cterm_5465 | EETVKRLLDELRELLERLKRTIEELL |
| | EENRKVVEELRRGGVSEDLVRESKRLVDESPRVIEKINKESADSVE | | KRNRDLLADAEEKARRLLEENRKLLK |
| | RTRETVDRLREELKRLVEEIAKMVKGGSSEETVKRLLDELRELLER | | AARDTAT(SEQ ID NO: 27159) |
| | LKRTIEELLKRNRDLLADAEEKARRLLEENRKLLKAARDTAT(SEQ | | |
| | ID NO: 27158) | | |
| 2plus1_Cage_Cterm_5470 | SKEDRLREELKKLLARLAEEIERLKRALEESNKULKPTIDASEKHL | 2plus1_Key_Cterm_5470 | EEELDKLLKEARDLIREIEKRLEELL |
| | RDVNEDVKRGGVSEELLRELERSTAENKERAKELLKRHEDLVRKVE | | KRVEKLTEDAKRDLERSNREHKELAD |
| | KELADLLRRLEEIVARVDEALKRGISEEELDKLLKEARDLIREIEK | | RIKETAR(SEQ ID NO: 27161) |
| | RLEELLKRVEKLTEDAKRDLERSNREHKELADRIKETAR(SEQ ID | | |
| | NO: 27160) | | |
| 2plus1_Cage_Nterm_2406 | SEVDEVVKEVEDLVRRNEELVEEVVRRVEKVVTDDRRLVEEVVREI | 2plus1_Key_Nterm_2406 | SEVDEVVKEVEDLVRRNEELVEEVVR |
| | RKIVKDVEDLARKLDKEELKRVLDEMREPIERLLEKLRRHSKKLDD | | RVEKVVTDDRRLVEEVVREIRKIVKD |
| | ELKRLLEELREHSRRVEKRLEDLLKELRERGVDEKVLRKLEKVIRE | | VEDLARK(SEQ ID NO: 27163) |
| | VRERSTRALRKVEEVIRRVREESERALRDIERVVKEVEKRMREAAR | | |
| | (SEQ ID NO: 27162) | | |
| 2plus1_Cage_Nterm_5406 | DREREVKKRLDEVRERIERLLPRVEEESRRVAEEIRRIIEEVRRRN | 2plus1_Key_Nterm_5406 | DREREVKKRLDEVRERIERLLRRVEE |
| | KKVTEEIRELLKGLKDKEEVRRVLERLRKINAESDELLERILERLR | | ESRRVAEEIRRLIEEVRRRNKKVTEE |
| | RLVEATNRLVKAIIEELRRLVEKIVREVPDSEELREELKKLERKIE | | IRELLKGL(SEQ ID NO: 27165) |
| | KVAKEINDHDKEVTERLEDLLRRITEHARKSDREIEETAR(SEQ | | |
| | ID NO: 27164) | | |
| 2plus1_Cage_Nterm_5409 | SEAEELLKRLEDRAEEILRRLEEILRTSRKLAEDVLRELEKLLRES | 2plus1_Key_Nterm_5409 | SEAEELLKRLEDRAEEILRRLEEILR |
| | ERRIREVLEELRGIKDKKELEDVIREVEKELDESLERSRELLKDVL | | TSRKLAEDVLRELEKLLRESERRIRE |
| | KKLDDNLKESERLVEDIDRELAKILEDLKKAGVPKEVVDEIKRIVD | | VLEELRGI(SEQ ID NO: 27167) |
| | EVRERLKRIVDENAKIVEDARRALEKIVKENEEILRRLKKELRELR | | |
| | K(SEQ ID NO: 27166) | | |
| 2plus1_Cage_Nterm_5410 | SRAETVLKEVTDKIKKLADSSDELLRRNKENIDELKKSSEELLRRL | 2plus1_Key_Nterm_5410 | SRAETVLKEVTDKIKKLADSSDELLR |
| | TKAIEEIEKGSVDEETIEELIRRVEAELEAHHRELEKNSREDEKRN | | RNKENIDELKKSSEELLRRLTKAIEE |
| | RDHHAKLEEEMRRVEERLEREGIDDEVVKRVRDLLDTVRRRNEKVN | | IEKGS(SEQ ID NO: 27169) |
| | EDVKRMNDKLRRDNEDVIRRVEKLLRELEEKRRT(SEQ ID | | |
| | NO: 27168) | | |
| 2plus1_Cage_Nterm_5413 | STEEVLDEIRKLNKTLTEDIKPVLREIEELHRRTIEENKEVLDKIA | 2plus1_Key_Nterm_5413 | STEEVLDEIRKLHKYLTEDIKRVLRE |
| | EDYKRVIDDVRTKDTPNVEKLLKDLEKSAKENIEHNERTLREDDRV | | IEELHRRTIEENKEVLDKIAEDYKRV |
| | LKEIRRRATELLKANEEMLPPIEEVARKGGVDNEELIRESKEAIKE | | IDDVRTKD(SEQ ID NO: 27171) |
| | VKRVLEELRKESKRVVDETRKLSEENLEHSERVLRKVEEDLR(SEQ | | |
| | ID NO: 27170) | | |
| 2plus1_Cage_5414_GFP11_Nterm | SEIEKILKEIEDLARRDEEVSKKIVEDIRRLAKEVEDTSPPDHMVL | 2plus1_Key_Nterm_5414 | SEIEKILKEIEDLARRDEEVSKKIVE |
| | HEYVNAAGITLRKDGSKEELEKEVREVVKTLEELVKDNHRLIRRAV | | DIRRLAKEVEDTSPLIVRKIEELAKR |
| | EEMKRLVEEKHRHSREVVKELEDLVRELRKGSGSEDSEPLVREVED | | VLDRLRKD(SEQ ID NO: 27173) |
| | LVRRLVRRSEKSNEEVKRTVEELVRRMEESNDRVRDLVRRLVEELK | | |
| | RAVD(SEQ ID NO: 27172) | | |
| 2plus1_Cage_5414_GFP11_Nterm | SEIEKILKEIEDLARRDEEVSKKIVEDIRRLAKEVEDTSRDIRDHM | 2plus1_Key_Nterm_5414 | SEIEKILKZIEDLARRDEEVSKKIVE |
| | VLHEYVNAAGITKDGSKEELEKEVREVVKTLEELVKDNHRLIRRAV | | DIRRLAKEVEDTSRDIVRKIEELAKR |
| | EEMKRLVEENHRHSREVVKELEDLVRELRKGSGSEDSERLVREVED | | VLDRLRKD(SEQ ID NO: 27175) |
| | LVRRLVRRSEKSNEEVKRTVEELVPRMEESNDRVRDLVRRLVEELK | | |
| | RAVD(SEQ ID NO: 27174) | | |
| 2plus1_Cage_Nterm_5439 | SRVEEIIEDLRRLLEEIRKENEDSIRRSKELLDRVKEINDTIIAEL | 2plus1_Key_Nterm_5439 | SRVEEIIEDLRRLLEEIRKENEDSIR |
| | ERLLKDIEKEVREKGSESEEVKKALRNVLEELFKLLRRVAEINEEV | | RSKELLDRVKEINDTIIAELERLLKD |
| | LRRNSKLVEEDERRNREVLKELARLVEELIREIGDZDKARKVAEVA | | IEKEVREKG(SEQ ID NO: 27177) |
| | EKVLRDIDKLDRESKENFRATNEEIAKLDEDTARVAERVKKAIEDL | | |
| | AK(SEQ ID NO: 27176) | | |
| 3plus_Cage_529_GFP11_Cterm | SEAEDLEELIKELAELLKDVIRKLEKINRRLVKILEDIIRRLKEIS | 3plus_Key_Cterm_529 | KDEAERRRRELKDKLDRLREEHEEVK |
| | KEAEEELRKGTVEDKDILRDLERRLREILEESDRLLEELKRRLEEI | | RRLEEELTRLRETHKKIEKELREALK |
| | LRKSKELLRRLEEVLREILKRNEEVKRSNLPKEELIKEIVKLLEEL | | RVRDRST(SEQ ID NO: 27179) |
| | LRVIEKTLEDNIRLLEELVEVIKEILEKHLTLLEELVRVIERILRE | | |
| | VGKDKDEAERRDHMVLHEYVNAAGITEEVKRRLEEELTRLRETHKK | | |
| | IEKELREALKRVRDRST(SEQ ID NO: 27178) | | |
| 3plus1_Cage_Cterm_263 | SLVDELRKSLERNVPVSEEVARRLKEALKRWVDVVRKVVEDLIRLN | 3plus1_Key_Cterm_263 | DEELKRVLEKNNDLHRRLKDRHRKLL |
| | EDVVRVVEKVTVDESAIERVRRIIEELNRKLDAVLKKNEDLVRRLT | | EDLERIIRELKKKLDEVVEENKRSVD |
| | ELLDKLLEENRRINEELDEDLKRRGGTEEVIDTILELIERSIERLK | | ELKR(SEQ ID NO: 27181) |
| | RLLDELLRIVREALKDNKRVADENLKKLKEILDELRKDGVEDEELK | | |
| | RVLEKAADLHRRLKDRHRKLLEDLERIIRELKKKLDEVVEENKRSV | | |
| | DELKR(SEQ ID NO: 27180) | | |
| 3plus1_Cage_Cterm_494 | SKEDKARELEKRLRDNLKKLEEVVRELNEVLNRNLEKLRRLAEELL | 3plus1_Key_Cterm_494 | EDLVRDIRRELKELEERARKILRDDE |
| | RALKRLLDKLRAGGLPKDELEDLRREVEDVLRRLEDLLRKLKKAND | | RDLRALEKRIRDIIREDREELERLKE |
| | ESLTRLEELLRRAEEENRRVLTTLRELLRGNGDDRDLARLVARLVE | | RARK(SEQ ID NO: 27183) |
| | ANNRALEELLRLVAKNVEDNNRVLEELLRLVKELNKRLLGRIRDED | | |
| | LVRDIRRELKELEEPARKILRDDERDLRALEKPIRDIIREDREELE | | |
| | RLKERARK(SEQ ID NO: 27182) | | |
| 3plus1_Cage_Cterm_500 | SEKEELKRILDKLLKELKRLSDELKATIDKILKILKEVSEEVKRTA | 3plus1_Key_Cterm_500 | EDELRKVEEDLKRLEDKLKKLLEDYE |
| | DELLDAIRRGGVDEEVLREIKREIEEIEKKLRKVNKEIEDEIREIK | | KKVRELEETLDDLIRKYEETLRRLEK |
| | KKLDEVDDKITKEVEKIKEALDKGGVDAKEVIKALKEILKEHADVF | | ELEEAEP(SEQ ID NO: 27185) |
| | EDVLRRIKEIIKRHRDVVKEVLEELRKILEKVAEVLKRQGRSEDEL | | |
| | RKVEEDLKRLEDKLKKILEDYEKKVRELEETLDDLLRKYEETLRRL | | |
| | EKELEEAER(SEQ ID NO: 27184) | | |
| 3plus1_Cage_506_GFP11_Cterm | SAEETLRRITEESKRVLEEITKKYEDLERESREVLRKLREDLDRIK | 3plus1_Key_Cterm_506 | RERLARLLKALADKLIRVLEEILKIN |
| | RELEDVLTKGGDDKDEVLTVLEKVLDELLKLHRENLRVIKELIRKV | | EELNPKIIKFARENLERNRRVNKKVI |
| | LEVDRENLEVLKRLLEKARDLLRRSGRDEKDLKKLEDELRKVKEEL | | EVLREAAR(SEQ ID NO: 27187) |
| | EKKHEASKRDIEDLEPELDKVTEEVERLIRKLKEELRRAAEGSDER | | |
| | DHMVLHEYVNAAGITIRVLEEILKINEELNRKIIKFARENLERNRR | | |
| | VNKKVIEVLREAAR(SEQ ID NO: 27186) | | |
| 3plus1_Cage_508_GFP11_Cterm | STEEILKRVKEILDELAKELRDIIRESLRTIEELLDELRRILEESE | 3plus1_Key_Cterm_508 | DEVKRRLEEKERRIRTRYEELRRRLR |
| | RTLEELVKTIKDGVKDSEELLRRLKRLLEDLRRAHEELLKRLKEAV | | KRVKDYEDKLREIEKKVRRDAERIEE |
| | DEHRDRLRKILEELERVLKELRKRIEELRRSGDRISEKDVLRKLEE | | ELERAKK(SEQ ID NO: 27189) |
| | VLRKALEILERLLKKIRESARELLKIIEEVLDANIKVMEKALKTIK | | |
| | ELLKDGRDHMVLHEYVNAAGITTRYEELRRRIPKPVKDYEDKLREI | | |
| | EKKVRRDAERIEEELERAKK(SEQ ID NO: 27188) | | |
| 3plus1_Cage_Cterm_510 | SEKEELLKLIKRVIELLKRVLEEHLRLVEDVIRRLKELLDSNEKIV | 3plus1_Key_Cterm_510 | EDLLRKAKKVITEVREKLKRNLEDVR |
| | REVIEDLKRLLDEVRGDKEELDRIKEKLEEVLERYKRRLEEIKRDL | | RVIEDVKRKSARILEEARRLIEEVER |
| | ERMLEDYKRELKRIEEDLRRVLEEVERTATRGEGPAEALTDKLRKI | | ELEKIRK(SEQ ID NO: 27191) |
| | LERALRELDKLSKKLDELLKKVLEELEKSNREIDKLLKDVLRRVEE | | |
| | GGASEDLLRKAKKVITEVREKLKPNLEDVRRV1EDVKRKSARILEE | | |
| | ARRLIEEVERELEKIRK(SEQ ID NO: 27190) | | |
| 3plus1_Cage_528_GFP211_Cterm | SEAEDLEELIKELAELLKDVIRKLEKINRRLVKILEDIIRRLKEIS | 3plus1_Key_Cterm_528 | KDEAERRRRELKDKLDPLREEHEEVK |
| | KEAEEELPKGTVEDKDILRDLERRLREILEESDRLLEELKRRLEEI | | RRLEEELTRLRETHKKIEKELREALK |
| | LRKSKELLRRLEEVLREILKRAEEVKRSNLPKEELIKEIVKLLEEL | | RVRDRST(SEQ ID NO: 27193) |
| | LRVIEKILEDNIRLLEELVEVIKEILEKHLRLLEELVPVIERILRE | | |
| | VGRDHMVLHEYVNAAGITLDRLREEHEEVKPRLEEELTRLRETHKK | | |
| | IEKELPFALKRVRDRST(SEQ ID NO: 21192) | | |
| 3plus1_Cage_528_GFP11_Cterm | SEAEDLEELIKELAELLKDVIRKLEKINRRLVKILEDIIRRLKEIS | 3plus1_Key_Cterm_528 | KDEAERRRRELKDKIDRLREEHEEVK |
| | KEAEEELRKGTVEDKDILRDLERRLREILEESDRLLEELKRRLEEI | | RRLEEELTRLRETNKKTEKELREALK |
| | LRKSKELLPRLEEVLREILKRAEEVKRSNL2KEELIKEIVKLLEEL | | RVRDPST(SEQ ID NO: 27195) |
| | LRVIEKILEDNIRLLEELVEVIKEILEKHLRLLEELVRVIERILRE | | |
| | VGKDKRDHMVLHEYVNAAGITLREEHEEVKRRLEEELTRLRETHKK | | |
| | IEKELREALKRVRDRST(SEQ ID NO: 27194) | | |
| 3plus1_Cage_528_GFP11_Cterm | SEAEDLEELIKELAELLKDVIRKLEKINRRLVKILEDIIRRLKEIS | 3plus1_Key_Cterm_528 | KDEAERRRRELKDKLDRLREEHEEVK |
| | KEAEEELPYGTVEDKDILRDLEPPIREILEESDRLLEELKPRLEEI | | RRLEEELTPLRETHKKIEKELREALK |
| | LRKSKELLRRLEEVLREILKRAEEVKRSNLPKEELIKEIVKLLEEL | | RVRDRST(SEQ ID NO: 27197) |
| | LRVIEKILEDNIRLLEELVEVIKEILEKHLRLLEELVRVIERILRE | | |
| | VGKDKDRAERDHMVLHEYVNAAGITHEEVKRRLEEEITRLPETHKK | | |
| | IEKELREALKRVRDRST(SEQ ID NO: 27196) | | |
| 3plus1_Cage_529_G5P11_Cterm | SEAEDLEELIKELAELLKDVIRKLEKINRRLVKILEDIIRRLKEIS | 3plus1_Key_Cterm_529 | KDEAERRRRELKDKLDRLREEHEEVK |
| | KRAEEELRKGTVEDKDILRDLERRLREILEESDRLLEELKRRLEEI | | RRLEEELTRLRETNKKIEKELREALK |
| | LRKSKELLRRLEEVLREILKRAEEVKRSNIPKEELIKEIVKLLEEL | | RVRDRSTSEQ ID NO: 27199) |
| | LIWIEKILEDNIRZLEELVEVIKEILEKH2RLLEELVPVIERILRE | | |
| | VGKRDHMVLHEYVNAAGITDRLREEHEEVKRRIEEELTRLRETHKK | | |
| | IEKELREALKRVRDRST(SEQ ID NO: 27198) | | |
| 3plus1_Cage_529_GFP11_Cterm | SEAEDLEELIKELAELLKDVIRKLEKINRRLVEILEDIIRRLKEIS | 3plus1_Key_Cterm_529 | KDEAEPPRRELKDKLDRLREEHEEVK |
| | KEAEEELRKGTVEDKDILRDLERRLREILEESDRLLEELKRRLEEI | | RRLEEELTRLRETHKKIEKELREALK |
| | LRKSKELLRRLEEVLREILKRAEEVKRSNIPKEELIKEIVKLLEEL | | RVRDRST(SEQ ID NO: 27201) |
| | LRVIEKILEDNIRLLEELVEVIKEILEKHLRLLEELVRVIERILRE | | |
| | VGKDRDHMVLHEYVNAAGITRLREEHEEVKRRLEEELTRLRETHKK | | |
| | IEKELRENLKRVRDRST(SEQ ID NO: 27200) | | |
| 3plus1_Cage_529_GFP11_Cterm | SEAEDLEELIKELAELLKDVIRKLEKINRRIVKILEDIIRRLKEIS | 3plus1_Key_Cterm_529 | KDEAERRRRELKDKLDRLREEHEEVK |
| | KEAEEELRKGTVEDKDILRDLERRLREILEESDRLLEELKRRLEEI | | RRLEEELTRLRETHKKIEKELREALK |
| | LRKSKELLRPLEEVLREILKRAEEVKRSNLPKEELIKEIVKLLEEL | | RVRDRST(SEQ ID NO: 27203) |
| | LPVIEKILEDNIRLLEELVEVIKEILEKHLRLLEELVRVIERILRE | | |
| | VGKDKDRDHMVLHEYVNAAGITREEHEEVKRRLEEELTRLRETHKK | | |
| | IEKELREALKRVRDRST(SEQ ID NO: 27202) | | |
| 3plus1_Cage_Cterm_530 | SDKEEIKRRVEKTARDLETEHDKIKKRLEDTVPDIKRELDELLEKY | 3plus1_Key_Cterm_530 | EKRLIEEVVRLLRENLDVVRRILEAL |
| | ERVLRKTEKTLREGDGDATDLVDKLLETVKRLNEEVLRTVKKIADE | | AKLIKELLEALEEVLRRNKELIRELL |
| | LPRLVEEVLRVLRESNETLARLLEEGNVGDEVREPLEEVLRRTEEI | | RVLDEALK(SEQ ID NO: 27205) |
| | IKTLEEIVKPLLDELRRLVEELRRISKKLKDELDKIKEKGKDEKRL | | |
| | IEEVVRLLRENLDVVPRILEALAKLIKELLEALEEVLRRNKELIRE | | |
| | LLRVLDEALK(SEQ ID NO: 27204) | | |
| 3plus1_Cage_534_GFP11_Cterm | DEDRIIEEIARLLEELLRELLELIKKLIETNRRLNEEHERAVRELA | 3plus1_Key_Cterm_534 | EKIAEEIERELEELRRMIKRLHEDLE |
| | RLLEELLDRLVKKGISDEKLKRIRERLKRALDDLERLHREINKRLE | | PKLKESEDELREIEARLEEKIRRLEE |
| | DLVRELEKLVREILKELKDALEELRRASARAGGEEVLRRLEEIVKK | | KLERKRR(SEQ ID NO: 27207) |
| | LLDLVRRILERLKEIHKDNVRLLRELNERLTRIVEDLVRLIREILR | | |
| | EAGVDEPDHMVLHEYVNAAGITIKRLHEDLERKLKESEDELREIEA | | |
| | RLEEKIRRLEEKLEPKRR(SEQ ID NO: 27206) | | |
| 3plus1_Cage_534_GFP11_Cterm | DEDRIIEEIARLLEELLRELLELIKKLIETNRRLNEEHERAVRELA | 3plus1_Key_Cterm_534 | EKIAEEIERELEELRRMIKPLHEDLE |
| | RLLEELLDRLVKKGISDEKLKRIRERLKRALDDLERLHREINKRLE | | RKLKESEDELREIENRLEEKIRRLEE |
| | DLVRELEKLVREIIKELKDALEELRRNSARNOGEEVLRRLEEIVKK | | KLERKRR(SEQ ID NO: 27209) |
| | LLDLVRRILERLKEIHKDNVRLLRELNERLTRIVEDLVRLIREILR | | |
| | EAGVDEKIRDHMVLHEYVNAAGITRLHEDIERKLKESEDELREIEA | | |
| | RLEEKIRRLEEKLERKRR(SEQ ID NO: 27208) | | |
| 3plus1_Cage_534_GFP11_Cterm | DEDRIIEEIARLLEELLRELLELIKKLIETNRPLNEENERAVRELA | 3plus1_Key_Cterm_534 | EKIAEEIERELEELRRMTKRLHEDLE |
| | RLLEELLDRLVKKGISDEKLKRIPERLKRALDDLERLHPEINKRLE | | RKLKESEDELREIEARLEEKIRRLEE |
| | DLVRELEKLVREILKELKDALEELRRASARAGGEEVLRRLEEIVKK | | KLERKRR(SEQ ID NO: 27211) |
| | LLDLVPPILERLKEINKDNVRLLRELNERLTRIVEDLVPLIREILR | | |
| | ENGVDEKIAEEIERDHMVLHEYVNAAGITLERKLKESEDELREIEA | | |
| | RLEEKIRRLEEKLERKRR(SEQ ID NO: 27210) | | |
| 3plus1_Cage_Cterm_539 | SEKEKLLKESEEEVRRLRRTLEELLRKYREVLERLRKELREIEERV | 3plus1_Key_Cterm_539 | ERLVKTLIEDVEAVIKRILELITRVA |
| | RDVVRRLKEVLDRKGLDIDTIIKEVEDLLKTVLDRLRELLDKIRRL | | EDNERVLERIIRELTDNLERNLKIVR |
| | TKEAIEVVREIIERIVRHAERVKDELRKEGGDKEKLDRVDRLIKEN | | EIVK(SEQ ID NO: 27213) |
| | TRHLKEILDRIEDLVRRSEKKLRDIIREVRRLIEELRKKAEEIKKG | | |
| | PDERLVKTLIEDVENVIKRILEIITRVAEDNERVLERIIRELTDNL | | |
| | ERHLKIVREIVK(SEQ ID NO: 27212) | | |
| 3plus1_Cage_Cterm_548 | DKAEVLREALKLLKDLLEELIKIHEESLKRILDLIDTLVKVHEDAL | 3plus1_Key_Cterm_548 | EEIDRELKRVVEELRRLHEEIKERLD |
| | RALKELLERSGLDERELRKVERMATESLRTIAKLKEELRDLARRSL | | DVAPPSEEELRRIIKKLKEVVEEIRK |
| | EKLREDLKRVDDTIRKVEEKVRRTGPSEELIEELIRTIEKLLKEIV | | KLK(SEQ ID NO: 27215) |
| | RINEEVLKAVRELLKTLLKLSEDVVRRIEEILRKGGVPEEIDRELK | | |
| | RVVEELRRLHEEIKERLDDVARRSEEELRRIIKKLKEVVKEIRKKL | | |
| | K(SEQ ID NO: 27214) | | |
| 3plus1_Cage_Cterm_556 | SERELIERWLELEKEILRLIRELVERLLKLHREILDTIKKLIRELL | 3plus1_Key_Cterm_556 | DDERRTLTELLKRMEDILEKVERTLK |
| | ELLEDIARKLGLDKEAKDELREIAKRVEDKLEKLERESRKVEEDLK | | KLLDDSARMAEEVKKTLKELLERSEK |
| | RKLKELTDESDTVEKRVRDVVRRGTQSREEIAEELLRLDRKLLKAV | | VAEDVRK(SEQ ID NO: 27217) |
| | EELLKEILDLNKKLLDDVRAILEETRRVIEKLLDRVRRGERTDDER | | |
| | RTLTELLKRMEDILEKVERTLKKLLDDSARMAEEVKKTLKELLERS | | |
| | EKVAEDVRK(SEQ ID NO: 27216) | | |
| 3plus1_Cage_Cterm_560 | SKKELLEEVVRRAIELLKRHLEKLKRILEEIVRLLEEHLEKVERVL | 3plus1_Key_Cterm_560 | EDKLKEIEDELRRLLEELRRLDKAIK |
| | EAILSLLDDLLRRGGDERAIRTLEDVKRRLREILERLADENAKAIK | | DRLRELKKDLDEANRRIKETLKKLLR |
| | RLNDLLDKLEKRNKEAIERLEEILEELKRVRRDEELLRVLETLLKI | | EVEK(SEQ ID NO: 27219) |
| | IEDILRENTKVLEDLLPLVEEILENYLRVVEELLRLAREILTEIVG | | |
| | DEDKLKEIEDELRRLLEELRRLDKAIKDRLRELKKDLDEANRRIKE | | |
| | TLKKLLREVEK(SEQ ID NO: 27218) | | |
| 3plus1_Cage_568_GEP11_Cterm | KEIEETLKELEDLNREMVETNRRVLEETRRLNKETVDRVKATLDEL | 3plus1_Key_Cterm_568 | KAVEELEKALEEIKRRLKEVIDRYED |
| | AKMLKKLVDDVRKOPTSEELKRLLAELEELLNRVVRRVEELLKKST | | ELRKLRKEYKEKIDKYERKLEEIERP |
| | DLLERAVKDSADALRRSHEVLKEVASRVKRAKDEGLPREEVLRLLR | | ERT(SEQ ID NO: 27221) |
| | ELLERENKVLKDIVRVSEKLLREHLKVLREIVEVLEELLERILKVI | | |
| | LDTTRDHMVLHEYVNAAGITKRRLKEVIDRYEDELRKLRKEYKEKI | | |
| | DKYERKLEEIERRERT(SEQ ID NO: 27220) | | |
| 3plus1_Cage_568_GFP11_Cterm | KEIEETLKELEDLNREMVETNRPVLEETRRINKETVDRVKATLDEL | 3plus1_Key_Cterm_568 | KAVEELEKALEEIKRRLKEVIDRYED |
| | AKMLKKLVDDVRKGPTSEELKRLLAELEELLARVVRRVEELLKKST | | ELRKLRKEYKEKIDKYERKLEEIERR |
| | DLLERAVKDSADALRRSHEVLKEVASRVKRAKDEGLPREEVLRLLR | | ERT(SEQ ID NO: 27223) |
| | ELLERHAKVLKDIVRVSEKLLREHLXVLREIVEVLEELLERILKVI | | |
| | LDTTGGDRDHMVLHEYVNAAGITLKEVIDRYEDELRKLRKEYKEKI | | |
| | DKYERKLEETERRERT(SEQ ID NO: 27222) | | |
| 3plus1_Cage_Cterm_572 | DEDELIRKLLEDLKDIVRKILELIERDLPLIERVVRRIVKVIRDDL | 3plus1_Key_Cterm_572 | SELADRIRKLIEDLERHTAKVLEDVK |
| | KKIKEVVDDIARGVPRTEELERVIKRIEELLRTSEEELDRILKEIE | | RAITELRKNSKDILEEVRKLIDELRK |
| | ELLRESRRRLEEVVSAVEELLRRVEEIVDKGRESKEDVIKLLREVV | | RIKEVED(SEQ ID NO: 27225) |
| | DDILRLVEEVVRTNLEIIKRILELIERVIRLNLSIIRDILRLLEGT | | |
| | VDSELADRIRKLIEDLERHTAKVLEDVKRAITELRKNSKDILEEVR | | |
| | KLIDELRKRIKEVED(SEQ ID NO: 27224) | | |
| 3plus1_Cage_Cterm_581 | SALETVKKLLEDSSEKIERIVEEDERVAKESSDRIRRLVEEDKRVA | 3plus1_Key_Cterm_581 | AEAVIKVIEKLIRANKRVWDALLKIN |
| | DEILDLIEKIGDTDTLLKLVEEWSRTSKKLLDDVLKLHKDWSDDSR | | EDLVRVNKTVWKELLRVNEKLARDLE |
| | RLLEEILRVEEELIPRVKEILDREGKPEEVVRELEKVLKESLDTLE | | RVVK(SEQ ID NO: 27227) |
| | EIIRRLDEANAATVKRVADVIRELEDINRKVLEEIKRGSDDAEAVI | | |
| | KVIEKLIRANKRVWDALLKINEDLVRVNKTVWKELLRVNEKLARDL | | |
| | ERVVK(SEQ ID NO: 27226) | | |
| 3plus1_Cage_Cterm_585 | SKEEKLKDDVRAVLEDLDRVLKELEKLSEDNLRELKRVLDRITDLH | 3plus1_Key_Cterm_585 | SKAAEDILRVLEKLVKVSREAIKLIL |
| | RRILDELRKGIGSEELLRRVEKVLKDNLDLLRKLVEEHKESSERDL | | ELSEHHVRVSTRIARLLLDVARKLAE |
| | KRVEDLVREIKEVLRKLLELEDPGTDIRKIEEEIERLLRKIRKAVE | | VIKEAER(SEQ ID NO: 27229) |
| | ESKDLNRRNSERIEEVARRSEELARRLIKEIPERODSKAAEDILRV | | |
| | LEKLVKVSPEAIKLILELSEHHVPVSTRIARLLLDVARKLAEVIKE | | |
| | AER(SEQ ID NO: 27228) | | |
| 3plus1_Cage_Cterm_587 | SEIEDVIRRLRKILEDLERVSEKLLREIKKILDEARRINEEVIKEI | 3plus1_Key_Cterm_587 | IEDLVREVERLIKRIEDSLRELEKTV |
| | KRVLEDAVRVFRDOSGSKEEIAKLVEELIRELAKLAKEVDEIHKRI | | RELLKRIKEASDKVREDVDRLIKELK |
| | VERLKALVEDAEPIHRKIVETLEEIVROVPSEELKRVVEAIVEVIK | | EAAD(SEQ ID NO: 27231) |
| | EHLKVLADVIRRIIKAIEENAETIKRVLEDIVRVLELVLRGEGSIE | | |
| | DLVREVERLIKRIEDSLRELEKTVRELLKRIKEASDKVREDVDRLI | | |
| | KELKEAAD(SEQ ID NO: 27230) | | |
| 3plus1_Cage_Cterm_605 | SREELDDRILEATAKILEDLKPLIDENLARLEEVVRELERIIDRNL | 3plus1_Key_Cterm_605 | DEIIRKLDELLKEVEKVHKEVKDRIR |
| | KLIRETLDELKKGSGSEETLEKIKKVDKELEDLTRRLLKKLEDLIR | | KLLEDHKRSLDEVKEKLERLLERAKE |
| | ETERRIREILKRIRDLLKEVKDPDKDLERLLEVLEEVLPVIAELAK | | VVEREKE(SEQ ID NO: 27233) |
| | ELLDSLRKVLKVVEEVLRLLNEVNKEVLDVIRELAKDOGSDEIIRK | | |
| | LDELLKEVEKVHKEVKDRIRKLLEDHKRSLDEVKKKLERLLEPAKE | | |
| | VVEREKK(SEQ ID NO: 27232) | | |
| 3plus1_Cage_Cterm_607 | SEREELLERIKEILKPVKDKLDEDLKRLKEILEKLKEKADRDIEEL | 3plus1_Key_Cterm_607 | SETAVRAIIRVLEKHLEAVRRVLEEL |
| | RRRIEEVREKLERTGRTDELVKEVLDTVRRNLENLKRLVEDILRKL | | LKVLkEHLETVRELJERLKRVLEEAI |
| | EENVKNLTDLVREILKLITELIKRLEDGGLPKEVLDALRRVLEKLE | | EVVERVAR(SEQ ID NO: 27235) |
| | ELLREILERLKRSLEAVKRKIEELLKELERSLDELRRALERIRKEI | | |
| | GDSETAVRAIIRVLEKHLEAVRRVLEELLKVLAEHLETVRELIERL | | |
| | KRVLEEAIEVVERVAR(SEQ ID NO: 27234) | | |
| 3plus1_Cage_Cterm_610 | SLEEITKRLLELVEENLARREEILRELLELAKRLAKEDRDILEEVL | 3plus1_Key_Cterm_610 | ERTLREVVRKVLEEAKRLLDELEEVE |
| | KLIEELLKLLEDNGSSEEDLKRLLKEVIEELRAVVKRVKDKWDEVV | | KRVKKELEDIIEENRRWKRVRDELR |
| | KRIEDLVKKLKELHDDTLRKLRELVRKIVTDISESGGEAEKVKRVV | | EIKRELDE(SEQ ID NO: 27231) |
| | EKILELVERLAKVVKESVEKLLEILRELAEVSKRVAEALLRLLEEL | | |
| | VRVIRIKDERTLREVVRKVLEEAHRLLDELEEVHKRVKKELEDIIE | | |
| | ENRRVVKRVRDELREIKPELDE(SEQ ID NO: 27236) | | |
| 3plus1_Cage_611_GFP11_Cterm | SLEEITKRLLELVEENLARHEEILRELLELAKRLAKEDRDILEEVL | 3plus1_Key_Cterm_611 | ERTLREVVRKVLEEAKRLLDELEEVH |
| | KLIEELLKLLEDNGSSEEDLKRLLKEVIEELRAVVKRVKDKVIDEVV | | KRVKKELEDIIEENRRVVKRVRDELR |
| | KRIEDLVKKLKELHDDTLRKLRELVRKIVTDISESGGEAEKVKRVV | | EIKRELDE(SEQ ID NO: 27239) |
| | EKILEDVERLAKVVKESVEKLLEILRELAEVSKRVAEALLRLLEEL | | |
| | VRVIRIKDERDHMVLHEYVNAAGITLLDELEEVRKRVKKELEDIIE | | |
| | ENRRVVKRVRDELREIKRELDE(SEQ ID NO: 27238) | | |
| 3plus1_Cage_Cterm_632 | SEKELVDDIRRTLEEILRLLRSLLEEVIRILEENEKLVRRHLKTVI | 3plus1_Key_Cterm_632 | DSLVREVEELIKRLEKKIDDLLKTSR |
| | DILRRVAKLLDENGIRTDETADRVLERLEKkHRELLEDYKRALEKIK | | DLVKRVLDLVDEVVKRVEDLVERVKE |
| | ETLERVLPEAEEVVKKIDDALRKLGGSKEVLKRLLEELLRLVEKIA | | KIDT(SEQ ID NO: 27241) |
| | EEIKRLLSELVRVTEELVRTNKELLEEAVRVIRKEVODDSLVREVE | | |
| | ELIKRZEKHIDDLLKTSRDLVKPVLDLVDEVVKRVEDLVERVKEKI | | |
| | DT(SEQ ID NO: 27240) | | |
| 3plus1_Cage_Cterm_641 | DEVEELLKRVRELLKASEELVRKILEDVKRDLERSIEEVEDLLRKV | 3plus1_Key_Cterm_641 | EDLIRDVDRVLKEIMDLLRDLVRRTK |
| | EELLKRLLDLVERGGSLDEILRELVRLLKEIVRKVLELNRKLVEDV | | ELLEELLRLLEELVRAHKELVRSILD |
| | IPIAKRLIELNAESVKEWDRILKLLRDGTGDKEELLKDAEFALEKY | | EIRK(SEQ ID NO: 27243) |
| | ERAVRYLLKELEEIIKEYVRRVEELLKELKDAVDKAKDEVRKGSGD | | |
| | EDLIRDVDRVLKEIMDLLRDLVRRTKELIEELLRLLEELVRAHKEL | | |
| | VRSILDEIRK(SEQ ID NO: 27242) | | |
| 3plus1_Cage_646_GFP11_Cterm | DAEEVVKRLADVLRENDETIRKVVEDLVRIAEENDRLWKKLVEDIA | 3plus1_Key_Cterm_646 | EDVKRALEELVSRLRKLLEDVKKASE |
| | EILRRIVEILRRGGVPEELLDRIAKVVKSIVEKAEKILERLNRVSK | | DIVREVERIVRELAKRSDEILKKLED |
| | AIAEKLKTIVDELNEVSKEIVKRAEDILRKGKDKETVLRAIRTLVK | | IVEKLRE(SEQ ID NO: 27245) |
| | EYADLSKEVLERVERIVREYVKLSDEVVKSLAEIVREELRIIEDLL | | |
| | RKGNRDHMVLHEYVNAAGITRKLLEDVKKASEDIVREVERIVRELA | | |
| | KRSDEILKKLEDIVEKLRE(SEQ ID NO: 27244) | | |
| 3plus1_Cage_646_GFP11_Cterm | DAEEVVKRLNDVLRENDETIRKVVEDLVRIAEENDRLWKKLVEDIA | 3plus1_Key_Cterm_646 | EDVKPALEELVSRLRKLLEDVKKASE |
| | EILRRIVELLRRGOVPEELLDRLAKVVKSIVEKAEKILERLNRVSK | | DIVREVERIVRELAKRSDEILKKLED |
| | AIAEKLKTIVDELNEVSKEIVKRAEDILRKGKDKETVLRALRTLVK | | IVEKLRE(SEQ ID NO: 27247) |
| | EYADLSKEVLERVERIVREYVKLSDEVVKSLAEIVEELIRIIEDLL | | |
| | RKGNLDEDRDHMVDHEYVNAAGITEDVKKASEDIVREVERIVRELA | | |
| | IKRSDEILKKLEDIVEKLRE(SEQ ID NO: 27246) | | |
| 3plus1_Cage_646_GFP11_Cterm | DAEEVVKRLADVLRENDETIRKVVEDLVRIAEENDRLWKKLVEDIA | 3plus1_Key_Cterm_646 | EDVKRALEEINSRLPKLLEDVKKASE |
| | EILRRIVELLRRGGVPEELLDRLAKVVKSIVEKAEKILERLNRVSK | | DIVREVEPIVRELAKRSDEILKKLED |
| | AIAEKLKTIVDELNEVSKEIVKRAEDILRKGKDKETVLRALRTLVK | | IVEKLRE(SEQ ID NO: 27249 |
| | EYADLSKEVLERVERIVREYVKLSDEVVKSLAEIVEELIPIIEDLL | | |
| | RKGNLDEDVRDHMVLHEYVNAAGITDVKKASEDIVREVERIVRELA | | |
| | KRSDEILKKLEDIVEKLRE(SEQ ID NO: 27248) | | |
| 3plus1_Cage_647_GFP11_Cterm | DAEEVVKRLADVLRENDETIRKVVEDLVRIAEENDRLWKKLVEDIA | 3plus1_Key_Cterm_647 | EDVKRALEELVSRLRKLLEDVKKASE |
| | EILRRIVELLRRGGVPEELLDRLAKVVKSIVEKAEKILERLNRVSK | | DIVREVERIVRELAKRSDEILKKLED |
| | AIAEKLKTIVDELNEVSKEIVKRAEDILKKGKDKETVLPALRTLVK | | IVEKLRE(SEQ ID NO: 27251) |
| | EYADLSKEVLERVERIVREYVKLSDEVVKSLAEIVEELIRIIEDLL | | |
| | RKGNLRDHMVLHEYVNAAGITKLLEDVKKASEDIVREVERIVRELA | | |
| | KRSDEILKKLEDIVEKLRE(SEQ ID NO: 27250) | | |
| 3plus1_Cage_647_GFP11_Cterm | DAEEVVKRLADVLRENDETIRKVVEDLVRIAEENDRLWKKLVEDIA | 3plus1_Key_Cterm_647 | EDVKRkLEELVSRIRKLLEDVKKASE |
| | EILRRIVELLRRGGVPEELLDRLAKVVKSIVEKAEKILERLNRVSK | | DIVREVERIVRELAKRSDEILKKLED |
| | AIAEKLKTIVDELNEVSKEIVKPAEDILRKGKDKETVLRAIRTLVK | | IVEKLRE(SEQ ID NO: 27253) |
| | EYADLSKEVLERVERIVREYVKLSDEVVKSLAEIVEELIRIIEDLL | | |
| | RKGNLDEDVKRALERDHMVLHEYVNAAGITSEDIVREVERIVRELA | | |
| | KRSDEILKKLEDIVEKLRE(SEQ ID NO: 27252) | | |
| 3plus1_Cage_Cterm_647 | DAEEVVKRLADVLRENDETIRKVVEDLVRIAEENDRLWKKLVEDIA | 3plus1_Key_Cterm_647 | EDVKRALEELVSRLRKLLEDVKKASE |
| | EILRRIVELLRRGGVPEELLDRLAKVVKSIVEKAEKILERLNRVSK | | DIVREVERIVRELAKRSDEILKKLED |
| | AIAEKLKTIVDELNEVSKEIVKRAEDILRKGKDKETVLRALRTLVK | | IVEKLRE(SEQ ID NO: 27255) |
| | EYADLSKEVLERVERIVREYVKLSDEVVKSLAEIVEELIRIIEDLL | | |
| | RKGNLDEDVKRALEELVSRLRKLLEDVKKASEDIVREVERIVRELA | | |
| | KRSDEILKKLEDIVEKLRE(SEQ ID NO: 27254) | | |
| 3plus1_Cage_Cterm_653 | DEEETLRRLLERKVELAKEYLDVSKEVIDRTTKLLDEYLKTSKRIV | 3plus1_Key_Cterm_653 | SREALEEARRRLEELLRELNEITKDL |
| | DATVELLERGDLGPDELIKRLAEELERSLRELEEEIKRLKRELEES | | EAKLEKLLRDLNELTKALEEELKRLL |
| | LKKLKEIIDRLAEEAEKLLAVLKPGEGSEEEALRALASLVRELIEV | | DELKKRTD(SEQ ID NO: 27257) |
| | LRENDERLRDVLRRLIEALRKNNEILERVLRKLVRAAEERGRDESS | | |
| | REALEEARRRLEELLRELNEITKDLEAKLEKLLRDLNELTKALEEE | | |
| | LKRLLDELKKRTD(SEQ ID NO: 27256) | | |
| 3plus1_Cage_Cterm_658 | DEERIIKTLEDINAKIVEDIKRILDKVAELNERLADAIRKILEETK | 3plus1_Key_Cterm_658 | KDTLRTVEKLVEDVKRRLDKLLEDYK |
| | RILEATTRKVRKDGEISEELLRPLEEKLRKLLEDLERVLAEHEDES | | RLIEEVKKELDKLLKEYEDALREIKK |
| | RRILEEVERLLKRHADASKELLDRARSVARGVKSDKELVDRLKKLI | | RIDE(SEQ ID NO: 27259) |
| | DDSLESVRELIERLKELLDRLVKSVEDLIRTIKELLDRLVEVLREG | | |
| | VSDKDTLRTVEKLVEDVKRRLDKLLEDYKRLIEEVKKELDKLIKEY | | |
| | EDALREIKKRIDE(SEQ ID NO: 27258) | | |
| 3plus1_Cage_Cterm_660 | TEEEVVEDVKRVLDESHDDLRRLIETLTRVIRESLKRIKEALEELE | 3plus1_Key_Cterm_660 | REEVKRVLEEARDELRRLLEEYKATI |
| | RVLKKLLDLLEGGPDAREVLDEIRKVLERLREVIEELLRINKEVLR | | EELERELERLLREHREVIRRIKEEID |
| | ELERVIRELLKKNEDLARRVRSGVKSRLLEVLERLARESLELNRAI | | KSSK(SEQ ID NO: 27261) |
| | LEELRKLVENSLPAVEKILKRLEEIVRKLLKLVEDGGPREEVKRVL | | |
| | EEARDELRRLLEEYKAITEELERELERLLREHREVIRRIKEEIDKS | | |
| | SK(SEQ ID NO: 27260) | | |
| 3plus1_Cage_Nterm_263 | SLVDELRKSLEPNVRVSEEVARRLKEALKRWVDVVRKVVEDLIRLN | 3plus1_Key_Nterm_263 | SLVDELRKSLEPNVRVSEEVARRLKE |
| | EDVVPVVEKVTVDESAIERVRRIIEELNRKLDAVLKKNEDLVRRLT | | ALKPNVDVVRKVVEDLIRLNEDVVRV |
| | ELLDKLLEENRRLVEELDEDLKRRGGTEEVIDTILELIERSIERLK | | VEKV(SEQ ID NO: 27263) |
| | RLLDELLRIVREALKDNKRVADENLKKLKEILDELRKDGVEDEELK | | |
| | RVLEKAADLHRRLKDRHRKLLEDLERIIRELKKKLDEVVEENKRSV | | |
| | DELKR(SEQ ID NO: 27262) | | |
| 3plus1_Cage_Nterm_500 | SEKEELKRLLDKLLKELKRLSDELKATIDKILKILKEVSEEVKRTA | 3plus1_Key_Nterm_500 | SEKEELKRLLDKLIKELKRLSDELKA |
| | DELLDAIPPGGVDEEVLREIKREIEEIEKKLRKVNKEIEDEIRETK | | TIDKILKILKEVSEEVXRTADELLDA |
| | KKLDEVDDKITKEVEKIKEALDKGGVDAKEVIKALKEILKEHADVF | | IRRG(SEQ ID NO: 27265) |
| | EDVLRRLKEIIKRHRDVVKEVLEELRKILEKVAEVLKRQGRSEDEL | | |
| | PKVEEDLKRLEDKLKKLLEDYEKKVRELEETLDDLLREYEETLRRL | | |
| | EKELEEAER(SEQ ID NO: 27264) | | |
| 3plus1_Cage_Nterm_510 | SEKEELLKLIKRVIELLKRVLEEHLRLVEDVIRRLKELLDSNEKIV | 3plus1_Key_Nterm_510 | SEKEELLKLIKRVIELLKRVLEEHLR |
| | REVIEDLKRLLDEVRGDKEELDRIKEKLEEVLERYKRRLEEIKRDL | | LVEDVIRRLKELLDSNEKIVREVIED |
| | ERMLEDYKRELKRIEEDLRRVLEEVERIATRGEGPAEALTDKLRKT | | LKRLLDEV(SEQ ID NO: 27267) |
| | LERALRELDKLSKKLDELLEKVLEELEKSNREIDKLLKDVLRRVEE | | |
| | GGASEDLLRKAKKVITEVREKLKPNLEDVRRVIEDVKRKSARILEE | | |
| | ARRLIEEVERELEKIRK(SEQ ID NO: 27266) | | |
| 3plus1_Cage_529_GFP11_Nterm | SEAEDLEELIKELAELLKDVIRKLEKINRRLVKILRDHMVLHEYVN | 3plus1_Key_Nterm_529 | SEAEDLEELIKELAELLKDVIRKLEK |
| | AAGITELPKGTVEDKDILRDLEPPLREILEESDRLLEELKRRLEEI | | INRRLVKILEDIIRRLKEISKEAEEE |
| | LRKSKELLRRLEEVLREILKRAEEVKRSNLPKEELIKEIVKLIEEL | | LRKG(SEQ ID NO: 27269) |
| | LRVIEKILEDNIRLLEELVEVIKEILEKHLRLLEELVRVIERILRE | | |
| | VGKDKDEAERRRRELKDKLDRLREEHEEVKPRLEEELTRLRETHKK | | |
| | IEKELPEALKRVRDRST(SEQ ID NO: 27268) | | |
| 3plus1_Cage_568_GFP11_Nterm | KEIEETLKELEDLNREMVETNRRVLEETRRLNKETVDRVKATRDHM | 3plus1_Key_Nterm_568 | KEIEETLKELEDLNREMVETNRRVLE |
| | VLHEY-VNAAGITKCPTSEELKRLLAELFELTARVVRRVEELLKKST | | ETRRLNKETVDRVKATLDELAKMLKK |
| | DLLEPAVKDSADALRRSHEVLKEVASRVKRAKDEGLPREEVLFLLR | | LVDDVPXG(SEQ ID NO: 27271) |
| | ELLERHAKVLKDIVRVSEKLLREHLKVLREIVEVLEELLERILKVI | | |
| | LDTTGGDKAVEELEKALEEIKRRLKEVIDRYEDELRKLREEYKEKI | | |
| | DKYERKLEEIERRERT(SEQ ID NO: 27270) | | |
| 3plus1_Cage_Nterm_581 | SALETVKKLLEDSSEKIERIVEEDERVAKESSDRIRRLVEEDKRVA | 3plus1_Key_Nterm_581 | SALETVKKLLEDSSEKIERIVEEDER |
| | DEILDLIEKIGDTDTLLKLVEEWSRTSKKLLDDVLKLHKDWSDDSR | | VAKESSDRIRRLVEEDKRVADEILDL |
| | RLLEEILRVHEELIRRVKEILDREGKPEEVVRELEKVLKESLDTLE | | IEKI(SEQ ID NO: 27273) |
| | EIIRRLDEANAATVKRVADVIRELEDINRKVLEEIKRGSDDAEAVI | | |
| | KVIEKLIPANKRVWDALLKINEDLVRVNKTVWKELLRVNEKLARDL | | |
| | ERVVK(SEQ ID NO: 27272) | | |
| 3plus1_Cage_610_GFP11_Nterm | SLEEITKRLLELVEENLARHEEILREELELAKRLAKRDHMVLHEYV | 3plus1_Key_Nterm_610 | SLEEITKRLLELVEENLARHEEILRE |
| | NAAGITLKLLEDNGSSEEDLKRLLKEVIEELRAVVKRVKDKWDEVV | | LLELAKRLAKEDRDILEEVLKLlEEL |
| | KRIEDLVEKLKELHDDTLRKLRELVRKIVTDISESGGEAEKVKRVV | | LKELEDN(SEQ ID NO: 27275) |
| | EKILELVERLAKVVKESVEKLLEILRELAEVSKRVAEAELRELEEL | | |
| | VRVIRIKDERTLREVVRKVLEEAKRLLDELEEVHKRVKKELEDIIE | | |
| | ENRRVVKRVRDELREIKRELDE(SEQ ID NO: 27274) | | |
| 3plus1_Cage_647_GFP11_Nterm | DAEEVVERLADVLRENDETIRKVVEDLVRIAEENDRLWRDHMVLHE | 3plus1_Key_Nterm_647 | DAEEVVKRLADVLRENDETIRKVVED |
| | YVNAAGITLLRRGGVPEELLDRLAKVVKSIVEKAEKILERENRVSK | | LVRIAEENDRLWKELVEDIAEILRRI |
| | AIAEKLETIVDELNEVSKEIVKPAEDIERKGKDKETVLRALRTLVK | | VELLRRG(SEQ ID NO: 27277) |
| | EYADLSKEVLERVERIVREYVKLGDEVVKSLAEIVEELIRIIEDLL | | |
| | PKGNLDEDVKRALEELVSRLRELLEDVKKASEDIVREVERIVRELA | | |
| | KRSDEILKKLEDIVEKLRE(SEQ ID NO: 27276) | | |

TABLE 4

| Row | | |
|---|---|---|
| number | Cage (column 1) | Key (column 2) |
| 1 | LOCKR_extend18 (SEQ ID NO: 6), | p18_MBP (SEQ ID NO: 27020), |
| | BimLOCKR_extend18 (SEQ ID NO: 22), | p76-long (SEQ ID NO: 27027), |
| | , | p76-short (SEQ ID NO: 27028), |
| | 1fix-long-Bim-t0 (SEQ ID NO: 54), | |
| | 1fix-long-GFP-t0 (SEQ ID NO: 55), | |
| | 1fix-short-BIM-t0 (SEQ ID NO: 56), | |
| | 1fix-short-GFP-t0 (SEQ ID NO: 57), | |
| 2 | LOCKRb (SEQ ID NO: 7), | key_b (SEQ ID NO: 27022) |
| 3 | LOCKRc (SEQ ID NO: 8), | key_c (SEQ ID NO: 27023) |

TABLE 5

| Cage Name | Cage Sequence | Key Name | Key Sequence |
|---|---|---|---|
| 2plus1_Cage_Cterm_2406 | SEVDEVVKEVEDLVRRNEELVEEVVRRVEKVVTDDRRLVEEVVREI | 2plus1_Key_Cterm_2406 | EKVLRKLEKVIREVRERSTRALRKVE |
| | RKIVKLVEDLARKLDKEELKRVLDEMRERIERLLEKLRRHSKKLDD | | EVIRRVREESERAIRDLERVVKEVEK |
| | ELKRLLEELREHSRRVEKRLEDLLKELRERGVDEKVLRKLEKVIRE | | RMREAAR(SEQ ID NO: 27127) |
| | VRERSTRALRKVEEVIRRVREESERALRDLERVVKEVEKRMREAAR | | |
| | (SEQ ID NO: 27126) | | |
| 2plus1_Cage_Cterm_5398 | SVEELLRKLEEVLRKIREENERSLKELRDRAREIVKRNRETNRELE | 2plus1_Key_Cterm_5398 | EDIVRKIERIVETIEREVRESVKKVE |
| | EVIKELEKRLSGADKEKVEELVRRIRRIVERVVEEDRRTVEEIEKI | | EIARDIRRKVDESVKNVEKLLRDVDK |
| | AREVVKRDRDSADRVRRTVEDVDRKATGSEDIVRKIERIVETIERE | | KARDRKK(SEQ ID NO: 27129) |
| | VRESVKKVEEIARDIRRKVDESVKNVEKLLRDVDKKARDRKK(SEQ | | |
| | ID NO: 27128) | | |
| 2plus1_Cage_Cterm_5405 | SESDDVIRKLRELLEELRTHVEKSIRDLRKILEDSTRNAKRSIEEL | 2plus1_Key_Cterm_5405 | EEKDKDLIRKLRDIIPPAAEANKKLI |
| | ERLLEEVPAAPGDEEVRKTVEEISRRVAENVKRLEDLYRPMEEEVK | | DDARESLERAKREHEKLIDRLKKILE |
| | KNLDRLRKRVEDIIREVEEARKKGVDEEKLKDLIRKLRDILRRAAE | | ELER(SEQ ID NO: 27131 |
| | AHKKLIDDARESLERAKREHEKLIDRLKKILEELER(SEQ ID | | |
| | NO: 27130) | | |
| 2plus1_Cage_Cterm_5406 | DREREVKKRLDEVREPIERLLRRVEEESRRVAEEIRRLIEEVRRRN | 2plus1_Key_Cterm_5406 | EELREELKKLERKIEEVAKEIHDHDK |
| | KKVTEEIRELLKGLKDKEEVRRVLERLRKLNAESDELLERILERLR | | EVTERLEDLLRRITEHARKSDREIEE |
| | RLVEATNRLVKAIIEELRRLVEKIVREVPDSEELREELKKLERKIE | | TAR(SEQ ID NO: 27133) |
| | KVAKEIHDHDKEVTERLEDLLRRITEHARKSDREIEETAR(SEQ | | |
| | ID NO: 27132) | | |
| 2plus1_Cage_Cterm_5409 | SEAEELLKRLEDRAEEILRRLEEILRTSPELAEDVLRELEKLLRES | 2plus1_Key_Cterm_5409 | KEVVDEIKRIVDEVRERLKRIVDENA |
| | ERRIREVLEELRGIKDKKELEDVIREVEKELDESLERSPELLKDVL | | KIVEDAPPALEKIVKENEEIDRRLKK |
| | KKLDDNLKESERLVEDIDRELAKILEDLKKAGVPKEVVDEIKRIVD | | ELRELRK(SEQ ID NO: 27135) |
| | EVRERLKRIVDENAKIVEDARRALEKIVKENEEILRRLKKELRELR | | |
| | K(SEQ ID NO: 27134) | | |
| 2plus1_Cage_5414_GFP11_Cterm | SEIEKILKEIEDLARRDEEVSKKIVEDIRRLAKEVEDTSRDIVRKI | 2plus1_Key_Cterm_5414 | EDSERLVREVEDLVRRLVRRSEKSNE |
| | EELAKPVLDRLRKDGSKEELEKEVREVVKTLEELVKDNHRLIRRAV | | EVKRTVEELVRRMEESNDRVRDLVRR |
| | EEMKRLVEENHPESREVVKELEDLVRELRKGSGSEDSERDHMVLHE | | LVEELKRAVD(SEQ ID |
| | YVNAAGITSEKSNEEVYRTVEELVRRMEESNDRVRDLVPRLVEELK | | NO: 27141) |
| | RAVD(SEQ ID NO: 27140) | | |
| 2plus1_Cage_Cterm_5421 | SVDEVLKEIEDALRRIKEEVEPVLKENEDELRRLEEEVPRVLKEDE | 2plus1_Key_Cterm_5421 | EKAIRDVAKEIRDRLKELEEEIEEVT |
| | ELLESLKRGVGESDEVDRVVDEIAKLSAEILEKVKKVVKEIRDSLE | | RRNLKLLADVEEEIPPVHEKTRRLLE |
| | TVKRRVDMIVRRLKELLDEIKRGSDEKAIRDVAKEIRDRLKELEEE | | TVLRRAT(SEQ ID NO: 27147) |
| | IEEVTTRNLKLLADVEEEIRRVHEKTRRLLETVLRRAT(SEQ ID | | |
| | NO: 27146) | | |
| 2plus1_Cage_Cterm_5432 | DEIRKVVKEITDLLKASNDKNRKVVEEIRDLLRKSKKLADELVERL | 2plus1_Key_Cterm_5432 | SEDLKPVEERAREVSRRNEESMRRVK |
| | RALVEDLRRRIDKSGDKETAEDIVRRIIEEIKRILKEIEDLARRIN | | EDADRVSEANKEVLDPVREEVKRLIE |
| | REIERLVEEVERDNRDVNRAIEELLKDIARRGGSEDLKRVEERARE | | EVRETLR(SEQ ID NO: 27149) |
| | VSRRNEESMRRVKEDADRVSEANKEVLDRVREEVKRLIEEVRETLR | | |
| | (SEQ ID NO: 27148) | | |
| 2plus1_Cage_Cterm_5435 | STAETVAEEVERVLKHSDDLIKEVEDVNRRVEEEIKRVIRELEEEN | 2plus1_Key_Cterm_5435 | EEAAREIIKRLREVNKRTKEKLDELI |
| | ERLVAEVRKGVKGEILAEIEKRLADNSEKVREVAERAKKLLEENTA | | KHSEEVLIRVKRLIDELRKHSEEVLE |
| | RVKDILRESPKLVKDLLDEVRGTGSEEAAREIIKRLREVNKRTKEK | | DLRRRAK(SEQ ID NO: 27151) |
| | LDELIKHSEEVIERVKRLIDELRKHSEEVLEDLRRRAK(SEQ ID | | |
| | NO: 27150) | | |
| 2plus1_Cage_Cterm_5439 | SRVEEIIEDLRRLLEEIRKENEDSIRRSKELLDRVKEINDTIIAEL | 2plus1_Key_Cterm_5439 | EDKARKVAEVAEKVLRDIDKLDRESK |
| | ERLLKDIEKEVREKGSESEEVKKALRAVLEELEKLLRRVAEINEEV | | EAFRATNEEIAKLDEDTARVAERVKK |
| | LRRNSKLVEEDERRNREVLKELARLVEELIREIGDEDKARKVAEVA | | AIEDLAK(SEQ ID NO: 27155) |
| | EKVLRDIDKLDRESKEAFRATNEEIAKLDEDTARVAERVKKAIEDL | | |
| | AK(SEQ ID NO: 27154) | | |
| 2plus1_Cage_Cterm_5447 | SEADDVLKKLAETVKRIIERLKKLTDDSRRLVEEVHPRNDKLSKES | 2plus1_Key_Cterm_5447 | EELSAEVKKLLDEVRKALARHKDEND |
| | AEAVRKAEERGIDEKDVRKLLEDLKKKSEEVAERNKRILDTLREIS | | KLLKEIEDSLRRHKEENDRLLEKLKE |
| | KRAEDEVRKVLKELEKTLKELEDRRPDSEELSAEVKKLLDEVRKAL | | STR(SEQ ID NO: 27157) |
| | ARHKDENDKLLKEIEDSLRRHKEENDRLLEKLKESTR(SEQ ID | | |
| | NO: 27156) | | |
| 2plus1_Cage_Cterm_5456 | SAEELLREVAELVKRVDEDLRRLLEEVRASNEEVIRRLEEILKRIE | 2plus1_Key_Cterm_5465 | EETVKRLLDELRELLERLKRTIEELL |
| | EENRKVVEELRRGGVSEDLVRESKRLVDESRRVIEKLVKESADSVE | | KRNRDLLADAEEKARRLLEENRKLLK |
| | RTRETVDRLREELKPLVEEIAKMVKGGSSEETVKRLLDELRELLER | | AARDTAT(SEQ ID NO: 27159) |
| | LKRTIEELKRNRDLLADAEEKARRLLEENRKLLKAARDTAT(SEQ | | |
| | ID NO: 27158) | | |
| 2plus1_Cage_Nterm_2406 | SEVDEVVKEVEDLVRRNEELVEEVVRRVEKVVTDDRRLVEEVVREI | 2plus1_Key_Nterm_2406 | SEVDEVVKEVEDLVRRNEELVEEVVR |
| | RKIVKDVEDLARKLDKEELKRVLDEMRERIERLLEKLRPHSKKLDD | | RVEKVVTDDRRLVEEVVREIRKIVKD |
| | ELKRLLEELREHSPRVEKRLEDLLKELRERGVDEKVLRKLEKVIRE | | VEDLARK(SEQ ID NO: 27163) |
| | VRERSTRALRKVEEVIRRVREESERALRDLERVVKEVEKRMPEAAR | | |
| | (SEQ ID NO: 27162) | | |
| 2plus1_Cage_Nterm_5406 | DREREVKKRLDEVRERIERLLRRVEEESRRVAEEIRRLIEEVRRRN | 2plus1_Key_Nterm_5406 | DREREVKKRLDEVRERIERLLRRVEE |
| | KKVTEEIRELLKGLKDKEEVRRVLERLRKLNAESDELLERILERLR | | ESRRVAEEIRRLIEEVRRRNKKVTEE |
| | PLVEATNRLVKAIIEELRRLVEKIVREVPDSEEIREELKKLERKIE | | IRELLKGL(SEQ ID NO: 27165) |
| | KVAKEIHDHDKEVTERLEDLLRRITEHARKSDREIEETAR(SEQ | | |
| | ID NO: 27164) | | |
| 2plus1_Cage_Nterm_5409 | SEAEELLKRLEDRAEEILRRLEEILRTSRKLAEDVLRELEKLLRES | 2plus1_Key_Nterm_5409 | SEAEELLKRLEDRAEEILRRIEEILR |
| | ERRIREVLEELRGIKDKKELEDVIREVEKELDESLERSRELIKDVL | | TSRKLAEDVLRELEKLLRESERRIRE |
| | KKLDDNLKESERLVEDIDRELAKILEDLKKAGVPKEVVDEIKRIVD | | VLEELRGI(SEQ ID NO: 27167) |
| | EVRERLKRIVDENAKIVEDARRALEKIVKENEEILRRLKKELRELR | | |
| | K(SEQ ID NO: 27166) | | |
| 3plus_Cage_529_GFP11_Cterm | SEAEDLEELIKELAELLKDVIRKLEKINRRLVKILEDIIRRLKEIS | 3plus_Key_Cterm_529 | KDEAERPRRELKDKIDRLREEHEEVK |
| | KEAEEELRKGTVEDKDILRDLERRLREILEESDRLLEELKRRLEEI | | RRLEEELTRLRETHKKIEKELREALK |
| | LRKSKELLRRLEEVLREILKRAEEVKRSNLPKEELIKEIVKLLEEL | | RVRDRST(SEQ ID NO: 27179) |
| | LRVIEKILEDNIRLLEELVEVIKEILEKHLRLLEELVRVIERILRE | | |
| | VGKDKDKAERRDHMVLHEYVNAAGITEEVKRPLEEELTRLRETHKK | | |
| | IEKELREAIKRVRDRST(SEQ ID NO: 27178) | | |
| 3plus1_Cage_Cterm_500 | SEKEELKRLLDKLLKELKRLSDELKATIDKILKILKEVSEEVKRTA | 3plus1_Key_Cterm_500 | EDELRKVEEDLKRLEDKLKKLLEDYE |
| | DELLDAIRRGGVDEEVLREIKREIEEIEKKLRKVNKEIEDEIREIK | | KKVRELEETLDDLLRKYEETLRRLEK |
| | KKLDEVDDKITKEVEKIKEALDKGGVDAKEVIKALKEILKEHADVF | | ELEEAER(SEQ ID NO: 27185) |
| | EDVLPPLKEIIKPHRDVVKEVLEELRKILEKVAEVLKRQGRSEDEL | | |
| | RKVEEDLKRLEDKLKKLLEDYEKKVRELEETLDDLLRKYEETLRRL | | |
| | EKELEEAER(SEQ ID NO: 27184) | | |
| 3plus1_Cage_Cterm_510 | SEKEELLKLIKRVIELLKRVLEEHLRLVEDVIRRLKELLDSNEKIV | 3plus1_Key_Cterm_510 | EDLLPKAKKVITEVREKLKPVLEDVR |
| | REVIEDLKRLDDEVRGDKEELDRIKEKLEEVLERYKPRLEEIKRDL | | RVIEDVKRKSARILEEAPRLIEEVER |
| | ERMLEDYKRELKRIEEDLRRVLEEVERIATRGEGPAEALIDKLPKI | | ELEKIRK(SEQ ID NO: 2/191) |
| | LERALRELDKLSKKLDELLKKVLEELEKSNREIDKLLKDVLRRVEE | | |
| | GGASEDLLPKAKKVITEVREKLKRNLEDVRRVIEDVKRKSARILEE | | |
| | ARRLIEEVERELEKIRK(SEQ ID NO: 27190) | | |
| 3plus1_Cage_528_GFP11_Cterm | SEAEDLEELIKELAELLKDVIRKLEKINPPLVKILEDIIRPLKEIS | 3plus1_Key_Cterm_528 | KDEAERPPRELKDKLDPLREEHEEVK |
| | KEAEEELPKGTVEDKDILRDLEPPLPETLEESDPLLEELYRRLEEI | | RRLEEELTRLRETHKKIEKELREALK |
| | LRKSKELLPPLEEVLREILKRAFEVKPSNLPKEELIKEIVKLLEEL | | RVRDRST(SEQ ID NO: 27193) |
| | LPVIEKILEDNIPILEELVEVIKEILEKHLPILEELVPVIERILRE | | |
| | VGRDHMVLHEYVNAAGITLDRLREEHEEVKRRLEEELTPIRETHKK | | |
| | IEKELPEALKRVPDRST(SEQ ID NO: 27192) | | |
| 3plus1_Cage_528_GFP11_Cterm | SEAEDLEELIKELAELLKDVIPXLEKINPRLVKILEDIIPPLKEIS | 3plus1_Key_Cterm_528 | KDEAERRRRELKDKLDRLREEHEEVK |
| | KEAEEELPKGTVEDKDILPDLEPPLREIDEESDPLLEELKPRLEEI | | RRLEEELTRLRETHKKIEKELREALK |
| | LRKSKELLPPLEEVLREILKPAEEVKPSNLPKEELIKEIVKLLEEL | | RVRDRST(SEQ ID NO: 27195) |
| | LRVIEKILEDNIRLLEELVEVIKEILEKHLRLLEELVRVIERILRE | | |
| | VGKDKPDHMVLHEYVNAAGITLREEHEEVKRRLEEELTPLRETHKK | | |
| | IEKELPEALKPVPDPST(SEQ ID NO: 27194) | | |
| 3plus1_Cage_528_GFP11_Cterm | SEAEDLEELIKELAELLKDVIRKLEKINRPLVKILEDIIPPLKEIS | 3plus1_Key_Cterm_528 | KDEAERPRRELKDKLDPEREEHEEVK |
| | KEAEEELRKGTVEDKDILPDLERPLREILEESDPLLEELKRRLEEI | | RRLEEELTRLRETHKKIEKELREALK |
| | LRKSKELLPPLEEVLREILKRAEEVKPSNLPKEELIKEIVKLLEEL | | RVRDRST(SEQ ID NO: 27197) |
| | LRVIEKILEDNIPLLEELVEVIKEILEKHLPILEELVPVIERILRE | | |
| | VGKDKDEAEPDHMVLHEYVNAAGITHEEVKRRLEEELTRIPETHKK | | |
| | IEKELREALKRVPDPST(SEQ ID NO: 27196) | | |
| 3plus1_Cage_529_GFP11_Cterm | SEAEDLEELIKELAELLKDVIRKLEKINRRLVKILEDIIRRLKEIS | 3plus1_Key_Cterm_529 | KDEAERRPRELKDKLDRLREEHEEVK |
| | KEAEEELPKGTVEDKDILPDLERRLREILEESDRLLEELKRRLEEI | | RRLEEELTRLRETHKKIEKELREALK |
| | LRKSKELLRRLEEVLREILKRAEEVKRSNLPKEELIKEIVKLLEEL | | RVRDRST(SEQ ID NO: 27299 |
| | LRVIEKILEDNIRLLEELVEVIKEILEKHLRLLEELVRVIERILRE | | |
| | VGKRDHMVLHEYVNAAGITDRLREEHEEVKRRLEEELTRLRETHKK | | |
| | IEKELREAIKRVRDRST(SEQ ID NO: 27198) | | |
| 3plus1_Cage_529_GF911_Cterm | SEAEDLEELIKELAELLKDVIRKLEKINRRLVKILEDIIRRLKEIS | 3plus1_Key_Cterm_529 | KDEAERRRRELKDKLDRLREEHEEVK |
| | KEAEEEIRKGTVEDKDILRDLERRLREILEESDRLLEELKRRLEEI | | RRLEEELTRLRETHKKIEKELREALK |
| | LRKSKELLRRLEEVLREILKRAEEVKRSNLPKEELIKEIVKLLEEL | | RVRDRST(SEQ ID NO: 27202) |
| | LRVIEKILEDNIRLLEELVEVIKEILEKHLPLLEELVRVIERILRE | | |
| | VGKDRDHMVLHEYVNAAGITRIREEHEEVKRRLEEELTPLPETHKK | | |
| | IEKELREALKRVRDRST(SEQ ID NO: 27200) | | |
| 3plus1_Cage_529_GFP11_Cterm | SEAEDLEELIKELAELLKDVIRKLEKTNRRLVKILEDIIRRLKEIS | 3plus1_Key_Cterm_529 | KDFAERRRRELKDKLDRLREEHEEVK |
| | KEAEEELRKGTVEDKDILRDLERRLREILEESDRLLEELKRRLEEI | | RRLEEELTRLRETHKKIEKELREALK |
| | LRKSKELLRRLEEVLREILKRAEEVKRSNLPKEELIKEIVKLLEEL | | RVRDRST(SEQ ID NO: 27203) |
| | LRVIEKILEDNIRLLEELVEVIKEILEKHLRLLEELVRVIERILRE | | |
| | VGKDKDRDHMVLHEYVNAAGITREEHEEVKRPLEEELTRLRETHKK | | |
| | IEKELREALKRVRDRST(SEQ ID NO: 27202) | | |
| 3plus1_Cage_534_GFP11_Cterm | DEDRIIEEIARLLEELLRELLELIKKLIETNPPLNEEHERAVRELA | 3plus1_Key_Cterm_534 | EKIAEEIERELEELPRMIKRLHEDLE |
| | RLLEELLDRLVKKGISDEKLKRIRERLKRALDDLERLHREINKRLE | | RKLKESEDELREIEARLEEKIRRLEE |
| | DLVRELEKLVREILKELKDALEELRRASARAGGEEVLRRLEEIVKK | | KLERKRR(SEQ ID NO: 27207) |
| | LLDLVRRILERLKEIHKDMVRLLRELNERLTPIVEDLVPLIREILR | | |
| | EAGVDERDHMVLHEYVNAAGITIKRLHEDLERKLKESEDELREIEA | | |
| | RLEEKIRRLEEKLERKRR(SEQ ID NO: 27206) | | |
| 3plus1_Cage_534_GFP11_Cterm | DEDRIIEEIARLLEELLRELLELIKKLIETNRRLNEEHERAVRELA | 3plus1_Key_Cterm_534 | EKIAEEIERELEELRRMIKRLHEDLE |
| | RLLEELLDRINKKGISDEKLKPIRERLKRALDDLERLHREINKRLE | | RKLKESEDELREIEARLEEKIRRLEE |
| | DLVRELEKLVREILKELKDALEELRRASARAGGEEVLRRLEEIVKK | | KLERKRR(SEQ ID NO: 27209) |
| | LLDLVRRILERLKEIHKDNVRLLRELNERLTRIVEDLVRLIREILR | | |
| | EAGVDEKIRDHMVLHEYVNAAGITRLHEDLERKLKESEDELREIEA | | |
| | RLEEKIRRLEEKLERKRR(SEQ ID NO: 27208) | | |
| 3plus1_Cage_534_GFP11_Cterm | DEDRIIEEIARLLEELLRELLELIKKLIETNRRLNEEHEPAVRELA | 3plus1_Key_Cterm_534 | EKIAEEIERELEELRRMIKRLHEDLE |
| | RLLEELLDRLVKKGISDEKLKRIRERLKRLDDLERLHREINKRLE | | RKLKESEDELRE1EARLEEKIRRLEE |
| | DLVRELEKLVREILKELKDALEELRRASARAGGEEVLPTLEEIVKK | | KLERKPP(SEQ ID NO: 27211) |
| | LLDLVRRILERLKEIHKDNVRLLRELNERLTRIVEDLVRLIREIL | | |
| | FIAGVDEKTAEETERDHMVLHEYVNAAGTTERKLKESEDELPETEA | | |
| | RLEEKIRRLEEKLERKRR(SEQ ID NO: 27210) | | |
| 3plus1_Cage_Cterm_539 | SEKEKLLKESEEEVRRLRRTLEELLRKYREVLERLRKELREIEERV | 3plus1_Key_Cterm_539 | ERLVKTLIEDVEAVIKRILELITRVA |
| | RDVVRRLKEVLDRKGIDIDTIIKEVEDLLKTVLDRLRELLDKIRRL | | EDNERVLERIIRELTDNLERHLKIVR |
| | TKEAIEVVREIIERIVRHAERVKDELRKEGGDKEKLDRVDRLIKEN | | EIVK(SEQ ID NO: 27213) |
| | TRHLKEILDRIEDLVRRSEKKLRDIIREVRRLIEELRKKAEEIKKG | | |
| | PDERLVKTLIEDVEAVIKRILELITRVAEDNERVLERIIRELTDNL | | |
| | ERHLKIVREIVK(SEQ ID NO: 27212) | | |
| 3plus1_Cage_Cterm_548 | DKAEVLPEALKLLKDLLEELIKIHEESIKRILDLIDTLVKVHEDAL | 3plus1_Key_Cterm_548 | EEIDRELKRVVEEIRRLHEEIKERLD |
| | RALKELLERSGLDERELRKVERMATESLPTIAKLKEELRDLARRSL | | DVARRSEEELRRIIKKLKEVVKEIRK |
| | EKLREDIKPVDDTLRKVEEKVPPTGPSEELIEELIRTIEKLLKEIV | | KLK(SEQ ID NO: 27215) |
| | RINEEVLKAVRELLKTLLKLSEDVVRRIEEILPKGGVPEEIDRELK | | |
| | RVVEELPRLHEETKERLDDVARPSEEELPRIIKKLKEVVKEIRKKL | | |
| | K(SEQ ID NO: 27214) | | |
| 3plus1_Cage_Cterm_556 | SERELIERWLELHKEILRLIRELVERLLKLHREILDTIKKLIRELL | 3plus1_Key_Cterm_556 | DDERRTLTELLKRMEDILEKVERTLK |
| | ELLEDIARKLGLDKEAKDELREIAKRVEDKLEKLERESPEVEEDLK | | KLLDDSARMAEEVKKTLKELLEPSEK |
| | RKLKELTDESDTVEKRVRDVVRRGTQSREEIAEELLRLDRKLLKAV | | VAEDVRK(SEQ ID NO: 27217) |
| | EELLKEILDLNKKLLDDVRAILEETRRVLEKLLDRVRRGERTDDER | | |
| | RTLTELLKRMEDILEKVERTLKKLLDDSARMAEEVKKTLKELLERS | | |
| | EKVAEDVRK(SEQ ID NO: 27216) | | |
| 3plus1_Cage_Cterm_560 | SKKELLEEVVRRAIELLKRHLEKLKRILEEIVRLLEENLEKVERVL | 3plus1_Key_Cterm_560 | EDKLKEIEDELRRLLEELRRLDKAIK |
| | EAILSLLDDLLRRGGDEPAIRTLEDVKRRLPEILERIADENAKAIK | | DRLRELKKDLDEANPPIKETLKKLLR |
| | RLADLLDKLEKRNKEAIERLEEILEELKRVRRDEELLRVLETLLKI | | EVEK(SEQ ID NO: 27219) |
| | IEDILRENTKVLEDLLPINEEILEAYLRVVEELLPLAREILTEIVG | | |
| | DEDKLKEIEDELPRLLEELRRLDKAIKDRLRELKKDLDEANRRIKE | | |
| | TLKKLLREVEK(SEQ ID NO: 27218) | | |
| 3plus1_Cage_568_GFP11_Cterm | KEIEETLKELEDLNREMVETNRRVLEETRPLNKETVDRVKATLDEL | 3p1us1_Key_Cterm_568 | KAVEELEKALEEIKERLKEVIDRYED |
| | AKMLKKLVDDVPKGPTSEELKPILAELEELLARVVRRVEELLKKST | | ELRKLPEETKEKIDKYERKLEEIERR |
| | DLLERAVKDSADALPPSHEVLKEVASRVKRAKDEGLPREEVLRLLR | | ERT(SEQ ID NO: 27221) |
| | ELLERHAKVLKDIVRVSEKLLREHLKVLREIVEVLEELLERILKVI | | |
| | LDTTPDHMVLBEYVNAAGITKPRLKEVIDRYEDELRKLPKEYKEKI | | |
| | DKYERKLEEIERRERT(SEQ ID NO: 27220) | | |
| 3plus1_Cage_568_GFP11_Cterm | KEIEETLKELEDLNREMVETNRRVLEETRRLNKETVDPVKATLDEL | 3plus1_Key_Cterm_568 | KAVEELEKALEEIKRRLKEVIDRYED |
| | AKMLKKLVDDVRKGPTSEELKPLLAELEELLARVVRRVEELLKKST | | ELRKLRKEYKEKIDKYERKLEEIERR |
| | DLLEPAVKDSADALRRSHEVLKEVASPVKRAKDEGLRREEVLRLLR | | ERT(SEQ ID NO: 27223) |
| | ELLERRAKVLKDIVRVSEKLLREHLKVLREIVEVLEELLERILKVI | | |
| | LDTTGGDRDHMVLHEYVNAAGITLKEVIDRYEDELRKIRKEYKEKI | | |
| | DKYERKLEEIERRERT(SEQ ID NO: 27222) | | |
| 3plus1_Cage_Cterm_581 | SALETVKKLLEDSSEKIERIVEEDERVAKESSDRIPPLVEEDKRVA | 3plus1_Key_Cterm_581 | AEAVIKVIEKLIRANKRVWDALLKIN |
| | DEILDDIEKIGDTDTLLKLVEEWSPTSKKLLDDVLKDNKDWSDDSR | | EDLVPVNKTVWKELLRVNEKLARDLE |
| | RLLEEILRVHEELIRRVKEILDREGKPEEVVRELEKVLKESLDTLE | | RVVK(SEQ ID NO: 27227) |
| | EIIRRLDEANAATVKRVADVIRELEDINPKVLEEIKRGSDDAEAVI | | |
| | KVIEKLIPANKRVWDALLKINEDLVRVNKTVWKELLPVNEKLARDL | | |
| | ERVVK(SEQ ID NO: 27226) | | |
| 3plus1_Cage_Cterm_585 | SKEEKLKDDVRAVLEDLDRVLKELEKLSEDNLRELKRVLDRITDLH | 3plus1_Key_Cterm_585 | SKAAEDILPVLEKLVKVSREAIKLIL |
| | RRILDELPKGIGSEELLPRVEKVIKDNLDLLRKLVEEHKESSERDL | | ELSEHHVRVSTRIAPLLLDVARKLAE |
| | KRVEDLVREIKEVLRKLLELEDPGTDIRKIEEEIERLDPKIPKAVE | | VIKEAER(SEQ ID NO: 27229) |
| | ESKDLNERNSERIEEVARRSEELAPRLLKEIRERGDSKAAEDILRV | | |
| | LEKLVKVSREAIKLIIELSEHNVRVSTRIAPILLDVARKLAEVIKE | | |
| | AER(SEQ ID NO: 27228) | | |
| 3plus1_Cage_Cterm_587 | SEIEDVINRLRKILEDLERVSEKLLREIKKILDEAPYLNEEVIKEI | 3plus1_Key_Cterm_587 | IEDLVREVERLIKRTEDSLRELEKTV |
| | KRVLEDAVRVFPDGSGSKEELAKLVEELIEELAKLAKEVDEIHKRI | | RELLKPIKEASDKVREDVDRLIKELK |
| | VERLKALVEDAERINPKIVETLEEIVRGVPSEELKRVVEAIVEVIK | | EAAD(SEQ ID NO: 27231) |
| | EHLKVLADVIRRIIKAIEENAETIKRVLEDIVRVLELVLRGEGSIE | | |
| | DLVREVERLIKRIEDSLRELEKTVRELLKRIKEASDKVREDVDRLI | | |
| | KELKEAAD(SEQ ID NO: 27230) | | |
| 3plus1_Cage_Cterm_605 | SREELLDRILEAIAKILEDLKRLIDENLARLEEVVRELERIIDRNL | 3plus1_Key_Cterm_605 | DEIIRKLDELLKEVENVHKEVKDRIR |
| | KLIREILDELKKGSGSEEILEKIKKVDKEIEDLIRRZLKKLEDLIR | | KLLEDHKRSLDEVKKKLERLDERAKE |
| | ETERRLREILKRIRDLLKEVKDRDKDLERLLEVLEEVLPVIAELAK | | VVEREKK(SEQ ID NO: 27233) |
| | ELLDSLRKVLKVVEEVLPLLNEVNKEVLDVIRELAKDGGSDEIIRK | | |
| | LDELLKEVEKVHKEVKDRIRKDLEDHKRSLDEVKKKLERLLERAKE | | |
| | VVEREKK(SEQ ID NO: 27232) | | |
| 3plus1_Cage_Cterm_607 | SEREELLERIKEILKRVKDKLDEDLKRLKEILEKLKEKADRDLEEL | 3plus1_Key_Cterm_607 | SETAVRAIIRVLEKHLEAVRRVLEEL |
| | RRRIEEVREKLERTGRTDELVKEVLDTVRRNLENLKRLVEDILRKL | | LKVLAEHLETVRELIERLKRVLEEAI |
| | EENVKNLTDLVREILKLITELIKRLEDGGLPKEVLDALRRVLEKLE | | EVVERVAR(SEQ ID NO: 27235) |
| | ELLREILERLKRSLEAVKRKIEELLKELERSLDELRRADERIRKEI | | |
| | GDSETAVRAIIRVLEKHLEAVRRVLEELLKVLAEHLETVRELIERL | | |
| | KRVLEEAIEVVEPVAR(SEQ ID NO: 27234) | | |
| 3plus1_Cage_611_GFP11_Cterm | SLEEITKRLLELVEENLARHEEILRELLELARRLAKEDRDILEEVL | 3plus1_Key_Cterm_611 | ERTLREVVRKVLEEAKRLLDELEEVH |
| | KLIEELLKLLEDNGSSEEDLKRLLKEVIEELRAVVKRVKDKWDEVV | | KRVKKELEDIIEENRRVVKRVRDELR |
| | KRIEDLVKKLKELHDDTLRKLRELVRKIVTDISESGGEAEKVKRVV | | EIKRELDE(SEQ ID NO: 27239) |
| | EKILELVERLAKVVKESVEKLLEILRELAEVSKRVAEALLRLLEEL | | |
| | VRVIRIKDERDHMVLHEYVNAAGITLLDELEEVHKRVKKELEDIIE | | |
| | ENRRVVKRVRDELREIKRELDE(SEQ ID NO: 27238) | | |
| 3plus1_Cage_Cterm_632 | SEKELVDDIRRILEEILRLDRSLLEEVIRLLEENEKLVRRHLKTVI | 3plus1_Key_Cterm_632 | DSLVREVEELIKRIEKKIDDLLKTSR |
| | DILRRVAKLLDENGIRTDEADPVLERLEKAHRELLEDYKPALEKIK | | DLVKPVLDLVDEVVKRVEDLVERVKE |
| | ETLERVLREAEEVVKKIDDALRKLGGSKEVLKRLLEELLRLVEKIA | | KIDT(SEQ ID NO: 27241) |
| | EEIKRLLSELVRVTEELVRINKELLEEAVRVIRKEVGDDSLVREVE | | |
| | ELIKRLEKHIDDLLKTSRDLVKRVLDLVDEVVKRVEDLVERVKEKI | | |
| | DT(SEQ ID NO: 27240) | | |
| 3plus1_Cage_646_GEP11_Cterm | DAEEVVKRLADVLRENDETIRKVVEDLVRIAEENDRLWKKLVEDIA | 3plus1_Key_Cterm_646 | EDVKRALEELVSRLRKLLEDVKKASE |
| | EILRRIVELLRRGGVPEELLDRIAKVVKSIVEKAEKILERLNRVSK | | DIVREVERIVRELAKPSDEILKKLED |
| | AIAEKLKTIVDELNEVSKEIVKRNEDILRKOKDKETVLRALRTLVK | | IVEKLRE(SEQ ID NO: 27245) |
| | EYADLSKEVLERVERIVREYVKLSDEVVKSLAEIVEELIRIIEDLL | | |
| | RKGNRDHMVLHEYVNAAGITRKLLEDVKKASEDIVREVERIVRELA | | |
| | KRSDEILKKLEDIVEKLRE(SEQ ID N: 27244) | | |
| 3plus1_Cage_546_GFP11_Cterm | DAEEVVKRLADVLPENDETIRKVVEDLVPIAFENDRINKKLVEDIA | 3plus1_Key_Cterm_646 | EDVKRALEELVSRLRKLLEDVKKASE |
| | EILPPIVELLRRGGVPEELLDRIAKVVKSIVEKAEKILEPLNRVSK | | DIVREVERIVRELAKRSDEILKKLED |
| | AIAEKLKTIVDELNEVSKEIVKRAEDILPKGKDKETVLRALRTLVK | | IVEKLRE(SEQ ID NO: 27247) |
| | EYADLSKEVLERVERIVREYNKLSDEVVKSLAEIVEELIRIIEDLL | | |
| | RKGNLDEDRDHMVLHEYVNAAGITEDVKKASEDIVREVERIVRELA | | |
| | KRSDEILKKLEDIVEKLPE(SEQ ID NO: 27246) | | |
| 3plus1_Cage_546_GFP11_Cterm | DAEEVVKRLADVLRENDETIPKVVEDLVRIAEENDRLWKKLVEDIA | 3plus1_Key_Cterm_646 | EDVKRALEELVSRLRKLLEDVKKASE |
| | EILRRIVELLRRGGVPEELLDRLAKVVKSIVEKAEKILERLNRVSK | | DIVREVERIVRELAKRSDEILKKLED |
| | AIAEKLKTIVDELNEVSKEIVKRAEDILRKGKDKETVLRALPTLVK | | IVEKLRE(SEQ ID NO: 27249) |
| | EYADLSKEVLERVERIVREYVKLSDEVVKSLAEIVEELIRIIEDLL | | |
| | RKGNLDEDVRDHMVLHETVNAAGITDVKKASEDIVREVERIVRELA | | |
| | KRSDEILKKLEDIVEKLRE(SEQ ID NO: 27248) | | |
| 3plus1_Cage_547_GF211_Cterm | DAEEVVKRLADVLRENDETIRKVVEDLVRIAEENDRLWKKLVEDIA | 3plus1_Key_Cterm_647 | EDVKRALEELVSRLRKLLEDVKKASE |
| | EILRRIVELLRRGGVPEELLDRLAKVVKSIVEKAEKILERLNRVSK | | DIVREVEPIVRELAKRSDEILKKLED |
| | AIAEKLKTIVDELNEVSKEIVKRNEDILRKGKDKETVLRALRTLVK | | IVEKLRE(SEQ ID NO: 27251) |
| | EYADLSKEVLEPVERIVREYVKLSDEVVKSLAEIVEELIRIIEDLL | | |
| | RKGNLRDHMVLHEYVNAAGITKLLEDVKKASEDIVREVERIVRELA | | |
| | KRSDEILKKLEDIVEKLRE(SEQ ID NO: 27250) | | |
| 3plus1_Cage_647_GFP11_Cterm | DAEEVVKPLADVLRENDETIRKVVEDINRIAEENDRLWKKLVEDIA | 3plus1_Key_Cterm_647 | EDVKRALEELVSRLRKLLEDVKKASE |
| | EILRRIVELLRRGGVPEELLDRLAKVVKSIVEKAEKILERLNRVSK | | DIVREVERIVRELAKRSDEILKKLED |
| | AIAEKLKTIVDELNEVSKEIVKRAEDILRKGKDKETVLRALRTLVK | | IVEKLRE(SEQ ID NO: 27253) |
| | EYADLSKEVLERVERIVREYVKLSDEVVKSLAEIVEELIRIIEDLL | | |
| | RKGNLDEDVKRALERDHMVLHEYVNAAGITSEDIVREVERIVRELA | | |
| | KRSDEILKKLEDIVEKLRE(SEQ ID NO: 27252) | | |
| p1us1_Cage_Cterm_547 | DAEEVVKRLADVLRENDETIRKVVEDLVRIAEENDRLWKKLVEDIA | 3plus1_Key_Cterm_647 | EDVKRALEELVSRKRKLLEDVKKASE |
| | EILRRIVELLPRGGVPEELLDRLAKVVKSIVEKAEKILERLNRVSK | | DIVREVERIVRELAKRSDEILKKLED |
| | AIAEKLKTIVDELNEVSKEIVKRAEDILRKGKDKETVLRALRTLVK | | IVEKLRE(SEQ ID NO: 27255) |
| | EYADLSKEVLERVERIVREYVKLSDEVYKSLAEIVEELIRIIEDLL | | |
| | RKGNLDEDVKRALEELVSRLRKLLEDVKKASEDIVREVERIVRELA | | |
| | KRSDEILKKLEDIVEKLRE(SEQ ID NO: 27254) | | |
| 3plus1_Cage_Cterm_653 | DEEETLRRLLERKVELAKEYLDVSKEVIDRTTKLLDEYLKTSKRIV | 3plus1_Key_Cterm_653 | SREALEEARRRLEELLRELNEITKDL |
| | DATVELLERGDLGRDELIKPLAEELERSLRELEEEIKRLKRELEES | | EAKLEKLLRDLNELTKALEEELKRLL |
| | LKKLKEIIDPLAEEAEKLLAVLKRGEGSEEEALRALASLVRELIEV | | DELKERTD(SEQ ID NO: 27257) |
| | LRENDERLRDVLRRLIEALRKNNEILERVLRKLVRAAEERGRDESS | | |
| | REALEEARRRLEELLRELNEITKDLEAKLEKLLRDLNELTKALEEE | | |
| | LKRLLDELKKRTD(SEQ ID NO: 27256) | | |
| 3plus1_Cage_Cterm_658 | DEERIIKTLEDINAELVEDIKRILDKVAELNEPLADAIRKILEETK | 3plus1_Key_Cterm_658 | KDTLRTVEKLVEDVKPRLDKLLEDYK |
| | RILEATTRKVRKDGEISEELLRRLEEKLRKLLEDLERVLAEHEDES | | RLIEEVKKELDKLLKEYEDALREIKK |
| | PRILEEVERLLKRHADASKELLDRARSVARGVKSDKELVDRLKKLI | | RIDE(SFQ ID NO: 27259) |
| | DDSLESVRELIERLKELLDRLVKSVEDLIRTIKELLDRLVEVLREG | | |
| | VSDKDTLRTVEKLVEDVKRRLDKLLEDYKRLIEEVKKELDKLLKEY | | |
| | EDALREIKKRIDE(SEQ ID NO: 27258) | | |
| 3plus1_Cage_Nterm_263 | SLVDELRKSLERNVRVSEEVARRLKEALKRWVDVVRKVVEDLIRLN | 3plus1_Key_Nterm_263 | SLVDELRKSLERNVRVSEEVARRLKE |
| | EDVVRVVEKVTVDESAIERVRRIIEELNRKLDAVLKKNEDLVRRLT | | ALKRWVDVVRKVVEDLIPLNEDVVRV |
| | ELLDKLLEENRRLVEELDEDLKRRGGTEEVIDTILELIERSIERLK | | VEKV(SEQ ID NO: 27263) |
| | RLLDELLRIVREALKDNKRVADENLKKLKEILDELRKDGVEDEELK | | |
| | RVLEKAADLHRRLKDPHRKLLEDLERIIRELKKKLDEVVEENKRSV | | |
| | DELKR(SEQ ID NO: 27262) | | |
| 3plus1_Cage_647_GFP11_Nterm | DAEEVVKRLADVLRENDETIRKVVEDLVRIAEENDPLWRDHMVLHE | 3plus1_Key_Nterm_647 | DAEEVVKRLNDVLRENDETIRKVVED |
| | YVNAAGITLLRRGGVPEELLDRLAKVVKSIVEKAEKILERLNRVSK | | LVRIAEENDRLWKKLVEDIAEILRRI |
| | AIAEKLKTIVDELNEVSKEIVKRAEDILRKGKDKETVLRALPTLVK | | VELLRRG(SEQ ID NO: 27277) |
| | EYADLSKEVLERVERIVREYVKLSDEVVKSIAEIVEELTRIIEDLL | | |
| | RKGNLDEDVKRALEELVSRLRKLLEDVKKASEDIVREVERIVRELA | | |
| | KPSDEILKKLEDIVEKLRE(SEQ ID NO: 27276) | | |

TABLE 6
Mapping Switch to Key that activates it

| Row | Cage polypeptide | Key polypeptide |
|---|---|---|
| 1 | 1fix-short_cODC_t11, | key_a |
| | (SEQ ID NO: 27, 373) | (SEQ ID NO: 27, 477), |
| | 1fix-short_cODC_t8 | key_a_m4 |
| | (SEQ ID NO: 27, 372), | (SEQ ID NO: 27, 478), |
| | 1fix-short_cODC_t5 | key_a_m9 |
| | (SEQ ID NO: 27, 371), | (SEQ ID NO: 27, 479), |
| | 1fix-short_cODC | key_a_m12 |
| | (SEQ ID NO: 27, 370), | (SEQ ID NO: 27, 480), |
| | 1fix-short_CODC_mut_t6 | key_a_m15 |
| | (SEQ ID NO: 27, 369), | (SEQ ID NO: 27, 481) |
| | 1fix-short_cODC_mut | |
| | (SEQ ID NO: 27, 368), | |
| | degron-miniLOCKRa_t12 | |
| | (SEQ ID NO: 27, 367), | |
| | degron-miniLOCKRa_2_t9 | |
| | (SEQ ID NO: 27, 366), | |
| | degron-miniLOCKRa_1_t12 | |
| | (SEQ ID NO: 27, 365), | |
| | degron-miniLOCKRa_1_t9 | |
| | (SEQ ID NO: 27, 364), | |
| | degonLOCKRa_320_t16 | |
| | (SEQ ID NO: 27, 363), | |
| | degonLOCKRa_324_t12 | |
| | (SEQ ID NO: 21, 362), | |
| | degonLOCKRa_CAonly | |
| | (SEQ ID NO: 27, 361), | |
| | degonLOCKRa_327_noPro | |
| | (SEQ ID NO: 27, 360), | |
| | degonLOCKRa_327 | |
| | (SEQ ID NO: 27, 359) | |
| 2 | degonLOCKRb, | key_b |
| | (SEQ ID NO: 27, 374) | (SEQ ID NO: 27, 482) |
| | degonLOCKRb_t13 | |
| | (SEQ ID NO: 27, 375) | |
| 3 | degonLOCKRc_t13 | key_c |
| | (SEQ ID NO: 27, 376), | (SEQ ID NO: 27, 483) |
| | degron-miniLOCKRc_1_t9 | |
| | (SEQ ID NO: 27, 378), | |
| | degron-miniLOCKRc_1_t13 | |
| | (SEQ ID NO: 27, 379), | |
| | degron-miniLOCKRc_2_t9 | |
| | (SEQ ID NO: 27, 380), | |
| | degron-miniLOCKRc_t13 | |
| | (SEQ ID NO: 27, 331), | |
| | degronLOCKRc_1fix_t13 | |
| | (SEQ ID NO: 27, 382) | |
| 4 | degonLOCKRd SEQ ID | key_d |
| | NO: 27, 383 | (SEQ ID NO: 27, 484), |
| | | key_d_m4 |
| | | (SEQ ID NO: 27, 4851, |
| | | key_d_m7 |
| | | (SEQ ID NO: 27, 477) |

TABLE 7

| | | | |
|---|---|---|---|
| degronSwitch_cODC_2plus1_5398_t15 | SVEELLRKLEEVLRKIREENERSLKELRDRAREIVKRN | 2plus1_Key_Cterm_5398 | EDIVRKIERIVETIEREVRESVKKVEEIARDIRR |
| | RETNRELEEVIKELEKRLSGADKEKVEELVRRIRRIVE | | KVDESVKKIVEKLLRDVDKKARDRKK (SEQ ID |
| | RVVEEDRRTVEEIEKIAREVVKRDRDSADPVRRTVEDV | | NO: 27129) |
| | LPKATGSEDIVRKIERIVETTEREVRELIMSCAQESRD | | |
| | IRRKVDESVYNVE SEQ ID NO: 27384) | | |
| degronSwitch_cODC_2plus1_5398_t12 | SVEELLRKLEEVLPEIREENERSLKELRDRAREIVKRN | 2plus1_Key_Cterm_5398 | EDIVRKIERIVETIEREVRESVKKVEEIARDIRR |
| | RETNRELEEVIKELEKRLSGADKEKVEELVRRIRRIVE | | KVDESVKNVEKLLRDVDKKARDRKK (SEQ ID |
| | RVVEEDRRTVEEIEKIAREVVKRDRDSADPYRRTVEDV | | NO: 27129) |
| | LRKATGSEDIVRKIERIVETIEREVRESVKLVMSCAQE | | |
| | SRRKVDESVYNVEKLL (SEQ ID NO: 27385) | | |
| degronSwitch_cODC_2plus1_5398_t8 | SVEELLRKLEEVLRKIREENERSIKELRDPAREIVKRN | 2plus1_Key_Cterm_5398 | EDIVRKIERIVETIEREVRESVKKVEEIARDIRR |
| | RETNRELEEVIKELEKRLSGADKEKVEELVRRIRRIVE | | KVDESVKNVEKLIRDVDKKARDRKK (SEQ ID |
| | RVVEEDRRTVEEIEKIAREVVKRDRDSADPVRRTVEDV | | NO: 27129) |
| | LPKATGSEDIVRKIERIVETIEREVRESVKKVEELAMS | | |
| | CAQESDESVYNVEKLLRDVD (SEQ ID NO: 21386) | | |
| degronSwitch_cODC_2plus1_5398_t4 | SVEELLRKLEEVLRKIREENERSIKELRDPAREIVKRN | 2plus1_Key_Cterm_5398 | EDIVRKIERIVETIEREVRESVKKVEEIARDIRR |
| | RETNRELEEVIKELEKRLSGADKEKVEELVRRIRRIVE | | KVDESVKNVEKLLRDVDKKARDRKK (SEQ ID |
| | RVVEEDRRTVEEIEKIAREVVKRDRDSADPVRRTVEDV | | NO: 27129) |
| | LRKATGSEDIVRKIERIVETIEREVRESVKKVEEIARD | | |
| | LRMSCAQESKNVEKLLRDVDKKAR (SEQ ID | | |
| | NO: 27387) | | |
| degronSwitch_cODC_2plus1_5398_t1 | SVEELLRKLEEVLRKIREENERSIKELRDRAREIVKRN | 2plus1_Key_Cterm_5398 | EDIVRKIERIVETIEREVRESVKKVEEIARDIRR |
| | RETNRELEEVIKELEKRLSGADKEKVEELVRRIRRIVE | | KVDESVKNVEKLLRDVDKKARDRKK (SEQ ID |
| | RVVEEDRRTVEEIEKIAREVVKRDRDSADRVRRTVEDV | | NO: 27129) |
| | LRKATGSEDIVRKIERIVETIEREVRESVKKVEEIARD | | |
| | IRRLGMSCAQESEKLLRDVDKKARDRK (SEQ ID | | |
| | NO: 27388) | | |
| degronSwitch_cODC_2plus1_5398_t0 | SVEELLRKLEEVLRKIREENERSLKELRDRAPEIVKRN | 2plus1_Key_Cterm_5398 | EDIVRKIERIVETIEREVRESVKKVEEIARDIRR |
| | RETNRELEEVIKELEKRLSGADKEKVEELVRRIRRIVE | | KVDESVKNIVEKLLRDVDKKARDRKK (SEQ ID |
| | RVVEEDRRTVEEIEKIAREVVKRDRDSADRVRRTVEDV | | NO: 27129) |
| | LRKATGSEDIVRKIERIVETIEREVPESVKKVEEIARD | | |
| | IRRKLDMSCAQESKLLPDVDKKARDRKK (SEQ ID | | |
| | NO: 27389) | | |
| degronSwitch_cODC_2plus1_5405_t15 | SESDDVIRKLRELLEELRTEVEKSIPDLRKILEDSTRH | 2p1us1_Key_Cterm_5405 | EEKLKDLIRKLRDILRPAAEAHKKIJDDARESLE |
| | AKRSIEELERLLEEVRKKPGDEEVRKTVEEISRRVAEN | | RAKREHEKLIDPLKKILEELER (SEQ ID |
| | VKRLEDLYRRMEEEVKKNLDRLRKRVEDIIREVEEARK | | NO: 27131) |
| | KGVDEEKLKDLIRKLRDILRRLAMSCAQESDDARESLE | | |
| | RAKREHE (SEQ ID NO: 27424) | | |
| degronSwitch_cODC2plus1_5405_t12 | SESDDVIRKLRELLEELRTHVEKSIRDLRKILEDSTRH | 2p1us1_Key_Cterm_5405 | EEKLKDLIRKLRDILPPAAEAHKKLIDDARESLE |
| | AKRSIEELERLLEEVPKKPGDEEVRKTVEEISRRVAEN | | RAKREHEKLIDPLKKILEELER (SEQ ID |
| | VKRLEDLYRRMEEENKKNLDRLRKPVEDIIREVEEARK | | NO: 27131) |
| | KGVDEEKLKDLIRKLRDILRRAAELHMSCAQESRESLE | | |
| | RAKREHEKLI (SEQ ID NO: 27425) | | |
| degronSwitch_cODC_2plus1_5405_t11 | SESDDVIRKLRELLEELRTHVEKSIRDLRKILEDSTRH | 2p1us1_Key_Cterm_5405 | EEKLKDLIRKLRDILRRAAEAHKKLIDDARESLE |
| | AKRSIEELERLLEEVRKKPGDEEVRKTVEEISPPVAEN | | RAKREHEKLIDREKKILEELER (SEQ ID |
| | VKRLEDLYRRMEEEVKKNLDRLRKPVEDIIREVEEARK | | NO: 27131) |
| | KGVDEEKLKDLIRKLPDILPRAAEALKMSCAQESESLE | | |
| | RAKREHEKLID (SEQ ID NO: 27426) | | |
| degron5witch_cODC_2plus1_5405_t8 | SESDDVIRKLPELLEELRTHVEKSIRDLRKILEDSTRH | 2plus1_Key_Cterm_5405 | EEKLKDLIRKLRDILPPAAEATIKKLIDDARESLE |
| | AKRSIEELERLLEEVRKKPGDEEVRKTVEEISRRVAEN | | RAKREHEKLIDPLKKILEELER (SEQ ID |
| | VKRLEDLYRRMEEEVKKNLDRLRKPVEDIIREVERARK | | NO: 27131) |
| | KGVDEEKLKDLIRKLRDILRRAAEAHKKLIMSCAQESE | | |
| | RAKREHEKLIDRLK (SEQ ID NO: 27427) | | |
| degronSwitch_cODC_2plus1_5405_t4 | SESDDVIRKLPELLEELRTEVEKSIRDLRKILEDSTRH | 2plus1_Key_Cterm_5405 | EEKLKDLIRKLRDILRRAAEAHKKLIDDARESLE |
| | AKPSIEELERLLEEVRKKPGDEEVRKTVEEISRRVAEN | | RAKREHEKLIDRLKKILEELER (SEQ ID |
| | VKRLEDLYRRMEEEVXKNLDRLRKPVEDIIREVERARK | | NO: 27131) |
| | KGVDEEKLKDLIRKLRDILRRAAEAHKKLIDDLRMSCA | | |
| | QESREHEKLIDRLKKILE (SEQ ID NO: 27428) | | |
| degronSwitch_cODC_2plus1_5406_t15 | DREREVKKRLDEVRERIERLLRRVEEESRRVAEEIRRL | 2plus1_Key_Cterm_5406 | EELREELKKLERKIEKVAKEIHDHDKEVTERLED |
| | IEEVRRRNKKVTEEIRELLKGLKDKEEVRRVLEPLRKL | | LLRRITEHARKSDREIEETAR (SEQ ID |
| | NAESDELLERILERLRRLVEATNPLVKAIIEELRRLVE | | NO: 27133) |
| | KIVREVPDSEELREELKKLERKIEKLAMSCAQESKEVT | | |
| | ERLEDLLRRIT (SEQ ID NO: 27430) | | |
| degronSwitch_cODC_2plus1_5406_t11 | DREREVKKRLDEVREPIERLLRRVEEESRRVAEEIRRL | 2plus1_Key_Cterm_5406 | EELREELKKLERKIEKVAKEIHDHDKEVTERLED |
| | IEEVRRRNKKVTEEIPELLKGLKDKEEVRRVLERLRKL | | LLRRITEHARKSDREIEETAR (SEQ ID |
| | NAESDELLERILERLRRLVEATNRINKAIIEELRRLVE | | NO: 27133) |
| | KIVREVPDSEELREELKELERKIEKVAKELKMSCAQES | | |
| | ERLEDLLRRITEHAR (SEQ ID NO: 27431) | | |
| degronSwitch_cODC_2plus1_5406_t4 | DREREVKKPLDEVRERIERLLRPVEEESRRVAEEIRRL | 2plus1_Key_Cterm_5406 | EELREELKKLERKIEKVAKEIHDHDKEVTERLED |
| | IEEVRRRNKKVTEEIRELLKGLKDKEEVRRVLEPLRKL | | LLRRITEHARKSDREIEETAR (SEQ ID |
| | NAESDELLERILERLRRLVEATNRLVKAIIEELRRLVE | | NO: 27133) |
| | KIVREVPDSEELREELKKLERKIEKVAKEIHDHDKELE | | |
| | MSCAQESPPITEHARKSDREIE (SEQ ID | | |
| | NO: 27432) | | |
| degronSwitch_cODC_2plus1_5409_t15 | SEAEELLKRLEDRAEEILRRLEEILRTSRKLAEDVLRE | 2plus1_Key_Cterm_5409 | KEVVDEIKRIVDEVRERLKRIVDENAKIVEDARR |
| | LEKLLRESEPRIREVLEELRGIKDKKELEDVIREVEKE | | ALEKIVKENEEILRRLKKELRELRK (SEQ ID |
| | LDESLERSRELLKDVLKKLDDNLKESERLVEDIDRELA | | NO: 27135) |
| | KILEDLKKAGVPKEVVDEIKRIVDEVRERLKRLVMSCA | | |
| | QESEDARRALEKIVKENE (SEQ ID NO: 27440) | | |
| degronSwitch_cODC_2plus1_5409_t12 | SEAEELLKRLEDRAEEILRRLEEILRTSRKLAEDVLRE | 2plus1_Key_Cterm_5409 | KEVVDEIKRIVDEVRERLKRIVDENAKIVEDARR |
| | LEKLLRESERRIREVLEELRGIKDKKELEDVIREVEKE | | ALEKIVKENEEILRRLKKELRELRK (SEQ ID |
| | LDESLERSRELLKDVLKKLDDNLKESERLVEDIDRELA | | NO: 27135) |
| | KILEDLKKAGVPKEVVDEIKRIVDEVRERLKRIVDLTM | | |
| | SCAQESRRALEKIVKENEEIL (SEQ ID | | |
| | NO: 27441) | | |
| degronSwitch_cODC_2plus1_5409_t11 | SEAEELLKRLEDRAEEILRRLEEILRTSRKLAEDVLRE | 2(p1us1_Key_Cterm_5409 | KEVVDEIKRIVDEVRERLKRIVDENAKIVEDARR |
| | LEKLLRESERRIREVLEELRGIKDKKELEDVIREVEKE | | ALEKIVKENEEILRRLKKELRELRK (SEQ ID |
| | LDESLERSRELLKDVLKKEDDNLKESERLVEDIDRELA | | NO: 27135) |
| | KILEDLKKAGVPKEVVDEIKRIVDEVRERLKRIVDELR | | |
| | MSCAQESRALEKIVKENEEILR (SEQ ID | | |
| | NO: 27442) | | |
| degronSwitch_cODC_2plus1_5409_t8 | SEAEELLKRLEDRAEEILRRLEEILRTSRKLAEDVLRE | 2plus1_Key_Cterm_5409 | KEVVDEIKRIVDEVRERLKRIVDENAKIVEDARR |
| | LEKLLRESERRIREVLEELRGIKDKKELEDVIREVEKE | | ALEKIVKENEEILRRLKKELRELRK (SEQ ID |
| | LDESLERSRELLKDVLKKLDDNLKESERLVEDIDRELA | | NO: 27135) |
| | KILEDLKKAGVRKEVVDEIKRIVDEVRERLKRIVDENA | | |
| | KLTMSCAQESEKIVKENEEILRRLK (SEQ ID | | |
| | NO: 27443) | | |
| degronSwitch_cODC_2plus1_5409_t0 | SEAEELLKRIEDRAEEILRRLEEILRTSRKLAEDVLRE | 2plus1_Key_Cterm_5409 | KEVVDEIKRIVDEVRERLKRIVDENAKIVEDARR |
| | LEKLLRESERRIREVLEELRGIKDKKELEDVIREVEKE | | ALEKIVKENEEILRRLKKELRELRK (SEQ ID |
| | LDESLERSRELLKDVLKKLDDNLKESERLVEDIDRELA | | NO: 27135) |
| | KILEDLKKAGVPKEVVDEIKRIVDEVRERLKRIVDENA | | |
| | KIVEDARRALEMSCAQESEILRRLKKELRELRK (SEQ | | |
| | ID NO: 27444) | | |
| degronSwitch_cODC_2plus1_5410_t12 | SRAETVLKEVTDKIKKLADSSDELLRRNKENIDELKKS | 2plus1_Key_Cterm_5410 | DEVVKRVRDLLDTVRRRNEKVNEDVKRMNDKLRR |
| | SEELLRRITKAIEEIEKGSVDEETLEELIRRVEAELEA | | DNEDVIRRVEKLLRELEEKRRT (SEQ ID |
| | HHRELEKNSREDEKRNRDHHAKLEEEMRRVEERLEREG | | NO: 27137) |
| | IDDEVVKPVRDLLDTVRRRNEKLMMSCAQESDKLRRDN | | |
| | EDVIRRVE (SEQ ID NO: 27445) | | |
| degronSwich_c0DC_2plus1_5410_t5 | SRAETVLKEVTDKIKKLADSSDELLRRNKENIDELKKS | 2plus1_Key_Cterm_5410 | DEVVKPVRDLLDTVRRRNEKVNEDVKRMNDKLRR |
| | SEELLPRLTKAIEEIEKGSVDEETLEELTPRVEAELEA | | DNEDVIRRVEKELEEKRRT (SEQ ID |
| | HHRELEKNSREDEKRNRDHHAKLEEEMRRVEERLEREG | | NO: 27137) |
| | IDDEVVERVRDLLDTVRRRNEKVNEDVKRLNMSCAQES | | |
| | EDVIRRVEKLLRELE (SEQ ID NO: 27446) | | |
| degronSwitch_cODC_2plus1_5410_t1 | SRAETVLKEVTDKIKKLADSSDELLRRNKENIDELKKS | 2plus1_Key_Cterm_5410 | DEVVKRVRDLLDTVRRRNEKVNEDVKRMNDKLRR |
| | SEELLRRLTKAIEEIEKGSVDEETLEELIRRVEAELEA | | DNEDVIRRVEKLLRELEEKRRT (SEQ ID |
| | HHRELEKNSREDEKRNRDHHAKLEEEMRRVEERLEREG | | NO: 27137) |
| | IDDEVVKRVPDLLDTVRRRNEKVNEDVKRMNDKLRMSC | | |
| | AQESRRVEKLLRELEEKRR (SEQ ID NO: 27447) | | |
| degronSwitch_cODC_2plus1_5413_t15 | STEEVLDEIRKLHKTLTEDIKRVLREIEELHRRTIEEN | 2plus1_Key_Cterm_5413 | AEELLRESKEAIKEVKRVLEELRKESKRVVDETR |
| | KEVLDKIAEDYKRVIDDVRTKDTPNVEKLLKDLEKSAK | | KLSEENLEHSERVLRKVEEDLR (SEQ ID |
| | ENIEHNERTLREDDRVLKEIRPRATELLKANEEMLRRI | | NO: 27139) |
| | EEVARKGGVDAEELLRESKEAIKEVKRLLMSCAQESKR | | |
| | VVDETRKLSEENL (SEQ ID NO: 27455) | | |
| degronSwitch_cODC_2plus1_5413_t11 | STEEVLDEIRKLHKTLTEDIKRVLREIEELHRRTIEEN | 2plus1_Key_Cterm_5413 | AEELLRESKEAIKEVKRVIEELRKESKRVVDETR |
| | KEVLDKIAEDYKRVIDDVRTKDTPNVEKLLKDLEKSAK | | KLSEENLEHSERVLRKVEEDLR (SEQ ID |
| | ENIEHNERTLREDDRVLKEIRRRATELLKANEEMLRRI | | NO: 27139) |
| | EEVARKGGVDAEELLRESKEAIKEVKRVLEELKMSCAQ | | |
| | ESDETRKLSEENLEHSE (SEQ ID NO: 27456) | | |
| degronSwitch_cOIDC_2plus1_5413_t7 | STEEVLDEIRKLHKTLTEDIKRVLREIEELHRRTIEEN | 2plus1_Key_Cterm_5413 | AEELLRESKEAIKEVKPVLEELRKESKRVVDETR |
| | KEVLDKIAEDYKRVIDDVRTKDTPNVEKLLKDLEKSAK | | KLSEENLEHSERVLRKVEEDLR (SEQ ID |
| | ENIEHNERTLREDDRVLKEIRRRATELLKANEEMLRRI | | NO: 27139) |
| | EEVARKGGVDAEELLRESKEAIKEVKRVLEELRKELEM | | |
| | SCAQESKLSEENLEHSERVLR (SEQ ID | | |
| | NO: 27457) | | |
| degronSwitch_cODC_2plus1_5413_t4 | STEEVLDEIRKIHKTLTEDIKRVLREIEELHRRTIEEN | 2plus1_Key_Cterm_5413 | AEELLRESKRAIKEVKRVLEELRKESKRVVDETR |
| | KEVLDKIAEDYKRVIDDVRTKDTPNVEKLLKDLEKSAK | | KLSEENLEHSERVLRKVEEDLR (SEQ ID |
| | ENIEHNEPTLPEDDRVLKEIRRPATELLKANEEMLRRI | | NO: 27139) |
| | EEVARKGGVDAEELLPESKEAIKEVKRVLEELPKESKR | | |
| | LTMSCAQESEENLEHSERVLRKVE (SEQ ID | | |
| | NO: 27458) | | |
| degronSwitch_cODC_2plus1_5413_t0 | STEEVLDEIRKLHKTLTEDIKRVLREIEELHRRTIEEN | 2plus1_Key_Cterm_5413 | AEELLRESKEAIKEVKRVLEELRKESKRVVDETR |
| | KEVLDK1AEDYKRVIDDVRTKDTPNVEKLLKDLEKSAK | | KLSEENLEHSERVLRKVEEDLR (SEQ ID |
| | ENIEHNERTLREDDRVLKEIRRRATELLKANEEMLRRI | | NO: 27139) |
| | EEVARKGGVDAEELLRESKEAIKEVKRVLEELRKESKR | | |
| | VVDELRMSCAQESEHSERVLRKVEEDLR (SEQ ID | | |
| | NO: 27459) | | |
| degronSwitch_cODC_2plus1_5414_t15 | SEIEKILKEIEDLARRDEEVSKKIVEDIRRIAKEVEDT | 2plus1_Key_Cterm_5414 | EDSERLVREVEDLVRPLVPRSEKSNEEVKRTVEE |
| | SRDIVRKIEELAKRVIDRLRKDGSKEELEKEVREVVKT | | LVRRMEESNDPVRDLVRRLVEELKRAVD (SEQ |
| | LEELVKDNHRLIRRLVEEMKRLVEENHRNSREVVKELE | | ID NO: 27141) |
| | DLVRELPRKGSGSEDSERLREVEDLVRRINRRSEKLDM | | |
| | SCAQESEELVRRMEESNDRVR (SEQ ID | | |
| | NO: 27460) | | |
| degronSwitch_cODC_2plus1_5414_t11 | SEIEKILKEIEDLARRDEEVSKKIVEDIRRLAKEVEDT | 2plus1_Key_Cterm_5414 | EDSERLVREVEDLVRRLVRRSEKSNEEVKRTVEE |
| | SRDIVRKIEELAKRVLDRLRKDGSKEELEKEVPEVVKT | | LVRRMEESNDRVRDLVRRLVEELKRAVD (SEQ |
| | LEELVKDNHRLIRRAVEEMKRLVEENHRHSREVVKELE | | ID NO: 27141) |
| | DLVRELRKGSGSEDSERLVREVEDLNRRLVPRSEKSNE | | |
| | ELKMSCAQESRRMEESNDRVRDLVR (SEQ ID | | |
| | NO: 27461) | | |
| degronSwitch_cODC_2plus1_5414_t7 | SEIEKILKEIEDLAPPDEEVSKKIVEDIRRLAKEVEDT | 2plus1_Key_Cterm_5414 | EDSERLVREVEDLVRPIVRRSEKSNEEVKRTVEE |
| | SRDIVRKIEELAKRVLDRLRKDGSKEELEKEVREVVKT | | LVRRMEESNDRVRDLVRRLMEELKRAVD (SEQ |
| | LEELVKDNHRLIRRAVEHMKRLVEENHRHSREVVKELE | | ID NO: 27141) |
| | DLVRELRKGSGSEDSERLVREVEDLVRRLVRRSEKSNE | | |
| | EVKRTLEMSCAQESESNDRVRDLVRRLVE (SEQ ID | | |
| | NO: 27462) | | |
| degronSwitch_cODC_2plus1_5414_t4 | SEIEKILKEIEDLARRDEEVSKKIVEDIRRLAKEVEDT | 2plus1_Key_Cterm_5414 | EDSERLVREVEDLVRALVRRSEKSNEEVKRTVEE |
| | SRDIVRKIEELAKPVLDPLRKDGSKEELEKEVREVVKT | | LVRRMEESNDRDLVRRLVEELKRAVD (SEQ |
| | LEELVKDNHRLIRRIVEEMKRLVEENHRHSREVVKELE | | ID NO: 27141) |
| | DLVRELRKGSGSEDSERLVREVEDLVRRINRRSEKSNE | | |
| | EVKRTVEELVMSCAQESDRVRDLVRRLVEELK (SEQ | | |
| | ID NO: 27463) | | |
| degronSwitch_cODC_2plus1_5414_t0 | SEIEKILKEIEDLARRDEEVSKKIVEDIRRLAKEVEDT | 2plus1_Key_Cterm_5414 | EDSERLVREVEDLVRRIVRRSEKSNEEVKRTVEE |
| | SRDIVRKIEELAKRVLDRLRKDGSKEELEKEVREVVKT | | LVRRMEESNDRVRDLVRRLVEELKRAVD (SEQ |
| | LEELVKDNHRLIRRAVEEMKRLVEENHRHSREVVKELE | | ID NO: 27141) |
| | DLVRELREGSGSEDSERLVREVEDLVRRINRRSEKSNE | | |
| | EVKRTVEELVRPLLMSCAQESDLVRRLVEELKRAVD | | |
| | (SEQ ID NO: 27464) | | |
| degronSwitch_cODC_2plus1_5421_t11 | SVDEVLKEIEDALRRLKEEVERVLKENEDELRRLEEEV | 2plus1_Key_Cterm_5421 | EKAIRDVAKEIRDPIKELEEEIEEVTRRNLKLLA |
| | RRVLKEDEELLESLKRGVGESDEVDRVVDEIAKLSAEI | | DVEEEIRRVHEKTRRLLETVLRRAT (SEQ ID |
| | LEKVKKVVKEIRDSLETVKRPMDDVVRRLKELIDEIKR | | NO: 27147) |
| | GSDEKTURDVAKEIRDRLKELEEEIEELIMSCAQESAD | | |
| | VEEEIRRVHEKTR (SEQ ID NO: 27492) | | |
| degronSwitch_cODC_2plus1_5421_t7 | SVDEVLKEIEDALRRLKEEVERVLKENEDELRRLEEEV | 2plus1_Key_Cterm_5421 | EKAIRDVAKEIRDRLKELEEEIEEVTRRNLKLLA |
| | RRVLKEDEELLESLKRGVGESDEVDPVVDEIAKLSAEI | | DVEEEIRRVHEKTRRLLETVLRRAT (SEQ ID |
| | LEKVKKVVKEIRDSLETVKPRVDDVVRRLKELLDEIKR | | NO: 27147) |
| | GSDEKAIRDVAKEIRDRLKEIEEEIEEVTRRLLMSCAQ | | |
| | ESEEIRPVHEKTRRLLE (SEQ ID NO: 27493) | | |
| degronSwitch_cODC_2plus1_5421_t4 | SVDEVLKEIEDALRPLKEEVERVLKENEDELRRLEEEV | 2plus1_Key_Cterm_5421 | EKAIRDVAKEIPDRLKEIEEEIREVTRRNLKLLA |
| | RRVLKEDEELLESLKRGVGESDEVDRVVDEIAKLSAEI | | DVEEEIRRVHEKTRRLLETVLRRAT (SEQ ID |
| | LEKYKKVVKEIRDSLETVKPRVDDVVRRLKELLDEIKR | | NO: 27147) |
| | GSDEKAIRDVAKEIRDRLKELEEEIEEVTRRNLKLLMS | | |
| | CAQESRRVHEKTRRLLETVL (SEQ ID NO: 27494) | | |
| degronSwitch_cODC_2plus1_5421_t0 | SVDEVLKEIEDALRRLKEEVERVLKENEDELRRLEEEV | 2plus1_Key_Cterm_5421 | EKAIRDVAKEIRDRLKELEEEIEEVTRRNLKLLA |
| | RRVLKEDEELLESLKRGVGESDEVDRVVDEIAKLSAEI | | DVEEEIRRVEEKTRRLLETVLRRAT (SEQ ID |
| | LEKVKKVVKEIRDSLETVKPRVDDVVRRLKELIDEIKR | | NO: 27147) |
| | GSDEKAIRDVAKEIRDRLKELEEEIEEVTRRNLKLLAD | | |
| | LEMSCAQESEKTRRLLETVLRRAT (SEQ ID | | |
| | NO: 27495) | | |
| degronSwitch_cODC_2plus1_5432_t15 | DEIRKVVKEITDLLKASNDKNRKVVEEIRDLLRKSKKL | 2plus1_Key_Cterm_5432 | SEDLKRVEERAREVSPRNEESMRRVKEDADRVSE |
| | ADELVERLRALVEDLPPRIDKSGDKETAEDIVPRIIEE | | ANKEVLDPVREEVKRLIEEVRETLR (SEQ ID |
| | LKRILKEIEDLARRINREIERLVEEVERDNRDVNRAIE | | NO: 27149) |
| | ELLKDIARRGGSEDIKRVEEPAREVSRRNEELMMSCAQ | | |
| | ESDRVSEANKEVLDRVR (SEQ ID NO: 27543) | | |
| degronSwitch_cODC_2plus1_5432_t11 | DEIRKVVKEITDLLKASNDKNRKVVEEIRDLLRKSKKL | 2plus1_Key_Cterm_5432 | SEDLKRVEEPAREVSRRNEESMRPVKEDADRVSE |
| | ADELVERLRALVEDLRRRIDKSGDKETAEDIVRRIIEE | | ANKEVLDRVREEVKRLIEEVRETLR (SEQ ID |
| | LKRILKEIEDLARRINREIERLVEEVERDNRDVNRAIE | | NO: 27149) |
| | ELLKDIARRGGSEDLKRVEERAREVSRRNEESMRRLKM | | |
| | SCAQESEANKEVLDRVREEVK (SEQ ID | | |
| | NO: 27544) | | |
| degronSwitch_cODC_2plus1_5432_t8 | DEIRKVVKEITDLLKASNDKNRKVVEEIRDLLRKSKKL | 2plus1_Key_Cterm_5432 | SEDLKRVEERAREVSPRNEESMRRVKEDADRVSE |
| | ADELVERLRALVEDLRRRIDKSGDKETAEDIVRRIIEE | | ANKEVLDRVREEVKRLIEEVRETLR (SEQ ID |
| | LKRILKEIEDLNRRINREIERLVEEVERDNRDVNRAIE | | NO: 27149) |
| | ELLKDIAPRGGSEDLKRVEERAREVSRRNEESMRRVKE | | |
| | LAMSCAQESKEVLDRVREEVKRLI (SEQ ID | | |
| | NO: 27545) | | |
| degronSwitch_cODC_2plus1_5432_t4 | DEIRKVVKEITDLLKASNDKNRKVVEEIRDLLRKSKKL | 2plus1_Key_Cterm_5432 | SEDLKRVEERAREVSRRNEESMRPYKEDADRVSE |
| | ADELVERLRALVEDIRRRIDKSGDKETAEDIVRRIIEE | | ANKEVLDRVREEVKRLIEEVRETLR (SEQ ID |
| | LKRILKEIEDLARRINREIERLVEEVERDNRDVNRAIE | | NO: 27149) |
| | ELLKDIARRGGSEDLKRVEERNREVSRRNEESMRRVKE | | |
| | DADRLKMSCAQESDRVREEVKRLIEEVR (SEQ ID | | |
| | NO: 27546) | | |
| degronSwitch_cODC_2plus1_5432_t1 | DEIRKVVKEITDLLKASNDKNRKVVEEIRDLLRKSKKL | 2plus1_Key_Cterm_5432 | SEDLKRVEERAREVSRRNEESMRPVKEDADRVSE |
| | ADELVERLRALVEDLPPPIDKSGDKETAEDIVPRIIEE | | ANKEVLDRVREEVKPLIEEVRETLR (SEQ ID |
| | LKRILKEIEDLARRINREIEPLVEEVERDNRDVNRAIE | | NO: 27149) |
| | ELLKDIARRGGSEDLKRVEERAREVSRRNEESMPRVKE | | |
| | DADRVSELTMSCAQESREEVKPIIEEVRETL (SEQ | | |
| | ID NO: 27547) | | |
| degronSwitch_cODC_2plus1_5435_t15 | STAETVAEEVERVLKHSDDLIKEVEDVNRRVEEEIKRV | 2plus1_Key_Cterm_5435 | EEAAREIIKRLREVNKRTKEKLDELIKHSEEVLE |
| | IRELEEENERLVAEVRKGVKGEILAEIEKRLADNSEKV | | RVKRLIDELRKHSEEVLEDLRRRAK (SEQ ID |
| | REVAERAKKLLEENTARVKDILRESRKLVKDILDEVRG | | NO: 27151) |
| | TGSEEAAREIIKRLREVNKRTKEILMSCAQESEEVLER | | |
| | VKRLIDELR (SEQ ID NO: 27562) | | |
| degronSwitch_cODC_2plus1_5435_t14 | STAETVAEEVERVLKHSDDLIKEVEDVNRRVEEEIKRV | 2plus1_Key_Cterm_5435 | EEAAREIIKRLREVNKRTKEKLDELIKESEEVLE |
| | IRELEEENERLVAEVRKGVKGEILAEIEKRLADNSEKV | | RVKRLIDELRKHSEEVLEDLRRRAK (SEQ ID |
| | REVAERAKKLLEENTARVKDILRESRKLVKDLLDEVRG | | NO: 27151) |
| | TGSEEAAREIIKRLREVNKRTKEKLDMSCAQESEVLER | | |
| | VKRLIDELRK (SEQ ID NO: 27563) | | |
| degronSwitch_cODC_2plus1_5435_t11 | STAETVAEEVERVLKESDDLIKEVEDVNRRVEEEIKRV | 2plus1_Key_Cterm_5435 | EEAAREIIKRLREVNKRTKEKLDELIKHSEEVLE |
| | IRELEEENERLVAEVRKCNKGEILAEIEKRLADNSEKV | | RVKRLIDELRKHSEEVLEDLRRRAK (SEQ ID |
| | REVAERAKKLLEENTARVKDILRESRKLVKDLLDEVRG | | NO: 27151) |
| | TGSEEAAREIIKRLREVNKRTKEKLDELIMSCAQESER | | |
| | VKRLIDELRKHSE (SEQ ID NO: 27564) | | |
| degronSwitch_cODC_2plus1_5435_t8 | STAETVAEEVERVLKHSDDLIKEVEDVNRRVEEEIKRV | 2plus1_Key_Cterm_5435 | EEAAREIIKBLREVNKRTKEKLDELIKESEEVLE |
| | IRELEEENERLVAEVRKGVKGEILAEIEKRLADNSEKV | | RVKRLIDELRKHSEEVLEDLRRRAK (SEQ ID 1 |
| | REVAERAKKLLEENTARVKDILRESRKLVKDLLDEVRG | | NO: 27151) |
| | TGSEEAAREIIKRLREVNKRTKEKIDELIKLAMSCAQE | | |
| | SKRLIDELRKHSEEVL (SEQ ID NO: 27565) | | |
| degronSwitch_cODC_2plus1_5435_t4 | STAETVAEEVERVLKHSDDLIKEVEDVNRRVEEEIKRV | 2plus1_Key_Cterm_5435 | EEAAREIIKRLREVNKRTKEKLDELIKHSEEVLE |
| | IRELEEENERLVAEVRKGVKGEILAEIEKRLADNSEKV | | RVKRLIDELRKHSEEVLEDLRRRAK (SEQ ID |
| | REVAERAKKLLEENTARVKDILRESRKLVKDILDEVRG | | NO: 27151) |
| | TGSEEAAPEIIKRLREVNKRTKEKLDELIKHSEELLMS | | |
| | CAQESDELRKHSEEVLEDLR (SEQ ID NO: 27566) | | |
| degronSwitch_cODC_2plus1_5435_t0 | STAETVAEEVERVLKHSDDLIKEVEDVNRRVEEEIKRV | 2plus1_Key_Cterm_5435 | EKAAREIIKRLREVNKRTKEKLDELIKHSEEVLE |
| | IRELEEENERLVAEVRKGVKGEILAEIEKRLADNSEKV | | RVKRLIDELRKHSEEVLEDLRRRAK (SEQ ID |
| | REVAERAKKLLEENTARVKDILRESRKLVKDLLDEVRG | | NO: 27151) |
| | TGSEEAAREIIKRLREVNKRTKEKLDELIKHSEEVLEP | | |
| | LKMSCAQESKHSEEVLEDLRRRAK (SEQ ID | | |
| | NO: 27567) | | |
| degronSwitch_cODC_2plus1_5439_t15 | SRVEEIIEDLRRLLEEIRKENEDSIRRSKELIDRVKEI | 2plus1_Key_Cterm_5439 | EDKARKVAEVAEKVLRDIDKLDRESKEAFRATNE |
| | NDTIIAELEPLLKDIEKEVREKGSESEEVKKALRAVLE | | EIAKLDEDTARVAERVKKAIEDLAK (SEQ ID |
| | ELEKLLRRVAEINEEVLRRNSKLVEEDERRNPEVLKEL | | NO: 27155) |
| | ARLVEELIREIGDEDKARKVAEVAEKVLRDIDKLLMSC | | |
| | AQESRATNEEIAKLDEDTA (SEQ ID NO: 27587) | | |
| degronSwitch_cODC_2plus1_5439_t11 | SPVEEIIEDLRRELEEIRKENEDSIRRSKELLDRVKEI | 2plus1_Key_Cterm_5439 | EDKARKVAEVAEKVLPDIDKLDRESKEAFRATNE |
| | NDTIIAELERLLKDIEKEVREKGSESEEVKKALRAVLE | | EIAKLDEDTARVAERVKKAIEDLAK (SEQ ID |
| | ELEKDLRRVAEINEEVLRRNSKLVEEDERRNREVLKEL | | NO: 27155) |
| | ARLVEELIREIGDEDKARKVAEVAEKVLRDIDKLDREL | | |
| | KMSCAQESEEIAKLDEDTARVAE (SEQ ID | | |
| | NO: 27588) | | |
| degronSwitch_cODC_2plus1_5439_t8 | SRVEEIIEDLRRLLEEIRKENEDSIRRSKELLDRVKEI | 2plus1_Key_Cterm_5439 | EDKARKVAEVAEKVLRDIDKLDRESKEAFRATNE |
| | NDTIIAELERLLKDIEKEVREKGSESEEVKKAIRAVLE | | EIAKLDEDTARVAERVKKAIEDLAK (SEQ ID |
| | ELEKLLPDVAEINEEVLRRNSKLVEEDERRNREVLKEL | | NO: 27155) |
| | ARLVEELIREIGDEDKAPKVAEVAEKVLRDIDKLDRES | | |
| | KELFMSCAQESAKLDEDTARVAERVK (SEQ ID | | |
| | NO: 27589) | | |
| degronSwitch_cODC_2plus1_5439_t7 | SRNEEIIEDLPRELEEIRKENEDSIRRSKELLDRVKEI | 2plus1_Key_Cterm_5439 | EDKARKVAEVAEKVLPDIDKLDRESKEAFRATNE |
| | NDTIIAELERLLKDIEKEVREKGSESEEVKKALRAVLE | | EIAKLDEDTARVAERVKKAIEDLAK (SEQ ID |
| | ELEKLLRRVAEINEEVLRRNSKLVEEDERRNREVLKEL | | NO: 27155) |
| | ARLVEELIREIGDEDKARKVAEVAEKVLRDIDKLDRES | | |
| | KEALRMSCAQESKLDEDTARVAERVKK (SEQ ID | | |
| | NO: 27390) | | |
| degronSwitch_cODC_2plus1_5439_t4 | SRVEEIIEDLRRLLEEIRKENEDSIRRSKELLDRVKEI | 2plus1_Key_Cterm_5439 | EDKARKVAEVAEKVLRDIDKLDRESKRAFRATNE |
| | NDTIIAELERILKDIEKEVREKGSESEEVKKALRAVLE | | EIAKLDEDTARVAERVKKAIEDLAK (SEQ ID |
| | ELEKLLRRVAEINEEVERRNSKLVEEDERRNREVLKEL | | NO: 27155) |
| | ARLVEELIREIGDEDKARKVAEVAEKVLPDIDKLDRES | | |
| | KEAFRALAMSCAQESEDTARVAERVKKAIE (SEQ ID | | |
| | NO: 27591) | | |
| degronSwitch_cODC_2plus1_5439_t1 | SRVEEIIEDLRPLLEEIRKENEDSIRRSKELIDRVKEI | 2plus1_Key_Cterm_5439 | EDKARKVAEVAEKVLRDIDKLDRESKEAFRATNE |
| | NDTIIAELERLLKDIEKEVREKGSESEEVKKALRAVLE | | EIAKLDEDTARVAERVKKAIEDLAK (SEQ ID |
| | ELEKLLRRVAEINEEVLRRNSKLVEEDERRNREVLKEL | | NO: 27155) |
| | ARLVEELIREIGDEDKARKVAEVAEKVERDIDKLDRES | | |
| | KEAFRATNELIMSCAQESARVAERVKKAIEDLA (SEQ | | |
| | ID NO: 27592) | | |
| degronSwitch_cODC_2plus1_5447_t15 | SEADDVLKKLAETVKRIIERLKKLTDDSRRLVEEVHRR | 2plus1_Key_Cterm_5447 | EELSAEVKKLLDEVRKALAREKDENDKLLKEIED |
| | NDKLSKESAEAVRKAEERGIDEKDVRKLLEDIKKKSEE | | SLRRHKEENDRLLEKLKESTR (SEQ ID |
| | VAERNKRILDTLREISKRAEDEVRKVLKELEKTLKELE | | NO: 27157) |
| | DRRPDSEELSAEVKKELDEVRKLEMSCAQESDKLLKEI | | |
| | EDSLRRHK (SEQ ID NO: 27634) | | |
| degronSwitch_cODC_2plus1_5447_t11 | SEADDVLKKLAETVKRIIERLKKLTDDSRRLVEEVHRR | 2plus1_Key_Cterm_5447 | EELSAEVKKLLDEVRKALARHKDENDKLLKEIED |
| | NDKLSKESAEAVRKAEERGIDEKDVRKLLEDLKKKSEE | | SLRRHKEENDRLLEKLKESTR (SEQ ID |
| | VAERNKRILDTLREISKRAEDEVRKVLKELEKTLKELE | | NO: 27157) |
| | DRRPDSEELSAEVKKLLDEVRKALARLLMSCAQESKEI | | |
| | EDSLRRHKEEND (SEQ ID NO: 27635) | | |
| degronSwitch_cODC_2plus1_5447_t8 | SEADDVLKKLAETVKRIIERLKKLTDDSRRLVEEVHRR | 2plus1_Key_Cterm_5447 | EELSAEVKKLLDEVRKALARHKDENDKLLKEIED |
| | NDKLSKESAEAVRKAEERGIDEKDVRKLLEDLKKKSEE | | SLRRHKEENDRLLEKLKESTR (SEQ ID |
| | VAERNKRILDTLREISKRAEDEVRKVLKELEKTLKELE | | NO: 27157) |
| | DRRPDSEELSAEVKKLLDEVRKALAREKDLAMSCAQES | | |
| | EDSLRRHKEENDRLL(SEQ ID NO: 27636) | | |
| degronSwitch_cODC_2plus1_5447_t7 | SEADDVLKKLAETVKRIIERLKKLTDDSRRLVEEVHRR | 2plus1_Key_Cterm_5447 | EELSAEVKKLLDEVRKALARHKDENDKLLKEIED |
| | NDKLSKESAEAVRKAEERGIDEKDVRKLLEDLKKKSEE | | SLRRHKEENDRLLEKLKESTR (SEQ ID |
| | VAERNKRILDTLREISKRAEDEVRKVLKELEKTLKELE | | NO: 27157) |
| | DRRPDSEELSAEVKKLLDEVRKALARHKDELLMSCAQE | | |
| | SDSLRRHKEENDRLLE (SEQ ID NO: 27637) | | |
| degronSwitch_cODC_2plus1_5447_t4 | SEADDVLKKLAETVKRIIERLKKLTDDSRRLVEEVHRR | 2plus1_Key_Cterm_5447 | EELSAEVKKLLDEVRKALARHKDENDKLLKEIED |
| | NDKLSKESAEAVRKAEERGIDEKDVRKLLEDLKKKSEE | | SLRRHKEENDRLLEKLKESTR (SEQ ID |
| | VAERNKRILDTLREISKRAEDEVRKVLKELEKTLKELE | | NO: 27137) |
| | DRRPDSEELSAEVKKLLDEVRKALARHKDENDKLMMSC | | |
| | AQESRRHKEENDRLLEKLK (SEQ ID NO: 27638) | | |
| degronSwitch_cODC_2plus1_5447_t1 | SEADDVLKKLAETVKRIIERLKKLIDDSRRLVEEVHRR | 2plus1_Key_Cterm_5447 | EELSAEVKKLLDEVRKALARHKDENDKLLKEIED |
| | NDKLSKESAEAVRKAEERGIDEKDVRKLLEDLKKKSEE | | SLRRHKEENDRLLEKLKESTR (SEQ ID |
| | VAERNKRILDTLREISKRAEDEVRKVLKELEKTLKELE | | NO: 27157) |
| | DRRPDSEELSAEVKKLLDEVRKALARHKDENDKLLKLI | | |
| | MSCAQESKEENDRLLEKLKEST (SEQ ID | | |
| | NO: 27639) | | |
| degronSwitch_cODC_2plus1_5465_t15 | SAEELLREVAELVKRVDEDLRRLIEEVRASNEEVIRRL | 2plus1_Key_Cterm_5465 | EETVKRLLDELRELLERLKRTIEELLKRNRDLLA |
| | EEILKRIEEENRKVVEELRRGGVSEDLVRESKRLVDES | | DAEEKARRLLEENRKLLKAARDTAT (SEQ ID |
| | RRVIEKLVKESADSVERTRETVDRLREELKRLVEEIAK | | NO: 57159) |
| | MVKGGSSEETVKRLIDELRELLERLKRLIMSCAQESRD | | |
| | LLADAEEKARRLL (SEQ ID NO: 27726) | | |
| degronSwitch_cODC_2plus1_5465_t14 | SAEELLREVAELVKRVDEDLRRLLEEVRASNEEVIRRL | 2plus1_Key_Cterm_5465 | EETVKRILLDELRELLERLKRTIEELLKRNRDLIA |
| | EEILKRIEEENRKVVEELRRGGVSEDLVRESKRLVDES | | DAEEKARRLLEENRKLLKAARDTAT (SEQ ID |
| | RRVIEKINKESADSVERTRETVDRLREELKRLVEEIAK | | NO: 57159) |
| | MVKGGSSEETVKRLLDELRELLERLKRTLEMSCAQESD | | |
| | LLADAEEKARRLLE (SEQ ID NO: 27727) | | |
| degronSwitch_cODC_2plus1_5465_t11 | SAEELIREVAELVKRVDEDLRRLIEEVRASNEEVIRRL | 2plus1_Key_Cterm_5465 | EETVKPLIDELRELLERLKRTIEELIKRNRDLLA |
| | EEILKRIEEENRKVVEELPPGGVSEDLVRESKRLVDES | | DAEEKARRILEENRKLLKAARDTAT (SEQ ID |
| | RRVIEKLVKESADSVERTRETVDRLREELKRLVEEIAK | | NO: 57159) |
| | MVKGGSSEETVKRILDELRELLERLKRTIEELLMSCAQ | | |
| | ESADAEEKARRLLEENR (SEQ ID NO: 27728) | | |
| degronSwitch_cODC_2plus1_5465_t4 | SAEELLREVAELVKRVDEDLRRLLEEVRASNEEVIRRL | 2plus1_Key_Cterm_5465 | EETVKRLLDELRELLERLKRTIEELLKRNRDLLA |
| | EEILKRIEEENRKVVEELPRCCVSEDLVRESKPLVDES | | DAEEKARRLLEENRKLLKAARDTAT (SEQ ID |
| | RRVIEKLVKESADSVERTRETVDRLREELKPLVEEIAK | | NO: 57159) |
| | MVKGGSSEETVKRLLDELRELLERLKRTIEEILKRNRD | | |
| | LCMSCAQESRRLLEENRKLLKAAR (SEQ ID | | |
| | NO: 27729) | | |
| degronSwitch_cODC_2plus1_5465_t0 | SAEELLREVAELVKRVDEDLRRLLEEVRLSNEEVIRRL | 2plus1_Key_Cterm_5465 | EETVKRLLDELRELLERLKRTIEELLKRNRDLLA |
| | EEILKRIEEENRKVVEELRRGGVSEDLVRESKRLVDES | | DAEEKARRLLEENRKLLKAARDTAT (SEQ ID |
| | RRVIEKLVKESADSVERTRETVDRLREELKRLVEEIAK | | NO: 57159) |
| | MVKGGSSEETVKRLLDELRELLERLKRTIEELIKRNRD | | |
| | LLADLLMSCAQESEENRKLLKAARDTAT(SEQ ID | | |
| | NO: 27730) | | |
| degronSwitch_cODC_3plus1_494_t8 | SKEDKARELEKRLRDNLKKLEEVVRELAEVLKRNLEKL | 3plus1_Key_Cterm_494 | EDLVRDIRRELKELEERARKILRDDERDLRALEK |
| | RRLAEELLRALKRLLDKLRAGGLPKDELEDLPREVEDV | | RIPDIIREDREELERLKEPARK (SEQ ID |
| | LRRLEDLLRKLKKANDESLTRLEELLRRAEEENRRVLT | | NO: 27183) |
| | TLRELLRGNGDDRDLARLVARLVEANNRALEELLRLVA | | |
| | KNVEDNNRVLEELLRLVKELAKRLLGRIRDEDLVRDIR | | |
| | RELKELEEPAPKILRDLKMSCAQESKRIRDIIREDREE | | |
| | LE (SEQ ID NO: 27805) | | |
| degronSwitch_cODC_3plus1_494_t1 | SKEDKARELEKRLRDNLKKLEEVVRELAEVLKRNLEKL | 3plus1_Key_Cterm_494 | EDLVRDIRRELKELEERARKILPDDERDLRALEK |
| | RRLAEELLRALKRLLDKLRAGGLPKDELEDLRREVEDV | | PIRDIIREDREELERLKERARK (SEQ ID |
| | LRRLEDLLRKLKKANDESLTRLEELLRRAEEENRRVLT | | NO: 27183) |
| | TLRELLRGNGDDRDLARLVARLVEANNRALEELLRLVA | | |
| | KNVEDNNRVLEELLRLVKELAKRLLGRIRDEDLVRDIR | | |
| | RELKELEEPARKILRDDERDLRAIEMSCAQESREDREE | | |
| | LERLKERAR (SEQ ID NO: 27806) | | |
| degronSwitch_cODC_3plus1_500_t15 | SEKEELKPLLDKLLKELKRLSDEIKATIDKILKILKEV | 3plus1_Key_Cterm_500 | EDELRKVEEDLKRLEDKLKKLLEDYEKKVRELEE |
| | SEEVKRTADELLDAIRRGGVDEEVLPEIKREIEEIEKK | | TLDDLLRKYEETLRRLEKELEEAER (SEQ ID |
| | LRKVNKEIEDEIREIKKKIDEVDDKITKEVEKIKEALD | | NO: 27185) |
| | KGGVDAKEVIKALKEILKEHADVFEDVLRPLKEIIKRH | | |
| | PDVVKEVIEELRKILEKVAEVLKRQGRSEDELRKVEED | | |
| | LKRLEDKIKKLLMSCAQESRELEETLDDLLRKYE | | |
| | (SEQ ID NO: 27819) | | |
| degronSwitch_cODC_3plus1_506_t15 | SAEETLPRITEESKRVLEEITKKYEDLERESREVLRKL | 3plus1_Key_Cterm_506 | RERLARLLKALADKLIRVLEEILKINEELNRKII |
| | REDLDRIKRELEDVLTKGGDDKDEVLTVLEKVLDELLK | | KFARENLERNRRVNKKVIEVLREAAR (SEQ ID |
| | LHRENLRVIKELLRKVLEVDRENLEVLKRLLEKARDLL | | NO: 27187) |
| | RRSGRDEKDLKKLEDELRKVKEELEKKHEASKRDIEDL | | |
| | ERELDKVTEEVERLLRKLKEELRRAAEGSDEDRERLAR | | |
| | LLKALADKLIRVLEELLMSCAQESRKIIKFARENLERN | | |
| | R (SEQ ID NO: 27844) | | |
| degronSwitch_cODC_3plus1_506_t8 | SAEETLRRITEESKRVLEEITKKYEDLERESREVLRKL | 3plus1_Key_Cterm_506 | RERLARLLKALADKLIRVLEEILKINEELNRKII |
| | REDLDRIKRELEDVLTKGGDDKDEVLTVLEKVLDELLK | | KFARENLERNRRVNKKVIEVLREAAR (SEQ ID |
| | LHRENLRVIKELLRKVLEVDRENIEVLKRLLEKARDLL | | NO: 27187) |
| | RRSGRDEKDLKKLEDELRKVKEELEKKHEASKRDIEDL | | |
| | ERELDKVTEEVERLLRKLKEELRRAAEGSDEDRERLAR | | |
| | LLKALADKLIRVLEEILKINEELNMSCAQESRENLERN | | |
| | RRVNKKVI (SEQ ID NO: 27845) | | |
| degronSwitch_cODC_3plus1_506_t7 | SAEETLRRITEESKRVLEEITKKYEDLERESREVLRKL | 3plus1_Key_Cterm_506 | RERLARLLKALADKLIRVLEEILKINEELNRKII |
| | REDLDRIKRELEDVLTKGGDDKDEVLTVLEKVLDELLK | | KFARENLERNRRVNKKVIEVLREAAR (SEQ ID |
| | LHRENLRVIKELLRKVLEVDRENIEVLKRLLEKARDLL | | NO: 27187) |
| | RRSGRDEKDLAALEDEIRKVKEELEKKHEASKRDIEDL | | |
| | ERELDKVTEEVERLLRKLKEELRPAAEGSDEDRERLAR | | |
| | LLKALADKLIRVLEEILKINEELLKMSCAQESENLERN | | |
| | RRVNKKVIE (SEQ ID NO: 27846) | | |
| degronSwitch_cODC_3plus1_506_t4 | SAEETLRRITEESKRVLEEITKKYEDLERESREVLRKL | 3plus1_Key_Cterm_506 | RERLARLLKALADKLIRVIEEILKINEELNRKII |
| | REDLDRIKRELEDVLTKGGDDKDEVLTVLEKVLDELLK | | KFARENLERNRRVNKKVIEVLREAAR (SEQ ID |
| | LHRENLRVIKELIRKVLEVDRENLEVIKRLLEKARDLL | | NO: 21187) |
| | RRSGRDEKDLKKLEDEIRKVKEELEKKHEASKRDIEDL | | |
| | ERELDKVTEEVERLLRKLKEELRRAAEGSDEDRERLAR | | |
| | LLKALADKLIRVLEEILKINEELNPKLIMSCAQESERN | | |
| | RRVNKKVIEVLR (SEQ ID NO: 27847) | | |
| degronSwitch_cODC_3plus1_506_t1 | SAEETLRRITEESKRVLEEITKKYEDLERESREVLRKL | 3plus1_Key_Cterm_506 | RERLARLLKALADKLIRVIEEILKINEELNRKII |
| | REDLDRIKRELEDVLTKGGDDKDEVLTVLEKVLDELLK | | KFARENLERNRRVNKKVIEVLREAAR (SEQ ID |
| | LHRENLRVIKELLRKVLEVDRENLEVLKRLLEKARDLL | | NO: 27187) |
| | RRSSRDEKDLKKLEDEIRKVKEELEKKHEASKRDIEDL | | |
| | ERELDKVTEEVERLLRKLKEELRRAAEGSDEDRERLAR | | |
| | LLKALADKLIRVLEEILKINEELNRKIIKLAMSCAQES | | |
| | RRVNKKVIEVLREAA (SEQ ID NO: 27848) | | |
| degronSwitch_cODC_3plus1_508_t15 | STEEILKRVKEILDELAKELRDIIRESLRTIEELLDEL | 3plus1_Key_Cterm_508 | DEVKRRLEEKERRIRTRYEELRRRLRKRVKDYED |
| | RRILEESERTLEELVKTIKDGVKDSEELLRRLKRLLED | | KLREIEKKVRRDAERIEEELERAKK (SEQ ID |
| | LRRAHEELLKRLKEAVDEHRDRLRKILEELERVLKELR | | NO: 27189 |
| | KRIEELPRSGDRISEKDVIRKLEEVLPKALEILERLLK | | |
| | KIRESARELLKIIEFVLDANIKVMEEALKTIKELLKDG | | |
| | PDEVKRPLEEKERRIRTRYEELKMSCAQESKDYEDKLR | | |
| | EIEKKVR (SEQ ID NO: 27852) | | |
| degronSwitch_cODC_3plus1_510_t15 | SEKEELLKLIKRVIELLKRVLEEHLRLVEDVIRRLKEL | 3plus1_Key_ Cterm_510 | EDLLRKAKKVITEVREKLKRNLEDVRRVIEDVKR |
| | LDSNEKIVREVIEDLKRLLDFVRGDKEELDRIKEKLEE | | KSARILEEARRLIEEVERELEKIRK (SEQ ID |
| | VLERYKRRLEEIKRDLERMLEDYKRELKRIFEDLRRVL | | NO: 57191) |
| | EEVERIATRGEGRAEALIDKLRKIIERkLRELDKLSKK | | |
| | LDELLKKVLEELEKSNREIDKLLKDVLRRVEEGGASED | | |
| | LLRKAKKVITEVREKLKRLLMSCAQESEDVKRKSARIL | | |
| | EEAR (SEQ ID NO: 27855) | | |
| degronSwitch_cODC_3plus1_510_t8 | SEKEELLKLIKRVIELLKRVLEEHLRLVEDVIRRLKEL | 3plus1_Key_Cterm_510 | EDLLRKAKKVITEVREKLKRNLEDVRRVIEDVKR |
| | LDSNEKIVREVIEDLKRLLDEVRGDKEELDRIKEKLEE | | KSARILEEARRLIEEVERELEKIRK (SEQ ID |
| | VLERYKRRLEEIKRDLERMLEDYKRELKRIEEDLRRVL | | NO: 57191) |
| | EEVERIATRGEGPAEALIDKLRKILERALRELDKLSKK | | |
| | LDELLKKVLEELEKSNREIDKLLKDVLRRVEEGGASED | | |
| | LLRKAKKVITEVREKLKRNLEDVRRLIMSCAQESARIL | | |
| | EEARRLIEEVE (SEQ ID NO: 27856) | | |
| degronSwitch_cODC_3plus1_510_t4 | SEKEELLKLIKRVIELLKRVLFEHLRLVEDVIRRLKEL | 3plus1_Key_Cterm_510 | EDLLRKAKKVITEVREKLKRNLEDVRRVIEDVKR |
| | LDSNEKIVREVIEDLKRLLDEVRGDKEELDRIKEKLEE | | KSARILEEARRLIEEVERELEKIRK (SEQ ID 1 |
| | VLERYKRRLEEIKRDLERMLEDYKRELKRIEEDLRRVL | | NO: 57191) |
| | EEVERIATRGEGPAEALIDKLRKILERALRELDKLSKK | | |
| | LDELLKKVLEELEKSNREIDKLLKDVLRRVEEGGASED | | |
| | LLRKAKKVITEVREKLKRNLEDVRRVIEDLKMSCAQES | | |
| | EEARRLIEEVERELE (SEQ ID NO: 27857) | | |
| degronSwitch_cODC_3plus1_510_t1 | SEKEELLKLIKRVIELLKRVLEENLRLVEDVIRRLKEL | 3plus1_Key_Cterm_510 | EDLLRKAKKVITEVRFKLKRNLEDVRRVIEDVKR |
| | LDSNEKIVREVIEDLKRLLDEVRGDKEELDRIKEKLEE | | KSARILEEARRLIEEVERELEKIRK (SEQ ID |
| | VLERYKRRLEEIKRDLERMLEDYKRELKRIEEDLRRVL | | NO: 57191) |
| | EEVERIATRGEGPAEALIDKLRKILERNLRELDKLSKK | | |
| | LDELLKKVLEFLEKSNREIDKLLKDVLPRVEEGGASED | | |
| | LLRKAKKVITEVREKIKPNLEDVRRVIEDVKRLAMSCA | | |
| | QESRRLIEEVERELEKIR (SEQ ID NO: 27858) | | |
| degronSwitch_cODC_3plus1_528_t14 | SEAEDLEELIKELAELLKDVIRKLEKINRRLVKILEDI | 3plus1_Key_Cterm_528 | KDEAERRRRELKDKLDRLREEHEFVKPRLEEELT |
| | IRRLKEISKEAEEELRKGTVEDKDILRDLERRLREILE | | RLRETHKKIEKELREALKPVRDRST (SEQ ID |
| | ESDRLLEELKRRLEEILRKSKELLRRLEEVLREILKRA | | NO: 57193) |
| | EEVKRSNLPKEELIKEIVKLLEELLRVIEKILEDNIRL | | |
| | LEELVEVIKEILEKELRLLEELVRVIERILREVGKDKD | | |
| | EAERRRRELKDKLDRIREELLMSCAQESEELTRLRETH | | |
| | KKIEK (SEQ ID NO: 27912) | | |
| degronSwitch_cODC_3plus1_528_t11 | SEAEDLEELIKELAELLKDVIRKLEKINRRLVKILEDI | 3plus1_Key_Cterm_528 | KDEAERRPRELKDKLDRLREEHEEVKRRLEEELT |
| | IRRLKEISKEAEEELRKGTVEDKDILPDLERRLREILE | | RLRETHKKIEKELREALKRVRDRST (SEQ ID |
| | ESDRLLEELKRRLEEILRKSKELLRRLEEVLREILKRA | | NO: 57193) |
| | EEVKRSNLPKEELIKEIVKLLEELLRVIEKILEDNIRL | | |
| | LEELVEVIKEILEKHLRLLEELVRVIEPILREVGKDKD | | |
| | EAERRRRELKDKLDRLREEHEELKMSCAQESTRLRETH | | |
| | KKIEKELR (SEQ ID NO: 27913) | | |
| degronSwitch_cODC_3plus1_528_t4 | SEAEDLEELIKELAELLKDVIRKLEKINRRIVKILEDI | 3plus1_Key_Cterm_528 | KDRAERRRRELKDKLDRLREEHEEVKRRLEEELT |
| | IRRLKEISKEAEEELRKGTVEDKDILRDLERRLREILE | | RLRETHKKIEKELREALKRVRDRST (SEQ ID |
| | ESDRLLEELKRRLEEILRKSKELLPRLEEVLREILKRA | | NO: 57193) |
| | EEVKPSNLPKEELIKEIVKLLEELLRVIEKILEDNIRL | | |
| | LEELVEVIKEILEKHLRLLEELVRVIEPILREVGKDKD | | |
| | EAERPPREIKDKLDRIPEEHEEVKRRLEELLMSCAQES | | |
| | KKIEKELREALKRVR (SEQ ID NO: 27914) | | |
| degronSwitch_cODC_3plus1_528_t0 | SEAEDLEELIKELAELLKDVIRKLEKINRPIVKILEDI | 3plus1_Key_Cterm_528 | KDEAERRRRELKDKLDRLREEHEEVKRRLEEELT |
| | IRPLKEISKENEEELRKGTVEDKDILRDLERRLREILE | | RLRETHKKIEKELREALKRVRDRST (SEQ ID |
| | ESDRLLEELYPRLEEILRKSKELLRPLEEVLREILKRA | | NO: 57193) |
| | EEVKRSNLPKEELIKEIVKLLEELLRVIEKILEDNIRL | | |
| | LEELVEVIKEILEKHLRLLEELVRVIERILREVGKDKD | | |
| | EAERRRRELKDKLDRLREEHEEVKRRLEEELTRLRMSC | | |
| | AQESKELREALKRVRDRST (SEQ ID NO: 27915) | | |
| degronSwitch_cODC_3plus1_529_t15 | SEAEDLEELIKEIAELLKDVIRKLEKINRRLVKILEDI | 3plus1_Key_Cterm_529 | KDEAERRRRELKDKLDRLREEHEEVKRRLEEELT |
| | IRRLKEISKEAEEEDRKGTVEDKDILRDLERRLREILE | | RLRETHKKIEKELREALKRVRDRST (SEQ ID |
| | ESDRLLEELKRRLEEILRKSKELLRPLEEVLREILKRA | | NO: 27199) |
| | EEVKRSNLPKEELIKEIVKLLEELLRVIEKILEDNIRL | | |
| | LEELVEVIKEILEKHLRLLEELVRVIERILREVGKDKD | | |
| | EAERRRRELKDKLDRLRELHMSCAQESEEELTRLRETH | | |
| | KKIE (SEQ ID NO: 27916) | | |
| degronSwitch_cODC_3plus1_529_t14 | SEAEDLEELIKEIAELLKDVIRKLEKINRRLVKILEDI | 3plus1_Key_Cterm_529 | KDEAERRRRELKDKLDRLREEHEEVKRRLEEELT |
| | IRRLKEISKEAEEELPKGTVEDKDILRDLERRIREILE | | RLRETHKKIEKELREALKRVRDRST (SEQ ID |
| | ESDRLLEELKRRLEEILRKSKELLRRLEEVLREILKRA | | NO: 27199) |
| | EEVKRSNLPKEELIKEIVKLLEELLRVIEKILEDNIRL | | |
| | LEELVEVIKEILEKHLRLLEELVRVIERILREVGKDKD | | |
| | EAERRRRELKDKLDRLREELKMSCAQESEELTRLRETH | | |
| | KKIEK (SEQ ID NO: 27917) | | |
| degronSwitch_cODC_3plus1_529_t4 | SEAEDLEELIKELAELLKDVIRKLEKINRRLVKILEDI | 3plus1_Key_Cterm_529 | KDEAERRRRELKDKLDRLREEHEEVKRRLEEELT |
| | IRRLKEISKEAEEELRKGTVEDKCILRDLERRIREILE | | RLRETHKKIEKELREALKRVRDRST (SEQ ID |
| | ESDRLLEELKPRLEEILRKSKELLRRLEEVLREILKRA | | NO: 27199) |
| | EEVKRSNLPKEELIKEIVKLLEELLRVIEKILEDNIRL | | |
| | LEELVEVIKEILEKHLRLLEELVPVIERILREVGKDKD | | |
| | EAERRRRELKDKLDPIPEEHEEVERRLEELLMSCAQES | | |
| | KKIEKELREALKRVR (SEQ ID NO: 27918) | | |
| degronSwitch_cODC_3plus1_529_t0 | SEAEDLEELIKELAELLKDVIRKLEKINRRLVKILEDI | 3plus1_Key_Cterm_529 | KDEAERRRRELKDKLDRLREEHEEVKRRLEEELT |
| | IRRLKEISKEAEEEDRKGTVEDKDILRDLERKLREILE | | RLRETHKKIEKELREALKRVRDRST (SEQ ID |
| | ESDRLLEELKRRLEEILRKSKELLRRLEEVLREILKRA | | NO: 27199) |
| | EEVKRSNLPKEELIKEIVKLLEELLRVIEKILEDNIRL | | |
| | LEELVEVIKEILEKHLRLLEELVRVIERILREVGKDKD | | |
| | EAERRRRELKDKLDRLREEHEEVKRRLEEELTRLRMSC | | |
| | AQESKELREALKRVRDRST (SEQ ID NO: 27919) | | |
| degronSwitch_cODC_3plus1_530_t12 | SDKEEIKPRVEKTARDLETEHDKIKKRLEDTVRDIKRE | 3plus1_Key_Cterm_530 | EKRLIEEVVRLLRENLDVVRRILEALAKLIKELL |
| | LDELLEKYERVLRKIEKTLREGDGDATDLVDKLLETVK | | EALEEVLRRNKELIRELLRVLDEALK (SEQ ID |
| | RLNEEVLRTVKKIADELRRLVEEVLRVLRESNETLARL | | NO: 27205) |
| | LEEGNVGDEVRERLEEVLRRTEEIIKTLEEIVERLLDE | | |
| | LRRLVEELRRISKKLEDELDKIKEKGKDEKRLIEEVVR | | |
| | LLRENLDVVRRILELLMSCAQESLEALEEVLRRNKELI | | |
| | (SEQ ID NO: 27920) | | |
| degronSwitch_cODC_3plus1_530_t11 | SDKEEIKRRVEKTARDLETEHDKIKKRLEDTVRDIKRE | 3plus1_Key_Cterm_530 | EKRLIEEVVRLLRENLDVVRRILEALAKLIKELL |
| | LDELLEKYERVLRKIEKTLREGDGDATDLVDKLLETVK | | EALEEVLRRNKELIRELLRVLDEALK (SEQ ID |
| | RLNEEVLRTVKKIADELRRLVEEVIRVLRESNETLARL | | NO: 27205) |
| | LEEGNVGDEVRERLEEVLRRTEEIIKTLEEIVKRLLDE | | |
| | LRRLVEELRRISKKLKDELDKIKEKGKDEKRLIEEVVR | | |
| | LLRENLDVVRRILEALKMSCAQESEALEEVLRRNKELI | | |
| | R (SEQ ID NO: 27921) | | |
| degronSwitch_cODC_3plus1_530_t8 | SDKEEIKRRVEKTARDLETEHDKIKKRLEDTVRDIKRE | 3plus1_Key_Cterm_530 | EKRLIEEVVPLLRENLDVVRRILEALAKLIKELL |
| | LDELLEKYERVLRKIEKTLREGDGDATDLVDKLLETVK | | EALEEVLRRNKELIRELLPVLDEALK (SEQ ID |
| | RLNEEVLRTVKKIADELRRLVEEVLRVLRESNETLARL | | NO: 27205) |
| | LEEGNVGDEVRERLEEVLRRTEEIIKTLEEIVKRLLDE | | |
| | LRRLVEELRRISKKLKDELDKIKEKGKDEKRLIEEVVR | | |
| | LLRENLDVVRRILEALAKLVMSCAQESEEVLRRNKELI | | |
| | RELL (SEQ ID NO: 27922) | | |
| degronSwitch_cODC_3plus1_530_t5 | SDKEEIKRRVEKTARDLETEHDKIKKRLEDTVRDIKRE | 3plus1_Key_Cterm_530 | EKRLIEEVVRILRENLDVVRRILEALAKLIKELL |
| | LDELLEKYERVLRKIEKTLREGDGDATDLVDKLLETVK | | EALEEVLRRNKELIRELLRVLDEALK (SEQ ID |
| | RLNEEVLRTVKKIADELPRLVEEVLRVLRESNETLARL | | NO: 27205) |
| | LEEGNVGDEVRERLEEVLRRTEEIIKTLEEIVKRLLDE | | |
| | LRRLVEELRRISKKLKDELDKIKEKGKDEKRLIEEVVR | | |
| | LLRENLDVVRRILEALAKLIKLLMSCAQESLRRNKELI | | |
| | RELLRVL (SEQ ID NO: 27923) | | |
| degronSwitch_cODC_3plus1_530_t4 | SDKEEIKRRVEKTARDLETEHDKIKKRLEDTVRDIKRE | 3plus1_Key_Cterm_530 | EKRLIEEVVRLLRENLDVVRRILEALAELIKELL |
| | LDELLEKYERVLRKIEKTLREGDGDATDLVDKLLETVK | | EALEEVLRRNKELIRELLRVLDEALK (SEQ ID |
| | RLNEEVLRTVKKIADELPRLVEEVLRVLRESNETLARL | | NO: 27205) |
| | LEEGNVGDEVRERLEEVLRRTEEIIKTLEETVKRLLDE | | |
| | LRRLVEELRRISKKLKDELDKIKEKGKDEKRLIEEVVR | | |
| | LLRENLDVVRRILEKLAKLIKELLMSCAQESRRNKELI | | |
| | RELLRVLD (SEQ ID NO: 27924) | | |
| degronSwitch_cODC_3plus1_530_t1 | SDKEEIKRRVEKTARDLETEHDKIKKRLEDTVPDIKRE | 3plus1_Key_Cterm_530 | EKRLIEEVVRLLRENLDVVRRILEALAKLIKELL |
| | LDELLEKYERVLRKIEKTLREGDGDATDLVDKLLETVK | | EALEEVLRRNKELIRELLPVLDEALK (SEQ ID |
| | RLNEEVLRTVKKIADELPRLVEEVLRVLRESNETLARL | | NO: 27205) |
| | LEEGNVGDEVRERLEEVLRRTEEIIKTLEEIVKRLLDE | | |
| | LRRLVEELRRISKKLKDELDKIKEKGKDEKRLIEEVVR | | |
| | LLRENLDVVRRILEALAKLIKELLELCMSCAQESKELI | | |
| | RELLRVLDEAL (SEQ ID NO: 27925) | | |
| degronSwitch_cODC_3plus1_530_t0 | SDKEEIKRRVEKTARDLETEHDKIKKRLEDTVPDIKRE | 3plus1_Key_Cterm_530 | EKRLIEEVVRLLRENLDVVRRILEALAKLIKELL |
| | LDELLEKYERVLRKIEKTLREGDGDATDLVDKLLETVK | | EALEEVLRRNKELIRELLRVLDEALK (SEQ ID |
| | RLNEEVLRTVYKIADELRRLVEEVLPVLRESNETLARL | | NO: 27205) |
| | LEEGNVGDEVRERLEEVLRRTEEIIKTLEEIVKRLLDE | | |
| | LRRLVEELRRISKKLKDELDKIKEKGKDEKRLIEEVVR | | |
| | LLRENLDVVRRILEALAKLIKELLEALKMSCAQESELI | | |
| | RELLRVLDEALK (SEQ ID NO: 27926) | | |
| degronSwitch_cODC_3plus1_534_t4 | DEDRIIEEIARLLEELLRELLELIKKLIETNRRLNEEH | 3plus1_Key_Cterm_534 | EKIAEEIERELEELRRMIKRLHEDLERKLKESED |
| | ERAVRELARLLEELLDRLNKKGISDEKLKRIRERLKPA | | ELREIEARLEEKIRRLEEKLERKRR (SEQ ID |
| | LDDLERLHREINKRLEDLVRELEKLVREILKELKDALE | | NO: 27207) |
| | ELRRASARAGGEEVLRRLEEIVKKLLDLVRRILERLKE | | |
| | IHKDNVRLLRELNERLTRIVEDLVRLIREILREAGVDE | | |
| | KIAEEIERELEELRRMIKPLHEDLERKLKELLMSCAQE | | |
| | SARLEEKIRRLEEKLE (SEQ ID NO: 27940) | | |
| degronSwitch_cODC_3plus1_539_t12 | SEKEKLLKESEEEVRRLRRTLEELLRKYREVLERLRKE | 3plus1_Key_Cterm_539 | ERLVKTLIEDVEAVIKRILELITRVAEDNERVLE |
| | LREIEERVRDVVRRLKEVLDRKGLDIDTIIKEVEDLLK | | RIIRELTDNLERHLKIVREIVK (SEQ ID |
| | TVLDRLRELLDKIRRLTKEAIEVVREIIERIVRHAERV | | NO: 27213) |
| | KDELRKEGGDKEKLDRVDRLIKENTRHLKEILDRIEDL | | |
| | VRRSEKKLRDIIREVRRLIEELRKKNEEIKKGPDERLV | | |
| | KTLIEDVEAVIKRILELAMSCAQESERVLERIIRELTD | | |
| | NL (SEQ ID NO: 27956) | | |
| degronSwitch_cODC_3plus1_539_t11 | SEKEKLLKESEEEVRRLRRTLEELLRKYREVLERLRKE | 3plus1_Key_Cterm_539 | ERLVKTLIEDVEAVIKRILELITRVAEDNERVLE |
| | LREIEEPVPDVVRRLKEVLDRKGLDIDTIIKEVEDLLK | | RIIRELTDNLERHLKIVREIVK (SEQ ID |
| | TVLDRLRELLDKIRRLTKEAIEVVREIIERIVPHAERV | | NO: 27213) |
| | KDELRKEGGDKEKLDRVDRLIKENTRHLKEILDRIEDL | | |
| | VRRSEKKLRDIIREVRRLIEEERKKAEEIKKGPDERLV | | |
| | KTLIEDVEAVIKRILELLEMSCAQESRVLERIIRELTD | | |
| | NLE (SEQ ID NO: 27957) | | |
| degronSwitch_cODC_3plus1_539_t8 | SEKEKLLKESEEEVRRLRRTLEELLRKYREVLEPLRKE | 3plus1_Key_Cterm_539 | ERLVKTLIEDVEAVIKRILELITRVAEDNERVLE |
| | LREIEERVRDVVRRLKEVLDRKGLDIDTIIKEVEDLLK | | RIIRELTDNLERHLKIVREIVK (SEQ ID |
| | TVLDRLRELLDKIRRLTKEAIEVVREIIERIVRHAERV | | NO: 27213) |
| | KDELRKEGGDKEKLDRVDRLIKENTRHLKEIEDRIEDL | | |
| | VRRSEKKLRDIIREVRRLIEELRKKAEEIKKGPDERLV | | |
| | KTLIEDVEAVIKRILELITRLAMSCAQESERIIRELTD | | |
| | NLERHL (SEQ ID NO: 27958) | | |
| degronSwitch_cODC_3plus1_539_t5 | SEKEKLLKESEEEVRRLRRTLEELLRKYREVLERLRKE | 3plus1_Key_Cterm_539 | ERLVKTLIEDVEAVIKRILELITRVAEDNERVLE |
| | LREIEERVRDVVRRLEEVLDRKGLDIDTIIKEVEDLLK | | RIIRELTDNLERHLKIVREIVK (SEQ ID |
| | TVLDRLRELLDKIRRLTKEAIEVVREIIERIVRHAERV | | NO: 27213) |
| | KDELRKEGGDKEKLDRVDRLIKENTRELKEILDRIEDL | | |
| | VRRSEKKLRDIIREVRRLIEELRKKNEEIKKGPDERLV | | |
| | KTLIEDVEAVIKRILELITRVAELVMSCAQESIRELTD | | |
| | NLERHLKIV (SEQ ID NO: 27959) | | |
| degronSwitch_cODC_3plus1_539_t4 | SEKEKLLKESEEEVRRLRRTLEELLRKYREVLERLRKE | 3plus1_Key_Cterm_539 | ERLVKTLIEDVENVIKRILELITRVAEDNERVLE |
| | LREIEERVRDVVRRLKEVLDRKGLDIDTIIKEVEDLLK | | RIIRELTDNLERHLKIVREIVK (SEQ ID |
| | TVLDRLRELLDKIRRLTKEAIEVVREITERIVRHAERV | | NO: 27213) |
| | KDELRKEGGDKEKLDPVDRLIKENTRHLKEILDRIEDL | | |
| | VRRSEKKLRDIIREVRRLIEELRKKAEEIKKGRDERLV | | |
| | KTLIEDVEAVIKRILELITRVAEDLYMSCAQESPELTD | | |
| | NLERHLKIVR (SEQ ID NO: 27960) | | |
| degronSwitch_cODC_3plus1_539_t0 | SEKEKLLKESEEEVRRLRRTLEELIPKYREVLERLRKE | 3plus1_Key_Cterm_539 | EPLVKTLIEDVEAVIKRILELITRVAEDNERVLE |
| | LREIEERVRDVVRRLKEVLDRKGLDIDTIIKEVEDLLK | | RIIRELTDNLERHLKIVREIVK (SEQ ID |
| | TVLDRLRELLDKIRRLTKEAIEVVPEIIERIVRHNERV | | NO: 27213) |
| | KDELRKEGGDKEKLDRVDRLIKENTRHLKEILDRIEDL | | |
| | VRRSEKKLPDIIREVRRLIEELRKYAEEIKKGRDERLV | | |
| | KTLIEDVEAVIKRILELITRVAEDNERVEKMSCAQESD | | |
| | NLERHLKIVREIVK (SEQ ID NO: 27961) | | |
| degronSwitch_cODC_3plus1_548_t15 | DKAEVEREALKLLKDLLEELIKIHEESLKRILDLIDTL | 3plus1_Key_Cterm_548 | EEIDRELKPVVEELRRLHEEIKERLDDVARRSEE |
| | VKVHEDALRALKELLERSGLDERELRKVERMATESLRT | | ELPRIIKKIKEVVKEIRKKLK (SEQ ID |
| | IAKLKEELRDLARRSLEKLREDLKRVDDTLRKVEEKVR | | NO: 27215) |
| | RTGPSEELIEELIRTIEKLLKEIVRINEEVLKAVRELL | | |
| | KTLLKLSEDVVRRIEEILRKGGVPEEIDRELKRVVEEL | | |
| | RRLHMSCAQESDDVAPPSEEELRRII (SEQ ID | | |
| | NO: 27985) | | |
| degronSwitch_cODC_3plus1_548_t11 | DKAEVLREALKLLKDLLEELIKIHEESLKRILDLIDTL | 3plus1_Key_Cterm_548 | EEIDRELERNNEELPPLHEEIKERLDDVARRSEE |
| | VKVHEDALRALKELLEPSGLDERELRKVERMATESLRT | | ELRRIIKKLKEVVIKEIRKKLK (SEQ ID |
| | IAKLKEELRDLARRSLEKLREDLKRVDDTLRKVEEKVR | | NO: 27215) |
| | RTGPSEELIEELIRTIEKELKEIVRINEEVLKAVRELL | | |
| | KTLLKLSEDVVERIEEILRKGGVPEEIDRELKRVVEEL | | |
| | PRLHEELNMSCAQESRPSEEELRRIIKKLK (SEQ ID | | |
| | NO: 27986) | | |
| degronSwitch_cODC_3plus1_548_t8 | DKAEVEREADKELKDLLEELIKIHEESLKRILDLIDTL | 3plus1_Key_Cterm_548 | EEIDRELERVVEELRRLHEEIKERLDDVARRSEE |
| | VKVHEDALRALKELLERSGLDERELRKVERMATESLRT | | ELRRIIKKLKEVVIKEIRKKLK (SEQ ID |
| | IAKLKEELRDLARRSLEKLREDLKEVDDTLREVEEKVR | | NO: 27215) |
| | RTGPSEELIEELIRTIEKELKEIVRINEEVLKAVRELL | | |
| | KTLLKESEDVVRRIEEILRKGGVPEEIDRELKIVVEEL | | |
| | RRLHEEIKELLMSCAQESEEELRRIIKKLKEVV (SEQ | | |
| | ID NO: 27987) | | |
| degronSwitch_cODC_3plus1_548_t4 | DKAEVEREALKLLEDLLEELIKIHEESEKRILDLIDTL | 3plus1_Key_Cterm_548 | EEIDRELKRVVEELRPLHEEIKERLDDVARRSEE |
| | VKVHEDALRALKELLERSGLDERELRKVERMATESLRT | | ELRRIIKKLKEVVIKEIRKELK (SEQ ID |
| | IAKLKEELRDLARRSLEKLREDLKPVDDTLRKVEEKVR | | NO: 27215) |
| | RTGPSEELIEELIRTIEKLLKEIVRINEEVLKAVRELL | | |
| | KTLLKESEDVVRRIEEILREGGVPEEIDRELKRVVEEL | | |
| | RRLHEEIKERLDDLGMSCAQESRRIIKKLKEVVKEIR | | |
| | (SEQ ID NO: 27988) | | |
| degronSwitch_cODC_3plus1_548_t0 | DKAEVEREALKELKDLLEELIKIHEESEKRILDLIDTL | 3plus1_Key_Cterm_548 | EEIDRELKRVVEELRRLHEEIKERLDDVARRSEE |
| | VKVHEDALRALKELLERSGLDERELRKVERMATESLRT | | ELRRIIKKIKEVVKEIRKKLK (SEQ ID |
| | IAKLKEELRDLARRSLEKLREDLKRVDDTLRKVEEKVR | | NO: 27215) |
| | RTGPSEELIEELIRTIEKLLKEIVRINEEVEKAVRELL | | |
| | KTLLKLSEDVVRRIEEILPKGCNPEEIDRELKPVVEEL | | |
| | RRLHEEIKERLDDVARRLLMSCAQESKKLKEVVKEIRK | | |
| | KLK (SEQ ID NO: 27989) | | |
| degronSwitch_cODC_3plus1_556_t5 | SERELIERWLELHKEILRLIRELVERLLKLHREILDTI | 3plus1_Key_Cterm_556 | DDERRTLTELLKRMEDILEKVERTLKKILDDSAR |
| | KKLIRELLELLEDIARKLGLDKEAKDELREIAKRVEDK | | MAEEVKKTLKELLERSEKVAEDVRK (SEQ ID |
| | LEKLERESRKVEEDLKRKLKELTDESDTVEKRVRDVVR | | NO: 27217) |
| | RGTQSREEIAEELLRLDRKLLKAVEELLKEILDLNKKL | | |
| | LDDVRAILEETRRVLEKLLDRVRRGERTDDERRTLTEL | | |
| | LKRMEDILEKVERTEKKLLDLAMSCAQESKKTLKELLE | | |
| | RSEKVA (SEQ ID NO: 28016) | | |
| degronSwitch_cODC_3plus1_556_t4 | SERELIERWLELHKEILRLIRELVEPLLKLHREILDTI | 3plus1_Key_Cterm_556 | DDERRTLTELLKRMEDILEKVERTIKKLLDDSAR |
| | KKLIRELLELLEDIARKLGLDKEAKDELREIAKRVEDK | | MAEEVKKTLKELLERSEKVAEDVRK (SEQ ID |
| | LEKLERESRKVEEDLRRKLKELTDESDTVEKRVRDVVR | | NO: 27217) |
| | RGTQSREEIAEELLRLDRKLLKAVEELLKEILDLNKKL | | |
| | LDDVRAILEETRRVLEKLLDRVRRGERTDDERRTLTEL | | |
| | LKRMEDILEKVERTLKKLLDDLLMSCAQESKTLKELLE | | |
| | RSEKVAE (SEQ ID NO: 28017) | | |
| degronSwitch_cODC_3plus1_556_t1 | SERELIERWLELHKEILRLIRELVERLLKLHREILDTI | 3plus1_Key_Cterm_556 | DDERRTLTELIKRMEDILEKVERTLKKLLDDSAR |
| | KKLIRELLELLEDIARKLGLDKEAKDELREIAKRVEDK | | MAEEVKKTLKELLERSEKVAEDVRK (SEQ ID |
| | LEKLERESRKVEEDLKRKLKELTDESDTVEKRVRDVVR | | NO: 27217) |
| | RGTQSREEIAEELLRLDRKLLKAVEELLKEILDLNKKL | | |
| | LDDVRAILEETRRVLEKLLDRVPRGERTDDERRTLTEL | | |
| | LKRMEDILENVERTLKKLLDDSARLAMSCAQESKELLE | | |
| | RSEKVAEDVR (SEQ ID NO: 28018) | | |
| degronSwitch_cODC_3plus1_560_t15 | SKKELLEEVVRRAIELLKRHLEKLKRILEEIVRLLEEH | 3plus1_Key_Cterm_560 | EDKLKEIEDELPRLLEELRRLDKAIKDRLRELKK |
| | LEKVERVLEAILSLLDDLLRRGGDERAIRTLEDVKRRL | | DLDEANPRIKETLKKILREVEK (SEQ ID |
| | REILERLADENAKAIKPLADLLDKLEKRNKFAIERLEE | | NO: 27219) |
| | ILEELKRVRRDEELLRVLETLLKIIEDILRENTKVLED | | |
| | LLPLVEEILEANLRVVEELLRIAREILTEIVGDEDKLK | | |
| | EIEDELPRLLEELQMSCAQESDRDRELKKDLDEANR | | |
| | (SEQ ID NO: 28034) | | |
| degronSwitch_cODC_3plus1_560_t12 | SKKELLEEVVRRAIELLKRHLEKIKRILEEIVRLLEEH | 3plus1_Key_Cterm_560 | EDKLKEIEDELPRLLEELRRLDKAIKDPLRELKK |
| | LEKVERVLEAILSLLDDLLRRGGDERAIRTLEDVKRRL | | DLDEANRRIKETLIKKILREVEK (SEQ ID |
| | REILERLADENAKAIKPLADLLDKIEKRNKEAIERLEE | | NO: 27219) |
| | ILEELKRVRRDEELLRVLETLLKIIEDILRENTKVLED | | |
| | LLPLVEEILEANLRVVEELLRLAREILTEIVGDEDKLK | | |
| | EIEDELRRILEELRRLVMSCAQESPELKKDLDEANRRI | | |
| | K (SEQ ID NO: 28035) | | |
| degronSwitch_cODC_3plus1_560_t8 | SKKELLEEVVRRAIELLKRHLEKLKRILEEIVRLLEEH | 3plus1_Key_Cterm_560 | EDKLKEIEDELPRLLEELRRLDKAIKDRLRELKK |
| | LEKVERVLEAILSLLDDLLRRGGDERAIRTLEDVKRRL | | DLDEANRRIKETLKKLLREVEK (SEQ ID |
| | REILERLADENAKAIKPLADLLDKLEKRNKEAIERLEE | | NO: 27219) |
| | ILEELKRVRRDEELLRVLETLLKIIEDILRENTKVLED | | |
| | LLRLVEEILEANLRVVEELLRLAREILTEIVGDEDKLK | | |
| | EIEDELRRLLEELRRLDKALKMSCAQESKDLDEANRRI | | |
| | KETLK (SEQ ID NO: 28036) | | |
| degronSwitch_cODC_3plus1_560_t1 | SKKELLEEVVRRAIELLKRHLEKLKRILEEIVRLLEEH | 3plus1_Key_Cterm_560 | EDKLKEIEDELPRLLEELRRLDKAIKDRLRELKK |
| | LEKVERVLEAILSLLDDLLRRGGDERAIRTLEDVKRRL | | DLDEANPRIKETLKKLLREVEK (SEQ ID |
| | REILERLADENAKAIKRLADLLDKLEKRNKEAIERLEE | | NO: 27219) |
| | ILEELKRVRRDEELLRVLETLLKIIEDILRENTKVLED | | |
| | LLELVEEILEANLRVVEELLELAREILTKIVGDEDKLK | | |
| | EIEDELRRLLEELERLDKAIKDRLPELYMSCAQESRRI | | |
| | KETLKKLLREVE (SEQ ID NO: 28037) | | |
| degronSwitch_cODC_3plus1_568_t15 | KEIEETLKELEDLNREMVETNRRVLEETRRLNKETVDR | 3plus1_Key_Cterm_568 | KAVEELEKALEEIKRRLKEVIDRYEDELRKLRKE |
| | VKATLDELAKMLKKLVDDVRKGPTSEELKRLLAELEEL | | YKEKIDKYERKLEEIERRERT (SEQ ID |
| | LARVVRRVEELLKKSTDLLERAVKDSADALRRSHEVLK | | NO: 27221) |
| | EVASRVKPAKDEGLEREEVLRLLRELLERHAKVLKDIV | | |
| | RVSEKLLREHLKVLREIVEVLEELLERILKVILDTTGG | | |
| | DKAVEELEKALEEIKRRLTMSCAQESDELRKLRKEYKE | | |
| | KID (SEQ ID NO: 28046) | | |
| degronSwitch_cODC_3plus1_572_t15 | DEDELIRKLLEDLKDIVRKILELIERDLRDIERVVRRI | 3plus1_Key_Cterm_572 | SELADRIRKLIEDLERHTAKVLEDVKRITELRK |
| | VKVIRDDLKKIKEVVDDIARGVPRTEELERVIKRIEEL | | NSKDILEEVRKLIDELRKRIKEVED (SEQ ID |
| | LRTSEEELDRILKEIEELIRESRRRLEEVVSAVEELLR | | NO: 27225) |
| | RVEEIVDKGRESKEDVIKLLREVVDDILRLVEEVVRTN | | |
| | LEIIKRILELIEPVIRLNLSIIRDILRLLEGTVDSELA | | |
| | DRIRKLIEDLERHTAKLLMSCAQESTELRKNSKDILEE | | |
| | VR (SEQ ID NO: 28059) | | |
| degronSwitch_cODC_3plus1_572_t8 | DEDELIRKLLEDLKDIVRKILELIERDLRDIERVVRRI | 3plus1_Key_Cterm_572 | SELADRIRKLIEDLERHTAKVLEDVKRAITELRK |
| | VKVIRDDLKKIKEVVDDIARGVPRTEELERVIKRIEEL | | NSKDILEEVRKLIDELEKRIKEVED (SEQ ID |
| | LRTSEEELDRILKEIEELLRESRRRLEEVVSAVEELLR | | NO: 27225) |
| | RVEEIVDKGRESKEDVIKLLREVVDDILRLVEEVVRTN | | |
| | LEIIKRILELIERVIRLNLSIIRDILRLLEGTVDSELA | | |
| | DRIRKLIEDLERHTAKVLEDVKRLMMSCAQESKDILEE | | |
| | VRKLIDELR (SEQ ID NO: 28060) | | |
| degronSwitch_cODC_3plus1_572_t7 | DEDELIRKLIEDLKDIVRKILELIERDLEDIERVVRRI | 3plus1_Key_Cterm_572 | SELADRIRKLIEDLERHTAKVLEDVKRAITELRK |
| | VKVIRDDLKKIKEVVDDIARGVERTEELERVIKRIEEL | | NSKDILEEVRKLIDELRKRIKEVED (SEQ ID |
| | LRTSEEELDPILKEIEELLRESRRELEEVVSAVEELLR | | NO: 27225) |
| | RVEEIVDKGRESKEDVIKLLREVVDDILRINEEVVRTN | | |
| | LEIIKRILELIERVIRLNLSIIRDILPLLEGTVDSELA | | |
| | DRIRKLIEDLERHTAKVLEDVKRALSMSCAQESDILEE | | |
| | VRKLIDELPK (SEQ ID NO: 28061) | | |
| degronSwitch_cODC_3plus1_572_t4 | DEDELIRKLLEDLKDIVRKILELIERDLEDIERVVRRI | 3plus1_Key_Cterm_572 | SELADRIRKLIEDLERHTAKVLEDVKRAITELRK |
| | VKVIRDDLKKIKEVVDDIARGVPRTEELERVIKRIEEL | | NSKDILEEVRKLIDEIRKPIKEVED (SEQ ID |
| | LRTSEEELDPILKEIEELLRESRREIEEVVSAVEELLR | | NO: 27225) |
| | RVEEIVDKGRESKEDVIKLLREVVDDILRLVEEVVRTN | | |
| | LEIIKRILELIERVIRLNLSIIRDILRLLEGTVDSELA | | |
| | DRIRKLIEDLERHTAKVLEDVKRAITELAMSCAQESEE | | |
| | VRKLIDELRKRIK (SEQ ID NO: 28062) | | |
| degronSwitch_cODC_3plus1_572_t1 | DEDELIRKLLEDLKDIVRKILELIERDLRDIERVVRRI | 3plus1_Key_Cterm_572 | SELADRIPKLIEDLERHTAKVLEDVKRAITELRK |
| | VKVIRDDLKKIKEVVDDIARGVPRTEELERVIKRIEEL | | NSKDILEEVRKLIDELRKRIKEVED (SEQ ID |
| | LRTSEEELDRILKEIEELLRESPRRLEEVVSAVEELLR | | NO: 27225) |
| | RVEEIVDKGRESKEDVIKLLRETVDDILPLVEEVVRTN | | |
| | LEIIKRILELIERVIRLNLSIIRDILRLLEGIVDSELA | | |
| | DRIRKLIEDLERHTAKVLEDVKRAITELRKLAMSCAQE | | |
| | SRKLIDELRKRIKEVE (SEQ ID NO: 28063) | | |
| degronSwitch_cODC_3plus1_581_t15 | SALETVKKLLEDSSEKIERIVEEDERVAKESSDRIRRL | 3plus1_Key_Cterm_581 | AEAVIKVIEKLIRNNKRVWDALLKINEDLVRVNK |
| | VEEDKRVADEILDLIEKIGDTDTILKLVEEWSRTSKKL | | TVWKELLRVNEKLARDLERVVK (SEQ ID |
| | LDDVLKLHKDWSDDSRRLLEEILRVHEELIRPVKEILD | | MC: 27227) |
| | REGKPEEVVRELEKVLKESLDTLEEIIRRLDEANAATV | | |
| | KRVADVIRELEDINRKVLEEIKRGSDDAEAVIKVIEKL | | |
| | IRANKRLWMSCAQESEDLVRVNKTVWKELL (SEQ ID | | |
| | NO: 28095) | | |
| degronSwitch_cODC_3plus1_581_t14 | SALETVKKLLEDSSEKIERIVEEDERVAKESSDRIRRL | 3plus1_Key_Cterm_581 | AEAVIKVIEKLIRANKRVWDALLKINEDLVRVNK |
| | VEEDKRVADEILDLIEKIGDTDTLLKLVEEWSRTSKKL | | TVWKELLPVNEKLARDLERVVK (SEQ ID |
| | LDDVLKLHKDWSDDSRRLLEEILRVHEELIRRVKEILD | | NO: 27227) |
| | REGKPEEVVRELEKVLKESLDTLEEIIRRLDENNAATV | | |
| | KRVADVIRELEDINRKVLEEIKROSDDAEAVIKVIEKL | | |
| | IRANKRVLDMSCAQESDLVRVNKTVWKELLR (SEQ | | |
| | ID NO: 28096) | | |
| degronSwitch_cODC_3plus1_581_t12 | SALETVKKLLEDSSEKIERIVEEDERVAKESSDRIRRL | 3plus1_Key_Cterm_581 | AEAVIKVIEKLIRANKRVWDALLKINEDLVRVNK |
| | VEEDKRVADEILDLIEKIGDTDTLLKLVEEWSRTSKKL | | TVWKELLRVNEKLARDLERVVK (SEQ ID |
| | LDDVLKLHKDWSDDSRRLLEEILRVHEELIRRVKEILD | | NO: 27227) |
| | REGKPEEVVRELEKVLKESLDTLEEIIRRLDEANAATV | | |
| | KRVADVIPELEDINPKVLEEIKRGSDDAEAVIKVIEKL | | |
| | IRANKRVWDLLMSCAQESVRVNKTVWKELLRVN (SEQ | | |
| | ID NO: 28097) | | |
| degronSwitch_cODC_3plus1_581_t11 | SALETVKKLLEDSSEKIERIVEEDERVAKESSDRIRRL | 3plus1_Key_Cterm_581 | AEAVIKVIEKLIRANKRVWDALLKINEDLVRVNK |
| | VEEDKRVADEILDLIEKIGDTDTLLKLVEEWSRTSKKL | | TVWKELLPVNEKLARDLERVVK (SEQ ID |
| | LDDVLKLHKDWSDDSRRLLEEILRVHEELIRRVKEILD | | NO: 27227) |
| | REGKPEEVVRELEKVLKESLDTLEEIIRRLDEANAATV | | |
| | KRVADVIRELEDINRKVLEEIKRGSDDAEAVIKVIEKL | | |
| | IRANKRVWDALLMSCAQESRVNKTVWKELLRVNE | | |
| | (SEQ ID NO: 28098) | | |
| degronSwitch_cODC_3plus1_585_t15 | SKEEKLKDDVRAVLEDLDRVLKELEKLSEDNLRELKRV | 3plus1_Key_Cterm_585 | SKAAEDILRVLEKLVKVSRaNIKLILELSEHHVR |
| | LDRITDLHRRILDELPKGIGSEELLRRVEKVLKDNLDL | | VSTRIARLLLDVARKLNEVIKEJNEP (SEQ ID |
| | LRKLVEEHKESSERDLKRVEDLVREIKEVLRKLLELED | | NO: 27229) |
| | RGTDIRKIEEEIERLLRKIRKAVEESKDLNRRNSERIE | | |
| | EVARRSEELARRLLKEIRERGDSKAAEDILRVLEKLVK | | |
| | VSRELCMSCAQESEHHVRVSTRIARLLL (SEQ ID | | |
| | NO: 28118) | | |
| degronSwitch_cODC_3plus1_585_t12 | SKEEKLKDDVRAVLEDLDRVLKELEKLSEDNLRELKRV | 3plus1_Key_Cterm_585 | SKAAEDILRVLEKINKVSREAIKLILELSEHHVR |
| | LDRITDLHRRILDELPKGIGSEELLRRVEKVLKDNLDL | | VSTRIARLILDVARKLAEVIKEAER (SEQ ID |
| | LRKLVEEHKESSERDLKRVEDLVREIKEVLRKLLELED | | NO: 27229) |
| | RGTDIRKIEEEIERLIRKIRKAVEESKDLNRRNSERIE | | |
| | EVARRSEELARRLLKEIRERGDSKAAEDILRVLEKLVK | | |
| | VSREAIKLIMSCAQESVPIVSTRIARLLLDVA (SEQ | | |
| | ID NO: 28119) | | |
| degronSwitch_cODC_3plus1_585_t11 | SKEEKLKDDVRAVLEDLDRVLKEIEKLSEDNLRELKRV | 3plus1_Key_Cterm_585 | SKAAEDILRVLEKLNKVSREAIKLILELSEHHVR |
| | LDRITDLHRRILDELRKGIGSEELLRRVEKVLKDNLDL | | VSTRIARLLLDVARKLAEVIKEAER (SEQ ID |
| | LRKLVEEHKESSERDLKRVEDLVREIKEVLRKLLELED | | NO: 27229) |
| | RGTDIRKIEEEIERLLRKIRKAVEESKDLNRRNSERIE | | |
| | EVARRSEELkRRLLKEIRERGDSKAAEDILRVLEKLVK | | |
| | VSREAIKLLIMSCAQESRVSTRIARLLLDVAR (SEQ | | |
| | ID NO: 28120) | | |
| degronSwitch_cODC_3plus1_585_t8 | SKEEKLKDDVRAVLEDLDRVLKELEKLSEDNLRELKRV | 3plus1_Key_Cterm_585 | SKAAEDILRVLEKLVKVSREAIKLILELSEHHVR |
| | LDRITDLHRRILDELRKGIGSEELLRRVEKVLKDNLDL | | VSTRIARLLLDVARKLAEVIKEAER (SEQ ID |
| | LRKLVEEHKESSERDLKRVEDLVREIKEVLRKLLELED | | NO: 27229) |
| | RGTDIRKIEEEIERLLRKIRKNVEESKDLNRRNSERIE | | |
| | EVARRSEELARRLLKEIRERGDSKAAEDILRVLEKLVK | | |
| | VSREAIKLILELAMSCAQESTRIARLLLDVARKLA | | |
| | (SEQ ID NO: 28121) | | |
| degronSwitch_cODC_3plus1_585_t4 | SKEEKLKDDVRAVLEDLDRVLKELEKLSEDNLRELKRV | 3plus1_Key_Cterm_585 | SKAAEDILRVLEKLVKVSREAIKLILELSEHHVR |
| | LDRITDLHRRILDELRKGIGSEELLRRVEKVIKDNLDL | | VSTRIARLLLDVARKLAEVIKEAER (SEQ ID |
| | LRKLVEEHKESSERDLKRVEDLVREIKEVLRKLLELED | | NO: 27229) |
| | RGTDIRKIEEEIERLLRKIRKAVEESKDLNRRNSERIE | | |
| | EVARRSEELARRLLKEIPERGDSKAAEDILRVLEKLVK | | |
| | VSREAIKLILELSEHLIMSCAQESPLLLDVARKLAEVI | | |
| | K (SEQ ID NO: 28122) | 3plus1_Key_Cterm_585 | SKAAEDILRVLEKLVKVSREAIKLILELSEHHVR |
| degronSwitch_cODC_3plus1_585_t1 | SKEEKLKDDVRAVLEDLDRVLKELEKLSEDNLRELKRV | | VSTRIARLLLDVARKLAEVIKEAER (SEQ ID |
| | LDRITDLHRRILDELRKGIGSEELLRRVEKVLKDNLDL | | NO: 27229) |
| | LRKLVEEHKESSERDLKPVEDLVREIKEMLRKLLELED | | |
| | RGTDIRKIEEEIERLLRKIRKAVEESKDLNRRNSERIE | | |
| | EVARRSEELARRLIKEIRERGDSKAAEDILRVLEKLVK | | |
| | VSREAIKLILELSEHHVRLSMSCAQESLDVARKLAEVI | | |
| | KEAE (SEQ ID NO: 28123) | | |
| degronSwitch_cODC_3plus1_585_t0 | SKEEKLKDDVRAVLEDLDRVLKELEKLSEDNLRELKRV | 3plus1_Key_Cterm_585 | SKAAEDILPVLEKLVKVSRRAIKLILELSEHHVR |
| | LDRITDLHRRILDELRKGIGSEELLRRVEKVLKDNLDL | | VSTRIARLLIDVARKLAEVIKEAER (SEQ ID |
| | LRKLVEEHKESSERDLKPVEDLVREIKEVLRKLLELED | | NO: 27229) |
| | RGTDIRKIEEEIERLLRKIRKAVEESKDLNRRNSERIE | | |
| | EVARPSEELARRLLKEIRERGDSKAAEDILRVLEKLVK | | |
| | VSREAIKLILELSEHHVRVLTMSCAQESDVARKLAEVI | | |
| | KEAER (SEQ ID NO: 28124) | | |
| degronSwitch_cODC_3plus1_587_t15 | SEIEDVIRRLRKILEDLEPVSEKLLREIKKILDEARRL | 3plus1_Key_Cterm_587 | IEDLVREVERLIKRIEDSLRELEKTVRELLKRIK |
| | NEEVIKEIKRVLEDAVRVFRDGSGSKEELAKLVEELIR | | EASDKVREDVDRLIKELKEAAD (SEQ ID |
| | ELAKLAKEVDEIHKRIVEPIKALVEDAERIHRKIVETL | | NO: 27231) |
| | EEIVRGVPSEELKRVVEAIVEVIKEHLKVLADVIRRII | | |
| | KAIEENAETIKRVLEDIVRVLEIVIRGEGSIEDLVREV | | |
| | ERLIKRIEDLVMSCAQESRELLKRIKEASDKVR (SEQ | | |
| | ID NO: 28131) | | |
| degronSwitch_cODC_3plus1_587_t8 | SEIEDVIRRLRKILEDLERVSEKLIREIKKILDEARRL | 3plus1_Key_Cterm_587 | IEDLVREVERLIKRIEDSLRELEKTVRELLKRIK |
| | NEEVIKEIKRVLEDAVRVFRDGSGSKEELAKLVEELIR | | EASDKVREDVDRLIKELKEAAD (SEQ ID |
| | ELAKLAKEVDEIHKRIVERLKALVEDAERIHREIVETL | | NO: 27231) |
| | EEIVRGVPSEELKRVVEAIVEVIKEHLKVLADVIRRII | | |
| | KAIEENAETIKRVLEDIVRVLELVLRGEGSIEDLVREV | | |
| | ERLIKRIEDSIRELEKLVMSCAQESKEASDKVREDVDR | | |
| | LI (SEQ ID NO: 28132) | | |
| degronSwitch_cODC_3plus1_587_t4 | SEIEDVIRRLRKILEDLERVSEKLIREIKKILDEARRL | 3plus1_Key_Cterm_587 | IEDLVREVERLIKRIEDSLRELEKTVRELLKRIK |
| | NEEVIKEIKRVLEDAVRVFRDGSGSKEELAKLVEELIR | | EASDKVREDVDRLIKELKEAAD (SEQ ID |
| | ELAKLAKEVDEIHKRIVERLKALVEDAERIHRKIVETL | | NO: 27231) |
| | EEIVRGVPSEELKRVVEAIVEVIKEHLKVLADVIRRII | | |
| | KAIEENAETIKRVLEDIVRVLELVLRGEGSIEDLVREV | | |
| | ERLIKRIEDSLRELEKTVPELLMSCAQESDKVREDVDR | | |
| | LIKELK (SEQ ID NO: 28133) | | |
| degronSwitch_cODC_3plus1_587_t1 | SEIEDVIRRLRKILEDLERVSEKLIREIKKILDEARRL | 3plus1_Key_Cterm_587 | IEDLVREVERLIKRIEDSLRELEKTVRELLKRIK |
| | NEEVIKEIKRVLEDAVRVFRDGSGSKEELAKIVEELIR | | EASDKVREDVDPLIKEIKEAAD (SEQ ID |
| | ELAKLAKEVDEIHKRIVERLKALVEDAERIHRKIVETL | | NO: 27231) |
| | EEIVRGVPSEELKRVVEAIVEVIKEHLKVLADVIRRII | | |
| | KAIEENAETIKRVLEDIVRVLELVLRGEGSIEDLVREV | | |
| | ERLIKRIEDSLRELEKTVRELLKLAMSCAQESPEDVDR | | |
| | LIKELKEAN (SEQ ID NO: 28134) | | |
| degronSwitch_cODC_3plus1_587_t0 | SEIEDVIRRLRKILEDLERVSEKLLREIKKILDEARRL | 3plus1_Key_Cterm_587 | IEDLVREVERLIKRIEDSLRELEKTVRELLKRIK |
| | NEEVIKEIKPVLEDAVRVFRDGSGSKEELAKLVEELIR | | EASDKVREDVDRLIKELKEAAD (SEQ ID |
| | ELAKLAKEVDEIHKRIVERLKALVEDAERIHRKIVETL | | NO: 27231) |
| | EEIVRGVPSEELKRVVEAIVEVIKEHLKVLADVIRRII | | |
| | KAIEENAETIKRVLEDIVPVLELVLRGEGSIEDLVREV | | |
| | ERLIKRIEDSLRELEKTVRELLKPLAMSCAQESEDVDR | | |
| | LIKELKEAAD (SEQ ID NO: 28135) | | |
| degronSwitch_cODC_3plus1_605_t15 | SREELLDRILEAIAKILEDLKRLIDENLARLEEVVREL | 3plus1_Key_Cterm_605 | DEIIRKLDELLKEVEKVHKEVKDRIRKLLEDHKR |
| | ERIIDRNLKLIREILDELKKGSGSEEILEKIKKVDKEL | | SLDEVKKKLERLLERAKEVVEREKK (SEQ ID |
| | EDLIRRLLKKLEDLIRETERRLREILKRIRDILKEVKD | | NO: 27233) |
| | RDKDLERLLEVLEEVLRVIAELAKELLDSLRKVLKVVE | | |
| | EVLRLLNEVNKEVLDVIRELAKDGGSDEIIRKLDELLK | | |
| | EVEKVHKELKMSCAQESEDHKRSLDEVKKKLE (SEQ | | |
| | ID NO: 28213) | | |
| degronSwitch_cODC_3plus1_605_t8 | SREELLDRLLEALAKILEDLKRLIDENLARLEEVVREL | 3plus1_Key_Cterm_605 | DEIIRKLDELLKEVEKVHKEVKDRIRKLLEDHKR |
| | ERIIDRNLKLIREILDELKKGSGSEEILEKIKKVDKEL | | SLDEVKKKLERILERAKEVVEREKK (SEQ ID |
| | EDLIRRLLKKLEDLIPETERPLREILKPIRDLLKEVKD | | NO: 27233) |
| | RDKDLERLLEVLEEVLRVIAELAKELLDSLRKVLKVVE | | |
| | EVLPLLNEVNKEVLDVIRELAKDGGSDEIIRKLDELLK | | |
| | EVEKVHKEVKDRIRKILMSCAQESDEVKKKLEPLLERA | | |
| | K (SEQ ID NO: 28214) | | |
| degronSwitch_cODC_3plus1_605_t7 | SREELLDRILEALAKILEDLKPLIDENLARLEEVVREL | 3plus1_Key_Cterm_605 | DEIIRKLDELLKEVEKVHKEVKDRIRKLLEDHKR |
| | ERIIDRNLKLIREILDELKKGSGSEEILEKIKKVDKEL | | SLDEVKKKERLLERAKEVVEREKK (SEQ ID |
| | EDLIRRLLKKLEDLIRETERRLREILKRIRDLLKEVKD | | NO: 27233) |
| | PDKDLERLLEVLEEVLRVIAELAKELLDSLRKVLKVVE | | |
| | EVLRLLNEVNKEVLDVIRELAKDGGSDEIIRKLDELLK | | |
| | EVEKVHKEVKDRIRKLLEMSCAQESEVKKKLERLLERA | | |
| | KE (SEQ ID NO: 28215) | | |
| degronSwitch_cODC_3plus1_605_t4 | SREELLDRILEAIAKILEDLKRLIDENLARLEEVVREL | 3plus1_Key_Cterm_605 | DEIIRKLDELLKEVEKVHKEVKDRIRKLLEDHKR |
| | ERIIDPNIKLIREILDELKKGSGSEEILEKIKKVDKEL | | SLDEVKKKLERLLERAKEVVEREKK (SEQ ID |
| | EDLIRRLLKKLEDLIRETERRLREILKRIRDLLKEVKD | | NO: 27233) |
| | PDKDLERLLEVLEEVIRVIAELAKELLDSLPKVLKVVE | | |
| | EVLRLLNEVNKEVIDVIRELAKDCGSDETIRKIDELLK | | |
| | EVEKVHKEVKDRIPXLLEDLAMSCAQESKKLERLLERA | | |
| | KEVVE (SEQ ID NO: 28216) | | |
| degronSwitch_cODC_3plus1_605_t1 | SREEILDRILEAIAKILEDLKRLIDENLARLEEVVREL | 3plus1_Key_Cterm_605 | DEIIRKLDELLKEVEKVHKEVKDRIRKLLEDHKR |
| | ERIIDPNLKLIREILDELKKGSGSEEILEKIKKVDKEL | | SLDEVKKKLERLLERAKEVVEREKK (SEQ ID |
| | EDLIRRIIKKIEDLIRETERRLPEILKPIRDLIKEVKD | | NO: 27233) |
| | RDKDLERLIEVLEEVLRVIAELAKELLDSLPKVLKVVE | | |
| | EVLPLLNEVNKEVLDVIRELAKDGGSDETIRKLDELLK | | |
| | EVEKVHREVKDPIRKLLEDHKRLCMSCAQESERLLERA | | |
| | KEVVEREK (SEQ ID NO: 28217) | | |
| degronSwitch_cODC_3plus1_605_t0 | SREELLDPILEATAKILEDLKPLIDENLAPLEEVVREL | 3plus1_Key_Cterm_605 | DEIIRKLDELLKEVEKVHKEVKDRIRKLLEDHKR |
| | ERIIDPNLKLIREILDELKKGSGSEEILEKIKKVDKEL | | SLDEVKKKLERLLERAKEVVEREKK (SEQ ID |
| | EDLIRRLLKKLEDLIRETERRLREILKRIRDLLKEVKD | | NO: 27233) |
| | PDKDLERLLEVLEEVLPVIAELAKELLDSLRKVLKVVE | | |
| | EVLRLLNEVNKEVLDNIRELAKDGGSDEIIRKLDELLK | | |
| | EVEKVHEEVKDRIRKLLEDHKRSLDMSCAQESRLLERA | | |
| | KEVVEREKK (SEQ ID NO: 28218) | | |
| degronSwitch_cODC_3plus1_607_t11 | SEREELLERIKEILKRVKDKLDEDLKPLKEILEKLKEK | 3plus1_Key_Cterm_607 | SETAVRAIIRVLEKHLEAVRPVLEELLKVLAEHL |
| | ADRDLEELRRRIEEVREKLERTGRTDELVKEVLDTVRR | | ETVRELIEPLKRVLEEAIEVVERVAR (SEQ ID |
| | NLENLKRINEDILRKLEENVKNLTDLVREILKLITELI | | NO: 27235) |
| | KRLEDGGLPKEVLDALRRVLEKLEELLREILERLKRSL | | |
| | EAVKRKIEELLKELERSLDELRRALERIRKEIGDSETA | | |
| | VRAIIRVLEKHLEAVRRVLEELLMSCAQESETVRELIE | | |
| | RLKRVLE (SEQ ID NO: 28223) | | |
| degronSwitch_cODC_3plus1_607_t8 | SEREELLERIKEILKRVKDKLDEDIKRLKEILEKLKEK | 3plus1_Key_Cterm_607 | SETAVRAIIRVLEKHLEAVRRVLEELLKVLAEHL |
| | ADRDLEELRRRIEEVREKLERTGRTDELVKEVLDTVRR | | ETVRELIERLKRVLEEAIEVVERVAR (SEQ ID |
| | NLENLKRLVEDILRKLEENVKNLTDLVREILKLITELI | | NO: 27235) |
| | KRLEDGGLPKEVLDALRRVLEKLEELLREILERLKRSL | | |
| | EAVKRKIEELLKELERSLDELRRAIERIRKEIGDSETA | | |
| | VRAIIPVLEKHLEAVRRVLEELLKLQMSCAQESRELIE | | |
| | RLKRVLEEAI (SEQ ID NO: 28224) | | |
| degronSwitch_cODC_3plus1_607_t7 | SEREELLERIKEILKRVKDKLDEDIKRLKEILEKLKEK | 3plus1_Key_Cterm_607 | SETAVRAIIRVLEKHLEAVRRVLEELLKVLAEHL |
| | ADRDLEELRRRIEEVREKLERTGRTDELVKEVLDTVRR | | ETVRELIERLKRVLEEAIEVVERVAR (SEQ ID |
| | NLENLKPLVEDILRKLEENVKNLTDLVREILKLITELI | | NO: 27235) |
| | KRLEDGGLPKEVLDALPRVLEKLEELLREILERLKRSL | | |
| | EAVKRKIEELLKELEPSLDELRRALERIRKEIGDSETA | | |
| | VRAIIRVLEKBLEAVRRVLEELLKVLAMSCAQESELIE | | |
| | PLKRVLEEAIE (SEQ ID NO: 28225) | | |
| degronSwitch_cODC_3plus1_607_t4 | SEREELLERIKEILKRVKDKLDEDLKRLKEILEKLKEK | 3plus1_Key_Cterm_607 | SETAVRAIIPVLEKHLEAVRRVLEELLKVLAEHL |
| | ADRDLEELRRRIEEVREKLERTGRTDEINKEVLDTVRR | | ETVRELIERLKRVLEEAIEVVERVAR (SEQ ID |
| | NLENLKPLVEDILRKLEENVKNLTDLVREILKLITELI | | NO: 27235) |
| | KRLEDGGLPKEVLDALRRVLEKLEELLPEILERLKRSL | | |
| | EAVKRKIEELLKELEPSLDELPRALERIRKEIGDSETA | | |
| | VRAIIPVLEKHLEAVRRVLEELLKVLAELLMSCAQESE | | |
| | RLKRVLEEAIEVVE (SEQ ID NO: 28226) | | |
| degronSwitch_cODC_3plus1_607_t1 | SEREELLERIKETLKRVKDKLDEDLKPLKEILEKLKEK | 3plus1_Key_Cterm_607 | SETAVRAIIRVLEKHLEAVRRVLEELLKVLAEHL |
| | ADRDLEELRRRIEEVREKLERTGRTDELVKEVLDTVRR | | ETVRELIERLKRVLEEAIEVVERVAR (SEQ ID |
| | NLENLKPIVEDILRKLEENVKNLTDLVREILKLITELI | | NO: 27235) |
| | KRLEDGGLPKEVLDALPRVLEKLEELLREILEPLKKSL | | |
| | EAVKRKIEELLKELERSLDELPRALERIRKEIGDSETA | | |
| | VRAIIRVLEKHLEAVRRVLEELLKVLAEHLELVMSCAQ | | |
| | ESKRVLEEAIEVVERVA (SEQ ID NO: 28227) | | |
| degronSwitch_cODC_3plus1_607_t0 | SEREELLERIKEILKRVKDKLDEDLKKLKEILEKLKEK | 3plus1_Key_Cterm_607 | SETAVRAIIRVLEKHLEAVRRVLEELLKVLAEHL |
| | ADRDLEELRRRIEEVREKLERTGRTDELVKEVLDTVRR | | ETVRELIERLKRVLEEAIEVVERVAR (SEQ ID |
| | NLENLKRLVEDILRKLEENVKNLTDLVREILKLITELI | | NO: 27235) |
| | KRLEDGGLPKEVLDALRRVLEKLEELLREILERLKRSL | | |
| | EAVKRKIEELLKELERSLDELRRALERIRKEIGDSETA | | |
| | VRAIIRVLEKELEAVRRVLEELLKVLAEHLETLKMSCA | | |
| | QESRVLEEAIEVVERVAR (SEQ ID NO: 28228) | | |
| degronSwitch_cODC_3plus1_610_t1 | SLEEITKRLIELVEENLARKEEILRELLELAKRLAKED | 3plus1_Key_Cterm_610 | ERTLREVVRKVLEEAKRLLDELEEVHKRVKKELE |
| | RDILEEVLKLIEELLKLLEDNGSSEEDLKRLLKEVIEE | | DIIEENRPVVKPVRDELREIKRELDE (SEQ ID |
| | LRAVVKRVKDKWDEVVKRIEDLVKKLKELHDDTLRKLR | | NO: 27237) |
| | ELVRKIVTDISESGGEAEKVKRVVEKILELVERLAKVV | | |
| | KESVEKLLEILRELAEVSKRVARALLRLLEELVRVIRI | | |
| | KDERTZREVVRKVLEEAKRLLDELEEVHKRVKKELEDL | | |
| | IMSCAQESKRVRDELPEIKRELD (SEQ ID | | |
| | NO: 28237) | | |
| degronSwitch_cODC_3plus1_611_t1 | SLEEITKRLLELNEENLARHEEILRELLELAKRLAKED | 3plus1_Key_Cterm_611 | ERTLREVVRKVLEEAKRLILDELEEVHKRVKKELE |
| | RDILEEVLKIIEELLKLLEDNGSSEEDLKRLLKEVIEE | | DIIEENRRVVKRVRDELREIKRELDE (SEQ ID |
| | LRAVVKRVKDKWDEVVKRIEDLVKKLKELHDDTLRKLR | | NO: 27239) |
| | ELVRKIVTDISESGSEAEKVKRVVEKILELVERLAKVV | | |
| | KESVEKLLEILKELAEVSKRVAEALLRLLEELVRVIRI | | |
| | KDERTLREVVRKVLEEAKPLLDELEEVHKRVKKELEDL | | |
| | EMSCAQESKRVRDELREIKRELD (SEQ ID | | |
| | NO: 28238) | | |
| degronSwitch_cODC_3plus1_632_t15 | SEKELVDDIRRILEEILPLLRSLLEEVIRLLEENEKLV | 3plus1_Key_Cterm_632 | DSLVREVEELIKRLEKHKIDDLLKTSRDLVKRVLD |
| | RRHLKTVIDILRRVAKLLDENGIRTDEADRVLERLEKA | | LVDEVVKRVEDLVERVKEKIDT (SEQ ID |
| | HRELLEDYKRALEKIKETLERVLREAEEVVKKIDDALR | | NO: 27241) |
| | KLGGSKEVLKRLLEELLRLVEKIAEEIKRLLSELVRVT | | |
| | EELVRTNKELLEEAVRVIRKEVGDDSLVREVEELIKRL | | |
| | EKHLDMSCAQESDLATKRVLDLVDEVVK (SEQ ID | | |
| | NO: 28317) | | |
| degronSwitch_cODC_3plus1_632_t12 | SEKELVDDIRRILEEILRLLPSLLEEVIRLLEENEKLV | 3plus1 Key_Cterm_632 | DSLVREVEELIKPLEKKIDDLLKTSRDLVKRVLD |
| | RRHLYTVIDILRRVAKLLDENGIRTDEADRVLERLEKA | | LVDEVVKRVEDLVERVKEKIDT (SEQ ID |
| | HRELLEDYKRALEKIKETLERVLREAEEVVKKIDDALR | | NO: 27241) |
| | KLGGSKEVLKRLLEELLRLVEKIAEEIKRLLSELVRVT | | |
| | EELVRTNKELIEEAVRVIRKEVGDDSLVREVEELIKRL | | |
| | EKHIDDLLMSCAQESKRVLDLVDEVVKRVE (SEQ ID | | |
| | NO: 28318) | | |
| degronSwitch_cODC_3plus1_632_t8 | SEKELVDDIRRILEKLRPLLRSLLEEVIRLLEENEKLV | 3plus1_Key_Cterm_632 | DSLVREVEELIKRLEKHIDDLLKTSRDLVKRVLD |
| | RRHLKTVIDILRRVAKLLDENGIRTDEADRVLERLEKA | | LVDEVVKRVEDLVERVKEKIDT (SEQ ID |
| | HRELLEDYKRALEKIKETLERVLREAEEVVKKIDDALR | | NO: 27241) |
| | KLGGSKEVLKRLLEELLRLVEKIAEEIKRLLSELVRVT | | |
| | EELVRTNKELLEEAVRVIRKEVGDDSLVREVEELIKRL | | |
| | EKHIDDLLKTLRMSCAQESDLVDEVVKRVEDLVE | | |
| | (SEQ ID NO: 28319) | | |
| degronSwitch_cODC_3plus1_632_t5 | SEKELVDDIRRILEEILRLLRSLLEEVIRLLEENEKLV | 3plus1_Key_Cterm_632 | DSLVREVEELIKRLEKEIDDLLKTSRDLVKRVLD |
| | RRHLKTVIDILRRVAKLLDENGIRTDEADRVLERLEKA | | LVDEVVKRVEDLVERVKEKIDT (SEQ ID |
| | HRELLEDYKRALEKIKETLERVLREAEEVVKKIDDALR | | NO: 27241) |
| | KLGGSKEVLKRLLEELLRLVEKTAEEIKRLLSELVRVT | | |
| | EELVRTNKELLEKAVRVIRKEVGDDSLVREVEELIKRL | | |
| | EKHIDDLLKTSRDLVMSCAQESDEVVKRVEDLVERVK | | |
| | (SEQ ID NO: 28320) | | |
| degronSwitch_cODC_3plus1_632_t4 | SEKELVDDIRRILEEILRLLRSLLEEVIRLLEENEKLV | 3plus1_Key_Cterm_632 | DSLVREVEELIKRLEKHIDDLLKTSRDLVKRVLD |
| | RRHLKTVIDILRRVAKLLDENGIRTDEADRVLERLEKA | | LVDEVVKRVEDLVERVKEKIDT (SEQ ID |
| | HRELLEDYKPALEKIKETLERVLRENEEVVKKIDDALR | | NO: 27241) |
| | KLGGSKFVLKRLLEELLPLVEKTAEEIKRLLSELVRVT | | |
| | EELVRTNKELLEEAVRVIRKEVGDDSLVREVEELIKRL | | |
| | EKHIDDLLKTSRDLLKMSCAQESEVVYRVEDLVERVKE | | |
| | (SEQ ID NO: 28321) | | |
| degronSwitch_cODC_3plus1_632_t1 | SEKELVDDIRRILEEILRLLRSLLEEVIRLLEENEKLV | 3plus1_Key_Cterm_632 | DSLVREVEELIKRIEKHIDDLLKTSRDLVKRVLD |
| | RRHLKTVIDILRRVAKLLDENGIRTDEADRVLERLEKA | | LVDEVVKRVEDLVERVKEKIDT (SEQ ID |
| | HRELLEDYKRALEKIKETLERVDREAEZVVKKIDDALR | | NO: 27241) |
| | KLGGSKEVLKRLLEELLPLVEKIAEEIKRLDSELVRVT | | |
| | EELVRTNKELLEEAVRVIRKEVGDDSLVREVEELIKRL | | |
| | EKHIDDLLKTSRDLVKRLAMSCAQESKRVEDLVERVKE | | |
| | KID (SEQ ID NO: 28322) | | |
| degronSwitch_cODC_3plus1_641_t15 | DEVEELLKRVRELLKASEELVRKILEDVKRLLERSIEE | 3plus1_Key_Cterm_641 | EDLIRDVDRVLKEIMDLLRDLVRRTKELLEELLR |
| | VEDLLRKVEELLKRLLDLVERGGSLDEILRELVRLLKE | | LLEELVRAHKELVRSILDEIRK (SEQ ID |
| | IVRKVLELNPYLVEDVIRIAKRLLELNAESVKEWDRIL | | NO: 27243) |
| | KLLRDGTGDKEELLKDAEEALEKYERAVREILKELEEI | | |
| | IKEYVRPVEELLKELKDAVDKAKDEVRKGSGDEDLIRD | | |
| | VDRVLKEIMDLLMSCAQESELLEELLRLLEELVR | | |
| | (SEQ ID NO: 28358) | | |
| degronSwitch_cODC_3plus1_641_t4 | DEVEELLKRVRELLKASEELVRKILEDVKPLIERSIEE | 3plus1_Key_Cterm_641 | EDLIRDVDRVLKEIMDLLRDLVRRTKELLEELLR |
| | VEDLLRKVEELLKRLLDLVERGGSLDEILRELVRLLKE | | LLEELVRAHKELVRSILDEIRK (SEQ ID |
| | IVRKVLELNRKLVEDVIRIAKRLLELNAESVKEWDRIL | | NO: 27243) |
| | KLLRDGTGDKEELLKDAEEALEKYERAVREILKELEEI | | |
| | IKEYVRRVEELLKELKDAVDKAKDEVRKGSGDEDLIRD | | |
| | VDRVLKEIMDILRDLVRRTKELLEMSCAQESELVRAHK | | |
| | ELVRSILD (SEQ ID NO: 28359) | | |
| degronSwitch_cODC_3plus1_641_t1 | DEVEELLKPVRELLKASEELVRKILEDVKRLLERSIEE | 3plus1_Key_Cterm_641 | EDLIRDVDRVLKEIMDLLRDLVRRTKELLEELLR |
| | VEDLLRKVEELLKRLLDLVERGGSLDETDRELVRLLKE | | LLEEIVRAHKELVRSILDEIRK (SEQ ID |
| | IVRKVLELNRKLVEDVIRIAKRLLELNAESVKEWDRIL | | NO: 27243) |
| | KLLRDGTGDKEELLKDAEEALEKYERAVREILKELEEI | | |
| | IKEYVRFVEELLKELKDAVDKAKDEVRKGSGDEDLIRD | | |
| | VDRVLKEIMDLLRDLVRRTKELLEELLMSCAQESRAHK | | |
| | ELVRSILDEIR (SEQ ID NO: 28360) | | |
| degronSwitch_cODC_3plus1_646_t15 | DAEEVVKRLADVLRENDETIRKVVEDLVRIAEENDRLW | 3plus1_Key_Cterm_646 | EDVKRALEEINSRLRKLLEDVKKASEDIVREVER |
| | KKLVEDIAEILRRIVELLRRGGVPEELLDRLAKVVKSI | | IVRELAKRSDEILKKLEDIVEKLRE (SEQ ID |
| | VEKAEKILERLNRVSKAIAEKLKTIVDELNEVSKEIVK | | NO: 27245) |
| | RAEDILRKGKDKETVLRALRTLVKEYADLSKEVLERVE | | |
| | RIVREYVKLSDEVVKSLAEIVEELIRIIEDLLRKGNLD | | |
| | EDVKRNDEELVSRLRKLLEDLAMSCAQESREVERIVRE | | |
| | LAKRSD (SEQ ID NO: 28376) | | |
| degronSwitch_cODC_3plus1_646_t12 | DAEEVVERLADVDRENDETIRKVVEDLVRIAEENDRLW | 3plus1_Key_Cterm_646 | EDVKRALEELVSRLRKLLEDVKKASEDIVREVER |
| | KKLVEDIAEILRRIVELLRRGGVPEELLDRLAKVVKSI | | IVRELAKRSDEILKKEDIVEKLRE (SEQ ID |
| | VEKAEKILERLNRVSKAIAEKLKTIVDELNEVSKEIVK | | NO: 27245) |
| | RAEDILRKGKDKETVLRALRTLVKEYADLSKEVLERVE | | |
| | RIVREYVKLSDEVVKSLAEIVEELIRIIEDLLRKGNLD | | |
| | EDVKRALEELVSRLRKLLEDVKKLAMSCAQESERIVRE | | |
| | LAKRSDEIL (SEQ ID NO: 28377) | | |
| degronSwitch_cODC_3plus1_646_t8 | DAEEVVKRLADVLRENDETIRKVVEDLVRIAEENDRLW | 3plus1_Key_Cterm_646 | EDVNRALEELVSRLRKLLEDVKKASEDIVREVER |
| | KKLVEDIAEILRRIVELLRRGGVPEELLDRLAKVVKSI | | IVRELAKRSDEILKKLEDIVEKLRE (SEQ ID |
| | VEKAEKILERLNRVSKAIAEKLKTIVDELNEVSKEIVK | | NO: 27245) |
| | RAEDILRKGKDKETVLRALRTLVKEYADLSKEVLERVE | | |
| | RIVREYVKLSDEVVKSLAEIVEELIRIIEDLLPKGNLD | | |
| | EDVKRALEELVSRLRKLLEDVKKASEDLVMSCAQESRE | | |
| | LAKRSDEILKKLE (SEQ ID NO: 28378) | | |
| degronSwitch_cODC_3plus1_646_t5 | DAEEVVKRLADVLRENDETIRKVVEDLVRIAEENDRLW | 3plus1_Key_Cterm_646 | EDVKRALEELVSRLRKLLEDVKKASEDIVREVER |
| | KKLVEDIAEILRRIVELLRRGGVPEELLDRLAKVVKSI | | IVRELAKRSDEILKKLEDIVEKLRE (SEQ ID |
| | VEKAEKILERLNRVSKAIAEKLKTIVDELNEVSKEIVK | | NO: 27215) |
| | RAEDILRKGKDKETVLRALRTLVKEYADLSKEVLERVE | | |
| | RIVREYVKLSDEVVKSLAEIVEELIRIIEDLLRKGNLD | | |
| | EDVKRNLEELVSRLRKLLEDVKKASEDIVRLQMSCAQE | | |
| | SAKRSDEILKKLEDIV (SEQ ID NO: 28379) | | |
| degronSwitch_cODC_3plus1_646_t4 | DAEEVVKRLADVLRENDETIRKTVEDLVRIAEENDRLW | 3plus1_Key_Cterm_646 | EDVKRALEELVSRLRKLLEDVKKASEDIVREVER |
| | KKLVEDIAEILRRIVELLRRGGVREELLDRLAKVVKSI | | IVRELAKRSDEILKKLEDIVEKLRE (SEQ ID |
| | VEKAEKILERLNRVSKAIAEKLKTIVDELNEVSKEIVK | | NO: 27245) |
| | PAEDILRKGKDKETVLPALRTLVKEYADLSKEVLERVE | | |
| | RIVREYVKLSDEVVKSLAEIVEELIRIIEDLLRKGNLD | | |
| | EDVKRNLEELVSRLRKLLEDVKKASEDIVRELLMSCAQ | | |
| | ESKRSDEILKKLEDIVE (SEQ ID NO: 28380) | | |
| degronSwitch_cODC_3plus1_646_t1 | DAEEVVKRLADVLRENDETIRKVVEDLVRIAEENDRLW | 3plus1_Key_Cterm_646 | EDVKRNLEELVSRLRKLLEDVKKASEDIVREVER |
| | KKLVEDIAEILRRIVELLRRGGVPEELLDRLAKVVKSI | | IVRELAKRSDEILKKLEDIVEKLRE (SEQ ID |
| | VEKAEKILERLNRVSKAIAEKLKTIVDELNEVSKEIVK | | NO: 27245) |
| | RAEDILRKGKDKETVLRNLRTLVKEYADLSKEVLERVE | | |
| | RIVREYVKLSDEVVKSLNEIVEELIRIIEDLLRKGNLD | | |
| | EDVKRALEELVSRLRKLLEDVKKNSEDIVREVERLVMS | | |
| | CAQESDEILKKLEDIVEKLR (SEQ ID NO: 28381) | | |
| degronSwitch_cODC_3plus1_647_t15 | DAEEVVKRLADVLRENDETIRKTVEDLVRIAEENDRLW | 3plus1_Key_Cterm_647 | EDVKRALEELVSRLRKLLEDVKKASEDIVREVER |
| | KKLVEDIARILRRIVELLRRGGVPEELLDRLAKVVKSI | | IVRELAKRSDEILKKLEDIVEKLRE (SEQ ID |
| | VEKAEKTITRLNRVSKAIAEKLKTIVDELNEVSKEIVK | | NO: 27251) |
| | RAEDILRKGKDKETVLRALRTLVKEYADLSKEVLERVE | | |
| | RIVREYVKLSDEVVKSLAEIVEELIRIIEDLLRKGNLD | | |
| | EDVKRALEELVSRLRKLLEDLRMSCAQESREVERIVRE | | |
| | LAKRSD (SEQ ID NO: 28382) | | |
| degronSwitch_cODC_3plus1_647_t12 | DAEEVVKRLADVLRENDETIRKVVEDLVRIAEENDRLW | 3plus1_Key_Cterm_647 | EDVKRALEELVSRLRKLLEDVKKASEDIVREVER |
| | KKLVEDIAEILRRIVELLRRGGVPEELLDRLAKVVKSI | | IVRELAKRSDEILKKLEDIVEKLRE (SEQ ID |
| | VEKAEKILERLNRVSKAIAEKLKTIVDELNEVSKEIVK | | NO: 27251) |
| | RAEDILRKGKDKETVLRALRTLVKEYADLSKEVLERVE | | |
| | RIVREYVKLSDEVVKSLAEIVEELIRIIEDLLRKGNLD | | |
| | EDVKRALEELVSRLRKLLEDVKKLSMSCAQESERIVRE | | |
| | LNKRSDEIL (SEQ ID NO: 28383) | | |
| degronSwitch_cODC_3plus1_647_t11 | DAEEVVKRLADVLRENDETIRKVVEDLVRIAEENDRLW | 3plus1_Key_Cterm_647 | EDVKRNLEELVSRLRKLLEDVKKNSEDIVREVER |
| | KKLVEDIAEILRRIVELLRRGGVPEELLDRLAKVVKSI | | IVRELAKRSDEILKKLEDIVEKLRE (SEQ ID |
| | VEKAEKILERLNRVSKAIAEKLKTIVDELNEVSKEIVK | | NO: 27251) |
| | RAEDILRKGKDKETVLRALRTLVKEYADLSKEVLERVE | | |
| | RIVREYVKLSDEVVKSLAEIVEELIRIIEDLLPKGNLD | | |
| | EDVKRALEELVSRLRKLLEDVKKALKMSCAQESRIVRE | | |
| | LAKRSDEILK (SEQ ID ND:28384) | | |
| degronSwitch_cODC_3plus1_647_t8 | DAEEVVKRLADVLRENDETIRKVVEDLVRIAEENDRLW | 3plus1_Key_Cterm_647 | EDVKRALEELVSRLRKLLEDVKKASEDIVREVER |
| | KKLVEDIAEILRRIVELLRRGGVPEELLDRLAKVVKSI | | IVRELAKRSDEILKKLEDIVEKLRE (SEQ ID |
| | VEKAEKILERLNRVSKAIAEKLKTIVDELNEVSKEIVK | | NO: 27251) |
| | RAEDILRKGKDKETVLRALRTLVKEYADLSKEVLERVE | | |
| | RIVREYVKISDEVVKSLAEIVEELIRIIEDLLRKGNLD | | |
| | EDVKRALEELVSRLRKLLEDVKKASEDLVMSCAQESRE | | |
| | LAKRSDEILKKLE (SEQ ID NO: 28385) | | |
| degronSwitch_cODC_3plus1_647_t5 | DAEEVVERLADVLRENDETIRKVVEDLVRIAEENDRLW | 3plus1_Key_Cterm_647 | EDVKRALEELVSRLRKLLEDVKKASEDIVREVER |
| | KKLVEDIAEILRRIVELLRRGGVPEELLDRLAKVVKSI | | IVRELAKRSDEILKKLEDIVEKLRE (SEQ ID |
| | VEKAEKILERLNRVSKAIAEKLKTIVDELNEVSKEIVK | | NO: 27251) |
| | RAEDILRKGKDKETVLRALRTLVKEYADLSKEVLERVE | | |
| | RIVREYVKLSDEVVESLAEIVEELIRIIEDLIRKGNLD | | |
| | EDVKRAIEEWSELRKLLEDVKKASEDIVRINMSCAQE | | |
| | SAKESDEILKKLEDIV (SEQ ID NO: 28386) | | |
| degronSwitch_cODC_3plus1_647_t4 | DAEEVVKRLADVLRENDETIRKVVEDLVRIAEEVDRLW | 3pLusl_Key_Cterm_647 | EDVKRALEELVSRLRKLLEDVKKASEDIVREVER |
| | KKLVEDIAEILRRIVELLRRGGVPEELLDRLAKVVKSI | | IVRELAKRSDEILKKLEDIVEKLRE (SEQ ID |
| | VEKAEKILERLNRVSKAIAEKLKTIVDELNEVSKEIVK | | NO: 27251) |
| | RAEDILRKGKDKETVLRALPTLVKEYADLSKEVLERVE | | |
| | RIVREYVKISDEVVKSLNEIVEELIRIIEDLLRKGNLD | | |
| | EDVKRALEELVSRLRKLLEDVKKASEDIVRELQMSCAQ | | |
| | ESKRSDEIDKKLEDIVE (SEQ ID NO: 28387) | | |
| degronSwitch_cODC_3plus1_647_t1 | DAEEVVKRLADVLRENDETIRKVVEDLVRIAEENDRLW | 3plus1_Key_Cterm_647 | EDVKRALEELVSRLRKLLEDVKKASEDIVREVER |
| | KELVEDIAEILRRIVELLRRGGVPEELLDRLAKVVKSI | | IVRELAKRSDEILKKLEDIVEKLRE (SEQ ID |
| | VEKAEKILEPLNRVSKAIAEKLKTIVDELNEVSKEIVK | | NO: 21251) |
| | RAEDILRKGKDKETVLPALPTLVKEYADLSKEVLERVE | | |
| | RIVREYVKLSDEVVKSLAEIVEELIRIIEDLLRKGNLD | | |
| | EDVKRALEELVSRLRKLLEDVKKASEDIVREVERLVMS | | |
| | CAQESDEILKKLEDIVEKLR (SEQ ID NO: 28388) | | |
| degronSwitch_cODC_3plus1_653_t15 | DEEETLRELLERKVELAKEYLDVSKEVIDPTTKLLDEY | 3plus1_Key_Cterm_653 | SREALEEARRRLEELLRELNEITKDLEAKLEKLL |
| | LKTSKRIVDATVELLERGDLGPDELIKRLAEELERSLR | | PDLNELTKALEEELKRLLDELKKRTD (SEQ ID |
| | ELEEEIKRLKRELEESLKKLKEIIDRLAEKAEKLLAVL | | NO: 27257) |
| | KRGEGSEEEALRALASLVRELIEVLRENDERLPDVLRR | | |
| | LIEALRKNNEILERVLRKLVRAAEERGRDESSREALEE | | |
| | ARRRLEELLBELNELAMSCAQESEKLLRDLNELTKALE | | |
| | (SEQ ID NO: 28410) | | |
| degronSwitch_cODC_3plus1_653_t11 | DEEETLRRLLERKVELAKEYLDVSKEVIDRTTYLLDEY | 3plus1_Key_Cterm_653 | SREALEEARRRLEELLRELNEITKDLEAKLEKLL |
| | LKTSKRIVDATVELLERGDLGPDELIKRLAEELERSLR | | RDLNELTKALEEELKRLLDELKKRTD (SEQ ID |
| | ELEEEIKRLKRELEESIKKLKEIIDRLAELAEKLLAVL | | NO: 27257) |
| | KRGEGSEERALRALASLVRELIEVLRENDERLRDVLRR | | |
| | LIEALRKNNEILERVLRKLVRAAEERGRDESSREALEE | | |
| | ARRRLEELLRELNEITKDLEMSCAQESRDLNELTKALE | | |
| | EELK (SEQ TD NO: 28411) | | |
| degronSwitch_cODC_3plus1_653_t8 | DEEETLRRLLERKVELAKEYLDVSKEVIDPTTKLLDEY | 3plus1_Key_Cterm_653 | SREALEEARRRLEELLRELNEITKDLEAKLEKLL |
| | LKTSKRIVDATVELLERGDLGPDELIKRLNEELERSLR | | RDLNELTKALEEELKRLLDELKKRTD (SEQ ID |
| | ELEEEIKRLKRELEESLKKLKEIIDRIAEEAEKLLAVL | | NO: 27257) |
| | KRGEGSEEEALRNLASLVRELIEVLRENDERLRDVLRR | | |
| | LIEALRKNNEILERVLRKLVRAAEEPGRDESSREALEE | | |
| | ARRRLEELIRELNEITKDLEALMMSCAQESNELTKALE | | |
| | EELKRLL (SEQ ID NO: 28412) | | |
| degronSwitch_cODC_3plus1_653_t4 | DEEETLRRLIERKVELAKEYLDVSKEVIDRTTKLLDEY | 3plus1_Key_Cterm_653 | SREALEEARRRLEELLPELNEITKDLEAKLEKLL |
| | LKTSKRIVDATVELLEPGDLGPDELTKRLAEELEPSLR | | RDLNELTKALEEELKRLLDELKKRTD (SEQ ID |
| | ELEEEIKRLKEELEESLKKLKEIIDPLAERAEKLLAVL | | NO: 27257) |
| | KRGEGSEEEALRALASLVRELIEVLRENDERLRDVLRR | | |
| | LIEALRKNNEILERVLRKLVRAAEERGRDESSREALEE | | |
| | ARRRLEELLRELNEITKDLEAKLEKLLMSCAQESKALE | | |
| | EELKRLLDELK (SEQ ID NO: 28413) | | |
| degronSwitch_cODC_3plus1_653_t1 | DEEETLRRLLERKVELAKEYLDVSKEVIDRTTKLLDEY | 3plus1_Key_Cterm_653 | SREALEEARRRLEELLRELNEITKDLEAKLEKLL |
| | LKTSKRIVDATVELLERGDLGPDELIKRLAEELERSLR | | RDLNELTKALEEELKRLLDELKKRTD (SEQ ID |
| | ELEEEIKPIKRELEESLKKLKEIIDPLAEEAEKLLAVL | | NO: 27257) |
| | KRGEGSEERALRALASLVRELIEVLRENDERLPDVLRR | | |
| | LIEALRKNNEILERVLRKLVRAAEERGRDESSREALEE | | |
| | ARRRLEELLKELNEITKDLEAKLEKLLRLLMSCAQESE | | |
| | EELKRLLDELKKRT (SEQ ID NO: 28414) | | |
| degronSwitch_cODC_3plus1_653_t0 | DEEETLRRLLERKVELAKEYLDVSKEVIDRTTKLLDEY | 3plus1_Key_Cterm_653 | SREALEEARRRLEELLRELNEITKELEAKLEKLL |
| | LKTSKRIVDATVELLEPGDLGPDELIKRLAEELERSLR | | RDLNELTKALEEELKRLLDELKKRTD (SEQ ID |
| | ELEEEIKPIKRELEESLKKLKEIIDRDAEEAEKLLAVL | | NO: 27257) |
| | KRGEGSEEEALRALASLVRELIEVLRENDEPLRDVLRR | | |
| | LIEALRKNNEILERVLRKIVRAAEERGRDESSREALEE | | |
| | ARRRLEELLRELNEITKDLEAKLEKLLRDLAMSCAQES | | |
| | EELKRLLDELKKRTD (SEQ ID NO: 28415) | | |
| degronSwitch_cODC_3plus1_658_t15 | DEERIIKTLEDINAKLVEDIKRILDKVAELNERLADAI | 3plus1_Key_Cterm_658 | KDTLRTVEKLVEDVKPRLDKLLEDYKRLIEEVKK |
| | RKILEETKRILEATTRKVRKDGEISEELLPPLEEKLRK | | ELDKLLKEYEDALREIKKRIDE (SEQ ID |
| | LLEDLEPVLAENEDESRRILEEVEPLLKRHADASKELL | | NO: 27259) |
| | DRARSVARGVKSDKELVDPIKKLIDDSLESVRELIERL | | |
| | KELLDPLVKSVEDLIRTIKELLDPLVEVLREGVSDKDT | | |
| | LRTVEKLVEDVKRRLDMSCAQESRLIEEVKKELDKLLK | | |
| | (SEQ ID NO: 28427) | | |
| degronSwitch_cODC_3plus1_658_t12 | DEERIIKTLEDINAKLVEDIKRILDKVAELNERLADAI | 3plus1_Key_Cterm_658 | KDTLRTVEKLVEDVKRRLDKLLEDYKRLIEEVKK |
| | RKILEETKRILEATTPKVRKDOEISEELLRRLEEKLRK | | ELDKLLKEYEDALREIKKRIDE (SEQ ID |
| | LLEDLERVLAENEDESRRILEEVERLLKREADASKELL | | NO: 27259) |
| | DRARSVAROVKSDKELVDRLKKLIDDSLESVRELIERL | | |
| | KELLDRLVKSVEDLIRTIKELLDRLVEVLREGVSDKDT | | |
| | LRTVEKLVEDVKRRLDKLGMSCAQESEEVKKEIDKLLK | | |
| | EYE (SEQ ID NO: 28428) | | |
| degronSwitch_cODC_3plus1_658_t8 | DEERIIKTLEDINAKLVEDIKRILDKVAELNERLADAI | 3plus1_Key_Cterm_658 | KDTLRTVEKLVEDVKRRLDKLLEDYKRLIEEVKK |
| | RKILEETKRILEATTRKVRKDGEISEELLRRLEEKLRK | | ELDKLLKEYEDALREIKKRIDE (SEQ ID |
| | LLEDLERVLAEHEDESRRILEEVERLLKRHADASKELL | | NO: 27259) |
| | DRARSVARGVKSDKELVDRLKKLIDDSLESVRELIERL | | |
| | KELLDRLVKSVEDLIRTIKELLDRLVEVLREGVSDKDT | | |
| | LRTVEKLVEDVKRRIDKLLEDLKMSCAQESKELDKLLK | | |
| | EYEDALR (SEQ ID NO: 28429) | | |
| degronSwitch_cODC_3plus1_658_t5 | DEERIIKTLEDINAKLVEDIKRILDKVAELNERLADAI | 3plus1_Key_Cterm_658 | KDTLRTVEKLVEDVKRRLDKLLEDYKRLIEEVKK |
| | RKILEETKRILEATTRKVRKDGEISEELLRRLEEKLRK | | ELDKLLKEYEDALREIKKRIDE (SEQ ID |
| | LLEDLERVLAEHEDESRRILEEVERLLKRHADASKELL | | NO: 27259) |
| | DRARSVAROVKSDKELVDREKKLIDDSLESVRELIERL | | |
| | KELLDRLVKSVEDLIRTIKELLDRLVEVLREGVSDKDT | | |
| | LRTVEKLVEDVKRRLDKLLEDYKRLMMSCAQESDKLLK | | |
| | EYEDALREIK (SEQ ID NO: 28430) | | |
| degronSwitch_cODC_3plus1_658_t1 | DEERIIKTLEDINAKLVEDIKRILDKVAELNERLADAI | 3plus1_Key_Cterm_658 | KDTLRTVEKIVEDVKRRLDKLLEDYKRLIEEVKK |
| | RKILEETKRILEATTRKVRKDGEISEELLRRLEEKLRK | | ELDKLLKEYEDALREIKKPIDE (SEQ ID |
| | LLEDLERVLAEHEDESRRILEEVERLLKRNADASKELL | | NO: 27259) |
| | DRARSVARGVKSDKELVDRLKKLIDDSLESVRELIERL | | |
| | KELLDRLVKSVEDLIPTIKELLDRLVEVLREGVSDKDT | | |
| | LRTVEKLVEDVKRRLDKLLEDYKRLIEELKMSCAQESK | | |
| | EYEDALREIKKRID (SEQ ID NO: 28431) | | |
| degronSwitch_cODC_3plus1_660_t15 | TEEEVVEDVKRVLDESHDDLRRLIETLTRVLRESLKRI | 3plus1_Key_Cterm_660 | REEVKRVLEEARDELRRLLEEYKAIIEELERELE |
| | KEALEELERVLKKLLDLLEGGRDAREVLDEIRKVLERL | | RLLREHREVIRRIKEEIDKSSK (SEQ ID |
| | REVIEELLRINKEVLRELERVIRELLKKNEDLARRVRS | | NO: 27261) |
| | GVKSRLLEVLERLARESLELNRAILEELRKIVEKSLRA | | |
| | VEKILKRLEEIVRKLLKLVEDGGPREEVKRVLEEARDE | | |
| | LRRLLMSCAESEELERELERLIREHR (SEQ ID | | |
| | NO: 28437) | | |
| degronSwitch_cODC_3plus1_660_t11 | TEEEVVEDVKRVLDESHDDLRRLIETLTRVLRESLKRI | 3plus1_Key_Cterm_660 | REEVKRVLEEARDELRRLLEEYKAIIEELERELE |
| | KEALEELERVLKKLLDLLEGGRDAREVLDEIRKVLERL | | RLLREHREVIRRIKEEIDKSSK (SEQ ID |
| | REVIEELLRINKEVLRELERVIRELLKKNEDLARRVRS | | NO: 27261) |
| | GVKSRLLEVLERLARESLELNRAILEELRKINEKSLRA | | |
| | VEKILKRLEEIVRKLLKLVEDGGPREEVKRVLEEARDE | | |
| | LRRLLEELKMSCAQESRELERLLREHREVIR (SEQ | | |
| | ID NO: 28438) | | |
| degronSwitch_cODC_3plus1_660_t8 | TEEEVVEDVKRVLDESHDDLRRLIETLTRVLRESLKRI | 3plus1_Key_Cterm_660 | REEVKRVLEEARDELRRLLEEYKAIIEELERELE |
| | KEALEELERVLKKLLDLLEGGRDAREVLDEIRKVLERL | | RLLREHREVIRRIKEEIDKSSK (SEQ ID |
| | REVIEELLRINKEVLRELERVIRELLKKNEDLARRVRS | | NO: 27261) |
| | GVKSRLLEVLERLARESLELNRAILEELRKLVEKSLRA | | |
| | VEKILKRLEEIVRKLLKLVEDGGPREEVKRVLEEARDE | | |
| | LRRLLEEYKALVMSCAQESERLLREHREVIRRIK | | |
| | (SEQ ID NO: 28439) | | |
| degronSwitch_cODC_3plus1_660_t1 | TEEEVVEDVKRVLDESHD)LRRLIETLIRVLPESLKRI | 3plus1_Key_Cterm_660 | REEVKRVIEEARDELRRLLEEYKAIIEELERELE |
| | KEALEELERVLKKLLDLLEGGRDAREVLDEIRKVLERL | | RLLREHREVIRRIKEEIDKSSK (SEQ ID |
| | REVIEELLRINKEVLRELERVIRELLKKNEDIARRVRS | | NO: 27261) |
| | GVKSRLLEVLERLARESLELNPAILEELRKLVEKSLRA | | |
| | VEKILKRLEEIVRKLLKINEDGGPREEVKPVLEEARDE | | |
| | LRRLLEEYKAIIEELERLLMSCAQESREVIRRIKEEID | | |
| | KSS (SEQ ID NO: 28440) | | |

[0179] In some aspects, the polypeptide of the present disclosure further comprises one or more signaling proteins, e.g., input-receiving member, intermediate member, and/or output producing member, of a signaling pathway. As used herein, the term “signaling protein” generally refers to a protein of a signaling pathway, including natural and synthetic signaling pathways, described in more detail below. Any convenient and appropriate signaling protein of any convenient signaling pathway can be employed. Generally, signaling proteins include proteins that can be activated by an input of the signaling pathway with which the signaling protein is associated. A signaling pathway can generate an output that is dependent upon, or at least influenced by, the function of the signaling protein. Such outputs can be a direct or indirect result of the response of the signaling protein to the input. Useful signaling proteins include members from any convenient and appropriate point a signaling pathway, including input-receiving members, intermediate members, and output-producing members. By “input-receiving members”, as used herein, is generally meant the initial component of a signaling pathway that receives an input to initiate signaling along the pathway. Examples of input-receiving members include but are not limited to e.g., extracellular receptors (e.g., G protein-coupled receptors, protein kinases, integrins, toll-like receptors, ligand-gated ion channels, and the like) and intracellular receptors (e.g., nuclear receptors, cytoplasmic receptors, etc.). In some aspects, an input-receiving member can be a protein that directly binds an input of a signaling pathway, such as a ligand input of a signaling pathway. In some aspects, a signaling protein that includes a degron in a cage polypeptide of the present disclosure can be an input-receiving member. In some aspects, a signaling protein that includes a a degron in a cage polypeptide in a polypeptide of the present disclosure cannot be an input-receiving member, e.g., it can be an intermediate member or an output-producing member.

[0180] By “intermediate member”, as used herein, is generally meant a component of a signaling pathway that is required for, or at least involved in, signal transduction but does not directly receive the initial input or directly produce or cause the final output of the signaling pathway. Examples of intermediate members of a signaling pathway include but are not limited to e.g., enzymes, binding partners, protein complex subunits, scaffold proteins, transport proteins, co-activators, co-repressors, and the like. In some aspects, a signaling protein that includes a degron in a cage poly peptide of the present disclosure can be an intermediate member. In some aspects, a signaling protein that includes a degron in a cage polypeptide of the present disclosure cannot be an intermediate member, e.g., it can be an input-receiving member or an output-producing member.

[0181] By “output-producing member”, as used herein, is generally meant a component of a. signaling pathway that directly produces an output of the signaling pathway or otherwise causes the output of the signaling pathway to occur. Examples of output-producing members of a signaling pathway include but are not limited to e.g., DNA binding proteins, such as e.g., transcription factors, enzymes, and the like. In some aspects, a signaling protein that includes a degron in a cage polypeptide of the present disclosure can be an output-producing member. In some aspects, a signaling protein that includes a degron in a cage polypeptide of the present disclosure cannot be an output-producing member, e.g., it can be an input-receiving member or an intermediate member.

[0182] As summarized above, various signaling pathways, including native and synthetic signaling pathways can be modulated using the herein described molecular circuits. Suitable signaling pathways include those that are modulated (e.g., activated, repressed, etc.) by one or more inputs to produce one or more outputs. Inputs and outputs of signaling pathways can vary and can include endogenous (e.g., native) inputs or outputs of signaling pathways and heterologous (e.g., engineered or synthetic) signaling pathway inputs and outputs. In some aspects, an input of a signaling pathway relevant to a polypeptide of the present disclosure can include an intracellular signal, including e.g., where the output of the pathway can be intracellular or intercellular. In some aspects, an output of a signaling pathway relevant to a polypeptide of the present disclosure can include an intracellular signal, including e.g., where the input of the pathway can be intracellular or intercellular. In some aspects, an input of a signaling pathway relevant to a polypeptide of the present disclosure can include an intercellular signal, including e.g., where the output of the pathway can be intracellular or intercellular. In some aspects, an output of a signaling pathway relevant to a polypeptide of the present disclosure can include an intercellular signal, including e.g., where the input of the pathway can be intracellular or intercellular.

[0183] In some aspects, both the input and the output of a signaling pathway relevant to a polypeptide of the present disclosure can include intracellular signals. In some aspects, both the input and the output of a signaling pathway relevant to a polypeptide of the present disclosure can include intercellular signals.

[0184] Suitable non-limiting examples of native signaling pathways that can be modulated using a polypeptide of the present disclosure include but are not limited to e.g., the AKT signaling pathway, the Akt/PKB signaling pathway, the AMPK signaling pathway, the apoptosis signaling pathway, the BMP signaling pathway, the cAMP-dependent pathway, the estrogen signaling pathway, the hedgehog signaling pathway, the hippo signaling pathway, an immune activation pathway, an immune suppression pathway, an immune cell differentiation pathway, an insulin signal transduction pathway, the JAK-STAT signaling pathway, the MAPK/ERK signaling pathway, the mTOR signaling pathway, the NF-B signaling pathway, the nodal signaling pathway, the notch signaling pathway, the p53 signaling pathway, the PI3K signaling pathway, the TGF beta signaling pathway, the TLR signaling pathway, the TNF signaling pathway, the VEGF signaling pathway, the Wnt signaling pathway, and the like.

[0185] Suitable non-limiting examples of pathways, the components of which can be modified to include a degron in a cage polypeptide as described herein, also include those PANTHER (Protein Analysis THrough Evolutionary Relationships) pathways described as part of the Gene Ontology Phylogenetic Annotation Project, descriptions of which (including descriptions of the components of such pathways) are available online at www(dot)pantherdb(dot)org. Nonlimiting examples include 2-arachidonoylglycerol biosynthesis, the 5HT1 type receptor mediated signaling pathway, the 5HT2 type receptor mediated signaling pathway, the 5HT3 type receptor mediated signaling pathway, the 5HT4 type receptor mediated signaling pathway, 5-Hydroxytryptamine biosynthesis, 5-Hydroxytryptamine degredation, Acetate utilization, the Activin beta signaling pathway, the Adenine and hypoxanthine salvage pathway, Adrenaline and noradrenaline biosynthesis, Alanine biosynthesis, Allantoin degradation, the ALP23B signaling pathway, the Alpha adrenergic receptor signaling pathway, the Alzheimer diseaseamyloid secretase pathway, the Alzheimer disease-presenilin pathway, Aminobutyrate degradation, Anandamide biosynthesis. Anandamide degradation, Androgen/estrogene/progesterone biosynthesis, the Angiogenesis pathway, Angiotensin Ilstimulated signaling through G proteins and beta-arrestin, the Apoptosis signaling pathway, Arginine biosynthesis, Ascorbate degradation, Asparagine and aspartate biosynthesis, ATP synthesis, Axon guidance mediated by netrin, Axon guidance mediated by semaphorins, Axon guidance mediated by Slit/Robo, the B cell activation pathway, the Betal adrenergic receptor signaling pathway, the Beta2 adrenergic receptor signaling pathway, the Beta3 adrenergic receptor signaling pathway, Biotin biosynthesis, Blood coagulation, the BMP/activin signaling pathway. Bupropion degradation, the Cadherin signaling pathway, Coenzyme A linked carnitine metabolism, Carnitine metabolism, CCKR signaling, the Cell cycle, Cholesterol biosynthesis, Chorismate biosynthesis, Circadian clock system, Cobalamin biosynthesis, Coenzyme A biosynthesis, the Cortocotropin releasing factor receptor signaling pathway, Cysteine biosynthesis, Cytoskeletal regulation by Rho GTPase. De novo purine biosynthesis. De novo pyrimidine deoxyribonucleotide biosynthesis, De novo pyrimidine ribonucleotides biosythesis, DNA replication, the Dopamine receptor mediated signaling pathway, the DPP-SCW signaling pathway, the DPP signaling pathway, the EGF receptor signaling pathway, the Endogenous cannabinoid signaling, the Endothelin signaling pathway, Enkephalin release, the FAS signaling pathway, the FGF signaling pathway, Flavin biosynthesis, Tetrahvdrofolate biosynthesis, Formyltetrahydroformate biosynthesis, Fructose galactose metabolism, GABA-B receptor II signaling, Gamma-aminobutyric acid synthesis, the GBB signaling pathway, General transcription by RNA polymerase I, General transcription regulation, Glutamine glutamate conversion, Glycolysis, the Gonadotropin-releasing hormone receptor pathway, the Hedgehog signaling pathway, Heme biosynthesis, the Heterotrimeric G-protein signaling pathway-Gi alpha and Gs alpha mediated pathway, the Heterotrimeric G-protein signaling pathway-Gq alpha and Go alpha mediated pathway, Heterotrimeric G-protein signaling pathway-rod outer segment phototransduction, the Histamine H1 receptor mediated signaling pathway the Histamine H2 receptor mediated signaling pathway, Histamine synthesis, Histidine biosynthesis, the Hinitington disease pathway, Hypoxia response via HIF activation, the Inflammation mediated by chemokine and cytokine signaling pathway, Insulin/IGF pathway-mitogen activated protein kinase kinase/MAP kinase cascade, Insulin/IGF pathway-protein kinase B signaling cascade, the lntegrin signalling pathway, the Interferon-gamma signaling pathway, the Interleukin signaling pathway, the lonotropic glutamate receptor pathway, isoleucine biosynthesis, the JAK/STAT signaling pathway, Leucine biosynthesis, Lipoate_biosynthesis, Lysine biosynthesis, Mannose metabolism, the Metabotropic glutamate receptor group III pathway, the Metabotropic glutamate receptor group II pathway, the Metabotropic glutamate receptor group I pathway, Methionine biosynthesis, Methylcitrate cycle, the Methylmalonvl pathway, mRNA splicing, the Muscarinic acetylcholine receptor 1 and 3 signaling pathway, the Muscarinic acetylcholine receptor 2 and 4 signaling pathway, the MYO signaling pathway, N-acetylglucosamine metabolism, Nicotine degradation, the Nicotine pharmacodynamics pathway, the Nicotinic acetylcholine receptor signaling pathway, the Notch signaling pathway, O-antigen biosynthesis, the Opioid prodynorphin pathway, the Opioid proenkephalin pathway, the Opioid proopiomelanocortin pathway, Omithine degradation, Oxidative stress response, the Oxytocin receptor mediated signaling pathway, the p38 MAPK pathway, the p53 pathway, p53 pathway by glucose deprivation. Pantothenate biosynthesis, Parkinson disease, the PDGF signaling pathway, the Pentose phosphate pathway, Peptidoglycan biosynthesis, Phenylacetate degradation, Phenylalanine biosynthesis, Phenylethylamine degradation, Phenylpropionate degradation, the PI3 kinase pathway, Plasminogen activating cascade, Pyridoxal-5-phosphate biosynthesis, Proline biosynthesis, PRPP biosynthesis, Purine metabolism, the Pyridoxal phosphate salvage pathway, Pyrimidine Metabolism, Pyruvate metabolism, the Ras Pathway. S-adenosylmethionine biosynthesis, Salvage pyrimidine deoxyribonucleotides, Salvage pyrimidine ribonucleotides, the SCW signaling pathway, Serine glycine biosynthesis, Succinate to proprionate conversion, Sulfate assimilation, Synaptic vesicle trafficking, TCA cycle, the T cell activation pathway, the TGF-beta signaling pathway, Thiamin biosynthesis, Thiamin metabolism, Threonine biosynthesis, the Thyrotropin-releasing hormone receptor signaling pathway, the Toll pathway, the Toll receptor signaling pathway, Transcription regulation by bZIP transcription factor, Triacylglycerol metabolism, Tryptophan biosynthesis, Tyrosine biosynthesis, the Ubiquitin proteasome pathway, Valine biosynthesis, Vasopressin synthesis, the VEGF signaling pathway, Vitamin B6 biosynthesis, Vitamin B6 metabolism, the Vitamin D metabolism and pathway, the Wnt signaling pathway, the Xanthine and guanine salvage pathway, and the like.

[0186] Further non-limiting examples of signaling pathways, and description thereof, include the following: AKT Signaling Pathway (AKT is a serine/threonine kinase that is involved in mediating various biological responses, such as inhibition of apoptosis), Angiopoietin-TIE2 Signaling (The angiopoietins are a new family of growth factor ligands that bind to TIE2/TEK RTK (Receptor Tyrosine Kinase)), Antigen Processing and Presentation by MHCs (Antigen processing and presentation are the processes that result in association of proteins with major histocompatibility complex (MHC) molecules for recognition by a T-cell), Apoptosis Through Death Receptors (Certain cells have unique sensors, termed death receptors (DRs), which detect the presence of extracellular death signals and rapidly ignite the cell's intrinsic apoptosis machinery), APRIL Pathway (In immune responses, APRIL acts as a co-stimulator for B-cell and T-cell proliferation and supports class switch), B-Cell Development Pathway (The B-cell receptor (BCR) complex usually consists of an antigen-binding subunit that is composed of two Ig heavy chains, two Ig light chains, and a signaling subunit), BMP Pathway (Bone morphogenetic proteins (BMPs) are a large subclass of the transforming growth factor-beta (TGF-beta) superfamily), Cancer Immunoediting (The immune system attempts to constrain tumor growth, but sometimes tumor cells might escape or attenuate this immune pressure), CCR5 Pathway in Macrophages (C-C motif chemokine receptor type 5 (CCR5) is a member of the chemokine receptor subclass of the G protein-coupled receptor (GPCR) superfamily). CD4 and CD8 T-Cell Lineage (Each mature T-cell generally retains expression of the co-receptor molecule (CD4 or CD8) that has a major histocompatibility complex (MHC)-binding property that matches that of its T-cell receptor (TCR)), Cellular Apoptosis Pathway (Apoptosis is a naturally occurring process by which a cell is directed to programmed cell death), CTLMediated Apoptosis (The cytotoxic T lymphocytes (CTLs), also known as killer T-cells, are produced during cell-mediated immunity designed to remove body cells displaying a foreign epitope), CTLA4 Signaling Pathway (The co-stimulatory CTLA4 pathway attenuates or downregulales T-cell activation CTLA4 is designed to remove body cells displaying a foreign epitope), Cytokine Network (Cytokines have been classified on the basis of their biological responses into pro- or anti-inflammatory cytokines, depending on their effects on immunocytes), ErhB Family Pathway (The ErbB family of transmembrane receptor tyrosine kinases (RTKs) plays an important role during the growth and development of organs), Fas Signaling (FAS (also called APO1 or CD95) is a death domain-containing member of the tumor necrosis factor (TNF) receptor superfamily), FGF Pathway (One of the most well characterized modulators of angiogenesis is the heparin-binding fibroblast growth factor (FGF)), Granulocyte Adhesion and Diapedesis (Adhesion and diapedesis of granulocytes have mostly been analyzed in context to non-lymphoid endothelium), Granzyme Pathway (Granzyme A (GzmA) activates a caspaseindependent cell death pathway with morphological features of apoptosis), GSK3 Signaling (GSK3 is a ubiquitously expressed, highly conserved serine/threonine protein kinase found in all eukaryotes), Hematopoiesis from Multipotent Stem Cells (Hematopoietic stem cells are classified into long-term, short-term and multipotent progenitors, based on the extent of their self-renewal abilities), Hematopoiesis from Pluripotent Stern Cells (Pluripotent stem cells are capable of forming virtually all of the possible tissue types found in human beings), IL-2 Gene Expression in Activated and Quiescent T-Cells (IL-2 is a cytokine that stimulates the growth, proliferation, and differentiation of T-cells, B-cells, NK cells, and other immune cells), IL-6 Pathway (IL-6 is a pleiotropic cytokine that affects the immune system and many physiological events in various organs), IL-10 Pathway (IL-10 is a pleiotropic cytokine with important immunoregulatory functions and whose activities influence many immune cell types), IL-22 Pathway (IL-22 is a member of the IL-10 family of cytokines and exerts multiple effects on the immune system), Interferon Pathway (Interferons are pleiotropic cytokines best known for their ability to induce cellular resistance to viral infection), JAK/STAT Pathway (The JAK/STAT pathway is a signaling cascade whose evolutionarily conserved roles include cell proliferation and hematopoiesis), MAPK Family Pathway (Mitogen-activated protein kinases (MAPKs) belong to a large family of serine/threonine protein kinases that are conserved in organisms as diverse as yeast and humans), Nanog in Mammalian ESC Pluripotency (NANOG is a transcription factor transcribed in pluripotent stem cells and is down-regulated upon cell differentiation), p53-Mediated Apoptosis Pathway (Tumor protein p53 is a nuclear transcription factor that regulates the expression of a wide variety of genes involved in apoptosis, growth arrest, or senescence in response to genotoxic or cellular stress), Pathogenesis of Rheumatoid Arthritis (Rheumatoid arthritis (RA) is a chronic symmetric polyarticular joint disease that primarily affects the small joints of the hands and feet), PI3K Signaling in B Lymphocytes (The phosphoinositide 3-kinases (PI3Ks) regulate numerous biological processes, including cell growth, differentiation, survival, proliferation, migration, and metabolism), RANK Pathway (RANKL and its receptor RANK are key regulators of bone remodeling, and are essential for the development and activation of osteoclasts), RANK Signaling in Osteoclasts (RANKL induces the differentiation of osteoclast precursor cells and stimulates the resorption function and survival of mature osteoclasts), TGF-Beta Pathway (Members of the transforming growth factor (TGF)-beta family play an important role in the development, homeostasis, and repair of most tissues), THC Differentiation Pathway (T-helper cells of type 1 (TH1) and type 2 (TH2) are derived from ‘T’-helper cells and provide help to cells of both the innate and adaptive immune systems), TNF Signaling Pathway (Tumor necrosis factor (TNF) is a multifunctional proinflammatory cytokine with effects on lipid metabolism, coagulation, insulin resistance, and endothelial function), TNF Superfamily Pathway (The tumor necrosis factor (TNF) superfamily consists of 19 members that signal through 29 receptors that are members of the TNF receptor (TNFR) superfamily), Transendothelial Migration of Leukocytes (Transport of plasma proteins and solutes across the endothelium involves two different routes: transcellular and paracellular junctions), Tumoricidal Effects of Hepatic NK Cells (The liver is a major site for the formation and metastasis of tumors), TWEAK Pathway (TWEAK is a cell surface-associated protein belonging to the tumor necrosis factor (TNF) superfamily and has multiple biological activities). VEGF Family of Ligands and Receptor Interactions (Vascular endothelial growth factor (VEGF) is a highly-conserved genetic pathway that has evolved from simple to complex systems), and the like.

[0187] As summarized above, a component of a signaling pathway, including but not limited to a pathway described herein, can be modified to include a degron in a cage polypeptide such that degradation of the signaling pathway member can be controlled by expression of a key polypeptide. Suitable pathway components that can be employed include e.g., input-receiving members, intermediate members, and output-producing members, including but not limited to e.g., the corresponding member of the pathways listed above.

[0188] Similarly, essentially any synthetic pathway can be modulated using a degron in a cage polypeptide as described herein. Suitable non-limiting examples of synthetic signaling pathways that can be modulated using a degron in a cage polypeptide of the present disclosure include, but are not limited to, those pathways controlled by a synthetic or engineered receptor, such as but not limited to e.g., a CAR, an engineered TCR, a synNotch, etc.

[0189] In some aspects, a pathway modulated using a degron in a cage polypeptide of the present disclosure can include an immune modulation pathway, such as e.g., an immune activation pathway or an immune suppression pathway. Such immune modulation pathways can be natural or synthetic and can be endogenous to the cell in which the degron in a cage polypeptide is employed or heterologous to the cell in which the degron in a cage polypeptide is employed.

[0190] Suitable non-limiting examples of synthetic signaling pathways that can be modulated using a degron in a cage polypeptide of the present disclosure also include biosynthesis and/or bioproduction pathways. Biosynthesis and/or bioproduction pathways can be natural or synthetic and can be employed in cells and/or organisms where the pathway is endogenous or heterologous.

[0191] Non-limiting examples of biosynthesis pathways that can be modulated using a degron in a cage polypeptide of the present disclosure include, hut are not limited to, hormone production pathways (e.g., an insulin production pathway, an estrogen/progesterone production pathway, an androgen production pathway, a growth hormone production pathway, and the like), opioid production pathways, isobutanol production pathways, non-ribosomal polyketide synthetase (NRPS) production pathways, antibiotic production pathways, chemotherapeutic production pathways, artemisinic acid production pathways, terpenoid production pathways, polyketide production pathways, and the like.

[0192] Non-limiting examples of synthetic biosynthesis pathways include but are not limited to e.g., synthetic hormone production pathways, synthetic opioid production pathways, synthetic antibiotic production pathways, synthetic chemotherapeutic production pathways, synthetic artemisinic acid production pathways, synthetic terpenoid production pathways, synthetic polyketide production pathways, and the like.

[0193] As used throughout the present application, the term “polypeptide” is used in its broadest sense to refer to a sequence of subunit amino acids. The polypeptides of the invention may comprise L-amino acids+glycine, D-amino acids+glycine (which are resistant to L-amino acid-specific proteases in vivo), or a combination of D- arid L-amino acids+glycine. The polypeptides described herein may be chemically synthesized or recombinantly expressed. The polypeptides may be linked to other compounds to promote an increased half-life in vivo, such as by PEGylation, HESylation, PASylation, glycosylation, or may be produced as an Fc-fusion or in deimmunized variants. Such linkage can be covalent or non-covalent as is understood by those of skill inthe art.

[0194] In a fourth aspect the disclosure provides nucleic acids encoding the polypeptide of any embodiment or combination of embodiments of each aspect disclosed herein. The nucleic acid sequence may comprise single stranded or double stranded RNA or DNA in genomic or cDNA form, or DNA-RNA hybrids, each of which may include chemically or biochemically modified, non-natural, or derivatized nucleotide bases. Such nucleic acid sequences may comprise additional sequences useful for promoting expression and/or purification of the encoded polypeptide, including but not limited to polyA sequences, modified Kozak sequences, and sequences encoding epitope tags, export signals, and secretory signals, nuclear localization signals, and plasma membrane localization signals. It will be apparent to those of skill in the art, based on the teachings herein, what nucleic acid sequences will encode the polypeptides of the disclosure.

[0195] In a fifth aspect, the disclosure provides expression vectors comprising the nucleic acid of any aspect of the disclosure operatively linked to a suitable control sequence. “Expression vector” includes vectors that operatively link a nucleic acid coding region or gene to any control sequences capable of effecting expression of the gene product. “Control sequences” operably linked to the nucleic acid sequences of the disclosure are nucleic acid sequences capable of effecting the expression of the nucleic acid molecules. The control sequences need not be contiguous with the nucleic acid sequences, so long as they function to direct the expression thereof. Thus, for example, intervening untranslated vet transcribed sequences can be present between a promoter sequence and the nucleic acid sequences and the promoter sequence can still be considered “operably linked” to the coding sequence. Other such control sequences include, but are not limited to, polyadenylation signals, termination signals, and ribosome binding sites. Such expression vectors can be of any type, including but not limited plasmid and viral-based expression vectors. The control sequence used to drive expression of the disclosed nucleic acid sequences in a mammalian system may be constitutive (driven by any of a variety of promoters, including but not limited to, CMV, SV40, RSV, actin, EF) or inducible (driven by any of a number of inducible promoters including, but not limited to, tetracycline, ecdysone, steroid-responsive). The expression vector must be replicable in the host organisms either as an episome or by integration into host chromosomal DNA. In various embodiments, the expression vector may comprise a plasmid, viral-based vector, or any other suitable expression vector.

[0196] In a sixth aspect, the disclosure provides host cells that comprise the nucleic acids or expression vectors (i.e.: episomal or chromosornally integrated) disclosed herein, wherein the host cells can be either prokaryotic or eukaryotic. The cells can be transiently or stably engineered to incorporate the expression vector of the disclosure, using techniques including but not limited to bacterial transformations, calcium phosphate co-precipitation, electroporation, or liposome mediated-, DEAE dextran mediated-, polycationic mediated-, or viral mediated transfection. In one embodiment, the recombinant host cells comprise:

[0197] (a) a first nucleic acid encoding the polypeptide of any embodiment or combination of embodiments of the cage polypeptides of the disclosure, operatively linked to a first promoter; and

[0198] (b) a second nucleic acid encoding the polypeptide of any embodiment or combination of embodiments of the key polypeptide of the disclosure, wherein the key poly peptide is capable of binding to a structural region of the cage polypeptide to induce a conformational change in the can polypeptide, wherein the second nucleic acid is operatively linked to a second promoter.

[0199] The recombinant host cells may comprise a single cage polypeptide encoding nucleic acid and a single key polypeptide encoding nucleic acid, or may comprise a plurality (i.e.: 2, 3, 4, 5, 6, 7, 8, 9, 10, or more) first and second nucleic acids—in one such embodiment, each second-nucleic acid may encode a key polypeptide capable of binding to a structural region and inducing a conformational change of a different cage polypeptide encoded by the plurality of first nucleic acids. In another embodiment, each second nucleic acid may encode a key polypeptide capable of binding to a structural region and inducing a conformational change of more than one of the cage polypeptides encoded by the plurality of first nucleic acids.

[0200] Thus, in one embodiment the first nucleic acid comprises a plurality of first nucleic acids encoding a plurality of different cage polypeptides. In one such embodiment, the second nucleic acid comprises a plurality of second nucleic acids encoding a plurality of different key polypeptides, wherein the plurality of different key polypeptides comprise one or more key polypeptides that are capable of binding to and inducing a conformational change in only a subset of the plurality of different cage polypeptides. In another such embodiment, the second nucleic acid encodes a single key polypeptide that is capable of binding to and inducing a conformational change in each different cage polypeptide.

[0201] In another embodiment, the host cells comprise nucleic acids encoding and/or expression vectors capable of expressing the fusion proteins disclosed herein, wherein the host cells comprise:

[0202] (a) a first nucleic acid encoding a first fusion protein (i.e.: cage polypeptide fused to key polypeptide) linked to a first promoter; and

[0203] (b) a second nucleic acid encoding a second fusion protein operatively linked to a second promoter, wherein:
[0204] (i) the cage polypeptide encoded by the first nucleic acid is activated by the key polypeptide encoded by the second nucleic acid;
[0205] (ii) the cage polypeptide encoded by the first nucleic acid is not activated by the key polypeptide encoded by the first nucleic acid;
[0206] (iii) the cage polypeptide encoded by the second nucleic acid is activated by the key polypeptide encoded by the first nucleic acid; and
[0207] (iv) the cage polypeptide encoded by the second nucleic acid is not activated by the key polypeptide encoded by the second nucleic acid.

[0208] In all these embodiments, the first and/or second nucleic acids may, for example, be in the form of an expression vector. In other embodiments, the first and/or second nucleic acids may be in the form of nucleic acid integrated into the host cell genome.

[0209] A method of producing a polypeptide according to the disclosure is an additional part of the disclosure. In one embodiment, the method comprises the steps of (a) culturing a host according to this aspect of the disclosure under conditions conducive to the expression of the polypeptide, and (b) optionally, recovering the expressed polypeptide. The expressed polypeptide can be recovered from the cell free extract or recovered from the culture medium. In another embodiment, the method comprises chemically synthesizing the polypeptides.

[0210] In a seventh aspect, the disclosure provides kits. In one embodiment, the kits comprise:

[0211] (a) one or more cage polypeptides of any embodiment or combination of embodiments of the disclosure;

[0212] (b) one or more key polypeptides of any embodiment or combination of embodiments of the disclosure; and

[0213] (c) optionally, one or more fusion proteins of any embodiment disclosed herein.

[0214] In another embodiment, the kits comprise:

[0215] (a) a first nucleic acid encoding the cage polypeptide of any embodiment or combination of embodiments of the disclosure;

[0216] (b) a second nucleic acid encoding the key polypeptides of any embodiment or combination of embodiments of the disclosure; and

[0217] (c) optionally, a third nucleic acid encoding the fusion protein of any embodiment disclosed herein.

[0218] In another embodiment, the kit comprises:

[0219] (a) a first expression vector comprising a first nucleic acid encoding the cage polypeptide of any embodiment or combination of embodiments of the disclosure, wherein the first nucleic acid is operatively linked to a first promoter; and

[0220] (b) a second expression vector comprising a second nucleic acid encoding the key polypeptides of any embodiment or combination of embodiments of the disclosure, wherein the second nucleic acid is operatively linked to a second promoter.

[0221] In each of the kit embodiments, the first nucleic acid, the second nucleic acid, the first expression vector, and/or the second expression vector may comprise a single nucleic acid encoding or expression vector capable of expressing the cage or key polypeptide, or may comprise a plurality (i.e.: 2, 3, 4, 5, 6, 7, 8, 9, 10, or more) of first nucleic acids, second nucleic acids, first expression vectors, and/or the second expression vectors. In various such embodiments, each second nucleic. acid may encode, or each second expression vector may be capable of expressing, a key polypeptide capable of binding to a structural region and inducing a conformational change of a different cage polypeptide encoded by the plurality of first nucleic acids or capable of being expressed by the plurality of first expression vectors. In other embodiments, each second nucleic acid may encode, or each second expression vector may be capable of expressing, a key polypeptide capable of binding to a stnictural region and inducing a conformational change of more than one of the cage polypeptides encoded by the plurality of first nucleic acids or capable of being expressed by the plurality of first expression vectors.

[0222] In one embodiment, the promoters operatively linked to the cage polypeptide-encoding nucleic acids (first promoters) are different than the promoters operatively linked to the key polypeptide-encoding nucleic acids (second promoters), allowing tunable control of the cage polypeptides and any functional polypeptide domains by controlling expression of the key polypeptide. In other embodiments, the promoters operatively linked to the cage polypeptide-encoding nucleic acids (first promoters) are the same as the promoters operatively linked to the key polypeptide-encoding nucleic acids (second promoters). In other embodiments, the first promoters and/or second promoters may be inducible promoters.

[0223] In an eighth aspect, the disclosure provides uses of cage polypeptides, kits, degronLOCKR switches, nucleic acids, expression vectors, or host cells comprising cage polypeptides to sequester a degron in the cage polypeptide until a key is expressed and activates the cage polypeptide, and the degron targets the cage polypeptide and any functional peptide fused to it for degradation. As disclosed in detail herein, when a key is expressed and activates the cage polypeptide by interacting with the structural region, the degron targets the cage polypeptide, and any functional polypeptide domains fused to the cage polypeptide, for degradation. In this way, a functional polypeptide domain of interest fused to the cage polypeptide having a degron can be conditionally degraded in a titratable manner via expression of the key. This is sometimes referred to herein as degron LOCKR. The kits and degron LOCKR switches disclosed herein are activated separate from natural proteins and work in any eukaryote. Furthermore, there are no current methods to modularly tag any functional polypeptide domain of interest with a conditional degron dependent on expression of a control peptide. Thus, the kits and degron LOCKR switches disclosed herein can be used as a modular regulatory hub in a wide variety of biotechnological applications as described herein.

### EXAMPLE 1

### Summary:

[0224] We have developed a general approach to design novel protein switches that can sequester bioactive peptides and/or binding domains, holding them in an inactive (“off”) state, until combined with a second designed polypeptide called the Key, which induces a conformational change that activates (“on”) the bioactive peptide or binding domain.

Nomenclature and Structural Features that Define LOCKR Switches:
[0225] LOCKR stands for Latching Orthogonal Cage-Key pRotiens; each LOCKR design consists of a Cage protein and a Key protein, which are two separate polypeptide chains.
[0226] The Cage encodes the sequestered bioactive peptide or binding domain in a region of the Cage scaffold denoted as the Latch. The general strategy is to optimize the position of the encoded peptide or binding domain for maximum burial of the functional residues that need to be sequestered, simultaneously optimizing for burial of hydrophobic residues, and for solvent exposure/compensatory hydrogen bonds of polar residues.
[0227] The Key displaces the Latch through competitive intermolecular binding that induces conformational change, exposing the encoded bioactive peptide or domain and activating the system (FIG. 1).
[0228] Orthogonal LOCKR designs (FIG. 3) are denoted by lowercase letter subscripts: LOCKRₐ consists of Cageₐ and Keyₐ, and LOCKR_{b} consists of Cage_{b} and Key_{b}, etc. such that Cageₐ is only activated by Keyₐ, and Cage_{b} is only activated by Key_{b}, etc.
[0229] Prefixes denote the functional group that is encoded and controlled by the LOCKR switch. For example, BimLOCKR refers to designed switches that encode the Bim peptide, and GFP11-LOCKR refers to designed switches that encode GFP11 (the 11^{th} strand of GFP).
[0230] Toehold: The dynamic, range of LOCKR activation by Key can be tuned by truncating the Latch length, simultaneously weakening the Cage-Latch interaction and opening an exposed region on the Cage that the Key can bind to as a “toehold” (FIG. 2. LOCKR can also be tuned in a similar manner by designing mutations into the Latch that weaken the Cage-Latch interaction (FIGS. 1-2, FIG. 10). The length of the toehold is included as a suffix to the design name: For example “−t0” means no toehold, and “−t9” means a toehold of 9 residues (i.e. Latch truncated by 9 residues).
[0231] If the term “Lock” is used in reference to a single polypeptide chain (not in reference to the LOCKR acronym), it is assumed to be synonymous with “Cage”.

[0232] These designs comprise the first ever de novo designed proteins that can undergo conformational switching in response to protein binding. They are modular in that they can encode bioactive peptides of all three types of secondary structure in an inactive conformation: alpha helix, beta strand, loop, and are tunable in that their responsiveness can be tuned over a large dynamic range by varying length (length of Cage scaffold and/or Latch Toehold), and/or mutating residues in the Cage-Latch interface. Designed LOCKR switches can be used to control the activity of a wide range of functional peptides. The ability to harness these biological functions with tight, inducible control is useful, for example, in engineering cells (inducible activation of function, engineering complex logic behavior and circuits), developing sensors, developing inducible protein-based therapeutics, and creating new biomaterials.

### Design of LOCKR Switches

[0233] We set out to design de novo switchable protein systems guided by the following general considerations. First, the free energy tuning required to achieve maximal dynamic range upon addition of the switch-triggering input is more straightforward in a system governed by competition between inter- and intra-molecular interactions at the same site rather than at distant sites (as is common in allosteric biological systems). Second, a stable protein framework with an extended binding surface available for the competing interactions has advantages over a framework that only becomes ordered upon binding, as the former is more programmable and less likely to engage in off-target interactions. These features are described by the abstract system depicted in Fig l a, which undergoes thermodynamically-driven switching between a binding incompetent and a binding competent state. A latch (blue) contains a peptide sequence (orange) that can bind a target (yellow) unless blocked by intramolecular interactions to a cage (cyan); a more tightly binding key (magenta) outcompetes the latch allowing the peptide to bind target. The behavior of such a system is governed by the binding equilibrium constants for the individual subreactions (FIG. 1a): Kₒₚₑₙ, the dissociation of latch from cage; K_{LT}, the binding of latch to target; and K_{CK}, the binding of key to cage. Solution of this set of equations shows that when the latch-cage interaction is too weak (red and orange curves), the system is leaky and the fold induction by key is low, while when the latch-cage interaction is too strong (purple curve), the system is only partially activated, even at high key concentrations. The latch-cage interaction affinity that gives optimal switching (FIG. 1b, blue curve left, green curve right) is a function of the latch-target binding affinity. We used this model to guide design of an optimally switchable protein system, as described in the following sections.

### LOCKR Design Strategy

[0234] To design such a switchable system, we chose structural features amenable to tuning of the affinities of the cage-latch and cage-key interactions over a wide dynamic range. Alpha helices have advantages over beta strands because inter-helical interfaces are dominated by sidechain-sidechain interactions, which can be more readily tuned than the cooperative backbone hydrogen bonding necessary for beta sheets. To allow fine control over the relative affinities of the cage-latch and cage-key interactions, we chose to design interfaces containing buried hydrogen bond networks: as illustrated by Watson Crick base pairing, considerable specificity can be obtained with relatively minor changes in the positions of hydrogen bond donors and acceptors^{4.5}. We selected as a starting point a designed homo-trimer of α-helical hairpins with hydrogen bond network-mediated subunit-subunit interaction specificity (5L6HC3_1)⁵. By designing short unstructured loops connecting the subunits, we generated monomeric protein frameworks with five or six helices and 40 residues per helix (FIG. 1c). In the five-helix framework, there is an open binding site for a sixth helix added in trans, whereas this site is filled by a sixth helix in cis in the six-helix framework.

[0235] The five helix (cage) and six helix (cage plus latch) designs were soluble when recombinantly expressed in E. coli, and the purified proteins were largely monomeric by size-exclusion chromatography with multi-angle light scattering, and very thermostable, remaining folded at upwards of 95° C. and 5 M guanidine hydrochloride (FIG. 1d). Small-angle X-ray scattering (SAXS) spectra were in close agreement to the design models and previous of the original trimers (FIG. 1e), suggesting that the structure was not altered by the loops. The five-helix framework, but not the six-helix framework, bound the sixth helix fused to GFP in a pull-down assay (FIG. 1f); the latter result is expected since if the interfaces are otherwise identical, the intramolecular interaction Kₒₚₑₙ, should outcompete its intermolecular counterpart, K_{CK}, because of the reduced entropic cost of formation of intramolecular interactions. To tune Kₒₚₑₙ, we screened destabilizing mutations in the latch (large hydrophobics to alanine or serine, and alanine residues to larger hydrophobics or serine) and using the GFP pull-down assay, identified mutants with a range of affinities for the key. A double mutant, V223S/I238S, bound key as strongly as the five-helix cage without the latch (FIG. 1e, 10); the two serines likely weaken the cage-latch interaction because of the desolvation penalty associated with burying the sidechain hydroxyls, and because they decrease the helical propensity of the latch. SAXS and CD spectra indicate that in the absence of key, V223S, I238S is a well-folded six-helix bundle with structure similar to the original monomer (FIG. 1d). We call this cage-latch-key system LOCKR, for Latching Orthogonal Cage-Key pRoteins.

### Controlling Bim-Bcl2 Binding, and Tuning the Dynamic Range of Activation:

[0236] To install function into LOCKR, we selected the Bim-Bcl2 interaction central to apoptosis as a model system, seeking to cage Bim such that binding to Bcl2 only occurred in the presence of key. We designed constructs with two possible Bim-related sequences designed onto the latch: a designed Bcl2-binding peptide (aBcl2LOCKR) or just the Bim residues crucial for Bcl2 binding (pBimLOCKR). Each has a different affinity for Bcl2, allowing us to sample a range of K_{LT} values in the initial series of designs. Bim-related sequences were grafted onto the latch by sampling different helical registers such that residues involved in binding to Bcl2 are sequestered in the cage-latch interface (data not shown), optimizing for the burial of hydrophobic residues and surface exposure of polar residues. Kₒₚₑₙ can be tuned by non-optimal interactions between the cage and Bim residues or by changing the length of the latch (FIG. 2a). Initial designs were tested for binding to Bcl2 by bio-layer interferometry, and were either showed little Bcl2 binding even in the presence of key, or Bcl2 binding even in the absence of key. The range of Kₒₚₑₙ and K_{CK} values accessible with this system was evidently not matched to K_{LT} in this case: the key induced response was far from the ideal curves in FIG. 1b.

[0237] We hypothesized that the system could be improved by extending the interface area presented on the cage: extending the latch could increase the affinity for the cage (decrease Kₒₚₑₙ) to make the system more “off” in absence of key, while extending the key to be longer could allow it to outcompete the latch (decrease K_{CK} relative to Kₒₚₑₙ), making the system more inducible. Taking advantage of the modular nature of de novo parametric helical bundles, the cage, latch and key were each extended by 5, 9 or 18 residues. To enable the key to outcompete the latch, the latter was truncated by four to nine residues to access a range of Kₒₚₑₙ values; this creates a “toehold” on the cage for the key to bind). The 18-residue extension with a 9 residue toehold resulted in strongly inducible binding (FIG. 2b,c; the signal on bio-layer interferometry is not due to key binding Bcl2 nor the key adding bulk to inactive LOCKR. The activation of binding by the key is approximately 40-fold (FIG. 2c), comparable to or better than many naturally occurring processes that are regulated by protein interactions.

[0238] The range of key concentrations over which BimLOCKR is activated can be controlled by tuning K_{CK} by varying the length of the key since the interaction energy is roughly proportional to the total surface area of interacting residues. The EC50 for the 58-length designed key is 55.6+/−34 nM (FIG. 2c,d), and for a 45 residue key, 230+/−58 nM. Truncating an additional five residues completely negates key activation, indicating the equilibria are very sensitive to small changes in free energy as expected from our model (FIG. 2d). To examine function of BimLOCKR over a three orders of magnitude range of K_{LT} we studied key induced binding to Bcl2 homologs BclB and Bak (which bind Bim with Kd's of 0.17 nM (Bcl2), 20 nM (BclB), and 500 nM (Bak))⁶. Bio-layer interferometry experiments were performed with target immobilized assayed against the switch with or without key in solution, as well as with key immobilized and assayed against the switch alone or with target in solution. From these results, we can obtain the fraction of target or key bound as a function of the concentrations of switch, key, and target. A global fit of the model to these data for Kₒₚₑₙ, K_{CK}, and K_{LT} yields estimates of Kₒₚₑₙ=0.01+/−0.0033, K_{CK}=2.1+/−1.1 nM, K_{LT}(Bcl2)=28+/−7.8 nM, and K_{LT}(BclB)=32+/−22 nM with no estimate for K_{LT} (Bak) as little switch activation was observed. This fit has an RMSE (root-mean-square-error) of 0.072 nm to the observed BLI data. The approximate agreement of these estimates with the Bim binding Kd's (which were not used in the fitting) suggests the thermodynamic model (FIG. 1a) is a good representation of the system while possibly missing small features of the system affecting target binding.

[0239] We next sought to design a series of orthogonal LOCKR systems with the goal of engineering multiple switches able to be activated selectively in a heterogeneous mixture. Specificity was designed for using different hydrogen bond networks at the cage-key interface. The latch helix was deleted from the original extended LOCKRₐ model and backbones for a new sixth helix were generated by parametrically sampling the radius, helical phase, and z-offset of the new latch/key helix. The resulting structures were scanned for new hydrogen bond networks spanning the interface between the new sixth helix and cage with all buried polar atoms participating in hydrogen bonds; the remaining interface around the networks was subjected to full sequence and sidechain rotamer optimization using Rosetta™ design. Five designs were selected based on packing quality, sequence dissimilarity, and lack of buried polar atoms not participating in hydrogen bonds. Truncations and toehold variants were assayed for cognate and off target key binding using the GFP pulldown assay from FIG. 1c. Three of the new designs were found to bind their cognate keys (FIG. 11) and did so orthogonally from one another. All bound keyₐ to some extent yet is unknown. The Bim sequence was threaded onto the latches of these three designs as it was for the original design. BimLOCKRₐ, (FIG. 2). BimLOCKR_{b} and BimLOCKR_{c} show 22-fold and 8-fold activation, respectively, from their cognate keys given a nine residue toehold on the latch (FIG. 3a,b). BimLOCKRₐ, BimLOCKR_{b} and BimLOCKR_{c} are also orthogonal; each is activated only by its cognate key at concentrations up to 5 μM (FIG. 3c). The power of the buried hydrogen bond network approach to achieving specificity is illustrated by the fact that of the six designed BimLOCKR proteins, three successfully switch and can be activated orthogonally, a 50% success rate starting from a single scaffold.

### Asymmetrized LOCKR Switches

[0240] The original LOCKR switch design (FIGS. 1-2) was built starting from a de novo designed symmetric homotrimer, 5L6HC3_1, which contains 6 helices⁵. The symmetric repeating sequence motifs create opportunities for misfolding and aggregation. To mitigate these effects, we redesigned the original LOCKR switch to be asymmetric (sequences listed at the end of this document). The asymmetric designs are better behaved, more monomeric, and we experimentally solved x-ray crystal structures (FIG. 4), both with the encoded BIM peptide (FIG. 4a), and without the BIM peptide (FIG. 4b). The experimental structure without BIM is nearly identical to the computational design model (FIG. 4b), demonstrating atomic-level accuracy of our design strategy. Details of computational design and experimental testing providing in Methods. See FIG. 9 for a superposition of the crystal structure of 1fix-short-noBim(AYYA)-t0 (FIG. 4b) onto the x-ray crystal structure of the base scaffold 5L6HC3_1⁵ (dark) used to make LOCKRa (FIG. 1).

gfpLOCKR (GFP11-LOCKR)

[0241] Using the asymmetric designs as a starting point, we successful encoded the 11^{th} strand of GFP into designed LOCKR switches (FIG. 5). A common split GFP consists of two parts: Strands 1-10, and Strand 11; when mixed, 1-10 combines with 11 to yield fluorescence. Here we demonstrate that the 11^{th} strand is sequestered in the absence of Key, unable to combine with GFP-1-10, but readily yields fluorescence when mixed with Key in the presence of GFP-1-10 (FIG. 5). We experimentally determined x-ray crystal structures of the designed protein, which shows that GFP-11 is structurally encoded as an alpha helix, in a nearly identical conformation to that of the computational design model (FIG. 5); this result highlights the power and modularity of the LOCKR system, suggesting that we can encode bioactive peptides with secondary structure propensities that are non-helical.

### Tuning for Co-Localization Dependence

[0242] FIGS. 1-2 demonstrate that the dynamic range of LOCKR activation can be predictively tuned, suggesting that the system can be modulated to respond only when the Cage and Key are colocalized, which would be advantageous for a wide range of functions. Using the GFP11-LOCKR from FIG. 4, we demonstrated that this is indeed the case, and that that designed LOCKR switches can be tuned to be colocalization dependent using Spycatcher™/Spytag™ fusions (FIG. 6). Spycatcher™ covalently fuses to Spytag™; when Spycatcher™ fuse Cage was mixed with its Spytag™-fused Key, it showed significantly more fluorescence that when mixed with its Key that was not fused to Spytag™ (FIG. 6).

### Caged Intein LOCKR Switches

[0243] Designed LOCKR switch, with Cage component encoding the VMAc Intein, shows successful activation when mixed with designed Key fused to sfGFP and VMAn Intein (FIG. 7). The SDS-PAGE shows successful VMAc-VMAn reaction, with bands corresponding to the correct molecular weight of the expected spliced protein products (FIG. 7).

### Large-Scale High-Throughput Design of LOCKR Switches

[0244] The original LOCKR switch design (FIGS. 1-2) was built starting from a de novo designed symmetric homotrimer, 5L6HC3_1, which contains 6 helices⁵. We reasoned we should be make smaller LOCKR switches, consisting of 3 or 4 helices. Using everything that we learned from the testing and experimental validation of the original LOCKR switch, we created a computational pipeline to automate the design of thousands of new LOCKR switch scaffolds from scratch by exhaustively sampling Crick helical parameters^{4.9}. These 2plus1 and 3plus1 LOCKR switches have smaller payload than the original designs (advantageous for cell engineering efforts), and due to lack of symmetry, are likely to be well-behaved and not aggregation-prone. (See Methods section for details of computational design and experimental testing).

strepLOCKR (STREII-LOCKR)

[0245] Using the new 2+1 and 3+1 LOCKR scaffolds from the large-scale high-throughput design, we designed and tested new LOCKR scaffolds that encode and control the STREPII sequence. (N)WSHPQFEK (SEQ ID NO: 63) (see Methods section for details). The designs (FIG. 13A) sequester the STREPII tag as compared to a positive control (FIG. 13B) and can be activated in the presence of Key (FIG. 13c-d), as determined by biolayerinterferometry (Octet) data.

[0246] The data in FIG. 12 demonstrate caging of the PAH2 domain of the mSin3A transcriptional repressor. See the figure legend for details.

[0247] The data in FIG. 14 demonstrate 3plus LOCKR switches activating GFP fluorescence in response to expression of key. See the figure legend for details

### Discussion

[0248] Here we demonstrate the power of the LOCKR platform by caging protein-protein interactions that can be inducibly activated by key. We show in vitro data caging the Bim peptide from binding its family members, GFP strand11 from completing the truncated 1-10 construct, and an anti-StrepTag™ II antibody from binding caged StrepTag™II. The modularity and hyperstability of de novo designed proteins enables tuning of switch activation over a broad dynamic range by tuning the strength of the competing cage-key and cage-latch interfaces. Using this approach, we can now design switches beyond these proof-of-concept designs to cage peptides for more complex applications. LOCKR is useful for controlling native signaling networks, and in general for controlling biological function through fully synthetic networks of de novo signaling molecules.

[0249] LOCKR brings to proteins the modularity of DNA switching technology, but with advantages of being able to control, and be coupled to, the wide range of biochemical functions that can be carried out by proteins and bioactive peptides (which are much more diverse and wide ranging than nucleic acids).

### Methods

### PCR Mutagenesis and Isothermal Assembly

[0250] All primers for mutagenesis were ordered from Integrated. DNA Technologies (IDT). Mutagenic primers were designed to anneal >18 bp on either side of the site for mutagenesis with the desired mutation encoded in the primer. PCR was used to create fragments upstream and downstream of the mutation site with >20 bp overlap with the desired pET vector. The resulting amplicons were isothermally assembled into either pET21b, pET28b, or pET29b restriction digested with Xhol and Ndel and transformed into chemically competent E. coli XL1-Blue cells. Monoclonal colonies were sequenced with Sanger sequencing. Sequence verified plasmid was purified using Qiagen miniprep kit and transformed into chemically competent E. coli BL21(DE3)Star, BL21(DE3)Star-pLysS cells (Invitrogen), or Lemo21(DE3) cells (NEB) for protein expression.

### Synthetic Gene Construction

[0251] Synthetic genes were ordered from Genscript Inc. (Piscataway, N.J. USA) and delivered in pET 28 , pET21+, or pET29b+ E coil expression vectors, inserted at the Ndel and XhoI sites of each vector. For pET28b+ constructs, synthesized DNA was cloned in frame with the N-terminal hexahistidine tag and thrombin cleavage site and a stop codon was added at the C-terminus. For pET21b+ constructs, a stop codon was added at the C-terminus such that the protein was expressed with no hexahistidine tag. For pET29b+ constructs, the synthesized DNA was cloned in frame with the C-terminal hexahistidine tag. Plasmids were transformed into chemically competent E. coli BL21(DE3)Star, BL21(DE3)Star-pLysS cells (Invitrogen), or Lemo21(DE3) cells (NEB) for protein expression.

### Bacterial Protein Expression and Purification

[0252] Starter cultures were grown in Lysogeny Broth (LB) or Terrific™ Broth II (TBII) overnight in the presence of 50 μg/ml, carbenicillin (pET21b+) or 30 μg/mL (for LB) to 60 μg/mL (for TBII) kanamycin (pET28b+ and pET29b+). Starter cultures were used to inoculate 500 mL of Studier TBM-5052 autoinduction media containing antibiotic and grown at 37° C. for 24 hours. Cells were harvested by centrifugation at 4000 ref for 20 minutes at 4° C. and resuspended in lysis buffer (20 mM Tris. 300 mM NaCl, 20 mM Imidazole, pH 8.0 at room temperature), then lysed by microfluidization in the presence of 1 mM PMSF. Lysates were cleared by centrifugation at 24,000 rcf for at least 30 minutes at 4° C. Supernatant was applied to Ni-NTA (Qiagen) columns pre-equilibrated in lysis buffer. The column was washed twice with 15 column volumes. (CV) of wash buffer (20 mM Tris, 300 mM NaCl, 40 mM Imidazole, pH 8.0 at room temperature), followed by 15 CV of high-salt wash buffer (20 mM Tris, 1M NaCl, 40 mM Imidazole, pH 8.0 at room temperature) then 1.5 CV of wash buffer. Protein was eluted with 20 mM Tris. 300 mM NaCl, 250 mM Imidazole, pH 8.0 at room temperature. Proteins were further purified by gel filtration using FPLC and a Superdex™ 75 Increase 10/300 GL (GE) size exclusion column, pooling fractions containing monomeric protein.

### Size-Exclusion Chromatography, Multi-Angle Light Scattering (SEC-MALS)

[0253] SEC-MALS experiments used a Superdex™ 75 Increase 10/300 GL (GE) size exclusion column connected to a miniDAWN™ TREOS multi-angle static light scattering and an Optilab T-rEX™ (refractometer with Extended range) detector (Wyatt Technology Corporation, Santa Barbara Calif., USA). Protein samples were injected at concentrations of 3-5 mg/mL in TBS (pH 8.0). Data was analyzed using ASTRATM™ (Wyatt Technologies) software to estimate the weight average molar mass (Mw) of eluted species, as well as the number average molar mass (Mn) to assess monodispersity by polydispersity index (PDT)=Mw/Mn.

### Circular Dichroism (CD) Measurements

[0254] CD wavelength scans (260 to 195 nm) and temperature melts (25 to 95 C) were measured using an AVIV model 420 CD spectrometer. Temperature melts monitored absorption signal at 222 nm and were carried out at a heating rate of 4° C./min. Protein samples were at 0.3 mg/mL in PBS pH 7.4 in a 0.1 cm cuvette. Guanidinium chloride (GdmCl) titrations were performed on the same spectrometer with an automated titration apparatus in PBS pH 7.4 at 25 μ C. monitored at 222 nm with protein sample at 0.03 mg/mL in a 1 cm cuvette with stir bar. Each titration consisted of at least 40 evenly distributed concentration points with one minute mixing time for each step. Titrant solution consisted of the same concentration of protein in PBS+GdmCl. GdmCl concentration was determined by refractive index.

### Small Angle X-ray Scattering (SAXS)

[0255] Samples were exchanged into SAXS buffer (20mM Tris, 150mM NaCl, 2% glycerol, pH 8.0 at room temperature) via gel filtration. Scattering measurements were performed at the SIBYLS™ 12.3.1 beamline at the Advanced Light Source. The X-ray wavelength (λ) was 1.27 Å and the sample-to-detector distance of the Mar165 detector was 1.5 m, corresponding to a scattering vector q (q=4π*sin(θ/λ) where 2θ is the scattering angle) range of 0.01 to 0.59 Å⁻¹. Data sets were collected using 34 0.2 second exposures over a period of 7 seconds at 11 keV with protein at a concentration of 6 mg/mL. Data were also collected at a concentration of 3 mg/mL to determine concentration-dependence; all presented data was collected at the higher concentration as no concentration-dependent aggregation was observed. Data from 32 exposures was averaged separately over the Gunier, Parod, and Wide-q regions depending on signal quality over each region and frame. The averages were analyzed using the ScÅtter software package to analyze data and report statistics. FoXS was used to compare design models to experimental scattering profiles and calculate quality of fit (X) values. The hexahistidine tags and thrombin cleavage sites on the N-terminii of LOCKR proteins were modeled using Rosetta Remodel™ so that the design sequence matched that of the experimentally tested protein. To capture conformational flexibility of these residues, 100 independent models were generated, clustered, and the cluster center of the largest cluster was selected as a representative model for FoXS fitting without bias.

### GFP Pulldown Assay

[0256] His-tagged LOCKR was expressed per the above protocol from pET28b+ while the key was expressed fused to superfolder CGP (sfGFP) without a his-tag in pET21b+. The his-tagged LOCKR was purified to completion and dialyzed into TBS (20 mM Tris, 150 mM NaCl, pH 8.0 at room temperature); the key-GFP remained as lysate for this assay. 100 μL LOCKR at >1 uM was applied to a 96-well black Pierce® Nickel Coated Plate (ThermoFisher) and incubated at room temperature for 1 hour. Sample was discarded from the plate and washed 3× with 200 μL TBST (TBS+0.05% Tween-20). 100 μL of lysate containing key-GFP was added to each well and incubated at room temperature for 1 hour. Sample was discarded from the plate and washed 3× with 200 μL TBST (TBS+0.05% Tween-20). The plate was washed 1× with TBS, and 100 μL of TBS was added to each well. sfGFP fluorescence was measured on a Molecular Devices SpectraMax™ M5 plate reader or BioTek Synergy Neo2 plate reader; fluorescence was measured at 485 nm excitation and 530 nm emission, with a bandwidth of 20 nm for excitation and emission.

### Bio-Layer Interferometry (BLI)

[0257] BLI measurements were made on an Octet® RED96 System (ForteBio) with streptavidin (SA) coated biosensors and all analysis was performed within ForteBio Data Analysis Software version 9.0.0.10. Assays were performed with protein diluted into HBS-EP+ Buffer from GE (10 mM HEPES, 150 mM NaCl, 3 mM EDTA, 0.05% v/v Surfactant P20, 0.5% non-fat dry milk, pH7.4 at room temperature). Biotinylated Bcl2 was loaded onto the SA tips to a threshold of 0.5 nm programmed into the machine's protocol. Baseline was obtained by dipping the loaded biosensors into HBS-EP+ buffer; association kinetics were observed by dipping into wells containing defined concentrations of LOCKR and key, then dissociation kinetics were observed by dipping into the buffer used to obtain the baseline. Kinetic constants and response at equilibrium were computed by fitting a 1:1 binding model.

### Thermodynamic LOCKR Model

[0258] The thermodynamic model in FIG. 1a illustrates three free parameters for five equillibrea. This defines three equations that relate the concentrations of all species (open or closed Switch, Key, Target, Switch-Key, Switch-Target, and Switch-Key-Target) at equilibrium.

Kₒₚₑₘ=[Switchₒₚₑₙ]/[Switch_{closed}]

K_{CK}=[Switchₒₚₑₙ][Key]/[Switch−Key]=[Switch−Target][Key]/[Switch−Key−Target]

K_{LT}=[Switch−Key][Target]/[Switch−Key−Target]=[Switchₒₚₑₙ][Target]/[Switch−Target]

[0259] The total amount of each component (Switch. Key, and Target) is also constant and constrains the values of each species at equilibrium. This introduces the following equations to the model.

[Switch]ₜₒₜₐₗ=[Switchₒₚₑₙ]+[Switch_{closed}]+[Switch−Key]+[Switch−Target]+[Switch−Key−Target]

[Key]ₜₒₜₐₗ=[Key]+[Switch−Key]+[Switch−Key−Target]

[Target]ₜₒₜₐₗ=[Target]+[Switch−Target]+[Switch−Key−Target]

[0260] These six equations were fed into sympy.nsolve( ) to find solutions given the six constants (three equilibrium constants, three total concentrations). Fraction bound was extracted from this solution and plotted for the corresponding figures.

Grafting Functional Sequence onto LOCKR using Rosetta

[0261] Models of functional LOCKRs were made by grafting bioactive sequences onto the latch were designed using Rosetta™ XML to sample grafts starting at every helical register on the latch. This protocol uses two Rosetta movers, SimpleThreadingMover to change the amino acid sequence on the latch, and FastRelax™ with default settings to find the lowest energy structure given the functional mutations. Designs were selected by eye in PyMol™ 2.0 and high quality grafts had important binding residues interacting with the cage and minimized the number of buried unsatisfied hydrogen bonding residues.

### Rosetta Design of Orthogonal LOCKR

[0262] Redesign of LOCkRₐ to orthogonal cage-key pairs using was carried out using Rosetta with scorefunction bet_nov16. We extracted a model of the five-helix cage from the extended LOCKR model and used the Rosetta™ BundleGridSampler module to generate an ensemble of backbones for new latch geometries. The BundleGridSampler generates backbone geometry based on the Crick mathematical expressions for a coiled-coil, and allows efficient, parallel sampling of a regular grid of coiled-coil expression parameter values, which correspond to a continuum of peptide backbone conformations. For each parametrically-generated latch conformation sampled, Rosetta™ residue selectors specified the interface of the cage and latch for design of hydrogen bonding networks (HBNet) followed by Rosetta™ sidechain design. Residues were selected for design through Rosetta residue selectors by selecting the interface of the latch and cage via the InterfaceByVector residue selector. This residue selection was passed into both HBNet and sidechain design to strictly design the switching interface while leaving the cage with its original LOCKR sequence. Hydrogen Bond networks were designed using HBNetStapleInterface on the residues selected at the interface. The output contained designs with two or three hydrogen bond networks which span the three helices that make up the interface. All output from HBNet was then designed using PackRotamersMover to place residues at the interface while maintaining the hydrogen bond networks. Two rounds of design were done. The first used beta_soft to aggressively pack the interface with potentially clashing rotamers while optimizing the interaction energy at the interface, then the structure was minimized using beta to resolve potential clashing atoms according to the full Rosetta score function. The final round of design placed rotamers with the full beta Rosetta score function to finally optimize the interactions across the cage-latch interface.

[0263] Candidate orthogonal LOCKR designs were selected based on lacking unsatisfied buried hydrogen bonding residues, the count of alanine residues as a proxy for packing quality, and sequence dissimilarity as a metric to find polar/hydrophobic patterns dissimilar enough to be orthogonal. Unsatisfied hydrogen bonding atoms were filtered out using the BuriedUnsatHbonds filter allowing no unsatisfied polar atoms according to the filter's metrics. Packing quality was determined by counting alanine residues at the interface because high alanine count means poor interdigitation of residues. A maximum of 15 alanine residues were allowed in the entire three helix interface. Pairwise sequence dissimilarity of every designed latch was scored with BLOSUM62 by aligning sequences using the Bio.pairwise2 package from BioPython as shown in seq_alignment.py. Alignment was performed disallowing gaps within the sequence through large opening and extension penalties which is analogous to a structural alignment of two helices to find the most similar superposition based on hydrophobic-polar patterning. Each score was subtracted from the maximum score to convert scores into a distance metric; the most diverse sequences has the lowest BLOSUM62 score which converts to the largest distance. The sequences were then clustered using HeirClust_fromRMSD.py and clustered with a cutoff of 170, resulting in 13 clusters. The center of each cluster was picked by maximizing distance between the 13 centers selected. The 13 candidates were then filtered by eye in PyMol™ 2.0 for unsatisfied hydrogen bonding atoms and qualitative packing quality. The five best designs by these three metrics were ordered as LOCKR_{b-f}.

### Asymmetrized LOCKR Switches

[0264] The original LOCKRₐ switch was redesigned using Rosetta™ with HBNet; residues known to be important for LOCKR function were kept fixed, and remaining residues were optimized to preserve hydrophobic packing while introducing sequence diversity that minimized the number of repeating amino acid sequences and motifs. Synthetic DNA coding for the designs was obtained as described previously and designs were expressed, purified, and biophysically characterized as described previously. Crystallization trials were set up as described in the next section.

### X-Ray Crystallography

### Crystallization of Protein Samples

[0265] Purified protein samples were concentrated to 12-50 mg/ml in 20 mM Tris pH 8.0 and 100 mM NaCl. Samples were screened with a 5-position deck Mosquito crystal (ttplabtech) with an active humidity chamber, utilizing the following crystallization screens: JCSG+ (Qiagen), JCSG Core I-IV (Qiagen), PEG/Ion (Hampton Research), and Morpheus (Molecular Dimensions). The optimal conditions for crystallization of the different designs were found as follows:
[0266] 1-fix-short-BIM-t0: 0.1M Tris pH 8,5, 5% (w/v) PEG 8000, 20% (v/v) PEG 300, 10% (v/v) Glycerol (no cryo needed)
[0267] 1fix-short-GFP-t0: 0.2M Sodium chloride, 0.1 M Sodium cacodylate pH 6.5, 2.0M Ammonium sulfate (plus 20% glycerol for cryo)
[0268] 1fix-short-noBim(AYYA)-t0: 0.2M di-Sodium tartrate, 20% (w/v) PEG 3350 (no cryo added)

### X-Ray Data Collection and Structure Determination

[0269] The crystals of the designed proteins were looped and placed in the corresponding reservoir solution, containing 20% (v/v) glycerol if the reservoir solution did not contain cryoprotectant, and flash-frozen in liquid nitrogen. The X-ray data sets were collected at the Advanced Light Source at Lawrence Berkeley National Laboratory with beamlines 8.2.1 and 8.2.2. Data sets were indexed and scaled using either XDS³⁵ or HKL2000³⁶. Initial models were generated by the molecular-replacement method with the program PHASER™³⁷ within the Phenix™ software suite³⁸, using the design models as the initial search models. Efforts were made to reduce model bias through refinement with simulated annealing using Phenix.refine, or, if the resolution was sufficient, by using Phenix.autobuild⁴⁰ with rebuild-in-place set to false, simulated annealing and prime-and-switch phasing. Iterative rounds of manual building in COOT and refinement in Phenix™ were used to produce the final models. Due to the high degree of self-similarity inherit in coiled-coil-like proteins, datasets for the reported structures suffered from a high degree of pseudo translational non-crystallographic symmetry, as report by Phenix.Xtriage™, which complicated structure refinement and may explain the higher than expected R values reported. RMSDs of bond lengths, angles and dihedrals from ideal geometries were calculated with Phenix™. The overall quality of all final models was assessed using the program MOLPROBITY™.

gfpLOCKR: (GFP11-LOCKR) Switch Design and Characterization

[0270] Using the asymmetrized LOCKRₐ design scaffold, the 11^{th} strand of GFP was encoded into the Latch sequence of the Cage as described in the section above “Grafting Functional Sequence onto LOCKR using Rosetta™”, and synthetic genes coding for the designed proteins obtained as described above. Proteins were purified and biophysically characterized as described above. To test for induction of fluorescence upon addition of Key, the proteins were mixed by pipetting and immediately assayed in a black 96-well plate using a Biotek Synergy Neo2 plate reader to monitor relative GFP fluorescence (Ex: 488, Em: 508, 10 minutes between reads). Cage leakiness was evaluated by measuring GFP fluorescence over time in the absence of Key

In Vitro Co-Localization-Dependent Switching with gfpLOCKR (GFP11-LOCKR)

[0271] The GfpLOCKR Cage was cloned with SpyCatcher™ fused to its N-terminus via a floppy linker, the gfpLOCKR Key was cloned with SpyTag™ fused to its C-terminus via a floppy linker, and GFP1-10 was cloned into its own pET21 vector. These proteins were expressed in E. coli Lemo21 cells with Studier's autoinduction media overnight at 18° C. After expression, the producer cells were harvested by centrifugation and lysed by microtluidizer. The desired proteins were purified from clarified lysates by Ni-NTA affinity chromatography and quantitated by A²⁸⁰ on a nanodrop. Proteins were diluted to final concentrations in PBS (GFP1-10: 1.9 uM in all samples; Cage: 1.5 uM. 0.8 uM, 0.4 uM, 0.2 uM, 0.094 uM; Key: 1.5 uM, 0.8 uM, 0.4 uM, 0.2 uM, 0.094 uM) and pooled as follows: SpyCatcher™-Cage alone (no Key), SpyCatcher™-Cage with naked Key (no SpyTag™), and SpyCatcher-Cage with SpyTag-Key. The proteins were mixed by pipetting and immediately assayed in a black 96-well plate using a Biotek Synergy Neo2 plate reader to monitor relative GFP fluorescence (Ex: 488, Em: 508, 10 minutes between reads). Cage leakiness was evaluated by measuring GFP fluorescence over time in the absence of Key. Co-localization dependence was confirmed by showing that SpyTag™-Key activated GFP fluorescence faster than did naked Key.

### Caged Intein LOCKR Switches

[0272] The VMAc intein sequence was designed to be encoded into the Latch of LOCKRₐ. The VMAn Intein sequence was fused to Keyₐ. Constructs were cloned and purified as previous LOCKR designs described above. Intein activity (splicing) was assessed by SDS-PAGE.

### Large-Scale High-Throughput Design of LOCKR Switches

[0273] The computational pipeline to design of thousands of new LOCKR switch scaffolds from scratch is as follows: backbones were exhaustively sampled using Crick helical parameters for 3-helix bundles (denoted 2plus1 or 2+1 because of a 2-helix scaffold plus 1-helix latch) and 4-helix bundles (denoted 3plus1 or 3+1 because of 3-helices plus 1-helix latch); parameters sampled include z-offset (−1.51, 0 and 1.51), helical phase every 10 degrees between 0 and 100, and superhelical radii for each helix ranging from 5-10 angstroms from the central superhelical axis (z-axis); based on the success of the original LOCKR design, we focused on designs with straight helices and no supercoiling (superhelical twist fixed to 0.0). Each generated helix is 58 residues in length; Rosetta loop closure methods were used to add loops connecting all helices into a single polypeptide chain (Cage scaffold). Sequence and sidechain design was carried out using HBNet, MC-HBNet, and RosettaDesign™. Additional designs were generated by truncating the helical bundles into shorter scaffolds, making versions with the Latch as either the N-terminal or C-terminal helix, and by trying different toehold lengths (truncations of Latch helix that end in a polar residue and remove at least one or two hydrophobic packing residues from the original design). Designs were selected based on computational methods learned from iterative testing and design of previous LOCKR scaffolds and HBNet helical bundles: important metrics include secondary structure shape complementarity (ss_sc)>0.65 (best designs had ss_sc>0.7); RosettaHoles™ filter in regions surrounding hydrogen bond networks to eliminate designs with large cavities adjacent to hydrogen bond networks in the core of the scaffolds; designs were required to have at least 2 distinct hydrogen bond networks that spanned all helices of the design model (i.e. each helix must contribute at least one amino acid sidechain to the network); the number of Ile, Leu, and Val residues, and number of contacts made by these amino acid types, as compared to Ala (smaller amino acid) also serves as a proxy that correlates well with designs that have tight, interdigitated hydrophobic packing, which is important for generating a stable protein scaffold.

strepLOCKR (STREPII-LOCKR) Computational Design:

[0274] LOCKR switches encoding the STREPII tag, (N)WSHPQFEK (SEQ ID NO: 63), were designed using the 2plus1 and 3plus1 switches from the large-scale high-throughput LOCKR design set. This sequence is difficult to encode because of the Pro (which kinks alpha helices) and the Trp and His, which if buried must likely participate in hydrogen bonds. To address these issues, rather than sampling all helical residues, the large-scale design set was mined to find LOCKR scaffolds that already contained Trp (W), His (H) already pre-organized into hydrogen bond networks of the designs. Designs with pre-organized Phe (F) were also considered.

strepLOCKR (STREPII-LOCKR) Experimental Testing:

[0275] The purified proteins were tested for their ability to sequester the STREPII sequence in absence of Key, and activate in presence of Key using biolayerinterferometry (Octet® RED96 System, PALL ForteBio): THE™ NWSHPQFEK (SEQ ID NO: 63) Tag Antibody (mAb mouse, Genscript A01732-200) was loaded onto Anti-Mouse IgG Fc Capture (AMC) Biosensors (PALL ForteBio); tips were preconditioned by cycling between Glycine pH 1.65 and Octet assay buffer: HBS-EP+Buffer from GE (10 mM HEPES, 150 mM NaCl, 3 mM EDTA, 0.05% v/v Surfactant P20, 0.5% non-fat dry milk, pH 7.4 at room temperature). Protein samples were diluted into Octet assay buffer, keeping dilution factors consistent as to minimize noise. The antibody-loaded tips were reused up to 8 times using the recommended regeneration protocol of cycling between Glycine pH 1,65 and Octet assay buffer (minimal loss in loading was observed when the tips were preconditions, and a signal threshold was set to ensure consistent loading of the tips each time).

[0276] The THE™ NWSHPQFEK (SEQ ID NO: 63) Tag Antibody (mAb mouse, Genscript A01732-200) was used at a concentration of 5 ug/mL in Octet assay buffer; stocks of antibody were made up to 0.5 mg/mL with 400 ul mqH2O, aliquoted and stored at −80° C., thawed immediately before use.

Purification of Proteins from Bacterial Preps Not Already Described Above:

[0277] Starter cultures were grown at 37° C. in either Luria-Bertani (LB) medium overnight, or in Terrific Broth for 8 hours, in the presence of 50 μg/ml carbenicillin (pET21-NESG) or 50 μg/ml kanamycin (pET-28b+). Starter cultures were used to inoculate 500mL of LB (induced with 0.2 mM IPTG at OD600 of ˜0.6-0.9) or Studier auto-induction media containing antibiotic. Cultures were expressed overnight at 18° C. (many designs were also later expressed at 37° C. for 4 hours with no noticeable difference in yield). Cells were harvested by centrifugation for 15 minutes at 5000 ref 4° C. and resuspended in lysis buffer (20 mM Tris, 300 mM NaCl, 20 mM Imidazole, pH 8.0 at room temperature), then lysed by sonication in presence of lysozyme, DNAse, and EDTA-free cocktail protease inhibitor (Roche) or 1 mM PMSF. Lysates were cleared by centrifugation at 4° C. 18,000 rpm for at least 30 minutes and applied to Ni-NTA (Qiagen) columns pre-equilibrated in lysis buffer. The column was washed three times with 5 column volumes (CV) of wash buffer (20 mM Tris, 300 mM NaCl, 40 mM Imidazole, pH 8.0 at room temperature), followed by 3-5 CV of high-salt wash buffer (20 mM Tris, 1 M NaCl, 40 mM lmidazole, pH 8.0 at room temperature), and then 5 CV of wash buffer. Protein was eluted with 20 mM Tris, 300 mM NaCl, 250 mM Imidazole, pH 8.0 at room temperature. No reducing agents were added, as none of the designed proteins contained cysteines.

### REFERENCES

[0278] 1. Huang, P.-S., Boyken, S. E. & Baker, D. The coming of age of de novo protein design. Nature 537, 320-327 (2016).
[0279] 2. Joh, N. H. et al. De novo design of a transmembrane Zn²⁺-transporting four-helix bundle. Science 346, 1520-1524 (2014).
[0280] 3. Davey, J. A., Damry, A. M., Goto, N. K. & Chica, R. A. Rational design of proteins that exchange on functional timescales. Nat. Chem. Biol. 13, 1280-1285 (2017).
[0281] 4. Huang, P.-S. et al. High thermodynamic stability of parametrically designed helical bundles. Science 346, 481-485 (2014).
[0282] 5. Boyken, S. E. et al. De novo design of protein homo-oligomers with modular hydrogen-bond network-mediated specificity. Science 352, 680-687 (2016).
[0283] 6. Berger, S. el al. Computationally designed high specificity inhibitors delineate the roles of BCL2 family proteins in cancer. Elife 5, 1422 (2016).
[0284] 7. Leaver-Fay, A. et al. ROSETTA3: an object-oriented software suite for the simulation and design of macromolecules. Meth Enzymol 487, 545-574 (2011).
[0285] 8. Kuhlman, B. & Baker, D. Native protein sequences are close to optimal for their structures. Proc Natl Acad Sci USA 97, 10383--10388 (2000).
[0286] 9. Crick, F. H. C. The packing of [alpha]-helices: simple coiled-coils. Acta Cyst (1953). Q6, 689-697 [doi: 10.1107/S0365110X53001964]6, 1-9 (1953).
[0287] 10. Glantz, S. T. et al. Functional and topological diversity of LOV domain photoreceptors. Proc Natl Acad Sci USA 113, E1442-51 (2016).
[0288] 11. Dueber, J. E., Mirsky, E. A. & Lim, W. A. Engineering synthetic signaling proteins with ultrasensitive input/output control. 25, 660-662 (2007).
[0289] 12. Dueber, J. E., Yeh, B. J., Chak, K. & Lim, W. A. Reprogramming control of an allosteric signaling switch through modular recombination. Science 301, 1904-1908 (2003).
[0290] 13. Huang, P.-S. et al. RosettaRemodel: A Generalized Framework for Flexible Backbone Protein Design. PLoS ONE 6, e24109 (2011).
[0291] 14. Schneidman-Duhovny, D., Hammel, M. & Sali, A. FoXS: a web server for rapid computation and fitting of SAXS profiles. Nucleic Acids Res 38, W540-4 (2010).
[0292] 15. Maguire, J. B., Boyken, S. E., Baker, D. & Kuhlman, B. Rapid Sampling of Hydrogen Bond Networks for Computational Protein Design. J. Chem. Theory Comput 14, 2751-2760 (2018).

### EXAMPLE 2

### degronLOCKR for Tunable Control of Protein Degradation

### Summary:

[0293] This example builds on the Latching Orthogonal Cage Key pRoteins (LOCKR) technology, disclosed above, which are de novo designed protein switches. Degron LOCKR is a specific embodiment of LOCKR for use (for example) in cellular engineering with a modified version of a degron (including but not limited to the C-terminus of the murine omithine decarboxylase (cODC)) caged. When a key is expressed and activates the switch, the degron targets the switch and any protein (hereafter “cargo”) fused to it for degradation. In this way, a cargo of interest that has the degron Switch fused to its C-terminus can be conditionally degraded in a titratable manner via expression of the key. This is sometimes referred to as degronLOCKR. This embodiment provides significant benefits, including but not limited to the following:
[0294] degronLOCKR is activated separate from natural proteins and works in any eukaryote.
[0295] Natural proteins cannot be tuned to the extent LOCKR can. We have enabled tighter control over the dynamic range and specificity of protein degradation in vivo.
[0296] No current method to use orthogonally acting degrons in a single cell.
[0297] No current method to modularly tag any cellular protein with a conditional degron dependent on expression of the control peptide
[0298] Can tune responsiveness over a large dynamic range by varying length, changing residues within the cODC degron, and or mutating residues in interface
[0299] degronLOCKR can be used as a modular regulatory hub in biotechnological applications. By tagging degronLOCKR to (for example) metabolic enzymes, transcription factors, kinases, or phosphatases, flux through different biological pathways can be controlled.
[0300] Tagged to functional modules of engineered cell types, such as CAR, SynNotch, and kinases, this invention can improve the fidelity and modulate the function of therapeutically relevant engineered cells.
[0301] dCas9 has known off-target effects so degrading it selectively under control of degronLOCKR is a means of controlling gene therapies that rely on precise gene editing.
   degronLOCKR Design

[0302] We caged the cODC degron, a ubiquitin-independent degradation signal from the C-terminus of murine ornithine decarboxylase as a strategy for controlling arbitrary protein stability in a living cell. Our goal was to have degradation of the switch, and any protein fused to it, be inducible by Key. The caging strategy employed for Bim was used to embed three variants of cODC into Switchₐ: the wild-type sequence, wild-type with a proline removed (since proline destabilizes alpha helices), and the dipeptide sequence CA, believed to be the minimal functional residues of the degron (FIG. 17). We tested each switch variant in budding yeast S. cerevisiae, using a dual inducible system² to independently titrate the concentration of the switch with a yellow fluorescent protein (YFP) N-terminal fusion and the Key with a blue fluorescent protein (BFP) C-terminal fusion (FIG. 15a). To assess the dynamic range of switch activation we titrated in different amounts of Key using a range of progesterone (Pg) concentrations at a fixed amount of YFP-degronSwitchₐ (at a single concentration of estradiol (E2)) and measured steady-state fluorescence using flow cytometry. Key induced degradation observed for these initial constructs was dependent on the presence of the cODC degron in the switch, and was not observed when YFP was fused to either BimSwitchₐ or Switchₐ (FIG. 18). In order to optimize the amount of inducible degradation, we varied the switch toehold length to tune Kₒₚₑₙ. The switch with the largest dynamic range was the proline-removed cODC and a 12-residue toehold (hereafter referred to as degronSwitchₐ). Using this variant, YFP fluorescence fused to degronSwitchₐ was reduced up to 73% upon full induction of Keyₐ (FIG. 19).

[0303] We explored the dynamic range of degronLOCKRₐ at different concentrations of YFP-degronSwitchₐ and Keyₐ-BFP for two different Key lengths (FIG. 15b) by testing the full range of E2 and Pg combinations. The extent of Keyₐ-induced degradation of degronSwitchₐ varied as a function of the concentration of both proteins. Key, fluorescence was stable as a function of degronSwitchₐ concentration (FIG. 20), suggesting the Key is not co-degraded with the degronSwitch. With a truncated Keyₐ (43 residues versus 55 residues), the same dynamic range of switch activation was observed, but a higher Key concentration was required for maximal activation (FIG. 15c). This is similar to the behavior observed with BimLOCKR (FIG. 16d), and suggests our model of Cage/Key interaction holds true within living cells. To assess the dynamics of degronLOCKRₐ activation, we used an automated flow cytometry platform to measure YFP fluorescence as a function of time. Cells were grown at a constant concentration of E2 until YFP-degronSwitchₐ reached steady-state and then induced with Pg to activate production of Keyₐ-BFP. We found that the in viva half-life for active degronLOCKRₐ is 24 minutes, which is very similar to the reported half-life of 11-30 minutes for the constitutive cODC degron.

[0304] We next sought to enhance the functionality of degronLOCKR to trigger orthogonal degradation of different proteins in the same cell by installing the proline removed cODC degron in LOCKR_{b}, LOCKR_{c}, and LOCKR_{d}. We constitutively expressed each orthogonal switch variant fused to YFP (FIG. 21) and measured the degradation of YFP with constitutive expression of each Key variant fused to cyan fluorescent protein (CFP). DegronLOCKRₐ and degronLOCKR_{c} were strongly activated by their cognate Keys, but not by each other's Key (other constructs did not activate in vivo; FIG. 22). To test the orthogonality of the degronLOCKRs, we constitutively coexpressed degronLOCKRₐ and degronLOCKR_{c} in the same cell fused to YFP and red fluorescent protein (RFP), respectively, and used the Pg inducible system to titrate expression of each Key variant in separate strains. Expression of Keyₐ led to selective degradation of YFP but not RFP, and expression of Key_{c} led to selective degradation of RFP but not YFP (FIG. 15d). This demonstrates that the dual degronLOCKR system can function orthogonally and simultaneously in living cells.

degronLOCKR Control of Gene Expression In Vivo

[0305] To demonstrate the utility of degronLOCKR, we used it as a tool to modulate the intracellular concentration of a synthetic transcription factor and dCas9. We first placed a zinc-finger based synthetic transcription factor (SvnTF) fused to both RFP and degronSwitchₐ under the control of the E2 inducible promoter. and Keyₐ-BFP-NLS under the control of the Pg inducible promoter. To monitor SynTF activity, we measured pSynTF-YFP fluorescence in the same cell (FIG. 16a). An increase in expression of SynTF-RFP-degronSwitchₐ increased both RFP and YFP fluorescence, while an increase in Key expression decreased both outputs (FIG. 16b). For example, at 31.25 nM E2 (FIG. 16b), maximal Key induction caused a 61% reduction of RFP and 82% reduction of YFP (FIG. 16c). Notably, degronLOCKR caused a graded change in YFP fluorescence as a function of Key concentration, which contrasts with the more digital behavior of transcription factors typically used in synthetic biology applications⁵. To further establish degronLOCKR as a general method of transcriptional control, we next tested degradation of an activating dCas9-VP64 fusion. dCas9 was targeted to the tet operator site of the pTet7x with a constitutively expressed sgRNA to induce expression of YFP (FIG. 16d), and Key expression was titrated at different concentrations of dCas9 (FIG. 16e). We observed a 78% reduction of RFP and 41% reduction of YFP upon induction of Key at 31.25 nM E2 (FIG. 16t). Together, these results demonstrate the modularity and functionality of degronLOCKR as a tool to control the stability of proteins in vivo.

### Methods

### Construction of DNA Circuits

[0306] Hierarchical golden gate assembly was used to assemble plasmids for yeast strain construction using the method in Lee et al.⁷. Individual parts had their Bsal, BsmBI, and NotI cut sites removed to facilitate downstream assembly and linearization. Parts were either generated via PCR or purchased as gBlocks from IDT. These parts were assembled into transcriptional units (promoter-gene-terminator) on cassette plasmids. These cassettes were then assembled together to form multi-gene plasmids for insertion into the yeast genome.

### Yeast Strains and Growth Media

[0307] The base S. cerevisiae strain used in all experiments was BY4741 (MATa his3Δ1 leu2Δ0 met 15Δ0 ura3Δ0). All yeast cultures were grown in YPD media (10 g/L Bacto Yeast Extract, 20 g/L. Bacto peptone, 20 g/L dextrose) or synthetic complete medium (SDC) (6,7 g/L Bacto-yeast nitrogen base without amino acids, 2 g/L complete supplement amino acid mix, 20 g/L dextrose). Selection of auxotrophic markers (URA3, LEU2, and/or HIS3) was performed on synthetic complete medium with the appropriate dropout amino acid mix.

### Estradiol and Progesterone Induction

[0308] Yeast strains were grown overnight by picking a single colony from a plate into YPD media. Saturated culture was diluted 1:500 in fresh SDC and aliquoted into individual wells of a 2 mL 96 well storage block (Corning) for a three hour outgrowth at 30° C. and 900 RPM in a Multitron shaker (Infors HT). Estradiol (Sigma-Aldrich) and progesterone (Fisher Scientific) were prepared at a 10× concentration by making the appropriate dilutions into SDC from a 3.6 mM estradiol and 3.2 mM progesterone stock solution. After the three hour outgrowth, 50 ul of estradiol and progesterone inducer were added to the 96 well block in the appropriate combinations and the block was returned to the shaker.

### Description of Automated Flow Cytometry and Continuous Culture System Hardware

[0309] We adapted an existing automated experimental platform³ to perform variable concentration small molecule induction and long-term culturing. Yeast cultures were grown in 50 mL optically clear conical tubes (Falcon) that were held in eight custom temperature-controlled, magnetically stirred chambers. Liquid handling was accomplished using a 14 position stream selector (VICI Cheminert) and two syringe pumps (Cavro XCalibur Pump, TECAN) of a BD High-Throughput Sampler. Commands to the HTS were controlled using LABVIEW 2013. This setup allowed for periodic sampling and dilution of individual cultures. Each sampling period consisted of three main steps: 1) send sample to flow cytometer for measurement, 2) extract culture and send to waste, and 3) replenish culture with fresh media at desired hormone concentration. Each sampling period can be designated to either induce cultures to a new higher hormone concentration or to maintain desired hormone concentration. A sampling frequency of 24 minutes and a dilution volume of 3 mL were used.

### Yeast Culture

[0310] Yeast strains were grown overnight by picking a single colony from a plate into YPD media. Saturated culture was diluted 1:200 into fresh SDC. Cultures were grown for 2 hours in glass tubes at 30 C and 250 RPM in a Innova 44 shaker (New Brunswick). Cultures were then diluted to 0.01 OD600 in fresh SDC and aliquoted into individual 50 mL optically clear conical tubes (Falcon) at a total volume of 30 mL YPD. Another one hour outgrowth was performed in bioreactors with magnetically-controlled stir bars at 30 C. All SDC media was supplemented with 5,000 U/mL Penicillin Streptomycin (Thermo-Fisher).

Estradiol and Progesterone Induction to Test degronLOCKR Dynamics

[0311] A 1× concentration was determined by the highest desired hormone concentration at which to test strains (30 nM E2 and 50 nM Pg. respectively). A solution of E2 and SDC media was created at a 10× concentration to bring pre-induced cultures to a desired concentration in one sampling period. A second solution of Pg and SDC media was created at a 10× concentration to induce Key expression after degSwitch-YFP expression reached steady-state. SDC media was prepared at three different concentrations of hormone: (1) 10× E2/no Pg, (2) 1X E2/no Pg, (3) 1X OX Pg, and (4) 1X E2/1X Pg. After a one hour outgrowth in bioreactors (t=−6 hr), the first induction was performed to achieve E2 concentration by extracting 3 mL from all cultures and replenishing with (1). After E2 induction, sampling proceeded as described above (see Hardware). All sampling periods following the first induction time point included sending a sample to the cytometer for measurement, extracting 3 mL from all cultures, and replenishing cultures with (2). During the second induction time point (t=0 hr), cultures were induced with (3) to activate Key expression. This induction was followed by the same procedure as the first induction, except that hormone concentrations were maintained by (4). Controls (no activated Key expression) did not undergo a second induction and, instead, continued to be replenished by (2).

### Flow Cytometry

[0312] Analysis of fluorescent protein expression was performed using a BD LSR11 flow cytometer (BD Biosciences) equipped with a high-throughput sampler. Cultures were diluted in TE before running through the instrument to obtain an acceptable density of cells. YFP (Venus) fluorescence was measured using the FITC channel, RFP (mScarlet) was measured using the PE-Texas Red channel, and BFP (mTagBFP2) was measured using the DAPI channel. For steady-state measurements, 5,000-10,000 events were collected per sample. For dynamic measurements, 2,000-10,000 events were collected per sample. Fluorescence values were calculated as the height (H) measurement for the appropriate channel and normalized to cell size by dividing by side scatter (SSC-H). All analysis of flow cytornetry data was performed in Python 2.7 using the package FlowCytomenyTools and custom scripts.

Appendix
Amino Acid Sequence of cODC degrons threaded: An “X” represents a sequence
position that can be any amino acid
>cODC
(SEQ ID NO: 28, 466)
LPMSCAQES
>cODC_noPro
(SEQ ID NO: 28, 467)
LXMSCAQES
>cODC_CA_only
----CA---
Amino Acid Sequences of degronLOCKR Switches
Degron sequence underlined
Latch indicated by [brackets]
>degonLOCKR_a_327
(SEQ ID NO: 27359)
SKEAVTKLQALNIKLAEKLLEAVTKLQALNIKLAEKLLEALARLQELNIALVYLAVELTDPKRIADEIKKVKDKS
KEIVERAEEEIARAAAESKKILDEAEEEIARAAAESKKILDEGSGSGSDAVAELQALNLKLAELLLEAVAELQAL
NLKLAELLLEAIAKLQELNIKLVELLTKLTDPATIREAIRKVKEDSERIVAEAERLIAAAKAESERIIREAERLI
AAAKAESERIIREGSGSGDPDVARLQELNIELARELLRDVARLQELNIELARELLRAAAELQELNIKLVELASEL
TDP[DEARKAIARVKRESKRIVEDAERLPMSCAQESEKISREAERLIREAA]
>degonLOCKR_a_327_noPro
(SEQ ID NO: 27360)
SKEAVTKLQALNIKLAEKLLEAVTKLQALNIKLAEKLLEALARLQELNIALVYLAVELTDPKRIADEIKKVKDKS
KEIVERAEEEIARAAAESKKILDEAEEEIARAAAESKKILDEGSGSGSDAVAELQALNLKLAELLLEAVAELQAL
NLKLAELLLEAIAKLQELNIKLVELLTKLTDPATIREAIRKVKEDSERIVAEAERLIAAAKAESERIIREAERLI
AAAKAESERIIREGSGSGDPDVARLQELNIELARELLRDVARLQELNIELARELLRAAAELQELNIKLVELASEL
TDP[DEARKAIARVKRESKRIVEDAERLAMSCAQESEKISREAERLIREAA]
>degonLOCKR_a_CAonly
(SEQ ID NO: 27361)
SKEAVTKLQALNIKLAEKLLEAVTKLQALNIKLAEKLLEALARLQELNIALVYLAVELTDPKRIADEIKKVKDKS
KEIVERAEEEIARAAAESKKILDEAEEEIARAAAESKKILDEGSGSGSDAVAELQALNLKLAELLLEAVAELQAL
NLKLAELLLEAIAKLQELNIKLVELLTKLTDPATIREAIRKVKEDSERIVAEAERLIAAAKAESERIIREAERLI
AAAKAESERIIREGSGSGDPDVARLQELNIELARELLRDVARLQELNIELARELLRAAAELQELNIKLVELASEL
TDP[DEARKAIARVKRESKRIVEDAERLIRECAAASEKISREAERLIREAA]
>degonLOCKR_a_324_t12
(SEQ ID NO: 27362)
SKEAVTKLQALNIKLAEKLLEAVTKLQALNIKLAEKLLEALARLQELNIALVYLAVELTDPKRIADEIKKVKDKS
KEIVERAEEEIARAAAESKKILDEAEEEIARAAAESKKILDEGSGSGSDAVAELQALNLKLAELLLEAVAELQAL
NLKLAELLLEAIAKLQELNIKLVELLTKLTDPATIREAIRKVKEDSERIVAEAERLIAAAKAESERIIREAERLI
AAAKAESERIIREGSGSGDPDVARLQELNIELARELLRDVARLQELNIELARELLRAAAELQELNIKLVELASEL
TDP[DEARKAIARVKRESKRIVEDLIMSCAQESAASEKISREAERLIR]
>degonLOCKR_a_320_t16
(SEQ ID NO: 27363)
SKEAVTKLQALNIKLAEKLLEAVTKLQALNIKLAEKLLEALARLQELNIALVYLAVELTDPKRIADEIKKVKDKS
KEIVERAEEEIARAAAESKKILDEAEEEIARAAAESKKILDEGSGSGSDAVAELQALNLKLAELLLEAVAELQAL
NLKLAELLLEAIAKLQELNIKLVELLTKLTDPATIREAIRKVKEDSERIVAEAERLIAAAKAESERIIREAERLI
AAAKAESERIIREGSGSGDPDVARLQELNIELARELLRDVARLQELNIELARELLRAAAELQELNIKLVELASEL
TDP[DEARKAIARVKRESKRLVMSCAQESREAAAASEKISREAE]
>degron-miniLOCKRa_1_t9
(SEQ ID NO: 27364)
NKEDATEAQKKAIRAAEELLKDVTRIQERAIREAEKALERLARVQEEAIRRVYEAVESKNKEELKKVKEEIEELL
RRLKRELDELEREIRELLKEIKEKADRLEKEIRDLIERIRRDRNASDEVVTRLARLNEELIRELREDVRRLAELN
KELLRELERAARELARLNEKLLELADRVETE[EEARKAIARVKRESKRIVEDAERLAMSCAQESEKISREAERLI
REAA]
>degron-miniLOCKRa_1_t12
(SEQ ID NO: 27365)
NKEDATEAQKKAIRAAEELLKDVTRIQERAIREAEKALERLARVQEEAIRRVYEAVESKNKEELKKVKEEIEELL
RRLKRELDELEREIRELLKEIKEKADRLEKEIRDLIERIRRDRNASDEVVTRLARLNEELIRELREDVRRLAELN
KELLRELERAARELARLNEKLLELADRVETE[EEARKAIARVKRESKRIVEDLIMSCAQESAASEKISREAERLI
R]
>degron-miniLOCKRa_2_t9
(SEQ ID NO: 27366)
DERLKRLNERLADELDKDLERLLRLNEELARELTRAAEELRELNEKLVELAKKLQGGRSREVAERAEKEREKIRR
KLEEIKKEIKEDADRIKKRADELRRRLEKTLEDAARELEKLKREPRTEELKRKATELQKEAIRRAEELLKEVTDV
QRRAIERAEELLEKLARLQEEAIRTVYLLVELNKV[DRARKAIARVKRESKRIVEDAERLAMSCAQESEKISREA
ERLIREAA]
>degron-miniLOCKRa_t12
(SEQ ID NO: 27367)
DERLKRLNERLADELDKDLERLLRLNEELARELTRAAEELRELNEKLVELAKKLQGGRSREVAERAEKEREKIRR
KLEEIKKEIKEDADRIKKRADELRRRLEKTLEDAARELEKLKREPRTEELKRKATELQKENIRRAEELLKEVTDV
QRRNIERAEELLEKLARLQEENIRTVYLLVELNKV[DRARKAIARVKRESKRIVEDLIMSCAQESAASEKISREA
ERLIR]
>1fix-short_cODC_mut
(SEQ ID NO: 27368)
SKEAAKKLQDLNIELARKLLEASTKLQRLNIRLAEALLEAIARLQELNLELVYLAVELTDPKRIRDEIKEVKDKS
KEIIRRAEKEIDDAAKESKKILEEARKAIRDAAEESRKILEEGSGSGSDALDELQKLNLELAKLLLKAIAETQDL
NLRAAKAFLEAAAKLQELNIRAVELLVKLTDPATIRRALEHAKRRSKEIIDEAERAIRAAKRESERIIEEARRLI
EKAKEESERIIREGSGSGDPDIKKLQDLNIELARELLRAHAQLQRLNLELLRELLRALAQLQELNLDLLRLASEL
TDPDEARKAIARVKRESKRIVEDAERLSREAAALSMSCAQESERSIREAAAASEKISRE]
>1fix-short_cODC_mut_t6
(SEQ ID NO: 27369)
SKEAAKKLQDLNIELARKLLEASTKLQRLNIRLAEALLEAIARLQELNLELVYLAVELTDPKRIRDEIKEVKDKS
KEIIRRAEKEIDDAAKESKKILEEARKAIRDAAEESRKILEEGSGSGSDALDELQKLNLELAKLLLKAIAETQDL
NLRAAKAFLEAAAKLQELNIRAVELLVKLTDPATIRRALEHAKRRSKEIIDEAERAIRAAKRESERIIEEARRLI
EKAKEESERIIREGSGSGDPDIKKLQDLNIELARELLRAHAQLQRLNLELLRELLRALAQLQELNLDLLRLASEL
TDP[DEARKAIARVKRESKRIVEDAERLSMSCAQESEKISREAERSIREAAAAS]
>1fix-short_cODC
(SEQ ID NO: 27370)
SELARKLLEASTKLQRLNIRLAEALLEAIARLQELNLELVYLAVELTDPKRIRDEIKEVKDKSKEIIRRAEKEID
DAAKESEKILEEAREAISGSGSELAKLLLKAIAETQDLNLRAAKAFLEAAAKLQELNIRAVELLVKLTDPATIRE
ALEHAKRRSKEIIDEAERAIRAAKRESERIIEEARRLIEKGSGSGSELARELLRAHAQLQRLNLELLRELLRALA
QLQELNLDLLRLASELTDP[DEARKAIARVKRESKRIVEDLEMSCAQESAASEKISREAERLIR]
>1fix-short_cODC_t5
(SEQ ID NO: 27371)
SELARKLLEASTKLQRLNIRLAEALLEAIARLQELNLELVYLAVELTDPKRIRDEIKEVKDKSKEIIRRAEKEID
DAAKESEKILEEAREAISGSGSELAKLLLKAIAETQDLNLRAAKAFLEAAAKLQELNIRAVELLVKLTDPATIRE
ALEHAKRRSKEIIDEAERAIRAAKRESERIIEEARRLIEKGSGSGSELARELLRAHAQLQRLNLELLRELLRALA
QLQELNLDLLRLASELTDP[DEARKAIARVKRESKRLVMSCAQESREAAAASEKISREA]
>1fix-short_cODC_t8
(SEQ ID NO: 27372)
SELARKLLEASTKLQRLNIRLAEALLEAIARLQELNLELVYLAVELTDPKRIRDEIKEVKDKSKEIIRRAEKEID
DAAKESEKILEEAREAISGSGSELAKLLLKAIAETQDLNLRAAKAFLEAAAKLQELNIRAVELLVKLTDPATIRE
ALEHAKRRSKEIIDEAERAIRAAKRESERIIEEARRLIEKGSGSGSELARELLRAHAQLQRLNLELLRELLRALA
QLQELNLDLLRLASELTDP[DEARKAIARVKRLSMSCAQESERLIREAAAASEKIK]
>1fix-short_cODC_t11
(SEQ ID NO: 27373)
SELARKLLEASTKLQRLNIRLAEALLEAIARLQELNLELVYLAVELTDPKRIRDEIKEVKDKSKEIIRRAEKEID
DAAKESEKILEEAREAISGSGSELAKLLLKAIAETQDLNLRAAKAFLEAAAKLQELNIRAVELLVKLTDPATIRE
ALEHAKRRSKEIIDEAERAIRAAKRESERIIEEARRLIEKGSGSGSELARELLRAHAQLQRLNLELLRELLRALA
QLQELNLDLLRLASELTDP[DEARKAIARLKMSCAQESEDAERLIREAAAASE]
>degonLOCKRb
(SEQ ID NO: 27374)
SHAAVIKLSDLNIRLLDKLLQAVIKLTELNAELNRKLIEALQRLFDLNVALVHLAAELTDPKRIADEIKKVKDKS
KEIVERAEEEIARAAAESKKILDEAEEEIARAAAESKKILDEGSGSGSDAVAELQALNLKLAELLLEAVAELQAL
NLKLAELLLEAIAKLQELNIKLVELLTKLTDPATIREAIRKVKEDSERIVAEAERLIAAAKAESERIIREAERLI
AAAKAESERIIREGSGSNDPQVAQNQETFIELARDALRLVAENQEAFIEVARLTLRAAALAQEVAIKAVEAASEG
GSGSGP[NKEEIEKLAKEAREKLKKAEKEHKMSCAQERKKNKKAREDLKKKADK]
>degonLOCKRb_t13
(SEQ ID NO: 27375)
SHAAVIKLSDLNIRLLDKLLQAVIKLTELNAELNRKLIEALQRLFDLNVALVHLAAELTDPKRIADEIKKVKDKS
KEIVERAEEEIARAAAESKKILDEAEEEIARAAAESKKILDEGSGSGSDAVAELQALNLKLAELLLEAVAELQAL
NLKLAELLLEAIAKLQELNIKLVELLTKLTDPATIREAIRKVKEDSERIVAEAERLIAAAKAESERIIREAERLI
AAAKAESERIIREGSGSNDPQVAQNQETFIELARDALRLVAENQEAFIEVARLTLRAAALAQEVAIKAVEAASEG
GSGSGP[NKEEIEKLAKEAREKLKKAEMSCAQEHDKLRKKNKKAREDLKK]
>degonLOCKRc_t9
(SEQ ID NO: 27376)
SLEAVLKLAELNLKLSDKLAEAVQKLAALLNKLLEKLSEALQRLFELNVALVTLAIELTDPKRIADEIKKVKDKS
KEIVERAEEEIARAAAESKKILDEAEEEIARAAAESKKILDEGSGSGSDAVAELQALNLKLAELLLEAVAELQAL
NLKLAELLLEAIAKLQELNIKLVELLTKLTDPATIREAIRKVKEDSERIVAEAERLIAAAKAESERIIREAERLI
AAAKAESERIIREGSGSNDPLVARLQELLIEHARELLRLVATSQEIFIELARAFLANAAQLQEAAIKAVEAASEN
GSGSGP[SSEKVRRELKESLKENHKQNQKLLMSCAQEQEKLNRELEELKKKHKK]
>degonLOCKRc_t13
(SEQ ID NO: 27377)
SLEAVLKLAELNLKLSDKLAEAVQKLAALLNKLLEKLSEALQRLFELNVALVTLAIELTDPKRIADEIKKVKDKS
KEIVERAEEEIARAAAESKKILDEAEEEIARAAAESKKILDEGSGSGSDAVAELQALNLKLAELLLEAVAELQAL
NLKLAELLLEAIAKLQELNIKLVELLTKLTDPATIREAIRKVKEDSERIVAEAERLIAAAKAESERIIREAERLI
AAAKAESERIIREGSGSNDPLVARLQELLIEHARELLRLVATSQEIFIELARAFLANAAQLQEAAIKAVEAASEN
GSGSGP[SSEKVRRELKESLKENHKQNMSCAQEHKRAQEKLNRELEELKK]
>degron-miniLOCKRc_1_t9
(SEQ ID NO: 27378)
LIERLTRLEKEHVRELKRLLDTSLEILRRLVEAFETNLRQLKEALKRALEAANLHNEEVEEVLRKLEEDLRRLEE
ELRKTLDDVRKEVKRLKEELDKRIKEVEDELRKIKEKLKKGDKNEKRVLEEILRLAEDVLKKSDKLAKDVQERAR
ELNEILEELSRKLQELFERVVEEVTRNVPTTE[RIEKVRRELKESLKENHKQNQKLLMSCAQEQEKLNRELEELK
KKHKK]
>degron-miniLOCKRc_1_t13
(SEQ ID NO: 27379)
LIERLTRLEKEHVRELKRLLDTSLEILRRLVEAFETNLRQLKEALKRALEAANLHNEEVEEVLRKLEEDLRRLEE
ELRKTLDDVRKEVKRLKEELDKRIKEVEDELRKIKEKLKKGDKNEKRVLEEILRLAEDVLKKSDKLAKDVQERAR
ELNEILEELSRKLQELFERVVEEVTRNVPTTE[RIEKVRRELKESLKENHKLNMSCAQEHKRAQEKLNRELEELK
K]
>degron-miniLOCKRc_2_t9
(SEQ ID NO: 27380)
SEERVLELAEEALRLSDEAAKEIQELARRLNEELEKLSKELQDLFERIVETVTRLIDADEETLKRAAEEIKKRLE
DARKKAKEAADKAREELDRARKKLKELVDEIRKKAKDALEKAGADEELVARLLRLLEEHARELERLLRTSARIIE
RLLDAFRRNLEQLKEAADKAVEAAEEAVRRVEDVRV[WSEKVRRELKESLKENHKQNQKLLMSCAQEQEKLNREL
EELKKKHKK]
>degron-miniLOCKRc_t13
(SEQ ID NO: 27381)
SEERVLELAEEALRLSDEAAKEIQELARRLNEELEKLSKELQDLFERIVETVTRLIDADEETLKRAAEEIKKRLE
DARKKAKEAADKAREELDRARKKLKELVDEIRKKAKDALEKAGADEELVARLLRLLEEHARELERLLRTSARIIE
RLLDAFRRNLEQLKEAADKAVEAAEEAVRRVEDVRV[WSEKVRRELKESLKENHKLNMSCAQEHKRAQEKLNREL
EELKK]
>degronLOCKRc_1fix_t13
(SEQ ID NO: 27382)
SLEAALKLAELNLKLSDKLAEASQKLAALLNKLLEKLSEAIQRLFELNLALVTLAIELTDPKRIADEIKKVKDKS
KEIIERAEEEIARAAAESKKILDEAEEEIARAAAESKKILDEGSGSGSDALAELQALNLKLAELLLEAIAETQAL
NLKAAEAFLEAAAKLQELNIKAVELLVKLTDPATIREALRKAKEDSERIIAEAERAIAAAKAESERIIREAERLI
AAAKAESERIIREGSGSNDPLIARLQELLIEHARELLRLHATSQEIFVELLRAFLANLAQLQEAALKALEAASEN
GSGSGP[SSEKVRRELKESLKENHKQNQKLLMSCAQEQEKLNRELEELKKKHKK]
>degonLOCKRd
(SEQ ID NO: 27383)
SLEAVLKLFELNHKLSEKLLEAVLKLHALNQKLSQKLLEALARLLELNVALVELAIELTDPKRIADEIKKVKDKS
KEIVERAEEEIARAAAESKKILDEAEEEIARAAAESKKILDEGSGSGSDAVAELQALNLKLAELLLEAVAELQAL
NLKLAELLLEAIAKLQELNIKLVELLTKLTDPATIREAIRKVKEDSERIVAEAERLIAAAKAESERIIREAERLI
AAAKAESERIIREGSGSGDPEVARLQEAFIEQAREILRNVAAAQEALIEQARRLLALAALAQEAAIKAVELASEH
GSGSGP[DTVKRILEELRRRFEKLAKDLDDIAMSCAQEHKKHNKELKDKQRKIK]
Amino Acid Sequences of keys for degronKOCKRs
>key_a
(SEQ ID NO: 28477)
EARKAIARVKRESKRIVEDAERLIREAAAASEKISREAERLIREAAAASEKISRE
>key_a_m4
(SEQ ID NO: 28478)
DEARKAIARVKRESKRIVEDAERLIREAAAASEKISREAERLIREAAAASEK
>key_a_m9
(SEQ ID NO: 28479)
DEARKAIARVKRESKRIVEDAERLIREAAAASEKISREAERLIREAAK
>key_a_m12
(SEQ ID NO: 28480)
DEARKAIARVKRESKRIVEDAERLIREAAAASEKISREAERLIR
>key_a_m15
(SEQ ID NO: 28481)
DEARKAIARVKRESKRIVEDAERLIREAAAASEKISREAER
>key_b
(SEQ ID NO: 28482)
NKEEIEKLAKEAREKLKKAEKEHKEIHDKLRKKNKKAREDLKKKADELRETNKRVN
>key_c
(SEQ ID NO: 28483)
SSEKVRRELKESLKENHKQNQKLLKDHKRAQEKLNRELEELKKKHKKTLDDIRRES
>key_d
(SEQ ID NO: 28484)
DTVKRILEELRRRFEKLAKDLDDIARKLLEDHKKHNKELKDKQRKIKKEADDAARS
>key_d_m4
(SEQ ID NO: 28485)
RILEELRRRFEKLAKDLDDIARKLLEDHKKHNKELKDKQRKIKKEADDAARS
>key_d_m7
(SEQ ID NO: 28486)
EELRRRFEKLAKDLDDIARKLLEDHKKHNKELKDKQRKIKKEADDAARS

Mapping Switch to Key that Activates It: See Table 6 Above
cODC degon Sequences

[0313] All cODC Variants encoded into the Latch summarized in this sequence logo shown in FIG. 24. The minimal motif for degradation activity is CA in the fifth and sixth positions, which are between 10-30 residues from the C-terminus. Multiple designs have residues 3-8 fixed at MSCAQE, except for the CA_only design. Diversity in the first and last position is due to structural considerations in LOCKR_{b}, LOCKR_{c}, and LOCKR_{d} where the residue from the base scaffold was chosen over the cODC sequence. Diversity in the second position is due to the proline destabilizing the helical conformation, as described in the above text. In that case, the residue from the base scaffold was chosen at that position.

[0314] To evaluate degronLOCKR function in mammalian cells, degronSwitcha fused to mCherry™ RFP was expressed in human HEK293T cells, and RFP fluorescence was measured in the presence and absence of Key. A redesigned asymmetric degronSwitcha with an 8-residue toehold (1fix-short_cODC_t8 (SEQ ID NO: 27,372)) (see FIG. 25) triggered a 11-fold reduction in mean RFP fluorescence in the presence of Key. These data demonstrate the functionality of the degronLOCKR system in mammalian cells.

[0315] The ability of degronLOCKR to function in human primary T cells was demonstrated by inducibly degrading a mCherry™ fluorescent protein. Lentiviral transfer constructs were constructed containing mCherry™ fused to the asymmetric short scaffold degronSwitch with a t8 toehold and cODC degron embedded in the latch (1fix-short_cODC_t8 (SEQ ID NO: 27,372)). The mCherry™-degronSwitch fusion was expressed using pPGK constitutive promoter. In a second lentiviral construct a fusion of Key to tagBFP was expressed using four different constitutive promoters (pPGK, pSFFV, pCMV(G), pCMV(D)).

[0316] Experiments were performed in human primary CD4+ T cells. Cells were transduced with different combinations of the aforementioned lentiviruses. In one instance, cells were transduced with only mCherry™-degronSwitch. In others, cells received both the mCherry™-degronSwitch virus in addition to a virus expressing Key-tagBFP. After lentiviral transduction, fluorescence was measured using flow cytometry. Distributions are shown in FIG. 26. We observed that mCherry™ fluorescence was nearly completely abolished when cells were co-transduced with a virus containing any amount of Key production (Key production was quantified using tagBFP fluorescence). This data indicates that the Key is able to trigger the degronSwitch and activate degradation of mCherry™.

### REFERENCES

[0317] 1. Takeuchi, J., Chen, H., Hoyt, M. A. & Coffino, P. Structural elements of the ubiquitin-independent proteasome degron of ornithine decarboxylase. Biochem. J.1410, 401-407 (2008).
[0318] 2. Aranda-Diaz, A., Mace, K., Zuleta, I., Harrigan, P. & El-Samad, H. Robust Synthetic Circuits for Two-Dimensional Control of Gene Expression in Yeast. ACS Synth. Biol. 6, 545-554 (2017).
[0319] 3. Harrigan, P., Madhani, H. & El-Samad, H. Real time genetic compensation operationally defines the dynamic demands of feedback control. bioRxiv 244020 (2018). doi:10.1101/244020
[0320] 4. Khalil, A. S. et al. A synthetic biology framework for programming eukaryotic transcription functions. Cell 150, 647-658 (2012).
[0321] 5. Nielsen, A. A. K. et al. Genetic circuit design. automation. Science 352, aac7341 (2016).
[0322] 6. Perez-Pinera, P. et al. RNA-guided gene activation by CRISPR-Cas9-based transcription factors. Nat. Methods 10, 973-976 (2013).
[0323] 7. Lee, M. E., DeLoache, W. C., Cervantes, B. & Dueber, J. E. A highly characterized yeast toolkit for modular, multipart assembly. AGS Synth. Biol. 4,975-986 (2015).

We claim:

1. A non-naturally occurring cage polypeptide comprising:
(a) a helical bundle, comprising between 2 and 7 alpha-helices, wherein the helical bundle comprises:
(i) a structural region; and
(ii) a latch region, wherein the latch region comprises a degron located within the latch region, wherein the structural region interacts with the latch region to prevent activity of the degron; and
(b) amino acid linkers connecting each alpha helix.

2. The cage polypeptide of claim 1, wherein the latch region is C-terminal to the structural region, and wherein the degron is located within about 100, 95, 90, 85, 80, 75, 70, 65, 60, 55, 50, 45, 40, 35, 30, 25, 20, 15, 10, 5, 4, 3, 2, 1, or 0 amino acid residues of the C-terminus of the latch region, and/or within about 100, 95, 90, 85, 80, 75, 70, 65, 60, 55, 50, 45, 40, 35, 30, 25, 20, 15, 10, 5, 4, 3, 2, 1, or 0 amino acid residues of the C-terminus of the cage polypeptide.

3. The cage polypeptide of claim 2, wherein the degron comprises a CA dipeptide located between 10-30 residues from the C-terminus of the cage polypeptide.

4. The cage polypeptide of claim 3 wherein the degron comprises the peptide MSCAQES (SEQ ID NO: 28468).

5. The cage polypeptide of claim 3 wherein the degron comprises the peptide L(X)MSCAQES (SEQ ID NO: 28467), wherein X can be any amino acid residue, wherein X is optionally not praline.

6. The cage polypeptide of claim 1 or 2, wherein the degron comprises an amino acid residue or peptide selected from the group consisting of
(a) GG; RG; KG; QG; WG; PG; AG; RxxG; EE; R; Rxx; Vx; Ax; A, wherein “x” can be any amino acid residue, and wherein the degron is within 10-30 amino acids of a terminus of the latch region, and/or within 10-30 amino acids of a terminus of the cage polypeptide;
(b) an amino acid residue or peptide that recruits an ubiquitin ligase that ubiquitilates the cage polypeptide and/or the operably linked functional polypeptide;
(c) a proteolysis-targeting chimeric molecule (PROTAC); and
(d) any other degron described herein.

7. The cage polypeptide of claim 1, wherein the latch region is N-terminal to the structural region, and wherein the degron is located within about 100, 95, 90, 85, 80, 75, 70, 65, 60, 55, 50, 45, 40, 35, 30, 25, 20, 15, 10, 5, 4, 3, 2, 1, or 0 amino acid residues of the N-terminus of the latch region, and/or within about 100, 95, 90, 85, 80, 75, 70, 65, 60, 55, 50, 45, 40, 35, 30, 25, 20, 15, 10, 5, 4, 3, 2, 1, or 0 amino acid residues of the N-terminus of the cage polypeptide.

8. The cage polypeptide of claim 1 or 2, wherein the degron comprises a peptide selected from the group consisting of the following (residues within brackets are optional):
(SEQ ID NO: 28469)
[[KTRGVEEVAEGVVLL]]RRRG [[NK(FAM)KKK]],
(SEQ ID NO: 28470)
[[KPFLNGGPY]] HSREQSTDSG [[LGLGSYK(FAM)KKK]],
(SEQ ID NO: 28471)
ASADLDLEALAPYIPADDDFQLRK(FAM)KKK,
(SEQ ID NO: 28472)
[[K-(PEG)-KEEK]] DINN [[VKKTK(FAM)KKK]],
(SEQ ID NO: 28487)
[[K-(PEG)]] DVQKADVSST [[GQGIDSK(FAM)KKK]],
(SEQ ID NO: 28473)
KAAEEEEVSLASTPTDVRDVDIK(FAM)KKK,
(SEQ ID NO: 28474)
[[KKYSSQTSQ]] DSGNYS [[NK(FAM)KKK]],
(SEQ ID NO: 28475)
KPLSSSVPSQKTYQGSYGFRLGK(FAM)KKK,
(SEQ ID NO: 28476)
[[KAWQQQSYL]] DSGIHSG [[ATTTAPK(FAM)KKK]];
(SEQ ID NO: 28488)
[[KTRGVEEVAEGVVLL]]RRRG [[NKKKK]],
(SEQ ID NO: 28489)
[[KPFLNGGPY]] HSREQSTDSG [[LGLGSYKKKK]],
(SEQ ID NO: 28490)
ASADLDLEALAPYIPADDDFQLRKKKK
(SEQ ID NO: 28491)
[[KKEEK]] DINNN [[VKKTKKKK]],
(SEQ ID NO: 28492)
[[K]] DVQKADVSST [[GQGIDSKKKK]],
(SEQ ID NO: 28493)
KAAEEEEVSLASTPTDVRDVDIKKKK,
(SEQ ID NO: 28494)
[[KKYSSQTSQ]] DSGNYS [[NKKKK]],
(SEQ ID NO: 28495)
KPLSSSVPSQKTYQGSYGFRLGKKKK,
(SEQ ID NO: 28496)
[[KAWQQQSYL]] DSGIHSG [[ATTTAPKKKK]];
(SEQ ID NO: 28497)
RRRG;
(SEQ ID NO: 28498)
HSREQSTDSG;
(SEQ ID NO: 28499)
DINNN;
(SEQ ID NO: 28500)
DVQKADVSST;
(SEQ ID NO: 28501)
DSGNYS;
and
(SEQ ID NO: 28502
DSGIHSG.

9. The cage polypeptide of any one of claims 1-8, further comprising one or more functional polypeptide domains.

10. The cage polypeptide of claim 9, wherein the one or more functional polypeptide domains are located at the N-terminus of the cage polypeptide and the latch region is located C-terminal to the structural region, or wherein the one or more functional polypeptide domains are located at the C-terminus of the cage polypeptide and the latch region is located N-terminal to the structural region.

11. The cage polypeptide of claim 9, wherein the one or more functional polypeptide domains are located at the same terminus or of the cage polypeptide as the latch region.

12. The cage polypeptide of any one of claims 9-11, wherein the one or more functional polypeptide domains include, but are not limited to metabolic enzymes, transcription factors, kinases, phosphatases, Chimeric Antigen Receptor (CAR), T Cell Receptor (TCR), SynNotch, TCR mimics, cytokine receptors, G-protein coupled receptors (GPCR), co-stimulatory receptors (including but not limited to CD28, CTLA-4, ICOS), co-inhibitory receptors (e.g. PD-1), endogenous signaling domains (including but not limited to Pleckstrin Homology (PH), Src Homology 2 (SH2), Src Homology 3 (SH3), WW, C1, PDZ, CARD, phosphotyrosine-binding, proline-rich region, coiled-coil, and pseudokinase domains), synthetic receptors or synthetic signaling proteins comprising-one or more signaling domain (including but not limited to Pleckstrin Homology (PH), Src Homology 2 (SH2), Src Homology 3 (SH3), WW, C1, PDZ, CARD, phosphotyrosine-binding, proline-rich region, coiled-coil, and pseudokinase domains), engineered or endogenous receptors containing ITAM or ITIM motifs, jAK/STAT binding motifs, DNA binding domains (including but not limited to Cas9, dCas9, TALEs, and Zinc Fingers), vesicular trafficking domains, protein degradation domains (including but not limited to ubiqui tin recruitment domains and proteasomal-targeting domains), cell death domains (including but not limited to those involved in the apoptosis, necroptosis, and pyroptosis), fluorescent proteins, de novo designed proteins, a second cage polypeptide described herein, such as one that binds to a key polypeptide different than a key polypeptide bound by the cage polypeptide), a key polypeptide described herein, such as one that does not bind to the cage polypeptide, and active domains thereof.

13. The cage polypeptide of any one of claims 1-12, wherein the latch region comprises one or more additional bioactive peptides besides the degron, wherein the structural region interacts with the latch region to prevent activity of the one or more additional bioactive peptides.

14. The cage polypeptide of claim 13, wherein the one or more additional bioactive peptides may comprise one or more additional bioactive peptide comprising the amino acid sequence selected from the non-limiting group consisting of SEQ ID NO: 50, 60, 62-64, 66, 27052-27093, and 27118-27119.

15. The cage polypeptide of any one of claims 1-14. wherein each helix is independently 18-60, 18-55, 18-50, 18-45, 22-60, 22-55, 22-50, 22-45, 25-60, 25-55, 25-50, 25-45, 28-60, 28-55, 28-50, 28-45, 32-60, 32-55, 32-50, 32-45, 35-60, 35-55, 35-50, 35-45, 38-60, 38-55, 38-50, 38-45, 40-60, 40-58, 40-55. 40-50, or 40-45 amino acids in length.

16. The cage polypeptide of any one of claims 1-15, wherein each amino acid linker is independently between 3-10, 4-10, 5-10, 6-10, 7-10, 8-10, 9-10, 2-9, 3-9, 4-9, 5-9, 6-9, 7-9, 8-9, 2-8. 3-8, 4-8, 5-8, 6-8, 7-8, 2-7, 3-7. 4-7, 5-7, 6-7, 2-6, 3-6, 4-6, 5-6, 2-5, 3-5, 4-5, 2-4, 3-4, 2-3, or 2, 3, 4. 5, 6, 7, 8, 9, or 10 amino acids in length, not including any functional polypeptide domain fused to the linker.

17. The cage polypeptide of any one of claims 1-16, wherein the cage polypeptide comprises the amino acid sequence having at least 45%, 50%, 55%, 60%, 65%, 70%, 75%, 80%, 85%, 90%, 91%, 92%, 93%, 94%, 95%, 96%, 97%, 98%, 99%, or 100% sequence identity, not including optional residues, along the full length of the amino acid sequence of a cage polypeptide selected from the group consisting of (a) SEQ ID NO: 27359-28465 or a cage polypeptide listed in Table 7 (in (a) embodiments, the degron is included within the polypeptide sequence), and (b) SEQ ID NOS:1-49, 51-52, 54-59, 61, 65, 67-91, 92 -2033, SEQ ID NOS:2034-14317, 27094-27117, 27120-27125, 27278-27321, and cage polypeptides listed in Table 2 (polypeptides with an even-numbered SEQ ID NO between SEQ ID NOS: 27126 and 27276), Table 3, and/or Table 4 ((in (b) embodiments, the degron is not included in the amino acid sequence and would be added within the latch region, including but not limited to those degron amino acid sequences disclosed herein.

18. A kit comprising:
(a) the cage polypeptide of any one of claims 1-17; and
(b) a key polypeptide capable of binding to the cage polypeptide structural region, thereby displacing the latch region and activating the one or more degron.

19. A degron LOCKR switch comprising:
(a) the cage polypeptide of any one of claims 1-17; and
(b) a key polypeptide capable of binding to the cage polypeptide structural region, thereby displacing the latch region and activating the one or more degron.

20. The kit of claim 18 or the degron LOCKR switch of claim 19, wherein the key polypeptide comprises an amino acid sequence having at least 45%, 50%, 55%, 60%, 65%, 70%, 75%, 80%, 85%, 90%, 91%, 92%, 93%, 94%, 95%, 96%, 97%, 98%, 99%, or 100% sequence identity, not including optional residues, along the full length of the amino acid sequence of a key protein disclosed herein, or a key polypeptide selected from the group consisting of SEQ ID NOS: 26602-27050, and 27,322 to 27,358. and 28477-28486, or a key polypeptide listed in Table 7.

21. The kit or degron LOCKR switch of any one of claims 18-20, wherein the cage polypeptide comprises an amino acid sequence having at least 45%, 50%, 55%, 60%, 65%, 70%, 75%, 80%, 85%, 90%, 91%, 92%. 93%, 94%, 95%, 96%, 97%, 98%, 99%, or 100% sequence identity, not including optional residues, along the full length of the amino acid sequence selected from the group consisting of SEQ ID NO: 27359-28465 or a cage polypeptide listed in Table 7.

22. The kit or degron LOCKR switch of any one of claims 18-21, wherein the one or more cage polypeptide and the one or more key polypeptide comprise at least one cave polypeptide and at least one key polypeptide comprising an amino acid sequence having at least 40%, 45%, 50%, 55%, 60%, 65%, 70%, 75%, 80%, 85%, 90%, 91%, 92%, 93%, 94%, 95%, 96%, 97%, 98%, 99%, or 100% sequence identity, not including optional residues, along the full length of a cage polypeptide and a key polypeptide, respectively, the in the same row of Table 2, 3, 4, 5, 6, or 7, in particular Table 6 or Table 7.

23. A nucleic acid encoding the cage polypeptide of any one of claims 1-17.

24. An expression vector comprising the nucleic acid of claim 23 operatively linked to a promoter.

25. A kit comprising:
(a) one or more nucleic acids encoding the cage polypeptide of any one of claims 1-17: and
(b) one or more nucleic acids encoding one or more key polypeptides capable of binding to the cage polypeptide structural region.

26. A kit comprising:
(a) one or more expression vectors according to claim 24; and
(b) one or more expression vectors comprising one or more nucleic acids encoding one or more key polypeptides capable of binding to the cage polypeptide structural region, wherein the one or more nucleic acids encoding one or more key polypeptides are operatively linked to a promoter.

27. A host cell comprising one or more nucleic acids encoding the cage polypeptide of any one of claims 1-17, and/or one or more of the expression vectors of claim 24.

28. The host cell of claim 27, further comprising one or more nucleic acids encoding one or more key polypeptides capable of binding to the cage polypeptide structural region, wherein the one or more nucleic acids encoding one or more key polypeptides capable of binding to the cage polypeptide structural region are operatively linked to a promoter, and/or one or more expression vectors comprising one or more nucleic acids encoding one or more key polypeptides capable of binding to the cage polypeptide structural region, wherein the one or more nucleic acids encoding one or more key polypeptides are operatively linked to a. promoter.

29. The host cell of claim 28, wherein the one or more expression vectors of claim 24 are operatively linked to a first promoter, and the one or more expression vectors comprising one or more nucleic acids encoding one or more key polypeptides are operatively linked to a second promoter, where the first promoter and the second promoter are different.

30. The kit of claim 25 or 26, or the host cell of any one of claims 28 and 29, wherein the one or more nucleic acids encoding the one or more key polypeptides comprise an amino acid sequence having at least 45%, 50%, 55%, 60%, 65%, 70%, 75%, 80%, 85%, 90%, 91%, 92%, 93%, 94%, 95%, 96%, 97%, 98%, 99%, or 100% sequence identity, not including optional residues, along the full length of the amino acid sequence of a key protein disclosed herein, or a key polypeptide selected from SEQ ID NOS: 26602-27050, 27,322-27,358, and 28477-28486.

31. The kit of claim 25 or 26, or the host cell of any one of claims 28 and 29, wherein the one or more nucleic acids encoding the one or more key polypeptides comprise an amino acid sequence having at least 45%, 50%, 55%, 60%, 65%, 70%, 75%, 80%, 85%, 90%, 91%, 92%, 93%, 94%, 95%, 96%, 97%, 98%, 99%, or 100% sequence identity, not including optional residues, along the full length of the amino acid sequence of a key polypeptide selected from the group consisting of SEQ ID NOS: 28477-28486.

32. The kit of claim 25 or 26, or the host cell of any one of claims 28 and 29, wherein the one or more nucleic acids encoding the polypeptide of any one of claims 1-17, encodes a polypeptide that comprise an amino acid sequence having at least 45%, 50%, 55%, 60%, 65%, 70%, 75%, 80%, 85%, 90%, 91%, 92%, 93%, 94%, 95%, 96%, 97%, 98%, 99%, or 100% sequence identity, not including optional residues, along the full length of the amino acid sequence of a cage polypeptide selected from the group consisting of SEQ ID NOS: 27359-28465 or a cage polypeptide listed in Table 7.

33. The kit of claim 24, 25, 31, or 32, or the host cell of any one of claims 27 and 28, wherein the one or more cage polypeptide and the one or more key polypeptide comprise at least one cage polypeptide and at least one key polypeptide comprising an amino acid sequence having at least 40%, 45%, 50%, 55%, 60%, 65%, 70%, 75%, 80%, 85%, 90%, 91%, 92%, 93%, 94%, 95%, 96%, 97%, 98%, 99%, or 100% sequence identity, not including optional residues, along the full length of a cage polypeptide and a key polypeptide, respectively, the in the same row of Table 2, 3, 4, 5, 6, or 7, in particular Table 6 or Table 7.

34. Use of the polypeptides, LOCKR switches, nucleic acids, expression vectors, or host cells disclosed herein to sequester a degron in the cage polypeptide until a key is expressed and activates the cage polypeptide, and the degron targets the cage polypeptide and any functional peptide fused to it for degradation.

The application's sequence listing, which the Patent Office published only in electronic form, follows.

SEQUENCE LISTING (28496 sequences)

SEQ ID NO: 1 - protein, 272 aa, Artificial Sequence
  Synthetic
  MISC_FEATURE (1)..(21): optional
  MISC_FEATURE (244)..(244): X can be any residue
  MISC_FEATURE (259)..(259): X can be any residue
MGSSHHHHHHSSGLVPRGSHMSKEAVTKLQALNIKLAEKLLEALARLQELNIALVYLAVELTDPKRIADEIKKVKDKSKEIVERAEEEIARAAAESKKILDEGSGSGSDAVAELQALNLKLAELLLEAIAKLQELNIKLVELLTKLTDPATIREAIRKVKEDSERIVAEAERLIAAAKAESERIIREGSGSGDPDVARLQELNIELARELLRAAAELQELNIKLVELASELTDPDEARKAIARXKRESKRIVEDAERLXREAAAASEKISRE

SEQ ID NO: 2 - protein, 273 aa, Artificial Sequence
  Synthetic
  MISC_FEATURE (1)..(21): optional
MGSSHHHHHHSSGLVPRGSHMGSKEAVTKLMALNLKLAEKLLEAIARLQELNIALVYLATELTDPERIREEIRKVKEESARIVEEAEEEIRRAAARSEDILREGSGSGSDAVAELQRLNLELAELLLRAAAKLQELNIDLVRLLTELTDPKTIRDAIERVKAESERIVREAERLIREAKADSERILREGSGSGDPDVARLQELFIELARELLEALARLQELNIDLVRLASELTDPDTIRDAIRRVKEESARIVEDARRLIKEAAEEAEKISRE

SEQ ID NO: 3 - protein, 273 aa, Artificial Sequence
  Synthetic
  MISC_FEATURE (1)..(21): optional
MGSSHHHHHHSSGLVPRGSHMGSKRAVTELQKLNIELARKLLRALAELMELNIALVYLAVELTDPRRIREEIRKVKEKSDEIVKRAEDEIRKAAAESEKILREGSGSGSDAVAELQRLNLELAKLLLEAIAKLQALNIDLVRLLTELTDPETIRRAIKRVKDESARIVEEAEKLIRAAKDKAREIIDKGSGSGDPDVARLQELNIELARELLEAAARLQELFIDLVRLASELTDPDEARKAIERVKREAERIVREAERLIREAKRASKEISDE

SEQ ID NO: 4 - protein, 295 aa, Artificial Sequence
  Synthetic
  MISC_FEATURE (1)..(21): optional
MGSSHHHHHHSSGLVPRGSHMKLLEAVTKLQALNIKLAEKLLEALARLQELNIALVYLAVELTDPKRIADEIKKVKDKSKEIVERAEEEIARAAAESKKILDEAEEEGSGSGSELLLEAVAELQALNLKLAELLLEAIAKLQELNIKLVELLTKLTDPATIREAIRKVKEDSERIVAEAERLIAAAKAESERIIREAERLAGSGSGSRELLRDVARLQELNIELARELLRAAAELQELNIKLVELASELTDPDEARKAIARVKRESKRIVEDAERLIREAAAASEKISREAERLI

SEQ ID NO: 5 - protein, 319 aa, Artificial Sequence
  Synthetic
  MISC_FEATURE (1)..(21): optional
MGSSHHHHHHSSGLVPRGSHMKLAEKLLEAVTKLQALNIKLAEKLLEALARLQELNIALVYLAVELTDPKRIADEIKKVKDKSKEIVERAEEEIARAAAESKKILDEAEEEIARAGSGSGSLKLAELLLEAVAELQALNLKLAELLLEAIAKLQELNIKLVELLTKLTDPATIREAIRKVKEDSERIVAEAERLIAAAKAESERIIREAERLIAAAAGSGSGSIELARELLRDVARLQELNIELARELLRAAAELQELNIKLVELASELTDPDEARKAIARVKRESKRIVEDAERLIREAAAASEKISREAERLIREAA

SEQ ID NO: 6 - protein, 380 aa, Artificial Sequence
  Synthetic
  MISC_FEATURE (1)..(21): optional
MGSSHHHHHHSSGLVPRGSHMSKEAVTKLQALNIKLAEKLLEAVTKLQALNIKLAEKLLEALARLQELNIALVYLAVELTDPKRIADEIKKVKDKSKEIVERAEEEIARAAAESKKILDEAEEEIARAAAESKKILDEGSGSGSDAVAELQALNLKLAELLLEAVAELQALNLKLAELLLEAIAKLQELNIKLVELLTKLTDPATIREAIRKVKEDSERIVAEAERLIAAAKAESERIIREAERLIAAAKAESERIIREGSGSGDPDVARLQELNIELARELLRDVARLQELNIELARELLRAAAELQELNIKLVELASELTDPDEARKAIARVKRESKRIVEDAERLIREAAAASEKISREAERLIREAAAASEKISRE

SEQ ID NO: 7 - protein, 382 aa, Artificial Sequence
  Synthetic
  MISC_FEATURE (1)..(21): optional
MGSSHHHHHHSSGLVPRGSHMSHAAVIKLSDLNIRLLDKLLQAVIKLTELNAELNRKLIEALQRLFDLNVALVHLAAELTDPKRIADEIKKVKDKSKEIVERAEEEIARAAAESKKILDEAEEEIARAAAESKKILDEGSGSGSDAVAELQALNLKLAELLLEAVAELQALNLKLAELLLEAIAKLQELNIKLVELLTKLTDPATIREAIRKVKEDSERIVAEAERLIAAAKAESERIIREAERLIAAAKAESERIIREGSGSNDPQVAQNQETFIELARDALRLVAENQEAFIEVARLTLRAAALAQEVAIKAVEAASEGGSGSGNKEEIEKLAKEAREKLKKAEKEHKEIHDKLRKKNKKAREDLKKKADELRETNKRVN

SEQ ID NO: 8 - protein, 382 aa, Artificial Sequence
  Synthetic
  MISC_FEATURE (1)..(21): optional
MGSSHHHHHHSSGLVPRGSHMSLEAVLKLAELNLKLSDKLAEAVQKLAALLNKLLEKLSEALQRLFELNVALVTLAIELTDPKRIADEIKKVKDKSKEIVERAEEEIARAAAESKKILDEAEEEIARAAAESKKILDEGSGSGSDAVAELQALNLKLAELLLEAVAELQALNLKLAELLLEAIAKLQELNIKLVELLTKLTDPATIREAIRKVKEDSERIVAEAERLIAAAKAESERIIREAERLIAAAKAESERIIREGSGSNDPLVARLQELLIEHARELLRLVATSQEIFIELARAFLANAAQLQEAAIKAVEAASENGSGSGSSEKVRRELKESLKENHKQNQKLLKDHKRAQEKLNRELEELKKKHKKTLDDIRRES

SEQ ID NO: 9 - protein, 382 aa, Artificial Sequence
  Synthetic
  MISC_FEATURE (1)..(21): optional
MGSSHHHHHHSSGLVPRGSHMSLEAVLKLFELNHKLSEKLLEAVLKLHALNQKLSQKLLEALARLLELNVALVELAIELTDPKRIADEIKKVKDKSKEIVERAEEEIARAAAESKKILDEAEEEIARAAAESKKILDEGSGSGSDAVAELQALNLKLAELLLEAVAELQALNLKLAELLLEAIAKLQELNIKLVELLTKLTDPATIREAIRKVKEDSERIVAEAERLIAAAKAESERIIREAERLIAAAKAESERIIREGSGSGDPEVARLQEAFIEQAREILRNVAAAQEALIEQARRLLALAALAQEAAIKAVELASEHGSGSGDTVKRILEELRRRFEKLAKDLDDIARKLLEDHKKHNKELKDKQRKIKKEADDAARS

SEQ ID NO: 10 - protein, 382 aa, Artificial Sequence
  Synthetic
  MISC_FEATURE (1)..(21): optional
MGSSHHHHHHSSGLVPRGSHMSLEAVLKLQDLNSKLSEKLSEAQLKLQALNNKLLRKLLEALLRLQDLNQALVNLALQLTDPKRIADEIKKVKDKSKEIVERAEEEIARAAAESKKILDEAEEEIARAAAESKKILDEGSGSGSDAVAELQALNLKLAELLLEAVAELQALNLKLAELLLEAIAKLQELNIKLVELLTKLTDPATIREAIRKVKEDSERIVAEAERLIAAAKAESERIIREAERLIAAAKAESERIIREGSGSGDPDVAKSQEHLIEHARELLRQVAKSQELFIELARQLLRLAAKSQELAIKAVELASEAGSGSGDDVERRLRKANKESKKEAEELTEEAKKANEKTKEDSKELTKENRKTNKTIKDEARS

SEQ ID NO: 11 - protein, 382 aa, Artificial Sequence
  Synthetic
  MISC_FEATURE (1)..(21): optional
MGSSHHHHHHSSGLVPRGSHMSREAVEKLAELNHKLSHKLQQAQQKLQALNLKLLQKLLEALDRLQDLNNALVKLAQRLTDPKRIADEIKKVKDKSKEIVERAEEEIARAAAESKKILDEAEEEIARAAAESKKILDEGSGSGSDAVAELQALNLKLAELLLEAVAELQALNLKLAELLLEAIAKLQELNIKLVELLTKLTDPATIREAIRKVKEDSERIVAEAERLIAAAKAESERIIREAERLIAAAKAESERIIREGSGSGDPDVARQQETLIEQARRLLRNVAESQELFIEAARTVLRLAAKLQEINIKQVELASEAGSGSGDDEERRSEKTVQDAKREIKKVEDDLQRLNEEQKKKVKKQEDENQKTLKKHKDDARS

SEQ ID NO: 12 - protein, 258 aa, Artificial Sequence
  Synthetic
  MISC_FEATURE (1)..(21): optional
MGSSHHHHHHSSGLVPRGSHMNKEDATEAQKKAIRAAEELLKDVTRIQERAIREAEKALERLARVQEEAIRRVYEAVESKNKEELKKVKEEIEELLRRLKRELDELEREIRELLKEIKEKADRLEKEIRDLIERIRRDRNASDEVVTRLARLNEELIRELREDVRRLAELNKELLRELERAARELARLNEKLLELADRVETEEEARKAIARVKRESKRIVEDAERLIREAAAASEKISREAERLIREAAAASEKISRE

SEQ ID NO: 13 - protein, 262 aa, Artificial Sequence
  Synthetic
  MISC_FEATURE (1)..(21): optional
MGSSHHHHHHSSGLVPRGSHMDERLKRLNERLADELDKDLERLLRLNEELARELTRAAEELRELNEKLVELAKKLQGGRSREVAERAEKEREKIRRKLEEIKKEIKEDADRIKKRADELRRRLEKTLEDAARELEKLKREPRTEELKRKATELQKEAIRRAEELLKEVTDVQRRAIERAEELLEKLARLQEEAIRTVYLLVELNKVDRARKAIARVKRESKRIVEDAERLIREAAAASEKISREAERLIREAAAASEKISRE

SEQ ID NO: 14 - protein, 259 aa, Artificial Sequence
  Synthetic
  MISC_FEATURE (1)..(21): optional
MGSSHHHHHHSSGLVPRGSHMLIERLTRLEKEHVRELKRLLDTSLEILRRLVEAFETNLRQLKEALKRALEAANLHNEEVEEVLRKLEEDLRRLEEELRKTLDDVRKEVKRLKEELDKRIKEVEDELRKIKEKLKKGDKNEKRVLEEILRLAEDVLKKSDKLAKDVQERARELNEILEELSRKLQELFERVVEEVTRNVPTTERIEKVRRELKESLKENHKQNQKLLKDHKRAQEKLNRELEELKKKHKKTLDDIRRES

SEQ ID NO: 15 - protein, 263 aa, Artificial Sequence
  Synthetic
  MISC_FEATURE (1)..(21): optional
MGSSHHHHHHSSGLVPRGSHMSEERVLELAEEALRLSDEAAKEIQELARRLNEELEKLSKELQDLFERIVETVTRLIDADEETLKRAAEEIKKRLEDARKKAKEAADKAREELDRARKKLKELVDEIRKKAKDALEKAGADEELVARLLRLLEEHARELERLLRTSARIIERLLDAFRRNLEQLKEAADKAVEAAEEAVRRVEDVRVWSEKVRRELKESLKENHKQNQKLLKDHKRAQEKLNRELEELKKKHKKTLDDIRRES

SEQ ID NO: 16 - protein, 311 aa, Artificial Sequence
  Synthetic
  MISC_FEATURE (1)..(23): optional
MGSHHHHHHGSGSENLYFQGSGGSELARKLLEASTKLQRLNIRLAEALLEAIARLQELNLELVYLAVELTDPKRIRDEIKEVKDKSKEIIRRAEKEIDDAAKESEKILEEAREAISGSGSELAKLLLKAIAETQDLNLRAAKAFLEAAAKLQELNIRAVELLVKLTDPATIREALEHAKRRSKEIIDEAERAIRAAKRESERIIEEARRLIEKGSGSGSELARELLRAHAQLQRLNLELLRELLRALAQLQELNLDLLRLASELTDPDEARKAIARVKRESKRIVEDAERLIREAAAASEKISREAERLIR

SEQ ID NO: 17 - protein, 311 aa, Artificial Sequence
  Synthetic
  MISC_FEATURE (1)..(23): optional
MGSHHHHHHGSGSENLYFQGSGGSELARKLLEASTKLQRLNIRLAEALLEAIARLQELNLELVYLAVELTDPKRIRDEIKEVKDKSKEIIRRAEKEIDDAAKESEKILEEAREAISGSGSELAKLLLKAIAETQDLNLRAAKAFLEAAAKLQELNIRAVELLVKLTDPATIREALEHAKRRSKEIIDEAERAIRAAKRESERIIEEARRLIEKGSGSGSELARELLRAHAQLQRLNLELLRELLRALAQLQELNLDLLRLASELTDPDEARKAIARVKRESNAYYADAERLIREAAAASEKISREAERLIR

SEQ ID NO: 18 - protein, 280 aa, Artificial Sequence
  Synthetic
  MISC_FEATURE (1)..(21): optional
  MISC_FEATURE (234)..(240): optional
  MISC_FEATURE (249)..(249): X is any residue
  MISC_FEATURE (252)..(252): X is any residue
  MISC_FEATURE (260)..(260): X is any residue
MGSSHHHHHHSSGLVPRGSHMGSKEAVTKLQALNIKLAEKLLEALARLQELNIALVYLAVELTDPKRIADEIKKVKDKSKEIVERAEEEIARAAAESKKILDEGSGSGSDAVAELQALNLKLAELLLEAIAKLQELNIKLVELLTKLTDPATIREAIRKVKEDSERIVAEAERLIAAAKAESERIIREGSGSGDPDVARLQELNIELARELLRAAAELQELNIKLVELASELTGSGSGSGDPKMAQELXDKXRAASLQIXGDAFYAILRALAASEKLSKE

SEQ ID NO: 19 - protein, 275 aa, Artificial Sequence
  Synthetic
  MISC_FEATURE (1)..(21): optional
  MISC_FEATURE (247)..(247): X is any residue
  MISC_FEATURE (262)..(262): X is any residue
MGSSHHHHHHSSGLVPRGSHMKEAVTKLQALNIKLAEKLLEALARLQELNIALVYLAVELTDPKRIADEIKKVKDKSKEIVERAEEEIARAAAESKKILDEGSGSGSDAVAELQALNLKLAELLLEAIAKLQELNIKLVELLTKLTDPATIREAIRKVKEDSERIVAEAERLIAAAKAESERIIREGSGSGDPDVARLQELNIELARELLRAAAELQELNIKLVELASEGSGSGSEIAEALRAIGDXFNESYRIVEDAERLXREAAAASEKISRE

SEQ ID NO: 20 - protein, 295 aa, Artificial Sequence
  Synthetic
  MISC_FEATURE (1)..(21): optional
MGSSHHHHHHSSGLVPRGSHMKLLEAVTKLQALNIKLAEKLLEALARLQELNIALVYLAVELTDPKRIADEIKKVKDKSKEIVERAEEEIARAAAESKKILDEAEEEGSGSGSELLLEAVAELQALNLKLAELLLEAIAKLQELNIKLVELLTKLTDPATIREAIRKVKEDSERIVAEAERLIAAAKAESERIIREAERLAGSGSGSRELLRDVARLQELNIELARELLRAAAELQELNIKLVELASELTDEIWIAQELRRIGDEFNAYYADAERLIREAAAASEKISREAERLI

SEQ ID NO: 21 - protein, 319 aa, Artificial Sequence
  Synthetic
  MISC_FEATURE (1)..(21): optional
MGSSHHHHHHSSGLVPRGSHMKLAEKLLEAVTKLQALNIKLAEKLLEALARLQELNIALVYLAVELTDPKRIADEIKKVKDKSKEIVERAEEEIARAAAESKKILDEAEEEIARAGSGSGSLKLAELLLEAVAELQALNLKLAELLLEAIAKLQELNIKLVELLTKLTDPATIREAIRKVKEDSERIVAEAERLIAAAKAESERIIREAERLIAAAAGSGSGSIELARELLRDVARLQELNIELARELLRAAAELQELNIKLVELASELTDEIWIAQELRRIGDEFNAYYADAERLIREAAAASEKISREAERLIREAA

SEQ ID NO: 22 - protein, 380 aa, Artificial Sequence
  Synthetic
  MISC_FEATURE (1)..(21): optional
MGSSHHHHHHSSGLVPRGSHMSKEAVTKLQALNIKLAEKLLEAVTKLQALNIKLAEKLLEALARLQELNIALVYLAVELTDPKRIADEIKKVKDKSKEIVERAEEEIARAAAESKKILDEAEEEIARAAAESKKILDEGSGSGSDAVAELQALNLKLAELLLEAVAELQALNLKLAELLLEAIAKLQELNIKLVELLTKLTDPATIREAIRKVKEDSERIVAEAERLIAAAKAESERIIREAERLIAAAKAESERIIREGSGSGDPDVARLQELNIELARELLRDVARLQELNIELARELLRAAAELQELNIKLVELASELTDEIWIAQELRRIGDEFNAYYADAERLIREAAAASEKISREAERLIREAAAASEKISRE

SEQ ID NO: 23 - protein, 382 aa, Artificial Sequence
  Synthetic
  MISC_FEATURE (1)..(21): optional
MGSSHHHHHHSSGLVPRGSHMSHAAVIKLSDLNIRLLDKLLQAVIKLTELNAELNRKLIEALQRLFDLNVALVHLAAELTDPKRIADEIKKVKDKSKEIVERAEEEIARAAAESKKILDEAEEEIARAAAESKKILDEGSGSGSDAVAELQALNLKLAELLLEAVAELQALNLKLAELLLEAIAKLQELNIKLVELLTKLTDPATIREAIRKVKEDSERIVAEAERLIAAAKAESERIIREAERLIAAAKAESERIIREGSGSNDPQVAQNQETFIELARDALRLVAENQEAFIEVARLTLRAAALAQEVAIKAVEAASEGGSGSGNEIWIAQELRRIGDEFNAYYAEHKEIHDKLRKKNKKAREDLKKKADELRETNKRVN

SEQ ID NO: 24 - protein, 382 aa, Artificial Sequence
  Synthetic
  MISC_FEATURE (1)..(21): optional
MGSSHHHHHHSSGLVPRGSHMSLEAVLKLAELNLKLSDKLAEAVQKLAALLNKLLEKLSEALQRLFELNVALVTLAIELTDPKRIADEIKKVKDKSKEIVERAEEEIARAAAESKKILDEAEEEIARAAAESKKILDEGSGSGSDAVAELQALNLKLAELLLEAVAELQALNLKLAELLLEAIAKLQELNIKLVELLTKLTDPATIREAIRKVKEDSERIVAEAERLIAAAKAESERIIREAERLIAAAKAESERIIREGSGSNDPLVARLQELLIEHARELLRLVATSQEIFIELARAFLANAAQLQEAAIKAVEAASENGSGEIWIAQELRRIGDEFNAYYAQNQKLLKDHKRAQEKLNRELEELKKKHKKTLDDIRRES

SEQ ID NO: 25 - protein, 381 aa, Artificial Sequence
  Synthetic
  MISC_FEATURE (1)..(21): optional
MGSSHHHHHHSSGLVPRGSHMSLEAVLKLFELNHKLSEKLLEAVLKLHALNQKLSQKLLEALARLLELNVALVELAIELTDPKRIADEIKKVKDKSKEIVERAEEEIARAAAESKKILDEAEEEIARAAAESKKILDEGSGSGSDAVAELQALNLKLAELLLEAVAELQALNLKLAELLLEAIAKLQELNIKLVELLTKLTDPATIREAIRKVKEDSERIVAEAERLIAAAKAESERIIREAERLIAAAKAESERIIREGSGSGDPEVARLQEAFIEQAREILRNVAAAQEALIEQARRLLALAALAQEAAIKAVELASEHGSGSEIWIAQELRRIGDEFNAYYADLDDIARKLLEDHKKHNKELKDKQRKIKTIKDEARS

SEQ ID NO: 26 - protein, 382 aa, Artificial Sequence
  Synthetic
  MISC_FEATURE (1)..(21): optional
  MISC_FEATURE (320)..(321): optional
MGSSHHHHHHSSGLVPRGSHMSKEAVTKLQALNIKLAEKLLEAVTKLQALNIKLAEKLLEALARLQELNIALVYLAVELTDPKRIADEIKKVKDKSKEIVERAEEEIARAAAESKKILDEAEEEIARAAAESKKILDEGSGSGSDAVAELQALNLKLAELLLEAVAELQALNLKLAELLLEAIAKLQELNIKLVELLTKLTDPATIREAIRKVKEDSERIVAEAERLIAAAKAESERIIREAERLIAAAKAESERIIREGSGSGDPDVARLQELNIELARELLRDVARLQELNIELARELLRAAAELQELNIKLVELASGGNWSHPQFEKKAIARVKRESKRIVEDAERLIREAAAASEKISREAERLIREAAAASEKISRE

SEQ ID NO: 27 - protein, 380 aa, Artificial Sequence
  Synthetic
  MISC_FEATURE (1)..(21): optional
MGSSHHHHHHSSGLVPRGSHMSKEAVTKLQALNIKLAEKLLEAVTKLQALNIKLAEKLLEALARLQELNIALVYLAVELTDPKRIADEIKKVKDKSKEIVERAEEEIARAAAESKKILDEAEEEIARAAAESKKILDEGSGSGSDAVAELQALNLKLAELLLEAVAELQALNLKLAELLLEAIAKLQELNIKLVELLTKLTDPATIREAIRKVKEDSERIVAEAERLIAAAKAESERIIREAERLIAAAKAESERIIREGSGSGDPDVARLQELNIELARELLRDVARLQELNIELARELLRAAAELQELNIKLVELASELTDPDENWSHPQFEKRESKRIVEDAERLIREAAAASEKISREAERLIREAAAASEKISRE

SEQ ID NO: 28 - protein, 380 aa, Artificial Sequence
  Synthetic
  MISC_FEATURE (1)..(21): optional
MGSSHHHHHHSSGLVPRGSHMSKEAVTKLQALNIKLAEKLLEAVTKLQALNIKLAEKLLEALARLQELNIALVYLAVELTDPKRIADEIKKVKDKSKEIVERAEEEIARAAAESKKILDEAEEEIARAAAESKKILDEGSGSGSDAVAELQALNLKLAELLLEAVAELQALNLKLAELLLEAIAKLQELNIKLVELLTKLTDPATIREAIRKVKEDSERIVAEAERLIAAAKAESERIIREAERLIAAAKAESERIIREGSGSGDPDVARLQELNIELARELLRDVARLQELNIELARELLRAAAELQELNIKLVELASELTDPDEARKNWSHPQFEKKRIVEDAERLIREAAAASEKISREAERLIREAAAASEKISRE

SEQ ID NO: 29 - protein, 380 aa, Artificial Sequence
  Synthetic
  MISC_FEATURE (1)..(21): optional
MGSSHHHHHHSSGLVPRGSHMSKEAVTKLQALNIKLAEKLLEAVTKLQALNIKLAEKLLEALARLQELNIALVYLAVELTDPKRIADEIKKVKDKSKEIVERAEEEIARAAAESKKILDEAEEEIARAAAESKKILDEGSGSGSDAVAELQALNLKLAELLLEAVAELQALNLKLAELLLEAIAKLQELNIKLVELLTKLTDPATIREAIRKVKEDSERIVAEAERLIAAAKAESERIIREAERLIAAAKAESERIIREGSGSGDPDVARLQELNIELARELLRDVARLQELNIELARELLRAAAELQELNIKLVELASELTDPDEARKAIANWSHPQFEKVEDAERLIREAAAASEKISREAERLIREAAAASEKISRE

SEQ ID NO: 30 - protein, 380 aa, Artificial Sequence
  Synthetic
  MISC_FEATURE (1)..(21): optional
MGSSHHHHHHSSGLVPRGSHMSKEAVTKLQALNIKLAEKLLEAVTKLQALNIKLAEKLLEALARLQELNIALVYLAVELTDPKRIADEIKKVKDKSKEIVERAEEEIARAAAESKKILDEAEEEIARAAAESKKILDEGSGSGSDAVAELQALNLKLAELLLEAVAELQALNLKLAELLLEAIAKLQELNIKLVELLTKLTDPATIREAIRKVKEDSERIVAEAERLIAAAKAESERIIREAERLIAAAKAESERIIREGSGSGDPDVARLQELNIELARELLRDVARLQELNIELARELLRAAAELQELNIKLVELASELTDPDEARKAIARNWSHPQFEKEDAERLIREAAAASEKISREAERLIREAAAASEKISRE

SEQ ID NO: 31 - protein, 380 aa, Artificial Sequence
  Synthetic
  MISC_FEATURE (1)..(21): optional
MGSSHHHHHHSSGLVPRGSHMSKEAVTKLQALNIKLAEKLLEAVTKLQALNIKLAEKLLEALARLQELNIALVYLAVELTDPKRIADEIKKVKDKSKEIVERAEEEIARAAAESKKILDEAEEEIARAAAESKKILDEGSGSGSDAVAELQALNLKLAELLLEAVAELQALNLKLAELLLEAIAKLQELNIKLVELLTKLTDPATIREAIRKVKEDSERIVAEAERLIAAAKAESERIIREAERLIAAAKAESERIIREGSGSGDPDVARLQELNIELARELLRDVARLQELNIELARELLRAAAELQELNIKLVELASELTDPDEARKAIARVKRENWSHPQFEKRLIREAAAASEKISREAERLIREAAAASEKISRE

SEQ ID NO: 32 - protein, 380 aa, Artificial Sequence
  Synthetic
  MISC_FEATURE (1)..(21): optional
MGSSHHHHHHSSGLVPRGSHMSKEAVTKLQALNIKLAEKLLEAVTKLQALNIKLAEKLLEALARLQELNIALVYLAVELTDPKRIADEIKKVKDKSKEIVERAEEEIARAAAESKKILDEAEEEIARAAAESKKILDEGSGSGSDAVAELQALNLKLAELLLEAVAELQALNLKLAELLLEAIAKLQELNIKLVELLTKLTDPATIREAIRKVKEDSERIVAEAERLIAAAKAESERIIREAERLIAAAKAESERIIREGSGSGDPDVARLQELNIELARELLRDVARLQELNIELARELLRAAAELQELNIKLVELASELTDPDEARKAIARVKRESKRNWSHPQFEKREAAAASEKISREAERLIREAAAASEKISRE

SEQ ID NO: 33 - protein, 380 aa, Artificial Sequence
  Synthetic
  MISC_FEATURE (1)..(21): optional
MGSSHHHHHHSSGLVPRGSHMSKEAVTKLQALNIKLAEKLLEAVTKLQALNIKLAEKLLEALARLQELNIALVYLAVELTDPKRIADEIKKVKDKSKEIVERAEEEIARAAAESKKILDEAEEEIARAAAESKKILDEGSGSGSDAVAELQALNLKLAELLLEAVAELQALNLKLAELLLEAIAKLQELNIKLVELLTKLTDPATIREAIRKVKEDSERIVAEAERLIAAAKAESERIIREAERLIAAAKAESERIIREGSGSGDPDVARLQELNIELARELLRDVARLQELNIELARELLRAAAELQELNIKLVELASELTDPDEARKAIARVKRESKRIVENWSHPQFEKAAASEKISREAERLIREAAAASEKISRE

SEQ ID NO: 34 - protein, 380 aa, Artificial Sequence
  Synthetic
  MISC_FEATURE (1)..(21): optional
MGSSHHHHHHSSGLVPRGSHMSKEAVTKLQALNIKLAEKLLEAVTKLQALNIKLAEKLLEALARLQELNIALVYLAVELTDPKRIADEIKKVKDKSKEIVERAEEEIARAAAESKKILDEAEEEIARAAAESKKILDEGSGSGSDAVAELQALNLKLAELLLEAVAELQALNLKLAELLLEAIAKLQELNIKLVELLTKLTDPATIREAIRKVKEDSERIVAEAERLIAAAKAESERIIREAERLIAAAKAESERIIREGSGSGDPDVARLQELNIELARELLRDVARLQELNIELARELLRAAAELQELNIKLVELASELTDPDEARKAIARVKRESKRIVEDAERLINWSHPQFEKISREAERLIREAAAASEKISRE

SEQ ID NO: 35 - protein, 309 aa, Artificial Sequence
  Synthetic
  MISC_FEATURE (1)..(21): optional
  MISC_FEATURE (217)..(217): X is any residue
MGSSHHHHHHSSGLVPRGSHMGSKEAVTKLQALNIKLAEKLLEALARLQELNIALVYLAVELTDPKRIADEIKKVKDKSKEIVERAEEEIARAAAESKKILDEGSGSGSDAVAELQALNLKLAELLLEAIAKLQELNIKLVELLTKLTDPATIREAIRKVKEDSERIVAEAERLIAAAKAESERIIREGSGSGDPDVARLQELNIELARELLRAAAXLQELNIKLVELASEGSGSGSGYELRRALEELEKALRELKKSLDELERSLEELEKNPSEDALVENNRLNVENNKIIVEVLRIIAEVLKINAKS

SEQ ID NO: 36 - protein, 319 aa, Artificial Sequence
  Synthetic
  MISC_FEATURE (1)..(21): optional
MGSSHHHHHHSSGLVPRGSHMGSKEAVTKLQALNIKLAEKLLEALARLQELNIALVYLAVELTDPKRIADEIKKVKDKSKEIVERAEEEIARAAAESKKILDEGSGSGSDAVAELQALNLKLAELLLEAIAKLQELNIKLVELLTKLTDPATIREAIRKVKEDSERIVAEAERLIAAAKAESERIIREGSGSGDPDVARLQELNIELARELLRAAAELQELNIKLVELASEGSGSGSGKKLVEEVERALRELLKTSEDLVRKVEKALRELLELIRRGGTKDKIEEKIRRVLEEIKRELERQKRKIEDVLRQIKEELYRS

SEQ ID NO: 37 - protein, 398 aa, Artificial Sequence
  Synthetic
  MISC_FEATURE (1)..(21): optional
MGSSHHHHHHSSGLVPRGSHMSKEAVTKLQALNIKLAEKLLEAVTKLQALNIKLAEKLLEALARLQELNIALVYLAVELTDPKRIADEIKKVKDKSKEIVERAEEEIARAAAESKKILDEAEEEIARAAAESKKILDEGSGSGSDAVAELQALNLKLAELLLEAVAELQALNLKLAELLLEAIAKLQELNIKLVELLTKLTDPATIREAIRKVKEDSERIVAEAERLIAAAKAESERIIREAERLIAAAKAESERIIREGSGSGDPDVARLQELNIELARELLRDVARLQELNIELARELLRAAAELQELNIKLVELASEGSGSGSGYELRRALEELEKALRELKKSLDELERSLEELEKNPSEDALVENNRLNVENNKIIVEVLRIIAEVLKINAKS

SEQ ID NO: 38 - protein, 408 aa, Artificial Sequence
  Synthetic
  MISC_FEATURE (1)..(21): optional
MGSSHHHHHHSSGLVPRGSHMSKEAVTKLQALNIKLAEKLLEAVTKLQALNIKLAEKLLEALARLQELNIALVYLAVELTDPKRIADEIKKVKDKSKEIVERAEEEIARAAAESKKILDEAEEEIARAAAESKKILDEGSGSGSDAVAELQALNLKLAELLLEAVAELQALNLKLAELLLEAIAKLQELNIKLVELLTKLTDPATIREAIRKVKEDSERIVAEAERLIAAAKAESERIIREAERLIAAAKAESERIIREGSGSGDPDVARLQELNIELARELLRDVARLQELNIELARELLRAAAELQELNIKLVELASEGSGSGSGKKLVEEVERALRELLKTSEDLVRKVEKALRELLELIRRGGTKDKIEEKIRRVLEEIKRELERQKRKIEDVLRQIKEELYRS

SEQ ID NO: 39 - protein, 856 aa, Artificial Sequence
  Synthetic
  MISC_FEATURE (1)..(259): optional
  MISC_FEATURE (619)..(856): optional
GHHHHHHHHHHGVSKGEELFTGVVPILVELDGDVNGHKFSVSGEGEGDATYGKLTLKFICTTGKLPVPWPTLVTTLSWGVQCFARYPDHMKQHDFFKSAMPEGYVQERTIFFKDDGNYKTRAEVKFEGDTLVNRIELKGIDFKEDGNILGHKLEYNYFSDNVYITADKQKNGIKANFKIRHNIEDGGVQLADHYQQNTPIGDGPVLLPDNHYLSTQSKLSKDPNEKRDHMVLLEFVTAAGITLGMDELYKGSGCSLQGMSKEAVTKLQALNIKLAEKLLEAVTKLQALNIKLAEKLLEALARLQELNIALVYLAVELTDPKRIADEIKKVKDKSKEIVERAEEEIARAAAESKKILDEAEEEIARAAAESKKILDEGSGSGSDAVAELQALNLKLAELLLEAVAELQALNLKLAELLLEAIAKLQELNIKLVELLTKLTDPATIREAIRKVKEDSERIVAEAERLIAAAKAESERIIREAERLIAAAKAESERIIREGSGSGDPDVARLQELNIELARELLRDVARLQELNIELARELLRAAAELQELNIKLVELASELTDPDEARKAIARVKRESKRIVEDAERLIREAAAASEKISREAERLIREAAAASEKISREVSKGEELFTGVVPILVELDGDVNGHKFSVSGEGEGDATYGKLTLKLICTTGKLPVPWPTLVTTLGYGVQCFARYPDHMKQHDFFKSAMPEGYVQERTIFFKDDGNYKTRAEVKFEGDTLVNRIELKGIDFKEDGNILGHKLEYNYNSHNVYITADKQKNGIKANFKIRHNIEDGGVQLADHYQQNTPIGDGPVLLPDNHYLSYQSKLSKDPNEKRDHMVLLEFVTAAGITLGMDELYK

SEQ ID NO: 40 - protein, 859 aa, Artificial Sequence
  Synthetic
  MISC_FEATURE (1)..(260): optional
  MISC_FEATURE (622)..(859): optional
MGHHHHHHHHHHGVSKGEELFTGVVPILVELDGDVNGHKFSVSGEGEGDATYGKLTLKFICTTGKLPVPWPTLVTTLSWGVQCFARYPDHMKQHDFFKSAMPEGYVQERTIFFKDDGNYKTRAEVKFEGDTLVNRIELKGIDFKEDGNILGHKLEYNYFSDNVYITADKQKNGIKANFKIRHNIEDGGVQLADHYQQNTPIGDGPVLLPDNHYLSTQSKLSKDPNEKRDHMVLLEFVTAAGITLGMDELYKGSGCSLQGMSHAAVIKLSDLNIRLLDKLLQAVIKLTELNAELNRKLIEALQRLFDLNVALVHLAAELTDPKRIADEIKKVKDKSKEIVERAEEEIARAAAESKKILDEAEEEIARAAAESKKILDEGSGSGSDAVAELQALNLKLAELLLEAVAELQALNLKLAELLLEAIAKLQELNIKLVELLTKLTDPATIREAIRKVKEDSERIVAEAERLIAAAKAESERIIREAERLIAAAKAESERIIREGSGSNDPQVAQNQETFIELARDALRLVAENQEAFIEVARLTLRAAALAQEVAIKAVEAASEGGSGSGNKEEIEKLAKEAREKLKKAEKEHKEIHDKLRKKNKKAREDLKKKADELRETNKRVNVSKGEELFTGVVPILVELDGDVNGHKFSVSGEGEGDATYGKLTLKLICTTGKLPVPWPTLVTTLGYGVQCFARYPDHMKQHDFFKSAMPEGYVQERTIFFKDDGNYKTRAEVKFEGDTLVNRIELKGIDFKEDGNILGHKLEYNYNSHNVYITADKQKNGIKANFKIRHNIEDGGVQLADHYQQNTPIGDGPVLLPDNHYLSYQSKLSKDPNEKRDHMVLLEFVTAAGITLGMDELYK

SEQ ID NO: 41 - protein, 858 aa, Artificial Sequence
  Synthetic
  MISC_FEATURE (1)..(259): optional
  MISC_FEATURE (621)..(858): optional
GHHHHHHHHHHGVSKGEELFTGVVPILVELDGDVNGHKFSVSGEGEGDATYGKLTLKFICTTGKLPVPWPTLVTTLSWGVQCFARYPDHMKQHDFFKSAMPEGYVQERTIFFKDDGNYKTRAEVKFEGDTLVNRIELKGIDFKEDGNILGHKLEYNYFSDNVYITADKQKNGIKANFKIRHNIEDGGVQLADHYQQNTPIGDGPVLLPDNHYLSTQSKLSKDPNEKRDHMVLLEFVTAAGITLGMDELYKGSGCSLQGMSLEAVLKLAELNLKLSDKLAEAVQKLAALLNKLLEKLSEALQRLFELNVALVTLAIELTDPKRIADEIKKVKDKSKEIVERAEEEIARAAAESKKILDEAEEEIARAAAESKKILDEGSGSGSDAVAELQALNLKLAELLLEAVAELQALNLKLAELLLEAIAKLQELNIKLVELLTKLTDPATIREAIRKVKEDSERIVAEAERLIAAAKAESERIIREAERLIAAAKAESERIIREGSGSNDPLVARLQELLIEHARELLRLVATSQEIFIELARAFLANAAQLQEAAIKAVEAASENGSGSGSSEKVRRELKESLKENHKQNQKLLKDHKRAQEKLNRELEELKKKHKKTLDDIRRESVSKGEELFTGVVPILVELDGDVNGHKFSVSGEGEGDATYGKLTLKLICTTGKLPVPWPTLVTTLGYGVQCFARYPDHMKQHDFFKSAMPEGYVQERTIFFKDDGNYKTRAEVKFEGDTLVNRIELKGIDFKEDGNILGHKLEYNYNSHNVYITADKQKNGIKANFKIRHNIEDGGVQLADHYQQNTPIGDGPVLLPDNHYLSYQSKLSKDPNEKRDHMVLLEFVTAAGITLGMDELYK

SEQ ID NO: 42 - protein, 858 aa, Artificial Sequence
  Synthetic
  MISC_FEATURE (1)..(259): optional
  MISC_FEATURE (621)..(858): optional
GHHHHHHHHHHGVSKGEELFTGVVPILVELDGDVNGHKFSVSGEGEGDATYGKLTLKFICTTGKLPVPWPTLVTTLSWGVQCFARYPDHMKQHDFFKSAMPEGYVQERTIFFKDDGNYKTRAEVKFEGDTLVNRIELKGIDFKEDGNILGHKLEYNYFSDNVYITADKQKNGIKANFKIRHNIEDGGVQLADHYQQNTPIGDGPVLLPDNHYLSTQSKLSKDPNEKRDHMVLLEFVTAAGITLGMDELYKGSGCSLQGMSLEAVLKLFELNHKLSEKLLEAVLKLHALNQKLSQKLLEALARLLELNVALVELAIELTDPKRIADEIKKVKDKSKEIVERAEEEIARAAAESKKILDEAEEEIARAAAESKKILDEGSGSGSDAVAELQALNLKLAELLLEAVAELQALNLKLAELLLEAIAKLQELNIKLVELLTKLTDPATIREAIRKVKEDSERIVAEAERLIAAAKAESERIIREAERLIAAAKAESERIIREGSGSGDPEVARLQEAFIEQAREILRNVAAAQEALIEQARRLLALAALAQEAAIKAVELASEHGSGSGDTVKRILEELRRRFEKLAKDLDDIARKLLEDHKKHNKELKDKQRKIKKEADDAARSVSKGEELFTGVVPILVELDGDVNGHKFSVSGEGEGDATYGKLTLKLICTTGKLPVPWPTLVTTLGYGVQCFARYPDHMKQHDFFKSAMPEGYVQERTIFFKDDGNYKTRAEVKFEGDTLVNRIELKGIDFKEDGNILGHKLEYNYNSHNVYITADKQKNGIKANFKIRHNIEDGGVQLADHYQQNTPIGDGPVLLPDNHYLSYQSKLSKDPNEKRDHMVLLEFVTAAGITLGMDELYK

SEQ ID NO: 43 - protein, 380 aa, Artificial Sequence
  Synthetic
  MISC_FEATURE (1)..(21): optional
MGSSHHHHHHSSGLVPRGSHMSKEAVTKLQALNIKLAEKLLEAVTKLQALNIKLAEKLLEALARLQELNIALVYLAVELTDPKRIADEIKKVKDKSKEIVERAEEEIARAAAESKKILDEAEEEIARAAAESKKILDEGSGSGSDAVAELQALNLKLAELLLEAVAELQALNLKLAELLLEAIAKLQELNIKLVELLTKLTDPATIREAIRKVKEDSERIVAEAERLIAAAKAESERIIREAERLIAAAKAESERIIREGSGSGDPDVARLQELNIELARELLRDVARLQELNIELARELLRAAAELQELNIKLVELASELTDPDEARKAIARVKRESKRIVEDAEENLYFQGAASEKISREAERLIREAAAASEKISRE

SEQ ID NO: 44 - protein, 380 aa, Artificial Sequence
  Synthetic
  MISC_FEATURE (1)..(21): optional
MGSSHHHHHHSSGLVPRGSHMSKEAVTKLQALNIKLAEKLLEAVTKLQALNIKLAEKLLEALARLQELNIALVYLAVELTDPKRIADEIKKVKDKSKEIVERAEEEIARAAAESKKILDEAEEEIARAAAESKKILDEGSGSGSDAVAELQALNLKLAELLLEAVAELQALNLKLAELLLEAIAKLQELNIKLVELLTKLTDPATIREAIRKVKEDSERIVAEAERLIAAAKAESERIIREAERLIAAAKAESERIIREGSGSGDPDVARLQELNIELARELLRDVARLQELNIELARELLRAAAELQELNIKLVELASELTDPDEARAHIVMVDAYKKRIVEDAERLIREAAAASEKISREAERLIREAAAASEKISRE

SEQ ID NO: 45 - protein, 359 aa, Artificial Sequence
  Synthetic
SKEAVTKLQALNIKLAEKLLEAVTKLQALNIKLAEKLLEALARLQELNIALVYLAVELTDPKRIADEIKKVKDKSKEIVERAEEEIARAAAESKKILDEAEEEIARAAAESKKILDEGSGSGSDAVAELQALNLKLAELLLEAVAELQALNLKLAELLLEAIAKLQELNIKLVELLTKLTDPATIREAIRKVKEDSERIVAEAERLIAAAKAESERIIREAERLIAAAKAESERIIREGSGSGDPDVARLQELNIELARELLRDVARLQELNIELARELLRAAAELQELNIKLVELASELTDPDEARKAIARVKRESKRIVEDLALKLAGLDINSEKISREAERLIREAAAASEKISRE

SEQ ID NO: 46 - protein, 359 aa, Artificial Sequence
  Synthetic
SKEAVTKLQALNIKLAEKLLEAVTKLQALNIKLAEKLLEALARLQELNIALVYLAVELTDPKRIADEIKKVKDKSKEIVERAEEEIARAAAESKKILDEAEEEIARAAAESKKILDEGSGSGSDAVAELQALNLKLAELLLEAVAELQALNLKLAELLLEAIAKLQELNIKLVELLTKLTDPATIREAIRKVKEDSERIVAEAERLIAAAKAESERIIREAERLIAAAKAESERIIREGSGSGDPDVARLQELNIELARELLRDVARLQELNIELARELLRAAAELQELNIKLVELASELTDPDEARKAIARVKRESKRIVEDAERLIRELAEKLAGLDINAERLIREAAAASEKISRE

SEQ ID NO: 47 - protein, 359 aa, Artificial Sequence
  Synthetic
SKEAVTKLQALNIKLAEKLLEAVTKLQALNIKLAEKLLEALARLQELNIALVYLAVELTDPKRIADEIKKVKDKSKEIVERAEEEIARAAAESKKILDEAEEEIARAAAESKKILDEGSGSGSDAVAELQALNLKLAELLLEAVAELQALNLKLAELLLEAIAKLQELNIKLVELLTKLTDPATIREAIRKVKEDSERIVAEAERLIAAAKAESERIIREAERLIAAAKAESERIIREGSGSGDPDVARLQELNIELARELLRDVARLQELNIELARELLRAAAELQELNIKLVELASELTDPDEARKAIARVKRESKELAEKLRAGLDLNAAASEKISREAERLIREAAAASEKISRE

SEQ ID NO: 48 - protein, 359 aa, Artificial Sequence
  Synthetic
SKEAVTKLQALNIKLAEKLLEAVTKLQALNIKLAEKLLEALARLQELNIALVYLAVELTDPKRIADEIKKVKDKSKEIVERAEEEIARAAAESKKILDEAEEEIARAAAESKKILDEGSGSGSDAVAELQALNLKLAELLLEAVAELQALNLKLAELLLEAIAKLQELNIKLVELLTKLTDPATIREAIRKVKEDSERIVAEAERLIAAAKAESERIIREAERLIAAAKAESERIIREGSGSGDPDVARLQELNIELARELLRDVARLQELNIELARELLRAAAELQELNIKLVELASELTDPDEARKAIARVKRESKAAAKRARTSIREAAAASEKISREAERLIREAAAASEKISRE

SEQ ID NO: 49 - protein, 380 aa, Artificial Sequence
  Synthetic
  MISC_FEATURE (1)..(21): optional
MGSSHHHHHHSSGLVPRGSHMSKEAVTKLQALNIKLAEKLLEAVTKLQALNIKLAEKLLEALARLQELNIALVYLAVELTDPKRIADEIKKVKDKSKEIVERAEEEIARAAAESKKILDEAEEEIARAAAESKKILDEGSGSGSDAVAELQALNLKLAELLLEAVAELQALNLKLAELLLEAIAKLQELNIKLVELLTKLTDPATIREAIRKVKEDSERIVAEAERLIAAAKAESERIIREAERLIAAAKAESERIIREGSGSGDPDVARLQELNIELARELLRDVARLQELNIELARELLRAAAELQELNIKLVELASELTDPDEARKAIARVKTMFSSNRQKILERTETLNQEWKQRRIQAERLIREAAAASEKISRE

SEQ ID NO: 50 - protein, 16 aa, Artificial Sequence
  Synthetic
  MISC_FEATURE (2)..(4): X is any amino acid
  MISC_FEATURE (7)..(7): X is any amino acid
  MISC_FEATURE (11)..(11): X is any amino acid
  MISC_FEATURE (13)..(15): X is any amino acid
IXXXLRXIGDXFXXXY

SEQ ID NO: 51 - protein, 451 aa, Artificial Sequence
  Synthetic
  MISC_FEATURE (1)..(20): optional
  MISC_FEATURE (331)..(396): optional
MGSHHHHHHGSGSENLYFQGSKEAAKKLQDLNIELARKLLEASTKLQRLNIRLAEALLEAIARLQELNLELVYLAVELTDPKRIRDEIKEVKDKSKEIIRRAEKEIDDAAKESKKILEEARKAIRDAAEESRKILEEGSGSGSDALDELQKLNLELAKLLLKAIAETQDLNLRAAKAFLEAAAKLQELNIRAVELLVKLTDPATIRRALEHAKRRSKEIIDEAERAIRAAKRESERIIEEARRLIEKAKEESERIIREGSGSGDPDIKKLQDLNIELARELLRAHAQLQRLNLELLRELLRALAQLQELNLDLLRLASELTGGSGGSGGSVLLNVLSKCAGSKKFRPAPAAAFARECRGFYFELQELKEDDYYGITLSDDSDHQFLLANQVVVHNCGGSGGSDEIWIAQELRRIGDEFNAYYADAERLIREAAAASEKISREAERLIREAA

SEQ ID NO: 52 - protein, 823 aa, Artificial Sequence
  Synthetic
  MISC_FEATURE (1)..(20): optional
MGSHHHHHHGSGSENLYFQGHMSKGEELFTGVVPILVELDGDVNGHKFSVRGEGEGDATNGKLTLKFICTTGKLPVPWPTLVTTLTYGVQCFARYPDHMKQHDFFKSAMPEGYVQERTISFKDDGTYKTRAEVKFEGDTLVNRIELKGIDFKEDGNILGHKLEYNFNSHNVYITADKQKNGIKANFKIRHNVEDGSVQLADHYQQNTPIGDGPVLLPDNHYLSTQSVLSKDPNEKRDHMVLLEFVTAAGITHGMDELYKSGSGSGCFAKGTNVLMADGSIECIENIEVGNKVMGKDGRPREVIKLPRGRETMYSVVQKSQHRAHKSDSSREVPELLKFTCNATHELVVRTPRSVRRLSRTIKGVEYFEVITFEMGQKKAPDGRIVELVKEVSKSYPISEGPERANELVESYRKASNKAYFEWTIEARDLSLLGSHVRKATYQTYAPILYGGSGGSGGGGSGGSGSKEAAKKLQDLNIELARKLLEASTKLQRLNIRLAEALLEAIARLQELNLELVYLAVELTDPKRIRDEIKEVKDKSKEIIRRAEKEIDDAAKESKKILEEARKAIRDAAEESRKILEEGSGSGSDALDELQKLNLELAKLLLKAIAETQDLNLRAAKAFLEAAAKLQELNIRAVELLVKLTDPATIRRALEHAKRRSKEIIDEAERAIRAAKRESERIIEEARRLIEKAKEESERIIREGSGSGDPDIKKLQDLNIELARELLRAHAQLQRLNLELLRELLRALAQLQELNLDLLRLASELTDEIWIAQELRRIGDEFNAYYADAERLSREAAAASEKISREAERSIREAAAASEKISRE

SEQ ID NO: 53 - protein, 822 aa, Artificial Sequence
  Synthetic
  MISC_FEATURE (1)..(463): optional
MGSSHHHHHHSSGLVPRGSHMSKGEELFTGVVPILVELDGDVNGHKFSVRGEGEGDATNGKLTLKFICTTGKLPVPWPTLVTTLTYGVQCFARYPDHMKQHDFFKSAMPEGYVQERTISFKDDGTYKTRAEVKFEGDTLVNRIELKGIDFKEDGNILGHKLEYNFNSHNVYITADKQKNGIKANFKIRHNVEDGSVQLADHYQQNTPIGDGPVLLPDNHYLSTQSVLSKDPNEKRDHMVLLEFVTAAGITHGMDELYKSGSGSGCFAKGTNVLMADGSIECIENIEVGNKVMGKDGRPREVIKLPRGRETMYSVVQKSQHRAHKSDSSREVPELLKFTCNATHELVVRTPRSVRRLSRTIKGVEYFEVITFEMGQKKAPDGRIVELVKEVSKSYPISEGPERANELVESYRKASNKAYFEWTIEARDLSLLGSHVRKATYQTYAPILYGGSGGSGGGGSGGSGSKEAAKKLQDLNIELARKLLEASTKLQRLNIRLAEALLEAIARLQELNLELVYLAVELTDPKRIRDEIKEVKDKSKEIIRRAEKEIDDAAKESKKILEEARKAIRDAAEESRKILEEGSGSGSDALDELQKLNLELAKLLLKAIAETQDLNLRAAKAFLEAAAKLQELNIRAVELLVKLTDPATIRRALEHAKRRSKEIIDEAERAIRAAKRESERIIEEARRLIEKAKEESERIIREGSGSGDPDIKKLQDLNIELARELLRAHAQLQRLNLELLRELLRALAQLQELNLDLLRLASELTDEIWIAQELRRIGDEFNAYYADAERLSREAAAASEKISREAERSIREAAAASEKISRE

SEQ ID NO: 54 - protein, 379 aa, Artificial Sequence
  Synthetic
  MISC_FEATURE (1)..(20): optional
  MISC_FEATURE (321)..(342): optional
  misc_feature (348)..(348): Xaa can be any naturally occurring amino acid
  misc_feature (365)..(365): Xaa can be any naturally occurring amino acid
MGSHHHHHHGSGSENLYFQGSKEAAKKLQDLNIELARKLLEASTKLQRLNIRLAEALLEAIARLQELNLELVYLAVELTDPKRIRDEIKEVKDKSKEIIRRAEKEIDDAAKESKKILEEARKAIRDAAEESRKILEEGSGSGSDALDELQKLNLELAKLLLKAIAETQDLNLRAAKAFLEAAAKLQELNIRAVELLVKLTDPATIRRALEHAKRRSKEIIDEAERAIRAAKRESERIIEEARRLIEKAKEESERIIREGSGSGDPDIKKLQDLNIELARELLRAHAQLQRLNLELLRELLRALAQLQELNLDLLRLASELTDEIWIAQELRRIGDEFNAYYADAERLXREAAAASEKISREAERXIREAAAASEKISRE

SEQ ID NO: 55 - protein, 379 aa, Artificial Sequence
  Synthetic
  MISC_FEATURE (1)..(20): optional
  MISC_FEATURE (321)..(342): optional
  misc_feature (348)..(348): Xaa can be any naturally occurring amino acid
  misc_feature (365)..(365): Xaa can be any naturally occurring amino acid
MGSHHHHHHGSGSENLYFQGSKEAAKKLQDLNIELARKLLEASTKLQRLNIRLAEALLEAIARLQELNLELVYLAVELTDPKRIRDEIKEVKDKSKEIIRRAEKEIDDAAKESKKILEEARKAIRDAAEESRKILEEGSGSGSDALDELQKLNLELAKLLLKAIAETQDLNLRAAKAFLEAAAKLQELNIRAVELLVKLTDPATIRRALEHAKRRSKEIIDEAERAIRAAKRESERIIEEARRLIEKAKEESERIIREGSGSGDPDIKKLQDLNIELARELLRAHAQLQRLNLELLRELLRALAQLQELNLDLLRLASELRDHMVLHEYVNAAGITFNAYYADAERLXREAAAASEKISREAERXIREAAAASEKISRE

SEQ ID NO: 56 - protein, 311 aa, Artificial Sequence
  Synthetic
  MISC_FEATURE (1)..(22): optional
  MISC_FEATURE (265)..(286): optional
  misc_feature (295)..(295): Xaa can be any naturally occurring amino acid
  misc_feature (298)..(298): Xaa can be any naturally occurring amino acid
MGSHHHHHHGSGSENLYFQGSGGSELARKLLEASTKLQRLNIRLAEALLEAIARLQELNLELVYLAVELTDPKRIRDEIKEVKDKSKEIIRRAEKEIDDAAKESEKILEEAREAISGSGSELAKLLLKAIAETQDLNLRAAKAFLEAAAKLQELNIRAVELLVKLTDPATIREALEHAKRRSKEIIDEAERAIRAAKRESERIIEEARRLIEKGSGSGSELARELLRAHAQLQRLNLELLRELLRALAQLQELNLDLLRLASELTDEIWIAQELRRIGDEFNAYYADAERLIREXAAXSEKISREAERLIR

SEQ ID NO: 57 - protein, 311 aa, Artificial Sequence
  Synthetic
  MISC_FEATURE (1)..(22): optional
  MISC_FEATURE (265)..(286): optional
  misc_feature (295)..(295): Xaa can be any naturally occurring amino acid
  misc_feature (298)..(298): Xaa can be any naturally occurring amino acid
MGSHHHHHHGSGSENLYFQGSGGSELARKLLEASTKLQRLNIRLAEALLEAIARLQELNLELVYLAVELTDPKRIRDEIKEVKDKSKEIIRRAEKEIDDAAKESEKILEEAREAISGSGSELAKLLLKAIAETQDLNLRAAKAFLEAAAKLQELNIRAVELLVKLTDPATIREALEHAKRRSKEIIDEAERAIRAAKRESERIIEEARRLIEKGSGSGSELARELLRAHAQLQRLNLELLRELLRALAQLQELNLDLLRLASELRDHMVLHEYVNAAGITFNAYYADAERLIREXAAXSEKISREAERLIR

SEQ ID NO: 58 - protein, 494 aa, Artificial Sequence
  Synthetic
  MISC_FEATURE (1)..(21): optional
  MISC_FEATURE (436)..(457): optional
  misc_feature (463)..(463): Xaa can be any naturally occurring amino acid
  misc_feature (480)..(480): Xaa can be any naturally occurring amino acid
MGSHHHHHHGSGSENLYFQGSAMVDTLSGLSSEQGQSGDMTIEEDSATHIKFSKRDEDGKELAGATMELRDSSGKTISTWISDGQVKDFYLYPGKYTFVETAAPDGYEVATAITFTVNEQGQVTVNGKATKGSGGSKEAAKKLQDLNIELARKLLEASTKLQRLNIRLAEALLEAIARLQELNLELVYLAVELTDPKRIRDEIKEVKDKSKEIIRRAEKEIDDAAKESKKILEEARKAIRDAAEESRKILEEGSGSGSDALDELQKLNLELAKLLLKAIAETQDLNLRAAKAFLEAAAKLQELNIRAVELLVKLTDPATIRRALEHAKRRSKEIIDEAERAIRAAKRESERIIEEARRLIEKAKEESERIIREGSGSGDPDIKKLQDLNIELARELLRAHAQLQRLNLELLRELLRALAQLQELNLDLLRLASELRDHMVLHEYVNAAGITFNAYYADAERLXREAAAASEKISREAERXIREAAAASEKISRE

SEQ ID NO: 59 - protein, 423 aa, Artificial Sequence
  Synthetic
  MISC_FEATURE (1)..(21): optional
  MISC_FEATURE (377)..(398): optional
  misc_feature (407)..(407): Xaa can be any naturally occurring amino acid
  misc_feature (410)..(410): Xaa can be any naturally occurring amino acid
MGSHHHHHHGSGSENLYFQGSAMVDTLSGLSSEQGQSGDMTIEEDSATHIKFSKRDEDGKELAGATMELRDSSGKTISTWISDGQVKDFYLYPGKYTFVETAAPDGYEVATAITFTVNEQGQVTVNGKATKGSGGSELARKLLEASTKLQRLNIRLAEALLEAIARLQELNLELVYLAVELTDPKRIRDEIKEVKDKSKEIIRRAEKEIDDAAKESEKILEEAREAISGSGSELAKLLLKAIAETQDLNLRAAKAFLEAAAKLQELNIRAVELLVKLTDPATIREALEHAKRRSKEIIDEAERAIRAAKRESERIIEEARRLIEKGSGSGSELARELLRAHAQLQRLNLELLRELLRALAQLQELNLDLLRLASELRDHMVLHEYVNAAGITFNAYYADAERLIREXAAXSEKISREAERLIR

SEQ ID NO: 60 - protein, 20 aa, Artificial Sequence
  Synthetic
EIWIAQELRRIGDEFNAYYA

SEQ ID NO: 61 - protein, 379 aa, Artificial Sequence
  Synthetic
  MISC_FEATURE (1)..(20): optional
  MISC_FEATURE (322)..(334): optional
MGSHHHHHHGSGSENLYFQGSKEAAKKLQDLNIELARKLLEASTKLQRLNIRLAEALLEAIARLQELNLELVYLAVELTDPKRIRDEIKEVKDKSKEIIRRAEKEIDDAAKESKKILEEARKAIRDAAEESRKILEEGSGSGSDALDELQKLNLELAKLLLKAIAETQDLNLRAAKAFLEAAAKLQELNIRAVELLVKLTDPATIRRALEHAKRRSKEIIDEAERAIRAAKRESERIIEEARRLIEKAKEESERIIREGSGSGDPDIKKLQDLNIELARELLRAHAQLQRLNLELLRELLRALAQLQELNLDLLRLASELTNIQMLLEAADYLERESKRIVEDAERLIREAAAASEKISREAERSIREAAAASEKISRE

SEQ ID NO: 62 - protein, 29 aa, Artificial Sequence
  Synthetic
KMAQELIDKVRAASLQINGDAFYAILRAL

SEQ ID NO: 63 - protein, 9 aa, Artificial Sequence
  Synthetic
  MISC_FEATURE (1)..(1): optional
NWSHPQFEK

SEQ ID NO: 64 - protein, 8 aa, Artificial Sequence
  Synthetic
  MISC_FEATURE (7)..(7): X is G or S
  MISC_FEATURE (8)..(8): X is any amino acid, except P
ENLYFQXX

SEQ ID NO: 65 - protein, 377 aa, Artificial Sequence
  Synthetic
  MISC_FEATURE (1)..(20): optional
  MISC_FEATURE (329)..(341): optional
MGSHHHHHHGSGSENLYFQGSKEAAKKLQDLNIELARKLLEASTKLQRLNIRLAEALLEAIARLQELNLELVYLAVELTDPKRIRDEIKEVKDKSKEIIRRAEKEIDDAAKESKKILEEARKAIRDAAEESRKILEEGSGSGSDALDELQKLNLELAKLLLKAIAETQDLNLRAAKAFLEAAAKLQELNIRAVELLVKLTDPATIRRALEHAKRRSKEIIDEAERAIRAAKRESERIIEEARRLIEKAKEESERIIREGSGSGDPDIKKLQDLNIELARELLRAHAQLQRLNLELLRELLRALAQLQELNLDLLRLASELTDPDEARKNIQMLLEAADYLEEDAERLIREAAAASEKISREAERLIREAASEKISRE

SEQ ID NO: 66 - protein, 6 aa, Artificial Sequence
  Synthetic
LVPRGS

SEQ ID NO: 67 - protein, 285 aa, Artificial Sequence
  Synthetic
  MISC_FEATURE (19)..(38): optional
MDEARKAIARVKRESKRIEIWIAQELRRIGDEFNAYYAEAEKLATDELWHRLLEASTKLQRLNIRLAEALLEAIARLQELNLELVYLAVELTDPKRIRDEIKEVKDKSKEIIRRAEKEIDDAAKESEKILEEAREAISGSGSELAKLLLKAIAETQDLNLRAAKAFLEAAAKLQELNIRAVELLVKLTDPATIREALEHAKRRSKEIIDEAERAIRAAKRESERIIEEARRLIEKGSGSGSELARELLRAHAQLQRLNLELLRELLRALAQLQELNLDLLRLASE

SEQ ID NO: 68 - protein, 309 aa, Artificial Sequence
  Synthetic
  MISC_FEATURE (1)..(21): optional
  MISC_FEATURE (270)..(279): optional
MGSSHHHHHHSSGLVPRGSHMSELARKLLEASTKLQRLNIRLAEALLEAIARLQELNLELVYLAVELTDPKRIRDEIKEVKDKSKEIIRRAEKEIDDAAKESEKILEEAREAISGSGSELAKLLLKAIAETQDLNLRAAKAFLEAAAKLQELNIRAVELLVKLTDPATIREALEHAKRRSKEIIDEAERAIRAAKRESERIIEEARRLIEKGSGSGSELARELLRAHAQLQRLNLELLRELLRALAQLQELNLDLLRLASELTDPDEARAHIVMVDAYKKRIVEDAERLIREAAAASEKISREAERLIR

SEQ ID NO: 69 - protein, 309 aa, Artificial Sequence
  Synthetic
  MISC_FEATURE (1)..(21): optional
  MISC_FEATURE (281)..(290): optional
MGSSHHHHHHSSGLVPRGSHMSELARKLLEASTKLQRLNIRLAEALLEAIARLQELNLELVYLAVELTDPKRIRDEIKEVKDKSKEIIRRAEKEIDDAAKESEKILEEAREAISGSGSELAKLLLKAIAETQDLNLRAAKAFLEAAAKLQELNIRAVELLVKLTDPATIREALEHAKRRSKEIIDEAERAIRAAKRESERIIEEARRLIEKGSGSGSELARELLRAHAQLQRLNLELLRELLRALAQLQELNLDLLRLASELTDPDEARKAIARVKRESKAHIVMVDAYKREAAAASEKISREAERLIR

SEQ ID NO: 70 - protein, 309 aa, Artificial Sequence
  Synthetic
  MISC_FEATURE (1)..(21): optional
  MISC_FEATURE (270)..(277): optional
MGSSHHHHHHSSGLVPRGSHMSELARKLLEASTKLQRLNIRLAEALLEAIARLQELNLELVYLAVELTDPKRIRDEIKEVKDKSKEIIRRAEKEIDDAAKESEKILEEAREAISGSGSELAKLLLKAIAETQDLNLRAAKAFLEAAAKLQELNIRAVELLVKLTDPATIREALEHAKRRSKEIIDEAERAIRAAKRESERIIEEARRLIEKGSGSGSELARELLRAHAQLQRLNLELLRELLRALAQLQELNLDLLRLASELTDPDEARENLYFQGSESKRIVEDAERLIREAAAASEKISREAERLIR

SEQ ID NO: 71 - protein, 309 aa, Artificial Sequence
  Synthetic
  MISC_FEATURE (1)..(21): optional
  MISC_FEATURE (284)..(291): optional
MGSSHHHHHHSSGLVPRGSHMSELARKLLEASTKLQRLNIRLAEALLEAIARLQELNLELVYLAVELTDPKRIRDEIKEVKDKSKEIIRRAEKEIDDAAKESEKILEEAREAISGSGSELAKLLLKAIAETQDLNLRAAKAFLEAAAKLQELNIRAVELLVKLTDPATIREALEHAKRRSKEIIDEAERAIRAAKRESERIIEEARRLIEKGSGSGSELARELLRAHAQLQRLNLELLRELLRALAQLQELNLDLLRLASELTDPDEARKAIARVKRESKRIVENLYFQGSEAAAASEKISREAERLIR

SEQ ID NO: 72 - protein, 309 aa, Artificial Sequence
  Synthetic
  MISC_FEATURE (1)..(21): optional
  MISC_FEATURE (270)..(280): optional
MGSSHHHHHHSSGLVPRGSHMSELARKLLEASTKLQRLNIRLAEALLEAIARLQELNLELVYLAVELTDPKRIRDEIKEVKDKSKEIIRRAEKEIDDAAKESEKILEEAREAISGSGSELAKLLLKAIAETQDLNLRAAKAFLEAAAKLQELNIRAVELLVKLTDPATIREALEHAKRRSKEIIDEAERAIRAAKRESERIIEEARRLIEKGSGSGSELARELLRAHAQLQRLNLELLRELLRALAQLQELNLDLLRLASELTDPDEARVSGWRLFKKISRIVEDAERLIREAAAASEKISREAERLIR

SEQ ID NO: 73 - protein, 309 aa, Artificial Sequence
  Synthetic
  MISC_FEATURE (1)..(21): optional
  MISC_FEATURE (281)..(291): optional
MGSSHHHHHHSSGLVPRGSHMSELARKLLEASTKLQRLNIRLAEALLEAIARLQELNLELVYLAVELTDPKRIRDEIKEVKDKSKEIIRRAEKEIDDAAKESEKILEEAREAISGSGSELAKLLLKAIAETQDLNLRAAKAFLEAAAKLQELNIRAVELLVKLTDPATIREALEHAKRRSKEIIDEAERAIRAAKRESERIIEEARRLIEKGSGSGSELARELLRAHAQLQRLNLELLRELLRALAQLQELNLDLLRLASELTDPDEARKAIARVKRESKVSGWRLFKKISEAAAASEKISREAERLIR

SEQ ID NO: 74 - protein, 309 aa, Artificial Sequence
  Synthetic
  MISC_FEATURE (1)..(21): optional
  MISC_FEATURE (273)..(276): optional
  MISC_FEATURE (302)..(305): optional
MGSSHHHHHHSSGLVPRGSHMSELARKLLEASTKLQRLNIRLAEALLEAIARLQELNLELVYLAVELTDPKRIRDEIKEVKDKSKEIIRRAEKEIDDAAKESEKILEEAREAISGSGSELAKLLLKAIAETQDLNLRAAKAFLEAAAKLQELNIRAVELLVKLTDPATIREALEHAKRRSKEIIDEAERAIRAAKRESERIIEEARRLIEKGSGSGSELARELLRAHAQLQRLNLELLRELLRALAQLQELNLDLLRLASELTDPDEARKAIIQIGRESKRIVEDAERLIREAAAASEKISVQLGRLIR

SEQ ID NO: 75 - protein, 309 aa, Artificial Sequence
  Synthetic
  MISC_FEATURE (1)..(21): optional
  MISC_FEATURE (284)..(287): optional
  MISC_FEATURE (291)..(294): optional
MGSSHHHHHHSSGLVPRGSHMSELARKLLEASTKLQRLNIRLAEALLEAIARLQELNLELVYLAVELTDPKRIRDEIKEVKDKSKEIIRRAEKEIDDAAKESEKILEEAREAISGSGSELAKLLLKAIAETQDLNLRAAKAFLEAAAKLQELNIRAVELLVKLTDPATIREALEHAKRRSKEIIDEAERAIRAAKRESERIIEEARRLIEKGSGSGSELARELLRAHAQLQRLNLELLRELLRALAQLQELNLDLLRLASELTDPDEARKAIARVKRESKRIVIQIGRLIVQLGAASEKISREAERLIR

SEQ ID NO: 76 - protein, 309 aa, Artificial Sequence
  Synthetic
  MISC_FEATURE (1)..(21): optional
  MISC_FEATURE (284)..(287): optional
  MISC_FEATURE (302)..(305): optional
MGSSHHHHHHSSGLVPRGSHMSELARKLLEASTKLQRLNIRLAEALLEAIARLQELNLELVYLAVELTDPKRIRDEIKEVKDKSKEIIRRAEKEIDDAAKESEKILEEAREAISGSGSELAKLLLKAIAETQDLNLRAAKAFLEAAAKLQELNIRAVELLVKLTDPATIREALEHAKRRSKEIIDEAERAIRAAKRESERIIEEARRLIEKGSGSGSELARELLRAHAQLQRLNLELLRELLRALAQLQELNLDLLRLASELTDPDEARKAIARVKRESKRIVIQIGRLIREAAAASEKISVQLGRLIR

SEQ ID NO: 77 - protein, 309 aa, Artificial Sequence
  Synthetic
  MISC_FEATURE (1)..(21): optional
  MISC_FEATURE (272)..(300): optional
MGSSHHHHHHSSGLVPRGSHMSELARKLLEASTKLQRLNIRLAEALLEAIARLQELNLELVYLAVELTDPKRIRDEIKEVKDKSKEIIRRAEKEIDDAAKESEKILEEAREAISGSGSELAKLLLKAIAETQDLNLRAAKAFLEAAAKLQELNIRAVELLVKLTDPATIREALEHAKRRSKEIIDEAERAIRAAKRESERIIEEARRLIEKGSGSGSELARELLRAHAQLQRLNLELLRELLRALAQLQELNLDLLRLASELTDPDESVKELEDKVEELLSKNYHLENEVARLKKLVGERSREAERLIR

SEQ ID NO: 78 - protein, 309 aa, Artificial Sequence
  Synthetic
  MISC_FEATURE (1)..(21): optional
  MISC_FEATURE (274)..(303): optional
MGSSHHHHHHSSGLVPRGSHMSELARKLLEASTKLQRLNIRLAEALLEAIARLQELNLELVYLAVELTDPKRIRDEIKEVKDKSKEIIRRAEKEIDDAAKESEKILEEAREAISGSGSELAKLLLKAIAETQDLNLRAAKAFLEAAAKLQELNIRAVELLVKLTDPATIREALEHAKRRSKEIIDEAERAIRAAKRESERIIEEARRLIEKGSGSGSELARELLRAHAQLQRLNLELLRELLRALAQLQELNLDLLRLASELTDPDEARKAIAGEIAALKQEIAALKKENAALKWEIAALKQGAERLIR

SEQ ID NO: 79 - protein, 309 aa, Artificial Sequence
  Synthetic
  MISC_FEATURE (1)..(21): optional
  MISC_FEATURE (278)..(304): optional
MGSSHHHHHHSSGLVPRGSHMSELARKLLEASTKLQRLNIRLAEALLEAIARLQELNLELVYLAVELTDPKRIRDEIKEVKDKSKEIIRRAEKEIDDAAKESEKILEEAREAISGSGSELAKLLLKAIAETQDLNLRAAKAFLEAAAKLQELNIRAVELLVKLTDPATIREALEHAKRRSKEIIDEAERAIRAAKRESERIIEEARRLIEKGSGSGSELARELLRAHAQLQRLNLELLRELLRALAQLQELNLDLLRLASELTDPDEARKAIARVKRGLEQEIAALEKENAALEWEIAALEQGGERLIR

SEQ ID NO: 80 - protein, 309 aa, Artificial Sequence
  Synthetic
  MISC_FEATURE (1)..(21): optional
  MISC_FEATURE (278)..(304): optional
MGSSHHHHHHSSGLVPRGSHMSELARKLLEASTKLQRLNIRLAEALLEAIARLQELNLELVYLAVELTDPKRIRDEIKEVKDKSKEIIRRAEKEIDDAAKESEKILEEAREAISGSGSELAKLLLKAIAETQDLNLRAAKAFLEAAAKLQELNIRAVELLVKLTDPATIREALEHAKRRSKEIIDEAERAIRAAKRESERIIEEARRLIEKGSGSGSELARELLRAHAQLQRLNLELLRELLRALAQLQELNLDLLRLASELTDPDEARKAIARVKRGLKQKIAALKYKNAALKKKIAALKQGGERLIR

SEQ ID NO: 81 - protein, 186 aa, Artificial Sequence
  Synthetic
  MISC_FEATURE (151)..(158): optional
SRVEEIIEDLRRLLEEIRKENADSIRASKELLDRVKEINDTIIAELERLLKDIEKEVREKGSESEEVKKALRRVLEELEKLLRRVAEINEEVLRRNSKLVEEDARRNAEVLKELKRLVEELMREIGDEDKVRKVAEVAEKVLRDIDKLDRWSHPQFEKTNGEISKLDEDTRRVAERVKKAIEDLAK

SEQ ID NO: 82 - protein, 179 aa, Artificial Sequence
  Synthetic
  MISC_FEATURE (35)..(42): optional
SEVDEIIADNERALDEVRREVEEIDKENAERLGEWSHPQFEKGDRLAKALEEIRKGVRSRLVDELERAIREVEEVIRRVLERVRRLIEEVSKIITDVLREVERLHEEVTKELRKVEDGNSREALDALRRLIEKVVEDSARLIKKVDEALKAVNKEIEDLSREVADLVRAVAEELDARVK

SEQ ID NO: 83 - protein, 177 aa, Artificial Sequence
  Synthetic
  MISC_FEATURE (143)..(150): optional
SSDEVLKEIEEIIRRLEAEVRRVNAEVNASTEDLAREVEEVLRATNELIEELERRVTGTEELKRVIDELRDRDRKVRRRVERVIEESAKRDDESRKRLTRAVEKLRADLKKLADDGVPEEALSKAIKDVRDIVKKVKDELKEWSHPQFEKVDRLSEELKEWLKDVERVLKELTDKDR

SEQ ID NO: 84 - protein, 178 aa, Artificial Sequence
  Synthetic
  MISC_FEATURE (140)..(147): optional
SDAEELLKRVADLLKASLESLEKILRDSKELMDRWRKKLEDLLRESEELVDRAEKILRRGGSDKEVLDKIAEEVRRTNDDSRRLDEELHRLSRDTLRKLEENLRRTEKEVREMDKRAAERGVDERVREELKKLLTRVEWSHPQFEKGDKKILKEAHKESKEVNDRDRELLERLEESVR

SEQ ID NO: 85 - protein, 178 aa, Artificial Sequence
  Synthetic
  MISC_FEATURE (35)..(42): optional
SDAEELLKRVADLLKASLESLEKILRDSKELMDRWSHPQFEKLGESEELVDRAEKILRRGGSDKEVLDKIAEEVRRTNDDSRRLDEELHRLSRDTLRKLEENLRRTEKEVREMDKRAAERGVDERVREELKKLLTRVEEEHRKVLETDKKILKEAHKESKEVNDRDRELLERLEESVR

SEQ ID NO: 86 - protein, 242 aa, Artificial Sequence
  Synthetic
  MISC_FEATURE (212)..(219): optional
SEAEDLLERVKRVLDELIEIVDRNHELNARVVETSARLVERLLEEVERALETLEREIPGRELLDKAIKDLRDVLRRVAEKVKRSIEELKEVLEESRRVLEEVVRALAEVIDRVRRLVEKGVDLRDLIRELKRVLEEAVSLIERLVRLNTRAAEKDNESLRELVRAIKEALKRAVDMVRADGLDSRLVKKLDEIVKEVAKKLEDVVRANEELWSHPQFEKGSSVARLREAVERVARDLEETAR

SEQ ID NO: 87 - protein, 235 aa, Artificial Sequence
  Synthetic
  MISC_FEATURE (24)..(31): optional
SDEERLEKVVKDVIEKVRRILEKWSHPQFEKGSELRRILEEWEKIIREVLDKVRRGSGSADALVEVLEEILRLAEELSKRVEEVLREILKLAKALSDELVKVLAEIVEAAKRISRDDELRKAVEDVARELEDLAAKDRKILDDVREALERIAKEDKDILREAEETLRRLADEMRRSGVDERLLKRVVDILARLLELNATTIERLLRILEELLKLNKELAERVIRVLEKLLEEIKR

SEQ ID NO: 88 - protein, 235 aa, Artificial Sequence
  Synthetic
  MISC_FEATURE (198)..(205): optional
SVLETVKKALEDSSEKIERIVEEDERVAKESSDRIRRLVEEDKRVADEILDLIEKGGDTDTLAKLVEEWSRTSKKLLDDVLKLHKDWSDDSRRLLEEILRVHEELIRAVKEILDRGGKPEEVVRELEKVLKESLDTLEEIIRRLDEANARTVKRVADVIRELEDANAKVLEEIERKGDDKDAVIKVIEELIRANAAVWSHPQFEKGDLVRVNKTVWKELLRVNEKLARDLERVVK

SEQ ID NO: 89 - protein, 235 aa, Artificial Sequence
  Synthetic
  MISC_FEATURE (31)..(38): optional
SLVDELRKSLERNVRVSEEVARRLKEALGRWSHPQFEKGGDLIRLNEDVVRVVEKVGVDESAIERVRRIIEELNRALDAVLKKNEDLVRRLTELLDKLLEENRRLVEELDEDLKRRGGTEEVIDTILELIERSIERLKRLLDELLRIVREALKDNARVADENLKALKEILDELRKDGVSDEELKRVLEKAADLHARLKDAHRKLLEDLERIIRELKKKLDEVVEENKRSVDELKR

SEQ ID NO: 90 - protein, 237 aa, Artificial Sequence
  Synthetic
  MISC_FEATURE (20)..(27): optional
MKDAVIKVIEELIRANAAVWSHPQFEKGDLVRVNKTVWKELLRVNEKLARDLERALDERDVSAWETVKKALEDSSEKIERIVEEDERVAKESSDRIRRLVEEDKRVADEILDLIEKGGDTDTLAKLVEEWSRTSKKLLDDVLKLHKDWSDDSRRLLEEILRVHEELIRAVKEILDRGGAPEEVVRELEKVLKESLDTLEEIIRRLDEANARTVKRVADVIRELEDANAKVLEEIERK

SEQ ID NO: 91 - protein, 175 aa, Artificial Sequence
  Synthetic
  MISC_FEATURE (26)..(33): optional
MEEAASKAIKDVRDIVKKVKDELKEWSHPQFEKVDRLSEELKEWLKDVERVLKELTDREEASEEELKRVIDELRDRDRKVRRRVERVIEESAKRDDESRKRLTRAVEKLRADLKKLSVEGASDEVLKEIEEIIRRLEAEVRRVNAEVNASTEDLAREVEEVLRATNELIEELERR

SEQ ID NO: 92 - protein, 170 aa, Artificial Sequence
  Synthetic
SEVEDVVRKVEKLVRDLIKHVEENVRRVEEVVRKLIEEIKRIAEEITRIAEELAKEPGSEDLLRKLEKVLKEIDDKLKELEDRLRDMVRRSRESSEENERRLKRVEDEVRRDHMVLHEYVNAAGITKEVEKVNRESREVTRRVLEEAKEMLERVKKIVKEVIEKVRRVVK

SEQ ID NO: 93 - protein, 171 aa, Artificial Sequence
  Synthetic
SEKEKVIKEARELLERLRKRLKDVNDDVTRLLDELRKENEKSREDVEREVKRLEEEVPVEDVIRELKRRLEEVDKKNRDILETLKRELDEVSRRTREELEKLRKELEEVERDHMVLHEYVNAAGITRRRLERLVEENERVVKKILDEIRRSVEENKRIVDKVRKDLDERRK

SEQ ID NO: 94 - protein, 172 aa, Artificial Sequence
  Synthetic
SRAETVLKEVTDKIKKLADSSDELLRRNKENIDELKKSSEELLRRLTKAIEEIEKGSVDEETLEELIRRVEAELEAHHRELEKNSREDEKRNRDHHAKLEEEMRRVEERLERDHMVLHEYVNAAGITDTVRRRNEKVNEDVKRMNDKLRRDNEDVIRRVEKLLRELEEKRRT

SEQ ID NO: 95 - protein, 172 aa, Artificial Sequence
  Synthetic
SKEEELEKLLREHHEKIKRLKEESKRINDRIRRTVEELIKESEKINRDINDTVRKGDRDEEVIRRLLEDVRRKHEELRERLKRELDKVRERHKELLDRARRATEAVKERLDRDHMVLHEYVNAAGITERNLDDLARVLKESEDDLAEILRRLKEVLEESERDLERVEREVRK

SEQ ID NO: 96 - protein, 171 aa, Artificial Sequence
  Synthetic
SEKEKVIKEARELLERLRKRLKDVNDDVTRLLDELRKENEKSREDVEREVKRLEEEVPVEDVIRELKRRLEEVDKKNRDILETLKRELDEVSRRTREELEKLRKELEEVEKARDHMVLHEYVNAAGITRLERLVEENERVVKKILDEIRRSVEENKRIVDKVRKDLDERRK

SEQ ID NO: 97 - protein, 173 aa, Artificial Sequence
  Synthetic
STEDVLRKIKEDVKRVIDDNRRILDEVRRTSKRVLDDLRANLKHIAEEVERVLRGSDSEEVVRELAKILDEIREEHRRLIRTNEKVLEDIERDHRRISEELKRILDEVDELLRDHMVLHEYVNAAGITVDEIKRLAEESLKRLEDLSRDHKRRAKELNDEIAKVVDELAKRAT

SEQ ID NO: 98 - protein, 174 aa, Artificial Sequence
  Synthetic
SRDEKIRDILRRVLKEVRDSTKKVEEDLEDVHRRTEEELRKVKKRLDEVLKRVRDEGASEELKRRMEEVVRRIEELLKKLLKEDRDVVKEIRDKLDETRKEMEEVAERIKDKIRDHMVLHEYVNAAGITADRLIDLNRRIAEEVDKIVRDSIKKVEEIVTEVEKIVEKLIRDVR

SEQ ID NO: 99 - protein, 174 aa, Artificial Sequence
  Synthetic
SELEKVVKEVADLLRRNLEKSKRVLEEVRRRLEENLRESEKVHDDNRKTARRILELVREGKDKRDLTRLLEEDDKRVKEALDKSRENNERILKEVRRALRESEEDNRRILKEVRDHMVLHEYVNAAGITRESIERSRRFIEELEKIVEETLTESEKLARASSEITKTVLDEIRK

SEQ ID NO: 100 - protein, 171 aa, Artificial Sequence
  Synthetic
SEKEKVIKEARELLERLRKRLKDVNDDVTRLLDELRKENEKSREDVEREVKRLEEEVPVEDVIRELKRRLEEVDKKNRDILETLKRELDEVSRRTREELEKLRKELEEVEKAGRDHMVLHEYVNAAGITLERLVEENERVVKKILDEIRRSVEENKRIVDKVRKDLDERRK

SEQ ID NO: 101 - protein, 174 aa, Artificial Sequence
  Synthetic
SEIEELEKRIDELLKELRDLSRRIAEEVKRLLEELKKLSKDSEDKLRELLERLKRKGVPEEELRRVEEEVERVVRESRKLNKETEDELRRLLEEIKESNDRVEKRARELKKLLRDHMVLHEYVNAAGITVREDKERLKKVLKDARDLIKKDKDLNEKLSRELEKLVRELEERAR

SEQ ID NO: 102 - protein, 174 aa, Artificial Sequence
  Synthetic
DELRDVKRELDRLLRENEEIVERIAETVRRLLEELKKLTKELAEELRKLLEELRKRGVPEKELKEVADTLRKLLKDIERSNKEVEDRLRKLLEEIKESTDRLREELEEVEKLLRDHMVLHEYVNAAGITSRDNKRRMRRVLEEAKRLAKEDKERIDKIRKEIEELIKRLKDKAT

SEQ ID NO: 103 - protein, 174 aa, Artificial Sequence
  Synthetic
DEEEDLERRIKKLLDENRELLKRIAEELRRLLEELRRLTEESADRLRRLLKELKDRGVPEKDLRDVAEKVKKVLKESEDSNRDVKRKLEKLLRDLERSTERLEREARKVRKLLRDHMVLHEYVNAAGITSRDNKELLKKIEKEIRDLIKEDKERNRELSERLRKLVEELKKKAT

SEQ ID NO: 104 - protein, 174 aa, Artificial Sequence
  Synthetic
REIEEAAKDLDRLLEENKKLVKEVEEELRRLLKENRDLVKESEDRIRKLLEELRRRGVPEEELKEVEERARRVIEESRRSSKELEKRLRELLEELRRSTKELEDRLREIKKLLRDHMVLHEYVNAAGITSRENKEKIRKILEDVKKLSEDNKRRNEELSRRVKTLVDEIKKRAT

SEQ ID NO: 105 - protein, 174 aa, Artificial Sequence
  Synthetic
EELERILDKVRKVIEEVRKRLRDDLRTVEKVLKETEEVLRRAAERAKRALERVEEAARRGRDRREIKEELKKVLDDLRELLRALEEKNRRVNKENEDSLRKIEEDLRDVLRKLRDHMVLHEYVNAAGITLRTIREEVERVLRKSNELSTRIKKRIDDVLETLERLLKELDDKLR

SEQ ID NO: 106 - protein, 174 aa, Artificial Sequence
  Synthetic
SEEEVLREAAKTVEKLLDEIRRSLEKVSKRVEDSNRELKESLDRVRERVRELLEELRKNNVDRTLLEDVRRKLERIEERNEEMNDRSRRKLEELRERNRKILEDIRRTLEDLKRDHMVLHEYVNAAGITAKLVDEVDKENKRALRENEERVKTLNRENEEMLKRIEEEVRRATK

SEQ ID NO: 107 - protein, 174 aa, Artificial Sequence
  Synthetic
SESDEVIRDLARLLDELARHVDDSVRRMDEVVKRSTREADELAKRLDELVKEVEKKPGDERVERMVAEIERLVAEVLEELKKKYEKLKREVEENLRRLEETVRDIVEKARKVTRDHMVLHEYVNAAGITERILEEAKKKHEDVLRRLEDSLRRVAELLKAALDRLREIVDRLRR

SEQ ID NO: 108 - protein, 172 aa, Artificial Sequence
  Synthetic
SRAETVLKEVTDKIKKLADSSDELLRRNKENIDELKKSSEELLRRLTKAIEEIEKGSVDEETLEELIRRVEAELEAHHRELEKNSREDEKRNRDHHAKLEEEMRRVEERLERERDHMVLHEYVNAAGITVRRRNEKVNEDVKRMNDKLRRDNEDVIRRVEKLLRELEEKRRT

SEQ ID NO: 109 - protein, 174 aa, Artificial Sequence
  Synthetic
KEVEDAVKELEDLLRANEDKTRSIVEDMRASNKDLEDHSRASEEEVRKLLDDLRRAGVPRDSLKRLAEDVERVTRESRELLERVHRADRELIERLKESNERLRRAIEEIRKAIRDHMVLHEYVNAAGITAEEDAERLDRLRRESEELNERVRRVDKKLLEEIRRKAKKVEDDTR

SEQ ID NO: 110 - protein, 174 aa, Artificial Sequence
  Synthetic
DEEEDLERAIKKLLDENRELLKRIAEELRRLLEELRRLTEESADRLRRLLKELKDRGVPEEDLADVAEKVKKVLKESEDSNADVARKLEKLLRDLERSTERLEREARKVRKLLRDHMVLHEYVNAAGITSRDNKELLKKIEKEIRDLIKEDKERNIELSERLRKLVEELKKKAT

SEQ ID NO: 111 - protein, 174 aa, Artificial Sequence
  Synthetic
SEDETIRRIVRTVHEESRKSTEDVRREVERVLRESEEVVKKVKKKVDDVLKRVEETGISEELEERMRRIIREIREHLKDNLRRVREVIERIERKLEETERRDEKVLREIEKKIRRDHMVLHEYVNAAGITRDTIRENEEIAKEVREIVERSIKNLEEVAEEVERVVRELIEARR

SEQ ID NO: 112 - protein, 174 aa, Artificial Sequence
  Synthetic
SRDEKIRDILRRVLKEVRDSTKKVEEDLEDVHRRTEEELRKVKKRLDEVLKRVRDEGASEELKRRMEEVVRRIEELLKKLLKEDRDVVKEIRDKLDETRKEMEEVAERIKDKIRRDHMVLHEYVNAAGITDRLIDLNRRIAEEVDKIVRDSIKKVEEIVTEVEKIVEKLIRDVR

SEQ ID NO: 113 - protein, 173 aa, Artificial Sequence
  Synthetic
SLEELLEEARKTVERLIRESERVLRESEERVRRLIEELERVVRETRKRVKEVIERVEDEEALKELEKLLREDSKRVKEVLDDLRRDLERNKRRNEKVLRELEELLKRLEELVRERDHMVLHEYVNAAGITRVKEMLKRDEDTLREIERKVKEAVRDSERTLEEIEKRVTEEKT

SEQ ID NO: 114 - protein, 175 aa, Artificial Sequence
  Synthetic
SEKEDLERELEEVRRRVEESLRKNEEDVKRVRDELKKLLDENRKELERIRREVERANVDKRVLDEADRLLKELEDDHKKLEEDAKKALDELREEHKRLEETLRRMLKRIKEVLDRDHMVLHEYVNAAGITLRDIERVSRELNKKLEEIVRRLKKVSDELNRRIEEIAERVRRRRK

SEQ ID NO: 115 - protein, 175 aa, Artificial Sequence
  Synthetic
SEEDELRRLLKEVNERVERLLDEIRKELEKIAEELRDLLKKNEDKLREIKRRVEENRVDEEIKKDAERALTELKEEHERLDREAKKDLDRIRKELERLEEEHRRVSERIEEVLDRDHMVLHEYVNAAGITMERTRRVIEEIKKELRDILEKLRRVSEELNKKLDEILKRIEDRTR

SEQ ID NO: 116 - protein, 174 aa, Artificial Sequence
  Synthetic
DELRDVKRELDRLLRENEEIVERIAETVRRLLEELKKLTKELAEELRKLLEELRKRGVPEKELKEVADTLRKLLKDIERSNKEVEDRLRKLLEEIKESTDRLREELEEVEKLLRRDHMVLHEYVNAAGITRDNKRRMRRVLEEAKRLAKEDKERIDKIRKEIEELIKRLKDKAT

SEQ ID NO: 117 - protein, 174 aa, Artificial Sequence
  Synthetic
REIEEAAKDLDRLLEENKKLVKEVEEELRRLLKENRDLVKESEDRIRKLLEELRRRGVPEEELKEVEERARRVIEESRRSSKELEKRLRELLEELRRSTKELEDRLREIKKLLRRDHMVLHEYVNAAGITRENKEKIRKILEDVKKLSEDNKRRNEELSRRVKTLVDEIKKRAT

SEQ ID NO: 118 - protein, 175 aa, Artificial Sequence
  Synthetic
SEVDEVLREAKRIVDEVHKDNERATEESRRLVKKVHEENEEMVKDIERIVKEVKDANIDEKLVTEILKEIEEALKEAARRNKEVKDRLRELSRRVSERNREILEELKERLDRVRRDHMVLHEYVNAAGITLKRIEESLRRHRKENKRLLEELDRSLRELAKIVKEVLDEIRERTR

SEQ ID NO: 119 - skipped

SEQ ID NO: 120 - protein, 175 aa, Artificial Sequence
  Synthetic
SEMDDVLKKLAETVKRIIERLKKLTDDSRRLVEEVHRRNDKLSKESREAVRKAEERNIDEKDVRKLLEDLKKKSEEVAERNKRILDTLREISKRAEDEVRKVLKELEKTLKELERDHMVLHEYVNAAGITLDEVRKALKRHKDENDKLLKEIEDSLRRHKEENDRLLEKLKESTR

SEQ ID NO: 121 - protein, 172 aa, Artificial Sequence
  Synthetic
SRAETVLKEVTDKIKKLADSSDELLRRNKENIDELKKSSEELLRRLTKAIEEIEKGSVDEETLEELIRRVEAELEAHHRELEKNSREDEKRNRDHHAKLEEEMRRVEERLEREGRDHMVLHEYVNAAGITRRRNEKVNEDVKRMNDKLRRDNEDVIRRVEKLLRELEEKRRT

SEQ ID NO: 122 - protein, 174 aa, Artificial Sequence
  Synthetic
KEVEDAVKELEDLLRANEDKTRSIVEDMRASNKDLEDHSRASEEEVRKLLDDLRRAGVPRDSLKRLAEDVERVTRESRELLERVHRADRELIERLKESNERLRRAIEEIRKAIKRDHMVLHEYVNAAGITEEDAERLDRLRRESEELNERVRRVDKKLLEEIRRKAKKVEDDTR

SEQ ID NO: 123 - protein, 175 aa, Artificial Sequence
  Synthetic
SEADDVLKKLAETVKRIIERLKKLTDDSRRLVEEVHRRNDKLSKESAEAVRKAEERGIDEKDVRKLLEDLKKKSEEVAERNKRILDTLREISKRAEDEVRKVLKELEKTLKELERDHMVLHEYVNAAGITLDEVRKALARHKDENDKLLKEIEDSLRRHKEENDRLLEKLKESTR

SEQ ID NO: 124 - protein, 175 aa, Artificial Sequence
  Synthetic
SEIERVKKRLEELLAEVEESTRRLEERLKRLLEEAKRSSEEVEKELRRLLEAVRRGLSRDEKLVSELEARVKELLEDSRASLEELKKRVRKLAEDSARLLEEVKREVEKLKAKLRDHMVLHEYVNAAGITAKRAHDENERLIREVEELVRAHNKRNKELVDEVKRLVEKVIEEER

SEQ ID NO: 125 - protein, 174 aa, Artificial Sequence
  Synthetic
SRDEKIRDILRRVLKEVRDSTKKVEEDLEDVHRRTEEELRKVKKRLDEVLKRVRDEGASEELKRRMEEVVRRIEELLKKLLKEDRDVVKEIRDKLDETRKEMEEVAERIKDKIRRRDHMVLHEYVNAAGITRLIDLNRRIAEEVDKIVRDSIKKVEEIVTEVEKIVEKLIRDVR

SEQ ID NO: 126 - protein, 175 aa, Artificial Sequence
  Synthetic
SEKEDLERELEEVRRRVEESLRKNEEDVKRVRDELKKLLDENRKELERIRREVERANVDKRVLDEADRLLKELEDDHKKLEEDAKKALDELREEHKRLEETLRRMLKRIKEVLDRRDHMVLHEYVNAAGITRDIERVSRELNKKLEEIVRRLKKVSDELNRRIEEIAERVRRRRK

SEQ ID NO: 127 - protein, 174 aa, Artificial Sequence
  Synthetic
DEEEDLERRIKKLLDENRELLKRIAEELRRLLEELRRLTEESADRLRRLLKELKDRGVPEKDLRDVAEKVKKVLKESEDSNRDVKRKLEKLLRDLERSTERLEREARKVRKLLRDRDHMVLHEYVNAAGITDNKELLKKIEKEIRDLIKEDKERNRELSERLRKLVEELKKKAT

SEQ ID NO: 128 - protein, 175 aa, Artificial Sequence
  Synthetic
SEMDDVLKKLAETVKRIIERLKKLTDDSRRLVEEVHRRNDKLSKESREAVRKAEERNIDEKDVRKLLEDLKKKSEEVAERNKRILDTLREISKRAEDEVRKVLKELEKTLKELEDRDHMVLHEYVNAAGITDEVRKALKRHKDENDKLLKEIEDSLRRHKEENDRLLEKLKESTR

SEQ ID NO: 129 - protein, 174 aa, Artificial Sequence
  Synthetic
SEEEVLREAAKTVEKLLDEIRRSLEKVSKRVEDSNRELKESLDRVRERVRELLEELRKNNVDRTLLEDVRRKLERIEERNEEMNDRSRRKLEELRERNRKILEDIRRTLEDLKRRRDHMVLHEYVNAAGITLVDEVDKENKRALRENEERVKTLNRENEEMLKRIEEEVRRATK

SEQ ID NO: 130 - protein, 174 aa, Artificial Sequence
  Synthetic
SESDEVIRDLARLLDELARHVDDSVRRMDEVVKRSTREADELAKRLDELVKEVEKKPGDERVERMVAEIERLVAEVLEELKKKYEKLKREVEENLRRLEETVRDIVEKARKVTEKRDHMVLHEYVNAAGITILEEAKKKHEDVLRRLEDSLRRVAELLKAALDRLREIVDRLRR

SEQ ID NO: 131 - protein, 172 aa, Artificial Sequence
  Synthetic
SRAETVLKEVTDKIKKLADSSDELLRRNKENIDELKKSSEELLRRLTKAIEEIEKGSVDEETLEELIRRVEAELEAHHRELEKNSREDEKRNRDHHAKLEEEMRRVEERLEREGIRDHMVLHEYVNAAGITRRNEKVNEDVKRMNDKLRRDNEDVIRRVEKLLRELEEKRRT

SEQ ID NO: 132 - protein, 175 aa, Artificial Sequence
  Synthetic
SEADDVLKKLAETVKRIIERLKKLTDDSRRLVEEVHRRNDKLSKESAEAVRKAEERGIDEKDVRKLLEDLKKKSEEVAERNKRILDTLREISKRAEDEVRKVLKELEKTLKELEDRDHMVLHEYVNAAGITDEVRKALARHKDENDKLLKEIEDSLRRHKEENDRLLEKLKESTR

SEQ ID NO: 133 - protein, 174 aa, Artificial Sequence
  Synthetic
KELEDVIEEVKKLLKTVNEESRRVAEEVRKLIREVSEELTEVIRRVERLVEEVAKGVDSEEALDAVRKRIEELVRRVEEVNAASKRRIEELEDELRKVDEESRETIERLIDLLRRRDHMVLHEYVNAAGITKNRKLAEEVLRRVKKIVEENRKIASEVLDDVRKLVEDVLARAS

SEQ ID NO: 134 - protein, 175 aa, Artificial Sequence
  Synthetic
SEIERVKKRLEELLAEVEESTRRLEERLKRLLEEAKRSSEEVEKELRRLLEAVRRGLSRDEKLVSELEARVKELLEDSRASLEELKKRVRKLAEDSARLLEEVKREVEKLKAKLDRDHMVLHEYVNAAGITKRAHDENERLIREVEELVRAHNKRNKELVDEVKRLVEKVIEEER

SEQ ID NO: 135 - protein, 174 aa, Artificial Sequence
  Synthetic
SEDETIRRIVRTVHEESRKSTEDVRREVERVLRESEEVVKKVKKKVDDVLKRVEETGISEELEERMRRIIREIREHLKDNLRRVREVIERIERKLEETERRDEKVLREIEKKIRDGRDHMVLHEYVNAAGITTIRENEEIAKEVREIVERSIKNLEEVAEEVERVVRELIEARR

SEQ ID NO: 136 - protein, 174 aa, Artificial Sequence
  Synthetic
SRDEKIRDILRRVLKEVRDSTKKVEEDLEDVHRRTEEELRKVKKRLDEVLKRVRDEGASEELKRRMEEVVRRIEELLKKLLKEDRDVVKEIRDKLDETRKEMEEVAERIKDKIRRGRDHMVLHEYVNAAGITLIDLNRRIAEEVDKIVRDSIKKVEEIVTEVEKIVEKLIRDVR

SEQ ID NO: 137 - protein, 173 aa, Artificial Sequence
  Synthetic
SLEELLEEARKTVERLIRESERVLRESEERVRRLIEELERVVRETRKRVKEVIERVEDEEALKELEKLLREDSKRVKEVLDDLRRDLERNKRRNEKVLRELEELLKRLEELVREGVRDHMVLHEYVNAAGITKEMLKRDEDTLREIERKVKEAVRDSERTLEEIEKRVTEEKT

SEQ ID NO: 138 - protein, 175 aa, Artificial Sequence
  Synthetic
SEKEDLERELEEVRRRVEESLRKNEEDVKRVRDELKKLLDENRKELERIRREVERANVDKRVLDEADRLLKELEDDHKKLEEDAKKALDELREEHKRLEETLRRMLKRIKEVLDRERDHMVLHEYVNAAGITDIERVSRELNKKLEEIVRRLKKVSDELNRRIEEIAERVRRRRK

SEQ ID NO: 139 - protein, 177 aa, Artificial Sequence
  Synthetic
SAIEKVKEVVERVLETVRDSVRRSHEESKRLIDKVRKRLEEVREEVKELIERVRRKGIPERMVEKLERDLEELLKEIKDTIDRIEEELRTSNRRLKETNDEIAKRLEELLRELSRDRDHMVLHEYVNAAGITIRDLNKKNDDNVRRVKEVIDRAEKLVRDLLREIRKLIEKLIRDTE

SEQ ID NO: 140 - protein, 177 aa, Artificial Sequence
  Synthetic
SVLEEVRRRVEELLKTVKESVDRSHERSERLIEEVRESLKEVKRRVKELVERVREKGIPEDRVKRIEDKLREELERLERENRKIEEDLKRSNDELRRENERIAERLEELLRELSRDRDHMVLHEYVNAAGITIREANERNKRNLEDVERVIRELNKENERVLREVEKKIEKLIRETE

SEQ ID NO: 141 - protein, 174 aa, Artificial Sequence
  Synthetic
DELRDVKRELDRLLRENEEIVERIAETVRRLLEELKKLTKELAEELRKLLEELRKRGVPEKELKEVADTLRKLLKDIERSNKEVEDRLRKLLEEIKESTDRLREELEEVEKLLRGGRDHMVLHEYVNAAGITNKRRMRRVLEEAKRLAKEDKERIDKIRKEIEELIKRLKDKAT

SEQ ID NO: 142 - protein, 174 aa, Artificial Sequence
  Synthetic
REIEEAAKDLDRLLEENKKLVKEVEEELRRLLKENRDLVKESEDRIRKLLEELRRRGVPEEELKEVEERARRVIEESRRSSKELEKRLRELLEELRRSTKELEDRLREIKKLLRNGRDHMVLHEYVNAAGITNKEKIRKILEDVKKLSEDNKRRNEELSRRVKTLVDEIKKRAT

SEQ ID NO: 143 - protein, 177 aa, Artificial Sequence
  Synthetic
SEAEKVVEELKKLLREVEKKIRDHTEDVKRILEELERRLRKHSEEVRRTAKELKDKNSDDDTVRKVKEELDRSHEKLREELRKVAKELKESNEELERDLKRLVEEAEDRLRRLKDRRDHMVLHEYVNAAGITKRTLDKLLRENRETLKRIEDRLRELLEENRKLLEKIERELRERSR

SEQ ID NO: 144 - protein, 177 aa, Artificial Sequence
  Synthetic
DEVEDILRKVEEIVKKSITDARRLLKEAREIVEESIKTAEELLRRNEDIVRKLSEDVKRTTDEEKKKKLEEESRRVLEKTKRDLDRTKDDNRKALEKIRKRVKETEEENREVVDRVRDHMVLHEYVNAAGITVDDSVRVNREVLKRVEEVLEESKRVNEKVEEDVRRVHEEVRKEIK

SEQ ID NO: 145 - protein, 174 aa, Artificial Sequence
  Synthetic
SESDEVIRDLARLLDELARHVDDSVRRMDEVVKRSTREADELAKRLDELVKEVEKKPGDERVERMVAEIERLVAEVLEELKKKYEKLKREVEENLRRLEETVRDIVEKARKVTEKGRDHMVLHEYVNAAGITLEEAKKKHEDVLRRLEDSLRRVAELLKAALDRLREIVDRLRR

SEQ ID NO: 146 - protein, 174 aa, Artificial Sequence
  Synthetic
SESDDVIRKLRELLEELRTHVEKSIRDLRKILEDSTRHAKRSIEELERLLEEVRKKPGDEEVRKTVEEISRRVAENVKRLEDLYRRMEEEVKKNLDRLRKRVEDIIREVEEARKKGRDHMVLHEYVNAAGITLRRAAEAHKKLIDDARESLERAKREHEKLIDRLKKILEELER

SEQ ID NO: 147 - protein, 174 aa, Artificial Sequence
  Synthetic
KEVEDAVKELEDLLRANEDKTRSIVEDMRASNKDLEDHSRASEEEVRKLLDDLRRAGVPRDSLKRLAEDVERVTRESRELLERVHRADRELIERLKESNERLRRAIEEIRKAIKGGRDHMVLHEYVNAAGITDAERLDRLRRESEELNERVRRVDKKLLEEIRRKAKKVEDDTR

SEQ ID NO: 148 - protein, 176 aa, Artificial Sequence
  Synthetic
STAETVEKKVEEVIRENEKSMRESEEKVDRSTKRIEDVLRRLEETIRKTSDDIAKGVKGERVKEVLEENRRLLEEAKKLVDEVLETNKKLLEDDKRLNEEVSKTLKKLLEEIKSVDRDHMVLHEYVNAAGITDEARKLNEETIRRSEELVRRIERVIEEIIKRSEKLLEDVARESK

SEQ ID NO: 149 - protein, 175 aa, Artificial Sequence
  Synthetic
SEADDVLKKLAETVKRIIERLKKLTDDSRRLVEEVHRRNDKLSKESAEAVRKAEERGIDEKDVRKLLEDLKKKSEEVAERNKRILDTLREISKRAEDEVRKVLKELEKTLKELEDRRDHMVLHEYVNAAGITEVRKALARHKDENDKLLKEIEDSLRRHKEENDRLLEKLKESTR

SEQ ID NO: 150 - protein, 174 aa, Artificial Sequence
  Synthetic
KELEDVIEEVKKLLKTVNEESRRVAEEVRKLIREVSEELTEVIRRVERLVEEVAKGVDSEEALDAVRKRIEELVRRVEEVNAASKRRIEELEDELRKVDEESRETIERLIDLLRRGRDHMVLHEYVNAAGITNRKLAEEVLRRVKKIVEENRKIASEVLDDVRKLVEDVLARAS

SEQ ID NO: 151 - protein, 175 aa, Artificial Sequence
  Synthetic
SEIERVKKRLEELLAEVEESTRRLEERLKRLLEEAKRSSEEVEKELRRLLEAVRRGLSRDEKLVSELEARVKELLEDSRASLEELKKRVRKLAEDSARLLEEVKREVEKLKAKLDRRDHMVLHEYVNAAGITRAHDENERLIREVEELVRAHNKRNKELVDEVKRLVEKVIEEER

SEQ ID NO: 152 - protein, 173 aa, Artificial Sequence
  Synthetic
STEDVLRKIKEDVKRVIDDNRRILDEVRRTSKRVLDDLRANLKHIAEEVERVLRGSDSEEVVRELAKILDEIREEHRRLIRTNEKVLEDIERDHRRISEELKRILDEVDELLRGGKRDHMVLHEYVNAAGITKRLAEESLKRLEDLSRDHKRRAKELNDEIAKVVDELAKRAT

SEQ ID NO: 153 - protein, 177 aa, Artificial Sequence
  Synthetic
SEDEDLDRVAEKLAREHKKSVEEIKRVLKSADEESKKLVRDTERVIEEIKREVEEARRGNIDEELVERLKKKIEDILRTLEERHKKLIKELREILKRLSDESRRLAEETEKVLEDLRDHMVLHEYVNAAGITVRRVKEENRKVNEEVEKRLRELEEENKKVIEDLKSTVEELVERLR

SEQ ID NO: 154 - protein, 177 aa, Artificial Sequence; identical to SEQ ID NO: 153
  Synthetic

SEQ ID NO: 155 - protein, 177 aa, Artificial Sequence
  Synthetic
SKEDRLREELKKLLARLAEEIERLKRALEESNKDLKRTIDASEKHLRDVNEDVKRGGVSEELLRELERSTAENKERAKELLKRHEDLVRKVEKELADLLRRLEEIVARVDEALKRGRDHMVLHEYVNAAGITIREIEKRLEELLKRVEKLTEDAKRDLERSNREHKELADRIKETAR

SEQ ID NO: 156 - protein, 178 aa, Artificial Sequence
  Synthetic
DEVEKLLRDLEELDRDIERKVRELLKRNKEVLDDIEREVRRLEKELRRIIKEVADVIRKTTDKRTVDKLLKELEKILKEVLDRVRRLLEEAKESLDRSREEIERLLEESKTLVDEVRRDHMVLHEYVNAAGITRDLIERAKRETDRLLEEAERLMREVVDRVRKILEEAKRLIDEARR

SEQ ID NO: 157 - protein, 174 aa, Artificial Sequence
  Synthetic
SEDETIRRIVRTVHEESRKSTEDVRREVERVLRESEEVVKKVKKKVDDVLKRVEETGISEELEERMRRIIREIREHLKDNLRRVREVIERIERKLEETERRDEKVLREIEKKIRDGDRDHMVLHEYVNAAGITIRENEEIAKEVREIVERSIKNLEEVAEEVERVVRELIEARR

SEQ ID NO: 158 - protein, 174 aa, Artificial Sequence
  Synthetic
SRDEKIRDILRRVLKEVRDSTKKVEEDLEDVHRRTEEELRKVKKRLDEVLKRVRDEGASEELKRRMEEVVRRIEELLKKLLKEDRDVVKEIRDKLDETRKEMEEVAERIKDKIRRGDRDHMVLHEYVNAAGITIDLNRRIAEEVDKIVRDSIKKVEEIVTEVEKIVEKLIRDVR

SEQ ID NO: 159 - protein, 170 aa, Artificial Sequence
  Synthetic
SEVEDVVRKVEKLVRDLIKHVEENVRRVEEVVRKLIEEIKRIAEEITRIAEELAKEPGSEDLLRKLEKVLKEIDDKLKELEDRLRDMVRRSRESSEENERRLKRVEDEVRRNGISEERDHMVLHEYVNAAGITRESREVTRRVLEEAKEMLERVKKIVKEVIEKVRRVVK

SEQ ID NO: 160 - protein, 178 aa, Artificial Sequence
  Synthetic
DDLERVLKEIKKAADKIREDNKRTADKIRKRVKELDDETRDMLRRIRKLVKEIKERVRGREEARKVIEELKKLVDEVRKRNEKSIEELKKLLKEDRDLMRRVIEELEDLVRRLREEVRDHMVLHEYVNAAGITIRDLRRVLKETSDRVRELIDKHRRLSEEVEKDVKRLIDELKKKTD

SEQ ID NO: 161 - protein, 175 aa, Artificial Sequence
  Synthetic
SEKEDLERELEEVRRRVEESLRKNEEDVKRVRDELKKLLDENRKELERIRREVERANVDKRVLDEADRLLKELEDDHKKLEEDAKKALDELREEHKRLEETLRRMLKRIKEVLDRESRDHMVLHEYVNAAGITIERVSRELNKKLEEIVRRLKKVSDELNRRIEEIAERVRRRRK

SEQ ID NO: 162 - protein, 175 aa, Artificial Sequence
  Synthetic
SEEDELRRLLKEVNERVERLLDEIRKELEKIAEELRDLLKKNEDKLREIKRRVEENRVDEEIKKDAERALTELKEEHERLDREAKKDLDRIRKELERLEEEHRRVSERIEEVLDKESRDHMVLHEYVNAAGITTRRVIEEIKKELRDILEKLRRVSEELNKKLDEILKRIEDRTR

SEQ ID NO: 163 - protein, 178 aa, Artificial Sequence
  Synthetic
SSIERVEKEVRRLLRESDESLKRVMEEAKELIKSVRESTKRVEEDARDLLRKVVERTGDEREDLRRVLEELRKLIEDNRREDKRSEDELRKLIRDNKEENDRARREAEKLLEDLSRGRDHMVLHEYVNAAGITIEKLKEDDKRSLERIERIVRRNNELNKESVDRIRKIIKEMEERAD

SEQ ID NO: 164 - protein, 177 aa, Artificial Sequence
  Synthetic
SVIERVEEEMEKVIRDSERVTKEVEDRAREVHERSEKRIREVEETSRRVLEELRRAGVDKRILDELRKRIKDSREDLERINEELRRALRKLLEDSKRINEELRKTLEELRKRLERVDRDHMVLHEYVNAAGITEDSIRKLEELARRVDELVRESIERVDRNVEENKRLVREAIERRR

SEQ ID NO: 165 - protein, 177 aa, Artificial Sequence
  Synthetic
SEAEKVVEELKKLLREVEKKIRDHTEDVKRILEELERRLRKHSEEVRRTAKELKDKNSDDDTVRKVKEELDRSHEKLREELRKVAKELKESNEELERDLKRLVEEAEDRLRRLKDRVRDHMVLHEYVNAAGITRTLDKLLRENRETLKRIEDRLRELLEENRKLLEKIERELRERSR

SEQ ID NO: 166 - protein, 174 aa, Artificial Sequence
  Synthetic
EELERILDKVRKVIEEVRKRLRDDLRTVEKVLKETEEVLRRAAERAKRALERVEEAARRGRDRREIKEELKKVLDDLRELLRALEEKNRRVNKENEDSLRKIEEDLRDVLRKLEEEIRDHMVLHEYVNAAGITREEVERVLRKSNELSTRIKKRIDDVLETLERLLKELDDKLR

SEQ ID NO: 167 - protein, 178 aa, Artificial Sequence
  Synthetic
SKVEKLEEEIARLVERSRRLVEELKKEVTKVKEKVDEIVERSRRHVKKVVEKLRDIKRRGGSEEVLRRVTEELKKVLEDNRRVIEEVLRDLERILEELKRKAEEVTKRNRDDLKRLRRDHMVLHEYVNAAGITDRSEKELRTVLRDVTEDIKRIAEELKKALEDSTEIIRRAEDELRT

SEQ ID NO: 168 - protein, 177 aa, Artificial Sequence
  Synthetic
DEVEDILRKVEEIVKKSITDARRLLKEAREIVEESIKTAEELLRRNEDIVRKLSEDVKRTTDEEKKKKLEEESRRVLEKTKRDLDRTKDDNRKALEKIRKRVKETEEENREVVDRVRRDHMVLHEYVNAAGITDDSVRVNREVLKRVEEVLEESKRVNEKVEEDVRRVHEEVRKEIK

SEQ ID NO: 169 - protein, 175 aa, Artificial Sequence
  Synthetic
SEVDEVLREAKRIVDEVHKDNERATEESRRLVKKVHEENEEMVKDIERIVKEVKDANIDEKLVTEILKEIEEALKEAARRNKEVKDRLRELSRRVSERNREILEELKERLDRVRERRRDHMVLHEYVNAAGITIEESLRRHRKENKRLLEELDRSLRELAKIVKEVLDEIRERTR

SEQ ID NO: 170 - protein, 175 aa, Artificial Sequence
  Synthetic
SEMDDVLKKLAETVKRIIERLKKLTDDSRRLVEEVHRRNDKLSKESREAVRKAEERNIDEKDVRKLLEDLKKKSEEVAERNKRILDTLREISKRAEDEVRKVLKELEKTLKELEDRRRDHMVLHEYVNAAGITVRKALKRHKDENDKLLKEIEDSLRRHKEENDRLLEKLKESTR

SEQ ID NO: 171 - protein, 178 aa, Artificial Sequence
  Synthetic
SEEEKLKEVKDRIREVLRKLEEHTDKVKKEVEKVLRDIRRTTDELKKEVRAMLERLRRKKKDAEDLLRELEKIIEEIERELDRVLEENDKMAEEWKKLLDKVLDDNRKSIRDIEKELRDHMVLHEYVNAAGITLRDDEETNRDVVKKVREAVKKDADTNRKVIEEVKKVLEDAARRLD

SEQ ID NO: 172 - protein, 176 aa, Artificial Sequence
  Synthetic
REAEEAKEEVEELNRRNKKELDDARRRVDELDKRNKDRLKESSDRVKRLVEELERVKEEGRSDDRLREKIERMLKTSADELERLKEENKRALRDLAERLRELIERNRRKLEEITRRTRDHMVLHEYVNAAGITSIRELERVLEELAEKIDRSLKELDDVLRKNETDLKRVIEDLKR

SEQ ID NO: 173 - protein, 174 aa, Artificial Sequence
  Synthetic
SEEEVLREAAKTVEKLLDEIRRSLEKVSKRVEDSNRELKESLDRVRERVRELLEELRKNNVDRTLLEDVRRKLERIEERNEEMNDRSRRKLEELRERNRKILEDIRRTLEDLKRRQLRDHMVLHEYVNAAGITDEVDKENKRALRENEERVKTLNRENEEMLKRIEEEVRRATK

SEQ ID NO: 174 - protein, 178 aa, Artificial Sequence
  Synthetic
DAEELVRELEERIKRSHERLEELLREVKRLIERSHEELKRLNEEVLRELDRVLDEVAKRGSDSEELLRELEERVARIKERSKESYARSKESLDRAKEVLEELYRASKRSLEEFERELRDHMVLHEYVNAAGITVKENAELAERVFREVEKIVRENTKLAEDSVRELKRLVEELKKRAK

SEQ ID NO: 175 - protein, 174 aa, Artificial Sequence
  Synthetic
SESDEVIRDLARLLDELARHVDDSVRRMDEVVKRSTREADELAKRLDELVKEVEKKPGDERVERMVAEIERLVAEVLEELKKKYEKLKREVEENLRRLEETVRDIVEKARKVTEKGVRDHMVLHEYVNAAGITEEAKKKHEDVLRRLEDSLRRVAELLKAALDRLREIVDRLRR

SEQ ID NO: 176 - protein, 174 aa, Artificial Sequence
  Synthetic
SESDDVIRKLRELLEELRTHVEKSIRDLRKILEDSTRHAKRSIEELERLLEEVRKKPGDEEVRKTVEEISRRVAENVKRLEDLYRRMEEEVKKNLDRLRKRVEDIIREVEEARKKGVRDHMVLHEYVNAAGITRRAAEAHKKLIDDARESLERAKREHEKLIDRLKKILEELER

SEQ ID NO: 177 - protein, 172 aa, Artificial Sequence
  Synthetic
SRAETVLKEVTDKIKKLADSSDELLRRNKENIDELKKSSEELLRRLTKAIEEIEKGSVDEETLEELIRRVEAELEAHHRELEKNSREDEKRNRDHHAKLEEEMRRVEERLEREGIDDRDHMVLHEYVNAAGITNEKVNEDVKRMNDKLRRDNEDVIRRVEKLLRELEEKRRT

SEQ ID NO: 178 - protein, 178 aa, Artificial Sequence
  Synthetic
SEAEKAKETIDRLADRVRKLLEEIKRSLDDSRRKSKETVEENEKTLDRMRKEVDAAKRGSVSEEELERLIRKLKKTLDELRRRHEKLVEDLRRNLERIKRRLEELTREMRETLERLARDHMVLHEYVNAAGITRRLTKELEDVLREYERELRRLEEENKRVIDKTEEEIRRLADRLRR

SEQ ID NO: 179 - protein, 178 aa, Artificial Sequence
  Synthetic
DEARELVKELEDLIREITKTVRRLLEESEELIKRIDDAVDDLRRADEDLNREIKEEIEKGKSKESLEALIERLKESLERVKRTIEKLIRDLERLNEKLRRDVESLVAELEKILSKIKRDHMVLHEYVNAAGITKELEKEAREILKRSEDETDKLREKAERILEDLERANRRTMDEARR

SEQ ID NO: 180 - protein, 175 aa, Artificial Sequence
  Synthetic
SEADDVLKKLAETVKRIIERLKKLTDDSRRLVEEVHRRNDKLSKESAEAVRKAEERGIDEKDVRKLLEDLKKKSEEVAERNKRILDTLREISKRAEDEVRKVLKELEKTLKELEDRRRDHMVLHEYVNAAGITVRKALARHKDENDKLLKEIEDSLRRHKEENDRLLEKLKESTR

SEQ ID NO: 181 - protein, 175 aa, Artificial Sequence
  Synthetic
SEAEEIRRRLEEISRRSVEHLRKVLEEIKRISERSKRHLDRVLEENARRLEELAELLKRGGDKEELLADLKAVHDESRKVIEKNAEENDRALKAAKEVIDENRERNKRVLDEVRKGGRDHMVLHEYVNAAGITEERIKRIEEEIKKIIDKSREDIKRVLEEIERLNAKAADDLRK

SEQ ID NO: 182 - protein, 175 aa, Artificial Sequence
  Synthetic
SEIERVKKRLEELLAEVEESTRRLEERLKRLLEEAKRSSEEVEKELRRLLEAVRRGLSRDEKLVSELEARVKELLEDSRASLEELKKRVRKLAEDSARLLEEVKREVEKLKAKLDRGRDHMVLHEYVNAAGITAHDENERLIREVEELVRAHNKRNKELVDEVKRLVEKVIEEER

SEQ ID NO: 183 - protein, 177 aa, Artificial Sequence
  Synthetic
SEDEDLDRVAEKLAREHKKSVEEIKRVLKSADEESKKLVRDTERVIEEIKREVEEARRGNIDEELVERLKKKIEDILRTLEERHKKLIKELREILKRLSDESRRLAEETEKVLEDLERDHMVLHEYVNAAGITRRVKEENRKVNEEVEKRLRELEEENKKVIEDLKSTVEELVERLR

SEQ ID NO: 184 - protein, 177 aa, Artificial Sequence
  Synthetic
SKEDRLREELKKLLARLAEEIERLKRALEESNKDLKRTIDASEKHLRDVNEDVKRGGVSEELLRELERSTAENKERAKELLKRHEDLVRKVEKELADLLRRLEEIVARVDEALKRGIRDHMVLHEYVNAAGITREIEKRLEELLKRVEKLTEDAKRDLERSNREHKELADRIKETAR

SEQ ID NO: 185 - protein, 174 aa, Artificial Sequence
  Synthetic
SEDETIRRIVRTVHEESRKSTEDVRREVERVLRESEEVVKKVKKKVDDVLKRVEETGISEELEERMRRIIREIREHLKDNLRRVREVIERIERKLEETERRDEKVLREIEKKIRDGDGRDHMVLHEYVNAAGITRENEEIAKEVREIVERSIKNLEEVAEEVERVVRELIEARR

SEQ ID NO: 186 - skipped

SEQ ID NO: 187 - protein, 178 aa, Artificial Sequence
  Synthetic
DDLERVLKEIKKAADKIREDNKRTADKIRKRVKELDDETRDMLRRIRKLVKEIKERVRGREEARKVIEELKKLVDEVRKRNEKSIEELKKLLKEDRDLMRRVIEELEDLVRRLREEVRRDHMVLHEYVNAAGITRDLRRVLKETSDRVRELIDKHRRLSEEVEKDVKRLIDELKKKTD

SEQ ID NO: 188 - protein, 175 aa, Artificial Sequence
  Synthetic
SEKEDLERELEEVRRRVEESLRKNEEDVKRVRDELKKLLDENRKELERIRREVERANVDKRVLDEADRLLKELEDDHKKLEEDAKKALDELREEHKRLEETLRRMLKRIKEVLDRESDRDHMVLHEYVNAAGITERVSRELNKKLEEIVRRLKKVSDELNRRIEEIAERVRRRRK

SEQ ID NO: 189 - protein, 175 aa, Artificial Sequence
  Synthetic
SEEDELRRLLKEVNERVERLLDEIRKELEKIAEELRDLLKKNEDKLREIKRRVEENRVDEEIKKDAERALTELKEEHERLDREAKKDLDRIRKELERLEEEHRRVSERIEEVLDKESDRDHMVLHEYVNAAGITRRVIEEIKKELRDILEKLRRVSEELNKKLDEILKRIEDRTR

SEQ ID NO: 190 - protein, 174 aa, Artificial Sequence
  Synthetic
DELRDVKRELDRLLRENEEIVERIAETVRRLLEELKKLTKELAEELRKLLEELRKRGVPEKELKEVADTLRKLLKDIERSNKEVEDRLRKLLEEIKESTDRLREELEEVEKLLRGGKDRDHMVLHEYVNAAGITRRMRRVLEEAKRLAKEDKERIDKIRKEIEELIKRLKDKAT

SEQ ID NO: 191 - skipped

SEQ ID NO: 192 - protein, 178 aa, Artificial Sequence
  Synthetic
SSKDEIRRRVEEVVERSDEIVKRSREHVKTVVDELDRVVKELERKVREVVKKLDKIRKDGGSEETLKRVLDELREILKELKEEVKKVKRKLEKVVKENRDTIREVEERNRKILDELRKRDHMVLHEYVNAAGITKSEEKLRRVLKESEDIAKEAEDRLKTVLERVERIADEVLKRLTK

SEQ ID NO: 193 - protein, 178 aa, Artificial Sequence
  Synthetic
SKVEKLEEEIARLVERSRRLVEELKKEVTKVKEKVDEIVERSRRHVKKVVEKLRDIKRRGGSEEVLRRVTEELKKVLEDNRRVIEEVLRDLERILEELKRKAEEVTKRNRDDLKRLRDRDHMVLHEYVNAAGITRSEKELRTVLRDVTEDIKRIAEELKKALEDSTEIIRRAEDELRT

SEQ ID NO: 194 - protein, 175 aa, Artificial Sequence
  Synthetic
SEVDEVLREAKRIVDEVHKDNERATEESRRLVKKVHEENEEMVKDIERIVKEVKDANIDEKLVTEILKEIEEALKEAARRNKEVKDRLRELSRRVSERNREILEELKERLDRVRERRKRDHMVLHEYVNAAGITEESLRRHRKENKRLLEELDRSLRELAKIVKEVLDEIRERTR

SEQ ID NO: 195 - protein, 175 aa, Artificial Sequence
  Synthetic
SEMDDVLKKLAETVKRIIERLKKLTDDSRRLVEEVHRRNDKLSKESREAVRKAEERNIDEKDVRKLLEDLKKKSEEVAERNKRILDTLREISKRAEDEVRKVLKELEKTLKELEDRRPRDHMVLHEYVNAAGITRKALKRHKDENDKLLKEIEDSLRRHKEENDRLLEKLKESTR

SEQ ID NO: 196 - protein, 178 aa, Artificial Sequence
  Synthetic
SEEEKLKEVKDRIREVLRKLEEHTDKVKKEVEKVLRDIRRTTDELKKEVRAMLERLRRKKKDAEDLLRELEKIIEEIERELDRVLEENDKMAEEWKKLLDKVLDDNRKSIRDIEKELDRDHMVLHEYVNAAGITRDDEETNRDVVKKVREAVKKDADTNRKVIEEVKKVLEDAARRLD

SEQ ID NO: 197 - protein, 178 aa, Artificial Sequence
  Synthetic
KAAEEIRKKVEDYKRESEKILEEVEDHSRRSKETLKRLLDDLRRAVEELKRRLEELKRRPRTEEIAKRAEEAVRRAAERIKKVIDDVERHIRENAKELKRLLEEDREASRRLEDEIDKRDHMVLHEYVNAAGITRANEESERVLRELAERNKTALEEAERVLRRLKEEIEKVLRKLKK

SEQ ID NO: 198 - protein, 176 aa, Artificial Sequence
  Synthetic
REAEEAKEEVEELNRRNKKELDDARRRVDELDKRNKDRLKESSDRVKRLVEELERVKEEGRSDDRLREKIERMLKTSADELERLKEENKRALRDLAERLRELIERNRRKLEEITRRTVRDHMVLHEYVNAAGITIRELERVLEELAEKIDRSLKELDDVLRKNETDLKRVIEDLKR

SEQ ID NO: 199 - protein, 174 aa, Artificial Sequence
  Synthetic
SEEEVLREAAKTVEKLLDEIRRSLEKVSKRVEDSNRELKESLDRVRERVRELLEELRKNNVDRTLLEDVRRKLERIEERNEEMNDRSRRKLEELRERNRKILEDIRRTLEDLKRRQLPRDHMVLHEYVNAAGITEVDKENKRALRENEERVKTLNRENEEMLKRIEEEVRRATK

SEQ ID NO: 200 - skipped

SEQ ID NO: 201 - protein, 179 aa, Artificial Sequence
  Synthetic
RLEDEVRKMEKEVREEVKRLEDESRKVLEESRRNLDKLREESKRVLDTVRERIKDLRRRGLDERVLRELLKRVREVHERNRKLLDEVRRASEKVHEDNRRILEEVRKTVKDVVDKLRRRDHMVLHEYVNAAGITLEDVEREVKKSIEEVKEINRRLNEEVKKTIEEVKEIVKEVTERAK

SEQ ID NO: 202 - protein, 178 aa, Artificial Sequence
  Synthetic
SEAEKAKETIDRLADRVRKLLEEIKRSLDDSRRKSKETVEENEKTLDRMRKEVDAAKRGSVSEEELERLIRKLKKTLDELRRRHEKLVEDLRRNLERIKRRLEELTREMRETLERLARRDHMVLHEYVNAAGITRLTKELEDVLREYERELRRLEEENKRVIDKTEEEIRRLADRLRR

SEQ ID NO: 203 - protein, 179 aa, Artificial Sequence
  Synthetic
SEVEELIKRLAKVLKELVDKVRKVIEDTKELLERLKRRSEDHIRKLREVLKEAKDQPIDDEELKEILDRLRKTLEELEEELKKALEDDREEAKRLVDDARRVLKELEEEVREIRERRGRDHMVLHEYVNAAGITEEKIREVIKEWERVHREVEELLKRLIDENRKVLDEIRKLLEEKSK

SEQ ID NO: 204 - protein, 178 aa, Artificial Sequence
  Synthetic
DEARELVKELEDLIREITKTVRRLLEESEELIKRIDDAVDDLRRADEDLNREIKEEIEKGKSKESLEALIERLKESLERVKRTIEKLIRDLERLNEKLRRDVESLVAELEKILSKIKRRDHMVLHEYVNAAGITELEKEAREILKRSEDETDKLREKAERILEDLERANRRTMDEARR

SEQ ID NO: 205 - protein, 175 aa, Artificial Sequence
  Synthetic
SEADDVLKKLAETVKRIIERLKKLTDDSRRLVEEVHRRNDKLSKESAEAVRKAEERGIDEKDVRKLLEDLKKKSEEVAERNKRILDTLREISKRAEDEVRKVLKELEKTLKELEDRRPRDHMVLHEYVNAAGITRKALARHKDENDKLLKEIEDSLRRHKEENDRLLEKLKESTR

SEQ ID NO: 206 - protein, 177 aa, Artificial Sequence
  Synthetic
SEDEDLDRVAEKLAREHKKSVEEIKRVLKSADEESKKLVRDTERVIEEIKREVEEARRGNIDEELVERLKKKIEDILRTLEERHKKLIKELREILKRLSDESRRLAEETEKVLEDLERRDHMVLHEYVNAAGITRVKEENRKVNEEVEKRLRELEEENKKVIEDLKSTVEELVERLR

SEQ ID NO: 207 - protein, 177 aa, Artificial Sequence
  Synthetic
ELREDVERVVDEIRRLVEENVRRIDEVAKDIKRLADDNVRRVKELVRKIEEDIRRLKEEGVTEVVDELREEVRKLSEDNRRHSRELIERVKKLLKELEEHSRDLKRRVKELLEDLKRKGRDHMVLHEYVNAAGITERKSRDALRRLEEAIRRVRRESERVNRELDEVIKRVTEELKK

SEQ ID NO: 208 - protein, 174 aa, Artificial Sequence
  Synthetic
SELEKVVKEVADLLRRNLEKSKRVLEEVRRRLEENLRESEKVHDDNRKTARRILELVREGKDKRDLTRLLEEDDKRVKEALDKSRENNERILKEVRRALRESEEDNRRILKEVREKVDSRDHMVLHEYVNAAGITSRRFIEELEKIVEETLTESEKLARASSEITKTVLDEIRK

SEQ ID NO: 209 - protein, 175 aa, Artificial Sequence
  Synthetic
SEKEDLERELEEVRRRVEESLRKNEEDVKRVRDELKKLLDENRKELERIRREVERANVDKRVLDEADRLLKELEDDHKKLEEDAKKALDELREEHKRLEETLRRMLKRIKEVLDRESDKRDHMVLHEYVNAAGITRVSRELNKKLEEIVRRLKKVSDELNRRIEEIAERVRRRRK

SEQ ID NO: 210 - protein, 175 aa, Artificial Sequence
  Synthetic
SEEDELRRLLKEVNERVERLLDEIRKELEKIAEELRDLLKKNEDKLREIKRRVEENRVDEEIKKDAERALTELKEEHERLDREAKKDLDRIRKELERLEEEHRRVSERIEEVLDKESDKRDHMVLHEYVNAAGITRVIEEIKKELRDILEKLRRVSEELNKKLDEILKRIEDRTR

SEQ ID NO: 211 - protein, 177 aa, Artificial Sequence
  Synthetic
SAIEKVKEVVERVLETVRDSVRRSHEESKRLIDKVRKRLEEVREEVKELIERVRRKGIPERMVEKLERDLEELLKEIKDTIDRIEEELRTSNRRLKETNDEIAKRLEELLRELSRDRDKRDHMVLHEYVNAAGITLNKKNDDNVRRVKEVIDRAEKLVRDLLREIRKLIEKLIRDTE

SEQ ID NO: 212 - protein, 179 aa, Artificial Sequence
  Synthetic
SSKEVADELRKKAEKVLDELRKIIRELERKNEDSLRRTEEIVRRLEEEAERVLRDLVRTRGEDDRLVREVERLLRELKRRLEELIRRSEELIKRSREEVDRVIRTVEKLLEELDRLLRARDHMVLHEYVNAAGITEEIKDLARKLAKSSDDTVREDEKLVEELRKDVKRIVRKIKKDLE

SEQ ID NO: 213 - protein, 174 aa, Artificial Sequence
  Synthetic
DELRDVKRELDRLLRENEEIVERIAETVRRLLEELKKLTKELAEELRKLLEELRKRGVPEKELKEVADTLRKLLKDIERSNKEVEDRLRKLLEEIKESTDRLREELEEVEKLLRGGKDVRDHMVLHEYVNAAGITRMRRVLEEAKRLAKEDKERIDKIRKEIEELIKRLKDKAT

SEQ ID NO: 214 - protein, 174 aa, Artificial Sequence
  Synthetic
DEEEDLERRIKKLLDENRELLKRIAEELRRLLEELRRLTEESADRLRRLLKELKDRGVPEKDLRDVAEKVKKVLKESEDSNRDVKRKLEKLLRDLERSTERLEREARKVRKLLRDGKDIRDHMVLHEYVNAAGITLLKKIEKEIRDLIKEDKERNRELSERLRKLVEELKKKAT

SEQ ID NO: 215 - protein, 178 aa, Artificial Sequence
  Synthetic
SSKDEIRRRVEEVVERSDEIVKRSREHVKTVVDELDRVVKELERKVREVVKKLDKIRKDGGSEETLKRVLDELREILKELKEEVKKVKRKLEKVVKENRDTIREVEERNRKILDELRKRRDHMVLHEYVNAAGITSEEKLRRVLKESEDIAKEAEDRLKTVLERVERIADEVLKRLTK

SEQ ID NO: 216 - protein, 178 aa, Artificial Sequence
  Synthetic
SKVEKLEEEIARLVERSRRLVEELKKEVTKVKEKVDEIVERSRRHVKKVVEKLRDIKRRGGSEEVLRRVTEELKKVLEDNRRVIEEVLRDLERILEELKRKAEEVTKRNRDDLKRLRDSRDHMVLHEYVNAAGITSEKELRTVLRDVTEDIKRIAEELKKALEDSTEIIRRAEDELRT

SEQ ID NO: 217 - protein, 175 aa, Artificial Sequence
  Synthetic
SEVDEVLREAKRIVDEVHKDNERATEESRRLVKKVHEENEEMVKDIERIVKEVKDANIDEKLVTEILKEIEEALKEAARRNKEVKDRLRELSRRVSERNREILEELKERLDRVRERRKDRDHMVLHEYVNAAGITESLRRHRKENKRLLEELDRSLRELAKIVKEVLDEIRERTR

SEQ ID NO: 218 - protein, 175 aa, Artificial Sequence
  Synthetic
SEMDDVLKKLAETVKRIIERLKKLTDDSRRLVEEVHRRNDKLSKESREAVRKAEERNIDEKDVRKLLEDLKKKSEEVAERNKRILDTLREISKRAEDEVRKVLKELEKTLKELEDRRPDRDHMVLHEYVNAAGITKALKRHKDENDKLLKEIEDSLRRHKEENDRLLEKLKESTR

SEQ ID NO: 219 - protein, 178 aa, Artificial Sequence
  Synthetic
SEEEKLKEVKDRIREVLRKLEEHTDKVKKEVEKVLRDIRRTTDELKKEVRAMLERLRRKKKDAEDLLRELEKIIEEIERELDRVLEENDKMAEEWKKLLDKVLDDNRKSIRDIEKELDDRDHMVLHEYVNAAGITDDEETNRDVVKKVREAVKKDADTNRKVIEEVKKVLEDAARRLD

SEQ ID NO: 220 - protein, 179 aa, Artificial Sequence
  Synthetic
RLEDEVRKMEKEVREEVKRLEDESRKVLEESRRNLDKLREESKRVLDTVRERIKDLRRRGLDERVLRELLKRVREVHERNRKLLDEVRRASEKVHEDNRRILEEVRKTVKDVVDKLRRVRDHMVLHEYVNAAGITEDVEREVKKSIEEVKEINRRLNEEVKKTIEEVKEIVKEVTERAK

SEQ ID NO: 221 - protein, 174 aa, Artificial Sequence
  Synthetic
SESDEVIRDLARLLDELARHVDDSVRRMDEVVKRSTREADELAKRLDELVKEVEKKPGDERVERMVAEIERLVAEVLEELKKKYEKLKREVEENLRRLEETVRDIVEKARKVTEKGVSKRDHMVLHEYVNAAGITAKKKHEDVLRRLEDSLRRVAELLKAALDRLREIVDRLRR

SEQ ID NO: 222 - protein, 179 aa, Artificial Sequence
  Synthetic
SEVEELIKRLAKVLKELVDKVRKVIEDTKELLERLKRRSEDHIRKLREVLKEAKDQPIDDEELKEILDRLRKTLEELEEELKKALEDDREEAKRLVDDARRVLKELEEEVREIRERRGERDHMVLHEYVNAAGITEKIREVIKEWERVHREVEELLKRLIDENRKVLDEIRKLLEEKSK

SEQ ID NO: 223 - protein, 178 aa, Artificial Sequence
  Synthetic
DDAERILREMERLLEENKEISDEIAKELKRLLDENRKLSEDVVKALEDLLRDLERRSGVSEEVLKRVREVLERIKRELDRSDDELRKVAERILRDAERSNDELRKVIEEIEEELRGSRDRDHMVLHEYVNAAGITENKERLKELLRELKKLSDENKERIKKLLSDAEKIIEDVARRAK

SEQ ID NO: 224 - protein, 178 aa, Artificial Sequence
  Synthetic
DEARELVKELEDLIREITKTVRRLLEESEELIKRIDDAVDDLRRADEDLNREIKEEIEKGKSKESLEALIERLKESLERVKRTIEKLIRDLERLNEKLRRDVESLVAELEKILSKIKRGRDHMVLHEYVNAAGITLEKEAREILKRSEDETDKLREKAERILEDLERANRRTMDEARR

SEQ ID NO: 225 - protein, 180 aa, Artificial Sequence
  Synthetic
REVEEMIKELEELLKDLKEKNERASKRNRELVRRLEEENKRVIEELKKLVKELEDLVRSGEDEEVLREVLKRLEEVLERVRALNERVLEAIEKSLEEVKASNEAVKRRLKELLEEAERGRDHMVLHEYVNAAGITAKRIDELDEYTRESIRRAKKEIERLNRETKKVIEEVVKRIEEERK

SEQ ID NO: 226 - protein, 178 aa, Artificial Sequence
  Synthetic
SDAEELLKRVADLLKASLESLEKILRDSKELMDRWRKKLEDLLRESEELVDRAEKILRRGGSDKEVLDKIAEEVRRTNDDSRRLDEELHRLSRDTLRKLEENLRRTEKEVREMDKRAAERDHMVLHEYVNAAGITRVEEEHRKVLETDKKILKEAHKESKEVNDRDRELLERLEESVR

SEQ ID NO: 227 - protein, 175 aa, Artificial Sequence
  Synthetic
SEIERVKKRLEELLAEVEESTRRLEERLKRLLEEAKRSSEEVEKELRRLLEAVRRGLSRDEKLVSELEARVKELLEDSRASLEELKKRVRKLAEDSARLLEEVKREVEKLKAKLDRGGDRDHMVLHEYVNAAGITDENERLIREVEELVRAHNKRNKELVDEVKRLVEKVIEEER

SEQ ID NO: 228 - protein, 180 aa, Artificial Sequence
  Synthetic
SAEELLREVAELVKRVDEDLRRLLEEVRASNEEVIRRLEEILKRIEEENRKVVEELRRGGVSEDLVRESKRLVDESRRVIEKLVKESADSVERTRETVDRLREELKRLVEEIAKMVKGGRDHMVLHEYVNAAGITLERLKRTIEELLKRNRDLLADAEEKARRLLEENRKLLKAARDTAT

SEQ ID NO: 229 - protein, 177 aa, Artificial Sequence
  Synthetic
SEDEDLDRVAEKLAREHKKSVEEIKRVLKSADEESKKLVRDTERVIEEIKREVEEARRGNIDEELVERLKKKIEDILRTLEERHKKLIKELREILKRLSDESRRLAEETEKVLEDLERKRDHMVLHEYVNAAGITVKEENRKVNEEVEKRLRELEEENKKVIEDLKSTVEELVERLR

SEQ ID NO: 230 - protein, 181 aa, Artificial Sequence
  Synthetic
SEVERVLEDLRRLVRDVEEKLRRIIERDRRLVEEVERENRKTIRKIEELLRKVLEELKDISDKKTIERIVREIIKEARDLVRRNHERNREIVDESRRLVEELRRIVEEIIRRLRELLERVRDHMVLHEYVNAAGITEKRLRELLKELEKTSRDLKKRLEELDRELKALVEKVERDLEELRK

SEQ ID NO: 231 - protein, 177 aa, Artificial Sequence
  Synthetic
KEEEDLEREVKRLEDKVREDAKKLEEVVKTVEKLVRDDARRNEEVVKEVADRVRRLTERKLDEETLRKVKEDLKRTLERLKRENEKSLEELRDILRRLKKENDDTLKELRDELKRLTDSGRDHMVLHEYVNAAGITEEVSREVEKRLRRIIRELERVSKEVLDRLREIIEKLDRDAT

SEQ ID NO: 232 - protein, 174 aa, Artificial Sequence
  Synthetic
SEDETIRRIVRTVHEESRKSTEDVRREVERVLRESEEVVKKVKKKVDDVLKRVEETGISEELEERMRRIIREIREHLKDNLRRVREVIERIERKLEETERRDEKVLREIEKKIRDGDGRERDHMVLHEYVNAAGITNEEIAKEVREIVERSIKNLEEVAEEVERVVRELIEARR

SEQ ID NO: 233 - protein, 174 aa, Artificial Sequence
  Synthetic
SRDEKIRDILRRVLKEVRDSTKKVEEDLEDVHRRTEEELRKVKKRLDEVLKRVRDEGASEELKRRMEEVVRRIEELLKKLLKEDRDVVKEIRDKLDETRKEMEEVAERIKDKIRRGDGRERDHMVLHEYVNAAGITNRRIAEEVDKIVRDSIKKVEEIVTEVEKIVEKLIRDVR

SEQ ID NO: 234 - protein, 181 aa, Artificial Sequence
  Synthetic
DEERKLEKSLKDVEDTHRRLLEKNDEDLKELRKRVEDMLRRLEDALRRILEDIEEKLKRIEDDETLKRLRKRVKELLDEIRRRLERLEREVDKRLEEIKERNDRHHEEAKKELKRIRDKIRDHMVLHEYVNAAGITLRKVAEDLKRSNDEVKELAERLEETIRDLLRRIEEILKEIEERVR

SEQ ID NO: 235 - protein, 181 aa, Artificial Sequence
  Synthetic
DEEETLEDVLRELEERVEKLLRDLTRDLERVEKEHKELLKRNKEAIDEIEKRIEELLKRIEDDEKLRRLKEEVRKLVEESRERNKRHHKEVREVLERIRELLERLEKELRRALEEIRDKIRDHMVLHEYVNAAGITLRRAEEVIRDLERKVRKLERDIRENIKKNHREVREILRKIEEDVR

SEQ ID NO: 236 - protein, 175 aa, Artificial Sequence
  Synthetic
SEKEDLERELEEVRRRVEESLRKNEEDVKRVRDELKKLLDENRKELERIRREVERANVDKRVLDEADRLLKELEDDHKKLEEDAKKALDELREEHKRLEETLRRMLKRIKEVLDRESDKMRDHMVLHEYVNAAGITVSRELNKKLEEIVRRLKKVSDELNRRIEEIAERVRRRRK

SEQ ID NO: 237 - protein, 177 aa, Artificial Sequence
  Synthetic
SAIEKVKEVVERVLETVRDSVRRSHEESKRLIDKVRKRLEEVREEVKELIERVRRKGIPERMVEKLERDLEELLKEIKDTIDRIEEELRTSNRRLKETNDEIAKRLEELLRELSRDRDKDRDHMVLHEYVNAAGITNKKNDDNVRRVKEVIDRAEKLVRDLLREIRKLIEKLIRDTE

SEQ ID NO: 238 - protein, 178 aa, Artificial Sequence
  Synthetic
SSIERVEKEVRRLLRESDESLKRVMEEAKELIKSVRESTKRVEEDARDLLRKVVERTGDEREDLRRVLEELRKLIEDNRREDKRSEDELRKLIRDNKEENDRARREAEKLLEDLSRGRSERDHMVLHEYVNAAGITLKEDDKRSLERIERIVRRNNELNKESVDRIRKIIKEMEERAD

SEQ ID NO: 239 - protein, 174 aa, Artificial Sequence
  Synthetic
DELRDVKRELDRLLRENEEIVERIAETVRRLLEELKKLTKELAEELRKLLEELRKRGVPEKELKEVADTLRKLLKDIERSNKEVEDRLRKLLEEIKESTDRLREELEEVEKLLRGGKDVERDHMVLHEYVNAAGITMRRVLEEAKRLAKEDKERIDKIRKEIEELIKRLKDKAT

SEQ ID NO: 240 - protein, 174 aa, Artificial Sequence
  Synthetic
DEEEDLERRIKKLLDENRELLKRIAEELRRLLEELRRLTEESADRLRRLLKELKDRGVPEKDLRDVAEKVKKVLKESEDSNRDVKRKLEKLLRDLERSTERLEREARKVRKLLRDGKDIERDHMVLHEYVNAAGITLKKIEKEIRDLIKEDKERNRELSERLRKLVEELKKKAT

SEQ ID NO: 241 - protein, 178 aa, Artificial Sequence
  Synthetic
SKVEKLEEEIARLVERSRRLVEELKKEVTKVKEKVDEIVERSRRHVKKVVEKLRDIKRRGGSEEVLRRVTEELKKVLEDNRRVIEEVLRDLERILEELKRKAEEVTKRNRDDLKRLRDSGRDHMVLHEYVNAAGITEKELRTVLRDVTEDIKRIAEELKKALEDSTEIIRRAEDELRT

SEQ ID NO: 242 - protein, 177 aa, Artificial Sequence
  Synthetic
DEVEDILRKVEEIVKKSITDARRLLKEAREIVEESIKTAEELLRRNEDIVRKLSEDVKRTTDEEKKKKLEEESRRVLEKTKRDLDRTKDDNRKALEKIRKRVKETEEENREVVDRVRKAGRDHMVLHEYVNAAGITVRVNREVLKRVEEVLEESKRVNEKVEEDVRRVHEEVRKEIK

SEQ ID NO: 243 - protein, 178 aa, Artificial Sequence
  Synthetic
SEEEKLKEVKDRIREVLRKLEEHTDKVKKEVEKVLRDIRRTTDELKKEVRAMLERLRRKKKDAEDLLRELEKIIEEIERELDRVLEENDKMAEEWKKLLDKVLDDNRKSIRDIEKELDDRRDHMVLHEYVNAAGITDEETNRDVVKKVREAVKKDADTNRKVIEEVKKVLEDAARRLD

SEQ ID NO: 244 - protein, 176 aa, Artificial Sequence
  Synthetic
REAEEAKEEVEELNRRNKKELDDARRRVDELDKRNKDRLKESSDRVKRLVEELERVKEEGRSDDRLREKIERMLKTSADELERLKEENKRALRDLAERLRELIERNRRKLEEITRRTVPDRDHMVLHEYVNAAGITELERVLEELAEKIDRSLKELDDVLRKNETDLKRVIEDLKR

SEQ ID NO: 245 - protein, 179 aa, Artificial Sequence
  Synthetic
RLEDEVRKMEKEVREEVKRLEDESRKVLEESRRNLDKLREESKRVLDTVRERIKDLRRRGLDERVLRELLKRVREVHERNRKLLDEVRRASEKVHEDNRRILEEVRKTVKDVVDKLRRVDRDHMVLHEYVNAAGITDVEREVKKSIEEVKEINRRLNEEVKKTIEEVKEIVKEVTERAK

SEQ ID NO: 246 - protein, 174 aa, Artificial Sequence
  Synthetic
SESDEVIRDLARLLDELARHVDDSVRRMDEVVKRSTREADELAKRLDELVKEVEKKPGDERVERMVAEIERLVAEVLEELKKKYEKLKREVEENLRRLEETVRDIVEKARKVTEKGVSKERDHMVLHEYVNAAGITKKKHEDVLRRLEDSLRRVAELLKAALDRLREIVDRLRR

SEQ ID NO: 247 - protein, 178 aa, Artificial Sequence
  Synthetic
DEARELVKELEDLIREITKTVRRLLEESEELIKRIDDAVDDLRRADEDLNREIKEEIEKGKSKESLEALIERLKESLERVKRTIEKLIRDLERLNEKLRRDVESLVAELEKILSKIKRGGRDHMVLHEYVNAAGITEKEAREILKRSEDETDKLREKAERILEDLERANRRTMDEARR

SEQ ID NO: 248 - protein, 176 aa, Artificial Sequence
  Synthetic
STAETVEKKVEEVIRENEKSMRESEEKVDRSTKRIEDVLRRLEETIRKTSDDIAKGVKGERVKEVLEENRRLLEEAKKLVDEVLETNKKLLEDDKRLNEEVSKTLKKLLEEIKSVDTREDRDHMVLHEYVNAAGITKLNEETIRRSEELVRRIERVIEEIIKRSEKLLEDVARESK

SEQ ID NO: 249 - protein, 176 aa, Artificial Sequence
  Synthetic
STAETVAEEVERVLKHSDDLIKEVEDVNRRVEEEIKRVIRELEEENERLVAEVRKGVKGEILAEIEKRLADNSEKVREVAERAKKLLEENTARVKDILRESRKLVKDLLDEVRGTGSEEARDHMVLHEYVNAAGITEKLDELIKHSEEVLERVKRLIDELRKHSEEVLEDLRRRAK

SEQ ID NO: 250 - protein, 180 aa, Artificial Sequence
  Synthetic
REVEEMIKELEELLKDLKEKNERASKRNRELVRRLEEENKRVIEELKKLVKELEDLVRSGEDEEVLREVLKRLEEVLERVRALNERVLEAIEKSLEEVKASNEAVKRRLKELLEEAERGVRDHMVLHEYVNAAGITKRIDELDEYTRESIRRAKKEIERLNRETKKVIEEVVKRIEEERK

SEQ ID NO: 251 - protein, 181 aa, Artificial Sequence
  Synthetic
DAVEEAEKLIRKVIADSEKLLRDLADLNAKSIRRSEKLVEDDRRANEDVIRKLEELRRNGGSEEELRALLKEVEDTNRASHETNKRLLDEDRALNKEVHDRNEKLLRDIKRLVEEVAKGIRDHMVLHEYVNAAGITKKAIEDSSREIKRLLEESERVMKRSSEDIKRTLDDTRRVVEEVRR

SEQ ID NO: 252 - protein, 177 aa, Artificial Sequence
  Synthetic
SSDEVLKEIEEIIRRLEAEVRRVNAEVNASTEDLAREVEEVLRATNELIEELERRVTGTEELKRVIDELRDRDRKVRRRVERVIEESAKRDDESRKRLTRAVEKLRADLKKLADDGVPEERDHMVLHEYVNAAGITKDELKEWRDRNKELVDRLSEELKEWLKDVERVLKELTDKDR

SEQ ID NO: 253 - protein, 178 aa, Artificial Sequence
  Synthetic
SDAEELLKRVADLLKASLESLEKILRDSKELMDRWRKKLEDLLRESEELVDRAEKILRRGGSDKEVLDKIAEEVRRTNDDSRRLDEELHRLSRDTLRKLEENLRRTEKEVREMDKRAAERRDHMVLHEYVNAAGITVEEEHRKVLETDKKILKEAHKESKEVNDRDRELLERLEESVR

SEQ ID NO: 254 - protein, 181 aa, Artificial Sequence
  Synthetic
SEIETVRREIEKILDDLRRTVKRIEDEVRKIHEDLRRSLEDSKRNIEEILKDLERAARRDGLDKKVEDDMRKLVEDLKRKHDKLRADNEAVTKELKDRLKKLEDDLARAIEELRRRLDKGRDHMVLHEYVNAAGITVEKIKKDLKELLERYEEIVRRIKELLKDLNREAEEVVRRLKEELR

SEQ ID NO: 255 - protein, 175 aa, Artificial Sequence
  Synthetic
SEIERVKKRLEELLAEVEESTRRLEERLKRLLEEAKRSSEEVEKELRRLLEAVRRGLSRDEKLVSELEARVKELLEDSRASLEELKKRVRKLAEDSARLLEEVKREVEKLKAKLDRGGDARDHMVLHEYVNAAGITENERLIREVEELVRAHNKRNKELVDEVKRLVEKVIEEER

SEQ ID NO: 256 - protein, 177 aa, Artificial Sequence
  Synthetic
SEDEDLDRVAEKLAREHKKSVEEIKRVLKSADEESKKLVRDTERVIEEIKREVEEARRGNIDEELVERLKKKIEDILRTLEERHKKLIKELREILKRLSDESRRLAEETEKVLEDLERKGRDHMVLHEYVNAAGITKEENRKVNEEVEKRLRELEEENKKVIEDLKSTVEELVERLR

SEQ ID NO: 257 - protein, 180 aa, Artificial Sequence
  Synthetic
DEVEDVLRKIEKILDDHRKRIEKNSRDMARIIDEHRRKVEENSREMKKLVDDLKKAVDRGEGDEETAEDVKAKLEKSNRELEKHSEEVKRALDESNEDLRRHSEEVKERIERLVKKLREDRDHMVLHEYVNAAGITEKLDRLNRENEKSSEELKRELDKINDENRETSERLKREIDETTR

SEQ ID NO: 258 - protein, 182 aa, Artificial Sequence
  Synthetic
RVEDALRKLLDDVRRLVEEAERRLRTSNDKSRRLVEEAKRRLEESNERSEKLVRDVRRRIRDEDVKRVLEELLKRDHDVVRRVLERIDEMLERNSRLVKRVLEDIRRLLKRVREVVERIKRRDHMVLHEYVNAAGITIKTAKKIIEDVLRASEDTIRRLEEIIRKVEEDSKRIIEEIERAAR

SEQ ID NO: 259 - protein, 179 aa, Artificial Sequence
  Synthetic
STREDARRLVERVRKEVKRLLKKNSDLLREVTERVKTLNERNRRLLEEVEREAKRLKDSDERDVERLLDRARKLVKESEDLIRKLLKDLRELVRRSEKDIDELRKELKRLLDELRARATDKRDHMVLHEYVNAAGITIRELEENVKTSEKLIEDLIRELEKSVDESRKRVEELVKELRT

SEQ ID NO: 260 - protein, 174 aa, Artificial Sequence
  Synthetic
SELEKVVKEVADLLRRNLEKSKRVLEEVRRRLEENLRESEKVHDDNRKTARRILELVREGKDKRDLTRLLEEDDKRVKEALDKSRENNERILKEVRRALRESEEDNRRILKEVREKVDSRLRDHMVLHEYVNAAGITRFIEELEKIVEETLTESEKLARASSEITKTVLDEIRK

SEQ ID NO: 261 - protein, 181 aa, Artificial Sequence
  Synthetic
DEERKLEKSLKDVEDTHRRLLEKNDEDLKELRKRVEDMLRRLEDALRRILEDIEEKLKRIEDDETLKRLRKRVKELLDEIRRRLERLEREVDKRLEEIKERNDRHHEEAKKELKRIRDKIRRDHMVLHEYVNAAGITRKVAEDLKRSNDEVKELAERLEETIRDLLRRIEEILKEIEERVR

SEQ ID NO: 262 - protein, 175 aa, Artificial Sequence
  Synthetic
SEKEDLERELEEVRRRVEESLRKNEEDVKRVRDELKKLLDENRKELERIRREVERANVDKRVLDEADRLLKELEDDHKKLEEDAKKALDELREEHKRLEETLRRMLKRIKEVLDRESDKMERDHMVLHEYVNAAGITSRELNKKLEEIVRRLKKVSDELNRRIEEIAERVRRRRK

SEQ ID NO: 263 - protein, 177 aa, Artificial Sequence
  Synthetic
SVIERVEEEMEKVIRDSERVTKEVEDRAREVHERSEKRIREVEETSRRVLEELRRAGVDKRILDELRKRIKDSREDLERINEELRRALRKLLEDSKRINEELRKTLEELRKRLERVDDEEERDHMVLHEYVNAAGITRKLEELARRVDELVRESIERVDRNVEENKRLVREAIERRR

SEQ ID NO: 264 - protein, 179 aa, Artificial Sequence
  Synthetic
SSKEVADELRKKAEKVLDELRKIIRELERKNEDSLRRTEEIVRRLEEEAERVLRDLVRTRGEDDRLVREVERLLRELKRRLEELIRRSEELIKRSREEVDRVIRTVEKLLEELDRLLRANKRDHMVLHEYVNAAGITIKDLARKLAKSSDDTVREDEKLVEELRKDVKRIVRKIKKDLE

SEQ ID NO: 265 - protein, 174 aa, Artificial Sequence
  Synthetic
DELRDVKRELDRLLRENEEIVERIAETVRRLLEELKKLTKELAEELRKLLEELRKRGVPEKELKEVADTLRKLLKDIERSNKEVEDRLRKLLEEIKESTDRLREELEEVEKLLRGGKDVETRDHMVLHEYVNAAGITRRVLEEAKRLAKEDKERIDKIRKEIEELIKRLKDKAT

SEQ ID NO: 266 - protein, 182 aa, Artificial Sequence
  Synthetic
DEIETVLDEVRRLHEDAKRRLEEMIDEVRKLNEESVRELARVVEEVERLLRTVKEEVERAGLDKGKLEELEERLERVREDVERILREIKRRNEKTLEDSERILEENKERNRTVLKKLKELRRDHMVLHEYVNAAGITVEESRESVRRVLEKNRRVVEESKRLAEELLRRVKKVVDEIRKRVE

SEQ ID NO: 267 - protein, 178 aa, Artificial Sequence
  Synthetic
SKVEKLEEEIARLVERSRRLVEELKKEVTKVKEKVDEIVERSRRHVKKVVEKLRDIKRRGGSEEVLRRVTEELKKVLEDNRRVIEEVLRDLERILEELKRKAEEVTKRNRDDLKRLRDSGVRDHMVLHEYVNAAGITKELRTVLRDVTEDIKRIAEELKKALEDSTEIIRRAEDELRT

SEQ ID NO: 268 - protein, 182 aa, Artificial Sequence
  Synthetic
SDADRVAEELKKLVEDSRRENERVIEESKRLVKENEDRNRELIERLKKLVDKLRDILEKEKDKKTLDDIVREILERLKRLLEKVEDENRKSHEENKRLLEDVKRKNKRISDELKRLLEEIERDHMVLHEYVNAAGITLEENKRVMEKTEEVAKKSSEDIKRVADETRRRAEELLKEVDELRK

SEQ ID NO: 269 - protein, 179 aa, Artificial Sequence
  Synthetic
KDEETLKRLLEKAKEVVDRLKDENEKVTRDNHESVKKAKDANKRSNEKSERVARDAIRRVREAKEVVDTAEKLLRDNHEHSRDTVKKARELNETSRRHSERIVEKIEEILEEVERTLRENRRDHMVLHEYVNAAGITLEELSRENREAVKRISDEIKRLSDENAKDSERIIKEIDDRVR

SEQ ID NO: 270 - protein, 179 aa, Artificial Sequence
  Synthetic
REDERLEEIARKIKKVVDELVERNKKLTEDNHESVRRAEKRNRELSRELEEVAKRAIERIRSDKKVVDEVKKLLEDAKKHSKEVIDELRRLNEESKRSSEDTIRRMRKLLRELEETVKAKKRDHMVLHEYVNAAGITLEDLSRRNEEKVRRISEEIKKLSKDNERTIKEIIKEIEERVK

SEQ ID NO: 271 - protein, 178 aa, Artificial Sequence
  Synthetic
KAAEEIRKKVEDYKRESEKILEEVEDHSRRSKETLKRLLDDLRRAVEELKRRLEELKRRPRTEEIAKRAEEAVRRAAERIKKVIDDVERHIRENAKELKRLLEEDREASRRLEDEIDKEVKRDHMVLHEYVNAAGITEESERVLRELAERNKTALEEAERVLRRLKEEIEKVLRKLKK

SEQ ID NO: 272 - protein, 176 aa, Artificial Sequence
  Synthetic
REAEEAKEEVEELNRRNKKELDDARRRVDELDKRNKDRLKESSDRVKRLVEELERVKEEGRSDDRLREKIERMLKTSADELERLKEENKRALRDLAERLRELIERNRRKLEEITRRTVPDKRDHMVLHEYVNAAGITLERVLEELAEKIDRSLKELDDVLRKNETDLKRVIEDLKR

SEQ ID NO: 273 - protein, 182 aa, Artificial Sequence
  Synthetic
DLERRLDELLKRIEDRVRELVRTLEESLRELERRVREIIRRLEEHLRRIEKMVRDLKRANKPDKAVKDDVRRLRENADRLNKRVREELKKLREDVKRVNEDVKRELDKLAEEAKDMLRKLRRDHMVLHEYVNAAGITRRLLREIEEVSERHKREVDRLEREIEEVSREHKERVEKLLREIER

SEQ ID NO: 274 - protein, 179 aa, Artificial Sequence
  Synthetic
RLEDEVRKMEKEVREEVKRLEDESRKVLEESRRNLDKLREESKRVLDTVRERIKDLRRRGLDERVLRELLKRVREVHERNRKLLDEVRRASEKVHEDNRRILEEVRKTVKDVVDKLRRVDARDHMVLHEYVNAAGITVEREVKKSIEEVKEINRRLNEEVKKTIEEVKEIVKEVTERAK

SEQ ID NO: 275 - protein, 174 aa, Artificial Sequence
  Synthetic
SESDEVIRDLARLLDELARHVDDSVRRMDEVVKRSTREADELAKRLDELVKEVEKKPGDERVERMVAEIERLVAEVLEELKKKYEKLKREVEENLRRLEETVRDIVEKARKVTEKGVSKEKRDHMVLHEYVNAAGITKKHEDVLRRLEDSLRRVAELLKAALDRLREIVDRLRR

SEQ ID NO: 276 - protein, 174 aa, Artificial Sequence; identical to SEQ ID NO: 275
  Synthetic

SEQ ID NO: 277 - protein, 181 aa, Artificial Sequence
  Synthetic
SEVDEAVKNNEEDAKESRRVVEEAVKRDEDIARDIERAAREVVERDKEIVDEVRRGVKDEKKLREVVTLSKKIVDETKEIADRVLELSKRIVKETRDIAKRVLKLNDDSVKDVRRIAREGRRDHMVLHEYVNAAGITEISREVKKDLERTVRENKKIVDEVAKALEDTVDKNRRIVEEVTT

SEQ ID NO: 278 - protein, 172 aa, Artificial Sequence
  Synthetic
SRAETVLKEVTDKIKKLADSSDELLRRNKENIDELKKSSEELLRRLTKAIEEIEKGSVDEETLEELIRRVEAELEAHHRELEKNSREDEKRNRDHHAKLEEEMRRVEERLEREGIDDEVVKRDHMVLHEYVNAAGITNEDVKRMNDKLRRDNEDVIRRVEKLLRELEEKRRT

SEQ ID NO: 279 - protein, 179 aa, Artificial Sequence
  Synthetic
SEVEELIKRLAKVLKELVDKVRKVIEDTKELLERLKRRSEDHIRKLREVLKEAKDQPIDDEELKEILDRLRKTLEELEEELKKALEDDREEAKRLVDDARRVLKELEEEVREIRERRGESERDHMVLHEYVNAAGITIREVIKEWERVHREVEELLKRLIDENRKVLDEIRKLLEEKSK

SEQ ID NO: 280 - protein, 181 aa, Artificial Sequence
  Synthetic
DAVEEAEKLIRKVIADSEKLLRDLADLNAKSIRRSEKLVEDDRRANEDVIRKLEELRRNGGSEEELRALLKEVEDTNRASHETNKRLLDEDRALNKEVHDRNEKLLRDIKRLVEEVAKGIDRDHMVLHEYVNAAGITKAIEDSSREIKRLLEESERVMKRSSEDIKRTLDDTRRVVEEVRR

SEQ ID NO: 281 - protein, 175 aa, Artificial Sequence
  Synthetic
SEADDVLKKLAETVKRIIERLKKLTDDSRRLVEEVHRRNDKLSKESAEAVRKAEERGIDEKDVRKLLEDLKKKSEEVAERNKRILDTLREISKRAEDEVRKVLKELEKTLKELEDRRPDSERDHMVLHEYVNAAGITLARHKDENDKLLKEIEDSLRRHKEENDRLLEKLKESTR

SEQ ID NO: 282 - protein, 181 aa, Artificial Sequence
  Synthetic
SEIETVRREIEKILDDLRRTVKRIEDEVRKIHEDLRRSLEDSKRNIEEILKDLERAARRDGLDKKVEDDMRKLVEDLKRKHDKLRADNEAVTKELKDRLKKLEDDLARAIEELRRRLDKGLRDHMVLHEYVNAAGITEKIKKDLKELLERYEEIVRRIKELLKDLNREAEEVVRRLKEELR

SEQ ID NO: 283 - protein, 175 aa, Artificial Sequence
  Synthetic
SEIERVKKRLEELLAEVEESTRRLEERLKRLLEEAKRSSEEVEKELRRLLEAVRRGLSRDEKLVSELEARVKELLEDSRASLEELKKRVRKLAEDSARLLEEVKREVEKLKAKLDRGGDADRDHMVLHEYVNAAGITNERLIREVEELVRAHNKRNKELVDEVKRLVEKVIEEER

SEQ ID NO: 284 - protein, 177 aa, Artificial Sequence
  Synthetic
SEDEDLDRVAEKLAREHKKSVEEIKRVLKSADEESKKLVRDTERVIEEIKREVEEARRGNIDEELVERLKKKIEDILRTLEERHKKLIKELREILKRLSDESRRLAEETEKVLEDLERKGVRDHMVLHEYVNAAGITEENRKVNEEVEKRLRELEEENKKVIEDLKSTVEELVERLR

SEQ ID NO: 285 - protein, 177 aa, Artificial Sequence; identical to SEQ ID NO: 284
  Synthetic

SEQ ID NO: 286 - protein, 182 aa, Artificial Sequence
  Synthetic
RVEDALRKLLDDVRRLVEEAERRLRTSNDKSRRLVEEAKRRLEESNERSEKLVRDVRRRIRDEDVKRVLEELLKRDHDVVRRVLERIDEMLERNSRLVKRVLEDIRRLLKRVREVVERIKRVRDHMVLHEYVNAAGITKTAKKIIEDVLRASEDTIRRLEEIIRKVEEDSKRIIEEIERAAR

SEQ ID NO: 287 - protein, 183 aa, Artificial Sequence
  Synthetic
KVEKRLTDLLKTVADEVKRVEDELRETVRESKEVVDKSRRDLERTVEESEKTVKDAERRVSEDLVRRIRKVLDENREVNDRVVKEDERILEENERVNRKVVEKIRDILRKIEEVVRRAAEEIRDHMVLHEYVNAAGITLERLKEEADRVRERSKKILTDLKKSSEDVKRESERMLKKLEDEIR

SEQ ID NO: 288 - protein, 174 aa, Artificial Sequence
  Synthetic
SEDETIRRIVRTVHEESRKSTEDVRREVERVLRESEEVVKKVKKKVDDVLKRVEETGISEELEERMRRIIREIREHLKDNLRRVREVIERIERKLEETERRDEKVLREIEKKIRDGDGREEVRDHMVLHEYVNAAGITEIAKEVREIVERSIKNLEEVAEEVERVVRELIEARR

SEQ ID NO: 289 - protein, 178 aa, Artificial Sequence
  Synthetic
DDLERVLKEIKKAADKIREDNKRTADKIRKRVKELDDETRDMLRRIRKLVKEIKERVRGREEARKVIEELKKLVDEVRKRNEKSIEELKKLLKEDRDLMRRVIEELEDLVRRLREEVRDDEARDHMVLHEYVNAAGITRVLKETSDRVRELIDKHRRLSEEVEKDVKRLIDELKKKTD

SEQ ID NO: 290 - protein, 175 aa, Artificial Sequence
  Synthetic
SEKEDLERELEEVRRRVEESLRKNEEDVKRVRDELKKLLDENRKELERIRREVERANVDKRVLDEADRLLKELEDDHKKLEEDAKKALDELREEHKRLEETLRRMLKRIKEVLDRESDKMEERDHMVLHEYVNAAGITRELNKKLEEIVRRLKKVSDELNRRIEEIAERVRRRRK

SEQ ID NO: 291 - protein, 178 aa, Artificial Sequence
  Synthetic
SSIERVEKEVRRLLRESDESLKRVMEEAKELIKSVRESTKRVEEDARDLLRKVVERTGDEREDLRRVLEELRKLIEDNRREDKRSEDELRKLIRDNKEENDRARREAEKLLEDLSRGRSEEERDHMVLHEYVNAAGITEDDKRSLERIERIVRRNNELNKESVDRIRKIIKEMEERAD

SEQ ID NO: 292 - protein, 179 aa, Artificial Sequence
  Synthetic
SSKEVADELRKKAEKVLDELRKIIRELERKNEDSLRRTEEIVRRLEEEAERVLRDLVRTRGEDDRLVREVERLLRELKRRLEELIRRSEELIKRSREEVDRVIRTVEKLLEELDRLLRANKGRDHMVLHEYVNAAGITKDLARKLAKSSDDTVREDEKLVEELRKDVKRIVRKIKKDLE

SEQ ID NO: 293 - protein, 183 aa, Artificial Sequence
  Synthetic
KDAEDLERRVRELVEENNRVSKRLAEEVTRLVKENEDKVRELEKEVRDRAKELLDMKRRGEVREEEVKRVLREIEELLREITEHSKEVLKTIEKLLRDSLEHSRRVLEEIERLLETILRKSKRDHMVLHEYVNAAGITERSLRENEKVADELRKRAEKSLEDVKRVVDELRKIVDDVLKRVED

SEQ ID NO: 294 - protein, 183 aa, Artificial Sequence
  Synthetic
SEIEKLVEDVRKLVEDNLRHSEEVHRRNRRLIEENERKIDELEKRVRKLVEELRELAERGEIREEEARKVLEEIKRLLDEIRRHSEEVLKEIERTLKENLKHSEEVLRRIEERLEDIKRKDKRDHMVLHEYVNAAGITKRSLDESEKLNRESRKRVTRSLEKVDDLVRELEKLARKVLEEVKT

SEQ ID NO: 295 - protein, 174 aa, Artificial Sequence
  Synthetic
SEIEELEKRIDELLKELRDLSRRIAEEVKRLLEELKKLSKDSEDKLRELLERLKRKGVPEEELRRVEEEVERVVRESRKLNKETEDELRRLLEEIKESNDRVEKRARELKKLLRDGKDVEEVRDHMVLHEYVNAAGITKVLKDARDLIKKDKDLNEKLSRELEKLVRELEERAR

SEQ ID NO: 296 - protein, 174 aa, Artificial Sequence
  Synthetic
DELRDVKRELDRLLRENEEIVERIAETVRRLLEELKKLTKELAEELRKLLEELRKRGVPEKELKEVADTLRKLLKDIERSNKEVEDRLRKLLEEIKESTDRLREELEEVEKLLRGGKDVETVRDHMVLHEYVNAAGITRVLEEAKRLAKEDKERIDKIRKEIEELIKRLKDKAT

SEQ ID NO: 297 - protein, 174 aa, Artificial Sequence
  Synthetic
DEEEDLERRIKKLLDENRELLKRIAEELRRLLEELRRLTEESADRLRRLLKELKDRGVPEKDLRDVAEKVKKVLKESEDSNRDVKRKLEKLLRDLERSTERLEREARKVRKLLRDGKDIETLRDHMVLHEYVNAAGITKIEKEIRDLIKEDKERNRELSERLRKLVEELKKKAT

SEQ ID NO: 298 - protein, 177 aa, Artificial Sequence
  Synthetic
DEVEDILRKVEEIVKKSITDARRLLKEAREIVEESIKTAEELLRRNEDIVRKLSEDVKRTTDEEKKKKLEEESRRVLEKTKRDLDRTKDDNRKALEKIRKRVKETEEENREVVDRVRKAGVDRDHMVLHEYVNAAGITVNREVLKRVEEVLEESKRVNEKVEEDVRRVHEEVRKEIK

SEQ ID NO: 299 - protein, 182 aa, Artificial Sequence
  Synthetic
SDADRVAEELKKLVEDSRRENERVIEESKRLVKENEDRNRELIERLKKLVDKLRDILEKEKDKKTLDDIVREILERLKRLLEKVEDENRKSHEENKRLLEDVKRKNKRISDELKRLLEEIERRDHMVLHEYVNAAGITEENKRVMEKTEEVAKKSSEDIKRVADETRRRAEELLKEVDELRK

SEQ ID NO: 300 - protein, 175 aa, Artificial Sequence
  Synthetic
SEMDDVLKKLAETVKRIIERLKKLTDDSRRLVEEVHRRNDKLSKESREAVRKAEERNIDEKDVRKLLEDLKKKSEEVAERNKRILDTLREISKRAEDEVRKVLKELEKTLKELEDRRPDVRERDHMVLHEYVNAAGITKRHKDENDKLLKEIEDSLRRHKEENDRLLEKLKESTR

SEQ ID NO: 301 - protein, 183 aa, Artificial Sequence
  Synthetic
SEVDEVLERIKRLLERLAEHSDKVVRDIEKLLDDNRKENERLLDKLRRELKRLEEMRRRGDLREELLERVVREVEKEIRDIKRKNKRSVETVEKLVRDDRKELKRALEDVERLIRELETRLKRDHMVLHEYVNAAGITEKVIDELLKKTDEVLKRARETIEDLNRKLDKVLKEVRDKLDRLRD

SEQ ID NO: 302 - protein, 179 aa, Artificial Sequence
  Synthetic
KDEETLKRLLEKAKEVVDRLKDENEKVTRDNHESVKKAKDANKRSNEKSERVARDAIRRVREAKEVVDTAEKLLRDNHEHSRDTVKKARELNETSRRHSERIVEKIEEILEEVERTLRENRGRDHMVLHEYVNAAGITEELSRENREAVKRISDEIKRLSDENAKDSERIIKEIDDRVR

SEQ ID NO: 303 - protein, 179 aa, Artificial Sequence
  Synthetic
SDDETVTKLLKEAEKVVRELTKRNKELLRKNHESVREAKKRNEDLSRKLEEVVRRLIEEIREREDVVRELEKLLEDAKRHSERIVREMEDLNRKSKKHSKETVDRLKDLLRKVEETARARKGRDHMVLHEYVNAAGITEELTRRNEKRIEEISDEIRRLSDTNRREIERIREELRRRAK

SEQ ID NO: 304 - protein, 176 aa, Artificial Sequence
  Synthetic
REAEEAKEEVEELNRRNKKELDDARRRVDELDKRNKDRLKESSDRVKRLVEELERVKEEGRSDDRLREKIERMLKTSADELERLKEENKRALRDLAERLRELIERNRRKLEEITRRTVPDKDRDHMVLHEYVNAAGITERVLEELAEKIDRSLKELDDVLRKNETDLKRVIEDLKR

SEQ ID NO: 305 - protein, 182 aa, Artificial Sequence
  Synthetic
SELEKTLEDLKRHSEENKKKLEEDLRDMERNLKENKDRLKKILEEAEKTLKDLERRFREGDIDERELERVRRKMEEIKKRLDENVERNRRKAEDIKRKLDENVKRSEDRVKEIKEDIRRRVRRDHMVLHEYVNAAGITKENREIHERVKKALDDIVKELEELHERLKRRLEEILRRIAETVR

SEQ ID NO: 306 - protein, 179 aa, Artificial Sequence
  Synthetic
RLEDEVRKMEKEVREEVKRLEDESRKVLEESRRNLDKLREESKRVLDTVRERIKDLRRRGLDERVLRELLKRVREVHERNRKLLDEVRRASEKVHEDNRRILEEVRKTVKDVVDKLRRVDAKRDHMVLHEYVNAAGITEREVKKSIEEVKEINRRLNEEVKKTIEEVKEIVKEVTERAK

SEQ ID NO: 307 - protein, 183 aa, Artificial Sequence
  Synthetic
RVDERLDTVLKRVEETVRENKKKNDELLERSKENIDRLKKRLDDLLDKVRREAEKLKREVTKEEVKKIIDEVLKEIEDLLRTVKEELDRALERNREVVEETKRRIDRVLKEIEKLIRDVKRDRDHMVLHEYVNAAGITLKEVNDTSKDAERRLRETNERLNEIVKEVEKRIRELSEEVRKRVK

SEQ ID NO: 308 - protein, 183 aa, Artificial Sequence
  Synthetic
SVDERLDEVLERVKEDMDRNRRKNDESLREDEENVRRNKKETDESVKRVEERVRELKKRVKDERVKEFLDRVLEEIRKSAEEVKTIIDEVHKESEETVRRTKKIIEEVLRRIEELIRRVKKDRDHMVLHEYVNAAGITLKEVNKVSDEAHKRNKELNERVNRVNKEAHKRNEDLLREAERKVR

SEQ ID NO: 309 - protein, 183 aa, Artificial Sequence
  Synthetic
SIEDEIRKLKEDIKRVLDKVRRDNERLKERLDKVLEDIRRSSEDNNRKLEEVLKRIRDKPVDERLVRKVEEAVKRLKEHNEDSTRRVEEVIRRLKEESEESVRKTEKVARDLERELDEVLTRRDHMVLHEYVNAAGITLERLKREDKEVADRAEKLLREAEEHNKRSLDESRRVLEELDEEIR

SEQ ID NO: 310 - protein, 183 aa, Artificial Sequence
  Synthetic
SIREKIRELEERLEEVLRRIEENSERVLREAERVLKEIKDNSKRNNEKLERALEEIRKLPVEDELVRRVKELVERLKRHNKKSSEDVERVVRELKEELKRSSEEVKKAVDRLKEELEKVLRDRDHMVLHEYVNAAGITLRKLEEHNRRVVERLKRLLEELKKHNEDSLRKSEEVLRKLEEDAR

SEQ ID NO: 311 - protein, 182 aa, Artificial Sequence
  Synthetic
SIEDLVRELKKKVDEVAEDLRRKVREALERSRENIDRLKKHSEENLRRSEEVVDKLRKETREEEVKDILRRVLELSKRIVEESKEILDRVLELSKKVVDDIEEIIRRVEETVKEVLTRLSRVRDHMVLHEYVNAAGITREVTKLVEKLIRELEDINRKVNERNRRLAEESRKILDEVEKRVR

SEQ ID NO: 312 - protein, 174 aa, Artificial Sequence
  Synthetic
SESDEVIRDLARLLDELARHVDDSVRRMDEVVKRSTREADELAKRLDELVKEVEKKPGDERVERMVAEIERLVAEVLEELKKKYEKLKREVEENLRRLEETVRDIVEKARKVTEKGVSKEKIRDHMVLHEYVNAAGITKHEDVLRRLEDSLRRVAELLKAALDRLREIVDRLRR

SEQ ID NO: 313 - protein, 178 aa, Artificial Sequence
  Synthetic
DREREVKKRLDEVRERIERLLRRVEEESRRVAEEIRRLIEEVRRRNKKVTEEIRELLKGLKDKEEVRRVLERLRKLNAESDELLERILERLRRLVEATNRLVKAIIEELRRLVEKIVREVPDRDHMVLHEYVNAAGITKVAKEIHDHDKEVTERLEDLLRRITEHARKSDREIEETAR

SEQ ID NO: 314 - protein, 179 aa, Artificial Sequence
  Synthetic
SEVEELIKRLAKVLKELVDKVRKVIEDTKELLERLKRRSEDHIRKLREVLKEAKDQPIDDEELKEILDRLRKTLEELEEELKKALEDDREEAKRLVDDARRVLKELEEEVREIRERRGESEERDHMVLHEYVNAAGITREVIKEWERVHREVEELLKRLIDENRKVLDEIRKLLEEKSK

SEQ ID NO: 315 - protein, 176 aa, Artificial Sequence
  Synthetic
STAETVEKKVEEVIRENEKSMRESEEKVDRSTKRIEDVLRRLEETIRKTSDDIAKGVKGERVKEVLEENRRLLEEAKKLVDEVLETNKKLLEDDKRLNEEVSKTLKKLLEEIKSVDTREDATRDHMVLHEYVNAAGITNEETIRRSEELVRRIERVIEEIIKRSEKLLEDVARESK

SEQ ID NO: 316 - protein, 180 aa, Artificial Sequence
  Synthetic
REVEEMIKELEELLKDLKEKNERASKRNRELVRRLEEENKRVIEELKKLVKELEDLVRSGEDEEVLREVLKRLEEVLERVRALNERVLEAIEKSLEEVKASNEAVKRRLKELLEEAERGVDSRDHMVLHEYVNAAGITIDELDEYTRESIRRAKKEIERLNRETKKVIEEVVKRIEEERK

SEQ ID NO: 317 - protein, 181 aa, Artificial Sequence
  Synthetic
DAVEEAEKLIRKVIADSEKLLRDLADLNAKSIRRSEKLVEDDRRANEDVIRKLEELRRNGGSEEELRALLKEVEDTNRASHETNKRLLDEDRALNKEVHDRNEKLLRDIKRLVEEVAKGIDSRDHMVLHEYVNAAGITAIEDSSREIKRLLEESERVMKRSSEDIKRTLDDTRRVVEEVRR

SEQ ID NO: 318 - protein, 181 aa, Artificial Sequence
  Synthetic
SEIETVRREIEKILDDLRRTVKRIEDEVRKIHEDLRRSLEDSKRNIEEILKDLERAARRDGLDKKVEDDMRKLVEDLKRKHDKLRADNEAVTKELKDRLKKLEDDLARAIEELRRRLDKGLDRDHMVLHEYVNAAGITKIKKDLKELLERYEEIVRRIKELLKDLNREAEEVVRRLKEELR

SEQ ID NO: 319 - protein, 183 aa, Artificial Sequence
  Synthetic
SDVDRVLEEIRKLLEDLKRHSEKVSEENEDLLRANTELNKRVSEDNERLLEELKRLRERGGISEEDLKRALDRVRKTVETVKEENKRSLEDVRRTVETNKRKLERVVEEIKKLIEDAKRRGSRDHMVLHEYVNAAGITKRTIDRLLETSDRSLEKVEADLRRLNEELDRSLERAERTIRELAK

SEQ ID NO: 320 - protein, 177 aa, Artificial Sequence
  Synthetic
SEDEDLDRVAEKLAREHKKSVEEIKRVLKSADEESKKLVRDTERVIEEIKREVEEARRGNIDEELVERLKKKIEDILRTLEERHKKLIKELREILKRLSDESRRLAEETEKVLEDLERKGVDRDHMVLHEYVNAAGITENRKVNEEVEKRLRELEEENKKVIEDLKSTVEELVERLR

SEQ ID NO: 321 - protein, 177 aa, Artificial Sequence; identical to SEQ ID NO: 320
  Synthetic

SEQ ID NO: 322 - protein, 183 aa, Artificial Sequence
  Synthetic
KVEKRLTDLLKTVADEVKRVEDELRETVRESKEVVDKSRRDLERTVEESEKTVKDAERRVSEDLVRRIRKVLDENREVNDRVVKEDERILEENERVNRKVVEKIRDILRKIEEVVRRAAEEIRRDHMVLHEYVNAAGITERLKEEADRVRERSKKILTDLKKSSEDVKRESERMLKKLEDEIR

SEQ ID NO: 323 - protein, 184 aa, Artificial Sequence
  Synthetic
SLEEVIKTVRKLLEEVERRLREVVERAERMLEEVRRRTREVSEEAREMLKDVEKALRDKNVSEEIEEKLRKIKEELERDNEKVNRDNERSVETLRRLLDRVRKEVKDIAKELEERLKEVERKSRDHMVLHEYVNAAGITVKRLRELIEKLREEVEKIVDENRKTVEELRRRNEEIVRRLRREIE

SEQ ID NO: 324 - protein, 184 aa, Artificial Sequence
  Synthetic
KLDEVIEEIRKLLRRMEEELRRSVEEIDKLLREVRELLRESSEKVKELLRRVTEELKKRGVPEEVKERLDRLVETLRRLSEETLKELDKLVREVKELSKESLKRLRELVERLRRELEEIKKRGRDHMVLHEYVNAAGITIRELREIVKRNTEIAREVVERAKRIVEKNEKLLKDVVEEAKKIVK

SEQ ID NO: 325 - protein, 181 aa, Artificial Sequence
  Synthetic
SEVERVLEDLRRLVRDVEEKLRRIIERDRRLVEEVERENRKTIRKIEELLRKVLEELKDISDKKTIERIVREIIKEARDLVRRNHERNREIVDESRRLVEELRRIVEEIIRRLRELLERVKSGRDHMVLHEYVNAAGITLRELLKELEKTSRDLKKRLEELDRELKALVEKVERDLEELRK

SEQ ID NO: 326 - protein, 177 aa, Artificial Sequence
  Synthetic
KEEEDLEREVKRLEDKVREDAKKLEEVVKTVEKLVRDDARRNEEVVKEVADRVRRLTERKLDEETLRKVKEDLKRTLERLKRENEKSLEELRDILRRLKKENDDTLKELRDELKRLTDSGASERDHMVLHEYVNAAGITSREVEKRLRRIIRELERVSKEVLDRLREIIEKLDRDAT

SEQ ID NO: 327 - protein, 177 aa, Artificial Sequence
  Synthetic
ELREDVERVVDEIRRLVEENVRRIDEVAKDIKRLADDNVRRVKELVRKIEEDIRRLKEEGVTEVVDELREEVRKLSEDNRRHSRELIERVKKLLKELEEHSRDLKRRVKELLEDLKRKGVDERRDHMVLHEYVNAAGITRDALRRLEEAIRRVRRESERVNRELDEVIKRVTEELKK

SEQ ID NO: 328 - protein, 181 aa, Artificial Sequence
  Synthetic
DEERKLEKSLKDVEDTHRRLLEKNDEDLKELRKRVEDMLRRLEDALRRILEDIEEKLKRIEDDETLKRLRKRVKELLDEIRRRLERLEREVDKRLEEIKERNDRHHEEAKKELKRIRDKIRRDRDHMVLHEYVNAAGITVAEDLKRSNDEVKELAERLEETIRDLLRRIEEILKEIEERVR

SEQ ID NO: 329 - protein, 181 aa, Artificial Sequence
  Synthetic
DEEETLEDVLRELEERVEKLLRDLTRDLERVEKEHKELLKRNKEAIDEIEKRIEELLKRIEDDEKLRRLKEEVRKLVEESRERNKRHHKEVREVLERIRELLERLEKELRRALEEIRDKIRKDRDHMVLHEYVNAAGITAEEVIRDLERKVRKLERDIRENIKKNHREVREILRKIEEDVR

SEQ ID NO: 330 - protein, 175 aa, Artificial Sequence
  Synthetic
SEEDELRRLLKEVNERVERLLDEIRKELEKIAEELRDLLKKNEDKLREIKRRVEENRVDEEIKKDAERALTELKEEHERLDREAKKDLDRIRKELERLEEEHRRVSERIEEVLDKESDKTEDIRDHMVLHEYVNAAGITEIKKELRDILEKLRRVSEELNKKLDEILKRIEDRTR

SEQ ID NO: 331 - protein, 177 aa, Artificial Sequence
  Synthetic
SAIEKVKEVVERVLETVRDSVRRSHEESKRLIDKVRKRLEEVREEVKELIERVRRKGIPERMVEKLERDLEELLKEIKDTIDRIEEELRTSNRRLKETNDEIAKRLEELLRELSRDRDKDAVERDHMVLHEYVNAAGITNDDNVRRVKEVIDRAEKLVRDLLREIRKLIEKLIRDTE

SEQ ID NO: 332 - protein, 177 aa, Artificial Sequence
  Synthetic
SVLEEVRRRVEELLKTVKESVDRSHERSERLIEEVRESLKEVKRRVKELVERVREKGIPEDRVKRIEDKLREELERLERENRKIEEDLKRSNDELRRENERIAERLEELLRELSRDTNDKVARRDHMVLHEYVNAAGITNKRNLEDVERVIRELNKENERVLREVEKKIEKLIRETE

SEQ ID NO: 333 - protein, 179 aa, Artificial Sequence
  Synthetic
SSKEVADELRKKAEKVLDELRKIIRELERKNEDSLRRTEEIVRRLEEEAERVLRDLVRTRGEDDRLVREVERLLRELKRRLEELIRRSEELIKRSREEVDRVIRTVEKLLEELDRLLRANKGDRDHMVLHEYVNAAGITDLARKLAKSSDDTVREDEKLVEELRKDVKRIVRKIKKDLE

SEQ ID NO: 334 - protein, 183 aa, Artificial Sequence
  Synthetic
KDAEDLERRVRELVEENNRVSKRLAEEVTRLVKENEDKVRELEKEVRDRAKELLDMKRRGEVREEEVKRVLREIEELLREITEHSKEVLKTIEKLLRDSLEHSRRVLEEIERLLETILRKSKDRDHMVLHEYVNAAGITRSLRENEKVADELRKRAEKSLEDVKRVVDELRKIVDDVLKRVED

SEQ ID NO: 335 - protein, 183 aa, Artificial Sequence
  Synthetic
SEIEKLVEDVRKLVEDNLRHSEEVHRRNRRLIEENERKIDELEKRVRKLVEELRELAERGEIREEEARKVLEEIKRLLDEIRRHSEEVLKEIERTLKENLKHSEEVLRRIEERLEDIKRKDKDRDHMVLHEYVNAAGITRSLDESEKLNRESRKRVTRSLEKVDDLVRELEKLARKVLEEVKT

SEQ ID NO: 336 - protein, 181 aa, Artificial Sequence
  Synthetic
EEIERALREMRELSRTHKELVEKILRDIAELAKTHERINEDILRKIKKLIDEIADEIRKEDKKEELKRKIDELRRRAEELLKESKEHLKRLEDTVRELIERLKETLKKVEEDLKRILEKLEKSRDHMVLHEYVNAAGITNRELLKRVEDEVRRLIRKLEELNRRTEEEVKKLIKKLEDDLK

SEQ ID NO: 337 - protein, 174 aa, Artificial Sequence
  Synthetic
DEEEDLERRIKKLLDENRELLKRIAEELRRLLEELRRLTEESADRLRRLLKELKDRGVPEKDLRDVAEKVKKVLKESEDSNRDVKRKLEKLLRDLERSTERLEREARKVRKLLRDGKDIETLLRDHMVLHEYVNAAGITIEKEIRDLIKEDKERNRELSERLRKLVEELKKKAT

SEQ ID NO: 338 - protein, 178 aa, Artificial Sequence
  Synthetic
SSKDEIRRRVEEVVERSDEIVKRSREHVKTVVDELDRVVKELERKVREVVKKLDKIRKDGGSEETLKRVLDELREILKELKEEVKKVKRKLEKVVKENRDTIREVEERNRKILDELRKRGVEERDHMVLHEYVNAAGITLRRVLKESEDIAKEAEDRLKTVLERVERIADEVLKRLTK

SEQ ID NO: 339 - protein, 178 aa, Artificial Sequence
  Synthetic
SKVEKLEEEIARLVERSRRLVEELKKEVTKVKEKVDEIVERSRRHVKKVVEKLRDIKRRGGSEEVLRRVTEELKKVLEDNRRVIEEVLRDLERILEELKRKAEEVTKRNRDDLKRLRDSGVDERDHMVLHEYVNAAGITLRTVLRDVTEDIKRIAEELKKALEDSTEIIRRAEDELRT

SEQ ID NO: 340 - protein, 179 aa, Artificial Sequence
  Synthetic
REDERLEEIARKIKKVVDELVERNKKLTEDNHESVRRAEKRNRELSRELEEVAKRAIERIRSDKKVVDEVKKLLEDAKKHSKEVIDELRRLNEESKRSSEDTIRRMRKLLRELEETVKAKKGDRDHMVLHEYVNAAGITDLSRRNEEKVRRISEEIKKLSKDNERTIKEIIKEIEERVK

SEQ ID NO: 341 - protein, 184 aa, Artificial Sequence
  Synthetic
ELIKKARKDVEEVRERSERLVDELRKRNKKLADESRRLIDKLRKDVEKVLREIEDLLRKRRTKDVLKEIEDLVRELERELRRVVKESSDKVRKLIRENEKVVEESSRLFRDLVEKLRRVVEERRDHMVLHEYVNAAGITEDVNEKSERDVREINKESERVNEETEREVEDAIRKLREVLRRAKK

SEQ ID NO: 342 - protein, 176 aa, Artificial Sequence
  Synthetic
REAEEAKEEVEELNRRNKKELDDARRRVDELDKRNKDRLKESSDRVKRLVEELERVKEEGRSDDRLREKIERMLKTSADELERLKEENKRALRDLAERLRELIERNRRKLEEITRRTVPDKDVRDHMVLHEYVNAAGITRVLEELAEKIDRSLKELDDVLRKNETDLKRVIEDLKR

SEQ ID NO: 343 - protein, 174 aa, Artificial Sequence
  Synthetic
SEEEVLREAAKTVEKLLDEIRRSLEKVSKRVEDSNRELKESLDRVRERVRELLEELRKNNVDRTLLEDVRRKLERIEERNEEMNDRSRRKLEELRERNRKILEDIRRTLEDLKRRQLPKDDVERDHMVLHEYVNAAGITNKRALRENEERVKTLNRENEEMLKRIEEEVRRATK

SEQ ID NO: 344 - protein, 182 aa, Artificial Sequence
  Synthetic
SELEKTLEDLKRHSEENKKKLEEDLRDMERNLKENKDRLKKILEEAEKTLKDLERRFREGDIDERELERVRRKMEEIKKRLDENVERNRRKAEDIKRKLDENVKRSEDRVKEIKEDIRRRVRDRDHMVLHEYVNAAGITENREIHERVKKALDDIVKELEELHERLKRRLEEILRRIAETVR

SEQ ID NO: 345 - protein, 179 aa, Artificial Sequence
  Synthetic
RLEDEVRKMEKEVREEVKRLEDESRKVLEESRRNLDKLREESKRVLDTVRERIKDLRRRGLDERVLRELLKRVREVHERNRKLLDEVRRASEKVHEDNRRILEEVRKTVKDVVDKLRRVDAKVRDHMVLHEYVNAAGITREVKKSIEEVKEINRRLNEEVKKTIEEVKEIVKEVTERAK

SEQ ID NO: 346 - protein, 183 aa, Artificial Sequence
  Synthetic
RVDERLDTVLKRVEETVRENKKKNDELLERSKENIDRLKKRLDDLLDKVRREAEKLKREVTKEEVKKIIDEVLKEIEDLLRTVKEELDRALERNREVVEETKRRIDRVLKEIEKLIRDVKRDRRDHMVLHEYVNAAGITKEVNDTSKDAERRLRETNERLNEIVKEVEKRIRELSEEVRKRVK

SEQ ID NO: 347 - protein, 183 aa, Artificial Sequence
  Synthetic
SVDERLDEVLERVKEDMDRNRRKNDESLREDEENVRRNKKETDESVKRVEERVRELKKRVKDERVKEFLDRVLEEIRKSAEEVKTIIDEVHKESEETVRRTKKIIEEVLRRIEELIRRVKKDRRDHMVLHEYVNAAGITKEVNKVSDEAHKRNKELNERVNRVNKEAHKRNEDLLREAERKVR

SEQ ID NO: 348 - protein, 183 aa, Artificial Sequence
  Synthetic
SIEDEIRKLKEDIKRVLDKVRRDNERLKERLDKVLEDIRRSSEDNNRKLEEVLKRIRDKPVDERLVRKVEEAVKRLKEHNEDSTRRVEEVIRRLKEESEESVRKTEKVARDLERELDEVLTRGRDHMVLHEYVNAAGITERLKREDKEVADRAEKLLREAEEHNKRSLDESRRVLEELDEEIR

SEQ ID NO: 349 - protein, 183 aa, Artificial Sequence
  Synthetic
SIREKIRELEERLEEVLRRIEENSERVLREAERVLKEIKDNSKRNNEKLERALEEIRKLPVEDELVRRVKELVERLKRHNKKSSEDVERVVRELKEELKRSSEEVKKAVDRLKEELEKVLRDGRDHMVLHEYVNAAGITRKLEEHNRRVVERLKRLLEELKKHNEDSLRKSEEVLRKLEEDAR

SEQ ID NO: 350 - protein, 179 aa, Artificial Sequence
  Synthetic
SEVEELIKRLAKVLKELVDKVRKVIEDTKELLERLKRRSEDHIRKLREVLKEAKDQPIDDEELKEILDRLRKTLEELEEELKKALEDDREEAKRLVDDARRVLKELEEEVREIRERRGESEELRDHMVLHEYVNAAGITEVIKEWERVHREVEELLKRLIDENRKVLDEIRKLLEEKSK

SEQ ID NO: 351 - protein, 178 aa, Artificial Sequence
  Synthetic
DEARELVKELEDLIREITKTVRRLLEESEELIKRIDDAVDDLRRADEDLNREIKEEIEKGKSKESLEALIERLKESLERVKRTIEKLIRDLERLNEKLRRDVESLVAELEKILSKIKRGGLDERDHMVLHEYVNAAGITAREILKRSEDETDKLREKAERILEDLERANRRTMDEARR

SEQ ID NO: 352 - protein, 184 aa, Artificial Sequence
  Synthetic
DEIRKVVKEITDLLKASNDKNRKVVEEIRDLLRKSKKLADELVERLRALVEDLRRRIDKSGDKETAEDIVRRIIEELKRILKEIEDLARRINREIERLVEEVERDNRDVNRAIEELLKDIARRRDHMVLHEYVNAAGITSRRNEESMRRVKEDADRVSEANKEVLDRVREEVKRLIEEVRETLR

SEQ ID NO: 353 - protein, 180 aa, Artificial Sequence
  Synthetic
REVEEMIKELEELLKDLKEKNERASKRNRELVRRLEEENKRVIEELKKLVKELEDLVRSGEDEEVLREVLKRLEEVLERVRALNERVLEAIEKSLEEVKASNEAVKRRLKELLEEAERGVDSERDHMVLHEYVNAAGITDELDEYTRESIRRAKKEIERLNRETKKVIEEVVKRIEEERK

SEQ ID NO: 354 - protein, 181 aa, Artificial Sequence
  Synthetic
DAVEEAEKLIRKVIADSEKLLRDLADLNAKSIRRSEKLVEDDRRANEDVIRKLEELRRNGGSEEELRALLKEVEDTNRASHETNKRLLDEDRALNKEVHDRNEKLLRDIKRLVEEVAKGIDSERDHMVLHEYVNAAGITIEDSSREIKRLLEESERVMKRSSEDIKRTLDDTRRVVEEVRR

SEQ ID NO: 355 - protein, 181 aa, Artificial Sequence; identical to SEQ ID NO: 354
  Synthetic

SEQ ID NO: 356 - protein, 175 aa, Artificial Sequence
  Synthetic
SEAEEIRRRLEEISRRSVEHLRKVLEEIKRISERSKRHLDRVLEENARRLEELAELLKRGGDKEELLADLKAVHDESRKVIEKNAEENDRALKAAKEVIDENRERNKRVLDEVRKGGLPEEVLRDHMVLHEYVNAAGITIEEEIKKIIDKSREDIKRVLEEIERLNAKAADDLRK

SEQ ID NO: 357 - protein, 183 aa, Artificial Sequence
  Synthetic
SDVDRVLEEIRKLLEDLKRHSEKVSEENEDLLRANTELNKRVSEDNERLLEELKRLRERGGISEEDLKRALDRVRKTVETVKEENKRSLEDVRRTVETNKRKLERVVEEIKKLIEDAKRRGSGRDHMVLHEYVNAAGITRTIDRLLETSDRSLEKVEADLRRLNEELDRSLERAERTIRELAK

SEQ ID NO: 358 - protein, 177 aa, Artificial Sequence
  Synthetic
SEDEDLDRVAEKLAREHKKSVEEIKRVLKSADEESKKLVRDTERVIEEIKREVEEARRGNIDEELVERLKKKIEDILRTLEERHKKLIKELREILKRLSDESRRLAEETEKVLEDLERKGVDERDHMVLHEYVNAAGITNRKVNEEVEKRLRELEEENKKVIEDLKSTVEELVERLR

SEQ ID NO: 359 - protein, 177 aa, Artificial Sequence
  Synthetic
SKEDRLREELKKLLARLAEEIERLKRALEESNKDLKRTIDASEKHLRDVNEDVKRGGVSEELLRELERSTAENKERAKELLKRHEDLVRKVEKELADLLRRLEEIVARVDEALKRGISEEELDRDHMVLHEYVNAAGITLEELLKRVEKLTEDAKRDLERSNREHKELADRIKETAR

SEQ ID NO: 360 - protein, 177 aa, Artificial Sequence; identical to SEQ ID NO: 359
  Synthetic

SEQ ID NO: 361 - protein, 183 aa, Artificial Sequence
  Synthetic
KVEKRLTDLLKTVADEVKRVEDELRETVRESKEVVDKSRRDLERTVEESEKTVKDAERRVSEDLVRRIRKVLDENREVNDRVVKEDERILEENERVNRKVVEKIRDILRKIEEVVRRAAEEIRDRDHMVLHEYVNAAGITRLKEEADRVRERSKKILTDLKKSSEDVKRESERMLKKLEDEIR

SEQ ID NO: 362 - protein, 184 aa, Artificial Sequence
  Synthetic
KLDEVIEEIRKLLRRMEEELRRSVEEIDKLLREVRELLRESSEKVKELLRRVTEELKKRGVPEEVKERLDRLVETLRRLSEETLKELDKLVREVKELSKESLKRLRELVERLRRELEEIKKRGERDHMVLHEYVNAAGITRELREIVKRNTEIAREVVERAKRIVEKNEKLLKDVVEEAKKIVK

SEQ ID NO: 363 - protein, 181 aa, Artificial Sequence
  Synthetic
SEVERVLEDLRRLVRDVEEKLRRIIERDRRLVEEVERENRKTIRKIEELLRKVLEELKDISDKKTIERIVREIIKEARDLVRRNHERNREIVDESRRLVEELRRIVEEIIRRLRELLERVKSGERDHMVLHEYVNAAGITRELLKELEKTSRDLKKRLEELDRELKALVEKVERDLEELRK

SEQ ID NO: 364 - protein, 178 aa, Artificial Sequence
  Synthetic
DDLERVLKEIKKAADKIREDNKRTADKIRKRVKELDDETRDMLRRIRKLVKEIKERVRGREEARKVIEELKKLVDEVRKRNEKSIEELKKLLKEDRDLMRRVIEELEDLVRRLREEVRDDEALRRDHMVLHEYVNAAGITLKETSDRVRELIDKHRRLSEEVEKDVKRLIDELKKKTD

SEQ ID NO: 365 - protein, 181 aa, Artificial Sequence
  Synthetic
DEERKLEKSLKDVEDTHRRLLEKNDEDLKELRKRVEDMLRRLEDALRRILEDIEEKLKRIEDDETLKRLRKRVKELLDEIRRRLERLEREVDKRLEEIKERNDRHHEEAKKELKRIRDKIRRDGRDHMVLHEYVNAAGITAEDLKRSNDEVKELAERLEETIRDLLRRIEEILKEIEERVR

SEQ ID NO: 366 - protein, 175 aa, Artificial Sequence
  Synthetic
SEKEDLERELEEVRRRVEESLRKNEEDVKRVRDELKKLLDENRKELERIRREVERANVDKRVLDEADRLLKELEDDHKKLEEDAKKALDELREEHKRLEETLRRMLKRIKEVLDRESDKMEEIKRDHMVLHEYVNAAGITLNKKLEEIVRRLKKVSDELNRRIEEIAERVRRRRK

SEQ ID NO: 367 - protein, 177 aa, Artificial Sequence
  Synthetic
SAIEKVKEVVERVLETVRDSVRRSHEESKRLIDKVRKRLEEVREEVKELIERVRRKGIPERMVEKLERDLEELLKEIKDTIDRIEEELRTSNRRLKETNDEIAKRLEELLRELSRDRDKDAVEDRDHMVLHEYVNAAGITDDNVRRVKEVIDRAEKLVRDLLREIRKLIEKLIRDTE

SEQ ID NO: 368 - protein, 177 aa, Artificial Sequence
  Synthetic
SVLEEVRRRVEELLKTVKESVDRSHERSERLIEEVRESLKEVKRRVKELVERVREKGIPEDRVKRIEDKLREELERLERENRKIEEDLKRSNDELRRENERIAERLEELLRELSRDTNDKVARDRDHMVLHEYVNAAGITKRNLEDVERVIRELNKENERVLREVEKKIEKLIRETE

SEQ ID NO: 369 - protein, 177 aa, Artificial Sequence
  Synthetic
SVIERVEEEMEKVIRDSERVTKEVEDRAREVHERSEKRIREVEETSRRVLEELRRAGVDKRILDELRKRIKDSREDLERINEELRRALRKLLEDSKRINEELRKTLEELRKRLERVDDEEEVKKRDHMVLHEYVNAAGITEELARRVDELVRESIERVDRNVEENKRLVREAIERRR

SEQ ID NO: 370 - protein, 183 aa, Artificial Sequence
  Synthetic
SEIEKLVEDVRKLVEDNLRHSEEVHRRNRRLIEENERKIDELEKRVRKLVEELRELAERGEIREEEARKVLEEIKRLLDEIRRHSEEVLKEIERTLKENLKHSEEVLRRIEERLEDIKRKDKDSRDHMVLHEYVNAAGITSLDESEKLNRESRKRVTRSLEKVDDLVRELEKLARKVLEEVKT

SEQ ID NO: 371 - protein, 181 aa, Artificial Sequence
  Synthetic
EEIERALREMRELSRTHKELVEKILRDIAELAKTHERINEDILRKIKKLIDEIADEIRKEDKKEELKRKIDELRRRAEELLKESKEHLKRLEDTVRELIERLKETLKKVEEDLKRILEKLEKSRRDHMVLHEYVNAAGITRELLKRVEDEVRRLIRKLEELNRRTEEEVKKLIKKLEDDLK

SEQ ID NO: 372 - protein, 182 aa, Artificial Sequence
  Synthetic
DEIETVLDEVRRLHEDAKRRLEEMIDEVRKLNEESVRELARVVEEVERLLRTVKEEVERAGLDKGKLEELEERLERVREDVERILREIKRRNEKTLEDSERILEENKERNRTVLKKLKELRDRGRDHMVLHEYVNAAGITSRESVRRVLEKNRRVVEESKRLAEELLRRVKKVVDEIRKRVE

SEQ ID NO: 373 - protein, 182 aa, Artificial Sequence
  Synthetic
DELEEVVRRVRELSRTVKEELREVIERVRELSERVKKKLRKVLREVAELHREVMKRVRDSGLDKSKLEKLEDESRRVLDKSREILRKNEEDNRRLNKELEEILKKNEDDNEDVRRKVDEVTRKGRDHMVLHEYVNAAGITSRRSAKDALKRVEDRVRESDKSVRELLEENRKVVEDIKRRVD

SEQ ID NO: 374 - protein, 178 aa, Artificial Sequence
  Synthetic
SSKDEIRRRVEEVVERSDEIVKRSREHVKTVVDELDRVVKELERKVREVVKKLDKIRKDGGSEETLKRVLDELREILKELKEEVKKVKRKLEKVVKENRDTIREVEERNRKILDELRKRGVEERRDHMVLHEYVNAAGITRRVLKESEDIAKEAEDRLKTVLERVERIADEVLKRLTK

SEQ ID NO: 375 - protein, 182 aa, Artificial Sequence
  Synthetic
SDADRVAEELKKLVEDSRRENERVIEESKRLVKENEDRNRELIERLKKLVDKLRDILEKEKDKKTLDDIVREILERLKRLLEKVEDENRKSHEENKRLLEDVKRKNKRISDELKRLLEEIERRNRDHMVLHEYVNAAGITNKRVMEKTEEVAKKSSEDIKRVADETRRRAEELLKEVDELRK

SEQ ID NO: 376 - protein, 182 aa, Artificial Sequence
  Synthetic
DEVREVAERLRRLVDESRKRNEEVIKESEALVDRVRKTNEEVMKRLRELIDKLEKDIRRLKDKKTVEKIIREVLKKIDELLKRVERTNREISKENKRLLDEVRKTNEEISRRLKKLLEDIRRRNRDHMVLHEYVNAAGITNKEVLRKTEEMVKRSTETNKRLLERSKEVADRLRERIKEAAK

SEQ ID NO: 377 - protein, 175 aa, Artificial Sequence
  Synthetic
SEVDEVLREAKRIVDEVHKDNERATEESRRLVKKVHEENEEMVKDIERIVKEVKDANIDEKLVTEILKEIEEALKEAARRNKEVKDRLRELSRRVSERNREILEELKERLDRVRERRKDVKELERDHMVLHEYVNAAGITHRKENKRLLEELDRSLRELAKIVKEVLDEIRERTR

SEQ ID NO: 378 - protein, 185 aa, Artificial Sequence
  Synthetic
DDIERLKREIERLLKEAEKISRDNEERSKELLDRLRKLSEDNKRKIDKLVEELKRLADKIKDKEELTRRLKEVVDRVEKSVRDSERMLREVVREDEESVRRSKTKLEDLLRKVEELVRRLEKKVRDHMVLHEYVNAAGITKKKVDELKRKNDEVHRRSREEVKRLLEENRKLLEDLRRMVREITQ

SEQ ID NO: 379 - protein, 185 aa, Artificial Sequence
  Synthetic
SAEELLRTIEKRIEDNHRRLEEILEEIARLIEDMLRTDERIVREIKELLKEVLDRVRRAGVPEEVLERVRRELERLKKELEELRRRSEEKVKELKRRLEEIRRKLEEEHRDLRRKLEELRRDLGRDHMVLHEYVNAAGITLERSLREAEDLLRRVEEVIRTSKKESKDVLEKIERLLRDLERRTR

SEQ ID NO: 380 - protein, 182 aa, Artificial Sequence
  Synthetic
SELEKTLEDLKRHSEENKKKLEEDLRDMERNLKENKDRLKKILEEAEKTLKDLERRFREGDIDERELERVRRKMEEIKKRLDENVERNRRKAEDIKRKLDENVKRSEDRVKEIKEDIRRRVRDKRDHMVLHEYVNAAGITNREIHERVKKALDDIVKELEELHERLKRRLEEILRRIAETVR

SEQ ID NO: 381 - protein, 179 aa, Artificial Sequence
  Synthetic
RLEDEVRKMEKEVREEVKRLEDESRKVLEESRRNLDKLREESKRVLDTVRERIKDLRRRGLDERVLRELLKRVREVHERNRKLLDEVRRASEKVHEDNRRILEEVRKTVKDVVDKLRRVDAKVVRDHMVLHEYVNAAGITEVKKSIEEVKEINRRLNEEVKKTIEEVKEIVKEVTERAK

SEQ ID NO: 382 - protein, 183 aa, Artificial Sequence
  Synthetic
SIEDEIRKLKEDIKRVLDKVRRDNERLKERLDKVLEDIRRSSEDNNRKLEEVLKRIRDKPVDERLVRKVEEAVKRLKEHNEDSTRRVEEVIRRLKEESEESVRKTEKVARDLERELDEVLTRGGRDHMVLHEYVNAAGITRLKREDKEVADRAEKLLREAEEHNKRSLDESRRVLEELDEEIR

SEQ ID NO: 383 - protein, 183 aa, Artificial Sequence
  Synthetic
SIEERVRELMRDLERVLKEIREHSKRVIEEAKRVLEEIERNSERNNKELEEVLDEIRKRPVDETLVREVEEAVKKLKEHNKRSSDTVRDAVRKLVERLKESSDRATELVKDLKRKLEEVLRRGGRDHMVLHEYVNAAGITDLRRNNKEVVDRLKEVLERLKEHNRRSLDESRKVLRELKERIR

SEQ ID NO: 384 - protein, 180 aa, Artificial Sequence
  Synthetic
SVEELLRKLEEVLRKIREENERSLKELRDRAREIVKRNRETNRELEEVIKELEKRLSGADKEKVEELVRRIRRIVERVVEEDRRTVEEIEKIAREVVKRDRDSADRVRRTVEDVLRKATGSEDIRDHMVLHEYVNAAGITESVKKVEEIARDIRRKVDESVKNVEKLLRDVDKKARDRKK

SEQ ID NO: 385 - protein, 185 aa, Artificial Sequence
  Synthetic
SEAEELLKRLEDRAEEILRRLEEILRTSRKLAEDVLRELEKLLRESERRIREVLEELRGIKDKKELEDVIREVEKELDESLERSRELLKDVLKKLDDNLKESERLVEDIDRELAKILEDLKKAGRDHMVLHEYVNAAGITRERLKRIVDENAKIVEDARRALEKIVKENEEILRRLKKELRELRK

SEQ ID NO: 386 - protein, 179 aa, Artificial Sequence
  Synthetic
SEVEELIKRLAKVLKELVDKVRKVIEDTKELLERLKRRSEDHIRKLREVLKEAKDQPIDDEELKEILDRLRKTLEELEEELKKALEDDREEAKRLVDDARRVLKELEEEVREIRERRGESEELDRDHMVLHEYVNAAGITVIKEWERVHREVEELLKRLIDENRKVLDEIRKLLEEKSK

SEQ ID NO: 387 - protein, 184 aa, Artificial Sequence
  Synthetic
DEIRKVVKEITDLLKASNDKNRKVVEEIRDLLRKSKKLADELVERLRALVEDLRRRIDKSGDKETAEDIVRRIIEELKRILKEIEDLARRINREIERLVEEVERDNRDVNRAIEELLKDIARRGRDHMVLHEYVNAAGITRRNEESMRRVKEDADRVSEANKEVLDRVREEVKRLIEEVRETLR

SEQ ID NO: 388 - protein, 176 aa, Artificial Sequence
  Synthetic
STAETVEKKVEEVIRENEKSMRESEEKVDRSTKRIEDVLRRLEETIRKTSDDIAKGVKGERVKEVLEENRRLLEEAKKLVDEVLETNKKLLEDDKRLNEEVSKTLKKLLEEIKSVDTREDATRVRDHMVLHEYVNAAGITETIRRSEELVRRIERVIEEIIKRSEKLLEDVARESK

SEQ ID NO: 389 - protein, 182 aa, Artificial Sequence
  Synthetic
DEVREVAERLRRLVDESRKRNEEVIKESEALVDRVRKTNEEVMKRLRELIDKLEKDIRRSGDKETVEKIIREVLSAIDELLKRVERTNAEISKENARLLDEVRKTNEEISRRLAKLLEDIRRGSRDHMVLHEYVNAAGITNKEVLRKTEEAVKRSTETNKRLLEASKEVADRLRERIKEAAK

SEQ ID NO: 390 - protein, 180 aa, Artificial Sequence
  Synthetic
REVEEMIKELEELLKDLKEKNERASKRNRELVRRLEEENKRVIEELKKLVKELEDLVRSGEDEEVLREVLKRLEEVLERVRALNERVLEAIEKSLEEVKASNEAVKRRLKELLEEAERGVDSEKRDHMVLHEYVNAAGITELDEYTRESIRRAKKEIERLNRETKKVIEEVVKRIEEERK

SEQ ID NO: 391 - protein, 181 aa, Artificial Sequence
  Synthetic
DAVEEAEKLIRKVIADSEKLLRDLADLNAKSIRRSEKLVEDDRRANEDVIRKLEELRRNGGSEEELRALLKEVEDTNRASHETNKRLLDEDRALNKEVHDRNEKLLRDIKRLVEEVAKGIDSEERDHMVLHEYVNAAGITEDSSREIKRLLEESERVMKRSSEDIKRTLDDTRRVVEEVRR

SEQ ID NO: 392 - protein, 183 aa, Artificial Sequence
  Synthetic
SKLEEVEKAVRKVIEDSRRVNEEVNRRSEEVVRELEKVHREVNDASRRVVEKARRVLKGSGDERLAAEVERIIEEIRELNERDRKRVEEIRKEIEDLNRDLNRRSKESEDRLRKLLEDATRGGVRDHMVLHEYVNAAGITENKRRVEDVARKSKELVEDVRRHSEEVVRRVEELVKEVEERVR

SEQ ID NO: 393 - protein, 183 aa, Artificial Sequence
  Synthetic
SDVDRVLEEIRKLLEDLKRHSEKVSEENEDLLRANTELNKRVSEDNERLLEELKRLRERGGISEEDLKRALDRVRKTVETVKEENKRSLEDVRRTVETNKRKLERVVEEIKKLIEDAKRRGSGDRDHMVLHEYVNAAGITTIDRLLETSDRSLEKVEADLRRLNEELDRSLERAERTIRELAK

SEQ ID NO: 394 - protein, 185 aa, Artificial Sequence
  Synthetic
SSVEELLERLRRISEENKRRIEKLLREVEKVLRELKDRHRKLLKRVEEIIRKVKEEIKSGLPEEAVKRVLERVRERVKEVLEEADRLNDEMRRIVTEVEKELDKSDKEVEDAVRDILKKIEEGVRDHMVLHEYVNAAGITLDENRDRSKKVKEEIRRILEDLTRTTERVKREIAKLLKELEDTAR

SEQ ID NO: 395 - protein, 180 aa, Artificial Sequence
  Synthetic
SELEEVLRRIEALVRKAHKENEDVLREIERLVRTAHRLNKKVDDDSAKIAEDLKRGGREDKDKVEEALRRLRELYRRLEEENRRILREIEELVKELEKRNREILKELEDLVADAERKGSDGSEARDHMVLHEYVNAAGITRSLEELRKEVERLKKEVEDSLRELKKSLEEWVKSLEEATR

SEQ ID NO: 396 - protein, 186 aa, Artificial Sequence
  Synthetic
SAEDSIRELLERDERLLEEARKEAKRLNEENERLLERIEETVRRLLEEIKRLLDDIRKKIKGEKLREIEELVRRVKRTIEKLLEEVKKSVEDSSKRIEELLEAVERSVERTKEEIRRLLDEVRKDRDHMVLHEYVNAAGITHDENRRLVKEVIEEVEKLIRDNEKLAEDIEREIRRLLKELDEAAK

SEQ ID NO: 397 - protein, 182 aa, Artificial Sequence
  Synthetic
DEAEKLLKELRDLLEESRKDLERLLKELEDLLEESKRDLERLLEEITELLKRIKETVERRNEREKLEKLLRELKKVVERLKDNLKDNERRNKEAIERVRKKLKDNERENKKVIEDLRAKLKDLEERDHMVLHEYVNAAGITEEARKRLEEVEEKSKKIIDDARRALDRIDKELRRVVEETRK

SEQ ID NO: 398 - protein, 183 aa, Artificial Sequence
  Synthetic
KVEKRLTDLLKTVADEVKRVEDELRETVRESKEVVDKSRRDLERTVEESEKTVKDAERRVSEDLVRRIRKVLDENREVNDRVVKEDERILEENERVNRKVVEKIRDILRKIEEVVRRAAEEIRDERDHMVLHEYVNAAGITLKEEADRVRERSKKILTDLKKSSEDVKRESERMLKKLEDEIR

SEQ ID NO: 399 - protein, 181 aa, Artificial Sequence
  Synthetic
SEVERVLEDLRRLVRDVEEKLRRIIERDRRLVEEVERENRKTIRKIEELLRKVLEELKDISDKKTIERIVREIIKEARDLVRRNHERNREIVDESRRLVEELRRIVEEIIRRLRELLERVKSGELRDHMVLHEYVNAAGITELLKELEKTSRDLKKRLEELDRELKALVEKVERDLEELRK

SEQ ID NO: 400 - protein, 177 aa, Artificial Sequence
  Synthetic
KEEEDLEREVKRLEDKVREDAKKLEEVVKTVEKLVRDDARRNEEVVKEVADRVRRLTERKLDEETLRKVKEDLKRTLERLKRENEKSLEELRDILRRLKKENDDTLKELRDELKRLTDSGASEDVRDHMVLHEYVNAAGITEVEKRLRRIIRELERVSKEVLDRLREIIEKLDRDAT

SEQ ID NO: 401 - protein, 181 aa, Artificial Sequence
  Synthetic
DEERKLEKSLKDVEDTHRRLLEKNDEDLKELRKRVEDMLRRLEDALRRILEDIEEKLKRIEDDETLKRLRKRVKELLDEIRRRLERLEREVDKRLEEIKERNDRHHEEAKKELKRIRDKIRRDGARDHMVLHEYVNAAGITEDLKRSNDEVKELAERLEETIRDLLRRIEEILKEIEERVR

SEQ ID NO: 402 - protein, 177 aa, Artificial Sequence
  Synthetic
SVLEEVRRRVEELLKTVKESVDRSHERSERLIEEVRESLKEVKRRVKELVERVREKGIPEDRVKRIEDKLREELERLERENRKIEEDLKRSNDELRRENERIAERLEELLRELSRDTNDKVARDVRDHMVLHEYVNAAGITRNLEDVERVIRELNKENERVLREVEKKIEKLIRETE

SEQ ID NO: 403 - protein, 183 aa, Artificial Sequence
  Synthetic
KDAEDLERRVRELVEENNRVSKRLAEEVTRLVKENEDKVRELEKEVRDRAKELLDMKRRGEVREEEVKRVLREIEELLREITEHSKEVLKTIEKLLRDSLEHSRRVLEEIERLLETILRKSKDSERDHMVLHEYVNAAGITLRENEKVADELRKRAEKSLEDVKRVVDELRKIVDDVLKRVED

SEQ ID NO: 404 - protein, 183 aa, Artificial Sequence
  Synthetic
SEIEKLVEDVRKLVEDNLRHSEEVHRRNRRLIEENERKIDELEKRVRKLVEELRELAERGEIREEEARKVLEEIKRLLDEIRRHSEEVLKEIERTLKENLKHSEEVLRRIEERLEDIKRKDKDSERDHMVLHEYVNAAGITLDESEKLNRESRKRVTRSLEKVDDLVRELEKLARKVLEEVKT

SEQ ID NO: 405 - protein, 177 aa, Artificial Sequence
  Synthetic
REIEELRKEIETLIRENEELNRRSKETSEELIRRLKKLNRDVEEEVRRLVKDLRDRGAPEEDVRRAEERVKKLIEDNKRHSDEVAKTDKKLNEDSERHTRRVEERLRELLDRLSRSDKDEVVRRVRDHMVLHEYVNAAGITEVNETSRRLATRDAKHTRDVLREIKRLADEIRERTR

SEQ ID NO: 406 - protein, 181 aa, Artificial Sequence
  Synthetic
EEIERALREMRELSRTHKELVEKILRDIAELAKTHERINEDILRKIKKLIDEIADEIRKEDKKEELKRKIDELRRRAEELLKESKEHLKRLEDTVRELIERLKETLKKVEEDLKRILEKLEKSRERDHMVLHEYVNAAGITELLKRVEDEVRRLIRKLEELNRRTEEEVKKLIKKLEDDLK

SEQ ID NO: 407 - protein, 178 aa, Artificial Sequence
  Synthetic
SEIERIERENDRLNEENKKITEDIERELKRLLEENRELSRTIEEELERLLRELRKRNGGREEVLKEVEDRLRRIVEEIRRSDKRLEDIAREVKKRIRESDEELRRVSEEITRRLRKVRDEKTLRERDHMVLHEYVNAAGITKKLLDDLREVSKKNKEDLKRLLREVREVARKVKERAN

SEQ ID NO: 408 - protein, 182 aa, Artificial Sequence
  Synthetic
DEIETVLDEVRRLHEDAKRRLEEMIDEVRKLNEESVRELARVVEEVERLLRTVKEEVERAGLDKGKLEELEERLERVREDVERILREIKRRNEKTLEDSERILEENKERNRTVLKKLKELRDRGSRDHMVLHEYVNAAGITRESVRRVLEKNRRVVEESKRLAEELLRRVKKVVDEIRKRVE

SEQ ID NO: 409 - protein, 178 aa, Artificial Sequence
  Synthetic
SSKDEIRRRVEEVVERSDEIVKRSREHVKTVVDELDRVVKELERKVREVVKKLDKIRKDGGSEETLKRVLDELREILKELKEEVKKVKRKLEKVVKENRDTIREVEERNRKILDELRKRGVEERARDHMVLHEYVNAAGITRVLKESEDIAKEAEDRLKTVLERVERIADEVLKRLTK

SEQ ID NO: 410 - protein, 178 aa, Artificial Sequence
  Synthetic
SKVEKLEEEIARLVERSRRLVEELKKEVTKVKEKVDEIVERSRRHVKKVVEKLRDIKRRGGSEEVLRRVTEELKKVLEDNRRVIEEVLRDLERILEELKRKAEEVTKRNRDDLKRLRDSGVDEEVRDHMVLHEYVNAAGITTVLRDVTEDIKRIAEELKKALEDSTEIIRRAEDELRT

SEQ ID NO: 411 - protein, 177 aa, Artificial Sequence
  Synthetic
DEVEDILRKVEEIVKKSITDARRLLKEAREIVEESIKTAEELLRRNEDIVRKLSEDVKRTTDEEKKKKLEEESRRVLEKTKRDLDRTKDDNRKALEKIRKRVKETEEENREVVDRVRKAGVDKRVRDHMVLHEYVNAAGITEVLKRVEEVLEESKRVNEKVEEDVRRVHEEVRKEIK

SEQ ID NO: 412 - protein, 182 aa, Artificial Sequence
  Synthetic
SDADRVAEELKKLVEDSRRENERVIEESKRLVKENEDRNRELIERLKKLVDKLRDILEKEKDKKTLDDIVREILERLKRLLEKVEDENRKSHEENKRLLEDVKRKNKRISDELKRLLEEIERRNVRDHMVLHEYVNAAGITKRVMEKTEEVAKKSSEDIKRVADETRRRAEELLKEVDELRK

SEQ ID NO: 413 - protein, 186 aa, Artificial Sequence
  Synthetic
SEVDEVRKTLEDLLRRLDEENKDIIRRNKELLDDLDRKVREAIERLKRLLDELRKILEKLKDRETLTRIIEEIEKRARELIKRLRDEIRKIEEESKKSIEDSRKRNDEIRKRLEELIKDLRDKIKRDHMVLHEYVNAAGITREVIERLKEKNKRLEDDSRRVITELRKKLKDLEDRVREEIEELRK

SEQ ID NO: 414 - protein, 183 aa, Artificial Sequence
  Synthetic
SEVDEVLERIKRLLERLAEHSDKVVRDIEKLLDDNRKENERLLDKLRRELKRLEEMRRRGDLREELLERVVREVEKEIRDIKRKNKRSVETVEKLVRDDRKELKRALEDVERLIRELETRLKDKERDHMVLHEYVNAAGITIDELLKKTDEVLKRARETIEDLNRKLDKVLKEVRDKLDRLRD

SEQ ID NO: 415 - protein, 186 aa, Artificial Sequence
  Synthetic
KEVEDLERRVKEILDRMKRLIDENRKKIEKSIRELERLIDENRKEVERVKKELKDLKREGGDDARTLRERVRKIIEDVEEHSRRSTEEVRRIHKENKEHSERSSDEIRELLRRVEELIEEVKRRLRDHMVLHEYVNAAGITREVVRRAHETNERLVDRSRKAVEKAERTNRRLVEEIRKVAEEVRK

SEQ ID NO: 416 - protein, 178 aa, Artificial Sequence
  Synthetic
KAAEEIRKKVEDYKRESEKILEEVEDHSRRSKETLKRLLDDLRRAVEELKRRLEELKRRPRTEEIAKRAEEAVRRAAERIKKVIDDVERHIRENAKELKRLLEEDREASRRLEDEIDKEVKAREVRDHMVLHEYVNAAGITRVLRELAERNKTALEEAERVLRRLKEEIEKVLRKLKK

SEQ ID NO: 417 - protein, 185 aa, Artificial Sequence
  Synthetic
SAEELLRTIEKRIEDNHRRLEEILEEIARLIEDMLRTDERIVREIKELLKEVLDRVRRAGVPEEVLERVRRELERLKKELEELRRRSEEKVKELKRRLEEIRRKLEEEHRDLRRKLEELRRDLGDRDHMVLHEYVNAAGITERSLREAEDLLRRVEEVIRTSKKESKDVLEKIERLLRDLERRTR

SEQ ID NO: 418 - protein, 182 aa, Artificial Sequence
  Synthetic
SELEKTLEDLKRHSEENKKKLEEDLRDMERNLKENKDRLKKILEEAEKTLKDLERRFREGDIDERELERVRRKMEEIKKRLDENVERNRRKAEDIKRKLDENVKRSEDRVKEIKEDIRRRVRDKDRDHMVLHEYVNAAGITREIHERVKKALDDIVKELEELHERLKRRLEEILRRIAETVR

SEQ ID NO: 419 - protein, 186 aa, Artificial Sequence
  Synthetic
SEIEKLIEELRRELEKVKDELERSIEEMDRELDDVRRDSKRLVDEIKRELREVTERTKRGDRPEEVLRKELEDIKRKLRRILEEHHEKIRRIKEKLRRENKRVRDELKRIKDEIDEKVKDVRRKGRDHMVLHEYVNAAGITKRALEELLKKHTRVVERVEKALDELDKELERIVREAEKELDRREK

SEQ ID NO: 420 - protein, 179 aa, Artificial Sequence
  Synthetic
RLEDEVRKMEKEVREEVKRLEDESRKVLEESRRNLDKLREESKRVLDTVRERIKDLRRRGLDERVLRELLKRVREVHERNRKLLDEVRRASEKVHEDNRRILEEVRKTVKDVVDKLRRVDAKVVKRDHMVLHEYVNAAGITVKKSIEEVKEINRRLNEEVKKTIEEVKEIVKEVTERAK

SEQ ID NO: 421 - protein, 183 aa, Artificial Sequence
  Synthetic
SIEDEIRKLKEDIKRVLDKVRRDNERLKERLDKVLEDIRRSSEDNNRKLEEVLKRIRDKPVDERLVRKVEEAVKRLKEHNEDSTRRVEEVIRRLKEESEESVRKTEKVARDLERELDEVLTRGGERDHMVLHEYVNAAGITLKREDKEVADRAEKLLREAEEHNKRSLDESRRVLEELDEEIR

SEQ ID NO: 422 - protein, 183 aa, Artificial Sequence
  Synthetic
SIREKIRELEERLEEVLRRIEENSERVLREAERVLKEIKDNSKRNNEKLERALEEIRKLPVEDELVRRVKELVERLKRHNKKSSEDVERVVRELKEELKRSSEEVKKAVDRLKEELEKVLRDGGERDHMVLHEYVNAAGITLEEHNRRVVERLKRLLEELKKHNEDSLRKSEEVLRKLEEDAR

SEQ ID NO: 423 - protein, 183 aa, Artificial Sequence
  Synthetic
SIEDRIRELEKRLEKVLREIEEHSKKVVREAEKVLREIEENSRRNNKRLEEVLDEIRKRPVDETLVREVEEAVRRLKKHNKDSSDTARKLVEELKKELKESSDRVRKVVEELKDRLRKVLEKGGERDHMVLHEYVNAAGITLKEDNEDVVRRLKEVLKELRKHNKRSLDESEKVLRELRERIR

SEQ ID NO: 424 - protein, 178 aa, Artificial Sequence
  Synthetic
DEARELVKELEDLIREITKTVRRLLEESEELIKRIDDAVDDLRRADEDLNREIKEEIEKGKSKESLEALIERLKESLERVKRTIEKLIRDLERLNEKLRRDVESLVAELEKILSKIKRGGLDERIRDHMVLHEYVNAAGITEILKRSEDETDKLREKAERILEDLERANRRTMDEARR

SEQ ID NO: 425 - protein, 176 aa, Artificial Sequence
  Synthetic
STAETVEKKVEEVIRENEKSMRESEEKVDRSTKRIEDVLRRLEETIRKTSDDIAKGVKGERVKEVLEENRRLLEEAKKLVDEVLETNKKLLEDDKRLNEEVSKTLKKLLEEIKSVDTREDATRVIRDHMVLHEYVNAAGITTIRRSEELVRRIERVIEEIIKRSEKLLEDVARESK

SEQ ID NO: 426 - protein, 186 aa, Artificial Sequence
  Synthetic
SRVEEIIEDLRRLLEEIRKENEDSIRRSKELLDRVKEINDTIIAELERLLKDIEKEVREKGSESEEVKKALRAVLEELEKLLRRVAEINEEVLRRNSKLVEEDERRNREVLKELARLVEELIREIRDHMVLHEYVNAAGITLRDIDKLDRESKEAFRATNEEIAKLDEDTARVAERVKKAIEDLAK

SEQ ID NO: 427 - protein, 180 aa, Artificial Sequence
  Synthetic
REVEEMIKELEELLKDLKEKNERASKRNRELVRRLEEENKRVIEELKKLVKELEDLVRSGEDEEVLREVLKRLEEVLERVRALNERVLEAIEKSLEEVKASNEAVKRRLKELLEEAERGVDSEKLRDHMVLHEYVNAAGITLDEYTRESIRRAKKEIERLNRETKKVIEEVVKRIEEERK

SEQ ID NO: 428 - protein, 181 aa, Artificial Sequence
  Synthetic
DAVEEAEKLIRKVIADSEKLLRDLADLNAKSIRRSEKLVEDDRRANEDVIRKLEELRRNGGSEEELRALLKEVEDTNRASHETNKRLLDEDRALNKEVHDRNEKLLRDIKRLVEEVAKGIDSEELRDHMVLHEYVNAAGITDSSREIKRLLEESERVMKRSSEDIKRTLDDTRRVVEEVRR

SEQ ID NO: 429 - protein, 185 aa, Artificial Sequence
  Synthetic
SEIDEVLTRLRKISKDLNETSDRVNERARKIIDDIKKESKRVNDEAREIVERLKREIDKTRDRDVLRRILKEIEDVARRVKEINEELLARVEKVVREVEEINRELVKRSREAVEAVKRLLDRGVSRDHMVLHEYVNAAGITEEDRKRLEESTRSVRKLLEELKRELEKSTRSVKALVDELRERVR

SEQ ID NO: 430 - protein, 183 aa, Artificial Sequence
  Synthetic
SKLEEVEKAVRKVIEDSRRVNEEVNRRSEEVVRELEKVHREVNDASRRVVEKARRVLKGSGDERLAAEVERIIEEIRELNERDRKRVEEIRKEIEDLNRDLNRRSKESEDRLRKLLEDATRGGVTRDHMVLHEYVNAAGITNKRRVEDVARKSKELVEDVRRHSEEVVRRVEELVKEVEERVR

SEQ ID NO: 431 - protein, 183 aa, Artificial Sequence
  Synthetic
SDVDRVLEEIRKLLEDLKRHSEKVSEENEDLLRANTELNKRVSEDNERLLEELKRLRERGGISEEDLKRALDRVRKTVETVKEENKRSLEDVRRTVETNKRKLERVVEEIKKLIEDAKRRGSGDERDHMVLHEYVNAAGITIDRLLETSDRSLEKVEADLRRLNEELDRSLERAERTIRELAK

SEQ ID NO: 432 - protein, 185 aa, Artificial Sequence
  Synthetic
SSVEELLERLRRISEENKRRIEKLLREVEKVLRELKDRHRKLLKRVEEIIRKVKEEIKSGLPEEAVKRVLERVRERVKEVLEEADRLNDEMRRIVTEVEKELDKSDKEVEDAVRDILKKIEEGVRRDHMVLHEYVNAAGITDENRDRSKKVKEEIRRILEDLTRTTERVKREIAKLLKELEDTAR

SEQ ID NO: 433 - protein, 186 aa, Artificial Sequence
  Synthetic
SAEDSIRELLERDERLLEEARKEAKRLNEENERLLERIEETVRRLLEEIKRLLDDIRKKIKGEKLREIEELVRRVKRTIEKLLEEVKKSVEDSSKRIEELLEAVERSVERTKEEIRRLLDEVRKDRRDHMVLHEYVNAAGITDENRRLVKEVIEEVEKLIRDNEKLAEDIEREIRRLLKELDEAAK

SEQ ID NO: 434 - protein, 182 aa, Artificial Sequence
  Synthetic
DEAEKLLKELRDLLEESRKDLERLLKELEDLLEESKRDLERLLEEITELLKRIKETVERRNEREKLEKLLRELKKVVERLKDNLKDNERRNKEAIERVRKKLKDNERENKKVIEDLRAKLKDLEEVRDHMVLHEYVNAAGITEARKRLEEVEEKSKKIIDDARRALDRIDKELRRVVEETRK

SEQ ID NO: 435 - protein, 184 aa, Artificial Sequence
  Synthetic
SLEEVIKTVRKLLEEVERRLREVVERAERMLEEVRRRTREVSEEAREMLKDVEKALRDKNVSEEIEEKLRKIKEELERDNEKVNRDNERSVETLRRLLDRVRKEVKDIAKELEERLKEVERKSRDDRDHMVLHEYVNAAGITLRELIEKLREEVEKIVDENRKTVEELRRRNEEIVRRLRREIE

SEQ ID NO: 436 - protein, 184 aa, Artificial Sequence
  Synthetic
KLDEVIEEIRKLLRRMEEELRRSVEEIDKLLREVRELLRESSEKVKELLRRVTEELKKRGVPEEVKERLDRLVETLRRLSEETLKELDKLVREVKELSKESLKRLRELVERLRRELEEIKKRGEDERDHMVLHEYVNAAGITLREIVKRNTEIAREVVERAKRIVEKNEKLLKDVVEEAKKIVK

SEQ ID NO: 437 - protein, 187 aa, Artificial Sequence
  Synthetic
SEKERLKEELEKLSKEIEDILRDDKRSDDELRRRLRELLEKDRREDERLNEELKRMLEEARKRVSEDELRAIKKEIEDLNRRNEESLRAIEEKIKRLNDENRKSLEEIRRRLKRLVEEVDELRKRDRDHMVLHEYVNAAGITAEKLKRDIEDNNRKLRKVATELAKEIEDNSEKLREDAKRLSEKIK

SEQ ID NO: 438 - protein, 187 aa, Artificial Sequence
  Synthetic
DEEEELRKRLEKLSKEVRELLRRDEEEDRRLNRELEELLKDHERTVRDLSREVEDLLRKARRKVSEEELTRLRKKLRDLEEESKEALRELRRRVEELNKENKKSLDDLERRLKELEDRAREVEKRDRDHMVLHEYVNAAGITIRKLAEDLKRNTEDLRRVIKELAERLEELNKRLKREIRRLKEELR

SEQ ID NO: 439 - protein, 181 aa, Artificial Sequence
  Synthetic
DEERKLEKSLKDVEDTHRRLLEKNDEDLKELRKRVEDMLRRLEDALRRILEDIEEKLKRIEDDETLKRLRKRVKELLDEIRRRLERLEREVDKRLEEIKERNDRHHEEAKKELKRIRDKIRRDGADRDHMVLHEYVNAAGITDLKRSNDEVKELAERLEETIRDLLRRIEEILKEIEERVR

SEQ ID NO: 440 - protein, 179 aa, Artificial Sequence
  Synthetic
SSKEVADELRKKAEKVLDELRKIIRELERKNEDSLRRTEEIVRRLEEEAERVLRDLVRTRGEDDRLVREVERLLRELKRRLEELIRRSEELIKRSREEVDRVIRTVEKLLEELDRLLRANKGDIEDRDHMVLHEYVNAAGITRKLAKSSDDTVREDEKLVEELRKDVKRIVRKIKKDLE

SEQ ID NO: 441 - protein, 183 aa, Artificial Sequence
  Synthetic
SEIEKLVEDVRKLVEDNLRHSEEVHRRNRRLIEENERKIDELEKRVRKLVEELRELAERGEIREEEARKVLEEIKRLLDEIRRHSEEVLKEIERTLKENLKHSEEVLRRIEERLEDIKRKDKDSERRDHMVLHEYVNAAGITDESEKLNRESRKRVTRSLEKVDDLVRELEKLARKVLEEVKT

SEQ ID NO: 442 - protein, 182 aa, Artificial Sequence
  Synthetic
DEIETVLDEVRRLHEDAKRRLEEMIDEVRKLNEESVRELARVVEEVERLLRTVKEEVERAGLDKGKLEELEERLERVREDVERILREIKRRNEKTLEDSERILEENKERNRTVLKKLKELRDRGSDRDHMVLHEYVNAAGITESVRRVLEKNRRVVEESKRLAEELLRRVKKVVDEIRKRVE

SEQ ID NO: 443 - protein, 182 aa, Artificial Sequence
  Synthetic
SDADRVAEELKKLVEDSRRENERVIEESKRLVKENEDRNRELIERLKKLVDKLRDILEKEKDKKTLDDIVREILERLKRLLEKVEDENRKSHEENKRLLEDVKRKNKRISDELKRLLEEIERRNVDRDHMVLHEYVNAAGITRVMEKTEEVAKKSSEDIKRVADETRRRAEELLKEVDELRK

SEQ ID NO: 444 - protein, 186 aa, Artificial Sequence
  Synthetic
SEVDEVRKTLEDLLRRLDEENKDIIRRNKELLDDLDRKVREAIERLKRLLDELRKILEKLKDRETLTRIIEEIEKRARELIKRLRDEIRKIEEESKKSIEDSRKRNDEIRKRLEELIKDLRDKIKDRDHMVLHEYVNAAGITEVIERLKEKNKRLEDDSRRVITELRKKLKDLEDRVREEIEELRK

SEQ ID NO: 445 - protein, 183 aa, Artificial Sequence
  Synthetic
SEVDEVLERIKRLLERLAEHSDKVVRDIEKLLDDNRKENERLLDKLRRELKRLEEMRRRGDLREELLERVVREVEKEIRDIKRKNKRSVETVEKLVRDDRKELKRALEDVERLIRELETRLKDKEERDHMVLHEYVNAAGITDELLKKTDEVLKRARETIEDLNRKLDKVLKEVRDKLDRLRD

SEQ ID NO: 446 - protein, 184 aa, Artificial Sequence
  Synthetic
ELIKKARKDVEEVRERSERLVDELRKRNKKLADESRRLIDKLRKDVEKVLREIEDLLRKRRTKDVLKEIEDLVRELERELRRVVKESSDKVRKLIRENEKVVEESSRLFRDLVEKLRRVVEERNDKRDHMVLHEYVNAAGITNEKSERDVREINKESERVNEETEREVEDAIRKLREVLRRAKK

SEQ ID NO: 447 - protein, 179 aa, Artificial Sequence
  Synthetic
DEAEKAKRDSEKVVEDNRKMLEDSTRRAERLNEENKKELKKSTEEAEKILREIDETKRRGTDDEVVKDLIRRVEELLERSRKKLEDLTRDNERVLDESRRRLEKLIRDNERIVKDLTDRVVRVDEVRDHMVLHEYVNAAGITEVLRRNEEIIRRSIEDLERVLDRNRRELEDVIRRLKE

SEQ ID NO: 448 - protein, 179 aa, Artificial Sequence
  Synthetic
RLEDEVRKMEKEVREEVKRLEDESRKVLEESRRNLDKLREESKRVLDTVRERIKDLRRRGLDERVLRELLKRVREVHERNRKLLDEVRRASEKVHEDNRRILEEVRKTVKDVVDKLRRVDAKVVKERDHMVLHEYVNAAGITKKSIEEVKEINRRLNEEVKKTIEEVKEIVKEVTERAK

SEQ ID NO: 449 - protein, 183 aa, Artificial Sequence
  Synthetic
SIEDEIRKLKEDIKRVLDKVRRDNERLKERLDKVLEDIRRSSEDNNRKLEEVLKRIRDKPVDERLVRKVEEAVKRLKEHNEDSTRRVEEVIRRLKEESEESVRKTEKVARDLERELDEVLTRGGEERDHMVLHEYVNAAGITKREDKEVADRAEKLLREAEEHNKRSLDESRRVLEELDEEIR

SEQ ID NO: 450 - protein, 183 aa, Artificial Sequence
  Synthetic
SIREKIRELEERLEEVLRRIEENSERVLREAERVLKEIKDNSKRNNEKLERALEEIRKLPVEDELVRRVKELVERLKRHNKKSSEDVERVVRELKEELKRSSEEVKKAVDRLKEELEKVLRDGGERRDHMVLHEYVNAAGITEEHNRRVVERLKRLLEELKKHNEDSLRKSEEVLRKLEEDAR

SEQ ID NO: 451 - protein, 183 aa, Artificial Sequence
  Synthetic
SIEERVRELMRDLERVLKEIREHSKRVIEEAKRVLEEIERNSERNNKELEEVLDEIRKRPVDETLVREVEEAVKKLKEHNKRSSDTVRDAVRKLVERLKESSDRATELVKDLKRKLEEVLRRGGEKRDHMVLHEYVNAAGITRRNNKEVVDRLKEVLERLKEHNRRSLDESRKVLRELKERIR

SEQ ID NO: 452 - protein, 178 aa, Artificial Sequence
  Synthetic
DEARELVKELEDLIREITKTVRRLLEESEELIKRIDDAVDDLRRADEDLNREIKEEIEKGKSKESLEALIERLKESLERVKRTIEKLIRDLERLNEKLRRDVESLVAELEKILSKIKRGGLDERILRDHMVLHEYVNAAGITILKRSEDETDKLREKAERILEDLERANRRTMDEARR

SEQ ID NO: 453 - protein, 178 aa, Artificial Sequence; identical to SEQ ID NO: 452
  Synthetic

SEQ ID NO: 454 - protein, 184 aa, Artificial Sequence
  Synthetic
DEIRKVVKEITDLLKASNDKNRKVVEEIRDLLRKSKKLADELVERLRALVEDLRRRIDKSGDKETAEDIVRRIIEELKRILKEIEDLARRINREIERLVEEVERDNRDVNRAIEELLKDIARRGGSRDHMVLHEYVNAAGITNEESMRRVKEDADRVSEANKEVLDRVREEVKRLIEEVRETLR

SEQ ID NO: 455 - protein, 186 aa, Artificial Sequence
  Synthetic
SRVEEIIEDLRRLLEEIRKENEDSIRRSKELLDRVKEINDTIIAELERLLKDIEKEVREKGSESEEVKKALRAVLEELEKLLRRVAEINEEVLRRNSKLVEEDERRNREVLKELARLVEELIREIGRDHMVLHEYVNAAGITRDIDKLDRESKEAFRATNEEIAKLDEDTARVAERVKKAIEDLAK

SEQ ID NO: 456 - protein, 181 aa, Artificial Sequence
  Synthetic
DAVEEAEKLIRKVIADSEKLLRDLADLNAKSIRRSEKLVEDDRRANEDVIRKLEELRRNGGSEEELRALLKEVEDTNRASHETNKRLLDEDRALNKEVHDRNEKLLRDIKRLVEEVAKGIDSEELLRDHMVLHEYVNAAGITSSREIKRLLEESERVMKRSSEDIKRTLDDTRRVVEEVRR

SEQ ID NO: 457 - protein, 177 aa, Artificial Sequence
  Synthetic
SSDEVLKEIEEIIRRLEAEVRRVNAEVNASTEDLAREVEEVLRATNELIEELERRVTGTEELKRVIDELRDRDRKVRRRVERVIEESAKRDDESRKRLTRAVEKLRADLKKLADDGVPEEALSKAIRDHMVLHEYVNAAGITWRDRNKELVDRLSEELKEWLKDVERVLKELTDKDR

SEQ ID NO: 458 - protein, 185 aa, Artificial Sequence
  Synthetic
SEIDEVLTRLRKISKDLNETSDRVNERARKIIDDIKKESKRVNDEAREIVERLKREIDKTRDRDVLRRILKEIEDVARRVKEINEELLARVEKVVREVEEINRELVKRSREAVEAVKRLLDRGVSDRDHMVLHEYVNAAGITEDRKRLEESTRSVRKLLEELKRELEKSTRSVKALVDELRERVR

SEQ ID NO: 459 - protein, 181 aa, Artificial Sequence
  Synthetic
SEIETVRREIEKILDDLRRTVKRIEDEVRKIHEDLRRSLEDSKRNIEEILKDLERAARRDGLDKKVEDDMRKLVEDLKRKHDKLRADNEAVTKELKDRLKKLEDDLARAIEELRRRLDKGLDKEDIRDHMVLHEYVNAAGITDLKELLERYEEIVRRIKELLKDLNREAEEVVRRLKEELR

SEQ ID NO: 460 - protein, 183 aa, Artificial Sequence
  Synthetic
SDVDRVLEEIRKLLEDLKRHSEKVSEENEDLLRANTELNKRVSEDNERLLEELKRLRERGGISEEDLKRALDRVRKTVETVKEENKRSLEDVRRTVETNKRKLERVVEEIKKLIEDAKRRGSGDEERDHMVLHEYVNAAGITDRLLETSDRSLEKVEADLRRLNEELDRSLERAERTIRELAK

SEQ ID NO: 461 - protein, 177 aa, Artificial Sequence
  Synthetic
SKEDRLREELKKLLARLAEEIERLKRALEESNKDLKRTIDASEKHLRDVNEDVKRGGVSEELLRELERSTAENKERAKELLKRHEDLVRKVEKELADLLRRLEEIVARVDEALKRGISEEELDKLLRDHMVLHEYVNAAGITLLKRVEKLTEDAKRDLERSNREHKELADRIKETAR

SEQ ID NO: 462 - protein, 185 aa, Artificial Sequence
  Synthetic
SSVEELLERLRRISEENKRRIEKLLREVEKVLRELKDRHRKLLKRVEEIIRKVKEEIKSGLPEEAVKRVLERVRERVKEVLEEADRLNDEMRRIVTEVEKELDKSDKEVEDAVRDILKKIEEGVRDRDHMVLHEYVNAAGITENRDRSKKVKEEIRRILEDLTRTTERVKREIAKLLKELEDTAR

SEQ ID NO: 463 - protein, 186 aa, Artificial Sequence
  Synthetic
SAEDSIRELLERDERLLEEARKEAKRLNEENERLLERIEETVRRLLEEIKRLLDDIRKKIKGEKLREIEELVRRVKRTIEKLLEEVKKSVEDSSKRIEELLEAVERSVERTKEEIRRLLDEVRKDRKRDHMVLHEYVNAAGITENRRLVKEVIEEVEKLIRDNEKLAEDIEREIRRLLKELDEAAK

SEQ ID NO: 464 - protein, 182 aa, Artificial Sequence
  Synthetic
DEAEKLLKELRDLLEESRKDLERLLKELEDLLEESKRDLERLLEEITELLKRIKETVERRNEREKLEKLLRELKKVVERLKDNLKDNERRNKEAIERVRKKLKDNERENKKVIEDLRAKLKDLEEVKRDHMVLHEYVNAAGITARKRLEEVEEKSKKIIDDARRALDRIDKELRRVVEETRK

SEQ ID NO: 465 - protein, 182 aa, Artificial Sequence
  Synthetic
RVEDALRKLLDDVRRLVEEAERRLRTSNDKSRRLVEEAKRRLEESNERSEKLVRDVRRRIRDEDVKRVLEELLKRDHDVVRRVLERIDEMLERNSRLVKRVLEDIRRLLKRVREVVERIKRVRSKVVRDHMVLHEYVNAAGITIIEDVLRASEDTIRRLEEIIRKVEEDSKRIIEEIERAAR

SEQ ID NO: 466 - protein, 183 aa, Artificial Sequence
  Synthetic
KVEKRLTDLLKTVADEVKRVEDELRETVRESKEVVDKSRRDLERTVEESEKTVKDAERRVSEDLVRRIRKVLDENREVNDRVVKEDERILEENERVNRKVVEKIRDILRKIEEVVRRAAEEIRDEEVRDHMVLHEYVNAAGITEEADRVRERSKKILTDLKKSSEDVKRESERMLKKLEDEIR

SEQ ID NO: 467 - protein, 187 aa, Artificial Sequence
  Synthetic
SEKERLKEELEKLSKEIEDILRDDKRSDDELRRRLRELLEKDRREDERLNEELKRMLEEARKRVSEDELRAIKKEIEDLNRRNEESLRAIEEKIKRLNDENRKSLEEIRRRLKRLVEEVDELRKRDNRDHMVLHEYVNAAGITEKLKRDIEDNNRKLRKVATELAKEIEDNSEKLREDAKRLSEKIK

SEQ ID NO: 468 - protein, 187 aa, Artificial Sequence
  Synthetic
DEEEELRKRLEKLSKEVRELLRRDEEEDRRLNRELEELLKDHERTVRDLSREVEDLLRKARRKVSEEELTRLRKKLRDLEEESKEALRELRRRVEELNKENKKSLDDLERRLKELEDRAREVEKRDRRDHMVLHEYVNAAGITRKLAEDLKRNTEDLRRVIKELAERLEELNKRLKREIRRLKEELR

SEQ ID NO: 469 - protein, 181 aa, Artificial Sequence
  Synthetic
DEEETLEDVLRELEERVEKLLRDLTRDLERVEKEHKELLKRNKEAIDEIEKRIEELLKRIEDDEKLRRLKEEVRKLVEESRERNKRHHKEVREVLERIRELLERLEKELRRALEEIRDKIRKDGATDRDHMVLHEYVNAAGITIRDLERKVRKLERDIRENIKKNHREVREILRKIEEDVR

SEQ ID NO: 470 - protein, 183 aa, Artificial Sequence
  Synthetic
SEIEKLVEDVRKLVEDNLRHSEEVHRRNRRLIEENERKIDELEKRVRKLVEELRELAERGEIREEEARKVLEEIKRLLDEIRRHSEEVLKEIERTLKENLKHSEEVLRRIEERLEDIKRKDKDSERVRDHMVLHEYVNAAGITESEKLNRESRKRVTRSLEKVDDLVRELEKLARKVLEEVKT

SEQ ID NO: 471 - protein, 181 aa, Artificial Sequence
  Synthetic
EEIERALREMRELSRTHKELVEKILRDIAELAKTHERINEDILRKIKKLIDEIADEIRKEDKKEELKRKIDELRRRAEELLKESKEHLKRLEDTVRELIERLKETLKKVEEDLKRILEKLEKSRELDRDHMVLHEYVNAAGITLKRVEDEVRRLIRKLEELNRRTEEEVKKLIKKLEDDLK

SEQ ID NO: 472 - protein, 183 aa, Artificial Sequence
  Synthetic
SEVDEVLERIKRLLERLAEHSDKVVRDIEKLLDDNRKENERLLDKLRRELKRLEEMRRRGDLREELLERVVREVEKEIRDIKRKNKRSVETVEKLVRDDRKELKRALEDVERLIRELETRLKDKEELRDHMVLHEYVNAAGITELLKKTDEVLKRARETIEDLNRKLDKVLKEVRDKLDRLRD

SEQ ID NO: 473 - protein, 185 aa, Artificial Sequence
  Synthetic
DDIERLKREIERLLKEAEKISRDNEERSKELLDRLRKLSEDNKRKIDKLVEELKRLADKIKDKEELTRRLKEVVDRVEKSVRDSERMLREVVREDEESVRRSKTKLEDLLRKVEELVRRLEKKVTDERDHMVLHEYVNAAGITVDELKRKNDEVHRRSREEVKRLLEENRKLLEDLRRMVREITQ

SEQ ID NO: 474 - protein, 184 aa, Artificial Sequence
  Synthetic
ELIKKARKDVEEVRERSERLVDELRKRNKKLADESRRLIDKLRKDVEKVLREIEDLLRKRRTKDVLKEIEDLVRELERELRRVVKESSDKVRKLIRENEKVVEESSRLFRDLVEKLRRVVEERNDKKRDHMVLHEYVNAAGITEKSERDVREINKESERVNEETEREVEDAIRKLREVLRRAKK

SEQ ID NO: 475 - protein, 186 aa, Artificial Sequence
  Synthetic
KEVEDLERTVRTILKRMRELITRNEEEIRRSIEELKKLLKENKDTVRRILEEMKELKKEGGDDKKRLVEEIKRLLDELRENSKRSSDRAKEIHERNKRHSEESSRTIEKLLKELRDLVRDVERKLRDRDHMVLHEYVNAAGITVVREADERNKRLTKRSKEVLDEVHRANEEALKEVEEVVRRVTK

SEQ ID NO: 476 - protein, 178 aa, Artificial Sequence
  Synthetic
KAAEEIRKKVEDYKRESEKILEEVEDHSRRSKETLKRLLDDLRRAVEELKRRLEELKRRPRTEEIAKRAEEAVRRAAERIKKVIDDVERHIRENAKELKRLLEEDREASRRLEDEIDKEVKAREVADRDHMVLHEYVNAAGITLRELAERNKTALEEAERVLRRLKEEIEKVLRKLKK

SEQ ID NO: 477 - protein, 185 aa, Artificial Sequence
  Synthetic
SAEELLRTIEKRIEDNHRRLEEILEEIARLIEDMLRTDERIVREIKELLKEVLDRVRRAGVPEEVLERVRRELERLKKELEELRRRSEEKVKELKRRLEEIRRKLEEEHRDLRRKLEELRRDLGDKERDHMVLHEYVNAAGITSLREAEDLLRRVEEVIRTSKKESKDVLEKIERLLRDLERRTR

SEQ ID NO: 478 - protein, 182 aa, Artificial Sequence
  Synthetic
DLERRLDELLKRIEDRVRELVRTLEESLRELERRVREIIRRLEEHLRRIEKMVRDLKRANKPDKAVKDDVRRLRENADRLNKRVREELKKLREDVKRVNEDVKRELDKLAEEAKDMLRKLREAGIDERDHMVLHEYVNAAGITIEEVSERHKREVDRLEREIEEVSREHKERVEKLLREIER

SEQ ID NO: 479 - protein, 179 aa, Artificial Sequence
  Synthetic
RLEDEVRKMEKEVREEVKRLEDESRKVLEESRRNLDKLREESKRVLDTVRERIKDLRRRGLDERVLRELLKRVREVHERNRKLLDEVRRASEKVHEDNRRILEEVRKTVKDVVDKLRRVDAKVVKELRDHMVLHEYVNAAGITKSIEEVKEINRRLNEEVKKTIEEVKEIVKEVTERAK

SEQ ID NO: 480 - protein, 185 aa, Artificial Sequence
  Synthetic
SEAEELLKRLEDRAEEILRRLEEILRTSRKLAEDVLRELEKLLRESERRIREVLEELRGIKDKKELEDVIREVEKELDESLERSRELLKDVLKKLDDNLKESERLVEDIDRELAKILEDLKKAGVPKRDHMVLHEYVNAAGITLKRIVDENAKIVEDARRALEKIVKENEEILRRLKKELRELRK

SEQ ID NO: 481 - protein, 184 aa, Artificial Sequence
  Synthetic
DDLERAREEVADLIRKHEEKTRRILEESRRLNERHRELSARILDEIRKLAERIEELIKRERGKDELRRKVEDLEARVEDLIRRLEEHLRRVHDKDRRLIEDLRRHLKRVVEELKRLIDELRRGVPKERDHMVLHEYVNAAGITREKNREVEKRARDSNRDLKRTNDEIAKEVRELIKKLREDLK

SEQ ID NO: 482 - protein, 178 aa, Artificial Sequence
  Synthetic
DEARELVKELEDLIREITKTVRRLLEESEELIKRIDDAVDDLRRADEDLNREIKEEIEKGKSKESLEALIERLKESLERVKRTIEKLIRDLERLNEKLRRDVESLVAELEKILSKIKRGGLDERILRRDHMVLHEYVNAAGITLKRSEDETDKLREKAERILEDLERANRRTMDEARR

SEQ ID NO: 483 - protein, 182 aa, Artificial Sequence
  Synthetic
DEVREVAERLRRLVDESRKRNEEVIKESEALVDRVRKTNEEVMKRLRELIDKLEKDIRRSGDKETVEKIIREVLSAIDELLKRVERTNAEISKENARLLDEVRKTNEEISRRLAKLLEDIRRGSGDARDHMVLHEYVNAAGITVLRKTEEAVKRSTETNKRLLEASKEVADRLRERIKEAAK

SEQ ID NO: 484 - protein, 186 aa, Artificial Sequence
  Synthetic
SRVEEIIEDLRRLLEEIRKENEDSIRRSKELLDRVKEINDTIIAELERLLKDIEKEVREKGSESEEVKKALRAVLEELEKLLRRVAEINEEVLRRNSKLVEEDERRNREVLKELARLVEELIREIGDRDHMVLHEYVNAAGITDIDKLDRESKEAFRATNEEIAKLDEDTARVAERVKKAIEDLAK

SEQ ID NO: 485 - protein, 185 aa, Artificial Sequence
  Synthetic
SEIDEVLTRLRKISKDLNETSDRVNERARKIIDDIKKESKRVNDEAREIVERLKREIDKTRDRDVLRRILKEIEDVARRVKEINEELLARVEKVVREVEEINRELVKRSREAVEAVKRLLDRGVSDERDHMVLHEYVNAAGITDRKRLEESTRSVRKLLEELKRELEKSTRSVKALVDELRERVR

SEQ ID NO: 486 - protein, 178 aa, Artificial Sequence
  Synthetic
DAAERAKEKLDKILEDLRDVVRASKENLDRLHAENAETLERSKANLDRLLEKVKKDGVPEELLKELERIIRDLKRKHAKLLEDHRKIIEELKREHDRLLKEAEEIVRRIKDELEKGSDDERDIERILRDHMVLHEYVNAAGITLNREVERVSRDTKKKSKELNEELKAVLDEVKRKAD

SEQ ID NO: 487 - protein, 183 aa, Artificial Sequence
  Synthetic
SKLEEVEKAVRKVIEDSRRVNEEVNRRSEEVVRELEKVHREVNDASRRVVEKARRVLKGSGDERLAAEVERIIEEIRELNERDRKRVEEIRKEIEDLNRDLNRRSKESEDRLRKLLEDATRGGVTKERDHMVLHEYVNAAGITRRVEDVARKSKELVEDVRRHSEEVVRRVEELVKEVEERVR

SEQ ID NO: 488 - protein, 183 aa, Artificial Sequence
  Synthetic
SDVDRVLEEIRKLLEDLKRHSEKVSEENEDLLRANTELNKRVSEDNERLLEELKRLRERGGISEEDLKRALDRVRKTVETVKEENKRSLEDVRRTVETNKRKLERVVEEIKKLIEDAKRRGSGDEEARDHMVLHEYVNAAGITRLLETSDRSLEKVEADLRRLNEELDRSLERAERTIRELAK

SEQ ID NO: 489 - protein, 185 aa, Artificial Sequence
  Synthetic
SSVEELLERLRRISEENKRRIEKLLREVEKVLRELKDRHRKLLKRVEEIIRKVKEEIKSGLPEEAVKRVLERVRERVKEVLEEADRLNDEMRRIVTEVEKELDKSDKEVEDAVRDILKKIEEGVRDRRDHMVLHEYVNAAGITNRDRSKKVKEEIRRILEDLTRTTERVKREIAKLLKELEDTAR

SEQ ID NO: 490 - protein, 186 aa, Artificial Sequence
  Synthetic
SAEDSIRELLERDERLLEEARKEAKRLNEENERLLERIEETVRRLLEEIKRLLDDIRKKIKGEKLREIEELVRRVKRTIEKLLEEVKKSVEDSSKRIEELLEAVERSVERTKEEIRRLLDEVRKDRKERDHMVLHEYVNAAGITNRRLVKEVIEEVEKLIRDNEKLAEDIEREIRRLLKELDEAAK

SEQ ID NO: 491 - protein, 182 aa, Artificial Sequence
  Synthetic
RVEDALRKLLDDVRRLVEEAERRLRTSNDKSRRLVEEAKRRLEESNERSEKLVRDVRRRIRDEDVKRVLEELLKRDHDVVRRVLERIDEMLERNSRLVKRVLEDIRRLLKRVREVVERIKRVRSKVVERDHMVLHEYVNAAGITIEDVLRASEDTIRRLEEIIRKVEEDSKRIIEEIERAAR

SEQ ID NO: 492 - protein, 184 aa, Artificial Sequence
  Synthetic
SLEEVIKTVRKLLEEVERRLREVVERAERMLEEVRRRTREVSEEAREMLKDVEKALRDKNVSEEIEEKLRKIKEELERDNEKVNRDNERSVETLRRLLDRVRKEVKDIAKELEERLKEVERKSRDDRIRDHMVLHEYVNAAGITELIEKLREEVEKIVDENRKTVEELRRRNEEIVRRLRREIE

SEQ ID NO: 493 - protein, 179 aa, Artificial Sequence
  Synthetic
SSKEVADELRKKAEKVLDELRKIIRELERKNEDSLRRTEEIVRRLEEEAERVLRDLVRTRGEDDRLVREVERLLRELKRRLEELIRRSEELIKRSREEVDRVIRTVEKLLEELDRLLRANKGDIEDLRRDHMVLHEYVNAAGITLAKSSDDTVREDEKLVEELRKDVKRIVRKIKKDLE

SEQ ID NO: 494 - protein, 183 aa, Artificial Sequence
  Synthetic
SEIEKLVEDVRKLVEDNLRHSEEVHRRNRRLIEENERKIDELEKRVRKLVEELRELAERGEIREEEARKVLEEIKRLLDEIRRHSEEVLKEIERTLKENLKHSEEVLRRIEERLEDIKRKDKDSERVRRDHMVLHEYVNAAGITSEKLNRESRKRVTRSLEKVDDLVRELEKLARKVLEEVKT

SEQ ID NO: 495 - protein, 181 aa, Artificial Sequence
  Synthetic
EEIERALREMRELSRTHKELVEKILRDIAELAKTHERINEDILRKIKKLIDEIADEIRKEDKKEELKRKIDELRRRAEELLKESKEHLKRLEDTVRELIERLKETLKKVEEDLKRILEKLEKSRELDERDHMVLHEYVNAAGITKRVEDEVRRLIRKLEELNRRTEEEVKKLIKKLEDDLK

SEQ ID NO: 496 - protein, 186 aa, Artificial Sequence
  Synthetic
SEVDEVRKTLEDLLRRLDEENKDIIRRNKELLDDLDRKVREAIERLKRLLDELRKILEKLKDRETLTRIIEEIEKRARELIKRLRDEIRKIEEESKKSIEDSRKRNDEIRKRLEELIKDLRDKIKDSERDHMVLHEYVNAAGITIERLKEKNKRLEDDSRRVITELRKKLKDLEDRVREEIEELRK

SEQ ID NO: 497 - protein, 183 aa, Artificial Sequence
  Synthetic
SEVDEVLERIKRLLERLAEHSDKVVRDIEKLLDDNRKENERLLDKLRRELKRLEEMRRRGDLREELLERVVREVEKEIRDIKRKNKRSVETVEKLVRDDRKELKRALEDVERLIRELETRLKDKEELRRDHMVLHEYVNAAGITLLKKTDEVLKRARETIEDLNRKLDKVLKEVRDKLDRLRD

SEQ ID NO: 498 - protein, 185 aa, Artificial Sequence
  Synthetic
DDIERLKREIERLLKEAEKISRDNEERSKELLDRLRKLSEDNKRKIDKLVEELKRLADKIKDKEELTRRLKEVVDRVEKSVRDSERMLREVVREDEESVRRSKTKLEDLLRKVEELVRRLEKKVTDEKRDHMVLHEYVNAAGITDELKRKNDEVHRRSREEVKRLLEENRKLLEDLRRMVREITQ

SEQ ID NO: 499 - protein, 186 aa, Artificial Sequence
  Synthetic
KEVEDLERRVKEILDRMKRLIDENRKKIEKSIRELERLIDENRKEVERVKKELKDLKREGGDDARTLRERVRKIIEDVEEHSRRSTEEVRRIHKENKEHSERSSDEIRELLRRVEELIEEVKRRLRDKRDHMVLHEYVNAAGITVRRAHETNERLVDRSRKAVEKAERTNRRLVEEIRKVAEEVRK

SEQ ID NO: 500 - protein, 186 aa, Artificial Sequence
  Synthetic
DEIRELEERVRRILDELRRLVERNREVIERSIRELEKLLDRNRRKVEEILRRIDDLTRRGGDDKKTMLDDVRRLLREAEDHSRRSSETAKRIHRENEEHSKDSSRKVRKLIEELRELAKKVEKEITDERDHMVLHEYVNAAGITMREVDRANRELTKTSKKVLEDVDRTNRRLVKEVRDVVERARK

SEQ ID NO: 501 - protein, 186 aa, Artificial Sequence
  Synthetic
KEVEDLERTVRTILKRMRELITRNEEEIRRSIEELKKLLKENKDTVRRILEEMKELKKEGGDDKKRLVEEIKRLLDELRENSKRSSDRAKEIHERNKRHSEESSRTIEKLLKELRDLVRDVERKLRDERDHMVLHEYVNAAGITVREADERNKRLTKRSKEVLDEVHRANEEALKEVEEVVRRVTK

SEQ ID NO: 502 - protein, 179 aa, Artificial Sequence
  Synthetic
REAEEVERKVEELNRRNRKVLDDARKESEEVVRRNREFLRRLEERVRTILRELDKRKRDGTSEEVIKRLIDRVRKILEDIRRLVDELIKRNERIVEKLTRIVEELIRRNKKLLEDIRRELVKVDEVLRRDHMVLHEYVNAAGITLRELERIHRELIKELKEVLKRLEKDAKEVIERLRT

SEQ ID NO: 503 - protein, 186 aa, Artificial Sequence
  Synthetic
SEIEKLIEELRRELEKVKDELERSIEEMDRELDDVRRDSKRLVDEIKRELREVTERTKRGDRPEEVLRKELEDIKRKLRRILEEHHEKIRRIKEKLRRENKRVRDELKRIKDEIDEKVKDVRRKGADERDHMVLHEYVNAAGITLEELLKKHTRVVERVEKALDELDKELERIVREAEKELDRREK

SEQ ID NO: 504 - protein, 179 aa, Artificial Sequence
  Synthetic
RLEDEVRKMEKEVREEVKRLEDESRKVLEESRRNLDKLREESKRVLDTVRERIKDLRRRGLDERVLRELLKRVREVHERNRKLLDEVRRASEKVHEDNRRILEEVRKTVKDVVDKLRRVDAKVVKELIRDHMVLHEYVNAAGITSIEEVKEINRRLNEEVKKTIEEVKEIVKEVTERAK

SEQ ID NO: 505 - protein, 183 aa, Artificial Sequence
  Synthetic
SIEDEIRKLKEDIKRVLDKVRRDNERLKERLDKVLEDIRRSSEDNNRKLEEVLKRIRDKPVDERLVRKVEEAVKRLKEHNEDSTRRVEEVIRRLKEESEESVRKTEKVARDLERELDEVLTRGGEERVRDHMVLHEYVNAAGITEDKEVADRAEKLLREAEEHNKRSLDESRRVLEELDEEIR

SEQ ID NO: 506 - protein, 183 aa, Artificial Sequence
  Synthetic
SIREKIRELEERLEEVLRRIEENSERVLREAERVLKEIKDNSKRNNEKLERALEEIRKLPVEDELVRRVKELVERLKRHNKKSSEDVERVVRELKEELKRSSEEVKKAVDRLKEELEKVLRDGGEREVRDHMVLHEYVNAAGITHNRRVVERLKRLLEELKKHNEDSLRKSEEVLRKLEEDAR

SEQ ID NO: 507 - protein, 182 aa, Artificial Sequence
  Synthetic
SIEDLVRELKKKVDEVAEDLRRKVREALERSRENIDRLKKHSEENLRRSEEVVDKLRKETREEEVKDILRRVLELSKRIVEESKEILDRVLELSKKVVDDIEEIIRRVEETVKEVLTRLSRVDDKVVKRDHMVLHEYVNAAGITVEKLIRELEDINRKVNERNRRLAEESRKILDEVEKRVR

SEQ ID NO: 508 - protein, 185 aa, Artificial Sequence
  Synthetic
SEAEELLKRLEDRAEEILRRLEEILRTSRKLAEDVLRELEKLLRESERRIREVLEELRGIKDKKELEDVIREVEKELDESLERSRELLKDVLKKLDDNLKESERLVEDIDRELAKILEDLKKAGVPKERDHMVLHEYVNAAGITKRIVDENAKIVEDARRALEKIVKENEEILRRLKKELRELRK

SEQ ID NO: 509 - protein, 179 aa, Artificial Sequence
  Synthetic
SEVEELIKRLAKVLKELVDKVRKVIEDTKELLERLKRRSEDHIRKLREVLKEAKDQPIDDEELKEILDRLRKTLEELEEELKKALEDDREEAKRLVDDARRVLKELEEEVREIRERRGESEELDRRIERDHMVLHEYVNAAGITWERVHREVEELLKRLIDENRKVLDEIRKLLEEKSK

SEQ ID NO: 510 - protein, 184 aa, Artificial Sequence
  Synthetic
DEIRKVVKEITDLLKASNDKNRKVVEEIRDLLRKSKKLADELVERLRALVEDLRRRIDKSGDKETAEDIVRRIIEELKRILKEIEDLARRINREIERLVEEVERDNRDVNRAIEELLKDIARRGGSEDRDHMVLHEYVNAAGITESMRRVKEDADRVSEANKEVLDRVREEVKRLIEEVRETLR

SEQ ID NO: 511 - protein, 182 aa, Artificial Sequence
  Synthetic
DEVREVAERLRRLVDESRKRNEEVIKESEALVDRVRKTNEEVMKRLRELIDKLEKDIRRSGDKETVEKIIREVLSAIDELLKRVERTNAEISKENARLLDEVRKTNEEISRRLAKLLEDIRRGSGDAERDHMVLHEYVNAAGITLRKTEEAVKRSTETNKRLLEASKEVADRLRERIKEAAK

SEQ ID NO: 512 - protein, 186 aa, Artificial Sequence
  Synthetic
SRVEEIIEDLRRLLEEIRKENEDSIRRSKELLDRVKEINDTIIAELERLLKDIEKEVREKGSESEEVKKALRAVLEELEKLLRRVAEINEEVLRRNSKLVEEDERRNREVLKELARLVEELIREIGDERDHMVLHEYVNAAGITIDKLDRESKEAFRATNEEIAKLDEDTARVAERVKKAIEDLAK

SEQ ID NO: 513 - protein, 181 aa, Artificial Sequence
  Synthetic
DAVEEAEKLIRKVIADSEKLLRDLADLNAKSIRRSEKLVEDDRRANEDVIRKLEELRRNGGSEEELRALLKEVEDTNRASHETNKRLLDEDRALNKEVHDRNEKLLRDIKRLVEEVAKGIDSEELLRRRDHMVLHEYVNAAGITREIKRLLEESERVMKRSSEDIKRTLDDTRRVVEEVRR

SEQ ID NO: 514 - protein, 185 aa, Artificial Sequence
  Synthetic
SEIDEVLTRLRKISKDLNETSDRVNERARKIIDDIKKESKRVNDEAREIVERLKREIDKTRDRDVLRRILKEIEDVARRVKEINEELLARVEKVVREVEEINRELVKRSREAVEAVKRLLDRGVSDEDRDHMVLHEYVNAAGITRKRLEESTRSVRKLLEELKRELEKSTRSVKALVDELRERVR

SEQ ID NO: 515 - protein, 183 aa, Artificial Sequence
  Synthetic
SDVDRVLEEIRKLLEDLKRHSEKVSEENEDLLRANTELNKRVSEDNERLLEELKRLRERGGISEEDLKRALDRVRKTVETVKEENKRSLEDVRRTVETNKRKLERVVEEIKKLIEDAKRRGSGDEEAKRDHMVLHEYVNAAGITLLETSDRSLEKVEADLRRLNEELDRSLERAERTIRELAK

SEQ ID NO: 516 - protein, 185 aa, Artificial Sequence
  Synthetic
SSVEELLERLRRISEENKRRIEKLLREVEKVLRELKDRHRKLLKRVEEIIRKVKEEIKSGLPEEAVKRVLERVRERVKEVLEEADRLNDEMRRIVTEVEKELDKSDKEVEDAVRDILKKIEEGVRDRERDHMVLHEYVNAAGITRDRSKKVKEEIRRILEDLTRTTERVKREIAKLLKELEDTAR

SEQ ID NO: 517 - protein, 186 aa, Artificial Sequence
  Synthetic
SAEDSIRELLERDERLLEEARKEAKRLNEENERLLERIEETVRRLLEEIKRLLDDIRKKIKGEKLREIEELVRRVKRTIEKLLEEVKKSVEDSSKRIEELLEAVERSVERTKEEIRRLLDEVRKDRKEERDHMVLHEYVNAAGITRRLVKEVIEEVEKLIRDNEKLAEDIEREIRRLLKELDEAAK

SEQ ID NO: 518 - protein, 182 aa, Artificial Sequence
  Synthetic
DEAEKLLKELRDLLEESRKDLERLLKELEDLLEESKRDLERLLEEITELLKRIKETVERRNEREKLEKLLRELKKVVERLKDNLKDNERRNKEAIERVRKKLKDNERENKKVIEDLRAKLKDLEEVKRKRDHMVLHEYVNAAGITKRLEEVEEKSKKIIDDARRALDRIDKELRRVVEETRK

SEQ ID NO: 519 - protein, 182 aa, Artificial Sequence
  Synthetic
RVEDALRKLLDDVRRLVEEAERRLRTSNDKSRRLVEEAKRRLEESNERSEKLVRDVRRRIRDEDVKRVLEELLKRDHDVVRRVLERIDEMLERNSRLVKRVLEDIRRLLKRVREVVERIKRVRSKVVEERDHMVLHEYVNAAGITEDVLRASEDTIRRLEEIIRKVEEDSKRIIEEIERAAR

SEQ ID NO: 520 - protein, 183 aa, Artificial Sequence
  Synthetic
KVEKRLTDLLKTVADEVKRVEDELRETVRESKEVVDKSRRDLERTVEESEKTVKDAERRVSEDLVRRIRKVLDENREVNDRVVKEDERILEENERVNRKVVEKIRDILRKIEEVVRRAAEEIRDEEVVKRDHMVLHEYVNAAGITADRVRERSKKILTDLKKSSEDVKRESERMLKKLEDEIR

SEQ ID NO: 521 - protein, 181 aa, Artificial Sequence
  Synthetic
SEVERVLEDLRRLVRDVEEKLRRIIERDRRLVEEVERENRKTIRKIEELLRKVLEELKDISDKKTIERIVREIIKEARDLVRRNHERNREIVDESRRLVEELRRIVEEIIRRLRELLERVKSGELAERIRDHMVLHEYVNAAGITELEKTSRDLKKRLEELDRELKALVEKVERDLEELRK

SEQ ID NO: 522 - protein, 180 aa, Artificial Sequence
  Synthetic
STEEVLDEIRKLHKTLTEDIKRVLREIEELHRRTIEENKEVLDKIREDYKRVIDDVRTKDTPNVEKLLKDLEKSAKENEEHNERTLREDDRVLKEIRRRATELLKANEEMLRRIEEVMRAGKVDAEELLRDHMVLHEYVNAAGITLRKESKRVVDETRKLSEENLEHSERVLRKVEEDLR

SEQ ID NO: 523 - protein, 183 aa, Artificial Sequence
  Synthetic
SEIEKLVEDVRKLVEDNLRHSEEVHRRNRRLIEENERKIDELEKRVRKLVEELRELAERGEIREEEARKVLEEIKRLLDEIRRHSEEVLKEIERTLKENLKHSEEVLRRIEERLEDIKRKDKDSERVRTRDHMVLHEYVNAAGITEKLNRESRKRVTRSLEKVDDLVRELEKLARKVLEEVKT

SEQ ID NO: 524 - protein, 182 aa, Artificial Sequence
  Synthetic
DELEEVVRRVRELSRTVKEELREVIERVRELSERVKKKLRKVLREVAELHREVMKRVRDSGLDKSKLEKLEDESRRVLDKSREILRKNEEDNRRLNKELEEILKKNEDDNEDVRRKVDEVTRKGKDAEERDHMVLHEYVNAAGITKDALKRVEDRVRESDKSVRELLEENRKVVEDIKRRVD

SEQ ID NO: 525 - protein, 182 aa, Artificial Sequence
  Synthetic
SDADRVAEELKKLVEDSRRENERVIEESKRLVKENEDRNRELIERLKKLVDKLRDILEKEKDKKTLDDIVREILERLKRLLEKVEDENRKSHEENKRLLEDVKRKNKRISDELKRLLEEIERRNVDVDKRDHMVLHEYVNAAGITEKTEEVAKKSSEDIKRVADETRRRAEELLKEVDELRK

SEQ ID NO: 526 - protein, 184 aa, Artificial Sequence
  Synthetic
ELIKKARKDVEEVRERSERLVDELRKRNKKLADESRRLIDKLRKDVEKVLREIEDLLRKRRTKDVLKEIEDLVRELERELRRVVKESSDKVRKLIRENEKVVEESSRLFRDLVEKLRRVVEERNDKKLMRDHMVLHEYVNAAGITSERDVREINKESERVNEETEREVEDAIRKLREVLRRAKK

SEQ ID NO: 527 - protein, 186 aa, Artificial Sequence
  Synthetic
KEVEDLERRVKEILDRMKRLIDENRKKIEKSIRELERLIDENRKEVERVKKELKDLKREGGDDARTLRERVRKIIEDVEEHSRRSTEEVRRIHKENKEHSERSSDEIRELLRRVEELIEEVKRRLRDKERDHMVLHEYVNAAGITRRAHETNERLVDRSRKAVEKAERTNRRLVEEIRKVAEEVRK

SEQ ID NO: 528 - protein, 186 aa, Artificial Sequence
  Synthetic
DEIRELEERVRRILDELRRLVERNREVIERSIRELEKLLDRNRRKVEEILRRIDDLTRRGGDDKKTMLDDVRRLLREAEDHSRRSSETAKRIHRENEEHSKDSSRKVRKLIEELRELAKKVEKEITDERRDHMVLHEYVNAAGITREVDRANRELTKTSKKVLEDVDRTNRRLVKEVRDVVERARK

SEQ ID NO: 529 - protein, 186 aa, Artificial Sequence
  Synthetic
KEVEDLERTVRTILKRMRELITRNEEEIRRSIEELKKLLKENKDTVRRILEEMKELKKEGGDDKKRLVEEIKRLLDELRENSKRSSDRAKEIHERNKRHSEESSRTIEKLLKELRDLVRDVERKLRDEDRDHMVLHEYVNAAGITREADERNKRLTKRSKEVLDEVHRANEEALKEVEEVVRRVTK

SEQ ID NO: 530 - protein, 182 aa, Artificial Sequence
  Synthetic
DLERRLDELLKRIEDRVRELVRTLEESLRELERRVREIIRRLEEHLRRIEKMVRDLKRANKPDKAVKDDVRRLRENADRLNKRVREELKKLREDVKRVNEDVKRELDKLAEEAKDMLRKLREAGIDERVRDHMVLHEYVNAAGITEVSERHKREVDRLEREIEEVSREHKERVEKLLREIER

SEQ ID NO: 531 - protein, 182 aa, Artificial Sequence
  Synthetic
SELEKTLEDLKRHSEENKKKLEEDLRDMERNLKENKDRLKKILEEAEKTLKDLERRFREGDIDERELERVRRKMEEIKKRLDENVERNRRKAEDIKRKLDENVKRSEDRVKEIKEDIRRRVRDKDKAEERDHMVLHEYVNAAGITERVKKALDDIVKELEELHERLKRRLEEILRRIAETVR

SEQ ID NO: 532 - protein, 186 aa, Artificial Sequence
  Synthetic
SEIEKLIEELRRELEKVKDELERSIEEMDRELDDVRRDSKRLVDEIKRELREVTERTKRGDRPEEVLRKELEDIKRKLRRILEEHHEKIRRIKEKLRRENKRVRDELKRIKDEIDEKVKDVRRKGADEERDHMVLHEYVNAAGITEELLKKHTRVVERVEKALDELDKELERIVREAEKELDRREK

SEQ ID NO: 533 - protein, 183 aa, Artificial Sequence
  Synthetic
SIEDEIRKLKEDIKRVLDKVRRDNERLKERLDKVLEDIRRSSEDNNRKLEEVLKRIRDKPVDERLVRKVEEAVKRLKEHNEDSTRRVEEVIRRLKEESEESVRKTEKVARDLERELDEVLTRGGEERVRRDHMVLHEYVNAAGITDKEVADRAEKLLREAEEHNKRSLDESRRVLEELDEEIR

SEQ ID NO: 534 - protein, 183 aa, Artificial Sequence
  Synthetic
SIREKIRELEERLEEVLRRIEENSERVLREAERVLKEIKDNSKRNNEKLERALEEIRKLPVEDELVRRVKELVERLKRHNKKSSEDVERVVRELKEELKRSSEEVKKAVDRLKEELEKVLRDGGEREVDRDHMVLHEYVNAAGITNRRVVERLKRLLEELKKHNEDSLRKSEEVLRKLEEDAR

SEQ ID NO: 535 - protein, 185 aa, Artificial Sequence
  Synthetic
SEAEELLKRLEDRAEEILRRLEEILRTSRKLAEDVLRELEKLLRESERRIREVLEELRGIKDKKELEDVIREVEKELDESLERSRELLKDVLKKLDDNLKESERLVEDIDRELAKILEDLKKAGVPKEVRDHMVLHEYVNAAGITRIVDENAKIVEDARRALEKIVKENEEILRRLKKELRELRK

SEQ ID NO: 536 - protein, 186 aa, Artificial Sequence
  Synthetic
SRVEEIIEDLRRLLEEIRKENEDSIRRSKELLDRVKEINDTIIAELERLLKDIEKEVREKGSESEEVKKALRAVLEELEKLLRRVAEINEEVLRRNSKLVEEDERRNREVLKELARLVEELIREIGDEDRDHMVLHEYVNAAGITDKLDRESKEAFRATNEEIAKLDEDTARVAERVKKAIEDLAK

SEQ ID NO: 537 - protein, 186 aa, Artificial Sequence
  Synthetic
SEVDEIIKELERLLAEIARENERIIRESRKLADEVRKRNEDAIRKLEELVARLADAVRRKGSESEEVKKLIEDVLREIERLLKRIEEENREVVKRNSELVERVRAINEEILRRVAELVEKIARDIGDKDRDHMVLHEYVNAAGITKKLDDETRRVIEDTNKKIADLDKATRDVVRKVLEEVKKLEK

SEQ ID NO: 538 - protein, 181 aa, Artificial Sequence
  Synthetic
SEIETVRREIEKILDDLRRTVKRIEDEVRKIHEDLRRSLEDSKRNIEEILKDLERAARRDGLDKKVEDDMRKLVEDLKRKHDKLRADNEAVTKELKDRLKKLEDDLARAIEELRRRLDKGLDKEDIDKLRDHMVLHEYVNAAGITELLERYEEIVRRIKELLKDLNREAEEVVRRLKEELR

SEQ ID NO: 539 - protein, 185 aa, Artificial Sequence
  Synthetic
SSVEELLERLRRISEENKRRIEKLLREVEKVLRELKDRHRKLLKRVEEIIRKVKEEIKSGLPEEAVKRVLERVRERVKEVLEEADRLNDEMRRIVTEVEKELDKSDKEVEDAVRDILKKIEEGVRDRETRDHMVLHEYVNAAGITDRSKKVKEEIRRILEDLTRTTERVKREIAKLLKELEDTAR

SEQ ID NO: 540 - protein, 181 aa, Artificial Sequence
  Synthetic
SEVERVLEDLRRLVRDVEEKLRRIIERDRRLVEEVERENRKTIRKIEELLRKVLEELKDISDKKTIERIVREIIKEARDLVRRNHERNREIVDESRRLVEELRRIVEEIIRRLRELLERVKSGELAERIERDHMVLHEYVNAAGITLEKTSRDLKKRLEELDRELKALVEKVERDLEELRK

SEQ ID NO: 541 - protein, 187 aa, Artificial Sequence
  Synthetic
DEEEELRKRLEKLSKEVRELLRRDEEEDRRLNRELEELLKDHERTVRDLSREVEDLLRKARRKVSEEELTRLRKKLRDLEEESKEALRELRRRVEELNKENKKSLDDLERRLKELEDRAREVEKRDRREDRDHMVLHEYVNAAGITAEDLKRNTEDLRRVIKELAERLEELNKRLKREIRRLKEELR

SEQ ID NO: 542 - protein, 181 aa, Artificial Sequence
  Synthetic
DEERKLEKSLKDVEDTHRRLLEKNDEDLKELRKRVEDMLRRLEDALRRILEDIEEKLKRIEDDETLKRLRKRVKELLDEIRRRLERLEREVDKRLEEIKERNDRHHEEAKKELKRIRDKIRRDGADEKILRDHMVLHEYVNAAGITSNDEVKELAERLEETIRDLLRRIEEILKEIEERVR

SEQ ID NO: 543 - protein, 181 aa, Artificial Sequence
  Synthetic
EEIERALREMRELSRTHKELVEKILRDIAELAKTHERINEDILRKIKKLIDEIADEIRKEDKKEELKRKIDELRRRAEELLKESKEHLKRLEDTVRELIERLKETLKKVEEDLKRILEKLEKSRELDEIARDHMVLHEYVNAAGITVEDEVRRLIRKLEELNRRTEEEVKKLIKKLEDDLK

SEQ ID NO: 544 - protein, 182 aa, Artificial Sequence
  Synthetic
DELEEVVRRVRELSRTVKEELREVIERVRELSERVKKKLRKVLREVAELHREVMKRVRDSGLDKSKLEKLEDESRRVLDKSREILRKNEEDNRRLNKELEEILKKNEDDNEDVRRKVDEVTRKGKDAEEVRDHMVLHEYVNAAGITDALKRVEDRVRESDKSVRELLEENRKVVEDIKRRVD

SEQ ID NO: 545 - protein, 182 aa, Artificial Sequence
  Synthetic
SDADRVAEELKKLVEDSRRENERVIEESKRLVKENEDRNRELIERLKKLVDKLRDILEKEKDKKTLDDIVREILERLKRLLEKVEDENRKSHEENKRLLEDVKRKNKRISDELKRLLEEIERRNVDVDKVRDHMVLHEYVNAAGITKTEEVAKKSSEDIKRVADETRRRAEELLKEVDELRK

SEQ ID NO: 546 - protein, 183 aa, Artificial Sequence
  Synthetic
SEVDEVLERIKRLLERLAEHSDKVVRDIEKLLDDNRKENERLLDKLRRELKRLEEMRRRGDLREELLERVVREVEKEIRDIKRKNKRSVETVEKLVRDDRKELKRALEDVERLIRELETRLKDKEELRRKRDHMVLHEYVNAAGITKKTDEVLKRARETIEDLNRKLDKVLKEVRDKLDRLRD

SEQ ID NO: 547 - protein, 184 aa, Artificial Sequence
  Synthetic
ELIKKARKDVEEVRERSERLVDELRKRNKKLADESRRLIDKLRKDVEKVLREIEDLLRKRRTKDVLKEIEDLVRELERELRRVVKESSDKVRKLIRENEKVVEESSRLFRDLVEKLRRVVEERNDKKLMERDHMVLHEYVNAAGITERDVREINKESERVNEETEREVEDAIRKLREVLRRAKK

SEQ ID NO: 548 - protein, 186 aa, Artificial Sequence
  Synthetic
KEVEDLERTVRTILKRMRELITRNEEEIRRSIEELKKLLKENKDTVRRILEEMKELKKEGGDDKKRLVEEIKRLLDELRENSKRSSDRAKEIHERNKRHSEESSRTIEKLLKELRDLVRDVERKLRDEDARDHMVLHEYVNAAGITEADERNKRLTKRSKEVLDEVHRANEEALKEVEEVVRRVTK

SEQ ID NO: 549 - protein, 182 aa, Artificial Sequence
  Synthetic
SELEKTLEDLKRHSEENKKKLEEDLRDMERNLKENKDRLKKILEEAEKTLKDLERRFREGDIDERELERVRRKMEEIKKRLDENVERNRRKAEDIKRKLDENVKRSEDRVKEIKEDIRRRVRDKDKAEELRDHMVLHEYVNAAGITRVKKALDDIVKELEELHERLKRRLEEILRRIAETVR

SEQ ID NO: 550 - protein, 183 aa, Artificial Sequence
  Synthetic
RVDERLDTVLKRVEETVRENKKKNDELLERSKENIDRLKKRLDDLLDKVRREAEKLKREVTKEEVKKIIDEVLKEIEDLLRTVKEELDRALERNREVVEETKRRIDRVLKEIEKLIRDVKRDRKEEVVKERDHMVLHEYVNAAGITKDAERRLRETNERLNEIVKEVEKRIRELSEEVRKRVK

SEQ ID NO: 551 - protein, 183 aa, Artificial Sequence
  Synthetic
SVDERLDEVLERVKEDMDRNRRKNDESLREDEENVRRNKKETDESVKRVEERVRELKKRVKDERVKEFLDRVLEEIRKSAEEVKTIIDEVHKESEETVRRTKKIIEEVLRRIEELIRRVKKDRKEEVVKTRDHMVLHEYVNAAGITDEAHKRNKELNERVNRVNKEAHKRNEDLLREAERKVR

SEQ ID NO: 552 - protein, 183 aa, Artificial Sequence
  Synthetic
SIEERVRELMRDLERVLKEIREHSKRVIEEAKRVLEEIERNSERNNKELEEVLDEIRKRPVDETLVREVEEAVKKLKEHNKRSSDTVRDAVRKLVERLKESSDRATELVKDLKRKLEEVLRRGGEKELEERDHMVLHEYVNAAGITKEVVDRLKEVLERLKEHNRRSLDESRKVLRELKERIR

SEQ ID NO: 553 - protein, 185 aa, Artificial Sequence
  Synthetic
SEAEELLKRLEDRAEEILRRLEEILRTSRKLAEDVLRELEKLLRESERRIREVLEELRGIKDKKELEDVIREVEKELDESLERSRELLKDVLKKLDDNLKESERLVEDIDRELAKILEDLKKAGVPKEVVRDHMVLHEYVNAAGITIVDENAKIVEDARRALEKIVKENEEILRRLKKELRELRK

SEQ ID NO: 554 - protein, 188 aa, Artificial Sequence
  Synthetic
SEIEKILKEIEDLARRDEEVSKKIVEDIRRLAKEVEDTSRDIVRKIEELAKRVLDRLRKDGSKEELEKEVREVVKTLEELVKDNHRLIRRAVEEMKRLVEENHRHSREVVKELEDLVRELRKGSGSEDSERDHMVLHEYVNAAGITSEKSNEEVKRTVEELVRRMEESNDRVRDLVRRLVEELKRAVD

SEQ ID NO: 555 - protein, 186 aa, Artificial Sequence
  Synthetic
SRVEEIIEDLRRLLEEIRKENEDSIRRSKELLDRVKEINDTIIAELERLLKDIEKEVREKGSESEEVKKALRAVLEELEKLLRRVAEINEEVLRRNSKLVEEDERRNREVLKELARLVEELIREIGDEDKRDHMVLHEYVNAAGITKLDRESKEAFRATNEEIAKLDEDTARVAERVKKAIEDLAK

SEQ ID NO: 556 - protein, 183 aa, Artificial Sequence
  Synthetic
SDVDRVLEEIRKLLEDLKRHSEKVSEENEDLLRANTELNKRVSEDNERLLEELKRLRERGGISEEDLKRALDRVRKTVETVKEENKRSLEDVRRTVETNKRKLERVVEEIKKLIEDAKRRGSGDEEAKKKRDHMVLHEYVNAAGITETSDRSLEKVEADLRRLNEELDRSLERAERTIRELAK

SEQ ID NO: 557 - protein, 182 aa, Artificial Sequence
  Synthetic
RVEDALRKLLDDVRRLVEEAERRLRTSNDKSRRLVEEAKRRLEESNERSEKLVRDVRRRIRDEDVKRVLEELLKRDHDVVRRVLERIDEMLERNSRLVKRVLEDIRRLLKRVREVVERIKRVRSKVVEEVLRDHMVLHEYVNAAGITVLRASEDTIRRLEEIIRKVEEDSKRIIEEIERAAR

SEQ ID NO: 558 - protein, 183 aa, Artificial Sequence
  Synthetic
KVEKRLTDLLKTVADEVKRVEDELRETVRESKEVVDKSRRDLERTVEESEKTVKDAERRVSEDLVRRIRKVLDENREVNDRVVKEDERILEENERVNRKVVEKIRDILRKIEEVVRRAAEEIRDEEVVKKVRDHMVLHEYVNAAGITRVRERSKKILTDLKKSSEDVKRESERMLKKLEDEIR

SEQ ID NO: 559 - protein, 182 aa, Artificial Sequence
  Synthetic
SDADRVAEELKKLVEDSRRENERVIEESKRLVKENEDRNRELIERLKKLVDKLRDILEKEKDKKTLDDIVREILERLKRLLEKVEDENRKSHEENKRLLEDVKRKNKRISDELKRLLEEIERRNVDVDKVRRDHMVLHEYVNAAGITTEEVAKKSSEDIKRVADETRRRAEELLKEVDELRK

SEQ ID NO: 560 - protein, 186 aa, Artificial Sequence
  Synthetic
SEVDEVRKTLEDLLRRLDEENKDIIRRNKELLDDLDRKVREAIERLKRLLDELRKILEKLKDRETLTRIIEEIEKRARELIKRLRDEIRKIEEESKKSIEDSRKRNDEIRKRLEELIKDLRDKIKDSEELARDHMVLHEYVNAAGITLKEKNKRLEDDSRRVITELRKKLKDLEDRVREEIEELRK

SEQ ID NO: 561 - protein, 185 aa, Artificial Sequence
  Synthetic
SAEELLRTIEKRIEDNHRRLEEILEEIARLIEDMLRTDERIVREIKELLKEVLDRVRRAGVPEEVLERVRRELERLKKELEELRRRSEEKVKELKRRLEEIRRKLEEEHRDLRRKLEELRRDLGDKEEVVKRDHMVLHEYVNAAGITAEDLLRRVEEVIRTSKKESKDVLEKIERLLRDLERRTR

SEQ ID NO: 562 - protein, 183 aa, Artificial Sequence
  Synthetic
SIEDRIRELEKRLEKVLREIEEHSKKVVREAEKVLREIEENSRRNNKRLEEVLDEIRKRPVDETLVREVEEAVRRLKKHNKDSSDTARKLVEELKKELKESSDRVRKVVEELKDRLRKVLEKGGEEDVRKVRDHMVLHEYVNAAGITDVVRRLKEVLKELRKHNKRSLDESEKVLRELRERIR

SEQ ID NO: 563 - protein, 188 aa, Artificial Sequence
  Synthetic
SEIEKILKEIEDLARRDEEVSKKIVEDIRRLAKEVEDTSRDIVRKIEELAKRVLDRLRKDGSKEELEKEVREVVKTLEELVKDNHRLIRRAVEEMKRLVEENHRHSREVVKELEDLVRELRKGSGSEDSERRDHMVLHEYVNAAGITEKSNEEVKRTVEELVRRMEESNDRVRDLVRRLVEELKRAVD

SEQ ID NO: 564 - protein, 186 aa, Artificial Sequence
  Synthetic
SRVEEIIEDLRRLLEEIRKENEDSIRRSKELLDRVKEINDTIIAELERLLKDIEKEVREKGSESEEVKKALRAVLEELEKLLRRVAEINEEVLRRNSKLVEEDERRNREVLKELARLVEELIREIGDEDKARDHMVLHEYVNAAGITLDRESKEAFRATNEEIAKLDEDTARVAERVKKAIEDLAK

SEQ ID NO: 565 - protein, 186 aa, Artificial Sequence
  Synthetic
SEVDEIIKELERLLAEIARENERIIRESRKLADEVRKRNEDAIRKLEELVARLADAVRRKGSESEEVKKLIEDVLREIERLLKRIEEENREVVKRNSELVERVRAINEEILRRVAELVEKIARDIGDKDEVRDHMVLHEYVNAAGITLDDETRRVIEDTNKKIADLDKATRDVVRKVLEEVKKLEK

SEQ ID NO: 566 - protein, 185 aa, Artificial Sequence
  Synthetic
SSVEELLERLRRISEENKRRIEKLLREVEKVLRELKDRHRKLLKRVEEIIRKVKEEIKSGLPEEAVKRVLERVRERVKEVLEEADRLNDEMRRIVTEVEKELDKSDKEVEDAVRDILKKIEEGVRDRETAERDHMVLHEYVNAAGITSKKVKEEIRRILEDLTRTTERVKREIAKLLKELEDTAR

SEQ ID NO: 567 - protein, 186 aa, Artificial Sequence
  Synthetic
SAEDSIRELLERDERLLEEARKEAKRLNEENERLLERIEETVRRLLEEIKRLLDDIRKKIKGEKLREIEELVRRVKRTIEKLLEEVKKSVEDSSKRIEELLEAVERSVERTKEEIRRLLDEVRKDRKEELVKRDHMVLHEYVNAAGITVKEVIEEVEKLIRDNEKLAEDIEREIRRLLKELDEAAK

SEQ ID NO: 568 - protein, 183 aa, Artificial Sequence
  Synthetic
KVEKRLTDLLKTVADEVKRVEDELRETVRESKEVVDKSRRDLERTVEESEKTVKDAERRVSEDLVRRIRKVLDENREVNDRVVKEDERILEENERVNRKVVEKIRDILRKIEEVVRRAAEEIRDEEVVKKVERDHMVLHEYVNAAGITVRERSKKILTDLKKSSEDVKRESERMLKKLEDEIR

SEQ ID NO: 569 - protein, 186 aa, Artificial Sequence
  Synthetic
SEVDEVRKTLEDLLRRLDEENKDIIRRNKELLDDLDRKVREAIERLKRLLDELRKILEKLKDRETLTRIIEEIEKRARELIKRLRDEIRKIEEESKKSIEDSRKRNDEIRKRLEELIKDLRDKIKDSEELARRDHMVLHEYVNAAGITKEKNKRLEDDSRRVITELRKKLKDLEDRVREEIEELRK

SEQ ID NO: 570 - protein, 183 aa, Artificial Sequence
  Synthetic
SEVDEVLERIKRLLERLAEHSDKVVRDIEKLLDDNRKENERLLDKLRRELKRLEEMRRRGDLREELLERVVREVEKEIRDIKRKNKRSVETVEKLVRDDRKELKRALEDVERLIRELETRLKDKEELRRKLERDHMVLHEYVNAAGITTDEVLKRARETIEDLNRKLDKVLKEVRDKLDRLRD

SEQ ID NO: 571 - protein, 185 aa, Artificial Sequence
  Synthetic
DDIERLKREIERLLKEAEKISRDNEERSKELLDRLRKLSEDNKRKIDKLVEELKRLADKIKDKEELTRRLKEVVDRVEKSVRDSERMLREVVREDEESVRRSKTKLEDLLRKVEELVRRLEKKVTDEKVKRDRDHMVLHEYVNAAGITRKNDEVHRRSREEVKRLLEENRKLLEDLRRMVREITQ

SEQ ID NO: 572 - protein, 184 aa, Artificial Sequence
  Synthetic
ELIKKARKDVEEVRERSERLVDELRKRNKKLADESRRLIDKLRKDVEKVLREIEDLLRKRRTKDVLKEIEDLVRELERELRRVVKESSDKVRKLIRENEKVVEESSRLFRDLVEKLRRVVEERNDKKLMEEVRDHMVLHEYVNAAGITDVREINKESERVNEETEREVEDAIRKLREVLRRAKK

SEQ ID NO: 573 - protein, 184 aa, Artificial Sequence
  Synthetic
DEIRKVVKEITDLLKASNDKNRKVVEEIRDLLRKSKKLADELVERLRALVEDLRRRIDKSGDKETAEDIVRRIIEELKRILKEIEDLARRINREIERLVEEVERDNRDVNRAIEELLKDIARRGGSEDLKRVRDHMVLHEYVNAAGITRVKEDADRVSEANKEVLDRVREEVKRLIEEVRETLR

SEQ ID NO: 574 - protein, 186 aa, Artificial Sequence
  Synthetic
SRVEEIIEDLRRLLEEIRKENEDSIRRSKELLDRVKEINDTIIAELERLLKDIEKEVREKGSESEEVKKALRAVLEELEKLLRRVAEINEEVLRRNSKLVEEDERRNREVLKELARLVEELIREIGDEDKARRDHMVLHEYVNAAGITDRESKEAFRATNEEIAKLDEDTARVAERVKKAIEDLAK

SEQ ID NO: 575 - protein, 186 aa, Artificial Sequence
  Synthetic
SEVDEIIKELERLLAEIARENERIIRESRKLADEVRKRNEDAIRKLEELVARLADAVRRKGSESEEVKKLIEDVLREIERLLKRIEEENREVVKRNSELVERVRAINEEILRRVAELVEKIARDIGDKDEVTRDHMVLHEYVNAAGITDDETRRVIEDTNKKIADLDKATRDVVRKVLEEVKKLEK

SEQ ID NO: 576 - protein, 185 aa, Artificial Sequence
  Synthetic
SEIDEVLTRLRKISKDLNETSDRVNERARKIIDDIKKESKRVNDEAREIVERLKREIDKTRDRDVLRRILKEIEDVARRVKEINEELLARVEKVVREVEEINRELVKRSREAVEAVKRLLDRGVSDEDKVERRDHMVLHEYVNAAGITEESTRSVRKLLEELKRELEKSTRSVKALVDELRERVR

SEQ ID NO: 577 - protein, 183 aa, Artificial Sequence
  Synthetic
SDVDRVLEEIRKLLEDLKRHSEKVSEENEDLLRANTELNKRVSEDNERLLEELKRLRERGGISEEDLKRALDRVRKTVETVKEENKRSLEDVRRTVETNKRKLERVVEEIKKLIEDAKRRGSGDEEAKKKLDRDHMVLHEYVNAAGITSDRSLEKVEADLRRLNEELDRSLERAERTIRELAK

SEQ ID NO: 578 - protein, 187 aa, Artificial Sequence
  Synthetic
DEEEELRKRLEKLSKEVRELLRRDEEEDRRLNRELEELLKDHERTVRDLSREVEDLLRKARRKVSEEELTRLRKKLRDLEEESKEALRELRRRVEELNKENKKSLDDLERRLKELEDRAREVEKRDRREDELRRDHMVLHEYVNAAGITLKRNTEDLRRVIKELAERLEELNKRLKREIRRLKEELR

SEQ ID NO: 579 - protein, 184 aa, Artificial Sequence
  Synthetic
ELIKKARKDVEEVRERSERLVDELRKRNKKLADESRRLIDKLRKDVEKVLREIEDLLRKRRTKDVLKEIEDLVRELERELRRVVKESSDKVRKLIRENEKVVEESSRLFRDLVEKLRRVVEERNDKKLMEEVERDHMVLHEYVNAAGITVREINKESERVNEETEREVEDAIRKLREVLRRAKK

SEQ ID NO: 580 - protein, 186 aa, Artificial Sequence
  Synthetic
KEVEDLERTVRTILKRMRELITRNEEEIRRSIEELKKLLKENKDTVRRILEEMKELKKEGGDDKKRLVEEIKRLLDELRENSKRSSDRAKEIHERNKRHSEESSRTIEKLLKELRDLVRDVERKLRDEDAKRKRDHMVLHEYVNAAGITERNKRLTKRSKEVLDEVHRANEEALKEVEEVVRRVTK

SEQ ID NO: 581 - protein, 185 aa, Artificial Sequence
  Synthetic
SAEELLRTIEKRIEDNHRRLEEILEEIARLIEDMLRTDERIVREIKELLKEVLDRVRRAGVPEEVLERVRRELERLKKELEELRRRSEEKVKELKRRLEEIRRKLEEEHRDLRRKLEELRRDLGDKEEVVKKLRDHMVLHEYVNAAGITDLLRRVEEVIRTSKKESKDVLEKIERLLRDLERRTR

SEQ ID NO: 582 - protein, 185 aa, Artificial Sequence
  Synthetic
SSVEELLERLRRISEENKRRIEKLLREVEKVLRELKDRHRKLLKRVEEIIRKVKEEIKSGLPEEAVKRVLERVRERVKEVLEEADRLNDEMRRIVTEVEKELDKSDKEVEDAVRDILKKIEEGVRDRETAERARDHMVLHEYVNAAGITKVKEEIRRILEDLTRTTERVKREIAKLLKELEDTAR

SEQ ID NO: 583 - protein, 185 aa, Artificial Sequence; identical to SEQ ID NO: 582
  Synthetic

SEQ ID NO: 584 - protein, 186 aa, Artificial Sequence
  Synthetic
SAEDSIRELLERDERLLEEARKEAKRLNEENERLLERIEETVRRLLEEIKRLLDDIRKKIKGEKLREIEELVRRVKRTIEKLLEEVKKSVEDSSKRIEELLEAVERSVERTKEEIRRLLDEVRKDRKEELVKRVRDHMVLHEYVNAAGITEVIEEVEKLIRDNEKLAEDIEREIRRLLKELDEAAK

SEQ ID NO: 585 - protein, 185 aa, Artificial Sequence
  Synthetic
DDIERLKREIERLLKEAEKISRDNEERSKELLDRLRKLSEDNKRKIDKLVEELKRLADKIKDKEELTRRLKEVVDRVEKSVRDSERMLREVVREDEESVRRSKTKLEDLLRKVEELVRRLEKKVTDEKVKRDARRDHMVLHEYVNAAGITNDEVHRRSREEVKRLLEENRKLLEDLRRMVREITQ

SEQ ID NO: 586 - protein, 186 aa, Artificial Sequence
  Synthetic
SRVEEIIEDLRRLLEEIRKENEDSIRRSKELLDRVKEINDTIIAELERLLKDIEKEVREKGSESEEVKKALRAVLEELEKLLRRVAEINEEVLRRNSKLVEEDERRNREVLKELARLVEELIREIGDEDKARKVRDHMVLHEYVNAAGITESKEAFRATNEEIAKLDEDTARVAERVKKAIEDLAK

SEQ ID NO: 587 - protein, 186 aa, Artificial Sequence
  Synthetic
SEVDEIIKELERLLAEIARENERIIRESRKLADEVRKRNEDAIRKLEELVARLADAVRRKGSESEEVKKLIEDVLREIERLLKRIEEENREVVKRNSELVERVRAINEEILRRVAELVEKIARDIGDKDEVTKVRDHMVLHEYVNAAGITETRRVIEDTNKKIADLDKATRDVVRKVLEEVKKLEK

SEQ ID NO: 588 - protein, 185 aa, Artificial Sequence
  Synthetic
SEIDEVLTRLRKISKDLNETSDRVNERARKIIDDIKKESKRVNDEAREIVERLKREIDKTRDRDVLRRILKEIEDVARRVKEINEELLARVEKVVREVEEINRELVKRSREAVEAVKRLLDRGVSDEDKVERVVRDHMVLHEYVNAAGITSTRSVRKLLEELKRELEKSTRSVKALVDELRERVR

SEQ ID NO: 589 - protein, 185 aa, Artificial Sequence
  Synthetic
SSVEELLERLRRISEENKRRIEKLLREVEKVLRELKDRHRKLLKRVEEIIRKVKEEIKSGLPEEAVKRVLERVRERVKEVLEEADRLNDEMRRIVTEVEKELDKSDKEVEDAVRDILKKIEEGVRDRETAERARRDHMVLHEYVNAAGITVKEEIRRILEDLTRTTERVKREIAKLLKELEDTAR

SEQ ID NO: 590 - protein, 187 aa, Artificial Sequence
  Synthetic
SEKETVRDELRKLVETIRKLLEEDKESDKRLADRIRELNEENKEDTERLIRELEKVLEELRKKVSEDELRKLRKRIEDLRRRDEELNKRSREKLEDLNERNKDSLRRIEDELRKLVEEAREVEKRDNDEERLRKLRDHMVLHEYVNAAGITENNKRLRKAIKELLDELRKINKELREVIKKLLDDAR

SEQ ID NO: 591 - protein, 186 aa, Artificial Sequence
  Synthetic
DEIRELEERVRRILDELRRLVERNREVIERSIRELEKLLDRNRRKVEEILRRIDDLTRRGGDDKKTMLDDVRRLLREAEDHSRRSSETAKRIHRENEEHSKDSSRKVRKLIEELRELAKKVEKEITDERVKEAIKRDHMVLHEYVNAAGITNRELTKTSKKVLEDVDRTNRRLVKEVRDVVERARK

SEQ ID NO: 592 - protein, 186 aa, Artificial Sequence
  Synthetic
KEVEDLERTVRTILKRMRELITRNEEEIRRSIEELKKLLKENKDTVRRILEEMKELKKEGGDDKKRLVEEIKRLLDELRENSKRSSDRAKEIHERNKRHSEESSRTIEKLLKELRDLVRDVERKLRDEDAKRKLDRDHMVLHEYVNAAGITNKRLTKRSKEVLDEVHRANEEALKEVEEVVRRVTK

SEQ ID NO: 593 - protein, 186 aa, Artificial Sequence
  Synthetic
SRVEEIIEDLRRLLEEIRKENEDSIRRSKELLDRVKEINDTIIAELERLLKDIEKEVREKGSESEEVKKALRAVLEELEKLLRRVAEINEEVLRRNSKLVEEDERRNREVLKELARLVEELIREIGDEDKARKVARDHMVLHEYVNAAGITSKEAFRATNEEIAKLDEDTARVAERVKKAIEDLAK

SEQ ID NO: 594 - protein, 187 aa, Artificial Sequence
  Synthetic
DEEEELRKRLEKLSKEVRELLRRDEEEDRRLNRELEELLKDHERTVRDLSREVEDLLRKARRKVSEEELTRLRKKLRDLEEESKEALRELRRRVEELNKENKKSLDDLERRLKELEDRAREVEKRDRREDELRELLRDHMVLHEYVNAAGITNTEDLRRVIKELAERLEELNKRLKREIRRLKEELR

SEQ ID NO: 595 - protein, 188 aa, Artificial Sequence
  Synthetic
SEIEKILKEIEDLARRDEEVSKKIVEDIRRLAKEVEDTSRDIVRKIEELAKRVLDRLRKDGSKEELEKEVREVVKTLEELVKDNHRLIRRAVEEMKRLVEENHRHSREVVKELEDLVRELRKGSGSEDSERLVREVRDHMVLHEYVNAAGITEVKRTVEELVRRMEESNDRVRDLVRRLVEELKRAVD

SEQ ID NO: 596 - protein, 229 aa, Artificial Sequence
  Synthetic
SKEERLREVAEKHKKDLEDIVKRVDEAAKETARRLEEILKRLEEVLKKILDDLEKGPDDEKLKKVKKILKDIMDRLAELIKKILKLLKENLEKIKELLRRNLEISEELLKLAKGLSDRDVLETVRRVLEKLDEEWDRVLEDSRRIIETILRELDTLLREVEKLIKEIKRDHMVLHEYVNAAGITVEVVRRVIKALKEVLERHVDATREVIERVKRVNKRLLEAVREVVT

SEQ ID NO: 597 - protein, 229 aa, Artificial Sequence
  Synthetic
SKEERLREVAEKHKKDLEDIVKRVDEAAKETARRLEEILKRLEEVLKKILDDLEKGPDDEKLKKVKKILKDIMDRLAELIKKILKLLKENLEKIKELLRRNLEISEELLKLAKGLSDRDVLETVRRVLEKLDEEWDRVLEDSRRIIETILRELDTLLREVEKLIKEIKDRDHMVLHEYVNAAGITEVVRRVIKALKEVLERHVDATREVIERVKRVNKRLLEAVREVVT

SEQ ID NO: 598 - protein, 231 aa, Artificial Sequence
  Synthetic
DKAEVLREALKLLKDLLEELIKIHEESLKRILDLIDTLVKVHEDALRALKELLERSGLDERELRKVERMATESLRTIAKLKEELRDLARRSLEKLREDLKRVDDTLRKVEEKVRRTGPSEELIEELIRTIEKLLKEIVRINEEVLKAVRELLKTLLKLSEDVVRRIEEILRDHMVLHEYVNAAGITVEELRRLHEEIKERLDDVARRSEEELRRIIKKLKEVVKEIRKKLK

SEQ ID NO: 599 - protein, 231 aa, Artificial Sequence
  Synthetic
SKEEEVEKVLRKWEEILRRLIEENKRANDKIRREYEELVKEIRRVLEEIKEVAERLGVSEEVKRILEKLIKLLEDILEYEKENVERLIELNERILRELKKSVEELKALVTRVRRDGLPESEVRKLVEDVLRKNEELLKEAKKAWRDSIENLKRVLEEVAKLVKTVLREIERDHMVLHEYVNAAGITERLLRVAEEVIRRILKVNTELMRVDERSIRESLKAISEVLKVLDT

SEQ ID NO: 600 - protein, 231 aa, Artificial Sequence; identical to SEQ ID NO: 599
  Synthetic

SEQ ID NO: 601 - protein, 231 aa, Artificial Sequence
  Synthetic
SKDEELARLLEELVERWRKIVEDLERDHRRLVKEIRELVERIRKKLEELVDRIRKNGIDERIVRLIEEIAKIIEEVLKEIVKLVERAVRENVRVLRESVRLVAELVETLARLLRGSDERVTEAIKKVLDTSEDLIRRVIKVNEDILREIAKLVEEVLREAERILTEIKKERDHMVLHEYVNAAGITVDDVLRIIARILKLLRDLTRRLAEVAKAVHKLLEELLRKLKEDTR

SEQ ID NO: 602 - protein, 229 aa, Artificial Sequence
  Synthetic
SKEERLREVAEKHKKDLEDIVKRVDEAAKETARRLEEILKRLEEVLKKILDDLEKGPDDEKLKKVKKILKDIMDRLAELIKKILKLLKENLEKIKELLRRNLEISEELLKLAKGLSDRDVLETVRRVLEKLDEEWDRVLEDSRRIIETILRELDTLLREVEKLIKEIKDERDHMVLHEYVNAAGITVVRRVIKALKEVLERHVDATREVIERVKRVNKRLLEAVREVVT

SEQ ID NO: 603 - protein, 231 aa, Artificial Sequence
  Synthetic
DKAEVLREALKLLKDLLEELIKIHEESLKRILDLIDTLVKVHEDALRALKELLERSGLDERELRKVERMATESLRTIAKLKEELRDLARRSLEKLREDLKRVDDTLRKVEEKVRRTGPSEELIEELIRTIEKLLKEIVRINEEVLKAVRELLKTLLKLSEDVVRRIEEILRRDHMVLHEYVNAAGITEELRRLHEEIKERLDDVARRSEEELRRIIKKLKEVVKEIRKKLK

SEQ ID NO: 604 - protein, 231 aa, Artificial Sequence
  Synthetic
SKEEEVEKVLRKWEEILRRLIEENKRANDKIRREYEELVKEIRRVLEEIKEVAERLGVSEEVKRILEKLIKLLEDILEYEKENVERLIELNERILRELKKSVEELKALVTRVRRDGLPESEVRKLVEDVLRKNEELLKEAKKAWRDSIENLKRVLEEVAKLVKTVLREIEERDHMVLHEYVNAAGITRLLRVAEEVIRRILKVNTELMRVDERSIRESLKAISEVLKVLDT

SEQ ID NO: 605 - protein, 231 aa, Artificial Sequence; identical to SEQ ID NO: 604
  Synthetic

SEQ ID NO: 606 - protein, 229 aa, Artificial Sequence
  Synthetic
SKEERLREVAEKHKKDLEDIVKRVDEAAKETARRLEEILKRLEEVLKKILDDLEKGPDDEKLKKVKKILKDIMDRLAELIKKILKLLKENLEKIKELLRRNLEISEELLKLAKGLSDRDVLETVRRVLEKLDEEWDRVLEDSRRIIETILRELDTLLREVEKLIKEIKDEIRDHMVLHEYVNAAGITVRRVIKALKEVLERHVDATREVIERVKRVNKRLLEAVREVVT

SEQ ID NO: 607 - protein, 229 aa, Artificial Sequence; identical to SEQ ID NO: 606
  Synthetic

SEQ ID NO: 608 - protein, 231 aa, Artificial Sequence
  Synthetic
DKAEVLREALKLLKDLLEELIKIHEESLKRILDLIDTLVKVHEDALRALKELLERSGLDERELRKVERMATESLRTIAKLKEELRDLARRSLEKLREDLKRVDDTLRKVEEKVRRTGPSEELIEELIRTIEKLLKEIVRINEEVLKAVRELLKTLLKLSEDVVRRIEEILRKRDHMVLHEYVNAAGITELRRLHEEIKERLDDVARRSEEELRRIIKKLKEVVKEIRKKLK

SEQ ID NO: 609 - protein, 231 aa, Artificial Sequence; identical to SEQ ID NO: 608
  Synthetic

SEQ ID NO: 610 - protein, 231 aa, Artificial Sequence
  Synthetic
SKEEEVEKVLRKWEEILRRLIEENKRANDKIRREYEELVKEIRRVLEEIKEVAERLGVSEEVKRILEKLIKLLEDILEYEKENVERLIELNERILRELKKSVEELKALVTRVRRDGLPESEVRKLVEDVLRKNEELLKEAKKAWRDSIENLKRVLEEVAKLVKTVLREIEEKRDHMVLHEYVNAAGITLLRVAEEVIRRILKVNTELMRVDERSIRESLKAISEVLKVLDT

SEQ ID NO: 611 - protein, 231 aa, Artificial Sequence; identical to SEQ ID NO: 610
  Synthetic

SEQ ID NO: 612 - protein, 231 aa, Artificial Sequence
  Synthetic
SKDEELARLLEELVERWRKIVEDLERDHRRLVKEIRELVERIRKKLEELVDRIRKNGIDERIVRLIEEIAKIIEEVLKEIVKLVERAVRENVRVLRESVRLVAELVETLARLLRGSDERVTEAIKKVLDTSEDLIRRVIKVNEDILREIAKLVEEVLREAERILTEIKKEGDRDHMVLHEYVNAAGITDVLRIIARILKLLRDLTRRLAEVAKAVHKLLEELLRKLKEDTR

SEQ ID NO: 613 - protein, 229 aa, Artificial Sequence
  Synthetic
SKEERLREVAEKHKKDLEDIVKRVDEAAKETARRLEEILKRLEEVLKKILDDLEKGPDDEKLKKVKKILKDIMDRLAELIKKILKLLKENLEKIKELLRRNLEISEELLKLAKGLSDRDVLETVRRVLEKLDEEWDRVLEDSRRIIETILRELDTLLREVEKLIKEIKDEISRDHMVLHEYVNAAGITRRVIKALKEVLERHVDATREVIERVKRVNKRLLEAVREVVT

SEQ ID NO: 614 - protein, 229 aa, Artificial Sequence; identical to SEQ ID NO: 613
  Synthetic

SEQ ID NO: 615 - protein, 234 aa, Artificial Sequence
  Synthetic
SAKETIRKLIEENKDIIRKLAEKLKRLLEESERIAEEALRLIKELLERIERALRRVGSGIDEELLKELEKELARLEEELKEILDRVRDLHRRLAEEIRKILEESKKLNEELEDRLRKDGDVEELLELLERVHATDVRLLRELLKLLKKVHEDVVSLLERLLELLKRVLDRIVERDHMVLHEYVNAAGITEREIRRLAKRLKELSDRLEEKIRKIKRELDDLSARLREKIERTRK

SEQ ID NO: 616 - protein, 231 aa, Artificial Sequence
  Synthetic
DKAEVLREALKLLKDLLEELIKIHEESLKRILDLIDTLVKVHEDALRALKELLERSGLDERELRKVERMATESLRTIAKLKEELRDLARRSLEKLREDLKRVDDTLRKVEEKVRRTGPSEELIEELIRTIEKLLKEIVRINEEVLKAVRELLKTLLKLSEDVVRRIEEILRKGRDHMVLHEYVNAAGITLRRLHEEIKERLDDVARRSEEELRRIIKKLKEVVKEIRKKLK

SEQ ID NO: 617 - protein, 231 aa, Artificial Sequence; identical to SEQ ID NO: 616
  Synthetic

SEQ ID NO: 618 - protein, 231 aa, Artificial Sequence
  Synthetic
SKEEEVEKVLRKWEEILRRLIEENKRANDKIRREYEELVKEIRRVLEEIKEVAERLGVSEEVKRILEKLIKLLEDILEYEKENVERLIELNERILRELKKSVEELKALVTRVRRDGLPESEVRKLVEDVLRKNEELLKEAKKAWRDSIENLKRVLEEVAKLVKTVLREIEEKIRDHMVLHEYVNAAGITLRVAEEVIRRILKVNTELMRVDERSIRESLKAISEVLKVLDT

SEQ ID NO: 619 - protein, 231 aa, Artificial Sequence; identical to SEQ ID NO: 618
  Synthetic

SEQ ID NO: 620 - protein, 231 aa, Artificial Sequence
  Synthetic
SKDEELARLLEELVERWRKIVEDLERDHRRLVKEIRELVERIRKKLEELVDRIRKNGIDERIVRLIEEIAKIIEEVLKEIVKLVERAVRENVRVLRESVRLVAELVETLARLLRGSDERVTEAIKKVLDTSEDLIRRVIKVNEDILREIAKLVEEVLREAERILTEIKKEGDRRDHMVLHEYVNAAGITVLRIIARILKLLRDLTRRLAEVAKAVHKLLEELLRKLKEDTR

SEQ ID NO: 621 - protein, 229 aa, Artificial Sequence
  Synthetic
SKEERLREVAEKHKKDLEDIVKRVDEAAKETARRLEEILKRLEEVLKKILDDLEKGPDDEKLKKVKKILKDIMDRLAELIKKILKLLKENLEKIKELLRRNLEISEELLKLAKGLSDRDVLETVRRVLEKLDEEWDRVLEDSRRIIETILRELDTLLREVEKLIKEIKDEISGRDHMVLHEYVNAAGITRVIKALKEVLERHVDATREVIERVKRVNKRLLEAVREVVT

SEQ ID NO: 622 - protein, 234 aa, Artificial Sequence
  Synthetic
SAKETIRKLIEENKDIIRKLAEKLKRLLEESERIAEEALRLIKELLERIERALRRVGSGIDEELLKELEKELARLEEELKEILDRVRDLHRRLAEEIRKILEESKKLNEELEDRLRKDGDVEELLELLERVHATDVRLLRELLKLLKKVHEDVVSLLERLLELLKRVLDRIVEERDHMVLHEYVNAAGITREIRRLAKRLKELSDRLEEKIRKIKRELDDLSARLREKIERTRK

SEQ ID NO: 623 - protein, 234 aa, Artificial Sequence; identical to SEQ ID NO: 622
  Synthetic

SEQ ID NO: 624 - protein, 231 aa, Artificial Sequence
  Synthetic
DKAEVLREALKLLKDLLEELIKIHEESLKRILDLIDTLVKVHEDALRALKELLERSGLDERELRKVERMATESLRTIAKLKEELRDLARRSLEKLREDLKRVDDTLRKVEEKVRRTGPSEELIEELIRTIEKLLKEIVRINEEVLKAVRELLKTLLKLSEDVVRRIEEILRKGGRDHMVLHEYVNAAGITRRLHEEIKERLDDVARRSEEELRRIIKKLKEVVKEIRKKLK

SEQ ID NO: 625 - protein, 231 aa, Artificial Sequence; identical to SEQ ID NO: 624
  Synthetic

SEQ ID NO: 626 - protein, 231 aa, Artificial Sequence
  Synthetic
SKEEEVEKVLRKWEEILRRLIEENKRANDKIRREYEELVKEIRRVLEEIKEVAERLGVSEEVKRILEKLIKLLEDILEYEKENVERLIELNERILRELKKSVEELKALVTRVRRDGLPESEVRKLVEDVLRKNEELLKEAKKAWRDSIENLKRVLEEVAKLVKTVLREIEEKIDRDHMVLHEYVNAAGITRVAEEVIRRILKVNTELMRVDERSIRESLKAISEVLKVLDT

SEQ ID NO: 627 - protein, 231 aa, Artificial Sequence
  Synthetic
SKDEELARLLEELVERWRKIVEDLERDHRRLVKEIRELVERIRKKLEELVDRIRKNGIDERIVRLIEEIAKIIEEVLKEIVKLVERAVRENVRVLRESVRLVAELVETLARLLRGSDERVTEAIKKVLDTSEDLIRRVIKVNEDILREIAKLVEEVLREAERILTEIKKEGDRERDHMVLHEYVNAAGITLRIIARILKLLRDLTRRLAEVAKAVHKLLEELLRKLKEDTR

SEQ ID NO: 628 - protein, 229 aa, Artificial Sequence
  Synthetic
SKEERLREVAEKHKKDLEDIVKRVDEAAKETARRLEEILKRLEEVLKKILDDLEKGPDDEKLKKVKKILKDIMDRLAELIKKILKLLKENLEKIKELLRRNLEISEELLKLAKGLSDRDVLETVRRVLEKLDEEWDRVLEDSRRIIETILRELDTLLREVEKLIKEIKDEISGSRDHMVLHEYVNAAGITVIKALKEVLERHVDATREVIERVKRVNKRLLEAVREVVT

SEQ ID NO: 629 - protein, 234 aa, Artificial Sequence
  Synthetic
SAKETIRKLIEENKDIIRKLAEKLKRLLEESERIAEEALRLIKELLERIERALRRVGSGIDEELLKELEKELARLEEELKEILDRVRDLHRRLAEEIRKILEESKKLNEELEDRLRKDGDVEELLELLERVHATDVRLLRELLKLLKKVHEDVVSLLERLLELLKRVLDRIVEELRDHMVLHEYVNAAGITEIRRLAKRLKELSDRLEEKIRKIKRELDDLSARLREKIERTRK

SEQ ID NO: 630 - protein, 234 aa, Artificial Sequence; identical to SEQ ID NO: 629
  Synthetic

SEQ ID NO: 631 - protein, 231 aa, Artificial Sequence
  Synthetic
DKAEVLREALKLLKDLLEELIKIHEESLKRILDLIDTLVKVHEDALRALKELLERSGLDERELRKVERMATESLRTIAKLKEELRDLARRSLEKLREDLKRVDDTLRKVEEKVRRTGPSEELIEELIRTIEKLLKEIVRINEEVLKAVRELLKTLLKLSEDVVRRIEEILRKGGVRDHMVLHEYVNAAGITRLHEEIKERLDDVARRSEEELRRIIKKLKEVVKEIRKKLK

SEQ ID NO: 632 - protein, 231 aa, Artificial Sequence; identical to SEQ ID NO: 631
  Synthetic

SEQ ID NO: 633 - protein, 236 aa, Artificial Sequence
  Synthetic
STREKAKKVLDTLRADNEDMKRVVEKILRALKRTNERAEKLAREITEEIKRILKEVGVSEEALKEIEDTLKRVLEEIKRLLDESKKLLEDVEREIREILKTSEELLERIEREIETVGSDEKTLAEILKRLLELNEEMNRRLLKILRDLLRLNEEVIRRLLAVLERLLDALKEALDRDHMVLHEYVNAAGITRRIKEKLRKALEELEREHRELEKELDKLHDESRKEHERIEEELRR

SEQ ID NO: 634 - protein, 236 aa, Artificial Sequence; identical to SEQ ID NO: 633
  Synthetic

SEQ ID NO: 635 - protein, 231 aa, Artificial Sequence
  Synthetic
SKEEEVEKVLRKWEEILRRLIEENKRANDKIRREYEELVKEIRRVLEEIKEVAERLGVSEEVKRILEKLIKLLEDILEYEKENVERLIELNERILRELKKSVEELKALVTRVRRDGLPESEVRKLVEDVLRKNEELLKEAKKAWRDSIENLKRVLEEVAKLVKTVLREIEEKIDDRDHMVLHEYVNAAGITVAEEVIRRILKVNTELMRVDERSIRESLKAISEVLKVLDT

SEQ ID NO: 636 - protein, 231 aa, Artificial Sequence
  Synthetic
SKDEELARLLEELVERWRKIVEDLERDHRRLVKEIRELVERIRKKLEELVDRIRKNGIDERIVRLIEEIAKIIEEVLKEIVKLVERAVRENVRVLRESVRLVAELVETLARLLRGSDERVTEAIKKVLDTSEDLIRRVIKVNEDILREIAKLVEEVLREAERILTEIKKEGDREERDHMVLHEYVNAAGITRIIARILKLLRDLTRRLAEVAKAVHKLLEELLRKLKEDTR

SEQ ID NO: 637 - protein, 229 aa, Artificial Sequence
  Synthetic
SKEERLREVAEKHKKDLEDIVKRVDEAAKETARRLEEILKRLEEVLKKILDDLEKGPDDEKLKKVKKILKDIMDRLAELIKKILKLLKENLEKIKELLRRNLEISEELLKLAKGLSDRDVLETVRRVLEKLDEEWDRVLEDSRRIIETILRELDTLLREVEKLIKEIKDEISGSKRDHMVLHEYVNAAGITIKALKEVLERHVDATREVIERVKRVNKRLLEAVREVVT

SEQ ID NO: 638 - protein, 234 aa, Artificial Sequence
  Synthetic
SAKETIRKLIEENKDIIRKLAEKLKRLLEESERIAEEALRLIKELLERIERALRRVGSGIDEELLKELEKELARLEEELKEILDRVRDLHRRLAEEIRKILEESKKLNEELEDRLRKDGDVEELLELLERVHATDVRLLRELLKLLKKVHEDVVSLLERLLELLKRVLDRIVEELGRDHMVLHEYVNAAGITIRRLAKRLKELSDRLEEKIRKIKRELDDLSARLREKIERTRK

SEQ ID NO: 639 - protein, 234 aa, Artificial Sequence; identical to SEQ ID NO: 638
  Synthetic

SEQ ID NO: 640 - protein, 231 aa, Artificial Sequence
  Synthetic
DKAEVLREALKLLKDLLEELIKIHEESLKRILDLIDTLVKVHEDALRALKELLERSGLDERELRKVERMATESLRTIAKLKEELRDLARRSLEKLREDLKRVDDTLRKVEEKVRRTGPSEELIEELIRTIEKLLKEIVRINEEVLKAVRELLKTLLKLSEDVVRRIEEILRKGGVPRDHMVLHEYVNAAGITLHEEIKERLDDVARRSEEELRRIIKKLKEVVKEIRKKLK

SEQ ID NO: 641 - protein, 231 aa, Artificial Sequence; identical to SEQ ID NO: 640
  Synthetic

SEQ ID NO: 642 - protein, 236 aa, Artificial Sequence
  Synthetic
STREKAKKVLDTLRADNEDMKRVVEKILRALKRTNERAEKLAREITEEIKRILKEVGVSEEALKEIEDTLKRVLEEIKRLLDESKKLLEDVEREIREILKTSEELLERIEREIETVGSDEKTLAEILKRLLELNEEMNRRLLKILRDLLRLNEEVIRRLLAVLERLLDALKEALDRRDHMVLHEYVNAAGITRIKEKLRKALEELEREHRELEKELDKLHDESRKEHERIEEELRR

SEQ ID NO: 643 - protein, 236 aa, Artificial Sequence; identical to SEQ ID NO: 642
  Synthetic

SEQ ID NO: 644 - protein, 231 aa, Artificial Sequence
  Synthetic
SKEEEVEKVLRKWEEILRRLIEENKRANDKIRREYEELVKEIRRVLEEIKEVAERLGVSEEVKRILEKLIKLLEDILEYEKENVERLIELNERILRELKKSVEELKALVTRVRRDGLPESEVRKLVEDVLRKNEELLKEAKKAWRDSIENLKRVLEEVAKLVKTVLREIEEKIDDERDHMVLHEYVNAAGITAEEVIRRILKVNTELMRVDERSIRESLKAISEVLKVLDT

SEQ ID NO: 645 - protein, 231 aa, Artificial Sequence; identical to SEQ ID NO: 644
  Synthetic

SEQ ID NO: 646 - protein, 231 aa, Artificial Sequence
  Synthetic
SKDEELARLLEELVERWRKIVEDLERDHRRLVKEIRELVERIRKKLEELVDRIRKNGIDERIVRLIEEIAKIIEEVLKEIVKLVERAVRENVRVLRESVRLVAELVETLARLLRGSDERVTEAIKKVLDTSEDLIRRVIKVNEDILREIAKLVEEVLREAERILTEIKKEGDREEIRDHMVLHEYVNAAGITIIARILKLLRDLTRRLAEVAKAVHKLLEELLRKLKEDTR

SEQ ID NO: 647 - protein, 237 aa, Artificial Sequence
  Synthetic
REDEVLRDIERLLREIEEKIRRILEESTAELRKVEEEVKRIIERTKRELKAIKEDVERKGIDEELRKLLDEVLDKLTKLIERNKRSLERILELIKRIIDENLEVLRDIIRLLEELLKATKDNGVPKDEVIKLVEDVVRRIEELVTRVVARNEKLVKDLDDLAKKNVRENEELLREIRDHMVLHEYVNAAGITREHIKALEKLARDLKEILRRHIEALKELARDLAEVIRKLLEDVKR

SEQ ID NO: 648 - protein, 237 aa, Artificial Sequence; identical to SEQ ID NO: 647
  Synthetic

SEQ ID NO: 649 - protein, 234 aa, Artificial Sequence
  Synthetic
SAKETIRKLIEENKDIIRKLAEKLKRLLEESERIAEEALRLIKELLERIERALRRVGSGIDEELLKELEKELARLEEELKEILDRVRDLHRRLAEEIRKILEESKKLNEELEDRLRKDGDVEELLELLERVHATDVRLLRELLKLLKKVHEDVVSLLERLLELLKRVLDRIVEELGLRDHMVLHEYVNAAGITRRLAKRLKELSDRLEEKIRKIKRELDDLSARLREKIERTRK

SEQ ID NO: 650 - protein, 234 aa, Artificial Sequence; identical to SEQ ID NO: 649
  Synthetic

SEQ ID NO: 651 - protein, 238 aa, Artificial Sequence
  Synthetic
SEAEKIREALETNLRLLEELIKRLKEILDTHNELLRRVIETLERLLKELLELLEEGGLDEEVLREVKRLVDELRKEARRVLDEHEKLVRKIKKEAEDVARESEEIIKEVEDKLKGLDREELLERVRRVLKKSDDLIAELVRRALKILEELTRLLAELLKKVVEILRRIVELVERVLTRDHMVLHEYVNAAGITEELEDRLRRLLEKLARDSAELMRELERILDRYARESEELDRRLAE

SEQ ID NO: 652 - protein, 238 aa, Artificial Sequence; identical to SEQ ID NO: 651
  Synthetic

SEQ ID NO: 653 - protein, 238 aa, Artificial Sequence
  Synthetic
DADELLRRLAEEVERVIREAEDLLRRWKETIKKVLDDLKRLLDELKKRNEDVIRELTKTKGDEELAKLIKDLLDTNEKVNRDLLRLIKKLLKDAERVNRRLLELIEELLEELKRVAKDLGLREEADKKLRDIADRARKELEDYERRLKELLKTVEDALRKAEEDSRKLKRDVEELLERDHMVLHEYVNAAGITLDRLRKLLERLREILRENLEALKKTLKRLEDVVREILEDLKRERK

SEQ ID NO: 654 - protein, 238 aa, Artificial Sequence; identical to SEQ ID NO: 653
  Synthetic

SEQ ID NO: 655 - protein, 231 aa, Artificial Sequence
  Synthetic
DKAEVLREALKLLKDLLEELIKIHEESLKRILDLIDTLVKVHEDALRALKELLERSGLDERELRKVERMATESLRTIAKLKEELRDLARRSLEKLREDLKRVDDTLRKVEEKVRRTGPSEELIEELIRTIEKLLKEIVRINEEVLKAVRELLKTLLKLSEDVVRRIEEILRKGGVPERDHMVLHEYVNAAGITHEEIKERLDDVARRSEEELRRIIKKLKEVVKEIRKKLK

SEQ ID NO: 656 - protein, 236 aa, Artificial Sequence
  Synthetic
STREKAKKVLDTLRADNEDMKRVVEKILRALKRTNERAEKLAREITEEIKRILKEVGVSEEALKEIEDTLKRVLEEIKRLLDESKKLLEDVEREIREILKTSEELLERIEREIETVGSDEKTLAEILKRLLELNEEMNRRLLKILRDLLRLNEEVIRRLLAVLERLLDALKEALDRGRDHMVLHEYVNAAGITIKEKLRKALEELEREHRELEKELDKLHDESRKEHERIEEELRR

SEQ ID NO: 657 - protein, 236 aa, Artificial Sequence; identical to SEQ ID NO: 656
  Synthetic

SEQ ID NO: 658 - protein, 231 aa, Artificial Sequence
  Synthetic
SKEEEVEKVLRKWEEILRRLIEENKRANDKIRREYEELVKEIRRVLEEIKEVAERLGVSEEVKRILEKLIKLLEDILEYEKENVERLIELNERILRELKKSVEELKALVTRVRRDGLPESEVRKLVEDVLRKNEELLKEAKKAWRDSIENLKRVLEEVAKLVKTVLREIEEKIDDEDRDHMVLHEYVNAAGITEEVIRRILKVNTELMRVDERSIRESLKAISEVLKVLDT

SEQ ID NO: 659 - protein, 231 aa, Artificial Sequence
  Synthetic
SKDEELARLLEELVERWRKIVEDLERDHRRLVKEIRELVERIRKKLEELVDRIRKNGIDERIVRLIEEIAKIIEEVLKEIVKLVERAVRENVRVLRESVRLVAELVETLARLLRGSDERVTEAIKKVLDTSEDLIRRVIKVNEDILREIAKLVEEVLREAERILTEIKKEGDREEIRRDHMVLHEYVNAAGITIARILKLLRDLTRRLAEVAKAVHKLLEELLRKLKEDTR

SEQ ID NO: 660 - protein, 238 aa, Artificial Sequence
  Synthetic
SEIEDVIRRLRKILEDLERVSEKLLREIKKILDEARRLNEEVIKEIKRVLEDAVRVFRDGSGSKEELAKLVEELIRELAKLAKEVDEIHKRIVERLKALVEDAERIHRKIVETLEEIVRGVPSEELKRVVEAIVEVIKEHLKVLADVIRRIIKAIEENAETIKRVLEDIVRVLELVLRDHMVLHEYVNAAGITIKRIEDSLRELEKTVRELLKRIKEASDKVREDVDRLIKELKEAAD

SEQ ID NO: 661 - protein, 229 aa, Artificial Sequence
  Synthetic
SKEERLREVAEKHKKDLEDIVKRVDEAAKETARRLEEILKRLEEVLKKILDDLEKGPDDEKLKKVKKILKDIMDRLAELIKKILKLLKENLEKIKELLRRNLEISEELLKLAKGLSDRDVLETVRRVLEKLDEEWDRVLEDSRRIIETILRELDTLLREVEKLIKEIKDEISGSKEVRDHMVLHEYVNAAGITALKEVLERHVDATREVIERVKRVNKRLLEAVREVVT

SEQ ID NO: 662 - protein, 237 aa, Artificial Sequence
  Synthetic
REDEVLRDIERLLREIEEKIRRILEESTAELRKVEEEVKRIIERTKRELKAIKEDVERKGIDEELRKLLDEVLDKLTKLIERNKRSLERILELIKRIIDENLEVLRDIIRLLEELLKATKDNGVPKDEVIKLVEDVVRRIEELVTRVVARNEKLVKDLDDLAKKNVRENEELLREIDRDHMVLHEYVNAAGITEHIKALEKLARDLKEILRRHIEALKELARDLAEVIRKLLEDVKR

SEQ ID NO: 663 - protein, 237 aa, Artificial Sequence; identical to SEQ ID NO: 662
  Synthetic

SEQ ID NO: 664 - protein, 232 aa, Artificial Sequence
  Synthetic
SEKELVDDIRRILEEILRLLRSLLEEVIRLLEENEKLVRRHLKTVIDILRRVAKLLDENGIRTDEADRVLERLEKAHRELLEDYKRALEKIKETLERVLREAEEVVKKIDDALRKLGGSKEVLKRLLEELLRLVEKIAEEIKRLLSELVRVTEELVRTNKELLEEAVRVIRKEVGDDRDHMVLHEYVNAAGITIDDLLKTSRDLVKRVLDLVDEVVKRVEDLVERVKEKIDT

SEQ ID NO: 665 - protein, 239 aa, Artificial Sequence
  Synthetic
SDEELLERVERLLRELLDTNRRMLEEVEKELRRLLETNKKTLDDVRRLLKELLDVLETRGVKDEKRLRDIRRRLEEVVRRLDKLHRDIAEDLKRVKERLDRLHERIKRRLEEVVKELRDLKDRGVDERKVLERAAEVLRELLELLRESLEEIERIIRRLLELHKRSTEEAARALEELLRDHMVLHEYVNAAGITEDLLKEDKERLEKIARDIERDLERYARDLKRLEDELREDIERARR

SEQ ID NO: 666 - protein, 239 aa, Artificial Sequence; identical to SEQ ID NO: 665
  Synthetic

SEQ ID NO: 667 - protein, 234 aa, Artificial Sequence
  Synthetic
SAKETIRKLIEENKDIIRKLAEKLKRLLEESERIAEEALRLIKELLERIERALRRVGSGIDEELLKELEKELARLEEELKEILDRVRDLHRRLAEEIRKILEESKKLNEELEDRLRKDGDVEELLELLERVHATDVRLLRELLKLLKKVHEDVVSLLERLLELLKRVLDRIVEELGLSRDHMVLHEYVNAAGITRLAKRLKELSDRLEEKIRKIKRELDDLSARLREKIERTRK

SEQ ID NO: 668 - protein, 234 aa, Artificial Sequence; identical to SEQ ID NO: 667
  Synthetic

SEQ ID NO: 669 - protein, 238 aa, Artificial Sequence
  Synthetic
SKEDKARELEKRLRDNLKKLEEVVRELAEVLKRNLEKLRRLAEELLRALKRLLDKLRAGGLPKDELEDLRREVEDVLRRLEDLLRKLKKANDESLTRLEELLRRAEEENRRVLTTLRELLRGNGDDRDLARLVARLVEANNRALEELLRLVAKNVEDNNRVLEELLRLVKELAKRLLGRDHMVLHEYVNAAGITELEERARKILRDDERDLRALEKRIRDIIREDREELERLKERARK

SEQ ID NO: 670 - protein, 238 aa, Artificial Sequence
  Synthetic
SEAEKIREALETNLRLLEELIKRLKEILDTHNELLRRVIETLERLLKELLELLEEGGLDEEVLREVKRLVDELRKEARRVLDEHEKLVRKIKKEAEDVARESEEIIKEVEDKLKGLDREELLERVRRVLKKSDDLIAELVRRALKILEELTRLLAELLKKVVEILRRIVELVERVLTKRDHMVLHEYVNAAGITELEDRLRRLLEKLARDSAELMRELERILDRYARESEELDRRLAE

SEQ ID NO: 671 - protein, 238 aa, Artificial Sequence; identical to SEQ ID NO: 670
  Synthetic

SEQ ID NO: 672 - protein, 238 aa, Artificial Sequence
  Synthetic
DADELLRRLAEEVERVIREAEDLLRRWKETIKKVLDDLKRLLDELKKRNEDVIRELTKTKGDEELAKLIKDLLDTNEKVNRDLLRLIKKLLKDAERVNRRLLELIEELLEELKRVAKDLGLREEADKKLRDIADRARKELEDYERRLKELLKTVEDALRKAEEDSRKLKRDVEELLERRDHMVLHEYVNAAGITDRLRKLLERLREILRENLEALKKTLKRLEDVVREILEDLKRERK

SEQ ID NO: 673 - protein, 231 aa, Artificial Sequence
  Synthetic
DKAEVLREALKLLKDLLEELIKIHEESLKRILDLIDTLVKVHEDALRALKELLERSGLDERELRKVERMATESLRTIAKLKEELRDLARRSLEKLREDLKRVDDTLRKVEEKVRRTGPSEELIEELIRTIEKLLKEIVRINEEVLKAVRELLKTLLKLSEDVVRRIEEILRKGGVPEERDHMVLHEYVNAAGITEEIKERLDDVARRSEEELRRIIKKLKEVVKEIRKKLK

SEQ ID NO: 674 - protein, 231 aa, Artificial Sequence; identical to SEQ ID NO: 673
  Synthetic

SEQ ID NO: 675 - protein, 236 aa, Artificial Sequence
  Synthetic
STREKAKKVLDTLRADNEDMKRVVEKILRALKRTNERAEKLAREITEEIKRILKEVGVSEEALKEIEDTLKRVLEEIKRLLDESKKLLEDVEREIREILKTSEELLERIEREIETVGSDEKTLAEILKRLLELNEEMNRRLLKILRDLLRLNEEVIRRLLAVLERLLDALKEALDRGDRDHMVLHEYVNAAGITKEKLRKALEELEREHRELEKELDKLHDESRKEHERIEEELRR

SEQ ID NO: 676 - protein, 239 aa, Artificial Sequence
  Synthetic
SERELIERWLELHKEILRLIRELVERLLKLHREILDTIKKLIRELLELLEDIARKLGLDKEAKDELREIAKRVEDKLEKLERESRKVEEDLKRKLKELTDESDTVEKRVRDVVRRGTQSREEIAEELLRLDRKLLKAVEELLKEILDLNKKLLDDVRAILEETRRVLEKLLDRVRRGERDHMVLHEYVNAAGITEDILEKVERTLKKLLDDSARMAEEVKKTLKELLERSEKVAEDVRK

SEQ ID NO: 677 - protein, 231 aa, Artificial Sequence
  Synthetic
SKDEELARLLEELVERWRKIVEDLERDHRRLVKEIRELVERIRKKLEELVDRIRKNGIDERIVRLIEEIAKIIEEVLKEIVKLVERAVRENVRVLRESVRLVAELVETLARLLRGSDERVTEAIKKVLDTSEDLIRRVIKVNEDILREIAKLVEEVLREAERILTEIKKEGDREEIRRRDHMVLHEYVNAAGITARILKLLRDLTRRLAEVAKAVHKLLEELLRKLKEDTR

SEQ ID NO: 678 - protein, 238 aa, Artificial Sequence
  Synthetic
SEIEDVIRRLRKILEDLERVSEKLLREIKKILDEARRLNEEVIKEIKRVLEDAVRVFRDGSGSKEELAKLVEELIRELAKLAKEVDEIHKRIVERLKALVEDAERIHRKIVETLEEIVRGVPSEELKRVVEAIVEVIKEHLKVLADVIRRIIKAIEENAETIKRVLEDIVRVLELVLRRDHMVLHEYVNAAGITKRIEDSLRELEKTVRELLKRIKEASDKVREDVDRLIKELKEAAD

SEQ ID NO: 679 - protein, 238 aa, Artificial Sequence; identical to SEQ ID NO: 678
  Synthetic

SEQ ID NO: 680 - protein, 237 aa, Artificial Sequence
  Synthetic
KEKEDALKKLEDLARKSREDLERVLRKHKKILDKIEELLKRVLDEHKKIVDDILRKTGTESEILKELARLLREHHEALRRLIEELRRLLEEHHKILEDLAREHKRLLDELIKVVADGVDKDELERIIKELRERDKKLVDDLRKVSEDLLDAVRKLVEDLERISRELLRRVEELAKGIDRDHMVLHEYVNAAGITKSKEILERIERAIDELLKVSEEILKLSEDASEELLKILREFAK

SEQ ID NO: 681 - protein, 229 aa, Artificial Sequence
  Synthetic
SKEERLREVAEKHKKDLEDIVKRVDEAAKETARRLEEILKRLEEVLKKILDDLEKGPDDEKLKKVKKILKDIMDRLAELIKKILKLLKENLEKIKELLRRNLEISEELLKLAKGLSDRDVLETVRRVLEKLDEEWDRVLEDSRRIIETILRELDTLLREVEKLIKEIKDEISGSKEVLRDHMVLHEYVNAAGITLKEVLERHVDATREVIERVKRVNKRLLEAVREVVT

SEQ ID NO: 682 - protein, 237 aa, Artificial Sequence
  Synthetic
REDEVLRDIERLLREIEEKIRRILEESTAELRKVEEEVKRIIERTKRELKAIKEDVERKGIDEELRKLLDEVLDKLTKLIERNKRSLERILELIKRIIDENLEVLRDIIRLLEELLKATKDNGVPKDEVIKLVEDVVRRIEELVTRVVARNEKLVKDLDDLAKKNVRENEELLREIDRRDHMVLHEYVNAAGITHIKALEKLARDLKEILRRHIEALKELARDLAEVIRKLLEDVKR

SEQ ID NO: 683 - protein, 234 aa, Artificial Sequence
  Synthetic
SAKETIRKLIEENKDIIRKLAEKLKRLLEESERIAEEALRLIKELLERIERALRRVGSGIDEELLKELEKELARLEEELKEILDRVRDLHRRLAEEIRKILEESKKLNEELEDRLRKDGDVEELLELLERVHATDVRLLRELLKLLKKVHEDVVSLLERLLELLKRVLDRIVEELGLSDRDHMVLHEYVNAAGITLAKRLKELSDRLEEKIRKIKRELDDLSARLREKIERTRK

SEQ ID NO: 684 - protein, 238 aa, Artificial Sequence
  Synthetic
SEAEKIREALETNLRLLEELIKRLKEILDTHNELLRRVIETLERLLKELLELLEEGGLDEEVLREVKRLVDELRKEARRVLDEHEKLVRKIKKEAEDVARESEEIIKEVEDKLKGLDREELLERVRRVLKKSDDLIAELVRRALKILEELTRLLAELLKKVVEILRRIVELVERVLTKKRDHMVLHEYVNAAGITLEDRLRRLLEKLARDSAELMRELERILDRYARESEELDRRLAE

SEQ ID NO: 685 - protein, 238 aa, Artificial Sequence; identical to SEQ ID NO: 684
  Synthetic

SEQ ID NO: 686 - protein, 240 aa, Artificial Sequence
  Synthetic
SDKEEIKRRVEKTARDLETEHDKIKKRLEDTVRDIKRELDELLEKYERVLRKIEKTLREGDGDATDLVDKLLETVKRLNEEVLRTVKKIADELRRLVEEVLRVLRESNETLARLLEEGNVGDEVRERLEEVLRRTEEIIKTLEEIVKRLLDELRRLVEELRRISKKLKDELDKIKEKGKRDHMVLHEYVNAAGITLDVVRRILEALAKLIKELLEALEEVLRRNKELIRELLRVLDEALK

SEQ ID NO: 687 - protein, 240 aa, Artificial Sequence; identical to SEQ ID NO: 686
  Synthetic

SEQ ID NO: 688 - protein, 231 aa, Artificial Sequence
  Synthetic
DKAEVLREALKLLKDLLEELIKIHEESLKRILDLIDTLVKVHEDALRALKELLERSGLDERELRKVERMATESLRTIAKLKEELRDLARRSLEKLREDLKRVDDTLRKVEEKVRRTGPSEELIEELIRTIEKLLKEIVRINEEVLKAVRELLKTLLKLSEDVVRRIEEILRKGGVPEEIRDHMVLHEYVNAAGITEIKERLDDVARRSEEELRRIIKKLKEVVKEIRKKLK

SEQ ID NO: 689 - protein, 231 aa, Artificial Sequence; identical to SEQ ID NO: 688
  Synthetic

SEQ ID NO: 690 - protein, 236 aa, Artificial Sequence
  Synthetic
STREKAKKVLDTLRADNEDMKRVVEKILRALKRTNERAEKLAREITEEIKRILKEVGVSEEALKEIEDTLKRVLEEIKRLLDESKKLLEDVEREIREILKTSEELLERIEREIETVGSDEKTLAEILKRLLELNEEMNRRLLKILRDLLRLNEEVIRRLLAVLERLLDALKEALDRGDVRDHMVLHEYVNAAGITEKLRKALEELEREHRELEKELDKLHDESRKEHERIEEELRR

SEQ ID NO: 691 - protein, 236 aa, Artificial Sequence; identical to SEQ ID NO: 690
  Synthetic

SEQ ID NO: 692 - protein, 239 aa, Artificial Sequence
  Synthetic
SERELIERWLELHKEILRLIRELVERLLKLHREILDTIKKLIRELLELLEDIARKLGLDKEAKDELREIAKRVEDKLEKLERESRKVEEDLKRKLKELTDESDTVEKRVRDVVRRGTQSREEIAEELLRLDRKLLKAVEELLKEILDLNKKLLDDVRAILEETRRVLEKLLDRVRRGERRDHMVLHEYVNAAGITDILEKVERTLKKLLDDSARMAEEVKKTLKELLERSEKVAEDVRK

SEQ ID NO: 693 - protein, 237 aa, Artificial Sequence
  Synthetic
KEKEDALKKLEDLARKSREDLERVLRKHKKILDKIEELLKRVLDEHKKIVDDILRKTGTESEILKELARLLREHHEALRRLIEELRRLLEEHHKILEDLAREHKRLLDELIKVVADGVDKDELERIIKELRERDKKLVDDLRKVSEDLLDAVRKLVEDLERISRELLRRVEELAKGIDERDHMVLHEYVNAAGITSKEILERIERAIDELLKVSEEILKLSEDASEELLKILREFAK

SEQ ID NO: 694 - protein, 237 aa, Artificial Sequence; identical to SEQ ID NO: 693
  Synthetic

SEQ ID NO: 695 - protein, 240 aa, Artificial Sequence
  Synthetic
DREKSVRDIEEDLKRVLDKLRRRVETSKEELKKVLKADKENADELEKTLRDVVRELDRGIDSEVLRAVREIVKRLVEVVRRYNELSEKIIRDLVRVNDRVLELLKRIVKRLIDVVRELEKIGDKEKALRRLEEVVKEVKRRIEELLKELEDVHRELVKILEEVNEDLKRVATEVKEIIKRDHMVLHEYVNAAGITKRLLDNLKENTDRLKEVIDRNLADLRDLAEELRAVIERLLEDARR

SEQ ID NO: 696 - protein, 237 aa, Artificial Sequence
  Synthetic
REDEVLRDIERLLREIEEKIRRILEESTAELRKVEEEVKRIIERTKRELKAIKEDVERKGIDEELRKLLDEVLDKLTKLIERNKRSLERILELIKRIIDENLEVLRDIIRLLEELLKATKDNGVPKDEVIKLVEDVVRRIEELVTRVVARNEKLVKDLDDLAKKNVRENEELLREIDRGRDHMVLHEYVNAAGITIKALEKLARDLKEILRRHIEALKELARDLAEVIRKLLEDVKR

SEQ ID NO: 697 - protein, 237 aa, Artificial Sequence; identical to SEQ ID NO: 696
  Synthetic

SEQ ID NO: 698 - protein, 237 aa, Artificial Sequence
  Synthetic
SREDLLRSLAELIETILRKSSELLDRLLKLVREHSETSERLIRELKKILEDILKLIKGGISEDDVRRIVKEAKDELRRSVEEVKKSVDDLKEELKRSLREVRELVKSIADALEEIVRRSSGLGEVIKKLLELLRRLLEVHERTIRLLAELLERHLEVHEESIRLLLRLLEELLELVERKRDHMVLHEYVNAAGITLRDHKAKNDKILRDVEEVLRRHLEELARILKDVKKVLDEARK

SEQ ID NO: 699 - protein, 239 aa, Artificial Sequence
  Synthetic
SAEDLVRRVKDLVDKLEDKLRKVVRTNERLWEEIRKRLEELVRRNKELWDALVEKLKAGDKDKDELIEEAKSLEDESNALVEKLVRDIERVLAESNKLLDTLAKEIEEVLEEIVELVERGSGSDKEAREKLEDIKARLKEVLKKLREESKRIIDELRRLLEEYKRLVKEIRDRIEEVRKRDHMVLHEYVNAAGITKVLKELVEELEKLVRDHNRVVEEVVRELVELLSRAVEVIKEVVK

SEQ ID NO: 700 - protein, 240 aa, Artificial Sequence
  Synthetic
DKDKRLEELLKRLKELNDKTFEELERILEELKRANEASLREAERILEELRARIEGGNLDKRLAELLKKLLDDLKRLLEEYTRTNEELLKRLRELLERYRETNKKLLDLLRKLLDEARRTGTDEDLLRRLEDILRKYEDEVRRLLKELEDILREYEDTSRRLLEELERIAKEAAERVSRGRDHMVLHEYVNAAGITRDLLRLLEEDSRTNSEVVKRLLDLLREDSKANSEVVKRLLDVLRE

SEQ ID NO: 701 - protein, 240 aa, Artificial Sequence
  Synthetic
SKEETLKRLLDELEKRNRETVERLERLLKELEDRNRASLEELEAVLEELERKIEESGLSKELKDTLARILEELRKLLEEYFRKNEELLRLLRKLLDEYARTNEELLRLLEELLDTARRTGGDSELLKRLEDIAREYEKRVRRLLEKLKDILDKYRKTVEELVRKMEEILKEAKKTISRIRDHMVLHEYVNAAGITRRLIEILRRDVELNLDVAKKLLELLKEDSKLNLDVARELLELLDR

SEQ ID NO: 702 - protein, 240 aa, Artificial Sequence; identical to SEQ ID NO: 701
  Synthetic

SEQ ID NO: 703 - protein, 238 aa, Artificial Sequence
  Synthetic
EEDERLTKRVEEIKRENRELLRRLEEEVKELERKSEKIVRDLKEKVDRAKEKLDSGKGSTELLVEELEKLIREILKLSEDHNRTLEEVVRKIEDVLRANLERLKELVDEILKALKERGKGDSEELKRKVEKVARDYERLLRKLREVVKRILDESKRLDEELEERLKEVLKKLEELIKRGGRDHMVLHEYVNAAGITLKLVEKLIRRNLRLLEELLRLVREILRTSNEILEEILKDARR

SEQ ID NO: 704 - protein, 234 aa, Artificial Sequence
  Synthetic
SAKETIRKLIEENKDIIRKLAEKLKRLLEESERIAEEALRLIKELLERIERALRRVGSGIDEELLKELEKELARLEEELKEILDRVRDLHRRLAEEIRKILEESKKLNEELEDRLRKDGDVEELLELLERVHATDVRLLRELLKLLKKVHEDVVSLLERLLELLKRVLDRIVEELGLSDKRDHMVLHEYVNAAGITAKRLKELSDRLEEKIRKIKRELDDLSARLREKIERTRK

SEQ ID NO: 705 - protein, 234 aa, Artificial Sequence; identical to SEQ ID NO: 704
  Synthetic

SEQ ID NO: 706 - protein, 238 aa, Artificial Sequence
  Synthetic
SEAEKIREALETNLRLLEELIKRLKEILDTHNELLRRVIETLERLLKELLELLEEGGLDEEVLREVKRLVDELRKEARRVLDEHEKLVRKIKKEAEDVARESEEIIKEVEDKLKGLDREELLERVRRVLKKSDDLIAELVRRALKILEELTRLLAELLKKVVEILRRIVELVERVLTKKGRDHMVLHEYVNAAGITEDRLRRLLEKLARDSAELMRELERILDRYARESEELDRRLAE

SEQ ID NO: 707 - protein, 238 aa, Artificial Sequence; identical to SEQ ID NO: 706
  Synthetic

SEQ ID NO: 708 - protein, 240 aa, Artificial Sequence
  Synthetic
SDKEEIKRRVEKTARDLETEHDKIKKRLEDTVRDIKRELDELLEKYERVLRKIEKTLREGDGDATDLVDKLLETVKRLNEEVLRTVKKIADELRRLVEEVLRVLRESNETLARLLEEGNVGDEVRERLEEVLRRTEEIIKTLEEIVKRLLDELRRLVEELRRISKKLKDELDKIKEKGKDRDHMVLHEYVNAAGITDVVRRILEALAKLIKELLEALEEVLRRNKELIRELLRVLDEALK

SEQ ID NO: 709 - protein, 240 aa, Artificial Sequence; identical to SEQ ID NO: 708
  Synthetic

SEQ ID NO: 710 - protein, 238 aa, Artificial Sequence
  Synthetic
DADELLRRLAEEVERVIREAEDLLRRWKETIKKVLDDLKRLLDELKKRNEDVIRELTKTKGDEELAKLIKDLLDTNEKVNRDLLRLIKKLLKDAERVNRRLLELIEELLEELKRVAKDLGLREEADKKLRDIADRARKELEDYERRLKELLKTVEDALRKAEEDSRKLKRDVEELLERGRRDHMVLHEYVNAAGITLRKLLERLREILRENLEALKKTLKRLEDVVREILEDLKRERK

SEQ ID NO: 711 - protein, 238 aa, Artificial Sequence; identical to SEQ ID NO: 710
  Synthetic

SEQ ID NO: 712 - protein, 231 aa, Artificial Sequence
  Synthetic
DKAEVLREALKLLKDLLEELIKIHEESLKRILDLIDTLVKVHEDALRALKELLERSGLDERELRKVERMATESLRTIAKLKEELRDLARRSLEKLREDLKRVDDTLRKVEEKVRRTGPSEELIEELIRTIEKLLKEIVRINEEVLKAVRELLKTLLKLSEDVVRRIEEILRKGGVPEEIDRDHMVLHEYVNAAGITIKERLDDVARRSEEELRRIIKKLKEVVKEIRKKLK

SEQ ID NO: 713 - protein, 236 aa, Artificial Sequence
  Synthetic
STREKAKKVLDTLRADNEDMKRVVEKILRALKRTNERAEKLAREITEEIKRILKEVGVSEEALKEIEDTLKRVLEEIKRLLDESKKLLEDVEREIREILKTSEELLERIEREIETVGSDEKTLAEILKRLLELNEEMNRRLLKILRDLLRLNEEVIRRLLAVLERLLDALKEALDRGDVPRDHMVLHEYVNAAGITKLRKALEELEREHRELEKELDKLHDESRKEHERIEEELRR

SEQ ID NO: 714 - protein, 236 aa, Artificial Sequence; identical to SEQ ID NO: 713
  Synthetic

SEQ ID NO: 715 - protein, 239 aa, Artificial Sequence
  Synthetic
SERELIERWLELHKEILRLIRELVERLLKLHREILDTIKKLIRELLELLEDIARKLGLDKEAKDELREIAKRVEDKLEKLERESRKVEEDLKRKLKELTDESDTVEKRVRDVVRRGTQSREEIAEELLRLDRKLLKAVEELLKEILDLNKKLLDDVRAILEETRRVLEKLLDRVRRGERTRDHMVLHEYVNAAGITILEKVERTLKKLLDDSARMAEEVKKTLKELLERSEKVAEDVRK

SEQ ID NO: 716 - protein, 231 aa, Artificial Sequence
  Synthetic
SKEEEVEKVLRKWEEILRRLIEENKRANDKIRREYEELVKEIRRVLEEIKEVAERLGVSEEVKRILEKLIKLLEDILEYEKENVERLIELNERILRELKKSVEELKALVTRVRRDGLPESEVRKLVEDVLRKNEELLKEAKKAWRDSIENLKRVLEEVAKLVKTVLREIEEKIDDEDVVRRDHMVLHEYVNAAGITIRRILKVNTELMRVDERSIRESLKAISEVLKVLDT

SEQ ID NO: 717 - protein, 231 aa, Artificial Sequence; identical to SEQ ID NO: 716
  Synthetic

SEQ ID NO: 718 - protein, 231 aa, Artificial Sequence
  Synthetic
SKDEELARLLEELVERWRKIVEDLERDHRRLVKEIRELVERIRKKLEELVDRIRKNGIDERIVRLIEEIAKIIEEVLKEIVKLVERAVRENVRVLRESVRLVAELVETLARLLRGSDERVTEAIKKVLDTSEDLIRRVIKVNEDILREIAKLVEEVLREAERILTEIKKEGDREEIRRILRDHMVLHEYVNAAGITILKLLRDLTRRLAEVAKAVHKLLEELLRKLKEDTR

SEQ ID NO: 719 - protein, 238 aa, Artificial Sequence
  Synthetic
SEIEDVIRRLRKILEDLERVSEKLLREIKKILDEARRLNEEVIKEIKRVLEDAVRVFRDGSGSKEELAKLVEELIRELAKLAKEVDEIHKRIVERLKALVEDAERIHRKIVETLEEIVRGVPSEELKRVVEAIVEVIKEHLKVLADVIRRIIKAIEENAETIKRVLEDIVRVLELVLRGERDHMVLHEYVNAAGITIEDSLRELEKTVRELLKRIKEASDKVREDVDRLIKELKEAAD

SEQ ID NO: 720 - protein, 238 aa, Artificial Sequence; identical to SEQ ID NO: 719
  Synthetic

SEQ ID NO: 721 - protein, 237 aa, Artificial Sequence
  Synthetic
KEKEDALKKLEDLARKSREDLERVLRKHKKILDKIEELLKRVLDEHKKIVDDILRKTGTESEILKELARLLREHHEALRRLIEELRRLLEEHHKILEDLAREHKRLLDELIKVVADGVDKDELERIIKELRERDKKLVDDLRKVSEDLLDAVRKLVEDLERISRELLRRVEELAKGIDEERDHMVLHEYVNAAGITKEILERIERAIDELLKVSEEILKLSEDASEELLKILREFAK

SEQ ID NO: 722 - protein, 241 aa, Artificial Sequence
  Synthetic
SEKELLKEILDRIRELLEDDNRLLKRIVDEIRKLLEEWLRVHKEILERIKELLDRIGAPEDVIRELTRALKETEEDVDRVIRTLEKLLKEVLDAHEEVVRKLDRLLKEVERLVEGGDAEEVVRDLLRVVKEILDESKAVIDELARVVDEILKLLEEVDRKLAKVVKEILEDVLRGSGDDERDHMVLHEYVNAAGITLEDLARDTRRVIEEAKRLLKEWRDRNKEVADTLKKLLEDLIRKIR

SEQ ID NO: 723 - protein, 241 aa, Artificial Sequence; identical to SEQ ID NO: 722
  Synthetic

SEQ ID NO: 724 - protein, 240 aa, Artificial Sequence
  Synthetic
DREKSVRDIEEDLKRVLDKLRRRVETSKEELKKVLKADKENADELEKTLRDVVRELDRGIDSEVLRAVREIVKRLVEVVRRYNELSEKIIRDLVRVNDRVLELLKRIVKRLIDVVRELEKIGDKEKALRRLEEVVKEVKRRIEELLKELEDVHRELVKILEEVNEDLKRVATEVKEIIKTRDHMVLHEYVNAAGITRLLDNLKENTDRLKEVIDRNLADLRDLAEELRAVIERLLEDARR

SEQ ID NO: 725 - protein, 241 aa, Artificial Sequence
  Synthetic
SAEEAVEKLVRIARAIVKINEDLSREVVRILREIVRLNEETTRLLVEIAREVVKVVEDGGLSEDVVRKLRKLVKELEDLLKKSNDDIRKLVEDVARRLKESNDEIRRLVERLEELLKRGPGDEELLRLVEELTEELLRTHEEVVKALEKLTADLLELHRELLERVRRLTKRIEEELKRVGRDHMVLHEYVNAAGITEKVLDDSAKELEKLKRELERLLEESRRKLEKLKRDLERVLEETRR

SEQ ID NO: 726 - protein, 241 aa, Artificial Sequence; identical to SEQ ID NO: 725
  Synthetic

SEQ ID NO: 727 - protein, 237 aa, Artificial Sequence
  Synthetic
REDEVLRDIERLLREIEEKIRRILEESTAELRKVEEEVKRIIERTKRELKAIKEDVERKGIDEELRKLLDEVLDKLTKLIERNKRSLERILELIKRIIDENLEVLRDIIRLLEELLKATKDNGVPKDEVIKLVEDVVRRIEELVTRVVARNEKLVKDLDDLAKKNVRENEELLREIDRGLRDHMVLHEYVNAAGITKALEKLARDLKEILRRHIEALKELARDLAEVIRKLLEDVKR

SEQ ID NO: 728 - protein, 239 aa, Artificial Sequence
  Synthetic
SAEDLVRRVKDLVDKLEDKLRKVVRTNERLWEEIRKRLEELVRRNKELWDALVEKLKAGDKDKDELIEEAKSLEDESNALVEKLVRDIERVLAESNKLLDTLAKEIEEVLEEIVELVERGSGSDKEAREKLEDIKARLKEVLKKLREESKRIIDELRRLLEEYKRLVKEIRDRIEEVRKRRDHMVLHEYVNAAGITVLKELVEELEKLVRDHNRVVEEVVRELVELLSRAVEVIKEVVK

SEQ ID NO: 729 - protein, 240 aa, Artificial Sequence
  Synthetic
DKDKRLEELLKRLKELNDKTFEELERILEELKRANEASLREAERILEELRARIEGGNLDKRLAELLKKLLDDLKRLLEEYTRTNEELLKRLRELLERYRETNKKLLDLLRKLLDEARRTGTDEDLLRRLEDILRKYEDEVRRLLKELEDILREYEDTSRRLLEELERIAKEAAERVSRGSRDHMVLHEYVNAAGITDLLRLLEEDSRTNSEVVKRLLDLLREDSKANSEVVKRLLDVLRE

SEQ ID NO: 730 - protein, 240 aa, Artificial Sequence
  Synthetic
SKEETLKRLLDELEKRNRETVERLERLLKELEDRNRASLEELEAVLEELERKIEESGLSKELKDTLARILEELRKLLEEYFRKNEELLRLLRKLLDEYARTNEELLRLLEELLDTARRTGGDSELLKRLEDIAREYEKRVRRLLEKLKDILDKYRKTVEELVRKMEEILKEAKKTISRIGRDHMVLHEYVNAAGITRLIEILRRDVELNLDVAKKLLELLKEDSKLNLDVARELLELLDR

SEQ ID NO: 731 - protein, 241 aa, Artificial Sequence
  Synthetic
SADEALEELVRRLLEVLKTVLERTKELSRDDLRVVKEVLRIIEELVKRLLKVIRDGLDDADRVLEEVERVIREAKREVKRWEEVVRKVVEDSRRLIERVLAEVEEVIKEAKRLLDERKSGGSREVIEELLSLLREIVRHHKEVSDEHLKLSAELVKRILDVVEETLRLATEIVRRIKEGGRDHMVLHEYVNAAGITKRRVERLLEDIERLLAELEKLNEDVLRENKALLEDLERRVRERKK

SEQ ID NO: 732 - protein, 239 aa, Artificial Sequence
  Synthetic
SDEELLERVERLLRELLDTNRRMLEEVEKELRRLLETNKKTLDDVRRLLKELLDVLETRGVKDEKRLRDIRRRLEEVVRRLDKLHRDIAEDLKRVKERLDRLHERIKRRLEEVVKELRDLKDRGVDERKVLERAAEVLRELLELLRESLEEIERIIRRLLELHKRSTEEAARALEELLRGLRDHMVLHEYVNAAGITLKEDKERLEKIARDIERDLERYARDLKRLEDELREDIERARR

SEQ ID NO: 733 - protein, 239 aa, Artificial Sequence; identical to SEQ ID NO: 732
  Synthetic

SEQ ID NO: 734 - protein, 238 aa, Artificial Sequence
  Synthetic
SEAEKIREALETNLRLLEELIKRLKEILDTHNELLRRVIETLERLLKELLELLEEGGLDEEVLREVKRLVDELRKEARRVLDEHEKLVRKIKKEAEDVARESEEIIKEVEDKLKGLDREELLERVRRVLKKSDDLIAELVRRALKILEELTRLLAELLKKVVEILRRIVELVERVLTKKGARDHMVLHEYVNAAGITDRLRRLLEKLARDSAELMRELERILDRYARESEELDRRLAE

SEQ ID NO: 735 - protein, 238 aa, Artificial Sequence; identical to SEQ ID NO: 734
  Synthetic

SEQ ID NO: 736 - protein, 242 aa, Artificial Sequence
  Synthetic
SEKERLMRLLDKLKDLNRRLVERIKELLDKALELHKKLVKELRELLERLKELVERGGVPEELLTRIDELIKKLEDEARKISKEVKRLIDELKKRLEDIHREVDRLIRELKETLKGVTDKDELLRRVAEVLERIARLSEELIREVKEVLEKIVELSRELLKRVLDVLRRIAELLEDALRKGNRDHMVLHEYVNAAGITEDDLRKIERDAEREYKKLKDELEELTERYRREIRKLKEELKADRK

SEQ ID NO: 737 - protein, 242 aa, Artificial Sequence; identical to SEQ ID NO: 736
  Synthetic

SEQ ID NO: 738 - protein, 238 aa, Artificial Sequence
  Synthetic
DADELLRRLAEEVERVIREAEDLLRRWKETIKKVLDDLKRLLDELKKRNEDVIRELTKTKGDEELAKLIKDLLDTNEKVNRDLLRLIKKLLKDAERVNRRLLELIEELLEELKRVAKDLGLREEADKKLRDIADRARKELEDYERRLKELLKTVEDALRKAEEDSRKLKRDVEELLERGRLRDHMVLHEYVNAAGITRKLLERLREILRENLEALKKTLKRLEDVVREILEDLKRERK

SEQ ID NO: 739 - protein, 238 aa, Artificial Sequence; identical to SEQ ID NO: 738
  Synthetic

SEQ ID NO: 740 - protein, 236 aa, Artificial Sequence
  Synthetic
STREKAKKVLDTLRADNEDMKRVVEKILRALKRTNERAEKLAREITEEIKRILKEVGVSEEALKEIEDTLKRVLEEIKRLLDESKKLLEDVEREIREILKTSEELLERIEREIETVGSDEKTLAEILKRLLELNEEMNRRLLKILRDLLRLNEEVIRRLLAVLERLLDALKEALDRGDVPERDHMVLHEYVNAAGITLRKALEELEREHRELEKELDKLHDESRKEHERIEEELRR

SEQ ID NO: 741 - protein, 239 aa, Artificial Sequence
  Synthetic
SERELIERWLELHKEILRLIRELVERLLKLHREILDTIKKLIRELLELLEDIARKLGLDKEAKDELREIAKRVEDKLEKLERESRKVEEDLKRKLKELTDESDTVEKRVRDVVRRGTQSREEIAEELLRLDRKLLKAVEELLKEILDLNKKLLDDVRAILEETRRVLEKLLDRVRRGERTDRDHMVLHEYVNAAGITLEKVERTLKKLLDDSARMAEEVKKTLKELLERSEKVAEDVRK

SEQ ID NO: 742 - protein, 237 aa, Artificial Sequence
  Synthetic
KEKEDALKKLEDLARKSREDLERVLRKHKKILDKIEELLKRVLDEHKKIVDDILRKTGTESEILKELARLLREHHEALRRLIEELRRLLEEHHKILEDLAREHKRLLDELIKVVADGVDKDELERIIKELRERDKKLVDDLRKVSEDLLDAVRKLVEDLERISRELLRRVEELAKGIDEELRDHMVLHEYVNAAGITEILERIERAIDELLKVSEEILKLSEDASEELLKILREFAK

SEQ ID NO: 743 - protein, 237 aa, Artificial Sequence; identical to SEQ ID NO: 742
  Synthetic

SEQ ID NO: 744 - protein, 241 aa, Artificial Sequence
  Synthetic
SEKELLKEILDRIRELLEDDNRLLKRIVDEIRKLLEEWLRVHKEILERIKELLDRIGAPEDVIRELTRALKETEEDVDRVIRTLEKLLKEVLDAHEEVVRKLDRLLKEVERLVEGGDAEEVVRDLLRVVKEILDESKAVIDELARVVDEILKLLEEVDRKLAKVVKEILEDVLRGSGDDEDRDHMVLHEYVNAAGITEDLARDTRRVIEEAKRLLKEWRDRNKEVADTLKKLLEDLIRKIR

SEQ ID NO: 745 - protein, 240 aa, Artificial Sequence
  Synthetic
DREKSVRDIEEDLKRVLDKLRRRVETSKEELKKVLKADKENADELEKTLRDVVRELDRGIDSEVLRAVREIVKRLVEVVRRYNELSEKIIRDLVRVNDRVLELLKRIVKRLIDVVRELEKIGDKEKALRRLEEVVKEVKRRIEELLKELEDVHRELVKILEEVNEDLKRVATEVKEIIKTGRDHMVLHEYVNAAGITLLDNLKENTDRLKEVIDRNLADLRDLAEELRAVIERLLEDARR

SEQ ID NO: 746 - protein, 241 aa, Artificial Sequence
  Synthetic
SAEEAVEKLVRIARAIVKINEDLSREVVRILREIVRLNEETTRLLVEIAREVVKVVEDGGLSEDVVRKLRKLVKELEDLLKKSNDDIRKLVEDVARRLKESNDEIRRLVERLEELLKRGPGDEELLRLVEELTEELLRTHEEVVKALEKLTADLLELHRELLERVRRLTKRIEEELKRVGVRDHMVLHEYVNAAGITKVLDDSAKELEKLKRELERLLEESRRKLEKLKRDLERVLEETRR

SEQ ID NO: 747 - protein, 241 aa, Artificial Sequence; identical to SEQ ID NO: 746
  Synthetic

SEQ ID NO: 748 - protein, 239 aa, Artificial Sequence
  Synthetic
SAEDLVRRVKDLVDKLEDKLRKVVRTNERLWEEIRKRLEELVRRNKELWDALVEKLKAGDKDKDELIEEAKSLEDESNALVEKLVRDIERVLAESNKLLDTLAKEIEEVLEEIVELVERGSGSDKEAREKLEDIKARLKEVLKKLREESKRIIDELRRLLEEYKRLVKEIRDRIEEVRKRNRDHMVLHEYVNAAGITLKELVEELEKLVRDHNRVVEEVVRELVELLSRAVEVIKEVVK

SEQ ID NO: 749 - protein, 239 aa, Artificial Sequence; identical to SEQ ID NO: 748
  Synthetic

SEQ ID NO: 750 - protein, 240 aa, Artificial Sequence
  Synthetic
DKDKRLEELLKRLKELNDKTFEELERILEELKRANEASLREAERILEELRARIEGGNLDKRLAELLKKLLDDLKRLLEEYTRTNEELLKRLRELLERYRETNKKLLDLLRKLLDEARRTGTDEDLLRRLEDILRKYEDEVRRLLKELEDILREYEDTSRRLLEELERIAKEAAERVSRGSDRDHMVLHEYVNAAGITLLRLLEEDSRTNSEVVKRLLDLLREDSKANSEVVKRLLDVLRE

SEQ ID NO: 751 - protein, 240 aa, Artificial Sequence
  Synthetic
SKEETLKRLLDELEKRNRETVERLERLLKELEDRNRASLEELEAVLEELERKIEESGLSKELKDTLARILEELRKLLEEYFRKNEELLRLLRKLLDEYARTNEELLRLLEELLDTARRTGGDSELLKRLEDIAREYEKRVRRLLEKLKDILDKYRKTVEELVRKMEEILKEAKKTISRIGSRDHMVLHEYVNAAGITLIEILRRDVELNLDVAKKLLELLKEDSKLNLDVARELLELLDR

SEQ ID NO: 752 - protein, 240 aa, Artificial Sequence; identical to SEQ ID NO: 751
  Synthetic

SEQ ID NO: 753 - protein, 239 aa, Artificial Sequence
  Synthetic
SDEELLERVERLLRELLDTNRRMLEEVEKELRRLLETNKKTLDDVRRLLKELLDVLETRGVKDEKRLRDIRRRLEEVVRRLDKLHRDIAEDLKRVKERLDRLHERIKRRLEEVVKELRDLKDRGVDERKVLERAAEVLRELLELLRESLEEIERIIRRLLELHKRSTEEAARALEELLRGLERDHMVLHEYVNAAGITKEDKERLEKIARDIERDLERYARDLKRLEDELREDIERARR

SEQ ID NO: 754 - protein, 239 aa, Artificial Sequence; identical to SEQ ID NO: 753
  Synthetic

SEQ ID NO: 755 - protein, 238 aa, Artificial Sequence
  Synthetic
EEDERLTKRVEEIKRENRELLRRLEEEVKELERKSEKIVRDLKEKVDRAKEKLDSGKGSTELLVEELEKLIREILKLSEDHNRTLEEVVRKIEDVLRANLERLKELVDEILKALKERGKGDSEELKRKVEKVARDYERLLRKLREVVKRILDESKRLDEELEERLKEVLKKLEELIKRGGPDRDHMVLHEYVNAAGITLVEKLIRRNLRLLEELLRLVREILRTSNEILEEILKDARR

SEQ ID NO: 756 - protein, 238 aa, Artificial Sequence
  Synthetic
SEAEKIREALETNLRLLEELIKRLKEILDTHNELLRRVIETLERLLKELLELLEEGGLDEEVLREVKRLVDELRKEARRVLDEHEKLVRKIKKEAEDVARESEEIIKEVEDKLKGLDREELLERVRRVLKKSDDLIAELVRRALKILEELTRLLAELLKKVVEILRRIVELVERVLTKKGAPRDHMVLHEYVNAAGITRLRRLLEKLARDSAELMRELERILDRYARESEELDRRLAE

SEQ ID NO: 757 - protein, 238 aa, Artificial Sequence; identical to SEQ ID NO: 756
  Synthetic

SEQ ID NO: 758 - protein, 242 aa, Artificial Sequence
  Synthetic
SEKERLMRLLDKLKDLNRRLVERIKELLDKALELHKKLVKELRELLERLKELVERGGVPEELLTRIDELIKKLEDEARKISKEVKRLIDELKKRLEDIHREVDRLIRELKETLKGVTDKDELLRRVAEVLERIARLSEELIREVKEVLEKIVELSRELLKRVLDVLRRIAELLEDALRKGNVRDHMVLHEYVNAAGITDDLRKIERDAEREYKKLKDELEELTERYRREIRKLKEELKADRK

SEQ ID NO: 759 - protein, 242 aa, Artificial Sequence; identical to SEQ ID NO: 758
  Synthetic

SEQ ID NO: 760 - protein, 240 aa, Artificial Sequence
  Synthetic
SDKEEIKRRVEKTARDLETEHDKIKKRLEDTVRDIKRELDELLEKYERVLRKIEKTLREGDGDATDLVDKLLETVKRLNEEVLRTVKKIADELRRLVEEVLRVLRESNETLARLLEEGNVGDEVRERLEEVLRRTEEIIKTLEEIVKRLLDELRRLVEELRRISKKLKDELDKIKEKGKDEKRDHMVLHEYVNAAGITVRRILEALAKLIKELLEALEEVLRRNKELIRELLRVLDEALK

SEQ ID NO: 761 - protein, 240 aa, Artificial Sequence; identical to SEQ ID NO: 760
  Synthetic

SEQ ID NO: 762 - protein, 238 aa, Artificial Sequence
  Synthetic
DADELLRRLAEEVERVIREAEDLLRRWKETIKKVLDDLKRLLDELKKRNEDVIRELTKTKGDEELAKLIKDLLDTNEKVNRDLLRLIKKLLKDAERVNRRLLELIEELLEELKRVAKDLGLREEADKKLRDIADRARKELEDYERRLKELLKTVEDALRKAEEDSRKLKRDVEELLERGRLRRDHMVLHEYVNAAGITKLLERLREILRENLEALKKTLKRLEDVVREILEDLKRERK

SEQ ID NO: 763 - protein, 236 aa, Artificial Sequence
  Synthetic
STREKAKKVLDTLRADNEDMKRVVEKILRALKRTNERAEKLAREITEEIKRILKEVGVSEEALKEIEDTLKRVLEEIKRLLDESKKLLEDVEREIREILKTSEELLERIEREIETVGSDEKTLAEILKRLLELNEEMNRRLLKILRDLLRLNEEVIRRLLAVLERLLDALKEALDRGDVPEDRDHMVLHEYVNAAGITRKALEELEREHRELEKELDKLHDESRKEHERIEEELRR

SEQ ID NO: 764 - protein, 236 aa, Artificial Sequence; identical to SEQ ID NO: 763
  Synthetic

SEQ ID NO: 765 - protein, 243 aa, Artificial Sequence
  Synthetic
DLERVVEDIVDKAKRLLDKNLEVLKRIVDEVLRLLERLLRESRKVVKRVKEIIEELVRDEKELRRVKRALEEVLRRHEEIAKELKERLRKVAKEAEEKHKKLVEDLKRVVDEVRKKLSGPLDREKVLEVLDELVTIIAKLLDENIKVLEEVIRVIAELLERLLDSHRRLIDIIAKLLEGLRPRDHMVLHEYVNAAGITKRDSEKVVDDLKKELERIKREVKRLIEENARTLADIKRAVDEARK

SEQ ID NO: 766 - protein, 239 aa, Artificial Sequence
  Synthetic
SERELIERWLELHKEILRLIRELVERLLKLHREILDTIKKLIRELLELLEDIARKLGLDKEAKDELREIAKRVEDKLEKLERESRKVEEDLKRKLKELTDESDTVEKRVRDVVRRGTQSREEIAEELLRLDRKLLKAVEELLKEILDLNKKLLDDVRAILEETRRVLEKLLDRVRRGERTDDRDHMVLHEYVNAAGITEKVERTLKKLLDDSARMAEEVKKTLKELLERSEKVAEDVRK

SEQ ID NO: 767 - protein, 238 aa, Artificial Sequence
  Synthetic
SEIEDVIRRLRKILEDLERVSEKLLREIKKILDEARRLNEEVIKEIKRVLEDAVRVFRDGSGSKEELAKLVEELIRELAKLAKEVDEIHKRIVERLKALVEDAERIHRKIVETLEEIVRGVPSEELKRVVEAIVEVIKEHLKVLADVIRRIIKAIEENAETIKRVLEDIVRVLELVLRGEGSRDHMVLHEYVNAAGITDSLRELEKTVRELLKRIKEASDKVREDVDRLIKELKEAAD

SEQ ID NO: 768 - protein, 237 aa, Artificial Sequence
  Synthetic
KEKEDALKKLEDLARKSREDLERVLRKHKKILDKIEELLKRVLDEHKKIVDDILRKTGTESEILKELARLLREHHEALRRLIEELRRLLEEHHKILEDLAREHKRLLDELIKVVADGVDKDELERIIKELRERDKKLVDDLRKVSEDLLDAVRKLVEDLERISRELLRRVEELAKGIDEELARDHMVLHEYVNAAGITILERIERAIDELLKVSEEILKLSEDASEELLKILREFAK

SEQ ID NO: 769 - protein, 241 aa, Artificial Sequence
  Synthetic
SEKELLKEILDRIRELLEDDNRLLKRIVDEIRKLLEEWLRVHKEILERIKELLDRIGAPEDVIRELTRALKETEEDVDRVIRTLEKLLKEVLDAHEEVVRKLDRLLKEVERLVEGGDAEEVVRDLLRVVKEILDESKAVIDELARVVDEILKLLEEVDRKLAKVVKEILEDVLRGSGDDEDARDHMVLHEYVNAAGITDLARDTRRVIEEAKRLLKEWRDRNKEVADTLKKLLEDLIRKIR

SEQ ID NO: 770 - protein, 240 aa, Artificial Sequence
  Synthetic
DREKSVRDIEEDLKRVLDKLRRRVETSKEELKKVLKADKENADELEKTLRDVVRELDRGIDSEVLRAVREIVKRLVEVVRRYNELSEKIIRDLVRVNDRVLELLKRIVKRLIDVVRELEKIGDKEKALRRLEEVVKEVKRRIEELLKELEDVHRELVKILEEVNEDLKRVATEVKEIIKTGIRDHMVLHEYVNAAGITLDNLKENTDRLKEVIDRNLADLRDLAEELRAVIERLLEDARR

SEQ ID NO: 771 - protein, 240 aa, Artificial Sequence; identical to SEQ ID NO: 770
  Synthetic

SEQ ID NO: 772 - protein, 241 aa, Artificial Sequence
  Synthetic
SAEEAVEKLVRIARAIVKINEDLSREVVRILREIVRLNEETTRLLVEIAREVVKVVEDGGLSEDVVRKLRKLVKELEDLLKKSNDDIRKLVEDVARRLKESNDEIRRLVERLEELLKRGPGDEELLRLVEELTEELLRTHEEVVKALEKLTADLLELHRELLERVRRLTKRIEEELKRVGVSRDHMVLHEYVNAAGITVLDDSAKELEKLKRELERLLEESRRKLEKLKRDLERVLEETRR

SEQ ID NO: 773 - protein, 241 aa, Artificial Sequence; identical to SEQ ID NO: 772
  Synthetic

SEQ ID NO: 774 - protein, 237 aa, Artificial Sequence
  Synthetic
REDEVLRDIERLLREIEEKIRRILEESTAELRKVEEEVKRIIERTKRELKAIKEDVERKGIDEELRKLLDEVLDKLTKLIERNKRSLERILELIKRIIDENLEVLRDIIRLLEELLKATKDNGVPKDEVIKLVEDVVRRIEELVTRVVARNEKLVKDLDDLAKKNVRENEELLREIDRGLDERDHMVLHEYVNAAGITLEKLARDLKEILRRHIEALKELARDLAEVIRKLLEDVKR

SEQ ID NO: 775 - protein, 237 aa, Artificial Sequence; identical to SEQ ID NO: 774
  Synthetic

SEQ ID NO: 776 - protein, 243 aa, Artificial Sequence
  Synthetic
SEAERLADEVRKAVKKSEEDNETLVREVEKAVRELKKNNKTWVDEVRKLMKRLVDLLRDGQVSDRDLLKELEEVLRRVLEALAENHERTEEILKRWLDRYAEDIERLRKVLKEVIEALKRGGSDDKRIVDELEEILRRNEDVLDKIAKRLRRLLEEDRRLLERIVRELKRLLDDLDRITKEGRDHMVLHEYVNAAGITLEIIEELVRLNNEILERLLKIVRELHKDNIKILEDLLRIIEEVLR

SEQ ID NO: 777 - protein, 243 aa, Artificial Sequence; identical to SEQ ID NO: 776
  Synthetic

SEQ ID NO: 778 - protein, 239 aa, Artificial Sequence
  Synthetic
SAEDLVRRVKDLVDKLEDKLRKVVRTNERLWEEIRKRLEELVRRNKELWDALVEKLKAGDKDKDELIEEAKSLEDESNALVEKLVRDIERVLAESNKLLDTLAKEIEEVLEEIVELVERGSGSDKEAREKLEDIKARLKEVLKKLREESKRIIDELRRLLEEYKRLVKEIRDRIEEVRKRNSRDHMVLHEYVNAAGITKELVEELEKLVRDHNRVVEEVVRELVELLSRAVEVIKEVVK

SEQ ID NO: 779 - protein, 243 aa, Artificial Sequence
  Synthetic
SRVEELKKLIEDILRISREVVERIARVAEDIHRINRRVLDDLRKLIEDILRTVEEILARKVSGTEAAEALRDTIRRVVDEIRKLLEEHEKRSAELLEEIRKLLEDILRRSERAVEEIRELLKKGVSTKDVLRIIEEILREHLELLERVVRRIEEILRELLKTIEEIVKRIKEILEELKEVLKRDHMVLHEYVNAAGITKEDLDRILEEYRRLLEEIKRKLEEILRRVEELHRRLRRKLEEIDR

SEQ ID NO: 780 - protein, 243 aa, Artificial Sequence; identical to SEQ ID NO: 779
  Synthetic

SEQ ID NO: 781 - protein, 240 aa, Artificial Sequence
  Synthetic
DKDKRLEELLKRLKELNDKTFEELERILEELKRANEASLREAERILEELRARIEGGNLDKRLAELLKKLLDDLKRLLEEYTRTNEELLKRLRELLERYRETNKKLLDLLRKLLDEARRTGTDEDLLRRLEDILRKYEDEVRRLLKELEDILREYEDTSRRLLEELERIAKEAAERVSRGSDKRDHMVLHEYVNAAGITLRLLEEDSRTNSEVVKRLLDLLREDSKANSEVVKRLLDVLRE

SEQ ID NO: 782 - protein, 240 aa, Artificial Sequence
  Synthetic
SKEETLKRLLDELEKRNRETVERLERLLKELEDRNRASLEELEAVLEELERKIEESGLSKELKDTLARILEELRKLLEEYFRKNEELLRLLRKLLDEYARTNEELLRLLEELLDTARRTGGDSELLKRLEDIAREYEKRVRRLLEKLKDILDKYRKTVEELVRKMEEILKEAKKTISRIGSERDHMVLHEYVNAAGITIEILRRDVELNLDVAKKLLELLKEDSKLNLDVARELLELLDR

SEQ ID NO: 783 - protein, 240 aa, Artificial Sequence; identical to SEQ ID NO: 782
  Synthetic

SEQ ID NO: 784 - protein, 243 aa, Artificial Sequence
  Synthetic
DEEETLRRLLERKVELAKEYLDVSKEVIDRTTKLLDEYLKTSKRIVDATVELLERGDLGPDELIKRLAEELERSLRELEEEIKRLKRELEESLKKLKEIIDRLAEEAEKLLAVLKRGEGSEEEALRALASLVRELIEVLRENDERLRDVLRRLIEALRKNNEILERVLRKLVRAAEERGRDERDHMVLHEYVNAAGITLRELNEITKDLEAKLEKLLRDLNELTKALEEELKRLLDELKKRTD

SEQ ID NO: 785 - protein, 243 aa, Artificial Sequence; identical to SEQ ID NO: 784
  Synthetic

SEQ ID NO: 786 - protein, 243 aa, Artificial Sequence
  Synthetic
SEAERTKESLKKVLKALVDLNRELLRKLEENMRELTKLNEEVKRALKEVLDKVREGGIVDKDAEREAERLMRELDKSSEDTARETRKLIEESKKSTRRTEEEARKLTETLDRLAKGGLPREDLLRALVRLLEELARLIEEDVRRNAELVKRHIELVERDVAELLRLIKELVDLLADLAEKGSRDHMVLHEYVNAAGITKELADRYREEVRKSKDKLRSILEDYKRKVDELKERLRELIEEVET

SEQ ID NO: 787 - protein, 243 aa, Artificial Sequence; identical to SEQ ID NO: 786
  Synthetic

SEQ ID NO: 788 - protein, 238 aa, Artificial Sequence
  Synthetic
EEDERLTKRVEEIKRENRELLRRLEEEVKELERKSEKIVRDLKEKVDRAKEKLDSGKGSTELLVEELEKLIREILKLSEDHNRTLEEVVRKIEDVLRANLERLKELVDEILKALKERGKGDSEELKRKVEKVARDYERLLRKLREVVKRILDESKRLDEELEERLKEVLKKLEELIKRGGPDKRDHMVLHEYVNAAGITVEKLIRRNLRLLEELLRLVREILRTSNEILEEILKDARR

SEQ ID NO: 789 - protein, 234 aa, Artificial Sequence
  Synthetic
SAKETIRKLIEENKDIIRKLAEKLKRLLEESERIAEEALRLIKELLERIERALRRVGSGIDEELLKELEKELARLEEELKEILDRVRDLHRRLAEEIRKILEESKKLNEELEDRLRKDGDVEELLELLERVHATDVRLLRELLKLLKKVHEDVVSLLERLLELLKRVLDRIVEELGLSDKELERDHMVLHEYVNAAGITLKELSDRLEEKIRKIKRELDDLSARLREKIERTRK

SEQ ID NO: 790 - protein, 234 aa, Artificial Sequence; identical to SEQ ID NO: 789
  Synthetic

SEQ ID NO: 791 - protein, 238 aa, Artificial Sequence
  Synthetic
SKEDKARELEKRLRDNLKKLEEVVRELAEVLKRNLEKLRRLAEELLRALKRLLDKLRAGGLPKDELEDLRREVEDVLRRLEDLLRKLKKANDESLTRLEELLRRAEEENRRVLTTLRELLRGNGDDRDLARLVARLVEANNRALEELLRLVAKNVEDNNRVLEELLRLVKELAKRLLGRIRDERDHMVLHEYVNAAGITARKILRDDERDLRALEKRIRDIIREDREELERLKERARK

SEQ ID NO: 792 - protein, 243 aa, Artificial Sequence
  Synthetic
KREDILKKLEDIIRDIIDKLRRILEKVKRLNEDIIREIKRLLDESLKTLEDLLKRIADKSRDRELEDILRRVLEKLRRSLDKLRDTLRKLKEETDTVLERAERTLKELKDRLEKLLRDGEKVSEEDLVEALKALIDELRKVLEDVIRVSKELVERLLRALREHLETNKRLVKELLDALRKTTGRDHMVLHEYVNAAGITRRLEEEVERVARELEKAHRDLERDIRRVAEELKKLLKKLRDDRR

SEQ ID NO: 793 - protein, 244 aa, Artificial Sequence
  Synthetic
SAEETLRRITEESKRVLEEITKKYEDLERESREVLRKLREDLDRIKRELEDVLTKGGDDKDEVLTVLEKVLDELLKLHRENLRVIKELLRKVLEVDRENLEVLKRLLEKARDLLRRSGRDEKDLKKLEDELRKVKEELEKKHEASKRDIEDLERELDKVTEEVERLLRKLKEELRRAAEGSDERDHMVLHEYVNAAGITIRVLEEILKINEELNRKIIKFARENLERNRRVNKKVIEVLREAAR

SEQ ID NO: 794 - protein, 238 aa, Artificial Sequence
  Synthetic
SEAEKIREALETNLRLLEELIKRLKEILDTHNELLRRVIETLERLLKELLELLEEGGLDEEVLREVKRLVDELRKEARRVLDEHEKLVRKIKKEAEDVARESEEIIKEVEDKLKGLDREELLERVRRVLKKSDDLIAELVRRALKILEELTRLLAELLKKVVEILRRIVELVERVLTKKGAPKRDHMVLHEYVNAAGITLRRLLEKLARDSAELMRELERILDRYARESEELDRRLAE

SEQ ID NO: 795 - protein, 238 aa, Artificial Sequence; identical to SEQ ID NO: 794
  Synthetic

SEQ ID NO: 796 - protein, 242 aa, Artificial Sequence
  Synthetic
SEKERLMRLLDKLKDLNRRLVERIKELLDKALELHKKLVKELRELLERLKELVERGGVPEELLTRIDELIKKLEDEARKISKEVKRLIDELKKRLEDIHREVDRLIRELKETLKGVTDKDELLRRVAEVLERIARLSEELIREVKEVLEKIVELSRELLKRVLDVLRRIAELLEDALRKGNVSRDHMVLHEYVNAAGITDLRKIERDAEREYKKLKDELEELTERYRREIRKLKEELKADRK

SEQ ID NO: 797 - protein, 242 aa, Artificial Sequence; identical to SEQ ID NO: 796
  Synthetic

SEQ ID NO: 798 - protein, 240 aa, Artificial Sequence
  Synthetic
SDKEEIKRRVEKTARDLETEHDKIKKRLEDTVRDIKRELDELLEKYERVLRKIEKTLREGDGDATDLVDKLLETVKRLNEEVLRTVKKIADELRRLVEEVLRVLRESNETLARLLEEGNVGDEVRERLEEVLRRTEEIIKTLEEIVKRLLDELRRLVEELRRISKKLKDELDKIKEKGKDEKRRDHMVLHEYVNAAGITRRILEALAKLIKELLEALEEVLRRNKELIRELLRVLDEALK

SEQ ID NO: 799 - protein, 238 aa, Artificial Sequence
  Synthetic
DADELLRRLAEEVERVIREAEDLLRRWKETIKKVLDDLKRLLDELKKRNEDVIRELTKTKGDEELAKLIKDLLDTNEKVNRDLLRLIKKLLKDAERVNRRLLELIEELLEELKRVAKDLGLREEADKKLRDIADRARKELEDYERRLKELLKTVEDALRKAEEDSRKLKRDVEELLERGRLRKRDHMVLHEYVNAAGITLLERLREILRENLEALKKTLKRLEDVVREILEDLKRERK

SEQ ID NO: 800 - protein, 236 aa, Artificial Sequence
  Synthetic
STREKAKKVLDTLRADNEDMKRVVEKILRALKRTNERAEKLAREITEEIKRILKEVGVSEEALKEIEDTLKRVLEEIKRLLDESKKLLEDVEREIREILKTSEELLERIEREIETVGSDEKTLAEILKRLLELNEEMNRRLLKILRDLLRLNEEVIRRLLAVLERLLDALKEALDRGDVPEDLRDHMVLHEYVNAAGITKALEELEREHRELEKELDKLHDESRKEHERIEEELRR

SEQ ID NO: 801 - protein, 236 aa, Artificial Sequence; identical to SEQ ID NO: 800
  Synthetic

SEQ ID NO: 802 - protein, 243 aa, Artificial Sequence
  Synthetic
DLERVVEDIVDKAKRLLDKNLEVLKRIVDEVLRLLERLLRESRKVVKRVKEIIEELVRDEKELRRVKRALEEVLRRHEEIAKELKERLRKVAKEAEEKHKKLVEDLKRVVDEVRKKLSGPLDREKVLEVLDELVTIIAKLLDENIKVLEEVIRVIAELLERLLDSHRRLIDIIAKLLEGLRPGRDHMVLHEYVNAAGITRDSEKVVDDLKKELERIKREVKRLIEENARTLADIKRAVDEARK

SEQ ID NO: 803 - protein, 243 aa, Artificial Sequence; identical to SEQ ID NO: 802
  Synthetic

SEQ ID NO: 804 - protein, 239 aa, Artificial Sequence
  Synthetic
SERELIERWLELHKEILRLIRELVERLLKLHREILDTIKKLIRELLELLEDIARKLGLDKEAKDELREIAKRVEDKLEKLERESRKVEEDLKRKLKELTDESDTVEKRVRDVVRRGTQSREEIAEELLRLDRKLLKAVEELLKEILDLNKKLLDDVRAILEETRRVLEKLLDRVRRGERTDDERDHMVLHEYVNAAGITKVERTLKKLLDDSARMAEEVKKTLKELLERSEKVAEDVRK

SEQ ID NO: 805 - protein, 237 aa, Artificial Sequence
  Synthetic
KEKEDALKKLEDLARKSREDLERVLRKHKKILDKIEELLKRVLDEHKKIVDDILRKTGTESEILKELARLLREHHEALRRLIEELRRLLEEHHKILEDLAREHKRLLDELIKVVADGVDKDELERIIKELRERDKKLVDDLRKVSEDLLDAVRKLVEDLERISRELLRRVEELAKGIDEELARRDHMVLHEYVNAAGITLERIERAIDELLKVSEEILKLSEDASEELLKILREFAK

SEQ ID NO: 806 - protein, 241 aa, Artificial Sequence
  Synthetic
SEKELLKEILDRIRELLEDDNRLLKRIVDEIRKLLEEWLRVHKEILERIKELLDRIGAPEDVIRELTRALKETEEDVDRVIRTLEKLLKEVLDAHEEVVRKLDRLLKEVERLVEGGDAEEVVRDLLRVVKEILDESKAVIDELARVVDEILKLLEEVDRKLAKVVKEILEDVLRGSGDDEDAVRDHMVLHEYVNAAGITLARDTRRVIEEAKRLLKEWRDRNKEVADTLKKLLEDLIRKIR

SEQ ID NO: 807 - protein, 241 aa, Artificial Sequence; identical to SEQ ID NO: 806
  Synthetic

SEQ ID NO: 808 - protein, 240 aa, Artificial Sequence
  Synthetic
DREKSVRDIEEDLKRVLDKLRRRVETSKEELKKVLKADKENADELEKTLRDVVRELDRGIDSEVLRAVREIVKRLVEVVRRYNELSEKIIRDLVRVNDRVLELLKRIVKRLIDVVRELEKIGDKEKALRRLEEVVKEVKRRIEELLKELEDVHRELVKILEEVNEDLKRVATEVKEIIKTGIKRDHMVLHEYVNAAGITDNLKENTDRLKEVIDRNLADLRDLAEELRAVIERLLEDARR

SEQ ID NO: 809 - protein, 241 aa, Artificial Sequence
  Synthetic
SAEEAVEKLVRIARAIVKINEDLSREVVRILREIVRLNEETTRLLVEIAREVVKVVEDGGLSEDVVRKLRKLVKELEDLLKKSNDDIRKLVEDVARRLKESNDEIRRLVERLEELLKRGPGDEELLRLVEELTEELLRTHEEVVKALEKLTADLLELHRELLERVRRLTKRIEEELKRVGVSERDHMVLHEYVNAAGITLDDSAKELEKLKRELERLLEESRRKLEKLKRDLERVLEETRR

SEQ ID NO: 810 - protein, 241 aa, Artificial Sequence; identical to SEQ ID NO: 809
  Synthetic

SEQ ID NO: 811 - protein, 237 aa, Artificial Sequence
  Synthetic
REDEVLRDIERLLREIEEKIRRILEESTAELRKVEEEVKRIIERTKRELKAIKEDVERKGIDEELRKLLDEVLDKLTKLIERNKRSLERILELIKRIIDENLEVLRDIIRLLEELLKATKDNGVPKDEVIKLVEDVVRRIEELVTRVVARNEKLVKDLDDLAKKNVRENEELLREIDRGLDEDRDHMVLHEYVNAAGITEKLARDLKEILRRHIEALKELARDLAEVIRKLLEDVKR

SEQ ID NO: 812 - protein, 237 aa, Artificial Sequence; identical to SEQ ID NO: 811
  Synthetic

SEQ ID NO: 813 - protein, 243 aa, Artificial Sequence
  Synthetic
SEAERLADEVRKAVKKSEEDNETLVREVEKAVRELKKNNKTWVDEVRKLMKRLVDLLRDGQVSDRDLLKELEEVLRRVLEALAENHERTEEILKRWLDRYAEDIERLRKVLKEVIEALKRGGSDDKRIVDELEEILRRNEDVLDKIAKRLRRLLEEDRRLLERIVRELKRLLDDLDRITKEGKRDHMVLHEYVNAAGITEIIEELVRLNNEILERLLKIVRELHKDNIKILEDLLRIIEEVLR

SEQ ID NO: 814 - protein, 243 aa, Artificial Sequence; identical to SEQ ID NO: 813
  Synthetic

SEQ ID NO: 815 - protein, 243 aa, Artificial Sequence
  Synthetic
SRVEELKKLIEDILRISREVVERIARVAEDIHRINRRVLDDLRKLIEDILRTVEEILARKVSGTEAAEALRDTIRRVVDEIRKLLEEHEKRSAELLEEIRKLLEDILRRSERAVEEIRELLKKGVSTKDVLRIIEEILREHLELLERVVRRIEEILRELLKTIEEIVKRIKEILEELKEVLKRRDHMVLHEYVNAAGITEDLDRILEEYRRLLEEIKRKLEEILRRVEELHRRLRRKLEEIDR

SEQ ID NO: 816 - protein, 243 aa, Artificial Sequence; identical to SEQ ID NO: 815
  Synthetic

SEQ ID NO: 817 - protein, 240 aa, Artificial Sequence
  Synthetic
SKEETLKRLLDELEKRNRETVERLERLLKELEDRNRASLEELEAVLEELERKIEESGLSKELKDTLARILEELRKLLEEYFRKNEELLRLLRKLLDEYARTNEELLRLLEELLDTARRTGGDSELLKRLEDIAREYEKRVRRLLEKLKDILDKYRKTVEELVRKMEEILKEAKKTISRIGSEERDHMVLHEYVNAAGITEILRRDVELNLDVAKKLLELLKEDSKLNLDVARELLELLDR

SEQ ID NO: 818 - protein, 240 aa, Artificial Sequence; identical to SEQ ID NO: 817
  Synthetic

SEQ ID NO: 819 - protein, 243 aa, Artificial Sequence
  Synthetic
DEEETLRRLLERKVELAKEYLDVSKEVIDRTTKLLDEYLKTSKRIVDATVELLERGDLGPDELIKRLAEELERSLRELEEEIKRLKRELEESLKKLKEIIDRLAEEAEKLLAVLKRGEGSEEEALRALASLVRELIEVLRENDERLRDVLRRLIEALRKNNEILERVLRKLVRAAEERGRDESRDHMVLHEYVNAAGITRELNEITKDLEAKLEKLLRDLNELTKALEEELKRLLDELKKRTD

SEQ ID NO: 820 - protein, 243 aa, Artificial Sequence; identical to SEQ ID NO: 819
  Synthetic

SEQ ID NO: 821 - protein, 243 aa, Artificial Sequence
  Synthetic
SEAERTKESLKKVLKALVDLNRELLRKLEENMRELTKLNEEVKRALKEVLDKVREGGIVDKDAEREAERLMRELDKSSEDTARETRKLIEESKKSTRRTEEEARKLTETLDRLAKGGLPREDLLRALVRLLEELARLIEEDVRRNAELVKRHIELVERDVAELLRLIKELVDLLADLAEKGSRRDHMVLHEYVNAAGITELADRYREEVRKSKDKLRSILEDYKRKVDELKERLRELIEEVET

SEQ ID NO: 822 - protein, 243 aa, Artificial Sequence; identical to SEQ ID NO: 821
  Synthetic

SEQ ID NO: 823 - protein, 241 aa, Artificial Sequence
  Synthetic
SADEALEELVRRLLEVLKTVLERTKELSRDDLRVVKEVLRIIEELVKRLLKVIRDGLDDADRVLEEVERVIREAKREVKRWEEVVRKVVEDSRRLIERVLAEVEEVIKEAKRLLDERKSGGSREVIEELLSLLREIVRHHKEVSDEHLKLSAELVKRILDVVEETLRLATEIVRRIKEGGNSERDHMVLHEYVNAAGITVERLLEDIERLLAELEKLNEDVLRENKALLEDLERRVRERKK

SEQ ID NO: 824 - protein, 241 aa, Artificial Sequence; identical to SEQ ID NO: 823
  Synthetic

SEQ ID NO: 825 - protein, 239 aa, Artificial Sequence
  Synthetic
SDEELLERVERLLRELLDTNRRMLEEVEKELRRLLETNKKTLDDVRRLLKELLDVLETRGVKDEKRLRDIRRRLEEVVRRLDKLHRDIAEDLKRVKERLDRLHERIKRRLEEVVKELRDLKDRGVDERKVLERAAEVLRELLELLRESLEEIERIIRRLLELHKRSTEEAARALEELLRGLEGSRDHMVLHEYVNAAGITDKERLEKIARDIERDLERYARDLKRLEDELREDIERARR

SEQ ID NO: 826 - protein, 245 aa, Artificial Sequence
  Synthetic
TEEEVLRKVEKLIKDLLDVLRDLLRASEEVVREALRVLEELIEENKRVIEELSRALSGGSRESVESALAKNEERLKKILEDADRVLDKWRRLLEELSKKAKAVLDEVRKRLEEIKREVPETEKLRTLLTILEEILRALEKIIRDILRINERLLEKLKRILERLRETNREIDERIRKLVEEARGGRDHMVLHEYVNAAGITEKRHEDLRRELEKLLRDYKRELEEIERALEEIEKTLKRRADETRR

SEQ ID NO: 827 - protein, 238 aa, Artificial Sequence
  Synthetic
SKEDKARELEKRLRDNLKKLEEVVRELAEVLKRNLEKLRRLAEELLRALKRLLDKLRAGGLPKDELEDLRREVEDVLRRLEDLLRKLKKANDESLTRLEELLRRAEEENRRVLTTLRELLRGNGDDRDLARLVARLVEANNRALEELLRLVAKNVEDNNRVLEELLRLVKELAKRLLGRIRDEDRDHMVLHEYVNAAGITRKILRDDERDLRALEKRIRDIIREDREELERLKERARK

SEQ ID NO: 828 - protein, 243 aa, Artificial Sequence
  Synthetic
KREDILKKLEDIIRDIIDKLRRILEKVKRLNEDIIREIKRLLDESLKTLEDLLKRIADKSRDRELEDILRRVLEKLRRSLDKLRDTLRKLKEETDTVLERAERTLKELKDRLEKLLRDGEKVSEEDLVEALKALIDELRKVLEDVIRVSKELVERLLRALREHLETNKRLVKELLDALRKTTGDRDHMVLHEYVNAAGITRLEEEVERVARELEKAHRDLERDIRRVAEELKKLLKKLRDDRR

SEQ ID NO: 829 - protein, 243 aa, Artificial Sequence; identical to SEQ ID NO: 828
  Synthetic

SEQ ID NO: 830 - protein, 244 aa, Artificial Sequence
  Synthetic
SAEETLRRITEESKRVLEEITKKYEDLERESREVLRKLREDLDRIKRELEDVLTKGGDDKDEVLTVLEKVLDELLKLHRENLRVIKELLRKVLEVDRENLEVLKRLLEKARDLLRRSGRDEKDLKKLEDELRKVKEELEKKHEASKRDIEDLERELDKVTEEVERLLRKLKEELRRAAEGSDEDRDHMVLHEYVNAAGITRVLEEILKINEELNRKIIKFARENLERNRRVNKKVIEVLREAAR

SEQ ID NO: 831 - protein, 238 aa, Artificial Sequence
  Synthetic
SEAEKIREALETNLRLLEELIKRLKEILDTHNELLRRVIETLERLLKELLELLEEGGLDEEVLREVKRLVDELRKEARRVLDEHEKLVRKIKKEAEDVARESEEIIKEVEDKLKGLDREELLERVRRVLKKSDDLIAELVRRALKILEELTRLLAELLKKVVEILRRIVELVERVLTKKGAPKERDHMVLHEYVNAAGITRRLLEKLARDSAELMRELERILDRYARESEELDRRLAE

SEQ ID NO: 832 - protein, 238 aa, Artificial Sequence; identical to SEQ ID NO: 831
  Synthetic

SEQ ID NO: 833 - protein, 242 aa, Artificial Sequence
  Synthetic
SEKERLMRLLDKLKDLNRRLVERIKELLDKALELHKKLVKELRELLERLKELVERGGVPEELLTRIDELIKKLEDEARKISKEVKRLIDELKKRLEDIHREVDRLIRELKETLKGVTDKDELLRRVAEVLERIARLSEELIREVKEVLEKIVELSRELLKRVLDVLRRIAELLEDALRKGNVSERDHMVLHEYVNAAGITLRKIERDAEREYKKLKDELEELTERYRREIRKLKEELKADRK

SEQ ID NO: 834 - protein, 242 aa, Artificial Sequence; identical to SEQ ID NO: 833
  Synthetic

SEQ ID NO: 835 - protein, 240 aa, Artificial Sequence
  Synthetic
SDKEEIKRRVEKTARDLETEHDKIKKRLEDTVRDIKRELDELLEKYERVLRKIEKTLREGDGDATDLVDKLLETVKRLNEEVLRTVKKIADELRRLVEEVLRVLRESNETLARLLEEGNVGDEVRERLEEVLRRTEEIIKTLEEIVKRLLDELRRLVEELRRISKKLKDELDKIKEKGKDEKRLRDHMVLHEYVNAAGITRILEALAKLIKELLEALEEVLRRNKELIRELLRVLDEALK

SEQ ID NO: 836 - protein, 238 aa, Artificial Sequence
  Synthetic
DADELLRRLAEEVERVIREAEDLLRRWKETIKKVLDDLKRLLDELKKRNEDVIRELTKTKGDEELAKLIKDLLDTNEKVNRDLLRLIKKLLKDAERVNRRLLELIEELLEELKRVAKDLGLREEADKKLRDIADRARKELEDYERRLKELLKTVEDALRKAEEDSRKLKRDVEELLERGRLRKDRDHMVLHEYVNAAGITLERLREILRENLEALKKTLKRLEDVVREILEDLKRERK

SEQ ID NO: 837 - protein, 236 aa, Artificial Sequence
  Synthetic
STREKAKKVLDTLRADNEDMKRVVEKILRALKRTNERAEKLAREITEEIKRILKEVGVSEEALKEIEDTLKRVLEEIKRLLDESKKLLEDVEREIREILKTSEELLERIEREIETVGSDEKTLAEILKRLLELNEEMNRRLLKILRDLLRLNEEVIRRLLAVLERLLDALKEALDRGDVPEDLLRDHMVLHEYVNAAGITALEELEREHRELEKELDKLHDESRKEHERIEEELRR

SEQ ID NO: 838 - protein, 239 aa, Artificial Sequence
  Synthetic
SERELIERWLELHKEILRLIRELVERLLKLHREILDTIKKLIRELLELLEDIARKLGLDKEAKDELREIAKRVEDKLEKLERESRKVEEDLKRKLKELTDESDTVEKRVRDVVRRGTQSREEIAEELLRLDRKLLKAVEELLKEILDLNKKLLDDVRAILEETRRVLEKLLDRVRRGERTDDERRDHMVLHEYVNAAGITVERTLKKLLDDSARMAEEVKKTLKELLERSEKVAEDVRK

SEQ ID NO: 839 - protein, 241 aa, Artificial Sequence
  Synthetic
SEKELLKEILDRIRELLEDDNRLLKRIVDEIRKLLEEWLRVHKEILERIKELLDRIGAPEDVIRELTRALKETEEDVDRVIRTLEKLLKEVLDAHEEVVRKLDRLLKEVERLVEGGDAEEVVRDLLRVVKEILDESKAVIDELARVVDEILKLLEEVDRKLAKVVKEILEDVLRGSGDDEDAVRRDHMVLHEYVNAAGITARDTRRVIEEAKRLLKEWRDRNKEVADTLKKLLEDLIRKIR

SEQ ID NO: 840 - protein, 241 aa, Artificial Sequence; identical to SEQ ID NO: 839
  Synthetic

SEQ ID NO: 841 - protein, 237 aa, Artificial Sequence
  Synthetic
REDEVLRDIERLLREIEEKIRRILEESTAELRKVEEEVKRIIERTKRELKAIKEDVERKGIDEELRKLLDEVLDKLTKLIERNKRSLERILELIKRIIDENLEVLRDIIRLLEELLKATKDNGVPKDEVIKLVEDVVRRIEELVTRVVARNEKLVKDLDDLAKKNVRENEELLREIDRGLDEDLRDHMVLHEYVNAAGITKLARDLKEILRRHIEALKELARDLAEVIRKLLEDVKR

SEQ ID NO: 842 - protein, 237 aa, Artificial Sequence; identical to SEQ ID NO: 841
  Synthetic

SEQ ID NO: 843 - protein, 245 aa, Artificial Sequence
  Synthetic
SEKDEVTRRIRELLKEAEETNREAIERIKRLLDRVREAVEEVAKRSEELLRRLKKVLDRGLQDDEALLKLLIDALREHNRLSTELIKILIDVLRTILKIIKDVLATNIEIARRILDLVRRLAERGGLDDRLVKEVEKLVRTAERLHRDALRKVKRLVEELEKRLRELVKTDHDLVRRLETLLRRRDHMVLHEYVNAAGITAESLRLIRELLKEIEKIVKEIIELLERLNDELRKIIEAILETTKK

SEQ ID NO: 844 - protein, 243 aa, Artificial Sequence
  Synthetic
SRVEELKKLIEDILRISREVVERIARVAEDIHRINRRVLDDLRKLIEDILRTVEEILARKVSGTEAAEALRDTIRRVVDEIRKLLEEHEKRSAELLEEIRKLLEDILRRSERAVEEIRELLKKGVSTKDVLRIIEEILREHLELLERVVRRIEEILRELLKTIEEIVKRIKEILEELKEVLKRGRDHMVLHEYVNAAGITDLDRILEEYRRLLEEIKRKLEEILRRVEELHRRLRRKLEEIDR

SEQ ID NO: 845 - protein, 243 aa, Artificial Sequence; identical to SEQ ID NO: 844
  Synthetic

SEQ ID NO: 846 - protein, 243 aa, Artificial Sequence
  Synthetic
DEEETLRRLLERKVELAKEYLDVSKEVIDRTTKLLDEYLKTSKRIVDATVELLERGDLGPDELIKRLAEELERSLRELEEEIKRLKRELEESLKKLKEIIDRLAEEAEKLLAVLKRGEGSEEEALRALASLVRELIEVLRENDERLRDVLRRLIEALRKNNEILERVLRKLVRAAEERGRDESSRDHMVLHEYVNAAGITELNEITKDLEAKLEKLLRDLNELTKALEEELKRLLDELKKRTD

SEQ ID NO: 847 - protein, 243 aa, Artificial Sequence; identical to SEQ ID NO: 846
  Synthetic

SEQ ID NO: 848 - protein, 243 aa, Artificial Sequence
  Synthetic
SEAERTKESLKKVLKALVDLNRELLRKLEENMRELTKLNEEVKRALKEVLDKVREGGIVDKDAEREAERLMRELDKSSEDTARETRKLIEESKKSTRRTEEEARKLTETLDRLAKGGLPREDLLRALVRLLEELARLIEEDVRRNAELVKRHIELVERDVAELLRLIKELVDLLADLAEKGSRTRDHMVLHEYVNAAGITLADRYREEVRKSKDKLRSILEDYKRKVDELKERLRELIEEVET

SEQ ID NO: 849 - protein, 243 aa, Artificial Sequence; identical to SEQ ID NO: 848
  Synthetic

SEQ ID NO: 850 - protein, 238 aa, Artificial Sequence
  Synthetic
EEDERLTKRVEEIKRENRELLRRLEEEVKELERKSEKIVRDLKEKVDRAKEKLDSGKGSTELLVEELEKLIREILKLSEDHNRTLEEVVRKIEDVLRANLERLKELVDEILKALKERGKGDSEELKRKVEKVARDYERLLRKLREVVKRILDESKRLDEELEERLKEVLKKLEELIKRGGPDKDVRDHMVLHEYVNAAGITKLIRRNLRLLEELLRLVREILRTSNEILEEILKDARR

SEQ ID NO: 851 - protein, 245 aa, Artificial Sequence
  Synthetic
TEEEVLRKVEKLIKDLLDVLRDLLRASEEVVREALRVLEELIEENKRVIEELSRALSGGSRESVESALAKNEERLKKILEDADRVLDKWRRLLEELSKKAKAVLDEVRKRLEEIKREVPETEKLRTLLTILEEILRALEKIIRDILRINERLLEKLKRILERLRETNREIDERIRKLVEEARGGSRDHMVLHEYVNAAGITKRHEDLRRELEKLLRDYKRELEEIERALEEIEKTLKRRADETRR

SEQ ID NO: 852 - protein, 245 aa, Artificial Sequence; identical to SEQ ID NO: 851
  Synthetic

SEQ ID NO: 853 - protein, 244 aa, Artificial Sequence
  Synthetic
SAEETLRRITEESKRVLEEITKKYEDLERESREVLRKLREDLDRIKRELEDVLTKGGDDKDEVLTVLEKVLDELLKLHRENLRVIKELLRKVLEVDRENLEVLKRLLEKARDLLRRSGRDEKDLKKLEDELRKVKEELEKKHEASKRDIEDLERELDKVTEEVERLLRKLKEELRRAAEGSDEDRRDHMVLHEYVNAAGITVLEEILKINEELNRKIIKFARENLERNRRVNKKVIEVLREAAR

SEQ ID NO: 854 - protein, 238 aa, Artificial Sequence
  Synthetic
SEAEKIREALETNLRLLEELIKRLKEILDTHNELLRRVIETLERLLKELLELLEEGGLDEEVLREVKRLVDELRKEARRVLDEHEKLVRKIKKEAEDVARESEEIIKEVEDKLKGLDREELLERVRRVLKKSDDLIAELVRRALKILEELTRLLAELLKKVVEILRRIVELVERVLTKKGAPKEDRDHMVLHEYVNAAGITRLLEKLARDSAELMRELERILDRYARESEELDRRLAE

SEQ ID NO: 855 - protein, 238 aa, Artificial Sequence; identical to SEQ ID NO: 854
  Synthetic

SEQ ID NO: 856 - protein, 242 aa, Artificial Sequence
  Synthetic
SEKERLMRLLDKLKDLNRRLVERIKELLDKALELHKKLVKELRELLERLKELVERGGVPEELLTRIDELIKKLEDEARKISKEVKRLIDELKKRLEDIHREVDRLIRELKETLKGVTDKDELLRRVAEVLERIARLSEELIREVKEVLEKIVELSRELLKRVLDVLRRIAELLEDALRKGNVSEERDHMVLHEYVNAAGITRKIERDAEREYKKLKDELEELTERYRREIRKLKEELKADRK

SEQ ID NO: 857 - protein, 238 aa, Artificial Sequence
  Synthetic
DADELLRRLAEEVERVIREAEDLLRRWKETIKKVLDDLKRLLDELKKRNEDVIRELTKTKGDEELAKLIKDLLDTNEKVNRDLLRLIKKLLKDAERVNRRLLELIEELLEELKRVAKDLGLREEADKKLRDIADRARKELEDYERRLKELLKTVEDALRKAEEDSRKLKRDVEELLERGRLRKDDRDHMVLHEYVNAAGITERLREILRENLEALKKTLKRLEDVVREILEDLKRERK

SEQ ID NO: 858 - protein, 236 aa, Artificial Sequence
  Synthetic
STREKAKKVLDTLRADNEDMKRVVEKILRALKRTNERAEKLAREITEEIKRILKEVGVSEEALKEIEDTLKRVLEEIKRLLDESKKLLEDVEREIREILKTSEELLERIEREIETVGSDEKTLAEILKRLLELNEEMNRRLLKILRDLLRLNEEVIRRLLAVLERLLDALKEALDRGDVPEDLLRRDHMVLHEYVNAAGITLEELEREHRELEKELDKLHDESRKEHERIEEELRR

SEQ ID NO: 859 - protein, 236 aa, Artificial Sequence; identical to SEQ ID NO: 858
  Synthetic

SEQ ID NO: 860 - protein, 243 aa, Artificial Sequence
  Synthetic
DLERVVEDIVDKAKRLLDKNLEVLKRIVDEVLRLLERLLRESRKVVKRVKEIIEELVRDEKELRRVKRALEEVLRRHEEIAKELKERLRKVAKEAEEKHKKLVEDLKRVVDEVRKKLSGPLDREKVLEVLDELVTIIAKLLDENIKVLEEVIRVIAELLERLLDSHRRLIDIIAKLLEGLRPGDERDHMVLHEYVNAAGITSEKVVDDLKKELERIKREVKRLIEENARTLADIKRAVDEARK

SEQ ID NO: 861 - protein, 239 aa, Artificial Sequence
  Synthetic
SERELIERWLELHKEILRLIRELVERLLKLHREILDTIKKLIRELLELLEDIARKLGLDKEAKDELREIAKRVEDKLEKLERESRKVEEDLKRKLKELTDESDTVEKRVRDVVRRGTQSREEIAEELLRLDRKLLKAVEELLKEILDLNKKLLDDVRAILEETRRVLEKLLDRVRRGERTDDERRRDHMVLHEYVNAAGITERTLKKLLDDSARMAEEVKKTLKELLERSEKVAEDVRK

SEQ ID NO: 862 - protein, 246 aa, Artificial Sequence
  Synthetic
KEIEETLKELEDLNREMVETNRRVLEETRRLNKETVDRVKATLDELAKMLKKLVDDVRKGPTSEELKRLLAELEELLARVVRRVEELLKKSTDLLERAVKDSADALRRSHEVLKEVASRVKRAKDEGLPREEVLRLLRELLERHAKVLKDIVRVSEKLLREHLKVLREIVEVLEELLERILKVILRDHMVLHEYVNAAGITEEIKRRLKEVIDRYEDELRKLRKEYKEKIDKYERKLEEIERRERT

SEQ ID NO: 863 - protein, 246 aa, Artificial Sequence
  Synthetic
SREEIVATLEDLARKILEVVKKLAKEIEDAWREIERAVREILKRLEELWREIEDVVRKKVDSRVAEILETVVKRVVDITRRLIEEAERVVRELVDITRKLITILEEVVRRLVEIVREASKIDDRRELEDMLRKIREVVREVIERLKKLDEDVRRVVEEVIRRLEELNKRLEDVIREVKKRLKELGRDHMVLHEYVNAAGITLERNTRVIKEIIDLLRTVIRIHEKIVEDLIKLLEELLRRLEEATR

SEQ ID NO: 864 - protein, 237 aa, Artificial Sequence
  Synthetic
KEKEDALKKLEDLARKSREDLERVLRKHKKILDKIEELLKRVLDEHKKIVDDILRKTGTESEILKELARLLREHHEALRRLIEELRRLLEEHHKILEDLAREHKRLLDELIKVVADGVDKDELERIIKELRERDKKLVDDLRKVSEDLLDAVRKLVEDLERISRELLRRVEELAKGIDEELAREVRDHMVLHEYVNAAGITRIERAIDELLKVSEEILKLSEDASEELLKILREFAK

SEQ ID NO: 865 - protein, 241 aa, Artificial Sequence
  Synthetic
SEKELLKEILDRIRELLEDDNRLLKRIVDEIRKLLEEWLRVHKEILERIKELLDRIGAPEDVIRELTRALKETEEDVDRVIRTLEKLLKEVLDAHEEVVRKLDRLLKEVERLVEGGDAEEVVRDLLRVVKEILDESKAVIDELARVVDEILKLLEEVDRKLAKVVKEILEDVLRGSGDDEDAVRKRDHMVLHEYVNAAGITRDTRRVIEEAKRLLKEWRDRNKEVADTLKKLLEDLIRKIR

SEQ ID NO: 866 - protein, 241 aa, Artificial Sequence; identical to SEQ ID NO: 865
  Synthetic

SEQ ID NO: 867 - protein, 246 aa, Artificial Sequence
  Synthetic
SEREELLERIKEILKRVKDKLDEDLKRLKEILEKLKEKADRDLEELRRRIEEVREKLERTGRTDELVKEVLDTVRRNLENLKRLVEDILRKLEENVKNLTDLVREILKLITELIKRLEDGGLPKEVLDALRRVLEKLEELLREILERLKRSLEAVKRKIEELLKELERSLDELRRALERIRKEIGRDHMVLHEYVNAAGITLEAVRRVLEELLKVLAEHLETVRELIERLKRVLEEAIEVVERVAR

SEQ ID NO: 868 - protein, 246 aa, Artificial Sequence; identical to SEQ ID NO: 867
  Synthetic

SEQ ID NO: 869 - protein, 240 aa, Artificial Sequence
  Synthetic
DREKSVRDIEEDLKRVLDKLRRRVETSKEELKKVLKADKENADELEKTLRDVVRELDRGIDSEVLRAVREIVKRLVEVVRRYNELSEKIIRDLVRVNDRVLELLKRIVKRLIDVVRELEKIGDKEKALRRLEEVVKEVKRRIEELLKELEDVHRELVKILEEVNEDLKRVATEVKEIIKTGIKSSRDHMVLHEYVNAAGITLKENTDRLKEVIDRNLADLRDLAEELRAVIERLLEDARR

SEQ ID NO: 870 - protein, 240 aa, Artificial Sequence; identical to SEQ ID NO: 869
  Synthetic

SEQ ID NO: 871 - protein, 241 aa, Artificial Sequence
  Synthetic
SAEEAVEKLVRIARAIVKINEDLSREVVRILREIVRLNEETTRLLVEIAREVVKVVEDGGLSEDVVRKLRKLVKELEDLLKKSNDDIRKLVEDVARRLKESNDEIRRLVERLEELLKRGPGDEELLRLVEELTEELLRTHEEVVKALEKLTADLLELHRELLERVRRLTKRIEEELKRVGVSEELRDHMVLHEYVNAAGITDSAKELEKLKRELERLLEESRRKLEKLKRDLERVLEETRR

SEQ ID NO: 872 - protein, 237 aa, Artificial Sequence
  Synthetic
REDEVLRDIERLLREIEEKIRRILEESTAELRKVEEEVKRIIERTKRELKAIKEDVERKGIDEELRKLLDEVLDKLTKLIERNKRSLERILELIKRIIDENLEVLRDIIRLLEELLKATKDNGVPKDEVIKLVEDVVRRIEELVTRVVARNEKLVKDLDDLAKKNVRENEELLREIDRGLDEDLLRDHMVLHEYVNAAGITLARDLKEILRRHIEALKELARDLAEVIRKLLEDVKR

SEQ ID NO: 873 - protein, 243 aa, Artificial Sequence
  Synthetic
SEAERLADEVRKAVKKSEEDNETLVREVEKAVRELKKNNKTWVDEVRKLMKRLVDLLRDGQVSDRDLLKELEEVLRRVLEALAENHERTEEILKRWLDRYAEDIERLRKVLKEVIEALKRGGSDDKRIVDELEEILRRNEDVLDKIAKRLRRLLEEDRRLLERIVRELKRLLDDLDRITKEGKSERDHMVLHEYVNAAGITIEELVRLNNEILERLLKIVRELHKDNIKILEDLLRIIEEVLR

SEQ ID NO: 874 - protein, 243 aa, Artificial Sequence; identical to SEQ ID NO: 873
  Synthetic

SEQ ID NO: 875 - protein, 245 aa, Artificial Sequence
  Synthetic
SEKDEVTRRIRELLKEAEETNREAIERIKRLLDRVREAVEEVAKRSEELLRRLKKVLDRGLQDDEALLKLLIDALREHNRLSTELIKILIDVLRTILKIIKDVLATNIEIARRILDLVRRLAERGGLDDRLVKEVEKLVRTAERLHRDALRKVKRLVEELEKRLRELVKTDHDLVRRLETLLRRGRDHMVLHEYVNAAGITESLRLIRELLKEIEKIVKEIIELLERLNDELRKIIEAILETTKK

SEQ ID NO: 876 - protein, 239 aa, Artificial Sequence
  Synthetic
SAEDLVRRVKDLVDKLEDKLRKVVRTNERLWEEIRKRLEELVRRNKELWDALVEKLKAGDKDKDELIEEAKSLEDESNALVEKLVRDIERVLAESNKLLDTLAKEIEEVLEEIVELVERGSGSDKEAREKLEDIKARLKEVLKKLREESKRIIDELRRLLEEYKRLVKEIRDRIEEVRKRNSEIRRDHMVLHEYVNAAGITVEELEKLVRDHNRVVEEVVRELVELLSRAVEVIKEVVK

SEQ ID NO: 877 - protein, 243 aa, Artificial Sequence
  Synthetic
SRVEELKKLIEDILRISREVVERIARVAEDIHRINRRVLDDLRKLIEDILRTVEEILARKVSGTEAAEALRDTIRRVVDEIRKLLEEHEKRSAELLEEIRKLLEDILRRSERAVEEIRELLKKGVSTKDVLRIIEEILREHLELLERVVRRIEEILRELLKTIEEIVKRIKEILEELKEVLKRGSRDHMVLHEYVNAAGITLDRILEEYRRLLEEIKRKLEEILRRVEELHRRLRRKLEEIDR

SEQ ID NO: 878 - protein, 243 aa, Artificial Sequence; identical to SEQ ID NO: 877
  Synthetic

SEQ ID NO: 879 - protein, 240 aa, Artificial Sequence
  Synthetic
DKDKRLEELLKRLKELNDKTFEELERILEELKRANEASLREAERILEELRARIEGGNLDKRLAELLKKLLDDLKRLLEEYTRTNEELLKRLRELLERYRETNKKLLDLLRKLLDEARRTGTDEDLLRRLEDILRKYEDEVRRLLKELEDILREYEDTSRRLLEELERIAKEAAERVSRGSDKDVKRDHMVLHEYVNAAGITLEEDSRTNSEVVKRLLDLLREDSKANSEVVKRLLDVLRE

SEQ ID NO: 880 - protein, 240 aa, Artificial Sequence; identical to SEQ ID NO: 879
  Synthetic

SEQ ID NO: 881 - protein, 240 aa, Artificial Sequence
  Synthetic
SKEETLKRLLDELEKRNRETVERLERLLKELEDRNRASLEELEAVLEELERKIEESGLSKELKDTLARILEELRKLLEEYFRKNEELLRLLRKLLDEYARTNEELLRLLEELLDTARRTGGDSELLKRLEDIAREYEKRVRRLLEKLKDILDKYRKTVEELVRKMEEILKEAKKTISRIGSEEVKRDHMVLHEYVNAAGITLRRDVELNLDVAKKLLELLKEDSKLNLDVARELLELLDR

SEQ ID NO: 882 - protein, 240 aa, Artificial Sequence; identical to SEQ ID NO: 881
  Synthetic

SEQ ID NO: 883 - protein, 243 aa, Artificial Sequence
  Synthetic
DEEETLRRLLERKVELAKEYLDVSKEVIDRTTKLLDEYLKTSKRIVDATVELLERGDLGPDELIKRLAEELERSLRELEEEIKRLKRELEESLKKLKEIIDRLAEEAEKLLAVLKRGEGSEEEALRALASLVRELIEVLRENDERLRDVLRRLIEALRKNNEILERVLRKLVRAAEERGRDESSRRDHMVLHEYVNAAGITLNEITKDLEAKLEKLLRDLNELTKALEEELKRLLDELKKRTD

SEQ ID NO: 884 - protein, 243 aa, Artificial Sequence; identical to SEQ ID NO: 883
  Synthetic

SEQ ID NO: 885 - protein, 243 aa, Artificial Sequence
  Synthetic
SEAERTKESLKKVLKALVDLNRELLRKLEENMRELTKLNEEVKRALKEVLDKVREGGIVDKDAEREAERLMRELDKSSEDTARETRKLIEESKKSTRRTEEEARKLTETLDRLAKGGLPREDLLRALVRLLEELARLIEEDVRRNAELVKRHIELVERDVAELLRLIKELVDLLADLAEKGSRTERDHMVLHEYVNAAGITADRYREEVRKSKDKLRSILEDYKRKVDELKERLRELIEEVET

SEQ ID NO: 886 - protein, 243 aa, Artificial Sequence; identical to SEQ ID NO: 885
  Synthetic

SEQ ID NO: 887 - protein, 238 aa, Artificial Sequence
  Synthetic
EEDERLTKRVEEIKRENRELLRRLEEEVKELERKSEKIVRDLKEKVDRAKEKLDSGKGSTELLVEELEKLIREILKLSEDHNRTLEEVVRKIEDVLRANLERLKELVDEILKALKERGKGDSEELKRKVEKVARDYERLLRKLREVVKRILDESKRLDEELEERLKEVLKKLEELIKRGGPDKDVLRDHMVLHEYVNAAGITLIRRNLRLLEELLRLVREILRTSNEILEEILKDARR

SEQ ID NO: 888 - protein, 245 aa, Artificial Sequence
  Synthetic
TEEEVLRKVEKLIKDLLDVLRDLLRASEEVVREALRVLEELIEENKRVIEELSRALSGGSRESVESALAKNEERLKKILEDADRVLDKWRRLLEELSKKAKAVLDEVRKRLEEIKREVPETEKLRTLLTILEEILRALEKIIRDILRINERLLEKLKRILERLRETNREIDERIRKLVEEARGGSERDHMVLHEYVNAAGITRHEDLRRELEKLLRDYKRELEEIERALEEIEKTLKRRADETRR

SEQ ID NO: 889 - protein, 243 aa, Artificial Sequence
  Synthetic
KREDILKKLEDIIRDIIDKLRRILEKVKRLNEDIIREIKRLLDESLKTLEDLLKRIADKSRDRELEDILRRVLEKLRRSLDKLRDTLRKLKEETDTVLERAERTLKELKDRLEKLLRDGEKVSEEDLVEALKALIDELRKVLEDVIRVSKELVERLLRALREHLETNKRLVKELLDALRKTTGDDERDHMVLHEYVNAAGITEEEVERVARELEKAHRDLERDIRRVAEELKKLLKKLRDDRR

SEQ ID NO: 890 - protein, 243 aa, Artificial Sequence; identical to SEQ ID NO: 889
  Synthetic

SEQ ID NO: 891 - protein, 244 aa, Artificial Sequence
  Synthetic
SAEETLRRITEESKRVLEEITKKYEDLERESREVLRKLREDLDRIKRELEDVLTKGGDDKDEVLTVLEKVLDELLKLHRENLRVIKELLRKVLEVDRENLEVLKRLLEKARDLLRRSGRDEKDLKKLEDELRKVKEELEKKHEASKRDIEDLERELDKVTEEVERLLRKLKEELRRAAEGSDEDRERDHMVLHEYVNAAGITLEEILKINEELNRKIIKFARENLERNRRVNKKVIEVLREAAR

SEQ ID NO: 892 - protein, 247 aa, Artificial Sequence
  Synthetic
SEKEELLKLIKRVIELLKRVLEEHLRLVEDVIRRLKELLDSNEKIVREVIEDLKRLLDEVRGDKEELDRIKEKLEEVLERYKRRLEEIKRDLERMLEDYKRELKRIEEDLRRVLEEVERIATRGEGPAEALIDKLRKILERALRELDKLSKKLDELLKKVLEELEKSNREIDKLLKDVLRRVEEGGRDHMVLHEYVNAAGITREKLKRNLEDVRRVIEDVKRKSARILEEARRLIEEVERELEKIRK

SEQ ID NO: 893 - protein, 238 aa, Artificial Sequence
  Synthetic
SEAEKIREALETNLRLLEELIKRLKEILDTHNELLRRVIETLERLLKELLELLEEGGLDEEVLREVKRLVDELRKEARRVLDEHEKLVRKIKKEAEDVARESEEIIKEVEDKLKGLDREELLERVRRVLKKSDDLIAELVRRALKILEELTRLLAELLKKVVEILRRIVELVERVLTKKGAPKEDLRDHMVLHEYVNAAGITLLEKLARDSAELMRELERILDRYARESEELDRRLAE

SEQ ID NO: 894 - protein, 242 aa, Artificial Sequence
  Synthetic
SEKERLMRLLDKLKDLNRRLVERIKELLDKALELHKKLVKELRELLERLKELVERGGVPEELLTRIDELIKKLEDEARKISKEVKRLIDELKKRLEDIHREVDRLIRELKETLKGVTDKDELLRRVAEVLERIARLSEELIREVKEVLEKIVELSRELLKRVLDVLRRIAELLEDALRKGNVSEETRDHMVLHEYVNAAGITKIERDAEREYKKLKDELEELTERYRREIRKLKEELKADRK

SEQ ID NO: 895 - protein, 242 aa, Artificial Sequence; identical to SEQ ID NO: 894
  Synthetic

SEQ ID NO: 896 - protein, 247 aa, Artificial Sequence
  Synthetic
SEAEDLEELIKELAELLKDVIRKLEKINRRLVKILEDIIRRLKEISKEAEEELRKGTVEDKDILRDLERRLREILEESDRLLEELKRRLEEILRKSKELLRRLEEVLREILKRAEEVKRSNLPKEELIKEIVKLLEELLRVIEKILEDNIRLLEELVEVIKEILEKHLRLLEELVRVIERILREVGRDHMVLHEYVNAAGITLDRLREEHEEVKRRLEEELTRLRETHKKIEKELREALKRVRDRST

SEQ ID NO: 897 - protein, 247 aa, Artificial Sequence; identical to SEQ ID NO: 896
  Synthetic

SEQ ID NO: 898 - protein, 238 aa, Artificial Sequence
  Synthetic
DADELLRRLAEEVERVIREAEDLLRRWKETIKKVLDDLKRLLDELKKRNEDVIRELTKTKGDEELAKLIKDLLDTNEKVNRDLLRLIKKLLKDAERVNRRLLELIEELLEELKRVAKDLGLREEADKKLRDIADRARKELEDYERRLKELLKTVEDALRKAEEDSRKLKRDVEELLERGRLRKDDLRDHMVLHEYVNAAGITRLREILRENLEALKKTLKRLEDVVREILEDLKRERK

SEQ ID NO: 899 - protein, 238 aa, Artificial Sequence; identical to SEQ ID NO: 898
  Synthetic

SEQ ID NO: 900 - protein, 247 aa, Artificial Sequence
  Synthetic
SKAEKLLKDLREALEKVKRRYEELERRLDEVLKEHEEIVKRLLEELEKVLKRIEEGGLPEEELEKLKKLAEKVKELLRELLRLSKELVDRVRELLKRDLDLVRRLVEIALKVLREAREQPNDEKRVEKIKRDLEKKARRVREENERIKRDLKRTADESRKRLEKLLEDLKRELDRLREDLDRGRKDRDHMVLHEYVNAAGITERLLREVIKSHEKLVRTIERLIEESIRVNEELLEVIERLLDRARK

SEQ ID NO: 901 - protein, 247 aa, Artificial Sequence; identical to SEQ ID NO: 900
  Synthetic

SEQ ID NO: 902 - protein, 243 aa, Artificial Sequence
  Synthetic
DLERVVEDIVDKAKRLLDKNLEVLKRIVDEVLRLLERLLRESRKVVKRVKEIIEELVRDEKELRRVKRALEEVLRRHEEIAKELKERLRKVAKEAEEKHKKLVEDLKRVVDEVRKKLSGPLDREKVLEVLDELVTIIAKLLDENIKVLEEVIRVIAELLERLLDSHRRLIDIIAKLLEGLRPGDEDRDHMVLHEYVNAAGITEKVVDDLKKELERIKREVKRLIEENARTLADIKRAVDEARK

SEQ ID NO: 903 - protein, 246 aa, Artificial Sequence
  Synthetic
KEIEETLKELEDLNREMVETNRRVLEETRRLNKETVDRVKATLDELAKMLKKLVDDVRKGPTSEELKRLLAELEELLARVVRRVEELLKKSTDLLERAVKDSADALRRSHEVLKEVASRVKRAKDEGLPREEVLRLLRELLERHAKVLKDIVRVSEKLLREHLKVLREIVEVLEELLERILKVILDRDHMVLHEYVNAAGITEIKRRLKEVIDRYEDELRKLRKEYKEKIDKYERKLEEIERRERT

SEQ ID NO: 904 - protein, 247 aa, Artificial Sequence
  Synthetic
RDRDVLRKVKAEIEELVARIEKVSRDALSEVKRLLDENRKIAEDVLRLIESLLRKIRDTRGDDEVVKETEEVLRDNHRLLEELIRRLIKVLEEWLRRHKKLLDEIRELLKEILRLVKESGVSEDLLRRLKRVIEELDKKLKESEEKLRRVVEKAKEDLKAVLEEHRKVLEDLKRALEEVREKLRERRDHMVLHEYVNAAGITAEEMKRVHDDLSRAVEKVVRDVVRVDKELLDELARILRRLEEVIT

SEQ ID NO: 905 - protein, 237 aa, Artificial Sequence
  Synthetic
KEKEDALKKLEDLARKSREDLERVLRKHKKILDKIEELLKRVLDEHKKIVDDILRKTGTESEILKELARLLREHHEALRRLIEELRRLLEEHHKILEDLAREHKRLLDELIKVVADGVDKDELERIIKELRERDKKLVDDLRKVSEDLLDAVRKLVEDLERISRELLRRVEELAKGIDEELAREVERDHMVLHEYVNAAGITIERAIDELLKVSEEILKLSEDASEELLKILREFAK

SEQ ID NO: 906 - protein, 237 aa, Artificial Sequence; identical to SEQ ID NO: 905
  Synthetic

SEQ ID NO: 907 - protein, 241 aa, Artificial Sequence
  Synthetic
SEKELLKEILDRIRELLEDDNRLLKRIVDEIRKLLEEWLRVHKEILERIKELLDRIGAPEDVIRELTRALKETEEDVDRVIRTLEKLLKEVLDAHEEVVRKLDRLLKEVERLVEGGDAEEVVRDLLRVVKEILDESKAVIDELARVVDEILKLLEEVDRKLAKVVKEILEDVLRGSGDDEDAVRKIRDHMVLHEYVNAAGITDTRRVIEEAKRLLKEWRDRNKEVADTLKKLLEDLIRKIR

SEQ ID NO: 908 - protein, 246 aa, Artificial Sequence
  Synthetic
SEREELLERIKEILKRVKDKLDEDLKRLKEILEKLKEKADRDLEELRRRIEEVREKLERTGRTDELVKEVLDTVRRNLENLKRLVEDILRKLEENVKNLTDLVREILKLITELIKRLEDGGLPKEVLDALRRVLEKLEELLREILERLKRSLEAVKRKIEELLKELERSLDELRRALERIRKEIGDRDHMVLHEYVNAAGITEAVRRVLEELLKVLAEHLETVRELIERLKRVLEEAIEVVERVAR

SEQ ID NO: 909 - protein, 246 aa, Artificial Sequence; identical to SEQ ID NO: 908
  Synthetic

SEQ ID NO: 910 - protein, 240 aa, Artificial Sequence
  Synthetic
DREKSVRDIEEDLKRVLDKLRRRVETSKEELKKVLKADKENADELEKTLRDVVRELDRGIDSEVLRAVREIVKRLVEVVRRYNELSEKIIRDLVRVNDRVLELLKRIVKRLIDVVRELEKIGDKEKALRRLEEVVKEVKRRIEELLKELEDVHRELVKILEEVNEDLKRVATEVKEIIKTGIKSSERDHMVLHEYVNAAGITKENTDRLKEVIDRNLADLRDLAEELRAVIERLLEDARR

SEQ ID NO: 911 - protein, 240 aa, Artificial Sequence; identical to SEQ ID NO: 910
  Synthetic

SEQ ID NO: 912 - protein, 241 aa, Artificial Sequence
  Synthetic
SAEEAVEKLVRIARAIVKINEDLSREVVRILREIVRLNEETTRLLVEIAREVVKVVEDGGLSEDVVRKLRKLVKELEDLLKKSNDDIRKLVEDVARRLKESNDEIRRLVERLEELLKRGPGDEELLRLVEELTEELLRTHEEVVKALEKLTADLLELHRELLERVRRLTKRIEEELKRVGVSEELLRDHMVLHEYVNAAGITSAKELEKLKRELERLLEESRRKLEKLKRDLERVLEETRR

SEQ ID NO: 913 - protein, 237 aa, Artificial Sequence
  Synthetic
REDEVLRDIERLLREIEEKIRRILEESTAELRKVEEEVKRIIERTKRELKAIKEDVERKGIDEELRKLLDEVLDKLTKLIERNKRSLERILELIKRIIDENLEVLRDIIRLLEELLKATKDNGVPKDEVIKLVEDVVRRIEELVTRVVARNEKLVKDLDDLAKKNVRENEELLREIDRGLDEDLLERDHMVLHEYVNAAGITARDLKEILRRHIEALKELARDLAEVIRKLLEDVKR

SEQ ID NO: 914 - protein, 237 aa, Artificial Sequence; identical to SEQ ID NO: 913
  Synthetic

SEQ ID NO: 915 - protein, 243 aa, Artificial Sequence
  Synthetic
SEAERLADEVRKAVKKSEEDNETLVREVEKAVRELKKNNKTWVDEVRKLMKRLVDLLRDGQVSDRDLLKELEEVLRRVLEALAENHERTEEILKRWLDRYAEDIERLRKVLKEVIEALKRGGSDDKRIVDELEEILRRNEDVLDKIAKRLRRLLEEDRRLLERIVRELKRLLDDLDRITKEGKSEERDHMVLHEYVNAAGITEELVRLNNEILERLLKIVRELHKDNIKILEDLLRIIEEVLR

SEQ ID NO: 916 - protein, 243 aa, Artificial Sequence; identical to SEQ ID NO: 915
  Synthetic

SEQ ID NO: 917 - protein, 245 aa, Artificial Sequence
  Synthetic
SEKDEVTRRIRELLKEAEETNREAIERIKRLLDRVREAVEEVAKRSEELLRRLKKVLDRGLQDDEALLKLLIDALREHNRLSTELIKILIDVLRTILKIIKDVLATNIEIARRILDLVRRLAERGGLDDRLVKEVEKLVRTAERLHRDALRKVKRLVEELEKRLRELVKTDHDLVRRLETLLRRGSRDHMVLHEYVNAAGITSLRLIRELLKEIEKIVKEIIELLERLNDELRKIIEAILETTKK

SEQ ID NO: 918 - protein, 247 aa, Artificial Sequence
  Synthetic
DEERLAEELERVLDRNRKLLEEALRELRRVIEENRKSVKRLLDELKRVLDELLKVLRELSRGDSDEELRKVIEDLIRKLTKVLDKVRSLVEENIERLARVLEKLERLARENLEDLKKVLDDVDKKLKDRRLVERLAELVRELIEVNKEILEMLKEIVRELLEINRTLLERLKDLVATALEIIKLLARDHMVLHEYVNAAGITRDRLRKLLEDYERAVRRLEDKLRRVRERYEAVLKRIKDKLEETKR

SEQ ID NO: 919 - protein, 243 aa, Artificial Sequence
  Synthetic
SRVEELKKLIEDILRISREVVERIARVAEDIHRINRRVLDDLRKLIEDILRTVEEILARKVSGTEAAEALRDTIRRVVDEIRKLLEEHEKRSAELLEEIRKLLEDILRRSERAVEEIRELLKKGVSTKDVLRIIEEILREHLELLERVVRRIEEILRELLKTIEEIVKRIKEILEELKEVLKRGSVRDHMVLHEYVNAAGITDRILEEYRRLLEEIKRKLEEILRRVEELHRRLRRKLEEIDR

SEQ ID NO: 920 - protein, 243 aa, Artificial Sequence; identical to SEQ ID NO: 919
  Synthetic

SEQ ID NO: 921 - protein, 240 aa, Artificial Sequence
  Synthetic
DKDKRLEELLKRLKELNDKTFEELERILEELKRANEASLREAERILEELRARIEGGNLDKRLAELLKKLLDDLKRLLEEYTRTNEELLKRLRELLERYRETNKKLLDLLRKLLDEARRTGTDEDLLRRLEDILRKYEDEVRRLLKELEDILREYEDTSRRLLEELERIAKEAAERVSRGSDKDVKDRDHMVLHEYVNAAGITEEDSRTNSEVVKRLLDLLREDSKANSEVVKRLLDVLRE

SEQ ID NO: 922 - protein, 240 aa, Artificial Sequence
  Synthetic
SKEETLKRLLDELEKRNRETVERLERLLKELEDRNRASLEELEAVLEELERKIEESGLSKELKDTLARILEELRKLLEEYFRKNEELLRLLRKLLDEYARTNEELLRLLEELLDTARRTGGDSELLKRLEDIAREYEKRVRRLLEKLKDILDKYRKTVEELVRKMEEILKEAKKTISRIGSEEVKDRDHMVLHEYVNAAGITRRDVELNLDVAKKLLELLKEDSKLNLDVARELLELLDR

SEQ ID NO: 923 - protein, 243 aa, Artificial Sequence
  Synthetic
DEEETLRRLLERKVELAKEYLDVSKEVIDRTTKLLDEYLKTSKRIVDATVELLERGDLGPDELIKRLAEELERSLRELEEEIKRLKRELEESLKKLKEIIDRLAEEAEKLLAVLKRGEGSEEEALRALASLVRELIEVLRENDERLRDVLRRLIEALRKNNEILERVLRKLVRAAEERGRDESSRERDHMVLHEYVNAAGITNEITKDLEAKLEKLLRDLNELTKALEEELKRLLDELKKRTD

SEQ ID NO: 924 - protein, 243 aa, Artificial Sequence; identical to SEQ ID NO: 923
  Synthetic

SEQ ID NO: 925 - protein, 243 aa, Artificial Sequence
  Synthetic
SEAERTKESLKKVLKALVDLNRELLRKLEENMRELTKLNEEVKRALKEVLDKVREGGIVDKDAEREAERLMRELDKSSEDTARETRKLIEESKKSTRRTEEEARKLTETLDRLAKGGLPREDLLRALVRLLEELARLIEEDVRRNAELVKRHIELVERDVAELLRLIKELVDLLADLAEKGSRTEERDHMVLHEYVNAAGITDRYREEVRKSKDKLRSILEDYKRKVDELKERLRELIEEVET

SEQ ID NO: 926 - protein, 243 aa, Artificial Sequence; identical to SEQ ID NO: 925
  Synthetic

SEQ ID NO: 927 - protein, 238 aa, Artificial Sequence
  Synthetic
EEDERLTKRVEEIKRENRELLRRLEEEVKELERKSEKIVRDLKEKVDRAKEKLDSGKGSTELLVEELEKLIREILKLSEDHNRTLEEVVRKIEDVLRANLERLKELVDEILKALKERGKGDSEELKRKVEKVARDYERLLRKLREVVKRILDESKRLDEELEERLKEVLKKLEELIKRGGPDKDVLTRDHMVLHEYVNAAGITIRRNLRLLEELLRLVREILRTSNEILEEILKDARR

SEQ ID NO: 928 - protein, 238 aa, Artificial Sequence; identical to SEQ ID NO: 927
  Synthetic

SEQ ID NO: 929 - protein, 245 aa, Artificial Sequence
  Synthetic
TEEEVLRKVEKLIKDLLDVLRDLLRASEEVVREALRVLEELIEENKRVIEELSRALSGGSRESVESALAKNEERLKKILEDADRVLDKWRRLLEELSKKAKAVLDEVRKRLEEIKREVPETEKLRTLLTILEEILRALEKIIRDILRINERLLEKLKRILERLRETNREIDERIRKLVEEARGGSEERDHMVLHEYVNAAGITHEDLRRELEKLLRDYKRELEEIERALEEIEKTLKRRADETRR

SEQ ID NO: 930 - protein, 245 aa, Artificial Sequence; identical to SEQ ID NO: 929
  Synthetic

SEQ ID NO: 931 - protein, 238 aa, Artificial Sequence
  Synthetic
SKEDKARELEKRLRDNLKKLEEVVRELAEVLKRNLEKLRRLAEELLRALKRLLDKLRAGGLPKDELEDLRREVEDVLRRLEDLLRKLKKANDESLTRLEELLRRAEEENRRVLTTLRELLRGNGDDRDLARLVARLVEANNRALEELLRLVAKNVEDNNRVLEELLRLVKELAKRLLGRIRDEDLVRRDHMVLHEYVNAAGITLRDDERDLRALEKRIRDIIREDREELERLKERARK

SEQ ID NO: 932 - protein, 243 aa, Artificial Sequence
  Synthetic
KREDILKKLEDIIRDIIDKLRRILEKVKRLNEDIIREIKRLLDESLKTLEDLLKRIADKSRDRELEDILRRVLEKLRRSLDKLRDTLRKLKEETDTVLERAERTLKELKDRLEKLLRDGEKVSEEDLVEALKALIDELRKVLEDVIRVSKELVERLLRALREHLETNKRLVKELLDALRKTTGDDEERDHMVLHEYVNAAGITEEVERVARELEKAHRDLERDIRRVAEELKKLLKKLRDDRR

SEQ ID NO: 933 - protein, 244 aa, Artificial Sequence
  Synthetic
SAEETLRRITEESKRVLEEITKKYEDLERESREVLRKLREDLDRIKRELEDVLTKGGDDKDEVLTVLEKVLDELLKLHRENLRVIKELLRKVLEVDRENLEVLKRLLEKARDLLRRSGRDEKDLKKLEDELRKVKEELEKKHEASKRDIEDLERELDKVTEEVERLLRKLKEELRRAAEGSDEDRERRDHMVLHEYVNAAGITEEILKINEELNRKIIKFARENLERNRRVNKKVIEVLREAAR

SEQ ID NO: 934 - protein, 247 aa, Artificial Sequence
  Synthetic
SEKEELLKLIKRVIELLKRVLEEHLRLVEDVIRRLKELLDSNEKIVREVIEDLKRLLDEVRGDKEELDRIKEKLEEVLERYKRRLEEIKRDLERMLEDYKRELKRIEEDLRRVLEEVERIATRGEGPAEALIDKLRKILERALRELDKLSKKLDELLKKVLEELEKSNREIDKLLKDVLRRVEEGGARDHMVLHEYVNAAGITEKLKRNLEDVRRVIEDVKRKSARILEEARRLIEEVERELEKIRK

SEQ ID NO: 935 - protein, 247 aa, Artificial Sequence; identical to SEQ ID NO: 934
  Synthetic

SEQ ID NO: 936 - protein, 238 aa, Artificial Sequence
  Synthetic
SEAEKIREALETNLRLLEELIKRLKEILDTHNELLRRVIETLERLLKELLELLEEGGLDEEVLREVKRLVDELRKEARRVLDEHEKLVRKIKKEAEDVARESEEIIKEVEDKLKGLDREELLERVRRVLKKSDDLIAELVRRALKILEELTRLLAELLKKVVEILRRIVELVERVLTKKGAPKEDLERDHMVLHEYVNAAGITLEKLARDSAELMRELERILDRYARESEELDRRLAE

SEQ ID NO: 937 - protein, 238 aa, Artificial Sequence; identical to SEQ ID NO: 936
  Synthetic

SEQ ID NO: 938 - protein, 242 aa, Artificial Sequence
  Synthetic
SEKERLMRLLDKLKDLNRRLVERIKELLDKALELHKKLVKELRELLERLKELVERGGVPEELLTRIDELIKKLEDEARKISKEVKRLIDELKKRLEDIHREVDRLIRELKETLKGVTDKDELLRRVAEVLERIARLSEELIREVKEVLEKIVELSRELLKRVLDVLRRIAELLEDALRKGNVSEETVRDHMVLHEYVNAAGITIERDAEREYKKLKDELEELTERYRREIRKLKEELKADRK

SEQ ID NO: 939 - protein, 242 aa, Artificial Sequence; identical to SEQ ID NO: 938
  Synthetic

SEQ ID NO: 940 - protein, 247 aa, Artificial Sequence
  Synthetic
SEAEDLEELIKELAELLKDVIRKLEKINRRLVKILEDIIRRLKEISKEAEEELRKGTVEDKDILRDLERRLREILEESDRLLEELKRRLEEILRKSKELLRRLEEVLREILKRAEEVKRSNLPKEELIKEIVKLLEELLRVIEKILEDNIRLLEELVEVIKEILEKHLRLLEELVRVIERILREVGKRDHMVLHEYVNAAGITDRLREEHEEVKRRLEEELTRLRETHKKIEKELREALKRVRDRST

SEQ ID NO: 941 - protein, 247 aa, Artificial Sequence; identical to SEQ ID NO: 940
  Synthetic

SEQ ID NO: 942 - protein, 240 aa, Artificial Sequence
  Synthetic
SDKEEIKRRVEKTARDLETEHDKIKKRLEDTVRDIKRELDELLEKYERVLRKIEKTLREGDGDATDLVDKLLETVKRLNEEVLRTVKKIADELRRLVEEVLRVLRESNETLARLLEEGNVGDEVRERLEEVLRRTEEIIKTLEEIVKRLLDELRRLVEELRRISKKLKDELDKIKEKGKDEKRLIEERDHMVLHEYVNAAGITEALAKLIKELLEALEEVLRRNKELIRELLRVLDEALK

SEQ ID NO: 943 - protein, 248 aa, Artificial Sequence
  Synthetic
DEDRIIEEIARLLEELLRELLELIKKLIETNRRLNEEHERAVRELARLLEELLDRLVKKGISDEKLKRIRERLKRALDDLERLHREINKRLEDLVRELEKLVREILKELKDALEELRRASARAGGEEVLRRLEEIVKKLLDLVRRILERLKEIHKDNVRLLRELNERLTRIVEDLVRLIREILREAGRDHMVLHEYVNAAGITRRMIKRLHEDLERKLKESEDELREIEARLEEKIRRLEEKLERKRR

SEQ ID NO: 944 - protein, 248 aa, Artificial Sequence; identical to SEQ ID NO: 943
  Synthetic

SEQ ID NO: 945 - protein, 238 aa, Artificial Sequence
  Synthetic
DADELLRRLAEEVERVIREAEDLLRRWKETIKKVLDDLKRLLDELKKRNEDVIRELTKTKGDEELAKLIKDLLDTNEKVNRDLLRLIKKLLKDAERVNRRLLELIEELLEELKRVAKDLGLREEADKKLRDIADRARKELEDYERRLKELLKTVEDALRKAEEDSRKLKRDVEELLERGRLRKDDLERDHMVLHEYVNAAGITLREILRENLEALKKTLKRLEDVVREILEDLKRERK

SEQ ID NO: 946 - protein, 238 aa, Artificial Sequence; identical to SEQ ID NO: 945
  Synthetic

SEQ ID NO: 947 - protein, 243 aa, Artificial Sequence
  Synthetic
DLERVVEDIVDKAKRLLDKNLEVLKRIVDEVLRLLERLLRESRKVVKRVKEIIEELVRDEKELRRVKRALEEVLRRHEEIAKELKERLRKVAKEAEEKHKKLVEDLKRVVDEVRKKLSGPLDREKVLEVLDELVTIIAKLLDENIKVLEEVIRVIAELLERLLDSHRRLIDIIAKLLEGLRPGDEDLRDHMVLHEYVNAAGITKVVDDLKKELERIKREVKRLIEENARTLADIKRAVDEARK

SEQ ID NO: 948 - protein, 246 aa, Artificial Sequence
  Synthetic
KEIEETLKELEDLNREMVETNRRVLEETRRLNKETVDRVKATLDELAKMLKKLVDDVRKGPTSEELKRLLAELEELLARVVRRVEELLKKSTDLLERAVKDSADALRRSHEVLKEVASRVKRAKDEGLPREEVLRLLRELLERHAKVLKDIVRVSEKLLREHLKVLREIVEVLEELLERILKVILDTRDHMVLHEYVNAAGITIKRRLKEVIDRYEDELRKLRKEYKEKIDKYERKLEEIERRERT

SEQ ID NO: 949 - protein, 247 aa, Artificial Sequence
  Synthetic
RDRDVLRKVKAEIEELVARIEKVSRDALSEVKRLLDENRKIAEDVLRLIESLLRKIRDTRGDDEVVKETEEVLRDNHRLLEELIRRLIKVLEEWLRRHKKLLDEIRELLKEILRLVKESGVSEDLLRRLKRVIEELDKKLKESEEKLRRVVEKAKEDLKAVLEEHRKVLEDLKRALEEVREKLRERGRDHMVLHEYVNAAGITEEMKRVHDDLSRAVEKVVRDVVRVDKELLDELARILRRLEEVIT

SEQ ID NO: 950 - protein, 247 aa, Artificial Sequence; identical to SEQ ID NO: 949
  Synthetic

SEQ ID NO: 951 - protein, 246 aa, Artificial Sequence
  Synthetic
SREEIVATLEDLARKILEVVKKLAKEIEDAWREIERAVREILKRLEELWREIEDVVRKKVDSRVAEILETVVKRVVDITRRLIEEAERVVRELVDITRKLITILEEVVRRLVEIVREASKIDDRRELEDMLRKIREVVREVIERLKKLDEDVRRVVEEVIRRLEELNKRLEDVIREVKKRLKELGLSRDHMVLHEYVNAAGITRNTRVIKEIIDLLRTVIRIHEKIVEDLIKLLEELLRRLEEATR

SEQ ID NO: 952 - protein, 241 aa, Artificial Sequence
  Synthetic
SEKELLKEILDRIRELLEDDNRLLKRIVDEIRKLLEEWLRVHKEILERIKELLDRIGAPEDVIRELTRALKETEEDVDRVIRTLEKLLKEVLDAHEEVVRKLDRLLKEVERLVEGGDAEEVVRDLLRVVKEILDESKAVIDELARVVDEILKLLEEVDRKLAKVVKEILEDVLRGSGDDEDAVRKIARDHMVLHEYVNAAGITTRRVIEEAKRLLKEWRDRNKEVADTLKKLLEDLIRKIR

SEQ ID NO: 953 - protein, 241 aa, Artificial Sequence; identical to SEQ ID NO: 952
  Synthetic

SEQ ID NO: 954 - protein, 246 aa, Artificial Sequence
  Synthetic
SEREELLERIKEILKRVKDKLDEDLKRLKEILEKLKEKADRDLEELRRRIEEVREKLERTGRTDELVKEVLDTVRRNLENLKRLVEDILRKLEENVKNLTDLVREILKLITELIKRLEDGGLPKEVLDALRRVLEKLEELLREILERLKRSLEAVKRKIEELLKELERSLDELRRALERIRKEIGDSRDHMVLHEYVNAAGITAVRRVLEELLKVLAEHLETVRELIERLKRVLEEAIEVVERVAR

SEQ ID NO: 955 - protein, 240 aa, Artificial Sequence
  Synthetic
DREKSVRDIEEDLKRVLDKLRRRVETSKEELKKVLKADKENADELEKTLRDVVRELDRGIDSEVLRAVREIVKRLVEVVRRYNELSEKIIRDLVRVNDRVLELLKRIVKRLIDVVRELEKIGDKEKALRRLEEVVKEVKRRIEELLKELEDVHRELVKILEEVNEDLKRVATEVKEIIKTGIKSSEVRDHMVLHEYVNAAGITENTDRLKEVIDRNLADLRDLAEELRAVIERLLEDARR

SEQ ID NO: 956 - protein, 240 aa, Artificial Sequence; identical to SEQ ID NO: 955
  Synthetic

SEQ ID NO: 957 - protein, 245 aa, Artificial Sequence
  Synthetic
SEKDEVTRRIRELLKEAEETNREAIERIKRLLDRVREAVEEVAKRSEELLRRLKKVLDRGLQDDEALLKLLIDALREHNRLSTELIKILIDVLRTILKIIKDVLATNIEIARRILDLVRRLAERGGLDDRLVKEVEKLVRTAERLHRDALRKVKRLVEELEKRLRELVKTDHDLVRRLETLLRRGSGRDHMVLHEYVNAAGITLRLIRELLKEIEKIVKEIIELLERLNDELRKIIEAILETTKK

SEQ ID NO: 958 - protein, 245 aa, Artificial Sequence; identical to SEQ ID NO: 957
  Synthetic

SEQ ID NO: 959 - protein, 239 aa, Artificial Sequence
  Synthetic
SAEDLVRRVKDLVDKLEDKLRKVVRTNERLWEEIRKRLEELVRRNKELWDALVEKLKAGDKDKDELIEEAKSLEDESNALVEKLVRDIERVLAESNKLLDTLAKEIEEVLEEIVELVERGSGSDKEAREKLEDIKARLKEVLKKLREESKRIIDELRRLLEEYKRLVKEIRDRIEEVRKRNSEIRVLRDHMVLHEYVNAAGITELEKLVRDHNRVVEEVVRELVELLSRAVEVIKEVVK

SEQ ID NO: 960 - protein, 247 aa, Artificial Sequence
  Synthetic
DEERLAEELERVLDRNRKLLEEALRELRRVIEENRKSVKRLLDELKRVLDELLKVLRELSRGDSDEELRKVIEDLIRKLTKVLDKVRSLVEENIERLARVLEKLERLARENLEDLKKVLDDVDKKLKDRRLVERLAELVRELIEVNKEILEMLKEIVRELLEINRTLLERLKDLVATALEIIKLLARRDHMVLHEYVNAAGITDRLRKLLEDYERAVRRLEDKLRRVRERYEAVLKRIKDKLEETKR

SEQ ID NO: 961 - protein, 243 aa, Artificial Sequence
  Synthetic
SRVEELKKLIEDILRISREVVERIARVAEDIHRINRRVLDDLRKLIEDILRTVEEILARKVSGTEAAEALRDTIRRVVDEIRKLLEEHEKRSAELLEEIRKLLEDILRRSERAVEEIRELLKKGVSTKDVLRIIEEILREHLELLERVVRRIEEILRELLKTIEEIVKRIKEILEELKEVLKRGSVGRDHMVLHEYVNAAGITRILEEYRRLLEEIKRKLEEILRRVEELHRRLRRKLEEIDR

SEQ ID NO: 962 - protein, 243 aa, Artificial Sequence; identical to SEQ ID NO: 961
  Synthetic

SEQ ID NO: 963 - protein, 243 aa, Artificial Sequence
  Synthetic
DEEETLRRLLERKVELAKEYLDVSKEVIDRTTKLLDEYLKTSKRIVDATVELLERGDLGPDELIKRLAEELERSLRELEEEIKRLKRELEESLKKLKEIIDRLAEEAEKLLAVLKRGEGSEEEALRALASLVRELIEVLRENDERLRDVLRRLIEALRKNNEILERVLRKLVRAAEERGRDESSREARDHMVLHEYVNAAGITEITKDLEAKLEKLLRDLNELTKALEEELKRLLDELKKRTD

SEQ ID NO: 964 - protein, 243 aa, Artificial Sequence; identical to SEQ ID NO: 963
  Synthetic

SEQ ID NO: 965 - protein, 243 aa, Artificial Sequence
  Synthetic
SEAERTKESLKKVLKALVDLNRELLRKLEENMRELTKLNEEVKRALKEVLDKVREGGIVDKDAEREAERLMRELDKSSEDTARETRKLIEESKKSTRRTEEEARKLTETLDRLAKGGLPREDLLRALVRLLEELARLIEEDVRRNAELVKRHIELVERDVAELLRLIKELVDLLADLAEKGSRTEEIRDHMVLHEYVNAAGITRYREEVRKSKDKLRSILEDYKRKVDELKERLRELIEEVET

SEQ ID NO: 966 - protein, 243 aa, Artificial Sequence; identical to SEQ ID NO: 965
  Synthetic

SEQ ID NO: 967 - protein, 245 aa, Artificial Sequence
  Synthetic
TEEEVLRKVEKLIKDLLDVLRDLLRASEEVVREALRVLEELIEENKRVIEELSRALSGGSRESVESALAKNEERLKKILEDADRVLDKWRRLLEELSKKAKAVLDEVRKRLEEIKREVPETEKLRTLLTILEEILRALEKIIRDILRINERLLEKLKRILERLRETNREIDERIRKLVEEARGGSEEKRDHMVLHEYVNAAGITEDLRRELEKLLRDYKRELEEIERALEEIEKTLKRRADETRR

SEQ ID NO: 968 - protein, 245 aa, Artificial Sequence; identical to SEQ ID NO: 967
  Synthetic

SEQ ID NO: 969 - protein, 243 aa, Artificial Sequence
  Synthetic
KREDILKKLEDIIRDIIDKLRRILEKVKRLNEDIIREIKRLLDESLKTLEDLLKRIADKSRDRELEDILRRVLEKLRRSLDKLRDTLRKLKEETDTVLERAERTLKELKDRLEKLLRDGEKVSEEDLVEALKALIDELRKVLEDVIRVSKELVERLLRALREHLETNKRLVKELLDALRKTTGDDEEIRDHMVLHEYVNAAGITEVERVARELEKAHRDLERDIRRVAEELKKLLKKLRDDRR

SEQ ID NO: 970 - protein, 244 aa, Artificial Sequence
  Synthetic
SAEETLRRITEESKRVLEEITKKYEDLERESREVLRKLREDLDRIKRELEDVLTKGGDDKDEVLTVLEKVLDELLKLHRENLRVIKELLRKVLEVDRENLEVLKRLLEKARDLLRRSGRDEKDLKKLEDELRKVKEELEKKHEASKRDIEDLERELDKVTEEVERLLRKLKEELRRAAEGSDEDRERLRDHMVLHEYVNAAGITEILKINEELNRKIIKFARENLERNRRVNKKVIEVLREAAR

SEQ ID NO: 971 - protein, 247 aa, Artificial Sequence
  Synthetic
SEKEELLKLIKRVIELLKRVLEEHLRLVEDVIRRLKELLDSNEKIVREVIEDLKRLLDEVRGDKEELDRIKEKLEEVLERYKRRLEEIKRDLERMLEDYKRELKRIEEDLRRVLEEVERIATRGEGPAEALIDKLRKILERALRELDKLSKKLDELLKKVLEELEKSNREIDKLLKDVLRRVEEGGASRDHMVLHEYVNAAGITKLKRNLEDVRRVIEDVKRKSARILEEARRLIEEVERELEKIRK

SEQ ID NO: 972 - protein, 242 aa, Artificial Sequence
  Synthetic
SEKERLMRLLDKLKDLNRRLVERIKELLDKALELHKKLVKELRELLERLKELVERGGVPEELLTRIDELIKKLEDEARKISKEVKRLIDELKKRLEDIHREVDRLIRELKETLKGVTDKDELLRRVAEVLERIARLSEELIREVKEVLEKIVELSRELLKRVLDVLRRIAELLEDALRKGNVSEETVRRDHMVLHEYVNAAGITERDAEREYKKLKDELEELTERYRREIRKLKEELKADRK

SEQ ID NO: 973 - protein, 242 aa, Artificial Sequence; identical to SEQ ID NO: 972
  Synthetic

SEQ ID NO: 974 - protein, 247 aa, Artificial Sequence
  Synthetic
SEAEDLEELIKELAELLKDVIRKLEKINRRLVKILEDIIRRLKEISKEAEEELRKGTVEDKDILRDLERRLREILEESDRLLEELKRRLEEILRKSKELLRRLEEVLREILKRAEEVKRSNLPKEELIKEIVKLLEELLRVIEKILEDNIRLLEELVEVIKEILEKHLRLLEELVRVIERILREVGKDRDHMVLHEYVNAAGITRLREEHEEVKRRLEEELTRLRETHKKIEKELREALKRVRDRST

SEQ ID NO: 975 - protein, 247 aa, Artificial Sequence; identical to SEQ ID NO: 974
  Synthetic

SEQ ID NO: 976 - protein, 248 aa, Artificial Sequence
  Synthetic
DEDRIIEEIARLLEELLRELLELIKKLIETNRRLNEEHERAVRELARLLEELLDRLVKKGISDEKLKRIRERLKRALDDLERLHREINKRLEDLVRELEKLVREILKELKDALEELRRASARAGGEEVLRRLEEIVKKLLDLVRRILERLKEIHKDNVRLLRELNERLTRIVEDLVRLIREILREAGVRDHMVLHEYVNAAGITRMIKRLHEDLERKLKESEDELREIEARLEEKIRRLEEKLERKRR

SEQ ID NO: 977 - protein, 248 aa, Artificial Sequence; identical to SEQ ID NO: 976
  Synthetic

SEQ ID NO: 978 - protein, 247 aa, Artificial Sequence
  Synthetic
SKAEKLLKDLREALEKVKRRYEELERRLDEVLKEHEEIVKRLLEELEKVLKRIEEGGLPEEELEKLKKLAEKVKELLRELLRLSKELVDRVRELLKRDLDLVRRLVEIALKVLREAREQPNDEKRVEKIKRDLEKKARRVREENERIKRDLKRTADESRKRLEKLLEDLKRELDRLREDLDRGRKDIDRDHMVLHEYVNAAGITLLREVIKSHEKLVRTIERLIEESIRVNEELLEVIERLLDRARK

SEQ ID NO: 979 - protein, 239 aa, Artificial Sequence
  Synthetic
SERELIERWLELHKEILRLIRELVERLLKLHREILDTIKKLIRELLELLEDIARKLGLDKEAKDELREIAKRVEDKLEKLERESRKVEEDLKRKLKELTDESDTVEKRVRDVVRRGTQSREEIAEELLRLDRKLLKAVEELLKEILDLNKKLLDDVRAILEETRRVLEKLLDRVRRGERTDDERRTLTRDHMVLHEYVNAAGITLKKLLDDSARMAEEVKKTLKELLERSEKVAEDVRK

SEQ ID NO: 980 - protein, 246 aa, Artificial Sequence
  Synthetic
KEIEETLKELEDLNREMVETNRRVLEETRRLNKETVDRVKATLDELAKMLKKLVDDVRKGPTSEELKRLLAELEELLARVVRRVEELLKKSTDLLERAVKDSADALRRSHEVLKEVASRVKRAKDEGLPREEVLRLLRELLERHAKVLKDIVRVSEKLLREHLKVLREIVEVLEELLERILKVILDTTRDHMVLHEYVNAAGITKRRLKEVIDRYEDELRKLRKEYKEKIDKYERKLEEIERRERT

SEQ ID NO: 981 - protein, 246 aa, Artificial Sequence
  Synthetic
SREEIVATLEDLARKILEVVKKLAKEIEDAWREIERAVREILKRLEELWREIEDVVRKKVDSRVAEILETVVKRVVDITRRLIEEAERVVRELVDITRKLITILEEVVRRLVEIVREASKIDDRRELEDMLRKIREVVREVIERLKKLDEDVRRVVEEVIRRLEELNKRLEDVIREVKKRLKELGLSERDHMVLHEYVNAAGITNTRVIKEIIDLLRTVIRIHEKIVEDLIKLLEELLRRLEEATR

SEQ ID NO: 982 - protein, 241 aa, Artificial Sequence
  Synthetic
SEKELLKEILDRIRELLEDDNRLLKRIVDEIRKLLEEWLRVHKEILERIKELLDRIGAPEDVIRELTRALKETEEDVDRVIRTLEKLLKEVLDAHEEVVRKLDRLLKEVERLVEGGDAEEVVRDLLRVVKEILDESKAVIDELARVVDEILKLLEEVDRKLAKVVKEILEDVLRGSGDDEDAVRKIAKRDHMVLHEYVNAAGITRRVIEEAKRLLKEWRDRNKEVADTLKKLLEDLIRKIR

SEQ ID NO: 983 - protein, 241 aa, Artificial Sequence; identical to SEQ ID NO: 982
  Synthetic

SEQ ID NO: 984 - protein, 248 aa, Artificial Sequence
  Synthetic
SEDELLEKIVRKLAEAVKRIEEELRKSKREIERLVKEIKEKLEDSLARVKETLDRIRETRKGPSDEEVLERLVRTLEELLARHLKLIEDIARELKKLLKEHLDRIETIVRDLKRLLKEILDELERTGLPREALEAVRELVKTVARLLDEVLKNNKKLLDDLKKELDDVLANNKRIVDELARLLERVRRRDHMVLHEYVNAAGITERSIESLERLLELILRVLEYSVASLEELLRRLLEVIKRIVDTTK

SEQ ID NO: 985 - protein, 246 aa, Artificial Sequence
  Synthetic
SEREELLERIKEILKRVKDKLDEDLKRLKEILEKLKEKADRDLEELRRRIEEVREKLERTGRTDELVKEVLDTVRRNLENLKRLVEDILRKLEENVKNLTDLVREILKLITELIKRLEDGGLPKEVLDALRRVLEKLEELLREILERLKRSLEAVKRKIEELLKELERSLDELRRALERIRKEIGDSERDHMVLHEYVNAAGITVRRVLEELLKVLAEHLETVRELIERLKRVLEEAIEVVERVAR

SEQ ID NO: 986 - protein, 246 aa, Artificial Sequence; identical to SEQ ID NO: 985
  Synthetic

SEQ ID NO: 987 - protein, 240 aa, Artificial Sequence
  Synthetic
DREKSVRDIEEDLKRVLDKLRRRVETSKEELKKVLKADKENADELEKTLRDVVRELDRGIDSEVLRAVREIVKRLVEVVRRYNELSEKIIRDLVRVNDRVLELLKRIVKRLIDVVRELEKIGDKEKALRRLEEVVKEVKRRIEELLKELEDVHRELVKILEEVNEDLKRVATEVKEIIKTGIKSSEVARDHMVLHEYVNAAGITNTDRLKEVIDRNLADLRDLAEELRAVIERLLEDARR

SEQ ID NO: 988 - protein, 241 aa, Artificial Sequence
  Synthetic
SAEEAVEKLVRIARAIVKINEDLSREVVRILREIVRLNEETTRLLVEIAREVVKVVEDGGLSEDVVRKLRKLVKELEDLLKKSNDDIRKLVEDVARRLKESNDEIRRLVERLEELLKRGPGDEELLRLVEELTEELLRTHEEVVKALEKLTADLLELHRELLERVRRLTKRIEEELKRVGVSEELLRRRDHMVLHEYVNAAGITKELEKLKRELERLLEESRRKLEKLKRDLERVLEETRR

SEQ ID NO: 989 - protein, 243 aa, Artificial Sequence
  Synthetic
SEAERLADEVRKAVKKSEEDNETLVREVEKAVRELKKNNKTWVDEVRKLMKRLVDLLRDGQVSDRDLLKELEEVLRRVLEALAENHERTEEILKRWLDRYAEDIERLRKVLKEVIEALKRGGSDDKRIVDELEEILRRNEDVLDKIAKRLRRLLEEDRRLLERIVRELKRLLDDLDRITKEGKSEELVRDHMVLHEYVNAAGITLVRLNNEILERLLKIVRELHKDNIKILEDLLRIIEEVLR

SEQ ID NO: 990 - protein, 243 aa, Artificial Sequence; identical to SEQ ID NO: 989
  Synthetic

SEQ ID NO: 991 - protein, 243 aa, Artificial Sequence
  Synthetic
SRVEELKKLIEDILRISREVVERIARVAEDIHRINRRVLDDLRKLIEDILRTVEEILARKVSGTEAAEALRDTIRRVVDEIRKLLEEHEKRSAELLEEIRKLLEDILRRSERAVEEIRELLKKGVSTKDVLRIIEEILREHLELLERVVRRIEEILRELLKTIEEIVKRIKEILEELKEVLKRGSVGDRDHMVLHEYVNAAGITILEEYRRLLEEIKRKLEEILRRVEELHRRLRRKLEEIDR

SEQ ID NO: 992 - protein, 249 aa, Artificial Sequence
  Synthetic
DAEEVVKRLADVLRENDETIRKVVEDLVRIAEENDRLWKKLVEDIAEILRRIVELLRRGGVPEELLDRLAKVVKSIVEKAEKILERLNRVSKAIAEKLKTIVDELNEVSKEIVKRAEDILRKGKDKETVLRALRTLVKEYADLSKEVLERVERIVREYVKLSDEVVKSLAEIVEELIRIIEDLLRKGNRDHMVLHEYVNAAGITRKLLEDVKKASEDIVREVERIVRELAKRSDEILKKLEDIVEKLRE

SEQ ID NO: 993 - protein, 249 aa, Artificial Sequence; identical to SEQ ID NO: 992
  Synthetic

SEQ ID NO: 994 - protein, 240 aa, Artificial Sequence
  Synthetic
DKDKRLEELLKRLKELNDKTFEELERILEELKRANEASLREAERILEELRARIEGGNLDKRLAELLKKLLDDLKRLLEEYTRTNEELLKRLRELLERYRETNKKLLDLLRKLLDEARRTGTDEDLLRRLEDILRKYEDEVRRLLKELEDILREYEDTSRRLLEELERIAKEAAERVSRGSDKDVKDIIRDHMVLHEYVNAAGITDSRTNSEVVKRLLDLLREDSKANSEVVKRLLDVLRE

SEQ ID NO: 995 - protein, 240 aa, Artificial Sequence
  Synthetic
SKEETLKRLLDELEKRNRETVERLERLLKELEDRNRASLEELEAVLEELERKIEESGLSKELKDTLARILEELRKLLEEYFRKNEELLRLLRKLLDEYARTNEELLRLLEELLDTARRTGGDSELLKRLEDIAREYEKRVRRLLEKLKDILDKYRKTVEELVRKMEEILKEAKKTISRIGSEEVKDIVRDHMVLHEYVNAAGITDVELNLDVAKKLLELLKEDSKLNLDVARELLELLDR

SEQ ID NO: 996 - protein, 243 aa, Artificial Sequence
  Synthetic
DEEETLRRLLERKVELAKEYLDVSKEVIDRTTKLLDEYLKTSKRIVDATVELLERGDLGPDELIKRLAEELERSLRELEEEIKRLKRELEESLKKLKEIIDRLAEEAEKLLAVLKRGEGSEEEALRALASLVRELIEVLRENDERLRDVLRRLIEALRKNNEILERVLRKLVRAAEERGRDESSREALRDHMVLHEYVNAAGITITKDLEAKLEKLLRDLNELTKALEEELKRLLDELKKRTD

SEQ ID NO: 997 - protein, 243 aa, Artificial Sequence
  Synthetic
SEAERTKESLKKVLKALVDLNRELLRKLEENMRELTKLNEEVKRALKEVLDKVREGGIVDKDAEREAERLMRELDKSSEDTARETRKLIEESKKSTRRTEEEARKLTETLDRLAKGGLPREDLLRALVRLLEELARLIEEDVRRNAELVKRHIELVERDVAELLRLIKELVDLLADLAEKGSRTEEIRRDHMVLHEYVNAAGITYREEVRKSKDKLRSILEDYKRKVDELKERLRELIEEVET

SEQ ID NO: 998 - protein, 243 aa, Artificial Sequence; identical to SEQ ID NO: 997
  Synthetic

SEQ ID NO: 999 - protein, 245 aa, Artificial Sequence
  Synthetic
TEEEVLRKVEKLIKDLLDVLRDLLRASEEVVREALRVLEELIEENKRVIEELSRALSGGSRESVESALAKNEERLKKILEDADRVLDKWRRLLEELSKKAKAVLDEVRKRLEEIKREVPETEKLRTLLTILEEILRALEKIIRDILRINERLLEKLKRILERLRETNREIDERIRKLVEEARGGSEEKLRDHMVLHEYVNAAGITDLRRELEKLLRDYKRELEEIERALEEIEKTLKRRADETRR

SEQ ID NO: 1000 - protein, 243 aa, Artificial Sequence
  Synthetic
KREDILKKLEDIIRDIIDKLRRILEKVKRLNEDIIREIKRLLDESLKTLEDLLKRIADKSRDRELEDILRRVLEKLRRSLDKLRDTLRKLKEETDTVLERAERTLKELKDRLEKLLRDGEKVSEEDLVEALKALIDELRKVLEDVIRVSKELVERLLRALREHLETNKRLVKELLDALRKTTGDDEEIKRDHMVLHEYVNAAGITVERVARELEKAHRDLERDIRRVAEELKKLLKKLRDDRR

SEQ ID NO: 1001 - protein, 244 aa, Artificial Sequence
  Synthetic
SAEETLRRITEESKRVLEEITKKYEDLERESREVLRKLREDLDRIKRELEDVLTKGGDDKDEVLTVLEKVLDELLKLHRENLRVIKELLRKVLEVDRENLEVLKRLLEKARDLLRRSGRDEKDLKKLEDELRKVKEELEKKHEASKRDIEDLERELDKVTEEVERLLRKLKEELRRAAEGSDEDRERLARDHMVLHEYVNAAGITILKINEELNRKIIKFARENLERNRRVNKKVIEVLREAAR

SEQ ID NO: 1002 - protein, 250 aa, Artificial Sequence
  Synthetic
STEEILKRVKEILDELAKELRDIIRESLRTIEELLDELRRILEESERTLEELVKTIKDGVKDSEELLRRLKRLLEDLRRAHEELLKRLKEAVDEHRDRLRKILEELERVLKELRKRIEELRRSGDRISEKDVLRKLEEVLRKALEILERLLKKIRESARELLKIIEEVLDANIKVMEEALKTIKELLKDRDHMVLHEYVNAAGITRTRYEELRRRLRKRVKDYEDKLREIEKKVRRDAERIEEELERAKK

SEQ ID NO: 1003 - protein, 247 aa, Artificial Sequence
  Synthetic
SEKEELLKLIKRVIELLKRVLEEHLRLVEDVIRRLKELLDSNEKIVREVIEDLKRLLDEVRGDKEELDRIKEKLEEVLERYKRRLEEIKRDLERMLEDYKRELKRIEEDLRRVLEEVERIATRGEGPAEALIDKLRKILERALRELDKLSKKLDELLKKVLEELEKSNREIDKLLKDVLRRVEEGGASERDHMVLHEYVNAAGITLKRNLEDVRRVIEDVKRKSARILEEARRLIEEVERELEKIRK

SEQ ID NO: 1004 - protein, 247 aa, Artificial Sequence; identical to SEQ ID NO: 1003
  Synthetic

SEQ ID NO: 1005 - protein, 242 aa, Artificial Sequence
  Synthetic
SEKERLMRLLDKLKDLNRRLVERIKELLDKALELHKKLVKELRELLERLKELVERGGVPEELLTRIDELIKKLEDEARKISKEVKRLIDELKKRLEDIHREVDRLIRELKETLKGVTDKDELLRRVAEVLERIARLSEELIREVKEVLEKIVELSRELLKRVLDVLRRIAELLEDALRKGNVSEETVRRRDHMVLHEYVNAAGITRDAEREYKKLKDELEELTERYRREIRKLKEELKADRK

SEQ ID NO: 1006 - protein, 247 aa, Artificial Sequence
  Synthetic
SEAEDLEELIKELAELLKDVIRKLEKINRRLVKILEDIIRRLKEISKEAEEELRKGTVEDKDILRDLERRLREILEESDRLLEELKRRLEEILRKSKELLRRLEEVLREILKRAEEVKRSNLPKEELIKEIVKLLEELLRVIEKILEDNIRLLEELVEVIKEILEKHLRLLEELVRVIERILREVGKDKRDHMVLHEYVNAAGITLREEHEEVKRRLEEELTRLRETHKKIEKELREALKRVRDRST

SEQ ID NO: 1007 - protein, 247 aa, Artificial Sequence; identical to SEQ ID NO: 1006
  Synthetic

SEQ ID NO: 1008 - protein, 248 aa, Artificial Sequence
  Synthetic
DEDRIIEEIARLLEELLRELLELIKKLIETNRRLNEEHERAVRELARLLEELLDRLVKKGISDEKLKRIRERLKRALDDLERLHREINKRLEDLVRELEKLVREILKELKDALEELRRASARAGGEEVLRRLEEIVKKLLDLVRRILERLKEIHKDNVRLLRELNERLTRIVEDLVRLIREILREAGVDRDHMVLHEYVNAAGITMIKRLHEDLERKLKESEDELREIEARLEEKIRRLEEKLERKRR

SEQ ID NO: 1009 - protein, 248 aa, Artificial Sequence; identical to SEQ ID NO: 1008
  Synthetic

SEQ ID NO: 1010 - protein, 247 aa, Artificial Sequence
  Synthetic
SKAEKLLKDLREALEKVKRRYEELERRLDEVLKEHEEIVKRLLEELEKVLKRIEEGGLPEEELEKLKKLAEKVKELLRELLRLSKELVDRVRELLKRDLDLVRRLVEIALKVLREAREQPNDEKRVEKIKRDLEKKARRVREENERIKRDLKRTADESRKRLEKLLEDLKRELDRLREDLDRGRKDIDERDHMVLHEYVNAAGITLREVIKSHEKLVRTIERLIEESIRVNEELLEVIERLLDRARK

SEQ ID NO: 1011 - protein, 246 aa, Artificial Sequence
  Synthetic
KEIEETLKELEDLNREMVETNRRVLEETRRLNKETVDRVKATLDELAKMLKKLVDDVRKGPTSEELKRLLAELEELLARVVRRVEELLKKSTDLLERAVKDSADALRRSHEVLKEVASRVKRAKDEGLPREEVLRLLRELLERHAKVLKDIVRVSEKLLREHLKVLREIVEVLEELLERILKVILDTTGRDHMVLHEYVNAAGITRRLKEVIDRYEDELRKLRKEYKEKIDKYERKLEEIERRERT

SEQ ID NO: 1012 - protein, 246 aa, Artificial Sequence; identical to SEQ ID NO: 1011
  Synthetic

SEQ ID NO: 1013 - protein, 247 aa, Artificial Sequence
  Synthetic
RDRDVLRKVKAEIEELVARIEKVSRDALSEVKRLLDENRKIAEDVLRLIESLLRKIRDTRGDDEVVKETEEVLRDNHRLLEELIRRLIKVLEEWLRRHKKLLDEIRELLKEILRLVKESGVSEDLLRRLKRVIEELDKKLKESEEKLRRVVEKAKEDLKAVLEEHRKVLEDLKRALEEVREKLRERGSERDHMVLHEYVNAAGITMKRVHDDLSRAVEKVVRDVVRVDKELLDELARILRRLEEVIT

SEQ ID NO: 1014 - protein, 241 aa, Artificial Sequence
  Synthetic
SEKELLKEILDRIRELLEDDNRLLKRIVDEIRKLLEEWLRVHKEILERIKELLDRIGAPEDVIRELTRALKETEEDVDRVIRTLEKLLKEVLDAHEEVVRKLDRLLKEVERLVEGGDAEEVVRDLLRVVKEILDESKAVIDELARVVDEILKLLEEVDRKLAKVVKEILEDVLRGSGDDEDAVRKIAKIRDHMVLHEYVNAAGITRVIEEAKRLLKEWRDRNKEVADTLKKLLEDLIRKIR

SEQ ID NO: 1015 - protein, 241 aa, Artificial Sequence; identical to SEQ ID NO: 1014
  Synthetic

SEQ ID NO: 1016 - protein, 246 aa, Artificial Sequence
  Synthetic
SEREELLERIKEILKRVKDKLDEDLKRLKEILEKLKEKADRDLEELRRRIEEVREKLERTGRTDELVKEVLDTVRRNLENLKRLVEDILRKLEENVKNLTDLVREILKLITELIKRLEDGGLPKEVLDALRRVLEKLEELLREILERLKRSLEAVKRKIEELLKELERSLDELRRALERIRKEIGDSETRDHMVLHEYVNAAGITRRVLEELLKVLAEHLETVRELIERLKRVLEEAIEVVERVAR

SEQ ID NO: 1017 - protein, 240 aa, Artificial Sequence
  Synthetic
DREKSVRDIEEDLKRVLDKLRRRVETSKEELKKVLKADKENADELEKTLRDVVRELDRGIDSEVLRAVREIVKRLVEVVRRYNELSEKIIRDLVRVNDRVLELLKRIVKRLIDVVRELEKIGDKEKALRRLEEVVKEVKRRIEELLKELEDVHRELVKILEEVNEDLKRVATEVKEIIKTGIKSSEVAKRDHMVLHEYVNAAGITTDRLKEVIDRNLADLRDLAEELRAVIERLLEDARR

SEQ ID NO: 1018 - protein, 240 aa, Artificial Sequence; identical to SEQ ID NO: 1017
  Synthetic

SEQ ID NO: 1019 - protein, 241 aa, Artificial Sequence
  Synthetic
SAEEAVEKLVRIARAIVKINEDLSREVVRILREIVRLNEETTRLLVEIAREVVKVVEDGGLSEDVVRKLRKLVKELEDLLKKSNDDIRKLVEDVARRLKESNDEIRRLVERLEELLKRGPGDEELLRLVEELTEELLRTHEEVVKALEKLTADLLELHRELLERVRRLTKRIEEELKRVGVSEELLRRLRDHMVLHEYVNAAGITELEKLKRELERLLEESRRKLEKLKRDLERVLEETRR

SEQ ID NO: 1020 - protein, 243 aa, Artificial Sequence
  Synthetic
SEAERLADEVRKAVKKSEEDNETLVREVEKAVRELKKNNKTWVDEVRKLMKRLVDLLRDGQVSDRDLLKELEEVLRRVLEALAENHERTEEILKRWLDRYAEDIERLRKVLKEVIEALKRGGSDDKRIVDELEEILRRNEDVLDKIAKRLRRLLEEDRRLLERIVRELKRLLDDLDRITKEGKSEELVRRDHMVLHEYVNAAGITVRLNNEILERLLKIVRELHKDNIKILEDLLRIIEEVLR

SEQ ID NO: 1021 - protein, 243 aa, Artificial Sequence; identical to SEQ ID NO: 1020
  Synthetic

SEQ ID NO: 1022 - protein, 247 aa, Artificial Sequence
  Synthetic
DEERLAEELERVLDRNRKLLEEALRELRRVIEENRKSVKRLLDELKRVLDELLKVLRELSRGDSDEELRKVIEDLIRKLTKVLDKVRSLVEENIERLARVLEKLERLARENLEDLKKVLDDVDKKLKDRRLVERLAELVRELIEVNKEILEMLKEIVRELLEINRTLLERLKDLVATALEIIKLLARGDRDHMVLHEYVNAAGITLRKLLEDYERAVRRLEDKLRRVRERYEAVLKRIKDKLEETKR

SEQ ID NO: 1023 - protein, 247 aa, Artificial Sequence; identical to SEQ ID NO: 1022
  Synthetic

SEQ ID NO: 1024 - protein, 243 aa, Artificial Sequence
  Synthetic
SRVEELKKLIEDILRISREVVERIARVAEDIHRINRRVLDDLRKLIEDILRTVEEILARKVSGTEAAEALRDTIRRVVDEIRKLLEEHEKRSAELLEEIRKLLEDILRRSERAVEEIRELLKKGVSTKDVLRIIEEILREHLELLERVVRRIEEILRELLKTIEEIVKRIKEILEELKEVLKRGSVGDDRDHMVLHEYVNAAGITLEEYRRLLEEIKRKLEEILRRVEELHRRLRRKLEEIDR

SEQ ID NO: 1025 - protein, 243 aa, Artificial Sequence; identical to SEQ ID NO: 1024
  Synthetic

SEQ ID NO: 1026 - protein, 249 aa, Artificial Sequence
  Synthetic
DAEEVVKRLADVLRENDETIRKVVEDLVRIAEENDRLWKKLVEDIAEILRRIVELLRRGGVPEELLDRLAKVVKSIVEKAEKILERLNRVSKAIAEKLKTIVDELNEVSKEIVKRAEDILRKGKDKETVLRALRTLVKEYADLSKEVLERVERIVREYVKLSDEVVKSLAEIVEELIRIIEDLLRKGNLRDHMVLHEYVNAAGITKLLEDVKKASEDIVREVERIVRELAKRSDEILKKLEDIVEKLRE

SEQ ID NO: 1027 - protein, 249 aa, Artificial Sequence; identical to SEQ ID NO: 1026
  Synthetic

SEQ ID NO: 1028 - protein, 240 aa, Artificial Sequence
  Synthetic
SKEETLKRLLDELEKRNRETVERLERLLKELEDRNRASLEELEAVLEELERKIEESGLSKELKDTLARILEELRKLLEEYFRKNEELLRLLRKLLDEYARTNEELLRLLEELLDTARRTGGDSELLKRLEDIAREYEKRVRRLLEKLKDILDKYRKTVEELVRKMEEILKEAKKTISRIGSEEVKDIVRRDHMVLHEYVNAAGITVELNLDVAKKLLELLKEDSKLNLDVARELLELLDR

SEQ ID NO: 1029 - protein, 240 aa, Artificial Sequence; identical to SEQ ID NO: 1028
  Synthetic

SEQ ID NO: 1030 - protein, 243 aa, Artificial Sequence
  Synthetic
DEEETLRRLLERKVELAKEYLDVSKEVIDRTTKLLDEYLKTSKRIVDATVELLERGDLGPDELIKRLAEELERSLRELEEEIKRLKRELEESLKKLKEIIDRLAEEAEKLLAVLKRGEGSEEEALRALASLVRELIEVLRENDERLRDVLRRLIEALRKNNEILERVLRKLVRAAEERGRDESSREALERDHMVLHEYVNAAGITTKDLEAKLEKLLRDLNELTKALEEELKRLLDELKKRTD

SEQ ID NO: 1031 - protein, 243 aa, Artificial Sequence; identical to SEQ ID NO: 1030
  Synthetic

SEQ ID NO: 1032 - protein, 243 aa, Artificial Sequence
  Synthetic
SEAERTKESLKKVLKALVDLNRELLRKLEENMRELTKLNEEVKRALKEVLDKVREGGIVDKDAEREAERLMRELDKSSEDTARETRKLIEESKKSTRRTEEEARKLTETLDRLAKGGLPREDLLRALVRLLEELARLIEEDVRRNAELVKRHIELVERDVAELLRLIKELVDLLADLAEKGSRTEEIRKRDHMVLHEYVNAAGITREEVRKSKDKLRSILEDYKRKVDELKERLRELIEEVET

SEQ ID NO: 1033 - protein, 241 aa, Artificial Sequence
  Synthetic
SADEALEELVRRLLEVLKTVLERTKELSRDDLRVVKEVLRIIEELVKRLLKVIRDGLDDADRVLEEVERVIREAKREVKRWEEVVRKVVEDSRRLIERVLAEVEEVIKEAKRLLDERKSGGSREVIEELLSLLREIVRHHKEVSDEHLKLSAELVKRILDVVEETLRLATEIVRRIKEGGNSEDVRRDIRDHMVLHEYVNAAGITDIERLLAELEKLNEDVLRENKALLEDLERRVRERKK

SEQ ID NO: 1034 - protein, 245 aa, Artificial Sequence
  Synthetic
TEEEVLRKVEKLIKDLLDVLRDLLRASEEVVREALRVLEELIEENKRVIEELSRALSGGSRESVESALAKNEERLKKILEDADRVLDKWRRLLEELSKKAKAVLDEVRKRLEEIKREVPETEKLRTLLTILEEILRALEKIIRDILRINERLLEKLKRILERLRETNREIDERIRKLVEEARGGSEEKLRRDHMVLHEYVNAAGITLRRELEKLLRDYKRELEEIERALEEIEKTLKRRADETRR

SEQ ID NO: 1035 - protein, 245 aa, Artificial Sequence; identical to SEQ ID NO: 1034
  Synthetic

SEQ ID NO: 1036 - protein, 243 aa, Artificial Sequence
  Synthetic
KREDILKKLEDIIRDIIDKLRRILEKVKRLNEDIIREIKRLLDESLKTLEDLLKRIADKSRDRELEDILRRVLEKLRRSLDKLRDTLRKLKEETDTVLERAERTLKELKDRLEKLLRDGEKVSEEDLVEALKALIDELRKVLEDVIRVSKELVERLLRALREHLETNKRLVKELLDALRKTTGDDEEIKRRDHMVLHEYVNAAGITERVARELEKAHRDLERDIRRVAEELKKLLKKLRDDRR

SEQ ID NO: 1037 - protein, 244 aa, Artificial Sequence
  Synthetic
SAEETLRRITEESKRVLEEITKKYEDLERESREVLRKLREDLDRIKRELEDVLTKGGDDKDEVLTVLEKVLDELLKLHRENLRVIKELLRKVLEVDRENLEVLKRLLEKARDLLRRSGRDEKDLKKLEDELRKVKEELEKKHEASKRDIEDLERELDKVTEEVERLLRKLKEELRRAAEGSDEDRERLARRDHMVLHEYVNAAGITLKINEELNRKIIKFARENLERNRRVNKKVIEVLREAAR

SEQ ID NO: 1038 - protein, 250 aa, Artificial Sequence
  Synthetic
STEEILKRVKEILDELAKELRDIIRESLRTIEELLDELRRILEESERTLEELVKTIKDGVKDSEELLRRLKRLLEDLRRAHEELLKRLKEAVDEHRDRLRKILEELERVLKELRKRIEELRRSGDRISEKDVLRKLEEVLRKALEILERLLKKIRESARELLKIIEEVLDANIKVMEEALKTIKELLKDGRDHMVLHEYVNAAGITTRYEELRRRLRKRVKDYEDKLREIEKKVRRDAERIEEELERAKK

SEQ ID NO: 1039 - protein, 247 aa, Artificial Sequence
  Synthetic
SEKEELLKLIKRVIELLKRVLEEHLRLVEDVIRRLKELLDSNEKIVREVIEDLKRLLDEVRGDKEELDRIKEKLEEVLERYKRRLEEIKRDLERMLEDYKRELKRIEEDLRRVLEEVERIATRGEGPAEALIDKLRKILERALRELDKLSKKLDELLKKVLEELEKSNREIDKLLKDVLRRVEEGGASEDRDHMVLHEYVNAAGITKRNLEDVRRVIEDVKRKSARILEEARRLIEEVERELEKIRK

SEQ ID NO: 1040 - protein, 247 aa, Artificial Sequence; identical to SEQ ID NO: 1039
  Synthetic

SEQ ID NO: 1041 - protein, 242 aa, Artificial Sequence
  Synthetic
SEKERLMRLLDKLKDLNRRLVERIKELLDKALELHKKLVKELRELLERLKELVERGGVPEELLTRIDELIKKLEDEARKISKEVKRLIDELKKRLEDIHREVDRLIRELKETLKGVTDKDELLRRVAEVLERIARLSEELIREVKEVLEKIVELSRELLKRVLDVLRRIAELLEDALRKGNVSEETVRRLRDHMVLHEYVNAAGITDAEREYKKLKDELEELTERYRREIRKLKEELKADRK

SEQ ID NO: 1042 - protein, 247 aa, Artificial Sequence
  Synthetic
SEAEDLEELIKELAELLKDVIRKLEKINRRLVKILEDIIRRLKEISKEAEEELRKGTVEDKDILRDLERRLREILEESDRLLEELKRRLEEILRKSKELLRRLEEVLREILKRAEEVKRSNLPKEELIKEIVKLLEELLRVIEKILEDNIRLLEELVEVIKEILEKHLRLLEELVRVIERILREVGKDKDRDHMVLHEYVNAAGITREEHEEVKRRLEEELTRLRETHKKIEKELREALKRVRDRST

SEQ ID NO: 1043 - protein, 247 aa, Artificial Sequence; identical to SEQ ID NO: 1042
  Synthetic

SEQ ID NO: 1044 - protein, 248 aa, Artificial Sequence
  Synthetic
DEEERVKKLLTDLRRLLRKLHEESKKLLDELRKKLRELRRRSEEKLREVERRLREAEKKLPGTRVLKLVADVVKKVLDAIRDLNRKLEEIIDEALKLLEELDDILRRVVEEALRLLKEIKDTKGDREEVKKRVEDILKRLEELVKEYEDRVREIKKRLRRALEELRDEYRKIREDIERVLDELRKGGVPERDHMVLHEYVNAAGITLDENLKMVERLIRELEKVLDDHERKVRRLIEELLEVLDRDAK

SEQ ID NO: 1045 - protein, 248 aa, Artificial Sequence
  Synthetic
DEDRIIEEIARLLEELLRELLELIKKLIETNRRLNEEHERAVRELARLLEELLDRLVKKGISDEKLKRIRERLKRALDDLERLHREINKRLEDLVRELEKLVREILKELKDALEELRRASARAGGEEVLRRLEEIVKKLLDLVRRILERLKEIHKDNVRLLRELNERLTRIVEDLVRLIREILREAGVDERDHMVLHEYVNAAGITIKRLHEDLERKLKESEDELREIEARLEEKIRRLEEKLERKRR

SEQ ID NO: 1046 - protein, 248 aa, Artificial Sequence; identical to SEQ ID NO: 1045
  Synthetic

SEQ ID NO: 1047 - protein, 251 aa, Artificial Sequence
  Synthetic
DEEEKIRTTLDLLRKLLKVLREILEELIRSNKELNERLLRLVEDSDRLLEELLKKLADDGGVDEEALRRIKKRLEDLIRTNREIEERIDRESERLAEELRRILRELEKELRRLIEDLKEVLKRGLPREELLRRLKKVVEDVLRILEEVLRVVDELDKENVRLLREWLERNKEIVEEVIRILEDLIRKGGSRDHMVLHEYVNAAGITREKHAEIAKELERLLRENRRRLEELAREAKKVLDELRKRLEDERR

SEQ ID NO: 1048 - protein, 246 aa, Artificial Sequence
  Synthetic
SREEIVATLEDLARKILEVVKKLAKEIEDAWREIERAVREILKRLEELWREIEDVVRKKVDSRVAEILETVVKRVVDITRRLIEEAERVVRELVDITRKLITILEEVVRRLVEIVREASKIDDRRELEDMLRKIREVVREVIERLKKLDEDVRRVVEEVIRRLEELNKRLEDVIREVKKRLKELGLSEEARDHMVLHEYVNAAGITRVIKEIIDLLRTVIRIHEKIVEDLIKLLEELLRRLEEATR

SEQ ID NO: 1049 - protein, 241 aa, Artificial Sequence
  Synthetic
SEKELLKEILDRIRELLEDDNRLLKRIVDEIRKLLEEWLRVHKEILERIKELLDRIGAPEDVIRELTRALKETEEDVDRVIRTLEKLLKEVLDAHEEVVRKLDRLLKEVERLVEGGDAEEVVRDLLRVVKEILDESKAVIDELARVVDEILKLLEEVDRKLAKVVKEILEDVLRGSGDDEDAVRKIAKIIRDHMVLHEYVNAAGITVIEEAKRLLKEWRDRNKEVADTLKKLLEDLIRKIR

SEQ ID NO: 1050 - protein, 246 aa, Artificial Sequence
  Synthetic
SEREELLERIKEILKRVKDKLDEDLKRLKEILEKLKEKADRDLEELRRRIEEVREKLERTGRTDELVKEVLDTVRRNLENLKRLVEDILRKLEENVKNLTDLVREILKLITELIKRLEDGGLPKEVLDALRRVLEKLEELLREILERLKRSLEAVKRKIEELLKELERSLDELRRALERIRKEIGDSETARDHMVLHEYVNAAGITRVLEELLKVLAEHLETVRELIERLKRVLEEAIEVVERVAR

SEQ ID NO: 1051 - protein, 246 aa, Artificial Sequence; identical to SEQ ID NO: 1050
  Synthetic

SEQ ID NO: 1052 - protein, 245 aa, Artificial Sequence
  Synthetic
SEKDEVTRRIRELLKEAEETNREAIERIKRLLDRVREAVEEVAKRSEELLRRLKKVLDRGLQDDEALLKLLIDALREHNRLSTELIKILIDVLRTILKIIKDVLATNIEIARRILDLVRRLAERGGLDDRLVKEVEKLVRTAERLHRDALRKVKRLVEELEKRLRELVKTDHDLVRRLETLLRRGSGSKERDHMVLHEYVNAAGITIRELLKEIEKIVKEIIELLERLNDELRKIIEAILETTKK

SEQ ID NO: 1053 - protein, 247 aa, Artificial Sequence
  Synthetic
DEERLAEELERVLDRNRKLLEEALRELRRVIEENRKSVKRLLDELKRVLDELLKVLRELSRGDSDEELRKVIEDLIRKLTKVLDKVRSLVEENIERLARVLEKLERLARENLEDLKKVLDDVDKKLKDRRLVERLAELVRELIEVNKEILEMLKEIVRELLEINRTLLERLKDLVATALEIIKLLARGDGRDHMVLHEYVNAAGITRKLLEDYERAVRRLEDKLRRVRERYEAVLKRIKDKLEETKR

SEQ ID NO: 1054 - protein, 243 aa, Artificial Sequence
  Synthetic
SRVEELKKLIEDILRISREVVERIARVAEDIHRINRRVLDDLRKLIEDILRTVEEILARKVSGTEAAEALRDTIRRVVDEIRKLLEEHEKRSAELLEEIRKLLEDILRRSERAVEEIRELLKKGVSTKDVLRIIEEILREHLELLERVVRRIEEILRELLKTIEEIVKRIKEILEELKEVLKRGSVGDDERDHMVLHEYVNAAGITEEYRRLLEEIKRKLEEILRRVEELHRRLRRKLEEIDR

SEQ ID NO: 1055 - protein, 249 aa, Artificial Sequence
  Synthetic
DAEEVVKRLADVLRENDETIRKVVEDLVRIAEENDRLWKKLVEDIAEILRRIVELLRRGGVPEELLDRLAKVVKSIVEKAEKILERLNRVSKAIAEKLKTIVDELNEVSKEIVKRAEDILRKGKDKETVLRALRTLVKEYADLSKEVLERVERIVREYVKLSDEVVKSLAEIVEELIRIIEDLLRKGNLDRDHMVLHEYVNAAGITLLEDVKKASEDIVREVERIVRELAKRSDEILKKLEDIVEKLRE

SEQ ID NO: 1056 - protein, 249 aa, Artificial Sequence; identical to SEQ ID NO: 1055
  Synthetic

SEQ ID NO: 1057 - protein, 243 aa, Artificial Sequence
  Synthetic
DEEETLRRLLERKVELAKEYLDVSKEVIDRTTKLLDEYLKTSKRIVDATVELLERGDLGPDELIKRLAEELERSLRELEEEIKRLKRELEESLKKLKEIIDRLAEEAEKLLAVLKRGEGSEEEALRALASLVRELIEVLRENDERLRDVLRRLIEALRKNNEILERVLRKLVRAAEERGRDESSREALEERDHMVLHEYVNAAGITKDLEAKLEKLLRDLNELTKALEEELKRLLDELKKRTD

SEQ ID NO: 1058 - protein, 243 aa, Artificial Sequence; identical to SEQ ID NO: 1057
  Synthetic

SEQ ID NO: 1059 - protein, 243 aa, Artificial Sequence
  Synthetic
SEAERTKESLKKVLKALVDLNRELLRKLEENMRELTKLNEEVKRALKEVLDKVREGGIVDKDAEREAERLMRELDKSSEDTARETRKLIEESKKSTRRTEEEARKLTETLDRLAKGGLPREDLLRALVRLLEELARLIEEDVRRNAELVKRHIELVERDVAELLRLIKELVDLLADLAEKGSRTEEIRKIRDHMVLHEYVNAAGITEEVRKSKDKLRSILEDYKRKVDELKERLRELIEEVET

SEQ ID NO: 1060 - protein, 243 aa, Artificial Sequence; identical to SEQ ID NO: 1059
  Synthetic

SEQ ID NO: 1061 - protein, 241 aa, Artificial Sequence
  Synthetic
SADEALEELVRRLLEVLKTVLERTKELSRDDLRVVKEVLRIIEELVKRLLKVIRDGLDDADRVLEEVERVIREAKREVKRWEEVVRKVVEDSRRLIERVLAEVEEVIKEAKRLLDERKSGGSREVIEELLSLLREIVRHHKEVSDEHLKLSAELVKRILDVVEETLRLATEIVRRIKEGGNSEDVRRDIERDHMVLHEYVNAAGITIERLLAELEKLNEDVLRENKALLEDLERRVRERKK

SEQ ID NO: 1062 - protein, 245 aa, Artificial Sequence
  Synthetic
TEEEVLRKVEKLIKDLLDVLRDLLRASEEVVREALRVLEELIEENKRVIEELSRALSGGSRESVESALAKNEERLKKILEDADRVLDKWRRLLEELSKKAKAVLDEVRKRLEEIKREVPETEKLRTLLTILEEILRALEKIIRDILRINERLLEKLKRILERLRETNREIDERIRKLVEEARGGSEEKLRRRDHMVLHEYVNAAGITRRELEKLLRDYKRELEEIERALEEIEKTLKRRADETRR

SEQ ID NO: 1063 - protein, 245 aa, Artificial Sequence; identical to SEQ ID NO: 1062
  Synthetic

SEQ ID NO: 1064 - protein, 244 aa, Artificial Sequence
  Synthetic
SAEETLRRITEESKRVLEEITKKYEDLERESREVLRKLREDLDRIKRELEDVLTKGGDDKDEVLTVLEKVLDELLKLHRENLRVIKELLRKVLEVDRENLEVLKRLLEKARDLLRRSGRDEKDLKKLEDELRKVKEELEKKHEASKRDIEDLERELDKVTEEVERLLRKLKEELRRAAEGSDEDRERLARLRDHMVLHEYVNAAGITKINEELNRKIIKFARENLERNRRVNKKVIEVLREAAR

SEQ ID NO: 1065 - protein, 250 aa, Artificial Sequence
  Synthetic
STEEILKRVKEILDELAKELRDIIRESLRTIEELLDELRRILEESERTLEELVKTIKDGVKDSEELLRRLKRLLEDLRRAHEELLKRLKEAVDEHRDRLRKILEELERVLKELRKRIEELRRSGDRISEKDVLRKLEEVLRKALEILERLLKKIRESARELLKIIEEVLDANIKVMEEALKTIKELLKDGPRDHMVLHEYVNAAGITRYEELRRRLRKRVKDYEDKLREIEKKVRRDAERIEEELERAKK

SEQ ID NO: 1066 - protein, 247 aa, Artificial Sequence
  Synthetic
SEKEELLKLIKRVIELLKRVLEEHLRLVEDVIRRLKELLDSNEKIVREVIEDLKRLLDEVRGDKEELDRIKEKLEEVLERYKRRLEEIKRDLERMLEDYKRELKRIEEDLRRVLEEVERIATRGEGPAEALIDKLRKILERALRELDKLSKKLDELLKKVLEELEKSNREIDKLLKDVLRRVEEGGASEDLRDHMVLHEYVNAAGITRNLEDVRRVIEDVKRKSARILEEARRLIEEVERELEKIRK

SEQ ID NO: 1067 - protein, 247 aa, Artificial Sequence; identical to SEQ ID NO: 1066
  Synthetic

SEQ ID NO: 1068 - protein, 242 aa, Artificial Sequence
  Synthetic
SEKERLMRLLDKLKDLNRRLVERIKELLDKALELHKKLVKELRELLERLKELVERGGVPEELLTRIDELIKKLEDEARKISKEVKRLIDELKKRLEDIHREVDRLIRELKETLKGVTDKDELLRRVAEVLERIARLSEELIREVKEVLEKIVELSRELLKRVLDVLRRIAELLEDALRKGNVSEETVRRLRRDHMVLHEYVNAAGITAEREYKKLKDELEELTERYRREIRKLKEELKADRK

SEQ ID NO: 1069 - protein, 242 aa, Artificial Sequence; identical to SEQ ID NO: 1068
  Synthetic

SEQ ID NO: 1070 - protein, 247 aa, Artificial Sequence
  Synthetic
SEAEDLEELIKELAELLKDVIRKLEKINRRLVKILEDIIRRLKEISKEAEEELRKGTVEDKDILRDLERRLREILEESDRLLEELKRRLEEILRKSKELLRRLEEVLREILKRAEEVKRSNLPKEELIKEIVKLLEELLRVIEKILEDNIRLLEELVEVIKEILEKHLRLLEELVRVIERILREVGKDKDERDHMVLHEYVNAAGITEEHEEVKRRLEEELTRLRETHKKIEKELREALKRVRDRST

SEQ ID NO: 1071 - protein, 247 aa, Artificial Sequence; identical to SEQ ID NO: 1070
  Synthetic

SEQ ID NO: 1072 - protein, 248 aa, Artificial Sequence
  Synthetic
DEDRIIEEIARLLEELLRELLELIKKLIETNRRLNEEHERAVRELARLLEELLDRLVKKGISDEKLKRIRERLKRALDDLERLHREINKRLEDLVRELEKLVREILKELKDALEELRRASARAGGEEVLRRLEEIVKKLLDLVRRILERLKEIHKDNVRLLRELNERLTRIVEDLVRLIREILREAGVDEKRDHMVLHEYVNAAGITKRLHEDLERKLKESEDELREIEARLEEKIRRLEEKLERKRR

SEQ ID NO: 1073 - protein, 248 aa, Artificial Sequence; identical to SEQ ID NO: 1072
  Synthetic

SEQ ID NO: 1074 - protein, 251 aa, Artificial Sequence
  Synthetic
DEEEKIRTTLDLLRKLLKVLREILEELIRSNKELNERLLRLVEDSDRLLEELLKKLADDGGVDEEALRRIKKRLEDLIRTNREIEERIDRESERLAEELRRILRELEKELRRLIEDLKEVLKRGLPREELLRRLKKVVEDVLRILEEVLRVVDELDKENVRLLREWLERNKEIVEEVIRILEDLIRKGGSERDHMVLHEYVNAAGITEKHAEIAKELERLLRENRRRLEELAREAKKVLDELRKRLEDERR

SEQ ID NO: 1075 - protein, 246 aa, Artificial Sequence
  Synthetic
KEIEETLKELEDLNREMVETNRRVLEETRRLNKETVDRVKATLDELAKMLKKLVDDVRKGPTSEELKRLLAELEELLARVVRRVEELLKKSTDLLERAVKDSADALRRSHEVLKEVASRVKRAKDEGLPREEVLRLLRELLERHAKVLKDIVRVSEKLLREHLKVLREIVEVLEELLERILKVILDTTGGDRDHMVLHEYVNAAGITLKEVIDRYEDELRKLRKEYKEKIDKYERKLEEIERRERT

SEQ ID NO: 1076 - protein, 245 aa, Artificial Sequence
  Synthetic
DEDELIRKLLEDLKDIVRKILELIERDLRDIERVVRRIVKVIRDDLKKIKEVVDDIARGVPRTEELERVIKRIEELLRTSEEELDRILKEIEELLRESRRRLEEVVSAVEELLRRVEEIVDKGRESKEDVIKLLREVVDDILRLVEEVVRTNLEIIKRILELIERVIRLNLSIIRDILRLLEGTVDSELADRDHMVLHEYVNAAGITLEDVKRAITELRKNSKDILEEVRKLIDELRKRIKEVED

SEQ ID NO: 1077 - protein, 247 aa, Artificial Sequence
  Synthetic
RDRDVLRKVKAEIEELVARIEKVSRDALSEVKRLLDENRKIAEDVLRLIESLLRKIRDTRGDDEVVKETEEVLRDNHRLLEELIRRLIKVLEEWLRRHKKLLDEIRELLKEILRLVKESGVSEDLLRRLKRVIEELDKKLKESEEKLRRVVEKAKEDLKAVLEEHRKVLEDLKRALEEVREKLRERGSEEVRDHMVLHEYVNAAGITRVHDDLSRAVEKVVRDVVRVDKELLDELARILRRLEEVIT

SEQ ID NO: 1078 - protein, 243 aa, Artificial Sequence
  Synthetic
SEAERLADEVRKAVKKSEEDNETLVREVEKAVRELKKNNKTWVDEVRKLMKRLVDLLRDGQVSDRDLLKELEEVLRRVLEALAENHERTEEILKRWLDRYAEDIERLRKVLKEVIEALKRGGSDDKRIVDELEEILRRNEDVLDKIAKRLRRLLEEDRRLLERIVRELKRLLDDLDRITKEGKSEELVRIARDHMVLHEYVNAAGITLNNEILERLLKIVRELHKDNIKILEDLLRIIEEVLR

SEQ ID NO: 1079 - protein, 243 aa, Artificial Sequence; identical to SEQ ID NO: 1078
  Synthetic

SEQ ID NO: 1080 - protein, 245 aa, Artificial Sequence
  Synthetic
SEKDEVTRRIRELLKEAEETNREAIERIKRLLDRVREAVEEVAKRSEELLRRLKKVLDRGLQDDEALLKLLIDALREHNRLSTELIKILIDVLRTILKIIKDVLATNIEIARRILDLVRRLAERGGLDDRLVKEVEKLVRTAERLHRDALRKVKRLVEELEKRLRELVKTDHDLVRRLETLLRRGSGSKEDRDHMVLHEYVNAAGITRELLKEIEKIVKEIIELLERLNDELRKIIEAILETTKK

SEQ ID NO: 1081 - protein, 247 aa, Artificial Sequence
  Synthetic
DEERLAEELERVLDRNRKLLEEALRELRRVIEENRKSVKRLLDELKRVLDELLKVLRELSRGDSDEELRKVIEDLIRKLTKVLDKVRSLVEENIERLARVLEKLERLARENLEDLKKVLDDVDKKLKDRRLVERLAELVRELIEVNKEILEMLKEIVRELLEINRTLLERLKDLVATALEIIKLLARGDGTRDHMVLHEYVNAAGITKLLEDYERAVRRLEDKLRRVRERYEAVLKRIKDKLEETKR

SEQ ID NO: 1082 - protein, 247 aa, Artificial Sequence; identical to SEQ ID NO: 1081
  Synthetic

SEQ ID NO: 1083 - protein, 243 aa, Artificial Sequence
  Synthetic
SRVEELKKLIEDILRISREVVERIARVAEDIHRINRRVLDDLRKLIEDILRTVEEILARKVSGTEAAEALRDTIRRVVDEIRKLLEEHEKRSAELLEEIRKLLEDILRRSERAVEEIRELLKKGVSTKDVLRIIEEILREHLELLERVVRRIEEILRELLKTIEEIVKRIKEILEELKEVLKRGSVGDDEVRDHMVLHEYVNAAGITEYRRLLEEIKRKLEEILRRVEELHRRLRRKLEEIDR

SEQ ID NO: 1084 - protein, 249 aa, Artificial Sequence
  Synthetic
DAEEVVKRLADVLRENDETIRKVVEDLVRIAEENDRLWKKLVEDIAEILRRIVELLRRGGVPEELLDRLAKVVKSIVEKAEKILERLNRVSKAIAEKLKTIVDELNEVSKEIVKRAEDILRKGKDKETVLRALRTLVKEYADLSKEVLERVERIVREYVKLSDEVVKSLAEIVEELIRIIEDLLRKGNLDERDHMVLHEYVNAAGITLEDVKKASEDIVREVERIVRELAKRSDEILKKLEDIVEKLRE

SEQ ID NO: 1085 - protein, 249 aa, Artificial Sequence; identical to SEQ ID NO: 1084
  Synthetic

SEQ ID NO: 1086 - protein, 243 aa, Artificial Sequence
  Synthetic
DEEETLRRLLERKVELAKEYLDVSKEVIDRTTKLLDEYLKTSKRIVDATVELLERGDLGPDELIKRLAEELERSLRELEEEIKRLKRELEESLKKLKEIIDRLAEEAEKLLAVLKRGEGSEEEALRALASLVRELIEVLRENDERLRDVLRRLIEALRKNNEILERVLRKLVRAAEERGRDESSREALEEARDHMVLHEYVNAAGITDLEAKLEKLLRDLNELTKALEEELKRLLDELKKRTD

SEQ ID NO: 1087 - protein, 243 aa, Artificial Sequence; identical to SEQ ID NO: 1086
  Synthetic

SEQ ID NO: 1088 - protein, 245 aa, Artificial Sequence
  Synthetic
TEEEVLRKVEKLIKDLLDVLRDLLRASEEVVREALRVLEELIEENKRVIEELSRALSGGSRESVESALAKNEERLKKILEDADRVLDKWRRLLEELSKKAKAVLDEVRKRLEEIKREVPETEKLRTLLTILEEILRALEKIIRDILRINERLLEKLKRILERLRETNREIDERIRKLVEEARGGSEEKLRRDRDHMVLHEYVNAAGITRELEKLLRDYKRELEEIERALEEIEKTLKRRADETRR

SEQ ID NO: 1089 - protein, 245 aa, Artificial Sequence; identical to SEQ ID NO: 1088
  Synthetic

SEQ ID NO: 1090 - protein, 244 aa, Artificial Sequence
  Synthetic
SAEETLRRITEESKRVLEEITKKYEDLERESREVLRKLREDLDRIKRELEDVLTKGGDDKDEVLTVLEKVLDELLKLHRENLRVIKELLRKVLEVDRENLEVLKRLLEKARDLLRRSGRDEKDLKKLEDELRKVKEELEKKHEASKRDIEDLERELDKVTEEVERLLRKLKEELRRAAEGSDEDRERLARLLRDHMVLHEYVNAAGITINEELNRKIIKFARENLERNRRVNKKVIEVLREAAR

SEQ ID NO: 1091 - protein, 250 aa, Artificial Sequence
  Synthetic
STEEILKRVKEILDELAKELRDIIRESLRTIEELLDELRRILEESERTLEELVKTIKDGVKDSEELLRRLKRLLEDLRRAHEELLKRLKEAVDEHRDRLRKILEELERVLKELRKRIEELRRSGDRISEKDVLRKLEEVLRKALEILERLLKKIRESARELLKIIEEVLDANIKVMEEALKTIKELLKDGPDRDHMVLHEYVNAAGITYEELRRRLRKRVKDYEDKLREIEKKVRRDAERIEEELERAKK

SEQ ID NO: 1092 - protein, 250 aa, Artificial Sequence; identical to SEQ ID NO: 1091
  Synthetic

SEQ ID NO: 1093 - protein, 247 aa, Artificial Sequence
  Synthetic
SEKEELLKLIKRVIELLKRVLEEHLRLVEDVIRRLKELLDSNEKIVREVIEDLKRLLDEVRGDKEELDRIKEKLEEVLERYKRRLEEIKRDLERMLEDYKRELKRIEEDLRRVLEEVERIATRGEGPAEALIDKLRKILERALRELDKLSKKLDELLKKVLEELEKSNREIDKLLKDVLRRVEEGGASEDLLRDHMVLHEYVNAAGITNLEDVRRVIEDVKRKSARILEEARRLIEEVERELEKIRK

SEQ ID NO: 1094 - protein, 247 aa, Artificial Sequence; identical to SEQ ID NO: 1093
  Synthetic

SEQ ID NO: 1095 - protein, 247 aa, Artificial Sequence
  Synthetic
SEAEDLEELIKELAELLKDVIRKLEKINRRLVKILEDIIRRLKEISKEAEEELRKGTVEDKDILRDLERRLREILEESDRLLEELKRRLEEILRKSKELLRRLEEVLREILKRAEEVKRSNLPKEELIKEIVKLLEELLRVIEKILEDNIRLLEELVEVIKEILEKHLRLLEELVRVIERILREVGKDKDEARDHMVLHEYVNAAGITEHEEVKRRLEEELTRLRETHKKIEKELREALKRVRDRST

SEQ ID NO: 1096 - protein, 247 aa, Artificial Sequence; identical to SEQ ID NO: 1095
  Synthetic

SEQ ID NO: 1097 - protein, 248 aa, Artificial Sequence
  Synthetic
DEDRIIEEIARLLEELLRELLELIKKLIETNRRLNEEHERAVRELARLLEELLDRLVKKGISDEKLKRIRERLKRALDDLERLHREINKRLEDLVRELEKLVREILKELKDALEELRRASARAGGEEVLRRLEEIVKKLLDLVRRILERLKEIHKDNVRLLRELNERLTRIVEDLVRLIREILREAGVDEKIRDHMVLHEYVNAAGITRLHEDLERKLKESEDELREIEARLEEKIRRLEEKLERKRR

SEQ ID NO: 1098 - protein, 251 aa, Artificial Sequence
  Synthetic
DEEEKIRTTLDLLRKLLKVLREILEELIRSNKELNERLLRLVEDSDRLLEELLKKLADDGGVDEEALRRIKKRLEDLIRTNREIEERIDRESERLAEELRRILRELEKELRRLIEDLKEVLKRGLPREELLRRLKKVVEDVLRILEEVLRVVDELDKENVRLLREWLERNKEIVEEVIRILEDLIRKGGSESRDHMVLHEYVNAAGITKHAEIAKELERLLRENRRRLEELAREAKKVLDELRKRLEDERR

SEQ ID NO: 1099 - protein, 247 aa, Artificial Sequence
  Synthetic
SKAEKLLKDLREALEKVKRRYEELERRLDEVLKEHEEIVKRLLEELEKVLKRIEEGGLPEEELEKLKKLAEKVKELLRELLRLSKELVDRVRELLKRDLDLVRRLVEIALKVLREAREQPNDEKRVEKIKRDLEKKARRVREENERIKRDLKRTADESRKRLEKLLEDLKRELDRLREDLDRGRKDIDERVERDHMVLHEYVNAAGITVIKSHEKLVRTIERLIEESIRVNEELLEVIERLLDRARK

SEQ ID NO: 1100 - protein, 243 aa, Artificial Sequence
  Synthetic
DLERVVEDIVDKAKRLLDKNLEVLKRIVDEVLRLLERLLRESRKVVKRVKEIIEELVRDEKELRRVKRALEEVLRRHEEIAKELKERLRKVAKEAEEKHKKLVEDLKRVVDEVRKKLSGPLDREKVLEVLDELVTIIAKLLDENIKVLEEVIRVIAELLERLLDSHRRLIDIIAKLLEGLRPGDEDLLTELERDHMVLHEYVNAAGITLKKELERIKREVKRLIEENARTLADIKRAVDEARK

SEQ ID NO: 1101 - protein, 246 aa, Artificial Sequence
  Synthetic
KEIEETLKELEDLNREMVETNRRVLEETRRLNKETVDRVKATLDELAKMLKKLVDDVRKGPTSEELKRLLAELEELLARVVRRVEELLKKSTDLLERAVKDSADALRRSHEVLKEVASRVKRAKDEGLPREEVLRLLRELLERHAKVLKDIVRVSEKLLREHLKVLREIVEVLEELLERILKVILDTTGGDKRDHMVLHEYVNAAGITKEVIDRYEDELRKLRKEYKEKIDKYERKLEEIERRERT

SEQ ID NO: 1102 - protein, 246 aa, Artificial Sequence
  Synthetic
SEREELLERIKEILKRVKDKLDEDLKRLKEILEKLKEKADRDLEELRRRIEEVREKLERTGRTDELVKEVLDTVRRNLENLKRLVEDILRKLEENVKNLTDLVREILKLITELIKRLEDGGLPKEVLDALRRVLEKLEELLREILERLKRSLEAVKRKIEELLKELERSLDELRRALERIRKEIGDSETAVRRDHMVLHEYVNAAGITLEELLKVLAEHLETVRELIERLKRVLEEAIEVVERVAR

SEQ ID NO: 1103 - protein, 252 aa, Artificial Sequence
  Synthetic
SLEEITKRLLELVEENLARHEEILRELLELAKRLAKEDRDILEEVLKLIEELLKLLEDNGSSEEDLKRLLKEVIEELRAVVKRVKDKWDEVVKRIEDLVKKLKELHDDTLRKLRELVRKIVTDISESGGEAEKVKRVVEKILELVERLAKVVKESVEKLLEILRELAEVSKRVAEALLRLLEELVRVIRIKDRDHMVLHEYVNAAGITRLLDELEEVHKRVKKELEDIIEENRRVVKRVRDELREIKRELDE

SEQ ID NO: 1104 - protein, 243 aa, Artificial Sequence
  Synthetic
SEAERLADEVRKAVKKSEEDNETLVREVEKAVRELKKNNKTWVDEVRKLMKRLVDLLRDGQVSDRDLLKELEEVLRRVLEALAENHERTEEILKRWLDRYAEDIERLRKVLKEVIEALKRGGSDDKRIVDELEEILRRNEDVLDKIAKRLRRLLEEDRRLLERIVRELKRLLDDLDRITKEGKSEELVRIAIRDHMVLHEYVNAAGITNNEILERLLKIVRELHKDNIKILEDLLRIIEEVLR

SEQ ID NO: 1105 - protein, 243 aa, Artificial Sequence; identical to SEQ ID NO: 1104
  Synthetic

SEQ ID NO: 1106 - protein, 243 aa, Artificial Sequence
  Synthetic
SRVEELKKLIEDILRISREVVERIARVAEDIHRINRRVLDDLRKLIEDILRTVEEILARKVSGTEAAEALRDTIRRVVDEIRKLLEEHEKRSAELLEEIRKLLEDILRRSERAVEEIRELLKKGVSTKDVLRIIEEILREHLELLERVVRRIEEILRELLKTIEEIVKRIKEILEELKEVLKRGSVGDDEVERDHMVLHEYVNAAGITYRRLLEEIKRKLEEILRRVEELHRRLRRKLEEIDR

SEQ ID NO: 1107 - protein, 249 aa, Artificial Sequence
  Synthetic
DAEEVVKRLADVLRENDETIRKVVEDLVRIAEENDRLWKKLVEDIAEILRRIVELLRRGGVPEELLDRLAKVVKSIVEKAEKILERLNRVSKAIAEKLKTIVDELNEVSKEIVKRAEDILRKGKDKETVLRALRTLVKEYADLSKEVLERVERIVREYVKLSDEVVKSLAEIVEELIRIIEDLLRKGNLDEDRDHMVLHEYVNAAGITEDVKKASEDIVREVERIVRELAKRSDEILKKLEDIVEKLRE

SEQ ID NO: 1108 - protein, 249 aa, Artificial Sequence; identical to SEQ ID NO: 1107
  Synthetic

SEQ ID NO: 1109 - protein, 243 aa, Artificial Sequence
  Synthetic
DEEETLRRLLERKVELAKEYLDVSKEVIDRTTKLLDEYLKTSKRIVDATVELLERGDLGPDELIKRLAEELERSLRELEEEIKRLKRELEESLKKLKEIIDRLAEEAEKLLAVLKRGEGSEEEALRALASLVRELIEVLRENDERLRDVLRRLIEALRKNNEILERVLRKLVRAAEERGRDESSREALEEARRDHMVLHEYVNAAGITLEAKLEKLLRDLNELTKALEEELKRLLDELKKRTD

SEQ ID NO: 1110 - protein, 243 aa, Artificial Sequence; identical to SEQ ID NO: 1109
  Synthetic

SEQ ID NO: 1111 - protein, 245 aa, Artificial Sequence
  Synthetic
TEEEVLRKVEKLIKDLLDVLRDLLRASEEVVREALRVLEELIEENKRVIEELSRALSGGSRESVESALAKNEERLKKILEDADRVLDKWRRLLEELSKKAKAVLDEVRKRLEEIKREVPETEKLRTLLTILEEILRALEKIIRDILRINERLLEKLKRILERLRETNREIDERIRKLVEEARGGSEEKLRRDLRDHMVLHEYVNAAGITELEKLLRDYKRELEEIERALEEIEKTLKRRADETRR

SEQ ID NO: 1112 - protein, 244 aa, Artificial Sequence
  Synthetic
SAEETLRRITEESKRVLEEITKKYEDLERESREVLRKLREDLDRIKRELEDVLTKGGDDKDEVLTVLEKVLDELLKLHRENLRVIKELLRKVLEVDRENLEVLKRLLEKARDLLRRSGRDEKDLKKLEDELRKVKEELEKKHEASKRDIEDLERELDKVTEEVERLLRKLKEELRRAAEGSDEDRERLARLLKRDHMVLHEYVNAAGITNEELNRKIIKFARENLERNRRVNKKVIEVLREAAR

SEQ ID NO: 1113 - protein, 250 aa, Artificial Sequence
  Synthetic
STEEILKRVKEILDELAKELRDIIRESLRTIEELLDELRRILEESERTLEELVKTIKDGVKDSEELLRRLKRLLEDLRRAHEELLKRLKEAVDEHRDRLRKILEELERVLKELRKRIEELRRSGDRISEKDVLRKLEEVLRKALEILERLLKKIRESARELLKIIEEVLDANIKVMEEALKTIKELLKDGPDERDHMVLHEYVNAAGITEELRRRLRKRVKDYEDKLREIEKKVRRDAERIEEELERAKK

SEQ ID NO: 1114 - protein, 247 aa, Artificial Sequence
  Synthetic
SEAEDLEELIKELAELLKDVIRKLEKINRRLVKILEDIIRRLKEISKEAEEELRKGTVEDKDILRDLERRLREILEESDRLLEELKRRLEEILRKSKELLRRLEEVLREILKRAEEVKRSNLPKEELIKEIVKLLEELLRVIEKILEDNIRLLEELVEVIKEILEKHLRLLEELVRVIERILREVGKDKDEAERDHMVLHEYVNAAGITHEEVKRRLEEELTRLRETHKKIEKELREALKRVRDRST

SEQ ID NO: 1115 - protein, 247 aa, Artificial Sequence; identical to SEQ ID NO: 1114
  Synthetic

SEQ ID NO: 1116 - protein, 248 aa, Artificial Sequence
  Synthetic
DEDRIIEEIARLLEELLRELLELIKKLIETNRRLNEEHERAVRELARLLEELLDRLVKKGISDEKLKRIRERLKRALDDLERLHREINKRLEDLVRELEKLVREILKELKDALEELRRASARAGGEEVLRRLEEIVKKLLDLVRRILERLKEIHKDNVRLLRELNERLTRIVEDLVRLIREILREAGVDEKIARDHMVLHEYVNAAGITLHEDLERKLKESEDELREIEARLEEKIRRLEEKLERKRR

SEQ ID NO: 1117 - protein, 251 aa, Artificial Sequence
  Synthetic
DEEEKIRTTLDLLRKLLKVLREILEELIRSNKELNERLLRLVEDSDRLLEELLKKLADDGGVDEEALRRIKKRLEDLIRTNREIEERIDRESERLAEELRRILRELEKELRRLIEDLKEVLKRGLPREELLRRLKKVVEDVLRILEEVLRVVDELDKENVRLLREWLERNKEIVEEVIRILEDLIRKGGSESERDHMVLHEYVNAAGITHAEIAKELERLLRENRRRLEELAREAKKVLDELRKRLEDERR

SEQ ID NO: 1118 - protein, 246 aa, Artificial Sequence
  Synthetic
KEIEETLKELEDLNREMVETNRRVLEETRRLNKETVDRVKATLDELAKMLKKLVDDVRKGPTSEELKRLLAELEELLARVVRRVEELLKKSTDLLERAVKDSADALRRSHEVLKEVASRVKRAKDEGLPREEVLRLLRELLERHAKVLKDIVRVSEKLLREHLKVLREIVEVLEELLERILKVILDTTGGDKARDHMVLHEYVNAAGITEVIDRYEDELRKLRKEYKEKIDKYERKLEEIERRERT

SEQ ID NO: 1119 - protein, 247 aa, Artificial Sequence
  Synthetic
RDRDVLRKVKAEIEELVARIEKVSRDALSEVKRLLDENRKIAEDVLRLIESLLRKIRDTRGDDEVVKETEEVLRDNHRLLEELIRRLIKVLEEWLRRHKKLLDEIRELLKEILRLVKESGVSEDLLRRLKRVIEELDKKLKESEEKLRRVVEKAKEDLKAVLEEHRKVLEDLKRALEEVREKLRERGSEEVVERDHMVLHEYVNAAGITHDDLSRAVEKVVRDVVRVDKELLDELARILRRLEEVIT

SEQ ID NO: 1120 - protein, 246 aa, Artificial Sequence
  Synthetic
SEREELLERIKEILKRVKDKLDEDLKRLKEILEKLKEKADRDLEELRRRIEEVREKLERTGRTDELVKEVLDTVRRNLENLKRLVEDILRKLEENVKNLTDLVREILKLITELIKRLEDGGLPKEVLDALRRVLEKLEELLREILERLKRSLEAVKRKIEELLKELERSLDELRRALERIRKEIGDSETAVRARDHMVLHEYVNAAGITEELLKVLAEHLETVRELIERLKRVLEEAIEVVERVAR

SEQ ID NO: 1121 - protein, 252 aa, Artificial Sequence
  Synthetic
SLEEITKRLLELVEENLARHEEILRELLELAKRLAKEDRDILEEVLKLIEELLKLLEDNGSSEEDLKRLLKEVIEELRAVVKRVKDKWDEVVKRIEDLVKKLKELHDDTLRKLRELVRKIVTDISESGGEAEKVKRVVEKILELVERLAKVVKESVEKLLEILRELAEVSKRVAEALLRLLEELVRVIRIKDERDHMVLHEYVNAAGITLLDELEEVHKRVKKELEDIIEENRRVVKRVRDELREIKRELDE

SEQ ID NO: 1122 - protein, 249 aa, Artificial Sequence
  Synthetic
DAEEVVKRLADVLRENDETIRKVVEDLVRIAEENDRLWKKLVEDIAEILRRIVELLRRGGVPEELLDRLAKVVKSIVEKAEKILERLNRVSKAIAEKLKTIVDELNEVSKEIVKRAEDILRKGKDKETVLRALRTLVKEYADLSKEVLERVERIVREYVKLSDEVVKSLAEIVEELIRIIEDLLRKGNLDEDVRDHMVLHEYVNAAGITDVKKASEDIVREVERIVRELAKRSDEILKKLEDIVEKLRE

SEQ ID NO: 1123 - protein, 249 aa, Artificial Sequence; identical to SEQ ID NO: 1122
  Synthetic

SEQ ID NO: 1124 - protein, 245 aa, Artificial Sequence
  Synthetic
TEEEVLRKVEKLIKDLLDVLRDLLRASEEVVREALRVLEELIEENKRVIEELSRALSGGSRESVESALAKNEERLKKILEDADRVLDKWRRLLEELSKKAKAVLDEVRKRLEEIKREVPETEKLRTLLTILEEILRALEKIIRDILRINERLLEKLKRILERLRETNREIDERIRKLVEEARGGSEEKLRRDLTRDHMVLHEYVNAAGITLEKLLRDYKRELEEIERALEEIEKTLKRRADETRR

SEQ ID NO: 1125 - protein, 245 aa, Artificial Sequence; identical to SEQ ID NO: 1124
  Synthetic

SEQ ID NO: 1126 - protein, 250 aa, Artificial Sequence
  Synthetic
STEEILKRVKEILDELAKELRDIIRESLRTIEELLDELRRILEESERTLEELVKTIKDGVKDSEELLRRLKRLLEDLRRAHEELLKRLKEAVDEHRDRLRKILEELERVLKELRKRIEELRRSGDRISEKDVLRKLEEVLRKALEILERLLKKIRESARELLKIIEEVLDANIKVMEEALKTIKELLKDGPDEVRDHMVLHEYVNAAGITELRRRLRKRVKDYEDKLREIEKKVRRDAERIEEELERAKK

SEQ ID NO: 1127 - protein, 250 aa, Artificial Sequence; identical to SEQ ID NO: 1126
  Synthetic

SEQ ID NO: 1128 - protein, 247 aa, Artificial Sequence
  Synthetic
SEKEELLKLIKRVIELLKRVLEEHLRLVEDVIRRLKELLDSNEKIVREVIEDLKRLLDEVRGDKEELDRIKEKLEEVLERYKRRLEEIKRDLERMLEDYKRELKRIEEDLRRVLEEVERIATRGEGPAEALIDKLRKILERALRELDKLSKKLDELLKKVLEELEKSNREIDKLLKDVLRRVEEGGASEDLLRKRDHMVLHEYVNAAGITEDVRRVIEDVKRKSARILEEARRLIEEVERELEKIRK

SEQ ID NO: 1129 - protein, 247 aa, Artificial Sequence
  Synthetic
SEAEDLEELIKELAELLKDVIRKLEKINRRLVKILEDIIRRLKEISKEAEEELRKGTVEDKDILRDLERRLREILEESDRLLEELKRRLEEILRKSKELLRRLEEVLREILKRAEEVKRSNLPKEELIKEIVKLLEELLRVIEKILEDNIRLLEELVEVIKEILEKHLRLLEELVRVIERILREVGKDKDEAERRDHMVLHEYVNAAGITEEVKRRLEEELTRLRETHKKIEKELREALKRVRDRST

SEQ ID NO: 1130 - protein, 247 aa, Artificial Sequence; identical to SEQ ID NO: 1129
  Synthetic

SEQ ID NO: 1131 - protein, 248 aa, Artificial Sequence
  Synthetic
DEDRIIEEIARLLEELLRELLELIKKLIETNRRLNEEHERAVRELARLLEELLDRLVKKGISDEKLKRIRERLKRALDDLERLHREINKRLEDLVRELEKLVREILKELKDALEELRRASARAGGEEVLRRLEEIVKKLLDLVRRILERLKEIHKDNVRLLRELNERLTRIVEDLVRLIREILREAGVDEKIAERDHMVLHEYVNAAGITHEDLERKLKESEDELREIEARLEEKIRRLEEKLERKRR

SEQ ID NO: 1132 - protein, 251 aa, Artificial Sequence
  Synthetic
DEEEKIRTTLDLLRKLLKVLREILEELIRSNKELNERLLRLVEDSDRLLEELLKKLADDGGVDEEALRRIKKRLEDLIRTNREIEERIDRESERLAEELRRILRELEKELRRLIEDLKEVLKRGLPREELLRRLKKVVEDVLRILEEVLRVVDELDKENVRLLREWLERNKEIVEEVIRILEDLIRKGGSESEERDHMVLHEYVNAAGITAEIAKELERLLRENRRRLEELAREAKKVLDELRKRLEDERR

SEQ ID NO: 1133 - protein, 246 aa, Artificial Sequence
  Synthetic
KEIEETLKELEDLNREMVETNRRVLEETRRLNKETVDRVKATLDELAKMLKKLVDDVRKGPTSEELKRLLAELEELLARVVRRVEELLKKSTDLLERAVKDSADALRRSHEVLKEVASRVKRAKDEGLPREEVLRLLRELLERHAKVLKDIVRVSEKLLREHLKVLREIVEVLEELLERILKVILDTTGGDKAVRDHMVLHEYVNAAGITVIDRYEDELRKLRKEYKEKIDKYERKLEEIERRERT

SEQ ID NO: 1134 - protein, 246 aa, Artificial Sequence
  Synthetic
SREEIVATLEDLARKILEVVKKLAKEIEDAWREIERAVREILKRLEELWREIEDVVRKKVDSRVAEILETVVKRVVDITRRLIEEAERVVRELVDITRKLITILEEVVRRLVEIVREASKIDDRRELEDMLRKIREVVREVIERLKKLDEDVRRVVEEVIRRLEELNKRLEDVIREVKKRLKELGLSEEAVKELRDHMVLHEYVNAAGITEIIDLLRTVIRIHEKIVEDLIKLLEELLRRLEEATR

SEQ ID NO: 1135 - protein, 246 aa, Artificial Sequence
  Synthetic
SEREELLERIKEILKRVKDKLDEDLKRLKEILEKLKEKADRDLEELRRRIEEVREKLERTGRTDELVKEVLDTVRRNLENLKRLVEDILRKLEENVKNLTDLVREILKLITELIKRLEDGGLPKEVLDALRRVLEKLEELLREILERLKRSLEAVKRKIEELLKELERSLDELRRALERIRKEIGDSETAVRAIRDHMVLHEYVNAAGITELLKVLAEHLETVRELIERLKRVLEEAIEVVERVAR

SEQ ID NO: 1136 - protein, 246 aa, Artificial Sequence; identical to SEQ ID NO: 1135
  Synthetic

SEQ ID NO: 1137 - protein, 252 aa, Artificial Sequence
  Synthetic
SLEEITKRLLELVEENLARHEEILRELLELAKRLAKEDRDILEEVLKLIEELLKLLEDNGSSEEDLKRLLKEVIEELRAVVKRVKDKWDEVVKRIEDLVKKLKELHDDTLRKLRELVRKIVTDISESGGEAEKVKRVVEKILELVERLAKVVKESVEKLLEILRELAEVSKRVAEALLRLLEELVRVIRIKDERRDHMVLHEYVNAAGITLDELEEVHKRVKKELEDIIEENRRVVKRVRDELREIKRELDE

SEQ ID NO: 1138 - protein, 247 aa, Artificial Sequence
  Synthetic
DEERLAEELERVLDRNRKLLEEALRELRRVIEENRKSVKRLLDELKRVLDELLKVLRELSRGDSDEELRKVIEDLIRKLTKVLDKVRSLVEENIERLARVLEKLERLARENLEDLKKVLDDVDKKLKDRRLVERLAELVRELIEVNKEILEMLKEIVRELLEINRTLLERLKDLVATALEIIKLLARGDGTEEDRDHMVLHEYVNAAGITEDYERAVRRLEDKLRRVRERYEAVLKRIKDKLEETKR

SEQ ID NO: 1139 - protein, 249 aa, Artificial Sequence
  Synthetic
DAEEVVKRLADVLRENDETIRKVVEDLVRIAEENDRLWKKLVEDIAEILRRIVELLRRGGVPEELLDRLAKVVKSIVEKAEKILERLNRVSKAIAEKLKTIVDELNEVSKEIVKRAEDILRKGKDKETVLRALRTLVKEYADLSKEVLERVERIVREYVKLSDEVVKSLAEIVEELIRIIEDLLRKGNLDEDVKRDHMVLHEYVNAAGITVKKASEDIVREVERIVRELAKRSDEILKKLEDIVEKLRE

SEQ ID NO: 1140 - protein, 249 aa, Artificial Sequence; identical to SEQ ID NO: 1139
  Synthetic

SEQ ID NO: 1141 - protein, 250 aa, Artificial Sequence
  Synthetic
STEEILKRVKEILDELAKELRDIIRESLRTIEELLDELRRILEESERTLEELVKTIKDGVKDSEELLRRLKRLLEDLRRAHEELLKRLKEAVDEHRDRLRKILEELERVLKELRKRIEELRRSGDRISEKDVLRKLEEVLRKALEILERLLKKIRESARELLKIIEEVLDANIKVMEEALKTIKELLKDGPDEVKRDHMVLHEYVNAAGITLRRRLRKRVKDYEDKLREIEKKVRRDAERIEEELERAKK

SEQ ID NO: 1142 - protein, 247 aa, Artificial Sequence
  Synthetic
SEKEELLKLIKRVIELLKRVLEEHLRLVEDVIRRLKELLDSNEKIVREVIEDLKRLLDEVRGDKEELDRIKEKLEEVLERYKRRLEEIKRDLERMLEDYKRELKRIEEDLRRVLEEVERIATRGEGPAEALIDKLRKILERALRELDKLSKKLDELLKKVLEELEKSNREIDKLLKDVLRRVEEGGASEDLLRKARDHMVLHEYVNAAGITDVRRVIEDVKRKSARILEEARRLIEEVERELEKIRK

SEQ ID NO: 1143 - protein, 247 aa, Artificial Sequence; identical to SEQ ID NO: 1142
  Synthetic

SEQ ID NO: 1144 - protein, 247 aa, Artificial Sequence
  Synthetic
SEAEDLEELIKELAELLKDVIRKLEKINRRLVKILEDIIRRLKEISKEAEEELRKGTVEDKDILRDLERRLREILEESDRLLEELKRRLEEILRKSKELLRRLEEVLREILKRAEEVKRSNLPKEELIKEIVKLLEELLRVIEKILEDNIRLLEELVEVIKEILEKHLRLLEELVRVIERILREVGKDKDEAERRRDHMVLHEYVNAAGITEVKRRLEEELTRLRETHKKIEKELREALKRVRDRST

SEQ ID NO: 1145 - protein, 247 aa, Artificial Sequence; identical to SEQ ID NO: 1144
  Synthetic

SEQ ID NO: 1146 - protein, 246 aa, Artificial Sequence
  Synthetic
KEIEETLKELEDLNREMVETNRRVLEETRRLNKETVDRVKATLDELAKMLKKLVDDVRKGPTSEELKRLLAELEELLARVVRRVEELLKKSTDLLERAVKDSADALRRSHEVLKEVASRVKRAKDEGLPREEVLRLLRELLERHAKVLKDIVRVSEKLLREHLKVLREIVEVLEELLERILKVILDTTGGDKAVERDHMVLHEYVNAAGITIDRYEDELRKLRKEYKEKIDKYERKLEEIERRERT

SEQ ID NO: 1147 - protein, 252 aa, Artificial Sequence
  Synthetic
SLEEITKRLLELVEENLARHEEILRELLELAKRLAKEDRDILEEVLKLIEELLKLLEDNGSSEEDLKRLLKEVIEELRAVVKRVKDKWDEVVKRIEDLVKKLKELHDDTLRKLRELVRKIVTDISESGGEAEKVKRVVEKILELVERLAKVVKESVEKLLEILRELAEVSKRVAEALLRLLEELVRVIRIKDERTRDHMVLHEYVNAAGITDELEEVHKRVKKELEDIIEENRRVVKRVRDELREIKRELDE

SEQ ID NO: 1148 - protein, 249 aa, Artificial Sequence
  Synthetic
DAEEVVKRLADVLRENDETIRKVVEDLVRIAEENDRLWKKLVEDIAEILRRIVELLRRGGVPEELLDRLAKVVKSIVEKAEKILERLNRVSKAIAEKLKTIVDELNEVSKEIVKRAEDILRKGKDKETVLRALRTLVKEYADLSKEVLERVERIVREYVKLSDEVVKSLAEIVEELIRIIEDLLRKGNLDEDVKRRDHMVLHEYVNAAGITKKASEDIVREVERIVRELAKRSDEILKKLEDIVEKLRE

SEQ ID NO: 1149 - protein, 249 aa, Artificial Sequence; identical to SEQ ID NO: 1148
  Synthetic

SEQ ID NO: 1150 - protein, 250 aa, Artificial Sequence
  Synthetic
STEEILKRVKEILDELAKELRDIIRESLRTIEELLDELRRILEESERTLEELVKTIKDGVKDSEELLRRLKRLLEDLRRAHEELLKRLKEAVDEHRDRLRKILEELERVLKELRKRIEELRRSGDRISEKDVLRKLEEVLRKALEILERLLKKIRESARELLKIIEEVLDANIKVMEEALKTIKELLKDGPDEVKRRDHMVLHEYVNAAGITRRRLRKRVKDYEDKLREIEKKVRRDAERIEEELERAKK

SEQ ID NO: 1151 - protein, 250 aa, Artificial Sequence; identical to SEQ ID NO: 1150
  Synthetic

SEQ ID NO: 1152 - protein, 247 aa, Artificial Sequence
  Synthetic
SEKEELLKLIKRVIELLKRVLEEHLRLVEDVIRRLKELLDSNEKIVREVIEDLKRLLDEVRGDKEELDRIKEKLEEVLERYKRRLEEIKRDLERMLEDYKRELKRIEEDLRRVLEEVERIATRGEGPAEALIDKLRKILERALRELDKLSKKLDELLKKVLEELEKSNREIDKLLKDVLRRVEEGGASEDLLRKAKRDHMVLHEYVNAAGITVRRVIEDVKRKSARILEEARRLIEEVERELEKIRK

SEQ ID NO: 1153 - protein, 247 aa, Artificial Sequence
  Synthetic
SEAEDLEELIKELAELLKDVIRKLEKINRRLVKILEDIIRRLKEISKEAEEELRKGTVEDKDILRDLERRLREILEESDRLLEELKRRLEEILRKSKELLRRLEEVLREILKRAEEVKRSNLPKEELIKEIVKLLEELLRVIEKILEDNIRLLEELVEVIKEILEKHLRLLEELVRVIERILREVGKDKDEAERRRRDHMVLHEYVNAAGITVKRRLEEELTRLRETHKKIEKELREALKRVRDRST

SEQ ID NO: 1154 - protein, 247 aa, Artificial Sequence; identical to SEQ ID NO: 1153
  Synthetic

SEQ ID NO: 1155 - protein, 248 aa, Artificial Sequence
  Synthetic
DEDRIIEEIARLLEELLRELLELIKKLIETNRRLNEEHERAVRELARLLEELLDRLVKKGISDEKLKRIRERLKRALDDLERLHREINKRLEDLVRELEKLVREILKELKDALEELRRASARAGGEEVLRRLEEIVKKLLDLVRRILERLKEIHKDNVRLLRELNERLTRIVEDLVRLIREILREAGVDEKIAEEIRDHMVLHEYVNAAGITDLERKLKESEDELREIEARLEEKIRRLEEKLERKRR

SEQ ID NO: 1156 - protein, 251 aa, Artificial Sequence
  Synthetic
DEEEKIRTTLDLLRKLLKVLREILEELIRSNKELNERLLRLVEDSDRLLEELLKKLADDGGVDEEALRRIKKRLEDLIRTNREIEERIDRESERLAEELRRILRELEKELRRLIEDLKEVLKRGLPREELLRRLKKVVEDVLRILEEVLRVVDELDKENVRLLREWLERNKEIVEEVIRILEDLIRKGGSESEEKVRDHMVLHEYVNAAGITIAKELERLLRENRRRLEELAREAKKVLDELRKRLEDERR

SEQ ID NO: 1157 - protein, 247 aa, Artificial Sequence
  Synthetic
RDRDVLRKVKAEIEELVARIEKVSRDALSEVKRLLDENRKIAEDVLRLIESLLRKIRDTRGDDEVVKETEEVLRDNHRLLEELIRRLIKVLEEWLRRHKKLLDEIRELLKEILRLVKESGVSEDLLRRLKRVIEELDKKLKESEEKLRRVVEKAKEDLKAVLEEHRKVLEDLKRALEEVREKLRERGSEEVVEELLRDHMVLHEYVNAAGITLSRAVEKVVRDVVRVDKELLDELARILRRLEEVIT

SEQ ID NO: 1158 - protein, 249 aa, Artificial Sequence
  Synthetic
DAEEVVKRLADVLRENDETIRKVVEDLVRIAEENDRLWKKLVEDIAEILRRIVELLRRGGVPEELLDRLAKVVKSIVEKAEKILERLNRVSKAIAEKLKTIVDELNEVSKEIVKRAEDILRKGKDKETVLRALRTLVKEYADLSKEVLERVERIVREYVKLSDEVVKSLAEIVEELIRIIEDLLRKGNLDEDVKRARDHMVLHEYVNAAGITKASEDIVREVERIVRELAKRSDEILKKLEDIVEKLRE

SEQ ID NO: 1159 - protein, 250 aa, Artificial Sequence
  Synthetic
STEEILKRVKEILDELAKELRDIIRESLRTIEELLDELRRILEESERTLEELVKTIKDGVKDSEELLRRLKRLLEDLRRAHEELLKRLKEAVDEHRDRLRKILEELERVLKELRKRIEELRRSGDRISEKDVLRKLEEVLRKALEILERLLKKIRESARELLKIIEEVLDANIKVMEEALKTIKELLKDGPDEVKRRRDHMVLHEYVNAAGITRRLRKRVKDYEDKLREIEKKVRRDAERIEEELERAKK

SEQ ID NO: 1160 - protein, 248 aa, Artificial Sequence
  Synthetic
DEDRIIEEIARLLEELLRELLELIKKLIETNRRLNEEHERAVRELARLLEELLDRLVKKGISDEKLKRIRERLKRALDDLERLHREINKRLEDLVRELEKLVREILKELKDALEELRRASARAGGEEVLRRLEEIVKKLLDLVRRILERLKEIHKDNVRLLRELNERLTRIVEDLVRLIREILREAGVDEKIAEEIERDHMVLHEYVNAAGITLERKLKESEDELREIEARLEEKIRRLEEKLERKRR

SEQ ID NO: 1161 - protein, 248 aa, Artificial Sequence; identical to SEQ ID NO: 1160
  Synthetic

SEQ ID NO: 1162 - protein, 252 aa, Artificial Sequence
  Synthetic
SLEEITKRLLELVEENLARHEEILRELLELAKRLAKEDRDILEEVLKLIEELLKLLEDNGSSEEDLKRLLKEVIEELRAVVKRVKDKWDEVVKRIEDLVKKLKELHDDTLRKLRELVRKIVTDISESGGEAEKVKRVVEKILELVERLAKVVKESVEKLLEILRELAEVSKRVAEALLRLLEELVRVIRIKDERTLRRDHMVLHEYVNAAGITLEEVHKRVKKELEDIIEENRRVVKRVRDELREIKRELDE

SEQ ID NO: 1163 - protein, 249 aa, Artificial Sequence
  Synthetic
DAEEVVKRLADVLRENDETIRKVVEDLVRIAEENDRLWKKLVEDIAEILRRIVELLRRGGVPEELLDRLAKVVKSIVEKAEKILERLNRVSKAIAEKLKTIVDELNEVSKEIVKRAEDILRKGKDKETVLRALRTLVKEYADLSKEVLERVERIVREYVKLSDEVVKSLAEIVEELIRIIEDLLRKGNLDEDVKRALRDHMVLHEYVNAAGITASEDIVREVERIVRELAKRSDEILKKLEDIVEKLRE

SEQ ID NO: 1164 - protein, 249 aa, Artificial Sequence; identical to SEQ ID NO: 1163
  Synthetic

SEQ ID NO: 1165 - protein, 250 aa, Artificial Sequence
  Synthetic
STEEILKRVKEILDELAKELRDIIRESLRTIEELLDELRRILEESERTLEELVKTIKDGVKDSEELLRRLKRLLEDLRRAHEELLKRLKEAVDEHRDRLRKILEELERVLKELRKRIEELRRSGDRISEKDVLRKLEEVLRKALEILERLLKKIRESARELLKIIEEVLDANIKVMEEALKTIKELLKDGPDEVKRRLRDHMVLHEYVNAAGITRLRKRVKDYEDKLREIEKKVRRDAERIEEELERAKK

SEQ ID NO: 1166 - protein, 250 aa, Artificial Sequence; identical to SEQ ID NO: 1165
  Synthetic

SEQ ID NO: 1167 - protein, 251 aa, Artificial Sequence
  Synthetic
DEEEKIRTTLDLLRKLLKVLREILEELIRSNKELNERLLRLVEDSDRLLEELLKKLADDGGVDEEALRRIKKRLEDLIRTNREIEERIDRESERLAEELRRILRELEKELRRLIEDLKEVLKRGLPREELLRRLKKVVEDVLRILEEVLRVVDELDKENVRLLREWLERNKEIVEEVIRILEDLIRKGGSESEEKVRDRDHMVLHEYVNAAGITKELERLLRENRRRLEELAREAKKVLDELRKRLEDERR

SEQ ID NO: 1168 - protein, 249 aa, Artificial Sequence
  Synthetic
DAEEVVKRLADVLRENDETIRKVVEDLVRIAEENDRLWKKLVEDIAEILRRIVELLRRGGVPEELLDRLAKVVKSIVEKAEKILERLNRVSKAIAEKLKTIVDELNEVSKEIVKRAEDILRKGKDKETVLRALRTLVKEYADLSKEVLERVERIVREYVKLSDEVVKSLAEIVEELIRIIEDLLRKGNLDEDVKRALERDHMVLHEYVNAAGITSEDIVREVERIVRELAKRSDEILKKLEDIVEKLRE

SEQ ID NO: 1169 - protein, 249 aa, Artificial Sequence; identical to SEQ ID NO: 1168
  Synthetic

SEQ ID NO: 1170 - protein, 250 aa, Artificial Sequence
  Synthetic
STEEILKRVKEILDELAKELRDIIRESLRTIEELLDELRRILEESERTLEELVKTIKDGVKDSEELLRRLKRLLEDLRRAHEELLKRLKEAVDEHRDRLRKILEELERVLKELRKRIEELRRSGDRISEKDVLRKLEEVLRKALEILERLLKKIRESARELLKIIEEVLDANIKVMEEALKTIKELLKDGPDEVKRRLERDHMVLHEYVNAAGITLRKRVKDYEDKLREIEKKVRRDAERIEEELERAKK

SEQ ID NO: 1171 - protein, 250 aa, Artificial Sequence; identical to SEQ ID NO: 1170
  Synthetic

SEQ ID NO: 1172 - protein, 251 aa, Artificial Sequence
  Synthetic
DEEEKIRTTLDLLRKLLKVLREILEELIRSNKELNERLLRLVEDSDRLLEELLKKLADDGGVDEEALRRIKKRLEDLIRTNREIEERIDRESERLAEELRRILRELEKELRRLIEDLKEVLKRGLPREELLRRLKKVVEDVLRILEEVLRVVDELDKENVRLLREWLERNKEIVEEVIRILEDLIRKGGSESEEKVRDTRDHMVLHEYVNAAGITELERLLRENRRRLEELAREAKKVLDELRKRLEDERR

SEQ ID NO: 1173 - protein, 252 aa, Artificial Sequence
  Synthetic
SLEEITKRLLELVEENLARHEEILRELLELAKRLAKEDRDILEEVLKLIEELLKLLEDNGSSEEDLKRLLKEVIEELRAVVKRVKDKWDEVVKRIEDLVKKLKELHDDTLRKLRELVRKIVTDISESGGEAEKVKRVVEKILELVERLAKVVKESVEKLLEILRELAEVSKRVAEALLRLLEELVRVIRIKDERTLREVRDHMVLHEYVNAAGITEVHKRVKKELEDIIEENRRVVKRVRDELREIKRELDE

SEQ ID NO: 1174 - protein, 251 aa, Artificial Sequence
  Synthetic
DEEEKIRTTLDLLRKLLKVLREILEELIRSNKELNERLLRLVEDSDRLLEELLKKLADDGGVDEEALRRIKKRLEDLIRTNREIEERIDRESERLAEELRRILRELEKELRRLIEDLKEVLKRGLPREELLRRLKKVVEDVLRILEEVLRVVDELDKENVRLLREWLERNKEIVEEVIRILEDLIRKGGSESEEKVRDTERDHMVLHEYVNAAGITLERLLRENRRRLEELAREAKKVLDELRKRLEDERR

SEQ ID NO: 1175 - protein, 186 aa, Artificial Sequence
  Synthetic
SAEDSIRELLERDERLLEEARKEAKRLNEENERRDHMVLHEYVNAAGITKRLLDDIRKKIKGEKLREIEELVRRVKRTIEKLLEEVKKSVEDSSKRIEELLEAVERSVERTKEEIRRLLDEVRKDRKEELVKRVEERIKRLHDENRRLVKEVIEEVEKLIRDNEKLAEDIEREIRRLLKELDEAAK

SEQ ID NO: 1176 - protein, 181 aa, Artificial Sequence
  Synthetic
SRVERLSAEIKKLIDENRRVAEELLRELEKLLKRDHMVLHEYVNAAGITSRKLEELARAGAPEEDIRRLVEESKELIKRLLRDIERTTREINEVIKRVVETIRRTTDEINRRIEELVRKIDRGEAREDMDRLVRENERLLKKVEDDLRKLSEENKRLVDRARERLARLLEENERLVDERRK

SEQ ID NO: 1177 - protein, 182 aa, Artificial Sequence
  Synthetic
RVEDALRKLLDDVRRLVEEAERRLRTSNDKSRRRDHMVLHEYVNAAGITEKLVRDVRRRIRDEDVKRVLEELLKRDHDVVRRVLERIDEMLERNSRLVKRVLEDIRRLLKRVREVVERIKRVRSKVVEEVLKELEELIKTAKKIIEDVLRASEDTIRRLEEIIRKVEEDSKRIIEEIERAAR

SEQ ID NO: 1178 - protein, 183 aa, Artificial Sequence
  Synthetic
KVEKRLTDLLKTVADEVKRVEDELRETVRESKERDHMVLHEYVNAAGITEKTVKDAERRVSEDLVRRIRKVLDENREVNDRVVKEDERILEENERVNRKVVEKIRDILRKIEEVVRRAAEEIRDEEVVKKVEKEIRELLERLKEEADRVRERSKKILTDLKKSSEDVKRESERMLKKLEDEIR

SEQ ID NO: 1179 - protein, 184 aa, Artificial Sequence
  Synthetic
SLEEVIKTVRKLLEEVERRLREVVERAERMLEERDHMVLHEYVNAAGITKDVEKALRDKNVSEEIEEKLRKIKEELERDNEKVNRDNERSVETLRRLLDRVRKEVKDIAKELEERLKEVERKSRDDRIVEKLLRDAERIVKRLRELIEKLREEVEKIVDENRKTVEELRRRNEEIVRRLRREIE

SEQ ID NO: 1180 - protein, 177 aa, Artificial Sequence
  Synthetic
KEEEDLEREVKRLEDKVREDAKKLEEVVKTVEKRDHMVLHEYVNAAGITADRVRRLTERKLDEETLRKVKEDLKRTLERLKRENEKSLEELRDILRRLKKENDDTLKELRDELKRLTDSGASEDVIRKMEEIIKRLEEVSREVEKRLRRIIRELERVSKEVLDRLREIIEKLDRDAT

SEQ ID NO: 1181 - protein, 175 aa, Artificial Sequence
  Synthetic
SELEKVVDDVRRRLDRLLETSEKLLEDATKRLKRDHMVLHEYVNAAGITLERLKTVLERRETDKRELLKENKEILERTRELSERNLKEVEDILREVEEEVRKNLRRIEKVLEEVRRKLRSELLKRVEERIKRVLDESKKILKEIADEVRRVLERDKELLKRLEDKNREVSERIRK

SEQ ID NO: 1182 - protein, 180 aa, Artificial Sequence
  Synthetic
SKEEVLREIERLHKETIRRIEEVLREATELHKRRDHMVLHEYVNAAGITREVIEDVRRADTPNVEELLRELKDALDKVRDHNRKTLKKNEDVVREIEKEVRELLKEDEDVLRRIEKVMRDGRVDARELLEESRREVERSEKEVERLLRKSRKVVEEVRKLSEENDREVKKILEEVKRRLD

SEQ ID NO: 1183 - protein, 187 aa, Artificial Sequence
  Synthetic
SEKERLKEELEKLSKEIEDILRDDKRSDDELRRRDHMVLHEYVNAAGITNEELKRMLEEARKRVSEDELRAIKKEIEDLNRRNEESLRAIEEKIKRLNDENRKSLEEIRRRLKRLVEEVDELRKRDNREELLRRLLEKLKRMAEKLKRDIEDNNRKLRKVATELAKEIEDNSEKLREDAKRLSEKIK

SEQ ID NO: 1184 - protein, 177 aa, Artificial Sequence
  Synthetic
SAIEKVKEVVERVLETVRDSVRRSHEESKRLIDRDHMVLHEYVNAAGITIERVRRKGIPERMVEKLERDLEELLKEIKDTIDRIEEELRTSNRRLKETNDEIAKRLEELLRELSRDRDKDAVEDVLRRIEELIRDLNKKNDDNVRRVKEVIDRAEKLVRDLLREIRKLIEKLIRDTE

SEQ ID NO: 1185 - protein, 177 aa, Artificial Sequence
  Synthetic
SVLEEVRRRVEELLKTVKESVDRSHERSERLIERDHMVLHEYVNAAGITVERVREKGIPEDRVKRIEDKLREELERLERENRKIEEDLKRSNDELRRENERIAERLEELLRELSRDTNDKVARDVLEEIERLIREANERNKRNLEDVERVIRELNKENERVLREVEKKIEKLIRETE

SEQ ID NO: 1186 - protein, 183 aa, Artificial Sequence
  Synthetic
KDAEDLERRVRELVEENNRVSKRLAEEVTRLVKRDHMVLHEYVNAAGITAKELLDMKRRGEVREEEVKRVLREIEELLREITEHSKEVLKTIEKLLRDSLEHSRRVLEEIERLLETILRKSKDSERLKKLVDELRETLERSLRENEKVADELRKRAEKSLEDVKRVVDELRKIVDDVLKRVED

SEQ ID NO: 1187 - protein, 183 aa, Artificial Sequence
  Synthetic
SEIEKLVEDVRKLVEDNLRHSEEVHRRNRRLIERDHMVLHEYVNAAGITVEELRELAERGEIREEEARKVLEEIKRLLDEIRRHSEEVLKEIERTLKENLKHSEEVLRRIEERLEDIKRKDKDSERVRTLVDRLREELKRSLDESEKLNRESRKRVTRSLEKVDDLVRELEKLARKVLEEVKT

SEQ ID NO: 1188 - protein, 181 aa, Artificial Sequence
  Synthetic
EEIERALREMRELSRTHKELVEKILRDIAELAKRDHMVLHEYVNAAGITIDEIADEIRKEDKKEELKRKIDELRRRAEELLKESKEHLKRLEDTVRELIERLKETLKKVEEDLKRILEKLEKSRELDEIAKDVKRLIDENRELLKRVEDEVRRLIRKLEELNRRTEEEVKKLIKKLEDDLK

SEQ ID NO: 1189 - protein, 174 aa, Artificial Sequence
  Synthetic
SEIEELEKRIDELLKELRDLSRRIAEEVKRLLERDHMVLHEYVNAAGITLERLKRKGVPEEELRRVEEEVERVVRESRKLNKETEDELRRLLEEIKESNDRVEKRARELKKLLRDGKDVEEVLRRLEKLVREDKERLKKVLKDARDLIKKDKDLNEKLSRELEKLVRELEERAR

SEQ ID NO: 1190 - protein, 174 aa, Artificial Sequence
  Synthetic
REIEEAAKDLDRLLEENKKLVKEVEEELRRLLKRDHMVLHEYVNAAGITLEELRRRGVPEEELKEVEERARRVIEESRRSSKELEKRLRELLEELRRSTKELEDRLREIKKLLRNGKDVEEVLRRVRKLSRENKEKIRKILEDVKKLSEDNKRRNEELSRRVKTLVDEIKKRAT

SEQ ID NO: 1191 - protein, 178 aa, Artificial Sequence
  Synthetic
SEIERIERENDRLNEENKKITEDIERELKRLLERDHMVLHEYVNAAGITLRELRKRNGGREEVLKEVEDRLRRIVEEIRRSDKRLEDIAREVKKRIRESDEELRRVSEEITRRLRKVRDEKTLRELLKRSEELSKENKDRLKKLLDDLREVSKKNKEDLKRLLREVREVARKVKERAN

SEQ ID NO: 1192 - protein, 182 aa, Artificial Sequence
  Synthetic
DEIETVLDEVRRLHEDAKRRLEEMIDEVRKLNERDHMVLHEYVNAAGITLRTVKEEVERAGLDKGKLEELEERLERVREDVERILREIKRRNEKTLEDSERILEENKERNRTVLKKLKELRDRGSDAREALKESRKVVEESRESVRRVLEKNRRVVEESKRLAEELLRRVKKVVDEIRKRVE

SEQ ID NO: 1193 - protein, 174 aa, Artificial Sequence
  Synthetic
EELERILDKVRKVIEEVRKRLRDDLRTVEKVLKRDHMVLHEYVNAAGITLERVEEAARRGRDRREIKEELKKVLDDLRELLRALEEKNRRVNKENEDSLRKIEEDLRDVLRKLEEEIKGREVLRKVRELLRTIREEVERVLRKSNELSTRIKKRIDDVLETLERLLKELDDKLR

SEQ ID NO: 1194 - protein, 178 aa, Artificial Sequence
  Synthetic
SSKDEIRRRVEEVVERSDEIVKRSREHVKTVVDRDHMVLHEYVNAAGITVKKLDKIRKDGGSEETLKRVLDELREILKELKEEVKKVKRKLEKVVKENRDTIREVEERNRKILDELRKRGVEERALREVEEISRKSEEKLRRVLKESEDIAKEAEDRLKTVLERVERIADEVLKRLTK

SEQ ID NO: 1195 - protein, 182 aa, Artificial Sequence
  Synthetic
SDADRVAEELKKLVEDSRRENERVIEESKRLVKRDHMVLHEYVNAAGITVDKLRDILEKEKDKKTLDDIVREILERLKRLLEKVEDENRKSHEENKRLLEDVKRKNKRISDELKRLLEEIERRNVDVDKVRETVKRLLEENKRVMEKTEEVAKKSSEDIKRVADETRRRAEELLKEVDELRK

SEQ ID NO: 1196 - protein, 182 aa, Artificial Sequence
  Synthetic
DEVDELLKRLRKLVDEVRKENDKMVKESKRLVERDHMVLHEYVNAAGITLEELEKILKDTEDKDTLRKIVEEIKRRLRRLLEELKRIIEKALRDNKKLLDEVRKRNKEISDELRRLLEEIRRRNVRVEDIEREAERLLRENEELLRRSEEVIRRSTEKIKKVLRDAEERAREILKRVEDAAK

SEQ ID NO: 1197 - protein, 175 aa, Artificial Sequence
  Synthetic
SEVDEVLREAKRIVDEVHKDNERATEESRRLVKRDHMVLHEYVNAAGITVKEVKDANIDEKLVTEILKEIEEALKEAARRNKEVKDRLRELSRRVSERNREILEELKERLDRVRERRKDVKELEREVEKLLKRIEESLRRHRKENKRLLEELDRSLRELAKIVKEVLDEIRERTR

SEQ ID NO: 1198 - protein, 175 aa, Artificial Sequence
  Synthetic
SEMDDVLKKLAETVKRIIERLKKLTDDSRRLVERDHMVLHEYVNAAGITVRKAEERNIDEKDVRKLLEDLKKKSEEVAERNKRILDTLREISKRAEDEVRKVLKELEKTLKELEDRRPDVRELSEEVKKLLDEVRKALKRHKDENDKLLKEIEDSLRRHKEENDRLLEKLKESTR

SEQ ID NO: 1199 - protein, 186 aa, Artificial Sequence
  Synthetic
SEVDEVRKTLEDLLRRLDEENKDIIRRNKELLDRDHMVLHEYVNAAGITLDELRKILEKLKDRETLTRIIEEIEKRARELIKRLRDEIRKIEEESKKSIEDSRKRNDEIRKRLEELIKDLRDKIKDSEELARRITELEKRVREVIERLKEKNKRLEDDSRRVITELRKKLKDLEDRVREEIEELRK

SEQ ID NO: 1200 - protein, 186 aa, Artificial Sequence
  Synthetic
SRVDEVIERLERLLRELDKINRDMIEDDKRLNTRDHMVLHEYVNAAGITLEELEEIRKKLSDEKTLEEIIERVERRLEELIERSKRRNREILERSKELIERSKKTNEEILRRAEELIKRLREEVKDIKEALDKIRRLEERARRVIEELDEKNRRALERSKENVKRLDERNERLRKELEEKVRRLRK

SEQ ID NO: 1201 - protein, 176 aa, Artificial Sequence
  Synthetic
REAEEAKEEVEELNRRNKKELDDARRRVDELDKRDHMVLHEYVNAAGITVEELERVKEEGRSDDRLREKIERMLKTSADELERLKEENKRALRDLAERLRELIERNRRKLEEITRRTVPDKDVLKRLAELIKESIRELERVLEELAEKIDRSLKELDDVLRKNETDLKRVIEDLKR

SEQ ID NO: 1202 - protein, 179 aa, Artificial Sequence
  Synthetic
REAEEVERKVEELNRRNRKVLDDARKESEEVVRRDHMVLHEYVNAAGITLRELDKRKRDGTSEEVIKRLIDRVRKILEDIRRLVDELIKRNERIVEKLTRIVEELIRRNKKLLEDIRRELVKVDEVLRRLAEDIERSIRELEKVLRELERIHRELIKELKEVLKRLEKDAKEVIERLRT

SEQ ID NO: 1203 - protein, 174 aa, Artificial Sequence
  Synthetic
SEEEVLREAAKTVEKLLDEIRRSLEKVSKRVEDRDHMVLHEYVNAAGITRELLEELRKNNVDRTLLEDVRRKLERIEERNEEMNDRSRRKLEELRERNRKILEDIRRTLEDLKRRQLPKDDVERTLREIAKLVDEVDKENKRALRENEERVKTLNRENEEMLKRIEEEVRRATK

SEQ ID NO: 1204 - protein, 183 aa, Artificial Sequence
  Synthetic
RVDERLDTVLKRVEETVRENKKKNDELLERSKERDHMVLHEYVNAAGITRREAEKLKREVTKEEVKKIIDEVLKEIEDLLRTVKEELDRALERNREVVEETKRRIDRVLKEIEKLIRDVKRDRKEEVVKEVEERIKKLLKEVNDTSKDAERRLRETNERLNEIVKEVEKRIRELSEEVRKRVK

SEQ ID NO: 1205 - protein, 183 aa, Artificial Sequence
  Synthetic
SVDERLDEVLERVKEDMDRNRRKNDESLREDEERDHMVLHEYVNAAGITEERVRELKKRVKDERVKEFLDRVLEEIRKSAEEVKTIIDEVHKESEETVRRTKKIIEEVLRRIEELIRRVKKDRKEEVVKTVEEDIKRLLKEVNKVSDEAHKRNKELNERVNRVNKEAHKRNEDLLREAERKVR

SEQ ID NO: 1206 - protein, 174 aa, Artificial Sequence
  Synthetic
SESDEVIRDLARLLDELARHVDDSVRRMDEVVKRDHMVLHEYVNAAGITVKEVEKKPGDERVERMVAEIERLVAEVLEELKKKYEKLKREVEENLRRLEETVRDIVEKARKVTEKGVSKEKIDRIIRELERILEEAKKKHEDVLRRLEDSLRRVAELLKAALDRLREIVDRLRR

SEQ ID NO: 1207 - protein, 172 aa, Artificial Sequence
  Synthetic
SRAETVLKEVTDKIKKLADSSDELLRRNKENIDRDHMVLHEYVNAAGITIEEIEKGSVDEETLEELIRRVEAELEAHHRELEKNSREDEKRNRDHHAKLEEEMRRVEERLEREGIDDEVVKRVRDLLDTVRRRNEKVNEDVKRMNDKLRRDNEDVIRRVEKLLRELEEKRRT

SEQ ID NO: 1208 - protein, 176 aa, Artificial Sequence
  Synthetic
SVDEVLKEIEDALRRLKEEVERVLKENEDELRRRDHMVLHEYVNAAGITESLKRGVGESDEVDRVVDEIAKLSAEILEKVKKVVKEIRDSLETVKRRVDDVVRRLKELLDEIKRGSDEKAIRDVAKEIRDRLKELEEEIEEVTRRNLKLLADVEEEIRRVHEKTRRLLETVLRRAT

SEQ ID NO: 1209 - protein, 186 aa, Artificial Sequence
  Synthetic
SEVDEIIKELERLLAEIARENERIIRESRKLADRDHMVLHEYVNAAGITVARLADAVRRKGSESEEVKKLIEDVLREIERLLKRIEEENREVVKRNSELVERVRAINEEILRRVAELVEKIARDIGDKDEVTKVKKVADDVLAEIKKLDDETRRVIEDTNKKIADLDKATRDVVRKVLEEVKKLEK

SEQ ID NO: 1210 - protein, 181 aa, Artificial Sequence
  Synthetic
SEVDDVLRRLEELIKTLEDINAKSLEDIKKLIDRDHMVLHEYVNAAGITIRELREAKKGIDSREAEEIAKRVLEELKRTSDDLRKKVERVDEDLRRLLRENHERNKKILRDLERLLRDAARRGVPKEALDRMREEIRRLEEESRKSDETIERLIRELRRRVEEVLKTSTDLIRELEEEVKK

SEQ ID NO: 1211 - protein, 181 aa, Artificial Sequence; identical to SEQ ID NO: 1210
  Synthetic

SEQ ID NO: 1212 - protein, 234 aa, Artificial Sequence
  Synthetic
SAKETIRKLIEENKDIIRKLAEKLKRLLEESERRDHMVLHEYVNAAGITERALRRVGSGIDEELLKELEKELARLEEELKEILDRVRDLHRRLAEEIRKILEESKKLNEELEDRLRKDGDVEELLELLERVHATDVRLLRELLKLLKKVHEDVVSLLERLLELLKRVLDRIVEELGLSDKELEKLLEDLEREIRRLAKRLKELSDRLEEKIRKIKRELDDLSARLREKIERTRK

SEQ ID NO: 1213 - protein, 244 aa, Artificial Sequence
  Synthetic
SAEETLRRITEESKRVLEEITKKYEDLERESRERDHMVLHEYVNAAGITEDVLTKGGDDKDEVLTVLEKVLDELLKLHRENLRVIKELLRKVLEVDRENLEVLKRLLEKARDLLRRSGRDEKDLKKLEDELRKVKEELEKKHEASKRDIEDLERELDKVTEEVERLLRKLKEELRRAAEGSDEDRERLARLLKALADKLIRVLEEILKINEELNRKIIKFARENLERNRRVNKKVIEVLREAAR

SEQ ID NO: 1214 - protein, 238 aa, Artificial Sequence
  Synthetic
SEAEKIREALETNLRLLEELIKRLKEILDTHNERDHMVLHEYVNAAGITLELLEEGGLDEEVLREVKRLVDELRKEARRVLDEHEKLVRKIKKEAEDVARESEEIIKEVEDKLKGLDREELLERVRRVLKKSDDLIAELVRRALKILEELTRLLAELLKKVVEILRRIVELVERVLTKKGAPKEDLERLRRKVEELEDRLRRLLEKLARDSAELMRELERILDRYARESEELDRRLAE

SEQ ID NO: 1215 - protein, 238 aa, Artificial Sequence; identical to SEQ ID NO: 1214
  Synthetic

SEQ ID NO: 1216 - protein, 242 aa, Artificial Sequence
  Synthetic
SEKERLMRLLDKLKDLNRRLVERIKELLDKALERDHMVLHEYVNAAGITKELVERGGVPEELLTRIDELIKKLEDEARKISKEVKRLIDELKKRLEDIHREVDRLIRELKETLKGVTDKDELLRRVAEVLERIARLSEELIREVKEVLEKIVELSRELLKRVLDVLRRIAELLEDALRKGNVSEETVRRLREALKKLEDDLRKIERDAEREYKKLKDELEELTERYRREIRKLKEELKADRK

SEQ ID NO: 1217 - protein, 242 aa, Artificial Sequence; identical to SEQ ID NO: 1216
  Synthetic

SEQ ID NO: 1218 - protein, 247 aa, Artificial Sequence
  Synthetic
SEAEDLEELIKELAELLKDVIRKLEKINRRLVKRDHMVLHEYVNAAGITEEELRKGTVEDKDILRDLERRLREILEESDRLLEELKRRLEEILRKSKELLRRLEEVLREILKRAEEVKRSNLPKEELIKEIVKLLEELLRVIEKILEDNIRLLEELVEVIKEILEKHLRLLEELVRVIERILREVGKDKDEAERRRRELKDKLDRLREEHEEVKRRLEEELTRLRETHKKIEKELREALKRVRDRST

SEQ ID NO: 1219 - protein, 240 aa, Artificial Sequence
  Synthetic
SDKEEIKRRVEKTARDLETEHDKIKKRLEDTVRRDHMVLHEYVNAAGITLRKIEKTLREGDGDATDLVDKLLETVKRLNEEVLRTVKKIADELRRLVEEVLRVLRESNETLARLLEEGNVGDEVRERLEEVLRRTEEIIKTLEEIVKRLLDELRRLVEELRRISKKLKDELDKIKEKGKDEKRLIEEVVRLLRENLDVVRRILEALAKLIKELLEALEEVLRRNKELIRELLRVLDEALK

SEQ ID NO: 1220 - protein, 240 aa, Artificial Sequence; identical to SEQ ID NO: 1219
  Synthetic

SEQ ID NO: 1221 - protein, 248 aa, Artificial Sequence
  Synthetic
DEEERVKKLLTDLRRLLRKLHEESKKLLDELRKRDHMVLHEYVNAAGITERRLREAEKKLPGTRVLKLVADVVKKVLDAIRDLNRKLEEIIDEALKLLEELDDILRRVVEEALRLLKEIKDTKGDREEVKKRVEDILKRLEELVKEYEDRVREIKKRLRRALEELRDEYRKIREDIERVLDELRKGGVPEELLRVLEELVRTLKKLLDENLKMVERLIRELEKVLDDHERKVRRLIEELLEVLDRDAK

SEQ ID NO: 1222 - protein, 238 aa, Artificial Sequence
  Synthetic
DADELLRRLAEEVERVIREAEDLLRRWKETIKKRDHMVLHEYVNAAGITEDVIRELTKTKGDEELAKLIKDLLDTNEKVNRDLLRLIKKLLKDAERVNRRLLELIEELLEELKRVAKDLGLREEADKKLRDIADRARKELEDYERRLKELLKTVEDALRKAEEDSRKLKRDVEELLERGRLRKDDLEDILRKNLDRLRKLLERLREILRENLEALKKTLKRLEDVVREILEDLKRERK

SEQ ID NO: 1223 - protein, 238 aa, Artificial Sequence; identical to SEQ ID NO: 1222
  Synthetic

SEQ ID NO: 1224 - protein, 231 aa, Artificial Sequence
  Synthetic
DKAEVLREALKLLKDLLEELIKIHEESLKRILDRDHMVLHEYVNAAGITKELLERSGLDERELRKVERMATESLRTIAKLKEELRDLARRSLEKLREDLKRVDDTLRKVEEKVRRTGPSEELIEELIRTIEKLLKEIVRINEEVLKAVRELLKTLLKLSEDVVRRIEEILRKGGVPEEIDRELKRVVEELRRLHEEIKERLDDVARRSEEELRRIIKKLKEVVKEIRKKLK

SEQ ID NO: 1225 - protein, 236 aa, Artificial Sequence
  Synthetic
STREKAKKVLDTLRADNEDMKRVVEKILRALKRRDHMVLHEYVNAAGITKRILKEVGVSEEALKEIEDTLKRVLEEIKRLLDESKKLLEDVEREIREILKTSEELLERIEREIETVGSDEKTLAEILKRLLELNEEMNRRLLKILRDLLRLNEEVIRRLLAVLERLLDALKEALDRGDVPEDLLRKLEEELRRIKEKLRKALEELEREHRELEKELDKLHDESRKEHERIEEELRR

SEQ ID NO: 1226 - protein, 236 aa, Artificial Sequence; identical to SEQ ID NO: 1225
  Synthetic

SEQ ID NO: 1227 - protein, 247 aa, Artificial Sequence
  Synthetic
SKAEKLLKDLREALEKVKRRYEELERRLDEVLKRDHMVLHEYVNAAGITLKRIEEGGLPEEELEKLKKLAEKVKELLRELLRLSKELVDRVRELLKRDLDLVRRLVEIALKVLREAREQPNDEKRVEKIKRDLEKKARRVREENERIKRDLKRTADESRKRLEKLLEDLKRELDRLREDLDRGRKDIDERVEELIERLIRIIERLLREVIKSHEKLVRTIERLIEESIRVNEELLEVIERLLDRARK

SEQ ID NO: 1228 - protein, 246 aa, Artificial Sequence
  Synthetic
KEIEETLKELEDLNREMVETNRRVLEETRRLNKRDHMVLHEYVNAAGITLKKLVDDVRKGPTSEELKRLLAELEELLARVVRRVEELLKKSTDLLERAVKDSADALRRSHEVLKEVASRVKRAKDEGLPREEVLRLLRELLERHAKVLKDIVRVSEKLLREHLKVLREIVEVLEELLERILKVILDTTGGDKAVEELEKALEEIKRRLKEVIDRYEDELRKLRKEYKEKIDKYERKLEEIERRERT

SEQ ID NO: 1229 - protein, 231 aa, Artificial Sequence
  Synthetic
SKEEEVEKVLRKWEEILRRLIEENKRANDKIRRRDHMVLHEYVNAAGITKEVAERLGVSEEVKRILEKLIKLLEDILEYEKENVERLIELNERILRELKKSVEELKALVTRVRRDGLPESEVRKLVEDVLRKNEELLKEAKKAWRDSIENLKRVLEEVAKLVKTVLREIEEKIDDEDVVRALIEVIERLLRVAEEVIRRILKVNTELMRVDERSIRESLKAISEVLKVLDT

SEQ ID NO: 1230 - protein, 245 aa, Artificial Sequence
  Synthetic
DEDELIRKLLEDLKDIVRKILELIERDLRDIERRDHMVLHEYVNAAGITKEVVDDIARGVPRTEELERVIKRIEELLRTSEEELDRILKEIEELLRESRRRLEEVVSAVEELLRRVEEIVDKGRESKEDVIKLLREVVDDILRLVEEVVRTNLEIIKRILELIERVIRLNLSIIRDILRLLEGTVDSELADRIRKLIEDLERHTAKVLEDVKRAITELRKNSKDILEEVRKLIDELRKRIKEVED

SEQ ID NO: 1231 - protein, 231 aa, Artificial Sequence
  Synthetic
SKDEELARLLEELVERWRKIVEDLERDHRRLVKRDHMVLHEYVNAAGITVDRIRKNGIDERIVRLIEEIAKIIEEVLKEIVKLVERAVRENVRVLRESVRLVAELVETLARLLRGSDERVTEAIKKVLDTSEDLIRRVIKVNEDILREIAKLVEEVLREAERILTEIKKEGDREEIRRILEELKRIVDDVLRIIARILKLLRDLTRRLAEVAKAVHKLLEELLRKLKEDTR

SEQ ID NO: 1232 - protein, 238 aa, Artificial Sequence
  Synthetic
SEIEDVIRRLRKILEDLERVSEKLLREIKKILDRDHMVLHEYVNAAGITLEDAVRVFRDGSGSKEELAKLVEELIRELAKLAKEVDEIHKRIVERLKALVEDAERIHRKIVETLEEIVRGVPSEELKRVVEAIVEVIKEHLKVLADVIRRIIKAIEENAETIKRVLEDIVRVLELVLRGEGSIEDLVREVERLIKRIEDSLRELEKTVRELLKRIKEASDKVREDVDRLIKELKEAAD

SEQ ID NO: 1233 - protein, 238 aa, Artificial Sequence; identical to SEQ ID NO: 1232
  Synthetic

SEQ ID NO: 1234 - protein, 246 aa, Artificial Sequence
  Synthetic
SREEIVATLEDLARKILEVVKKLAKEIEDAWRERDHMVLHEYVNAAGITREIEDVVRKKVDSRVAEILETVVKRVVDITRRLIEEAERVVRELVDITRKLITILEEVVRRLVEIVREASKIDDRRELEDMLRKIREVVREVIERLKKLDEDVRRVVEEVIRRLEELNKRLEDVIREVKKRLKELGLSEEAVKELVELLEEILERNTRVIKEIIDLLRTVIRIHEKIVEDLIKLLEELLRRLEEATR

SEQ ID NO: 1235 - protein, 237 aa, Artificial Sequence
  Synthetic
KEKEDALKKLEDLARKSREDLERVLRKHKKILDRDHMVLHEYVNAAGITVDDILRKTGTESEILKELARLLREHHEALRRLIEELRRLLEEHHKILEDLAREHKRLLDELIKVVADGVDKDELERIIKELRERDKKLVDDLRKVSEDLLDAVRKLVEDLERISRELLRRVEELAKGIDEELAREVERVIKELLDKSKEILERIERAIDELLKVSEEILKLSEDASEELLKILREFAK

SEQ ID NO: 1236 - protein, 229 aa, Artificial Sequence
  Synthetic
SKEERLREVAEKHKKDLEDIVKRVDEAAKETARRDHMVLHEYVNAAGITLDDLEKGPDDEKLKKVKKILKDIMDRLAELIKKILKLLKENLEKIKELLRRNLEISEELLKLAKGLSDRDVLETVRRVLEKLDEEWDRVLEDSRRIIETILRELDTLLREVEKLIKEIKDEISGSKEVLDILERAVEVVRRVIKALKEVLERHVDATREVIERVKRVNKRLLEAVREVVT

SEQ ID NO: 1237 - protein, 241 aa, Artificial Sequence
  Synthetic
SEKELLKEILDRIRELLEDDNRLLKRIVDEIRKRDHMVLHEYVNAAGITKELLDRIGAPEDVIRELTRALKETEEDVDRVIRTLEKLLKEVLDAHEEVVRKLDRLLKEVERLVEGGDAEEVVRDLLRVVKEILDESKAVIDELARVVDEILKLLEEVDRKLAKVVKEILEDVLRGSGDDEDAVRKIAKIIEELKRLLEDLARDTRRVIEEAKRLLKEWRDRNKEVADTLKKLLEDLIRKIR

SEQ ID NO: 1238 - protein, 240 aa, Artificial Sequence
  Synthetic
DREKSVRDIEEDLKRVLDKLRRRVETSKEELKKRDHMVLHEYVNAAGITRDVVRELDRGIDSEVLRAVREIVKRLVEVVRRYNELSEKIIRDLVRVNDRVLELLKRIVKRLIDVVRELEKIGDKEKALRRLEEVVKEVKRRIEELLKELEDVHRELVKILEEVNEDLKRVATEVKEIIKTGIKSSEVAKELDEVIKRLLDNLKENTDRLKEVIDRNLADLRDLAEELRAVIERLLEDARR

SEQ ID NO: 1239 - protein, 252 aa, Artificial Sequence
  Synthetic
SLEEITKRLLELVEENLARHEEILRELLELAKRRDHMVLHEYVNAAGITEELLKLLEDNGSSEEDLKRLLKEVIEELRAVVKRVKDKWDEVVKRIEDLVKKLKELHDDTLRKLRELVRKIVTDISESGGEAEKVKRVVEKILELVERLAKVVKESVEKLLEILRELAEVSKRVAEALLRLLEELVRVIRIKDERTLREVVRKVLEEAKRLLDELEEVHKRVKKELEDIIEENRRVVKRVRDELREIKRELDE

SEQ ID NO: 1240 - protein, 237 aa, Artificial Sequence
  Synthetic
REDEVLRDIERLLREIEEKIRRILEESTAELRKRDHMVLHEYVNAAGITKAIKEDVERKGIDEELRKLLDEVLDKLTKLIERNKRSLERILELIKRIIDENLEVLRDIIRLLEELLKATKDNGVPKDEVIKLVEDVVRRIEELVTRVVARNEKLVKDLDDLAKKNVRENEELLREIDRGLDEDLLEKIKRVIREHIKALEKLARDLKEILRRHIEALKELARDLAEVIRKLLEDVKR

SEQ ID NO: 1241 - protein, 237 aa, Artificial Sequence; identical to SEQ ID NO: 1240
  Synthetic

SEQ ID NO: 1242 - protein, 243 aa, Artificial Sequence
  Synthetic
SEAERLADEVRKAVKKSEEDNETLVREVEKAVRRDHMVLHEYVNAAGITMKRLVDLLRDGQVSDRDLLKELEEVLRRVLEALAENHERTEEILKRWLDRYAEDIERLRKVLKEVIEALKRGGSDDKRIVDELEEILRRNEDVLDKIAKRLRRLLEEDRRLLERIVRELKRLLDDLDRITKEGKSEELVRIAIEVLKRLLEIIEELVRLNNEILERLLKIVRELHKDNIKILEDLLRIIEEVLR

SEQ ID NO: 1243 - protein, 243 aa, Artificial Sequence; identical to SEQ ID NO: 1242
  Synthetic

SEQ ID NO: 1244 - protein, 245 aa, Artificial Sequence
  Synthetic
SEKDEVTRRIRELLKEAEETNREAIERIKRLLDRDHMVLHEYVNAAGITLRRLKKVLDRGLQDDEALLKLLIDALREHNRLSTELIKILIDVLRTILKIIKDVLATNIEIARRILDLVRRLAERGGLDDRLVKEVEKLVRTAERLHRDALRKVKRLVEELEKRLRELVKTDHDLVRRLETLLRRGSGSKEDLLREIARILAESLRLIRELLKEIEKIVKEIIELLERLNDELRKIIEAILETTKK

SEQ ID NO: 1245 - protein, 239 aa, Artificial Sequence
  Synthetic
SAEDLVRRVKDLVDKLEDKLRKVVRTNERLWEERDHMVLHEYVNAAGITDALVEKLKAGDKDKDELIEEAKSLEDESNALVEKLVRDIERVLAESNKLLDTLAKEIEEVLEEIVELVERGSGSDKEAREKLEDIKARLKEVLKKLREESKRIIDELRRLLEEYKRLVKEIRDRIEEVRKRNSEIRVLVELVRRHNKVLKELVEELEKLVRDHNRVVEEVVRELVELLSRAVEVIKEVVK

SEQ ID NO: 1246 - protein, 232 aa, Artificial Sequence
  Synthetic
SEKELVDDIRRILEEILRLLRSLLEEVIRLLEERDHMVLHEYVNAAGITRRVAKLLDENGIRTDEADRVLERLEKAHRELLEDYKRALEKIKETLERVLREAEEVVKKIDDALRKLGGSKEVLKRLLEELLRLVEKIAEEIKRLLSELVRVTEELVRTNKELLEEAVRVIRKEVGDDSLVREVEELIKRLEKHIDDLLKTSRDLVKRVLDLVDEVVKRVEDLVERVKEKIDT

SEQ ID NO: 1247 - protein, 243 aa, Artificial Sequence
  Synthetic
SRVEELKKLIEDILRISREVVERIARVAEDIHRRDHMVLHEYVNAAGITLRTVEEILARKVSGTEAAEALRDTIRRVVDEIRKLLEEHEKRSAELLEEIRKLLEDILRRSERAVEEIRELLKKGVSTKDVLRIIEEILREHLELLERVVRRIEEILRELLKTIEEIVKRIKEILEELKEVLKRGSVGDDEVEREIRRVKEDLDRILEEYRRLLEEIKRKLEEILRRVEELHRRLRRKLEEIDR

SEQ ID NO: 1248 - protein, 243 aa, Artificial Sequence; identical to SEQ ID NO: 1247
  Synthetic

SEQ ID NO: 1249 - protein, 244 aa, Artificial Sequence
  Synthetic
DEDRRLEDAVAKLRKEHADIMKKLDDIMRELDERDHMVLHEYVNAAGITKALLTRVLRETREDELLRKVLELLTRLLKLLADVLEENKRLLEDILRLLKELIETNLRLLEEILALLRKVARGPVSEEEAKRLVEEITRLLEASTEEARKLVETIKRLLEESLDKLRSLVEEIERRLRTVLEEIRRRGAPEEIERIIRRVIEVIREILDLVRKVNKKALRVIEEILEDLARVNKKAVDAIDELAK

SEQ ID NO: 1250 - protein, 240 aa, Artificial Sequence
  Synthetic
DKDKRLEELLKRLKELNDKTFEELERILEELKRRDHMVLHEYVNAAGITRARIEGGNLDKRLAELLKKLLDDLKRLLEEYTRTNEELLKRLRELLERYRETNKKLLDLLRKLLDEARRTGTDEDLLRRLEDILRKYEDEVRRLLKELEDILREYEDTSRRLLEELERIAKEAAERVSRGSDKDVKDIIRTILEVARDLLRLLEEDSRTNSEVVKRLLDLLREDSKANSEVVKRLLDVLRE

SEQ ID NO: 1251 - protein, 240 aa, Artificial Sequence
  Synthetic
SKEETLKRLLDELEKRNRETVERLERLLKELEDRDHMVLHEYVNAAGITERKIEESGLSKELKDTLARILEELRKLLEEYFRKNEELLRLLRKLLDEYARTNEELLRLLEELLDTARRTGGDSELLKRLEDIAREYEKRVRRLLEKLKDILDKYRKTVEELVRKMEEILKEAKKTISRIGSEEVKDIVRAMEEVIRRLIEILRRDVELNLDVAKKLLELLKEDSKLNLDVARELLELLDR

SEQ ID NO: 1252 - protein, 240 aa, Artificial Sequence; identical to SEQ ID NO: 1251
  Synthetic

SEQ ID NO: 1253 - protein, 243 aa, Artificial Sequence
  Synthetic
DEEETLRRLLERKVELAKEYLDVSKEVIDRTTKRDHMVLHEYVNAAGITVELLERGDLGPDELIKRLAEELERSLRELEEEIKRLKRELEESLKKLKEIIDRLAEEAEKLLAVLKRGEGSEEEALRALASLVRELIEVLRENDERLRDVLRRLIEALRKNNEILERVLRKLVRAAEERGRDESSREALEEARRRLEELLRELNEITKDLEAKLEKLLRDLNELTKALEEELKRLLDELKKRTD

SEQ ID NO: 1254 - protein, 243 aa, Artificial Sequence
  Synthetic
SEAERTKESLKKVLKALVDLNRELLRKLEENMRRDHMVLHEYVNAAGITLDKVREGGIVDKDAEREAERLMRELDKSSEDTARETRKLIEESKKSTRRTEEEARKLTETLDRLAKGGLPREDLLRALVRLLEELARLIEEDVRRNAELVKRHIELVERDVAELLRLIKELVDLLADLAEKGSRTEEIRKIVEEILKEIKELADRYREEVRKSKDKLRSILEDYKRKVDELKERLRELIEEVET

SEQ ID NO: 1255 - protein, 243 aa, Artificial Sequence; identical to SEQ ID NO: 1254
  Synthetic

SEQ ID NO: 1256 - protein, 239 aa, Artificial Sequence
  Synthetic
SEVEDILRRLAELNKRLIDKLRELIDRIARLNERDHMVLHEYVNAAGITADELIRVVRERGDIPEELLRKLEEELKKIVDELRRLVEEYEKALRDLIKELRKAVEEYRRTLAELVERLRRLEGPEELLKDLAEDVSRNIKAVEEVIRRFEKNVEDNIEVVRRLVDALEKLVRRLESVLRGKGSDEDLKRLLEKLKEDVERVLKEVRDRTAESLKHLEDVIRELEKKTEDSLRHMEERRK

SEQ ID NO: 1257 - protein, 239 aa, Artificial Sequence; identical to SEQ ID NO: 1256
  Synthetic

SEQ ID NO: 1258 - protein, 186 aa, Artificial Sequence
  Synthetic
SAEDSIRELLERDERLLEEARKEAKRLNEENERLRDHMVLHEYVNAAGITRLLDDIRKKIKGEKLREIEELVRRVKRTIEKLLEEVKKSVEDSSKRIEELLEAVERSVERTKEEIRRLLDEVRKDRKEELVKRVEERIKRLHDENRRLVKEVIEEVEKLIRDNEKLAEDIEREIRRLLKELDEAAK

SEQ ID NO: 1259 - protein, 182 aa, Artificial Sequence
  Synthetic
DEAEKLLKELRDLLEESRKDLERLLKELEDLLEERDHMVLHEYVNAAGITKRIKETVERRNEREKLEKLLRELKKVVERLKDNLKDNERRNKEAIERVRKKLKDNERENKKVIEDLRAKLKDLEEVKRKIDRLEEESRRVIEEARKRLEEVEEKSKKIIDDARRALDRIDKELRRVVEETRK

SEQ ID NO: 1260 - protein, 173 aa, Artificial Sequence
  Synthetic
SLEELLEEARKTVERLIRESERVLRESEERVRRLRDHMVLHEYVNAAGITEVIERVEDEEALKELEKLLREDSKRVKEVLDDLRRDLERNKRRNEKVLRELEELLKRLEELVREGVREEELEKLLREIEERVKEMLKRDEDTLREIERKVKEAVRDSERTLEEIEKRVTEEKT

SEQ ID NO: 1261 - protein, 175 aa, Artificial Sequence
  Synthetic
SELEKVVDDVRRRLDRLLETSEKLLEDATKRLKDRDHMVLHEYVNAAGITERLKTVLERRETDKRELLKENKEILERTRELSERNLKEVEDILREVEEEVRKNLRRIEKVLEEVRRKLRSELLKRVEERIKRVLDESKKILKEIADEVRRVLERDKELLKRLEDKNREVSERIRK

SEQ ID NO: 1262 - protein, 180 aa, Artificial Sequence
  Synthetic
SKEEVLREIERLHKETIRRIEEVLREATELHKRLRDHMVLHEYVNAAGITEVIEDVRRADTPNVEELLRELKDALDKVRDHNRKTLKKNEDVVREIEKEVRELLKEDEDVLRRIEKVMRDGRVDARELLEESRREVERSEKEVERLLRKSRKVVEEVRKLSEENDREVKKILEEVKRRLD

SEQ ID NO: 1263 - protein, 180 aa, Artificial Sequence
  Synthetic
SKEEVLDEMRRLHETTKRDIRRVLKEIEELHERTRDHMVLHEYVNAAGITRVIEDIKRKKTPDVEKLVRRVEEMLKELEKHNKKTTDDDKRVLDEIRRRADELVKEDERVLREIEEVVRAGKVDLKELLDESRRVVKESKEDLDRLLKESRDVVDDTRRKSEKNLRDAERVIREAEEAVR

SEQ ID NO: 1264 - protein, 178 aa, Artificial Sequence
  Synthetic
DDLERVLKEIKKAADKIREDNKRTADKIRKRVKERDHMVLHEYVNAAGITKEIKERVRGREEARKVIEELKKLVDEVRKRNEKSIEELKKLLKEDRDLMRRVIEELEDLVRRLREEVRDDEALRRVEEEVERLIRDLRRVLKETSDRVRELIDKHRRLSEEVEKDVKRLIDELKKKTD

SEQ ID NO: 1265 - protein, 181 aa, Artificial Sequence
  Synthetic
DEEETLEDVLRELEERVEKLLRDLTRDLERVEKERDHMVLHEYVNAAGITKRIEELLKRIEDDEKLRRLKEEVRKLVEESRERNKRHHKEVREVLERIRELLERLEKELRRALEEIRDKIRKDGATDEILRKIEELLRRAEEVIRDLERKVRKLERDIRENIKKNHREVREILRKIEEDVR

SEQ ID NO: 1266 - protein, 179 aa, Artificial Sequence
  Synthetic
SSKEVADELRKKAEKVLDELRKIIRELERKNEDSRDHMVLHEYVNAAGITRVLRDLVRTRGEDDRLVREVERLLRELKRRLEELIRRSEELIKRSREEVDRVIRTVEKLLEELDRLLRANKGDIEDLRRTVDKLVEEIKDLARKLAKSSDDTVREDEKLVEELRKDVKRIVRKIKKDLE

SEQ ID NO: 1267 - protein, 183 aa, Artificial Sequence
  Synthetic
SEIEKLVEDVRKLVEDNLRHSEEVHRRNRRLIEERDHMVLHEYVNAAGITEELRELAERGEIREEEARKVLEEIKRLLDEIRRHSEEVLKEIERTLKENLKHSEEVLRRIEERLEDIKRKDKDSERVRTLVDRLREELKRSLDESEKLNRESRKRVTRSLEKVDDLVRELEKLARKVLEEVKT

SEQ ID NO: 1268 - protein, 177 aa, Artificial Sequence
  Synthetic
SEAEKVVEELKKLLREVEKKIRDHTEDVKRILEERDHMVLHEYVNAAGITKELKDKNSDDDTVRKVKEELDRSHEKLREELRKVAKELKESNEELERDLKRLVEEAEDRLRRLKDRVSEKVLRELEKILEDIKRTLDKLLRENRETLKRIEDRLRELLEENRKLLEKIERELRERSR

SEQ ID NO: 1269 - protein, 182 aa, Artificial Sequence
  Synthetic
DEIETVLDEVRRLHEDAKRRLEEMIDEVRKLNEERDHMVLHEYVNAAGITRTVKEEVERAGLDKGKLEELEERLERVREDVERILREIKRRNEKTLEDSERILEENKERNRTVLKKLKELRDRGSDAREALKESRKVVEESRESVRRVLEKNRRVVEESKRLAEELLRRVKKVVDEIRKRVE

SEQ ID NO: 1270 - protein, 178 aa, Artificial Sequence
  Synthetic
SSKDEIRRRVEEVVERSDEIVKRSREHVKTVVDERDHMVLHEYVNAAGITKKLDKIRKDGGSEETLKRVLDELREILKELKEEVKKVKRKLEKVVKENRDTIREVEERNRKILDELRKRGVEERALREVEEISRKSEEKLRRVLKESEDIAKEAEDRLKTVLERVERIADEVLKRLTK

SEQ ID NO: 1271 - protein, 182 aa, Artificial Sequence
  Synthetic
SDADRVAEELKKLVEDSRRENERVIEESKRLVKERDHMVLHEYVNAAGITDKLRDILEKEKDKKTLDDIVREILERLKRLLEKVEDENRKSHEENKRLLEDVKRKNKRISDELKRLLEEIERRNVDVDKVRETVKRLLEENKRVMEKTEEVAKKSSEDIKRVADETRRRAEELLKEVDELRK

SEQ ID NO: 1272 - protein, 182 aa, Artificial Sequence
  Synthetic
DEVDELLKRLRKLVDEVRKENDKMVKESKRLVEDRDHMVLHEYVNAAGITEELEKILKDTEDKDTLRKIVEEIKRRLRRLLEELKRIIEKALRDNKKLLDEVRKRNKEISDELRRLLEEIRRRNVRVEDIEREAERLLRENEELLRRSEEVIRRSTEKIKKVLRDAEERAREILKRVEDAAK

SEQ ID NO: 1273 - protein, 175 aa, Artificial Sequence
  Synthetic
SEVDEVLREAKRIVDEVHKDNERATEESRRLVKKRDHMVLHEYVNAAGITKEVKDANIDEKLVTEILKEIEEALKEAARRNKEVKDRLRELSRRVSERNREILEELKERLDRVRERRKDVKELEREVEKLLKRIEESLRRHRKENKRLLEELDRSLRELAKIVKEVLDEIRERTR

SEQ ID NO: 1274 - protein, 178 aa, Artificial Sequence
  Synthetic
SEEEKLKEVKDRIREVLRKLEEHTDKVKKEVEKVRDHMVLHEYVNAAGITAMLERLRRKKKDAEDLLRELEKIIEEIERELDRVLEENDKMAEEWKKLLDKVLDDNRKSIRDIEKELDDREPTDELVTEVEKLLRDDEETNRDVVKKVREAVKKDADTNRKVIEEVKKVLEDAARRLD

SEQ ID NO: 1275 - protein, 186 aa, Artificial Sequence
  Synthetic
SEVDEVRKTLEDLLRRLDEENKDIIRRNKELLDDRDHMVLHEYVNAAGITDELRKILEKLKDRETLTRIIEEIEKRARELIKRLRDEIRKIEEESKKSIEDSRKRNDEIRKRLEELIKDLRDKIKDSEELARRITELEKRVREVIERLKEKNKRLEDDSRRVITELRKKLKDLEDRVREEIEELRK

SEQ ID NO: 1276 - protein, 179 aa, Artificial Sequence
  Synthetic
REDERLEEIARKIKKVVDELVERNKKLTEDNHESRDHMVLHEYVNAAGITEVAKRAIERIRSDKKVVDEVKKLLEDAKKHSKEVIDELRRLNEESKRSSEDTIRRMRKLLRELEETVKAKKGDVEDIERKVEDIIRRLEDLSRRNEEKVRRISEEIKKLSKDNERTIKEIIKEIEERVK

SEQ ID NO: 1277 - protein, 185 aa, Artificial Sequence
  Synthetic
DDIERLKREIERLLKEAEKISRDNEERSKELLDRRDHMVLHEYVNAAGITEELKRLADKIKDKEELTRRLKEVVDRVEKSVRDSERMLREVVREDEESVRRSKTKLEDLLRKVEELVRRLEKKVTDEKVKRDAREALRKAKKKVDELKRKNDEVHRRSREEVKRLLEENRKLLEDLRRMVREITQ

SEQ ID NO: 1278 - protein, 176 aa, Artificial Sequence
  Synthetic
REAEEAKEEVEELNRRNKKELDDARRRVDELDKRRDHMVLHEYVNAAGITEELERVKEEGRSDDRLREKIERMLKTSADELERLKEENKRALRDLAERLRELIERNRRKLEEITRRTVPDKDVLKRLAELIKESIRELERVLEELAEKIDRSLKELDDVLRKNETDLKRVIEDLKR

SEQ ID NO: 1279 - protein, 179 aa, Artificial Sequence
  Synthetic
DEAEKAKRDSEKVVEDNRKMLEDSTRRAERLNEERDHMVLHEYVNAAGITREIDETKRRGTDDEVVKDLIRRVEELLERSRKKLEDLTRDNERVLDESRRRLEKLIRDNERIVKDLTDRVVRVDEVLKRLKEEHRRLIEELEEVLRRNEEIIRRSIEDLERVLDRNRRELEDVIRRLKE

SEQ ID NO: 1280 - protein, 174 aa, Artificial Sequence
  Synthetic
SEEEVLREAAKTVEKLLDEIRRSLEKVSKRVEDSRDHMVLHEYVNAAGITELLEELRKNNVDRTLLEDVRRKLERIEERNEEMNDRSRRKLEELRERNRKILEDIRRTLEDLKRRQLPKDDVERTLREIAKLVDEVDKENKRALRENEERVKTLNRENEEMLKRIEEEVRRATK

SEQ ID NO: 1281 - protein, 182 aa, Artificial Sequence
  Synthetic
SELEKTLEDLKRHSEENKKKLEEDLRDMERNLKERDHMVLHEYVNAAGITKDLERRFREGDIDERELERVRRKMEEIKKRLDENVERNRRKAEDIKRKLDENVKRSEDRVKEIKEDIRRRVRDKDKAEELERRLDELVKENREIHERVKKALDDIVKELEELHERLKRRLEEILRRIAETVR

SEQ ID NO: 1282 - protein, 186 aa, Artificial Sequence
  Synthetic
SEIEKLIEELRRELEKVKDELERSIEEMDRELDDRDHMVLHEYVNAAGITREVTERTKRGDRPEEVLRKELEDIKRKLRRILEEHHEKIRRIKEKLRRENKRVRDELKRIKDEIDEKVKDVRRKGADEELLKRLEEVAEDVKRALEELLKKHTRVVERVEKALDELDKELERIVREAEKELDRREK

SEQ ID NO: 1283 - protein, 179 aa, Artificial Sequence
  Synthetic
RLEDEVRKMEKEVREEVKRLEDESRKVLEESRRNRDHMVLHEYVNAAGITERIKDLRRRGLDERVLRELLKRVREVHERNRKLLDEVRRASEKVHEDNRRILEEVRKTVKDVVDKLRRVDAKVVKELIDRVRKILEDVEREVKKSIEEVKEINRRLNEEVKKTIEEVKEIVKEVTERAK

SEQ ID NO: 1284 - protein, 183 aa, Artificial Sequence
  Synthetic
RVDERLDTVLKRVEETVRENKKKNDELLERSKENRDHMVLHEYVNAAGITREAEKLKREVTKEEVKKIIDEVLKEIEDLLRTVKEELDRALERNREVVEETKRRIDRVLKEIEKLIRDVKRDRKEEVVKEVEERIKKLLKEVNDTSKDAERRLRETNERLNEIVKEVEKRIRELSEEVRKRVK

SEQ ID NO: 1285 - protein, 172 aa, Artificial Sequence
  Synthetic
SRAETVLKEVTDKIKKLADSSDELLRRNKENIDERDHMVLHEYVNAAGITEEIEKGSVDEETLEELIRRVEAELEAHHRELEKNSREDEKRNRDHHAKLEEEMRRVEERLEREGIDDEVVKRVRDLLDTVRRRNEKVNEDVKRMNDKLRRDNEDVIRRVEKLLRELEEKRRT

SEQ ID NO: 1286 - protein, 174 aa, Artificial Sequence
  Synthetic
KEVEDAVKELEDLLRANEDKTRSIVEDMRASNKDRDHMVLHEYVNAAGITDDLRRAGVPRDSLKRLAEDVERVTRESRELLERVHRADRELIERLKESNERLRRAIEEIRKAIKGGSDIKTLLDRVRKLAEEDAERLDRLRRESEELNERVRRVDKKLLEEIRRKAKKVEDDTR

SEQ ID NO: 1287 - protein, 181 aa, Artificial Sequence
  Synthetic
SEVDDVLRRLEELIKTLEDINAKSLEDIKKLIDDRDHMVLHEYVNAAGITRELREAKKGIDSREAEEIAKRVLEELKRTSDDLRKKVERVDEDLRRLLRENHERNKKILRDLERLLRDAARRGVPKEALDRMREEIRRLEEESRKSDETIERLIRELRRRVEEVLKTSTDLIRELEEEVKK

SEQ ID NO: 1288 - protein, 245 aa, Artificial Sequence
  Synthetic
TEEEVLRKVEKLIKDLLDVLRDLLRASEEVVREARDHMVLHEYVNAAGITELSRALSGGSRESVESALAKNEERLKKILEDADRVLDKWRRLLEELSKKAKAVLDEVRKRLEEIKREVPETEKLRTLLTILEEILRALEKIIRDILRINERLLEKLKRILERLRETNREIDERIRKLVEEARGGSEEKLRRDLTETKKELEKRHEDLRRELEKLLRDYKRELEEIERALEEIEKTLKRRADETRR

SEQ ID NO: 1289 - protein, 238 aa, Artificial Sequence
  Synthetic
SKEDKARELEKRLRDNLKKLEEVVRELAEVLKRNRDHMVLHEYVNAAGITRLLDKLRAGGLPKDELEDLRREVEDVLRRLEDLLRKLKKANDESLTRLEELLRRAEEENRRVLTTLRELLRGNGDDRDLARLVARLVEANNRALEELLRLVAKNVEDNNRVLEELLRLVKELAKRLLGRIRDEDLVRDIRRELKELEERARKILRDDERDLRALEKRIRDIIREDREELERLKERARK

SEQ ID NO: 1290 - protein, 243 aa, Artificial Sequence
  Synthetic
KREDILKKLEDIIRDIIDKLRRILEKVKRLNEDIRDHMVLHEYVNAAGITDLLKRIADKSRDRELEDILRRVLEKLRRSLDKLRDTLRKLKEETDTVLERAERTLKELKDRLEKLLRDGEKVSEEDLVEALKALIDELRKVLEDVIRVSKELVERLLRALREHLETNKRLVKELLDALRKTTGDDEEIKRLKEELERRHRRLEEEVERVARELEKAHRDLERDIRRVAEELKKLLKKLRDDRR

SEQ ID NO: 1291 - protein, 244 aa, Artificial Sequence
  Synthetic
SAEETLRRITEESKRVLEEITKKYEDLERESREVRDHMVLHEYVNAAGITDVLTKGGDDKDEVLTVLEKVLDELLKLHRENLRVIKELLRKVLEVDRENLEVLKRLLEKARDLLRRSGRDEKDLKKLEDELRKVKEELEKKHEASKRDIEDLERELDKVTEEVERLLRKLKEELRRAAEGSDEDRERLARLLKALADKLIRVLEEILKINEELNRKIIKFARENLERNRRVNKKVIEVLREAAR

SEQ ID NO: 1292 - protein, 250 aa, Artificial Sequence
  Synthetic
STEEILKRVKEILDELAKELRDIIRESLRTIEELRDHMVLHEYVNAAGITELVKTIKDGVKDSEELLRRLKRLLEDLRRAHEELLKRLKEAVDEHRDRLRKILEELERVLKELRKRIEELRRSGDRISEKDVLRKLEEVLRKALEILERLLKKIRESARELLKIIEEVLDANIKVMEEALKTIKELLKDGPDEVKRRLEEKERRIRTRYEELRRRLRKRVKDYEDKLREIEKKVRRDAERIEEELERAKK

SEQ ID NO: 1293 - protein, 242 aa, Artificial Sequence
  Synthetic
SEKERLMRLLDKLKDLNRRLVERIKELLDKALELRDHMVLHEYVNAAGITELVERGGVPEELLTRIDELIKKLEDEARKISKEVKRLIDELKKRLEDIHREVDRLIRELKETLKGVTDKDELLRRVAEVLERIARLSEELIREVKEVLEKIVELSRELLKRVLDVLRRIAELLEDALRKGNVSEETVRRLREALKKLEDDLRKIERDAEREYKKLKDELEELTERYRREIRKLKEELKADRK

SEQ ID NO: 1294 - protein, 240 aa, Artificial Sequence
  Synthetic
SDKEEIKRRVEKTARDLETEHDKIKKRLEDTVRDRDHMVLHEYVNAAGITRKIEKTLREGDGDATDLVDKLLETVKRLNEEVLRTVKKIADELRRLVEEVLRVLRESNETLARLLEEGNVGDEVRERLEEVLRRTEEIIKTLEEIVKRLLDELRRLVEELRRISKKLKDELDKIKEKGKDEKRLIEEVVRLLRENLDVVRRILEALAKLIKELLEALEEVLRRNKELIRELLRVLDEALK

SEQ ID NO: 1295 - protein, 240 aa, Artificial Sequence; identical to SEQ ID NO: 1294
  Synthetic

SEQ ID NO: 1296 - protein, 248 aa, Artificial Sequence
  Synthetic
DEDRIIEEIARLLEELLRELLELIKKLIETNRRLRDHMVLHEYVNAAGITELLDRLVKKGISDEKLKRIRERLKRALDDLERLHREINKRLEDLVRELEKLVREILKELKDALEELRRASARAGGEEVLRRLEEIVKKLLDLVRRILERLKEIHKDNVRLLRELNERLTRIVEDLVRLIREILREAGVDEKIAEEIERELEELRRMIKRLHEDLERKLKESEDELREIEARLEEKIRRLEEKLERKRR

SEQ ID NO: 1297 - protein, 236 aa, Artificial Sequence
  Synthetic
STREKAKKVLDTLRADNEDMKRVVEKILRALKRTRDHMVLHEYVNAAGITRILKEVGVSEEALKEIEDTLKRVLEEIKRLLDESKKLLEDVEREIREILKTSEELLERIEREIETVGSDEKTLAEILKRLLELNEEMNRRLLKILRDLLRLNEEVIRRLLAVLERLLDALKEALDRGDVPEDLLRKLEEELRRIKEKLRKALEELEREHRELEKELDKLHDESRKEHERIEEELRR

SEQ ID NO: 1298 - protein, 231 aa, Artificial Sequence
  Synthetic
SKEEEVEKVLRKWEEILRRLIEENKRANDKIRRERDHMVLHEYVNAAGITEVAERLGVSEEVKRILEKLIKLLEDILEYEKENVERLIELNERILRELKKSVEELKALVTRVRRDGLPESEVRKLVEDVLRKNEELLKEAKKAWRDSIENLKRVLEEVAKLVKTVLREIEEKIDDEDVVRALIEVIERLLRVAEEVIRRILKVNTELMRVDERSIRESLKAISEVLKVLDT

SEQ ID NO: 1299 - protein, 247 aa, Artificial Sequence
  Synthetic
RDRDVLRKVKAEIEELVARIEKVSRDALSEVKRLRDHMVLHEYVNAAGITSLLRKIRDTRGDDEVVKETEEVLRDNHRLLEELIRRLIKVLEEWLRRHKKLLDEIRELLKEILRLVKESGVSEDLLRRLKRVIEELDKKLKESEEKLRRVVEKAKEDLKAVLEEHRKVLEDLKRALEEVREKLRERGSEEVVEELLRMLKRVAEEMKRVHDDLSRAVEKVVRDVVRVDKELLDELARILRRLEEVIT

SEQ ID NO: 1300 - protein, 237 aa, Artificial Sequence
  Synthetic
KEKEDALKKLEDLARKSREDLERVLRKHKKILDKRDHMVLHEYVNAAGITDDILRKTGTESEILKELARLLREHHEALRRLIEELRRLLEEHHKILEDLAREHKRLLDELIKVVADGVDKDELERIIKELRERDKKLVDDLRKVSEDLLDAVRKLVEDLERISRELLRRVEELAKGIDEELAREVERVIKELLDKSKEILERIERAIDELLKVSEEILKLSEDASEELLKILREFAK

SEQ ID NO: 1301 - protein, 240 aa, Artificial Sequence
  Synthetic
DREKSVRDIEEDLKRVLDKLRRRVETSKEELKKVRDHMVLHEYVNAAGITDVVRELDRGIDSEVLRAVREIVKRLVEVVRRYNELSEKIIRDLVRVNDRVLELLKRIVKRLIDVVRELEKIGDKEKALRRLEEVVKEVKRRIEELLKELEDVHRELVKILEEVNEDLKRVATEVKEIIKTGIKSSEVAKELDEVIKRLLDNLKENTDRLKEVIDRNLADLRDLAEELRAVIERLLEDARR

SEQ ID NO: 1302 - protein, 240 aa, Artificial Sequence; identical to SEQ ID NO: 1301
  Synthetic

SEQ ID NO: 1303 - protein, 241 aa, Artificial Sequence
  Synthetic
SAEEAVEKLVRIARAIVKINEDLSREVVRILREIRDHMVLHEYVNAAGITEVVKVVEDGGLSEDVVRKLRKLVKELEDLLKKSNDDIRKLVEDVARRLKESNDEIRRLVERLEELLKRGPGDEELLRLVEELTEELLRTHEEVVKALEKLTADLLELHRELLERVRRLTKRIEEELKRVGVSEELLRRLEELRKRLEKVLDDSAKELEKLKRELERLLEESRRKLEKLKRDLERVLEETRR

SEQ ID NO: 1304 - protein, 237 aa, Artificial Sequence
  Synthetic
REDEVLRDIERLLREIEEKIRRILEESTAELRKVRDHMVLHEYVNAAGITAIKEDVERKGIDEELRKLLDEVLDKLTKLIERNKRSLERILELIKRIIDENLEVLRDIIRLLEELLKATKDNGVPKDEVIKLVEDVVRRIEELVTRVVARNEKLVKDLDDLAKKNVRENEELLREIDRGLDEDLLEKIKRVIREHIKALEKLARDLKEILRRHIEALKELARDLAEVIRKLLEDVKR

SEQ ID NO: 1305 - protein, 237 aa, Artificial Sequence; identical to SEQ ID NO: 1304
  Synthetic

SEQ ID NO: 1306 - protein, 243 aa, Artificial Sequence
  Synthetic
SEAERLADEVRKAVKKSEEDNETLVREVEKAVRERDHMVLHEYVNAAGITKRLVDLLRDGQVSDRDLLKELEEVLRRVLEALAENHERTEEILKRWLDRYAEDIERLRKVLKEVIEALKRGGSDDKRIVDELEEILRRNEDVLDKIAKRLRRLLEEDRRLLERIVRELKRLLDDLDRITKEGKSEELVRIAIEVLKRLLEIIEELVRLNNEILERLLKIVRELHKDNIKILEDLLRIIEEVLR

SEQ ID NO: 1307 - protein, 243 aa, Artificial Sequence; identical to SEQ ID NO: 1306
  Synthetic

SEQ ID NO: 1308 - protein, 239 aa, Artificial Sequence
  Synthetic
SAEDLVRRVKDLVDKLEDKLRKVVRTNERLWEEIRDHMVLHEYVNAAGITALVEKLKAGDKDKDELIEEAKSLEDESNALVEKLVRDIERVLAESNKLLDTLAKEIEEVLEEIVELVERGSGSDKEAREKLEDIKARLKEVLKKLREESKRIIDELRRLLEEYKRLVKEIRDRIEEVRKRNSEIRVLVELVRRHNKVLKELVEELEKLVRDHNRVVEEVVRELVELLSRAVEVIKEVVK

SEQ ID NO: 1309 - protein, 249 aa, Artificial Sequence
  Synthetic
DAEEVVKRLADVLRENDETIRKVVEDLVRIAEENRDHMVLHEYVNAAGITRIVELLRRGGVPEELLDRLAKVVKSIVEKAEKILERLNRVSKAIAEKLKTIVDELNEVSKEIVKRAEDILRKGKDKETVLRALRTLVKEYADLSKEVLERVERIVREYVKLSDEVVKSLAEIVEELIRIIEDLLRKGNLDEDVKRALEELVSRLRKLLEDVKKASEDIVREVERIVRELAKRSDEILKKLEDIVEKLRE

SEQ ID NO: 1310 - protein, 249 aa, Artificial Sequence; identical to SEQ ID NO: 1309
  Synthetic

SEQ ID NO: 1311 - protein, 240 aa, Artificial Sequence
  Synthetic
DKDKRLEELLKRLKELNDKTFEELERILEELKRARDHMVLHEYVNAAGITARIEGGNLDKRLAELLKKLLDDLKRLLEEYTRTNEELLKRLRELLERYRETNKKLLDLLRKLLDEARRTGTDEDLLRRLEDILRKYEDEVRRLLKELEDILREYEDTSRRLLEELERIAKEAAERVSRGSDKDVKDIIRTILEVARDLLRLLEEDSRTNSEVVKRLLDLLREDSKANSEVVKRLLDVLRE

SEQ ID NO: 1312 - protein, 240 aa, Artificial Sequence; identical to SEQ ID NO: 1311
  Synthetic

SEQ ID NO: 1313 - protein, 240 aa, Artificial Sequence
  Synthetic
SKEETLKRLLDELEKRNRETVERLERLLKELEDRRDHMVLHEYVNAAGITRKIEESGLSKELKDTLARILEELRKLLEEYFRKNEELLRLLRKLLDEYARTNEELLRLLEELLDTARRTGGDSELLKRLEDIAREYEKRVRRLLEKLKDILDKYRKTVEELVRKMEEILKEAKKTISRIGSEEVKDIVRAMEEVIRRLIEILRRDVELNLDVAKKLLELLKEDSKLNLDVARELLELLDR

SEQ ID NO: 1314 - protein, 243 aa, Artificial Sequence
  Synthetic
DEEETLRRLLERKVELAKEYLDVSKEVIDRTTKLRDHMVLHEYVNAAGITELLERGDLGPDELIKRLAEELERSLRELEEEIKRLKRELEESLKKLKEIIDRLAEEAEKLLAVLKRGEGSEEEALRALASLVRELIEVLRENDERLRDVLRRLIEALRKNNEILERVLRKLVRAAEERGRDESSREALEEARRRLEELLRELNEITKDLEAKLEKLLRDLNELTKALEEELKRLLDELKKRTD

SEQ ID NO: 1315 - protein, 243 aa, Artificial Sequence; identical to SEQ ID NO: 1314
  Synthetic

SEQ ID NO: 1316 - protein, 243 aa, Artificial Sequence
  Synthetic
SEAERTKESLKKVLKALVDLNRELLRKLEENMRERDHMVLHEYVNAAGITDKVREGGIVDKDAEREAERLMRELDKSSEDTARETRKLIEESKKSTRRTEEEARKLTETLDRLAKGGLPREDLLRALVRLLEELARLIEEDVRRNAELVKRHIELVERDVAELLRLIKELVDLLADLAEKGSRTEEIRKIVEEILKEIKELADRYREEVRKSKDKLRSILEDYKRKVDELKERLRELIEEVET

SEQ ID NO: 1317 - protein, 243 aa, Artificial Sequence; identical to SEQ ID NO: 1316
  Synthetic

SEQ ID NO: 1318 - protein, 186 aa, Artificial Sequence
  Synthetic
SAEDSIRELLERDERLLEEARKEAKRLNEENERLLRDHMVLHEYVNAAGITLLDDIRKKIKGEKLREIEELVRRVKRTIEKLLEEVKKSVEDSSKRIEELLEAVERSVERTKEEIRRLLDEVRKDRKEELVKRVEERIKRLHDENRRLVKEVIEEVEKLIRDNEKLAEDIEREIRRLLKELDEAAK

SEQ ID NO: 1319 - protein, 178 aa, Artificial Sequence
  Synthetic
DEVEKLLRDLEELDRDIERKVRELLKRNKEVLDDIRDHMVLHEYVNAAGITEVADVIRKTTDKRTVDKLLKELEKILKEVLDRVRRLLEEAKESLDRSREEIERLLEESKTLVDEVRRAGIDKKEVDKIEKHSRDLIERAKRETDRLLEEAERLMREVVDRVRKILEEAKRLIDEARR

SEQ ID NO: 1320 - protein, 182 aa, Artificial Sequence
  Synthetic
DEAEKLLKELRDLLEESRKDLERLLKELEDLLEESRDHMVLHEYVNAAGITRIKETVERRNEREKLEKLLRELKKVVERLKDNLKDNERRNKEAIERVRKKLKDNERENKKVIEDLRAKLKDLEEVKRKIDRLEEESRRVIEEARKRLEEVEEKSKKIIDDARRALDRIDKELRRVVEETRK

SEQ ID NO: 1321 - protein, 174 aa, Artificial Sequence
  Synthetic
SRDEKIRDILRRVLKEVRDSTKKVEEDLEDVHRRTRDHMVLHEYVNAAGITRVRDEGASEELKRRMEEVVRRIEELLKKLLKEDRDVVKEIRDKLDETRKEMEEVAERIKDKIRRGDGREKVAEEVKRIADRLIDLNRRIAEEVDKIVRDSIKKVEEIVTEVEKIVEKLIRDVR

SEQ ID NO: 1322 - protein, 173 aa, Artificial Sequence
  Synthetic
SLEELLEEARKTVERLIRESERVLRESEERVRRLIRDHMVLHEYVNAAGITVIERVEDEEALKELEKLLREDSKRVKEVLDDLRRDLERNKRRNEKVLRELEELLKRLEELVREGVREEELEKLLREIEERVKEMLKRDEDTLREIERKVKEAVRDSERTLEEIEKRVTEEKT

SEQ ID NO: 1323 - protein, 179 aa, Artificial Sequence
  Synthetic
STREDARRLVERVRKEVKRLLKKNSDLLREVTERVRDHMVLHEYVNAAGITEAKRLKDSDERDVERLLDRARKLVKESEDLIRKLLKDLRELVRRSEKDIDELRKELKRLLDELRARATDKDLERVVREIEKEIRDLIRELEENVKTSEKLIEDLIRELEKSVDESRKRVEELVKELRT

SEQ ID NO: 1324 - protein, 175 aa, Artificial Sequence
  Synthetic
SELEKVVDDVRRRLDRLLETSEKLLEDATKRLKDSRDHMVLHEYVNAAGITRLKTVLERRETDKRELLKENKEILERTRELSERNLKEVEDILREVEEEVRKNLRRIEKVLEEVRRKLRSELLKRVEERIKRVLDESKKILKEIADEVRRVLERDKELLKRLEDKNREVSERIRK

SEQ ID NO: 1325 - protein, 174 aa, Artificial Sequence
  Synthetic
SELEKVVKEVADLLRRNLEKSKRVLEEVRRRLEENRDHMVLHEYVNAAGITRILELVREGKDKRDLTRLLEEDDKRVKEALDKSRENNERILKEVRRALRESEEDNRRILKEVREKVDSRLLEELEERVRESIERSRRFIEELEKIVEETLTESEKLARASSEITKTVLDEIRK

SEQ ID NO: 1326 - protein, 180 aa, Artificial Sequence
  Synthetic
SKEEVLDEMRRLHETTKRDIRRVLKEIEELHERTLRDHMVLHEYVNAAGITVIEDIKRKKTPDVEKLVRRVEEMLKELEKHNKKTTDDDKRVLDEIRRRADELVKEDERVLREIEEVVRAGKVDLKELLDESRRVVKESKEDLDRLLKESRDVVDDTRRKSEKNLRDAERVIREAEEAVR

SEQ ID NO: 1327 - protein, 187 aa, Artificial Sequence
  Synthetic
DEEEELRKRLEKLSKEVRELLRRDEEEDRRLNRELRDHMVLHEYVNAAGITEVEDLLRKARRKVSEEELTRLRKKLRDLEEESKEALRELRRRVEELNKENKKSLDDLERRLKELEDRAREVEKRDRREDELRELLRRLEDVIRKLAEDLKRNTEDLRRVIKELAERLEELNKRLKREIRRLKEELR

SEQ ID NO: 1328 - protein, 171 aa, Artificial Sequence
  Synthetic
SEKEKVIKEARELLERLRKRLKDVNDDVTRLLDELRDHMVLHEYVNAAGITRLEEEVPVEDVIRELKRRLEEVDKKNRDILETLKRELDEVSRRTREELEKLRKELEEVEKAGLPAEELKRVADRLRRRLERLVEENERVVKKILDEIRRSVEENKRIVDKVRKDLDERRK

SEQ ID NO: 1329 - protein, 177 aa, Artificial Sequence
  Synthetic
SVIERVEEEMEKVIRDSERVTKEVEDRAREVHERSRDHMVLHEYVNAAGITELRRAGVDKRILDELRKRIKDSREDLERINEELRRALRKLLEDSKRINEELRKTLEELRKRLERVDDEEEVKKLAEEVRRLVEDSIRKLEELARRVDELVRESIERVDRNVEENKRLVREAIERRR

SEQ ID NO: 1330 - protein, 183 aa, Artificial Sequence
  Synthetic
SEIEKLVEDVRKLVEDNLRHSEEVHRRNRRLIEENRDHMVLHEYVNAAGITELRELAERGEIREEEARKVLEEIKRLLDEIRRHSEEVLKEIERTLKENLKHSEEVLRRIEERLEDIKRKDKDSERVRTLVDRLREELKRSLDESEKLNRESRKRVTRSLEKVDDLVRELEKLARKVLEEVKT

SEQ ID NO: 1331 - protein, 181 aa, Artificial Sequence
  Synthetic
EEIERALREMRELSRTHKELVEKILRDIAELAKTHRDHMVLHEYVNAAGITEIADEIRKEDKKEELKRKIDELRRRAEELLKESKEHLKRLEDTVRELIERLKETLKKVEEDLKRILEKLEKSRELDEIAKDVKRLIDENRELLKRVEDEVRRLIRKLEELNRRTEEEVKKLIKKLEDDLK

SEQ ID NO: 1332 - protein, 174 aa, Artificial Sequence
  Synthetic
REIEEAAKDLDRLLEENKKLVKEVEEELRRLLKENRDHMVLHEYVNAAGITELRRRGVPEEELKEVEERARRVIEESRRSSKELEKRLRELLEELRRSTKELEDRLREIKKLLRNGKDVEEVLRRVRKLSRENKEKIRKILEDVKKLSEDNKRRNEELSRRVKTLVDEIKKRAT

SEQ ID NO: 1333 - protein, 177 aa, Artificial Sequence
  Synthetic
SEAEKVVEELKKLLREVEKKIRDHTEDVKRILEELRDHMVLHEYVNAAGITELKDKNSDDDTVRKVKEELDRSHEKLREELRKVAKELKESNEELERDLKRLVEEAEDRLRRLKDRVSEKVLRELEKILEDIKRTLDKLLRENRETLKRIEDRLRELLEENRKLLEKIERELRERSR

SEQ ID NO: 1334 - protein, 178 aa, Artificial Sequence
  Synthetic
SKVEKLEEEIARLVERSRRLVEELKKEVTKVKEKVRDHMVLHEYVNAAGITKLRDIKRRGGSEEVLRRVTEELKKVLEDNRRVIEEVLRDLERILEELKRKAEEVTKRNRDDLKRLRDSGVDEEVLRRVEETSDRSEKELRTVLRDVTEDIKRIAEELKKALEDSTEIIRRAEDELRT

SEQ ID NO: 1335 - protein, 182 aa, Artificial Sequence
  Synthetic
DEVDELLKRLRKLVDEVRKENDKMVKESKRLVEDLRDHMVLHEYVNAAGITELEKILKDTEDKDTLRKIVEEIKRRLRRLLEELKRIIEKALRDNKKLLDEVRKRNKEISDELRRLLEEIRRRNVRVEDIEREAERLLRENEELLRRSEEVIRRSTEKIKKVLRDAEERAREILKRVEDAAK

SEQ ID NO: 1336 - protein, 186 aa, Artificial Sequence
  Synthetic
SEVDEVRKTLEDLLRRLDEENKDIIRRNKELLDDLRDHMVLHEYVNAAGITELRKILEKLKDRETLTRIIEEIEKRARELIKRLRDEIRKIEEESKKSIEDSRKRNDEIRKRLEELIKDLRDKIKDSEELARRITELEKRVREVIERLKEKNKRLEDDSRRVITELRKKLKDLEDRVREEIEELRK

SEQ ID NO: 1337 - protein, 183 aa, Artificial Sequence
  Synthetic
SEVDEVLERIKRLLERLAEHSDKVVRDIEKLLDDNRDHMVLHEYVNAAGITRLEEMRRRGDLREELLERVVREVEKEIRDIKRKNKRSVETVEKLVRDDRKELKRALEDVERLIRELETRLKDKEELRRKLEKVLREAEKVIDELLKKTDEVLKRARETIEDLNRKLDKVLKEVRDKLDRLRD

SEQ ID NO: 1338 - protein, 179 aa, Artificial Sequence
  Synthetic
KDEETLKRLLEKAKEVVDRLKDENEKVTRDNHESVRDHMVLHEYVNAAGITVARDAIRRVREAKEVVDTAEKLLRDNHEHSRDTVKKARELNETSRRHSERIVEKIEEILEEVERTLRENRGDVRELAKKVEKAIRELEELSRENREAVKRISDEIKRLSDENAKDSERIIKEIDDRVR

SEQ ID NO: 1339 - protein, 185 aa, Artificial Sequence
  Synthetic
DDIERLKREIERLLKEAEKISRDNEERSKELLDRLRDHMVLHEYVNAAGITELKRLADKIKDKEELTRRLKEVVDRVEKSVRDSERMLREVVREDEESVRRSKTKLEDLLRKVEELVRRLEKKVTDEKVKRDAREALRKAKKKVDELKRKNDEVHRRSREEVKRLLEENRKLLEDLRRMVREITQ

SEQ ID NO: 1340 - protein, 184 aa, Artificial Sequence
  Synthetic
ELIKKARKDVEEVRERSERLVDELRKRNKKLADESRDHMVLHEYVNAAGITEIEDLLRKRRTKDVLKEIEDLVRELERELRRVVKESSDKVRKLIRENEKVVEESSRLFRDLVEKLRRVVEERNDKKLMEEVERLIKRLEDVNEKSERDVREINKESERVNEETEREVEDAIRKLREVLRRAKK

SEQ ID NO: 1341 - protein, 186 aa, Artificial Sequence
  Synthetic
KEVEDLERRVKEILDRMKRLIDENRKKIEKSIRELRDHMVLHEYVNAAGITELKDLKREGGDDARTLRERVRKIIEDVEEHSRRSTEEVRRIHKENKEHSERSSDEIRELLRRVEELIEEVKRRLRDKEMEKKLEDIVRRVREVVRRAHETNERLVDRSRKAVEKAERTNRRLVEEIRKVAEEVRK

SEQ ID NO: 1342 - protein, 186 aa, Artificial Sequence
  Synthetic
KEVEDLERTVRTILKRMRELITRNEEEIRRSIEELRDHMVLHEYVNAAGITEMKELKKEGGDDKKRLVEEIKRLLDELRENSKRSSDRAKEIHERNKRHSEESSRTIEKLLKELRDLVRDVERKLRDEDAKRKLDELTKRVEKVVREADERNKRLTKRSKEVLDEVHRANEEALKEVEEVVRRVTK

SEQ ID NO: 1343 - protein, 185 aa, Artificial Sequence
  Synthetic
SAEELLRTIEKRIEDNHRRLEEILEEIARLIEDMLRDHMVLHEYVNAAGITVLDRVRRAGVPEEVLERVRRELERLKKELEELRRRSEEKVKELKRRLEEIRRKLEEEHRDLRRKLEELRRDLGDKEEVVKKLVEDVERELERSLREAEDLLRRVEEVIRTSKKESKDVLEKIERLLRDLERRTR

SEQ ID NO: 1344 - protein, 182 aa, Artificial Sequence
  Synthetic
SELEKTLEDLKRHSEENKKKLEEDLRDMERNLKENRDHMVLHEYVNAAGITDLERRFREGDIDERELERVRRKMEEIKKRLDENVERNRRKAEDIKRKLDENVKRSEDRVKEIKEDIRRRVRDKDKAEELERRLDELVKENREIHERVKKALDDIVKELEELHERLKRRLEEILRRIAETVR

SEQ ID NO: 1345 - protein, 179 aa, Artificial Sequence
  Synthetic
RLEDEVRKMEKEVREEVKRLEDESRKVLEESRRNLRDHMVLHEYVNAAGITRIKDLRRRGLDERVLRELLKRVREVHERNRKLLDEVRRASEKVHEDNRRILEEVRKTVKDVVDKLRRVDAKVVKELIDRVRKILEDVEREVKKSIEEVKEINRRLNEEVKKTIEEVKEIVKEVTERAK

SEQ ID NO: 1346 - protein, 183 aa, Artificial Sequence
  Synthetic
SIREKIRELEERLEEVLRRIEENSERVLREAERVLRDHMVLHEYVNAAGITALEEIRKLPVEDELVRRVKELVERLKRHNKKSSEDVERVVRELKEELKRSSEEVKKAVDRLKEELEKVLRDGGEREVDRVIRKLEDVLRKLEEHNRRVVERLKRLLEELKKHNEDSLRKSEEVLRKLEEDAR

SEQ ID NO: 1347 - protein, 174 aa, Artificial Sequence
  Synthetic
SESDEVIRDLARLLDELARHVDDSVRRMDEVVKRSRDHMVLHEYVNAAGITEVEKKPGDERVERMVAEIERLVAEVLEELKKKYEKLKREVEENLRRLEETVRDIVEKARKVTEKGVSKEKIDRIIRELERILEEAKKKHEDVLRRLEDSLRRVAELLKAALDRLREIVDRLRR

SEQ ID NO: 1348 - protein, 174 aa, Artificial Sequence
  Synthetic
SESDDVIRKLRELLEELRTHVEKSIRDLRKILEDSRDHMVLHEYVNAAGITEVRKKPGDEEVRKTVEEISRRVAENVKRLEDLYRRMEEEVKKNLDRLRKRVEDIIREVEEARKKGVDEEKLKDLIRKLRDILRRAAEAHKKLIDDARESLERAKREHEKLIDRLKKILEELER

SEQ ID NO: 1349 - protein, 172 aa, Artificial Sequence
  Synthetic
SRAETVLKEVTDKIKKLADSSDELLRRNKENIDELRDHMVLHEYVNAAGITEIEKGSVDEETLEELIRRVEAELEAHHRELEKNSREDEKRNRDHHAKLEEEMRRVEERLEREGIDDEVVKRVRDLLDTVRRRNEKVNEDVKRMNDKLRRDNEDVIRRVEKLLRELEEKRRT

SEQ ID NO: 1350 - protein, 178 aa, Artificial Sequence
  Synthetic
SEAEKAKETIDRLADRVRKLLEEIKRSLDDSRRKSRDHMVLHEYVNAAGITEVDAAKRGSVSEEELERLIRKLKKTLDELRRRHEKLVEDLRRNLERIKRRLEELTREMRETLERLAREGLDEEVLRTLEEIIRRLTKELEDVLREYERELRRLEEENKRVIDKTEEEIRRLADRLRR

SEQ ID NO: 1351 - protein, 178 aa, Artificial Sequence; identical to SEQ ID NO: 1350
  Synthetic

SEQ ID NO: 1352 - protein, 179 aa, Artificial Sequence
  Synthetic
SEVEELIKRLAKVLKELVDKVRKVIEDTKELLERLRDHMVLHEYVNAAGITEAKDQPIDDEELKEILDRLRKTLEELEEELKKALEDDREEAKRLVDDARRVLKELEEEVREIRERRGESEELDRRIEKVLKEIEEKIREVIKEWERVHREVEELLKRLIDENRKVLDEIRKLLEEKSK

SEQ ID NO: 1353 - protein, 182 aa, Artificial Sequence
  Synthetic
SELEEIEKKVRELTKRHRELVERVRKTVKELIETNRDHMVLHEYVNAAGITEVRDLERRGEPKEDLKARLEDIIRRLAEDIERVKRETDKLLEELARIIEEVEKEMRETNKELDKEIKDGGLDDKALEEAKRVLAENNEVIKDIKRALDELLKELEKSVRESEERLRRLLEEVKRVIEEVAT

SEQ ID NO: 1354 - protein, 177 aa, Artificial Sequence
  Synthetic
SSEERLRAVIEDLKRLAEESRKRHKELIDELAKAVRDHMVLHEYVNAAGITVVDDIRRGVSEELLKRIEEVLDEIRKELEENIKRIRKVLDELRRTSEENIARIEKVLRELEDLVRKGGSDADTIIEEVKRVLEELARSTEEVEKRVRDAIEELERSSEELARRIKEVLKRLEEETR

SEQ ID NO: 1355 - protein, 184 aa, Artificial Sequence
  Synthetic
DEIRKVVKEITDLLKASNDKNRKVVEEIRDLLRKSRDHMVLHEYVNAAGITDLRRRIDKSGDKETAEDIVRRIIEELKRILKEIEDLARRINREIERLVEEVERDNRDVNRAIEELLKDIARRGGSEDLKRVEERAREVSRRNEESMRRVKEDADRVSEANKEVLDRVREEVKRLIEEVRETLR

SEQ ID NO: 1356 - protein, 176 aa, Artificial Sequence
  Synthetic
STAETVAEEVERVLKHSDDLIKEVEDVNRRVEEEIRDHMVLHEYVNAAGITEVRKGVKGEILAEIEKRLADNSEKVREVAERAKKLLEENTARVKDILRESRKLVKDLLDEVRGTGSEEAAREIIKRLREVNKRTKEKLDELIKHSEEVLERVKRLIDELRKHSEEVLEDLRRRAK

SEQ ID NO: 1357 - protein, 186 aa, Artificial Sequence
  Synthetic
SEVDEIIKELERLLAEIARENERIIRESRKLADEVRDHMVLHEYVNAAGITRLADAVRRKGSESEEVKKLIEDVLREIERLLKRIEEENREVVKRNSELVERVRAINEEILRRVAELVEKIARDIGDKDEVTKVKKVADDVLAEIKKLDDETRRVIEDTNKKIADLDKATRDVVRKVLEEVKKLEK

SEQ ID NO: 1358 - protein, 185 aa, Artificial Sequence
  Synthetic
SEIDEVLTRLRKISKDLNETSDRVNERARKIIDDIRDHMVLHEYVNAAGITRLKREIDKTRDRDVLRRILKEIEDVARRVKEINEELLARVEKVVREVEEINRELVKRSREAVEAVKRLLDRGVSDEDKVERVVREVEKLHEEDRKRLEESTRSVRKLLEELKRELEKSTRSVKALVDELRERVR

SEQ ID NO: 1359 - protein, 177 aa, Artificial Sequence
  Synthetic
SEDEDLDRVAEKLAREHKKSVEEIKRVLKSADEESRDHMVLHEYVNAAGITEVEEARRGNIDEELVERLKKKIEDILRTLEERHKKLIKELREILKRLSDESRRLAEETEKVLEDLERKGVDEEVLKKLAEIVRRVKEENRKVNEEVEKRLRELEEENKKVIEDLKSTVEELVERLR

SEQ ID NO: 1360 - protein, 185 aa, Artificial Sequence
  Synthetic
SSVEELLERLRRISEENKRRIEKLLREVEKVLRELRDHMVLHEYVNAAGITKVKEEIKSGLPEEAVKRVLERVRERVKEVLEEADRLNDEMRRIVTEVEKELDKSDKEVEDAVRDILKKIEEGVRDRETAERARETLKRLLDENRDRSKKVKEEIRRILEDLTRTTERVKREIAKLLKELEDTAR

SEQ ID NO: 1361 - protein, 238 aa, Artificial Sequence
  Synthetic
EEDERLTKRVEEIKRENRELLRRLEEEVKELERKSRDHMVLHEYVNAAGITKLDSGKGSTELLVEELEKLIREILKLSEDHNRTLEEVVRKIEDVLRANLERLKELVDEILKALKERGKGDSEELKRKVEKVARDYERLLRKLREVVKRILDESKRLDEELEERLKEVLKKLEELIKRGGPDKDVLTELKRILDELLKLVEKLIRRNLRLLEELLRLVREILRTSNEILEEILKDARR

SEQ ID NO: 1362 - protein, 238 aa, Artificial Sequence
  Synthetic
SKEDKARELEKRLRDNLKKLEEVVRELAEVLKRNLRDHMVLHEYVNAAGITLLDKLRAGGLPKDELEDLRREVEDVLRRLEDLLRKLKKANDESLTRLEELLRRAEEENRRVLTTLRELLRGNGDDRDLARLVARLVEANNRALEELLRLVAKNVEDNNRVLEELLRLVKELAKRLLGRIRDEDLVRDIRRELKELEERARKILRDDERDLRALEKRIRDIIREDREELERLKERARK

SEQ ID NO: 1363 - protein, 243 aa, Artificial Sequence
  Synthetic
KREDILKKLEDIIRDIIDKLRRILEKVKRLNEDIIRDHMVLHEYVNAAGITLLKRIADKSRDRELEDILRRVLEKLRRSLDKLRDTLRKLKEETDTVLERAERTLKELKDRLEKLLRDGEKVSEEDLVEALKALIDELRKVLEDVIRVSKELVERLLRALREHLETNKRLVKELLDALRKTTGDDEEIKRLKEELERRHRRLEEEVERVARELEKAHRDLERDIRRVAEELKKLLKKLRDDRR

SEQ ID NO: 1364 - protein, 247 aa, Artificial Sequence
  Synthetic
SEKEELLKLIKRVIELLKRVLEEHLRLVEDVIRRLRDHMVLHEYVNAAGITDLKRLLDEVRGDKEELDRIKEKLEEVLERYKRRLEEIKRDLERMLEDYKRELKRIEEDLRRVLEEVERIATRGEGPAEALIDKLRKILERALRELDKLSKKLDELLKKVLEELEKSNREIDKLLKDVLRRVEEGGASEDLLRKAKKVITEVREKLKRNLEDVRRVIEDVKRKSARILEEARRLIEEVERELEKIRK

SEQ ID NO: 1365 - protein, 238 aa, Artificial Sequence
  Synthetic
SEAEKIREALETNLRLLEELIKRLKEILDTHNELLRDHMVLHEYVNAAGITLLEEGGLDEEVLREVKRLVDELRKEARRVLDEHEKLVRKIKKEAEDVARESEEIIKEVEDKLKGLDREELLERVRRVLKKSDDLIAELVRRALKILEELTRLLAELLKKVVEILRRIVELVERVLTKKGAPKEDLERLRRKVEELEDRLRRLLEKLARDSAELMRELERILDRYARESEELDRRLAE

SEQ ID NO: 1366 - protein, 247 aa, Artificial Sequence
  Synthetic
SEAEDLEELIKELAELLKDVIRKLEKINRRLVKILRDHMVLHEYVNAAGITELRKGTVEDKDILRDLERRLREILEESDRLLEELKRRLEEILRKSKELLRRLEEVLREILKRAEEVKRSNLPKEELIKEIVKLLEELLRVIEKILEDNIRLLEELVEVIKEILEKHLRLLEELVRVIERILREVGKDKDEAERRRRELKDKLDRLREEHEEVKRRLEEELTRLRETHKKIEKELREALKRVRDRST

SEQ ID NO: 1367 - protein, 240 aa, Artificial Sequence
  Synthetic
SDKEEIKRRVEKTARDLETEHDKIKKRLEDTVRDIRDHMVLHEYVNAAGITKIEKTLREGDGDATDLVDKLLETVKRLNEEVLRTVKKIADELRRLVEEVLRVLRESNETLARLLEEGNVGDEVRERLEEVLRRTEEIIKTLEEIVKRLLDELRRLVEELRRISKKLKDELDKIKEKGKDEKRLIEEVVRLLRENLDVVRRILEALAKLIKELLEALEEVLRRNKELIRELLRVLDEALK

SEQ ID NO: 1368 - protein, 240 aa, Artificial Sequence; identical to SEQ ID NO: 1367
  Synthetic

SEQ ID NO: 1369 - protein, 248 aa, Artificial Sequence
  Synthetic
DEDRIIEEIARLLEELLRELLELIKKLIETNRRLNRDHMVLHEYVNAAGITLLDRLVKKGISDEKLKRIRERLKRALDDLERLHREINKRLEDLVRELEKLVREILKELKDALEELRRASARAGGEEVLRRLEEIVKKLLDLVRRILERLKEIHKDNVRLLRELNERLTRIVEDLVRLIREILREAGVDEKIAEEIERELEELRRMIKRLHEDLERKLKESEDELREIEARLEEKIRRLEEKLERKRR

SEQ ID NO: 1370 - protein, 251 aa, Artificial Sequence
  Synthetic
DEEEKIRTTLDLLRKLLKVLREILEELIRSNKELNRDHMVLHEYVNAAGITLLKKLADDGGVDEEALRRIKKRLEDLIRTNREIEERIDRESERLAEELRRILRELEKELRRLIEDLKEVLKRGLPREELLRRLKKVVEDVLRILEEVLRVVDELDKENVRLLREWLERNKEIVEEVIRILEDLIRKGGSESEEKVRDTEKKLRDLREKHAEIAKELERLLRENRRRLEELAREAKKVLDELRKRLEDERR

SEQ ID NO: 1371 - protein, 238 aa, Artificial Sequence
  Synthetic
DADELLRRLAEEVERVIREAEDLLRRWKETIKKVLRDHMVLHEYVNAAGITVIRELTKTKGDEELAKLIKDLLDTNEKVNRDLLRLIKKLLKDAERVNRRLLELIEELLEELKRVAKDLGLREEADKKLRDIADRARKELEDYERRLKELLKTVEDALRKAEEDSRKLKRDVEELLERGRLRKDDLEDILRKNLDRLRKLLERLREILRENLEALKKTLKRLEDVVREILEDLKRERK

SEQ ID NO: 1372 - protein, 231 aa, Artificial Sequence
  Synthetic
DKAEVLREALKLLKDLLEELIKIHEESLKRILDLIRDHMVLHEYVNAAGITLLERSGLDERELRKVERMATESLRTIAKLKEELRDLARRSLEKLREDLKRVDDTLRKVEEKVRRTGPSEELIEELIRTIEKLLKEIVRINEEVLKAVRELLKTLLKLSEDVVRRIEEILRKGGVPEEIDRELKRVVEELRRLHEEIKERLDDVARRSEEELRRIIKKLKEVVKEIRKKLK

SEQ ID NO: 1373 - protein, 236 aa, Artificial Sequence
  Synthetic
STREKAKKVLDTLRADNEDMKRVVEKILRALKRTNRDHMVLHEYVNAAGITILKEVGVSEEALKEIEDTLKRVLEEIKRLLDESKKLLEDVEREIREILKTSEELLERIEREIETVGSDEKTLAEILKRLLELNEEMNRRLLKILRDLLRLNEEVIRRLLAVLERLLDALKEALDRGDVPEDLLRKLEEELRRIKEKLRKALEELEREHRELEKELDKLHDESRKEHERIEEELRR

SEQ ID NO: 1374 - protein, 247 aa, Artificial Sequence
  Synthetic
SKAEKLLKDLREALEKVKRRYEELERRLDEVLKEHRDHMVLHEYVNAAGITRIEEGGLPEEELEKLKKLAEKVKELLRELLRLSKELVDRVRELLKRDLDLVRRLVEIALKVLREAREQPNDEKRVEKIKRDLEKKARRVREENERIKRDLKRTADESRKRLEKLLEDLKRELDRLREDLDRGRKDIDERVEELIERLIRIIERLLREVIKSHEKLVRTIERLIEESIRVNEELLEVIERLLDRARK

SEQ ID NO: 1375 - protein, 247 aa, Artificial Sequence; identical to SEQ ID NO: 1374
  Synthetic

SEQ ID NO: 1376 - protein, 231 aa, Artificial Sequence
  Synthetic
SKEEEVEKVLRKWEEILRRLIEENKRANDKIRREYRDHMVLHEYVNAAGITVAERLGVSEEVKRILEKLIKLLEDILEYEKENVERLIELNERILRELKKSVEELKALVTRVRRDGLPESEVRKLVEDVLRKNEELLKEAKKAWRDSIENLKRVLEEVAKLVKTVLREIEEKIDDEDVVRALIEVIERLLRVAEEVIRRILKVNTELMRVDERSIRESLKAISEVLKVLDT

SEQ ID NO: 1377 - protein, 231 aa, Artificial Sequence; identical to SEQ ID NO: 1376
  Synthetic

SEQ ID NO: 1378 - protein, 231 aa, Artificial Sequence
  Synthetic
SKDEELARLLEELVERWRKIVEDLERDHRRLVKEIRDHMVLHEYVNAAGITRIRKNGIDERIVRLIEEIAKIIEEVLKEIVKLVERAVRENVRVLRESVRLVAELVETLARLLRGSDERVTEAIKKVLDTSEDLIRRVIKVNEDILREIAKLVEEVLREAERILTEIKKEGDREEIRRILEELKRIVDDVLRIIARILKLLRDLTRRLAEVAKAVHKLLEELLRKLKEDTR

SEQ ID NO: 1379 - protein, 231 aa, Artificial Sequence; identical to SEQ ID NO: 1378
  Synthetic

SEQ ID NO: 1380 - protein, 237 aa, Artificial Sequence
  Synthetic
KEKEDALKKLEDLARKSREDLERVLRKHKKILDKIRDHMVLHEYVNAAGITDILRKTGTESEILKELARLLREHHEALRRLIEELRRLLEEHHKILEDLAREHKRLLDELIKVVADGVDKDELERIIKELRERDKKLVDDLRKVSEDLLDAVRKLVEDLERISRELLRRVEELAKGIDEELAREVERVIKELLDKSKEILERIERAIDELLKVSEEILKLSEDASEELLKILREFAK

SEQ ID NO: 1381 - protein, 237 aa, Artificial Sequence; identical to SEQ ID NO: 1380
  Synthetic

SEQ ID NO: 1382 - protein, 229 aa, Artificial Sequence
  Synthetic
SKEERLREVAEKHKKDLEDIVKRVDEAAKETARRLRDHMVLHEYVNAAGITDLEKGPDDEKLKKVKKILKDIMDRLAELIKKILKLLKENLEKIKELLRRNLEISEELLKLAKGLSDRDVLETVRRVLEKLDEEWDRVLEDSRRIIETILRELDTLLREVEKLIKEIKDEISGSKEVLDILERAVEVVRRVIKALKEVLERHVDATREVIERVKRVNKRLLEAVREVVT

SEQ ID NO: 1383 - protein, 229 aa, Artificial Sequence; identical to SEQ ID NO: 1382
  Synthetic

SEQ ID NO: 1384 - protein, 241 aa, Artificial Sequence
  Synthetic
SEKELLKEILDRIRELLEDDNRLLKRIVDEIRKLLRDHMVLHEYVNAAGITLLDRIGAPEDVIRELTRALKETEEDVDRVIRTLEKLLKEVLDAHEEVVRKLDRLLKEVERLVEGGDAEEVVRDLLRVVKEILDESKAVIDELARVVDEILKLLEEVDRKLAKVVKEILEDVLRGSGDDEDAVRKIAKIIEELKRLLEDLARDTRRVIEEAKRLLKEWRDRNKEVADTLKKLLEDLIRKIR

SEQ ID NO: 1385 - protein, 241 aa, Artificial Sequence; identical to SEQ ID NO: 1384
  Synthetic

SEQ ID NO: 1386 - protein, 246 aa, Artificial Sequence
  Synthetic
SEREELLERIKEILKRVKDKLDEDLKRLKEILEKLRDHMVLHEYVNAAGITEVREKLERTGRTDELVKEVLDTVRRNLENLKRLVEDILRKLEENVKNLTDLVREILKLITELIKRLEDGGLPKEVLDALRRVLEKLEELLREILERLKRSLEAVKRKIEELLKELERSLDELRRALERIRKEIGDSETAVRAIIRVLEKHLEAVRRVLEELLKVLAEHLETVRELIERLKRVLEEAIEVVERVAR

SEQ ID NO: 1387 - protein, 240 aa, Artificial Sequence
  Synthetic
DREKSVRDIEEDLKRVLDKLRRRVETSKEELKKVLRDHMVLHEYVNAAGITVVRELDRGIDSEVLRAVREIVKRLVEVVRRYNELSEKIIRDLVRVNDRVLELLKRIVKRLIDVVRELEKIGDKEKALRRLEEVVKEVKRRIEELLKELEDVHRELVKILEEVNEDLKRVATEVKEIIKTGIKSSEVAKELDEVIKRLLDNLKENTDRLKEVIDRNLADLRDLAEELRAVIERLLEDARR

SEQ ID NO: 1388 - protein, 243 aa, Artificial Sequence
  Synthetic
SEAERLADEVRKAVKKSEEDNETLVREVEKAVRELRDHMVLHEYVNAAGITRLVDLLRDGQVSDRDLLKELEEVLRRVLEALAENHERTEEILKRWLDRYAEDIERLRKVLKEVIEALKRGGSDDKRIVDELEEILRRNEDVLDKIAKRLRRLLEEDRRLLERIVRELKRLLDDLDRITKEGKSEELVRIAIEVLKRLLEIIEELVRLNNEILERLLKIVRELHKDNIKILEDLLRIIEEVLR

SEQ ID NO: 1389 - protein, 245 aa, Artificial Sequence
  Synthetic
SEKDEVTRRIRELLKEAEETNREAIERIKRLLDRVRDHMVLHEYVNAAGITRLKKVLDRGLQDDEALLKLLIDALREHNRLSTELIKILIDVLRTILKIIKDVLATNIEIARRILDLVRRLAERGGLDDRLVKEVEKLVRTAERLHRDALRKVKRLVEELEKRLRELVKTDHDLVRRLETLLRRGSGSKEDLLREIARILAESLRLIRELLKEIEKIVKEIIELLERLNDELRKIIEAILETTKK

SEQ ID NO: 1390 - protein, 245 aa, Artificial Sequence; identical to SEQ ID NO: 1389
  Synthetic

SEQ ID NO: 1391 - protein, 249 aa, Artificial Sequence
  Synthetic
DAEEVVKRLADVLRENDETIRKVVEDLVRIAEENDRDHMVLHEYVNAAGITIVELLRRGGVPEELLDRLAKVVKSIVEKAEKILERLNRVSKAIAEKLKTIVDELNEVSKEIVKRAEDILRKGKDKETVLRALRTLVKEYADLSKEVLERVERIVREYVKLSDEVVKSLAEIVEELIRIIEDLLRKGNLDEDVKRALEELVSRLRKLLEDVKKASEDIVREVERIVRELAKRSDEILKKLEDIVEKLRE

SEQ ID NO: 1392 - protein, 240 aa, Artificial Sequence
  Synthetic
SKEETLKRLLDELEKRNRETVERLERLLKELEDRNRDHMVLHEYVNAAGITKIEESGLSKELKDTLARILEELRKLLEEYFRKNEELLRLLRKLLDEYARTNEELLRLLEELLDTARRTGGDSELLKRLEDIAREYEKRVRRLLEKLKDILDKYRKTVEELVRKMEEILKEAKKTISRIGSEEVKDIVRAMEEVIRRLIEILRRDVELNLDVAKKLLELLKEDSKLNLDVARELLELLDR

SEQ ID NO: 1393 - protein, 240 aa, Artificial Sequence; identical to SEQ ID NO: 1392
  Synthetic

SEQ ID NO: 1394 - protein, 243 aa, Artificial Sequence
  Synthetic
SEAERTKESLKKVLKALVDLNRELLRKLEENMRELRDHMVLHEYVNAAGITKVREGGIVDKDAEREAERLMRELDKSSEDTARETRKLIEESKKSTRRTEEEARKLTETLDRLAKGGLPREDLLRALVRLLEELARLIEEDVRRNAELVKRHIELVERDVAELLRLIKELVDLLADLAEKGSRTEEIRKIVEEILKEIKELADRYREEVRKSKDKLRSILEDYKRKVDELKERLRELIEEVET

SEQ ID NO: 1395 - protein, 186 aa, Artificial Sequence
  Synthetic
SAEDSIRELLERDERLLEEARKEAKRLNEENERLLERDHMVLHEYVNAAGITLDDIRKKIKGEKLREIEELVRRVKRTIEKLLEEVKKSVEDSSKRIEELLEAVERSVERTKEEIRRLLDEVRKDRKEELVKRVEERIKRLHDENRRLVKEVIEEVEKLIRDNEKLAEDIEREIRRLLKELDEAAK

SEQ ID NO: 1396 - protein, 178 aa, Artificial Sequence
  Synthetic
DEVEKLLRDLEELDRDIERKVRELLKRNKEVLDDIERDHMVLHEYVNAAGITVADVIRKTTDKRTVDKLLKELEKILKEVLDRVRRLLEEAKESLDRSREEIERLLEESKTLVDEVRRAGIDKKEVDKIEKHSRDLIERAKRETDRLLEEAERLMREVVDRVRKILEEAKRLIDEARR

SEQ ID NO: 1397 - protein, 182 aa, Artificial Sequence
  Synthetic
DEAEKLLKELRDLLEESRKDLERLLKELEDLLEESKRDHMVLHEYVNAAGITIKETVERRNEREKLEKLLRELKKVVERLKDNLKDNERRNKEAIERVRKKLKDNERENKKVIEDLRAKLKDLEEVKRKIDRLEEESRRVIEEARKRLEEVEEKSKKIIDDARRALDRIDKELRRVVEETRK

SEQ ID NO: 1398 - protein, 182 aa, Artificial Sequence
  Synthetic
RVEDALRKLLDDVRRLVEEAERRLRTSNDKSRRLVERDHMVLHEYVNAAGITVRDVRRRIRDEDVKRVLEELLKRDHDVVRRVLERIDEMLERNSRLVKRVLEDIRRLLKRVREVVERIKRVRSKVVEEVLKELEELIKTAKKIIEDVLRASEDTIRRLEEIIRKVEEDSKRIIEEIERAAR

SEQ ID NO: 1399 - protein, 184 aa, Artificial Sequence
  Synthetic
SLEEVIKTVRKLLEEVERRLREVVERAERMLEEVRRRDHMVLHEYVNAAGITEKALRDKNVSEEIEEKLRKIKEELERDNEKVNRDNERSVETLRRLLDRVRKEVKDIAKELEERLKEVERKSRDDRIVEKLLRDAERIVKRLRELIEKLREEVEKIVDENRKTVEELRRRNEEIVRRLRREIE

SEQ ID NO: 1400 - protein, 177 aa, Artificial Sequence
  Synthetic
ELREDVERVVDEIRRLVEENVRRIDEVAKDIKRLADRDHMVLHEYVNAAGITIRRLKEEGVTEVVDELREEVRKLSEDNRRHSRELIERVKKLLKELEEHSRDLKRRVKELLEDLKRKGVDERVLKKLKEVIEDVERKSRDALRRLEEAIRRVRRESERVNRELDEVIKRVTEELKK

SEQ ID NO: 1401 - protein, 174 aa, Artificial Sequence
  Synthetic
SEDETIRRIVRTVHEESRKSTEDVRREVERVLRESERDHMVLHEYVNAAGITVEETGISEELEERMRRIIREIREHLKDNLRRVREVIERIERKLEETERRDEKVLREIEKKIRDGDGREEVAREVTKIARDTIRENEEIAKEVREIVERSIKNLEEVAEEVERVVRELIEARR

SEQ ID NO: 1402 - protein, 174 aa, Artificial Sequence
  Synthetic
SRDEKIRDILRRVLKEVRDSTKKVEEDLEDVHRRTERDHMVLHEYVNAAGITVRDEGASEELKRRMEEVVRRIEELLKKLLKEDRDVVKEIRDKLDETRKEMEEVAERIKDKIRRGDGREKVAEEVKRIADRLIDLNRRIAEEVDKIVRDSIKKVEEIVTEVEKIVEKLIRDVR

SEQ ID NO: 1403 - protein, 170 aa, Artificial Sequence
  Synthetic
SEVEDVVRKVEKLVRDLIKHVEENVRRVEEVVRKLIRDHMVLHEYVNAAGITLAKEPGSEDLLRKLEKVLKEIDDKLKELEDRLRDMVRRSRESSEENERRLKRVEDEVRRNGISEEVEKVLREVVKEVEKVNRESREVTRRVLEEAKEMLERVKKIVKEVIEKVRRVVK

SEQ ID NO: 1404 - protein, 173 aa, Artificial Sequence
  Synthetic
SLEELLEEARKTVERLIRESERVLRESEERVRRLIERDHMVLHEYVNAAGITIERVEDEEALKELEKLLREDSKRVKEVLDDLRRDLERNKRRNEKVLRELEELLKRLEELVREGVREEELEKLLREIEERVKEMLKRDEDTLREIERKVKEAVRDSERTLEEIEKRVTEEKT

SEQ ID NO: 1405 - protein, 174 aa, Artificial Sequence
  Synthetic
SELEKVVKEVADLLRRNLEKSKRVLEEVRRRLEENLRDHMVLHEYVNAAGITILELVREGKDKRDLTRLLEEDDKRVKEALDKSRENNERILKEVRRALRESEEDNRRILKEVREKVDSRLLEELEERVRESIERSRRFIEELEKIVEETLTESEKLARASSEITKTVLDEIRK

SEQ ID NO: 1406 - protein, 180 aa, Artificial Sequence
  Synthetic
STEEVLDEIRKLHKTLTEDIKRVLREIEELHRRTIERDHMVLHEYVNAAGITIDDVRTKDTPNVEKLLKDLEKSAKENEEHNERTLREDDRVLKEIRRRATELLKANEEMLRRIEEVMRAGKVDAEELLRESKEAIKEVKRVLEELRKESKRVVDETRKLSEENLEHSERVLRKVEEDLR

SEQ ID NO: 1407 - protein, 180 aa, Artificial Sequence
  Synthetic
SKEEVLREIERLHKETIRRIEEVLREATELHKRLTERDHMVLHEYVNAAGITIEDVRRADTPNVEELLRELKDALDKVRDHNRKTLKKNEDVVREIEKEVRELLKEDEDVLRRIEKVMRDGRVDARELLEESRREVERSEKEVERLLRKSRKVVEEVRKLSEENDREVKKILEEVKRRLD

SEQ ID NO: 1408 - protein, 178 aa, Artificial Sequence
  Synthetic
DDLERVLKEIKKAADKIREDNKRTADKIRKRVKELDRDHMVLHEYVNAAGITIKERVRGREEARKVIEELKKLVDEVRKRNEKSIEELKKLLKEDRDLMRRVIEELEDLVRRLREEVRDDEALRRVEEEVERLIRDLRRVLKETSDRVRELIDKHRRLSEEVEKDVKRLIDELKKKTD

SEQ ID NO: 1409 - protein, 187 aa, Artificial Sequence
  Synthetic
SEKETVRDELRKLVETIRKLLEEDKESDKRLADRIRRDHMVLHEYVNAAGITLEKVLEELRKKVSEDELRKLRKRIEDLRRRDEELNKRSREKLEDLNERNKDSLRRIEDELRKLVEEAREVEKRDNDEERLRKLLERLERVIRDLLRKIEENNKRLRKAIKELLDELRKINKELREVIKKLLDDAR

SEQ ID NO: 1410 - protein, 175 aa, Artificial Sequence
  Synthetic
SEEDELRRLLKEVNERVERLLDEIRKELEKIAEELRRDHMVLHEYVNAAGITVEENRVDEEIKKDAERALTELKEEHERLDREAKKDLDRIRKELERLEEEHRRVSERIEEVLDKESDKTEDIAREIRELMERTRRVIEEIKKELRDILEKLRRVSEELNKKLDEILKRIEDRTR

SEQ ID NO: 1411 - protein, 171 aa, Artificial Sequence
  Synthetic
SEKEKVIKEARELLERLRKRLKDVNDDVTRLLDELRRDHMVLHEYVNAAGITLEEEVPVEDVIRELKRRLEEVDKKNRDILETLKRELDEVSRRTREELEKLRKELEEVEKAGLPAEELKRVADRLRRRLERLVEENERVVKKILDEIRRSVEENKRIVDKVRKDLDERRK

SEQ ID NO: 1412 - protein, 177 aa, Artificial Sequence
  Synthetic
SAIEKVKEVVERVLETVRDSVRRSHEESKRLIDKVRRDHMVLHEYVNAAGITVRRKGIPERMVEKLERDLEELLKEIKDTIDRIEEELRTSNRRLKETNDEIAKRLEELLRELSRDRDKDAVEDVLRRIEELIRDLNKKNDDNVRRVKEVIDRAEKLVRDLLREIRKLIEKLIRDTE

SEQ ID NO: 1413 - protein, 177 aa, Artificial Sequence
  Synthetic
SVLEEVRRRVEELLKTVKESVDRSHERSERLIEEVRRDHMVLHEYVNAAGITVREKGIPEDRVKRIEDKLREELERLERENRKIEEDLKRSNDELRRENERIAERLEELLRELSRDTNDKVARDVLEEIERLIREANERNKRNLEDVERVIRELNKENERVLREVEKKIEKLIRETE

SEQ ID NO: 1414 - protein, 183 aa, Artificial Sequence
  Synthetic
KDAEDLERRVRELVEENNRVSKRLAEEVTRLVKENERDHMVLHEYVNAAGITLLDMKRRGEVREEEVKRVLREIEELLREITEHSKEVLKTIEKLLRDSLEHSRRVLEEIERLLETILRKSKDSERLKKLVDELRETLERSLRENEKVADELRKRAEKSLEDVKRVVDELRKIVDDVLKRVED

SEQ ID NO: 1415 - protein, 183 aa, Artificial Sequence
  Synthetic
SEIEKLVEDVRKLVEDNLRHSEEVHRRNRRLIEENERDHMVLHEYVNAAGITLRELAERGEIREEEARKVLEEIKRLLDEIRRHSEEVLKEIERTLKENLKHSEEVLRRIEERLEDIKRKDKDSERVRTLVDRLREELKRSLDESEKLNRESRKRVTRSLEKVDDLVRELEKLARKVLEEVKT

SEQ ID NO: 1416 - protein, 181 aa, Artificial Sequence
  Synthetic
EEIERALREMRELSRTHKELVEKILRDIAELAKTHERDHMVLHEYVNAAGITIADEIRKEDKKEELKRKIDELRRRAEELLKESKEHLKRLEDTVRELIERLKETLKKVEEDLKRILEKLEKSRELDEIAKDVKRLIDENRELLKRVEDEVRRLIRKLEELNRRTEEEVKKLIKKLEDDLK

SEQ ID NO: 1417 - protein, 174 aa, Artificial Sequence
  Synthetic
SEIEELEKRIDELLKELRDLSRRIAEEVKRLLEELKRDHMVLHEYVNAAGITLKRKGVPEEELRRVEEEVERVVRESRKLNKETEDELRRLLEEIKESNDRVEKRARELKKLLRDGKDVEEVLRRLEKLVREDKERLKKVLKDARDLIKKDKDLNEKLSRELEKLVRELEERAR

SEQ ID NO: 1418 - protein, 174 aa, Artificial Sequence
  Synthetic
DELRDVKRELDRLLRENEEIVERIAETVRRLLEELKRDHMVLHEYVNAAGITLRKRGVPEKELKEVADTLRKLLKDIERSNKEVEDRLRKLLEEIKESTDRLREELEEVEKLLRGGKDVETVLRRVRELSRDNKRRMRRVLEEAKRLAKEDKERIDKIRKEIEELIKRLKDKAT

SEQ ID NO: 1419 - protein, 174 aa, Artificial Sequence
  Synthetic
DEEEDLERRIKKLLDENRELLKRIAEELRRLLEELRRDHMVLHEYVNAAGITLKDRGVPEKDLRDVAEKVKKVLKESEDSNRDVKRKLEKLLRDLERSTERLEREARKVRKLLRDGKDIETLLRELEKLSRDNKELLKKIEKEIRDLIKEDKERNRELSERLRKLVEELKKKAT

SEQ ID NO: 1420 - protein, 174 aa, Artificial Sequence
  Synthetic
REIEEAAKDLDRLLEENKKLVKEVEEELRRLLKENRRDHMVLHEYVNAAGITLRRRGVPEEELKEVEERARRVIEESRRSSKELEKRLRELLEELRRSTKELEDRLREIKKLLRNGKDVEEVLRRVRKLSRENKEKIRKILEDVKKLSEDNKRRNEELSRRVKTLVDEIKKRAT

SEQ ID NO: 1421 - protein, 177 aa, Artificial Sequence
  Synthetic
SEAEKVVEELKKLLREVEKKIRDHTEDVKRILEELERDHMVLHEYVNAAGITLKDKNSDDDTVRKVKEELDRSHEKLREELRKVAKELKESNEELERDLKRLVEEAEDRLRRLKDRVSEKVLRELEKILEDIKRTLDKLLRENRETLKRIEDRLRELLEENRKLLEKIERELRERSR

SEQ ID NO: 1422 - protein, 182 aa, Artificial Sequence
  Synthetic
DELEEVVRRVRELSRTVKEELREVIERVRELSERVKRDHMVLHEYVNAAGITVMKRVRDSGLDKSKLEKLEDESRRVLDKSREILRKNEEDNRRLNKELEEILKKNEDDNEDVRRKVDEVTRKGKDAEEVLREVEKVVEDSRRSAKDALKRVEDRVRESDKSVRELLEENRKVVEDIKRRVD

SEQ ID NO: 1423 - protein, 174 aa, Artificial Sequence
  Synthetic
EELERILDKVRKVIEEVRKRLRDDLRTVEKVLKETERDHMVLHEYVNAAGITVEEAARRGRDRREIKEELKKVLDDLRELLRALEEKNRRVNKENEDSLRKIEEDLRDVLRKLEEEIKGREVLRKVRELLRTIREEVERVLRKSNELSTRIKKRIDDVLETLERLLKELDDKLR

SEQ ID NO: 1424 - protein, 178 aa, Artificial Sequence
  Synthetic
SSKDEIRRRVEEVVERSDEIVKRSREHVKTVVDELDRDHMVLHEYVNAAGITLDKIRKDGGSEETLKRVLDELREILKELKEEVKKVKRKLEKVVKENRDTIREVEERNRKILDELRKRGVEERALREVEEISRKSEEKLRRVLKESEDIAKEAEDRLKTVLERVERIADEVLKRLTK

SEQ ID NO: 1425 - protein, 178 aa, Artificial Sequence
  Synthetic
SKVEKLEEEIARLVERSRRLVEELKKEVTKVKEKVDRDHMVLHEYVNAAGITLRDIKRRGGSEEVLRRVTEELKKVLEDNRRVIEEVLRDLERILEELKRKAEEVTKRNRDDLKRLRDSGVDEEVLRRVEETSDRSEKELRTVLRDVTEDIKRIAEELKKALEDSTEIIRRAEDELRT

SEQ ID NO: 1426 - protein, 182 aa, Artificial Sequence
  Synthetic
SDADRVAEELKKLVEDSRRENERVIEESKRLVKENERDHMVLHEYVNAAGITLRDILEKEKDKKTLDDIVREILERLKRLLEKVEDENRKSHEENKRLLEDVKRKNKRISDELKRLLEEIERRNVDVDKVRETVKRLLEENKRVMEKTEEVAKKSSEDIKRVADETRRRAEELLKEVDELRK

SEQ ID NO: 1427 - protein, 182 aa, Artificial Sequence
  Synthetic
DEVREVAERLRRLVDESRKRNEEVIKESEALVDRVRRDHMVLHEYVNAAGITLEKDIRRLKDKKTVEKIIREVLKKIDELLKRVERTNREISKENKRLLDEVRKTNEEISRRLKKLLEDIRRRNVDVETIERVVRELLEENKEVLRKTEEMVKRSTETNKRLLERSKEVADRLRERIKEAAK

SEQ ID NO: 1428 - protein, 175 aa, Artificial Sequence
  Synthetic
SEVDEVLREAKRIVDEVHKDNERATEESRRLVKKVHRDHMVLHEYVNAAGITVKDANIDEKLVTEILKEIEEALKEAARRNKEVKDRLRELSRRVSERNREILEELKERLDRVRERRKDVKELEREVEKLLKRIEESLRRHRKENKRLLEELDRSLRELAKIVKEVLDEIRERTR

SEQ ID NO: 1429 - protein, 175 aa, Artificial Sequence
  Synthetic
SEMDDVLKKLAETVKRIIERLKKLTDDSRRLVEEVHRDHMVLHEYVNAAGITAEERNIDEKDVRKLLEDLKKKSEEVAERNKRILDTLREISKRAEDEVRKVLKELEKTLKELEDRRPDVRELSEEVKKLLDEVRKALKRHKDENDKLLKEIEDSLRRHKEENDRLLEKLKESTR

SEQ ID NO: 1430 - protein, 178 aa, Artificial Sequence
  Synthetic
SEEEKLKEVKDRIREVLRKLEEHTDKVKKEVEKVLRRDHMVLHEYVNAAGITLERLRRKKKDAEDLLRELEKIIEEIERELDRVLEENDKMAEEWKKLLDKVLDDNRKSIRDIEKELDDREPTDELVTEVEKLLRDDEETNRDVVKKVREAVKKDADTNRKVIEEVKKVLEDAARRLD

SEQ ID NO: 1431 - protein, 186 aa, Artificial Sequence
  Synthetic
SRVDEVIERLERLLRELDKINRDMIEDDKRLNTELNRDHMVLHEYVNAAGITLEEIRKKLSDEKTLEEIIERVERRLEELIERSKRRNREILERSKELIERSKKTNEEILRRAEELIKRLREEVKDIKEALDKIRRLEERARRVIEELDEKNRRALERSKENVKRLDERNERLRKELEEKVRRLRK

SEQ ID NO: 1432 - protein, 183 aa, Artificial Sequence
  Synthetic
SEVDEVLERIKRLLERLAEHSDKVVRDIEKLLDDNRRDHMVLHEYVNAAGITLEEMRRRGDLREELLERVVREVEKEIRDIKRKNKRSVETVEKLVRDDRKELKRALEDVERLIRELETRLKDKEELRRKLEKVLREAEKVIDELLKKTDEVLKRARETIEDLNRKLDKVLKEVRDKLDRLRD

SEQ ID NO: 1433 - protein, 184 aa, Artificial Sequence
  Synthetic
ELIKKARKDVEEVRERSERLVDELRKRNKKLADESRRDHMVLHEYVNAAGITIEDLLRKRRTKDVLKEIEDLVRELERELRRVVKESSDKVRKLIRENEKVVEESSRLFRDLVEKLRRVVEERNDKKLMEEVERLIKRLEDVNEKSERDVREINKESERVNEETEREVEDAIRKLREVLRRAKK

SEQ ID NO: 1434 - protein, 186 aa, Artificial Sequence
  Synthetic
KEVEDLERTVRTILKRMRELITRNEEEIRRSIEELKRDHMVLHEYVNAAGITMKELKKEGGDDKKRLVEEIKRLLDELRENSKRSSDRAKEIHERNKRHSEESSRTIEKLLKELRDLVRDVERKLRDEDAKRKLDELTKRVEKVVREADERNKRLTKRSKEVLDEVHRANEEALKEVEEVVRRVTK

SEQ ID NO: 1435 - protein, 176 aa, Artificial Sequence
  Synthetic
REAEEAKEEVEELNRRNKKELDDARRRVDELDKRNKRDHMVLHEYVNAAGITLERVKEEGRSDDRLREKIERMLKTSADELERLKEENKRALRDLAERLRELIERNRRKLEEITRRTVPDKDVLKRLAELIKESIRELERVLEELAEKIDRSLKELDDVLRKNETDLKRVIEDLKR

SEQ ID NO: 1436 - protein, 186 aa, Artificial Sequence
  Synthetic
SEIEKLIEELRRELEKVKDELERSIEEMDRELDDVRRDHMVLHEYVNAAGITVTERTKRGDRPEEVLRKELEDIKRKLRRILEEHHEKIRRIKEKLRRENKRVRDELKRIKDEIDEKVKDVRRKGADEELLKRLEEVAEDVKRALEELLKKHTRVVERVEKALDELDKELERIVREAEKELDRREK

SEQ ID NO: 1437 - protein, 179 aa, Artificial Sequence
  Synthetic
RLEDEVRKMEKEVREEVKRLEDESRKVLEESRRNLDRDHMVLHEYVNAAGITIKDLRRRGLDERVLRELLKRVREVHERNRKLLDEVRRASEKVHEDNRRILEEVRKTVKDVVDKLRRVDAKVVKELIDRVRKILEDVEREVKKSIEEVKEINRRLNEEVKKTIEEVKEIVKEVTERAK

SEQ ID NO: 1438 - protein, 183 aa, Artificial Sequence
  Synthetic
SIREKIRELEERLEEVLRRIEENSERVLREAERVLKRDHMVLHEYVNAAGITLEEIRKLPVEDELVRRVKELVERLKRHNKKSSEDVERVVRELKEELKRSSEEVKKAVDRLKEELEKVLRDGGEREVDRVIRKLEDVLRKLEEHNRRVVERLKRLLEELKKHNEDSLRKSEEVLRKLEEDAR

SEQ ID NO: 1439 - protein, 182 aa, Artificial Sequence
  Synthetic
SIEDLVRELKKKVDEVAEDLRRKVREALERSRENIDRDHMVLHEYVNAAGITVDKLRKETREEEVKDILRRVLELSKRIVEESKEILDRVLELSKKVVDDIEEIIRRVEETVKEVLTRLSRVDDKVVKKLIKEVDDILREVTKLVEKLIRELEDINRKVNERNRRLAEESRKILDEVEKRVR

SEQ ID NO: 1440 - protein, 179 aa, Artificial Sequence
  Synthetic
SKAEEVEELVKKLLAEVKKSLDDVRRTVEKLLREVRRDHMVLHEYVNAAGITLKDLKDDGQDERAVRRVVEEIKELLDRNNEDSKRVVKEIRKLLDENDKTSKRVVEEIKRLLDEVRKEGKISEEKVEKLERDVRRALERDTRENKKLEDRVETALREDKKRNDDLREDVKRVLEEIRT

SEQ ID NO: 1441 - protein, 177 aa, Artificial Sequence
  Synthetic
SAADEVVERMKELVATVKRENDEVVKELKKLVKELERDHMVLHEYVNAAGITLARRVGKDKREVVEEVRRTSKELVERNEETAKRVDDLVRRLVEENRRSVTEVEELVKELVKELRRGSGSEDLVREVEKRVRDIVEESRKLAEETRKAVEDIIEKSKRIAEDTLEKNKEMVERLER

SEQ ID NO: 1442 - protein, 174 aa, Artificial Sequence
  Synthetic
SESDEVIRDLARLLDELARHVDDSVRRMDEVVKRSTRDHMVLHEYVNAAGITVEKKPGDERVERMVAEIERLVAEVLEELKKKYEKLKREVEENLRRLEETVRDIVEKARKVTEKGVSKEKIDRIIRELERILEEAKKKHEDVLRRLEDSLRRVAELLKAALDRLREIVDRLRR

SEQ ID NO: 1443 - protein, 174 aa, Artificial Sequence
  Synthetic
KEVEDAVKELEDLLRANEDKTRSIVEDMRASNKDLERDHMVLHEYVNAAGITLRRAGVPRDSLKRLAEDVERVTRESRELLERVHRADRELIERLKESNERLRRAIEEIRKAIKGGSDIKTLLDRVRKLAEEDAERLDRLRRESEELNERVRRVDKKLLEEIRRKAKKVEDDTR

SEQ ID NO: 1444 - protein, 184 aa, Artificial Sequence
  Synthetic
DEIRKVVKEITDLLKASNDKNRKVVEEIRDLLRKSKRDHMVLHEYVNAAGITLRRRIDKSGDKETAEDIVRRIIEELKRILKEIEDLARRINREIERLVEEVERDNRDVNRAIEELLKDIARRGGSEDLKRVEERAREVSRRNEESMRRVKEDADRVSEANKEVLDRVREEVKRLIEEVRETLR

SEQ ID NO: 1445 - protein, 186 aa, Artificial Sequence
  Synthetic
SRVEEIIEDLRRLLEEIRKENEDSIRRSKELLDRVKRDHMVLHEYVNAAGITIEKEVREKGSESEEVKKALRAVLEELEKLLRRVAEINEEVLRRNSKLVEEDERRNREVLKELARLVEELIREIGDEDKARKVAEVAEKVLRDIDKLDRESKEAFRATNEEIAKLDEDTARVAERVKKAIEDLAK

SEQ ID NO: 1446 - protein, 186 aa, Artificial Sequence; identical to SEQ ID NO: 1445
  Synthetic

SEQ ID NO: 1447 - protein, 181 aa, Artificial Sequence
  Synthetic
SEVDDVLRRLEELIKTLEDINAKSLEDIKKLIDDLARDHMVLHEYVNAAGITLREAKKGIDSREAEEIAKRVLEELKRTSDDLRKKVERVDEDLRRLLRENHERNKKILRDLERLLRDAARRGVPKEALDRMREEIRRLEEESRKSDETIERLIRELRRRVEEVLKTSTDLIRELEEEVKK

SEQ ID NO: 1448 - protein, 183 aa, Artificial Sequence
  Synthetic
SKLEEVEKAVRKVIEDSRRVNEEVNRRSEEVVRELERDHMVLHEYVNAAGITARRVLKGSGDERLAAEVERIIEEIRELNERDRKRVEEIRKEIEDLNRDLNRRSKESEDRLRKLLEDATRGGVTKEADEVVERAERISEENKRRVEDVARKSKELVEDVRRHSEEVVRRVEELVKEVEERVR

SEQ ID NO: 1449 - protein, 238 aa, Artificial Sequence
  Synthetic
EEDERLTKRVEEIKRENRELLRRLEEEVKELERKSERDHMVLHEYVNAAGITLDSGKGSTELLVEELEKLIREILKLSEDHNRTLEEVVRKIEDVLRANLERLKELVDEILKALKERGKGDSEELKRKVEKVARDYERLLRKLREVVKRILDESKRLDEELEERLKEVLKKLEELIKRGGPDKDVLTELKRILDELLKLVEKLIRRNLRLLEELLRLVREILRTSNEILEEILKDARR

SEQ ID NO: 1450 - protein, 245 aa, Artificial Sequence
  Synthetic
TEEEVLRKVEKLIKDLLDVLRDLLRASEEVVREALRRDHMVLHEYVNAAGITSRALSGGSRESVESALAKNEERLKKILEDADRVLDKWRRLLEELSKKAKAVLDEVRKRLEEIKREVPETEKLRTLLTILEEILRALEKIIRDILRINERLLEKLKRILERLRETNREIDERIRKLVEEARGGSEEKLRRDLTETKKELEKRHEDLRRELEKLLRDYKRELEEIERALEEIEKTLKRRADETRR

SEQ ID NO: 1451 - protein, 234 aa, Artificial Sequence
  Synthetic
SAKETIRKLIEENKDIIRKLAEKLKRLLEESERIAERDHMVLHEYVNAAGITLRRVGSGIDEELLKELEKELARLEEELKEILDRVRDLHRRLAEEIRKILEESKKLNEELEDRLRKDGDVEELLELLERVHATDVRLLRELLKLLKKVHEDVVSLLERLLELLKRVLDRIVEELGLSDKELEKLLEDLEREIRRLAKRLKELSDRLEEKIRKIKRELDDLSARLREKIERTRK

SEQ ID NO: 1452 - protein, 238 aa, Artificial Sequence
  Synthetic
SKEDKARELEKRLRDNLKKLEEVVRELAEVLKRNLERDHMVLHEYVNAAGITLDKLRAGGLPKDELEDLRREVEDVLRRLEDLLRKLKKANDESLTRLEELLRRAEEENRRVLTTLRELLRGNGDDRDLARLVARLVEANNRALEELLRLVAKNVEDNNRVLEELLRLVKELAKRLLGRIRDEDLVRDIRRELKELEERARKILRDDERDLRALEKRIRDIIREDREELERLKERARK

SEQ ID NO: 1453 - protein, 244 aa, Artificial Sequence
  Synthetic
SAEETLRRITEESKRVLEEITKKYEDLERESREVLRRDHMVLHEYVNAAGITLTKGGDDKDEVLTVLEKVLDELLKLHRENLRVIKELLRKVLEVDRENLEVLKRLLEKARDLLRRSGRDEKDLKKLEDELRKVKEELEKKHEASKRDIEDLERELDKVTEEVERLLRKLKEELRRAAEGSDEDRERLARLLKALADKLIRVLEEILKINEELNRKIIKFARENLERNRRVNKKVIEVLREAAR

SEQ ID NO: 1454 - protein, 250 aa, Artificial Sequence
  Synthetic
STEEILKRVKEILDELAKELRDIIRESLRTIEELLDRDHMVLHEYVNAAGITVKTIKDGVKDSEELLRRLKRLLEDLRRAHEELLKRLKEAVDEHRDRLRKILEELERVLKELRKRIEELRRSGDRISEKDVLRKLEEVLRKALEILERLLKKIRESARELLKIIEEVLDANIKVMEEALKTIKELLKDGPDEVKRRLEEKERRIRTRYEELRRRLRKRVKDYEDKLREIEKKVRRDAERIEEELERAKK

SEQ ID NO: 1455 - protein, 238 aa, Artificial Sequence
  Synthetic
SEAEKIREALETNLRLLEELIKRLKEILDTHNELLRRDHMVLHEYVNAAGITLEEGGLDEEVLREVKRLVDELRKEARRVLDEHEKLVRKIKKEAEDVARESEEIIKEVEDKLKGLDREELLERVRRVLKKSDDLIAELVRRALKILEELTRLLAELLKKVVEILRRIVELVERVLTKKGAPKEDLERLRRKVEELEDRLRRLLEKLARDSAELMRELERILDRYARESEELDRRLAE

SEQ ID NO: 1456 - protein, 238 aa, Artificial Sequence; identical to SEQ ID NO: 1455
  Synthetic

SEQ ID NO: 1457 - protein, 242 aa, Artificial Sequence
  Synthetic
SEKERLMRLLDKLKDLNRRLVERIKELLDKALELHKRDHMVLHEYVNAAGITVERGGVPEELLTRIDELIKKLEDEARKISKEVKRLIDELKKRLEDIHREVDRLIRELKETLKGVTDKDELLRRVAEVLERIARLSEELIREVKEVLEKIVELSRELLKRVLDVLRRIAELLEDALRKGNVSEETVRRLREALKKLEDDLRKIERDAEREYKKLKDELEELTERYRREIRKLKEELKADRK

SEQ ID NO: 1458 - protein, 242 aa, Artificial Sequence; identical to SEQ ID NO: 1457
  Synthetic

SEQ ID NO: 1459 - protein, 247 aa, Artificial Sequence
  Synthetic
SEAEDLEELIKELAELLKDVIRKLEKINRRLVKILERDHMVLHEYVNAAGITLRKGTVEDKDILRDLERRLREILEESDRLLEELKRRLEEILRKSKELLRRLEEVLREILKRAEEVKRSNLPKEELIKEIVKLLEELLRVIEKILEDNIRLLEELVEVIKEILEKHLRLLEELVRVIERILREVGKDKDEAERRRRELKDKLDRLREEHEEVKRRLEEELTRLRETHKKIEKELREALKRVRDRST

SEQ ID NO: 1460 - protein, 247 aa, Artificial Sequence; identical to SEQ ID NO: 1459
  Synthetic

SEQ ID NO: 1461 - protein, 240 aa, Artificial Sequence
  Synthetic
SDKEEIKRRVEKTARDLETEHDKIKKRLEDTVRDIKRDHMVLHEYVNAAGITIEKTLREGDGDATDLVDKLLETVKRLNEEVLRTVKKIADELRRLVEEVLRVLRESNETLARLLEEGNVGDEVRERLEEVLRRTEEIIKTLEEIVKRLLDELRRLVEELRRISKKLKDELDKIKEKGKDEKRLIEEVVRLLRENLDVVRRILEALAKLIKELLEALEEVLRRNKELIRELLRVLDEALK

SEQ ID NO: 1462 - protein, 240 aa, Artificial Sequence; identical to SEQ ID NO: 1461
  Synthetic

SEQ ID NO: 1463 - protein, 248 aa, Artificial Sequence
  Synthetic
DEDRIIEEIARLLEELLRELLELIKKLIETNRRLNERDHMVLHEYVNAAGITLDRLVKKGISDEKLKRIRERLKRALDDLERLHREINKRLEDLVRELEKLVREILKELKDALEELRRASARAGGEEVLRRLEEIVKKLLDLVRRILERLKEIHKDNVRLLRELNERLTRIVEDLVRLIREILREAGVDEKIAEEIERELEELRRMIKRLHEDLERKLKESEDELREIEARLEEKIRRLEEKLERKRR

SEQ ID NO: 1464 - protein, 238 aa, Artificial Sequence
  Synthetic
DADELLRRLAEEVERVIREAEDLLRRWKETIKKVLDRDHMVLHEYVNAAGITIRELTKTKGDEELAKLIKDLLDTNEKVNRDLLRLIKKLLKDAERVNRRLLELIEELLEELKRVAKDLGLREEADKKLRDIADRARKELEDYERRLKELLKTVEDALRKAEEDSRKLKRDVEELLERGRLRKDDLEDILRKNLDRLRKLLERLREILRENLEALKKTLKRLEDVVREILEDLKRERK

SEQ ID NO: 1465 - protein, 231 aa, Artificial Sequence
  Synthetic
DKAEVLREALKLLKDLLEELIKIHEESLKRILDLIDRDHMVLHEYVNAAGITLERSGLDERELRKVERMATESLRTIAKLKEELRDLARRSLEKLREDLKRVDDTLRKVEEKVRRTGPSEELIEELIRTIEKLLKEIVRINEEVLKAVRELLKTLLKLSEDVVRRIEEILRKGGVPEEIDRELKRVVEELRRLHEEIKERLDDVARRSEEELRRIIKKLKEVVKEIRKKLK

SEQ ID NO: 1466 - protein, 247 aa, Artificial Sequence
  Synthetic
SKAEKLLKDLREALEKVKRRYEELERRLDEVLKEHERDHMVLHEYVNAAGITIEEGGLPEEELEKLKKLAEKVKELLRELLRLSKELVDRVRELLKRDLDLVRRLVEIALKVLREAREQPNDEKRVEKIKRDLEKKARRVREENERIKRDLKRTADESRKRLEKLLEDLKRELDRLREDLDRGRKDIDERVEELIERLIRIIERLLREVIKSHEKLVRTIERLIEESIRVNEELLEVIERLLDRARK

SEQ ID NO: 1467 - protein, 239 aa, Artificial Sequence
  Synthetic
SERELIERWLELHKEILRLIRELVERLLKLHREILDRDHMVLHEYVNAAGITARKLGLDKEAKDELREIAKRVEDKLEKLERESRKVEEDLKRKLKELTDESDTVEKRVRDVVRRGTQSREEIAEELLRLDRKLLKAVEELLKEILDLNKKLLDDVRAILEETRRVLEKLLDRVRRGERTDDERRTLTELLKRMEDILEKVERTLKKLLDDSARMAEEVKKTLKELLERSEKVAEDVRK

SEQ ID NO: 1468 - protein, 246 aa, Artificial Sequence
  Synthetic
KEIEETLKELEDLNREMVETNRRVLEETRRLNKETVRDHMVLHEYVNAAGITLVDDVRKGPTSEELKRLLAELEELLARVVRRVEELLKKSTDLLERAVKDSADALRRSHEVLKEVASRVKRAKDEGLPREEVLRLLRELLERHAKVLKDIVRVSEKLLREHLKVLREIVEVLEELLERILKVILDTTGGDKAVEELEKALEEIKRRLKEVIDRYEDELRKLRKEYKEKIDKYERKLEEIERRERT

SEQ ID NO: 1469 - protein, 231 aa, Artificial Sequence
  Synthetic
SKEEEVEKVLRKWEEILRRLIEENKRANDKIRREYERDHMVLHEYVNAAGITAERLGVSEEVKRILEKLIKLLEDILEYEKENVERLIELNERILRELKKSVEELKALVTRVRRDGLPESEVRKLVEDVLRKNEELLKEAKKAWRDSIENLKRVLEEVAKLVKTVLREIEEKIDDEDVVRALIEVIERLLRVAEEVIRRILKVNTELMRVDERSIRESLKAISEVLKVLDT

SEQ ID NO: 1470 - protein, 231 aa, Artificial Sequence; identical to SEQ ID NO: 1469
  Synthetic

SEQ ID NO: 1471 - protein, 247 aa, Artificial Sequence
  Synthetic
RDRDVLRKVKAEIEELVARIEKVSRDALSEVKRLLDRDHMVLHEYVNAAGITLRKIRDTRGDDEVVKETEEVLRDNHRLLEELIRRLIKVLEEWLRRHKKLLDEIRELLKEILRLVKESGVSEDLLRRLKRVIEELDKKLKESEEKLRRVVEKAKEDLKAVLEEHRKVLEDLKRALEEVREKLRERGSEEVVEELLRMLKRVAEEMKRVHDDLSRAVEKVVRDVVRVDKELLDELARILRRLEEVIT

SEQ ID NO: 1472 - protein, 231 aa, Artificial Sequence
  Synthetic
SKDEELARLLEELVERWRKIVEDLERDHRRLVKEIRRDHMVLHEYVNAAGITIRKNGIDERIVRLIEEIAKIIEEVLKEIVKLVERAVRENVRVLRESVRLVAELVETLARLLRGSDERVTEAIKKVLDTSEDLIRRVIKVNEDILREIAKLVEEVLREAERILTEIKKEGDREEIRRILEELKRIVDDVLRIIARILKLLRDLTRRLAEVAKAVHKLLEELLRKLKEDTR

SEQ ID NO: 1473 - protein, 231 aa, Artificial Sequence; identical to SEQ ID NO: 1472
  Synthetic

SEQ ID NO: 1474 - protein, 238 aa, Artificial Sequence
  Synthetic
SEIEDVIRRLRKILEDLERVSEKLLREIKKILDEARRDHMVLHEYVNAAGITAVRVFRDGSGSKEELAKLVEELIRELAKLAKEVDEIHKRIVERLKALVEDAERIHRKIVETLEEIVRGVPSEELKRVVEAIVEVIKEHLKVLADVIRRIIKAIEENAETIKRVLEDIVRVLELVLRGEGSIEDLVREVERLIKRIEDSLRELEKTVRELLKRIKEASDKVREDVDRLIKELKEAAD

SEQ ID NO: 1475 - protein, 229 aa, Artificial Sequence
  Synthetic
SKEERLREVAEKHKKDLEDIVKRVDEAAKETARRLERDHMVLHEYVNAAGITLEKGPDDEKLKKVKKILKDIMDRLAELIKKILKLLKENLEKIKELLRRNLEISEELLKLAKGLSDRDVLETVRRVLEKLDEEWDRVLEDSRRIIETILRELDTLLREVEKLIKEIKDEISGSKEVLDILERAVEVVRRVIKALKEVLERHVDATREVIERVKRVNKRLLEAVREVVT

SEQ ID NO: 1476 - protein, 229 aa, Artificial Sequence; identical to SEQ ID NO: 1475
  Synthetic

SEQ ID NO: 1477 - protein, 241 aa, Artificial Sequence
  Synthetic
SEKELLKEILDRIRELLEDDNRLLKRIVDEIRKLLERDHMVLHEYVNAAGITLDRIGAPEDVIRELTRALKETEEDVDRVIRTLEKLLKEVLDAHEEVVRKLDRLLKEVERLVEGGDAEEVVRDLLRVVKEILDESKAVIDELARVVDEILKLLEEVDRKLAKVVKEILEDVLRGSGDDEDAVRKIAKIIEELKRLLEDLARDTRRVIEEAKRLLKEWRDRNKEVADTLKKLLEDLIRKIR

SEQ ID NO: 1478 - protein, 241 aa, Artificial Sequence; identical to SEQ ID NO: 1477
  Synthetic

SEQ ID NO: 1479 - protein, 240 aa, Artificial Sequence
  Synthetic
DREKSVRDIEEDLKRVLDKLRRRVETSKEELKKVLKRDHMVLHEYVNAAGITVRELDRGIDSEVLRAVREIVKRLVEVVRRYNELSEKIIRDLVRVNDRVLELLKRIVKRLIDVVRELEKIGDKEKALRRLEEVVKEVKRRIEELLKELEDVHRELVKILEEVNEDLKRVATEVKEIIKTGIKSSEVAKELDEVIKRLLDNLKENTDRLKEVIDRNLADLRDLAEELRAVIERLLEDARR

SEQ ID NO: 1480 - protein, 240 aa, Artificial Sequence; identical to SEQ ID NO: 1479
  Synthetic

SEQ ID NO: 1481 - protein, 252 aa, Artificial Sequence
  Synthetic
SLEEITKRLLELVEENLARHEEILRELLELAKRLAKRDHMVLHEYVNAAGITLKLLEDNGSSEEDLKRLLKEVIEELRAVVKRVKDKWDEVVKRIEDLVKKLKELHDDTLRKLRELVRKIVTDISESGGEAEKVKRVVEKILELVERLAKVVKESVEKLLEILRELAEVSKRVAEALLRLLEELVRVIRIKDERTLREVVRKVLEEAKRLLDELEEVHKRVKKELEDIIEENRRVVKRVRDELREIKRELDE

SEQ ID NO: 1482 - protein, 252 aa, Artificial Sequence; identical to SEQ ID NO: 1481
  Synthetic

SEQ ID NO: 1483 - protein, 241 aa, Artificial Sequence
  Synthetic
SAEEAVEKLVRIARAIVKINEDLSREVVRILREIVRRDHMVLHEYVNAAGITVKVVEDGGLSEDVVRKLRKLVKELEDLLKKSNDDIRKLVEDVARRLKESNDEIRRLVERLEELLKRGPGDEELLRLVEELTEELLRTHEEVVKALEKLTADLLELHRELLERVRRLTKRIEEELKRVGVSEELLRRLEELRKRLEKVLDDSAKELEKLKRELERLLEESRRKLEKLKRDLERVLEETRR

SEQ ID NO: 1484 - protein, 237 aa, Artificial Sequence
  Synthetic
REDEVLRDIERLLREIEEKIRRILEESTAELRKVEERDHMVLHEYVNAAGITKEDVERKGIDEELRKLLDEVLDKLTKLIERNKRSLERILELIKRIIDENLEVLRDIIRLLEELLKATKDNGVPKDEVIKLVEDVVRRIEELVTRVVARNEKLVKDLDDLAKKNVRENEELLREIDRGLDEDLLEKIKRVIREHIKALEKLARDLKEILRRHIEALKELARDLAEVIRKLLEDVKR

SEQ ID NO: 1485 - protein, 237 aa, Artificial Sequence; identical to SEQ ID NO: 1484
  Synthetic

SEQ ID NO: 1486 - protein, 237 aa, Artificial Sequence
  Synthetic
SREDLLRSLAELIETILRKSSELLDRLLKLVREHSERDHMVLHEYVNAAGITLKLIKGGISEDDVRRIVKEAKDELRRSVEEVKKSVDDLKEELKRSLREVRELVKSIADALEEIVRRSSGLGEVIKKLLELLRRLLEVHERTIRLLAELLERHLEVHEESIRLLLRLLEELLELVERKGDEKELRRIAEAVERVLRDHKAKNDKILRDVEEVLRRHLEELARILKDVKKVLDEARK

SEQ ID NO: 1487 - protein, 243 aa, Artificial Sequence
  Synthetic
SEAERLADEVRKAVKKSEEDNETLVREVEKAVRELKRDHMVLHEYVNAAGITLVDLLRDGQVSDRDLLKELEEVLRRVLEALAENHERTEEILKRWLDRYAEDIERLRKVLKEVIEALKRGGSDDKRIVDELEEILRRNEDVLDKIAKRLRRLLEEDRRLLERIVRELKRLLDDLDRITKEGKSEELVRIAIEVLKRLLEIIEELVRLNNEILERLLKIVRELHKDNIKILEDLLRIIEEVLR

SEQ ID NO: 1488 - protein, 243 aa, Artificial Sequence; identical to SEQ ID NO: 1487
  Synthetic

SEQ ID NO: 1489 - protein, 245 aa, Artificial Sequence
  Synthetic
SEKDEVTRRIRELLKEAEETNREAIERIKRLLDRVRRDHMVLHEYVNAAGITLKKVLDRGLQDDEALLKLLIDALREHNRLSTELIKILIDVLRTILKIIKDVLATNIEIARRILDLVRRLAERGGLDDRLVKEVEKLVRTAERLHRDALRKVKRLVEELEKRLRELVKTDHDLVRRLETLLRRGSGSKEDLLREIARILAESLRLIRELLKEIEKIVKEIIELLERLNDELRKIIEAILETTKK

SEQ ID NO: 1490 - protein, 247 aa, Artificial Sequence
  Synthetic
DEERLAEELERVLDRNRKLLEEALRELRRVIEENRKRDHMVLHEYVNAAGITLKVLRELSRGDSDEELRKVIEDLIRKLTKVLDKVRSLVEENIERLARVLEKLERLARENLEDLKKVLDDVDKKLKDRRLVERLAELVRELIEVNKEILEMLKEIVRELLEINRTLLERLKDLVATALEIIKLLARGDGTEEDVERAVKEIRDRLRKLLEDYERAVRRLEDKLRRVRERYEAVLKRIKDKLEETKR

SEQ ID NO: 1491 - protein, 243 aa, Artificial Sequence
  Synthetic
SRVEELKKLIEDILRISREVVERIARVAEDIHRINRRDHMVLHEYVNAAGITVEEILARKVSGTEAAEALRDTIRRVVDEIRKLLEEHEKRSAELLEEIRKLLEDILRRSERAVEEIRELLKKGVSTKDVLRIIEEILREHLELLERVVRRIEEILRELLKTIEEIVKRIKEILEELKEVLKRGSVGDDEVEREIRRVKEDLDRILEEYRRLLEEIKRKLEEILRRVEELHRRLRRKLEEIDR

SEQ ID NO: 1492 - protein, 243 aa, Artificial Sequence; identical to SEQ ID NO: 1491
  Synthetic

SEQ ID NO: 1493 - protein, 249 aa, Artificial Sequence
  Synthetic
DAEEVVKRLADVLRENDETIRKVVEDLVRIAEENDRRDHMVLHEYVNAAGITVELLRRGGVPEELLDRLAKVVKSIVEKAEKILERLNRVSKAIAEKLKTIVDELNEVSKEIVKRAEDILRKGKDKETVLRALRTLVKEYADLSKEVLERVERIVREYVKLSDEVVKSLAEIVEELIRIIEDLLRKGNLDEDVKRALEELVSRLRKLLEDVKKASEDIVREVERIVRELAKRSDEILKKLEDIVEKLRE

SEQ ID NO: 1494 - protein, 249 aa, Artificial Sequence; identical to SEQ ID NO: 1493
  Synthetic

SEQ ID NO: 1495 - protein, 240 aa, Artificial Sequence
  Synthetic
DKDKRLEELLKRLKELNDKTFEELERILEELKRANERDHMVLHEYVNAAGITIEGGNLDKRLAELLKKLLDDLKRLLEEYTRTNEELLKRLRELLERYRETNKKLLDLLRKLLDEARRTGTDEDLLRRLEDILRKYEDEVRRLLKELEDILREYEDTSRRLLEELERIAKEAAERVSRGSDKDVKDIIRTILEVARDLLRLLEEDSRTNSEVVKRLLDLLREDSKANSEVVKRLLDVLRE

SEQ ID NO: 1496 - protein, 240 aa, Artificial Sequence
  Synthetic
SKEETLKRLLDELEKRNRETVERLERLLKELEDRNRRDHMVLHEYVNAAGITIEESGLSKELKDTLARILEELRKLLEEYFRKNEELLRLLRKLLDEYARTNEELLRLLEELLDTARRTGGDSELLKRLEDIAREYEKRVRRLLEKLKDILDKYRKTVEELVRKMEEILKEAKKTISRIGSEEVKDIVRAMEEVIRRLIEILRRDVELNLDVAKKLLELLKEDSKLNLDVARELLELLDR

SEQ ID NO: 1497 - protein, 240 aa, Artificial Sequence; identical to SEQ ID NO: 1496
  Synthetic

SEQ ID NO: 1498 - protein, 243 aa, Artificial Sequence
  Synthetic
DEEETLRRLLERKVELAKEYLDVSKEVIDRTTKLLDRDHMVLHEYVNAAGITLERGDLGPDELIKRLAEELERSLRELEEEIKRLKRELEESLKKLKEIIDRLAEEAEKLLAVLKRGEGSEEEALRALASLVRELIEVLRENDERLRDVLRRLIEALRKNNEILERVLRKLVRAAEERGRDESSREALEEARRRLEELLRELNEITKDLEAKLEKLLRDLNELTKALEEELKRLLDELKKRTD

SEQ ID NO: 1499 - protein, 243 aa, Artificial Sequence; identical to SEQ ID NO: 1498
  Synthetic

SEQ ID NO: 1500 - protein, 243 aa, Artificial Sequence
  Synthetic
SEAERTKESLKKVLKALVDLNRELLRKLEENMRELTRDHMVLHEYVNAAGITVREGGIVDKDAEREAERLMRELDKSSEDTARETRKLIEESKKSTRRTEEEARKLTETLDRLAKGGLPREDLLRALVRLLEELARLIEEDVRRNAELVKRHIELVERDVAELLRLIKELVDLLADLAEKGSRTEEIRKIVEEILKEIKELADRYREEVRKSKDKLRSILEDYKRKVDELKERLRELIEEVET

SEQ ID NO: 1501 - protein, 178 aa, Artificial Sequence
  Synthetic
DEVEKLLRDLEELDRDIERKVRELLKRNKEVLDDIERRDHMVLHEYVNAAGITADVIRKTTDKRTVDKLLKELEKILKEVLDRVRRLLEEAKESLDRSREEIERLLEESKTLVDEVRRAGIDKKEVDKIEKHSRDLIERAKRETDRLLEEAERLMREVVDRVRKILEEAKRLIDEARR

SEQ ID NO: 1502 - protein, 182 aa, Artificial Sequence
  Synthetic
DEAEKLLKELRDLLEESRKDLERLLKELEDLLEESKRRDHMVLHEYVNAAGITKETVERRNEREKLEKLLRELKKVVERLKDNLKDNERRNKEAIERVRKKLKDNERENKKVIEDLRAKLKDLEEVKRKIDRLEEESRRVIEEARKRLEEVEEKSKKIIDDARRALDRIDKELRRVVEETRK

SEQ ID NO: 1503 - protein, 181 aa, Artificial Sequence
  Synthetic
SEVERVLEDLRRLVRDVEEKLRRIIERDRRLVEEVERRDHMVLHEYVNAAGITLEELKDISDKKTIERIVREIIKEARDLVRRNHERNREIVDESRRLVEELRRIVEEIIRRLRELLERVKSGELAERIEDVVREAEKRLRELLKELEKTSRDLKKRLEELDRELKALVEKVERDLEELRK

SEQ ID NO: 1504 - protein, 174 aa, Artificial Sequence
  Synthetic
SEDETIRRIVRTVHEESRKSTEDVRREVERVLRESEERDHMVLHEYVNAAGITEETGISEELEERMRRIIREIREHLKDNLRRVREVIERIERKLEETERRDEKVLREIEKKIRDGDGREEVAREVTKIARDTIRENEEIAKEVREIVERSIKNLEEVAEEVERVVRELIEARR

SEQ ID NO: 1505 - protein, 174 aa, Artificial Sequence
  Synthetic
SELEKVVKEVADLLRRNLEKSKRVLEEVRRRLEENLRRDHMVLHEYVNAAGITLELVREGKDKRDLTRLLEEDDKRVKEALDKSRENNERILKEVRRALRESEEDNRRILKEVREKVDSRLLEELEERVRESIERSRRFIEELEKIVEETLTESEKLARASSEITKTVLDEIRK

SEQ ID NO: 1506 - protein, 178 aa, Artificial Sequence
  Synthetic
DDLERVLKEIKKAADKIREDNKRTADKIRKRVKELDDRDHMVLHEYVNAAGITKERVRGREEARKVIEELKKLVDEVRKRNEKSIEELKKLLKEDRDLMRRVIEELEDLVRRLREEVRDDEALRRVEEEVERLIRDLRRVLKETSDRVRELIDKHRRLSEEVEKDVKRLIDELKKKTD

SEQ ID NO: 1507 - protein, 181 aa, Artificial Sequence
  Synthetic
DEEETLEDVLRELEERVEKLLRDLTRDLERVEKEHKERDHMVLHEYVNAAGITEELLKRIEDDEKLRRLKEEVRKLVEESRERNKRHHKEVREVLERIRELLERLEKELRRALEEIRDKIRKDGATDEILRKIEELLRRAEEVIRDLERKVRKLERDIRENIKKNHREVREILRKIEEDVR

SEQ ID NO: 1508 - protein, 175 aa, Artificial Sequence
  Synthetic
SEEDELRRLLKEVNERVERLLDEIRKELEKIAEELRDRDHMVLHEYVNAAGITEENRVDEEIKKDAERALTELKEEHERLDREAKKDLDRIRKELERLEEEHRRVSERIEEVLDKESDKTEDIAREIRELMERTRRVIEEIKKELRDILEKLRRVSEELNKKLDEILKRIEDRTR

SEQ ID NO: 1509 - protein, 177 aa, Artificial Sequence
  Synthetic
SAIEKVKEVVERVLETVRDSVRRSHEESKRLIDKVRKRDHMVLHEYVNAAGITRRKGIPERMVEKLERDLEELLKEIKDTIDRIEEELRTSNRRLKETNDEIAKRLEELLRELSRDRDKDAVEDVLRRIEELIRDLNKKNDDNVRRVKEVIDRAEKLVRDLLREIRKLIEKLIRDTE

SEQ ID NO: 1510 - protein, 183 aa, Artificial Sequence
  Synthetic
KDAEDLERRVRELVEENNRVSKRLAEEVTRLVKENEDRDHMVLHEYVNAAGITLDMKRRGEVREEEVKRVLREIEELLREITEHSKEVLKTIEKLLRDSLEHSRRVLEEIERLLETILRKSKDSERLKKLVDELRETLERSLRENEKVADELRKRAEKSLEDVKRVVDELRKIVDDVLKRVED

SEQ ID NO: 1511 - protein, 183 aa, Artificial Sequence
  Synthetic
SEIEKLVEDVRKLVEDNLRHSEEVHRRNRRLIEENERRDHMVLHEYVNAAGITRELAERGEIREEEARKVLEEIKRLLDEIRRHSEEVLKEIERTLKENLKHSEEVLRRIEERLEDIKRKDKDSERVRTLVDRLREELKRSLDESEKLNRESRKRVTRSLEKVDDLVRELEKLARKVLEEVKT

SEQ ID NO: 1512 - protein, 177 aa, Artificial Sequence
  Synthetic
REIEELRKEIETLIRENEELNRRSKETSEELIRRLKKRDHMVLHEYVNAAGITRDRGAPEEDVRRAEERVKKLIEDNKRHSDEVAKTDKKLNEDSERHTRRVEERLRELLDRLSRSDKDEVVRRVAEEARRLSKRNKDAIREVNETSRRLATRDAKHTRDVLREIKRLADEIRERTR

SEQ ID NO: 1513 - protein, 174 aa, Artificial Sequence
  Synthetic
REIEEAAKDLDRLLEENKKLVKEVEEELRRLLKENRDRDHMVLHEYVNAAGITRRRGVPEEELKEVEERARRVIEESRRSSKELEKRLRELLEELRRSTKELEDRLREIKKLLRNGKDVEEVLRRVRKLSRENKEKIRKILEDVKKLSEDNKRRNEELSRRVKTLVDEIKKRAT

SEQ ID NO: 1514 - protein, 182 aa, Artificial Sequence
  Synthetic
DEIETVLDEVRRLHEDAKRRLEEMIDEVRKLNEESVRRDHMVLHEYVNAAGITKEEVERAGLDKGKLEELEERLERVREDVERILREIKRRNEKTLEDSERILEENKERNRTVLKKLKELRDRGSDAREALKESRKVVEESRESVRRVLEKNRRVVEESKRLAEELLRRVKKVVDEIRKRVE

SEQ ID NO: 1515 - protein, 182 aa, Artificial Sequence
  Synthetic
DELEEVVRRVRELSRTVKEELREVIERVRELSERVKKRDHMVLHEYVNAAGITMKRVRDSGLDKSKLEKLEDESRRVLDKSREILRKNEEDNRRLNKELEEILKKNEDDNEDVRRKVDEVTRKGKDAEEVLREVEKVVEDSRRSAKDALKRVEDRVRESDKSVRELLEENRKVVEDIKRRVD

SEQ ID NO: 1516 - protein, 182 aa, Artificial Sequence
  Synthetic
SDADRVAEELKKLVEDSRRENERVIEESKRLVKENEDRDHMVLHEYVNAAGITRDILEKEKDKKTLDDIVREILERLKRLLEKVEDENRKSHEENKRLLEDVKRKNKRISDELKRLLEEIERRNVDVDKVRETVKRLLEENKRVMEKTEEVAKKSSEDIKRVADETRRRAEELLKEVDELRK

SEQ ID NO: 1517 - protein, 175 aa, Artificial Sequence
  Synthetic
SEVDEVLREAKRIVDEVHKDNERATEESRRLVKKVHERDHMVLHEYVNAAGITKDANIDEKLVTEILKEIEEALKEAARRNKEVKDRLRELSRRVSERNREILEELKERLDRVRERRKDVKELEREVEKLLKRIEESLRRHRKENKRLLEELDRSLRELAKIVKEVLDEIRERTR

SEQ ID NO: 1518 - protein, 186 aa, Artificial Sequence
  Synthetic
SRVDEVIERLERLLRELDKINRDMIEDDKRLNTELNKRDHMVLHEYVNAAGITEEIRKKLSDEKTLEEIIERVERRLEELIERSKRRNREILERSKELIERSKKTNEEILRRAEELIKRLREEVKDIKEALDKIRRLEERARRVIEELDEKNRRALERSKENVKRLDERNERLRKELEEKVRRLRK

SEQ ID NO: 1519 - protein, 185 aa, Artificial Sequence
  Synthetic
DDIERLKREIERLLKEAEKISRDNEERSKELLDRLRKRDHMVLHEYVNAAGITKRLADKIKDKEELTRRLKEVVDRVEKSVRDSERMLREVVREDEESVRRSKTKLEDLLRKVEELVRRLEKKVTDEKVKRDAREALRKAKKKVDELKRKNDEVHRRSREEVKRLLEENRKLLEDLRRMVREITQ

SEQ ID NO: 1520 - protein, 184 aa, Artificial Sequence
  Synthetic
ELIKKARKDVEEVRERSERLVDELRKRNKKLADESRRRDHMVLHEYVNAAGITEDLLRKRRTKDVLKEIEDLVRELERELRRVVKESSDKVRKLIRENEKVVEESSRLFRDLVEKLRRVVEERNDKKLMEEVERLIKRLEDVNEKSERDVREINKESERVNEETEREVEDAIRKLREVLRRAKK

SEQ ID NO: 1521 - protein, 186 aa, Artificial Sequence
  Synthetic
KEVEDLERTVRTILKRMRELITRNEEEIRRSIEELKKRDHMVLHEYVNAAGITKELKKEGGDDKKRLVEEIKRLLDELRENSKRSSDRAKEIHERNKRHSEESSRTIEKLLKELRDLVRDVERKLRDEDAKRKLDELTKRVEKVVREADERNKRLTKRSKEVLDEVHRANEEALKEVEEVVRRVTK

SEQ ID NO: 1522 - protein, 179 aa, Artificial Sequence
  Synthetic
RLEDEVRKMEKEVREEVKRLEDESRKVLEESRRNLDKRDHMVLHEYVNAAGITKDLRRRGLDERVLRELLKRVREVHERNRKLLDEVRRASEKVHEDNRRILEEVRKTVKDVVDKLRRVDAKVVKELIDRVRKILEDVEREVKKSIEEVKEINRRLNEEVKKTIEEVKEIVKEVTERAK

SEQ ID NO: 1523 - protein, 183 aa, Artificial Sequence
  Synthetic
SVDERLDEVLERVKEDMDRNRRKNDESLREDEENVRRRDHMVLHEYVNAAGITRELKKRVKDERVKEFLDRVLEEIRKSAEEVKTIIDEVHKESEETVRRTKKIIEEVLRRIEELIRRVKKDRKEEVVKTVEEDIKRLLKEVNKVSDEAHKRNKELNERVNRVNKEAHKRNEDLLREAERKVR

SEQ ID NO: 1524 - protein, 183 aa, Artificial Sequence
  Synthetic
SIREKIRELEERLEEVLRRIEENSERVLREAERVLKERDHMVLHEYVNAAGITEEIRKLPVEDELVRRVKELVERLKRHNKKSSEDVERVVRELKEELKRSSEEVKKAVDRLKEELEKVLRDGGEREVDRVIRKLEDVLRKLEEHNRRVVERLKRLLEELKKHNEDSLRKSEEVLRKLEEDAR

SEQ ID NO: 1525 - protein, 182 aa, Artificial Sequence
  Synthetic
SIEDLVRELKKKVDEVAEDLRRKVREALERSRENIDRRDHMVLHEYVNAAGITDKLRKETREEEVKDILRRVLELSKRIVEESKEILDRVLELSKKVVDDIEEIIRRVEETVKEVLTRLSRVDDKVVKKLIKEVDDILREVTKLVEKLIRELEDINRKVNERNRRLAEESRKILDEVEKRVR

SEQ ID NO: 1526 - protein, 179 aa, Artificial Sequence
  Synthetic
SKAEEVEELVKKLLAEVKKSLDDVRRTVEKLLREVRKRDHMVLHEYVNAAGITKDLKDDGQDERAVRRVVEEIKELLDRNNEDSKRVVKEIRKLLDENDKTSKRVVEEIKRLLDEVRKEGKISEEKVEKLERDVRRALERDTRENKKLEDRVETALREDKKRNDDLREDVKRVLEEIRT

SEQ ID NO: 1527 - protein, 174 aa, Artificial Sequence
  Synthetic
SESDEVIRDLARLLDELARHVDDSVRRMDEVVKRSTRRDHMVLHEYVNAAGITEKKPGDERVERMVAEIERLVAEVLEELKKKYEKLKREVEENLRRLEETVRDIVEKARKVTEKGVSKEKIDRIIRELERILEEAKKKHEDVLRRLEDSLRRVAELLKAALDRLREIVDRLRR

SEQ ID NO: 1528 - protein, 174 aa, Artificial Sequence; identical to SEQ ID NO: 1527
  Synthetic

SEQ ID NO: 1529 - protein, 174 aa, Artificial Sequence
  Synthetic
SESDDVIRKLRELLEELRTHVEKSIRDLRKILEDSTRRDHMVLHEYVNAAGITRKKPGDEEVRKTVEEISRRVAENVKRLEDLYRRMEEEVKKNLDRLRKRVEDIIREVEEARKKGVDEEKLKDLIRKLRDILRRAAEAHKKLIDDARESLERAKREHEKLIDRLKKILEELER

SEQ ID NO: 1530 - protein, 177 aa, Artificial Sequence
  Synthetic
DEVRELLERNRRLLEEIKKTVKDLIRANEELLKRIEDRDHMVLHEYVNAAGITEKGLSDDETIREAKERLKASLEDVKRRVEEVKRLLEKSLEEVETIIREAEKRNRDSLREMERRGSSEELEELRRVVEESDETIKRLLEEAKESVDRSLDRIRKLLEDVRRSVERSAKRIDEKRK

SEQ ID NO: 1531 - protein, 184 aa, Artificial Sequence
  Synthetic
DEIRKVVKEITDLLKASNDKNRKVVEEIRDLLRKSKKRDHMVLHEYVNAAGITRRRIDKSGDKETAEDIVRRIIEELKRILKEIEDLARRINREIERLVEEVERDNRDVNRAIEELLKDIARRGGSEDLKRVEERAREVSRRNEESMRRVKEDADRVSEANKEVLDRVREEVKRLIEEVRETLR

SEQ ID NO: 1532 - protein, 238 aa, Artificial Sequence
  Synthetic
EEDERLTKRVEEIKRENRELLRRLEEEVKELERKSEKRDHMVLHEYVNAAGITDSGKGSTELLVEELEKLIREILKLSEDHNRTLEEVVRKIEDVLRANLERLKELVDEILKALKERGKGDSEELKRKVEKVARDYERLLRKLREVVKRILDESKRLDEELEERLKEVLKKLEELIKRGGPDKDVLTELKRILDELLKLVEKLIRRNLRLLEELLRLVREILRTSNEILEEILKDARR

SEQ ID NO: 1533 - protein, 247 aa, Artificial Sequence
  Synthetic
SEKEELLKLIKRVIELLKRVLEEHLRLVEDVIRRLKERDHMVLHEYVNAAGITKRLLDEVRGDKEELDRIKEKLEEVLERYKRRLEEIKRDLERMLEDYKRELKRIEEDLRRVLEEVERIATRGEGPAEALIDKLRKILERALRELDKLSKKLDELLKKVLEELEKSNREIDKLLKDVLRRVEEGGASEDLLRKAKKVITEVREKLKRNLEDVRRVIEDVKRKSARILEEARRLIEEVERELEKIRK

SEQ ID NO: 1534 - protein, 238 aa, Artificial Sequence
  Synthetic
SEAEKIREALETNLRLLEELIKRLKEILDTHNELLRRRDHMVLHEYVNAAGITEEGGLDEEVLREVKRLVDELRKEARRVLDEHEKLVRKIKKEAEDVARESEEIIKEVEDKLKGLDREELLERVRRVLKKSDDLIAELVRRALKILEELTRLLAELLKKVVEILRRIVELVERVLTKKGAPKEDLERLRRKVEELEDRLRRLLEKLARDSAELMRELERILDRYARESEELDRRLAE

SEQ ID NO: 1535 - protein, 248 aa, Artificial Sequence
  Synthetic
SAEEELEKLVRKVEEDLKRLEEESERIKKEIKDTLRARDHMVLHEYVNAAGITRRLEEEGRRVSLEEAIKIIKEILDELAKVNEDIIRIIKELLKRLVDTNRRVIETIDRILKKLVDDLRRGNLPEDKLREVERELRELKKELEEIVRESEKMLKELEDKLREIVRESRELLEKLRRDLKRIKDGNLSADEALEMLKRLLDKALKVHEDVLRKLVELVDEVLKVHEESLRKLLTLAAKVLEVLRKITK

SEQ ID NO: 1536 - protein, 240 aa, Artificial Sequence
  Synthetic
SDKEEIKRRVEKTARDLETEHDKIKKRLEDTVRDIKRRDHMVLHEYVNAAGITEKTLREGDGDATDLVDKLLETVKRLNEEVLRTVKKIADELRRLVEEVLRVLRESNETLARLLEEGNVGDEVRERLEEVLRRTEEIIKTLEEIVKRLLDELRRLVEELRRISKKLKDELDKIKEKGKDEKRLIEEVVRLLRENLDVVRRILEALAKLIKELLEALEEVLRRNKELIRELLRVLDEALK

SEQ ID NO: 1537 - protein, 248 aa, Artificial Sequence
  Synthetic
DEEERVKKLLTDLRRLLRKLHEESKKLLDELRKKLRERDHMVLHEYVNAAGITREAEKKLPGTRVLKLVADVVKKVLDAIRDLNRKLEEIIDEALKLLEELDDILRRVVEEALRLLKEIKDTKGDREEVKKRVEDILKRLEELVKEYEDRVREIKKRLRRALEELRDEYRKIREDIERVLDELRKGGVPEELLRVLEELVRTLKKLLDENLKMVERLIRELEKVLDDHERKVRRLIEELLEVLDRDAK

SEQ ID NO: 1538 - protein, 236 aa, Artificial Sequence
  Synthetic
STREKAKKVLDTLRADNEDMKRVVEKILRALKRTNERRDHMVLHEYVNAAGITKEVGVSEEALKEIEDTLKRVLEEIKRLLDESKKLLEDVEREIREILKTSEELLERIEREIETVGSDEKTLAEILKRLLELNEEMNRRLLKILRDLLRLNEEVIRRLLAVLERLLDALKEALDRGDVPEDLLRKLEEELRRIKEKLRKALEELEREHRELEKELDKLHDESRKEHERIEEELRR

SEQ ID NO: 1539 - protein, 247 aa, Artificial Sequence
  Synthetic
SKAEKLLKDLREALEKVKRRYEELERRLDEVLKEHEERDHMVLHEYVNAAGITEEGGLPEEELEKLKKLAEKVKELLRELLRLSKELVDRVRELLKRDLDLVRRLVEIALKVLREAREQPNDEKRVEKIKRDLEKKARRVREENERIKRDLKRTADESRKRLEKLLEDLKRELDRLREDLDRGRKDIDERVEELIERLIRIIERLLREVIKSHEKLVRTIERLIEESIRVNEELLEVIERLLDRARK

SEQ ID NO: 1540 - protein, 231 aa, Artificial Sequence
  Synthetic
SKEEEVEKVLRKWEEILRRLIEENKRANDKIRREYEERDHMVLHEYVNAAGITERLGVSEEVKRILEKLIKLLEDILEYEKENVERLIELNERILRELKKSVEELKALVTRVRRDGLPESEVRKLVEDVLRKNEELLKEAKKAWRDSIENLKRVLEEVAKLVKTVLREIEEKIDDEDVVRALIEVIERLLRVAEEVIRRILKVNTELMRVDERSIRESLKAISEVLKVLDT

SEQ ID NO: 1541 - protein, 231 aa, Artificial Sequence; identical to SEQ ID NO: 1540
  Synthetic

SEQ ID NO: 1542 - protein, 247 aa, Artificial Sequence
  Synthetic
RDRDVLRKVKAEIEELVARIEKVSRDALSEVKRLLDERDHMVLHEYVNAAGITRKIRDTRGDDEVVKETEEVLRDNHRLLEELIRRLIKVLEEWLRRHKKLLDEIRELLKEILRLVKESGVSEDLLRRLKRVIEELDKKLKESEEKLRRVVEKAKEDLKAVLEEHRKVLEDLKRALEEVREKLRERGSEEVVEELLRMLKRVAEEMKRVHDDLSRAVEKVVRDVVRVDKELLDELARILRRLEEVIT

SEQ ID NO: 1543 - protein, 231 aa, Artificial Sequence
  Synthetic
SKDEELARLLEELVERWRKIVEDLERDHRRLVKEIRERDHMVLHEYVNAAGITRKNGIDERIVRLIEEIAKIIEEVLKEIVKLVERAVRENVRVLRESVRLVAELVETLARLLRGSDERVTEAIKKVLDTSEDLIRRVIKVNEDILREIAKLVEEVLREAERILTEIKKEGDREEIRRILEELKRIVDDVLRIIARILKLLRDLTRRLAEVAKAVHKLLEELLRKLKEDTR

SEQ ID NO: 1544 - protein, 238 aa, Artificial Sequence
  Synthetic
SEIEDVIRRLRKILEDLERVSEKLLREIKKILDEARRRDHMVLHEYVNAAGITVRVFRDGSGSKEELAKLVEELIRELAKLAKEVDEIHKRIVERLKALVEDAERIHRKIVETLEEIVRGVPSEELKRVVEAIVEVIKEHLKVLADVIRRIIKAIEENAETIKRVLEDIVRVLELVLRGEGSIEDLVREVERLIKRIEDSLRELEKTVRELLKRIKEASDKVREDVDRLIKELKEAAD

SEQ ID NO: 1545 - protein, 246 aa, Artificial Sequence
  Synthetic
SREEIVATLEDLARKILEVVKKLAKEIEDAWREIERARDHMVLHEYVNAAGITDVVRKKVDSRVAEILETVVKRVVDITRRLIEEAERVVRELVDITRKLITILEEVVRRLVEIVREASKIDDRRELEDMLRKIREVVREVIERLKKLDEDVRRVVEEVIRRLEELNKRLEDVIREVKKRLKELGLSEEAVKELVELLEEILERNTRVIKEIIDLLRTVIRIHEKIVEDLIKLLEELLRRLEEATR

SEQ ID NO: 1546 - protein, 237 aa, Artificial Sequence
  Synthetic
KEKEDALKKLEDLARKSREDLERVLRKHKKILDKIEERDHMVLHEYVNAAGITLRKTGTESEILKELARLLREHHEALRRLIEELRRLLEEHHKILEDLAREHKRLLDELIKVVADGVDKDELERIIKELRERDKKLVDDLRKVSEDLLDAVRKLVEDLERISRELLRRVEELAKGIDEELAREVERVIKELLDKSKEILERIERAIDELLKVSEEILKLSEDASEELLKILREFAK

SEQ ID NO: 1547 - protein, 237 aa, Artificial Sequence; identical to SEQ ID NO: 1546
  Synthetic

SEQ ID NO: 1548 - protein, 229 aa, Artificial Sequence
  Synthetic
SKEERLREVAEKHKKDLEDIVKRVDEAAKETARRLEERDHMVLHEYVNAAGITEKGPDDEKLKKVKKILKDIMDRLAELIKKILKLLKENLEKIKELLRRNLEISEELLKLAKGLSDRDVLETVRRVLEKLDEEWDRVLEDSRRIIETILRELDTLLREVEKLIKEIKDEISGSKEVLDILERAVEVVRRVIKALKEVLERHVDATREVIERVKRVNKRLLEAVREVVT

SEQ ID NO: 1549 - protein, 241 aa, Artificial Sequence
  Synthetic
SEKELLKEILDRIRELLEDDNRLLKRIVDEIRKLLEERDHMVLHEYVNAAGITDRIGAPEDVIRELTRALKETEEDVDRVIRTLEKLLKEVLDAHEEVVRKLDRLLKEVERLVEGGDAEEVVRDLLRVVKEILDESKAVIDELARVVDEILKLLEEVDRKLAKVVKEILEDVLRGSGDDEDAVRKIAKIIEELKRLLEDLARDTRRVIEEAKRLLKEWRDRNKEVADTLKKLLEDLIRKIR

SEQ ID NO: 1550 - protein, 246 aa, Artificial Sequence
  Synthetic
SEREELLERIKEILKRVKDKLDEDLKRLKEILEKLKERDHMVLHEYVNAAGITREKLERTGRTDELVKEVLDTVRRNLENLKRLVEDILRKLEENVKNLTDLVREILKLITELIKRLEDGGLPKEVLDALRRVLEKLEELLREILERLKRSLEAVKRKIEELLKELERSLDELRRALERIRKEIGDSETAVRAIIRVLEKHLEAVRRVLEELLKVLAEHLETVRELIERLKRVLEEAIEVVERVAR

SEQ ID NO: 1551 - protein, 240 aa, Artificial Sequence
  Synthetic
DREKSVRDIEEDLKRVLDKLRRRVETSKEELKKVLKARDHMVLHEYVNAAGITRELDRGIDSEVLRAVREIVKRLVEVVRRYNELSEKIIRDLVRVNDRVLELLKRIVKRLIDVVRELEKIGDKEKALRRLEEVVKEVKRRIEELLKELEDVHRELVKILEEVNEDLKRVATEVKEIIKTGIKSSEVAKELDEVIKRLLDNLKENTDRLKEVIDRNLADLRDLAEELRAVIERLLEDARR

SEQ ID NO: 1552 - protein, 240 aa, Artificial Sequence; identical to SEQ ID NO: 1551
  Synthetic

SEQ ID NO: 1553 - protein, 237 aa, Artificial Sequence
  Synthetic
REDEVLRDIERLLREIEEKIRRILEESTAELRKVEEERDHMVLHEYVNAAGITEDVERKGIDEELRKLLDEVLDKLTKLIERNKRSLERILELIKRIIDENLEVLRDIIRLLEELLKATKDNGVPKDEVIKLVEDVVRRIEELVTRVVARNEKLVKDLDDLAKKNVRENEELLREIDRGLDEDLLEKIKRVIREHIKALEKLARDLKEILRRHIEALKELARDLAEVIRKLLEDVKR

SEQ ID NO: 1554 - protein, 237 aa, Artificial Sequence; identical to SEQ ID NO: 1553
  Synthetic

SEQ ID NO: 1555 - protein, 243 aa, Artificial Sequence
  Synthetic
SEAERLADEVRKAVKKSEEDNETLVREVEKAVRELKKRDHMVLHEYVNAAGITVDLLRDGQVSDRDLLKELEEVLRRVLEALAENHERTEEILKRWLDRYAEDIERLRKVLKEVIEALKRGGSDDKRIVDELEEILRRNEDVLDKIAKRLRRLLEEDRRLLERIVRELKRLLDDLDRITKEGKSEELVRIAIEVLKRLLEIIEELVRLNNEILERLLKIVRELHKDNIKILEDLLRIIEEVLR

SEQ ID NO: 1556 - protein, 243 aa, Artificial Sequence; identical to SEQ ID NO: 1555
  Synthetic

SEQ ID NO: 1557 - protein, 245 aa, Artificial Sequence
  Synthetic
SEKDEVTRRIRELLKEAEETNREAIERIKRLLDRVRERDHMVLHEYVNAAGITKKVLDRGLQDDEALLKLLIDALREHNRLSTELIKILIDVLRTILKIIKDVLATNIEIARRILDLVRRLAERGGLDDRLVKEVEKLVRTAERLHRDALRKVKRLVEELEKRLRELVKTDHDLVRRLETLLRRGSGSKEDLLREIARILAESLRLIRELLKEIEKIVKEIIELLERLNDELRKIIEAILETTKK

SEQ ID NO: 1558 - protein, 245 aa, Artificial Sequence; identical to SEQ ID NO: 1557
  Synthetic

SEQ ID NO: 1559 - protein, 243 aa, Artificial Sequence
  Synthetic
SRVEELKKLIEDILRISREVVERIARVAEDIHRINRRRDHMVLHEYVNAAGITEEILARKVSGTEAAEALRDTIRRVVDEIRKLLEEHEKRSAELLEEIRKLLEDILRRSERAVEEIRELLKKGVSTKDVLRIIEEILREHLELLERVVRRIEEILRELLKTIEEIVKRIKEILEELKEVLKRGSVGDDEVEREIRRVKEDLDRILEEYRRLLEEIKRKLEEILRRVEELHRRLRRKLEEIDR

SEQ ID NO: 1560 - protein, 249 aa, Artificial Sequence
  Synthetic
DAEEVVKRLADVLRENDETIRKVVEDLVRIAEENDRLRDHMVLHEYVNAAGITELLRRGGVPEELLDRLAKVVKSIVEKAEKILERLNRVSKAIAEKLKTIVDELNEVSKEIVKRAEDILRKGKDKETVLRALRTLVKEYADLSKEVLERVERIVREYVKLSDEVVKSLAEIVEELIRIIEDLLRKGNLDEDVKRALEELVSRLRKLLEDVKKASEDIVREVERIVRELAKRSDEILKKLEDIVEKLRE

SEQ ID NO: 1561 - protein, 249 aa, Artificial Sequence; identical to SEQ ID NO: 1560
  Synthetic

SEQ ID NO: 1562 - protein, 240 aa, Artificial Sequence
  Synthetic
DKDKRLEELLKRLKELNDKTFEELERILEELKRANEARDHMVLHEYVNAAGITEGGNLDKRLAELLKKLLDDLKRLLEEYTRTNEELLKRLRELLERYRETNKKLLDLLRKLLDEARRTGTDEDLLRRLEDILRKYEDEVRRLLKELEDILREYEDTSRRLLEELERIAKEAAERVSRGSDKDVKDIIRTILEVARDLLRLLEEDSRTNSEVVKRLLDLLREDSKANSEVVKRLLDVLRE

SEQ ID NO: 1563 - protein, 240 aa, Artificial Sequence; identical to SEQ ID NO: 1562
  Synthetic

SEQ ID NO: 1564 - protein, 240 aa, Artificial Sequence
  Synthetic
SKEETLKRLLDELEKRNRETVERLERLLKELEDRNRARDHMVLHEYVNAAGITEESGLSKELKDTLARILEELRKLLEEYFRKNEELLRLLRKLLDEYARTNEELLRLLEELLDTARRTGGDSELLKRLEDIAREYEKRVRRLLEKLKDILDKYRKTVEELVRKMEEILKEAKKTISRIGSEEVKDIVRAMEEVIRRLIEILRRDVELNLDVAKKLLELLKEDSKLNLDVARELLELLDR

SEQ ID NO: 1565 - protein, 240 aa, Artificial Sequence; identical to SEQ ID NO: 1564
  Synthetic

SEQ ID NO: 1566 - protein, 243 aa, Artificial Sequence
  Synthetic
SEAERTKESLKKVLKALVDLNRELLRKLEENMRELTKRDHMVLHEYVNAAGITREGGIVDKDAEREAERLMRELDKSSEDTARETRKLIEESKKSTRRTEEEARKLTETLDRLAKGGLPREDLLRALVRLLEELARLIEEDVRRNAELVKRHIELVERDVAELLRLIKELVDLLADLAEKGSRTEEIRKIVEEILKEIKELADRYREEVRKSKDKLRSILEDYKRKVDELKERLRELIEEVET

SEQ ID NO: 1567 - protein, 241 aa, Artificial Sequence
  Synthetic
SADEALEELVRRLLEVLKTVLERTKELSRDDLRVVKERDHMVLHEYVNAAGITRDGLDDADRVLEEVERVIREAKREVKRWEEVVRKVVEDSRRLIERVLAEVEEVIKEAKRLLDERKSGGSREVIEELLSLLREIVRHHKEVSDEHLKLSAELVKRILDVVEETLRLATEIVRRIKEGGNSEDVRRDIERLLEELKRRVERLLEDIERLLAELEKLNEDVLRENKALLEDLERRVRERKK

SEQ ID NO: 1568 - protein, 186 aa, Artificial Sequence
  Synthetic
SAEDSIRELLERDERLLEEARKEAKRLNEENERLLERIRDHMVLHEYVNAAGITDIRKKIKGEKLREIEELVRRVKRTIEKLLEEVKKSVEDSSKRIEELLEAVERSVERTKEEIRRLLDEVRKDRKEELVKRVEERIKRLHDENRRLVKEVIEEVEKLIRDNEKLAEDIEREIRRLLKELDEAAK

SEQ ID NO: 1569 - protein, 177 aa, Artificial Sequence
  Synthetic
ELREDVERVVDEIRRLVEENVRRIDEVAKDIKRLADDNRDHMVLHEYVNAAGITRLKEEGVTEVVDELREEVRKLSEDNRRHSRELIERVKKLLKELEEHSRDLKRRVKELLEDLKRKGVDERVLKKLKEVIEDVERKSRDALRRLEEAIRRVRRESERVNRELDEVIKRVTEELKK

SEQ ID NO: 1570 - protein, 174 aa, Artificial Sequence
  Synthetic
SEDETIRRIVRTVHEESRKSTEDVRREVERVLRESEEVRDHMVLHEYVNAAGITETGISEELEERMRRIIREIREHLKDNLRRVREVIERIERKLEETERRDEKVLREIEKKIRDGDGREEVAREVTKIARDTIRENEEIAKEVREIVERSIKNLEEVAEEVERVVRELIEARR

SEQ ID NO: 1571 - protein, 180 aa, Artificial Sequence
  Synthetic
SKEEVLREIERLHKETIRRIEEVLREATELHKRLTETNRDHMVLHEYVNAAGITDVRRADTPNVEELLRELKDALDKVRDHNRKTLKKNEDVVREIEKEVRELLKEDEDVLRRIEKVMRDGRVDARELLEESRREVERSEKEVERLLRKSRKVVEEVRKLSEENDREVKKILEEVKRRLD

SEQ ID NO: 1572 - protein, 187 aa, Artificial Sequence
  Synthetic
DEEEELRKRLEKLSKEVRELLRRDEEEDRRLNRELEELRDHMVLHEYVNAAGITDLLRKARRKVSEEELTRLRKKLRDLEEESKEALRELRRRVEELNKENKKSLDDLERRLKELEDRAREVEKRDRREDELRELLRRLEDVIRKLAEDLKRNTEDLRRVIKELAERLEELNKRLKREIRRLKEELR

SEQ ID NO: 1573 - protein, 181 aa, Artificial Sequence
  Synthetic
DEERKLEKSLKDVEDTHRRLLEKNDEDLKELRKRVEDMRDHMVLHEYVNAAGITEKLKRIEDDETLKRLRKRVKELLDEIRRRLERLEREVDKRLEEIKERNDRHHEEAKKELKRIRDKIRRDGADEKILREVEDLLRKVAEDLKRSNDEVKELAERLEETIRDLLRRIEEILKEIEERVR

SEQ ID NO: 1574 - protein, 175 aa, Artificial Sequence
  Synthetic
SEKEDLERELEEVRRRVEESLRKNEEDVKRVRDELKKLRDHMVLHEYVNAAGITRANVDKRVLDEADRLLKELEDDHKKLEEDAKKALDELREEHKRLEETLRRMLKRIKEVLDRESDKMEEIKKEIEKILRDIERVSRELNKKLEEIVRRLKKVSDELNRRIEEIAERVRRRRK

SEQ ID NO: 1575 - protein, 177 aa, Artificial Sequence
  Synthetic
SAIEKVKEVVERVLETVRDSVRRSHEESKRLIDKVRKRRDHMVLHEYVNAAGITRKGIPERMVEKLERDLEELLKEIKDTIDRIEEELRTSNRRLKETNDEIAKRLEELLRELSRDRDKDAVEDVLRRIEELIRDLNKKNDDNVRRVKEVIDRAEKLVRDLLREIRKLIEKLIRDTE

SEQ ID NO: 1576 - protein, 177 aa, Artificial Sequence
  Synthetic
SVLEEVRRRVEELLKTVKESVDRSHERSERLIEEVRESRDHMVLHEYVNAAGITEKGIPEDRVKRIEDKLREELERLERENRKIEEDLKRSNDELRRENERIAERLEELLRELSRDTNDKVARDVLEEIERLIREANERNKRNLEDVERVIRELNKENERVLREVEKKIEKLIRETE

SEQ ID NO: 1577 - protein, 178 aa, Artificial Sequence
  Synthetic
SSIERVEKEVRRLLRESDESLKRVMEEAKELIKSVRESRDHMVLHEYVNAAGITERTGDEREDLRRVLEELRKLIEDNRREDKRSEDELRKLIRDNKEENDRARREAEKLLEDLSRGRSEEEVERVLEEVRRIIEKLKEDDKRSLERIERIVRRNNELNKESVDRIRKIIKEMEERAD

SEQ ID NO: 1578 - protein, 177 aa, Artificial Sequence
  Synthetic
SVIERVEEEMEKVIRDSERVTKEVEDRAREVHERSEKRRDHMVLHEYVNAAGITRAGVDKRILDELRKRIKDSREDLERINEELRRALRKLLEDSKRINEELRKTLEELRKRLERVDDEEEVKKLAEEVRRLVEDSIRKLEELARRVDELVRESIERVDRNVEENKRLVREAIERRR

SEQ ID NO: 1579 - protein, 179 aa, Artificial Sequence
  Synthetic
SSKEVADELRKKAEKVLDELRKIIRELERKNEDSLRRTRDHMVLHEYVNAAGITDLVRTRGEDDRLVREVERLLRELKRRLEELIRRSEELIKRSREEVDRVIRTVEKLLEELDRLLRANKGDIEDLRRTVDKLVEEIKDLARKLAKSSDDTVREDEKLVEELRKDVKRIVRKIKKDLE

SEQ ID NO: 1580 - protein, 183 aa, Artificial Sequence
  Synthetic
KDAEDLERRVRELVEENNRVSKRLAEEVTRLVKENEDKRDHMVLHEYVNAAGITDMKRRGEVREEEVKRVLREIEELLREITEHSKEVLKTIEKLLRDSLEHSRRVLEEIERLLETILRKSKDSERLKKLVDELRETLERSLRENEKVADELRKRAEKSLEDVKRVVDELRKIVDDVLKRVED

SEQ ID NO: 1581 - protein, 174 aa, Artificial Sequence
  Synthetic
SEIEELEKRIDELLKELRDLSRRIAEEVKRLLEELKKLRDHMVLHEYVNAAGITRKGVPEEELRRVEEEVERVVRESRKLNKETEDELRRLLEEIKESNDRVEKRARELKKLLRDGKDVEEVLRRLEKLVREDKERLKKVLKDARDLIKKDKDLNEKLSRELEKLVRELEERAR

SEQ ID NO: 1582 - protein, 174 aa, Artificial Sequence
  Synthetic
DELRDVKRELDRLLRENEEIVERIAETVRRLLEELKKLRDHMVLHEYVNAAGITKRGVPEKELKEVADTLRKLLKDIERSNKEVEDRLRKLLEEIKESTDRLREELEEVEKLLRGGKDVETVLRRVRELSRDNKRRMRRVLEEAKRLAKEDKERIDKIRKEIEELIKRLKDKAT

SEQ ID NO: 1583 - protein, 174 aa, Artificial Sequence
  Synthetic
DEEEDLERRIKKLLDENRELLKRIAEELRRLLEELRRLRDHMVLHEYVNAAGITDRGVPEKDLRDVAEKVKKVLKESEDSNRDVKRKLEKLLRDLERSTERLEREARKVRKLLRDGKDIETLLRELEKLSRDNKELLKKIEKEIRDLIKEDKERNRELSERLRKLVEELKKKAT

SEQ ID NO: 1584 - protein, 174 aa, Artificial Sequence
  Synthetic
REIEEAAKDLDRLLEENKKLVKEVEEELRRLLKENRDLRDHMVLHEYVNAAGITRRGVPEEELKEVEERARRVIEESRRSSKELEKRLRELLEELRRSTKELEDRLREIKKLLRNGKDVEEVLRRVRKLSRENKEKIRKILEDVKKLSEDNKRRNEELSRRVKTLVDEIKKRAT

SEQ ID NO: 1585 - protein, 177 aa, Artificial Sequence
  Synthetic
SEAEKVVEELKKLLREVEKKIRDHTEDVKRILEELERRRDHMVLHEYVNAAGITDKNSDDDTVRKVKEELDRSHEKLREELRKVAKELKESNEELERDLKRLVEEAEDRLRRLKDRVSEKVLRELEKILEDIKRTLDKLLRENRETLKRIEDRLRELLEENRKLLEKIERELRERSR

SEQ ID NO: 1586 - protein, 182 aa, Artificial Sequence
  Synthetic
DEIETVLDEVRRLHEDAKRRLEEMIDEVRKLNEESVRERDHMVLHEYVNAAGITEEVERAGLDKGKLEELEERLERVREDVERILREIKRRNEKTLEDSERILEENKERNRTVLKKLKELRDRGSDAREALKESRKVVEESRESVRRVLEKNRRVVEESKRLAEELLRRVKKVVDEIRKRVE

SEQ ID NO: 1587 - protein, 178 aa, Artificial Sequence
  Synthetic
SKVEKLEEEIARLVERSRRLVEELKKEVTKVKEKVDEIRDHMVLHEYVNAAGITDIKRRGGSEEVLRRVTEELKKVLEDNRRVIEEVLRDLERILEELKRKAEEVTKRNRDDLKRLRDSGVDEEVLRRVEETSDRSEKELRTVLRDVTEDIKRIAEELKKALEDSTEIIRRAEDELRT

SEQ ID NO: 1588 - protein, 186 aa, Artificial Sequence
  Synthetic
SEVDEVRKTLEDLLRRLDEENKDIIRRNKELLDDLDRKRDHMVLHEYVNAAGITKILEKLKDRETLTRIIEEIEKRARELIKRLRDEIRKIEEESKKSIEDSRKRNDEIRKRLEELIKDLRDKIKDSEELARRITELEKRVREVIERLKEKNKRLEDDSRRVITELRKKLKDLEDRVREEIEELRK

SEQ ID NO: 1589 - protein, 184 aa, Artificial Sequence
  Synthetic
ELIKKARKDVEEVRERSERLVDELRKRNKKLADESRRLRDHMVLHEYVNAAGITDLLRKRRTKDVLKEIEDLVRELERELRRVVKESSDKVRKLIRENEKVVEESSRLFRDLVEKLRRVVEERNDKKLMEEVERLIKRLEDVNEKSERDVREINKESERVNEETEREVEDAIRKLREVLRRAKK

SEQ ID NO: 1590 - protein, 186 aa, Artificial Sequence
  Synthetic
KEVEDLERRVKEILDRMKRLIDENRKKIEKSIRELERLRDHMVLHEYVNAAGITDLKREGGDDARTLRERVRKIIEDVEEHSRRSTEEVRRIHKENKEHSERSSDEIRELLRRVEELIEEVKRRLRDKEMEKKLEDIVRRVREVVRRAHETNERLVDRSRKAVEKAERTNRRLVEEIRKVAEEVRK

SEQ ID NO: 1591 - protein, 176 aa, Artificial Sequence
  Synthetic
REAEEAKEEVEELNRRNKKELDDARRRVDELDKRNKDRRDHMVLHEYVNAAGITRVKEEGRSDDRLREKIERMLKTSADELERLKEENKRALRDLAERLRELIERNRRKLEEITRRTVPDKDVLKRLAELIKESIRELERVLEELAEKIDRSLKELDDVLRKNETDLKRVIEDLKR

SEQ ID NO: 1592 - protein, 182 aa, Artificial Sequence
  Synthetic
SELEKTLEDLKRHSEENKKKLEEDLRDMERNLKENKDRRDHMVLHEYVNAAGITRRFREGDIDERELERVRRKMEEIKKRLDENVERNRRKAEDIKRKLDENVKRSEDRVKEIKEDIRRRVRDKDKAEELERRLDELVKENREIHERVKKALDDIVKELEELHERLKRRLEEILRRIAETVR

SEQ ID NO: 1593 - protein, 179 aa, Artificial Sequence
  Synthetic
RLEDEVRKMEKEVREEVKRLEDESRKVLEESRRNLDKLRDHMVLHEYVNAAGITDLRRRGLDERVLRELLKRVREVHERNRKLLDEVRRASEKVHEDNRRILEEVRKTVKDVVDKLRRVDAKVVKELIDRVRKILEDVEREVKKSIEEVKEINRRLNEEVKKTIEEVKEIVKEVTERAK

SEQ ID NO: 1594 - protein, 183 aa, Artificial Sequence
  Synthetic
RVDERLDTVLKRVEETVRENKKKNDELLERSKENIDRLRDHMVLHEYVNAAGITKLKREVTKEEVKKIIDEVLKEIEDLLRTVKEELDRALERNREVVEETKRRIDRVLKEIEKLIRDVKRDRKEEVVKEVEERIKKLLKEVNDTSKDAERRLRETNERLNEIVKEVEKRIRELSEEVRKRVK

SEQ ID NO: 1595 - protein, 183 aa, Artificial Sequence
  Synthetic
SVDERLDEVLERVKEDMDRNRRKNDESLREDEENVRRNRDHMVLHEYVNAAGITELKKRVKDERVKEFLDRVLEEIRKSAEEVKTIIDEVHKESEETVRRTKKIIEEVLRRIEELIRRVKKDRKEEVVKTVEEDIKRLLKEVNKVSDEAHKRNKELNERVNRVNKEAHKRNEDLLREAERKVR

SEQ ID NO: 1596 - protein, 183 aa, Artificial Sequence
  Synthetic
SIREKIRELEERLEEVLRRIEENSERVLREAERVLKEIRDHMVLHEYVNAAGITEIRKLPVEDELVRRVKELVERLKRHNKKSSEDVERVVRELKEELKRSSEEVKKAVDRLKEELEKVLRDGGEREVDRVIRKLEDVLRKLEEHNRRVVERLKRLLEELKKHNEDSLRKSEEVLRKLEEDAR

SEQ ID NO: 1597 - protein, 182 aa, Artificial Sequence
  Synthetic
SIEDLVRELKKKVDEVAEDLRRKVREALERSRENIDRLRDHMVLHEYVNAAGITKLRKETREEEVKDILRRVLELSKRIVEESKEILDRVLELSKKVVDDIEEIIRRVEETVKEVLTRLSRVDDKVVKKLIKEVDDILREVTKLVEKLIRELEDINRKVNERNRRLAEESRKILDEVEKRVR

SEQ ID NO: 1598 - protein, 172 aa, Artificial Sequence
  Synthetic
SRAETVLKEVTDKIKKLADSSDELLRRNKENIDELKKSRDHMVLHEYVNAAGITKGSVDEETLEELIRRVEAELEAHHRELEKNSREDEKRNRDHHAKLEEEMRRVEERLEREGIDDEVVKRVRDLLDTVRRRNEKVNEDVKRMNDKLRRDNEDVIRRVEKLLRELEEKRRT

SEQ ID NO: 1599 - protein, 174 aa, Artificial Sequence
  Synthetic
DEEEDLERAIKKLLDENRELLKRIAEELRRLLEELRRLRDHMVLHEYVNAAGITDRGVPEEDLADVAEKVKKVLKESEDSNADVARKLEKLLRDLERSTERLEREARKVRKLLRGGKDAETLLRELEKLSRDNKELLKKIEKEIRDLIKEDKERNIELSERLRKLVEELKKKAT

SEQ ID NO: 1600 - protein, 184 aa, Artificial Sequence
  Synthetic
DEIRKVVKEITDLLKASNDKNRKVVEEIRDLLRKSKKLRDHMVLHEYVNAAGITRRIDKSGDKETAEDIVRRIIEELKRILKEIEDLARRINREIERLVEEVERDNRDVNRAIEELLKDIARRGGSEDLKRVEERAREVSRRNEESMRRVKEDADRVSEANKEVLDRVREEVKRLIEEVRETLR

SEQ ID NO: 1601 - protein, 177 aa, Artificial Sequence
  Synthetic
SKEDRLREELKKLLARLAEEIERLKRALEESNKDLKRTRDHMVLHEYVNAAGITRGGVSEELLRELERSTAENKERAKELLKRHEDLVRKVEKELADLLRRLEEIVARVDEALKRGISEEELDKLLKEARDLIREIEKRLEELLKRVEKLTEDAKRDLERSNREHKELADRIKETAR

SEQ ID NO: 1602 - protein, 243 aa, Artificial Sequence
  Synthetic
KREDILKKLEDIIRDIIDKLRRILEKVKRLNEDIIREIRDHMVLHEYVNAAGITRIADKSRDRELEDILRRVLEKLRRSLDKLRDTLRKLKEETDTVLERAERTLKELKDRLEKLLRDGEKVSEEDLVEALKALIDELRKVLEDVIRVSKELVERLLRALREHLETNKRLVKELLDALRKTTGDDEEIKRLKEELERRHRRLEEEVERVARELEKAHRDLERDIRRVAEELKKLLKKLRDDRR

SEQ ID NO: 1603 - protein, 244 aa, Artificial Sequence
  Synthetic
SAEETLRRITEESKRVLEEITKKYEDLERESREVLRKLRDHMVLHEYVNAAGITKGGDDKDEVLTVLEKVLDELLKLHRENLRVIKELLRKVLEVDRENLEVLKRLLEKARDLLRRSGRDEKDLKKLEDELRKVKEELEKKHEASKRDIEDLERELDKVTEEVERLLRKLKEELRRAAEGSDEDRERLARLLKALADKLIRVLEEILKINEELNRKIIKFARENLERNRRVNKKVIEVLREAAR

SEQ ID NO: 1604 - protein, 242 aa, Artificial Sequence
  Synthetic
SEKERLMRLLDKLKDLNRRLVERIKELLDKALELHKKLRDHMVLHEYVNAAGITRGGVPEELLTRIDELIKKLEDEARKISKEVKRLIDELKKRLEDIHREVDRLIRELKETLKGVTDKDELLRRVAEVLERIARLSEELIREVKEVLEKIVELSRELLKRVLDVLRRIAELLEDALRKGNVSEETVRRLREALKKLEDDLRKIERDAEREYKKLKDELEELTERYRREIRKLKEELKADRK

SEQ ID NO: 1605 - protein, 242 aa, Artificial Sequence; identical to SEQ ID NO: 1604
  Synthetic

SEQ ID NO: 1606 - protein, 240 aa, Artificial Sequence
  Synthetic
SDKEEIKRRVEKTARDLETEHDKIKKRLEDTVRDIKRERDHMVLHEYVNAAGITKTLREGDGDATDLVDKLLETVKRLNEEVLRTVKKIADELRRLVEEVLRVLRESNETLARLLEEGNVGDEVRERLEEVLRRTEEIIKTLEEIVKRLLDELRRLVEELRRISKKLKDELDKIKEKGKDEKRLIEEVVRLLRENLDVVRRILEALAKLIKELLEALEEVLRRNKELIRELLRVLDEALK

SEQ ID NO: 1607 - protein, 248 aa, Artificial Sequence
  Synthetic
DEDRIIEEIARLLEELLRELLELIKKLIETNRRLNEEHRDHMVLHEYVNAAGITRLVKKGISDEKLKRIRERLKRALDDLERLHREINKRLEDLVRELEKLVREILKELKDALEELRRASARAGGEEVLRRLEEIVKKLLDLVRRILERLKEIHKDNVRLLRELNERLTRIVEDLVRLIREILREAGVDEKIAEEIERELEELRRMIKRLHEDLERKLKESEDELREIEARLEEKIRRLEEKLERKRR

SEQ ID NO: 1608 - protein, 248 aa, Artificial Sequence; identical to SEQ ID NO: 1607
  Synthetic

SEQ ID NO: 1609 - protein, 238 aa, Artificial Sequence
  Synthetic
DADELLRRLAEEVERVIREAEDLLRRWKETIKKVLDDLRDHMVLHEYVNAAGITELTKTKGDEELAKLIKDLLDTNEKVNRDLLRLIKKLLKDAERVNRRLLELIEELLEELKRVAKDLGLREEADKKLRDIADRARKELEDYERRLKELLKTVEDALRKAEEDSRKLKRDVEELLERGRLRKDDLEDILRKNLDRLRKLLERLREILRENLEALKKTLKRLEDVVREILEDLKRERK

SEQ ID NO: 1610 - protein, 231 aa, Artificial Sequence
  Synthetic
DKAEVLREALKLLKDLLEELIKIHEESLKRILDLIDTLRDHMVLHEYVNAAGITRSGLDERELRKVERMATESLRTIAKLKEELRDLARRSLEKLREDLKRVDDTLRKVEEKVRRTGPSEELIEELIRTIEKLLKEIVRINEEVLKAVRELLKTLLKLSEDVVRRIEEILRKGGVPEEIDRELKRVVEELRRLHEEIKERLDDVARRSEEELRRIIKKLKEVVKEIRKKLK

SEQ ID NO: 1611 - protein, 236 aa, Artificial Sequence
  Synthetic
STREKAKKVLDTLRADNEDMKRVVEKILRALKRTNERARDHMVLHEYVNAAGITEVGVSEEALKEIEDTLKRVLEEIKRLLDESKKLLEDVEREIREILKTSEELLERIEREIETVGSDEKTLAEILKRLLELNEEMNRRLLKILRDLLRLNEEVIRRLLAVLERLLDALKEALDRGDVPEDLLRKLEEELRRIKEKLRKALEELEREHRELEKELDKLHDESRKEHERIEEELRR

SEQ ID NO: 1612 - protein, 247 aa, Artificial Sequence
  Synthetic
RDRDVLRKVKAEIEELVARIEKVSRDALSEVKRLLDENRDHMVLHEYVNAAGITKIRDTRGDDEVVKETEEVLRDNHRLLEELIRRLIKVLEEWLRRHKKLLDEIRELLKEILRLVKESGVSEDLLRRLKRVIEELDKKLKESEEKLRRVVEKAKEDLKAVLEEHRKVLEDLKRALEEVREKLRERGSEEVVEELLRMLKRVAEEMKRVHDDLSRAVEKVVRDVVRVDKELLDELARILRRLEEVIT

SEQ ID NO: 1613 - protein, 231 aa, Artificial Sequence
  Synthetic
SKDEELARLLEELVERWRKIVEDLERDHRRLVKEIRELRDHMVLHEYVNAAGITKNGIDERIVRLIEEIAKIIEEVLKEIVKLVERAVRENVRVLRESVRLVAELVETLARLLRGSDERVTEAIKKVLDTSEDLIRRVIKVNEDILREIAKLVEEVLREAERILTEIKKEGDREEIRRILEELKRIVDDVLRIIARILKLLRDLTRRLAEVAKAVHKLLEELLRKLKEDTR

SEQ ID NO: 1614 - protein, 229 aa, Artificial Sequence
  Synthetic
SKEERLREVAEKHKKDLEDIVKRVDEAAKETARRLEEIRDHMVLHEYVNAAGITKGPDDEKLKKVKKILKDIMDRLAELIKKILKLLKENLEKIKELLRRNLEISEELLKLAKGLSDRDVLETVRRVLEKLDEEWDRVLEDSRRIIETILRELDTLLREVEKLIKEIKDEISGSKEVLDILERAVEVVRRVIKALKEVLERHVDATREVIERVKRVNKRLLEAVREVVT

SEQ ID NO: 1615 - protein, 229 aa, Artificial Sequence; identical to SEQ ID NO: 1614
  Synthetic

SEQ ID NO: 1616 - protein, 246 aa, Artificial Sequence
  Synthetic
SEREELLERIKEILKRVKDKLDEDLKRLKEILEKLKEKRDHMVLHEYVNAAGITEKLERTGRTDELVKEVLDTVRRNLENLKRLVEDILRKLEENVKNLTDLVREILKLITELIKRLEDGGLPKEVLDALRRVLEKLEELLREILERLKRSLEAVKRKIEELLKELERSLDELRRALERIRKEIGDSETAVRAIIRVLEKHLEAVRRVLEELLKVLAEHLETVRELIERLKRVLEEAIEVVERVAR

SEQ ID NO: 1617 - protein, 240 aa, Artificial Sequence
  Synthetic
DREKSVRDIEEDLKRVLDKLRRRVETSKEELKKVLKADRDHMVLHEYVNAAGITELDRGIDSEVLRAVREIVKRLVEVVRRYNELSEKIIRDLVRVNDRVLELLKRIVKRLIDVVRELEKIGDKEKALRRLEEVVKEVKRRIEELLKELEDVHRELVKILEEVNEDLKRVATEVKEIIKTGIKSSEVAKELDEVIKRLLDNLKENTDRLKEVIDRNLADLRDLAEELRAVIERLLEDARR

SEQ ID NO: 1618 - protein, 240 aa, Artificial Sequence; identical to SEQ ID NO: 1617
  Synthetic

SEQ ID NO: 1619 - protein, 241 aa, Artificial Sequence
  Synthetic
SAEEAVEKLVRIARAIVKINEDLSREVVRILREIVRLNRDHMVLHEYVNAAGITVVEDGGLSEDVVRKLRKLVKELEDLLKKSNDDIRKLVEDVARRLKESNDEIRRLVERLEELLKRGPGDEELLRLVEELTEELLRTHEEVVKALEKLTADLLELHRELLERVRRLTKRIEEELKRVGVSEELLRRLEELRKRLEKVLDDSAKELEKLKRELERLLEESRRKLEKLKRDLERVLEETRR

SEQ ID NO: 1620 - protein, 237 aa, Artificial Sequence
  Synthetic
REDEVLRDIERLLREIEEKIRRILEESTAELRKVEEEVRDHMVLHEYVNAAGITDVERKGIDEELRKLLDEVLDKLTKLIERNKRSLERILELIKRIIDENLEVLRDIIRLLEELLKATKDNGVPKDEVIKLVEDVVRRIEELVTRVVARNEKLVKDLDDLAKKNVRENEELLREIDRGLDEDLLEKIKRVIREHIKALEKLARDLKEILRRHIEALKELARDLAEVIRKLLEDVKR

SEQ ID NO: 1621 - protein, 243 aa, Artificial Sequence
  Synthetic
SEAERLADEVRKAVKKSEEDNETLVREVEKAVRELKKNRDHMVLHEYVNAAGITDLLRDGQVSDRDLLKELEEVLRRVLEALAENHERTEEILKRWLDRYAEDIERLRKVLKEVIEALKRGGSDDKRIVDELEEILRRNEDVLDKIAKRLRRLLEEDRRLLERIVRELKRLLDDLDRITKEGKSEELVRIAIEVLKRLLEIIEELVRLNNEILERLLKIVRELHKDNIKILEDLLRIIEEVLR

SEQ ID NO: 1622 - protein, 245 aa, Artificial Sequence
  Synthetic
SEKDEVTRRIRELLKEAEETNREAIERIKRLLDRVREARDHMVLHEYVNAAGITKVLDRGLQDDEALLKLLIDALREHNRLSTELIKILIDVLRTILKIIKDVLATNIEIARRILDLVRRLAERGGLDDRLVKEVEKLVRTAERLHRDALRKVKRLVEELEKRLRELVKTDHDLVRRLETLLRRGSGSKEDLLREIARILAESLRLIRELLKEIEKIVKEIIELLERLNDELRKIIEAILETTKK

SEQ ID NO: 1623 - protein, 243 aa, Artificial Sequence
  Synthetic
SRVEELKKLIEDILRISREVVERIARVAEDIHRINRRVRDHMVLHEYVNAAGITEILARKVSGTEAAEALRDTIRRVVDEIRKLLEEHEKRSAELLEEIRKLLEDILRRSERAVEEIRELLKKGVSTKDVLRIIEEILREHLELLERVVRRIEEILRELLKTIEEIVKRIKEILEELKEVLKRGSVGDDEVEREIRRVKEDLDRILEEYRRLLEEIKRKLEEILRRVEELHRRLRRKLEEIDR

SEQ ID NO: 1624 - protein, 249 aa, Artificial Sequence
  Synthetic
DAEEVVKRLADVLRENDETIRKVVEDLVRIAEENDRLWRDHMVLHEYVNAAGITLLRRGGVPEELLDRLAKVVKSIVEKAEKILERLNRVSKAIAEKLKTIVDELNEVSKEIVKRAEDILRKGKDKETVLRALRTLVKEYADLSKEVLERVERIVREYVKLSDEVVKSLAEIVEELIRIIEDLLRKGNLDEDVKRALEELVSRLRKLLEDVKKASEDIVREVERIVRELAKRSDEILKKLEDIVEKLRE

SEQ ID NO: 1625 - protein, 240 aa, Artificial Sequence
  Synthetic
DKDKRLEELLKRLKELNDKTFEELERILEELKRANEASRDHMVLHEYVNAAGITGGNLDKRLAELLKKLLDDLKRLLEEYTRTNEELLKRLRELLERYRETNKKLLDLLRKLLDEARRTGTDEDLLRRLEDILRKYEDEVRRLLKELEDILREYEDTSRRLLEELERIAKEAAERVSRGSDKDVKDIIRTILEVARDLLRLLEEDSRTNSEVVKRLLDLLREDSKANSEVVKRLLDVLRE

SEQ ID NO: 1626 - protein, 240 aa, Artificial Sequence
  Synthetic
SKEETLKRLLDELEKRNRETVERLERLLKELEDRNRASRDHMVLHEYVNAAGITESGLSKELKDTLARILEELRKLLEEYFRKNEELLRLLRKLLDEYARTNEELLRLLEELLDTARRTGGDSELLKRLEDIAREYEKRVRRLLEKLKDILDKYRKTVEELVRKMEEILKEAKKTISRIGSEEVKDIVRAMEEVIRRLIEILRRDVELNLDVAKKLLELLKEDSKLNLDVARELLELLDR

SEQ ID NO: 1627 - protein, 240 aa, Artificial Sequence; identical to SEQ ID NO: 1626
  Synthetic

SEQ ID NO: 1628 - protein, 243 aa, Artificial Sequence
  Synthetic
DEEETLRRLLERKVELAKEYLDVSKEVIDRTTKLLDEYRDHMVLHEYVNAAGITRGDLGPDELIKRLAEELERSLRELEEEIKRLKRELEESLKKLKEIIDRLAEEAEKLLAVLKRGEGSEEEALRALASLVRELIEVLRENDERLRDVLRRLIEALRKNNEILERVLRKLVRAAEERGRDESSREALEEARRRLEELLRELNEITKDLEAKLEKLLRDLNELTKALEEELKRLLDELKKRTD

SEQ ID NO: 1629 - protein, 243 aa, Artificial Sequence
  Synthetic
SEAERTKESLKKVLKALVDLNRELLRKLEENMRELTKLRDHMVLHEYVNAAGITEGGIVDKDAEREAERLMRELDKSSEDTARETRKLIEESKKSTRRTEEEARKLTETLDRLAKGGLPREDLLRALVRLLEELARLIEEDVRRNAELVKRHIELVERDVAELLRLIKELVDLLADLAEKGSRTEEIRKIVEEILKEIKELADRYREEVRKSKDKLRSILEDYKRKVDELKERLRELIEEVET

SEQ ID NO: 1630 - protein, 186 aa, Artificial Sequence
  Synthetic
SAEDSIRELLERDERLLEEARKEAKRLNEENERLLERIERDHMVLHEYVNAAGITIRKKIKGEKLREIEELVRRVKRTIEKLLEEVKKSVEDSSKRIEELLEAVERSVERTKEEIRRLLDEVRKDRKEELVKRVEERIKRLHDENRRLVKEVIEEVEKLIRDNEKLAEDIEREIRRLLKELDEAAK

SEQ ID NO: 1631 - protein, 182 aa, Artificial Sequence
  Synthetic
DEAEKLLKELRDLLEESRKDLERLLKELEDLLEESKRDLRDHMVLHEYVNAAGITTVERRNEREKLEKLLRELKKVVERLKDNLKDNERRNKEAIERVRKKLKDNERENKKVIEDLRAKLKDLEEVKRKIDRLEEESRRVIEEARKRLEEVEEKSKKIIDDARRALDRIDKELRRVVEETRK

SEQ ID NO: 1632 - protein, 182 aa, Artificial Sequence
  Synthetic
RVEDALRKLLDDVRRLVEEAERRLRTSNDKSRRLVEEAKRDHMVLHEYVNAAGITVRRRIRDEDVKRVLEELLKRDHDVVRRVLERIDEMLERNSRLVKRVLEDIRRLLKRVREVVERIKRVRSKVVEEVLKELEELIKTAKKIIEDVLRASEDTIRRLEEIIRKVEEDSKRIIEEIERAAR

SEQ ID NO: 1633 - protein, 183 aa, Artificial Sequence
  Synthetic
KVEKRLTDLLKTVADEVKRVEDELRETVRESKEVVDKSRRDHMVLHEYVNAAGITAERRVSEDLVRRIRKVLDENREVNDRVVKEDERILEENERVNRKVVEKIRDILRKIEEVVRRAAEEIRDEEVVKKVEKEIRELLERLKEEADRVRERSKKILTDLKKSSEDVKRESERMLKKLEDEIR

SEQ ID NO: 1634 - protein, 184 aa, Artificial Sequence
  Synthetic
SLEEVIKTVRKLLEEVERRLREVVERAERMLEEVRRRTRRDHMVLHEYVNAAGITLRDKNVSEEIEEKLRKIKEELERDNEKVNRDNERSVETLRRLLDRVRKEVKDIAKELEERLKEVERKSRDDRIVEKLLRDAERIVKRLRELIEKLREEVEKIVDENRKTVEELRRRNEEIVRRLRREIE

SEQ ID NO: 1635 - protein, 184 aa, Artificial Sequence
  Synthetic
KLDEVIEEIRKLLRRMEEELRRSVEEIDKLLREVRELLRRDHMVLHEYVNAAGITLKKRGVPEEVKERLDRLVETLRRLSEETLKELDKLVREVKELSKESLKRLRELVERLRRELEEIKKRGEDEKLVEDLKRRAEEVIRELREIVKRNTEIAREVVERAKRIVEKNEKLLKDVVEEAKKIVK

SEQ ID NO: 1636 - protein, 181 aa, Artificial Sequence
  Synthetic
SEVERVLEDLRRLVRDVEEKLRRIIERDRRLVEEVERENRDHMVLHEYVNAAGITELKDISDKKTIERIVREIIKEARDLVRRNHERNREIVDESRRLVEELRRIVEEIIRRLRELLERVKSGELAERIEDVVREAEKRLRELLKELEKTSRDLKKRLEELDRELKALVEKVERDLEELRK

SEQ ID NO: 1637 - protein, 177 aa, Artificial Sequence
  Synthetic
KEEEDLEREVKRLEDKVREDAKKLEEVVKTVEKLVRDDARDHMVLHEYVNAAGITLTERKLDEETLRKVKEDLKRTLERLKRENEKSLEELRDILRRLKKENDDTLKELRDELKRLTDSGASEDVIRKMEEIIKRLEEVSREVEKRLRRIIRELERVSKEVLDRLREIIEKLDRDAT

SEQ ID NO: 1638 - protein, 180 aa, Artificial Sequence
  Synthetic
STEEVLDEIRKLHKTLTEDIKRVLREIEELHRRTIEENKRDHMVLHEYVNAAGITVRTKDTPNVEKLLKDLEKSAKENEEHNERTLREDDRVLKEIRRRATELLKANEEMLRRIEEVMRAGKVDAEELLRESKEAIKEVKRVLEELRKESKRVVDETRKLSEENLEHSERVLRKVEEDLR

SEQ ID NO: 1639 - protein, 180 aa, Artificial Sequence
  Synthetic
SKEEVLDEMRRLHETTKRDIRRVLKEIEELHERTLRENKRDHMVLHEYVNAAGITIKRKKTPDVEKLVRRVEEMLKELEKHNKKTTDDDKRVLDEIRRRADELVKEDERVLREIEEVVRAGKVDLKELLDESRRVVKESKEDLDRLLKESRDVVDDTRRKSEKNLRDAERVIREAEEAVR

SEQ ID NO: 1640 - protein, 187 aa, Artificial Sequence
  Synthetic
SEKERLKEELEKLSKEIEDILRDDKRSDDELRRRLRELLRDHMVLHEYVNAAGITMLEEARKRVSEDELRAIKKEIEDLNRRNEESLRAIEEKIKRLNDENRKSLEEIRRRLKRLVEEVDELRKRDNREELLRRLLEKLKRMAEKLKRDIEDNNRKLRKVATELAKEIEDNSEKLREDAKRLSEKIK

SEQ ID NO: 1641 - protein, 187 aa, Artificial Sequence
  Synthetic
DEEEELRKRLEKLSKEVRELLRRDEEEDRRLNRELEELLRDHMVLHEYVNAAGITLLRKARRKVSEEELTRLRKKLRDLEEESKEALRELRRRVEELNKENKKSLDDLERRLKELEDRAREVEKRDRREDELRELLRRLEDVIRKLAEDLKRNTEDLRRVIKELAERLEELNKRLKREIRRLKEELR

SEQ ID NO: 1642 - protein, 171 aa, Artificial Sequence
  Synthetic
SEKEKVIKEARELLERLRKRLKDVNDDVTRLLDELRKENRDHMVLHEYVNAAGITEVPVEDVIRELKRRLEEVDKKNRDILETLKRELDEVSRRTREELEKLRKELEEVEKAGLPAEELKRVADRLRRRLERLVEENERVVKKILDEIRRSVEENKRIVDKVRKDLDERRK

SEQ ID NO: 1643 - protein, 177 aa, Artificial Sequence
  Synthetic
SAIEKVKEVVERVLETVRDSVRRSHEESKRLIDKVRKRLRDHMVLHEYVNAAGITKGIPERMVEKLERDLEELLKEIKDTIDRIEEELRTSNRRLKETNDEIAKRLEELLRELSRDRDKDAVEDVLRRIEELIRDLNKKNDDNVRRVKEVIDRAEKLVRDLLREIRKLIEKLIRDTE

SEQ ID NO: 1644 - protein, 179 aa, Artificial Sequence
  Synthetic
SSKEVADELRKKAEKVLDELRKIIRELERKNEDSLRRTERDHMVLHEYVNAAGITLVRTRGEDDRLVREVERLLRELKRRLEELIRRSEELIKRSREEVDRVIRTVEKLLEELDRLLRANKGDIEDLRRTVDKLVEEIKDLARKLAKSSDDTVREDEKLVEELRKDVKRIVRKIKKDLE

SEQ ID NO: 1645 - protein, 174 aa, Artificial Sequence
  Synthetic
SEIEELEKRIDELLKELRDLSRRIAEEVKRLLEELKKLSRDHMVLHEYVNAAGITKGVPEEELRRVEEEVERVVRESRKLNKETEDELRRLLEEIKESNDRVEKRARELKKLLRDGKDVEEVLRRLEKLVREDKERLKKVLKDARDLIKKDKDLNEKLSRELEKLVRELEERAR

SEQ ID NO: 1646 - protein, 182 aa, Artificial Sequence
  Synthetic
SDADRVAEELKKLVEDSRRENERVIEESKRLVKENEDRNRDHMVLHEYVNAAGITILEKEKDKKTLDDIVREILERLKRLLEKVEDENRKSHEENKRLLEDVKRKNKRISDELKRLLEEIERRNVDVDKVRETVKRLLEENKRVMEKTEEVAKKSSEDIKRVADETRRRAEELLKEVDELRK

SEQ ID NO: 1647 - protein, 178 aa, Artificial Sequence
  Synthetic
SEEEKLKEVKDRIREVLRKLEEHTDKVKKEVEKVLRDIRRDHMVLHEYVNAAGITLRRKKKDAEDLLRELEKIIEEIERELDRVLEENDKMAEEWKKLLDKVLDDNRKSIRDIEKELDDREPTDELVTEVEKLLRDDEETNRDVVKKVREAVKKDADTNRKVIEEVKKVLEDAARRLD

SEQ ID NO: 1648 - protein, 183 aa, Artificial Sequence
  Synthetic
SEVDEVLERIKRLLERLAEHSDKVVRDIEKLLDDNRKENRDHMVLHEYVNAAGITMRRRGDLREELLERVVREVEKEIRDIKRKNKRSVETVEKLVRDDRKELKRALEDVERLIRELETRLKDKEELRRKLEKVLREAEKVIDELLKKTDEVLKRARETIEDLNRKLDKVLKEVRDKLDRLRD

SEQ ID NO: 1649 - protein, 179 aa, Artificial Sequence
  Synthetic
KDEETLKRLLEKAKEVVDRLKDENEKVTRDNHESVKKAKRDHMVLHEYVNAAGITAIRRVREAKEVVDTAEKLLRDNHEHSRDTVKKARELNETSRRHSERIVEKIEEILEEVERTLRENRGDVRELAKKVEKAIRELEELSRENREAVKRISDEIKRLSDENAKDSERIIKEIDDRVR

SEQ ID NO: 1650 - protein, 179 aa, Artificial Sequence
  Synthetic
REDERLEEIARKIKKVVDELVERNKKLTEDNHESVRRAERDHMVLHEYVNAAGITAIERIRSDKKVVDEVKKLLEDAKKHSKEVIDELRRLNEESKRSSEDTIRRMRKLLRELEETVKAKKGDVEDIERKVEDIIRRLEDLSRRNEEKVRRISEEIKKLSKDNERTIKEIIKEIEERVK

SEQ ID NO: 1651 - protein, 184 aa, Artificial Sequence
  Synthetic
ELIKKARKDVEEVRERSERLVDELRKRNKKLADESRRLIRDHMVLHEYVNAAGITLLRKRRTKDVLKEIEDLVRELERELRRVVKESSDKVRKLIRENEKVVEESSRLFRDLVEKLRRVVEERNDKKLMEEVERLIKRLEDVNEKSERDVREINKESERVNEETEREVEDAIRKLREVLRRAKK

SEQ ID NO: 1652 - protein, 179 aa, Artificial Sequence
  Synthetic
RLEDEVRKMEKEVREEVKRLEDESRKVLEESRRNLDKLRRDHMVLHEYVNAAGITLRRRGLDERVLRELLKRVREVHERNRKLLDEVRRASEKVHEDNRRILEEVRKTVKDVVDKLRRVDAKVVKELIDRVRKILEDVEREVKKSIEEVKEINRRLNEEVKKTIEEVKEIVKEVTERAK

SEQ ID NO: 1653 - protein, 179 aa, Artificial Sequence
  Synthetic
SKAEEVEELVKKLLAEVKKSLDDVRRTVEKLLREVRKSLRDHMVLHEYVNAAGITLKDDGQDERAVRRVVEEIKELLDRNNEDSKRVVKEIRKLLDENDKTSKRVVEEIKRLLDEVRKEGKISEEKVEKLERDVRRALERDTRENKKLEDRVETALREDKKRNDDLREDVKRVLEEIRT

SEQ ID NO: 1654 - protein, 174 aa, Artificial Sequence
  Synthetic
SESDEVIRDLARLLDELARHVDDSVRRMDEVVKRSTREARDHMVLHEYVNAAGITKPGDERVERMVAEIERLVAEVLEELKKKYEKLKREVEENLRRLEETVRDIVEKARKVTEKGVSKEKIDRIIRELERILEEAKKKHEDVLRRLEDSLRRVAELLKAALDRLREIVDRLRR

SEQ ID NO: 1655 - protein, 174 aa, Artificial Sequence; identical to SEQ ID NO: 1654
  Synthetic

SEQ ID NO: 1656 - protein, 174 aa, Artificial Sequence
  Synthetic
SESDDVIRKLRELLEELRTHVEKSIRDLRKILEDSTRHARDHMVLHEYVNAAGITKPGDEEVRKTVEEISRRVAENVKRLEDLYRRMEEEVKKNLDRLRKRVEDIIREVEEARKKGVDEEKLKDLIRKLRDILRRAAEAHKKLIDDARESLERAKREHEKLIDRLKKILEELER

SEQ ID NO: 1657 - protein, 186 aa, Artificial Sequence
  Synthetic
SRVEEIIEDLRRLLEEIRKENEDSIRRSKELLDRVKEINRDHMVLHEYVNAAGITEVREKGSESEEVKKALRAVLEELEKLLRRVAEINEEVLRRNSKLVEEDERRNREVLKELARLVEELIREIGDEDKARKVAEVAEKVLRDIDKLDRESKEAFRATNEEIAKLDEDTARVAERVKKAIEDLAK

SEQ ID NO: 1658 - protein, 186 aa, Artificial Sequence
  Synthetic
SEVDEIIKELERLLAEIARENERIIRESRKLADEVRKRNRDHMVLHEYVNAAGITAVRRKGSESEEVKKLIEDVLREIERLLKRIEEENREVVKRNSELVERVRAINEEILRRVAELVEKIARDIGDKDEVTKVKKVADDVLAEIKKLDDETRRVIEDTNKKIADLDKATRDVVRKVLEEVKKLEK

SEQ ID NO: 1659 - protein, 185 aa, Artificial Sequence
  Synthetic
SSVEELLERLRRISEENKRRIEKLLREVEKVLRELKDRHRDHMVLHEYVNAAGITEIKSGLPEEAVKRVLERVRERVKEVLEEADRLNDEMRRIVTEVEKELDKSDKEVEDAVRDILKKIEEGVRDRETAERARETLKRLLDENRDRSKKVKEEIRRILEDLTRTTERVKREIAKLLKELEDTAR

SEQ ID NO: 1660 - protein, 180 aa, Artificial Sequence
  Synthetic
SELEEVLRRIEALVRKAHKENEDVLREIERLVRTAHRLNRDHMVLHEYVNAAGITGGREDKDKVEEALRRLRELYRRLEEENRRILREIEELVKELEKRNREILKELEDLVADAERKGSDGSEAVRRLKEILERLKEEVRRSLEELRKEVERLKKEVEDSLRELKKSLEEWVKSLEEATR

SEQ ID NO: 1661 - protein, 238 aa, Artificial Sequence
  Synthetic
EEDERLTKRVEEIKRENRELLRRLEEEVKELERKSEKIVRDHMVLHEYVNAAGITGKGSTELLVEELEKLIREILKLSEDHNRTLEEVVRKIEDVLRANLERLKELVDEILKALKERGKGDSEELKRKVEKVARDYERLLRKLREVVKRILDESKRLDEELEERLKEVLKKLEELIKRGGPDKDVLTELKRILDELLKLVEKLIRRNLRLLEELLRLVREILRTSNEILEEILKDARR

SEQ ID NO: 1662 - protein, 244 aa, Artificial Sequence
  Synthetic
SAEETLRRITEESKRVLEEITKKYEDLERESREVLRKLRRDHMVLHEYVNAAGITGGDDKDEVLTVLEKVLDELLKLHRENLRVIKELLRKVLEVDRENLEVLKRLLEKARDLLRRSGRDEKDLKKLEDELRKVKEELEKKHEASKRDIEDLERELDKVTEEVERLLRKLKEELRRAAEGSDEDRERLARLLKALADKLIRVLEEILKINEELNRKIIKFARENLERNRRVNKKVIEVLREAAR

SEQ ID NO: 1663 - protein, 244 aa, Artificial Sequence; identical to SEQ ID NO: 1662
  Synthetic

SEQ ID NO: 1664 - protein, 250 aa, Artificial Sequence
  Synthetic
STEEILKRVKEILDELAKELRDIIRESLRTIEELLDELRRDHMVLHEYVNAAGITIKDGVKDSEELLRRLKRLLEDLRRAHEELLKRLKEAVDEHRDRLRKILEELERVLKELRKRIEELRRSGDRISEKDVLRKLEEVLRKALEILERLLKKIRESARELLKIIEEVLDANIKVMEEALKTIKELLKDGPDEVKRRLEEKERRIRTRYEELRRRLRKRVKDYEDKLREIEKKVRRDAERIEEELERAKK

SEQ ID NO: 1665 - protein, 238 aa, Artificial Sequence
  Synthetic
SEAEKIREALETNLRLLEELIKRLKEILDTHNELLRRVIRDHMVLHEYVNAAGITGGLDEEVLREVKRLVDELRKEARRVLDEHEKLVRKIKKEAEDVARESEEIIKEVEDKLKGLDREELLERVRRVLKKSDDLIAELVRRALKILEELTRLLAELLKKVVEILRRIVELVERVLTKKGAPKEDLERLRRKVEELEDRLRRLLEKLARDSAELMRELERILDRYARESEELDRRLAE

SEQ ID NO: 1666 - protein, 248 aa, Artificial Sequence
  Synthetic
SAEEELEKLVRKVEEDLKRLEEESERIKKEIKDTLRAIRRDHMVLHEYVNAAGITLEEEGRRVSLEEAIKIIKEILDELAKVNEDIIRIIKELLKRLVDTNRRVIETIDRILKKLVDDLRRGNLPEDKLREVERELRELKKELEEIVRESEKMLKELEDKLREIVRESRELLEKLRRDLKRIKDGNLSADEALEMLKRLLDKALKVHEDVLRKLVELVDEVLKVHEESLRKLLTLAAKVLEVLRKITK

SEQ ID NO: 1667 - protein, 240 aa, Artificial Sequence
  Synthetic
SDKEEIKRRVEKTARDLETEHDKIKKRLEDTVRDIKRELRDHMVLHEYVNAAGITTLREGDGDATDLVDKLLETVKRLNEEVLRTVKKIADELRRLVEEVLRVLRESNETLARLLEEGNVGDEVRERLEEVLRRTEEIIKTLEEIVKRLLDELRRLVEELRRISKKLKDELDKIKEKGKDEKRLIEEVVRLLRENLDVVRRILEALAKLIKELLEALEEVLRRNKELIRELLRVLDEALK

SEQ ID NO: 1668 - protein, 248 aa, Artificial Sequence
  Synthetic
DEEERVKKLLTDLRRLLRKLHEESKKLLDELRKKLRELRRDHMVLHEYVNAAGITAEKKLPGTRVLKLVADVVKKVLDAIRDLNRKLEEIIDEALKLLEELDDILRRVVEEALRLLKEIKDTKGDREEVKKRVEDILKRLEELVKEYEDRVREIKKRLRRALEELRDEYRKIREDIERVLDELRKGGVPEELLRVLEELVRTLKKLLDENLKMVERLIRELEKVLDDHERKVRRLIEELLEVLDRDAK

SEQ ID NO: 1669 - protein, 248 aa, Artificial Sequence
  Synthetic
DEDRIIEEIARLLEELLRELLELIKKLIETNRRLNEEHERDHMVLHEYVNAAGITLVKKGISDEKLKRIRERLKRALDDLERLHREINKRLEDLVRELEKLVREILKELKDALEELRRASARAGGEEVLRRLEEIVKKLLDLVRRILERLKEIHKDNVRLLRELNERLTRIVEDLVRLIREILREAGVDEKIAEEIERELEELRRMIKRLHEDLERKLKESEDELREIEARLEEKIRRLEEKLERKRR

SEQ ID NO: 1670 - protein, 238 aa, Artificial Sequence
  Synthetic
DADELLRRLAEEVERVIREAEDLLRRWKETIKKVLDDLKRDHMVLHEYVNAAGITLTKTKGDEELAKLIKDLLDTNEKVNRDLLRLIKKLLKDAERVNRRLLELIEELLEELKRVAKDLGLREEADKKLRDIADRARKELEDYERRLKELLKTVEDALRKAEEDSRKLKRDVEELLERGRLRKDDLEDILRKNLDRLRKLLERLREILRENLEALKKTLKRLEDVVREILEDLKRERK

SEQ ID NO: 1671 - protein, 238 aa, Artificial Sequence; identical to SEQ ID NO: 1670
  Synthetic

SEQ ID NO: 1672 - protein, 236 aa, Artificial Sequence
  Synthetic
STREKAKKVLDTLRADNEDMKRVVEKILRALKRTNERAERDHMVLHEYVNAAGITVGVSEEALKEIEDTLKRVLEEIKRLLDESKKLLEDVEREIREILKTSEELLERIEREIETVGSDEKTLAEILKRLLELNEEMNRRLLKILRDLLRLNEEVIRRLLAVLERLLDALKEALDRGDVPEDLLRKLEEELRRIKEKLRKALEELEREHRELEKELDKLHDESRKEHERIEEELRR

SEQ ID NO: 1673 - protein, 236 aa, Artificial Sequence; identical to SEQ ID NO: 1672
  Synthetic

SEQ ID NO: 1674 - protein, 247 aa, Artificial Sequence
  Synthetic
SKAEKLLKDLREALEKVKRRYEELERRLDEVLKEHEEIVRDHMVLHEYVNAAGITGGLPEEELEKLKKLAEKVKELLRELLRLSKELVDRVRELLKRDLDLVRRLVEIALKVLREAREQPNDEKRVEKIKRDLEKKARRVREENERIKRDLKRTADESRKRLEKLLEDLKRELDRLREDLDRGRKDIDERVEELIERLIRIIERLLREVIKSHEKLVRTIERLIEESIRVNEELLEVIERLLDRARK

SEQ ID NO: 1675 - protein, 247 aa, Artificial Sequence; identical to SEQ ID NO: 1674
  Synthetic

SEQ ID NO: 1676 - protein, 231 aa, Artificial Sequence
  Synthetic
SKEEEVEKVLRKWEEILRRLIEENKRANDKIRREYEELVRDHMVLHEYVNAAGITLGVSEEVKRILEKLIKLLEDILEYEKENVERLIELNERILRELKKSVEELKALVTRVRRDGLPESEVRKLVEDVLRKNEELLKEAKKAWRDSIENLKRVLEEVAKLVKTVLREIEEKIDDEDVVRALIEVIERLLRVAEEVIRRILKVNTELMRVDERSIRESLKAISEVLKVLDT

SEQ ID NO: 1677 - protein, 247 aa, Artificial Sequence
  Synthetic
RDRDVLRKVKAEIEELVARIEKVSRDALSEVKRLLDENRRDHMVLHEYVNAAGITIRDTRGDDEVVKETEEVLRDNHRLLEELIRRLIKVLEEWLRRHKKLLDEIRELLKEILRLVKESGVSEDLLRRLKRVIEELDKKLKESEEKLRRVVEKAKEDLKAVLEEHRKVLEDLKRALEEVREKLRERGSEEVVEELLRMLKRVAEEMKRVHDDLSRAVEKVVRDVVRVDKELLDELARILRRLEEVIT

SEQ ID NO: 1678 - protein, 237 aa, Artificial Sequence
  Synthetic
KEKEDALKKLEDLARKSREDLERVLRKHKKILDKIEELLRDHMVLHEYVNAAGITKTGTESEILKELARLLREHHEALRRLIEELRRLLEEHHKILEDLAREHKRLLDELIKVVADGVDKDELERIIKELRERDKKLVDDLRKVSEDLLDAVRKLVEDLERISRELLRRVEELAKGIDEELAREVERVIKELLDKSKEILERIERAIDELLKVSEEILKLSEDASEELLKILREFAK

SEQ ID NO: 1679 - protein, 229 aa, Artificial Sequence
  Synthetic
SKEERLREVAEKHKKDLEDIVKRVDEAAKETARRLEEILRDHMVLHEYVNAAGITGPDDEKLKKVKKILKDIMDRLAELIKKILKLLKENLEKIKELLRRNLEISEELLKLAKGLSDRDVLETVRRVLEKLDEEWDRVLEDSRRIIETILRELDTLLREVEKLIKEIKDEISGSKEVLDILERAVEVVRRVIKALKEVLERHVDATREVIERVKRVNKRLLEAVREVVT

SEQ ID NO: 1680 - protein, 241 aa, Artificial Sequence
  Synthetic
SEKELLKEILDRIRELLEDDNRLLKRIVDEIRKLLEEWLRDHMVLHEYVNAAGITIGAPEDVIRELTRALKETEEDVDRVIRTLEKLLKEVLDAHEEVVRKLDRLLKEVERLVEGGDAEEVVRDLLRVVKEILDESKAVIDELARVVDEILKLLEEVDRKLAKVVKEILEDVLRGSGDDEDAVRKIAKIIEELKRLLEDLARDTRRVIEEAKRLLKEWRDRNKEVADTLKKLLEDLIRKIR

SEQ ID NO: 1681 - protein, 241 aa, Artificial Sequence; identical to SEQ ID NO: 1680
  Synthetic

SEQ ID NO: 1682 - protein, 240 aa, Artificial Sequence
  Synthetic
DREKSVRDIEEDLKRVLDKLRRRVETSKEELKKVLKADKRDHMVLHEYVNAAGITLDRGIDSEVLRAVREIVKRLVEVVRRYNELSEKIIRDLVRVNDRVLELLKRIVKRLIDVVRELEKIGDKEKALRRLEEVVKEVKRRIEELLKELEDVHRELVKILEEVNEDLKRVATEVKEIIKTGIKSSEVAKELDEVIKRLLDNLKENTDRLKEVIDRNLADLRDLAEELRAVIERLLEDARR

SEQ ID NO: 1683 - protein, 240 aa, Artificial Sequence; identical to SEQ ID NO: 1682
  Synthetic

SEQ ID NO: 1684 - protein, 237 aa, Artificial Sequence
  Synthetic
REDEVLRDIERLLREIEEKIRRILEESTAELRKVEEEVKRDHMVLHEYVNAAGITVERKGIDEELRKLLDEVLDKLTKLIERNKRSLERILELIKRIIDENLEVLRDIIRLLEELLKATKDNGVPKDEVIKLVEDVVRRIEELVTRVVARNEKLVKDLDDLAKKNVRENEELLREIDRGLDEDLLEKIKRVIREHIKALEKLARDLKEILRRHIEALKELARDLAEVIRKLLEDVKR

SEQ ID NO: 1685 - protein, 237 aa, Artificial Sequence; identical to SEQ ID NO: 1684
  Synthetic

SEQ ID NO: 1686 - protein, 243 aa, Artificial Sequence
  Synthetic
SEAERLADEVRKAVKKSEEDNETLVREVEKAVRELKKNNRDHMVLHEYVNAAGITLLRDGQVSDRDLLKELEEVLRRVLEALAENHERTEEILKRWLDRYAEDIERLRKVLKEVIEALKRGGSDDKRIVDELEEILRRNEDVLDKIAKRLRRLLEEDRRLLERIVRELKRLLDDLDRITKEGKSEELVRIAIEVLKRLLEIIEELVRLNNEILERLLKIVRELHKDNIKILEDLLRIIEEVLR

SEQ ID NO: 1687 - protein, 243 aa, Artificial Sequence; identical to SEQ ID NO: 1686
  Synthetic

SEQ ID NO: 1688 - protein, 245 aa, Artificial Sequence
  Synthetic
SEKDEVTRRIRELLKEAEETNREAIERIKRLLDRVREAVRDHMVLHEYVNAAGITVLDRGLQDDEALLKLLIDALREHNRLSTELIKILIDVLRTILKIIKDVLATNIEIARRILDLVRRLAERGGLDDRLVKEVEKLVRTAERLHRDALRKVKRLVEELEKRLRELVKTDHDLVRRLETLLRRGSGSKEDLLREIARILAESLRLIRELLKEIEKIVKEIIELLERLNDELRKIIEAILETTKK

SEQ ID NO: 1689 - protein, 243 aa, Artificial Sequence
  Synthetic
SRVEELKKLIEDILRISREVVERIARVAEDIHRINRRVLRDHMVLHEYVNAAGITILARKVSGTEAAEALRDTIRRVVDEIRKLLEEHEKRSAELLEEIRKLLEDILRRSERAVEEIRELLKKGVSTKDVLRIIEEILREHLELLERVVRRIEEILRELLKTIEEIVKRIKEILEELKEVLKRGSVGDDEVEREIRRVKEDLDRILEEYRRLLEEIKRKLEEILRRVEELHRRLRRKLEEIDR

SEQ ID NO: 1690 - protein, 249 aa, Artificial Sequence
  Synthetic
DAEEVVKRLADVLRENDETIRKVVEDLVRIAEENDRLWKRDHMVLHEYVNAAGITLRRGGVPEELLDRLAKVVKSIVEKAEKILERLNRVSKAIAEKLKTIVDELNEVSKEIVKRAEDILRKGKDKETVLRALRTLVKEYADLSKEVLERVERIVREYVKLSDEVVKSLAEIVEELIRIIEDLLRKGNLDEDVKRALEELVSRLRKLLEDVKKASEDIVREVERIVRELAKRSDEILKKLEDIVEKLRE

SEQ ID NO: 1691 - protein, 240 aa, Artificial Sequence
  Synthetic
DKDKRLEELLKRLKELNDKTFEELERILEELKRANEASLRDHMVLHEYVNAAGITGNLDKRLAELLKKLLDDLKRLLEEYTRTNEELLKRLRELLERYRETNKKLLDLLRKLLDEARRTGTDEDLLRRLEDILRKYEDEVRRLLKELEDILREYEDTSRRLLEELERIAKEAAERVSRGSDKDVKDIIRTILEVARDLLRLLEEDSRTNSEVVKRLLDLLREDSKANSEVVKRLLDVLRE

SEQ ID NO: 1692 - protein, 240 aa, Artificial Sequence
  Synthetic
SKEETLKRLLDELEKRNRETVERLERLLKELEDRNRASLRDHMVLHEYVNAAGITSGLSKELKDTLARILEELRKLLEEYFRKNEELLRLLRKLLDEYARTNEELLRLLEELLDTARRTGGDSELLKRLEDIAREYEKRVRRLLEKLKDILDKYRKTVEELVRKMEEILKEAKKTISRIGSEEVKDIVRAMEEVIRRLIEILRRDVELNLDVAKKLLELLKEDSKLNLDVARELLELLDR

SEQ ID NO: 1693 - protein, 240 aa, Artificial Sequence; identical to SEQ ID NO: 1692
  Synthetic

SEQ ID NO: 1694 - protein, 243 aa, Artificial Sequence
  Synthetic
DEEETLRRLLERKVELAKEYLDVSKEVIDRTTKLLDEYLRDHMVLHEYVNAAGITGDLGPDELIKRLAEELERSLRELEEEIKRLKRELEESLKKLKEIIDRLAEEAEKLLAVLKRGEGSEEEALRALASLVRELIEVLRENDERLRDVLRRLIEALRKNNEILERVLRKLVRAAEERGRDESSREALEEARRRLEELLRELNEITKDLEAKLEKLLRDLNELTKALEEELKRLLDELKKRTD

SEQ ID NO: 1695 - protein, 243 aa, Artificial Sequence
  Synthetic
SEAERTKESLKKVLKALVDLNRELLRKLEENMRELTKLNRDHMVLHEYVNAAGITGGIVDKDAEREAERLMRELDKSSEDTARETRKLIEESKKSTRRTEEEARKLTETLDRLAKGGLPREDLLRALVRLLEELARLIEEDVRRNAELVKRHIELVERDVAELLRLIKELVDLLADLAEKGSRTEEIRKIVEEILKEIKELADRYREEVRKSKDKLRSILEDYKRKVDELKERLRELIEEVET

SEQ ID NO: 1696 - protein, 243 aa, Artificial Sequence; identical to SEQ ID NO: 1695
  Synthetic

SEQ ID NO: 1697 - protein, 178 aa, Artificial Sequence
  Synthetic
DEVEKLLRDLEELDRDIERKVRELLKRNKEVLDDIEREVRRDHMVLHEYVNAAGITIRKTTDKRTVDKLLKELEKILKEVLDRVRRLLEEAKESLDRSREEIERLLEESKTLVDEVRRAGIDKKEVDKIEKHSRDLIERAKRETDRLLEEAERLMREVVDRVRKILEEAKRLIDEARR

SEQ ID NO: 1698 - protein, 181 aa, Artificial Sequence
  Synthetic
SEVERVLEDLRRLVRDVEEKLRRIIERDRRLVEEVERENRRDHMVLHEYVNAAGITLKDISDKKTIERIVREIIKEARDLVRRNHERNREIVDESRRLVEELRRIVEEIIRRLRELLERVKSGELAERIEDVVREAEKRLRELLKELEKTSRDLKKRLEELDRELKALVEKVERDLEELRK

SEQ ID NO: 1699 - protein, 174 aa, Artificial Sequence
  Synthetic
SEDETIRRIVRTVHEESRKSTEDVRREVERVLRESEEVVKRDHMVLHEYVNAAGITGISEELEERMRRIIREIREHLKDNLRRVREVIERIERKLEETERRDEKVLREIEKKIRDGDGREEVAREVTKIARDTIRENEEIAKEVREIVERSIKNLEEVAEEVERVVRELIEARR

SEQ ID NO: 1700 - protein, 174 aa, Artificial Sequence
  Synthetic
SRDEKIRDILRRVLKEVRDSTKKVEEDLEDVHRRTEEELRRDHMVLHEYVNAAGITGASEELKRRMEEVVRRIEELLKKLLKEDRDVVKEIRDKLDETRKEMEEVAERIKDKIRRGDGREKVAEEVKRIADRLIDLNRRIAEEVDKIVRDSIKKVEEIVTEVEKIVEKLIRDVR

SEQ ID NO: 1701 - protein, 174 aa, Artificial Sequence
  Synthetic
SELEKVVKEVADLLRRNLEKSKRVLEEVRRRLEENLRESERDHMVLHEYVNAAGITVREGKDKRDLTRLLEEDDKRVKEALDKSRENNERILKEVRRALRESEEDNRRILKEVREKVDSRLLEELEERVRESIERSRRFIEELEKIVEETLTESEKLARASSEITKTVLDEIRK

SEQ ID NO: 1702 - protein, 180 aa, Artificial Sequence
  Synthetic
STEEVLDEIRKLHKTLTEDIKRVLREIEELHRRTIEENKERDHMVLHEYVNAAGITRTKDTPNVEKLLKDLEKSAKENEEHNERTLREDDRVLKEIRRRATELLKANEEMLRRIEEVMRAGKVDAEELLRESKEAIKEVKRVLEELRKESKRVVDETRKLSEENLEHSERVLRKVEEDLR

SEQ ID NO: 1703 - protein, 180 aa, Artificial Sequence
  Synthetic
SKEEVLREIERLHKETIRRIEEVLREATELHKRLTETNKRRDHMVLHEYVNAAGITRRADTPNVEELLRELKDALDKVRDHNRKTLKKNEDVVREIEKEVRELLKEDEDVLRRIEKVMRDGRVDARELLEESRREVERSEKEVERLLRKSRKVVEEVRKLSEENDREVKKILEEVKRRLD

SEQ ID NO: 1704 - protein, 180 aa, Artificial Sequence
  Synthetic
SKEEVLDEMRRLHETTKRDIRRVLKEIEELHERTLRENKRRDHMVLHEYVNAAGITKRKKTPDVEKLVRRVEEMLKELEKHNKKTTDDDKRVLDEIRRRADELVKEDERVLREIEEVVRAGKVDLKELLDESRRVVKESKEDLDRLLKESRDVVDDTRRKSEKNLRDAERVIREAEEAVR

SEQ ID NO: 1705 - protein, 187 aa, Artificial Sequence
  Synthetic
SEKETVRDELRKLVETIRKLLEEDKESDKRLADRIRELNERDHMVLHEYVNAAGITLEELRKKVSEDELRKLRKRIEDLRRRDEELNKRSREKLEDLNERNKDSLRRIEDELRKLVEEAREVEKRDNDEERLRKLLERLERVIRDLLRKIEENNKRLRKAIKELLDELRKINKELREVIKKLLDDAR

SEQ ID NO: 1706 - protein, 187 aa, Artificial Sequence
  Synthetic
SEKERLKEELEKLSKEIEDILRDDKRSDDELRRRLRELLERDHMVLHEYVNAAGITLEEARKRVSEDELRAIKKEIEDLNRRNEESLRAIEEKIKRLNDENRKSLEEIRRRLKRLVEEVDELRKRDNREELLRRLLEKLKRMAEKLKRDIEDNNRKLRKVATELAKEIEDNSEKLREDAKRLSEKIK

SEQ ID NO: 1707 - protein, 187 aa, Artificial Sequence
  Synthetic
DEEEELRKRLEKLSKEVRELLRRDEEEDRRLNRELEELLKRDHMVLHEYVNAAGITLRKARRKVSEEELTRLRKKLRDLEEESKEALRELRRRVEELNKENKKSLDDLERRLKELEDRAREVEKRDRREDELRELLRRLEDVIRKLAEDLKRNTEDLRRVIKELAERLEELNKRLKREIRRLKEELR

SEQ ID NO: 1708 - protein, 175 aa, Artificial Sequence
  Synthetic
SEKEDLERELEEVRRRVEESLRKNEEDVKRVRDELKKLLDRDHMVLHEYVNAAGITNVDKRVLDEADRLLKELEDDHKKLEEDAKKALDELREEHKRLEETLRRMLKRIKEVLDRESDKMEEIKKEIEKILRDIERVSRELNKKLEEIVRRLKKVSDELNRRIEEIAERVRRRRK

SEQ ID NO: 1709 - protein, 177 aa, Artificial Sequence
  Synthetic
SVIERVEEEMEKVIRDSERVTKEVEDRAREVHERSEKRIRRDHMVLHEYVNAAGITGVDKRILDELRKRIKDSREDLERINEELRRALRKLLEDSKRINEELRKTLEELRKRLERVDDEEEVKKLAEEVRRLVEDSIRKLEELARRVDELVRESIERVDRNVEENKRLVREAIERRR

SEQ ID NO: 1710 - protein, 179 aa, Artificial Sequence
  Synthetic
SSKEVADELRKKAEKVLDELRKIIRELERKNEDSLRRTEERDHMVLHEYVNAAGITVRTRGEDDRLVREVERLLRELKRRLEELIRRSEELIKRSREEVDRVIRTVEKLLEELDRLLRANKGDIEDLRRTVDKLVEEIKDLARKLAKSSDDTVREDEKLVEELRKDVKRIVRKIKKDLE

SEQ ID NO: 1711 - protein, 183 aa, Artificial Sequence
  Synthetic
SEIEKLVEDVRKLVEDNLRHSEEVHRRNRRLIEENERKIDRDHMVLHEYVNAAGITAERGEIREEEARKVLEEIKRLLDEIRRHSEEVLKEIERTLKENLKHSEEVLRRIEERLEDIKRKDKDSERVRTLVDRLREELKRSLDESEKLNRESRKRVTRSLEKVDDLVRELEKLARKVLEEVKT

SEQ ID NO: 1712 - protein, 174 aa, Artificial Sequence
  Synthetic
SEIEELEKRIDELLKELRDLSRRIAEEVKRLLEELKKLSKRDHMVLHEYVNAAGITGVPEEELRRVEEEVERVVRESRKLNKETEDELRRLLEEIKESNDRVEKRARELKKLLRDGKDVEEVLRRLEKLVREDKERLKKVLKDARDLIKKDKDLNEKLSRELEKLVRELEERAR

SEQ ID NO: 1713 - protein, 174 aa, Artificial Sequence
  Synthetic
DELRDVKRELDRLLRENEEIVERIAETVRRLLEELKKLTKRDHMVLHEYVNAAGITGVPEKELKEVADTLRKLLKDIERSNKEVEDRLRKLLEEIKESTDRLREELEEVEKLLRGGKDVETVLRRVRELSRDNKRRMRRVLEEAKRLAKEDKERIDKIRKEIEELIKRLKDKAT

SEQ ID NO: 1714 - protein, 174 aa, Artificial Sequence
  Synthetic
DEEEDLERRIKKLLDENRELLKRIAEELRRLLEELRRLTERDHMVLHEYVNAAGITGVPEKDLRDVAEKVKKVLKESEDSNRDVKRKLEKLLRDLERSTERLEREARKVRKLLRDGKDIETLLRELEKLSRDNKELLKKIEKEIRDLIKEDKERNRELSERLRKLVEELKKKAT

SEQ ID NO: 1715 - protein, 174 aa, Artificial Sequence
  Synthetic
REIEEAAKDLDRLLEENKKLVKEVEEELRRLLKENRDLVKRDHMVLHEYVNAAGITGVPEEELKEVEERARRVIEESRRSSKELEKRLRELLEELRRSTKELEDRLREIKKLLRNGKDVEEVLRRVRKLSRENKEKIRKILEDVKKLSEDNKRRNEELSRRVKTLVDEIKKRAT

SEQ ID NO: 1716 - protein, 177 aa, Artificial Sequence
  Synthetic
SEAEKVVEELKKLLREVEKKIRDHTEDVKRILEELERRLRRDHMVLHEYVNAAGITNSDDDTVRKVKEELDRSHEKLREELRKVAKELKESNEELERDLKRLVEEAEDRLRRLKDRVSEKVLRELEKILEDIKRTLDKLLRENRETLKRIEDRLRELLEENRKLLEKIERELRERSR

SEQ ID NO: 1717 - protein, 174 aa, Artificial Sequence
  Synthetic
EELERILDKVRKVIEEVRKRLRDDLRTVEKVLKETEEVLRRDHMVLHEYVNAAGITARRGRDRREIKEELKKVLDDLRELLRALEEKNRRVNKENEDSLRKIEEDLRDVLRKLEEEIKGREVLRKVRELLRTIREEVERVLRKSNELSTRIKKRIDDVLETLERLLKELDDKLR

SEQ ID NO: 1718 - protein, 178 aa, Artificial Sequence
  Synthetic
SSKDEIRRRVEEVVERSDEIVKRSREHVKTVVDELDRVVKRDHMVLHEYVNAAGITRKDGGSEETLKRVLDELREILKELKEEVKKVKRKLEKVVKENRDTIREVEERNRKILDELRKRGVEERALREVEEISRKSEEKLRRVLKESEDIAKEAEDRLKTVLERVERIADEVLKRLTK

SEQ ID NO: 1719 - protein, 178 aa, Artificial Sequence
  Synthetic
SKVEKLEEEIARLVERSRRLVEELKKEVTKVKEKVDEIVERDHMVLHEYVNAAGITKRRGGSEEVLRRVTEELKKVLEDNRRVIEEVLRDLERILEELKRKAEEVTKRNRDDLKRLRDSGVDEEVLRRVEETSDRSEKELRTVLRDVTEDIKRIAEELKKALEDSTEIIRRAEDELRT

SEQ ID NO: 1720 - protein, 182 aa, Artificial Sequence
  Synthetic
SDADRVAEELKKLVEDSRRENERVIEESKRLVKENEDRNRRDHMVLHEYVNAAGITLEKEKDKKTLDDIVREILERLKRLLEKVEDENRKSHEENKRLLEDVKRKNKRISDELKRLLEEIERRNVDVDKVRETVKRLLEENKRVMEKTEEVAKKSSEDIKRVADETRRRAEELLKEVDELRK

SEQ ID NO: 1721 - protein, 175 aa, Artificial Sequence
  Synthetic
SEVDEVLREAKRIVDEVHKDNERATEESRRLVKKVHEENERDHMVLHEYVNAAGITNIDEKLVTEILKEIEEALKEAARRNKEVKDRLRELSRRVSERNREILEELKERLDRVRERRKDVKELEREVEKLLKRIEESLRRHRKENKRLLEELDRSLRELAKIVKEVLDEIRERTR

SEQ ID NO: 1722 - protein, 175 aa, Artificial Sequence
  Synthetic
SEMDDVLKKLAETVKRIIERLKKLTDDSRRLVEEVHRRNDRDHMVLHEYVNAAGITNIDEKDVRKLLEDLKKKSEEVAERNKRILDTLREISKRAEDEVRKVLKELEKTLKELEDRRPDVRELSEEVKKLLDEVRKALKRHKDENDKLLKEIEDSLRRHKEENDRLLEKLKESTR

SEQ ID NO: 1723 - protein, 178 aa, Artificial Sequence
  Synthetic
SEEEKLKEVKDRIREVLRKLEEHTDKVKKEVEKVLRDIRRRDHMVLHEYVNAAGITRRKKKDAEDLLRELEKIIEEIERELDRVLEENDKMAEEWKKLLDKVLDDNRKSIRDIEKELDDREPTDELVTEVEKLLRDDEETNRDVVKKVREAVKKDADTNRKVIEEVKKVLEDAARRLD

SEQ ID NO: 1724 - protein, 186 aa, Artificial Sequence
  Synthetic
SEVDEVRKTLEDLLRRLDEENKDIIRRNKELLDDLDRKVRRDHMVLHEYVNAAGITLEKLKDRETLTRIIEEIEKRARELIKRLRDEIRKIEEESKKSIEDSRKRNDEIRKRLEELIKDLRDKIKDSEELARRITELEKRVREVIERLKEKNKRLEDDSRRVITELRKKLKDLEDRVREEIEELRK

SEQ ID NO: 1725 - protein, 186 aa, Artificial Sequence
  Synthetic
SRVDEVIERLERLLRELDKINRDMIEDDKRLNTELNKENKRDHMVLHEYVNAAGITRKKLSDEKTLEEIIERVERRLEELIERSKRRNREILERSKELIERSKKTNEEILRRAEELIKRLREEVKDIKEALDKIRRLEERARRVIEELDEKNRRALERSKENVKRLDERNERLRKELEEKVRRLRK

SEQ ID NO: 1726 - protein, 186 aa, Artificial Sequence
  Synthetic
DEIRELEERVRRILDELRRLVERNREVIERSIRELEKLLDRDHMVLHEYVNAAGITTRRGGDDKKTMLDDVRRLLREAEDHSRRSSETAKRIHRENEEHSKDSSRKVRKLIEELRELAKKVEKEITDERVKEAIKELVKDVDRVMREVDRANRELTKTSKKVLEDVDRTNRRLVKEVRDVVERARK

SEQ ID NO: 1727 - protein, 186 aa, Artificial Sequence
  Synthetic
KEVEDLERTVRTILKRMRELITRNEEEIRRSIEELKKLLKRDHMVLHEYVNAAGITKKEGGDDKKRLVEEIKRLLDELRENSKRSSDRAKEIHERNKRHSEESSRTIEKLLKELRDLVRDVERKLRDEDAKRKLDELTKRVEKVVREADERNKRLTKRSKEVLDEVHRANEEALKEVEEVVRRVTK

SEQ ID NO: 1728 - protein, 178 aa, Artificial Sequence
  Synthetic
KAAEEIRKKVEDYKRESEKILEEVEDHSRRSKETLKRLLDRDHMVLHEYVNAAGITKRRPRTEEIAKRAEEAVRRAAERIKKVIDDVERHIRENAKELKRLLEEDREASRRLEDEIDKEVKAREVADELKKRLKRANEESERVLRELAERNKTALEEAERVLRRLKEEIEKVLRKLKK

SEQ ID NO: 1729 - protein, 176 aa, Artificial Sequence
  Synthetic
REAEEAKEEVEELNRRNKKELDDARRRVDELDKRNKDRLKRDHMVLHEYVNAAGITKEEGRSDDRLREKIERMLKTSADELERLKEENKRALRDLAERLRELIERNRRKLEEITRRTVPDKDVLKRLAELIKESIRELERVLEELAEKIDRSLKELDDVLRKNETDLKRVIEDLKR

SEQ ID NO: 1730 - protein, 179 aa, Artificial Sequence
  Synthetic
DEAEKAKRDSEKVVEDNRKMLEDSTRRAERLNEENKKELKRDHMVLHEYVNAAGITKRRGTDDEVVKDLIRRVEELLERSRKKLEDLTRDNERVLDESRRRLEKLIRDNERIVKDLTDRVVRVDEVLKRLKEEHRRLIEELEEVLRRNEEIIRRSIEDLERVLDRNRRELEDVIRRLKE

SEQ ID NO: 1731 - protein, 174 aa, Artificial Sequence
  Synthetic
SEEEVLREAAKTVEKLLDEIRRSLEKVSKRVEDSNRELKERDHMVLHEYVNAAGITRKNNVDRTLLEDVRRKLERIEERNEEMNDRSRRKLEELRERNRKILEDIRRTLEDLKRRQLPKDDVERTLREIAKLVDEVDKENKRALRENEERVKTLNRENEEMLKRIEEEVRRATK

SEQ ID NO: 1732 - protein, 182 aa, Artificial Sequence
  Synthetic
SELEKTLEDLKRHSEENKKKLEEDLRDMERNLKENKDRLKRDHMVLHEYVNAAGITFREGDIDERELERVRRKMEEIKKRLDENVERNRRKAEDIKRKLDENVKRSEDRVKEIKEDIRRRVRDKDKAEELERRLDELVKENREIHERVKKALDDIVKELEELHERLKRRLEEILRRIAETVR

SEQ ID NO: 1733 - protein, 186 aa, Artificial Sequence
  Synthetic
SEIEKLIEELRRELEKVKDELERSIEEMDRELDDVRRDSKRDHMVLHEYVNAAGITTKRGDRPEEVLRKELEDIKRKLRRILEEHHEKIRRIKEKLRRENKRVRDELKRIKDEIDEKVKDVRRKGADEELLKRLEEVAEDVKRALEELLKKHTRVVERVEKALDELDKELERIVREAEKELDRREK

SEQ ID NO: 1734 - protein, 179 aa, Artificial Sequence
  Synthetic
RLEDEVRKMEKEVREEVKRLEDESRKVLEESRRNLDKLRERDHMVLHEYVNAAGITRRRGLDERVLRELLKRVREVHERNRKLLDEVRRASEKVHEDNRRILEEVRKTVKDVVDKLRRVDAKVVKELIDRVRKILEDVEREVKKSIEEVKEINRRLNEEVKKTIEEVKEIVKEVTERAK

SEQ ID NO: 1735 - protein, 174 aa, Artificial Sequence
  Synthetic
SESDEVIRDLARLLDELARHVDDSVRRMDEVVKRSTREADRDHMVLHEYVNAAGITPGDERVERMVAEIERLVAEVLEELKKKYEKLKREVEENLRRLEETVRDIVEKARKVTEKGVSKEKIDRIIRELERILEEAKKKHEDVLRRLEDSLRRVAELLKAALDRLREIVDRLRR

SEQ ID NO: 1736 - protein, 174 aa, Artificial Sequence
  Synthetic
SESDDVIRKLRELLEELRTHVEKSIRDLRKILEDSTRHAKRDHMVLHEYVNAAGITPGDEEVRKTVEEISRRVAENVKRLEDLYRRMEEEVKKNLDRLRKRVEDIIREVEEARKKGVDEEKLKDLIRKLRDILRRAAEAHKKLIDDARESLERAKREHEKLIDRLKKILEELER

SEQ ID NO: 1737 - protein, 172 aa, Artificial Sequence
  Synthetic
SRAETVLKEVTDKIKKLADSSDELLRRNKENIDELKKSSERDHMVLHEYVNAAGITSVDEETLEELIRRVEAELEAHHRELEKNSREDEKRNRDHHAKLEEEMRRVEERLEREGIDDEVVKRVRDLLDTVRRRNEKVNEDVKRMNDKLRRDNEDVIRRVEKLLRELEEKRRT

SEQ ID NO: 1738 - protein, 177 aa, Artificial Sequence
  Synthetic
DEVRELLERNRRLLEEIKKTVKDLIRANEELLKRIEDDAKRDHMVLHEYVNAAGITLSDDETIREAKERLKASLEDVKRRVEEVKRLLEKSLEEVETIIREAEKRNRDSLREMERRGSSEELEELRRVVEESDETIKRLLEEAKESVDRSLDRIRKLLEDVRRSVERSAKRIDEKRK

SEQ ID NO: 1739 - protein, 180 aa, Artificial Sequence
  Synthetic
STEEVLDEIRKLHKTLTEDIKRVLREIEELHRRTIEENKERDHMVLHEYVNAAGITRTKDTPNVEKLLKDLEKSAKENIEHNERTLREDDRVLKEIRRRATELLKANEEMLRRIEEVARKGGVDAEELLRESKEAIKEVKRVLEELRKESKRVVDETRKLSEENLEHSERVLRKVEEDLR

SEQ ID NO: 1740 - protein, 188 aa, Artificial Sequence
  Synthetic
SEIEKILKEIEDLARRDEEVSKKIVEDIRRLAKEVEDTSRRDHMVLHEYVNAAGITLRKDGSKEELEKEVREVVKTLEELVKDNHRLIRRAVEEMKRLVEENHRHSREVVKELEDLVRELRKGSGSEDSERLVREVEDLVRRLVRRSEKSNEEVKRTVEELVRRMEESNDRVRDLVRRLVEELKRAVD

SEQ ID NO: 1741 - protein, 186 aa, Artificial Sequence
  Synthetic
SEAERLEARARELLRANEELMDDLRAKAEELLKRNDRLVKRDHMVLHEYVNAAGITKRRGEPKEEVARKIEEILRRLEETLRRIKEESDRLDEELKRELERVKRESEELDRELRKLIEDVERRGSGSKRLEELLRRLNEEHKRISDELRKLLDEALEAHRELSRRLEEELERLLREIERLVEEVTR

SEQ ID NO: 1742 - protein, 184 aa, Artificial Sequence
  Synthetic
DDLERAREEVADLIRKHEEKTRRILEESRRLNERHRELSARDHMVLHEYVNAAGITIKRERGKDELRRKVEDLEARVEDLIRRLEEHLRRVHDKDRRLIEDLRRHLKRVVEELKRLIDELRRGVPKEELDRIEEELKRLIDTLREKNREVEKRARDSNRDLKRTNDEIAKEVRELIKKLREDLK

SEQ ID NO: 1743 - protein, 174 aa, Artificial Sequence
  Synthetic
DEEEDLERAIKKLLDENRELLKRIAEELRRLLEELRRLTERDHMVLHEYVNAAGITGVPEEDLADVAEKVKKVLKESEDSNADVARKLEKLLRDLERSTERLEREARKVRKLLRGGKDAETLLRELEKLSRDNKELLKKIEKEIRDLIKEDKERNIELSERLRKLVEELKKKAT

SEQ ID NO: 1744 - protein, 184 aa, Artificial Sequence
  Synthetic
DEIRKVVKEITDLLKASNDKNRKVVEEIRDLLRKSKKLADRDHMVLHEYVNAAGITIDKSGDKETAEDIVRRIIEELKRILKEIEDLARRINREIERLVEEVERDNRDVNRAIEELLKDIARRGGSEDLKRVEERAREVSRRNEESMRRVKEDADRVSEANKEVLDRVREEVKRLIEEVRETLR

SEQ ID NO: 1745 - protein, 184 aa, Artificial Sequence; identical to SEQ ID NO: 1744
  Synthetic

SEQ ID NO: 1746 - protein, 176 aa, Artificial Sequence
  Synthetic
STAETVEKKVEEVIRENEKSMRESEEKVDRSTKRIEDVLRRDHMVLHEYVNAAGITVKGERVKEVLEENRRLLEEAKKLVDEVLETNKKLLEDDKRLNEEVSKTLKKLLEEIKSVDTREDATRVIEEAKRILDEARKLNEETIRRSEELVRRIERVIEEIIKRSEKLLEDVARESK

SEQ ID NO: 1747 - protein, 186 aa, Artificial Sequence
  Synthetic
SRVEEIIEDLRRLLEEIRKENEDSIRRSKELLDRVKEINDRDHMVLHEYVNAAGITVREKGSESEEVKKALRAVLEELEKLLRRVAEINEEVLRRNSKLVEEDERRNREVLKELARLVEELIREIGDEDKARKVAEVAEKVLRDIDKLDRESKEAFRATNEEIAKLDEDTARVAERVKKAIEDLAK

SEQ ID NO: 1748 - protein, 186 aa, Artificial Sequence; identical to SEQ ID NO: 1747
  Synthetic

SEQ ID NO: 1749 - protein, 180 aa, Artificial Sequence
  Synthetic
REVEEMIKELEELLKDLKEKNERASKRNRELVRRLEEENKRDHMVLHEYVNAAGITVRSGEDEEVLREVLKRLEEVLERVRALNERVLEAIEKSLEEVKASNEAVKRRLKELLEEAERGVDSEKLKELRDVIAEVAKRIDELDEYTRESIRRAKKEIERLNRETKKVIEEVVKRIEEERK

SEQ ID NO: 1750 - protein, 181 aa, Artificial Sequence
  Synthetic
SEVDDVLRRLEELIKTLEDINAKSLEDIKKLIDDLAKILERDHMVLHEYVNAAGITKKGIDSREAEEIAKRVLEELKRTSDDLRKKVERVDEDLRRLLRENHERNKKILRDLERLLRDAARRGVPKEALDRMREEIRRLEEESRKSDETIERLIRELRRRVEEVLKTSTDLIRELEEEVKK

SEQ ID NO: 1751 - protein, 183 aa, Artificial Sequence
  Synthetic
SKLEEVEKAVRKVIEDSRRVNEEVNRRSEEVVRELEKVHRRDHMVLHEYVNAAGITLKGSGDERLAAEVERIIEEIRELNERDRKRVEEIRKEIEDLNRDLNRRSKESEDRLRKLLEDATRGGVTKEADEVVERAERISEENKRRVEDVARKSKELVEDVRRHSEEVVRRVEELVKEVEERVR

SEQ ID NO: 1752 - protein, 180 aa, Artificial Sequence
  Synthetic
DEVEDVLRKIEKILDDHRKRIEKNSRDMARIIDEHRRKVERDHMVLHEYVNAAGITVDRGEGDEETAEDVKAKLEKSNRELEKHSEEVKRALDESNEDLRRHSEEVKERIERLVKKLREDGVEREEELKEVADRVKEKLDRLNRENEKSSEELKRELDKINDENRETSERLKREIDETTR

SEQ ID NO: 1753 - protein, 185 aa, Artificial Sequence
  Synthetic
SSVEELLERLRRISEENKRRIEKLLREVEKVLRELKDRHRRDHMVLHEYVNAAGITIKSGLPEEAVKRVLERVRERVKEVLEEADRLNDEMRRIVTEVEKELDKSDKEVEDAVRDILKKIEEGVRDRETAERARETLKRLLDENRDRSKKVKEEIRRILEDLTRTTERVKREIAKLLKELEDTAR

SEQ ID NO: 1754 - protein, 238 aa, Artificial Sequence
  Synthetic
EEDERLTKRVEEIKRENRELLRRLEEEVKELERKSEKIVRRDHMVLHEYVNAAGITKGSTELLVEELEKLIREILKLSEDHNRTLEEVVRKIEDVLRANLERLKELVDEILKALKERGKGDSEELKRKVEKVARDYERLLRKLREVVKRILDESKRLDEELEERLKEVLKKLEELIKRGGPDKDVLTELKRILDELLKLVEKLIRRNLRLLEELLRLVREILRTSNEILEEILKDARR

SEQ ID NO: 1755 - protein, 238 aa, Artificial Sequence
  Synthetic
SKEDKARELEKRLRDNLKKLEEVVRELAEVLKRNLEKLRRRDHMVLHEYVNAAGITRAGGLPKDELEDLRREVEDVLRRLEDLLRKLKKANDESLTRLEELLRRAEEENRRVLTTLRELLRGNGDDRDLARLVARLVEANNRALEELLRLVAKNVEDNNRVLEELLRLVKELAKRLLGRIRDEDLVRDIRRELKELEERARKILRDDERDLRALEKRIRDIIREDREELERLKERARK

SEQ ID NO: 1756 - protein, 244 aa, Artificial Sequence
  Synthetic
SAEETLRRITEESKRVLEEITKKYEDLERESREVLRKLRERDHMVLHEYVNAAGITGDDKDEVLTVLEKVLDELLKLHRENLRVIKELLRKVLEVDRENLEVLKRLLEKARDLLRRSGRDEKDLKKLEDELRKVKEELEKKHEASKRDIEDLERELDKVTEEVERLLRKLKEELRRAAEGSDEDRERLARLLKALADKLIRVLEEILKINEELNRKIIKFARENLERNRRVNKKVIEVLREAAR

SEQ ID NO: 1757 - protein, 244 aa, Artificial Sequence; identical to SEQ ID NO: 1756
  Synthetic

SEQ ID NO: 1758 - protein, 247 aa, Artificial Sequence
  Synthetic
SEKEELLKLIKRVIELLKRVLEEHLRLVEDVIRRLKELLDRDHMVLHEYVNAAGITLDEVRGDKEELDRIKEKLEEVLERYKRRLEEIKRDLERMLEDYKRELKRIEEDLRRVLEEVERIATRGEGPAEALIDKLRKILERALRELDKLSKKLDELLKKVLEELEKSNREIDKLLKDVLRRVEEGGASEDLLRKAKKVITEVREKLKRNLEDVRRVIEDVKRKSARILEEARRLIEEVERELEKIRK

SEQ ID NO: 1759 - protein, 247 aa, Artificial Sequence; identical to SEQ ID NO: 1758
  Synthetic

SEQ ID NO: 1760 - protein, 238 aa, Artificial Sequence
  Synthetic
SEAEKIREALETNLRLLEELIKRLKEILDTHNELLRRVIERDHMVLHEYVNAAGITGLDEEVLREVKRLVDELRKEARRVLDEHEKLVRKIKKEAEDVARESEEIIKEVEDKLKGLDREELLERVRRVLKKSDDLIAELVRRALKILEELTRLLAELLKKVVEILRRIVELVERVLTKKGAPKEDLERLRRKVEELEDRLRRLLEKLARDSAELMRELERILDRYARESEELDRRLAE

SEQ ID NO: 1761 - protein, 238 aa, Artificial Sequence; identical to SEQ ID NO: 1760
  Synthetic

SEQ ID NO: 1762 - protein, 242 aa, Artificial Sequence
  Synthetic
SEKERLMRLLDKLKDLNRRLVERIKELLDKALELHKKLVKRDHMVLHEYVNAAGITGVPEELLTRIDELIKKLEDEARKISKEVKRLIDELKKRLEDIHREVDRLIRELKETLKGVTDKDELLRRVAEVLERIARLSEELIREVKEVLEKIVELSRELLKRVLDVLRRIAELLEDALRKGNVSEETVRRLREALKKLEDDLRKIERDAEREYKKLKDELEELTERYRREIRKLKEELKADRK

SEQ ID NO: 1763 - protein, 242 aa, Artificial Sequence; identical to SEQ ID NO: 1762
  Synthetic

SEQ ID NO: 1764 - protein, 247 aa, Artificial Sequence
  Synthetic
SEAEDLEELIKELAELLKDVIRKLEKINRRLVKILEDIIRRDHMVLHEYVNAAGITTVEDKDILRDLERRLREILEESDRLLEELKRRLEEILRKSKELLRRLEEVLREILKRAEEVKRSNLPKEELIKEIVKLLEELLRVIEKILEDNIRLLEELVEVIKEILEKHLRLLEELVRVIERILREVGKDKDEAERRRRELKDKLDRLREEHEEVKRRLEEELTRLRETHKKIEKELREALKRVRDRST

SEQ ID NO: 1765 - protein, 240 aa, Artificial Sequence
  Synthetic
SDKEEIKRRVEKTARDLETEHDKIKKRLEDTVRDIKRELDRDHMVLHEYVNAAGITLREGDGDATDLVDKLLETVKRLNEEVLRTVKKIADELRRLVEEVLRVLRESNETLARLLEEGNVGDEVRERLEEVLRRTEEIIKTLEEIVKRLLDELRRLVEELRRISKKLKDELDKIKEKGKDEKRLIEEVVRLLRENLDVVRRILEALAKLIKELLEALEEVLRRNKELIRELLRVLDEALK

SEQ ID NO: 1766 - protein, 240 aa, Artificial Sequence; identical to SEQ ID NO: 1765
  Synthetic

SEQ ID NO: 1767 - protein, 248 aa, Artificial Sequence
  Synthetic
DEEERVKKLLTDLRRLLRKLHEESKKLLDELRKKLRELRRRDHMVLHEYVNAAGITEKKLPGTRVLKLVADVVKKVLDAIRDLNRKLEEIIDEALKLLEELDDILRRVVEEALRLLKEIKDTKGDREEVKKRVEDILKRLEELVKEYEDRVREIKKRLRRALEELRDEYRKIREDIERVLDELRKGGVPEELLRVLEELVRTLKKLLDENLKMVERLIRELEKVLDDHERKVRRLIEELLEVLDRDAK

SEQ ID NO: 1768 - protein, 248 aa, Artificial Sequence
  Synthetic
DEDRIIEEIARLLEELLRELLELIKKLIETNRRLNEEHERRDHMVLHEYVNAAGITVKKGISDEKLKRIRERLKRALDDLERLHREINKRLEDLVRELEKLVREILKELKDALEELRRASARAGGEEVLRRLEEIVKKLLDLVRRILERLKEIHKDNVRLLRELNERLTRIVEDLVRLIREILREAGVDEKIAEEIERELEELRRMIKRLHEDLERKLKESEDELREIEARLEEKIRRLEEKLERKRR

SEQ ID NO: 1769 - protein, 238 aa, Artificial Sequence
  Synthetic
DADELLRRLAEEVERVIREAEDLLRRWKETIKKVLDDLKRRDHMVLHEYVNAAGITTKTKGDEELAKLIKDLLDTNEKVNRDLLRLIKKLLKDAERVNRRLLELIEELLEELKRVAKDLGLREEADKKLRDIADRARKELEDYERRLKELLKTVEDALRKAEEDSRKLKRDVEELLERGRLRKDDLEDILRKNLDRLRKLLERLREILRENLEALKKTLKRLEDVVREILEDLKRERK

SEQ ID NO: 1770 - protein, 236 aa, Artificial Sequence
  Synthetic
STREKAKKVLDTLRADNEDMKRVVEKILRALKRTNERAEKRDHMVLHEYVNAAGITGVSEEALKEIEDTLKRVLEEIKRLLDESKKLLEDVEREIREILKTSEELLERIEREIETVGSDEKTLAEILKRLLELNEEMNRRLLKILRDLLRLNEEVIRRLLAVLERLLDALKEALDRGDVPEDLLRKLEEELRRIKEKLRKALEELEREHRELEKELDKLHDESRKEHERIEEELRR

SEQ ID NO: 1771 - protein, 236 aa, Artificial Sequence; identical to SEQ ID NO: 1770
  Synthetic

SEQ ID NO: 1772 - protein, 247 aa, Artificial Sequence
  Synthetic
SKAEKLLKDLREALEKVKRRYEELERRLDEVLKEHEEIVKRDHMVLHEYVNAAGITGLPEEELEKLKKLAEKVKELLRELLRLSKELVDRVRELLKRDLDLVRRLVEIALKVLREAREQPNDEKRVEKIKRDLEKKARRVREENERIKRDLKRTADESRKRLEKLLEDLKRELDRLREDLDRGRKDIDERVEELIERLIRIIERLLREVIKSHEKLVRTIERLIEESIRVNEELLEVIERLLDRARK

SEQ ID NO: 1773 - protein, 247 aa, Artificial Sequence; identical to SEQ ID NO: 1772
  Synthetic

SEQ ID NO: 1774 - protein, 243 aa, Artificial Sequence
  Synthetic
DLERVVEDIVDKAKRLLDKNLEVLKRIVDEVLRLLERLLRRDHMVLHEYVNAAGITVRDEKELRRVKRALEEVLRRHEEIAKELKERLRKVAKEAEEKHKKLVEDLKRVVDEVRKKLSGPLDREKVLEVLDELVTIIAKLLDENIKVLEEVIRVIAELLERLLDSHRRLIDIIAKLLEGLRPGDEDLLTELEKKLRKLKRDSEKVVDDLKKELERIKREVKRLIEENARTLADIKRAVDEARK

SEQ ID NO: 1775 - protein, 239 aa, Artificial Sequence
  Synthetic
SERELIERWLELHKEILRLIRELVERLLKLHREILDTIKKRDHMVLHEYVNAAGITGLDKEAKDELREIAKRVEDKLEKLERESRKVEEDLKRKLKELTDESDTVEKRVRDVVRRGTQSREEIAEELLRLDRKLLKAVEELLKEILDLNKKLLDDVRAILEETRRVLEKLLDRVRRGERTDDERRTLTELLKRMEDILEKVERTLKKLLDDSARMAEEVKKTLKELLERSEKVAEDVRK

SEQ ID NO: 1776 - protein, 246 aa, Artificial Sequence
  Synthetic
KEIEETLKELEDLNREMVETNRRVLEETRRLNKETVDRVKRDHMVLHEYVNAAGITVRKGPTSEELKRLLAELEELLARVVRRVEELLKKSTDLLERAVKDSADALRRSHEVLKEVASRVKRAKDEGLPREEVLRLLRELLERHAKVLKDIVRVSEKLLREHLKVLREIVEVLEELLERILKVILDTTGGDKAVEELEKALEEIKRRLKEVIDRYEDELRKLRKEYKEKIDKYERKLEEIERRERT

SEQ ID NO: 1777 - protein, 231 aa, Artificial Sequence
  Synthetic
SKEEEVEKVLRKWEEILRRLIEENKRANDKIRREYEELVKRDHMVLHEYVNAAGITGVSEEVKRILEKLIKLLEDILEYEKENVERLIELNERILRELKKSVEELKALVTRVRRDGLPESEVRKLVEDVLRKNEELLKEAKKAWRDSIENLKRVLEEVAKLVKTVLREIEEKIDDEDVVRALIEVIERLLRVAEEVIRRILKVNTELMRVDERSIRESLKAISEVLKVLDT

SEQ ID NO: 1778 - protein, 247 aa, Artificial Sequence
  Synthetic
RDRDVLRKVKAEIEELVARIEKVSRDALSEVKRLLDENRKRDHMVLHEYVNAAGITRDTRGDDEVVKETEEVLRDNHRLLEELIRRLIKVLEEWLRRHKKLLDEIRELLKEILRLVKESGVSEDLLRRLKRVIEELDKKLKESEEKLRRVVEKAKEDLKAVLEEHRKVLEDLKRALEEVREKLRERGSEEVVEELLRMLKRVAEEMKRVHDDLSRAVEKVVRDVVRVDKELLDELARILRRLEEVIT

SEQ ID NO: 1779 - protein, 231 aa, Artificial Sequence
  Synthetic
SKDEELARLLEELVERWRKIVEDLERDHRRLVKEIRELVERDHMVLHEYVNAAGITGIDERIVRLIEEIAKIIEEVLKEIVKLVERAVRENVRVLRESVRLVAELVETLARLLRGSDERVTEAIKKVLDTSEDLIRRVIKVNEDILREIAKLVEEVLREAERILTEIKKEGDREEIRRILEELKRIVDDVLRIIARILKLLRDLTRRLAEVAKAVHKLLEELLRKLKEDTR

SEQ ID NO: 1780 - protein, 231 aa, Artificial Sequence; identical to SEQ ID NO: 1779
  Synthetic

SEQ ID NO: 1781 - protein, 238 aa, Artificial Sequence
  Synthetic
SEIEDVIRRLRKILEDLERVSEKLLREIKKILDEARRLNERDHMVLHEYVNAAGITFRDGSGSKEELAKLVEELIRELAKLAKEVDEIHKRIVERLKALVEDAERIHRKIVETLEEIVRGVPSEELKRVVEAIVEVIKEHLKVLADVIRRIIKAIEENAETIKRVLEDIVRVLELVLRGEGSIEDLVREVERLIKRIEDSLRELEKTVRELLKRIKEASDKVREDVDRLIKELKEAAD

SEQ ID NO: 1782 - protein, 237 aa, Artificial Sequence
  Synthetic
KEKEDALKKLEDLARKSREDLERVLRKHKKILDKIEELLKRDHMVLHEYVNAAGITTGTESEILKELARLLREHHEALRRLIEELRRLLEEHHKILEDLAREHKRLLDELIKVVADGVDKDELERIIKELRERDKKLVDDLRKVSEDLLDAVRKLVEDLERISRELLRRVEELAKGIDEELAREVERVIKELLDKSKEILERIERAIDELLKVSEEILKLSEDASEELLKILREFAK

SEQ ID NO: 1783 - protein, 237 aa, Artificial Sequence; identical to SEQ ID NO: 1782
  Synthetic

SEQ ID NO: 1784 - protein, 229 aa, Artificial Sequence
  Synthetic
SKEERLREVAEKHKKDLEDIVKRVDEAAKETARRLEEILKRDHMVLHEYVNAAGITPDDEKLKKVKKILKDIMDRLAELIKKILKLLKENLEKIKELLRRNLEISEELLKLAKGLSDRDVLETVRRVLEKLDEEWDRVLEDSRRIIETILRELDTLLREVEKLIKEIKDEISGSKEVLDILERAVEVVRRVIKALKEVLERHVDATREVIERVKRVNKRLLEAVREVVT

SEQ ID NO: 1785 - protein, 246 aa, Artificial Sequence
  Synthetic
SEREELLERIKEILKRVKDKLDEDLKRLKEILEKLKEKADRDHMVLHEYVNAAGITLERTGRTDELVKEVLDTVRRNLENLKRLVEDILRKLEENVKNLTDLVREILKLITELIKRLEDGGLPKEVLDALRRVLEKLEELLREILERLKRSLEAVKRKIEELLKELERSLDELRRALERIRKEIGDSETAVRAIIRVLEKHLEAVRRVLEELLKVLAEHLETVRELIERLKRVLEEAIEVVERVAR

SEQ ID NO: 1786 - protein, 246 aa, Artificial Sequence; identical to SEQ ID NO: 1785
  Synthetic

SEQ ID NO: 1787 - protein, 240 aa, Artificial Sequence
  Synthetic
DREKSVRDIEEDLKRVLDKLRRRVETSKEELKKVLKADKERDHMVLHEYVNAAGITDRGIDSEVLRAVREIVKRLVEVVRRYNELSEKIIRDLVRVNDRVLELLKRIVKRLIDVVRELEKIGDKEKALRRLEEVVKEVKRRIEELLKELEDVHRELVKILEEVNEDLKRVATEVKEIIKTGIKSSEVAKELDEVIKRLLDNLKENTDRLKEVIDRNLADLRDLAEELRAVIERLLEDARR

SEQ ID NO: 1788 - protein, 240 aa, Artificial Sequence; identical to SEQ ID NO: 1787
  Synthetic

SEQ ID NO: 1789 - protein, 237 aa, Artificial Sequence
  Synthetic
REDEVLRDIERLLREIEEKIRRILEESTAELRKVEEEVKRRDHMVLHEYVNAAGITERKGIDEELRKLLDEVLDKLTKLIERNKRSLERILELIKRIIDENLEVLRDIIRLLEELLKATKDNGVPKDEVIKLVEDVVRRIEELVTRVVARNEKLVKDLDDLAKKNVRENEELLREIDRGLDEDLLEKIKRVIREHIKALEKLARDLKEILRRHIEALKELARDLAEVIRKLLEDVKR

SEQ ID NO: 1790 - protein, 243 aa, Artificial Sequence
  Synthetic
SEAERLADEVRKAVKKSEEDNETLVREVEKAVRELKKNNKRDHMVLHEYVNAAGITLRDGQVSDRDLLKELEEVLRRVLEALAENHERTEEILKRWLDRYAEDIERLRKVLKEVIEALKRGGSDDKRIVDELEEILRRNEDVLDKIAKRLRRLLEEDRRLLERIVRELKRLLDDLDRITKEGKSEELVRIAIEVLKRLLEIIEELVRLNNEILERLLKIVRELHKDNIKILEDLLRIIEEVLR

SEQ ID NO: 1791 - protein, 243 aa, Artificial Sequence; identical to SEQ ID NO: 1790
  Synthetic

SEQ ID NO: 1792 - protein, 245 aa, Artificial Sequence
  Synthetic
SEKDEVTRRIRELLKEAEETNREAIERIKRLLDRVREAVERDHMVLHEYVNAAGITLDRGLQDDEALLKLLIDALREHNRLSTELIKILIDVLRTILKIIKDVLATNIEIARRILDLVRRLAERGGLDDRLVKEVEKLVRTAERLHRDALRKVKRLVEELEKRLRELVKTDHDLVRRLETLLRRGSGSKEDLLREIARILAESLRLIRELLKEIEKIVKEIIELLERLNDELRKIIEAILETTKK

SEQ ID NO: 1793 - protein, 245 aa, Artificial Sequence; identical to SEQ ID NO: 1792
  Synthetic

SEQ ID NO: 1794 - protein, 232 aa, Artificial Sequence
  Synthetic
SEKELVDDIRRILEEILRLLRSLLEEVIRLLEENEKLVRRRDHMVLHEYVNAAGITDENGIRTDEADRVLERLEKAHRELLEDYKRALEKIKETLERVLREAEEVVKKIDDALRKLGGSKEVLKRLLEELLRLVEKIAEEIKRLLSELVRVTEELVRTNKELLEEAVRVIRKEVGDDSLVREVEELIKRLEKHIDDLLKTSRDLVKRVLDLVDEVVKRVEDLVERVKEKIDT

SEQ ID NO: 1795 - protein, 247 aa, Artificial Sequence
  Synthetic
DEERLAEELERVLDRNRKLLEEALRELRRVIEENRKSVKRRDHMVLHEYVNAAGITRELSRGDSDEELRKVIEDLIRKLTKVLDKVRSLVEENIERLARVLEKLERLARENLEDLKKVLDDVDKKLKDRRLVERLAELVRELIEVNKEILEMLKEIVRELLEINRTLLERLKDLVATALEIIKLLARGDGTEEDVERAVKEIRDRLRKLLEDYERAVRRLEDKLRRVRERYEAVLKRIKDKLEETKR

SEQ ID NO: 1796 - protein, 240 aa, Artificial Sequence
  Synthetic
DKDKRLEELLKRLKELNDKTFEELERILEELKRANEASLRRDHMVLHEYVNAAGITNLDKRLAELLKKLLDDLKRLLEEYTRTNEELLKRLRELLERYRETNKKLLDLLRKLLDEARRTGTDEDLLRRLEDILRKYEDEVRRLLKELEDILREYEDTSRRLLEELERIAKEAAERVSRGSDKDVKDIIRTILEVARDLLRLLEEDSRTNSEVVKRLLDLLREDSKANSEVVKRLLDVLRE

SEQ ID NO: 1797 - protein, 240 aa, Artificial Sequence
  Synthetic
SKEETLKRLLDELEKRNRETVERLERLLKELEDRNRASLERDHMVLHEYVNAAGITGLSKELKDTLARILEELRKLLEEYFRKNEELLRLLRKLLDEYARTNEELLRLLEELLDTARRTGGDSELLKRLEDIAREYEKRVRRLLEKLKDILDKYRKTVEELVRKMEEILKEAKKTISRIGSEEVKDIVRAMEEVIRRLIEILRRDVELNLDVAKKLLELLKEDSKLNLDVARELLELLDR

SEQ ID NO: 1798 - protein, 240 aa, Artificial Sequence; identical to SEQ ID NO: 1797
  Synthetic

SEQ ID NO: 1799 - protein, 243 aa, Artificial Sequence
  Synthetic
DEEETLRRLLERKVELAKEYLDVSKEVIDRTTKLLDEYLKRDHMVLHEYVNAAGITDLGPDELIKRLAEELERSLRELEEEIKRLKRELEESLKKLKEIIDRLAEEAEKLLAVLKRGEGSEEEALRALASLVRELIEVLRENDERLRDVLRRLIEALRKNNEILERVLRKLVRAAEERGRDESSREALEEARRRLEELLRELNEITKDLEAKLEKLLRDLNELTKALEEELKRLLDELKKRTD

SEQ ID NO: 1800 - protein, 243 aa, Artificial Sequence
  Synthetic
SEAERTKESLKKVLKALVDLNRELLRKLEENMRELTKLNERDHMVLHEYVNAAGITGIVDKDAEREAERLMRELDKSSEDTARETRKLIEESKKSTRRTEEEARKLTETLDRLAKGGLPREDLLRALVRLLEELARLIEEDVRRNAELVKRHIELVERDVAELLRLIKELVDLLADLAEKGSRTEEIRKIVEEILKEIKELADRYREEVRKSKDKLRSILEDYKRKVDELKERLRELIEEVET

SEQ ID NO: 1801 - protein, 182 aa, Artificial Sequence
  Synthetic
DEAEKLLKELRDLLEESRKDLERLLKELEDLLEESKRDLERRDHMVLHEYVNAAGITERRNEREKLEKLLRELKKVVERLKDNLKDNERRNKEAIERVRKKLKDNERENKKVIEDLRAKLKDLEEVKRKIDRLEEESRRVIEEARKRLEEVEEKSKKIIDDARRALDRIDKELRRVVEETRK

SEQ ID NO: 1802 - protein, 184 aa, Artificial Sequence
  Synthetic
SLEEVIKTVRKLLEEVERRLREVVERAERMLEEVRRRTREVRDHMVLHEYVNAAGITDKNVSEEIEEKLRKIKEELERDNEKVNRDNERSVETLRRLLDRVRKEVKDIAKELEERLKEVERKSRDDRIVEKLLRDAERIVKRLRELIEKLREEVEKIVDENRKTVEELRRRNEEIVRRLRREIE

SEQ ID NO: 1803 - protein, 181 aa, Artificial Sequence
  Synthetic
SLDEVVKRLEDLLREVEEKSKESSKRMEDLNREVNERLRRSRDHMVLHEYVNAAGITDAGRDDKIRRTLERLSEDTKRKSDKTNEDLKRLSDETRERSKRLNEELRRLVEEVRRRLEDLRRKGSPVEEIKKLADKVVTELEKLVEDDRRLAEESFERARKIVEEDERLARESVDRARRLVD

SEQ ID NO: 1804 - protein, 181 aa, Artificial Sequence
  Synthetic
SEVERVLEDLRRLVRDVEEKLRRIIERDRRLVEEVERENRKRDHMVLHEYVNAAGITKDISDKKTIERIVREIIKEARDLVRRNHERNREIVDESRRLVEELRRIVEEIIRRLRELLERVKSGELAERIEDVVREAEKRLRELLKELEKTSRDLKKRLEELDRELKALVEKVERDLEELRK

SEQ ID NO: 1805 - protein, 177 aa, Artificial Sequence
  Synthetic
KEEEDLEREVKRLEDKVREDAKKLEEVVKTVEKLVRDDARRRDHMVLHEYVNAAGITERKLDEETLRKVKEDLKRTLERLKRENEKSLEELRDILRRLKKENDDTLKELRDELKRLTDSGASEDVIRKMEEIIKRLEEVSREVEKRLRRIIRELERVSKEVLDRLREIIEKLDRDAT

SEQ ID NO: 1806 - protein, 174 aa, Artificial Sequence
  Synthetic
SEDETIRRIVRTVHEESRKSTEDVRREVERVLRESEEVVKKRDHMVLHEYVNAAGITISEELEERMRRIIREIREHLKDNLRRVREVIERIERKLEETERRDEKVLREIEKKIRDGDGREEVAREVTKIARDTIRENEEIAKEVREIVERSIKNLEEVAEEVERVVRELIEARR

SEQ ID NO: 1807 - protein, 174 aa, Artificial Sequence
  Synthetic
SRDEKIRDILRRVLKEVRDSTKKVEEDLEDVHRRTEEELRKRDHMVLHEYVNAAGITASEELKRRMEEVVRRIEELLKKLLKEDRDVVKEIRDKLDETRKEMEEVAERIKDKIRRGDGREKVAEEVKRIADRLIDLNRRIAEEVDKIVRDSIKKVEEIVTEVEKIVEKLIRDVR

SEQ ID NO: 1808 - protein, 179 aa, Artificial Sequence
  Synthetic
STREDARRLVERVRKEVKRLLKKNSDLLREVTERVKTLNERRDHMVLHEYVNAAGITDSDERDVERLLDRARKLVKESEDLIRKLLKDLRELVRRSEKDIDELRKELKRLLDELRARATDKDLERVVREIEKEIRDLIRELEENVKTSEKLIEDLIRELEKSVDESRKRVEELVKELRT

SEQ ID NO: 1809 - protein, 174 aa, Artificial Sequence
  Synthetic
SELEKVVKEVADLLRRNLEKSKRVLEEVRRRLEENLRESEKRDHMVLHEYVNAAGITREGKDKRDLTRLLEEDDKRVKEALDKSRENNERILKEVRRALRESEEDNRRILKEVREKVDSRLLEELEERVRESIERSRRFIEELEKIVEETLTESEKLARASSEITKTVLDEIRK

SEQ ID NO: 1810 - protein, 178 aa, Artificial Sequence
  Synthetic
DDLERVLKEIKKAADKIREDNKRTADKIRKRVKELDDETRDRDHMVLHEYVNAAGITRGREEARKVIEELKKLVDEVRKRNEKSIEELKKLLKEDRDLMRRVIEELEDLVRRLREEVRDDEALRRVEEEVERLIRDLRRVLKETSDRVRELIDKHRRLSEEVEKDVKRLIDELKKKTD

SEQ ID NO: 1811 - protein, 187 aa, Artificial Sequence
  Synthetic
DEEEELRKRLEKLSKEVRELLRRDEEEDRRLNRELEELLKDRDHMVLHEYVNAAGITRKARRKVSEEELTRLRKKLRDLEEESKEALRELRRRVEELNKENKKSLDDLERRLKELEDRAREVEKRDRREDELRELLRRLEDVIRKLAEDLKRNTEDLRRVIKELAERLEELNKRLKREIRRLKEELR

SEQ ID NO: 1812 - protein, 177 aa, Artificial Sequence
  Synthetic
SVLEEVRRRVEELLKTVKESVDRSHERSERLIEEVRESLKERDHMVLHEYVNAAGITIPEDRVKRIEDKLREELERLERENRKIEEDLKRSNDELRRENERIAERLEELLRELSRDTNDKVARDVLEEIERLIREANERNKRNLEDVERVIRELNKENERVLREVEKKIEKLIRETE

SEQ ID NO: 1813 - protein, 178 aa, Artificial Sequence
  Synthetic
SSIERVEKEVRRLLRESDESLKRVMEEAKELIKSVRESTKRRDHMVLHEYVNAAGITGDEREDLRRVLEELRKLIEDNRREDKRSEDELRKLIRDNKEENDRARREAEKLLEDLSRGRSEEEVERVLEEVRRIIEKLKEDDKRSLERIERIVRRNNELNKESVDRIRKIIKEMEERAD

SEQ ID NO: 1814 - protein, 183 aa, Artificial Sequence
  Synthetic
KDAEDLERRVRELVEENNRVSKRLAEEVTRLVKENEDKVRERDHMVLHEYVNAAGITRRGEVREEEVKRVLREIEELLREITEHSKEVLKTIEKLLRDSLEHSRRVLEEIERLLETILRKSKDSERLKKLVDELRETLERSLRENEKVADELRKRAEKSLEDVKRVVDELRKIVDDVLKRVED

SEQ ID NO: 1815 - protein, 183 aa, Artificial Sequence
  Synthetic
SEIEKLVEDVRKLVEDNLRHSEEVHRRNRRLIEENERKIDERDHMVLHEYVNAAGITERGEIREEEARKVLEEIKRLLDEIRRHSEEVLKEIERTLKENLKHSEEVLRRIEERLEDIKRKDKDSERVRTLVDRLREELKRSLDESEKLNRESRKRVTRSLEKVDDLVRELEKLARKVLEEVKT

SEQ ID NO: 1816 - protein, 177 aa, Artificial Sequence
  Synthetic
REIEELRKEIETLIRENEELNRRSKETSEELIRRLKKLNRDRDHMVLHEYVNAAGITAPEEDVRRAEERVKKLIEDNKRHSDEVAKTDKKLNEDSERHTRRVEERLRELLDRLSRSDKDEVVRRVAEEARRLSKRNKDAIREVNETSRRLATRDAKHTRDVLREIKRLADEIRERTR

SEQ ID NO: 1817 - protein, 181 aa, Artificial Sequence
  Synthetic
EEIERALREMRELSRTHKELVEKILRDIAELAKTHERINEDRDHMVLHEYVNAAGITRKEDKKEELKRKIDELRRRAEELLKESKEHLKRLEDTVRELIERLKETLKKVEEDLKRILEKLEKSRELDEIAKDVKRLIDENRELLKRVEDEVRRLIRKLEELNRRTEEEVKKLIKKLEDDLK

SEQ ID NO: 1818 - protein, 174 aa, Artificial Sequence
  Synthetic
SEIEELEKRIDELLKELRDLSRRIAEEVKRLLEELKKLSKDRDHMVLHEYVNAAGITVPEEELRRVEEEVERVVRESRKLNKETEDELRRLLEEIKESNDRVEKRARELKKLLRDGKDVEEVLRRLEKLVREDKERLKKVLKDARDLIKKDKDLNEKLSRELEKLVRELEERAR

SEQ ID NO: 1819 - protein, 174 aa, Artificial Sequence
  Synthetic
DELRDVKRELDRLLRENEEIVERIAETVRRLLEELKKLTKERDHMVLHEYVNAAGITVPEKELKEVADTLRKLLKDIERSNKEVEDRLRKLLEEIKESTDRLREELEEVEKLLRGGKDVETVLRRVRELSRDNKRRMRRVLEEAKRLAKEDKERIDKIRKEIEELIKRLKDKAT

SEQ ID NO: 1820 - protein, 174 aa, Artificial Sequence
  Synthetic
DEEEDLERRIKKLLDENRELLKRIAEELRRLLEELRRLTEERDHMVLHEYVNAAGITVPEKDLRDVAEKVKKVLKESEDSNRDVKRKLEKLLRDLERSTERLEREARKVRKLLRDGKDIETLLRELEKLSRDNKELLKKIEKEIRDLIKEDKERNRELSERLRKLVEELKKKAT

SEQ ID NO: 1821 - protein, 174 aa, Artificial Sequence
  Synthetic
REIEEAAKDLDRLLEENKKLVKEVEEELRRLLKENRDLVKERDHMVLHEYVNAAGITVPEEELKEVEERARRVIEESRRSSKELEKRLRELLEELRRSTKELEDRLREIKKLLRNGKDVEEVLRRVRKLSRENKEKIRKILEDVKKLSEDNKRRNEELSRRVKTLVDEIKKRAT

SEQ ID NO: 1822 - protein, 177 aa, Artificial Sequence
  Synthetic
SEAEKVVEELKKLLREVEKKIRDHTEDVKRILEELERRLRKRDHMVLHEYVNAAGITSDDDTVRKVKEELDRSHEKLREELRKVAKELKESNEELERDLKRLVEEAEDRLRRLKDRVSEKVLRELEKILEDIKRTLDKLLRENRETLKRIEDRLRELLEENRKLLEKIERELRERSR

SEQ ID NO: 1823 - protein, 182 aa, Artificial Sequence
  Synthetic
DEIETVLDEVRRLHEDAKRRLEEMIDEVRKLNEESVRELARRDHMVLHEYVNAAGITERAGLDKGKLEELEERLERVREDVERILREIKRRNEKTLEDSERILEENKERNRTVLKKLKELRDRGSDAREALKESRKVVEESRESVRRVLEKNRRVVEESKRLAEELLRRVKKVVDEIRKRVE

SEQ ID NO: 1824 - protein, 177 aa, Artificial Sequence
  Synthetic
DEVEDILRKVEEIVKKSITDARRLLKEAREIVEESIKTAEERDHMVLHEYVNAAGITKRTTDEEKKKKLEEESRRVLEKTKRDLDRTKDDNRKALEKIRKRVKETEEENREVVDRVRKAGVDKRVLEKIKKVVDDSVRVNREVLKRVEEVLEESKRVNEKVEEDVRRVHEEVRKEIK

SEQ ID NO: 1825 - protein, 175 aa, Artificial Sequence
  Synthetic
SEVDEVLREAKRIVDEVHKDNERATEESRRLVKKVHEENEERDHMVLHEYVNAAGITIDEKLVTEILKEIEEALKEAARRNKEVKDRLRELSRRVSERNREILEELKERLDRVRERRKDVKELEREVEKLLKRIEESLRRHRKENKRLLEELDRSLRELAKIVKEVLDEIRERTR

SEQ ID NO: 1826 - protein, 175 aa, Artificial Sequence
  Synthetic
SEMDDVLKKLAETVKRIIERLKKLTDDSRRLVEEVHRRNDKRDHMVLHEYVNAAGITIDEKDVRKLLEDLKKKSEEVAERNKRILDTLREISKRAEDEVRKVLKELEKTLKELEDRRPDVRELSEEVKKLLDEVRKALKRHKDENDKLLKEIEDSLRRHKEENDRLLEKLKESTR

SEQ ID NO: 1827 - protein, 186 aa, Artificial Sequence
  Synthetic
SEVDEVRKTLEDLLRRLDEENKDIIRRNKELLDDLDRKVRERDHMVLHEYVNAAGITEKLKDRETLTRIIEEIEKRARELIKRLRDEIRKIEEESKKSIEDSRKRNDEIRKRLEELIKDLRDKIKDSEELARRITELEKRVREVIERLKEKNKRLEDDSRRVITELRKKLKDLEDRVREEIEELRK

SEQ ID NO: 1828 - protein, 183 aa, Artificial Sequence
  Synthetic
SEVDEVLERIKRLLERLAEHSDKVVRDIEKLLDDNRKENERRDHMVLHEYVNAAGITRRGDLREELLERVVREVEKEIRDIKRKNKRSVETVEKLVRDDRKELKRALEDVERLIRELETRLKDKEELRRKLEKVLREAEKVIDELLKKTDEVLKRARETIEDLNRKLDKVLKEVRDKLDRLRD

SEQ ID NO: 1829 - protein, 185 aa, Artificial Sequence
  Synthetic
DDIERLKREIERLLKEAEKISRDNEERSKELLDRLRKLSEDRDHMVLHEYVNAAGITDKIKDKEELTRRLKEVVDRVEKSVRDSERMLREVVREDEESVRRSKTKLEDLLRKVEELVRRLEKKVTDEKVKRDAREALRKAKKKVDELKRKNDEVHRRSREEVKRLLEENRKLLEDLRRMVREITQ

SEQ ID NO: 1830 - protein, 184 aa, Artificial Sequence
  Synthetic
ELIKKARKDVEEVRERSERLVDELRKRNKKLADESRRLIDKRDHMVLHEYVNAAGITRKRRTKDVLKEIEDLVRELERELRRVVKESSDKVRKLIRENEKVVEESSRLFRDLVEKLRRVVEERNDKKLMEEVERLIKRLEDVNEKSERDVREINKESERVNEETEREVEDAIRKLREVLRRAKK

SEQ ID NO: 1831 - protein, 186 aa, Artificial Sequence
  Synthetic
KEVEDLERRVKEILDRMKRLIDENRKKIEKSIRELERLIDERDHMVLHEYVNAAGITREGGDDARTLRERVRKIIEDVEEHSRRSTEEVRRIHKENKEHSERSSDEIRELLRRVEELIEEVKRRLRDKEMEKKLEDIVRRVREVVRRAHETNERLVDRSRKAVEKAERTNRRLVEEIRKVAEEVRK

SEQ ID NO: 1832 - protein, 186 aa, Artificial Sequence
  Synthetic
KEVEDLERTVRTILKRMRELITRNEEEIRRSIEELKKLLKERDHMVLHEYVNAAGITKEGGDDKKRLVEEIKRLLDELRENSKRSSDRAKEIHERNKRHSEESSRTIEKLLKELRDLVRDVERKLRDEDAKRKLDELTKRVEKVVREADERNKRLTKRSKEVLDEVHRANEEALKEVEEVVRRVTK

SEQ ID NO: 1833 - protein, 176 aa, Artificial Sequence
  Synthetic
REAEEAKEEVEELNRRNKKELDDARRRVDELDKRNKDRLKERDHMVLHEYVNAAGITEEGRSDDRLREKIERMLKTSADELERLKEENKRALRDLAERLRELIERNRRKLEEITRRTVPDKDVLKRLAELIKESIRELERVLEELAEKIDRSLKELDDVLRKNETDLKRVIEDLKR

SEQ ID NO: 1834 - protein, 174 aa, Artificial Sequence
  Synthetic
SEEEVLREAAKTVEKLLDEIRRSLEKVSKRVEDSNRELKESRDHMVLHEYVNAAGITKNNVDRTLLEDVRRKLERIEERNEEMNDRSRRKLEELRERNRKILEDIRRTLEDLKRRQLPKDDVERTLREIAKLVDEVDKENKRALRENEERVKTLNRENEEMLKRIEEEVRRATK

SEQ ID NO: 1835 - protein, 182 aa, Artificial Sequence
  Synthetic
SELEKTLEDLKRHSEENKKKLEEDLRDMERNLKENKDRLKKRDHMVLHEYVNAAGITREGDIDERELERVRRKMEEIKKRLDENVERNRRKAEDIKRKLDENVKRSEDRVKEIKEDIRRRVRDKDKAEELERRLDELVKENREIHERVKKALDDIVKELEELHERLKRRLEEILRRIAETVR

SEQ ID NO: 1836 - protein, 186 aa, Artificial Sequence
  Synthetic
SEIEKLIEELRRELEKVKDELERSIEEMDRELDDVRRDSKRRDHMVLHEYVNAAGITKRGDRPEEVLRKELEDIKRKLRRILEEHHEKIRRIKEKLRRENKRVRDELKRIKDEIDEKVKDVRRKGADEELLKRLEEVAEDVKRALEELLKKHTRVVERVEKALDELDKELERIVREAEKELDRREK

SEQ ID NO: 1837 - protein, 179 aa, Artificial Sequence
  Synthetic
RLEDEVRKMEKEVREEVKRLEDESRKVLEESRRNLDKLREERDHMVLHEYVNAAGITRRGLDERVLRELLKRVREVHERNRKLLDEVRRASEKVHEDNRRILEEVRKTVKDVVDKLRRVDAKVVKELIDRVRKILEDVEREVKKSIEEVKEINRRLNEEVKKTIEEVKEIVKEVTERAK

SEQ ID NO: 1838 - protein, 183 aa, Artificial Sequence
  Synthetic
RVDERLDTVLKRVEETVRENKKKNDELLERSKENIDRLKKRRDHMVLHEYVNAAGITREVTKEEVKKIIDEVLKEIEDLLRTVKEELDRALERNREVVEETKRRIDRVLKEIEKLIRDVKRDRKEEVVKEVEERIKKLLKEVNDTSKDAERRLRETNERLNEIVKEVEKRIRELSEEVRKRVK

SEQ ID NO: 1839 - protein, 183 aa, Artificial Sequence
  Synthetic
SIEDEIRKLKEDIKRVLDKVRRDNERLKERLDKVLEDIRRSRDHMVLHEYVNAAGITDKPVDERLVRKVEEAVKRLKEHNEDSTRRVEEVIRRLKEESEESVRKTEKVARDLERELDEVLTRGGEERVREVIEKLKETLERLKREDKEVADRAEKLLREAEEHNKRSLDESRRVLEELDEEIR

SEQ ID NO: 1840 - protein, 172 aa, Artificial Sequence
  Synthetic
DEVEKVLEEIKRALDDLRKKVEESKREIKEALKAVEKHTRDRDHMVLHEYVNAAGITKSKDTERVRKLVEELSEENERSLREVRRVAEELLEINERVLEEVERVVEALLDLVRRGGSERVVEEVRRVLEELRRRLEKVTEDSRRAIERLAREDARVSKKSIDVNKKLDDDVR

SEQ ID NO: 1841 - protein, 174 aa, Artificial Sequence
  Synthetic
SESDEVIRDLARLLDELARHVDDSVRRMDEVVKRSTREADERDHMVLHEYVNAAGITGDERVERMVAEIERLVAEVLEELKKKYEKLKREVEENLRRLEETVRDIVEKARKVTEKGVSKEKIDRIIRELERILEEAKKKHEDVLRRLEDSLRRVAELLKAALDRLREIVDRLRR

SEQ ID NO: 1842 - protein, 174 aa, Artificial Sequence
  Synthetic
KEVEDAVKELEDLLRANEDKTRSIVEDMRASNKDLEDHSRARDHMVLHEYVNAAGITVPRDSLKRLAEDVERVTRESRELLERVHRADRELIERLKESNERLRRAIEEIRKAIKGGSDIKTLLDRVRKLAEEDAERLDRLRRESEELNERVRRVDKKLLEEIRRKAKKVEDDTR

SEQ ID NO: 1843 - protein, 184 aa, Artificial Sequence
  Synthetic
DEIRKVVKEITDLLKASNDKNRKVVEEIRDLLRKSKKLADERDHMVLHEYVNAAGITDKSGDKETAEDIVRRIIEELKRILKEIEDLARRINREIERLVEEVERDNRDVNRAIEELLKDIARRGGSEDLKRVEERAREVSRRNEESMRRVKEDADRVSEANKEVLDRVREEVKRLIEEVRETLR

SEQ ID NO: 1844 - protein, 176 aa, Artificial Sequence
  Synthetic
STAETVAEEVERVLKHSDDLIKEVEDVNRRVEEEIKRVIRERDHMVLHEYVNAAGITKGEILAEIEKRLADNSEKVREVAERAKKLLEENTARVKDILRESRKLVKDLLDEVRGTGSEEAAREIIKRLREVNKRTKEKLDELIKHSEEVLERVKRLIDELRKHSEEVLEDLRRRAK

SEQ ID NO: 1845 - protein, 186 aa, Artificial Sequence
  Synthetic
SRVEEIIEDLRRLLEEIRKENEDSIRRSKELLDRVKEINDTRDHMVLHEYVNAAGITREKGSESEEVKKALRAVLEELEKLLRRVAEINEEVLRRNSKLVEEDERRNREVLKELARLVEELIREIGDEDKARKVAEVAEKVLRDIDKLDRESKEAFRATNEEIAKLDEDTARVAERVKKAIEDLAK

SEQ ID NO: 1846 - protein, 186 aa, Artificial Sequence
  Synthetic
SEVDEIIKELERLLAEIARENERIIRESRKLADEVRKRNEDRDHMVLHEYVNAAGITRRKGSESEEVKKLIEDVLREIERLLKRIEEENREVVKRNSELVERVRAINEEILRRVAELVEKIARDIGDKDEVTKVKKVADDVLAEIKKLDDETRRVIEDTNKKIADLDKATRDVVRKVLEEVKKLEK

SEQ ID NO: 1847 - protein, 181 aa, Artificial Sequence
  Synthetic
SEVDDVLRRLEELIKTLEDINAKSLEDIKKLIDDLAKILEDRDHMVLHEYVNAAGITKGIDSREAEEIAKRVLEELKRTSDDLRKKVERVDEDLRRLLRENHERNKKILRDLERLLRDAARRGVPKEALDRMREEIRRLEEESRKSDETIERLIRELRRRVEEVLKTSTDLIRELEEEVKK

SEQ ID NO: 1848 - protein, 183 aa, Artificial Sequence
  Synthetic
SKLEEVEKAVRKVIEDSRRVNEEVNRRSEEVVRELEKVHRERDHMVLHEYVNAAGITKGSGDERLAAEVERIIEEIRELNERDRKRVEEIRKEIEDLNRDLNRRSKESEDRLRKLLEDATRGGVTKEADEVVERAERISEENKRRVEDVARKSKELVEDVRRHSEEVVRRVEELVKEVEERVR

SEQ ID NO: 1849 - protein, 173 aa, Artificial Sequence
  Synthetic
SAEEVKEELKRIATKLKEEIKENIRRLEESVEKIAKELAENRDHMVLHEYVNAAGITDERIVKTVEDIARRVVEDNERIMEEDKDVVRRLVERNEEIVRRVDETVKKIVELIDRGEPGEELVERLRRVVEEVRERLKDSSRELRKINEDSRKAVEDSSAEVAKVVEELERRDT

SEQ ID NO: 1850 - protein, 183 aa, Artificial Sequence
  Synthetic
SDVDRVLEEIRKLLEDLKRHSEKVSEENEDLLRANTELNKRRDHMVLHEYVNAAGITERGGISEEDLKRALDRVRKTVETVKEENKRSLEDVRRTVETNKRKLERVVEEIKKLIEDAKRRGSGDEEAKKKLDEVLERAKRTIDRLLETSDRSLEKVEADLRRLNEELDRSLERAERTIRELAK

SEQ ID NO: 1851 - protein, 180 aa, Artificial Sequence
  Synthetic
DEVEDVLRKIEKILDDHRKRIEKNSRDMARIIDEHRRKVEERDHMVLHEYVNAAGITDRGEGDEETAEDVKAKLEKSNRELEKHSEEVKRALDESNEDLRRHSEEVKERIERLVKKLREDGVEREEELKEVADRVKEKLDRLNRENEKSSEELKRELDKINDENRETSERLKREIDETTR

SEQ ID NO: 1852 - protein, 185 aa, Artificial Sequence
  Synthetic
SSVEELLERLRRISEENKRRIEKLLREVEKVLRELKDRHRKRDHMVLHEYVNAAGITKSGLPEEAVKRVLERVRERVKEVLEEADRLNDEMRRIVTEVEKELDKSDKEVEDAVRDILKKIEEGVRDRETAERARETLKRLLDENRDRSKKVKEEIRRILEDLTRTTERVKREIAKLLKELEDTAR

SEQ ID NO: 1853 - protein, 238 aa, Artificial Sequence
  Synthetic
EEDERLTKRVEEIKRENRELLRRLEEEVKELERKSEKIVRDRDHMVLHEYVNAAGITGSTELLVEELEKLIREILKLSEDHNRTLEEVVRKIEDVLRANLERLKELVDEILKALKERGKGDSEELKRKVEKVARDYERLLRKLREVVKRILDESKRLDEELEERLKEVLKKLEELIKRGGPDKDVLTELKRILDELLKLVEKLIRRNLRLLEELLRLVREILRTSNEILEEILKDARR

SEQ ID NO: 1854 - protein, 244 aa, Artificial Sequence
  Synthetic
SAEETLRRITEESKRVLEEITKKYEDLERESREVLRKLREDRDHMVLHEYVNAAGITDDKDEVLTVLEKVLDELLKLHRENLRVIKELLRKVLEVDRENLEVLKRLLEKARDLLRRSGRDEKDLKKLEDELRKVKEELEKKHEASKRDIEDLERELDKVTEEVERLLRKLKEELRRAAEGSDEDRERLARLLKALADKLIRVLEEILKINEELNRKIIKFARENLERNRRVNKKVIEVLREAAR

SEQ ID NO: 1855 - protein, 250 aa, Artificial Sequence
  Synthetic
STEEILKRVKEILDELAKELRDIIRESLRTIEELLDELRRIRDHMVLHEYVNAAGITDGVKDSEELLRRLKRLLEDLRRAHEELLKRLKEAVDEHRDRLRKILEELERVLKELRKRIEELRRSGDRISEKDVLRKLEEVLRKALEILERLLKKIRESARELLKIIEEVLDANIKVMEEALKTIKELLKDGPDEVKRRLEEKERRIRTRYEELRRRLRKRVKDYEDKLREIEKKVRRDAERIEEELERAKK

SEQ ID NO: 1856 - protein, 238 aa, Artificial Sequence
  Synthetic
SEAEKIREALETNLRLLEELIKRLKEILDTHNELLRRVIETRDHMVLHEYVNAAGITLDEEVLREVKRLVDELRKEARRVLDEHEKLVRKIKKEAEDVARESEEIIKEVEDKLKGLDREELLERVRRVLKKSDDLIAELVRRALKILEELTRLLAELLKKVVEILRRIVELVERVLTKKGAPKEDLERLRRKVEELEDRLRRLLEKLARDSAELMRELERILDRYARESEELDRRLAE

SEQ ID NO: 1857 - protein, 247 aa, Artificial Sequence
  Synthetic
SEAEDLEELIKELAELLKDVIRKLEKINRRLVKILEDIIRRRDHMVLHEYVNAAGITVEDKDILRDLERRLREILEESDRLLEELKRRLEEILRKSKELLRRLEEVLREILKRAEEVKRSNLPKEELIKEIVKLLEELLRVIEKILEDNIRLLEELVEVIKEILEKHLRLLEELVRVIERILREVGKDKDEAERRRRELKDKLDRLREEHEEVKRRLEEELTRLRETHKKIEKELREALKRVRDRST

SEQ ID NO: 1858 - protein, 240 aa, Artificial Sequence
  Synthetic
SDKEEIKRRVEKTARDLETEHDKIKKRLEDTVRDIKRELDERDHMVLHEYVNAAGITREGDGDATDLVDKLLETVKRLNEEVLRTVKKIADELRRLVEEVLRVLRESNETLARLLEEGNVGDEVRERLEEVLRRTEEIIKTLEEIVKRLLDELRRLVEELRRISKKLKDELDKIKEKGKDEKRLIEEVVRLLRENLDVVRRILEALAKLIKELLEALEEVLRRNKELIRELLRVLDEALK

SEQ ID NO: 1859 - protein, 238 aa, Artificial Sequence
  Synthetic
DADELLRRLAEEVERVIREAEDLLRRWKETIKKVLDDLKRLRDHMVLHEYVNAAGITKTKGDEELAKLIKDLLDTNEKVNRDLLRLIKKLLKDAERVNRRLLELIEELLEELKRVAKDLGLREEADKKLRDIADRARKELEDYERRLKELLKTVEDALRKAEEDSRKLKRDVEELLERGRLRKDDLEDILRKNLDRLRKLLERLREILRENLEALKKTLKRLEDVVREILEDLKRERK

SEQ ID NO: 1860 - protein, 236 aa, Artificial Sequence
  Synthetic
STREKAKKVLDTLRADNEDMKRVVEKILRALKRTNERAEKLRDHMVLHEYVNAAGITVSEEALKEIEDTLKRVLEEIKRLLDESKKLLEDVEREIREILKTSEELLERIEREIETVGSDEKTLAEILKRLLELNEEMNRRLLKILRDLLRLNEEVIRRLLAVLERLLDALKEALDRGDVPEDLLRKLEEELRRIKEKLRKALEELEREHRELEKELDKLHDESRKEHERIEEELRR

SEQ ID NO: 1861 - protein, 236 aa, Artificial Sequence; identical to SEQ ID NO: 1860
  Synthetic

SEQ ID NO: 1862 - protein, 239 aa, Artificial Sequence
  Synthetic
SERELIERWLELHKEILRLIRELVERLLKLHREILDTIKKLRDHMVLHEYVNAAGITLDKEAKDELREIAKRVEDKLEKLERESRKVEEDLKRKLKELTDESDTVEKRVRDVVRRGTQSREEIAEELLRLDRKLLKAVEELLKEILDLNKKLLDDVRAILEETRRVLEKLLDRVRRGERTDDERRTLTELLKRMEDILEKVERTLKKLLDDSARMAEEVKKTLKELLERSEKVAEDVRK

SEQ ID NO: 1863 - protein, 246 aa, Artificial Sequence
  Synthetic
KEIEETLKELEDLNREMVETNRRVLEETRRLNKETVDRVKARDHMVLHEYVNAAGITRKGPTSEELKRLLAELEELLARVVRRVEELLKKSTDLLERAVKDSADALRRSHEVLKEVASRVKRAKDEGLPREEVLRLLRELLERHAKVLKDIVRVSEKLLREHLKVLREIVEVLEELLERILKVILDTTGGDKAVEELEKALEEIKRRLKEVIDRYEDELRKLRKEYKEKIDKYERKLEEIERRERT

SEQ ID NO: 1864 - protein, 231 aa, Artificial Sequence
  Synthetic
SKEEEVEKVLRKWEEILRRLIEENKRANDKIRREYEELVKERDHMVLHEYVNAAGITVSEEVKRILEKLIKLLEDILEYEKENVERLIELNERILRELKKSVEELKALVTRVRRDGLPESEVRKLVEDVLRKNEELLKEAKKAWRDSIENLKRVLEEVAKLVKTVLREIEEKIDDEDVVRALIEVIERLLRVAEEVIRRILKVNTELMRVDERSIRESLKAISEVLKVLDT

SEQ ID NO: 1865 - protein, 231 aa, Artificial Sequence
  Synthetic
SKDEELARLLEELVERWRKIVEDLERDHRRLVKEIRELVERRDHMVLHEYVNAAGITIDERIVRLIEEIAKIIEEVLKEIVKLVERAVRENVRVLRESVRLVAELVETLARLLRGSDERVTEAIKKVLDTSEDLIRRVIKVNEDILREIAKLVEEVLREAERILTEIKKEGDREEIRRILEELKRIVDDVLRIIARILKLLRDLTRRLAEVAKAVHKLLEELLRKLKEDTR

SEQ ID NO: 1866 - protein, 237 aa, Artificial Sequence
  Synthetic
KEKEDALKKLEDLARKSREDLERVLRKHKKILDKIEELLKRRDHMVLHEYVNAAGITGTESEILKELARLLREHHEALRRLIEELRRLLEEHHKILEDLAREHKRLLDELIKVVADGVDKDELERIIKELRERDKKLVDDLRKVSEDLLDAVRKLVEDLERISRELLRRVEELAKGIDEELAREVERVIKELLDKSKEILERIERAIDELLKVSEEILKLSEDASEELLKILREFAK

SEQ ID NO: 1867 - protein, 237 aa, Artificial Sequence; identical to SEQ ID NO: 1866
  Synthetic

SEQ ID NO: 1868 - protein, 229 aa, Artificial Sequence
  Synthetic
SKEERLREVAEKHKKDLEDIVKRVDEAAKETARRLEEILKRRDHMVLHEYVNAAGITDDEKLKKVKKILKDIMDRLAELIKKILKLLKENLEKIKELLRRNLEISEELLKLAKGLSDRDVLETVRRVLEKLDEEWDRVLEDSRRIIETILRELDTLLREVEKLIKEIKDEISGSKEVLDILERAVEVVRRVIKALKEVLERHVDATREVIERVKRVNKRLLEAVREVVT

SEQ ID NO: 1869 - protein, 241 aa, Artificial Sequence
  Synthetic
SEKELLKEILDRIRELLEDDNRLLKRIVDEIRKLLEEWLRVRDHMVLHEYVNAAGITAPEDVIRELTRALKETEEDVDRVIRTLEKLLKEVLDAHEEVVRKLDRLLKEVERLVEGGDAEEVVRDLLRVVKEILDESKAVIDELARVVDEILKLLEEVDRKLAKVVKEILEDVLRGSGDDEDAVRKIAKIIEELKRLLEDLARDTRRVIEEAKRLLKEWRDRNKEVADTLKKLLEDLIRKIR

SEQ ID NO: 1870 - protein, 246 aa, Artificial Sequence
  Synthetic
SEREELLERIKEILKRVKDKLDEDLKRLKEILEKLKEKADRRDHMVLHEYVNAAGITERTGRTDELVKEVLDTVRRNLENLKRLVEDILRKLEENVKNLTDLVREILKLITELIKRLEDGGLPKEVLDALRRVLEKLEELLREILERLKRSLEAVKRKIEELLKELERSLDELRRALERIRKEIGDSETAVRAIIRVLEKHLEAVRRVLEELLKVLAEHLETVRELIERLKRVLEEAIEVVERVAR

SEQ ID NO: 1871 - protein, 240 aa, Artificial Sequence
  Synthetic
DREKSVRDIEEDLKRVLDKLRRRVETSKEELKKVLKADKENRDHMVLHEYVNAAGITRGIDSEVLRAVREIVKRLVEVVRRYNELSEKIIRDLVRVNDRVLELLKRIVKRLIDVVRELEKIGDKEKALRRLEEVVKEVKRRIEELLKELEDVHRELVKILEEVNEDLKRVATEVKEIIKTGIKSSEVAKELDEVIKRLLDNLKENTDRLKEVIDRNLADLRDLAEELRAVIERLLEDARR

SEQ ID NO: 1872 - protein, 241 aa, Artificial Sequence
  Synthetic
SAEEAVEKLVRIARAIVKINEDLSREVVRILREIVRLNEETRDHMVLHEYVNAAGITDGGLSEDVVRKLRKLVKELEDLLKKSNDDIRKLVEDVARRLKESNDEIRRLVERLEELLKRGPGDEELLRLVEELTEELLRTHEEVVKALEKLTADLLELHRELLERVRRLTKRIEEELKRVGVSEELLRRLEELRKRLEKVLDDSAKELEKLKRELERLLEESRRKLEKLKRDLERVLEETRR

SEQ ID NO: 1873 - protein, 237 aa, Artificial Sequence
  Synthetic
REDEVLRDIERLLREIEEKIRRILEESTAELRKVEEEVKRIRDHMVLHEYVNAAGITRKGIDEELRKLLDEVLDKLTKLIERNKRSLERILELIKRIIDENLEVLRDIIRLLEELLKATKDNGVPKDEVIKLVEDVVRRIEELVTRVVARNEKLVKDLDDLAKKNVRENEELLREIDRGLDEDLLEKIKRVIREHIKALEKLARDLKEILRRHIEALKELARDLAEVIRKLLEDVKR

SEQ ID NO: 1874 - protein, 237 aa, Artificial Sequence; identical to SEQ ID NO: 1873
  Synthetic

SEQ ID NO: 1875 - protein, 243 aa, Artificial Sequence
  Synthetic
SEAERLADEVRKAVKKSEEDNETLVREVEKAVRELKKNNKTRDHMVLHEYVNAAGITRDGQVSDRDLLKELEEVLRRVLEALAENHERTEEILKRWLDRYAEDIERLRKVLKEVIEALKRGGSDDKRIVDELEEILRRNEDVLDKIAKRLRRLLEEDRRLLERIVRELKRLLDDLDRITKEGKSEELVRIAIEVLKRLLEIIEELVRLNNEILERLLKIVRELHKDNIKILEDLLRIIEEVLR

SEQ ID NO: 1876 - protein, 243 aa, Artificial Sequence; identical to SEQ ID NO: 1875
  Synthetic

SEQ ID NO: 1877 - protein, 245 aa, Artificial Sequence
  Synthetic
SEKDEVTRRIRELLKEAEETNREAIERIKRLLDRVREAVEERDHMVLHEYVNAAGITDRGLQDDEALLKLLIDALREHNRLSTELIKILIDVLRTILKIIKDVLATNIEIARRILDLVRRLAERGGLDDRLVKEVEKLVRTAERLHRDALRKVKRLVEELEKRLRELVKTDHDLVRRLETLLRRGSGSKEDLLREIARILAESLRLIRELLKEIEKIVKEIIELLERLNDELRKIIEAILETTKK

SEQ ID NO: 1878 - protein, 245 aa, Artificial Sequence; identical to SEQ ID NO: 1877
  Synthetic

SEQ ID NO: 1879 - protein, 249 aa, Artificial Sequence
  Synthetic
DAEEVVKRLADVLRENDETIRKVVEDLVRIAEENDRLWKKLRDHMVLHEYVNAAGITRGGVPEELLDRLAKVVKSIVEKAEKILERLNRVSKAIAEKLKTIVDELNEVSKEIVKRAEDILRKGKDKETVLRALRTLVKEYADLSKEVLERVERIVREYVKLSDEVVKSLAEIVEELIRIIEDLLRKGNLDEDVKRALEELVSRLRKLLEDVKKASEDIVREVERIVRELAKRSDEILKKLEDIVEKLRE

SEQ ID NO: 1880 - protein, 240 aa, Artificial Sequence
  Synthetic
DKDKRLEELLKRLKELNDKTFEELERILEELKRANEASLRERDHMVLHEYVNAAGITLDKRLAELLKKLLDDLKRLLEEYTRTNEELLKRLRELLERYRETNKKLLDLLRKLLDEARRTGTDEDLLRRLEDILRKYEDEVRRLLKELEDILREYEDTSRRLLEELERIAKEAAERVSRGSDKDVKDIIRTILEVARDLLRLLEEDSRTNSEVVKRLLDLLREDSKANSEVVKRLLDVLRE

SEQ ID NO: 1881 - protein, 240 aa, Artificial Sequence
  Synthetic
SKEETLKRLLDELEKRNRETVERLERLLKELEDRNRASLEERDHMVLHEYVNAAGITLSKELKDTLARILEELRKLLEEYFRKNEELLRLLRKLLDEYARTNEELLRLLEELLDTARRTGGDSELLKRLEDIAREYEKRVRRLLEKLKDILDKYRKTVEELVRKMEEILKEAKKTISRIGSEEVKDIVRAMEEVIRRLIEILRRDVELNLDVAKKLLELLKEDSKLNLDVARELLELLDR

SEQ ID NO: 1882 - protein, 243 aa, Artificial Sequence
  Synthetic
SEAERTKESLKKVLKALVDLNRELLRKLEENMRELTKLNEERDHMVLHEYVNAAGITIVDKDAEREAERLMRELDKSSEDTARETRKLIEESKKSTRRTEEEARKLTETLDRLAKGGLPREDLLRALVRLLEELARLIEEDVRRNAELVKRHIELVERDVAELLRLIKELVDLLADLAEKGSRTEEIRKIVEEILKEIKELADRYREEVRKSKDKLRSILEDYKRKVDELKERLRELIEEVET

SEQ ID NO: 1883 - protein, 243 aa, Artificial Sequence; identical to SEQ ID NO: 1882
  Synthetic

SEQ ID NO: 1884 - protein, 182 aa, Artificial Sequence
  Synthetic
DEAEKLLKELRDLLEESRKDLERLLKELEDLLEESKRDLERLRDHMVLHEYVNAAGITRRNEREKLEKLLRELKKVVERLKDNLKDNERRNKEAIERVRKKLKDNERENKKVIEDLRAKLKDLEEVKRKIDRLEEESRRVIEEARKRLEEVEEKSKKIIDDARRALDRIDKELRRVVEETRK

SEQ ID NO: 1885 - protein, 182 aa, Artificial Sequence
  Synthetic
RVEDALRKLLDDVRRLVEEAERRLRTSNDKSRRLVEEAKRRLRDHMVLHEYVNAAGITRIRDEDVKRVLEELLKRDHDVVRRVLERIDEMLERNSRLVKRVLEDIRRLLKRVREVVERIKRVRSKVVEEVLKELEELIKTAKKIIEDVLRASEDTIRRLEEIIRKVEEDSKRIIEEIERAAR

SEQ ID NO: 1886 - protein, 181 aa, Artificial Sequence
  Synthetic
SEVERVLEDLRRLVRDVEEKLRRIIERDRRLVEEVERENRKTRDHMVLHEYVNAAGITDISDKKTIERIVREIIKEARDLVRRNHERNREIVDESRRLVEELRRIVEEIIRRLRELLERVKSGELAERIEDVVREAEKRLRELLKELEKTSRDLKKRLEELDRELKALVEKVERDLEELRK

SEQ ID NO: 1887 - protein, 174 aa, Artificial Sequence
  Synthetic
SRDEKIRDILRRVLKEVRDSTKKVEEDLEDVHRRTEEELRKVRDHMVLHEYVNAAGITSEELKRRMEEVVRRIEELLKKLLKEDRDVVKEIRDKLDETRKEMEEVAERIKDKIRRGDGREKVAEEVKRIADRLIDLNRRIAEEVDKIVRDSIKKVEEIVTEVEKIVEKLIRDVR

SEQ ID NO: 1888 - protein, 174 aa, Artificial Sequence
  Synthetic
SELEKVVKEVADLLRRNLEKSKRVLEEVRRRLEENLRESEKVRDHMVLHEYVNAAGITEGKDKRDLTRLLEEDDKRVKEALDKSRENNERILKEVRRALRESEEDNRRILKEVREKVDSRLLEELEERVRESIERSRRFIEELEKIVEETLTESEKLARASSEITKTVLDEIRK

SEQ ID NO: 1889 - protein, 178 aa, Artificial Sequence
  Synthetic
DDLERVLKEIKKAADKIREDNKRTADKIRKRVKELDDETRDMRDHMVLHEYVNAAGITGREEARKVIEELKKLVDEVRKRNEKSIEELKKLLKEDRDLMRRVIEELEDLVRRLREEVRDDEALRRVEEEVERLIRDLRRVLKETSDRVRELIDKHRRLSEEVEKDVKRLIDELKKKTD

SEQ ID NO: 1890 - protein, 187 aa, Artificial Sequence
  Synthetic
DEEEELRKRLEKLSKEVRELLRRDEEEDRRLNRELEELLKDHRDHMVLHEYVNAAGITKARRKVSEEELTRLRKKLRDLEEESKEALRELRRRVEELNKENKKSLDDLERRLKELEDRAREVEKRDRREDELRELLRRLEDVIRKLAEDLKRNTEDLRRVIKELAERLEELNKRLKREIRRLKEELR

SEQ ID NO: 1891 - protein, 175 aa, Artificial Sequence
  Synthetic
SEEDELRRLLKEVNERVERLLDEIRKELEKIAEELRDLLKKNRDHMVLHEYVNAAGITDEEIKKDAERALTELKEEHERLDREAKKDLDRIRKELERLEEEHRRVSERIEEVLDKESDKTEDIAREIRELMERTRRVIEEIKKELRDILEKLRRVSEELNKKLDEILKRIEDRTR

SEQ ID NO: 1892 - protein, 171 aa, Artificial Sequence
  Synthetic
SEKEKVIKEARELLERLRKRLKDVNDDVTRLLDELRKENEKSRDHMVLHEYVNAAGITVEDVIRELKRRLEEVDKKNRDILETLKRELDEVSRRTREELEKLRKELEEVEKAGLPAEELKRVADRLRRRLERLVEENERVVKKILDEIRRSVEENKRIVDKVRKDLDERRK

SEQ ID NO: 1893 - protein, 177 aa, Artificial Sequence
  Synthetic
SAIEKVKEVVERVLETVRDSVRRSHEESKRLIDKVRKRLEEVRDHMVLHEYVNAAGITPERMVEKLERDLEELLKEIKDTIDRIEEELRTSNRRLKETNDEIAKRLEELLRELSRDRDKDAVEDVLRRIEELIRDLNKKNDDNVRRVKEVIDRAEKLVRDLLREIRKLIEKLIRDTE

SEQ ID NO: 1894 - protein, 183 aa, Artificial Sequence
  Synthetic
SEIEKLVEDVRKLVEDNLRHSEEVHRRNRRLIEENERKIDELRDHMVLHEYVNAAGITRGEIREEEARKVLEEIKRLLDEIRRHSEEVLKEIERTLKENLKHSEEVLRRIEERLEDIKRKDKDSERVRTLVDRLREELKRSLDESEKLNRESRKRVTRSLEKVDDLVRELEKLARKVLEEVKT

SEQ ID NO: 1895 - protein, 174 aa, Artificial Sequence
  Synthetic
DELRDVKRELDRLLRENEEIVERIAETVRRLLEELKKLTKELRDHMVLHEYVNAAGITPEKELKEVADTLRKLLKDIERSNKEVEDRLRKLLEEIKESTDRLREELEEVEKLLRGGKDVETVLRRVRELSRDNKRRMRRVLEEAKRLAKEDKERIDKIRKEIEELIKRLKDKAT

SEQ ID NO: 1896 - protein, 174 aa, Artificial Sequence
  Synthetic
DEEEDLERRIKKLLDENRELLKRIAEELRRLLEELRRLTEESRDHMVLHEYVNAAGITPEKDLRDVAEKVKKVLKESEDSNRDVKRKLEKLLRDLERSTERLEREARKVRKLLRDGKDIETLLRELEKLSRDNKELLKKIEKEIRDLIKEDKERNRELSERLRKLVEELKKKAT

SEQ ID NO: 1897 - protein, 177 aa, Artificial Sequence
  Synthetic
SEAEKVVEELKKLLREVEKKIRDHTEDVKRILEELERRLRKHRDHMVLHEYVNAAGITDDDTVRKVKEELDRSHEKLREELRKVAKELKESNEELERDLKRLVEEAEDRLRRLKDRVSEKVLRELEKILEDIKRTLDKLLRENRETLKRIEDRLRELLEENRKLLEKIERELRERSR

SEQ ID NO: 1898 - protein, 182 aa, Artificial Sequence
  Synthetic
DEIETVLDEVRRLHEDAKRRLEEMIDEVRKLNEESVRELARVRDHMVLHEYVNAAGITRAGLDKGKLEELEERLERVREDVERILREIKRRNEKTLEDSERILEENKERNRTVLKKLKELRDRGSDAREALKESRKVVEESRESVRRVLEKNRRVVEESKRLAEELLRRVKKVVDEIRKRVE

SEQ ID NO: 1899 - protein, 174 aa, Artificial Sequence
  Synthetic
EELERILDKVRKVIEEVRKRLRDDLRTVEKVLKETEEVLRRARDHMVLHEYVNAAGITRGRDRREIKEELKKVLDDLRELLRALEEKNRRVNKENEDSLRKIEEDLRDVLRKLEEEIKGREVLRKVRELLRTIREEVERVLRKSNELSTRIKKRIDDVLETLERLLKELDDKLR

SEQ ID NO: 1900 - protein, 178 aa, Artificial Sequence
  Synthetic
SSKDEIRRRVEEVVERSDEIVKRSREHVKTVVDELDRVVKELRDHMVLHEYVNAAGITDGGSEETLKRVLDELREILKELKEEVKKVKRKLEKVVKENRDTIREVEERNRKILDELRKRGVEERALREVEEISRKSEEKLRRVLKESEDIAKEAEDRLKTVLERVERIADEVLKRLTK

SEQ ID NO: 1901 - protein, 182 aa, Artificial Sequence
  Synthetic
SDADRVAEELKKLVEDSRRENERVIEESKRLVKENEDRNRELRDHMVLHEYVNAAGITKEKDKKTLDDIVREILERLKRLLEKVEDENRKSHEENKRLLEDVKRKNKRISDELKRLLEEIERRNVDVDKVRETVKRLLEENKRVMEKTEEVAKKSSEDIKRVADETRRRAEELLKEVDELRK

SEQ ID NO: 1902 - protein, 175 aa, Artificial Sequence
  Synthetic
SEVDEVLREAKRIVDEVHKDNERATEESRRLVKKVHEENEEMRDHMVLHEYVNAAGITDEKLVTEILKEIEEALKEAARRNKEVKDRLRELSRRVSERNREILEELKERLDRVRERRKDVKELEREVEKLLKRIEESLRRHRKENKRLLEELDRSLRELAKIVKEVLDEIRERTR

SEQ ID NO: 1903 - protein, 175 aa, Artificial Sequence
  Synthetic
SEMDDVLKKLAETVKRIIERLKKLTDDSRRLVEEVHRRNDKLRDHMVLHEYVNAAGITDEKDVRKLLEDLKKKSEEVAERNKRILDTLREISKRAEDEVRKVLKELEKTLKELEDRRPDVRELSEEVKKLLDEVRKALKRHKDENDKLLKEIEDSLRRHKEENDRLLEKLKESTR

SEQ ID NO: 1904 - protein, 186 aa, Artificial Sequence
  Synthetic
SEVDEVRKTLEDLLRRLDEENKDIIRRNKELLDDLDRKVREARDHMVLHEYVNAAGITKLKDRETLTRIIEEIEKRARELIKRLRDEIRKIEEESKKSIEDSRKRNDEIRKRLEELIKDLRDKIKDSEELARRITELEKRVREVIERLKEKNKRLEDDSRRVITELRKKLKDLEDRVREEIEELRK

SEQ ID NO: 1905 - protein, 183 aa, Artificial Sequence
  Synthetic
SEVDEVLERIKRLLERLAEHSDKVVRDIEKLLDDNRKENERLRDHMVLHEYVNAAGITRGDLREELLERVVREVEKEIRDIKRKNKRSVETVEKLVRDDRKELKRALEDVERLIRELETRLKDKEELRRKLEKVLREAEKVIDELLKKTDEVLKRARETIEDLNRKLDKVLKEVRDKLDRLRD

SEQ ID NO: 1906 - protein, 184 aa, Artificial Sequence
  Synthetic
ELIKKARKDVEEVRERSERLVDELRKRNKKLADESRRLIDKLRDHMVLHEYVNAAGITKRRTKDVLKEIEDLVRELERELRRVVKESSDKVRKLIRENEKVVEESSRLFRDLVEKLRRVVEERNDKKLMEEVERLIKRLEDVNEKSERDVREINKESERVNEETEREVEDAIRKLREVLRRAKK

SEQ ID NO: 1907 - protein, 182 aa, Artificial Sequence
  Synthetic
SELEKTLEDLKRHSEENKKKLEEDLRDMERNLKENKDRLKKIRDHMVLHEYVNAAGITEGDIDERELERVRRKMEEIKKRLDENVERNRRKAEDIKRKLDENVKRSEDRVKEIKEDIRRRVRDKDKAEELERRLDELVKENREIHERVKKALDDIVKELEELHERLKRRLEEILRRIAETVR

SEQ ID NO: 1908 - protein, 186 aa, Artificial Sequence
  Synthetic
SEIEKLIEELRRELEKVKDELERSIEEMDRELDDVRRDSKRLRDHMVLHEYVNAAGITRGDRPEEVLRKELEDIKRKLRRILEEHHEKIRRIKEKLRRENKRVRDELKRIKDEIDEKVKDVRRKGADEELLKRLEEVAEDVKRALEELLKKHTRVVERVEKALDELDKELERIVREAEKELDRREK

SEQ ID NO: 1909 - protein, 178 aa, Artificial Sequence
  Synthetic
DREREVKKRLDEVRERIERLLRRVEEESRRVAEEIRRLIEEVRDHMVLHEYVNAAGITGLKDKEEVRRVLERLRKLNAESDELLERILERLRRLVEATNRLVKAIIEELRRLVEKIVREVPDSEELREELKKLERKIEKVAKEIHDHDKEVTERLEDLLRRITEHARKSDREIEETAR

SEQ ID NO: 1910 - protein, 172 aa, Artificial Sequence
  Synthetic
SRAETVLKEVTDKIKKLADSSDELLRRNKENIDELKKSSEELRDHMVLHEYVNAAGITDEETLEELIRRVEAELEAHHRELEKNSREDEKRNRDHHAKLEEEMRRVEERLEREGIDDEVVKRVRDLLDTVRRRNEKVNEDVKRMNDKLRRDNEDVIRRVEKLLRELEEKRRT

SEQ ID NO: 1911 - protein, 188 aa, Artificial Sequence
  Synthetic
SEIEKILKEIEDLARRDEEVSKKIVEDIRRLAKEVEDTSRDIRDHMVLHEYVNAAGITKDGSKEELEKEVREVVKTLEELVKDNHRLIRRAVEEMKRLVEENHRHSREVVKELEDLVRELRKGSGSEDSERLVREVEDLVRRLVRRSEKSNEEVKRTVEELVRRMEESNDRVRDLVRRLVEELKRAVD

SEQ ID NO: 1912 - protein, 178 aa, Artificial Sequence
  Synthetic
SEAEKAKETIDRLADRVRKLLEEIKRSLDDSRRKSKETVEENRDHMVLHEYVNAAGITGSVSEEELERLIRKLKKTLDELRRRHEKLVEDLRRNLERIKRRLEELTREMRETLERLAREGLDEEVLRTLEEIIRRLTKELEDVLREYERELRRLEEENKRVIDKTEEEIRRLADRLRR

SEQ ID NO: 1913 - protein, 179 aa, Artificial Sequence
  Synthetic
SEVEELIKRLAKVLKELVDKVRKVIEDTKELLERLKRRSEDHRDHMVLHEYVNAAGITDDEELKEILDRLRKTLEELEEELKKALEDDREEAKRLVDDARRVLKELEEEVREIRERRGESEELDRRIEKVLKEIEEKIREVIKEWERVHREVEELLKRLIDENRKVLDEIRKLLEEKSK

SEQ ID NO: 1914 - protein, 184 aa, Artificial Sequence
  Synthetic
DEIRKVVKEITDLLKASNDKNRKVVEEIRDLLRKSKKLADELRDHMVLHEYVNAAGITKSGDKETAEDIVRRIIEELKRILKEIEDLARRINREIERLVEEVERDNRDVNRAIEELLKDIARRGGSEDLKRVEERAREVSRRNEESMRRVKEDADRVSEANKEVLDRVREEVKRLIEEVRETLR

SEQ ID NO: 1915 - protein, 184 aa, Artificial Sequence; identical to SEQ ID NO: 1914
  Synthetic

SEQ ID NO: 1916 - protein, 176 aa, Artificial Sequence
  Synthetic
STAETVEKKVEEVIRENEKSMRESEEKVDRSTKRIEDVLRRLRDHMVLHEYVNAAGITGERVKEVLEENRRLLEEAKKLVDEVLETNKKLLEDDKRLNEEVSKTLKKLLEEIKSVDTREDATRVIEEAKRILDEARKLNEETIRRSEELVRRIERVIEEIIKRSEKLLEDVARESK

SEQ ID NO: 1917 - protein, 186 aa, Artificial Sequence
  Synthetic
SRVEEIIEDLRRLLEEIRKENEDSIRRSKELLDRVKEINDTIRDHMVLHEYVNAAGITEKGSESEEVKKALRAVLEELEKLLRRVAEINEEVLRRNSKLVEEDERRNREVLKELARLVEELIREIGDEDKARKVAEVAEKVLRDIDKLDRESKEAFRATNEEIAKLDEDTARVAERVKKAIEDLAK

SEQ ID NO: 1918 - protein, 180 aa, Artificial Sequence
  Synthetic
REVEEMIKELEELLKDLKEKNERASKRNRELVRRLEEENKRVRDHMVLHEYVNAAGITSGEDEEVLREVLKRLEEVLERVRALNERVLEAIEKSLEEVKASNEAVKRRLKELLEEAERGVDSEKLKELRDVIAEVAKRIDELDEYTRESIRRAKKEIERLNRETKKVIEEVVKRIEEERK

SEQ ID NO: 1919 - protein, 181 aa, Artificial Sequence
  Synthetic
DAVEEAEKLIRKVIADSEKLLRDLADLNAKSIRRSEKLVEDDRDHMVLHEYVNAAGITNGGSEEELRALLKEVEDTNRASHETNKRLLDEDRALNKEVHDRNEKLLRDIKRLVEEVAKGIDSEELLRRIKKLLDEIKKAIEDSSREIKRLLEESERVMKRSSEDIKRTLDDTRRVVEEVRR

SEQ ID NO: 1920 - protein, 181 aa, Artificial Sequence
  Synthetic
SEVDDVLRRLEELIKTLEDINAKSLEDIKKLIDDLAKILEDARDHMVLHEYVNAAGITGIDSREAEEIAKRVLEELKRTSDDLRKKVERVDEDLRRLLRENHERNKKILRDLERLLRDAARRGVPKEALDRMREEIRRLEEESRKSDETIERLIRELRRRVEEVLKTSTDLIRELEEEVKK

SEQ ID NO: 1921 - protein, 175 aa, Artificial Sequence
  Synthetic
SEIERVKKRLEELLAEVEESTRRLEERLKRLLEEAKRSSEEVRDHMVLHEYVNAAGITRDEKLVSELEARVKELLEDSRASLEELKKRVRKLAEDSARLLEEVKREVEKLKAKLDRGGDADDVLARVEELAKRAHDENERLIREVEELVRAHNKRNKELVDEVKRLVEKVIEEER

SEQ ID NO: 1922 - protein, 183 aa, Artificial Sequence
  Synthetic
SDVDRVLEEIRKLLEDLKRHSEKVSEENEDLLRANTELNKRVRDHMVLHEYVNAAGITRGGISEEDLKRALDRVRKTVETVKEENKRSLEDVRRTVETNKRKLERVVEEIKKLIEDAKRRGSGDEEAKKKLDEVLERAKRTIDRLLETSDRSLEKVEADLRRLNEELDRSLERAERTIRELAK

SEQ ID NO: 1923 - protein, 180 aa, Artificial Sequence
  Synthetic
DEVEDVLRKIEKILDDHRKRIEKNSRDMARIIDEHRRKVEENRDHMVLHEYVNAAGITRGEGDEETAEDVKAKLEKSNRELEKHSEEVKRALDESNEDLRRHSEEVKERIERLVKKLREDGVEREEELKEVADRVKEKLDRLNRENEKSSEELKRELDKINDENRETSERLKREIDETTR

SEQ ID NO: 1924 - protein, 238 aa, Artificial Sequence
  Synthetic
EEDERLTKRVEEIKRENRELLRRLEEEVKELERKSEKIVRDLRDHMVLHEYVNAAGITSTELLVEELEKLIREILKLSEDHNRTLEEVVRKIEDVLRANLERLKELVDEILKALKERGKGDSEELKRKVEKVARDYERLLRKLREVVKRILDESKRLDEELEERLKEVLKKLEELIKRGGPDKDVLTELKRILDELLKLVEKLIRRNLRLLEELLRLVREILRTSNEILEEILKDARR

SEQ ID NO: 1925 - protein, 238 aa, Artificial Sequence; identical to SEQ ID NO: 1924
  Synthetic

SEQ ID NO: 1926 - protein, 240 aa, Artificial Sequence
  Synthetic
SDKEEIKRRVEKTARDLETEHDKIKKRLEDTVRDIKRELDELRDHMVLHEYVNAAGITEGDGDATDLVDKLLETVKRLNEEVLRTVKKIADELRRLVEEVLRVLRESNETLARLLEEGNVGDEVRERLEEVLRRTEEIIKTLEEIVKRLLDELRRLVEELRRISKKLKDELDKIKEKGKDEKRLIEEVVRLLRENLDVVRRILEALAKLIKELLEALEEVLRRNKELIRELLRVLDEALK

SEQ ID NO: 1927 - protein, 240 aa, Artificial Sequence; identical to SEQ ID NO: 1926
  Synthetic

SEQ ID NO: 1928 - protein, 248 aa, Artificial Sequence
  Synthetic
DEDRIIEEIARLLEELLRELLELIKKLIETNRRLNEEHERAVRDHMVLHEYVNAAGITKGISDEKLKRIRERLKRALDDLERLHREINKRLEDLVRELEKLVREILKELKDALEELRRASARAGGEEVLRRLEEIVKKLLDLVRRILERLKEIHKDNVRLLRELNERLTRIVEDLVRLIREILREAGVDEKIAEEIERELEELRRMIKRLHEDLERKLKESEDELREIEARLEEKIRRLEEKLERKRR

SEQ ID NO: 1929 - protein, 248 aa, Artificial Sequence; identical to SEQ ID NO: 1928
  Synthetic

SEQ ID NO: 1930 - protein, 246 aa, Artificial Sequence
  Synthetic
KEIEETLKELEDLNREMVETNRRVLEETRRLNKETVDRVKATRDHMVLHEYVNAAGITKGPTSEELKRLLAELEELLARVVRRVEELLKKSTDLLERAVKDSADALRRSHEVLKEVASRVKRAKDEGLPREEVLRLLRELLERHAKVLKDIVRVSEKLLREHLKVLREIVEVLEELLERILKVILDTTGGDKAVEELEKALEEIKRRLKEVIDRYEDELRKLRKEYKEKIDKYERKLEEIERRERT

SEQ ID NO: 1931 - protein, 231 aa, Artificial Sequence
  Synthetic
SKEEEVEKVLRKWEEILRRLIEENKRANDKIRREYEELVKEIRDHMVLHEYVNAAGITSEEVKRILEKLIKLLEDILEYEKENVERLIELNERILRELKKSVEELKALVTRVRRDGLPESEVRKLVEDVLRKNEELLKEAKKAWRDSIENLKRVLEEVAKLVKTVLREIEEKIDDEDVVRALIEVIERLLRVAEEVIRRILKVNTELMRVDERSIRESLKAISEVLKVLDT

SEQ ID NO: 1932 - protein, 247 aa, Artificial Sequence
  Synthetic
RDRDVLRKVKAEIEELVARIEKVSRDALSEVKRLLDENRKIARDHMVLHEYVNAAGITTRGDDEVVKETEEVLRDNHRLLEELIRRLIKVLEEWLRRHKKLLDEIRELLKEILRLVKESGVSEDLLRRLKRVIEELDKKLKESEEKLRRVVEKAKEDLKAVLEEHRKVLEDLKRALEEVREKLRERGSEEVVEELLRMLKRVAEEMKRVHDDLSRAVEKVVRDVVRVDKELLDELARILRRLEEVIT

SEQ ID NO: 1933 - protein, 231 aa, Artificial Sequence
  Synthetic
SKDEELARLLEELVERWRKIVEDLERDHRRLVKEIRELVERIRDHMVLHEYVNAAGITDERIVRLIEEIAKIIEEVLKEIVKLVERAVRENVRVLRESVRLVAELVETLARLLRGSDERVTEAIKKVLDTSEDLIRRVIKVNEDILREIAKLVEEVLREAERILTEIKKEGDREEIRRILEELKRIVDDVLRIIARILKLLRDLTRRLAEVAKAVHKLLEELLRKLKEDTR

SEQ ID NO: 1934 - protein, 237 aa, Artificial Sequence
  Synthetic
KEKEDALKKLEDLARKSREDLERVLRKHKKILDKIEELLKRVRDHMVLHEYVNAAGITTESEILKELARLLREHHEALRRLIEELRRLLEEHHKILEDLAREHKRLLDELIKVVADGVDKDELERIIKELRERDKKLVDDLRKVSEDLLDAVRKLVEDLERISRELLRRVEELAKGIDEELAREVERVIKELLDKSKEILERIERAIDELLKVSEEILKLSEDASEELLKILREFAK

SEQ ID NO: 1935 - protein, 229 aa, Artificial Sequence
  Synthetic
SKEERLREVAEKHKKDLEDIVKRVDEAAKETARRLEEILKRLRDHMVLHEYVNAAGITDEKLKKVKKILKDIMDRLAELIKKILKLLKENLEKIKELLRRNLEISEELLKLAKGLSDRDVLETVRRVLEKLDEEWDRVLEDSRRIIETILRELDTLLREVEKLIKEIKDEISGSKEVLDILERAVEVVRRVIKALKEVLERHVDATREVIERVKRVNKRLLEAVREVVT

SEQ ID NO: 1936 - protein, 246 aa, Artificial Sequence
  Synthetic
SEREELLERIKEILKRVKDKLDEDLKRLKEILEKLKEKADRDRDHMVLHEYVNAAGITRTGRTDELVKEVLDTVRRNLENLKRLVEDILRKLEENVKNLTDLVREILKLITELIKRLEDGGLPKEVLDALRRVLEKLEELLREILERLKRSLEAVKRKIEELLKELERSLDELRRALERIRKEIGDSETAVRAIIRVLEKHLEAVRRVLEELLKVLAEHLETVRELIERLKRVLEEAIEVVERVAR

SEQ ID NO: 1937 - protein, 252 aa, Artificial Sequence
  Synthetic
SLEEITKRLLELVEENLARHEEILRELLELAKRLAKEDRDILRDHMVLHEYVNAAGITNGSSEEDLKRLLKEVIEELRAVVKRVKDKWDEVVKRIEDLVKKLKELHDDTLRKLRELVRKIVTDISESGGEAEKVKRVVEKILELVERLAKVVKESVEKLLEILRELAEVSKRVAEALLRLLEELVRVIRIKDERTLREVVRKVLEEAKRLLDELEEVHKRVKKELEDIIEENRRVVKRVRDELREIKRELDE

SEQ ID NO: 1938 - protein, 237 aa, Artificial Sequence
  Synthetic
REDEVLRDIERLLREIEEKIRRILEESTAELRKVEEEVKRIIRDHMVLHEYVNAAGITKGIDEELRKLLDEVLDKLTKLIERNKRSLERILELIKRIIDENLEVLRDIIRLLEELLKATKDNGVPKDEVIKLVEDVVRRIEELVTRVVARNEKLVKDLDDLAKKNVRENEELLREIDRGLDEDLLEKIKRVIREHIKALEKLARDLKEILRRHIEALKELARDLAEVIRKLLEDVKR

SEQ ID NO: 1939 - protein, 237 aa, Artificial Sequence; identical to SEQ ID NO: 1938
  Synthetic

SEQ ID NO: 1940 - protein, 243 aa, Artificial Sequence
  Synthetic
SEAERLADEVRKAVKKSEEDNETLVREVEKAVRELKKNNKTWRDHMVLHEYVNAAGITDGQVSDRDLLKELEEVLRRVLEALAENHERTEEILKRWLDRYAEDIERLRKVLKEVIEALKRGGSDDKRIVDELEEILRRNEDVLDKIAKRLRRLLEEDRRLLERIVRELKRLLDDLDRITKEGKSEELVRIAIEVLKRLLEIIEELVRLNNEILERLLKIVRELHKDNIKILEDLLRIIEEVLR

SEQ ID NO: 1941 - protein, 243 aa, Artificial Sequence; identical to SEQ ID NO: 1940
  Synthetic

SEQ ID NO: 1942 - protein, 245 aa, Artificial Sequence
  Synthetic
SEKDEVTRRIRELLKEAEETNREAIERIKRLLDRVREAVEEVRDHMVLHEYVNAAGITRGLQDDEALLKLLIDALREHNRLSTELIKILIDVLRTILKIIKDVLATNIEIARRILDLVRRLAERGGLDDRLVKEVEKLVRTAERLHRDALRKVKRLVEELEKRLRELVKTDHDLVRRLETLLRRGSGSKEDLLREIARILAESLRLIRELLKEIEKIVKEIIELLERLNDELRKIIEAILETTKK

SEQ ID NO: 1943 - protein, 245 aa, Artificial Sequence; identical to SEQ ID NO: 1942
  Synthetic

SEQ ID NO: 1944 - protein, 243 aa, Artificial Sequence
  Synthetic
SRVEELKKLIEDILRISREVVERIARVAEDIHRINRRVLDDLRDHMVLHEYVNAAGITRKVSGTEAAEALRDTIRRVVDEIRKLLEEHEKRSAELLEEIRKLLEDILRRSERAVEEIRELLKKGVSTKDVLRIIEEILREHLELLERVVRRIEEILRELLKTIEEIVKRIKEILEELKEVLKRGSVGDDEVEREIRRVKEDLDRILEEYRRLLEEIKRKLEEILRRVEELHRRLRRKLEEIDR

SEQ ID NO: 1945 - protein, 249 aa, Artificial Sequence
  Synthetic
DAEEVVKRLADVLRENDETIRKVVEDLVRIAEENDRLWKKLVRDHMVLHEYVNAAGITGGVPEELLDRLAKVVKSIVEKAEKILERLNRVSKAIAEKLKTIVDELNEVSKEIVKRAEDILRKGKDKETVLRALRTLVKEYADLSKEVLERVERIVREYVKLSDEVVKSLAEIVEELIRIIEDLLRKGNLDEDVKRALEELVSRLRKLLEDVKKASEDIVREVERIVRELAKRSDEILKKLEDIVEKLRE

SEQ ID NO: 1946 - protein, 240 aa, Artificial Sequence
  Synthetic
DKDKRLEELLKRLKELNDKTFEELERILEELKRANEASLREARDHMVLHEYVNAAGITDKRLAELLKKLLDDLKRLLEEYTRTNEELLKRLRELLERYRETNKKLLDLLRKLLDEARRTGTDEDLLRRLEDILRKYEDEVRRLLKELEDILREYEDTSRRLLEELERIAKEAAERVSRGSDKDVKDIIRTILEVARDLLRLLEEDSRTNSEVVKRLLDLLREDSKANSEVVKRLLDVLRE

SEQ ID NO: 1947 - protein, 240 aa, Artificial Sequence
  Synthetic
SKEETLKRLLDELEKRNRETVERLERLLKELEDRNRASLEELRDHMVLHEYVNAAGITSKELKDTLARILEELRKLLEEYFRKNEELLRLLRKLLDEYARTNEELLRLLEELLDTARRTGGDSELLKRLEDIAREYEKRVRRLLEKLKDILDKYRKTVEELVRKMEEILKEAKKTISRIGSEEVKDIVRAMEEVIRRLIEILRRDVELNLDVAKKLLELLKEDSKLNLDVARELLELLDR

SEQ ID NO: 1948 - protein, 240 aa, Artificial Sequence; identical to SEQ ID NO: 1947
  Synthetic

SEQ ID NO: 1949 - protein, 243 aa, Artificial Sequence
  Synthetic
DEEETLRRLLERKVELAKEYLDVSKEVIDRTTKLLDEYLKTSRDHMVLHEYVNAAGITGPDELIKRLAEELERSLRELEEEIKRLKRELEESLKKLKEIIDRLAEEAEKLLAVLKRGEGSEEEALRALASLVRELIEVLRENDERLRDVLRRLIEALRKNNEILERVLRKLVRAAEERGRDESSREALEEARRRLEELLRELNEITKDLEAKLEKLLRDLNELTKALEEELKRLLDELKKRTD

SEQ ID NO: 1950 - protein, 243 aa, Artificial Sequence
  Synthetic
SEAERTKESLKKVLKALVDLNRELLRKLEENMRELTKLNEEVRDHMVLHEYVNAAGITVDKDAEREAERLMRELDKSSEDTARETRKLIEESKKSTRRTEEEARKLTETLDRLAKGGLPREDLLRALVRLLEELARLIEEDVRRNAELVKRHIELVERDVAELLRLIKELVDLLADLAEKGSRTEEIRKIVEEILKEIKELADRYREEVRKSKDKLRSILEDYKRKVDELKERLRELIEEVET

SEQ ID NO: 1951 - protein, 243 aa, Artificial Sequence; identical to SEQ ID NO: 1950
  Synthetic

SEQ ID NO: 1952 - protein, 186 aa, Artificial Sequence
  Synthetic
SAEDSIRELLERDERLLEEARKEAKRLNEENERLLERIEETVRRDHMVLHEYVNAAGITIKGEKLREIEELVRRVKRTIEKLLEEVKKSVEDSSKRIEELLEAVERSVERTKEEIRRLLDEVRKDRKEELVKRVEERIKRLHDENRRLVKEVIEEVEKLIRDNEKLAEDIEREIRRLLKELDEAAK

SEQ ID NO: 1953 - protein, 182 aa, Artificial Sequence
  Synthetic
RVEDALRKLLDDVRRLVEEAERRLRTSNDKSRRLVEEAKRRLERDHMVLHEYVNAAGITIRDEDVKRVLEELLKRDHDVVRRVLERIDEMLERNSRLVKRVLEDIRRLLKRVREVVERIKRVRSKVVEEVLKELEELIKTAKKIIEDVLRASEDTIRRLEEIIRKVEEDSKRIIEEIERAAR

SEQ ID NO: 1954 - protein, 184 aa, Artificial Sequence
  Synthetic
KLDEVIEEIRKLLRRMEEELRRSVEEIDKLLREVRELLRESSERDHMVLHEYVNAAGITGVPEEVKERLDRLVETLRRLSEETLKELDKLVREVKELSKESLKRLRELVERLRRELEEIKKRGEDEKLVEDLKRRAEEVIRELREIVKRNTEIAREVVERAKRIVEKNEKLLKDVVEEAKKIVK

SEQ ID NO: 1955 - protein, 181 aa, Artificial Sequence
  Synthetic
SEVERVLEDLRRLVRDVEEKLRRIIERDRRLVEEVERENRKTIRDHMVLHEYVNAAGITISDKKTIERIVREIIKEARDLVRRNHERNREIVDESRRLVEELRRIVEEIIRRLRELLERVKSGELAERIEDVVREAEKRLRELLKELEKTSRDLKKRLEELDRELKALVEKVERDLEELRK

SEQ ID NO: 1956 - protein, 177 aa, Artificial Sequence
  Synthetic
ELREDVERVVDEIRRLVEENVRRIDEVAKDIKRLADDNVRRVKRDHMVLHEYVNAAGITGVTEVVDELREEVRKLSEDNRRHSRELIERVKKLLKELEEHSRDLKRRVKELLEDLKRKGVDERVLKKLKEVIEDVERKSRDALRRLEEAIRRVRRESERVNRELDEVIKRVTEELKK

SEQ ID NO: 1957 - protein, 173 aa, Artificial Sequence
  Synthetic
SLEELLEEARKTVERLIRESERVLRESEERVRRLIEELERVVRRDHMVLHEYVNAAGITEALKELEKLLREDSKRVKEVLDDLRRDLERNKRRNEKVLRELEELLKRLEELVREGVREEELEKLLREIEERVKEMLKRDEDTLREIERKVKEAVRDSERTLEEIEKRVTEEKT

SEQ ID NO: 1958 - protein, 179 aa, Artificial Sequence
  Synthetic
STREDARRLVERVRKEVKRLLKKNSDLLREVTERVKTLNERNRRDHMVLHEYVNAAGITDERDVERLLDRARKLVKESEDLIRKLLKDLRELVRRSEKDIDELRKELKRLLDELRARATDKDLERVVREIEKEIRDLIRELEENVKTSEKLIEDLIRELEKSVDESRKRVEELVKELRT

SEQ ID NO: 1959 - protein, 180 aa, Artificial Sequence
  Synthetic
STEEVLDEIRKLHKTLTEDIKRVLREIEELHRRTIEENKEVLDRDHMVLHEYVNAAGITDTPNVEKLLKDLEKSAKENEEHNERTLREDDRVLKEIRRRATELLKANEEMLRRIEEVMRAGKVDAEELLRESKEAIKEVKRVLEELRKESKRVVDETRKLSEENLEHSERVLRKVEEDLR

SEQ ID NO: 1960 - protein, 180 aa, Artificial Sequence
  Synthetic
SKEEVLREIERLHKETIRRIEEVLREATELHKRLTETNKRVLERDHMVLHEYVNAAGITDTPNVEELLRELKDALDKVRDHNRKTLKKNEDVVREIEKEVRELLKEDEDVLRRIEKVMRDGRVDARELLEESRREVERSEKEVERLLRKSRKVVEEVRKLSEENDREVKKILEEVKRRLD

SEQ ID NO: 1961 - protein, 178 aa, Artificial Sequence
  Synthetic
DDLERVLKEIKKAADKIREDNKRTADKIRKRVKELDDETRDMLRDHMVLHEYVNAAGITREEARKVIEELKKLVDEVRKRNEKSIEELKKLLKEDRDLMRRVIEELEDLVRRLREEVRDDEALRRVEEEVERLIRDLRRVLKETSDRVRELIDKHRRLSEEVEKDVKRLIDELKKKTD

SEQ ID NO: 1962 - protein, 187 aa, Artificial Sequence
  Synthetic
SEKERLKEELEKLSKEIEDILRDDKRSDDELRRRLRELLEKDRRDHMVLHEYVNAAGITARKRVSEDELRAIKKEIEDLNRRNEESLRAIEEKIKRLNDENRKSLEEIRRRLKRLVEEVDELRKRDNREELLRRLLEKLKRMAEKLKRDIEDNNRKLRKVATELAKEIEDNSEKLREDAKRLSEKIK

SEQ ID NO: 1963 - protein, 175 aa, Artificial Sequence
  Synthetic
SEKEDLERELEEVRRRVEESLRKNEEDVKRVRDELKKLLDENRRDHMVLHEYVNAAGITKRVLDEADRLLKELEDDHKKLEEDAKKALDELREEHKRLEETLRRMLKRIKEVLDRESDKMEEIKKEIEKILRDIERVSRELNKKLEEIVRRLKKVSDELNRRIEEIAERVRRRRK

SEQ ID NO: 1964 - protein, 175 aa, Artificial Sequence
  Synthetic
SEEDELRRLLKEVNERVERLLDEIRKELEKIAEELRDLLKKNERDHMVLHEYVNAAGITEEIKKDAERALTELKEEHERLDREAKKDLDRIRKELERLEEEHRRVSERIEEVLDKESDKTEDIAREIRELMERTRRVIEEIKKELRDILEKLRRVSEELNKKLDEILKRIEDRTR

SEQ ID NO: 1965 - protein, 177 aa, Artificial Sequence
  Synthetic
SAIEKVKEVVERVLETVRDSVRRSHEESKRLIDKVRKRLEEVRRDHMVLHEYVNAAGITERMVEKLERDLEELLKEIKDTIDRIEEELRTSNRRLKETNDEIAKRLEELLRELSRDRDKDAVEDVLRRIEELIRDLNKKNDDNVRRVKEVIDRAEKLVRDLLREIRKLIEKLIRDTE

SEQ ID NO: 1966 - protein, 174 aa, Artificial Sequence
  Synthetic
SEIEELEKRIDELLKELRDLSRRIAEEVKRLLEELKKLSKDSERDHMVLHEYVNAAGITEEELRRVEEEVERVVRESRKLNKETEDELRRLLEEIKESNDRVEKRARELKKLLRDGKDVEEVLRRLEKLVREDKERLKKVLKDARDLIKKDKDLNEKLSRELEKLVRELEERAR

SEQ ID NO: 1967 - protein, 174 aa, Artificial Sequence
  Synthetic
DEEEDLERRIKKLLDENRELLKRIAEELRRLLEELRRLTEESARDHMVLHEYVNAAGITEKDLRDVAEKVKKVLKESEDSNRDVKRKLEKLLRDLERSTERLEREARKVRKLLRDGKDIETLLRELEKLSRDNKELLKKIEKEIRDLIKEDKERNRELSERLRKLVEELKKKAT

SEQ ID NO: 1968 - protein, 177 aa, Artificial Sequence
  Synthetic
SEAEKVVEELKKLLREVEKKIRDHTEDVKRILEELERRLRKHSRDHMVLHEYVNAAGITDDTVRKVKEELDRSHEKLREELRKVAKELKESNEELERDLKRLVEEAEDRLRRLKDRVSEKVLRELEKILEDIKRTLDKLLRENRETLKRIEDRLRELLEENRKLLEKIERELRERSR

SEQ ID NO: 1969 - protein, 174 aa, Artificial Sequence
  Synthetic
EELERILDKVRKVIEEVRKRLRDDLRTVEKVLKETEEVLRRAARDHMVLHEYVNAAGITGRDRREIKEELKKVLDDLRELLRALEEKNRRVNKENEDSLRKIEEDLRDVLRKLEEEIKGREVLRKVRELLRTIREEVERVLRKSNELSTRIKKRIDDVLETLERLLKELDDKLR

SEQ ID NO: 1970 - protein, 178 aa, Artificial Sequence
  Synthetic
SSKDEIRRRVEEVVERSDEIVKRSREHVKTVVDELDRVVKELERDHMVLHEYVNAAGITGGSEETLKRVLDELREILKELKEEVKKVKRKLEKVVKENRDTIREVEERNRKILDELRKRGVEERALREVEEISRKSEEKLRRVLKESEDIAKEAEDRLKTVLERVERIADEVLKRLTK

SEQ ID NO: 1971 - protein, 175 aa, Artificial Sequence
  Synthetic
SEVDEVLREAKRIVDEVHKDNERATEESRRLVKKVHEENEEMVRDHMVLHEYVNAAGITEKLVTEILKEIEEALKEAARRNKEVKDRLRELSRRVSERNREILEELKERLDRVRERRKDVKELEREVEKLLKRIEESLRRHRKENKRLLEELDRSLRELAKIVKEVLDEIRERTR

SEQ ID NO: 1972 - protein, 186 aa, Artificial Sequence
  Synthetic
SEVDEVRKTLEDLLRRLDEENKDIIRRNKELLDDLDRKVREAIRDHMVLHEYVNAAGITLKDRETLTRIIEEIEKRARELIKRLRDEIRKIEEESKKSIEDSRKRNDEIRKRLEELIKDLRDKIKDSEELARRITELEKRVREVIERLKEKNKRLEDDSRRVITELRKKLKDLEDRVREEIEELRK

SEQ ID NO: 1973 - protein, 184 aa, Artificial Sequence
  Synthetic
ELIKKARKDVEEVRERSERLVDELRKRNKKLADESRRLIDKLRRDHMVLHEYVNAAGITRRTKDVLKEIEDLVRELERELRRVVKESSDKVRKLIRENEKVVEESSRLFRDLVEKLRRVVEERNDKKLMEEVERLIKRLEDVNEKSERDVREINKESERVNEETEREVEDAIRKLREVLRRAKK

SEQ ID NO: 1974 - protein, 186 aa, Artificial Sequence
  Synthetic
KEVEDLERRVKEILDRMKRLIDENRKKIEKSIRELERLIDENRRDHMVLHEYVNAAGITGGDDARTLRERVRKIIEDVEEHSRRSTEEVRRIHKENKEHSERSSDEIRELLRRVEELIEEVKRRLRDKEMEKKLEDIVRRVREVVRRAHETNERLVDRSRKAVEKAERTNRRLVEEIRKVAEEVRK

SEQ ID NO: 1975 - protein, 186 aa, Artificial Sequence
  Synthetic
DEIRELEERVRRILDELRRLVERNREVIERSIRELEKLLDRNRRDHMVLHEYVNAAGITGGDDKKTMLDDVRRLLREAEDHSRRSSETAKRIHRENEEHSKDSSRKVRKLIEELRELAKKVEKEITDERVKEAIKELVKDVDRVMREVDRANRELTKTSKKVLEDVDRTNRRLVKEVRDVVERARK

SEQ ID NO: 1976 - protein, 186 aa, Artificial Sequence
  Synthetic
KEVEDLERTVRTILKRMRELITRNEEEIRRSIEELKKLLKENKRDHMVLHEYVNAAGITGGDDKKRLVEEIKRLLDELRENSKRSSDRAKEIHERNKRHSEESSRTIEKLLKELRDLVRDVERKLRDEDAKRKLDELTKRVEKVVREADERNKRLTKRSKEVLDEVHRANEEALKEVEEVVRRVTK

SEQ ID NO: 1977 - protein, 185 aa, Artificial Sequence
  Synthetic
SAEELLRTIEKRIEDNHRRLEEILEEIARLIEDMLRTDERIVRRDHMVLHEYVNAAGITGVPEEVLERVRRELERLKKELEELRRRSEEKVKELKRRLEEIRRKLEEEHRDLRRKLEELRRDLGDKEEVVKKLVEDVERELERSLREAEDLLRRVEEVIRTSKKESKDVLEKIERLLRDLERRTR

SEQ ID NO: 1978 - protein, 176 aa, Artificial Sequence
  Synthetic
REAEEAKEEVEELNRRNKKELDDARRRVDELDKRNKDRLKESSRDHMVLHEYVNAAGITGRSDDRLREKIERMLKTSADELERLKEENKRALRDLAERLRELIERNRRKLEEITRRTVPDKDVLKRLAELIKESIRELERVLEELAEKIDRSLKELDDVLRKNETDLKRVIEDLKR

SEQ ID NO: 1979 - protein, 182 aa, Artificial Sequence
  Synthetic
DLERRLDELLKRIEDRVRELVRTLEESLRELERRVREIIRRLERDHMVLHEYVNAAGITNKPDKAVKDDVRRLRENADRLNKRVREELKKLREDVKRVNEDVKRELDKLAEEAKDMLRKLREAGIDERVIKKAEEDVRRLLREIEEVSERHKREVDRLEREIEEVSREHKERVEKLLREIER

SEQ ID NO: 1980 - protein, 179 aa, Artificial Sequence
  Synthetic
RLEDEVRKMEKEVREEVKRLEDESRKVLEESRRNLDKLREESKRDHMVLHEYVNAAGITGLDERVLRELLKRVREVHERNRKLLDEVRRASEKVHEDNRRILEEVRKTVKDVVDKLRRVDAKVVKELIDRVRKILEDVEREVKKSIEEVKEINRRLNEEVKKTIEEVKEIVKEVTERAK

SEQ ID NO: 1981 - protein, 183 aa, Artificial Sequence
  Synthetic
SVDERLDEVLERVKEDMDRNRRKNDESLREDEENVRRNKKETDRDHMVLHEYVNAAGITVKDERVKEFLDRVLEEIRKSAEEVKTIIDEVHKESEETVRRTKKIIEEVLRRIEELIRRVKKDRKEEVVKTVEEDIKRLLKEVNKVSDEAHKRNKELNERVNRVNKEAHKRNEDLLREAERKVR

SEQ ID NO: 1982 - protein, 183 aa, Artificial Sequence
  Synthetic
SIEDEIRKLKEDIKRVLDKVRRDNERLKERLDKVLEDIRRSSERDHMVLHEYVNAAGITPVDERLVRKVEEAVKRLKEHNEDSTRRVEEVIRRLKEESEESVRKTEKVARDLERELDEVLTRGGEERVREVIEKLKETLERLKREDKEVADRAEKLLREAEEHNKRSLDESRRVLEELDEEIR

SEQ ID NO: 1983 - protein, 183 aa, Artificial Sequence
  Synthetic
SIEERVRELMRDLERVLKEIREHSKRVIEEAKRVLEEIERNSERDHMVLHEYVNAAGITPVDETLVREVEEAVKKLKEHNKRSSDTVRDAVRKLVERLKESSDRATELVKDLKRKLEEVLRRGGEKELEEVERRLRKVLEDLRRNNKEVVDRLKEVLERLKEHNRRSLDESRKVLRELKERIR

SEQ ID NO: 1984 - protein, 174 aa, Artificial Sequence
  Synthetic
SESDEVIRDLARLLDELARHVDDSVRRMDEVVKRSTREADELARDHMVLHEYVNAAGITERVERMVAEIERLVAEVLEELKKKYEKLKREVEENLRRLEETVRDIVEKARKVTEKGVSKEKIDRIIRELERILEEAKKKHEDVLRRLEDSLRRVAELLKAALDRLREIVDRLRR

SEQ ID NO: 1985 - protein, 172 aa, Artificial Sequence
  Synthetic
SRAETVLKEVTDKIKKLADSSDELLRRNKENIDELKKSSEELLRDHMVLHEYVNAAGITEETLEELIRRVEAELEAHHRELEKNSREDEKRNRDHHAKLEEEMRRVEERLEREGIDDEVVKRVRDLLDTVRRRNEKVNEDVKRMNDKLRRDNEDVIRRVEKLLRELEEKRRT

SEQ ID NO: 1986 - protein, 174 aa, Artificial Sequence
  Synthetic
DEEEDLERAIKKLLDENRELLKRIAEELRRLLEELRRLTEESARDHMVLHEYVNAAGITEEDLADVAEKVKKVLKESEDSNADVARKLEKLLRDLERSTERLEREARKVRKLLRGGKDAETLLRELEKLSRDNKELLKKIEKEIRDLIKEDKERNIELSERLRKLVEELKKKAT

SEQ ID NO: 1987 - protein, 184 aa, Artificial Sequence
  Synthetic
DEIRKVVKEITDLLKASNDKNRKVVEEIRDLLRKSKKLADELVRDHMVLHEYVNAAGITSGDKETAEDIVRRIIEELKRILKEIEDLARRINREIERLVEEVERDNRDVNRAIEELLKDIARRGGSEDLKRVEERAREVSRRNEESMRRVKEDADRVSEANKEVLDRVREEVKRLIEEVRETLR

SEQ ID NO: 1988 - protein, 181 aa, Artificial Sequence
  Synthetic
DAVEEAEKLIRKVIADSEKLLRDLADLNAKSIRRSEKLVEDDRRDHMVLHEYVNAAGITGGSEEELRALLKEVEDTNRASHETNKRLLDEDRALNKEVHDRNEKLLRDIKRLVEEVAKGIDSEELLRRIKKLLDEIKKAIEDSSREIKRLLEESERVMKRSSEDIKRTLDDTRRVVEEVRR

SEQ ID NO: 1989 - protein, 177 aa, Artificial Sequence
  Synthetic
SEDEDLDRVAEKLAREHKKSVEEIKRVLKSADEESKKLVRDTERDHMVLHEYVNAAGITNIDEELVERLKKKIEDILRTLEERHKKLIKELREILKRLSDESRRLAEETEKVLEDLERKGVDEEVLKKLAEIVRRVKEENRKVNEEVEKRLRELEEENKKVIEDLKSTVEELVERLR

SEQ ID NO: 1990 - protein, 177 aa, Artificial Sequence
  Synthetic
SKEDRLREELKKLLARLAEEIERLKRALEESNKDLKRTIDASERDHMVLHEYVNAAGITEELLRELERSTAENKERAKELLKRHEDLVRKVEKELADLLRRLEEIVARVDEALKRGISEEELDKLLKEARDLIREIEKRLEELLKRVEKLTEDAKRDLERSNREHKELADRIKETAR

SEQ ID NO: 1991 - protein, 238 aa, Artificial Sequence
  Synthetic
EEDERLTKRVEEIKRENRELLRRLEEEVKELERKSEKIVRDLKRDHMVLHEYVNAAGITTELLVEELEKLIREILKLSEDHNRTLEEVVRKIEDVLRANLERLKELVDEILKALKERGKGDSEELKRKVEKVARDYERLLRKLREVVKRILDESKRLDEELEERLKEVLKKLEELIKRGGPDKDVLTELKRILDELLKLVEKLIRRNLRLLEELLRLVREILRTSNEILEEILKDARR

SEQ ID NO: 1992 - protein, 245 aa, Artificial Sequence
  Synthetic
TEEEVLRKVEKLIKDLLDVLRDLLRASEEVVREALRVLEELIERDHMVLHEYVNAAGITSRESVESALAKNEERLKKILEDADRVLDKWRRLLEELSKKAKAVLDEVRKRLEEIKREVPETEKLRTLLTILEEILRALEKIIRDILRINERLLEKLKRILERLRETNREIDERIRKLVEEARGGSEEKLRRDLTETKKELEKRHEDLRRELEKLLRDYKRELEEIERALEEIEKTLKRRADETRR

SEQ ID NO: 1993 - protein, 250 aa, Artificial Sequence
  Synthetic
STEEILKRVKEILDELAKELRDIIRESLRTIEELLDELRRILERDHMVLHEYVNAAGITVKDSEELLRRLKRLLEDLRRAHEELLKRLKEAVDEHRDRLRKILEELERVLKELRKRIEELRRSGDRISEKDVLRKLEEVLRKALEILERLLKKIRESARELLKIIEEVLDANIKVMEEALKTIKELLKDGPDEVKRRLEEKERRIRTRYEELRRRLRKRVKDYEDKLREIEKKVRRDAERIEEELERAKK

SEQ ID NO: 1994 - protein, 247 aa, Artificial Sequence
  Synthetic
SEKEELLKLIKRVIELLKRVLEEHLRLVEDVIRRLKELLDSNERDHMVLHEYVNAAGITVRGDKEELDRIKEKLEEVLERYKRRLEEIKRDLERMLEDYKRELKRIEEDLRRVLEEVERIATRGEGPAEALIDKLRKILERALRELDKLSKKLDELLKKVLEELEKSNREIDKLLKDVLRRVEEGGASEDLLRKAKKVITEVREKLKRNLEDVRRVIEDVKRKSARILEEARRLIEEVERELEKIRK

SEQ ID NO: 1995 - protein, 238 aa, Artificial Sequence
  Synthetic
SEAEKIREALETNLRLLEELIKRLKEILDTHNELLRRVIETLERDHMVLHEYVNAAGITEEVLREVKRLVDELRKEARRVLDEHEKLVRKIKKEAEDVARESEEIIKEVEDKLKGLDREELLERVRRVLKKSDDLIAELVRRALKILEELTRLLAELLKKVVEILRRIVELVERVLTKKGAPKEDLERLRRKVEELEDRLRRLLEKLARDSAELMRELERILDRYARESEELDRRLAE

SEQ ID NO: 1996 - protein, 247 aa, Artificial Sequence
  Synthetic
SEAEDLEELIKELAELLKDVIRKLEKINRRLVKILEDIIRRLKRDHMVLHEYVNAAGITDKDILRDLERRLREILEESDRLLEELKRRLEEILRKSKELLRRLEEVLREILKRAEEVKRSNLPKEELIKEIVKLLEELLRVIEKILEDNIRLLEELVEVIKEILEKHLRLLEELVRVIERILREVGKDKDEAERRRRELKDKLDRLREEHEEVKRRLEEELTRLRETHKKIEKELREALKRVRDRST

SEQ ID NO: 1997 - protein, 240 aa, Artificial Sequence
  Synthetic
SDKEEIKRRVEKTARDLETEHDKIKKRLEDTVRDIKRELDELLRDHMVLHEYVNAAGITGDGDATDLVDKLLETVKRLNEEVLRTVKKIADELRRLVEEVLRVLRESNETLARLLEEGNVGDEVRERLEEVLRRTEEIIKTLEEIVKRLLDELRRLVEELRRISKKLKDELDKIKEKGKDEKRLIEEVVRLLRENLDVVRRILEALAKLIKELLEALEEVLRRNKELIRELLRVLDEALK

SEQ ID NO: 1998 - protein, 240 aa, Artificial Sequence; identical to SEQ ID NO: 1997
  Synthetic

SEQ ID NO: 1999 - protein, 248 aa, Artificial Sequence
  Synthetic
DEDRIIEEIARLLEELLRELLELIKKLIETNRRLNEEHERAVRRDHMVLHEYVNAAGITGISDEKLKRIRERLKRALDDLERLHREINKRLEDLVRELEKLVREILKELKDALEELRRASARAGGEEVLRRLEEIVKKLLDLVRRILERLKEIHKDNVRLLRELNERLTRIVEDLVRLIREILREAGVDEKIAEEIERELEELRRMIKRLHEDLERKLKESEDELREIEARLEEKIRRLEEKLERKRR

SEQ ID NO: 2000 - protein, 248 aa, Artificial Sequence; identical to SEQ ID NO: 1999
  Synthetic

SEQ ID NO: 2001 - protein, 238 aa, Artificial Sequence
  Synthetic
DADELLRRLAEEVERVIREAEDLLRRWKETIKKVLDDLKRLLDRDHMVLHEYVNAAGITKGDEELAKLIKDLLDTNEKVNRDLLRLIKKLLKDAERVNRRLLELIEELLEELKRVAKDLGLREEADKKLRDIADRARKELEDYERRLKELLKTVEDALRKAEEDSRKLKRDVEELLERGRLRKDDLEDILRKNLDRLRKLLERLREILRENLEALKKTLKRLEDVVREILEDLKRERK

SEQ ID NO: 2002 - protein, 231 aa, Artificial Sequence
  Synthetic
DKAEVLREALKLLKDLLEELIKIHEESLKRILDLIDTLVKVHERDHMVLHEYVNAAGITERELRKVERMATESLRTIAKLKEELRDLARRSLEKLREDLKRVDDTLRKVEEKVRRTGPSEELIEELIRTIEKLLKEIVRINEEVLKAVRELLKTLLKLSEDVVRRIEEILRKGGVPEEIDRELKRVVEELRRLHEEIKERLDDVARRSEEELRRIIKKLKEVVKEIRKKLK

SEQ ID NO: 2003 - protein, 231 aa, Artificial Sequence; identical to SEQ ID NO: 2002
  Synthetic

SEQ ID NO: 2004 - protein, 236 aa, Artificial Sequence
  Synthetic
STREKAKKVLDTLRADNEDMKRVVEKILRALKRTNERAEKLARRDHMVLHEYVNAAGITEEALKEIEDTLKRVLEEIKRLLDESKKLLEDVEREIREILKTSEELLERIEREIETVGSDEKTLAEILKRLLELNEEMNRRLLKILRDLLRLNEEVIRRLLAVLERLLDALKEALDRGDVPEDLLRKLEEELRRIKEKLRKALEELEREHRELEKELDKLHDESRKEHERIEEELRR

SEQ ID NO: 2005 - protein, 236 aa, Artificial Sequence; identical to SEQ ID NO: 2004
  Synthetic

SEQ ID NO: 2006 - protein, 239 aa, Artificial Sequence
  Synthetic
SERELIERWLELHKEILRLIRELVERLLKLHREILDTIKKLIRRDHMVLHEYVNAAGITKEAKDELREIAKRVEDKLEKLERESRKVEEDLKRKLKELTDESDTVEKRVRDVVRRGTQSREEIAEELLRLDRKLLKAVEELLKEILDLNKKLLDDVRAILEETRRVLEKLLDRVRRGERTDDERRTLTELLKRMEDILEKVERTLKKLLDDSARMAEEVKKTLKELLERSEKVAEDVRK

SEQ ID NO: 2007 - protein, 239 aa, Artificial Sequence; identical to SEQ ID NO: 2006
  Synthetic

SEQ ID NO: 2008 - protein, 231 aa, Artificial Sequence
  Synthetic
SKEEEVEKVLRKWEEILRRLIEENKRANDKIRREYEELVKEIRRDHMVLHEYVNAAGITEEVKRILEKLIKLLEDILEYEKENVERLIELNERILRELKKSVEELKALVTRVRRDGLPESEVRKLVEDVLRKNEELLKEAKKAWRDSIENLKRVLEEVAKLVKTVLREIEEKIDDEDVVRALIEVIERLLRVAEEVIRRILKVNTELMRVDERSIRESLKAISEVLKVLDT

SEQ ID NO: 2009 - protein, 231 aa, Artificial Sequence; identical to SEQ ID NO: 2008
  Synthetic

SEQ ID NO: 2010 - protein, 245 aa, Artificial Sequence
  Synthetic
DEDELIRKLLEDLKDIVRKILELIERDLRDIERVVRRIVKVIRRDHMVLHEYVNAAGITVPRTEELERVIKRIEELLRTSEEELDRILKEIEELLRESRRRLEEVVSAVEELLRRVEEIVDKGRESKEDVIKLLREVVDDILRLVEEVVRTNLEIIKRILELIERVIRLNLSIIRDILRLLEGTVDSELADRIRKLIEDLERHTAKVLEDVKRAITELRKNSKDILEEVRKLIDELRKRIKEVED

SEQ ID NO: 2011 - protein, 247 aa, Artificial Sequence
  Synthetic
RDRDVLRKVKAEIEELVARIEKVSRDALSEVKRLLDENRKIAERDHMVLHEYVNAAGITRGDDEVVKETEEVLRDNHRLLEELIRRLIKVLEEWLRRHKKLLDEIRELLKEILRLVKESGVSEDLLRRLKRVIEELDKKLKESEEKLRRVVEKAKEDLKAVLEEHRKVLEDLKRALEEVREKLRERGSEEVVEELLRMLKRVAEEMKRVHDDLSRAVEKVVRDVVRVDKELLDELARILRRLEEVIT

SEQ ID NO: 2012 - protein, 247 aa, Artificial Sequence; identical to SEQ ID NO: 2011
  Synthetic

SEQ ID NO: 2013 - protein, 231 aa, Artificial Sequence
  Synthetic
SKDEELARLLEELVERWRKIVEDLERDHRRLVKEIRELVERIRRDHMVLHEYVNAAGITERIVRLIEEIAKIIEEVLKEIVKLVERAVRENVRVLRESVRLVAELVETLARLLRGSDERVTEAIKKVLDTSEDLIRRVIKVNEDILREIAKLVEEVLREAERILTEIKKEGDREEIRRILEELKRIVDDVLRIIARILKLLRDLTRRLAEVAKAVHKLLEELLRKLKEDTR

SEQ ID NO: 2014 - protein, 238 aa, Artificial Sequence
  Synthetic
SEIEDVIRRLRKILEDLERVSEKLLREIKKILDEARRLNEEVIRDHMVLHEYVNAAGITGSGSKEELAKLVEELIRELAKLAKEVDEIHKRIVERLKALVEDAERIHRKIVETLEEIVRGVPSEELKRVVEAIVEVIKEHLKVLADVIRRIIKAIEENAETIKRVLEDIVRVLELVLRGEGSIEDLVREVERLIKRIEDSLRELEKTVRELLKRIKEASDKVREDVDRLIKELKEAAD

SEQ ID NO: 2015 - protein, 237 aa, Artificial Sequence
  Synthetic
KEKEDALKKLEDLARKSREDLERVLRKHKKILDKIEELLKRVLRDHMVLHEYVNAAGITESEILKELARLLREHHEALRRLIEELRRLLEEHHKILEDLAREHKRLLDELIKVVADGVDKDELERIIKELRERDKKLVDDLRKVSEDLLDAVRKLVEDLERISRELLRRVEELAKGIDEELAREVERVIKELLDKSKEILERIERAIDELLKVSEEILKLSEDASEELLKILREFAK

SEQ ID NO: 2016 - protein, 237 aa, Artificial Sequence; identical to SEQ ID NO: 2015
  Synthetic

SEQ ID NO: 2017 - protein, 241 aa, Artificial Sequence
  Synthetic
SEKELLKEILDRIRELLEDDNRLLKRIVDEIRKLLEEWLRVHKRDHMVLHEYVNAAGITEDVIRELTRALKETEEDVDRVIRTLEKLLKEVLDAHEEVVRKLDRLLKEVERLVEGGDAEEVVRDLLRVVKEILDESKAVIDELARVVDEILKLLEEVDRKLAKVVKEILEDVLRGSGDDEDAVRKIAKIIEELKRLLEDLARDTRRVIEEAKRLLKEWRDRNKEVADTLKKLLEDLIRKIR

SEQ ID NO: 2018 - protein, 241 aa, Artificial Sequence; identical to SEQ ID NO: 2017
  Synthetic

SEQ ID NO: 2019 - protein, 240 aa, Artificial Sequence
  Synthetic
DREKSVRDIEEDLKRVLDKLRRRVETSKEELKKVLKADKENADRDHMVLHEYVNAAGITIDSEVLRAVREIVKRLVEVVRRYNELSEKIIRDLVRVNDRVLELLKRIVKRLIDVVRELEKIGDKEKALRRLEEVVKEVKRRIEELLKELEDVHRELVKILEEVNEDLKRVATEVKEIIKTGIKSSEVAKELDEVIKRLLDNLKENTDRLKEVIDRNLADLRDLAEELRAVIERLLEDARR

SEQ ID NO: 2020 - protein, 240 aa, Artificial Sequence; identical to SEQ ID NO: 2019
  Synthetic

SEQ ID NO: 2021 - protein, 237 aa, Artificial Sequence
  Synthetic
REDEVLRDIERLLREIEEKIRRILEESTAELRKVEEEVKRIIERDHMVLHEYVNAAGITGIDEELRKLLDEVLDKLTKLIERNKRSLERILELIKRIIDENLEVLRDIIRLLEELLKATKDNGVPKDEVIKLVEDVVRRIEELVTRVVARNEKLVKDLDDLAKKNVRENEELLREIDRGLDEDLLEKIKRVIREHIKALEKLARDLKEILRRHIEALKELARDLAEVIRKLLEDVKR

SEQ ID NO: 2022 - protein, 237 aa, Artificial Sequence; identical to SEQ ID NO: 2021
  Synthetic

SEQ ID NO: 2023 - protein, 243 aa, Artificial Sequence
  Synthetic
SEAERLADEVRKAVKKSEEDNETLVREVEKAVRELKKNNKTWVRDHMVLHEYVNAAGITGQVSDRDLLKELEEVLRRVLEALAENHERTEEILKRWLDRYAEDIERLRKVLKEVIEALKRGGSDDKRIVDELEEILRRNEDVLDKIAKRLRRLLEEDRRLLERIVRELKRLLDDLDRITKEGKSEELVRIAIEVLKRLLEIIEELVRLNNEILERLLKIVRELHKDNIKILEDLLRIIEEVLR

SEQ ID NO: 2024 - protein, 245 aa, Artificial Sequence
  Synthetic
SEKDEVTRRIRELLKEAEETNREAIERIKRLLDRVREAVEEVARDHMVLHEYVNAAGITGLQDDEALLKLLIDALREHNRLSTELIKILIDVLRTILKIIKDVLATNIEIARRILDLVRRLAERGGLDDRLVKEVEKLVRTAERLHRDALRKVKRLVEELEKRLRELVKTDHDLVRRLETLLRRGSGSKEDLLREIARILAESLRLIRELLKEIEKIVKEIIELLERLNDELRKIIEAILETTKK

SEQ ID NO: 2025 - protein, 239 aa, Artificial Sequence
  Synthetic
SAEDLVRRVKDLVDKLEDKLRKVVRTNERLWEEIRKRLEELVRRDHMVLHEYVNAAGITDKDKDELIEEAKSLEDESNALVEKLVRDIERVLAESNKLLDTLAKEIEEVLEEIVELVERGSGSDKEAREKLEDIKARLKEVLKKLREESKRIIDELRRLLEEYKRLVKEIRDRIEEVRKRNSEIRVLVELVRRHNKVLKELVEELEKLVRDHNRVVEEVVRELVELLSRAVEVIKEVVK

SEQ ID NO: 2026 - protein, 247 aa, Artificial Sequence
  Synthetic
DEERLAEELERVLDRNRKLLEEALRELRRVIEENRKSVKRLLDRDHMVLHEYVNAAGITSRGDSDEELRKVIEDLIRKLTKVLDKVRSLVEENIERLARVLEKLERLARENLEDLKKVLDDVDKKLKDRRLVERLAELVRELIEVNKEILEMLKEIVRELLEINRTLLERLKDLVATALEIIKLLARGDGTEEDVERAVKEIRDRLRKLLEDYERAVRRLEDKLRRVRERYEAVLKRIKDKLEETKR

SEQ ID NO: 2027 - protein, 243 aa, Artificial Sequence
  Synthetic
SRVEELKKLIEDILRISREVVERIARVAEDIHRINRRVLDDLRRDHMVLHEYVNAAGITKVSGTEAAEALRDTIRRVVDEIRKLLEEHEKRSAELLEEIRKLLEDILRRSERAVEEIRELLKKGVSTKDVLRIIEEILREHLELLERVVRRIEEILRELLKTIEEIVKRIKEILEELKEVLKRGSVGDDEVEREIRRVKEDLDRILEEYRRLLEEIKRKLEEILRRVEELHRRLRRKLEEIDR

SEQ ID NO: 2028 - protein, 249 aa, Artificial Sequence
  Synthetic
DAEEVVKRLADVLRENDETIRKVVEDLVRIAEENDRLWKKLVERDHMVLHEYVNAAGITGVPEELLDRLAKVVKSIVEKAEKILERLNRVSKAIAEKLKTIVDELNEVSKEIVKRAEDILRKGKDKETVLRALRTLVKEYADLSKEVLERVERIVREYVKLSDEVVKSLAEIVEELIRIIEDLLRKGNLDEDVKRALEELVSRLRKLLEDVKKASEDIVREVERIVRELAKRSDEILKKLEDIVEKLRE

SEQ ID NO: 2029 - protein, 240 aa, Artificial Sequence
  Synthetic
DKDKRLEELLKRLKELNDKTFEELERILEELKRANEASLREAERDHMVLHEYVNAAGITKRLAELLKKLLDDLKRLLEEYTRTNEELLKRLRELLERYRETNKKLLDLLRKLLDEARRTGTDEDLLRRLEDILRKYEDEVRRLLKELEDILREYEDTSRRLLEELERIAKEAAERVSRGSDKDVKDIIRTILEVARDLLRLLEEDSRTNSEVVKRLLDLLREDSKANSEVVKRLLDVLRE

SEQ ID NO: 2030 - protein, 240 aa, Artificial Sequence; identical to SEQ ID NO: 2029
  Synthetic

SEQ ID NO: 2031 - protein, 240 aa, Artificial Sequence
  Synthetic
SKEETLKRLLDELEKRNRETVERLERLLKELEDRNRASLEELERDHMVLHEYVNAAGITKELKDTLARILEELRKLLEEYFRKNEELLRLLRKLLDEYARTNEELLRLLEELLDTARRTGGDSELLKRLEDIAREYEKRVRRLLEKLKDILDKYRKTVEELVRKMEEILKEAKKTISRIGSEEVKDIVRAMEEVIRRLIEILRRDVELNLDVAKKLLELLKEDSKLNLDVARELLELLDR

SEQ ID NO: 2032 - protein, 240 aa, Artificial Sequence; identical to SEQ ID NO: 2031
  Synthetic

SEQ ID NO: 2033 - protein, 243 aa, Artificial Sequence
  Synthetic
SEAERTKESLKKVLKALVDLNRELLRKLEENMRELTKLNEEVKRDHMVLHEYVNAAGITDKDAEREAERLMRELDKSSEDTARETRKLIEESKKSTRRTEEEARKLTETLDRLAKGGLPREDLLRALVRLLEELARLIEEDVRRNAELVKRHIELVERDVAELLRLIKELVDLLADLAEKGSRTEEIRKIVEEILKEIKELADRYREEVRKSKDKLRSILEDYKRKVDELKERLRELIEEVET

SEQ ID NO: 2034 - protein, 178 aa, Artificial Sequence
  Synthetic
REVEEIERRLRELVRRSDELVRTVAEELEKLVRRNKKLVEDVMKRLRDLVERLRELVDAGLDKKEAEEDVRRLEEEIRRLLETLKEHSDRTRKKIRELVERLRDVNRKVNEEVKKLIRDRDEVRKVLKDVTELSKTSEDKLEKVVREVKRKLDEVNRDLERVVREAKKLLREVRERLE

SEQ ID NO: 2035 - protein, 178 aa, Artificial Sequence; identical to SEQ ID NO: 2034
  Synthetic

SEQ ID NO: 2036 - protein, 178 aa, Artificial Sequence
  Synthetic
DEVDEIRRRLKKLLDDSRKTSKDIERRLRELLDRNRRLVERVEEELRKLIKELEELVRSGLDREDVKRMVKKIEDEIRKLLEDLREHSKRTLEEVKRLLEEDRRTNEDLNREIERLDRRREEVEKVLKEARDVSEDSKRETTEVLKEAKKALEDINKRLREIVETVREALERVERALT

SEQ ID NO: 2037 - protein, 178 aa, Artificial Sequence; identical to SEQ ID NO: 2036
  Synthetic

SEQ ID NO: 2038 - protein, 178 aa, Artificial Sequence
  Synthetic
DEKETVKDVVRRLVEKLEEVVKESKKLVDDLVKRAKEIVRESEELVRRNVRRAEEVARERNDEETAKRLIEDIRRTTKEIIDTSRRLIEELRRLLEELKRRSEELIREIEKELKDVADRLVRDEKVLKELEDAVREVKERIKKTNKELEEMVRRVEEEIRESDERLKKASEEVEEKIR

SEQ ID NO: 2039 - protein, 178 aa, Artificial Sequence; identical to SEQ ID NO: 2038
  Synthetic

SEQ ID NO: 2040 - protein, 178 aa, Artificial Sequence
  Synthetic
SEMETVLDDVRRVVEESEELVKRARDRVKKLVDDLKRLVEKNEEDVKRVVDELDKLVEKVRTEELLERVRKTIERLADEIRRSTETIEREITKIEEEIERIVKTIEDRDRRLLEEIERRGAGEEVLEEARRLSERSREELRRVLEEARRLIRRVREELKRVHDKARRLVERVEEKLRT

SEQ ID NO: 2041 - protein, 178 aa, Artificial Sequence; identical to SEQ ID NO: 2040
  Synthetic

SEQ ID NO: 2042 - protein, 178 aa, Artificial Sequence
  Synthetic
DEVEEVLERVKKVVADSEELVKRNRERVKKVVDDIRDLIRRNAETVKEVVKTIRELVKKVRTRELLEDVKRRIKKLLDEIRESTKRIKDTIRRLREEIERTSRKIEDDDRKLVEEIRKSGLGEEALKDAERRSDESRKKLKKVHDDADRMVREVTRRLDEVHKEAEKRVREVLAELDT

SEQ ID NO: 2043 - protein, 178 aa, Artificial Sequence; identical to SEQ ID NO: 2042
  Synthetic

SEQ ID NO: 2044 - protein, 177 aa, Artificial Sequence
  Synthetic
SIEEVLKEAHELNKEANKRLRDVEEDAKRLIEEVLRRLEDVLRESERLAREVLEELKRKGVDEKILREIKKLLDENRKHSEEVKRRIEELLRRLKDLVRRILKKDTDSNRELKRLVEEGLDAKELRRRVERSVEESKRLVDELRKDVKRVVDEIRKVVEEDLRHAKRVVDEIREKVR

SEQ ID NO: 2045 - protein, 177 aa, Artificial Sequence; identical to SEQ ID NO: 2044
  Synthetic

SEQ ID NO: 2046 - protein, 175 aa, Artificial Sequence
  Synthetic
DEAEEVKRVVEESVRRNEELVRRNEELVRDVLRRLKEVVDENERLVKEVVDRLRDLVRRGADKEEVRREIEKILRDLHEHSKRTEEEIRRLLEELHKHSEETLKDSKRSHEELRRRGAEERVLKEVEELDRRVLEELKRVNDEARKRVRTLLEELRRVNEKVEELVRRILEELKK

SEQ ID NO: 2047 - protein, 175 aa, Artificial Sequence; identical to SEQ ID NO: 2046
  Synthetic

SEQ ID NO: 2048 - protein, 172 aa, Artificial Sequence
  Synthetic
DEAEDVVRKVMDEIRKLIEVSKEILKELRRLVEELKKHSDRTVEELRRVVTELLKKEASEEEAKEVVDRIRELVTRLVEENKKLVEEIRRRVEELIRRSEEELKRIEREVDTKLKDITDAVRRVRELLETVRRTSEEVLKTLEEFLRRVEKSTRRAEEELEEFLKRVEDRVK

SEQ ID NO: 2049 - protein, 172 aa, Artificial Sequence; identical to SEQ ID NO: 2048
  Synthetic

SEQ ID NO: 2050 - protein, 183 aa, Artificial Sequence
  Synthetic
KEADKLAKELEETIERLKRDSERLVTDLERLLERLERRSRELVKRLRRHVEELLKTVRRDGGESEELKKRLKELKDSNKRLNEDSERVTRKLVTDVERLLEKAEERTKELSERVKRRIDEVRKDVPELREVIKKVEDLLREVEETSKRILDRVRELLKKVEDSSRRINEESKKLLKRVEEEAR

SEQ ID NO: 2051 - protein, 183 aa, Artificial Sequence; identical to SEQ ID NO: 2050
  Synthetic

SEQ ID NO: 2052 - protein, 175 aa, Artificial Sequence
  Synthetic
SELEKILEDLKRVAERVAKALDRSLRELEKVLRRVEEELTRSNERLREVVKEVEDAADKLREVIKKLRELLRDLEEKTKRLVDELRKLAKRLAEDTKRLVEDIKRLLDELRKRIRDVDRDEEVRKLVEDLARRLDDIVRRSEELSRKLAEDVEEIVERSKRLSEELAREARELVR

SEQ ID NO: 2053 - protein, 175 aa, Artificial Sequence; identical to SEQ ID NO: 2052
  Synthetic

SEQ ID NO: 2054 - protein, 180 aa, Artificial Sequence
  Synthetic
SEIEDVVRKVETLARESDERVKTLMEENKDLAEKLKKLVRDVVEKVKREVTRLLDEVRRRPEREVLDRIRETIKRIEDELRELLKTIDRLSRDLERKNRELRETSKKIIDDIRRELDKLPEDEELKKVKERLDEAERRSKELIDEADRLNREMLKRVKEAIKKVKETLDKALEDVERAVR

SEQ ID NO: 2055 - protein, 180 aa, Artificial Sequence; identical to SEQ ID NO: 2054
  Synthetic

SEQ ID NO: 2056 - protein, 173 aa, Artificial Sequence
  Synthetic
SDLERVEERLERAVREVEKLHEDSRRELRRVVKEVHDSTRKVEERNRKLVKRVEEADIREEMLEELRRRSEESIRRTRKVNEDLHRAIEEIERKDKELLDRAKKEVEELLKEVRERGDKKVIKKLEDMLREWAKLVEKSIKELKELLEELRKVSKKLVDDNDRLAEELKRRVD

SEQ ID NO: 2057 - protein, 173 aa, Artificial Sequence; identical to SEQ ID NO: 2056
  Synthetic

SEQ ID NO: 2058 - protein, 183 aa, Artificial Sequence
  Synthetic
DEVKALVDKVRELVRKLKEESDDLVRRNEELAKEVEKRSREVVEKVRDTVRKLLEELERADKSDKERLDRLITRIREKIDEVRRRIEELNREIEEVSKKSLKENKDTNREIRERIERLRKELDDKGVDKKVRDDLRKALEDVNRSSKRVEERDKEVLDEAHRSSTRVLETLKRMLERLDEKIR

SEQ ID NO: 2059 - protein, 183 aa, Artificial Sequence; identical to SEQ ID NO: 2058
  Synthetic

SEQ ID NO: 2060 - protein, 183 aa, Artificial Sequence
  Synthetic
DEVEKLVKKVEDLVKRLIEVSEDVVREVEKRLRELEKVHREALRKNRKLLEDLLRRLREADKTSDEEVKRLKEEIDEVSERSRRENDRLNEEVNRVTKEVTDKIRKVNEDIRRKIKELKKELDEKGVDDKVREKLKRALDRVNKSSREVEETLRRADKRLNDLVKEIKDEDKRMLERLERETQ

SEQ ID NO: 2061 - protein, 183 aa, Artificial Sequence; identical to SEQ ID NO: 2060
  Synthetic

SEQ ID NO: 2062 - protein, 183 aa, Artificial Sequence
  Synthetic
KEVEELVKEVRKLATKVIETSKRVVEELEKLAERLLRTSKEVVKRNKELVDDLLRRVREVSDGDEEKVRRLEEDIRRRSKKSEEDNDRLNEDINRKSKKVADELKKLNDDIRRELDELERELDREGVEEEVRKELRELLRRVNESSKDVKRRLEDLDREINRLSKRVKEEDRRALKEVEEEIK

SEQ ID NO: 2063 - protein, 183 aa, Artificial Sequence; identical to SEQ ID NO: 2062
  Synthetic

SEQ ID NO: 2064 - protein, 177 aa, Artificial Sequence
  Synthetic
SKEEEVKRVLREALERVEELNKRLNEEDKRMLDEVRKVNRDAERVLREALKRVEELLSRVSDKDRVKKLREDVKRIAEEVERLSRKSEEDVKKVHRESKRLSDENRKEVKRVEDRVRDKPKTDELVTDVERVVRELLDHVRRLVRESKELARELIRRSEEIVRTVEEVVRKLEKDVR

SEQ ID NO: 2065 - protein, 177 aa, Artificial Sequence; identical to SEQ ID NO: 2064
  Synthetic

SEQ ID NO: 2066 - protein, 177 aa, Artificial Sequence
  Synthetic
DKAKKVEELLRKAIEEVEKLNDEVNRTDEKMLRRVKELNDDVHRTLEEAIKRVRELLSRVSDEDRVRDLRKKVEDARREIEKLSEENEERVRRVHERSRKLSDDNRRRVKEVEDRIRKKEKTDEVVTEVEKLMRELLEHVKRLIDESRKLAADLEKHSRDIVEEVRRLVEELLRTVK

SEQ ID NO: 2067 - protein, 177 aa, Artificial Sequence; identical to SEQ ID NO: 2066
  Synthetic

SEQ ID NO: 2068 - protein, 177 aa, Artificial Sequence
  Synthetic
SKERDVERKVREVIKRVEDLNKRVHKTLEDVIREVEKLNEEVKTRVEKLIREVEELLKRVSDKDKVRRLRELVERVRRRIEELSRENKKRVEEVRKTIEDLSRENRELVERVRREIEKKEKTDRVVEEVERLLRELEKHSKEIEEAVDRLVRKLEEHVKKVVEEVARLVAELKERVK

SEQ ID NO: 2069 - protein, 177 aa, Artificial Sequence; identical to SEQ ID NO: 2068
  Synthetic

SEQ ID NO: 2070 - protein, 177 aa, Artificial Sequence
  Synthetic
SVAEEVKKVKDKLKKDVERLNEEDRRVLEKAKRESKKLLDEIKRVLEELERKLEELLRRDDDKDRVRDLRRKLDEVRKRVKKLIDDSRKRTKDVEKRTEDLNRETEELVRRVEKRVEDLPKAKEVVTEIRRVVKELLDKVRESIKETERVVRELLERNRKILKEIREVVRKLLEDVR

SEQ ID NO: 2071 - protein, 177 aa, Artificial Sequence; identical to SEQ ID NO: 2070
  Synthetic

SEQ ID NO: 2072 - protein, 186 aa, Artificial Sequence
  Synthetic
DEARKLLEELKRLAERVLKTDTDLLDESRRILEEVLKTNKKSIEDSKRLAEDVLRKVAREGGESERAKDLIRKLLEDLKELLKRSHETNKRLLEELRRLDEEIHRTNEKLLRELKALLDRIREAGLEEEVLDRVREIMERVLTESKELNDRIHTISRKAEEDSKRLNEEDRAIMEDVRRELKRVVD

SEQ ID NO: 2073 - protein, 186 aa, Artificial Sequence; identical to SEQ ID NO: 2072
  Synthetic

SEQ ID NO: 2074 - protein, 186 aa, Artificial Sequence
  Synthetic
SEAEKLLEELRTIAKEVLDRVRKMLRESEKLAEDVLRENKKSIEDSRRIAKKVLDELRRDGGEDESLRERIKRLLEELRRLLEESHKKNEELKRELEELNRRIEETIRRLEKRLKELLDRIEEAGLEEEVLERIRRIFEDVLRKLRKLLDEIHRISEKVKKESEELNEEDKRIVDDAERRLEDLER

SEQ ID NO: 2075 - protein, 186 aa, Artificial Sequence; identical to SEQ ID NO: 2074
  Synthetic

SEQ ID NO: 2076 - protein, 177 aa, Artificial Sequence
  Synthetic
SVKDAVEKILREAEETVKRLNEETKRRLDEAREESKRLIDEVRRILEKLKEVLDEVLRRVSDEEKVKRLEDVLRRIEKRVRDLLKEVEDNTRRSVERVRKLNEDDKRRLDEIKEEVRREPGAEELLERVKRLMDELEETSRRILEEVERVIRRNKELADRILKEVAELLKRLEEELR

SEQ ID NO: 2077 - protein, 177 aa, Artificial Sequence; identical to SEQ ID NO: 2076
  Synthetic

SEQ ID NO: 2078 - protein, 180 aa, Artificial Sequence
  Synthetic
DEAEELRKTVEDIMKELREELKRLEEESRRIMEELKKRLEKLIEDSRKAAEDLKREADRLTDKEKVKRLKEELERLNRTINKISKELLEKLRRLNTEINKTVDRLRERLERLAEDIRRRVDKRLLEEIKERVDRVKKELDEADKRINDSSREVEKTLEDLDRKINKSSEEVRRVLEEAER

SEQ ID NO: 2079 - protein, 180 aa, Artificial Sequence; identical to SEQ ID NO: 2078
  Synthetic

SEQ ID NO: 2080 - protein, 181 aa, Artificial Sequence
  Synthetic
DVEETLTRLLKEILDVVRKALRDTREIVRDVRRVSEEVLKELEDLLREVDREVKRVLAELKGKELLEELKKLLEEIRKVVKEIEDRLKRVTEESEENIEESLRELKRLLKEIKDDVDRVRKSGVEDTEVVKRIRELVEKLRELVKRSNDNLKEHVKRNKELAKRLLDELRKLVEDLKRARK

SEQ ID NO: 2081 - protein, 181 aa, Artificial Sequence; identical to SEQ ID NO: 2080
  Synthetic

SEQ ID NO: 2082 - protein, 176 aa, Artificial Sequence
  Synthetic
DMEEEVKKLIDEVRRVLEEVLKRVEDIIDASRRTLKKVVDDVRRIDEDVERELKEAEKRGVPKEVVEEVRDRLRRNHETVKKRIRDLEKENRDLIREIRKLIDKLRREIEELERRLDELGKEEVLREVDRLVKKVEKTARELLRLLEESIEKSKREAEKLLRSNEDVVRRVRERVR

SEQ ID NO: 2083 - protein, 176 aa, Artificial Sequence; identical to SEQ ID NO: 2082
  Synthetic

SEQ ID NO: 2084 - protein, 174 aa, Artificial Sequence
  Synthetic
DAEEDAKRLLKEVKDLLDEVRERHRELNERSRKVLEDARKTHEDLNEESRKTLEDRNIPEDILRKIEKHTRDTHRRAERLVRELREHSKKVHDTARRLVEELDKRIKELEERVRRERVGREARELLKRILKDIERILETVVRLSERDVEEVRKIMEELKKLSDDDLKRVEEEAR

SEQ ID NO: 2085 - protein, 174 aa, Artificial Sequence; identical to SEQ ID NO: 2084
  Synthetic

SEQ ID NO: 2086 - protein, 174 aa, Artificial Sequence
  Synthetic
SAREEIEELIKRVKDTSKKILEDVRRMIERVKRKSKKIKEDAKRLIERVEKLLRDSNLREDLLKRLEEEIRRIKEDIDRLIEKDERDIRRIEKEIEDLVRRNEDEIRKIEERIDKIDDKDELRELIKRLEDHSRRVVEEVARLVKELDEHSERVLKTLEDLIRRLDELVKRVTT

SEQ ID NO: 2087 - protein, 174 aa, Artificial Sequence; identical to SEQ ID NO: 2086
  Synthetic

SEQ ID NO: 2088 - protein, 174 aa, Artificial Sequence
  Synthetic
KAEETVKELLDRVERISERARKEVRELLERSKESTKRILDEAREMIKRSRDELRRVGTDDKELKKVEDHSEEVRREVDELIKKSEKHTEDIRREVEELVRRDREELRKVEDKARREGDLEDLERLARELARHSEDVMRRLRDLARKDKELSEDLVRRLRELVKRDLDLVKTVKE

SEQ ID NO: 2089 - protein, 174 aa, Artificial Sequence; identical to SEQ ID NO: 2088
  Synthetic

SEQ ID NO: 2090 - protein, 181 aa, Artificial Sequence
  Synthetic
SMEDRLREVNEKNNRLIEDATRKSERVLDKIRELLKEVKRRSEDVLRRIKELVEKLPVEERVKKEIKEDIDRLRKHSEELVRDVERIIRDLKRHSEEVVERVRRKDEETRREVEELARRGSDEKTLKELVEKIEKVAEDSLREAEEDVKRIEDLVREIKKRADDDVRRLEDRVRRLRERLE

SEQ ID NO: 2091 - protein, 181 aa, Artificial Sequence; identical to SEQ ID NO: 2090
  Synthetic

SEQ ID NO: 2092 - protein, 182 aa, Artificial Sequence
  Synthetic
SSVEEVVEEIERLVDELRKRAEELVRESEKLVAELERRIRKLVEDSEKLVKDLKDRAAKGVSEEELERLLEKLKRVAEKTNRTSEELLRELHDFNRRSEKEIDDLLRELEKRVKEVRDRINSDDKVLRKIEDVDRRLKELVRRVKKKDRDSNERVKELVKRLNDENEKVLKRVEELVRRDKT

SEQ ID NO: 2093 - protein, 182 aa, Artificial Sequence; identical to SEQ ID NO: 2092
  Synthetic

SEQ ID NO: 2094 - protein, 174 aa, Artificial Sequence
  Synthetic
DEIKKVVKDLEDLVKRLKDEVDRHVRENERIVEELKRNVDRHVEENRRLVKTLEDEVRKGVSEDELRKLLEEVERVTRRSKEDIDRMSKRVDDVTRESDEHIKELLKRVRDMAEKLPDSEDLKRVLKAVEDVVREAKERLERVNRTIREVVKRAREKLKRVHDTIRKVVDDARR

SEQ ID NO: 2095 - protein, 174 aa, Artificial Sequence; identical to SEQ ID NO: 2094
  Synthetic

SEQ ID NO: 2096 - protein, 178 aa, Artificial Sequence
  Synthetic
DEVEEVLKELKRSVDETRKLLKKIEDEAKRNVRRNEELAERVKRTVDRLVEELRDLIRRGVDKEKLDRLLRKIEKDLRELKRELEESLKESEKTIRRLKEELEDMLRRSREKIEELRRRGVDNEKLKRAEKEDEEVVRRIRELIERLREENEDVIRRAEELLREVVKRIEEVITEARR

SEQ ID NO: 2097 - protein, 178 aa, Artificial Sequence; identical to SEQ ID NO: 2096
  Synthetic

SEQ ID NO: 2098 - protein, 181 aa, Artificial Sequence
  Synthetic
SVEDEIRRVIEELDRLLRKDKETIKRVIKELRDLLREVKKRTEEMIRRLDELLETVTRRIKDEETMDRIDKEIKRLKEELRELLERSDREIRKLEERLERLVRESEKKIRDLKRRLDKARRDGSDVDDVRRLAKEVLDEVKKSVDETKRLADEVKTRVRKNVKDNTDLAREVLRRVAERAR

SEQ ID NO: 2099 - protein, 181 aa, Artificial Sequence; identical to SEQ ID NO: 2098
  Synthetic

SEQ ID NO: 2100 - protein, 174 aa, Artificial Sequence
  Synthetic
SRLEKLVKEIRDVVRELAERVKESVDRARKVVKEDLEHAEESVRRVKKVVKELEELVRKLDREEELRKTVEEIRRRNERSNRENRKHSKKVLDDDERSNRELERTMREIKDRIDKLDDDKDIKEVEKRLKDVLDEAHKLNKRTNDELKRVNKESNDLNRKTEEDLKRVLERAED

SEQ ID NO: 2101 - protein, 174 aa, Artificial Sequence; identical to SEQ ID NO: 2100
  Synthetic

SEQ ID NO: 2102 - protein, 174 aa, Artificial Sequence
  Synthetic
KRKEDLVEEIRKIVKAVEDEVRRSVKESEDSVRENLKEAERIVRELEEIVKELEKLVRDGLDRRDLRRVAREVKERLRELVERLRESIRDSNRRNKELHDRLRELVRRVAEELKKLDQDELLEDVRKKLEDVLREVEKLNKTVEDKNREVLRRIDELIRRVEEAIEDVRRKVEK

SEQ ID NO: 2103 - protein, 174 aa, Artificial Sequence; identical to SEQ ID NO: 2102
  Synthetic

SEQ ID NO: 2104 - protein, 174 aa, Artificial Sequence
  Synthetic
DEKEELVKRVEDKVKDLRDKVEKSVRESTESVRDNERRVRESVERSRDLVRRLDELVRAGLDEEEVKKVVKRIEEDNKRLHDELRRSVEASNEKNKKLHEDLKRLADEIRKEIDKLDQDEELERVRKELEEVLRRAKRLNEDVLEKNREVVRRAAELNKEVKKLLKEVLDRAKT

SEQ ID NO: 2105 - protein, 174 aa, Artificial Sequence; identical to SEQ ID NO: 2104
  Synthetic

SEQ ID NO: 2106 - protein, 175 aa, Artificial Sequence
  Synthetic
DEKEDIDRRLRDMVRRDRELARRSVEEARKLVDKNRKLVERVFRELKKLVDELDELVRRRDGPEDDIRRAVKKIKDDLRKLLKELDDHSKDTRRRDEESNRELERHTRELEERIRRLEDDKLLKDLEEELRKTREEVHRLNEETNRRLDKVNKDARDLVRELEELIEDVLRKVET

SEQ ID NO: 2107 - protein, 175 aa, Artificial Sequence; identical to SEQ ID NO: 2106
  Synthetic

SEQ ID NO: 2108 - protein, 174 aa, Artificial Sequence
  Synthetic
DEKETVEERLDRLVRHHEKLVRESVKELEELVRHNRELIKKSVEDARRLVEDLKRLIDEGVPEDDVRRTVREIEERNRESHKELEDHNRELRRRNKESHEELKKHIDEIRKELDKLPKDKLLDELRERIDKVNEDARKLNEEVERRITESEKEVTDLNRKVDEDIKRVLEKVER

SEQ ID NO: 2109 - protein, 174 aa, Artificial Sequence; identical to SEQ ID NO: 2108
  Synthetic

SEQ ID NO: 2110 - protein, 178 aa, Artificial Sequence
  Synthetic
SVEKVVKDVTDTIKKVVDDARRLSEEVVERNERVNKKLERLSREVVERIKDVLKRLRDKKSEKEEVERRIEKLVREHEEKTKKISEENKRSIREHERTSKEVEERIRRLVETLKELVRRGVPVEDLKRDADRIVEDIKRVVKELVKHAEKSVEDLERVVKEIVKDAERIVREIEKRVK

SEQ ID NO: 2111 - protein, 178 aa, Artificial Sequence; identical to SEQ ID NO: 2110
  Synthetic

SEQ ID NO: 2112 - protein, 182 aa, Artificial Sequence
  Synthetic
DVEEVVRRAREENKRSHDEVRELVKEVNERNKTVLERIKELAERALREIREVLREVDERKKDAREDLERLRKRVEDLLRRLEELLKTLEKRVRDLNDESRKLLKRLEEVNRELKKEIDDLEENRVETEKLKEDLDRIVRTSEELVRRLLERARRMVRETEELMRELLTEVKRIVEEVARRVK

SEQ ID NO: 2113 - protein, 182 aa, Artificial Sequence; identical to SEQ ID NO: 2112
  Synthetic

SEQ ID NO: 2114 - protein, 178 aa, Artificial Sequence
  Synthetic
DKEELLKRVTEKLEKVSDKSRRLIEEVEREVEKVHREVEERVRKVREDVRDVLRKIRAQGSSEEELEEVRDLARRIEETLKRILDEIKRVTEETREELKRLLEENRRLSEEIKDRLRRLRDDTELVLREVERLVAENERSVEELKKELEKLVRRNRTLVRKIEEDVRRLVEKITKRRE

SEQ ID NO: 2115 - protein, 178 aa, Artificial Sequence; identical to SEQ ID NO: 2114
  Synthetic

SEQ ID NO: 2116 - protein, 175 aa, Artificial Sequence
  Synthetic
SDSERVKKEAEDVLREIKRLIERNKRLAEETSERIRRLLEELKDLADKIVETLKDLIDRGEDKDTVREKIKDDLRDLERLAREVEDRIKKLTDELREHTRESEKEIKKIVEELRRKMKGREVVDEVEKRIRELLERLKDVSKKVEESNKKLLDEIRETVERVKKRIKELLEELRR

SEQ ID NO: 2117 - protein, 175 aa, Artificial Sequence; identical to SEQ ID NO: 2116
  Synthetic

SEQ ID NO: 2118 - protein, 176 aa, Artificial Sequence
  Synthetic
SLEEVVEEVKRRLTKLLKEIEDVIRRAEEESRRLLEEIERVIREAEKESRRLLEEIRTAGVREEELDKLRKHSEDVKRRLRKILEDNRKRSEEVAKELKELLEELKERIRKVEEDARDLDEDLVRKLAKELLDTLREVLKRIEEIAKEVLDLNDESLKEIRRIVEEDLRKLEEKMR

SEQ ID NO: 2119 - protein, 176 aa, Artificial Sequence; identical to SEQ ID NO: 2118
  Synthetic

SEQ ID NO: 2120 - protein, 173 aa, Artificial Sequence
  Synthetic
SEEEEVKRLLDDVREKVKRVAEENRRTVEEVKRVVDEVRRRNKETVERDRRELEKVARDEDKDRVVKEVRKSSADVVREDRESVRRAEEEIRKVMEDDKRSAEEVERIVRRAEEEVKVEEVVREIRRIVEDVRRKVKESVDRVKKILEKVRKDVEDSVREVERTMKKVSDDVT

SEQ ID NO: 2121 - protein, 173 aa, Artificial Sequence; identical to SEQ ID NO: 2120
  Synthetic

SEQ ID NO: 2122 - protein, 183 aa, Artificial Sequence
  Synthetic
SKEETAKRLIEEVRKVIEEVKKRAEDSNDHNRRSIEEVEKTLKRLIDEVRRVVEEVKEKISRTTDKDDIKRVLEEIKRIAEEVVRKIRRLLEEITRNSERIVRENEKLLREIEEIVRRVLEELKRLDLKEAVEEIERLMRKIKKVVEDSVRNVERTMREVEEKVRKVEEDVRRLAEDVTRAVK

SEQ ID NO: 2123 - protein, 183 aa, Artificial Sequence; identical to SEQ ID NO: 2122
  Synthetic

SEQ ID NO: 2124 - protein, 172 aa, Artificial Sequence
  Synthetic
DEVEEVLRRVRKIVKEDRDEAKDVREENRRLVEDDKRKVERVKEENRRLVEELRKRDEERVEEVVRRIEESARRVAKLSEETARDAERSVEKVVKDSERTVREIDKLVRDVVTDGDRRLLEEVERRVEKLVKESREIAKRSNDRTKDLVRRSEEILRESNERTRRLLEETER

SEQ ID NO: 2125 - protein, 172 aa, Artificial Sequence; identical to SEQ ID NO: 2124
  Synthetic

SEQ ID NO: 2126 - protein, 172 aa, Artificial Sequence
  Synthetic
SEAEKVLKDIEKIVKDLERNAKEVLDRNKRNVEDDKRAAEEVLEKLERIVREIDRGDKESVKEVVKEIRRLAEEVARASDETVRRNEKLAREVVEANKDVVRKIRKLVEDVVRDGDRELLKKVIRTVEKLLEDVHKLNEDSERAAKKLTDESREIAREVEERVERLLREEER

SEQ ID NO: 2127 - protein, 172 aa, Artificial Sequence; identical to SEQ ID NO: 2126
  Synthetic

SEQ ID NO: 2128 - protein, 174 aa, Artificial Sequence
  Synthetic
REVEEAEKRLREIVKEVTERNKEVVERLRDIVRKSEDDSRKSVETNKEIVDRVRRDVSDERVVREVKKVADEVVRRNERSAEDSRRVVEELVERSRESMERVREMVKRLVEEARKVTDRDVLRELIRTLEEVLKRSEDTNRELEKRIKEVVEDNRRKLEESIKESEKVVDEIRK

SEQ ID NO: 2129 - protein, 174 aa, Artificial Sequence; identical to SEQ ID NO: 2128
  Synthetic

SEQ ID NO: 2130 - protein, 174 aa, Artificial Sequence
  Synthetic
SEVEEAERRLKEIAEESKEISKRSVETNAKILDEVRRENTRVLETLKKILEEVERRVSDERVVREVEERVKELVRRSEESLRRVEEVIRRVLEENKESMRRSEERVRRLLEEARKVTDKDELERLIEDIREVVERNKKIADESIKRSRDVVKRSKETNDELEKTIREVVKRIED

SEQ ID NO: 2131 - protein, 174 aa, Artificial Sequence; identical to SEQ ID NO: 2130
  Synthetic

SEQ ID NO: 2132 - protein, 174 aa, Artificial Sequence
  Synthetic
DEVEEVLKRLRDILREAKELVERSVKRNEEIAEESRKESEESVRRNEEIVDAVRKRVDDKDKVARVEEVIRRVVEENRKSAKESLDMIRDVVRKNKKVLREAEEVVKRLVEEVRKVTDRRVLERLIRELERVLEELREKLKRSIEESEDVVRKNREILRRSIEKSEDVVRKIET

SEQ ID NO: 2133 - protein, 174 aa, Artificial Sequence; identical to SEQ ID NO: 2132
  Synthetic

SEQ ID NO: 2134 - protein, 182 aa, Artificial Sequence
  Synthetic
DVDEVLDTVRRLVEELLKKVERTSRESVRLAEKLLDEVRESSKRSKDESRRLLEEVREIDDSRKVARVVEESRRLMKEDLETVTEVVKRNEDSAREDEERVKRVAEEIRKIVADVFRRVKDKKREKVDKVRRDVERLVEEVEKTVKRSVEENRRIAEEIKRTVEESVKTNEEVVKRIEETAR

SEQ ID NO: 2135 - protein, 182 aa, Artificial Sequence; identical to SEQ ID NO: 2134
  Synthetic

SEQ ID NO: 2136 - protein, 172 aa, Artificial Sequence
  Synthetic
RERELVEEVERRLRESNERVKESVDRSRKLLETSHRRVKELVDRLKRVLERVEREVRNTTDKDRVRELVEEVKDAVRRVKEEVKKSVDEVREVVDKDVRDVRRSVKEVEEVARRVKVDELVKRVKEVVDHNERLAEESKKEVDDVVRRNEDLVRKVVEEVKDVVRRIKETVR

SEQ ID NO: 2137 - protein, 172 aa, Artificial Sequence; identical to SEQ ID NO: 2136
  Synthetic

SEQ ID NO: 2138 - protein, 172 aa, Artificial Sequence
  Synthetic
RERELVEEVERELKRSTREVEESIEESRKRLEESHRLVAELVKRLEEVLERVRDDVRRTRDKRRADKLVKDVEKAVRDVKREVDKSVKEVEDVVKEDKKRVDDSVTRVDEVLKRVDVDELRKRVEEVVRTNEELARESVRKVKEVVRRNKELVARVADKVREVVKRIRETLK

SEQ ID NO: 2139 - protein, 172 aa, Artificial Sequence; identical to SEQ ID NO: 2138
  Synthetic

SEQ ID NO: 2140 - protein, 179 aa, Artificial Sequence
  Synthetic
SVKEIVKKVVEENKKSDDELREFARRVAERNKRVVEELKKRLEDLVRKNEEVVDRLRKRSREEVVEKVKEDSKASVDTAKKVVDEVEERSRRSVKEVERVARESERKSRESVDRVRKAVRSEIVKEVVDRVRKSEESSRKLLEEIVRLVEKSLEEVKRILDEIRRRVEKSERDVRRLRK

SEQ ID NO: 2141 - protein, 179 aa, Artificial Sequence; identical to SEQ ID NO: 2140
  Synthetic

SEQ ID NO: 2142 - protein, 181 aa, Artificial Sequence
  Synthetic
DIVEELKENVKRVEETIRKIVKEARENVDDVLKKNKDNVEHDKRTAEEVLKEVKKSIKSDELRRKVEEVVERSRKTAKENEELARRVRDENEKVVKEVERLVRTVAEANKRIVEEIRRIEDKDTVRRLLEEASKLNKDVIRRVRELLKRLHERNEESLRRARELNERSRREAERVLEEVRK

SEQ ID NO: 2143 - protein, 181 aa, Artificial Sequence; identical to SEQ ID NO: 2142
  Synthetic

SEQ ID NO: 2144 - protein, 185 aa, Artificial Sequence
  Synthetic
SIVDRIREIMKEVREKVKRVVEENRRNAERIKRRVDEVVKTNRKTVDDVRRKVEDVVRKIKEKGREIERLLRRVEETVEESVERVERIAEKVVREHDKSVKDVERIVKRVTEVAEEVVKRLRRVDREVVEELLRRLRKIVKDVERELKRSTEELNRRSREVLKELEKSTRDVEKVVRELEERLRK

SEQ ID NO: 2145 - protein, 185 aa, Artificial Sequence; identical to SEQ ID NO: 2144
  Synthetic

SEQ ID NO: 2146 - protein, 185 aa, Artificial Sequence
  Synthetic
SVVDKIREIVRKSREDVRRVVEEIKDNARDLKRKAEEVVKEVKRIVDEVRETVRDVVEKIKELGREIEKLMERVRKAVEEVIRDIERIMREVLRLHEEVVERIERIVTEDEKKVRDVVAKVRRVREEEARKLLEDVKKSSDDVRRELKRLLEEVNRVSREAEKKLRELLERVKRIIDTLKDELRK

SEQ ID NO: 2147 - protein, 185 aa, Artificial Sequence; identical to SEQ ID NO: 2146
  Synthetic

SEQ ID NO: 2148 - protein, 185 aa, Artificial Sequence
  Synthetic
SVKDEIRRIVKESEEANRDVVEKIRRNVERIRRKVERVVEEIKRIVKEVKEKVEDVVRKNKEKGERIKKLVTDVEREVERVVEEIRRIAEKVTDVHRRVAEESKRSADEDKKTVDRVVERVDKAEEEVVRKLLEEVKKSSDESKDRSRRLLEEVNRISRDVERKLEELLRKVEKVVRDLEEELRR

SEQ ID NO: 2149 - protein, 185 aa, Artificial Sequence; identical to SEQ ID NO: 2148
  Synthetic

SEQ ID NO: 2150 - protein, 185 aa, Artificial Sequence
  Synthetic
SAEDVVRELKKRVDRSREDNTRVLEELKKAVEESRRLNEESNRRLEKIVRDIKEDLKRITTRKKELEDTVRRLLEKAEKVVRDSIKTSEETVTRVTDVVRRVIERSRETVTDLARVVEEVIRNVTREEVLRELAKIREDIERENKRVLEELEDVLRKVKRVNEEALKNSEDILRDIKEKVDRRRK

SEQ ID NO: 2151 - protein, 185 aa, Artificial Sequence; identical to SEQ ID NO: 2150
  Synthetic

SEQ ID NO: 2152 - protein, 180 aa, Artificial Sequence
  Synthetic
SVEELLRKLEEVLRKIREENERSLKELRDRAREIVKRNRETNRELEEVIKELEKRLSRRDKEKVEELVRRIRRIVERVVEEDRRTVEEIEKIAREVVKRDRDSMDRVRRTVEDVLRKATGSEDIVRKIERIVETIEREVRESVKKVEEIARDIRRKVDESVKNVEKLLRDVDKKARDRKK

SEQ ID NO: 2153 - protein, 180 aa, Artificial Sequence; identical to SEQ ID NO: 2152
  Synthetic

SEQ ID NO: 2154 - protein, 174 aa, Artificial Sequence
  Synthetic
SEEEKVKEEIRKLIEDSRRHVDELKKRLEKLLRDSEKNVEDAHRTNEKLARELKEKVKKTGTDKKLEEDLRRLLKKTEEYVKEHHRTNRELLEKVREEVKDHERRNRKLLEDLKKRGVNEDVLREAEEMLRDSNRELREILEKIERDLRKSDEELKKSVDDLRRLIKEVEDRLK

SEQ ID NO: 2155 - protein, 174 aa, Artificial Sequence; identical to SEQ ID NO: 2154
  Synthetic

SEQ ID NO: 2156 - protein, 174 aa, Artificial Sequence
  Synthetic
SREEELKKELKKRIEDSDRHVKEEKDELDRLIRESEEHVKRLKEEARKKLERLKDLVRKDGPTDELRKRLKDLLDEVKKMVEEHERDNRRKLKELEKRARDHHKRNRELLDEVRKAGVDEKVLREAEELLKEVDRKLERILEEIKRRLEKSDRDLRRVLKELEELIDEVRRRLE

SEQ ID NO: 2157 - protein, 174 aa, Artificial Sequence; identical to SEQ ID NO: 2156
  Synthetic

SEQ ID NO: 2158 - protein, 175 aa, Artificial Sequence
  Synthetic
SEKEDIKERIKELLKRSEENVRKLREENRELVRRSEENVKEIHKENEDLIRKLEKLRTRDVDKKKEAEDELRRLLRRTEKLLEDHKKLLEDILRRSRELLKEHEELLREIERELRERIKDEDVLREAKEALEESLRRLRKIHEDSERRLRESLEELRRSVEEAKRLLERLKRELD

SEQ ID NO: 2159 - protein, 175 aa, Artificial Sequence; identical to SEQ ID NO: 2158
  Synthetic

SEQ ID NO: 2160 - protein, 182 aa, Artificial Sequence
  Synthetic
DELDRVIEEAEELIRRIEEKLRRINETAKRLLDENLRHSERVHEEINRALERVRKKVEDAGLPKEVVETIKRLLEEVKKESEDLLRENKKLLDDVTKESKDLHDTVKELLKRVADELERLRRSGSDVKDVKDRLRRIIEELERRVRELKKRHEDILRELNRRSKELKDRHKKILEDLDRRVR

SEQ ID NO: 2161 - protein, 182 aa, Artificial Sequence; identical to SEQ ID NO: 2160
  Synthetic

SEQ ID NO: 2162 - protein, 182 aa, Artificial Sequence
  Synthetic
EEVERVIDEARRLLRENERHSEEVIEEITKLIRDVEEKVKRINDRAREALEDIREEVKRKGLPEEELKRIEELLDTVRRESEKMHETIKEKLKRVEDEVRKALKENRDLLKKLEDELRELRKTGKDVDELRKELERLIRDLNRLSKRIKEELKRRIEELEEEVKRLKEEHERIIEELRRRVK

SEQ ID NO: 2163 - protein, 182 aa, Artificial Sequence; identical to SEQ ID NO: 2162
  Synthetic

SEQ ID NO: 2164 - protein, 177 aa, Artificial Sequence
  Synthetic
EEVERAKKELEDRIREWEEDSKRLKDELKRIIKEWEDESRRVKEELRKIIDDLRKAVEKGISEETLRKIEREIEEILRKIEKKDRDILKRVEEIIEEIERRDRKILRELEKVLDELKKAGIDERILEEARRLVRRVHESSKRVLDDARRKLKELHERSKRVLDDVRRKLKKVADDTR

SEQ ID NO: 2165 - protein, 177 aa, Artificial Sequence; identical to SEQ ID NO: 2164
  Synthetic

SEQ ID NO: 2166 - protein, 177 aa, Artificial Sequence
  Synthetic
SEVERIKEELKRIIEDWDRRSRRLKEELKKEIKDWEEDSRRLKRELEEELKKLKEKVERGISEDELRELLRTVEKKIEEIERRDRRIKEEVEKKIEEAERRDEKIKREVEERLKELERRGVDKKIIDEARRLLEELHRKSREVAKEIRKEVKRLHDTSKKVLEDIRRAVKKVADDVK

SEQ ID NO: 2167 - protein, 177 aa, Artificial Sequence; identical to SEQ ID NO: 2166
  Synthetic

SEQ ID NO: 2168 - protein, 177 aa, Artificial Sequence
  Synthetic
SEVEKIKRDLEEIIRRWEEDIKRVKKRLDEEIRRWEEESKKVKKKLEDLIRRLEKEVADGRSEEDLKRLLKKLREELEKIERDDRRIAERVKRRLDEIRRRDEDIKKKLEDRLRELRERGVDEKILEDARREAERLHKTSKDVLKKVEDLLRRVNEHSRRVLEEAERRIRDVAEKTR

SEQ ID NO: 2169 - protein, 177 aa, Artificial Sequence; identical to SEQ ID NO: 2168
  Synthetic

SEQ ID NO: 2170 - protein, 177 aa, Artificial Sequence
  Synthetic
SEVEDIKRRLEKIIEDWRRKSKELEKRLEDIIDEWDKRSRKLKEDLKRIIEEARKAVDDGIDREEVKELKKRLEDEIEKIRETDREIEKRVDEAIREAEERDKEIAERVKDTLEKLRKAGVDEKVIKEAEDLLRELNESSRRVAKKAKDDLRELNERSRRALKEIRELLREVRERVE

SEQ ID NO: 2171 - protein, 177 aa, Artificial Sequence; identical to SEQ ID NO: 2170
  Synthetic

SEQ ID NO: 2172 - protein, 177 aa, Artificial Sequence
  Synthetic
REVEKIITDLEEVIRRVEEYLKRSDEELEKELRRVKRYLDKSDKDLRDEIRRVKEELDKRGGSEDVTRRLKELLRESEEHSERLKRRLDKLLKDSRDHSEELRERLRRLLEEARRRLKEVDKDELRARVEDVVRRAEDELRRHSELNKRLVDEARKLLEDHSRRNEELMRELRKLVE

SEQ ID NO: 2173 - protein, 177 aa, Artificial Sequence; identical to SEQ ID NO: 2172
  Synthetic

SEQ ID NO: 2174 - protein, 177 aa, Artificial Sequence
  Synthetic
SELEDILRKLEKRMTDVERYLDESNKDLERAVRRVVETLKRIDDEIRRLLEEVERDLDRKGGNEDLKRKLRELLKRLEEHSERLKRRADELLERSREHSERLKEKLRRLLEEVRRRLDEVDKDELETRLREITKTAEDELRKHSRTNEDIVRELKELVDEHEKELRKVVREAEDESR

SEQ ID NO: 2175 - protein, 177 aa, Artificial Sequence; identical to SEQ ID NO: 2174
  Synthetic

SEQ ID NO: 2176 - protein, 177 aa, Artificial Sequence
  Synthetic
SELEEILKDLERMIREVEDYLRKSNERLEDVLRKVKKKLDEINDELRRVVEEVKKKLEDKGGKRELTEKIDRLLDDARRHSEELKKELDDLLRESRKHSEDLKRELRRLLDEVRRLLSQVDAEELKRRLEEIVKRARDLLKEHSDDNERLVERAERLVEEHRDKVRKIVEELEEEVR

SEQ ID NO: 2177 - protein, 177 aa, Artificial Sequence; identical to SEQ ID NO: 2176
  Synthetic

SEQ ID NO: 2178 - protein, 178 aa, Artificial Sequence
  Synthetic
SEIERILEEVERAVRESDERLKDIVRKDREVVKRVKELLDKILRKDEEAIKRVIEDLERRGSDETLIRKLKKHLDENRRKVEELKRRLDEHLRRNDETVKDLIRKNNKELEEVRRRLKDITDKDELKKEVDKWVKRARDIVKELEEHSRRSTDELRRTVEDLERHSEESVRRAEKTSE

SEQ ID NO: 2179 - protein, 178 aa, Artificial Sequence; identical to SEQ ID NO: 2178
  Synthetic

SEQ ID NO: 2180 - protein, 183 aa, Artificial Sequence
  Synthetic
SELEKILKKIEDALKKVEEDLDRILEEDRKTLEEVKERLERDNEDLKRVVERVEEELKRRGRRRSELDKIRKELRDRLRDASKTHEDIKDELEKIHREVEDTIRRLKEELRDLVRRLEEMVRRDIDKTDELRKDVDRLVKRLKKLVDDLRRKSKETADRLRELVKRSRELSRTLAEELRKKTE

SEQ ID NO: 2181 - protein, 183 aa, Artificial Sequence; identical to SEQ ID NO: 2180
  Synthetic

SEQ ID NO: 2182 - protein, 178 aa, Artificial Sequence
  Synthetic
SEDEEAKKRVEDLVRELKKSNDELRRKSEESLRRLKELNDELRKRVRDLEDRLRKLVEDNVDKKDLKKTLDDIRKRLEELERRLKEEHKDLEDRTRELKKRHEDLLKRIKEELKRLADEGKISERIIEELDKELKKSSEETDEIVKRDEDVLRRSDEESRRIIKKLEDVLRRADERVK

SEQ ID NO: 2183 - protein, 178 aa, Artificial Sequence; identical to SEQ ID NO: 2182
  Synthetic

SEQ ID NO: 2184 - protein, 177 aa, Artificial Sequence
  Synthetic
SKDEEAKKRVEELTRKLEETVREDKKRIEDLAEKLKKVVDKLRRDSERTRKKLEEVERKGVDDEVVRRLKEEVERINKESREELKKLTKEVEDIIRDSERKLRRLEEEVRKLIEDLRRRGVDERILRELEKVLREVKKKHKETLRTLEELLREVAKRAEDINEEDRKVLEDVVRKLT

SEQ ID NO: 2185 - protein, 177 aa, Artificial Sequence; identical to SEQ ID NO: 2184
  Synthetic

SEQ ID NO: 2186 - protein, 179 aa, Artificial Sequence
  Synthetic
SEVEEILEDIRRRMTRVEERLRKSNKELEDAIREVTKRLKKSLDDLKKIIEEVKDVADKKGIDDKVKEKLKRDLDKHRRESEELVKKLDKKLKDHKRDSKRVIDELKRKVEDLERIVRKGELDAEELRKMVEDLTKELEDLVEEDKERVKRWRDELEEIVKRDRDKVERWREEAEKIKK

SEQ ID NO: 2187 - protein, 179 aa, Artificial Sequence; identical to SEQ ID NO: 2186
  Synthetic

SEQ ID NO: 2188 - protein, 179 aa, Artificial Sequence
  Synthetic
SELEEILRDVERLVRKVKTDLDDSLRRLKEVIDDVERLLRESNEKLRRVIKDVEDLADKKGIDDKEKKKLREELKEHDDRSRELVKELRKELKEHADDTERLKKEIEELLERLERIVRRGDLSEEALKKLVEDLRKRLREVVEEDKEKVRRWTEKAKRIVEDDKRRVEEWERKLEETVR

SEQ ID NO: 2189 - protein, 179 aa, Artificial Sequence; identical to SEQ ID NO: 2188
  Synthetic

SEQ ID NO: 2190 - protein, 179 aa, Artificial Sequence
  Synthetic
DEVERVLDDVRRKLEKVRRDLRRIDEDLRRVVETVKRLLDESNKDLERAVRKVKDELDKKVRDKKELEKVKKELDEMLEEHKKRAEDLKRRLEELLRRHHEELKKMERKLREELKRLEDAQLPEEELRRVVKELKEDLERLVRELEETVREVKEELEKVVRDDEKLVEEWKKRLEERSR

SEQ ID NO: 2191 - protein, 179 aa, Artificial Sequence; identical to SEQ ID NO: 2190
  Synthetic

SEQ ID NO: 2192 - protein, 179 aa, Artificial Sequence
  Synthetic
EEVERVLDDIRRVVEEVKRRLDEIDKKLTEENERVKEELDRIDDRLRKLVEEVKRRLDEKVGDKEELERVKRELDERLKKHHEEIERLKRELDEINKEHHRRIEELKKDLERLLKELEDAQLPREELEKVVEDIKRKLEKAVRDLEKTVKENKDRNDDIVRRVKKTVDDAEERLRRAVK

SEQ ID NO: 2193 - protein, 179 aa, Artificial Sequence; identical to SEQ ID NO: 2192
  Synthetic

SEQ ID NO: 2194 - protein, 175 aa, Artificial Sequence
  Synthetic
KEVEDILRELRRAVEEHRRRSEELLRRMRKLVKDLEDRIREILERARRSVKEIKDRIEKDGPDKRMEDLLRKDNEDLKRLAEEIRKVLEKLRRDIERVKRKNETDLRKWEEDLRRLNIDEEVLKEVKKLLDEVRKRSKDIVDEVRKLLEEVLKEAERVLREWKKLNDEVEDRLRQ

SEQ ID NO: 2195 - protein, 175 aa, Artificial Sequence; identical to SEQ ID NO: 2194
  Synthetic

SEQ ID NO: 2196 - protein, 180 aa, Artificial Sequence
  Synthetic
SEVEEVLKEVRKLIEDWRANSERILRRIERAIRELRRKIREWLERSKKKIKRLEEVIDKEVDKKEELREKIKRVREDNERRLKRLEEEIEEVRKELEDALRDDTRKLKELEKRLEDVRRDGVIDEDVLREARKRVDELEKRSREVAKRARDLLKEVRDKIKEVADRSRDLLRKVEEAIEK

SEQ ID NO: 2197 - protein, 180 aa, Artificial Sequence; identical to SEQ ID NO: 2196
  Synthetic

SEQ ID NO: 2198 - protein, 184 aa, Artificial Sequence
  Synthetic
SAEEVDRRVEELLKELERRSEEVLETWKELNKKLNKDAKDVTDEVRELLKELAELIKRDGLPEEDVRRLLERVKRTIEELKKELEKLSEDDKRRLERVREENKRIAERLRETIERIREDIKRGRSEEVVRRLLEDLRRLIDEWRKRSKEVEEEVRKSIEDIKRRIEEILRRIRKLIEEIRRRIK

SEQ ID NO: 2199 - protein, 184 aa, Artificial Sequence; identical to SEQ ID NO: 2198
  Synthetic

SEQ ID NO: 2200 - protein, 174 aa, Artificial Sequence
  Synthetic
DEDERVKDLLRRVKKTVDELLEELKREVKKSREEAKRLLKELEDRLRRSRKEAEKLRSSTDEDRLREESDRDRRELEDVREKLKRVLREDNERLKEVEKKLRDILRRMEDTLRRANIPREVLEEAKKILDDARRAIEEIIREWEEVNKEVDDRIDRIVEEWRKVNDKVNKDLTT

SEQ ID NO: 2201 - protein, 174 aa, Artificial Sequence; identical to SEQ ID NO: 2200
  Synthetic

SEQ ID NO: 2202 - protein, 174 aa, Artificial Sequence
  Synthetic
SEEEKIVEDLRREVKRLAERVKELIETSKKLVEDSKRHVKDLARRLRDIIRKLKKDLRDKGPTEDLKRKVDKVLEEAAREIKKHLDKNKELLERDERVVRDVERRLRELLKKVEDRGVERRALEELEKVVREIRRELERVHEETRRVIEESNRELEEILREAKELLEEVKKEAE

SEQ ID NO: 2203 - protein, 174 aa, Artificial Sequence; identical to SEQ ID NO: 2202
  Synthetic

SEQ ID NO: 2204 - protein, 187 aa, Artificial Sequence
  Synthetic
RELEKALEEAKRLLDKVRKELKKIHEESRRLLKETRDETRRVLEEAERLLREIKKLIDRLREDRDETEVKRLEDALKRLKEKVEEDVRRNEEHNKKLEEDDEKLLRDLERTIDTLERRIKEKAKRDIREEDVRRLVEELRDLIRELERKVKEVVETSRRLAEKDKEDNKRILEELRRLIRELEEDVR

SEQ ID NO: 2205 - protein, 187 aa, Artificial Sequence; identical to SEQ ID NO: 2204
  Synthetic

SEQ ID NO: 2206 - protein, 182 aa, Artificial Sequence
  Synthetic
EEIERVEKLVEEVVRRAEDELRRSAEHVDRVVERAERLVERSREHSKDLMRRLEEVLRRGEPRREVLTEVKEELDRHREENKRLVEELRKIVEDHERDNRRLVKKMREDIKRVEDRVRRELKDEDKAREIIERLRDVLRKIEEALERISRKLKEVLRRVEKKLEEDSRTLTRVVEEAKKKLD

SEQ ID NO: 2207 - protein, 182 aa, Artificial Sequence; identical to SEQ ID NO: 2206
  Synthetic

SEQ ID NO: 2208 - protein, 182 aa, Artificial Sequence
  Synthetic
KEIEELDEEVRRLVEELKRLSDESRKHSKRLVEELKKLLEDSKRHSEELARRARKVLREGRERDKVLKELEELVKRHEEDNKRIVDELRKLIEDHRRKVEELTERVRRLLETLTRKVKDKLKRREDAERIIKKLEDVMKRAEETNRRDIKKLEDVLKDVEDKLREDSKRLREVLEEVKKRLE

SEQ ID NO: 2209 - protein, 182 aa, Artificial Sequence; identical to SEQ ID NO: 2208
  Synthetic

SEQ ID NO: 2210 - protein, 182 aa, Artificial Sequence
  Synthetic
SEVEEILRDIERASEESKKTLDRILKKIEDASRRSKELSDKSLKEIRDAMEEIKKELDKGPDDEKVKRIKERLEELLRRLEEHNRRLKEEDDRLLKELRDKVRELKERDKKLLKDLERMVRRDVRKSEELDRRVKELVRKSEEELKDLDREVKELVRRSEELLEDDKRLVKEVVDEARERRR

SEQ ID NO: 2211 - protein, 182 aa, Artificial Sequence; identical to SEQ ID NO: 2210
  Synthetic

SEQ ID NO: 2212 - protein, 178 aa, Artificial Sequence
  Synthetic
DELEDVKRRVDEIVRELERLNEKLRRDVEEIVKRLKELNKRLLEEVRRTAEELKTKNVDRDRAKEELDEVRRKLKEVFDRAKRVHDEVRKRLEELKRRSKEVLDRVREDLKRLEREIPETEELREILKELKRVLDESRKLSKEIEEELERVLRDSERATEEILRELEKIIEEVERKVR

SEQ ID NO: 2213 - protein, 178 aa, Artificial Sequence; identical to SEQ ID NO: 2212
  Synthetic

SEQ ID NO: 2214 - protein, 178 aa, Artificial Sequence
  Synthetic
DELEEVRKRVERIMEELKRHLEKIAKDSKKSVDELKKHLEDADRKSEESVRKLERDNVDRDEARKLLEDNEREVRKVERNVEERNKRNEDEMKKVEDDVRRLNDEVRRDLERLAREIPRTRELEDILRRLEEVSERHRRSIEEILRRNEEASRRHRESIRRILEKNRRVLERVERKVE

SEQ ID NO: 2215 - protein, 178 aa, Artificial Sequence; identical to SEQ ID NO: 2214
  Synthetic

SEQ ID NO: 2216 - protein, 177 aa, Artificial Sequence
  Synthetic
EEDERAKERVKRVVEENDKVNEDVEREVRKVVKENEDVLEEIKRTVDKIVEDLERLVREGVSEEIVKKVKKDVKDVLKELEKKLRALSRKNKELLDRMEEVTRDLSRRNKELLDELKARNVDERILKELEDANEKSKKRSREILERLREANERIEETARRILKKLEEVLEEVERRTT

SEQ ID NO: 2217 - protein, 177 aa, Artificial Sequence; identical to SEQ ID NO: 2216
  Synthetic

SEQ ID NO: 2218 - protein, 174 aa, Artificial Sequence
  Synthetic
KEREDVKREVEKSVEDLRRHVRDVEEKVRKIKKELEDHVRELKKRVEEIRRRLKDLADRNVDREVVRKELEKLERELREEEKDVKRKNDDIRRRLKEIEDDVDRKNKESEERLRRSDIDESVLEELKRANERHKREIERIRKELEDVSKEHEDRIRRVLEELERVLEEVKRRVD

SEQ ID NO: 2219 - protein, 174 aa, Artificial Sequence; identical to SEQ ID NO: 2218
  Synthetic

SEQ ID NO: 2220 - protein, 175 aa, Artificial Sequence
  Synthetic
SEEERAKEEVEKHKRRLEKLVRDAERSSTEHERKLREIVERVKRELDKHEEKLRDIERKGDLTEELKRELDESTKRFKEKIERLKREIRRSSDEHRKRIKEIEDELKESTKRIKERLKRLEEVIREVEKISREVTKLLRDNLKRVEEVTERVERTLDELLERVKEVTKEVKERLR

SEQ ID NO: 2221 - protein, 175 aa, Artificial Sequence; identical to SEQ ID NO: 2220
  Synthetic

SEQ ID NO: 2222 - protein, 175 aa, Artificial Sequence
  Synthetic
SERERAEELVRRHEDRLEKLVRELEESSDRHKKRLKRLVEEVRRLIEEHRRRLDEIKKEGEQTEELTKELEDSDRAVEETIRRIEEELKRSSDRHRRKVTEIKRELDKSTRDIEEELKTLEEVLRKVRTVSTEVKKRLDRNLEEVKKLTEDVTRKLRRLLEEVNKITRDVKREIK

SEQ ID NO: 2223 - protein, 175 aa, Artificial Sequence; identical to SEQ ID NO: 2222
  Synthetic

SEQ ID NO: 2224 - protein, 175 aa, Artificial Sequence
  Synthetic
SELDEVRERLKRIVDDLRRRSEEVNKRLEEILREITERLREVNERLADIIRKIREDRKDAEESLRRLTKILEDAHRRSREVIEDLKRTLEELERRSRELIRRLEEILEKIRKDLEEGRREEVLKKLVEELRKRVEDMARTHDRLVEELKRKADEIVRRHEELVKDLKRKLEEVKT

SEQ ID NO: 2225 - protein, 175 aa, Artificial Sequence; identical to SEQ ID NO: 2224
  Synthetic

SEQ ID NO: 2226 - protein, 173 aa, Artificial Sequence
  Synthetic
SEEEKAKELVKELRKEAKKIVDEMRKLVEDHAKLVEELVRDHKRLVDEHRRLIEELKDREEKERILEELRRSDEKLKEDSERAKRELDRSTKELRETAERAKRRLTKLLDEIRREGVSEDVLRELEEIVRDIRKKIDDVIRKLEDISRKARKDSDDVNKRLNELTDDVRRKLT

SEQ ID NO: 2227 - protein, 173 aa, Artificial Sequence; identical to SEQ ID NO: 2226
  Synthetic

SEQ ID NO: 2228 - protein, 173 aa, Artificial Sequence
  Synthetic
EEEERARDLVRRLEEIVRRLVKEHEDLVRRHKELVDKLVREHEKLLEDHRKLVEELKDRERKEEILEELRRSTEEIERRSEEAKKRLRESDERLKEMSKRAKEEIKRLLEEIKRRGVSEEILERARKIVERLKTESDRVNKRLNEITRELEKRSDEVNTEVRRITKKVTEELK

SEQ ID NO: 2229 - protein, 173 aa, Artificial Sequence; identical to SEQ ID NO: 2228
  Synthetic

SEQ ID NO: 2230 - protein, 173 aa, Artificial Sequence
  Synthetic
SEEERADKLVKELKKMAEDIKREMDKLVEELKRTIDELRKKHKELVDRHRRLVEELARREDSERIERELKESDDRIKEESDRAKRKLEKLLKDLTDRAREAKKRLRRLLEEIERDGVSEEVLKTLKEIVRKIEEEIDRVEKRLRELVKELKDDSDEVNKEVNKITRKVKEELR

SEQ ID NO: 2231 - protein, 173 aa, Artificial Sequence; identical to SEQ ID NO: 2230
  Synthetic

SEQ ID NO: 2232 - protein, 175 aa, Artificial Sequence
  Synthetic
RTEEEAERTVEDVARKVKEWREELEEVVKEVRERVKRWKEEMRKLDEDTKKKLDDASDIDEELLKRLITEIKKINEDSKKKDKELEKEIRRLLEELKRKDEKLAEEIKRIIEDLRRRGVPEEVIERIERILKDLHRDSERVLRELKRILDELHRESKESNERNKKLVEDAERRTK

SEQ ID NO: 2233 - protein, 175 aa, Artificial Sequence; identical to SEQ ID NO: 2232
  Synthetic

SEQ ID NO: 2234 - protein, 175 aa, Artificial Sequence
  Synthetic
DTEKDAKRTVDDVRRKIREWEERLKKIVEEVKELVRELVERAKRLDEETEREAREAKDIDDDTLRKLKEKVERENRKSRKELEEIERRIEKLLEDMTEEDKKLEKEIRDILRDLRRRGVPEEVIKELEDLLRRLHEESKRVLDTLRRILEELRDRVRRSNKRNEEIVKELEDRSR

SEQ ID NO: 2235 - protein, 175 aa, Artificial Sequence; identical to SEQ ID NO: 2234
  Synthetic

SEQ ID NO: 2236 - protein, 175 aa, Artificial Sequence
  Synthetic
SEEDKAREVLKRVRDEVEKWRKELERLDEESKKKVDDLVRELEELDKKTDEELRRMQDATSEVLKDLERKIKERNEESKRKLKRIAEDAERTNRESKKKDEKLAEDIERILERLKEEGVPEEILKKIRRILEKLHEDSRRSNETNRRILEELEKRVRESNKRNEDILREVKRKAK

SEQ ID NO: 2237 - protein, 175 aa, Artificial Sequence; identical to SEQ ID NO: 2236
  Synthetic

SEQ ID NO: 2238 - protein, 175 aa, Artificial Sequence
  Synthetic
KTEEKVERDVERVKRDVDELIRRAEEVVKRVEDEVRKWIKELKELDDETERLVREASTVSSEDVKRLEEEAREINRESKKKDDELAKEVRRLLEDLRRLLRELAEKIRKIIEDLRREGVPEEVIKRIKKILDDVRRAVKEVLDRIRRILEKVHEDSRRSNKRNKEILDKVREDTR

SEQ ID NO: 2239 - protein, 175 aa, Artificial Sequence; identical to SEQ ID NO: 2238
  Synthetic

SEQ ID NO: 2240 - protein, 175 aa, Artificial Sequence
  Synthetic
SDEERVKEELKRILDEARRLLEESDEKLKRILDELRERLKESDERLKRILDKVRKDGLPEEVLRRLEKLVREHHKRNRELLKRVEDYVKEHHDRNRRLLEDVEKKVRELEELIDRGDLSSEELEKEVRELKKRLKKLIDESDKNVKEAEKELRELLRRSEEHVKELKKDADRESK

SEQ ID NO: 2241 - protein, 175 aa, Artificial Sequence; identical to SEQ ID NO: 2240
  Synthetic

SEQ ID NO: 2242 - protein, 175 aa, Artificial Sequence
  Synthetic
DDERRVKEKLKRILDESRDMLRRSDERVERSVRTLEDALRRSDEKLERILKKAEDDGVPREELERVRRYVKRHHEENRRLLKETREYAERHHRENRRLLKEDEEKIRRWEEILDRGELDSKELDDAVKKNKKESKETVDRSEKNVKELHDRNEELLRRSEKNVDDAKRRLDDTSR

SEQ ID NO: 2243 - protein, 175 aa, Artificial Sequence; identical to SEQ ID NO: 2242
  Synthetic

SEQ ID NO: 2244 - protein, 175 aa, Artificial Sequence
  Synthetic
DDEERVKKALDEILDRSRRRLEESDEKLDRSLKTLKKLLEESDRDLERILEKAERDGVPREVLEELKKLVEKHKKDNRELLRATEERVKRHKDTNRRLLEEDRRKIETWKEIIDRGELSREELEEAVRRNDEESKKTVDDSRRHVDELHRRNEKLIEESKDHVRRLEEELRKKSK

SEQ ID NO: 2245 - protein, 175 aa, Artificial Sequence; identical to SEQ ID NO: 2244
  Synthetic

SEQ ID NO: 2246 - protein, 175 aa, Artificial Sequence
  Synthetic
DEKEELSERVERVIRTAEKLLDEIKRKLEEIHKKANEDLERSLRKLEKVVKEVRDAGVSEDVERRLKRLVDEHRKKLEDIVRRSREELRELEKTLRDIKDEVKKELDRLEEVLRRGELREDELREDVERVKRRLEELIERLRKKVDEVKERHERMLKRSEEHVKELKDEVTEEAK

SEQ ID NO: 2247 - protein, 175 aa, Artificial Sequence; identical to SEQ ID NO: 2246
  Synthetic

SEQ ID NO: 2248 - protein, 174 aa, Artificial Sequence
  Synthetic
SEKEELEKEVEDLERRHREELEKLNRKSKKIDEDLKRIIEELNKVSKKIKEDLEREIRKGQRKDDLRRRLEEMLRRNKKDLDEVRKELEELLRENKRLLDKVEEDSKRRHEELERRNIDDEVRKRVEDINREVKEMLERNLRHTEEVIKKADREIEKNERHTREVIREAEERLR

SEQ ID NO: 2249 - protein, 174 aa, Artificial Sequence; identical to SEQ ID NO: 2248
  Synthetic

SEQ ID NO: 2250 - protein, 175 aa, Artificial Sequence
  Synthetic
SEVEEVDKKLETSHRDIEKRIREVLRELEESSRKLKRDVDEVLKKLEESHRRIAESLKTADEKLRRLEETTRTLIERLKRLVERVKELSDELARRLEEVEKELRERSRRLKEELKRVTDSKRLEELVKEHKRTLEEVKRRLEELVKKHRKDLEDLVREAEELVERHKRKLDETEK

SEQ ID NO: 2251 - protein, 175 aa, Artificial Sequence; identical to SEQ ID NO: 2250
  Synthetic

SEQ ID NO: 2252 - protein, 175 aa, Artificial Sequence
  Synthetic
SEVEEVDKEVERILDEARKALKRVEERVRKSHEDIRREIKRVEEDLERSSREIREKLKDQDRKLEELEKESKTLKDDLDRIRKEVEKLTRDVEKRLRELMERIKDEIRRVKEKLKRVTDAEKLKKLVEELEKEIRRLVDELDKLVRKHEEELDRLRKRMDELVKEHKKRLDDTAK

SEQ ID NO: 2253 - protein, 175 aa, Artificial Sequence; identical to SEQ ID NO: 2252
  Synthetic

SEQ ID NO: 2254 - protein, 184 aa, Artificial Sequence
  Synthetic
DDEERAKKRVKEAEKEIKDLAKESRDIVEKHRKEVEDVVREMERIVRELAEEAKDVVRKVKDDRDDDKIRELLERLKRKVEEILREIRKLLDDLRRKSEEVVRTNKELTDRLRKKIKDILDELEKEDVRTEVKDRLRDVLKKAEEMSKEVEDRLRKSSEDLREEVERVEEELKRVLRKIEEDIR

SEQ ID NO: 2255 - protein, 184 aa, Artificial Sequence; identical to SEQ ID NO: 2254
  Synthetic

SEQ ID NO: 2256 - protein, 184 aa, Artificial Sequence
  Synthetic
DDRERAKKTVDKVKEDLTRLVRRSEDLVRRHTEKLERVVEELERIVKELEERLKKVVDDVKDRRDREEIERLLRTLDREVKEIKKRIRELLKKLHDDSRRVVKENKELTDRAADEARRIEKRLEDEDVREDVKRTLREILRELEEASREVEERLKESDDRIRERVREVDEKLDRVLEELRKKMT

SEQ ID NO: 2257 - protein, 184 aa, Artificial Sequence; identical to SEQ ID NO: 2256
  Synthetic

SEQ ID NO: 2258 - protein, 174 aa, Artificial Sequence
  Synthetic
DELEKVRKELKEILDKLKDVLEESRERTDRLLRKAEEDLRRSDEETERLVKELKDAGVSEEALRRLEELVKRHKEELKKLLEELRRLIEEARDVHRRLLERIDRLIKELEEMLRRGTDKDELKKLVEDLDREVRKIVEELKELNKRIEDELRRIVDEARRSNEKVKELIDRLRK

SEQ ID NO: 2259 - protein, 174 aa, Artificial Sequence; identical to SEQ ID NO: 2258
  Synthetic

SEQ ID NO: 2260 - protein, 174 aa, Artificial Sequence
  Synthetic
DEVETVEREADRILKEDEDVLRRSKKITEDILDTLREMLERSERRTEEILKRLEEDGVSEEVKREIRERIKELKDRHRRIEEDVKRLADEHRERLKELLKDTKRIIEDIRRKLREGTDKDELKKLVDELKERSKETERELKESNDRLRKKVEDIRRELKRLNDEAEEAVRRLRT

SEQ ID NO: 2261 - protein, 174 aa, Artificial Sequence; identical to SEQ ID NO: 2260
  Synthetic

SEQ ID NO: 2262 - protein, 181 aa, Artificial Sequence
  Synthetic
SLIERIEEEIRRVIERVRRLVREIEDSDRKAKEDLERVVREDEETLRRVEKKLKDLNVPEEVLKRLREELEKVLRDSKELLKRMTEESERHNKEVRDEVRRLEKKLEKLVEDVKRTASRPTSEEEVKKLLEKVKRTARELEKVAEDMLRSNRELVKELLRTLEKSLRDSERTAEKLERAEK

SEQ ID NO: 2263 - protein, 181 aa, Artificial Sequence; identical to SEQ ID NO: 2262
  Synthetic

SEQ ID NO: 2264 - protein, 175 aa, Artificial Sequence
  Synthetic
DKEKEISDRLKDVLRKVRDVIEKDKRTNEEARKRVEDLVRKDEETLKRVLEEVRKGGLDEDKLRKLETEVRRILEESEKLLRDIRDRLRRSLEEIERLLEELERELRKIDEEVKRKEIPLEDLLRKVEKLAREITERLKESNERSRDLVEKLKREVKKSLRKSERLMEKARETLR

SEQ ID NO: 2265 - protein, 175 aa, Artificial Sequence; identical to SEQ ID NO: 2264
  Synthetic

SEQ ID NO: 2266 - protein, 174 aa, Artificial Sequence
  Synthetic
SEREEVKRTLTKAEEEARRLIKRDRDTNTEILKEATERSERDKDKLRKILEEVKKAGLPKELLDEVRERVRRHEEENKKVLEEVKKLIEDSKRETEELERRVKTKVDKLRDEIDKEPPDKDILDRVRRLVEELRRMIEELNDKSRKLVERLRKLLEDLNRHLEELVKRLRDKAK

SEQ ID NO: 2267 - protein, 174 aa, Artificial Sequence; identical to SEQ ID NO: 2266
  Synthetic

SEQ ID NO: 2268 - protein, 174 aa, Artificial Sequence
  Synthetic
SAKEELEDRIRDIVRRVRELITEVKKKNREILKRVEKVIKEVKETNERIEEEVRRGGLPEKLLRDITRKLRDHNRKVEEVMKRLRDLSRKHEKEVEDVLRELEKKAKELRDRLRKIEDIDKARKEVEDLVRDAKRVIEELERSLDELVRTLDELVRRLKKSSEDLMRELRKTTE

SEQ ID NO: 2269 - protein, 174 aa, Artificial Sequence; identical to SEQ ID NO: 2268
  Synthetic

SEQ ID NO: 2270 - protein, 174 aa, Artificial Sequence
  Synthetic
DEKKEVEKRLKEIEDEVRKMIKEVKETNRRILKKARDLIKKVEDTNKRILEEVRRGGRPEELLRRIEEELRKHNRDVDKVRKDVEDEVRKHDREVEEVLDRARRKVEEVARRVKRIEDIKKLEDEVRKLKDELRRELERLKRSSTDLARRLEEIIRRLERSSEDLERRLRERER

SEQ ID NO: 2271 - protein, 174 aa, Artificial Sequence; identical to SEQ ID NO: 2270
  Synthetic

SEQ ID NO: 2272 - protein, 174 aa, Artificial Sequence
  Synthetic
DEKEEVRKRLTDILRELEDLSRENERSNRRILDRVRELIERVKKTNKDILEEVERGGLPKDLLREIRERLRKHDKRVEEVLEEAERKVRDHDRENRRVTKEARELLEEARRRVERIEDIDKLRREVEELVRDLRRLIEELSRSSEELVKELEKLLRELEESSKKLAEELRKAVE

SEQ ID NO: 2273 - protein, 174 aa, Artificial Sequence; identical to SEQ ID NO: 2272
  Synthetic

SEQ ID NO: 2274 - protein, 181 aa, Artificial Sequence
  Synthetic
SSKERIKEKVDRIEERIREVVKEVEEELRRSTEEARRMVREVKRRLEDSNRKIKKFIDEKPEDEDLRRKEREIEELTRDIERKLRRIEEEIEKLSERLKRELDKISKTVEDLARKLEEKIKRITDSEELKRLLEDLRRKIEELAKELKKLLEEHKRRVDDVVRRMEELLKRHEELVRRIAK

SEQ ID NO: 2275 - protein, 181 aa, Artificial Sequence; identical to SEQ ID NO: 2274
  Synthetic

SEQ ID NO: 2276 - protein, 177 aa, Artificial Sequence
  Synthetic
SEAEEAKKTVEEISERLREALRRSEEETERILRENEKASERHKTEIEKITKELEDKLGDDKRVREEIERLRRNVEKLNKENREAAEELKRRAKEVHDRVRKKLRELEDKVDKLRRKGKDRDKDELKKVLKEIEDTVRRIVKELEDLNTEAEKASRKSVKELEEHLKRVEERVREEAK

SEQ ID NO: 2277 - protein, 177 aa, Artificial Sequence; identical to SEQ ID NO: 2276
  Synthetic

SEQ ID NO: 2278 - protein, 180 aa, Artificial Sequence
  Synthetic
ELKERLEKLLKDWADDSKRMRDELARLLKEWEDRSRKAKRDLEKILEENDDKVKKLDKVDKREAVEKELKELDERNKEVLKKLEDDDRKILEDAEELIERIERRDRKILEEVERDLSRISDEKVLREVKESAKKISRHSEKVLDEARKELERISEHSRRVLDRVRRESKKIVEDLRERKR

SEQ ID NO: 2279 - protein, 180 aa, Artificial Sequence; identical to SEQ ID NO: 2278
  Synthetic

SEQ ID NO: 2280 - protein, 178 aa, Artificial Sequence
  Synthetic
DIERELEEIVRRIKELIRRHKKRLEELVRELEELLRRHREELKKLVKRAAELVEELRRRNSRDETTLRRMREKLDRIRREIEKSTKEVEDELDKLLKEVDTSHKELEDRVRELAKELERKNVDDTVKDMLRKLLEEVKEASDRAREKLTDILRKIKKISEEVKREIDDIRKKIEDTAK

SEQ ID NO: 2281 - protein, 178 aa, Artificial Sequence; identical to SEQ ID NO: 2280
  Synthetic

SEQ ID NO: 2282 - protein, 178 aa, Artificial Sequence
  Synthetic
SIEEEAARIVEELRREVEEWERTLREIVERLRRLVEEHKRRLDELVAELKRLVDELRKENSKDETSLREIKERLERLEKEIDESDERMERELRKLTEEVKERNERLRRKVEEVKKELDDKNVREDIRRKLKEILDELDTITEKLKKELERIKREMKEASRRVREKIDRIRKEIEEVAR

SEQ ID NO: 2283 - protein, 178 aa, Artificial Sequence; identical to SEQ ID NO: 2282
  Synthetic

SEQ ID NO: 2284 - protein, 179 aa, Artificial Sequence
  Synthetic
DEIRELLKRIRDVAKRIKDKADRLNEKSRRKVEKLVRDVEKINEDTKRLLDRLRDSDQDRKDLERDVRRVKEDIKRLNEELDDRVRRILRELEKENEDSKREVDEIAKRIKDLLREIKLPEDVLRELERLLKEIEDLVRELNKTNKKIVDKARKDVKDVHRTNERLLREIERVVREKLK

SEQ ID NO: 2285 - protein, 179 aa, Artificial Sequence; identical to SEQ ID NO: 2284
  Synthetic

SEQ ID NO: 2286 - protein, 179 aa, Artificial Sequence
  Synthetic
SEAEELLRRLEKIIEDLERNARALLEKLKEEIRRLDKNLRDLLRRIEKIMRDLTRSDVDRDELRKEVDRLRKEIKKYLDDHREEVRKIVEEIKKELDDHRRRSKEIVDRIKRLLDEINLDEEVLKEIKRVLEEAEKVSEDLLREIKEVLDRAEELSRRLLKTLEDLLRDIERSVKERED

SEQ ID NO: 2287 - protein, 179 aa, Artificial Sequence; identical to SEQ ID NO: 2286
  Synthetic

SEQ ID NO: 2288 - protein, 174 aa, Artificial Sequence
  Synthetic
SSKEKVEELVKEIEEEDRRVLEDTRRLLEEIMRRDEDVLRKTDERIKEIEKELRDRVRDEELLRELLRELKEVLRRHREESKRSLEKLKKVMEDHDDESRRTLEELKEALRELKRDKDSKEAEDRLRDLVRRSREIAKRSRDHLRDLLRESEERVRASLEHVERLVKKLRKDAN

SEQ ID NO: 2289 - protein, 174 aa, Artificial Sequence; identical to SEQ ID NO: 2288
  Synthetic

SEQ ID NO: 2290 - protein, 178 aa, Artificial Sequence
  Synthetic
SEAEDLLRRLEEEIRRIKKRHKEVLDELRKLIKEVEDRHKELLDRLREEIRELEERDVSREDLKRLVEELRERVKRMNRESEKLVRDLEERAKELHRESEELVTRLERVIEDLERRIKGDRVKEELRRIVKEVRDEIRKANEKIKRLLDEVRERSKDMNRRLKEIVDRVTESLRRKAE

SEQ ID NO: 2291 - protein, 178 aa, Artificial Sequence; identical to SEQ ID NO: 2290
  Synthetic

SEQ ID NO: 2292 - protein, 180 aa, Artificial Sequence
  Synthetic
SEVDEALERIKRLIEDLERHVREWLKELREIIEDLRERVRKLLEDLERRIKELEEKARRTGPDRELEELLERLRRKIEEDIKKLEEDLREIEKRVEETNRRHEKKSRDVKREIDELLKRLRSKAVEDLERLVEELRKLSEEASRRSRKILEELRETVERVIKRLKELLKKLKEVVDELRR

SEQ ID NO: 2293 - protein, 180 aa, Artificial Sequence; identical to SEQ ID NO: 2292
  Synthetic

SEQ ID NO: 2294 - protein, 180 aa, Artificial Sequence
  Synthetic
DRAEKVLEDIRKLIEEMRKHAEEWERRAREAVKELRKEVTDWRRRLRKLLEDLEEKVRREGNDERLERLAEELLKEVKKVNEETKRRVKELLDRLRKENEEHDRLSKKLLDEIREKLKSLRSEVVRRLEKLVEDLRKINEDVNRRSRELVETLRDDVRKVNEESKRILEEVKKILDDSKR

SEQ ID NO: 2295 - protein, 180 aa, Artificial Sequence; identical to SEQ ID NO: 2294
  Synthetic

SEQ ID NO: 2296 - protein, 181 aa, Artificial Sequence
  Synthetic
DLRRELRRVLEESKKHVKELVRELDEDLTRWERRVEELVKRLRDVLRKLEKEVDELEKKPTREEELREAVERLRRVIRELEERNKRTLDEADKRVKDLKRKLRKVVEDHRRRIKELEDRVEGDRVKEELRELVRESDKIAEEIIEKLDRDVKKVKKDHERIDEELKRKLKEVEERVERIRT

SEQ ID NO: 2297 - protein, 181 aa, Artificial Sequence; identical to SEQ ID NO: 2296
  Synthetic

SEQ ID NO: 2298 - protein, 184 aa, Artificial Sequence
  Synthetic
SEVEETLREIKEDIKRSKKEWDDLLKTIKELIEDSKRKWDKLLRDVEELIRELLERLRRDGPTEEIDRTVKKIIDDVEELLRKLEKDDRDADERIDRLVKELVERDKRSLDKLKERLDKLKDRVPDRAERDVERIIREAKKLTDKVREDVERLREEWERLVREVKERIKRLLEDLRRLVEETRR

SEQ ID NO: 2299 - protein, 184 aa, Artificial Sequence; identical to SEQ ID NO: 2298
  Synthetic

SEQ ID NO: 2300 - protein, 184 aa, Artificial Sequence
  Synthetic
DEAERLLEEAERIIEKSREEWERLLERIKRLIETLRKRYEDDLRESEKRIEELLRKARRDGPTEELRREVEKINRDNKESLERWNREVEEILRELKELVERLEERDRRLIEELKRRLERLRERVSDRVAREVERILRELKKLTDDMKKRAKELIDELKRLSEEMHRRIEKSNEDLKRLVDDVDR

SEQ ID NO: 2301 - protein, 184 aa, Artificial Sequence; identical to SEQ ID NO: 2300
  Synthetic

SEQ ID NO: 2302 - protein, 185 aa, Artificial Sequence
  Synthetic
DEAEDILRRIRELIERSKRKWDELLREIKKLIEESRREWEELLRRIREIIERLKRLAERDVDDKDRLKEEVKRIKEELKREVDRLEERNRELLERLKKEVEKLKREDDEIVKELEELLTRAKDRVDERVKEEMKRLIEDLKRVSEEVKRELDKLIEELKEVSERASKRLKELIDDLDRLVKEVEK

SEQ ID NO: 2303 - protein, 185 aa, Artificial Sequence; identical to SEQ ID NO: 2302
  Synthetic

SEQ ID NO: 2304 - protein, 178 aa, Artificial Sequence
  Synthetic
SEDEKAIEELKKEIERLRRLLEELRKHVRRLIEEIKRLVEESKRHVEELIREIDDLRRRDQREEEVKRSVEKIKEDLERHERDVKRRLDEIREALKRHEEDTKRVDDELRERIERLDRRLKGRKEVTDIIRELKEVLDEIKRTSEELLRTIEEIVRDAERKNRELLKELKKVLDEVEK

SEQ ID NO: 2305 - protein, 178 aa, Artificial Sequence; identical to SEQ ID NO: 2304
  Synthetic

SEQ ID NO: 2306 - protein, 178 aa, Artificial Sequence
  Synthetic
DEDEELIKRLRDRIREIRKLVEDSARNVKRLIDEDERLARRSLRHLEETLKEIERKAREDQSEDTVREAVERIKRDLERHRRESKRLLETSDKLLRDHEEEVKKLLERIKRVIEDLDRKLRGRDEVREVLKEIRELVKELKERNDELLTRWKESIKRVEEEDERILREIERRVEEVER

SEQ ID NO: 2307 - protein, 178 aa, Artificial Sequence; identical to SEQ ID NO: 2306
  Synthetic

SEQ ID NO: 2308 - protein, 177 aa, Artificial Sequence
  Synthetic
RAEEEVKRLLKEDNETLKRIEDDVRRLLRKNNESIREAEKTNRELVKRVEDIIRRARERGVDESVLADLRRVLKELKEESDKVLDELRKLNEKLREEVRELKRELDEENKELDREIKEGQPLEELLERIKELNERTKKKVADLRRVAKRLDEETERKVRETERRWRDVLDKVRKKVK

SEQ ID NO: 2309 - protein, 177 aa, Artificial Sequence; identical to SEQ ID NO: 2308
  Synthetic

SEQ ID NO: 2310 - protein, 178 aa, Artificial Sequence
  Synthetic
REVEEVLERLKELLREHEKHAKEVEDRLRELIRENKEHAREMLERLEKILDELKKIRDSEEVLRETLKRIDEEVRRLIRHHEELSKEVLKEIEDIIRHHRKESRRSEEEVREIEKRITDEEALRELRRLLDEIRRVNRKVEERIKEVLKKIDEDNKEVVRRLEEALEKIREVIERTAT

SEQ ID NO: 2311 - protein, 178 aa, Artificial Sequence; identical to SEQ ID NO: 2310
  Synthetic

SEQ ID NO: 2312 - protein, 176 aa, Artificial Sequence
  Synthetic
KAKEDVKRALDEWKEVNDRVNEELKKAIDTWREVNRKVKEDVDRLVKEIEELIRRVRENGADERLLEKLKRELEKLTEDVKRRLKEDNDRLEKLLTDLKRESDKDREELKELARRLDELRREDVKRELKRVIEETRERAKRLLEDLRRLIEETKKLAEELLARAKEIIDRIREAAR

SEQ ID NO: 2313 - protein, 176 aa, Artificial Sequence; identical to SEQ ID NO: 2312
  Synthetic

SEQ ID NO: 2314 - protein, 182 aa, Artificial Sequence
  Synthetic
RAEEELDRLSREVEKVSKKAREDLEEMRKALEDVSRRVKEKLRRILEEIKEAIKDVKRRTNGSSKKLKEIEDLLRKLEEDLRDLERRVEESHERLEREVRRLLKEVDESSKRLREEVKRLRDEPPSRELIREVEKLIEDHRRRLEEIVETVRRLVDEHRRRLERIVREAAKLVKDIKRELEK

SEQ ID NO: 2315 - protein, 182 aa, Artificial Sequence; identical to SEQ ID NO: 2314
  Synthetic

SEQ ID NO: 2316 - protein, 182 aa, Artificial Sequence
  Synthetic
SVKEKLRRISKELEKASRDDERENRRILKEARDVIREAADKIRRIEEELRKIIDRVRKETNGSEDELRRIEELMRRADTELRKLEKTIEDLLREVEERVKESLERSRRSSERLRELVRDLDEKPPSEEIIEEVKRLVDEHKKRLDENVKRLKELVDRLRETLERLVDRLRKLVETLKRESDR

SEQ ID NO: 2317 - protein, 182 aa, Artificial Sequence; identical to SEQ ID NO: 2316
  Synthetic

SEQ ID NO: 2318 - protein, 182 aa, Artificial Sequence
  Synthetic
KVEEDLKRIKKEIKDAADEDREKNREIMKRLNDVTREVEERLRKILEDLERLVRRVKEEVNGRKEELDRIEELLRRAREELEKLEEDVRRDNKELRERVRESLERSDELVRRLEDELRRLEEKPPSEELIKRVKELVREAKERLKDNVRRLEELVKEWKRKLKEIVDRVRELVKDLERRLKE

SEQ ID NO: 2319 - protein, 182 aa, Artificial Sequence; identical to SEQ ID NO: 2318
  Synthetic

SEQ ID NO: 2320 - protein, 175 aa, Artificial Sequence
  Synthetic
SEKEKIVKDVEELIREAEELVRRLLKRLKELNDESEKTARDLVRKNEETLKELKDVVDRRVKDKDTLRKRVKELHDESRDDLRKLDELNRRVERELEKLVEELKRTIEELKKRLEEAPRARELDELIKKLDEVLRRAEKEAEELIRDHRRISREVKERIKDLNRRIERILREAEK

SEQ ID NO: 2321 - protein, 175 aa, Artificial Sequence; identical to SEQ ID NO: 2320
  Synthetic

SEQ ID NO: 2322 - protein, 181 aa, Artificial Sequence
  Synthetic
SLEEIVKRVEEDIRRIIEELRRRIEEADRKIAEIIDRLRKTVEKVNKEIEDLIRELKKKEGDDRDVERKLRELEELLRRHTERVRDVERRLKKLLEDHHREVREILKRAEKLLRDLSEELRTITDDKRVRELVEEVKKKLRDLVEEVRESVKRLEDTLRRVEEEIRTTARELLRRLREELE

SEQ ID NO: 2323 - protein, 181 aa, Artificial Sequence; identical to SEQ ID NO: 2322
  Synthetic

SEQ ID NO: 2324 - protein, 181 aa, Artificial Sequence
  Synthetic
SLEEEVRETVKRLRKEVEDWLREVEKVLEDLLRELKKSIEETKKVAKELEDKLRDVKRRNVDEDEVRRLKEEAKRTIEELEKKNKELERKIEKIVRELREKDKELDKRVEDVLDELRKRLTDERIRRTLEKAREEVKRLSAETKRLIEEVKRRLDELLKRDNDIIDDARRRVKKVLDEIET

SEQ ID NO: 2325 - protein, 181 aa, Artificial Sequence; identical to SEQ ID NO: 2324
  Synthetic

SEQ ID NO: 2326 - protein, 181 aa, Artificial Sequence
  Synthetic
DLEEELRKVVEDLERKLRESIRETEEVMRRLEESVEESIRKTEEVVKRLREKLEDVKRRNVDEEVVKKLEREVKEVIDRLREENRRHHETVKEIIKELEEKNRRLKKEAEDVIRELEKRLKSDEIRDTVRKAKEDVERLLEEDNRRIKEVLDRVAKLNKRDNETIERAEEEARKVLREIEK

SEQ ID NO: 2327 - protein, 181 aa, Artificial Sequence; identical to SEQ ID NO: 2326
  Synthetic

SEQ ID NO: 2328 - protein, 181 aa, Artificial Sequence
  Synthetic
DIEEEIREEVERLRRTLKELADRIKKLVDELREKLRRWLEEVEEVLRRLIEDLRRVKEENVDEKVVDDLEKKVRKLVEELKEKDKRLNEEAKEVIRKVEEEIKRHHDEVKKRLDELRKRVKTEELEKRVREAEEEVRRVNKKLKDDLDKAREDLKEFSDRTRRMIKAVERDVKRVLDEIRR

SEQ ID NO: 2329 - protein, 181 aa, Artificial Sequence; identical to SEQ ID NO: 2328
  Synthetic

SEQ ID NO: 2330 - protein, 177 aa, Artificial Sequence
  Synthetic
SVEETIKRILEEVEELIREVKERNERIERRAERLIEEVKRSNDEIKKEVRTAIEKVIRKREDDRVRKVLRELEKAVEDHDREVEKVVEEVRRLSKKHLDEVERALEELRRRLKEIKDRPVDKEKVDKLVKDLRRVIEELRKSLEDLERRLDDILRRLKESSDELVRELRRLLKEMEK

SEQ ID NO: 2331 - protein, 177 aa, Artificial Sequence; identical to SEQ ID NO: 2330
  Synthetic

SEQ ID NO: 2332 - protein, 177 aa, Artificial Sequence
  Synthetic
SVEEALDEIEKKVEEMIREVKETNDRVRRKVKELSEKSKTENERVVREARELIREVEREREEEEVRRILEEVERLSKKHLDENRRLVEEIDKEVEDHNREVERVLEEARRRLDDIKKKPVDKKDVDDLDRDLEKKLRDLKDSSRKLVKRVEDLVRESEDTVRKLIERLERLIRETKR

SEQ ID NO: 2333 - protein, 177 aa, Artificial Sequence; identical to SEQ ID NO: 2332
  Synthetic

SEQ ID NO: 2334 - protein, 177 aa, Artificial Sequence
  Synthetic
KVEEELDKILKEVEDLVRRDEEEIKRILEEVKELIRKVKETNDKVEREMRKLVEEVKKREEREEVKKVEREAEKKVRDHKREVKRVLEELARELKELLDETRRLLKDIRREVEDIKRKPVDEDSVRELVKRLRERAEESKKRTKDLEDKIRTKIEELERSSKELTDELRTLIREAER

SEQ ID NO: 2335 - protein, 177 aa, Artificial Sequence; identical to SEQ ID NO: 2334
  Synthetic

SEQ ID NO: 2336 - protein, 184 aa, Artificial Sequence
  Synthetic
SVEEAIKEILRELEKVNEDSKRLSDRNLKELEKALRDAKKSVEEILRELEKALDEVRKNGLSEELERRVREVLERIKEKLDRLRKTIKEALDRSRKKTEELSRENERLLRDIRRRVEEVRKDDSREDVERILKEIKDEVDRVRKENERVNRESEDESRKLVEELKKVLRRLKEEVRRIVEELRT

SEQ ID NO: 2337 - protein, 184 aa, Artificial Sequence; identical to SEQ ID NO: 2336
  Synthetic

SEQ ID NO: 2338 - protein, 182 aa, Artificial Sequence
  Synthetic
EVEERLEEILRRLERAVEDWKRKNEKILKELRDVVRESKKRTREIEKKIEDAARDVLREVNTDKKKLEEIKRLLEEVRKEIEDLLRTNEKLLEDLERLSKDDERRVRELLKEVRERVDKLKKDKVSKEVVKELEKDVRRIVEELKDSLRRLKEKVEEVARTVKKLNEELDDSVREIVERLRK

SEQ ID NO: 2339 - protein, 182 aa, Artificial Sequence; identical to SEQ ID NO: 2338
  Synthetic

SEQ ID NO: 2340 - protein, 182 aa, Artificial Sequence
  Synthetic
NVEEELDRIRREAEKVVKESRELTREILERAREAVEKSEEDTRRILERLERVVKRVKKDVNDREEKLKRIEDIVRRVRESVKKLEEDNKKILRELEESIRRWLEAIEKILEDLRREIKKLKDDRVSEEVLDELRKKVKKLVDELRTEDRRLEEEVKKIVRDAEKRNKELEDEIRRLAEELEK

SEQ ID NO: 2341 - protein, 182 aa, Artificial Sequence; identical to SEQ ID NO: 2340
  Synthetic

SEQ ID NO: 2342 - protein, 176 aa, Artificial Sequence
  Synthetic
SETETAVKKLKKLVDDLKREVERLVERLRELVRENSEKSRELVKRSDDLVRELLEKVKRRDLREDELRKEAEDLRETDDDLLRDDERHVKELEERMREELKRLREEARKLEEDIRKGEVDSELVKTVEEELKKVLEEVDRLVRKILEDLRRSLEESKRLSEESKKKLEDVLDRARR

SEQ ID NO: 2343 - protein, 176 aa, Artificial Sequence; identical to SEQ ID NO: 2342
  Synthetic

SEQ ID NO: 2344 - protein, 176 aa, Artificial Sequence
  Synthetic
RELEEAVKKLKKKVEDNTRTSRKLVTDLEREVEELKKEVEEVVRKSKELVRELKKKVDRRDLDKRELRKEVKELEERDERLLEKLERAVEELERKIRELLERDRRHVDKLRKDIEDGEVDSELVERVKEELKRSLEESDKLVEDVRRKLKEVLDDIRRLSEESKRELRDVLREADK

SEQ ID NO: 2345 - protein, 176 aa, Artificial Sequence; identical to SEQ ID NO: 2344
  Synthetic

SEQ ID NO: 2346 - protein, 182 aa, Artificial Sequence
  Synthetic
ELEEIVKDARRRIKELIDEARRTSEEVVERIKELLKRAEEISREARKRLTELLEELKKTVKDEDTLRRLLTELERLIREHDRLSREVLERLKKLIEDHKRKSDELLERLKRLLEELEDMVRRRIDKKEELRKIVEDILRTIKKLLEELRDDARRLLEEIKRLLEELERHVRKLLKEIDERIK

SEQ ID NO: 2347 - protein, 182 aa, Artificial Sequence; identical to SEQ ID NO: 2346
  Synthetic

SEQ ID NO: 2348 - protein, 182 aa, Artificial Sequence
  Synthetic
ELEEIARKAKEDIERLVEEARRISEEVKRELTELVERLRRISEEVRKRIEDLADELRKKVEDKDTLKRLEEEIRELAERHERKSRELEKRLKELVDTHRKKSEDLLRELKRLVEELERVLRRDIKDKKTLKEKVEDILRRIRELLRELRENARELVKEIERLIRELEKDAKRILKKIEDAIR

SEQ ID NO: 2349 - protein, 182 aa, Artificial Sequence; identical to SEQ ID NO: 2348
  Synthetic

SEQ ID NO: 2350 - protein, 181 aa, Artificial Sequence
  Synthetic
SVEELVKEIEKRLDELVREIEKTNKKVEDDIRKMLEDIKRVHDKSNEDLEKLVKELREKLKDEKRLEEITRRVEKMKRDNNEVLKELEERVRRILEHHRRLSDRVREEAEDIRRRLRELLERGLDLKDIEKVARDILRRVKKILEENRKHAEKARRELEKLLRESKRLVDELLRRAEEEKR

SEQ ID NO: 2351 - protein, 181 aa, Artificial Sequence; identical to SEQ ID NO: 2350
  Synthetic

SEQ ID NO: 2352 - protein, 175 aa, Artificial Sequence
  Synthetic
SREDRARELVKRILDEHKKILEDVEELAKELLRRHEELLKTLRELMRRIEEDLKRLEDEDVDREKAKRRVDELRKTLKKVLDELHKESRRLLKTLEEVLRRIDKRSREIKEELEKGEIDSEILKTVTRLSEELNRRIREVVRKVEEDLEDLNRRLKKIADEIEERIKEILRRIEK

SEQ ID NO: 2353 - protein, 175 aa, Artificial Sequence; identical to SEQ ID NO: 2352
  Synthetic

SEQ ID NO: 2354 - protein, 177 aa, Artificial Sequence
  Synthetic
SIEDVVRRIREEDRRLHEEIRKVVDEIRKRLEDALRSHEERVREVLERIKKLLEELKRRGTDKRVEKEVEDIERRLKEVLEESRDIVRRLEEELKRTLDKIRRENEKSEDELKKLTDERLDEKDLRKKLREIEEKNERLLRELERLLEEIRRTLEDLNRKLDEEIKKLERRLKERDR

SEQ ID NO: 2355 - protein, 177 aa, Artificial Sequence; identical to SEQ ID NO: 2354
  Synthetic

SEQ ID NO: 2356 - protein, 184 aa, Artificial Sequence
  Synthetic
SLKELIDEVERRLREVNRRARELVEEVKERLRRVNEESRELLREIEERLEDVLRELEEGDLREEELRRLAEDIKRVKDEVKKLFDDHRDTNRRIEDDLRKKVEEHHERNRRIIEELKRLLDRGNGEEEIKELVKRARELVKRSKEHVDELMETAKRLVDESRKHAEELFRELKKLIEELREKIR

SEQ ID NO: 2357 - protein, 184 aa, Artificial Sequence; identical to SEQ ID NO: 2356
  Synthetic

SEQ ID NO: 2358 - protein, 176 aa, Artificial Sequence
  Synthetic
SEVEKLVEDLRREVKRHSEKVERLVKELRDDLERWKERLEEIMRRLEKLVRDLEELLRRGDLSEESIKRLIDDAERRLRELLKRIREEIEEHRKKSEDLRREAKETVDELRERIERMNLDEELVREVKERLERSRERVDKLLRDNHKRLKEVLDEAKKLIDRVRKLLRRVLEEAKK

SEQ ID NO: 2359 - protein, 176 aa, Artificial Sequence; identical to SEQ ID NO: 2358
  Synthetic

SEQ ID NO: 2360 - protein, 176 aa, Artificial Sequence
  Synthetic
SDVERLITELADSVRDHSRDVRRVVEELEKLLRDWERDIEDIVEKLDRLVRTLEELLRRGELSEDLIREVVKDIDRKLKKVAREIEKKIRDHERKSRKLLEDVEKTSRENREEIKKANAREDLVRTVEKLNTESLDEVRKLVKKNHEDLKRVLDKAKKLIEEVRKKLEEVLDEARK

SEQ ID NO: 2361 - protein, 176 aa, Artificial Sequence; identical to SEQ ID NO: 2360
  Synthetic

SEQ ID NO: 2362 - protein, 178 aa, Artificial Sequence
  Synthetic
TLEEILKEVAERVKKANEDSRRILEKVKRDVETVNRENEKILKKAAEDVKRVLDEARKRNVDEKLLRELERLLEELKKEVEKLNRRNEKLLRDLARRVRELDERNKELLDRLADLVRRGDLSEKELREMIEKLKRDNERMLRELERRIEELKRDNDRVNEESKRLVDELKRDAEEKLK

SEQ ID NO: 2363 - protein, 178 aa, Artificial Sequence; identical to SEQ ID NO: 2362
  Synthetic

SEQ ID NO: 2364 - protein, 178 aa, Artificial Sequence
  Synthetic
TLEEILREVEKRVKEANERNRKISEELADLVRRVNEENKKILEDVAEEVRRALERARRRNVDERVLKKIRDLLRKLAEEVKKLNERNKEELKRLEKRDKELNDRNKELLKRLKETVERGDLSEEELRRMIEELEKRNRDVDRESKKLAEELEKTNRDVNRKSRELVRRLRRKLEEELR

SEQ ID NO: 2365 - protein, 178 aa, Artificial Sequence; identical to SEQ ID NO: 2364
  Synthetic

SEQ ID NO: 2366 - protein, 178 aa, Artificial Sequence
  Synthetic
ELEDILREVRKRVEDVNRRNKEILERVAEEVRRLNEENKRILEEARKRVEKVLEDLKRRNVDERLLRELEELLERLARRVEELNRENKRDLDRLRETVKRLNDENRELLRRLAETVKRGDLSEEELRRAIKELKDRNEDVDRRTKELIKRLEDKNRELNRESRERVEELKKRAEELAR

SEQ ID NO: 2367 - protein, 178 aa, Artificial Sequence; identical to SEQ ID NO: 2366
  Synthetic

SEQ ID NO: 2368 - protein, 178 aa, Artificial Sequence
  Synthetic
DLEEILKDVKRRVEEANRRNEKILEEAKEKVDRVNRSNEKILEEVKETVKEVLRRAREENVDDRVLEDLKRLLRELEERVKELNRRNRELLKELADRVKKLNDDNRKLLEELADTVRRGDLSEEELKEMIRRLEETNRRVDKETRKLIEELERRNREVDRESERLIRELKKKAKDDLD

SEQ ID NO: 2369 - protein, 178 aa, Artificial Sequence; identical to SEQ ID NO: 2368
  Synthetic

SEQ ID NO: 2370 - protein, 178 aa, Artificial Sequence
  Synthetic
TLEDILREIAKVVKEANKRNKRILEKVARDVEEVNKENKKILDEVKRDVERVLREAEKRNVPEDVLRKLAELLKRLEDRVRELNEETKRLLEELADRVRELNERSKDLLRRLADIVRRGDLSEDELRRMLEELERTLREVDRESDELVKKLKRDAERVNEETRRLIKELKEIADRLLD

SEQ ID NO: 2371 - protein, 178 aa, Artificial Sequence; identical to SEQ ID NO: 2370
  Synthetic

SEQ ID NO: 2372 - protein, 184 aa, Artificial Sequence
  Synthetic
SIEELVREIEKTNEDMRREIERLSDENRRRLDKALEDIERRAREIKEKLERVMKRLREKGVSEEVEERLRRLEKELKEVLDRLREIIKELKDDNERLTKRIRDRSRETRERLKRFLDEARRDKDEKRVLDELRKLLEDSKDELRRLLEELRRHIKETDDTVRELLDRIRKIREELDDEVRRLEK

SEQ ID NO: 2373 - protein, 184 aa, Artificial Sequence; identical to SEQ ID NO: 2372
  Synthetic

SEQ ID NO: 2374 - protein, 174 aa, Artificial Sequence
  Synthetic
KEEEDARRALKRVEEEVRRNKEEMRKLLEDNEKRIRENKKRAEDSSRKVKKRIDELRRDGKRGEEVKRDLDRLRDEHRRETKKSEDELKRNNERLEEETKRSKEDIKRIKEDLDRRGLPEEVLREIEKILRDLERDHRRVLEEIRKRNDELRETHERVLRENEKILEKVERELR

SEQ ID NO: 2375 - protein, 174 aa, Artificial Sequence; identical to SEQ ID NO: 2374
  Synthetic

SEQ ID NO: 2376 - protein, 181 aa, Artificial Sequence
  Synthetic
SVDDKVRRRIREIKEELERVLTRSERESDDIKRELEEVLKRSEERTKKIKDDAERGGVSDELREKLERETKRAEDKHRKIREDLKRDEDRNRKRHKEIRDEARKDTERMKKKLKDLKDDKDDERVMRDLERELEKLERKVREIKRELEEHNARLREKVRRIDEDLKRDNKELEDTIREDTR

SEQ ID NO: 2377 - protein, 181 aa, Artificial Sequence; identical to SEQ ID NO: 2376
  Synthetic

SEQ ID NO: 2378 - protein, 182 aa, Artificial Sequence
  Synthetic
KEEEELEERIRRLEKLVEDYKRELDRSIKELEDEVDRARRELEKSIEEMKKKVKKAEDDGPVDEELKRRLEEDNERHKRDLDRRKEELEKKLRELRKRNEELRRRLEEELKRVEEELKEANLPDRVIRKIKKLLDEVRERLERINRTHRELLKEVEERLKKILKDITDANRRIEERLEEITR

SEQ ID NO: 2379 - protein, 182 aa, Artificial Sequence; identical to SEQ ID NO: 2378
  Synthetic

SEQ ID NO: 2380 - protein, 182 aa, Artificial Sequence
  Synthetic
SLKEELKRINDENKEELDRLREELKKLLKEVEEELRRAAEELERINRRIKEELDKVADRVDDEKIKRIEKRLKEEHDRHREELKRIKRELDELKKELEKVLKDIEKKNREREKELRDREETTTEEVAERLLEELREDVKRTKEKMKEMLDRVKKKIDDIKRKLEKLLRDNERRIEELKRDAD

SEQ ID NO: 2381 - protein, 182 aa, Artificial Sequence; identical to SEQ ID NO: 2380
  Synthetic

SEQ ID NO: 2382 - protein, 176 aa, Artificial Sequence
  Synthetic
SVEEKLKKALEESKRKSKRIKDDDERANREVKKRIEDIVRRLEEVLRKVLKDVTKDIKDKRELLKEIEDRIREIEERIRRLTEEMKRTHEENEKRTREDEKRNDEEHKRIEKKLAETGASEDEVTRDVKRLEDHNTRLEKKVKESVERLKEKLEELRKRVEKIERDLEKLLEDVRT

SEQ ID NO: 2383 - protein, 176 aa, Artificial Sequence; identical to SEQ ID NO: 2382
  Synthetic

SEQ ID NO: 2384 - protein, 179 aa, Artificial Sequence
  Synthetic
KAEDVLRRVKEEHERIRREIKRVIDDVRRKHKEILDRLREEIKRVEELLRKILEDVERDGKRDDRLRRLAEELKKRLDDVKRDVEEKEKENRRRLEKEEKRLEENFKRNEERLRRIEEEGPVREEVVKELEDNVKRNEEDAKRTVEKLRKNLEDNRREVEKIVRDLRRLVEKAREDVKR

SEQ ID NO: 2385 - protein, 179 aa, Artificial Sequence; identical to SEQ ID NO: 2384
  Synthetic

SEQ ID NO: 2386 - protein, 173 aa, Artificial Sequence
  Synthetic
DLKEILDEARKLIEDLRKKAEEILEESKRLLDDLKRKADEILTRYDELTKRLSTKVPRTRELEELERRSKEELDKLKRELEEEVERWKEENEKIRKRMEDLVRDLRRKLEEARRDQRLEELKKRLEELIREVEKDLRRIKKESEDRVEEIERRLRRIAEELDKDVRRVEEEAK

SEQ ID NO: 2387 - protein, 173 aa, Artificial Sequence; identical to SEQ ID NO: 2386
  Synthetic

SEQ ID NO: 2388 - protein, 181 aa, Artificial Sequence
  Synthetic
SKEETVARRVDEIARELEEKNKKWEDDSRKAVDELRRKLEEWEKRSRDLREKVKDLLRKLKDQDDKERLKEEVRRVLEEWRRELKKLREEVKRTAEKWRRELKKLEDDSRRKLEEVKRELEELDVSEELKKKVEKLLEDHRKKSEELLRKDEKLIRDMEREVERLLREDEKVIEDVERATK

SEQ ID NO: 2389 - protein, 181 aa, Artificial Sequence; identical to SEQ ID NO: 2388
  Synthetic

SEQ ID NO: 2390 - protein, 181 aa, Artificial Sequence
  Synthetic
SKEETVERDVERIVRRLRELNKEWKKRSEEVKREVDESDKRTAEAVKKLVRDLEETLKDLKDRDDRETAKEEVDRRIKKIEDDLRRLLDEHRKLLEEWRERLKKLLDDSRRELEKVKEELERLDVSEEIKKKLEKLLKEHEDLSRKLLKEDEEEIDRHRRKVREWAEDLRKKLEEAERAST

SEQ ID NO: 2391 - protein, 181 aa, Artificial Sequence; identical to SEQ ID NO: 2390
  Synthetic

SEQ ID NO: 2392 - protein, 177 aa, Artificial Sequence
  Synthetic
SEKERAEEELKRIEDELREAIKRSEDRLRRIEKELRDREKRSEEELRRLEEELRRLAEERISEETVEKVARDIDEENKKHEDEVRKTEEKVKTENERHKKEVEDIARKVKRSIEELKRRNGDRKIIEDLKRLLREFERAVEESNERLRRLLEEFKEKVKESNKRSRELLRRMEEEVR

SEQ ID NO: 2393 - protein, 177 aa, Artificial Sequence; identical to SEQ ID NO: 2392
  Synthetic

SEQ ID NO: 2394 - protein, 175 aa, Artificial Sequence
  Synthetic
DDLERLEKEAREILERHKRALDELEKRLRRVLEKHEEDLRRLEETLRELLKKVRKDGLPEEVLRDVKRKLDKLKEDLKRSLDRLREELDRLRKELERSLRELKRDVERVKEELERNEKRREELEKEVRKLEKKSRDDIRRLEKELRELEKRSRDNIRELEKRVRRVARELDKTAK

SEQ ID NO: 2395 - protein, 175 aa, Artificial Sequence; identical to SEQ ID NO: 2394
  Synthetic

SEQ ID NO: 2396 - protein, 177 aa, Artificial Sequence
  Synthetic
DEKEEAEKALREIKKRIEDNVREVRRLNRELREKLRKLIEDYDRLLKELEKRVEDIVRKGRVDEKVKEDADRELEKNREELDRRRKEVDDRLRKHNRELEESMKEARRRLEEVDRRLDELGERDLRREEKKLRDELRDLHREHRKSIEDLDREIKKMEDELRRSIEENRKRVEELEK

SEQ ID NO: 2397 - protein, 177 aa, Artificial Sequence; identical to SEQ ID NO: 2396
  Synthetic

SEQ ID NO: 2398 - protein, 175 aa, Artificial Sequence
  Synthetic
REKERVKRVVRRVEEELKRNLEEVEEESRRDLRRLEENLERVEEAVRRILKRLDDSRIDSEELKRLKEEVREKLRRAKKDHDEYLKRNEEDLRRVRRKHEEIRERIKKKLRDVERENKPREELEKLIEKIERELKKTHDDSRREIERLRRETKKLHEKSEELIRELEKRLRDAER

SEQ ID NO: 2399 - protein, 175 aa, Artificial Sequence; identical to SEQ ID NO: 2398
  Synthetic

SEQ ID NO: 2400 - protein, 180 aa, Artificial Sequence
  Synthetic
SEVEEILDRIRRELERLAREARKTVERNKKELDRIREEVDRSLRRNKEELDRLRREKKDVDEEFLRRIEKELEDNKRELEREDRRLEEELKRNHEELEKEDRKIRKEIKDLEDEVEKKVRGEDARRAARELLKRLEDLLREHHDRLRKSDEEIRKLIEDHHRALEESNREIKELIDRMAK

SEQ ID NO: 2401 - protein, 180 aa, Artificial Sequence; identical to SEQ ID NO: 2400
  Synthetic

SEQ ID NO: 2402 - protein, 185 aa, Artificial Sequence
  Synthetic
DEAEKLIKDIEDKDEELKEKARELKEKLEERDERTKKLIEELKREADRTLEELKKKVEKAKTSDEKVLEELVREVEELLKRVKDLLDELVETVKRLNEESEEELRRLEERSRKVIEDLERRLSKLRSEVVKRVRDLLKRHEDLTREIKKEVKKMNEKNRELVRRVEETLKKLLEDLKRLLDESRK

SEQ ID NO: 2403 - protein, 185 aa, Artificial Sequence; identical to SEQ ID NO: 2402
  Synthetic

SEQ ID NO: 2404 - protein, 175 aa, Artificial Sequence
  Synthetic
SEEEEKVKDIERKLRKHNKEVKDTERENEKRLRELRRTVEEDRKDAERELERIKRVVERGEVDEETLKKILKDLRRKLEELRKRIEELKRRLERHHEEVERRLEESLRRLEDTLRKLEKSEELDRLEKELRESIRRAEELLKDSKRRADELIERIKDVLRKVKEKIEKLIEDTRR

SEQ ID NO: 2405 - protein, 175 aa, Artificial Sequence; identical to SEQ ID NO: 2404
  Synthetic

SEQ ID NO: 2406 - protein, 173 aa, Artificial Sequence
  Synthetic
SEKEVVEELKKTVDDLKRKSEEAIKKAKEAVDKIRRDSERAIRKNEDTLRKIEEEIKRNRSEEALKKIEDTLRELSKEHKEIIERIKKALDDLKRESEEIVKRLEDALRELAKSETDEDILREIAKRIKDLIEDHKRASKEIERDIRKILEDHKRAAEKIRRDLRRLLEDVER

SEQ ID NO: 2407 - protein, 173 aa, Artificial Sequence; identical to SEQ ID NO: 2406
  Synthetic

SEQ ID NO: 2408 - protein, 179 aa, Artificial Sequence
  Synthetic
SLEKMVTDIIRKLEEIARRHKTRSDEIVRRLEEIIKTHEKRSKELMDDLKRLVDEVRKKKDKAEEVKEKLRESLKRLAEESRKVVEDLKRTIERIKKESTETLKRIKDVVRRIREEARDKEPKEEDIRRLDEEVKDLERRSREEEERLEREVRELEKRSEETIRRVEKKVRDLADELRK

SEQ ID NO: 2409 - protein, 179 aa, Artificial Sequence; identical to SEQ ID NO: 2408
  Synthetic

SEQ ID NO: 2410 - protein, 174 aa, Artificial Sequence
  Synthetic
SEEDVVKKVRKKLEDVHRDTRREIRRLEEETKKLHDETRKTIETIERRLRDLRDRLTKEPKDKRVEEKVKKIAEDIERILRKLRRDHEDYLRRNEEVLKRLEDKHRKITEELDRGELDSEEVRDVKEKLKRNLEEARKASREDLERLKRNLEKADEDVRRLLEELKRLLDEVRR

SEQ ID NO: 2411 - protein, 174 aa, Artificial Sequence; identical to SEQ ID NO: 2410
  Synthetic

SEQ ID NO: 2412 - protein, 183 aa, Artificial Sequence
  Synthetic
SLEEAIEDLRRKLEKLLKDYADLSKEIEDKLRKIHEDSRRLVEKLEEEARRILKEVRERGKDEERVKKEERDIREELKKLEKTIEDSEREVEKEKRDSDEKLKRVEDDARKLLEDLRRSGEGREEEVRKEIEDADKRVKDLKRELERDIDELRKRVEELRRRHEEKIKKVAEDVKRREDEARK

SEQ ID NO: 2413 - protein, 183 aa, Artificial Sequence; identical to SEQ ID NO: 2412
  Synthetic

SEQ ID NO: 2414 - protein, 175 aa, Artificial Sequence
  Synthetic
SRLEKIKRELDKKLKDHEDDSRDKVRKLRESLKRHEDKSRKEEEEVKKTLKELEDKLRRDGPDKRVEEESRRHLEEVEKLLKELEDHSRRHREELKKRLDELRDHLRKLLEDLDRTDLEKRLVDDAKRKIKELEEENERLVKEVEDRNRELDERNKRIIDRIRRLNERVKEEAEK

SEQ ID NO: 2415 - protein, 175 aa, Artificial Sequence; identical to SEQ ID NO: 2414
  Synthetic

SEQ ID NO: 2416 - protein, 179 aa, Artificial Sequence
  Synthetic
DEVETVIERDKKLLEDWVDRARKVVKRDEDSLRRDEEENRRVVEENSRTVKELKERIRDERLVREVDTLARKLNRDIERTVEESRRLSEESKRLIEEVVKKVEKLSRDSVRILEAVKDGKEEVVKRVEEEVKRLNERADELLKRVEKRAEELNEESRRLSEEVERKVRELNREADERVK

SEQ ID NO: 2417 - protein, 179 aa, Artificial Sequence; identical to SEQ ID NO: 2416
  Synthetic

SEQ ID NO: 2418 - protein, 179 aa, Artificial Sequence
  Synthetic
SEVEEVVKRNSDTAKEDMDRNEKVVEDNSKRLREWEKAIEEVEKEVDKAMKDLKRRIRDEELVRRVEKLAKELKEIIKKVLDDIRKLIEELNRKIKDTVRRSKKEIDELNKILEEVRDGREKLVEDVRREVEKLNRESEERSKRVKEEVDDLNRKLEKLLRDVKEEVKKLLEEAERETK

SEQ ID NO: 2419 - protein, 179 aa, Artificial Sequence; identical to SEQ ID NO: 2418
  Synthetic

SEQ ID NO: 2420 - protein, 178 aa, Artificial Sequence
  Synthetic
DEVRKVVEDNERSVREIKEELKRVVEEDKELVDRWRERLEKVVKDNERSAKKIKDDVTKEEVKKLVEEVLRTSRKLAEELKKLIEEVHRTSRELIKRVDEEVDKVLEDSRRLAKELKDVDEMLRRIEETIRRLDEELRRLVEEVKRRIDELNREVEKRIREVEERIKEMDKRLREAVK

SEQ ID NO: 2421 - protein, 178 aa, Artificial Sequence; identical to SEQ ID NO: 2420
  Synthetic

SEQ ID NO: 2422 - protein, 178 aa, Artificial Sequence
  Synthetic
DEAEKVVEKDRRLIEKWKEDLKELVRRVREKVKEIKKRVADVVKENEDSVRRIEKEVTKEEVKRLVREVLERSRRLIEEVRRLVDEVLKTVEKLAKELVDKAEEVHRESRELIKDLKDVDEMLRRIDRRAERLNEDVARVIDEVAKRVTRLLERLEEKLKKIRDDIKKLDEELEEAAR

SEQ ID NO: 2423 - protein, 178 aa, Artificial Sequence; identical to SEQ ID NO: 2422
  Synthetic

SEQ ID NO: 2424 - protein, 178 aa, Artificial Sequence
  Synthetic
DEVRELVKENRRSVKENEEELKRILDEDERLIRDWKKKLEEVVRKVAELVREIEERVTKEEVKKLVREVLKTVKKLIDELRKLADEVHKRSNKLIEDNKRLTDEVLRRSEDLARKVKDSDELLRRVAETVKRMDEDLNRTTEEIADTIRRLNEEVAKRIREVERTVERLIEELEEAVR

SEQ ID NO: 2425 - protein, 178 aa, Artificial Sequence; identical to SEQ ID NO: 2424
  Synthetic

SEQ ID NO: 2426 - protein, 170 aa, Artificial Sequence
  Synthetic
DEEEELEKDARRVLEELRRELERVVREAKDINRRVEELIREVRERAKRVDDELRKRPRDDEVMKDVKREVERTIRDIERVLEDIERLSERSERLIKRVLDEVKRVVDDVLRKITNERVLREVERVLRELEREADEVLKEDRELLERWKKTVKDVVKENRDSLDELAKEMK

SEQ ID NO: 2427 - protein, 170 aa, Artificial Sequence; identical to SEQ ID NO: 2426
  Synthetic

SEQ ID NO: 2428 - protein, 170 aa, Artificial Sequence
  Synthetic
SEEERLREEAKEVLKRLREDLKRVEEDVERVDKRLRELNEDVARKLEEVLKRLREQPRDKDVADRVRREVEKILRESREVLKKSARDVDETIKKIETVLREIEKKVEEVVRKITNEKVLREVKRALDDLRRRVEEVLRKNEKSLRELEEENRRVLKKVEDLLEDIIRRLK

SEQ ID NO: 2429 - protein, 170 aa, Artificial Sequence; identical to SEQ ID NO: 2428
  Synthetic

SEQ ID NO: 2430 - protein, 175 aa, Artificial Sequence
  Synthetic
REEDEVRKELERVERRIEDLLREVERTNREVIETSERLTKTVEDDVRRVNTEIDRLLKEKKDDKERVVREVRELIRELNEKIKKTVEDSKRLADELAERNERVAREVRRLIEELKRRVGVEELLRELEEVLRRIEEKLKKIDDESKKLAKEDTDRNKRIVDENTRLVEEWDKRAK

SEQ ID NO: 2431 - protein, 175 aa, Artificial Sequence; identical to SEQ ID NO: 2430
  Synthetic

SEQ ID NO: 2432 - protein, 187 aa, Artificial Sequence
  Synthetic
SVLEEVRKKVERVIRESRELSERVREHIKRTIDEVKKLTEEVRKIVETLIRRLKELLDRVRRKELVEEVVRRARKVLKELEELAEKSIRDTRRLLDENRDILRKTIERSKRLLEEIEDVARKILKDVPDEEVRKILTDLRKAVDEDRRRNEKLLKDSEDAVRRDEKENRDILRELRKAIEEIERRLR

SEQ ID NO: 2433 - protein, 187 aa, Artificial Sequence; identical to SEQ ID NO: 2432
  Synthetic

SEQ ID NO: 2434 - protein, 187 aa, Artificial Sequence
  Synthetic
SMVDKVREEARKLIEEARRLSEEVKKIIDELTKRVKDLTRTSHELSKRLEDTIRELLKRVRRRELVEEVVRRLREMLKELEKTDRDSIRTTRDLLRRLEKIVRDTIRESRRVVKEAEDEIRRITKDVDDEKLREILKRLREELKRDEDRNRELLKRVRDRVKKDEEENRENTKRVREAVEKIERELE

SEQ ID NO: 2435 - protein, 187 aa, Artificial Sequence; identical to SEQ ID NO: 2434
  Synthetic

SEQ ID NO: 2436 - protein, 187 aa, Artificial Sequence
  Synthetic
DVLEEVRRRAEEVIREARELSKRSHDRSRELIERVKKLTEESHRLSRKLIRELEERLEKVRREEELEKVVRDAEKVLRDLKETDERSIRDTERVLRELEKTDRETIKRSRDLLEELERLARKILKDVPDEEVRRILKELRDEVKRDEERNRKNTKDVKDEVDKDRRTNEKNTEDAEREIRRIKEDAR

SEQ ID NO: 2437 - protein, 187 aa, Artificial Sequence; identical to SEQ ID NO: 2436
  Synthetic

SEQ ID NO: 2438 - protein, 187 aa, Artificial Sequence
  Synthetic
SVLEDVRRDVERLRREIEELSKRSHERSRRIIERLEELLKRSHDLSKRLRERLEELLKRVRREELVRRVVEEARRLLKELEKTDRDVVEEARRLVTELEDTDRRTIEESRRALKELEEEARKIRKDVPDEEVRRILKKLRDDVKKDEDDNRRNTEEVRKLAKDIERKLKKNTDDVRKDIKAIEDRLR

SEQ ID NO: 2439 - protein, 187 aa, Artificial Sequence; identical to SEQ ID NO: 2438
  Synthetic

SEQ ID NO: 2440 - protein, 187 aa, Artificial Sequence
  Synthetic
SVLEKVKELLDRLIRELEELVKTVEEIARRLITEVRELTERSHELSRRLIKELKRLLDDVRREEVLKDVVRRAEEVLERLRKTDEDSIRSTEDAVRRVAELAKRVLDKAEEVIRKVREDARKISKDVPDEEVRRILEEITRVLEEIATRLKRILDELRKAVDKDRKDNERNTEEVRKLIEEIKRRLK

SEQ ID NO: 2441 - protein, 187 aa, Artificial Sequence; identical to SEQ ID NO: 2440
  Synthetic

SEQ ID NO: 2442 - protein, 187 aa, Artificial Sequence
  Synthetic
SLLDEVRRKVKEVEDRLRKLVKDSHELSRRLIEEVERLTKTSHELSRRLIEELRELLKRTRTEELVKKVEEIVKELLRRLEETDKRSIERTEELLEELRETDRRVVEEAKRLVKEVEDEARRIKERVPDKDLRDILRKLREVLEEIERRLRKNTEDVKKVVDDDRKRNKDNTDEVRKAIREIEERLR

SEQ ID NO: 2443 - protein, 187 aa, Artificial Sequence; identical to SEQ ID NO: 2442
  Synthetic

SEQ ID NO: 2444 - protein, 181 aa, Artificial Sequence
  Synthetic
SEIERLLEEDTKRLRDWEEAIRKNLEDSEREAKKLKDRVKKLLDDARRDIDRLKKERKDDKDVIKLLDEVLDTVRRLAEDIKRVIEEVLKESRRLVEEVKKVIEEVNRRSKKLVEEIRREEREEILDEVRRRLKTLNDDVERLLREVHERSKKLRETVRKIVEEVEKRITELRDRVRRAAK

SEQ ID NO: 2445 - protein, 181 aa, Artificial Sequence; identical to SEQ ID NO: 2444
  Synthetic

SEQ ID NO: 2446 - protein, 181 aa, Artificial Sequence
  Synthetic
SDIDRLLEEDKKKLDDWRRAIEKNLEDSERRAREIKERLKKLLDEVRREAERLKEERKDDKDVLELIDRVVDTVRKLIEEVERVIDEVLRTSEKLVRDVKRAIDEVNERSKKLVEDARRDEKEDILREIAKRIEDLNKEVEDLLRTVHKESRRLDREVEEIVRRVKEEIDRLIREVREAAK

SEQ ID NO: 2447 - protein, 181 aa, Artificial Sequence; identical to SEQ ID NO: 2446
  Synthetic

SEQ ID NO: 2448 - protein, 181 aa, Artificial Sequence
  Synthetic
SEVDKLLEDDRKALEEWERRITKNLEDSKREIDDIRRRLRKNLEDSRRAIKEMKDRRREDEEVLRLLEEVLERSKRLVEEVEKLLEKVLRDSEKLVREVRRAIREVNKTSAELAKELKREEREEILKRIADEIKRLNDEVKKLLEEVHERSRRLIEELRRLLEEVHRRSRKLIREVEEAAR

SEQ ID NO: 2449 - protein, 181 aa, Artificial Sequence; identical to SEQ ID NO: 2448
  Synthetic

SEQ ID NO: 2450 - protein, 180 aa, Artificial Sequence
  Synthetic
SAEEEIEERLKRAIDRDEESVKRSAEEIKRLIEELKKSVDDSARELKELIERLKKLKKDGVDKSVIDKVVRELTRRVEELHERNRELLERVKETVERLHEENRRTSDEIEERVRELVREVDTKEIKDLLDRVKKEVERSKRKSAKLLKELEDAIKEIEDRSRELLERAREELKRVKDDKR

SEQ ID NO: 2451 - protein, 180 aa, Artificial Sequence; identical to SEQ ID NO: 2450
  Synthetic

SEQ ID NO: 2452 - protein, 180 aa, Artificial Sequence
  Synthetic
DETKRVRDLIRELIKRDEESVRRSARTLEELIRRLEESVKRSKKLVEDVIRKLKKLVKDGVDSDDIRKLVRDVERVVRKVVEENRRLVETVAREVERVHKENEDTSEEVRRTVKELVDEVRTEEAKKLLEDVEEAVERSKRKSRKLLEDARRALEKVKRDSDKLLEDVREEVERVLRTVK

SEQ ID NO: 2453 - protein, 180 aa, Artificial Sequence; identical to SEQ ID NO: 2452
  Synthetic

SEQ ID NO: 2454 - protein, 180 aa, Artificial Sequence
  Synthetic
DELEKIAEELDKLIRDDKKSVDESKRLLEDLIRRDRESVEESERELTELRRRLDELRRRGVDRDEIRKALEEVKRVVEKLVEENERSTEEVKRTVDRLHRENERTSEEVRRRVEELVREVDTREIKELLKRVRELVRESKERSRAVKERLKEEVKESERRSRELLERVRRDLEKIERDTR

SEQ ID NO: 2455 - protein, 180 aa, Artificial Sequence; identical to SEQ ID NO: 2454
  Synthetic

SEQ ID NO: 2456 - protein, 180 aa, Artificial Sequence
  Synthetic
SELERIKKELEELIERDKKSVKDTARRLEEMERRLRESVRKSEEDLRRMIEKLEKLVTDGVEEESIRRLIKEIIRTAKKLHDDNERLLKEVEEVVRKLVKDNEDTSKEIEDRVRELIREVKTDEARKLLEDVKRLVEESKRESKRLLDEVKKVIDRLRERSEKLLRDVERALREAEERTR

SEQ ID NO: 2457 - protein, 180 aa, Artificial Sequence; identical to SEQ ID NO: 2456
  Synthetic

SEQ ID NO: 2458 - protein, 180 aa, Artificial Sequence
  Synthetic
EEDERIRRDLEEAIRRDRKSVEDTREELRKMIEDDERSVRDSEEKLKELIKRLEELVREGRDSKDIEKALRDVEDTVRRLVRENEKSTEDIEKRVKELVEENKRTSEEIERRVEKLVDDVRTDEIRELLRRVRELVKKSKDDSRKLLEDVKRELERSKEESKRLLDEVKRAIDEIRERDK

SEQ ID NO: 2459 - protein, 180 aa, Artificial Sequence; identical to SEQ ID NO: 2458
  Synthetic

SEQ ID NO: 2460 - protein, 180 aa, Artificial Sequence
  Synthetic
SELERIEEELKKLIEDDKKSVDDTRKELDRAIEEDKRSVERSERDLRRMIKKLEDLVRRGRRDEDIRKLLEDVKREVKRLVDENEASTRTIKRRVEELDKRNRETSERIRKRVEELVREVKTDEIRKLLEEVKKLVEESKRTSEELLKEVDRRLRRSEDESRKLLEEAKKAVKRIEEETR

SEQ ID NO: 2461 - protein, 180 aa, Artificial Sequence; identical to SEQ ID NO: 2460
  Synthetic

SEQ ID NO: 2462 - protein, 180 aa, Artificial Sequence
  Synthetic
DELEEIKRRLKELIDRDRESVKRTEDELRELIKRLRKSVDDSRKEAERLIRELERLVKEGVDRRDIERLIREIKKRVKELNDENRRLAEEILRRVEKLDKENKETSEEIRKRVKRLVDEVRTDEIRELLERVERALRESKERSRKLLEDVRRAIEKVERDSEKLLKDVEEALERVKRERD

SEQ ID NO: 2463 - protein, 180 aa, Artificial Sequence; identical to SEQ ID NO: 2462
  Synthetic

SEQ ID NO: 2464 - protein, 180 aa, Artificial Sequence
  Synthetic
REEDEIRRELKELIERDERSVEETRKELEELIRELEELVKRVEDDLRRLIEKLEDLRRKGRDRREIERLLEEIEKRVTELVKEIEKLIEDIRRRVDELDKENRRTSEEIRKRVKELIDEVRSDEARKLLKEVEELLRRSKRKSEELLKRVEELLRKAREDIRRLLEEVKRVIDKVKKDTD

SEQ ID NO: 2465 - protein, 180 aa, Artificial Sequence; identical to SEQ ID NO: 2464
  Synthetic

SEQ ID NO: 2466 - protein, 179 aa, Artificial Sequence
  Synthetic
SDVERIIRENERKAKEIKDKVRKVIEDNERSVEEIKEKAERIVREVRKTLEEIRKRIRSELMRRLAELIREIEKRIEDVLRRIEKLHKDVSEAIRRVLKEIEDLHREVTEEVKRVRDANSKEMVERVERLIEEVARRSEELLRRIAKLVEDVNRESERLIREIKELAREVEKELKERAD

SEQ ID NO: 2467 - protein, 179 aa, Artificial Sequence; identical to SEQ ID NO: 2466
  Synthetic

SEQ ID NO: 2468 - protein, 179 aa, Artificial Sequence
  Synthetic
SEVDDIIRKNEELLKKIEDDARKILKENEERVEEIKERIKKLIEDDRRKLEEIKRRIRGELAERLRELSRTTVELLKEVLRRIETLHKKVTDDLKKVLEDIRRLHEEVTKELRRVKDANSEEALDRIRKLIEKVKRESEKLLEDIKRLIDKVDKDSERLLRTVKKLSEDVEKELKDTTK

SEQ ID NO: 2469 - protein, 179 aa, Artificial Sequence; identical to SEQ ID NO: 2468
  Synthetic

SEQ ID NO: 2470 - protein, 179 aa, Artificial Sequence
  Synthetic
SEVDEIIKDNERELDEVRREVEEIDKENKERLKEWVEEAREILDRLRKDLEEIRKRVRSRLVDELERLIREVEEVIRRVLERVRRLIEEVSKIITDVLREVERLHEEVTKELRKVEDANVREALDRLRRLIEKVVEDSRRLIKKVDELLKKVNKEIEDLVREVKDLVRRVKEELDRRVK

SEQ ID NO: 2471 - protein, 179 aa, Artificial Sequence; identical to SEQ ID NO: 2470
  Synthetic

SEQ ID NO: 2472 - protein, 179 aa, Artificial Sequence
  Synthetic
EEAERILKKDDDSVRKIKKEADRIVRENERLAEEIKKEVRKIIEDDKRTLEEIEKRIRSKLVEDLKRLSRETLEELRRVLEEAEKLHEEVTRLIRDVLRKIEELHRRTKKKLRDVRDANSEEMLRRVEEDLRRVNEESERLIRRIAKEVKRVTDESKKLLEEVKRISETVIEKMKEDAR

SEQ ID NO: 2473 - protein, 179 aa, Artificial Sequence; identical to SEQ ID NO: 2472
  Synthetic

SEQ ID NO: 2474 - protein, 179 aa, Artificial Sequence
  Synthetic
DEVEEILKRDEEALRDIEKKVREVDERNRREVEKIKEKVKEIIKRDKDELDEIRKRIRSEKARELEELSDRTLKTLKKVLDDIEREHREVSRDIKKVLEDIKRLHDETLKELTRVRDANSEEVLKRLEEEARRVNKTSKDLLKEVEDKIRKVNRKSEELLKKVEELSRRVIEEMRRRVK

SEQ ID NO: 2475 - protein, 179 aa, Artificial Sequence; identical to SEQ ID NO: 2474
  Synthetic

SEQ ID NO: 2476 - protein, 181 aa, Artificial Sequence
  Synthetic
RELEELIEDLRRALERSREEVTRLLKDLEDANRRSHRHNEELIKRLRKILKEARDRVKRDNVDERVVRRVERLVKESEKDNRRVLKESSDLVKKIVDELREVLKRSTELVERVVDLIRKLREEEALKDLRRVVEEVKKRSTDLNREVAKVIEEVKKRSEDLNRELEKLNRDIEERIDRETR

SEQ ID NO: 2477 - protein, 181 aa, Artificial Sequence; identical to SEQ ID NO: 2476
  Synthetic

SEQ ID NO: 2478 - protein, 175 aa, Artificial Sequence
  Synthetic
REEEEARKILERLEEELKRSLDEVRDLIEKATKESKDVNEKIRKLLEELKEELRKVVEDTGGNVEEIDKILKKVKKDLDDLLKESEDVARKVKKLLDELHEKNREMLERVRRELERVVKVEELVKDVERKLKRVAEESRKLVEDLRRRIKESREEIKRLVEDLERVLKEIKEEAK

SEQ ID NO: 2479 - protein, 175 aa, Artificial Sequence; identical to SEQ ID NO: 2478
  Synthetic

SEQ ID NO: 2480 - protein, 175 aa, Artificial Sequence
  Synthetic
REEEEALKRIRETSERIKRVVDDLHRRNKKSTDDIKRRVDELHKRNEKIVREVLDVIRRRGGEAEEVKELVERLRRSVEDSLREVTRLVEEDKRSVDESLDELRRLLKENRDLVERLVDSEVLRELDRRTKELKRRADELVTENRKLSKELEDEIRRLAERNRDAIRKIDKAVKE

SEQ ID NO: 2481 - protein, 175 aa, Artificial Sequence; identical to SEQ ID NO: 2480
  Synthetic

SEQ ID NO: 2482 - protein, 175 aa, Artificial Sequence
  Synthetic
DEEERALETIRDTSRRIEERIDDLRRRVEKIVRDIEETIRRLHEENRKIAERVKEVIERRGGKAEEVKKLVDELRRSVKKSLDDARKLVEDLKRVIDKVLEELRRLLEEDKRLVDELVDSEVLKELEDETRRVKERVDKIIKELEERVEDVERKVRELVKRNEELLKKIKDDADK

SEQ ID NO: 2483 - protein, 175 aa, Artificial Sequence; identical to SEQ ID NO: 2482
  Synthetic

SEQ ID NO: 2484 - protein, 175 aa, Artificial Sequence
  Synthetic
SREEDAVRKIRKLVEDVTRETKKMLEDVRRLVETVEKLTDDLLEEVRRLVEEVEDEIRRAGDVEERARELVEEIKRIIDEVRETSERLDREIEDLLRKVEKRARDLDRRIKEIIDREVDSELLREVEDLLRRHHETVRRILDEIRRLIERHHRRVREILKELDKLVKDAADEVRR

SEQ ID NO: 2485 - protein, 175 aa, Artificial Sequence; identical to SEQ ID NO: 2484
  Synthetic

SEQ ID NO: 2486 - protein, 188 aa, Artificial Sequence
  Synthetic
SEVERVEEEVKRLATEVEKSNRDSLREIEDLNRRDRDISRRVKEEIERLIREVKKLIDDRREEEAVREVEKVIREVLRRVTELIRRLRETVKEIRKRVEELIRRDEELVDRVLKEVRRLIEELRKRNDEKKVKELLERAKKIADELRKHIKRTLKKVEEEVEKNKRDNDKLLEEARELIKRLDDEVRR

SEQ ID NO: 2487 - protein, 188 aa, Artificial Sequence; identical to SEQ ID NO: 2486
  Synthetic

SEQ ID NO: 2488 - protein, 188 aa, Artificial Sequence
  Synthetic
DDLERVRKEIEDLNREDKRRSEEVRREVKKLIEDLEDSNRRSLEEVDRLVETVRELIDRERREEAVDKVRKVIEEVLRRVRELVERDERLVDEVLRRVKELIRELRETVKEILKRVEELIRRLEDRNDKEKVKRLLRTVRELMKKNKRDNDRLLKEAEDEARRVKRHIKESLKRIEEEIRRLKERLER

SEQ ID NO: 2489 - protein, 188 aa, Artificial Sequence; identical to SEQ ID NO: 2488
  Synthetic

SEQ ID NO: 2490 - protein, 188 aa, Artificial Sequence
  Synthetic
DELEKVAEDIKKLNKEDRDRSDEVRRAVKELVKEVEKKDKDIKRRAEELIREIKEDIERRREEEVVDRVREKIKKVLKEAEDLIRDSKRVIDEVLERVERLIRELEKTLEEILRRVRKLIRDLEEKNDREKVRKLLEDVEREARKNEEDNRKLLKDIREEIRRLADRSRKTLEDAKRLIEKIERDLEK

SEQ ID NO: 2491 - protein, 188 aa, Artificial Sequence; identical to SEQ ID NO: 2490
  Synthetic

SEQ ID NO: 2492 - protein, 172 aa, Artificial Sequence
  Synthetic
SEVEEVLKEIEEMLRDLERRVKESDEENRDSLRKIREDVERVDEENRDTLRRIKEKVKGELLKEVEELIRELSRELEKVLKEAEDAVRELSKDNRRVLEEIRKAVKRLLDLVREDGSEKVMKEVRDVIARLRDELEKVTEDSRRVNKELKKRLEDVVREIRRANEELDERVR

SEQ ID NO: 2493 - protein, 172 aa, Artificial Sequence; identical to SEQ ID NO: 2492
  Synthetic

SEQ ID NO: 2494 - protein, 172 aa, Artificial Sequence
  Synthetic
DEVEKVLEEIKRALDDLRKKVEESKREIKEALKRVEKHTRDSDTDNKRTLREIEERVKSKDLERVRKLVEELSEENERSLREVRRVAEELLEINERVLEEVERVVKRLLDLVRRRGEERVVEEVRRVLEELRRRLEKVTEDSRRAIERLEREDRRVSKKSKDVNKKLDDDVR

SEQ ID NO: 2495 - protein, 172 aa, Artificial Sequence; identical to SEQ ID NO: 2494
  Synthetic

SEQ ID NO: 2496 - protein, 178 aa, Artificial Sequence
  Synthetic
DSARKVEREVEEAARRVERTLEDVTRKVRELHDEVRRRLEEVKRRIEDLHRRVDEEPRGKELKEKLDEVHKRSEDMLREVEKIVRKVNTESKKLLDDVRRELEDVLRRVKELLRDVLSDKDTVKRVLDDVARIVKRIEEDIKRVLEESKKLVRDIEKEIRDVKKESRDLVREIREKIR

SEQ ID NO: 2497 - protein, 178 aa, Artificial Sequence; identical to SEQ ID NO: 2496
  Synthetic

SEQ ID NO: 2498 - protein, 178 aa, Artificial Sequence
  Synthetic
SSAEEVKRELEERHRDLRRTDEELRKDLDRVHDRARKILEEIEKKIRDMHRKVKERERGEDLERELDEVNKRSEELVTRAKEEVTRVNERSKRLVERSKEKVAEVNKRSETVLRDVLSDERKVKKVRDESNKVVEEIMRHSDKVLERSRRLVEEIRRRLEEVLRTSREVVRRIRDEVR

SEQ ID NO: 2499 - protein, 178 aa, Artificial Sequence; identical to SEQ ID NO: 2498
  Synthetic

SEQ ID NO: 2500 - protein, 172 aa, Artificial Sequence
  Synthetic
REVEEVLKEIEEMLKRIEDDVRRVLEEIKDVARRNEDEVRKLLRENEESVEEIKRRVSEELLRKVVTLSEDVVRKLAEVVKDTLRKIETVVKKVEKVVEKIRRDIKRVAKKVRKDSDRKVVEEVRKLLTDLKRLLEEVVKEVRKRLKELHDRTRTVAEEIRDINKKLKEEVN

SEQ ID NO: 2501 - protein, 172 aa, Artificial Sequence; identical to SEQ ID NO: 2500
  Synthetic

SEQ ID NO: 2502 - protein, 185 aa, Artificial Sequence
  Synthetic
SSVDEVRRTIEELIRRVEELVKRSKDHVDETERRVKELVRRSHELTKEVIERVEELLRRLKQRDVLEDILRRVKKLVDDVHESNRRVLEEVKRLVDENRESNKKVLEDVTRAVEELERLLRDKVSDEDKVRKLVEDLRRALEKIRREIEKSTEESDRVLRRIEEEIRRDSEELKRALREAEEEVR

SEQ ID NO: 2503 - protein, 185 aa, Artificial Sequence; identical to SEQ ID NO: 2502
  Synthetic

SEQ ID NO: 2504 - protein, 184 aa, Artificial Sequence
  Synthetic
SEVEELLKEVERLVREVEERVRRLHETDRKLLEDVKRKVEELHREDKKLADEVREAVKRRRDEEAVERIERLLREVEKHSDETVKEVKKLLDEVTKHVEDSNREAERLLREVRELVKEVLRRAGDNEDVERLRRELEKVAEKIRRLVEANRKTVEDARREIEKLLEENRRELDKVRRDVEREAK

SEQ ID NO: 2505 - protein, 184 aa, Artificial Sequence; identical to SEQ ID NO: 2504
  Synthetic

SEQ ID NO: 2506 - protein, 188 aa, Artificial Sequence
  Synthetic
KEVDDLLKEVRRLVREVEKELKRLHDENRKSSEEIARRLEELHKESKELVERVKETLRDLRKDSGDERVRREIRRLVKEVEDVVRRSIREAEELVERDERSVKRSIEEIRRLVKEVEDFVRDVIRKIRDEKVVRDLEREVREALRRLEEILRRDEDDVRRSREELKRIIDENREEVKRVLRELEETLR

SEQ ID NO: 2507 - protein, 188 aa, Artificial Sequence; identical to SEQ ID NO: 2506
  Synthetic

SEQ ID NO: 2508 - protein, 182 aa, Artificial Sequence
  Synthetic
SEVDELVERNERLVDEVRRRVEDVARKLEKVSRDSDDLVRRSNEELEDRLRKVEKRVREERDAKELVEKLIREVRKVLEESEKLVRDLIKKNEDVLREIEKEIRRLSKENEDVLREIERRIEDKKKLDEIRERSKRANDTLRKLLEDIRKRVEDSIRRLDELLKRSETRVRDIIKKLEDELR

SEQ ID NO: 2509 - protein, 182 aa, Artificial Sequence; identical to SEQ ID NO: 2508
  Synthetic

SEQ ID NO: 2510 - protein, 182 aa, Artificial Sequence
  Synthetic
DEVDELERRNERLAEDVRRKVREVEERLKELSKRSMDIVKDVLRRLKELVDRVEKKVREKRDDEELVRRLIKEVRRVLEEAKKVVKRLIEENRRVLEEIKEVVERLSRKNEEVLKRIRERISDEKKVEEIREKSERVNRDLEDKLRKIEEKVKESEKRLRDLLREIEERIKRAIEKLERDLK

SEQ ID NO: 2511 - protein, 182 aa, Artificial Sequence; identical to SEQ ID NO: 2510
  Synthetic

SEQ ID NO: 2512 - protein, 182 aa, Artificial Sequence
  Synthetic
SKVEELTERLRRLSKRSEEEVEKSNKDNDELVRRVLKRVKEVMRELEKLVEKVKEDVRRERDSRELVKKLIDEVRRVLEDARRVVKELSKENERVLRESEKLVRELIKENERVLKELEKRIDDKETLDRIRKEVEDSIERLKKLLDDSRRRSKEANDALRKLLKEIEDTIRRAIEELERARR

SEQ ID NO: 2513 - protein, 182 aa, Artificial Sequence; identical to SEQ ID NO: 2512
  Synthetic

SEQ ID NO: 2514 - protein, 182 aa, Artificial Sequence
  Synthetic
SRVEELTEENRRLAKRLKEVVKKVLDELRRRVEEVKERVERSNKKLRDLVREVDERVATKRDVKELVEKLLREIEKVLRESEKLVRDLIRDVRRVLEEVKKLVKEVSDRNREVLEDIKRRIDDEEIVRRIEEESKKVNRELEELLRKIEDDIRKAEEELRELVERSKREVDKALDDIDRRTR

SEQ ID NO: 2515 - protein, 182 aa, Artificial Sequence; identical to SEQ ID NO: 2514
  Synthetic

SEQ ID NO: 2516 - protein, 182 aa, Artificial Sequence
  Synthetic
KEVDDVKKELDDVDREVKELIKRAHDKNRKVVKEVEDELRRLTEDDKRVADKVRELLKKVRDKEEVVRRLLEEIERSLRKIEEDVKKLLEKIKRSLEESRELAKELLEKVARVLDKIKKTITDKDKMKEVEDEVRKVLDTIRKLLKRDEEAVKEALDKVKKMLDDARRHSEKVLREVEDTLR

SEQ ID NO: 2517 - protein, 182 aa, Artificial Sequence; identical to SEQ ID NO: 2516
  Synthetic

SEQ ID NO: 2518 - protein, 178 aa, Artificial Sequence
  Synthetic
SEVEELLKEVRELARRIEEEIKKLHRRNEELARRIKETIKRLIDENRKLAEDVRRDSGPDDRLRDLVRRVAEHVKESSDRIKELVDRVRRHVKKTSKEVDELLKKVERVVEEVLRRVGDGEDAKRIRDELERVRKSIEKLIRDNERFLEKVERDIRKLIEENEDLLRKIKEDVERKEK

SEQ ID NO: 2519 - protein, 178 aa, Artificial Sequence; identical to SEQ ID NO: 2518
  Synthetic

SEQ ID NO: 2520 - protein, 178 aa, Artificial Sequence
  Synthetic
DEVRELLETVRKLAEDVERRIRELIKENERLAREVERRIKELHDRNRELAREVEEKTGPDEELRRLLKEVEDHVRRTIREVEDLLRRVKKHVEDTTREIAKLLREVEEVVKDVLRKTGEGKEAREIERELEKVKDTIRRLLERNEELLEEIARRITKLLEEDKELLERIERRIAEKLK

SEQ ID NO: 2521 - protein, 178 aa, Artificial Sequence; identical to SEQ ID NO: 2520
  Synthetic

SEQ ID NO: 2522 - protein, 185 aa, Artificial Sequence
  Synthetic
SEVETLLRELKRLAEEVKKRIEELDRELKKLSDDVRREIERLIRENERLAREVLKEIRDLKGDKKRIEELLREVEKSVRETSKTIRDLLRRVEKVYEDVLRTIRELLERVRRVAEDVRRKIKERGKEEALREIEKLLRKVEEDVRRLIEKLKKSLEDSARDVDRLVKENERILEEVAREVEKLLR

SEQ ID NO: 2523 - protein, 185 aa, Artificial Sequence; identical to SEQ ID NO: 2522
  Synthetic

SEQ ID NO: 2524 - protein, 185 aa, Artificial Sequence
  Synthetic
KEVEDLLRDLKRIVDEVEKRIRKLIEDNKRLADEVRERIERLHKRNKDLAEEVLKRVRELKGDDKRIRELLKEVEDSSKESVERIEELLREVEESVKRSSREIERLLEEVARLAEDVIRKAEERGKKEVVKRIKEELDRVREEVKKLIKRNEELLKKVAEDVRRLLEKDKKALEEIKRRVEDELR

SEQ ID NO: 2525 - protein, 185 aa, Artificial Sequence; identical to SEQ ID NO: 2524
  Synthetic

SEQ ID NO: 2526 - protein, 181 aa, Artificial Sequence
  Synthetic
DELEELRKRVKENEDEVEKVLRELHKLNEENKEEVDRALEELRKRVRDIEEEIKKEPVDEELLRELERLVDELRRIVEKVIEDAKKLTEESNELNRRIIEESRRLSKELRKIVEDVSRVENRKDVVDKVRKVIEEVHKRSRDLAKEAREVNRRVHETTKKLVEDVRRVIEKVEEDVRRKVK

SEQ ID NO: 2527 - protein, 181 aa, Artificial Sequence; identical to SEQ ID NO: 2526
  Synthetic

SEQ ID NO: 2528 - protein, 181 aa, Artificial Sequence
  Synthetic
SSLEEADKKVDKNRRDVDRALEELHRRNKRNEEEIRKALKENRETNKRLLEEIRKNPVERELLEELEKLVRDSLRVSEEVIRDLERLTRESNRLNKEVIDESRKLSERLKDIVRTMSRVENREDAVRRVDKVIKEVHDESKRLVDELRDRNRRVHDETRRLDEESKKINRTVEELIRRKET

SEQ ID NO: 2529 - protein, 181 aa, Artificial Sequence; identical to SEQ ID NO: 2528
  Synthetic

SEQ ID NO: 2530 - protein, 181 aa, Artificial Sequence
  Synthetic
DKVEELLKRLEESTRRILKRVEELLRENERLAREVRKTVERLLEENRRLIEEVERRVRRDKKREAIEKLVRDVSRSADESSKRIKKLLDEVEESVRRSSKEIKRLLDEDRKLVEDVERRITDEKLRRELRRLLRESEKKIKEMLDRNKELLDEIERTIRELLKRNEDLLREVRERAKEADK

SEQ ID NO: 2531 - protein, 181 aa, Artificial Sequence; identical to SEQ ID NO: 2530
  Synthetic

SEQ ID NO: 2532 - protein, 181 aa, Artificial Sequence
  Synthetic
DEAEDLLRKLKRSTDEIKKTVEKLLRENEKTSRDIEREVRELLRRNKELAERVEEVARRENDKKKIEELLKEVERSARESSERIKKLLRDDEKSVKDSSDEIKRLLKEDKELVERVIRRITDEKVRRELERLLRESEKEIRKLLKRNKELLDESRDTIREMLERNKRLLEEVRKKIEKMKE

SEQ ID NO: 2533 - protein, 181 aa, Artificial Sequence; identical to SEQ ID NO: 2532
  Synthetic

SEQ ID NO: 2534 - protein, 181 aa, Artificial Sequence
  Synthetic
SEAERLLEELKRSTDEIKKRVEKLLEDNKRTSEEIEEEVRRLLETNRKLIEDVKRKVERDRDKDEIKRLLDEVKKSAEDSSRRIEELLKEDKKSADDSSEEIKRLLDEDRKLVEDVIRRITDERVRRELEKLLRDSERKIKEMLERNEKLARDSEERIRRMDDKNKDLLRRVKETIERKLK

SEQ ID NO: 2535 - protein, 181 aa, Artificial Sequence; identical to SEQ ID NO: 2534
  Synthetic

SEQ ID NO: 2536 - protein, 181 aa, Artificial Sequence
  Synthetic
DEVEDLLRKLEESTRRILERVKKLLEDNKRLIDRVRKEVERLLRDLKRLAKEIDEEVRRDNDKDRIRDLLREVERLVREVIKRIRKLLEEVKKSIEDSSREIKRLAEDDERLVREVIARVTDERVIRELEELLKESKKRIDDALRENEKLLREVKRRIEEAERTIKELLEEIKRKIAEEEK

SEQ ID NO: 2537 - protein, 181 aa, Artificial Sequence; identical to SEQ ID NO: 2536
  Synthetic

SEQ ID NO: 2538 - protein, 182 aa, Artificial Sequence
  Synthetic
KEAEELKRRLEDLVRRVEEDNRRLLEEHKKLVKDVRKRAKELLETHKKLVEDVTREVRKSTDSDVIRRLLEEIHRLVEEILREIEELLKRLHDLARRILERVRDTLRELEKLVRKILKDIKDLREVLEDLKRDLERARKINEESEKRIKDSDKRVHEEIRRVLEEVKKSDEEVRRRADRERE

SEQ ID NO: 2539 - protein, 182 aa, Artificial Sequence; identical to SEQ ID NO: 2538
  Synthetic

SEQ ID NO: 2540 - protein, 181 aa, Artificial Sequence
  Synthetic
REVDELRKELERIVKEVEDVIRDLNKKLKDILKDVKDKSDELNERLKKIVEDVRRLIRDVKGNRKDIRTVLERVKELVEETIRRDEELLDRVRKLVEETIRRIKRMLERVEELVKRVISRVRDKMVEELERLLDEARRRVEEAIRSNEELLKRIEEESERTVRSNEKLLKEAEEEVRRAEE

SEQ ID NO: 2541 - protein, 181 aa, Artificial Sequence; identical to SEQ ID NO: 2540
  Synthetic

SEQ ID NO: 2542 - protein, 181 aa, Artificial Sequence
  Synthetic
DEVEDVERDLKRILKEVKDRSDELIERNRKSTEDMKRRSKELNEELRRIIEDIRRLIRDTKGDKKKIEEALERVERLARRTIEEDKRVLEEDKRLVDRLLDTDRKLLKEVKDLVKEIIKRVRSKMVERLERLLEEAERTSRETLKRLEDTLRESEKRSRETVRSNEELVKEVTKEVEDAKK

SEQ ID NO: 2543 - protein, 181 aa, Artificial Sequence; identical to SEQ ID NO: 2542
  Synthetic

SEQ ID NO: 2544 - protein, 181 aa, Artificial Sequence
  Synthetic
DEVETVLRDNERTTKEAEDDVRRLNEELKEIIKRVREVSKRLIDELRRILEDVERRAREVKGDKDDIDRLLKEVEELVRRVIRTDEELLKRVEKLVRETIKKSKDVVKEDEKVVRRLISRIRSDFVERLRRTLEESKDKARRNVESNRELLERARKDSKRTLEELERLLETVRKSVDEMKK

SEQ ID NO: 2545 - protein, 181 aa, Artificial Sequence; identical to SEQ ID NO: 2544
  Synthetic

SEQ ID NO: 2546 - protein, 178 aa, Artificial Sequence
  Synthetic
EREERLEEKLKKSVDDSRELIERVLRKHEKVSDKVRRELERILEDHKRVLEEIKRVLKDRRKDKEVIRDLLRKIHEVATRLRERIKRLLEEVRRSVEEIKELVDRLNKHNERVIREVRRDSDVERLKDLLDKAHEEDRRAKEEVKRLLEDTTKKIKEFLDRVERSNEEVERELEKAER

SEQ ID NO: 2547 - protein, 178 aa, Artificial Sequence; identical to SEQ ID NO: 2546
  Synthetic

SEQ ID NO: 2548 - protein, 180 aa, Artificial Sequence
  Synthetic
DKDRKIKRIIEEVKKTIRKLLDDVRRINEEVLKELRKLLREVEEINKEILRRLKELVKTSKSDDVIRKARELIKRSREINKEVIDRLRKLVEDTRRINKTVIDEIKKLIDDVAEIIKDVTDEKVKKELDDEIRDAERELREAKKDMDRSNEELREEIKRAEERLRRLDEKLREEVEKDRK

SEQ ID NO: 2549 - protein, 180 aa, Artificial Sequence; identical to SEQ ID NO: 2548
  Synthetic

SEQ ID NO: 2550 - protein, 187 aa, Artificial Sequence
  Synthetic
SVKEEIKEMLKKIKRHSDEALKKNKETLDRDRKRVEDVIRELKKLLDEIRKRVEDVRRRVKDEDKLREIEDVLRRIEKRVTDLIREVRDSLRESEELSKRLLDKIKRSLDEAKRLVEELLEEVDRDDREEIARKVRELLERVLRDDRRVVREVEELNRRMHKKNEEVAKKVRDLLREVRKELEDVDR

SEQ ID NO: 2551 - protein, 187 aa, Artificial Sequence; identical to SEQ ID NO: 2550
  Synthetic

SEQ ID NO: 2552 - protein, 188 aa, Artificial Sequence
  Synthetic
REAEELLKELDEIIRRVEEEVKRLLDKVRETTKRIEEEIRKLDEDLKEIIREVEERIRKLKSDSGDERVRDKVRKLLRRLERVATESIRRIRELMKRDEDVIRRVLERVDELLKEIEKLIKEVRDRTDDEEVERRIKRLREKVKKKIDELKERVRRLLEESRRKAERVEESNRDLLRELKERLEERRR

SEQ ID NO: 2553 - protein, 188 aa, Artificial Sequence; identical to SEQ ID NO: 2552
  Synthetic

SEQ ID NO: 2554 - protein, 175 aa, Artificial Sequence
  Synthetic
SFEEEIKKIADEVEKRIRDAEKRSKDILEKSREVVERAKRRSEKLLRDAEREIKRVMEEKDDERIRRLLKELRDVVKRSKDLIDDLLRENKRVVDDSLRLIRELLRRLREVVRRLEEDGKDEMLRRLKKVTDDVRKRLEDSHRRLEKVTEESRKRADESHEELRKLIEEVREKLK

SEQ ID NO: 2555 - protein, 175 aa, Artificial Sequence; identical to SEQ ID NO: 2554
  Synthetic

SEQ ID NO: 2556 - protein, 175 aa, Artificial Sequence
  Synthetic
SSKERIEKILREVKREIEEAEKRSRDILKDSERIMRDVKRTTDDLLRKAEEIIREVAKRKDDDRVRDLLRRLRDVVRRSRELIKKLLKDNRKAVEDSKRLIKKLLDELRDMAEKLKKDGDEEVLKRLRELIDTVRRVLEESHKRLRELTKRSEEEARRVNEELRELIDRVRREAE

SEQ ID NO: 2557 - protein, 175 aa, Artificial Sequence; identical to SEQ ID NO: 2556
  Synthetic

SEQ ID NO: 2558 - protein, 175 aa, Artificial Sequence
  Synthetic
DVEKRIEELRERSDRIIDEARKRSEKLLRESEKMMRDVDKTTEDILREAEEEIKRVLDEKDDDRIRKLLEEIRKVIKESKDVIRKLLKENKEAVDTSRRLIEELLKRNREAIEKIRDKGEERVLKDLERLSKESEDELRRSHEELKRLTEESRETIEDVNRKIKEKIEDVKRKLK

SEQ ID NO: 2559 - protein, 175 aa, Artificial Sequence; identical to SEQ ID NO: 2558
  Synthetic

SEQ ID NO: 2560 - protein, 186 aa, Artificial Sequence
  Synthetic
SAEDSIRELLERDERLLEEARKEAKRLNEENERLLERIEETVRRLLEEIKRLLDDIRKKIKGEKLREIEELVRRVKRTIEKLLEEVKKSVEDSSKRIEELLEAVERSVERTKEEIRRLLDEVRKDRKEELVKRVEERIKRLHDENRRLVKEVIEEVEKLIRDNEKLAEDIEREIRRLLKELDEAAK

SEQ ID NO: 2561 - protein, 186 aa, Artificial Sequence; identical to SEQ ID NO: 2560
  Synthetic

SEQ ID NO: 2562 - protein, 181 aa, Artificial Sequence
  Synthetic
SEVEEIVKEIEKLIKENEEVVREVEKEIRELIKRNREVVERIRKELEKMLRELERLAREGADRSLIRTLVREIEKEIERLAEEIRKTTEDINRRIEELLKRIKETTKEINDRIRELLKRIDRGEARERIKELVRRNERLLREVEKRLKTLSEENKKLLEDAKRELDRILKEVRDLLRETER

SEQ ID NO: 2563 - protein, 181 aa, Artificial Sequence; identical to SEQ ID NO: 2562
  Synthetic

SEQ ID NO: 2564 - protein, 181 aa, Artificial Sequence
  Synthetic
SRVERLSAEIKKLIDENRRVAEELLRELEKLLKDNEDVVREVERRIRDSSRKLEELARAGAPEEDIRRLVEESKELIKRLLRDIERTTREINEVIKRVVETIRRTTDEINRRIEELVRKIDRGEAREDMDRLVRENERLLKKVEDDLRKLSEENKRLVDRARERLARLLEENERLVDERRK

SEQ ID NO: 2565 - protein, 181 aa, Artificial Sequence; identical to SEQ ID NO: 2564
  Synthetic

SEQ ID NO: 2566 - protein, 172 aa, Artificial Sequence
  Synthetic
REAEEALKRVKEILKRIAEEVERVLTEVKKLSEDVKRRVEEVLTRLKRSTEEIERKKGPKEDLERLVKDDERTIKELLKEVEELIRRVDRLSEELLRKVEKLIRDLSKTLRDVGVDKKLVEDVDREIKKLLEEVTKKAKRLNDENKRLLDDVRDKARRVIEESREVLERARK

SEQ ID NO: 2567 - protein, 172 aa, Artificial Sequence; identical to SEQ ID NO: 2566
  Synthetic

SEQ ID NO: 2568 - protein, 176 aa, Artificial Sequence
  Synthetic
SSEEEVEKLERKVRAVIRKAEEDLEDSLRKSEKMAKEVTDEIEKSRRKAKAVIDDARRRNVDTDLVRELLRKLEETTRRVKKLVDELLEENRRTTERLKELVKRLLDELDEVVKEIARRGEEEVLKKVEELIRKVEKVIRTVLEEDRKVSEDSLRKMRKVLKEDEDVIKEVRDRAQ

SEQ ID NO: 2569 - protein, 176 aa, Artificial Sequence; identical to SEQ ID NO: 2568
  Synthetic

SEQ ID NO: 2570 - protein, 176 aa, Artificial Sequence
  Synthetic
SMKEEVDRLLKEVKDVIREVRERIKKSEEDVRRVIDDARRKLEELSKRAREVVEEVRRRNVDDEAVERLLRKVDRTSKELKKTVDELLKELERTTRRVKELVDRLLEKLRDVAEKLKKRGEEEVLKRVKELIDEVRERIEKVLTDDRRLIERVKREIERVIRENEKVIRDARERLR

SEQ ID NO: 2571 - protein, 176 aa, Artificial Sequence; identical to SEQ ID NO: 2570
  Synthetic

SEQ ID NO: 2572 - protein, 178 aa, Artificial Sequence
  Synthetic
DEVEKLLRDLEELDRDIERKVRELLKRNKEVLDDIEREVRRLEKELRRIIKEVADVIRKTTDKRTVDKLLKELEKILKEVLDRVRRLLEEAKESLDRSREEIERLLEESKTLVDEVRRAGIDKKEVDKIEKHSRDLIERAKRETDRLLEEAERLMREVVDRVRKILEEAKRLIDEARR

SEQ ID NO: 2573 - protein, 178 aa, Artificial Sequence; identical to SEQ ID NO: 2572
  Synthetic

SEQ ID NO: 2574 - protein, 187 aa, Artificial Sequence
  Synthetic
DVEDEARRLEKELRDILREIADDIRKLLEENKELLKESEKDIRRAEKAIEDILDDVRKRITDEKKLREIEKLAEDVKRRVRELLEEDRKSVEDTTRRIKELLREVKELVERVIKRVRELVDEVRKDKKEKLLTEVSEEVKRLADELRELARRVKEEVKKLLDDNRETTDRIRRTVTELLEELKRKTK

SEQ ID NO: 2575 - protein, 187 aa, Artificial Sequence; identical to SEQ ID NO: 2574
  Synthetic

SEQ ID NO: 2576 - protein, 187 aa, Artificial Sequence
  Synthetic
SVDETITEVIKRIEDTLRKVKEDADRLDERNKALLEDSKKKIKEVEEELRRILEEVRRKVKDEKKLREIEELVRRVIEEVRRLLDEDRKSVERSSRRIEELARRVEDLVRKVIETIRRLMAEVRREERRELVEEVKERAERLLKELEDLIKKVKEEVERLLEENRKTTEDILKRAKDLARELRKRTK

SEQ ID NO: 2577 - protein, 187 aa, Artificial Sequence; identical to SEQ ID NO: 2576
  Synthetic

SEQ ID NO: 2578 - protein, 187 aa, Artificial Sequence
  Synthetic
DAKESIEEVKKRLEKSLEDSERESRKTLEENKDLLRRSREEIKKALDRLKDLLRRAEERIDDKDKLEKVKRLVERVEEEVRRLMREDEKSLEDSLETDKKLLREDEEVVKRIIDTVEELLRRVEEEEREKLVEEVEREVERLLRENEKTSDEIKKTSEELLKRNEETTRRILEEVERLLKRVKEATD

SEQ ID NO: 2579 - protein, 187 aa, Artificial Sequence; identical to SEQ ID NO: 2578
  Synthetic

SEQ ID NO: 2580 - protein, 186 aa, Artificial Sequence
  Synthetic
KVEETATRLREEVKRSDTEVHRENRESEDRNKKSDEEVHKTIRDALKRVKDKLDDVRRRRKSRKLEEIERIVRDILRRIEELLRRLHKLAKESRDLVRKTLEELHKLAEDILRRIKELLDEVKDERRDEIVRRVKEEVERLLEEHRRLAKRVRDENRRSTEEHRDLVRKVKREIERLEEELDRAEK

SEQ ID NO: 2581 - protein, 186 aa, Artificial Sequence; identical to SEQ ID NO: 2580
  Synthetic

SEQ ID NO: 2582 - protein, 186 aa, Artificial Sequence
  Synthetic
KVEESADRARREVKRSDEEVRKRNTDSREEIKKSDKEVHERIRELLERIRRILDEVRKKRKSRDLDRIRRIVEEIERRIERLLEELHKLAEEILKRVEETLKRLHELARRILEEIKRLLKEVERENRDEIVRRVEDEIEKLLREHRELVKDVERENRRLLEEHKKLVEEVEREVRRMMKKLRDATK

SEQ ID NO: 2583 - protein, 186 aa, Artificial Sequence; identical to SEQ ID NO: 2582
  Synthetic

SEQ ID NO: 2584 - protein, 186 aa, Artificial Sequence
  Synthetic
KVEEEIEKLLRHNDELLKEVEKRAREVEERIKRSDEAVHDSIRKLLEDVKRILDEARRRRKGEELEKLEKIARDVLEEIKRLLRELHELAKRILEEVRRLLEEIEKSSRESKERIKRLLEELKRENRDEIVERVEREVRKLDDDDRRLAERVLRRAEELLKRHKELVERVEREVERLLKELEDAVK

SEQ ID NO: 2585 - protein, 186 aa, Artificial Sequence; identical to SEQ ID NO: 2584
  Synthetic

SEQ ID NO: 2586 - protein, 186 aa, Artificial Sequence
  Synthetic
KAEDEARRLERHNKELLKEVRKDNTRSEREIEESDKRAHDEIKRLEEEVEEILKDIERRRKSDKLRKIREIVERIRREIRRLLKELHELAKTIKDRVRDTLRKLDESSRRSLELIKRLLREVERENRDEIVERVRRTVKKLDEDDDKLVKDVRKENKDLLRRHEELVREVTERVKKLLRDLREASR

SEQ ID NO: 2587 - protein, 186 aa, Artificial Sequence; identical to SEQ ID NO: 2586
  Synthetic

SEQ ID NO: 2588 - protein, 183 aa, Artificial Sequence
  Synthetic
DVEDEVRRAEESNRDSDRKVHEEVRRVLKSNRDSDTKAHRDVEEAKRRLKTELKDIERKRKGRKLDDIRRVVEEIERRVDTLLERIHRVVEETLERIKRALEEVHDVVRKSLEDIRRLLEEVREKRLVDKVRTEIKRLNDEHRKVLKKVRDLVRKLNEDHERVVRDVRREIKRLRDELRETAR

SEQ ID NO: 2589 - protein, 183 aa, Artificial Sequence; identical to SEQ ID NO: 2588
  Synthetic

SEQ ID NO: 2590 - protein, 183 aa, Artificial Sequence
  Synthetic
DVEDEVRKMKKELDELLKRAEEEVKRVLESNEKSDDEVHKRAREAEEELRRLLDDVRRRRKSEKLRRIEEVAKRVLDLVRELLERVHKVVEDTKETIRRLLEEIREVVREIEERVRRLLEEIRDKKVVKDVEKKIRDLLTKLREVLRRVRREVKKLNERHEDILREVERLIEELRKRLEDTTK

SEQ ID NO: 2591 - protein, 183 aa, Artificial Sequence; identical to SEQ ID NO: 2590
  Synthetic

SEQ ID NO: 2592 - protein, 187 aa, Artificial Sequence
  Synthetic
DIEDEVREAIERLKKLLEDSEREVRESIKRLRDLLREIARESEEANERIKRLLEEIERKVKDEEKLERIREEVERLSETNRRVLEEAADLVRKLIRENEEALEDSKRLVDELIREIEDVLRKIRKDDKEDVRRRLRELVEKVMREIEDSNRKLRKLSKDSEKAVRDAERRNRKLVREIEDRIRKSLK

SEQ ID NO: 2593 - protein, 187 aa, Artificial Sequence; identical to SEQ ID NO: 2592
  Synthetic

SEQ ID NO: 2594 - protein, 187 aa, Artificial Sequence
  Synthetic
EVDKEVRKVLKDIERLLEEIERRVRKSIEDLKTELKKIEDESEKANRELERLLREIKDRVDDEKKLREIEELVRRLSDENRRVLDDARRLVKKLIEENAEALKKARDDVRKLLEEIKRVLERIREDDKEDVRRELRELVDKVRKDVERVMKALEDLSRESRREVRRVKEKNRRLVEEVKKRVEDKAK

SEQ ID NO: 2595 - protein, 187 aa, Artificial Sequence; identical to SEQ ID NO: 2594
  Synthetic

SEQ ID NO: 2596 - protein, 174 aa, Artificial Sequence
  Synthetic
SEDEDMVRDVKRLIDEVRKLIERVKREVEDLIRRLNELDERVVRTSEELARDVKRLVDAGLSREEVEKVVRESIERTRRLAKELDERNRDVLREVKRLVAEVEKVIRDVLKAVEEKLDSEDVERLKEEIKELLDRARRTIEELERRIRENVKRSRKKIEDLVRRHKKILDEARK

SEQ ID NO: 2597 - protein, 174 aa, Artificial Sequence; identical to SEQ ID NO: 2596
  Synthetic

SEQ ID NO: 2598 - protein, 174 aa, Artificial Sequence
  Synthetic
REKEEAVKTVKELIKEVREMVERLHRKNEEMIRTVREVVKELNERNKELIKTVRDLRRRGTDKEDLRRIIEEVLDHIRRSLEELERLAEEVLEHIKRTLEEIERLVREVLDVIKKLVDSEDARRLEREVRELLRDVREKVERNKEKVERLKREVRKRVRDDLERVKRLKEEVDT

SEQ ID NO: 2599 - protein, 174 aa, Artificial Sequence; identical to SEQ ID NO: 2598
  Synthetic

SEQ ID NO: 2600 - protein, 174 aa, Artificial Sequence
  Synthetic
SEDERAVREVEKLIKRVEEVVRRLNERNRRLIEEVRRIVEELHRRNEDLIRKVRELAERGVDKRDVERIVREVLKHIRDSLERLERLAREVLKHIRKTLEELTKLAREVLEAIRRLVDSREMERLEREVERLLREVERRVKEDEERVRKLLEEVERLVRRNARKVEELLKEVEK

SEQ ID NO: 2601 - protein, 174 aa, Artificial Sequence; identical to SEQ ID NO: 2600
  Synthetic

SEQ ID NO: 2602 - protein, 184 aa, Artificial Sequence
  Synthetic
SEKEKLTEDIERIIDKVRREVERLNEENERLIREVRKRVEKLNRENKEAIKRVEEEVRRLRDRDKSDVRKKVEEAIRKLERSVRESLKEVRRLIEELKRSVEETLREIERLAKELKDILDKVRTDGIDEELVKRLEEKIRELLKRARDLVKEDEDRIRKLLEEIERVNRDDKRKIDKLLEEVRR

SEQ ID NO: 2603 - protein, 184 aa, Artificial Sequence; identical to SEQ ID NO: 2602
  Synthetic

SEQ ID NO: 2604 - protein, 182 aa, Artificial Sequence
  Synthetic
KSDEEVRERVERLLREVRRLTREVRRHAKETLDTVAELVDRVRREAERLLREVEELLRRLTDKDVLEEIKKRLDEVLKKLEDIVREVLKEIKRLLDENRRISEETLRRLDDVLRKLEELARRLGVDETEVRDVKRKADEIKEEDKRILEEAEKRHKELLEDLKRLLDRIKEEVKRVREDIKT

SEQ ID NO: 2605 - protein, 182 aa, Artificial Sequence; identical to SEQ ID NO: 2604
  Synthetic

SEQ ID NO: 2606 - protein, 174 aa, Artificial Sequence
  Synthetic
REEDEARKRLKELLDRITKLSKEVRDLIREMLRELEESIERTKREIDDLLRRLEEIRRAGVDKKELKKVADDVLKRIEELLKEDKDVADRVLAVIEKLLRDLERLNRDILREVEEIIDSDEVERVKREIEEHLRRSEEDIRRVAEEIKKLVEESRRVIEEAKDRVRRLVERVKK

SEQ ID NO: 2607 - protein, 174 aa, Artificial Sequence; identical to SEQ ID NO: 2606
  Synthetic

SEQ ID NO: 2608 - protein, 174 aa, Artificial Sequence
  Synthetic
SEEDDARRKVEELLRRDKKVVDEVRDELRKLLEELRRLSEEVEKLIRKLEKELREVRKRGEDKDVLRKVVEDIKREVTRLLKELEEANREVEKRVKELLDRLRRTTEEILKEIRKIIKGETVKKVEDEVRDSLRRAKKIIEDAARAIRKHLEESKRRIEEARKRLEELLKEAED

SEQ ID NO: 2609 - protein, 174 aa, Artificial Sequence; identical to SEQ ID NO: 2608
  Synthetic

SEQ ID NO: 2610 - protein, 175 aa, Artificial Sequence
  Synthetic
SREEEAKKEVKRLLDELKKLSDDSRKRIRESHERLKRVIEEVRREAERSHEELERVIRRGEPREVIREVVRRSRELIKKLLKRLEDVARESKRLIEELLKRNKEMVDEIKKVIKDVVESEKDVRKVDRDVDEILKRSEDIIRKVKEDSERLLKEVRERIEEMKKRTDDLLKEAEK

SEQ ID NO: 2611 - protein, 175 aa, Artificial Sequence; identical to SEQ ID NO: 2610
  Synthetic

SEQ ID NO: 2612 - protein, 177 aa, Artificial Sequence
  Synthetic
RKEETLKRAEEKSKETLERNKRLLERIEEESRKTLEKNKDMLRRVKKRVEDLLREIKRDKPEAEEVRKRVEDLLREVKRSSERSLREDERLLREVKESSERSLKRDKDLLDRVKELIKEVPEEELRRVIEDVLRESEKLHREDEELARRVLEESERLHREDEELARRVEKEIRELKK

SEQ ID NO: 2613 - protein, 177 aa, Artificial Sequence; identical to SEQ ID NO: 2612
  Synthetic

SEQ ID NO: 2614 - protein, 172 aa, Artificial Sequence
  Synthetic
SLDELAKKAKEDSERSVRTDEKRLEEIARRIKELIKENEDLLREVKKEIDRLIEEIKDDRVLKEIERLLREVEKHVTRSSEEIKRLLKEVEDHSRESLREDEKLLEDVADMVKRVDEEEARKLLEDIKRRSEELHKRNDELAREVEKRIRKLIKENRELAEEVRRRIEELRR

SEQ ID NO: 2615 - protein, 172 aa, Artificial Sequence; identical to SEQ ID NO: 2614
  Synthetic

SEQ ID NO: 2616 - protein, 172 aa, Artificial Sequence
  Synthetic
RTDETVKKIEEDSRRSLEEDRKELEEVERRSRESIKENERLLREVAERIKRLIEEIDKREVLDEIRKLLREVEKHVRDSSREDEELLKRVKEHSERSLDEDRRLLEEVADLAKRVDEKTLKELADRIKERSEELHRRNEKLAREVLERSKELIKRNEELARRVIEEIKKLKK

SEQ ID NO: 2617 - protein, 172 aa, Artificial Sequence; identical to SEQ ID NO: 2616
  Synthetic

SEQ ID NO: 2618 - protein, 181 aa, Artificial Sequence
  Synthetic
DVEETLKTVEDESRKTIETLRRSLRKSEEESKRSIDRLRESLERSREEVERLLREIERDKPEAKDVVEKVRKLLEDVRREYERVLEDDRRLADDVRRVYEEVLERDKRLLDEVRKEAKRDTREEAVEKLKKLAEDVRRESEELRRELEELSKDVRRVSEELERRLRKLSEEVKKRIKDLKR

SEQ ID NO: 2619 - protein, 181 aa, Artificial Sequence; identical to SEQ ID NO: 2618
  Synthetic

SEQ ID NO: 2620 - protein, 181 aa, Artificial Sequence
  Synthetic
SVEKILRDVEDTSRRTIEELKRSLEESKKTVTKLLEENKDLLRRIKEDVRRRLEEIKRDKPEMKEVVERVERLLKEVEDSADRTTKEIKRLLEELEKVYREVLETDKKLLDEVRKVAEESTSEEAVERLKELAEEVKRVSKELLEELRKISEEIERRIRRLIEENKELADRVREEIERLKK

SEQ ID NO: 2621 - protein, 181 aa, Artificial Sequence; identical to SEQ ID NO: 2620
  Synthetic

SEQ ID NO: 2622 - protein, 179 aa, Artificial Sequence
  Synthetic
DKVDRVIEEARRILERLRKRVTDVVRELEEINRRLKREVDESVKEVDEILKKLEERVRKRKESERLLEDIKETLERVLRKNDDVVRKVEELVKRSDEKLNKVVEEIKRELDEVLKEIDRLEVRKELVEKLDREVKRLLKEARELSEENRRRSKKLLDELRKSSERIREKVEDLVRRIRK

SEQ ID NO: 2623 - protein, 179 aa, Artificial Sequence; identical to SEQ ID NO: 2622
  Synthetic

SEQ ID NO: 2624 - protein, 177 aa, Artificial Sequence
  Synthetic
SEEEAAKRRIDELLKRLKEVSDKVKEDIDELLKDLERRSREVVEEIKKLLEEVKDRVRKRREEEMLKRLEEELARVLREAERLIDEVDKLSEEVLRRVEELVREVSKLIKEVLERVRRDIDSERLKRVTEEAKRLHEENKKLLDDVRREARRLNEDNRRLLDEVRKRVEEVLRRIRK

SEQ ID NO: 2625 - protein, 177 aa, Artificial Sequence; identical to SEQ ID NO: 2624
  Synthetic

SEQ ID NO: 2626 - protein, 176 aa, Artificial Sequence
  Synthetic
DEDRRALEEVRRVLEEDKRVSKRSRDLIEKVLREVEELIKEVTKRAEDVLRRVREIIKTSGGRVEEVDKVIRELERTVDKLLRDMEEVIKEVEKLVRKVLRENRETTDRVREVVERIVKVRELVKKVEDEIKESEDESEDLIRRADEAVKRLRKRVRDVIEKARRDLEKIVTDAKK

SEQ ID NO: 2627 - protein, 176 aa, Artificial Sequence; identical to SEQ ID NO: 2626
  Synthetic

SEQ ID NO: 2628 - protein, 184 aa, Artificial Sequence
  Synthetic
SIEKLIEDVRREVERIEEESKKLVKKAREDVKRSHDHSKRLMEEATRRVRDILRRAEEMPKSEDELEELRRLVEEVEDRIRRLLKESADVDRDVKRLIDEALERNRKLVEDVRRRLDELKDRLRRKELVDDARRRVEELLRRLEDSLRKSERLVRELLKRSKEVDDRIREEVKRLLEELDDRRR

SEQ ID NO: 2629 - protein, 184 aa, Artificial Sequence; identical to SEQ ID NO: 2628
  Synthetic

SEQ ID NO: 2630 - protein, 178 aa, Artificial Sequence
  Synthetic
DTEEILKRIEEEIRRLLEENEKLLRDAEDTVRKSLEEHERILDEVTKRIRKMLEEIARTDRPGVEDVLREVRDLLRRVREVAKRVIDDNRRLLKEVRDSVKETSEEIKRLLDEVRDLMRKVDDETLKRLAEEVLREVERLLRENERLIREVERRADKTVKDLEKLIEEVERRIDELKK

SEQ ID NO: 2631 - protein, 178 aa, Artificial Sequence; identical to SEQ ID NO: 2630
  Synthetic

SEQ ID NO: 2632 - protein, 178 aa, Artificial Sequence
  Synthetic
DSKEIIDKVREDIKRADEENKRLLEEVRDRIRKLLEENETLLKDSERKARELLEELRRKDSPGVEEVLKRIRKLVEDDKESVDRSTKTIKKLLKEVEDSVRESSKEIERLLREVEDIVRKVPEEDLKRLAKEVKDRIRELLERNRELIKEVEKRVRRLLDENRKSSEEIRKEVEDRKR

SEQ ID NO: 2633 - protein, 178 aa, Artificial Sequence; identical to SEQ ID NO: 2632
  Synthetic

SEQ ID NO: 2634 - protein, 174 aa, Artificial Sequence
  Synthetic
SDEERALKLVEDVIRDVKRLNKRDRELIEKVERDIEKLLEDHRRLVDEVRRRVKELEDKVEDKEEVLKRIKDLLDEIHKLVEEILRRIKKLLEDIEESSRRSLEEIRRLLEELRRRIDSELLKEVEERIKKLLKSNKDLLREVEERVRRALERVKRSDEEVHKMARDALRRVRK

SEQ ID NO: 2635 - protein, 174 aa, Artificial Sequence; identical to SEQ ID NO: 2634
  Synthetic

SEQ ID NO: 2636 - protein, 174 aa, Artificial Sequence
  Synthetic
SEDEDAERLVEEVIRRVKELLDTHKRLVEEVERKIRELDKKDAELVKEVEKRAEDLRRKVDDKDDVLRKVEKLLRELEESSKRSLEEIKRLLEDIHRLVKEIEKRIKELLDELRRRIDSELLERAEREIRRLLREVKESDKEVHRRVRRMLEHNKDLLRRARDSIKKVLDEIRR

SEQ ID NO: 2637 - protein, 174 aa, Artificial Sequence; identical to SEQ ID NO: 2636
  Synthetic

SEQ ID NO: 2638 - protein, 174 aa, Artificial Sequence
  Synthetic
SEREDAERVIERVEREIRELNRRDEELIRRVEKEIRRMLEEHKTLVKEVTRELDRLRREVSDKEEVLRRIEELLRRIHELAKEILKRIKKLLKDLEESSKRSLEEIKRLLDEVRKRIDSEDLKRVDKKVRDVLRSNKELLDEARKRITKVLEEVRRSDEEVKRRAEKVLDEVRK

SEQ ID NO: 2639 - protein, 174 aa, Artificial Sequence; identical to SEQ ID NO: 2638
  Synthetic

SEQ ID NO: 2640 - protein, 174 aa, Artificial Sequence
  Synthetic
SEEEDAERAVREAAELAKKANKEDEELARRAAELAKKALREHEELVERAARLADEAEKKAEDKDTALKLIKEAADRAHKAARDALRVIEDAARKADKSSKESLDLIREAADDARKRADSERAKKAEDDARKAAEDNRRLAKRAKEEARRAAEEVKKSDKEAEERARRAAERVRR

SEQ ID NO: 2641 - protein, 174 aa, Artificial Sequence; identical to SEQ ID NO: 2640
  Synthetic

SEQ ID NO: 2642 - protein, 173 aa, Artificial Sequence
  Synthetic
SLERLLEEVTRRSEETVRTNEEILRRAADEVRKAIESNKDLLRKIKKEVDDVKRRLKDEKALRDIERALDEVRRLVEETIERIRRMLERVRKLAEETIEVDRRLLKKVEDLVRRGLPEESVRTIIEEVERTSREMNERLKKIIDEVRRTIEELNKDLKRILEEIRELVKRLET

SEQ ID NO: 2643 - protein, 173 aa, Artificial Sequence; identical to SEQ ID NO: 2642
  Synthetic

SEQ ID NO: 2644 - protein, 173 aa, Artificial Sequence
  Synthetic
SLEETLEEVDRKSKETVKRLKELLDRIRERVEEAIKSNEDILRRIKAEAEEAERRLKDEEMLKEIRRLAEEVEKLVRKTIEEIKKLLEDVKELVERVIRRDKEVLEEVRRLVEKGLDESEVERIIRELERVSRELMELLKKILEEVRKRIKELNDRLEEILRRVRKRIRELEQ

SEQ ID NO: 2645 - protein, 173 aa, Artificial Sequence; identical to SEQ ID NO: 2644
  Synthetic

SEQ ID NO: 2646 - protein, 173 aa, Artificial Sequence
  Synthetic
SLEELLERIKRDSDRTVRELEELLERAEEISRRTEKSNEDSLRRSTKEVKEAEDRLKDEDALKKIRDLLERDRKLVEDTIRDDRRVLDEVRRLAEEVIKRDKDVLETVSRLVERGLPEEVVKKMLDELRDRSEKLLRTLRDIIRRAKERSDDLNRKNKESTEKVREDIRRLEQ

SEQ ID NO: 2647 - protein, 173 aa, Artificial Sequence; identical to SEQ ID NO: 2646
  Synthetic

SEQ ID NO: 2648 - protein, 173 aa, Artificial Sequence
  Synthetic
KLEELLKRIAEESKKTVEELEKLLEEVERISKKTVEELEDSLRRSEEDAKEAEERLRDEDMLRKIREMVKRDAELVKKVIEEDKKVLDDVRRLAEEVIRADEDALRKVEKLVRDGLPEDDVRRILEEVRRLSEELKTRLRKILEDLRRLSEKLKRENEESTKTVRKVIEDLER

SEQ ID NO: 2649 - protein, 173 aa, Artificial Sequence; identical to SEQ ID NO: 2648
  Synthetic

SEQ ID NO: 2650 - protein, 173 aa, Artificial Sequence
  Synthetic
SLEELLKRIKERSEETVKRLEDLLKRVREDIDRAIKELKKSLDDSRKTVEDIEREIKDEDVLRRIRKLLEDDERLVREIIKEVKKLLKDVEELVKEVIERDKKLLEEVERLVRKGLPEEKVKEIAEEVRRRSEKMLEELKKLVDEVRKRLEDLRKRNEDSTEEMKKRVEEEKR

SEQ ID NO: 2651 - protein, 173 aa, Artificial Sequence; identical to SEQ ID NO: 2650
  Synthetic

SEQ ID NO: 2652 - protein, 181 aa, Artificial Sequence
  Synthetic
SEVEKVIKDNKRSVDEIRKTLKRVLERNEKTLRENEKKIRDIIAEVDKRLKDLEREIDDRDEAREIKKEVKKLVDDLRRDAEEIVKESARLSKELKEKLERIVREVEELSRRLSEEAKKGRDDKAIKEIEEEVRRVDDRVRKLVEKLDRDIKEVDDRSRKLTDDLRRKVEEVLRRIKETVT

SEQ ID NO: 2653 - protein, 181 aa, Artificial Sequence; identical to SEQ ID NO: 2652
  Synthetic

SEQ ID NO: 2654 - protein, 174 aa, Artificial Sequence
  Synthetic
REVEEIEKELRKIIRDLKELLRELRERLEKLDRDLKDLLRRLREENREILDRLRKEPKDKDVEKKIEDLLRELKKKNKEVLERIKEIMERSRREVEKVITTIDELIKRVKEKVRRNNLDEKVIRDADRMAKELKKDLRKVLEDNRRTVEKLKRDLEEVDKESDEEARKLREEIR

SEQ ID NO: 2655 - protein, 174 aa, Artificial Sequence; identical to SEQ ID NO: 2654
  Synthetic

SEQ ID NO: 2656 - protein, 180 aa, Artificial Sequence
  Synthetic
SESEKIEREIRKLIDDSRKNSERIRREIEKLIRDSEETSKEIKKEIEDLLRELKEMLDEIKKRDDDRLKEELKKRADDVERRIRELIKKNKDRLDEILERVERLVRENKERLDKIEEDIRRKGVPEEVLRRAKKALEEDKKRNDEVLDEVRKALEEDKKRNDKVLEDARRVIKKIKDELK

SEQ ID NO: 2657 - protein, 180 aa, Artificial Sequence; identical to SEQ ID NO: 2656
  Synthetic

SEQ ID NO: 2658 - protein, 180 aa, Artificial Sequence
  Synthetic
KDEETIRRRIEELLKRSEDNSERIRRTIRELLERSKKLSEEVRKRIEELLKRLDEKVKEIRKREDERLVRDAKRELERILDEVRRLVEKTKRDLEDMLRRIKELVRRNKEEIDRMLEEIRRSGVPEEVLKEAEKRLREDKKRNDEVLKRVTEAVEEDKKRNDDVLEKVERAIREIARKLD

SEQ ID NO: 2659 - protein, 180 aa, Artificial Sequence; identical to SEQ ID NO: 2658
  Synthetic

SEQ ID NO: 2660 - protein, 174 aa, Artificial Sequence
  Synthetic
SEEEKVIRDLERLLEENEEHSRDVERKLRESDKRLREMVKKVSDEIRKLDEEVEELLRRGTDSDRLRKVLEDILKRSKELADKLKKDIDKSLDEVKKLIDRDDEHVKDIEKKVRELRVSEDALRRVKEALERSKKRLDKVLKDHEDSVRELKKEIDDVLKRNEETVREIEKRAR

SEQ ID NO: 2661 - protein, 174 aa, Artificial Sequence; identical to SEQ ID NO: 2660
  Synthetic

SEQ ID NO: 2662 - protein, 174 aa, Artificial Sequence
  Synthetic
EEVERVKRELERLLEENDEHSKEVEKRIRDLDRKAEELLREIEERLRRSDERLKRLLERGTDEDELRKRIKKSEDEVRELIKKLTRVLEEILKRTKELADRDKKHVRDVEKRVRELDVEERVLKKVEDDLRESEKRVEEVLRKNEETVRRLKEELRKVLEDHKRTVEELRRRLT

SEQ ID NO: 2663 - protein, 174 aa, Artificial Sequence; identical to SEQ ID NO: 2662
  Synthetic

SEQ ID NO: 2664 - protein, 174 aa, Artificial Sequence
  Synthetic
SREEEVEKRIREVLKRLEELLADVERRARELNRRLEKVVRDVKKEIEDLDRKLRKLLKDGVDSEELKKVLKEVKKRSTELAKELEELIREVNRRVEKLVRDLREAIKRVEEEVRRLDVREKVLKDVTDMARELERRLEEVLRKHRKSSEDLKRRIDEVLKRNEETLREIDRRLN

SEQ ID NO: 2665 - protein, 174 aa, Artificial Sequence; identical to SEQ ID NO: 2664
  Synthetic

SEQ ID NO: 2666 - protein, 177 aa, Artificial Sequence
  Synthetic
SEREKAKRELERLLEEDRKHLKDVERELKELDEEDERHLREVEKELKELDDRAKEALDRRPDQKDKLRELLKRIKDRSEELVRRHEETNKRIEERTKELLDRHEESNRRIKKRLEELKDVVEEEVLKEVKRLSEKSKTDLEKIVRDNKRSSDDSRRELERVIRENEETLRRLAERIK

SEQ ID NO: 2667 - protein, 177 aa, Artificial Sequence; identical to SEQ ID NO: 2666
  Synthetic

SEQ ID NO: 2668 - protein, 177 aa, Artificial Sequence
  Synthetic
KEEEEAKKELDDLLRRLKDLYRRIREELERLDRRLEEAYRRIKEDLKRLDEELRRLLEKDRDDRERIETLLEEILRRSEDLVRKLKKLNDEINTRTEELLKRLKKLNDDINKRLEDLRDVIDEKVIRDVRKASRDTEREIRKVAEDNRKSSEDSRRKLEDVLRKNKETLDRLRDELR

SEQ ID NO: 2669 - protein, 177 aa, Artificial Sequence; identical to SEQ ID NO: 2668
  Synthetic

SEQ ID NO: 2670 - protein, 177 aa, Artificial Sequence
  Synthetic
DEKETVEEELRRLLEELKKHIEDTERKLRKLDTDLEDVYRRIEEELRRLLEELKKMLDDRKEDREELRRLLEEIERRIRRLAEELKKLNKDINDTTKDLVRKNERLLREILKRLRELRDLVDEKVLRDVEEALRRAKKRSDDVVRENEKSSRRSEERLERVLRDAKRVLKELKERID

SEQ ID NO: 2671 - protein, 177 aa, Artificial Sequence; identical to SEQ ID NO: 2670
  Synthetic

SEQ ID NO: 2672 - protein, 185 aa, Artificial Sequence
  Synthetic
SELEEVLKRVAEVVERVSREDEKVNRKNDAAVKKVTKDDRKVLEDLERKLRELEKDAKDRGVDKELVDRIREKIETIKEEIRDLNKKLKELIEDTLRDNRRLNEEVRRKVERILEKLEEIRRRGSDEDVIRRLEKEVRDVLKDWEEKSKEAEEKNKTVNKRWEDESRRLKKKVDRLIEKIKEDLR

SEQ ID NO: 2673 - protein, 185 aa, Artificial Sequence; identical to SEQ ID NO: 2672
  Synthetic

SEQ ID NO: 2674 - protein, 177 aa, Artificial Sequence
  Synthetic
RSEELLREIEERIKRLKEKNEELVKEIRRRARELEREDDRAKKEIDDLARKVEEKIRRTIRDKDRARELEKRLRDILREIEDLSRKSEKAIRDVERKVEELSEENKRLIEEIADRVRRKRMDDDVVREVRKLIEELDRHLERLVEEVRRVVKELLEISKEILDRVREVITRLREEVK

SEQ ID NO: 2675 - protein, 177 aa, Artificial Sequence; identical to SEQ ID NO: 2674
  Synthetic

SEQ ID NO: 2676 - protein, 179 aa, Artificial Sequence
  Synthetic
SEVEDAVRKIRELAKEIARAIDELLKEHEELIRTVADALEKLVRTSDKLAEDIARVIDGGVSEEALKEALKRWREATEEVRKRLEDVLRRTKEHLREVAETIREALERLERAIRRVEEEGTIGRELLEELKRILEDLERRAKEIVDRARELNKRAEDEIRRLIEDSKRKLEEIRKRIEE

SEQ ID NO: 2677 - protein, 179 aa, Artificial Sequence; identical to SEQ ID NO: 2676
  Synthetic

SEQ ID NO: 2678 - protein, 179 aa, Artificial Sequence
  Synthetic
KEAEEAVKRLRDLVRRVEEETKRLLRESRESLKTLEEITDRLLKRSEESVKEIEKVITRGRPEKDVKDALDKHRDTNREVLKRLTDLNREHKELNEKVARDLERIDEELKKALDEVTRRGTIGRELLTEVTKLIKDHHDKVREILRESDKELDRHHKDVERILERSKRELERLEDEVRR

SEQ ID NO: 2679 - protein, 179 aa, Artificial Sequence; identical to SEQ ID NO: 2678
  Synthetic

SEQ ID NO: 2680 - protein, 171 aa, Artificial Sequence
  Synthetic
SREELLKEIKKKIDDIKRENEKLLRDIERLIRELEKRDKELLDEARKTSEELVRRAGTEDEKVKKLLEESERLIEEVERVSREMVERARRLLERVKRASERLTRKLEDILRRKGADRDVVRDVDRILTEWKKESEDLVEEVKELIKRWKDTSEELVRRVRELNERIDRETR

SEQ ID NO: 2681 - protein, 171 aa, Artificial Sequence; identical to SEQ ID NO: 2680
  Synthetic

SEQ ID NO: 2682 - protein, 178 aa, Artificial Sequence
  Synthetic
SEVETVEEKVKKVIEDLRRLLKEVRDRNRRIIEEIKRLLERVAEKNKRIVDEIRDLLRRRSTEEVLKDIERLLREAHETNKEVLERVKRLADEAHRRNEKVLEEIKRLADTIDKELKDINVDEDIIRRIDELFREILKEVKRLNEESKRRLEKLEEDIKRLDDRSREEAEKLRDAVRR

SEQ ID NO: 2683 - protein, 178 aa, Artificial Sequence; identical to SEQ ID NO: 2682
  Synthetic

SEQ ID NO: 2684 - protein, 178 aa, Artificial Sequence
  Synthetic
SEVEKVARDVEEVIRTSEDKTRKLEKRNKDIIREIKKLLDDLARENKRIADEIKRKLDERREERVLEEIERLMRKLHEDNKRVLKRVDELLRKLHDENRRLNEENKELAERVEDTLRRKNVDKRLIDEIRREMERSHRRDEEVNEKSKREADKLRRDVEKLDEDSARELKKLEDEVRT

SEQ ID NO: 2685 - protein, 178 aa, Artificial Sequence; identical to SEQ ID NO: 2684
  Synthetic

SEQ ID NO: 2686 - protein, 178 aa, Artificial Sequence
  Synthetic
SEVERVERELDKVITDLRRLLDDLKRKNEELVRRIRELLKKVKERNKKIVTEIDDLLRRRKTEEVLKEIKKLLEDAHRDNTEVLKEVRRIVKEAHDLNKKVLDEIKKLLRELLEDLKRLNVDERIIRRIKELADRIEERVKELNERVREEVRKLEEDIKKLDDESREEARKLEDKVRQ

SEQ ID NO: 2687 - protein, 178 aa, Artificial Sequence; identical to SEQ ID NO: 2686
  Synthetic

SEQ ID NO: 2688 - protein, 177 aa, Artificial Sequence
  Synthetic
SSEEIRREIERESEDTRRRLDRVLEDIERLSRETKEHIKESLERVRREHDRLRRELERKAKDKDTVTELAKHIKRSLEEVERIHEELLRDDERVLKEIKEIADELRRRDDEVVKRIRDREMTEEVRREVRKLIEESRRAIDEVKRRVEELIKESRDRNRRIEERVKELVKENAERIR

SEQ ID NO: 2689 - protein, 177 aa, Artificial Sequence; identical to SEQ ID NO: 2688
  Synthetic

SEQ ID NO: 2690 - protein, 177 aa, Artificial Sequence
  Synthetic
KSEEIRRKIEEDSRRTKKELDDILDEIRKLAEKVKKEIEELLRKVRRRHEDMKRRLREKVKDKDTVTELEKHIRRSLDEVRKLAEELKKKIEEVKRELKKLADELRRRDDEVVKRIRDKPVTEEVAKEVKKLIEESRKLLEELKDTVRRLIKRLKELLEELERRVEELIKENEERIR

SEQ ID NO: 2691 - protein, 177 aa, Artificial Sequence; identical to SEQ ID NO: 2690
  Synthetic

SEQ ID NO: 2692 - protein, 177 aa, Artificial Sequence
  Synthetic
RSEDILREIEDLSRETKEKIDEILERIRKLAEEVKRHIDESLKEVRRRHEEADRELDEKMRDKDTVKRLKEHIRRSLTEVEDLHRKLREEVERVLRKVERDIDKLRETDDRVAKRIRSKRADEEVAKEVRDLIRRSEDLLRRILETVDKLIKELRKLNEDILERVRKLIKKNKDDIK

SEQ ID NO: 2693 - protein, 177 aa, Artificial Sequence; identical to SEQ ID NO: 2692
  Synthetic

SEQ ID NO: 2694 - protein, 177 aa, Artificial Sequence
  Synthetic
KSEEIERRIRERSRETRRELEEVDKKVKKRHTELREHLKRSLKKVKEDHDDLKRKLEEKIKDKDTVRRLDEHIKRSLEEVKRLHEELERHLTTSLRKVEEEAKRLKKRDDDIERRIESKPMTEEVEEEVKRLIEESKELIKRLEEEVDKLIRDNKKLNDDILRRVKRLAEENDERIR

SEQ ID NO: 2695 - protein, 177 aa, Artificial Sequence; identical to SEQ ID NO: 2694
  Synthetic

SEQ ID NO: 2696 - protein, 177 aa, Artificial Sequence
  Synthetic
SSEDILRDIERIARKLREDLKRVLKRVKELSDDTRREIERLVEEVERIHERLRRELERKVSDKDTARRLKKHIDDSLREVRKLAEDLERTDKKVLDEIRKLAEDLKRKIDKIVEDVRRKRMDERVADEVRKLIAELEKLIRDLKRRVDELIRRSRELLERIRDRVRKLIEENKRAID

SEQ ID NO: 2697 - protein, 177 aa, Artificial Sequence; identical to SEQ ID NO: 2696
  Synthetic

SEQ ID NO: 2698 - protein, 179 aa, Artificial Sequence
  Synthetic
SKVEEAKREVDRVIKELREDIKRVEEEVDKLIKDHEKLNKELEDESRKLAERVEKLRRDGVPREDVRRALDDWRRRSEEALRRSEESLKRIKERVRELLERIRKLLKEIDDRVEKLREAGVIDEKIVRDIKELLRDLRREVEKVIERIDRLIKRLEEESRRLFEESEKAIRELKRRVDK

SEQ ID NO: 2699 - protein, 179 aa, Artificial Sequence; identical to SEQ ID NO: 2698
  Synthetic

SEQ ID NO: 2700 - protein, 179 aa, Artificial Sequence
  Synthetic
KKVEEAKKEVKEMIRRHRERNKEVEKEVKDLARKHEKENRDVAETSKRLAEKVKKLRDDGVDRKDVRRVLEDWRRRSKELLDRSRKSLEEIRKRVEDLVRESKESLKRIEDRVRELEERGVIDEEIVKDIKREIEELEDESRRILEEIREDIDRLRRRSEKLFEDSRELIERMKREVDR

SEQ ID NO: 2701 - protein, 179 aa, Artificial Sequence; identical to SEQ ID NO: 2700
  Synthetic

SEQ ID NO: 2702 - protein, 176 aa, Artificial Sequence
  Synthetic
DEIEKVRKRAEDLNREDKRLSERAFEESKEVVEEHRRLSDRARRESDRVVEEVEKTLKDKREKKEDLEKLLRDWKRISEKLKEESDKSLKDWEDRTRELMERSKKSLDELEEVLRRIPVDRKILEEIRKAIDRNRDENRRLVEESKKELDELRKEDEELVERSKRKLEELDRRAKK

SEQ ID NO: 2703 - protein, 176 aa, Artificial Sequence; identical to SEQ ID NO: 2702
  Synthetic

SEQ ID NO: 2704 - protein, 176 aa, Artificial Sequence
  Synthetic
SRIETVKDELRRIAEDVRRALEEIEERLKDLNRRDEELTKRIEDTSRDILRRVEEVLRRNREKKEEAETLLRDWDRVSKELKKESDRSLEELRREIERLREEIERLLRELDKLIKDIDIDEKILKEVADRLRELKRRAERLIEEVTRLLKENEKRNKEVVDTSREALREIRDRVRK

SEQ ID NO: 2705 - protein, 176 aa, Artificial Sequence; identical to SEQ ID NO: 2704
  Synthetic

SEQ ID NO: 2706 - protein, 177 aa, Artificial Sequence
  Synthetic
SKEDILREIEKRIRKIEKEAEELLRESRKILEELEERDRRLLERVKREIDRLLEETGEDDDLRRLLRELEKALEDMERVSRTVLREIERLIKESEDNIRELIERLEELLREVERRVRDEELLRRVERELKKLIDEVRKVLKDNFDRNRELAKEWEDLSRELFKRAKELIEKVEEASR

SEQ ID NO: 2707 - protein, 177 aa, Artificial Sequence; identical to SEQ ID NO: 2706
  Synthetic

SEQ ID NO: 2708 - protein, 177 aa, Artificial Sequence
  Synthetic
SKEDILREIKKRIEEIERDARRLLEESKRILDELRKTDEKLLRESEERVEELERKSGRDEKVEDLLRRLKRLIDESKKDSDRMLKEAKKLIEDSKRNIEELLKELRRLLERVRREVRDEELLKRVMEELRELIERVERELRRNARENRELARKWKKLSEENKKKNDDLIREVDEASR

SEQ ID NO: 2709 - protein, 177 aa, Artificial Sequence; identical to SEQ ID NO: 2708
  Synthetic

SEQ ID NO: 2710 - protein, 174 aa, Artificial Sequence
  Synthetic
DEKERIEEEIRRILEELERKVDEAREEIKRMDEELKRRIEEIARRSRELDDELRERVDKDKDKDKLEKIVEDILRTSRKLIEDLKKLIDDILRRSKELVDRLRELVDRVRERVERLPVDEEVRKEAERVLRKIEEDIDRVLRENEDSVRKLRTEIDRVEEENRRSAKRIRERLK

SEQ ID NO: 2711 - protein, 174 aa, Artificial Sequence; identical to SEQ ID NO: 2710
  Synthetic

SEQ ID NO: 2712 - protein, 176 aa, Artificial Sequence
  Synthetic
DEVRDVVTRIRDLLRRIKERLEELTERIRRLLEKIHKTTEDLARRNRKLIDEIRKEIDKGVEKEEVDKMIEELKKHTDETLRRIEELNDRSDKLVKRVLEEIERLIREAEKEVKKAERVIPEDVKREVKELLDKIREDLERVREEAKRSNEENRKRLEEVVEESERLLEELKRRST

SEQ ID NO: 2713 - protein, 176 aa, Artificial Sequence; identical to SEQ ID NO: 2712
  Synthetic

SEQ ID NO: 2714 - protein, 180 aa, Artificial Sequence
  Synthetic
DEVREVLKELKKVLREIEKAVRDVLEEDREMHERIARKVKKVLDENKKSLDDLRRKVDSEKLKEIEKVVEDTLRELKELLDRARELNERTKRRLEKLLDEIRKVIKRLLEELDELRRRGASEKKLKEIADKIRELLERLKDRLEKIAREIRDVNRKLDEDLEDIVRRIRDVDKKLDDKTK

SEQ ID NO: 2715 - protein, 180 aa, Artificial Sequence; identical to SEQ ID NO: 2714
  Synthetic

SEQ ID NO: 2716 - protein, 188 aa, Artificial Sequence
  Synthetic
SVLEEIEREVEEIRRRIEKVLKELNDDDRRVIEDSKRLNEKLEKEVRDIERKARDLLRKLKDTDDDREMKKILREVEKMVEELKRRSDEVVKRTRRVVDRLREKNKDVLRRIEKKIRELKDKIEKISAPREELEKLKRRLDEELDRVREKVEENIRRTDKAVEDSERENERLKRELDEKVKRIRDELR

SEQ ID NO: 2717 - protein, 188 aa, Artificial Sequence; identical to SEQ ID NO: 2716
  Synthetic

SEQ ID NO: 2718 - protein, 171 aa, Artificial Sequence
  Synthetic
SDEEDVERLVKELIDRVRKTDAELERKVDEVIRELKEVIKRIEDHSRDSIRKLRNEPMTEDVLRKAEEVHERNRDLLRKISERIKKLLEDLNKESRKNEDRVRRLVEELERRAKTLRELIKRLRDAVRESEKENKRINERLRRVIEKAKRDLEKILEEDRRVLEEMAERAK

SEQ ID NO: 2719 - protein, 171 aa, Artificial Sequence; identical to SEQ ID NO: 2718
  Synthetic

SEQ ID NO: 2720 - protein, 181 aa, Artificial Sequence
  Synthetic
SEVETIKREIDKLMKELTEKIKRIKEEDDKVHEELKRAVDRSRERLEEVLKELRDRGVPDKKLRELEKLIEELKRRNDDLLRKLKEVNEKTREDLERLLRDLRRLLKELRERLKELKDRNSDEKEIRDLMREIREVAERAKKRVDELLERIRRINTKLKEELKELHKRTEDLIKKAKEEVN

SEQ ID NO: 2721 - protein, 181 aa, Artificial Sequence; identical to SEQ ID NO: 2720
  Synthetic

SEQ ID NO: 2722 - protein, 181 aa, Artificial Sequence
  Synthetic
KEVEEIDERLKRVLEELRRMLEESRKEDERVHDELRKEAEKIKRELDKAVEELRARGVPKDVLRELKRLIDELRKEIKDLLDDLRRVNEETLRENERLLRELEKLVRELEEELKKVKDERRDKKVIDDLLRKIEKLIREMKKRLKDLHEETKRINEELERRLRDLERRVRDLLRRAREEAN

SEQ ID NO: 2723 - protein, 181 aa, Artificial Sequence; identical to SEQ ID NO: 2722
  Synthetic

SEQ ID NO: 2724 - protein, 181 aa, Artificial Sequence
  Synthetic
SEIERIKEEDEEVHKRLKEINDRINKEDKDVHDKLRDEARKIEERLRRVMEELRANGVPKSLLDEARRVIDELRRKLEKVLDELEKLNRKTEEDNRRLHEETRKVNEDTKRKLKEVKDNRSDEKVIRKLLEEIRRINEELERRNRKLMKDIREINERAEEKLRRLAEEIEELIKKLKEEVK

SEQ ID NO: 2725 - protein, 181 aa, Artificial Sequence; identical to SEQ ID NO: 2724
  Synthetic

SEQ ID NO: 2726 - protein, 181 aa, Artificial Sequence
  Synthetic
SEVEEIKREDDKVHEDLKKAADDIRKRDEDVNRKLTEAIEEIRREVDKALEDLERRGVPKDLLDRARRLAEELRRRLKELLERMHKVNEDTKRLLEELLRRLEEVNRRTRKELEDVKRRREPEEVIRRLMEKIRRINAELRKALKRLLEEIEDINRKLEEEVKKILEEIRRVLEELRRRAN

SEQ ID NO: 2727 - protein, 181 aa, Artificial Sequence; identical to SEQ ID NO: 2726
  Synthetic

SEQ ID NO: 2728 - protein, 182 aa, Artificial Sequence
  Synthetic
SEVEELVKELRRLIEEWDRRSKRLMEELKELAERIDKTTKELLKELEDLVEKIKRELDKKGGEDERLKEDVERLLRELREALKRVEDTVDRLNRESEEVLKEVKKTNEELVRRLEELLKRAKENGVEERVAEEVKRAIERAKRESDKIERDVRELNRRNREILKKIKKRVEDVLRKLRKDLE

SEQ ID NO: 2729 - protein, 182 aa, Artificial Sequence; identical to SEQ ID NO: 2728
  Synthetic

SEQ ID NO: 2730 - protein, 174 aa, Artificial Sequence
  Synthetic
DEVEELKERLRRLAETIARRIRELVERLRDSARKIEKRVRELAKKLRDSVREITKVIKDGVDERTIDEMIERHKRTSEEIAREIRDLLRRHKEVSERILEEVRRLIEELDRVVKEVTRTEEIREEVEKAVRDLEELLKELKRESEETIRRIEKLVRDLERESEEAVRRLKEEKD

SEQ ID NO: 2731 - protein, 174 aa, Artificial Sequence; identical to SEQ ID NO: 2730
  Synthetic

SEQ ID NO: 2732 - protein, 174 aa, Artificial Sequence
  Synthetic
SEEEKLKKELEDLARRIEKRLRELVEELERSVREIERRIEKLHKELEESVDRIKKVVDKGVDEDAVRKLLTDHDRISRETVRRIEELIKKHEEDSRRVVKEIEDLIRRLEEVVRRVTRTDEIRRRVEEVVRRLEKIVKELEERSREVLKRLREEIEKHKKRSEETKERIRTRAT

SEQ ID NO: 2733 - protein, 174 aa, Artificial Sequence; identical to SEQ ID NO: 2732
  Synthetic

SEQ ID NO: 2734 - protein, 174 aa, Artificial Sequence
  Synthetic
SEVEELLKRLEDLIRKIEERLKELVKRLKESAKEIEERLEELHRRLKESVDRIREEIEKGRDKEDVKRLVKRHKELSEETVRRIKKLLEDHKRLVDKILREIEKLLKELKDVAERVSRTEEIKKEVKKALERLKKIVEDAKKVSEETMERIRKLVEEHKDTSRKTVEDLERATK

SEQ ID NO: 2735 - protein, 174 aa, Artificial Sequence; identical to SEQ ID NO: 2734
  Synthetic

SEQ ID NO: 2736 - protein, 174 aa, Artificial Sequence
  Synthetic
DEVERLMEELRRLLEEVRKRIEDLIRENRKLVKEIKDRLEKLLRDNERLAREIEEVIRSGTEEEKVRELLERLERSSRKTLKEIRELLEKLRKKNEDSTREIERVLRELEDVVRKVVREERIREEVKRAIEKLKELVEDSNREVTEALKEIEDLLRKLKERSEELLRRIKARTD

SEQ ID NO: 2737 - protein, 174 aa, Artificial Sequence; identical to SEQ ID NO: 2736
  Synthetic

SEQ ID NO: 2738 - protein, 182 aa, Artificial Sequence
  Synthetic
KEVDELDEELKKHAERIDRELERLDRENEKHVEDVRRELERLREENERHARRIEDEVKKRTDEEEVIKRLIDDHRRLSKRTEDEIKKLLDDHRRLSEETKERIKELLKDHRRLLKDVADKIEDRKTLEDIRRKVEKSLRELEKKLEEIDKKNRDTLEEARRELERIRRENEEVIRRLDKRRR

SEQ ID NO: 2739 - protein, 182 aa, Artificial Sequence; identical to SEQ ID NO: 2738
  Synthetic

SEQ ID NO: 2740 - protein, 182 aa, Artificial Sequence
  Synthetic
KEVEELVRKLREHVRDIKRKLEELLKENEDHARRAEDRLRELTKENRDHVKEMEDVLRRDTDSRETIRKLLEDHKRLSKETAERIEELIRDHERLSRETSKRIKELIDDHRRLLEEAAKDIRDKDTLERLEREVRKSIKELEDKLREIRKRNKEVIDKLRDILEKIKKENREALKRLRDTEE

SEQ ID NO: 2741 - protein, 182 aa, Artificial Sequence; identical to SEQ ID NO: 2740
  Synthetic

SEQ ID NO: 2742 - protein, 182 aa, Artificial Sequence
  Synthetic
SEVEKLTEELRRHVEEIERDLDRLRKENERHAKKIKDELKRLLEELEEVARRIEAELERDTDDEDKIRKLLEDLEELLERIADTIRRLIEDHRRLSEETMERIRRLIEDHKKLLDDIARRIRDKDMLRRIEEEVERSIRRLEELLERIRERNEKVIEDLKELLKRIRDRAEEVKDRLRRTRK

SEQ ID NO: 2743 - protein, 182 aa, Artificial Sequence; identical to SEQ ID NO: 2742
  Synthetic

SEQ ID NO: 2744 - protein, 182 aa, Artificial Sequence
  Synthetic
SEVEKLKKELEDHVRDIEKKLRDLMRENEEHAKRARERLKKLLEDNEENVKDIEDKVRKKRDKEEVIKKLIDHHRKLSEDSVRDIEELIKDHKRLSEETSERIKRLIEDHRRLLKEISDKIRDEDTLRKIREDAKRSEKKLEEILRTIRKRNEKVIRDLRRLLEELRKRNREAIERLRKELE

SEQ ID NO: 2745 - protein, 182 aa, Artificial Sequence; identical to SEQ ID NO: 2744
  Synthetic

SEQ ID NO: 2746 - protein, 182 aa, Artificial Sequence
  Synthetic
SEVERLAEELRKHVEEIKKELRKLKEKLEKLARDIERELKRLRDENKKHADDIRDKVEKRKTDEKTIEDLIRDHERLSEETKKRIEDLIRRLEELLREVAKRIKELIEDHRRLLKDVADKIEDKDTLRRIEEEVKKSERELREELKRLEERVRRVIEKLEDLLRRIEKENEEVKRDLERRRK

SEQ ID NO: 2747 - protein, 182 aa, Artificial Sequence; identical to SEQ ID NO: 2746
  Synthetic

SEQ ID NO: 2748 - protein, 182 aa, Artificial Sequence
  Synthetic
SEVDELKRRLDEHAKDIRDKLRKLVKELREHAKRAEDELRRLLKENEDNAREIRELVKTLRDDKDKIEELIKHHKKLSEDSEREIKRLIEDHKRLLEEVEERIRRLIEDHKRLLEDVARKIRDEKTLRDIKRAVEKSIRDLERILEELRKEVEDTIKRLEDILREIRKRNKDVIDDLRRRMK

SEQ ID NO: 2749 - protein, 182 aa, Artificial Sequence; identical to SEQ ID NO: 2748
  Synthetic

SEQ ID NO: 2750 - protein, 182 aa, Artificial Sequence
  Synthetic
SEVDRLVRELDKHVEDIERTLKKLREENEKNVEEIKRTLKKLVDELRKLAREIIDTVDKNRDIREEIEKLIEDLRRMVEEIAKRAKDLLDHHAELSRRTREEIKRLLEDHDRLLKEIARKIKDEKTLRDIKRRVDKSLEDLKRTLEEIKRENERTLEEIKKILEDMEREVRDIERKLREKEK

SEQ ID NO: 2751 - protein, 182 aa, Artificial Sequence; identical to SEQ ID NO: 2750
  Synthetic

SEQ ID NO: 2752 - protein, 182 aa, Artificial Sequence
  Synthetic
KEVEDLVRELEKLIEEIKRRLEELDKELKKHVEDAERRIKKLLDENRENAERILEKLRRDKDDDDKARRLVKHHRELSEESSRRIEELIRDHRRLLEEISRTIEELLDRLRRMLKKIADEIKDEELLRRAKERVREALEDLRRILEEIRRKVEETIRRLEKLLKELRDRNRRVLEELERTLK

SEQ ID NO: 2753 - protein, 182 aa, Artificial Sequence; identical to SEQ ID NO: 2752
  Synthetic

SEQ ID NO: 2754 - protein, 180 aa, Artificial Sequence
  Synthetic
REKEEIKREVEEAKKRLEDLLREIAEEVKRALERLRELNERNNDRARRVLKRLTDELRRVDNEDLKRDARRLLEELKRINRESNETHKKLLEELRRLLREVEKTVERLLRRLDEMLERVERTEPDDRLSERLRRLVREIEETLKELLKALRRLLERIREVSEELHRRSEELVERILRKLK

SEQ ID NO: 2755 - protein, 180 aa, Artificial Sequence; identical to SEQ ID NO: 2754
  Synthetic

SEQ ID NO: 2756 - protein, 180 aa, Artificial Sequence
  Synthetic
REKEDIEEKVKRVLERLERLNRENNKESERLLRRLEELNKRNNEAVKELLDRLREILKRVRDEKKKREVEELLERLRRINEESNRVHRRLLEELRKLNEESNRVHKRLLELLKTLLDEIRKREPDDRLMEELKRLAREAERVSEELHDRTRRLAEEIEKVSKELHKKSEKLAREIKKRLD

SEQ ID NO: 2757 - protein, 180 aa, Artificial Sequence; identical to SEQ ID NO: 2756
  Synthetic

SEQ ID NO: 2758 - protein, 175 aa, Artificial Sequence
  Synthetic
KEAEELIKELKDLAERIRRENRRLLEELKKLVEEIRRRIRELIERSEDSVRKIEETVKRKKEKREELEKLLREHEKLNEEILEEIKKLLDDLRKTVKEAIDRSRKLNKELKDMVEKVSRDEKAERELKKISEDDERSIKELEDLLRKVEEDIRRLLDELRDIMKKTKEKVDELRR

SEQ ID NO: 2759 - protein, 175 aa, Artificial Sequence; identical to SEQ ID NO: 2758
  Synthetic

SEQ ID NO: 2760 - protein, 182 aa, Artificial Sequence
  Synthetic
DEAERVKRELERLVKEIKEENRRLLRELRELSKRSREVLERLLRKLEDLVRKIREVLERLKRVKEVVKRLKEELKKLLDEAEKVIEDLKRENDKLLEEVHRVNEKLDRDLEALLEEVRRINLPKKVLDEIEKEAEEIKRENKDFNRRIEREVRESKREIEEVVKRIREIAERVDRDIDRTRR

SEQ ID NO: 2761 - protein, 182 aa, Artificial Sequence; identical to SEQ ID NO: 2760
  Synthetic

SEQ ID NO: 2762 - protein, 182 aa, Artificial Sequence
  Synthetic
DEEREVKERLRDLTRRIRETIKRLLDKNKDLARRIREVNKETSEELERLARDIERVLEELKDVDEVVKRLKERLRELLRRSEEVNRRLDEENKKSNKETEDVARRLLKELRDLLEEVRRINLPKKVLDEIREAAERVKREIEELLKEVHRINTELNKDNTELNKRNREIVERVKRRIDERAR

SEQ ID NO: 2763 - protein, 182 aa, Artificial Sequence; identical to SEQ ID NO: 2762
  Synthetic

SEQ ID NO: 2764 - protein, 182 aa, Artificial Sequence
  Synthetic
DEVEEVKKALEDLAEKIRDLNRKILEKNKKLADDIRRLNEKLLRELRKLVEEIERVLRKLKDVKKVVKELKDRLKRLLEELERVNRELDERNKKLHKETEDLNRELDERLKKLEDDVRRVNIPKELLDEIRRRVEEVKKDNERVNKEIEELNRKLDEDNERANREIRDTVEKVRRRIDEEEK

SEQ ID NO: 2765 - protein, 182 aa, Artificial Sequence; identical to SEQ ID NO: 2764
  Synthetic

SEQ ID NO: 2766 - protein, 181 aa, Artificial Sequence
  Synthetic
SEIEEIEKEIRRVLEEIERLLRTLKKINDDVKRESEKLVRDDKKKIDDALRELRKLAAERGKDEKVIRDIEKLIRDVKRHSEEVLERLKRLNEETRKTNEEVIRRARRLIDELEKDIRRIRGDEVVRRAEKLLKEIRDTVETALKELEDKNERSERENKRVAEESERKLRKIKEEVDKAAE

SEQ ID NO: 2767 - protein, 181 aa, Artificial Sequence; identical to SEQ ID NO: 2766
  Synthetic

SEQ ID NO: 2768 - protein, 182 aa, Artificial Sequence
  Synthetic
RKVEEIKKRLKELKERLEESVKRIKDRLRKLEEDNRRLAEEVKKRLEELLKRLEDLVKRREGDKTDLRRSVEKVVREIRELIEELKRHTEESADEIRKLLEEHKRLSDEVVREIRELIRDLDDEKAVKELEDELRRIEKTSRDVLKELEDILRRLREESKRVADELRELLRRVKEKVERETK

SEQ ID NO: 2769 - protein, 182 aa, Artificial Sequence; identical to SEQ ID NO: 2768
  Synthetic

SEQ ID NO: 2770 - protein, 182 aa, Artificial Sequence
  Synthetic
SEDDRIRERLKELVDRNDELVKRIKRALDELLRELRKSVEDIKRTLDDLARKLEELARRREGDKTDLRRVVEKIRRDIEKLLKDHEDKSREVVRTIRELLDKLRRHTERTAREIRELIRRQDSREVVEDLKRILRELEKRSEDVLRELKKKLDDVEKESRDVLRELTEKLKKIEEDVRRAEK

SEQ ID NO: 2771 - protein, 182 aa, Artificial Sequence; identical to SEQ ID NO: 2770
  Synthetic

SEQ ID NO: 2772 - protein, 182 aa, Artificial Sequence
  Synthetic
REVEEIERRIRELLETNREIAERTTEEIKRLKKELEDSLEEIKKRLKELVDELRKLATDRRGDKTDLRRSVRRVEEEIRRLLDEHRKLSEEVMRTIEKLNEDSRRHTRETVEEIKELIKRLTIEEAVRRLEELVREIEDRSERLNKENEDELKKIEETSRKALKELEDRLREVKKEVREAER

SEQ ID NO: 2773 - protein, 182 aa, Artificial Sequence; identical to SEQ ID NO: 2772
  Synthetic

SEQ ID NO: 2774 - protein, 181 aa, Artificial Sequence
  Synthetic
DSDRELEKKIRDSLKRLEEALRELEERLKRSLEDDERVHEELRRRAERIRETIKKRLSDKDTLDKLKKEVDKLLTDLERVNRDTKRLNKELLDKAREVVKKLKEDNRRLLEDLKEIIKKPTRSELVKRMKERVDELHKRTEELLERLKEELKKLHDETRDINRELKKRLEDLERKIEEAAK

SEQ ID NO: 2775 - protein, 181 aa, Artificial Sequence; identical to SEQ ID NO: 2774
  Synthetic

SEQ ID NO: 2776 - protein, 181 aa, Artificial Sequence
  Synthetic
KEAEELRRLIEESKRTDKKVHEDLKEEVRKIEEEDDKAHEELRKEVERIKKKIDDDMSDEDTARRLRKEVEDLLRRLKKLNEETKRELERLDEKLRKVNEKTKEDNERLARELEEIIKKPTGSELIKRLKDEVKKLHDETERINRELKKELDDLLRRVRKINKELKEELKKLERKIEEAAR

SEQ ID NO: 2777 - protein, 181 aa, Artificial Sequence; identical to SEQ ID NO: 2776
  Synthetic

SEQ ID NO: 2778 - protein, 181 aa, Artificial Sequence
  Synthetic
SSREELEKRIRESEKRDREMHERLRRTAEKIEKEDKEMHDRLREKAERIEERIDKEVSDEDTARRLKEELKRLLEDLERVNRRTKEELERLLKEAEELNKRTEERNRKLEKEIKDIISRDTKSELIERIAERIERLNRDTERINRELEEKLRRLLKRIREINTELDKRLKELLDRIEEASR

SEQ ID NO: 2779 - protein, 181 aa, Artificial Sequence; identical to SEQ ID NO: 2778
  Synthetic

SEQ ID NO: 2780 - protein, 178 aa, Artificial Sequence
  Synthetic
SSEEKIEKASEDNERKVKEVLREIEELSKKDKTDVERVLRELEKRLEEIKREVDRRDRRREEMERLREEIKRLLDRLRERIEEVDKRITELNKDANDTVRRVVKEIKELNDRLRRRVREVDSEEDLKRELDEIDKRTEELARELRELMREIHERTKRLADDLRRAIDEIRKKIEEDAR

SEQ ID NO: 2781 - protein, 178 aa, Artificial Sequence; identical to SEQ ID NO: 2780
  Synthetic

SEQ ID NO: 2782 - protein, 181 aa, Artificial Sequence
  Synthetic
DELEDLLRRHRELVKRSLERLKDLLERNRELIEDSERRAEELLRELRRLIEEIKKVLDEGIDEKDIKKMLDELRRTAEEILKELEEVNERLNRASRKTLEEIKDSNRKLNDSVKKIEDRIKDKKVLEELKRSNDEANERHKTVLRRLEEENKRANDSHRKIKEELKDLLRRVDETVKEKRR

SEQ ID NO: 2783 - protein, 181 aa, Artificial Sequence; identical to SEQ ID NO: 2782
  Synthetic

SEQ ID NO: 2784 - protein, 181 aa, Artificial Sequence
  Synthetic
SRLEELLKTHKKLVEDSVDEVRRLLERNRKLIEDSKERLKELLRTNEELIRTLKEVLDRGTSEEDIKRLLDELEKHVRETNERSKRSNERLNRHVEETNKRTKELNDELNRSVKEIEDEIKDEEVLRRLKESNKKANEDHRRLNEENKDLNRRANEEHKKVNDRNKELLDRARRTADEKRR

SEQ ID NO: 2785 - protein, 181 aa, Artificial Sequence; identical to SEQ ID NO: 2784
  Synthetic

SEQ ID NO: 2786 - protein, 181 aa, Artificial Sequence
  Synthetic
DEVDELVKTHERLVEESERRIEELLERNRRLIERITERAKELLKENKRLIEEITEVLKRGSDEKDIERLLRELEKHVRETNEESKRMLDELRKHVEDTNRETKKLNDDLNDSVKKIEDRIKDKDVLERLKDSNRKANERHKRMNEENKRLLEDVERRIKELNKRNEDLLREAEKRVRDERR

SEQ ID NO: 2787 - protein, 181 aa, Artificial Sequence; identical to SEQ ID NO: 2786
  Synthetic

SEQ ID NO: 2788 - protein, 181 aa, Artificial Sequence
  Synthetic
SELEELLKTHKKLVEDSVERVRDLLRENKRLIEESEKEIRKLLDELRELIERIIELVERGESEETIKEVVDRLRRTVERIEKRLRDSNRELNDHVRRTNEETKRLNEELNRAVKEIEDRIKDKEVLERLKKSNKEANDEHRRLNDENRELNERANRKHKEVEDRLKDLLRRAEEKLTEDAK

SEQ ID NO: 2789 - protein, 181 aa, Artificial Sequence; identical to SEQ ID NO: 2788
  Synthetic

SEQ ID NO: 2790 - protein, 181 aa, Artificial Sequence
  Synthetic
DEVERLITKHRKLVEDSRRRVEELLRRNAELIKTSKRRVEELLERNRRLAEELRRLLKEGQSEETIKELLERLRKHVKETDDELRESNKRLNDHVKRTNEETEKLNRELNKVAKEIKDRIKGDEVLRRVEDSNRRANETHKDLNRKNKELNEEANRTHEELLRRNEKLLREIEDTVDRETK

SEQ ID NO: 2791 - protein, 181 aa, Artificial Sequence; identical to SEQ ID NO: 2790
  Synthetic

SEQ ID NO: 2792 - protein, 181 aa, Artificial Sequence
  Synthetic
SEVEKLLKELEDESRKSEDDNRRLLEELRRLSEESLRDLRRLLEDLKRLAEEIEREVRKRPEKELLEDLLRKLEKILRDIRRAIRRNIEENRRVLEEWKKRTDKNRRDNEDIVRRIRERIRGDELKKRVDEVLETSRELLRESKRKIEEIARRSEEELKRVKDEVDDTARRIKRKIEEAEK

SEQ ID NO: 2793 - protein, 181 aa, Artificial Sequence; identical to SEQ ID NO: 2792
  Synthetic

SEQ ID NO: 2794 - protein, 174 aa, Artificial Sequence
  Synthetic
DSERRLDEILERAREVNEESSRRLDKLLRETEEKNRKSTEELRKIVEDLKRTVKDESRTDEIEDLVRKIEEEIKKLIKESNDLVEEILRRSKDALRESNERVREILERIRDMKERGEDAETVIRRIEKLLEDLKRVDDKILEEHKDLSKKLDDVDREIKERIKKLIKDLKDTAR

SEQ ID NO: 2795 - protein, 174 aa, Artificial Sequence; identical to SEQ ID NO: 2794
  Synthetic

SEQ ID NO: 2796 - protein, 174 aa, Artificial Sequence
  Synthetic
DSEEELKDILRKAKEDNDRSSDKLRRLLEETEKRNRDSTKRLEELLEETEREVRRRSRREDIERLVREILTRSRKLIEDSNRLVKRILDESEKLLRDSNRLLEEVERRIKDLKDRGEDAETVKERIKKLLKDLREVDREILERHKKMSDDLKRVDEEISKTHKELSRRLKETAR

SEQ ID NO: 2797 - protein, 174 aa, Artificial Sequence; identical to SEQ ID NO: 2796
  Synthetic

SEQ ID NO: 2798 - protein, 174 aa, Artificial Sequence
  Synthetic
SKEEDLKRILEEAEKTNKESSDRLRELMDRTRRENEESSRTLKEIVKDADRRVAEIIRTDELRKLVRDIKETIKELDERSNRLAEEILKTSKKLDEDSNRLVEDVVRRIKDMVDRGEDVERVKEDIERLLDELRKVDREILETHKKLSEELRRVDEEIIKRVKDLIRTLEKAAE

SEQ ID NO: 2799 - protein, 174 aa, Artificial Sequence; identical to SEQ ID NO: 2798
  Synthetic

SEQ ID NO: 2800 - protein, 174 aa, Artificial Sequence
  Synthetic
SSEERLRTILREIEKTNRDSSKRLRDLLRETKRENKESSDELRKLLEETRDEVEKRRRDKEIERLVREILKTSEDLDRRSNREVERILRTSERLDRESNKLATKISEDIKRMTDKGEDSDTVAERIRRLLEELKRVDEEILKTHKDLSDRLRELDEEIKKTHEKLSEELRRAAN

SEQ ID NO: 2801 - protein, 174 aa, Artificial Sequence; identical to SEQ ID NO: 2800
  Synthetic

SEQ ID NO: 2802 - protein, 181 aa, Artificial Sequence
  Synthetic
KEVEEILETHKEIARELREVAEEIIRDHERILRDLEKKIRELRRTHERMVEELDRVAKEGVSEEELKRLLDELHERVKEILETLKRLLDKLHKTVEELKRTLEELLRDLHRLVKELEDRIKDKDALDKLRDSDRRVHEDVRRMLKRLDDSDKRVHDRVRKVLEDLKRSNDELRRTVEERER

SEQ ID NO: 2803 - protein, 181 aa, Artificial Sequence; identical to SEQ ID NO: 2802
  Synthetic

SEQ ID NO: 2804 - protein, 181 aa, Artificial Sequence
  Synthetic
SEVEKILEDHKRIVDELEKEAKKIEETHTELVKRLREEVEKLKEELRRLLEELKDMARRGVREEELRELLDRLREMVERILRRLRKLNEELNKVIEELKRRLEKLLEDLHRRVEELLREIKDEEALRRLKKSDEEVHRRVREILKRLEKSNRDLNDDSRKVEEELKRILRRIEEEAKRTED

SEQ ID NO: 2805 - protein, 181 aa, Artificial Sequence; identical to SEQ ID NO: 2804
  Synthetic

SEQ ID NO: 2806 - protein, 187 aa, Artificial Sequence
  Synthetic
SEAERLLDELRRLLEEIKRRIEELLEESKRSLEEVEKRSKELLDRLEDLLRKIKEEIRKDGTSDEVAKKIKELLERLEDSIRKVKEEDEKMLREHEETNRRIEKEIKDMLRKLEDDIKKVKDRLKDSPEEVKERLERLRERIKREIDRVIRELRELDKRAKEVSKRTKEELEKILEKVRRVIEEVKR

SEQ ID NO: 2807 - protein, 187 aa, Artificial Sequence; identical to SEQ ID NO: 2806
  Synthetic

SEQ ID NO: 2808 - protein, 187 aa, Artificial Sequence
  Synthetic
DDVDRLLDELRELIDRIRKDLERLLKESRDSLEELRRRSEELLKKLEEEIREVVERIRREGTGDEVREKIDRVAKEVERSVRKVKEEDKDLLRRHNELNKDIKRKIDELLKRLEEVVRRIKKRIEKDPDELKRRAEKLLEDLRRVIEEIKRRLDKVNDEVREVSKETTDRLDDLVRKARELIRRVEK

SEQ ID NO: 2809 - protein, 187 aa, Artificial Sequence; identical to SEQ ID NO: 2808
  Synthetic

SEQ ID NO: 2810 - protein, 179 aa, Artificial Sequence
  Synthetic
SEREKLLTDLRDLLKKVVDTLRRLNEELKKSIEESKETLERLNRTLKKLLDEVKKKLEDDGGEDKRVLDKIRDLLRKLRRAVEETKKTNKRLAEENEKLAKKSKEDLKKLLDDLEKVVKEVEETDELRKIVEEIRTELDRVRETNERILKEVRDEHRRVDKTNTDIERDIERVIKEVET

SEQ ID NO: 2811 - protein, 179 aa, Artificial Sequence; identical to SEQ ID NO: 2810
  Synthetic

SEQ ID NO: 2812 - protein, 182 aa, Artificial Sequence
  Synthetic
KKDEDLKKLLKDNEDVMKKAADEVKRLNDENRDLMRRVAEKIEDLLRRLEKLLRDILRRRGEEDERAKRLEELVREILERIERLLRESEKVHRESNERSKRLLEESKKLHKRIAEEIDELRRRGSDSKTVKDRIKRLTDELERVNRELSEEHKRVLDELRKRNKEILDRLKELLKRLKEEAD

SEQ ID NO: 2813 - protein, 182 aa, Artificial Sequence; identical to SEQ ID NO: 2812
  Synthetic

SEQ ID NO: 2814 - protein, 181 aa, Artificial Sequence
  Synthetic
SSEEELERLLEELRRITEEAKERMERSSKELEDVSREAEKRLEKSSRDLDKTVRDIKRRIKDKDTLREIDRLAKELKERNERLLEELRRSSEELKRRNERLIEESRKSSEEIKKRIKDLRRDSDDAEDVKRRVRELIEEHKRLNKELLDESRELLKTHAELVKRILDESRRLLEELEKAAR

SEQ ID NO: 2815 - protein, 181 aa, Artificial Sequence; identical to SEQ ID NO: 2814
  Synthetic

SEQ ID NO: 2816 - protein, 175 aa, Artificial Sequence
  Synthetic
SEREDATRRLRDIIRRLRDLIRRLTEESEESIKEIRERIERIIRTSEESLKELEERIRRNRDKRELLEELLRRHHELNKRLKEELKRILKEHAELNKRIKEELKRILKEAKERIDRLERTEDLERLREEIEDVVRKAEKRLDELHDEIRRTIEDAERRLDESNERAEKVVRDAEK

SEQ ID NO: 2817 - protein, 175 aa, Artificial Sequence; identical to SEQ ID NO: 2816
  Synthetic

SEQ ID NO: 2818 - protein, 175 aa, Artificial Sequence
  Synthetic
SDEERALEKIRRLIEDLRRMVREMLERSKKSLEEHKELAREILRRSRESLERLKDVARRNKEKEEDLKRLLKEHADLNRELKKRLRDSNREHNELNKDLKRKLRELLKELKKRVDELPRSRELDKLREELEEVVRRVEEKLDDSDRRANEVTREIEKTLDDLHREAEEVVKEIRR

SEQ ID NO: 2819 - protein, 175 aa, Artificial Sequence; identical to SEQ ID NO: 2818
  Synthetic

SEQ ID NO: 2820 - protein, 181 aa, Artificial Sequence
  Synthetic
SVEETLRRLLEESERVNRRVKEDLDRIRRESEEVNKRAEEMAKELLDEIRKDIDRVRKRNVDEDTLRKLLEEIKRLVDEWRRLVEENHKRNEDLIRKWEKLVRENHERNKTILKEVEERIRTEELAKEVIKTLRKLIEESKRNHEDLRRELRELIEESKRDHERLLRRLRELIKRIRDTTK

SEQ ID NO: 2821 - protein, 181 aa, Artificial Sequence; identical to SEQ ID NO: 2820
  Synthetic

SEQ ID NO: 2822 - protein, 181 aa, Artificial Sequence
  Synthetic
DEIEDLLRRAEKLIRDLKRKNDKLLKESEELLERLRERAKEVLDESKKLLEELRELVRRRGKTEEIEELVKEINKRNRELLKELSDLVKEINERDKEVLDRLRRDHERTLKTIDDLLKEIRDERAARDVERLKRRNKKVVEDSEDLARKTNKKSEELLREIRKRVEDSNRETKEILDRVRK

SEQ ID NO: 2823 - protein, 181 aa, Artificial Sequence; identical to SEQ ID NO: 2822
  Synthetic

SEQ ID NO: 2824 - protein, 174 aa, Artificial Sequence
  Synthetic
DEDEELLKRLRDLIREVRDRVRRLLEEDKDSLRRIRERVEELLRRSEESLKDLEKKIREGSPEEEIERLLREHEELNKRVLDEIRKLAEDNRDLTRRIKEKVEELIERVRDALRKLTPSEELKKIADKVEEVLREVEKELDKSRRTSDEILKKVEKAVRDLDRRVKEVIDRARR

SEQ ID NO: 2825 - protein, 174 aa, Artificial Sequence; identical to SEQ ID NO: 2824
  Synthetic

SEQ ID NO: 2826 - protein, 182 aa, Artificial Sequence
  Synthetic
SEAEELLKRLERLLRESKKDLERLRKELKDLLEESRKDVTRLLDEIRRLLEEIKRRLDKRNEDEKLDKLRKELKELVDRARRVLERNVRENEELIRDIERNLKKNREDNERAIKEILDELKDLEEVKRMIEKLKKESEEVIRKAKEDLDRVTKESRRVIEEVERRLDELRERLREVVERVKT

SEQ ID NO: 2827 - protein, 182 aa, Artificial Sequence; identical to SEQ ID NO: 2826
  Synthetic

SEQ ID NO: 2828 - protein, 182 aa, Artificial Sequence
  Synthetic
DEAEKLLKELRDLLEESRKDLERLLKELEDLLEESKRDLERLLEEITELLKRIKETVERRNEREKLEKLLRELKKVVERLKDNLKDNERRNKEAIERVRKKLKDNERENKKVIEDLRAKLKDLEEVKRKIDRLEEESRRVIEEARKRLEEVEEKSKKIIDDARRALDRIDKELRRVVEETRK

SEQ ID NO: 2829 - protein, 182 aa, Artificial Sequence; identical to SEQ ID NO: 2828
  Synthetic

SEQ ID NO: 2830 - protein, 180 aa, Artificial Sequence
  Synthetic
SVEETARRLLDENRKLLEEAERIHTEINERNKELLKRADDLHRRVLEDLRKLLDKVAKEIDSRRLERIEELVKRILEKLEKSNRDSNKEHKDTNERSKRSNDESRKVHEKTLKEIEDVTKEGQDADTVVKRIKKVIDELEELNRKSKKELKEVIEDLERRNRDSIRRAEDLLRRLEEEVR

SEQ ID NO: 2831 - protein, 180 aa, Artificial Sequence; identical to SEQ ID NO: 2830
  Synthetic

SEQ ID NO: 2832 - protein, 180 aa, Artificial Sequence
  Synthetic
KDEETVEKLLRELEELLKEAEERAKDLNRRNKELLDEADRRHEELLRRLEDLLRDVRRRIDSERLERLERLAKEIRERIKKSNEESNRLHEETNKRIEKLLRDLRKTVKEVLERIKDMKDRGEDSDTVSERIRKVIREIERLIKEIVKEIEKLIRDLEKRNRESLKEIKDLLKKLKDEVD

SEQ ID NO: 2833 - protein, 180 aa, Artificial Sequence; identical to SEQ ID NO: 2832
  Synthetic

SEQ ID NO: 2834 - protein, 173 aa, Artificial Sequence
  Synthetic
SRKEKLLTELKEILKRLKEEVEKIVKESEKSIEEHHRRSERLKRESKKSLDDLAKILERSDKKVIDEIAKEHHDLNREILREDKKLLDDHHRLNKDLLKTIKELIDEARRRMEELDQDEELEKIRREVEELLRRAEEELRRLNREIEENHKRVKRELEKIDKEMKDLLREAKR

SEQ ID NO: 2835 - protein, 173 aa, Artificial Sequence; identical to SEQ ID NO: 2834
  Synthetic

SEQ ID NO: 2836 - protein, 173 aa, Artificial Sequence
  Synthetic
DRKERLKERLERLLKEHHDRSRELLRTSEESIRRHHEESRRLLRRSKESLDRLRDELRRLREEDIDKLMREHHKLNRDLLKEDEDLLDTHHKLNRKILREDEELLRKIREEIEKLDKDEELRKLERRARENHKRVREALERLNRRIEENHKRVRRRLEDLDRAAEELLREAKR

SEQ ID NO: 2837 - protein, 173 aa, Artificial Sequence; identical to SEQ ID NO: 2836
  Synthetic

SEQ ID NO: 2838 - protein, 173 aa, Artificial Sequence
  Synthetic
SRKEDLKRRLEEIIKRLEEVVRRILRTSEESLKDHHEASKRLLEESEKSLKRLEEELKRKDERVIEELVRRHHDLNRRILEDDKRLLEEHHDLNKKLLEAVDKLLKEAEDVLRKLDKDEELRKIEERIRELAKRAREELDKLDKEVRKNHERVKRRLEELDRRAKELVREERR

SEQ ID NO: 2839 - protein, 173 aa, Artificial Sequence; identical to SEQ ID NO: 2838
  Synthetic

SEQ ID NO: 2840 - protein, 173 aa, Artificial Sequence
  Synthetic
SEKEKLLKEIERLIEELRRVVKKAVEDSKESIDRHHERSRELLRRSRESLKDLERRLKDSDESVIEKLVKEHHDLNRRILKEDRDLLREHHELNKKLIDKIRRLVEDVRRKLEELRKDRELEELEKRVRELERRIRETLTRLNEEIEKNHRRVEERLRDLNREAEKLAEEAKR

SEQ ID NO: 2841 - protein, 173 aa, Artificial Sequence; identical to SEQ ID NO: 2840
  Synthetic

SEQ ID NO: 2842 - protein, 173 aa, Artificial Sequence
  Synthetic
SEKEDLSRRLAELLKEHHDRSKKLLDESRDSLRKHHKASRDMLRRSDESLKRLDRVRKERDDEVIKELVKRHHELNRELLERDKKLLKEHHDLNEEIARRDETLLREIRKKLEEADKDEELDRIRKEVKKNHDRARRALEKIDKEAKENHERVREALRKLNEDLEKLEREKRK

SEQ ID NO: 2843 - protein, 173 aa, Artificial Sequence; identical to SEQ ID NO: 2842
  Synthetic

SEQ ID NO: 2844 - protein, 173 aa, Artificial Sequence
  Synthetic
REKEELIKRLKRLIDELRRVVKTLLADLERLLKEHHDRSRRILEESKRSLEELEKTLRRSDERVIEELLKRHHDLNRRLLEEDRELLRRLTEMIDRILEELERLLKELDDEVKKLDKDDELRKLKEELEDLARKARKEIEDIKEKLRRNHERVKKALEDLNRTAEELLDRARQ

SEQ ID NO: 2845 - protein, 173 aa, Artificial Sequence; identical to SEQ ID NO: 2844
  Synthetic

SEQ ID NO: 2846 - protein, 173 aa, Artificial Sequence
  Synthetic
SREEKLLKELKDIIDTLRRRVEEILTESEKSLRDHHRESRKIVEELRKLLEDLRRLLERKDERVIEEILKRLAERIRDLTRKDEKLVEEHHRLNRRLIDEIRKLFEELKEVLDRLDKNRELDKIEEEARELVKRAEEKLREIDKRARDNHKRVRDELKRILDELKKLIDERRK

SEQ ID NO: 2847 - protein, 173 aa, Artificial Sequence; identical to SEQ ID NO: 2846
  Synthetic

SEQ ID NO: 2848 - protein, 188 aa, Artificial Sequence
  Synthetic
SVEDSIDKIDKELEKNSERTKRTIDRIREESRRLIEEIKDRVRRLLREAERTIEDVKRKLKDDERARERIKELEEKVRRLIEKVRRRIKENLDRNDKLLREVEKVDKELNERLKELIKEVEDVLRKTRERRVVEELRERLKRLLEKHHDLMRRLTEDLKRLLEESERDARRLVKELEDALREIREDTR

SEQ ID NO: 2849 - protein, 188 aa, Artificial Sequence; identical to SEQ ID NO: 2848
  Synthetic

SEQ ID NO: 2850 - protein, 180 aa, Artificial Sequence
  Synthetic
SREDKVRELEERLKRLNERLNREVKKVNEDNRRLLKRAEDTARRLAERIRRLLERVDREIDSERLERVRRTVERIERELKRLLDELRKHVRETDEESRKVNEELNEMSERTLRELRKLKDNNVPDEELERRVEELLKRNEKLIREVKKRLEELLRRNEELIRRILEEVEKLLKDLEDKVR

SEQ ID NO: 2851 - protein, 180 aa, Artificial Sequence; identical to SEQ ID NO: 2850
  Synthetic

SEQ ID NO: 2852 - protein, 180 aa, Artificial Sequence
  Synthetic
RREERVKEALERIRRLNKRINERVEEVNRENKRLLDEAKRTHEELEKEADRLLDDVRRKIDSERLERIERKVKEIKERIRESNKRLKEHVEDTDRRSKELNERLNRSSEKTLEDIKRMKDSNVPEEELEKEIRKVLETNRKLAEDVRRDLERLLRRNRRLIEESKKEVEKLLKELEEDVR

SEQ ID NO: 2853 - protein, 180 aa, Artificial Sequence; identical to SEQ ID NO: 2852
  Synthetic

SEQ ID NO: 2854 - protein, 180 aa, Artificial Sequence
  Synthetic
RRDDKVRKLEKELRDSNRKANDESKKLRDELRRLNEEANRRVRELERRIERLLEKVKDDIDSEELERIERKAREVKKTLEDLNRKLNDTSRRSEEELKELNRELNRVVRELEEELRAMLENNVPEEELKKRVEEALEEHRRLVEEVRRRVERILERNDELIKRIEETVEDLLRRLEEEVR

SEQ ID NO: 2855 - protein, 180 aa, Artificial Sequence; identical to SEQ ID NO: 2854
  Synthetic

SEQ ID NO: 2856 - protein, 175 aa, Artificial Sequence
  Synthetic
SEIDEIVKEVERLLEKLKEDSRRTVEEVKKLLDELRKHSEDSVREIEELIERLRREIERDGDTEEVEKKIRDIKRRIEELLRRNEKLVKEIKDRLKKLLDENRERLKKIEKELRDKARAEEKLRRLEEELREILKRSEDLARKLDEDLKRILERTRREIKRLEEDLDRLDEEVRR

SEQ ID NO: 2857 - protein, 175 aa, Artificial Sequence; identical to SEQ ID NO: 2856
  Synthetic

SEQ ID NO: 2858 - protein, 175 aa, Artificial Sequence
  Synthetic
SESDEIIKEVDELIKRLRKHSKETVKEIEEILTRLEERSRKSVKEIEDEIRKLEDIVRKRGNTEEVRELIKKILEDIERMLEENERLAKEVKDRIEKLLRDNERLVRDIKRKLREKLSVEEKARTLERKLDKILEETKREAEELKKRLDELVEKTRRLIEELKRRLKELLDRAET

SEQ ID NO: 2859 - protein, 175 aa, Artificial Sequence; identical to SEQ ID NO: 2858
  Synthetic

SEQ ID NO: 2860 - protein, 175 aa, Artificial Sequence
  Synthetic
DESRKIVRDVEELIKRLEEHSRETVKRADRVLREDHKKSRDSVREIEKLIRDVKDKIDKRGRTEEVEKLLRDIIRKVEKLLEENRRHNRRVKEELKRALEENRRLLEEIKKEIEKKASVEEEVRRLKKELDDLLEETKDLIRRLEEKLDKNVKETEDEIRRLIEELKKILEDATR

SEQ ID NO: 2861 - protein, 175 aa, Artificial Sequence; identical to SEQ ID NO: 2860
  Synthetic

SEQ ID NO: 2862 - protein, 175 aa, Artificial Sequence
  Synthetic
REIDEIVKEIEKILRELKKRSDETVREIERLIEEDHRKSRKSVRDIEKLIDDLRKDVERRGDTEEVKKLIEDIDRRIKELLDRNRKHNTRVLKRIEDLLRENERLAREVEKRLKDDMRAEEKLRKLEEELRRLLEESKREADRLKKELRDNLKTTDELIKELKERLDKLKEDIER

SEQ ID NO: 2863 - protein, 175 aa, Artificial Sequence; identical to SEQ ID NO: 2862
  Synthetic

SEQ ID NO: 2864 - protein, 175 aa, Artificial Sequence
  Synthetic
DESDRIVEEVRRLIKTDHDNSRRSVRKIEELIARDHKKVKEIVDEIRRLIRELEELIRRDGDTREIEKLIRDIEETIRRALEELERHNERVKREVEKMLRDNEEHNKEVKERIRRKLRVKEKLDRLEEEIDKNVKRTREEIERLKRELDKNLEDVRRLAKELEDELRKLDEDAKR

SEQ ID NO: 2865 - protein, 175 aa, Artificial Sequence; identical to SEQ ID NO: 2864
  Synthetic

SEQ ID NO: 2866 - protein, 175 aa, Artificial Sequence
  Synthetic
SEIDRIIEDAERLLRELERNSDRSVEEIEKLIRDDHDNSRRTLEKIEKVIRELRKDVKDRGDTEEVERKIREILREIEELLRRNEKHNREVKERIKEVLRRNKELLDEIKKRLEDRVSSREKVKRLEEELRKILKKTREKAEELKRRIDRNVEETRRRARELKEELDRLLKEART

SEQ ID NO: 2867 - protein, 175 aa, Artificial Sequence; identical to SEQ ID NO: 2866
  Synthetic

SEQ ID NO: 2868 - protein, 175 aa, Artificial Sequence
  Synthetic
DESRKVIKEIEDLLEEWKRRSERMIRESEKLIEELRERVDKILEDIDRLIRTLDELRKAGVPREEIRKLAEEVRKRIEDLKREIKKLAEDIKRTDEKLLKESRDIVRKIEEIIRRKLSVEEEAKRLKDELEEILKESEDLSRRTKKELEDLLREVEKEIKKLEDKLKKLLDETDK

SEQ ID NO: 2869 - protein, 175 aa, Artificial Sequence; identical to SEQ ID NO: 2868
  Synthetic

SEQ ID NO: 2870 - protein, 175 aa, Artificial Sequence
  Synthetic
SETEKVIREIEKLIDDIRKESERSIEESRKLLKELEEIVEKAIRDSRRLLEDLRRLVEDGVDRDEIRKLAEEVERSDRELVKRIEDIARELKKRDEELLRENEKIVRTLEETIKRELSSEEKADTLRRKLEKLLEDTKRMSEKTKKEIEDLLKRVRELSEETKRRLDRILEDVER

SEQ ID NO: 2871 - protein, 175 aa, Artificial Sequence; identical to SEQ ID NO: 2870
  Synthetic

SEQ ID NO: 2872 - protein, 175 aa, Artificial Sequence
  Synthetic
SESDKVVKEIEELLRELRKRVEEIIRESEALIETLKKRVDDAVRESRKLIKDLRELIERGVPEKDIRKIAKDLEEKNKKLTDEIRRLAEELRDRDRRLLEEIEKLLRDIERTVDRKLSVREKAKKLREELRKLMEEVRRLSKETKDKLDELLKTVEELSKELRERLKRLLDEAET

SEQ ID NO: 2873 - protein, 175 aa, Artificial Sequence; identical to SEQ ID NO: 2872
  Synthetic

SEQ ID NO: 2874 - protein, 175 aa, Artificial Sequence
  Synthetic
SESDEVAKRIKELIDRLEERSRRSIRESDRLIKELEKEIEKAVRESEKLIRDLEELIRRGVDTREIEKLARELKKRNDDLTRKIEDIARKLKKRDEELLKENEDLVKEIDDSIKAALSVEEKMRTLEEDLKRLLEETRDMSRKTKEKLEELLKRVRDLSKKLAEDLRRLLEEVRR

SEQ ID NO: 2875 - protein, 175 aa, Artificial Sequence; identical to SEQ ID NO: 2874
  Synthetic

SEQ ID NO: 2876 - protein, 175 aa, Artificial Sequence
  Synthetic
SETDEVIKTLEELLERIKRRVEELVKRNKDLIKALEEEVRRIIKESKKLIDDLAELAKEGVPKKDIEKIARDLEKRDEELLDRIRKLAEELRRRSKKSLDEVRKIVRELEEEIDRRLSDKDKADRIREEIRKLEEEVKRLHDELKKELDDLLRRVEEDSKRTKERLRKLLTDVKK

SEQ ID NO: 2877 - protein, 175 aa, Artificial Sequence; identical to SEQ ID NO: 2876
  Synthetic

SEQ ID NO: 2878 - protein, 179 aa, Artificial Sequence
  Synthetic
SEVDDLIRRLEKLLEDIKRRVEELVRRDEKITKDWERESERLIRELEELLKTIADLVRRRKESKEEVEKVIRDAERKIREILETSKELLRRSKKHTKEVLEEVERLIDEARKMIEEVRKRNVDKKKLDEIRKRLEEILKRVRELLERLDRENEDLARKSKELADRIRKELKRILDEVRR

SEQ ID NO: 2879 - protein, 179 aa, Artificial Sequence; identical to SEQ ID NO: 2878
  Synthetic

SEQ ID NO: 2880 - protein, 179 aa, Artificial Sequence
  Synthetic
DEVDELVKELEESLRRSREEIERLVREDEELTKTIREEVKKLVKTDEDLSKKIEDTVRRRREADEKIKEMIDRSKKHTDEVLERVEELIKRSKDHTKEVVDRVEESIKRNDERLDEIRKRNVDKDKIKELKERNDKLLEEARRLAKELKERNDTLLKEVREELRRLRERNDRILKEAKK

SEQ ID NO: 2881 - protein, 179 aa, Artificial Sequence; identical to SEQ ID NO: 2880
  Synthetic

SEQ ID NO: 2882 - protein, 179 aa, Artificial Sequence
  Synthetic
DEVDKLIRDLEELIRRIRKRLKELVDRDRELTREIRRRIRELIEESKEALERIDKRVKERKEVREEVEDLARELKRLNDEVLKEIEDLLRESKKHTDDVRREVERLIKEIREKLEEIRKRNVDKDKIKKLKDDLDRLLKEAEDRLRELEERNKRLLDEARKEIEKSDRRLEEILERVRR

SEQ ID NO: 2883 - protein, 179 aa, Artificial Sequence; identical to SEQ ID NO: 2882
  Synthetic

SEQ ID NO: 2884 - protein, 179 aa, Artificial Sequence
  Synthetic
DEVDELIKTLKKLLEDIRERVERLVTDSKRSLDEIRETVRDLVRRDKELLKRIEDTVRERKEVREEVEELIKRSEEHTEDVERRVRKAIEEHKRLNDEILREVEELIKRIEEAIREVAKRNVDKDKLEKIKRDLEKILTEVREALRELDERLKKLAEEAKRLLEELRKRNRDILEKVRK

SEQ ID NO: 2885 - protein, 179 aa, Artificial Sequence; identical to SEQ ID NO: 2884
  Synthetic

SEQ ID NO: 2886 - protein, 179 aa, Artificial Sequence
  Synthetic
DEVDKLIKEIEESLRRSEKEVRDLVRESERSLKEIEKRVRELVKRDEDLLKEIEEVVRKKKEAREEIEEMAKRSEEHTEEVRKEVEELARRHKERNKEILKRIRESMKRNDELIDEIAKRNVDEEKLKRLRKENKDLRDRVEEELRRLDKELDELLETVRRLLDELRKRNKKLLDEARK

SEQ ID NO: 2887 - protein, 179 aa, Artificial Sequence; identical to SEQ ID NO: 2886
  Synthetic

SEQ ID NO: 2888 - protein, 179 aa, Artificial Sequence
  Synthetic
RLEEEIERLRREVEELIERSKDLIRRSHTKSRKLIEDVKRELDRLRREVEELIKRAEDRTRREEVDKKLKDLLRELEKILEEIDRNIRRNMKENEDLNRRWKEVTEELLKELEEILKRIRDRVEDRVVREAEKLIRKIAEDNRKALEESDELIRRSEKDVRDMVRRAEELIEEIKRRVD

SEQ ID NO: 2889 - protein, 179 aa, Artificial Sequence; identical to SEQ ID NO: 2888
  Synthetic

SEQ ID NO: 2890 - protein, 181 aa, Artificial Sequence
  Synthetic
SKDEEVERLKEELDRLLEEVRRLSEESKKRNDELLKRAEEIIEELKKELDEIREEVERRGLPEEKLERIERLVKRIKERIEDLLKKSREEHEKSKRRDEELLRRLEEVAKEVKRRLDEMARKGEDKDTVVRRAKKVIDELRKDVERVKRESDEVLKELEKLNREIEREVRKLLKELRDTVR

SEQ ID NO: 2891 - protein, 181 aa, Artificial Sequence; identical to SEQ ID NO: 2890
  Synthetic

SEQ ID NO: 2892 - protein, 181 aa, Artificial Sequence
  Synthetic
RSEEEARKLERENKKLVDDARKLSEESRRRNDKLVEEARRIAEELKRELDRLLEEVDRRGLPEERLRDIRRLIEEIKRRVEELLRRSKKMHEDSKKRDDDLLRRSEELHEEIRKAIEKMRKDGEDTKTVVDRVKKLLDDLREVNREILRESDKVLRDLKRLNDEIKREVEELLERLEREVR

SEQ ID NO: 2893 - protein, 181 aa, Artificial Sequence; identical to SEQ ID NO: 2892
  Synthetic

SEQ ID NO: 2894 - protein, 181 aa, Artificial Sequence
  Synthetic
SAEEDAERMKDRNRRLLEKVRRLSEESKRRNDKLVEDAKKLSEDTRRKLEDIARKVRKRGLPEDKLRRIEELVKEIEKRNRELTKRSEDAHRESKKRDEKLLRDSEKRHREVLKRIEDLLRRGEDKDRVSEEIDRLLRDLERRNREILKESKEVLDRLKKLNEEILKESEDLLRRLEEEVR

SEQ ID NO: 2895 - protein, 181 aa, Artificial Sequence; identical to SEQ ID NO: 2894
  Synthetic

SEQ ID NO: 2896 - protein, 176 aa, Artificial Sequence
  Synthetic
SEIEKVVKDVDKLLKELEDHTRKSLEDSKRLLDELRKHTEDTSREVKELLERLEEVIRRNKEMKEELRRIAKKIDEDIKRLVERNKKIADDIRREDKKLLDRNRELVDRIREEIDRRIRSKEDADRLRERLDRILEESERLSRETKEELDRLLEDSKRKIRELEERLKKLLDDAER

SEQ ID NO: 2897 - protein, 176 aa, Artificial Sequence; identical to SEQ ID NO: 2896
  Synthetic

SEQ ID NO: 2898 - protein, 176 aa, Artificial Sequence
  Synthetic
DDSDKVLKELEKLLEDLERHTRESLRESDELLKELKEHTKTTLRRSERLLRELKRLVDENKEAVERIEEAARRIEEEDRKLLKRNEELVREIEKRDRELLERNRKLAEEIKEAIRRKVRVEKDVEEVRRKVEELLKDSERLSKETKERLRDILRDSRRLSRETKEELKRILKEVRD

SEQ ID NO: 2899 - protein, 176 aa, Artificial Sequence; identical to SEQ ID NO: 2898
  Synthetic

SEQ ID NO: 2900 - protein, 176 aa, Artificial Sequence
  Synthetic
RESEEVIKEVEKLLEELKENTKRTLKESRDLLKTLEDHTRETKKTVEKMLKELEDKVRKRKESEEEIRKVVEDIKREIERLARENERIAREIEERDRELLDRNRKLAEDIEEKIRRKIRVEEEADRLRRELKKILDRSRELSRKTKEDLKKLLKESEDIIRELDRRLEEILKEVER

SEQ ID NO: 2901 - protein, 176 aa, Artificial Sequence; identical to SEQ ID NO: 2900
  Synthetic

SEQ ID NO: 2902 - protein, 176 aa, Artificial Sequence
  Synthetic
EEIERVIKEVKDLIEELRRNTERTLRESEELLKTLKKISDDSKEEVERMLRELRELVKSNKEAKEEIRKVADRIRKVIKRLMDENKKVADEIRKRDEDLLDENRKLIDRIRREIDKKIRSKEDADRLRREVDKLLEESKRLSEETKRELDRILEETKRTLERLKEELDKILEEVER

SEQ ID NO: 2903 - protein, 176 aa, Artificial Sequence; identical to SEQ ID NO: 2902
  Synthetic

SEQ ID NO: 2904 - protein, 174 aa, Artificial Sequence
  Synthetic
SEKEKLVEEVRRIIERHKRVTEELLKELRRILKEWEDVSRDIERRVREILERLERAARDGEDKRLVRELVKDIERLLKKLLDDSKKIVKEIDEVLKELLKTDEELVRRIREKLERADKDKDLEELKKELEDSARRSKKLADDVREELKTLLRESERIIKELRKELEKLLREVEK

SEQ ID NO: 2905 - protein, 174 aa, Artificial Sequence; identical to SEQ ID NO: 2904
  Synthetic

SEQ ID NO: 2906 - protein, 178 aa, Artificial Sequence
  Synthetic
TLEEVLKEVKRRVERVNEEDKRVLDESRKRAKEINDEDRRLLEESKRKAEELLERLRRKDKDAKEVEEKIKRVLEELAREHEKINERIKEEVKRLEEEHKKINERTKRLLEDLKRLVESGLDEDRLRREAERILREIRELSRELKRKNEELLRTIRRVSEELRKKNEEILERVDREIK

SEQ ID NO: 2907 - protein, 178 aa, Artificial Sequence; identical to SEQ ID NO: 2906
  Synthetic

SEQ ID NO: 2908 - protein, 173 aa, Artificial Sequence
  Synthetic
SAKELLDDLRKKIEDNVRETEKLLRRLREKVEKIEREIKELVRKLREDLERLLEKVKRRGVEEEVERLIREIIKKIEELVKRLEELLKEILERIEKLAEDNRRHNEEVKKDIDDKRIEKEVVDTVRELIERDHKKSRDSVRRVDELIDRARKDVRRVVEEVRKDLEKLDEDVK

SEQ ID NO: 2909 - protein, 173 aa, Artificial Sequence; identical to SEQ ID NO: 2908
  Synthetic

SEQ ID NO: 2910 - protein, 175 aa, Artificial Sequence
  Synthetic
REVEEVLKDLKRLIDEAKKRVEDAIREIDRLIREWERLNREMLREIKKSNDEVRELVKAGVPKEDIERLLREDNKLIEELLRRSEEIARDIERKIRKILEDLKRIIEELKKRVKDALRVEEAVRDVERRLEKLLKEIKDLIDRLKEKVDRVKREVERSIEELKRHNEEVLKEVRK

SEQ ID NO: 2911 - protein, 175 aa, Artificial Sequence; identical to SEQ ID NO: 2910
  Synthetic

SEQ ID NO: 2912 - protein, 175 aa, Artificial Sequence
  Synthetic
KEVEDVLEELDRLIETWARLNRELVERIRRLLEEWREENRKVVEEVRRSNETLRELVERGVPKEDIRRLAKEDNERIEELLKRSRKIADDIRRAIEEIVRRSREILRELEKRVDDKLRVEEVVRRVKDKLREVKREVEETARELRERVDDLLRKVEESVTRLKRHNEDLLREVER

SEQ ID NO: 2913 - protein, 175 aa, Artificial Sequence; identical to SEQ ID NO: 2912
  Synthetic

SEQ ID NO: 2914 - protein, 175 aa, Artificial Sequence
  Synthetic
SEVEEVLRDLKRLLEEWKKRNEDLVRDVERLLREWKEANDRALKKSRDSNKELERLARDGVPEKDVEELAKRDNEENKRLSEESARIVERIREKIEEALKRSTDIVREIEKRVEKALRKKEMVERVRREIKRLEEEVKKTITDLKERLKKLKEDADRSSRESEEHNKKVVEDVRR

SEQ ID NO: 2915 - protein, 175 aa, Artificial Sequence; identical to SEQ ID NO: 2914
  Synthetic

SEQ ID NO: 2916 - protein, 175 aa, Artificial Sequence
  Synthetic
REVEEVLKELDRLIDELRKEVEKIVREVERSNDEWRRRNKELVDEVRRELDRLRKLVDDGVDKKDIRRLLDEIRKLIERVLKESRDILRKDNERIKELADRIRRLVEDLERKIEEKLRVKEVVDDVKRKLEDLKRRVDELVRRLEEHNKDLRRKVEESAKDLRRKLEELRERVER

SEQ ID NO: 2917 - protein, 175 aa, Artificial Sequence; identical to SEQ ID NO: 2916
  Synthetic

SEQ ID NO: 2918 - protein, 176 aa, Artificial Sequence
  Synthetic
SEKDEVRKTIERLLKEVEKMIRRVLKEVEDLLRELKKRTEKLKRELDESHRRVKEVIERRKEDRDLLRRLIEENERLIEEAKRELDEVDERVRRRIEELLKELEKIVRDVEDMLRRLNLPRELLEEVERALKKLKEDVDKVIEELREKLKRHHEDVKRAIDRVREESKRLKDEAEK

SEQ ID NO: 2919 - protein, 176 aa, Artificial Sequence; identical to SEQ ID NO: 2918
  Synthetic

SEQ ID NO: 2920 - protein, 176 aa, Artificial Sequence
  Synthetic
REDEEVVKTLRELLREAKERTDRLLRELREIIKTMRKRLRDIEEDLRRSHREIEKLIRDRKEKREELRDIVRRNDELIRRLTEDLERLIEEARKVLKDIERDLERVDEELEDTLDKANLKRELLEEVRKELERHHREARRAVEEVKKLIDDLMREVRKLIDEVRKDSERLRREVER

SEQ ID NO: 2921 - protein, 176 aa, Artificial Sequence; identical to SEQ ID NO: 2920
  Synthetic

SEQ ID NO: 2922 - protein, 176 aa, Artificial Sequence
  Synthetic
DEDEEVKRRLEKLLEDADRVTEKIRKDLKETHDRVKRAIDELKKELEKSHRTIKEVIERRKEKRKDLTKIVRDNERLIEEVKKRLEELIRKNEEIIKELEKELKKIDDDLDKKIKDANLKRELVEEVRDRLRKHHKKVRDIVDDVDKRSKDLERTARRVIEDVKEKSDRLKEEVDR

SEQ ID NO: 2923 - protein, 176 aa, Artificial Sequence; identical to SEQ ID NO: 2922
  Synthetic

SEQ ID NO: 2924 - protein, 174 aa, Artificial Sequence
  Synthetic
EDEERVKEKLKRLLEKAEEALRRSKRRNEENKKEHERVLKEIDERLKRLEEKVRRGNLERRTVEEIRRILEDIKRKLDKLTKESEDLHRRNDERVKEVFRRIEKLIRDIEEDIKAGRSREDIERLLKELDDRIRRIIEELKRSDEELHKENRRKIKELEDLVREADKRIEDKRK

SEQ ID NO: 2925 - protein, 174 aa, Artificial Sequence; identical to SEQ ID NO: 2924
  Synthetic

SEQ ID NO: 2926 - protein, 174 aa, Artificial Sequence
  Synthetic
DDEKEIKDRLDDNKRKDDEMTKRAEDELRKNLETTKEALRDIKRKLDRLREKVERNNLDEKTLKEIEDVLRTIEEEARRLLEDSKRVHREIEERMKRLNDDSKRVHEDIKRALDGGVRREELEKIVRDLHKRNKEVIDDIRRLIDELHKRDRETIKRLEEIVRRADEKIKEKAR

SEQ ID NO: 2927 - protein, 174 aa, Artificial Sequence; identical to SEQ ID NO: 2926
  Synthetic

SEQ ID NO: 2928 - protein, 174 aa, Artificial Sequence
  Synthetic
SDEERIEERLKRNEETDKRATDENEKRNDDLLRRAKEALDRNRERNDELRDKVRKENLDDETVKRIEKLLRDNDRRLKELLRELEKRLRDNREKLKELNKESKKRHEEVRERLRAGVRREELSKLVKELHDDNREKIKDSDRSDDDIRREIERMIRETNKSDEDIARAIDESAR

SEQ ID NO: 2929 - protein, 174 aa, Artificial Sequence; identical to SEQ ID NO: 2928
  Synthetic

SEQ ID NO: 2930 - protein, 174 aa, Artificial Sequence
  Synthetic
SERERVEERLKELAKRVEDAIRRLKKDLERTKEEHKEADRRVKEKLKRLKEEVDRANVDEDLRRKIEELLKRAKDENKKLNEEVERILRELEKRYEELKRRIDRLLDTLRKKLEEGTRDTEVEELLKDVKRKIEEMIKELKRLNDELNKRSEEMIRRNDDLIKRLEEEIRKDSK

SEQ ID NO: 2931 - protein, 174 aa, Artificial Sequence; identical to SEQ ID NO: 2930
  Synthetic

SEQ ID NO: 2932 - protein, 176 aa, Artificial Sequence
  Synthetic
SSEDEVRKTVDELRERSERTIRDLERVDRELKKEHEELIKELREIVKELREKVKRASKEPTSEREIERLKEELERTMRELHKKNKRVREKHEELLEELRRRNRKLNEEVKKTVREMRDKVDKRIEEELRKLHKENKEAVERSERTNRDILRRNDEADKEIEKELRELIEKLERDRK

SEQ ID NO: 2933 - protein, 176 aa, Artificial Sequence; identical to SEQ ID NO: 2932
  Synthetic

SEQ ID NO: 2934 - protein, 175 aa, Artificial Sequence
  Synthetic
SEKEDLKEKLKRNEEEHRRAVEEIRKRLDENRRRHEKVIKEIEDALKKDEDDVDKENLDEELRKELKRLHDEIRRRLEELNRRSKKRHKEVEDKLRRLDEESEKMHRRVEDLIRRGELDKDELTREIEKLHRTNREMVRDLRETLKRLHEENKRLVDELRRLLEELHRRTREASR

SEQ ID NO: 2935 - protein, 175 aa, Artificial Sequence; identical to SEQ ID NO: 2934
  Synthetic

SEQ ID NO: 2936 - protein, 174 aa, Artificial Sequence
  Synthetic
SEEEEVRKALERLRRELKRVLERSEELLKEWEDRLRRVLEESRRLLERWREELEKDGIDEDVLRELEKDIKKVKEDHDRDAEKLRRIIEEIRKRHEEVFRRLEDLLRKVRERLERGRRREELKEILKRLEDTLREIEKEAKRLNDELARVLEEIRRKSERENRRLKELIDRLRK

SEQ ID NO: 2937 - protein, 174 aa, Artificial Sequence; identical to SEQ ID NO: 2936
  Synthetic

SEQ ID NO: 2938 - protein, 171 aa, Artificial Sequence
  Synthetic
SDRERLEEMLKRLKEELEKVRRDNERSLEEIKRSVDRVLEEHKRTLEELKREVDRANVDEDLKRELKELLEDSKRRVEELKEKHERLLRKNKKELDELKKRLDDLLKKIRDDDVRGEEADEVVKRLADVLEKAREDLKRSDKRLRDSNRESRKELEKINRDLRRKLEEAKR

SEQ ID NO: 2939 - protein, 171 aa, Artificial Sequence; identical to SEQ ID NO: 2938
  Synthetic

SEQ ID NO: 2940 - protein, 171 aa, Artificial Sequence
  Synthetic
KDEERLETVLREIETRAEKVARDHRDSLRRIREELERVLKENKDTLKRIREELEKTNVDEKLKTEADRLEEENERRLRELEKELDELLKRSEDTLRKLLKELRELLKRVRDRQVRGEEVKRVLKELRDLLEEIRKRLEDINRDLKRKLDEIEEELRRSDEKLKRDLEEARK

SEQ ID NO: 2941 - protein, 171 aa, Artificial Sequence; identical to SEQ ID NO: 2940
  Synthetic

SEQ ID NO: 2942 - protein, 171 aa, Artificial Sequence
  Synthetic
SDEDKLREDLRRLEEELKKVLDDHRKSLKEIEDSLRRVLEENKRTLEKLKRDAEKANVDEELLERLKKLLDDNRKRVEELEERHRRLLKESEERLRRLVEEFKRLLEKIERDQVRGEEAKKVVKALEDVLREIRERLKRINDELRERNKKSSDELRKSDERLKRELDKMRK

SEQ ID NO: 2943 - protein, 171 aa, Artificial Sequence; identical to SEQ ID NO: 2942
  Synthetic

SEQ ID NO: 2944 - protein, 183 aa, Artificial Sequence
  Synthetic
DADKELEKLLREWEKRSEELRKRLEDINRRWEEESKRLKKELKDINADLRRKVEELRRDEDKDRVREVVKRLSERNDEVDRKVKKTSEDIADRNRREDKKIREDSKKIKEDLERALEELREKVSSDVIRRAKEELDRIEKKDRDVLDDNRRLIETWRREDKKVNDDNRRSNEELKRELDKTRE

SEQ ID NO: 2945 - protein, 183 aa, Artificial Sequence; identical to SEQ ID NO: 2944
  Synthetic

SEQ ID NO: 2946 - protein, 183 aa, Artificial Sequence
  Synthetic
SAEEELKELLERWDRDSKRAEEELRRLLEESRERSEKVLRDLKRLLDEMEDAVRKLKRDSDKDRVRRTVEELTKTVRKKLEEIERRTREIKKELERTLKRIEERSREIKKDLERSLERLRKDVSSEVIERFKDVLRRIEKRNKEVIDRAKEVIDEDEKRNREVIERVERKVERLRKEVEDREK

SEQ ID NO: 2947 - protein, 183 aa, Artificial Sequence; identical to SEQ ID NO: 2946
  Synthetic

SEQ ID NO: 2948 - protein, 184 aa, Artificial Sequence
  Synthetic
EEKERMREVLKRLEEEAKKVLDDNRRAVEEIEKKDREVHKRNRDLLERWREEMEEILRKARERVDKEDLDRLEETLRRLIEDNRRKDEEIRKVSEDVKRDNRKKNEDIKRRLEELKKTVADVERKNSREEELKKIIERAREELEKVRRELEEHLKRWDEISKKLSKDLERHNEEVARTLKRSRD

SEQ ID NO: 2949 - protein, 184 aa, Artificial Sequence; identical to SEQ ID NO: 2948
  Synthetic

SEQ ID NO: 2950 - protein, 181 aa, Artificial Sequence
  Synthetic
SVLEEFKKRIEELHRRDRKVLEDHRRRLKEWEEELKRVLDEHRESLKRIKERVDRVKKDLDDEELKRVDKKLKDLEKKSRDLVREVEKILRELRKRSKDAEDKVKKVNEDVRRRAEKLARDLREDSDALRELLREWDKLSKELEKELRDLNREVERSIREAKKKLEKANEEMRRTLEKDRK

SEQ ID NO: 2951 - protein, 181 aa, Artificial Sequence; identical to SEQ ID NO: 2950
  Synthetic

SEQ ID NO: 2952 - protein, 181 aa, Artificial Sequence
  Synthetic
STEEDAERALEELKEELRRVEKENRDSLKRIREKLKEVEDEHRKTLEELKKELDDVMRKIKDERKKRKVEKLRRELEKAKRDSEKLLRDLERKIDEVEKTSKKMLEELERDLRKILDDVRKAKLDKDSLKRLLDEARKKLEELKRRLEKLDRDLDESLKRLKEDLDRLDRELRRLLDELDK

SEQ ID NO: 2953 - protein, 181 aa, Artificial Sequence; identical to SEQ ID NO: 2952
  Synthetic

SEQ ID NO: 2954 - protein, 181 aa, Artificial Sequence
  Synthetic
SVEEEARKALDDLRRRLEEVTRRHRESLKELREELDEVRKENEKSLKKIKDDLEAVRRRITDERKKRKVDEARERIKEVEERSRRKLRRLEEEIDKAEEESERLLETLKEELKRLMDEVEKAKRDEEELRRLLKKLEDDLRRLKKRLDELDRRLRELVKRLLEDLKRLDDELKKLLEETER

SEQ ID NO: 2955 - protein, 181 aa, Artificial Sequence; identical to SEQ ID NO: 2954
  Synthetic

SEQ ID NO: 2956 - protein, 175 aa, Artificial Sequence
  Synthetic
SAEEELKRLLEEHKKESEDVKRRLRDLLRELEDIHRRMTERLRELLKRLDDILRRRNSDDETLKRLVDELRKEIKKVEDDDHRNLERLREELRRLEEDLKRRNEETKEEVDRVRKKGSLTEEILKKLEEISRRVREKVKKELDELKELIRRHARKLEKILEEIRRLIEDLERRAR

SEQ ID NO: 2957 - protein, 175 aa, Artificial Sequence; identical to SEQ ID NO: 2956
  Synthetic

SEQ ID NO: 2958 - protein, 184 aa, Artificial Sequence
  Synthetic
SEAEEVLKRIRDILETLRREHERILKEIRELNEEFKKEVEKALRKIKRELEELEKDAEREGTTEELRKKVEKLLRDIKETLRRLEEKSRELEERIRELLKRLHETVRTLEERIKDLREELRERVDERVEKKIEELLREIRKVNDEVHKRIRKLLEDHRRTVDEARRRIEELLRRLKKTLDDIDK

SEQ ID NO: 2959 - protein, 184 aa, Artificial Sequence; identical to SEQ ID NO: 2958
  Synthetic

SEQ ID NO: 2960 - protein, 181 aa, Artificial Sequence
  Synthetic
SDKDELKRLLDDHERTSTRARESLEKLSREHRKTSREVEERLKRLVDAIRDTARRVDSRRREVEETLKEIEKRLRELKRELEELDKEFEDSVRKLKRELERLNEEVRKRVEDLKRRMAEGTDEEVVRRILRELRELNERAKEMLERILRKLEELNREYKKKVREILERIKELLRDLRRKAN

SEQ ID NO: 2961 - protein, 181 aa, Artificial Sequence; identical to SEQ ID NO: 2960
  Synthetic

SEQ ID NO: 2962 - protein, 181 aa, Artificial Sequence
  Synthetic
SADDEIRKLKKEAEDILRKAREDRERLKEKNRKIDEDMRRTLKKLHEETRELEKKVRREKGEDERVKELLDDLRRKDDDMRKRVTELHEENKKIDDEVRREVERLEEEIRDTIRKLDEDVKRDGVTEELVKEIRELLRRLEEKIEELRRRYEKKLEELKRKVDELIRRYKRKLERVAEEVK

SEQ ID NO: 2963 - protein, 181 aa, Artificial Sequence; identical to SEQ ID NO: 2962
  Synthetic

SEQ ID NO: 2964 - protein, 175 aa, Artificial Sequence
  Synthetic
SEEEELVRRVEEKIKASEKHARELVEETRKKLDESRKKWKDLARRSRRLLEELKDKVDKGTDKKRLAEEIKRVLDEHEDENRKLADEDRELRKRHKEKNKEHEERNRRLREELERRLDETEELRRLEKELRDLNKRVKEESRKLEEDLKDIHERAKEDSKRLKRELEKIKEEVER

SEQ ID NO: 2965 - protein, 175 aa, Artificial Sequence; identical to SEQ ID NO: 2964
  Synthetic

SEQ ID NO: 2966 - protein, 181 aa, Artificial Sequence
  Synthetic
DAERILRELEERLKRLLDEHREISKELRKRNKDLLKEHKERSKRVKEELKELVKEVEDGGKPREDVDRLRKSAEKVEEELDRMDEEFERDNRELDRRLDELDKEIEELVETVRERLERAEERGEPIEELVKEVEKLIKELREKSREVEREVDKMIRDNARKSEKIVRDAKRLLEKLEREVR

SEQ ID NO: 2967 - protein, 181 aa, Artificial Sequence; identical to SEQ ID NO: 2966
  Synthetic

SEQ ID NO: 2968 - protein, 181 aa, Artificial Sequence
  Synthetic
RSEDILRELRERVKRSEERHEKISRDLERKNRELLKEHRERSEKLKRELEELVKRVEDRGLPEERLKELRKIAEEVDRELEEMDRRVEEMNERLDRRLEELDDENRKKVKEIKRKLDEDAKRGEEAEDLARRVDETIKDHERHSEEVKRDVTEKIKENEKLSRDIVRRVEKLLRDLEREVR

SEQ ID NO: 2969 - protein, 181 aa, Artificial Sequence; identical to SEQ ID NO: 2968
  Synthetic

SEQ ID NO: 2970 - protein, 181 aa, Artificial Sequence
  Synthetic
SREDILRDLRRRLEELLRRHKRISDELRKRNKKLLDDAEKRAKELREELEKLVREAERRGLPEEELKRLKEIADEVKKRLDELVKELRRDNERLDKTLDDLNREVEELVRRVEDELRRAAERGEEIEELVKRVDKLIKELKRKSEEVMKRVDELIRRNERLIREIVKEVEKLLEDLEREVR

SEQ ID NO: 2971 - protein, 181 aa, Artificial Sequence; identical to SEQ ID NO: 2970
  Synthetic

SEQ ID NO: 2972 - protein, 181 aa, Artificial Sequence
  Synthetic
SAEETIERLKEEIEKLLREAEEILRRLRERNRRLLEEHKDISRKLEEELRKLMEKVRRGGLPEDRLRELERRLKEVEDRLKDLNRKVEEKNKELDRRLDKLAEELKKEIRDVERELDDLRRKGTEVEELVRRVRELIKRLRDMAKEIEERVDETIRRNRRLSEKVARDVERLLRELEERVR

SEQ ID NO: 2973 - protein, 181 aa, Artificial Sequence; identical to SEQ ID NO: 2972
  Synthetic

SEQ ID NO: 2974 - protein, 181 aa, Artificial Sequence
  Synthetic
DAERILKELEERLDRLSEEAKKILDELRRENEELLREHDERVKKLKEDLKRLEKKVEDGGLPEERLDRLRKLVEKVRKRLEDLNKRTRELNKELDERLERLLEELKRTIEKVKDELRKEAEKGTEVEELVKRVTKLIEDLRRLAKKISDEVRKLIEENRRASKRVEDEARELLKRLEDAVR

SEQ ID NO: 2975 - protein, 181 aa, Artificial Sequence; identical to SEQ ID NO: 2974
  Synthetic

SEQ ID NO: 2976 - protein, 172 aa, Artificial Sequence
  Synthetic
SEIEKMVKDVRDLLKRLKDEVKKISERWEDSLRKLKKRSEDTVKRVKEILEELRRRNLPRDEVREEVKKIKEELDRLNEEFKKRNEEDRRDLERAAEEIKKLLKDIEDELRRRLRKRDALRELERELDKLRKEIKKELDRLRKENREVNERHKELSKRLEEELERVKRELDT

SEQ ID NO: 2977 - protein, 172 aa, Artificial Sequence; identical to SEQ ID NO: 2976
  Synthetic

SEQ ID NO: 2978 - protein, 176 aa, Artificial Sequence
  Synthetic
DEVRELVKTVKKVLDDIRREVEETLRRYEKLVEDLKRRSDKSVKDVDDEIKRAEEEGDKDKELIDRIREEMEDLKRKHEDEHRRIEEELKRLNDEVKKILDELRERLKRLDEDLRRKRLDEELIKRLREEAEKLIRRAKEEHERLEEESKRLLEENEELLDRLDKKVRTLLDKLEK

SEQ ID NO: 2979 - protein, 176 aa, Artificial Sequence; identical to SEQ ID NO: 2978
  Synthetic

SEQ ID NO: 2980 - protein, 179 aa, Artificial Sequence
  Synthetic
SEEDRVRETVKKLLEDHRRKTEKVTEDVRRLLKENREKVEDAVDKARKLLKRLEELRREGELSEDDLRRVIEEIKRRIDEVERRLRKHHDDIRRTLEELDRDNDETLRRIEKELKRLVDEKVDDEKLKRIEEELRKSRERTKRLLEEIRKELEDSKKEVEDLLRRLREELKRLKDEIER

SEQ ID NO: 2981 - protein, 179 aa, Artificial Sequence; identical to SEQ ID NO: 2980
  Synthetic

SEQ ID NO: 2982 - protein, 182 aa, Artificial Sequence
  Synthetic
SEVEELVKRAEELIRELKKLSEDSVRELEKLLDEYRKTTEKLKRELEELLKEVEDVVRKLRDQDDDEKIRKTAEELVKRLEDILRKLEEVNREKKERAKRLLEKHEELLRRLDRRLEDLRRKIKVDEKLLRKIEEDVRRLKETNERLLKRVDEELKRLDEESRRVLKEAKERLKELKDRERK

SEQ ID NO: 2983 - protein, 182 aa, Artificial Sequence; identical to SEQ ID NO: 2982
  Synthetic

SEQ ID NO: 2984 - protein, 178 aa, Artificial Sequence
  Synthetic
DEVEKVLDELEKVIREVEERIKTTNKRLREVVERVERRIDKSDRELEEMIERVERKLEDDERARRLIERLRDLLRRLRKRSKELIDELRKLLKDLEDRSRDLLRELRELLERIKRKVEAGTPSEEVRKEVRRLDKRVKEIVEESRKLVKELAERVEEIVEESKRLVEKLAREVDETRR

SEQ ID NO: 2985 - protein, 178 aa, Artificial Sequence; identical to SEQ ID NO: 2984
  Synthetic

SEQ ID NO: 2986 - protein, 178 aa, Artificial Sequence
  Synthetic
SEIEKALKEAREAIEDAKKKIDDTDRENEKASRDAERRIDKSDKEAEEAVRRAEEEAEDDERARKLIEDLRKLLKELKETSEKLKEEIRRSTEEHRRRSEELKKELEKLADEIEKAARAGRDKDEVTKAARKAADDAREAAERSRKLAEENARRAKKAADDSRKLARELAKEAKKAAD

SEQ ID NO: 2987 - protein, 178 aa, Artificial Sequence; identical to SEQ ID NO: 2986
  Synthetic

SEQ ID NO: 2988 - protein, 175 aa, Artificial Sequence
  Synthetic
KELEDVLDTVRRAIERVKRESKKINDELEKELKKVKDELDKSHEEVRRAVEDVARKLKDVEEVKRDLERLLKEDRELIKRIVDRLRKLLKESKDHSREVVKDLRRVLEELRKLVEEGLDVKDIEKLVRDVVRRAEKVVDDDRKLVRDIVRDAKRVVRDSERTVRDIVKKADENTK

SEQ ID NO: 2989 - protein, 175 aa, Artificial Sequence; identical to SEQ ID NO: 2988
  Synthetic

SEQ ID NO: 2990 - protein, 175 aa, Artificial Sequence
  Synthetic
SKLEKILKDLERAVREVARELERTHRELEEAVKKVKKRLEDTNRRLTEALKRVKDKLDKVEDVKRKLDKLNEDDRRLIREIVEELRRLLEENKRKLDKIEEDLRKLLEDLDKLVKDGLDVSEIKKLVDDIVRRLRKVVKDSEREVREIMKRADDVVRTSEKTVEDIVKEAEDDAR

SEQ ID NO: 2991 - protein, 175 aa, Artificial Sequence; identical to SEQ ID NO: 2990
  Synthetic

SEQ ID NO: 2992 - protein, 175 aa, Artificial Sequence
  Synthetic
SELEEAAKRAREAAKKAKEALKRSLKEAEDAAREAEEDLKRSNDKNRKATREAEERAKTARELLKRLRESTKKHEEDTKKLAEDIRRLLEELRKRSEELAREIDKLLEDLERLIRAGLDAEEAKKAADDLARKAKEAADESKRLSEELAKKAKEAAKTSDKLAKENAEEAKKAAK

SEQ ID NO: 2993 - protein, 175 aa, Artificial Sequence; identical to SEQ ID NO: 2992
  Synthetic

SEQ ID NO: 2994 - protein, 175 aa, Artificial Sequence
  Synthetic
DELERVLEDLKRVMEEVERKLRESNKELEKAVRRVEELLKRSNEKNRKVTREVREKAKTDRELLEELDDSTRKHEEETKKLVKEIRDLLEELRKTSERLVEDIRRLLKELKELIEAGLDAKDVEDLVRRLMEKLERIVEESERLSDELRRRAEEVVKTSEDLVRENAKRVDDAAK

SEQ ID NO: 2995 - protein, 175 aa, Artificial Sequence; identical to SEQ ID NO: 2994
  Synthetic

SEQ ID NO: 2996 - protein, 175 aa, Artificial Sequence
  Synthetic
DELEEIEKKLRDVVREVEEKLRETNRRLREVVKRVEERLKKSNEDLRRAVRKVEESVKTLEEDLRRLKELLRRLEEESRKLVEEIRKLLKDLERRSKELVDRIRKLLEELKRLIEAGLDAKDVEKLVKELMEEAEKIVEESRERVDRLMKRLDDIVRESERLSKELADRADEVEK

SEQ ID NO: 2997 - protein, 175 aa, Artificial Sequence; identical to SEQ ID NO: 2996
  Synthetic

SEQ ID NO: 2998 - protein, 179 aa, Artificial Sequence
  Synthetic
RELEEILRTLEEMIERVKEKHERSKRELEKVITEVKEELRRSNEELRRVIEEVERKLGKESEEAKDVVDEARRLLREHEELVREVEKTARDLLRENEKLVEDSERRVEKLRRELKRLVEEGVPVDEVRKVVEDIVREAEKSVRENEELVKAIMRELKRVVKEAEELSEEIVRRLEERTR

SEQ ID NO: 2999 - protein, 179 aa, Artificial Sequence; identical to SEQ ID NO: 2998
  Synthetic

SEQ ID NO: 3000 - protein, 182 aa, Artificial Sequence
  Synthetic
KELEDVKRRLEKVHRDVNEASKEIVTRLREVHKRANDESKKIIERLDTVLREVARRLADRRRDKKVEKLLRDIAREAEEIKKRVKRLNDENRKRVEEVEKRVTKLNDENRKKVEDLLRVIDRGDLDAEEVERRVRELEKDVRRLVEDIRRLVEELMRNAKEIVDTAEKLVRELERKLEEVVR

SEQ ID NO: 3001 - protein, 182 aa, Artificial Sequence; identical to SEQ ID NO: 3000
  Synthetic

SEQ ID NO: 3002 - protein, 182 aa, Artificial Sequence
  Synthetic
DEVEDIIRRLEKFHREVNEESKRIIEELERVHREVNRKSEEIVRKLEKVLDEVREKAKRRSRSEEVRKRLEEIADEVRRVKEEVERLNRENKREVDRLKKEVEDLNRDNRKKVEEVIKVVEDGKLRAEEVEEVVRRLVRHAEAVVERIERLVEELVRNAEKLVEEVKRKADRLVEEADRTVR

SEQ ID NO: 3003 - protein, 182 aa, Artificial Sequence; identical to SEQ ID NO: 3002
  Synthetic

SEQ ID NO: 3004 - protein, 175 aa, Artificial Sequence
  Synthetic
DELEEVKRRLDEVNKRVEDEHRRVEEELRKVLEDVAREHEEVIKELERVLEKVRRAKGGDEEVLRRLTKKVEDISRDSKRLLDELREDIKRIIEDSKRLLEDNRRHSKEIKDTIDRDKKSDEARKLVKENERRVEETVRRSEKLVRDAMKKAKDTVRRSAELVKELMDRVERVVR

SEQ ID NO: 3005 - protein, 175 aa, Artificial Sequence; identical to SEQ ID NO: 3004
  Synthetic

SEQ ID NO: 3006 - protein, 171 aa, Artificial Sequence
  Synthetic
SEVEKVKKEAREMLKRVTDLLKEVNDRLKEVNKRVREEIRRVIERVREVLKRVAREVDKREMLERLEERVRRAEERVEELLRENERHSKKVSDDSKRLLDELRKIIKEIEDANLPLEDLRRVVEELEKRARDVVEESRRLVDEDRKHVEDVVRRVRDVVRELEERAERITR

SEQ ID NO: 3007 - protein, 171 aa, Artificial Sequence; identical to SEQ ID NO: 3006
  Synthetic

SEQ ID NO: 3008 - protein, 181 aa, Artificial Sequence
  Synthetic
SEVEKVVEENKKSVKTVRERVTELVKRNRDSVEEVKRRAEEMVRRNRKSVEEVRELLARGVSEEVLRKAKEDNDELNKRVRETLKELVKRNDDLLKRVTDDLDKLRRDNERLVEDIDRKNLPEEAKRRVDRVSEELEEVLRRVEEELRRVSKDLRRVLDEVKKEVDRVSEDLERVLRKDTT

SEQ ID NO: 3009 - protein, 181 aa, Artificial Sequence; identical to SEQ ID NO: 3008
  Synthetic

SEQ ID NO: 3010 - protein, 184 aa, Artificial Sequence
  Synthetic
DEVDEIVRRIEEIVRESEEMAERIVRDIKRVVEKSRKDVEDNVDELRKIVEKVEETAKRTRDEELLERLAREVEEVIKKSEESLKRINDTSKRVKDELEKKNTDLNDRTRRVAEELKKEVSRLRDRDAERKVRDLLRDLERVNTEADEKSKKLIKELEKVNKEAEDKSRKLIKELEDVLREARR

SEQ ID NO: 3011 - protein, 184 aa, Artificial Sequence; identical to SEQ ID NO: 3010
  Synthetic

SEQ ID NO: 3012 - protein, 184 aa, Artificial Sequence
  Synthetic
SSVDEIVKEAEKVVEDSREEAREIVERAEEIVRDSARKVDENVRRLEEIVRKVKEVADRTRSDELLEALAREVEEVEKESKESLRRIDEKTRKVIEDLKKLLEELDRKSEKVVRDLERKVDRLRDRDAERKVREVIERLKKVNDEVRKKLDELTRRLEDVNRKANERSTDLVRKLRRVLEEARR

SEQ ID NO: 3013 - protein, 184 aa, Artificial Sequence; identical to SEQ ID NO: 3012
  Synthetic

SEQ ID NO: 3014 - protein, 178 aa, Artificial Sequence
  Synthetic
SADRKIEEMRKEIKRSTDEARRLVEELIRKIERSNEKVKRDVEKLIEDIRRVIRRVREDNTLDEKDVKRVEDEVEKIIRKLEEDLKRISEETRKLLEELKKRLKEIEEKSKKLIEDLEREPNSEELKKKLEDIVREDEKLVEELTRLAEDIVRRDTKLVRELLERAKRVVDRVREEVK

SEQ ID NO: 3015 - protein, 178 aa, Artificial Sequence; identical to SEQ ID NO: 3014
  Synthetic

SEQ ID NO: 3016 - protein, 178 aa, Artificial Sequence
  Synthetic
DAEELVRELEERIKRSHERLEELLREVKRLIERSHEELKRLNEEVLRELDRVLDEVRKRKKDVEELLRELEERVRRIKERSKESYRRSKESLDRAKEVLEELYRRSKRSLEEFERELREKGVDKDVVRELERIVKENSELAERVFREVEKIVRENTKLAEDSVRELKRLVEELKKRVK

SEQ ID NO: 3017 - protein, 178 aa, Artificial Sequence; identical to SEQ ID NO: 3016
  Synthetic

SEQ ID NO: 3018 - protein, 176 aa, Artificial Sequence
  Synthetic
SDVEDVVRKLRELVKTNLKKVEDRVRKLKEEVEENVRRAEKIVRELEEEVERLLKLVADGRVDKDELRRLVERIKRELKRVLDEDKKTVDEIDKEVKRLVEEDRETVDRIREEIKKRVRGREVAEEVERRLERSHRESRKLADEVRRALEKSNRKTRELLRRVDERVEEVREELDR

SEQ ID NO: 3019 - protein, 176 aa, Artificial Sequence; identical to SEQ ID NO: 3018
  Synthetic

SEQ ID NO: 3020 - protein, 177 aa, Artificial Sequence
  Synthetic
SMEELVDKVEKELEESSRRSKELLDEVRRLLEESNKKTEDLLREVEELLKDVEREAEEKGSSEEKKDRLRKLADRIRDELKKVRREDEKSLEEIEDRLRKAEKEDRDSNREIRDKLRKDGVDEDVVRDVERLVEENRERVKRIADEMRKLVKENEDRARDVVRRLRELVKRLRERVE

SEQ ID NO: 3021 - protein, 177 aa, Artificial Sequence; identical to SEQ ID NO: 3020
  Synthetic

SEQ ID NO: 3022 - protein, 175 aa, Artificial Sequence
  Synthetic
KELEDIARDLERLLRENKKLIKEIVDRLRRLLEDNTRKVKKIVDEVKKLLDDLDKLRKDGVDEKEIEDVVREIAERLKRVLEEIEESIRRIEKVIEEVARESEKLSEDIEREIRKKITGKEVADKVREDLERSNDEMRRVIEKIREDLRRSLKEAKERLDEIKERIDRLLDAARK

SEQ ID NO: 3023 - protein, 175 aa, Artificial Sequence; identical to SEQ ID NO: 3022
  Synthetic

SEQ ID NO: 3024 - protein, 181 aa, Artificial Sequence
  Synthetic
KLEELLTEVRRRIEEVSRDLERVLREVEEDIKRTSDELDRVNRKVETEIKEVTERAEEKGVDRRDLKRLKDEVDKMSKESRDRNEKTIREVRELLKRIRDENRKSNEEVRRVEEDIKRKVRDEELVREVIERLKELVKKDKKLVEDVLRELKRLVDEDRKLVEDSLRRAKEIVDRARERVK

SEQ ID NO: 3025 - protein, 181 aa, Artificial Sequence; identical to SEQ ID NO: 3024
  Synthetic

SEQ ID NO: 3026 - protein, 179 aa, Artificial Sequence
  Synthetic
SIEDVLREVERLLREVIERNRKVHEEVNERSREVERELKRVHDEANRESEEVIREAKRKGIKDIERVEEKVKELNRENAERIKRVVEEVRELNERNRESSERVEEEIKKLLKTLADLVRAGVPVEELERRAREIVKRVRELVDTHRENLERIVERAKELIKELEENLRDIVREIRERVR

SEQ ID NO: 3027 - protein, 179 aa, Artificial Sequence; identical to SEQ ID NO: 3026
  Synthetic

SEQ ID NO: 3028 - protein, 176 aa, Artificial Sequence
  Synthetic
KEVEEVADRSRRVVEESKRRLDDVVRRVKEDSDRLRRDIERMVKRIKEIVKRVREEIGKDKRELVERVREEADKVVETARKLLDEVEKHARDIVRRIEELARRDKRSVERSEEEVKRVDDRKILKELLDRDRKSVKESEDEVKRLLDSNHELSRRIREELKRLLEKVKELVDRVRT

SEQ ID NO: 3029 - protein, 176 aa, Artificial Sequence; identical to SEQ ID NO: 3028
  Synthetic

SEQ ID NO: 3030 - protein, 176 aa, Artificial Sequence
  Synthetic
KEVEDVKRKLEKIARDSEEALRRVVDELRKIVTESKKKLDKAVKEVKDDSKRVEETIGKDKREVVDEVRRHAEEIVKRIEDLAKKDKDLVDEVVKTIEKLMTDDKRLVDEVVRRLEKTRDRDIMRKLLEEVKRSIDESKKRVKELVDEVRDSVRRSEEEVERLLRSNHRLSDEVRK

SEQ ID NO: 3031 - protein, 176 aa, Artificial Sequence; identical to SEQ ID NO: 3030
  Synthetic

SEQ ID NO: 3032 - protein, 176 aa, Artificial Sequence
  Synthetic
DDVERVIEEVKRVVDDSKRRAEEVVEESRKIVTDSERKVREMVRDVRRIVKEVEERIGKDKKDVVEEVKRVAKEVVETAERLVREDKRSSEDSVRKIRRLVTEDERLAREVAERLKRTRDRRIVKKLLEDVRKSVKESKDTVDKLVEENKRSVDRSLRELEKLLKEVEDLIREVTR

SEQ ID NO: 3033 - protein, 176 aa, Artificial Sequence; identical to SEQ ID NO: 3032
  Synthetic

SEQ ID NO: 3034 - protein, 176 aa, Artificial Sequence
  Synthetic
DEVDEVVKRSRDVVTESEKRLRDVVRRSKEIAEDSRRRVREVVERLKEIVREVEERIGKDKKDVVREVRERVKKVVEELERLVKEDEDSSKRSVEEIRRLAERDKRSADESVKELRKTTDRRVVEELLRRDEKSVEDSLRRVEKLVEDNRKTSEDIEREVRRLEEEVRKLVEDVTK

SEQ ID NO: 3035 - protein, 176 aa, Artificial Sequence; identical to SEQ ID NO: 3034
  Synthetic

SEQ ID NO: 3036 - protein, 177 aa, Artificial Sequence
  Synthetic
REVDEVVERMKELVATVKRENDEVVKELKKLVKELEDDNRRVVEESKKSVEDLARRVGKDKREVVEEVRRTSKELVERNEETAKRVDDLVRRLVEENRRSVTEVEELVKELVKELRRESTSRDLVREVEKRVRDIVEESRKLAEETRKKVEDIIEKSKRIAEDTLEKNKEMVERLER

SEQ ID NO: 3037 - protein, 177 aa, Artificial Sequence; identical to SEQ ID NO: 3036
  Synthetic

SEQ ID NO: 3038 - protein, 175 aa, Artificial Sequence
  Synthetic
REDELVERLVDKVRRSSKEVRDRAEEMVRRNEKLVRDVEEDLDRLVEENKKLVDSVSRLRGEKAEEAVRRSKKVVDDIRERVKRALDRSRKVVEESREELERLLKRDKELVDEIKERVRIKEVVDRLRELVERSEKDVRKVVEEDKRITDKLEKRVREVVKRNEEITDELRERVR

SEQ ID NO: 3039 - protein, 175 aa, Artificial Sequence; identical to SEQ ID NO: 3038
  Synthetic

SEQ ID NO: 3040 - protein, 188 aa, Artificial Sequence
  Synthetic
SSIERVAKLVEEVERHVRKSIKDVEKLVRDVERHIEESVKTVSKLVEDVKRAVEELRRKVKEKEELDELVREVKRRIEDVVRRSRDLVRKNEELLRRVAEEVRRLVDENRELAERVVEEVRRIGTSEDVERLVREVVKRLEEIVERSERLVREVEERLKEIVERSRRLSKENEDELRKIEKEVRDRVK

SEQ ID NO: 3041 - protein, 188 aa, Artificial Sequence; identical to SEQ ID NO: 3040
  Synthetic

SEQ ID NO: 3042 - protein, 173 aa, Artificial Sequence
  Synthetic
KDVEDAERRLKELLDRLKRFVEESVKTSKKIVDDSKRVVEESAKRSRDIVREVKDRVPEDLVREVEKLARDTERRSEKLVTDNAEIVKRTVEESKDLLKKVEEVVREVVKRARDENVREKIEELVKEVDKLIKDVVRRMEKLNREVKKSADDSAREVEELNRRVREVVERVRT

SEQ ID NO: 3043 - protein, 173 aa, Artificial Sequence; identical to SEQ ID NO: 3042
  Synthetic

SEQ ID NO: 3044 - protein, 173 aa, Artificial Sequence
  Synthetic
DEVEEVEKELRELVKRSEEVAREVKDRLRKLVEESERVVRESRRKSREIVEEIRKKVREDLVREVEELVKRTIERSTELMEDNKRLVEEVEDRARKLVKENEDLAREIVKEVRDRNVKDEARRLVEEVKRSVEKSVKELEDLVEEVKRSVEESVKEAKELNDRVDETVKRRAT

SEQ ID NO: 3045 - protein, 173 aa, Artificial Sequence; identical to SEQ ID NO: 3044
  Synthetic

SEQ ID NO: 3046 - protein, 173 aa, Artificial Sequence
  Synthetic
RSVDEVEKELRELVERITRFVEKSVRDSRKIVEDSKREVEKVKDDLRKIVEEIRRKVPEKDVERVKRVVEEVERRVETLAEENRKIVERTERRSKELVDTVREVVREVVEKVRKDNSEEDAKRLVKEVAELIKRVVEEMKKLNDEVEESARRSVEEARRLVEEVKRLVDEVAT

SEQ ID NO: 3047 - protein, 173 aa, Artificial Sequence; identical to SEQ ID NO: 3046
  Synthetic

SEQ ID NO: 3048 - protein, 184 aa, Artificial Sequence
  Synthetic
EVEELVERVLRELERLVRENKESSDRIKEELRKLVEDNEKSVRDTKRTAEKLVDDLRRKKDEERVEELARRIAKTVEKLVEEDRKSVEDTIKRVEDLVREDEKSVRDSVRKVRELVKRVEENVKDERVVRKVREDVKRVERLSKEIVDDSKREVEKVVETSRRIAEKSTDVVRRVKRELEEITR

SEQ ID NO: 3049 - protein, 184 aa, Artificial Sequence; identical to SEQ ID NO: 3048
  Synthetic

SEQ ID NO: 3050 - protein, 180 aa, Artificial Sequence
  Synthetic
SMKELIKRVKDLVDEVRKKVERLIEEVSKLVDDVKRHIRELIETVKRLVKEVADLLRAGREKEEVVKLLEEVVRRVKKLSKENEERLRTVVERSKKLVDDLRRDAERVAEEVRKLVEDVNDEEARRLVEKVERDLKDIVRRVEELSRRNVERLKEIVKESRELVKEVVERLKRIAEEVTT

SEQ ID NO: 3051 - protein, 180 aa, Artificial Sequence; identical to SEQ ID NO: 3050
  Synthetic

SEQ ID NO: 3052 - protein, 175 aa, Artificial Sequence
  Synthetic
KEKEDVKRRLEELIRRLEEHSKKVKRDLERVIKELDDEVRRVKERHEDVIRRLKDRDTSEKVLRDEAERIRRESEEINKRLEEKAERIKKEADDLLRENEERVKKIERELERLRTEGKLDDDVVRRVKELLRRVLEHTRKVVEDVRRLLKRIREKLEEISRKLDELLRRIEEKRR

SEQ ID NO: 3053 - protein, 175 aa, Artificial Sequence; identical to SEQ ID NO: 3052
  Synthetic

SEQ ID NO: 3054 - protein, 177 aa, Artificial Sequence
  Synthetic
DREDEVRKDIERIERELRRVVDELRKEVEDSMRKLDEEVKRLEEHIRESVERLEERVSEDRDDRVVKTIVKEADRDHKELERELDRLRKEVKKTNDDLERKIRKLEKEAEDVLRELAKRGIDEKVLRDLKRVVDEVRKELKDVLDRHNKVVREVERKLEEVIDKHRKAVEKVKRDAK

SEQ ID NO: 3055 - protein, 177 aa, Artificial Sequence; identical to SEQ ID NO: 3054
  Synthetic

SEQ ID NO: 3056 - protein, 177 aa, Artificial Sequence
  Synthetic
SREEELKKEVERLVREAEKHVEDNRKHVEDSVRELEKLVKELADKARESADRLDKKVKEDRDKRVVEKILREAEKINKDLKDTVKKILDEIREDHKRLEDNIRRLEEELRKVLKELKDRGIEERVLEELKRVVDDIRKKHKDILKRHRDVVRKVEKELRDILREHNEVIREVKDKLE

SEQ ID NO: 3057 - protein, 177 aa, Artificial Sequence; identical to SEQ ID NO: 3056
  Synthetic

SEQ ID NO: 3058 - protein, 183 aa, Artificial Sequence
  Synthetic
SEVERILKEAKRRLDEVVERLRKSAETLRRMLERVSRELKKSHDELDRVLRRVEDALRKRNLDEKSVRRIKKEIDEARKKSKKVLDEIEERAERVKRESREVLERIKKRIEDVIRRLAEIVREQRRDAEELRKEVEDMVRDLERLVREHSDRVRKIVTDLDRLVKEHNEEVRKIVERLDEEVK

SEQ ID NO: 3059 - protein, 183 aa, Artificial Sequence; identical to SEQ ID NO: 3058
  Synthetic

SEQ ID NO: 3060 - protein, 179 aa, Artificial Sequence
  Synthetic
SELDEILERLKEVLERVKRKLEESNRRLEEVLDRVLKKLTESVKRLEDELRRVLKELRENNRPDDRLKEKVERVREESEEMRDRLRRLIERVREESKRILEELERRAREVKKRAEDVRRRGKPIEEIKKDVERIVRELEDLVRRHEKRVEDIVRELEKIVRDHNERLKEIVRRAEEDVR

SEQ ID NO: 3061 - protein, 179 aa, Artificial Sequence; identical to SEQ ID NO: 3060
  Synthetic

SEQ ID NO: 3062 - protein, 179 aa, Artificial Sequence
  Synthetic
RELEEILKRLEEVLERVLRELRKSVERLRKELERVLKELRDSNRKLDKVLREVLEELRKKNKDATDLKRRLDEARKESKDVIKTLDERVKRVKEESDEMLERLKELLDRVREEAERVARRGEPAEDLERRVKEIERRLKRLVDEHNRRLREIVRELEEIVKRHKERVEEIVRELKRRVD

SEQ ID NO: 3063 - protein, 179 aa, Artificial Sequence; identical to SEQ ID NO: 3062
  Synthetic

SEQ ID NO: 3064 - protein, 179 aa, Artificial Sequence
  Synthetic
SELDDIVRRLDEMLKRVEDELRKSDERLDELLKRVKKELEKSNRDLERALREVLKELEDRNRPNDELKRRIDEVREESRRVIEELDRTVKEIKRRSEEMSKELKRTADEVRKRADEVRKRGKDARELEEEVERIVRELEKLVEEHKEELERLARKLEEIVRRHEERVRRIVKELEDRVK

SEQ ID NO: 3065 - protein, 179 aa, Artificial Sequence; identical to SEQ ID NO: 3064
  Synthetic

SEQ ID NO: 3066 - protein, 179 aa, Artificial Sequence
  Synthetic
RELDEILRRLREELKRVREELEKSLKRLEDELRKVEEDLRESNERLERMLERVLRELRKRNRPDDELKKKLDKVRKESEDMSRRLKETADRVREKLKDSKRKLDEKVKRVEKRLEEVRRRGKDVDELRKELEKIAREAREYVKRNKDDLRRIVEELRKIVKKHKDKVEEDVRRLKKDVD

SEQ ID NO: 3067 - protein, 179 aa, Artificial Sequence; identical to SEQ ID NO: 3066
  Synthetic

SEQ ID NO: 3068 - protein, 173 aa, Artificial Sequence
  Synthetic
RELEEILKKLEEVVRTVEELHKRTNEKLEKAVDEVRELHRKTNEDLKRAVDEVEKAGLPKELVDRLRELLKDNKRRSDEIIRKIEKVLEDNKRKSEEIVKRLREELKRLADVIKDLEKDRLDEEVKRLVEEARRSVEDDDRNIRRLVEEAKDSVRRDEETIKKLVDELREATR

SEQ ID NO: 3069 - protein, 173 aa, Artificial Sequence; identical to SEQ ID NO: 3068
  Synthetic

SEQ ID NO: 3070 - protein, 173 aa, Artificial Sequence
  Synthetic
SDLERILKRLREVIKRAEELHRKTNEEDERVVREVIELHRKTNEDLREVIERVARGGLDEKMIERLERLLKENTERSKEISERLKRETEENIERSKRIVEDIERLLEELRRVVKDLDKEELRKAVEELEEKLERSVREDKKTSDDSARRAKKSVEDDRRTIEKLVEEAERSRK

SEQ ID NO: 3071 - protein, 173 aa, Artificial Sequence; identical to SEQ ID NO: 3070
  Synthetic

SEQ ID NO: 3072 - protein, 183 aa, Artificial Sequence
  Synthetic
KDLEKLLDDIRKVLEEVTRRLKRISDELRRVLEEIKKRLDKDNEDLKRVIDEVKKLLDKKVRDEKRVKDLVDRAREIHRRHAEEVKRLVDKLREIIRRDEKSVEDWKRRLEKILEDLKRVVDRNERSREEIEKEIRDVEEELRRAVEENAELVKRVKEDAERVVRDSEKKSKEVAEELKDAVR

SEQ ID NO: 3073 - protein, 183 aa, Artificial Sequence; identical to SEQ ID NO: 3072
  Synthetic

SEQ ID NO: 3074 - protein, 182 aa, Artificial Sequence
  Synthetic
SELEKILKELKDASREVEKRLRDILREDKKMLKKVVEELEEILRRLDEEVKKVKERLKNKEVLERLEEEVRRLKERIKKLIEDLKRESERLEDTIRKLIRELRENTKRLEEKIRRLKKKGEPREEVVDRAKKEVDDHVKKAEDVVREVEKRSRESVKRLRDIVEELERLVKRLVDEAEREVK

SEQ ID NO: 3075 - protein, 182 aa, Artificial Sequence; identical to SEQ ID NO: 3074
  Synthetic

SEQ ID NO: 3076 - protein, 175 aa, Artificial Sequence
  Synthetic
SETEKLLEEVRRIIEEIKKRIDRSLEEVRRSVEEAKRRIEKSLEDVEKSVRRVKKILDEGDSSERLKRENDEHLKTHHEVVKKILKDNREHLRRHHETLKDIKRRIDKVVEDLRRAGLDDRVLKEVEDLAREVKKRIDEVDKRVAELHKEVEDRLREVDKTVEELHRRVKKRADD

SEQ ID NO: 3077 - protein, 175 aa, Artificial Sequence; identical to SEQ ID NO: 3076
  Synthetic

SEQ ID NO: 3078 - protein, 180 aa, Artificial Sequence
  Synthetic
SIEDVEREVKRLIERTKRHNDRVLETIRRLLEETKKHNEKVLREIRELIKRVEDTMRRRGVDERLRDELRKILEDLERESRKLKEDNKRALEELARMSKKLKDDNDRALERLKDTVKEERSEETIKRLLDEVREYVRKSEEDSERLLRDVERYVKESKERSERILKEARRLVKEVEDKIR

SEQ ID NO: 3079 - protein, 180 aa, Artificial Sequence; identical to SEQ ID NO: 3078
  Synthetic

SEQ ID NO: 3080 - protein, 180 aa, Artificial Sequence
  Synthetic
SIEEVLEEVRDLLRKTKEDTKRILDEIRRLLEETKKRLEEVLREATKLLREVEDLVRKSGVDERLLEEIKRIEDELRKKIETIRRRNDEALKRLTDLVEENKKRNDDILRKLKEERDEDRDEEEVKRLLEKARKLVEESKRESKEILDRARKYVKESLEEIERLLDELRKLIEELRRRIE

SEQ ID NO: 3081 - protein, 180 aa, Artificial Sequence; identical to SEQ ID NO: 3080
  Synthetic

SEQ ID NO: 3082 - protein, 176 aa, Artificial Sequence
  Synthetic
SSEEILKEVKELIEESNRASEEVLKEVKKLLDESKKRSDEVLEEVERELKRLEESASRIDDEKRLREVRDVLRRIRERLDRVRKENEKILKEVKDTLKKVKEDNEDISRRLEEEIKKKGADEDVVREMRRLVEEDKRRIKEALDRLRKLVEDDKRRIEEVLREMRELIRELEERIR

SEQ ID NO: 3083 - protein, 176 aa, Artificial Sequence; identical to SEQ ID NO: 3082
  Synthetic

SEQ ID NO: 3084 - protein, 175 aa, Artificial Sequence
  Synthetic
KEIEDILERLKETIKEIEDHIRRDLEELKKVIEELKRSLEEWKKRAERLIEELERLIRETGPTKELEKEARDRLRELEEAMKRNVEKIDKIKRENEKNSEDLKRRLERVLRELRKSGLEERVLREAEERIRRLEEKLKEVNKRSEEMLRRLKEEHERVLREVKELIREIDDKARK

SEQ ID NO: 3085 - protein, 175 aa, Artificial Sequence; identical to SEQ ID NO: 3084
  Synthetic

SEQ ID NO: 3086 - protein, 182 aa, Artificial Sequence
  Synthetic
GEDEVLRKVEKLLREVKERAEKSVERVERLLKDVEDKLKESHDRAKRLLEEVKKAADRGDLREEELDRLRKKIEDAYKRSEDILREIKKEIKRVLDRSRETLKRVEEELKKVLDTLADLVRRNEEDLKDLDRRIEEVVKRLEDEVRRHTKEVEEMVKRLRELVREHTERVKKIVEDLKREVD

SEQ ID NO: 3087 - protein, 182 aa, Artificial Sequence; identical to SEQ ID NO: 3086
  Synthetic

SEQ ID NO: 3088 - protein, 175 aa, Artificial Sequence
  Synthetic
SEVEDVERRIREIIERLRRIVERHKEEVKKIIEKLEKLVRDHTERAKRIIERLKEVVDRKMPRELIKEELDRVREDSKRVLDELRRKLEEVRERSRKALEDIKRRLDEIRDELRRRISNEEVLKEVERLLEEVKELVERSHKEAEDLLKRVLDAMKRSVDEVEKLLEELKRRADK

SEQ ID NO: 3089 - protein, 175 aa, Artificial Sequence; identical to SEQ ID NO: 3088
  Synthetic

SEQ ID NO: 3090 - protein, 175 aa, Artificial Sequence
  Synthetic
SKVEKVEEDIDKIIRRLEELVEEHRTEAEKTVKKLDDDVRRHNEKVEKIIRDLEEVVRRRKPEKDIEDKLRRVKEESERVLEEMDRRLRRVEEESRRLHERAREELERVEDELRKKIENRKVLEDAKRLLERVMDEVRRSNEELKKLLEEVKRKLKKSVEDAERLLDEVRKRVEK

SEQ ID NO: 3091 - protein, 175 aa, Artificial Sequence; identical to SEQ ID NO: 3090
  Synthetic

SEQ ID NO: 3092 - protein, 175 aa, Artificial Sequence
  Synthetic
SEVEEVDKRIREIVTTLKRLVEEHNDRARKIIEKLRRLVKKHEDEVEEIVRRLDEAVERRLPREEIERKLREVEERSKEVHKRLEDELEKVKRESEKMKREADERLKKVEKDLRDTISNEEVLKKVKELLKEVKRRLERSLEELERLLEEVLKLMKESNDKAKELLERVREKVER

SEQ ID NO: 3093 - protein, 175 aa, Artificial Sequence; identical to SEQ ID NO: 3092
  Synthetic

SEQ ID NO: 3094 - protein, 177 aa, Artificial Sequence
  Synthetic
DFVERVKEEIKRIVERLKRLVKEHEDEVKRILDELRKLVETHKELSKDSLRKLEEVGDGSEDDIRRLLEENKKMDKEVNDKVRKLAKDVRDIDRRMNERVERLLREIEKTLEDLRRENKVDERVLEELRRLVKEVKERADRSSEKLNELLRKAEEDAKRSSEENNRRLEEVERRVRK

SEQ ID NO: 3095 - protein, 177 aa, Artificial Sequence; identical to SEQ ID NO: 3094
  Synthetic

SEQ ID NO: 3096 - protein, 181 aa, Artificial Sequence
  Synthetic
DEERKIEEIIDKSRRDWERLLREAREIIKRSEDEWRELLERIKRLIEETRKRAKDLKKADGRERVVEEIEERVRRINEETKKLVRELLEKDRKLIEDLRKKLRELREKDKRLIERIKEERDTEEIRRLLEEMDKLSREASKRVEDILRELEERSRRMADEVRKLNEENKKLLEEAKKELKD

SEQ ID NO: 3097 - protein, 181 aa, Artificial Sequence; identical to SEQ ID NO: 3096
  Synthetic

SEQ ID NO: 3098 - protein, 181 aa, Artificial Sequence
  Synthetic
DKEEIKEKLEELVERVVRELEKLLKELEDLSREVARRIKKIARDLEKLTKEVEEKLRRRPKTEELTELVKRLKEHSERLRRRIEELLRRLEEDSRRLVERIKKLVKDLRDDVRRLKELIDRGELSEEELERLIKELVDRARKLLEEVKKLIEDHREKLKRVLDEIKDLLRKHKETLDRTDT

SEQ ID NO: 3099 - protein, 181 aa, Artificial Sequence; identical to SEQ ID NO: 3098
  Synthetic

SEQ ID NO: 3100 - protein, 181 aa, Artificial Sequence
  Synthetic
SKEDILRELRDRVERIKREIEKIFRDAKRLSEEVKRRIEDLLRKLKKVSDDVRERLARKPDTEELRKLVEELERDSERLKKEIKDLVRELDEHSKELLTRIRKLLKELEERVRELEELIKRGDLSEEELKELIKRLVEDAKRILEELKKLLDDHERKARRILERIEKLIKEHEDKARERER

SEQ ID NO: 3101 - protein, 181 aa, Artificial Sequence; identical to SEQ ID NO: 3100
  Synthetic

SEQ ID NO: 3102 - protein, 181 aa, Artificial Sequence
  Synthetic
SEVEKLEEEVERSVRDLERELRDSEEKSKELMRRLDELVRRAKDHVRRSVEELRKTLSKGLDEDEVRDLERRVREDHEKLKEDLKRIVREAREALKKHRRRVEEIVKRVKERLEELRRRIGDDEEVRRILRDAERVIEEIKRRLEEDHKRLEEVIRRVEEKLRRILDEHDKVVKEIKEALR

SEQ ID NO: 3103 - protein, 181 aa, Artificial Sequence; identical to SEQ ID NO: 3102
  Synthetic

SEQ ID NO: 3104 - protein, 181 aa, Artificial Sequence
  Synthetic
SEVEEAEKEVEDIMRRLKRKVEENKRHVDESVKEAEKLLRDSETRTRDIARRLKEELDKGLDEEEVKRLAREVDRLLREHREEVKKIIERIDRDNDRNREHVEKVVREVEELLRDLERKIGRDKELTRILTRLREVIERVKRALEKSHDDHRRAVEEVRKELKRDHDDLRRVIEKVRRDLK

SEQ ID NO: 3105 - protein, 181 aa, Artificial Sequence; identical to SEQ ID NO: 3104
  Synthetic

SEQ ID NO: 3106 - protein, 181 aa, Artificial Sequence
  Synthetic
SEVEEAKRRVDDIVRKLEELLKDSRRESERIMRELKRLLEELKRHVEDSVRKLREVLSRGLDEEKVERLIREARKDNERLKRELERILREVEKALKRHRERVEKIDREVRERLKDLERRIGDDRELREILRRAKEVIDKIREDLERDHDRLREVIEEIKKTLDRIHEEHRRVVKEVEDTLK

SEQ ID NO: 3107 - protein, 181 aa, Artificial Sequence; identical to SEQ ID NO: 3106
  Synthetic

SEQ ID NO: 3108 - protein, 181 aa, Artificial Sequence
  Synthetic
SEVEEAEKEVREIMKELDKLLEDSKRESDDIRRDLDRVLEENKRHVDKSVTDLERVLSRGLDEEAVRELLRRAREDNRRNKEHVDRLVKKAKDKLDEHKKKVDDIIEKARRELKRLEDEIGDDKELRRILRELEEVIKRVERTLREDHKELKRVIDRMKEDLERSHEEHERLVEEVERKLR

SEQ ID NO: 3109 - protein, 181 aa, Artificial Sequence; identical to SEQ ID NO: 3108
  Synthetic

SEQ ID NO: 3110 - protein, 181 aa, Artificial Sequence
  Synthetic
SEVEEAKKDVERIMRELEKLVRDNKKHVDDSVRKLKKLLDDLRKHVEDSREELERVLRRGLDEELVKELRKRAEDDNRRLKEELDKIKEEADRDNEENAKHVKKVVDRARKMLEDLRRKIGDDRDLRKILEDLERIIRRVEEELRRSHERHKEVVDRIKKVLDEIHRRHREVVKEVEKELR

SEQ ID NO: 3111 - protein, 181 aa, Artificial Sequence; identical to SEQ ID NO: 3110
  Synthetic

SEQ ID NO: 3112 - protein, 181 aa, Artificial Sequence
  Synthetic
KEVEEAEDKVRRIVEDLKRKLEDLERHVEESVRRLEDLLRRSKKKSDDIMEKLTRTLSKGLDEEEVKRLTEEVERLLREHRRELRRIVEEARKDNERLETRLRKIKREVEELLKELEREIGDDKELRRILKRMKDAIERVERELRRIHTRHKEAVDRVREELKRNHDELAKVIRKVREDLK

SEQ ID NO: 3113 - protein, 181 aa, Artificial Sequence; identical to SEQ ID NO: 3112
  Synthetic

SEQ ID NO: 3114 - protein, 181 aa, Artificial Sequence
  Synthetic
DEVERADEDVERIVRELRRVLEENRRHVKESVERLERLVRKSKKDSKKIMEDLKRVLDRGLDEESVKKLRDDARKELEKHREELRRIEEEAEKDNRRNEEHVRRLEKRVEEELRRLETEIGDDTELRKILKKMKDAIREIKRTLDESHREHRRVVEEVKEELERNHKELKEVIDKVAKDLE

SEQ ID NO: 3115 - protein, 181 aa, Artificial Sequence; identical to SEQ ID NO: 3114
  Synthetic

SEQ ID NO: 3116 - protein, 176 aa, Artificial Sequence
  Synthetic
DEVEDILRRVREAVERARESLERIHREHKKVVDEVRKALEKVLEDHARVVDEFRRKSGSESEEAKKILDELRRDHEELKKRLEKIEREVREDNERLERELRELEERVRRKLEELERRNVRKDELKKEVEKLEEELKKELKRLKDHVKKSKEDLRRKLEDLKRHVERSVKRAEEEAR

SEQ ID NO: 3117 - protein, 176 aa, Artificial Sequence; identical to SEQ ID NO: 3116
  Synthetic

SEQ ID NO: 3118 - protein, 176 aa, Artificial Sequence
  Synthetic
SEVEKVLRDLERAVKEVSERHRRNHEELRKVIKRVKEEHDRIHDEHRKVVEDLKRKIGTESEDAKRILDKLEEDNRRLKKHIDDSKERVDRVVKRHKEHLDRSLKRVKEMLDELRKANVPREEIKKEVDRLKKELDENLKRLERDSERLKKELEDNLKRLEEHVRRSKEEAERDAK

SEQ ID NO: 3119 - protein, 176 aa, Artificial Sequence; identical to SEQ ID NO: 3118
  Synthetic

SEQ ID NO: 3120 - protein, 176 aa, Artificial Sequence
  Synthetic
SDLEEVLKRLEDVVRRLEEELRRIHKEHRDVVRRVTEEHKRILEELKRVVERAREKDGEESREVKEILRELEEVLRDLKRHIERSRKELEDDNRRLKKRLDEILKKIREVLERLRRKNVDRDRVTKEVRDLEEELRELLERLRAHVKRSEKKIEENLRRLEKRVEDLKKKIDDRTR

SEQ ID NO: 3121 - protein, 176 aa, Artificial Sequence; identical to SEQ ID NO: 3120
  Synthetic

SEQ ID NO: 3122 - protein, 179 aa, Artificial Sequence
  Synthetic
RELEDIKRKHKKVVDDVREKLKESHRRLKEVIEEARRRLDEVRKKLEKVIREILTSAGTEDERLKRVEETVRRVLEELEELIKRLDDKAKRMLDEHRKILEEIVKRADKSHKELDEMIKRRLPIEDLKRYVEEVKRDLDDLIRRSEELVRRIKEDLDRALKELEELVRRIKKKLEEDRK

SEQ ID NO: 3123 - protein, 179 aa, Artificial Sequence; identical to SEQ ID NO: 3122
  Synthetic

SEQ ID NO: 3124 - protein, 182 aa, Artificial Sequence
  Synthetic
SELDELRERVERHSRELRRTLEEAKKLVDDHKRTLREVLERIKKRVEDVKRELEKLVRDGVDERFLERLKKKLEDIVRDIERRNKELNEHSKKLAEELRRILKKLEDHSRELEKRMREEGGELREELKKIIDELRRVNEEAAKTLDEIIKRLEDVNREVNRTSKEVIDRLRKVLEEAERRTK

SEQ ID NO: 3125 - protein, 182 aa, Artificial Sequence; identical to SEQ ID NO: 3124
  Synthetic

SEQ ID NO: 3126 - protein, 182 aa, Artificial Sequence
  Synthetic
EELDRIRKEVEDHERKLREVVKDIERKVEEHAKRLKKVIEDDERRVKEWKDTLEELIRRGVSEEVLKRLAEELEKHKERSKKLNRELNKHSKELVDELRRRLKRLKEHSDELEEKIRRRGGELKDEVRRVIKELRDVNRKVADALRKVEEKLKRVNDEMNKESKRTLDELDKALEEAERRAR

SEQ ID NO: 3127 - protein, 182 aa, Artificial Sequence; identical to SEQ ID NO: 3126
  Synthetic

SEQ ID NO: 3128 - protein, 182 aa, Artificial Sequence
  Synthetic
DLLRELEARVRKHKRDLEEVLKKIEEEVRRHKKKLEDVLEELRRLVEDLMRELKELLEKGVPEKVLKELADKLRRLVEDARRLLRELKEHSRKLEEDIRRRNTELNKHSEKLEEDMRRKGGELREELKRIIDELREVNERVNDESRKVIKELRDANKEADKKVRDIIRRLEDILRKAAEDTR

SEQ ID NO: 3129 - protein, 182 aa, Artificial Sequence; identical to SEQ ID NO: 3128
  Synthetic

SEQ ID NO: 3130 - protein, 182 aa, Artificial Sequence
  Synthetic
KDLERLEKEVKEHKEDLERIVREAEKLVEDHERELEKVLRELEKTVRDVKRELEDLLRRGASEDVLRELAKKLKKIVEDMEKKNEDLNRHSEELLRRLDKILKELNKHSEDLMRKAREEGGKLKEEVDRVLDELRKVNKKAADDLERVIRELEDVNRRVNERSREIIETLKRVLDEVREKTR

SEQ ID NO: 3131 - protein, 182 aa, Artificial Sequence; identical to SEQ ID NO: 3130
  Synthetic

SEQ ID NO: 3132 - protein, 182 aa, Artificial Sequence
  Synthetic
DELRELKRKVDEHTRELERILKEIEDRVRRHKEKLDETVKRDKDRVDEWLRRAEELVRRGVSEEVVKRLAEELEKHKRTSEELNRKLNEHSKKLEDDIKTKLDELNKHSKELTEEMRRRGGELREEVEKIERRLREANKRAADALKKVIDELRRANEEVNRKSEETLKTLDKILEDVERKTR

SEQ ID NO: 3133 - protein, 182 aa, Artificial Sequence; identical to SEQ ID NO: 3132
  Synthetic

SEQ ID NO: 3134 - protein, 182 aa, Artificial Sequence
  Synthetic
DDLERLAEEVKRHSEDLDRIVEEIRDRVRRYKEKLDEVVKEDEKRVREWRDRLEKLVRAGVSEEVLRKLAEDLEKHKEDSDRTNEKLREEVKRLEEEIRKTLEDLNRHSKELVERARRRGGKLKDELDKIITRLEEANRKAAEDLRRVVEELRKAHEEMNRKSEKTKKDLDEVLEEAERRTR

SEQ ID NO: 3135 - protein, 182 aa, Artificial Sequence; identical to SEQ ID NO: 3134
  Synthetic

SEQ ID NO: 3136 - protein, 182 aa, Artificial Sequence
  Synthetic
DDLERLKRRVEEYRRKLEEVLKTIEEEVRRYKKEAEKVLDEDRRRVEDWKRKLDEMVRRGVSEEFLERLARALEDHKRKSDRDNDRLREKVRRLEEKIKELNDRLRKEVEEIVKRARDRGGSLEEDVRRIIDELRRVHKRANEDSKRVVDELRDVHRKVNETSEETKKRLDKVLKEAEDRTR

SEQ ID NO: 3137 - protein, 182 aa, Artificial Sequence; identical to SEQ ID NO: 3136
  Synthetic

SEQ ID NO: 3138 - protein, 182 aa, Artificial Sequence
  Synthetic
KKLDDIRREVERLTDKLEKIVKRIKELVDRYRRKLERVLEEDDRRVKEWKRRMEELLRRGASEDVMREIAERLERHKEESKRLNDELREELKKLEREIEKTLRDLAEELEKLKEDIKRKGGELKEEVDKVLKDLDRALKKAADDLKRVIDELREVHERINRTSERTLTKLDRALEELEKRLR

SEQ ID NO: 3139 - protein, 182 aa, Artificial Sequence; identical to SEQ ID NO: 3138
  Synthetic

SEQ ID NO: 3140 - protein, 182 aa, Artificial Sequence
  Synthetic
KELDEIRELVKRHKDKLKKIVDEVKERVDALKRKLKEILDEDRERVKKWVRDMEELVRRGVSEEVLKRVAEELEKHKKKSEEDLRRLAEDLRRLEEEIRKRVEDLNRHSKELVEDIERKGGKLKEDVDRVIRDLERVNEEANRRAKKVIDELRRVLEEAERTLRKTLEDLDRALEELARATK

SEQ ID NO: 3141 - protein, 182 aa, Artificial Sequence; identical to SEQ ID NO: 3140
  Synthetic

SEQ ID NO: 3142 - protein, 183 aa, Artificial Sequence
  Synthetic
DEAEKILEELRKVVRELEEELRRNHEELKRVIEDVERKLRESNRRVEKVIKEVTDEKGSEDDEARKVLKELKEKLDEHKKRVDEVKKKLEEELEKHKRKLDKVVKEVEKFLREAEDRLRKEGTDEDVVRELEKLVEELKRRVTEVVETVARDSERLREELRRIVEESKRLVEELKRRAEEASR

SEQ ID NO: 3143 - protein, 183 aa, Artificial Sequence; identical to SEQ ID NO: 3142
  Synthetic

SEQ ID NO: 3144 - protein, 179 aa, Artificial Sequence
  Synthetic
SELERVVEDLRRAAKKLADDLKRVIEEHRKYARDNKERLKKVLERLKRLAEELKKELERDGKSDEVRKRLEELLDRLRRLVEEAIRENKKSVDDSRKNSKRVEDELRDRLRKLDEKLKRDVKDSREVLEDVRRLIEDLERLITELRKENERVIRESEKLSRDIEREVERVIRELEETIR

SEQ ID NO: 3145 - protein, 179 aa, Artificial Sequence; identical to SEQ ID NO: 3144
  Synthetic

SEQ ID NO: 3146 - protein, 171 aa, Artificial Sequence
  Synthetic
KEVEDVKREIDKVLEDARRLLKESDDTLKKILDKARRDLEESDRRLKEILDKVRKDGLDEELLRRIEEYAKRHHDRNREILERLRELVKRHHDRNRDIVRRLEELVDKLKKDNIPFEELKDTVDKLRREIERRITESRRHVEELRRRVEEMLERSERNVREAEKKLEEDKK

SEQ ID NO: 3147 - protein, 171 aa, Artificial Sequence; identical to SEQ ID NO: 3146
  Synthetic

SEQ ID NO: 3148 - protein, 182 aa, Artificial Sequence
  Synthetic
DEVERVEEELKKSDDELRRRMEEVKRALDKDNEDAKRMLDEVKKELEKILRKVEKEVKDKESVDRLRKKLEDIKRELERILEELSKIHEDIKKRLDDLLRESEEHSRRLIEEIRDLERRGSDKKEVVERLDKLVKEHHERNKRIVEEAKRLVEDSREKTRRIAERAKELVRRLKELVDRLSK

SEQ ID NO: 3149 - protein, 182 aa, Artificial Sequence; identical to SEQ ID NO: 3148
  Synthetic

SEQ ID NO: 3150 - protein, 182 aa, Artificial Sequence
  Synthetic
DRIEDVKRKVKEIKEKVDRLLEESSKKVDDLNKKVRDLLTESNKRIEDIVRELRELAKRDLKEEELRKVLEDLRRRIEKIIKDNEEINREHEKVVRDIVKENKEINDELRKEIERIREELGTESEEAKEVLERLKRILEESRRASEENKKKLEKSHEELKRASDENKRKLERILDELREALR

SEQ ID NO: 3151 - protein, 182 aa, Artificial Sequence; identical to SEQ ID NO: 3150
  Synthetic

SEQ ID NO: 3152 - protein, 171 aa, Artificial Sequence
  Synthetic
SAKEKIDKTLKDIYRKHEEVVRRVEKKHRDIHREHEEVVRRVEEEHRRILDELRKAPVDEDVIRKIEKNVEEVKREIDKSDDDIRRNIKEVKDEMDKSNEELKRKIDELRKANLPEEEAKKFLDKLDKEVRDSMKRLEDHVRETKKRVEESVRRLEEHVKRTEEEVRETAT

SEQ ID NO: 3153 - protein, 171 aa, Artificial Sequence; identical to SEQ ID NO: 3152
  Synthetic

SEQ ID NO: 3154 - protein, 171 aa, Artificial Sequence
  Synthetic
SVEDEVRRDLKRIYEKHEEAVRRVEERHERSNERLEDVIRKVEDKHREILKKLEDEPVEEEFIKELEKNVRTVKKKAEDKLRESEKNSRDLKRKIDESNKRLRDKIEELERANLPEEDVKRVLDKLDEEVKDSVRELEEHVEKNERDVEEIAKDLERHVEETRKEVDKTAK

SEQ ID NO: 3155 - protein, 171 aa, Artificial Sequence; identical to SEQ ID NO: 3154
  Synthetic

SEQ ID NO: 3156 - protein, 171 aa, Artificial Sequence
  Synthetic
KVEEKVRETLRRIYERHRKIVKEVEEKHRESNERLRREIERVKRKLDEILKKLEEAPVDEDVIRRLRKELRDLEEKMERKLRESERNSEEVKRRAEESNKRLRDKIKTLEEANLREDRVAEVLKKLKDDVDKSAEELERHVKRNRDEVRKIVEDLDRVLEELRTKVDEEAR

SEQ ID NO: 3157 - protein, 171 aa, Artificial Sequence; identical to SEQ ID NO: 3156
  Synthetic

SEQ ID NO: 3158 - protein, 171 aa, Artificial Sequence
  Synthetic
SVEDKVRESLERIYKKHEKVLRDVERTLKEIHEEHREAVERVRRELERIKRKLEELPVDKDMIRRLEELIKELERRADESDDDLRRKIDELRRRAEESNKKLKRDIDRLREAKLPDKDVERVLKKLDDDVRKSVKELTDVLKRLREEVKRSVEELEDVLRKLDKEVDDTAK

SEQ ID NO: 3159 - protein, 171 aa, Artificial Sequence; identical to SEQ ID NO: 3158
  Synthetic

SEQ ID NO: 3160 - protein, 171 aa, Artificial Sequence
  Synthetic
DVEDRIRKSLEEIYRRHETEVRKIKRKHDESHRRHEKVVREVTEDLERIKRRLEELPVDEEAIKKLEEDIKRLRERIKESDKRNEDNIREVEKEARKSNDELRKDIEKLDRDRLPEEDAKRVLDELEEKVRRSVKKLREHVEENEKRVEDSVEELKRILEELRKAVDETTR

SEQ ID NO: 3161 - protein, 171 aa, Artificial Sequence; identical to SEQ ID NO: 3160
  Synthetic

SEQ ID NO: 3162 - protein, 182 aa, Artificial Sequence
  Synthetic
SKKDEVEKLLKESERHSKKLVEDAKRLSDESKKHVEELVRRAEEELEKSDRDVKKVKDDNRPKDELKKVVEDLERENERLNRKIKEELKRHKDENERLTKELRELVKRHTDEVKEITDRLNVPEEVMDRVRRRLERDIRELRKALKRVEDTNEEITRELEKAMKEVKDTSDRILEKLRRARK

SEQ ID NO: 3163 - protein, 182 aa, Artificial Sequence; identical to SEQ ID NO: 3162
  Synthetic

SEQ ID NO: 3164 - protein, 182 aa, Artificial Sequence
  Synthetic
SVKDKLKELLKDSKRNSDRLVERAKELLDRSRKHSKELEDRARKLLEDSRRKVEELERANLREDELTRVVRKLEEENKRLNTELEKLVRDHERDNKRLVDELTKLSKEHEDRVREIAKKLDVEREVLEKARRDLERDLRENKKALDEVRRTLEEDSRRLREVLEEVKRISTKIIERLREIRR

SEQ ID NO: 3165 - protein, 182 aa, Artificial Sequence; identical to SEQ ID NO: 3164
  Synthetic

SEQ ID NO: 3166 - protein, 173 aa, Artificial Sequence
  Synthetic
SEKEDAEKKLRDILTDLARIVREVEEALKKILDDIRKVSEESKRASDESLKRARDAGIDEKLLEELERHNRKLKRDDDRLLKELEEDIRRLKEDIDRLLEEVAREVDRLREELDRLRGEELEELLRRLEEAVRRIAERLRKLLKELEEKARRLAEESKKLLEKDKEDVKRAAE

SEQ ID NO: 3167 - protein, 173 aa, Artificial Sequence; identical to SEQ ID NO: 3166
  Synthetic

SEQ ID NO: 3168 - protein, 173 aa, Artificial Sequence
  Synthetic
SEKERIKEESKKSLDDLRRASERSKEELDRILKRIDEASKRSKEESDRSLKEVKDRGIDEELLRELKRHNEELKERDDRLLEELKRKVEELKRTDDDLLRRSKEKHEKVERELKDLDGEELKDVLRELRETNRKLVEDSRKLLEELDRDVERLADESRKLLEDDKRKVREVAR

SEQ ID NO: 3169 - protein, 173 aa, Artificial Sequence; identical to SEQ ID NO: 3168
  Synthetic

SEQ ID NO: 3170 - protein, 173 aa, Artificial Sequence
  Synthetic
SDEERIDELSKKSLEDLKRVSDDSKRKLDDILKKIEDASRESEDKLRRILEKARRDGIEERLLTELERKVRELKKDDRRLLEELRKKVERLKERDDELLDRSRRKHEEVKRRLKDLDGRELERILEELRTDNDRLAKESDKLVKELEEEVRELIKRSETLLEELRKDVEELAK

SEQ ID NO: 3171 - protein, 173 aa, Artificial Sequence; identical to SEQ ID NO: 3170
  Synthetic

SEQ ID NO: 3172 - protein, 171 aa, Artificial Sequence
  Synthetic
DAKERVDDALKKILDDHRRVLKKVEDDHRDSHREHRRVVEEVKRELEKVLKKLRDAGVPEEIIREAKELVEELVRRAEESDKRNEDNIREVKERAEESHRRLRRLVEEIRKANLPKEDLDRMLEKLREIVERSRDKLRRHLEKNKREVDDSKRRLEKMLRDLEKKVRDAER

SEQ ID NO: 3173 - protein, 171 aa, Artificial Sequence; identical to SEQ ID NO: 3172
  Synthetic

SEQ ID NO: 3174 - protein, 171 aa, Artificial Sequence
  Synthetic
DDEERVKRKLEEVLRKHKEVVDEVIERHRRSHKRHRDMLREVDKKHRRILTELEKAGVDEKIIREAKEHVDRSREKLKESDERNEENIKKVTKELRESHKRLRDKVKELAEANLPVEDLKRVLEDLDREVRESKERARKHVEDNERKVEESKKRADDNLRRLERKIREAAR

SEQ ID NO: 3175 - protein, 171 aa, Artificial Sequence; identical to SEQ ID NO: 3174
  Synthetic

SEQ ID NO: 3176 - protein, 171 aa, Artificial Sequence
  Synthetic
SVEETVDEELKKIHETHKRVVDKVRREHEKSHKKHRDILKRVEEVHRRILTDLERAGVDESIIKEARDHVERSREELRKSDEDNKRNIETVDDKARRSDEELKKDIDELRKAKLDKKDLDEMLRRLKRKVDESERDLKKHLDDNKRAVEKSREDAERNLKELRDKIREVKR

SEQ ID NO: 3177 - protein, 171 aa, Artificial Sequence; identical to SEQ ID NO: 3176
  Synthetic

SEQ ID NO: 3178 - protein, 180 aa, Artificial Sequence
  Synthetic
REEEEARKVLEELKRDVERNERESKEILDKDKRDVEEWVKELEKMLEESKKLVDDVRKAKKDLREEELEREVRRIEDTNRKLNTDVEEIVRRHVDKSEKLVERDKRLVEEWERKAEEIKKRLSTIEELKKAVEDIIRTLREVLEKSRKTLKDSNDRLRRALEKAREDSKRSIRRLREELR

SEQ ID NO: 3179 - protein, 180 aa, Artificial Sequence; identical to SEQ ID NO: 3178
  Synthetic

SEQ ID NO: 3180 - protein, 185 aa, Artificial Sequence
  Synthetic
SVREDAKRLLEELERAVRELVERLKKLIERHRRASEDTRRELEKLLRELEKAVEELKRGNKEEEKVRDVLRKLKERAEEIKKRLREIHEELRKHSEDLKRRLTEALDTLRKDIERIKRELTRDVRGTKALEDVKEALDRILERVKRAIEEARKKLDDVDEHNREVIERVEKEIDRILKDVEDAAR

SEQ ID NO: 3181 - protein, 185 aa, Artificial Sequence; identical to SEQ ID NO: 3180
  Synthetic

SEQ ID NO: 3182 - protein, 185 aa, Artificial Sequence
  Synthetic
SVEEEARELIERLRKLSEDTMRRLTELLKEHERLSRETKKEAERLLDELRKKVDDLTRDNRDDEEVRRVDEKLKRDVEKIKRDLRKIHEEVKKHSEELRRELEKIHKDVDDTVKEIKDRLDKKVKDDEVLERVKRELDRILDHNKKVVDEAERALRRVDKHNEDVLREVEKTLERILDKVKESAR

SEQ ID NO: 3183 - protein, 185 aa, Artificial Sequence; identical to SEQ ID NO: 3182
  Synthetic

SEQ ID NO: 3184 - protein, 178 aa, Artificial Sequence
  Synthetic
SVEEKLEKIVRDLERRVRKSEEDLRRMVEEVERTVEKHREELKRVVDTLRKIVRDKGADEDLIRELEKLKDDLRKRNDEARRRAEELKRRLEDLIRRSREESERLRKELDDVIRDDVKDEKVARDIKDKVREIIRRNEEVLEEVDRRARELIERLERTIEKSERDVERIIRELRERAK

SEQ ID NO: 3185 - protein, 178 aa, Artificial Sequence; identical to SEQ ID NO: 3184
  Synthetic

SEQ ID NO: 3186 - protein, 176 aa, Artificial Sequence
  Synthetic
SKEEEAEKLVRDLEDSSRKHKDRLRKLVRDLEELVKEHERDLKRIVEELKKLVDDASRSKREDVLKTVEDRLRELEEKLERSTRTIREVVKRVEEDLDRSTEEHEKLVEDIRRELEKRGGIKELEEELRRNLKEVREVTEDAKRKLRDILRKVEDASRRVKEMLDKILKRVEEEIR

SEQ ID NO: 3187 - protein, 176 aa, Artificial Sequence; identical to SEQ ID NO: 3186
  Synthetic

SEQ ID NO: 3188 - protein, 177 aa, Artificial Sequence
  Synthetic
KLDEDIRKLLKEALDRNKEMLERLKKTLDEALEKVKKLLEDLRRVNKEVEDELRRAGLPEDSLRKVKKESDRSLREIEREVREAERRLKEILDELKRVLDRSKEILDELKKDLDRVRGEDVLREVIRRIRKVIEDTDRTWKRLIDEIRKEVKDVLDKARRLIRESEKLMEDIKRRTK

SEQ ID NO: 3189 - protein, 177 aa, Artificial Sequence; identical to SEQ ID NO: 3188
  Synthetic

SEQ ID NO: 3190 - protein, 177 aa, Artificial Sequence
  Synthetic
DMEKRIEKLLKDMLDRVRELHKRVREVNKEVNKRVKELHDEVRKVNEKVNKAVKDRGLPEELVERVRRKSETTRKTNEEKLERINEESRETERTNEKLLDDIRRRLEELRRDLERVRGEEVLARVIERIRKDVEKVLREAEKHIEESRRLARKVLEELRRHIEENRRLLEEVDRRRR

SEQ ID NO: 3191 - protein, 177 aa, Artificial Sequence; identical to SEQ ID NO: 3190
  Synthetic

SEQ ID NO: 3192 - protein, 171 aa, Artificial Sequence
  Synthetic
EVEKKVEELLKRIEDDNKRVADRSRKLLRELKKRLEDVVRESRELLRRILKKLKEAGGRDEVEREVRRVVEENERRLEEILRRVEEVVKRNEDELRKSHDRLRKAVEKMRRAKIREDEVADRLRKLRKESEEVVERSDRHLKDLERRIEEMAERSRRHLKRLEDKIREDAR

SEQ ID NO: 3193 - protein, 171 aa, Artificial Sequence; identical to SEQ ID NO: 3192
  Synthetic

SEQ ID NO: 3194 - protein, 178 aa, Artificial Sequence
  Synthetic
SMEDRVREMLRTIKRVIEEAHERSKKILDEDRKVLKAVEDAVRDVLTKIKKLLDDARRRGQVSDDLVREITEKIKRILDEVRRIIEKNERELERWRREDEEILKDLERLLRELEKDVRTTKVDEEVVKRAKKLLEEIEKLARESLERLRDNLRKTEKLLKDLLDEAKRLLEEIKETVD

SEQ ID NO: 3195 - protein, 178 aa, Artificial Sequence; identical to SEQ ID NO: 3194
  Synthetic

SEQ ID NO: 3196 - protein, 178 aa, Artificial Sequence
  Synthetic
DIEEEVKKILDEIRERIKKMKRDLERLSKEDEDVLRKVKKDVDEVLKRAEESLRDVKRRGRVDDEVVERLKRRLDRLREDVRRIVEDNKRRLKEWNERTEEVIRRLKKRLDDVRREVRTTKVFEEVLRKLEEILRDIKRKADELRKRYRENIEETERLLEELLRRAEELLRRLDETAR

SEQ ID NO: 3197 - protein, 178 aa, Artificial Sequence; identical to SEQ ID NO: 3196
  Synthetic

SEQ ID NO: 3198 - protein, 181 aa, Artificial Sequence
  Synthetic
SEAEKLLEDIRRIIKEVKENVERSLEKIKRLIEELEKNARDLVRRIRKLIEDLERKVRRDGNTEELRREVEKLEEELREHVKRHEEKTEKLAEELKEHNERHKTESEKVERKLREDLKRIEDEKVIRDIEKLIEDLKRISEKANEDNKRLIDDMRRISKEVARTIKELIERLRKIVEEARK

SEQ ID NO: 3199 - protein, 181 aa, Artificial Sequence; identical to SEQ ID NO: 3198
  Synthetic

SEQ ID NO: 3200 - protein, 181 aa, Artificial Sequence
  Synthetic
SEAEELLERIKKLIEDLKRDAERLLREIEEMIKDIRRHVEEDLRRLREVIKEIKRLVDERGNTDDLERRVEEISRRNEKNIKDLEDKVREIVRRLEEVLKKHKEDTDRLVEKLKEDLKRIKDEEVEREIRRLIEEMKRISEEVRKEIKRLIDELEEIVRRAKEALKKLNEELKRIVDEAKR

SEQ ID NO: 3201 - protein, 181 aa, Artificial Sequence; identical to SEQ ID NO: 3200
  Synthetic

SEQ ID NO: 3202 - protein, 178 aa, Artificial Sequence
  Synthetic
SKVEEVLKRLERLIRELKRLMDEVREDNREVLERLERYAERNERENRELLKKLEDVARRRSPREELRRELKEIHDRNRKSIEELEDRLRKVHERNRDIIRRLRETLRKIEEDLKELTKDGVSKEELDKMLKTAERVLREIEKDIEKLDRDLKRVVERIRDRSRRLDEAAEEIVRRIED

SEQ ID NO: 3203 - protein, 178 aa, Artificial Sequence; identical to SEQ ID NO: 3202
  Synthetic

SEQ ID NO: 3204 - protein, 178 aa, Artificial Sequence
  Synthetic
SKMEEVLKRLEKLLRELEEYVERNERENRKLLEELEDYVRRNEKRNKEILEELRDVVRRRSPREDLRRKLEEAHKENRKSIEDLRRKLERIHERNKRSVEELRKRLDEIKKEVDELRRDGVSDEELRKALERLRRVVEKVEDISRELDDRLRRVVEKAEEISRRLDEEIKEVVDRAEK

SEQ ID NO: 3205 - protein, 178 aa, Artificial Sequence; identical to SEQ ID NO: 3204
  Synthetic

SEQ ID NO: 3206 - protein, 178 aa, Artificial Sequence
  Synthetic
SKVEKVLDDMRRIIEEAERLLEEVKRRHDEIIERVKRYAEENRRRNEELIEDLKRVAEKRGPREDLRDKLRRIHKENEDSTRELRDRVRRVNEESRELVERLERKLRDVARRVDELRKDGISKDDVRRLLEELRKVVEDVKRLSKKMNDRIEKIAKEIEEESERLDRTIAEIVKEIEK

SEQ ID NO: 3207 - protein, 178 aa, Artificial Sequence; identical to SEQ ID NO: 3206
  Synthetic

SEQ ID NO: 3208 - protein, 181 aa, Artificial Sequence
  Synthetic
DEVEKVLEELRRLLKEDEDIVRELLKRLKELLEDIDRIAKETEKEWRKILREIEELRRKPIPEEDVKRLRERVERVLRESEKRVKELRERLKELLKKIEEDLRRSEKRLKELRDDIRRKGLPEDAEREVDRVVRTIEESTKDAREKVKRMADEIERIIKEVEDLNRKLVEEIERVIREVER

SEQ ID NO: 3209 - protein, 181 aa, Artificial Sequence; identical to SEQ ID NO: 3208
  Synthetic

SEQ ID NO: 3210 - protein, 173 aa, Artificial Sequence
  Synthetic
DSEETLRELVKTIEDSSRKVKKRNEELARELRRRIEEAREANDRLVETIRKEIRELPVPEETVRRLEELIKTLKERSEELVRKLEDKIRRILEKSEKLLRETKKELKELTDKLKDLRREELEKTARKLIEDDEKKARDTEREWEELIRDIERLVRESLEAWKRLREEIRETVR

SEQ ID NO: 3211 - protein, 173 aa, Artificial Sequence; identical to SEQ ID NO: 3210
  Synthetic

SEQ ID NO: 3212 - protein, 173 aa, Artificial Sequence
  Synthetic
KSEEELRKLVRELEELIERMERTNEKLLRELKEVLDRARERNEELVRRLEDLIRRLPVDKDTVEELKRLIEELKRKSEEILRRLEKKLRDHRREVKKLADDLRRKIKELEDKLKDLREEELRKEAEDLIREIEEKVRRSKRNLEELIREIRELVERSEDEWRKLIKRIADAVK

SEQ ID NO: 3213 - protein, 173 aa, Artificial Sequence; identical to SEQ ID NO: 3212
  Synthetic

SEQ ID NO: 3214 - protein, 173 aa, Artificial Sequence
  Synthetic
SSEETLERLLREIERVLEEARKRNEDLVRKIREVIKEALERNKRMLEEIKKEIDRLPVEEELVKDLRDKLDKHRREVEKIITELKRLIDELKKESDDLLDEIRKKLKDLKDLLKDLRSEELLRTAKRLLEDIERIVRETLKKWRDLEREIRKLVRESTENLKRIIEEIRERAR

SEQ ID NO: 3215 - protein, 173 aa, Artificial Sequence; identical to SEQ ID NO: 3214
  Synthetic

SEQ ID NO: 3216 - protein, 174 aa, Artificial Sequence
  Synthetic
SKVDEVIRDLARLLDELRRHVDDSVRRMDEVVKRSTREADELAKRLDELVKEVEKKPGDKRVERMVREIERLVREVLEELKKKYEKLKREVEENLRRLEETVRDIVEKARKVTEDGVSKEKIDRIIRELERILEEAKKKHEDVLRRLEDSLRRVAELLKAALDRLREIVDRLRR

SEQ ID NO: 3217 - protein, 174 aa, Artificial Sequence; identical to SEQ ID NO: 3216
  Synthetic

SEQ ID NO: 3218 - protein, 174 aa, Artificial Sequence
  Synthetic
SKADDVIRKLRELLEELRTHVEKSIRDLRKMLEDSTRHAKRSIEELERLLEEVRKKPGDEEVRKTVEEISRRVKENVKRLEDEYRRLEEEVKKNLDRLRKRVEDIIREVEEMRKDGVDEEKLKDLIRKLRDILRRAAEAHKKLIDDARESLERAKREHEKLIDRLKKILEELER

SEQ ID NO: 3219 - protein, 174 aa, Artificial Sequence; identical to SEQ ID NO: 3218
  Synthetic

SEQ ID NO: 3220 - protein, 174 aa, Artificial Sequence
  Synthetic
SKVEEVVRTLDELLKRLEEHVKESIRRIKKVIDDSNREADELIRDIDRLLKELEKKPGSKELTDEARKIAEKIRDVLRRLKEKYERLEKDIRDNVRRITEEVKRIEEDVERLKEDGVDKDRVERIIRELRRILEEIRDLHRKLEEELRRSLKEVEDRLRELLKKLEDILRELRR

SEQ ID NO: 3221 - protein, 174 aa, Artificial Sequence; identical to SEQ ID NO: 3220
  Synthetic

SEQ ID NO: 3222 - protein, 180 aa, Artificial Sequence
  Synthetic
DEVEDLLRKLKDTIRRLKAHADRDLKKLEEILEKLRRHVEKNLRDLERILKELKDLSRTIDDEELRRRVEEVIKKDRDNNRRLNDESRRASEENRRNLETLAREVERVVKELEDELSRVRVEEVAERVRRVIKELRKLLEEIARALEDVNKKAKEINDKADEDSKRVNDELKRIIKEIRD

SEQ ID NO: 3223 - protein, 180 aa, Artificial Sequence; identical to SEQ ID NO: 3222
  Synthetic

SEQ ID NO: 3224 - protein, 180 aa, Artificial Sequence
  Synthetic
SEVDELRRRAEESSKKIRKIAEELTKRLKDLLETIRRLMRKIEEDMKRTSEEIKDLIRRGNTEEVLKRLEEKSRDLLEKVRKILEELKRELERLEKEVEERLEKLKRESEDLERRVSNATDDRLRDVVKKLHKKNKDILDEIRDIVRRLKEEVDTILKEIKERLEELHKNNERLLREAKR

SEQ ID NO: 3225 - protein, 180 aa, Artificial Sequence; identical to SEQ ID NO: 3224
  Synthetic

SEQ ID NO: 3226 - protein, 181 aa, Artificial Sequence
  Synthetic
SAKEKLEDLLRKLKRILDELEKTSREMKERVERIIRELEKTVREVHERIKRLIDEALKRNRGDDRVREIVEEIRKKSEDVNRETEEIAERLRRELKKLDDEDKDILRRLKERIEELRRKAEETSISEELKKELEDLLRKIEKLIKESEEKWRRLLEEIKREIERLRETYAEILRDVKRRDK

SEQ ID NO: 3227 - protein, 181 aa, Artificial Sequence; identical to SEQ ID NO: 3226
  Synthetic

SEQ ID NO: 3228 - protein, 181 aa, Artificial Sequence
  Synthetic
SAEETVRKLLEEIKEIIKRMEDRVREVLEENRKSIEDLEERVRRLHEEVERIIREALEDLRGDKRVDEIVKELRERSDRLNKRVEEILRELKKESEDLDREVKKIVEELRKRLEDAAEEVKRTKIDDEVKRELKRILEEIEKLIEELLRRMKESNKKIRKLAEDLTREYKRLLDEIRKRRK

SEQ ID NO: 3229 - protein, 181 aa, Artificial Sequence; identical to SEQ ID NO: 3228
  Synthetic

SEQ ID NO: 3230 - protein, 174 aa, Artificial Sequence
  Synthetic
REVEEVVKRAEEVIRRLEKEVEDIVRRVAKHLKDNEDHARRSVERLRRDIEELKKEDGDDEVRERIRRLKEDVDRDNKELRDNVERVKREIDRMVDELRKKLEDLKRRIDDVRRRGLLDELVKEVKKKIDDVLKKAEDLARKLKKEHDEVVARITEAHDEVKKRVEKVLKELED

SEQ ID NO: 3231 - protein, 174 aa, Artificial Sequence; identical to SEQ ID NO: 3230
  Synthetic

SEQ ID NO: 3232 - protein, 174 aa, Artificial Sequence
  Synthetic
SKVEDVIREIRELIKRLEKHVKDSVREVRKHIEDNKRKVEKLVKEVEDVIRELRKEDGDERVEEKVERLKRRIDEMLKDLEENLRRVKREVREDNRRLKKLIEDVKKKITDVERDGLMRELAEELRRRLDEVLEKATRLHRELEKRHDDVLREAEKRLRDLKREIDKVLDDLRR

SEQ ID NO: 3233 - protein, 174 aa, Artificial Sequence; identical to SEQ ID NO: 3232
  Synthetic

SEQ ID NO: 3234 - protein, 175 aa, Artificial Sequence
  Synthetic
EEVERVVKELRDHLAETKKKIDEIIKRLDDHIEENRERVERMVEELRRILKEIRDSNVREDEVRKLVEELLRRAREVLRESEKNIRDVKKEAEDVLRDLERNIRDSERKLEEVLRRGLAREVVDEVRKEHRDVLREAEELIKRVEKDHEKSHREVKKLIEDVERRLREVLKELRD

SEQ ID NO: 3235 - protein, 175 aa, Artificial Sequence; identical to SEQ ID NO: 3234
  Synthetic

SEQ ID NO: 3236 - protein, 175 aa, Artificial Sequence
  Synthetic
KEAEDTIRKVSKHIEDNKRKVEEMIKKLKEHLKETEEKIRRIVKKVRDEVRKLEENNVPEDEIKELVDRLRKELKDVLDDLKRNIEEVEKEAEDILRESEKNIRDVEKELEEMRRNGLDEKLVRDLKRRHKESHDEARKLIEEVRREHEEVLKRAEDLIRELDKRLKEVLDKLRK

SEQ ID NO: 3237 - protein, 175 aa, Artificial Sequence; identical to SEQ ID NO: 3236
  Synthetic

SEQ ID NO: 3238 - protein, 175 aa, Artificial Sequence
  Synthetic
SEAEEVVRRVEKHIRDTEKKIRDIVRRVKEEVDRNSERVREMVERVRKEIEELERAQVPEDRIEEEAKRLEEELKRILEEDKRNIDRLKEELDRELEDLRRNIREVERRLDELTRRGLKKEVVDELKKRHREVLEEARRLIEELKERAERSHRESKKLIDELREEIRRVLEERRR

SEQ ID NO: 3239 - protein, 175 aa, Artificial Sequence; identical to SEQ ID NO: 3238
  Synthetic

SEQ ID NO: 3240 - protein, 178 aa, Artificial Sequence
  Synthetic
SEVEDIVTKLRDKVERHREEVKRIIDTLKKLVEEHKRRVDDEVKKLDDTVKRLREANVDEETLREVEERIDERLRRVLDRSREVKKRLDKALDEVRKRSKEVHEELRRALEEVRKRSRDKRVDDLLREVEERLERSNREARKLLEEVKREMEESHRRLKKLLDEVREKVRRVVEELRK

SEQ ID NO: 3241 - protein, 178 aa, Artificial Sequence; identical to SEQ ID NO: 3240
  Synthetic

SEQ ID NO: 3242 - protein, 177 aa, Artificial Sequence
  Synthetic
KVEELVKEVDERIKKVLDDLRRALEDVRKKAEDSVRRMEELSEKVKRDLDRVIAKAEEKGLDEKDLDELRRILERLRRENKKLNEESRRDLEEVRKELEEVLKRAEEMVKRLKDTLRRDGVDEEVVKRLEEILRRLKETIDRVLERLKRRVEDHDRKVEKRVRENEKAVEDLKRRID

SEQ ID NO: 3243 - protein, 177 aa, Artificial Sequence; identical to SEQ ID NO: 3242
  Synthetic

SEQ ID NO: 3244 - protein, 179 aa, Artificial Sequence
  Synthetic
SVEEVLEEARKDIDRLIRRMEEISERAKEKIERLIDELRKISEEANKKNEEVLRELREKGGDNKERVDEIEERLKRHNEEHRRRTEDLERKLRKHVEEHKERTREIKEELKRLLKELEEANIPREDIKREVDRLLEEIRRLIERLRENVKKLLDEIRKLIEELDENVKRSLKKLRDDIR

SEQ ID NO: 3245 - protein, 179 aa, Artificial Sequence; identical to SEQ ID NO: 3244
  Synthetic

SEQ ID NO: 3246 - protein, 188 aa, Artificial Sequence
  Synthetic
SLDDILREVRRTSRELNEESRRIVDRAKRESEELLKELETILRDATRRLDDLLRKLDEKRQDEEVKKILRDLREEIKKLREDVKRELDRLRKHTEDLVRKVEELNRRSEEHLKKLEEEVDKAKKEGQDRETVVKELEDKVREHLRTNRELIERLEKEMRDHLREIKRKIEELERRIRKLVEEVKRRID

SEQ ID NO: 3247 - protein, 188 aa, Artificial Sequence; identical to SEQ ID NO: 3246
  Synthetic

SEQ ID NO: 3248 - protein, 175 aa, Artificial Sequence
  Synthetic
DELEDLVRKAEKLVRESEKKIKEIVDDARRLIEDSEREIREIVKKLRELSKRVEEELRRDGPTEELEKKLRRITEELDKLLEDLRDKNRRINEKLRKDIKELERENRDINRELTKRVRMKDLLKELRDKSKRVLEKLRRLLEEINKRSRDVLEKLKRLADEVRESNREVLDRARK

SEQ ID NO: 3249 - protein, 175 aa, Artificial Sequence; identical to SEQ ID NO: 3248
  Synthetic

SEQ ID NO: 3250 - protein, 172 aa, Artificial Sequence
  Synthetic
RELEEIVKDAERLVKKDTEDIRDKVRRAEEVVKKDTEDLEESVKRVKDKVKELEDANIRRDEARKVAEEMKKELKEVLDDNERKSRDLKTKLRKVLEENKKKVDEIREDLERRMKSEELLREIEERIKRSLDESRKLVREIEKKVDESNERSRKLVEDVEREIEEVLKRLAD

SEQ ID NO: 3251 - protein, 172 aa, Artificial Sequence; identical to SEQ ID NO: 3250
  Synthetic

SEQ ID NO: 3252 - protein, 177 aa, Artificial Sequence
  Synthetic
SSEDILREVKKLLDDSLDKLRRLIEKIKEDLDRSVDRHRKLSEEIRRRHERVREAVERRGSSEEKKERIERNIREVEEEIKKVDEESKRIVDKLEKELREVLRKSEETIKKIRKDIKDEGVDEDVARKLRELVREHSKEVEDKVRRAARLVEEHTERSDRVADKLRKHIEETKKRID

SEQ ID NO: 3253 - protein, 177 aa, Artificial Sequence; identical to SEQ ID NO: 3252
  Synthetic

SEQ ID NO: 3254 - protein, 177 aa, Artificial Sequence
  Synthetic
SKEEILKEITDRVRESRKRTKKLLDDVREELERSHRRLEKLIREVEKRLREVKRKVDESGQSEEMVKRVEDVVRTLTEELKKVLKENRDEIRRIEKRIKEIDEENDRTIRRIEDRIRREGADEDVVRDLRRLVKEDTDRARKVVRELEREVERDKEEVERIVDKAEKKVRELEERIR

SEQ ID NO: 3255 - protein, 177 aa, Artificial Sequence; identical to SEQ ID NO: 3254
  Synthetic

SEQ ID NO: 3256 - protein, 178 aa, Artificial Sequence
  Synthetic
DEVEKAVADLRRLNEEHTRDIDKAARDLERLVKKHTDEVRKLVRDLEKLVKDLKDANLREDEVEEVVRRIDETLKRILKRSEDVVREIERELDKIRRKSEEAVKRSEDMLREIARRSRDEKLEELLKEVEETTRRSLRRLEELLRKVERAVRESHKELKKLLDEVREKVKKVLEELRR

SEQ ID NO: 3257 - protein, 178 aa, Artificial Sequence; identical to SEQ ID NO: 3256
  Synthetic

SEQ ID NO: 3258 - protein, 178 aa, Artificial Sequence
  Synthetic
DEVEKAVRDLEKLNEEHTRRVEKVVTDLRDLVRRHTEEVRKLVDELRELVERLRRAKLDDKTVKKVADDLRKKLRDIEERSKEMVKKAEETLRRILEDSKRAVDESRDRLREIARRRRDKKLEKLLDDVRKTTETSHERLKRLLEEVEERVRRSHEELKDLLRKVKELVEKVLRELKE

SEQ ID NO: 3259 - protein, 178 aa, Artificial Sequence; identical to SEQ ID NO: 3258
  Synthetic

SEQ ID NO: 3260 - protein, 178 aa, Artificial Sequence
  Synthetic
SEVEKLAKELRDLVREHTKRVRELIDELKKRVEDHTRKVEEIVKRLKKLVDDLRDANLDKDEVRKALEEAKRRLDDVRRRSKEVTDRLDKTLKDIERESERAVREMDRRLREIERRSRDKKLEKLLKEVRELVKRSHDELKKLLDRVREAVEKSKRRLEKLLDTVRRLLEKVVRDLER

SEQ ID NO: 3261 - protein, 178 aa, Artificial Sequence; identical to SEQ ID NO: 3260
  Synthetic

SEQ ID NO: 3262 - protein, 178 aa, Artificial Sequence
  Synthetic
SEAEKLVEELRRLNERHTRRVEEVVRRLDEEVKKHRKDVRELVRELRKLVDELRKANLDEDTVRKVAEEAKKRLDEIRRKSERVVERMRRELKKIKDESEEMVKESRKRLTEIARRSRDEKLEELLREVEETTEKSHRDLKRLLDRVREKVEDSHKELEELLKEAKDRVDRVLEELRR

SEQ ID NO: 3263 - protein, 178 aa, Artificial Sequence; identical to SEQ ID NO: 3262
  Synthetic

SEQ ID NO: 3264 - protein, 178 aa, Artificial Sequence
  Synthetic
SLEDKVRDDVRKLLAEAKKVADDLRKVVEDHRKTVEDVIREIRRRVEEHLKKLKELIDAGVDERVLEELKRHSEKLVEDIERLLRELNKHSERLLREAEKILRELEKKVRDTKKELRDRGVDDRVLKRIEEEIRRLLKELREIVKDLERLDRELTDELRKLVEEVRRLSETVLDEARK

SEQ ID NO: 3265 - protein, 178 aa, Artificial Sequence; identical to SEQ ID NO: 3264
  Synthetic

SEQ ID NO: 3266 - protein, 182 aa, Artificial Sequence
  Synthetic
SLDEDVAEKMKELEKENKDLLDTIRRLIEELEKHARELLKRIEDLIRELTEDAKRLEDSNLREDELKRELDRLRDKVRKVRKEIEELLKEHEDRSRKVVRDIEEKLKESNRKVKELLEELKTRGVDRRILEEIRRTNEELTERVRDLVEEMRKTSEELLKEVRKIADEVRRTVEEALKRLEK

SEQ ID NO: 3267 - protein, 182 aa, Artificial Sequence; identical to SEQ ID NO: 3266
  Synthetic

SEQ ID NO: 3268 - protein, 179 aa, Artificial Sequence
  Synthetic
DEAEKILRDAKRLVEELSKKLEDNLREIKEVIDRLSEELDRNLKEHRDLIRKLEEDMDRKGVDDKEKKKLREDHDRYRKEVEERKKKLRDELKKYKERVEEMIEKLKRRLEEIEKRIRDEGKITEERAREVEEDIKRAEEEVERSIRESKKRTRDAEREVRESKKKSEDHIREVEKRIR

SEQ ID NO: 3269 - protein, 179 aa, Artificial Sequence; identical to SEQ ID NO: 3268
  Synthetic

SEQ ID NO: 3270 - protein, 183 aa, Artificial Sequence
  Synthetic
SELEELLKELKEIVERSADHLRRSNDDLRKIIEEVTKTLEKILEDLKRIVEEVVDRARKKVSDKDRVRELKKRLEEDLRRVEKKVRDIKKEAEDSLRKSEEDVREYKRKLKEDLDRLKEIIERNEDREEELKKKLKELKDRAKETNERHRRDVERLMEKLRRDLERLDREVKDLEKKLREEEK

SEQ ID NO: 3271 - protein, 183 aa, Artificial Sequence; identical to SEQ ID NO: 3270
  Synthetic

SEQ ID NO: 3272 - protein, 172 aa, Artificial Sequence
  Synthetic
SDREEIKRRVEEEAKKSRENLKETLREVDERVRDSERNLKRHHEEVKKAIDDLRRSDVPREEITKRLRELLRRSEKKIEEAMRDHDRILKEIKERADKAERDHDDRLRKLEERGLEKRILDDVRRLLEELKERYRRIVDEIKKLLERLKEAYKRNLDRVRELIERIEKEIRD

SEQ ID NO: 3273 - protein, 172 aa, Artificial Sequence; identical to SEQ ID NO: 3272
  Synthetic

SEQ ID NO: 3274 - protein, 180 aa, Artificial Sequence
  Synthetic
SELEEVKERIERLVRRHKEELEKVRREIEREVKKHEKDLEDLERRSREHIETAERLLAENRVREDEVRRILKENRDEAREVEKKSREHLDRLKKRLDKLREDSKRHLEDVERDLKRLKDRGDVDDRILEEARRLLDRLREENEKVLKEAEDMLKRLEDENRKMLEENEKLLKELKKEVDK

SEQ ID NO: 3275 - protein, 180 aa, Artificial Sequence; identical to SEQ ID NO: 3274
  Synthetic

SEQ ID NO: 3276 - protein, 180 aa, Artificial Sequence
  Synthetic
SEVEEVLKTIEKKDEEHKRELERVKEEVDEDAKRHRERLKKVDRDVKEEIKRLRKLLEDRTVDEEEVREELRKLTERLDKLRKDSEKHLRDVEDKLRRLRERSERHLDTVRKELEDMRRRGDIEEKILEEIKRRLDELRKRNEDLLRRVKELLDELREENRRLLEDAKRLLEEVLKRARD

SEQ ID NO: 3277 - protein, 180 aa, Artificial Sequence; identical to SEQ ID NO: 3276
  Synthetic

SEQ ID NO: 3278 - protein, 180 aa, Artificial Sequence
  Synthetic
SELEEVEKKVREDARRHKEELRRVEEEVKRNAEKHRDELRRVREDIERKIRTLRELLKERRQSEEDVKRRLDKLRDELKKLKERSKKHLDDVERRLEELRKESERHLREVEKELEELRTRGDVSEEILRRVKKLLDELRDENRRLLERVRELLERLREENERVLREVKKLLDEVKREAEK

SEQ ID NO: 3279 - protein, 180 aa, Artificial Sequence; identical to SEQ ID NO: 3278
  Synthetic

SEQ ID NO: 3280 - protein, 182 aa, Artificial Sequence
  Synthetic
SEREKLLKELKDNLDESRRRVEELLKRIKENLEEVKDRAKKTLDDLKRDIEELRKLVERRETREEEIKKKLKEHDEKTEKIKRDLRDHLRRHKEDTKRLVEELKKHLEDHKRKIEDIERKLKDEDVKRRLRDLSRRLAREHEKVIEKLRRLSDELEKIHREIEERLERLSDELRKEADKARK

SEQ ID NO: 3281 - protein, 182 aa, Artificial Sequence; identical to SEQ ID NO: 3280
  Synthetic

SEQ ID NO: 3282 - protein, 182 aa, Artificial Sequence
  Synthetic
DEARELLKRLREINEKLKKDVEEIERRLEKYNRDVKRKLDDSIRELKEKLDRLRERIRDEGTGREDLERVKKDVEDYLEENRRRAEESKRELERLLREVREKLKRSVERLDEALEKVDRDGLPEDVRRAVEELVRRHKDTVKKIEESVRRLVEEHKRTVKEALDRSRRIAEEIKRVLDEAAR

SEQ ID NO: 3283 - protein, 182 aa, Artificial Sequence; identical to SEQ ID NO: 3282
  Synthetic

SEQ ID NO: 3284 - protein, 182 aa, Artificial Sequence
  Synthetic
SEEEKLLTELKKLNDDLERRVRKSLDEIRRYNEKMREDVRRSDREVREEKKRLDEKLKKDGTDDDELRRVKKKLEDYLRRNEEEVRKSREEVRRYLTKNREDVRRSKEELRKLLEKVKKDGLPEEALKKVRELVERHKRTVDEALEKSERLLREHERTVDEVLDRSRRAVEEVKKTLDDARK

SEQ ID NO: 3285 - protein, 182 aa, Artificial Sequence; identical to SEQ ID NO: 3284
  Synthetic

SEQ ID NO: 3286 - protein, 181 aa, Artificial Sequence
  Synthetic
REAEEVRRRIEESHEEVRRRARKDERDLEESHKRLEEKAKELKDELRKILKDIDDLAKSNVSEESVKKLKEDLDRKLEEVERRMREDKKRHEDHLRESEKDMRRLKKEHRDRLEELRRAGLPEDVLRDIEKLVRDNEEALDRILKRTKELVDRNLEAIDRILKEVEELVRRIKELLDRAKK

SEQ ID NO: 3287 - protein, 181 aa, Artificial Sequence; identical to SEQ ID NO: 3286
  Synthetic

SEQ ID NO: 3288 - protein, 179 aa, Artificial Sequence
  Synthetic
SEVEEVLERLKRKLDEIERESRESAKKIRREIERIEKEARDSLRRLKKLIKEIEDRVRRDGRRRDELDELLKRLEDYVRRSVERLERLLEDLTKKVRDHERTLRRRLKRVRDDIERLKEAGIDREELEKLLKRLEEVVRESEKEIEDLLRRVRELIERIKREHEKILKEAEEVIRRVKK

SEQ ID NO: 3289 - protein, 179 aa, Artificial Sequence; identical to SEQ ID NO: 3288
  Synthetic

SEQ ID NO: 3290 - protein, 179 aa, Artificial Sequence
  Synthetic
REVEEVLRELEEHIERSKRKSEESLKEIRRRIEEIEERSRRSLTELKKRIDDIKRRVEKDGPREKELDDLLKDLKRKADEHAKRLRDLLKELEDRVREHERDLERNLKEIKEKIEELERAGIDKEDLKRLLDKVTEVHKESAKEIRKLLDEARKVIEDSLRAIRDILRKIKETIDRDKT

SEQ ID NO: 3291 - protein, 179 aa, Artificial Sequence; identical to SEQ ID NO: 3290
  Synthetic

SEQ ID NO: 3292 - protein, 179 aa, Artificial Sequence
  Synthetic
EEVERVLEKLKRHIDDSRRKSKRSVDEIRKHIERSKRRSEESVERVKRELERIEEKVRREGNRRDELKTDLDRLRRYVRKHVEDLRENLKRIDERIKEHEDRLDKNLEDLKREIEELRKAGVDEEELKKLLEEAEKVHRDSKRELRKLVKEARDVHRESMETVKRLLDELEREIRRAET

SEQ ID NO: 3293 - protein, 179 aa, Artificial Sequence; identical to SEQ ID NO: 3292
  Synthetic

SEQ ID NO: 3294 - protein, 179 aa, Artificial Sequence
  Synthetic
SEDEEALKKLKEHIDRSREESKRSLDRVKREIERIREEIERDLRRLREELKKIEDRLRRDGPRRDDLERLLRRVEEEVERLKKKLDKLLEELRKYVEDHKRRLDENLERIRDEIRRLREAGIDEDELRKLLEDAKRVHKRSKDELKRLLEEAEKVIRDAKRKIKKLLDELRKVLEDARR

SEQ ID NO: 3295 - protein, 179 aa, Artificial Sequence; identical to SEQ ID NO: 3294
  Synthetic

SEQ ID NO: 3296 - protein, 179 aa, Artificial Sequence
  Synthetic
DEVRRVLEELKEHIKRSEKRVRENEEEIRRHIEKSKRDSDESLKELARLIKKIEDDVRREGTREKDLDKLLKDLERYVEEHKKRLDDNLRRLEEHIKRSKEELEKNLRRLREEIEELKKAGIDEEELKKILDEAEERHRRIEERHKDLLRKAEEVHRDSLRRLREILRRAEEVIRREKT

SEQ ID NO: 3297 - protein, 179 aa, Artificial Sequence; identical to SEQ ID NO: 3296
  Synthetic

SEQ ID NO: 3298 - protein, 179 aa, Artificial Sequence
  Synthetic
KEVEEDLERLKKHTEDTRKRARDNLERIKEELEEIRKESEDSARKVRRDIEEIKRRVDETGPDRDELDRLLRRLEEYVKRHKDRLRELLRRVEEHIKKSIRELREDLRRLREEIEELKKAGVDERELEKLLKEHEKTIRDIEEEHRRLLKELKDVVRESSRELEELLKEAEDVIRRVKK

SEQ ID NO: 3299 - protein, 179 aa, Artificial Sequence; identical to SEQ ID NO: 3298
  Synthetic

SEQ ID NO: 3300 - protein, 182 aa, Artificial Sequence
  Synthetic
DEVREALKRLEDETRKNKKESDKSLERLKEESKKNKDESDKSVKNIEDKIKKLKEDLDRDGPDEDRLREVLKRLRDYLREHKERLDRSKRKLDEELKKHREDLKRSKDRLDEELKRLDKEGLPEEVKRALDELVKDHRRVLEESARRIDEIVERHRRLLDDSLRRIAELVRRVEETLREERR

SEQ ID NO: 3301 - protein, 182 aa, Artificial Sequence; identical to SEQ ID NO: 3300
  Synthetic

SEQ ID NO: 3302 - protein, 182 aa, Artificial Sequence
  Synthetic
DEVEKALKELEDDLRELKKRSEESLKNVEEEIKRAKKELDESLDNLRKKIEELKRRLEKDGTNEDDLRRVLEELRKYLEDVRRKLEEVLRKLRDYLRKHEEDLRRVERELEKKLEDLERAGLPEEVLRKLETIVRKIREELDRSKKKLEKLIEEAKRELERVLKEHEDLVKRVRDVLEDARR

SEQ ID NO: 3303 - protein, 182 aa, Artificial Sequence; identical to SEQ ID NO: 3302
  Synthetic

SEQ ID NO: 3304 - protein, 182 aa, Artificial Sequence
  Synthetic
DDVRETLTRLRKETERNKRESDKSLENLKRKSEDNKRKIEESLKNMKRRIDEVKRRAEKDGPNEDELRKLKEELKRYLDRLREELERSVKEATEYVRRHERRLRESLKDLKRKLEDLDRRGLPEEVKKELDEILRRHKEVLRESERRLEKLLRDHRRRLEEALEEHKKLIDEAEETLKRIRD

SEQ ID NO: 3305 - protein, 182 aa, Artificial Sequence; identical to SEQ ID NO: 3304
  Synthetic

SEQ ID NO: 3306 - protein, 182 aa, Artificial Sequence
  Synthetic
SEVEKALKELEDKTRKNKEDSERSLDKLRKDIEELRKKAERSIRNMRDKLRKLRDDVRKEGPDKDRLEEVLREVERYLEELRKDLERVLEELKKYLEEHKRRLEESRRRLKEDLDKLEKDGLPEEARRKLKELVDRHEEVLRRSLERLKRLVEEVRRTLEKILRDHERLLDELRRDLEKDRK

SEQ ID NO: 3307 - protein, 182 aa, Artificial Sequence; identical to SEQ ID NO: 3306
  Synthetic

SEQ ID NO: 3308 - protein, 182 aa, Artificial Sequence
  Synthetic
DEVEERLRELEETTKENKRRAERSLENVRKKSRDNDKRIKESLDNIRREIKRLRDKVRKDGPNREELKEVLDRLRTYLKEVEKDLRRSLKELEDYLRKLEKELRESLEDLKKKLEDLRREGLPREVLEKLKEIVERHEEVLRRIKKKHEDLVREHRKRLEEARKRHEKLVREAEKTLDDVRR

SEQ ID NO: 3309 - protein, 182 aa, Artificial Sequence; identical to SEQ ID NO: 3308
  Synthetic

SEQ ID NO: 3310 - protein, 182 aa, Artificial Sequence
  Synthetic
EEVERILDELRRRNEDMRRRSEENERELRKRNTELRKKVEDSLRRLREDLKRIKKLVEEGRVDEETLRKLLEDVERYLKEHRDRLRKSLEDAKKRFKEHEDRLKKSLEDVERKLEELRREGLPEEVTKALEELVRRHRKTLEESLRKAEKVLRDHKESLERSEKKLKELMEEVKKLLDDARR

SEQ ID NO: 3311 - protein, 182 aa, Artificial Sequence; identical to SEQ ID NO: 3310
  Synthetic

SEQ ID NO: 3312 - protein, 178 aa, Artificial Sequence
  Synthetic
SREDEIRKRLEESLERVKKIIEDIKRRIDESLERIKELLKEIDERSKRSLEKIRRKIEREPRSEKVEKEAREHMKRLDELLREVEEYIERSIKELRELLDELRRYVEESEERLKELRRRGGSEELLRRARKAHEDLLREVKRRIERAEEEHKRLLDELRKVVERSKTEIKKLLDELRK

SEQ ID NO: 3313 - protein, 178 aa, Artificial Sequence; identical to SEQ ID NO: 3312
  Synthetic

SEQ ID NO: 3314 - protein, 185 aa, Artificial Sequence
  Synthetic
SRVEDVERKLRRKLEELKEDIERLREESRRSLEELERDSDRNRRESEDSLRRVEERIRRIKDDEDKERVTRTVEEELERHERRLRESKKRLDDEERKHKKRLEEVRREVTEKVRTIREELEELERDGVDRETLRRVEREIERLLRELEETLKRSEEELKRIVDEHRKLLERSKRELEKLVDEVRK

SEQ ID NO: 3315 - protein, 185 aa, Artificial Sequence; identical to SEQ ID NO: 3314
  Synthetic

SEQ ID NO: 3316 - protein, 186 aa, Artificial Sequence
  Synthetic
REIEEVLKRVEKVVRDDSRRNKEVLTRNRRKVERWKETLEDVLRRVEKAVRELRKDAEDRLREKKEKIAKVEDLLDKIRKTVKKVLDEVKKLLDDSIRLSEEMLRESERTLRDIEREVDEVSKKTRTEDILREVEKKLKELLDRSRELSDEVRKRSDESNKEIKKELDRARDELRRLLERIEEELN

SEQ ID NO: 3317 - protein, 186 aa, Artificial Sequence; identical to SEQ ID NO: 3316
  Synthetic

SEQ ID NO: 3318 - protein, 186 aa, Artificial Sequence
  Synthetic
DEIEKVLEEVERVVEEDERRNRKVLEENKRLVDEWDRRVREVLKDVKRRVDELDTRARRDLRENEEKIRKVRKLLDEIREVVERALKKVRELLERSIELSKRVAEDSKRTLDDIRRVVEEVARKTKDKEILDRVKERLERLLEESRELSERVKREIEETNERIARELERVMETLKKLLKDIEDELK

SEQ ID NO: 3319 - protein, 186 aa, Artificial Sequence; identical to SEQ ID NO: 3318
  Synthetic

SEQ ID NO: 3320 - protein, 186 aa, Artificial Sequence
  Synthetic
KEAEDVLKKVDTDVTRDDEDNRKLLEDNRRSVEEDERRNRRVLEEVEKRVRDLAERVKRDLREDSKRLEEVERLLRRIEERVTRALEDTKRTLEESLKLSEDVLRDSHRTNRDIKRVVEEVTRKVRTREILKRVTEELERLLAESERLSEEAEERVRRSDDTSRRLSEEVRKELEELLRRIEERLR

SEQ ID NO: 3321 - protein, 186 aa, Artificial Sequence; identical to SEQ ID NO: 3320
  Synthetic

SEQ ID NO: 3322 - protein, 186 aa, Artificial Sequence
  Synthetic
REVEEVLKRVKETVEKDREDNTRVLERNRESVKEDDDRNRKVLKRVRDEVRKLLEEAKRDLKDDEKKLREVTDALRRIIEEVERVLKESHDTNRESIKLSEKLIRDSERTLERIERRVDELVKKVRTEEILKRIEEELKRLLEESRELSKEVEDRVRKSDKKSRDLSEKVKKDLKELTDEIRKRLK

SEQ ID NO: 3323 - protein, 186 aa, Artificial Sequence; identical to SEQ ID NO: 3322
  Synthetic

SEQ ID NO: 3324 - protein, 186 aa, Artificial Sequence
  Synthetic
SEIEDILERVREEVDKDRRKNDEVLRENERLVKKDDDDNAKADEDVRRKVTELEKRARRELKDNREKLKKVKELLERIKERVKEVLRRSHKTNRDSERLSEKVVRDSRKTLREIEEVVEEVSRRIRSEEILKRVAKRLKELLEESKRLSDEVTKRSRDTDEESERLSRKVDKEVKDLLKEIERELE

SEQ ID NO: 3325 - protein, 186 aa, Artificial Sequence; identical to SEQ ID NO: 3324
  Synthetic

SEQ ID NO: 3326 - protein, 185 aa, Artificial Sequence
  Synthetic
SEVEEMEERLRKLDEDSRRLSEDVKRRLDKINKEIKDLLDDVRRKLKEMLDKLTKDLRDLKGKEEDVERVVREIEEDVKRVLKEVKRLVEESRRLSEKVLRDSERSVRESRELAKEALKRVKEKRAEDKVRDVLRDNERTLKKDEDDNKRVLDEDEKRLREWEERARRVLEEVRRRLKELVEEVR

SEQ ID NO: 3327 - protein, 185 aa, Artificial Sequence; identical to SEQ ID NO: 3326
  Synthetic

SEQ ID NO: 3328 - protein, 185 aa, Artificial Sequence
  Synthetic
REVDKAREDLRRVDDELRKILERVRRELEKLDKESEERSRRLARDLDRLLEELERDLKDNKGKRERVDRVVREIKEKVRRVLETSKKLVEKSRKLAEDVLREVEELVRRSKTLAEDVLRKVKEREVERKVREVLKDNERTLRELRDTIRKVLEDNDKTLREDVRRNEEVLRRVDETLRELKKRVE

SEQ ID NO: 3329 - protein, 185 aa, Artificial Sequence; identical to SEQ ID NO: 3328
  Synthetic

SEQ ID NO: 3330 - protein, 185 aa, Artificial Sequence
  Synthetic
SEVDKVKEDLDEVDKDSRRISREMEERLKELDKRSREISDRVVRELEKILKEIEDLLRDLKGRSEDVREMVRRLRELVKRVLKESKELVDRSRKLSDDALKESKRVADESRKLVEDALRKIDRKEARDKIRRVLEDNERTLREDIEDNRKVLEDNDKRLKDDERKNREVLKRVDETLKELDERVK

SEQ ID NO: 3331 - protein, 185 aa, Artificial Sequence; identical to SEQ ID NO: 3330
  Synthetic

SEQ ID NO: 3332 - protein, 186 aa, Artificial Sequence
  Synthetic
DELRELEERLRRSVEEIKRDLKRIHDENREAVERSERKSKKILEELKREVEDVKRELREKLKDDKEKVERVTRLLETVIKELRELVERNREELEESDREVDKLIKEVEKVLEDAERDLEDLVRRSRDEKLVREIERRVRKMEEDVRELVKTIEKRSRDVIKKSEDILKRIKERVEELEKRVRDAVR

SEQ ID NO: 3333 - protein, 186 aa, Artificial Sequence; identical to SEQ ID NO: 3332
  Synthetic

SEQ ID NO: 3334 - protein, 186 aa, Artificial Sequence
  Synthetic
DELRELLETLRDEVRKDDKRNEDIHRENRKRVEESRRRSEKILRDLREVVKRLEDELRKKLKDDKDKVRKVKRLLDEVIKTVEEIIRRNEKVLRDSDKTVREAIRRTHELNRRIIEDLEELVRKTRSEELLKRIEKRVRDMIRRSRTLSARLEDLSRELDERSKRVVEDLKRRIDEAIKELEKEVE

SEQ ID NO: 3335 - protein, 186 aa, Artificial Sequence; identical to SEQ ID NO: 3334
  Synthetic

SEQ ID NO: 3336 - protein, 180 aa, Artificial Sequence
  Synthetic
DETEEVAKKIKELIERSRELVKKVKEKIDRLNEEIEKLVREVEKTIKELTDRIEELRKRGVDAKDIERLLKEIEERVRKMLEDVKRILERSIRESEKALERNEEVLKRIKEEVEEALKRVDREEMKKLLDDLRKAVDESRRRSEEILKENRKRVEKWREDLRRLLEKVKEDLDRIRERLR

SEQ ID NO: 3337 - protein, 180 aa, Artificial Sequence; identical to SEQ ID NO: 3336
  Synthetic

SEQ ID NO: 3338 - protein, 180 aa, Artificial Sequence
  Synthetic
SEVEEAKKTLDELNRDIAKKVEDVEREIKRMIEESERLTREVEERIRRLTKKIEDLRRGGVDRKDIKELLERILKDVDKALKDSHKSNREIIRRVEEALKTIEELLKRSDELVKRVLDRVDEERVKKILEENKRDAERWKRRLKKLLDDVRRLVKEDDDRNEELLREVTERVRRIEEKLD

SEQ ID NO: 3339 - protein, 180 aa, Artificial Sequence; identical to SEQ ID NO: 3338
  Synthetic

SEQ ID NO: 3340 - protein, 180 aa, Artificial Sequence
  Synthetic
SEVEKVKEELKKLNKEIADSSDEVDKDIERLIRESRKLTEDVRREIKRLIERIDELRRAGVDEKELDRLLKEIIKRVEDALRKSHESNRRIIKRVEEALKRDKELLERSDERVAEALKRVDDEEAKRILDENKKLVREWEEKSRAVLEKVKKLVKRDDDENKKLLDDVKKLVDEMRERAR

SEQ ID NO: 3341 - protein, 180 aa, Artificial Sequence; identical to SEQ ID NO: 3340
  Synthetic

SEQ ID NO: 3342 - protein, 180 aa, Artificial Sequence
  Synthetic
DLEREIRKIIEEAKKELERVNDEIRRIIEEMRRRSEESNKRIREIIERARRRLEELIRRGVPKEDVERVLEEAIRRVEELLKESRRILEEVIKRVDKLLKDSERILKRVEDLVRELLRRVDTEEVKKLLTDLKRLVDEIRKHNKRLLDELRKEVEKSERENRRLLEEVRRTVDEMRERAR

SEQ ID NO: 3343 - protein, 180 aa, Artificial Sequence; identical to SEQ ID NO: 3342
  Synthetic

SEQ ID NO: 3344 - protein, 180 aa, Artificial Sequence
  Synthetic
SAEDKARKIAEDAKKEAEDSNRDAHRIAEEAKRRARKINEEARELIERAKKELTRLRREGADKRAVKKAAEEAIEIAERALRESDKAARDAIRLAEEALRRSKRIAEEARKLARDALEKVKAEEAKKLLDELRKAAEDIRRNNEEALKDLRRAAEEIRRHNEELLRRAREAAKKARDDAE

SEQ ID NO: 3345 - protein, 180 aa, Artificial Sequence; identical to SEQ ID NO: 3344
  Synthetic

SEQ ID NO: 3346 - protein, 185 aa, Artificial Sequence
  Synthetic
SAEEAVKRVEELVRRVKERNKRLVEDVEREVRRVKKRSEETNRRVKKLVERVKEDLDKRVSDEEKVKRIEDLLREILDTVRRLDEDSKRLLDEILERARRLIKKSDELLDRILKRARDMVKDLKDDKDKLEEVLREVRDRLADVERKSERVVEEVERLLREVVRKNEDVLRRIEELLRDVEEKAR

SEQ ID NO: 3347 - protein, 185 aa, Artificial Sequence; identical to SEQ ID NO: 3346
  Synthetic

SEQ ID NO: 3348 - protein, 185 aa, Artificial Sequence
  Synthetic
SVEELVREVEKRARKVKRDSDKTNKDSTKLVKEVKDRSRRTNEEVKKEVERVKEDLEKRVSDKEKVDRLKKELEDILRRVTKLDEESTRELKKINEEVTRMDEKSKKELDRILEELRRMAEKLKDDEDKLKEVVDRIRKLLEDVKRENEDVKRRSRELAERVREENDKVSKEIRELLEEVERRAK

SEQ ID NO: 3349 - protein, 185 aa, Artificial Sequence; identical to SEQ ID NO: 3348
  Synthetic

SEQ ID NO: 3350 - protein, 185 aa, Artificial Sequence
  Synthetic
SAEEMREEVKRLVDKNRKDNREVEKKSTRLAEDVKRKSEETNRKIREEVERVKKDLEERVSDEEKVRKLKDDLRKILETVDRMDETSVRELEKINRDLRKLVAENDELTDRVLKEAEKLVKDLREKEEKLKEVLDEVRRLIKEINDHSREVSKTSEKLLRDVLKKNEDVLREIERLLEEVRRRIK

SEQ ID NO: 3351 - protein, 185 aa, Artificial Sequence; identical to SEQ ID NO: 3350
  Synthetic

SEQ ID NO: 3352 - protein, 178 aa, Artificial Sequence
  Synthetic
REVEEITKEIREMNEESKRLLEEVREKIERLSRESNRLLEDSKREIDEAIRRVEELLDKEDKKDVVEKLKEVVKRAHERNEKIVKDDRDVVREVKRLLEEIVRRDRELAERVIRRLKRDGDDKDIITEIERTNDETEERVRDIERRIKESSDRNDKRAKEISERIKRLLEEVDKKVKE

SEQ ID NO: 3353 - protein, 178 aa, Artificial Sequence; identical to SEQ ID NO: 3352
  Synthetic

SEQ ID NO: 3354 - protein, 184 aa, Artificial Sequence
  Synthetic
DLEELVKEVERRVRRNKTETDRLVEEVERSVRENRRRIEELVRRVEKEVRRIKEDLKRKLSDEDKVRRILEELDRVLREARERLKRVEDKNREVLERVRELAKESVRRTEDALRRAKELIDNIRDKDVLEKVAREIKRLIEESNRLDKEVEDEVREMSKDVNRELERIAEEIEKVLRDVERKLR

SEQ ID NO: 3355 - protein, 184 aa, Artificial Sequence; identical to SEQ ID NO: 3354
  Synthetic

SEQ ID NO: 3356 - protein, 173 aa, Artificial Sequence
  Synthetic
SLEELLKEVKKLVEDVHRKNKKNVEDVRRLVERLRKENEENVEEVRREVKKVKEEIGDKDVLDKLEKALKEVERLNEESTRRLEKVLREIEELNRKSSEDLKRVVDEVRKLINNNAPLEEVRRRVEELVTDVDRSSKENHRRIRKVVREVERTTEENHRRIRDIVRRVREEAK

SEQ ID NO: 3357 - protein, 173 aa, Artificial Sequence; identical to SEQ ID NO: 3356
  Synthetic

SEQ ID NO: 3358 - protein, 176 aa, Artificial Sequence
  Synthetic
SEIEKAVRELEELVKDNERKSKKSVEDSERIVKEIRDRVRRVVERVRKVVEDIARAGVPEEVIKEIKRIVEEAEKLLRDVIRRIETVVDENRRLLERSNRKIRKVVREAKELLDRLRDDELRKVVERARDLIRKIREESKRSHDRITKLAEDIKRELEKIERRLEKLAEELERKAR

SEQ ID NO: 3359 - protein, 176 aa, Artificial Sequence; identical to SEQ ID NO: 3358
  Synthetic

SEQ ID NO: 3360 - protein, 176 aa, Artificial Sequence
  Synthetic
SEVDELRKEVEEMVKRNKDETDKSVKESKEIVDEIRKRIKEVVDEVRRFVEDIRREGVDEKVIREIDKVVEEAKKKLDDVLEDIKRVVDENRKRLDDSNKEIRDVVKKADDLLKKLRSRALEDVARRLRELLKRINDKTRESHKEIKRLADEIRKKLEDIVRELEKLLREIKERAR

SEQ ID NO: 3361 - protein, 176 aa, Artificial Sequence; identical to SEQ ID NO: 3360
  Synthetic

SEQ ID NO: 3362 - protein, 176 aa, Artificial Sequence
  Synthetic
SEVDEVRERLERVVRRIEREVEKSERDSERIVEKNKRDTDRVDREIEKVVKKIRDRGVDERVVREVERVVEELRELLERSNEELRRVVKENKDLLREVIERVRKVVREIDDLLRKLRSRALEEIEKRARELLKRITELLRESHERIKRLAEEINKKTEKVVRDIRKLLKEIEDKVT

SEQ ID NO: 3363 - protein, 176 aa, Artificial Sequence; identical to SEQ ID NO: 3362
  Synthetic

SEQ ID NO: 3364 - protein, 176 aa, Artificial Sequence
  Synthetic
SEIERLREELERVVRAIERTVTESVRESKEMVDRNKRATEKSVRDSEDMVREIEERGVPKEVIEKIRRVVKENKELLEESNRKLEDVVRKNEELLREVERAVRDVVRRIEKLLRDLRSRELERVAKEARDLLREIKKLLDESTETIRRLVKEINDETERSHRKITELAKRLKEEAK

SEQ ID NO: 3365 - protein, 176 aa, Artificial Sequence; identical to SEQ ID NO: 3364
  Synthetic

SEQ ID NO: 3366 - protein, 176 aa, Artificial Sequence
  Synthetic
DEVRELVEEVERVVKRNKDESKKSEEESREIVREIEKRVEDLVRTVEEVVKEIERKGVPEEVIKKIREIVKRVKKLLDDVRRKIEKVVRENKELLERSNREIERVVDRARELLKKLRSRELEKVADTLRKLLKEINEKLERSVRRIRELAKEIKDELRRIEEELRKLAKELDDEAK

SEQ ID NO: 3367 - protein, 176 aa, Artificial Sequence; identical to SEQ ID NO: 3366
  Synthetic

SEQ ID NO: 3368 - protein, 174 aa, Artificial Sequence
  Synthetic
DRTREVMERIERLLEDSRRKTDKVRREIRKLLEDVHDKTRRVAKEIRDLLDEIRRLLESGVDSKEVERRVREVFDRLRRLVEESERLLEEILRRLEDMARRSKETSERIVRELEREGIEEEVVKKARKKVRENAEEAEEVRRRIRRSVEENRKELRRLEKELKDVLDEIRERVR

SEQ ID NO: 3369 - protein, 174 aa, Artificial Sequence; identical to SEQ ID NO: 3368
  Synthetic

SEQ ID NO: 3370 - protein, 174 aa, Artificial Sequence
  Synthetic
RELEEVRKDIERLLKEVEDTNRRAKERVKRLLEEVHDDTRRAVERIRKLLDEIRKLLEGGVDDRDVRKLLEDVLRELERLVRRSVEELERVLKELEDLNRTSIRLLEKIVDDLRRAGIDEEVVKEIEKMLEKIARHARKSDKEAKESVEDNRRRLEKVRKEVEDMLDEIRERAR

SEQ ID NO: 3371 - protein, 174 aa, Artificial Sequence; identical to SEQ ID NO: 3370
  Synthetic

SEQ ID NO: 3372 - protein, 174 aa, Artificial Sequence
  Synthetic
DREKEVADRIRKLLEEIREESERVAKEIRELIKEVHKRTKEVAEEIRRLLKEVEELLRNGVDSEEVRRLLKEIVDRLRELVKESEKELDRILDRLKKLVEKSKRESEKVVKELRDAGIDEEVVKEIERRLRENERKLRELEKEIKKLVEDNRTRLRELEDEIRRVLKKITDEVT

SEQ ID NO: 3373 - protein, 174 aa, Artificial Sequence; identical to SEQ ID NO: 3372
  Synthetic

SEQ ID NO: 3374 - protein, 180 aa, Artificial Sequence
  Synthetic
SELEKAVEDSRRLDRRVEETLRDVTRRVRETNKEVEDMLEEVRERAERLLREIEEKLTDEAVERVLKKIIDDIERLLREIKKLLEDSNRELRRVVKEIRKLLEESLKRSRDAVEEVRRKGLEDELRKVIDENRKSVETIEEELRRVEKEDEDTLREIEEKLRKAIEELEKKLKEILDRLR

SEQ ID NO: 3375 - protein, 180 aa, Artificial Sequence; identical to SEQ ID NO: 3374
  Synthetic

SEQ ID NO: 3376 - protein, 173 aa, Artificial Sequence
  Synthetic
REREELVERVRELLKEVEDRDREMVERSERLNERIRERDKEVEDRSRKLDEDIERLLRAGARDDEVRRLLEESLRTTEKAVEDTERLLRESLERSKEVVKETKRLLDEIAEEIKRIGGEEVLKEVKDAVDTLKKHSEDVIRKDEESVRDLRRHSEDVLRKNKEMVDDIKAKAE

SEQ ID NO: 3377 - protein, 173 aa, Artificial Sequence; identical to SEQ ID NO: 3376
  Synthetic

SEQ ID NO: 3378 - protein, 181 aa, Artificial Sequence
  Synthetic
DEEDKLREVLKDVERRVREMLRENNELIREVAETSERLLRENNELIERVRKEVTRLLKELEKVSDKRLVKEVVDRVRKLVDELKKHADKLVEESTRLVEELKKHADDLVRRVRELVERVERKIKDIREIVETIRKILREIEEHAERNKTRLEEENKKVREHVERNKKDLEETLKEVEDRAR

SEQ ID NO: 3379 - protein, 181 aa, Artificial Sequence; identical to SEQ ID NO: 3378
  Synthetic

SEQ ID NO: 3380 - protein, 181 aa, Artificial Sequence
  Synthetic
SKEDKLREELKEVEKTVRELLKRNNELIERVREEVERRLEENNRLIKEVKDRIDDLLRKLKDDSDERSVRRVRETVTRLVEELKRHADRLVEEVRRLVEELKKHADEVLERVKRLVDDVTRKAKDIREIVKTIKEILDEIRRHLERNKDRLEKELTRVRETAEKNKRDLEKVLEDVDRKAK

SEQ ID NO: 3381 - protein, 181 aa, Artificial Sequence; identical to SEQ ID NO: 3380
  Synthetic

SEQ ID NO: 3382 - protein, 182 aa, Artificial Sequence
  Synthetic
DEAEKLEREVRKELEENREELERSTEESERLLKHNEDELRKSEEESKKLLREVEKELRRVPKEKLDKVERDARDILRKNKEMVDRVRKTVEDILRDNRRVVDESRRLSKEIERRVREVSESSDKRVLDEVVKEIRRLIEEVKRTTKEMNKKIRKLFEESNRKLEEAHRDIRRKAERVKRELK

SEQ ID NO: 3383 - protein, 182 aa, Artificial Sequence; identical to SEQ ID NO: 3382
  Synthetic

SEQ ID NO: 3384 - protein, 182 aa, Artificial Sequence
  Synthetic
KELDEIREEVDRVLRENERRLRTVKKEARDVLEHNRKRLEELRRKIEEVLKEIEEELKRVPEKKADEVRKRIRDILEDLRRVLREVAETAKRILDELDKVVRESEKLSRKIKDDVTKILKSKDEEVLRRVLERIRRLIERVKERTKRMTDDMRRLIEESNDKLRRAEERIRKLLEEVKRTLK

SEQ ID NO: 3385 - protein, 182 aa, Artificial Sequence; identical to SEQ ID NO: 3384
  Synthetic

SEQ ID NO: 3386 - protein, 182 aa, Artificial Sequence
  Synthetic
KKVEDIKREAEKVIKESEESIRRNERELDEVIKESERSIRRNERELERVLKELRDSVARLRGEELERAKRVVDELEEFVKESKELLKRSLDELDKAVKDSKRLLEESLKRLEKVVREIEEKLRERPDDRIREELKKVADEIRETNKRIHEESKRVVDEVRRTNEEIHKRSAKVVKDIKDKIK

SEQ ID NO: 3387 - protein, 182 aa, Artificial Sequence; identical to SEQ ID NO: 3386
  Synthetic

SEQ ID NO: 3388 - protein, 182 aa, Artificial Sequence
  Synthetic
EEVERITEDAKRVIDESRKTIKRNEDDLRRVIEESRETVERNRKRLEEVLRELEERVRRLRGEELERARRVVEELRKMVETSVRLLRRSLEELKKLVKESVELLKRSLDELRKLVEEVRERLRERPDKRIEEELKRVAEEVKKINEDIHRRSKEEVDRVREINEKIHRDSERVAEEVRRRIK

SEQ ID NO: 3389 - protein, 182 aa, Artificial Sequence; identical to SEQ ID NO: 3388
  Synthetic

SEQ ID NO: 3390 - protein, 177 aa, Artificial Sequence
  Synthetic
EELERLKEEVEEIVRRLKRELERIEEEIAKMVRDSEKSLEEDEREVRKVVEELRRRGNGGEIEKLVEELRRLSREAVRRSEKLLEEIRRLVEKVVREVERVVDELRRRVEEVVRKIETEEILRRVKEEVEKVARDIKAIIEKVAREVKEVLDRIREVNKRAHEETRKVADEIEKRAK

SEQ ID NO: 3391 - protein, 177 aa, Artificial Sequence; identical to SEQ ID NO: 3390
  Synthetic

SEQ ID NO: 3392 - protein, 179 aa, Artificial Sequence
  Synthetic
DEVERIAKELTDVLDRIRKAVETDKEEIKRVLKEIEEAVRTNEEKLKDALRKIREGPVDEKIVRTAERLAEELVRNSRKILTDISDLARKLAENSERILRKIEKLIRDLVKELEDLRKESERALERVEEKARELVRRVDELLRRSHERTKELAERVRRLLKKSDEETERLARDVERKIK

SEQ ID NO: 3393 - protein, 179 aa, Artificial Sequence; identical to SEQ ID NO: 3392
  Synthetic

SEQ ID NO: 3394 - protein, 179 aa, Artificial Sequence
  Synthetic
SEVERITERLKEVLKEIKELVETNSEKLKRVLEEIKKAVEDNTRTIKKVLEEITRAPVDKDIVKDIREELERLVEESRRILEEVERLIRELMKNTERILEEAERLAERLVRKLEALRDGSEEMLKRVEDEARRLTERVRKLIEDSDRETEKLVRRVRELVKRSHEKVKELVDRVRKRIE

SEQ ID NO: 3395 - protein, 179 aa, Artificial Sequence; identical to SEQ ID NO: 3394
  Synthetic

SEQ ID NO: 3396 - protein, 179 aa, Artificial Sequence
  Synthetic
SEVERIAEEVKRVLEKIRRDVEENRKRIEEALKRIEKELRDNERRLREVLDEIRKRPVDEEIVKEVKKRAEDLVRNSERIVREVERLARELLKKTEDILRKIKRLAERVLKKLEELRDSSEDALRAVEEEIRKLEDEVRRLIETSHKEVEDLAKEVTDLLRESNERTEDLRREVDAKRR

SEQ ID NO: 3397 - protein, 179 aa, Artificial Sequence; identical to SEQ ID NO: 3396
  Synthetic

SEQ ID NO: 3398 - protein, 184 aa, Artificial Sequence
  Synthetic
SDEERLLRTITRVLEENKKSVDDDLKKNEDVLDENRRRVERWEEALRELLKRVEDKVKDLKKDGRDEELKRVIELVRRALDRVRDELKKSLDESKELVDESRRTLDESRRLVEEVLREVKELLREGVDTDEIRRVLEKVKEELDRTDEKSRDLSRKVRDRIRESNREIEKLLEEVRERLERETK

SEQ ID NO: 3399 - protein, 184 aa, Artificial Sequence; identical to SEQ ID NO: 3398
  Synthetic

SEQ ID NO: 3400 - protein, 184 aa, Artificial Sequence
  Synthetic
READELRTRAEKALRDNRESVERLKRELDRVLKENERTVRELKERVKEVLKDVDKKVKDLKKEGRDEDLRRLKDRVRRVLRRVEELLERSRRESERMVREVRRLLEESKRLVEEVLREVEELLRRGKPREEIRKVLEDVRREVEETDDRIRKVLERARRESEKVDRELKKELERVRKELEEETK

SEQ ID NO: 3401 - protein, 184 aa, Artificial Sequence; identical to SEQ ID NO: 3400
  Synthetic

SEQ ID NO: 3402 - protein, 175 aa, Artificial Sequence
  Synthetic
DRERRVLEELRKLSEDSKRLLERIRERMRRLAEETKRRARDILREVEELSRRVKELLDGGKDAREVLEDNKRVVDEVREKLKRLLEENKRIVDEVEKLLREVIRDNERVVEKVARDVREIEEVKDDVRRSSEEVKEEVERLIREAKKSTDEVRELLKELEKRLRESIEESKRKAE

SEQ ID NO: 3403 - protein, 175 aa, Artificial Sequence; identical to SEQ ID NO: 3402
  Synthetic

SEQ ID NO: 3404 - protein, 178 aa, Artificial Sequence
  Synthetic
EEVKRMEDRLEEVAKRADEESKKVMDELEKIVRDVLRESKRLTEELRRIADRVRKELRTDEVVRRVVKELDDVSKRNEEVVTKVLEELDRIVEKVEEINRRVLDELRRIVDEIRRRVTDKKELDRIEKRVREIKKRSEDSVRTIRERVRDAKRKLERSVEEDKREVKEIKERLEREAR

SEQ ID NO: 3405 - protein, 178 aa, Artificial Sequence; identical to SEQ ID NO: 3404
  Synthetic

SEQ ID NO: 3406 - protein, 178 aa, Artificial Sequence
  Synthetic
SEVDDLKRKLDEVVRRAKEESKEISERLEEIVRDAERLLKELHEEDERIVDRARKEIRTREMVEEFVRRSEDVARKTTEIVKKVVEELRRVSETNERVVERVLRELDEIVRKIEEDVTDRDKLEKIRDAVRKVKEELERSLEKDRKRVTEIEEKLKKLVEENRRTSKRVKEELEEKVR

SEQ ID NO: 3407 - protein, 178 aa, Artificial Sequence; identical to SEQ ID NO: 3406
  Synthetic

SEQ ID NO: 3408 - protein, 179 aa, Artificial Sequence
  Synthetic
RELEEIKKRVEDIMRRIEDLLRENEKKIDKVRKDIRKSLEENKRKVEEVRKDLKRLLDEREDDRLRELIKDAERLLKEVLDHSRKSVRDVEDLLEKLLRHSKELVERAKKALTDVLRKVEERPEEEVKKEIERLAKKLEEELERSNRESDRLVREARKHNEESDRRSEELARRVRERLR

SEQ ID NO: 3409 - protein, 179 aa, Artificial Sequence; identical to SEQ ID NO: 3408
  Synthetic

SEQ ID NO: 3410 - protein, 179 aa, Artificial Sequence
  Synthetic
KREEDVKRDLKRVADESRKSDEDIKRRLDRLVKEIRELHKKTTDELKKVADEVRDRLRKVKDDKDVLRKILDDLRKMLEEVKRTDDRIVERLEKLVREVERLAEESLKRSKDKLREVIKRVKDIDELREDVKRVEDENRTSLREIKRAIEKVLDESRKLVEENRRRAEKIIKEVEDTLR

SEQ ID NO: 3411 - protein, 179 aa, Artificial Sequence; identical to SEQ ID NO: 3410
  Synthetic

SEQ ID NO: 3412 - protein, 179 aa, Artificial Sequence
  Synthetic
REEEEVTEELKRLADKSRKSDEDIERTDRRVTEEIERLHEETTRELEKVRRDVDRELKKVKDDKRVLEDILRKLDELLKRIKKKDEDILKELRELLEKSIRDLERSLEESRRALEDVVRKVKDIDELKKEVRKILEENKRSLERIRRHSTRVEEKSRKLIKENDDRLKKVIEDVRRKLK

SEQ ID NO: 3413 - protein, 179 aa, Artificial Sequence; identical to SEQ ID NO: 3412
  Synthetic

SEQ ID NO: 3414 - protein, 179 aa, Artificial Sequence
  Synthetic
SEKDKVTKELEDVARESRESDKEIKRELDEVVEESERLLREIRRRLEKVAEEVRRALEKVKDDKRVLKEILDRLREVVEEVKRLAEEVVKRNREVTRRIKELVRKSLEDSERVAREVIKKVREIEELKRRVEEIIRENEESVRRIAKRADDSNREIERLVDEIRRRAEEAIRRVTEKVR

SEQ ID NO: 3415 - protein, 179 aa, Artificial Sequence; identical to SEQ ID NO: 3414
  Synthetic

SEQ ID NO: 3416 - protein, 179 aa, Artificial Sequence
  Synthetic
KEEDDVRRKLEKVVREIDKLHKESTERDRKVREDSEETDRRIKEELKKVVKEVRDRLREVKDDKEKLRKILDDLRKMITDAKRLAEDSLRRSRELLKRSVETDERITDRLRKLLKEVIDEVDKIEELKDEVRKATEKSEDLVRRNEEHSRRVIEENERTLKDIADEAERVIKEVEDRLR

SEQ ID NO: 3417 - protein, 179 aa, Artificial Sequence; identical to SEQ ID NO: 3416
  Synthetic

SEQ ID NO: 3418 - protein, 179 aa, Artificial Sequence
  Synthetic
REDEEVTKELEEVIREIEELHERSTRKLKEVVDRSRELLDRVRRRLKEVVDRIRELLERVKDDKDVLREILEELRRVVKEVKDLLREILERNTRVTEDVVRTDEEITKRLRDMAREVIKKVREIEELRKRVEEAIRKSEELVKENTERAKKSNEELERRVRELEERAKRAIEEVKEKIR

SEQ ID NO: 3419 - protein, 179 aa, Artificial Sequence; identical to SEQ ID NO: 3418
  Synthetic

SEQ ID NO: 3420 - protein, 179 aa, Artificial Sequence
  Synthetic
SREEDVDRKLDEVIERSRRIDEEILRRDKEVVDEIRKLHKESTDRLKEVVDRVDKELKEVKDDKEKLREILKELREMVRRVEKTDDDISKELEDLLRESVRLAEESLKESEELIRKVIEEVKDIEELKKKVTEAIEENRESVEEIRRHSEEVKKESEKRVKENRDRARRAEERVEEMLR

SEQ ID NO: 3421 - protein, 179 aa, Artificial Sequence; identical to SEQ ID NO: 3420
  Synthetic

SEQ ID NO: 3422 - protein, 178 aa, Artificial Sequence
  Synthetic
DREREVKKRLDEVRERIERLLRRVEEESRRVAEEIRRLIEEVRRRNKKVTEEIRELLKRLKDKEEVRRVLERLRKLNKESDELLERILERLRRLVEKTNRLVKKIIEELRRLVEKIVREVPDVKELREELKKLERKIEKVAKEIHDHDKEVTERLEDLLRRITEHARKSDREIEETAR

SEQ ID NO: 3423 - protein, 178 aa, Artificial Sequence; identical to SEQ ID NO: 3422
  Synthetic

SEQ ID NO: 3424 - protein, 178 aa, Artificial Sequence
  Synthetic
DEEEKITRDLEKVEDEIRRLLEEVRRLSKKVKEEITKLLEDVNRESEKAVRKVRETLKRLETKEEVERVLRELEKLMRESDKLLKDIVERLRRLLEETNRLLKEIVDRLRKLLKELVERLDKVERLRKRVTDVIRKLEEVLKDIHRHDKEAIEEAERRLEDNHRRNRRVLEELKRRAD

SEQ ID NO: 3425 - protein, 178 aa, Artificial Sequence; identical to SEQ ID NO: 3424
  Synthetic

SEQ ID NO: 3426 - protein, 179 aa, Artificial Sequence
  Synthetic
SEEETVEELVRRAEEKSRRILEDSKKKVRDIERENDEILKRSRDRVKKAEDDLRRVVEKRDEEEVRKILEDLKRLLEKVIKTDEDIVKTSRDLLREVIKKDEEIVEKLKRLLRDMLEKAKDRGDERILRELERVVEEIDREHERTKEELKKVADESRKAHRESERDLERVIREVRERLR

SEQ ID NO: 3427 - protein, 179 aa, Artificial Sequence; identical to SEQ ID NO: 3426
  Synthetic

SEQ ID NO: 3428 - protein, 179 aa, Artificial Sequence
  Synthetic
SEVERVRKTVEEIKEKNERILKTSKDEVRRILEESERMLEESKKRVDEVREEAADVVRKRDEERVRRILRELEDLLRRVIEEDKRIVERLRRLLKRVIDTDRRILEESRKVLEDVIREAEERPDDRILEKLEEAAKRSDELHKRSRDDLRRVAEEIKKLHEETRRKLKKVVDEIRKKLK

SEQ ID NO: 3429 - protein, 179 aa, Artificial Sequence; identical to SEQ ID NO: 3428
  Synthetic

SEQ ID NO: 3430 - protein, 188 aa, Artificial Sequence
  Synthetic
STLEEVRERVDRVKKKLKKLLEEVTEINERSKKEIDEILKESEDRVRKVKEDLKRVVKEDKDGDRVRKIIEEAKKKLDEVLENSERIAREVKKDNDDSNREVKRVIEDIERKLDEIVKKIEDLERKGMDEEVLERVLRELEELTRRVEKEIRDLLKRIEDSSRRVRELATESRKKLEDLVREIKERLT

SEQ ID NO: 3431 - protein, 188 aa, Artificial Sequence; identical to SEQ ID NO: 3430
  Synthetic

SEQ ID NO: 3432 - protein, 183 aa, Artificial Sequence
  Synthetic
SSEEKVREEVERVREEITRLLRENEDTVRRVDEKAEKALRENKERVDRLREEVRKLLEKDKDKRLEEVLKRVEELLKRSIDKSREVLDRLRKMLEKSLKLSKDILKELEKLLRDIERRVRALTEDDFVRKVTEELKKVTDRIRKLLEESRKHTERVRREAEKLLKEIKDETKKVEEEVRRRAK

SEQ ID NO: 3433 - protein, 183 aa, Artificial Sequence; identical to SEQ ID NO: 3432
  Synthetic

SEQ ID NO: 3434 - protein, 181 aa, Artificial Sequence
  Synthetic
SSREKIKDDLRKAVEENRRLLREVRELLREMLERDERILREIERRLDEARKRLEEVARNNVPEKVVKRLVERVVEEVKRLLETSKKTVKEVVEEIKRLLEEIEKSSRDVVEEIRRLLEETGEGRAVEELKKELRRLEEESRRAVEDLKRLLDELKERTDRVVKKLDETLRKLKEDVDRKAK

SEQ ID NO: 3435 - protein, 181 aa, Artificial Sequence; identical to SEQ ID NO: 3434
  Synthetic

SEQ ID NO: 3436 - protein, 182 aa, Artificial Sequence
  Synthetic
REIDELRKELDEIRKRIEKVIEELKRHLDEVDKRAEDLAKELDDLTKTIERDAERRIREDKKSKEVVERVKRLLDKSNTDSDRVVKTVKRLLDENNKTSDKVVKDVKKLLDEVLKKVRDGPVDDKVIREVEERVKRIKEDVDRVLEDNSREVERVKRKVDKMLKRNKDEADRIRKKMDDDLR

SEQ ID NO: 3437 - protein, 182 aa, Artificial Sequence; identical to SEQ ID NO: 3436
  Synthetic

SEQ ID NO: 3438 - protein, 182 aa, Artificial Sequence
  Synthetic
SVIERLKEELKKIEEDARDMAKKLNKETEDILRRARKLARELEKHLEDVKRKIDELIKEDKKSEEVVKEVKKELDRNNEESKRVVEEVRRRLDESNKKSREVAEDVKRLLDEILEKVRRGPVDKKMIEEVERDVRRIKKEVDRLLEENTERIEEIKKEVDELLKRNTDEVEKVKKKVDEDRK

SEQ ID NO: 3439 - protein, 182 aa, Artificial Sequence; identical to SEQ ID NO: 3438
  Synthetic

SEQ ID NO: 3440 - protein, 179 aa, Artificial Sequence
  Synthetic
KIEEDLERSLKKSEDELKELRDRLRKSNKEVTDDAERIKKEVEDSNREVEKRVRDLERRGVDKDELRRVLEELSKIVEEIKELIERLLEELTKIVEDLERELKELLKESRRIVEELRRLRSEEARKVLEENEEVVRRIVKKVEDILDDHRRVVKEVRDRIERLLKEHKKIVEDADKDLT

SEQ ID NO: 3441 - protein, 179 aa, Artificial Sequence; identical to SEQ ID NO: 3440
  Synthetic

SEQ ID NO: 3442 - protein, 173 aa, Artificial Sequence
  Synthetic
REEEEVAKKLERAAEESRRLHEESKRDHERATDEIRRKAEATLRELKRVIDEIERLADERDKEDVRRRAEELLRRVKKASEDIVKELRDLVERSLRRDKEIVDRSKKVLDEVIREVDVEEIRRRVETLERENRKAEEESRDKVRKSERRLEELNKRHEDLVRELEERLERKRK

SEQ ID NO: 3443 - protein, 173 aa, Artificial Sequence; identical to SEQ ID NO: 3442
  Synthetic

SEQ ID NO: 3444 - protein, 173 aa, Artificial Sequence
  Synthetic
DEEEKVLRELEEVIRTSRRLHKRSLEELDRVLEESKALHRESKRALEDVTREITKLADDRDKKDVVRRLKELLERILRTDEKIVRDSEEALKRIEEEDKKIVRRSEEVLKRVIDKVDVERIRKLVDDLRKENEKALRESKKRVEEIRRRNEEAIKDSKKDVEDLERDLERKRK

SEQ ID NO: 3445 - protein, 173 aa, Artificial Sequence; identical to SEQ ID NO: 3444
  Synthetic

SEQ ID NO: 3446 - protein, 173 aa, Artificial Sequence
  Synthetic
SDEERVLEELKKVIKESRDLHKESLDDLRRVIEKSRRLHEESLERLRRAIEEIERLMDERDKKDVVREAEKILREVRKEDEDIVRDSERVLERVKRTDREIVKRSKEVLKRAIDKVDVEEIRDLVRTLEEDNKRMEERSRRTVRKLEKENDDARKESERLVEELERRLEEKRR

SEQ ID NO: 3447 - protein, 173 aa, Artificial Sequence; identical to SEQ ID NO: 3446
  Synthetic

SEQ ID NO: 3448 - protein, 183 aa, Artificial Sequence
  Synthetic
RDVEEVKKRSDTTLKRIEELIRRVNERSKKSIKEIRDRAKEVEDEVRELARKIEEDARRRKESKELLEELLRRIKKLVDEIVDEIRRLLEKNKRIVEDSKRILEELVEENSRRVEEIKKRNKELDEVVRELEKINDKSRKRVEDAVRSNEKLLEDSERDIRRVIERLKKLLEDLKRKLEEIER

SEQ ID NO: 3449 - protein, 183 aa, Artificial Sequence; identical to SEQ ID NO: 3448
  Synthetic

SEQ ID NO: 3450 - protein, 183 aa, Artificial Sequence
  Synthetic
SDAERVMEESRRTIEKIKKDAKEMNERSRKTVDEIRERLERLLRELERIAEEIRRELEKRREVKDEVRRLLEEVEKLAREIEETVRRLVEKNTDLVRRSLERLDELVKTNHDLVEKIKDRNKELEEFVRELKKLNDKSRKDVEDLKRSNEEINEDSKRKVEEIIRRLEELLKEIRRELEDVER

SEQ ID NO: 3451 - protein, 183 aa, Artificial Sequence; identical to SEQ ID NO: 3450
  Synthetic

SEQ ID NO: 3452 - protein, 184 aa, Artificial Sequence
  Synthetic
SVEEDLKRLVDEIRRRVEKVKRDLERIVDENRKRVEESKEESKKSVEEIERRVREAAKRISDERLIKTLRRIVEEVERVNREVLRKDDELLRESEKVVTEVVKRLDEIVERARKVVEEVAKRIRDEKVADEVRKRLRKMIRDLEEVAREVKRELERLHEETERSSRDAKRRSDKMARDLERTEK

SEQ ID NO: 3453 - protein, 184 aa, Artificial Sequence; identical to SEQ ID NO: 3452
  Synthetic

SEQ ID NO: 3454 - protein, 184 aa, Artificial Sequence
  Synthetic
SSEEKLRELVKRIKRRVEEIIRRLEESVERDRDEVRRSKERLEALVEEIRRRVDDIEKRIDDERLIRTLREIVRRAEEVVRRAVEEDRKISDENEDVVRKVVKRLEKILREIEKVVKEVADRLRSEKAVREVEEELRDMERKLEKVAEEVTRRSKEVTEKLRESSDRVEKELRRIIEELERVAK

SEQ ID NO: 3455 - protein, 184 aa, Artificial Sequence; identical to SEQ ID NO: 3454
  Synthetic

SEQ ID NO: 3456 - protein, 184 aa, Artificial Sequence
  Synthetic
SVREDLKRLVKEIEDEVRKSKKDLDDSVREDKREVRESKEDSKRSVKRSEEEVRKIKKRTDDDELVKRLEDILRENKRVNDEAMKRDDKVSKENEDVVRKVVREDEDVLRTARRVVKEVSERIRDEEVAKRVRELLEEIMRRLRKTSEEARRRSKKITDDLRESSKKVREDSERLRKRLEEEAK

SEQ ID NO: 3457 - protein, 184 aa, Artificial Sequence; identical to SEQ ID NO: 3456
  Synthetic

SEQ ID NO: 3458 - protein, 187 aa, Artificial Sequence
  Synthetic
DAERKITRLLEEIRRESKRSSEEIKKSLKENEDEVRRVVEEIRKRLREIEKEVKEVLDRLRDQREVVDLLRRVLERVREIVRRIEDELRRVLEKSERSVEEIHRRNEEVVKKVEDVVREVRKLAKENSEKLVEEVLREVKRIIEENRTLSERVKEHNEKSHRESEELAKRVKELLKEIERDIRRLEK

SEQ ID NO: 3459 - protein, 187 aa, Artificial Sequence; identical to SEQ ID NO: 3458
  Synthetic

SEQ ID NO: 3460 - protein, 181 aa, Artificial Sequence
  Synthetic
SDAERVLKESKESLEELERRVTEALKRSRDSLRRLKEVADEARRRLEEVLERIARKKDSREELRELLERLRELVEKVVRDVREMLKRDEDLNRRVVEEVREILDRDRKLVKRVMDELDKDKNSEVKERLKRSLEETEKRVREVEERLKKTVEDTRKVVEDIERELERLLREVEEVVRRIEK

SEQ ID NO: 3461 - protein, 181 aa, Artificial Sequence; identical to SEQ ID NO: 3460
  Synthetic

SEQ ID NO: 3462 - protein, 181 aa, Artificial Sequence
  Synthetic
EEAERMLRESEASLRRIEKIVREALEASRRTVEELKKVVERVLREVRKLIEEIEKKKDVREELEKLLREVEERVRRVEEEVKEVLDRDRELVDRVLRRVRELLERDEKLNRDVVRRVDKDNMDEVRERLKKTVEDSKRVVEKAEEDLRRSLEDTERLVREASRRLRDLLRELRRIVEEIKR

SEQ ID NO: 3463 - protein, 181 aa, Artificial Sequence; identical to SEQ ID NO: 3462
  Synthetic

SEQ ID NO: 3464 - protein, 181 aa, Artificial Sequence
  Synthetic
SEDEKALRESKKTTDEIRKRVTEMEKRSREVVKEIRDIIERVLREVRRVLEEIRKKKDSREELDKLLRELEKLVKDVVKEVTELVDRDRELNKEVVKELRRLLEEDERLVEEVVRRIEKDKNSEAKKRLKDSLDRTRKTVEEMTRRLEKTVKETEDLLREARERLEELLRELERVADEKRR

SEQ ID NO: 3465 - protein, 181 aa, Artificial Sequence; identical to SEQ ID NO: 3464
  Synthetic

SEQ ID NO: 3466 - protein, 181 aa, Artificial Sequence
  Synthetic
SEDEKVLRDSRKVLREIEEVVKEVLKRSKKLVEELEDIARRVLKESEDSNKEARDKKDLREELRRLLEEDERLVERVTREVREVLDRDRRLNKEAVERVERLLEEDEKLNRDALRKLSKDNNDEVERRLRKTVRDTKEVVDRAREKLERTVRTTEETVKEIEKRLEESLRRSREDVKEREK

SEQ ID NO: 3467 - protein, 181 aa, Artificial Sequence; identical to SEQ ID NO: 3466
  Synthetic

SEQ ID NO: 3468 - protein, 182 aa, Artificial Sequence
  Synthetic
RVEDALRKLLDDVRRLVEEAERRLRTSNDKSRRLVEEAKRRLEESNERSEKLVRDVRRRIRDEDVKRVLEELLKRDHDVVRRVLERIDEMLERNSRLVKRVLEDIRRLLKRVREVVERIKRVRSKVVEEVLKELEELIKTAKKIIEDVLRASEDTIRRLEEIIRKVEEDSKRIIEEIERAAR

SEQ ID NO: 3469 - protein, 182 aa, Artificial Sequence; identical to SEQ ID NO: 3468
  Synthetic

SEQ ID NO: 3470 - protein, 182 aa, Artificial Sequence
  Synthetic
SAEDKLRKLLDDARRTVKEVEERLKKLNKKLEEDVKRVKRELRESNKKSRELVEKVKREVTDEDVKKKVEDLLKRDHDVVRRVEKELDDMLRRNHKLVRDVLRELRKLLEDVERVVERARRVRSEVVEEVLEELKKLIETVKRRAKEVLDRSEETIREIRKRAEDVLRESERIIEDIERMTR

SEQ ID NO: 3471 - protein, 182 aa, Artificial Sequence; identical to SEQ ID NO: 3470
  Synthetic

SEQ ID NO: 3472 - protein, 183 aa, Artificial Sequence
  Synthetic
KVEKRLTDLLKTVADEVKRVEDELRETVRESKEVVDKSRRDLERTVEESEKTVKDAERRVSEDLVRRIRKVLDENREVNDRVVKEDERILEENERVNRKVVEKIRDILRKIEEVVRRAAEEIRDEEVVKKVEKEIRELLERLKEEADRVRERSKKILTDLKKSSEDVKRESERMLKKLEDEIR

SEQ ID NO: 3473 - protein, 183 aa, Artificial Sequence; identical to SEQ ID NO: 3472
  Synthetic

SEQ ID NO: 3474 - protein, 183 aa, Artificial Sequence
  Synthetic
SVEERLEDLLREVTETLDTSRRRLEKLDREVDKKVKEVEKRLRETLKESEDTVRDVERRVSEELVKLVRDILERNEEVNREAVKRIRDILDEIKKLVEEVVRRDAEIVKEAERVVERVARDIRSEEVARRVEKELEDILRKLRKSSEEAERRIEEMLRRLDKVVKEMLKRSRDLLRTLEETTK

SEQ ID NO: 3475 - protein, 183 aa, Artificial Sequence; identical to SEQ ID NO: 3474
  Synthetic

SEQ ID NO: 3476 - protein, 181 aa, Artificial Sequence
  Synthetic
SIREDVERLAEELDRKSREIATRAKRELDEILRKDKEISDRARKELEEILKKLKEIADRDKDERKIRRVLEEAEDLVRRVVELNKKSLEEARKLVEDVLRLLEESLKESKDLVERAKERITGKEVEKRLDDALKRNAEEVEDVKRKLKDVLREVERTVRESEKDLRRVLEEVERAVREIRR

SEQ ID NO: 3477 - protein, 181 aa, Artificial Sequence; identical to SEQ ID NO: 3476
  Synthetic

SEQ ID NO: 3478 - protein, 182 aa, Artificial Sequence
  Synthetic
SEVDEVLKRSRDVLKRIDEIVKKVLTDSKRVLEDLRRIVKEVLDESKKVLEEIRKIKDSREDVTELVKRLHKRNKDVLDRVRKVVERNHRLNKRALEEVARLVKELHDLNKRALDEVRSDERAEEVERAMRKSSDDLRRKLEEVERRLRKSSEESKKVLKDAEREIRRSSDELRKVLEDIRR

SEQ ID NO: 3479 - protein, 182 aa, Artificial Sequence; identical to SEQ ID NO: 3478
  Synthetic

SEQ ID NO: 3480 - protein, 182 aa, Artificial Sequence
  Synthetic
SEVEDVLTKSRKVLKEIEEIARKVLEESKRVLEEIRRVVEEMERRSEDVLRELRRIKDKREEVREVVKDLHKKNEDVLRRVKKMIEENHRLNETVLREVRRLVKELHELNKDALRRVKDLERADEVRDEVRKSSEELRRVLEEAEERIRRSSKESKELLKRVKERIEELSRRLEKVLREIEK

SEQ ID NO: 3481 - protein, 182 aa, Artificial Sequence; identical to SEQ ID NO: 3480
  Synthetic

SEQ ID NO: 3482 - protein, 184 aa, Artificial Sequence
  Synthetic
DAEDELKKAEDRLRKSDEEAKKSIEDVKRELRRLLEESKKEIEKLIEELRRLLERAKEKPKDETILRRLEEIVRRIEERLRRAVEENAEIVKRIEERADRVVEESEESVRRIVEEIKKAKDRLRTEEVVERVLRKVERLLEENERLVKEVEDELRKLLEDLKRSSKKVRDEVKELAKRLRDEVR

SEQ ID NO: 3483 - protein, 184 aa, Artificial Sequence; identical to SEQ ID NO: 3482
  Synthetic

SEQ ID NO: 3484 - protein, 184 aa, Artificial Sequence
  Synthetic
SAEERIEEVKERLRRSDEEAKRKIDRLVEELRRLLEESKKEAEKVKKELRKLLEEVKRKPKDEKILKKIEEIVREIERTVEDMLRRNAEIVKRIEDRARRVVEESNDSVRRIEKRVDEALREVRTEEVVKRVEDELRRLLEENKKLVDDILDEVRRLLEELEKSSRKVKEDLDRLLEELRREDK

SEQ ID NO: 3485 - protein, 184 aa, Artificial Sequence; identical to SEQ ID NO: 3484
  Synthetic

SEQ ID NO: 3486 - protein, 179 aa, Artificial Sequence
  Synthetic
SAAEEVKKRITDLLRKDEEVVKRASEAVERLLEDDKRVVEDVRREIEEILRTLEKVTREGKDKKAIRTIVRDLERVIRRVLEASARTVKRIEDLIEKLLRESRETVDELRRVLEEAAREGSIDKDDVKRAEDEVRKSHKKVEDDLRRLKEEVERSLKDTEDKARRAKEEVERLLRESER

SEQ ID NO: 3487 - protein, 179 aa, Artificial Sequence; identical to SEQ ID NO: 3486
  Synthetic

SEQ ID NO: 3488 - protein, 179 aa, Artificial Sequence
  Synthetic
DEDDRVRKEVEKMLRDDDRIVKEIEKRLKDLLDRDRKVVREVRELVEELLRRLEKVIKDGAPEEVIREIVERIRKRLKELLEKSAKTVDEIRKLIEELLKKSKKSVDDLVKRLEDVRREGSISEEDVDRLRREVDKSNKDTKKILDEVRKEVEDSLRKTKKIIDDALRRVDELLKEAER

SEQ ID NO: 3489 - protein, 179 aa, Artificial Sequence; identical to SEQ ID NO: 3488
  Synthetic

SEQ ID NO: 3490 - protein, 182 aa, Artificial Sequence
  Synthetic
SVEERVEDIKRSNEESNKRLREEVEKIKEELKEINKRVEDTVREIEKRLEELLRRVRSDKEEKFKDVKKLVEDIVRRLREIVKENHEIVKEVLKELDELVEKSTRTVEESKKRLDEMLRKIRDERVVEEIDKIAKEVNTRNKKVVDEIRKRAEEVKEESKESLKRLRKIAEEVLEELKKRAT

SEQ ID NO: 3491 - protein, 182 aa, Artificial Sequence; identical to SEQ ID NO: 3490
  Synthetic

SEQ ID NO: 3492 - protein, 175 aa, Artificial Sequence
  Synthetic
DLAEEVRKDVEDLERTNEKVVRDIRKLLEDLNREHKRVSDEIRKRIEELKEKLKRIKDEDEVRKVVEELERTLERVRKRVKDTVDKSKELLKRLLERSRETVERVKKKLDDVRRDGAIDDDDVRRIKKRAEDSHDRVKKELDRIAKSNEELLRKTEEEVRRLLEELEEILRRTRK

SEQ ID NO: 3493 - protein, 175 aa, Artificial Sequence; identical to SEQ ID NO: 3492
  Synthetic

SEQ ID NO: 3494 - protein, 179 aa, Artificial Sequence
  Synthetic
DEVEEALRRVEESNRRVKEEVERAVERVKRSDDDVRRLVEEMEREVRKLIDDIRRLAEAGKSADVVRKLIKEVEDKLKEVLERVRKLVETSKKLLDEILKRVEELVRRSKEELDKVLKDGSADKDEITELKKHSERLLEEAERLVRDLKRHSDELLEEVEERLRRLREDLKRLLDEVET

SEQ ID NO: 3495 - protein, 179 aa, Artificial Sequence; identical to SEQ ID NO: 3494
  Synthetic

SEQ ID NO: 3496 - protein, 179 aa, Artificial Sequence
  Synthetic
SAVEKAVRDVERTNEEIRRVVEEVRKEAEKTHRDIRRVVEEARETAERLLREIEELAKKNAPKEAIEELVRRVLDLLRRALEEVREAVERSDRRLEEALERVRELLERSNKLVDDVRREGSISEEAVKRLKDENKKTLDEVREIVKRLAEENKRLLEEVEKTVRDLKRELEKLLREVAK

SEQ ID NO: 3497 - protein, 179 aa, Artificial Sequence; identical to SEQ ID NO: 3496
  Synthetic

SEQ ID NO: 3498 - protein, 182 aa, Artificial Sequence
  Synthetic
KEVEDVVKEIEEVLDRLRKEVKKIKEDSDRLNEEIEKVVTDLVKELDRLLREIDDLIRKLKGDSEAVRRAVEELKREVDRVLREVEEMVKETKRLNDESNEKVRRVVEDLRRLIERVLRDATDDRARKTLEDLKRRIEELLRRVDETNERLKRHSDDLLRDVKRRLDEVRERIDRLLDKAER

SEQ ID NO: 3499 - protein, 182 aa, Artificial Sequence; identical to SEQ ID NO: 3498
  Synthetic

SEQ ID NO: 3500 - protein, 182 aa, Artificial Sequence
  Synthetic
DEVDEAVKRLREILRRIREIVEKVRKESEDVNDEIRRIVEEVTKRSEDALRELRELIRRNKGREEDVKRVADRIRELDDRSNDTVRRLVEKTRRLNDESNKTVRKLVEELKREVKKVEARVTDERVREELRKVEEDIDRLLKEVTELNERLKRHSEKLLRDVTRENRRSKEAVTRILEEARR

SEQ ID NO: 3501 - protein, 182 aa, Artificial Sequence; identical to SEQ ID NO: 3500
  Synthetic

SEQ ID NO: 3502 - protein, 182 aa, Artificial Sequence
  Synthetic
SEVEELLDRLREVNKRIREEVRKVTEESKKAIEEIKRIVDDMVDKVRKILEKLKELIRDNRGDRESVRKVVEELRELIRRVLEEVRKLIERVKKRNDESNDTVRRLVEETERIVDEAEKRVKDDKAREDLRRVKEHSERLLREVTKLNKDVEKELKELLDEVRERLKDLKRRIDKILEEAER

SEQ ID NO: 3503 - protein, 182 aa, Artificial Sequence; identical to SEQ ID NO: 3502
  Synthetic

SEQ ID NO: 3504 - protein, 181 aa, Artificial Sequence
  Synthetic
SVRERVKDEMEKVLRDDKEVSKRVTDEARKVLEEHRKITDEVRRRSKELIRELKKVRDEGRPEEKIKEIADRIREVDDRSNRRVRESVKKLEDLLRRVVKESEETVRTLRKLLEDVLREVDREEVRRTVDEVRRRIDKSLEESKKLVEDISREITELLRRTTERNKESKREVDKILEDARK

SEQ ID NO: 3505 - protein, 181 aa, Artificial Sequence; identical to SEQ ID NO: 3504
  Synthetic

SEQ ID NO: 3506 - protein, 181 aa, Artificial Sequence
  Synthetic
SIVERAEKELRRLLKEDEEVSDRVRKEVKRLLKEDKEILDDVRRRIEKILREIEEVARRGEDKRAIRKLVEELKRVIDKAVEESRDSVRRIKDLLDKALRESEETVRRIKTLADDLLRKVDREDVRRIIKEIKERVKKSLDESREIIERAKREVDKSLEESKKVAEDAKRRIERLLREVER

SEQ ID NO: 3507 - protein, 181 aa, Artificial Sequence; identical to SEQ ID NO: 3506
  Synthetic

SEQ ID NO: 3508 - protein, 179 aa, Artificial Sequence
  Synthetic
SEVEKVVREVEKLIREIERHSKEVNKRSKEDIDRIREKIERAIRRVEELIRKVKEVTERGDRRKEEVLEELDRIVEEVETMAKRVREELKEIVDKSRELMRRSEELLDEILKRAAELARRVGVKEDLDRIRERLERLKKRTKELLERDEREVERVERELEELIRDIRRKIEKLKRDIEK

SEQ ID NO: 3509 - protein, 179 aa, Artificial Sequence; identical to SEQ ID NO: 3508
  Synthetic

SEQ ID NO: 3510 - protein, 175 aa, Artificial Sequence
  Synthetic
SDLEDVIKKIEELLRRVEERLRDAVRKIEELLRASDERLREINEESRELLRRVKELKDAGIDKRDVERILRDIVRRSKKLLDEVHRTNEEILRTIERVVEEVKKELDKILKEVEDKVRDRKLVDDIRKEVERIVEEARKLLERIKREVKESSERAERLHEEDRKRVEDALREVKK

SEQ ID NO: 3511 - protein, 175 aa, Artificial Sequence; identical to SEQ ID NO: 3510
  Synthetic

SEQ ID NO: 3512 - protein, 175 aa, Artificial Sequence
  Synthetic
KEAEDVLEKAKRLLKRSDEVVEEANDESRRLLDKIRKLVDTVNEESKRLLDRVRELREAGTDKKDVKKILEDIVRRSEEMVERVERLLREVVERSRELVERVHELNKEILERIRREVEDKDAVRDVEREVRRSSKRLKELHEEDKRRVRKILERLKRLHEKDRRDLEKVMKEVED

SEQ ID NO: 3513 - protein, 175 aa, Artificial Sequence; identical to SEQ ID NO: 3512
  Synthetic

SEQ ID NO: 3514 - protein, 175 aa, Artificial Sequence
  Synthetic
DDLDEVIKDIERLLKESDDDVERVIREIKKLLDEVRKRVRDANEDSKRLLREVERLAEAGLDRERVEEELRKIVEKSRKAVEEVKRLLDEILKRVTDAVREVHELNKDILRRVRERVRDERLVREIERRVRKSSEDLRRRLEEIRERVEDIERELRKLHEEDKKRVEDILTEVRR

SEQ ID NO: 3515 - protein, 175 aa, Artificial Sequence; identical to SEQ ID NO: 3514
  Synthetic

SEQ ID NO: 3516 - protein, 174 aa, Artificial Sequence
  Synthetic
SEKERVVEEVRKKLEEIRRRTEEMIERVERLLDEIRRRNKELVERNKELNKRIAEIVRDRNNKDEVKELIDRSKKSTDDVNEESRDLARKVKELVDRANKESRRLVEEVRKEVEDLIDSELARDIKRKLEKILEDSERLVDEIRKRIEKIKRESDETVRESRESSRRLLEEVKR

SEQ ID NO: 3517 - protein, 174 aa, Artificial Sequence; identical to SEQ ID NO: 3516
  Synthetic

SEQ ID NO: 3518 - protein, 179 aa, Artificial Sequence
  Synthetic
SEVERLLEDNRRTIREDEERNKRVVDTWRELTRRLEERIEKVLTDNKKTVEDLVRKRGRDRDVLRIIKELEDLSKKIEDDLREIIKRDRELARELKERSDELLKRLRELSKRIEKVLRDRRRDDDELRKDLERLDEESKRASEKLEEEVRREIKRSKELIEEVERKVEEIDKRADERLN

SEQ ID NO: 3519 - protein, 179 aa, Artificial Sequence; identical to SEQ ID NO: 3518
  Synthetic

SEQ ID NO: 3520 - protein, 179 aa, Artificial Sequence
  Synthetic
SEVERVLEKLKRDVEKNERDNRRVLKKLREDVKKDADDNRKVLEDLRRAVEELRREVGRDRDVERILRELEEALRRIEEESKKLIRRLEDLLREIERKSRELLKRLRDLLRRIAEVLRANTNDTKDLVDEARKVLETSKRLSDELKKEVEKMLRESREMSKRLKEEVDRILKEVRDKAR

SEQ ID NO: 3521 - protein, 179 aa, Artificial Sequence; identical to SEQ ID NO: 3520
  Synthetic

SEQ ID NO: 3522 - protein, 174 aa, Artificial Sequence
  Synthetic
DELEEVIDRNRKSLKEIEERNKKVIEDLRRAIKEIEDRLKEVLDRVKKRIEDIERRVPGKEILDKVREMVKELEDRVRELVKELRKLVKELEDKVREHSKKVRKLSKELEDELRKEGPVEELRKKIEDVDRKVRKESEDLKRELKKLLDEIRRKVRELEERAKRVEEEVDREAK

SEQ ID NO: 3523 - protein, 174 aa, Artificial Sequence; identical to SEQ ID NO: 3522
  Synthetic

SEQ ID NO: 3524 - protein, 174 aa, Artificial Sequence
  Synthetic
SELEEVIRDNERSLKEIEDKNREVTKTVREEIKRIAKKLKEVLDRNRETVRDIERRVKGEEILREVRELSDRLEEDARRILEEVKELLERLEREVEKHSREVRDLSRKLADRLRKEGPVDELRRRIKEVDKEVEEKSEKLKREVKAVLDRVEKLAEEIRKKVEDVDRTVEEKAR

SEQ ID NO: 3525 - protein, 174 aa, Artificial Sequence; identical to SEQ ID NO: 3524
  Synthetic

SEQ ID NO: 3526 - protein, 174 aa, Artificial Sequence
  Synthetic
KEMEDLEREVERVLKRLEELVRELLETVRRTLTRLKRKLDEKKKELDKVNEDLDRVTREGRDRREIIKEAEKSLEDLKRDLERIKREIDKINDELRKRVKEIVDRARKILEDLRRNNLEERVVKKLEDAIEEIKRKLEKVHDEHRRTVEKIEEDIRRVEEEHRRTIKEIKEKLK

SEQ ID NO: 3527 - protein, 174 aa, Artificial Sequence; identical to SEQ ID NO: 3526
  Synthetic

SEQ ID NO: 3528 - protein, 174 aa, Artificial Sequence
  Synthetic
SESERLAKEVEKKLKDAERLVKELHEEVDRMNRDLERKLREISERAKKTTEDVERVAERGEDRREIDKDLRRVNKEVKDLIDKLEDEARKSHEEHARVLKEIEDRLREVLKEVEANNLPEEVIKKVRKDIEEITRKLERSNREHERTLREIKKRAEKVHEDHRREIDRIREELK

SEQ ID NO: 3529 - protein, 174 aa, Artificial Sequence; identical to SEQ ID NO: 3528
  Synthetic

SEQ ID NO: 3530 - protein, 174 aa, Artificial Sequence
  Synthetic
RESEELEREVERVLRELEELVKRLHDDVRRVDEELDRKVRDLHKKVRDVLRRVEKLVRDGRDAREIRKELEDAHERHRRMLEKIEDEARKSHEDHKKVLEDIKRRAEEILKKLRDENLEDRVVDRLRRKIEEIARRLRKSNEDHRRSLKEIKDKLEESNERLRRALEEIAERLR

SEQ ID NO: 3531 - protein, 174 aa, Artificial Sequence; identical to SEQ ID NO: 3530
  Synthetic

SEQ ID NO: 3532 - protein, 175 aa, Artificial Sequence
  Synthetic
SEKDEVITRVETELRRVKTEDRDVARRVKEELEDLKRRLERVIEDNERTLRELKKELKERNKPDDEAERLLEKSREVAERVLRKLEEIIKRIEEEIKKMLDESEKIVEEIRDVVRRKGVDEDVVRELEKLLRDWEKRSREVEEKLRRLLDELRETLKEIEKELRRLDKEIKERLR

SEQ ID NO: 3533 - protein, 175 aa, Artificial Sequence; identical to SEQ ID NO: 3532
  Synthetic

SEQ ID NO: 3534 - protein, 175 aa, Artificial Sequence
  Synthetic
DREEKVKRRVEEELDRVRRTDDRVLKRVEERLREDEKRNEEVIRRNEKTLRELEKRLRDNRKPDDRMRELLERSRRKAEEALRKTKKIVRDVREKMREAKEESRKIEERIKETIREKGVDEDVVRELEELLKRWKETSERVKRELTDLLRKSEETSKEVTKTLRELDKRIEDELR

SEQ ID NO: 3535 - protein, 175 aa, Artificial Sequence; identical to SEQ ID NO: 3534
  Synthetic

SEQ ID NO: 3536 - protein, 174 aa, Artificial Sequence
  Synthetic
SREEDLKRKIDEVDKEWKKLTKKLEEEIREVEKEWRKLSKELERKIREVEKRLKEAKDRNVDKDDVDRRARELVERIKREAEKINEDVERLLKEIEDRIREINKDVDRLLKELEAAGVPEEVIKTLRERVKDIHREDKEIIDRLREKAERIKEHDRKLLEDLKRTLDKLRREME

SEQ ID NO: 3537 - protein, 174 aa, Artificial Sequence; identical to SEQ ID NO: 3536
  Synthetic

SEQ ID NO: 3538 - protein, 174 aa, Artificial Sequence
  Synthetic
DEREEIKKELDRIIRESEELVKKIKDVIRKLIEESKRLVEKIREDIKRSNDKLDEVTRRGVSKEDVERVLEKSREDSKRLLEKNRKLIEEVKREIRRLIEENRKLIEEVREEIERRNVEEEVKRRAEDLLRRSDEKSKRIAEEAERRLDRSDEESEKILRDNEDMVRKWREKEK

SEQ ID NO: 3539 - protein, 174 aa, Artificial Sequence; identical to SEQ ID NO: 3538
  Synthetic

SEQ ID NO: 3540 - protein, 174 aa, Artificial Sequence
  Synthetic
DETEKITKDLEDLIREDEKLVKDARDTLAKSNEDSRRLVEDLRRLIKESNEELERVVREDVDERELKKLADESRERSKDALRRNKELIDRSREESKKIITRSDELNREIRKRVEDINVEEDVVRRLERLSEESRERLERILRDNKRRLDKSLEDSKRLVEKNDRDLKKWKEDRR

SEQ ID NO: 3541 - protein, 174 aa, Artificial Sequence; identical to SEQ ID NO: 3540
  Synthetic

SEQ ID NO: 3542 - protein, 177 aa, Artificial Sequence
  Synthetic
DERETVREELKELIERLRDLNRKIEELLRRSNEEIRRLVEEIRRRLKEMNDEIRRVLKKVDREIIRKLVRESEKLTEEVRRELKTIVDESRKLVDKVRRENERLVREVKKRLEDAKRKGSIDDKVLKEAKELLDASEKHLRDLIETNERVLKRWEEELDKIAEENERVLRKWEEEAK

SEQ ID NO: 3543 - protein, 177 aa, Artificial Sequence; identical to SEQ ID NO: 3542
  Synthetic

SEQ ID NO: 3544 - protein, 175 aa, Artificial Sequence
  Synthetic
SEREEVLKKIREMSKRDNEKNKRILDDVRRLSKEDNKDNDRLVEEHRRKITELEDRVRKEGPREEIRKESRRVLEKTAEDFKRSIDRNRKANKEVRDKVKKSIDENKKVLDDAKTEVGEDEVLREVEELSRRDEKRSKEILEEVSKLSKDDEDRSRDLLRKAEEENRRLEEKLRK

SEQ ID NO: 3545 - protein, 175 aa, Artificial Sequence; identical to SEQ ID NO: 3544
  Synthetic

SEQ ID NO: 3546 - protein, 175 aa, Artificial Sequence
  Synthetic
SEKETVLEDIRRMSKEDNEKNERIVERARRILEKIEEKNRRVKEEAKKMLERIKKLVKDRGPDKDLKRELEEVVKTLEELHKRLIDELRRVVEEVERLVRESIKENRKVLKDAADRVGEDRVVDEVRKRSEEDERRSRELLEEVRRAVKRVEDKSRTTVREIRERVKEVKKRLDD

SEQ ID NO: 3547 - protein, 175 aa, Artificial Sequence; identical to SEQ ID NO: 3546
  Synthetic

SEQ ID NO: 3548 - protein, 178 aa, Artificial Sequence
  Synthetic
SEVEDVVRKVRKLVEKSTRDNKRVLEKVRKLVKESSDKNKKVLDEVEELIERLREKLERIRNDKEKEELKKEIDDVLERVERLHKELKKENDDVLREVEEVSRELKKRNDEVLKRVKEAGVDRDALEEIRKRVEDNKRRSDESLEEIRRLVEENKRRSEKTLKEIREKAKRLKDEIDR

SEQ ID NO: 3549 - protein, 178 aa, Artificial Sequence; identical to SEQ ID NO: 3548
  Synthetic

SEQ ID NO: 3550 - protein, 178 aa, Artificial Sequence
  Synthetic
SEVEKVEREVDEMVRDSTKENEDILREVRERLKKIKEDLDRTVTEVRRLLKELEEKAREVRDERLKRRLEEELDRILKEVEELAKKLKDDVEEVLKEVKKLSKRLKDKNDKVLKEVEEAGVTKDMLDRVREKVKRNKEESDKSLDEIRRIAEEVKRRIDELLKEIKKRAEELKRKLRK

SEQ ID NO: 3551 - protein, 178 aa, Artificial Sequence; identical to SEQ ID NO: 3550
  Synthetic

SEQ ID NO: 3552 - protein, 178 aa, Artificial Sequence
  Synthetic
SEVEEVLKRARELVERSTRENRKILERARKMLEDARKTNEDVLRDVERLLDELRRELEKIKEDRLKEELKKKIDDILRKVEKLHREIKKRIDEVLEELAKLSKELKEDNDRVLKEVEEAGVDKEVLDEIRELVKENKKRSDDSLREAEKRLRELKEESDKTLDEIRRKLEKLKEEIDR

SEQ ID NO: 3553 - protein, 178 aa, Artificial Sequence; identical to SEQ ID NO: 3552
  Synthetic

SEQ ID NO: 3554 - protein, 178 aa, Artificial Sequence
  Synthetic
DEVETVRKDVERLVRTSNDENRRILETARKLIKEVREKNKEVTDRVRDLLRRIEEEVKKVKDKELKDRLKKKIDEVRERVERLHKEIKDELKEILDELERLSTELKEKNKKVLKEVEDAGVDERILEEIRRRVEENKKRSDESLKEARELLRDVERESDETLKEIEEEARRLKEEIDR

SEQ ID NO: 3555 - protein, 178 aa, Artificial Sequence; identical to SEQ ID NO: 3554
  Synthetic

SEQ ID NO: 3556 - protein, 175 aa, Artificial Sequence
  Synthetic
DEVKKVVDEARKLVEDDKRTNEEVLRRTRELLERDERKNEEAVKRIRDLLKEIKKLVEAGVDKRELKKRIDELLERLERLVRDSERLNEEILKEDRKVVEESEERNERIKDRLRKLPVDEELLKRIDELIKESKRRTKEAHRESEELARKTKKSTRDLLREVEKRLREIKEEIKR

SEQ ID NO: 3557 - protein, 175 aa, Artificial Sequence; identical to SEQ ID NO: 3556
  Synthetic

SEQ ID NO: 3558 - protein, 175 aa, Artificial Sequence
  Synthetic
SDVEKVVDEVREKVKRDKEDNRRVAKEARELVKESSEKLERLVTEVKKLIKTIEKLVRDGVDKRDLERKLREVEEEVKKMADRLREENEKILRDLEEMVKESRERNERIKDEVRKLNVDDELLKEIDKLIKESKKETDDLLKEIKDLIDENKRRIDKLLREIEKLARKVKRDIEK

SEQ ID NO: 3559 - protein, 175 aa, Artificial Sequence; identical to SEQ ID NO: 3558
  Synthetic

SEQ ID NO: 3560 - protein, 175 aa, Artificial Sequence
  Synthetic
SDVEKVVEELRRLVRKDEEDNRRAVEETRRLVEDSSRKLEEMVRRVRDLIRKVEELVKSGKDKRELTKRLDDILERVKEAAKRLRDINERILERDREMVKRSRDTNEEILDRARKLRVEERLLREIEKLIRESKKKTDDLHRESKKLIEDNKKRIDDLLKEIKDRVERVKEEIRR

SEQ ID NO: 3561 - protein, 175 aa, Artificial Sequence; identical to SEQ ID NO: 3560
  Synthetic

SEQ ID NO: 3562 - protein, 175 aa, Artificial Sequence
  Synthetic
DEVKKVVDEVRKKVEEDKDDNRRAVKETRELVEESSRDLKRLVETSRRLIEEVERLVEKGVDKRRLKELLEEILREDRRAVEELDKKNREILRRDRKAVEDSEKKNEDIRKEVEELDVEERLLREIRKLITESKKTTRDLHRDSKRLIDENRKRIRDLHEETRKLVKEVLDKIRK

SEQ ID NO: 3563 - protein, 175 aa, Artificial Sequence; identical to SEQ ID NO: 3562
  Synthetic

SEQ ID NO: 3564 - protein, 175 aa, Artificial Sequence
  Synthetic
SDVEKAVDEVRKLVKDSNEKVERVLREVRKLIEEDERKNREVFERVRKLIEDILRLVKGGTDKRELEKRLRDVLRRVKEAVEDSRETNERILTDVKRIVEELRKENEDIEDRVRKLRVDEKLLRDIREEIERNRRELEKALREIKKEIEKTKRKTDRLLETIKELIDRVVEEIKR

SEQ ID NO: 3565 - protein, 175 aa, Artificial Sequence; identical to SEQ ID NO: 3564
  Synthetic

SEQ ID NO: 3566 - protein, 175 aa, Artificial Sequence
  Synthetic
DEVETVKRRVEELVKRSNEELKRIVEETRRRVEDDERDNERIIREIKKKLKDIEELVKSGTDKRDLKRKIEEILRELKEAVDRSRELNKEILRKDREKVEELRKRNKDIEDEVRKLPVEEEILKTIRRLIEKNREDIDRLHEESKREIDRTKERTDRLLDDVRRIAERIKEEIDK

SEQ ID NO: 3567 - protein, 175 aa, Artificial Sequence; identical to SEQ ID NO: 3566
  Synthetic

SEQ ID NO: 3568 - protein, 175 aa, Artificial Sequence
  Synthetic
REVEEVLKEVDELVRKSNEDLKDIVRRTRDLLRKDKERNDEVVRRSEELIRRVEELVRRGRDKRELTKRLKEILDEDREAVKESKKLNEEILTEDREAVRELEKKNRKILRDVERLPVDEEALERIKRKIDENEKEIRELHKESEKRIRDTLRATDKLHKDTRRRVEEVKEEIKK

SEQ ID NO: 3569 - protein, 175 aa, Artificial Sequence; identical to SEQ ID NO: 3568
  Synthetic

SEQ ID NO: 3570 - protein, 175 aa, Artificial Sequence
  Synthetic
SDVERVVERARDLVRKSDDDLRKMVAETKRLVEESSKKLDKIVRESRELIRDVKRLVEEGKDKRDLRRELKKILDRDRRAVEELRKDNERILERDRRLAERDDELNRKIEDELRKLNVDEELLKEIKKRIDESREKTKRLHEESRKLIEDNKRRIDELHKETKEEVERAKKEIED

SEQ ID NO: 3571 - protein, 175 aa, Artificial Sequence; identical to SEQ ID NO: 3570
  Synthetic

SEQ ID NO: 3572 - protein, 179 aa, Artificial Sequence
  Synthetic
EEVKRALEELDELVKRIEEDSRRMVKEAEDLVEKIRKEIEDLLRRSRKLNEDIRRLIDRDNEDKTVERLLRRDEELNEEIKRRVDEVLKRIKELLDRMNKRSEDLLRRLKERLEELAKDGKISEDILRRADELLKRLRRKDEELTKKIERLLEKVAKEVEDINRESKRSADEVRKRVRK

SEQ ID NO: 3573 - protein, 179 aa, Artificial Sequence; identical to SEQ ID NO: 3572
  Synthetic

SEQ ID NO: 3574 - protein, 179 aa, Artificial Sequence
  Synthetic
SSVKEVRDELKRLVDEIRKESEDMVERLRRLVEEIRKRNEELVRRSEELNERARRLIERDNNDKEVERLLDEDRKLNERIKRESDDLLRKLEELVKEINRRSKELLDRLEELLRRAKKEGKVDDKILKEAEDLLRDLERRDRELTREVEKLLEELRRTSEETNKRSKESADRVEDEVRR

SEQ ID NO: 3575 - protein, 179 aa, Artificial Sequence; identical to SEQ ID NO: 3574
  Synthetic

SEQ ID NO: 3576 - protein, 179 aa, Artificial Sequence
  Synthetic
KEVEEALKRVRELVKRAEDMNEELLRRSRKLNDEIRRRIEEMLRRLEEVVRRIKELVDRDNDDKTVRELLKKIEELIERVIRTVRKLLKRDKELNDRLRRESERVLREIRKLLEEARKDGKVDEKILTEIEKRLKDLEKKSRDSNRESEESLERIRRKVEEIARRVRELLDRLRREVER

SEQ ID NO: 3577 - protein, 179 aa, Artificial Sequence; identical to SEQ ID NO: 3576
  Synthetic

SEQ ID NO: 3578 - protein, 178 aa, Artificial Sequence
  Synthetic
SRLEEVTRRARKLVEDITRELRKAVEDSRRVVDKIRRLNEELTRRSRELVKEVKDKVRDKDKLKEVEERIRRLNEESRRLSKEVADELRRINEESKKLLDEVAERIRKLLEDLRAESDTEKVREILEEIRRLLEELEREVKELNEESKRRLDELEKRSEETNKESEDLLEKVRRDVEK

SEQ ID NO: 3579 - protein, 178 aa, Artificial Sequence; identical to SEQ ID NO: 3578
  Synthetic

SEQ ID NO: 3580 - protein, 178 aa, Artificial Sequence
  Synthetic
SELEDVVRRLDELVKRIKEENRETLERSRRLVEEAKRTNEETEDRMRRLVEEIEKKVRGDEELERVREEIERANEDDRRRVDEMAKTIRKVNEEDKRRLDKVRREIEELLEDLRRKSDTEEVRRLLEEIRRKLEDAKRHVEELSEESKKLLKELEEHVREVNKKSEKLLRELKDKVKT

SEQ ID NO: 3581 - protein, 178 aa, Artificial Sequence; identical to SEQ ID NO: 3580
  Synthetic

SEQ ID NO: 3582 - protein, 178 aa, Artificial Sequence
  Synthetic
SELEKLVEDVRRLVEKIKRDNRKTLKELEELVREIVERNRDTLRRSRELVDRIKKRVRGEKLLDDVVKDIERVNRDDERRLREVMREIERANDEDRKRVEEAAKRIEELLEDIRRKSDTEDVRRVLKEIKELLERVREHVERLNRDSERLLKDLEEHARRLSKESKELLRELEERVRT

SEQ ID NO: 3583 - protein, 178 aa, Artificial Sequence; identical to SEQ ID NO: 3582
  Synthetic

SEQ ID NO: 3584 - protein, 178 aa, Artificial Sequence
  Synthetic
SEVEKIREDVKKLIEESKKLNRDILEEVRKMIERWRDTTRRIRERIRKLIEEAEEEIKRSTDEELIERIKKKIDDVLKEIEDLLRKTKEEARKVLEDVERLLREDKRRNDKALEDVERAGASSEVLEEVKRLVEESKRESDEILKRVKKLVDDLARTDDKVLEDIKREVDRLKKELED

SEQ ID NO: 3585 - protein, 178 aa, Artificial Sequence; identical to SEQ ID NO: 3584
  Synthetic

SEQ ID NO: 3586 - protein, 178 aa, Artificial Sequence
  Synthetic
SEVEKIKKDVDRMITEWEKRSRDIAKTVDELIEDSRRLNETIRRDVDRVARELKERIKRTTDEELIERIERRIDEILDEIRELLKRDEEKNERVLREAERLLRETKERVKEVRKRVRDKGVSDDVLKKIEEALKRLADRDDDILRRIETLVRKTRRESEELLKEVEDKMRKLKEELRR

SEQ ID NO: 3587 - protein, 178 aa, Artificial Sequence; identical to SEQ ID NO: 3586
  Synthetic

SEQ ID NO: 3588 - protein, 178 aa, Artificial Sequence
  Synthetic
SEVEKLTEDVKRLIEKSKRNNRDILRKVKEDIDEWRKRTKKIADEVRKTERDLEEKIKRTKDEEIIKRIKKEIDEILKRVEDLVRDTKERVKEVDTEVKKLAEDNKRENDDVLKKVREAGVSDEVLRRIEEDLKRSKKETDDILKEVKDLLTDLLRRDDEVLEEIKRRAERIKEEIDR

SEQ ID NO: 3589 - protein, 178 aa, Artificial Sequence; identical to SEQ ID NO: 3588
  Synthetic

SEQ ID NO: 3590 - protein, 175 aa, Artificial Sequence
  Synthetic
REVEKILTDVRRLIEEWRKKTEDIKREVDKLIEEWRKRSDEIADRSRKLAEEIERLLREGVPREDLRRMIKRILDEDRRLLKESRDKAKEIRDRVEKLVRETDKKVKEIEDRVRKAGVEERVLRKIRRDLERLKKTDDDVLKTIEKKLRELEERDRRLHKESREIAEKLKEDIDR

SEQ ID NO: 3591 - protein, 175 aa, Artificial Sequence; identical to SEQ ID NO: 3590
  Synthetic

SEQ ID NO: 3592 - protein, 175 aa, Artificial Sequence
  Synthetic
DEVETIMEKVERDVKRWEELTREIKRRSDKLIEDWKKRSEEVLRESTELIKTIEKLLREGAPREDLDRLLKEILKRDRDLLKESRDRVREAEKEDEDLLRETKKRVKEIKDEVREAGVDESVLRTIDELVRRLEEEDRKVHEESKELARRLEKEDKRLHEESKKLIDELEKKIRD

SEQ ID NO: 3593 - protein, 175 aa, Artificial Sequence; identical to SEQ ID NO: 3592
  Synthetic

SEQ ID NO: 3594 - protein, 175 aa, Artificial Sequence
  Synthetic
SEVEKILDEVRKLVKKWDDETRKILEEIDKLIEDSERLLEKIERRSKKLADEIRDLLRKGAPREELKKRLEEILKEDEDLVREDEKLNEEILRRLEELVKRTDDEVRKIDKRVKEAGIDKSVLDEIRERVTRAKEKDKRVLERVKREVERTKEESKRVHEKSREIIERLKKEIDK

SEQ ID NO: 3595 - protein, 175 aa, Artificial Sequence; identical to SEQ ID NO: 3594
  Synthetic

SEQ ID NO: 3596 - protein, 174 aa, Artificial Sequence
  Synthetic
DEVRKVRKELDDAVRKLRRDHERVIRESEKVSKEIEDRARDVERRLDKVVDELRKKDVKEEIEREVERIREEVRKKLEEILDRVRKINEKAREHSERNKRDVERVKKEVADRLRDGDSREEVMKRLRDMIRRLKEDAEKLKRELKRRHERVKELLDKVRRELEKLEKEVDDKVK

SEQ ID NO: 3597 - protein, 174 aa, Artificial Sequence; identical to SEQ ID NO: 3596
  Synthetic

SEQ ID NO: 3598 - protein, 174 aa, Artificial Sequence
  Synthetic
DEVREVERESEELSEELRRRHEEVVKESEEVSKEIEERIREVIRDLRRVLRKLEEDGVRKEILEEIEKVVRDVEREAERILREVERVNERVRELSKRNIKETEEVNKKVRDELRDGDSREEVVKELRELHDRSRKKVEDIAREARDMHRKAADKLRRLMEDLKRVLEEIRKKVE

SEQ ID NO: 3599 - protein, 174 aa, Artificial Sequence; identical to SEQ ID NO: 3598
  Synthetic

SEQ ID NO: 3600 - protein, 171 aa, Artificial Sequence
  Synthetic
SRVDKIRRELRELLERDREDLERAMRELRKIDKDIDERLKEVVERLRRIDERIDREDRDREELEELLRRSEDTVKKISDEIEDLLRRSEERLRRVLERSKKTNDEIRERLRRVDVSKEVEKEVEDAIRETEKRAREVEEENRKSVEDVRRKMKKVEEENRKSVEDVRRKAT

SEQ ID NO: 3601 - protein, 171 aa, Artificial Sequence; identical to SEQ ID NO: 3600
  Synthetic

SEQ ID NO: 3602 - protein, 171 aa, Artificial Sequence
  Synthetic
SRVDKIRKELEDLLREDEKRIRDMVKRLREIDEKIDRELEKVARELRELLKRVEDSPDDREEVERMLDEIRRRLDEILERIERLLRESERAVKEVEKESRRTNDEIKKRLEKVDVPEEVEKKVRELVERTEETVRDVERENKESVKRVREKAETVKREVEKRAKEVRDKAK

SEQ ID NO: 3603 - protein, 171 aa, Artificial Sequence; identical to SEQ ID NO: 3602
  Synthetic

SEQ ID NO: 3604 - protein, 179 aa, Artificial Sequence
  Synthetic
SEMEEVEERLKELDDKDKRDVDEARKRLEKLDRDIDRRIKEVTKRLRDLNRRIEEELRRNKEKKEELDKLLRESEETTRRILDEVRKLLERSRREVRKIVEENKETIERSRKEVEKIRREGVLTEEVEKKNRKSADDSRETAKRVEEENERTIKRLEEELREVEEEDRKTVEDLRRTLK

SEQ ID NO: 3605 - protein, 179 aa, Artificial Sequence; identical to SEQ ID NO: 3604
  Synthetic

SEQ ID NO: 3606 - protein, 179 aa, Artificial Sequence
  Synthetic
DEVREVTKELRDLDREDKKRVEEATKRLRDLNEEDKRLVKKVADDLREDLKRIRERLERNKEKKEDLERLIKEIEEKLEKIKRDNDKTIRESRRTTEELRRENRKTIEDSRRRVKEIRDRGVLTEEVEKENERSVKKSEEDLKRVKDEDEESVKESRKAVREVEEELRKRLKELREELK

SEQ ID NO: 3607 - protein, 179 aa, Artificial Sequence; identical to SEQ ID NO: 3606
  Synthetic

SEQ ID NO: 3608 - protein, 170 aa, Artificial Sequence
  Synthetic
SEDETVRREVRELIRRLRKHSEDVKRESDKLLDEIRRRVKEVEDRVKEAVERLDRKKRDERLRDVVEKIDRLLEEVKDRIRKVERDSKEMNKKDEERVERVVRKLEEILDREGVDEDVVRKIRTVVKKIEEDNKKTADELRKLHKDIKKEVDDMEKRIRKVLDEIDKEIK

SEQ ID NO: 3609 - protein, 170 aa, Artificial Sequence; identical to SEQ ID NO: 3608
  Synthetic

SEQ ID NO: 3610 - protein, 170 aa, Artificial Sequence
  Synthetic
DEEERARRELEDLLRRLREHSERVAKEVEEVVERNRRKSEEVEKRVREMLKRLDEKKRDEELKRVVEEVKEMLKRLRELNEKVVEEVRRILEKDRRLVDKVRRDLERLLREKGVDKDVVKEIRDRVREAERRNREVVEEIRKLLKEIDKTTRDVEEEIRKLLKRIDEEIN

SEQ ID NO: 3611 - protein, 170 aa, Artificial Sequence; identical to SEQ ID NO: 3610
  Synthetic

SEQ ID NO: 3612 - protein, 170 aa, Artificial Sequence
  Synthetic
DEERKARTEVKKEVDDLKKHVKDVADEVREAVKKNRRKSEEVSREVRDLIRRLKETKDDEELKKAIKKLEELLERMRRLNEKVVKEIKKLLDDDDRLVEEVVEDVKRILREKGVDEDVVREIRELLKRIREENRRTVEEIRKLLKRIDEATEELVREIRRVVKEIEDKIR

SEQ ID NO: 3613 - protein, 170 aa, Artificial Sequence; identical to SEQ ID NO: 3612
  Synthetic

SEQ ID NO: 3614 - protein, 170 aa, Artificial Sequence
  Synthetic
DREEKLRKELKKLIDDDRKKSEDVEREVRKLIKENEDKSRKVEEEVRKLAEELDTKKRDKELEKVIRDLERLLEELKELNDRVRRTLEELLKKLKELNERARKELEDILRDKGVDEEVIKEIRTVVKRVNEESEEMTKRIRDVVREADKTTEDVRRKIEDMVRRIDERTN

SEQ ID NO: 3615 - protein, 170 aa, Artificial Sequence; identical to SEQ ID NO: 3614
  Synthetic

SEQ ID NO: 3616 - protein, 185 aa, Artificial Sequence
  Synthetic
DELRRIEEEVRRRFEEMARRHRKVKRDIEELVKEVTKRNKDTEREIEELVKRMKDEIDRIKEDEKLERLLREAAERLKELLKRDKKLVEDIAREIERVIKELRKINEEVSEEIERLLRELEKLRAEEEKVRRVVKKAREAVERSSREVEKVEREVKKLLDDLKKHSEEVEKKVRELLKRLEDRAR

SEQ ID NO: 3617 - protein, 185 aa, Artificial Sequence; identical to SEQ ID NO: 3616
  Synthetic

SEQ ID NO: 3618 - protein, 185 aa, Artificial Sequence
  Synthetic
SELEEIVKTAREIMDRVRREHDRVATEIRELVKRLEEANRRVREEIKRLVKEVEERIRKIKEDKRLREVLEEIARELEKLLKEDKDLLRKAAEDLKRLIEDLRRINEEVEDIARKVIEELRKSRAPREEVEKVVKEIEDVVRESSERVRRVVEEVKKLLRELAKHSEDVEREVRELLKKLAREVD

SEQ ID NO: 3619 - protein, 185 aa, Artificial Sequence; identical to SEQ ID NO: 3618
  Synthetic

SEQ ID NO: 3620 - protein, 185 aa, Artificial Sequence
  Synthetic
DELKEIRDRIKKRVEELRRENEEVREEIERIVRKAREDHRRVERELEDLVRRARDKVEKIKDRETLKRLLDKVEKDIRKILDELRRLNEEVARTLEKLLRDDKRLVDKAAEDLRRLIEELKKSRADEEEVRRVVKEVEELLEDLKRHSEKVKEEVKRLLEESSREVERVEEKAREMLERLRERAR

SEQ ID NO: 3621 - protein, 185 aa, Artificial Sequence; identical to SEQ ID NO: 3620
  Synthetic

SEQ ID NO: 3622 - protein, 185 aa, Artificial Sequence
  Synthetic
SEAEKLRDEIRRIVEKAERDHEDVKKKIEDLVKRVEERNREVTKRIRDLVRDARRRLDEIKEDEKLERVLRKVERDLRELIKEDEDLLRRIAEALEDMLRKLEKLNRDVAEILKELLRKLRETRIEKDKLKKVEEEVEELLKKSNRKVREVKRELKELLDRLAKHSDEVRREVEELLRDLARRAT

SEQ ID NO: 3623 - protein, 185 aa, Artificial Sequence; identical to SEQ ID NO: 3622
  Synthetic

SEQ ID NO: 3624 - protein, 185 aa, Artificial Sequence
  Synthetic
SELEKIREDMRELVERLKEANDRMREKIRKILEDVDREHEEVRKRIEELVKRARETIERIRDKRTLDEVLKKVEEELRRALKRLDEINERVKRDIRRLLEEDKRLVEEAARRLKKLLEDLDKSRAEKDKVKKVKEDVKRLLDELRKHSEKVIREVEKLLRESNEKVKRVKEKLEELLRRLRERSR

SEQ ID NO: 3625 - protein, 185 aa, Artificial Sequence; identical to SEQ ID NO: 3624
  Synthetic

SEQ ID NO: 3626 - protein, 179 aa, Artificial Sequence
  Synthetic
DEIETIKKEIDDMLREIKREVERSKEEIDRALKRIREEVKKSEEEIDKALEELRRNGVPEEILRKIEELLRRLKDEHRKLLERIEEVLRRLKRRHDKLLEDAERLLRELKEELDRNKDKSEEIIKRLLEKIRREARKVKELIRTSNEEVRKRLKDLEELIRKSHEDVRRTLETLERETR

SEQ ID NO: 3627 - protein, 179 aa, Artificial Sequence; identical to SEQ ID NO: 3626
  Synthetic

SEQ ID NO: 3628 - protein, 175 aa, Artificial Sequence
  Synthetic
DKERELDKEVRDMIDTLRDSNRRINERSERVLRELDESVKKNEEDIRRAIEELKAEVRRDDLPRGLVREAVERLKKLLERDRRLVTEVKERSKKSNEDDKRLSEEVVKELRRLVREKGVDEKVLKEIRDLARKIKEDNDRSLEDNDRLAKEIKERNKRVHDETRKMLEDIKRELT

SEQ ID NO: 3629 - protein, 175 aa, Artificial Sequence; identical to SEQ ID NO: 3628
  Synthetic

SEQ ID NO: 3630 - protein, 178 aa, Artificial Sequence
  Synthetic
DEDKEIDERVKTVKEEIRRRSKKDKEEVDRVLKESDETLKRILEEVKKVLKEIEERVPDLDEVRKKVEDVERKVATELEKNLRRVDKAVKEVRELNKELERELDEIRKEVRDLLKRIRREEELRRIVERVRERVTELREKLKEIHKRTREVADELRKNNRRWEEDVRRLVKELREREE

SEQ ID NO: 3631 - protein, 178 aa, Artificial Sequence; identical to SEQ ID NO: 3630
  Synthetic

SEQ ID NO: 3632 - protein, 178 aa, Artificial Sequence
  Synthetic
DEEERIRTKVEKVKRELEEKSERDKRALEKVEDESRRTSEEDERELERVIEEIIREVDKLDEVREKLERVLRKVRKLNRDSEERLKRIKEEVEEANREIRRRLEEVERRVKDLLDRVRREEELRRIEREVDRAVKELDRLLRELHRRTREVVKELRDLDRRIHEDTRRVVREAREEVR

SEQ ID NO: 3633 - protein, 178 aa, Artificial Sequence; identical to SEQ ID NO: 3632
  Synthetic

SEQ ID NO: 3634 - protein, 178 aa, Artificial Sequence
  Synthetic
SEREEIEERVERVERESEDTSRRDEEALERVLRESEDTSRKDREALRKALEDIERELPNLEEVKRKVERVVEEVEKLNRDSERKVKEIAEEVRRLNEESRRELKEMVRRVRELLKRVRREDVLRRIMEDVKRVADKLRELDKKIHEETRRAVDDLRRLDKEIHDRTRKLVKELREEAK

SEQ ID NO: 3635 - protein, 178 aa, Artificial Sequence; identical to SEQ ID NO: 3634
  Synthetic

SEQ ID NO: 3636 - protein, 174 aa, Artificial Sequence
  Synthetic
SEIEEITKDLRRLVEEIERLNKRVEDENERTAKELRDRVREAEKKNRKTVDDIRKLIEDGVRREEIREVIERDREEVEKVVRDLRDLLRKDRKRVREAVETSERLLEDIKRRLEEVDVSDEVRREVDELIKKSRETLKRIERRSEEVAEELERRLRDIKRRSEDMVRELEERAK

SEQ ID NO: 3637 - protein, 174 aa, Artificial Sequence; identical to SEQ ID NO: 3636
  Synthetic

SEQ ID NO: 3638 - protein, 174 aa, Artificial Sequence
  Synthetic
DEKEKVTKKIEELLKAIEDKIREVEKRSRDSAKEIEDRNREVEKRNKDTVRRIRELIERGVREEEIKKLIEEDKERVRKMVEETKKLVKRSTDEVRRVVDEARKLIERIKEEVERMPVDEEVRKRLEDAVERIKKELKRIKDENDEVVKKSRDSLRRIKEDSERVVRELEERAK

SEQ ID NO: 3639 - protein, 174 aa, Artificial Sequence; identical to SEQ ID NO: 3638
  Synthetic

SEQ ID NO: 3640 - protein, 174 aa, Artificial Sequence
  Synthetic
KRKEDIERRIEKLVRDDRRLVREAEKRSKESVDRLRDLVDKARKESDESARTIDKLIKDGVERRDIERMIRESSKRVKDVIERLKKLLEESTRTVEELVRRSKRTLDEIREEVERLDVEERVRKRLEDVVRESKKRLDEIKKRNEDVVRELEERLRRIEERNRRVAEELKRKAK

SEQ ID NO: 3641 - protein, 174 aa, Artificial Sequence; identical to SEQ ID NO: 3640
  Synthetic

SEQ ID NO: 3642 - protein, 175 aa, Artificial Sequence
  Synthetic
SEIEDIERELRESNKRHEDTLRKIKRDLEDSNRRHRETIRDIEARLEEVIKKLREDGVSEEVLKEIKRMLEEIVRDIRRSHEEHKKLLDEIKREAEKSHEEHRKLLEEIRREAEKNKVREEELRELVKRVHERAERVNRDLKRKVKEVHDRVREVNKELRRKVEELKRRAEERRR

SEQ ID NO: 3643 - protein, 175 aa, Artificial Sequence; identical to SEQ ID NO: 3642
  Synthetic

SEQ ID NO: 3644 - protein, 175 aa, Artificial Sequence
  Synthetic
SEIEDIKRKLDDVIREHARTLKEIKDELKKSNERARERIEDIDRKLRDVERRLRESGVDDDVLRDLEDKARKIKRKLEKIHEEHRRMLEEIEKEARKSLKELKEIVEDIKRKADDNRVRVEELEDLVRRLKKRVEEVNKRLREKVKRLHDEVDRVLRELEEEVKKLKEDVERAAK

SEQ ID NO: 3645 - protein, 175 aa, Artificial Sequence; identical to SEQ ID NO: 3644
  Synthetic

SEQ ID NO: 3646 - protein, 175 aa, Artificial Sequence
  Synthetic
SEREKIEEDIKKALKEAREVVERIKKKLDDSNREHKRTLDEIKKKLDEVIDEVRKSGVSEKMLREIEEVVKKIEEDARRSHEEHKRVLDKIVEDAKRILDRLRELVTRLLEELKKNKRREEEIREDLERIVTEVKKVLDELDKLVKDLHDEVRKVNEELDRKVKKLRKEAEEKTR

SEQ ID NO: 3647 - protein, 175 aa, Artificial Sequence; identical to SEQ ID NO: 3646
  Synthetic

SEQ ID NO: 3648 - protein, 175 aa, Artificial Sequence
  Synthetic
SEIEEIKRRLEDSNRRAREVIKRIEDELRRSNEEHRRTLKEIKEELDRVLEELKRKGVDESVLDRIRELIERIAREAEKSHEEHRKLLEEIRKRAEDIHRRHKEILDDILRKAEDNRTREDELREVVKRVHDEVRRELKKLEELVKKVHEDAKRVNEELRRKVKEVKERAERDVR

SEQ ID NO: 3649 - protein, 175 aa, Artificial Sequence; identical to SEQ ID NO: 3648
  Synthetic

SEQ ID NO: 3650 - protein, 174 aa, Artificial Sequence
  Synthetic
RREEEVEKRLDDARRRLEKSNRDDERLTRTVEEELKRSNDEIRKRLETAMRELKKLVKDGVDKDDVERVLDRVRRELEELVKENKEIVREIRKRNEKSKRDNERLLRKVEEDIRRLDRSEEVERRLEKVEEDSRRELKRSEKRSDEVARDSERLLDEWRRRLEEVIRRVKEETR

SEQ ID NO: 3651 - protein, 174 aa, Artificial Sequence; identical to SEQ ID NO: 3650
  Synthetic

SEQ ID NO: 3652 - protein, 174 aa, Artificial Sequence
  Synthetic
SREETVRERLREVAERLKKSNREIEELLKKAAEELKESNTRDKKLSEDVSRRLEKLSRDGVDKDDVRREIERIKRKNDDTERRNKELLDKIREDMERMARRNKELLRRIEEEIRKMDASEEVEERLKRVIEESERRLDKWRRDLDRVIKESEDLLKKSREDSERVVREVEKKEK

SEQ ID NO: 3653 - protein, 174 aa, Artificial Sequence; identical to SEQ ID NO: 3652
  Synthetic

SEQ ID NO: 3654 - protein, 185 aa, Artificial Sequence
  Synthetic
SEIEEVERMLEDLERRVREADKRVREESKKLEDEIRREDKRVEEMIDEVRKKVDELDRDVRGRERLKEVVERLEEEAEEIVKRVRELSKRLEKKVRDHTREVRRLSEELERRARDIKRRVRERLRDKDEVRRIEEEVDRVIEENRETVKEIEERNRRVLEANRESLRELEERLKRILEEVRRRSK

SEQ ID NO: 3655 - protein, 185 aa, Artificial Sequence; identical to SEQ ID NO: 3654
  Synthetic

SEQ ID NO: 3656 - protein, 185 aa, Artificial Sequence
  Synthetic
SEIDEVRREVEELERRAEEVDREVERRSKELKERVDDVDRRSRELSKRLKDTADEVRKRVRGREDLERVVRDLEKKVEEVVETSKRLSDELRKEAEKHTEDVERLSRKLVEELREIVDRVRKRLRDKDKLETIRRRLEEVLKRNKETVDEIRRRNEDVIRRNEESLEKNERDLRRVLDEVRRSAT

SEQ ID NO: 3657 - protein, 185 aa, Artificial Sequence; identical to SEQ ID NO: 3656
  Synthetic

SEQ ID NO: 3658 - protein, 185 aa, Artificial Sequence
  Synthetic
SELEKVDELVKRLMKEVRDVDRRSEKLTEELERKVREMDRKSKKLSEDLERDARRVEKEVRGKERLEKVVRDLERKVREVVKESERLSRELERDAKRVVEESRRLSEELRRKAEELVRRAREELRDKDALRAIEKKLEDILRRNEETLRRNEDKIRRIIETNKRSLEENRRRLEEVLRRVKESAR

SEQ ID NO: 3659 - protein, 185 aa, Artificial Sequence; identical to SEQ ID NO: 3658
  Synthetic

SEQ ID NO: 3660 - protein, 185 aa, Artificial Sequence
  Synthetic
SITEKVERLIRELERKVKEIDDDLRRTSEEIMKRARKADEDSERLSERLRELVDRLDREVRGKEKVKKVVDDIKREAKRIIEKTDELHEETRRLVEENKRRIDELHKEIRETVKEIEKRIDDDGVPRESAERLKEELRRVLEENRETLERLREENERVLEENKRRVDENREKIKEVLRRVEERTR

SEQ ID NO: 3661 - protein, 185 aa, Artificial Sequence; identical to SEQ ID NO: 3660
  Synthetic

SEQ ID NO: 3662 - protein, 185 aa, Artificial Sequence
  Synthetic
SITERVEEDIKRLMEEAKRVDDKVRKLVEELMRDVKRVDKELAELVEELERRVKDLTRRVRGKERVKEVVKDIERKAREIIRRIRKLLDESRKKAEEIIKELRKLHEDIDRKVKEILRDIDRAGVSREEAERLKEELRRVLEENRRTVEEIERRIKRVLEENEETVRRLEKRIEEVLRDVREKTK

SEQ ID NO: 3663 - protein, 185 aa, Artificial Sequence; identical to SEQ ID NO: 3662
  Synthetic

SEQ ID NO: 3664 - protein, 174 aa, Artificial Sequence
  Synthetic
SKVEELKRRLKKVRDDDRRSVEKLRETLRRVLARDRDEIREAERELREALKRLEDAGADEKLLRDMKKVIDEMKEHLKRNNEELKRVVERVERDLERSHDELRRVIEEVEKRLADGDTREDVLRDVERVVREVLEKNKKILKEVKEVVEESLRNVRDLIRRAREIVKEIVDRVK

SEQ ID NO: 3665 - protein, 174 aa, Artificial Sequence; identical to SEQ ID NO: 3664
  Synthetic

SEQ ID NO: 3666 - protein, 174 aa, Artificial Sequence
  Synthetic
KEVEDLRRELEEAKKRDKDLIDKLKRRAEEVKEEDERSIRENKKALRKAEEDLRRKGADEKLKEDLKRIIEESERNNEDSHRRLEEMIEKVRRHLDRNNEDLERFIKDVDELLRRGDTRERVLEEVRKTLKRSMENVEELEKELEELVTRVRDHNRRDHEETRRLLEEIKRRVD

SEQ ID NO: 3667 - protein, 174 aa, Artificial Sequence; identical to SEQ ID NO: 3666
  Synthetic

SEQ ID NO: 3668 - protein, 174 aa, Artificial Sequence
  Synthetic
DEVERLKEKLEEVRRRDEEIIRKLEEDLERVKRDDDRLVRENEEELKRVEEKLERDGADESLLRELKDVIRRSRDHLTRNNEDLERVIRRVEEHLKRNNDTLKDVLRKVDELLRRGDTREEVLRRVEEAAKRSLDNVDKLEKDVADLVRRSMENVRDLHRRTRRLLEELKEKVK

SEQ ID NO: 3669 - protein, 174 aa, Artificial Sequence; identical to SEQ ID NO: 3668
  Synthetic

SEQ ID NO: 3670 - protein, 176 aa, Artificial Sequence
  Synthetic
SEKEKVLEDAERVLREIKKKNEKALREAEEVARRIAEEVKRIHDRSKEVVDDIKRLADAGEVDEKELEERLKRVIDTVRKLNEDLRKKLEDAIRRLEKLLKESKEELKRVAEELRKDLKDDKDVERRVREAKKENDKSVDEIREEVKRVKDELDRLSERNEEELEKVERDLRRRAK

SEQ ID NO: 3671 - protein, 176 aa, Artificial Sequence; identical to SEQ ID NO: 3670
  Synthetic

SEQ ID NO: 3672 - protein, 171 aa, Artificial Sequence
  Synthetic
DEEKKVLDKLRELATRLSRRVEEAHRESEKIAEEIRRRAEKVLRESRKTVEEIKRSPDDRKDVRRVVKEDEDRSREVVKDLERLLKELEDRSRKLEEELRRIMKKIEEEVRRAGVDERIKDDVRRMKKELEDLIEENRRRVEKVKEDIRRLIRELEARNEDVDRELRRKED

SEQ ID NO: 3673 - protein, 171 aa, Artificial Sequence; identical to SEQ ID NO: 3672
  Synthetic

SEQ ID NO: 3674 - protein, 171 aa, Artificial Sequence
  Synthetic
SRLEKVEKELEELAREDKERIKRVIDDIRRLVREDEERIKEMHKKTEDIVRAIEEEDRDREELKRLLERLEEESRRMADESRRTNEEIRRKVEKVVEESKKTNEEIRKRVEDAGADERIKKRVEKLKRDSKRLIDELRKELEEVVKRSEDLIKENRDTVKEVSDRIREKAR

SEQ ID NO: 3675 - protein, 171 aa, Artificial Sequence; identical to SEQ ID NO: 3674
  Synthetic

SEQ ID NO: 3676 - protein, 171 aa, Artificial Sequence
  Synthetic
DDEERVLKELKKLVEDDRKKIEDVIETIERLAREDVERIKRVIEELRRLVKELEDGDLDKEVVRRLLEEIKRAVKEAVRESEKTNDKIRRDVDRVVKDSKRTVKDIKRKVDEAGADEEIKEDVKRAADESEKLIRELRKAVKRVEEESRRLIEELEREVKEAEERLKRRTK

SEQ ID NO: 3677 - protein, 171 aa, Artificial Sequence; identical to SEQ ID NO: 3676
  Synthetic

SEQ ID NO: 3678 - protein, 181 aa, Artificial Sequence
  Synthetic
EEVERLLEELKELVRRIEERLKRAHDEMEDLVRRIKEEIKKLHEDTKRVVEEIRKLIERDNIDKLLERLIEELKRIHEKINRDIKRAIEELKRLSDRIEEEIRKLIKELEDVLRRITETAGRDERVKEAEDRVRDAVRRLKRLLEEHKKASEKVVRELERLLEENRKTVKEVVDRLREESR

SEQ ID NO: 3679 - protein, 181 aa, Artificial Sequence; identical to SEQ ID NO: 3678
  Synthetic

SEQ ID NO: 3680 - protein, 181 aa, Artificial Sequence
  Synthetic
REVEELIKELRRLAEEIRDRIRKLHKEMEDLARDIERRIEELDRELERVATEIAKLIERDNIDRLLDELLERLDRLSKKIEEDVKRLIDESRRLSEEIAKRIKDLIEELKRLLEEVAKRKGRDEDIKRLEEEVRKVEEELKKLLKEHRDANKEVVDRLKRRIEEHKRKTKDLKEELERRMR

SEQ ID NO: 3681 - protein, 181 aa, Artificial Sequence; identical to SEQ ID NO: 3680
  Synthetic

SEQ ID NO: 3682 - protein, 181 aa, Artificial Sequence
  Synthetic
DEVEEVIERLRRLAERIEERLREMDRRLEELVERAKRTIERLHEELEKLVREAEELIRRDNNDKLVEELIRRSEDLSRKIEETIRRIIERLRKLSREIEEEIRRVIEELKRLLDKIRADRGDDKDVTRLEEELRRVVKKLEDLLREHKEKSDRAVEDLERLLTEHKKRNEDVIRRLKEASD

SEQ ID NO: 3683 - protein, 181 aa, Artificial Sequence; identical to SEQ ID NO: 3682
  Synthetic

SEQ ID NO: 3684 - protein, 174 aa, Artificial Sequence
  Synthetic
SEVEEIRKKAEDVMRRLEELDKRLDEVLKKVSRELEKSDKDLEDRIREVIRELEERGGKKRETLKKVIEDLRKLVEEHKELIERVKRELKRIVDEHHRLIEEAKKRLRDILDKITKDTKDEMERRLEEVVKEAERRSEEVLRRLEKVVKDIKKKSKEILDRLEELVREIRERVR

SEQ ID NO: 3685 - protein, 174 aa, Artificial Sequence; identical to SEQ ID NO: 3684
  Synthetic

SEQ ID NO: 3686 - protein, 177 aa, Artificial Sequence
  Synthetic
SESEEIDREAKKVEREVREMSRRNDEELRRVAKESEDSVRRVEDRVREVSEEVEARGVDDKVREELERISRRIKKLLDESRERLKKMVKESKELNEEIRRKLEEILREVRELLKRVRREKELTEILKRLKDLADELRKLLEDVHRRSKKAADEDRKLNEDILKELEDLARELRKKTK

SEQ ID NO: 3687 - protein, 177 aa, Artificial Sequence; identical to SEQ ID NO: 3686
  Synthetic

SEQ ID NO: 3688 - protein, 177 aa, Artificial Sequence
  Synthetic
DEEKKVRDEIRRAEEESRRSSKRNEDELRKVKEEIERRLEEVRRKAKEVEEKVRREGVPEEVEKRLKEILDEVRRLLEELRERLDRVLRRSEELNKRSEDKLRKVAKEVEELLRNVRREEELRRILERLKEMVERDKETNEEIHRRSKDVVDKLRRRIEDIKRRLDELAEKLKEDTR

SEQ ID NO: 3689 - protein, 177 aa, Artificial Sequence; identical to SEQ ID NO: 3688
  Synthetic

SEQ ID NO: 3690 - protein, 177 aa, Artificial Sequence
  Synthetic
DDERRIRETLKRADEEVEKALREVREHTKDVERENEKLSKENKERLEEVKKRVDDSGVDETVKDELRRIVETSKRLNDESRRKSEEIKKDTEKLLREIKEKVERVLERIERLLDKIRRKDVLRKIEKEIEEMVKDLRRLLKEVEDKDRTLAEELRRINEDIHRRSEEMKKELDDRTR

SEQ ID NO: 3691 - protein, 177 aa, Artificial Sequence; identical to SEQ ID NO: 3690
  Synthetic

SEQ ID NO: 3692 - protein, 182 aa, Artificial Sequence
  Synthetic
KEVEDVEEKIREIVERIRDEARKAEERNRDTVRRIEDVARKLHKRTKEIVDEIRDVLTKRREVEEELRKLLTKLREMNERARRRIEELLRRDKKVTKEVKDKLEKLLRELEEELKKIAKEVDSKEMLETIKRKVEKVKEDLRKKIEDIEKHTRDVEDKVRKELERNEKKSRDVKEEVERRLT

SEQ ID NO: 3693 - protein, 182 aa, Artificial Sequence; identical to SEQ ID NO: 3692
  Synthetic

SEQ ID NO: 3694 - protein, 182 aa, Artificial Sequence
  Synthetic
SELEKAEKENKDSADEIREVLKRLEEENRETAKRIEKHTRDAHRKTEDIVRRIEEVLRRRKEVREEIRELLKRLREVNEEVHRRNEKLVREDEERTKRAEEELRKLLEDDKRRVDEVEREVDAKEALKRIRDHVEEVRREVEELLRKIREHTKEVAEKVRRENEKNKKRSEDVRKKVEDDER

SEQ ID NO: 3695 - protein, 182 aa, Artificial Sequence; identical to SEQ ID NO: 3694
  Synthetic

SEQ ID NO: 3696 - protein, 182 aa, Artificial Sequence
  Synthetic
SEVERVLEENRKSAKEIEDELRKVLRENEKSAEDIEREIDKAEKENRETVKDLRRVLTERKEVREEIERLVREDEKKTKDLIEKLRKLLEDDRRRTEEVKRRIRKLVDEDRERVKEAKRRVDSKEKLETIERHVRKVEEDVERMLKEIERRTRDVMRKVDKLIKEIEKHTREVAKEVKEAED

SEQ ID NO: 3697 - protein, 182 aa, Artificial Sequence; identical to SEQ ID NO: 3696
  Synthetic

SEQ ID NO: 3698 - protein, 178 aa, Artificial Sequence
  Synthetic
SLVEDLERKLEESTRRDEESMKRVREILKELEDRDRKSVKEIEDELRKARKEVKDSRVSEEIRKELEKAVEEVERLLRESHEELKRVIDELEELLKESHKRNKKVVDDVKDVLDKLREIEEMAREVIKTLEKVSRELEETNRRVIDRIRKLAEEILRKNKEVLERLRKIVKEIKEKAK

SEQ ID NO: 3699 - protein, 178 aa, Artificial Sequence; identical to SEQ ID NO: 3698
  Synthetic

SEQ ID NO: 3700 - protein, 178 aa, Artificial Sequence
  Synthetic
SLVETLKKILDDSTRRNEELIRRLEEELKRIKETNERTVRELERELKRAEEEIERQNVSEEIRKEVKDVVDEVRKLLEESKERTKRTIDKVRKLLEESHRDNRRVVKEVEDLLRKLREDEEAAKRVIERLRRLSERNVRTLEEIIKTLRDLARRSKERDDEVLEELKEMIRRIEEKSK

SEQ ID NO: 3701 - protein, 178 aa, Artificial Sequence; identical to SEQ ID NO: 3700
  Synthetic

SEQ ID NO: 3702 - protein, 176 aa, Artificial Sequence
  Synthetic
DELEKVVRELEELAKEILKKLDEIIRDTERLVREAVKRLRELIERTRRLMDEVRKKVRDKDLLKEVKERLDRSHEEAERLVRKLKKDLEDSNRRAEELVRRVEEELKDLVRRLRGTDEKVMRELEDTVRRVREELRKLLEEHNRRVKKVLEDLDRLLDEHRKIVEDIKRDLDRREK

SEQ ID NO: 3703 - protein, 176 aa, Artificial Sequence; identical to SEQ ID NO: 3702
  Synthetic

SEQ ID NO: 3704 - protein, 176 aa, Artificial Sequence
  Synthetic
SEIEKVLEELRELVKKAVTDLRRIIEESKRLADEAAKALKDIIRRSEELADRLRKEIRGREVLEEAKKKLDTSNRDAERLVRELKERLDDSHRRLEELVKRLKDDLDRILEELKGTDEKLARELEDVVRKVKETLDRLLEEHKEIIERIKRTLDKLLKEHNEIVERIKRDLDRRRK

SEQ ID NO: 3705 - protein, 176 aa, Artificial Sequence; identical to SEQ ID NO: 3704
  Synthetic

SEQ ID NO: 3706 - protein, 176 aa, Artificial Sequence
  Synthetic
DEMEKVIRDDEKLLEDVLRRLAEIIRRTEKRAEEMVRELEKLIEDSKRKADDVRKRVRTDEVVKRVKEELDESNEKAEKLVRDLKRELEDSNRKAEELVRRIKKENKRTVEEVKGTDEEVVKRLDDIARDVNRTLDKLLKDHNEIVERIERTLDELLKEHNEIVKRIKEDLDRKRK

SEQ ID NO: 3707 - protein, 176 aa, Artificial Sequence; identical to SEQ ID NO: 3706
  Synthetic

SEQ ID NO: 3708 - protein, 176 aa, Artificial Sequence
  Synthetic
DDAETVIERDRKLADEVAKELKRLIEETRDLARRIREELRRLIEELKTLAKRAKDEVRGDEVVEKVKKELDEILKTIEDLVREVKRELDESNERAKELVRRIKKRNDDTVKEVQGTDRDVVRELREIARKINEDLDDLLRKHNEIVEKIKRDLDRLLEEARKILEEIKRELDETKK

SEQ ID NO: 3709 - protein, 176 aa, Artificial Sequence; identical to SEQ ID NO: 3708
  Synthetic

SEQ ID NO: 3710 - protein, 178 aa, Artificial Sequence
  Synthetic
DEEERLRDSVRRSRELIKEIRKRLEESIRRSERINERVREELRRSVRESERSAEEARRRGDLREELLKELEEVNKALEDMLRKNEKKSEDVNEDLRRRIKELEEELERVNDTVRKLIERNRDTETVLEEHKERVKRILDRARDLLRKHRELVEDSRRHLEKLLRDHRKVVKEIEDKIR

SEQ ID NO: 3711 - protein, 178 aa, Artificial Sequence; identical to SEQ ID NO: 3710
  Synthetic

SEQ ID NO: 3712 - protein, 178 aa, Artificial Sequence
  Synthetic
SEEERLRESLERSRKRLEEVKRELERKLEEWEEIVEESRRRAEKSLRESKERIDDLKRRGELREKLEEDLKEVNKEIREMIKRSKDEVERKIREVERRAKRLAEKLEELNKKMKDLADNNRDTEEVLRRHEKVVRRIDEELEELLEELERVIREDTERNKKLLDEHREVVKEIEERVR

SEQ ID NO: 3713 - protein, 178 aa, Artificial Sequence; identical to SEQ ID NO: 3712
  Synthetic

SEQ ID NO: 3714 - protein, 178 aa, Artificial Sequence
  Synthetic
SSEKRLRDSVRESRDRARKIEEDHRRLVEEWERLVKRSEEEVRKSVEESREEVEKAKKEGRLREELRKELEDVNEKLKKDIKRSKEEVKKVIDRSRESVKTLLDRLEKMNRDLEELLRNNSDTDKVLEDHKRLVEKILKEAEDNLRRSRKMIREDEERNRDLLRRHREVVKEVKRKVD

SEQ ID NO: 3715 - protein, 178 aa, Artificial Sequence; identical to SEQ ID NO: 3714
  Synthetic

SEQ ID NO: 3716 - protein, 178 aa, Artificial Sequence
  Synthetic
DKEERLRESLEKSDRDIRRIKEELERLLREWEKRVRDSEKELRDVLRKVTEEAKELKKQGKLREKLLKELDDVRKRVEKVMRKSKEDVKRVIEEVKRRADELKRRLEKVNRDVEEALKRNVDTDDLLRRHKEVVEKILREIEELLRELREAIRRDKKRNDELLKRLAEVAEKIREDVR

SEQ ID NO: 3717 - protein, 178 aa, Artificial Sequence; identical to SEQ ID NO: 3716
  Synthetic

SEQ ID NO: 3718 - protein, 178 aa, Artificial Sequence
  Synthetic
SEKETLERSIRESERILEEVLRELKKVLDEWRRRVEESEKRHRDLIEEVRRRAKKLREDGKLREDLLRELERILRESRESVDKSKKEVEEVIKRVEDKAREIAERLKRMNDEVREAADKNVDTDDLLRRHKELVEEIKELLERLLRELEEVIKRDKDKNDENLTRSKRLIEEIEERVR

SEQ ID NO: 3719 - protein, 178 aa, Artificial Sequence; identical to SEQ ID NO: 3718
  Synthetic

SEQ ID NO: 3720 - protein, 178 aa, Artificial Sequence
  Synthetic
DSEERLKESVKRSEDDLKRLRDEHRKLVEEWRRRIDESERRHRKLIEDVRRRLTEFRKRGDLREELEKRITEAERRSKESVEESRREAEEVIRRSERSVDKLAEELREVNKRLEEAARRNVDTDRLVEEHKKMVKEIRDRVKANLERSRRMIKRDKEKNDDNLRRSKELIDKLEEDVR

SEQ ID NO: 3721 - protein, 178 aa, Artificial Sequence; identical to SEQ ID NO: 3720
  Synthetic

SEQ ID NO: 3722 - protein, 178 aa, Artificial Sequence
  Synthetic
SKEERLRESSRRSEKAVREVEKRHKESVERSKEEIRRLAEELRKSIEDSERRIKEIRERGKARDELLEELRRVNDEVRDRLRRLKERLEEVNKESKDSVDDLKRKLREVNERAKELITRNVDTDRLLEEHRKLVERILEELEKNLERHRRVVKEILDRVKELLDEHRRRVEEIERKIE

SEQ ID NO: 3723 - protein, 178 aa, Artificial Sequence; identical to SEQ ID NO: 3722
  Synthetic

SEQ ID NO: 3724 - protein, 178 aa, Artificial Sequence
  Synthetic
SKEETLKRSSEESKKELKRVDEELEKIIREWEEDVKRSEKELEEVIERAKREAEKLRTRGELREELKRELERVLRDVRRRVEDSKRDVKRELDKLKKDLDAIRRELEKLNKEVEEAMKRNVDTDTLLERHKRLVEEVREKLERLLRRLRKVIKEDRERNKRLIKRLKEVIDEIRERVR

SEQ ID NO: 3725 - protein, 178 aa, Artificial Sequence; identical to SEQ ID NO: 3724
  Synthetic

SEQ ID NO: 3726 - protein, 178 aa, Artificial Sequence
  Synthetic
SERERLEDSSRKSKERLERIARTLEKLLRDWRREVEKSEKRHRELVEKVRRDLDDLRRRGKVREELERKLEELIKESEKSVKRSKDEVEKVIREMEEELKRLVEELERVNTEVREAAERNVDTEKLLRDHKRLVDDLDRRAKELLEELKRVIDEDKKRNEKNLTDSRRLVEELKEEVR

SEQ ID NO: 3727 - protein, 178 aa, Artificial Sequence; identical to SEQ ID NO: 3726
  Synthetic

SEQ ID NO: 3728 - protein, 178 aa, Artificial Sequence
  Synthetic
SSKERLEESSERSERSIERIDREHERSSEESERRLKKMVDDLRRSSEKSKDDLEKLKREGKVREDLERELREVNKELERLARELAEKLRKVNKDSKESVRELEERLRDANRRLEELLRRNVDTDELVERHKRVVEEIEERAERNLRRHKKVVEDILREARKVLEDHKELVERLKERVE

SEQ ID NO: 3729 - protein, 178 aa, Artificial Sequence; identical to SEQ ID NO: 3728
  Synthetic

SEQ ID NO: 3730 - protein, 178 aa, Artificial Sequence
  Synthetic
DAERRLKKSSEDSKRAIDELRKEHEDSSRESKERLDKIKRDHEELVRRARERAEELRRRGKLREELVKELEKAIEESERNVEKLARDLERANEESRRSVEELVKELEEANRRLEELLARNVDAEKLVTDHKRVVETILDKARKNLDRHRRAVEDLLRKARENLKKTEELVRKLDEDVR

SEQ ID NO: 3731 - protein, 178 aa, Artificial Sequence; identical to SEQ ID NO: 3730
  Synthetic

SEQ ID NO: 3732 - protein, 178 aa, Artificial Sequence
  Synthetic
DAERRLREILRRVTERLKEVKERHKRSSEKSKKSADDVRREHEKLAEELRRKVEELKRRGELREELEKEVEDLLRESEESVRRLEEELKEINERSKRSVDKLERELEEVRRTVEDLIKRNVDTDTVIEELKRRIRELEKRLEENLRRHEELVRRIEEELKRNLKRSRDLLKEIEDKVR

SEQ ID NO: 3733 - protein, 178 aa, Artificial Sequence; identical to SEQ ID NO: 3732
  Synthetic

SEQ ID NO: 3734 - protein, 182 aa, Artificial Sequence
  Synthetic
SEAEEVLRRLEELAKRDREENKKVLDDLEKLVREDEERNKEVLKDLEKFIDELDKELRSEGREVVEELEKKLREVVRRVRKKAEDSHRRLEEIVERVKRLLDESSKKVREIVERVKKEVKDLDKDVVRELERLLREWERDNERSREEIDRVIEEARKRNEDSERELDRLIKEVKDRLDEKAR

SEQ ID NO: 3735 - protein, 182 aa, Artificial Sequence; identical to SEQ ID NO: 3734
  Synthetic

SEQ ID NO: 3736 - protein, 182 aa, Artificial Sequence
  Synthetic
SDAEDVLRKLKELIDRDTKENDEVLRKHKRLTDEDRRKNEEVVRELRKIITRLDEKLRAEGKELVDEVAKEVDKVVKDVERLLDESHEENKEVNRDLKRLLDESSKKVEKIIREVEEEARRLDKEVLDRIRDLLRRWRERNEESRRRAEKSIRDSDETNKRSREEIKRIIRKLREILKERKR

SEQ ID NO: 3737 - protein, 182 aa, Artificial Sequence; identical to SEQ ID NO: 3736
  Synthetic

SEQ ID NO: 3738 - protein, 182 aa, Artificial Sequence
  Synthetic
SDVEKVLRELEELIDRDRRDVEKVIEELRKLIKEDEEENREVLKRAEKMLREIREKLRNSGKEFLDELKRELEKVVEEVERLVKRSHDKLRKIERDVEEVAKRSTEDVKRVVDDVERKAKDIDEKFLRDIRETLKRWKERNEELTRRLREIIREVEERNEESKRRLDELIREAEEDMRRRRT

SEQ ID NO: 3739 - protein, 182 aa, Artificial Sequence; identical to SEQ ID NO: 3738
  Synthetic

SEQ ID NO: 3740 - protein, 182 aa, Artificial Sequence
  Synthetic
SEAERVLEDLKRLIDEDRKKLREILEDHKRLTDEDRERNRRVLEELDKIIKELDERLRSEGRELLKKVREELDRVVRRVEDMVRRSHETNKEVNERLKRLLRESTEDVKRIVREVRERARKLDKDVLDKIEKSLRDWERDNERMVKEADRSVKRSDETNEKSREDLERLIEEARRRLKERER

SEQ ID NO: 3741 - protein, 182 aa, Artificial Sequence; identical to SEQ ID NO: 3740
  Synthetic

SEQ ID NO: 3742 - protein, 182 aa, Artificial Sequence
  Synthetic
SEVERVLEELEELARRDEEKNKRVEDRLRKLIEDDRRDLRRILERLREIAERLKEEAESEGKEVLDEVRKKVEDVIREVEKLLRESTKRLEDVKREVEELLKRSREEVEEIRERVERKVKDIDEEFVRRIRDLLRRWKEEVDRSEDRIRRELEKWERENEEAEKRIRKIIEDLRREIKKKAD

SEQ ID NO: 3743 - protein, 182 aa, Artificial Sequence; identical to SEQ ID NO: 3742
  Synthetic

SEQ ID NO: 3744 - protein, 182 aa, Artificial Sequence
  Synthetic
SKLERVLEELERLIREDEDENKKILDRLKKLIDEDKKENDEIMETLKEIARKLTEELRSEGEELLEEVKKRADKAVEDVKRLLEESRRKVEKIVREVRKLLEDSNRKLEEIIKRVEEELKEADEEVLRRIRELIKEVRRRNDESRERIERLLKEWRERVDASERTIREIIKEIKERVRRARK

SEQ ID NO: 3745 - protein, 182 aa, Artificial Sequence; identical to SEQ ID NO: 3744
  Synthetic

SEQ ID NO: 3746 - protein, 182 aa, Artificial Sequence
  Synthetic
SKAEDVLRKLKELIDRDRDENRKVLDELRRLIERDREKNRRIMEKLKKIVRELEEALKVDGKELVKKVEEELRRVVEEVKKLLKESTDELDKIVRDVEELLKRSEEKVEDIERKVREEARELREDVLKRIEDELERWKEEVERSKREIEKLIKEARDENDKSRKTIEKIIREAEKILRDRDR

SEQ ID NO: 3747 - protein, 182 aa, Artificial Sequence; identical to SEQ ID NO: 3746
  Synthetic

SEQ ID NO: 3748 - protein, 182 aa, Artificial Sequence
  Synthetic
SEAERVLEELKELIERDEEENRRILEEHKRLTEEDLRENREVMKRLEDIIRELEEKLRTEGKEELDEVKKEAEEVAKEVKRLLEESTEKNKEVNERLKRLLDESNKKLREIVKKVREDARRLSEKVLTDIERLIREAEKRNRDSKREAEKSVKKSDELNERSRRRIEKIIEELRRLVDTRRT

SEQ ID NO: 3749 - protein, 182 aa, Artificial Sequence; identical to SEQ ID NO: 3748
  Synthetic

SEQ ID NO: 3750 - protein, 182 aa, Artificial Sequence
  Synthetic
SDVEKFLDELRELIRRSKERVDRMLRKLEELIRRSSEDVERLLKELKELIDDIRRLLDENREKREDIRRLVEELRKRVEDIIRKMEESNKRLRDEVEKIIRELEKLNEEVARVIKKAEDDIRGDELRERIKRLLEEHHKRLREAVEELRKLVEDATEEHERLSERAKRLVEEVKKRVDERER

SEQ ID NO: 3751 - protein, 182 aa, Artificial Sequence; identical to SEQ ID NO: 3750
  Synthetic

SEQ ID NO: 3752 - protein, 182 aa, Artificial Sequence
  Synthetic
DEVEKVLRDLEELIRRSETDIRRLLEELKKLIDDTRREVKKVLDDLRRRIKEVLDRIRRNPEKREEIERLVRELKRKVEEIEKRLERLNEEVERKIREIIRRIRETNKTLRKKVRELEKRLRGDEARERLKDTVTKASRRHEKVERDLEKLLEEHHRAIEKLRKELRDLVRKAKEDIDRARK

SEQ ID NO: 3753 - protein, 182 aa, Artificial Sequence; identical to SEQ ID NO: 3752
  Synthetic

SEQ ID NO: 3754 - protein, 182 aa, Artificial Sequence
  Synthetic
DEAEKVRREHRELVEDSLRKAEEALKRLDELIKRTEKRVKDVEEELKRLIKRVLDEVRKNREKREDIRRLVKELRDKVREIEDEMRKMNEEVRREVKKVEDDLRRTNRELHEKVKDVERKLKGDEVKRRLRTSDKKVSEKHKELLDRLRELLRRHHESLKRLEERIRKLVTDATRRIEEEEK

SEQ ID NO: 3755 - protein, 182 aa, Artificial Sequence; identical to SEQ ID NO: 3754
  Synthetic

SEQ ID NO: 3756 - protein, 182 aa, Artificial Sequence
  Synthetic
DEVEELLKEHRELVKESKKTVEKMLRELEELIKRTRDEVEKVERTHEELVRRVDEVLKRRREVAEDIERLLREIHKFVEDVKEKIKKLNEDVAKVLREITEDIKRTNKELHDVVERVTRRIEGDELKERLKESDKEASDLHEKAREDLERLLKKHHDDLRKIMERLERSDKEAKKRLEEEKT

SEQ ID NO: 3757 - protein, 182 aa, Artificial Sequence; identical to SEQ ID NO: 3756
  Synthetic

SEQ ID NO: 3758 - protein, 182 aa, Artificial Sequence
  Synthetic
DEVEKLLKELEDLRRKTREDLERVKKELEELVKRSKDRLREAEDELRRLVEDIERVIREDREAREDIRRLVEELKKKVDDIRRTLEESNEELRRKVERIIRELERANRDVREKVKEVERRIKGDELKKRIRELVKEHTDELRKVKRELEALVEKATEDHERVLRRLEELVERIKREVDKAEK

SEQ ID NO: 3759 - protein, 182 aa, Artificial Sequence; identical to SEQ ID NO: 3758
  Synthetic

SEQ ID NO: 3760 - protein, 182 aa, Artificial Sequence
  Synthetic
SDAEDLLREHRELVERSKREVERVLDELRRLIEKSLREVEKVLKELEKLIREILDRVRKNSEKEEEIERLERELEKIVEEIERRIETSNRELKRIVKEIIDEIRRTNKELHDKVRDVERKLRGDRVREELRRSDEKVSRDHEELVKEAERLVDEATKEHRKLKRRIRELVRRAKEEIEKLRK

SEQ ID NO: 3761 - protein, 182 aa, Artificial Sequence; identical to SEQ ID NO: 3760
  Synthetic

SEQ ID NO: 3762 - protein, 182 aa, Artificial Sequence
  Synthetic
SKVEDILRRHRELVKKSLDEIRDLLRKLKRLIEESLRRVEEVLRDHERLVREIEDRVRKNREKREELRKLLEDLHRKLEEVEREIRESNKKLAEEVRKIEETIRKTNKELHDTLRDAERKIEGDELKRRLRESDKRVSERHKRATEEIKKLLDRATEEHKKLVKRLRDSDKRVADELDKAEK

SEQ ID NO: 3763 - protein, 182 aa, Artificial Sequence; identical to SEQ ID NO: 3762
  Synthetic

SEQ ID NO: 3764 - protein, 182 aa, Artificial Sequence
  Synthetic
DDVDRVRKEHEKLVRDSLDTARKLLEELEDLIRRDKEDVERVLEELKRLIEEIDDRVRRNREKREELRELLKELEKRVRDIVKKNEESVDELRKKVEDIIRRLAETNKRLHDRLRDVERKLRGDELIERLRRSDKRASEEHKRLMDEAKRLVEKAEKDVTELNKDIKRLVKEVEDRLREAER

SEQ ID NO: 3765 - protein, 182 aa, Artificial Sequence; identical to SEQ ID NO: 3764
  Synthetic

SEQ ID NO: 3766 - protein, 178 aa, Artificial Sequence
  Synthetic
DEVKKVLDESRELVDRIRRKAKEVDDRDRKLIRDVLEELKKLLEENRKLVEDIRRLLEAGVSEDELRRLLEESRELIKRVKERLDDALRRLEESSKTWKEELDRLLEENEELIRRAEEAGVDKETLRRLHEETERILRDLKRHNDELNDEARKRLKEVKERLDESHDRVRRELEAKER

SEQ ID NO: 3767 - protein, 178 aa, Artificial Sequence; identical to SEQ ID NO: 3766
  Synthetic

SEQ ID NO: 3768 - protein, 178 aa, Artificial Sequence
  Synthetic
KDVEEILRKLKELIDEARRRLEKTLRDHEDIVRRAKRRLEELLKRHRDIMDEVRRKVRTKELLDTVREDSKRVVKEAREILEELKRISEKVVEEHKRLSEELKRRLDKILEELERRGVPEEARRRLEEEVRKVRKEIEDVNRRLEKSHKEAEETLRRVEEELKKSHDELERILREIER

SEQ ID NO: 3769 - protein, 178 aa, Artificial Sequence; identical to SEQ ID NO: 3768
  Synthetic

SEQ ID NO: 3770 - protein, 178 aa, Artificial Sequence
  Synthetic
DDVEEILRTLRELIKKIKKDLKKVLDDHERIARRAKEELERILRRHREIVERVDRKVRTEEVATRVAETSKRVVDDARRILKRIAEISREVVEDLKRILKEAAEALRELLRRLEEAGIPDEARKKIEDIVREVEDDLRRVAKAAEDSNRKLEKDLREVAERLRKSHEEAEKALRDREK

SEQ ID NO: 3771 - protein, 178 aa, Artificial Sequence; identical to SEQ ID NO: 3770
  Synthetic

SEQ ID NO: 3772 - protein, 178 aa, Artificial Sequence
  Synthetic
DDVRRLEEELRRLMEEAERRLRKTLEDHKRIVEEAKRRLEEILREHKRILEEIDKRVRTEEVLDEVLRESKRVVDDARRILKELKETSERVEERHRRLSKELKKLLDEILERLARRGAPEELKKRVEDLVREIRRRLDKVNEDLERSNRELEKVLRDVLRELKKSHDDLERSLRETRR

SEQ ID NO: 3773 - protein, 178 aa, Artificial Sequence; identical to SEQ ID NO: 3772
  Synthetic

SEQ ID NO: 3774 - protein, 178 aa, Artificial Sequence
  Synthetic
DEAEKILDELRRLIDEIRRRLRKTLEEHKRILERIRRELEKMLEEHRRIVDEMRRKLRTEELIKEAEDRSREILRRVKEIVDRVREESRDVVRRHEELSRELKKLLDEILERLKKTGLPEEVTRRLEKLVRDVDRDIKRVNKELEKSNRELEKDLRAVEKRLEDSNRDARKKLEDTRR

SEQ ID NO: 3775 - protein, 178 aa, Artificial Sequence; identical to SEQ ID NO: 3774
  Synthetic

SEQ ID NO: 3776 - protein, 178 aa, Artificial Sequence
  Synthetic
DDAERILEELKRLMEEVEKRLKDTLDTHREIARRILERARESLKRHEDIAREIERDVRTEELLKRVLEDSERVVRDHERLSREVAKDSKRVLKEHEELSRRVARRLEDILRKLEERGVPEDVKRKIRELVERAKKRLKEINDELKKSDEDLDRKLEDLNRRLEESNEELKRRLDETRR

SEQ ID NO: 3777 - protein, 178 aa, Artificial Sequence; identical to SEQ ID NO: 3776
  Synthetic

SEQ ID NO: 3778 - protein, 178 aa, Artificial Sequence
  Synthetic
SDAEKLLEDIRKLTEDVERDLRRSLEELKDLIRRLKKEIEDLLERHKRIVDKVVREVRTEEVLREVKKESDKVLKELEELVDRIKKRLDELLKRHRELSEEIKRRLRELLKRLRDRGVPEEVKERVERLVREVEKRLDEVDKELEEEVDKARKELEKLLEDIDRSDKEARKRLEDKRR

SEQ ID NO: 3779 - protein, 178 aa, Artificial Sequence; identical to SEQ ID NO: 3778
  Synthetic

SEQ ID NO: 3780 - protein, 174 aa, Artificial Sequence
  Synthetic
SKEDEIRRLIEDLERRNKEVEETLRELVRETRERIERIKRRLEELIKKSKDEVDDARRKGKVKEELEKKVREIVDESRRLLERLEERVREAVEESERLVERDKEDSRRIKKEIEDIPGSEELLERLERLIDKSRKNVEDIVKRHEDLSRELTERAKAILERHKELTDELREDVR

SEQ ID NO: 3781 - protein, 174 aa, Artificial Sequence; identical to SEQ ID NO: 3780
  Synthetic

SEQ ID NO: 3782 - protein, 174 aa, Artificial Sequence
  Synthetic
SEEERIERLIDELRRDNDEVRKRLDKLVKDTERENEEAERRLRRLIEESRREVEKLKAEGKVKEELERDVERIVKESEDLLRESHKEVEEMVRKSRELVEDDKRRSDEVVERVERIKADEELARELEKLIEDSRRNVKRIKEEHEELSRRNRKLLEDILERHRRLTEELRKKVK

SEQ ID NO: 3783 - protein, 174 aa, Artificial Sequence; identical to SEQ ID NO: 3782
  Synthetic

SEQ ID NO: 3784 - protein, 174 aa, Artificial Sequence
  Synthetic
SKEREIEELIKELEEEVERLKEELRRIIKKLRDDNKRAEEELERLIRESKEDLDRARKEGKVKEEIEKKLRRIIEESERLVEEDKKKSEEIVKRIEELVKKLEKKVRDVAERVRRIPAAEELRKELEDVRRKLKEEIDRILEEAKRVVDDSRRNAEEITRRHKEATKRLREEVE

SEQ ID NO: 3785 - protein, 174 aa, Artificial Sequence; identical to SEQ ID NO: 3784
  Synthetic

SEQ ID NO: 3786 - protein, 186 aa, Artificial Sequence
  Synthetic
SIAERLKELIDRMREDNERAAKELRELIRKAKEESKEVEERLRRRLKELRDRVEELVRRNSEGDKKVREIRKKLEEIIEEIERLLRENEKLVREIEKRIKELIDRDRKRSKEIEDRIRDLIRKLKDLKEMLDRILEELKKLIKESRENLRRILEDLKRLLDESRRHAERITRRLEELIKELKEKAD

SEQ ID NO: 3787 - protein, 186 aa, Artificial Sequence; identical to SEQ ID NO: 3786
  Synthetic

SEQ ID NO: 3788 - protein, 186 aa, Artificial Sequence
  Synthetic
KARERLKRLIEEAKRRNEEMEKELDRRLDELRRESKTLEEDLRRSLEELEERIRRLVKRNSEGSEKIERLKRLVEEIKRRVERAIEENKELVRRIIERIKRLIKENRKLSEDIERRIDDLIRKLKDLREMVEEILRELRKLVEDSLEVLERILDDLRRLIEESRKHLEEVKRRLEELKKRLEDEAR

SEQ ID NO: 3789 - protein, 186 aa, Artificial Sequence; identical to SEQ ID NO: 3788
  Synthetic

SEQ ID NO: 3790 - protein, 178 aa, Artificial Sequence
  Synthetic
KEVEKILEEIERLIREIDREVKRVKTENEKTVRDIRKRVEEIKEEHKDLTRKLEKLARDGVPEERLREVLKRIEDRTREVIEELRELLRRDEKKVRDMIRKLKDLVKKIEDRVRKVELSDEARKRAEDLLRDAKRRVDEVVEELKKTVEELKEEVRKVEEELKELVKRSEDKVRETER

SEQ ID NO: 3791 - protein, 178 aa, Artificial Sequence; identical to SEQ ID NO: 3790
  Synthetic

SEQ ID NO: 3792 - protein, 182 aa, Artificial Sequence
  Synthetic
SEVDKVLKEHEDLVREDKKRLEEILRELKDRLRRDEEELRRIMEELEELLRRLKDVVDKRREDRETLRRLLEELRKKVEEVKRRNDRSVRELEKVVRKVVKENEDSLREVHKRLRDVEKDLRKKEMIDRLRRSDEELKKEADRANEEAKRIVEKIRDTLKKANDKLDEIVERIEDELRRAET

SEQ ID NO: 3793 - protein, 182 aa, Artificial Sequence; identical to SEQ ID NO: 3792
  Synthetic

SEQ ID NO: 3794 - protein, 182 aa, Artificial Sequence
  Synthetic
KEAEDVEEEHKRLVEDDRRKLEEIKKTLERLVEEDRRRLEEVVRELKRLLDEITDVLTKRREVEKDLEKLLEELERLVKKVVDENKKSVETLTRTVEKVSRDNKRTLKEVHDRLRDVERKIKDDEVRKRLRKSDKELRDEAREVNKELEAIVKRARDEVKKVNDDLRKIVDEVRETVKEARR

SEQ ID NO: 3795 - protein, 182 aa, Artificial Sequence; identical to SEQ ID NO: 3794
  Synthetic

SEQ ID NO: 3796 - protein, 182 aa, Artificial Sequence
  Synthetic
DEVREVKKRLRDLIRDDERELRRVLEELKELVKDDVDKLRRLIEKLRKLLEELRRVATKRREVREELRKLLKELRDEVRKASEENRESVERLERRVREISERNKKSLKELRDVVEDVTRKLRDEKAREELKRIVEEVEEKSRRANKKLKDIVDEMRERVKRANEELDDIVKKITEDLERMRK

SEQ ID NO: 3797 - protein, 182 aa, Artificial Sequence; identical to SEQ ID NO: 3796
  Synthetic

SEQ ID NO: 3798 - protein, 182 aa, Artificial Sequence
  Synthetic
REVDEVRKEHERLVKEDEDKLRKIIEDLKKLLREDEKRLREALKRHRELVEEARDVVRKRKEDRERLRKILEDLHRMVRKVSKDNKKSVEDLEREVRRVSTENKKSLEDIHRMLKDVAEKLRSDKVKKELEESDRRVEEKSRRANETLKRIVEEIRKKAEEINRRLKESDDRAAEDIKRVEK

SEQ ID NO: 3799 - protein, 182 aa, Artificial Sequence; identical to SEQ ID NO: 3798
  Synthetic

SEQ ID NO: 3800 - protein, 182 aa, Artificial Sequence
  Synthetic
DEARRVKEELDKLRREDEELLRRLMEKLKDLIRRDTEELKRIIDELRELVERLEDELRRRREDRERLRELLRRLEDRVRRVSDKNRKSLEDLERVVEEVSRENEKTVRRLEKKVKEVEKDLKDEKVREELRRIVDRVKKEVDRANRELEDIRREVEEISKRANEELERIVTEAADRLRKVAE

SEQ ID NO: 3801 - protein, 182 aa, Artificial Sequence; identical to SEQ ID NO: 3800
  Synthetic

SEQ ID NO: 3802 - protein, 182 aa, Artificial Sequence
  Synthetic
SEAEKVIREHERLLEEDRRRLEEALRTLERLAERDEERLKEAEERHRDLLRKLEETVKKRREVREKLRKILEEIHRTVKKVSEDNEKSLRELKEKVDRISRDNEETLERAHRRLRRVEERLEKDEVKRRLRKSDEDVKRRAEEINKEAKEIVDDVKKKSDEANKRLKDSDKRVAERLKEAED

SEQ ID NO: 3803 - protein, 182 aa, Artificial Sequence; identical to SEQ ID NO: 3802
  Synthetic

SEQ ID NO: 3804 - protein, 182 aa, Artificial Sequence
  Synthetic
SEVEKVIEDHDRLLKRDEELLRKIAEDLKDLVRRDEERLRRATEKLKRLLETLEDVLRKRREVREDLRRLLKELKEAVKRISTENKKSLDKLREDVERVSRANEKSLRDAHRKLKDVEDKIKDKEVKDKLRRSDERVEKRSRDANRELEEIVRRARKKSEEANRRLEEIVERAEKRLKEAED

SEQ ID NO: 3805 - protein, 182 aa, Artificial Sequence; identical to SEQ ID NO: 3804
  Synthetic

SEQ ID NO: 3806 - protein, 181 aa, Artificial Sequence
  Synthetic
SEVDKVVEESKTSMRRLERRHREATKESKKSIEEIEETVERVKRESEKSVKKLDDLVKNGSDKSALERALEENRRLIEEIKRTLDRLLETNKRLIEEISRESKELLEENKELIERIEKDVKDEEVRRRLRKIHKELEERLRRMNKRLRELHRELEEKVKEVKKELEDIHRKARERVEKAKE

SEQ ID NO: 3807 - protein, 181 aa, Artificial Sequence; identical to SEQ ID NO: 3806
  Synthetic

SEQ ID NO: 3808 - protein, 181 aa, Artificial Sequence
  Synthetic
EELKEVRERSKESIKRIKEEHERVEEELKDIKRDIDRRHKEVVDESRESVKRVEDLSRADVDEEELRKLLERNKELIDRASEESKRMLEDLERVVREASEKSKRLLEENKKLIDDIERRVKDEEVRRELREIHDELRKRVEEANKRLEDILREIDKRLKELNEELKRIHDRARERLEEERR

SEQ ID NO: 3809 - protein, 181 aa, Artificial Sequence; identical to SEQ ID NO: 3808
  Synthetic

SEQ ID NO: 3810 - protein, 181 aa, Artificial Sequence
  Synthetic
DEIREVIKESKKSVEDVKRRHEEAKRESERSLKEIRELAEEVKERLRDLLRRIRKLVKDGVDEKTLEELLRRIEELLKRIKDRLDEMLERNRELIKKISDDSERLLRDNERLIRDIERKVKDEEVRRRLRKIHKEAEERLRRANDELRKLHEEIKKTVEKIKRELDKIVEEIERDVRRDRK

SEQ ID NO: 3811 - protein, 181 aa, Artificial Sequence; identical to SEQ ID NO: 3810
  Synthetic

SEQ ID NO: 3812 - protein, 181 aa, Artificial Sequence
  Synthetic
SRVEEILRDSKRSMDEARKEHERVLRELRDRLRRLDERHRRLLEELKRLLREVRELTRAKVSERELREALKTIRELLRKISEESKRLLEEIEEVLKRISDTSKRLLEENKKLIDDARREVKNEEVLRRLDDIHRRIKRELKEVNDRLEEIVREIRKRLKEVNERLKEIVDAVEEVVRRAEK

SEQ ID NO: 3813 - protein, 181 aa, Artificial Sequence; identical to SEQ ID NO: 3812
  Synthetic

SEQ ID NO: 3814 - protein, 181 aa, Artificial Sequence
  Synthetic
KRLEDVARESKKSIDEIRKRHKEATDESNKSIEEARRIHEEVLRTLKELLDRVRKLIESGVSERALDEALRTIKELLERISRTSEELLRRNRELIERISKESKELLDTNRKLIEDIEREVDEEEVRRDLRRIHERLREEAEEVNERLERNHEELEREARKVNEELRKIVEDARREVERAKD

SEQ ID NO: 3815 - protein, 181 aa, Artificial Sequence; identical to SEQ ID NO: 3814
  Synthetic

SEQ ID NO: 3816 - protein, 181 aa, Artificial Sequence
  Synthetic
DDVEEIKRRLEELLERLKEDHKRMLEESRKSVEDAEKIVEEVKKESEDSIREIKKLLKDGVDEDTLRELLDRNRRLIERIKEDLDRLLKENRELIKKISERSEKLLREIRKVVKEAKDRVKDEKVKRELDEIVKRIEDEARKVNEELKRIHDDAERKVRKVKEDLERIHRELKKRVEDDRT

SEQ ID NO: 3817 - protein, 181 aa, Artificial Sequence; identical to SEQ ID NO: 3816
  Synthetic

SEQ ID NO: 3818 - protein, 181 aa, Artificial Sequence
  Synthetic
KEDERVEEELRKLLKELEDRHKKASEDSRDSIRRIRERARTVLEELKRVLEDIDRLIKADVREEELKRALEELEKLVREIKKELDDLLDKNRKLIEKISKESRELLEKIERVLEDIRRRVKDEEVKRRLDKIVDDVRERLKEMNDRLRRLHEELKRELERIKEELDKILEEVKRRLEEARR

SEQ ID NO: 3819 - protein, 181 aa, Artificial Sequence; identical to SEQ ID NO: 3818
  Synthetic

SEQ ID NO: 3820 - protein, 178 aa, Artificial Sequence
  Synthetic
ELEERLTRSNDELRKELKRMNEELRRKLEEIRKELERLNEKLREIIERIKEDLDRRARDKDKVKRVTDELRELLKRAHDISRELLKTLEKLIREIHKLSKELLEESDRLLDEARKKVKGRELAEEFLRRHKELVERIREIHERLRERLEELLRRIEELHKRLEDELREVLKRIEDEIR

SEQ ID NO: 3821 - protein, 178 aa, Artificial Sequence; identical to SEQ ID NO: 3820
  Synthetic

SEQ ID NO: 3822 - protein, 178 aa, Artificial Sequence
  Synthetic
KKEEDLDESNKRARDELKEMNDRLRKIVKEIEDELRRLNEEARRSNEELRRRVEERLKDKETADRVLKESEDLLRTIHKLSRDLLKELEDLLREINKRSRELLEESDRLIDRIRKEVKGDELAKKVIKEHEDLVREVLKRHEDLLRRARELLKKIKEIHDRLLDEHRKLVEDIEREAT

SEQ ID NO: 3823 - protein, 178 aa, Artificial Sequence; identical to SEQ ID NO: 3822
  Synthetic

SEQ ID NO: 3824 - protein, 178 aa, Artificial Sequence
  Synthetic
DRERELEKSNRELERELREALKRVKEIIDRIRKTLEDMNRRLKRSNEEAERRLREKARDKDKVDKIVTESKKLVEDIHRTSRELVRELEKLLREMERILRELKRRSEKLIKEIRDKVRGDELAERVIREHRRLAEEIRRLIEKLKREIEELLERARRTHEDLLRKHKELVKKVDEEIR

SEQ ID NO: 3825 - protein, 178 aa, Artificial Sequence; identical to SEQ ID NO: 3824
  Synthetic

SEQ ID NO: 3826 - protein, 178 aa, Artificial Sequence
  Synthetic
DDEEEVKRSNDELRKEIKEAEERLEKSNRELEEDLRRMNRELEESNKRLRELLEREARDEEKVRRVIRESERLVEEIHKRSKELEERSRELIKRIRDELRKLIERSDRLLKDVKDKVRGKELAEDMLRRHRDLVREIRELIDKLTRDHDRLVKEAREIHKRLTERHRKLVEDIKRETD

SEQ ID NO: 3827 - protein, 178 aa, Artificial Sequence; identical to SEQ ID NO: 3826
  Synthetic

SEQ ID NO: 3828 - protein, 178 aa, Artificial Sequence
  Synthetic
SKEEELEKSNRKLKEDLERMNEDLKRILREVEDVLRRIEEELEKLVRELEEILKRRVKDEDKVREMVKRAKDLLDEVREVLKRLRDRLEELIRRIHERSKDLLRESKRLIDEIRRKVRGDELAEEVIDRHRDLVRRIKDEHRKLTDELRKLLEDIERLAEEAKRKLEKLIEDVEREAN

SEQ ID NO: 3829 - protein, 178 aa, Artificial Sequence; identical to SEQ ID NO: 3828
  Synthetic

SEQ ID NO: 3830 - protein, 175 aa, Artificial Sequence
  Synthetic
SSEERVKKVVEELEDLIRKIREEHKDSIRENRKVVEDIRERVKELITELKKELEDKLKDDKDIVREVEKILKEVKEALDRVAEENEEVDRRSEESLRRIEEKVRRAIRTVEELVRRNVDTEDLLRRLRKLIEDVFREARENLKRHKKMSKEAKEKLEELLKRLRDLIKEAREKIK

SEQ ID NO: 3831 - protein, 175 aa, Artificial Sequence; identical to SEQ ID NO: 3830
  Synthetic

SEQ ID NO: 3832 - protein, 182 aa, Artificial Sequence
  Synthetic
SEADEVLRTHEELVRELEERAKEILRRHRKLSEESERKAREVLKTLRDLIRELKKLADEGSRRREDLSRRAERIKEEITRVVEELERENRRIDEELKKLVKELEDRMKEINDRLRELLKRDKDEEIARRIEESEDKSRRIIDEVRERVRKSIEENKRVVEEVRERVERLIKELDKIVEDIRR

SEQ ID NO: 3833 - protein, 182 aa, Artificial Sequence; identical to SEQ ID NO: 3832
  Synthetic

SEQ ID NO: 3834 - protein, 181 aa, Artificial Sequence
  Synthetic
DELEKVIEELKRRIEEVKKELTELNKELKDVSKEIEDVIRDLNRELKKLSDRIKELADRDNNDDLLRKLHKRLEDLHRETKERITEMLERLERLHRDTKRRIEEVLREIEKRVDEIKKKTTDEEIRRRLDEVLRKAEEDLRRAEESNDEHLRKSKEDVERARKSNDKHLDDNRKTLEEATR

SEQ ID NO: 3835 - protein, 181 aa, Artificial Sequence; identical to SEQ ID NO: 3834
  Synthetic

SEQ ID NO: 3836 - protein, 186 aa, Artificial Sequence
  Synthetic
SDVEDLLRRLRKLTKDIEERVKELNKKLEDVSRDIKRRVEEVLKKLEDVLRKARDEVRKLGDDGGAEELLKDILRRIAELLRELDETLKRVDKKIEDIVEESKELLRKVNEEVKKVVDEIRERNKDLDRAEKELRKILEDHKEISDRVRRSNEKLLRDHRRTSETVKRRLEKVLEDIRKELEDAKR

SEQ ID NO: 3837 - protein, 186 aa, Artificial Sequence; identical to SEQ ID NO: 3836
  Synthetic

SEQ ID NO: 3838 - protein, 180 aa, Artificial Sequence
  Synthetic
DVEERVKTIVDDIERTLDEVRRRLEESHKRLEDALKEVDDRLKKLLKETEEVLKRIEDERGKREELDDVRRRAEKSARDLKRLLDEIRKESRRILEELRKLLDDIRKEVREVLERLARVKEKEKVEELLRRLREILERVTRRLEEVLKRHRDLVEEVKKELERVLEDHKRLSEDAERRAR

SEQ ID NO: 3839 - protein, 180 aa, Artificial Sequence; identical to SEQ ID NO: 3838
  Synthetic

SEQ ID NO: 3840 - protein, 180 aa, Artificial Sequence
  Synthetic
SVEEALEKSVKESEEVLKKAEKELRESHEDAKRVLKEVRDELERLMEETKKELRDVERKRGRRDELERIKKRVEDSLRKLEKLLKEVKERSEDLLRKLKTLLREAKKRNDEVREELARVRDKEKVDRILKKDKDLIDRVRRELKKMLDRHRKLVEDVKRELEEALKEHKDDSKRVRDKLK

SEQ ID NO: 3841 - protein, 180 aa, Artificial Sequence; identical to SEQ ID NO: 3840
  Synthetic

SEQ ID NO: 3842 - protein, 180 aa, Artificial Sequence
  Synthetic
DIEDRLERVVRDAKRVLADVEDKLRKLLEETERMLRRVKRELERSHEEAEEELRRVEEERGRTEDLERVKRESEEVVKRVKKILDEIREKAKDSMRKLKELLKRVEERVREVLEELARVDDKKLLEDILRKLRKIIEEVKRTLEEALKRHRDLTRKVVEELEDLLRKHRRIVEEVKKRLK

SEQ ID NO: 3843 - protein, 180 aa, Artificial Sequence; identical to SEQ ID NO: 3842
  Synthetic

SEQ ID NO: 3844 - protein, 180 aa, Artificial Sequence
  Synthetic
DIEDELRKSVKRSEEVLREVEERLKRLLEETKEVLTRARETNEKSHRELEDKLRKIEEERGEDRTLDEVRRESEELLKESEKTLRELLERAKKSVKELKELLDEVRKRNKEMEERLRRVTDESKLRELLKRDKKEIDDVKRELERLLEDHKRLTEEIRRRLKRLNEKHREIVKRVEKELK

SEQ ID NO: 3845 - protein, 180 aa, Artificial Sequence; identical to SEQ ID NO: 3844
  Synthetic

SEQ ID NO: 3846 - protein, 180 aa, Artificial Sequence
  Synthetic
DVEDRLRESEKRSEKTLKDVEERLRRSHEDLEKKLREVEKRLRDSHREAEKTLKRVKEEKGERETLREAEKTSRKVLEDLKRLLDEIREESKRIVKKLKDILDEARKRNEEVREELARVDDKEVVRKILEDDKRLIEEVKKELERVLEEHRRLVEKVKRELEEVLKRHKEIVDDVRRRLE

SEQ ID NO: 3847 - protein, 180 aa, Artificial Sequence; identical to SEQ ID NO: 3846
  Synthetic

SEQ ID NO: 3848 - protein, 180 aa, Artificial Sequence
  Synthetic
SIEDELRKIADEARKVLDKVRKDVERSHREAEKKLREIDKRLKDSARDSKRVLDEVREERGEREELEKARKENEEMLEKLRDLVRKVKKESEEMVRRIRKILEEVKREVEKVLEELARVKEEEKLERILRKLKKIIKDVEDELRKLLEEHRELVKKVEKDLRDLLERDRELIEEVERRLR

SEQ ID NO: 3849 - protein, 180 aa, Artificial Sequence; identical to SEQ ID NO: 3848
  Synthetic

SEQ ID NO: 3850 - protein, 180 aa, Artificial Sequence
  Synthetic
DIEDRLRTSVKKSRDVLEEVERKLRDSHRRAKEVLDKAREDLRKSKEDSKRVLDDVRRKRGDREKLDKARRDNERVEERAREILDRVRRDSERLLKRLKDLLDEVRKRNEKVREELARVKEKEKLEDVLRRDEELIDRVRRRLERILEEHEELVKRVEEELRRVLEEDRKLIKRVKEELE

SEQ ID NO: 3851 - protein, 180 aa, Artificial Sequence; identical to SEQ ID NO: 3850
  Synthetic

SEQ ID NO: 3852 - protein, 180 aa, Artificial Sequence
  Synthetic
DIEDALRDSERESEEVLKRAREELEKSHKEVKKRLDEVEKTNKDSVDESKKVLDDVRRKRGELEKLKEATERNKRVLDTSRTILKRLLEESEEMVKRARRILDEARRRNEEVAEKLKRVTDKELLKKILKEDKELIKRVEEILRRILEEHRELVRRMKKELDELNKRDKELIDRVREELT

SEQ ID NO: 3853 - protein, 180 aa, Artificial Sequence; identical to SEQ ID NO: 3852
  Synthetic

SEQ ID NO: 3854 - protein, 180 aa, Artificial Sequence
  Synthetic
DLEEEAKKSVRESERALDEVRKRLDRVRKEVERELRKVEEDLRRSHRKLEDILRRVAEKRGPAEALERIEEDSRRVLEELKKLLDDLRRRLTELAKRLEELLRRLEEDNRRVLEEAKRVKDEEAARRILERDKALIEKAREDLKRILDEAREILKEAAKRLEDILRKHKKIVEDVARELE

SEQ ID NO: 3855 - protein, 180 aa, Artificial Sequence; identical to SEQ ID NO: 3854
  Synthetic

SEQ ID NO: 3856 - protein, 188 aa, Artificial Sequence
  Synthetic
KIEEEVEKLIRDARRIIEEMRESTERLIERNEEVLETVRREVEKLLRDLERILEKIKRELEGDERVKELLRRVEKLLREVKKRVEELERENREELRKLEERSRKLLEDVKRLADELRRRVEKMSKDNVPEEVLRRILEEIRKIVEDVRRELDTLNRELEELTKESRRRAEELLRRLKEIVKKVERDAE

SEQ ID NO: 3857 - protein, 188 aa, Artificial Sequence; identical to SEQ ID NO: 3856
  Synthetic

SEQ ID NO: 3858 - protein, 181 aa, Artificial Sequence
  Synthetic
REVEEILKEVETLIRENKKKLEEWLRTHEKLNEDLERKAREILTRHRRENEDLKRVADDGKDKRDIKRKIEKLERETRKLIDELKKEVEEVIRRSKEAVKRNNDEDREMVEKLKEDLKRVDKDEVKRRIEELIKKSKRVNDEANRRVDKLVKDTRDKIREIEERIRKLIEESKKLLEDKRR

SEQ ID NO: 3859 - protein, 181 aa, Artificial Sequence; identical to SEQ ID NO: 3858
  Synthetic

SEQ ID NO: 3860 - protein, 181 aa, Artificial Sequence
  Synthetic
REVEEILRRVRELIERNRKEVEDWMRRHRRVNEELKRKAREILERIKEMLKTLKEVLERGRDKREIAERVKKVEKEVEELLRRLKEEVERLAKESEDVVRKNNKKDDEVVKELRELLKRVKDDEAAKRIEKLIKESRERNEEVNRKIKKLIEDTRRVVEDVRRKVEELVKRLRTELDRARK

SEQ ID NO: 3861 - protein, 181 aa, Artificial Sequence; identical to SEQ ID NO: 3860
  Synthetic

SEQ ID NO: 3862 - protein, 181 aa, Artificial Sequence
  Synthetic
SEAEEIAKRAKEAIERNRKLAEEWAKRARDAAERLKELYKRIAERHRKANEELRRAAERGEDLDKIREDAERAIEETERLIEKANRETRKAIEELKKAAKENNDEDRKAAEEAKKLAEKVKDDEARKRIRELIERSKKANKEANDRARKLAEDAKRLNEEANERAKRLAEESREAIKEAER

SEQ ID NO: 3863 - protein, 181 aa, Artificial Sequence; identical to SEQ ID NO: 3862
  Synthetic

SEQ ID NO: 3864 - protein, 182 aa, Artificial Sequence
  Synthetic
REVEEVAKELRELIKRTEDLIRRALERNRKLVKETRDLIEKVLRDLRDLLRRLEEEARRRGKDEDVLRTLRRLLEELKKKVDEVLKELRRSHEELKKHSDKVLKELKESHDRLKEKVDEVRRRGVDDKTLRDLLREHKELVEEAKRRLEESNDEHRREVEDAERRIEEIVRDAKRVVDEIER

SEQ ID NO: 3865 - protein, 182 aa, Artificial Sequence; identical to SEQ ID NO: 3864
  Synthetic

SEQ ID NO: 3866 - protein, 182 aa, Artificial Sequence
  Synthetic
SEVEKVVTELRRLIERLEEVIRRALDTNRKLLEDTEKEAERMMRKLEELIKDLERDLREKGRNEEVEERLDRLLETIKRVVEEVKERLERSHERLKRHSEEVLRTLERILEEIERRVREVERRGVDKETLRKLLKELREVLDKAREDLERSNRDHRRAVEEIKERLERLLKKLEDVVRKAKE

SEQ ID NO: 3867 - protein, 182 aa, Artificial Sequence; identical to SEQ ID NO: 3866
  Synthetic

SEQ ID NO: 3868 - protein, 182 aa, Artificial Sequence
  Synthetic
KEAEEAAKKLKDLIKEDRERARRALEENKRLIDELRKAAKEALDRNRELLERLRDEARKRGNDEEAAETLDRLLKELRDHSKKAAEELEKLLEDINRHSEKAARENEESLKRIREEAKKAKDGNADKDTAEDLLRRATRDSEEAKKKLKKSNEEAAKAVEEAKERLKRSVDEATKAVEEAKR

SEQ ID NO: 3869 - protein, 182 aa, Artificial Sequence; identical to SEQ ID NO: 3868
  Synthetic

SEQ ID NO: 3870 - protein, 178 aa, Artificial Sequence
  Synthetic
SEVEKALEESKESLKTIKKIAKDVLTESEESLRRTKKLIEEVLEASKRSIEELKRLSEADTREKDLDKLLDDNRRLVEKIKKELDDSHRDNRRLVKEIKETLERLLRENKKLVEEIRKAGVDEDELRRLHEDVKRLVEEIAKRLDELHDRHRETVKRAKEELDKLHDRARKEVEDDKR

SEQ ID NO: 3871 - protein, 178 aa, Artificial Sequence; identical to SEQ ID NO: 3870
  Synthetic

SEQ ID NO: 3872 - protein, 178 aa, Artificial Sequence
  Synthetic
SEVEKVLKDSEKSIEDAERIARDVLRKSEESIDRIRRIAEEVLKESEKSIRDAKKLAEDGVSEEALKRVLDTNKELVDRIKKALEDALRRNEELVRRIKATLDDLLRKNKELVDEAKKAGVDERELDRLHEKLRRVVEEIEKELRESNRKLEEVLRDIKRKLDDLHRKAREILERIRK

SEQ ID NO: 3873 - protein, 178 aa, Artificial Sequence; identical to SEQ ID NO: 3872
  Synthetic

SEQ ID NO: 3874 - protein, 178 aa, Artificial Sequence
  Synthetic
SEVEEVLKRIRDVIKTMEDRAREVLKESEKSIKEIRDTIREVLKRSEDSIRRIDEELKKGVDEKDLDKLLRDNRELVRKIKEELDELLKENEKLVRDIERELEELLRRIEELVKEIKKRGVDKDRLDELLKRAEEVLRKIKEDLRRSNEKLREEVKEAKKRLDDLHRELEDVLREAKR

SEQ ID NO: 3875 - protein, 178 aa, Artificial Sequence; identical to SEQ ID NO: 3874
  Synthetic

SEQ ID NO: 3876 - protein, 178 aa, Artificial Sequence
  Synthetic
KETEEAEKLAREAARRSEKLAEEAEKRAKEAIDESKELADRARDTARRADEDLERLAREGADEEALERARERARRLVEKAKEDLKRSHEKAKKLVEEAKKRLDESNKDAERLVREAKKAGAEREKLDDLLRRHNEKVKRAKERLDRLLEEHEKRIRDAERDLERLERELKKKAEDKRR

SEQ ID NO: 3877 - protein, 178 aa, Artificial Sequence; identical to SEQ ID NO: 3876
  Synthetic

SEQ ID NO: 3878 - protein, 178 aa, Artificial Sequence
  Synthetic
SETEEALERLRKMIEDSRRLAKKIREDLREMIERSRRLAEKVRRDDEKSSEDLRRVTEEGRDSEVLRKLLEENERLVREIKADLDRSNEEAERLVRRVKRELDKSNEELKRLVERIKERGVDKDRLDRLLEEHNRIVKEIKEDLDRLLREHNEIVKRIKDDLDRLHEENRRLLEESER

SEQ ID NO: 3879 - protein, 178 aa, Artificial Sequence; identical to SEQ ID NO: 3878
  Synthetic

SEQ ID NO: 3880 - protein, 177 aa, Artificial Sequence
  Synthetic
SKEDLVRELKKKLEEVVKRSREESERSLRKLEKVIRDFRRESERLKKESRDVVKKAREDGLPEDVLRDLERLLREDEERNREANREIEKLLREIEKRNREVNRENEDTLRRIEDKLRKDGADEEVLKEIDDLIRRDEERLRRVLRESEELIKEIKKRAEEMLTRSKKLTRDIEEKTR

SEQ ID NO: 3881 - protein, 177 aa, Artificial Sequence; identical to SEQ ID NO: 3880
  Synthetic

SEQ ID NO: 3882 - protein, 177 aa, Artificial Sequence
  Synthetic
RDREELRRLEEELRRVFEESRRRSERSKKELDKIVKEAEKASKRSLDKLKRVFDELRRRGLPEEVLDELKKLLDEIERVNRDVLKKIRELLREIEELNREVIDRNKKTLDKITEDLRRRGADEDVLRDARELIERDREELERVLRDSDRLVREIKKRIEEMLKRSEDLIEEIERRAR

SEQ ID NO: 3883 - protein, 177 aa, Artificial Sequence; identical to SEQ ID NO: 3882
  Synthetic

SEQ ID NO: 3884 - protein, 182 aa, Artificial Sequence
  Synthetic
SEVERVLKEIEDLIEEIERRAKTVLEEIDKLTKEIEEVVKRMLDRDRELIKTAEDLLRKNKESREELKKMLEDSRELNTRLKKRIRELHRESKELVDKIRKELDDLLKRIEKRVKEIKDRLRDDRVRKALEDLLRKVEEVVRRVREELKKLERKDREVVRKVEEDSERSLRELEKVADEARK

SEQ ID NO: 3885 - protein, 182 aa, Artificial Sequence; identical to SEQ ID NO: 3884
  Synthetic

SEQ ID NO: 3886 - protein, 182 aa, Artificial Sequence
  Synthetic
SEVEKVLRELKELTRRIREEAERLLREDERLLREAERIARELLETNKRLIEEIERRLRERKESKEELDKLLKESEDLNREIKKTIDDMVRKSEKLNREITETLDRLHKESKKVVDDIKKRSRDERVKKDLEEVRKRDREVVEEVRRRSEKSKEDVRRLVEKIRKDSEDSLKELKEVVEEARR

SEQ ID NO: 3887 - protein, 182 aa, Artificial Sequence; identical to SEQ ID NO: 3886
  Synthetic

SEQ ID NO: 3888 - protein, 182 aa, Artificial Sequence
  Synthetic
DEVEKMLEELKRLTDKIREDAERLLKRSEELTEEIKRLIDELLKEIEELIKEARDIVRRNPESREELDRVLEEIKRLVEKILRDIEDMLRKNEELVRRIKETIKRLHDESKKRVKEVEDRLRDERVRRELEKVEREDRKVVRDAEEELKKSRKKSEDVVKEAKERLEELLRRVKRVVDEVRR

SEQ ID NO: 3889 - protein, 182 aa, Artificial Sequence; identical to SEQ ID NO: 3888
  Synthetic

SEQ ID NO: 3890 - protein, 182 aa, Artificial Sequence
  Synthetic
SEVERVLKEIEELTRRLREEAEELLERSERLTEKIRRRAEELLKRNEDLIEKIERDLRRNREKREELEKMLKTSEDLNREIRDELKKLLEENEKLLRDIKRRIREMHKRSEDLVREIERRLTDDRVKKALDELRRRDREVVKRLEEELEKSKKKSEDVVREVEEKSERSKRKLERVADEARR

SEQ ID NO: 3891 - protein, 182 aa, Artificial Sequence; identical to SEQ ID NO: 3890
  Synthetic

SEQ ID NO: 3892 - protein, 179 aa, Artificial Sequence
  Synthetic
SEAEKLLKEDEDLIRKARDEIRKVLEDDERLIEEVERKSREMLKRIKEIIDDMRKRIRGDELLEEARERIERLIKTLEDLNRKSEKENRDSLRRLERLLEELDRLNAKSLDELRKRIGELKEVVEEVRKSRKKSEDVLREVERELKKSFEKSKRVNDDSKKKLDELKREADEVIKRLKD

SEQ ID NO: 3893 - protein, 179 aa, Artificial Sequence; identical to SEQ ID NO: 3892
  Synthetic

SEQ ID NO: 3894 - protein, 179 aa, Artificial Sequence
  Synthetic
SRAEELLKRDEELIDTVRRRIEKMLREIKEIIDRVKRKSEKMLEDDERLIREVEKRVRDEDLLREVAERNKKTIKEIRDLNDRSRKEIKDLIRRLKKLLDEAREENEKSIRELRKEAGQLEEVLRELEKSRKKSEEVLERVKRELEKLERRAEEVNKESEDRLRESEKESKKVIDELRR

SEQ ID NO: 3895 - protein, 179 aa, Artificial Sequence; identical to SEQ ID NO: 3894
  Synthetic

SEQ ID NO: 3896 - protein, 179 aa, Artificial Sequence
  Synthetic
RRAEELLRTIKEIIKRIDDELKRVLDDDDRLIDELRKESERLLEEIERIIRRIEREVRGEELLKRVTDIIRELERRLEELNKRSRDLNKRSIEKLRELLERVKREIEDLIRKLEKEIGEREEVLRELRKLEEEAKAVIDKARRELERSERKSEELNRESKRRLEELSRRAKRVIDELRK

SEQ ID NO: 3897 - protein, 179 aa, Artificial Sequence; identical to SEQ ID NO: 3896
  Synthetic

SEQ ID NO: 3898 - protein, 179 aa, Artificial Sequence
  Synthetic
DEVRRLLKEIEDIIRRIEEDIRRMLEKDRKLIEEVERKSKEMLDRDKRLIEELEKRLRGEEFLEEAERRNRKTIEDIRRLNRESEKENEKSIRDLEELLKRVEEEIRRLVKKLTDRIGELEEAVRELDRLRREAEEVLDRVRKKLDKSRKDSERVNEESERRLERSAEESKRVLDELRR

SEQ ID NO: 3899 - protein, 179 aa, Artificial Sequence; identical to SEQ ID NO: 3898
  Synthetic

SEQ ID NO: 3900 - protein, 187 aa, Artificial Sequence
  Synthetic
DVREELKKVVDKAEKVSRKSRDDLDKVRKRVEEVNRDNERRLREIAKKVKEVLRDIDRKRRDESLKRLIDTIEKLLRDLERTNEKLDDESRKLLEDLARKVEELNDRARKELERLRERVKKVEEDNKPKEVVKRLLEDVDRLIREVEKESKRLLDEIEEMIEELKRRAEENLKTIEDIIKDVTEKAT

SEQ ID NO: 3901 - protein, 187 aa, Artificial Sequence; identical to SEQ ID NO: 3900
  Synthetic

SEQ ID NO: 3902 - protein, 179 aa, Artificial Sequence
  Synthetic
REVEEVLKTVRKLIEELERSSRKSLKEVKELLEKLEEDARRSLKRVKELLKELEDRSRTVDSKDIKRVVEEIEEDIRRSNKELEDLLREIRRKIEESNKENRKRAEDIIRELAKALKDVDEEAKKRIEDLIRELEELLRESSDRHRKLDEELKKLLKDVTDAHRRLMEELRKLLEDIET

SEQ ID NO: 3903 - protein, 179 aa, Artificial Sequence; identical to SEQ ID NO: 3902
  Synthetic

SEQ ID NO: 3904 - protein, 179 aa, Artificial Sequence
  Synthetic
DEVETILRDIKRLLREIEELARKSSKKFKELLERLEETARRSLTRIERLLEEVEDISRTVDRKEIEDKVREIKKEVDEMNKRLEDELKKIKDDLERSNEELRRLIEEIKDRVAKRLKDVDEDAAREIEKLKRELERLLEEASRTHEELTRRLEKLLEDATREHERLKRELEKLLEDIKK

SEQ ID NO: 3905 - protein, 179 aa, Artificial Sequence; identical to SEQ ID NO: 3904
  Synthetic

SEQ ID NO: 3906 - protein, 179 aa, Artificial Sequence
  Synthetic
REVEEILRKIRELLEELRKRVEESRRRIEELLKKLEEEVRESEKDVRRLLRELEEISRTRRREEIARRMEEIKEKARKSNEELKKLMEEIKERVKRVNDELRKLAEDIKEKVRKDLKDVDEEAAKEIEKLVKELEELLKRASDKHRKLSKDLEDLLREVTERHRRLEKELEDLLREIER

SEQ ID NO: 3907 - protein, 179 aa, Artificial Sequence; identical to SEQ ID NO: 3906
  Synthetic

SEQ ID NO: 3908 - protein, 179 aa, Artificial Sequence
  Synthetic
SEVEKLLEEARRLLKELEDSSRRSVEEAKRLLEELKRRVEESVRRIRELLKDLERLSSRVDREEIEKEVRRIEEDVRRSNDELRKLVEDILRKLRKVNEENADLVRRIITRLRDALKDVDERAKEALRELEKRLRDLLRDSSRLHEDLARDLKRLLDEVTEEHDKLRRELRKLLEDIKT

SEQ ID NO: 3909 - protein, 179 aa, Artificial Sequence; identical to SEQ ID NO: 3908
  Synthetic

SEQ ID NO: 3910 - protein, 179 aa, Artificial Sequence
  Synthetic
SEVEKVEEDVKRLLKEIEDSSRRSLEKAKRLLEELRRSSEESLKRIRDLLEELRELSRTVDSKDIADRARKIAKEVDDSNKRNRELVKRIIEELERVNRENEEKLKKIKEDLRRSLKDVDEEAKKRIEELKRELEELLKKSSEEHKKLVKELKELLKKSTEDHEKLKRDLRKLLEEIRT

SEQ ID NO: 3911 - protein, 179 aa, Artificial Sequence; identical to SEQ ID NO: 3910
  Synthetic

SEQ ID NO: 3912 - protein, 178 aa, Artificial Sequence
  Synthetic
DSEDLMRRVKEELDKLVKDSRKRSEDLKRENEELLRRSEEALEKSVRDADRLFEEIKRTKDKKEELLRELKKLLDELREHSKRVLERNREILERNKKRNKEANDRNKEILDRIREEIKRKGADRDVLKTLKDLIRELKRHSEEVEREDKETTDRLRRHSEKALRTNEEIIRRIEERAR

SEQ ID NO: 3913 - protein, 178 aa, Artificial Sequence; identical to SEQ ID NO: 3912
  Synthetic

SEQ ID NO: 3914 - protein, 182 aa, Artificial Sequence
  Synthetic
SVDEALRDIERKVEELMRESDERLRRVKKEVEDNVRRSEEELKRIADEMKELLDRARERGVDEEILRRVEEELRRLAEEIKKINRDAEERLRRLIKEVREINEDVRRKLEELREELRRDGGKVEDLVREVLKKLKELIDRWRDLSRRLKERLDTLIKEHHELSKRLLERLKRLIDEARKKLN

SEQ ID NO: 3915 - protein, 182 aa, Artificial Sequence; identical to SEQ ID NO: 3914
  Synthetic

SEQ ID NO: 3916 - protein, 182 aa, Artificial Sequence
  Synthetic
SEVEELKREADDVNRRAEELARETLKKIEKVNREVKRRLEEALREIEELLRRAEEIVRRNEDKDRAIEEVRRRLDELRRKVEKVNEDNRKLLEELTEEVKRVNDENKKLLDDLADKVEKKLTTEEARKRLEEVVRHNKKLDDEHRKALDELRKHNEDLDRRSKEELDKLRKRLEDLLRKVKE

SEQ ID NO: 3917 - protein, 182 aa, Artificial Sequence; identical to SEQ ID NO: 3916
  Synthetic

SEQ ID NO: 3918 - protein, 182 aa, Artificial Sequence
  Synthetic
REVEELLKEIEEVLKKSERLSRESLKKIREVLERIERLARENVKRMKEVIDRVRELAERNEDRERLIEDVKRLIKEVSDSNRELDERSKKLLKELRDENERLSEESKKELERIRKKVEDKLTTEDARRALEELRKRVEEVNKKSRDDLERLTREAEELNRKNEEDLRRLEKEVKDLLDEIRR

SEQ ID NO: 3919 - protein, 182 aa, Artificial Sequence; identical to SEQ ID NO: 3918
  Synthetic

SEQ ID NO: 3920 - protein, 181 aa, Artificial Sequence
  Synthetic
SSRETVKRLTEEARKLLEDWKDRNRDVERKVEEIIERIRRTNEKSERDARRKLEEVDKRRRDEEVEKVREELERLLEESHRKVEEVVKEVEELVRESTEKVRRIVEKVKRLLEELTRLMEAGERDTEELKREIERILEELRRLMKEDKEELERILERLRRLAEEDKKENEEILDRVDKKAK

SEQ ID NO: 3921 - protein, 181 aa, Artificial Sequence; identical to SEQ ID NO: 3920
  Synthetic

SEQ ID NO: 3922 - protein, 181 aa, Artificial Sequence
  Synthetic
STEETITDLKREAEEILRRWREENKRVSDEAAESVKESDKTNKKSKDDLKRVLDEVDTKERSERVKTVIRKAEDLARRSHEKNREVNERLKKLLEESTRTVDTIIRELRRILDDIKRKVDAGERDAKELEDEVREALKRIRKLIEEDRRKLKRILDEHRRLTEEDRERNERVLRELREDTR

SEQ ID NO: 3923 - protein, 181 aa, Artificial Sequence; identical to SEQ ID NO: 3922
  Synthetic

SEQ ID NO: 3924 - protein, 181 aa, Artificial Sequence
  Synthetic
SVDESLEEIRKEVERLLRKWKEDNKEMRKRIRELLEDWRKKVEDSKKRAKDLIDEVKKRRDDERVEKVRKELEDLLKESEEKVREVERRVKKLLDESTKKVKEIEKEIRDIIRELDKRLKAGKRDTRELEKEAEDALRRLKKLIEEDRRELEKILKELEDLMREDTKENEKILREAEERSR

SEQ ID NO: 3925 - protein, 181 aa, Artificial Sequence; identical to SEQ ID NO: 3924
  Synthetic

SEQ ID NO: 3926 - protein, 181 aa, Artificial Sequence
  Synthetic
SVEDEIRRLTEEIERTLRRWREEVKRSEDRAEESIKRSDEKNKESKERLDKVLDEARRRRDDEEVKKVIKEVEELAEESNRRNKEVNDRLKKLLEDSKRKVEEIVRRVKKAMEDLKRLLDAGERDLRELLKEVEDVLEELKELIKRDTEENKRILDEHKRLTEEDEKRNREVLERLKRKTD

SEQ ID NO: 3927 - protein, 181 aa, Artificial Sequence; identical to SEQ ID NO: 3926
  Synthetic

SEQ ID NO: 3928 - protein, 181 aa, Artificial Sequence
  Synthetic
ESEETLKEVKKEIEKLIKRAEEINRESAERLKRILEEWKKEVDRSEKRLREVLDEVRRRRNTEEVEKVIREVEELVKRSRDKVRKIEKEVRDLLKESTDELKRIVEEIEEAVRDIERKLRAGKRDRRELLEELKRVLDRLKKLIDDDRRKNEKVLRDLEKLMREDADENREVLKRLEDKAR

SEQ ID NO: 3929 - protein, 181 aa, Artificial Sequence; identical to SEQ ID NO: 3928
  Synthetic

SEQ ID NO: 3930 - protein, 179 aa, Artificial Sequence
  Synthetic
SDEERVIKEVEDLIRRIREDNKRLLDEAEKIIRRVAEDNKKLVEDHRRMLRKIDEEAKRGRDEKFLKDLVERSERVVEESRRHVERNEREIREMLERLREHVERNERELREILERVVRKVGKETEDVKRLEEKVRKLLEESKRKLKRLAEEVRKLIKDSRDKIRELERENKEIIKKVKD

SEQ ID NO: 3931 - protein, 179 aa, Artificial Sequence; identical to SEQ ID NO: 3930
  Synthetic

SEQ ID NO: 3932 - protein, 179 aa, Artificial Sequence
  Synthetic
DREKEVVDTLRRLIEDARRDNKDLVETHRRLLEDLERDNRELVRTHEERLEEIERRARRGDDDTFLKKLEDESRDVVRDSERHLEENKRKSTKIVKDTKDHVDRNRKKIKKILDEAVREVGKEAEDVRRLEKEVEELLRESDRRVEDLERKNREILKRSEDLIRRLKEENRRIIEKVRK

SEQ ID NO: 3933 - protein, 179 aa, Artificial Sequence; identical to SEQ ID NO: 3932
  Synthetic

SEQ ID NO: 3934 - protein, 179 aa, Artificial Sequence
  Synthetic
DDERRVVEELERMIRELEKKIREIVKRHEEALKRLKEDNDELSKRHKKMVEEIKRRADEGRDDTFLKKLVEDSERVVEESKRHVDRNKEKSERIVRTTAELIKRLKEEIKKVLEDAVRKVGKDTEEVRRLKREVEELLKRAEELLKRLEDRNRKILRESEEDIKRLERENREIITRVRT

SEQ ID NO: 3935 - protein, 179 aa, Artificial Sequence; identical to SEQ ID NO: 3934
  Synthetic

SEQ ID NO: 3936 - protein, 175 aa, Artificial Sequence
  Synthetic
KELDEIIRRVEELIKDDERRNREVLKRSDESTKESHDKARRILEESEKTTEDIKRKVEKDGNTEKVERDIRRNNEELRKVLRELEKEHRENNKRLDEMLDRSRKNNDDIRKEIREKVKDEDKIRRLERESRELLRDSEDKVRKSKRKDEENLKRIEEEARRSEKRDEELLREAAK

SEQ ID NO: 3937 - protein, 175 aa, Artificial Sequence; identical to SEQ ID NO: 3936
  Synthetic

SEQ ID NO: 3938 - protein, 175 aa, Artificial Sequence
  Synthetic
RELDEIIKTLEKLIEDSHREAREIVKEVKKRLDDDKRRNEEVLKESRETTERIRKEIEERGRTEEIEEKIRRNNRRLEKLLDESEKNNRRIIDTIERLLRKLEELHKKIIDEIRKKVKSEEKIRRLEERARRNVEEMRKLAEELEKESRRILKESAEAVKRSKDEDRKLLEEAKK

SEQ ID NO: 3939 - protein, 175 aa, Artificial Sequence; identical to SEQ ID NO: 3938
  Synthetic

SEQ ID NO: 3940 - protein, 175 aa, Artificial Sequence
  Synthetic
SETDKVIEESEKTNRDIKRHSEEVVKDSKRTNTEIERTVEKMIRELEEILERIKRLADNGVPKEDLKRLVDELKERIDRILKELEELLRTDKKRISDALRRDEELAKKDKDEIDKKLDDKDKAKKLKDETDRILETSERLLKALRDETDAIKRKVEELVRRVKEELDRILKKTED

SEQ ID NO: 3941 - protein, 175 aa, Artificial Sequence; identical to SEQ ID NO: 3940
  Synthetic

SEQ ID NO: 3942 - protein, 175 aa, Artificial Sequence
  Synthetic
SETDRVVEESERTNKEIERHSEEMVRDSERTNKEIEEHSREVIERLREILERIERLVRKGVPKDELKKLVEDLRRRAKEALDRDRELLRRDKEKIDEVLKRDTELAERDKREIDKKVRDEEKMRRLKEETDRILDKSRRELKRLKDETDKLLEDSERLLREVEKTLRRILEEARK

SEQ ID NO: 3943 - protein, 175 aa, Artificial Sequence; identical to SEQ ID NO: 3942
  Synthetic

SEQ ID NO: 3944 - protein, 175 aa, Artificial Sequence
  Synthetic
SETEEVVKTLKRLLEEIKKHSDDAVRKSEETNKRIREEVERVIKRLKELIEEISELVKSGVEKERLKELVDRVKTALDRALDELRKLLEDDERKIKTVLDEDKKLVEEVKKRADEKASDEEKLKRLKDALDRILEESKRLADELKKRTKDILDEAKDALRKIKEELDKLVEDAER

SEQ ID NO: 3945 - protein, 175 aa, Artificial Sequence; identical to SEQ ID NO: 3944
  Synthetic

SEQ ID NO: 3946 - protein, 175 aa, Artificial Sequence
  Synthetic
SETDKVVREVEELIRRLEEHSRRVVEKSERTNEEIERHSRDVIRRSKEINDRIEELARNGVPEDDLRRLVKKNKEDNDRALEEDKRLLDTDKEEIDRALKRDEEIVRRIKEEIDKKVTDKDKMKRLKEELDKLLDDSRRLMKRLKDETDKILDKSRDLLAKTKRESDRILEEAER

SEQ ID NO: 3947 - protein, 175 aa, Artificial Sequence; identical to SEQ ID NO: 3946
  Synthetic

SEQ ID NO: 3948 - protein, 175 aa, Artificial Sequence
  Synthetic
SETDKVVDDSRKTNEDIKRHSEEVIRRLEELIREVEEHSRRVEDEVRRILDEIRKLAEDGVDERDLRRLVKKLEEEIDRVLEEDERLIREIKKEADRVLETDKRLAEEDKKRIDDKATDKDKATELKKDTDRILKESEDALRRIKKELDDLLRTSKRLAEELKKELREILERAKR

SEQ ID NO: 3949 - protein, 175 aa, Artificial Sequence; identical to SEQ ID NO: 3948
  Synthetic

SEQ ID NO: 3950 - protein, 175 aa, Artificial Sequence
  Synthetic
SETDEVVERLEKILKDIREHSERAIKKLEDILREIERHSRKVIRDSERINTEIKKLAEAGVPEKDLTKLVEDNKKRNDDVLDEDRKLVEELRERAERILRTDKRLVDDLKRKADEKLTDKDKLTTLKKKLDDLLDTSRRLVEKVEEDLRRILEASKRMLEETKKRSKEILDRIRK

SEQ ID NO: 3951 - protein, 175 aa, Artificial Sequence; identical to SEQ ID NO: 3950
  Synthetic

SEQ ID NO: 3952 - protein, 175 aa, Artificial Sequence
  Synthetic
SESEEVVREVDKILKEIRKHSKDVIEKLKKLIDDIRRRVRKVIRDSEEINKRIEDLAREGVPEEDLERLVEENKRRNDEVLKRLKELAERVKEEADRALERDKRLVEELKKRIDDKVTSEEDMRRLKERLDKILDDSREMLKRLKDELDEVLEEVERLLRETKKRSDEILKRIKD

SEQ ID NO: 3953 - protein, 175 aa, Artificial Sequence; identical to SEQ ID NO: 3952
  Synthetic

SEQ ID NO: 3954 - protein, 176 aa, Artificial Sequence
  Synthetic
SEIEDVIRRAEELIKEDKKRVEDVVREIEKLIRDDARKVRRAIEELKRLLREIEERVREEKEKRDVLERLVRTIKEEIDRLLKDNEDSIRRITKRLRDILRENRESLERIRRELDRRLTVKEEAERLRRELEDLHRDVKRLIDELEKDLRRLLEESKRRADRVKEELRRLREEVRK

SEQ ID NO: 3955 - protein, 176 aa, Artificial Sequence; identical to SEQ ID NO: 3954
  Synthetic

SEQ ID NO: 3956 - protein, 176 aa, Artificial Sequence
  Synthetic
SEADKAAEDAKRLIDKDREDVERAVKRAEDLIEKDREDVDRAIKESEELNKRAEDEARRRKDAREKVKRLADEDKKRNEEALRRNRKSIEDIRRDLEKALRDNEKTIEDIRREIEKLASDEEKARRLKEEADKVAKESKELADRLKERADRLHKRARELAERTKEDTDRLVEEAKR

SEQ ID NO: 3957 - protein, 176 aa, Artificial Sequence; identical to SEQ ID NO: 3956
  Synthetic

SEQ ID NO: 3958 - protein, 176 aa, Artificial Sequence
  Synthetic
SEIDEVVKEIEKILEDDKRRVDEAIEELEKLIREIREEVRRVIKESEDLNKEIRDRVRKNKEKREDLDRLVEEDRKKNREILETLKELIERIRREIERLLRENEETLRDIERKIREKMTDKDKAERLRRELKKIMEDSRRLADEIKKRLDRLLEEVKEEIERTKRETDRLLEEVRR

SEQ ID NO: 3959 - protein, 176 aa, Artificial Sequence; identical to SEQ ID NO: 3958
  Synthetic

SEQ ID NO: 3960 - protein, 176 aa, Artificial Sequence
  Synthetic
SELDRVVEEIDRLIREDEKEVRDMIRESEKLNRENEETNRKLLEDWDKLSKDIRDRVDKNKEKEEEAEKLLRDSERLAEDVLRRDKETVERDREKNKKVKERNERTIKEIRDRIEKKMEDDKKARELKEKLDELKKRSEKLLEDTKRETDKLHERSRRELEKLRRKDEELVKRVKD

SEQ ID NO: 3961 - protein, 176 aa, Artificial Sequence; identical to SEQ ID NO: 3960
  Synthetic

SEQ ID NO: 3962 - protein, 176 aa, Artificial Sequence
  Synthetic
SEIEEVVERIERLIKRIKEEVERALKESEDLIRDIERRVRELLEEWDRLSERIREVVERNPEKREDLKRLVEESRREAKRVLDELRRLVEEDRRRNEELLRRLEELIREIEDRIEKLAEDKDELRRLKEELRKLLEDVKKLLEESKKKTDDLLKRAEDELRKLKEKDDDLLRKVKD

SEQ ID NO: 3963 - protein, 176 aa, Artificial Sequence; identical to SEQ ID NO: 3962
  Synthetic

SEQ ID NO: 3964 - protein, 176 aa, Artificial Sequence
  Synthetic
EELDRVVEELDRLIRDNKRRNDEALKESDRLIRENERRNRKAARDWEELSKEIEDRVRKNKEKEEEVERLVRRSEKELEKIERADEETVRRDRELNKKVRDDDRRTIEDIEKKARELLEDKDKLTTLRKKLDDLHKESRRELERSKKKTDDLHRKSREEVRKLREDDERKLREIKK

SEQ ID NO: 3965 - protein, 176 aa, Artificial Sequence; identical to SEQ ID NO: 3964
  Synthetic

SEQ ID NO: 3966 - protein, 176 aa, Artificial Sequence
  Synthetic
SEADEAAKKIEKLIEDNERKNRKALKEWDELTRENEKRNRDAIKESEDLIKEAADEVRRRKDAREKAKKLAEDDKRRNEKALEDDERTLRESKKRAEEALREDRETLRRIEEEIKKLASDEEKARRLREEAEELHRRSEEAARRAEKKDREAHKRSREAIKRTKDDTEELLKEAER

SEQ ID NO: 3967 - protein, 176 aa, Artificial Sequence; identical to SEQ ID NO: 3966
  Synthetic

SEQ ID NO: 3968 - protein, 176 aa, Artificial Sequence
  Synthetic
DEIDKVVRKIEKLIDDNRRENEEMLRESEKLLKENEKKNEKAIRESEELIRRIEKRVRENKEKEEELKELVDRDRERNKEVEKEDRETVKRDRDLNEDALRRDRETLERIKREIEKRAEDKDKARRLEEELKELHKRSKEELEKSKEKTDRLHDKSRRLIEETERRTEELLERVRR

SEQ ID NO: 3969 - protein, 176 aa, Artificial Sequence; identical to SEQ ID NO: 3968
  Synthetic

SEQ ID NO: 3970 - protein, 183 aa, Artificial Sequence
  Synthetic
SVEDEVERLERDAEEISRRSETELRRLKKEVEDLNRESKKLLDELREEMEKILKKVREDSDEEELERLIREARKLLKDLADKIRRVDEESKRILDELARRIKKVNDDLKELVERLSRRAREIKDKDEVKRLVEEIERLLKRAEELSRELVRRIEKLIRELAEESRRLVDEIREVLKRLKDRAD

SEQ ID NO: 3971 - protein, 183 aa, Artificial Sequence; identical to SEQ ID NO: 3970
  Synthetic

SEQ ID NO: 3972 - protein, 176 aa, Artificial Sequence
  Synthetic
SEIETVLEKLKRLLEEDRELVKRVEDKIRRIIEEDEKTVRDIKKRLDDILREIRDVLEKRKEVREELKELLERVEEVIKDVLRKNEETLERLERELKRALKRNDDTLKRLREEAARLLEVEEELKKVEDELDRVRKETERIIKELREELEELHKRARDLLKEVRDELRKLLEEAKK

SEQ ID NO: 3973 - protein, 176 aa, Artificial Sequence; identical to SEQ ID NO: 3972
  Synthetic

SEQ ID NO: 3974 - protein, 176 aa, Artificial Sequence
  Synthetic
SEIEDVVRRIDELLREDKRRVDEVLERNRKLIEDDERLSREIARELDEIIKRLREVVKSNKEDRDTIRRLAEEAREVIERVDRENEKTKRELEKHSREALRENEDTIRRITEELKTRIKVREEVRKLKERLDKILEDTRRLLEESKRRLDRLHERHRETSEDMKRRIDKLLEEVRK

SEQ ID NO: 3975 - protein, 176 aa, Artificial Sequence; identical to SEQ ID NO: 3974
  Synthetic

SEQ ID NO: 3976 - protein, 176 aa, Artificial Sequence
  Synthetic
KEAEDVVREVEELIDRDRKLVERVLRENERLLKEDRDTVKKVLEELEEILKDIERVVRERKEVKEEVDRLIKELRDLIEKVLRDNKESIDRIREHSKRALETNERTNKELEETLRRLLDIEELLRRLKEEIERLLERSRRLVKESEERLDRIREETKRELDRVEEKLRRLLEEVKR

SEQ ID NO: 3977 - protein, 176 aa, Artificial Sequence; identical to SEQ ID NO: 3976
  Synthetic

SEQ ID NO: 3978 - protein, 176 aa, Artificial Sequence
  Synthetic
SEIEKVVEEIKKLLKELKETSERILRRNEKIIKEIEETSREVLKELERILEEIEDVVRKRKEVREEVEELIKELEERIRRADKRLEELIKELRDHSEKANKKIEDIVRRIEERLRRLLRDKDRLKRLRDELERILRDHERLSRESKDKLDKLLERHKELSDEVRKKLKELRDRADT

SEQ ID NO: 3979 - protein, 176 aa, Artificial Sequence; identical to SEQ ID NO: 3978
  Synthetic

SEQ ID NO: 3980 - protein, 176 aa, Artificial Sequence
  Synthetic
REIEEVEKEIERIIERIERTSRRVKEENDRLLEEIKRRSEEVKKRNDDIIREIRRVVEEDKKNREEVKRLIEELRKHSRDADEELRELIKKLKRHSDEANKTLEELIKELRKRLEERARDERRLKELKRKLDKLREDHERLSRRSDEELRRLEEEHKRLSEDSKRELDKLLDEVRK

SEQ ID NO: 3981 - protein, 176 aa, Artificial Sequence; identical to SEQ ID NO: 3980
  Synthetic

SEQ ID NO: 3982 - protein, 176 aa, Artificial Sequence
  Synthetic
DEIERVLEEAKKLIRDLEEHSRRVEEENKRLLKEIRETSERVKRELDRILEEIRKTVERRKEVREELDELIKTIRKRIKEADDELRRLIEELEEHSRRALETDKKILDEIEKRLRDLFKDDEKLRRLEEELKRLLDESKRLLEESEDELRKLEEEHRKLSEEVKRRLDELKKEVET

SEQ ID NO: 3983 - protein, 176 aa, Artificial Sequence; identical to SEQ ID NO: 3982
  Synthetic

SEQ ID NO: 3984 - protein, 176 aa, Artificial Sequence
  Synthetic
REIEEIVERVKEIIDRIRRHSKEVEKENEKIIERIRRRSEEVLRTNEKALRDIERRVRERKEVREELRKLIEDLRRHSDRADEELERLIETLKRHSKEALDRDRELIKRLEDDLRRAAKDKDELKRLKEELERLLRESKKLVDESKRRLEELLREHRELSKRSRDKLDELLRRVEK

SEQ ID NO: 3985 - protein, 176 aa, Artificial Sequence; identical to SEQ ID NO: 3984
  Synthetic

SEQ ID NO: 3986 - protein, 176 aa, Artificial Sequence
  Synthetic
SEIEEVVRRIREIIEEIRRLSEAALERNKRIIDEIRRTSKRVKEEIERIIRDIRRVVEERKEVREEVERLIRELKKTIEDANEELKRLIKELRDHSEKVNEEVRRALEELKERLDRLLRVREDVRKLKEDLKELLKEHKRLSEESKKRLERLLEEHERISEELKRRLEKLLKEAED

SEQ ID NO: 3987 - protein, 176 aa, Artificial Sequence; identical to SEQ ID NO: 3986
  Synthetic

SEQ ID NO: 3988 - protein, 176 aa, Artificial Sequence
  Synthetic
SEIEEVVKKVKKIIDEIRERSREALERNEKILEELKRHSEEVTRRAEKIIEEIKRVLEKRKEVRKRLRELARKLEELLKRALRRDEEIVAKLRRHSEKVNRELEEDIKRLKEELKTRMKDKDELTKLEKELEDLREEHRKLSKDSKDRLKKLLDESRELIERLKEKLKRLLEEAER

SEQ ID NO: 3989 - protein, 176 aa, Artificial Sequence; identical to SEQ ID NO: 3988
  Synthetic

SEQ ID NO: 3990 - protein, 181 aa, Artificial Sequence
  Synthetic
SEVEEMLKRLDDILKKHRELVKEMKEELDRVIETHRRLVEEVRRRLEKSNDEIDKLVKADVREDELRKLLTDNERLNREINRTSKDVVRKLEDLLRRAEEESRRVVKEVRKVIDDIRRRTRDERVEKALKEVRERLERSHKKAKEDLDRVREEARKSHEDVKRLSEEDRKKSEDLADEVRR

SEQ ID NO: 3991 - protein, 181 aa, Artificial Sequence; identical to SEQ ID NO: 3990
  Synthetic

SEQ ID NO: 3992 - protein, 181 aa, Artificial Sequence
  Synthetic
REVEEALERLRKLIEDDRELVKRAKEKLDKLLKDDRKLVEDVLRELKRSNDEVKKLVDSGVSEEELKRLLDENRRLNEKINRENEESIKRVEELLEEIERRNRETLERIKRLLDDVRKKTTDKRAEEELRRVKEEVDRVLEESKRRLDEVRRRLERIEEESRTKSEEDRKRSEDLVREAER

SEQ ID NO: 3993 - protein, 181 aa, Artificial Sequence; identical to SEQ ID NO: 3992
  Synthetic

SEQ ID NO: 3994 - protein, 181 aa, Artificial Sequence
  Synthetic
SEVERLVEDAERVIDEHRKLVTEMERRLERVNREDEKLVRKVLEELKKSNEEIKKLREDSVSEEELEKMLRKNEELNKEANERNKDSTRKNKELNKRINEDSKRVVKKLRDLLKEVEDRTTDERAKKLLDEIRKKLDDSNREVEKRSRDDERHTERVVRESKRLSEEDKKRSDELADETRK

SEQ ID NO: 3995 - protein, 181 aa, Artificial Sequence; identical to SEQ ID NO: 3994
  Synthetic

SEQ ID NO: 3996 - protein, 181 aa, Artificial Sequence
  Synthetic
SRVEEVKKELDDLIRRHKELVEKVRKELKDLLDKHERLVEEAKKEIEKLIETLKRLAENGVSEKDAEEILKEIEKLLKRIEEDSKRVLDEIKKLLDDIRKESKKVLDDIRRVIDRARKETTDRRAEDELRKVRKEVERSNKEVEEILDDVRRKVEESDKRVKEILKKLREDVKKLLDEVRK

SEQ ID NO: 3997 - protein, 181 aa, Artificial Sequence; identical to SEQ ID NO: 3996
  Synthetic

SEQ ID NO: 3998 - protein, 181 aa, Artificial Sequence
  Synthetic
SEVEKLVADADKLIKDHRKLVEEAKKRLDEVNERHRRLVEEVERRLDKSNKELEDLVRSGVDEDDARRVLEDNERLNKEANDRSKEMLDRNRDLNRRINETSERILKKIEDLLEDVRRRTDDRRADEELRRISERVKRSNEDVRKKSEDDKRHTDESDRDVKRLSKEDRERSETLMDRVRE

SEQ ID NO: 3999 - protein, 181 aa, Artificial Sequence; identical to SEQ ID NO: 3998
  Synthetic

SEQ ID NO: 4000 - protein, 181 aa, Artificial Sequence
  Synthetic
SRVEDVERELEEEIDKHRKEVEDAKRRLDELIRRHKEEVKKLKKKLDDLIEELERLARNGVDEKTIEEVVKRIREELEAIEERSRRVLKKIEDVIDELRKRSEEVVRRLEKLLKDVEREVDDERAKRSLDRVREKIEKSDRTAKDLLKKVEEEVRKSNERVKELLKRVKDAVDDLLRRRRK

SEQ ID NO: 4001 - protein, 181 aa, Artificial Sequence; identical to SEQ ID NO: 4000
  Synthetic

SEQ ID NO: 4002 - protein, 181 aa, Artificial Sequence
  Synthetic
DEVEEVVKRAEDVIRTHKELVKKAKEDLDKIIEDIERELKKMLEDLERSNRRVEELVRGGVDERELDKLLEENRRLNEEINDRLEKLVKEVRKVLEKIKKDSDDVVRKLEKLLKDVERRSTDERVKKILDDIRRELEESNKKVEEDLRKAEEDLEELLRRARELSKEDEKKSRKLVEDARR

SEQ ID NO: 4003 - protein, 181 aa, Artificial Sequence; identical to SEQ ID NO: 4002
  Synthetic

SEQ ID NO: 4004 - protein, 181 aa, Artificial Sequence
  Synthetic
DEVDEVVKRLEDIIRKHETLVKKAKEDLDRVNEEDTKLIRDVLRRLKESNEEMERLVRSGVSEDDARRLLDENRKLNEEANRRNKKSLEDNSRLNEKLNRDSKRVLDEIRELLKDIERRSTDERVKEELRRVEEDVKKSDEDARRLSKEDRDHTRENFKRSEELSRRDEETSRRLMEEVKR

SEQ ID NO: 4005 - protein, 181 aa, Artificial Sequence; identical to SEQ ID NO: 4004
  Synthetic

SEQ ID NO: 4006 - protein, 187 aa, Artificial Sequence
  Synthetic
KDVEDLVRKAEELLKRHREDVTRLLERLKKVNKDHERLVKELKRRLEELLREVRELVERDGGESERAKEILRRLVEKAKKLLKEVEERSRKVNRDSEKLLKEIRERSKEVEDRVRKLLKEIEERVRGKDEVERRLRRLEEELKKSHEEVERRLDEVRRHSKRSHDELRKVLRKLEEDLRRLAEEVKT

SEQ ID NO: 4007 - protein, 187 aa, Artificial Sequence; identical to SEQ ID NO: 4006
  Synthetic

SEQ ID NO: 4008 - protein, 187 aa, Artificial Sequence
  Synthetic
SDLEELVKRAEKLLEEHKELVKRLEDRLRELDKRHKEIVERLRKELERLLREIRRIVEEKGGESEEAKELLKKLREEVRKILEEIERTSEKMERDSERLNEEIRKRSKEMLDRAAELLKEIESRIRGVDEAKRKLDELEERLRRSNKELEEKSEENERRTRESNEELERRLEDVRRKLERLREEVER

SEQ ID NO: 4009 - protein, 187 aa, Artificial Sequence; identical to SEQ ID NO: 4008
  Synthetic

SEQ ID NO: 4010 - protein, 187 aa, Artificial Sequence
  Synthetic
KDVEDLLRRLEEIIKDHRREVEELLRELTKLDEEHKEEVRRLTEELERLLDEARRLVEEKGGESEEARKIVKDMEERVKKVLDDIRRESERVVRESERLNKEIEKRNDEVRRRAEKVLKDITDRIRGVDEAERELERVEREVRKSSDKLRRDSKRNKERTRKSNEELERRLEEVERELRRLVAEVEK

SEQ ID NO: 4011 - protein, 187 aa, Artificial Sequence; identical to SEQ ID NO: 4010
  Synthetic

SEQ ID NO: 4012 - protein, 177 aa, Artificial Sequence
  Synthetic
KKVEDLEERLERLLRDAERRVRELLDEARRLLETHRELSKRLLERLEKVNRDIREKAKEKKEEVLTELLKESERLLEEVKKINKEAEDRIRELLKRVDDILKDLKKRIEDLLDEVRKRGLDERLLRRVEKEVEDLLRTVKDLLRRIEEEVRKSLEESKKLLKEVEDHSRKLLEEIRK

SEQ ID NO: 4013 - protein, 177 aa, Artificial Sequence; identical to SEQ ID NO: 4012
  Synthetic

SEQ ID NO: 4014 - protein, 177 aa, Artificial Sequence
  Synthetic
DEDEEVLRRLKELLKTHRKLSEDLLREAEAINEDHRRLSEELLRRLEKLNEEIRRKAKEKDRRVMEKVRKESRDLLEEVKRINEEAKRRSEEVAKKVRKINKEAKDRIDTLLEDLKRRGVDEELLRRVEEEVKKSNEESKKKIKELEEHSRRSNEESERRLREVEEHSRRLLEEIRK

SEQ ID NO: 4015 - protein, 177 aa, Artificial Sequence; identical to SEQ ID NO: 4014
  Synthetic

SEQ ID NO: 4016 - protein, 176 aa, Artificial Sequence
  Synthetic
SEVEDIVRKVDEIIRRLERHNEELRKRVEEVLDRLRRHNEKLDRDVKEIIKEIERVIRGNTDDARELTKRLKEALDRHRKASEDNIRDIRDALRKVEEVSRKNVDDLRDALREVREKLGKKDLLREIEEKVRRLVRKSEELLRRIAEDVKKVIEDSKDSHKKIEDELRELEERLRK

SEQ ID NO: 4017 - protein, 176 aa, Artificial Sequence; identical to SEQ ID NO: 4016
  Synthetic

SEQ ID NO: 4018 - protein, 176 aa, Artificial Sequence
  Synthetic
SEVEDIVRKVDEFLERLKEHNRKLDKEAKELLDRLKRHNEKLDEEAKRLIEEIKRVADENSMDKDRLLAELRKVLEEHRRVSEDNVRRIRKLLDDHRRRSEENMRRIDAVLDKVRKELEDKDLLREIAEKAERVKEESKRSHDEIADEIRKVEEESERSHREIAEELERLSRRLKK

SEQ ID NO: 4019 - protein, 176 aa, Artificial Sequence; identical to SEQ ID NO: 4018
  Synthetic

SEQ ID NO: 4020 - protein, 176 aa, Artificial Sequence
  Synthetic
KDVEDIVREVERLIKELREHNKELVDRAREVLKELKDHNEKLVEDVKRLIEDITRKIRANTDDKEKLLRDLERVLREVKRVSEENIRRIRKVLEKVAEDAKRNVEELRKVLKEVREKLKKKDLLRDIERKVEKLERDSRRLLREIEEEIRKVIERSKELLERIEKELRDLMRELRK

SEQ ID NO: 4021 - protein, 176 aa, Artificial Sequence; identical to SEQ ID NO: 4020
  Synthetic

SEQ ID NO: 4022 - protein, 176 aa, Artificial Sequence
  Synthetic
KEVEDIVEDVKRVLDELRRHNEKLVREVDRLIRELDKHNKELDDRATEIIKRIEEVVRRKSRDKRELVRELEEVLERHREMSERNVRRLERILKEVAREADKNVKDIRRALERVKRELEKKELLERIDEEVKRVEETSRRLLREIAEKVKTLKEKSKRSHEEIRRRLEELADEIRK

SEQ ID NO: 4023 - protein, 176 aa, Artificial Sequence; identical to SEQ ID NO: 4022
  Synthetic

SEQ ID NO: 4024 - protein, 176 aa, Artificial Sequence
  Synthetic
SEVEEIVRRVEKLIEDLKRHNEKLVDEVKKVIDTLRKHNEDLVRRVEEVIKRIEEVIRENRVDKRELLKRLEELLKRVAEEAKRNVKRLREALKEVAERSKENVKRLEDVLEKVKRELEDKDLLRDIAEKVKTLKEDSRRLLEEIADRVRRLEEDSRRLLEEIRKEVERLKEELKK

SEQ ID NO: 4025 - protein, 176 aa, Artificial Sequence; identical to SEQ ID NO: 4024
  Synthetic

SEQ ID NO: 4026 - protein, 176 aa, Artificial Sequence
  Synthetic
SEAEEAAREAKEAIDRLEEHNKKLDEDAKRAIEEARKHNKELDERAKRALEEIEKAARDNREDKEELKKKADRALEEHRKAAKRNIDEARRALDEHRKASEDNAREAREALKRVRRDLRDTDAARRIAEEVKKLEKKSEDSHRKIAEDVKKAEEDSERSHRDIARRAEEVKKKADD

SEQ ID NO: 4027 - protein, 176 aa, Artificial Sequence; identical to SEQ ID NO: 4026
  Synthetic

SEQ ID NO: 4028 - protein, 176 aa, Artificial Sequence
  Synthetic
SEVEKIVREVEKLLEELREDNRDLVRRADKDLERMERHNRKLVKDVEDVLRRIEEVRRANTEDKRELEKEVRRVLKEVADMAKRNEEEIKKVLDKVTRHSEDNVRKIREILEDVRRKLEDKDLLREIERKIREVEEKSRELLREIKKKLEDVARESRRLLEEIARKIEKLSDELRK

SEQ ID NO: 4029 - protein, 176 aa, Artificial Sequence; identical to SEQ ID NO: 4028
  Synthetic

SEQ ID NO: 4030 - protein, 176 aa, Artificial Sequence
  Synthetic
SRAERIVEEVEKVITDLERDNRELVRDVRRLLERLERHNKELDDRITEIIKEILRLAERNERDKRELEKELEKVLDEHRRVLEENIKEIRDVLREVAEHSERNMRKLRDALRKVERDLEKEELLREIKRKVEELEKRSKELLEEIARRVKEVEEKSRDSHRKIRERLKELVRKVRE

SEQ ID NO: 4031 - protein, 176 aa, Artificial Sequence; identical to SEQ ID NO: 4030
  Synthetic

SEQ ID NO: 4032 - protein, 178 aa, Artificial Sequence
  Synthetic
REMEEVLKEAKELLKESNKKAREIDRKIKELLDDSHRKVKETVDRVKRRIEELDRKVKEVKEERLKEELKEEAERVRRDVERLVEELRRENDEILEEHRRLIKELEDENEEVLDRLRKKLRVEEVLREVEKELEDNKRELRESHKEIARELERNKEDIDRLVEEIKRRIEELKKRIDK

SEQ ID NO: 4033 - protein, 178 aa, Artificial Sequence; identical to SEQ ID NO: 4032
  Synthetic

SEQ ID NO: 4034 - protein, 178 aa, Artificial Sequence
  Synthetic
DEMEKVLKEAEDELRRVEKEVREVDKEAEELLERSHRKVRDIVRRVTEELKRLKDKVEKIREERVKKRLKEEIDEVLTRAKKLIDELRKENDDVLRRHRELVKRIKEKLERIREDLERKLRVREMLEKLRREVERVKKEVDDSHREIAKKVERNKKEIDKLVREVEREVEELKKRIDK

SEQ ID NO: 4035 - protein, 178 aa, Artificial Sequence; identical to SEQ ID NO: 4034
  Synthetic

SEQ ID NO: 4036 - protein, 178 aa, Artificial Sequence
  Synthetic
SEVEEVLEDAKRLLKEVEKRVREIDRRAEDLLRRSHEKVRRIDKDVKRLLREVEKKVEEVKEDELKKRLEEELEEILRKHKELAEELKKENEDALKEHEDLIRRLREELEDVLRRLRERLRKEEVLKKVEDDVRRLDEEVRRSHEDIRKKVEDNKKRIDESHEEIRRLAERVKKEIRK

SEQ ID NO: 4037 - protein, 178 aa, Artificial Sequence; identical to SEQ ID NO: 4036
  Synthetic

SEQ ID NO: 4038 - protein, 178 aa, Artificial Sequence
  Synthetic
SEDEKVVKEAKRLLDENRRENKEIDERAEKALEDSHRKVRKIDKEAKELLEKLRRDVEEVKEEELKKELRKELERVLRRHKKLVDDLKRENDEVLKRHRDLVEESKRKLEEILKELEERLRSRELLDKVRREVERLKEESKKSHDRIREELRRNKEEIEKSHDEIRRRVEKLDDEIRR

SEQ ID NO: 4039 - protein, 178 aa, Artificial Sequence; identical to SEQ ID NO: 4038
  Synthetic

SEQ ID NO: 4040 - protein, 178 aa, Artificial Sequence
  Synthetic
SEVEEVEREVRKLLKESNDKVREIDKEAKKRLKDVEDKAREIDERITKLLKDIEDEVRKVKERELKEDLKRKIEDVLRDHERLVRELERELEKILEDHKRLIEELKRENDRVLEELRKKLRKEEVLRKVEKEVEDNKKELDESHKEVKREVEEVRERIDESHKRIRERADRVKKKIEK

SEQ ID NO: 4041 - protein, 178 aa, Artificial Sequence; identical to SEQ ID NO: 4040
  Synthetic

SEQ ID NO: 4042 - protein, 178 aa, Artificial Sequence
  Synthetic
KELEDVLEDVKRLLKESNDEVKEIDDRARRLLEESHRKSEEVDRRAEKRLREIEDKVRKSDKEEVKEELKKEIKKVRDEHEELSRRNTEENKRVLDEHRKLVEELKKKNDDVLRELRKRLRKEEMLREVEERARKNKEDIEKSHDEIRKEVEDNIRRDRESHKRIEEEARRVMAEIEK

SEQ ID NO: 4043 - protein, 178 aa, Artificial Sequence; identical to SEQ ID NO: 4042
  Synthetic

SEQ ID NO: 4044 - protein, 178 aa, Artificial Sequence
  Synthetic
SEVERVLKEADKLLKDNDEKNERVDREVEKLIRDSHEKSKKVDERAKRALDKLDDEVRKVKDEELKRELKERIKKVLEEHKRLSDENRDENRKVLERHKELVDRSKKELEEVLKELRKKLRKEEMLREVEKKVETLKKKSDDSHKEIEEKIRRNIEEDDKSHERIREEAEKLKKKIDD

SEQ ID NO: 4045 - protein, 178 aa, Artificial Sequence; identical to SEQ ID NO: 4044
  Synthetic

SEQ ID NO: 4046 - protein, 184 aa, Artificial Sequence
  Synthetic
ELEELMKKIEDDSKKNDEDTERLVKEIRDRSKRNREESKKLHDEDRREAKRVLDEARRDVRDEEKLKRLEDKLEKILRENAEVHKTSEEKNRRINKRLDDLVREDKKKNEDILRKLRELARRVKREEDVRRAIEEVRRLLEKSHRDSRRVIEEVRRLLEKSHRDNRKVNEDSRRLLKKVREDAE

SEQ ID NO: 4047 - protein, 184 aa, Artificial Sequence; identical to SEQ ID NO: 4046
  Synthetic

SEQ ID NO: 4048 - protein, 184 aa, Artificial Sequence
  Synthetic
SLEDLVREIREESERNKKETRKLLRRIEEESKRNLDESERLHREDKKRLEDIAERLERRVRDEDKLRRLKEELERILKRNKDLVDEDREENERIITKLRKLVKEDEDKNRKIITDLEDVLRKVKDEDLVRKVITEVKRLLEESHKESREVIREIKELLEESHEKSKKVNEESKKLAEDVLRKAD

SEQ ID NO: 4049 - protein, 184 aa, Artificial Sequence; identical to SEQ ID NO: 4048
  Synthetic

SEQ ID NO: 4050 - protein, 184 aa, Artificial Sequence
  Synthetic
SLEELLKKIREESKRNLDETRKLHREDKEESRKNLEESRKLHEEDRREAERVKRRADREVRDEEKLRKLRELLKRILDKNKKVLDDDKRLNEKILKENEERVRDDKETNDRIIEEADEALERVKDEKLVREVVERLRELLRESHERSREVNKRSRDLLRRSHEKSRRLNEESRRLLEEVERRVK

SEQ ID NO: 4051 - protein, 184 aa, Artificial Sequence; identical to SEQ ID NO: 4050
  Synthetic

SEQ ID NO: 4052 - protein, 184 aa, Artificial Sequence
  Synthetic
SADELLKKLRDESEKNKDDTRKLLEELRRRAEKNKKDIEDLLREIEKKLREVLEDIKRKVRDEEKLRRLKEMLERILKRARELVEELKKENDKILKELEDMVEDDKRDNKRIIERVEELRKKVRDEEEVKRAVDEVRRLLEESHKKSREVIKRIKKLLEDSHKKVREIVTELDKLIKEVEKKVE

SEQ ID NO: 4053 - protein, 184 aa, Artificial Sequence; identical to SEQ ID NO: 4052
  Synthetic

SEQ ID NO: 4054 - protein, 184 aa, Artificial Sequence
  Synthetic
DLKELVDELRKKSDDNLKETERLVREIEKRLTDNKRESERLVREIEKELRDLRERIERTVRDERKLRDLERKLKKVDEELKEMHERSKRENEEIRRELKKLVEDDERRNREIKKRVEDLLRKVKDKDEVRKAIKEAEELLKRSHEESRRVIERVRKLIEESHRKNREAIKRIRRLIEEIRKEVD

SEQ ID NO: 4055 - protein, 184 aa, Artificial Sequence; identical to SEQ ID NO: 4054
  Synthetic

SEQ ID NO: 4056 - protein, 175 aa, Artificial Sequence
  Synthetic
SEIEKVREELKELLERDEREVKRVIDDLRRLIKDLRERVKEVNKRDDETVKEIKKVIEERGDTEDVKRLLTENKKRNDRMLERLEKILEDIRERVRRALETSEKTNREIDERVKRKIKVEEVAREVEERSRRVKRKLEELIREIKTELDRVREEIERLSKRDREKNERLREEARR

SEQ ID NO: 4057 - protein, 175 aa, Artificial Sequence; identical to SEQ ID NO: 4056
  Synthetic

SEQ ID NO: 4058 - protein, 175 aa, Artificial Sequence
  Synthetic
SEIEDVLRELKKLLTDDKREVERANRDDERTLRDIRRKVEEAIKKLEDLLRDVKRRVDEEGNTEEVEELLRRILKDVERVLRELEKLIRDNKRRNKEMLDRSRRTNEKIKEDADRKLKVKDVAEEVERESRKVEKELEDLSERDKERNDRILRTIEELIKRVEEEIRKVKEDVER

SEQ ID NO: 4059 - protein, 175 aa, Artificial Sequence; identical to SEQ ID NO: 4058
  Synthetic

SEQ ID NO: 4060 - protein, 175 aa, Artificial Sequence
  Synthetic
SEIEDVLRKLRKLLREDEKRVEDANRRDRDTVRKIEKRSEEAFKESKETNKRIEDKVRKTGPTDEVRKELEDDKKRVDDAHRKSEEDIRRNDKENEEFLEESRKTNEDIKEEVDRKIKVKEVVEEVRDDSRRVEEKLRRLSKEDKEENDKIRRRDRKLVEDLRRDSDRILRKVET

SEQ ID NO: 4061 - protein, 175 aa, Artificial Sequence; identical to SEQ ID NO: 4060
  Synthetic

SEQ ID NO: 4062 - protein, 175 aa, Artificial Sequence
  Synthetic
DEIERVVEEVRELLERDKRRSDEVIERLKRLLEKDEEDVDDVIRRSKETNERIRDKIEKEGPTEEVEKLLRDDKRRVDKLLEDSKRTNDDIVRRLDEAHEESEKTNRDIDEEIERKAKVKEVVDDLKRLSKKVYDDNKELIDRVRERSREVLRRLKELADELRKLSEKIKRDADK

SEQ ID NO: 4063 - protein, 175 aa, Artificial Sequence; identical to SEQ ID NO: 4062
  Synthetic

SEQ ID NO: 4064 - protein, 175 aa, Artificial Sequence
  Synthetic
DDIEEVVKEVEDLLRRDAEDVERAIKELRKLLEDDRDRVRKVNEESRRIIEEIRKAIERRGDQEDVKRAVKEVKDRNRKANDESRRTNTDIKRALDEALKRSRETNKDIEDKIREKAKVKEVVDKLREDSERVKKKAEDLVEEIRRASEEVKKEVDDLSREDEERLEKLKEDARR

SEQ ID NO: 4065 - protein, 175 aa, Artificial Sequence; identical to SEQ ID NO: 4064
  Synthetic

SEQ ID NO: 4066 - protein, 182 aa, Artificial Sequence
  Synthetic
SEAEELEDRIRKLLREVEETSRRILKRARELNKRIEEESRRIIKRIKELIDEIKELVRTRGDDRGVEELLKKVLKEIEEVNDEHRKRIEDVTRKSEKVNEDHRKTIEEMEERLRRLLEDLRRRGIDERLLRKLEREVRRLSEEVTRLDEETRRHSDDLRRRVERLDETTRRELEKLADEVRK

SEQ ID NO: 4067 - protein, 182 aa, Artificial Sequence; identical to SEQ ID NO: 4066
  Synthetic

SEQ ID NO: 4068 - protein, 182 aa, Artificial Sequence
  Synthetic
SEAEELIKRAEDLIREIKKRSDDLVREMERLNEEIKRVSDEIIKRIEEVLEEIKKLVKKVRDDRGVEERVREVKREIERLNDEHRKIIEKVLRESRDVNRRHEEEIRRVLKEIEDLLREAEERGIDRRLLEKLKRELKDLERRVREENERSKRHSEELVRRARKLNEKTDKDLKRLEEETRR

SEQ ID NO: 4069 - protein, 182 aa, Artificial Sequence; identical to SEQ ID NO: 4068
  Synthetic

SEQ ID NO: 4070 - protein, 175 aa, Artificial Sequence
  Synthetic
REIEEVRKEVERVRKRYKDEVRKIVEDARRVLEEHKRRVEKLLEELERILREAKRLTDEGDRREEVIERLKELLKRIKERIERLNKRLREVVERIARDLKRLVEESKRELDRIREEVRDEDMLREIEKAVRELNEESKELLERIEREVRKSEERSKEVIKEIAERARKVVEDTKT

SEQ ID NO: 4071 - protein, 175 aa, Artificial Sequence; identical to SEQ ID NO: 4070
  Synthetic

SEQ ID NO: 4072 - protein, 174 aa, Artificial Sequence
  Synthetic
SEAEKVLTDNRDTLRRLKEELKKVLDENRKTLEELDKRLEEVHKRHNEELDRIRKDGLSEEVLREVEKINEELRKELEDLSREVKKLHEDLEREIRELAKEAEDRHKDLERKVRDTKADERVKEELKRIDEDLKRVVDRIKEKAEDIDRKLKKRVKEIMDKARESLKTLEERVK

SEQ ID NO: 4073 - protein, 174 aa, Artificial Sequence; identical to SEQ ID NO: 4072
  Synthetic

SEQ ID NO: 4074 - protein, 174 aa, Artificial Sequence
  Synthetic
DEMREVLKRLRELVEELRRELEEVLRRNRETLKRLEEELRRVHKEHNDVLKEIRDKGLDEDRLREVTEINKRLKKLLDELRERAKKLHEDLKRLIDELDRRLRELLKRLKERLRDTRVDERMKDELKKILDEARRVVERIDREAKRIDDELREVVERISRDAKRSLDELDERTR

SEQ ID NO: 4075 - protein, 174 aa, Artificial Sequence; identical to SEQ ID NO: 4074
  Synthetic

SEQ ID NO: 4076 - protein, 174 aa, Artificial Sequence
  Synthetic
DEMREVLRELEDELRKIKERLKRVLDRSRELLEEWREELERVHRRNEETLRRIEKNGLSEEVLREADELNKELKREADELLDTYRRLLEESEKEAREIIKTVEELVKRLREELRDTKTDEEIKRRAEDILRELRRLVEELERRNEEINRRLAKRIKELMEKIRREDERLKKEVE

SEQ ID NO: 4077 - protein, 174 aa, Artificial Sequence; identical to SEQ ID NO: 4076
  Synthetic

SEQ ID NO: 4078 - protein, 178 aa, Artificial Sequence
  Synthetic
DKAKRVRTELERRLEKLKRDARKVIEEHEKSLRDLEEEVRRVREEHERSLKELKEELDRKPKREEEKKRLKDEMEESRRRLDKLTEDLKRELDKSRDRLRKIDKELDDSAKKLRDELEKKGVDEDVTRELERVLDELRREVDRVRRELEKIDRELRELVKRIEDELRKINKELKEKSD

SEQ ID NO: 4079 - protein, 178 aa, Artificial Sequence; identical to SEQ ID NO: 4078
  Synthetic

SEQ ID NO: 4080 - protein, 179 aa, Artificial Sequence
  Synthetic
DEVEELVKTVRKLVEDHNRKLEEVVRRLREIVKELEDRTRRALEEARRTVKRIEEEVRKRGKSDKLAEDIRRKLKELEKRLKRVKKELDDLHRDSKKKLDDVKRESEEDLRRIDEALKRVDIDERLLRELKDLLEKSKRRVDELVKEIEKRNRDHKEKVRKIVDEIRRLLRELEERVKK

SEQ ID NO: 4081 - protein, 179 aa, Artificial Sequence; identical to SEQ ID NO: 4080
  Synthetic

SEQ ID NO: 4082 - protein, 183 aa, Artificial Sequence
  Synthetic
KLEEILRRIRELLKRHHEKNKKILDDIREKSKKLKKKVDDILTRITEIIKDLEREVDGRPRDRRLEELKRELRDLLDKLRKRVERIAEEHRRLDEELETKVRKLNEELRKLTKDLEERVREGNDERVLEDLRRKADDIIRRADEESRKIKEEADDIFRRSDELLKRLEDEAKRIADEVRKKTK

SEQ ID NO: 4083 - protein, 183 aa, Artificial Sequence; identical to SEQ ID NO: 4082
  Synthetic

SEQ ID NO: 4084 - protein, 183 aa, Artificial Sequence
  Synthetic
DSDRIEETIKKLLKELSDKSKEVLDEIRKRLKDHHDRNRKVLEEIRRILKRLEEEVRRKPNDERLEELKKRLRELAERLRTEVEEINKRLDELRKELEEKVRRLNEKLKKLADDLRKELRKGNDKRALKEMLDRVRKIIKEYEDSLRRLKEEVDEIIERADRLSEELRRKAEKIIRDITDAVR

SEQ ID NO: 4085 - protein, 183 aa, Artificial Sequence; identical to SEQ ID NO: 4084
  Synthetic

SEQ ID NO: 4086 - protein, 183 aa, Artificial Sequence
  Synthetic
DSEELLREIRKRLEDLSRKSEEIKRRIDEISRDLERKVEEIKKRIEELVRRVRTEADKRPKTRELDRLKEELDRLRRELEKEAEKLMEDHRRLNEELREEVKKINEELKRKTDTLTERLRRGNDRKVLERIREEADEIDKDYDRLLKEIRKKIEDIARDTERRLRELKDRVDKIIKKVEEDER

SEQ ID NO: 4087 - protein, 183 aa, Artificial Sequence; identical to SEQ ID NO: 4086
  Synthetic

SEQ ID NO: 4088 - protein, 179 aa, Artificial Sequence
  Synthetic
REIETVTKKSRDLNREIDKKLKELTERVDKLIEEWKRKTDRVREEAKRAVKEIEDKNVREDEFEKLTRELEKRLEDVKEESRKDKERIEKRLKEAEDDLRRLDKEHREELKEVRERLPETEELRRVIEESKRSNDELKKKADELSKRVKEALDRLEEEDKRVLEEIKDILRELRERRRK

SEQ ID NO: 4089 - protein, 179 aa, Artificial Sequence; identical to SEQ ID NO: 4088
  Synthetic

SEQ ID NO: 4090 - protein, 179 aa, Artificial Sequence
  Synthetic
SEIEEVEKKSRELNRRVKERLDEVEEESRRLNEKWERDTRRVRERVEEEIKKIEERNVREDEARRMLEAIKEDLERAERESERTDEEHRRRLEEVRKEVEDMDRRHREELKRVAERLPRTEKLDEVLKRSEDSNRELKRRAEELLRDSERTNEELRRRDEEVKREVEEKLKELEKEIRR

SEQ ID NO: 4091 - protein, 179 aa, Artificial Sequence; identical to SEQ ID NO: 4090
  Synthetic

SEQ ID NO: 4092 - protein, 187 aa, Artificial Sequence
  Synthetic
SSKEILKEIDERVEELKRRNEKVDREIKEKVKRLEEENEKVDREIKEILKELEKEAEKRPRTEDLERKIREVRDTLRRLHEENKEVNDRMRETVRRLHEKNKRMDERAKEEIEKIKEDIKRLEDKGTTEEVLERLRREVRKRIEDYKRKLDKIARDVDETIERYKRKLEEIKRRVEDEARKIKEEIR

SEQ ID NO: 4093 - protein, 187 aa, Artificial Sequence; identical to SEQ ID NO: 4092
  Synthetic

SEQ ID NO: 4094 - protein, 179 aa, Artificial Sequence
  Synthetic
SRKEELKRRLDEALKKYEADLDELRRRHEEDVRRSKEENERLLKELEDAVRRAKEEVKKAGKDKKDLDRLEEELRKLVEDIKRESEKLERDIDRHHKEIKKHMDKSRDELKKVREEIDRRDDEDRRVEKEIREAIERLKRNLERIKRNIEKVREDSKRVNKELRDKIREIIERIDRRLK

SEQ ID NO: 4095 - protein, 179 aa, Artificial Sequence; identical to SEQ ID NO: 4094
  Synthetic

SEQ ID NO: 4096 - protein, 183 aa, Artificial Sequence
  Synthetic
SRKEKLLDDARKILKRAEEELKRLYDKHRRIIEEVKRDLERLKKEHEDVVRRVEDVLRKRVTEEERVRELKRKIEENHKELKERIDKLKEELDRINEELKKRLDKIKKEADELLRRLKEVADRNEKDDKELEEDIRRIEDRLRRLLEELEKLIEDSMRELKRVLDELEKHIREVDEELEEDLK

SEQ ID NO: 4097 - protein, 183 aa, Artificial Sequence; identical to SEQ ID NO: 4096
  Synthetic

SEQ ID NO: 4098 - protein, 184 aa, Artificial Sequence
  Synthetic
SEAERVKRELDEALKKAKKALEDNKRKLEEALRKHREDAKRWKEELEKALKEAEKAAKDLRRDADKEELDRLREDLERKAKKLKDEIEKINRELEELAKRHEDTNRKLEEDLRRLAKKLREEIEKDGADKEAERKLRELEKRAKEALERSKEHSDELEERARKANKEIEDKLKRLAEEAEKEAR

SEQ ID NO: 4099 - protein, 184 aa, Artificial Sequence; identical to SEQ ID NO: 4098
  Synthetic

SEQ ID NO: 4100 - protein, 179 aa, Artificial Sequence
  Synthetic
SEAEKIKKDLDKIREDLKRLDREAEERVRRLSEELDRKDRELRKRIDEILKRMRDEERSDDELRKEEKKVRDELEEMAEDLRRKNEEIREILKRIAERLKKRNDDVRKRLEDIARKKSVPDEDLKRLEDELRKVEEDNRRTLEELRRRVEEVSRRNKESLEDIRRKLEEAIRRLREKTR

SEQ ID NO: 4101 - protein, 179 aa, Artificial Sequence; identical to SEQ ID NO: 4100
  Synthetic

SEQ ID NO: 4102 - protein, 179 aa, Artificial Sequence
  Synthetic
DGAEEVDDRLKKADEELRRKDKESDEKTKRIAEELRKLLEESKKKTEDLVRRLDEEDQRDELVRRTLREIEEDHERIDRRLKEKEEEVKREHEKIARELEKKNKEIRDELKEIADRNSVPEKRLRELEKKVEDVSRTNKKTLEDNRKKIAEVVKRLDEEIKRNKDTVRRVVERVKKDTD

SEQ ID NO: 4103 - protein, 179 aa, Artificial Sequence; identical to SEQ ID NO: 4102
  Synthetic

SEQ ID NO: 4104 - protein, 180 aa, Artificial Sequence
  Synthetic
ERKERLKERLDEVKKEHERLVERWHRENREVLRENRETVERLERELERVLRELRDALREQNRDEKAEKILRDLERKVRELKERAKRLHDKLEEENREVNKKIKKDSDDLREELEDETRKIKERRDEELEKRIEEVERKLRDTNRKIEELLKRLKKRHEEVDRELERLLEKLEREAEETRR

SEQ ID NO: 4105 - protein, 180 aa, Artificial Sequence; identical to SEQ ID NO: 4104
  Synthetic

SEQ ID NO: 4106 - protein, 180 aa, Artificial Sequence
  Synthetic
SEEEELEKELEKVLRENEESVRRLHKRNRDVLKKNRETLEKLEEDLKRVLERLKRALDRKNTPDEARKIIKRLKEKLERLVEEARELHRRLEEKNRDLNRRLKEKHDRLRKEVEDLRRELKARREKEARDEVRRLKKKMDDVDKDVERLVRELEKEHEEVDKDLRRKLDEVRKELEDARR

SEQ ID NO: 4107 - protein, 180 aa, Artificial Sequence; identical to SEQ ID NO: 4106
  Synthetic

SEQ ID NO: 4108 - protein, 182 aa, Artificial Sequence
  Synthetic
SEEERLEKELDEVLEDHKRRVEEWKKKMDEVNKKHKESIDRLREELDRVLDEVRKAGLDEKKLRELEKKARDLKEKIKKRTEEIKESNKRIKDEIKKLSDDLEKEARDLKREIRDLKRRGEPREEALKRLEELVRKLKEKLERINRRIARIVDKNTKEIKDTNDTLRKEVRDLMKELKDRTR

SEQ ID NO: 4109 - protein, 182 aa, Artificial Sequence; identical to SEQ ID NO: 4108
  Synthetic

SEQ ID NO: 4110 - protein, 175 aa, Artificial Sequence
  Synthetic
REDEEVKKELRKILEDHKRRVEDWKRRLKKNLEEHRRRVEEWKRRLDELLEKVRRAGLPEEVLRELEKVVREIKERIDRLDEEYEDLLRKIEEEAEEMNRRLEELVRELERLIERKDLSEEEIKRVIERLARDARRINERLRELLERLSEISERINREIEKIIDEARERLEREER

SEQ ID NO: 4111 - protein, 175 aa, Artificial Sequence; identical to SEQ ID NO: 4110
  Synthetic

SEQ ID NO: 4112 - protein, 175 aa, Artificial Sequence
  Synthetic
SEKEEVKKRLKDNMRRAEELIRRDDREVEENRKRHDELVKEWDKRLREILKKAEDSGLPEEVKKELKEIVDRIREEMKRLNEEYKRLVEEHKKRNEKVLRDYRDLLRRIEELIERNDLSEKEIKEVLEELSRTSKRLIEDSKRSSERLSERSKRTNEEIERIVRAAKRTIEERER

SEQ ID NO: 4113 - protein, 175 aa, Artificial Sequence; identical to SEQ ID NO: 4112
  Synthetic

SEQ ID NO: 4114 - protein, 183 aa, Artificial Sequence
  Synthetic
SVAEELEERLKEIKRESEKSIRDLRRLLEEIERRLRDINRKLDEIVKRVAEKIKDAETKGAPKEELDKELDKDRRDLERRADESRRELRRLEEEMKKKEKESRDRLDELRRRMEDRLRKNKEVDKKVVDDVERKLREIIRRHEEELKKIKEDLDKIREDHERLLREWKKELDELITRVAESAR

SEQ ID NO: 4115 - protein, 183 aa, Artificial Sequence; identical to SEQ ID NO: 4114
  Synthetic

SEQ ID NO: 4116 - protein, 183 aa, Artificial Sequence
  Synthetic
SVSKKLDDELRKMEREIEKSNETIKKLIEDIRRRSKESRDRLKELLEEIKKRLKEAEERGEPKEELDKKLEKMVRDAKRELDESRKELDKLKKEIEKVLRDSRKKLKKIEDELRRELEENKEIDEKVVEDIERRVEKVLTDHERELERVERELDDIIRRHEEELEKIERELEKIKEDVDRSAK

SEQ ID NO: 4117 - protein, 183 aa, Artificial Sequence; identical to SEQ ID NO: 4116
  Synthetic

SEQ ID NO: 4118 - protein, 181 aa, Artificial Sequence
  Synthetic
DELDRLRELLEELKRRSETVIKEAEELLRKLERELRELIREWKEITERLARRMEDLSRKGVDERTVEKLAREVKEANKRLEDRLREVKKKITRDRERLEKRSEELERRAKEELDKLRKGGLQREDLKRIEEELREILKRHRDANKRIKDEVEELLKRVEEMLRRLHEEDRKLLEDLKRETD

SEQ ID NO: 4119 - protein, 181 aa, Artificial Sequence; identical to SEQ ID NO: 4118
  Synthetic

SEQ ID NO: 4120 - protein, 181 aa, Artificial Sequence
  Synthetic
RETEEVKKDVDRIRKASEDVARKMEKITRDVAKELRDLIEEWRRRSEELKKELEDLSRRGVSKEDLKRVAEKIEKINEDIKRRLEETSRKNEELNRRLKEESDKLAKEVEDRLRRLREGGLPEDELKRIEEELRKILKEHEDKNREIKKENDRLNKEVEEEAEKATREDKRLLEKADRDRQ

SEQ ID NO: 4121 - protein, 181 aa, Artificial Sequence; identical to SEQ ID NO: 4120
  Synthetic

SEQ ID NO: 4122 - protein, 174 aa, Artificial Sequence
  Synthetic
SEKEEIEKRLDKLLKEHEEENDKIRRTLKEINDRSKEEVERIEERLKDLLRRLRERIEPREELKKIEDEVREVIREAREELEKLNRKDREIEKTLKKLSDELRKKVDDLKKELRTDEDTKRARDRLEELRRESEELIKTARDLVRRSEKEHRDLIERLRRILEELREKLERKTT

SEQ ID NO: 4123 - protein, 174 aa, Artificial Sequence; identical to SEQ ID NO: 4122
  Synthetic

SEQ ID NO: 4124 - protein, 185 aa, Artificial Sequence
  Synthetic
SVKEEVRTLLRRLERVSRELIRRLKEMLKTLHEENKKLIDDSRKLIRKIKRDLERVAERRARDEELKDLLRKLEELVRRLKEENDRLTDESRKKLDELRKEIKKLSDELRRDIKELEDRLDEKLRDKDTVKKVKEDLKDILRRHEEANERIRDELRRNLRKHEDDSKKSKEELDRILKKARDDAR

SEQ ID NO: 4125 - protein, 185 aa, Artificial Sequence; identical to SEQ ID NO: 4124
  Synthetic

SEQ ID NO: 4126 - protein, 185 aa, Artificial Sequence
  Synthetic
DIEDELRKELEKHHTKSREVKRRLTELLKRHEDRVEEVERRLRKDLKELRDRIEELSKIREEEMVERARRELKKIKEDVKKETEDVERESEEIEKELRERLKRVEEESRRVEEELRKKIEKNKDLDEKVAREVEERLKRDHDDLRRVIEEIRKRLEDSHRELKKTIEDVKRRVEELIEEAERRMK

SEQ ID NO: 4127 - protein, 185 aa, Artificial Sequence; identical to SEQ ID NO: 4126
  Synthetic

SEQ ID NO: 4128 - protein, 185 aa, Artificial Sequence
  Synthetic
SIREKLREVLERHHRTSRKVEEDLRRKLEDHHRKTREVAERLKEKVDRLREEIKRASRIREEEVVREIEERLKRMKEEIKTLADKVRDTSRRVKEELDRLLEEVERRSEKVERELEKRLRENKDLDERVVRKIEKDLRDDHRRLKEIAKRIDDEARRDIKRLEEIIKKIEEEVDRLIEEVRRRDK

SEQ ID NO: 4129 - protein, 185 aa, Artificial Sequence; identical to SEQ ID NO: 4128
  Synthetic

SEQ ID NO: 4130 - protein, 178 aa, Artificial Sequence
  Synthetic
DKDREIERLAKEAKDRHDKTLEDDRRRLEEVRRKIEETIRRIKKKLDEAKKRLKELVRDKPVEEELEKDVERRLKELEDELRELLRELEERVRESEKRFKELTDELKALIDRLREDIKREGVTEEILKELEEIVRRVEEKNKRLHDENEKDTRRVEAVLEDIKRRIDEIVRRLEERIK

SEQ ID NO: 4131 - protein, 178 aa, Artificial Sequence; identical to SEQ ID NO: 4130
  Synthetic

SEQ ID NO: 4132 - protein, 178 aa, Artificial Sequence
  Synthetic
DEKDRIDKRMKEVLKKIEELIRRDERRLEKVRKDHEELVRRIEDELRRVLEELKKLVEEKEVDKKLEEDVRRVVEEIKRKIEKHHEELERLVRESEKRLKKLLEDAKKELDEIREEIKRDGVTEDIERKIRELEEKVERELKKIHDENEKLAEKARRDLERIEREIDKLVKDVEDAIR

SEQ ID NO: 4133 - protein, 178 aa, Artificial Sequence; identical to SEQ ID NO: 4132
  Synthetic

SEQ ID NO: 4134 - protein, 178 aa, Artificial Sequence
  Synthetic
SEKDKITKTLEDAKRDHRKLVEEDEKALEEVERRHEEIVRRIEEKLKEAKEELDRLVRDKPVPDDLKREVRKLLEDLKRRLKKHHDELRKLVKESRDRLKEHHDRLEEELRRIKDRIRKTGVDEKILREIEERIKEVKENLRRVHEENRELAKKVLKDLERILEEIKKIIKELRERVK

SEQ ID NO: 4135 - protein, 178 aa, Artificial Sequence; identical to SEQ ID NO: 4134
  Synthetic

SEQ ID NO: 4136 - protein, 178 aa, Artificial Sequence
  Synthetic
SKKDEIEETIRRARERIKTIVDRIREELKRIRDKHKKLVDEDKKTLEEVLRTLRELVRDKPVDDRLLREVEKLLEDSKEEIKKHHEELARRLREIEEKIKRLLEEAEKKVEDVRDEIRKTGVTDEILEKVKELVREVEEVLRRIEKEIEDLVRKVEEDLRRIHERNRELAKKADDDIK

SEQ ID NO: 4137 - protein, 178 aa, Artificial Sequence; identical to SEQ ID NO: 4136
  Synthetic

SEQ ID NO: 4138 - protein, 178 aa, Artificial Sequence
  Synthetic
SKEEEIEKTLKKIEEDHRELVRRIERALDDARRRHKELVDRDDKELRDAERELDRLVREKPVPEELKERVKRLVKESKEEIDRHHKELEKRLKEIKEEIDKHHRELKERLDRIRERIRKDGATEEILKEIRDLADEARRNLERILRDIERVVEKVERDLKRIHDKNKRDVERVRREVK

SEQ ID NO: 4139 - protein, 178 aa, Artificial Sequence; identical to SEQ ID NO: 4138
  Synthetic

SEQ ID NO: 4140 - protein, 178 aa, Artificial Sequence
  Synthetic
KEKDDIDRDLKRAEEEHKRLVDEIRETLKEIEREHRERVKRIKEKLDEAKRRLEKLKRDRPVEDKLEKDLERRLREIEKKLRKHHKEVKDILRAIEEEIRRHHRTVRERLRAIRERIKKDGVTEKILEDIKREVDRVRKNLKEIKEKIDKEREDVKRDLDRIRKEIEELVEKVDRDVK

SEQ ID NO: 4141 - protein, 178 aa, Artificial Sequence; identical to SEQ ID NO: 4140
  Synthetic

SEQ ID NO: 4142 - protein, 178 aa, Artificial Sequence
  Synthetic
DKARKIEEDIRRAEEEHKELVKRNEERIKEVAERHEETVRDIERKAEDIRRELKKLVDEKPVPEELKRDFEELIKELREELRRHHEKMKRLLDEMRKRHKEHHDRVRELSKRVKDDIDREGVTKEILDEVKKLVDEVRANLEKSHEDIERLVEKVREDLKRIEERLRKIAEDLRRRVK

SEQ ID NO: 4143 - protein, 178 aa, Artificial Sequence; identical to SEQ ID NO: 4142
  Synthetic

SEQ ID NO: 4144 - protein, 178 aa, Artificial Sequence
  Synthetic
EEEREIEDTIRRAEEEHRKRVEDNKRRLEEAEKEHRKRVEDNKRRAEEIRRKLKELVDRKEVDERLDKRADEVLRRLEKRHRDHHEDLKKKLDDLRREHEEHHRRVKELERRVKEEIRREGVTEEILKKVKELVDRVRRNLERSHEKIKRIEDKVRRDLERSHKELEDLMRRMEEEIR

SEQ ID NO: 4145 - protein, 178 aa, Artificial Sequence; identical to SEQ ID NO: 4144
  Synthetic

SEQ ID NO: 4146 - protein, 175 aa, Artificial Sequence
  Synthetic
EKKERIEERAKEVEREHREIVKRDEEELERVREEHEESVRRDRKALEDVERDVRRDGIEKEVLDEIKKRLERSREKLDKLSRDVEKELEESKRKLEKLSRESKKKLEDLRRELTRGEVPMEDMLRKVKEVADENRERLKELHEENERTARRLRKLNRELHEENKRLVEEIKKEAK

SEQ ID NO: 4147 - protein, 175 aa, Artificial Sequence; identical to SEQ ID NO: 4146
  Synthetic

SEQ ID NO: 4148 - protein, 175 aa, Artificial Sequence
  Synthetic
SKAEEIRKELDRVRREIEKRAEEDKRTLEEVRREHEKLVRENEETIKRVEEDVERAGIDEKKKREIKEALDDLRRKHEKLSRESEDAIRRSEKELRDLKEEIDRLLDRLRRILDEGRVPMEDALREIKEVADEVRKKLRELHEKNKKLMDDNRRKLDKSHKDVREVEREIRERIK

SEQ ID NO: 4149 - protein, 175 aa, Artificial Sequence; identical to SEQ ID NO: 4148
  Synthetic

SEQ ID NO: 4150 - protein, 175 aa, Artificial Sequence
  Synthetic
DKERRIEEELEKARRDHKEDVDRDRERLKEVREEHERLVRENKKRLEEIRKELEDRGIERELLEEARKLLEDLKRKHEELSRRSEELIKRSEEKLKRLSDESERLLRELREKLKRGEVPMEDLLREVKRVVEKNKEDLKRLHDENEKLAEENRRRLKKSHDEVEKVAEDLKRKAK

SEQ ID NO: 4151 - protein, 175 aa, Artificial Sequence; identical to SEQ ID NO: 4150
  Synthetic

SEQ ID NO: 4152 - protein, 175 aa, Artificial Sequence
  Synthetic
EKKERIEDDLRRVKEEIDDLLRKNEKRLREAEDEHRKRVEDDRRRLDEVRKEVDDEGIDERVKREIERLLRESEEELKKLSDESRRTMKKLRDKHREDEEDIKRLLEELKRELDRGEVPMEDALRKLKRVADEIRKRLDESHKEIKKVVDDNRKKLEELHRKNRELERKIREDAR

SEQ ID NO: 4153 - protein, 175 aa, Artificial Sequence; identical to SEQ ID NO: 4152
  Synthetic

SEQ ID NO: 4154 - protein, 171 aa, Artificial Sequence
  Synthetic
KDEERIKKKLKKLVDENRDLNRRIEETNRRVAEDLDRRLKEIEKRNRDMAEELRKSDRSRETVKEMLKRLEDEDRKLSKEIRDRLRDLEREDERLHEEDKRHLERVDEELKRSNIDDEIRKRAEDAERETRETNRRIRDHTRRVAERVEKVLDEIRRHTEEVKKEVDEKER

SEQ ID NO: 4155 - protein, 171 aa, Artificial Sequence; identical to SEQ ID NO: 4154
  Synthetic

SEQ ID NO: 4156 - protein, 171 aa, Artificial Sequence
  Synthetic
SDEERIKDKLEKLVKENEDKNRRILEENKRVADENRRLNEEIEKRLEEMVEELERRDDSEESVKKALDDLEKELRDLNREDREHLRKLSEDLRKMKEEDKKHAEDVRRDLERANIDEEIRKRVKEAEDKTEETNRRIEKHHREVKKESEESNKRITDRLEEVKERVTRKRK

SEQ ID NO: 4157 - protein, 171 aa, Artificial Sequence; identical to SEQ ID NO: 4156
  Synthetic

SEQ ID NO: 4158 - protein, 171 aa, Artificial Sequence
  Synthetic
KREEDIKRRLEKLAKENRERNEEIKRRLDELVDRNREENEKILRELEKMVRELERSDRDRSVVEKELRDLEERIRRMHERDKEDLRRIEETLRELKERDKRHLDEVEKRVEDDNLDEEARKRLEELKKETEDTNRRIDEAVERAKEETRRTNERIKEELKRVKKKVTDKRR

SEQ ID NO: 4159 - protein, 171 aa, Artificial Sequence; identical to SEQ ID NO: 4158
  Synthetic

SEQ ID NO: 4160 - protein, 178 aa, Artificial Sequence
  Synthetic
SEVETAKEDLKKKVEENEKRIKDVEDKLRKTVEDNRKRLEDVLEELRRSVETLRDLLRKGTREEELETMLRDHRRKDKEVEDENRKSIKEHREENRRVEEENKKSKEELRRRLEDLRRKGVVDEELEKRLREAEEKSDRLLRRLKEESRKAEEDSKRLLKELKEESRRAEEEVRRARD

SEQ ID NO: 4161 - protein, 178 aa, Artificial Sequence; identical to SEQ ID NO: 4160
  Synthetic

SEQ ID NO: 4162 - protein, 178 aa, Artificial Sequence
  Synthetic
DEKEEAKERLKELRRRLEETDKRVDEELEKLMREMEDTDRRVKEKVDRSRREADEVLRRGTDDETLKRLKEKHERDDKDIEDKNEELERRLERRLREIEKRNRELNERAKRELEDLERKGVVDEELKRRLRKVSEENKESNERLRRKVKRVVDENRRTNKELKETSKKVKEDIERKRK

SEQ ID NO: 4163 - protein, 178 aa, Artificial Sequence; identical to SEQ ID NO: 4162
  Synthetic

SEQ ID NO: 4164 - protein, 181 aa, Artificial Sequence
  Synthetic
SELEEVTDRLRKLAEKARRLDKEYEEKSRKLKEEVERIDEDLDRLLKELTDEVREIAERGTDEEVVKDLKRKLKKLKRDIEELHKRLHDRNRELERELEEIHRRLREELDKLRDDIRKAGLPEEALRRIEKEIREVEKENRDTLERLRRHDEEVNRTNKETLDRLDEKLKRVEREIDERRK

SEQ ID NO: 4165 - protein, 181 aa, Artificial Sequence; identical to SEQ ID NO: 4164
  Synthetic

SEQ ID NO: 4166 - protein, 182 aa, Artificial Sequence
  Synthetic
DEEEDLKEKVKKVETEHEETLKEIRRKLEDVKREHEKTVEEIRDHNRKVEERIRDVERRKDDKSRELEERSERLKRKLEKHNRELDELSKELEELIERLKRDIDRVTEEVRRKLRKLERDVDREGATERIRERLEELMRDARRLNRELDEKVRKLVEKARRDNTRVKKKSRELMKEIDDELR

SEQ ID NO: 4167 - protein, 182 aa, Artificial Sequence; identical to SEQ ID NO: 4166
  Synthetic

SEQ ID NO: 4168 - protein, 182 aa, Artificial Sequence
  Synthetic
DEEEELKERIERVKDENRRSVERLRRELKRVEDDHRETVKDLERRLREVKKEIEELVRRKDDRDERLKKILKELEEELRKLKEDIDRVSKELKERIEELKKRVDRIHKELKKKAEDLEREVRRDGATEELKKKLEELMKEVRDLDRELKREVEELEREIRRLNKEIRERIEDLVRKAREAIR

SEQ ID NO: 4169 - protein, 182 aa, Artificial Sequence; identical to SEQ ID NO: 4168
  Synthetic

SEQ ID NO: 4170 - protein, 182 aa, Artificial Sequence
  Synthetic
REEEELKKKLDDVRRENEESVKKIKEDIDRVRREHEKTVEEIRRHNKKVEEEIRAEVRRKDDRDSRLERILRELKRLLEEHNKELDELSERLERELRAVEEKIERIHDDLARKLEKLAEEIKKDGADDRIREEIEKLAEEIRRLDERLEEELREIVRKMRELNRRVAEKSKELTEDARRRLK

SEQ ID NO: 4171 - protein, 182 aa, Artificial Sequence; identical to SEQ ID NO: 4170
  Synthetic

SEQ ID NO: 4172 - protein, 178 aa, Artificial Sequence
  Synthetic
SEREEIRERLRRNLEELRKSIKKIEDDLRRLEKRHRDAVKEIEDRLRRLEEKLDEMAKRDSDEETVRKIKEEVRRKVEKIKEEIRKHHEEIEERLRRIRKELKEVEDEHRRRVEKLERDDLPREDVKRAVDEIHKHTKEKEDRLRKLLKDLEKNIEDAIRRLEKLLRDLEEEIKEAAK

SEQ ID NO: 4173 - protein, 178 aa, Artificial Sequence; identical to SEQ ID NO: 4172
  Synthetic

SEQ ID NO: 4174 - protein, 181 aa, Artificial Sequence
  Synthetic
EESERILEKIRRAAEEDKERIRKAIEELRKLAEEDERKLRKANKEARDSARELRRLLKEGLDREEVKEVRERHRRRSDEVHRENEEERRRVDEKLKRVHEENRKIEETLKRELEDVLRKTGEAEVVEEARRLIKKWREEVERLNEEIKKLVEDWDRRVKELNERHRDDDRKIEKEVEDEEK

SEQ ID NO: 4175 - protein, 181 aa, Artificial Sequence; identical to SEQ ID NO: 4174
  Synthetic

SEQ ID NO: 4176 - protein, 181 aa, Artificial Sequence
  Synthetic
SELEKALEEIKRLAEDDMRRIKKVIKELEKLARDDEKRLREVIERLETEVRKLEELLKRGLSDEEVRRILERIKRELKRVHEENERITRKVETDLRKVHEDNKRSLEELKKKLDDLVRKTGDTEVVDELRKRLKEVKERAEDLNRKLEELIRRWKERVERLNRELEKRMRDVEEKVRREEK

SEQ ID NO: 4177 - protein, 181 aa, Artificial Sequence; identical to SEQ ID NO: 4176
  Synthetic

SEQ ID NO: 4178 - protein, 181 aa, Artificial Sequence
  Synthetic
SDLEKILEELKRLAEEDKRKLEEVIKKLEEAARKDAEDLKKVNEEAKKSARELEELLKRGLDRKEVREAEERHERRSRDVHRRNREKKDRVTKELRKVHEDNKRSLEELKRKVDDAVRRTGDAEVVREIEELLKKIEEEVRRLNEELKRLADEWRREVRRLNEEHKDTDRRIKERVKRAEE

SEQ ID NO: 4179 - protein, 181 aa, Artificial Sequence; identical to SEQ ID NO: 4178
  Synthetic

SEQ ID NO: 4180 - protein, 181 aa, Artificial Sequence
  Synthetic
KDMERMLKEIEDLARKLREELKRVLDELRKTAKRDEEELKKVNKEAKESARELEEKLRRGLSREEVEKDVRDHRKKSEEVNRRNRERRKKTREDVERVKRETRRKEEALERRLKEVVDRKGDTEVVKELRKLLKKIKDDVRRLDKELDELLRRWEESVERLNREHKKTDEKVEEDVKRTTT

SEQ ID NO: 4181 - protein, 181 aa, Artificial Sequence; identical to SEQ ID NO: 4180
  Synthetic

SEQ ID NO: 4182 - protein, 182 aa, Artificial Sequence
  Synthetic
SEEEKVEKELRDLVREDDRRLREVEERVRKVVKEAEDDHRRVKEDIRRMVEEIRKKLDKDGKSDRIARELDELLKRLEERLREVEKRSKELNEKLKREIEKVHEENKKLLDEIRKRLEDATRRGTSSERLEDEVRKVEDRSRRMNERIDERLKRVEEESKKAIEELRRELERVKREVEERKR

SEQ ID NO: 4183 - protein, 182 aa, Artificial Sequence; identical to SEQ ID NO: 4182
  Synthetic

SEQ ID NO: 4184 - protein, 182 aa, Artificial Sequence
  Synthetic
SEVEEVKKELEKLAREDEKRLEDVKEEVKESARRDKRRLEEVEEDLDRLVKELEDKLRDDGKDDKLKKEVEDLLRKLEERLRRVHEENKKILEEHKRRSDKVHEENKETLKDIRRRLKEAEDRGTSTDELKRKLKRVEERSREVNRELRERDKKIEEDSRRINKRLKKKVDEVKEKVREDTR

SEQ ID NO: 4185 - protein, 182 aa, Artificial Sequence; identical to SEQ ID NO: 4184
  Synthetic

SEQ ID NO: 4186 - protein, 182 aa, Artificial Sequence
  Synthetic
DEEEDVRRKLEELARRLKRRLEEIEKRLRDSVKEDRRKLEEVKEKLRELIKKLEDEIRKKGTDRRLRDEVKKILDEIKEEITRVHEDNKRRLKEHKETSEKVKREIEDALRKIEDELRKAEERGTSTEKLKEDVERVKRDVRRVIRELEKTDERIERESRKVNEELKELVERVERSVKKADE

SEQ ID NO: 4187 - protein, 182 aa, Artificial Sequence; identical to SEQ ID NO: 4186
  Synthetic

SEQ ID NO: 4188 - protein, 182 aa, Artificial Sequence
  Synthetic
DEDREARKKVEALLKEVEDRVRESKKRTKDLLREIEKRLRDTTREIDELRRRIEDLSRRGEPKEDVLRELKKKLEELLRKDEKINRDLRRKLERLRREHEKILKRLEELLKELEDELREAGLPEEVLRELKELLDKIRETIERASKENEELLREIEKRIEDANRENTERLRRIEKRIDDDAR

SEQ ID NO: 4189 - protein, 182 aa, Artificial Sequence; identical to SEQ ID NO: 4188
  Synthetic

SEQ ID NO: 4190 - protein, 171 aa, Artificial Sequence
  Synthetic
SEKDELRKRVEDIKETAKKVVEELREASRKIHEDNKRVNDRLRKESKRIKDKADKLDIPEESLKRLKKEHEDTDRRIRETDKKLNDDHEDKNRKIEEELDRLIKEIKERDERKPVDERAREEVRRIEKTIRDTARRVRERVRDSERRFRKLVREWEKLVEDSERKIDELSK

SEQ ID NO: 4191 - protein, 171 aa, Artificial Sequence; identical to SEQ ID NO: 4190
  Synthetic

SEQ ID NO: 4192 - protein, 171 aa, Artificial Sequence
  Synthetic
SAKEEIKERVKRIEERLRRLLKELEEKVKRIHDENRKVNKELTDRSKEIKDRLKDLDIPEEALRDLDRRHDETNKRIREEDEKLNREIKERLERLKRKAEKLREEVEERDKRKPVSEEVREELKRIEERLDRTLREVRKTLEDIERRIRKAVEDWRRLVKESEERVKRLTD

SEQ ID NO: 4193 - protein, 171 aa, Artificial Sequence; identical to SEQ ID NO: 4192
  Synthetic

SEQ ID NO: 4194 - protein, 178 aa, Artificial Sequence
  Synthetic
SEEERVRKDLKELHEHLKREVDKARKDLEDMHRHSEELAREVRERHERSKRELDELERRGTDEKTIRDVERKNRDTNRRIREEMERHKKKLDEILERIRKSLEDHTKRVREVLKELAKENVKSEEIEERVRRNEDTLRRVLKELRERAKRNKDDIRRVLKELEDRSREIEKKLREAER

SEQ ID NO: 4195 - protein, 178 aa, Artificial Sequence; identical to SEQ ID NO: 4194
  Synthetic

SEQ ID NO: 4196 - protein, 178 aa, Artificial Sequence
  Synthetic
TEEERARETLDRLNKHSKELVDRVREKLKRLVEHSRELLRRVDRKHKESEKRVREVSRRGADSKTMREIEKDNDRTNKEIKERLDRHKKKLDEILEEIRDELRRHKEKLDRILERLAENNVKTDEIERRVERNKREIDKVLKELEERVRTNKDEIDKALEKLKRLSEEIKRKMREDET

SEQ ID NO: 4197 - protein, 178 aa, Artificial Sequence; identical to SEQ ID NO: 4196
  Synthetic

SEQ ID NO: 4198 - protein, 178 aa, Artificial Sequence
  Synthetic
KEKEELDETIRRLEEHSKKKVDKVRKELKEMDEHSRDEARRVRREHEKSEEKVRRASEEGRSKEVMKRLKEENRDINRRIRERVKEHKRRLDEIEERIRRTVEDHKRKVEEVARRVRERGVESEEARERLRKNEEEIKKVLEELERRVRENKERIDDVERELEDLSRKIEEKLDRDDT

SEQ ID NO: 4199 - protein, 178 aa, Artificial Sequence; identical to SEQ ID NO: 4198
  Synthetic

SEQ ID NO: 4200 - protein, 178 aa, Artificial Sequence
  Synthetic
KEEEEARRTLERIERRIRKALKEIDETLKRLNDHSAKRVKEVREKHEESRRKVDDVSRRGTDDDVARRLKRENDEINKRIEDTVRDHKRRLDKILKDIKKRLDDIKRDLDRVAKELRERNVQTEEIRERVKRIKEEMDRALKRLKDKVKENKERIDEVLKDLRRTSKEIKERLDRSTK

SEQ ID NO: 4201 - protein, 178 aa, Artificial Sequence; identical to SEQ ID NO: 4200
  Synthetic

SEQ ID NO: 4202 - protein, 174 aa, Artificial Sequence
  Synthetic
SKKEELERLLEEAKKKHEESERRLRESSKKLEEEIRRMKEHSKKSSEDAEDKLRRNRASEELLKEVKKMNEELKKKHEDLEREIEESNRRIEEKLKRNKDKSRKEEEDVRKILEDGDTGDELLERIKDLVRRSEEENKKLLDEHRKIVKTLKERLEKLNEEHERIVREVERRTR

SEQ ID NO: 4203 - protein, 174 aa, Artificial Sequence; identical to SEQ ID NO: 4202
  Synthetic

SEQ ID NO: 4204 - protein, 174 aa, Artificial Sequence
  Synthetic
SSEDELRRLLKEARDTHRESEKRLRDSSKRAEDMHEKSKEDVERSSRELEKELRRRRADEELKRKVKEKNDEIKKKLEDNEDKSRKENEKLRDKLRKNKEESDRLVKRLEDIARRGDTGERLLDEVRKEMKRSEEENRRLLREHEEVVKKSIKENKELLDKHKEIEDRLREEIR

SEQ ID NO: 4205 - protein, 174 aa, Artificial Sequence; identical to SEQ ID NO: 4204
  Synthetic

SEQ ID NO: 4206 - protein, 174 aa, Artificial Sequence
  Synthetic
SEKETLKRLLDEIKKRHKESEDRVRKLVEDAREELDRVADELRKSSEDLRRDLKRANADEELKKKVEKLNRELEKKLRDLRRRMKEEEEELRRKLEENKKESDERVKRLEKIAKDGDTGSKLLREVEKLMEESRKRNEDLLKELRDIIEDLREKLRELLREHREAAKRLRDEIR

SEQ ID NO: 4207 - protein, 174 aa, Artificial Sequence; identical to SEQ ID NO: 4206
  Synthetic

SEQ ID NO: 4208 - protein, 174 aa, Artificial Sequence
  Synthetic
DERETLEKLLKEVRDMHEESKKRLTDSSRKLREDLRRVKEELDKTLRDIEERAKEENISEELKRKLDDLKRRLKEKVKKIEDEVEEKNERIRKKVEENETKSAEIEKRLRDIVRRGDTGSRLLEEAKKLIEESKRENEELLKEHDKIVKELIKKLRDLLKEVEDRARDVTEEAK

SEQ ID NO: 4209 - protein, 174 aa, Artificial Sequence; identical to SEQ ID NO: 4208
  Synthetic

SEQ ID NO: 4210 - protein, 174 aa, Artificial Sequence
  Synthetic
SSRETLDELLRRAEEIHRRSEEELRRSSEEVRRKHEKSERDLEKLLRDAEELLRRENVSDELRDEMRRKVEEVKKKADRNREESEDSNRKVDEDVKRNKEKSRELVKELRKIADAGDTGDKLLDTVRKLVETSRDENRKLLEDHKKMVKESEDRNRELLRDLERVIEELSRRIR

SEQ ID NO: 4211 - protein, 174 aa, Artificial Sequence; identical to SEQ ID NO: 4210
  Synthetic

SEQ ID NO: 4212 - protein, 179 aa, Artificial Sequence
  Synthetic
SEVEEILDRLRREVERSKKKVEDILRELKKLAEDTKEKVERVLDRNRKTIEELKKARLPDEELERALRKDRDELRRIKEDLERRHEEIARRVKEVEDRLRKEHERLEKELREVERDLKISEDLVTKLRDLLRRHHETLRRLAKELRDLLKKHHEELRRLIERLEKSLEDLERELDKTRR

SEQ ID NO: 4213 - protein, 179 aa, Artificial Sequence; identical to SEQ ID NO: 4212
  Synthetic

SEQ ID NO: 4214 - protein, 179 aa, Artificial Sequence
  Synthetic
SEVEKILEDLKKLIKESKDEADRILTDHRRLVKETEEEARRALERNRKTVDDLRKANLREDELRDALRRDEKELEDIVRRLRKLHEDLHRKLKKVTDKLRELHEELKRRVEEVERDLKISEEALRELRRLLKEHHEILRKVEEELRRSDEEHHRRLEEVERRLRKSLRELEETVRETTR

SEQ ID NO: 4215 - protein, 179 aa, Artificial Sequence; identical to SEQ ID NO: 4214
  Synthetic

SEQ ID NO: 4216 - protein, 179 aa, Artificial Sequence
  Synthetic
SEAERILEKLDRLVKETDRRVKEVLEDNRRTVRRLEEEVKRILKENRETARELEEANLPKEDLERRLRRDEEELRKMVEELRERLKRDAEKLEKIKRELRELHERLKRDVEDVTRRVKLDEEVLRRLKKLLDEHNERLRRLERDLDRSLKEAKETLDELERRLEKSLRELKESVDRTRK

SEQ ID NO: 4217 - protein, 179 aa, Artificial Sequence; identical to SEQ ID NO: 4216
  Synthetic

SEQ ID NO: 4218 - protein, 177 aa, Artificial Sequence
  Synthetic
SSEERLKEEFKRAAEKVRKVEEELRELHERVEKSSRDSKRRIRELLKRAEEEVKRVEDRGTDRRKKEEIKRVVDELRKDVRRVEKENDEELKKHNEDLKRVTDEIRKILKEMKEELDKRGASDEVLRDLKRLIEELEDKARRVLDKSRRIIERLRRKDEEVLRKLEKEIRELKKKAN

SEQ ID NO: 4219 - protein, 177 aa, Artificial Sequence; identical to SEQ ID NO: 4218
  Synthetic

SEQ ID NO: 4220 - protein, 177 aa, Artificial Sequence
  Synthetic
DEERELRRLLEDVKRRVREVEEELRRLHEEIKRTSKRSKEELRKLHKELEDAVREMAKRGTSKEKLDELRKELKKHNDRLRKVEEENDRKLERHNRRLRKVERELRELVKKLEEDVRRRGASDKVLRDLEELVKELKRRLDEVLETSRREAEKLKRDDEKVLRESKKIMEDLRRRAE

SEQ ID NO: 4221 - protein, 177 aa, Artificial Sequence; identical to SEQ ID NO: 4220
  Synthetic

SEQ ID NO: 4222 - protein, 177 aa, Artificial Sequence
  Synthetic
SEEDELRKLLEELRRRSKEVNDRLRKLHDELRRRVEDLKRKLRELHKEAAKIVEEMKARGTPEEKLRELEKSLEDHNRDLKRVEDEIDDKLRRHNEILKEVHKRDRDSLRRIEEEVRRRGASDKVLEDLRRLVEENTRRLEEMLKRSEKIARDLLEDVKRFLDESKKKIDTLRRRAE

SEQ ID NO: 4223 - protein, 177 aa, Artificial Sequence; identical to SEQ ID NO: 4222
  Synthetic

SEQ ID NO: 4224 - protein, 177 aa, Artificial Sequence
  Synthetic
SLEDELRRLLTEAEKRSKDVNERLRDLHREVRELSEDVNRKLEELHRELEERVKELKREGRDEEELRKIEETLKRHNEELKRVHERDRDTLREHNEKVKKVHDDDRRSLEELRERLKREGASDEVLKKLKELVRRNEEELEKALKESKDIVEKNKRDLDEVEKKSREIVRELIERTK

SEQ ID NO: 4225 - protein, 177 aa, Artificial Sequence; identical to SEQ ID NO: 4224
  Synthetic

SEQ ID NO: 4226 - protein, 177 aa, Artificial Sequence
  Synthetic
SLEETLEKLLREAEDISRKANKRLEEAHERIKRTLEDLERKLEKLNKEVRDRVERVKERGTPEEKLKDIERRLREHEKRSKEVRERLREDLEDHNRDLKRVHDEDKKSLDRLREELERKGVSDKVLEKLKRLIEENKKRLERVLEKSDKILDDLRRKVEEVLKRLEKTVKDLEDEAR

SEQ ID NO: 4227 - protein, 177 aa, Artificial Sequence; identical to SEQ ID NO: 4226
  Synthetic

SEQ ID NO: 4228 - protein, 179 aa, Artificial Sequence
  Synthetic
SEDEELLRRLEETIRRATERVKRLLDTLRKLAEDVRKELERLLDTHRELAKRIEDELREGRSKEVSDKVREENKEHHKEVERRLREIEERIRRHHKKVDEILKEIEKRLKEIIEEILRTRGRTPEEVERVLREVTKRLRDLKREHRKLLEKVKRELEKVEEDHRDSSRKLEEIIKEAEK

SEQ ID NO: 4229 - protein, 179 aa, Artificial Sequence; identical to SEQ ID NO: 4228
  Synthetic

SEQ ID NO: 4230 - protein, 182 aa, Artificial Sequence
  Synthetic
SEAEKLAKDIREAAKRLREHAERDKEELKKAADKLRDEARRDAEKLKRAAEKLKDLARRTGNTEELEKEAREIHERNKRNLERLEKEAREIHEENKKNLERLDREAERIEKEVRDAVRREQLDEEAAKRIKELLDKARKDLEDAKREAEELNRRAREELEKAKKDAEDLNRRAKEELDKARK

SEQ ID NO: 4231 - protein, 182 aa, Artificial Sequence; identical to SEQ ID NO: 4230
  Synthetic

SEQ ID NO: 4232 - protein, 182 aa, Artificial Sequence
  Synthetic
DDKDKLLEELRKVIEELEKKLEDNNRELEKVLEKLKREAERDLERLREMIRRLEELLRRDGPTEELRKDVERIHRENRENLKRIKKEVDEIKEKSKRSLEELKKEVDKIEEDLERLAREKNLSEEVLDRLRRIIEELRERLKRAEKSNRDILERIDRELEKLKRRAEELNEELRRRLKERRD

SEQ ID NO: 4233 - protein, 182 aa, Artificial Sequence; identical to SEQ ID NO: 4232
  Synthetic

SEQ ID NO: 4234 - protein, 182 aa, Artificial Sequence
  Synthetic
SRTEEVLKELRTLMRELRRRLEEVIKELEKSAEELERIAREVAKRSRKVIEELKRKADKDGTSDRLLEEVDKLLEEHNEELERVKKKLTDDLREHRRRSKEVKERLEKKLREIEKRLKEVVDRDGPREELEDLLRRIRETLEDMKRRLDELDTELEKRLREVARTLDELHKELEETLRRLKK

SEQ ID NO: 4235 - protein, 182 aa, Artificial Sequence; identical to SEQ ID NO: 4234
  Synthetic

SEQ ID NO: 4236 - protein, 175 aa, Artificial Sequence
  Synthetic
DAEDELRELSKRNKDEVREVKERLKKLSEENRRDLERVKRKLEKDSEENREALERENKENKEVVDRVEKVHRDIEERVKKIKREVDKLHREVEEEVERIERDLERVHRELEEDVKREGVTEELKKRIEELIRRSRKLAEDLKKKLEDIHRETERLVRELAELVRDLHRRTKEKAR

SEQ ID NO: 4237 - protein, 175 aa, Artificial Sequence; identical to SEQ ID NO: 4236
  Synthetic

SEQ ID NO: 4238 - protein, 175 aa, Artificial Sequence
  Synthetic
SAEDRLRELSKRNREEVEEVEKRLRELMERIRRRLREVKEDLRRLSEENRKTLERKNKDQRELVKRVEEEHRKIEEEVERTERRVEKVLEDIEREMDRIKKKLEDDHRKLEDEVRRRGVTEEIEERIKRLIKESRDLARELEEKLRKLLEELEKLAKRLREKVKELHDDTERAAK

SEQ ID NO: 4239 - protein, 175 aa, Artificial Sequence; identical to SEQ ID NO: 4238
  Synthetic

SEQ ID NO: 4240 - protein, 175 aa, Artificial Sequence
  Synthetic
SEEDELRELSRRNEEEVKKAKRDLEKLSRENEEDLKRVKRKLEKKSEDNRRILERDNREAEEVVRRVEERHKELRKRMEEIEREIRKVHEELRREVEEIEKDLRRVHDEIKKEIEDKGVTEEVKKKIEDLIRRSRELVERLKRKVEELHKTTKRLVEELEKTIDRIIEETRERAR

SEQ ID NO: 4241 - protein, 175 aa, Artificial Sequence; identical to SEQ ID NO: 4240
  Synthetic

SEQ ID NO: 4242 - protein, 183 aa, Artificial Sequence
  Synthetic
SAEDELRRLLRENRERNKKADKDIKKLLDDNRRDLERLRRELERILREIEKRLKDVEKDVEGRRLEEIRKRLERLRREARRELERLERHNRELLEEHKRKNEENEKHNRELEKEAEELSRRGTTEDVVRELMKKVDDDHKESEKLVRESEEKLERDNERTRRIADKLRKELDDTREEIERDAK

SEQ ID NO: 4243 - protein, 183 aa, Artificial Sequence; identical to SEQ ID NO: 4242
  Synthetic

SEQ ID NO: 4244 - protein, 181 aa, Artificial Sequence
  Synthetic
DSEERAEDVARENKEILERVDEKARKLLDDNRKVVEELKKTNEESSRELKRVLDELNIDEDLLREIEKLNRTLKKKTEDLAKDNKKIDDDLRRELEELKRENKEKDKRLREELEDLKRKGSSEETVEELLKKMRAISRDSERKVKELLDKIRELSDRSRRRAEELNKEHKKIVDDIAERRR

SEQ ID NO: 4245 - protein, 181 aa, Artificial Sequence; identical to SEQ ID NO: 4244
  Synthetic

SEQ ID NO: 4246 - protein, 181 aa, Artificial Sequence
  Synthetic
SVEERLRELVKENRDVVRRAEEEFRRLVEENKRILEEIDRRARESSRKLKDVLDKLNIDEDALRRIEERNKDVERKLEELKKRNKDKDEKLAREIEKLKAENEKEDRDLEREVRDLKKKGSSEETMERLLRKAKEISRRSKERLKRLLDKVKKLSEDSERELKKLLDEHEKIVEDIEREAR

SEQ ID NO: 4247 - protein, 181 aa, Artificial Sequence; identical to SEQ ID NO: 4246
  Synthetic

SEQ ID NO: 4248 - protein, 181 aa, Artificial Sequence
  Synthetic
DDERRLREVSDRNRRILDRIKKEVERLLDEVRKILKEAEDRLRRSSERLEELLRKDNIDEDKVREIRRLNEEIRKKVEELRKEIRDLLEELRKRADKLTEENKDTDDKLRRRAEDLKRKGSDEREVKKTLDEMRRRSRESEEELKKLLKEIKEIVEELKRKLDTLLKEHKEIVEEIKRRTT

SEQ ID NO: 4249 - protein, 181 aa, Artificial Sequence; identical to SEQ ID NO: 4248
  Synthetic

SEQ ID NO: 4250 - protein, 181 aa, Artificial Sequence
  Synthetic
SDEERVRRLEEEVDKTLEKVERELRKVSEENKRTLDRLRAEMEKSSKELERVLEELNIDEELRKEIKRRNDELRKELEELLTRNRKKDEDLKRRAEKLKREIERLKEELKRELEDLKRKGSDERDVERTLRKIEETVKKLAEDLKRLLDEIKKISEESKRRAEELLRKHKKIVDDIDKRTR

SEQ ID NO: 4251 - protein, 181 aa, Artificial Sequence; identical to SEQ ID NO: 4250
  Synthetic

SEQ ID NO: 4252 - protein, 182 aa, Artificial Sequence
  Synthetic
SMKEELDRLLKELRERNKEIEDRAEELLRRSTDSLRKVKEKLDKLLEESTRILRKVEKENRVSEDTLRELREIHERLRKELEDAKRDLDRDHKELAEKLEEIIRRNRENLRRLEREVEEMKKRNDLSEKVLKDIKRVIDEDEERLKRVLDDYERRVRELEDKVKKILDRYKTEVDKLRERAR

SEQ ID NO: 4253 - protein, 182 aa, Artificial Sequence; identical to SEQ ID NO: 4252
  Synthetic

SEQ ID NO: 4254 - protein, 182 aa, Artificial Sequence
  Synthetic
SVEEEIRDLLRKLREIVDRVRRRLKEILEESTRRLEEVTRRIDESNEDLKRAVDDVKRRNTRDEEVKRELDRKLKKIHDEDKREKDKLEKIHRDLTDKLEKAKRKLEELVKRIEKEVEDVRRENKLDKEVLRKLEEEIEKLRKEAKKILDEYRKLVEDLADKIKKILDRNRKLIEELVREVK

SEQ ID NO: 4255 - protein, 182 aa, Artificial Sequence; identical to SEQ ID NO: 4254
  Synthetic

SEQ ID NO: 4256 - protein, 182 aa, Artificial Sequence
  Synthetic
SESEKTLKDLDEISKRYEKKVREMLERHKRLSEETKKRDDEALERLTRLVKELKDVARRGDISEDEIRRTLEELRELVKDVKRRNDETNRELEERSDRVNKDLERINRDLKRLVDEAAKRGISEDVKRRLDELLERHKRISEEVEKRNEDLLREHEEISRRSKKRIDDLLREAERILDEMRR

SEQ ID NO: 4257 - protein, 182 aa, Artificial Sequence; identical to SEQ ID NO: 4256
  Synthetic

SEQ ID NO: 4258 - protein, 182 aa, Artificial Sequence
  Synthetic
SESEKVLRDLEKISEDTARRLEDELRKHKEIVDRIKEEDDEMLDRLRKLVETLKRLAERGDISDKVIRDMLRELRKRVREVEERNKRLNEELKKRSDEVNKELEETNRKLERDVREAERRGTSEEVKRRLEELLKRHKEESDRARERNERLLKEVRDLSEESRERIERLLRELEERVREDER

SEQ ID NO: 4259 - protein, 182 aa, Artificial Sequence; identical to SEQ ID NO: 4258
  Synthetic

SEQ ID NO: 4260 - protein, 182 aa, Artificial Sequence
  Synthetic
SRSEKSLKELREISERTRKRLEDKLDRHEKESKKVEDKAREVLKELEDLVRTLEEVARRGDISEEMIDRELKKLRERVKEIKDDLKRLNDELRERSKRVNDRLKEENEKLKRKIDEVEREGIDEEVRRRLRELLERHKRISDEARKRNEDLLREHEKRSRDIEKRLDDLLKEAEDRLRERKR

SEQ ID NO: 4261 - protein, 182 aa, Artificial Sequence; identical to SEQ ID NO: 4260
  Synthetic

SEQ ID NO: 4262 - protein, 183 aa, Artificial Sequence
  Synthetic
SDEEELRRLIEEHEKILKEIEDRVRESSKRNKEILKRLEDEVRKLLETVKDRLEKARERVDERLVKRVEERLEEIKRRVEELLKENEETDERLKKRVKETLDRSREEVKRVEERLRDLKRKGSSSETAKRVLDELKERSERSMEDLKRLLKEHKERVDEMRRRAEELLKRLREVIRKVEEEIR

SEQ ID NO: 4263 - protein, 183 aa, Artificial Sequence; identical to SEQ ID NO: 4262
  Synthetic

SEQ ID NO: 4264 - protein, 183 aa, Artificial Sequence
  Synthetic
SRDEEVKRLKKEHEDILEEIRKRVDESSKRNEKILREIKERVKRSSDDLKRLLEELRERVREREVERVEDENRRMEERVDRTLEKNRDLDRRLKEEVDRTLEESKKTVEELEKKLRDLKRKGSSEEDVERVLREFEEVSRRSEETLRRLLEKHKELVERAARELETLLKEHRERVRKIEEEAK

SEQ ID NO: 4265 - protein, 183 aa, Artificial Sequence; identical to SEQ ID NO: 4264
  Synthetic

SEQ ID NO: 4266 - protein, 174 aa, Artificial Sequence
  Synthetic
SSKERLEKLLRELEEDLRRAHEEHKRLIKRLREILDEIRKRVEKLNRDLDRVLERAREEGKLDEDLRREVEDIKRRNKENLKRLEDEVRRTEREIEELNKKLEKEVRDIAEDLKRKPVDEELLKEVKEMIKRLRKKIKKSLDDVRRVIRELEEHARRDLRKLEKDLKDIEDKLR

SEQ ID NO: 4267 - protein, 174 aa, Artificial Sequence; identical to SEQ ID NO: 4266
  Synthetic

SEQ ID NO: 4268 - protein, 174 aa, Artificial Sequence
  Synthetic
DSEERLKELERRLRELLKRVSERSKKLNKEHEEINRKAEEEVERLNRELERDLEDAARKGLLDKDLKKKVDDIRRDNRRNLEDSKRRSEKVSRENRERNERLRDRVRKIEKRLRERPVTDELLREAEKMLKELEELVREDEKRLKDISKEVEEHYRKDLEDVKRAIKEIRDRLK

SEQ ID NO: 4269 - protein, 174 aa, Artificial Sequence; identical to SEQ ID NO: 4268
  Synthetic

SEQ ID NO: 4270 - protein, 174 aa, Artificial Sequence
  Synthetic
DSERRLEKLLRELKELLKRVEESLRRLNEEHKRINDEARERSKRLNEELEETLRKAREDGRLDEELRKKVEEIRKRNEDKNRESEKDSERVRKENEDNLKRLKEKVEEIERRLRAKPVTEELLKEIKDRLKELAEHVERDERRLKRISEEAEKRYREDVREVKEMIEEIERELR

SEQ ID NO: 4271 - protein, 174 aa, Artificial Sequence; identical to SEQ ID NO: 4270
  Synthetic

SEQ ID NO: 4272 - protein, 174 aa, Artificial Sequence
  Synthetic
ESEERLRDLIRKIRELLEEIERRLRDLNRRLREILKRIEEESEKLNRELKKILDEARERGLLDKDLEREVRKISKDNKKKNDDLRRDVERISRENRKNLEKLKKKVKDIEEELRRKPVTEELLKEVRERLRELEEHARRDLETLKRMIRKLEEEAKKDLRELEKMIKDIRDKLK

SEQ ID NO: 4273 - protein, 174 aa, Artificial Sequence; identical to SEQ ID NO: 4272
  Synthetic

SEQ ID NO: 4274 - protein, 179 aa, Artificial Sequence
  Synthetic
SLEEALRKLEEELERLNEEAKRRIDRLIEELRRLNEEARKKIERLIEETRELLKRLAEEGKVDEELEKEVRRIEKENKEALDRSREETKRIEEEIKRVEEDSRKKTEEIKEELKELIRRDGGIDREILERAKELLKKLEREYRELLKKIEKVVRDLEEKYRELLKRHRKETERLDREVR

SEQ ID NO: 4275 - protein, 179 aa, Artificial Sequence; identical to SEQ ID NO: 4274
  Synthetic

SEQ ID NO: 4276 - protein, 179 aa, Artificial Sequence
  Synthetic
ELAERVKRLIEEHRKTDKEVEDRIRKLIEDHDRENRKVEDEIRKLIKELREIVDRARKEGKVDERVEEKLRRLEEEIERVLRELREESKRLEEEIKEVLDRLKEESKKLEEDIKEVLRRDGGIREEILDKIREVHRRVRKKARDLAERIKDAHRKLRKKVEELLRRIKEMIRRLEEELR

SEQ ID NO: 4277 - protein, 179 aa, Artificial Sequence; identical to SEQ ID NO: 4276
  Synthetic

SEQ ID NO: 4278 - protein, 179 aa, Artificial Sequence
  Synthetic
SDRERLTRLIEELRKLLEKWEREVKKINDEIRRTVEKVEEDSKKSIEDLRRLLKEMEDRGSVDEEMRKRVEEVERRNEKVLRDLRETLKKVHEDNKKITREVRERVKEVEKRLEDLRRRQEEDTKDLERRIEDVIRRLKKLADDDLRDLRRFLKELKERADKLRKEDEEALKELRDRAE

SEQ ID NO: 4279 - protein, 179 aa, Artificial Sequence; identical to SEQ ID NO: 4278
  Synthetic

SEQ ID NO: 4280 - protein, 179 aa, Artificial Sequence
  Synthetic
SREDDIRRLIEEARKLVEDAERRSKKSIDDIRRLVKEWEEEVKRINDDLKRLIDEARKRGDVTEEIEEDLRRMHKKNREIADRVRRELKRVEDDNKRVLDELREVLERIEREIEDLRRRNREPDKDLKERIKKLLDELRRLVEELEKRDKEMLDRIKKLADDDRRELERILKKLEDDLR

SEQ ID NO: 4281 - protein, 179 aa, Artificial Sequence; identical to SEQ ID NO: 4280
  Synthetic

SEQ ID NO: 4282 - protein, 179 aa, Artificial Sequence
  Synthetic
SAEDTIRTLLERHDDLDREVEERSKESIRELRRLIKEWRERVRKLNEELKRLLDDLRRKGLVDERLTKKVKDVHDDNDRIKKELTKRLREVEERNKEDLKRHKRESDEVKKKLTDLRRRKRNRKEELIEEIKEMNKKAKKSVDELEKKDRDVLDEIRKMAKEDLDRLRKALEDLERDAR

SEQ ID NO: 4283 - protein, 179 aa, Artificial Sequence; identical to SEQ ID NO: 4282
  Synthetic

SEQ ID NO: 4284 - protein, 179 aa, Artificial Sequence
  Synthetic
SSEDRVRDIERRHKEEDDRVEEESRRSTREIRELLRTAKERSDDSIRKLRKLIDDLRKEGLVDERLKEKLKRVEEENEEVLRRLEKRLRDVERENKKLLDDHKKKSKEVKDRLRKIETDQKRRTEELEKELEDVNRDVDRSAKRLKERDEEALKTLEDEIRKLEEKDKKVLEDLEREAR

SEQ ID NO: 4285 - protein, 179 aa, Artificial Sequence; identical to SEQ ID NO: 4284
  Synthetic

SEQ ID NO: 4286 - protein, 181 aa, Artificial Sequence
  Synthetic
SDKEEVDKLKERNERVLEEVRRRLEKLEKDNKDTLKKIRDDSERLREKIKRVRDREQISEEVEKKIKRDEDENTRHNEELEEDNRRKTERVKEEMKRIEDENEKKDRRFDERVKRAKENNSSREFVEKALREYEELLKRSRETLEELLRRYKKLLDESRKTAKEDLDRSEEIIKKLADESK

SEQ ID NO: 4287 - protein, 181 aa, Artificial Sequence; identical to SEQ ID NO: 4286
  Synthetic

SEQ ID NO: 4288 - protein, 181 aa, Artificial Sequence
  Synthetic
SDEEEVKKLHDENKKVNDEMREESKKLHDENDRVNKEVKERAKKVSKELEDMLRREQRPEEELKRIEEELRRLAEKVKDLNKKNKEIDDRNKDHNRELNKENKELDEELKKELDRAKRENSSEETVRRLLEKVREEIRRSKKRADDDLKTTKELIEKSEREVDRLLEEIKKIIEELERRAR

SEQ ID NO: 4289 - protein, 181 aa, Artificial Sequence; identical to SEQ ID NO: 4288
  Synthetic

SEQ ID NO: 4290 - protein, 179 aa, Artificial Sequence
  Synthetic
SELEKVLREVEENLREVKRENEEKLRRNEENIKRLEEEDRRRLEEIEKMIEEIERARIREDELDRRLRELRERVKKIEKKNRDHLRRDEKELRDVLRKHKKHAEETEKRVEDAKRRVLDGKEVEEELRRLREEYEEVSRRSKEELEKSLRRLEEVHKESRKRLRDLLKKLDDVAREERK

SEQ ID NO: 4291 - protein, 179 aa, Artificial Sequence; identical to SEQ ID NO: 4290
  Synthetic

SEQ ID NO: 4292 - protein, 179 aa, Artificial Sequence
  Synthetic
DELRELLKDIKRTTEDVEREVEEILRKVEEMIRRLEEEDRKVLEDIRRKIEDIRRANIPREELEEELKRLEEEIEKILRDNKRKLDELKEEVDRARRKLEKLSRDLEEKIKELARRVLDGEEVRKEMERLRREHEDVDKKVRDELRKLEEELRRVHRESEKALRDLLRKLREVAEREKT

SEQ ID NO: 4293 - protein, 179 aa, Artificial Sequence; identical to SEQ ID NO: 4292
  Synthetic

SEQ ID NO: 4294 - protein, 179 aa, Artificial Sequence
  Synthetic
DELEDFLRKVERVIKELRDDDKRALDRIREVTKDVERKAREILKRVEEVIRRIEESNIREDELKEVLERLKEEARRLKRELEKLSEELKKEIKEILDRNRKKLRDLEEEVKEVRKRVVRGREAEEALERLKTRLEKVHRDSKRALEKLRRDHEEVDKRITEELRKLMERLKRVVDELRR

SEQ ID NO: 4295 - protein, 179 aa, Artificial Sequence; identical to SEQ ID NO: 4294
  Synthetic

SEQ ID NO: 4296 - protein, 181 aa, Artificial Sequence
  Synthetic
SADEALRELEERNRKVNEDVKREDERLHREDREVNKRIREEDKKLHKTLRDVLEELRKKVSEEELKKIEERLKRVNDTNEDLHRRNEEKVRRLNEENRKKHEENEKKSRDLKEEFERDKDGDERRVEKLLRRYKKVLDEVKRELKESLDKAERVTRKSEDDARRSLEEIKKEIEEVRERIR

SEQ ID NO: 4297 - protein, 181 aa, Artificial Sequence; identical to SEQ ID NO: 4296
  Synthetic

SEQ ID NO: 4298 - protein, 181 aa, Artificial Sequence
  Synthetic
RVDEELRKLVEDNKRKNEEVKKELKKLKEENERVNKEVRERDRKLHEKLRRVLEEVRRTIREDELREIEETLKRLNDRNEELHRRNEEESKRAEDKVRTELEKNRKISEEIKKKAEDRKDGDEEEMRRLLEEYEELVRRVLKRLKEILEEYERLVRRVEEEVKKSLEDIERKIKEAKDRVD

SEQ ID NO: 4299 - protein, 181 aa, Artificial Sequence; identical to SEQ ID NO: 4298
  Synthetic

SEQ ID NO: 4300 - protein, 181 aa, Artificial Sequence
  Synthetic
DVEEEVKKLKDKNRRINEEVKKRMRELEERNKELNKRIREEDERLHRELRKVLEEARKTIDEKDLKRIEDELKKMNEENEKETEENERRSKEVKDRVREELERNRKESRDIEERLRRIKDGSREEVEKLLREYEERLERVRKRVEEILAKYKELLDRVEERARKSLKEIKETIEDARRRIK

SEQ ID NO: 4301 - protein, 181 aa, Artificial Sequence; identical to SEQ ID NO: 4300
  Synthetic

SEQ ID NO: 4302 - protein, 181 aa, Artificial Sequence
  Synthetic
SMDEELDKLTRENEAVNERVEREARRLKEENRKVDEEVRRAVEELKERVRRVLEEVRRKISEEKLRKIEEDLKRIEEEIERLEERNRRESEKFEKEVEDKLRENDKKSKEVRRDVERIKDGDEEDVRRLLEEYARLVREAEREVREILRKYEELVRKARKDAKKLLDDIERKIEKIKRDVD

SEQ ID NO: 4303 - protein, 181 aa, Artificial Sequence; identical to SEQ ID NO: 4302
  Synthetic

SEQ ID NO: 4304 - protein, 181 aa, Artificial Sequence
  Synthetic
SMDEELKKLVKENEDLNRRVREEAERLRKENEKVDEDAEREDKRLHDKAERVLRELRRRIRKEELDRVRRELERVNEENRELLERNKEESKRFREEVERTLEENRKLSEELKKKMEDIKDGDERTVTELLKEYRELVRRVEERVKKILKEYKEEVEEVKRRLEESLKDIERKIDEIRRRAT

SEQ ID NO: 4305 - protein, 181 aa, Artificial Sequence; identical to SEQ ID NO: 4304
  Synthetic

SEQ ID NO: 4306 - protein, 181 aa, Artificial Sequence
  Synthetic
SMDEALEELTRRNEEVNKRIEEEDRKLHKRNKEVDDEVRKRDKDLHDELRRVLEDARRTIREEELKRIEDKLRRLNERNEERLKRNEDRSREVNRRNKKLLDENRERSKRMKDDADRIKDGDEDEVEKLLREYKRRVEEVKKRAEDSLKRYEEEVKELEDEVRESLERIRRDIEDVKRRID

SEQ ID NO: 4307 - protein, 181 aa, Artificial Sequence; identical to SEQ ID NO: 4306
  Synthetic

SEQ ID NO: 4308 - protein, 181 aa, Artificial Sequence
  Synthetic
SMDEAVEKLKKENKDIDEEVRRRLDELRKRNEEVNKKIKEDDDRLHKEAKEVLEDVRKTISEDELRRIKERLEEINKRNEELLRDNRRRSEEMTRRVEELLKRNEDESRRLEETLKRVKDGDEDIVRKLLREYEKLLREVRERARRILEEYKRLVKEVRERAERSLEELKREIKKVRDRAK

SEQ ID NO: 4309 - protein, 181 aa, Artificial Sequence; identical to SEQ ID NO: 4308
  Synthetic

SEQ ID NO: 4310 - protein, 176 aa, Artificial Sequence
  Synthetic
SEKEELLRKAKEVIDRIRKELEELLRRAREVNKDSRRTVEEVLRKAREVSERVRKASERGTDDKEELAKENERLVRELEEEVKKLHDDDRKKDETLRREVEELARRIRKLLKELEEEVGRDEELDDLRRRAEELLKRAEDEIRKLHEENKRSNEEAERAIRELAKRNKELDDKTRE

SEQ ID NO: 4311 - protein, 176 aa, Artificial Sequence; identical to SEQ ID NO: 4310
  Synthetic

SEQ ID NO: 4312 - protein, 176 aa, Artificial Sequence
  Synthetic
KEKEDLIEKMKKVLEDIRKRLEELLKRARKVNEDSRKLVKEVLDKIKKVNEDVRKVATESTDDKKKLAEENRKLVEELRKELKEVHDEDKKLDDELRDRLRRIEEDIRRLLRDLEREVGRDEELTRLAREIEKLLEEARRRVEKLHEENKRSNEEAKERMERLRDHNRKLDDDTRK

SEQ ID NO: 4313 - protein, 176 aa, Artificial Sequence; identical to SEQ ID NO: 4312
  Synthetic

SEQ ID NO: 4314 - protein, 176 aa, Artificial Sequence
  Synthetic
REREELIKKVRTVHKRSEEELRRHSEEVKKVNRDSRERVKEHLKRVKEVIKELEDVARESTDDKKKLLEEVRKLLEDLDRHLRELHKRDEKLDRELDKHLRDLKRDNERLLRELEKEVGRDRELKELADRNKKLLEDIEREHKKLHEDNRRSNEDARRRHEELKREVEKLLDELRK

SEQ ID NO: 4315 - protein, 176 aa, Artificial Sequence; identical to SEQ ID NO: 4314
  Synthetic

SEQ ID NO: 4316 - protein, 183 aa, Artificial Sequence
  Synthetic
SLEEEIKRLVKHHEELLREVRKRLKELEDHHRELDERHRRMLEELVREARKLIKDVKDDIDRKLVEELRKKLDDLARELEELNRESNRKLKKLVEEVEKILEESLRRVEELKRDVERKRSKPTDEETVERILRTLKTTDERTTDTVREILRKIKRTNEESKETADRTVKRAKDLIREIRERVR

SEQ ID NO: 4317 - protein, 183 aa, Artificial Sequence; identical to SEQ ID NO: 4316
  Synthetic

SEQ ID NO: 4318 - protein, 183 aa, Artificial Sequence
  Synthetic
SAREAIKEIKKHHKKLLEDVKETIDRIEEHHRKLDKDHRDELKKLLEEVRELLRDIRSRIDKKLVDDLERKLRELEKKLEEENERSNRRLEKLKREIEDELRESEERVRRKEEEVKKTESKPTDERTVEKILEELKDMNRATKRRVEEILRRLKKTNDESEKRARDTLTRIKELIEEVERRAR

SEQ ID NO: 4319 - protein, 183 aa, Artificial Sequence; identical to SEQ ID NO: 4318
  Synthetic

SEQ ID NO: 4320 - protein, 185 aa, Artificial Sequence
  Synthetic
DESEELKKEAKEILDRLEKVLRELTDRNREMLKRIEKLIRENEKRLEDILREIAKRASEDRDERVLREIVRDVRRLIKENREEDDRIRRDVERYLRKSRRDMEELTRRLEEVIKRLEDKVREARVPEEVEKELKRIKDELKRLVEKAERSLRESEERLRRLLEEAEKRNRKVEREIEKLLDDTRK

SEQ ID NO: 4321 - protein, 185 aa, Artificial Sequence; identical to SEQ ID NO: 4320
  Synthetic

SEQ ID NO: 4322 - protein, 172 aa, Artificial Sequence
  Synthetic
SKEEKITRDAEEVLRRSEEIIRRLLRRLEEVLKDLERSARENKKRLDKILEDLAKLDTDRSVLKKAVEDVHKRDRETLKRHDEESKKVKDELEELLRRHNKELRDVRDELRRRGADEKRVKRMEEELRRLHEEVRRRVEKVKRDMDRLNKKIKEDSRRVNEEIRKLLEDKTR

SEQ ID NO: 4323 - protein, 172 aa, Artificial Sequence; identical to SEQ ID NO: 4322
  Synthetic

SEQ ID NO: 4324 - protein, 172 aa, Artificial Sequence
  Synthetic
SEEEKVRKELEEVLRRSDEDIERNRRRLEKVLDDLRRSAEENKRRLKEILDRLKDTDTEERVLKKIAEEVHRKDRKTEREHEERSKRVHDEDERSLREHNKKLKKVKEDLDRRGADEKEVRKVKDRLDKLHEKVKRISEEVNERIRRLNKRIKEISKRLNEELEELLRRRRT

SEQ ID NO: 4325 - protein, 172 aa, Artificial Sequence; identical to SEQ ID NO: 4324
  Synthetic

SEQ ID NO: 4326 - protein, 172 aa, Artificial Sequence
  Synthetic
DELEKFKEDVKEVIKKLAETIKRLLDDVRRVLEKLRKLAEENKERLDRILDELRRLRTDEREVERKVEEVHRRDKKTLDELRRDVKEVKERIEEVLKRHDEDSERVDKELKDRGADEKEVARLREEIKKLNERLKREVERLKRELEKLLRDIEKTSEDANRRLKELLDRTRK

SEQ ID NO: 4327 - protein, 172 aa, Artificial Sequence; identical to SEQ ID NO: 4326
  Synthetic

SEQ ID NO: 4328 - protein, 172 aa, Artificial Sequence
  Synthetic
RREEELLERAEEVLEKLERIIEETERELKEVLDRLRKSIEDNLRRLKKVLKELKDNDTDRETLRRELDKVHKEDRDTLREHKRESERVKKELDEKLRRAEEEVRRVEEELDRAGLDEKDLTEVKKRLRDLLKKMEDVLREVKKRLDDLNREMDDRSRKANEELRDLVRRKEK

SEQ ID NO: 4329 - protein, 172 aa, Artificial Sequence; identical to SEQ ID NO: 4328
  Synthetic

SEQ ID NO: 4330 - protein, 181 aa, Artificial Sequence
  Synthetic
DVERKLREVEERHKDVLKKAKELLDKVEEDHKKSSKEVEDVLEEMRRRAEKLVRDAVRKKGGSPRDLEELKKELEETLRRIRERNKRHHDEVKKRLEEVEEELKRHHDEVKKTLETLKDIRGDELARRIEEELEKLLRTLEELVTEIIKELEKLLKTHEDLLREVEKTLRRIIEELEKRDK

SEQ ID NO: 4331 - protein, 181 aa, Artificial Sequence; identical to SEQ ID NO: 4330
  Synthetic

SEQ ID NO: 4332 - protein, 181 aa, Artificial Sequence
  Synthetic
SVEETLRTVEEEHRKSSKEAEELLEEVERRHEESSKRLEDTLREAEKEVRRLAEDVVRRRGGSPEELRKIMEDIKRKLDRIREENKKHHEEVRREAEEIRKRNKKHHEEVKRVLERLKDIRGKELVDEARRELKELLETHKETVKRVLDKLRDLLRTHEEKMKDVEETLRRLLERLKEETR

SEQ ID NO: 4333 - protein, 181 aa, Artificial Sequence; identical to SEQ ID NO: 4332
  Synthetic

SEQ ID NO: 4334 - protein, 181 aa, Artificial Sequence
  Synthetic
KVEDSLREVKKRHKDKVDEVRKRLREAEEENKRLLDEVRRELERVEERIRRIVEEIVRKKGGSPKELERIKKEIEDELRRIEKELEDSERRNRELLREIEKRLEDHHRKVEKVLRDLKDIRGDEEARDIERRLRDLERTLEELVKEADERLKRSNEEDEERIRRVRKKLEELLRELEKRDE

SEQ ID NO: 4335 - protein, 181 aa, Artificial Sequence; identical to SEQ ID NO: 4334
  Synthetic

SEQ ID NO: 4336 - protein, 181 aa, Artificial Sequence
  Synthetic
DEDRDLKRELDRLLREHEELVDRSTKRLEKLLRKHEREARESKKELEKLNDELREIARKPTEERDLERSKRRLDKLKKELEDKNREARKELEDLREELREINERVRKKVKELEDDIRRKNSSEDVKRKLEEVRRRIEESVKRHRETVEEMRRRVDESVRRHERTVDELRRTHEELIERVRR

SEQ ID NO: 4337 - protein, 181 aa, Artificial Sequence; identical to SEQ ID NO: 4336
  Synthetic

SEQ ID NO: 4338 - protein, 181 aa, Artificial Sequence
  Synthetic
KDEEKIIEDLKRLLRKHEKLVEESRERLKRLLETIRKIAKDIVERLKRLNEELREIAKRPTPDEDLKRSKEKLDELEREIRELLEELEKRLRELEKELREINETVKREIEELRKEIERRNSSEEAREKIKRVVEELKESVERHERDVDRVRREAERLLEEVTRRIETVRRTHERLIEEIKK

SEQ ID NO: 4339 - protein, 181 aa, Artificial Sequence; identical to SEQ ID NO: 4338
  Synthetic

SEQ ID NO: 4340 - protein, 181 aa, Artificial Sequence
  Synthetic
SEKDEIKRELEELLREHEKLAEESRRRAEELLRDIERRARESLTELRELNKKLREEARRPVPDEVLEKSEKELEDRLRELEERNRKLKEDLDRLREEVEKLNRDVERKVEKLRKDIEERRTSEDVEREIRKVREDLKRSVDEHRKDLERIRRELEELLEKHHEDLRDVERTHRELLKEIKR

SEQ ID NO: 4341 - protein, 181 aa, Artificial Sequence; identical to SEQ ID NO: 4340
  Synthetic

SEQ ID NO: 4342 - protein, 179 aa, Artificial Sequence
  Synthetic
DVEDELRRLHEENKDLLREAEEELERLHRENKKLLEDARRLLERLEEELERIERRLKTDERDRREIRREADELRKRFEKLEKENRDINRKLREEFKRLKERNEKEDEDAKRRVEEKRGGDREEVEREVRKIEKLIRDSRERVRELIEKIERTLRDSERRVRELVKEVEKRLREIERKVE

SEQ ID NO: 4343 - protein, 179 aa, Artificial Sequence; identical to SEQ ID NO: 4342
  Synthetic

SEQ ID NO: 4344 - protein, 179 aa, Artificial Sequence
  Synthetic
DVEKELKELHDKNEEILERARRLLERLHKENEEINKRVEEALRRLAEELRRLKEELDDDESVKDKIDKLLEEAKKEVKRLNEENRELNRRLEERMRDLERRNRETNERLKKEAEEKRGGDRREVKELIRKIDELLRRSKEEVDRLVKEVERLLRESKRRVEEVIEKLRKIIEELEREVR

SEQ ID NO: 4345 - protein, 179 aa, Artificial Sequence; identical to SEQ ID NO: 4344
  Synthetic

SEQ ID NO: 4346 - protein, 179 aa, Artificial Sequence
  Synthetic
REVEEVIKDARRLLEELRKHSEDEVRKVEEEIKRLRDDNKRAVDDIERLLRELEEANLPEDEVEKVVREIRERAKEIKKRHEDKLRELRKKLEEVKKKHKKLVDDIKTKLKRVRDELVRDRRAETKLEELRRRLDEILRTTEELLRRLKRELEKLSEESKARLDELKRKLDEILKETRR

SEQ ID NO: 4347 - protein, 179 aa, Artificial Sequence; identical to SEQ ID NO: 4346
  Synthetic

SEQ ID NO: 4348 - protein, 174 aa, Artificial Sequence
  Synthetic
DEAREIVRELEKRIKDIEDRARKLIRELEKSLEDLKRRVEEMLREWEEESKELERRNVPRERVKEVKEKSDEKVTRIREELKKVNEENERRLREIEEELKKLAREMEKRLEEARDKIDREKVKEIKKRLDELLKRIEDELRRIREEDKRIHDEVEKELRKLERRDEELLKRLED

SEQ ID NO: 4349 - protein, 174 aa, Artificial Sequence; identical to SEQ ID NO: 4348
  Synthetic

SEQ ID NO: 4350 - protein, 174 aa, Artificial Sequence
  Synthetic
SEAEDIVRKIEELLKRHHDRVEEMLRRWEELTRRHSEKAEKIVREVEKLIDELREAKVPREEVERVARELEEKHKRVDEEHKEVTERSKRRAEEIRKESRDVAEDLKRRLSEVRDTIDEEEVKRLEKEIRDNLREMEERLKELEKRDKDNLDRIRELHRRLREELEKLLEDARR

SEQ ID NO: 4351 - protein, 174 aa, Artificial Sequence; identical to SEQ ID NO: 4350
  Synthetic

SEQ ID NO: 4352 - protein, 183 aa, Artificial Sequence
  Synthetic
SMDELLKRLEEEDRKLNEESKETLERLRKHDEDLNRKNREKLKELKDRVDRVLEDAKKRVPDEDLERIKKRLEELRRTNEELDRENEKLAEDLAREVKKTNEENRRTSKRIKEEADKLKKRKISEDDVRREVEDVKRRIEDSREKLRKLTEKWKKLNRESDEKVKKHVEDVEREIEKVRKEAE

SEQ ID NO: 4353 - protein, 183 aa, Artificial Sequence; identical to SEQ ID NO: 4352
  Synthetic

SEQ ID NO: 4354 - protein, 183 aa, Artificial Sequence
  Synthetic
SSEEELKKLSDKARRLNDENRKILERLKEHDERLNKRNKEELKRLREDVERLLEDARRRVDERVLRTITEILKRLEESNEELTRKNEREMEKLARTNEDEDRKARKKLKELEDEARRLRERNTSEEDVKRKLDTIDKVIRDVRRRIEEHVRRWEELNRRSKKEIEDHVKTVEDVIKEAKDRID

SEQ ID NO: 4355 - protein, 183 aa, Artificial Sequence; identical to SEQ ID NO: 4354
  Synthetic

SEQ ID NO: 4356 - protein, 175 aa, Artificial Sequence
  Synthetic
DEDEEVDREVREMIKRLEEHVKRDEDTLEEMLKRLRDHVERDRRRLEELLKDLERLVRERGRDEELEKKVKKIIRENRENLKRLEERVEKIRRDNEKNNEDLRREVEDIRKKLRDKVDDKEELKRLDREAEELLRRVDRLNEEVEKKLRKLLEEVRRENKRLEEEAKRLLDKAEE

SEQ ID NO: 4357 - protein, 175 aa, Artificial Sequence; identical to SEQ ID NO: 4356
  Synthetic

SEQ ID NO: 4358 - protein, 175 aa, Artificial Sequence
  Synthetic
DEDEEVRKKVEEEIKRLKKEVEEDRRDVERLDEESKDKVRRDEKKVKDLLKELEDLVRRDGRTEELRKRMEEILKENDEINKKLRKENEKINDENDKKNKELRKRVKEITERLRKEVDDKEELKRLEEEAKDLLRDVERLNRELHKRNREILEEATRRNEELKRELKELLDRARK

SEQ ID NO: 4359 - protein, 175 aa, Artificial Sequence; identical to SEQ ID NO: 4358
  Synthetic

SEQ ID NO: 4360 - protein, 175 aa, Artificial Sequence
  Synthetic
SEEERVKEELDKAIKTLEKLVKDDLKKVADALRRLREHVEKDLRDLEEVLRELKELVDKTGRTEELRDKVRKIEEDNERNNKKLADEVKRIADENTEINEELRRRVEEIKRELRERVRDTEELKRAERELDRLLTEADRRNDELRREAERLLEKVNEDNRTVKERARRLLDDARR

SEQ ID NO: 4361 - protein, 175 aa, Artificial Sequence; identical to SEQ ID NO: 4360
  Synthetic

SEQ ID NO: 4362 - protein, 175 aa, Artificial Sequence
  Synthetic
REDEEIVKEMERLLERLEELSRRIMEEVKRIDKESEDHIKRDEDKLREELERLRDLVRREGTTDELRDRVRRIKEENTENNKRLEDKNREANKRLKDLSDKLREDVKRIRDELRKKVDDKEELKELEERAKRLLERHERTNEELHRRNEEILRKANELNEEVRRRLDKLLDEVRT

SEQ ID NO: 4363 - protein, 175 aa, Artificial Sequence; identical to SEQ ID NO: 4362
  Synthetic

SEQ ID NO: 4364 - protein, 175 aa, Artificial Sequence
  Synthetic
DREREVRRRVKEALDEIKRHVDRDRKKAEDMDRRSRELSDELRRRVDDLIKRLKELVDRDGRTEELEKTVRKIERDLTEESRRLKDENRKINEENKDNNRRLRERVEDIKRRLKEEVPDTEELDELRKELDKLLTEVDETNKKLHEDNKRILDDHDRINEELRRRMEALLREATR

SEQ ID NO: 4365 - protein, 175 aa, Artificial Sequence; identical to SEQ ID NO: 4364
  Synthetic

SEQ ID NO: 4366 - protein, 175 aa, Artificial Sequence
  Synthetic
SEEEDMVRRVREMIKRLRDHVRRDKDKLDKEDKRSADHVDRDRKRLEDLLKELRDLVRDTGRTEELARRVERIIEENRENNERLRRENEKINRENDRNNKKLEEEVRRITEELRRKVDDTEDLKRLEKELRDLLDEVNKENEKVHRRNREILKRADELNEEAERRLRELLREAEK

SEQ ID NO: 4367 - protein, 175 aa, Artificial Sequence; identical to SEQ ID NO: 4366
  Synthetic

SEQ ID NO: 4368 - protein, 175 aa, Artificial Sequence
  Synthetic
KEDEEVKDKVEKLIRKLEKESRDISEEVKRLDEESKKLARDLTEEVDRVIKRLRELVERDGDTEELERRVREIEKELDKRLRDIEDRNEKANRELKRLSEELERRVEEIRRRLRKEIDDKEELKKLEKKLEELLERHRRDNKRLHEENRRILEELRRRIKELKERLRRLKEEARK

SEQ ID NO: 4369 - protein, 175 aa, Artificial Sequence; identical to SEQ ID NO: 4368
  Synthetic

SEQ ID NO: 4370 - protein, 185 aa, Artificial Sequence
  Synthetic
ETDERLDELRRRLEKSLKDHKKLLDEVRKKAEELLDRNARLLEELKRELDELLKKVEEDNRMRKDELKKIREDVERLREENRKTDREIRERLKELERRAEEIDKRAKETLDEIEREIERLKREGTTREVVEELLRRAEEEIRRHRKKVKESLDRLEDEIRKVEEDSRRSEKKVRKLIEDVKRRVK

SEQ ID NO: 4371 - protein, 185 aa, Artificial Sequence; identical to SEQ ID NO: 4370
  Synthetic

SEQ ID NO: 4372 - protein, 185 aa, Artificial Sequence
  Synthetic
STEETLEKLDRDLKDSSRRNEELLKRVDDRLRESSKENRKILKELSDRLRDLLEKVKKDNRAEEEVLERIRKEVEDLMRKNEDTNRRARERVKELEERNRKTNKDVEKRLEDLKREIKRLREEGTTDKVVRELVKRAEDEIRDHKRLSKESLDRLDEEIKRHRELSKESMEEADRLIKTVKERVR

SEQ ID NO: 4373 - protein, 185 aa, Artificial Sequence; identical to SEQ ID NO: 4372
  Synthetic

SEQ ID NO: 4374 - protein, 185 aa, Artificial Sequence
  Synthetic
ELDDLLREVEKRVRDLNRRNEEELRRVEDRMRESLRKSEEDLRRVEERLKKTLTRVKTERRVPDKDLDEIRKRVEKLSREIREINKDAKRRLKELVDENRKRDDEIRREVKKRKDDVKDLARKGDDRRSAKKILDDLERTLEDVERRSRESVRRLREEIETHRKLVEELKKRLDDLEEEVKERVR

SEQ ID NO: 4375 - protein, 185 aa, Artificial Sequence; identical to SEQ ID NO: 4374
  Synthetic

SEQ ID NO: 4376 - protein, 180 aa, Artificial Sequence
  Synthetic
SSDEILKRVKEELDRLLEENKRLLEEARKRLEDLIRKNREDLKRVEEKMRRLLEETPEDKKLEEIRERLKRLKEENERLNDEARRRLEKLRKENEETNRRIEEEVRRLAEEVERLKREGTTEEVVRRLAEELRRLIEEVKRKIEESERRLKETLDRYRKLVEDSLRKLEETIRRVREESR

SEQ ID NO: 4377 - protein, 180 aa, Artificial Sequence; identical to SEQ ID NO: 4376
  Synthetic

SEQ ID NO: 4378 - protein, 180 aa, Artificial Sequence
  Synthetic
SSEELLRKVKEDAKKIIKENEELLRKVDKDMRDIIKENRDLLEELTERVKRLLDRTPESDDLDRIRKIVEKLRRENEKLDEDAEKKLEDAKRRNKRTDRELEKRLKKLAEEVKDVRDKGTTEEVVKRILEELKKLLDEAERLSRESLKELEKMLREYRESVERSLRKVDDTLRRVEEKSR

SEQ ID NO: 4379 - protein, 180 aa, Artificial Sequence; identical to SEQ ID NO: 4378
  Synthetic

SEQ ID NO: 4380 - protein, 188 aa, Artificial Sequence
  Synthetic
DDKRLLEEIRRRADELIKENEELLRRLEKLNEDLERRNKELNERLAERVKRLEEDVRRRGLPREDVRRKIEDLRRLARELHEEDKKLNEEAKRLTETSRKRNKELNDEIRKLVKEIEERIEELERRGSDRRIVEEEVDRVRKTIEELKRKSEDLVREHEEIVRDLERKSRELVKKVEKLLRDVRERAR

SEQ ID NO: 4381 - protein, 188 aa, Artificial Sequence; identical to SEQ ID NO: 4380
  Synthetic

SEQ ID NO: 4382 - protein, 181 aa, Artificial Sequence
  Synthetic
SVDEMLKEIRDRAKKVDEDNRRLVERLEERNRELDERNKRLLDDIRRKVEEVMRIADERVDKKEELDRLKDELRRSLKRLEDLSKENHDRNRELNKRSKDRSEELHEELRRLLKEITDIIRAGDSGKELVDRVRKLLEEVRRKSEKLVREHEDLVRRNEEHSRRLVEEADRILERAKRELD

SEQ ID NO: 4383 - protein, 181 aa, Artificial Sequence; identical to SEQ ID NO: 4382
  Synthetic

SEQ ID NO: 4384 - protein, 181 aa, Artificial Sequence
  Synthetic
SVEEMLRRLRERDEEINDRLRRLAEDLKRENKRLDDENKKLVDEIREDVERLKEKLDRKLRDKDRMRELKRELEELLKELEEKSKRNHDRNKRENEKSEKILRELHKENREEVKRATEILEEGDTGSELLKRWEELLRRLEKRIRDLVEDHKRLVEENERHSRKLVEEVKKALTDAEKKVE

SEQ ID NO: 4385 - protein, 181 aa, Artificial Sequence; identical to SEQ ID NO: 4384
  Synthetic

SEQ ID NO: 4386 - protein, 181 aa, Artificial Sequence
  Synthetic
SVEELLEDIRRRVEKVKEDNKRMLEDLERKNRELKKEADDLAREIKKRVRDLEKELDEKLTDEEKVERLKRRLKKKLDELDRKLKENEDRNREENEKSKEDSKRLHEKLERLRERIERIVRAGDSGSKLVEEVRKLLEEARRESEELLRRHKKLVDDNRRHIRKLFEDVKKILDDARKEVE

SEQ ID NO: 4387 - protein, 181 aa, Artificial Sequence; identical to SEQ ID NO: 4386
  Synthetic

SEQ ID NO: 4388 - protein, 175 aa, Artificial Sequence
  Synthetic
SEEEEIVKDVERVIRELEERHKDLVRRAREDIKRLREHIRRSIRALDEDIKRIEEKIRRDGDDREVEEHIKRSKDELRKDEKRIEDHIRRSREKLDRDVERMEEEHKRLEKELRDRGLSEDLVRDLERKNKRVIDESRRLLEELRRRYEELLREYRELLEDLRRKYKRIEDEAKR

SEQ ID NO: 4389 - protein, 175 aa, Artificial Sequence; identical to SEQ ID NO: 4388
  Synthetic

SEQ ID NO: 4390 - protein, 175 aa, Artificial Sequence
  Synthetic
SEKEEIVKTVKTVIDRLEEEHRKILEDLRDDIRRADEYIKRSIDEVEEDLRRIEETVRRDGNTKEVEKHIEDSKRELEKNADKLRRHIEESRKELERLIREADEKHKKLDEDLKRAGLEERLVRELEKENEKLKRRSERMLEELEKEYRRLLKKYEDLLRELERKYEEIKDKLRK

SEQ ID NO: 4391 - protein, 175 aa, Artificial Sequence; identical to SEQ ID NO: 4390
  Synthetic

SEQ ID NO: 4392 - protein, 175 aa, Artificial Sequence
  Synthetic
SEDEDIVRKAKEDIERLKREVEETIKRVEDDARKVEKEVRDIVERTRKEIKKLEDEVRERGNTKEVERKIEELKKEHEDRNKKLVDHIKRSEEELRRLAKELEELIRRLKEELEKAGLKEKLVEELRRELEKLKKEIDDLLRDLEKKYDDIRKKIRKLSEELKKLLEELKRKLDE

SEQ ID NO: 4393 - protein, 175 aa, Artificial Sequence; identical to SEQ ID NO: 4392
  Synthetic

SEQ ID NO: 4394 - protein, 175 aa, Artificial Sequence
  Synthetic
SELEKIVEEVRRDIKRVRERVEEIIRKTDEMIRRLEEHIKRSIERVRKDAEDIERTVRRDGNDKELEKHLEKSKRELDKDAREVDERLKDLERRHREANKRLEDHIRRSEEELRRRGLDKDLLDELRRRYEELEERIRRLSRELEEKLKKLRKRYEDLLEELEREYRRIAEEARR

SEQ ID NO: 4395 - protein, 175 aa, Artificial Sequence; identical to SEQ ID NO: 4394
  Synthetic

SEQ ID NO: 4396 - protein, 175 aa, Artificial Sequence
  Synthetic
SEEEKIVEEVKRDIKKVDDEVKDIIRRTDKAIKDLRREHKELIDRTRKAIEELEDEVRKRGDDEKLRRKIRELEKRHERANEELERKHRKLETDHREMNERLKRHIRESEKKLEKDGLREDLVDELRKLYDTIREKIKRLSDRLREKNEKLKKESDDLSRRLRKELEKLEREVRR

SEQ ID NO: 4397 - protein, 175 aa, Artificial Sequence; identical to SEQ ID NO: 4396
  Synthetic

SEQ ID NO: 4398 - protein, 184 aa, Artificial Sequence
  Synthetic
SKEELLKEIRDELRKLKKKHDDLLEEIKREYDRLREKVRKDLEDIERKLRKLEEDVERKDVREEEKTDLDRLAKELREELKRIKKKIDDHIRRSEEELKRHHDEIRKILKKLKEELDTAASQDLREEEVKRVVERVKELIKRLEDNIREAIRKLREDIKRLEEEVEKARKDVEDFLRELRKKVK

SEQ ID NO: 4399 - protein, 184 aa, Artificial Sequence; identical to SEQ ID NO: 4398
  Synthetic

SEQ ID NO: 4400 - protein, 184 aa, Artificial Sequence
  Synthetic
SSDELAEELKREYDRNKEEHKKLLEELKKEYKRLLDEHRDLLRRIKERLDRLLRRIEEKDVREEDLKRLRKLVDDLRKRLKKHHEEVKEHIDRSRKELEDHHRELDEDHRRAEEKLRRMRSQDLREELVERVIRDVRKHIEDNTENIRRDIERVRKDIETLEENVKDAAKKVEDILKTLEDEVK

SEQ ID NO: 4401 - protein, 184 aa, Artificial Sequence; identical to SEQ ID NO: 4400
  Synthetic

SEQ ID NO: 4402 - protein, 184 aa, Artificial Sequence
  Synthetic
DKERLAEELRRLYERNKREHEKLLKKIEDDLRKLEEDHERLLREIEEAAERLRREIERKDVDEEKVRRLETELRKLREELKKHHEEIKRILDKLRKDLKKHHEELKRDHDKAEEELRDVESRDLREELVKRVVDRVRRHIEENTKNIEEAIKRVEDVIRELRKNIEEAIKRVREVLKRLKDEIK

SEQ ID NO: 4403 - protein, 184 aa, Artificial Sequence; identical to SEQ ID NO: 4402
  Synthetic

SEQ ID NO: 4404 - protein, 184 aa, Artificial Sequence
  Synthetic
SEDELLDRLREKYERNKERHKRLLDELRKRYEDLKREHEKLLRDIEEELKKLEDKIRRKDVPEEDLKRMKKLADDLRRELEKHHEDIKDHIRRSEEELREHHERVKDDHRKAEETLKDVRDRDLREDLVRKAIEDVDRHIKENTKNIEDTIRKVKKNIEDLKRNVEEAIKKVKEVLREIEERTR

SEQ ID NO: 4405 - protein, 184 aa, Artificial Sequence; identical to SEQ ID NO: 4404
  Synthetic

SEQ ID NO: 4406 - protein, 184 aa, Artificial Sequence
  Synthetic
SKEELLKRLKERNERLNEDSERLAREIKRRLEELRKEHRRLLKEIEERLKELEEDIRRKDVPEEKLERLKREIDRLREELKEHHKRVKDELDRLKKRLEDIKKDHDRKDRKVKEELEDMARRDLDEEDVKRVIRRWEELLKELEKDNRRVVKEAKELIDRLERNIRERIKEVRDALREIRKKVK

SEQ ID NO: 4407 - protein, 184 aa, Artificial Sequence; identical to SEQ ID NO: 4406
  Synthetic

SEQ ID NO: 4408 - protein, 184 aa, Artificial Sequence
  Synthetic
STDEKLKELEKRNRDLNEESRKLAEEIRKRYEDLKKEHEDLLREIEKRLRDLMREVERKDVPEKDLEELKEDARRLREELRRHHEEIERHIRESEKELRRIEDEHRKEDEKVKKELKDVRERDLDEKSVDDVIRRWEELLEELRRRNEEAVRRMERNIDELRRNVRETIDRVRKLLEEIKRKVD

SEQ ID NO: 4409 - protein, 184 aa, Artificial Sequence; identical to SEQ ID NO: 4408
  Synthetic

SEQ ID NO: 4410 - protein, 178 aa, Artificial Sequence
  Synthetic
SEAERVVEELERLLKKNRDDNERVIRRLEELLDRLREKNERAIEELRKLLDELKKVVDRGDVSERVVDKLLKEIKEKIDRVREEHRKLLEDIERTIRKVEKEHKESIERIRRRAEELKDLIRRELLREIEERLKTLSEESKRLIDRIREELKRLTKESEDLLKDIERLLREVKERART

SEQ ID NO: 4411 - protein, 178 aa, Artificial Sequence; identical to SEQ ID NO: 4410
  Synthetic

SEQ ID NO: 4412 - protein, 180 aa, Artificial Sequence
  Synthetic
DEMEDLRRDVERIHEESRKLSEDSVRTAEKIHRESEKLIDDLRRKVEKILKEVEDVVRRGDSDEKLKTRLRDLKRKLEKEAKEIMDRHERLAEELKERNKRINDDHRRKNEELKDELRRKRVGPEEELKKLEDRSRKLLEENKRLNEDLDRRSEELKARLKDILRRIDERLRDLEREADR

SEQ ID NO: 4413 - protein, 180 aa, Artificial Sequence; identical to SEQ ID NO: 4412
  Synthetic

SEQ ID NO: 4414 - protein, 180 aa, Artificial Sequence
  Synthetic
DEVEELKRRAEEILRKYDEDSKRIVEEAERIVRTSAEKIERLRKKAEDILREASKVVDDGRSEEELARRLTELTKRLEDEAKRIADEHDKLDEEIKRKIEELNKELKKLADDLRDRLEKERAGPERDLEKIETDVERLERKSKKLLEDLREKSERLKKRLEDILKRIKEEVERLKRKVEK

SEQ ID NO: 4415 - protein, 180 aa, Artificial Sequence; identical to SEQ ID NO: 4414
  Synthetic

SEQ ID NO: 4416 - protein, 180 aa, Artificial Sequence
  Synthetic
DEMEELKKEVEEILKEYEKRSRDLFKELKEILRRSKELSEDSKREADKILRDAEKVVADGDRREKLMETLERLLRRLEERNKRINEEHDKRDKDIEERVKKLNKELRDLVRRLREELRKRRAGREDDLRRIEEKVKKLEKESRELLKRIKDESEELKRDNKRLNDEVREELEKLKERVRK

SEQ ID NO: 4417 - protein, 180 aa, Artificial Sequence; identical to SEQ ID NO: 4416
  Synthetic

SEQ ID NO: 4418 - protein, 180 aa, Artificial Sequence
  Synthetic
DEMDELRREVKEILKTTEELIKRLEDKVRDILRRYKEVSDDIVRKAEDILRKAEDILRRGDSREEVSRELKRLLDELEKEIRKLNEDLKRLLDELREELERIVKTHRKLDKDLEDRLRKRRAGEERELEEIKKESEDLERRLKKVLERIEREVRRLEEETKELLKRIAEEVERLIREAEK

SEQ ID NO: 4419 - protein, 180 aa, Artificial Sequence; identical to SEQ ID NO: 4418
  Synthetic

SEQ ID NO: 4420 - protein, 180 aa, Artificial Sequence
  Synthetic
KEAEDLVREVERILEDYDRVVKELKDDADRILEESRRLIEELKKKAEDILRRVRKVVEDGDSRDDLKRELDKLAEDLAREAKEIADRHRKLDEELERRIRRLDEELKRLARELEERLARDRVGPEELLERIKDRLRKLHEKSKKLLTDIKRESRRLEKRLEDILKRIKEEADKLKEEADR

SEQ ID NO: 4421 - protein, 180 aa, Artificial Sequence; identical to SEQ ID NO: 4420
  Synthetic

SEQ ID NO: 4422 - protein, 174 aa, Artificial Sequence
  Synthetic
REEELERRVREESEELNRRLAEVHKRLRKKSKELNDRHKELDDRIRREADRLRKDIRRQGKEDDKLDREIKEIERELRKRSEELHDTNRKILRENEENLRRLHKENRDIERDLERKRLDDEVLKELKEMHDRLREHVKRDSERAERMHEELKRLSDELERRVREALKRLKEKVR

SEQ ID NO: 4423 - protein, 174 aa, Artificial Sequence; identical to SEQ ID NO: 4422
  Synthetic

SEQ ID NO: 4424 - protein, 174 aa, Artificial Sequence
  Synthetic
KKEEVRKRIEEELRRLKKDHRRLDEEIKRKLKKLDEEIKEVHERLKKAARDLEDEARRNGKRDDKLTEEIKEIIRRNKKNVDDLRRELKRIDEELKKESEKLERKADEIEERLRRREQTKEVEKDVEDLLKELEDDSRRLEEEVERLIERVKRHVERDERRVREMLREIKEKIK

SEQ ID NO: 4425 - protein, 174 aa, Artificial Sequence; identical to SEQ ID NO: 4424
  Synthetic

SEQ ID NO: 4426 - protein, 174 aa, Artificial Sequence
  Synthetic
SKEDLDRELRRLSEELNREHKELDERIRRELEKLRTRIDKVHEDIRREMKRLEDEVRKRGREDDRLRTKVKKILDDNKENVDRLRDELRKIKEELDRESKKLHDENEKIKRDLEARELTEEVFEDAERLHRELKKKSRDLEERVKKLLEEIEDHVRRDETRVRKVLRDIEEDIR

SEQ ID NO: 4427 - protein, 174 aa, Artificial Sequence; identical to SEQ ID NO: 4426
  Synthetic

SEQ ID NO: 4428 - protein, 174 aa, Artificial Sequence
  Synthetic
SKEDMLREAEERSRRLNEDHKRLDDELRKESEKLNRRHRDLDEKIDRELRRLKKDIRRRGKQDERLEREMKEKKDELDRLSKELHDKNREIKERLDRLSETLHKENEDIKEELRRRELTRELLERLRKVHEDLKKKSEDLKRTAEKLHRELEKESRDLVRDVERALDELRRKVE

SEQ ID NO: 4429 - protein, 174 aa, Artificial Sequence; identical to SEQ ID NO: 4428
  Synthetic

SEQ ID NO: 4430 - protein, 177 aa, Artificial Sequence
  Synthetic
SSEELLRDIERRLEEMNRDTERVVEEIRRRLEELRKRHKETIDKIREELKKVEDLVRRRGLDEDTSRELKELMRRLEEKLKEHHERLRELLERLEKELREAKERLDRKTEKIKKDLRKDGADEDVLRRAKRLIEKYKEDTKRIKEKLEKVIEDLRKNIEDFEEDVRRVLEELKKRIK

SEQ ID NO: 4431 - protein, 177 aa, Artificial Sequence; identical to SEQ ID NO: 4430
  Synthetic

SEQ ID NO: 4432 - protein, 177 aa, Artificial Sequence
  Synthetic
SSRELLERIKEELKELEDRHRDLLRRIEEKLERLNRRTREVLERIKRKLDELKKRVEEAGLDEDSRRRLEKKLKEIRDKLDEIRRRLEDETRKIKEELRRHHEEVRKRLRDVERRLREKGVDEDLLREVKELIERLRENIKRAKDKVEELIKKYKRDTDEAKKEVDEEIKRLKEEVD

SEQ ID NO: 4433 - protein, 177 aa, Artificial Sequence; identical to SEQ ID NO: 4432
  Synthetic

SEQ ID NO: 4434 - protein, 177 aa, Artificial Sequence
  Synthetic
DSERLVREIRERLKKLEKEHRELLEEIKDRLRRLNEESKKLLDDIKRRLEELRDRIRRAGLDEKTLTDLERILRKIEEDLKRMKEELDRLTREIERELEEHHKDIKRRLDEVRKELEKRGADEDVLRDLEKLIEDLKRNIERARAKVEKLIKEYEDKLEKIVRDAEELIKDLDRKVK

SEQ ID NO: 4435 - protein, 177 aa, Artificial Sequence; identical to SEQ ID NO: 4434
  Synthetic

SEQ ID NO: 4436 - protein, 177 aa, Artificial Sequence
  Synthetic
SSEEILRKIEEELERLEREVRKIHRDNERKSEELNRRSKKILDDIRRELDRLKKEAEEKGSSEETKKDLERLRRELEERLKEVEKESEELRREDKERNDRVREKLKELKKDIKRLLDEKGIDKEVVKEMRRALEEIKKEIEKVRKELEKRNREYRKRSEEVREEAERKLEEIKRRTD

SEQ ID NO: 4437 - protein, 177 aa, Artificial Sequence; identical to SEQ ID NO: 4436
  Synthetic

SEQ ID NO: 4438 - protein, 177 aa, Artificial Sequence
  Synthetic
RSEEILREIRDRLRKLNEESEKVHEENERRSRELNERSREILKRIDEELKRLKKEVDDKGADEKLKDELRRLVRRVEEELRRVEEESERLKREDDRKNEDVRRKSEELARDIERATREKGIDDDVVRDLKKKLERYKRETDRVRKELRDLNKKYEDRSREIKRELERLLRDIKRRID

SEQ ID NO: 4439 - protein, 177 aa, Artificial Sequence; identical to SEQ ID NO: 4438
  Synthetic

SEQ ID NO: 4440 - protein, 184 aa, Artificial Sequence
  Synthetic
SLEEVIKTVRKLLEEVERRLREVVERAERMLEEVRRRTREVSEEAREMLKDVEKALRDKNVSEEIEEKLRKIKEELERDNEKVNRDNERSVETLRRLLDRVRKEVKDIAKELEERLKEVERKSRDDRIVEKLLRDAERIVKRLRELIEKLREEVEKIVDENRKTVEELRRRNEEIVRRLRREIE

SEQ ID NO: 4441 - protein, 184 aa, Artificial Sequence; identical to SEQ ID NO: 4440
  Synthetic

SEQ ID NO: 4442 - protein, 184 aa, Artificial Sequence
  Synthetic
DVKEVLDDAERKLREVLKLIEDSLKKLKELSDEVIERIARSLEKLEKLIRDVDEELKRKVSDKDKLKRLKEKLDKVLRENEKLVEDLRRENKKVNDRNKRLVDELRRRLKKVKEDLERRVAEEDDKEVVKEIKERVDKVVDEARKLVEESERSIRELVERSKKVVEESERSIEELRRELKETVK

SEQ ID NO: 4443 - protein, 184 aa, Artificial Sequence; identical to SEQ ID NO: 4442
  Synthetic

SEQ ID NO: 4444 - protein, 184 aa, Artificial Sequence
  Synthetic
DLEEVRERARRLLRKLEEDLERVHKEMEELLRELEERIKASLERLDELLKRLADKLRRDVKDDDKLRKLDKKLKEAKKTNKDLADELRKELEEALRESRRSIDELRKDLERVTEEIEDILRKRKTKEVVKEIEDRVRKVAEKVREVIERNRKLVRDVLDKIRRMLKESERSVEEVLKRLDDELK

SEQ ID NO: 4445 - protein, 184 aa, Artificial Sequence; identical to SEQ ID NO: 4444
  Synthetic

SEQ ID NO: 4446 - protein, 181 aa, Artificial Sequence
  Synthetic
SLDEVVKRLEDLLREVEEKSKESSKRMEDLNREVNERLRRSSERLKRLNDEVKKRLEDAGRDDKIRRTLERLSEDTKRKSDKTNEDLKRLSDETRERSKRLNEELRRLVEEVRRRLEDLRRKGSPVEEIKKLADKVVTELEKLVEDDRRLAEESFERARKIVEEDERLARESVDRARRLVD

SEQ ID NO: 4447 - protein, 181 aa, Artificial Sequence; identical to SEQ ID NO: 4446
  Synthetic

SEQ ID NO: 4448 - protein, 184 aa, Artificial Sequence
  Synthetic
KLDEVIEEIRKLLRRMEEELRRSVEEIDKLLREVRELLRESSEKVKELLRRVTEELKKRGVPEEVKERLDRLVETLRRLSEETLKELDKLVREVKELSKESLKRLRELVERLRRELEEIKKRGEDEKLVEDLKRRAEEVIRELREIVKRNTEIAREVVERAKRIVEKNEKLLKDVVEEAKKIVK

SEQ ID NO: 4449 - protein, 184 aa, Artificial Sequence; identical to SEQ ID NO: 4448
  Synthetic

SEQ ID NO: 4450 - protein, 173 aa, Artificial Sequence
  Synthetic
SELEKAKEDVDRLLEDVNRVSEEVEDRVRKLLADSDRVLEEVERRVREVLKRLKDAGVPDEELERARRTLEDIIERLREKNKEVKERLRKIIKEDREVNERVEERVERLTREAKDKDVKTVADELRKVVKELLEINRRSLEELTKLVDESRRVNEKVMEELKKLVDDLRRRIE

SEQ ID NO: 4451 - protein, 173 aa, Artificial Sequence; identical to SEQ ID NO: 4450
  Synthetic

SEQ ID NO: 4452 - protein, 178 aa, Artificial Sequence
  Synthetic
SEIEKVKEVVREVIERSRKLLKEVRDTVEKVIDESRKLSDTVRRRVEDAIRDVLERRGDEDDELRRVKEELKKVIDENEDLNRRVEETLREIIKRLAEENKRVEDSLRKVIKDIERVRSREEVKKVIEDLTREAKRSLERNREVVKELKKLADDLKDLNKKSVDRLDDLVRRLKERTE

SEQ ID NO: 4453 - protein, 178 aa, Artificial Sequence; identical to SEQ ID NO: 4452
  Synthetic

SEQ ID NO: 4454 - protein, 184 aa, Artificial Sequence
  Synthetic
KRAEDVLEKLREDAKRVLKRNRDSVKEAEDLVRKSLRTSEEVVKTLRTELKKLLDELDRVKSEEARKRVEDVRDRLKREVDKLDRVSEEVEKTLEDLNRKNTEDNKRVVDRLREELDRLRREGLPEKVLRDIEREVRKIIKELEDMDDELRRILEEVIERSRRVNERLKELLKEADDRLREKLR

SEQ ID NO: 4455 - protein, 184 aa, Artificial Sequence; identical to SEQ ID NO: 4454
  Synthetic

SEQ ID NO: 4456 - protein, 181 aa, Artificial Sequence
  Synthetic
DAAEELLRLVEDVARELKRLVDELLKENRETVERLKKVVKRSEEINREVVRTLRELVANNGDKKEIDRIIKELKDANDKVAEDLRRVIEEDRRRNDEAAKTLRKIIEDLRRALEDVVRKRGEDEKIKEVRRSIEEARRRVEEALREVNEASKEAERTVREALKRSREAVEKAVRDVTEAAR

SEQ ID NO: 4457 - protein, 181 aa, Artificial Sequence; identical to SEQ ID NO: 4456
  Synthetic

SEQ ID NO: 4458 - protein, 178 aa, Artificial Sequence
  Synthetic
KELEDVLRESEKTAEELLRRVKKSIDRTRDVVRRLLEEIRKSIEETKRVADEAKREDRDEEVLKKIIRELEERSKKVEEDLERIIRELREESRKVEKELRDLIRRNEEKIKRVIERRGETDLVRRLERISEEVRRRVEKLVREDRKILEDVARALRELVKEDEEILRRVVKDLRDKTR

SEQ ID NO: 4459 - protein, 178 aa, Artificial Sequence; identical to SEQ ID NO: 4458
  Synthetic

SEQ ID NO: 4460 - protein, 175 aa, Artificial Sequence
  Synthetic
DEDKKVVRKVERIIKRVKELHDKSVRDSEEVVREVLKRHKESVEKIKEIVRRIVEIAARGDFREEVKKRLEEVIRELREENAKIHRELKELLERSRRRNDEIHRELKERLKEILEEAKDIEELKEVIRRVEKLSEDVKRENEKSNDEVRKLSEDAIRENEEVLRRARKLVDDLRR

SEQ ID NO: 4461 - protein, 175 aa, Artificial Sequence; identical to SEQ ID NO: 4460
  Synthetic

SEQ ID NO: 4462 - protein, 175 aa, Artificial Sequence
  Synthetic
DEEKEVVKKLRDIIREVERLHTESVRKVEEIVRRVLRLHKETVRELKEIVKRIVDIARNGDRREKVEDELRRRLEEIERKNKEIRDELKRLIDEVRKENTEIHDRLKKELKKILDEAREIRELEKVAKEVEDRSKELLDRNEEVLDRVRKLSEDVLRENREVIERVREEVKKESK

SEQ ID NO: 4463 - protein, 175 aa, Artificial Sequence; identical to SEQ ID NO: 4462
  Synthetic

SEQ ID NO: 4464 - protein, 180 aa, Artificial Sequence
  Synthetic
SEADKVVAELEKIVKDVVDAHKDSVRKLREIVRRAVERLRKDVDDTRRVVKEIVDIARSGDMREEVRKRLEELLRRSEEHSEKVERDLERVLKEVEDTNRDIKRRLEKRIREIEEKIKDLDERVRRKLEEVVKKVRDLSRRATEEVEEVIKEVRELVRRLKEENKRVVDEVRKRVEDTRK

SEQ ID NO: 4465 - protein, 180 aa, Artificial Sequence; identical to SEQ ID NO: 4464
  Synthetic

SEQ ID NO: 4466 - protein, 182 aa, Artificial Sequence
  Synthetic
KSMEDVVRKLDELVKTDKEIADRVVKELKDIVKRVEELVEDIVTKSRASVERVRDVVTRGVSEEELKRIHDENRRLIEEAKKRLEEIRREIEELVRRVEEESKRLNEELKRLIDDVTDKKRDVREAKELLDRLKRRLEKSTEEVKKKLETVLRELEEVIKRVKEELERVNRELRKVIEDAKK

SEQ ID NO: 4467 - protein, 182 aa, Artificial Sequence; identical to SEQ ID NO: 4466
  Synthetic

SEQ ID NO: 4468 - protein, 177 aa, Artificial Sequence
  Synthetic
ELEKLIRDVVRENEESAKEAHRRIKEVVRTSEDLVREVRERVRRIVESSKRVVEEVRKKMDEEELRRLVEESRRNVEEVRKALKKVEEDSRRNVEKVERDLEKLDRDNEREIRELRKRVKDMEKLLRDLKKLIEDNERVVRELKKNLDDDSERVKRVADELLKNLKKDTKKVKDTAK

SEQ ID NO: 4469 - protein, 177 aa, Artificial Sequence; identical to SEQ ID NO: 4468
  Synthetic

SEQ ID NO: 4470 - protein, 186 aa, Artificial Sequence
  Synthetic
DEAEDVVKRADDIVKRNRELLERVVRDLERIVRKNKDIVRKVVDEAKKLVKTVEDLSRQDNKREELRRRLEEVKERLERLVDKLRRESEKSKRELEKLLKELRDLSRKTEEELRKLVEDLRRKLKNVKEVEDLLRRVEEKLRKSVKEVEELLDTVRRRLEDSSRDVKRLLKEVLDRLEDVLDKEEK

SEQ ID NO: 4471 - protein, 186 aa, Artificial Sequence; identical to SEQ ID NO: 4470
  Synthetic

SEQ ID NO: 4472 - protein, 186 aa, Artificial Sequence
  Synthetic
SAVEEADKEVRRILKKNTDLVRRVVEEAKKILDRNEKRVREVFKELTRLLDELRKLIEEGNREERLRELLDRVRKRLKEEMDKVRKEDEKSREDLRRLVRELEELSKRTKEELDELTRALRKDLKDVEEVERLLRELERRLEDSVRKARELLKDIERRLRESIKRSEELLRDVERRLKELEERLEE

SEQ ID NO: 4473 - protein, 186 aa, Artificial Sequence; identical to SEQ ID NO: 4472
  Synthetic

SEQ ID NO: 4474 - protein, 177 aa, Artificial Sequence
  Synthetic
DVEEELKRVVEKLRDVERKVRELNKRVTDKNEDVVRTVRELNERVTRENRRVVEDIDRKKRTKDLKKLLEDSERNVDRVNKESERLIRESKKNVKDVNEESERLIRKVAKDLERLTERVSDLDDVLRRLEELVKDLERLIEESVRYLERNVERSRELVERSLRYLKENVDRSRKLAE

SEQ ID NO: 4475 - protein, 177 aa, Artificial Sequence; identical to SEQ ID NO: 4474
  Synthetic

SEQ ID NO: 4476 - protein, 175 aa, Artificial Sequence
  Synthetic
DEVREVVERARKLVKDNLDAARKAVKRLRELVKENLDTVRDVVRKLRKLVEDLKRLIRSGGSEEAVKRLKEELERLIKEVKERSDETRKRLEDLIRELEERSKRTAEELEKLIREKAKGKELADEVRELAKRSHEELKRLLDEVRKLLKDSERALRKLLEDVRREADKVAEEVRT

SEQ ID NO: 4477 - protein, 175 aa, Artificial Sequence; identical to SEQ ID NO: 4476
  Synthetic

SEQ ID NO: 4478 - protein, 175 aa, Artificial Sequence
  Synthetic
SEVDEVVRRARELVKKNRDDVKKVVEDLRRIVKEDLDTARRVVKRLRELVEELKELIRSGGSEELLKKLKEDLKRLLDKVREESKRTNDRLEELIEKVARDSRKTLEELKDLIRKKVRGKELADEVDELMKDSDRELKRLLEEVRKLAKRSTDELERLIEEVRKELEDVLDEARQ

SEQ ID NO: 4479 - protein, 175 aa, Artificial Sequence; identical to SEQ ID NO: 4478
  Synthetic

SEQ ID NO: 4480 - protein, 179 aa, Artificial Sequence
  Synthetic
SREEELLERLRRVVERNKKLVDDLADRADKVVKENEKLVRDLLEESRKTSEILDRLVKNRGDERRLEDIDREDRKTLKDVKDTSRESKKRLEDELKKVEDESRKLTRELEERLERAVRERGREPELVEEVRRLSEKSNRDLKELVKDIERKLDKVHKDLEKVIEEVERSNERVKEEVKT

SEQ ID NO: 4481 - protein, 179 aa, Artificial Sequence; identical to SEQ ID NO: 4480
  Synthetic

SEQ ID NO: 4482 - protein, 182 aa, Artificial Sequence
  Synthetic
SDAERIVEEAKRLVEENTELVERVLEKLERLVRENRTLVERVIEELDDLVRRIEDVVRRGVDEKDIAKLEKELRERIKEVRDRSKKTRDDLEKLIREVEERSKESTRKLEELLRDVTRKNKDSKKLEKLLREVERLMEESHKRLKEVADTARRLMDDSERELDRLLREAEKKIRDVREEIRR

SEQ ID NO: 4483 - protein, 182 aa, Artificial Sequence; identical to SEQ ID NO: 4482
  Synthetic

SEQ ID NO: 4484 - protein, 182 aa, Artificial Sequence
  Synthetic
SLVDEILKDLDRLVEENEKLVKKIVEDAEELVKRNTDLVEEVLRELKEIVETIRDLVRRGVDEDTIKKLEDDLRRKEEKVRRESKRSVERLEELAEEVRRESKRLTEELKRLVEDVLRRAKDVEELKDVLRRVEEKIRKSNEKLEKLLEEVSRLAKRSDERLKKVLEDIKEEIRKVKEDLER

SEQ ID NO: 4485 - protein, 182 aa, Artificial Sequence; identical to SEQ ID NO: 4484
  Synthetic

SEQ ID NO: 4486 - protein, 181 aa, Artificial Sequence
  Synthetic
SLEEVVKKAEDLLKRVNDELKKVSKKVRDDLRRVNEKLKTVVEDVLRKLEAVVDKIRKSGVDEERLRELKELIERAKRELERILEESEKTTRDVERESEESLDRSRRTTEEAKRELDDVRRRGVDVKDVDKRIRDVVRRHEEVVETNARRVDEVVKRHDKLVKDLERRVEKVVRELEEKVR

SEQ ID NO: 4487 - protein, 181 aa, Artificial Sequence; identical to SEQ ID NO: 4486
  Synthetic

SEQ ID NO: 4488 - protein, 181 aa, Artificial Sequence
  Synthetic
SLDEIVKRAEEELKRLNEELKRVSDRVKERLDRVLDELRRISERIKELLERVKRKLEREGVDEDTLRELARELKELEDRSRESLKRVEDLIRKVEEDSKESLKESKRLTDDARRRLDEIRKAGVDAEDLRREVEEIIRRHKEVIRKNEEDVKRVLDTLREMLKKNKKLVDDMVRKLDETIK

SEQ ID NO: 4489 - protein, 181 aa, Artificial Sequence; identical to SEQ ID NO: 4488
  Synthetic

SEQ ID NO: 4490 - protein, 177 aa, Artificial Sequence
  Synthetic
SEAEKVLEKVERVAREVLERIKRIVEHTKRVVEDVIRRADESVRRSEEIMEDVRRKVDSEKVEEIERRVREVVKENRRLVEELRERVRRVVEENKRLLEEIERIVREVVRRVEELARRNGPKEDVERLVRTVKEELDRLVDESRKLSRDVRETLEELVKRSEDVTRRVEETLREIVK

SEQ ID NO: 4491 - protein, 177 aa, Artificial Sequence; identical to SEQ ID NO: 4490
  Synthetic

SEQ ID NO: 4492 - protein, 177 aa, Artificial Sequence
  Synthetic
DELERILEEVKKVVEEVVRRAEESVKKTEDVMRKVVERVARSLEESRRVAEEVERRIRSEKLRRVREIVKEVVRINEELVKRVKDIVREVLERNRDLVRRVRDIVRRVEEEVKKLADNNGPEKDVKRLVDEVRKELEELVRRSEELTKEVKKTLEELVKESKEVVKDVEKKLREIEK

SEQ ID NO: 4493 - protein, 177 aa, Artificial Sequence; identical to SEQ ID NO: 4492
  Synthetic

SEQ ID NO: 4494 - protein, 181 aa, Artificial Sequence
  Synthetic
REVDEAVKNNEEDAKESRRVVEEAVKRDEDIARDIERRAREVVERDKEIVDEVRRRVKDEKKLREVVTLSKKIVDETKEIADRVLELSKRIVKETRDIAKRVLKLNDDSVKDVRRIAREVRSKEVKDLLDENSKRSNEISREVKKDLERTVRENKKIVDEVRKKLEDTVDKNRRIVEEVTT

SEQ ID NO: 4495 - protein, 181 aa, Artificial Sequence; identical to SEQ ID NO: 4494
  Synthetic

SEQ ID NO: 4496 - protein, 181 aa, Artificial Sequence
  Synthetic
SEVDKMLKRSNDIVREIARVVEEAVKTDERIMREILEHARKVVEEDKEIVDRVRKEVEDEEKLREVVERSRRIVKETEESAEEVLRRSAEIVKDTKRIAEEVRRRSKRISDEIRRIAREVRSEEVVRRLRTLVEENRKIVEDVKRELERTVRDNRRIVEEVAKRNHDTVRENKEIVDRVKT

SEQ ID NO: 4497 - protein, 181 aa, Artificial Sequence; identical to SEQ ID NO: 4496
  Synthetic

SEQ ID NO: 4498 - protein, 180 aa, Artificial Sequence
  Synthetic
KEAEDVIELVRRILEEVDRRVRDVLRKDEESLRRVKKTVEEVLKRHKDIEDEVRRRVRSEKLRRLVKKVRDMLKNVEKLARELIEKVARSIEKTKKIAEDLIRKAEEVLREVERVRDELDSEEVKRVLEEIVKKVEEIVKDVERKLRKTVEENEEVVRRVKRYLEKSVEDLEKVVRDVTT

SEQ ID NO: 4499 - protein, 180 aa, Artificial Sequence; identical to SEQ ID NO: 4498
  Synthetic

SEQ ID NO: 4500 - protein, 177 aa, Artificial Sequence
  Synthetic
SAEDILREVEELVRRTRKHLEDSLREVTKLVEETKREADRILKEVRDRVKEVIERGRDKKDLVRELEKAIEEVERRIRENVRRNEKVVEDHERLIRENEKKNDDAIERIRKIVAETKDEEVLKTVREELRDIIRRSVEHNRDSLRRLREIIERSLRHVEEVLERVRKEIERIKRETK

SEQ ID NO: 4501 - protein, 177 aa, Artificial Sequence; identical to SEQ ID NO: 4500
  Synthetic

SEQ ID NO: 4502 - protein, 177 aa, Artificial Sequence
  Synthetic
SAEDILREIKRLVEETERLLKRILEEVRKLVEETRRRLETILRRVEEKVRRLVEKGRDKRELKKRLEDVIEEIRKIIEDNIRRNDRVVEEVERLIEEDLRDNRRLVRRIEEIIRRVKDEETLKRALDEARKIIEESKKHVKDVLRKVTDEIRESKKDVERVEDEVDKRIREVDERTK

SEQ ID NO: 4503 - protein, 177 aa, Artificial Sequence; identical to SEQ ID NO: 4502
  Synthetic

SEQ ID NO: 4504 - protein, 181 aa, Artificial Sequence
  Synthetic
SIDEVAEEVERLLEEVKETSREVLERVKRELEKIIDTSRRILEEVRRLLERVLEEVERRKKNRERVRELVRRLLERARKVLEDNKDSVRRILEKLKEVLKRNEESVARIKEELERVRRDVKDDRDVKRVLDKVRKKIEENKDTVRRVEEEIKKLIEDNKRTSEKVRKEVTDIIEEIKEEIK

SEQ ID NO: 4505 - protein, 181 aa, Artificial Sequence; identical to SEQ ID NO: 4504
  Synthetic

SEQ ID NO: 4506 - protein, 176 aa, Artificial Sequence
  Synthetic
DVEDVVREAEDLLRKLEEKSRKVVEDAKRLLDEVKRKMEESVKEAKRLLDEVLRKSDEEKIRELVKRLEEINRRSLEEIKKLVKTLEEKLREMNERNKESVERLRRELTEARKRIRDKKIVEEVRRRVEEVVRRDEKSVEDLKREVDRVITELDRLVKRNTEEVERVIRRLDEETR

SEQ ID NO: 4507 - protein, 176 aa, Artificial Sequence; identical to SEQ ID NO: 4506
  Synthetic

SEQ ID NO: 4508 - protein, 179 aa, Artificial Sequence
  Synthetic
SEEEDAERLLRDLKRRADEVVKESEKILEDIVRDAERVLRESKRISEEIVRRADEIRRKVRGEEELEKVVRELEKLTRENKERVDRIMKKLAKLVEENERRVRELEEELKRILEEIVRRIGRESRLVEELRRLVEEVRERLDRSVKKTKELLKEVIKELEKLLKKDEDDVERVIRRLED

SEQ ID NO: 4509 - protein, 179 aa, Artificial Sequence; identical to SEQ ID NO: 4508
  Synthetic

SEQ ID NO: 4510 - protein, 178 aa, Artificial Sequence
  Synthetic
SEVEDILRRVEKRARDSLKHLEDVLRKVDKRVRESLDNLRRVLEEVERIVRELERLLDEGTDIEELLRRMEEMIRRIEEKVRRNLDDNRRVVEEVRKEVAKDLRDNERVVKDVRREIRDERLLEEIVRRLEDSLRKVEEIARRIEKRLRDSLRETKRIADEIRKRLEDALRRVEERAR

SEQ ID NO: 4511 - protein, 178 aa, Artificial Sequence; identical to SEQ ID NO: 4510
  Synthetic

SEQ ID NO: 4512 - protein, 178 aa, Artificial Sequence
  Synthetic
SDVEKILDDVRKDAERSLENLKEVLEKVEEEVRRSLEDLRKVLEDVERIARKLEELLKEGVDIRELKKELERVLEEIRRIAEENLKRNKDVVREIRKIVKENLDRNRRVLEKVRREIKDEELLRRIERTLRESLEAVKRIAEEIERTLEESLREVERIVKEMEDLVRAALKRVEDKAR

SEQ ID NO: 4513 - protein, 178 aa, Artificial Sequence; identical to SEQ ID NO: 4512
  Synthetic

SEQ ID NO: 4514 - protein, 178 aa, Artificial Sequence
  Synthetic
SEVEEILRRIKEEVRESLEDLRRVLEEIEKKAKESLRELKEVLERVKEIADKLKRLLDEGRDIRELEEELKKVDEEIDRIARRNKEENRRVLDEVRKVAKRNKDRNKEALRRVEKDIRDEKLLRDIKRDLERSLEAVDKIVKEIMERIKESLKATERIVKEMKDLITRVREEVKRRAE

SEQ ID NO: 4515 - protein, 178 aa, Artificial Sequence; identical to SEQ ID NO: 4514
  Synthetic

SEQ ID NO: 4516 - protein, 177 aa, Artificial Sequence
  Synthetic
DEVEELKERAKRSNEELKRKVEELKKRAKKAIDDVRRVVDENKKLVKEAIDRLRKTDVDEKIIEDLKRKLEKSVKESEDLVRRLEELMKEVVERLKKLVETNKRLTDEVVKKLARVREKETLKKLLEELKKLVDESRRRLDELRKEVEKKVEEMLERARRLLKKTEDLVREVKRRVD

SEQ ID NO: 4517 - protein, 177 aa, Artificial Sequence; identical to SEQ ID NO: 4516
  Synthetic

SEQ ID NO: 4518 - protein, 177 aa, Artificial Sequence
  Synthetic
DELKELEDRLRRAEEEARRLLEEIKKRLKESNEELKRLVEENEKLVKEALRRLENTDVDKKIIETLKRLLEESVERSRRLVERNREESEKVVERLKRILEELRRLLRRVVEEAARVKDKDVLRKLLEEVERLVKRVLDELRALLKEVEDLVRKSVEDLRKLLEETRKLVREMEERVR

SEQ ID NO: 4519 - protein, 177 aa, Artificial Sequence; identical to SEQ ID NO: 4518
  Synthetic

SEQ ID NO: 4520 - protein, 177 aa, Artificial Sequence
  Synthetic
SLVEKLEKRLRDVIKTIEDIIRENEERLRRSNRELEKLVDENRKLVEEVLKRLADTDVDKKIIEELERRLKESLDRSRELVKENKRLSEESVRRSRRLLEELKKLAEEVIERLRRVKDERVLEKLLREVEELAKRVLTELRRLLRETERLVRESEKRLRDLLRDTERLAREVEKRVE

SEQ ID NO: 4521 - protein, 177 aa, Artificial Sequence; identical to SEQ ID NO: 4520
  Synthetic

SEQ ID NO: 4522 - protein, 177 aa, Artificial Sequence
  Synthetic
SLVEDLKRELEKAKEEIEKIVRDLERELDRVIKENERLIRENEDTVRKALERLRRQDVDERIIRELEKKLRESVEESKKSLEEVEREVDEVRKRLDELVKELEKRVREVIEELRRVREEDVLRELKDRVRRIVEEVARRLEELLKKVKDLVKKSLKTNEDLLRKTEELVRRAEERVK

SEQ ID NO: 4523 - protein, 177 aa, Artificial Sequence; identical to SEQ ID NO: 4522
  Synthetic

SEQ ID NO: 4524 - protein, 181 aa, Artificial Sequence
  Synthetic
SEVEEVLKRLKELVDTVLEELKDVIRRIEELLERVRRDNERTIREDEELVRKVLDELRKISDKKTIERIVRRITRESERLLEENHRINKRITEELERLVRELERVVEEIIERLKELLERVKSGELAEEIERVIREAERRLKKLLDELRRLVEEVRRELEELDERLKRSSEEAKKRLDELVK

SEQ ID NO: 4525 - protein, 181 aa, Artificial Sequence; identical to SEQ ID NO: 4524
  Synthetic

SEQ ID NO: 4526 - protein, 181 aa, Artificial Sequence
  Synthetic
SEVERVLEDLRRLVRDVEEKLRRIIERDRRLVEEVERENRKTIRKIEELLRKVLEELKDISDKKTIERIVREIIKEARDLVRRNHERNREIVDESRRLVEELRRIVEEIIRRLRELLERVKSGELAERIEDVVREAEKRLRELLKELEKTSRDLKKRLEELDRELKALVEKVERDLEELRK

SEQ ID NO: 4527 - protein, 181 aa, Artificial Sequence; identical to SEQ ID NO: 4526
  Synthetic

SEQ ID NO: 4528 - protein, 185 aa, Artificial Sequence
  Synthetic
SEAEELLRRLKELVDEVLKRLRDMIKRSEDLARDVLRKHEDLIRKLEELMKKVEDLADKISDKDTVRELVKEVKKRLERLLRESEKLSKRVKEELKRSLDRSKELVDRVVETVREILKRLRDAGVPEEVVREIERIVREVTERLRRLVEENAEVVKRVEKELKELNDELRRVVEEIVRKAKEKTK

SEQ ID NO: 4529 - protein, 185 aa, Artificial Sequence; identical to SEQ ID NO: 4528
  Synthetic

SEQ ID NO: 4530 - protein, 185 aa, Artificial Sequence
  Synthetic
SEAEELLKRLEDRAEEILRRLEEILRTSRKLAEDVLRELEKLLRESERRIREVLEELRRIKDKKELEDVIREVEKELDESLERSRELLKDVLKKLDDNLKESERLVEDIDRELRKILEDLKKAGVPKEVVDEIKRIVDEVRERLKRIVDENRKIVEDARRKLEKIVKENEEILRRLKKELRELRK

SEQ ID NO: 4531 - protein, 185 aa, Artificial Sequence; identical to SEQ ID NO: 4530
  Synthetic

SEQ ID NO: 4532 - protein, 183 aa, Artificial Sequence
  Synthetic
DMRKELEKRVEEIRRAVTELVKRNEDIVREVKKRVEELVKRNEDITKKAEDDIRDLVRKRDREELRRLVERLKKLLKESNEELRRLVRELEERLRESIRNSRRVVEDLERKLEEIRKEISRVDEEEKLRRLLERLEDIARRVLKYLEEDLRETEKLAKEVLDRARKILEETKELVKDVLEKAR

SEQ ID NO: 4533 - protein, 183 aa, Artificial Sequence; identical to SEQ ID NO: 4532
  Synthetic

SEQ ID NO: 4534 - protein, 183 aa, Artificial Sequence
  Synthetic
DMDEELRRVVKEIEDELRRLVEENRDVVRKVEKLNRDLLKRNEDITDEARKRVEDLVRKRDDERVRELVRKLTEELKESNERNRKVVEESKRRLEESIRNSERVVEELKRLLREIIRTIDDVREREKLEKLIRRLREIAKEMLEYAKRDIERTKELAKRSLERHKESLDRTEKLVKEVLDKAR

SEQ ID NO: 4535 - protein, 183 aa, Artificial Sequence; identical to SEQ ID NO: 4534
  Synthetic

SEQ ID NO: 4536 - protein, 183 aa, Artificial Sequence
  Synthetic
DMVRDLERIVEKIKEDIKELVKRNREVTEKVVRDVEELVKTNREVVREATRRVEKLVEEEDREEVRRIVEELRRRLTKSIENSERVVEKLKKDLEKSNRDLEDLVRRLTELLKKIIEEIRRVKDEDTLRKLLKTLRELARRVLEEARKIIERSKELAERVLRYLKRDIEESKKIVKEIEDRAR

SEQ ID NO: 4537 - protein, 183 aa, Artificial Sequence; identical to SEQ ID NO: 4536
  Synthetic

SEQ ID NO: 4538 - protein, 183 aa, Artificial Sequence
  Synthetic
DMERELDDVVRKAEEDNRRLLKENEDIVREVVDRNARLLEENRRVVEEAVRRVEDMLRRRDRERLRDIVDRLRKELKKSEDNSRRSLKESEDRLRESIENSRRSIEESRKLLEEIRETIRRVKDERKLRKLIDDLRKLVRESLEYNKDDLEKTKELARRSLKYNKEDIDRSREIVRDVRRKAQ

SEQ ID NO: 4539 - protein, 183 aa, Artificial Sequence; identical to SEQ ID NO: 4538
  Synthetic

SEQ ID NO: 4540 - protein, 183 aa, Artificial Sequence
  Synthetic
SVIEALEEIAEKIERDVRKLVEENREVVKEAEKRVEEILRTNSKRSEEVRREVEDLVRKDDREEIRKLVEDLTRRLEESNRELKKLLEELKDLLRRSIENSERVVEKLRREARTLIEELSRVKEERVLEELLRRLEEIAKRALEYLTRDIEETKRLVEEVLKRLKEILDKTDDLAREVLERAR

SEQ ID NO: 4541 - protein, 183 aa, Artificial Sequence; identical to SEQ ID NO: 4540
  Synthetic

SEQ ID NO: 4542 - protein, 185 aa, Artificial Sequence
  Synthetic
SEVEKIEEDLKRLVKRLREINEESKKRLEELIRTAEEINKKTTDELERLAEEVDRLVKRVTSKEVKDLLREIEEELKKLLRKNREINEDIVRRLEELVRRNEKINKEIVERLDKTVKDVKKDLRSVREAVDRLRRVVDEIRKEARKLNEEIRKRVEDVVRKLDKMDEDLRKRVEEIERKVREATR

SEQ ID NO: 4543 - protein, 185 aa, Artificial Sequence; identical to SEQ ID NO: 4542
  Synthetic

SEQ ID NO: 4544 - protein, 185 aa, Artificial Sequence
  Synthetic
SEVEEILERLRRLVKEVDKRNTDSLDTLKRLIDELERKNRDSLRRVDELAKELEKLARRVTSEEVKKLAEDVVRRLEELVKENKEENERIVKRLTELLEENRDENRRIKEELEELLRDLKRKLRSVKDAVTELEKDVREIKKRLDEMDKRLKDVVDEVRRRAEEVNRRIERLVREIEKRAREEVR

SEQ ID NO: 4545 - protein, 185 aa, Artificial Sequence; identical to SEQ ID NO: 4544
  Synthetic

SEQ ID NO: 4546 - protein, 185 aa, Artificial Sequence
  Synthetic
SEAEEVLERLKRLRETVKEENDDSLRKDRELVDRLEKDNRDSLRKLKELIERVREILKRVTSEDVRRLLRRIVEELKELVERNKERNKRIVETSKRLVEKNRKRNEDITRDLRRLVEDLKRRLKEKKDVVETVKRVVEEIEKELEEANRRLEKSSREVEDRIRKANKRLEEVVDEVREEVDKATR

SEQ ID NO: 4547 - protein, 185 aa, Artificial Sequence; identical to SEQ ID NO: 4546
  Synthetic

SEQ ID NO: 4548 - protein, 185 aa, Artificial Sequence
  Synthetic
DEVREVLTRLEELVRRVTKELEDSLRNTERVRRTIRKLAEEVNRDSKRLKDEVKKVLEKIKDKDTLRKVVDDVEKELEELNRTLERLVREVSRYLRENNDRSRKLVEEVIERARRIVDTLRRAGVPEEAVETLKRKVEEIERRLKRMVEEDRKTIEEIEEEVRRLVKTNREIIKEIVETLREAVR

SEQ ID NO: 4549 - protein, 185 aa, Artificial Sequence; identical to SEQ ID NO: 4548
  Synthetic

SEQ ID NO: 4550 - protein, 185 aa, Artificial Sequence
  Synthetic
KEVEEVRTRLKKLRDDVKRLLDEVNEESKRLAEEVRRRLEESNRNTERVVEEIERVIERIKDKDTLERMVREVKRYLEENNKRSEALVDKVEKDLKRLNDKLREDVKRVIERLRRLVEELKRAGVDDKVVDEVRRRVEEAEREVKDMVRTNNEIVRRIVEEARRLVDEDRDRIKKIEERLRRELQ

SEQ ID NO: 4551 - protein, 185 aa, Artificial Sequence; identical to SEQ ID NO: 4550
  Synthetic

SEQ ID NO: 4552 - protein, 185 aa, Artificial Sequence
  Synthetic
SEAEEVLREVDELAKRLERVATESLKNTKKVVDDVRREVKRVNERSEEIMRRIEDVLRKIKDKDTLRRTVEEVIKELEDLNRELEKRVREVIRYLRENNRTTKEKVDEVRRRLEKLLDDARKAGVPEELIREIERIVREIDKRARELVERDNREVERIVEELKELVKTNNDIVRRVVEKLKETVR

SEQ ID NO: 4553 - protein, 185 aa, Artificial Sequence; identical to SEQ ID NO: 4552
  Synthetic

SEQ ID NO: 4554 - protein, 183 aa, Artificial Sequence
  Synthetic
SEAEKILEDLKRIVRRIKEELRRVLDHTRELVERIRRLAKKILDDTEKIVRDIRDKAEKVRDKDDLRRLVEEIRERLRRSDEELRKLVEKIARDLDKNLEDSERLVEKITKELEELLEDIRRLPEDVVRELKREVERIKREVKKMVDDNRRTVEKIKRDAEKMVRDNEELSRRIEKDVDDKTK

SEQ ID NO: 4555 - protein, 183 aa, Artificial Sequence; identical to SEQ ID NO: 4554
  Synthetic

SEQ ID NO: 4556 - protein, 183 aa, Artificial Sequence
  Synthetic
SEAEKIEERLKRVVEKLRRDATRVRKHTDDLVKEITDLAEESKRRVEEIRERVKRLRERVTDKDTVRKLVEEIKKRLDDSDKTLEDLVERIERLLEENLKDSERLVTEIEKELRRLLEEVRRLDEKVVKRLEDEVKRIKDEAKEMVDENKRKVDEIRKELRRLVEENRRESEKIKKKLDEDLK

SEQ ID NO: 4557 - protein, 183 aa, Artificial Sequence; identical to SEQ ID NO: 4556
  Synthetic

SEQ ID NO: 4558 - protein, 183 aa, Artificial Sequence
  Synthetic
DEIREILRRIREVVADATRRAKESLDNLKRVVEEVDRRVKESLDRLKEIVDRVRELSKRVTDKETVKELVERIRKELDDSNEELRKLVRDVEKYLKDNVRRIAELVKKIEKELRDLLREISRLPKDVVKRVEDEVRDIRRVLEEMVRRDKKVVDEIRERLKEAVRRNEEVSRKIKKDLKDETK

SEQ ID NO: 4559 - protein, 183 aa, Artificial Sequence; identical to SEQ ID NO: 4558
  Synthetic

SEQ ID NO: 4560 - protein, 177 aa, Artificial Sequence
  Synthetic
SMEERLREVVTEIRKKVEKLLRDNRKSNKEIKETVDDLVRRNRELTERAKRRVDARGIREDVVRRLEKRLRESNEKVERVVEEIEKRLRESDKKVEEVIERLDRLLKELIKRISRVTREREAEELLRELADVVRRAEELAERSLRESEKVMEDITREAERILRDTKRLIEEIERRAR

SEQ ID NO: 4561 - protein, 177 aa, Artificial Sequence; identical to SEQ ID NO: 4560
  Synthetic

SEQ ID NO: 4562 - protein, 177 aa, Artificial Sequence
  Synthetic
SLREDLEKDVRDIVREIDEAVERNRRSVEEVDKRVEDMLKNNRDSNKKIEEDVRRAGIPEEVVEELRRRLEESDREVERILKELRDRLREIIERSEDLVRRLREELKRLIDTIDRITREEDAKRLKDELREVVDKIRRDLKKSNDDIRRLVEKIKRELEELNKRSRELVERARETVR

SEQ ID NO: 4563 - protein, 177 aa, Artificial Sequence; identical to SEQ ID NO: 4562
  Synthetic

SEQ ID NO: 4564 - protein, 177 aa, Artificial Sequence
  Synthetic
SLEETIEEKVRRIREEVRRMLENNRRINEEVDRRVTEMVERNRKTVEEVVREVDRDGIPESVVDELRKAVEAVIRKSEKIVEDLRREAEKSDDELRKVVEKISERLEDIRRKVRKLTREEDAKRLLEEVEDIVRRLRKELEDSNRKSRKLVEEIRKRAEESNRELRELIKRIKDRAR

SEQ ID NO: 4565 - protein, 177 aa, Artificial Sequence; identical to SEQ ID NO: 4564
  Synthetic

SEQ ID NO: 4566 - protein, 177 aa, Artificial Sequence
  Synthetic
DVLERLAEVVRRVVKEAEDLVRNNRRLNKEVEDEVDELVRNNRRLTKDVVKKVEDAGVPEEVVDEIRKLLTTSNERVERLVDELKKRVETSDERAKRIVDRLRKIVEKLIREASKVTSKEEVKRLEDELRKVVDKVRKDMKRSNDDSERLREDITRKAKRLNEETRKVMEDVTRRAT

SEQ ID NO: 4567 - protein, 177 aa, Artificial Sequence; identical to SEQ ID NO: 4566
  Synthetic

SEQ ID NO: 4568 - protein, 185 aa, Artificial Sequence
  Synthetic
KEAEELIREIERKAEEVRKENERSIRENERLAREVEKRLKRTNEELKRLVRELEEKLKRDDDGETVKREVKKIDEDLRRLVEESERIVKEIVERSRKSVEDNRRRNEEIERDLRRLVEELKRRGVDEELIRRLEEVVKRIREDLKKLDDDLKRSVEEIERRLKKVIEDNRETLERARRRLDERVK

SEQ ID NO: 4569 - protein, 185 aa, Artificial Sequence; identical to SEQ ID NO: 4568
  Synthetic

SEQ ID NO: 4570 - protein, 183 aa, Artificial Sequence
  Synthetic
DEAEEILEELRRLIEEDKKTVEEVLRRDEETIKRLEEENREALKDNRRLIEELEDIVRRIKDKDTLREILKRVLEESEELLRRVHKRNREVIEENRRSVEELKKINEDSIKRIEDLLREIRRVDEKVREKVERILDDLRRVVEETVKRAEDLLRKSREVVKRVDEELKESHDRLDERIKRDLK

SEQ ID NO: 4571 - protein, 183 aa, Artificial Sequence; identical to SEQ ID NO: 4570
  Synthetic

SEQ ID NO: 4572 - protein, 183 aa, Artificial Sequence
  Synthetic
DEAREILKTLKDLIKELEDRNREVLERDKKTIEDLERRNARVLEENKKLIDEIRRIAKDIKDKDTLSEILKRVLRESEKLLRKIHKENREVIKRNEDSLKEVHDENRKVREEIKRLLDDARRVDRSVEEALKKILRELEKKVEEVDRRLKRILEDSRRVVRRVDEEARKSHEELKRELDRIRK

SEQ ID NO: 4573 - protein, 183 aa, Artificial Sequence; identical to SEQ ID NO: 4572
  Synthetic

SEQ ID NO: 4574 - protein, 183 aa, Artificial Sequence
  Synthetic
KEAEDLLRKLRELIKKLDDTNRRVLERDRKTIEELERRAEKILTDIERLIRELEDRVRRTKDKDTLRELLRRAKDTIRKLLKDLRDELEKVIKENERSLREVHKRNKEVDEDAERLVAEVRRVDEKVVEKARRILKELRDRIREVDKRLRELLEESRKRVEEVERELERLVRELEKKVREAEK

SEQ ID NO: 4575 - protein, 183 aa, Artificial Sequence; identical to SEQ ID NO: 4574
  Synthetic

SEQ ID NO: 4576 - protein, 182 aa, Artificial Sequence
  Synthetic
SEVEDVVRKIKEILERLKKEVDDVLDRNRKLLEELKKRADEVLKRNKDLLETLKREADRDGKDEDVVRRARKILKELRDHSKKVVEDMERILEESKKHSEDAVRRLREIVKRLAEEVDEVTKRGVDKDELKRLLDELREIVKEAEERLRKSDEDLERIIREVKKRLKESNEELERTIREVER

SEQ ID NO: 4577 - protein, 182 aa, Artificial Sequence; identical to SEQ ID NO: 4576
  Synthetic

SEQ ID NO: 4578 - protein, 184 aa, Artificial Sequence
  Synthetic
REVEEVVKEAEDLLRKLRELAKEFLTRHKKLIRDVTEKVKEVLKRSADSIRELEKIIDKVTSDEVRRLLEEINKRNREEIERLLRELEKILRESRELSKELKKILDEILKRIRELVEKVKARGLPEDAVRKLEEMVERLARIVEDVERKLKKLNKELEEIVRDAKRRLERLNEELRRRIREAER

SEQ ID NO: 4579 - protein, 184 aa, Artificial Sequence; identical to SEQ ID NO: 4578
  Synthetic

SEQ ID NO: 4580 - protein, 184 aa, Artificial Sequence
  Synthetic
DEDEDIERKLKELIDRLREEVKKAEDEHKELIKRDHRRVEEVERRSEKSIKDLRDLAKKVSSEEVERLLEDINRRNRELIDRLRKELEKTNEESKRLSEELKRKLTEVLKRIRELVEEVRKRGLPEDVARRLEELVEELEDIVRKVKESLRRLNEELRKNSETVKKKLEDLNRELRKDIEEKRR

SEQ ID NO: 4581 - protein, 184 aa, Artificial Sequence; identical to SEQ ID NO: 4580
  Synthetic

SEQ ID NO: 4582 - protein, 184 aa, Artificial Sequence
  Synthetic
SEAEKVLEEAKRLIEELERRVREVLKRSKKTIEDLRREVDRVVKEHKKLIRELREIIKRVTSREVEKLLEDILRDSRRLTKELDEKLKEINKRNAELIEELKRILDKIRKDIKRLIEEVEKRGLPEEVAKRLKDVLRELKDLVEKIEEEARRLNEELKEIIDRARKTLEDLNRELEEVVRRARK

SEQ ID NO: 4583 - protein, 184 aa, Artificial Sequence; identical to SEQ ID NO: 4582
  Synthetic

SEQ ID NO: 4584 - protein, 178 aa, Artificial Sequence
  Synthetic
SEVDEVRRELERVITDDKRLVDESRRKNEKSIRDDEELIKTSRRINEESIRRLKELVERGVPEEELERIVKENKEKVARVVEESKRLVERNKREAEKVVEESRRRVKRLREELKDVVRKGVDEETLRRLVKRLDETSEELEDENRRLNETLKRSSDELRKTNEELNKRLKEVVDRAKK

SEQ ID NO: 4585 - protein, 178 aa, Artificial Sequence; identical to SEQ ID NO: 4584
  Synthetic

SEQ ID NO: 4586 - protein, 178 aa, Artificial Sequence
  Synthetic
SVEEKIKEMVDKIKDSVRRSTEENDRLVKEIDKVLKEAEKRNRDLLKEAADVLKRVLDKRRESEELRRIVEEVEKTHRDLLKKTADLVRKVREDHDRLLKESKELNDRSERRAEELERKVDDIDTVLKDMKKILDDNKKLVDDSRKKHKESIDRLRKLVKDSLDEHRESIERLERAAR

SEQ ID NO: 4587 - protein, 178 aa, Artificial Sequence; identical to SEQ ID NO: 4586
  Synthetic

SEQ ID NO: 4588 - protein, 179 aa, Artificial Sequence
  Synthetic
REVEELERELEESNKELRKLIKELDDLLRETNKRLNDLIRELKERLDRVLEELRKIIKDDRRLVEELRRLVEDVRRELKKAIDELKKIVEDSERELERMIKRLRDIVDESRKRLKEVSRTREVEKLVEEAIKRNEDLVRTVERKVDEAIKENRRSVEKVAEEVKKAEEELERIVDTVRR

SEQ ID NO: 4589 - protein, 179 aa, Artificial Sequence; identical to SEQ ID NO: 4588
  Synthetic

SEQ ID NO: 4590 - protein, 179 aa, Artificial Sequence
  Synthetic
REVEELKKEADKTNEDLNRLIKELEERARESNRELKRLIDELRRRLEEVLKRLKDIIDKERRSTEELRKLVKDVEDELEKVIRDLERIVDRSRKELERVIRELEKIVRESERRLKEVSRTEEVERLVTEMIKRNRTSVDAVRRKVKEMIDRNKALVETVRDEVRRAREKLRDILRKAEK

SEQ ID NO: 4591 - protein, 179 aa, Artificial Sequence; identical to SEQ ID NO: 4590
  Synthetic

SEQ ID NO: 4592 - protein, 180 aa, Artificial Sequence
  Synthetic
SIEEIVRKVKEDLKRSLDELRKVSEDMARRLRESLKELEEVVREMEERLKRILDDIRRKVPEDRVRELERRVRELIERLRKKVKENKERLEKIVKDSDDHVERNVEELEKIVRELEKLVRDGRDERDLKRRVDEVLTRSKESVDENKRTADRVLEESRESIKELKERAKRLLERLEEERK

SEQ ID NO: 4593 - protein, 180 aa, Artificial Sequence; identical to SEQ ID NO: 4592
  Synthetic

SEQ ID NO: 4594 - protein, 178 aa, Artificial Sequence
  Synthetic
KEVEELEREARRMLEHTKRLIDEVRDRAKKSLDNTRRVDREVEKLVEDTERRLDELRKRGEPEERLKDIHRENRELVKRIEEYLKRDLDRSRKLVREIEERLRENLETSEDLVRRLVKGEELKRTAERMIEENRRLVETLKRVLEEAIRRNEELVKTLLRKLEESDKKIRKLIEETRT

SEQ ID NO: 4595 - protein, 178 aa, Artificial Sequence; identical to SEQ ID NO: 4594
  Synthetic

SEQ ID NO: 4596 - protein, 178 aa, Artificial Sequence
  Synthetic
SELEELRDRLKEILEHTKKLIKESVERLEESLRNTRRVIRKVEEEVERTRTKLDDLRRRGEDETKLREIHRENRELVRRIVKYAEDDLRRSRKLVEDSKRRSKKNLDDSEELVRRLVRGEEMADVARRVIEENKRLVEENEDRLRKAIERNRELVEEVKKRLEDSDREIERLIREVKK

SEQ ID NO: 4597 - protein, 178 aa, Artificial Sequence; identical to SEQ ID NO: 4596
  Synthetic

SEQ ID NO: 4598 - protein, 178 aa, Artificial Sequence
  Synthetic
DEVETLRREARKLLERIKREIEEVRRRLKESLDNTKRVEDEARKLVKETKDKLKRLAERGSPKEDLERIHRENRDLVRRIEEYLKRDLDESRKLVEEIERRLEELLRTLEDLVRRLVRGEEMRKVAEDMEREIRRLITDLRRELEEAIERNEELVRRLARELERSDREIKKRIDEIET

SEQ ID NO: 4599 - protein, 178 aa, Artificial Sequence; identical to SEQ ID NO: 4598
  Synthetic

SEQ ID NO: 4600 - protein, 178 aa, Artificial Sequence
  Synthetic
SELDELRKRAKRSLETTEELIRRSRKLMRESLDNTRRVEEKVRRLVEKTLRDLEDLKRRGVPEETLREIHKENRELIRRIEKYLEEDLRRSRELVKESKKRSKDDLDRSRDLVRRLVRGREMEETAREAIERNRKLVEDNERDLKKAIEDNEKLVRDLKRELERSDEEIKKLIREVKN

SEQ ID NO: 4601 - protein, 178 aa, Artificial Sequence; identical to SEQ ID NO: 4600
  Synthetic

SEQ ID NO: 4602 - protein, 178 aa, Artificial Sequence
  Synthetic
DSREELRREAKRLLDDIKRLEEKVERLAREVLKHTEELDEKLKRLVEETLKKLEDLRRRGEPDESLRRIHEENRRLVDEIRERLKENLRTSKKLVKEIEERLKELLEELRDLVRRLVRGEELKRTAEEMERRIRELIKRLKDRLEDMIRRNKELVDRLKKKAERSDEEIERLIRETKK

SEQ ID NO: 4603 - protein, 178 aa, Artificial Sequence; identical to SEQ ID NO: 4602
  Synthetic

SEQ ID NO: 4604 - protein, 182 aa, Artificial Sequence
  Synthetic
KEIEDVVRELERKVRENKRRNDEVIKRLERLVEKNTELVRRLIRTLEKLVEDLEDIVRRIKDKDELEERLERIRRRIKELVRKLEELNKKSLDDIRRLVEKLERENERSLREIKRDVDELVRSEEAKKVAEDVERRIRRSVEEARRLLEEVKRKMEESVEESKRLLKKVEDEAKDVVDRARK

SEQ ID NO: 4605 - protein, 182 aa, Artificial Sequence; identical to SEQ ID NO: 4604
  Synthetic

SEQ ID NO: 4606 - protein, 182 aa, Artificial Sequence
  Synthetic
SEIDKVIEELKDLVRKNEKRNRDVVRRDDKSVKDNTKRVEDVIRDLDRLIRELREIVERIKDKDTLRRILKEIKDRIKELVRRLDEENKKSIRDNERSVEEVEKENRESLKTIRELVRNLVNDKRAAELAKEVIDRMEESVKEAERLLRELKRKSEDSVRKSKELLDEVEKKVEEVVREAER

SEQ ID NO: 4607 - protein, 182 aa, Artificial Sequence; identical to SEQ ID NO: 4606
  Synthetic

SEQ ID NO: 4608 - protein, 182 aa, Artificial Sequence
  Synthetic
EEIERAIEKVEREIRELEERVREIIERDRKSVEDNSRRVRTVIKELEKLVEELRKTVKDIEDKDTLRKILDEIRRRIEELVRKLKRENDESNKKNKKSVKDLEDELETILKRIEDEVRKLVNSEEARKLAEELRKEIKRVVDEVRKLLRDLERKSKESVREAEELLKRVRDELKEVVDRTEK

SEQ ID NO: 4609 - protein, 182 aa, Artificial Sequence; identical to SEQ ID NO: 4608
  Synthetic

SEQ ID NO: 4610 - protein, 177 aa, Artificial Sequence
  Synthetic
SLREAVERLRKRHEDVVRELEKLVRRVKEELERVNKDLRKVVEEVRRRLEKVLEDAKDVERIKEIKDEVERVIRELKKIVDESRKNSKDLKEELDDVLKKSEDNVRRVTEELKDVVRRGGPVTDLLKRADDNVKRNRDLIRRLKEKADEIVKRNEDLIEDARRKADEMIKDLEEKAR

SEQ ID NO: 4611 - protein, 177 aa, Artificial Sequence; identical to SEQ ID NO: 4610
  Synthetic

SEQ ID NO: 4612 - protein, 182 aa, Artificial Sequence
  Synthetic
SEVDELRERAKRIVDDLRRKIEEVVKRLEDSDEENKKLIEKAVRELEKIIRDLEEVIRRGVDREEVRRIEKELRDKLEKVKEESKRTIDENRKIVTEVIKTVEEVLKRLREELDRVIKEKKDVRELKELVDRLDKEATDVLRKVREDLRKAIERSERSHRRLEKLIEEIERELKRVVDEVTR

SEQ ID NO: 4613 - protein, 182 aa, Artificial Sequence; identical to SEQ ID NO: 4612
  Synthetic

SEQ ID NO: 4614 - protein, 180 aa, Artificial Sequence
  Synthetic
DIEELLRKVAEEITRSVKESRDRLDEVEKKAREVVERSEKRLREVEEKIERVVRRIVKSDELRDLARKVLDEIRKLVEKLRRLNEKSLRDIERLVRKLEELNKRSLDEIRKLVEELKRVDREEDADKVLKEAEELVRRNRRLVEEVLRRLEEIVKRDEDLVRKVLKEADEIVRRLEEAAR

SEQ ID NO: 4615 - protein, 180 aa, Artificial Sequence; identical to SEQ ID NO: 4614
  Synthetic

SEQ ID NO: 4616 - protein, 182 aa, Artificial Sequence
  Synthetic
SRVEDVVRRLKELNDENSEDSRRVLEKLKDEVRKNSDEIEKAAEELKEKLTRLKRLIEGGVDEETVRRVLEEIRKDLEDLLRRSKESVERIKRELEKSLKRSEESLRKSDEDLKRLLDESRDVKEVKELVKRVRETSKKSLKEDEDMVREVKKKLDDSLRRVDELVRRVEEEARRVLEEVKK

SEQ ID NO: 4617 - protein, 182 aa, Artificial Sequence; identical to SEQ ID NO: 4616
  Synthetic

SEQ ID NO: 4618 - protein, 182 aa, Artificial Sequence
  Synthetic
DEVERVVKELRDKVDRNSREIEKAVTELRKIVKRNSDESKEVIERLEELLRRLEELIKSGVDEKTVREVLEEIDRRLKESERRSEESKDEIRRLLKRLLERSKESLDEIEKELKRLIERSKTSSRVKTLVDEVRKRAEDSLDTVKKLVDRVRERLDESLRDDKRLVDRVREEAERVVREVEK

SEQ ID NO: 4619 - protein, 182 aa, Artificial Sequence; identical to SEQ ID NO: 4618
  Synthetic

SEQ ID NO: 4620 - protein, 182 aa, Artificial Sequence
  Synthetic
SDVEKIFDELRKLLEDLRRKVEEVFRRLKELVERNTRLNREVVKELKKTSDDLRDMVRRTKDKDTLDDLLKKVKKEHEDLVKRLEDLNDRSEKEIRRILKELRDTLRTITRRIEDLVRKAEKDEKVRKLVKEIRERIEKVLRDAEELLKEIEERVKESKKEAKKLLDEVRESVDDVKRKAEK

SEQ ID NO: 4621 - protein, 182 aa, Artificial Sequence; identical to SEQ ID NO: 4620
  Synthetic

SEQ ID NO: 4622 - protein, 182 aa, Artificial Sequence
  Synthetic
SDVEEIVRKLDKLVEDNTRENEEAFKRLDETSKKLEEEVERVFRELKKLVDDLEKIIRDIEDKDTLRKIVKEILKEIEEIARELEKRLEDVLREHKKLLDDIRRRNERSKREIERLVREMEKDEKVRKLVREVEKKVDESTERAERLLKRVEDSVRDVLRRAKELLDEIRKRVKDVERKAEK

SEQ ID NO: 4623 - protein, 182 aa, Artificial Sequence; identical to SEQ ID NO: 4622
  Synthetic

SEQ ID NO: 4624 - protein, 179 aa, Artificial Sequence
  Synthetic
DEAREIRRRLKEVVDEVRKRLEDSLEEIDRRAKEVLEKVKRSLDRLRKVAEEVLDKLRRKGVDEKKIRELKKKVEDLEDKNRRVLREVEEIAKKNKEDHKRVLKELEKEVKDLEDELRELKELDERVKRRVDEVVRKLREIVRKLTEENKRTVEDLERIVERLDRDNRKMVEDMEREVK

SEQ ID NO: 4625 - protein, 179 aa, Artificial Sequence; identical to SEQ ID NO: 4624
  Synthetic

SEQ ID NO: 4626 - protein, 181 aa, Artificial Sequence
  Synthetic
REVEELKKRLEKIVEELKRIVDDHKRKVERIVEELEKLVEDHKRTVEEIVERAKRIVEKDKEKREELDKLVERVKRISDEVRKELERITKRVREESKKVLKRLEEIVKEVRDELDKVKRERDDERLEEVAREIEEALKKVKRDLKESNRELEEVADRVRKELDRSDEDLERRMREVREELK

SEQ ID NO: 4627 - protein, 181 aa, Artificial Sequence; identical to SEQ ID NO: 4626
  Synthetic

SEQ ID NO: 4628 - protein, 182 aa, Artificial Sequence
  Synthetic
SVLETLAERVKEVKDNLRKLVEDLKRLVDRIKETLDKLVEELRELVERLDDRLRKNDKSEEMLERLAEEAERRAKEIEDRLEKHVDESRKRAEELLRRLEDHVRKSKRELERIREEVNSTRDLLKRLEEIMRRLEKEHKDVSKLLRDIEREIDRVHREVKRKIEEIVRKVRKSLEEVKRRAK

SEQ ID NO: 4629 - protein, 182 aa, Artificial Sequence; identical to SEQ ID NO: 4628
  Synthetic

SEQ ID NO: 4630 - protein, 172 aa, Artificial Sequence
  Synthetic
SRAETVLKEVTDKIKKLKDSSDELLRRNKENIDELKKSSEELLRRLTKAIEEIEKANVDEKTLEELIRRVEEELERHHRELEKNSREDEKRNRDHHRKLEEEMRRVEERLEREGIDDEVVKRVRDLLDTVRRRNEKVNEDVKRMNDKLRRDNEDVIRRVEKLLRELEEKRRT

SEQ ID NO: 4631 - protein, 172 aa, Artificial Sequence; identical to SEQ ID NO: 4630
  Synthetic

SEQ ID NO: 4632 - protein, 182 aa, Artificial Sequence
  Synthetic
DLEEVVKEARRLLDTVRKKLDESIKEARELLREIEERFKKSADEVREELKRVEDELRRKRVPEEVERRLDELRKRLEELTRRLKKELDDLKEELERRNERTKRELKRLIDELERRLRRVTRDKDDDVRELRKEVEDIIRRLDELVKKNTEDNRRVIKELRELVEEHTRRVKKIIEDLEREVR

SEQ ID NO: 4633 - protein, 182 aa, Artificial Sequence; identical to SEQ ID NO: 4632
  Synthetic

SEQ ID NO: 4634 - protein, 182 aa, Artificial Sequence
  Synthetic
SVEEVVEEAKELLKEVEEELKRSAEEAEKLLRDVARKMEESVERLRRLLKDVERALREKNVDEKVKKKLRDLLKELEDINRKSKRDLDELVEELRRRTEELERRLRELVRRLEEDLDRFRRDKDDDLRRLREKIEEIVRRLRELVRRHNEEVRRIIETLEELVRRNTETVEREVRRLRDEVR

SEQ ID NO: 4635 - protein, 182 aa, Artificial Sequence; identical to SEQ ID NO: 4634
  Synthetic

SEQ ID NO: 4636 - protein, 182 aa, Artificial Sequence
  Synthetic
SVEKVLEDARRLLEEVKDRLKKSIDDAEKLLRELEKRLRESADEARRLLRRVKELLERKNVDDKLRRDLDRLIKELEDRTKKLIDELRRLIEEVREENRRTKEELERLIRELEEKLRRFKRDKDDDLRELKREIEEIVKRAEDLVRENTEKNKRVVDTVEELVRRHNEEVRRVVKELEERVR

SEQ ID NO: 4637 - protein, 182 aa, Artificial Sequence; identical to SEQ ID NO: 4636
  Synthetic

SEQ ID NO: 4638 - protein, 184 aa, Artificial Sequence
  Synthetic
GLDEIIKRLREVLEKIREELRKSSEELERLLKRVDDDLERSNKELEELLERVRKKLEDSRIDRKLLEDVRREIKRVKEESKEIRDTLKTLLDRLRELSKKIEDDLKRKLEKLDEDLRTIRRKPQSEELLRELEKEIKRVDEDLKRLVEEHEELVRDVLRKLEKLVREHKEKVRERVERADDKVR

SEQ ID NO: 4639 - protein, 184 aa, Artificial Sequence; identical to SEQ ID NO: 4638
  Synthetic

SEQ ID NO: 4640 - protein, 182 aa, Artificial Sequence
  Synthetic
SLEEVLKELKKIVEDVTRRLEEMLRESKETSKEVEKELKKLDDEIREIIERAEEDLRRANKPEEELDKARRRLEKILEDNNRKNREITKRSRTENKRLEERLEEIVRRLKTELDKLRKVLEEGKVDEEILKEVAERLKKTAEEVKRELEKFIEDDRKRADEVRRENEETLKRIEDIVRELKR

SEQ ID NO: 4641 - protein, 182 aa, Artificial Sequence; identical to SEQ ID NO: 4640
  Synthetic

SEQ ID NO: 4642 - protein, 183 aa, Artificial Sequence
  Synthetic
SALEKIMKDLEKSIEDVRRKLEDILRKLRKSSEEVKRRIEDIERKVDRAAKEILRSKGTESEEVKKLDKELKDVRDTLRRIMERLEEINRRIEEELRRLLKELEEENDKVKKELKDRIDKDGDDEDVVRRLKRTVEEVHKRNEDVVREAEKLVEKLSRINEEAVRRLADIVRRLEEELRKAEK

SEQ ID NO: 4643 - protein, 183 aa, Artificial Sequence; identical to SEQ ID NO: 4642
  Synthetic

SEQ ID NO: 4644 - protein, 172 aa, Artificial Sequence
  Synthetic
REKEDVLRRIERIVREIERRLRESLKRNREIVKDLERLARRVLKESEDNLRKLKEDRKELEEVLDELRKKNKELEDDIRRLLRELEERTERWEDELRRILRELEKRLEEIERADVSREKLRKRLEEMKEELRKADERAKEIDTRTKRLVDEAVRKLEKLVEEHRRMTDEIRR

SEQ ID NO: 4645 - protein, 172 aa, Artificial Sequence; identical to SEQ ID NO: 4644
  Synthetic

SEQ ID NO: 4646 - protein, 183 aa, Artificial Sequence
  Synthetic
REDETLEKILRRIEEIVRRLVREAEDVVRRDRETIERLVRENEKAVKEIKDIVDELTRLKKDKREEELERMLKKLEEEVKRIIEESERKLEDNRRKVEEIIRRLEDVLRRLEEEIRKMIKDLPDTESVREAAERLKDILRRLEELLRKVAKDLKKSNDELERLSEESVRRLREILKRLEDALR

SEQ ID NO: 4647 - protein, 183 aa, Artificial Sequence; identical to SEQ ID NO: 4646
  Synthetic

SEQ ID NO: 4648 - protein, 181 aa, Artificial Sequence
  Synthetic
SEVEKILEDLDRSAKEAADRIKEIVDRLTELVKDLKKKNEESLEELDRLVKELADLLRRGEVDEEALKRAVETLRRILKRDKEAVDEAVRTLEKIIEDLKRELDEHTRRLEEILKRARDEVEEDKLRDIARRVREVNKRLEDLIRTVARAVRKALKDSEDLVREIAKRVEKALEDVRRAAK

SEQ ID NO: 4649 - protein, 181 aa, Artificial Sequence; identical to SEQ ID NO: 4648
  Synthetic

SEQ ID NO: 4650 - protein, 175 aa, Artificial Sequence
  Synthetic
REVEEVIRKLERILEEAERMSRESERKLREILEKLERAIREIREELERIHKELEEKAGRDEEVREILKRNRDNIRKLEEDARRILEDLKRLIKKLTDENKRILDELRRRIDELRKANVDRDRLDKAVEELRKEIEEMLRRSDELVKRLDEKVKKVLKELREHVKRDKEKVDKDAE

SEQ ID NO: 4651 - protein, 175 aa, Artificial Sequence; identical to SEQ ID NO: 4650
  Synthetic

SEQ ID NO: 4652 - protein, 175 aa, Artificial Sequence
  Synthetic
SSRERVIKKLEESLERLERLARKIKEDLERINRDLERLARKVEEELKRIHEELERRSGDDREVREILRRNRENIRDIKRKIEEIHRENEKNIRKLVEEAKDILRRSEEKIRRLREAQIREDELDKRVKDLHRENEREIRRLEDHVRRDRERLEEALRDLEAHVKRDKDKLDKDAK

SEQ ID NO: 4653 - protein, 175 aa, Artificial Sequence; identical to SEQ ID NO: 4652
  Synthetic

SEQ ID NO: 4654 - protein, 173 aa, Artificial Sequence
  Synthetic
SEIEDVARRLEEINKKSEDMARRIKEELEKVDEESERLVREVAKRLDEVLKRVRDDGVDEKKLKELEDKVKRIKDEARRLLEESKELTRRLVEEVRRLLEDSRRAVEEIERKLKDGTAEELKKRVEDLKRKNEDLIRRLEEKVRRLKKRNRDLIEELKKLVKELKDEAKKTSD

SEQ ID NO: 4655 - protein, 173 aa, Artificial Sequence; identical to SEQ ID NO: 4654
  Synthetic

SEQ ID NO: 4656 - protein, 173 aa, Artificial Sequence
  Synthetic
SEEERIEKRLREIHERHKRMLDEIKKRLDDSLKTLEDLIRDVTRELEKVLKKAEDDGIDEKLLRELKKEVEEIKRRAEKLLDESRRKVEELARRAKEINERLKKMIEDLRRELKDGTAEDLDREVKRLEREIERSIKELEELVRKLHKENEELIRELEELVERLKRKIDETSR

SEQ ID NO: 4657 - protein, 173 aa, Artificial Sequence; identical to SEQ ID NO: 4656
  Synthetic

SEQ ID NO: 4658 - protein, 182 aa, Artificial Sequence
  Synthetic
SEVEDAERVVRELEREVREEVKKLRKHVKETRDRDKDTVRRVEEKVKRLREKVKRVEDARRPKEELRRVLEELKKEIDKLTKELEEIEERNRRNIEDVERKLKKILRDIEEKIKELVRKIGSEDRAVREVLKELERVLRDAKRELDRVREEHERSHKELRDMLDRVKKELEKILEKLERALR

SEQ ID NO: 4659 - protein, 182 aa, Artificial Sequence; identical to SEQ ID NO: 4658
  Synthetic

SEQ ID NO: 4660 - protein, 171 aa, Artificial Sequence
  Synthetic
EDKERVEEKIKRSLEEARREAERVRDKLRKSEEEIDRVMKRVLAEIDRVLKEVKEAGVSEDVDRRLEELLRTLERKVRELRKDSDEVRKTLEDLVRRNEEDNRRILEELRREDRDSKELEDIVRRLEERNRRTVEEVERLVDEHNKRLREAAKELKKLVDDLERKLREDTR

SEQ ID NO: 4661 - protein, 171 aa, Artificial Sequence; identical to SEQ ID NO: 4660
  Synthetic

SEQ ID NO: 4662 - protein, 175 aa, Artificial Sequence
  Synthetic
SEIEEVKKKLEKILRDHNRVVEEVAKEHEKILRDHNRVIREVKEELDRVLKKLRDDGVDEKLVREMEERLRELAERVKKKNKELEDNIRRVRREAEEINKELEKKIRDIEEKARRRRDDAEKLERLVKRIKEEVEESVKRLKDHAKENREDVKRSVEELRDVVRRLEERIKESAD

SEQ ID NO: 4663 - protein, 175 aa, Artificial Sequence; identical to SEQ ID NO: 4662
  Synthetic

SEQ ID NO: 4664 - protein, 175 aa, Artificial Sequence
  Synthetic
SEIEEVARRLDEILERHNDVLRKVKEKHEEILRRHRKRVREVEEELKKILKELREKGLDEKDVRKTEKEVREIKKKAKEDHERLKRNIERMERELEKRNEDLRREVEKIKREARDDREDAKDLKRKVDELRRKAEESMKEVERHVRENAEHVKRSVEELEEDVRRLRKKLEEKER

SEQ ID NO: 4665 - protein, 175 aa, Artificial Sequence; identical to SEQ ID NO: 4664
  Synthetic

SEQ ID NO: 4666 - protein, 175 aa, Artificial Sequence
  Synthetic
DEKEKVKEDLDRILEEHRREVEDVERKHRKILKDHEEVVRRVREEHEKILKRLKDNGVDRRLLEELRRNIERLEKEARDDHRRLKENIERMRREIEKDHEDLKREVDKIARRAREDTDDAKKLEDLVRRLKEHVDRSRERLEKHLRENKRHVEESAKRLEKHVRDNEEDVKRKST

SEQ ID NO: 4667 - protein, 175 aa, Artificial Sequence; identical to SEQ ID NO: 4666
  Synthetic

SEQ ID NO: 4668 - protein, 177 aa, Artificial Sequence
  Synthetic
KEEEDLEREVKRLEDKVREDAKKLEEVVKTVEKLVRDDARRNEEVVKEVADRVRRLTERKLDEETLRKVKEDLKRTLERLKRENEKSLEELRDILRRLKKENDDTLKELRDELKRLTDSGASEDVIRKMEEIIKRLEEVSREVEKRLRRIIRELERVSKEVLDRLREIIEKLDRDAT

SEQ ID NO: 4669 - protein, 177 aa, Artificial Sequence; identical to SEQ ID NO: 4668
  Synthetic

SEQ ID NO: 4670 - protein, 171 aa, Artificial Sequence
  Synthetic
SVEDDVRRKLKEIEDEHRKVVKDARDELEKSHRRLRKVIEDVKRKLDRVLEELERSGVDEKIIRKAKELVERLTKKAEDVLREHKEKLDRIEKKAEDSHRRLREDLERLDRAKIDEKDLEEVIRRIRKKVEDSKRDLERLLEKSKRDVEEVMKDLKRRIEELEKLVRDETT

SEQ ID NO: 4671 - protein, 171 aa, Artificial Sequence; identical to SEQ ID NO: 4670
  Synthetic

SEQ ID NO: 4672 - protein, 185 aa, Artificial Sequence
  Synthetic
SLKDELEKLLKELKEHVDRSEKKARENLKRLEEHVRKSKEELEDRLRRIEEKVKRLTESNLRKEDVKRVLEEVRKELKRILDDVRADHRRLEEHLKRSVKELEDDNEKLERDARRIEEKLRRSNVPEEMVERAIRKLEDIHRRHREVVERVEREHRRIKEEHEKVVREAEETLKRIIEDLRRSAD

SEQ ID NO: 4673 - protein, 185 aa, Artificial Sequence; identical to SEQ ID NO: 4672
  Synthetic

SEQ ID NO: 4674 - protein, 185 aa, Artificial Sequence
  Synthetic
KLEEEARELLRRLEEHVRKSKKEAEDNLRRLEKHVEDSKRRLKELLDRLRKTVEDLKRANLDKKDVKRVLDKLRRDLEKILEELRRDNERLERHLRKSTKRLEDDNKDLRDKLEEIKDRLRRSNVEEDVVRRAADALRRVHEAHKRMVEEVKRRHDEIHKRHEKVVRDAERALREVLKRLEEAAR

SEQ ID NO: 4675 - protein, 185 aa, Artificial Sequence; identical to SEQ ID NO: 4674
  Synthetic

SEQ ID NO: 4676 - protein, 179 aa, Artificial Sequence
  Synthetic
SLRETADKRLRDVNRDLKRVIEELRERLKESNKKLEDLIRELRERAERILDDLRRSGVDESILRELEERIRRIEEELERIHREHEREVREVKKDLDRIHEEHKRRLDEARRELEEGRRPEEDLARRLEEIVKESKEIVDRARRRLEEIVERSEDRVRRVEERIKELVKRLEDIVRREKT

SEQ ID NO: 4677 - protein, 179 aa, Artificial Sequence; identical to SEQ ID NO: 4676
  Synthetic

SEQ ID NO: 4678 - protein, 182 aa, Artificial Sequence
  Synthetic
KEIEEVLRRLEELIRRVREELRKNNEDIEREADKLRKELKRVNDELEKKIKDVKDRARRDGAREEDIDRIRKDLKKSKEDLERLIKEALDRLKKNLDDLKKRVEEVEKRLEDLIRDVERKGLPKEVLDELRRVVEEVTREIREVLETSRELVRRIVETVKEVLRSHDEKIKKVEEELDRDRQ

SEQ ID NO: 4679 - protein, 182 aa, Artificial Sequence; identical to SEQ ID NO: 4678
  Synthetic

SEQ ID NO: 4680 - protein, 175 aa, Artificial Sequence
  Synthetic
DVDEKVRELLRKIEEDLRRSVKELRELAKRIEEDLRRISKKSKDLLKKIKDDVKRAGLPEDILRRLDELAKRLEKKNEDIRRDLERVAREIDKENEDMRKKLKEDVDRLEDLLRRGEVKEEDLKRVIEELKKEVEELHRRNEKIIRELEDKVRRVREDNERVIEELARDVERAER

SEQ ID NO: 4681 - protein, 175 aa, Artificial Sequence; identical to SEQ ID NO: 4680
  Synthetic

SEQ ID NO: 4682 - protein, 185 aa, Artificial Sequence
  Synthetic
SLREEAEKIIRDLEDHVRRDEERVKEMVDRSRKLVKELEKRLRDLIREITRRVDKLRKDNIDEDKLRKIIEDLVRDLKRILDELEKLIRELDKRNKKILEDNERNIRELEERAKRILDKLREDGVDEKVLRKAEELLKRIIAELKKIHEELRRLSKESKERLERILDEARKMLEEVKKRLEDIEK

SEQ ID NO: 4683 - protein, 185 aa, Artificial Sequence; identical to SEQ ID NO: 4682
  Synthetic

SEQ ID NO: 4684 - protein, 185 aa, Artificial Sequence
  Synthetic
SLEEKLEKLLKELRDHVRRDKKEVREALERLKDHVRKDREKLERAIAEIKKAVEKLKRDNIDEERLTRIVKELSDRLREIHRDNRENIKRLEDELRRILKKNKENIEDLARKARELLKRLEEDGVDEKVLRKLEKAAREVAEAVKKVHEELKRALEEIRRELEDINRKLKEAADEVRKKLRDIAE

SEQ ID NO: 4685 - protein, 185 aa, Artificial Sequence; identical to SEQ ID NO: 4684
  Synthetic

SEQ ID NO: 4686 - protein, 185 aa, Artificial Sequence
  Synthetic
SLEEELREVIKRLRDHVRRDKERAKEAIKRAEDHVRRDEEAVEEVIKELKRLVDELRKAKLDREDLERVVRDLDRKIKEIEERNKRNIDELRKELERIHRENEKNIRDLDERLKREREKLARDGVEEDVLRRATKALEDIRRELEKINEELKRAAERIEKRLKEIHDRLKKALDDVRRELEETRR

SEQ ID NO: 4687 - protein, 185 aa, Artificial Sequence; identical to SEQ ID NO: 4686
  Synthetic

SEQ ID NO: 4688 - protein, 185 aa, Artificial Sequence
  Synthetic
SLKEKLEREIERLRKHVEDDERRLREVIRRLEEHVKRDEDRLKKELDRLREEVERLRRANIDKEELKRIVERRTEDMDRIRKENEDNIRKLDEELKKIHEDNRKNIERLKTEAEKILRELAEDGVEEEVLKEAEDLLRDVTRALEEVNRRARKLLKEIKEKLDEIHKRLNKMLEEVKRRLDEIRR

SEQ ID NO: 4689 - protein, 185 aa, Artificial Sequence; identical to SEQ ID NO: 4688
  Synthetic

SEQ ID NO: 4690 - protein, 178 aa, Artificial Sequence
  Synthetic
SRAEEMIKDVRRIVEEVRRENKRVLEEIEEIIKRSKEEWEKILKELRDIIEEVERRNLDDERLREILERLEKKLKDVDDRAKEINEELKDLLRRVHERNREILRRLEEKVKEVKREGIDEELLRRIKEVVDRARDTLRRLDEELKRIVEAVHDTDDKVKKELEKIVREVEEIARRRSK

SEQ ID NO: 4691 - protein, 178 aa, Artificial Sequence; identical to SEQ ID NO: 4690
  Synthetic

SEQ ID NO: 4692 - protein, 179 aa, Artificial Sequence
  Synthetic
SEAERVVRENEENLERIKREVERDLRRNEEVLEDLRRKVKKVLDEIRETLRRLREAKLDSEELRKVLEKLKREIEEIRRRLKKTLDDLRKANEKSEREIRENLKENRKRNEDIIEKLKEVEEAVRKLDDLDRRLEEIVRRASEALKRSLEEIERILRKAEEDLRRLLKRLEEIIREVER

SEQ ID NO: 4693 - protein, 179 aa, Artificial Sequence; identical to SEQ ID NO: 4692
  Synthetic

SEQ ID NO: 4694 - protein, 179 aa, Artificial Sequence
  Synthetic
SVEDTLREMLKRLEEIVRRAEETLKRLNEEIERVVREAARRLDKLNKELRDIVRDIKRRKPDKEKLVRELEKILKEHNDELKKIKDDLRRILKKSREDTEKILRELEDILRRLEKEIRDNDKRKDDLKRRLEEILKELKRIVDEAEERHREIIKRLRDIVREATEKSREVLKRLEDKAK

SEQ ID NO: 4695 - protein, 179 aa, Artificial Sequence; identical to SEQ ID NO: 4694
  Synthetic

SEQ ID NO: 4696 - protein, 185 aa, Artificial Sequence
  Synthetic
KVREKLERALRRSTTSSRDIERRLKELLDTNREIVDRIVKRLKEMLDRLREEIRRIEERRKEAEDRIRELREKLRDLERKVRRVVREMEERTRELEKRLEDILRRNDEENKRVEERLREIEKRPQDDELVKRLEDDLRRWEKESKEIVDRVKEEIDRVNRESKETLKELEKEAKRVLDELERDER

SEQ ID NO: 4697 - protein, 185 aa, Artificial Sequence; identical to SEQ ID NO: 4696
  Synthetic

SEQ ID NO: 4698 - protein, 185 aa, Artificial Sequence
  Synthetic
DVERTLDEMLKRSEDVTDEVREELKRALESNNKLIKEIVDTADKVLKDIEDTVRKIIEKKREDKDLVDDLRRLIEEVRRIVEKIKRDLKKLNDELEDRIRKIEEDLKRKNDEVRKMVETIKKKPESEKLVKEVEDRARKWLKDLRDKIERLREELEKVNRDTERILEKVERDLRRLLEEVRKRDR

SEQ ID NO: 4699 - protein, 185 aa, Artificial Sequence; identical to SEQ ID NO: 4698
  Synthetic

SEQ ID NO: 4700 - protein, 178 aa, Artificial Sequence
  Synthetic
DEVEKVLREIEEIIKELKKEVDKDLEELKRTIERLKKKADEVVKRNEEVIRTLREGNIDEEKLKEILKRLHDENKEILDRIRELLKKLSRDNEKKLDEIREMLERLERRARKILARTKIKEAADKLRELLKRLEEVVRRWKEAIEDINRKLEKVVRDIERLLRDLDRKAREVLERLRK

SEQ ID NO: 4701 - protein, 178 aa, Artificial Sequence; identical to SEQ ID NO: 4700
  Synthetic

SEQ ID NO: 4702 - protein, 178 aa, Artificial Sequence
  Synthetic
SSVEKVLRELDDLIRRNRDLVEEDRKELKRTSDENRERVERIVRKNEKAIRDLRRNNIDEKDLRKKLEELHRENKKFVERNAESSKKLSDDNKELVDRSREKLKRLADKIRDILRKERIKKAADDLKRVLDKLRKSHREWNELIKKANKENTEILREAEERLRELDRRLRKVLEDLRR

SEQ ID NO: 4703 - protein, 178 aa, Artificial Sequence; identical to SEQ ID NO: 4702
  Synthetic

SEQ ID NO: 4704 - protein, 180 aa, Artificial Sequence
  Synthetic
SEVERVLKELKELLDRLRELVEEILRRLEKIIKETKREIEESLRTLEEIIRRLEELAERVDEKKLREILKKLEDHIRRSREKLERSNKKLRELLERAEREMKKLIDTARRIVDEVRKQDLREDADRALRKVLEDIKEIVKKAKEDLERVYKKHKKLVDEVKKAHEDVLKKAREVLEEIRR

SEQ ID NO: 4705 - protein, 180 aa, Artificial Sequence; identical to SEQ ID NO: 4704
  Synthetic

SEQ ID NO: 4706 - protein, 180 aa, Artificial Sequence
  Synthetic
DEVEDVLRKIKEIIKRTEDKVRESLKTLKEIIRRTKEEVKKILKEIKELIERVEREARRVDRRELEKILKDLKKLVDDAVRKLKRSDEELERHIEESERDLERSNRELKRLIDDVKRRDARERAETKLRELYERHRKVIKEVRERHKEVHKRHRDVLEEIRRRLEKLLKDLEDVIREIER

SEQ ID NO: 4707 - protein, 180 aa, Artificial Sequence; identical to SEQ ID NO: 4706
  Synthetic

SEQ ID NO: 4708 - protein, 172 aa, Artificial Sequence
  Synthetic
DEEKDVVRRLKRNVEENTKNVERMVRELERNIRENTENAKEVITRLKKIIDELRRRELDRKLVRKILEDVRKLSEDHLRESERNLRRMEEESKRHIKESKENLEEVEREAERDVRDQEDVKRVRKLARESLERVRRLHREVLEKLKKSHDDVKRLHEEIDERAKRVVEEREK

SEQ ID NO: 4709 - protein, 172 aa, Artificial Sequence; identical to SEQ ID NO: 4708
  Synthetic

SEQ ID NO: 4710 - protein, 176 aa, Artificial Sequence
  Synthetic
DAEELLKEIERELKRSIEEARRLLEEVEKRLRKSKRDVEKLLKEVREKLEKVVREIPKDDRLEKVKEDLERILDTLRRRTEELERRVRELIERLERRNEETERRLKKLVDDVKDVKDRDVVRRLVEEARKLVEENTRENRDMIEKLRRLVKRHSEEVEEIIRRLDKLIDDVRREAE

SEQ ID NO: 4711 - protein, 176 aa, Artificial Sequence; identical to SEQ ID NO: 4710
  Synthetic

SEQ ID NO: 4712 - protein, 179 aa, Artificial Sequence
  Synthetic
SLEELLREVERRLRELNKKLEDMIREVEERLRKVIRETEKLIEDVKRELEKILEKARERVDEDTLRRLRKELEDAIRKVAEDVKRLEEENEKSVRELRKKLREIHERNRDTVRKLAELLETIDEKELEKEVRDDLRRTDEDIRRLLDEARKDVERHKEELKKLLEDAKRLLERVERTIR

SEQ ID NO: 4713 - protein, 179 aa, Artificial Sequence; identical to SEQ ID NO: 4712
  Synthetic

SEQ ID NO: 4714 - protein, 173 aa, Artificial Sequence
  Synthetic
RELEEVVKKVREEVKEHTEKVKRLVEEAEELNRRYEEEVKKLVTTAKRLNDEARKRNSKDETVVRELKRLNEELNRRSRKLVEELKKLNEELARKAEESKEELKRRLEDLARRMIDSKELLDEVAKLVEESLRRLDRLLEEIKRTSDELIEKNERLNRELNKTSDKVVEDMRR

SEQ ID NO: 4715 - protein, 173 aa, Artificial Sequence; identical to SEQ ID NO: 4714
  Synthetic

SEQ ID NO: 4716 - protein, 184 aa, Artificial Sequence
  Synthetic
SLEDLIREVEDRNRKSVEEVERLLEEVRRKLDESRKRLEELLKRVEEKLERVIEEAKRRLKNVKDVEERLKEVRKTLKRLKERLEERTDEVRRRLERLIEELRKRSKEHSERLRDRVEKVRDVKDEKVVEELAREMKKSVEEHTREVRRMVAELEKLVKRHTEEVERAVREAEKLVETLREELR

SEQ ID NO: 4717 - protein, 184 aa, Artificial Sequence; identical to SEQ ID NO: 4716
  Synthetic

SEQ ID NO: 4718 - protein, 184 aa, Artificial Sequence
  Synthetic
SLEDLIREVEKRNKESVDTARRLLDEVRKKLKDSIDRSRKLLEEVRRKLEEVIKDAKRKLKTDKDVEKELKDVTDTLEKLIRKLEEENERSRKRLEDLIKRLRDESRKHSDDLRRKVEDARKVSDERVVEEIMRRLEKSVERHTEEVKRVVREAEELVKDNTRKVEELVRRAEKLVEDLERRTR

SEQ ID NO: 4719 - protein, 184 aa, Artificial Sequence; identical to SEQ ID NO: 4718
  Synthetic

SEQ ID NO: 4720 - protein, 184 aa, Artificial Sequence
  Synthetic
SLEELIREVEERLRKSVDDSRKLLEEVKRKLEDSKREVDRLIEEVKRELERVIEDVTRKLKDVKEVRRRLDEVRRELEERAERVRRENERTDRELDELIKRLEEINRETEERLRELAREIRRVKDEKVVKELADEMRKLVRTNTEIVKDVVKKLDELVERNTRTNRDVVRRARELVEELERRER

SEQ ID NO: 4721 - protein, 184 aa, Artificial Sequence; identical to SEQ ID NO: 4720
  Synthetic

SEQ ID NO: 4722 - protein, 172 aa, Artificial Sequence
  Synthetic
RELERVVEEARRLVEEHTEEIERSADKARKLNEEHSRRVDEIFERLERLIREAEKKNSKDDKVIEDLKRKLEDITEKVKKSIDEMRKLTKDINDENRESIKRLRDEIRKIEKDVRNRELLEEIRKLVEESVERVKRLNEDVNRTSKESVKRLEDLVDEIRKRVEEVVRRLKK

SEQ ID NO: 4723 - protein, 172 aa, Artificial Sequence; identical to SEQ ID NO: 4722
  Synthetic

SEQ ID NO: 4724 - protein, 172 aa, Artificial Sequence
  Synthetic
SELERVAEEAERIVREAEEKIKKSVTELKELVKRHSERVKRIFKELEELLRRLREKNSKDDRVIKRAEEELRRIEEELRRSLEELKRRLEEINKENEKLIKELRDRIRKIEEEVRNEDLLREVRKKVEEVVKKIKRLNEEVNRDVKRSAEELKRLIDDIRRILKKVIDDLKT

SEQ ID NO: 4725 - protein, 172 aa, Artificial Sequence; identical to SEQ ID NO: 4724
  Synthetic

SEQ ID NO: 4726 - protein, 172 aa, Artificial Sequence
  Synthetic
DEMEEVVKRAEEIVKEARERIEESFRRLREENKEALERLKRIAEEMRRLLKEVLERNSKDRRVIKELKDLLDEIRKRVEDEIRELRKRTETINDENRKLIETLKRILEDIKRKLRNEELLRRVEKEVRRVEEEIRRLNKEVNETSDRVEREAEKLVRELEEAVRKVVEDLER

SEQ ID NO: 4727 - protein, 172 aa, Artificial Sequence; identical to SEQ ID NO: 4726
  Synthetic

SEQ ID NO: 4728 - protein, 181 aa, Artificial Sequence
  Synthetic
DLEEVIKEARKRLEDSHRRLEKLIREVEKEHEDSHRKLRELVERVKKKHKEVEEKIKRNGVSEKDLKRIEDNIRKSEKELRDALKRHKENVDRSRKKLEDILRRHRKKLEEVERKLEEMRRKGSPVEELLKDLERMVRELNEEIERALEDAKRNVDRLDDEIRKLEERVDRNVKRLEEDIK

SEQ ID NO: 4729 - protein, 181 aa, Artificial Sequence; identical to SEQ ID NO: 4728
  Synthetic

SEQ ID NO: 4730 - protein, 181 aa, Artificial Sequence
  Synthetic
SLEDVAREAKKRLEDLKKKITDLIREARRKHKESHDRLRELVEKIKEDLKRVLKKLEDDGSSREKLERLKRKVDELARELEEVLKRHKENVDRSDEELKRVLKRIEEEIKRLEDELEEVKKDGSDVREVKEKLRRTVEALDERIDKLRKELDENVRRLDKEIEDMVRKAKKVVDELREEIR

SEQ ID NO: 4731 - protein, 181 aa, Artificial Sequence; identical to SEQ ID NO: 4730
  Synthetic

SEQ ID NO: 4732 - protein, 181 aa, Artificial Sequence
  Synthetic
DLDEVVKEVDRRLEESHERLRRLIKKVDEDHRRSHEDLKRVIDEARRLLEEVLERLRRNGKEEETLERLKRTVEKVEEELKRVLDRHEENVRRSRKELEDVLRRHKEKLDELKKKLEEVRRRGMPVEEVLKEVKKAVEKLNEDIDRLFEKARENVKRLDEDIKRLLEELRRKVKKAEDEIR

SEQ ID NO: 4733 - protein, 181 aa, Artificial Sequence; identical to SEQ ID NO: 4732
  Synthetic

SEQ ID NO: 4734 - protein, 181 aa, Artificial Sequence
  Synthetic
DLERVVEEVKKLLRDSHEEHKKVVKEVKERLDRSHKESKRVSDEVRKKLEEVLKELEDRGVSEDLLRRLEKTVRDIEDENREVNERHERKLREVERELKESNDRHEKMVRDLREELKRIRKDGKDVEKVLRDVRRVVTELNKHIEDLKRKVTEDVERLNTEIKELKKRNDEAVRRAREEIK

SEQ ID NO: 4735 - protein, 181 aa, Artificial Sequence; identical to SEQ ID NO: 4734
  Synthetic

SEQ ID NO: 4736 - protein, 174 aa, Artificial Sequence
  Synthetic
KEDEDLDRDVKRHIEETEKRVKEVEKRHKDEIRKVREDVKDVERRHKEKIDDVRRKLRDGRLSEEVIKDLERDLRRSKDEVRRRVEEARRKLKESDEEIKRTVRENEEKLRELRERGLPEEILRKLRKRTEEIKREAERIHDRTREEIEKIKRDLDEIHKRTREVIKELEERSR

SEQ ID NO: 4737 - protein, 174 aa, Artificial Sequence; identical to SEQ ID NO: 4736
  Synthetic

SEQ ID NO: 4738 - protein, 174 aa, Artificial Sequence
  Synthetic
KKEEDIEREIRDHIRRTREKLEKLAKELRDDIRRLREELKRIEDEIREESKRLEDILRKGRLSEEVIEELKERIKTIERDVERLIKESEDELRRLKREIEETLRENEKKIKELAEEGLPEDILRRLREETEELRKEAERLLREYKRLTEELARELRELVKKLEEEVRDLERRSR

SEQ ID NO: 4739 - protein, 174 aa, Artificial Sequence; identical to SEQ ID NO: 4738
  Synthetic

SEQ ID NO: 4740 - protein, 174 aa, Artificial Sequence
  Synthetic
SEEERIEEDIRRHIKRTRDRLDELRRRLEEDIKRLRERVEDLKRDLERNIRELRDRLRRGRLSEKVVRDSREKLERLREEMEREVKESRDRLREVKEEIEDLIRRNKEKLDRLRERGLPEEILRRMERLTRELAKDADRLLKKYRKLTEDLKRELEKILKTYRDLTEELKERSR

SEQ ID NO: 4741 - protein, 174 aa, Artificial Sequence; identical to SEQ ID NO: 4740
  Synthetic

SEQ ID NO: 4742 - protein, 182 aa, Artificial Sequence
  Synthetic
SELDELRKRIEEAAKELKKRLEDHKRRLEEAEERFERDLERIHRRSREVVRDLKERPLEEEEIKKRVKEVREEYDRVREELKRKIEELRRRNDKTRRELEEDVRRLEEELRDAKRKVNSEDRILREVEDIVRKLKEILKEVRDRLRELSKRLEDRLKEVEDKLDKDVKDVEEELRRILEERK

SEQ ID NO: 4743 - protein, 182 aa, Artificial Sequence; identical to SEQ ID NO: 4742
  Synthetic

SEQ ID NO: 4744 - protein, 182 aa, Artificial Sequence
  Synthetic
SRLEKAEEDIKRYIEEHKRRSEETLKELTDKAREITRRLDESLKTVEDTSREIKKDVEDRGNDKDTMEKVKEDYKRLVRRLEELIEEMIREADKSVKDLERETEESKRKIEEEAEKLREESDDEDLRRVIKRIRELLERLEREDRRIIEEIKKLLDRLKKKVEDIIERIERSLKRLEEELRR

SEQ ID NO: 4745 - protein, 182 aa, Artificial Sequence; identical to SEQ ID NO: 4744
  Synthetic

SEQ ID NO: 4746 - protein, 178 aa, Artificial Sequence
  Synthetic
SEEELLRKLEEISRRVTRALEKLLEDHERLSREVAERLEDLLRRHKKLLEELIKLAEERVSDKDKVRELKERLRKNLDDLREHVRRDKERNEKNIEDLERHIRRDKKENEEALDDVRKTKQPEEELDERIRRLKDKNKKNLDDLREHSKEVLERNKENLDELRKHSKKVLDEARKELK

SEQ ID NO: 4747 - protein, 178 aa, Artificial Sequence; identical to SEQ ID NO: 4746
  Synthetic

SEQ ID NO: 4748 - protein, 174 aa, Artificial Sequence
  Synthetic
DEKERAKEEVKKLRDDAEKTDRDLEKEVEDTARELKETLERLRREVERLEEELERISRRGNKDDETLKRIKEKLEKLKKKAKDDNDRLEERIRRKREELKKHLDDLRKTLDELRRRVRDKDLTEELKRVLDDHERTLRKIEEDLRRILEEHKKETKKITEELERILEKMRKDEE

SEQ ID NO: 4749 - protein, 174 aa, Artificial Sequence; identical to SEQ ID NO: 4748
  Synthetic

SEQ ID NO: 4750 - protein, 171 aa, Artificial Sequence
  Synthetic
STKEELLERAKEIIKRLEELLRRNNRTLREILKDLKKRLEESNREIKRLIDEVTRNGLDRKLVEKLREALEKHDEDVKRLLEELERIIRTHEKKAEELLKRLKDEIEKLAREERDDEDLRRELERLKEEVDRAHKESEEIVKKLEKRIRDAIRRSKKRVDELEKELREAEK

SEQ ID NO: 4751 - protein, 171 aa, Artificial Sequence; identical to SEQ ID NO: 4750
  Synthetic

SEQ ID NO: 4752 - protein, 173 aa, Artificial Sequence
  Synthetic
SEKEEVDETLRRLEEEHERVVRDAKRRLEEDHEKLRRVIRDSDRINDEINKKAEEDRLEEELLKRLRDKSKKLREDLEDLLRRHKEKLDRIDEELKEDHKRLKEEAKRLRERLDELDAEELKRILDETRERIRESMEEIKRKLEESRRESEDIRRKLKEDNDRLKKELDDRAK

SEQ ID NO: 4753 - protein, 173 aa, Artificial Sequence; identical to SEQ ID NO: 4752
  Synthetic

SEQ ID NO: 4754 - protein, 182 aa, Artificial Sequence
  Synthetic
SSEEEIRETVKRLKEIVKKHKKDVDEIAEELRRIVEELRRRNEEEIKKIRKILRELEEKRSGDRRKIKELVDRMKKRLDDHKKTLEEIKRKAKEELEKSKKRTDEIVEELRRRLRELEKKGVDEKLVRELERIVEEIKEELEKSDRELEKIIREIAKRLEEIHEETERAVREVKKRLDEVAK

SEQ ID NO: 4755 - protein, 182 aa, Artificial Sequence; identical to SEQ ID NO: 4754
  Synthetic

SEQ ID NO: 4756 - protein, 175 aa, Artificial Sequence
  Synthetic
SEEEKLLERLERTVERLEREARRLLEKSKEKLKRLEDSSRELLDKLRKEVERLRREERDREELKTELERLKREIEKYVEEMKEELKKHKKESRDFVERLKKELEELKEEIERSNVPEDFLRELEKLLEEIKRKIEEARERLERSNKELEDVIRDSERRLRKLLKEIEEVIRRKAT

SEQ ID NO: 4757 - protein, 175 aa, Artificial Sequence; identical to SEQ ID NO: 4756
  Synthetic

SEQ ID NO: 4758 - protein, 175 aa, Artificial Sequence
  Synthetic
SEIERLLERLKKALEEIKRSSERLIRKLEEVLRDLEREVRKLLEDSRRTLERIRKEDKSDEELKRELDEHKDRTRKAERRLEEKLKTLAEEIKEYTRRLEEDLKRLREEIRRANVPRDAVEELERLLKEIEKTIEESRRRLEELLERIERLIRKVIEELRRSNEELERVIREKSK

SEQ ID NO: 4759 - protein, 175 aa, Artificial Sequence; identical to SEQ ID NO: 4758
  Synthetic

SEQ ID NO: 4760 - protein, 183 aa, Artificial Sequence
  Synthetic
KVEKRLRELVERIRESHERVLREVERLVEEHRETLKRILDRIREILKRIEEDIESIRRRVDERKEKKLRERLKRLEDELRKIEKRIRDSLEEVRKKLEELVRKLRKNLEEIKRRLEELKRTKLDEEVVREELERLERNIKESRDDIRRALKELKDTNEKAKEELERKLEELDRDLKRLREEAR

SEQ ID NO: 4761 - protein, 183 aa, Artificial Sequence; identical to SEQ ID NO: 4760
  Synthetic

SEQ ID NO: 4762 - protein, 179 aa, Artificial Sequence
  Synthetic
SEVEDELRKSRKEIEDLAREAERELEEIKRHIERSERKAKEDIDRIEREIEELDKLRKENSSSEKTLDDDLERLKRKIEKIKREMEKSLRELEKRIREIVEKMRRTLDRHREKLEDLRRRGIDEKALRKSHKELEDLVREVEKKLRELLERYRKRIEEVAKKLDDLLDKLREVVDRAKK

SEQ ID NO: 4763 - protein, 179 aa, Artificial Sequence; identical to SEQ ID NO: 4762
  Synthetic

SEQ ID NO: 4764 - protein, 179 aa, Artificial Sequence
  Synthetic
SEVERELKRIKDEIRELAREAREDLERIKEHIKRSKERVEEELRRSEEEIKEIERLARERRVSEKTLDDRLRDHRRKVKKIVDDLRKSIEDLRKEIEDIVRKLKEDLDRLREEIDRLRKRGISKDDLDRLLEELERVVREVKKRLRKLLEDYKELVDRVRKKLEDSHRRLKELAERTKK

SEQ ID NO: 4765 - protein, 179 aa, Artificial Sequence; identical to SEQ ID NO: 4764
  Synthetic

SEQ ID NO: 4766 - protein, 186 aa, Artificial Sequence
  Synthetic
DVERELDRIHREHEELLRDIEKKLREILREHEELLKRIKEELDEILERLRKLVEDVKREKPDIKDLMKKLDDKLREVEERLRRIKEKLEEHHKEAEKLVEEIKRKLDDHNRRLKEKLKRVKDRGKVDEEEVRDILRRLKEEIDRSRREAEEILRRLKKEIEDTKREVDETKKDLKRTLDEIREEAK

SEQ ID NO: 4767 - protein, 186 aa, Artificial Sequence; identical to SEQ ID NO: 4766
  Synthetic

SEQ ID NO: 4768 - protein, 186 aa, Artificial Sequence
  Synthetic
SEVEEEVERIDRNIDRLRKEVEDNIRRSEEEIKRIKEEVEKNLEDLRREIDRIRELVEANKQSEDDLERVLKRLKDHLEKSKRDLERKLRRHEEHVRRSAEELEKDNRKNKRRVEEILRKLKDSEDMERMKRKLKELLDKHKKLVDDAKKKHDDSNRKLERLIREATKEHKKALEDLKKLIDDSRR

SEQ ID NO: 4769 - protein, 186 aa, Artificial Sequence; identical to SEQ ID NO: 4768
  Synthetic

SEQ ID NO: 4770 - protein, 183 aa, Artificial Sequence
  Synthetic
KDTEEAEERWKAKDKKLEDDVRENLKRLREEITRLEKEVKDNVRRIKELIDKLRRDVEREGTDDETLKEVEKRLRDNIEESRKRLEEMLKKIEDNIRKSKKKLDDYKRELEKELREMERRVKDLEEAKDSLRKLKKHSDDTVRRVKEEHERVLKEAKELLDKVEKEHRRLLEELERLLREARK

SEQ ID NO: 4771 - protein, 183 aa, Artificial Sequence; identical to SEQ ID NO: 4770
  Synthetic

SEQ ID NO: 4772 - protein, 183 aa, Artificial Sequence
  Synthetic
SEEDKERKKWERRDEELRKRVERNEREWERADKELEEEVKREVERIRREIEELRRRVEKDGTDDKELRDLLRRLEEELRKLDERLKEYLRRLEENLKRSDEELKEYLRDLEEKLRRIEEKVKDLDEARKELERLLEHSRKLLEDVRRSHEELVKHSKERADRIRETLKKLLDDLRKLLEDARK

SEQ ID NO: 4773 - protein, 183 aa, Artificial Sequence; identical to SEQ ID NO: 4772
  Synthetic

SEQ ID NO: 4774 - protein, 183 aa, Artificial Sequence
  Synthetic
SDIERRKEEWKREDEKLEKRSRKNVEDWERRDEELKRRSEENVRRIKEMIERLEDRVRRDGKDEDELRRVEEELRKNLEENDKRLKEYLDRLRKNLEKNRRDLEEYLKRLEEELREAEERVKDLEEARKELEKLLRNSKRLVDESERRLRELERHSRELLKRSRRELERLMKELEDLAREIRR

SEQ ID NO: 4775 - protein, 183 aa, Artificial Sequence; identical to SEQ ID NO: 4774
  Synthetic

SEQ ID NO: 4776 - protein, 183 aa, Artificial Sequence
  Synthetic
RESEKIKEDMDRSNEKHNKEVEETLKRLEEELKRLEDEVRDAKRELDELLERLERRARDGDRSEELLDRDLKDVLKKLEEKVRKIEEDLKKFKDDLRKIIEKLVTDSKRHHDELKKEIDRRTRTKELEDLARDVAKKNKESVDRVKKELKRVDEEVKRLLDEVKKDLDKVREDLKRVIDEIRR

SEQ ID NO: 4777 - protein, 183 aa, Artificial Sequence; identical to SEQ ID NO: 4776
  Synthetic

SEQ ID NO: 4778 - protein, 177 aa, Artificial Sequence
  Synthetic
SEVEKVITEVEELVREYRKRLEDKRREAKKRVDEYEERLKRMEDEVRKLLEEIERRIRKDGGASEKTEDEIRRLLEELKRRVEKLIEETKRLNEEIDDESRREMEELRERLEEIADKSISSKDALRRAEEKLKKLIKENKEINDEINERSKELNERSKEVLKKIEEDLRRLIEEVRR

SEQ ID NO: 4779 - protein, 177 aa, Artificial Sequence; identical to SEQ ID NO: 4778
  Synthetic

SEQ ID NO: 4780 - protein, 178 aa, Artificial Sequence
  Synthetic
SREDLVREVRERLKKLLKHSAELIKRVKEELEELLRHSEENVREVKKRLDEIKEEAKKRGKSEDALKKLDEKLRKVTRKSKEYLDDLRRRVEEVERKLKEYLDRLREEVKKVEERLEKSRRPIEDERRAVEETEERWRRKDDTVRKEVEEEKEKWRREDEKHHRDVERALRKLKRDIE

SEQ ID NO: 4781 - protein, 178 aa, Artificial Sequence; identical to SEQ ID NO: 4780
  Synthetic

SEQ ID NO: 4782 - protein, 178 aa, Artificial Sequence
  Synthetic
DEDELVREAKDRLDKLLEHSRKNVEEAEKRLRDLLEHSKKNVEEAERLLEEIEEEARRSGKSKEVLDRLRKKARDLKEESKDYLRKLEEEVRRIVRKSEEYLKRLKDRVDEVKERLDKGRRPLEEVRKEVKKEIDDWRARDEEHHRDVKRREEEWERKDEEHHRKVEEVIERLKRELK

SEQ ID NO: 4783 - protein, 178 aa, Artificial Sequence; identical to SEQ ID NO: 4782
  Synthetic

SEQ ID NO: 4784 - protein, 177 aa, Artificial Sequence
  Synthetic
SVEELIKEVEERLKRLKEHSEDLAREVRERHKKLIEELRRILEEVKKRHKDLTEKLEKDGGSEELLDRIRRNVEKSKRELERVLREAEKNLERSDEELKEYLDRLRKRLERVREELKREPADEEMKKRVEEEEKKWKRDDERLEKRVRENIERLRRLLERLRKRVEDNIKRLDDERR

SEQ ID NO: 4785 - protein, 177 aa, Artificial Sequence; identical to SEQ ID NO: 4784
  Synthetic

SEQ ID NO: 4786 - protein, 177 aa, Artificial Sequence
  Synthetic
REEDLIREVERILEELLKHSKRLIDEARDSHRRLLEHSKRLVEEVERLHKELLDRARENGGSEELLTRIKKNIDESRKELKEYEDDLRRNLRESDERLRRYLDDLRREKKEVEDELRRRKADDRMREEVRKTEERWRDKDRELEKRVRDNERRWEDRDRKLEKRVRDNIKRLRDELE

SEQ ID NO: 4787 - protein, 177 aa, Artificial Sequence; identical to SEQ ID NO: 4786
  Synthetic

SEQ ID NO: 4788 - protein, 177 aa, Artificial Sequence
  Synthetic
KAEELVEKVRRDLEALLEHSKTLAEKVRRDHRKLKEELKELLERVKRRLEELKKRLEDSGGDEKKLRELERRLKEVEKELRKVLEDIDRNLRRSDEELKKYLEDLRERLKRVEDELRREPADDELRKKVDEDRRRWEEDDRRLEKRVRENLRRLEKIIKDLEDRVRREVEKIDKDRK

SEQ ID NO: 4789 - protein, 177 aa, Artificial Sequence; identical to SEQ ID NO: 4788
  Synthetic

SEQ ID NO: 4790 - protein, 177 aa, Artificial Sequence
  Synthetic
DREKLIEEVKDRLRRLLKHSRELLKEAEDRHRELLKHSERLVRESERRLEELLRRARKSGGSEELLKRIEENVRDNKRRLDKYKEELRRNLKASKEELDRYEEELRRRLKEVEDELDKKEADDEVRKEVKKDEDDWRKADDDLRKRVEDNVRRWEERDRELKERSERNLEKLERERK

SEQ ID NO: 4791 - protein, 177 aa, Artificial Sequence; identical to SEQ ID NO: 4790
  Synthetic

SEQ ID NO: 4792 - protein, 177 aa, Artificial Sequence
  Synthetic
SREDLVRRVDKALRDLTRHSEELMRRSDETLKELLKHSRRLAKESEDRLKELLDEARERGGSEELLKRIKENVDKNKEELEKYIRDLERNLKENRERLKKYEDELREELRRVKRRLEEEEADERLEEKVRREEEEWKKKDEELKKRSEKNVDEWRKRDDKLRRDSKRNLDKLREEIR

SEQ ID NO: 4793 - protein, 177 aa, Artificial Sequence; identical to SEQ ID NO: 4792
  Synthetic

SEQ ID NO: 4794 - protein, 180 aa, Artificial Sequence
  Synthetic
SLVDEIRERVRRLDEDVRRLIEEIEKRIREIDKRAEDLIRKIEDDSRRTLEEVAKQPRDEEVLERVERIARDSLRLLEEVIEEVRRIAEKTRRDLTRVIEEVKRTVTDSIRKLEEVIERVKVEELEKVVEENERSLRELVKTLEDVLRKNDKTVKELEKRLREVLDRTRRFMEELIRRAR

SEQ ID NO: 4795 - protein, 180 aa, Artificial Sequence; identical to SEQ ID NO: 4794
  Synthetic

SEQ ID NO: 4796 - protein, 180 aa, Artificial Sequence
  Synthetic
SLKDKIREDSERTLKTVERLLREIEKEIRKLDRDIERLIEEIRRRIEKLDKDIERQPRDDEVLKRVEDIVKKTRELIERVIEEVEEILRETKELLDTVLKEVERIIRESERRLREVIERVKVEELEKVLKDTRDEAERLKEEVRRVLEDNDRTAKELRKTLEEVLKRNEESARELKKRIT

SEQ ID NO: 4797 - protein, 180 aa, Artificial Sequence; identical to SEQ ID NO: 4796
  Synthetic

SEQ ID NO: 4798 - protein, 170 aa, Artificial Sequence
  Synthetic
DEERRVEEELREVDKRLKKLLEESKRKLDEVIRRVREVVKKLKKRLDDVNRLVARDVKSEELERLLRESSEEVKEVIKKLKRLLEKVLREDEKSVDEIRREAEEVLKRVRDAGIDEKILRTVEKLVRDIERELRETNKRVREDVEKIIEDLKRILEENDKRADDWRRADK

SEQ ID NO: 4799 - protein, 170 aa, Artificial Sequence; identical to SEQ ID NO: 4798
  Synthetic

SEQ ID NO: 4800 - protein, 170 aa, Artificial Sequence
  Synthetic
DESEEVARELEKVDRDVDKLVKDSRKELEDSNREVEELLRRSTERLKEVNTLVARDVRGEELEELLERLDRENEETIRRVEELLRRSLKKNEETLERLERLAKELLERLKRAGVDEKLVREVERRVEDIKRKAEKTLDDNRKLIEEWVRRLEKSLEDNRRLAKKWKDEDK

SEQ ID NO: 4801 - protein, 170 aa, Artificial Sequence; identical to SEQ ID NO: 4800
  Synthetic

SEQ ID NO: 4802 - protein, 178 aa, Artificial Sequence
  Synthetic
SELDELKKEVDDVAREVRRHNKKLEEEVEREVRRMRRHNEENVKRVEESAKEARKDVDREELLRRLEKLVEELRKLNEESLRKVEKLAEEIADVLRRSKKAVDEVVREIARLLEEVKRRNEDLREVKKLVEEVTRRLERINKELERLIREVRKRMERVNDELHKRNRDVERKLREVVR

SEQ ID NO: 4803 - protein, 178 aa, Artificial Sequence; identical to SEQ ID NO: 4802
  Synthetic

SEQ ID NO: 4804 - protein, 171 aa, Artificial Sequence
  Synthetic
SELEALEEDVKRVVKEIKDHNEKLIRELEETIRRIDRHNDENIRRTEEEIKRVLDKKPDVKEIEEVLKLAKEVNKRSKEEVKKVAEEVKRVLDESRKRVDRIVEEAKRVLERGLPEEDLRRLLEKLKEDLRKVNEDLERLLREAKRRLERVNEKLHELSRRIREKLEEVDR

SEQ ID NO: 4805 - protein, 171 aa, Artificial Sequence; identical to SEQ ID NO: 4804
  Synthetic

SEQ ID NO: 4806 - protein, 171 aa, Artificial Sequence
  Synthetic
SELEKLVEKIKERVERARRHNERLREDVERVLTESDKENKDLIDDARRAVKEVLDRKPDVREIEKLIREIEEVLKESKRLVKEIADELRKVLDDSKRLVDEIEEKVKRVADRGLPEEELDRLIREIIKELEDVNRTLRKLLEEIKRRSKDVNRDLRRLLEEIKEKLRRKSK

SEQ ID NO: 4807 - protein, 171 aa, Artificial Sequence; identical to SEQ ID NO: 4806
  Synthetic

SEQ ID NO: 4808 - protein, 184 aa, Artificial Sequence
  Synthetic
SEIDELKKDVERRVREVEETNRRLEKEVRERLERSRKHLKELIEDARREVERVEREVKEDEVLRLLRELARELEEMLKRVEDESRRVAKELERVIKESEERIKEVVKELKDVLDEVRRLMKEDDKKKVLDELKKVIKEVEDRLRKIDEELKKVIDEVRKELEKINRDLERVIREVKKRAEEVRR

SEQ ID NO: 4809 - protein, 184 aa, Artificial Sequence; identical to SEQ ID NO: 4808
  Synthetic

SEQ ID NO: 4810 - protein, 184 aa, Artificial Sequence
  Synthetic
REIEELAKTVRKEVDDSRKHLKELREDAKRTLDEVKRETKKLEEDVRREVERVKREVKEDRVLEELEKLVEELKTVLERIKRKDEESARRLEEVLKRIKEESDRVVRELERVLRDVRRLVEEDDKEKVLRELKKVIDEVRKLLEDINRELEEAIRDVKRKNEDTLRELRKVIKEVEKRLKDVTR

SEQ ID NO: 4811 - protein, 184 aa, Artificial Sequence; identical to SEQ ID NO: 4810
  Synthetic

SEQ ID NO: 4812 - protein, 173 aa, Artificial Sequence
  Synthetic
KEVEDVVRELKKSLEENEKRVRDIERELREVVKKIAKRVEETREEVERMLEEIRRRSGEDEIVKEITEVVETVVRLDRESLEELKRVVDRIVELLKKNVEDLKRAIEEVERLLREDDIKKVVDEARKVLKEVHENTERIVDEARKLLKRMEEKNRKTEEDIRRVADEVREKAR

SEQ ID NO: 4813 - protein, 173 aa, Artificial Sequence; identical to SEQ ID NO: 4812
  Synthetic

SEQ ID NO: 4814 - protein, 173 aa, Artificial Sequence
  Synthetic
SKVDKVREEVTRSLEDNKRKVEEIEREARESLERNRKKVEDSIREARKVVEEIERKKGQDRIVEEVRRVVEENERRLRENVRELRKVLEDIRRLLKRNVDELERVVREVRDLLEKEDIDTVTRRIREVMKKVHDNTRRIAEELRRLMKRVHDNTERSHEELKRLLEEVKRKAD

SEQ ID NO: 4815 - protein, 173 aa, Artificial Sequence; identical to SEQ ID NO: 4814
  Synthetic

SEQ ID NO: 4816 - protein, 173 aa, Artificial Sequence
  Synthetic
REVEEVVKELKKSLDDNRDEVRKIIEEVTRLNKRNEEDVKRVTDEAEEVVKRIVEKKGDDEIVRKVREVVREIKERLDRVVEENKKVVDEVVKYLKENVEDLERVVRTVKELLRRDDIRKVVEEARRLLERVHRNTKRVADEIRKLDKRSSELLDKILKDLRKLLEDVEREAR

SEQ ID NO: 4817 - protein, 173 aa, Artificial Sequence; identical to SEQ ID NO: 4816
  Synthetic

SEQ ID NO: 4818 - protein, 181 aa, Artificial Sequence
  Synthetic
DEKDEVRRRVDRELEDVHRETKKSSDDDKRLLEDVHRKLKESEKEVRRIADEVRKKLEDVRRREDLERVARELLRELEEVVKENHKSVRKSLEDIERSARTNRDIVEKTLERIERVLEEIARRIKVREVLEKIKRSLDENKERVEKSKKDSDDSLRENKDRVDKTDEEAKEMIKDLKRKTD

SEQ ID NO: 4819 - protein, 181 aa, Artificial Sequence; identical to SEQ ID NO: 4818
  Synthetic

SEQ ID NO: 4820 - protein, 181 aa, Artificial Sequence
  Synthetic
DEKEKVTREVRRILEEVDKRLEESRERVERIAEEVHRRTEESHRRDEEVVERVKEELKEARRDSRLKDVVRELLRKVEKSARDNKRIVDTTLKLIERVIRENHKSVTKLLRELEDVIRRLKEEINVREVLEELKRELRRLEEDVRRTDRKLEESLKDNERKVRRSKEESDRLLRELEERTR

SEQ ID NO: 4821 - protein, 181 aa, Artificial Sequence; identical to SEQ ID NO: 4820
  Synthetic

SEQ ID NO: 4822 - protein, 181 aa, Artificial Sequence
  Synthetic
KEVEDVRRRVEKILEEVHKKTREVTERVRRILEEVHRKTEESHRRDEEVMRRVRDELEKARRREDLERVVRELTKRVEDSLRENEKIVERTLEEIEKVLDELRKIAEDTLRLIAEVLRRAKEEINVREVIEKVKESLRENERRARKVEKEIRDSLERNRERVEDSKRTSKKLIEDLREAVR

SEQ ID NO: 4823 - protein, 181 aa, Artificial Sequence; identical to SEQ ID NO: 4822
  Synthetic

SEQ ID NO: 4824 - protein, 181 aa, Artificial Sequence
  Synthetic
DEEKELVRELRDILKKVHKETKESSDTDREVLKRVHEDTERSHRDDERVVEEVKKELDKIRDREDLERVVRELLEIVKRSAEENKRIVEETLKEIERSARENERIVRETLDKIRKVIEELRRRVRVREVEDEVRRSLEDNRRRVEESKRRSDESLRRNKRKVERSKEESDRLLKELEDEVR

SEQ ID NO: 4825 - protein, 181 aa, Artificial Sequence; identical to SEQ ID NO: 4824
  Synthetic

SEQ ID NO: 4826 - protein, 175 aa, Artificial Sequence
  Synthetic
REVEEALKRNEAVVEESREAVERALRENETMVRESEKEAKRVKDENRKSIEELKRSNVSDRVERTLRETLKELEKVVEELKDIHRRTSERLKDVARKLKKIHDDTRKELEDFGDVPEEVLERVVRKLKELDDKSREDLEKVKKELRDVDTRSEELLREVEKRLREVDDRLRREEE

SEQ ID NO: 4827 - protein, 175 aa, Artificial Sequence; identical to SEQ ID NO: 4826
  Synthetic

SEQ ID NO: 4828 - protein, 175 aa, Artificial Sequence
  Synthetic
SEVEEVEKENKKMVEESERELEKLERENDKLLKESEDEARKVEEELKRVVEELDRSNVSEEIREELKKAIEKVKRVLDDVLRKHEETKKELKEVVKELREIHKRTSDELRKFGEVPEEVLREVVKDLRRVDKESKERLKRMADKLRDVDRELKEKLKRALEDLRRIVTELRERAR

SEQ ID NO: 4829 - protein, 175 aa, Artificial Sequence; identical to SEQ ID NO: 4828
  Synthetic

SEQ ID NO: 4830 - protein, 180 aa, Artificial Sequence
  Synthetic
DEVETVTRELEDTNRDIEKKVEEVERELRKTDREIREKVKRVEEELTRSDRELAEIVKKKNTEDRIVKEVVRLNEDIVRRLREVVKEVEELNKRAVERLREVVKKVKRLNREIVEELRRVRGEDVKRIVEKARKINEDVRREIEKITEEVRRINEEVDDRIRRIAEEARRINEKVKRRLT

SEQ ID NO: 4831 - protein, 180 aa, Artificial Sequence; identical to SEQ ID NO: 4830
  Synthetic

SEQ ID NO: 4832 - protein, 180 aa, Artificial Sequence
  Synthetic
KEVDDVAEELRRTNKEIKDRVKDVLRELEELLTDIEKTVRDVERELRESDERLEREVRRKNTSDDIVREVKELNKEIVERLKKVVEEVTRRLKKLVDEAEEVVKEVVDLNREILKELRDVRGEEVRRIVEKARKINTEVKKKIEEIEKTVRKILKEVRKIIKDIRDEARRINEEVRKKLE

SEQ ID NO: 4833 - protein, 180 aa, Artificial Sequence; identical to SEQ ID NO: 4832
  Synthetic

SEQ ID NO: 4834 - protein, 180 aa, Artificial Sequence
  Synthetic
KEVEDIVRELEEEVEKIRDHSRRVSEELDKSVKDNKRRVDEVKKTLEKSVRDIRRKVRDDSLREIVERLKEKVDRMVRRLEEITEELEDKVRKVVENSRRIVKEVEDKVREVVRELERIKDGEVLKDVARRAREMLEEVRRKDRENTERARRLLEEVHRRTEEVERRAREVLKKADEDVK

SEQ ID NO: 4835 - protein, 180 aa, Artificial Sequence; identical to SEQ ID NO: 4834
  Synthetic

SEQ ID NO: 4836 - protein, 185 aa, Artificial Sequence
  Synthetic
SELDELRKRVRDLDERLKESDDTLRKLVKELIERVKKSDTELERLVERVIEEIERVLRDRKDSSEEVRRLLDTLRKIIEENIKRSTDLAREVTRIIEENIKTSRRLAEDAERTLEEVIRRLKDKSVKDRLRELEEELRKRMKESDERNRDLRRRLEEMIKDSKRTNDELKKRVEKVAREAEEKLR

SEQ ID NO: 4837 - protein, 185 aa, Artificial Sequence; identical to SEQ ID NO: 4836
  Synthetic

SEQ ID NO: 4838 - protein, 185 aa, Artificial Sequence
  Synthetic
DELERLEEEVEEVRRRLEKSDDDLRKLVDEVERRLRESDKRLHDLSEEVIRRIEDVLRKNRELRERLRTLAEELERISEENMRRVERLLEELERIIEENIKKVEELAERLRRRVEDVVRRLKDKSVKDELRKLKEKIKKVADESRRRNEELRRKVDKVIKDSRETNKRNTEEVRKVAKDVDDTVK

SEQ ID NO: 4839 - protein, 185 aa, Artificial Sequence; identical to SEQ ID NO: 4838
  Synthetic

SEQ ID NO: 4840 - protein, 174 aa, Artificial Sequence
  Synthetic
SEEERIAKEAEDLVRRVKENNARTIKEAREVARKVEAETKKIHDDARKLVEDVKRKVERRGVEELLEELREMVERSKKLSEDNVRESRRVSKEVKERDTESLKRLRDLVREVIKKVDKVRELKERLERVIKEIEETIRRSARELDEVNRRNEKMVKENEDELRKVIEEIERRIR

SEQ ID NO: 4841 - protein, 174 aa, Artificial Sequence; identical to SEQ ID NO: 4840
  Synthetic

SEQ ID NO: 4842 - protein, 174 aa, Artificial Sequence
  Synthetic
DEEEEIKKELRRVAEDVKRETKRIHEEIRRVLKEVKERLKRVHDELRRVAREVKEKLKKRPVERILEELRKVVKDSEDLSRRILEEIRRVVEESRKRSEDNVRESRRVVEKVIRDVDKVRELTEEAKKLIKENEEEIERNEREARKVIEELERVVRTNKEDVKRVEKEIEDATR

SEQ ID NO: 4843 - protein, 174 aa, Artificial Sequence; identical to SEQ ID NO: 4842
  Synthetic

SEQ ID NO: 4844 - protein, 178 aa, Artificial Sequence
  Synthetic
KEVEEIAKEAEDVLRRLDETVKEIADEAREVLRRLNESSKRIEEEARKAIKELRDRAREKEEILREVVEKLKRVIEELKKTDEEVERKLREVIKRLKDTNDEVRKKLKEAIDRLREITDKDELRKILKEVRDVLEEVKRRNEDILRRLRKIAEEVKRRNDKIREELERVLKEAEDRLR

SEQ ID NO: 4845 - protein, 178 aa, Artificial Sequence; identical to SEQ ID NO: 4844
  Synthetic

SEQ ID NO: 4846 - protein, 177 aa, Artificial Sequence
  Synthetic
SRLEKIKDDVKRLDDDSRRTLEEVHRRNKETARRVERLLEEAHRLNKKTVDEARSKPNDEDVARRLREIVKESLKLSKDVLKEIKDILDKSLKDSEDVVRLNEDILRKIERTVDSVERSDEIRKIKTDVKEMVKKNREDVKRNNEDVKRVEDKLRKELKKNDDDVRRVLEELERRLR

SEQ ID NO: 4847 - protein, 177 aa, Artificial Sequence; identical to SEQ ID NO: 4846
  Synthetic

SEQ ID NO: 4848 - protein, 180 aa, Artificial Sequence
  Synthetic
SEIEEVTRRLEELVKTVREVLREAHERTRRLVEKVRKLIEDVIRTNRKIKERVRELLERVRSEELKRLVEEVAEEMKKSDKELRDRVRRVVEELRRVTEEVRRLVEEAAKELRRVVDELKPGDEIRKLRRRVEEVVRELEEELEKDRREVEKVIEELEREVDRSNEETRRVVKRLREEVE

SEQ ID NO: 4849 - protein, 180 aa, Artificial Sequence; identical to SEQ ID NO: 4848
  Synthetic

SEQ ID NO: 4850 - protein, 174 aa, Artificial Sequence
  Synthetic
REKEEVRRKLREAERRVEEIDRRLEKLIRDVKRRVEEADRESEETSDRVRKEVERVDRRGERFEDLLRIVRRVLEENKRRLDETLEDVRRVVEEVERLVEETLRTVEEVIKELERDGVDEEVKERLKKVLEDNRRSIDELRRRIEEVLKENKRTVEEDKKRLEKVLEDVERRAR

SEQ ID NO: 4851 - protein, 174 aa, Artificial Sequence; identical to SEQ ID NO: 4850
  Synthetic

SEQ ID NO: 4852 - protein, 173 aa, Artificial Sequence
  Synthetic
SDTEEVEKLTEEIVREVKRLDEEVKELIKEIRKESRRTLEEVRRLIEEVRDRVEKISDDEKVRRLLKKVIEEVEEIARRSLRLLKEVIDEVRRIVEESKELLRRVIREVEKRVDSKDLERLRRELEEVLKENADSIRKLETELRDVLRRTREEAEKLKEELKDVLRRVEEKAK

SEQ ID NO: 4853 - protein, 173 aa, Artificial Sequence; identical to SEQ ID NO: 4852
  Synthetic

SEQ ID NO: 4854 - protein, 179 aa, Artificial Sequence
  Synthetic
DEERKIREEAKRADDEIRRLLEENKRALDESNKRAEELVKRLADEVREALKRIEDLLRERPRKEMEDLLRDLKRVLEEIKEELKKVLEDNRRVSEESKRRLEKVVRELRELLKEIEDLVKKDDVKKVVERLRRLIKEVKKRLEKIHEDSRRMVEESEKLLKEIVRKLRELIKEVEDKVK

SEQ ID NO: 4855 - protein, 179 aa, Artificial Sequence; identical to SEQ ID NO: 4854
  Synthetic

SEQ ID NO: 4856 - protein, 179 aa, Artificial Sequence
  Synthetic
DEKEDLKRTAEESDREAKKLLDENRKRLEESNKKAEDLVRRNEETLRKVDTDIKDLLRKRDTERAKRLVEELERVVRESLRLLRELLERNRELSKESLKRLEEVVRRNHELLKRIEELIDRDDVKKVLDELRRLVEESKELLKRIHDESEKMVEDSERLLEEVHRRSREVVERVREKIR

SEQ ID NO: 4857 - protein, 179 aa, Artificial Sequence; identical to SEQ ID NO: 4856
  Synthetic

SEQ ID NO: 4858 - protein, 179 aa, Artificial Sequence
  Synthetic
SEKDRLSKRAAESDEELERLVRRNAEELDRSNKEIADLLKESKDTLKRAEDEIRRLLAERDTERAKKIVRELEERLKEVEKHDRRSLEENTDVTRKSKERAERVLRENHRVLREVRKLIDEDDVEKVLKELEDVVKKSKELLERIHKESKEMVERSKRNNEKSLEDVRRLIERVLEKLK

SEQ ID NO: 4859 - protein, 179 aa, Artificial Sequence; identical to SEQ ID NO: 4858
  Synthetic

SEQ ID NO: 4860 - protein, 179 aa, Artificial Sequence
  Synthetic
DEKRRLKEEAKKSDDELRKLVKDSADRLEDATRRIEELLRENAKRLEEAEKRIREELDKRKRERMEKLLEELRKVVTDSKEAARKVVDDLREMLKRVKEHDRRSLEENHRVLREVEKLIDEEDVEEVLRRLKDLVERSKENNKRSLEEVERLIKEVEERLKRIHDESEKVVRTVEERLK

SEQ ID NO: 4861 - protein, 179 aa, Artificial Sequence; identical to SEQ ID NO: 4860
  Synthetic

SEQ ID NO: 4862 - protein, 185 aa, Artificial Sequence
  Synthetic
REAEEIKKRLERVREEVEKELERIHRETDKIAKDVKRELDEIDKESKKVAEEIKKVAEEIKDKEELKRRVDEVTRELERLNEELERIVREVVRRLEALNERLEEIVRRVVETLRRLVEEVVRRTGRGSKVDELKRRVEEVKRDLERKVRENNETIKKVKEDLRREVERNHKTIEDIKRELDERVR

SEQ ID NO: 4863 - protein, 185 aa, Artificial Sequence; identical to SEQ ID NO: 4862
  Synthetic

SEQ ID NO: 4864 - protein, 185 aa, Artificial Sequence
  Synthetic
SEAEELLDRIRRVAEEVKRRLEEIHRTTRDIVRRIEELLKEIHERTREIVERIKRVLEKIKDKDTLREEVKRVVKELEKLNKELEDIVRRVTRELERLNEELERIVREVAEDLKRLLEEVRRRTGDGDKVKRLEEEIRKIKRELEKIVRDNNEDIKRAKERLRKINKRNHDEIKKVKDELDETVR

SEQ ID NO: 4865 - protein, 185 aa, Artificial Sequence; identical to SEQ ID NO: 4864
  Synthetic

SEQ ID NO: 4866 - protein, 185 aa, Artificial Sequence
  Synthetic
SEAEDLRRRIEEVARRVAEKLKKINRDTERIVRDVKKKLEEIHKRTEEVAEEVKEVLRRIKDKDTLRKVVEEVAEELRDLNRKLEEIIRRVADELRKLNEELKRIVDEVVDELRKLIKEVVDRTGPGDEVEELRKTIEDIRRRLEEEVRRNHDEIRKAEEELRELNRRNHERIKEIKEELDREVT

SEQ ID NO: 4867 - protein, 185 aa, Artificial Sequence; identical to SEQ ID NO: 4866
  Synthetic

SEQ ID NO: 4868 - protein, 183 aa, Artificial Sequence
  Synthetic
SEVEKIDKRAKEVEKELEESNRRNRERIKEADERLRDLLRRNKEEIDRARKRLDEIVRRDEKDEVREIVRELDERLKDMNARLKEIVEELRRLLKEINDEDRRIIEELKRLLKKILEDAARLTDKKRLKEVERRMEEIVKTVKKRSEDSHRESDEIVKRVLERLRKVHEETKEIVKRVEDRLR

SEQ ID NO: 4869 - protein, 183 aa, Artificial Sequence; identical to SEQ ID NO: 4868
  Synthetic

SEQ ID NO: 4870 - protein, 174 aa, Artificial Sequence
  Synthetic
EEAERIDKKLEDEVREVERELEDVHRKVKEILEDVKRKHKKVHDELKKVIDEVKRKLEERPDERIVRELKEKLRESNERLNRLTEKVKKELADSNKLLEDIVRRLKERLEEVIREVDKIKELEEKVRRIVRKLERRVEKNKDDTRRAVEEAEKLNEDNKRTSEKVEEDLRRTTT

SEQ ID NO: 4871 - protein, 174 aa, Artificial Sequence; identical to SEQ ID NO: 4870
  Synthetic

SEQ ID NO: 4872 - protein, 174 aa, Artificial Sequence
  Synthetic
SEAEEIVRELRKAVEDVAREHKRIHEEVRKAAEDVKRKLKEILDRLERVVEEVARALEERGNEEIVETLKRKLEEAIKRARDVLDELRRKLEESNKALNRLSETLEKKLEEVIRRVDKIDELREEAKEVVRDVRRLNEENRKATEDILRELKEIVERLERRAREVVKELKERAR

SEQ ID NO: 4873 - protein, 174 aa, Artificial Sequence; identical to SEQ ID NO: 4872
  Synthetic

SEQ ID NO: 4874 - protein, 174 aa, Artificial Sequence
  Synthetic
DEREEIRRRLREDVKRVKRRLEEIHDEVRRLLEEVDRRLRKVHKELKEEVTEVEKRLRERPDKRIVEELRRRLKESIERTRKILETVAKKLRDSNRKLEKVVKDLKKRLDDVIRAVSDVRELKKEIDDVRKELEETVERNKRETERALRKAKEDLDRNREEVKRVVDELEKRTR

SEQ ID NO: 4875 - protein, 174 aa, Artificial Sequence; identical to SEQ ID NO: 4874
  Synthetic

SEQ ID NO: 4876 - protein, 174 aa, Artificial Sequence
  Synthetic
SEKDEIRDELEKILRRVEELNRRIRKKLEEIRKEVERLLREIHEKLEEVVKEVEEKLRERPDSRIVKELKDKLRESIKETADVLRKLEKKLRDVIREIRKTNKEVEEKLRDVIRRVDKIEELKRRVEEVLKRARESLRELEEDVRRVLEEARKELERNRERVERVLRRLEETVR

SEQ ID NO: 4877 - protein, 174 aa, Artificial Sequence; identical to SEQ ID NO: 4876
  Synthetic

SEQ ID NO: 4878 - protein, 179 aa, Artificial Sequence
  Synthetic
DEVEDLERRLKEVVDRSRRLDEELKRRDKKSVEDVRRKLEEVRKKLEDVARKLADLLRQGRDAKRVLDEIERVVRDVERVLEEILRDVKRSIDEVREVAKASLKLTEEVIRRVRKVAKERGVPLEKLERDVARAREENDRTLKEISKHSEKVLREVADMARKLRKEVKRIEDEIRERAR

SEQ ID NO: 4879 - protein, 179 aa, Artificial Sequence; identical to SEQ ID NO: 4878
  Synthetic

SEQ ID NO: 4880 - protein, 184 aa, Artificial Sequence
  Synthetic
KLVEEVKREIEELVRRLEEVLDRVRRENERLAEELKKVVKDVEDNNERIARTVTELLKKVDSKELERLLRKVVEDSRKSVKDLEKLLREFVRRSEESVKRLEDELRKMVETVRRVVEKLERDGVPKEKVDELKRDVDRAEEKVRELIERIKRRSEEVKKRAEELLKKLEDDSRRVKKKLDDDAR

SEQ ID NO: 4881 - protein, 184 aa, Artificial Sequence; identical to SEQ ID NO: 4880
  Synthetic

SEQ ID NO: 4882 - protein, 184 aa, Artificial Sequence
  Synthetic
SEVDEVRKEIKRLADEAREVVKEVRKNNEKIADDSRKLNERSIRESKKVTDTVRELLKRVRSRELDRLVKEVVERSNEIVEESERLVREMNKRSDDSVEKLREVLERIVRELERVVEEAARAGVPEERVKELKERVDEVSKELRDLLKKLRDDSERVVEENEKLLRELKERSDRATKELDDASK

SEQ ID NO: 4883 - protein, 184 aa, Artificial Sequence; identical to SEQ ID NO: 4882
  Synthetic

SEQ ID NO: 4884 - protein, 184 aa, Artificial Sequence
  Synthetic
KKAEKVDKEIEDLAREVREVLKEVEKDSDRLVKEVEDVLRRVKENNEDIRRRVSELDRRVRSEELRRLVKEVVDRSDESVRRLEELLKRAVKRSDDVVKKLEDELREIVKELRRVVEELERAGVPEESVERLRRKVKEIEDELRELLERLRKKSEDAKRKLRELLERIKRDSERAKRELEERDK

SEQ ID NO: 4885 - protein, 184 aa, Artificial Sequence; identical to SEQ ID NO: 4884
  Synthetic

SEQ ID NO: 4886 - protein, 184 aa, Artificial Sequence
  Synthetic
DTAREVKRKVKEIADEVRELIRRVHEETKKTSETVKKLIKEVHDTTEKIVREVRKLADEVDSEELERLVREAVRRLEETNRRLRELVERVVRENEKSSDELRKRVEEVVRRLRKVVKELDDAGVDKKLVEELKREVDRISEELKRLLERNEREVRESKKTLERDLERNHEEIERAKRELDERVR

SEQ ID NO: 4887 - protein, 184 aa, Artificial Sequence; identical to SEQ ID NO: 4886
  Synthetic

SEQ ID NO: 4888 - protein, 184 aa, Artificial Sequence
  Synthetic
REVDEVRKRVEKVAEEVRRLIEKVHRETERTSREVEKRIRDVHRRSDEVAREVDDLSRRVDSKELKELVEDVARRLEEINRRLEKLVKEAVDTNRESSERLRKLVREAVEKLKKIVEELDRRGVDKKMVRTLAERVKEISEELKRRLKRNKDEVEESSRRLRELLKRNHDEIRRIKEKLKEETR

SEQ ID NO: 4889 - protein, 184 aa, Artificial Sequence; identical to SEQ ID NO: 4888
  Synthetic

SEQ ID NO: 4890 - protein, 178 aa, Artificial Sequence
  Synthetic
EEVDRVKRKLEEVEKRVTEISKRTEELVEEVRKEVERISKRTEEDDRRVAKEVRERLKSGKDLKRLVDEVRRLLEETNRDNKRVIDEVVRELEEINERNKRVIDKVEEELKKIVEEVKRAEKAKEIKEKVDEVIERLRRSNRKLHERIREVEKKLRELNERLHRHSREVIKELEERAR

SEQ ID NO: 4891 - protein, 178 aa, Artificial Sequence; identical to SEQ ID NO: 4890
  Synthetic

SEQ ID NO: 4892 - protein, 179 aa, Artificial Sequence
  Synthetic
KEVEDILRDLERLSEESLRRNEEIHRELEELLRRVDEKNREIHKTLEEMVRRALTELRKRPDERILDELRRVLEEVLRLSEESDRELEDVLKKVLELSKESLDRNKKLLDEVRERIRTADEKVVREVDRRVEESRKRLEKLLRENEKRVRDARRRARKLSEENERTVREVEKRAREEVK

SEQ ID NO: 4893 - protein, 179 aa, Artificial Sequence; identical to SEQ ID NO: 4892
  Synthetic

SEQ ID NO: 4894 - protein, 179 aa, Artificial Sequence
  Synthetic
DEVEEIKRKLDKVADESRKLDEDIRDKLRRVADEIRRLHEESRKELEDVVREIERLLRERDIKEVLKRLKEMLDRIIRRDEEILKRLREMLKKVIEEIERSIERSRKLLEDVLREAKDVPEKVIKEVRDTVEKILRENEKSLEEVRKTVKRIEEESRELLETSRDEVRRVLEKAEETEK

SEQ ID NO: 4895 - protein, 179 aa, Artificial Sequence; identical to SEQ ID NO: 4894
  Synthetic

SEQ ID NO: 4896 - protein, 185 aa, Artificial Sequence
  Synthetic
SVADEIRKDLKRVADEVEERLRRLLEHNKKVRDEVKERVDESKKELKEVEEEVTEKLERIKEKERVKKVIDDVTKRMREIVEKNRRVSEEVKRLSEENVRESRRISDKVRKDLKRILDEIRRAGVDEKVVREIEERIRRVIRRLDEVDKTNEKISRDAARELEESDEELRRRVKEVKDRLDEKTK

SEQ ID NO: 4897 - protein, 185 aa, Artificial Sequence; identical to SEQ ID NO: 4896
  Synthetic

SEQ ID NO: 4898 - protein, 185 aa, Artificial Sequence
  Synthetic
DEAEKIKKELDDVAREVERRLKELLDDNRRVAEEVEKRLRDSKRELEEVTRRVRKELERIKNKEDVKRVVDEVVKEAEDILRKNEEVIRRVKDLSRRNVETSKRISEEVKRLLEEILKKAEDDGLDKKLVDKIRDDIRRIARRLDEMNKKNKKLSDELEERLKKSNEEHRRRVEKVKEELEKKVE

SEQ ID NO: 4899 - protein, 185 aa, Artificial Sequence; identical to SEQ ID NO: 4898
  Synthetic

SEQ ID NO: 4900 - protein, 185 aa, Artificial Sequence
  Synthetic
SEAEEIEKELREVAKEVRELMREMLKNNKEVAEEVKRRLERSRERLEEVEETVRDLLEKIKDKKTVRDVIRTVKKLLKEILDRNKKVIDEVKELSRENVKRSEDVSRDVLRRLEEILRKVRAAGVDDKVVKKIEDDIREVEKEARKLNRENRELSKKLAEELDRSNDRHRREVERVERELEKAER

SEQ ID NO: 4901 - protein, 185 aa, Artificial Sequence; identical to SEQ ID NO: 4900
  Synthetic

SEQ ID NO: 4902 - protein, 184 aa, Artificial Sequence
  Synthetic
SLQERVRDKVRKVKKDLEDLNRRHREEIERVVRELDKSNEDHEREVRRVEKELEELIRRNKERDEIREVVEELRKLLEEVLKENSDVIRELRELLKELHEKNRKVVKELDDLLRDVIDKLEKINDKKFVEDVDRALKRIADEVKRRSEESKKELDDIKKEVEERLRESKEKLKRIVDEARERLR

SEQ ID NO: 4903 - protein, 184 aa, Artificial Sequence; identical to SEQ ID NO: 4902
  Synthetic

SEQ ID NO: 4904 - protein, 175 aa, Artificial Sequence
  Synthetic
SELEEVIKRAEDELRDDERENKRVLEKSDRDIKRWEEEVKRVLKKARDELDKLRKEGIDEKVLREVEKIIRDVEEEIKKILEELRRITKKVEDESREILERVRRVIERVRRRANEDKDVVEKLREELEKVLKESRDESKRLKEELDKVNDDARKRLEDLMRKLERVLEEVRRRRK

SEQ ID NO: 4905 - protein, 175 aa, Artificial Sequence; identical to SEQ ID NO: 4904
  Synthetic

SEQ ID NO: 4906 - protein, 175 aa, Artificial Sequence
  Synthetic
SELERVIEEIRRALEEDHERNRDVLREAKEELERDKRRNDKVLTDIRKLVKDLERKGAPEDVLRELEEIIDRVLKRSEKILEEVKRVIDKVKRDSERINKEVEEMIKRVEERANEDEETVRRLTEELRKVLDEVTKRSKELSDRLREVLRRSKELSKELEKELRKVIKEADDRVK

SEQ ID NO: 4907 - protein, 175 aa, Artificial Sequence; identical to SEQ ID NO: 4906
  Synthetic

SEQ ID NO: 4908 - protein, 175 aa, Artificial Sequence
  Synthetic
SEIERVLKEARDELRKDEEKNRDLLRRAKKVIEEDHKRNRDVLRRVKEELDRLREAGVPEEVLKRVRKALEDVRKESERLNEELRDVLRRVAEASRRILEEVRKIIEDVERRANEDKDALDRLRRELEEVLRRSKEESDRLAEELKRVLREIEERSRRLAKELKEVLDTAKRDKD

SEQ ID NO: 4909 - protein, 175 aa, Artificial Sequence; identical to SEQ ID NO: 4908
  Synthetic

SEQ ID NO: 4910 - protein, 174 aa, Artificial Sequence
  Synthetic
SELERVIRENERTIREDMKKNEDVLREWEKLTRDLEDTIRRVLKKNRESLKRLKDKGVPEEVIKELEKVSEEIRRRLEEIIRDDRRVLKEAEKRSRDLLRELKKISEEAVELLRRNVDRRELVKRLRDVDERSDDTSRKLKEELERVIRRTEELIRRVMEDAKRVDDEARKKTD

SEQ ID NO: 4911 - protein, 174 aa, Artificial Sequence; identical to SEQ ID NO: 4910
  Synthetic

SEQ ID NO: 4912 - protein, 174 aa, Artificial Sequence
  Synthetic
SKVEEVLRELERRVKEDEDENRKVVRENERTVKEDEDTNRDALRRNEESIDKLRRDGVPEEVIRKLERLSRKIEDDSRKLLEELRELTRRIKKASEDLLRRLRELLERIVRLLERNVDVDTLKRELDEALKRSEEESRRLKEEVTRIDERSKRESDRLVEEAKRLDKEAKDRSD

SEQ ID NO: 4913 - protein, 174 aa, Artificial Sequence; identical to SEQ ID NO: 4912
  Synthetic

SEQ ID NO: 4914 - protein, 186 aa, Artificial Sequence
  Synthetic
SELEEVLKKAAEVIKEIEKRLRKVLEDSRRLTKEDEKRNKEVLKKLKEKIDEIEKRARDKGLPEKDVERLKRELDRALEDVERISKELKETNEDVDRKTEDIIRRIKKKLKEVLDKARDIVEKLKDVDEVLRRLDRELKEVLDRVEREVERLKEENDRMNKKSKDDSEKLERDLERVAERLERELK

SEQ ID NO: 4915 - protein, 186 aa, Artificial Sequence; identical to SEQ ID NO: 4914
  Synthetic

SEQ ID NO: 4916 - protein, 186 aa, Artificial Sequence
  Synthetic
SEAEKVLKEAREAAKRIEDEARKVLRESRELAKKAEEDDRRALKRAKEAAEKIKRDADRKGLEDKEAKKIEEKLRKALEDLERLSREAKKEAEKVDRKTKKIAEDIKRELEKALRDAEDIAEKLKTADKAIKEAADRLKKVLEDAEKKAREAAEENKRANEEWKKKSKRAAEEAKKVLDEAKKELD

SEQ ID NO: 4917 - protein, 186 aa, Artificial Sequence; identical to SEQ ID NO: 4916
  Synthetic

SEQ ID NO: 4918 - protein, 175 aa, Artificial Sequence
  Synthetic
SDKERIKERVKKVHKESAKHIEDVRRRNEEINKRIKEEIDDVERRNREINEDIRRLVRERRVDEKEIRKRLKDVRDETKRIVERIKRELERVLEETEKALEDNDRKAKKVRDELRELNLPERVIEDLERLIEENKRTLTEVIKRHRELLEDWKRRLDEVLKDHERSAREIDEEAR

SEQ ID NO: 4919 - protein, 175 aa, Artificial Sequence; identical to SEQ ID NO: 4918
  Synthetic

SEQ ID NO: 4920 - protein, 175 aa, Artificial Sequence
  Synthetic
DEKEEVRRTVEERLKRVEDRVRELEKENEDINRELKERLKKVRRENEEINERLKKLLDENRVDEKRLREELKKVKEKTDRMLEKIAEDAERVLKKTRDELEDIRRRAEKVLEDLRRLNLPEEVIRRVEEEIKRIEKRLRDVIKKHEDSVRKIRTDMERVVRDHERLAKKWEDDAR

SEQ ID NO: 4921 - protein, 175 aa, Artificial Sequence; identical to SEQ ID NO: 4920
  Synthetic

SEQ ID NO: 4922 - protein, 175 aa, Artificial Sequence
  Synthetic
DEAKEIEDRVRTEIRDIERKVREARERSKRSDDELKKHSEEVARELEEILRELEEALRRNEVDRRELERRLREALRRAKEVTERNEREVKKNLDELREILKRITDRLKKVLKDLKDLNLDKSVIDEVRKAVEDIARKLKKVLEDNKREIDKDRKRNEEVLRTAREKAEKIKEDAR

SEQ ID NO: 4923 - protein, 175 aa, Artificial Sequence; identical to SEQ ID NO: 4922
  Synthetic

SEQ ID NO: 4924 - protein, 175 aa, Artificial Sequence
  Synthetic
DEKEKIKEDVRRVIRRIEEIVKRVDRESERSDRELEKHSRDVERRLREINDRLRRLLEENRVDRREVRKRVEDSLREARRVTEENKKTVDRNLREVKRVIDEIDDEARKVLEELRRANLDERVIEEVKRLIDRIREELERVLEKNARLAKEDEERNERVLTENRKLIEDWEREAK

SEQ ID NO: 4925 - protein, 175 aa, Artificial Sequence; identical to SEQ ID NO: 4924
  Synthetic

SEQ ID NO: 4926 - protein, 184 aa, Artificial Sequence
  Synthetic
SKLEEVVRRVDKDARDIRRRNEEVKRRNEKSAREIEKKVKKVLEEFRRLVEEIRKRLEEEGIPDSLIRTLERIATEVLKRIKEVLERLKRILDDSRRLLEEVSERNDRSLRDLKRELEEVSNSTDERVLKELEERVRKVLKDNRDTSKELEERVRRIDEELDKTLRKAKEELRKIIRELEERLR

SEQ ID NO: 4927 - protein, 184 aa, Artificial Sequence; identical to SEQ ID NO: 4926
  Synthetic

SEQ ID NO: 4928 - protein, 184 aa, Artificial Sequence
  Synthetic
SELEKVLERVKREAERIEKKNKKVLEENKKSAEEIHRDNERVLREVKDMADKIEDELRKRGIPKSLEKTIRDILERLKDRLKKVNDENRESAERSLKEIKDVSRENRRSIKELLDELREVKRTTDRKVLRDVERRVKKILDDNKRTSDEMKKRLDRLDETNKRTSEKLEEDVRRIIEDLERRVK

SEQ ID NO: 4929 - protein, 184 aa, Artificial Sequence; identical to SEQ ID NO: 4928
  Synthetic

SEQ ID NO: 4930 - protein, 184 aa, Artificial Sequence
  Synthetic
SKLEEVLKKLERLAREIERRLRDVIRRNKESADRIRKRNEEVLRKVEDVAREIEDKVRRGGVPKSIIERLRRIAKEIAREIERASRENEKSAKRSAERAEKALRELAKILRDIAEELRRVSNDKDEEALRTLDKRVEDIIKRLKEEVDRVVRDLEELDKENEKSSREVEERLKEIIRELEETLK

SEQ ID NO: 4931 - protein, 184 aa, Artificial Sequence; identical to SEQ ID NO: 4930
  Synthetic

SEQ ID NO: 4932 - protein, 184 aa, Artificial Sequence
  Synthetic
SKLEEVLKTLRRLIEEIKKRLKKVKDDNKKSLEDIHRKNKRVLEELEKRLRDIDKKLKDKGIPRTRIEELKKIVEEIRRTVRKVNEDNKRSVDESRRELEDALRELDRILKELEALIRRVKNTTDERVLKEVEERVERIIRELRRRVEELKRRVEELDRRNEKTSDDLEEELKRIDKELKDRTD

SEQ ID NO: 4933 - protein, 184 aa, Artificial Sequence; identical to SEQ ID NO: 4932
  Synthetic

SEQ ID NO: 4934 - protein, 184 aa, Artificial Sequence
  Synthetic
SKVEDVVRRVAEVAERIRRRNEEVAEENERSLKEIHDENKEVVERARKMAKRIEDEVRRKGVPKELIKRLEEIVRRVEKRLKEVNEENRKSAEESRELLRRVNKRNDESLKRLLEKLERVKNTTDEEVLKTVADEVREILERNEKTSEELAERVRRLDEENRRTSREVEKRVEEVIEDLKRRLK

SEQ ID NO: 4935 - protein, 184 aa, Artificial Sequence; identical to SEQ ID NO: 4934
  Synthetic

SEQ ID NO: 4936 - protein, 181 aa, Artificial Sequence
  Synthetic
SEVDKLEEDLRRIIKEIRRLVEEVKRKSEEIDRELKRLLEEAERTLEEIDRKLEDELRKKGNDEDVRRELKEIVERSETLVREVLKTLREVARRSEELNKDVHRRLKELVEEVRKRLEDLPEDDKVREVKKDVEKKLKELEEELRDITRRNRESLKRLEERLKEVAKKNRKTVDELRKELD

SEQ ID NO: 4937 - protein, 181 aa, Artificial Sequence; identical to SEQ ID NO: 4936
  Synthetic

SEQ ID NO: 4938 - protein, 181 aa, Artificial Sequence
  Synthetic
DEVDDLKRRLEKIITEDEKLVKEVKDRSEKLDREIAKLLEDARRALEKLDKELEEILRKKGDDEDVRRELKKIADDSRRLAEKVLKELDDILKKSEEENRRVHEDSERSMREVEKLLRALEEDDKVREVVKRVRDEADKSRRKLEEITRRNRDSLERIKRKLERVLEENDRTLRELEERAR

SEQ ID NO: 4939 - protein, 181 aa, Artificial Sequence; identical to SEQ ID NO: 4938
  Synthetic

SEQ ID NO: 4940 - protein, 177 aa, Artificial Sequence
  Synthetic
SELEKVVEDSRRKLDAWDDESRRVAEESRRRLEEWRKRLEEVAKRVEERLRDLKRKAGDREKLREAKKELRRVVERIKKLVDEVEKRSEEILDRNRKLNDKVRKESEKLAEEIKRVDDEELVKKMARELDELNKDLDRLNKESKRELERLNTELAELIKEVERELRELLRKLEEDLR

SEQ ID NO: 4941 - protein, 177 aa, Artificial Sequence; identical to SEQ ID NO: 4940
  Synthetic

SEQ ID NO: 4942 - protein, 177 aa, Artificial Sequence
  Synthetic
DSLEDVVRRVKKKLDDNRKDVERVAKESEELLKRWRDRVKKVVRDVERRAEELRRRRGDDKSLRDVEERLRRIVRDLERLIEEVERRSRKILKDLRKLNKDSVDEAERLVEEIKRVTDEELIKTFERTLEELHKTNKKLNEEVKKRLEELNTRLAKLIEDVRKELEKVLKELEDRAR

SEQ ID NO: 4943 - protein, 177 aa, Artificial Sequence; identical to SEQ ID NO: 4942
  Synthetic

SEQ ID NO: 4944 - protein, 177 aa, Artificial Sequence
  Synthetic
DELDEVVREVKDRLRENKEEVKRVMDESRRLLERWNEESERVAKKVEEAVRKLTKDKGDDDLLREVKKALKRVLDENRRLNEEVEERSRRIVDRLRRLNEESEKRAEELTKEARRVNREDDIRRITKRLRDLHRENEKLNRDVKKELRELNERLAKLNRDSTRELEELLRKLEEDAR

SEQ ID NO: 4945 - protein, 177 aa, Artificial Sequence; identical to SEQ ID NO: 4944
  Synthetic

SEQ ID NO: 4946 - protein, 177 aa, Artificial Sequence
  Synthetic
SELDKVVEESKRLLEEWDRRSKDVAKKVKEMLDRSRKASKEVVKEARDELERLKRETGDVEEVREMEKRIEKIVREDEELNKDSVRRAEEIVRENEELNKEVKKRSKDLVDEARKVTDEKDIREIKERLKRLNETLAELNERSKKRLKRLLDEDKKLNDDSSKELKELLKELEDRTR

SEQ ID NO: 4947 - protein, 177 aa, Artificial Sequence; identical to SEQ ID NO: 4946
  Synthetic

SEQ ID NO: 4948 - protein, 177 aa, Artificial Sequence
  Synthetic
RELEDVARRARKKLEDNKRRVEEVAEEVERRLDESRKESDKVVREVEEVLKRLKEERGDVRSLDRVTERAEEIVRDDKRLNKRSKDELRKVLKRLRELNKRSVETIEKLLEEIKRVKNEELVKRMTEELERVHRENEKLNRDVRRELEDILRKDEELNKRSKKRLKDLLDELRRRLT

SEQ ID NO: 4949 - protein, 177 aa, Artificial Sequence; identical to SEQ ID NO: 4948
  Synthetic

SEQ ID NO: 4950 - protein, 177 aa, Artificial Sequence
  Synthetic
SELEEVVKKVRTDLDRIDEKSKRVAKEVDRVLKESEDRSKKVAREVEEVLRKLKEEAGEVDELKRVMKELKEIVDRDERLNEESSKRLKEVVKDNERLNEEVRRRAEKLVEEIKRVKDEDLVRRAVETLERLIRELEKLNDESKRRLEEILREDKRLNKESTEELRRLLEELRKTLT

SEQ ID NO: 4951 - protein, 177 aa, Artificial Sequence; identical to SEQ ID NO: 4950
  Synthetic

SEQ ID NO: 4952 - protein, 181 aa, Artificial Sequence
  Synthetic
SEVERVAEELKRVLKELEDLDRESEKKLKRLNEELARLIEEVRRRLEEVLRTLEELAKRVKDKETIDRILRRIEEALKKLADEARDILREAKKASEDLARENKKLLDDARETIERLARNLERTREVEEVIRRIDEAIKRIEKHSREVIERSRERVEDWRRKVERVIEEVERRARKLREDTR

SEQ ID NO: 4953 - protein, 181 aa, Artificial Sequence; identical to SEQ ID NO: 4952
  Synthetic

SEQ ID NO: 4954 - protein, 181 aa, Artificial Sequence
  Synthetic
SEVEKVAEEAKRVLDELEKLDRDSAKELKDLNDELRKRDKESEDALRKITRDLDELDKRVKDEKTARDIEREIDKRLEEIARTNEELLKTAKKRSKDLARKNKEILERIARALKELADKLRRDKDVEKVIRDLKRELERLAKHSEEVIRTSEELLKRWEDHSRKVIEEVKERARDIKRRTK

SEQ ID NO: 4955 - protein, 181 aa, Artificial Sequence; identical to SEQ ID NO: 4954
  Synthetic

SEQ ID NO: 4956 - protein, 177 aa, Artificial Sequence
  Synthetic
SELEKVVKEVEEALERNNRENRRVIRRSRELLKRWREEVEEVVRRLRERAKKIADDVDKREVLERLKEMIRRVEEKLERILEKAERDSRRIEEEIRRLNERLKELVERIKRKMDRVTREEEVRKLEEDLRRILEEIDRESDRLVKRIEDLNRRVAELLKRVEEELEDLARKVEEEAK

SEQ ID NO: 4957 - protein, 177 aa, Artificial Sequence; identical to SEQ ID NO: 4956
  Synthetic

SEQ ID NO: 4958 - protein, 184 aa, Artificial Sequence
  Synthetic
SIEEIVEEIERELEKLKRKLDELIKRSEELSRRLAEKTRRSNEEIKREIDKVADDIRKTLSDREKVERIRKKLEEVHERHRKIVKESEDHLKEVNDRLREILRELAERLEEAIKKIRDIVRRTTDEDTIRRVLEEAREEIKKLERDVDKVRKEVEDAHRKNSELNKTVHDEVRKIIDEIRKEVK

SEQ ID NO: 4959 - protein, 184 aa, Artificial Sequence; identical to SEQ ID NO: 4958
  Synthetic

SEQ ID NO: 4960 - protein, 184 aa, Artificial Sequence
  Synthetic
SIEEILREIEELIKDLLRKAEELLKESEKRSKELKDEMKRSNEEIRKLIEDLRRRAKDRVEDKDKVKRLEDDLRRVHEEHKKRLDELAKKLEDANRRAREILDKIRRRLERLLEEAEDIVRKVKDEDVIRDLLRRVREDIDRLRKELEKVVRELRRIHEEVRRDLKRVHEEVRKRIEDLEEELK

SEQ ID NO: 4961 - protein, 184 aa, Artificial Sequence; identical to SEQ ID NO: 4960
  Synthetic

SEQ ID NO: 4962 - protein, 179 aa, Artificial Sequence
  Synthetic
KEVEDVVRRVRKLIEDNERRNKEVHEEVEKRARENVERNRELLEKIRRTVEEIRRELEELRGDERVVKKVEDDLRRLLEEAKEVLKKSEKNLDELLKKHEKVLRDSEEDLKRVLDELRERGLDKDLLDEVRRLLERVKRRTEESNRRVKKIVDDVKRTSEEILREVEELLRRLIDDARK

SEQ ID NO: 4963 - protein, 179 aa, Artificial Sequence; identical to SEQ ID NO: 4962
  Synthetic

SEQ ID NO: 4964 - protein, 179 aa, Artificial Sequence
  Synthetic
DEVEKVFREVKKRIDENREKNRRVHEKVEREARRNSEENRRVHEEVRKTVEDIRRELDEKRGDEKAVREIEKKLKELLEKHKRVVEESRKNLTELLEEHKEVMRDSERDLRRVLKEVEKAGLDEELLRRIEKLAREVRDETRRSNEKVKEIIRRVEKESEDSNREVKRLLDELTRDARR

SEQ ID NO: 4965 - protein, 179 aa, Artificial Sequence; identical to SEQ ID NO: 4964
  Synthetic

SEQ ID NO: 4966 - protein, 179 aa, Artificial Sequence
  Synthetic
SEVEDVVRKAREILKRNEDENRRVLEKVREDLKRLTDENDKVVEDVREMVRRIKEMLDRNRGDERVLEEVERKLREVEDRVREAKRRDEEKLKRLEEELRRVVEESRRDLERLLEELKRAGVREELLREVDERIKDVKRKTDEILREVRERIKRNEERTERLRREIEELARRLLEDAER

SEQ ID NO: 4967 - protein, 179 aa, Artificial Sequence; identical to SEQ ID NO: 4966
  Synthetic

SEQ ID NO: 4968 - protein, 177 aa, Artificial Sequence
  Synthetic
DEEDLLEKIERILEEVKRRLEDVIRRVRKSNEDIERELKKAVDRSRELLRKVEEDLRRNRVDERLLDRLRKIKDENRKLLETLDRELKKISKEDEDRLREVEKRVEKIMRELRERIRREGADRDVFERLERIARRLTEEIEKALRDSDKLNEELKRKVEEVLRRSEESIRTVLEELR

SEQ ID NO: 4969 - protein, 177 aa, Artificial Sequence; identical to SEQ ID NO: 4968
  Synthetic

SEQ ID NO: 4970 - protein, 175 aa, Artificial Sequence
  Synthetic
DEIEKVRKDVDEIIRRLEEELEEVAKRLEDLNREIERILREVKKESDDTIRTIERLRKEGVDRRDIKRISEEDERKLEEVEKTLKRIADKSRELTEDVKRRLKEALDRLEEELKRVNVDESIVKEVRDKLRRLEKRLDDLAKRNEESLRELKRTLEEIIKRSRKENKRIEDEVRK

SEQ ID NO: 4971 - protein, 175 aa, Artificial Sequence; identical to SEQ ID NO: 4970
  Synthetic

SEQ ID NO: 4972 - protein, 184 aa, Artificial Sequence
  Synthetic
SEVEEVEKELRELIREDKERLDRLRKELKESIDTNKEKLDRVKEDLERLIEEIREEARRRNIDKETMDRLDEKLRRLKKELEEVIKDSRKKLEELLDELRKVVEENKRRLDEVEKELKEVKKLKDRERLTKLVEKIREVLERSKEHSERVAKKIRDELDKLHKETERVDRKLKTEARRLKEELR

SEQ ID NO: 4973 - protein, 184 aa, Artificial Sequence; identical to SEQ ID NO: 4972
  Synthetic

SEQ ID NO: 4974 - protein, 184 aa, Artificial Sequence
  Synthetic
DEVERVEEELKESIDRNDEELRRVRKENRESIEKDRRDLKRVEDDLRRLIKKIDEEVRRRNIDEEDVRRLKEKLDRLLKELRDVVKENADRLEATLRELEEVIKRSREKAKRARDELREVKRDSREEALREVVRKLRKLLKELHEETKRVMEKLRKLDRESEEHTKEVDERIKKTIEDLERELK

SEQ ID NO: 4975 - protein, 184 aa, Artificial Sequence; identical to SEQ ID NO: 4974
  Synthetic

SEQ ID NO: 4976 - protein, 184 aa, Artificial Sequence
  Synthetic
SEVDEVRKELRKVIKEDEDTMRKLEEENRKSIEEIRKELEKVEEELERVIRRIEDEIRKRNIDKRIADRLRKELKRLLEELRRVIEDLKRKLDKTREKLKRVADENRREAREVEEELKKVAKEDRREVLETLVRKIREELKRSKEHSKRVADDLRRMDEEIRREVKRVVDKVRELLKRLEDELK

SEQ ID NO: 4977 - protein, 184 aa, Artificial Sequence; identical to SEQ ID NO: 4976
  Synthetic

SEQ ID NO: 4978 - protein, 184 aa, Artificial Sequence
  Synthetic
DEVEDVLRRLKELAEEDKTKLKEVEKENKESIKEDRKRLEDVRRELEKLIEEIRREVTERRIDEKEVRKLEEKLKRLAEELEEVVKENERTAEKTERRIREVIKRNEDKLRRLMDELRKMKRSKDEKVLRDVSRRIKEEVEKSKKHSEEVKKELEDADRESKRHTEEVEKKIRELIERLKRETK

SEQ ID NO: 4979 - protein, 184 aa, Artificial Sequence; identical to SEQ ID NO: 4978
  Synthetic

SEQ ID NO: 4980 - protein, 184 aa, Artificial Sequence
  Synthetic
DEIDRLREELKRLIDKDKTDLDRVRKENEESIRDDERKLREVEKELRDLIEEIRRKAKERNIEEEIMRRLDEKLKKLERDLEEVKKKNETNARENRKELERVIEKNKEDADRLRRELDEVARDEDRRVLEEVARKIRELIRRSEKHSEDVMEKVRRNDERSKRHTEDVTRKIRTEIEKIDRELE

SEQ ID NO: 4981 - protein, 184 aa, Artificial Sequence; identical to SEQ ID NO: 4980
  Synthetic

SEQ ID NO: 4982 - protein, 175 aa, Artificial Sequence
  Synthetic
KEKEDVKKRLDEEAEKNKRTSEEAKRRNRESIRRNKETSKRVKEENRRSFEELDDLLRRGDGRREDLRRLLEANLETNTRVHEENDKSAKDNERTNEKVHRENDESLKEIKKRVREENLDKRVEEELDKLMEEIRRHNRESNEELKRLVEEIRKHNRESNEELKKLLEEIERKTE

SEQ ID NO: 4983 - protein, 175 aa, Artificial Sequence; identical to SEQ ID NO: 4982
  Synthetic

SEQ ID NO: 4984 - protein, 175 aa, Artificial Sequence
  Synthetic
DEDKDVEKKLRDIIKRNKETSRDVARRLEEIIKRNKKTSDEVATEVRKLIKEIEDVLRRGDGSREELEKLLEEVRKRLEDVHRENKESLKKVEDELKEVHRRNDESLKRVRERIEKENLDEKVKEELRRLIEEIKEHNERVLRKLRKLVEEIERTNEDIRRELKELVEDIRRKAK

SEQ ID NO: 4985 - protein, 175 aa, Artificial Sequence; identical to SEQ ID NO: 4984
  Synthetic

SEQ ID NO: 4986 - protein, 175 aa, Artificial Sequence
  Synthetic
SEKEEVRKRLRDKVEDNKRTSKEVADKLRKIIKENKDTSKKVMEDLRRIIEEADELLRRGDGSEETLRKIAEDLERDLDRVHEENRKSVEDLEEELREVHRENKKSADDIRREVDRENLDDDVRRELDELVKRIAEENKRVEDELRRLVKEIEDHNEEVKRELKELVKRIEEKTR

SEQ ID NO: 4987 - protein, 175 aa, Artificial Sequence; identical to SEQ ID NO: 4986
  Synthetic

SEQ ID NO: 4988 - protein, 175 aa, Artificial Sequence
  Synthetic
SEKEEVEREVEERLRDNKRTSDKVVEENRDSVRRNKKTSEDVKRENEESVRRIDEVLKRGDGSEETLDRLAEENRRTNEEVHERNDRSLRKNDETNKRVHEENDRSLREIKKKLDEKNVDEDVKRKAKRMVEEIRERNRKSNEELKKLAEEIRKHNKDSNKKLKELVDEIRRKAK

SEQ ID NO: 4989 - protein, 175 aa, Artificial Sequence; identical to SEQ ID NO: 4988
  Synthetic

SEQ ID NO: 4990 - protein, 175 aa, Artificial Sequence
  Synthetic
DEERRVREKLKKIIKDNEDTSRKVREDVKKELDDNRRTSEKVARDNERSIEEIKKALERGDGSEDDLRRLARENEETNRDVHRRNDESLRKIERRLEEVTKRNKESADRAREEVERANLPEEVRRELDKLVKEIKERNDEVIEEARERVKRIREKNERSNRKLKKEAKKIEEEAR

SEQ ID NO: 4991 - protein, 175 aa, Artificial Sequence; identical to SEQ ID NO: 4990
  Synthetic

SEQ ID NO: 4992 - protein, 175 aa, Artificial Sequence
  Synthetic
DEDREVERDLKKIIKDNKRTSEEVEKKLRDIIRKNEKTSKEVEKELRDIIRRADELLRRGDGSREDLKRILDELRKKLEEVSKRNKDSVDELRKELKEVHDRNKKSLDEVREKLEREKLPEEVKKDLDRLAEEIKKRNEEVRKDLDDLVRKIEKRNEEVKEELDRLAREIEEKAR

SEQ ID NO: 4993 - protein, 175 aa, Artificial Sequence; identical to SEQ ID NO: 4992
  Synthetic

SEQ ID NO: 4994 - protein, 175 aa, Artificial Sequence
  Synthetic
SEEDEVRRRLRRIIEENRRTSEEVRERLRKIVEDLERTSRDVRRKLREIVERIKEVLTRGDGSREDLERILKEIEDRLEEVTRELKRIADEARRTLEKVTEDNRRSLEEVKKEVRKDKLPREVEEELRRLIEEIERRNKEVREELDRLIEKLEDDNRKVHKELRELAKEIKDRAD

SEQ ID NO: 4995 - protein, 175 aa, Artificial Sequence; identical to SEQ ID NO: 4994
  Synthetic

SEQ ID NO: 4996 - protein, 188 aa, Artificial Sequence
  Synthetic
RELEEVVKRIRDILREIHERSEKSAEENRRLIEKAEEDSKRSAKRIREIIREIREEVKRIKDKDTLRKLLEDLERELKKLIDDNRKMVEDLRRESKRSIDDNRRLNEEIHERLRRIIEELRRRLRERDVREKLERVAREVEKSNKDNRDHSKRVEEESRELLKKLRKHSEDVAREVKKLLDELREETR

SEQ ID NO: 4997 - protein, 188 aa, Artificial Sequence; identical to SEQ ID NO: 4996
  Synthetic

SEQ ID NO: 4998 - protein, 188 aa, Artificial Sequence
  Synthetic
SELEKVVEDIRRLLRKIHEDSKRSVRKNEELVEELKRLSEKSEREIEELLRRIKELLKRIKDKESLKRALEELEERLRRIIEKNRELVDRAEERSRKSVKENEDLNRRIHEELKRVIDDARKKLRDERVKRKLDDVEREVRKSNEDNRKHSDEVRRKSEDMLEKLRRESERVADRVRKVLKELEDERR

SEQ ID NO: 4999 - protein, 188 aa, Artificial Sequence; identical to SEQ ID NO: 4998
  Synthetic

SEQ ID NO: 5000 - protein, 188 aa, Artificial Sequence
  Synthetic
SELEKLAKEIEEILREAKERSKESAERIRKLVRDLRELSRESEERIRKIETDVKKKIDDIKDKDTVRRLLEELRKRLEEMIKRNEDLVRELARLLKEMTDRNRRLVEELEREIRKLIEDLRRRLREREVRRKVEDVERRVTKVLKELEDRSREVEEEVERVLRDLKRHSDEVRREVEEVLRRLTERTK

SEQ ID NO: 5001 - protein, 188 aa, Artificial Sequence; identical to SEQ ID NO: 5000
  Synthetic

SEQ ID NO: 5002 - protein, 175 aa, Artificial Sequence
  Synthetic
SEREKIAEDIRKLVDESRRNLEDVVRRARELAERVRRNLKRVMETLERLAEEIRRIIESGDRSDRVLRELKKLLDDIDKYLKENHRRLEELVKEIEKYLEDDHRRLRELIEDIRRKLSDDKDLERELKELLDKHKKDLDDVREEIRRMLETHKEELDRVKKRVEDVLREAAERTR

SEQ ID NO: 5003 - protein, 175 aa, Artificial Sequence; identical to SEQ ID NO: 5002
  Synthetic

SEQ ID NO: 5004 - protein, 175 aa, Artificial Sequence
  Synthetic
DERERIREEVRKLARESKENLKRTEEDLKRRLEEVKRNLERVDEEVERLVRTVAEIVRKGDKDDEVLRRADELLKRIEDYLKKNNDRLRELIERVERYLERDHRELERLIEEIEDRLRDDEELKKEAKKLLKEHRDKVKEIKEDLKRAHEEHRKRLEEVVEKLKRVLRDLAEKVR

SEQ ID NO: 5005 - protein, 175 aa, Artificial Sequence; identical to SEQ ID NO: 5004
  Synthetic

SEQ ID NO: 5006 - protein, 175 aa, Artificial Sequence
  Synthetic
SEREEIVKTLRELVKRVKENLKRVTEEARKLADESRRNLERVAEEIRKIAEEVKRIVERGDRSSRVLEEIERVVREIEKYLKEDHDRLRTLIKRIKDYLEENNRRLEELLKDIKDKLSDDKDLEKELEDVHREHKRRLDEVVREMEDLLRKHEDDLRKVKREAEKMLKELTETTK

SEQ ID NO: 5007 - protein, 175 aa, Artificial Sequence; identical to SEQ ID NO: 5006
  Synthetic

SEQ ID NO: 5008 - protein, 175 aa, Artificial Sequence
  Synthetic
SEREEIAERAERLSREVKKKLEDIRREIEELAKRVLDNLRRVLRDVERLIEEVKDIIRRGRRSSEVLKRLEDELRRIEKYLRENNERLKRLIDTIRDLLRRLHEEHRRLLEDIKRKLSDDKKLKDDLDRADEELERRARKVDEDLKELHERHRRLLEDVRRELERVIKELKEETE

SEQ ID NO: 5009 - protein, 175 aa, Artificial Sequence; identical to SEQ ID NO: 5008
  Synthetic

SEQ ID NO: 5010 - protein, 175 aa, Artificial Sequence
  Synthetic
SDRERIAKRARELSERVKEKLEEILKEVRKISKDMKKRLEDILREAEELSRRIKEIVESGDSSDEVLKEHRDLLREIKEKLERLHEDHRRVLEEIKKRLEELHKDHKRLLDDVDDKLRDDDELRKELEEVDDELRRKIEEIKKELETMDKELRDRAKEIEKRLEDSNREVEERRR

SEQ ID NO: 5011 - protein, 175 aa, Artificial Sequence; identical to SEQ ID NO: 5010
  Synthetic

SEQ ID NO: 5012 - protein, 175 aa, Artificial Sequence
  Synthetic
SEREEIAKTVRKLSREMKETLKKITEEARRLSEEVKRALKKIVDDLRELMKDVKRIVESGDRSDKVLRDARELVKRIVERLEELHERHRKLIEEIKKKLEDLHRTHRRLIEDVERKLKDDKDLKKELEDVDRELADTIRRVEEELKKVNEELRKRVEDVREEAERALRELEERVR

SEQ ID NO: 5013 - protein, 175 aa, Artificial Sequence; identical to SEQ ID NO: 5012
  Synthetic

SEQ ID NO: 5014 - protein, 175 aa, Artificial Sequence
  Synthetic
DERERIAEELKKLTEEIRRRVEDVMREAERLAEEIKRKLEDVLEEVRRLSDRIREIIESGDRSDEVLRRHRKLLERIREELKKILEELRRLVREIKEKLKELHERHKRLLDDVDRKLSDDDDLRREAEKVNRKVREDLKRIEDRMRELLKEVEDLLRKIEEEARKSNKELEDRTR

SEQ ID NO: 5015 - protein, 175 aa, Artificial Sequence; identical to SEQ ID NO: 5014
  Synthetic

SEQ ID NO: 5016 - protein, 178 aa, Artificial Sequence
  Synthetic
SEAEKAREDVERAAKESKDKLDEIRKEVEKAARESREEAKRNEKDIKDAAKKLRELARDKKADEKVARRAEKIVEDNERSAKEAADRSEETAKRARDKLRKAAEDSKRTAEKARRDAEKRGADRDVLEELRKIAEDDKRRVDKVARELRELAKRDKEEAKKVHDENKKSAKEAEDELR

SEQ ID NO: 5017 - protein, 178 aa, Artificial Sequence; identical to SEQ ID NO: 5016
  Synthetic

SEQ ID NO: 5018 - protein, 178 aa, Artificial Sequence
  Synthetic
SSDETLRRELEKAVEESRRLLEENRKTIEDMVRESKRLLDRNREEIKKLVEELKKLLRDNNLPKEVADDVREIVRRNEESVEKLIRDSKETVDRDRKSLEDVARESEETVRKLREDVDRRGVDRDVLREIRELLKRDKERLKEVHKRNRESAKRDKDRVKDVHRKNRDSARRVKERLR

SEQ ID NO: 5019 - protein, 178 aa, Artificial Sequence; identical to SEQ ID NO: 5018
  Synthetic

SEQ ID NO: 5020 - protein, 178 aa, Artificial Sequence
  Synthetic
SSDETARKEIEDMVRESKKLLEEIREELDRVVKRLRRELEENEKDIKRLVKRLRDLLRENNLPDEVERRIEKIVRENEKSVKDVAKEVEDIVRELRRLIEEAERRSEKTVRELREKLRREGVDRDVLREIRELAKRDKDTVKKVMEEIRDRLRKLDERIKEVHERNRRSLKDVEDKVR

SEQ ID NO: 5021 - protein, 178 aa, Artificial Sequence; identical to SEQ ID NO: 5020
  Synthetic

SEQ ID NO: 5022 - protein, 178 aa, Artificial Sequence
  Synthetic
DEDREAKRRLDEAVKESRDRLEEIRKEVEKMVRENEELNRRNEEEIRKAVEELRELLRRQKLPEDVVRKIEKIVEDNRESVKRNVDESRKIVKELRDLLKKLFEESEETVRELEDRLRKRGVDRDVLREIEEELTKDRKRVKEVLEELRRIAKRLKERDEESHERNRRSLDKLKKEVK

SEQ ID NO: 5023 - protein, 178 aa, Artificial Sequence; identical to SEQ ID NO: 5022
  Synthetic

SEQ ID NO: 5024 - protein, 178 aa, Artificial Sequence
  Synthetic
SSEDEARKEVDKMAKESEELLRRNEETIRRLVRENEEKNERNRREIERVVRELDRLLKERKLDRTVERKIREIVTRNKKSVDDNKKRSEDIVREDEESVDELVKDSKRTLDELRKKIKREGVDRDVLRELREIAERDKKKVEDVHRENRDSARRLKEEDDDSHRRNRKSMKEVKEDVE

SEQ ID NO: 5025 - protein, 178 aa, Artificial Sequence; identical to SEQ ID NO: 5024
  Synthetic

SEQ ID NO: 5026 - protein, 186 aa, Artificial Sequence
  Synthetic
REIEEVAKRLRKLVKELKERSKESKDRSRKLMTELKKLSKDSLRELRRLLDELRKILKDRRDSEETVKEVEERLKELLERNKRDSERVAREDKKLNDDNREESKKAAEELKKIVKELEDRNRGKRDVKKKLDEIRREVKKVIEEDKRLNDESEKDSRRLIREDEDENRRIKEEIDRAVEELRRRRK

SEQ ID NO: 5027 - protein, 186 aa, Artificial Sequence; identical to SEQ ID NO: 5026
  Synthetic

SEQ ID NO: 5028 - protein, 186 aa, Artificial Sequence
  Synthetic
SDIERVLEELRRLVERLKRETERFAKELRDLARRVKEMSKRSEEELRELATRLKDTLRRRKESKERVEEVKKRLREIIKRNKETSKRVAEELKRIVKESKDLSEEVARRLEEIIKRLEDRNRGKRDVEEKLRRIKRELREVIKEDEKRNREIEREVDKVIRELEKLNKRIEDEVRKLEEELERRLK

SEQ ID NO: 5029 - protein, 186 aa, Artificial Sequence; identical to SEQ ID NO: 5028
  Synthetic

SEQ ID NO: 5030 - protein, 186 aa, Artificial Sequence
  Synthetic
SDIERMRDRLRKLVEEAREKSDRSREELEKLVRELRRKTEKFLKELRDLARRLKETLKRRKDLADEVRKVIKELKEIIDESKKVSKKVADELKKLLEENREKSREVEETLRKLVKDLEDRNRGKRDVKEKLDRIRKEVEEVARDLKRKNDEIEEEIKKVIRDDERRNEEIEKEVRKMAEELRRTLK

SEQ ID NO: 5031 - protein, 186 aa, Artificial Sequence; identical to SEQ ID NO: 5030
  Synthetic

SEQ ID NO: 5032 - protein, 186 aa, Artificial Sequence
  Synthetic
SDIERVRKELRELLERVARRSEKSMRDDKKSMDDLKKEIREVEEELRRLATEVKKTLKDRRDSEDRVRKAIEDLERIIEELEKRVRRVEERNERTVEENKKESEKVAEDLKRIIDKLEERNRGKRDVKKKLEEIEREIREAIKDLRRKNREIERTNREVIKELREELKRIDTEVKKLVKELRETSK

SEQ ID NO: 5033 - protein, 186 aa, Artificial Sequence; identical to SEQ ID NO: 5032
  Synthetic

SEQ ID NO: 5034 - protein, 185 aa, Artificial Sequence
  Synthetic
SELEELERDLERELEEDKRRNEEVMERNERRLRKLKEDVDRVVKELEDLLRKLEKILREEKDKDTIRKILEEIEDEARKILEKVKRLIETIKRESEESNKRLRDENRESEERLERILRKVREDGAPESELERLDRRLKKLIKESRETVDEIEERSERAIRDLERKLKELEERLRKKIKELRDETR

SEQ ID NO: 5035 - protein, 185 aa, Artificial Sequence; identical to SEQ ID NO: 5034
  Synthetic

SEQ ID NO: 5036 - protein, 175 aa, Artificial Sequence
  Synthetic
DETKKVEDDLRRVDTESKKHLDDVHKESKRVADELRKKLEDVHRRSEEMVRRLRRLLEENRTDKRELERALDEVLRESEKVVEEIRRLLEKVLRDSERAMRENRRLLEKVKKEVEDVKIREEVKKRIDDALRENERRAEENRREIERVLKELEDRVDENRRRIEEVRKELRDRAT

SEQ ID NO: 5037 - protein, 175 aa, Artificial Sequence; identical to SEQ ID NO: 5036
  Synthetic

SEQ ID NO: 5038 - protein, 175 aa, Artificial Sequence
  Synthetic
DETREVDERLKEADRRSKKHLDDVHKTSKKVLDELRRKIEELERRVRKVVKELEELLRENRVEEEELKRRAEEVEREIDRIVKEVKDLLEEVKKRSDEVAKENEERLKKVKKDLDDNNIPEDVRRKVDKIIKENRKMLEDNKRTIEEVLRELKERADEIKERVKKVLKKLEEDRR

SEQ ID NO: 5039 - protein, 175 aa, Artificial Sequence; identical to SEQ ID NO: 5038
  Synthetic

SEQ ID NO: 5040 - protein, 175 aa, Artificial Sequence
  Synthetic
DEEEKVERDVERVDKESKEHLDRVHEETRDINRRSEEHLRRVHRDSEDVARRLRDAVRRRTVDERDVERALREVRKKSEDVVRKNEEELKRALEKSKEVVEKNERELRELLDRLEKLNIDEKVKRRVEEAIKRNRDEARRDEEEVKKAIKRNREEADRNRREIEKVVEELRRRAT

SEQ ID NO: 5041 - protein, 175 aa, Artificial Sequence; identical to SEQ ID NO: 5040
  Synthetic

SEQ ID NO: 5042 - protein, 177 aa, Artificial Sequence
  Synthetic
SEKEEVKRRVDEITKRARKKLEDVHRRSEKIDRDSREHLERVHKRTKEILDELRDELRKRRDEDVARRIEDIATKLRRESEEVAKRNEDLLDELRKESEEVSRDLERLLKELRKELDAFNVDEDLRRRLEKVFRELKETLDRNREEIDRMVKRNRKTLRDNKEEIDRAVREARERLK

SEQ ID NO: 5043 - protein, 177 aa, Artificial Sequence; identical to SEQ ID NO: 5042
  Synthetic

SEQ ID NO: 5044 - protein, 177 aa, Artificial Sequence
  Synthetic
REDEEVLKDLKRIVDELRKKLKELHDRSEEIDKRSKKHLDDARRRVEEIMRRIEKRLREERSDKVRETVERLAREVKKEIDDVKRRNERLLRELKKESEKVSREIEEILRRIEEKLERKNVDDKVRKDLKDVAKEMRDRLEENERRIREAAKRNRTELERIERELKEFKDRLDETAR

SEQ ID NO: 5045 - protein, 177 aa, Artificial Sequence; identical to SEQ ID NO: 5044
  Synthetic

SEQ ID NO: 5046 - protein, 177 aa, Artificial Sequence
  Synthetic
SEVEKVMEEAKRIVTELEEKIRELERKVKKIDEDSRRHLKEVHDRTAEIAKTLRDILRKERSEEVAKEIERLLTELEKESKDVARRNEDLLRRLEEEIRRVVEEIRKLLEELRKRLDDKNVDDKIRREIEEAVERLETEARRLRREVEEAVRRNREMLKRNEKEIKDVAKELRDRLR

SEQ ID NO: 5047 - protein, 177 aa, Artificial Sequence; identical to SEQ ID NO: 5046
  Synthetic

SEQ ID NO: 5048 - protein, 182 aa, Artificial Sequence
  Synthetic
REDDRIRDEIRKLVEDNRRLLREILERLKTLADRLREINKKSNDDNERSADELREVLKKVRSEEVKRLVERVVEENRDSNRKDREISKKVVRELEELIERLREESKRSAEELERLIEDVVRKKGRDLEEVRREVEKAIRDSKEKLDELEERVRRMIEESEKLVEDNHRRIEEVEREMEEALR

SEQ ID NO: 5049 - protein, 182 aa, Artificial Sequence; identical to SEQ ID NO: 5048
  Synthetic

SEQ ID NO: 5050 - protein, 182 aa, Artificial Sequence
  Synthetic
KDEEEIKKAIEELVKRNEDIVEEIKRRSDKLADDLRDINRRSNEDNDRSLKTLEELLRRVDSKDVKELVERVIKRNTDSNREDEERSKEVVRRDEKLNEDLRRISEDSARKLEDLIRKIVERSGRDLKEVRDRVRRAIEKSKEDLDKSEDDSRKVIEESKRLVEENHRRIRKAVRKAEEATR

SEQ ID NO: 5051 - protein, 182 aa, Artificial Sequence; identical to SEQ ID NO: 5050
  Synthetic

SEQ ID NO: 5052 - protein, 176 aa, Artificial Sequence
  Synthetic
SEEEEARKKLKEAADRNRKVNEDAKKKAEDAARKNKKANEELAKKLKDAAEELKRVSRDEREEALREAAKKAKKIAEDAKREAKKVAEETAKIAKEIEDELRKALEESKEIAKRLEDEGAAEEIKERAKEVLERHKRSAEKIKEEAKRVLDEHRKRARDWEEEARRVLKEAEEEAR

SEQ ID NO: 5053 - protein, 176 aa, Artificial Sequence; identical to SEQ ID NO: 5052
  Synthetic

SEQ ID NO: 5054 - protein, 176 aa, Artificial Sequence
  Synthetic
REEEEVRKEVKKLKKENEDVNDKVRRDLEELLERNRKVNKELEDKIRDAKRRADEMLRVEDKDVLRRVLEEIRRLIEELKKELEEVLRRSREIIEKIREDLERVLRESKKKIDELRRRGVTEEIEEELRKVLKEHKELVERWKREAEEVLEESKRLIDKWKEDLERVLEDFRRKAE

SEQ ID NO: 5055 - protein, 176 aa, Artificial Sequence; identical to SEQ ID NO: 5054
  Synthetic

SEQ ID NO: 5056 - protein, 175 aa, Artificial Sequence
  Synthetic
SEAEEIEKRLKEVLDRHDKSAREIKDRLRKVIEEHRKLVEEWEKEARDVVKELKDENSELKDVLRELERILREIVKRLEDVLRKTEKILKEIERRLEEVKRRTKEILDEIKELLRRGEDTRRLRERLRKMEEDNRKINKEIRDEVKELEKENREINKRVEEELKRVRDELKRTAD

SEQ ID NO: 5057 - protein, 175 aa, Artificial Sequence; identical to SEQ ID NO: 5056
  Synthetic

SEQ ID NO: 5058 - protein, 175 aa, Artificial Sequence
  Synthetic
DEVEDIKRELEEVVKEHEKSVEDDERKNEDVVRRHDELVKKWEEDLRRVIEKLKRDNKDAREVLEELKEILDRLKKEADEALERTRRMTERNKKTAEDVRRDTERILREIDELVRRGRDERDLRRRVKDLKRRNKEMNERSKKHSDEVKEENKRINEEVEKKLRDVKEKLDRDIK

SEQ ID NO: 5059 - protein, 175 aa, Artificial Sequence; identical to SEQ ID NO: 5058
  Synthetic

SEQ ID NO: 5060 - protein, 182 aa, Artificial Sequence
  Synthetic
SELEKLIKEVEDLAKEVADKLRKSNKELRELVRKIAKALEETNREIEKVVRRVKRLLESGDRSSKLLKELEEIIRRAAKAHKDILDELEELVKTAARAHERILEELERLAKEIEDKLRERGLDKSKLKKIKEDLKRIADEIRKIVEDSKRDLERVADEARKIVEKSKEDLKRAKEEAEKETK

SEQ ID NO: 5061 - protein, 182 aa, Artificial Sequence; identical to SEQ ID NO: 5060
  Synthetic

SEQ ID NO: 5062 - protein, 182 aa, Artificial Sequence
  Synthetic
DELDELTKRARELVERNRRHIERSNRELKRLVKEVLDRNRENHKTVEELVKTVLKLAKDGDKSDELLRRLEKLIRESEEHLERSHEELDRLIRKADKDHEKNTRDHRRLVEKIDDDLRREGVDRSDVERVRKELKDSTDDIKRLVDKSREDLKRAKEKDEKSVRDNRERLRRVLRRLEEEVR

SEQ ID NO: 5063 - protein, 182 aa, Artificial Sequence; identical to SEQ ID NO: 5062
  Synthetic

SEQ ID NO: 5064 - protein, 182 aa, Artificial Sequence
  Synthetic
SELEKLTKEVRDDVRRVMERLKRSNDDIRRLAEEVIRRNDESRKKLEKLVEEVKDLFRRGDKSDKLLREAERLIEEARKEHEKLLRELRELVKRVTRKHEEILREVEELVERIKRSLEEKGLDDSKVREIERELDEVRKRLEDLVRKSKEDLDRVREELERLVEKSKRDLDKARRDLDEARR

SEQ ID NO: 5065 - protein, 182 aa, Artificial Sequence; identical to SEQ ID NO: 5064
  Synthetic

SEQ ID NO: 5066 - protein, 182 aa, Artificial Sequence
  Synthetic
DELEELEKKVREDVRRVKEKMERSHRETEKLARDVKKRLEDTNREIKKLVKEVEDILRRGDKLDEVLRRLEELIRKVLKDHEDILRELAELVERVERRNEEILREAEKLVRDIERELERNNLDKSKVEKVRRDLDEARKRLEELDRRNRKRLEEVRKEIREIVEKSKEDLKRAKDRARETVR

SEQ ID NO: 5067 - protein, 182 aa, Artificial Sequence; identical to SEQ ID NO: 5066
  Synthetic

SEQ ID NO: 5068 - protein, 182 aa, Artificial Sequence
  Synthetic
SEAEALIEEVKTLVRRNKEHAKRSHEKTEKLVRDVADALRKTNDEARKLVEEVRRILESGDKASRVLKRLEDLARELARAHKEILRTLEELVRRAKRDNERNLDEHRKLIEEIERRLEKDGVDKSKLERLKRELTRSAEELRELDKRNEDELRRAAKRIRDIVRKSEEDLKKVRDDAREKTR

SEQ ID NO: 5069 - protein, 182 aa, Artificial Sequence; identical to SEQ ID NO: 5068
  Synthetic

SEQ ID NO: 5070 - protein, 182 aa, Artificial Sequence
  Synthetic
KDVEEVRKELDEIARRVTEEIKRVHDETARIVDRLRERLEKVTRDNRRSVRELEKELERNKEKAERVKEIVTRNRETTKRVKDEVRKIIRELERKSEELEKRVREIEEKLKELLKRLAERGVPEKKLREAKKRLDELAERLKRLIDRNREEIKRVAREADERIRENEKEVEEVEERLDRKIK

SEQ ID NO: 5071 - protein, 182 aa, Artificial Sequence; identical to SEQ ID NO: 5070
  Synthetic

SEQ ID NO: 5072 - protein, 182 aa, Artificial Sequence
  Synthetic
KDAEKVVEDLERKADAVMRKLEDVSRRHREIAKRIKDRLEKVHRDNEKSVEDLKRILKRNRESEEEVRRIVEENRRSSDELRKEVEKIVKEMEDTSREVAKDVEKIVRELREELKRLRERGVPEEIVRRAEKKVEDFERRLRKLIEDNKREVDKVEKELRDTIRRNEERIREAVEELKRTSD

SEQ ID NO: 5073 - protein, 182 aa, Artificial Sequence; identical to SEQ ID NO: 5072
  Synthetic

SEQ ID NO: 5074 - protein, 182 aa, Artificial Sequence
  Synthetic
EDVRRVVEELRKIAEDAKEKARRVHERDRERVRKVEEDAKKVHEENEESVTRLERLLDRRRESDKDVRKIVEDNERSSKEVERRLEEIVRRSRKHSTDVEEDLKRIVEELERKLRELATRGIPEDDVRRIREEVEKVRKDLKDIVKRNKEANDEVEKRLRDIVRRNRERIEEMRRRLEEKKR

SEQ ID NO: 5075 - protein, 182 aa, Artificial Sequence; identical to SEQ ID NO: 5074
  Synthetic

SEQ ID NO: 5076 - protein, 182 aa, Artificial Sequence
  Synthetic
EDVKRVVKELEDIAEEVRRRLEKVNRENRESMKRLEEELRKVHEENRESIERLKRTLKDRRESKEEVRKIITEDKKTSEELKRRVEEISERNKDTSRRLEEDVKRIIDKAREDLERLARRGIPEEIVKEAKERVDKVKDDLRRLIEENERDIRRMDRKLEDEIRRNDEELRRVVREAEETVR

SEQ ID NO: 5077 - protein, 182 aa, Artificial Sequence; identical to SEQ ID NO: 5076
  Synthetic

SEQ ID NO: 5078 - protein, 182 aa, Artificial Sequence
  Synthetic
SDVERVRRELREIAETVKERLREVNERNRKSVRDVEEIVKKVHEEDKDLARKVEEILERNREADEKVKKIVRESEETSKELERRLREIIKDNERTSKELEEEVRKITRELEKKLEDLARRGIPKERVDDIKREVDKAREDLRRLIEENKRDIKEVVERLEKLIKDNRDDNDRLRRRLEEKSR

SEQ ID NO: 5079 - protein, 182 aa, Artificial Sequence; identical to SEQ ID NO: 5078
  Synthetic

SEQ ID NO: 5080 - protein, 182 aa, Artificial Sequence
  Synthetic
SELEKVEKELKRIVDEVKKELKRVHEDDERLVRELEESLKKVTEDDRRLARELEDTLRKRRESEREVERIIDESRKTSEDLEKEVEDIVRTSEETSKKMEKRVRDIVRKLEETLRRLREAGIPEEDARRAEERVRRVVKELKELIERNKKRNKEAVERLRRLIEENKRENREVEKRARDTAR

SEQ ID NO: 5081 - protein, 182 aa, Artificial Sequence; identical to SEQ ID NO: 5080
  Synthetic

SEQ ID NO: 5082 - protein, 182 aa, Artificial Sequence
  Synthetic
KDAEEVLERLKKIAEEVAKELRDVDEENRRLLKRWAEILEEVTREDERLARELEERLERRREASEEVREIERRSRETSEELERTVRDVLRKDRKSSKELEERVREIIKRAREELKRLAERGVPEEKLRRAKEEVDRAEKELRELIKRNKDNLERAVRELEKLIEENERRNREVEKRLEDRER

SEQ ID NO: 5083 - protein, 182 aa, Artificial Sequence; identical to SEQ ID NO: 5082
  Synthetic

SEQ ID NO: 5084 - protein, 182 aa, Artificial Sequence
  Synthetic
KDVEDVVRRLEEIAKRVKERLKEVDKRNKDKAREWLKEVKEVHERNEKLAEEVRRTLKDNREKSEKVRKITEESKKSSDTVRKRLEDLSRDDKRSSEELRREVEKIVRELRDILRRLRERGIPEEIVREAEKRVREMERELRELIERNKRNVEEMDRRLEELIKENEERNKRVEEDLRRKTK

SEQ ID NO: 5085 - protein, 182 aa, Artificial Sequence; identical to SEQ ID NO: 5084
  Synthetic

SEQ ID NO: 5086 - protein, 181 aa, Artificial Sequence
  Synthetic
DEVEEAKRRLTELVDRLRKTLEKVSREDRELEERVRKITKDSHDTTEEILKRLKRELEKGVDKEEVERVREELEEITKRNEDESRRVIEESEESTKRLEEEVERVEREVRRLLEELRRRGVDEKDLRELEERVRRAVKKLRDDLRRNKKESEEVKKKLEDENKKNRDRVAEAEEELRRRTT

SEQ ID NO: 5087 - protein, 181 aa, Artificial Sequence; identical to SEQ ID NO: 5086
  Synthetic

SEQ ID NO: 5088 - protein, 181 aa, Artificial Sequence
  Synthetic
DEVREMLRTLDEIARRLKKRTKESIDTDRRLVKKLREETDKSIEDDKKLVKEVEELLDGGADEKIVREVIKRSRDLNRENKERSRKVIKESRELNKRNSEETKRVIEELRELLRKLKDDGVEERKLRELEKRIRKAEEELRRDNERSKKETEDVERDLERKNEESERRTREAEKRLKERSD

SEQ ID NO: 5089 - protein, 181 aa, Artificial Sequence; identical to SEQ ID NO: 5088
  Synthetic

SEQ ID NO: 5090 - protein, 181 aa, Artificial Sequence
  Synthetic
SEVEEVLKRLRDIARELEKLIEEVIRRDRKLVEELKRRSERSIETDRRLVKRLKEMLDGGADSKDVKRVIERSRELNDENTRESERVIEESERLNRELEERIKEVTERLRRLLKELRDRGADEEKVRRAEEEIREVERRLRKLLRDSKEETKEVVKELRRLNEESKKETEKVVREAEKRTK

SEQ ID NO: 5091 - protein, 181 aa, Artificial Sequence; identical to SEQ ID NO: 5090
  Synthetic

SEQ ID NO: 5092 - protein, 181 aa, Artificial Sequence
  Synthetic
KDAEEVVRRLTKLVEDLKRKIEEVIREDKELVDRVRDTSRKSDETLEKLVREVKKLLREGATSEILEKVIRELEEILKKNTEDSKDAIRKSRELNERLARDIERVIRELREIVKRLAERGVEEEKLKRLEDRVREAEKELRELLERSEDTTRRAERELEELNRRLEDKIRRVVEELKEESR

SEQ ID NO: 5093 - protein, 181 aa, Artificial Sequence; identical to SEQ ID NO: 5092
  Synthetic

SEQ ID NO: 5094 - protein, 181 aa, Artificial Sequence
  Synthetic
SEVEDVLRRLERLVRELEKETKRSLEENEKLARRLKKKLEDVVRDNKRLVDEVKELLKEGADERTLREIEKRSDDTLEELKRDVDRVIKESKETLEDNSRKTKEMIDRLRELVKRLRERGAEEEKLRRLEKLVRDAARRLKELNDRLRKRSKEVKEELERILRELKERSDRAKEDLRRAAK

SEQ ID NO: 5095 - protein, 181 aa, Artificial Sequence; identical to SEQ ID NO: 5094
  Synthetic

SEQ ID NO: 5096 - protein, 188 aa, Artificial Sequence
  Synthetic
SELEKVEKDLEKLIRDDEEENKRVLEELERLVREDKEKNKRVHDETRKLEDTLRRILEKSKDKDTIRKILKEIEDRLDDLNRKLHEKNRESTERLKRLIDELRRTNKRSVEELERLLKELAERLDKEEAKEKLRRLKERIREAEEKSRKSLRDIEETLKKVKRESEETDRRNRDTLRRAKKRLKDETR

SEQ ID NO: 5097 - protein, 188 aa, Artificial Sequence; identical to SEQ ID NO: 5096
  Synthetic

SEQ ID NO: 5098 - protein, 188 aa, Artificial Sequence
  Synthetic
DEVEEVKKTIRDLLRRNKEISRETLERLKKLVDENRERNKKVHDETKKLTEEIKKILEEIKDKDTLREILREIKERLKELNKRLHETNKRSREELEKILRENHEISKESVRRARKLLEDLRRRLDKEEAEKELRKLEKEVKDAKEESERSDRRLEKEIRDVERDSERSDRENRDEIRRVAEELDERSR

SEQ ID NO: 5099 - protein, 188 aa, Artificial Sequence; identical to SEQ ID NO: 5098
  Synthetic

SEQ ID NO: 5100 - protein, 188 aa, Artificial Sequence
  Synthetic
SEAEKVLRDLEELVRENEEKSERSLRELEKLVRDNEEKNKEVVKRIKDLAERIRRILEEIKDKDTLEKILRKIDDDARRLLERLERINRESDERLRRLNKRNEDLSRESVKRMEELIRDLERKLDDEDAKRKLEEIRKTLEEVKRRSEDSNRELRRRLEEVKRRSEKSLRDLEELVRRIKKELDDRSR

SEQ ID NO: 5101 - protein, 188 aa, Artificial Sequence; identical to SEQ ID NO: 5100
  Synthetic

SEQ ID NO: 5102 - protein, 185 aa, Artificial Sequence
  Synthetic
SEADKLREDLERRVREIEKRSRDSDKRLEELLEEIRRRSKRTLDELERRLREVEEELEREKDKETVDRLLKEVEERLRKILEDNKRLIEDITEKLRKILEENERLIREAVKELERLLEDLERKGVDKKKVDRVRDEVRKVKRKLEEEHKKLERKVREARKELEKSHRDLNREVKKAKERLDRKRD

SEQ ID NO: 5103 - protein, 185 aa, Artificial Sequence; identical to SEQ ID NO: 5102
  Synthetic

SEQ ID NO: 5104 - protein, 185 aa, Artificial Sequence
  Synthetic
DEVEKLRKELEDLAEKIKRESEKTLRELKKLADEIRKLSEDTLRRLKELLDRVEELLRETKDKETVRRLLEKVREELRKISEENRELIERLARRLDEIAKRNKELIERIARRADELLKRLKDKGVEERKVRELEKTVEKIKRELEKSHEDLNREVEKIKRDLERSHKELNELVKRAEERLRRETK

SEQ ID NO: 5105 - protein, 185 aa, Artificial Sequence; identical to SEQ ID NO: 5104
  Synthetic

SEQ ID NO: 5106 - protein, 185 aa, Artificial Sequence
  Synthetic
SRVEELKRRLEELIERIDRESKRTLKELKDLAREIKELSERTLRELERLAKEVKEELDRIKDKDTVRRVLEEAERMLKEISERNKRLIEDIARKADEIHKRNRELIEDIRRKLEEILRRLRTEGVDEEKVKELEERVRRVDEELERSNERLRREVKKIKEELKESHERLNKRVEEIRRELRERSR

SEQ ID NO: 5107 - protein, 185 aa, Artificial Sequence; identical to SEQ ID NO: 5106
  Synthetic

SEQ ID NO: 5108 - protein, 185 aa, Artificial Sequence
  Synthetic
DEAERLEEEIRRLAEEIKRLSKESLERVEKLLEEVRRESKRTLEDLERLVRDVEDKLRKIKDEDTVRELLKRVEDELRRILEENKKVIDDVEKELREINEENRRLIEDAARKLDTLLRDLERKGVDEEKVRRLKKRIDEIKEELKKSNEDLHRRIEEAKRELEELHERLNRDVERVKEKLRRDAK

SEQ ID NO: 5109 - protein, 185 aa, Artificial Sequence; identical to SEQ ID NO: 5108
  Synthetic

SEQ ID NO: 5110 - protein, 185 aa, Artificial Sequence
  Synthetic
RELEELLKTLEELLKKIEEESRRSLEELKRLVDDIRRKSEESLERLERLAERVKEVLDREKDKETVDRLLKEVARRADRINEENRELIDRARKELDRILRENAELIRKIVEELRRLLEKLKKDGAPKEKIDRLEKRVRDAKKRLEDLHRELNKRVEDVKRDLEESNKRLHDTVREIKKELRERTR

SEQ ID NO: 5111 - protein, 185 aa, Artificial Sequence; identical to SEQ ID NO: 5110
  Synthetic

SEQ ID NO: 5112 - protein, 185 aa, Artificial Sequence
  Synthetic
DEVRELEERIDRILKKIEDESRRTLEEIKKIAREVEKRSEDTLRELDDLVRRVEELLERIRDKETVDRLLKKAKKDLEDIHRRNREVIERAARELDRMLEENKRLIDKIIEELKRMLDELRKRGVDEKDVRRLEKKIREAEKRLRESNERLEKTIRDIKKRLEKLNKELKDRVDEVVKRLRDKTE

SEQ ID NO: 5113 - protein, 185 aa, Artificial Sequence; identical to SEQ ID NO: 5112
  Synthetic

SEQ ID NO: 5114 - protein, 185 aa, Artificial Sequence
  Synthetic
SELEELLERLKRRADEIRKESEKTLEELDRDARRIEKESRETLEELKKRLDDVRRALEETKDKETVRRLLEKVAEELKRISDRNERLIREAAKKLDKIHDRDRRLVEKAREELKKLLEELEREGVDKKKIDDLRRKVEEIEKDLKRSNDELRKRVKEIKDRLKELHDKLNEDVKRARKELEERRK

SEQ ID NO: 5115 - protein, 185 aa, Artificial Sequence; identical to SEQ ID NO: 5114
  Synthetic

SEQ ID NO: 5116 - protein, 185 aa, Artificial Sequence
  Synthetic
SEAEELLERLDRRLRRVEETSKRTLDELKRLLEDIERKSRKSLKELEDLVRKVKDMLRREKDRETVRRLLEEAREVLREINERNRKLVEDIRRLLEEIHRRDKELVERVRRELEKLLRDLERKGVDEKKIRDLERRVEEAARRLEKSNRDLAEEVERAERRLDRSNRELRRRVEKVLKELEDTER

SEQ ID NO: 5117 - protein, 185 aa, Artificial Sequence; identical to SEQ ID NO: 5116
  Synthetic

SEQ ID NO: 5118 - protein, 185 aa, Artificial Sequence
  Synthetic
SELEELEKRLEDLAREIKRRSRESLKELEELVKRIEETSKRTLDELKRLLDEVVKELRRIKDKETVRRLVEEVEKRLEEIHKEDEKLVREATERLRRINEENKRIVKEAVDELRRLLKELRKRGVPEEDIRRLEERVEKIREDLERLNRELHETVKRVKKRLEDSNRRLKEEVRKAKRRLDEELK

SEQ ID NO: 5119 - protein, 185 aa, Artificial Sequence; identical to SEQ ID NO: 5118
  Synthetic

SEQ ID NO: 5120 - protein, 185 aa, Artificial Sequence
  Synthetic
SEAEELTERIRKILKEIRELSEKSLRELRELVKTITELSKESVERLKRRVEEVKEELRRIKDKETVRKRLEDVERELERINKENRRLVEEAERRLREINKRNEKLVRDIKRELERMLRDLRRKGVDESKVRELEERIRRAEEELKKRNEDLHREVRKVLKELRDSNKELEKEVKRVKKELRDESR

SEQ ID NO: 5121 - protein, 185 aa, Artificial Sequence; identical to SEQ ID NO: 5120
  Synthetic

SEQ ID NO: 5122 - protein, 185 aa, Artificial Sequence
  Synthetic
SELEKLAEDLERLAEEIKRESDRSLEELRELAERIKRESRKTLEDVKKLLKEVKEVLDREKDKETVERLVRDVEKKLREINKRNRELVEKIARDMRRINEENRRLIEEIRRLAEELLKRLKDEGVDDKKIEDLRRRVEEIIKRLEKSNRDLRKEVEDIKRELEKLNKELHDTIREAKERLDRTTK

SEQ ID NO: 5123 - protein, 185 aa, Artificial Sequence; identical to SEQ ID NO: 5122
  Synthetic

SEQ ID NO: 5124 - protein, 186 aa, Artificial Sequence
  Synthetic
REVEELLKELEKVVRENEKKIEDLHKRNEDVVRKIEKDHRDSEKELKEVADRVRELLERKPNIDELLKRILEELKRIAEEVEKRNEEIIEELKERVRKSREDAKRSLEEHERIIRELERRLEERGVREDDVRRLKKRAEESLKKIEDDLRRDEDRLRRVIEKSKRLVDKLREELERVLREIEKRIR

SEQ ID NO: 5125 - protein, 186 aa, Artificial Sequence; identical to SEQ ID NO: 5124
  Synthetic

SEQ ID NO: 5126 - protein, 186 aa, Artificial Sequence
  Synthetic
SEAEKLKEDLDRVVEKVKEDLKRLHDENRRVAEKNERVIEELHRRNREVTKELEKRLEEKKDDKEELERIIREAEEIVKKSLKRLKESLEEHRKIIEDSKRELRKILERLKKIIEELDDRLRKRGVEEEKVKRLRDAVRKVLKEIEEELERDERAVAKTLRKIEELLKRDKKELDKVRKRLEERLR

SEQ ID NO: 5127 - protein, 186 aa, Artificial Sequence; identical to SEQ ID NO: 5126
  Synthetic

SEQ ID NO: 5128 - protein, 186 aa, Artificial Sequence
  Synthetic
SEAEKIEEELRRAAETAKKRHEDSERELEEAAKTAEERAKRIHDRNERAAEEAKKRAEDDKDADELAKRILEELERIARKSEEDLKRILEELRKIAEDAEKRNREINEELKEIAKRAEDRLRKRGAEEEKATRIKREADEARKESKKLAEKLKKRADEARRKLEEEAKRDKERADRAAKEIEDRAR

SEQ ID NO: 5129 - protein, 186 aa, Artificial Sequence; identical to SEQ ID NO: 5128
  Synthetic

SEQ ID NO: 5130 - protein, 186 aa, Artificial Sequence
  Synthetic
SEVEKLKEDLKRVVERVKRDHERSLKRLEDVAREVEKRIRDLHERSKDVMRRLKDLIDKKKDDTELLERIIRDAARIVKESKDRLREILRDLEKIIEDLKRENEEINRDLRRIVKELKERLDERGVEEDELRKLAEDIKRAEDESRKLVERLKKKAEEVRRKIKKLLEENEEELKRILDRLREAAK

SEQ ID NO: 5131 - protein, 186 aa, Artificial Sequence; identical to SEQ ID NO: 5130
  Synthetic

SEQ ID NO: 5132 - protein, 186 aa, Artificial Sequence
  Synthetic
SEVEELLERLKKVADDIRREIEKLHKRTKEVADEVRKRHEDSRRELEKVADEVRDRIEKDKDADELLERILRELREIIKRLRERNERINRELRRIAEESERELKRILDEARKIVKELRDRAERRGVDSKALKRLSDEIKKIEDEIRKLLEDNRREVEEAEKESRKLVEELERRAKEVEEEIKRARD

SEQ ID NO: 5133 - protein, 186 aa, Artificial Sequence; identical to SEQ ID NO: 5132
  Synthetic

SEQ ID NO: 5134 - protein, 186 aa, Artificial Sequence
  Synthetic
SEVEKILEDLKRVVDEVRKRHKESLDRNKKVADEVRELHERSDKELEDVVREVKDKLEKNKTDKKLLEDIRRELREIVDRVRRDNERINRELKKISDKLDKENEDINRELREIAERVRDKLRKDGIDSKDVKRIEDELRKANEESRRLVEELRKHSEDVNRESRKLVEDLERKLRKAEKDIEDDAR

SEQ ID NO: 5135 - protein, 186 aa, Artificial Sequence; identical to SEQ ID NO: 5134
  Synthetic

SEQ ID NO: 5136 - protein, 186 aa, Artificial Sequence
  Synthetic
SEVEDLLRRLKEVVEEVERLIKKLHKETKEVVDEVRRLHEKSLRELKKAADDARDALRRNKDITELLDTIIRDARRILEELARRNEEINEKLKRIADRSAKRLEEILERLRRIIEELKDELRKRGVEEEKVRRLAEEVKRALDRIKELIKRNRDELKRANEESKRLVERLREEAERILRDLRRKLD

SEQ ID NO: 5137 - protein, 186 aa, Artificial Sequence; identical to SEQ ID NO: 5136
  Synthetic

SEQ ID NO: 5138 - protein, 186 aa, Artificial Sequence
  Synthetic
SEVEKIKKDLEKVADEVRRLHKESLDRLKKVVREVEERLKRLHEESEKVAKDVRRKVEEKKDDKDRLKKILDELREIIERSIRAFKKILDELEEIIKRLREENEEINRRLKEIAEEVEDRLRKRGVDEREVKKIKDDLDRVNEESRRLVEKLERDVTRVRKKIKEELKKNADRLKEVEEDIKRRAK

SEQ ID NO: 5139 - protein, 186 aa, Artificial Sequence; identical to SEQ ID NO: 5138
  Synthetic

SEQ ID NO: 5140 - protein, 186 aa, Artificial Sequence
  Synthetic
SEVEELERELKEVVDRVRKLHRESLERNREVVRKVDEDIKKLHRESEEVAKEVEKLIEEVKDDTDKLRKILERLREIAERSRRTLTEILKRLEKISRELLEENKKINEELKRILEDLIRRLRERGVDERDLKRLEDEARKANKESRDLVREIERHSREAMKRIEEELRRNKERLERVLKKIEDKAR

SEQ ID NO: 5141 - protein, 186 aa, Artificial Sequence; identical to SEQ ID NO: 5140
  Synthetic

SEQ ID NO: 5142 - protein, 186 aa, Artificial Sequence
  Synthetic
SEVEKLLEDLKRVAREVEKLLEDLHRRTDEVMKRNEDDIRRLHEESDRVVKRVKDEIEKKKDDTDRLREILRRLEEIAKKSDEDLRRSLDEHDKIVKKSEEDMERILRELRKIIEDLERRLRERGVDERDLKRLKDEAKRIEDKIRELLERNREKARRTKEKIKKLVERNRRELEKVLDEIRRRIK

SEQ ID NO: 5143 - protein, 186 aa, Artificial Sequence; identical to SEQ ID NO: 5142
  Synthetic

SEQ ID NO: 5144 - protein, 178 aa, Artificial Sequence
  Synthetic
KEVEDVEKRNREVHRRIEKLIEENERRLKEVRDRIRKLVREIEDLNRRVREEVDRRNAPEEVRKELEEVTERSRRMARDIERLLDKATKESRDNVREVKADLKRVTEETRRLAEELKDVEEVLRDLLRRNEEVVKRVEDNLRRDTERLEKVAKDVEKKLREVLKRNKEMVDEVRKKTK

SEQ ID NO: 5145 - protein, 178 aa, Artificial Sequence; identical to SEQ ID NO: 5144
  Synthetic

SEQ ID NO: 5146 - protein, 175 aa, Artificial Sequence
  Synthetic
SEEEDVLRKLEKIVTDLRETLKRMHEDSERIVEESRKHARKVHEDSKKIVRELKKVLDEKRVDRREVERTVRDVIRRSEEVFERNRDLLRRLKEKSEEIARRIEKKLKEVKDRLEEARVPEEVRRRVEEIRREIERELKRNRERLEEVERENRKLLRENKEELDKVEKDLRDTAE

SEQ ID NO: 5147 - protein, 175 aa, Artificial Sequence; identical to SEQ ID NO: 5146
  Synthetic

SEQ ID NO: 5148 - protein, 180 aa, Artificial Sequence
  Synthetic
DDIKRLEDEVRKAAEENKDEVRKNREELKRIKDEIDKLVKDVEETIRRAEDEIRKRVKDKETLERMEKLLREVKKEVDEVVKELDELLRRLEEKSRRVVEENKKLLDTIRKRLKDVSNTEDKRVMEKVLRELKEIVDRSRDHLRRVHEDSKRIADELRRKIEELLKRIKKVVDELREAIR

SEQ ID NO: 5149 - protein, 180 aa, Artificial Sequence; identical to SEQ ID NO: 5148
  Synthetic

SEQ ID NO: 5150 - protein, 184 aa, Artificial Sequence
  Synthetic
DDLRRIEKELKRLADRARKINRESDERIKKLEEEIRRINEDSLRRDRDLARRLREMLKRVRSREVEERLKRITDRSRELNEENERRNRRVEERLEKLLKENEDENEKVIRDLERLVEELIRKEGDTREVKKLKEDLDRVKRELEKLNEEIRDRIRRVKEELKRLNDRSKKHTKEVEEEVERRKK

SEQ ID NO: 5151 - protein, 184 aa, Artificial Sequence; identical to SEQ ID NO: 5150
  Synthetic

SEQ ID NO: 5152 - protein, 184 aa, Artificial Sequence
  Synthetic
SEAEDILRRIKRLADENRRILKEILDRIKELADRVRKINEDSLRTLRKLAEELRRVAEKVRSEEVVRRLERIIRELRRLLEENKRRNEEIIRELRRLLDELRRRSEDTVRKIRKLLEDLIRKKGRSEKAERLEREVRKIEKESREMLKRIEDEIRKVEEDLRRLNEELERDVRRVEEEVKRAAD

SEQ ID NO: 5153 - protein, 184 aa, Artificial Sequence; identical to SEQ ID NO: 5152
  Synthetic

SEQ ID NO: 5154 - protein, 184 aa, Artificial Sequence
  Synthetic
DELDDIRRRLEKLEEEAERINRESEKRDRELARRIREINKRSKEEDRRLAKEVDEILRRVRSEEVKDLLRRITEESKKLNEENSRRNEEVDKESKRLNEENEKTNRDMIRKLRELLKDLIDKKGRTEAVEELRKKIEEVEKKLRRLNEKSKKHTKDVRDELRRLNEDSKRHTDEVKDRLEEATR

SEQ ID NO: 5155 - protein, 184 aa, Artificial Sequence; identical to SEQ ID NO: 5154
  Synthetic

SEQ ID NO: 5156 - protein, 184 aa, Artificial Sequence
  Synthetic
DELRKIREDLKRLATEAREINKRSDEDIKRLTDDVRRINKESLERLKKLADDLRDALRKVRSKDVKRTLEEIIRRARKLVEDDKRTNRKIIEELKELLDRNRRINERIARELERLLEDLIRKKGRTEAVKELEEEIRKVKEELKKLNKEIEDKIRDVERELRETNKRLEDEVRRVEEEVRRATK

SEQ ID NO: 5157 - protein, 184 aa, Artificial Sequence; identical to SEQ ID NO: 5156
  Synthetic

SEQ ID NO: 5158 - protein, 184 aa, Artificial Sequence
  Synthetic
DDAERILDEIRRLTEELREINKESLKKVERLAERIREINKDSLRRDKELADRLRRMLEEVRGEEVKEILRRVDKESEDLNRRNSEINKRVTDEIRKLVEDNSRRNREAEKELKKLMDDLIRKTGRTEKVERIERTIRKVARELEKLNEDIRKRVDEVEEELKKLNKESEDHTRRVREEVRRRTQ

SEQ ID NO: 5159 - protein, 184 aa, Artificial Sequence; identical to SEQ ID NO: 5158
  Synthetic

SEQ ID NO: 5160 - protein, 184 aa, Artificial Sequence
  Synthetic
SELETVEERLKRLEEEIRRLLEKVDRDLDRLADEVRKKNKRSHERNKEIEDRIDKLLKDGKDDETVRRVAEELRRTLRRNEEENRRVAEELERILRELRKVVEDIKKRLEDLLKELKDRVDKEELKKMLRKLEERVKEVTRELEDLLKKAEEKVRRVKDELRRSNKKDEDRLREVEEKLREDSR

SEQ ID NO: 5161 - protein, 184 aa, Artificial Sequence; identical to SEQ ID NO: 5160
  Synthetic

SEQ ID NO: 5162 - protein, 184 aa, Artificial Sequence
  Synthetic
SELEEVRKRAKDIADEDRELNRRVHEENKRLADDVRRKNEKSHRDNERIATELRELLRDGKDDRVVRRVEEELKRTLEKNKRDNDRVVEDLKRTLDRLKELNDRSVEKLERLLKELEDRVDKEELKKLLDELRKRVEDVKEESKRSLDRDRRELERVKKELDDSNDEDRKRIEEVIKEVRDRSK

SEQ ID NO: 5163 - protein, 184 aa, Artificial Sequence; identical to SEQ ID NO: 5162
  Synthetic

SEQ ID NO: 5164 - protein, 178 aa, Artificial Sequence
  Synthetic
DEEREVKERLKELIERLRRLHEESLRELKRIADELRRLHEESHKRNEDIARELERLLAEVKDKKVVEELVKRIIERLEKSLEDDRDLSRRAIEELKRLLDEDRKLSEDAKKRLKDLLDTVPRIDELERRVRKVEEESKKLHEEIRKRIEEIERESRKLHEDDRRRIEEVLKRIKDAVR

SEQ ID NO: 5165 - protein, 178 aa, Artificial Sequence; identical to SEQ ID NO: 5164
  Synthetic

SEQ ID NO: 5166 - protein, 178 aa, Artificial Sequence
  Synthetic
SDEDRLREEAKKVADELRKLHEESHKRNKEIADELRKLHKKSHDDNKRIADEITELLKRTKDKRTLEKLIEEARKKLEESLRRDAEISKKIAEDLERSLREDAKISEDIRRRLKKLLEEVDKIEELRDRLRRVEEESRELHKRDREEVERIRRESEKLHREDREDVKRIEKKLRDDAR

SEQ ID NO: 5167 - protein, 178 aa, Artificial Sequence; identical to SEQ ID NO: 5166
  Synthetic

SEQ ID NO: 5168 - protein, 183 aa, Artificial Sequence
  Synthetic
DEAEKVLEELRRRAEKVLREVKKVLEDHKRLADELRKELKRVSDENRDSLRRLLEEIDRNKELKESVKKILDENRESSERLEDTVRKILKESKDRTKELEDKLETILEDLRRKLEDVERRGVLDEDLLRRLRELLDEIRKELRDLIRKLRELNDRVERDLRRIIRENRELVRRAEKELEDRTR

SEQ ID NO: 5169 - protein, 183 aa, Artificial Sequence; identical to SEQ ID NO: 5168
  Synthetic

SEQ ID NO: 5170 - protein, 183 aa, Artificial Sequence
  Synthetic
DEAEEVLERIKDLARKNEEKNRRVLEEHEKLIRESEERDEKSSRDNKRSVDEIRDIIRRKRESKDELKKILDDNKRSSEENMRRVKRINDESKKRTDELEEESRRVLEKVEKEVEDLARSGLVEEEKIKRIRDELARWAEKIKKTIDELRKLNKEAHDRNRKTIKENEDLVREAKEDLERKTT

SEQ ID NO: 5171 - protein, 183 aa, Artificial Sequence; identical to SEQ ID NO: 5170
  Synthetic

SEQ ID NO: 5172 - protein, 185 aa, Artificial Sequence
  Synthetic
SEAEEVLKEIKKLADELRKKNRESVEKVRESSKRLKDEIRKVLEDIKRLAEKLREILREMKDKDTIRKTIEDITEKLKELLDRLRERIEKAKRDHERLVERNRRENDKIRKDLERLLEELRKRGVDEKLLRELEKLIRDIKRELDRSDEKLEELVRRSAKELDDLLDTLREIIERIKRDLDEKLR

SEQ ID NO: 5173 - protein, 185 aa, Artificial Sequence; identical to SEQ ID NO: 5172
  Synthetic

SEQ ID NO: 5174 - protein, 185 aa, Artificial Sequence
  Synthetic
REAEEVLKRIKELADEIRKRNRESLERIRKSSEDLKRENEDSIRRVRELIDTLRRRLEKEKDKKTIEEIVKEIDKRLKELLDRNRRRNEEAVKEHEELLKENRKENEEILRDAERLLRDLERKGVPKELVDRIRDLIRRIKDELKESDDRIKELIDKSKEDLDKSDEDLKREIDKAREELAKAIK

SEQ ID NO: 5175 - protein, 185 aa, Artificial Sequence; identical to SEQ ID NO: 5174
  Synthetic

SEQ ID NO: 5176 - protein, 182 aa, Artificial Sequence
  Synthetic
DEVEELLKEVEELAREIVERLEKNLRDTKKLIDEIEEYARRNEERTRKLIEEAERLARRGDKSDDLKREVEKLLKESEDNVERLIRELEKLLEESRRNVKRIIDELRKRLDDVRRRLEERRADEELERRLRRLLEELERRLKRLEDEHRRLVEEVRDKLRKIEETHREIVERVRRTLDEEKR

SEQ ID NO: 5177 - protein, 182 aa, Artificial Sequence; identical to SEQ ID NO: 5176
  Synthetic

SEQ ID NO: 5178 - protein, 182 aa, Artificial Sequence
  Synthetic
DDARRLLEEVKELLERSKRHLTKNLEDTRRLIKELLDYARRNLEDTRRLIEEVLDLLKRGRRSDELMRRLERLLRESEENVKRLIKALRDLLKESKENVDRNIKRSEELLRRVEELADRRRLPEEVKETLKRLLDEIRRENEKVARDHKKLVDDVERELEDIERRHKELVDRARKVAEDEKK

SEQ ID NO: 5179 - protein, 182 aa, Artificial Sequence; identical to SEQ ID NO: 5178
  Synthetic

SEQ ID NO: 5180 - protein, 182 aa, Artificial Sequence
  Synthetic
SDAERILDEVRKLVEDSKRHLDENLKRTAELSKRSKEYAEENLDRTRRLAKEAADIARRGDKADEVLTRLEELLERSERNVRRLIEENEELLRESEENVRRNIKESEELLRKVERLIDESRLPEKVKEDLKRLLDEIRKENKRAEDAHRDLARRSREELEKAERKHKELVDRIRKALEEIKK

SEQ ID NO: 5181 - protein, 182 aa, Artificial Sequence; identical to SEQ ID NO: 5180
  Synthetic

SEQ ID NO: 5182 - protein, 182 aa, Artificial Sequence
  Synthetic
DEVRKLLKDVRELAREIERRLEENLRRSEELLKRIEDYLRKNLEDTRRLIEEVKELADRGDKVDKLLEDVERLLRESEENVERLIKELEKLLRDSEESVDRIIRELEDLLRKVEKRADDNNLEEEFKDRLRRLMKRIKERLEDVKRRHKELVKKARKSLEEVKRRHRKLVEDVRRTLEEEKR

SEQ ID NO: 5183 - protein, 182 aa, Artificial Sequence; identical to SEQ ID NO: 5182
  Synthetic

SEQ ID NO: 5184 - protein, 182 aa, Artificial Sequence
  Synthetic
DEARKILEDLKRLAEESIRHLEENLRRSEKLVEDVERYAEENLERTKKLVRDVDEIIRRGDNVDKVAKELRKLLKESEDNVKRLIEELERLLRESEESVDRNITKSEEILRRVEELVDKNRLPEEVKKRLEDLAREIRKANEDVKRRHKKLVDDVRKRLKEIEKKHRDLVRKIEEKLRDARK

SEQ ID NO: 5185 - protein, 182 aa, Artificial Sequence; identical to SEQ ID NO: 5184
  Synthetic

SEQ ID NO: 5186 - protein, 182 aa, Artificial Sequence
  Synthetic
SEAEELLKTVRDLVEKSRKHLKENLKRSEELSRKSKEYADKNLERTKRLVKTVADILDRGDRTDEVIKELRRLLKESLDNVRRLIETNRRLLEESKKSVKRNIDESERLLREAEEKLRRDRVDKKLEDELRRLVEEAKRENDEVRREHKRLVEDSERKLEKIERDHRELVDRVEKEMREKKR

SEQ ID NO: 5187 - protein, 182 aa, Artificial Sequence; identical to SEQ ID NO: 5186
  Synthetic

SEQ ID NO: 5188 - protein, 182 aa, Artificial Sequence
  Synthetic
SDVERILEDLDRVVKESKRHLEENLRRSEKLTREVEEELKRNLKESEELVKRVEDIARNGDRVDEVLERLKELLKRSERTVEKLIDDLRRLLDESRESVDKNIKESEEILRRVEEDLERRNASEDAKRRLRELVEKVKEDNKKVKEEHDDLVRKVERRLEEIRKRHEELVRRIRRRLEEEKR

SEQ ID NO: 5189 - protein, 182 aa, Artificial Sequence; identical to SEQ ID NO: 5188
  Synthetic

SEQ ID NO: 5190 - protein, 182 aa, Artificial Sequence
  Synthetic
SDVEELLRRLEELLKESEKHLTENLRRSEKLVRDSKRHLDENLKRSKDLAREVVRLAEKGDRVDRLKEDVERRLRKSEETVRRNIEESERLLRESEKSVKDNIRESEKLLRDVEKKLDDRNIDRKVKERARELVERIKRRNEKVERDHEELAREVRERNKEVEKRHRDLVEELRRRLDERKR

SEQ ID NO: 5191 - protein, 182 aa, Artificial Sequence; identical to SEQ ID NO: 5190
  Synthetic

SEQ ID NO: 5192 - protein, 182 aa, Artificial Sequence
  Synthetic
SEAEELLERVKKLTDESLRYLEENLDRLRKLVKESEDHLKDNLRKSEKRVREVIDLARRGDTTDELTERVEELLKRSEETVRDNIRKSERLLRESKENVERLIRDNERLLREVDEELKRRNLDKDMEDKLRRLVEESRRALEEVLKRHEDLVEEVRKSNDKVRKEHEELVKRVRDALREIKR

SEQ ID NO: 5193 - protein, 182 aa, Artificial Sequence; identical to SEQ ID NO: 5192
  Synthetic

SEQ ID NO: 5194 - protein, 181 aa, Artificial Sequence
  Synthetic
SVEERLEKLLKEAEERLRESEDRTRKLVEEVRRELEKLKKRSKELADRVREELRKFPKSEDLDRILKELEEVVKRVEDTHEESRRRIEDVVRKVEKKHEESRRELKRVADEVRKRLEEKKTDEEELEKILDTLRRIAEKLVRKNEDILRRLKEIVKKVIRENEEILRRLEEIAKELAKRLE

SEQ ID NO: 5195 - protein, 181 aa, Artificial Sequence; identical to SEQ ID NO: 5194
  Synthetic

SEQ ID NO: 5196 - protein, 181 aa, Artificial Sequence
  Synthetic
SLDEEAKRVVEEVRKRLRESKERSREIVERARRELERLKEESKRLADRIREEVKKFRDDEELERILRELEEVLKDVERKHRESKKEIEDVVERIKEEHEKSERELEEVIKRIDEALERNKDDTELVKRLLDDLRRIIRELEEKNRALNETLRKIVEEAIKKNREILEELREEVDRVRKRLK

SEQ ID NO: 5197 - protein, 181 aa, Artificial Sequence; identical to SEQ ID NO: 5196
  Synthetic

SEQ ID NO: 5198 - protein, 175 aa, Artificial Sequence
  Synthetic
SEVEKVLREAREILKKNKRENEEVHKKSKEIAERNREKNEKVHRDSRKIIEELKELADRGKDARELDEAVKRLADENRRVNEDSERDIKRLAEENRRVNDESRKDIERLVRKLEKDGVDEDEARKLVKEVRETLEDSARRDEKLIEDLKRTLDESKKEDDKLIEELERRLREAER

SEQ ID NO: 5199 - protein, 175 aa, Artificial Sequence; identical to SEQ ID NO: 5198
  Synthetic

SEQ ID NO: 5200 - protein, 175 aa, Artificial Sequence
  Synthetic
SEVEKVLREAEEIAKKNEEDNRRVNDRSEKIIEENERRNRKVHKESEDIVRDLERLAAEGKDARDLERKARELVKRNKEVNDTSRRDLERLVKENRDVNKESREDIERLVKELEKAGVDEEEVRKLVEKLERLLEKSKRDDEESIKKARELLRRSEEADKKLIREAEEAIRTRKK

SEQ ID NO: 5201 - protein, 175 aa, Artificial Sequence; identical to SEQ ID NO: 5200
  Synthetic

SEQ ID NO: 5202 - protein, 186 aa, Artificial Sequence
  Synthetic
SRLEELLKKAKKLVEDVEDTNRKMLEKLRKLADDLRRINKRVLDELERLARELEDIARKIRDKDTLKDILRRMEDELRRLLKKLEEDNRRIIEELRRLLKEIHDTNREVLERLKELLRRVKEEVKEAEEVLRELKKLLDEAKKKLEEIDKRLEDELRKIEDDLRRSNERVRRLLEEVRRRIKEETD

SEQ ID NO: 5203 - protein, 186 aa, Artificial Sequence; identical to SEQ ID NO: 5202
  Synthetic

SEQ ID NO: 5204 - protein, 186 aa, Artificial Sequence
  Synthetic
DELEEMLKRLEKLARDLDRINKEVLRRVEEEVRKLEEENEEVLRTLRRLAEEVERILDEIEDKKTLEKIIRDIEEELRRLLRTIHERNKKALDELRELLERLRRTNEEIKKTLRKLIEDIREEVKEAKEVLDKLEKLLEDIARELEKSNRRLEELLKEVERRLREMDERLRKELEEVKRRLEEKRR

SEQ ID NO: 5205 - protein, 186 aa, Artificial Sequence; identical to SEQ ID NO: 5204
  Synthetic

SEQ ID NO: 5206 - protein, 186 aa, Artificial Sequence
  Synthetic
SRVEKVLEELKELMKELDDSNRRVLEELERLVRENTRRNEEVLRRVRELAERLKDELDKIKDKDTLDKRLKEIEKELRKLVEDLRRLNEETIKTLEKLLREVREENERVIEELKRLLRELKEEVKEAEELLRRAKELLKRIKERLEESDRRLKRLLDEARKRSEDIIRALEKLLRDVKRELEEKLR

SEQ ID NO: 5207 - protein, 186 aa, Artificial Sequence; identical to SEQ ID NO: 5206
  Synthetic

SEQ ID NO: 5208 - protein, 186 aa, Artificial Sequence
  Synthetic
KDAERLFEDLRRLVDENREKNEKVLREIEERVERLERENEKVLRDLEDLIRRVREEIDRTKDKETLRRIIEEILRRLAELVKTLRERNKRVLEELEKLLRKVRELNKETIRRLEELLERMRERVKEAEEMLRELKKLLDRAREESRRIIEELERTLEKVKERLDRTDKEIEELLKRAEEELREKER

SEQ ID NO: 5209 - protein, 186 aa, Artificial Sequence; identical to SEQ ID NO: 5208
  Synthetic

SEQ ID NO: 5210 - protein, 186 aa, Artificial Sequence
  Synthetic
DDLERLLKEVKERIDEVKRRNEEVLKRLRELVKRNKEKNDRVLREAEKLMKKLRDIVRKIKDKDTLRRILEEIKKRLKELLDTVRELNKRTIEELEKLLRDLDRENKRIREELEKLLRDIKEKVKEAEEVLRRLRELLRTAERELEESNRRAEELLKDARRKSEEIIRRLERLLEEVDRDIKRALK

SEQ ID NO: 5211 - protein, 186 aa, Artificial Sequence; identical to SEQ ID NO: 5210
  Synthetic

SEQ ID NO: 5212 - protein, 185 aa, Artificial Sequence
  Synthetic
DDVRELLRTLRKISEDTLRRVEEINRKLERLSRETLKRVEDINRKVKELMEEVLKELDRIKDKKTLKDVIREAKKRLDETLERLERVIRESEKRARDTLRELEKVIEDSRKTVEELKKELERRGVEEDALRELKRLVDDNETKLRRLRDTHRELLERNRTELEKLKRTHKKLVDEAEEELRKKDK

SEQ ID NO: 5213 - protein, 185 aa, Artificial Sequence; identical to SEQ ID NO: 5212
  Synthetic

SEQ ID NO: 5214 - protein, 185 aa, Artificial Sequence
  Synthetic
SDVERLLEKLRDLSRRTVRELERINEEVREIIKTLKKELDRTNKELRDIIEEIKKELDKIKDKRTLEKIVDRLDKELKRSLEEDRKVVEDAKRLLDDTLRKLEEVIRRSKELLERILRELERRGVDEKLLDELRRLLEENEKTLEDVRRTHEELVKRAKRELEKNIEEHERLVRDVKEKLERKIR

SEQ ID NO: 5215 - protein, 185 aa, Artificial Sequence; identical to SEQ ID NO: 5214
  Synthetic

SEQ ID NO: 5216 - protein, 185 aa, Artificial Sequence
  Synthetic
SDAEELLKEAREVSKRTKDTLDEINKDVKRISEETKKRLKKTNEEIKEIADRLRKELERIKDKKTLEDVVREVERRLEDSLRRDRKIVEESRRRLKETLDRLEKVIRDSERRLKEILEELERRGVSEDILRELKKLVDDNRKTLKEVLETHEELLRDNSRKLERNVERHAKLVRDIKEELKETTR

SEQ ID NO: 5217 - protein, 185 aa, Artificial Sequence; identical to SEQ ID NO: 5216
  Synthetic

SEQ ID NO: 5218 - protein, 185 aa, Artificial Sequence
  Synthetic
SDAERLLKEVEEIARRLEKKMRETNKEVDRIVKEIEDDARRLNKELREIAERIKDELDKIKDKDTLRELVRRIKKELDRTLKELEDVIKRLKDLLKETLDRDKELVDRAARRLEKILEDLERRGVDEKVLKELKRRLEEIKKKLDDNLRRHKKKVDDVARELEKIVKTHRDLVEEIRRRLRKKEE

SEQ ID NO: 5219 - protein, 185 aa, Artificial Sequence; identical to SEQ ID NO: 5218
  Synthetic

SEQ ID NO: 5220 - protein, 185 aa, Artificial Sequence
  Synthetic
SDAERLLEELKRISEETKRRLAETNKKVKKIMKELTETLTETNKKLKKIIDDLRDRIDKIKDKETLRRVLDEADKRLRKSLREDEELVRRAEKRLRDTLREDERIVRESEKRLRELLERLERRGVEERVLKELRRLLERNREELRRNKEKHKELVERIKRRLEENKERHKRLVDEARKELKEKEK

SEQ ID NO: 5221 - protein, 185 aa, Artificial Sequence; identical to SEQ ID NO: 5220
  Synthetic

SEQ ID NO: 5222 - protein, 185 aa, Artificial Sequence
  Synthetic
KDAEELLKTLERLSRETKRRLERTNRELKEISKETEKDLERTNRKLKEIIDRLREELDKIKDKRTLEKLMTEAKKTLKKSLEEDRDIVRKSDEKARRTLEEDKRIVEESEKRVKKLLDDLRRRGVSEEMLRELRRLVEENKKRLRENIRRHERLLEENRRKLEKNIRDHERRLEKADKDLEDKRR

SEQ ID NO: 5223 - protein, 185 aa, Artificial Sequence; identical to SEQ ID NO: 5222
  Synthetic

SEQ ID NO: 5224 - protein, 185 aa, Artificial Sequence
  Synthetic
KDAERLLEEARRIVKEADDILRELDEEVRRIVEKIKRDAERTNEEIREIAKRIRDEIERIKDEKALEKLLEDLRRKLEESLRKDERLVKEAARLLKETLEDLERVIKELADLLERILREIEKRGVSEDVLRELRKLVEDVKRRLKEVADHHRELVRRAEEELKKNRDEHERLVREIEKELRKARE

SEQ ID NO: 5225 - protein, 185 aa, Artificial Sequence; identical to SEQ ID NO: 5224
  Synthetic

SEQ ID NO: 5226 - protein, 185 aa, Artificial Sequence
  Synthetic
DEAERLLERVKELMERLTEEARRTNETLREIVERAERRLRELDERVRKIAEEIRRRLEKIRDKDTLRKLVEEIEKLLRDSLRELEKVLKELKDLLDRTLREDERLVREAEETLKELLRELEERGVDEKVLTKLRKLLEDIRRRLEKNLKDHEELVRRVEEKLKRVREHHEELVRRIKEELDKAEK

SEQ ID NO: 5227 - protein, 185 aa, Artificial Sequence; identical to SEQ ID NO: 5226
  Synthetic

SEQ ID NO: 5228 - protein, 187 aa, Artificial Sequence
  Synthetic
RDAEELLRTMEEITRRVKKELEDLLRTDEELSERVKEEARKLDEKLKELARDVTEKARDIKKGPEEKLRRIVEKLRRELEESRRELEKLIRESKKLNEDTKREIDKIIDDLRRLIERIERELDERNVDDEVKKELKRLIEEVRDRLKKVKDTLEKLIKENEDELRKVEEHHEKLLREIEETLERMRK

SEQ ID NO: 5229 - protein, 187 aa, Artificial Sequence; identical to SEQ ID NO: 5228
  Synthetic

SEQ ID NO: 5230 - protein, 187 aa, Artificial Sequence
  Synthetic
EEAERLLKKAEDLSRDTARKAKELLEEDEKLVRDAEKKARELDRELEKLAEEAARAATRAKKDDKRKLDKIAKEAKELADRSLERLRKLAEDLERLNEETLRRLEELIKENKERADRALEELEKDNAPEEARKRAEDLIRESEKRARDAKRRAKELIDRSRKSAKEAKEHHEKLIKEARDELEKAKK

SEQ ID NO: 5231 - protein, 187 aa, Artificial Sequence; identical to SEQ ID NO: 5230
  Synthetic

SEQ ID NO: 5232 - protein, 187 aa, Artificial Sequence
  Synthetic
DEAEKLLRELEKLSRETEKRVREIIKKDRDLSEEVRRRAERLDDELRKLVEDAERELRRIKSDDETKLDEIVRELERLLEESLRRLEELVKELDRLNKETLEELETLVRENRKLAKEVKDRLDEQNVDDKVRKRLEELIRESDERLKELTKELRKLIEDNRRELEKIIRHHKRRVDEVRKRMTELRR

SEQ ID NO: 5233 - protein, 187 aa, Artificial Sequence; identical to SEQ ID NO: 5232
  Synthetic

SEQ ID NO: 5234 - protein, 182 aa, Artificial Sequence
  Synthetic
SEVEDLLRRLEEIVKRNDDELRADEERTRKIIKENKETLDRLLEDLKRILRELEKIVRDKGNDRDVVRELRKIVREAEEKLEEVTRRSRESLKDLHRRNRESIRRSEESVEKIKRDVRRLELSEEAKRRAEEKLKRLEERSREIERRLKKLNEELKRISDEVEKTAREILERIKRRIEEEER

SEQ ID NO: 5235 - protein, 182 aa, Artificial Sequence; identical to SEQ ID NO: 5234
  Synthetic

SEQ ID NO: 5236 - protein, 182 aa, Artificial Sequence
  Synthetic
SRVEKLLDDVRKILEDNERRLRDDMRRTEEIIRKNKRDLERLKERHEEIVKRLDEIIKKEGTDERVVTELRELLRRVHEELKEVIRRSEKSLEELHRTNERSIRKSEKSLEDLRETLERLDLSEDARREAERLLKEVEDTSREAEKRLRELNEELERRSRKVEEELKKSDEELKRRIEEAER

SEQ ID NO: 5237 - protein, 182 aa, Artificial Sequence; identical to SEQ ID NO: 5236
  Synthetic

SEQ ID NO: 5238 - protein, 183 aa, Artificial Sequence
  Synthetic
SIEDRLRKIVRDLEKVLRDLKREHDDVVRELEKRLRDIEERHRELVEELKKRIEEIERERDTEDVRRLKEEAERLLEEARRNLKRLEEEVRRLLKRSAETVKELVERVKKMLDEVKTKLRKIDKEKDLEELLKELEDIIREVRKRAKENLDRTRKLIKDIEDYLKKNLDRVRKLIEDITRALK

SEQ ID NO: 5239 - protein, 183 aa, Artificial Sequence; identical to SEQ ID NO: 5238
  Synthetic

SEQ ID NO: 5240 - protein, 183 aa, Artificial Sequence
  Synthetic
SIEERLREVERRLREDLKRLEKAHRDIVRDIERTLRKVEEDHRRVKEKLKRTIEDVERRRDTEDVRRLVETAKKLLEDSDRTVERLRRELERILDEVRRNVEKLKRDVKKRLDEVRRRLEDIRDEKELEKLLRDLKRIIDEVRKYATRNLEELKRVLKRVKEEAEKNLERTERLIEEIRRRAE

SEQ ID NO: 5241 - protein, 183 aa, Artificial Sequence; identical to SEQ ID NO: 5240
  Synthetic

SEQ ID NO: 5242 - protein, 183 aa, Artificial Sequence
  Synthetic
SIEETLREIVKDLERVLEEIERRHREIKKELEDILRELKKRHEDVVREAEKELRDAKRRRDTEDVRRLIKTLEDLLRESEENVKKLREEVKKTLKESEDNVRRLKDEVRKLLKEVEDKLKDIDKREELKRLLDELKKLIDRVREEAKKNLDRSKKMIEDVERYARENLRRTKELIDDVKEKLR

SEQ ID NO: 5243 - protein, 183 aa, Artificial Sequence; identical to SEQ ID NO: 5242
  Synthetic

SEQ ID NO: 5244 - protein, 183 aa, Artificial Sequence
  Synthetic
KIEEEVDKVRRTLEKELKEIDERHKRIVEKLREELKEAEKRHEELVKRAKEELDDVKRREDSERVRELIKELKKLLDESRENMKKLREDVEELLRRSDKSLEDLRRKVEEDLERVRRRAEEIRDEDLLRKLLEELDRIRKEVRERLKRNLDRLKKLIDEVREYLERNLRRTKKLIDRVREDAR

SEQ ID NO: 5245 - protein, 183 aa, Artificial Sequence; identical to SEQ ID NO: 5244
  Synthetic

SEQ ID NO: 5246 - protein, 183 aa, Artificial Sequence
  Synthetic
DVEEELRELIERLKEVLDRLREESKRVIKELRDTLRELEERSRDIIRKLEETLRDVARKSTDKDKLDEVREKIDRLRRENKEVNDDLRKKIEDIEKRNRDVNRDLERKVRELEKELRDMSRNKDDEFLRRVLERAKKIVRKLEEDARRVLEETEDLIRRLREKAERVHEKTKKIIKEITEELK

SEQ ID NO: 5247 - protein, 183 aa, Artificial Sequence; identical to SEQ ID NO: 5246
  Synthetic

SEQ ID NO: 5248 - protein, 183 aa, Artificial Sequence
  Synthetic
SVEDALRKLIEELKRVLKKLEDDSRRIIEELRKVLKDLEDRSRKVIEEIKDDLRKIAEKSTDEDKLRKLEEKVRRLMRRNERVNRELKKKVEKLEKENEDVNRELKKKVDELVKELREVSRDRREEVAKRLLDKARDIVRTLKEEAERVHERSRRIIEELRREAEEVLEETRDILRRLREEAK

SEQ ID NO: 5249 - protein, 183 aa, Artificial Sequence; identical to SEQ ID NO: 5248
  Synthetic

SEQ ID NO: 5250 - protein, 183 aa, Artificial Sequence
  Synthetic
SELEKVLEKLKDLLRKVREKNERVLREVEERTRRVKRDLERVLKEAKDILRKAKKLADDGKVSERSLREILKKLKERLDRVIKKWEDISRKVSEDLEEVIKDDKRTVDEAKEELKRVLDKVDKKEEIARRIKKVLDDWKRVSEESKRRIEELLKRDKEELEKIKRAAKKVIDELKRLLEEAER

SEQ ID NO: 5251 - protein, 183 aa, Artificial Sequence; identical to SEQ ID NO: 5250
  Synthetic

SEQ ID NO: 5252 - protein, 185 aa, Artificial Sequence
  Synthetic
SRAEEILKRLEELIKRLKEENDRVLEENKRLIEELEKKNRDALRRIEELLKELKDIARRIEDKDTLRKILEDVRRTIEELVKEIEKENERVRRESKKLSEELRKKNKDVNEEAKKLVDDLRRDEGDEDLEEKLRRLLDELRKISEEVEERSERSNKELEDVSEDSKRKLRKILEDLRDLLRRTEK

SEQ ID NO: 5253 - protein, 185 aa, Artificial Sequence; identical to SEQ ID NO: 5252
  Synthetic

SEQ ID NO: 5254 - protein, 185 aa, Artificial Sequence
  Synthetic
SRAERILEEMERLIEEVRKENERVLRENRRLIKELKEENERILRELKRLIKEAKEIVERIRDKDTLRKILREVLKRLKELLDELKETNERVLRESEELSKDLRRKNEEALRRLRKLVKDLRDDEGDEEVDERLERLLKTAEDDSRRSDKRSEDSNRELRKVSEDSRKRLEELLKDAERKLREDEK

SEQ ID NO: 5255 - protein, 185 aa, Artificial Sequence; identical to SEQ ID NO: 5254
  Synthetic

SEQ ID NO: 5256 - protein, 185 aa, Artificial Sequence
  Synthetic
DDVDRILEELKRLVEENRKRNEDIERELEKLIKEVEDSNRTMLERMEDLIRELRDIVRRIKDKDTLDEILRRIREELRRLLEELKKENERALEELKRLLDELKRTNKRSLEELKKLLDDLRRREGDEDAERRLKELLEDAKRVSDEVLRRLTELLKKAKDVSDESRERLRRLLEDLERDLKRERT

SEQ ID NO: 5257 - protein, 185 aa, Artificial Sequence; identical to SEQ ID NO: 5256
  Synthetic

SEQ ID NO: 5258 - protein, 185 aa, Artificial Sequence
  Synthetic
SDAERLLRELERLVEENRRRNKKVLDDNERLVEKLEKSNRRALEELKELVDRLEDIARRIKDKDTLREILKRIEDELEKLLRRLEEENKEVRRESEELSKRLDDINRRSLEELDRIVKDLERREGGERVREELERLLEEAKRDSDEVRERSKKSNKKLEDVSRKSKKDLRDLLKKARDILKETER

SEQ ID NO: 5259 - protein, 185 aa, Artificial Sequence; identical to SEQ ID NO: 5258
  Synthetic

SEQ ID NO: 5260 - protein, 185 aa, Artificial Sequence
  Synthetic
SDAEEVLKELERLIREVEERNKDILRKAKELVRDNERKNREVMERLKKLIEDLKKIAKEIEDKDTLRKILEEILRRLKKLLEDAERTNEESLKELRRLLEELRKRNKTILDELRRLLRELKEREGGEEVEKRLKDLLREAEEVSRRSEERLRELLKELEDVSREVKRRLERILEELKRILDEVEK

SEQ ID NO: 5261 - protein, 185 aa, Artificial Sequence; identical to SEQ ID NO: 5260
  Synthetic

SEQ ID NO: 5262 - protein, 176 aa, Artificial Sequence
  Synthetic
DEVEELTERLKRVLEDNRRTAEEVKERTRRVIDKVRRDYEELEKRLKKILKEIEDLSRENRTDSRELEKTVREVEKELRREDKRLKDEIDRVREENEDMNKKSRDHVEEVARELEKRGIDEDTVRRLIKEAKDDNDRMEEENRRLIRELEEVSKRAHKRLRELIRRIEELLRREET

SEQ ID NO: 5263 - protein, 176 aa, Artificial Sequence; identical to SEQ ID NO: 5262
  Synthetic

SEQ ID NO: 5264 - protein, 181 aa, Artificial Sequence
  Synthetic
SAEEEVRKIKREIEKVLRESEREIERVEKEIRDVLRKSEREIERVKREVDKVLEEVRRAGIEEEKLRELEREAREVIKRLRRIVEESAKHLEKVVRELKEALKRSAEHLKKVIDDLKKALDDNGRLEDLLREVKKAIEKNEKDNRDVLREVEEKIRRDEKRNKEVLEDAKRKIEELKKRAD

SEQ ID NO: 5265 - protein, 181 aa, Artificial Sequence; identical to SEQ ID NO: 5264
  Synthetic

SEQ ID NO: 5266 - protein, 181 aa, Artificial Sequence
  Synthetic
SAEDAIREVERKAREVLKRSKEEIDKVVKKAEEILKRSKDEVKKVADEIRRILEEVRRAGADEKKLRDLARELEEAIRKLDEIVRRSEKHLRDVVRKLEEVLKKSAEDIKRVVRELREAAKRKRRLEDVLRRIEKIIRDNAEENKRVLEEAEEVLKKDEKDNRDVLEELKKILEELKRKAD

SEQ ID NO: 5267 - protein, 181 aa, Artificial Sequence; identical to SEQ ID NO: 5266
  Synthetic

SEQ ID NO: 5268 - protein, 181 aa, Artificial Sequence
  Synthetic
SVEEAVKRLADEIRKVLERSKEELERVAKEAEDVLRRSREELKKVADEVRKVLDDVRRAGLDEKKVRELAEELKELIERLKKIVEESAENIKKVIKDLRDIVKRSAEKLEKVIRELEKALRDKKPLEDALRRLKEIIDENKRENEEVLKRAREIIEENKKRNKEVLDEAKEIIDRVREKAR

SEQ ID NO: 5269 - protein, 181 aa, Artificial Sequence; identical to SEQ ID NO: 5268
  Synthetic

SEQ ID NO: 5270 - protein, 181 aa, Artificial Sequence
  Synthetic
SAEDAIRKIAEDAKKLLEDSRRELRRVVEKVKRLLEKSKEDLDRVAEEVKKVLEEADRAGLDKEKLKRLKEEIEEVIKRLKEIVERSEKKLRDVIKKLEDIVRESAKNLKEVIDKLKKLADDKKRLEDAVREVREVLKKNKEDNDRVLREAEEVLKRNEEENRKVLEEAKRIIDELKKRID

SEQ ID NO: 5271 - protein, 181 aa, Artificial Sequence; identical to SEQ ID NO: 5270
  Synthetic

SEQ ID NO: 5272 - protein, 186 aa, Artificial Sequence
  Synthetic
SVREELTRVKKRARDVLERSREEAERVAKRAEEVNRESEREIERVLEEVERILEDIREKVKEERAEEILRTLAKEVEDLKRELREVLRRSKEETEKLIKKLEEVLKRSEDDIRRLARELDEADRAKDEEAVRDVLRKVREIIRRNRKENEEVLRDVERLIRELEERNRRVLKKAKEILKRIRDKAE

SEQ ID NO: 5273 - protein, 186 aa, Artificial Sequence; identical to SEQ ID NO: 5272
  Synthetic

SEQ ID NO: 5274 - protein, 186 aa, Artificial Sequence
  Synthetic
SVEEELEKVKRKAEKLLEDSDREIKRVTKKAEKVLEDSRKAVEEVEKEVKEVLDEIRANVREEDLKRILEELTEKIKRLTDRLREVLKDSERNVRELKKELERMLEESKKDIEELVRELEEVSRVSDEKKAREVLKKVEDRIEENRRRNEEVLEKAEKIIEDNRRKNKTELDKVKEIIRRIREEAR

SEQ ID NO: 5275 - protein, 186 aa, Artificial Sequence; identical to SEQ ID NO: 5274
  Synthetic

SEQ ID NO: 5276 - protein, 184 aa, Artificial Sequence
  Synthetic
SAEDALRKLKEDSKRVNDESRREAERLKREIEKINEDSDREVEKVKKKIEELLEKVERDGVDKKDVDRLRERVEEIKRRLEEVRRDSKRLVEEMRKTLEEVLERSRKISEDIARRLDRVKDEVKDERELKRVLEEVERLIEKVKTDNKRVLDEIRKILEEIERKNRKVLKEVEDLLKTMEDEAR

SEQ ID NO: 5277 - protein, 184 aa, Artificial Sequence; identical to SEQ ID NO: 5276
  Synthetic

SEQ ID NO: 5278 - protein, 184 aa, Artificial Sequence
  Synthetic
SLEEAVREVERKAKKVNDDSREEVKKVKKESKDVNKKSEDDARRVVEEIKKILKRIAEKGVDEEILKRLEDTVRKIEKELRDVLKESRDKTKEIEERLDKVLKESEEMVDEIRKRLEEVTRRVKDERLAKKVLDEVEKIIEDIKRRNEEVLRRVREDIKRVEEENKKVLKRVKERVEEMRRRAD

SEQ ID NO: 5279 - protein, 184 aa, Artificial Sequence; identical to SEQ ID NO: 5278
  Synthetic

SEQ ID NO: 5280 - protein, 184 aa, Artificial Sequence
  Synthetic
EMEDEARKVIKKIKEVNRRSREESEKLSRKSERVNRESKRASEELREEIRRVLEEIRRKGVDEKILTDLERIIEEAERENKRVNEKSEEITRRIRERNERVNRRSEKEVEDIKRRLEEVKRRVKDRRKMKTVLDEVEKEIRRIEEENKKVLKESEDLIREVEKENREVLERTKRIIDEARKRAD

SEQ ID NO: 5281 - protein, 184 aa, Artificial Sequence; identical to SEQ ID NO: 5280
  Synthetic

SEQ ID NO: 5282 - protein, 184 aa, Artificial Sequence
  Synthetic
SVDEAVKEVEDRLRKVNEESTRESKKVVDKARDVNRKSEEASRELEDRIEKVLTDIRRKGVDEKKLKKLRDIVREAKKRNDEVNKESRDIVRELTDKNRRVNEESKRESDDLKRRLEEVSRKVKDERLAKRVLDEAKRILDEVKEKNRRVLEDSERIIKEVEDRNRRVLEETRRIIEELRKEAD

SEQ ID NO: 5283 - protein, 184 aa, Artificial Sequence; identical to SEQ ID NO: 5282
  Synthetic

SEQ ID NO: 5284 - protein, 184 aa, Artificial Sequence
  Synthetic
SVEEMVKELIRKLREVNKRSADELDRVRKRMKKLNDDSRKAVKEVREKIERLLDAARRRGVREEDLKRLKEEVDKAEEELRRVLRKSEEIVKELEKRARKVLEDSKEDSRRIEEELKEVERRVRDERLAEEVLRRVEKKIEDIRRRNEKVLRELEKILREVSEENERVLRDLERKLRKLAEDDR

SEQ ID NO: 5285 - protein, 184 aa, Artificial Sequence; identical to SEQ ID NO: 5284
  Synthetic

SEQ ID NO: 5286 - protein, 184 aa, Artificial Sequence
  Synthetic
SVEDEIRKVKDELRRVNEKSTRDSKRVRDRMETVNRESEKRARDVKKRIKEVLDKIRERGVDEEKLERLREIVERIEEELDRVLEESKKLVKDVEETNRRVNRDSERESERIMTELDKVKDDVKDKRLADDVLRKVRDEIRKIEEDNREVLRRSEDILRKIKERNKKVLDDVRRKIDKARRDAE

SEQ ID NO: 5287 - protein, 184 aa, Artificial Sequence; identical to SEQ ID NO: 5286
  Synthetic

SEQ ID NO: 5288 - protein, 177 aa, Artificial Sequence
  Synthetic
KAEEAAERIKKKLEDILKRAKEESEKILDKLREVLERSKRKHEELIRRAEEVLKDIARKGVSEEILERLRKIVEELKKKSEEDIKRVEDILRRNAELHEEVLRRVEDIVKELEDRIRKDGVDRDVLTELEKIIKELEKRAKEVLDTSRKSIEDLERRNEESLKRLTDDLKRAKEEAD

SEQ ID NO: 5289 - protein, 177 aa, Artificial Sequence; identical to SEQ ID NO: 5288
  Synthetic

SEQ ID NO: 5290 - protein, 181 aa, Artificial Sequence
  Synthetic
SEVEEVLKRLEELLRDSERKVEEMERRLKEIIDRLREEAKRVLDESKESSKRLDELAKKGIDRKDLRENHERNKDLVRRLEKLLEKVLKELEDLARKLREMLKRSNEELKRLVDRLRERRDREEADRALRDLERKHEKRVREVDDRLKKIEDELKRVVEEIRKRLEDLKEENRRIVDRTAT

SEQ ID NO: 5291 - protein, 181 aa, Artificial Sequence; identical to SEQ ID NO: 5290
  Synthetic

SEQ ID NO: 5292 - protein, 181 aa, Artificial Sequence
  Synthetic
SDVDEVLKRSEDSTRRLRERAERMLEELERLIRESKRTADEVLKRSRESSKRLDEEVRAGVDRESLKRNHEENRELAEELRRRLKESNDRLRELVRRVEEELRENHRRNEELVKELLRRRDEEEVRKELERLRRENEKVVREAKKRLEDIIRKHEKIVKEIKEALDKLLEDNKRIVDRTSK

SEQ ID NO: 5293 - protein, 181 aa, Artificial Sequence; identical to SEQ ID NO: 5292
  Synthetic

SEQ ID NO: 5294 - protein, 183 aa, Artificial Sequence
  Synthetic
DELEDVLRKAKELIKRDRDEVRRVLEELKRSTEDLRRKVRDVERRLKELIDELDDIARKIKDKETLRRLLREIEERLKRLAEELRRLLKKALEEHEKLVRDLDKKNKDSLRKLEELLRDIVRRAGRRLKELEKIKKELEDVIRETRERLKKVLDETREDIKDVDRRLRKLEEEIRRKVEEDER

SEQ ID NO: 5295 - protein, 183 aa, Artificial Sequence; identical to SEQ ID NO: 5294
  Synthetic

SEQ ID NO: 5296 - protein, 183 aa, Artificial Sequence
  Synthetic
SELEEIIERIKRLIEEDRETVKEVLERLRRLSDEDRKEVKRVLREIKELIKELEDLRRRIKDEETLRRLLEDIRRRLEELVRRLEEKNRRSHEEHKKLAEELRKKNDDSMRKIERLVEKAVEDAGRPLEELERLKEEAKRVIKRTRDELEKILRENRELIDRSRKELRDLEKELRDVVRESER

SEQ ID NO: 5297 - protein, 183 aa, Artificial Sequence; identical to SEQ ID NO: 5296
  Synthetic

SEQ ID NO: 5298 - protein, 187 aa, Artificial Sequence
  Synthetic
SVREELEKLVRELRRLLEKSKRDTDRLSEEMEELNRRAEELIRTIERRLRELLRKIRENVDKEELKRILEELEETVRRVIEKAKKVLEESKRHSDEVRRRLEEINRRIEKKIRDLERELEKVERELKTEKLVEELKRRAKKVIRELEELSRRATEEVKRVLKENEDLVREVEKDLEEILKRIKDRAD

SEQ ID NO: 5299 - protein, 187 aa, Artificial Sequence; identical to SEQ ID NO: 5298
  Synthetic

SEQ ID NO: 5300 - protein, 187 aa, Artificial Sequence
  Synthetic
SLEEELKKLEEEVRRLLEKSKEDTDRLKKEIEDLNKKAEDDVREIRKELEKLLRDIARNVDEERMRKKLEELRERVRELEEKVREVLKTSKENSKRLIEDLKRINDELEKIVRDVTRELDEVAKRLTTEELAKRLSDKFRRILEKLEEDSKRALDKAREILKRNEELLRELLEELRRILEEIERRAR

SEQ ID NO: 5301 - protein, 187 aa, Artificial Sequence; identical to SEQ ID NO: 5300
  Synthetic

SEQ ID NO: 5302 - protein, 187 aa, Artificial Sequence
  Synthetic
KAKEELDRLRKEARDLLEDSKTKTKRLVEEMDKVNEDSKRESKKLLDELEKLLRDIEKRVREEELRKTLKELEDTVRRLEEELRKIDKESEENSRRLDERLKKINKELEDEIRKLDERLKRVEDKLKDDKLVEKLREEVERILERVKELSKKAIDEVKEVIKRNRDLSKRVIERAKEILRRIEEKAR

SEQ ID NO: 5303 - protein, 187 aa, Artificial Sequence; identical to SEQ ID NO: 5302
  Synthetic

SEQ ID NO: 5304 - protein, 182 aa, Artificial Sequence
  Synthetic
SVEDELRRIEEEMKRLNEKVERDSRRVLKEVEDLNREIKKRSDDLEREIRRLLEEVKRRKSKDEEKLRRIKELVERLKEENRKMNEDSKRSTDRLREENKKVNEDSKRSSEEIKRRADDVRKRNGDIRELLKELRKILDDNRETARKVLEDSKRIIERNKREAEKLERRSRKILKDIEDEAR

SEQ ID NO: 5305 - protein, 182 aa, Artificial Sequence; identical to SEQ ID NO: 5304
  Synthetic

SEQ ID NO: 5306 - protein, 182 aa, Artificial Sequence
  Synthetic
SVEEELRRLEKRIEELVREIERRLRELKKEVEELNERIKRASDEILDRIRRLLEEVRRRKREAEKVLREIEELIRRLKRENEEVNRDSKRSTEKLERDLRRVLEELKRTVEELKKRLREVERRNGDVRDVLREVERIIRELEERARDLLRRIREIIRRNEEKLERLLRRSKEILKEIEERAK

SEQ ID NO: 5307 - protein, 182 aa, Artificial Sequence; identical to SEQ ID NO: 5306
  Synthetic

SEQ ID NO: 5308 - protein, 179 aa, Artificial Sequence
  Synthetic
STERKLEELEKEAEKDLKEVEDRLKELNDHHDKRVKEVEDRLRRANKHHRDRLEDIRRRNISEELDKKLKDTLRELKRTTDRLRRILEKSKRDLERTTERLKRILDKIRRELKELSDKVKDRDTDEVLKRLKDLIKELRDEVRKVLTEHREIDKRVEEEVKRVLDEHREIDKRLDEETK

SEQ ID NO: 5309 - protein, 179 aa, Artificial Sequence; identical to SEQ ID NO: 5308
  Synthetic

SEQ ID NO: 5310 - protein, 179 aa, Artificial Sequence
  Synthetic
SSKEKIERLREKLEDLVRRVRKRLRELNEHHKELVKRIEDTLRELLRHHDELLKEAERRNIDKKLLDRLRETKERLKRLAEELRKILKESLDELRRTTEELERILEEILRRLEDLIRKMDERDTEDVLRRIEELIERLKREVDRVEREHERIDEEVRKRAEDIERRARDIDREVKETTR

SEQ ID NO: 5311 - protein, 179 aa, Artificial Sequence; identical to SEQ ID NO: 5310
  Synthetic

SEQ ID NO: 5312 - protein, 179 aa, Artificial Sequence
  Synthetic
SVRETLERMLRHHAELVERVRRELRKLNKHHRDEVKRVEERLDELRKHHEELLRRAEKDNVSEDLLREAERTKRELEKLVRDLREILKRSLETLEETTRRLEKRLDESLEELKKLIKDVDERDAKKVVEDLRRINERVKDEVRRALREHERIDKEVREIVEEIERRAEKIDEELKRTID

SEQ ID NO: 5313 - protein, 179 aa, Artificial Sequence; identical to SEQ ID NO: 5312
  Synthetic

SEQ ID NO: 5314 - protein, 179 aa, Artificial Sequence
  Synthetic
SVEEALTEIKKRLDKKVEDIERELKKLLDHHKELVDDVRRKLEELNRHHDRLLDEIRKDNSSEELEEKLKKTKDDLRRTTEELERRLEKSLDRLRKLVETLRRILERIKKELKELIDRVKDRDKDEVLKRLEDLIRELDRRVKEIEKRAEEIDRELEDRVRKVLDEHRKIDERAARETD

SEQ ID NO: 5315 - protein, 179 aa, Artificial Sequence; identical to SEQ ID NO: 5314
  Synthetic

SEQ ID NO: 5316 - protein, 179 aa, Artificial Sequence
  Synthetic
ETKERLDEILKHHEEEVKKVRKRLDELLRHHEELVKEVDKRLKEMNDHHRRLLDEADKDNIDKKLKDKLDETRDELRRTTERVKKRLKESLETLRKLVEDLRRELDKSREELKRLIDEVKDRDKDDVLRRLEDINRRLEERVRKAERRLEEIDEKAERITEKVKREHEDIDRRVEDIKR

SEQ ID NO: 5317 - protein, 179 aa, Artificial Sequence; identical to SEQ ID NO: 5316
  Synthetic

SEQ ID NO: 5318 - protein, 179 aa, Artificial Sequence
  Synthetic
SVKERLDEVRRHHEDEVRRVDEKLKEILRHHEEEVRRVDKELKELLDHHKELLDDAERRNISEELRKRLEDTEERLRELAKELREILKRSLEELKKLLDELRRILEESLRELEKLIRDVKDKDAEEVKKRLDDINKRVEEIVREIEERLRRIDEKLKEIVRKAAEDIRRIDKEVEDEIR

SEQ ID NO: 5319 - protein, 179 aa, Artificial Sequence; identical to SEQ ID NO: 5318
  Synthetic

SEQ ID NO: 5320 - protein, 184 aa, Artificial Sequence
  Synthetic
SLEELLKKIEERLRDLSRKVAEELKRILDELRELSERAKDLNRRVNETLRKLVEDITRRDKDTEELKEILREVEDRARKISERDKELNEEVNKEVTEIVRRLEKLNEESKRKVEKLREELKRVDSEEDVKKVLDELEKLLKDNEELNRRVRKELKDLLETLRKLNERSKEELDKLIKELEDRAR

SEQ ID NO: 5321 - protein, 184 aa, Artificial Sequence; identical to SEQ ID NO: 5320
  Synthetic

SEQ ID NO: 5322 - protein, 185 aa, Artificial Sequence
  Synthetic
REVEEILRKLKEITDRTRDLSRRNEEELRRIIRELEEMSKRNKREVEEIIKEAKELAKRTKDKKELEDIVREIKKKVDDSKEKDKELVKRIRERIEESRKRDKRIADESRRLVEEVAEELERKGVDEKAREDLDRLRRENEELIERSERINKKIKEELERVIKRSEDLNKKLEEDLEKLIRDETR

SEQ ID NO: 5323 - protein, 185 aa, Artificial Sequence; identical to SEQ ID NO: 5322
  Synthetic

SEQ ID NO: 5324 - protein, 185 aa, Artificial Sequence
  Synthetic
EEVERILTKAERVTRETERLSRENEKELKKITDETRRLSEKNIEDIERIIEEMERLARTTKDERELEEIARRIEEEIRKSIERDKEIARESRELLKESKKKDKKIMDDSRRLVEELRRELEEKGVDEDARRELKRLEEENRRLLEESEERNRRIEERNEELIEESERRNRELEKRLRDLIKETRD

SEQ ID NO: 5325 - protein, 185 aa, Artificial Sequence; identical to SEQ ID NO: 5324
  Synthetic

SEQ ID NO: 5326 - protein, 182 aa, Artificial Sequence
  Synthetic
SAEDSIRRAEEEARRLIKRAEEEAEKSARRHKELNERARKRAKESAEEAEKLIREAARSGRVDKKELDKAAEEAKRAIEDSERDLERAAKEDRESIEESKKDLERAAKELREVIEDLKRAAKEGADARDLEEKAKKALEKAERIARKNAEDNERNLEKSKRIAERNAKKNEEALREIAKKAN

SEQ ID NO: 5327 - protein, 182 aa, Artificial Sequence; identical to SEQ ID NO: 5326
  Synthetic

SEQ ID NO: 5328 - protein, 182 aa, Artificial Sequence
  Synthetic
SAREDIERLVKELKELVERAREAIKRSAEEHKKLNKELKDRIKEVVERLKKLIDDARRDGRVDEKRLRDVVREVARVLRDAEERVKELHKRDRDSIDRSRRDLDRLVKELKDVIDDLRDLLRRGVPAEELLKKAKRVIEKAEKILRENKEENERNLATSEKIARDIEDKLRKVLKRIADEIR

SEQ ID NO: 5329 - protein, 182 aa, Artificial Sequence; identical to SEQ ID NO: 5328
  Synthetic

SEQ ID NO: 5330 - protein, 181 aa, Artificial Sequence
  Synthetic
SAEDKLREVEKHHEKLVRDIRRKLEKNLRDHAEKVDRVRKKLEEAERRLKELVDRVRKDNVSEELLETIERLLEELKRLLRELERLLKKTLDEDREILERAERELKRTLDELRKIVEDVRRRGRDDERVDRDLERLDREVEEIARRLTRLMEESNKRLEDIVRTIEERIKEILERLKRTAK

SEQ ID NO: 5331 - protein, 181 aa, Artificial Sequence; identical to SEQ ID NO: 5330
  Synthetic

SEQ ID NO: 5332 - protein, 179 aa, Artificial Sequence
  Synthetic
SDVEKIIKDLEKVIDDNRRTNEKAIRDAEDIIRRSEEHSRKVIEKLKKIIKEVKEEAERLKGDERVVKELEDELRKVKKEWEDVSKENRDTNRRVLEELKKILEDSKRHLDKALKKVRDDGVDEEEVRRVEEEIKKLLEDSRRLLRRIEEESRRLDEEDERLMKEIDDEIRELLERIRR

SEQ ID NO: 5333 - protein, 179 aa, Artificial Sequence; identical to SEQ ID NO: 5332
  Synthetic

SEQ ID NO: 5334 - protein, 179 aa, Artificial Sequence
  Synthetic
KEVEDIVDEARKRIDTVRKESKRVVEEVERRIEENKRRNEEVIKRVREDIDRVRKEADKLKGDDKVVKKLEDDLRKVLEDLKRIVDESAKHLKDLTRKWEEISKRLKDRLEEVIRELERRGVDREELERLRREVEKLEEDDRRLLEELEKRARELLERSKKLLDEIRREMEELLKRIRT

SEQ ID NO: 5335 - protein, 179 aa, Artificial Sequence; identical to SEQ ID NO: 5334
  Synthetic

SEQ ID NO: 5336 - protein, 179 aa, Artificial Sequence
  Synthetic
KEVEDIIREVEKRIRDSERHSKEVLDRAEEVIDDNRRKNEEVIKEAEEIIDRIRREADRLKGDEKVVRELEERLRRALEKLRRILKESTKHLKKLIEDWKRRSEEDERRNRDVLRELERRGVDKDLLKEVEERSRRVIEKDRELLKRLEDKVRKLVEDSRRMVKRIEEEIRKLLEDIRR

SEQ ID NO: 5337 - protein, 179 aa, Artificial Sequence; identical to SEQ ID NO: 5336
  Synthetic

SEQ ID NO: 5338 - protein, 183 aa, Artificial Sequence
  Synthetic
SELEKIIEDIKRLIDELRKLVEDVERRNRKLSEDDKRLVEEVLKRLDELIRRLREIAKKIKDKDTLRKILRDILEELKKLLETLRRLNEDSLEKSKRSVEELRRLLRRIKEELKRLLEEAATRAGRKVERLDELRERLKRLEDEVRRRLEELERENRKIIEETEEALRRIEEKARKELEEVDR

SEQ ID NO: 5339 - protein, 183 aa, Artificial Sequence; identical to SEQ ID NO: 5338
  Synthetic

SEQ ID NO: 5340 - protein, 183 aa, Artificial Sequence
  Synthetic
SELDDIIRKIEELIRDDERKVRKAVRENEDLSRRDEERVRKVIDEARKLLKRLEEIAREIKDKDTLREILEEIKKRLEELVKTLKDTNRKSKRDSERSVEEVRKTNEKSRRDLERLAKELADREGRKSEKLDELRKRLEDLIRETEKELRRLERENDEIEKRTEDLLRRLREELRRIVEEVER

SEQ ID NO: 5341 - protein, 183 aa, Artificial Sequence; identical to SEQ ID NO: 5340
  Synthetic

SEQ ID NO: 5342 - protein, 183 aa, Artificial Sequence
  Synthetic
DDLERIIEEIERLIRTLEELVRDALRKSKRLLEENKKLNEEVLRRIKDLIRRLEEIARRIEDKKTLEDILKEIEDRIKELAERARRINEKSLRDNKELVKDVRRKVEEIKRRIEELVEEIVRRAGRKLEELDKLREELKRLVDRVEEMLRKSEEDTERIIRKSEEDLERLERDLKRLVEEVRR

SEQ ID NO: 5343 - protein, 183 aa, Artificial Sequence; identical to SEQ ID NO: 5342
  Synthetic

SEQ ID NO: 5344 - protein, 183 aa, Artificial Sequence
  Synthetic
KELEDIIREAEKLIEENSRKNKEMLDRSKELIERNERKNRDVIRRLEELIEDLRRIAEEIKDKDTLRKILREILEELKELAKRLRDTNRESEKRNRDLVKRIREENEKSKRDLKRLIDDAVRRAGRKSEELDRLRKKLEDNIRESEKELRRSEEETKKLIDDSERELERIERRARELLERVRR

SEQ ID NO: 5345 - protein, 183 aa, Artificial Sequence; identical to SEQ ID NO: 5344
  Synthetic

SEQ ID NO: 5346 - protein, 186 aa, Artificial Sequence
  Synthetic
SDVEDLLRKIKKILREIAEESKRTVRENEELTDRVKKKIREIVERIRRIIKELEERLRRIKDKRDLERVLRDAERRIRELIETAERLLEEVKERSKRSVERNEELLDKIRKEIEDLVRTLRERAKNVKDVEDKLRELERELKKIEDDSRRLLKRLEEENRTLVKEVRERLKRLEDDVRKLKEDVTT

SEQ ID NO: 5347 - protein, 186 aa, Artificial Sequence; identical to SEQ ID NO: 5346
  Synthetic

SEQ ID NO: 5348 - protein, 186 aa, Artificial Sequence
  Synthetic
DEVDKLVEEIKKIIEDVRRESDKTVRDNEELTKKLAEDSKRSLDEIKKLIEELRKEIERIKDKETLDRVLREATKRLKDLVDENERLLRDAKRKSDESVKRNEEVLRRVRKEIDDLVRELRERAKTSEEVERKLKKLKEELERLVEESRRKLEELKKRNEELVRRSREELDKLRREVKETLERVKR

SEQ ID NO: 5349 - protein, 186 aa, Artificial Sequence; identical to SEQ ID NO: 5348
  Synthetic

SEQ ID NO: 5350 - protein, 186 aa, Artificial Sequence
  Synthetic
SDAEEILKEIERLIREVEKTSRRTVEEDERVTEEVRKKSEKSVRDIEELLKEIKRELEEIKDKDTLDKLLRDIRETLRKIVEDNRKLLEDVKRESEKTVRDNKEILRRVKEELRKLVEKLRRRADKSERVERKLEELKRRLEELEKESERELDRLRKENEDLVRRSEEELRRLRRELEEIVREARE

SEQ ID NO: 5351 - protein, 186 aa, Artificial Sequence; identical to SEQ ID NO: 5350
  Synthetic

SEQ ID NO: 5352 - protein, 172 aa, Artificial Sequence
  Synthetic
SEAEKVLKEVEDIIREVEEENRRLIREIEEEIRRVKEEVERLLRKSEKDIKEVEESPKSKDLERRLEEVDEELKREIERIERELDKVLRELEERSRESVERLRRVLKEVRERNGMDEKLLREIERRMRELEKTSRKLLKEIKKKAKELKEKAEEVLRRSRKRTEELVDRLRK

SEQ ID NO: 5353 - protein, 172 aa, Artificial Sequence; identical to SEQ ID NO: 5352
  Synthetic

SEQ ID NO: 5354 - protein, 183 aa, Artificial Sequence
  Synthetic
DVEDLIRELRKRLDELRKESEELLRRSKRKHEKLLTDSRKLLRDIEREARKLLEDVKRKGASESTVEKIKRDLDRLIKELEKVHRDSRRKSKEDLDRLKRVHDESKKKIDELRKELDEMSRVKDREMIETLIRKAKEIIDRLREENRRAVRRSDETLRRLKEENDKVITDVKRKIKELRDEVK

SEQ ID NO: 5355 - protein, 183 aa, Artificial Sequence; identical to SEQ ID NO: 5354
  Synthetic

SEQ ID NO: 5356 - protein, 183 aa, Artificial Sequence
  Synthetic
SIDEEITRLEEESRRDEEESKRLLEKSRDDHRRLLERSEKLLRELEKRARDLLEDVKRKGASKSTVEKLREDIERVLDKLRKVHERSRRKSEEDIRRLEEVHERSKRKHEKLRRELEDVRRVSDEEMVRRVIEKYERAVERSTEENRDAFRRSEETIRELAKENEDAIREVKEIIDKLREDVR

SEQ ID NO: 5357 - protein, 183 aa, Artificial Sequence; identical to SEQ ID NO: 5356
  Synthetic

SEQ ID NO: 5358 - protein, 183 aa, Artificial Sequence
  Synthetic
DVEELIKELERRLRKLLEDSRRLLEESRREHKKLIDDSRRLLDELRRRLERLLEKVRRRGASESKVERIERRLRDLLRRLREVHERSKENSKRDIERLERVHDESRKEIKELLDELREMSKMSRREVIEAVIRKAEDIIRRLRRKNEKAVEESRENIKEIKRENKRVIDEAREIIKRLEEELE

SEQ ID NO: 5359 - protein, 183 aa, Artificial Sequence; identical to SEQ ID NO: 5358
  Synthetic

SEQ ID NO: 5360 - protein, 183 aa, Artificial Sequence
  Synthetic
SVEDLLRRLEEESRKDLDDSRRLLDESRKRHEDLLRKSEELLRELEERLRRLLEKVKKKGLDDSDVKRLEKKARDLLKELREAHKRSRDNSERDIRDLERVHRESEKRHRDLRKKLEDVRRSRREDVIRKLIEDYERLVKESTDRNRRAVEKSRENLKRLDKENRDVIEKARRIIEELEKEVK

SEQ ID NO: 5361 - protein, 183 aa, Artificial Sequence; identical to SEQ ID NO: 5360
  Synthetic

SEQ ID NO: 5362 - protein, 183 aa, Artificial Sequence
  Synthetic
SVDELIEELRRRLEKLLREAEELLKESRKRHEELKKRSKELLDELEREVERVLEELRRKGVSDDKVKRVEDRLTELIRDLRRAHKESEKNSRDDIRRLEEVLKKLEKKIRDLERELEEMRRSKDEEVIERVIRKADEIIKRLKKELREVVERSKENIKKLEEENRRVIKKAREELRKIEEEIR

SEQ ID NO: 5363 - protein, 183 aa, Artificial Sequence; identical to SEQ ID NO: 5362
  Synthetic

SEQ ID NO: 5364 - protein, 179 aa, Artificial Sequence
  Synthetic
SEVDEVLKTLKELIERLRERVKEVLKRLEKLLKELEDLSRETVRELRETNDDLRRKAEKTRDKDTLRELVKRVLDENKKIITRNRDTVRRAMERIEDLIRELERTVEKIRRDIERIIRELIRKREAAEKVRRDVDRLRKEVEEMLERVKRKLDELRKDSDRLAREVEDSTRKIERDVEK

SEQ ID NO: 5365 - protein, 179 aa, Artificial Sequence; identical to SEQ ID NO: 5364
  Synthetic

SEQ ID NO: 5366 - protein, 180 aa, Artificial Sequence
  Synthetic
SELEEMVKKVKEIIDRARERIRELIERHKELDRESRKRIEDIIREARELNKDVKRVIKEIKKEEEEKLKKILEDLKRLSDEVKRRLERILEENRKLVRESEKRLEDVLKELKELLRDVERKARVDEALEELKRRVKRLEEKLREDIKRLRENNERIREDVERLAEELDRHTRKLMEEVKK

SEQ ID NO: 5367 - protein, 180 aa, Artificial Sequence; identical to SEQ ID NO: 5366
  Synthetic

SEQ ID NO: 5368 - protein, 180 aa, Artificial Sequence
  Synthetic
SELEDIVEKAKKIIEDVRRRIEKLIRDDKRLNDESKKTIEELIRKARKLNEEAERIIRKIKEDDEKKLREILKRLRELSEEIIKRLREVLDRDRRLNKKTVDDARRILRELKELLKEVEKRIRVRELLEKLRRDVEELEREVRELLERLKENSKRIEDEVRELMKELKRHTEELEREAER

SEQ ID NO: 5369 - protein, 180 aa, Artificial Sequence; identical to SEQ ID NO: 5368
  Synthetic

SEQ ID NO: 5370 - protein, 180 aa, Artificial Sequence
  Synthetic
RELEEIVERAKEIIRRVAEKIKKLIEEAERLDRDSKRKIDELIEKVKKLNEDVRRTIEEIKEDDRKTLREILETLKDLSRRAIEEARRILEENKKLSKEIEDRVREVLRELKKLVDDIRREMKVEEMLRRLTELLKELADEVKKLLDRLKENNEKIREDVERLLRELEEHTKKLEEDVTR

SEQ ID NO: 5371 - protein, 180 aa, Artificial Sequence; identical to SEQ ID NO: 5370
  Synthetic

SEQ ID NO: 5372 - protein, 179 aa, Artificial Sequence
  Synthetic
SEEERVLKELEDVLREHKRKADESSRKLEEVHRRHRKRMEESKRELEEVHKEAKDRITKNRDDTKLLEDIIRTLRKINKDVARRNEESIRELKEINKRVLDENKKSREELEEILRRVIERVGETEELEDVERKARELEERNKKLLKDSEEATEELRRENEEMLEESKRRTEKLEREVRT

SEQ ID NO: 5373 - protein, 179 aa, Artificial Sequence; identical to SEQ ID NO: 5372
  Synthetic

SEQ ID NO: 5374 - protein, 175 aa, Artificial Sequence
  Synthetic
DKVREVLRESEKLLEDWDRELKEVLKDFKRTLDELEERLRDVLRKNKKSLEDLKRRGLDDRVVRKVEEEHRRVAEEIKRLVREAEKLLEDVKRELERLKREAEEENKRVRDKVRKDGDADDRIMRELRELNRRLDESVKEIRDRLRRILDKLRKMIEKLKKELEDTDRELEERVR

SEQ ID NO: 5375 - protein, 175 aa, Artificial Sequence; identical to SEQ ID NO: 5374
  Synthetic

SEQ ID NO: 5376 - protein, 175 aa, Artificial Sequence
  Synthetic
SKAEEVLKTSEKLLEEWRRRVKEVEDRNEETIKRLKEELDRALKENEESLRELEKRGLDEEVKRRVEERHRKIEEEIEELRKKLREKHKKVKRDIERLVKKMKDDNEEVKKRVDKRGDLDDRISEELKKLNEELERELRKLSEELKEVDREAKEEIRRLVEELREIDKRLEEETK

SEQ ID NO: 5377 - protein, 175 aa, Artificial Sequence; identical to SEQ ID NO: 5376
  Synthetic

SEQ ID NO: 5378 - protein, 175 aa, Artificial Sequence
  Synthetic
SEAEKVLTDFRDALEKDRERNERVLRENEETIRRDKEENERVLRENDKSLKELRKRGLDERVADKVRKDHEKVKRDTERLVRELRRVHEKVRKETERLIREMRKALEDVRDDVRRRGSADDRIKKTLERLLRESKKASEKLKDDLRKLDKRSKEESRRLTERLREIDEELRRRVD

SEQ ID NO: 5379 - protein, 175 aa, Artificial Sequence; identical to SEQ ID NO: 5378
  Synthetic

SEQ ID NO: 5380 - protein, 175 aa, Artificial Sequence
  Synthetic
SEAEDVLRRFEEELRRDDEKNERVLRRNEETNRRDDETNRDVLRRNKESLDKLRKRGLDEEVVKRLREVHERVREETKKLNREHKKAHEDVKRDTEDLKRRMEDELRRVEDEVRKRGSADKRIKDELRKLLKRSEERSEELRRRLEDLDRRSKETSDKLREELERLDRDVERKVN

SEQ ID NO: 5381 - protein, 175 aa, Artificial Sequence; identical to SEQ ID NO: 5380
  Synthetic

SEQ ID NO: 5382 - protein, 175 aa, Artificial Sequence
  Synthetic
SEAEKVEDDVRRVLETDEKKNRDVLDTNRRTIEEDRKRNEEVLRKARKMLEDLKRRGLDKDVVKRVEEVLERVKRETERLTRELRKFHEEVRKETEDLKREIEKLLRDLRRDVERRGSADERLRETLEELLRRSDERSRRIMEDLKRLDTDSKRVSEELKRRLEELLKDLERKVR

SEQ ID NO: 5383 - protein, 175 aa, Artificial Sequence; identical to SEQ ID NO: 5382
  Synthetic

SEQ ID NO: 5384 - protein, 185 aa, Artificial Sequence
  Synthetic
SEVDEITKELEESLKDLDRVVRELREKIKKIDKELAETVDKLTEEAKEILKTLRDIIRRGNNTEEVSREAEELLKELKKRLEELEREVERLHEELRKEIEELEREAEKRNKDVKEKIDRGNLDKKLKEKVDRVHKRHKDRLDEIKRKLKKVLEDNRETLERIKRKLRKVLEDLKRMLDELERELR

SEQ ID NO: 5385 - protein, 185 aa, Artificial Sequence; identical to SEQ ID NO: 5384
  Synthetic

SEQ ID NO: 5386 - protein, 176 aa, Artificial Sequence
  Synthetic
KETEDLVRRLRKVLKELEERVRTLMRDNERVNKEIADKIRRLREKLREEDERVDEVVKRREVDEKDLKRRADESREELKKVLKDLEDTVKRLEEKNDKVRRELKKIVDELRRELEREVKEAREVLREMDERVKELEERLERVLRKSKTDADRWRRELKRVLEEHDKTVKEIREKTR

SEQ ID NO: 5387 - protein, 176 aa, Artificial Sequence; identical to SEQ ID NO: 5386
  Synthetic

SEQ ID NO: 5388 - protein, 178 aa, Artificial Sequence
  Synthetic
KEKDEVVKRYEDRIKEIRERLKEVVTEHEDRLRKWRKDLEEVVERNRRSIKKIDEEVKRRGVPEKVKRELREIEKRSEEIIKKVREELEDLARKSRERIKRVEEEHDKNTDKARKDITKEGVDEDVVRKLDEDLKRNEDHLEEVRKELERLNEEIEKLIRDLLEILRRIDKELRDKLE

SEQ ID NO: 5389 - protein, 178 aa, Artificial Sequence; identical to SEQ ID NO: 5388
  Synthetic

SEQ ID NO: 5390 - protein, 178 aa, Artificial Sequence
  Synthetic
DEEKDVTRRVREVIKRLEEELEEVVRRHRESLKRLKERLEEVVRRNRKSIREIEKEVKDAGLPDEVKRRLDEIKKESEKRIDDARRREEEVEKDSERRIKEVEDRLKRKAERIEKAREERGVDEDVDRELARMLEELRDLLRRLAEELKRIDEELEKELRDVARELEKIDRDMREELR

SEQ ID NO: 5391 - protein, 178 aa, Artificial Sequence; identical to SEQ ID NO: 5390
  Synthetic

SEQ ID NO: 5392 - protein, 178 aa, Artificial Sequence
  Synthetic
DERKEVEERYRREIERIKTKLKEVVKRHEDSLKKIEDDLEEVRRDNERSIKEIREEVRKKGAPEKVEEDLRRIEEKSRRDIKRMEEDLKRMTEESRREIEDVERRHRENEERVEREIEKRGIDEDVDRELKEDLERNERHLEEVTRRLRKIDKDLKEKLKRLEEELKKIDREARERLR

SEQ ID NO: 5393 - protein, 178 aa, Artificial Sequence; identical to SEQ ID NO: 5392
  Synthetic

SEQ ID NO: 5394 - protein, 181 aa, Artificial Sequence
  Synthetic
KEIEDVKRRLEELDRRIKELVDRVRRKLEEVDTRAEKELRDVRRRLEELLERLEELIRRGTSEETLRRLAKEIRKIADEARKKLKKIKDDLKKEHDRVREKLEELARRSRKVLKEVRDRTGEVKELRDVIKENEDTLRRLKEEVEKVTKENEETLRRIERELDKVERDVERRIRELEEERR

SEQ ID NO: 5395 - protein, 181 aa, Artificial Sequence; identical to SEQ ID NO: 5394
  Synthetic

SEQ ID NO: 5396 - protein, 177 aa, Artificial Sequence
  Synthetic
SEVEKVLEDNKRSIDRLEEELRKVTRTSRELLKEWAKRLEDVLRDVKRAVDELETRGVDEKTLRELRKRLTDIEREIRKKLEEAEKKLRESERDVEDTLRRLREKSRRITEEARKGGDSDEIRKLKEELKRLDEEAARILETIMRRNKDLNDRLREIIETLKKRLKDLLKEVEDRAR

SEQ ID NO: 5397 - protein, 177 aa, Artificial Sequence; identical to SEQ ID NO: 5396
  Synthetic

SEQ ID NO: 5398 - protein, 178 aa, Artificial Sequence
  Synthetic
DAEKLREDVERTLRRLRKELKDSIKRNREELERLERKLRKSIKETEDEVRKLEEKLERRLKDDEEVRRRAEELAKRLKELNEDVKRKADRLKEESERLDEELEKRLRDLEREVKKLEKDQDVDDDVRRLVEKIEREVRKLIEDHKKKSEDIVRTVEKLIEDHKRRVDRISEEVEEELR

SEQ ID NO: 5399 - protein, 178 aa, Artificial Sequence; identical to SEQ ID NO: 5398
  Synthetic

SEQ ID NO: 5400 - protein, 178 aa, Artificial Sequence
  Synthetic
SKEDLKRKVKKILEDVERELRRSIEDTERLLREVEKRLEDSVRENRRKLREVEEKLRRRLKDKREVMEKLRKIVTESEELDKDVKRKVEELERRARELNRELKEKLEELKKEAEELDRREDVDRRVDELVKEIEERARKLIKEHRDRVRELLRELEELIERHKELSERILKELEELLK

SEQ ID NO: 5401 - protein, 178 aa, Artificial Sequence; identical to SEQ ID NO: 5400
  Synthetic

SEQ ID NO: 5402 - protein, 174 aa, Artificial Sequence
  Synthetic
SEKEEIARRLEKVHREHREELKRLEDRLREVLKRNRETIEDIRRKLEEVLRRLRERLVDDEEVLRELTEEAEELERRVRRRHEELERLVEELKRKADKINKDLERLIRELKERLDDGDEEKLRRDVERIVKEAEDTLRELERVVRELEKEVRETDKRLDERVKELEEKVRRAAK

SEQ ID NO: 5403 - protein, 174 aa, Artificial Sequence; identical to SEQ ID NO: 5402
  Synthetic

SEQ ID NO: 5404 - protein, 178 aa, Artificial Sequence
  Synthetic
SEEEDARRLLEEVERALREIKKRLKELLERHRRAVEELKKRAEDLLDEHRRAIERIADERGDRDTIADKVRKEIERSHTELKKLEEEIERISRDADRRVKEIAREAEELLRELEERLERKRVSEEIKRRLKELAKDLRRAIKEVKERLKESHDELKRAIEDVKRKLEELDEKLKRDED

SEQ ID NO: 5405 - protein, 178 aa, Artificial Sequence; identical to SEQ ID NO: 5404
  Synthetic

SEQ ID NO: 5406 - protein, 172 aa, Artificial Sequence
  Synthetic
SERERVERSVEELIRRYREVLEESERRNRKLLKRYEDALKKSREDNKRLLDELRRANRGPEEFLERMERESRRIIRELEKNLERLKRESEDILRKLDKNMKDIERELKKLRDDDLPREDAERLLERIERHLRRSEKTSEELNRRLEDHARRSIEESKKLNEELERKLRELER

SEQ ID NO: 5407 - protein, 172 aa, Artificial Sequence; identical to SEQ ID NO: 5406
  Synthetic

SEQ ID NO: 5408 - protein, 182 aa, Artificial Sequence
  Synthetic
SSEETLRDINRKISKAIEEIEREAREIDRELRKAVEDLKREAEEIDERVREVIERIGTRDEDLKRLEEEIERLHRELEKKARDLARKARELHRRLEEKIRELADRLRRLSEEAEKRDGRDTEVKKVLDKNEELLKRWEDRLREVLERNRKTLREIERELEEVLRKNRESIKKLKRELEEASR

SEQ ID NO: 5409 - protein, 182 aa, Artificial Sequence; identical to SEQ ID NO: 5408
  Synthetic

SEQ ID NO: 5410 - protein, 182 aa, Artificial Sequence
  Synthetic
SSEEDLKRIDDELDKMVKDIERKIRRIDTELERVVKELKEDIERSLERLREVVERIGTREEDLTRLDKEAKDINKRLEEEARRLVDEAKKLHKRIEEEIRELEKRMEDLHKRVRDEVGDDRDVRRVLDENRKTLEDLKRKLKEVLDRNRETLKRIEKELREVHEKHNRALDELRKELEDRRR

SEQ ID NO: 5411 - protein, 182 aa, Artificial Sequence; identical to SEQ ID NO: 5410
  Synthetic

SEQ ID NO: 5412 - protein, 182 aa, Artificial Sequence
  Synthetic
SVEEEAEDILRRLDKTVRDLEREAEKIDEDLERVVRKLEEELRRSLEELRKVVEEIGSTEKDLKRLTEEAERKNKELRDRAEELADRARKLHEELRKKLEELLKRARELLKDLERRSGRDRDVTRVLRKAERVLKEIEEKLRDVLRRNRETLKRIEDELERVHRDHNRKLKRLKEELDERRR

SEQ ID NO: 5413 - protein, 182 aa, Artificial Sequence; identical to SEQ ID NO: 5412
  Synthetic

SEQ ID NO: 5414 - protein, 175 aa, Artificial Sequence
  Synthetic
DEDRDVEEKIKKIIKAAEDVNKESEERITELKKRLREIHERSERLIRRIEEEAKKKNRSRDVKRELERLERELRRLNEESERRLDELTKELRKENDEMLRRLKELTKRLRDVLRRGELDKKKLDEIIERLRKLLEDLEERNRRVIKELEDLIKENEELNRKVIRDLEKLVEDAER

SEQ ID NO: 5415 - protein, 175 aa, Artificial Sequence; identical to SEQ ID NO: 5414
  Synthetic

SEQ ID NO: 5416 - protein, 185 aa, Artificial Sequence
  Synthetic
DEEDEVRKRVEESERESRKLLTDVKREADRLKEHDKRLLDEVKKLLDKIREDLKKLPSEDEEKRKRLKELLDRIEKELRDLAKEVKERNERLDEELERLADEARKLHEEVKRRLDDLRRKSKDVDREELKRELDRIIEELKELNKRLEERLRELIRDWERVSRELAERLKRIIDKARRLLEEVAR

SEQ ID NO: 5417 - protein, 185 aa, Artificial Sequence; identical to SEQ ID NO: 5416
  Synthetic

SEQ ID NO: 5418 - protein, 176 aa, Artificial Sequence
  Synthetic
DEVEELLKELKDLSRESVRELRRLDEELKDLSRRSLKRLTDLDEELRREVEERRKENSKDDRVEEEVEEALKKSEEDLDRIIKEHRDAVRDSRRRLRRVLERHEEELDRLRREVEREGVGDERLKKLADDSRKRLRDVERHHEKLVEDSERRLKTIKDHHKKAVEDIRRDLRETKR

SEQ ID NO: 5419 - protein, 176 aa, Artificial Sequence; identical to SEQ ID NO: 5418
  Synthetic

SEQ ID NO: 5420 - protein, 175 aa, Artificial Sequence
  Synthetic
SEIDEVLKEIKRIIDELRERNRKHNEEVKDRIRRLEEELRKDLKDLKEIVERLAKSNVDREELDRILEELRKRVKEVEERLEEIRRDLERSHEELDRENRRVHKELKERLDRTNVRGEAADRARELEKELKDISDTSRKSNEELRKRLEEIKDRVRKEIEKLLRELEEIVKEKRR

SEQ ID NO: 5421 - protein, 175 aa, Artificial Sequence; identical to SEQ ID NO: 5420
  Synthetic

SEQ ID NO: 5422 - protein, 179 aa, Artificial Sequence
  Synthetic
DEEKETIKRHRESVREAERRLRDTLRRNRELVERLKRTLEDILRKHEKLVEELEEMAKRGEVDEDTLREVEKRSKDLEERLREILEKVREESERLTEELKKESEKHERDSRRLTEDLRRRSSDPEELKESHKDLKKIHEDAERRVRESHTDLRRIIEKVKEDLERSHRKLKRIADETRK

SEQ ID NO: 5423 - protein, 179 aa, Artificial Sequence; identical to SEQ ID NO: 5422
  Synthetic

SEQ ID NO: 5424 - protein, 179 aa, Artificial Sequence
  Synthetic
SEMEEVLERDERKVRELEREIEKNLRDHKDEVRRLREDLERVLREDEKLVRELRKKNSKDDRLAKEARERNKKLNDEVRKKLEDVRRKSERNKEEHKRRLDEVRRDNKRLNDDLKDRNISEELEDRMRRSSKRLEEVLRESEERLKRSDEDLRRVIDEIRRRLEESTRRLEETIKELKD

SEQ ID NO: 5425 - protein, 179 aa, Artificial Sequence; identical to SEQ ID NO: 5424
  Synthetic

SEQ ID NO: 5426 - protein, 182 aa, Artificial Sequence
  Synthetic
SEREEVLKDIRRLLDEVRRRIEDLLEKLRRLNEEVKEKVKESEKRLRDLMRKAKELMKRGLDEDTLRKVLKEVEDRLRENHKELKRVEEESRRALEDIRRKLKKVTDDLRKRLREIAEELERRGIRDEDIKRLIEELEKLLKEAKEKAEDLTREHDDTLKKIRERHKEIIKDIEDKLDTDRQ

SEQ ID NO: 5427 - protein, 182 aa, Artificial Sequence; identical to SEQ ID NO: 5426
  Synthetic

SEQ ID NO: 5428 - protein, 182 aa, Artificial Sequence
  Synthetic
DEEEELKKKLKAILEDLKREMREHEEKLRRSLERVARTAERHKETIKRIIDRLRKEAEDVPKDRRAEERLEEIRRELKKKDEDTERRSRKNEKELKDLNDETDKRLKDIEEEVKRTIKRLKDESDTSEEVKRIAEDIKRVLEEIRKRSREILEEVKRLHKKIKDDSRKLLKDLEKLVREIRK

SEQ ID NO: 5429 - protein, 182 aa, Artificial Sequence; identical to SEQ ID NO: 5428
  Synthetic

SEQ ID NO: 5430 - protein, 172 aa, Artificial Sequence
  Synthetic
SVEDEARRLEEKLRELTKRAREALEESNRRHRKSVEEVRRSLKKNHEKLEELARRVSRIDERRVREIKRRHEELLERLKDELDKSEEEHERLIEELERLLEEARREVERLRREREVDERLLKELEDLIEEVERELRRVLTESKRLNEELRKRVKEIEERSEELIERLDREVR

SEQ ID NO: 5431 - protein, 172 aa, Artificial Sequence; identical to SEQ ID NO: 5430
  Synthetic

SEQ ID NO: 5432 - protein, 172 aa, Artificial Sequence
  Synthetic
SMDESMETLTRELEDLLRKVEKKLRDSNEHHRELLEEVKRRVEENHKELDELLRRASRVPEEVLKKIRRDHDELRKELDKLLRDSERRHRELLEELKRRLEEVKRRLDKLRKDEDVTEELLTKIRKLIRDVEETVREAERESRALDERLERTVRDVEEKSKRLIEELRRRAD

SEQ ID NO: 5433 - protein, 172 aa, Artificial Sequence; identical to SEQ ID NO: 5432
  Synthetic

SEQ ID NO: 5434 - protein, 178 aa, Artificial Sequence
  Synthetic
DAEEEIRRIDKHHEENVRKAEEDIRRLIEHHKENVERVDRELRKIIREVEEVIRRVKELDERKVREVEDRLRRIKEEADRLSKESTDRLREIKKELERISEESKKELDKLRRKAREVRDERLVRELIRRLERTDEEHHKKVRRILEELKRIDEEHHRLVRRILKALKDIIKRLREEVK

SEQ ID NO: 5435 - protein, 178 aa, Artificial Sequence; identical to SEQ ID NO: 5434
  Synthetic

SEQ ID NO: 5436 - protein, 178 aa, Artificial Sequence
  Synthetic
SLEEEIEKIERHHRKLVEEARRELKRLEDKLEKLNRDSRKRLKELAERLKKLIDEIKKLDEELVKEVKRRLEELSKDLERKHRKVKKEVKELIDDAERILRESERELERLTEKLKEVRDERVARRVLDELRRLNEKLRRMVEELVKEIERLIKKVKDDSEDVMRKLKELLKRLEDRAR

SEQ ID NO: 5437 - protein, 178 aa, Artificial Sequence; identical to SEQ ID NO: 5436
  Synthetic

SEQ ID NO: 5438 - protein, 179 aa, Artificial Sequence
  Synthetic
REKEELLERLKKVLERTERVIRDLERRLREVLERSRKLAEDLVERLERSLKTLEKLAREGRVEERLLKRNHDELRKLLEDAKDKLRRINEELEKLLRDVKRELDRINEELKRLIDDATRRTGEREELREIYKRHEDLLRTAEERLRKVYDDHRDLLRKIDEDLKRLKERHEELLREIRR

SEQ ID NO: 5439 - protein, 179 aa, Artificial Sequence; identical to SEQ ID NO: 5438
  Synthetic

SEQ ID NO: 5440 - protein, 180 aa, Artificial Sequence
  Synthetic
EEKDRLKKRLEELNREHEELVRRISERVRRLLEKAEREIRTLKKRLDELNKELEEIIRRDNARDEVIKRVERIHEELEKELKELLDRLRDEMRRLEEELKRLNDEMRERHDRLRKEVKDVDEKVKKELEDVERHSRDSSRRVKEELERLKEELDRRLRKVKEDLERVKRHSKKLVDDAKR

SEQ ID NO: 5441 - protein, 180 aa, Artificial Sequence; identical to SEQ ID NO: 5440
  Synthetic

SEQ ID NO: 5442 - protein, 180 aa, Artificial Sequence
  Synthetic
SEREDLRRELEELLREHEEVVKEVKRRLEELLREHEEIVRELTERLKTINEDLKRVIKRDKASDETARELEKRHKKLEDEVRRSNERMRRTLEKLRKDLEDKNRDLERKLRRLEKDAKDISEEAEKELRDVAKRLRESSREVRETVRDVADKLRESSKKLEEELRRVKKHSKKLLDEAKK

SEQ ID NO: 5443 - protein, 180 aa, Artificial Sequence; identical to SEQ ID NO: 5442
  Synthetic

SEQ ID NO: 5444 - protein, 185 aa, Artificial Sequence
  Synthetic
SLEDLLRKVEEDAKRSIEKLEKDLKRVEDKHRELVERVKRRLDDVRRKLEEIIRDAERKGTSDEVREFLKEVERRVEKIADELRRKLERNHEELRRLADELRKKSEEVTRRLRDIMRKLREENTTDERVVREVLDELRKLLDDHNKKVKTVLDELKRSLDKLREEVKKVEDKLEEILKTLKETVR

SEQ ID NO: 5445 - protein, 185 aa, Artificial Sequence; identical to SEQ ID NO: 5444
  Synthetic

SEQ ID NO: 5446 - protein, 181 aa, Artificial Sequence
  Synthetic
SLEELIREIEKELDDLLREHEDLLRKIKEEIERLIREARELIKRLEEENEELRRNLRTDKETLERLEKRSEELKDENRKNLRKVEETLKRLEEKLRKHNEDLRREIEKLKKELRDAAREGMSEEEVKREIDRVRRVIEELRESVERLREEVRETLRRLKEHVKKDVEDHKETVKEVERRTR

SEQ ID NO: 5447 - protein, 181 aa, Artificial Sequence; identical to SEQ ID NO: 5446
  Synthetic

SEQ ID NO: 5448 - protein, 177 aa, Artificial Sequence
  Synthetic
DTEDLIREIRRRLEESVRENKELLDRLRERLEESIKRNEDLLKRHRENSKRIADRVRSDEELERVKKEAERLHKESRDKDRDLRKKVEDLARRSEELDKELRKRLKDLERELREAKKTRELVKEMIDRLRDLLRRHKEESKRLVEEVKKLLDRHREESERLVRELDKMNKDLEDRAR

SEQ ID NO: 5449 - protein, 177 aa, Artificial Sequence; identical to SEQ ID NO: 5448
  Synthetic

SEQ ID NO: 5450 - protein, 173 aa, Artificial Sequence
  Synthetic
DTKELLDELRKRLEDSARRVEELEKRVKDELERLKKRSEELLDEIRKRMKDVRDRGLVSEEVLRRLEELLRRVTEKVKRLNEELERKTREIRKKLRESVEELRRRLEDAERLKERLDKDELVRRLDETLKDHDRKLKELVDEAKELLRRYEEESKRLKRELDEILRRVREEAK

SEQ ID NO: 5451 - protein, 173 aa, Artificial Sequence; identical to SEQ ID NO: 5450
  Synthetic

SEQ ID NO: 5452 - protein, 178 aa, Artificial Sequence
  Synthetic
REIEEVRKKVEKILRDYDKVVKDIVEKVRRILEEYRRKSEKLTREIEEILRRLREVIKRDLRKEELDELKERVRELLDRLRDKLRKLNEELRKLLRDLEDEIRRLDEKLKELIRDLERKARDEDSLREIRKEARRLHEKSKKLLDEIRKRAEDLERETKKLLDDIKRELEDVVRELEK

SEQ ID NO: 5453 - protein, 178 aa, Artificial Sequence; identical to SEQ ID NO: 5452
  Synthetic

SEQ ID NO: 5454 - protein, 172 aa, Artificial Sequence
  Synthetic
RELEELLKRAEEVIKELKKSIDTMKEENDRLITELAKRVEDLKKRNDDVLERLKKDNIDEKTLEKIIRKLRRENEEAMKTLKKLVDDIRKRNDEHNKELKKLARDLREDLKRKVKSEEVLKEIDKRLKELEKEHEKVNRESEKRLEELLRRVEKVNRDSERELERLREERET

SEQ ID NO: 5455 - protein, 172 aa, Artificial Sequence; identical to SEQ ID NO: 5454
  Synthetic

SEQ ID NO: 5456 - protein, 174 aa, Artificial Sequence
  Synthetic
SEIEEVLERAERLLRRVAEALRRTTKELEDLNREVADLLRRTTEKAERLIRRVKSKIDKEEVKTRIDRLLDRSKDLTKKIKKRSDDSVKRSRELTDEIRRDLERLLRTLKKLADDGVPVEELKRVADEVVKKADDLVDEDRKLAKDSVDELRRLVEKDEKLAKDVVEEVEKLAE

SEQ ID NO: 5457 - protein, 174 aa, Artificial Sequence; identical to SEQ ID NO: 5456
  Synthetic

SEQ ID NO: 5458 - protein, 177 aa, Artificial Sequence
  Synthetic
SLEDAVRKARELIKRAEDILRRAVEEAKKLHKRSKEILEKAVEDAKRLYEEAKDAARKAGADERVIKELEENAKRVEEEAKKVKDDNDRLAREIKRRAEEVEKRARDLARKLDEEAKRNADAKTILDKAREVAERVARLARKLLEDSRKVARESAELAKRLLEYAKKSAEDAKRKAK

SEQ ID NO: 5459 - protein, 177 aa, Artificial Sequence; identical to SEQ ID NO: 5458
  Synthetic

SEQ ID NO: 5460 - protein, 185 aa, Artificial Sequence
  Synthetic
SIDEVLKELEDVARKSKEKNKRVHDDDERVVREVHKENRRVLRELEEMAERVRRELEKRGVPEEVLKRLEELIEELKRDLERSDDELRRSVEESEKRNRETNKRLDDHVKEVRRTVEKIKRDNQEEEKVVRRVKDIARHNLELADRSVEESRKSVKENKDLVDRSVKKVEDLVRELKRLVDEIKR

SEQ ID NO: 5461 - protein, 185 aa, Artificial Sequence; identical to SEQ ID NO: 5460
  Synthetic

SEQ ID NO: 5462 - protein, 185 aa, Artificial Sequence
  Synthetic
SIDEALTRLERAVEESHKRNEDVHRRDEEAVREVHKRNREVVKKLEDEVRKVIERLRRRGVDERVLRRLEEEIDKVRDELRRSDEELKKSVDDSKRRNKESDDELKKHVDELRRTIKTMKDSRVREEEVVRRIDELVEHNKDLVRRSVDESDKSVETNKDLVEKSVRRVDKLVKDLRRLVDEIER

SEQ ID NO: 5463 - protein, 185 aa, Artificial Sequence; identical to SEQ ID NO: 5462
  Synthetic

SEQ ID NO: 5464 - protein, 185 aa, Artificial Sequence
  Synthetic
KIDEALKRLREVVKRSHEENEEVHKEDEKVVRELDKENKDVLKELDEAVKRVEKKLRDRGTPEKVLKELKDLIDKVEKDARKTNEELKESVKRSAEENKKSNEELRDHARKLDKTVRDMKENRVREDEVVKRIDELVTHNKRLVEESVERSKESVDRNRRLAEKSVEDVRRLVEELKKLVDDITR

SEQ ID NO: 5465 - protein, 185 aa, Artificial Sequence; identical to SEQ ID NO: 5464
  Synthetic

SEQ ID NO: 5466 - protein, 177 aa, Artificial Sequence
  Synthetic
SLEEVLRRLEKVVRDSDKRLEEVLTRLAKVVRESNKRDEDVHKELRDVVRRVEELLERSNVPGEALKELRRLLEEVEKRNRDSKRESEKSEEEIRRRAKKVLDDSRKSLEEIRRLVENGVSEETVDKLVEDNERLVREIVKEVDELVKRNEDRARESVDESRKLVRRIEERVREETR

SEQ ID NO: 5467 - protein, 177 aa, Artificial Sequence; identical to SEQ ID NO: 5466
  Synthetic

SEQ ID NO: 5468 - protein, 173 aa, Artificial Sequence
  Synthetic
SVEDVLREAKRVLDEVRERLREVNTETNKVIKDVKKESDDVNRETNELIERVAREVPRTRELEEIEKEVRELDERNRKTSKELVDTVRKLDDENRKRIEEVEKEVEDRLRELRKRRLTEEVERLVDEVRKLVKRLVEHVKKLAKEIKELLERNVRHVEEVAERIKRLIKETKD

SEQ ID NO: 5469 - protein, 173 aa, Artificial Sequence; identical to SEQ ID NO: 5468
  Synthetic

SEQ ID NO: 5470 - protein, 177 aa, Artificial Sequence
  Synthetic
ELREDVERVVDEIRRLVEENVRRIDEVAKDIKRLADDNVRRVKELVRKIEEDIRRLKEEGVTEVVDELREEVRKLSEDNRRHSRELIERVKKLLKELEEHSRDLKRRVKELLEDLKRKGVDERVLKKLKEVIEDVERKSRDALRRLEEAIRRVRRESERVNRELDEVIKRVTEELKK

SEQ ID NO: 5471 - protein, 177 aa, Artificial Sequence; identical to SEQ ID NO: 5470
  Synthetic

SEQ ID NO: 5472 - protein, 181 aa, Artificial Sequence
  Synthetic
SAREKVEKVVKEVEELVKRDVEEVERIVEEVKKLVTEDLKISEEIVERVDRLIRELKKEPKSDEFRKKVEEVRERVRRLLEENRRHTEELERRVEELLKELEKHTRKVKDDIKKLLDRLREDGVDERVLKKLEDVVRRVEKESEDALRRLKEVIKKVKRESEEANRKLEEVIRRVVERVRR

SEQ ID NO: 5473 - protein, 181 aa, Artificial Sequence; identical to SEQ ID NO: 5472
  Synthetic

SEQ ID NO: 5474 - protein, 174 aa, Artificial Sequence
  Synthetic
SRSEKLVDEARKMVERSKEIVDKSEREVEDVVRRARRNVEKVLKDAKKVVDEVDELTKRGTDKETLKERLREILERIERYIEESKKDLDRILEELERKHRENKERLRRILEKIRRDGVGEDVLREVEELVRRVEEENDRVLKRAKELVEDVKRKHDRVLETVRKLVEDVTRRLK

SEQ ID NO: 5475 - protein, 174 aa, Artificial Sequence; identical to SEQ ID NO: 5474
  Synthetic

SEQ ID NO: 5476 - protein, 174 aa, Artificial Sequence
  Synthetic
DEVDKVKEELERVIKEVDERNKRSSERLEEVNRKIRKEIKEVVERLKELIERVLRKVEGRREVKRLTDEVRKRVEDLRRKVEDVSRKSKEDNERSNRRSKELVKRVRELLKSARRREGVDEIRRLVEEVLRRARKLVEEDKELIKKSLKDLKTIVDELRKLLEDVIREAERTAR

SEQ ID NO: 5477 - protein, 174 aa, Artificial Sequence; identical to SEQ ID NO: 5476
  Synthetic

SEQ ID NO: 5478 - protein, 170 aa, Artificial Sequence
  Synthetic
EEVERILEDVRRMIEDHRRKVEEIVKRSEDMARRLIEEVKRIVEESKKLADELKKEDGSEELRRKIDKRHKESEELLKDIERKLEEVHRDSERRLKENKERIDRTREEVEKRGVDEDVRRELKRLVDEVKKRNDEVRERDKEVVDRVKEVLDRVRETDRRLVEEVRRRAN

SEQ ID NO: 5479 - protein, 170 aa, Artificial Sequence; identical to SEQ ID NO: 5478
  Synthetic

SEQ ID NO: 5480 - protein, 170 aa, Artificial Sequence
  Synthetic
SRVEKILEDVKEEIKKHKEEVDRIVKRSREMAKRHIERVDEILERSRRMIEELKKREGSEDLERELERVHRESEKLLRENEKRIKETHEKSKRDLDENRKAIARTEEEVRKAGVKEDVERELRRLVEEVEKRNEDVEREDRRLVEEVKKRNDEVRKEDRRLVEEVKERAR

SEQ ID NO: 5481 - protein, 170 aa, Artificial Sequence; identical to SEQ ID NO: 5480
  Synthetic

SEQ ID NO: 5482 - protein, 183 aa, Artificial Sequence
  Synthetic
DELEKVEKDVRRLLEKVRKRIDEVRKEVERLSRESEEVTRRVLETVEKLLKDVERVIRETLKDDDEKLRDLERLIREIREKVRRAVETDEERNKRLNDKLKKLLEDLEDKIRKLEEELRKAKETGKPVEEVLETVKRLIERIEEEIEKVVKDVERLVRESIKHSRDVLKEVDDLIKRIRERVK

SEQ ID NO: 5483 - protein, 183 aa, Artificial Sequence; identical to SEQ ID NO: 5482
  Synthetic

SEQ ID NO: 5484 - protein, 174 aa, Artificial Sequence
  Synthetic
DDDKRIREILRRVHEKSEKVLRKVRKRLEEVRRESEEVVRRVKKDLDRVLEEVRRKGVSEELLKELEKIIEDIERHLKKNRDDVERKVREIEKKLRKLLEDDRRVVKEIEEKLRSGDGREDVAREVEEIAKRTIDRVEAIVREVERIARESIDNVRRVVEEVKRAVTELIKRVE

SEQ ID NO: 5485 - protein, 174 aa, Artificial Sequence; identical to SEQ ID NO: 5484
  Synthetic

SEQ ID NO: 5486 - protein, 174 aa, Artificial Sequence
  Synthetic
SEDETIRRIVRTVHEESRKSTEDVRREVERVLRESEEVVKKVKKKVDDVLKRVEETGISEELEERMRRIIREIREHLKDNLRRVREVIERIERKLEETERRDEKVLREIEKKIRDGDGREEVAREVTKIARDTIRENEEIAKEVREIVERSIKNLEEVAEEVERVVRELIEARR

SEQ ID NO: 5487 - protein, 174 aa, Artificial Sequence; identical to SEQ ID NO: 5486
  Synthetic

SEQ ID NO: 5488 - protein, 174 aa, Artificial Sequence
  Synthetic
SRDEKIRDILRRVLKEVRDSTKKVEEDLEDVHRRTEEELRKVKKRLDEVLKRVRDEGASEELKRRMEEVVRRIEELLKKLLKEDRDVVKEIRDKLDETRKEMEEVAERIKDKIRRGDGREKVAEEVKRIADRLIDLNRRIAEEVDKIVRDSIKKVEEIVTEVEKIVEKLIRDVR

SEQ ID NO: 5489 - protein, 174 aa, Artificial Sequence; identical to SEQ ID NO: 5488
  Synthetic

SEQ ID NO: 5490 - protein, 170 aa, Artificial Sequence
  Synthetic
DRLEKIVEEVRRLADELIRHVERNVREVEKAVRESIEHVRDVAEKVERAVRELEKREGSEDLDRELDRVRREIEELLKRNKDRITRVVDKSRRSSEENKRELKKVEDEVERRGISEEVRKELKRVIREVEKVNKESNDVTRKVKEESEKVLKEVEKRLREVIRRVKEKIR

SEQ ID NO: 5491 - protein, 170 aa, Artificial Sequence; identical to SEQ ID NO: 5490
  Synthetic

SEQ ID NO: 5492 - protein, 170 aa, Artificial Sequence
  Synthetic
SEVEDVVRKVEKLVRDLIKHVEENVRRVEEVVRKLIEEIKRIAEEITRIAEELAKEPGSEDLLRKLEKVLKEIDDKLKELEDRLRDMVRRSRESSEENERRLKRVEDEVRRNGISEEVEKVLREVVKEVEKVNRESREVTRRVLEEAKEMLERVKKIVKEVIEKVRRVVK

SEQ ID NO: 5493 - protein, 170 aa, Artificial Sequence; identical to SEQ ID NO: 5492
  Synthetic

SEQ ID NO: 5494 - protein, 184 aa, Artificial Sequence
  Synthetic
SADREVEERLREVIERVKEALKRSKDVTDEVTRRVEKLDKESNDTSREVIRRVEDMLSRVSDEDKVRRIKEELERVRRESEETSKKNKRELDEVRKDSRRTLEDIRRKLEEVERRIREELREVRDDELVKRIVEKVDKAVKDLEKLVRENVERVRRAVERSRKTVEDNVKRSRDVVRELRERVR

SEQ ID NO: 5495 - protein, 184 aa, Artificial Sequence; identical to SEQ ID NO: 5494
  Synthetic

SEQ ID NO: 5496 - protein, 184 aa, Artificial Sequence
  Synthetic
SSIDEVREEIRRVIEEVRKLLEESKKDTDRVRREAEDMDRKANETVEEVERRVREVLRSVSDERKVREIEKKLEDMLRELKKRSDDNKRRLEDLVRRSDKTLDEIREELERALREIEEVLEKVDKEEVVRRILKRIEEVLKKLRKAIKDNVDRVRDAVRRSRRTVEDIVRRVREVLERLEREIK

SEQ ID NO: 5497 - protein, 184 aa, Artificial Sequence; identical to SEQ ID NO: 5496
  Synthetic

SEQ ID NO: 5498 - protein, 175 aa, Artificial Sequence
  Synthetic
SLAEEVERRLEESHKRARKLVKEVKEALEESHKESDRLVREVEKELKRVAEEVRKEGIDEKRLKEIKELVDTIRKEIKEVLDEDRRTVKEIKEEVEKIVEDLERLHREIRKEIEKVKEAVEKVRDLVRKTTEKVEEVVRRLRELVKENLDEAKRVVEDLKRKVKEIEEKVKEDSK

SEQ ID NO: 5499 - protein, 175 aa, Artificial Sequence; identical to SEQ ID NO: 5498
  Synthetic

SEQ ID NO: 5500 - protein, 178 aa, Artificial Sequence
  Synthetic
SMAEKVDEVSKRSKEELKRVVKEVHEVSTRVEKVVKDVLREVEKVSKESTDVVDRVGVDSETLKDLKRRDKELLDRIRDKLRRMLEDLRRLNKEAEDLIRRLETEDEKLLRDIRRKVRGREVVDKVVRDLEKTVKDVKEVVDRAVTASKELVDRIRRLAEEVVRALERTVDKVRRDAK

SEQ ID NO: 5501 - protein, 178 aa, Artificial Sequence; identical to SEQ ID NO: 5500
  Synthetic

SEQ ID NO: 5502 - protein, 178 aa, Artificial Sequence
  Synthetic
DAREEVDEVSRESKEELKRVLDEVDDVSEKSRKTVRDMLRKNKEVVDEVEKTLEDVGVDSRKVDELRKRIKTLSRKSEEDVRKLLKRDEDLLRRIREEVKRLLDEDEKLLKDIRDKVRGKEVVKDVVRKLRETVKRVREVAEEVVRELEKTVDEVRKRADDSVKKHRDLVKEVKEAAD

SEQ ID NO: 5503 - protein, 178 aa, Artificial Sequence; identical to SEQ ID NO: 5502
  Synthetic

SEQ ID NO: 5504 - protein, 178 aa, Artificial Sequence
  Synthetic
SAEEDVERVVREVEREVREALRRVREVSERSREDVRRVVDENRKVAEEVEKRVRDVEVDSEDLRKLLEDIRRVSEESERLARELLKEDEDLLRRIEDTVRRLLERLKDLLEDIRNKVRGEEVVREVVKKLREIVKDIRRLAEEVVRRLEDTVRKVREIAKRSVDAHRELVRRVEERAR

SEQ ID NO: 5505 - protein, 178 aa, Artificial Sequence; identical to SEQ ID NO: 5504
  Synthetic

SEQ ID NO: 5506 - protein, 174 aa, Artificial Sequence
  Synthetic
SSAEEVERVLRRVEEEDRRLVAEVRRVLKESRRTLEELVRRVKEVLEEVRKEVERIEVSEEVLREIEELLERLDRELDEVLKESEDTLRAIEKKLEEVHRRTKKLLDELREVLERGKDAKELIKRVEEIVEESRKLIDEAIREVEENVDRSRKKIKELIDRVREILKRARDRAR

SEQ ID NO: 5507 - protein, 174 aa, Artificial Sequence; identical to SEQ ID NO: 5506
  Synthetic

SEQ ID NO: 5508 - protein, 174 aa, Artificial Sequence
  Synthetic
DSEEEVKKVLDEVRRRDEKLVEEVRKVNEDSLDTLRKLAEEVKRKLDEVRERVERLEVSEDVLRRIEELLKDLKRRLEEVLRKSEETLRRNKEEIEKTHKDTRDELKELEELIKAGKDAEELIREVERIVKKSEDMIREHIRKVEENVEESKKEIEELIRRVDDILREAKEAAD

SEQ ID NO: 5509 - protein, 174 aa, Artificial Sequence; identical to SEQ ID NO: 5508
  Synthetic

SEQ ID NO: 5510 - protein, 174 aa, Artificial Sequence
  Synthetic
SGEEDLERVLDEVRRRDKKLVEEVRKRNEDSLRRLERLAEEVERVNEDVLKKVEELRVSEEVLKEIEEELRRNKEAIKRTLKRSKETLDKNERDIERTHERTKKKLDEIRELIKAGKDASEVRKLVEEIVTDSRRRITEHIRRVEENAKDSERVIREHKERVKEILEKVRRAAE

SEQ ID NO: 5511 - protein, 174 aa, Artificial Sequence; identical to SEQ ID NO: 5510
  Synthetic

SEQ ID NO: 5512 - protein, 181 aa, Artificial Sequence
  Synthetic
SEVEKLVEDVKKAVKEVLEEAKENVRKVEDVVRRVLERAEDNVEEVKKVVATLVDLVRRGDRRERLEERAKRINDESRKHLDKLERDVERMSKESEKHLRELEKKVEEILKEVEDRLSRVDGEELMREVRRVIKEVRDRVRDVLDEVRRVNEEVNRRVRKVLEDVRRVNERTKEDLDRESK

SEQ ID NO: 5513 - protein, 181 aa, Artificial Sequence; identical to SEQ ID NO: 5512
  Synthetic

SEQ ID NO: 5514 - protein, 181 aa, Artificial Sequence
  Synthetic
SEVDKLVREVDELVKKSKDNIDKLVKRVREMVEESKRKADRNVEEVERVVREIKDLARRGDRDERLRREVRRRNEESRRHLEKNKKESDDMLKEVKDHLDRNLKESEEELKRVEDKLKDVRGDELVKKVRDRLEEVERRTRKALEDVKRVLEDVKRLTDTALREVERVNRKTEEEVDREIR

SEQ ID NO: 5515 - protein, 181 aa, Artificial Sequence; identical to SEQ ID NO: 5514
  Synthetic

SEQ ID NO: 5516 - protein, 181 aa, Artificial Sequence
  Synthetic
DKVDRVVKEIEEAVKENLDRVREIVKEVRDLVRENLEEVRKSVEDVKRLVKEILELVRAGVPEEDLKRTLDEVVKRSEESLKRLKEHTERVEERLDRLLRELKKHTDDVKRRVEELRKDSTDEDAVRKVEEVLREVEKRSTEALKELRDVLREVRRESEEALDENRRVTEEVKKKVEDERK

SEQ ID NO: 5517 - protein, 181 aa, Artificial Sequence; identical to SEQ ID NO: 5516
  Synthetic

SEQ ID NO: 5518 - protein, 181 aa, Artificial Sequence
  Synthetic
SEVEEIVREIRDLVRKNEERVKKIVEDVRRAVEEILELAERSVEKVKRLVDDLRRLAENGVPREKLREDLRKIVEESKESLRRLERKLEEVKDTLRRLLEELKEHTDRVARRLEELRRRTTDEEAVRKVDRVLEEVEKRSRDALKELEEVLKEVERLAREVLEKNERVTEAVEDLVTKAAK

SEQ ID NO: 5519 - protein, 181 aa, Artificial Sequence; identical to SEQ ID NO: 5518
  Synthetic

SEQ ID NO: 5520 - protein, 178 aa, Artificial Sequence
  Synthetic
DEEERVREELERVNEEVKELKKEVETVNKRVHETLEKVIREVKKVNDDVHRTVEDLRRRGLLTEEVIRDLERASRESEDELRKVREKLRRASEESRDKLREVEERHEKLSRDIEEELRAGGDVEEIVKKIKEVVDRTRKLAKELVKESRDLAEDVKRLIKRLVEDSRRLVEEIKERAR

SEQ ID NO: 5521 - protein, 178 aa, Artificial Sequence; identical to SEQ ID NO: 5520
  Synthetic

SEQ ID NO: 5522 - protein, 178 aa, Artificial Sequence
  Synthetic
SEEERVEKRLREVNKDVKRLVKKVRDVNRKVHEDTKRLVEEVRRVNRDVHRRVKELREAGKLDEEVIKDLEKASEDSKRELEKVVRESEDSSRRSEEKLRRVEERHKRLSEEIRRKLESGGDVDKIVEEIDKVVTETRELAERLVKESEDNVERSRDLARKLVEKSERLVKEIDDRAR

SEQ ID NO: 5523 - protein, 178 aa, Artificial Sequence; identical to SEQ ID NO: 5522
  Synthetic

SEQ ID NO: 5524 - protein, 178 aa, Artificial Sequence
  Synthetic
SAAEKVREELERVNRRVEELLKKVKKVNEEVRDIVRKVVREVERVNKEVEEEVKRLVDQGRATEEVKKTVDKLSEDSRRKLKEAIEELEKRSRESEKELEDVKREHDRLSEEIERELESGGDVEEIVKKIKDVVKRTDELAERLVETSERLARTIKKVAEDLVRDSKRIVDEVRTRIT

SEQ ID NO: 5525 - protein, 178 aa, Artificial Sequence; identical to SEQ ID NO: 5524
  Synthetic

SEQ ID NO: 5526 - protein, 178 aa, Artificial Sequence
  Synthetic
SDEDRVRRRLEEVNREVEELLRDVERVNEEVKRRVKKVIREVEEVNKRVEEEVKRLRDEGRLDDKDIKRLKEASDKSREDLKRVEEKVEKLSRDNKKKLDDVKRRHDELSKRIDEELKSGGDVEDIVRKIDDVVRETRELAKELVKHVRDVVEDVRRLVKELVDLSEKLVKEIRDKVE

SEQ ID NO: 5527 - protein, 178 aa, Artificial Sequence; identical to SEQ ID NO: 5526
  Synthetic

SEQ ID NO: 5528 - protein, 182 aa, Artificial Sequence
  Synthetic
SEVEKVVKEMEDLARENERLAREIVKDVERLVREIEDTVRRSVETTRRLVEEIRELAERGVDERELERFLKEIEERNRKSREDLDRLLEKIERKVRKVDRDSDRSLERIRRRIDDVRRKINSDERVLELLERVLRELEKVVEDSKRRIKEVLDELRKAVDKVKKEDKKVHDELRKVVEEVRT

SEQ ID NO: 5529 - protein, 182 aa, Artificial Sequence; identical to SEQ ID NO: 5528
  Synthetic

SEQ ID NO: 5530 - protein, 185 aa, Artificial Sequence
  Synthetic
RVEELLRKVITELDRVLEEVRRRNEASIEELDRVLKEVERLNKEVDEELKKVLEKVRKDVSDEKKVRELEREVREISRRNEKLLRELREEVKRIKERNKRLLEELERTARRIKKRLEDLLRKLKDVEEVVRRIVEEIKKVIDELREESRRTVREVEKLVKEILDRSRKTVEEVKRLAEEIERKAK

SEQ ID NO: 5531 - protein, 185 aa, Artificial Sequence; identical to SEQ ID NO: 5530
  Synthetic

SEQ ID NO: 5532 - protein, 178 aa, Artificial Sequence
  Synthetic
RVKELVDEVKRKVEESMRESTERNRTATEKVEKSLRDSEKLNRDATRKLKKVVDDVRREGRVPEEVERRVKEILDKNNEDMKKVLEETRRILKDNNEELKRVLKETRDLLKELDDEVRETKIDEEVVKKVEDVVERNKDLVRKSVEHIDKVVKENRELVKRSVEHIDRVVKEARERAR

SEQ ID NO: 5533 - protein, 178 aa, Artificial Sequence; identical to SEQ ID NO: 5532
  Synthetic

SEQ ID NO: 5534 - protein, 178 aa, Artificial Sequence
  Synthetic
SAEELVKRVLDDVRRSAEESERLNREATEEVKRSLEKSRKDAERVLRDLERVVRKVKTEGAVSDEVVKEIEDIVRELRKEAEKVHRETEKLLKDNNDDARRVHEETKELLERLRREVRETRIDERVVRKVEAVVERNRKLVEDSVRHIREVVKRNEDLVRRLVEEVKRVVKKAEDKAR

SEQ ID NO: 5535 - protein, 178 aa, Artificial Sequence; identical to SEQ ID NO: 5534
  Synthetic

SEQ ID NO: 5536 - protein, 178 aa, Artificial Sequence
  Synthetic
DVEELVKKVEDMVRKVIEEVKKRNTDVTRRVEESLRKSTELVREAEERLRRTLEELRRRGLAPEELVERLRRLLERVKREVERVHEETKRLLKRNNEDMKRVVEELKKLLDRLREEVRDTRISEEVVRKAEEVVKRAKELVARSVKHVDEVVRRNEELVTRLVRELDELVKEVRETAR

SEQ ID NO: 5537 - protein, 178 aa, Artificial Sequence; identical to SEQ ID NO: 5536
  Synthetic

SEQ ID NO: 5538 - protein, 178 aa, Artificial Sequence
  Synthetic
RAERLVREVARRLEEVLKEVEKLNKDATDKVKKSLEDSRKKNEDVTREVRRVIEELRTRGDISKDVVKRIEDILRENNRRIAEVHRETKELLKRNNDEARKVKKKAKEDLERLTREVRDTKIDEDVVRRAEELVERLRKIAEDSVRHLEEVVRKNERLVKESVDHVRTAVEELKETAR

SEQ ID NO: 5539 - protein, 178 aa, Artificial Sequence; identical to SEQ ID NO: 5538
  Synthetic

SEQ ID NO: 5540 - protein, 178 aa, Artificial Sequence
  Synthetic
DAEEKVKEVEREVEKVIEEVKRDNTRVTEENKRVLDTVRERNKRVTDELRKVLEDVRREGSVPEEVVRRAEEILKRNNDEVREVLRESERRLRENNERMKRVEDDIRKLTKELREEVRDTKIDEEVVKRIADVVKTVKRRVDESVKDIKRSVKETEDRVDRSVRHVEEVLKELRKASE

SEQ ID NO: 5541 - protein, 178 aa, Artificial Sequence; identical to SEQ ID NO: 5540
  Synthetic

SEQ ID NO: 5542 - protein, 178 aa, Artificial Sequence
  Synthetic
SAEDKVRKVKKEVEKVIKDVKEENRRVTRENEEVLDRVKKDNERATRKLRKVVEDVRREGRVPEEVVRKVTEELRENNKRMKEVLDKSRKKLEENNKRVDEVVEELRKLLEDLDREVRDTKIDERVVERIKRVVERVDELVRRSVKDVKDSVRETRKLVDDSVKDIDRVVKEARDRAK

SEQ ID NO: 5543 - protein, 178 aa, Artificial Sequence; identical to SEQ ID NO: 5542
  Synthetic

SEQ ID NO: 5544 - protein, 178 aa, Artificial Sequence
  Synthetic
DAKDKVRKVLEEVKKVIEEVERRNRTVTRENERVLKEVKDRNTEVTKELKKVVEDVKRRGDVPEEVEDDIRRKVEKNNRDVEKVLDDSRRLLEENNKKAEDVKRKLEDELRKLEEEVRRTKIDEEVVDRVRRVVEEVTELVRRSVEEIKESVKTTRDLVRKSVKNIRDLVEEAKRRAD

SEQ ID NO: 5545 - protein, 178 aa, Artificial Sequence; identical to SEQ ID NO: 5544
  Synthetic

SEQ ID NO: 5546 - protein, 174 aa, Artificial Sequence
  Synthetic
DEVETVVRDVKRLVRENERKVREIVKTVDKLVKENEDLVKRSVEELKKLAKEIKDLADEGVDKRELDEVLKRIRERSERSKRESDRTLEKITRDIERVKRESRKSLEDVRKRLEDFPESEDLRRVKKEAEDVVRDSERLIEEVKRRVKKVVDDSRRKDEEALRDVERVIEEVRR

SEQ ID NO: 5547 - protein, 174 aa, Artificial Sequence; identical to SEQ ID NO: 5546
  Synthetic

SEQ ID NO: 5548 - protein, 174 aa, Artificial Sequence
  Synthetic
SEVDDVVRRVKKLVKEDRDLVRDSVRKLDELVRDDKRLVDEVVERLERIVKEIEDLMREGVDERTLREVLKKAEEVVRESKERHDTTLERVKDVVRRSREEHKRTLDEAKKEIDRVPRSEKLEEVLKMLEKVSDEVKKENDRALKKVEDVSREVKELNKEVLKRARDVVERVRT

SEQ ID NO: 5549 - protein, 174 aa, Artificial Sequence; identical to SEQ ID NO: 5548
  Synthetic

SEQ ID NO: 5550 - protein, 178 aa, Artificial Sequence
  Synthetic
SSKEKVKKVLDKVKEVLDRVRELVKRVDRESEKVVEDVRRKNKRASEKVKTVIRDVEEKKQVPEKVVKEVEELLKRNNDTMKRVVDESKKTLDKLREEVKRVREDIKRLLRELEDVVDRGKDVDDVLRKVEEIVRKVKDMVRKILEKAERNVEETERVVTESKENADRIVKEVEDRAR

SEQ ID NO: 5551 - protein, 178 aa, Artificial Sequence; identical to SEQ ID NO: 5550
  Synthetic

SEQ ID NO: 5552 - protein, 178 aa, Artificial Sequence
  Synthetic
SAREAVTEVLRKVREVLKRVEDENRKVSKELRDLLEEVERRNRDLTEKVKRLIDELKERGRIDDKAVRDLEKLLEDNNRDVKRLLEEIDKLIKDNNKKVEKVLREIRRLLERLEDVVDRGVDVERILEEAERIVKELEEVLEESLRNVKEILKKLEDALRKSEEDVRRILERVEEEAR

SEQ ID NO: 5553 - protein, 178 aa, Artificial Sequence; identical to SEQ ID NO: 5552
  Synthetic

SEQ ID NO: 5554 - protein, 178 aa, Artificial Sequence
  Synthetic
REVEEVLRRIKEMVKRIEELVRRSEDRAKKLVDTNRDLVRRSEERFRELVKEIEDVAREGVDEKELDKIRKKVKKESDKSKRTLEESLERVEEDSKRVEDELERILREIKEEVDRMREEGVDVEELERVLREVEKVVRDVRRRNEKATRDVRRSVEESRRLDKRALDEVRKRIEEVRT

SEQ ID NO: 5555 - protein, 178 aa, Artificial Sequence; identical to SEQ ID NO: 5554
  Synthetic

SEQ ID NO: 5556 - protein, 174 aa, Artificial Sequence
  Synthetic
RVEEVLKRVLDKLRESNKDSERLVREALKEHEEVNKEVEDRIREVLRRVEEVLKKVEKDKGRDKELEKIRKVLKDLADEVRELLKRLNDVLDRIRKEVKKLSDESNELIKELERANLPAEDIKRLVDEIVDTDRKLVEEVKREAKESVKESEELVERVKRKADRIVEEVEKTVK

SEQ ID NO: 5557 - protein, 174 aa, Artificial Sequence; identical to SEQ ID NO: 5556
  Synthetic

SEQ ID NO: 5558 - protein, 174 aa, Artificial Sequence
  Synthetic
DEVEEVRKTIERLVDRIEDVVRRVLELSRDTVRKNEDLVRRIEEELTKLVEDIKDVSRKREPEEVIETLAREAERILEEVKRLDEESKRESEKKLEEIKRELEELAEELKRISDSVERAELLEEVERLLEEVLRKAEKVIEDARKLDEDVNRKSNKVIEDVARRLEKVLKEVKD

SEQ ID NO: 5559 - protein, 174 aa, Artificial Sequence; identical to SEQ ID NO: 5558
  Synthetic

SEQ ID NO: 5560 - protein, 177 aa, Artificial Sequence
  Synthetic
SVEDVIRRVKEKSEEVLKRLKEVIDEVKKRSEDVLKEVEDAIDEVRRRSEEALDRVRRAGLDKKDLERLRRHSEELVKRVRKLLEDLRDHSRKLVEEVRKLLEDLRDHSRKLVERARRERKSEEARDLADRDVEDVERVVTDIRRLVEKNVRDVRRVVREIEDAVRRNVKEIDRRVK

SEQ ID NO: 5561 - protein, 177 aa, Artificial Sequence; identical to SEQ ID NO: 5560
  Synthetic

SEQ ID NO: 5562 - protein, 177 aa, Artificial Sequence
  Synthetic
SVEELIERVKRRSEKVLRDAEKTIRDLKKDSKRVNDELEKVIRDVMEKSKTALDEVRRRGVPKEVLERLERSSRKIKRDVEKLSEDNRRHSEELERRVEELLRKLKKHSEELEEEARRKRVSEEARRLVERDVEDVKRLVEEIKKLVTDNVRTVEDLVRRIKREAEENVKEIKEEVR

SEQ ID NO: 5563 - protein, 177 aa, Artificial Sequence; identical to SEQ ID NO: 5562
  Synthetic

SEQ ID NO: 5564 - protein, 178 aa, Artificial Sequence
  Synthetic
SDVDRAVETNDKVVTEIVERVKEVVERNREIVERISTTVDEMVRRNRDIVRRVAERVSDKEKVDRVVKHVEDTVRTIRDLVRRIREHVRRTVERIRKLAEEITERSKRLSDEIRKVGSDKDVRDLVREVLERSDELVKRVEEEVKRLLERNKKLLDDVTEAAARLLKRNKEVVEELDK

SEQ ID NO: 5565 - protein, 178 aa, Artificial Sequence; identical to SEQ ID NO: 5564
  Synthetic

SEQ ID NO: 5566 - protein, 178 aa, Artificial Sequence
  Synthetic
SEVDRVVEENDRVVRKVEEVVREAVERNETVAERVKDTVDRMVRENEKIVDKVRKDVKDKDKVDTVKKHVEKLVREVKELVERIVETSRDLSRKIKDLVDKVKERSKRLSEEIRRVGDEKDVEKLVRDVLRESEKLVDDVRRAVKKLLEDSEELVREVKEAAEESLRRNKKIVEDLTR

SEQ ID NO: 5567 - protein, 178 aa, Artificial Sequence; identical to SEQ ID NO: 5566
  Synthetic

SEQ ID NO: 5568 - protein, 170 aa, Artificial Sequence
  Synthetic
DELETVLREVERVVTEVKKLNERTVRDDKEVVERVLREIDKLLKEIREKVKEVKKKLRTEEVAERVVKEIKDRVDDIERRVDEALKESKRTVDESEREVKEMVERIEEMARRVKGEDVERTVRKLLEEIKDSVRKSKEDVRRSVEEIERLVRKVKEDVKRLLRDIRERAK

SEQ ID NO: 5569 - protein, 170 aa, Artificial Sequence; identical to SEQ ID NO: 5568
  Synthetic

SEQ ID NO: 5570 - protein, 185 aa, Artificial Sequence
  Synthetic
SKVEKALKKIEDVLEDIKRLVEEVVERDERLLERLEEENKRADEKSKELVKRLTDLVRENKGKEETVKRVVDRVTEEVKRVVDKTREVLKKIEDSSRRVLEEVERLLREVEKEVTDILDEIRKDNLREALERIREILEEVRKAVEDLLRKIKETLKRIRERVKRLIENLEKSLEDARKEVDRLRK

SEQ ID NO: 5571 - protein, 185 aa, Artificial Sequence; identical to SEQ ID NO: 5570
  Synthetic

SEQ ID NO: 5572 - protein, 177 aa, Artificial Sequence
  Synthetic
DVDERIEELLRRIERLVEESERDVRRLKREIDDLVTKSLKTVEESLKRIKELVDRVSEEAKDEDKVRTVKTKVDEALKRSKRTAEESKRLVDEARKEIEDVVKKSREIVKRVIDEIKKIRNKDDVERVVRRVLKEIDDSTKEIRRIVKRVLEEIERTTRDDKRVIDEVRELIKETSR

SEQ ID NO: 5573 - protein, 177 aa, Artificial Sequence; identical to SEQ ID NO: 5572
  Synthetic

SEQ ID NO: 5574 - protein, 178 aa, Artificial Sequence
  Synthetic
DADELVTEVRKRVRETLEEIRTILDEVRKRVKKTVEDIRTEAERVKREVDKLVKEVRDNNLPEEMVEKIRRMVDTVAREVEEAVKRSEDTLDRIRKLVEKVLDDSRKTLEEIEKLVKENKGKDREIEKLLDDNRRLIEEVLRRIDELVREDEELVKRVLDRIRTVLDRIREEVDEVRR

SEQ ID NO: 5575 - protein, 178 aa, Artificial Sequence; identical to SEQ ID NO: 5574
  Synthetic

SEQ ID NO: 5576 - protein, 178 aa, Artificial Sequence
  Synthetic
DVRELLKKVEDEVRRTLKEIERILKEVKTESDKTLKEVAELLERLDRDVKRLVKEVRDNNVPEEVVRRIEKVARDVKEEVKRLLKELERSVEELARRVKDALRKSARTLEEIRRLVEENQGKKEEIRKLVERNKELVRDVLRRIKELLKRDKEMLEEIRERIKEIEKRLKELLERAKR

SEQ ID NO: 5577 - protein, 178 aa, Artificial Sequence; identical to SEQ ID NO: 5576
  Synthetic

SEQ ID NO: 5578 - protein, 185 aa, Artificial Sequence
  Synthetic
SEIEEVLKRVEEMIRRSKKLTDKVLREVEKMIRELDKKTDEVLERSERLARELKELVRRDVPDSEKVERIREKIDRLVKESRDSVKKNKDENREIVRRVRDLVRENKERLDKVLEDVDREVKRVRRRERIEEILRRVTEAIKRSKEDSERIRETVTRLIRESEENSKRNLERVKKVIDELREEIR

SEQ ID NO: 5579 - protein, 185 aa, Artificial Sequence; identical to SEQ ID NO: 5578
  Synthetic

SEQ ID NO: 5580 - protein, 185 aa, Artificial Sequence
  Synthetic
DKLEEVLKRVEEMLRELDKETDDVLKTVEDLLRRLDELTDEVLKESRRAAEELKRKVDRDIDRSERAERIKRKIEELVKESERSVEENKRRNREVLDRVTKLAKRNKERNREVLKRIAEDVKDIRREEKIREIEKKARKLIKDSRKNIRDILETVKRLIEESDKNIKENEKRVRKVIDELDKEIK

SEQ ID NO: 5581 - protein, 185 aa, Artificial Sequence; identical to SEQ ID NO: 5580
  Synthetic

SEQ ID NO: 5582 - protein, 182 aa, Artificial Sequence
  Synthetic
REKEEIIKKVKDVVKRVKEELKKIVEESERLVREVEEELKRSNEKSRDLVRRAEEELEKKSTDKDVRERVKEIVKDLRRLLREDKRLVEEILKRLRELLERDRRTIEEILKELEDLLRRIEESDRREEELDRLIKRVEDRARKVLEDSKRTIEEIEKVARDVLRRSEETVKEVEEKARRALK

SEQ ID NO: 5583 - protein, 182 aa, Artificial Sequence; identical to SEQ ID NO: 5582
  Synthetic

SEQ ID NO: 5584 - protein, 189 aa, Artificial Sequence
  Synthetic
SAVEEIVKEVERIVREAEKALKKSVDDNRRIVEDAVRTLKRLVEEAARLVDEARKELTKKSTTEDVERRVREIVRDLERLLEEVEKRVEDIIEELKKSLEESERHTREVVKKLRELLEEIKRVVTEKGTDEDVLRELKRLLKELERVVEEVLRRDRKWLEDTRREVKRVVEELKRLLDELREVVERARR

SEQ ID NO: 5585 - protein, 189 aa, Artificial Sequence; identical to SEQ ID NO: 5584
  Synthetic

SEQ ID NO: 5586 - protein, 185 aa, Artificial Sequence
  Synthetic
KELEDLVREIEDTVDRIEREIRKLVEDDHRSVRKAEEDNRRLVKESEDLVRRIEEEIRKKETTEEVKERAERVIRELRELLKRNREIVERSIRKLEDINRRSKEIADRVIEELRRLLKEVRKVVKDGVDEEVMRRLKEDIERLMEEIRREVEKLNETTKEVVKESLETHKRIIERIREVAEETRR

SEQ ID NO: 5587 - protein, 185 aa, Artificial Sequence; identical to SEQ ID NO: 5586
  Synthetic

SEQ ID NO: 5588 - protein, 175 aa, Artificial Sequence
  Synthetic
SSLEELLKEIRKRVERIKEELDRALKEDHDIVRKALRELDEMLKKNEETVRRAMERIKDKREVIKELEDSLRKSEEIVRRLKETLKRSNEDSERLVREIKKKLEELARTIEDLVRRGVPEDVVRKVLEELEEEARRVLRELRESLKRTEELVRRALETLKRSDEETKKLVEDIER

SEQ ID NO: 5589 - protein, 175 aa, Artificial Sequence; identical to SEQ ID NO: 5588
  Synthetic

SEQ ID NO: 5590 - protein, 175 aa, Artificial Sequence
  Synthetic
SSLEELIKEDHRVVREAEKRLEELLKEDHDRLREAKEELERVLKRDHETLKEVVERIREKREVIEELKRSNEESRRLVEDAKRRLDESNERSEEIVRRLKEELKRSNDDSRRVVEEGVPEEVLKKIIERTRDLVRRALRTMEESIKRTEELVKKLLDELEASIRKTEEDADRIRK

SEQ ID NO: 5591 - protein, 175 aa, Artificial Sequence; identical to SEQ ID NO: 5590
  Synthetic

SEQ ID NO: 5592 - protein, 175 aa, Artificial Sequence
  Synthetic
SSLERLIEEDHETVRRVKKTLDDMLKRDHEVVDEARRRLDELLKRDTDIVRDAVKRIRDKREVIERLRESNDDSRRIVEEIKKTLKRSNEKSKRIVEELKRRLEESNERSRDVVRKGVPEEVLKKIIKETKELAKEAVERLEESIKETEDLVRRVLKEMEESLRRTEELVREIER

SEQ ID NO: 5593 - protein, 175 aa, Artificial Sequence; identical to SEQ ID NO: 5592
  Synthetic

SEQ ID NO: 5594 - protein, 180 aa, Artificial Sequence
  Synthetic
SIEEVIERIREEAERLLKELEEVNRESTRLAEDLREELRRVLENSRALVKELKERIRKESLLKEVDELAKRLTEEHERLLREVEDIMRKVNKHDTELLRTVEELMKEVKRRLEELRRRNVDDKSLKELLRDVERKIREVRKRLKESLERVEREIRRVREEIKRLNDESRERIERVKRRVD

SEQ ID NO: 5595 - protein, 180 aa, Artificial Sequence; identical to SEQ ID NO: 5594
  Synthetic

SEQ ID NO: 5596 - protein, 176 aa, Artificial Sequence
  Synthetic
DAEELLRRLDKSSKETLKRNEESLRRSEETSKRSLDTNRRSLEKIEKIATDLRRKLSERKIRELLKRIEEILRKVAEDVRRNSEHNKRLLDRSRENVRRISEHNRKLLEELAELAKRGDVDERVVREAEKLDEDNTRHSRRNLEESKRLDEENIKRSEDLLRDVRRLIEEVLEEAR

SEQ ID NO: 5597 - protein, 176 aa, Artificial Sequence; identical to SEQ ID NO: 5596
  Synthetic

SEQ ID NO: 5598 - protein, 188 aa, Artificial Sequence
  Synthetic
SKLDEILERAKKLIDDLRKESDDVLRRDRELIERIRRKSEEVLERVKRLIEELEDRVRKVRDEDLKRKLEEEVKKILEDVDDVIRRITEEIRRTARESEKVIEDISRKIDEVLDRLRKLIEELRKESDEDEVRRVLRELERLVKELKDKNKESLDELKKTNDRLEEENRESLRRAREEARRILEEIRR

SEQ ID NO: 5599 - protein, 188 aa, Artificial Sequence; identical to SEQ ID NO: 5598
  Synthetic

SEQ ID NO: 5600 - protein, 188 aa, Artificial Sequence
  Synthetic
DELEEILKRVEKLIRDSIEKIRRILEEDRELIKELIKESREVLERVRELIKTLEKKVKDVDKEELKKRLEDEVRKVEEDVRRLIEEITRKIEKTLRESKKKADEDKEENKKILDEVRELIRDLREKTDRRTVEEVLKRIEELVKRSLEESDRVAKEVRKTNEEVKKTNEDSLRKIKELVKRILEKIRK

SEQ ID NO: 5601 - protein, 188 aa, Artificial Sequence; identical to SEQ ID NO: 5600
  Synthetic

SEQ ID NO: 5602 - protein, 188 aa, Artificial Sequence
  Synthetic
DELEDVLREVRKLIKELEKKSREVLKRDKELIDRIRKESEEVLKRVEDVLRKLEDEVRKVREERLKEELKKKVERVLREVERLIKEISDKIRKTLKESRDVIREISEEIKDILRRAREKARDLADKSDKRRVDEVLEEIERRVTELNKKNEESLRRAEKTNKELDEENKESLERIRKLIEDILRKIEK

SEQ ID NO: 5603 - protein, 188 aa, Artificial Sequence; identical to SEQ ID NO: 5602
  Synthetic

SEQ ID NO: 5604 - protein, 188 aa, Artificial Sequence
  Synthetic
DELERILEEVKRRIERLIERLREVLERDKKLIEDIRRESEDVLRRVEEVIKKIREELERIRDRRLREELMKKIEKLLREVDKVIKDISEKIRRTLERSREVIERLKEEVEKVLREVEDMIRKLAERSDRETVKDVLRKLRKIADEVRRDIERVLDEARKTNKRLDEENKDSLKKLRDRAKELLDEVRR

SEQ ID NO: 5605 - protein, 188 aa, Artificial Sequence; identical to SEQ ID NO: 5604
  Synthetic

SEQ ID NO: 5606 - protein, 174 aa, Artificial Sequence
  Synthetic
RELEEVLKEAEKLIREITEEVKEALRRDEKTVRDNIRDLRRVLEEVRKLIEEILDRVRRRGPRDELERDVERIADKVRRAITRSRKHVEDSVRTTKEMIDRLRRKVEKILTEVRKKIDSKFLERLEELITRLKERIDKALRDLEKTNDELRKRSEEVLRRLERLLERLREEIRR

SEQ ID NO: 5607 - protein, 174 aa, Artificial Sequence; identical to SEQ ID NO: 5606
  Synthetic

SEQ ID NO: 5608 - protein, 172 aa, Artificial Sequence
  Synthetic
SEVERVLEDSRRTNEEIIKRLRDALRESEKTNRDIEKRLREMLKKSKETNERIKRSDRDKDELKKLVEKDKKEVEDALKDLEDLVREDKERVDEALERMRKLVEDDKEALERRIKDKKVLDKARELVRRTEEIVKDVIRKSRELVKESKERVDRVITESRRVVKKTLDDIRK

SEQ ID NO: 5609 - protein, 172 aa, Artificial Sequence; identical to SEQ ID NO: 5608
  Synthetic

SEQ ID NO: 5610 - protein, 172 aa, Artificial Sequence
  Synthetic
SEIEEALKRSKETNERIIRKLEEVLRRSRKTNEEIIRRVERVLEDSERTNREIEKSDRRKEEVAKLVDDDRRKVEKALEEARRLVEEDKERVEKALRDMRELVKEDKERLDRTIKGEEFLRTVKKLVDDTRKAVEEVITRSRRLVEESERRVREVIDRMRKLVEETKRKLDK

SEQ ID NO: 5611 - protein, 172 aa, Artificial Sequence; identical to SEQ ID NO: 5610
  Synthetic

SEQ ID NO: 5612 - protein, 172 aa, Artificial Sequence
  Synthetic
SEIEKALKESEDTNRKIKDDLRKVAERVRKLIEDVIRTLERVLRDSERTNREITRSDRDKDELRKLVERDRERVEKVLRDAKRLVRTIKEDIRRALEEMKKLVEEDEEKVKKKIKDEDVLRKAKRLVDETLKEVERVIRELEKLVEDLEETVKEVIKRSRELVDETEKRIRD

SEQ ID NO: 5613 - protein, 172 aa, Artificial Sequence; identical to SEQ ID NO: 5612
  Synthetic

SEQ ID NO: 5614 - protein, 172 aa, Artificial Sequence
  Synthetic
EEIERALKKSEETNRDIIRKLREVNERDKRAVERDEEELKKALDESRKTNEDIRKSDREKEELRKLVEEDRKRVEKVLTDSKRTNEELLRHSEDVLRKLRKLVKEDEKRLKDEIKDKDVLETVRKLVEDTLREVERVITHSLKRVEDTLRKAKEIADRMRTLVRKTLEDIER

SEQ ID NO: 5615 - protein, 172 aa, Artificial Sequence; identical to SEQ ID NO: 5614
  Synthetic

SEQ ID NO: 5616 - protein, 172 aa, Artificial Sequence
  Synthetic
DEVERVLEKSKRTNEDIIRRLEEVNKTDRKLVEDDIRRLEKALRDARKTNEEIRTSDRDKDLLRKLVEDDKKRVKDVLRESRKTNDDLRRHSEKALEEARRLVDEDRERLEREIKDEDVLRKVRELVERTKERVERVIDHSRKVVETTLREVERVIREIEELSKDSERKIRK

SEQ ID NO: 5617 - protein, 172 aa, Artificial Sequence; identical to SEQ ID NO: 5616
  Synthetic

SEQ ID NO: 5618 - protein, 172 aa, Artificial Sequence
  Synthetic
SDAERALKESEDTNREIIEKLERVNKRDKDIVDKIREDLKRVLERVRDTNRRIRESDRRKEELKELVERDKERIEDALRRLEELVKRLEDHSRELLKDAERLVRTDDELVKRRIKDERVLREVKRLIDETKRIVDEVIKHSKEEIDKLREEVERVIKELRELSDKSLDDIRK

SEQ ID NO: 5619 - protein, 172 aa, Artificial Sequence; identical to SEQ ID NO: 5618
  Synthetic

SEQ ID NO: 5620 - protein, 172 aa, Artificial Sequence
  Synthetic
KEIEDVLKKSEDTNRRIIERLRKANDTDRRLIEDTIRKLREVLKEAEKTNKDIKDSDRDTSVLRELVRRDERRVEEVAREMHKLNEDIREHSERVLRELRRLVEEDRDRVRREIKDEDVLRTVEELIERTEREVERVIAHSEDLIRRSNEDVKRVIKTIRELSEDSKRAADK

SEQ ID NO: 5621 - protein, 172 aa, Artificial Sequence; identical to SEQ ID NO: 5620
  Synthetic

SEQ ID NO: 5622 - protein, 174 aa, Artificial Sequence
  Synthetic
DEERVLKELEDLLREILKDIERTVRESRKLVKTILDEIEEVARHNRKLIEEIRREVKKKEVLDEVEEALRRSVKNLEDILREVERLVREDEEKNRKLVEDITRIADTLVKVLEAGTRDLKELLETVRRVIEEVKKVLKRSLEESKKVIDDVRRHLEKNNRDIKTVIDRVREKAK

SEQ ID NO: 5623 - protein, 174 aa, Artificial Sequence; identical to SEQ ID NO: 5622
  Synthetic

SEQ ID NO: 5624 - protein, 174 aa, Artificial Sequence
  Synthetic
SVEEVVEEVKRLIEEVEKTNKKTVEDSKRLIDDIRRRIEEVMRHNRELIKKIEREVTKEEVVRKIRDVLRKSEENLKELLREITERVKKDEKDNEENLRRTRELLEEMERLARAGTIDLRELLERVRRLVEESKRNAEESLRRSEKVIKEATDHLRRNNETIKRVIDRVREEAK

SEQ ID NO: 5625 - protein, 174 aa, Artificial Sequence; identical to SEQ ID NO: 5624
  Synthetic

SEQ ID NO: 5626 - protein, 174 aa, Artificial Sequence
  Synthetic
DTERVLKTLRDLIDTILKRNEEILRHNEKLSRDSKRRIEEVARHNRDLARRVEEEVTKEEVVRKAREMMKRSLRNLEELLKEDDKVLRDSLRHVEENLRRTEKLLRELEELLEAGKRDLRKLLEDVKEIIKTSKENVDRNNDRIRRVVERSEKHLEDNNRDVKRVVDEVREEAR

SEQ ID NO: 5627 - protein, 174 aa, Artificial Sequence; identical to SEQ ID NO: 5626
  Synthetic

SEQ ID NO: 5628 - protein, 174 aa, Artificial Sequence
  Synthetic
KEEEDIKREIEKRITEIKKKNEEVLRRVEELIKRIHELNKRIEDTIDEEIRRIEDLVRRGTDKEDLKRRVKEIEDRVRRLIEDSRKKIKDIEEEVKDLARRSRKEIKEIKDEVRKKVDDDVLRKLKRLLDEIIKHSEDVLRKIKELLDEIKRDSDRVFKKLKELLDRIAREIEK

SEQ ID NO: 5629 - protein, 174 aa, Artificial Sequence; identical to SEQ ID NO: 5628
  Synthetic

SEQ ID NO: 5630 - protein, 174 aa, Artificial Sequence
  Synthetic
RELEEIDRKIKKLIEDIHRENRDILRRIRELIERIKKKNEDILREVRKLIKEIEDLVREGAPKEELKKRIEDIMRRVEKLAKESRDEIDRILEEVERLAERSRRKIDKIMEDVKREVDDKVLKKLEDLLREIKKDSDRVLEEARKLLEEIKRHSDEVLEEIKKLLDDIKKRVET

SEQ ID NO: 5631 - protein, 174 aa, Artificial Sequence; identical to SEQ ID NO: 5630
  Synthetic

SEQ ID NO: 5632 - protein, 174 aa, Artificial Sequence
  Synthetic
SELEKIDDEIRKLIEDIHRLNREIARRNEKTIREIRKKNEDVLRRNKRSADEIDRLVKEGVDKRELRKEIKKSNDESRELIDRSRKEIKKSNDETRRLAEESRKLIEDIRREVERRIDSEALRKLKRLLEEIERDSRRVLDELHKTDEDIERHSREVEDRAHKTDKTIKDRVET

SEQ ID NO: 5633 - protein, 174 aa, Artificial Sequence; identical to SEQ ID NO: 5632
  Synthetic

SEQ ID NO: 5634 - protein, 174 aa, Artificial Sequence
  Synthetic
SEDEKILEEVRREIERIHEENRKVRERIERLIREIHKLNREVLERNKESIEEIRRLVEEGAPKEELRKTVRKSNEDSKRLAKESKDRIDEIEREVEKLIRDSEREIERIEEEVRRKIDSKFLEDIERLLREIDKDSKRVLEELKRLLDEIRKDSDRVLKTAHDTDDKILKDIDK

SEQ ID NO: 5635 - protein, 174 aa, Artificial Sequence; identical to SEQ ID NO: 5634
  Synthetic

SEQ ID NO: 5636 - protein, 174 aa, Artificial Sequence
  Synthetic
KEEDEVREEIKRRIEEIARLNKEIEDEIRELIKRIHELNREILKKVRKLIEEIEDLVRKGVPKEELRKRIEDIRRDVERLLRESEDRIRRIEERVDRLLKDSRDKIDRIKEEVKKKVDSEVLRELDELLRRIKKNSEDVARKLKDLLRRIREDSERVAKEIRRLVEEIKKKVDK

SEQ ID NO: 5637 - protein, 174 aa, Artificial Sequence; identical to SEQ ID NO: 5636
  Synthetic

SEQ ID NO: 5638 - protein, 182 aa, Artificial Sequence
  Synthetic
DEVKRIVDEVRRLVEKVHRVNEEVVKESEDLVREVHRKNKRVLDESERLVEEVERVLKRDVSDRRKVEELVEELRRLNEETRRAVKRSSEELKRINDETRRELEDNSRKLKEVLDRVEKELRKGNGDERVLRTAEEVIRRLEKHSKDLLDTSRRLAEEILRKSDDLLRRSKEKIDDLKRKIK

SEQ ID NO: 5639 - protein, 182 aa, Artificial Sequence; identical to SEQ ID NO: 5638
  Synthetic

SEQ ID NO: 5640 - protein, 182 aa, Artificial Sequence
  Synthetic
SEVDRIKEEVRKLLEEHHKRNEDIVREVTRLLEEHHKKNEEVVRESEKLVKKIREILRDRVRDEDKVRDLERRVERLNRETRRELTESSEEARELVKRVTDELRKSSKELTDVVRDVERLLDEGRGDERVLEEARKVVRELNRRSEELLKRARELVERLDRKSEELLRKSERIIKKIEEDIR

SEQ ID NO: 5641 - protein, 182 aa, Artificial Sequence; identical to SEQ ID NO: 5640
  Synthetic

SEQ ID NO: 5642 - protein, 182 aa, Artificial Sequence
  Synthetic
KEVEEIVRDVRRLVEEHHRENRKIVETVEDLVRKVHRENKRVVEESERLVDELTKILRDTLSDKDRVDDLKKKVDEINEETRRHVERNSREAEKLLRDVEKEVRKSSERLRDLERRVRKLLRDGRGDEEVLKRVREAIRRLNEDSKRLLKEARDVVERIKRNSDKALEESKRKLKEIEERIK

SEQ ID NO: 5643 - protein, 182 aa, Artificial Sequence; identical to SEQ ID NO: 5642
  Synthetic

SEQ ID NO: 5644 - protein, 178 aa, Artificial Sequence
  Synthetic
SKMEEVRRRIKEEADRDEEDNRRVLEDIRRLIEENKRRNEEVLKRIEKKARDLLERIKKDGRTEEIERLLRELEREVDEAVKRSEKNNRDSNRKIEELAKRSRERNRTTNEDIKEVLRRGEIKEEIIKEVSTLNEKLKRDTDEILKEVTRLNERLKEETDRILEEVKKLIDKVRKAVE

SEQ ID NO: 5645 - protein, 178 aa, Artificial Sequence; identical to SEQ ID NO: 5644
  Synthetic

SEQ ID NO: 5646 - protein, 178 aa, Artificial Sequence
  Synthetic
KEADDVKRRLDDLIRRNEEKIRDVRRRVKELVDRNRKKIKEVLDKVKEIIDRLKDEIDKTGRDEKIEKKLEDVRREVTEAVKRSREDNRRSNEEVRRLVEDSRRNNKKSNDEVREVLRRGEIEERIIEEVTRENDRLRKESDRVLDEVSKLNDEARKETDDVLKTVDELVREVAEKAK

SEQ ID NO: 5647 - protein, 178 aa, Artificial Sequence; identical to SEQ ID NO: 5646
  Synthetic

SEQ ID NO: 5648 - protein, 185 aa, Artificial Sequence
  Synthetic
SDAERLLETVRRIAKRLKELNEEVLREAKRIIDRVREENERSRETIREIMKKLKEDIDRIGGRDEEDLRKLLEDAKRIIEEILRRNEELLKEIEKEVDTVLKKNERLLERAEEEVRRMIEEIRTRDGPGVDEILRDVERLLEEVRRSVKESTRRIKRLLDEVRKSVKESTKEIKKLLKDVEDAAR

SEQ ID NO: 5649 - protein, 185 aa, Artificial Sequence; identical to SEQ ID NO: 5648
  Synthetic

SEQ ID NO: 5650 - protein, 185 aa, Artificial Sequence
  Synthetic
KDIEDLRRRIEEIIEEAKRLDKTSLELIRRIIKRIKDENKKMLDEAEKIIRDALKTIDDVGGRDEEELRRLLRKAEEDVRDVDRRNEKLMRDVDKEVAEVLERNKRLLDEIRKRVERVIEDIERRRGPGVEDVTRRIEELLEEVRKSSEDSIRDIRRLLKEVRDSFKRSSDELKRLLDEVRKRAE

SEQ ID NO: 5651 - protein, 185 aa, Artificial Sequence; identical to SEQ ID NO: 5650
  Synthetic

SEQ ID NO: 5652 - protein, 185 aa, Artificial Sequence
  Synthetic
RELEEVVKELRRLLEEVRKRVEDSIKRLDELLDEVRRSNKKSSEDTRKLLKELEDEARKVMERVPDERVRRVLDELRKLVDDNHRENEEISRRMKELVDRSRKHVEEVLRRLEELVKRIEDELRKGERDVREVREEIERIVTKARKVVKEDDDLVKRIVAEARRLSKESEEKVREIVKRAEEKVR

SEQ ID NO: 5653 - protein, 185 aa, Artificial Sequence; identical to SEQ ID NO: 5652
  Synthetic

SEQ ID NO: 5654 - protein, 174 aa, Artificial Sequence
  Synthetic
DEVEELREELERLLKESEDRLREVKKRSDDSLKESRELIKKVRDTLERLLREVEDKVEDERIVEKVRKAVEEVERHLRENEKTIARVVEETRRLLKRNLDEARRVVEEVRELLKRNKDVETVAREVRERVERSKRHIEKVLKEDEEMVRESKKNIEDLLRRVKEDIDRLKEEVD

SEQ ID NO: 5655 - protein, 174 aa, Artificial Sequence; identical to SEQ ID NO: 5654
  Synthetic

SEQ ID NO: 5656 - protein, 174 aa, Artificial Sequence
  Synthetic
SKADRLREELDRLLKEVKELNERSKRESDRSLEEIKRLIEKVERESEKTLREVRAKVDDERIVREAEKIVRETKEELKRLEKRVEEVVRRTKKANDDNLKAVTDMVRRVRDLLARNVDIDTVVEEVKKLIKEILDHIRELVEDDKRKIKEILEEIKKLAEDDRRKVEEVKRKVD

SEQ ID NO: 5657 - protein, 174 aa, Artificial Sequence; identical to SEQ ID NO: 5656
  Synthetic

SEQ ID NO: 5658 - protein, 174 aa, Artificial Sequence
  Synthetic
SDVEDLKKKLDELLEEVERTSREVRKTSERSLEEVEKLLRRVKEESKRLLEEVERDIKDESIIDEVRRLVERSEENLREILRRITKVVEDTERRLKESLDEAREVVERVRDLLERNVDVKKVLDDVKKLVDDVKRKDKKLLDDDRRRVEEALEHIKRNLDRSRDLIRRIKEKAK

SEQ ID NO: 5659 - protein, 174 aa, Artificial Sequence; identical to SEQ ID NO: 5658
  Synthetic

SEQ ID NO: 5660 - protein, 174 aa, Artificial Sequence
  Synthetic
DEVKKLKDDLDRLLDEIRRKIEKVRKDSEDSLKRVEELIRRVEEESRRLLEDVKREISDEEIIREAKKAVEESKKNLDDIRREVKRIVEETERLLKKLDDDLKRVVERVKELLDRNKDIKKVLDDVRREIRRIDEEIKRVEEEDRRMVTELLKHIERNLERSKRLADEVKEKAR

SEQ ID NO: 5661 - protein, 174 aa, Artificial Sequence; identical to SEQ ID NO: 5660
  Synthetic

SEQ ID NO: 5662 - protein, 174 aa, Artificial Sequence
  Synthetic
KEVDELRKALKELLDEVRETSKRVLDETRRLLEEVRRELERVKRESDETLKRIKDRVKDKRLIEEVKRVVEKTRRDLRKIEDEVRRAVEESKKNLDESIKTVEKVVREVKELLDRDRDVDTVLEDVKRKIDELKEHDKRNLDESRRLITELLERIKKLAEDDRRVIEEIERRIQ

SEQ ID NO: 5663 - protein, 174 aa, Artificial Sequence; identical to SEQ ID NO: 5662
  Synthetic

SEQ ID NO: 5664 - protein, 184 aa, Artificial Sequence
  Synthetic
KTMDEIKKEVTDLVRRIRELNERVERTVEDLVRKSRRLNERVLREVERLVKEVRDALRDKDEKDAKRIKDKLDEILRRVKKVLDDNSRHTDKVLEEVRKLLEDDTRELDRILEEVDDVIKKVGKDDETLEKVVDDVRKRIKRSKEHSDEVLEDAKKKIDENLEHSRRVLEEAKKLIDDLKDEIR

SEQ ID NO: 5665 - protein, 184 aa, Artificial Sequence; identical to SEQ ID NO: 5664
  Synthetic

SEQ ID NO: 5666 - protein, 184 aa, Artificial Sequence
  Synthetic
EKAERIIEEVTDLVRRVRETTKTVKEEVRKLVERSKRRNEEIRREVKELVDEVEKKLREKDEKDARRIRKELKEVLDRVDKLLTDDSRKVEEIRREVEERLDESRKRIEKILKDVEDLLRKIGTDKDALEKVRRDVERLIRELEKTDRDVLEEVKKLIEESERNSDRILEEVRRIIEELKKKIK

SEQ ID NO: 5667 - protein, 184 aa, Artificial Sequence; identical to SEQ ID NO: 5666
  Synthetic

SEQ ID NO: 5668 - protein, 184 aa, Artificial Sequence
  Synthetic
SVVDEIRERVERLLREVEKTTEELRDTVRKLVEESEELTKRIEDEVRKLVEKVRRELRRKREDEVTRIRKELEDILKEVKRLLDENRDKVRRVLERAKRLLEDSKRRLDEIVERVRDLLEKIGTDEDKLREVLEEVKERIDRLKELDKKILEDVKRLVKESKEELKDILRRARKLIRDLEEKIK

SEQ ID NO: 5669 - protein, 184 aa, Artificial Sequence; identical to SEQ ID NO: 5668
  Synthetic

SEQ ID NO: 5670 - protein, 184 aa, Artificial Sequence
  Synthetic
SEVEKMLKELKELVERALERDKDALRKLRDLVRESLERDKRMVDKLDELVKEIEDRIRKRKESREDVKRLLKRLREELDKIRKENEELVRRLKEELERIKEENKKLLEELKKRLEDAVRKVGKDKREKVDKIRRDVKRLLDESRESLERSEKDVEKLLEDSRDSLRKSKKRVEELVKRVEEALK

SEQ ID NO: 5671 - protein, 184 aa, Artificial Sequence; identical to SEQ ID NO: 5670
  Synthetic

SEQ ID NO: 5672 - protein, 184 aa, Artificial Sequence
  Synthetic
REVEEALKESTDTIKKILDDDRKAMDELKKLVDKSLEDDKRAVDRLRELVKEIKKIIKKRKDLEEKVKELLRRLEEELRKIEEENRRLVEELKRKLEEIKKKNEKLVRDNEERLKEVVERMGKDKKEDVDRIEEESRRLNEESRDSLRKSEDTVRKLLEESKESLDRSRREVEKLLKEVEDALR

SEQ ID NO: 5673 - protein, 184 aa, Artificial Sequence; identical to SEQ ID NO: 5672
  Synthetic

SEQ ID NO: 5674 - protein, 185 aa, Artificial Sequence
  Synthetic
SELEELDREVEELVERSKRTNERVVEESKRLVDESRRDIDRLLEEVRKLVKDILERIKEEGGESEKAEKEVRDLIRRIKELLDEIRKRVERSNEENEKLLRENKKLDEKSVRDLEDVARKIAKRVRSEDVRRLLEKIERLIEESNRSLERSREESERLSKESEDRLRELEKTVKELLKRVEEALR

SEQ ID NO: 5675 - protein, 185 aa, Artificial Sequence; identical to SEQ ID NO: 5674
  Synthetic

SEQ ID NO: 5676 - protein, 185 aa, Artificial Sequence
  Synthetic
DEIRELLKKAEELVERSLRDNEKVVDELKKLVDESLRRIREMLKRAEDEVRKILEDIERKGGESDDAKRRVEKAIREIEDLLDKVRREVEKSNEELKRVLDENRRRDRESVERLRKELEDVERRIRSDEVDTLRRTVDKLVKDSNRSLEESKRTLEDLIRRSKEELDKLEKDVRRLLDEVRKALK

SEQ ID NO: 5677 - protein, 185 aa, Artificial Sequence; identical to SEQ ID NO: 5676
  Synthetic

SEQ ID NO: 5678 - protein, 174 aa, Artificial Sequence
  Synthetic
DELEDAMRRVEEMAERSERNIRRSIRKVEELVTRSKKNIEDSLREVEKVAREAEELLRRNVDTDEVVKRVEEVVERIKRHNDENNKTSDRLVKEIEKENRENNKRTEEVVRDVARRVTGEEVKRRLDELLKRVTDLDRDSEKKLRELLEEVTKLDKESKDRLDELLEKVRRDRE

SEQ ID NO: 5679 - protein, 174 aa, Artificial Sequence; identical to SEQ ID NO: 5678
  Synthetic

SEQ ID NO: 5680 - protein, 178 aa, Artificial Sequence
  Synthetic
SEVDKLLDRLTKLAKRSIDEARRLVERDREVLEKSIRDAEKLVERDEKVLEDIKRLIEREGPSEELLKRVEDVVRRSREDLEELLKRSKEVVKRSDEALRRLLERSKDVVREVEDELRKKNLDETVRRLVTELNKASKKVVDDVRRESEKSNRDSEDVVRKVKKASDKSLEDVERDIR

SEQ ID NO: 5681 - protein, 178 aa, Artificial Sequence; identical to SEQ ID NO: 5680
  Synthetic

SEQ ID NO: 5682 - protein, 181 aa, Artificial Sequence
  Synthetic
EEVERIVERLKRLAEEDSREIKEVMDRNRESVRRILKRIKDIVEELRRLVEEIKKKIEKDGPTEEVEKRVKELEERVDEEVKKLKELVKRNHDEVRRVLERSRDTVRRIREDVERVAREISDKEKVERLEKDIRRLEKESEDALRRLEDTSKRTDDEIERAIEELERTITDLVREIRERVR

SEQ ID NO: 5683 - protein, 181 aa, Artificial Sequence; identical to SEQ ID NO: 5682
  Synthetic

SEQ ID NO: 5684 - protein, 182 aa, Artificial Sequence
  Synthetic
REVDEIRKELDDRVREIKKRIEEAVEDSRRTVEEIKRRVEEVDKTDRKLVEDIKREIDRRKDAREKVERLLEELKTHSDDSERRIRELIREDEETVRRVLEEIRKLIRDLEEKVKRVEKDISDRKKAEELRDRVRKLVEEIERLLEELRRTLEKTRREIERVVEENRRSVEELIREIKERVD

SEQ ID NO: 5685 - protein, 182 aa, Artificial Sequence; identical to SEQ ID NO: 5684
  Synthetic

SEQ ID NO: 5686 - protein, 174 aa, Artificial Sequence
  Synthetic
DDERRVKEEIKRILTEAKKVIDENKRRSEEVLDRVRKLVKENKDENDEVLKTVDELVRRGSPKEEVLRRVEELLERSKRKIKEVLDRVTKLNEESKRHSDEVLEKVERDLRRLAEEARIEEVRKELKRVLDEVRRLVKETEETDRTSNRTVAELAKDLEKKTDDIEREVRKKVT

SEQ ID NO: 5687 - protein, 174 aa, Artificial Sequence; identical to SEQ ID NO: 5686
  Synthetic

SEQ ID NO: 5688 - protein, 186 aa, Artificial Sequence
  Synthetic
DRVERILKKIEDALRKVEELIRRNKKKIDDVLDEVRRLVEESKKRIDEILDEVRDRITKLKDDEKVVREIEKEVRRLIEEARKDDERTNRKVKKEVEESERDNERSNREVDKVIRDIKREIERDIGGKKEAKRLKDLLDTVRETVKRLNDELRKRSEEVLRRVDKLNKESKKRLDEVLRTVREELR

SEQ ID NO: 5689 - protein, 186 aa, Artificial Sequence; identical to SEQ ID NO: 5688
  Synthetic

SEQ ID NO: 5690 - protein, 182 aa, Artificial Sequence
  Synthetic
REIEEVKKENDKSLKEIEKIIREVKEENKRSLDKIKRIIERALEEIKRMLEKAKKLADEGVDRSVVEKAIKDIERLLEEIRKEVERVLEENEELLRRIERRVKEVIKKDKKLMEDVARKLKELDKFLTEVKRSFEKSVEDIKRLLKEVSESVKRSTDEIRRLLDEVRRAVEEVLRRIRELLR

SEQ ID NO: 5691 - protein, 182 aa, Artificial Sequence; identical to SEQ ID NO: 5690
  Synthetic

SEQ ID NO: 5692 - protein, 179 aa, Artificial Sequence
  Synthetic
SLVEELRRVVEEVRKTLEELVKRLEDSVRRSAEEIRKLIEDAERSVRESERAVKETGDGKILEEAKELVERSERKVRKLLRDLERLVEESEREVRRIADEVRRVLDDLRRKIEDLERKRVTKEIKELLEEIKEMLRRLKKKAEDIDRTNRELEKEVRELVERLLRDNRRLLKEVVERAK

SEQ ID NO: 5693 - protein, 179 aa, Artificial Sequence; identical to SEQ ID NO: 5692
  Synthetic

SEQ ID NO: 5694 - protein, 179 aa, Artificial Sequence
  Synthetic
DKIEEAKKNVDESKRRVEELIRELRESVERSKRDVERLVRELEESVERSLETVKRDGDSRILREAERLVEESEKKIRELLRRAEKLVEDSARKIEELLREAEELVKESEDLIRDLERKNVTKEVKELLKRNSDLLRRVEELVKKLDKENRDLLRKVREDAKKLLKENEDLLEKVKRDAR

SEQ ID NO: 5695 - protein, 179 aa, Artificial Sequence; identical to SEQ ID NO: 5694
  Synthetic

SEQ ID NO: 5696 - protein, 179 aa, Artificial Sequence
  Synthetic
DEIEKAEKNVRDSRREVERVVKKLKESVDKSREEVERLVRELERSVEESRRLVEERGDSKILKEAKDLVDESRKEIEELLRRAEELVRRSEEEIRRLLKRARELVKESRDRIEELAKRGVTKEVDRLLERNSRLLEEVEERAKELDERNKKLLEEVRRRAEEVDKRNKDLLRTVDRRAR

SEQ ID NO: 5697 - protein, 179 aa, Artificial Sequence; identical to SEQ ID NO: 5696
  Synthetic

SEQ ID NO: 5698 - protein, 179 aa, Artificial Sequence
  Synthetic
SLIEEARENVKDSKKKVKELVDRLRKSVEESRERVREVVRRLRESVDTSADAVRKAGDSRILEEAKRLVDTSRKKIDDLLREAEELVKRSADKIKRLLEEATKLVEKSRRDIEKLAKDGVTEAVKRLLEENSKLLADVADEARKLNEENERLLREVEKKAKKLDDENRKLLEEVIETVR

SEQ ID NO: 5699 - protein, 179 aa, Artificial Sequence; identical to SEQ ID NO: 5698
  Synthetic

SEQ ID NO: 5700 - protein, 179 aa, Artificial Sequence
  Synthetic
DEIEELKKNVEDSRREIDRLIKELKESVEKSRKDVEKVVKELRESVKDSLDKLEKTGDSEILKEVRRLVERSEREIERLLEEARRLVDTSREEIDRLLKKARKLVEESERKIEDLRRKGVTKEIKELLKENSDLLERVREEAETLDRKNKELLERVKRKADRLNEENRRLLKEVIEKAR

SEQ ID NO: 5701 - protein, 179 aa, Artificial Sequence; identical to SEQ ID NO: 5700
  Synthetic

SEQ ID NO: 5702 - protein, 181 aa, Artificial Sequence
  Synthetic
SEVEKLLRDLERLLEEIVKEAEDLDRENKERLKEIARKARELNEENKDLLRRVKELVDRNVDKDTLRDEVRKAVEDTKRRVDDLLRDVKRVADETKKKVDELLERVERVLRRVKEEVRRIDDERLVREVERVIREVRKRVEEVVRKVEESIKESEERVKELVKRVTDSLERSKKEVEDAIR

SEQ ID NO: 5703 - protein, 181 aa, Artificial Sequence; identical to SEQ ID NO: 5702
  Synthetic

SEQ ID NO: 5704 - protein, 181 aa, Artificial Sequence
  Synthetic
SEVEELLKRLEDILRENERRARELNRKNKEVLKDNRRRAEEVNRRNKRMLDEAERLAEDNVDKRELLERVKKVARETRELVKDLLRHSEKVVRDTRKVVEDILRHSEEVAERVRREVKKISDEKLVREVETKIEEVRRRSEELVKEVEKSLKESEDDSRRLVREIEESIRESEERIKRRVE

SEQ ID NO: 5705 - protein, 181 aa, Artificial Sequence; identical to SEQ ID NO: 5704
  Synthetic

SEQ ID NO: 5706 - protein, 178 aa, Artificial Sequence
  Synthetic
DEVEEILEKSRRTLEENKRRAKEAVRRSRETLRESEERVKRVVEELRDRLRRIEEEPRRREEIRKVLEELARDVERVLKELEELSKRDEDEVKRVIDENRKSLDKDRRDVEKVIREIQDEDALRKIKKVLDETETESRRTLEELRKVLEETHRRNEKLIRDLREVLKEIEEAVRRREK

SEQ ID NO: 5707 - protein, 178 aa, Artificial Sequence; identical to SEQ ID NO: 5706
  Synthetic

SEQ ID NO: 5708 - protein, 178 aa, Artificial Sequence
  Synthetic
DEVEEALRRLEDLLRRNVEEAKEVVKDSERTLREDAERVKRVVEKSKRTLEAIEKRDLRRELIKEVLDKDREDVDRVLKDSKRTLEEDKERVKRALERNKKSLEDISRRVEDVIRKVTDEEAVRRIEEVLKKIREDSKRTIDELRRVLERTEEETRRLIKELEDVLRRTEEEVKRRLK

SEQ ID NO: 5709 - protein, 178 aa, Artificial Sequence; identical to SEQ ID NO: 5708
  Synthetic

SEQ ID NO: 5710 - protein, 186 aa, Artificial Sequence
  Synthetic
SEVEKVLEEIKRLLDRIKERVDETDRRNKELLKKIKDEVRRAVEEIRRLLEEIKKSADEKGGERKEVRDEAKRVLDRIRDLLRKLREEIERVLRESRKLNEESNKEIKDLLKEVEDRVEDIKRKIGDEKLVREVEEVVTRVRKTIEDLVKKDNDSVRKSEERIKEVVKRIEEEVKRVLEDVDRLAK

SEQ ID NO: 5711 - protein, 186 aa, Artificial Sequence; identical to SEQ ID NO: 5710
  Synthetic

SEQ ID NO: 5712 - protein, 177 aa, Artificial Sequence
  Synthetic
DEVRELLERNRRLLEEIKKTVKDLIRRNEELLKRIEDDAKRLIDRNEELLDELEKRLKDDRLIREAKERLKKSLEDVKRRVEEVKRRLEKSLEEVETIIREAEKRNRDSLREMERRVKGEELEELRRVVEESDETIKRLLEEAKESVDRSLDRIRKLLEDVRRSVERSKKRIDEKRK

SEQ ID NO: 5713 - protein, 177 aa, Artificial Sequence; identical to SEQ ID NO: 5712
  Synthetic

SEQ ID NO: 5714 - protein, 177 aa, Artificial Sequence
  Synthetic
DEVRKILKDIEDILREIEERVKRVIERNKRILEKIREDVKRVDDRNKKLLEELERKLKGRELIKRAKEELDRTLEDARRLIEEAKRTLDESLEDIRRLIEEVSRRIERLLEEIRRKVKGDDLRRVEEVAKRIKDRIRELLDEIRRSVERSKRDVKRLLDELRRSVEESKRRIDEREK

SEQ ID NO: 5715 - protein, 177 aa, Artificial Sequence; identical to SEQ ID NO: 5714
  Synthetic

SEQ ID NO: 5716 - protein, 177 aa, Artificial Sequence
  Synthetic
SEVDKLLRENEKLLEDIERTVKRMLERIKKLNDDVHREIRRIDEENRRLLDEIEKKVRDERMVREVTERLKRTLDEIRDIARKAAEEHDRLLEEAEKIIRDVREESDRSLEEIERKVKGRDLDRLRRVVEKSKKRIEELEREARKVAKDVKKNLEELLEEVKESVRESEKRIKETEK

SEQ ID NO: 5717 - protein, 177 aa, Artificial Sequence; identical to SEQ ID NO: 5716
  Synthetic

SEQ ID NO: 5718 - protein, 184 aa, Artificial Sequence
  Synthetic
SLKERIEEELKKVKDTSDRLNEEVRRSVEDTRKRSEDLNEEVRRSVEESRRRVESLLKRIEDEDKARELRKKVEKVARDTRRLIKEDKDRSDKMVRDTERLIEEDARESEKAVREVEELVRRVDKEEEVKKIIERIEEILERSERRNREIIKRDEEALKRSEERNREIIERDKEMLERLEREVR

SEQ ID NO: 5719 - protein, 184 aa, Artificial Sequence; identical to SEQ ID NO: 5718
  Synthetic

SEQ ID NO: 5720 - protein, 184 aa, Artificial Sequence
  Synthetic
SLIETIKEVVKRVAETSKRLNDRVREELRKVEREVEELNREVERVLREVETAVDDLVKKIEDEEKVRRVEELVREVAREVRELIKENKEEVDRIAKEVEELVETDKRDVDRVVREVEELLKRVRRREEAEDIIRKIEEVLKKSKELNDRIIERIKKMLEDLRRHNEEIIEKIRRALKRLEDEAR

SEQ ID NO: 5721 - protein, 184 aa, Artificial Sequence; identical to SEQ ID NO: 5720
  Synthetic

SEQ ID NO: 5722 - protein, 184 aa, Artificial Sequence
  Synthetic
SLKETIRELLKRVEEESRKLNEDVARSVRETKRRSDRLNEEVERSVRRSEEEVRRLLKRIEDEEKARRLADKVRRLVERTKKLIDEDRDEVRRVVEETKELIKDSKKKVDELSEEVERLVDKIDRKEKAEEIIRRIKEMLRRDEEENRRIIERDERALDKSRRLNEKIIEEDKKAMRDLEEEVK

SEQ ID NO: 5723 - protein, 184 aa, Artificial Sequence; identical to SEQ ID NO: 5722
  Synthetic

SEQ ID NO: 5724 - protein, 181 aa, Artificial Sequence
  Synthetic
SEVEEIIKENRRTLERDRREVEKVIEENKRSLEEIERKVREIIKDNDRSAKEITELAKAGVPRKDLKRFLEEDKRRVEKVLDELRKLLEEDRRKVEEALRKSEKTLREDERRAREVIRRIDDEELVDRLRKSLRDVREESKKLIDELRRSLEESDRRVKELIDRLRKSLDDSRKLVDDLRR

SEQ ID NO: 5725 - protein, 181 aa, Artificial Sequence; identical to SEQ ID NO: 5724
  Synthetic

SEQ ID NO: 5726 - protein, 181 aa, Artificial Sequence
  Synthetic
SEVEEIIKDNERTLEEIRKRVEDVIREIRRLLERIERRVREAIKRNEESLRRIKELVERGIDRRELEKLLRKDEEDVRRMLEELKRLLDEIRKRVKEAIDELERLLREDEKRADEVIRRIEDDELVRTLRESLRRVAEEVKRLLKEVEDVAREVEDRVKKLIEDLRRSLEKSREDVERDSK

SEQ ID NO: 5727 - protein, 181 aa, Artificial Sequence; identical to SEQ ID NO: 5726
  Synthetic

SEQ ID NO: 5728 - protein, 188 aa, Artificial Sequence
  Synthetic
DRVREIIKRLRDLLREIRTVVRKIIEDNRKSLEEIEEHNRRVIRELRELLKEIKETVEREGRNDEVKERLDELLRRLKKRVEEIVRRNEKLLEEDKRRIDEALEELERLLRRLKRVVEKAVDELAKENKEEMIRTVKKVITEIAEEVKRLADEVRDSVRRSEEAVRRLTKETKEVVDDIVRRVRELIE

SEQ ID NO: 5729 - protein, 188 aa, Artificial Sequence; identical to SEQ ID NO: 5728
  Synthetic

SEQ ID NO: 5730 - protein, 188 aa, Artificial Sequence
  Synthetic
KKVEEIIEELKKLLREIEEHNKRVIEENERSLEEIKRHNEEVIEELRELLERIEEVVKRKGKNERVVEELEKLARDLKKRAEEAVERNKRLLDEDRDRMRKVLERNERLLRRLRTRVEKVLRDLKRDRKEDMIRTVEDVVRRIERRVRELSRESEESIRRSTETVKKLTKDTRDVVRRILKTVRDRIK

SEQ ID NO: 5731 - protein, 188 aa, Artificial Sequence; identical to SEQ ID NO: 5730
  Synthetic

SEQ ID NO: 5732 - protein, 187 aa, Artificial Sequence
  Synthetic
SLEERLREVLKDIERRVRELNETNKRVLDKSKTTVDELLKRLREVLEEIREEVRKLIEELARRGKREVLEKIKKDLEELRKTVEEAIKEIERLLREDEKRVREALRDSERLLEELRERVRKAIEEVKGREMIEKVLRDLEELAKRIEDKNRETIKESEKTLEEIRRRVDRLLEELRRLLKEIAKEVK

SEQ ID NO: 5733 - protein, 187 aa, Artificial Sequence; identical to SEQ ID NO: 5732
  Synthetic

SEQ ID NO: 5734 - protein, 187 aa, Artificial Sequence
  Synthetic
SLEETLEKVLRDITERSERLIRENEKNLRDVKREVEKLNERNRDVLKKIREKVRELIEELRRKGKKEVLEEIEERLKRIEEEVRRALERSREILREIEKRNDETLKTSKDTLERIREEVEKISDKVKGEEAIRKVLEELKKLLEEDERRAKRVSEESKELLDRLAEDNERTIRKLERLLEELERRTK

SEQ ID NO: 5735 - protein, 187 aa, Artificial Sequence; identical to SEQ ID NO: 5734
  Synthetic

SEQ ID NO: 5736 - protein, 182 aa, Artificial Sequence
  Synthetic
SEVDKVLEELKKLLDDDRREVERLLRELRRLLDRDRREVEKSIRTLEKLLKEIEDIVRERKEAKEELRRLLEEIEDVSRKSLEDNEKTLRDIRRTVEKILRDNEKTARDIKKRVEEIERRIKDKRALERVREVLERAEDESRKLSERIKKVLEDIERESKRLSEEDREVLKRIKEEVERLEK

SEQ ID NO: 5737 - protein, 182 aa, Artificial Sequence; identical to SEQ ID NO: 5736
  Synthetic

SEQ ID NO: 5738 - protein, 182 aa, Artificial Sequence
  Synthetic
SEVDKVLEELKELLKRLEEDVKRSSKESEDLLRKDEEDVRRSIRELERLLEEIEERVRRRKDAKEELRRLLDDIRRKSEDSLRRNTETMEENRKKSEESLKRIEDAAREIAERVKDIERKIKDERALREVRKVLEDIKKSVDELLKEDKDNLRETARESERLSREDKKVLERIEERVKELED

SEQ ID NO: 5739 - protein, 182 aa, Artificial Sequence; identical to SEQ ID NO: 5738
  Synthetic

SEQ ID NO: 5740 - protein, 182 aa, Artificial Sequence
  Synthetic
SEVEKVIEELKKLADDDRRRVEKSLRELRKLLEELEKRVRDSLEKLKKLLKEIEDRVRRRKDMKEELRKLLEDIERESRKSLEDIKKMLEKIERKSRESLKENEETARRITRRVEDIERKIKDEKLLREVRKVLREARETSRELSRADEKVLRDIRREVKRALDADKKVLDDIRERVKELEK

SEQ ID NO: 5741 - protein, 182 aa, Artificial Sequence; identical to SEQ ID NO: 5740
  Synthetic

SEQ ID NO: 5742 - protein, 184 aa, Artificial Sequence
  Synthetic
DEVEKILKEIDDAVKDLKRKSDKSLTDDRRMVEELKKKSEESLREVEEMVRRLEDEASRTTDEEKLDRLRKKVETVERKIRKTIRDLEDDVRRIVETTKKTIKELKDKARKIVEDVKRLVDRLEDEKVVRRVRDILDKLRKTVERLVEENEDSARRTEETIRKLVKDNEDILRELRRLIEERRT

SEQ ID NO: 5743 - protein, 184 aa, Artificial Sequence; identical to SEQ ID NO: 5742
  Synthetic

SEQ ID NO: 5744 - protein, 182 aa, Artificial Sequence
  Synthetic
SEVEEMLERLKELLRRIEKVVRDSLRRLKELMRRDEEEVRRSLRRLEELLKEIERVARERKEVQEELERLLREVEKVVRTSTEKNKRSLEEIREVVRRSSERLKKLLEEVKRRVKEVLDRLGDKKVLDEVKELLERIEETVRRLIEENERVLEEAEELSRKLSEDNEKVLEDARREAERLTK

SEQ ID NO: 5745 - protein, 182 aa, Artificial Sequence; identical to SEQ ID NO: 5744
  Synthetic

SEQ ID NO: 5746 - protein, 182 aa, Artificial Sequence
  Synthetic
DEVEEVLKELEKLAREDEDRVRKSEKKLRELADKDREDVERSLRRLERLLEELKRVVEERKEVKEELERLLERIEEVVRKSTEDNKRSLEEIERVVRESSKENKDTLDRIRERVEDILRRLGDKDMLERVERLLREAEKLSEKLSRDNEDLLRRARDLSRELSKENERLLEDIRRRVEEAIK

SEQ ID NO: 5747 - protein, 182 aa, Artificial Sequence; identical to SEQ ID NO: 5746
  Synthetic

SEQ ID NO: 5748 - protein, 182 aa, Artificial Sequence
  Synthetic
REVEEVLERLKRLLDTLEREVRKSLEELKRLLDELRKESKKSLDELRKLAEELERVVRRLKEVTERLDELVRRIEKKVRDSIRRLKKLLEEIEKKVRDSSKKLEELLETIKRVVEEILRRLGDEKMLREVKRVLEEAERRVRELIEENKRLLKEIKEEVKKLIEENEKVLEEARRLAEELKK

SEQ ID NO: 5749 - protein, 182 aa, Artificial Sequence; identical to SEQ ID NO: 5748
  Synthetic

SEQ ID NO: 5750 - protein, 182 aa, Artificial Sequence
  Synthetic
DEVREVLKKLEKLADELREEVRKSLEDLKRLLREDEERSKESLKDLERLAREIEEVVKKKKEVEEELEKLLREVRKKVKESLDRNKKSLDDIRKRVKESSDKLRELLKRIKEEVEDILRKLGDEKALRDVEELLRRIEERVRRLIKENEDLLREIEKTSEKLSRDNKELLKEIEERVRRLRQ

SEQ ID NO: 5751 - protein, 182 aa, Artificial Sequence; identical to SEQ ID NO: 5750
  Synthetic

SEQ ID NO: 5752 - protein, 182 aa, Artificial Sequence
  Synthetic
DEVEEALKTLEELMRRDKEEVDKSLEKLRRLLKEDEDRSRESLERLKRLAEELEEVVKKEKEVKEKLKKLLDDIRRLVEESLERNKRSLEEIERTVRESSRKNKETLEEIKKVVDDVLRRLGDRRVLERVKKLLEDARRLSERLSEENERVLEEAKRRSEELSKRNEDLLREIEKKMKEDTR

SEQ ID NO: 5753 - protein, 182 aa, Artificial Sequence; identical to SEQ ID NO: 5752
  Synthetic

SEQ ID NO: 5754 - protein, 182 aa, Artificial Sequence
  Synthetic
SEVEKVLEELKKLADDLRRTSKRSEEELEKLARELEKRVRESEKRLRDLLRELEDVVRKKKEVKDELRELLKRIEDVVRRSTEELKKLLDDIRRRVKESIDTLRRLLEEIERRVKKILEDLGDKDALKRVKELLDRIREEVEKLIRRNEKLLRDIEEKVRTLLERNERVLEEIKKKVDDDIK

SEQ ID NO: 5755 - protein, 182 aa, Artificial Sequence; identical to SEQ ID NO: 5754
  Synthetic

SEQ ID NO: 5756 - protein, 182 aa, Artificial Sequence
  Synthetic
DEVREVLEELRRLMKELRDVSEKSLRDLRKLAEEDKDRVRKSLEKLRELLRTLEDVVRKRKEVREELDKLLEDIEREVRTSTKENKESLERIREVVERSVRKLERLLEEIKRVVDDILRKLGDEKMLREVEDLLRRAEKEVRRLIEENKKLLKEAEETSRKLSKENEDVLRDIRRAVEELKR

SEQ ID NO: 5757 - protein, 182 aa, Artificial Sequence; identical to SEQ ID NO: 5756
  Synthetic

SEQ ID NO: 5758 - protein, 182 aa, Artificial Sequence
  Synthetic
SEVEKALEDLERLAKELEKVSRESLRRLEKLLEDDRRRSKRSLEELEELLDRLRDTVRRRKEVKEELRKLLDRIRERVKESLDRNEESMREIKEVVDRSIDRLRRLLERIRRVVKKVEDDLGDEKALREVRDLLRRIEERVKKLIEDNRKLLEDARRESERLSEENKRVLEKIEREVKKLED

SEQ ID NO: 5759 - protein, 182 aa, Artificial Sequence; identical to SEQ ID NO: 5758
  Synthetic

SEQ ID NO: 5760 - protein, 182 aa, Artificial Sequence
  Synthetic
SRVEEVLKKLEDLLRRLEEVSERSLRELRELVKRLEDVVRRSEKKLKELADRIEEVVRRRKEVREELRELLKRVEDTVRRSNEELKKLLDEIRKKVEESIRTLKKLLDEIREEVERILRELGDKKALDDVRRLLEEIEKRVTELIERNRRLLEEAEDRVRKLLRDNEELLKRIEKLVRDLER

SEQ ID NO: 5761 - protein, 182 aa, Artificial Sequence; identical to SEQ ID NO: 5760
  Synthetic

SEQ ID NO: 5762 - protein, 182 aa, Artificial Sequence
  Synthetic
SRVEEVARKLEDLLRELKRVSDESLKTLEKLMTDDERRVRESLDKLRELAREIDEVVRRRKEDDEKLKRLLERVEEVVEKSNRDNRESLERIRKVVEESIRKLEKLLERIRREVKKIEEELGDEDALREVRRLLERAEELVRELIKRNEDVLREAKRTSDELSERNRRLLERIKETVDRKRK

SEQ ID NO: 5763 - protein, 182 aa, Artificial Sequence; identical to SEQ ID NO: 5762
  Synthetic

SEQ ID NO: 5764 - protein, 177 aa, Artificial Sequence
  Synthetic
REVEEILKRIEELLRRIKKLSEETLREIAKLLEDIKRLSEETLKSNKDLLKRVRDELRTEEAIKKVKEENDKNLKDSEKIIREVAERIKRALEKSREIIKKVKKEIEDLLDEARKKIDSRMLREIERIIKELKELVDKLLEDNERLIERLDREVKRLLEENEKSVREASREIDERRR

SEQ ID NO: 5765 - protein, 177 aa, Artificial Sequence; identical to SEQ ID NO: 5764
  Synthetic

SEQ ID NO: 5766 - protein, 177 aa, Artificial Sequence
  Synthetic
DEVEELLRRIERLVEEARRLVEELLETNKKLLKDIEKLSRDTLKSNEELLREVKDRVRTEELVRRVAERNRKNLEESERIIREVKRRNEENLREAERIIRELERLIKELEREVREKVDSEMLRRLETIIREAERDLRRLLKEARDSVKKVSDEIKRLLEENKRSVDRVSREIKRVEK

SEQ ID NO: 5767 - protein, 177 aa, Artificial Sequence; identical to SEQ ID NO: 5766
  Synthetic

SEQ ID NO: 5768 - protein, 181 aa, Artificial Sequence
  Synthetic
DEVEELLKEIRELIEEARRRIEELLKEDRDIVRRVTELSRRTLEKIKDLIRKIKDIADRNDKRERAVEKVAKEIKELKDESKKVIDDIDKLIKESDEKAKKLIEEMKKRIKELKDKVRRDVDSEMLRRLEELIKEIEDLVRKLLEELKRSVRETEERVRKLKEDNDELIKRIDELVKEREK

SEQ ID NO: 5769 - protein, 181 aa, Artificial Sequence; identical to SEQ ID NO: 5768
  Synthetic

SEQ ID NO: 5770 - protein, 185 aa, Artificial Sequence
  Synthetic
SSLDDLRRLAEELLRTNKKLMEDLRRTNEKLIKEIEDVLRRIRESSKRIKEEVDKLTRDVRGDEELKRVIDELRKKVEDNLERVKRLIDRLRELVDRNHERVKTLVDDSRKKLEDLRERVERLPIDRKVLERVKEAVDEVRRSVEESLRDAKRMDEETRKTVEDVRREVTKSVEDVKRRIDESRK

SEQ ID NO: 5771 - protein, 185 aa, Artificial Sequence; identical to SEQ ID NO: 5770
  Synthetic

SEQ ID NO: 5772 - protein, 184 aa, Artificial Sequence
  Synthetic
DEVDEVVREVERLLEELRKENDKSVEEDKRLVDKLREEVKRILEEVRKLLEDLARKAKEDKREKVVEELRREAKKILDDIRRVIEELKKKITEILERTREAIRRSEEAARKIVEDIERVASKLKDKDVLRKLREVIKEVERIAEEVVRKNKDSADKSRKIIEDVVRALKKVVDDVRKIAEDLSR

SEQ ID NO: 5773 - protein, 184 aa, Artificial Sequence; identical to SEQ ID NO: 5772
  Synthetic

SEQ ID NO: 5774 - protein, 181 aa, Artificial Sequence
  Synthetic
DEVEKAVRESEETVKDIRRRNDETVRRLRELAKRLKERNEESVRRLRDLLRRLDEEVARRGRREEVEKVLKRIKDEVRRTLEESRKILEDIERDIERSLRDSRRLVTEDLDRLDKLLRKTTDERVLRDIRRVMEDSERIVKEVLDRNRKVAEDVRRIVEEVLRVNEDVLRKIEKRVRELKK

SEQ ID NO: 5775 - protein, 181 aa, Artificial Sequence; identical to SEQ ID NO: 5774
  Synthetic

SEQ ID NO: 5776 - protein, 181 aa, Artificial Sequence
  Synthetic
SELEEIKKRVDRALEENNKLLKEIEERVRKSNRDNERLLKEIEDRVREVTERIKKVEEEGRDRSVLEKIVRKVLDDIRRVMEESEELNRRSNKEIRRVLEESRELLKRVREEIEEVLKKVTDEDVLKKIRDLAREVEENVRESERKIKKLAEDDNRSVAESLREIKRLADEVKRRVDEARK

SEQ ID NO: 5777 - protein, 181 aa, Artificial Sequence; identical to SEQ ID NO: 5776
  Synthetic

SEQ ID NO: 5778 - protein, 182 aa, Artificial Sequence
  Synthetic
SELEEVRKRVKDVNRKNKELLDEIERTVRELLEDDRRLVDEAKKELDTLLRDIERLRREGVDREVLDRVLKRVKEIADRVKELLDRSLERLRREIERLKELVERSREEIERLIRKVETELKDVEDALREIRRLLEEVRKSIEDSKRLIEELLRRLKKVTDESRKKVEDLLREVEREVREAKK

SEQ ID NO: 5779 - protein, 182 aa, Artificial Sequence; identical to SEQ ID NO: 5778
  Synthetic

SEQ ID NO: 5780 - protein, 182 aa, Artificial Sequence
  Synthetic
RELEEIEKELKRMLDENRRLLERIEEEVRRLNEDNRRLLEEIEKTVEDLLEKIRKLSKEGVPEEVLRRVLREVEKIIKDAKKLLETTAERIRTIIEEARKRSEESLRRVTEIVKEVLRKLKDVREALKRIEELLREIEEVVKRSKTEIERLLRELEESVRRSDERIERLLKRVKDVVDEEER

SEQ ID NO: 5781 - protein, 182 aa, Artificial Sequence; identical to SEQ ID NO: 5780
  Synthetic

SEQ ID NO: 5782 - protein, 182 aa, Artificial Sequence
  Synthetic
EKEKEITKTLEDLIRKNRKLLEEIERRVKEVLKRDRELLEEIERRVADMLRRIRDVLRKGVPEEVLDRLLKEVKRIADKARRDLDRSLDEIRRIAEEAKKRNRDSLEEVKRIVEKVATEVKDLREVLERIKRLLEKVEKVSTESAKRIEELLEEVKRVTDDSKRRVTELLREVERVVDEVRR

SEQ ID NO: 5783 - protein, 182 aa, Artificial Sequence; identical to SEQ ID NO: 5782
  Synthetic

SEQ ID NO: 5784 - protein, 180 aa, Artificial Sequence
  Synthetic
DTLRELAKKAKELDDRNRKLLETVEELVRRVNEKNKDLLRRVRELARELLDRLRKLAREGSGKALRDIKKEIDRLLEELRRLVKESADEIDEILKEARRLVDESREEIKRLLDEVRDKVEDEEVRRELERLVRKLEESVRKSRKDVEDLITELKKSVKESLKEIEDLVRRLREVVKEIER

SEQ ID NO: 5785 - protein, 180 aa, Artificial Sequence; identical to SEQ ID NO: 5784
  Synthetic

SEQ ID NO: 5786 - protein, 182 aa, Artificial Sequence
  Synthetic
EEVDRILKESEDTIREIRDRVRKMLETSKKTVEEIKRRVDRALERDKKLVEDLRERVERTGRDKEVEKIVTDILRHSRELVREIEKLITEDKREVERALEEIERLVREDEERVRRVVEELRELKEAVEKMRRIVRESREVVARIREDIKRVLDESDKVVKDLKRAADRSVEEVKKVVDDIKK

SEQ ID NO: 5787 - protein, 182 aa, Artificial Sequence; identical to SEQ ID NO: 5786
  Synthetic

SEQ ID NO: 5788 - protein, 184 aa, Artificial Sequence
  Synthetic
SELERLKETSKDTIKKIKDLLRELKKTVDDVIERDKTLLDDLREKVERVIRRIEELLKRTRDDRLLEKILREIKEALKKLEEDVRKILKENKDALRELEDRVRKIKDDNRKALRRLEEEVARLKDEKVRDEIRKLIETNKRVADRVEEEVRKLIEDSERSLRKSEKDVKELIKKVEEVMEEVRR

SEQ ID NO: 5789 - protein, 184 aa, Artificial Sequence; identical to SEQ ID NO: 5788
  Synthetic

SEQ ID NO: 5790 - protein, 184 aa, Artificial Sequence
  Synthetic
SIEETVKRLIEEIERVLRDARRESKRLSEEDKKVLDEIREEVRKLEEKIKTVLDKARKDISDEDKLRRVKERVEEAIRRLRKLLREIEERSRESLRDNERTAREIERKVREIIKELRELLERLRTEKLLDEVRRRVEEVIKELEELLRRDKERVDRSIRELEKLLEEIKERVDRMIKELEDRLR

SEQ ID NO: 5791 - protein, 184 aa, Artificial Sequence; identical to SEQ ID NO: 5790
  Synthetic

SEQ ID NO: 5792 - protein, 182 aa, Artificial Sequence
  Synthetic
REVEEADKTVKELIKRNKELLDRIKKEVDELIRRDKELLDKAERDVDRLIKELRDVAREGVDRKVIDELRRDLERLIKKLAEDNKRSLDEARELIREVEERDKRSLDEARKLIRDAERRVKDGKEVVDEIRRLLRELEKVSEDTKREIRELLKRAEESVRRVTERIERLLKELRDVIREIEK

SEQ ID NO: 5793 - protein, 182 aa, Artificial Sequence; identical to SEQ ID NO: 5792
  Synthetic

SEQ ID NO: 5794 - protein, 182 aa, Artificial Sequence
  Synthetic
DELEKIKKDVKKMIRDNEDLLRRVEERVRELNRRNEELLKEIEKRVEELIKRLEDVARRGEPEEVITTLEKEVRRLIKEVAERDEESLRENRKLIKEIEERDRESLRRAEKLIREVEKEVKDKREVLEAIRRLEKEARDVSRRSTRKIEELLETSETSSEKSKRRIEELLRRLERVVEEARK

SEQ ID NO: 5795 - protein, 182 aa, Artificial Sequence; identical to SEQ ID NO: 5794
  Synthetic

SEQ ID NO: 5796 - protein, 186 aa, Artificial Sequence
  Synthetic
EELERAAERIEELLRSNRDLADKITKLSRETLEKIKDLLRKIEKEVRELLERIKDLERRLKDKDTLRREIERLLREVTEIIKRVKKEVDELLRESEEIMTRVKKENEDNLRKAEEIVRDAERRVKDKEEVLRELERLLRELKKSVDELSRLIEELLRENKRLIDEVKKRIDELLEELKKLIEKVKK

SEQ ID NO: 5797 - protein, 186 aa, Artificial Sequence; identical to SEQ ID NO: 5796
  Synthetic

SEQ ID NO: 5798 - protein, 181 aa, Artificial Sequence
  Synthetic
EIEKVVEEVIRRVRKVLEEVERSVRDTIERIKDVLRRVEEVVRRTDKTIRDVLDRIRKEISDKDKLARVKEIVDEALERSRRSLDEVRKRVEDVVRDSERSLEEAERIVREAIKRLEELLRQKVRDEDIRRVLEDIRRELKRIVDENRKLAEEIIRTLERMVEKNKELMKEVVKKLEEDSR

SEQ ID NO: 5799 - protein, 181 aa, Artificial Sequence; identical to SEQ ID NO: 5798
  Synthetic

SEQ ID NO: 5800 - protein, 181 aa, Artificial Sequence
  Synthetic
RIKETVDKVIEEVRRVLEEVRTTVKRTDERIKEVLEEVEETVRRTLEEIRRVLEELERAIKDKDKLDKVRKKVEEVLRRSERSLERAEEIVRKANKESKDSLDEAERIVREVIKELERVLKDNVRDEDIRDLVRKIKEELRRIVEKNRELMEKVERELRRIVEENERLARRIKEELDRDMK

SEQ ID NO: 5801 - protein, 181 aa, Artificial Sequence; identical to SEQ ID NO: 5800
  Synthetic

SEQ ID NO: 5802 - protein, 181 aa, Artificial Sequence
  Synthetic
RIEEIVERLIREVEKVLRDVERTVDKTDRKIREVLEEVRRISDESIKEVREVLEDLERKIKDKDKLKEVRDEVREVIKELEDTLRKAEKIAREVNKESKKSLDDIRKEVKDVIERLEDLLRNKVRDEDIRRLAEEIKKKLKRMVERNKELMERIEREIREIVERDKELVERIKRKLRELAR

SEQ ID NO: 5803 - protein, 181 aa, Artificial Sequence; identical to SEQ ID NO: 5802
  Synthetic

SEQ ID NO: 5804 - protein, 181 aa, Artificial Sequence
  Synthetic
SIEDVVREVIKRVEDVLRRVEEVSRETIERVRRVLREVEERVERTDERIRRILDKLAKSIKDEDKLRKVEEEVKRVEEESRESLERIREIVERVIRELERTAEKAREDVERVIRELEELLARNVRDEDIRRLVKKIEEDLTRIVERDKELLEDIERELRRMVEENERLLEEIERRARDEER

SEQ ID NO: 5805 - protein, 181 aa, Artificial Sequence; identical to SEQ ID NO: 5804
  Synthetic

SEQ ID NO: 5806 - protein, 175 aa, Artificial Sequence
  Synthetic
EELERLARDVDKRVEDLKDDIRKIREEVKRLLDDNRRRAEEILEESRKSLETLTDLMRRNRVDKRELEELAEESKREVKRLLEESEEHIERIKERVDRLLKELKRKVDKIKEDVKRDARSEIVKRVLEKLDEVLKDLKRTIDELKKRLEDVLRESRDIARRALEENERVLDELRK

SEQ ID NO: 5807 - protein, 175 aa, Artificial Sequence; identical to SEQ ID NO: 5806
  Synthetic

SEQ ID NO: 5808 - protein, 175 aa, Artificial Sequence
  Synthetic
SEEDRIAEESRESLEKLKDDIRKIEDRVRKLLEDNKRRAEEILREVEEDLKRIEELFKQNRVDKEDLRRKVEEIERKIRKLMEESKKHVEKIIREVKKLLDELRRKVEESLKEIKKKLRSEIVRRLLEENKRVLDELEKRIEELLRRLDKVLKESERIAREAERKIEEVLRKLEK

SEQ ID NO: 5809 - protein, 175 aa, Artificial Sequence; identical to SEQ ID NO: 5808
  Synthetic

SEQ ID NO: 5810 - protein, 181 aa, Artificial Sequence
  Synthetic
SAEEIIDRVTKEAKKSIDRTRDRITKLRRELEESIRRSRDIITKLLEELRRVVEEVKRDKRELEELVKKIKEVIDRLREKIERNVRKTEDMVRKLEEKIDRIVRRTEKRVEELKEEAKRVRTEKVVEDLERKVEEIVREDEDLVRRLAEEVKRVVEDDERTAKKLEDDVRRIIEAVKRELK

SEQ ID NO: 5811 - protein, 181 aa, Artificial Sequence; identical to SEQ ID NO: 5810
  Synthetic

SEQ ID NO: 5812 - protein, 173 aa, Artificial Sequence
  Synthetic
SLEELLEEARKTVERLIRESERVLRESEERVRRLIEELERVVRETRKRVKEVIERVEDEEALKELEKLLREDSKRVKEVLDDLRRDLERNKRRNEKVLRELEELLKRLEELVREGVREEELEKLLREIEERVKEMLKRDEDTLREIERKVKEAVRDSERTLEEIEKRVTEEKT

SEQ ID NO: 5813 - protein, 173 aa, Artificial Sequence; identical to SEQ ID NO: 5812
  Synthetic

SEQ ID NO: 5814 - protein, 181 aa, Artificial Sequence
  Synthetic
SITEEIKDIERKVEKLIRELDEENKRILETLEREAKDVLRRIEDINEKLHRRARDLKRKGVDRREVDKLIREADKLHRDLKELIDRLATEVKDRLRKSLERVKKLIKEIRELVERLAEKVTREELKRVLDRVLKKVEDLLRKLEKSVRDSERRLEELLRELREVVKRVRDNIEKVLEELER

SEQ ID NO: 5815 - protein, 181 aa, Artificial Sequence; identical to SEQ ID NO: 5814
  Synthetic

SEQ ID NO: 5816 - protein, 181 aa, Artificial Sequence
  Synthetic
SIREEAREELKRLEEEAERLDRENREILKELTREFKELLKESRDINREIHERIRKLKKDGVDRKDVRRTIEDAKRKHEESHKKVEDLIRTVTERLKKSLEDVKRLIDEVRKRVDELRKRSTDRKLDKVLKEIEERLRELLKRLEDSVRESEKRLRDLLRELAKVDEEAKRNVEKVLKELED

SEQ ID NO: 5817 - protein, 181 aa, Artificial Sequence; identical to SEQ ID NO: 5816
  Synthetic

SEQ ID NO: 5818 - protein, 179 aa, Artificial Sequence
  Synthetic
SIKDEIRKLLEKVKREVEEIDDRNRRLLEKVKREAEELLEKNRRLLEEVRKRAEELKDSSEEMVEKLLEDATRLVKTSEDEIRALLKRAEDLVRDSRRRIEEILRTARRALERLREKFTDKDLERVVRDVERRIEELIRKLERSVDRSEEEVRRLIEELRKSVEDSKREVDRVVEELRR

SEQ ID NO: 5819 - protein, 179 aa, Artificial Sequence; identical to SEQ ID NO: 5818
  Synthetic

SEQ ID NO: 5820 - protein, 179 aa, Artificial Sequence
  Synthetic
SILEDVRRLLDEVKKLVEELLRENRRLLEEVKKEVEKLDRKNRELLREVRELVKELKDSSEEMVETLLRRAKKLVDDSREEIDRLLEELRRLVEDSRRKIEELLERAERLLEEVRRRFTDRKLEEAVREVEERVRDLIRKARESVDESRKRIEDLIRELKKSVEESLRDIERLIKELRD

SEQ ID NO: 5821 - protein, 179 aa, Artificial Sequence; identical to SEQ ID NO: 5820
  Synthetic

SEQ ID NO: 5822 - protein, 179 aa, Artificial Sequence
  Synthetic
STREDARRLVERVRKEVKRLLKKNSDLLREVTERVKTLNERNRRLLEEVEREAKRLKDSDERDVERLLDRARKLVKESEDLIRKLLKDLRELVRRSEKDIDELRKELKRLLDELRARATDKDLERVVREIEKEIRDLIRELEENVKTSEKLIEDLIRELEKSVDESRKRVEELVKELRT

SEQ ID NO: 5823 - protein, 179 aa, Artificial Sequence; identical to SEQ ID NO: 5822
  Synthetic

SEQ ID NO: 5824 - protein, 179 aa, Artificial Sequence
  Synthetic
SAEDVVREIEKTVRELMRRVEESVRKVEEDVKRLIKEVKDSADESEKKVERLLEEVKREKEEDEEVIRKLERLVEEDKERIRRAVRRLEELLKRDRERVEDVLRKLAELLERLKDRATKRKESEEELRRLLEEIKKEVDKVIRENEETLKRIKEVVERVIEDNKRTLREIEEEVRRIRK

SEQ ID NO: 5825 - protein, 179 aa, Artificial Sequence; identical to SEQ ID NO: 5824
  Synthetic

SEQ ID NO: 5826 - protein, 180 aa, Artificial Sequence
  Synthetic
SVEEVVKRILETIKDLMRRIKKNSEDVLETIKRLADEIRESVKRSNERIRELIKDIRETRKGDKVERIVRRLEELLRRNTRLVEKIERDLDRLLKENEDLLREIIKTLEKMLRDVRRIAEEGVGTDELEKLLREVEEIVKDVSRKSDTSLKKAEERVRDVKRKDEKTLRDAEEVVRREKK

SEQ ID NO: 5827 - protein, 180 aa, Artificial Sequence; identical to SEQ ID NO: 5826
  Synthetic

SEQ ID NO: 5828 - protein, 182 aa, Artificial Sequence
  Synthetic
SVEDLVRDVRDKAKRTSDEIRKLIERSKEIFERSSREIRRLIEESRDTARRVVEKLKKNGVDEELIRRLEKLVRELEKKHEDILRKNEELMREVVKEHERILERNEELMRELDDKARKNKDKSEEEIARLVEEVKRLVKESLELIEELHRRSEKLVRDSLREIKTLNDESRKIVTDVLREVT

SEQ ID NO: 5829 - protein, 182 aa, Artificial Sequence; identical to SEQ ID NO: 5828
  Synthetic

SEQ ID NO: 5830 - protein, 182 aa, Artificial Sequence
  Synthetic
KVEELVREVTEIARKVREDLERLVRESERRMRESSEKIKRLIEESRRRMKEVVEELKREGIPEELIKDLERLMREVDEEHKRILKKNEDLARELIEEHKDLIRRLEKLAEDLIREAEKNKDKSEEEIKRLREKVKRLVDKVKREIERLNRKSRELVKKSEEDIEKINRESRELLRKVLEDAK

SEQ ID NO: 5831 - protein, 182 aa, Artificial Sequence; identical to SEQ ID NO: 5830
  Synthetic

SEQ ID NO: 5832 - protein, 182 aa, Artificial Sequence
  Synthetic
DVEELIKEVKDKAKRTSDEIKKLIDESKRVLDEVVRRLEELVKRIKESADRVLEEIAREGVPEEILKKVEDLVRELKKRLEDLIERVKTVVRELKKKHDKILKENEELLEEVVRRAEENRDKDRKIAKKLVDDVERRLRKSLRLIEELNKESRDIVRELLRLIEELLKEVEELVERLLREVK

SEQ ID NO: 5833 - protein, 182 aa, Artificial Sequence; identical to SEQ ID NO: 5832
  Synthetic

SEQ ID NO: 5834 - protein, 175 aa, Artificial Sequence
  Synthetic
SELEKVLDEVRKRAKESLRRSEELAKRVEEMDERNLRNSKELRERVEEVIKRLLEVARQNRSDKKDLLRRIEEVLEEVRRHIEENLRHNEKVLEEVERVSEKNLRDVKRVLEEVRRKARSRVLEEVERIVKRVLDEDKKVLDRLRRSVERSSRESEKVLDELKKRVDRVLDEVRR

SEQ ID NO: 5835 - protein, 175 aa, Artificial Sequence; identical to SEQ ID NO: 5834
  Synthetic

SEQ ID NO: 5836 - protein, 175 aa, Artificial Sequence
  Synthetic
SELEKVFEDVKRRLDESLEKSKELLKRVRDTDRENLKNSKRLLERNKRLVDDLLRVVEANTRDKRELEKKNKDVADETREHSRRNVEHNKEVLRRVEEESRKNLEEVKEVLKDVRRRVRSRLLEELEKRAKKVLDDDKRVLDEARRSSKRVTDEDRKVLKTAEDINREVSKRIRD

SEQ ID NO: 5837 - protein, 175 aa, Artificial Sequence; identical to SEQ ID NO: 5836
  Synthetic

SEQ ID NO: 5838 - protein, 175 aa, Artificial Sequence
  Synthetic
SELEKVVDDVRRRLDRLLETSEKLLEDATKRLKDSERKSDEIVKTNEELLERLKTVLERRETDKRELLKENKEILERTRELSERNLKEVEDILREVEEEVRKNLRRIEKVLEEVRRKLRSELLKRVEERIKRVLDESKKILKEIADEVRRVLERDKELLKRLEDKNREVSERIRK

SEQ ID NO: 5839 - protein, 175 aa, Artificial Sequence; identical to SEQ ID NO: 5838
  Synthetic

SEQ ID NO: 5840 - protein, 174 aa, Artificial Sequence
  Synthetic
SELEKVVKEVADLLRRNLEKSKRVLEEVRRRLEENLRESEKVHDDNRKTARRILELVREGKDKRDLTRLLEEDDKRVKEALDKSRENNERILKEVRRALRESEEDNRRILKEVREKVDSRLLEELEERVRESIERSRRFIEELEKIVEETLTESEKLARASSEITKTVLDEIRK

SEQ ID NO: 5841 - protein, 174 aa, Artificial Sequence; identical to SEQ ID NO: 5840
  Synthetic

SEQ ID NO: 5842 - protein, 174 aa, Artificial Sequence
  Synthetic
RELEEVFKEVEKELRDNLRKVEEVLREVRERLKENLDRSKEVLKDVRRRIKELLDLARGGKDKRELEKRVRKIEKDVRKLMEESKENNKRILERVEEAMKDSERDNRRILDKVRKKVDSKLLERLERKVEETLRRSREVIEDAKRIVEETLRRSEDIIREAKEIIDDVLEKIRR

SEQ ID NO: 5843 - protein, 174 aa, Artificial Sequence; identical to SEQ ID NO: 5842
  Synthetic

SEQ ID NO: 5844 - protein, 180 aa, Artificial Sequence
  Synthetic
STDDALRKIERRHKELTKEVRDMLRKVDEEVKRLIEENEDVLRKLREEVDRVIKDIRRADTPNVDELLDEVRRLLEEVERHNKKTLDDLEKRLRDIREKARKLLEDNERALERIKRVVEAGKVDLEDLRRDSERIIEEVKRRLDELRREVEKVIDDVRRLSEKNEKDARRIIEEVKRRLD

SEQ ID NO: 5845 - protein, 180 aa, Artificial Sequence; identical to SEQ ID NO: 5844
  Synthetic

SEQ ID NO: 5846 - protein, 180 aa, Artificial Sequence
  Synthetic
STEEVLDEIRKLHKTLTEDIKRVLREIEELHRRTIEENKEVLDKIREDYKRVIDDVRTKDTPNVEKLLKDLEKSAKENEEHNERTLREDDRVLKEIRRRATELLKANEEMLRRIEEVMRAGKVDAEELLRESKEAIKEVKRVLEELRKESKRVVDETRKLSEENLEHSERVLRKVEEDLR

SEQ ID NO: 5847 - protein, 180 aa, Artificial Sequence; identical to SEQ ID NO: 5846
  Synthetic

SEQ ID NO: 5848 - protein, 180 aa, Artificial Sequence
  Synthetic
DEDKVLRKVKKLVEDIRREIERILREAERLHKELTRRNEEVLERIRRLVDKVIKEIRKADTPDVDRLIKEVRDALRRLEEHNRETLRENETVADEIRKKVEELLKRVEEVLETIRKVIEEGKRDLRELLERVERVIREVRRDLKRLLDESRDVVRRVEERSRRNLEEVKRDIERVKRELD

SEQ ID NO: 5849 - protein, 180 aa, Artificial Sequence; identical to SEQ ID NO: 5848
  Synthetic

SEQ ID NO: 5850 - protein, 180 aa, Artificial Sequence
  Synthetic
SKEEVLREIERLHKETIRRIEEVLREATELHKRLTETNKRVLEDLEREAREVIEDVRRADTPNVEELLRELKDALDKVRDHNRKTLKKNEDVVREIEKEVRELLKEDEDVLRRIEKVMRDGRVDARELLEESRREVERSEKEVERLLRKSRKVVEEVRKLSEENDREVKKILEEVKRRLD

SEQ ID NO: 5851 - protein, 180 aa, Artificial Sequence; identical to SEQ ID NO: 5850
  Synthetic

SEQ ID NO: 5852 - protein, 180 aa, Artificial Sequence
  Synthetic
SKEEVLDEMRRLHETTKRDIRRVLKEIEELHERTLRENKRVLEEIKELVRRVIEDIKRKKTPDVEKLVRRVEEMLKELEKHNKKTTDDDKRVLDEIRRRADELVKEDERVLREIEEVVRAGKVDLKELLDESRRVVKESKEDLDRLLKESRDVVDDTRRKSEKNLRDAERVIREAEEAVR

SEQ ID NO: 5853 - protein, 180 aa, Artificial Sequence; identical to SEQ ID NO: 5852
  Synthetic

SEQ ID NO: 5854 - protein, 180 aa, Artificial Sequence
  Synthetic
DRERVLREMERLVRELLRENREVLDEIRKLHERTVRRNRELAKRLEEEAKEVIDRIEKTKTPNVEELLEKVRRALERVKRHNEKTTRDDERVLRELEKHNEETTRELKEILDRILERVRDGKVDVKKLLEEARDVIRRAKEKSKRNLDESRRVVKETDDLSEKNREDVRKIIKEVEEELK

SEQ ID NO: 5855 - protein, 180 aa, Artificial Sequence; identical to SEQ ID NO: 5854
  Synthetic

SEQ ID NO: 5856 - protein, 180 aa, Artificial Sequence
  Synthetic
DVEEVLREIEELHRRTIERIKKVAKKVREDVKRVLDENKKVLDELRRRVEEVIEKIKKADTPNVEELLKTVEKMLEDVKRHNEETTRRAADILRKIEDKARKLLEEDERVLREIEKVARDGRVDMRELKKRSDDVVRESEKELRRLEDEIRKVIEDLKKLSEDNEREVEKVIRKVEEDLR

SEQ ID NO: 5857 - protein, 180 aa, Artificial Sequence; identical to SEQ ID NO: 5856
  Synthetic

SEQ ID NO: 5858 - protein, 184 aa, Artificial Sequence
  Synthetic
DMERIVDTLRKLNTDSNRRSKEAIDRLRKTNKDSLDKVEEVLREAERLAEDVLRKVEEKVTSEKLERIRREIERVVEEVRKRIEEIKRKIKESLRRVDKLITENSKKNKDSLDRVEDIIRKVGSKKEVLKKLLEEVKDSNRRSEEDVRRMEEEVKRSNDELLKELKEILDKVREAIKKLEEKVK

SEQ ID NO: 5859 - protein, 184 aa, Artificial Sequence; identical to SEQ ID NO: 5858
  Synthetic

SEQ ID NO: 5860 - protein, 184 aa, Artificial Sequence
  Synthetic
SAEDIIRRLRDLNRRSNKKSRDVAEKLRRDNKRTLEKVERKARELKKLAEEVVKEVRDKVTSEKLRRIEKEIRDVVDRVRRLIEEIAREIERSLEEVKRLIKENERKNEESLRRVDDIIKKVGDLEEVLRRMLKEVEDSNRDSDRDVRRIEEEVRRLNEELDKKLEDLEREVRRMIEEIRRKVK

SEQ ID NO: 5861 - protein, 184 aa, Artificial Sequence; identical to SEQ ID NO: 5860
  Synthetic

SEQ ID NO: 5862 - protein, 178 aa, Artificial Sequence
  Synthetic
SELEEVKERVERVLKRIRDLTRELEDRVDKILEKSKRTLDELEKRVREVIARIKELVKRLKDDRRAVKEILDEIREMLKDLEKKARDNLKEVEDRRKELEKLSRDSIKEVEEVLKELRDKVRSEVLKRLEELAREVIEEDKRALERLDRKIRRVLDESRDVLRKIRKLIEDVLREVEK

SEQ ID NO: 5863 - protein, 178 aa, Artificial Sequence; identical to SEQ ID NO: 5862
  Synthetic

SEQ ID NO: 5864 - protein, 178 aa, Artificial Sequence
  Synthetic
SESETIEKEADEMLKRSKKTLEELRKTVKRILERIEKLTRDLEKTAEDIIRKIEDDLRRLKDDERVVDEIIERIKKELRKLEERSRESLRDIKRVLDELRRRMEENLKRVEEILKRLEERVRSEVAKRISEKIRRVLEDSRRVLEELEDLIRRVLERDKRALERIKEDIDRIIRRVRT

SEQ ID NO: 5865 - protein, 178 aa, Artificial Sequence; identical to SEQ ID NO: 5864
  Synthetic

SEQ ID NO: 5866 - protein, 177 aa, Artificial Sequence
  Synthetic
SELEAVLDELRKLVKELEDRLRKVNEESRRLIKELLDRLREVDERSRKLIKDLAEKARRRGVDEKLLDELRRRLEEHNKENRKLEERIRKLLEEHNRENRKITKELRDLLKELEELLDEVDTDELRKRVRDLVRRVDELIKRSKRHAEELTREVEEKVRESEEHVRRLVKEVEDRIR

SEQ ID NO: 5867 - protein, 177 aa, Artificial Sequence; identical to SEQ ID NO: 5866
  Synthetic

SEQ ID NO: 5868 - protein, 171 aa, Artificial Sequence
  Synthetic
DEVEEADKRVEDEVRRLKRLVEEHTKRVEDKVRTLKKLVKEHTDEVRRAVEELKRRRDDEESVRRKIEEIKRRSDKIRRDVERKIEEVYRDSERELRRIKKEIEDVLREMKRRDIDEDVLRKVKELLEDVARLVEESHEEARKLLKEVEDRLRESVREVEELLRDVERRTR

SEQ ID NO: 5869 - protein, 171 aa, Artificial Sequence; identical to SEQ ID NO: 5868
  Synthetic

SEQ ID NO: 5870 - protein, 174 aa, Artificial Sequence
  Synthetic
DEVEKVKEEIRRIVKELEDRVEEHKKEAKKIIDELRRLVKRHREEVEEIVKKLEELVRRNSPREEIEKELDKVRRRSDELHKDAKKKLDEVREDSKRMAEEIKRTLEKVRDELRRKISNEEVLKEAEKLLEDVERKLRKSHEDLERLLKEVEEAVRDSNEEVRERLDRVREKMR

SEQ ID NO: 5871 - protein, 174 aa, Artificial Sequence; identical to SEQ ID NO: 5870
  Synthetic

SEQ ID NO: 5872 - protein, 174 aa, Artificial Sequence
  Synthetic
DEDRKVEEDIRRIVKRLREIVEKHNREAREIIKRLRDEVRKHRDKARKIVTRLDELIKRNTPEEEAKKEVDDVRRRSKEEHDRFDKELKEVRERSKEMADKIKEDLDRVRDELRRKIKNKDVLKEAEELLEKVKRDLDRSHEELEELLKRVREELEDSNRELEKLIEEVERKVR

SEQ ID NO: 5873 - protein, 174 aa, Artificial Sequence; identical to SEQ ID NO: 5872
  Synthetic

SEQ ID NO: 5874 - protein, 174 aa, Artificial Sequence
  Synthetic
SEVEDVDDRIRKIIKKLEDLVRKHNEDARRIIDELRELVERHNRRAREIVRELEDLVRRNKPRERIEEKLREVKKESEDVLKEAEDRLREVRKRSREVHEEARRRLEDVRKKLEERIDSEEVLKKVEKLLKEVLDLMKESNEELEKLLEEVKREMEESVKELKKLLDEVREKVK

SEQ ID NO: 5875 - protein, 174 aa, Artificial Sequence; identical to SEQ ID NO: 5874
  Synthetic

SEQ ID NO: 5876 - protein, 179 aa, Artificial Sequence
  Synthetic
KEIEDVLEKVRKVVTDLKKKLEDVNRESEKLVREVVKELKRVDDESRKLVERVEKEADEKGVDETLKRKLREYLKEHHKRNKKIIDDLKKYLDEHHDKNRRIIEELDRLLKEMEEIIRRNELSEEELDRRIKELKDRADKLIKDSKDNVEELRKKAEELIRRSRKNVEDLVRKATEDVR

SEQ ID NO: 5877 - protein, 179 aa, Artificial Sequence; identical to SEQ ID NO: 5876
  Synthetic

SEQ ID NO: 5878 - protein, 179 aa, Artificial Sequence
  Synthetic
RELEEVLKKVEDLHRDVMKKIDDVVREASELHKKVKEDIDEVVKRAEDVLRRVKRELDKRGGIEEVKRRLDKVLKDLRKEVEDIKRKLDEDNKTLRKKAKEIKDELKENLKRLEDVVRRGDLDKDELDEHIERSLRKVTELVKDLKEHIERSLEEAKELVRRLEELIEELLRRLAEEVR

SEQ ID NO: 5879 - protein, 179 aa, Artificial Sequence; identical to SEQ ID NO: 5878
  Synthetic

SEQ ID NO: 5880 - protein, 177 aa, Artificial Sequence
  Synthetic
SEVEEVLREAEELLKEVRDRLRESVEKSKRLLDEVRRKIEESHRRHKELSDEIRRLAEERNLDKTLEEKIKKVNDENRRRLRELERTLEEVLERNKETVRRLEDELRKVLERLRRLAKDVDIEELRKEIKKKIDEMRRLVKEDTERLERVAEELRRRVEEDKERSKDVVRRLREDVK

SEQ ID NO: 5881 - protein, 177 aa, Artificial Sequence; identical to SEQ ID NO: 5880
  Synthetic

SEQ ID NO: 5882 - protein, 177 aa, Artificial Sequence
  Synthetic
SEVEEVLKRAEELLDDVRRLLERSHRETERLLDEVRKRVEDSHREHRKLSDEVRRKAEERNLPEELDERLKTVNEENKKLIEEIKDRLDRVREEDEKSLKELKDKLDEVRDRLERLKKDVDIEELRKDIERAVKELRERVEENTRRVEELVRRLRELVEEDRKRSKEVADEMDERVR

SEQ ID NO: 5883 - protein, 177 aa, Artificial Sequence; identical to SEQ ID NO: 5882
  Synthetic

SEQ ID NO: 5884 - protein, 177 aa, Artificial Sequence
  Synthetic
KEVEEVLDTAKKLLDEVRRELERSHEEHKRLSDEIRERLERSHEETERLLKEVKEEVDDKNVEEELKKKLDEIRKEDEETLRELEERLKRADDKNEKIVRELEKRLRDVEEELRKLMKDVDIEELKRRIDDMVRRLRELVERDRRESKKVADDLRRLVKENTERAREKIEELRKDVE

SEQ ID NO: 5885 - protein, 177 aa, Artificial Sequence; identical to SEQ ID NO: 5884
  Synthetic

SEQ ID NO: 5886 - protein, 177 aa, Artificial Sequence
  Synthetic
SEIEEVLKEAEKLLREVEKELRRSHEELKRLLKEVRDKVRRSMEESERLLEEIKKKADERNLEDELRKRLEKVLRDNRETIRRIEEAIKRVEEENRKTIRDIERTLREVLERLKELKDRVDIEELKRRIEDAARKLEKLVKDDRERIERKVRELERLVEEDKKRLRDRVRKMDEDVR

SEQ ID NO: 5887 - protein, 177 aa, Artificial Sequence; identical to SEQ ID NO: 5886
  Synthetic

SEQ ID NO: 5888 - protein, 174 aa, Artificial Sequence
  Synthetic
REVEEIVKKVRKEVTRLLREVEEDMKRNRDTIRELLKYVKKDLEENKDIIRRLLELIRRDGSTKELRKTLEDKLKESEDNLRRVAEELREKEERSKRNLDRIEREARERVKRLEEEGVSEEARKDIERLLEEVRTKLRENEEDLRRLVKEVDRELKRNRDELERLAKEVRDELK

SEQ ID NO: 5889 - protein, 174 aa, Artificial Sequence; identical to SEQ ID NO: 5888
  Synthetic

SEQ ID NO: 5890 - protein, 174 aa, Artificial Sequence
  Synthetic
SEAEEIAKEVEKRIRELLDRVRRMVEESEKYARDSLRKIKRLLDEVRRRIEELLRKIRRDGPTEELRKELERIKEEIDELLKKIRKENEDAHRRSKELIDRMKEELDKIKEEIDRKNLPSEVAKKVKELLDEVERILREWEKEDRRLLKESEDLLREVEKEVRKLLRRVEEELK

SEQ ID NO: 5891 - protein, 174 aa, Artificial Sequence; identical to SEQ ID NO: 5890
  Synthetic

SEQ ID NO: 5892 - protein, 174 aa, Artificial Sequence
  Synthetic
SESEKILEEAKRRIRKLLEDVKEMVKRSRDYARESLKRIKDLVEESKREIDKLLEEIKRSGPTEELEKRLREINRRSRELVKKIREENERLHRRSKELVKEMEDRLREIEEEIRKKGLPSEVEEDLKRLLEEVKRELKRWEEDDKRLLDDSERALKEWEDTDRRLLKRVEDELR

SEQ ID NO: 5893 - protein, 174 aa, Artificial Sequence; identical to SEQ ID NO: 5892
  Synthetic

SEQ ID NO: 5894 - protein, 174 aa, Artificial Sequence
  Synthetic
SEVEEIVKDAERYIKESLDRIRKAVEESRRRITELLKEVERLLREVRKRIKELLDEIRRDGPTDELRRKLEKIEREIKKRLDDLRRELEEIHKRSDELVRRMEEENKKAEEEIRRRGLGSDAERKLEELLEESRELLKRWRDDDKRLVDDVRRKLKEVEEEVRKLLKEVEDELR

SEQ ID NO: 5895 - protein, 174 aa, Artificial Sequence; identical to SEQ ID NO: 5894
  Synthetic

SEQ ID NO: 5896 - protein, 174 aa, Artificial Sequence
  Synthetic
SEVEEIVKEAKRRIDELLKKVDELLKESERYARKSLKDNKDMVRRSEERIRELLEKIKRDGPDDKIREELKKINKESEDLIRKNKEDNERFHKKTEDMLKRLKEELDEIEERIRRKGLGSEAEKRLKDLLDRVKEKLDEVRRRDRELLEESKDLSRRWKERDDRLLEEVEKALK

SEQ ID NO: 5897 - protein, 174 aa, Artificial Sequence; identical to SEQ ID NO: 5896
  Synthetic

SEQ ID NO: 5898 - protein, 176 aa, Artificial Sequence
  Synthetic
REIEKIREDLERLLEEVKRAAEEWRRRDEELVRKLEELIKRVLDEDRRLLRELRDKGKGERLKEIERRSEESRRRLKRLLEEIRRLSKRSKEELDEALKRVEEEVRRIEDKLRKVRGREVIKKVLEEIRDKIRKILKTIEDLVRKSEDLIRRVLEEIERILDESRRDVEEVKRREE

SEQ ID NO: 5899 - protein, 176 aa, Artificial Sequence; identical to SEQ ID NO: 5898
  Synthetic

SEQ ID NO: 5900 - protein, 174 aa, Artificial Sequence
  Synthetic
DEDRRVKTEIKKLLEELTRRSREVEEDDRRLLDELTRETERIEEDLRRLLEEVRRSGVPEDKLREIEREIRELRKRLEDLNKEIKDLSEKTRKELRDLNRRLKEIVDRLKERIDKEGATDEIEREVRKVEEDYRRSLRRVLEESRKIAERYKKKLDEMREEVRRRAKKVKDEVR

SEQ ID NO: 5901 - protein, 174 aa, Artificial Sequence; identical to SEQ ID NO: 5900
  Synthetic

SEQ ID NO: 5902 - protein, 177 aa, Artificial Sequence
  Synthetic
KSVEKIVEDIKRVADKILEDIKRSEDRVREIVDRHRREIDKVVKEIVKRVEDLKRNNIPREEAERVLRDVERKVEEINRRMEEHLRKLEEEVKRSHDEIRRKLEELEKRVRDIKKDVDKDEMEDLKRRVDELKKEIERALKEHKDKVKKLLDDLRRLNEELRREVRRVLEEVRETTR

SEQ ID NO: 5903 - protein, 177 aa, Artificial Sequence; identical to SEQ ID NO: 5902
  Synthetic

SEQ ID NO: 5904 - protein, 191 aa, Artificial Sequence
  Synthetic
DEIERVEEALKKVEKDLRRLIRELEKLNDKIERDIRRLHEETNKRLKEVREKVEDMIRRVSARAPEEDLRRLKEEIDKLVRELEKKDRDLAKENERKIRELRKHLEELLREAEREIKRIEDKVREAKKRGEDRRVVKKLLDEIEEILRRLKKLVDDHARESKRILRESERKVEALLEEIEEILKRLEEKVK

SEQ ID NO: 5905 - protein, 191 aa, Artificial Sequence; identical to SEQ ID NO: 5904
  Synthetic

SEQ ID NO: 5906 - protein, 180 aa, Artificial Sequence
  Synthetic
DEIERVLREIDELRKKVEKVIEDSRRNAKRWLDRVKRTAEELNKLSDELLEEVTRLAEAGIPEEKVKELRDRLEELDRRSKEKIKKLKRDLERNLRETERTIEELKRELERLVEKIRREIDSRAMEEVRKTAEEVIKTVDKLLKELRKTYEDILRDIDRLLKEHHARNRRVLEEVERLTQ

SEQ ID NO: 5907 - protein, 180 aa, Artificial Sequence; identical to SEQ ID NO: 5906
  Synthetic

SEQ ID NO: 5908 - protein, 171 aa, Artificial Sequence
  Synthetic
SEREEVKKRLDDVRREAKRLLDEVRKRLEESHRKHKKLLDEVRKRLKEVEEEAKRRGVSEDLERELKRLLDELDKKLKESLRENEKTIRDIEESLKTVLKKLEDLVKKLRDDNVRKEKVTKIIEDLKRELEEMFRKLKRLVEEDDRRSKESLEEVRKLVEDARRKIEEDTR

SEQ ID NO: 5909 - protein, 171 aa, Artificial Sequence; identical to SEQ ID NO: 5908
  Synthetic

SEQ ID NO: 5910 - protein, 181 aa, Artificial Sequence
  Synthetic
SSIEKLKKVVEDIKRRSEDLNRELEKVVRDVKKRSEELNEELRKVSEEIERRLRELLKRISDEKKLRDAARLIDELRKNSERVSRENEELVRRLKKKVDDVSRKNKEIVKDLERRVDEVRKRGPAEERFVEELRRALKKDEDDMRRVVEDIERLLEEDERRMKKAVEDHRRLLEELEERAK

SEQ ID NO: 5911 - protein, 181 aa, Artificial Sequence; identical to SEQ ID NO: 5910
  Synthetic

SEQ ID NO: 5912 - protein, 174 aa, Artificial Sequence
  Synthetic
DESEELKKVLKEIEDEVRRLIREIERVLEEIERRDRELLKRDEETLKRIEEEVRKLRLSEELKKEAKKRLDESRRRLRELHEESKKRLDDIRERLERLLRELEKRLTEVDKRIKREGAREEIIEELRRILKEAEDVIRRIIEEVRDVLRESEKRVRESIDENRKILEELRRRAK

SEQ ID NO: 5913 - protein, 174 aa, Artificial Sequence; identical to SEQ ID NO: 5912
  Synthetic

SEQ ID NO: 5914 - protein, 170 aa, Artificial Sequence
  Synthetic
DEEDRLRRELEKVRRDADRLLEEIRRVLEEVERRSKELLKRDEDSLREIVRTVTEETKRDEIKREVDKIAEDTRDHLRKHEEKTRRIKEEVKELLKRLKDKVDKVRKEVEAKKVTDEVLEEIRRILEELRKEAEDIIRRIRELLRELEKNVTDSIRRNEEMLKELRRKVK

SEQ ID NO: 5915 - protein, 170 aa, Artificial Sequence; identical to SEQ ID NO: 5914
  Synthetic

SEQ ID NO: 5916 - protein, 180 aa, Artificial Sequence
  Synthetic
SEAEKILEDMKRYIEEHIERVKRSLEENKKKDRELIEKSRKSLEDARKKIRELLELVRQRKTSEDVLRKSIRELEEDLKKHEEDSERDKRRLEEDHKRHEDESKKSLDDLERRLEEVERRGLVSEEILKRIRDLVKELEERDRRVIEEMKKSNKRTEDTDREVLERIRRLVERLADEARK

SEQ ID NO: 5917 - protein, 180 aa, Artificial Sequence; identical to SEQ ID NO: 5916
  Synthetic

SEQ ID NO: 5918 - protein, 185 aa, Artificial Sequence
  Synthetic
SELERVIEEIKRLLERLKRENEEVKKRVKKLLDELRKINKDVEDTVRELLKRVKELVDRANLDEKSRRDLEKKREETKRELEEIKKKSDKNLTDLKRELEKIMEDSKRDIEKIERETKKLEEDRLGKDEIEEALRRVEEHIKRHLKTVKELAEKAERHIREHLKEVKRMLEKAKRTIDELLKKIK

SEQ ID NO: 5919 - protein, 185 aa, Artificial Sequence; identical to SEQ ID NO: 5918
  Synthetic

SEQ ID NO: 5920 - protein, 175 aa, Artificial Sequence
  Synthetic
SLREAAKEVLERVRREVEKLRKSNEEVLTRVREEVKKLLETNKDVLRRVAEILKTANVDKRIADRVRDELRRYEERLKEEADRIRKMLEDYERESRELRERIERTIKALEDRVEKKGEVSEEDIREIEDILRKIAETVETLNRRLEDILREIRKSSKKTIDELREKAKELEDRTR

SEQ ID NO: 5921 - protein, 175 aa, Artificial Sequence; identical to SEQ ID NO: 5920
  Synthetic

SEQ ID NO: 5922 - protein, 182 aa, Artificial Sequence
  Synthetic
SEVDEDLKDIKRYLDEHRKRVEEVVKRLEDRSRETAREVEEDVKRIERKVEEAKKEADERGNRKERLEELRKELKKERDDLRKRNEDDRRDLDRERKRLEKELEDSRRKLDKKEDELRKKNLDEDAKRRIEEVLERVRRELERSEEKLRRVLEKHREDNDRLEEELDRVLRELEKILDEVAT

SEQ ID NO: 5923 - protein, 182 aa, Artificial Sequence; identical to SEQ ID NO: 5922
  Synthetic

SEQ ID NO: 5924 - protein, 182 aa, Artificial Sequence
  Synthetic
DEVRKILKELKELVKRIEDKLRKYLEDVRREVERIEEEVRRNLERIKRLAEEIERRVRRDGKSKELAEEVKRKLTENEKEDRKRERDVREKNKEDKRRLEEEMKKVEETLKRKEDDVRRRNLSEDVKRKIDKVLDEVRRLLEDIKRRVEKINTDTERLLKKLAEDSKRALEEVKETLERAER

SEQ ID NO: 5925 - protein, 182 aa, Artificial Sequence; identical to SEQ ID NO: 5924
  Synthetic

SEQ ID NO: 5926 - protein, 179 aa, Artificial Sequence
  Synthetic
ELRERIKRALDEHRRVSEELERRVREANKRHNEVSKEVKDDLKRSHDELRESLERIKRRGDLSEEMEKKLRERLERSKREIEKKEKENRDEHEKSRKKVEDKKRDNERRVKEMEDKIEKDGRVEEEDLKRIREETERLKEDVRRYLRELEKLSRDLRRKVEELLKDNKRKVKEIEDEAK

SEQ ID NO: 5927 - protein, 179 aa, Artificial Sequence; identical to SEQ ID NO: 5926
  Synthetic

SEQ ID NO: 5928 - protein, 182 aa, Artificial Sequence
  Synthetic
DELETLEERIRRSVERVRRELKRYKEEMDKHSEDLKRLVDKNLEDVRRELEEIRKLATDGRFDEDVERTVEKRLKDNEDRDRERSRKVEDDNRRSREELEKLKKESDEELERTKKEVEERNLDEDMEKKLRELLERHERENKKAREDVEEANRRNEEVLKDIERRSKKALDDVRRELERVRK

SEQ ID NO: 5929 - protein, 182 aa, Artificial Sequence; identical to SEQ ID NO: 5928
  Synthetic

SEQ ID NO: 5930 - protein, 178 aa, Artificial Sequence
  Synthetic
SLKEVLDKIEEDHRRMSKRNEEVLEEVKRRAEKLLKDAEEVLRRVRERIEELIRRVEETKGRTERLRELEERIRKRDEEIERKLRKELERLKERLRRYRERTKELNKKFEEDLRELRKKGVDVKELKKRADESRKTVERLSRELKKELRKVEEDVKREVEKIEEDLKRIARRVREESR

SEQ ID NO: 5931 - protein, 178 aa, Artificial Sequence; identical to SEQ ID NO: 5930
  Synthetic

SEQ ID NO: 5932 - protein, 180 aa, Artificial Sequence
  Synthetic
SELERLLEEVERLLEKLERDNKRLLDDVRRLLERLRRDNERLLEKNKRLLDRLREEVSRVSDEKFLREVEKKLRDNEREAERVAEESEKHLRDVKKRLDELLETSERNLREVRERLERVRRDEDIEKLAREVKRHIERHKEELDRLRKEVEKNARKHEEDLRRLEERSKKHVEDIERETR

SEQ ID NO: 5933 - protein, 180 aa, Artificial Sequence; identical to SEQ ID NO: 5932
  Synthetic

SEQ ID NO: 5934 - protein, 180 aa, Artificial Sequence
  Synthetic
SELEKLLEDVKRLLDELRERNEKVLEDARRLLEELRKRNEDLLRRNRELLERLEREVSKVEREEVLDRVRRELEKNERRVDELRRESEKHLREVKEELDRLKEKSETNLRDAERELTELKDDEDIDRVRRRVERHIREHERDLREVKKRIEEDAKRHRDRLKKLEEDSREHVKRMEDRTR

SEQ ID NO: 5935 - protein, 180 aa, Artificial Sequence; identical to SEQ ID NO: 5934
  Synthetic

SEQ ID NO: 5936 - protein, 182 aa, Artificial Sequence
  Synthetic
KLEELAKELRRLLEELRKRSKEVIDRLRRLNEELRKTSEEVIRRLRELNRRLTEKARRRLKDEGEKLKEAEKLSEDHRRKVEELLKKSEEDSRRHREKLEELERRSREDLRRLREEIERVLKDRDIKEEVLRKVREEVKEHERRLEDALRRSKKEIDDHKRELEELLKENAEEVRRVEERIR

SEQ ID NO: 5937 - protein, 182 aa, Artificial Sequence; identical to SEQ ID NO: 5936
  Synthetic

SEQ ID NO: 5938 - protein, 182 aa, Artificial Sequence
  Synthetic
KAEELVRELKRLLDKLREESKKVIEELKRRLDEVAKKSEDVVEEMRRLLEELKEKIERRLKDKGEDLKRAEEKLKDIEREIDKLEKESRKNLEDIKRDLERLLKESEDDLKRLEDEIDTVRKDGNIREEVLRDVRRKVEDHRRKLDEIRKRVTDEARRHERELEKALEKIRRDIRRIEEELR

SEQ ID NO: 5939 - protein, 182 aa, Artificial Sequence; identical to SEQ ID NO: 5938
  Synthetic

SEQ ID NO: 5940 - protein, 182 aa, Artificial Sequence
  Synthetic
KVEDLLREAKALLDELKRESERIIKELRKLNDDLTKKSEEVIRELEKLLRDLKKIVDERLKDRGKDLEEVRRRLEEIKKEIDDALEKSRRNSEKHRREVEEVLERSERDLERIREELERLAKKGDIKEEALKKVRKEVEDHKRRLKEAVDRNRKKIKDHEEELERTLRDIRRKIDKERRELE

SEQ ID NO: 5941 - protein, 182 aa, Artificial Sequence; identical to SEQ ID NO: 5940
  Synthetic

SEQ ID NO: 5942 - protein, 176 aa, Artificial Sequence
  Synthetic
EELERLLKRVRDESKKNRDKVREDLERSRRKSKRHEDELRRLLKEARDDIDRVRDLRRKNSQRREDLKRILDTLREKLKKMMEDSERDLRRWEEENRKLNKESKEELDRLKEEIDKSPIGEEVVKEAEKILDDNRKENERVSEEDKELLERNKKKAEDVLRELEELIRKLAEELKK

SEQ ID NO: 5943 - protein, 176 aa, Artificial Sequence; identical to SEQ ID NO: 5942
  Synthetic

SEQ ID NO: 5944 - protein, 179 aa, Artificial Sequence
  Synthetic
SELEELLKRIRDKSKENEDEVRTDLKRVRDYARRHEERLRELLERVRDELRKAEELRRAGEVSEKVVKEIVDKLRKMIEEIKREVDESKKRLDDDLRKIADTSRRKAEELKKDLDKVRTDGADERVLEEIERIMRENKRRNEEVIKEIKELIDRLRRKSERVIEEIKKRIDELRDKARR

SEQ ID NO: 5945 - protein, 179 aa, Artificial Sequence; identical to SEQ ID NO: 5944
  Synthetic

SEQ ID NO: 5946 - protein, 179 aa, Artificial Sequence
  Synthetic
EEEREIEERLRKKIEEIRREDKRHHDEVRRKVKEIKEEDREHHERVKRKAEEVKKRIETTGPRREEVEKIEREVEKNSRDHKRRLDEIRRELEKDSEDHKRRVKEIEDDIKRDLDEIRRKVKDDKDVLRELKRLLDELRESARKNNEDLKRLLEELEESVKRNNDELKKLLDELKERAR

SEQ ID NO: 5947 - protein, 179 aa, Artificial Sequence; identical to SEQ ID NO: 5946
  Synthetic

SEQ ID NO: 5948 - protein, 186 aa, Artificial Sequence
  Synthetic
RELEELAERVKRLLERDEELLRRLKDAVRRLSEKDRRLLERLAREVKRLLDELRDLVRKRLKDKREDLERVEKMLREIKRDLEDHKRRVEETNRRLEEEVRKHEEEVKKDNDDIRKELREIEERKLDKELLERVITELERKARESEKKHEDSLRELERLARESEERHKRSLEEVERKIEEIKRDLD

SEQ ID NO: 5949 - protein, 186 aa, Artificial Sequence; identical to SEQ ID NO: 5948
  Synthetic

SEQ ID NO: 5950 - protein, 178 aa, Artificial Sequence
  Synthetic
RELEKLEDEIRRELRRIEKELKDYERELEERADKDRRDIEDYRRRLEERVKEIEDRLRRDGSDEEELRRIREESRKTLEELKRHLDKSRKESEDTLRRLEKRLRDIEKRAEEIKRELDRAGVSEELRKILEDALKRVREEVKRILDRNRELLRESEELVRRVLKRNRDLLREVDERVR

SEQ ID NO: 5951 - protein, 178 aa, Artificial Sequence; identical to SEQ ID NO: 5950
  Synthetic

SEQ ID NO: 5952 - protein, 182 aa, Artificial Sequence
  Synthetic
DKVREALKRLKDKMETYERRSKKHIEDHKRKLKEYEERVRRNIKRLREELKKLEEDAKTRGPREKDVTEILKRIEDHLEEHHRRSEEVKRDLERNLEEAHKDSRRVLEELKKELEKIRRGDLSEELLKRVDELARRIMKRIKELNRENERVVRESLKRVDELNKRSEKVHKEVLDRLEELRR

SEQ ID NO: 5953 - protein, 182 aa, Artificial Sequence; identical to SEQ ID NO: 5952
  Synthetic

SEQ ID NO: 5954 - protein, 178 aa, Artificial Sequence
  Synthetic
SLKEELEKLVRDIIRDNRRLLEENEELVRRSEESNKRLLEENEETARRIKAELERAGIPEEELKELVKRLEEELRRIKEEADRLDEKHKDDLRRIREEAKKIDDELKKELDEIKRKDDSEKLVEEVKRKLKRKLEEIRREHRRTKEEIKKTNEDIKRRHDETLRRLEKTLEDIKERTR

SEQ ID NO: 5955 - protein, 178 aa, Artificial Sequence; identical to SEQ ID NO: 5954
  Synthetic

SEQ ID NO: 5956 - protein, 182 aa, Artificial Sequence
  Synthetic
SEVEKILEELKREVREHERRVEKLVRELEDYVRRHREKVKRIEERLRDKLREIEELVKEGRLDDSEVERLKREVEDEARRLEEEHEKSLRRIEEKLREIEKDHKRSKEELDKRLEDIRRRGLPEKAVREIETLADEIRERIERSLKRIRDLIREIKEDLRRSLERIREIIREIKKAIDDRRK

SEQ ID NO: 5957 - protein, 182 aa, Artificial Sequence; identical to SEQ ID NO: 5956
  Synthetic

SEQ ID NO: 5958 - protein, 182 aa, Artificial Sequence
  Synthetic
SEVEKILKEIRDENERLKKEIEEILRELERKLREHRREVEEVLKRIREKIETLKDESRREDRGSERVDKVRRELEETLKRIKERHDESRKELREKSERIKRRIEEYKERNDRKLEEIERANLPEEMLREMERISREDRETLKRLTDRIREMIRRLEEEIKRSEREAREIIKEAKKVLEDEAT

SEQ ID NO: 5959 - protein, 182 aa, Artificial Sequence; identical to SEQ ID NO: 5958
  Synthetic

SEQ ID NO: 5960 - protein, 179 aa, Artificial Sequence
  Synthetic
SRVEELIKDLRRSTKELEDRVRKLLEELKDKTRRTEKRNREKLEKLKEELRKLEEDVKREGPRETDLDERVKELEKAAEDSKRELDENLERVTREIEKIKREIDKYRKDSERRIEEIRKSGDDDEKVRKVMEDDRRKLKKILDDVEDVLRKHKKVLEDLKRTNDDVLREARKLAEKIRR

SEQ ID NO: 5961 - protein, 179 aa, Artificial Sequence; identical to SEQ ID NO: 5960
  Synthetic

SEQ ID NO: 5962 - protein, 181 aa, Artificial Sequence
  Synthetic
SAEERLKEALKRLDDVSKRSEEEIRRMIKRIERISRESLKRLKDLNRRIKELVERIERRLKVDDELRRLRKRVEKLNRDSEETAEREREDNERMIRELEKRLREEKEDNKRFLKELEERLRRGPVDERLLEEIKRYIDEHKRRLDELRKDIERYLEEHKERLRELEKRHEELLRTLDREAK

SEQ ID NO: 5963 - protein, 181 aa, Artificial Sequence; identical to SEQ ID NO: 5962
  Synthetic

SEQ ID NO: 5964 - protein, 185 aa, Artificial Sequence
  Synthetic
SAEEDLDRMRKKVEDVIREDKERVRKLLERAKEVIRESEKKHEDLRRRIRKVIKEIRERTNGSSDELRKIEDLLRRLEKHVDDSEREVKKNEEEIREEVERHLKRSEDNAEEIRKEIEEVERRKVSDTDLERELRRIDKHLRDHKDEARKSEERVEDHLRRHRERVRRNEEDVEDKLKKLKDETK

SEQ ID NO: 5965 - protein, 185 aa, Artificial Sequence; identical to SEQ ID NO: 5964
  Synthetic

SEQ ID NO: 5966 - protein, 175 aa, Artificial Sequence
  Synthetic
REEEELKRRNKDHNRRHREDTKRIAEDVDRKLREWKKKSDEAREEVKRLLERLKELADRNEVEEREVERLLKELRDRVKELKEESDRDLERLRRTVEELLKKLDKNLKESEDELRKKPESEDLRRLMKENRETIRESAEILERLRERVEDLVRRDREILEKLLRDIEELAERIKR

SEQ ID NO: 5967 - protein, 175 aa, Artificial Sequence; identical to SEQ ID NO: 5966
  Synthetic

SEQ ID NO: 5968 - protein, 184 aa, Artificial Sequence
  Synthetic
SVEDELRKLEERLKRIADELRRLVEKNIEDNKESLKEIEKLIRENIERNKEVLKRIAERGKREDELRDIERKIRESIEKLKDLLRRAEEKVRRSIRRLEKILKELKEKVDKLKEELKDLTDKRLDKDELKKALDDVDKKLEDLRREVEDRDRKNEEDNRRLRKELEERSRENKEFLDKLAREAD

SEQ ID NO: 5969 - protein, 184 aa, Artificial Sequence; identical to SEQ ID NO: 5968
  Synthetic

SEQ ID NO: 5970 - protein, 175 aa, Artificial Sequence
  Synthetic
SEKDESARDIEEKLERHLRKSDESRRRNEKRIKEHRDRSDESRKKFETDLKRIEDEVRKRGPNRDELDELLKRLKDELDDHRRRTEKSARESKKHLDEHRKRTEDSLRTFEEELKKLEPDEKLKDLERKVREVIDRDRDILRRLEEEHRKVITEDEEILKRLEEKAREAIERIRR

SEQ ID NO: 5971 - protein, 175 aa, Artificial Sequence; identical to SEQ ID NO: 5970
  Synthetic

SEQ ID NO: 5972 - protein, 175 aa, Artificial Sequence
  Synthetic
SEKDERLEEIKRRLKEHKRRSEEAVKDNDRKLEKHKRDSDRSAEEVKKKLEEIEKRVRKDGPRETELEELDRRLRKELEDHARRTDESMKRSEEHLRKLKKEIDESLKEFKKELDKLEKDKKLDDLEREIRKVIEESKRLLEELERRHRRVIEEDKRILDELRRLIEELIEDAKR

SEQ ID NO: 5973 - protein, 175 aa, Artificial Sequence; identical to SEQ ID NO: 5972
  Synthetic

SEQ ID NO: 5974 - protein, 175 aa, Artificial Sequence
  Synthetic
SEKDEELKRIKEDLERHERESEDDVRRNEEKIRRHRRKTEEAVKEVEEELKRLEEDVRREGPGRDELEKASEDMKRRLDELRRRIEESMKESDKHLRELEEKVRRSSRRFEEELKKLERDRDLERLRKEIREVIEKSKDLLRELRRRHEKVIEDSEDILRKLEKKIKDLVDKIRK

SEQ ID NO: 5975 - protein, 175 aa, Artificial Sequence; identical to SEQ ID NO: 5974
  Synthetic

SEQ ID NO: 5976 - protein, 175 aa, Artificial Sequence
  Synthetic
SRKDEEVKRVKEKLKKHEERSRDMVRKVEDKSRRHREKIKEAEREVRRRIEELEEDVRRRGPRRDELERVKRELEKRLEELEREIRKSLEDAKRDLERLKREIDKSLEELKRELEKLEEDKKLEDLREEAERVIRRSEKLLEELREHVERNIDEVREILRELAELVKRVIDEIRR

SEQ ID NO: 5977 - protein, 175 aa, Artificial Sequence; identical to SEQ ID NO: 5976
  Synthetic

SEQ ID NO: 5978 - protein, 184 aa, Artificial Sequence
  Synthetic
SVEDILRTLRRLLEELEEESERILKRLREIIETNVRRVKELLRRLKERLDELAERLKAKVREEEVLRRLAEELKRAEDELRKLEEDVKKSVKELRDKLETLRRDVRRNLEEIRKELEKIEKDRVTSKELDDLLKKVEEHLRRHKRKLEKALKDVEDESREHEKELRRALKRIERLLRELERKAD

SEQ ID NO: 5979 - protein, 184 aa, Artificial Sequence; identical to SEQ ID NO: 5978
  Synthetic

SEQ ID NO: 5980 - protein, 180 aa, Artificial Sequence
  Synthetic
DEEEVIREIEKRFRDLIRRAEDVLRRIAEKMKRLKDKTRRLLEELRESNRKLIKELRDRIRDERLRKEVEDLEKTSRDRLDAIREELRESEERAREILDRIRRLIEELRRTAKERLDELRDTRRSKEVRDRVEEELKRIEDRLRKLDTDVDRYLKEHEDRLRKLKEDNERDLKRVEERAR

SEQ ID NO: 5981 - protein, 180 aa, Artificial Sequence; identical to SEQ ID NO: 5980
  Synthetic

SEQ ID NO: 5982 - protein, 177 aa, Artificial Sequence
  Synthetic
DIEELLKEVKKEVDRVEKKVKELIDRNKERVDRVREENERVADEVRKLIKELRDRIRDDEEVVREVEEVLRRVEKKLDELSRHVDEVLKESEDRLRKVLKLVREVLEDATKLLKDIETRELVEKVAREAREKLKKVEDLLRKISRRSEELLRRNREATKKILKELRELLRRVEEKRR

SEQ ID NO: 5983 - protein, 177 aa, Artificial Sequence; identical to SEQ ID NO: 5982
  Synthetic

SEQ ID NO: 5984 - protein, 185 aa, Artificial Sequence
  Synthetic
SEAEEALKRHRKLNKEAEKRAKDATDDSKRLLDEIRKRAKEASEDSKRLLDEARRLREAGARKEEVEKIIDEAAKKSKKAAEEARKAADDAARKSRKAAEEAKKLADDSARDAERAAREAKDREDKERVRRILEEAKKTARELRERIKKLLKENEDAAKKLRDEIDEAAKKNKKAADEAREEARR

SEQ ID NO: 5985 - protein, 185 aa, Artificial Sequence; identical to SEQ ID NO: 5984
  Synthetic

SEQ ID NO: 5986 - protein, 185 aa, Artificial Sequence
  Synthetic
SELEKVLEEHRRLNDEIRKELEDVTRKSEETNKRIEEDLRRVTKEAKDLLERIKEKLEAGRRKEEIREEVKKVLEDSERVIEKVKRLLDESLDRSRKMIKKVEDLVRDSLRKAEEVIRRVRDKEDRRRVEEILRDMKETVDKLKKEIEKLLEENKESAKELRERIKENLETNRDLVRKLEEDIKR

SEQ ID NO: 5987 - protein, 185 aa, Artificial Sequence; identical to SEQ ID NO: 5986
  Synthetic

SEQ ID NO: 5988 - protein, 175 aa, Artificial Sequence
  Synthetic
DEAEKALEEVRDLIREIRERDRKVTEDVERLNREIREKLKEVTERVKRSNDDIRRLLEEGRDKREIKKLIEESNELVRKVVKEATELIRDSNRLVKEAVDTSRKLIKEVLDRVREMPVDKSILEELERLVRELRKESEKSLEDLERLNKKLEDEVRDILRKLNKLNEDLLRKVEE

SEQ ID NO: 5989 - protein, 175 aa, Artificial Sequence; identical to SEQ ID NO: 5988
  Synthetic

SEQ ID NO: 5990 - protein, 175 aa, Artificial Sequence
  Synthetic
SEMDEARKEVKKLLDEVRKRDEDVTRKVEELNKRIEERAKRVAEEVEKLIREILKRLRDGSRKEEARKLLEEVKRTVDKMIKELEELVRRSNRVVKEAVKESRELIKRILERVEKVPVDEKILEDLRRLVKKLKEESDRSLERLERLNERLERRIREILKRLEKLVRELRKEVER

SEQ ID NO: 5991 - protein, 175 aa, Artificial Sequence; identical to SEQ ID NO: 5990
  Synthetic

SEQ ID NO: 5992 - protein, 175 aa, Artificial Sequence
  Synthetic
SEAEEALRKVEELIRRVKKRDDEAVKEVRELNKRIADILREVLETVRKLLEDVEKALRDGSDKREARKLLEEILEAVKRAADRIEDLIRRSNEAVRRVVEESRDLIKRILEEVERAPVEEDILRTLRELVRDLERKSEESLKELNRLNEDLKREVKRVLDELEELVRRLKKKVDD

SEQ ID NO: 5993 - protein, 175 aa, Artificial Sequence; identical to SEQ ID NO: 5992
  Synthetic

SEQ ID NO: 5994 - protein, 185 aa, Artificial Sequence
  Synthetic
QVEDVIRESKKLTEDSEKRVRDIIRRLKKTIKDSEDRVRRMVEELRERIKRLRERLESEDERVVREVERVVRELEKLVKEAEDRARKFLETSDRIVREIEKRAREMLEESKRVLEEIKRLADEGVSDEVIETLLRKDRDLNRRVNEELRKLEEEVEELNRRVNETIKEILRRIAELIRRILEKTK

SEQ ID NO: 5995 - protein, 185 aa, Artificial Sequence; identical to SEQ ID NO: 5994
  Synthetic

SEQ ID NO: 5996 - protein, 185 aa, Artificial Sequence
  Synthetic
KVEEILKELEELIKRSKETVDEVIKRSKDLVDESRRRIEDVIRELEKLIRELDKKLETDDKDVVKEVKEAVKRLRDEVKRIDDEVRRAVEKSKEVLDEIRRRVDELVKRSKRLVDDIRRLLAEGVSEEVVRTLVKEIRDLNKRVNEEIKRLLDEDKKLNEEVNRLIKELKKEIEDLIREVLEDKR

SEQ ID NO: 5997 - protein, 185 aa, Artificial Sequence; identical to SEQ ID NO: 5996
  Synthetic

SEQ ID NO: 5998 - protein, 185 aa, Artificial Sequence
  Synthetic
EVEDIIRESKKLIEDSKERVKEVIKESKRLIEELERTVREVIKELRERVDRLRKKLRDDNEEVERRVTEAVERLKELIERIRREVEEAVRRSEETLEELKRRADKLVEDSRRVLEEIKRLADENVSKEVLDTLLKEDRDLNEDVKRRITELLEEDRRLIEEVKKRIRELRERIKRVIEEVDRATT

SEQ ID NO: 5999 - protein, 185 aa, Artificial Sequence; identical to SEQ ID NO: 5998
  Synthetic

SEQ ID NO: 6000 - protein, 175 aa, Artificial Sequence
  Synthetic
STAEEIVRRIRDVNRRINEAIERLLEEDEKVIRDVERRIEEVLERDRRVIEEVKRRVRTEEVVERVIRRSEKTIEDLKKLVEKLLRDSARTIEKIERLVREVIKETKRLLEEIKRRNVDERIIEEIKRILKESEDRLRRILETSRERLKELKKKLERVLEDSKKKLDELRRELRK

SEQ ID NO: 6001 - protein, 175 aa, Artificial Sequence; identical to SEQ ID NO: 6000
  Synthetic

SEQ ID NO: 6002 - protein, 175 aa, Artificial Sequence
  Synthetic
REAEDLVRKVREVNKKANRDIKELLDRDEKVIREVARAAEAIVDEARRIVEEVERKIREERVAKEVLERLKKILDELAELAKRVLERSEETIERIERLAREVLRATRDLLEKIRKNNVDERIIKEIKETLDESRKRAEEVLEKSRRLLEELRKRVEEIVKRIKELIDELERRVRK

SEQ ID NO: 6003 - protein, 175 aa, Artificial Sequence; identical to SEQ ID NO: 6002
  Synthetic

SEQ ID NO: 6004 - protein, 187 aa, Artificial Sequence
  Synthetic
SAEEIIKTLEELVEKLKRDAEETLRKIEELVRRLEEEARKSSEKIRKLVEDLAKEARERTRSKEVEKIVEEAKRRLDEIIKRNNEVVKRVLRELEELIERNRKVVEDALRELKKLIEKLEDLVRRNTGDEVLTEVLKEITELVKRLKELSDRTLEEVRKLVERVKRESKRTLEEAEEVVRELKERLR

SEQ ID NO: 6005 - protein, 187 aa, Artificial Sequence; identical to SEQ ID NO: 6004
  Synthetic

SEQ ID NO: 6006 - protein, 187 aa, Artificial Sequence
  Synthetic
DAERLLREVEELVRRLEEEMEKTDREIKELIKRLEERLRTTSREIKKLIEDLEREARERTRSEEVDRIVKEVIERLKRVLDKNNEIMERARERLERLLEENKKIVDEVLKELKELIDRLKDLVDKNGGREVLKKVIDEIRKLVKRVKDESKRSLDEIRKLAEEVDRRSKKVLDEIRRLVDEVRERLR

SEQ ID NO: 6007 - protein, 187 aa, Artificial Sequence; identical to SEQ ID NO: 6006
  Synthetic

SEQ ID NO: 6008 - protein, 187 aa, Artificial Sequence
  Synthetic
DAEDILREIKKLADDLKREADKSLKEIEELARRLEEEAERSLREIEELARRLKKRADEKTTDKKAEKIAREALKLAKEAAEENKKVAEEAAELAKRAADEDKKVAEEALKLAREAAEDARRLAEENGGREALKRAAERARELADRARKLSEDTLRKAKKLADDARKLSRETLEKARELAERAERRLT

SEQ ID NO: 6009 - protein, 187 aa, Artificial Sequence; identical to SEQ ID NO: 6008
  Synthetic

SEQ ID NO: 6010 - protein, 178 aa, Artificial Sequence
  Synthetic
DEAEEVRERVKKLIEESKRLIEEVRRRVRTISERSAELIEEVERRVDKMARDVERLLKDNVDKRELKRVVDDILRLVETVIARLRDTVRDLDRLVEEVIRRLHETDRRLKEEIDDAFRRLQDDEVLRRLEKLVRDSNDEIRRVLKELKEVVKKNRDEIERVLKEARKKVEDLLREIER

SEQ ID NO: 6011 - protein, 178 aa, Artificial Sequence; identical to SEQ ID NO: 6010
  Synthetic

SEQ ID NO: 6012 - protein, 178 aa, Artificial Sequence
  Synthetic
SEVERVRRENEETIRRIDEVIKKIEEDNKRTIDEIRDVIRRVKETVEKTNREIEKVRRDNRDKRDLDKLIKDSNRLVREVIERLRRLVKESLDTVKKAADELKRLVKESKELVEDVIRRVRDDEALRELRKSNEDLERRIRKVLEDLKRSNDELLEEIDRVLKRLHKSDEDVRKRVTD

SEQ ID NO: 6013 - protein, 178 aa, Artificial Sequence; identical to SEQ ID NO: 6012
  Synthetic

SEQ ID NO: 6014 - protein, 174 aa, Artificial Sequence
  Synthetic
RELEEAEKTVEELIRRIKEIIDEVLKRDRDVSERSKELIDKVKREAEKIVEEIERLLKNNVDRDELRKMVERLRELVKKVLEELRKTVRELEETSRRALERLRRLLKRLREIIEKDVRSEVLRKLDKKVKDLKREIDDVVRESKELIKRNRRRVEEVAKELERLIKEVKDRIDT

SEQ ID NO: 6015 - protein, 174 aa, Artificial Sequence; identical to SEQ ID NO: 6014
  Synthetic

SEQ ID NO: 6016 - protein, 174 aa, Artificial Sequence
  Synthetic
DELERVREEVRRLIKEIEEIIERVERRDEEVSRKSEDLIRRVLKRDEELAKEIEDLKRNNVDKKELRKMVKKLEESSRRALERIRRTVKELEETSREALKRLEDLLRELEDVIRKLVRSRVLEELKRLVEELEREIRRVFEKSKKLIDDNRKKADDVVKRSEDLLREVKKEIDR

SEQ ID NO: 6017 - protein, 174 aa, Artificial Sequence; identical to SEQ ID NO: 6016
  Synthetic

SEQ ID NO: 6018 - protein, 178 aa, Artificial Sequence
  Synthetic
SESEEVERLVEDVSRRNTKAVRDIEEHSKDVSRRNKKLVREVEEHTREVIERAKELTKRRKTEEVIKRVLDTLERLMRESVKLLEETVERLRRLVEKSKRLIEKTMKELRDLIKKVVEDITGRDVVERIRRLLRENVEENKKVLKRSDDLLKKNERENREVVKKSEKDARDLVEEIKT

SEQ ID NO: 6019 - protein, 178 aa, Artificial Sequence; identical to SEQ ID NO: 6018
  Synthetic

SEQ ID NO: 6020 - protein, 178 aa, Artificial Sequence
  Synthetic
SEEEDVRRKVEKVSRENKDMVRRILEHSRKVSEDNRRLVKEILDRARKAIEDVKELIERLKREEDIERVVRELRKLVKTVLDLIRETVKRLRDLVRKSKELIKETVKELERLIEKVIRDITGRDVVREIKELLDRNREENRKVLEDSERLVDENEKDNKRVLDELRRLLKRAEEEARR

SEQ ID NO: 6021 - protein, 178 aa, Artificial Sequence; identical to SEQ ID NO: 6020
  Synthetic

SEQ ID NO: 6022 - protein, 184 aa, Artificial Sequence
  Synthetic
SIDKALRDLKEILDRNRKHSEDLLREAEELVERSNDHSRRVLEEIRKLLRELEEEIRKRVKDEKKLRELKEIVDRIRELAEELFRRSNESDKRIKETVEDMIRKSRESVKRIEELIREVIERIRDEKLVREVEKTVEDLSRENKKLNEDVKRTVDELIKKSEKLNEDAKRTIDELLKRVKERIE

SEQ ID NO: 6023 - protein, 184 aa, Artificial Sequence; identical to SEQ ID NO: 6022
  Synthetic

SEQ ID NO: 6024 - protein, 184 aa, Artificial Sequence
  Synthetic
SVEDLLRKLKTIVDENRERVKKSLEELRRILDENRRRVERSLRELRESNERLRKEIEDTVKDEEKLRRLRDLVRRSAERVEDAVRRSRETVREVEDRVEKLADESRKTVERVRELIEEAIKRITDEEVLKKVEETVKRLSDENRELNKRIKEEVDEMSKRNKELNKRIKEENDKLIKEVKDEIR

SEQ ID NO: 6025 - protein, 184 aa, Artificial Sequence; identical to SEQ ID NO: 6024
  Synthetic

SEQ ID NO: 6026 - protein, 183 aa, Artificial Sequence
  Synthetic
SVEDVLRELKELIDRNREEAKKTEKELRELIKRNDDEAEKVAKESKKLTEDLEKEAREKVRSRKLEEIKRILDENREVLRRVLEDSKRSVRELKELVDRVIRKSEKIVDDLRKLVERLAREVRDEKVLREAKERAKEISKRNKDVNEEARKRIKEISDKDKRILDEVRRESKEIEKRLKEALK

SEQ ID NO: 6027 - protein, 183 aa, Artificial Sequence; identical to SEQ ID NO: 6026
  Synthetic

SEQ ID NO: 6028 - protein, 174 aa, Artificial Sequence
  Synthetic
DDEERVREVVKRVKEDNERVDREIREIVKRLLEHDRELLEEIKKEVDRVAEELRKLKEDGVPEEDLRKVVKDIEELVRRLIDELRKSTDDARRTVEDLIERLRETVRKALELIERVVRSEVLERLRKTLEELEKRNEELLEEARRLLEESREEVRELLERAKKILEDLEREIRR

SEQ ID NO: 6029 - protein, 174 aa, Artificial Sequence; identical to SEQ ID NO: 6028
  Synthetic

SEQ ID NO: 6030 - protein, 174 aa, Artificial Sequence
  Synthetic
SREERVREVVKRMLERDEELLRRIREEVERALRRNDEVLREIERVVEEMEERVERLKREGVDRKDLERLVEEALRVVREAIKELERTTRELEDLIRKLIEELRDSTRKVDELIKRKVTDEVLEDLRRLLEESVRRVEDLLKKLTDIVRESRKRVRDILRKAKRIVDKLREEIKK

SEQ ID NO: 6031 - protein, 174 aa, Artificial Sequence; identical to SEQ ID NO: 6030
  Synthetic

SEQ ID NO: 6032 - protein, 182 aa, Artificial Sequence
  Synthetic
DVEREAKRLLEEVAEHVRRSIKELRKLLEDVARHVEKTLRELEKLTDDVRKRVEKLKRDVKEEEKLKEVVERLKRELDKVSEDAKKLVDENRRLLKTVVDTVRRLVEENRRRLEEVVRRVEEAGVDRKVVEDIREKVKDLKRKHDTVLEEIKKEVRRLEKEHKEVLDKSNEDARKLEEDLRR

SEQ ID NO: 6033 - protein, 182 aa, Artificial Sequence; identical to SEQ ID NO: 6032
  Synthetic

SEQ ID NO: 6034 - protein, 177 aa, Artificial Sequence
  Synthetic
SEREEAKKLLRENEEDNRRVDREVEKLTEENERINRRVNEEVRKLTEDIKRKVESVKRLSDKRMLDKAIKEVEELSERSKDTIRRVIEESKRLSEESKRTIKEVIKRSTDLMRELDKRVTTRDIVEDIRRKADRLRERNEETLKRDEDKLKKLEESNRKVLKEDEDELRRLADKLRK

SEQ ID NO: 6035 - protein, 177 aa, Artificial Sequence; identical to SEQ ID NO: 6034
  Synthetic

SEQ ID NO: 6036 - protein, 177 aa, Artificial Sequence
  Synthetic
SEAEEAAKRSRDTAKRAEEIAREAAERLKKNAEDAERIAREAKKTSKKTAKEAEDAARSNAPEKAIEDAARKNEELARRAAELIERAARTNRKIAEDAARLVREAAERNKELADRAIKTRDADELRELAKRTEDKARKLADELRKLADETEKKARKLAEEVKKLADDTRRKAEEARR

SEQ ID NO: 6037 - protein, 177 aa, Artificial Sequence; identical to SEQ ID NO: 6036
  Synthetic

SEQ ID NO: 6038 - protein, 177 aa, Artificial Sequence
  Synthetic
DEVEKAKEESRRTLKKIEDRVRKVAEDLKKNLEDIERRVREVLEELRRLLEEIEEVVRRNIDKKEIDRLAEEIKEIAKRIIDEIRELLETNRKIVEEILEEIKRLVDENKKLVDRVKETSDKEELERLVEKTEDKIRKLLEEIKELLKETEKKIRKLLKRIEELMKEIEDKIDEDKK

SEQ ID NO: 6039 - protein, 177 aa, Artificial Sequence; identical to SEQ ID NO: 6038
  Synthetic

SEQ ID NO: 6040 - protein, 177 aa, Artificial Sequence
  Synthetic
DEVERVKEELKRNLKEIREDVERVKEESRDTVRKATEIVKRVLEELKKSLEEIKKLVDDNAPERMIEEVLRHNKKLVERIEREIRRLVEENRRLVERVLRRVEELLESNRDIVRDIIRRRDVEELRDTLRKSAEDIERLLREIEDLVRKTTEDAKRLADEVRRLVKESERTIKERAD

SEQ ID NO: 6041 - protein, 177 aa, Artificial Sequence; identical to SEQ ID NO: 6040
  Synthetic

SEQ ID NO: 6042 - protein, 177 aa, Artificial Sequence
  Synthetic
SEVEKVDRELKDNLRRIEEEVRKVDEELRRLLEEIRRTVEEFKERSKRTVEEIEKVARENAPEEVIKEVLRRNRDLVRKVLKTIKDLLDEIRRRAEEIIKKVEDLLESNRRIVEEATKTRDVEELRRTLEESERRIRKLLEDLKRLLEEIEKDIRRLEEEVDKLVRDTEKRIDDLRR

SEQ ID NO: 6043 - protein, 177 aa, Artificial Sequence; identical to SEQ ID NO: 6042
  Synthetic

SEQ ID NO: 6044 - protein, 183 aa, Artificial Sequence
  Synthetic
SLEDELRRRITEAEKRIRDLLRRVRELVERSKKTIKDLLRKLEETARETKDEIRKLEEEVKEEELKELIRRVLEESDKTLEKARKELKEALDRSERSVEKIERLIEEVVKRLREVIERVRDVKEEEKVRRVEREIKEILKKIEEDVTRLLEENKKILKEVEDLVRELEKEDRDVLKKVRDDVK

SEQ ID NO: 6045 - protein, 183 aa, Artificial Sequence; identical to SEQ ID NO: 6044
  Synthetic

SEQ ID NO: 6046 - protein, 183 aa, Artificial Sequence
  Synthetic
DLRERLEEEIERARRDIEDLLRKAEELAKRSKDDIKRLMDEVRRLVEKTRRDIEKLLREVKDKSVKERIKEVLRESEKTMRDIEREIKEVLDKSDESLKKVKEDLERVVRTLDKLIEDVRRVTEEEKVRKVEEEIRRVLEKIRRDARKLLEENKRITDEVRKRVKELLEENRKVLKRIKDEVD

SEQ ID NO: 6047 - protein, 183 aa, Artificial Sequence; identical to SEQ ID NO: 6046
  Synthetic

SEQ ID NO: 6048 - protein, 183 aa, Artificial Sequence
  Synthetic
KLREELEKLAEEAKKRIEDLAREAREAAKRASESNKDLARRLRELAKRTEDEIKRLLDDAKEERAKKLAEDALRRSRETAERADKLAKDADKHDKEIAEKAEELAKKALKDLEEAARRARRADKEEAARKAAEEIKKILEEAERLAREALKELERSNEESERLARRAAEEDKRVADEARERAR

SEQ ID NO: 6049 - protein, 183 aa, Artificial Sequence; identical to SEQ ID NO: 6048
  Synthetic

SEQ ID NO: 6050 - protein, 183 aa, Artificial Sequence
  Synthetic
SLREELRKKIEEAKKRIEKLMDDVRKEAEKAKRSNEELLRRLRKLAKETKRRIEELLERVKDESVKERIRRVLEESDRTLREAEELIRRVNEHDDRILRKIEEEIKRVLEKLEKVIKDVERVDDEEKVRRLLKEIEEILRRIEDKVRKLLKELRDSNRDSKRLVDELMRRDKEVLRRIEEEVK

SEQ ID NO: 6051 - protein, 183 aa, Artificial Sequence; identical to SEQ ID NO: 6050
  Synthetic

SEQ ID NO: 6052 - protein, 183 aa, Artificial Sequence
  Synthetic
DLERELEELIKKAEKKIRDLRKEVEDVVRDASRSNKELLREAEKLAEETRKRIDDLRKEVKDRSVKERIKEVLRESEETLKEVRETLKRMDEHDRTIMREIEERIRRVVEELRRLIEEVRRVDKEEKVRELEKRIRDVLRRIEEEVRRLLKRLKDSNDDSRRRLEELLRRDKKVLEDIERETK

SEQ ID NO: 6053 - protein, 183 aa, Artificial Sequence; identical to SEQ ID NO: 6052
  Synthetic

SEQ ID NO: 6054 - protein, 183 aa, Artificial Sequence
  Synthetic
SLREELERLIKEAEEKIRRLLKEVKDLVRELSRTNKKLLKEVRDLAKRTKERIKRLLDELKEERAARLIEEALEASDRTLKKIEDLIRRVNEHDEEIARRIEEEIKKAVDELRRLIDTVRRVTDEDKVRKLLEDIERLLREIERLVRELLEELKDSNRRSEELVRRLLKEDKDVLEKAERDVR

SEQ ID NO: 6055 - protein, 183 aa, Artificial Sequence; identical to SEQ ID NO: 6054
  Synthetic

SEQ ID NO: 6056 - protein, 174 aa, Artificial Sequence
  Synthetic
DEEEELRRLVRRLMEEVKRLLEENKKLADELRKTVKKLLEDNEDLARRLREEVERKVKSRIMEEVKRLIDEVLRHSKKVIEEVEKEIRDVLRKSEKIIKEAEDLIRRVLELAESGRRDVEEVKKELEELLREVEELSRRSLKELKELLERVKKRSEESLKELEDLLREAERKSR

SEQ ID NO: 6057 - protein, 174 aa, Artificial Sequence; identical to SEQ ID NO: 6056
  Synthetic

SEQ ID NO: 6058 - protein, 174 aa, Artificial Sequence
  Synthetic
SEKEELKKEVDRLAEEVERLLRENEKRARDLERKIRKLLEENRRAADEVRKEVDRTVDSEKADRVRKEIEKVLRHSEKVIREVTKRIRKLLEDSERIIRTAKRLIDEVLRAAEAGEVDVEEVKKRLEDLLEEVKELSKRSEDTLRKLAEDVKRLAEDSNKKLEDLLEEAKERAR

SEQ ID NO: 6059 - protein, 174 aa, Artificial Sequence; identical to SEQ ID NO: 6058
  Synthetic

SEQ ID NO: 6060 - protein, 174 aa, Artificial Sequence
  Synthetic
SEKEELRDLVRRAKEDVDRLRRENEELNRRIEEDIERLLKENEDRNREVKDDIDKRVSSEIVKDARRLNRENHERSKRIIERAKRLNEENHRTSRKIIEEAKKLIDDVLKKAESGSVDVEEVKKELEELLRRVRKLSEDSLKHLRELLKEVRELSERSLRHLDELLRRVREKAR

SEQ ID NO: 6061 - protein, 174 aa, Artificial Sequence; identical to SEQ ID NO: 6060
  Synthetic

SEQ ID NO: 6062 - protein, 174 aa, Artificial Sequence
  Synthetic
KDEEDAERRARESDKSIEELRERNEREAKRLKEEVEKLLEENEKKVDELRKRVEKTVTSEIVDEVRKLIEEVLENSKRIIDEVRKRIEDVLRESEEIIRRVKKLTKRVLDLVKSGSRDMEEVKEELDRLNKEAEELSRRSLRKLEELLREARRLSRESKERLKKLLEDARRKSN

SEQ ID NO: 6063 - protein, 174 aa, Artificial Sequence; identical to SEQ ID NO: 6062
  Synthetic

SEQ ID NO: 6064 - protein, 174 aa, Artificial Sequence
  Synthetic
SDEERAREEARRSKESIERLLEENRRLAKELKKEIRRLLKENEDLVRKLKEDVDREVDSEIAREARKLIKEVLDESEEIIRRVDKKIDDVLRNSERIIREAKRLTERVLRLVDSGSRDIEEVLEELDRLNKEVEELSRRSLKRLEELLEEVRKLSEDSLRKLKELLDRVREKSR

SEQ ID NO: 6065 - protein, 174 aa, Artificial Sequence; identical to SEQ ID NO: 6064
  Synthetic

SEQ ID NO: 6066 - protein, 181 aa, Artificial Sequence
  Synthetic
DERERLRKALEEVRRTVEKLVRENEELLKKVEERVRRLNDEDRRLVEEIKRRADELRKRGEATDEVIERIRKVLTDSERISREILRKLEEMLDRSRKIVEEILRELERVLREIEELVKRVTNDEVIRRVEDELRKVLEDIKRLSDKNKRDLEEALRDIERLVKENNKRLKEALDDLERAAT

SEQ ID NO: 6067 - protein, 181 aa, Artificial Sequence; identical to SEQ ID NO: 6066
  Synthetic

SEQ ID NO: 6068 - protein, 181 aa, Artificial Sequence
  Synthetic
SEREDLKRELDEVRKDVARLNEEDRRLLEDARRDLEKLVRDNEELVERVKKTLKELEDRGELTEEVVEELDRVLDESRKIVEEILREAEKVLKESEEISKAIVKRAEDVIREIEELVKRVKTDEVIRRVRDRLRRVDEELKELVKRNNERLREVLERIRKLSRDNSERLKAALEKIKEEVR

SEQ ID NO: 6069 - protein, 181 aa, Artificial Sequence; identical to SEQ ID NO: 6068
  Synthetic

SEQ ID NO: 6070 - protein, 181 aa, Artificial Sequence
  Synthetic
SLKEKIEKLLEESRKDIEELNERDKKRVKESEDTVRRLNEEDEELVKRVREELEKLRKEGRLDDRVVEDARRMLERSRRISEEILKENRRVLEESKETSKRILEDNERAVREIKELIDRVRTEEVIKEVEKRLRDVTKTSREKVRENNRRLEEMTEDTKRLVEENNKDLDKALKDIRKKAE

SEQ ID NO: 6071 - protein, 181 aa, Artificial Sequence; identical to SEQ ID NO: 6070
  Synthetic

SEQ ID NO: 6072 - protein, 181 aa, Artificial Sequence
  Synthetic
KEREELEKLLEEVERDVARLNKEDKDLVDEIRRRVDELVKRDKELLDRVRDRLRELSERGDLDERVEEKLERVLRESEKITREIRERVREVLRESEKISEEIVRRARKVIEEIERLLRKVTDSRVIEKVKRDLRRVLEELRRLAEENNRRLDKALKELEDLVRKNNKKVEDALRKIEEEVR

SEQ ID NO: 6073 - protein, 181 aa, Artificial Sequence; identical to SEQ ID NO: 6072
  Synthetic

SEQ ID NO: 6074 - protein, 184 aa, Artificial Sequence
  Synthetic
ELAEDLRRLLKEVEDRSRDLLRKNRKLLEEVRERTERLIKELEDLLEEITRRVKDLIRKIKDEELLKKLEDLLREIEKLVREALERSRKTLEDIRKRVEDMVRRSKEVLERIRRLVKEAIEKLRDEELVRRVKEEIKRLMEEDKKLNKKSVEEIRELLKRDRDLIEEVKKEAERLLKEIEDEVR

SEQ ID NO: 6075 - protein, 184 aa, Artificial Sequence; identical to SEQ ID NO: 6074
  Synthetic

SEQ ID NO: 6076 - protein, 184 aa, Artificial Sequence
  Synthetic
DLERELEKLLDEVRRRVEELNKRNEDLARKVAEDTKELLKELRELLEEVKRRVRDLIRKITDEKLARELEDLLRKIEEDVKEAIKRSEETLERIIRDIERMIRESERLLREIEELVKEVIAKLRDREVAERVKEEIRRLLKEIEELNKRSEERIKKLLEDDRRLIERVKERIEDLLRRIEERTR

SEQ ID NO: 6077 - protein, 184 aa, Artificial Sequence; identical to SEQ ID NO: 6076
  Synthetic

SEQ ID NO: 6078 - protein, 179 aa, Artificial Sequence
  Synthetic
DEVDELLKRLEDSSRKAEEDVKRMLERLEDSTRDAARRVKEMIKRNEEVSDEAEKRIRTEEVVERVLRTSREIIERIREVVKETNKRDKEIVDEVKEVVRETNERDKDIAKKLRDRVRNLDKVVKEIDDLLRESERRNRELLREIEELLKESERINRELLKEVDKVLRDSEERVERRRE

SEQ ID NO: 6079 - protein, 179 aa, Artificial Sequence; identical to SEQ ID NO: 6078
  Synthetic

SEQ ID NO: 6080 - protein, 184 aa, Artificial Sequence
  Synthetic
DLERRLDKILRDIEEAARDNIRRNEELLKRSEENVRRNLEENKKKLEEIKREVEELERRVKDKDLLKEIRDVLERIRRVVERALKEIKDLLRRSEELVRKSIEDIRRVLERIRRVVKDVKERIRSEELAKRAEERLRELLKELHEISKKMLREIKRVNDEINKVSKESLDELDELVKEIKERTR

SEQ ID NO: 6081 - protein, 184 aa, Artificial Sequence; identical to SEQ ID NO: 6080
  Synthetic

SEQ ID NO: 6082 - protein, 184 aa, Artificial Sequence
  Synthetic
SLEEELRKMLEKVERDVRRNIERNKRLLDRSRENVKENIKKNRELLKEIEKDVRKLETDVKDKKLLDEIRKILEEIAKLVEESIRRIEEALEKSERLVERSIREIKRVLDEIRRLVEEVRKRIRSEKLAEDAKRRLEELVREIHKISEDALEEIKRVNKEINDVSKEMLDRLRELLKEIKERTR

SEQ ID NO: 6083 - protein, 184 aa, Artificial Sequence; identical to SEQ ID NO: 6082
  Synthetic

SEQ ID NO: 6084 - protein, 184 aa, Artificial Sequence
  Synthetic
SLEEELEKLLDEVRKEVKKNIDENKRLLDKSREEVRKNIKTNEDLLRRIEEKVRRLLEEVKDKDLLEKIKEMLKRIKELVEESIRRIREVLKRDEELVKKSIDDIRRVLKRIEDLVEDAKRKIRSEELAERAKRELKKLEEEIHRISREALERSKKTVEELHEISKRMLDELKRVDKRLEDETR

SEQ ID NO: 6085 - protein, 184 aa, Artificial Sequence; identical to SEQ ID NO: 6084
  Synthetic

SEQ ID NO: 6086 - protein, 184 aa, Artificial Sequence
  Synthetic
DQREDLDRRLREIEERVEENLRTNEELLKEVEKNAKENIDRNRKTLEDIKRRVDDLRRRVKDKDLLKRIEEMLRRIERMVRESIKKIKKVADDIRRLVKKSIDDIRRILEEIRRVVEEVKRRLRDDELVERVKDELRKLVKEIHDVSKKALEDLERLLRELNEISERALRTLEKLLRKLEEDTR

SEQ ID NO: 6087 - protein, 184 aa, Artificial Sequence; identical to SEQ ID NO: 6086
  Synthetic

SEQ ID NO: 6088 - protein, 184 aa, Artificial Sequence
  Synthetic
SLEETLKRILDKVREEAKRNIKENEDLMRESRRNVEENIRRNEKTLEDIEEEVRRLREEVKDEDLLRKIEKVLKEIRDLVRESIRKIRELLEEDKKLMDTSIRIIEKLLKELEELVDDIIKRIRSEELAKRVKEELDKIVRRVHEISRRALEESRKTVEELNRESEKVLRELERLLRRLEEEVR

SEQ ID NO: 6089 - protein, 184 aa, Artificial Sequence; identical to SEQ ID NO: 6088
  Synthetic

SEQ ID NO: 6090 - protein, 184 aa, Artificial Sequence
  Synthetic
SDEDDLRRILEEIRRNVERNIRENERLLDEIKKRVDENIKTNKKTLEDIREEVRKLEEEVKDKDLLRTIREMLRRIEEMVRESITRIRKVLDDIRKLVEESIKEIKRVLEEIKRAVEEVARRLRDRELVKRVEDTLRDLLRKLNEISKRALEELKRAVERIHRISRDALRELDRLRKELEERTR

SEQ ID NO: 6091 - protein, 184 aa, Artificial Sequence; identical to SEQ ID NO: 6090
  Synthetic

SEQ ID NO: 6092 - protein, 184 aa, Artificial Sequence
  Synthetic
DDEERLDKILRDIEENARRNIERNRTLLERSRENVKRNIDENRRKLEEIRRDVEDLKRKVKDEDLLREIEDVLRKIEEVVKRSIDKIRKMLEDDERLVEESIRRIREVLKRIRDLVEDVKRRLRDKELVKRAEDELRRLLKELNEISERMLRRSEETVRRLNEVSERALRELDRLRKKIERRTR

SEQ ID NO: 6093 - protein, 184 aa, Artificial Sequence; identical to SEQ ID NO: 6092
  Synthetic

SEQ ID NO: 6094 - protein, 184 aa, Artificial Sequence
  Synthetic
SLEETIRRILEESERNVKRNIDENRKLLKEIRDNAKRNIDENRRLLEEIERTVRDLERRVKDKDLLKEIRDVLERIRKLVEESIKRIEDLVRDVERLVEESIREIKRVLDEIRKLVKEVEDRIRSEKLAEDVLRELDKANKDINEISKKMLEDLKKAVEDVNRVSKEMLERLKRLREEIEKRTR

SEQ ID NO: 6095 - protein, 184 aa, Artificial Sequence; identical to SEQ ID NO: 6094
  Synthetic

SEQ ID NO: 6096 - protein, 184 aa, Artificial Sequence
  Synthetic
KDEERLDEILDRSRRNAETNIKRNKDLLDESRENVKENIKKNEDLARRIRERVEDLERKVKDKDLLKEIRDILREIEKVVEDSIRRIREMLRRDEKLVKDSIDEIRRVLKRVEDLVEDVKRRLRDEELVKRVEDELRRLNEEVNKISEEMLKRSKDTVRELNKVSEDALRKLDELRERIERRTT

SEQ ID NO: 6097 - protein, 184 aa, Artificial Sequence; identical to SEQ ID NO: 6096
  Synthetic

SEQ ID NO: 6098 - protein, 184 aa, Artificial Sequence
  Synthetic
SLEEDLRRILKEIRDNVRENIRTNEELLKRSRENVKENIERNKKLLREIEEEVRRLEREVKDEKLLRDIRRVLEEIRRDVERTIREIKRVLDEIAELVERSIREIKRVLDEIDRMVKEAEDRIRSEKLAKEVKDRLRDLLRKLNKISEDALRELKRLNDEINRISEEALERLKKLLEDLERRVR

SEQ ID NO: 6099 - protein, 184 aa, Artificial Sequence; identical to SEQ ID NO: 6098
  Synthetic

SEQ ID NO: 6100 - protein, 184 aa, Artificial Sequence
  Synthetic
SLEEKLRKILEESRENVERNIRRNEDILRKSRRNVEENIKTLEKILEDIKRTVDKLKKDVKDEELLKRIEEELRKIEDRVRRVIREVEKLLRDSEELVKRSIEEIRRALERIKELVEEAERRIRSEELARKVERELREMNKELNRISEEALKRIEEVNRDINRVSKEVIEELERLVEKIREDVR

SEQ ID NO: 6101 - protein, 184 aa, Artificial Sequence; identical to SEQ ID NO: 6100
  Synthetic

SEQ ID NO: 6102 - protein, 184 aa, Artificial Sequence
  Synthetic
DLERELRKAAKESRENAEKNKEDNKEAAKRSKENAEKNIRDNEETARKIEEDARKLEKDAEDEDLARTIRKAADEARKAAKESIDEIRRAAKESEDLARDSIRKIDEAAREAKKLADEAEKRARTEDLARKALRDLREANKRANEISKKALDEIRKANEDANRASKKANDDLRRLAEKAKRDAE

SEQ ID NO: 6103 - protein, 184 aa, Artificial Sequence; identical to SEQ ID NO: 6102
  Synthetic

SEQ ID NO: 6104 - protein, 188 aa, Artificial Sequence
  Synthetic
DLERELRELLERVRKDVRDNLETNKKLLEESRKNAEDNLRENDRLLKELEKRVKDLLDELRKDKEVLDKIKKLLDKLREVVERSLKLIEDLLREAEEVVRESLRLIEELLERVEEVVKRAAELIKRGLPEEVVKRVLDDIKRIVDEINRISKEMLDKLKRINDEANKISKRMLDELRRIAEEIEREVR

SEQ ID NO: 6105 - protein, 188 aa, Artificial Sequence; identical to SEQ ID NO: 6104
  Synthetic

SEQ ID NO: 6106 - protein, 188 aa, Artificial Sequence
  Synthetic
DLEERIKKLLEESRKNVEDNEKKNKDSLRRSREEVKRLSDENEKLLKRIRERAEKLKTDLKDDKDLLERIERALREVEDLVRKSKELNDRLLKKSEEVVKRSLDLIKTLLKRIDDLAKKILELLKEGRDKRVVETVLRELERINEEINDISRKMLKENEKILRDIKKINEDMLKRLKEALERVDREVN

SEQ ID NO: 6107 - protein, 188 aa, Artificial Sequence; identical to SEQ ID NO: 6106
  Synthetic

SEQ ID NO: 6108 - protein, 188 aa, Artificial Sequence
  Synthetic
SLEEEIRDILRRAEERVKELTKENERSLRESKKRVEDLSRENEKTLEEIKRDVDRLLKELKDEEEVLRLIEKMLRDARKVVEDARKLNEDLLRESERVVEEVKDKNRRLLEELRRVVEEIKRLIDRGEPEDVVREMLKDLERIVREISEDNARTLEENERILREIEEENKKTLERLREILKRIREEVT

SEQ ID NO: 6109 - protein, 188 aa, Artificial Sequence; identical to SEQ ID NO: 6108
  Synthetic

SEQ ID NO: 6110 - protein, 188 aa, Artificial Sequence
  Synthetic
SLEEEIRKILKRIREEVKRLTEENDKTLKDSERNVRENLTEIERILREAADDVRRLEEELREDERVLELIKRADKKLKDLVRDILRRIDEMLKRSREVVREVKRTNKEMLERIERIVKRATDLIREGRPEEVVERVLRELERLLEEIRDRNKKTLDDLRRINEEVNRISKDALEELRRLLRELRELVK

SEQ ID NO: 6111 - protein, 188 aa, Artificial Sequence; identical to SEQ ID NO: 6110
  Synthetic

SEQ ID NO: 6112 - protein, 188 aa, Artificial Sequence
  Synthetic
SLEDEIRKILDELRKNVRENLEDNKRVLREAEEEAKKLSEDNRRLLKELKERVKELKDRLRSDKDVLKEIDELLKELERVAKEVEDRNRRLMERVRDVVRRSLEEIKRLLEKLEDVVRRVERLMDEGRPEEVVRRALEEIERINRDINRRSKEVLDELREIVREAKEDNERTLRKLKKILEEIEEKVR

SEQ ID NO: 6113 - protein, 188 aa, Artificial Sequence; identical to SEQ ID NO: 6112
  Synthetic

SEQ ID NO: 6114 - protein, 188 aa, Artificial Sequence
  Synthetic
RLKEELERILREAEKNVRENLRRNRESLKESKETVDRLSEENKKTLEEVRTTVEELLKELKDKREVLKRIKEMLDTAKELVERALELNRDLLRKSERIVTESERLIKELEEELRRVVETVTRLLAEGRPEEVVRDALRKLEEINRRINEISERMLKENKRLLEEIKRINKETLDRLKELLEEIKEDVR

SEQ ID NO: 6115 - protein, 188 aa, Artificial Sequence; identical to SEQ ID NO: 6114
  Synthetic

SEQ ID NO: 6116 - protein, 181 aa, Artificial Sequence
  Synthetic
SDVERVEKELKKTNDELRKIVDEARKLLEKTNKEIRDINRTMMEELRRTNEDLKRVVERGEDRSVLKEILERSEKLVRESIKKNEDLLRESKRVVDKVIREIERILEKSRELVREALRRLTDRRVIERIREIARKNEEDVKKLLKELKDLLEKNKRDVEKASEENKKLLEDNERDVRREST

SEQ ID NO: 6117 - protein, 181 aa, Artificial Sequence; identical to SEQ ID NO: 6116
  Synthetic

SEQ ID NO: 6118 - protein, 181 aa, Artificial Sequence
  Synthetic
KEAEEAAKLLEDTNRRLKEIAEEAEELLRRTNEKAKKINDESREKIKDAARRAEDAARRGRPEKDLEKAARDAEEVAKRAIEESRRAARESEELAREAAKRLKKAADDSRRLAEEAARRLTDEKAIREIKELAKKNKEDAERALERIKRLADKNREDAKRADEDNERAAEEARRKAEELKR

SEQ ID NO: 6119 - protein, 181 aa, Artificial Sequence; identical to SEQ ID NO: 6118
  Synthetic

SEQ ID NO: 6120 - protein, 181 aa, Artificial Sequence
  Synthetic
DEAEDVERKLEATNKELNEINERSRKELETSNRELNRINTESEEEIRRIEERIDRVKKRGEPREVLRKIVKEIKDVVKRAIDLSREVLERSERIVREVIKDSERILRESERLVREALRRLDKKELIERIKRLLDKNREDVKRMNEDNKRLLKENRDDVKRMDEKNKKILDEVDEKAKEKEK

SEQ ID NO: 6121 - protein, 181 aa, Artificial Sequence; identical to SEQ ID NO: 6120
  Synthetic

SEQ ID NO: 6122 - protein, 177 aa, Artificial Sequence
  Synthetic
SEEEELKKLLDRVRERVERSLDEIRRLAREVEEHVKKVNDDIRRLLDEIRREVEDIERRVKDKDVLKKLREVLDEIEKLVRKVLEESTRSLEKARELVKKALERNERLLEEIEKLARDIPAGDEVRELVRTLEERIDDSTREVKKLIEDLKRENKRILDTVRDLVRRLREKIKRIAD

SEQ ID NO: 6123 - protein, 177 aa, Artificial Sequence; identical to SEQ ID NO: 6122
  Synthetic

SEQ ID NO: 6124 - protein, 177 aa, Artificial Sequence
  Synthetic
DEEERLAELLERVKRDVDRSLKRIRDLLKELEKHAKEVNDDIRRLLEEVERRVREMEKRVKDKDVLKKLKDLLDEIRRRVEDALRRSTTSVDKVRKLVERVLENNKRLLEEAEDLVRRIPAGREVEELIRRMLKRIRDSTKKVEDELRRILEENRRILEEVRREIDELKKAIDEISR

SEQ ID NO: 6125 - protein, 177 aa, Artificial Sequence; identical to SEQ ID NO: 6124
  Synthetic

SEQ ID NO: 6126 - protein, 177 aa, Artificial Sequence
  Synthetic
SEEERLEELLRRIEKHSRELIRELEKSLEDSEREVRKSLKRIEELLRRAERKVREIRKRVKDKDVLRELERLLREAEKRVREVLRNNERLLREDEELTKEVIKKSKKILDEIRDLVRRIPAGREVKKVLDDLLKRDRDAIDEARKLNEEMLKRIEDSSREVEKLLADMEKTIEDIEK

SEQ ID NO: 6127 - protein, 177 aa, Artificial Sequence; identical to SEQ ID NO: 6126
  Synthetic

SEQ ID NO: 6128 - protein, 185 aa, Artificial Sequence
  Synthetic
SIDDKARKDLKRILDENRDIVRRVEELIRRSDELLKRILDDVKRRIDELRKKLEDIARKVKSKDMAELLERVLREIEDLIRRVLERIKKVLDESRKLVEEVLKENKKSLEKVERLAREVKTRIKDDEDVLRDIDRLLKEIKKHAEDSLRKIEKLLRESEEKVKDILRKIKKLLDEARKEVEDRRR

SEQ ID NO: 6129 - protein, 185 aa, Artificial Sequence; identical to SEQ ID NO: 6128
  Synthetic

SEQ ID NO: 6130 - protein, 185 aa, Artificial Sequence
  Synthetic
SIAEEVEELIRRLETKNRKIVKDVEDAIRASDDKNRRVLDKVRKDVERLKRELDRIAKEVKSEEALKLLTRILEEAEKLARDAERLNKETLDESRDLIRRVKELNKTSLREARRLAEEALRRIKDDKEVLDRIKELLKKLEKHVKDSLDKIDDLLRKSEKHVRESLETIKRLLEELEREVERLAR

SEQ ID NO: 6131 - protein, 185 aa, Artificial Sequence; identical to SEQ ID NO: 6130
  Synthetic

SEQ ID NO: 6132 - protein, 185 aa, Artificial Sequence
  Synthetic
DEKREVERLIRELIEENRDIVRRVEKLVRESNKKLDEILEEIRERLERLREKLKDIKRRVKSKDALKLLEDVLKEARETVTRVEELLRKLLEESRKLVEEAKKRNKDSLRKVEELVRDAETKLKDNEEVLRRIRELLERVEKHVRDSLRRIDELLKRSEERVRRIIREVRERLKRLEEEVREAKR

SEQ ID NO: 6133 - protein, 185 aa, Artificial Sequence; identical to SEQ ID NO: 6132
  Synthetic

SEQ ID NO: 6134 - protein, 185 aa, Artificial Sequence
  Synthetic
SISEDAERLVRELLRKNKEIRDRVEELVRRSNDKNRRVLEEVEKRLRDIIRKLEDIERRVKSEEMKKLLEEVLKEAEDLVREVLKLNDDTLRESEELVKKAKEDNERSLEEIRELVERVERRVKDNEEVLRRIRDLLRRVTEHVEKSKRDIEKLLRESRDHVRRSKEKIKRLLDEARERVERSKK

SEQ ID NO: 6135 - protein, 185 aa, Artificial Sequence; identical to SEQ ID NO: 6134
  Synthetic

SEQ ID NO: 6136 - protein, 176 aa, Artificial Sequence
  Synthetic
DEEDKLRKLLEEAREAVKRALERVDKLLRDSEREVRRILEEVKKLLDESRKAVEDIRRKATDEEALERIDRVLENSEKIIRDIAELIRKVLEESRKIAKEARELIKAVLKEAEDIIREVSSEEAEELIRRVIRKAEKLLREVEELLRRSNDKLRKLTEKVRTDLERSKKRLEDEAR

SEQ ID NO: 6137 - protein, 176 aa, Artificial Sequence; identical to SEQ ID NO: 6136
  Synthetic

SEQ ID NO: 6138 - protein, 187 aa, Artificial Sequence
  Synthetic
SILEKVRELLERIRDTVRKILREIEKSLEDNKRHSDEVLKEIEDLLRDLERRVKEIEERIKDKDVLKKVKEIVDDVRRRVREVLEKNRRIAEDSERLVEEVLRRLKELLDEIKKRVDDVLRKLEERETEEILEEIERLIREVRRRLKKILDDVRELSRRANEKDRKSLEEVRKLVEDVRRELERVAT

SEQ ID NO: 6139 - protein, 187 aa, Artificial Sequence; identical to SEQ ID NO: 6138
  Synthetic

SEQ ID NO: 6140 - protein, 187 aa, Artificial Sequence
  Synthetic
DVEEEVKKLLEDLERHSRKVLEEIKKLLKELEDHNRKTVEDIEELLRELEKEVRKLEEDVKDEDVLRKIRKILDKIRKDVDRVLKLLDESMKEIEKLVRDVLRKNEEVLEEAKERVTRVLRKLRDRETEEILEEIRRLAEELEKEDRKTLKEARDLAREVKKRNEEIKRRVEELIKKVDRELKEVAR

SEQ ID NO: 6141 - protein, 187 aa, Artificial Sequence; identical to SEQ ID NO: 6140
  Synthetic

SEQ ID NO: 6142 - protein, 176 aa, Artificial Sequence
  Synthetic
DEDEDVRRLLRRLREKVRRVKKKIDDSLRENRKKVRKTNEEVKKLLEDNRRRIEDVKRKRQEKEVLDLLEEVERHVEDIVKKVSELDKESLKLSDDLAKKARELIKRVEEKIEKVVKDRRSEEARKLMRELEKELKEIEDEVDKMSEEINRKNDEILRRARELIKRNNELLEEIRR

SEQ ID NO: 6143 - protein, 176 aa, Artificial Sequence; identical to SEQ ID NO: 6142
  Synthetic

SEQ ID NO: 6144 - protein, 176 aa, Artificial Sequence
  Synthetic
SEEEEVRKLLERLERTVEKTNRDVERSLRENEKRVRETNDEVRRLLEENRRRIEDVERKLQDEDVLRLLEEVKKHVEEIVRRVSELDRESLEESKELAKRASKLDEDTRRLIDRVIEERRSEEAKRLIEELEKRNREVKKEVEEMSRRINKKNEEILREARKLIEENNKLLKDIER

SEQ ID NO: 6145 - protein, 176 aa, Artificial Sequence; identical to SEQ ID NO: 6144
  Synthetic

SEQ ID NO: 6146 - protein, 181 aa, Artificial Sequence
  Synthetic
SELDEIAKAIRRLLEEVRRKNERIDEDIRRLLDELREHSEKVLREIEELLRRLEDAVRKRKDADDILRKIKKLIEDVAELLRKSLEEARRLLEEVARLLKTSVDDIKRLIDRVAEELSRVKDKDARKRAKDVLRDLEKKVEDLKRRNDKTLTDAKRELDDSRRRVKRVLDELEKVLRDLKR

SEQ ID NO: 6147 - protein, 181 aa, Artificial Sequence; identical to SEQ ID NO: 6146
  Synthetic

SEQ ID NO: 6148 - protein, 181 aa, Artificial Sequence
  Synthetic
DEAERILEEVKKLLEEVERLNKKIDDEARRLLREVERENEEIDRDIKRLLDEVRKDVERNKESDEILRKIRELIERVARRLEESVRRIRELVKEVRKLVRTSNEDLRRLIRDVAEKMRRVKDEEVRRRAEEVLRELEKVVEDSRRRNEKTLRDMERRIKELEDRNRDTLRKLREVVKELER

SEQ ID NO: 6149 - protein, 181 aa, Artificial Sequence; identical to SEQ ID NO: 6148
  Synthetic

SEQ ID NO: 6150 - protein, 174 aa, Artificial Sequence
  Synthetic
SEEERVRELIERMREMLERLEESNKKVLEEIERVLEKSERDVERVIREIERTLEEVKDNDEVRELVKRVLDDLRRFLDESRKLVKEIVDRLREMAKESKKLVKEVLDRLRELLERNGDTDRVIREAERVLEEVRRRNEKVNKEARDLLKEVEKHSRDVLEDIKRLLEEIRERAR

SEQ ID NO: 6151 - protein, 174 aa, Artificial Sequence; identical to SEQ ID NO: 6150
  Synthetic

SEQ ID NO: 6152 - protein, 174 aa, Artificial Sequence
  Synthetic
SEKERIEDVIRRIEKVLKESRDEADRVKKEIEKRLRELEKRHKEVTTEVKRVAEEVKDNEEVLKEIEDALRENERMVEDVRRLVEDILRKLDKFMRESEELVRRIVKRLEDLLRNNGDSETVLREAEELLRRVKKHSKEVLDRVRELLKRVEEKSERVLRELERVLREIREKAR

SEQ ID NO: 6153 - protein, 174 aa, Artificial Sequence; identical to SEQ ID NO: 6152
  Synthetic

SEQ ID NO: 6154 - protein, 174 aa, Artificial Sequence
  Synthetic
KDEERIEELLRRNEENLRRLEDSNRKVLRENEEILKELKRRHEKITEDLKRELEKVKDNDEVERLVREVLKKNEELAKKVEDLVRRTTERLKRLVDKSRKLVREITERLRRLLEQNGDTDTVLREATELSKEVHKENRRVNEEAKDLSRRVAEESDRILRELKKLLDEIRKRAK

SEQ ID NO: 6155 - protein, 174 aa, Artificial Sequence; identical to SEQ ID NO: 6154
  Synthetic

SEQ ID NO: 6156 - protein, 174 aa, Artificial Sequence
  Synthetic
SDEERIRRVIEDIERKLRELEKRHKEVTRENKENAKELKERHDRVTKDIKKTLDDVKDNDEVRRKVEKVLDENRKMVEKVLELLERISRRNEELMKDVRRLVKEILERLKRLLDNNGDTDRVLEEIKKLLREVEERSDRALREAKKLSKRVHERSKEVIDRLRELLREIKREAD

SEQ ID NO: 6157 - protein, 174 aa, Artificial Sequence; identical to SEQ ID NO: 6156
  Synthetic

SEQ ID NO: 6158 - protein, 178 aa, Artificial Sequence
  Synthetic
DSAREMERRIRELLKRVEDKSEKALRDSKKLTKEVEEESERALRRTEKLLREVAELARRVDKKEIEDIAREIIKDNERVLEDIRRLSEESVRDNRRVLDEIRRLIEEIIEDLERVLRKGDLDEKRVRDVLREIEEVLRRLEERHERLTRDDERVLRELEDRHRKLSERVKKLLEELKK

SEQ ID NO: 6159 - protein, 178 aa, Artificial Sequence; identical to SEQ ID NO: 6158
  Synthetic

SEQ ID NO: 6160 - protein, 178 aa, Artificial Sequence
  Synthetic
DRAEKAEREIRRLLERVKEDSERVLRESEELTRRVEEESRKILEETKKLTRTLEELSRTEDKRLVEKISRETIRRNEEMLKDLKRLSDESVKRNEDALDDLRRLAEEIIRRLEEVLRRGDLDEERVKRVLEEIERLLRELEERHKRLTERDKEVVKRLADRHREVSEEDRRVLEELKR

SEQ ID NO: 6161 - protein, 178 aa, Artificial Sequence; identical to SEQ ID NO: 6160
  Synthetic

SEQ ID NO: 6162 - protein, 178 aa, Artificial Sequence
  Synthetic
DEMEEVIRRIETLLKRVVDESDKVLEDIKRLLDRVVEESEKALETTRKLLEEVAELARTVDKREIAKIIREIIERNRTVLEEIARLIKEIIDRNKKALDELRDLARRIIRDLAEALKRGDLDEDEVRRVLERVKKVLDELAERHKELSKEIKRELRRLEKEHEDLSEEVKRLLRELER

SEQ ID NO: 6163 - protein, 178 aa, Artificial Sequence; identical to SEQ ID NO: 6162
  Synthetic

SEQ ID NO: 6164 - protein, 178 aa, Artificial Sequence
  Synthetic
DEMREAEEEIKRLLDTVKTESDRVLEEARKLTRRVEEESERVLRETKKLTDELRKLSRKRDKELVKKISEDTIRRNEEAVKRIRELSKESIKRNEDALERIKRLIKEIIDRLEDVLRRGDLDEERVRRVLKEIREVLDRLEKRHKKVSKDDKEVLERLEKEHKRLSREDEEVLRELER

SEQ ID NO: 6165 - protein, 178 aa, Artificial Sequence; identical to SEQ ID NO: 6164
  Synthetic

SEQ ID NO: 6166 - protein, 178 aa, Artificial Sequence
  Synthetic
SRMEKVEREIRTLLKEVEERSRKVLDESRKLTEDVERISRDALKKIKELLEEVRDLARTVDKKILRKLAREIIERNKEMLKEVRRLSKESLDRNERALEELADLARRIIEELEKALRRGDLDEKDVRRVLREIEELLKDLERKHKELTRRDEEVLKKLEDDHRRVSEEIEEVLRRLEK

SEQ ID NO: 6167 - protein, 178 aa, Artificial Sequence; identical to SEQ ID NO: 6166
  Synthetic

SEQ ID NO: 6168 - protein, 178 aa, Artificial Sequence
  Synthetic
SRAERVKEEIKKLLEEVRKESKRVLKEVKDLTKEVDDKSKKVMRDIRELLKEVEELARTVDKKEIRDRIRKIIERNERMLEELKRDSEESLKRNEDALREVKRLIEEIIERLERALRRGDLDAEEVKKVLREIEETLRKLEEEHRRLSDRDREKLDELAKRHKKVSRDIEEKLKELER

SEQ ID NO: 6169 - protein, 178 aa, Artificial Sequence; identical to SEQ ID NO: 6168
  Synthetic

SEQ ID NO: 6170 - protein, 177 aa, Artificial Sequence
  Synthetic
KEVEDVLDKVKKALEEIRERNKRVNDEIRRLLDEVRRRNEDADREIEEILKRVADEVRDTDLERIIEELKKRVEEVIRRSRRLAEEIKKTIEEAVRRTRKLAEDLKREIDDVLKRVETEELRERIKAVVEEVERVMDELRRSNEKVVREVEDVMRRLEERNRRTLERIEEVLERLKR

SEQ ID NO: 6171 - protein, 177 aa, Artificial Sequence; identical to SEQ ID NO: 6170
  Synthetic

SEQ ID NO: 6172 - protein, 181 aa, Artificial Sequence
  Synthetic
EEVERLLTKVRELVRRIEEENKKANDDSRKSLKEIKDRVEKALDDSRKSLEEIEKIVRRDNIKEKVRELAKRDRDLNREVLKEVRELLKRDEDLNRRVIDKTKKLMEDVERKLKEVLDRVDKEELKRRIETVIKEVRETIEELKKSNEESVRDSERTIRELEEEIKRTVRESEKEIKRLED

SEQ ID NO: 6173 - protein, 181 aa, Artificial Sequence; identical to SEQ ID NO: 6172
  Synthetic

SEQ ID NO: 6174 - protein, 181 aa, Artificial Sequence
  Synthetic
EEVERMADEVRRLNEEVRRRNEESIEEVKRLNDEIRKTNEKSIEDVKELLKRVKEVRERNQDKRRIRELIKRILERDEALVRKSERLAREVNRRDKEVVEESEKLIRDINKRIDEAVKRVDGGDAREKMKRLVEENTKSVEELKKRNEETSRRNTKSVREVTRRNEKTSDDVRRLVREEEQ

SEQ ID NO: 6175 - protein, 181 aa, Artificial Sequence; identical to SEQ ID NO: 6174
  Synthetic

SEQ ID NO: 6176 - protein, 181 aa, Artificial Sequence
  Synthetic
DEVEEAKEKVRRLNKELRRVVKEVEDEVRRLNEEVRREVEKVRDDVRKLRETIREVKARNVDDREIRKLAEEVIRRIRTVIEKIRRLIEEINKRIRRVAEEVKRIAEEINEEIKRVLDRVKSGSLEREIEKISRENTKSLRDLLDRLRRLVEENTKSVEELVRRLEELLERVEEEMRRLET

SEQ ID NO: 6177 - protein, 181 aa, Artificial Sequence; identical to SEQ ID NO: 6176
  Synthetic

SEQ ID NO: 6178 - protein, 177 aa, Artificial Sequence
  Synthetic
SRVETMVKDIRRLLEEVKERVERALRDNERVLEDIRRRVDELLKTNEKINRDIERRVRRGLDRDEIRKLLKESEDSVRRALRDVEELLRKSRETVERVKRLIERLLEEVKRIVETVARESDVEEIKEVLRRVEEEAERLKREIEESLKRSEDLVRKLKERIKRSLEESRKRIKKLED

SEQ ID NO: 6179 - protein, 177 aa, Artificial Sequence; identical to SEQ ID NO: 6178
  Synthetic

SEQ ID NO: 6180 - protein, 177 aa, Artificial Sequence
  Synthetic
SEVEEAVKRIRKIVKEIEERVRRLLEENRRVIEEVERINKEMLKRNKEINKEVEELVRRGEPRKVIEDLVDRSRRSVEESERLNEELVDESRRTVEEIETEIERLREELKRVVDKVREKREVKEIEDILRRAEETVEDLKRRIRRSLEDSRRVVEELAEENRKSLRESKKKVDELKK

SEQ ID NO: 6181 - protein, 177 aa, Artificial Sequence; identical to SEQ ID NO: 6180
  Synthetic

SEQ ID NO: 6182 - protein, 177 aa, Artificial Sequence
  Synthetic
SRVEDFVRRIRDLLRKIEEIARKALKENKDVLREIKRINDEMLRRNEEILKRAEDLVREGRDRTVIERMLEESERSVRDSERLNRELLRKSEETVRKLKKLIDDLLREIEKIVREVARERDVEEIKRILEEAKKTIDELRKEIEKSLREVEKAIRELEERNRRSLERSEDLVRELKR

SEQ ID NO: 6183 - protein, 177 aa, Artificial Sequence; identical to SEQ ID NO: 6182
  Synthetic

SEQ ID NO: 6184 - protein, 177 aa, Artificial Sequence
  Synthetic
RRVEEAVKRIKEILERVTRRVEKVLRDNKRVLDDIRRINEEMLKRNKEINRKVEELVREGRPRKVIKDLLKRSRESVEESERLNRDLLRKSEETVRRALKEIEDALKRIEELVREVERESDVEKIKEILEEVRRTIEELKERIRKSLEEVKELIKRMDEENRKSLEESDERARRAEK

SEQ ID NO: 6185 - protein, 177 aa, Artificial Sequence; identical to SEQ ID NO: 6184
  Synthetic

SEQ ID NO: 6186 - protein, 181 aa, Artificial Sequence
  Synthetic
SELEEIRERVKRVEEELRKNLKDAERRVREAKRRSEESLKDIEKKVKEVRDELKELARRGADRKDIRRIVKEIEKRIRDAAKRNEDIVRRVEEEIKRLVESNRTLADDISRRVKELLDRVTDGSAREDIKRLLKELEELLKRSEDEARRLLKEVRDLVDTTKKRIDKLLKEIEDLLREIER

SEQ ID NO: 6187 - protein, 181 aa, Artificial Sequence; identical to SEQ ID NO: 6186
  Synthetic

SEQ ID NO: 6188 - protein, 180 aa, Artificial Sequence
  Synthetic
KIEEKVEKLVRELLKELETVDREVNERVKRSNEKLEKIDRDVNKLVEDSNRKLKEISDRVKSDEARELIKRVLEESRKLVKEAKDLTKKVLDESEELIRRVLKVSRDVLDKAKKLIEKVLEERDVEKIKRLLEEVKKLVEDSERNIRELLKESRKKVEDSKRNLDRLLKESDDRVDRERR

SEQ ID NO: 6189 - protein, 180 aa, Artificial Sequence; identical to SEQ ID NO: 6188
  Synthetic

SEQ ID NO: 6190 - protein, 180 aa, Artificial Sequence
  Synthetic
ETEKEVEELVKRVLDKDKRISDESEERIRRLMEKNKKILEDVKRLVDEVREKLEDIRRRVKSKEMKDLIERVLEEAKELVTRAKKLDEDSLREVDKLVKDVDRLNERSLEEAERLVREVLRKRDVEKIKKLLEDVRRLIKRSKEKNDELLEELKRLSEETRETLDRLLKDLEDKIREAKK

SEQ ID NO: 6191 - protein, 180 aa, Artificial Sequence; identical to SEQ ID NO: 6190
  Synthetic

SEQ ID NO: 6192 - protein, 173 aa, Artificial Sequence
  Synthetic
DEKEDVDRLLRELEELVERSERSIRKLLEDNRKLAEDLKRTVEKLLEDNRRKVEEVRRTGADERKVDEVLKHSEEVIRRVKEDIDRVLKHSEEVIDRADKLTKAVLKEARDIVREVDSEELRKLIKRVLKKLRDLNRRVKELSRRSAEELKRLLDEVRKLSEDSLRELDKLRK

SEQ ID NO: 6193 - protein, 173 aa, Artificial Sequence; identical to SEQ ID NO: 6192
  Synthetic

SEQ ID NO: 6194 - protein, 173 aa, Artificial Sequence
  Synthetic
DEEKRVRDLLEEVREEVERSDKSIEELLRELEKAVKDSERTIRKLLEDNERMVREVRRKGVDDELVRRVLEHSEKLIREAKRLTDEVLREAKRIITEAKKLTKEVEKKVREIVKKVKSKEAEDLIREILEELKRLNEDVKRLIREVLETLKELNERVKKLVKESNDELRELAR

SEQ ID NO: 6195 - protein, 173 aa, Artificial Sequence; identical to SEQ ID NO: 6194
  Synthetic

SEQ ID NO: 6196 - protein, 173 aa, Artificial Sequence
  Synthetic
REEEKLDKLRKDLEKRVEESKRSIDKLLEDNRRRVEESKKTIEKLLEDNKRRVDEIKKRGVDDELVRRALEHSKKLVDEAKELTKRVLEKSKRIIDRAKELTKRVERKVREIIKKVDSDEAEKLIRDVKKELDRLNEEVKKLSEDSLKELDDLNREVKELMERSNRKLDEDAK

SEQ ID NO: 6197 - protein, 173 aa, Artificial Sequence; identical to SEQ ID NO: 6196
  Synthetic

SEQ ID NO: 6198 - protein, 175 aa, Artificial Sequence
  Synthetic
KEVEDVLREIKKLIKEIHEKSKRALDETRELLERIHRTTRRVLEEIRRLLKEVEELAKAGMDKREVRRRVKEIIDRLREMLERSRKLWKDIEERDKRLLEEVERLWDEIRRELRERAGDKDRVEDLVRELERVVKEDKDRSKESEERIKKLVEDDTREAEKLIRELEKILEDTEK

SEQ ID NO: 6199 - protein, 175 aa, Artificial Sequence; identical to SEQ ID NO: 6198
  Synthetic

SEQ ID NO: 6200 - protein, 175 aa, Artificial Sequence
  Synthetic
SEVEEVLRDIDRLAKEIHKRSRDVLRDIDRLLKEIHERSRRMLERIKRLLDEVRRLVEAGVRKEEIKELIERILRDLKRVVDEVAREWEEVIKKLRKALEESRRLWEEIIKKLEREAGDRDRLRELVERLERLLETDKREIEKLIKKLEEMLEEDERRARELLEDIRRILEEIKK

SEQ ID NO: 6201 - protein, 175 aa, Artificial Sequence; identical to SEQ ID NO: 6200
  Synthetic

SEQ ID NO: 6202 - protein, 175 aa, Artificial Sequence
  Synthetic
SEVEEVTKEIKRLVEEIHKRSREALEETRRLVETIHRDSKRVLDEIERLLEEVRKLAEDGVDKRDIKRLAKEILKRLEDMMRRVTELWKEIIERDRRLLEESKKRWDEVIEELRRKVRDEKRVRDLLEKLREDAKRDEDASRKSEEDIRKVVEEDKREAEKLLKRIEDELRKTEK

SEQ ID NO: 6203 - protein, 175 aa, Artificial Sequence; identical to SEQ ID NO: 6202
  Synthetic

SEQ ID NO: 6204 - protein, 175 aa, Artificial Sequence
  Synthetic
SEVEKVLKDIRDLVKKIHDESKRVLDEIEELVRRINKRSRDALREIRELLRTVTELAKAGLDKREVEKLAKRILERLREVLEESRELWERVIRRLKEAMERVRELWERVIRELRKKVGDKDRVRKLVEDLERMLRRDEAEAEKLIKKLRELLEKDRDDIRRLLEDIKRILDEIRK

SEQ ID NO: 6205 - protein, 175 aa, Artificial Sequence; identical to SEQ ID NO: 6204
  Synthetic

SEQ ID NO: 6206 - protein, 175 aa, Artificial Sequence
  Synthetic
EEVERALDRARRLLERIHETSRDVLRRTEELLRRINEESRRVLKEAKELLDRVEKLVRDGLDKREVRRLIEEIVRRLEKVLKESEDLWREVIRTDKEMLDEVRKLWEEIIERLRREVGDKDRVEKLERELEKVVREDEEESKKSIRRAEEMLRKDREDIRRLLEEIKKILEDIDK

SEQ ID NO: 6207 - protein, 175 aa, Artificial Sequence; identical to SEQ ID NO: 6206
  Synthetic

SEQ ID NO: 6208 - protein, 175 aa, Artificial Sequence
  Synthetic
SEVEDVLRKAEELAKRIHDRSRKALKETEELLERINRDSERVLRESEKLLEDVRRLAEAGVRKEEIKKLAEEILREDKRVLDESKRLWEEILRRDRKLLDEVRRLWEEIIRRLRRELGDEKTVRRLVDKLRRLVEEDTDESRKSEERIKKMVEDDKRESEKSLKRIKDIMKEITD

SEQ ID NO: 6209 - protein, 175 aa, Artificial Sequence; identical to SEQ ID NO: 6208
  Synthetic

SEQ ID NO: 6210 - protein, 176 aa, Artificial Sequence
  Synthetic
SEVERVLEENERTLKRIEETAKKVLEEIEKLSKEVEDRAREVLDRVRRISEEVRRDVRSKEVERIIREIDKESERVLRELEELIKEISRKIEEVLREIERLARESKDRVRKAMKDIDEEMRDRVRKLIKRNDEVLDRVRREIEKLHRRNKKILDDLRREIERLNRENKRLLDELRK

SEQ ID NO: 6211 - protein, 176 aa, Artificial Sequence; identical to SEQ ID NO: 6210
  Synthetic

SEQ ID NO: 6212 - protein, 176 aa, Artificial Sequence
  Synthetic
SEVEEVLKRNEKTLKEIEERAREVEETVRELSERIRKRNEEVNRELEERSKRIRRDVRDKDVERLIRKVDEDSKRTLAETEKLIREVSEVIKRALEEIERLIRDSLEKVKEMMRDVDKEARDRADELLKRNREVLERLRKRIEDLHRDNKRVLDELRRSNEETNRRNRKLLEELRK

SEQ ID NO: 6213 - protein, 176 aa, Artificial Sequence; identical to SEQ ID NO: 6212
  Synthetic

SEQ ID NO: 6214 - protein, 176 aa, Artificial Sequence
  Synthetic
REVEEVLKENEKTLREIERRMEEVLKRVEDLSDEVRRRVDEVLRRVEETSKEIAKRVRGEDVKRLIEDVDRRSREALREVEELIKRIDEVSERALRELEELIKRSLDRLAEVMKDVDEEARKRAKDVLDRNRDVLRRLKDAIDKLNKRNKEILDRLRRKIEDLNRRNEELLRRLEK

SEQ ID NO: 6215 - protein, 176 aa, Artificial Sequence; identical to SEQ ID NO: 6214
  Synthetic

SEQ ID NO: 6216 - protein, 176 aa, Artificial Sequence
  Synthetic
REVEEVLDKNRKTLREIRKRAKEVLDRVEELSRRVREENERVNRELRKISEEIARKVRDKEVEKLIREVDERSKRTLETTERLIREIDERSKKVLDELRKLVKESLELVERAAKDVDEEMKKEADKLLKENRDVLRELERRIEELNERNRRVLKELEESNRRTNEENKRLLDELRR

SEQ ID NO: 6217 - protein, 176 aa, Artificial Sequence; identical to SEQ ID NO: 6216
  Synthetic

SEQ ID NO: 6218 - protein, 176 aa, Artificial Sequence
  Synthetic
DEVETVLDENRRTLKRIRERVDKVLKDVEKLSREVEDEIRRVLEEVEKELKDIERDVRDKDVERLIREIEEKIKRALEKIEELIRRIDERSREALEEVKKLIEDSLKRVEDAMRDVDEDAREKAKRLLEENKRVLKELEERVKRLNDKNRRILERIKKRIEDLRRRVKELLKKLRK

SEQ ID NO: 6219 - protein, 176 aa, Artificial Sequence; identical to SEQ ID NO: 6218
  Synthetic

SEQ ID NO: 6220 - protein, 176 aa, Artificial Sequence
  Synthetic
DEVERVLEENERTLRRVREIIREVLEEVRRLSEEVKRRIDEVLKENEDTLKKIKDEVRSEDVRRLIEESLELVKRVLEEVRRLIEAVDRESERVLKEVEDLARESERLVREVAKDVDKKARDRVREVEKRNRDVLEEVKDEIRKVNKDNRDILRRIKKDVEELLKRNEKVLRETEK

SEQ ID NO: 6221 - protein, 176 aa, Artificial Sequence; identical to SEQ ID NO: 6220
  Synthetic

SEQ ID NO: 6222 - protein, 176 aa, Artificial Sequence
  Synthetic
RELEELLKRNERTLRELAKRVKRLLEENKETVRRIEERLRRVLTEVEKISRDIRDRVDSEDLRRLLEELDKRSKEVVEEIEELLRRSLKRLKEVLDEIRKLVKESLEEIRRAAKDVDEEVRERVKKVEDENRKLLERAEREIKKVAEENRRLMEKMKDDVRKANKRNKELLERRTK

SEQ ID NO: 6223 - protein, 176 aa, Artificial Sequence; identical to SEQ ID NO: 6222
  Synthetic

SEQ ID NO: 6224 - protein, 176 aa, Artificial Sequence
  Synthetic
SEVEKVLRENEKTLREIEREIDRVLRDNERTLKEVRERNEEVNRRVEEDSKRVKDEVRSKKVEEVIKRIDERSKETLRETVERIEESLRRLKKALDDVRDLIRRSLKRVEEAAKDIDEKARERIKRILDENRKVLREIERKIREVLERNKKVLEEVRKSNEETNDRNRKLLEELRR

SEQ ID NO: 6225 - protein, 176 aa, Artificial Sequence; identical to SEQ ID NO: 6224
  Synthetic

SEQ ID NO: 6226 - protein, 183 aa, Artificial Sequence
  Synthetic
SVDERVEDLRRDVERVLRELRKSNEESIRRSEEIVTRLEEELKRNSKEVEEVLKRLEDELKDDEDKLREVRELIERVKKTNEDVLRRVRELIERDEEVNRRSLTETDDLIRRVRKVVEEARRLTSKDLEKALRDVEKLIREIRERNKEMLRRSEEILKEIEKRARDMSRESKRLIEDIERRTK

SEQ ID NO: 6227 - protein, 183 aa, Artificial Sequence; identical to SEQ ID NO: 6226
  Synthetic

SEQ ID NO: 6228 - protein, 183 aa, Artificial Sequence
  Synthetic
SVEEKVDRLKRRVEEVLKELKKSNEDNTREVREALKRLKKAIEESIDRSRKILEDLRRKLKDDEKKLREVEELIKRDEETNRRVLRRVEELIRRVEEFNEESLRRTERLIEEVKKVVDEARRLTDEDLERALKEVEELIRRIREENKEMSERSKKIIRKIEKDVKKALDDSERVLREIAERTK

SEQ ID NO: 6229 - protein, 183 aa, Artificial Sequence; identical to SEQ ID NO: 6228
  Synthetic

SEQ ID NO: 6230 - protein, 183 aa, Artificial Sequence
  Synthetic
DVEKKVKELLDEVRDALRRLRKSNKDNTDEVDRALRELEETNKKSIEDSRRIVEDLKRKLKDDEDVLREVEELIRRDEETNKRSLEEVKDLIKRVRDVNEESLRRTEDLIRRVEEKVKEIERLTDREADKVLKRVKEEIERIERENRRMSEKSERLIREIRKRNKEMLDRSKKLLEDIKRRVT

SEQ ID NO: 6231 - protein, 183 aa, Artificial Sequence; identical to SEQ ID NO: 6230
  Synthetic

SEQ ID NO: 6232 - protein, 180 aa, Artificial Sequence
  Synthetic
KEVEEILTESEDMNRKIDKLVKEILDESEEMNRRIRELVKRIVEELRELLREIRRLAEERDKDDVLRRLKELLKEIKEKARKVIDELRRLSEEIKKKIDDVLDELRRASEEVERKIREDKNEEVRDRLRRSHEKNKEVLDRIRKRVKESHEKNEKSLREIEETVKKLERDVERLLREIKR

SEQ ID NO: 6233 - protein, 180 aa, Artificial Sequence; identical to SEQ ID NO: 6232
  Synthetic

SEQ ID NO: 6234 - protein, 180 aa, Artificial Sequence
  Synthetic
EEVERILKESRDANERIKKLVEDILRRSKELNERIRDEVRKILAKSEEVNRRIRRLAKERDKEEVLRRLEEMSKKVKKEIDEVIEKLERLSEEIRRRIEEVLERLKRMSEEALEKIKEDKNEEVKEKAKESHKENKKVLDRIKRELEKSHEENKKSLDEIRDRVRRSHEKNRKVLEEIRK

SEQ ID NO: 6235 - protein, 180 aa, Artificial Sequence; identical to SEQ ID NO: 6234
  Synthetic

SEQ ID NO: 6236 - protein, 180 aa, Artificial Sequence
  Synthetic
EEVERILKESEDMNRRIRDLVRRIAEESDKVNREIRKLVDEIRRKLDRVLREIEDLIRKRDKEEVLRRLRKLLEEAKEEIERVLKRLEDASREVAKKIRDVLEELRKMSEEVLEKVKEDKNEEVKKRAEKSHRENEKSLREIRKELEELHRKNKKSLEEIRKTLRKLEEKVRKLLEDLRR

SEQ ID NO: 6237 - protein, 180 aa, Artificial Sequence; identical to SEQ ID NO: 6236
  Synthetic

SEQ ID NO: 6238 - protein, 180 aa, Artificial Sequence
  Synthetic
SRVEEILRESKRMNDEIREKVKKILKTSRDMNKRIEDRVREILKKSEDLNRKIRKLIDDRDKKEVVDTLRELSKEIEKEAREVIEELERISKEVHDRAREVIKELEEISDDVRRKAERDDKEEAKRELEKSHKTNEKVLRDIERRVEDSNRENEDSLRKIERAVTESHRRNEEVLERLER

SEQ ID NO: 6239 - protein, 180 aa, Artificial Sequence; identical to SEQ ID NO: 6238
  Synthetic

SEQ ID NO: 6240 - protein, 180 aa, Artificial Sequence
  Synthetic
EEVERILEESKRLNDEIRRKVDEILRKSEEINERVRRLVEKIRTDLERVLEEIRDLADKRDKDEVLKRLEDALKEALDRARKVIRELEEMSKEIEDEIRKVLEELERLSREVERKLREDDKEEVKRRLEESHKDNDRVLKEIERRVRESLRRNRESLRRIDEKVKELERRVEKLLREIKK

SEQ ID NO: 6241 - protein, 180 aa, Artificial Sequence; identical to SEQ ID NO: 6240
  Synthetic

SEQ ID NO: 6242 - protein, 180 aa, Artificial Sequence
  Synthetic
EEVERILDESKKMNDDIRRKVKEILDESEKLNEDIRRLVKEILEKSKRVNDRIRKLAKDRDKEDVLRELKKMSEDVLDDARKVLETLKKLSEDVRRKIREVLKELEKASREVERKVREDKNDEVRRRAEKSVRENDKSLKEIEDEVRRSVEKNEESLKRIEDEVRKSHEKNKKVLDEIKK

SEQ ID NO: 6243 - protein, 180 aa, Artificial Sequence; identical to SEQ ID NO: 6242
  Synthetic

SEQ ID NO: 6244 - protein, 180 aa, Artificial Sequence
  Synthetic
SKAEEVLKEIRERIERIRKRAEDVLRHDEESLKRAEEVNRKMEKESRRINEEIRDRVRKEGGRDKEKVDRLLEELHRVDEESIRIVERLLEHNRKSTEDIKDEVRKLLERLKEVIDEVRRAGVDEKDVRKVEDDIRRVIKKLKEELDRSADKSRDVVRRLRDSNKKLNDKNRRDIEEIKK

SEQ ID NO: 6245 - protein, 180 aa, Artificial Sequence; identical to SEQ ID NO: 6244
  Synthetic

SEQ ID NO: 6246 - protein, 180 aa, Artificial Sequence
  Synthetic
DSEEEVRERIRKIIEDVKRIIEEVLRRDDKILKEIEKRNRDMLKRSKEINKEARDRVREAGNRLKEEIRKLIKELHDVDRESIKRVEDLIREVRKSSDKAEEEVRRMLKRLKDVVDTVRKAGVDDRSVRELERRIKEVIDELRELVERSKRKVDKLLKDLTRSNEKVNRENREDLERLEK

SEQ ID NO: 6247 - protein, 180 aa, Artificial Sequence; identical to SEQ ID NO: 6246
  Synthetic

SEQ ID NO: 6248 - protein, 174 aa, Artificial Sequence
  Synthetic
DDERRAKKAAEDAAKRLKEIAEKAHRISEKALEELKRINDDANKISEDALRRLEKLKKEGAPEEAAERAARDSLRLIREAAERSREAAERSLRLIEEAAKEAEDAARDALEIIKTLAKSEEAKELAKKIKEIADEARKRAEDNARTNKEAAERSKENADRNAEENKKAAEKAKR

SEQ ID NO: 6249 - protein, 174 aa, Artificial Sequence; identical to SEQ ID NO: 6248
  Synthetic

SEQ ID NO: 6250 - protein, 174 aa, Artificial Sequence
  Synthetic
KDEDEVRRRVEELLKRNKELVEEIHKLSEDALRDLERINEEVNRISDEMRRRLDKLKKDGIPEEVLEDVVRRSLELIERLLRESRKVAEDSLRTIKEMLKRSEDIVRRVLEEIDRKIKSEEAKKLKERVDRSLKESEKEVRENLERNRKLLDESRRNAEENLRENKRVLDELRR

SEQ ID NO: 6251 - protein, 174 aa, Artificial Sequence; identical to SEQ ID NO: 6250
  Synthetic

SEQ ID NO: 6252 - protein, 174 aa, Artificial Sequence
  Synthetic
SEEDEVRERVKRVLDELRKINEDLNRISREMLERNKDILRRIHEISKRALDKLKKLKEDGVPEDDLRRVVEDSLRLIKEALERSERLVRTSLKLIKDMLRRSEEVARRILDDIRKRLKSEEVRKLLEEVKDSLRKSEENARRNLDENRRSLKKSEDEVRRNLEENEDTLRKLEK

SEQ ID NO: 6253 - protein, 174 aa, Artificial Sequence; identical to SEQ ID NO: 6252
  Synthetic

SEQ ID NO: 6254 - protein, 182 aa, Artificial Sequence
  Synthetic
DEMDEVRRTIKKLDKDSRDKVRTVEEKIRRLDEESRRENEEIVRKIEELLEEIERRVRSSTDERVLRELVRRLKEVLDRVEKDSRETIKKNKRALDKARREIEEILKENEKALDDAKKVVDELNIDEKEVKKIKEESDESLKEIEKLLREIEEESKRSLREMEKTLEDIERRVRRVLEEIKR

SEQ ID NO: 6255 - protein, 182 aa, Artificial Sequence; identical to SEQ ID NO: 6254
  Synthetic

SEQ ID NO: 6256 - protein, 181 aa, Artificial Sequence
  Synthetic
SIEELAKRNEEENEKAAEDVERLAEEVKERAERVARESEKLAREAEKEAERVAREIRRDRSDDKDAARLVEEAAKEARRAAEESARLIEEAAKKAEKAAEDVKREIKKTAEDLKRAADKAETEEAAKRASEENRKAVRDAREKARRAAEEAKKLLDEARKHSEEAAKRAKELLEEAKKRAD

SEQ ID NO: 6257 - protein, 181 aa, Artificial Sequence; identical to SEQ ID NO: 6256
  Synthetic

SEQ ID NO: 6258 - protein, 181 aa, Artificial Sequence
  Synthetic
KIEELMKRNEKENREVLERVKELADRNRRENEEVVKKSKKELDDLKRKIEEVLERIKRERKEMKEVEKLVREVLKRIEDLIRESVDRIRRTVEELEEVAKDVERKIRETIRRLRELAKRLETEEVVEKVSRENKKLVADIEDEVRRASTRNKKLVKDIEKHSEDVVRELEKLLKDIKDKVD

SEQ ID NO: 6259 - protein, 181 aa, Artificial Sequence; identical to SEQ ID NO: 6258
  Synthetic

SEQ ID NO: 6260 - protein, 181 aa, Artificial Sequence
  Synthetic
SIEDEARRNEKRNREVLKRSKDLLDEIARKIEEVEKRIRDLVKRVKEEIDEVLRRIKRERPDLKDVIELVKRVAKTARDMIEKLEDELRKILEEVTKLIEESEKRIKETVDRLKEAVKNIEDDELLRRVSKENEDLVREIEDHTRRVLETIERKLRRVEEKVETVVREIKRRLEDIERRVK

SEQ ID NO: 6261 - protein, 181 aa, Artificial Sequence; identical to SEQ ID NO: 6260
  Synthetic

SEQ ID NO: 6262 - protein, 174 aa, Artificial Sequence
  Synthetic
EEVDRVIERIKRLLEEVERKIRRASEKNRRLIEKSRKELEKVSKENKDLIDRVRELRDAGVDKREIKDLLRRISEEMKKVIDELKRSNEKVSEELRRMLKEIREDLKRIVDEARERVKGEKVKTVEKEIREVIERADEIIERNERENKKSVEEIEEILERNKRRNEEALREVDK

SEQ ID NO: 6263 - protein, 174 aa, Artificial Sequence; identical to SEQ ID NO: 6262
  Synthetic

SEQ ID NO: 6264 - protein, 170 aa, Artificial Sequence
  Synthetic
DELDRAIEEVKRLLDEIRRRLEKVVREVRKLNEEIREDLRRVVEEVRRTNKEIRDRVRSEEARRLAEESLRLLEEALERIRRLIERSLRRIRRLLEEIEKLARDILEEIRRIIDSDKVRRLEREVEELLKTVEELIRRLEEHTRRVLKEVDEEIKRLKEHTEKVLRDVEK

SEQ ID NO: 6265 - protein, 170 aa, Artificial Sequence; identical to SEQ ID NO: 6264
  Synthetic

SEQ ID NO: 6266 - protein, 187 aa, Artificial Sequence
  Synthetic
SAEELVKELERRIEELLKELEEIVRRNRKHSEDVLRKIKELVRDVLRRVKEALKDLTKKVRTREVRKLVEELIERLEELIERIDRTAERLITESRRTLEEIRRRIKELIDDLRRLLREIKKEVDRGLDEDVVRKLIKEIDDRLKEVKKEVEKLSDENRRLNEDVERRIKELLDDIERLLKEIRDTVT

SEQ ID NO: 6267 - protein, 187 aa, Artificial Sequence; identical to SEQ ID NO: 6266
  Synthetic

SEQ ID NO: 6268 - protein, 187 aa, Artificial Sequence
  Synthetic
DVEDIVRRIRERVKEALERLRKTNDDNRKHSEEVLRKLAESDKRTMERIERVLEELRRRSRTREVTKLVEDAIEKLRRRVRESHERVKRLFEDSKRTVDESLERVERAIEELKRVIDEVEELARRGLPKEVVREMKRKIEELLKRIEDENKRLSDENRELNKRVEEDNRRLNKEIEDELRKVEEDVK

SEQ ID NO: 6269 - protein, 187 aa, Artificial Sequence; identical to SEQ ID NO: 6268
  Synthetic

SEQ ID NO: 6270 - protein, 187 aa, Artificial Sequence
  Synthetic
DLEELVKELEKRIEDVLRTLRKTNKDNEKAVEESLRKLEDELRKLKEKIDRLLDKLTKESRTEEVEKLVRELIRELREVVRRIEELIRDMARRSKESVETSLELVERLIKKLEELLRRVLELVAKGLPEEVVRRIIEDIRRLLEEVKKVNEDLSEENERLNRDAERRVREAIKEVEDLLDEIEKTVR

SEQ ID NO: 6271 - protein, 187 aa, Artificial Sequence; identical to SEQ ID NO: 6270
  Synthetic

SEQ ID NO: 6272 - protein, 187 aa, Artificial Sequence
  Synthetic
SVEDELRKLEEKIRRLLEELRRTNDENRRHSEKVLEELRRELEKLKRRIEELLRKLREESRTREVTKLVEDLIRKLRELVERIEREVEKLVRDSRRTVEESDKLVKDVIKRLRELVREILKLAREGRPEEVVERLIRDVERKLREVKKENDRASKENEDLNREVKRRAEKLLRDVERLLREVEKTVK

SEQ ID NO: 6273 - protein, 187 aa, Artificial Sequence; identical to SEQ ID NO: 6272
  Synthetic

SEQ ID NO: 6274 - protein, 187 aa, Artificial Sequence
  Synthetic
SAEDRLRELEERIRRALKELEDTNRRNEEHSKKLLEELARSDRETEEEIKEALKRLTERKRDEEVEREIKEMIRDLERVVRESHRTVRELVKESERTVKESLERVKRAIDELRRIVEEIRKLIEEGLPEEVVDRLIREVEERLRDVRRLNEELSKRNKELNDRVREVNEELNRRIKKRLEEIKRRVE

SEQ ID NO: 6275 - protein, 187 aa, Artificial Sequence; identical to SEQ ID NO: 6274
  Synthetic

SEQ ID NO: 6276 - protein, 187 aa, Artificial Sequence
  Synthetic
SLEDLVRTIREEIERLMKEAEDTNRRNKEESEESLRRLKKLVEDIDREVKEVLDRAEKNTRTDEVREKVRRMIESLRRDIEEIRKRIEEAVKKSEDVVRKSLEEVRRAVKRLRDLVDKILELVEKGLPEKVVEELIRRIKDELKKIRERNKELSDRDKKLNEDVEREVRKLIDEIRKKLEDVERTVK

SEQ ID NO: 6277 - protein, 187 aa, Artificial Sequence; identical to SEQ ID NO: 6276
  Synthetic

SEQ ID NO: 6278 - protein, 180 aa, Artificial Sequence
  Synthetic
REVDKVREDVKRLIKEIEDRVRKVLKEDEDLIRELRERVKKVSKENKEVVKTLRELVRDLRGKRERIREVIKRADELLERAEKEVRKVIDDLRKTTEDALRDLERIIREAKKTVDDVLRRRGIREELVKELEKRIREVLERLRRLIERSKEEIDRVLREVEEDVRRNKEENKRLLEEAER

SEQ ID NO: 6279 - protein, 180 aa, Artificial Sequence; identical to SEQ ID NO: 6278
  Synthetic

SEQ ID NO: 6280 - protein, 178 aa, Artificial Sequence
  Synthetic
DEKDKVRKTVEDILREIEKIVEDLVRRNERVDREIRERVRELLRRDDEILKRMEEVKRRRAPEEVLEEIAERLRRSSEEVLKLIRELIRRLKETVKDAERLIRELIKRLAEVVDTARKEGVEEREVTKLKEDIDRLLEKLERDLDELRKRNDELLKELEDRVRKSKEKVEKILRDVRR

SEQ ID NO: 6281 - protein, 178 aa, Artificial Sequence; identical to SEQ ID NO: 6280
  Synthetic

SEQ ID NO: 6282 - protein, 181 aa, Artificial Sequence
  Synthetic
SIEDKLRELKERHKELSKRIKEELERLTEEHRRVSEKIRKSLEEDKRRADKVLERIRRERSDSEKLVRDLEKVLRDVERLYREVIKRNEEALDRVRRLVEEIIERNERMLRKVEELARRIKTEDVLRKVEEDSREVLKDSKRLLDEVATRSEEMLRRSEELLKRIHETSKKVLDEIKTKLK

SEQ ID NO: 6283 - protein, 181 aa, Artificial Sequence; identical to SEQ ID NO: 6282
  Synthetic

SEQ ID NO: 6284 - protein, 181 aa, Artificial Sequence
  Synthetic
SIEDLARDLERRHKELSEDDKRKLDELRKRHKDVSDEARRSLERDERRVEKVEREITKRRSDDKDVVTELRKVLEEIRRLYETVVRDNERVLRDIERLSRRTIEENKKVLDELRELARRIKTEKVLDDVRRRSDKMLEDSRRLTREVEETSKEMLERSRRLLEEIHKESDRVLREARERDR

SEQ ID NO: 6285 - protein, 181 aa, Artificial Sequence; identical to SEQ ID NO: 6284
  Synthetic

SEQ ID NO: 6286 - protein, 177 aa, Artificial Sequence
  Synthetic
RIEDILRRLEEHHRRLDKENKEILERLKKHHEEVLRKIKEILERLEREARDIERKIRELEEVLRKIREILERVKELADRLLEEVERSLREVEKLIRTSSDLIRRSLETVKRAAERLETDEVVEKVVREVEDTNEKIRRRSDEVRKEVEDTNRRIDKRLKEVEEEVRRLLDEVRKESE

SEQ ID NO: 6287 - protein, 177 aa, Artificial Sequence; identical to SEQ ID NO: 6286
  Synthetic

SEQ ID NO: 6288 - protein, 175 aa, Artificial Sequence
  Synthetic
SELEDVAKKAEDLLTKSAEILKEVVDRHRRLNERSEDEARRVEEEHRRTNKKLLDLARRGDRDKEEVKRIIERSLDRVREVFKRVKRLNDESLKEVERVIEEVRRLNEEILKTVERDVDSEELRKLKKRIEDISREHERILRELREHVERVSDKHRKILKELEEDVERILREVTK

SEQ ID NO: 6289 - protein, 175 aa, Artificial Sequence; identical to SEQ ID NO: 6288
  Synthetic

SEQ ID NO: 6290 - protein, 175 aa, Artificial Sequence
  Synthetic
SEIEKVVEDIKRLLEESKDRLRKAEEEVRDLSRRSREKLRRAEEDIKRLLDEIERMLRAGERDKKEVEDIIKEIVDKVRTVATDVERLNKEILERVDRLIEELRRLNEEILDRVRKDIDSDELRKLAEEIERVSEEHKRILDELRDHLRKNTKDVRDILRELEKEAERLLRELRR

SEQ ID NO: 6291 - protein, 175 aa, Artificial Sequence; identical to SEQ ID NO: 6290
  Synthetic

SEQ ID NO: 6292 - protein, 175 aa, Artificial Sequence
  Synthetic
KDVEDVLKRVKDVNREVEKRLEKVIRDDEKINEEINRRLDEMAERVKRVNETVEDIARKENIREKLEELIKESEDTIRKVLREVEELVRELRKTVDDALEEARDLVRKSEELIERIVRKEKLVEELRRESDTSKKRVEKLIRELKEKNKRSEERARRIIEKLKKESKDSLKRVKD

SEQ ID NO: 6293 - protein, 175 aa, Artificial Sequence; identical to SEQ ID NO: 6292
  Synthetic

SEQ ID NO: 6294 - protein, 174 aa, Artificial Sequence
  Synthetic
EEKEILDELEKEVRDLNRKNKEILRRLEETARDLHRRNEEILDRIRKRVEELKRRVREVRELLDEIRRILEEIKRLIEAVSRKIKKVLDDVRRLIKEVDDKSRDVLRRVERLIRQNVDKDTVAKEAKRLIRDLERLSREIEERVRRLIEEVKEESERIRERVTRLIKEVEDRRK

SEQ ID NO: 6295 - protein, 174 aa, Artificial Sequence; identical to SEQ ID NO: 6294
  Synthetic

SEQ ID NO: 6296 - protein, 174 aa, Artificial Sequence
  Synthetic
DDEEILKELEERVKKLHEKNKRILEKLKREVERLNDENRRILKEVKEDVDRLLKEVKEDKDLLEEIKRALERIERLMREVDKRSREALERVKDLIRKVSRRIEEALEEVRKLITQNVDSETVARRVEEMIKEVEELSKEIEERAKRLIDRLRELSKRILEELKRLLEEVREKRR

SEQ ID NO: 6297 - protein, 174 aa, Artificial Sequence; identical to SEQ ID NO: 6296
  Synthetic

SEQ ID NO: 6298 - protein, 174 aa, Artificial Sequence
  Synthetic
REEDEVLEDARRLSEESRKKLREVERRAKELSDRSRKRLRDVKRRVDDALRKIEDLRRRGVDKRDVLRVVEKVRDDVEKLIREVKDLNRRILEEVRRLIKEVEDLNKEVLDKVRRELKSEKLRELEEEIRRNSKDVKEVMKELDKHIKRNSEEVDKVLKELEERLKRLLDRVRK

SEQ ID NO: 6299 - protein, 174 aa, Artificial Sequence; identical to SEQ ID NO: 6298
  Synthetic

SEQ ID NO: 6300 - protein, 174 aa, Artificial Sequence
  Synthetic
SDEDRVKDKAEELSRRSREELERVKEEAKRLSDESKKRLEEVTRRIEKVLREIRELRERGVDKREVKRVVDEVVDTVRKLIKEVEDLNREVVERIKELIKEVERLNKEVLDEVERELKSEKLRRLREEIKKNSDEVKKVLRRLEENLRDNTRRVREVLERLEDEARKLLKDVKK

SEQ ID NO: 6301 - protein, 174 aa, Artificial Sequence; identical to SEQ ID NO: 6300
  Synthetic

SEQ ID NO: 6302 - protein, 174 aa, Artificial Sequence
  Synthetic
SEVDDVLRRLKELSERSEKTLEDIRDEAEKLSKESEDLLREVLRRSEKVNEDIRRLREKGVDKRDVAKVVEDALRESEDLIRKVEKRNEEVLRRVEELIKRVEDLNREILRRVDEELKSRRLEKLRREIEDNSRRVREVLKRLKENIKRNTDRVREALKRLEREHEEVLREVET

SEQ ID NO: 6303 - protein, 174 aa, Artificial Sequence; identical to SEQ ID NO: 6302
  Synthetic

SEQ ID NO: 6304 - protein, 183 aa, Artificial Sequence
  Synthetic
SIEEAITRLRKEVEDSNKRSEDVIRELHERDKESLEEVREIIKRLKDKVRTLLEEVDKRVKSERLERVRRLLERVDRVVDKVLRELKKLVEDSNELVKKVATESHKINEDIKKVVDDAARRIETEEILKEVLKRLRKLLEDNERVLDEARRRVEKTNEEIKEVLKRVAEEVDRLIKEVREEVE

SEQ ID NO: 6305 - protein, 183 aa, Artificial Sequence; identical to SEQ ID NO: 6304
  Synthetic

SEQ ID NO: 6306 - protein, 184 aa, Artificial Sequence
  Synthetic
SIDEIIEELRRRIEELRKEAEKIIRDSKKHLEDNKRDADRVIKESKEEVDKLLKEIEEAPISEELLRRVRDVIRRIEESTKKALEDIKRTIDEIKKSTDDALRTVREVIKRIRDLVDDVRKRIRTEELLEEVRKRIEDLLRELRDILRKLLERDKRLSKESERLVREMLREDRRLLDELRKEVK

SEQ ID NO: 6307 - protein, 184 aa, Artificial Sequence; identical to SEQ ID NO: 6306
  Synthetic

SEQ ID NO: 6308 - protein, 184 aa, Artificial Sequence
  Synthetic
SIEEIIRDLRRHIKENAEEAEKVIKESEDHLRENKKRAEDVIRRLEEELRKLAERVRRAPISEELLRRLEELIEELEKLVRDALRAIEKTIKDIEDSTRRVLEKIKETVKRLKELVDEASRRIRDEELLKRAVDAVRKLSEDSKRLVEEALRRDEELSKRSRDLVEEVRRRAEELLRRIEETVK

SEQ ID NO: 6309 - protein, 184 aa, Artificial Sequence; identical to SEQ ID NO: 6308
  Synthetic

SEQ ID NO: 6310 - protein, 178 aa, Artificial Sequence
  Synthetic
SSKDDVRRRMKEINERDKRLLDEVLRRLEKLIEELKRHTEEVERDADRIIEEIERMLRNGASEETAKRLLEELREKLEDVRRRDEKILEDIRRDVERALRESEKSLDELRRALEKVKDDGSVEERIIKEIRDLIRENEERNKEIVRRIEELLRELEKRSRDVIKRIREKLDRLRKRVE

SEQ ID NO: 6311 - protein, 178 aa, Artificial Sequence; identical to SEQ ID NO: 6310
  Synthetic

SEQ ID NO: 6312 - protein, 178 aa, Artificial Sequence
  Synthetic
SKVEEIERRIREEVTRSEKEDRDNVREIRKLVEELRRESKRILDESRRLVKRLIDEAKDLEELIRRIREMLKRSEENNKRIIDDLTRALEELEREHRENNKRLRELLRELEEKAKRIKDDEILKRIEEEVRKILEDSRRSTEESHEKVRRIITKIRKLLEDDERRNRKVVREAEEAMR

SEQ ID NO: 6313 - protein, 178 aa, Artificial Sequence; identical to SEQ ID NO: 6312
  Synthetic

SEQ ID NO: 6314 - protein, 178 aa, Artificial Sequence
  Synthetic
SKLEELLRRAREVARRLKEELERILKEVEDRVRKSEKEDEDNVKRITDEMRKLKERVPDLKELLDRIDEMLERLRKLHEDNNKRLRDEIKKLEDVVEEILRRLEKVLRELEEKVARVKEDRVIKRIEEDVRRVIEEIKRLLRELEEEIRRILDESRESTERSHRTARKIVEEVERAAK

SEQ ID NO: 6315 - protein, 178 aa, Artificial Sequence; identical to SEQ ID NO: 6314
  Synthetic

SEQ ID NO: 6316 - protein, 178 aa, Artificial Sequence
  Synthetic
SKMETIERRVEEAIRESEELNERDEERVKKVIDELKKLIDDIRRRLEEALRELKKVTDDGSPREDIDRKIKTVLRELEELIKRIRERIKEILRENEKTVRDDRRRNEELRAELKKLVDEGAVTEEILKKVRELIEETKRRTDDLHKKVKERVDDIKRRLDELLEEAKRALDEIRERVK

SEQ ID NO: 6317 - protein, 178 aa, Artificial Sequence; identical to SEQ ID NO: 6316
  Synthetic

SEQ ID NO: 6318 - protein, 178 aa, Artificial Sequence
  Synthetic
SAVEEIKRRLEEIIRDLERLIDDDRKRVEEMVKRIEDLIKKDEEDVREALKKLEEVVTRGEPREDIKRKIRELLARNRDTLRRIKEELEKILEENKESVREIEKKIEDAKRELRKLVEDGVLEEEILERADRLVKEIKEKLDRLVKTSEELIRRLEEELRRLHEKVKELMKRAEEKVR

SEQ ID NO: 6319 - protein, 178 aa, Artificial Sequence; identical to SEQ ID NO: 6318
  Synthetic

SEQ ID NO: 6320 - protein, 181 aa, Artificial Sequence
  Synthetic
SREDVLREIRRLVEETKKENEKILERLRRLVRTVERRNDEVVKKVRTLVKRLEEEIDKTVKDKDKVEKLRRELDKIRRKLEELARRSKEDLKRILEEVDRLSEEDKRKNDRVLEEAKKAIDNDVDLDELLRKLKEDLDRSKEELKEIEKRVRELLERNKRKTEEVEKEVKRDLDDIRRKLK

SEQ ID NO: 6321 - protein, 181 aa, Artificial Sequence; identical to SEQ ID NO: 6320
  Synthetic

SEQ ID NO: 6322 - protein, 181 aa, Artificial Sequence
  Synthetic
SEKEALDEVRKRVEDVRRDNKRILEESERLNRESRKRNRDILERLRKEAEDLKREIDETVKDKDKVKELDDRLKKVLKEVEDLVRESERDLERIHKRSRDLVRESERDLDRIEKEIKDAADRDVDLDKLLEDLERLLKENLDRLRKILEEDRRLNKENNDKLKEIEKRVRELLKDIKDKLK

SEQ ID NO: 6323 - protein, 181 aa, Artificial Sequence; identical to SEQ ID NO: 6322
  Synthetic

SEQ ID NO: 6324 - protein, 178 aa, Artificial Sequence
  Synthetic
KEVEDVLRKIRDLVRKNLEDAERVVEEAKRLIDENRERLREVLREDEELNREILKRLRELKDEDALRDLERKLKEVHDRTKKLIEDSERHLEEVLRKVEKVIKDSEKHLREVLDEVEKAGLDEEALKEVRRLIDELRKANKRILEEIRDLVRRLREENEEILRRLKRKNERTADEIRK

SEQ ID NO: 6325 - protein, 178 aa, Artificial Sequence; identical to SEQ ID NO: 6324
  Synthetic

SEQ ID NO: 6326 - protein, 178 aa, Artificial Sequence
  Synthetic
SEVEDVLRRIRELLEEIKRRLEDVRRRIKELLDRNRRESEDVLRRDKELNDEVRDKLRKRKDEKVLEELEREIKKIHDDTKRAVDRSREDNKRILDEVERAIEELERELERVLDEARKAGVEERMLKTVEDLVREVSKEVRRILEELRDEVRKSEEENRRILDKLEKENRKTAEDVKR

SEQ ID NO: 6327 - protein, 178 aa, Artificial Sequence; identical to SEQ ID NO: 6326
  Synthetic

SEQ ID NO: 6328 - protein, 178 aa, Artificial Sequence
  Synthetic
SEVEEVLRRIKELLDRNREELKKVRERIKRLLDRNREKSEEVRERDKRLNDEIKKRLDEDKDEKVLRKLKRLLEEVHKRTKEMADRSREDNKRILDEVEDVARRSKEDNERILKEAEEAGVEKRVLEEARRLVKKSEEDNRRILKELRELVKESERENEEILRELKKLNEDTKKRIED

SEQ ID NO: 6329 - protein, 178 aa, Artificial Sequence; identical to SEQ ID NO: 6328
  Synthetic

SEQ ID NO: 6330 - protein, 178 aa, Artificial Sequence
  Synthetic
DEVEEVLRKIEELIRENIKRAREVLEEDKRLNERNKRESEKVLEEDERLNREIEKELRKLKDEEVLRRLKEKIDEVHKRTREMFERSRDDNRRIHEKTRRAIEKSREDNKRILDEVRKAGLDEEVLRRIKKLIEESMEDNERILRDAERLNRESKERNERILKRLKKRNDETRKEVEK

SEQ ID NO: 6331 - protein, 178 aa, Artificial Sequence; identical to SEQ ID NO: 6330
  Synthetic

SEQ ID NO: 6332 - protein, 179 aa, Artificial Sequence
  Synthetic
SSAEEVKERSKRINEEIEKTLEKMLRESRRTNEEIKKTLKRLAEEAEKLLRDVERLVRAGVPKEDLKRLLKEIKERVEKLLRELEELIKRDNDRVEKALKDLRDLIKDDTDKVEDVRRRGDLDEDIIREIRELNKRTRDKIEEIIERIRKLNKETRDRIRKIMREIEKKIRDLAEEIRR

SEQ ID NO: 6333 - protein, 179 aa, Artificial Sequence; identical to SEQ ID NO: 6332
  Synthetic

SEQ ID NO: 6334 - protein, 179 aa, Artificial Sequence
  Synthetic
KSMEEARKKSKEINDRILDRLKKVLEESRKINKDIKDTVERLRERSEDINRRIKELVDSGRDKKDLRRLIEDDNTKVRKALEDLRELIRRDNERVKKVLRELRELIKRDTEEVEDVLRRGDLSEEIIKEIRKLNEETRKEIERIAREAEELNKRTADKIETIIREIEKLNKKLKDDIEK

SEQ ID NO: 6335 - protein, 179 aa, Artificial Sequence; identical to SEQ ID NO: 6334
  Synthetic

SEQ ID NO: 6336 - protein, 176 aa, Artificial Sequence
  Synthetic
DEVRELVKEIEELIERIERTLRKMTKDSRDLNRKINEKLKKVLEDSRRLNEEIKRTIDSNPEKKERARELLERDEELIRRVREELKRLLEEDNERIKEAEDRLARLLEEIERRIREIDVDESILRRLEKLLEELRKRVEDIIRELEKLNKESREEIDKIIREAERLTEETERRARK

SEQ ID NO: 6337 - protein, 176 aa, Artificial Sequence; identical to SEQ ID NO: 6336
  Synthetic

SEQ ID NO: 6338 - protein, 178 aa, Artificial Sequence
  Synthetic
DEMEELLERIRRLIREIDERLKEMLKRSRELNRELNERNKDVLRRIKELIDRIRRLIERDNDKKLVERLLEELERVIREDHKRVRKLLDENRKLSKELEDEARRLLKELEEVIDRVRRAGADERILRELKKLVDDLRRRIKKILDESKELLERSEKKADESNKELRKLVEELRKEADD

SEQ ID NO: 6339 - protein, 178 aa, Artificial Sequence; identical to SEQ ID NO: 6338
  Synthetic

SEQ ID NO: 6340 - protein, 178 aa, Artificial Sequence
  Synthetic
SRVEEIERRIRELIKRIEDRNRKMLETSRRLNEDINRRLRELLERIRKLIEEIEELIKRDNDKDTARKLLKEIEDLIRRLSEEAKELLDENRRLSEKDHREARRLLKEIEDLIRRAEEDGVDEKILRDLEELLKELARRLERSNEESRRLLEDSRRKMEKIIRELEKLLDDLRRKIEK

SEQ ID NO: 6341 - protein, 178 aa, Artificial Sequence; identical to SEQ ID NO: 6340
  Synthetic

SEQ ID NO: 6342 - protein, 177 aa, Artificial Sequence
  Synthetic
DEKEIDEEIERLVRDSKRRSRKVLRDIEELAKRVKEENDRVLEKLRKLIEDLKRKIDETIEDKDTVKRLTEKLETALRELEELSKENRRRLEEITKRVRELVRRDEEKNRDVERRVKEIPVSERLKEEVDRVIADSRRLNKEILDEVKRELDKLRKHLEDVLRRAEKMIRDIDEELR

SEQ ID NO: 6343 - protein, 177 aa, Artificial Sequence; identical to SEQ ID NO: 6342
  Synthetic

SEQ ID NO: 6344 - protein, 175 aa, Artificial Sequence
  Synthetic
SEVDKVREDVERLSARSEEKVREVLERVKRLLDKSKRDNEDVKRRVRELAERLRDLRRKGVPKEELKKRLEDIRREVEDLARRDKEKNKKILDEAEDLVKKLRDDNRRVEREVERAGIDKEVLDRIRRRIEENSKKIDDMVKKVRTLVKRSEEESERVLKELRDLMRDVERRIRE

SEQ ID NO: 6345 - protein, 175 aa, Artificial Sequence; identical to SEQ ID NO: 6344
  Synthetic

SEQ ID NO: 6346 - protein, 177 aa, Artificial Sequence
  Synthetic
SEVERVEKEIRDLSRKSNEDLKRILDEARELSKKSNEDTKRVLKETRDLLKEIADRLREVRDKRLKDRLREDLRRILERHKKLSEEDKRKNDEVLRDLRRKLEELKRRNEKVRDDVEKKGLDEEVKKRVEESLRENEKLLRTIAKEIEDLVRENRKVNEDVNREVEKLVRELEERIK

SEQ ID NO: 6347 - protein, 177 aa, Artificial Sequence; identical to SEQ ID NO: 6346
  Synthetic

SEQ ID NO: 6348 - protein, 183 aa, Artificial Sequence
  Synthetic
REVEELLKRIRELVKRNNEKTKRLLDESRRLNEEANRRLDKVLKELRDLAKRIKEELDEKGGEDERAKKRVEDMLRRLEELLREATKDSERMLKENRELVDRIREEDKRVLEELDKLVKEILERNKEDEDLEREVKKLLDENRESSERVIRESEKSLRDHAERTRKVREEIRKLLEELKRAVE

SEQ ID NO: 6349 - protein, 183 aa, Artificial Sequence; identical to SEQ ID NO: 6348
  Synthetic

SEQ ID NO: 6350 - protein, 174 aa, Artificial Sequence
  Synthetic
SEKEDIKRKLDDLLRRHREVSRESNRELKRLLEEHRRTSKRLDDEIKRLLREIEEAGASEELRRELEEIVTEVKKLIEEINRRLEDAVRKVHENNRKLDRELEEVVKTLRDLLRRNVDTETVRKEIEDIARRSKEKLEKNTRDVKRMVDRSKEELKRILKELEDAIREIKKKVD

SEQ ID NO: 6351 - protein, 174 aa, Artificial Sequence; identical to SEQ ID NO: 6350
  Synthetic

SEQ ID NO: 6352 - protein, 177 aa, Artificial Sequence
  Synthetic
SEKERILERLKELVERSNEKLERILRRSEKLFTDSNKELKDILDRARKLIEEIDDRIRKVKEKELKDELRKRLEEILKEARDLSEEDKEKSERVHRESRELSERDEEESRKVLEEVRSRDLDKKIRDDAERLITENKERNERVNKRDEDLLRRNRKENEELNRELERLVKEIREKLK

SEQ ID NO: 6353 - protein, 177 aa, Artificial Sequence; identical to SEQ ID NO: 6352
  Synthetic

SEQ ID NO: 6354 - protein, 177 aa, Artificial Sequence
  Synthetic
EEKERILETAKKLAEEIKRRAEEILKRSEELVRDSNKKLREVLEEARRLIKKIEDEIREIREDELKRRVREKLERILRRLRELSKEDLKRSEEVHRRSRRLLEELLEKLEEILRRLKSKPLDKEIEDEVRRLVREIEELLRDIERRDKELLDENRKLNEEVNRDAERLVRKIRKALE

SEQ ID NO: 6355 - protein, 177 aa, Artificial Sequence; identical to SEQ ID NO: 6354
  Synthetic

SEQ ID NO: 6356 - protein, 177 aa, Artificial Sequence
  Synthetic
SEVEELLRRIRELSKRSKDEIKRMLKEIRELSEKSKRDIERMLRRNEDLARKIKELIDRDNNDELVKRLNEESEKLAREARKRVERSIREIERLLEEIRRRVEESLRTLKEVLKEVEKNGVTEEIKREVEKLLEENRKLLEDLEEDVKRLIEENKRALEEVERESKRLNDESRERTK

SEQ ID NO: 6357 - protein, 177 aa, Artificial Sequence; identical to SEQ ID NO: 6356
  Synthetic

SEQ ID NO: 6358 - protein, 178 aa, Artificial Sequence
  Synthetic
DDLERVLKEIKKAADKIREDNKRTADKIRKRVKELDDETRDMLRRIRKLVKEIKERVRGREEARKVIEELKKLVDEVRKRNEKSIEELKKLLKEDRDLMRRVIEELEDLVRRLREEVRDDEALRRVEEEVERLIRDLRRVLKETSDRVRELIDKHRRLSEEVEKDVKRLIDELKKKTD

SEQ ID NO: 6359 - protein, 178 aa, Artificial Sequence; identical to SEQ ID NO: 6358
  Synthetic

SEQ ID NO: 6360 - protein, 187 aa, Artificial Sequence
  Synthetic
SEIEEILERIKKISEDSKRRLEDILRKAKKISDESRETNKKTLEDVRRIADEIRKRLEEAGGRDERDLRRLMKEVKERLEEMLKRDDELAKESIKILKDVLKELRELVKRSETELRRVIEELRRRVRDKDKLERVEREIRRLIKENKDIVERIERAIEELVRRNEKSVEDSKKDIKRLVDELDREAR

SEQ ID NO: 6361 - protein, 187 aa, Artificial Sequence; identical to SEQ ID NO: 6360
  Synthetic

SEQ ID NO: 6362 - protein, 180 aa, Artificial Sequence
  Synthetic
SEVERIKERIDKLVEENRKLVEEIEEEDRRLLEENREIVKRIEEEIEKLLRDLERRVKSEKAKEIRKKIKKARDELREVLKRSEEISKETIDRLKRLLEESKKELERLKRTLDEMAKRNEPEDVLRDILREIERLSKESKDRLKDLLRKSEELSKESKKLLKDILKKVEDLIREAREEAR

SEQ ID NO: 6363 - protein, 180 aa, Artificial Sequence; identical to SEQ ID NO: 6362
  Synthetic

SEQ ID NO: 6364 - protein, 184 aa, Artificial Sequence
  Synthetic
EEKERLKKSLEDLAKRIRDILRKHEEDSRRLSKEIRDVLRRHREASRKLVEEIKELIKSVRDEELVKELEKLLRELEKRSEDLLRELEKRLKELEDRSRDILRRLEELLRRLEERVKKALREVDGEEMLKRVLEELERIVRDIERRIKEASERIRKIVEDIKKRIKEADDRIKDIVREIAERIR

SEQ ID NO: 6365 - protein, 184 aa, Artificial Sequence; identical to SEQ ID NO: 6364
  Synthetic

SEQ ID NO: 6366 - protein, 177 aa, Artificial Sequence
  Synthetic
DEEEEALKDVERLLRRNEKLIEEHERRSEKLLRELEDVVRRHEERSKELLERIRERIKRLTDEDRVRDIERLMRELEEESRRTAKTARELLEELRRRSKETVERIEKSLEDLRRTVEREGVDEEVLKKLRKLSKESEDDIRKMSEEVEEIVRRIKRLLEEATRKLEELVKRIEERID

SEQ ID NO: 6367 - protein, 177 aa, Artificial Sequence; identical to SEQ ID NO: 6366
  Synthetic

SEQ ID NO: 6368 - protein, 177 aa, Artificial Sequence
  Synthetic
DEDEEAKREVERLLRENEKLIEDHKRLSEELVRRLEDLIRRHEETSERLLRELREIIKRQTDEKRVREIEDLLRRLKKRSDDTVRDIKRLIKELKDKSERIVREAEKSLKKLKEVVDRKGVDEDVLRELRDLSRRSKEEIKKMSEEIEKLARDILKRIREMTEEAKRIVKEIKDRIR

SEQ ID NO: 6369 - protein, 177 aa, Artificial Sequence; identical to SEQ ID NO: 6368
  Synthetic

SEQ ID NO: 6370 - protein, 186 aa, Artificial Sequence
  Synthetic
SEIERVLKELDEVSKKSLEEIRRMSEESRRLSKESIDRIREMLERAREKADRIRETIKREGGESEEARDRIKKLIDELRELLREVDERIKKSIEDLERLARETEERIKTSIRDLEEKVKEIAKRITDKDKLRRLRERVEELKKRNEDLLKEHRDENKRLIDENRDLVDKLRKTIKRLIDDLERRVR

SEQ ID NO: 6371 - protein, 186 aa, Artificial Sequence; identical to SEQ ID NO: 6370
  Synthetic

SEQ ID NO: 6372 - protein, 179 aa, Artificial Sequence
  Synthetic
SKVDELRKTVEKLLRELRDSLRRYEEESKRLLEELDDSLRRSKKTVEDLLREIKEILKRVRDEEVRKTVERVLRELKEILDRDKERVDRVKEENKRLLEKDRKTVEDVLRELEDLLEKIRKRPDDRAKERLERLVRKIKEDNKRSLTENERLVRKIKKENEDAIRRLKDVAKKIKEELT

SEQ ID NO: 6373 - protein, 179 aa, Artificial Sequence; identical to SEQ ID NO: 6372
  Synthetic

SEQ ID NO: 6374 - protein, 176 aa, Artificial Sequence
  Synthetic
SEKEELKKEIRRNLEENKDVLRRHEEENRRLKKRIKELLERHARTNKRLKEEIDRTIRDKDTAERVKRELDKLHKEAEELIREVLRRLDELHKTAEDIVRTSEKLLKEVEEELKDLDSRLLEELLRKLEKLSRDSKEKLKEISKRSKELVKRIERELEKMTKKSRDLVKKIKEEEK

SEQ ID NO: 6375 - protein, 176 aa, Artificial Sequence; identical to SEQ ID NO: 6374
  Synthetic

SEQ ID NO: 6376 - protein, 178 aa, Artificial Sequence
  Synthetic
SEVEELRKELERIVKETKDVAEELSRESEEVLKKSEENLRRLTEKSDDVLRRVAELIRSNRDTDTVVTEARDLLRRSDEHLEENLRRTDKELRDSDEKLKRLEEEHRKLSEEIKRRLDERGGVKELKERIERVNREVREEARKHHDKNRDIRRRVTELHKRHKERNEEIRRKVEEDAK

SEQ ID NO: 6377 - protein, 178 aa, Artificial Sequence; identical to SEQ ID NO: 6376
  Synthetic

SEQ ID NO: 6378 - protein, 178 aa, Artificial Sequence
  Synthetic
DEIEDLRRKVEKVVRDAEKVLRDLSRKSRKVHEDSRENVDRLLKEVEDVVKRVADLIRSNQDRDTVVKEAREVAKRIKEHLDRNLERVKKMMRDSDKELRDLLETIKRVVEEIKKRLEDKGGVEELKRTLEELLKRVEDLVRRHHEENKKLTDDNRRLHRRLRERLKEVLREVERRRD

SEQ ID NO: 6379 - protein, 178 aa, Artificial Sequence; identical to SEQ ID NO: 6378
  Synthetic

SEQ ID NO: 6380 - protein, 182 aa, Artificial Sequence
  Synthetic
SDVERIEEELRKLTEENRKLTETLKTELRKIRREVEKILKELEDRLRELSERVKDLIRKRNVPEDLKRKVDEIRKTIKTLLEEIERRVRKVEEEIKELLKDSNRKTERVIREIKRLLKDLGDKKEVLDDIRRKLKKLHDESKKTHRDILERLKEALKRLLELAERVLEELERRAEELRREIK

SEQ ID NO: 6381 - protein, 182 aa, Artificial Sequence; identical to SEQ ID NO: 6380
  Synthetic

SEQ ID NO: 6382 - protein, 182 aa, Artificial Sequence
  Synthetic
DDVERLEERLKELDKRNKELTKDLEDKLRKLTRDNRELLKKIEKRLEEVRREVKRLITERNVPERLEDKVREIEKEIRDLLDELRKRSDKVIRDIERLLEESNEKTERVIERIRRLLEKLGSLKEVAERIREELERLHEESKRLHEKILEDLERAHDETRRIVEDILRRLEKVARELKEEIR

SEQ ID NO: 6383 - protein, 182 aa, Artificial Sequence; identical to SEQ ID NO: 6382
  Synthetic

SEQ ID NO: 6384 - protein, 177 aa, Artificial Sequence
  Synthetic
DELRELIKTLREILERLLDRSRRLNDKLKEILERIERASKKMNDDDRRRVRRLEEEVRTEDLAREAEKTNKKTLEESEELIRRVEDELERVLDRSRTLIKEAKRIIEKLLDEIRKTVDSRRLEDVERVVEEAKRALERSLRENEKSVEDIKKRIRESVEENKKSVRDTLERLKRTLE

SEQ ID NO: 6385 - protein, 177 aa, Artificial Sequence; identical to SEQ ID NO: 6384
  Synthetic

SEQ ID NO: 6386 - protein, 179 aa, Artificial Sequence
  Synthetic
STEEEVRKRVEEIERTLRESLERNRETVERSEERLEELLRRARRVVEESKKRLDKEIKDERLLREVTDLNRKSLERIEELIKEADERNKRSLERSERIIRRAEELLRDVLRKAEELSDVTDEVMRDLIRKLEDILRRLKEESDRLNEEHKEILKELVRRLEEIIKEHREIVERILKKTR

SEQ ID NO: 6387 - protein, 179 aa, Artificial Sequence; identical to SEQ ID NO: 6386
  Synthetic

SEQ ID NO: 6388 - protein, 174 aa, Artificial Sequence
  Synthetic
DEEEEVKRLLDRIREEVKRLHDENKKRLDELRRTVDKLLRESERENKRVNDEVRKDGIPKEVLDELKEMSDRDREENERIVRDARKKIDDIERRSKKLLDDVEDALRRLEELLRRNTDVETLKRRIEDVLRRVEEESRRLNKELEDVLRRAKELVDRSKKKLEEVLRRVKEKAK

SEQ ID NO: 6389 - protein, 174 aa, Artificial Sequence; identical to SEQ ID NO: 6388
  Synthetic

SEQ ID NO: 6390 - protein, 174 aa, Artificial Sequence
  Synthetic
DEEREIEELLRTLTREVKRLLDESRKLNEEILRKVKRLHDENRKRIREVLEDVKRRGLPEEVVREVKRVLEEILRKSEKLLRDVERLSEEDKKRNEEIVDRAREVLKRVEELLRRNTDVETLKEEVKRALEEVEKRVRDSKRDLKRVAEEVEETSRRLNDELRKVREDVRRRAT

SEQ ID NO: 6391 - protein, 174 aa, Artificial Sequence; identical to SEQ ID NO: 6390
  Synthetic

SEQ ID NO: 6392 - protein, 188 aa, Artificial Sequence
  Synthetic
EEAERIADEARKVEEDVRRMVEESKRKLKKVLDDSKRLIDELKRRLEDIRRKVAEMAKRLRDDRDVVREVVRRVEELLDDIRRRLEDIHRRSRELSERDKEENRRVLERVERVLRELRKKLEDVKDRIDERVLRDIERLLEEIRRELERLARESEKVNERVNREDRRLLEEIRELLERIRKELEERTR

SEQ ID NO: 6393 - protein, 188 aa, Artificial Sequence; identical to SEQ ID NO: 6392
  Synthetic

SEQ ID NO: 6394 - protein, 179 aa, Artificial Sequence
  Synthetic
SLKEEVDELLRRIEEEIRRLADKSRRTNERVKEEIDRLARESEETNKKLKKKIEDIDVDEEIVRDARRLLEESHRRNRKLLEDAKKLLRESHEKNKKILKDAERLLDEIRKRAEANKDKDAKIVKKLLEDLKRLLKEVKELMERINKETKELLERVAREVKRLNTDTERLLKEVEDRVR

SEQ ID NO: 6395 - protein, 179 aa, Artificial Sequence; identical to SEQ ID NO: 6394
  Synthetic

SEQ ID NO: 6396 - protein, 176 aa, Artificial Sequence
  Synthetic
SEREEIEELSRRSRRSLEELKKEIRKVNERNKRLLEELEREIRRVSKESRDRLRELRRRLSEELAKRVDEVNRRVKREVEELVRRNEEVDKRSKEVVEKLAREVEKMNKDAKDLVDRNVDTKDLIRRLRELTRTIERRATELIKRLEEVSREIAERVRKLIKELRDMTRKIDEDAR

SEQ ID NO: 6397 - protein, 176 aa, Artificial Sequence; identical to SEQ ID NO: 6396
  Synthetic

SEQ ID NO: 6398 - protein, 182 aa, Artificial Sequence
  Synthetic
SEVEKLLERLKKILEEIARLVDRSNTEDDKILRKAEEDVRRLLDKLKKILERAAELLARNEEKERLIEEIERRLREVLKEVRRLLKKLKEDNKKSLEDNKKLLDDVRKTLDDLLRDAERTVRDEKLRREIRKLVKELKETIKRLEKKSRDTVKRTEDELRRLEEEAERLITELKERLDELRK

SEQ ID NO: 6399 - protein, 182 aa, Artificial Sequence; identical to SEQ ID NO: 6398
  Synthetic

SEQ ID NO: 6400 - protein, 175 aa, Artificial Sequence
  Synthetic
REDEEMLKDLKRVLEDAERVSRDTLRELEDAVRRLHELSEDTLDKLRKVLEEADRLIRSNQDKDEVVKRLEDILRKILEETKRIIDEARKILKKVEDDTRKLIKDVERLIERIKKDLEGNEDVRRILERVRKELKRLLEENEKLLRRVEKELEENERRNEEEIRRVKKTVEERAK

SEQ ID NO: 6401 - protein, 175 aa, Artificial Sequence; identical to SEQ ID NO: 6400
  Synthetic

SEQ ID NO: 6402 - protein, 181 aa, Artificial Sequence
  Synthetic
SRVEEVLKENRDTNEELKDTVRKILETNRRTLERAEEEVRKILEDLRDIARKIEEMVENGASEKTLKDLLDELRRTVEEVLRKLEKLLRKDEEDVRRALEKLEKLLRDDERRVKEVEDEIKDKEMLERLRRSLEESKETVKRLLEELRKSLEKSKRDVERLLKELEDLLRELEKKVDDRRR

SEQ ID NO: 6403 - protein, 181 aa, Artificial Sequence; identical to SEQ ID NO: 6402
  Synthetic

SEQ ID NO: 6404 - protein, 178 aa, Artificial Sequence
  Synthetic
DEAREILTRIRKLLEEIRKEAEEVSERHKRLVDELDKEVKDINKRAEDLLRELAEIVKRGDVDKRRIEEEVRKINEEHKDRVRRIADRVKKINKELEDIVRELKKKVEDVLRELARLIKDVDEKEVRKVLEEIKRVLEELKRHAEDNLRRAREVLKKLADEAKRVNERSEELLRELKK

SEQ ID NO: 6405 - protein, 178 aa, Artificial Sequence; identical to SEQ ID NO: 6404
  Synthetic

SEQ ID NO: 6406 - protein, 178 aa, Artificial Sequence
  Synthetic
SMADEILRELKELTEEIERRVREASREHRERLEKLRREVREINKELKRRLDELREIVERGEVDKEEITRTVEEINKEHKELLKRIEERVKKINEDLRRLLEKLTDESRRVLERLKRLLKDVDKDRVEKILRENKERTDRLRRHIEKNLEDARDLLRKLKEEVKRVNEESEKSLRDLRK

SEQ ID NO: 6407 - protein, 178 aa, Artificial Sequence; identical to SEQ ID NO: 6406
  Synthetic

SEQ ID NO: 6408 - protein, 181 aa, Artificial Sequence
  Synthetic
SLEEDIRRILDENRRSTERIKEEIREINERDKRSLEDIERRIRKVLEDLRKLLEDLAREGLDEEIRRRVKEILDEIRRLLEELKRRVEEINKRTTDLLKTLERESEKILRRIEDLLRKLKDIEEAVRKILKEVRDVNEELKRRVEKILEDIRDANRRLRETVEEIIRRAKEAVDKLRDEVR

SEQ ID NO: 6409 - protein, 181 aa, Artificial Sequence; identical to SEQ ID NO: 6408
  Synthetic

SEQ ID NO: 6410 - protein, 179 aa, Artificial Sequence
  Synthetic
SEKERVDDLLRRVDELLKRSKREVEKLLEDNKRLLERIERENRRLTKELEDKVRRLKEKGLVDDEVLKEAEKLLEENNRKSKEILEENKRLLEELKKEVEEIHRKTKKVLDELADIVRRGERDVEEIAKEIRDVLREHKELIDEIRKKAKKISDKSRKLMEELERHLRRVIKELDEKAR

SEQ ID NO: 6411 - protein, 179 aa, Artificial Sequence; identical to SEQ ID NO: 6410
  Synthetic

SEQ ID NO: 6412 - protein, 179 aa, Artificial Sequence
  Synthetic
SEEEEVEELLRRNRKKAEEVDREIDRLLKEVEKLVKDSRKRIEDLLRRAREKVEDLRRKGDVSEEVLKRAEDLLREIEEKVERIHETTKKVLEDLKRRVEEVLRDNERLIRELEKIVRAGKRDVREISEEIERITRETEDRIRKIAEEIRRVLKRHKELIEELEKEIRDVLKKLDDDVR

SEQ ID NO: 6413 - protein, 179 aa, Artificial Sequence; identical to SEQ ID NO: 6412
  Synthetic

SEQ ID NO: 6414 - protein, 178 aa, Artificial Sequence
  Synthetic
SEIEKLLKDLRDLLKKSEETVREMLKRLEEIVRRAEEDHKRLLEKLKRLLEKLRRDVRTDEVIKRAREDIERVLREIRKLNKEVEDEIRKIIEDLEDILRRSHETIERILREIRRRSRREEVRKRLEDLADEVDKRNRDIERKIRELMKRAKEVSERLNKELEDLAREAEKLLRELKK

SEQ ID NO: 6415 - protein, 178 aa, Artificial Sequence; identical to SEQ ID NO: 6414
  Synthetic

SEQ ID NO: 6416 - protein, 178 aa, Artificial Sequence
  Synthetic
DEIEELLKRLRDIVRKIREDHERLSRESERINKDARRRHDEMLRRLEELLRKVEKEVRTEELIKRVEEEIRRIIEEARRINEEVDKRSEDVVRTMKELNDRVDKDIDRVIDELRKRIRDEKVKRDIERIRKEVKEESKRLNDHIRDNERRNKESSEELNRRIKKIADEVRELLEKLKT

SEQ ID NO: 6417 - protein, 178 aa, Artificial Sequence; identical to SEQ ID NO: 6416
  Synthetic

SEQ ID NO: 6418 - protein, 175 aa, Artificial Sequence
  Synthetic
REEERLRELMDESRKRIEAVEKRARDLKRKSDRLIEDAARKIKTILDKIRKLIEDLRTDERVLEKIRKLLEELEKEARDVLERWKKLLEDSLRELEELLKKWRELTERLKEELDAGEKDLKDVEKKIREVNKTVKEEVDRLVEKNERLNDEARRVVKELLDKVERMLEEVEREAR

SEQ ID NO: 6419 - protein, 175 aa, Artificial Sequence; identical to SEQ ID NO: 6418
  Synthetic

SEQ ID NO: 6420 - protein, 174 aa, Artificial Sequence
  Synthetic
SEKEDMARKIKELIDRDRERIERVIREIEKLIKELRDHNKRVLETDKRLLDDLKRVADDGIDRSELERLAEEIIRHTERVTERDKRIVDEIRKKIKEILEDNERTNREIRDELEKAPKDEDLRRLKEEVDRVAEETRRLLEEIKKKVDKVVREVETSNRRSEEEVRRLLDEIRR

SEQ ID NO: 6421 - protein, 174 aa, Artificial Sequence; identical to SEQ ID NO: 6420
  Synthetic

SEQ ID NO: 6422 - protein, 174 aa, Artificial Sequence
  Synthetic
DEKEEAARRVEKLITELRKHNEDVLRDIKRLIDELRRHNEEVLKRDRELLERLRKVAEEGVDKDTLDELAKRIKDHTDEVTKRDRKILKDIKKKIEEVSRRDEKIFREIERVLAELPKDKELDDLRKRAEDVLRDLRRTNRKILEDVRRVIEELERSNERSLTEVERLLREVRK

SEQ ID NO: 6423 - protein, 174 aa, Artificial Sequence; identical to SEQ ID NO: 6422
  Synthetic

SEQ ID NO: 6424 - protein, 174 aa, Artificial Sequence
  Synthetic
SEKERVLTELEKILEELRRRVEEILKEIEKLIEELRRHNERALERDKKLLEELKEVRERGVPEKEIEKLLKELEKHTRDVTRRDREIMKRIEKRIEDVKDEIRRMIKKARDRVRSLPKDRELEKVKEKLDRLMKDIKEKLDRVKEKVRRVLKELEESNRKSEKDAKELIDRIRK

SEQ ID NO: 6425 - protein, 174 aa, Artificial Sequence; identical to SEQ ID NO: 6424
  Synthetic

SEQ ID NO: 6426 - protein, 178 aa, Artificial Sequence
  Synthetic
SEVEDLLRDIERLIEESRRLVERLLERLEELIRRHTRLVEELIRELERMLKKVADEVDKRELIERAEEEIRKLVKDLRRINDEANKRVEKLVRELEKILKESHDKVDEIRKRVEKDIRRDEIRTEIKKVVDKAREVNKRIKELIDKIKREAEENSKRANELIERITREIRRLLEDLRR

SEQ ID NO: 6427 - protein, 178 aa, Artificial Sequence; identical to SEQ ID NO: 6426
  Synthetic

SEQ ID NO: 6428 - protein, 186 aa, Artificial Sequence
  Synthetic
SELEELRKRVKDLIRETKKLVEEVAEKVERLNKETKKLLEDVARIVEELIRRAEEVAERIREDEKLKRALERLEEEIRRLVEEAERLLRESHEKNERLVREAKELLDRSHELAKELIEDAKRKLKDLEEVLRDIERLAREIEKVNREAEERIRRLKKKSEETNERVKRAIDKLAEELRRVLEEIRR

SEQ ID NO: 6429 - protein, 186 aa, Artificial Sequence; identical to SEQ ID NO: 6428
  Synthetic

SEQ ID NO: 6430 - protein, 186 aa, Artificial Sequence
  Synthetic
SELEELAKAVEKLLEDLRRMTREVEEKVKEINERTKKLLKDVAERVKTLLREIEELAKKIKEDKKLDDALRRLEEKIRKLVEELKRLLDESHKRNRDLVREARKILDDIRRRAEKLIRDAEEKLKELREVLKAIKELMERIKKTLDEIRKRIKELEDESEKTNRELKKKIEDLKRELEELLREIKR

SEQ ID NO: 6431 - protein, 186 aa, Artificial Sequence; identical to SEQ ID NO: 6430
  Synthetic

SEQ ID NO: 6432 - protein, 182 aa, Artificial Sequence
  Synthetic
SEIDEVIKTLEKLLEDLRRELEELSRRNKKVLEDILRRVKRLSDENRRLLERIKRTVDKRGTTEEILEELKRAVEKTRRDAEKLLDEIRRATKKLRDDIEKLKEDIERIERDAKDKIDKLSRDEKIEKKVKEVRERVKEVLERIERLVDENRRENKEVVDRIKKLLKENEEEVREVLKRIRD

SEQ ID NO: 6433 - protein, 182 aa, Artificial Sequence; identical to SEQ ID NO: 6432
  Synthetic

SEQ ID NO: 6434 - protein, 182 aa, Artificial Sequence
  Synthetic
SEIDDLVKKNKELVKKIREDVERLSEENKEVLKDIERKVRKVSEENDRLLEEIKDTVRKRGTTEDILRKLKRALERTTEEIKKILRELEEADKRLDKAIEELKDRIRRVSEDMRDKIEKIRRDRKVEKKVRENKKENEDVLRDIERLVKENKDRNREVLKRIEDLLRKNAERVKRVADEIRR

SEQ ID NO: 6435 - protein, 182 aa, Artificial Sequence; identical to SEQ ID NO: 6434
  Synthetic

SEQ ID NO: 6436 - protein, 176 aa, Artificial Sequence
  Synthetic
KEVEDIVDDVRRVIEELKRKVEEVSKKNEKLVREIEERVERISRRNKKLIKELKEIVDRGDRDKREIREELKRISKEMRDLARKLVKELKDVNRELDEDIREIDREIEEVLRELAKKLGKEELLRKIARDLEKVREEIKELVKENRKTNEEVVRRIEKLAKENDDENRKVLKEIED

SEQ ID NO: 6437 - protein, 176 aa, Artificial Sequence; identical to SEQ ID NO: 6436
  Synthetic

SEQ ID NO: 6438 - protein, 176 aa, Artificial Sequence
  Synthetic
DEVERIVEDIRRLLDEVRREVEKVSRENKELVDRVREKVKEISKRNKKLAKDLTDLVREGSRDKRELERDLERINEEMRKLIRDLERELREIDKRMDDLVREIEEKLRRIIEKLERELGDKELLDRIKEEIERVIKEIRELVEENKRTNEEVLRRIRELARRNEEENKRVLEDIRR

SEQ ID NO: 6439 - protein, 176 aa, Artificial Sequence; identical to SEQ ID NO: 6438
  Synthetic

SEQ ID NO: 6440 - protein, 183 aa, Artificial Sequence
  Synthetic
SVEELIKEVKDRLRKVLREIEELIRENEEENRKNVEDVKRTADKLRRDLEKVVDEIDKRVDSDKLERLRKKAEEIIRTLDRMLEESKKINREIDERLKRAADRLRRRVEKVIREVDRVAREVKEKEVIDKVVKRVEDLVREIKEEVDKISEENKELVKRDTRRVEEVRERIRKLVEELRREVT

SEQ ID NO: 6441 - protein, 183 aa, Artificial Sequence; identical to SEQ ID NO: 6440
  Synthetic

SEQ ID NO: 6442 - protein, 175 aa, Artificial Sequence
  Synthetic
SEIDRVIEKSDKTNEEIKRDVDRAVRRSEETLKRIRETVEEIVKTVEKLIRDLRRRVEDKGQDKEIEEIVKKIKKDIDDAKEELRKLAEEDKERVKAVKKKVEDLVREDKEEIDRRLTDKDKAKELRDRLERSLREIAKKIKKVLDDTDRVLRDIERTIEELKKRLREVLERVRK

SEQ ID NO: 6443 - protein, 175 aa, Artificial Sequence; identical to SEQ ID NO: 6442
  Synthetic

SEQ ID NO: 6444 - protein, 175 aa, Artificial Sequence
  Synthetic
SEIDDVIKKLKDLIEELEREVKEMSDENKRLLEEIEERVKEAIKRSKDTLEEIADRVRKKGPDKEIEELIREDKKRIKDVLKELRELVARTKKRVDDVTKKLREEARKIEEEIRRRLSDKDKATKIEKDLRDVLRKIEKTMEDNRRENEELLKKVEEEVRRLEEETEKVLRDLRR

SEQ ID NO: 6445 - protein, 175 aa, Artificial Sequence; identical to SEQ ID NO: 6444
  Synthetic

SEQ ID NO: 6446 - protein, 179 aa, Artificial Sequence
  Synthetic
SEVDEILKRIEELIRRIEDEVEKMIRESEDTIRRDEKEVKDAVRELADLIRRIEKRVRERKDSREEVEKLITDIADALRRFLERNEKSVTDDLDKNRRLLEKVERLIERIERVIREARKRNIDEKKVREIDKRLKDALREIRKLIERSKEESRRALKRSRELMKRLEEELRRVLKEIRD

SEQ ID NO: 6447 - protein, 179 aa, Artificial Sequence; identical to SEQ ID NO: 6446
  Synthetic

SEQ ID NO: 6448 - protein, 179 aa, Artificial Sequence
  Synthetic
DEVDKVLKRIKELIDEDKKEVEKVIRDSKRTLREDEERVRRAAKEVEDRIRDIEDIVRRRKEAREDVEKLVDDLRKKIKRLLDENEKSFKDDERKNEEVVRRNEKSITDIKRVIKEAEDRNLDKKKLEDIDRELDRVLEESKKEIEKSKRESEEVLKKSRDLVKRLAEELKRVLDEIRR

SEQ ID NO: 6449 - protein, 179 aa, Artificial Sequence; identical to SEQ ID NO: 6448
  Synthetic

SEQ ID NO: 6450 - protein, 179 aa, Artificial Sequence
  Synthetic
SRVEEVLKEIDKLIKEIKERVKRLIEESKRLNREDEERVRKVIEESKKTLEEIREVMERNKESREELEKLIEDDKEKNRKAKKDNDDSLRDDKRKNDEVEKEVRKRAKDIERAIKEIAKRNVDKDLLREIERRLREMLKEIEERIRRSKREVEESAERSERLIRKSEEDSERVLRELRR

SEQ ID NO: 6451 - protein, 179 aa, Artificial Sequence; identical to SEQ ID NO: 6450
  Synthetic

SEQ ID NO: 6452 - protein, 179 aa, Artificial Sequence
  Synthetic
DEVERILERIEELLRKIRKDVEEAIKDSERLNKDDLKRVRDAVETLRELIRRIEEEVRRRRESREEVEKLIREIEERLRRLLEENEKSVREDKERNRKLLKEVEELVKTVKDLIEEAKKRNIDKDLARDIDEKVRRLLEDIRRLVEESEKKVDESTEESRRLVTELERELREVLKRIRD

SEQ ID NO: 6453 - protein, 179 aa, Artificial Sequence; identical to SEQ ID NO: 6452
  Synthetic

SEQ ID NO: 6454 - protein, 178 aa, Artificial Sequence
  Synthetic
SRVDELVKEAEDLLEEAKKANAESIRRIEELLKRVAEEIRRLSEEDKKLVEEVRKRVKDKDAIDEVRERSRESLDRIRRIIDEIRRRAEKLLREDEELIRRLAEELRKLLEKLKRELRDKRAEDKLRRVEEDARRVLEDLKRTLKRLEEEVRRVLEEARDILRKNAEENRKVLEDLRR

SEQ ID NO: 6455 - protein, 178 aa, Artificial Sequence; identical to SEQ ID NO: 6454
  Synthetic

SEQ ID NO: 6456 - protein, 178 aa, Artificial Sequence
  Synthetic
SRVEELVEELKRLLRTVEKENEDSIREIERLLREVKRRNEESSREDEKTIRTVRREVRGEELIEEVRDRSRKSLDDDRKLIEDIKRRLEKLLREDEELIKEIRDRARRILEKIKRELREKRAEEILERLRKEAEEVLKKLEDTLRELRKRAEKVLRDMEETLKKNKKDNEKVLRDLRK

SEQ ID NO: 6457 - protein, 178 aa, Artificial Sequence; identical to SEQ ID NO: 6456
  Synthetic

SEQ ID NO: 6458 - protein, 178 aa, Artificial Sequence
  Synthetic
SEVDKIIKEIEDLLDEARKTNEKSSRDDKRLVEEVKELNKESSERNKRLVKEAREKIRGDEMIEKVRRDSEELLKDDRRLIEEVKRRSEKTLKEDKELIEDLARKLKKLLDDLRKDLKDKRAEDKIRRIAKDAEDVLRTMEKTLRDNERENREVLKELEKTLRENEKENEKVLRDLKR

SEQ ID NO: 6459 - protein, 178 aa, Artificial Sequence; identical to SEQ ID NO: 6458
  Synthetic

SEQ ID NO: 6460 - protein, 172 aa, Artificial Sequence
  Synthetic
EEIERVEEKVRRLIKELEDELRKIEERIERLLRRSRERNKEISDRNRRLLEEMRRSDRDKDVLRKRLEDIDRELRKLLKDDEDLMREIKRELRELLERLRKVAEDIRDEIRKDLSSEEKARELEEELRRAVERVDRKIEELEERLDRVLKESRDTVDENEKRNEKVLRELET

SEQ ID NO: 6461 - protein, 172 aa, Artificial Sequence; identical to SEQ ID NO: 6460
  Synthetic

SEQ ID NO: 6462 - protein, 172 aa, Artificial Sequence
  Synthetic
KEIEDVVETVRRLLRTSEELNERISRDNEKLLRDSEKLNREISERNRKLLKDLKDSDRDKRVLEEEARRIDEILRELLRRDEELAKRVNDRLKDLLRKDEELNRRVLDRIRKDLSMEEAARDLARKLKEVHDRSRETIKRNEDKNRRVLEESKKTARENEERNKRVLDELRK

SEQ ID NO: 6463 - protein, 172 aa, Artificial Sequence; identical to SEQ ID NO: 6462
  Synthetic

SEQ ID NO: 6464 - protein, 177 aa, Artificial Sequence
  Synthetic
SEEDRVLEDVERLLRELKKETDRIAEKNKKLNEDVTRETEEIVRRVRELLERLLDLVRKVRDDRLRKELEERLKEVVDRVRELSKTTKRKLDEITKDTRRASRETEERLKKIVDEARKRIDSEKAREVEREVRRIREEDERILRELEERNRENKKRDEDILKELEDRAERVLEEIKR

SEQ ID NO: 6465 - protein, 177 aa, Artificial Sequence; identical to SEQ ID NO: 6464
  Synthetic

SEQ ID NO: 6466 - protein, 177 aa, Artificial Sequence
  Synthetic
SEEDRVLKEAKDLLEEIERELDEVAERNKELNKRLTDETRKIERRVRELLRELKDKVRKVKEDRMRERLEEELEKIVRELEEASKETEKKLEEITRETRELIKRLEDKLRKVEKELREKIDSRKLEKLEKEVREVEKRIRDILKKLEDDNRANRKRDEDIIDELRKEADRVREEIKR

SEQ ID NO: 6467 - protein, 177 aa, Artificial Sequence; identical to SEQ ID NO: 6466
  Synthetic

SEQ ID NO: 6468 - protein, 175 aa, Artificial Sequence
  Synthetic
SEVEELVRRVEKSNRDIEEMVKKIDKRNRDLLRKIEKDLREADRRNEELLREIDDLVRRGTDKRDLERLIRRVTRELEDMVEKLERLIEEVSKELEDAARELEERIRDSLRRVKEAGIDEKLLKEVEDRNRESAKEVKRLADENRKANEELKRRVEKLVRDNRRKNEELKKKVKD

SEQ ID NO: 6469 - protein, 175 aa, Artificial Sequence; identical to SEQ ID NO: 6468
  Synthetic

SEQ ID NO: 6470 - protein, 175 aa, Artificial Sequence
  Synthetic
REVEELLKEIRKRIEDVRRRVEEIDRRNRKLLKEVEERLEKVRREVEKSNTDIKELAERGTDKRELAKEIKKSRERVERLVRELRRRLKRISDELEKVARDLKRKLEEILDRAEKAGIDEDLLRRVREEIERVIREVKRLLEENKKRNDEVRKRVEDIVRRLEEHHRELKRRVEK

SEQ ID NO: 6471 - protein, 175 aa, Artificial Sequence; identical to SEQ ID NO: 6470
  Synthetic

SEQ ID NO: 6472 - protein, 172 aa, Artificial Sequence
  Synthetic
KDIEDILKESEKTNREILKRAEDASEENERINKRITDRVDRVRKEIERLLEELTRRDEDREELDRVLKKIEDDLKKAMEELRKLIKELDERLEKVLEELERLIRRDREEIERRLRVKKLVDELRRRVEETLKRLRKLIADNREKNKDNLRRIEEEVKKLEEEIKKIKDEMKR

SEQ ID NO: 6473 - protein, 172 aa, Artificial Sequence; identical to SEQ ID NO: 6472
  Synthetic

SEQ ID NO: 6474 - protein, 172 aa, Artificial Sequence
  Synthetic
KELEDIARESEKTNRDIKRRVDEVRKTIEDLLRRIDEEVKRAAEESKDTNRRIREEDRRKEEVEKLLRDDNKRIDDMLERLRKLLEEVERRLDKALKDLEKLIRDDKERIDRLLRSEDLMRKLKREVEETDKEIKDIIRRLKEEIEKIKRKIEEIIKKLKKENEDTRREADK

SEQ ID NO: 6475 - protein, 172 aa, Artificial Sequence; identical to SEQ ID NO: 6474
  Synthetic

SEQ ID NO: 6476 - protein, 172 aa, Artificial Sequence
  Synthetic
SDIDDILRESRKINKEINDTVTEMMKRSKKTNDEIREKVKEVREESEKTNEEIRREPRRKEEVRELIKRDKERIDKALRELRELIKKDEEEIKRALRDLERLIRENRERIKKLLKDEKLVKELEDELRKSEERARRIIERLKEELKKTRKEIEDIIRELRKKLEDTLRDVEK

SEQ ID NO: 6477 - protein, 172 aa, Artificial Sequence; identical to SEQ ID NO: 6476
  Synthetic

SEQ ID NO: 6478 - protein, 172 aa, Artificial Sequence
  Synthetic
SDIEKILRESKDINRRINERVDRVVERSKKTNEDILKKVKDAAEESKKTNDDIRKSPDSEEDVKRKLDDDNRKIRKAMEELKKLLEDDERDVRRALEELRKLIEDNADDIRRKLKVEELVRELRRLVEESLKRIEKIIKDLEELIKETKRRLEEIIERLEKKNEDTEREARK

SEQ ID NO: 6479 - protein, 172 aa, Artificial Sequence; identical to SEQ ID NO: 6478
  Synthetic

SEQ ID NO: 6480 - protein, 172 aa, Artificial Sequence
  Synthetic
DEIREIVKESKRINEEINRKVEEVVRRSEKTNEDIRDTVRRLVRESDETNRRIEESPQDREEVKKAIKDDERRIEEALEELRKLLKEDNDLIEKAARELEELIRRNKKRIEDLLKDEDLVRELRKEVKRSEDRIRKIIRDLDELNRRSKEDIKRKIDELRKRVEETKRRVTK

SEQ ID NO: 6481 - protein, 172 aa, Artificial Sequence; identical to SEQ ID NO: 6480
  Synthetic

SEQ ID NO: 6482 - protein, 172 aa, Artificial Sequence
  Synthetic
DDIEEILKDVKRLLDEILAKVKKASDDNKRILDEIERKVEEMVRRSEKTNEDIRRSDRRREEVRKLLDEDNRRIEEAFKELDELIKRLDKTLTDLMRDLERLIKEVKDEIDKKLKVEELVRELKKRVDEIKERARRLIEENRERNKEIKERAERIIERLRKINEDTKREAEK

SEQ ID NO: 6483 - protein, 172 aa, Artificial Sequence; identical to SEQ ID NO: 6482
  Synthetic

SEQ ID NO: 6484 - protein, 172 aa, Artificial Sequence
  Synthetic
DEIEDIVRRVKKLIRDLEERVKKLEEDSDRTNERIRREAEKASKRNKEILDKLRKSDRRKEEVREVIKTLDEELKRVAKKLRELLKKDNEEIDRAAEELKRIADEIKEAIDRLLKVEELVKELRKELEEVKEEIRKIIEELKRRNDKSRRDLERLIRDNEDKNRRLKKEAED

SEQ ID NO: 6485 - protein, 172 aa, Artificial Sequence; identical to SEQ ID NO: 6484
  Synthetic

SEQ ID NO: 6486 - protein, 172 aa, Artificial Sequence
  Synthetic
EEIERIIRESEKINKEINRTVKEVEKRSEETNRRIREELKRISKRNKEILDRLRKEPRDKEVVEREIRKLDEELKRALEELKRLLEDDNRKIEEAMRRLEKLIRENEDRIRRLLRDEKEVEKLKRKVEKSEEDIRRIIEKLREENKRSEEEVRRLITENEKRNRKLLEEAKK

SEQ ID NO: 6487 - protein, 172 aa, Artificial Sequence; identical to SEQ ID NO: 6486
  Synthetic

SEQ ID NO: 6488 - protein, 172 aa, Artificial Sequence
  Synthetic
SELEKIAEDSERINKEINERVKRISDENKRILEEIEKAVEEASRDNKRILDELRKSPRRREEVKRVIEELDKRLEDALRRLRELIKELDDRLRKALEDLRKLIEDNEREIRKLLKAEELVRELERRVDESRKRAEDLIRDNKKKNDEARRRVEELIRRNREENRRIAEEARK

SEQ ID NO: 6489 - protein, 172 aa, Artificial Sequence; identical to SEQ ID NO: 6488
  Synthetic

SEQ ID NO: 6490 - protein, 179 aa, Artificial Sequence
  Synthetic
SDAERIMRESEELNERINDVVRRVAEESKRLNDRINDVLREVSKRNKDLIKRIKEVVDRNPEKKEEIKRLIDKLDKVLEDVERRIRKLIEDDKRRIEEVKRRLERLIKEDKRKIDEARKEGVEERIIERLDRLTKKSLEELKRIIEDLKRRTKESEDRARELIKRNREENKRLLEEAEK

SEQ ID NO: 6491 - protein, 179 aa, Artificial Sequence; identical to SEQ ID NO: 6490
  Synthetic

SEQ ID NO: 6492 - protein, 179 aa, Artificial Sequence
  Synthetic
DEAERIREESEELNERINREVDKMIDEDRKLNEDIRRTVEEMVREIKELLDRIRKVLEENPEKKEEIEKLIRRVKEKIRKAKEDLERLLRELEDRNRKVKKKLEDLIREDEERIRRAEEAGVDKEIIKELRETTERSRKRLEELIRDSEEKNRRTEDELEKIIRELDERLRRLEEEARK

SEQ ID NO: 6493 - protein, 179 aa, Artificial Sequence; identical to SEQ ID NO: 6492
  Synthetic

SEQ ID NO: 6494 - protein, 179 aa, Artificial Sequence
  Synthetic
DEAEDIARKSRELNERILRRVKEMIDEDRDLNREIEKTLRRVSERNRELVEEIKREVERNREKREEVEKLIKRLDDELRRILEELTRRLRELEKKNEEVRREMEKLLKEDRDRIRRAEEAGVEERIIEELRRLTEDTKRRADKLIKDSEDENRKTLRRARELIEENRDRNRKLEEDVRR

SEQ ID NO: 6495 - protein, 179 aa, Artificial Sequence; identical to SEQ ID NO: 6494
  Synthetic

SEQ ID NO: 6496 - protein, 179 aa, Artificial Sequence
  Synthetic
DEVREIVKRSDDLNDTIREVLKRVADDSRRLNEEIRRKVTEASRENEELIKEIEDRARKNPEKKEDLRRLVRELDEKLKEVKRDLERLIEEDKRKIERVLEELRRLVEEDRKRIDEAREAGVDEEIIKRLRDRTKKTLDEVRKIIEDLKDESRKTSEELRELIKRNKEKNDELLERLER

SEQ ID NO: 6497 - protein, 179 aa, Artificial Sequence; identical to SEQ ID NO: 6496
  Synthetic

SEQ ID NO: 6498 - protein, 179 aa, Artificial Sequence
  Synthetic
SEAEKIERESRDLNRRIREVVERASEDNERLIREIRKRLEEVVRTIEKLIRDILERVRKNPEKKEEVKKLIDDIRREIDRIKKELEELVREADKRLEEVLERLERLLEEDKRRIDEARRAGVDEEIIKELKKITDKTRRELERLIDENRKRNEELLKRVEDIIRELKRRLEKLDEEVKR

SEQ ID NO: 6499 - protein, 179 aa, Artificial Sequence; identical to SEQ ID NO: 6498
  Synthetic

SEQ ID NO: 6500 - protein, 179 aa, Artificial Sequence
  Synthetic
SEVERIEKESRDLNREIKEEAKRASEDNRRLLEDIRRKLEKVSEENKDLLRKIEEEMRRNSEKKEELRRLVKELDDKLTEILKDLTRLVEELDELLKEVLKRLKDLLREDREEIDRARKEGVDEEIIKKLKRLTDETEKELEKLIRKNEKENRDLEREIRRLIKENRDRNRELKKRAED

SEQ ID NO: 6501 - protein, 179 aa, Artificial Sequence; identical to SEQ ID NO: 6500
  Synthetic

SEQ ID NO: 6502 - protein, 179 aa, Artificial Sequence
  Synthetic
SEVEKAVREIEELIKRIEDRLREMARRVEETNKTLLRDVERLSKENEELVREIKERVRENPEKKEEVEKLIRELDKKLKEAEEEVRRLATEDAEDIKRAMKEITDLIEELRERLKRIRERGLREELVRELERKIKTVLDRVEEIIRRLDKKTKDTVRRVRELIEDNKRKNKKILDEVRK

SEQ ID NO: 6503 - protein, 179 aa, Artificial Sequence; identical to SEQ ID NO: 6502
  Synthetic

SEQ ID NO: 6504 - protein, 179 aa, Artificial Sequence
  Synthetic
SEVERIVKESEELNEKITRDLEEAEKEVRKTNDEIRRVVEEMSRRNEKLIRDIDDEVRKRPEKKEDVDELIKRVDELLERALRELEKLIRDDRELIEEVSRRIEKLVRDDEEKIRRAKEAGVDDEIIKELEKKTRDNLDKVRKIIERLRRETDKTEKELRDIIRKNEDENRKLEEKVRR

SEQ ID NO: 6505 - protein, 179 aa, Artificial Sequence; identical to SEQ ID NO: 6504
  Synthetic

SEQ ID NO: 6506 - protein, 179 aa, Artificial Sequence
  Synthetic
SKVEKLAKEVEETNRRILDEVRRASEENKDLVRRIEETVKRAVEEIKRLIEKIDDVVTKNPEKKERVKELVEEIRERIKRILRELERLIEEADRRLEEVLRKLKKLIDDDRRKIDRVEEAGVDEEIIKELRKRSEDSEREARKLIRRNEEENEKLRKKLKEIIDRLREELEKVLDRVRK

SEQ ID NO: 6507 - protein, 179 aa, Artificial Sequence; identical to SEQ ID NO: 6506
  Synthetic

SEQ ID NO: 6508 - protein, 181 aa, Artificial Sequence
  Synthetic
SEVERAAEESKRLNKTIRDENREVLREIRDLIRRMKEENRRMVKRVDEVLKEIRELFRRDKIDKLVEELLRRVRDIIRRDHERVRRVLERIERLIRKDHERVRRVLKEDERLIRELEKKRTDEKVREILERLERESRKTAKELDESNREAEELLKRVADEAKKSNETLRERLERLAREAEK

SEQ ID NO: 6509 - protein, 181 aa, Artificial Sequence; identical to SEQ ID NO: 6508
  Synthetic

SEQ ID NO: 6510 - protein, 181 aa, Artificial Sequence
  Synthetic
SELEELIRKIEELIRRIEEENKEMVRRSRKLNEDLERRLDEVRRRVEKLIREIEELLKRDKIDELIKKLVRELEEVIKRIEEEIRKLLEEDKRLIDADHERVKKVVEDLDRELKRIADERRDERAKRLLDELKRLIKELEDKLRESNEELKRRSDDSARKAEKILRELKKKVDEMADRARK

SEQ ID NO: 6511 - protein, 181 aa, Artificial Sequence; identical to SEQ ID NO: 6510
  Synthetic

SEQ ID NO: 6512 - protein, 181 aa, Artificial Sequence
  Synthetic
DEAEKLAEDVRRVIKRIREDNKRLSDRNKELLEEVEKDNKKSEEDVKRVIEDIERRVRELRDDRGVDELIKRVLEELEKLSDDDRRRLKRMIEESRRSLEEDRERIERVTTELRELLERLKEKVSRELLDELRRRIEELRKRLEDSNRENEEELRKIADKVRKTNKRLNEEVEDMFRRAKT

SEQ ID NO: 6513 - protein, 181 aa, Artificial Sequence; identical to SEQ ID NO: 6512
  Synthetic

SEQ ID NO: 6514 - protein, 175 aa, Artificial Sequence
  Synthetic
DEARELLRDDERLNRELNDLDRDSSKKDEDLNRKLNEDDKESVERADTLLERIKREVRTEDVVREVRRRLREMLEENRKLTKKAKDDVKRSLDENRELTKKMEEDVRRTLRRIEKDGVDRELIRELEERNRDSVRKSRKSNEDNERTNRESIERSRRSNEELRRRAEELIKDLRR

SEQ ID NO: 6515 - protein, 175 aa, Artificial Sequence; identical to SEQ ID NO: 6514
  Synthetic

SEQ ID NO: 6516 - protein, 175 aa, Artificial Sequence
  Synthetic
SEVEELLERDKDLNRRVNELNEKTSREDEKLNDEINKRIDRLVERARELLERIRREVRTEDMVRKVLEELKRLLEELRRLIETADKEVEDSLRDDERLLKKIKEDAERTLKEARDRGLDERLIRELEERNRESVERVRRSLKENEDRNRESKKRLEDLLREVKRLMDKLEEDLRK

SEQ ID NO: 6517 - protein, 175 aa, Artificial Sequence; identical to SEQ ID NO: 6516
  Synthetic

SEQ ID NO: 6518 - protein, 175 aa, Artificial Sequence
  Synthetic
SEVEELLERDKRLNDEANRLNRELVERDKRLNEELNKELKRMADEIKRLLEEIRRKVRTEEVVEKVTRELRELLERLRRLLEEMSKEARKSLETDKKLLKELKRRAEETLREIRERGLDERLIEKLERENRESEKRARDSNKELEKRNRESEDRARRILKKLEDDVRRLKKELET

SEQ ID NO: 6519 - protein, 175 aa, Artificial Sequence; identical to SEQ ID NO: 6518
  Synthetic

SEQ ID NO: 6520 - protein, 174 aa, Artificial Sequence
  Synthetic
SELEKVRTDVERVIRELEKELKEIDEENKKVNKDVEEEVKRIEEENKEMNDRLDDLRRRGLDKKDLLREIEKAHRESRKKIEDIKKKIEDALRETEKKIKELEKKIRDVLREAEKRIKSKEMEEVREELERLLRRIKKILEELRDENRKSLERLEDVLRRLEKRNRDTLEEVKR

SEQ ID NO: 6521 - protein, 174 aa, Artificial Sequence; identical to SEQ ID NO: 6520
  Synthetic

SEQ ID NO: 6522 - protein, 174 aa, Artificial Sequence
  Synthetic
KETEDVERDVERVIREIDTKLKEIEKKNDKANKELEEKLKKIEEDNKRVNERLKRLREEGLDKRDLERELRDVLRRTRDLIRELEEELERIVRDTRRLAEEIERELKRIVEELDKKIKSEEMRRVREEAKRLLDKVKKILRDLERRNEEVLKKIKDIMRRLEKRNRDTLEEIRT

SEQ ID NO: 6523 - protein, 174 aa, Artificial Sequence; identical to SEQ ID NO: 6522
  Synthetic

SEQ ID NO: 6524 - protein, 174 aa, Artificial Sequence
  Synthetic
SEEEKVLEEVKRAIDELKKELEEVEERNKRVNDDIRRLTDEIRKENKTANDRLRKLLEEGLDKKDLLKEIKEILERTERLSEETREKLKDVLRKTEKLIKEIKDKIDEIKKRADEKIKSKKLEEVRKEVKRLKDEVEKILKDLRKRNKDLLEEDKRVLDRLRETNEKTLDDVRR

SEQ ID NO: 6525 - protein, 174 aa, Artificial Sequence; identical to SEQ ID NO: 6524
  Synthetic

SEQ ID NO: 6526 - protein, 178 aa, Artificial Sequence
  Synthetic
KEEEDITRRIDKILRDLREKLRDVNRRVEELSKRLHDKLEKVLKRIKDEAERLRKEIREKLRDERRVREIEREVREIVERVEEVVRRLKEENKEIEKENRRNSTRLKEEMDRVKEDIDRKRVTKELEDKVEKDARDVERHIRKDLTDVRRRHEDLDRKIKELLDRVRKAIRDVEEKIK

SEQ ID NO: 6527 - protein, 178 aa, Artificial Sequence; identical to SEQ ID NO: 6526
  Synthetic

SEQ ID NO: 6528 - protein, 178 aa, Artificial Sequence
  Synthetic
SKAEELLRRVEELLKRVKDKVDDIVRKIEKSNRDLERRDEEVLREVEETNRRLEEELRRRGSDEDKLRELKEESDRSKERLDDAIRKSRKLSEESERELREITKELRKELDKIREELDRDGADEEVLRRLEELIRRAERKLEKMLEDLTRLNKEWEDRTRKLLEDLRRINEEIKRKIK

SEQ ID NO: 6529 - protein, 178 aa, Artificial Sequence; identical to SEQ ID NO: 6528
  Synthetic

SEQ ID NO: 6530 - protein, 178 aa, Artificial Sequence
  Synthetic
SEKDELLRDVRRLLKEVEKELEEIRRRVTESNRELEKLVREVLEESKRSDDKLREDLERAGLEKERLDKLEEDLKRHNEKLKKAVEDLKRTSEDSRKKLEDLARDVKRLLEDVERKLRKDGADKDLLERLKELIKRLKDKLKEIADRLRRINEDIERKIREILEDSRRFNEEIKKKID

SEQ ID NO: 6531 - protein, 178 aa, Artificial Sequence; identical to SEQ ID NO: 6530
  Synthetic

SEQ ID NO: 6532 - protein, 184 aa, Artificial Sequence
  Synthetic
STLETLEDEVRKIVTDIERVIRESNKHLKKSIDDVERVIEEIERRAREIVKKVRDVISEDRSEDDVRDLKRELEELLKRLEELVRDLERKAEEDLDRLRKEYEKLKEDLERLLKELKDKADRDGTDEKLERILREIKRIVEDLKKKVEDSLKRYEEELERLKEDLRRLLKRIRDEVEELKKESD

SEQ ID NO: 6533 - protein, 184 aa, Artificial Sequence; identical to SEQ ID NO: 6532
  Synthetic

SEQ ID NO: 6534 - protein, 184 aa, Artificial Sequence
  Synthetic
DEEEKLRDEVEKIVKKIEKAIEDLRRHAEKSVTDIRKVLKELEDHIRESVKDAERFISEDRSEESVERLVRKLERNLDELRRRAEELKKRIDEDLERLKELVRRLKEELEKMLRDLREKVRRLGTSEKLEKILREIERIVEKLKEDLDRLLKRYEDELRRLKEELERILDTYRRLLEELERRLR

SEQ ID NO: 6535 - protein, 184 aa, Artificial Sequence; identical to SEQ ID NO: 6534
  Synthetic

SEQ ID NO: 6536 - protein, 184 aa, Artificial Sequence
  Synthetic
DTARELEREVKKIVDEIEDVIRRLRRHIEESVKRAEKVLREIEKHARESAKRIADVVSKDTSEETVEKLKEEIRRDFKRLEDEVRRLKKELEDNLERLREIVKELEDRLREALKKLREKVRRDGTTEELKEILERIEEIVKRLEEELRRLLEEYKKRIEELAKRIKEVLDEYRKILKRLEDETK

SEQ ID NO: 6537 - protein, 184 aa, Artificial Sequence; identical to SEQ ID NO: 6536
  Synthetic

SEQ ID NO: 6538 - protein, 176 aa, Artificial Sequence
  Synthetic
DEAEELRKDVKRVLDEIKKRHEELLRKVREDLDRIRRKLEELAKRHRELLKEVKKIVDRDGTTEKLKRELDELNKETEKRLRDLKRELEELLRELKKRLKDSNDELKREVERLRRENLVDDKIRREIDELIKKLEEESRRIEEEIKKLVEDLKREADKIMEELERETDKLKKELDK

SEQ ID NO: 6539 - protein, 176 aa, Artificial Sequence; identical to SEQ ID NO: 6538
  Synthetic

SEQ ID NO: 6540 - protein, 172 aa, Artificial Sequence
  Synthetic
SEKEKILEEIREVLKRILDRLKKELEDDKKSLDDNKRRTEEALREDKKSLEEIRRANVREDEVKKLLEDNKRRNEEVRKRSEDDLKKNKERNERLAEELKKEVDKLREDIERANLDDKILRDLEKALDKLRRDIEEILKRSRDLNKKLEDDNREALRRSEELNRELEERERK

SEQ ID NO: 6541 - protein, 172 aa, Artificial Sequence; identical to SEQ ID NO: 6540
  Synthetic

SEQ ID NO: 6542 - protein, 172 aa, Artificial Sequence
  Synthetic
SEEERIRREIKKILDDIKEEAERRLEEDKKSLDENRKKTEEVLKKIRDDLKRIEEAKIPREEIKDELDRLRREIEKIARESEKDLRRNKEENKRLAEDLKRKLDKLKEDLDRANLDDEILRRIEKLIEDLKRTIDKILEDSERLNRKLEKENREALKELRDLLRELEERLKK

SEQ ID NO: 6543 - protein, 172 aa, Artificial Sequence; identical to SEQ ID NO: 6542
  Synthetic

SEQ ID NO: 6544 - protein, 172 aa, Artificial Sequence
  Synthetic
EELERILRKITEMLREIARKLKKLLEDDKESLDRNKEKTEDDLRRDKESLDRLRKSNIPEEEVRKRLKENKDRLRKRSKESKEDLERNEDENDKAAKDLKRLLDELREEIERRNLDDKILRDLEELLKDLERKIRRILDESRKLNDELRKENKKAEDTSRRLNEELEERLRT

SEQ ID NO: 6545 - protein, 172 aa, Artificial Sequence; identical to SEQ ID NO: 6544
  Synthetic

SEQ ID NO: 6546 - protein, 172 aa, Artificial Sequence
  Synthetic
SELEEILKRVEDVLRDILRKLKEVLDRAEKVIRDNKRKTKKMLDDDKRSLDEIRKAKIPRDEIKDVLRRNKDRNRKLAEESDRDLERLREELERIAKELEDLADELRKEIEKANLDDKILRELEKRLEDLRKRIKDILDDLKRKLEELKRENEKFLRRSKKLNEDLERELET

SEQ ID NO: 6547 - protein, 172 aa, Artificial Sequence; identical to SEQ ID NO: 6546
  Synthetic

SEQ ID NO: 6548 - protein, 172 aa, Artificial Sequence
  Synthetic
DELEEIRDRIKRKLEKLKEETKRTLEEDRKSLDDNRRKTEEALRRDRESLERIERAKIPSDKIREVLERNKTELRKIFERSREDLRRNKERLKKANEDAKKKIEDLREEIKKNNLDRDILEELTRLLDKLRRDHERVSEESKRRNDELEEENRRVLKESEDRNRELEERLRQ

SEQ ID NO: 6549 - protein, 172 aa, Artificial Sequence; identical to SEQ ID NO: 6548
  Synthetic

SEQ ID NO: 6550 - protein, 175 aa, Artificial Sequence
  Synthetic
SELEKLLDDVKKDLKRIEEHLRRDEEDSKRRIEELERHLERDKKEVEKAIRELDKKPRDDDLKRELEEILDRNKKNLDELRRELEKIDRDNKKNLDELKRELEEIEKKIREIVKRDKVDEKVVRTIEKLLTDLERKIREIEKRSKELLTRLEEKIKKAERESRKLLRELTERIDR

SEQ ID NO: 6551 - protein, 175 aa, Artificial Sequence; identical to SEQ ID NO: 6550
  Synthetic

SEQ ID NO: 6552 - protein, 174 aa, Artificial Sequence
  Synthetic
DELKKLLDDVREVSKRLNDELRKIMEEIRKVSEDLNKELDDIVRKIKKVIDDISEKIKRDGPREEVKEELKRLEEELRRLLKRLRDEHRRLRERLERLLKELEEKHEELADRVRKANVDEEIEKEIRELLKENRRRADEIRRRAEKSLKDNERRVEKVEREAERLLREIEKELK

SEQ ID NO: 6553 - protein, 174 aa, Artificial Sequence; identical to SEQ ID NO: 6552
  Synthetic

SEQ ID NO: 6554 - protein, 174 aa, Artificial Sequence
  Synthetic
SELEKLAEDVKRKLTEIREKIKKLLKETRDVSRELNKELEDLLRRTTEVIDEIRKKIEKEGPREEVRELLKKLEKDHRKASEEVERKHEDLRRRHDKASKEVEKELRDLKDEVDKANVDEDIKKEIEDLLRDLERLLRDVNREVEELLKENRKRLEEINRTVERLLEEIEKRLR

SEQ ID NO: 6555 - protein, 174 aa, Artificial Sequence; identical to SEQ ID NO: 6554
  Synthetic

SEQ ID NO: 6556 - protein, 174 aa, Artificial Sequence
  Synthetic
SELEELVRRLREVSKRLNEELDRILDRTRRLAERISEDIKRLADETKEVIERIKEEIKKKGPDERVKRKLEELKRRHDEASKTVRKKIEDLLKEHRDLSKELEDKHRDLEDKLRKANVDEEIEKEARELLRDNRRRIEEINREVEELIRRLEKLLKEVNETVKRLLEEIRKDLD

SEQ ID NO: 6557 - protein, 174 aa, Artificial Sequence; identical to SEQ ID NO: 6556
  Synthetic

SEQ ID NO: 6558 - protein, 174 aa, Artificial Sequence
  Synthetic
SELEKLMKDVKEVIDEIRKKLRKILEDTTRVAKRNEEKLKRIADEAEKVIREIRDEIEKKGPRDEVERRLRRLETELRRLLDESRKENERLRREHEKLSKELRDLLDDLRRRVEEANVDEEIKKRIDDLLRRIEKEIEEINRRVEELHKRLEDLHKEIEDKVRELLTRIEERLK

SEQ ID NO: 6559 - protein, 174 aa, Artificial Sequence; identical to SEQ ID NO: 6558
  Synthetic

SEQ ID NO: 6560 - protein, 171 aa, Artificial Sequence
  Synthetic
SEVEEILERIERLIRDDNRKLKDVERRNRENIKEDNERLKRMMEELKKIADEIRKADVDKDTLEKLLRDLRRKVEKIKRDNERHNDEDRKTLKRIHEDNKRILEEIKDRIDKAPVDDSIRRTVEKLLEDNRRRNEEILKESEDLLRKNREKTKEIVERAERLLDKLRRERK

SEQ ID NO: 6561 - protein, 171 aa, Artificial Sequence; identical to SEQ ID NO: 6560
  Synthetic

SEQ ID NO: 6562 - protein, 174 aa, Artificial Sequence
  Synthetic
DEAEELKERIERLSRRIDEEYRRLLEDYERLLRELEKKIEDLKRELEKLVEELRREGTDEKLDRRLEEMLRELERELRELVERLRRDLEEIRKHIKRSRDRHERANRELERELKETGVTEELKEKVKEIVKRSEEDIRRLKKHLDESIRTAEEVIRRLREKIKRIIDTVRDAKR

SEQ ID NO: 6563 - protein, 174 aa, Artificial Sequence; identical to SEQ ID NO: 6562
  Synthetic

SEQ ID NO: 6564 - protein, 174 aa, Artificial Sequence
  Synthetic
SELEELEKRIRRLSEEIKKLLDDLRREYEELVKELRRRLEELRKEIERLSEELKAEGRREELDRELRKLEKELEDKLRELKKRLDEDKERVEKMIRDLEERHRRANKELEDELRRDGVTDEMREKVDEIVKRSRDVIKELREHIEESIRRAEKVLRDLEREVRKIIEDARERTR

SEQ ID NO: 6565 - protein, 174 aa, Artificial Sequence; identical to SEQ ID NO: 6564
  Synthetic

SEQ ID NO: 6566 - protein, 174 aa, Artificial Sequence
  Synthetic
REVDELRKEIERLSRKIEDDLKKLEDRYEELLEKLERDLEKLKEDYDRLLRKLEEDGDDEKLKRELDKDREKIERDLEDLKRKLRTDEKEVRDRVKELRDRHREMNERLKTRLRRDGVTEKAEEDVRRTVTESKKVIDELREHIKKSIREVEEAIKRLREHVERSIRRAEEATK

SEQ ID NO: 6567 - protein, 174 aa, Artificial Sequence; identical to SEQ ID NO: 6566
  Synthetic

SEQ ID NO: 6568 - protein, 177 aa, Artificial Sequence
  Synthetic
SEEEKLDEDLERLREEIRELHRELEELIKKLREEVRRIIEKVRTHLKRDRDRAKEVIEKVRGEKDLTKVDEENERNTRDLERKLEEVKKEIKKLADDLKRRNEEIKKELKRKAEELKKRIKDERMREKLEKIKKDVDKLSKELHDKLDKVLKEIEELLRDVKRAIKKVNDDIKERLR

SEQ ID NO: 6569 - protein, 177 aa, Artificial Sequence; identical to SEQ ID NO: 6568
  Synthetic

SEQ ID NO: 6570 - protein, 182 aa, Artificial Sequence
  Synthetic
DEIRELVRRFEELVRRNVEHLKKLLRDAEKLVKENEKHLEDLLREIEETVKRLLDKIRREGPTEELKREAEKKAKELEERLKKNKEDHEERDKRIRDALKRNEDEHRKRSERLKEELDRDIKDKDKARDVEKRIEDLNREIKEIIRRVEERLKELNKRIEKLLEEVRDTLRRLKEELDRAMT

SEQ ID NO: 6571 - protein, 182 aa, Artificial Sequence; identical to SEQ ID NO: 6570
  Synthetic

SEQ ID NO: 6572 - protein, 182 aa, Artificial Sequence
  Synthetic
SEIEELLKEVERRVRENKKHLKRLLEDIKRLVERNAEDLERILRDAERIVRELIKKIRRDGTDKKLRDEAKEASDRIREKLEENERRHREESERLKEKLERNKRTHDDEDRRVRRRLERDIKDKDKLRRIEKALEDLNREIEEILRRVKEEIERLNREIEELLKRVEEELKRLEKELEEELK

SEQ ID NO: 6573 - protein, 182 aa, Artificial Sequence; identical to SEQ ID NO: 6572
  Synthetic

SEQ ID NO: 6574 - protein, 182 aa, Artificial Sequence
  Synthetic
SEIEELLKEVRKRVKENAEDLKRLLDEAKKLADDNVKHIEDLIREVEDIIRRLKERIKRTGNTEELRKEIKDKADEVREKLERNKRRHDELDKRLKDELRRNKKEHEEESKEIEDRLRRDIKDKDKARRLREELRKLNEDIERLLKRVEDELRKLNKKIKDILEEVEEVLERLLRELREEER

SEQ ID NO: 6575 - protein, 182 aa, Artificial Sequence; identical to SEQ ID NO: 6574
  Synthetic

SEQ ID NO: 6576 - protein, 187 aa, Artificial Sequence
  Synthetic
REKEELKKELKKLIEELKRSHDELKEELKRLLKRIEDILRENRKTTEDLSRELKKLLEELRKKVSEEELKRLRDELERLKKEDEEMNRRIEEKLRRLSKRVKDYLDTSRKRLEDLVRRVDEAASQDRRREELKRLLEELRRMIKELKDRNRKALEELEKVIREIEEEIKDINRRLREEIRRLEEEAR

SEQ ID NO: 6577 - protein, 187 aa, Artificial Sequence; identical to SEQ ID NO: 6576
  Synthetic

SEQ ID NO: 6578 - protein, 187 aa, Artificial Sequence
  Synthetic
SKEEELRETLKRLVDEIRRMLEEDRRSDEELVRRIERVLEEDKREDDRLHKRLRDELRRLRKDVDEKTLKEIEEKIRELNKRNEDSLKKIEDDLRRLNEENRKSLEELEKKLEKLARDAEEVLKRDKREDELRRLLRELEEMAKKLEKELRDNNRDLRRVAEELKELIDDNTRKLKEVIEKLEREIK

SEQ ID NO: 6579 - protein, 187 aa, Artificial Sequence; identical to SEQ ID NO: 6578
  Synthetic

SEQ ID NO: 6580 - protein, 187 aa, Artificial Sequence
  Synthetic
SEKETVRDELRKLVETIRKLLEEDKESDKRLADRIRELNEENKEDTERLIRELEKVLEELRKKVSEDELRKLRKRIEDLRRRDEELNKRSREKLEDLNERNKDSLRRIEDELRKLVEEAREVEKRDNDEERLRKLLERLERVIRDLLRKIEENNKRLRKAIKELLDELRKINKELREVIKKLLDDAR

SEQ ID NO: 6581 - protein, 187 aa, Artificial Sequence; identical to SEQ ID NO: 6580
  Synthetic

SEQ ID NO: 6582 - protein, 187 aa, Artificial Sequence
  Synthetic
SEKERLKEELEKLSKEIEDILRDDKRSDDELRRRLRELLEKDRREDERLNEELKRMLEEARKRVSEDELRAIKKEIEDLNRRNEESLRAIEEKIKRLNDENRKSLEEIRRRLKRLVEEVDELRKRDNREELLRRLLEKLKRMAEKLKRDIEDNNRKLRKVATELAKEIEDNSEKLREDAKRLSEKIK

SEQ ID NO: 6583 - protein, 187 aa, Artificial Sequence; identical to SEQ ID NO: 6582
  Synthetic

SEQ ID NO: 6584 - protein, 187 aa, Artificial Sequence
  Synthetic
DEEEELRKRLEKLSKEVRELLRRDEEEDRRLNRELEELLKDHERTVRDLSREVEDLLRKARRKVSEEELTRLRKKLRDLEEESKEALRELRRRVEELNKENKKSLDDLERRLKELEDRAREVEKRDRREDELRELLRRLEDVIRKLAEDLKRNTEDLRRVIKELAERLEELNKRLKREIRRLKEELR

SEQ ID NO: 6585 - protein, 187 aa, Artificial Sequence; identical to SEQ ID NO: 6584
  Synthetic

SEQ ID NO: 6586 - protein, 181 aa, Artificial Sequence
  Synthetic
EKSERLRERLRDLLRKHKELLDRNEKTLEEAERRVEKLLEDNERELKKIEDEVRELLKRLEDDETLRRLLEEAKEVLERIRRKNKKLREDLKRVLERIKEENDRHHEKVKEDLKRIEDRIRKDGVTKEILREIEERFKRLAEDLKRSNDKVRELVDKAEKDIRKSNEELRKLARDVRERVR

SEQ ID NO: 6587 - protein, 181 aa, Artificial Sequence; identical to SEQ ID NO: 6586
  Synthetic

SEQ ID NO: 6588 - protein, 181 aa, Artificial Sequence
  Synthetic
SDEDRLRELLRKLREDHERIVRELRKRLEEVLREIERLLKKNEEDLERIRREVEELLKRISDDEELRRLEKRAEEALRKIREENKKLRKEVRDTLRDILRRIEEHHREVDERLRRIEDRIRKEGATEDIEREIRDTLRRLREDLERIKEDVERLRREIKKRIEDSNRKVRDLLRRVKEAVR

SEQ ID NO: 6589 - protein, 181 aa, Artificial Sequence; identical to SEQ ID NO: 6588
  Synthetic

SEQ ID NO: 6590 - protein, 181 aa, Artificial Sequence
  Synthetic
DEERKLEKSLKDVEDTHRRLLEKNDEDLKELRKRVEDMLRRLEDALRRILEDIEEKLKRIEDDETLKRLRKRVKELLDEIRRRLERLEREVDKRLEEIKERNDRHHEEAKKELKRIRDKIRRDGADEKILREVEDLLRKVAEDLKRSNDEVKELAERLEETIRDLLRRIEEILKEIEERVR

SEQ ID NO: 6591 - protein, 181 aa, Artificial Sequence; identical to SEQ ID NO: 6590
  Synthetic

SEQ ID NO: 6592 - protein, 181 aa, Artificial Sequence
  Synthetic
KDEERLKRFLEDIRRRHRELLERNERALDEIRRRHEELLRRNEEAIKDIERRVRELLKRLEDDDTLRKLEKKVRDDARRSRKRNEEHHREVKEELDRSRKRNEDHHREAEREMRRIEEKIKKDGATEEILKEIEELLRRLEENLRRNHKEVRELLEKVRRNIEENHREVRRLLEEVERRAR

SEQ ID NO: 6593 - protein, 181 aa, Artificial Sequence; identical to SEQ ID NO: 6592
  Synthetic

SEQ ID NO: 6594 - protein, 181 aa, Artificial Sequence
  Synthetic
DEEETLEDVLRELEERVEKLLRDLTRDLERVEKEHKELLKRNKEAIDEIEKRIEELLKRIEDDEKLRRLKEEVRKLVEESRERNKRHHKEVREVLERIRELLERLEKELRRALEEIRDKIRKDGATDEILRKIEELLRRAEEVIRDLERKVRKLERDIRENIKKNHREVREILRKIEEDVR

SEQ ID NO: 6595 - protein, 181 aa, Artificial Sequence; identical to SEQ ID NO: 6594
  Synthetic

SEQ ID NO: 6596 - protein, 175 aa, Artificial Sequence
  Synthetic
KDEERLRELIKRINTEVKKSLDENKERLDKVEEDIRRSLKENEDRMERVRREVEKANVDEKVKKEAEDALRELKRKHDELRKEVEKLVKELEDKHKELEERHREASKDVERVLDKEIDKIEEIKKRLEDILEETRDMSRRLNEELRRILERVKEVSKELNRELEEILKRVEDARR

SEQ ID NO: 6597 - protein, 175 aa, Artificial Sequence; identical to SEQ ID NO: 6596
  Synthetic

SEQ ID NO: 6598 - protein, 175 aa, Artificial Sequence
  Synthetic
SEKEDLERELEEVRRRVEESLRKNEEDVKRVRDELKKLLDENRKELERIRREVERANVDKRVLDEADRLLKELEDDHKKLEEDAKKALDELREEHKRLEETLRRMLKRIKEVLDRESDKMEEIKKEIEKILRDIERVSRELNKKLEEIVRRLKKVSDELNRRIEEIAERVRRRRK

SEQ ID NO: 6599 - protein, 175 aa, Artificial Sequence; identical to SEQ ID NO: 6598
  Synthetic

SEQ ID NO: 6600 - protein, 175 aa, Artificial Sequence
  Synthetic
KDEERLDEELKRVNDEVRRLLARNEETLERIEREVKRLLDENEKRAEDIRKEVEDSNVDERVKTEAKKALDELRERHRELKKELEKLAEELRRKHEELEKRHRDKSRRIKEMLDKETDKIEEIEKTIREELKETRKVSEELNRELERILRELRKVSEELNKDLEKILRRVKKERK

SEQ ID NO: 6601 - protein, 175 aa, Artificial Sequence; identical to SEQ ID NO: 6600
  Synthetic

SEQ ID NO: 6602 - protein, 175 aa, Artificial Sequence
  Synthetic
SEEERLREILKDINRRVEELLKENEERMERIREELEELLERLKEELERIRKRVEEENVDEEVKRRFDEVAEEIKRRLEELKKEAEDKLRRLREEHKKLKEEHERASERIEEVLDKESDKVEEIEKDIRRLLRETERVSEELNKKLEEIARELREMIKEIKERLKRILEEVEKRRR

SEQ ID NO: 6603 - protein, 175 aa, Artificial Sequence; identical to SEQ ID NO: 6602
  Synthetic

SEQ ID NO: 6604 - protein, 175 aa, Artificial Sequence
  Synthetic
SEEDELRRLLKEVNERVERLLDEIRKELEKIAEELRDLLKKNEDKLREIKRRVEENRVDEEIKKDAERALTELKEEHERLDREAKKDLDRIRKELERLEEEHRRVSERIEEVLDKESDKTEDIAREIRELMERTRRVIEEIKKELRDILEKLRRVSEELNKKLDEILKRIEDRTR

SEQ ID NO: 6605 - protein, 175 aa, Artificial Sequence; identical to SEQ ID NO: 6604
  Synthetic

SEQ ID NO: 6606 - protein, 182 aa, Artificial Sequence
  Synthetic
REIEKLIRDYRRILRELSEKIRRLAEEHEDIVRKLIETLKRLIDEIRKIMEDLSRLLRRDGSTEELRKRARKSLEDLRRKIREIKKRLEEEHKKTRKKVKELEDEAREKTKELEKRLKDANVPKKLMDELRRVSEEVNTRLEKLLRDLEKKLRDSEERAKELIRRIEKTLEDIDRRLKEEEK

SEQ ID NO: 6607 - protein, 182 aa, Artificial Sequence; identical to SEQ ID NO: 6606
  Synthetic

SEQ ID NO: 6608 - protein, 184 aa, Artificial Sequence
  Synthetic
RELEKLMEDAERYAKRSMEAFEDLIRKHDELLKRLEKKLRDLIKRIEKLLREIKEKIERTGTTEDLEREVREIVKRIREFLERLDRDAKRIEKENRDVDERLKRENEKVSRRLREVLEELRKDVSEELLKRAKELIETIEERSKRVVDENKRVVERSRRRLKKLLEDIERVLERIERRLTEAKK

SEQ ID NO: 6609 - protein, 184 aa, Artificial Sequence; identical to SEQ ID NO: 6608
  Synthetic

SEQ ID NO: 6610 - protein, 184 aa, Artificial Sequence
  Synthetic
SELEKLLEDIERYVKRSKEKARELIKRHKEYVRRSEERLRRLIEKLEKLAEKLKELIRRTGTTEELEKELKDIAREVREVLKKIKEDNKRAEDKNREEDERLKRENEKMKEDVRKILADLKKDVDDSLLKEVEDLLRKVEEESRRVIEENKRVVEESRKRSERLLREIEKELRRVEKEFRDEKR

SEQ ID NO: 6611 - protein, 184 aa, Artificial Sequence; identical to SEQ ID NO: 6610
  Synthetic

SEQ ID NO: 6612 - protein, 184 aa, Artificial Sequence
  Synthetic
SELEDLMRDVKRYADESARRIEEIIKRHRKLVREISKKIEELIRELRKLIERILELIRRDGDTEELKKEVEKIREEVEEMLERIKREVDKVKDENRRLDEKVRRDNERKKRDLERLLRELRDKVDEELLDRARKLIREIEERSKELSKRNKEEVDRSEERIRRLLKRAEEELRRVREELKEASR

SEQ ID NO: 6613 - protein, 184 aa, Artificial Sequence; identical to SEQ ID NO: 6612
  Synthetic

SEQ ID NO: 6614 - protein, 181 aa, Artificial Sequence
  Synthetic
SREEEIRELLKRSKESLEKLLRELDKEHKESEKSARELLKRNEKRLREIREEIRRLNITEDLLKEIEDLLKRLEDKNRKVAKEYEDLLRESKRHLDELRKEYERLLKELEDKLEDLRRRRKSEEVMKRLLKEIRDVNKEITERLEEHRKRLEEINRDVERIIRELNEEHKEVLKRIREKAK

SEQ ID NO: 6615 - protein, 181 aa, Artificial Sequence; identical to SEQ ID NO: 6614
  Synthetic

SEQ ID NO: 6616 - protein, 182 aa, Artificial Sequence
  Synthetic
SEREELRKLLRRIEEEAKRLLEELKRTTDDTRRENEELLRRLEELSKETKKRVEDLLRELDRDKTVKDRLRTELERLERRDRELLERNKKHNKDLEDTDRDLIRKLKKLLDELKERAERVEKTGEDVKDVLKKLEDVLRELKKAVEKIKRDNKRAVDENRELVERIMKENKDAMKKLEEDVR

SEQ ID NO: 6617 - protein, 182 aa, Artificial Sequence; identical to SEQ ID NO: 6616
  Synthetic

SEQ ID NO: 6618 - protein, 182 aa, Artificial Sequence
  Synthetic
SEREELRDLLRRIKEDAERLLKEHRDLLEEVRKEVEKLLRELRKLSKETEDEAERLLRELRRDETVKEKLKRRLDELRKRDEDVERRLKEELDELRRRNKKIEDDLRKKLEDLEREMREVDRRGEDIKDVLKKLKEVLKKLRDDVEKSKRDTKRVLDRLRDTVRKIMEENRRALKEIADEVK

SEQ ID NO: 6619 - protein, 182 aa, Artificial Sequence; identical to SEQ ID NO: 6618
  Synthetic

SEQ ID NO: 6620 - protein, 182 aa, Artificial Sequence
  Synthetic
DDEERLREEVERVERTVRDLLRRLRELTKKTDEDNRKLLKEHEDLLREVVKRVTDLLKDLQRDEEVKRKLKEDLDRLREKNKEILERNKRHNDELRKKDEKLLRELEELLERLKKRIKEVEETGKDVKDVLKEIKEVLREVTERAKEIADDNRRALEENEREVKRSKEDTKRALRKLEEEVK

SEQ ID NO: 6621 - protein, 182 aa, Artificial Sequence; identical to SEQ ID NO: 6620
  Synthetic

SEQ ID NO: 6622 - protein, 181 aa, Artificial Sequence
  Synthetic
SSSEELEKLLEEVRRELRRLAEEVKRLNEEIDKDIDRLAEENDRLHKEVKKDLDRLNLPDESLRRIEEELRRNLERTREILEDLKRRLDESRKEAEKILDELRRTLEKLKRDIDDSDTKGNTEEVVKRILDEIRRTLEEIKEIARRYLEKNKKEMREIRETMKRDNDHLEDLLRKIRETAR

SEQ ID NO: 6623 - protein, 181 aa, Artificial Sequence; identical to SEQ ID NO: 6622
  Synthetic

SEQ ID NO: 6624 - protein, 174 aa, Artificial Sequence
  Synthetic
SDEERIRKKLREIEERHKKLSEELKELLRRSEESVRRLLEKNRKDLDEVRKRIEDLNLTEDILKKLREELDRHRRELERLAREYEKLLRELEREVREVNKRVEETMREIKRRLRETKVDEEVERRLDRLLDESRRLAEELKERIKRVNKRARELVRESEEHLRELLEKVERDAT

SEQ ID NO: 6625 - protein, 174 aa, Artificial Sequence; identical to SEQ ID NO: 6624
  Synthetic

SEQ ID NO: 6626 - protein, 178 aa, Artificial Sequence
  Synthetic
SDKDELKTRLDRVREIIERLARESEELHKELKKRLEDLKRDSERLHRKNLEDIRRSNLPREKLERLEESNRRNLRRSEDTLRKLEEEIRRNEERTKKLLDDLRRLVEELRDKIRRVGDEKEVTDRIREDIKRVIEEVRRLAEEDKESVKEILKKIEKLADEDRRSVEKNHKEVEDTRR

SEQ ID NO: 6627 - protein, 178 aa, Artificial Sequence; identical to SEQ ID NO: 6626
  Synthetic

SEQ ID NO: 6628 - protein, 175 aa, Artificial Sequence
  Synthetic
RDEERAEELLKEIKDTVDELKKEVEKVLDESRKRDKKLNDELRKLLEDSRRTIERDVREDDDLRKEVEEKNRETEKRLKEINDDNERLNKESEDKLRELKKEAEEKLKRIRKIIKDGDRGDKLLEELRKILEELRKKVKDLIEEHRRLVKTSADRVKRLLDEHRRILKELKDRRK

SEQ ID NO: 6629 - protein, 175 aa, Artificial Sequence; identical to SEQ ID NO: 6628
  Synthetic

SEQ ID NO: 6630 - protein, 182 aa, Artificial Sequence
  Synthetic
DEAEELIKRIEDLLRELARRMEEILRRHEEYVKKSAEDVKRLLEEVEKLADDLRREVERDGTTDELRKKVKKIADELRKVLEDLKRANKKVEDENRKLDDDIRKTVEKIEKDVRDALKDLNLPEEVARKIEEVLRRVKEELTKLVEENERKLRESRERSKKLAKEVEDLLREIKRRVEELER

SEQ ID NO: 6631 - protein, 182 aa, Artificial Sequence; identical to SEQ ID NO: 6630
  Synthetic

SEQ ID NO: 6632 - protein, 174 aa, Artificial Sequence
  Synthetic
SERETLEELLERVERLLEKLKRELDEAHKKNKEDLDRLRDKNRKRLEDIKRTIDRIDVREELKKEADRLLKELEELTREIVRRDEDLNRRLAEKVERLKREVERRLEEIRRRVDKDGVTEELLKELKEVLERIRKEVEKLLRTLEEINKTTRKLVEETNEKADRILEKVKRDAK

SEQ ID NO: 6633 - protein, 174 aa, Artificial Sequence; identical to SEQ ID NO: 6632
  Synthetic

SEQ ID NO: 6634 - protein, 174 aa, Artificial Sequence
  Synthetic
SEDEKMEELIKRSEDKLRKLEEDVRRLLEEIRRRAEDNTRRNERTLREIERTLREIPNDKELADRLRELLERLRRRNEELKRELDKLLRDLERKLEELKRRHKEKLDRLRDRVRKTGVTEELVRELEKIDRETTEVVKKLLEELKDIMRRVHERSEESLREAKKILREVEERAR

SEQ ID NO: 6635 - protein, 174 aa, Artificial Sequence; identical to SEQ ID NO: 6634
  Synthetic

SEQ ID NO: 6636 - protein, 179 aa, Artificial Sequence
  Synthetic
SEEEELDKLLKEVREKDERLKREVEELLRRIKKRLEELKRENDELLKEVREVLKKLAKETDVSDEIIKRIEELLRRLEKTSEELRKDVERKRKELEEEARRLHEESEELLKELRRILERGDLPVEDVLRRIEEVARRIERLYEELLKKLRDVVREIEKRVREHNEDVKRVVREIEKRIK

SEQ ID NO: 6637 - protein, 179 aa, Artificial Sequence; identical to SEQ ID NO: 6636
  Synthetic

SEQ ID NO: 6638 - protein, 178 aa, Artificial Sequence
  Synthetic
DEVEKVKEEIKRLNEDVRRLVEEYRKRLEKLNRDHRDYVKKSEKRIRDLIREVRRRPVTDEVVKRVEEELEKIERENREKSKEDEEKNKELEDELRRRKKESEDVLRELKDRVRKAGLDEDATREIDKALEDHRESVERLVRELERLNEENRKSVKKSEEDSRRLLEEVRRELRRKRK

SEQ ID NO: 6639 - protein, 178 aa, Artificial Sequence; identical to SEQ ID NO: 6638
  Synthetic

SEQ ID NO: 6640 - protein, 175 aa, Artificial Sequence
  Synthetic
DEEERVEELLRRDRESDKELRERLRKLNEENRDETEKLIRELEDSLRRLKEELEKKGKDIEELLRDVERYLRESRKRVEDLKREDEKLNKESEDKLDELNKRNEKSLRELREKLRRDGATKELEKELRDNNRRLEEVIRRLEEELKRISEELRKVIKKLKRDNEEKLRRLDEATR

SEQ ID NO: 6641 - protein, 175 aa, Artificial Sequence; identical to SEQ ID NO: 6640
  Synthetic

SEQ ID NO: 6642 - protein, 175 aa, Artificial Sequence
  Synthetic
DEEERVKDINRRNEEDSRRLERRIRELNRENRKSSKELADRVRELLKRAEERLRTEGKDKKELLEEAEDLLRKLTDDLRKLEEDDERMNRDIERKLRELKKEDKDRNDRTKEELERDGVTEELVKKLEDINRRLREAIKRLEDTIREINKELRKKIKELLDRLKEIVKRLEDRAR

SEQ ID NO: 6643 - protein, 175 aa, Artificial Sequence; identical to SEQ ID NO: 6642
  Synthetic

SEQ ID NO: 6644 - protein, 175 aa, Artificial Sequence
  Synthetic
SAEERIKRINKKNRDDSEKLKRRIEESNRENKRSSDELVKRLEELLRKLEEDLKRKGKDDEDLLREVKKRAEEIRERIKRLEDDDRRYNKKSKEDLDDLRREDERLNEETKRELDRDGVDKELEKKLRKINEDLKRAIRKLEEDNKRANEELKKRAEDLLREIEEIIRRLEERTR

SEQ ID NO: 6645 - protein, 175 aa, Artificial Sequence; identical to SEQ ID NO: 6644
  Synthetic

SEQ ID NO: 6646 - protein, 175 aa, Artificial Sequence
  Synthetic
DEERRAEEINRRNKKDSDRLAETIEKILKEDEDRDKELHDRLEEILKELRKRLEEEGKDIRELREEAERLIREIREEIKRLNEENKKSLERIRKKLEDLRRKDEKLNRETRRKLERDGVTEELVKELEKINEELRRDIKRLIDEIRENTERLERMIRELEKKIRKILKELDDRAK

SEQ ID NO: 6647 - protein, 175 aa, Artificial Sequence; identical to SEQ ID NO: 6646
  Synthetic

SEQ ID NO: 6648 - protein, 176 aa, Artificial Sequence
  Synthetic
DLEKELTDLMKKHAEENDRLRRRLEELLKRHAEENDRLRDRVRRINEEVEEILRRAPRSEELEKLKRDHERRVKEAEDRLRELHRLVEERVREIKDELRKLHEKVKKILEDLKDIKEEDVIREALERIKRISDESKRTIDEVVKEIEKITKESRDLITKYERDVERSIEEAERRAT

SEQ ID NO: 6649 - protein, 176 aa, Artificial Sequence; identical to SEQ ID NO: 6648
  Synthetic

SEQ ID NO: 6650 - protein, 184 aa, Artificial Sequence
  Synthetic
SLEERIRELLKRHEDLTRKLKKENDESLRRHRELTKKLRKELEELLKRAEDVLRDLEREGLREEDKEEIERRLKELREKAERLARKDEELLRRAEEKSERLRTEDERLLKELEDEARDLRRKGSDAREVDDLLRKIEDISKKSADRNRELNEELEDISRRSKEEMKKLLDELRRDVEEIKKRTK

SEQ ID NO: 6651 - protein, 184 aa, Artificial Sequence; identical to SEQ ID NO: 6650
  Synthetic

SEQ ID NO: 6652 - protein, 184 aa, Artificial Sequence
  Synthetic
DLEDRIRRLLEESKKNLDELKRRNEESLKRSEDLLKDLKRKLDDLLRKAEEVLRELRKRGLDEDLATKIKKELEDLKREIEELVERYKDLNREIKERSDKLVKEYEDLLKELTERAKDLTDKGSDARDVDRLLEDVKRISDTVHKRNEELNRRLREISERAREAVEDLLRRLEEIVRRIKTRTE

SEQ ID NO: 6653 - protein, 184 aa, Artificial Sequence; identical to SEQ ID NO: 6652
  Synthetic

SEQ ID NO: 6654 - protein, 174 aa, Artificial Sequence
  Synthetic
EEIERILEKLRRDLEEVRKKVKKVLDELRELTEELKRKVEKVLRELKRLSEEIARRVEKGLSEEELKRLDEEVEERVERIKRELEEDNRRVEEKVREVKERLDDEAREIEERIKKAPETRELRTVAREIREELKKLREELDKLLREHRETSKELEKRLKEVLDRHRELSDRLRR

SEQ ID NO: 6655 - protein, 174 aa, Artificial Sequence; identical to SEQ ID NO: 6654
  Synthetic

SEQ ID NO: 6656 - protein, 181 aa, Artificial Sequence
  Synthetic
DELREMIRKVREINERSKDEIRKILEAIKKIVEDHRRVVEKLLRDLKDIVRRARETRSRPTPEELIKTIEKLLEELKRELERLERENKRLLEEIKRRVKELEDRNRELDKELRKEVEKLRTSEEARKRLEDLSRENKRSLDELRKRIDDILDENRRAVEESRERAKRVLDEVRETLKRDEK

SEQ ID NO: 6657 - protein, 181 aa, Artificial Sequence; identical to SEQ ID NO: 6656
  Synthetic

SEQ ID NO: 6658 - protein, 183 aa, Artificial Sequence
  Synthetic
SEVDEVEKRIREAIKRHRDRVKKIIDEIKKLLDDHRRRVKKLEDDLKKRADDVRKETKDGDRDKRTLVERVREELERARREIEEDLKRSREELKKIEKKAREVHKKSRDDLERLREEIERKVKGKEARDRIRELLKKYEDDLRRSEKEIEDILRRYERELRESEKRMREVLKRLEDELRRAEK

SEQ ID NO: 6659 - protein, 183 aa, Artificial Sequence; identical to SEQ ID NO: 6658
  Synthetic

SEQ ID NO: 6660 - protein, 183 aa, Artificial Sequence
  Synthetic
DEVKEVEKKIRKVLREHKKLVEELIRKIKEMIDRHKEIVERIIRTIRRELKRAEELARKGDKDKKTLLEEIRRRLRELAERAKEKHDKSREDLKELKRDAERKLRESEKRLKELEDEARRKVRGEEMEKRIEDLLREYREELERSRRELERLLEEYEKVVDESRKRIKTILDEVEKLLRDLDR

SEQ ID NO: 6661 - protein, 183 aa, Artificial Sequence; identical to SEQ ID NO: 6660
  Synthetic

SEQ ID NO: 6662 - protein, 174 aa, Artificial Sequence
  Synthetic
SSRERFKELSDRNKEVVERSRRRLEKLLEENKREVEKSKKRIEDMLRKADDLLRKLPVSEELLRRAKEMLRRIKEEVDKVEEDNERVDRELRKEVKKIEDDNRREDKRLADEVRRDGVTERLSEEIKRLIETHEKLLRELEKKIRDLIRKHREDVERIIKEIDKLLKKIDEDTR

SEQ ID NO: 6663 - protein, 174 aa, Artificial Sequence; identical to SEQ ID NO: 6662
  Synthetic

SEQ ID NO: 6664 - protein, 171 aa, Artificial Sequence
  Synthetic
SEEETLDELNRENEELLRRSKERLDRSHEKLKKILDDISERVKELLKRAEKLLRDENVDEKLKKEFDRRLKELRDKLRRLEEEVKKYLEESKREVRKLEETNRRMDEETRRRRDDKDRVSDRIRRLLEEHERVVRELLESNDRMAERLRRVAEELVKEIKKELDDLRRRTT

SEQ ID NO: 6665 - protein, 171 aa, Artificial Sequence; identical to SEQ ID NO: 6664
  Synthetic

SEQ ID NO: 6666 - protein, 171 aa, Artificial Sequence
  Synthetic
SEEETLERLLRKNEEELKKSKERLKELNRTNRKELRDSERRIKRALEEVEDLIRREKVDEDLLRELKRLLEELRRLVEKLKEENERADEETRKKVKELEDRNRKANEDLRRRRDDKDEVTKTIERIIEEHRRMIEELIKEIRKLIKEHRDKVRELLKRIKDILRRLKEERR

SEQ ID NO: 6667 - protein, 171 aa, Artificial Sequence; identical to SEQ ID NO: 6666
  Synthetic

SEQ ID NO: 6668 - protein, 188 aa, Artificial Sequence
  Synthetic
SLDERIDELRRTLEEMLDRIRRSNEEVLRDSRRVLEEIDERARRVVEEAEKLLREIDKRKGKNEDAERLLREIKKRIEDLRRRIEKLKKEYEEEDDRLEKELRDLHREIDRLKRELETEADRLKKENVSEEDIKRLLEKVREIIEELKRRNDELNKRIKDLSEEMRRRVKKLLDEIKEDLERIKRRAD

SEQ ID NO: 6669 - protein, 188 aa, Artificial Sequence; identical to SEQ ID NO: 6668
  Synthetic

SEQ ID NO: 6670 - protein, 188 aa, Artificial Sequence
  Synthetic
SLEEEIKELIKRAEEVLERLARSNKEVLDRSRKVLKELRETNKRLLEELKRALDKIRKDKGDDEDLRRELTKIREKSERLRKKSKDLEDDYRRLDEELRKRIKELHDKIKRLLEELKEKADDLRRRNVSEEDIKRLLEEVERIIRKLAEENKKLNKEIEDLSRRARERNERLLREVEKIIRDIRERAR

SEQ ID NO: 6671 - protein, 188 aa, Artificial Sequence; identical to SEQ ID NO: 6670
  Synthetic

SEQ ID NO: 6672 - protein, 181 aa, Artificial Sequence
  Synthetic
SEVEELTKKAKKIIEDHRRYVEKSARDVERLIREHERYVEESAKKVEKLLREIKELDKRDLREEDRKRVDETIKRILDKLREENERAKEENKKMLDKLRRDNEKVERENRKLLDDLRREVKDIRDKDKIRELERENEEVIKESRERSERLARKNKKVLEDSERRSRELSERVERLLDESRR

SEQ ID NO: 6673 - protein, 181 aa, Artificial Sequence; identical to SEQ ID NO: 6672
  Synthetic

SEQ ID NO: 6674 - protein, 171 aa, Artificial Sequence
  Synthetic
REEDVLRKLEKEIRDLLERIKRKSEELIERNKRTNDDIRRRSKETIDELRELTKRVDIDDSVRRRVEKVEEELERENEKLSRDDKRSIEENKKKDDELARRVEKVIEDLRRANVPDEDIRREAERLLREMEKRAKENEEDVRRNLKRLRDALKEHKEKVEKLLEEIKKDAK

SEQ ID NO: 6675 - protein, 171 aa, Artificial Sequence; identical to SEQ ID NO: 6674
  Synthetic

SEQ ID NO: 6676 - protein, 175 aa, Artificial Sequence
  Synthetic
SETDDIIRRIRRLIEELLRNSKRTSDDNRRTLEELERNSERAIKKIKDVLEKLSRDRVPEDELKKRLDELREEIKEVEERHEELLERDRRKLEEVEKEHERRLEEIKRRIEKVLRDTSSDEKAEKIRKELEDMARESRKLMRENKREVDRVEKKSRKLLKDILDEIDKVDEDEKR

SEQ ID NO: 6677 - protein, 175 aa, Artificial Sequence; identical to SEQ ID NO: 6676
  Synthetic

SEQ ID NO: 6678 - protein, 176 aa, Artificial Sequence
  Synthetic
SEAERIAREVERVLREIEEEVKRLSEENRELVERIERESRKSIEDIERRLEEVKRKVKREELLKEVEKELRDLDRRHKEKHDEVERESRELLKRIEEVLDRARKELEELEKRAREENRLDRRLLEALRREVEEVLKRIRETLEENRRRNEEVLRRDKELLERIRDKIRRVLEELKR

SEQ ID NO: 6679 - protein, 176 aa, Artificial Sequence; identical to SEQ ID NO: 6678
  Synthetic

SEQ ID NO: 6680 - protein, 177 aa, Artificial Sequence
  Synthetic
DEERELRKLERELEDVVRKDRKILEDLRRTLDTVRREDERILRELEETLKEVVKRVREKGTTEDVDRKVDENRKELEKAKRKSEEETERNKERLDDILRRSERRLEDIKRRLDELERRGEDIRRISEEAKELLKRWEDESRKVEEEHRRSLEEWRERSERIAREHKKSLEKLEKDVE

SEQ ID NO: 6681 - protein, 177 aa, Artificial Sequence; identical to SEQ ID NO: 6680
  Synthetic

SEQ ID NO: 6682 - protein, 181 aa, Artificial Sequence
  Synthetic
SIEELLKKLEEDIERVLRKSEELLKRNEEENKKVLDESKRLLDELKKRAEKVLRELKDEKRRLEDAERKIREMEKEARKVLEDSKRTSEKLKKKAEDVLKRSKEEVEELKRRVKKVREDGTTEEVLKEIVKRVRDDIERHDRESKKLSDENKRVVDEHRKRSEELARKLEELLREIRERVT

SEQ ID NO: 6683 - protein, 181 aa, Artificial Sequence; identical to SEQ ID NO: 6682
  Synthetic

SEQ ID NO: 6684 - protein, 183 aa, Artificial Sequence
  Synthetic
SDIEKLAEEVDRLNKELTDRLERLREEHKRTLDEIRKTLEKLKREVDKELEEVKKIVKDGDNRERLEEDLRRRLEELEKRMKELKDRNRRKAEESERKLRELLKDNKDKLEKIKDDARKADSRDERVKKILDDLKRKNEENDERVERIMRELRERNRKLNEEIDKIVEDIRREVEKVSREARR

SEQ ID NO: 6685 - protein, 183 aa, Artificial Sequence; identical to SEQ ID NO: 6684
  Synthetic

SEQ ID NO: 6686 - protein, 180 aa, Artificial Sequence
  Synthetic
DAVDRVREENKKDSERNKKRVEDVKRRAEERSRRNKKKVKELRDRNREEIKRIKELKDRGEVTEEERKKIRDRYKKDEDRVRKEDEETKRRLEEETKEDDRRNEREEREYEKKAEELERRNIVDRKVEEESRRSFKRNKEENKKVRDEIKKTIEENEAENRKAHEDSKRSFEELEDELRK

SEQ ID NO: 6687 - protein, 180 aa, Artificial Sequence; identical to SEQ ID NO: 6686
  Synthetic

SEQ ID NO: 6688 - protein, 182 aa, Artificial Sequence
  Synthetic
DKEREATRRLRELEKENTKLVKEIRDADREIEKRLREIHKKLEDENRKLEEEIKDMVRRKGDTSEEEKKKLDDLRRRLREAHRELDEERKKSEKKLEDDHRREETRLRRNREETKKTEDDLRREGVDDRIVEEVKKHHERNERRLREYLDESRKYLEDHIRRLEKYLEDSRRLATRIKEETK

SEQ ID NO: 6689 - protein, 182 aa, Artificial Sequence; identical to SEQ ID NO: 6688
  Synthetic

SEQ ID NO: 6690 - protein, 178 aa, Artificial Sequence
  Synthetic
SSVEEVKRKNEKSLREIERASEEHLERLKRELEKSEDEARKHNKKLDDDLERLERKGGGDEDAERELRKLREDSERERKEHKEKLDRARRRSEKMKEDLKRRLEKLDREHREDRRREPDDERVKDLERTHEESKRRVEELMKENDDLLKRIEEESKRLNEENERKVEDIEKKVEDLKR

SEQ ID NO: 6691 - protein, 178 aa, Artificial Sequence; identical to SEQ ID NO: 6690
  Synthetic

SEQ ID NO: 6692 - protein, 182 aa, Artificial Sequence
  Synthetic
SEIERVAKELKDEADRLRKEVEKHRRRSKEELDRLREESKKVNEDLKRMLERIREIAAQGNLEEDILRTMKEEIERRREEYEERLKAVEERLRREHERTKKKLDDDRRRIEKKRKDLTDKLEPNEEFKKLRDLIEDIKRRLEELVKALEETNKKIEDDVRDSVRKNRETLERIKKEIEDTAT

SEQ ID NO: 6693 - protein, 182 aa, Artificial Sequence; identical to SEQ ID NO: 6692
  Synthetic

SEQ ID NO: 6694 - protein, 183 aa, Artificial Sequence
  Synthetic
KDVERILREIRETLRRVEEEAKRSNDEIRKLNEEAERIVREILKEIEKELREVRKRLTEKGPRERLEEELKRRLEKIRERIERAREEYERKVREEEKKHREKEERDRERKERTEDRIRRRQSENDELLRRLKEELDRVERTIRELIRRNEEVLERSDESVEKLLRELEELLRRVEEEIKKAAT

SEQ ID NO: 6695 - protein, 183 aa, Artificial Sequence; identical to SEQ ID NO: 6694
  Synthetic

SEQ ID NO: 6696 - protein, 176 aa, Artificial Sequence
  Synthetic
SEREERAKRLRKILEDLKRESEEHLRRLKTRLDKLREDSKKHLEDVRRKLEDLKRIVEENKVSREELEKRREDIERRVRESEKRTDEREKRDEERHREFRKDLERKVRTMRDETRRGGETDDELRKLVRKVEEDLKRLDEENKKLLEKVKRDLDRLKKENKDLLKRVEEELRREAT

SEQ ID NO: 6697 - protein, 176 aa, Artificial Sequence; identical to SEQ ID NO: 6696
  Synthetic

SEQ ID NO: 6698 - protein, 176 aa, Artificial Sequence
  Synthetic
SEEEERKRRLEEKLERLEEKSRRHLKEVKRTLEELEERSRRHLDENRRLLKRLKEIVDRNEDSEEVIERREEEIDKRNEEEERETRKRAEETDRRVEKSEEKLKRDEDRMDKETKDGGDTSEEIKKLVKDIKEELKRLLEENKRLLEEAKKTLKKLLEDNRRLIEKIKKELDEARK

SEQ ID NO: 6699 - protein, 176 aa, Artificial Sequence; identical to SEQ ID NO: 6698
  Synthetic

SEQ ID NO: 6700 - protein, 174 aa, Artificial Sequence
  Synthetic
REEERLKRELEKDLERIKKLSDEHKKRLEEENRDLRRKSREHKEKLERDLRRVEEIRRREKIREEIEERIRRRDEELERDNERVKEEYDRRREDRRRENEEIKERLKERKEETRKKDTSDEVERLLKEIEDRVRKLEKENEEIARRSTETLEKLLKENRETLKEIRDRVREAKR

SEQ ID NO: 6701 - protein, 174 aa, Artificial Sequence; identical to SEQ ID NO: 6700
  Synthetic

SEQ ID NO: 6702 - protein, 174 aa, Artificial Sequence
  Synthetic
SEEEELKRRLKEILRELKELSERHKKRLRELNEKLKRLSEEHKRKLEEITEDLRRIATREPIREEIDKRYREKVERAKEENKEIEEDYKRAEKELREDNRRIEEEVRKKEEDTRRTPNSEEVKRLLDEIRRELERLKEENRKIVEDSTRTLKELLEENKRILEESSRDLERLKR

SEQ ID NO: 6703 - protein, 174 aa, Artificial Sequence; identical to SEQ ID NO: 6702
  Synthetic

SEQ ID NO: 6704 - protein, 174 aa, Artificial Sequence
  Synthetic
SEEEKIKEEIKRDLEDLRRLSKEHKDRLRKLLEDIKKLSEEHKDKLRRITKELRDVVRREEIREELDEEYKEKAERARRENEEIRKKLEEDVERLRKENERIKREAERRDKETEDTDTSEEVKRLLEKVKEDLKRLLDENKRIIERIEREVERLKRENEEILKESSRDLERAKK

SEQ ID NO: 6705 - protein, 174 aa, Artificial Sequence; identical to SEQ ID NO: 6704
  Synthetic

SEQ ID NO: 6706 - protein, 174 aa, Artificial Sequence
  Synthetic
SKEEKLKEDLKRTLDDARRLAEETKRRLEEILEKLKRLSEKSKEDVKRTTDELRDIVRKRKIDEEIDERYKDKKRKHERRMTEIDKEVRELDEDTRRKIEKIDKELEDRDDRTRKEDTSEEIKDLLRRIREELKRLKDELRRIIEEIRKELERLKRENEELNRRSSEELKKAKK

SEQ ID NO: 6707 - protein, 174 aa, Artificial Sequence; identical to SEQ ID NO: 6706
  Synthetic

SEQ ID NO: 6708 - protein, 179 aa, Artificial Sequence
  Synthetic
SEVEELLERHKRALDKAKKVSEDHKRDLKEKLDDVKRKVEELERRLKRALDELTKEGGGSTDVERKLREVDEKTERDRRRLDEEVKRVEDESREKTERLREEVKRLHDESRDRKEKLRLEEDLVRTLDELHKDIERRLRKLEEENRDILRRIREEIERLKRKLDEIARRIKEEVKKLKK

SEQ ID NO: 6709 - protein, 179 aa, Artificial Sequence; identical to SEQ ID NO: 6708
  Synthetic

SEQ ID NO: 6710 - protein, 179 aa, Artificial Sequence
  Synthetic
SEVEELKKEHKKVLDEVRRASKKHKEELEEMLRDLKRKADELARRLEDALRRLEEEGGGGDRVEKDLRRIEERLKEDEKRDRDKVDELRRRSEEKLKRIKRRMEEVSKKSEDDERKLRLDKKAVDELRELHKEIKRRIEKLLKENEEILRKIEEDIERLLEDLRRKAEEIKRRVDETRR

SEQ ID NO: 6711 - protein, 179 aa, Artificial Sequence; identical to SEQ ID NO: 6710
  Synthetic

SEQ ID NO: 6712 - protein, 179 aa, Artificial Sequence
  Synthetic
SEVEEIEKENKDAVRRMREKSRRHKEELKDALREAEEISRRHKEELKRKLEELTKRGGGDEKLDEDLKRIRDKSKKTTEDLKRKVEELRKRSEETLKELEDDLKRLHEKHKDTEDKMDLEEELVRKLRRLDKRTHEDVRRLLDENRRTLEKIEEDIRRLIKENEDTLREIEKRVEDKKR

SEQ ID NO: 6713 - protein, 179 aa, Artificial Sequence; identical to SEQ ID NO: 6712
  Synthetic

SEQ ID NO: 6714 - protein, 177 aa, Artificial Sequence
  Synthetic
SEDEELKKEIEKLLRELRKRSTESKKEIEDLLDELRRKSERSRKEIEDTLRELEERAKGERSEEEDKRTREDTEEKEKEHRKKLRKEDEELREREKEHERKLREVEKRLREREEETKSRETSEEIKELLERLRRDAERLKKENEDLNRRLREEVEKNKEDNKRLNEELRKKVEEDRR

SEQ ID NO: 6715 - protein, 177 aa, Artificial Sequence; identical to SEQ ID NO: 6714
  Synthetic

SEQ ID NO: 6716 - protein, 185 aa, Artificial Sequence
  Synthetic
SLEETLDKILEDIRRRIRENEERNRRLKEEIDKAIKRNEEENRKTNEDIKRKIDDLERKRGDRSKEVEDTKREVEEEEDRSRKKEDEDRERVKRAKEESERRREEDKKRVEDMERRAEEKKDKEQDKKEVEELIRELEDELRKLEERSKEHLDRLREELKELDERSKKHLDELRKLEEKLRRDAD

SEQ ID NO: 6717 - protein, 185 aa, Artificial Sequence; identical to SEQ ID NO: 6716
  Synthetic

SEQ ID NO: 6718 - protein, 175 aa, Artificial Sequence
  Synthetic
SETEKLLERIRRNVEENEKYAREHLKKLDKNLKDNKEYIDRHVKKLKERLDTLREIAREKDPSRELDKALEETRRDSRRSEENRRRHEKRTRDEAKKSEERLRKHRKDSEKETKDGGDREERIEKLLRELERTHRELKEELDKLHKRLEEEHRRLEKKLRDIHRKVEKDLRDLKR

SEQ ID NO: 6719 - protein, 175 aa, Artificial Sequence; identical to SEQ ID NO: 6718
  Synthetic

SEQ ID NO: 6720 - protein, 175 aa, Artificial Sequence
  Synthetic
EEKERLKKRIRDNVEENKKYAEEHLKRLKEKLEEVRKYIEDHKDRLRRKIEELKKDAERKPDDRELEEKEKKDREEAERSKRRRDEKRRKIEEDSRESRKRRDRHRRESEKEIRDGGDNDEEIRRILEELRRTHKKLEEELEELHKRVEDELRRLEDELREIHERLEETLRRLRK

SEQ ID NO: 6721 - protein, 175 aa, Artificial Sequence; identical to SEQ ID NO: 6720
  Synthetic

SEQ ID NO: 6722 - protein, 175 aa, Artificial Sequence
  Synthetic
SEKEKLKEEIKRNVEENRRYVEEHKRDLERNAEENEKYIREHLKRLKEEAEEVRDRVAKEPPDRKMEKTEKETDKRAKESRDRAERHKEETRKKAEESKRREDRHREESEDRAKKGGDRDKEIERLLRELERTHRELRKDLKRIHDELKKKHDDLRRTLEEVHKRVKEELDRARR

SEQ ID NO: 6723 - protein, 175 aa, Artificial Sequence; identical to SEQ ID NO: 6722
  Synthetic

SEQ ID NO: 6724 - protein, 175 aa, Artificial Sequence
  Synthetic
SEKEELIERIRRNLEENRRYIERHLEELEKKLDDVRRKAKRHLEKLREELEKLKDDARKKPPDREVEKRKEEKDRESERSKRELDRTREEIERETRESEDRERRHAEESEKRIKDGGDNDEEIRKLLEELRKTHEKLKRDLERLHKKVRDTLKKLEDELKELHKRVDDELRKLRK

SEQ ID NO: 6725 - protein, 175 aa, Artificial Sequence; identical to SEQ ID NO: 6724
  Synthetic

SEQ ID NO: 6726 - protein, 179 aa, Artificial Sequence
  Synthetic
DEERKLEELEKENDKLLEDAKRTLEKLLKDNRDLVKRVEDELRRLEEENKKLADDVRRDGKSDEKIERDIDKSRRDTRDEARRARERIKRSEDELRREMEELDKRHKEFKEDERRKRKEKRRSSKELEDRSREHLERLKARLKELEDKSRKHLEEVKKELRELEEKSKKHLKRLEDARR

SEQ ID NO: 6727 - protein, 179 aa, Artificial Sequence; identical to SEQ ID NO: 6726
  Synthetic

SEQ ID NO: 6728 - protein, 179 aa, Artificial Sequence
  Synthetic
DEEETLKRLDEENDKLLEEVKKTLEDSLRRLEELHKRTEEELRKSRRELRELVKDVERKGSLREEIKKELDDYDRRTKEELDKTRDEHEKYKRKVREELKRTDEKVRRSKEDDERVRREKRRSKEELRDKSRRHLEDVKRRLEELKKSNEEALRRDEKKLEDLRRSNEKVLRELKEKAR

SEQ ID NO: 6729 - protein, 179 aa, Artificial Sequence; identical to SEQ ID NO: 6728
  Synthetic

SEQ ID NO: 6730 - protein, 179 aa, Artificial Sequence
  Synthetic
SEEEEVRRLEEELKKLHDDIKRRLEELLRENEKILRDIDREIKKLLEELRKTIDKADKDGVLSEELKKELEKLLKDIEDTLKRLKDESKEDRERLEKELRELSKRSREEDEKRRKATKDGDRDKDELRKIVEELKRDHEKDLRKVEKLSEEHKEKLRRALEELKRLAEEVKKRLDDERR

SEQ ID NO: 6731 - protein, 179 aa, Artificial Sequence; identical to SEQ ID NO: 6730
  Synthetic

SEQ ID NO: 6732 - protein, 189 aa, Artificial Sequence
  Synthetic
SVEERLEEMERRNKDLIRRVEEDLERLLKENRDLIRRIKEELKRLKEELKELVERISREGDRPEEEKERVKERLKKEEKETDEKAERDDRRHRKTEKETRDRVREDRKRHEDEERRRREKARRLKDSGSKEEVLKELEEENRKHEKRLRDALERLRRRSKKHKDEARKILEELKERAKTIKRRLEEDRR

SEQ ID NO: 6733 - protein, 189 aa, Artificial Sequence; identical to SEQ ID NO: 6732
  Synthetic

SEQ ID NO: 6734 - protein, 189 aa, Artificial Sequence
  Synthetic
SVKEDLRKAKEENKRLIEKAEDDLRKLLRENKELLKRIDEELKRLKKELDDIVRRIEDKGDRPKEDRDRVKKEADEIREETDREVEEERRDVKRTEEETKKRAEDSKRRHKKFEDDLDEKARELERSGSKEEVLEKLKRDNEDHKRRLKEDLRRLREESKKHKKKLEDRLKKLEERARRIKEKLKEEER

SEQ ID NO: 6735 - protein, 189 aa, Artificial Sequence; identical to SEQ ID NO: 6734
  Synthetic

SEQ ID NO: 6736 - protein, 184 aa, Artificial Sequence
  Synthetic
DDEERIRKIAEDIKRKLKETLERLRDESRKNKRKLEDLLRKSEEKAKRLKDKLRKMEEEKERKRDEELKREIERLRREKEELHKEFRKRVEDTRRENERRREEVKKRLDTMRKETEDTEEKIRRDGVDNEDVKRLLRELKEITDRIDEEVKRLREENERITRRIEEEHKRLNKELERILREIER

SEQ ID NO: 6737 - protein, 184 aa, Artificial Sequence; identical to SEQ ID NO: 6736
  Synthetic

SEQ ID NO: 6738 - protein, 175 aa, Artificial Sequence
  Synthetic
SSEEKAKELRKRLRETHKRVKDEIKRLKEELEESHKRLEERSRETLRKLEELIKELNVSEEVLDELRRKLERLEEEHKKYKEKSKRELEKIDEDVERYERDSRREEEETEKKLRKDGVVDTELEKDVRRVEEKNRRALEDVRRKVEEVKESNKRALEKNERIVREVERRLREEKK

SEQ ID NO: 6739 - protein, 175 aa, Artificial Sequence; identical to SEQ ID NO: 6738
  Synthetic

SEQ ID NO: 6740 - protein, 175 aa, Artificial Sequence
  Synthetic
SSEERFEKLDRELKRTHEELERAIRELKKDYERSLKRVEEELKRLLDELEELARRVGVDEKVLKEEEDERRRLREEVEKYKKDAKEELKRTDDKVRKYKEKSDRDRERAEDEVRKTGVVDTKVTETVRRVREENKRMLEDVKRDVDRLRTSNEKVLRDIRRTVKRAKERLKELKE

SEQ ID NO: 6741 - protein, 175 aa, Artificial Sequence; identical to SEQ ID NO: 6740
  Synthetic

SEQ ID NO: 6742 - protein, 179 aa, Artificial Sequence
  Synthetic
SAEDELRRLRRELEKSHEELKRRIDELLKRLRELVKRVKDRSKELLDELRKLLEDVKRKGRVSERLEEDIRKHMKRHRERLEREERELKKKLKEMEDRVREYEDRSRREAKKDEEDIRREGVKDTRVRERVKETRRRNEEVLREVERIAKEVEDDLKRILEELEDNVRRVKKKIKDVER

SEQ ID NO: 6743 - protein, 179 aa, Artificial Sequence; identical to SEQ ID NO: 6742
  Synthetic

SEQ ID NO: 6744 - protein, 179 aa, Artificial Sequence
  Synthetic
SSEEELKKLEKELEETHRKLKEDVERLLRDLDRKVKKVEDDSKKLLDELRKLLEEAKRRGVVSEEVEKRVRDHMKRHEEELKRIREELEREKEERREELRRYEEEVKKKREEDRDDIRRRGVKERDVRKRVKEMKEDNRRALEDIRRKTEEVAKKLREILKKLRENVRRVAEEIKRVAD

SEQ ID NO: 6745 - protein, 179 aa, Artificial Sequence; identical to SEQ ID NO: 6744
  Synthetic

SEQ ID NO: 6746 - protein, 179 aa, Artificial Sequence
  Synthetic
STEEELERLRRELERTHERLREESEKLVRELRKLVEEVREALERLRRDLKRLLKEVREKGRASEDVERELKKEDERIEDKARKDKEEADKHERRHREDLKRYEKKSEEDDRRREKKIRDKGVKETEVREEVKRTKEENKRVEEKLRRNVDEMRKKLEEILRRIKEEIDKMRRKIEEIER

SEQ ID NO: 6747 - protein, 179 aa, Artificial Sequence; identical to SEQ ID NO: 6746
  Synthetic

SEQ ID NO: 6748 - protein, 178 aa, Artificial Sequence
  Synthetic
DVEEDLKRLEKKNRDLNKRMEDSNRKLEEDDERVNRKIRKDHKKAEDDLRRVIKEVEEENRSDERDKKRLKKRTDDNRREDKRRDDENKKTNKDYKRRFEKKRRENEDTDRKTKDEVRRRGVTEKTIEDIERHLDRLRKENDKLRKELEDHIRRLEEEVRKNLDRIREEIERARERVR

SEQ ID NO: 6749 - protein, 178 aa, Artificial Sequence; identical to SEQ ID NO: 6748
  Synthetic

SEQ ID NO: 6750 - protein, 179 aa, Artificial Sequence
  Synthetic
RAEDEVRKIKKEIDELIRRLEKLNEDIKREIDELVRRLEELNKRVKEEIKRLIEELKKENRVDERKVRKLEEDLERHDREVREDKERIERTAKRHREDVERNKEETTRRREKTKREIDRDGVGDRELKERLDRMRDHARKHEEKLKESLKRVREHVKRHAERVEESLRRLKRDVDELRK

SEQ ID NO: 6751 - protein, 179 aa, Artificial Sequence; identical to SEQ ID NO: 6750
  Synthetic

SEQ ID NO: 6752 - protein, 174 aa, Artificial Sequence
  Synthetic
SSDEKLEEIERHHRKVEEESRRLDEDIKRHHKEVEDESRELLERIKKKLEDVTRALGREDREMKELKRELDKRREEVKRRDDREREKSKKREDEIEKKDRERRKESEEKRRRLREEGLRDEILEKLERDNRRYKEESEEEVERAKEENRRYLEESRREVEEFDRKLKEIADRAR

SEQ ID NO: 6753 - protein, 174 aa, Artificial Sequence; identical to SEQ ID NO: 6752
  Synthetic

SEQ ID NO: 6754 - protein, 182 aa, Artificial Sequence
  Synthetic
SELEERVKKVEKVNEDLKRRVEEHERRVKRTLERLEEEVRRHAEKVKKRLEELRRLAKDVERETLEREIREDEKRSRDDAERLAREIERVRKESEEDAKRKKEDNERKNRERKDSARRQGRSEERIEDLLRRLDDRNRETEREIEERHKRLKEELDKVEERIRREHEKLKRELEEVERRTRK

SEQ ID NO: 6755 - protein, 182 aa, Artificial Sequence; identical to SEQ ID NO: 6754
  Synthetic

SEQ ID NO: 6756 - protein, 185 aa, Artificial Sequence
  Synthetic
DVVDELRRIAKEVRDRLREIVERLDRIAKEVVKENEEVVRHNDELAKRVVTTAKRIVDEVKDKETVKRRIDRIAEKVEEDTKEHEDRSKRSEEDVERVVKKIREEVKEIVDRVEKFVKEVRDSGTDSEEVKRVVETVRKLLRDAEKEIEEVVKKVRDLLRRVNKELKESVERVRRLLEEVRERAR

SEQ ID NO: 6757 - protein, 185 aa, Artificial Sequence; identical to SEQ ID NO: 6756
  Synthetic

SEQ ID NO: 6758 - protein, 186 aa, Artificial Sequence
  Synthetic
SDLDRVLRKIEELVREIEKESERTNRKSERDTEEVARRSEDSDRDIERLVREIRDRLRKAGVDSREVERVDRELEELLRRLRKENEDSLRESERLNRENKRRSEDSVKKLRDILARVEEKVRKREDLKDVVRELEEIVKELEERAKENVKRSEKSVKEDLDVLADNVRRSKEIVEEIKKRADEVVT

SEQ ID NO: 6759 - protein, 186 aa, Artificial Sequence; identical to SEQ ID NO: 6758
  Synthetic

SEQ ID NO: 6760 - protein, 171 aa, Artificial Sequence
  Synthetic
SEKEKVIKEARELLERLRKRLKDVNDDVTRLLDELRKENEKSREDVEREVKRLEEEVPVEDVIRELKRRLEEVDKKNRDILETLKRELDEVSRRTREELEKLRKELEEVEKAGLPAEELKRVADRLRRRLERLVEENERVVKKILDEIRRSVEENKRIVDKVRKDLDERRK

SEQ ID NO: 6761 - protein, 171 aa, Artificial Sequence; identical to SEQ ID NO: 6760
  Synthetic

SEQ ID NO: 6762 - protein, 171 aa, Artificial Sequence
  Synthetic
DEDEKVLRKIEELVRRLHEKNRKVLEESKRTLEKVEERLRRVLKEIEDLVRDAARRVDKREVIEELKKDLDRVRRKLEKVRKENADLNDRVRRELEEIDKRLKKKLDDVRRSDRDVSELDKIIKELKREADESVKKLKEIVKRSLDHLEEVVKELKKRLDDLKREIDTKAK

SEQ ID NO: 6763 - protein, 171 aa, Artificial Sequence; identical to SEQ ID NO: 6762
  Synthetic

SEQ ID NO: 6764 - protein, 175 aa, Artificial Sequence
  Synthetic
SLEEEVKKVVEEIKRRIEDDVRRIRELVERIKKLIEKDVTDLKRVVDENRDLAEKAKRIPKEDVDRVVREVERSNDELRRHSEEVLRRVERLIRELERHSREVIKRIEDTIRELRRRKVSEELLRELRRVLEEAREDSRRLLEEIRKVLEEAEEKSRRVLEESKRVNDELRERLR

SEQ ID NO: 6765 - protein, 175 aa, Artificial Sequence; identical to SEQ ID NO: 6764
  Synthetic

SEQ ID NO: 6766 - protein, 176 aa, Artificial Sequence
  Synthetic
SLDESAKRVLEEIKRLAKEDLDELKRVLDEIKEILREVLEANRDSVRRIEEEVEKLARVDDERTVKRLEDEAKRILDDNRRKSERVARELERLLEELKRHSEDVLKKLKDLLRELKEEGVDDRVLEEIERVIRKIEEDSRRLLKEIADVIKKVREESKRLLDDLKRVIDELRERAR

SEQ ID NO: 6767 - protein, 176 aa, Artificial Sequence; identical to SEQ ID NO: 6766
  Synthetic

SEQ ID NO: 6768 - protein, 185 aa, Artificial Sequence
  Synthetic
SLEEVLDRVRRESDKVRKTLERVKEEVERVSREVVEDLKRVEEEVRRLIERVKDILRRSNIPEEDLRRLERRLEELERKIKKVVKDNEDRNRDLNRRIDEVIKENERRNRELLKKAEEDIRRKKDKEELIRDVLREAERLVKESLDDIRRLLDEVRRLVEESRRNIERLLEEVRRLVEEIERAAE

SEQ ID NO: 6769 - protein, 185 aa, Artificial Sequence; identical to SEQ ID NO: 6768
  Synthetic

SEQ ID NO: 6770 - protein, 178 aa, Artificial Sequence
  Synthetic
DKVDEVLKRVKRVVEEIEDRVRKLNKEVRDVVKRIEELAREVLDHSRKVVEEIKKTAEDRKDERVLEEIKRKSDEDEKRLEDVLRRIKELLDRLDDKHKRILEEIEKKIRELRERIKKTGIEEEVVRTVKEELDKALEKAERVLEHSRRMLERVLKEAKRVLDEVKELNKRVIDEVRR

SEQ ID NO: 6771 - protein, 178 aa, Artificial Sequence; identical to SEQ ID NO: 6770
  Synthetic

SEQ ID NO: 6772 - protein, 175 aa, Artificial Sequence
  Synthetic
SVEDVAREVDKLLKRANEESKRVLEEVERLLRTVSRELEKVIRDVKKLIDDVEKRVPLKESLEEVKRRIEKLVEDVKRVNDESRRRIEELIKELKDMDRRSKEEIEKLRREVRTSGSETAEKVLRDVERIVRRNEELVREVLRRVKKIVDENRKIAEDALRKVEELVKELEERAR

SEQ ID NO: 6773 - protein, 175 aa, Artificial Sequence; identical to SEQ ID NO: 6772
  Synthetic

SEQ ID NO: 6774 - protein, 178 aa, Artificial Sequence
  Synthetic
SEAEEALERVKELVKRSEELAEESLRRARKSVEEVARRAEEALERVKKSVEEVKEVRKEGQPKEELDKILEKNKRDTERLRRDLERILRENKRKTEKLAEDNKRAIDEIRKRIDDLERKVDGKEVLDKVRDLVRRVDEENRRVIEEAKKLSEDVARRVDKVIKDVERLSKRVEDEVRR

SEQ ID NO: 6775 - protein, 178 aa, Artificial Sequence; identical to SEQ ID NO: 6774
  Synthetic

SEQ ID NO: 6776 - protein, 178 aa, Artificial Sequence
  Synthetic
DEDRRAVEELRRVVEEVNKLNEDTLRELERIVRENIRRVRELLKEAEDVVREVEKEVRRITDKEKVERILRKLEKILDRIRRESERLDRETEEVLRKLHEENKEILKELEKKLRDVKEKVKEAEEVLREAKDLIDHVRKTIEEVNDTVRDLVRKVHEVNKEVLDRIRKLVEEVRKTVE

SEQ ID NO: 6777 - protein, 178 aa, Artificial Sequence; identical to SEQ ID NO: 6776
  Synthetic

SEQ ID NO: 6778 - protein, 184 aa, Artificial Sequence
  Synthetic
SSLDRVRRAIEELVKKVNTDSKRVKDRVRKLLKEVNDTSDRVRRDVKRKLDKVKDDARKAGTPDDVKRKLRRVEEEIKKLIEEDKEKNRRSEREVEELIERLEEANKRSKEELEKLIEDLKRSTDDRVVERVVREVERIVRENEELVKEVVRRAEEIVERNERHSRELLRRLAELVDDLRRKIE

SEQ ID NO: 6779 - protein, 184 aa, Artificial Sequence; identical to SEQ ID NO: 6778
  Synthetic

SEQ ID NO: 6780 - protein, 184 aa, Artificial Sequence
  Synthetic
SSLDEVRKRVTELLKKVDDTSKKVEDDVKRLLDKSTRTSDEVRKAAERLLEEVEESARRKGTPEEVKRRLEDVKRKVRKLIDDNRRTNERVRKRVEDLIRENRKKLEEVKRRVKKLIDELRRSTDDEMVKRVLEELKKIVDDLERHSRKLLKDARRIVEESIEHSDRVLKEATRIVEKLERDIR

SEQ ID NO: 6781 - protein, 184 aa, Artificial Sequence; identical to SEQ ID NO: 6780
  Synthetic

SEQ ID NO: 6782 - protein, 181 aa, Artificial Sequence
  Synthetic
DEIEEVLREMRELVERNVREIEKVVRENEKLVEDNIRLVREVAKELRDLVRKLIERVARTTDKEELKRVLKTIEDEVRKITERLKESSERSERESRKSVDKLRKSTEDIKRRIEELERRVERTEELEEVVKEARRLLKKSEEDLRRVEKRVEELNEKSKEEMERVRDDVRRLLEEVKERAR

SEQ ID NO: 6783 - protein, 181 aa, Artificial Sequence; identical to SEQ ID NO: 6782
  Synthetic

SEQ ID NO: 6784 - protein, 181 aa, Artificial Sequence
  Synthetic
SEVDELLRLADEIVRELRELVRRHDEIVDKLVEENRRIVEEHLRRVEDVVRRLKELVKKIKDKKKLEDKLRDLLKKLRELSREVEKLNRESLETIRRTTEDLERKLETLARKVRELEERVRRDEEAERVVKEARRLLREIEELVKRSVERVERLHREVHERIKESTKRVEELVDEVRKAVK

SEQ ID NO: 6785 - protein, 181 aa, Artificial Sequence; identical to SEQ ID NO: 6784
  Synthetic

SEQ ID NO: 6786 - protein, 184 aa, Artificial Sequence
  Synthetic
SAVDEVRKVIKEIFDRLAELLKHNSDMVRRLLEEIRELVKNNTEIVREVLKKLEDILRELTDKDEVRKALKELVDRLRKVSEEHKRRIEEIERRIRRVSREHEKTLKKIVDDLERLIRDVRERVEEEKLEKVAEDARRAIKDIEDKLRDSNRRLDKLIKEVRRRLEESHKRIEREIKEIEERVR

SEQ ID NO: 6787 - protein, 184 aa, Artificial Sequence; identical to SEQ ID NO: 6786
  Synthetic

SEQ ID NO: 6788 - protein, 187 aa, Artificial Sequence
  Synthetic
DKLDEVKEAARRVVEEAHKKNRRVLEKLDEVSRRAHELDKRVKEKLKEVVKRADDLLKEKGISEEKVKRVRDEARKIERELDRLNEENKRKNDESKKTLRELNERDREVVRKVEKEIEDLRREGGDDVDTLVERLRRLVEELRKHSDDTVRRMEDIVRRNKKHSEESVRKMDDIVKKLEELAREVVR

SEQ ID NO: 6789 - protein, 187 aa, Artificial Sequence; identical to SEQ ID NO: 6788
  Synthetic

SEQ ID NO: 6790 - protein, 187 aa, Artificial Sequence
  Synthetic
DRLDKVKEDLKRSSEDAHRKNKEAIELLDEVSTEAHKLDEDVRRKLEKVVREVRKLLEDKGISEELVKRLDDTAREVRERLERLNERNKEVNKKSKEKLKELNRRDEEHSRRLDKRLDDLARKGGDDIDTIVRDAEKIVEDNRRHSDETVRRIERLVTENLRHSEESVRTLDRLVEELLRTAEEVVR

SEQ ID NO: 6791 - protein, 187 aa, Artificial Sequence; identical to SEQ ID NO: 6790
  Synthetic

SEQ ID NO: 6792 - protein, 187 aa, Artificial Sequence
  Synthetic
DKLERVLRELERSSKEAHEKDKKVLEDLDEVSKRAHKANEEVIARLEDVVRKAEDELRKKGISKELVKRVEDTVRKIRKELEKLNEDDRKKNKESEDRLRKLNEDNKRHSEDVKRKLEDLARKGGDDLDTLVKRIEDIVKENEDHSRRSVEEIRRIVEENERHSRESVKTIKDLVEELERRAEEVVR

SEQ ID NO: 6793 - protein, 187 aa, Artificial Sequence; identical to SEQ ID NO: 6792
  Synthetic

SEQ ID NO: 6794 - protein, 187 aa, Artificial Sequence
  Synthetic
SELEKVLKDLEESSKEAHKADEEVLRRLERVSREAEKELKRVLDDLRRVVEEVERLLREKGISEEKVKRVKDTADEIKDRLKKLLDEVRERNRESEERLRELNERNKKHSEEVLRRLRELRRKGGDDLETLVRDARRIVKENEEHSRDSVRRIDKIVKENADEVRRVVKEIKDIVKRLEELARETVR

SEQ ID NO: 6795 - protein, 187 aa, Artificial Sequence; identical to SEQ ID NO: 6794
  Synthetic

SEQ ID NO: 6796 - protein, 171 aa, Artificial Sequence
  Synthetic
SLDEDVDELVKRVEEEMRRNVKELDKLVKEDKRLAEENVRRLEEIVDRSRKLADRKEGDKEKIKREADKSLEDLEESTRRLKERSDRLLRRLEESTKRVKDRLDEIEEDLKRKGVSEEVLKRLREVIERARRDSERVLRKLEKTTDKVRRDSERVLRENEKSIEDVARKMT

SEQ ID NO: 6797 - protein, 171 aa, Artificial Sequence; identical to SEQ ID NO: 6796
  Synthetic

SEQ ID NO: 6798 - protein, 186 aa, Artificial Sequence
  Synthetic
DELERLLEELKRTTRKIEEELKEVNRRLDDTTREAEKELRRLKEKLEEVVKRAEELLRRRGVSEEKVKRLRDTLDRVRKTVDELLKELKRVSDELRKRTEKSNRESRKRSEEIEREIEELARRGEPEKDVVKRLEDLVRDDDRIAKEDVKRLEDLVREDRTLVKEIVDRLEELVRTVEKLVKEVVN

SEQ ID NO: 6799 - protein, 186 aa, Artificial Sequence; identical to SEQ ID NO: 6798
  Synthetic

SEQ ID NO: 6800 - protein, 177 aa, Artificial Sequence
  Synthetic
SAIEKVKEVVERVLETVRDSVRRSHEESKRLIDKVRKRLEEVREEVKELIERVRRKGIPERMVEKLERDLEELLKEIKDTIDRIEEELRTSNRRLKETNDEIAKRLEELLRELSRDRDKDAVEDVLRRIEELIRDLNKKNDDNVRRVKEVIDRAEKLVRDLLREIRKLIEKLIRDTE

SEQ ID NO: 6801 - protein, 177 aa, Artificial Sequence; identical to SEQ ID NO: 6800
  Synthetic

SEQ ID NO: 6802 - protein, 177 aa, Artificial Sequence
  Synthetic
SVLEEVRRRVEELLKTVKESVDRSHERSERLIEEVRESLKEVKRRVKELVERVREKGIPEDRVKRIEDKLREELERLERENRKIEEDLKRSNDELRRENERIAERLEELLRELSRDTNDKVARDVLEEIERLIREANERNKRNLEDVERVIRELNKENERVLREVEKKIEKLIRETE

SEQ ID NO: 6803 - protein, 177 aa, Artificial Sequence; identical to SEQ ID NO: 6802
  Synthetic

SEQ ID NO: 6804 - protein, 178 aa, Artificial Sequence
  Synthetic
SSIERVEKEVRRLLRESDESLKRVMEEAKELIKSVRESTKRVEEDARDLLRKVVERTGDEREDLRRVLEELRKLIEDNRREDKRSEDELRKLIRDNKEENDRARREAEKLLEDLSRGRSEEEVERVLEEVRRIIEKLKEDDKRSLERIERIVRRNNELNKESVDRIRKIIKEMEERAD

SEQ ID NO: 6805 - protein, 178 aa, Artificial Sequence; identical to SEQ ID NO: 6804
  Synthetic

SEQ ID NO: 6806 - protein, 174 aa, Artificial Sequence
  Synthetic
DESEDVEEKMRRLLEKSKDETRRVKEEVERLNEESKRVTEEVEKRVRDLLREVREKVRDKDVLEEIERRARKLVKELRELNREITERSKRSREELDKLNKKIEDDLRKIKKKLDDGKDVETVLREAKRLIEESIERIERVLKENRELAERSIKVLRDVLREVEDLIRKLEERAK

SEQ ID NO: 6807 - protein, 174 aa, Artificial Sequence; identical to SEQ ID NO: 6806
  Synthetic

SEQ ID NO: 6808 - protein, 177 aa, Artificial Sequence
  Synthetic
RKVEEVKKEAERLLRRSEEVSKKVADDADRLLKRSREVSDRVRRESERLLKEVAEAGVDEKILREIKKRSEESVKRLEDINKRLEDEIRRLKEELKRINDELRKRIERLREDLERDRTDKRVEDVLREARDLVRRSIKKIDEVLKEAKRLVEESIKLSEDNVRRNEEIIRDLERRTR

SEQ ID NO: 6809 - protein, 177 aa, Artificial Sequence; identical to SEQ ID NO: 6808
  Synthetic

SEQ ID NO: 6810 - protein, 177 aa, Artificial Sequence
  Synthetic
SAVERVKEEVDRLLERSKKESERVRKESEDLIRESDEVSRKVEEDSRRLIEEVERSGVDESILEELRRRSKKSKEDLDRINEELKRRSEESVKRLEEINKELKERVERLKEELDKIDDERVVTRLLEEAKRLVERSIEEIKRNVKENRKLVEESIKLSEENVKRNKRLVDEAIRAAE

SEQ ID NO: 6811 - protein, 177 aa, Artificial Sequence; identical to SEQ ID NO: 6810
  Synthetic

SEQ ID NO: 6812 - protein, 187 aa, Artificial Sequence
  Synthetic
SVVEEVVERVKRIAEELKRSSEENVDTVRKVVAEAKKLVEDDVREVEKLARRLKEVVTRDISDKKTLRDDIDKIEEEMRRLNKELEERIRKIERELERSSEENKRRVEKLAREIRKLVEDLERSGRVDERVLKDVKDKADKLIREVEETSKRSEEDVRKVIEEVREVLRESHERVKELIKEVREAER

SEQ ID NO: 6813 - protein, 187 aa, Artificial Sequence; identical to SEQ ID NO: 6812
  Synthetic

SEQ ID NO: 6814 - protein, 182 aa, Artificial Sequence
  Synthetic
SEAEKVAEDARKLAEEVIRLIEEVVERSKELVDRNEKEIRRVIEESDKLVEEVIRLLRRGDIRDEDIKRIEERLKELNTRSRETSKDVERELKELNKRLEEEIRKIEKEMKKLLDDLVRKRGETESVREVEKIVRDVVREIREMLKRSKDETRRVIKRVREVNDRSEKRSRDVVREARETSR

SEQ ID NO: 6815 - protein, 182 aa, Artificial Sequence; identical to SEQ ID NO: 6814
  Synthetic

SEQ ID NO: 6816 - protein, 182 aa, Artificial Sequence
  Synthetic
SEAEEVARRARKLVRELEELIRKSVEDSRELVKRNIEKIKRNVRKSEEDVDRVIKLLRRGDIREEDIKRIKEDLKRSNEESRRDSKRLEDRLRRLNEKLTRDIRRIEEEAEELLRDLVRRRGEAEAVREVDRIVKEVVRRVREALERSREETRRVIEEAKKANKESDDVSRKVAKEIDEEAT

SEQ ID NO: 6817 - protein, 182 aa, Artificial Sequence; identical to SEQ ID NO: 6816
  Synthetic

SEQ ID NO: 6818 - protein, 177 aa, Artificial Sequence
  Synthetic
RVIEEVDKEIKRVIKESEDVTKEVKDTSRKVLEDSKRESERVRRRSEEVLKKVEEEGVDKRILDELRRRVEESSKTLEEINRRLEEKIRDSERKSEEINKRLREELDKLREELKRIDDEDEVRRVAEKVKRLVDESIKRLKDNVKRNKELVDESIREVERNVEENERLATKVIEEAK

SEQ ID NO: 6819 - protein, 177 aa, Artificial Sequence; identical to SEQ ID NO: 6818
  Synthetic

SEQ ID NO: 6820 - protein, 177 aa, Artificial Sequence
  Synthetic
SVIERVEEEMEKVIRDSERVTKEVEDRAREVHERSEKRIREVEETSRRVLEELRRAGVDKRILDELRKRIKDSREDLERINEELRRALRKLLEDSKRINEELRKTLEELRKRLERVDDEEEVKKLAEEVRRLVEDSIRKLEELARRVDELVRESIERVDRNVEENKRLVREAIERRR

SEQ ID NO: 6821 - protein, 177 aa, Artificial Sequence; identical to SEQ ID NO: 6820
  Synthetic

SEQ ID NO: 6822 - protein, 177 aa, Artificial Sequence
  Synthetic
SVDREVEEIMRRVHKESEDVIRKVKDTVRRVLERSREVSERVKRDAERVLEEVKRAGVEKEILDRLREEVKKLEEELRKIDTDLERKIRELEKELEEINKKLREDLKRLKDELDKIKDKDFLKRVAEEVKRLVEESIKRVEDVAREVERLVEESIRLLEAVAKKVRDLVREVKRRRT

SEQ ID NO: 6823 - protein, 177 aa, Artificial Sequence; identical to SEQ ID NO: 6822
  Synthetic

SEQ ID NO: 6824 - protein, 184 aa, Artificial Sequence
  Synthetic
KEIEDLVKKIREIVDRIKKTVEDSVREVRRIVDESAKSVEELVKELKKLAEELRKLVEDGPEEKLRREAKRIIERADKLLKDDHRENKRLIEELRKINRDVREEVKRLTKELKESLDDLVRKRGETELIRTVERELREVEKEVKKMLDESTEVLKEVEERVRRMNDDVRRVLEKVARDVERDLR

SEQ ID NO: 6825 - protein, 184 aa, Artificial Sequence; identical to SEQ ID NO: 6824
  Synthetic

SEQ ID NO: 6826 - protein, 183 aa, Artificial Sequence
  Synthetic
KEVEEVVTKVDDLVRELEERSRRHVERVKEIADRNEKLVREVVKRSRDNVRELEELVRRGLERIDEELKRSAKTNKELVDRLRDKNRRSIEELKRLLDHNKELLDRVRRELERLLEEAERNRLPREVLEEVKKRIRDVLKRVEDASKRVKETIDEVLKRIKELTEDVERKSREVLRRVKEARK

SEQ ID NO: 6827 - protein, 183 aa, Artificial Sequence; identical to SEQ ID NO: 6826
  Synthetic

SEQ ID NO: 6828 - protein, 181 aa, Artificial Sequence
  Synthetic
KEVEDIIRKLRRHVKEIERTIREMVESVKRLADEVVKVLKDALDSARDHVRKILETLRDKGTSEVARRLERSNEEHMRRTEEEIRKLEERLDRHVKETRDVLRELRRSNDKLRDEVDRANLPEDVLRELRKVIEDTERTIKRLVDELEKVHREVKERIRKIAKDLRDKHKKSKRDIRETER

SEQ ID NO: 6829 - protein, 181 aa, Artificial Sequence; identical to SEQ ID NO: 6828
  Synthetic

SEQ ID NO: 6830 - protein, 181 aa, Artificial Sequence
  Synthetic
SAKDEVKDVNDKVRKEVRRVIEESRAVNEEIKRRVDTVLKESEDVNREVKREVEDKVRGEDLKRRVDKLLKELDRHSDELRRRLKEVLREVDEHSKELAERVKRILDKTTEEIKDLTRRGVDEKVAKEIVRKSEDVVRRIVEELKEDAKRSRDLVRELVKEIKEDVKRSRELVKRVVEEAK

SEQ ID NO: 6831 - protein, 181 aa, Artificial Sequence; identical to SEQ ID NO: 6830
  Synthetic

SEQ ID NO: 6832 - protein, 182 aa, Artificial Sequence
  Synthetic
REAEELVKRNEKIVTDIRRLVEKTVRDSRRVVEELKREAEETVERSRRVVTKLKELVERGDGRREEIERVTRELERENEELERRVKKVIDELKELNDRLEETLRRLVEESRRLLKDLIDKRGPDRMVEEVERTSREVEEEVKRVLKKSRDVTREVEEEVRRLLERSRKETDDVRKRLEEAER

SEQ ID NO: 6833 - protein, 182 aa, Artificial Sequence; identical to SEQ ID NO: 6832
  Synthetic

SEQ ID NO: 6834 - protein, 182 aa, Artificial Sequence
  Synthetic
DEAERLVEEIKRVVKEAEDLVRRTVEISRRVVETLRKEAEDLVRDSERVVKELTELARRGDGRREEIEKLIRELRKLNKDLEERVRRVERELEKENKRLEDTLRKLLEELRKLLEDLIRRRGRTELVEKVRRVIEEVEKRLRDMLRKSRDVTREVKERVARMLEKSKKVTDDVEKRVTDEDR

SEQ ID NO: 6835 - protein, 182 aa, Artificial Sequence; identical to SEQ ID NO: 6834
  Synthetic

SEQ ID NO: 6836 - protein, 182 aa, Artificial Sequence
  Synthetic
KEAEDLVRRVEEVVEELERRVEKLVRESEEVVKKLSKEVKESVDTNRDIVRRITELARRGDGREEDIRRLVTESRRLDEELRKRIEEVIRRLRKLNEDLTREARRVEEELERELRELIRKRGETEKVEEVERVIRRVKKRVEEVLRKSKTTTTDVERRVREMLERSEESTRRVKERADRERT

SEQ ID NO: 6837 - protein, 182 aa, Artificial Sequence; identical to SEQ ID NO: 6836
  Synthetic

SEQ ID NO: 6838 - protein, 184 aa, Artificial Sequence
  Synthetic
SEADDVVREIEDLVRRDKELVDEVVKRIKDLVRRDKKLVDEVVKEIKDLVTELEDLARKLDEEELRRVVKRVRDEIRRLADELREHSRRVEKEIEDLRRELEKHSEDVEREIRRLLKELRDRGIPEEMLRKLERVVEEVKRRSTEALKRLREVVKEVKETSKRANEELERVVREVKKRLDDATK

SEQ ID NO: 6839 - protein, 184 aa, Artificial Sequence; identical to SEQ ID NO: 6838
  Synthetic

SEQ ID NO: 6840 - protein, 184 aa, Artificial Sequence
  Synthetic
DEVREVVKEIRKLVEDDKRRVDKVVEDDRRLAKRDLDLVEDVVRRIEDLVRRVLEEARKLDRETLRKVVKDVIDTVDELLKRLERHSREVRKESEDLLRELRDHSRRVKERIKKLLDDLRRAGVDKSVLDELRKVVEEVKERSDRALEEVERSIRESEKESRRANEKLRKVVEEVRKKLEEAER

SEQ ID NO: 6841 - protein, 184 aa, Artificial Sequence; identical to SEQ ID NO: 6840
  Synthetic

SEQ ID NO: 6842 - protein, 184 aa, Artificial Sequence
  Synthetic
SEVDKVVKDIRDLVRRDLKRVEDVVRTDRRLAEEDLRRVKEVVEKIEKDVKELDELARKLDREELDTMLEKVKREIEERRKRLEEHSKRVEDESRRLLEDLRRHSKEVVDRIRELLKDLERRGVDESVLKKLKDVVDEVERESREALRKVEESIKESKRRSEKALEELREVVKRVDRLLEEARR

SEQ ID NO: 6843 - protein, 184 aa, Artificial Sequence; identical to SEQ ID NO: 6842
  Synthetic

SEQ ID NO: 6844 - protein, 184 aa, Artificial Sequence
  Synthetic
SEVDEVVKEVEDLVRRNEELVEEVVRRVEKVVTDDRRLVEEVVREIRKIVKDVEDLARKLDKEELKRVLDEMRERIERLLEKLRRHSKKLDDELKRLLEELREHSRRVEKRLEDLLKELRERGVDEKVLRKLEKVIREVRERSTRALRKVEEVIRRVREESERALRDLERVVKEVEKRMREAAR

SEQ ID NO: 6845 - protein, 184 aa, Artificial Sequence; identical to SEQ ID NO: 6844
  Synthetic

SEQ ID NO: 6846 - protein, 185 aa, Artificial Sequence
  Synthetic
DEVDEIVRRIEKLVTDDLKRVEDLVREVKKLVDEDKRKVDEIVKEIRRLVEEIRKEAERDRDERVLDKIRRDLERMLRKLEEDLRRSVEETKKTLRDLEKRIKESSEETRRELEKLEEELERRRMDEKVKRKLRKVVEEVERRSKKANEELEKKVREVEELSKRVLEKLKKVADEVRKEVKDAKD

SEQ ID NO: 6847 - protein, 185 aa, Artificial Sequence; identical to SEQ ID NO: 6846
  Synthetic

SEQ ID NO: 6848 - protein, 186 aa, Artificial Sequence
  Synthetic
DSVERLVETIREIARESLRRAKELVKSNKKLAEDSKRRVDKLVKELKDLVTRVKETLKRKRDDEETIERLKRELDRAVEEVKKALKESKEKSEEHVERMRRDIERTHRELEDLVRKVREDLKKDDLKGEVLELIEEVVREVKEVNTTVSKEVEDVVEETRKVNEDVAKLIEKVVREVKRVVDEVRT

SEQ ID NO: 6849 - protein, 186 aa, Artificial Sequence; identical to SEQ ID NO: 6848
  Synthetic

SEQ ID NO: 6850 - protein, 182 aa, Artificial Sequence
  Synthetic
SELERLVEEIRRLVREIEERSKKTTEDIKRLAEDIRRRSKEAVDENEDLARKIRKRAEERNDKDLVTELERRIEEIERRNKKLLDELKKRVERIVREVEKINEDLKRRLEELERRVKDVVRKRNEDSREIDKVIEEVRKRLKEVTDSDREVIKEIEEVLREVEERNRRSIEKIRKVLEDVTK

SEQ ID NO: 6851 - protein, 182 aa, Artificial Sequence; identical to SEQ ID NO: 6850
  Synthetic

SEQ ID NO: 6852 - protein, 185 aa, Artificial Sequence
  Synthetic
SEVDELVEKIRTTVKRVLEKHKRNTDETRRLVEEILERHTRTSRRIERVVREATDKLRRRKTEEVKKDLDRLLKELREEVEELKRRTTEILKRSRESSDRVRRESEEILDRLRKDVEDLRRKRKDVTEMLEKLREVLERAAEVLKRAEESDRTVDEEVERRVREVARSDDEVLKEVKREVERVKT

SEQ ID NO: 6853 - protein, 185 aa, Artificial Sequence; identical to SEQ ID NO: 6852
  Synthetic

SEQ ID NO: 6854 - protein, 182 aa, Artificial Sequence
  Synthetic
SEAEEVAKRVKEIAKENADLAREVAKDIKRLADENKKHADDVARDIERLAKELLEAARRGDAREEVAERARRRAEELARRHREENKRSEERARRLAEKAKRDNEKSREDIRRLLEDLKRKGAPERAEKLARDAAEEAKKAAEESNKLIREAAERLKEAARRADKLVEEAARRLEKAAEEARR

SEQ ID NO: 6855 - protein, 182 aa, Artificial Sequence; identical to SEQ ID NO: 6854
  Synthetic

SEQ ID NO: 6856 - protein, 182 aa, Artificial Sequence
  Synthetic
DEVDEVVRRDERLAEENLKRNTESSKRDRDLARENLKDAKRVVERIRKLMEDLKKLFDRGDIRDERARDVEREVEELLRELKRRNEESERRSRELLERLREDNERSKRRSKRLLERLRERNVDEKLTRRVEESLKRSEEVLRRVNESDKRSLEETRKVLEESNKEIEKVVRDLEELLKEVRR

SEQ ID NO: 6857 - protein, 182 aa, Artificial Sequence; identical to SEQ ID NO: 6856
  Synthetic

SEQ ID NO: 6858 - protein, 182 aa, Artificial Sequence
  Synthetic
SEADKVVKEVDDIVARNTEENDKSSKRVEDIIRENDKHAEEVVRDIRRLAEELRELRERGEIREKRLEEVRRRVEELLREHKEENDRSAEEIKKILRDLAERNKDSLRRIRKLLKDLKDKNLPEELEKRLRDVVRRAEERLRDVNRSDEEVVRRAEELLKRVDDRVKTVVEELKKTLDDERR

SEQ ID NO: 6859 - protein, 182 aa, Artificial Sequence; identical to SEQ ID NO: 6858
  Synthetic

SEQ ID NO: 6860 - protein, 182 aa, Artificial Sequence
  Synthetic
EEVDRVVKRDDDLARKNLEENERSSREDDRLVKENEDHAKKVVDDIRKLMEELRELARRGDIREKDADRVRREVDELLKKHRRFNEESRKESKRLLDELRRRNDESTKDSERLMRDLKRKNVPEELEKRLRESLRRSREVLKRVNESDRDSLERTKKRLEDVDREVRKVVEELRKVIRDEEK

SEQ ID NO: 6861 - protein, 182 aa, Artificial Sequence; identical to SEQ ID NO: 6860
  Synthetic

SEQ ID NO: 6862 - protein, 182 aa, Artificial Sequence
  Synthetic
SEAEEVARRVEKIAEDNARHAEKVAKDIEDLARENLELNERTSRRVERLARELLKAARRGDAREEVARRVEREIEKILEDANEANRRSEKEAEELAERHKEENERSKREIDELLKRLEDAGAPEEARKLARKAAEDARRAAERANELVKRAADELRRAAEEANKSDEDAAREARRAAEEAER

SEQ ID NO: 6863 - protein, 182 aa, Artificial Sequence; identical to SEQ ID NO: 6862
  Synthetic

SEQ ID NO: 6864 - protein, 182 aa, Artificial Sequence
  Synthetic
KDVEDVVREDEELAKTNKKHADDVVRRIKELIDRNRRLNEETSKRIEDLVRRLLELARRGDIREDELRRVREEVEKILKDVNEENRRSLRELERLVKEHEERNRDSKKRSEDLAEELKKRNVPERVRKEVERSLRKSDEVLRRVNDKVRRVLEELRKVLEDVNRSDEKVLRELEELLERVRT

SEQ ID NO: 6865 - protein, 182 aa, Artificial Sequence; identical to SEQ ID NO: 6864
  Synthetic

SEQ ID NO: 6866 - protein, 174 aa, Artificial Sequence
  Synthetic
SEDEKVRKVVEEAKEVNRRAEEAIKDVSERLERVNREVTKRSRDVSEEVRKMLERDASDKDEVERVKEKSKKSNEDLKRISERSRDESRKSNETLRRISEETRRRIREIEKLVKAGKDVDEVVKRIKELVDRSLELAERIVERNERLVEKSERDVRKIVEDNKRLADEVAKRAT

SEQ ID NO: 6867 - protein, 174 aa, Artificial Sequence; identical to SEQ ID NO: 6866
  Synthetic

SEQ ID NO: 6868 - protein, 174 aa, Artificial Sequence
  Synthetic
REDELVDKVLRELEELLRRVKKRLEDVSRDLERVNREVRDELRRVSKKVEDMARRDVGDKELVDEVRRESEKSNKELEDISRESKERSDDSNRKLDKLLKDVRDELRRIRKKVEDGKDAETVVRDIRRLAEELLRTVDKIVKDNERLARESRERVRRIVERNEELARDLARKAR

SEQ ID NO: 6869 - protein, 174 aa, Artificial Sequence; identical to SEQ ID NO: 6868
  Synthetic

SEQ ID NO: 6870 - protein, 174 aa, Artificial Sequence
  Synthetic
DDEKKVEDVVRKVKKVAEDVRRRLEKVSREVKKVLDEVRRRVEEVSREVEEILRRAASDKKDVEEVKRRSEDSKRRLEEIIKEIEERSRRSNETLKKLIKELEDRVRKIKEKVDRGSDADEVVKRIEDLVRDLERRVDEIVKRNKELVKRVEEEADKIVEDNKRLAEEVLRKAT

SEQ ID NO: 6871 - protein, 174 aa, Artificial Sequence; identical to SEQ ID NO: 6870
  Synthetic

SEQ ID NO: 6872 - protein, 174 aa, Artificial Sequence
  Synthetic
DSRRKVKEVIKELEEVLRRVKEEVEKVSRDLERLLKEVKEKLERVSRKVEEEIREKASDKELADEVRKRSKDSNDELKRLLDELRKRSEDSDRRLDEVVTRIRKRLKDIEKKVEDGSDADTVVKRIKELMKDVERIVEEIVRENRKLVTDLLREVDRIVEENERLAEELAERAR

SEQ ID NO: 6873 - protein, 174 aa, Artificial Sequence; identical to SEQ ID NO: 6872
  Synthetic

SEQ ID NO: 6874 - protein, 174 aa, Artificial Sequence
  Synthetic
SSKEKVERVVERLRRVNEEVIRLIEKVSRELEEVNKEVRERIERSVKETEDILRTAASDKEEVDDVRRRTEELVRRLEKLSEDSKKRSKESLEEVRRISKDTEDKVREIRKKVEAGKDVDTVVREIEKLMDDSKKKADRIVDENRELVKRSEEAVEELVRRDKKLAEDVFRKAE

SEQ ID NO: 6875 - protein, 174 aa, Artificial Sequence; identical to SEQ ID NO: 6874
  Synthetic

SEQ ID NO: 6876 - protein, 174 aa, Artificial Sequence
  Synthetic
DDERKVKKVVKEVRKVDEEVARRLDKVSKELRDVNREVKKKMEDSVKKTEDLAKKDASDKELVDRVRRETERLLEELEKLSRDSEEESKKSKEELERISRETEDRIRKIERLVEGGKDADTVVKRIKELAEESEKRVDKIVKRNKELVDKSKKDVDELVKRDEELMKDLVEKAR

SEQ ID NO: 6877 - protein, 174 aa, Artificial Sequence; identical to SEQ ID NO: 6876
  Synthetic

SEQ ID NO: 6878 - protein, 174 aa, Artificial Sequence
  Synthetic
SAEEKVRKVLKELREVNERVERELKRVSDESERVDDEVNTRAKKVVRDVERVLEERAGDKEEVEEVRKRIEELLEELKRLSEENKRRSEESEKELKEISKKTDEDLKRIERLVEAGKDVDEVVERIERLARESKKRVERIVRENEKSARESEKRADEIVKTIEELAERVARRAT

SEQ ID NO: 6879 - protein, 174 aa, Artificial Sequence; identical to SEQ ID NO: 6878
  Synthetic

SEQ ID NO: 6880 - protein, 174 aa, Artificial Sequence
  Synthetic
KDEERVKEVVKKLRKVNEDVRRLIERVSRESKRLDEEVNRELDESAKDTERALRERLGDKEAVDRVRDETRRLAEELKELSERNEKRSRDSAREVEKISRDTEERVKEIEDKVKAGADADEVVKEIEKLAKTSEELARRIVRENEESARESLERARKLVEDDRRLVKEVVERAE

SEQ ID NO: 6881 - protein, 174 aa, Artificial Sequence; identical to SEQ ID NO: 6880
  Synthetic

SEQ ID NO: 6882 - protein, 181 aa, Artificial Sequence
  Synthetic
DLEERLATVVRKVEEDLKKLRRDNEKVIREVEKLNEDLNRRNKKLIDEVRKLLEKAKREGSLRDEEVERLEEELDKSNKRLEEISRKNKKELEESHKRLAEIVKRLKDELEKIKEEVKRVDDEKRVRELLEKIKRLLEEVDRRVKESIKEIEDSLRRSKEKADRSIEEIKKLLDDLRERAR

SEQ ID NO: 6883 - protein, 181 aa, Artificial Sequence; identical to SEQ ID NO: 6882
  Synthetic

SEQ ID NO: 6884 - protein, 181 aa, Artificial Sequence
  Synthetic
SVEDLLRRVVEEVRKELERLKRKNEKVVKEVRKKNKEVNDRNEEVIRRVEKRLKKLKEDGRLSDELVEKLKEELRRSNEELRKISDENEKELEKSNRRLKKIADRVEEELKRIKEELDRVDDEEEVRRLVRRIEKIVDEVRKRVDKSVEEIKRSLKRSKELADESLERIRRLLEEIDERVR

SEQ ID NO: 6885 - protein, 181 aa, Artificial Sequence; identical to SEQ ID NO: 6884
  Synthetic

SEQ ID NO: 6886 - protein, 179 aa, Artificial Sequence
  Synthetic
SSDEELKKVLEDMKRVLEKVREDMKRVNDELKEAVERVKKESDDVDRELRRVIEEVVREDTDDEDLKRELDDIHRRNREHTERLLDEARRLLEDSKRHTEETEKTLRRLLEDLKRKIERKEVDVKDLVRTVERLVEEIKDLVRKDVERVKKIVRRIEDLAKKDVEVSEKLVKEIKDRAK

SEQ ID NO: 6887 - protein, 179 aa, Artificial Sequence; identical to SEQ ID NO: 6886
  Synthetic

SEQ ID NO: 6888 - protein, 179 aa, Artificial Sequence
  Synthetic
SAKELLDDVAKKLEEVVERVARKLDEVDERLREMIERVRKELEDVNRRLRDLVRRVVDKDRTDEDLKKRIEDLEERLRRHTEETVKRAEDIHRENREKLREMKETLKELRDRLKEILDRNELRVEEVVRDVERIVDEIEKRAEKVVRDSEKLVRDIEELVRRDVREVERIAEEIEKEAT

SEQ ID NO: 6889 - protein, 179 aa, Artificial Sequence; identical to SEQ ID NO: 6888
  Synthetic

SEQ ID NO: 6890 - protein, 179 aa, Artificial Sequence
  Synthetic
SADEELERVLRELDKVIKDVVEESRDVDRKLERVVREVERLLDDVDRRLKEVIERVVREVTDKEDLRREAEKIHKENTDRLRELKKELKKLLDDSRRHSKEVEDELEKLLRDLKRILDRKELDVKDVVTEVKKLVETVKRLVEENVKRVEKIAEEIRRLVEKVVRESDELVERIERRVR

SEQ ID NO: 6891 - protein, 179 aa, Artificial Sequence; identical to SEQ ID NO: 6890
  Synthetic

SEQ ID NO: 6892 - protein, 188 aa, Artificial Sequence
  Synthetic
SAEELIRKAAEDARRANKEAEDLIREAAKEARRANEEAERLIREAAKRAEDALRDADRKAREKEAKDRARKLAKEIRDLIKKAEEDAKKSHEETEELIRRAEEEIKKSHEEIKKLIERAEEEAEKKKDAEEEAKKLADDIREAAKRSLDRARELAKRIREAARRSLEEAKKLAEEIKKAAEKALRDAT

SEQ ID NO: 6893 - protein, 188 aa, Artificial Sequence; identical to SEQ ID NO: 6892
  Synthetic

SEQ ID NO: 6894 - protein, 184 aa, Artificial Sequence
  Synthetic
SAVERVVREVKKTVDESRKRAEKEKREVEDVVRRIREKVKRVVDDNRRVVETIKELSKERRDEELLRRAEEEVRRVHERNRDILREIAETIRRVEERLRESLEDSRRESKRVKEELEEVLKEDKSEEAREKLDRVRKELDDANRRVEEELRRVARELEKVLREVEELLRKVDEDIRRVLDEERR

SEQ ID NO: 6895 - protein, 184 aa, Artificial Sequence; identical to SEQ ID NO: 6894
  Synthetic

SEQ ID NO: 6896 - protein, 184 aa, Artificial Sequence
  Synthetic
KDVEEVARKVKRVAERSEELVAELVKKNKKVVDESREKVDDVVRRNKELVDTIRDLARRRKDEDLLREAEERVRRVHEENKKAHTDSKEAIDRLEEDNRRVNEESRRLSKRVKEELKEVLKRDRSEEIRKLAEDVKRELERVNKKVKELSDRAAEELKRVNEEVRKKLEEVDREIRKVLEEVRK

SEQ ID NO: 6897 - protein, 184 aa, Artificial Sequence; identical to SEQ ID NO: 6896
  Synthetic

SEQ ID NO: 6898 - protein, 184 aa, Artificial Sequence
  Synthetic
SLMEEVKKEVDKVVREIKELVRKVEEDVKKVVKESRDKVDKVVKENKKVVEKIRDLARRRTDEDLLREAEDEVRKVHEENKRIHKESEDTIREVEKKLKKVLDDIERLVKEVSDRAKRVLDDDRSDEIRKLIKEALDKLKEVLDEARDRLKKVKEELETVNREVEKLLRDVDREIEKVLKEVEK

SEQ ID NO: 6899 - protein, 184 aa, Artificial Sequence; identical to SEQ ID NO: 6898
  Synthetic

SEQ ID NO: 6900 - protein, 190 aa, Artificial Sequence
  Synthetic
SEAEKIVREVERVVEESRRVAKENEKEVDKVVDTIRKLIEDLARRVEDILKKIEEERRKGGDDKEKLLEKIKRLLDELRKLIEELERRVEKIVEDVKRHSEELKERSKDLNRRIKEKIEDVLRKLKDDRDVKRIEDLLREVEERLRRVSEEVKKRLKELHERVEEVLRELRKRLRDLERKARKVLEEAKK

SEQ ID NO: 6901 - protein, 190 aa, Artificial Sequence; identical to SEQ ID NO: 6900
  Synthetic

SEQ ID NO: 6902 - protein, 173 aa, Artificial Sequence
  Synthetic
DVKEVLDEARKVVEDSIRRSKELIDEVRKRVEESVEESKRLAETVAEEVREVIERARGRDSAEELKRELDRLIEEIKRSNEKLRRDIKKLEDDVRRSDERLRREIEKIEELIRRGSDIETVLREVKRLVRENVKRIAELVKTIEDLVRENSERVRRVVREIRELVKELEKKAR

SEQ ID NO: 6903 - protein, 173 aa, Artificial Sequence; identical to SEQ ID NO: 6902
  Synthetic

SEQ ID NO: 6904 - protein, 173 aa, Artificial Sequence
  Synthetic
DVDELLKRVEDEVRRSKEESEKLRKEVRKEVEDSAKTSKDLIDDARRTVEEVIKKVKGRDVIEELKERIERLEKTVRDSDKELRERIRELEREIEESNRRLEEDIKRIKKVIKDGADVDTVVERIRKLVKENSDRVREVVDTIKKLVEENVREVRRLVEEIKRLVEEVKRREE

SEQ ID NO: 6905 - protein, 173 aa, Artificial Sequence; identical to SEQ ID NO: 6904
  Synthetic

SEQ ID NO: 6906 - protein, 173 aa, Artificial Sequence
  Synthetic
DVKEVLKRAEEEVRRSIKRTREVLERVEKMVRDSSRTTTDLIRKVRREVKRVIDEVNGRDLARELKRMLDELDERLKDSDRKLKEKIDRLIKEIEESDDELRRTIEEIKKLIDDGTDIDTVLEDVKRLVKENSEKIDEVVREIRELVETNRKLVEDLVREIKELVEKALRDAK

SEQ ID NO: 6907 - protein, 173 aa, Artificial Sequence; identical to SEQ ID NO: 6906
  Synthetic

SEQ ID NO: 6908 - protein, 173 aa, Artificial Sequence
  Synthetic
DVKEVLKRAKDEVRRSSDRTRRLIEKVRDESERVVEEVKKLNEDVNREVERVIREVKGRDVVEEVRRRVEKLNRDNEKIIKEDRDALEEIRRRLEESDKRLEDVIREIEKVIDDGKDIDTVLREVEKLVRDNERLVEKLVKEVEDSVRETKKRVEESVDTVRRIVEELKRRAT

SEQ ID NO: 6909 - protein, 173 aa, Artificial Sequence; identical to SEQ ID NO: 6908
  Synthetic

SEQ ID NO: 6910 - protein, 178 aa, Artificial Sequence
  Synthetic
SEAEEVLREVKEVVDRSRELAERVLRAVRELVKRDEDLARKILEDVARVVKTIDDLARERSDEEVLRRVKRLVDELRKKLKKVLEDSARLAEDLRRKAEEVKRESKRLSDELREKAKKAGVDKEVVDRADRALREVNKRLDEVVREVEKLLRESLDRSRRVIEEVAKRLEEVLKKLED

SEQ ID NO: 6911 - protein, 178 aa, Artificial Sequence; identical to SEQ ID NO: 6910
  Synthetic

SEQ ID NO: 6912 - protein, 178 aa, Artificial Sequence
  Synthetic
DEMDEVRREVERVVREDEKLARDLKRRVEKVVEDIKRSADEVLKEVKKLVEEIRELMKKRTDREVLERVRRKVEELTRELERNHREIEELVRRVKRELEKALKESEDRVREVKERLERAGVDREVVRRVEEELERSLRKSREVVKRVEKELEDVLREHRKVLEEVTDLLRRVLEELRR

SEQ ID NO: 6913 - protein, 178 aa, Artificial Sequence; identical to SEQ ID NO: 6912
  Synthetic

SEQ ID NO: 6914 - protein, 186 aa, Artificial Sequence
  Synthetic
REAEEILKKVAEVVKEDKKLADDLRKKNKETVDDIRRKAEELLKRVKKVVEELKRRMEEGGDDRKKLTDRVEELLRRVEEELKDLKRKIDEIIERLKRDNERVLRRSEDLVRKVEEELKDVIDKSDTDELRKIAEEVRKRLEDSVRTTRDIIRRVKRENEEVIKELERVMRKVREDLKRVKEEIER

SEQ ID NO: 6915 - protein, 186 aa, Artificial Sequence; identical to SEQ ID NO: 6914
  Synthetic

SEQ ID NO: 6916 - protein, 178 aa, Artificial Sequence
  Synthetic
SREEVAKEVRELIARSEKETRDIIREVEDRMRRSKEETEEVIKEVKRLLEEVKKRLEEKGISEELRESVDRVEETVRRLLTKLREDSERLRRRLRKLLEEIRRESERLKEEVERLIRRNEGDAEEILRTVKKVVDRDRELAKRLLDEARELVRTNRELVKRVLETVTRLVKKIDDEAR

SEQ ID NO: 6917 - protein, 178 aa, Artificial Sequence; identical to SEQ ID NO: 6916
  Synthetic

SEQ ID NO: 6918 - protein, 178 aa, Artificial Sequence
  Synthetic
DEEEVEKRVKDLLRESTERTKEVNERVRRLAEESRKRTEEIIREVRRLAEEVEERLRRRGIDEELKRRVEEVKKRLEELLTDLKRRSDELRKRLEDSSRETEKKSREVVKTVDELRKRREGDVRELLETVKKLVKDDVDIVRRNLEEVKKLVETNVRLAEEVLKEVDRLVKKVEEDAR

SEQ ID NO: 6919 - protein, 178 aa, Artificial Sequence; identical to SEQ ID NO: 6918
  Synthetic

SEQ ID NO: 6920 - protein, 184 aa, Artificial Sequence
  Synthetic
DELDEIRKRVEELIKRSEEDSREVRRRLEEIIERNRKISRDVEREIEKLIKDVRDSNTTSEEAKELLKDIRRKLKELVDRLHKIDEDSLREVERLVKRLKDKNRDILRELEELARDLRRRLRGEELRRVEEVVKRVRELVERSKEETDKIAEDVRRLLKESNDDTERIKRKVEEMLKELEERIK

SEQ ID NO: 6921 - protein, 184 aa, Artificial Sequence; identical to SEQ ID NO: 6920
  Synthetic

SEQ ID NO: 6922 - protein, 178 aa, Artificial Sequence
  Synthetic
RELDEVVKTVRKLVDESKKESDDVAREARELLEKLERESEEVVRRVRELVKELKKKRDDERLDRVVKDILKKVEDLIRELREVNKETRKKVERLVKELERVNREIRERVERIMDVLRRGDVDVDEVLRKAKELIDDSRRLIEDVKRRLKELIDRDRRLIERVLEEAERLIRELDEEAR

SEQ ID NO: 6923 - protein, 178 aa, Artificial Sequence; identical to SEQ ID NO: 6922
  Synthetic

SEQ ID NO: 6924 - protein, 190 aa, Artificial Sequence
  Synthetic
KEIEELDKMVEDIVRELDELVRAHTETVDRLIRDLERSNEELRKLIKKIVDELEDLVRRGGDDKERLLREIKRLVDDLKRLVEKNTRDIKRMADELRETAKEVEERIKELIKRLEDLARDILRKRKDDEEVVRRLKDVERKVKKLAEDVKEKLRRSVERVTKLLKEVEDNSREVEKEAEERVDRVLKKVK

SEQ ID NO: 6925 - protein, 190 aa, Artificial Sequence; identical to SEQ ID NO: 6924
  Synthetic

SEQ ID NO: 6926 - protein, 175 aa, Artificial Sequence
  Synthetic
REVEELVERIERSSRRALERLEDLDRTIKKSSEDARRRLKEMDDRLEELVKRARDNGVDEEVVKEVKKLVEESRRDNEESVKRSEDLLRETERRNRDAIRRSEEEVRKILEVLKKGELREEEIKKVLEEDRKLVEKLERDNKRVLDEDKELVRRNEERNREVLERIRELIERART

SEQ ID NO: 6927 - protein, 175 aa, Artificial Sequence; identical to SEQ ID NO: 6926
  Synthetic

SEQ ID NO: 6928 - protein, 179 aa, Artificial Sequence
  Synthetic
DEVEKLIKDIRDIIRRVEEAVARLVEENNKLVKEVDDRLRELSKENRDIVRKVREGGVGDEVLEKAEDSSRRNDEDVKKLLTELRKSSEDLKRLVDDVRKKLEDKVRRLEEVVRKELSDKRTLLEEAKRVLEDIEKEARDLLRRLEEIIRRTRKLVKDILDRSRDILRRTRELVDRVRR

SEQ ID NO: 6929 - protein, 179 aa, Artificial Sequence; identical to SEQ ID NO: 6928
  Synthetic

SEQ ID NO: 6930 - protein, 179 aa, Artificial Sequence
  Synthetic
KEAEDLLRRIEDLIRKVKKEVEDLVRENNRLVEKVVRELEKLSDELRKLIKRIKDAGVSDEVLRRLEEIVKRNDEEVRKILEEAKKSSRRLEETMRKVLEDLRRLVERLKRVVDEELQDKETLLRDIERIRREIEKLIEELLRRAEEIIRDTERLVEKILRESKELLKEIRELAEREKQ

SEQ ID NO: 6931 - protein, 179 aa, Artificial Sequence; identical to SEQ ID NO: 6930
  Synthetic

SEQ ID NO: 6932 - protein, 184 aa, Artificial Sequence
  Synthetic
DLERVVEESSRLVERVVRRNKKVVEDIRRRVREVERKNEEVTKEIKKILDEVRRRLERDGADSTLLRELEEVIKEAEKRHKDSIDELREILKELEKRHRKSIRELREINKDLRRRVKDLRDKGGIREELKKLLERSREMLEKSERTVDTSREEAKRVLEESEELVERTLREVEEIIRRVIERVR

SEQ ID NO: 6933 - protein, 184 aa, Artificial Sequence; identical to SEQ ID NO: 6932
  Synthetic

SEQ ID NO: 6934 - protein, 184 aa, Artificial Sequence
  Synthetic
SLEEVLRAVRKLAEDVKRKNKEVLDRIRDSSRRSEEKLEDSLRKIEELVRKLEEELKRDGADERLAEELREILDRVRKEHKRLVEENRRVVKKVEDEHRKSEEELDRIVDELRRRVEELRKRGGVDEDLKRLLEEIKRVLEESEEKVERSLREMEEVDKETEKRSRKLNREVREVVKDVADKVR

SEQ ID NO: 6935 - protein, 184 aa, Artificial Sequence; identical to SEQ ID NO: 6934
  Synthetic

SEQ ID NO: 6936 - protein, 181 aa, Artificial Sequence
  Synthetic
SRLEDLLRKVKKVLDEIRRTIEKSLEDVRELIKRIERTIEKLLERSRDVVRRVLEDAERRRRKELVEELEKELRRIDEEVEEEVRRLIEELERIVRESEKLSDKLIRDLERIVKRLAEEVDSEKAKEVLKEVKDRVDEVAKELTDVNRDIRRIVDELRRRAEKVVRESRELSRELREELEK

SEQ ID NO: 6937 - protein, 181 aa, Artificial Sequence; identical to SEQ ID NO: 6936
  Synthetic

SEQ ID NO: 6938 - protein, 181 aa, Artificial Sequence
  Synthetic
SELERLLEEVEKELRKIERTITELLRRSRELLEEIERAIKESLRDSERLLREIEDTVRKRRREEIVDKLVKDLERLDEESKKLSEKLARDLDKANKRVEDTVRELIERLKEIVEELARRLDESKVREVLREVRERVKEVVERLKRVVEESRKRSEEVKKKLEEVNRRSEEESKRVKEELKK

SEQ ID NO: 6939 - protein, 181 aa, Artificial Sequence; identical to SEQ ID NO: 6938
  Synthetic

SEQ ID NO: 6940 - protein, 182 aa, Artificial Sequence
  Synthetic
KLEEVLRTVRKLVEDLREELERVVRTSRELTRRLEEELKEVVKRSEDLSRRLEEILKRDAREDKDLVTEIKRRLEELNRRNRELVKELLRLLDEVDKDLKRLVEELLRELEKVIKKIKDLVDNNVDLTEALKEVKRLVDEIRKTIEEALRDSKRLVDEIRETIKRSLEEVEKEVRKAEERIR

SEQ ID NO: 6941 - protein, 182 aa, Artificial Sequence; identical to SEQ ID NO: 6940
  Synthetic

SEQ ID NO: 6942 - protein, 182 aa, Artificial Sequence
  Synthetic
SIEDVLRAVEKLLRDLKRRSEEVVKHSETELRRLLEEVRRVLEHSREALERLEERIKDVREEVIKRVKELVEKLKKENEDLLTDVRRLLEELKRRNKELTERTKELLDRLKEEAEKAKRDNVSDEVIKEILERVKKLIEEIDERNKELNERTKELIKRIKDRLKELNDKTEKAIDKIRKEVE

SEQ ID NO: 6943 - protein, 182 aa, Artificial Sequence; identical to SEQ ID NO: 6942
  Synthetic

SEQ ID NO: 6944 - protein, 182 aa, Artificial Sequence
  Synthetic
SIEEVLREVEELLKELEKRARDVLRHSEELLRDVIRRSEEVVKHSEDLLRKLKEAAKDVREEVIRDVDRLVRELKERNRKLSDDSRRRVERLKEENEKLLKEVKDLVEELKRRAEKLSRDNVSDEELKKILDEVRKVIKELEDKLRKLNKKTEDVIRELIERNDRLNKDTKRVIDELKEKVR

SEQ ID NO: 6945 - protein, 182 aa, Artificial Sequence; identical to SEQ ID NO: 6944
  Synthetic

SEQ ID NO: 6946 - protein, 182 aa, Artificial Sequence
  Synthetic
SIEEVVEEVKELLERLIRRSEDVLRHSKKLLEELERKSERVVEHSEDLLRKLEEKIKDVKDDVIRKVRELAKKLRTENEDLSRRSREVVKRLKELNEKNLEEVRRLVKKLKEDAERLARNNVDDETLKRILEEVREVIKKLIKSSEDVNRETEELIRRLEDRNRKLNEKTEKVIREIEEEVK

SEQ ID NO: 6947 - protein, 182 aa, Artificial Sequence; identical to SEQ ID NO: 6946
  Synthetic

SEQ ID NO: 6948 - protein, 182 aa, Artificial Sequence
  Synthetic
TVEDVLRELRERLKESEKRDRDSVRKAEELLRRSEKRTDDVVKHSERLLEELEEAVRRIRGDELKTEVEEVRKKIRRSLEELKKHSKEVVDEIRRLLEESERHSKEVVEDIERKLESLRRIEDEDVVRRLLEEVEELLRRNVKKSEELLKEIRERLEDNIRKVEKVNRDNKREIEEILRRVK

SEQ ID NO: 6949 - protein, 182 aa, Artificial Sequence; identical to SEQ ID NO: 6948
  Synthetic

SEQ ID NO: 6950 - protein, 182 aa, Artificial Sequence
  Synthetic
TVEEVLKEAEDLLKESKERSEDSARRAEEILRRSEERTRKVVEHSREMARRLMEKVKEKRGDELKEEVERVLRRIEKSLEELRRHSERVKEEIRRLLEEDKKHSDDVVKTIRELLERLKRIDDEKVVEDVLREVEKLVRDNIEHSKRLLDEIRRRVEENIRRVDEVNKRNEELIREVEERVR

SEQ ID NO: 6951 - protein, 182 aa, Artificial Sequence; identical to SEQ ID NO: 6950
  Synthetic

SEQ ID NO: 6952 - protein, 185 aa, Artificial Sequence
  Synthetic
SKVEEILERVKRLIEENIKRSEEILEEVRRLIRENTEVSKKLLEEVKREITELEKEVREDRDKDRLRKKVEEVKDKIRKELKRNEDHSRRVAEEIRRLLRENERHSKRVADEVDRVLKELDKTTKDERVKDVLRRLKKIVDESKRRSDKVNKEIEDRVRESEKKSRKVNEDIKRLVKRVADEVER

SEQ ID NO: 6953 - protein, 185 aa, Artificial Sequence; identical to SEQ ID NO: 6952
  Synthetic

SEQ ID NO: 6954 - protein, 185 aa, Artificial Sequence
  Synthetic
SDIEDLLKKVEDLIRRNIETSRRLLEEVRKLIEENIRLAERILEEVRRLIEELARLTREDRDKDELRKKVEEVEKTVKDVIDDLRRHSDKVEEDIKKLLDDNRRHSEKVMREIEKVLKELRDRDNDEKVKDALRRLRDLIRRSKEDSERVNEEIKDIVRKSRETSEDVVRRARELLDKVRREVEK

SEQ ID NO: 6955 - protein, 185 aa, Artificial Sequence; identical to SEQ ID NO: 6954
  Synthetic

SEQ ID NO: 6956 - protein, 185 aa, Artificial Sequence
  Synthetic
SELEELLKEVAKLIKRNKDRVRKILDEVRKLIKRNEDVSRRLLEDVERLIKELEREVREDRDKDKLKRKVEEVRKRIEEVLRTNERHSREVAKEIKKVLDELREHSEKVARDIKRMLDDLRRKTRDKKVEDILRTLEELIRESERTSEEVLRELREEAEESKRKSKRVNDRIRELVEKVDREVDK

SEQ ID NO: 6957 - protein, 185 aa, Artificial Sequence; identical to SEQ ID NO: 6956
  Synthetic

SEQ ID NO: 6958 - protein, 185 aa, Artificial Sequence
  Synthetic
SKLERLLEEVEKLIRRNKRIVREILREVRELIERNIRVSEEINRRNRRLIEEIRRLVEEDKDKEKLRKKVEDLAEKVRESLERNEKHSREVEERIKELIRRLREHSEDVRRRIREVLKELAKTTDDERVKRILKEIERLVEESKRESERVLEEIKELVKDSKRRSKEVNDHSKKLVDEVREAVKK

SEQ ID NO: 6959 - protein, 185 aa, Artificial Sequence; identical to SEQ ID NO: 6958
  Synthetic

SEQ ID NO: 6960 - protein, 178 aa, Artificial Sequence
  Synthetic
SRIDELLKEIRKVTEKTRRDVERLLEEIRKVTDKSRKDSERSLDEARKVLDTIRKLLEDGKPKEKLLKELRDLLRRIEERNERILRENKRIVDEIKKEAEKLLKRNKEIVDEVAERAARDGVGEALERIKRSSEELAEEVKRVLDEVRRSSEELEKRARDSLRELRELVKRVEEEARK

SEQ ID NO: 6961 - protein, 178 aa, Artificial Sequence; identical to SEQ ID NO: 6960
  Synthetic

SEQ ID NO: 6962 - protein, 178 aa, Artificial Sequence
  Synthetic
SRIEKLLDEIRKVSKKSIDEVRKILEEVEKVTRDSIRKLRKLLREIEKVLEEIERLLKNGRDKDELVRRLEEIAKKIEEDIKKILEENRRIVREVKERLKAIVRRNEEIVDDVLKKMAKDGVGEALKRIKELSDEVREEVKKVLRKIEESSERLEEEAKKVLDTVRELVERVARRAKE

SEQ ID NO: 6963 - protein, 178 aa, Artificial Sequence; identical to SEQ ID NO: 6962
  Synthetic

SEQ ID NO: 6964 - protein, 179 aa, Artificial Sequence
  Synthetic
REAEEALRRVEEVVRRSKTELKKLLEDVRRLIEESERELRDLLRRVEEVIRRIREELRERKTEEVIKKIEKLVTDVREEVKRLLDRDRKIVTDIKRKVERLLEENERLVERVREEAERDLREVKEMLRTVDELLKDSERDSERVLREIEELLERSKRKSEEVLREIERLLEKIEREVRK

SEQ ID NO: 6965 - protein, 179 aa, Artificial Sequence; identical to SEQ ID NO: 6964
  Synthetic

SEQ ID NO: 6966 - protein, 177 aa, Artificial Sequence
  Synthetic
SEVEEVAREVDELVKESRDESRRIVEEAKRLLKESNKSVKDIERDARRLVKEVEDAVREEELKRLVDELRKRAEELVDESRKLDEDLRRRLDELVKRMEEINEELERRVRRIKELLKRGMDVKKVLDEVRELAERSKDLNRRLLERIRELVRRSKERNKELLKRLRDLVERVKREIK

SEQ ID NO: 6967 - protein, 177 aa, Artificial Sequence; identical to SEQ ID NO: 6966
  Synthetic

SEQ ID NO: 6968 - protein, 177 aa, Artificial Sequence
  Synthetic
DEVEEVKKDAERLNKELHESLRRSNEEAKRLLKESKDASREVVKDARRLTKELRETMNDDRVRDLVRRNEEVVREVEKTLERINEELERMVRRLVREDEKLNEDNKRKLDEAKERLRGGSDVEKVLRDLRRLTEETKRRNRETLEEIRRLIERSKEEIKRLLEELRELTKRTKDRIR

SEQ ID NO: 6969 - protein, 177 aa, Artificial Sequence; identical to SEQ ID NO: 6968
  Synthetic

SEQ ID NO: 6970 - protein, 177 aa, Artificial Sequence
  Synthetic
DEVKEVKDRARKLVEEVKRAVDEVRKRADELNKEVHESLRRSNREAERLVKEVEDTVREERAERELRRLEDRVREVVERDKKINEDNKRVIDELTKRLEDLVRELERVVREIEDRLRRGADVETVLREITELAKKILRDIEELLREITKITEESKRENEKSLRELEDLARRVKEKTR

SEQ ID NO: 6971 - protein, 177 aa, Artificial Sequence; identical to SEQ ID NO: 6970
  Synthetic

SEQ ID NO: 6972 - protein, 177 aa, Artificial Sequence
  Synthetic
DEVERLVEELERLLREVRDSVRRSNTEAKELNKEVHEAIRRVVEEARRLLEEVRRTADDEDVRRILKRLEEVIREIVERLKEINDRNRRVVEEVAKEDEKIVRELEKLVEEVRKVLKDGVDVETVLRRVEEVARRVKKLNEDTLRTLRRITEDSLRKIEKLLRDIEKLVREVVERLR

SEQ ID NO: 6973 - protein, 177 aa, Artificial Sequence; identical to SEQ ID NO: 6972
  Synthetic

SEQ ID NO: 6974 - protein, 180 aa, Artificial Sequence
  Synthetic
SEIEDLERRIKEVVDDLRRLVEENSKKIDDLLRRLKDLIRKVEEMNRKLIREAEELVREERSEELVREAEELVKTVHRENKRVEDEIRRLVEEVERHSEKVIRDIERLVRTIEEEIKSLPDSEELRKVEESVRRLAEEIKKELEDSRRRVEELVREIEKELEDVNRDARRLVDKVREELR

SEQ ID NO: 6975 - protein, 180 aa, Artificial Sequence; identical to SEQ ID NO: 6974
  Synthetic

SEQ ID NO: 6976 - protein, 184 aa, Artificial Sequence
  Synthetic
REVEELKKTLDRLVEESKRESDKVREDAERTVRESEDKSRRVKDEARRSLEEVEEDVKDESAEDILRRVRKVSEDHVKELKRLNDDLRRVSEDHVRTLDKLNEELREMVDRIRKRLDELEKRGGDKDEIKKILEEAEEVVRDSKKKIEDLLRHNKKRVDDSLRKIEEILKHNRDEIERVREEIR

SEQ ID NO: 6977 - protein, 184 aa, Artificial Sequence; identical to SEQ ID NO: 6976
  Synthetic

SEQ ID NO: 6978 - protein, 184 aa, Artificial Sequence
  Synthetic
DEVETVREEAKRLVEESRKESRRVEEELKKLLRRVEEEARKVKEELEKSVDEVRKAVTDKDAKDILKTLEDASRDHMRKLDEIIKRLKEIVEEVKRRLKKLNDELEKVVRDVERTLDDLKKKGGIREEIKKILERVREVVKRSKDEIREILKEVRKMIDKVRKEIKEILDHNKEVVRKIKEETK

SEQ ID NO: 6979 - protein, 184 aa, Artificial Sequence; identical to SEQ ID NO: 6978
  Synthetic

SEQ ID NO: 6980 - protein, 184 aa, Artificial Sequence
  Synthetic
SEVEEVKERAERLVRESEELSDRVRREAEKTIEAVRELVERIRKRLKESVEEVERRVTDKKAEDILRRVRELSKRHVDRLEKILRDVKKLSEDHVRTLEKLNKDLRDMVRKVEKELKELKDRGGVREEIKKLLEEVKRVVDKSKRDIDELLKHNRRKIDEVLRELEEILRHNETRIKEVLDRAR

SEQ ID NO: 6981 - protein, 184 aa, Artificial Sequence; identical to SEQ ID NO: 6980
  Synthetic

SEQ ID NO: 6982 - protein, 177 aa, Artificial Sequence
  Synthetic
SEVEKLLREAEEDVERILKRLEDSMDSNRELVERILETLKRSLDEVEKEIRKIIEELKRRRREEEARKLIEKIKRIIDTNHKLAEDLLRRLERHLRENHREAEELLRRLEELIEDLRRRNVDDKVIKRLEDLLRKVEKVVRDTNRTIKDSIRRVKEVVDTTNREAEKLLRRVEDTVR

SEQ ID NO: 6983 - protein, 177 aa, Artificial Sequence; identical to SEQ ID NO: 6982
  Synthetic

SEQ ID NO: 6984 - protein, 177 aa, Artificial Sequence
  Synthetic
SRVEKLLDEVRRLAEDILRDLERSMRSNEELVRKILEKLKESLESNRRLVKRILERLREERKEELARDLLRKLRKHLEDNHKLAEELLKRLEDHVKRNHERAKELLDELKKMLKELKDRDVDEKVIREVERLIEEVKRVVDDTNRRAEESIKEVRDLVRRTNEEIEKTIEEVDREVK

SEQ ID NO: 6985 - protein, 177 aa, Artificial Sequence; identical to SEQ ID NO: 6984
  Synthetic

SEQ ID NO: 6986 - protein, 180 aa, Artificial Sequence
  Synthetic
REAEEIKKALDKLAEELRELLERSRDTVRKLIKELRDLVRESRRRVKELIDDIRRRVDSKEMEKVLKTATDVLRRNEDLIRRIEKVLREILRKNKELADDIERVLRELEKKIEKLRRDGASREELKRLLEEVERLIERLKERIKRLTEESEKLVRELLKLIEKSTKESEEDVKRLVDEAK

SEQ ID NO: 6987 - protein, 180 aa, Artificial Sequence; identical to SEQ ID NO: 6986
  Synthetic

SEQ ID NO: 6988 - protein, 175 aa, Artificial Sequence
  Synthetic
SEIEDLLRRVRRLIEESEEVIKRVADEVKEIIDRSREKIKRVTEESREIIKRLKKDGKEDRDKLEKLVKELEDKNRESLRDTERLVRELRKLLEESLRLTEEIVTRLEKELRDIDRDRRVEDVERDIRRLVRKLREDNKRIAKTIEDLVRELRELNKRSEDETRKLVKELRDAAK

SEQ ID NO: 6989 - protein, 175 aa, Artificial Sequence; identical to SEQ ID NO: 6988
  Synthetic

SEQ ID NO: 6990 - protein, 183 aa, Artificial Sequence
  Synthetic
SEVERIKKAVEDLVRKLRKVSKETLDESRELVKELKERDKESEKDSRRLAERLRKLLEEKNQTDLRKEVEDVVRDMERSNKESKDKTDEVARELEESNRDNRRKVEEVVERLRRLLEKLKRSTDRKVVKDILDEVKKLIDDIEEHSKRVADRNRRLIEKIKKDTEDVIKRNRDLVTEIEKRIR

SEQ ID NO: 6991 - protein, 183 aa, Artificial Sequence; identical to SEQ ID NO: 6990
  Synthetic

SEQ ID NO: 6992 - protein, 183 aa, Artificial Sequence
  Synthetic
SEVEKIEERVKRLVEELKKSLKESEEETERLARELRDVDRRSKEESRRLAEELEDLLRRRNVDELKREVEKIVRDLDKSNRDSKRLTEKIVEDIKKSNEDSDKKVEDLRKRLEDLLRDLSRSTDDKVVEELLKEIEEEIRKILETNDKVVKENRRLAREILEDTKRVVDRNRELIKRIAERIK

SEQ ID NO: 6993 - protein, 183 aa, Artificial Sequence; identical to SEQ ID NO: 6992
  Synthetic

SEQ ID NO: 6994 - protein, 183 aa, Artificial Sequence
  Synthetic
DEVETIAKEVKELADKLRREVEESRKDSEDLVRKLRESLKESRKRSKDLVDELRKLLERKNTTKLREEVERVAEELKRTNDDSRRKVEDAMRKSKKLNDDLRRRVEKVVEEAKELLKDLKRSTDKKVVDDLRKRVEKLIKEIEEDIERVIRRSRKLIEDILRDNERVVKENEDLIREIEERIR

SEQ ID NO: 6995 - protein, 183 aa, Artificial Sequence; identical to SEQ ID NO: 6994
  Synthetic

SEQ ID NO: 6996 - protein, 183 aa, Artificial Sequence
  Synthetic
SDVERVEEELRKLLKEIEDSVRESERRLEKLLEDLKRSTEKTKKELKELIDRLEERVRERGDEEVKRVVEEVAKRAEDLLRESEELVREVAKRLRELLEESRRLVREAAEDLKRLLEELKRLTDSERVKEILERVRKLVEDVLRRNKRLVEEVERLIEEILRVDERIVREVRELIKRIEERIE

SEQ ID NO: 6997 - protein, 183 aa, Artificial Sequence; identical to SEQ ID NO: 6996
  Synthetic

SEQ ID NO: 6998 - protein, 183 aa, Artificial Sequence
  Synthetic
SSVEEVKKTLEDLLRESDKSVRESERRLRELLRESDESVERSRKTLEDLIRELEDLVRKRGDEEVKKEVDRVAEEAKKLLEDSKRLSDDLRRRLKELLEESEKLSRTLKDLLRRVLEELRRLTDDREVEKILREVTKLIEESLRRDREITEEVRDLIKKSKEKDKEIVDTVRRLIREIKERIR

SEQ ID NO: 6999 - protein, 183 aa, Artificial Sequence; identical to SEQ ID NO: 6998
  Synthetic

SEQ ID NO: 7000 - protein, 183 aa, Artificial Sequence
  Synthetic
RSVEEVVKTLEDLLEKLERSVRESEERLKKLLAESDDSVRKSAEELRRLIEELKDLVRREADEEVERTVREVAKEAEDVLEESKRLSDKLAERLKELLDRSRRLVEEVAETLRRLLEELKRLTDEREVKRLLDEVERLIDEIRERDKDIVREVDKLIKDSKREDKRIVDDVRRLIEEIKRRIK

SEQ ID NO: 7001 - protein, 183 aa, Artificial Sequence; identical to SEQ ID NO: 7000
  Synthetic

SEQ ID NO: 7002 - protein, 183 aa, Artificial Sequence
  Synthetic
SSVEEVKRELEKLLEDSDRSVEESKKTLRRLLEESNKELRRVAERLKDLIRELKKRVKERGTEEVARTVDTVAREAEKVLDKLREDSERLAETLKRLLEESERLSRELAKTLRELLERLRRLTDDREVEEILRRVRKLIEESKTMDKKIVDDVRKLIEESLRDIERIVEDVERLIKEIKERIT

SEQ ID NO: 7003 - protein, 183 aa, Artificial Sequence; identical to SEQ ID NO: 7002
  Synthetic

SEQ ID NO: 7004 - protein, 183 aa, Artificial Sequence
  Synthetic
SSVETVEKELRRLIKELRDSVKKSEDDLRRLLEESNRLVREVERRLRELLEKLRKLVEERADERVEDEVRKVAERLKKLLKELKELSEKLARDLKRLLERSKRLVEEVEKELRRLLEELKRLTDDREVKRILDEVKDRIRRILREDEEIVKEVRRRIKRSEEAIREIAREVDREIEDIERRIR

SEQ ID NO: 7005 - protein, 183 aa, Artificial Sequence; identical to SEQ ID NO: 7004
  Synthetic

SEQ ID NO: 7006 - protein, 174 aa, Artificial Sequence
  Synthetic
SEVEELEERARKLLEDVERLTREVEERAKELVKRVKDSSKRSEDEIRRLLRKLLETSGDNEEVRDVEERAKRVVEESRESNKKLEEDLRRLVEELRKSNEELKRRIEEVRKVLADGKDVEKVIRTLEEEVRRDEEKIREVLERVEDLIREDLRRDEELVKELEKLIREVDEKER

SEQ ID NO: 7007 - protein, 174 aa, Artificial Sequence; identical to SEQ ID NO: 7006
  Synthetic

SEQ ID NO: 7008 - protein, 174 aa, Artificial Sequence
  Synthetic
KEVEDLEEELKKLLKEVKTRTEKVVRDAEKSVRDLEKSSRDSDRTLKDLLRRLMETTGDNEIVEELTRRLKKLKEESDKSNEDHDRKSKKLVKRLEDSNKRLEEEARRLRKVLDDGKDVKKVLDEVRRLVEEDKKRIEEVLKENRESVKRDKELDDRLLERVRELIERALERAR

SEQ ID NO: 7009 - protein, 174 aa, Artificial Sequence; identical to SEQ ID NO: 7008
  Synthetic

SEQ ID NO: 7010 - protein, 174 aa, Artificial Sequence
  Synthetic
SEVERLEEEAKRLLEELKRLVERVVREAERSVEKVRDSVRRSEEEARRLLEEITKDDGRNELVETLERLAEELVRRSKKLVEEHEKRSRDLVRELEELVKRVEEKIRDVVRKLRNGKDVDKVVEDLKDDIRKVKKRIEEVLDENRKSVRKLDEDDRRLVDELRRLVKEVKDKVR

SEQ ID NO: 7011 - protein, 174 aa, Artificial Sequence; identical to SEQ ID NO: 7010
  Synthetic

SEQ ID NO: 7012 - protein, 177 aa, Artificial Sequence
  Synthetic
KEVEDLKEELKKLVEELERLVEKNVREARELVKRSEEESRRVAETARRLVDEIRRAGLDEEVVRRLKEVVDDVIRKLKELDDRLRDVVRKVEEENERLVRELRKVVKRVVEELEKTTDRRTITELLKEVEELVKRVLDAIRKSNREVEKLVRESLRRIEKLLREVEKLVKELLERRK

SEQ ID NO: 7013 - protein, 177 aa, Artificial Sequence; identical to SEQ ID NO: 7012
  Synthetic

SEQ ID NO: 7014 - protein, 177 aa, Artificial Sequence
  Synthetic
DEVERLEEELKRLVKEIEDSVRESKKEAEETLRESRKLSREVEERARRLVEELKRKGVPDELVKRLEEVVREVKKDLERLDEEHERKSEEIVRRSEKLVEDLRRLAEEVVRRLRRTTDEREIRELLEEVRKVVEEIKRRDDELVKENRRSIEESKRRIEELLKEVKELVERVTDTER

SEQ ID NO: 7015 - protein, 177 aa, Artificial Sequence; identical to SEQ ID NO: 7014
  Synthetic

SEQ ID NO: 7016 - protein, 177 aa, Artificial Sequence
  Synthetic
RDVEEVKKEAEELVKKSEESVRRSKEELERTLKRSREESERVKETAKKLVEKIERDGIPDRLVKELEDAVRRIAEELDKLDKDHEDKSKKIVDDSKKNLDELREFVRRVADELDKTTDKETIKRLLDEVRKLVEDSLRHDEELVERNKKSIKDSLDEIERLLREIEELVRKVEEDER

SEQ ID NO: 7017 - protein, 177 aa, Artificial Sequence; identical to SEQ ID NO: 7016
  Synthetic

SEQ ID NO: 7018 - protein, 177 aa, Artificial Sequence
  Synthetic
SDVDRVKEDAKRLVEESKRSVDESAKDMRRTLKRSRDESRRVKEELKRLVDRVKESGLDDKVVRELERAVRRVEEDLKKLNKDHEDKSRELIKRSEKNVRELKKVVEDVAEELDRTTDKDEIRELLERVKKLVDESRRHDKRLVEENRRSARDSLREIERLLREVRKLVEKVLRDRK

SEQ ID NO: 7019 - protein, 177 aa, Artificial Sequence; identical to SEQ ID NO: 7018
  Synthetic

SEQ ID NO: 7020 - protein, 177 aa, Artificial Sequence
  Synthetic
DEVETALEEVKELLERVLRKIEDDLRRVRDLLEKLKRTNEELLRKVREEVRRLADLIRKRRTEDVERELERLLDELRREVERVERENRKIVDELEKHTRRVVEEIKETLRELDRKVKEMNLDETVKREIEKARETLERLLKRSEEEVDRVKKEVEEISRRVKKEVKKLVDEIRERLR

SEQ ID NO: 7021 - protein, 177 aa, Artificial Sequence; identical to SEQ ID NO: 7020
  Synthetic

SEQ ID NO: 7022 - protein, 177 aa, Artificial Sequence
  Synthetic
RRVEEVAKELKRIAEKLKRDIEELLRDDKRLADELRETNKELLRKDKEILDRLAEEIKRRRTDEVREELERRIDESKKEVDEVVKENDRIVKESEERVKDLEKELEERLRRLKEKLKANRVDETVDRKIDELAERIRRLLEKVKRHVEETKRDVRRVSEEVRKHVEETKRDVRRRLK

SEQ ID NO: 7023 - protein, 177 aa, Artificial Sequence; identical to SEQ ID NO: 7022
  Synthetic

SEQ ID NO: 7024 - protein, 182 aa, Artificial Sequence
  Synthetic
SRVEDLVRRIRELVRRDLKRIKDLEEEIKRLAEEIERHSKKVVDELKELADRLRKMLEEGNLREEDIDRVRKEMERLLEENKRESDKLVRRLEELVKDSERHSARVVEELEKLVETIRSEGVEKEKVDDIRREVKRVVRESEEANKRVRKLVEDIVKRAEDSNRRVEELVRELVEDLKRAAK

SEQ ID NO: 7025 - protein, 182 aa, Artificial Sequence; identical to SEQ ID NO: 7024
  Synthetic

SEQ ID NO: 7026 - protein, 182 aa, Artificial Sequence
  Synthetic
SEVDELLKTIEKLARDDVKKIREVVEENKREVRRLEEHSKEVVKEIKDRIKEVLELLRRGELRRKDVKKVEEELEKLVRENKERSKEVVRRMRESNRRSEKHSRDLVRELRDRLREIAERGVEERVLERVERLVRRLAEESRRANEKSKEDTKRLEDRLKKSNDDLEKLVRDVVTRVREEAD

SEQ ID NO: 7027 - protein, 182 aa, Artificial Sequence; identical to SEQ ID NO: 7026
  Synthetic

SEQ ID NO: 7028 - protein, 182 aa, Artificial Sequence
  Synthetic
DEVKELEKRIRKLVREIEEHSKEVVKENRRLVEEDLETIKEVLREIKRRIKKLLELLERGELRREDVKRVEDELKKLLEDSKRHSEDVEKKLKESNDKNEKKSEEVVRELEDLVREIAERGVEKDVLKTIKDTVEELVERLKRSNERSREETKKLVKRSREANKRVEDLVRKVVKELREAEK

SEQ ID NO: 7029 - protein, 182 aa, Artificial Sequence; identical to SEQ ID NO: 7028
  Synthetic

SEQ ID NO: 7030 - protein, 182 aa, Artificial Sequence
  Synthetic
EEVERIVKEIRDLAEKDKEHSKRVEEEIRRLVEEVERHSRRVEEEIRRLAEELKRLLDRGELRDEEVRRVVKEIEDLVRRNKEETRKVVEDLKRLVEENKRHSDEVVRRLEKLVEDIKRKGLPEEKLEDLERKVRKLADESREVNDRLRELVERVVRRLEEVNERLERLVEELRRRLEEAKR

SEQ ID NO: 7031 - protein, 182 aa, Artificial Sequence; identical to SEQ ID NO: 7030
  Synthetic

SEQ ID NO: 7032 - protein, 182 aa, Artificial Sequence
  Synthetic
DEVEELVERIKRLVERDEREIKRVEDEIERLVRRVDEHSKRVEEEIRRLVTELMELLDRGELRDEKVKEVVKTAKELVDRNKRETDEVKKELDKLVEDIRKHSKDVVDELKDLLRRIKSRGVEERVVEKVRRLVDKLAERSRDLLRKLRDLVRRVVKRLEDVNRRLEELVRKLAEELKEKSR

SEQ ID NO: 7033 - protein, 182 aa, Artificial Sequence; identical to SEQ ID NO: 7032
  Synthetic

SEQ ID NO: 7034 - protein, 188 aa, Artificial Sequence
  Synthetic
SEIEKILDDIRREAEKDLRLSEKIVEDIKRLAERDIKRLREIVEEIEKLLREVSDELRKRKEKEELKKRVEEAEERLRRLVRELEEHSKKVVRDLEELVKKNHDHSRRLKEKMEELVKELRKEMDSEDAERLIREVEKLVRDLVRESEKSNEEVRKLVEDLVRESDKVLKDVKRLVDEVVRRAREEVK

SEQ ID NO: 7035 - protein, 188 aa, Artificial Sequence; identical to SEQ ID NO: 7034
  Synthetic

SEQ ID NO: 7036 - protein, 188 aa, Artificial Sequence
  Synthetic
SRIDEIVKRIEELARRDEEVSREIVKEIRDLAKRDEDTSKRIVEEIKELVKKIKEELERSKDKEKLARKVDELVRRLRELVKRNHDHSRRVVREMEKLVEENHKHSKDVVDTMRDLVRRLEEELDSEDAKRLLDKVRKTVEDLVRRSRKSNEDVRREVEKLVDRSRKSNTTVERLVRKVVRELRETVR

SEQ ID NO: 7037 - protein, 188 aa, Artificial Sequence; identical to SEQ ID NO: 7036
  Synthetic

SEQ ID NO: 7038 - protein, 188 aa, Artificial Sequence
  Synthetic
SRAEEIVERIKKLAEDDKRESDRIVEEIKKLARDIEEAIRRIVKEIRDLVKEVRDVLEREKDKEKLDRKVDDAVRKLEKLVRELKELVDRVVKTAEDLVRENHRHSKEVVETLERLVEELRKEATDERAKELVEEVERLVRELVKDSDRSNKEVRRTVKEIVERAEKLVRDVEEDVERLVRDLKRKVK

SEQ ID NO: 7039 - protein, 188 aa, Artificial Sequence; identical to SEQ ID NO: 7038
  Synthetic

SEQ ID NO: 7040 - protein, 188 aa, Artificial Sequence
  Synthetic
SEIEKILKEIEDLARRDEEVSKKIVEDIRRLAKEVEDTSRDIVRKIEELAKRVLDRLRKDRRKEELEKEVREVVKTLEELVKDNHRLIRRAVEEMKRLVEENHRHSREVVKELEDLVRKLRADSTSEDAERLVREVEDLVRRLVRRSEKSNEEVKRTVEELVRRMEESNDRVRDLVRRLVEELKRAVD

SEQ ID NO: 7041 - protein, 188 aa, Artificial Sequence; identical to SEQ ID NO: 7040
  Synthetic

SEQ ID NO: 7042 - protein, 180 aa, Artificial Sequence
  Synthetic
SEIEKLRKTVERIKEEVKRLSDEHKKRTRELERTSERLVEEHRERTEELRRRIEEIVRKKRDRSLEEIVKKLKELLDKLDKELEDSSRDTKRRLKRLDEDSDRSNKELAERLRRIAELIKAGKDIDTLVEEIKELMKEDSERIKKSVKEVDDLAKEDSDRIRDSVRTVKELADEAIRRAK

SEQ ID NO: 7043 - protein, 180 aa, Artificial Sequence; identical to SEQ ID NO: 7042
  Synthetic

SEQ ID NO: 7044 - protein, 180 aa, Artificial Sequence
  Synthetic
SEIERLEDRIRRLIRDSRELVKTLKKELKEIIERLEELSERLRREIERVVREVEDVVRKRRSDKIEDLVRRLKERLDRIIEESRDLNEKTKRELERVIREIERSSKESEDRAKKIEDLIRAGSDIDELLKKLDEIATRDREKIERLREEIRKIARKDEEDIRKLVKEIRDEVRKLKEDAR

SEQ ID NO: 7045 - protein, 180 aa, Artificial Sequence; identical to SEQ ID NO: 7044
  Synthetic

SEQ ID NO: 7046 - protein, 174 aa, Artificial Sequence
  Synthetic
SEVEELRELVKRLIERIKRVVETNERDLEELIKRVKDAVKKNKEDLERLIEEIDRKRVDERLIRELRKKLERLKEENERLVRDLKRAVDEVVKENRRLVDDLRRKLETVERVLDKGEPIKELLDELKRLIDEVEKKLRESNERVRRLAEEVLRRSKESNDRVRDEARKVKETAR

SEQ ID NO: 7047 - protein, 174 aa, Artificial Sequence; identical to SEQ ID NO: 7046
  Synthetic

SEQ ID NO: 7048 - protein, 174 aa, Artificial Sequence
  Synthetic
DEVEALKRTVEELIKRIRKAVEDNERDLERLLKESRDVVKKNEEDLKRLIEEIERIRVDEKLIRELREVVKKVKKENEDSVKESEEVVREVRKRNRELVRELETIVRRVERVVENGEPIEKLLRELERVIEEIVRRLEDSNRRVRDIARRDKERSKRSNDRVRRLAEEVKERAK

SEQ ID NO: 7049 - protein, 174 aa, Artificial Sequence; identical to SEQ ID NO: 7048
  Synthetic

SEQ ID NO: 7050 - protein, 174 aa, Artificial Sequence
  Synthetic
SEVEELKKLVEELRREIRRLVRENEEDLKKLLEESKRMVERLKELVKKLIEDIRRTRVPDELIRRLEEMAKEVERRLKKSVKESEDELRRVVEENRKLVRDLEKILEDVERVVENGEPIKELVDELKRVADEIVRRIRESNRKVRKIAEEDKTRIKRLLEELERLIADVERRAT

SEQ ID NO: 7051 - protein, 174 aa, Artificial Sequence; identical to SEQ ID NO: 7050
  Synthetic

SEQ ID NO: 7052 - protein, 178 aa, Artificial Sequence
  Synthetic
SEVERLLRELERSVTEVKERVRRLVEELERIVREVKKRVDEHKERNKRALEDVKRKVRDRKDVKEVVRELVERLRRIVEESDKNLRELLREVERLVEDVVRKVEELLKRNERLVEEIKKRGVREEVEKRARKTTEDIKRMADKVTKVAEEVLRRVEKVVEEVREVSRRVVEDIERDTR

SEQ ID NO: 7053 - protein, 178 aa, Artificial Sequence; identical to SEQ ID NO: 7052
  Synthetic

SEQ ID NO: 7054 - protein, 182 aa, Artificial Sequence
  Synthetic
KDVEKVIEDIERILTEVRRHSKEILDRIKRILETIREIVKEVKKRNEDLLREARESNVRSEEVRRIVEEIVRRARRSNEELRRIAEEIVRELDRLVKENHELIREVARRLEKLVEDLVRRRGRDKSVEDARRAVERVVREARRSNEEVKRAVEEVAKELERLVKESEDESRRIVEELKKTVD

SEQ ID NO: 7055 - protein, 182 aa, Artificial Sequence; identical to SEQ ID NO: 7054
  Synthetic

SEQ ID NO: 7056 - protein, 182 aa, Artificial Sequence
  Synthetic
DEVEEVIKRIRDILRRVEEHSEKILREIEKLLRDATRHSEEVKRRNEKILRDAENSRVRSKEAEDIVRRIVEEAKKSNEENHRLIRDLERRLRELVKENHDLIRRVEKELEELVEDLVRKKGNDEDVKRVRDEVKKVVERVRRSNKKVEDMVREVERRLRESNKESREDSKRIVEEMDRRVK

SEQ ID NO: 7057 - protein, 182 aa, Artificial Sequence; identical to SEQ ID NO: 7056
  Synthetic

SEQ ID NO: 7058 - protein, 178 aa, Artificial Sequence
  Synthetic
SEVEKIIDELRKVAEEHKRRVKELVDTNRKVLKEVKDRVRDLVRRVREILKDVSDKARRVTDRKTLEELLRRLKEMVDRVRETAERLLRELERISREHKKEAKRLLETNKRRVEEVKRRVREVDEIKEVLKESEEEVRRMLEELEKELRRSRKTVEELLRRLDKTLREVEEAVKRERD

SEQ ID NO: 7059 - protein, 178 aa, Artificial Sequence; identical to SEQ ID NO: 7058
  Synthetic

SEQ ID NO: 7060 - protein, 178 aa, Artificial Sequence
  Synthetic
DRVEELLKRVREILERVEREARRLVEEVEDVMRRHKEKLEELVRHNREVLREVSREARRTRDKETLKRLLDELRKLSKEHKDEAKRLLESNRRIVERVRERVERLLDELRKEVDKVRKAVREVEEVKKVLKEVEDTVRELVRRLEKKLKESIDTVERLLEELERVLRESNKTVEDETR

SEQ ID NO: 7061 - protein, 178 aa, Artificial Sequence; identical to SEQ ID NO: 7060
  Synthetic

SEQ ID NO: 7062 - protein, 178 aa, Artificial Sequence
  Synthetic
DEVRKILRELREALKRHVEEVKRLLEHNERVLKKVKEDVERLMEEVKRALEDVKRDVDRTRDKETLERLLRRLKTIVDRVRETAKELLDRVRKVSKEHEDALRRLKDTNREIVRRVAERLKDVKEVRKVLRESEKLIDDLLRELKRVLEETNRRVEDLLRRLEEVLRRVEKTVRDRAK

SEQ ID NO: 7063 - protein, 178 aa, Artificial Sequence; identical to SEQ ID NO: 7062
  Synthetic

SEQ ID NO: 7064 - protein, 176 aa, Artificial Sequence
  Synthetic
SLKERLEKVVEESLRRVEEVIKKLERRVEESERRVEELVKTLRDVLRKILRELEKEGGRELIEELRKALRRLDETVKKNLDENRELIEEVRRRLKKHLDDNKKVAEKLKEALKRNSSRETVERLLEEIRELLERSRKNVEDLERRIDKLLEDSERNARELLERIRKELRDISEKRK

SEQ ID NO: 7065 - protein, 176 aa, Artificial Sequence; identical to SEQ ID NO: 7064
  Synthetic

SEQ ID NO: 7066 - protein, 176 aa, Artificial Sequence
  Synthetic
SMKEEIDRVVREVAENVRDMIRRLKRVLEESLRRVDELVKEIKKVLDDVRRRIEEDGGDELIAELDKIAEEVKRNAEKHLERNKRLADEVRKELEKHRKENERLIRELKDRADKNSSEETVKRLVEKIRELNERSLDNVKKLLDRIRELLEESERNVKDIVRRIRDLLRRIKEKAT

SEQ ID NO: 7067 - protein, 176 aa, Artificial Sequence; identical to SEQ ID NO: 7066
  Synthetic

SEQ ID NO: 7068 - protein, 182 aa, Artificial Sequence
  Synthetic
DEVERVLEEIERMLREVEEHTRRVVEEVRRVLEEVKRHSERVVREIRRLLEELRKLVERGEITDEKLREVVKRLDDLVKENKRRSEEVVKRLRELVRRNKEKSRKLEEEAKKLVDDVRRSGAPKDLVRKVEEEVRRVKRELERLNKELEDEVRRIEEAAKRSNEELKKVVDEVKRELEKASK

SEQ ID NO: 7069 - protein, 182 aa, Artificial Sequence; identical to SEQ ID NO: 7068
  Synthetic

SEQ ID NO: 7070 - protein, 182 aa, Artificial Sequence
  Synthetic
DEVDEVLKEIRKVLEDVRKHSEEVLREIERVVREVKKHSRKVVEEIKEVVKRLEDLARRGEIRRKDVEDVVRKLRKKVRDNVETSRRVVEELKKLVKRNVEVVKRVVEEARRLVEEVDKGGVDKRLVDKVRKVVEEVERELKKSVDDVRRVVEEVERRLREVNKEVEDVVREVEERVRRAAT

SEQ ID NO: 7071 - protein, 182 aa, Artificial Sequence; identical to SEQ ID NO: 7070
  Synthetic

SEQ ID NO: 7072 - protein, 175 aa, Artificial Sequence
  Synthetic
DEEKEVEKVVRDVEDKLRRLLEENRDVSRKIKRELEELLKELKRSVDDSKEKLERKLREEDEVVKRVLKTSEDLVRELERLIREVEKDLEDSNRKVEDVVRDLKRRLKEIEKLVRDGADIKTVLEEIKKLAKEAEEEIKRTLERVKKLLEEVRRVVEELLRRNRTLLREIVRKAK

SEQ ID NO: 7073 - protein, 175 aa, Artificial Sequence; identical to SEQ ID NO: 7072
  Synthetic

SEQ ID NO: 7074 - protein, 175 aa, Artificial Sequence
  Synthetic
DEERELEEVVKDIERRSKKVVEDNRRVSEEIKRRLEKLLEENRKSAEDSKEMLRRELREKDEVVRRLLKESDDSNKEVKELIDDLTRRLDKSNEDLKRSVDETKEKLDRLLDLLRRGVDVKTIVTEVRDVVRRDKKKAEDTVRTVKELLDRARKKVEKTIRDNRKVLEEVVRKAR

SEQ ID NO: 7075 - protein, 175 aa, Artificial Sequence; identical to SEQ ID NO: 7074
  Synthetic

SEQ ID NO: 7076 - protein, 175 aa, Artificial Sequence
  Synthetic
SELERVEKVVREVKKALEDLLRRNKESVDRSRTEARRLLEELRESVRRSEEMVRRKLREKDEVVRDLLKKSRKLVEDLRELAERLKRKSEKSNEEVRRLVEKLTEELKDLLRLVEAGKDVEKVLKEIRDLLREAAERVERSIRRNKKVLDDLKEVVERLLKENERLLREIVEDAR

SEQ ID NO: 7077 - protein, 175 aa, Artificial Sequence; identical to SEQ ID NO: 7076
  Synthetic

SEQ ID NO: 7078 - protein, 175 aa, Artificial Sequence
  Synthetic
SAREKLRKVVEEIRRELKRLLEENKKVSDDIRRKLDELLKELEKSVKESIDTLRRDLREKTEVVERVERDSRRLIEELRKLVEDLDRRLKKSNDEVRKVVEELKRTLEELLKLLDDGVDVDTIVKELRELLKRAEEEVKKTSDRVADLVRRAEEVVKKLLRENEELLRRIVETAR

SEQ ID NO: 7079 - protein, 175 aa, Artificial Sequence; identical to SEQ ID NO: 7078
  Synthetic

SEQ ID NO: 7080 - protein, 175 aa, Artificial Sequence
  Synthetic
SEKEKVEKVVDEVRRRLEDLLRRNRESVRRSDEELKRLLKRNKEVSDEIRKRLRRELDKKDEVVRELEKRLEESNREVEKLIRDVVRKSEDSNRRVEKLVRDLLRRLEDILRLVEAGADVKTVLREIRELLKEAEERVKKSIKENEDLLDDVRRKVEESTERVERELERVSREAT

SEQ ID NO: 7081 - protein, 175 aa, Artificial Sequence; identical to SEQ ID NO: 7080
  Synthetic

SEQ ID NO: 7082 - protein, 175 aa, Artificial Sequence
  Synthetic
DEDREVEEVVKEVEERLRRLLKKNEDVSREIEKRLKELLEKNKRSVEKSEEMLRRKLREKSEEVKDLKDKSARSNEEVAEIVKDLKRRLEESNREVEELIRRVRKRLDELLKMVKAGKDVDRVLEEIRELLKRVKEEVERTSRDVKEVLRRAEEEAKRTDDENRKLLEEVVEKAR

SEQ ID NO: 7083 - protein, 175 aa, Artificial Sequence; identical to SEQ ID NO: 7082
  Synthetic

SEQ ID NO: 7084 - protein, 178 aa, Artificial Sequence
  Synthetic
DRSKEVVDRLEEELRKVKEDSKESVDRLRRLLEEVERRAEKSLRDSKEVLRRVKEEAERDRDEKTLRDLLRELKKDLERSDRELADLVRRLKEVVDRIRETNEKLIRDLKRRLEEVLDRNREVRELEKVVRDIIDRVRKMLETSEEVIREVLERVRKVLEENRRVNKDIIDKVEERVR

SEQ ID NO: 7085 - protein, 178 aa, Artificial Sequence; identical to SEQ ID NO: 7084
  Synthetic

SEQ ID NO: 7086 - protein, 184 aa, Artificial Sequence
  Synthetic
DEIERLIEEIKTVLDEIRKEAKRMIDENKRLLDEIRELSERVVEENRRLLEEIRDRAEKRRTEELAERVRRLLRRVEEENKRVARELRELLRKSEEDTRRLVTEVRDRLEKLRERVEELVRRKRVKELADELRKVLKDVRREIEKLVRDAEKSNEDSRREVERLVKRNRESLEEIRKRVEDLVK

SEQ ID NO: 7087 - protein, 184 aa, Artificial Sequence; identical to SEQ ID NO: 7086
  Synthetic

SEQ ID NO: 7088 - protein, 175 aa, Artificial Sequence
  Synthetic
SSKETLRKEVERLEKELKKLVDESRRVLEEVEREVRRAVRELEESVKKSAKRLRDRVRGEEILRRVEKKLKESEELVRRATETLKEVLKRLRESSKEVADRLKEVVERLRREVDKGGDDVEKLIRRVEELLERVRELVKKNIREIEELLERLRRLVEKVIEDDKRMLKEVEEEAN

SEQ ID NO: 7089 - protein, 175 aa, Artificial Sequence; identical to SEQ ID NO: 7088
  Synthetic

SEQ ID NO: 7090 - protein, 185 aa, Artificial Sequence
  Synthetic
REVEELIKRIERLLDEAREHSKEVIRRDEELLRRVRKIIEEIIREIERLLREAEDIARKRGGSDEEVLRRLEEIVRRLRELVERVKRELEKIVEESRRLVEKNEDLSRKLVETLKDLVRRLSRDVSEELLKRIEDVVRRVVEDLKRLNEEIRRSSEETEKELRRLLEEIRKVVEDVERRVRELVK

SEQ ID NO: 7091 - protein, 185 aa, Artificial Sequence; identical to SEQ ID NO: 7090
  Synthetic

SEQ ID NO: 7092 - protein, 185 aa, Artificial Sequence
  Synthetic
DEVREVIKAIRKMLEEAEKHSRDVIRADKELLDKIARHSEEVIKEIRRLLRELEKIAKDKGGESRELEELAKEVVERLKKLVEENVRLSRRIVETSRRLVRENKELSREIVERLEKLLRDLAKTVSEDLLRRIEEEVRRVVEALEKLNRDIEESSRRTEDTARKLNERIREVVEEVMRRVRKLVE

SEQ ID NO: 7093 - protein, 185 aa, Artificial Sequence; identical to SEQ ID NO: 7092
  Synthetic

SEQ ID NO: 7094 - protein, 185 aa, Artificial Sequence
  Synthetic
SEVERVIEEIRKLLEDAKRHSDEVIKTDEDILRKVKKHSEEVIREIEKLLEEIEELARRRGGRDKEVVERLREVVRRAEELVKDNKRRSERVVEESRELVERNRRRSEKLVRRLEELVRRLSRDVDEELLRRLEKLVEDVMRTLKKLNDEIRKSVDETEKTLEELNRRIRKTVEEVRKTAEDLVR

SEQ ID NO: 7095 - protein, 185 aa, Artificial Sequence; identical to SEQ ID NO: 7094
  Synthetic

SEQ ID NO: 7096 - protein, 185 aa, Artificial Sequence
  Synthetic
DEVREVIRRIEKLLEDVKRHSERVIREDRKLLRDAERRAKEVIDEIRRVLEEAKEIVRREGGESKKVKDELEKVVRDLRKLVEDLKREVTEIVKKSDELVKENTRESDRVVKELRELVRRLSRDVSEELLKTITDVVRKVEETLKKLNDEIRKSVEDTMRALKKLVDDLRRVVKEVEDRVREEAR

SEQ ID NO: 7097 - protein, 185 aa, Artificial Sequence; identical to SEQ ID NO: 7096
  Synthetic

SEQ ID NO: 7098 - protein, 185 aa, Artificial Sequence
  Synthetic
DVVREVIKTIKKILDEVRDHTRRSIERNEKLLRDIRKIVEDSIRRNRKLLDDAKKVAERDLSDKESLKRKVDEVIKELKDTLDELRKIAEDVIRELEKTLKENHELIREVIERLKELVARLRSQVDEEMVKTLKKVVEDVERELRRLNKEDEDTVREIAEAAERLVRDDERTVREIEEALKELVR

SEQ ID NO: 7099 - protein, 185 aa, Artificial Sequence; identical to SEQ ID NO: 7098
  Synthetic

SEQ ID NO: 7100 - protein, 185 aa, Artificial Sequence
  Synthetic
DVIRDVEKKIRDILERVREHTKKSIKENRDILDDVRRHTEKSIKENEDILDEVRRVAERDLKDKKTLTDVVRRIERELEKTLERDHRRIREVEKRLEETLRENHELIRDVIRRLKDLVDKLRSQVPEEMVKRAKDVVDDVARRLEELNREDKKTVEEIVETAKELNERDKETVERIRKKLEDLVK

SEQ ID NO: 7101 - protein, 185 aa, Artificial Sequence; identical to SEQ ID NO: 7100
  Synthetic

SEQ ID NO: 7102 - protein, 185 aa, Artificial Sequence
  Synthetic
DAVRKVIEDIKRALEEVRRHTKESIKRNEDILREVEKIARDIIREIRRILERVREVVERDLKDKDTLRKAVEDVIKRLEEILKELEDIVRDVIRRLEKTLKENHDLIREVIKRLEDLVRDLRRKVPEEAVETLKRVVDDVAKKAKELNREDEETVRKIVEELKRLLDELRREVERVADEARRAVK

SEQ ID NO: 7103 - protein, 185 aa, Artificial Sequence; identical to SEQ ID NO: 7102
  Synthetic

SEQ ID NO: 7104 - protein, 185 aa, Artificial Sequence
  Synthetic
SVAEEVIRRIEEILKRVEEHTRESIERNKKLLEEVRKHTEDVIRRIRELLERLERVVRRDLKDKETLRDTARRVVEELEKILEEDHRLVRRVEEELRKTLEDNHRLIREIEERLRRLVEDLKRKVPEEMVKRVKDVVDDVVRRLKDLNETDRRTVDEIVKEARRLNDELRKVVEEVEEKARRDVK

SEQ ID NO: 7105 - protein, 185 aa, Artificial Sequence; identical to SEQ ID NO: 7104
  Synthetic

SEQ ID NO: 7106 - protein, 183 aa, Artificial Sequence
  Synthetic
DEVREIIERIKKLLDDIRKVAEESIRRNEKLLEEVRKRVRESIEELKRIKEEVEKLAREGQPKEELKRIVDEIAKRADESNETLKRIVDKLRKDSKKSNEDVKKIIEELKKRLDDLLRDVRRVPEDVVRTIEEVVRRVEKELRRLLEENERVIREIERELKKLVDDNKRVSDEIKDRAERLVD

SEQ ID NO: 7107 - protein, 183 aa, Artificial Sequence; identical to SEQ ID NO: 7106
  Synthetic

SEQ ID NO: 7108 - protein, 183 aa, Artificial Sequence
  Synthetic
SEVEDIIRKIEESARRSEKVVRDSIRENRRLLEEVKREVDRSIERLEDIIRKVEEVARRGEPEEELRRIVEEVKRELEKSNKELREIVKELRERSRRSNEEVERIVRENAKRLDELLRDIRRVEERAVDTIRRVVEKSKTVSKKVLDENREVVREVDERVRELVRKNEDVSRKIEERARRLLK

SEQ ID NO: 7109 - protein, 183 aa, Artificial Sequence; identical to SEQ ID NO: 7108
  Synthetic

SEQ ID NO: 7110 - protein, 177 aa, Artificial Sequence
  Synthetic
DEEEEVERVVKEAEETIRELLERDKRVVKRLREEADRVLDEVREEVKRSEETAEDLRRKGLDERLVDRLRKLSEDHKRKVEELKRRLDEVLRRVEEESKRLLEELREILERVRRLVRRGDPGEKLIKELEDVLRELEERSRKTLEELKDVLRKVKETIDELIRTNRRELEKLERDTR

SEQ ID NO: 7111 - protein, 177 aa, Artificial Sequence; identical to SEQ ID NO: 7110
  Synthetic

SEQ ID NO: 7112 - protein, 177 aa, Artificial Sequence
  Synthetic
SEEEEVAKVVEDVRRRLEELKRAVEEVIRRTDEEAKRLLEADRRVVERVREEVKRLVEAGLDERLARTIEEILKEVLRRSEKLLEDLRRVNEKSDRDVDRLREEVEDILRRLRELVRKGEPGKELIKRLRDELKRLEDDARRILERNKKILEDVERESRRTLKELKDVLKELEERAR

SEQ ID NO: 7113 - protein, 177 aa, Artificial Sequence; identical to SEQ ID NO: 7112
  Synthetic

SEQ ID NO: 7114 - protein, 184 aa, Artificial Sequence
  Synthetic
SLVEELERVVKDVEREARKLNEHNRENSKRVEDRLRELNEHLRKNTEEVKRRLEELIRKKKDSEELLRLAEKLLTESEKLVRDMERENKKSIEDSRRLVKRVVEENKRVLDEARKLVEELKRLTDEDAIREVLRRIERLLEEVKKKNEETSKRSKELLEENAKRNKEVSDRSKRLLEEIKRRAD

SEQ ID NO: 7115 - protein, 184 aa, Artificial Sequence; identical to SEQ ID NO: 7114
  Synthetic

SEQ ID NO: 7116 - protein, 184 aa, Artificial Sequence
  Synthetic
SLTERLREVVRRVEEELKELIRHLRENSERVRKTLEELNRHLKENVEDVKRKLEDLIRKKKDARELERLLRRIIETSEELVRRVVERNKKSIEESERLVRDAMRKLEKLIDEIRKLVEEVSRLTDKDAVERVIEEIERLLDEVKKTVEELSKTSKKLLDENKKENEDVSRKSEELLKKIADEVK

SEQ ID NO: 7117 - protein, 184 aa, Artificial Sequence; identical to SEQ ID NO: 7116
  Synthetic

SEQ ID NO: 7118 - protein, 184 aa, Artificial Sequence
  Synthetic
SLKERLEEVVRRVRKELKKLIEHLERNVEEVRKTLEELNRHLDENVKRVKDTLTRLIEEKRDKKDLVEKLERALEDSKRKVDKLREENRESIRRSKKLVDDAKKKLDDVIRRIKELLERASRLRKKDEFERVLKRIKEVLDEVKREVEELSKESEDLLRKNEERNKRASDRSEDLLKKIAEEVK

SEQ ID NO: 7119 - protein, 184 aa, Artificial Sequence; identical to SEQ ID NO: 7118
  Synthetic

SEQ ID NO: 7120 - protein, 184 aa, Artificial Sequence
  Synthetic
SLLEELEKVVEEVKRSLDEVNKRNKKNTDDVAKTLTDLNEHLERNVRKVEEDAKDLVRKKKDSDELRERLEDIIRRSKELVDELRKLNTDSIERSERLVREAVKRNERAIERIKKLVDDASRLDKEKLAKDVLREIRRVLEEVKRDNDRTSKESKDLLDENKKRNEEVSEESERLLRDIARKVD

SEQ ID NO: 7121 - protein, 184 aa, Artificial Sequence; identical to SEQ ID NO: 7120
  Synthetic

SEQ ID NO: 7122 - protein, 184 aa, Artificial Sequence
  Synthetic
DLLEELKDVVDKVRRTLERLNEENRKNVEDVKRRLDDLNRKLEDNVRRVEERARELIKRKKDAEELREELERVIKTSKDLVDKLRRENEKSIEDSDRLVKKVERDNERVITRIEELLRRLARLTDEKAVRDVLKEIEELLRKVTKENKDTSDESRRLVKTNEDLNREASKRSEDLLARVEEKVR

SEQ ID NO: 7123 - protein, 184 aa, Artificial Sequence; identical to SEQ ID NO: 7122
  Synthetic

SEQ ID NO: 7124 - protein, 184 aa, Artificial Sequence
  Synthetic
SLTERLAEVVKRAEDLLRKLNEENKKNVEDVERTLRKLNKDLKDSVDRSRREAEKLIRRKKDSKDLARKLKKVVEDSKELVDRLMEENKRSIERSRDLVRRVKETNEEVLREIRRLLEELSRLTDKDAIEKVLEDIERVLREVEKRNRETSRDSERLLRRNEEENRKALERDEKVLKEVADEVE

SEQ ID NO: 7125 - protein, 184 aa, Artificial Sequence; identical to SEQ ID NO: 7124
  Synthetic

SEQ ID NO: 7126 - protein, 184 aa, Artificial Sequence
  Synthetic
SLEEALEKIVREVKETLERLNKENRDSVRETADTLRKLNEELRRNVKRVEEALRDLIREKKEKEELKDKVRELLRRSRELVEEVVKENKKSIEESKRLVDEAEKINRDLIRRIKELLDRASRLRKEEEAKRVLRKIEEDLKRVADINRKTIERDKKLLEDNERKNRKVSEESRELLEKIAKDVK

SEQ ID NO: 7127 - protein, 184 aa, Artificial Sequence; identical to SEQ ID NO: 7126
  Synthetic

SEQ ID NO: 7128 - protein, 185 aa, Artificial Sequence
  Synthetic
KEVEEIIEEIKDRLRRLEETVERLLRENREMLRRTREEVKEIIKRIRDLLRELKKIAEKDRRKEELERLARELEERLKRLVDELRRSLEKHDRESEESVKRLEELARRLLEDLDRLVKDLRRKGIDKKLVEDVDKVVKEVEDRVRRLIEALKKVSEDLHRENKKLIEELEEVVKEVKERARELTR

SEQ ID NO: 7129 - protein, 185 aa, Artificial Sequence; identical to SEQ ID NO: 7128
  Synthetic

SEQ ID NO: 7130 - protein, 185 aa, Artificial Sequence
  Synthetic
DEVKEIIKRIEDLLEDLKRKVERILREDERSLEESRKKVEEILKEIEDVLRKLKKDVEEDRDKDRLREEAKRLLEKLEKLVRDLKREVDENVKRSEKLVREAEELAERLVKELEELVRDLERKGVDESAIKELRDVVREVKKRAKELIERLRESVERSRETNERLIRELEDVVRRVEETVRRLIK

SEQ ID NO: 7131 - protein, 185 aa, Artificial Sequence; identical to SEQ ID NO: 7130
  Synthetic

SEQ ID NO: 7132 - protein, 178 aa, Artificial Sequence
  Synthetic
KKEEKIKRSVERSKEENERLIEELERSIRDTARRAEKLIERLEKVVREVDKRLRELREEGRLRDEEVDRLKKELDRLLRTVKELVKELKRRSTELLRRLEEIVRENEKISRDILKLLRDGKDVETVLREDEDTLRRSEEKVDKLIKDDRRLLEELEDKVRELLRTVKELLKRTEERVT

SEQ ID NO: 7133 - protein, 178 aa, Artificial Sequence; identical to SEQ ID NO: 7132
  Synthetic

SEQ ID NO: 7134 - protein, 178 aa, Artificial Sequence
  Synthetic
SSEERLKESIDRSKKRNKEAIEELEKSIRETEKTLEELIKTTRKSIEDVRKRLEDLERKGELDRKMVETLRKRLEDILRRNKTLVDRVKERSEKLLRDLRKIVKENEDRSREILKLVRDGSDIDTLIEEDKETLRRSDEEVRRLIDEDRRLLEEVEKRARESNKEIRDLLRRVEEEAR

SEQ ID NO: 7135 - protein, 178 aa, Artificial Sequence; identical to SEQ ID NO: 7134
  Synthetic

SEQ ID NO: 7136 - protein, 178 aa, Artificial Sequence
  Synthetic
SEEDELRESVKDSERRLRRLIEEDKRVVEEVEEENKRLIDKVREVIKRIEDRLDELRRRGELSEDSVRRLKELLKDILRKVEEIVERNVRRLREMLKESKRLVDRLKEESEEILKLVRAGKDVKEAIRRDRELLKRAEEESRRTLEEMRTSLEESKRRVEELIKTLKRLLDEAEKEAK

SEQ ID NO: 7137 - protein, 178 aa, Artificial Sequence; identical to SEQ ID NO: 7136
  Synthetic

SEQ ID NO: 7138 - protein, 178 aa, Artificial Sequence
  Synthetic
SSEEKVEESIRRSKKRLEELIRDVERVVRKVEEDNRRLEEKLRKSIEDTRRKLEELKRRGELDDELVRRVKEESDRLLDELRDIVRRNVERARRLLEELERLVEDLKRKSEKILELVRRGKDFETLIRDDKRLLRKVEEDAKRLIKEIRDSLRESEKRVEELIDRDRRLAKEVEDRAR

SEQ ID NO: 7139 - protein, 178 aa, Artificial Sequence; identical to SEQ ID NO: 7138
  Synthetic

SEQ ID NO: 7140 - protein, 178 aa, Artificial Sequence
  Synthetic
SSEERLRESIKRSKKRLEELIREVRKRIEEIRRKNEELIREVEEVIRRIREELKRLRDEGKLDDKTVKDLKEKLDRILEEVKRIVDENEKTARELLKRVEEIVRELEKRSKEILKMVRDGKDIDELIKEDERLLREVEKKVKEIIKRLDDSLRDSERRAKELIRELEELLREAEERAK

SEQ ID NO: 7141 - protein, 178 aa, Artificial Sequence; identical to SEQ ID NO: 7140
  Synthetic

SEQ ID NO: 7142 - protein, 178 aa, Artificial Sequence
  Synthetic
SSEDRLRKSIEDSRKRNEELTRALETVIREIRKRNARLIEEVKKVVEEVKRELERLREEGLLSDELVETVLREAERLLEELRKIVEDNVRTADKVLEDLKRIVRRNEEESKKIEELVKAGKDIDTLIKRDRETLKESEDRVRKLLEDLRRSLRESEKEARRLIEEIRTLLEKVAREAT

SEQ ID NO: 7143 - protein, 178 aa, Artificial Sequence; identical to SEQ ID NO: 7142
  Synthetic

SEQ ID NO: 7144 - protein, 175 aa, Artificial Sequence
  Synthetic
SEVEDVLRRIRELLEEVRELVERNLKEIKRLADEIERLAKENLERSRRLAEELRDGNLDEKAAKDVVDDSKRHSREVVETVKKIAEESKRHSDEVVKTLKDIVREIKREVEEKVRGEDAVERVERILRDADEKIKELARESERLNRELDELIKRLVDESRELNRELEEIVRERAR

SEQ ID NO: 7145 - protein, 175 aa, Artificial Sequence; identical to SEQ ID NO: 7144
  Synthetic

SEQ ID NO: 7146 - protein, 175 aa, Artificial Sequence
  Synthetic
REVEEVLKKIEDLARELTKKVRKNLEDIKKLAEEIRELAERVLRTSRELIKELRDGNLRDEELKRIVDRSRELSKEVVERVERIVEESEKHSKDVVDEMKEIVDRVRKEVEDRVRGRELLEEVRKILEEMRRRVDELVRRSEELNRKLRELVERLVKELEDLNDEAKKIVDDRAR

SEQ ID NO: 7147 - protein, 175 aa, Artificial Sequence; identical to SEQ ID NO: 7146
  Synthetic

SEQ ID NO: 7148 - protein, 175 aa, Artificial Sequence
  Synthetic
REVEEILKKIRTLLEEVKRRVEKNLEDIRKLLKELEDRVRRDLDEIRRLAEELRDGNLPEEDVRRVVEESKKHSRDVVETMKKIVTESEDHSRKVAEELKKIVKEIKEEADDKVRGEKLLAEVRKVLKEAEDKIRELVERSKTINTEVKKEVDRLVEESKKLNKELEDEVDRRAK

SEQ ID NO: 7149 - protein, 175 aa, Artificial Sequence; identical to SEQ ID NO: 7148
  Synthetic

SEQ ID NO: 7150 - protein, 175 aa, Artificial Sequence
  Synthetic
REVEEVLKKIRELIETLEELVRDDLRRIEELLRRIEDKVRENLRRIREVIKELRDGNLPEEELRRVVEDTKRHSREVVEEAKKILEDIRRHSERVAREMKKIVDDIRKKVEKDVRGEDLLKRVKELLDDIRRKVDELIDRSRRLLEDLRRRVKELAEESKKLNEEAEKIVEDRAR

SEQ ID NO: 7151 - protein, 175 aa, Artificial Sequence; identical to SEQ ID NO: 7150
  Synthetic

SEQ ID NO: 7152 - protein, 175 aa, Artificial Sequence
  Synthetic
KEVEEVLKEIKDIAEEIRELAERDLKRDKELVDEAEDLVRRNLEDIRRVIEELRDGNLSEEELRRVVEETKKHSDEVRKELEDIVRRSKEHSRRVAERVKRLVEEVKKRVEDRVRGEELLRRVEKLLEDLKRTVDEMVKRSEDSLRRSEETVRELEERSRRLNDEIRRIVDERAR

SEQ ID NO: 7153 - protein, 175 aa, Artificial Sequence; identical to SEQ ID NO: 7152
  Synthetic

SEQ ID NO: 7154 - protein, 179 aa, Artificial Sequence
  Synthetic
SEVDKVVKEIKEKLDEIRKEVEKVVREDERLLEEIERLARKVVRENKELLKDIRREGREDTEKAREMLERSERKVRELIKEAKKILEESRELVKRLTEKAREVLKEIRDEVKKLEDRTDDETVARKLEEVVREVEEEVRRLEEKLKRSVEETEREIRRVVKELEDSVRETEREVRRLSK

SEQ ID NO: 7155 - protein, 179 aa, Artificial Sequence; identical to SEQ ID NO: 7154
  Synthetic

SEQ ID NO: 7156 - protein, 185 aa, Artificial Sequence
  Synthetic
DDVEKLVRDIERLVEKVTRDNKKTVDDDKTLVDEARKENEETVERIKRELEELEKRVRKDRRREALKKELEELEKRIREILKTLHDRNREIIKRSEDLLKELHERNRRAIEEVRRLLDELRRNGVSEEATRKLEKVLRDLEEELKRVDRENEKSLRESRKIVEDLDRTNKRVVDELRRIVEELRK

SEQ ID NO: 7157 - protein, 185 aa, Artificial Sequence; identical to SEQ ID NO: 7156
  Synthetic

SEQ ID NO: 7158 - protein, 182 aa, Artificial Sequence
  Synthetic
DEIDDVLRKIEDLVRKLRELVKKVLEDSKRLLEEIKRLAKEALERSEELVRRVEELARRGDIDEKELREVLETSKRLSEEVRKRAEELLKESRDLSEELRKRLEDVVREIRKLVKDVADKTTIEEVIRKLEEAVKRAEELVKRIEEELRKVDEEVERLVREIEKELREVNDRLRRLIEEIAR

SEQ ID NO: 7159 - protein, 182 aa, Artificial Sequence; identical to SEQ ID NO: 7158
  Synthetic

SEQ ID NO: 7160 - protein, 185 aa, Artificial Sequence
  Synthetic
REIEEALKEIEKIIEDLRKIVEEVLKRLEEIDRELRKRNEDSNREIEKIIEDLKDMVRKKGPDEELKKLVEDIKKKVTDILRRNEKVVEESERLSKELLDDLERVVKKIEEDIKRILDRVREAGLSEEAERRAETVLRKLERVVDKVIKDIRKVLKDNERVVREVRKSAEELLDKLRKVVEEVRR

SEQ ID NO: 7161 - protein, 185 aa, Artificial Sequence; identical to SEQ ID NO: 7160
  Synthetic

SEQ ID NO: 7162 - protein, 185 aa, Artificial Sequence
  Synthetic
REIEDVLRRIEEIIRELEERNKKSNKEIAEIDKELRDRNRKSNEEIEKIIEDLKEAVERKGTNEELEKLIDEARKRLEEILRRNDTVVDESRKRSKDILDRNRELVREIEERLDRILKRVREAGLSEEAEKRIRDVLDKLREVVERVIRSIEDMLRRNEKVVREVKESIERALKRLEETVKRVRD

SEQ ID NO: 7163 - protein, 185 aa, Artificial Sequence; identical to SEQ ID NO: 7162
  Synthetic

SEQ ID NO: 7164 - protein, 185 aa, Artificial Sequence
  Synthetic
DEIEKMLRDIEEIIKRLRKIVEEVRDTLRRIDEDLRRRNEESNRRLEKIIEDLERVARRDGPDERLRKLIKEARETVERLLEENRRRVAKSRETSKKLLDELRRVVEEIEKRLEEILKKVKDDGLDKKAEDEIRKALRKLKEVVKKVLKEIAEMVERNDRELRRLEKSIRESLDKLRETVKRLED

SEQ ID NO: 7165 - protein, 185 aa, Artificial Sequence; identical to SEQ ID NO: 7164
  Synthetic

SEQ ID NO: 7166 - protein, 174 aa, Artificial Sequence
  Synthetic
DLVEEIRKTIEKIVREIRKVLDEVRKHTEDVIRDIRRVLKEVERHSREVVKRIRDERGTEKARDLVRRNKEKSERVVRRARELVKRNEERSREVVKDLRRLVKEIKDLAKKLVDDGIDKDELRKLVETLEKVVREVEEELRRLNEELEKVVREVEKRARESNDRLEKVVREVER

SEQ ID NO: 7167 - protein, 174 aa, Artificial Sequence; identical to SEQ ID NO: 7166
  Synthetic

SEQ ID NO: 7168 - protein, 186 aa, Artificial Sequence
  Synthetic
SEVDEVVKEIRKLVEDDEREVEKAIRDIRRSNEELRERVERLLEELERLIKEVEETVRRMEGKEEIDKLLRELEKRARDVLRELEELLKEDEKRVKEVLDRIKKVNEDTKKRVEELLREIVRRRGEDVEAVEKARKILEEVEKVVTDTEKKLDDIRKHVKEVVDRLRKEIEDVLKRVRDVAERERR

SEQ ID NO: 7169 - protein, 186 aa, Artificial Sequence; identical to SEQ ID NO: 7168
  Synthetic

SEQ ID NO: 7170 - protein, 182 aa, Artificial Sequence
  Synthetic
KVEELLKELLDRVKEVVDRIRRELEKALEESRRVVREVEERVKTANREVRKVVDDVRKRSDEKRLDDILKRVEEESRRSVEELRKRLRKVIEENRKLVEDLERKLERVIREVERLLEELRNVDEEDVRRVLEEIARLVRELEKMVRDVVKTSRDTVRKLREDVKKVVDENRKLAEKLKRDAD

SEQ ID NO: 7171 - protein, 182 aa, Artificial Sequence; identical to SEQ ID NO: 7170
  Synthetic

SEQ ID NO: 7172 - protein, 182 aa, Artificial Sequence
  Synthetic
RIRETLTKLLEDVKEVVRETDELLKRLNRRVREVVRETEERLEDLNREVRKVVRDIERETDDERLRKLLERVIRESERSVEDVRRHSEEVIRRSEKSVEDLKRHSERVIRTAKELVDRLQNVDEETVKDIVRKVKRLLEENRKLAEKITRDNEELLKENKEMLDEVRRRNTELLKRLREEAK

SEQ ID NO: 7173 - protein, 182 aa, Artificial Sequence; identical to SEQ ID NO: 7172
  Synthetic

SEQ ID NO: 7174 - protein, 182 aa, Artificial Sequence
  Synthetic
RIEEDATRLIKEVKDVVKETEERARKVNKEVRDVVRDVERRLKELNEEVERVIRDVKRRSDEKELDDLLKEVNKRSKKSVDDLKERLEDVIRASEKSLRELEKHSREVLKTVKELLDRLKDVDEKIADDVAKEIEDLVRRNREVVTEIEKKNRELVRRLRDMVRKVEEDNKRLLEELKKATD

SEQ ID NO: 7175 - protein, 182 aa, Artificial Sequence; identical to SEQ ID NO: 7174
  Synthetic

SEQ ID NO: 7176 - protein, 178 aa, Artificial Sequence
  Synthetic
SVRELVEEARKHSRKVAEESRKLVEDLTEESKRVIDESREKVERLREEIERVLREVKKEGRVDDKIVEKLRRTAEELRKRVKESNDRNREELEKLREKVEDSNRKNKKTLDELTKKIEDGEPIERVLEEVEESDKRDEERVRKLEREIRESNKRDKEIVDRLLDELRRIVEELRERAR

SEQ ID NO: 7177 - protein, 178 aa, Artificial Sequence; identical to SEQ ID NO: 7176
  Synthetic

SEQ ID NO: 7178 - protein, 178 aa, Artificial Sequence
  Synthetic
SVDEAVDELLKNSEEVIKDTERKARELLRHSREVNKRSERESERLKEEIERVLRKLKRDNKVDDKILEDLRKKLEDLERENRDSVRKNEETVARLLREVEKSNEDNRRTLKELKDLVRNGEPIEELVERIKDSNRRDKEIIKDLERKIRESDKRHKERVDDLARRVEEIVKELEEAAR

SEQ ID NO: 7179 - protein, 178 aa, Artificial Sequence; identical to SEQ ID NO: 7178
  Synthetic

SEQ ID NO: 7180 - protein, 175 aa, Artificial Sequence
  Synthetic
SEVKKVEKEAEDISRRSRELLEKIREEVERLSRRSEELLKDVERKVRKVIKEIEDKRSSEEAKELVDRIDETLKRLLEESRRLVKEAEDRLREVVKESEDLVREMERRLERLREEGSVDEETVRELIRDLRRNTKRVKEEADEMIRHLRENTERVEKRLRELREELKKVVERVRK

SEQ ID NO: 7181 - protein, 175 aa, Artificial Sequence; identical to SEQ ID NO: 7180
  Synthetic

SEQ ID NO: 7182 - protein, 175 aa, Artificial Sequence
  Synthetic
EMVDRATEKVRTLSDESRRLLKKVRDENRKTSERSKRLLDEIERRVKEVLKRIRTERSDEDARRLVDEVRKDLERIIEESERLVREVEDRNRRAIERSRKLVKDIERDLRRLVAEGSVDKDRVKRLIEELKENTERVEKSLRDLDRHNRRNTEEVKRSADELIEELKRVVDEVKK

SEQ ID NO: 7183 - protein, 175 aa, Artificial Sequence; identical to SEQ ID NO: 7182
  Synthetic

SEQ ID NO: 7184 - protein, 175 aa, Artificial Sequence
  Synthetic
DKADEIEETVRRVSETSERLVEEVRKDNERTSKRSDDLLKDIEDKVRKVLERMRRERLDEEARKLVEEVVRRLEELLKTSKKLVEELREKNRRLIETSKRLVEKVEKELKDARDEGSVDEEKVRRLIKELRDNTKKVAEELKKLDDHNERNVEEVKKRLEELIRRLEKVVEDVKR

SEQ ID NO: 7185 - protein, 175 aa, Artificial Sequence; identical to SEQ ID NO: 7184
  Synthetic

SEQ ID NO: 7186 - protein, 175 aa, Artificial Sequence
  Synthetic
DFVKKAKDDVKEVSKESEKLLREIEEEVRRVSKRSRELLETVRRRVEKVLRDMERERKDEKAEELVRRVEEDLKRVLKESEDLVREVEKRLREALERSRKLVEEVREELRRLVEEGSVDEDRVRELIKELEENTRRVEEKLRKLIEDLKRNVREVEERARRLIEELREVVERVKT

SEQ ID NO: 7187 - protein, 175 aa, Artificial Sequence; identical to SEQ ID NO: 7186
  Synthetic

SEQ ID NO: 7188 - protein, 186 aa, Artificial Sequence
  Synthetic
SDLERLKREAEELIERDKRLLRRVEEESRRTLEEDRRSLKESEDRARELIRRIEELAKKIKDKRELEERLRRLLRTLEEIVERNARLSRKLLEDSKKLVKELRELSERLLRTLERLVRELIRKKDKSDEMRDAARRLIEEITRSVEESERELKRLIEEDKRSVERSKKENDKLIEEVRRVVERVTK

SEQ ID NO: 7189 - protein, 186 aa, Artificial Sequence; identical to SEQ ID NO: 7188
  Synthetic

SEQ ID NO: 7190 - protein, 175 aa, Artificial Sequence
  Synthetic
DVEEVLRKLKKEVEEVIRRTEAEVAKVLKEVEKVVTETREEVRRVLEEVKRVVDDVRRRNRADDRLLKEALKRVRDLLRRVEEVSRKHRDDVRRLMEEVKEVSERTRRAIDEIEKKVRDVEEVRKTVEKLIDDNRRMLEEVVKRAKELIEHNRRVVDKVLKEAKKIVRDLEETVR

SEQ ID NO: 7191 - protein, 175 aa, Artificial Sequence; identical to SEQ ID NO: 7190
  Synthetic

SEQ ID NO: 7192 - protein, 175 aa, Artificial Sequence
  Synthetic
SVEEVLKKLLEEVRRVAEETRRRAEKLLDDDRKVAEESKKRAEELLKEVKDRVDDVRRRNTLDDRILKDILRKVAELVKELEEISKRSLDESKRLVEEVEKVSRETEERVRDIARRVKDMEKVARTIKKLIKENRKFLEEVEKRSRETLKTNKKVLRDLEKRAKKIIEDLERTLR

SEQ ID NO: 7193 - protein, 175 aa, Artificial Sequence; identical to SEQ ID NO: 7192
  Synthetic

SEQ ID NO: 7194 - protein, 176 aa, Artificial Sequence
  Synthetic
KIEELMKRLEDEAKRSLDESEKKLEELRRDSERSVREVEELLKELLDRARRVLEKLGDSEEARKVLERVRKLVTEVREHSERVSRENERLVKENRDHSRRLLERVRELVERVSRLTDEEEVKRVAREVEELIERNRRHSDRIAEEVKETLERNREKVRRVLEKLKKELEDVLEKRK

SEQ ID NO: 7195 - protein, 176 aa, Artificial Sequence; identical to SEQ ID NO: 7194
  Synthetic

SEQ ID NO: 7196 - protein, 176 aa, Artificial Sequence
  Synthetic
DIEELARRLEEAVKDSLRRVEEKLRRLEDESRRSVEDSDRKLKELIDRVRKVLKDLGESKEAKDVLREVRRLVEENRKHSEDVSRDNKRLVDEVRRHSEELLKEVKRLVDEVRRLDKDEVVRRVARRIEELLKENDDLVRRVAEEIKRTLKENNEHSDDLRRRIEELIKEITERRR

SEQ ID NO: 7197 - protein, 176 aa, Artificial Sequence; identical to SEQ ID NO: 7196
  Synthetic

SEQ ID NO: 7198 - protein, 176 aa, Artificial Sequence
  Synthetic
DIEELLERLRRRVEKSLEDSDRLLRKLEEDSKESVKRVKRLLEELIKRVKEVLKKAGNSEEAKKVLEDVERLVREVEKHSREVSERNKKLVDDNRKHSEDLLRTVRKLVEEVRRLTDKELVKRALEEIEKRLKDNRDHSRRLAETVKDTLDKNDKKVEEVRREIEELLRRLDEKRN

SEQ ID NO: 7199 - protein, 176 aa, Artificial Sequence; identical to SEQ ID NO: 7198
  Synthetic

SEQ ID NO: 7200 - protein, 176 aa, Artificial Sequence
  Synthetic
DIEDLLRELRKRVEDSLKKSEDRLRRLEEKVKRSLDEVEKELKRLLDEAKKVVDKAGNSEEAKKVLDDVKRLVDRVRRESERLLKEVRDLVRENKKHSKELLDEVDELVERVRRLDKDEEVRRVLERIDRLIKRNDDHSRKLEKEIEDLLRRNNREAEEVAKEVEKLLEDLERRRK

SEQ ID NO: 7201 - protein, 176 aa, Artificial Sequence; identical to SEQ ID NO: 7200
  Synthetic

SEQ ID NO: 7202 - protein, 182 aa, Artificial Sequence
  Synthetic
REIEEVVKELDDLLRRNDERVKRILDELEELIKKHDRRSDEVTKEIRELLRKLEREVERDKSKEDLERKLDELRRTVDELVRDVERHAREVLERVKELVERLERHSRRVLEEVEKLVREVVRTKEARELAEELKKRAKESVDRSKKALEELKKRAREAVRRSREKLKKLKREVEKVVREVRR

SEQ ID NO: 7203 - protein, 182 aa, Artificial Sequence; identical to SEQ ID NO: 7202
  Synthetic

SEQ ID NO: 7204 - protein, 187 aa, Artificial Sequence
  Synthetic
DELREILERVRRVLERSKELSEELLRRVEEVLRRLRKHSRDLEEKVRRILTEIEKRARERRDDDEKLLREVKKVLEDVERELDRSIERSEEVVEELKRRADRSIEESRRLLETVKKELEDLIERRREVKDLREKLDKLRRDLEEVLRRNEEIVREATRRIRKVLDENRKKVEELKRRAERVLEELRR

SEQ ID NO: 7205 - protein, 187 aa, Artificial Sequence; identical to SEQ ID NO: 7204
  Synthetic

SEQ ID NO: 7206 - protein, 187 aa, Artificial Sequence
  Synthetic
DDLRRIAKEVEKVLKTSEDLSEELKKEVKRVVDESREDSKRLREEVRKVLEEVKRLADRNEKDREELLDEVRRLLEEVRRLLKESIDRSKRLLEDVKKKLEDSIRESERLLRTVEERLKELIDKKREVRELKEILKELKKELERVLEDNRRKVKELEDELREVLKRNEKIARELEKELRRVLEEVRR

SEQ ID NO: 7207 - protein, 187 aa, Artificial Sequence; identical to SEQ ID NO: 7206
  Synthetic

SEQ ID NO: 7208 - protein, 187 aa, Artificial Sequence
  Synthetic
DELRELEERAKKVVDESRENSDRLAKKVKEVLKRSRELSDELRKEVERVLREIKERARRKDEPREDLLREVAKVLEEVKRRLEESIRRSKRLLDEVTRELEESIRRSEELVDRLRKKLEELIDRRREVERLRDILDKIAREVERVLEENRRIVTELKKELEKVLDENRKIVEELERRARKVLKELRD

SEQ ID NO: 7209 - protein, 187 aa, Artificial Sequence; identical to SEQ ID NO: 7208
  Synthetic

SEQ ID NO: 7210 - protein, 187 aa, Artificial Sequence
  Synthetic
DELRELLEEVRRMLRESRENSRKLAEEVERVLRESEEDSKKLKRDVEKILEDVRRKLERNEKDKKDLLKEVEDELRKVRKDLEESIRKSKRLLDDVRRRLEESIRRSEKLLRDIDKRLKELIDKRKEVDELRRILDELRRRAKKVLDDNRKIVRDLERELRRVLEENRKIVEELEKLLEKVLEELRR

SEQ ID NO: 7211 - protein, 187 aa, Artificial Sequence; identical to SEQ ID NO: 7210
  Synthetic

SEQ ID NO: 7212 - protein, 187 aa, Artificial Sequence
  Synthetic
KELEELAKTVEDLLRENDRLAEEVLRTVDDLLRKNDEISKRLLDTARKLLKELKDLKRENRGDKKDLLRTLERLLEKLKEDVDRSRKISEDLLREVKRLVDELRERSKRILDEVRKLAEKLIREKDKSEDVKRILEKLIRDVEKSLKDVDDRLRELIRRVEESLRRNEEILKEVERRAEEVVEEVRR

SEQ ID NO: 7213 - protein, 187 aa, Artificial Sequence; identical to SEQ ID NO: 7212
  Synthetic

SEQ ID NO: 7214 - protein, 187 aa, Artificial Sequence
  Synthetic
DDAERLLEDVRRLLEENDRISEEVLKTVKRIVDENDRLAEELLRTVDELVKRLKELRERNEGDKKVLDKEVKKILREVEKLVEELRRISKKLLDDVKRLVDESRKISEKILDDVRKLVTELIRKVKDFERIRKILEKVIKEVEDSLRRNSEIVERAVDRARESVKRVKEIVETVERKIRKVVDEVRK

SEQ ID NO: 7215 - protein, 187 aa, Artificial Sequence; identical to SEQ ID NO: 7214
  Synthetic

SEQ ID NO: 7216 - protein, 187 aa, Artificial Sequence
  Synthetic
SEVEEVKDRVTKLLKENDDISKELEERVRRLLEENDRHSREVEKTVRKLLEDLKRLAEENKGDKKVLTKEAKRILDEVRKLVKENDDLSRKLLEDVKRLVETSKRISEKLLRDVKRLAEDLIDKKRDSKRVKDILRRLVEEAEESLRRNEKKLRELEKRVRESLKRSHKINKELEERVKEVLDRVRD

SEQ ID NO: 7217 - protein, 187 aa, Artificial Sequence; identical to SEQ ID NO: 7216
  Synthetic

SEQ ID NO: 7218 - protein, 187 aa, Artificial Sequence
  Synthetic
DEVERVLEEAKKLLDTNDDLLRKLDDTVRKLVEDNNRISEEVRERVERLLRRLEELVRKNEGDKKKLEKDARDILRKVRELAKESDERSRKILEEVRRLAEKLKRDSERLLRTVERLVRKLIDDKRDSERVKRILDRVIKEVTDSLKRVEDRLRELIRRVEESLKRNREELRRLEERVKDVLDKARR

SEQ ID NO: 7219 - protein, 187 aa, Artificial Sequence; identical to SEQ ID NO: 7218
  Synthetic

SEQ ID NO: 7220 - protein, 187 aa, Artificial Sequence
  Synthetic
DRLEDLLRDVKRLLEENDKHSKEVEERIRKLVEDNNEISRTVARDVEEKLKRLRERTEEKRGDKKVLERDVERLLEEVDRLLKRSEEISERILREVRREAERNDEESERILKEVRDLVRDLIDKFRDSERVRRTLEELTRRVEESLKRSHEINRKVIREIEKSMDENKKELERLIDRARRVLEDVRK

SEQ ID NO: 7221 - protein, 187 aa, Artificial Sequence; identical to SEQ ID NO: 7220
  Synthetic

SEQ ID NO: 7222 - protein, 187 aa, Artificial Sequence
  Synthetic
SEAEEVLKRAEEILRENNKISRDLEEEVRRLLKENDDLLREVEETVERLLEELKELAKRNEGDKKELVKRAEDLLRRVRDLVRRLEERSKEILKEVKRLVEESKRRSEELLKRVRELAKELIDRKKDSERVKKILERVIRELEKSLKDNERKLRELEERVRDSLRRVEESLRRLERRVEEVLERVRK

SEQ ID NO: 7223 - protein, 187 aa, Artificial Sequence; identical to SEQ ID NO: 7222
  Synthetic

SEQ ID NO: 7224 - protein, 187 aa, Artificial Sequence
  Synthetic
DEMEKLRKDVKKLLEDNNKISRDVEKTVEELLRRNDEHSKEVLKRVEDLLRELKKLKDDKDGDKKELLKTLEDILREVAELLKRNDDLSRKILEDVERLARESKKISEEILREVERLAEDLIRKFDKSEDVKRILEELKKRAEDSLRENEKRLRELIREVEKSLRRSHEINRDAERKVRKVLDDVRR

SEQ ID NO: 7225 - protein, 187 aa, Artificial Sequence; identical to SEQ ID NO: 7224
  Synthetic

SEQ ID NO: 7226 - protein, 182 aa, Artificial Sequence
  Synthetic
SEIEELLERVKELLKRNRELVERVKRTVEELNKDNDRVVKEIEDEARRLLDELEKIMRRTSDKRTLDKILREVLERVRKLVEDLEEHSRRILKRTEELVRKLRKHSEDVKRTVDRLVKEVVRDDRMRRIAKKAIDDVRKSVEDSKRILDELRKSTEESVKRTRDILKRVLDEAKKVVEDLRR

SEQ ID NO: 7227 - protein, 182 aa, Artificial Sequence; identical to SEQ ID NO: 7226
  Synthetic

SEQ ID NO: 7228 - protein, 182 aa, Artificial Sequence
  Synthetic
DELEELRTRVEKLLKENNDLVREVLKTVKKLNDENRKLVERILREVERLLRELREIAKTTSDKDTLKKELRRVLEEVKKLLEELREHSRRILETTKELVRRLEEHSKRVLDTVEDLVRKVVRTEEMRKKAEELRKRVDESVKDTRKKLEELRKSTEKSVRDTDRILKDLERRAREVVDELEK

SEQ ID NO: 7229 - protein, 182 aa, Artificial Sequence; identical to SEQ ID NO: 7228
  Synthetic

SEQ ID NO: 7230 - protein, 177 aa, Artificial Sequence
  Synthetic
DVEEAVRELRETLDKSVERSERTVRELVKKLETSVEETREEVERVVEELDRVVEEAKKDVSEKIVDEIRKLVDKLRKEAKKVLEDSKRKVDELRKEAKKVVDESRERAEKLKKDLDERGAGAKEVRKEVKELVERDEDLVRKIREKVEKVVKDNKDLLRRIREAAKRVVREIRERLR

SEQ ID NO: 7231 - protein, 177 aa, Artificial Sequence; identical to SEQ ID NO: 7230
  Synthetic

SEQ ID NO: 7232 - protein, 184 aa, Artificial Sequence
  Synthetic
STMDEIRRIVEKVLKEDKDLAETADRLNRDSVRRDEELAERNKRTNERVVREIEDRLKKEKSEEVVKTIKELIERVVKRNEESIRESERLVRELVKKNEEIIRRSKKLVEEVERRAREILKSSEDKRLEDIVREVKKRLEDSLRDTERIVREVDERNKESLRRSKEIVERVNKLLRDVLERART

SEQ ID NO: 7233 - protein, 184 aa, Artificial Sequence; identical to SEQ ID NO: 7232
  Synthetic

SEQ ID NO: 7234 - protein, 179 aa, Artificial Sequence
  Synthetic
SSKEVADELRKKAEKVLDELRKIIRELERKNEDSLRRTEEIVRRLEEEAERVLRDLVRTRGEDDRLVREVERLLRELKRRLEELIRRSEELIKRSREEVDRVIRTVEKLLEELDRLLRANKGDIEDLRRTVDKLVEEIKDLARKLAKSSDDTVREDEKLVEELRKDVKRIVRKIKKDLE

SEQ ID NO: 7235 - protein, 179 aa, Artificial Sequence; identical to SEQ ID NO: 7234
  Synthetic

SEQ ID NO: 7236 - protein, 170 aa, Artificial Sequence
  Synthetic
SAEEVVRELDKELKKVLEDSRDLVRRLEEELRKVLEDNEEVVKEIERSSDDVLRKLGDSEEAREIVKRSRDELKESIDDSRRIVEKIRRDLERNIRKVEEIIEDIKRKLKDLRGSDELLRRVKELVERARRHSERLLEEVKRLVDEIRERSKELLERARRLNEEMKERTR

SEQ ID NO: 7237 - protein, 170 aa, Artificial Sequence; identical to SEQ ID NO: 7236
  Synthetic

SEQ ID NO: 7238 - protein, 183 aa, Artificial Sequence
  Synthetic
SDLEELFREVKELVDDNLRKSDKLRRDVEKRVRDNERRSEKVHEDNRRLIEKIERLVRRGELREEDVRRALEEIKDSLRRSLETSKKVLDDIREELKRSLDHSREVLEEIERLLEEILRKDKDSDRVRTLVKELRERAKKSLDDNRRMVEELRKRLEESLRRNKRVVEESEKIAKEVLDKVRT

SEQ ID NO: 7239 - protein, 183 aa, Artificial Sequence; identical to SEQ ID NO: 7238
  Synthetic

SEQ ID NO: 7240 - protein, 183 aa, Artificial Sequence
  Synthetic
KDAEDLERRVRELVEENNRVSKRLAEEVTRLVKENEDKVRELEKEVRDRAKELLDMKRRGEVREEEVKRVLREIEELLREITEHSKEVLKTIEKLLRDSLEHSRRVLEEIERLLETILRKSKDSERLKKLVDELRETLERSLRENEKVADELRKRAEKSLEDVKRVVDELRKIVDDVLKRVED

SEQ ID NO: 7241 - protein, 183 aa, Artificial Sequence; identical to SEQ ID NO: 7240
  Synthetic

SEQ ID NO: 7242 - protein, 183 aa, Artificial Sequence
  Synthetic
DDLEELFERVKRLLERNNEVSKKLEDDVRKLIEDNERRVERVHRENEKELRRIEDLKRRGEIREKDVKRALEEIKRSLDELLKHSKDVLEEIEKLLRDSEEHSKTVLKEIEDLLRDILRKDKDSERVRRLVEELRKLLEDSLEKNKRLVDELRKRAERSLREVRKLVERSKREAERVLEEVRK

SEQ ID NO: 7243 - protein, 183 aa, Artificial Sequence; identical to SEQ ID NO: 7242
  Synthetic

SEQ ID NO: 7244 - protein, 183 aa, Artificial Sequence
  Synthetic
SRVEEMFERIERLVRRNNEVSRRVHERNRELIKRNREKVKKVHDDNKKLIDDLRELKRRGEIREEEAKKVLEEIEKSLRELKKHSEDVLREIDKTLRESEKHSDDVTREIDELLKRILDEDKDSERVRRLVEEARRLLKKSKDDNRRVVKRSREEVTRSLREVEKLVDESRREAEKVLEEVKK

SEQ ID NO: 7245 - protein, 183 aa, Artificial Sequence; identical to SEQ ID NO: 7244
  Synthetic

SEQ ID NO: 7246 - protein, 183 aa, Artificial Sequence
  Synthetic
KELEEAFDRVRRLLEENKRKAEEVHRTNEELVRRNNEKSERVHRENEKEIERLDRAKKRGEIREEEAKRVLEKIERSLKRSEEHSEELEREVERTLRELEKHSEDVLKDIERLLKDVLRKDKDSERVKTLLKELRDRLKESRETVKELVDRSREEVKKSKKRNKKVVTDSRRRIKDVLDKVRK

SEQ ID NO: 7247 - protein, 183 aa, Artificial Sequence; identical to SEQ ID NO: 7246
  Synthetic

SEQ ID NO: 7248 - protein, 183 aa, Artificial Sequence
  Synthetic
KEAEDMLRKVRKLIKENEKHSREVADEVRKLVEDNDRKVDEVHERNRKLITDLRRLAEEGRVREKDVKAVLEEIEKSLRELRKHSRDVLKRIDDLLKENEKHSREVLKEIKRLLDELKKEDKDSERLKTVVTELEKRARDSLEKSKEINKRLREELKRSEERVERLVRKSEEEAKKVLDDVRR

SEQ ID NO: 7249 - protein, 183 aa, Artificial Sequence; identical to SEQ ID NO: 7248
  Synthetic

SEQ ID NO: 7250 - protein, 183 aa, Artificial Sequence
  Synthetic
SEIEKLVEDVRKLVEDNLRHSEEVHRRNRRLIEENERKIDELEKRVRKLVEELRELAERGEIREEEARKVLEEIKRLLDEIRRHSEEVLKEIERTLKENLKHSEEVLRRIEERLEDIKRKDKDSERVRTLVDRLREELKRSLDESEKLNRESRKRVTRSLEKVDDLVRELEKLARKVLEEVKT

SEQ ID NO: 7251 - protein, 183 aa, Artificial Sequence; identical to SEQ ID NO: 7250
  Synthetic

SEQ ID NO: 7252 - protein, 185 aa, Artificial Sequence
  Synthetic
SEVEEIFKRVTDLLKRNRDLVREILERSRRLVERNDREAKKILDDARRLIEELEDAVRKERDKDTLRKKVKELRDEVKRLVDRLRKHSKDVLDTDRKLVKELEDHSKELEKEVERLLEELERRSRDERVKKLLDELRERVKRSVEESRRVLDDSRRKSEDSLRRSEELLKRVEEIVERVAREVER

SEQ ID NO: 7253 - protein, 185 aa, Artificial Sequence; identical to SEQ ID NO: 7252
  Synthetic

SEQ ID NO: 7254 - protein, 185 aa, Artificial Sequence
  Synthetic
SEVEEIARRVDKLLKDNKRTVDEILKESRRLVKENNELVDKILREVEELLRRLEDEVRKERDKDELTRKVKELIDRVRKLLEDLRRHSEEVRRRDEELADRLRKHSKELEERVKRLLEDLRRKSTSERVEKLLRELEKRVKESVDTSREVLKRSREDSKRSEDRTEKVLREARKRVEDVADKVRK

SEQ ID NO: 7255 - protein, 185 aa, Artificial Sequence; identical to SEQ ID NO: 7254
  Synthetic

SEQ ID NO: 7256 - protein, 185 aa, Artificial Sequence
  Synthetic
REVEEIVKEVERLVRENDKVAKEIVDESKRLVEENRKRVEEIRREVEELIRRLEDAVRKERRKEDLARKVKELRDTVERLVRELKKHSEEVLRRDEDLVRRLRRHSEKLKKDVDDLVRDLERKSDDKRVKDLLEELRKRVKDSRKKSEELLEESERRSKKSLDDTRRVLKDARDIVEKVADEVRK

SEQ ID NO: 7257 - protein, 185 aa, Artificial Sequence; identical to SEQ ID NO: 7256
  Synthetic

SEQ ID NO: 7258 - protein, 185 aa, Artificial Sequence
  Synthetic
SDVEEIKKRVKELLEENKRLVETIEREVRRLIEENRRLAKRILDEVRRLLEELKDRVDKDRDKDELRKEVERLLERVKELLDALRKHSKDVLDTVKKLLEDLRRSSEELRRTVEELVRRLEERSDSERVKKLLTDARKEVERSLRESKKALDELRRIVEKSLRDTERLLRTAEKEVEDVLREVER

SEQ ID NO: 7259 - protein, 185 aa, Artificial Sequence; identical to SEQ ID NO: 7258
  Synthetic

SEQ ID NO: 7260 - protein, 185 aa, Artificial Sequence
  Synthetic
SEVEKIFRDVEDLLRRNEETAKEILKTSEELVRRNEELVRRILEEVRDLIRKLREVVERSRDKDELRRKVDELRREVERLVRELEKHSRRVLEEDKRLAEELRRSSKELEDEVKRLLDDLRRRSTDRRVEELLRRLAEAVKESLERSERLLRRSEEESRRSLKKTEDILREAREIVRKVAEEVKK

SEQ ID NO: 7261 - protein, 185 aa, Artificial Sequence; identical to SEQ ID NO: 7260
  Synthetic

SEQ ID NO: 7262 - protein, 185 aa, Artificial Sequence
  Synthetic
REVEEIVKEVRRRLERNDEVAERIVRESERLVEENNRLVEEILRRVRKLIEELLDLVRKSRDKSKLKKKVDELRRTVKKLLDELREHSKRVKEEDERLVDELRKHSRKLLEEVKKLADELRKRSTDERVEKLLRDLEREVDESRKKSRKLLERSREESDRSLKTTEDILREAERIVEKVEEDVRR

SEQ ID NO: 7263 - protein, 185 aa, Artificial Sequence; identical to SEQ ID NO: 7262
  Synthetic

SEQ ID NO: 7264 - protein, 185 aa, Artificial Sequence
  Synthetic
SDVEEIVRRAEKLVEDNDRVAEKIHEDNRRSNKRTLDEVRKILEEVRKLIKDLEDEVRRDRDKDRLRKKVKELKDEVERLLRELEDTVRRDKETSKDTARKLRKHSEDVEKTVRDLVTELARRSDDERVKRLLRRVEKSVRDSKRRSEKLLEDSERSSEKVEKDVRDVLKEAREIVRDVAEKVEK

SEQ ID NO: 7265 - protein, 185 aa, Artificial Sequence; identical to SEQ ID NO: 7264
  Synthetic

SEQ ID NO: 7266 - protein, 185 aa, Artificial Sequence
  Synthetic
EEVERIVEDVRRLLEENRELVKRILDEVRKLIKENNRLAREILETVRTELEKLRDLVRKLKSKEDLDRKVKELRRKVKELLDDLRRHSEDVRRRVKELLDRLRDSSRRLREEVRRLLDDLRRKSTSERVEKLLEELERRVEESVEESERVLREAEKIVRDSRKTTEELLEEAKRRVDEVAKEVKK

SEQ ID NO: 7267 - protein, 185 aa, Artificial Sequence; identical to SEQ ID NO: 7266
  Synthetic

SEQ ID NO: 7268 - protein, 185 aa, Artificial Sequence
  Synthetic
SSVDEILKDVRRSNKENLDLVEKILRESKKLVEENRRLVKEILDRVRKLIKELLRLVREDRDKDTLRKKAEDLERTVKKLLKELEDSSRDVIRRDKELVTRLKESSDRNLERVKKLAKELREESTSEKVEDVLRRLKRTSERSLEESKKLLEESEKDSDRSRKESEEVLREAEEIVKRVLKEVER

SEQ ID NO: 7269 - protein, 185 aa, Artificial Sequence; identical to SEQ ID NO: 7268
  Synthetic

SEQ ID NO: 7270 - protein, 185 aa, Artificial Sequence
  Synthetic
DDVETIVERVRELLEENNRLAREIVERVEKLLKDNDDLVKEILEEVDRRIRKLEEAVKRDRDKETLRKKVRELEERVKELAERLKKSSKELKDEVDRLLKELEDHSRDLERRVKELLDDLRRKSTDRRVEELLRKLEEDVKRSLEDTKRLLDELKKKVDESRKRSKDVLDKAREIVDRVRRSVEK

SEQ ID NO: 7271 - protein, 185 aa, Artificial Sequence; identical to SEQ ID NO: 7270
  Synthetic

SEQ ID NO: 7272 - protein, 185 aa, Artificial Sequence
  Synthetic
SEVEKIVRDVEESNKKTKKKVEDIEEEVKDLVRKNNELVKRILEEVKRLLEELKRVKKDDRDKDRLRKKVEELIRTVEELAKELEDHSRRVIETVRRLLERLRRTLEEDLKEVERLLDELRRRSDDERVKRLLDRLRRTSEEVLERVEEVLKKAEEIVRKSFEDSKRVLRKAEEDVKRVARDVEK

SEQ ID NO: 7273 - protein, 185 aa, Artificial Sequence; identical to SEQ ID NO: 7272
  Synthetic

SEQ ID NO: 7274 - protein, 173 aa, Artificial Sequence
  Synthetic
SVDEAAKEAEEIVETVERESRKLLEDSRRIVEEVKKRSEEILEEVRRRVEEVVKESKLKRLADELRKMVKKIKDDVERSNKKTEDDLRKSEEEVKRSNDTTREILKRIREVLKAGSPLERLLEALRRVIDEDRKRSKKLHEENKRVIERDKEISDKLLDDLRKLVADLRRRAK

SEQ ID NO: 7275 - protein, 173 aa, Artificial Sequence; identical to SEQ ID NO: 7274
  Synthetic

SEQ ID NO: 7276 - protein, 179 aa, Artificial Sequence
  Synthetic
REAEELEKEVKKVVDDSKKRLDELDEENRRVDETIKKISEDLTREVKDVIRRIRDGNLREDEVRKVVKEVTDKLEDSNRRVEELIRRTEKKLRDALERSKELSREVLEKARKLLEDKKDLEELRELVERLRRRLETVNRELERRVRELKRSNDESHRENREVIEELIKELKKVLDDVRK

SEQ ID NO: 7277 - protein, 179 aa, Artificial Sequence; identical to SEQ ID NO: 7276
  Synthetic

SEQ ID NO: 7278 - protein, 179 aa, Artificial Sequence
  Synthetic
DELREILRKVEKVVEDIERTSDKLRREVDKVVDDSRRKLEELEKEVKKVIEDIRDGNLREEEVREEVKRVVRKAEKLLEDSRRETEKVVRDAEESNKEVKRLIDEVKKELDRIIEEKDKVDRLKEAVKELAKRLKDVHERNKRLIDTLREKLKRINDELERSVRELKKELEEVIDRVRK

SEQ ID NO: 7279 - protein, 179 aa, Artificial Sequence; identical to SEQ ID NO: 7278
  Synthetic

SEQ ID NO: 7280 - protein, 179 aa, Artificial Sequence
  Synthetic
DEVEELKRRVDRLVEEIRKLSEELLKRNRDVDREIKKRVKDLEDKVRKVIRDIEEGNLRKEEVEKVVRDVKRELEELERRVRELVKRTIEEAERSNEEVKRIIDEVEKEADRLLEEKKEVRELDEVIKEIRRRLEKVHRDNRRVIDEVRRSNRDSERDIAEAVERLTRLLETVLEKVKT

SEQ ID NO: 7281 - protein, 179 aa, Artificial Sequence; identical to SEQ ID NO: 7280
  Synthetic

SEQ ID NO: 7282 - protein, 187 aa, Artificial Sequence
  Synthetic
DELEELRTTVTKLLEDLKKISDDLREEVRRLLEEVEEISKRLEETVRRIIKRVEDIVRRDGGRDERVVREVARILEDIERLLRESLKRSKEVLDEIEKLLRDSEKISRTILEKIERDLERLLRRKKDVKDVKEVVKKLRDELRRVLERNKEVIDRLREKAREVLEKDRKLVDDLREEAREVLERVKT

SEQ ID NO: 7283 - protein, 187 aa, Artificial Sequence; identical to SEQ ID NO: 7282
  Synthetic

SEQ ID NO: 7284 - protein, 187 aa, Artificial Sequence
  Synthetic
DELEEIKKEVEELVKTNERIVDKLREDNKRLVEEVKRISEELEREVRRIIREVREIVKRDGGRDKRVRDTVRKVLRDIEELLKRSLDISREVLERSAESLRRSLEISKEIADRIRKLLRKLLEDLKDVKDVEKLLRELEEEAKRSLKRNRDVIEKLREENKRLLDDDRRVVEELRKEAKDVLDEVEK

SEQ ID NO: 7285 - protein, 187 aa, Artificial Sequence; identical to SEQ ID NO: 7284
  Synthetic

SEQ ID NO: 7286 - protein, 187 aa, Artificial Sequence
  Synthetic
REVDELKKTAEKLIRDDERLVEEVLRTSKKLVREDEDMVRKLRKTIEDLIRRLTDVAREELKDKDELRKMVREVLERVKKLLEELRRHSKRILDEDRRLAEELRRHSDEIKDRVRKLVEDLLRRLDKVRDVKRVLDEVEKLVEDSKRETERVLRESEERSRRSLEETEKALKDLAKLAEDIKREVEK

SEQ ID NO: 7287 - protein, 187 aa, Artificial Sequence; identical to SEQ ID NO: 7286
  Synthetic

SEQ ID NO: 7288 - protein, 187 aa, Artificial Sequence
  Synthetic
REVDELRKRIEDLVRRDEEVARKVLEDVRRLVRRNREKARELLERVEKLVRDLKRVADRDLKDKETLKRMVDRVIEEVKRLVEELRRDSKRVIDEVERLVRELEDHSRRVKDEVEKLVRELLERFKDVEEVKRVLDELRKLVKDSERKTKEVVEKVREDVKDSLRRSEEVLKRVKELVDRVADEVRK

SEQ ID NO: 7289 - protein, 187 aa, Artificial Sequence; identical to SEQ ID NO: 7288
  Synthetic

SEQ ID NO: 7290 - protein, 187 aa, Artificial Sequence
  Synthetic
SDLEKLKERVDELIRRDDELVKRVLEESRRLVDRNKKKVDELRRRARKLIEDLKRVADRDLKDKRTLTEKAKEVEKTVDKLVKDLRRDSKKVKDDDEKLAEELRRHSKEILERVERLLEELLRRLDKVERVKELLDRLRKKVEDSREKTERVLKESRELSDRSLERSEEVLERVRREVREVVERLKK

SEQ ID NO: 7291 - protein, 187 aa, Artificial Sequence; identical to SEQ ID NO: 7290
  Synthetic

SEQ ID NO: 7292 - protein, 187 aa, Artificial Sequence
  Synthetic
DSLREVEKRIRELIRENEELVKEVLERSKRLVDEDRETAERLRKTVEELLKRLREVADKELQDKDTLREMVKKVIEDVRRLLEELRRHSEKILRDDKRLVDELRKHSEDVKREVDKLLKELLEELKDVDEVRKALEDLKRTVDESERRTEEVLKESEDLSRRSLKETEDLLRELEKRVKEVADRVED

SEQ ID NO: 7293 - protein, 187 aa, Artificial Sequence; identical to SEQ ID NO: 7292
  Synthetic

SEQ ID NO: 7294 - protein, 187 aa, Artificial Sequence
  Synthetic
SDLDEVRKEVKRLIDENRTLVDEIRRRIEKLIRENKKKVEELRKRAEELIRRLKEVADRDLKDKETLKRMVDRVLDEVRRLVEELREDSRDLERRVEELVRRLKDHSRELEREVRRLAKELLDRLDKVRDVKRLLDDLKRLVKESLDETERVLRELRKEVKDSLRDSERALREVEDLVRRIKKRVEK

SEQ ID NO: 7295 - protein, 187 aa, Artificial Sequence; identical to SEQ ID NO: 7294
  Synthetic

SEQ ID NO: 7296 - protein, 187 aa, Artificial Sequence
  Synthetic
DEVKKLEEDVRRLIEENEELVRRVKKTSDDLVKRNKEKVEELRKRVEDLIRRLREVERRDLKDKDELRRKAEEVLRRVKKLADDLKKDSRDVLETDRELVERLKRHSEDLKRRVEELLKDLLDKLKDVDEVRKALERLRDEVRRSVTDTDRVLKESEDRSRKSLEDSERVLRELEELVKRILDDLAR

SEQ ID NO: 7297 - protein, 187 aa, Artificial Sequence; identical to SEQ ID NO: 7296
  Synthetic

SEQ ID NO: 7298 - protein, 187 aa, Artificial Sequence
  Synthetic
SEVDRLRETIKRLLEENKELVERLRERVRKLIRENEKKVEELRDRAKKLIDRLREVRTRDLKDKDKLRKVIEEVERRVRKLVDDLRRDSDRLEEAVRRLLKELEDNSRELKKEVERLLRELKERKKDVRDVERALKELRDRIEESLRRSEEVLKELEERVKESRDESRRVLEEVRRLVEEIKRRAEK

SEQ ID NO: 7299 - protein, 187 aa, Artificial Sequence; identical to SEQ ID NO: 7298
  Synthetic

SEQ ID NO: 7300 - protein, 187 aa, Artificial Sequence
  Synthetic
KDVEDLEREIDRLLDEDRKVVEDLERKIKKLIDDNKRLVDKLREDVERLIRRLREVTEKELKDKDTLRKMVRDVKETVKRLLEELERNSREVLKTVKKLLDDLRRHSKRIKEEVEKRVRELLERLKDVKKVKEVLDELRKRVDRSLEEAEKALRRLEKLVRDSLRRSEEALERLKRLVDDVKKKVED

SEQ ID NO: 7301 - protein, 187 aa, Artificial Sequence; identical to SEQ ID NO: 7300
  Synthetic

SEQ ID NO: 7302 - protein, 187 aa, Artificial Sequence
  Synthetic
SELDEVKRRAKELVDRDKKLVKEVLDTSRELVRRNEELVRRILEEVRKLIEDLAEVTKRDLKDKDTLREMVKRVKEEVERVLRELERNSREVLKRDKKLADELREHSREVLERVERLVRDLLEKKKDSKEVKELLDEVRRLAEESRREVERVLRESEKRSRESLKKSEDALERAKKLVEDIKDEVER

SEQ ID NO: 7303 - protein, 187 aa, Artificial Sequence; identical to SEQ ID NO: 7302
  Synthetic

SEQ ID NO: 7304 - protein, 185 aa, Artificial Sequence
  Synthetic
SEEDKIREIVDRVLKESEKLIEEIERRVDKVLKRIKELTDEIKKRAEDVIREIEDIVRKERSERVEKRVKELEKELDEMAKESNERVRRLVEEVKKELREVLKDSRRLSKEVEETLKRLLEEKKEVDELRKVVEEIKRELEKIDKKLEEVVRRIEKKLEDILKENSKAVREIRELLKKVKRELEK

SEQ ID NO: 7305 - protein, 185 aa, Artificial Sequence; identical to SEQ ID NO: 7304
  Synthetic

SEQ ID NO: 7306 - protein, 186 aa, Artificial Sequence
  Synthetic
DEVEELKRRVEKLLEEIERLTKTHEDRSRRLIEDIRDSNRKLKEDAERLIKEIEELKRKVKDKETLTREVERLLRELEEKLKRDLKRVEDVLRDNERSVRESEKRSRELLERLKKLLEELKTKSKDSEELKKVVDDLRREAERILRRDEEAVKRSEKLLRDILEHVKRVVDEIREELKRILDRVRE

SEQ ID NO: 7307 - protein, 186 aa, Artificial Sequence; identical to SEQ ID NO: 7306
  Synthetic

SEQ ID NO: 7308 - protein, 186 aa, Artificial Sequence
  Synthetic
DEVREIEKRVRDLIREIEKSNRDLEREAKRLIDEIDDLSRKLKEDADKLIEEIKELKKKVKDKRELTDRVRKILEEVERLLRESIERSKEVLKELEKLLRDDLKKVEDVLRTVEKILKDLLRRDKDSEEVRRVVEKLRRLLKTITEHVKEVLDRLRREAEDALRRDKEVADRIREEARRILEDVKK

SEQ ID NO: 7309 - protein, 186 aa, Artificial Sequence; identical to SEQ ID NO: 7308
  Synthetic

SEQ ID NO: 7310 - protein, 186 aa, Artificial Sequence
  Synthetic
DDVKRIEKEVRRLLREIERLTREHEKESRELVREIEELSRRLEEEIKRLIEEIEELRKRVKDKEKLTRDVERIKRRVEKLLKESEDRSKRVLDENRKSARESIERSREVLEELKRLLEDLLRRDKDSKEVRDVVKRLEEEIREVLAKDEEVARRSVEALADILRRDKDVVDRIRKLLKEILDRVRK

SEQ ID NO: 7311 - protein, 186 aa, Artificial Sequence; identical to SEQ ID NO: 7310
  Synthetic

SEQ ID NO: 7312 - protein, 174 aa, Artificial Sequence
  Synthetic
DREEVVKEIKKRLEDLNRRVREVVKKIDRELEKLLEESKRVVDDLRRRLEELKKRIKGDDAKRKVEEIVKEVEKILKRVIDDNKRLVDELKRLLEEVIRRSETSVRRLEDVLRREIQDERELERLVKEVEKTNERLLDELRKAAEEVAKRSEDTLRELRDIIKKVEERATDIAR

SEQ ID NO: 7313 - protein, 174 aa, Artificial Sequence; identical to SEQ ID NO: 7312
  Synthetic

SEQ ID NO: 7314 - protein, 174 aa, Artificial Sequence
  Synthetic
SKEDVVREIEKTLKDLLDDSRRVVRESEERLKELNRRLREVVKESKRRLDEALRRITGDELKERVRKLVEDLRKINKESIERSEKSVEELRRHSRKVIRDNEKLVDDLRRVLRRDIQDTEELRRLVDKVREDSERTLERDRRLAKEVSDRNKRLVEENRKIVEEVLKTIEELRR

SEQ ID NO: 7315 - protein, 174 aa, Artificial Sequence; identical to SEQ ID NO: 7314
  Synthetic

SEQ ID NO: 7316 - protein, 174 aa, Artificial Sequence
  Synthetic
EREKVVKKIKEDLDRLNEEVKRVVDESRKLLKRLNERVEEVIREIRKTLEELTRRITGDRMKERAEEIVKRVDDILKKVNKDSERSVRELERHSREVIERSRESVRRLEEVLRREIQDERELERLVAEVAERNKKLLKDDKDLARKVAEDNEDLLRRLRDEVEKVRRTADEIRR

SEQ ID NO: 7317 - protein, 174 aa, Artificial Sequence; identical to SEQ ID NO: 7316
  Synthetic

SEQ ID NO: 7318 - protein, 174 aa, Artificial Sequence
  Synthetic
SREEVVDELRKRLEELNKEVREVVRESERKAERALEEVEEMVKRVREELEKLKRDIKGDEMRREVDEIVRKVEEDLERVIREVKKLIDDLRRHSEDVERRSKESVDRLKEVLERDIQNKDDLRRLLKEVAERNRKLLEDDEELAERVLREVRRLLEELRRRLKEIKERLDEIRR

SEQ ID NO: 7319 - protein, 174 aa, Artificial Sequence; identical to SEQ ID NO: 7318
  Synthetic

SEQ ID NO: 7320 - protein, 174 aa, Artificial Sequence
  Synthetic
SREEVVRRADKLLKDLNKRVKEVIERSERKLRELNERVRDVVRKIEKRLEELERRIKGDELKDRVRRIVEELERKLREVIKRSEDSVEELRRHSEEVNRRSRESVERVKEVLKRDIQDEEELKRVITKVLRDNEELLKTDEELAEDVARKNKKLLDDLEKTVKEVMDRAEELRR

SEQ ID NO: 7321 - protein, 174 aa, Artificial Sequence; identical to SEQ ID NO: 7320
  Synthetic

SEQ ID NO: 7322 - protein, 174 aa, Artificial Sequence
  Synthetic
SREEVVRDIERRLRELNKRVADVADESRRRLEELNEKLRRVVEESRRRLEELRKEIKGDEAKKEVERLVEELERINRESEERSKKSVEDLTRHSKKVNDDSRKSVRRLEEVLRREISDDDTLRREVKKVERENERLLEEDRRLVREVTRRNEKLVKDNREIVKEVLERAKELTR

SEQ ID NO: 7323 - protein, 174 aa, Artificial Sequence; identical to SEQ ID NO: 7322
  Synthetic

SEQ ID NO: 7324 - protein, 174 aa, Artificial Sequence
  Synthetic
SREEVVKEIKDRLKKLNDDVKRVIKESEDLLRKLNEEVRDVVRKIEETLEELLRRITGDRLAEEVKKIVEELTKRLRDVIRESEKSVEELKRHSEEVDRRSKKSVERVEEVLRREIQDEERLKEVVAKVAKENKDLLRRDEELARRVAERNKKLVEDLRRLVEEVRRRAEELRR

SEQ ID NO: 7325 - protein, 174 aa, Artificial Sequence; identical to SEQ ID NO: 7324
  Synthetic

SEQ ID NO: 7326 - protein, 175 aa, Artificial Sequence
  Synthetic
SESERVEELLKEVAKRVKEVSDRSKRLLEEIERRVKEVSDESEELLRRIIDEAKKVDRRREVIKEAADRARDVVRKSRELVRKVVEELRKLLEESRELVKKVMDELRKMIEDLKRTGVEERVVDRVRRELEKLIKDLEENSREVERSLRELIEHLKKNVEDVEREAKRVIDELKT

SEQ ID NO: 7327 - protein, 175 aa, Artificial Sequence; identical to SEQ ID NO: 7326
  Synthetic

SEQ ID NO: 7328 - protein, 178 aa, Artificial Sequence
  Synthetic
SLEEKLRRVLDELRKTIETLLKTNKDVLKKLEEDVKRIIRRNEEVLRDLERKVRDLKKKGGKEEEVRRLLRELRRINRESEKEIEELLRELRRLSEEHKRRVERLLEELERILSEVEPDERLKRVVDELRKRAKKLLEDVERVIRKSEEEARRLLREVEKVVRELDREAEKLVEEVRR

SEQ ID NO: 7329 - protein, 178 aa, Artificial Sequence; identical to SEQ ID NO: 7328
  Synthetic

SEQ ID NO: 7330 - protein, 178 aa, Artificial Sequence
  Synthetic
SSEETLRDILKKVEERSEETLRHNERVLEEVRKEVERILRRNEEVLRRLEKEAKELKKRGGEREKVERLLKELRRINEESRKEAERLVRELKRVSREHLEESKRLLEELDKVLKSLEPDERLKRVVDDLERRIRELLERDERVIRRTEEEARRLLDDVRRVVEELDKRAEDVVKEVKD

SEQ ID NO: 7331 - protein, 178 aa, Artificial Sequence; identical to SEQ ID NO: 7330
  Synthetic

SEQ ID NO: 7332 - protein, 178 aa, Artificial Sequence
  Synthetic
DEEETLKKILDDVRKVSRDTMEENKTFLEELSKVADKIIRDNEKVLDDHRKAAEELKKRGGREEDVKRLLDTNREINERSEREVERLAEELRKISEESLEKSARLLKKAEDVLRSLPPDERLKRVVDDIRRSLEELLKRDEEVVEESRKEVKRLEEEVREVVTRSDKLMDELLKKVKR

SEQ ID NO: 7333 - protein, 178 aa, Artificial Sequence; identical to SEQ ID NO: 7332
  Synthetic

SEQ ID NO: 7334 - protein, 175 aa, Artificial Sequence
  Synthetic
SEKEEVLREAREEAKDIERRLERLLERDKEVIDRVEKDLERLLRENKKLIDDVRRRVEEEGPDERLKKELRDSLRESAERVKDLLRRLEEHLRRTAEELRKLAEDLRESIKRLRERIGDDEVMDEIRRLAERVERRLREVLERSKKLVDDLRERLKEVLKRIEDLYRRLEEEADR

SEQ ID NO: 7335 - protein, 175 aa, Artificial Sequence; identical to SEQ ID NO: 7334
  Synthetic

SEQ ID NO: 7336 - protein, 185 aa, Artificial Sequence
  Synthetic
TAKEVLDEIRKVHEDLNRKIEEVLKHSEDVLREVEERNERSVRHSEDMLRRLEERIDRKGREEELRRELDKDLDRLRREHEEHHRRLKKTLDDLRKEHEELARKVKKVSEDAERKLDEVRRKLKDNEEVLRKLLEENKKEIRRLEEELKRLNEEVKKRIKELEDSSRKENDRVRERIRELDERVK

SEQ ID NO: 7337 - protein, 185 aa, Artificial Sequence; identical to SEQ ID NO: 7336
  Synthetic

SEQ ID NO: 7338 - protein, 185 aa, Artificial Sequence
  Synthetic
TLDEAARTIEELLREVEERARRVLRHSEKVLDKVRKENEDSLRHSDEVLRRVEREAEKKGIDESLLKRLKEVLKRLRDEHREHHEDLKRRLKELKDKHEKLLRDLKRVLDEIRERVKEVKRDLKDEEEVIEKTLRDVERRLRDLEDKLRKLNEEVEKTIRDLRRSSEALNKKVKDLIKKLLDEVK

SEQ ID NO: 7339 - protein, 185 aa, Artificial Sequence; identical to SEQ ID NO: 7338
  Synthetic

SEQ ID NO: 7340 - protein, 185 aa, Artificial Sequence
  Synthetic
TLDEVAKEIEELLRRVEEENRKSLEHSERVLDEVRERNERSARHSEEVLRRLREEVRRKGIEEDKLRELEKRLEELRDDHRKHHEDLKRTLDELRKRHEDHHRRLKEELDRIRDEIRKVRRDLKDNEKVIKETLDRVRETIKRLIKSSRDLNEEVKRRIRELIESSRKKNEDVKKTIEELLRRVK

SEQ ID NO: 7341 - protein, 185 aa, Artificial Sequence; identical to SEQ ID NO: 7340
  Synthetic

SEQ ID NO: 7342 - protein, 185 aa, Artificial Sequence
  Synthetic
TADEVLKEIEDVHRRVNTENRKSIEHSKKVLEEVRRTNEKSIEDIERLLREVEKRIRDKGTEEDLLRKLEKVLDEIRKRLEDHHRTLEEVLRRLEKEHEKHHRELEEVSKDAKKKLDRLRKDLKDDEDVLRKALEENERLIRELEESSRRLNERVKELIRELEKSSKRLLDEVKKLIDELREEVR

SEQ ID NO: 7343 - protein, 185 aa, Artificial Sequence; identical to SEQ ID NO: 7342
  Synthetic

SEQ ID NO: 7344 - protein, 185 aa, Artificial Sequence
  Synthetic
TLEEVVEEIRRRHEEVNRRNRESVENSREVLERVEEDNKDSLRRIRELLERVARKLDERGVDETLKRKLEETLERIERELRKHHEELKETIERLERKHEEHHRRLEKVSRDAEREIEKVKRDLKDDEDAIRDMLRRNEERLRRLIESSEKLNRESRDVIRKLIESSRDLLRKVKETIEKLEEEVR

SEQ ID NO: 7345 - protein, 185 aa, Artificial Sequence; identical to SEQ ID NO: 7344
  Synthetic

SEQ ID NO: 7346 - protein, 185 aa, Artificial Sequence
  Synthetic
TLEEVVRDIERVHEEVNESLKRVNETTTDMHRRLNEEAKRVLEEIEKLLKDVEKKIRDKGTEEDLLRKLKETLDRIRKKLEKLLRDLKRKSDEAKKEDEKLEEELRRRSEDVKRKLEEVRKKLKDDEDAVKRELDRNREEIKKLEKRIRDVLKKNKDLIDKVREELKRLLDEVKKRIDKLAEEVK

SEQ ID NO: 7347 - protein, 185 aa, Artificial Sequence; identical to SEQ ID NO: 7346
  Synthetic

SEQ ID NO: 7348 - protein, 184 aa, Artificial Sequence
  Synthetic
SLDEAAKEIEELLRRSHEELKRVVKEIRDLLRRSHEELRRALEEIERLLDEVRRKLEERNVSEKLKKELEEVVKKVRDDLKRIREENKDDIRRLEKKLDDLRRKNEELIKKLREDLRRLKEEPVDDETVKELLRRVRKLVRESIEEVKTLLREAEEKVRRNERKVEEILRRVRETIRRLEERIK

SEQ ID NO: 7349 - protein, 184 aa, Artificial Sequence; identical to SEQ ID NO: 7348
  Synthetic

SEQ ID NO: 7350 - protein, 184 aa, Artificial Sequence
  Synthetic
SLDEALERIRRMLKRSHDENRRVAEDIKRLLEESHRENERVVKEIRDVLDKLREDAERNNISEELRDRLRRVVEDVERKLRESTKKNKKLIDDLRKRLEESSKRNKERIDELEKRLEDIKRKPVDDEDVKRLLDDVRRTVEENIRRSETELRDVKRRVTETIRESERLLEEVKRIIDKLREEAK

SEQ ID NO: 7351 - protein, 184 aa, Artificial Sequence; identical to SEQ ID NO: 7350
  Synthetic

SEQ ID NO: 7352 - protein, 184 aa, Artificial Sequence
  Synthetic
GLDEVLKEIRELLKESHDRLRRVLEEIEKLLEDSHRRNEEVVRRIRKVLEEVREKAERDNISEELRKKLEKVVREVEKRLEESTRKNRKLIEDVRRELEELKRKNEKVLDDLEKDLKRAKDEPVDERLVKELLDRARDKIRRNIEELERKLRAVEEKVRRTIRESEELLDRVRKIIEDLEREAT

SEQ ID NO: 7353 - protein, 184 aa, Artificial Sequence; identical to SEQ ID NO: 7352
  Synthetic

SEQ ID NO: 7354 - protein, 184 aa, Artificial Sequence
  Synthetic
DLDEALKEIERLLEEVERRNKEVLERIRRLLKRSHEELKRVLEEIEKLLRDLKKRVDDGNVDDELRKRAEKVIREVEDKLRRIEEKNREMIKRLEDELRRSSEELKKEVKRLRDELKDIKDKPVDRDSVRDLLRRAKERLDELIKTSKELLDRARKKVKENEEELRELLKDVRRIIKKLTEEVR

SEQ ID NO: 7355 - protein, 184 aa, Artificial Sequence; identical to SEQ ID NO: 7354
  Synthetic

SEQ ID NO: 7356 - protein, 182 aa, Artificial Sequence
  Synthetic
SELEDLLREVKELIDRLIDDSRRLVKTAEELIREAIKRSEDLLEEVKRLIDRVTEMVERGELDEDRLRELERRIAELIKRSKELSDELRRRIEKIIEDSKRRTEEALERIRRKIEELKKKRDDERVREVLERIKRLLEELKKRDEDSVREIERLLEELKRRNDRVVDEIRKLLKELAERVKK

SEQ ID NO: 7357 - protein, 182 aa, Artificial Sequence; identical to SEQ ID NO: 7356
  Synthetic

SEQ ID NO: 7358 - protein, 184 aa, Artificial Sequence
  Synthetic
DLDEVIRELEKLLKESHEAVKRVIKKSEDLLRDSHKKVKDVIRRSEDLLRKLEEEVRKNGLTEIEKRLRERAKELRDDAKRLEEENRKIIEDLERHARDLERKNRRIIEEVRRLLKEIKDRNSDDRTLLEELRRRIEELLKENRELLKRHEDKSKKLLEDNERLLREHAKKSDEIRRELRERVR

SEQ ID NO: 7359 - protein, 184 aa, Artificial Sequence; identical to SEQ ID NO: 7358
  Synthetic

SEQ ID NO: 7360 - protein, 178 aa, Artificial Sequence
  Synthetic
DEVERAKDVLDELRRRVEEELRRWKETSERLREESERALEKSEARLREAAEKLERVKRNNVSEDELKKLIDELDRILKELRKEHKELVEKWKKTIDEVRETLKRLLDKLEEILEKLARDGVDEEVLRDIREKLRELAERLKRLLDDDKRVLDEVRKANEDLLRKIKEDIEELRKELEK

SEQ ID NO: 7361 - protein, 178 aa, Artificial Sequence; identical to SEQ ID NO: 7360
  Synthetic

SEQ ID NO: 7362 - protein, 178 aa, Artificial Sequence
  Synthetic
DEDEEVKRTIEELRKEVEKTLREIEKSLKESEDKSRKHLEEVKKSLKETEEEVDELKKRNVDKEDLDRVVKKMEDNLKRLEDTARKLVREMRENLKRIKKRLEELTERLERTLDELRRRGVDEKVLRELEERVRRLKKELKRVLDDYKRKLEEAERRNRKVLKEYEDSLRELADRLRR

SEQ ID NO: 7363 - protein, 178 aa, Artificial Sequence; identical to SEQ ID NO: 7362
  Synthetic

SEQ ID NO: 7364 - protein, 178 aa, Artificial Sequence
  Synthetic
DEDREVRKTIEKLKRDSERHLEEMKRSAEESRKEVDKLLKKIKDSLRRTEERVRRLKKNNVSEEEVERLVREARENLERLREELERLERELRANLERLRKTAEDLTRRIRETLKELEDRGVPEEVLRELRKIVEELRKRNEDVLEEYERILRELKERLDRVLKEYEDRLRELEKELRD

SEQ ID NO: 7365 - protein, 178 aa, Artificial Sequence; identical to SEQ ID NO: 7364
  Synthetic

SEQ ID NO: 7366 - protein, 178 aa, Artificial Sequence
  Synthetic
SEAEKAKETIDRLADRVRKLLEEIKRSLDDSRRKSKETVEENEKTLDRMRKEVDAAKERRVSEEELERLIRKLKKTLDELRRRHEKLVEDLRRNLERIKRRLEELTREMRETLERLAREGLDEEVLRTLEEIIRRLTKELEDVLREYERELRRLEEENKRVIDKTEEEIRRLADRLRR

SEQ ID NO: 7367 - protein, 178 aa, Artificial Sequence; identical to SEQ ID NO: 7366
  Synthetic

SEQ ID NO: 7368 - protein, 178 aa, Artificial Sequence
  Synthetic
EEDERADETLKRIKRESDETVKKNERTITELLKRVKRLVDEIRKSLEETARRVDSAKKRNVSEDELRKLVKELEDNLRRIAEELRRLEEELRRILEKLAEDHKRLIDKIRKILKDLADRGVSEEVLRKFRKILEEAAELNKEVIDRSRKIIEDASRLLREVLEDYETKLRELKDKLDT

SEQ ID NO: 7369 - protein, 178 aa, Artificial Sequence; identical to SEQ ID NO: 7368
  Synthetic

SEQ ID NO: 7370 - protein, 172 aa, Artificial Sequence
  Synthetic
SLKEVIDDLERIIRELEKRNREVIKRVRKIVREAEEKNEDVIRKLKETIERLERELDDEDLLRELREKLRRLVEHVKKVIEDLREEIRRLEKHVEDEIKKSKDRLDELTKRLKDLDSRELRDEIRKIKKKNDEHLKRLEDELRKLLEKSDRHVKELEDRIRKAAKEVKDAKD

SEQ ID NO: 7371 - protein, 172 aa, Artificial Sequence; identical to SEQ ID NO: 7370
  Synthetic

SEQ ID NO: 7372 - protein, 172 aa, Artificial Sequence
  Synthetic
SLEDVIRDLARIIEEAERRNKTVLDELRKTIKELVEENEKVLDEDDKKSRELEKRLDKEELLDRLRKENKKLKDHVRKKNEEAKKRLKELEDHVRRVIEELKRELDKLRREAKDLGSRRLREEIKRLLRESEKHVEDLRREIERIKRENEEHLKKWRRDSERLEKEVEDAKR

SEQ ID NO: 7373 - protein, 172 aa, Artificial Sequence; identical to SEQ ID NO: 7372
  Synthetic

SEQ ID NO: 7374 - protein, 181 aa, Artificial Sequence
  Synthetic
DELEKLRDDARRIEEKHRRTVEKDKDVVRRMDKEVKDHVRRLKELAKKLEDDVRKRGDEKVIKELEEKLKRIHEESEKTKRKLKEDADRLEEDNERVKKESEDKLRELRERARKVKEDGIDKRSVDEVLREITEIVERVMELNDKSVEETRRIVERLKEEIDTVNDEIAKIVRKVIEEIKR

SEQ ID NO: 7375 - protein, 181 aa, Artificial Sequence; identical to SEQ ID NO: 7374
  Synthetic

SEQ ID NO: 7376 - protein, 181 aa, Artificial Sequence
  Synthetic
DELERLKEAAKRLADEVKEHVDRSRENAKRLKEEVEEHVKRLEDVARTMDEEVKRRGDDRVVKRLREILKKLHEESERTIRRMRRNLEENHRRTEESKKRLRDKLEELKRRLEKFKEDGVDKESVDRVLKEIEDIVRRLEERLDESNKELKEIVDDVTEKLERVNRKIAEIVKRLSDEIRK

SEQ ID NO: 7377 - protein, 181 aa, Artificial Sequence; identical to SEQ ID NO: 7376
  Synthetic

SEQ ID NO: 7378 - protein, 181 aa, Artificial Sequence
  Synthetic
DELEELRRAAEEMEKEVREHVKRSEKNAKDLEKEVREHVKKLREVLRRLTEKVKRRGDERVIEDIRRTLKELKDESDETEERMRRNLEENHRRTEESKRRLEEKLERLARKVEEVKRKGIDKEKVDRVLEEITREVERLKKELDESNERLERIVRKVIEELRKVDEDAEERVRRLEEEIRR

SEQ ID NO: 7379 - protein, 181 aa, Artificial Sequence; identical to SEQ ID NO: 7378
  Synthetic

SEQ ID NO: 7380 - protein, 181 aa, Artificial Sequence
  Synthetic
DDLDRLREAAERMAREVEDHVRKLKDLIRRVRERVERHVKKLEDDLKRVKEEVDRRGDKKVVDKLRRDLERLRRETEKSKRELEEDLKRAKDESRKTLTRLRDALERLREEVKRVEDKGIDKDKVRKVLEDIKRIVDRLEERIREVDKDLERIVRELMKRLDEVNKRLEDTVRRLSEEIRR

SEQ ID NO: 7381 - protein, 181 aa, Artificial Sequence; identical to SEQ ID NO: 7380
  Synthetic

SEQ ID NO: 7382 - protein, 185 aa, Artificial Sequence
  Synthetic
DLIEEIKKLAEDHHRRVKEVLDRNREVAERLKKRVRRIVEENKRLAEDVTRKIKELKRRVKDRDELRRRVEEIERRLKKHIDDSNRRITELKEEVERHLERSERELEKSKRDLERKLREVEKRKRTEDLRRVLEELREIVTRNEKEIRDTIRELEEIVKRLKEDNDRSVRELERILEELREELER

SEQ ID NO: 7383 - protein, 185 aa, Artificial Sequence; identical to SEQ ID NO: 7382
  Synthetic

SEQ ID NO: 7384 - protein, 175 aa, Artificial Sequence
  Synthetic
DSDEEVRRVLEKVEEDVRRLAKDIRDSVRRSEERIDELVKKLEKSIDESRRRVETTADNVEELKKIIKDSKEELKKVVKTVRKVLEDSKRELEKVLEDVKRTIKDLKDEVRKMREEGRVDERLLEEIEKVVEDLRRKAEELIEKNERLLRRLEEVAKELDKRNKELLEELIRRNE

SEQ ID NO: 7385 - protein, 175 aa, Artificial Sequence; identical to SEQ ID NO: 7384
  Synthetic

SEQ ID NO: 7386 - protein, 175 aa, Artificial Sequence
  Synthetic
SEADKVREVLKRVKEEIDRLVEEIEKVNRDSRREVEKLVEKLRKSLKESKDRIARDLDRVDEVRKILKDSKERLEKVIREVRKAIKDTHEELRKRVEDVERELKRLVEEVEDMIRRGNVDEELLRKIEEVLRRLTEDAKRLIRRNREILKELRELAKRLDEENKELLDELIKKAR

SEQ ID NO: 7387 - protein, 175 aa, Artificial Sequence; identical to SEQ ID NO: 7386
  Synthetic

SEQ ID NO: 7388 - protein, 182 aa, Artificial Sequence
  Synthetic
SMIEKVREVLKEVADRVRRLLEENKKSIDDSARALEELIKRIRESLRKSEEDLKREVRGEEERRKVRRLLEESKRKIDEDEKRVEKRLRDSEKSSRDLAEDLRRVLEDIERKIEEVAKRLKDDSEFVKRILDEVDEILKRLERRVKEHSRKNREELEKIRKEAEEILRENEELLEKIVRDAR

SEQ ID NO: 7389 - protein, 182 aa, Artificial Sequence; identical to SEQ ID NO: 7388
  Synthetic

SEQ ID NO: 7390 - protein, 182 aa, Artificial Sequence
  Synthetic
EMVERLEESIDRSRKELDRLIEENKKVLEEVEERVRRLIEKLKRSIEESEERLRRKVRGEELAREVKKLLDDSRRRLEELKERAERVLRELKKSSEDLARDVKRLLKESREKLEELARKLKDNDEVVRRLNEENKKLLEDIRRRAKDHSRRVREILEDLEREVEKMNEENKDLLERIVRRAK

SEQ ID NO: 7391 - protein, 182 aa, Artificial Sequence; identical to SEQ ID NO: 7390
  Synthetic

SEQ ID NO: 7392 - protein, 182 aa, Artificial Sequence
  Synthetic
SMIEALKENIRRSEEEIRRLIEEWRKVSEDIEREVKKLIKELEESIDESAKRLREKVRGEEELTRVEKLLRDSEEELKRLAEELEEVLKRNKDKVKEEVERARKLLDDSRRKLEKAERDLKDDSDFVRKLLEENNELLKEIKKRVEKVLEESKELLKELREKIRRLNEKNKKLLEEIVRRAK

SEQ ID NO: 7393 - protein, 182 aa, Artificial Sequence; identical to SEQ ID NO: 7392
  Synthetic

SEQ ID NO: 7394 - protein, 178 aa, Artificial Sequence
  Synthetic
SEIEKVVKDLRERLKELRESVKRLDDKNRELLERLEREVEEMDRRNEKLLRDLKRQDRDEKDLRRVIEKSKEDLRRLEEKLKEVIKRSEEELEEHVKRTRDVIERLKRRVEKLARDLDKEELLRTLEKVLREIAEELERLNRKVRESIRESARRLKRLIEKLERSIRRSAEELRKRAK

SEQ ID NO: 7395 - protein, 178 aa, Artificial Sequence; identical to SEQ ID NO: 7394
  Synthetic

SEQ ID NO: 7396 - protein, 178 aa, Artificial Sequence
  Synthetic
DEIDKIVKKLRDILREIEKRAKEVNKRNKELLDELRERVKDLDRTNEELLRELKDSDRDKKDMERVIRESEDRLRKLEEELRRVIERSERELRRLEKEARDVIEEMERDVRRIAKDLDSDKLLKKLKDVLDEIAERIKELIRELRESIKKSAEELKRLIDRVRRSIEESAKRLEDRAR

SEQ ID NO: 7397 - protein, 178 aa, Artificial Sequence; identical to SEQ ID NO: 7396
  Synthetic

SEQ ID NO: 7398 - protein, 178 aa, Artificial Sequence
  Synthetic
SELEKILEKLRRIVEELAKSVRKLNEENKELLKRLADSVKKLDDDNKRLLTDLRRRDNDEKDAKRVIDKSRDDLRKHVERSREVIEDSKRKADKHVEDTKRVIETLKREVDEIARELDSEELLRTLEDVLRKIAEDLERMNRELKRSIKKSADDLKRLNEKVKRSIERSAEELRKRRT

SEQ ID NO: 7399 - protein, 178 aa, Artificial Sequence; identical to SEQ ID NO: 7398
  Synthetic

SEQ ID NO: 7400 - protein, 178 aa, Artificial Sequence
  Synthetic
DEIKKIVEEIKKTLEEIDKSVRELIRRAREILRELEESVRELIRRNSKLLEDLRRQDRDEKDARRVIEESRRELEEHRKRSEDVIRKLREEVEKHVRETEEEIKRIEDEIRRLKEKLDKDELLKELEDVLKEVAEEIKRLNERLKKVLEEIERTLRELNRRLEENIRRSARALEETRR

SEQ ID NO: 7401 - protein, 178 aa, Artificial Sequence; identical to SEQ ID NO: 7400
  Synthetic

SEQ ID NO: 7402 - protein, 178 aa, Artificial Sequence
  Synthetic
SEVEDLLRRIEKILEDLRRSVEELLKRIEDALRRLEEEIRKVTEESKRLLEDLTRRDTDEREAREMIKENEKKLRDLEKKLRELIKRLKEEVDKHVKDTRDVLTRIREEVRKMAEKLDKRELIEEVEKVVKRVEEALKRLNDRVRETLDEVRKRLEDAIRRWREESERIARELEKRTT

SEQ ID NO: 7403 - protein, 178 aa, Artificial Sequence; identical to SEQ ID NO: 7402
  Synthetic

SEQ ID NO: 7404 - protein, 178 aa, Artificial Sequence
  Synthetic
SEADEIVRRIEELLKELEREIRKVIRDSERLLKELEDSVRELLKKIRDVLDELTKSDRDEKEARDVIRKLAKEVEDHLRRSKEVIDRNRKKLEDAEEKLKELIERIKREIDEIKRRLDSEELLRKLEAVLDKVKKDLKKMIDDWRRVSERIARELEKLNRRVKEELDRVKEALDERTR

SEQ ID NO: 7405 - protein, 178 aa, Artificial Sequence; identical to SEQ ID NO: 7404
  Synthetic

SEQ ID NO: 7406 - protein, 178 aa, Artificial Sequence
  Synthetic
SEIDEVVERIKRTLEEAEKRVKKASEDHKRRLDELRKKVEKLIEDNERTLEAVARRKIDEELLKELEKESEDRLRKLKRDAEEVTREMKKTSDELAEELKRLKDEIRKELERLEREGIEERLLRKLRKVVKDVDDRLKELLEENRDVVRRIKEELEKLLEKVRRSIEESRRRMRETRR

SEQ ID NO: 7407 - protein, 178 aa, Artificial Sequence; identical to SEQ ID NO: 7406
  Synthetic

SEQ ID NO: 7408 - protein, 178 aa, Artificial Sequence
  Synthetic
SEVDEVLKDIRRILEEARKRVEELDRENKRILDEVREKVKELNERNKEILRAAEERKIDDDLLRKLVEDSRRLLKELEEELRRLTERSKKLLKELAEEMDRLVKEIEDKLRKLREDGIDEKLLRDAKRVVEEVSKALKDLLKEVEDSVRRSKREMEKLLEELRESVKRSEEELRRTSK

SEQ ID NO: 7409 - protein, 178 aa, Artificial Sequence; identical to SEQ ID NO: 7408
  Synthetic

SEQ ID NO: 7410 - protein, 182 aa, Artificial Sequence
  Synthetic
DEVEDLLRRNEELLKRLLEEIKKLTDEHREELKRLAEDVKKVVEDVRRLLKELEEMVRRGELDEKTLDEARRRLEKLLKELKEKIDRVKEEMEKSNRKLEKKIRDAKRTTEEILKRLKDKGVDEKLVRKLEESVRRSTEELEKALKRNNDVIRRIAEALDDLLRRLEKVIREIEKKLRDDTR

SEQ ID NO: 7411 - protein, 182 aa, Artificial Sequence; identical to SEQ ID NO: 7410
  Synthetic

SEQ ID NO: 7412 - protein, 182 aa, Artificial Sequence
  Synthetic
DRVEEAVKDIERLLRELKRDVERLVRENEKILKDAKREVDELTKDHRRKVEELDEMVKRGELDKDTVDRVKKEMKETNEDLSRKATEIKKRSEDILRRLEEKIREVRKRLEKLLEELRREGVSEDLLRKLEKVVRDVEKKLRKLLEDLKRSIDRSTRELEKLNEKNNEVIRDIERRLDEAET

SEQ ID NO: 7413 - protein, 182 aa, Artificial Sequence; identical to SEQ ID NO: 7412
  Synthetic

SEQ ID NO: 7414 - protein, 178 aa, Artificial Sequence
  Synthetic
SEIEKLIEEIRRVVKEIKREVERAIRENEKLLRESKRRNDELIKEIERVVEELKKRNVPEEDVRKVLADLEKKLEELHREDRKLIKESEELLKRLMEEAEKILEELKRRLDELIRRRGRDRLIEELEKVLRDVEKVARDVLRKLRRSIEESRRRSEELNKTVKKVLEDVARTATERSR

SEQ ID NO: 7415 - protein, 178 aa, Artificial Sequence; identical to SEQ ID NO: 7414
  Synthetic

SEQ ID NO: 7416 - protein, 178 aa, Artificial Sequence
  Synthetic
REIEEAIKDVERVLRESEERNRRLIERIKRMLKKSEDENRKFIEDNKRLADDLRRRNVPEEDVRRTIERSRRELEKLVKRDEDLLKRLEEELRKLHEDDRRLLEELERKVEDIIRKRGRTEDVERLRKVIEEVKRRMKELNERLKEELREVAKRSRDLNKELRESIEESADRARRRRK

SEQ ID NO: 7417 - protein, 178 aa, Artificial Sequence; identical to SEQ ID NO: 7416
  Synthetic

SEQ ID NO: 7418 - protein, 178 aa, Artificial Sequence
  Synthetic
DEIERLREDIKRVLEESTRRNKKLLDEIRKALDESRRKNEEAIRRNEEVVRDLKDRKVPDKKVKEVIDRNRRMLEELVRDDKDLLKRLEERVRELHETDRKLIKDLRELLRRIIEKRGETDKVRTLRRELEEVARALEELNRRVEEELDEVRKESERLNKELEDSIRKSAEDAKRTTK

SEQ ID NO: 7419 - protein, 178 aa, Artificial Sequence; identical to SEQ ID NO: 7418
  Synthetic

SEQ ID NO: 7420 - protein, 174 aa, Artificial Sequence
  Synthetic
DEKDKAIEDVRDLLRRNEEVARRMDKRLKDLLDTIRKKAEDLDRELKRLLEEAERLVREGTTEELVKKLKKELDDSRRRLEKLIEELRKRLRDSIRELEEHLKRSEEELRRLLEEVKDVKELEKVLEEIRRRSEELLKHHAEVIERIERDVERLRRHHEDTIRKIKEKVDRDRK

SEQ ID NO: 7421 - protein, 174 aa, Artificial Sequence; identical to SEQ ID NO: 7420
  Synthetic

SEQ ID NO: 7422 - protein, 174 aa, Artificial Sequence
  Synthetic
DEDREAIKEVEKLLRDNERVARRLDEEVKELLDEMRRRSEEMDRELERLLEEAKRLADKGTREELVKELEKRLDESHDRHRKLVEELEERLERSIEELRKHLDDSRRRLKELEDRVDKVEELKEVLREVDKRSKELLKHHKRRIEEVRKRVRELNKHHEDVIRKIKKKVREDRK

SEQ ID NO: 7423 - protein, 174 aa, Artificial Sequence; identical to SEQ ID NO: 7422
  Synthetic

SEQ ID NO: 7424 - protein, 174 aa, Artificial Sequence
  Synthetic
KEAEEAIKRVEDLLRRNKEVAERIIREIRRLLREADETSKRMDEDLRRLLREAEDLVRRGTTEEVLEELKERLKESHKEHKKKVDELIERLRKLLEDLERHIRKSDRDLDRLREEVKDVRELDKVLERVKRESDRLLKEIEKVVREVEERLRRLNEHHEKVIREIEKKLEDDRR

SEQ ID NO: 7425 - protein, 174 aa, Artificial Sequence; identical to SEQ ID NO: 7424
  Synthetic

SEQ ID NO: 7426 - protein, 174 aa, Artificial Sequence
  Synthetic
DEDREAIERVRRLLDENRKVVEELDERLKELLRDAEEKSRRVIKTLRELLKEIEDLARRGTDREVAEKLRRALEELHRRHREMVKELKERLERSIKRLEEHIRKSKEDLDDLRRKVDKVDELRKVLEDVERASKELLDHHRDVIRRIEEELKRLNKELEKVIREIERAVEELER

SEQ ID NO: 7427 - protein, 174 aa, Artificial Sequence; identical to SEQ ID NO: 7426
  Synthetic

SEQ ID NO: 7428 - protein, 174 aa, Artificial Sequence
  Synthetic
DEDRDAIRKVEDLLRRIEEIVRRLIEEVKRLLEDNRRKSKRFIERVDELLKEMEKLVREGTDAEMVRELKDRLRRLHEEHADHVRDSARRLDELLRELERKIKELEDRLRDLEEKVKDVKELEELLRRVEREVEKLLTDLRRLLREVKETSKRLNEELKRRADEVEKKADEDRK

SEQ ID NO: 7429 - protein, 174 aa, Artificial Sequence; identical to SEQ ID NO: 7428
  Synthetic

SEQ ID NO: 7430 - protein, 181 aa, Artificial Sequence
  Synthetic
SSKDRIRKVLEEVRETLDRLAKRIEKSLRDSAKRVEDLAEENRTSLKETKERIDELIKRRKDRDRAEEVKKRLDESRRHVEEDEKRVREDLRRSADEARRVLDELRKTLEKLRKEVEDVIREGKLGEELIRRIEEELKRIEDTVEKIIRKDEKLLEDIERESERHIREDKELLKELEKEER

SEQ ID NO: 7431 - protein, 181 aa, Artificial Sequence; identical to SEQ ID NO: 7430
  Synthetic

SEQ ID NO: 7432 - protein, 181 aa, Artificial Sequence
  Synthetic
SSDKEIEDVLRKVKDELDKLARALDESLKRSEKDIDRLEEELKESHDRTREEIRKLIEERNVDKLAEDMKRKLKESLKEAREVVDEVRKRLERSRREIEKMIKKLEEDLRTLERKVREVIKRGRLGDELIREIKKVLDRIREEIERLLREDEELLERLREDAKRILDKNKELLDELRRRVK

SEQ ID NO: 7433 - protein, 181 aa, Artificial Sequence; identical to SEQ ID NO: 7432
  Synthetic

SEQ ID NO: 7434 - protein, 181 aa, Artificial Sequence
  Synthetic
SADRKLEEVLKKVEDDIRDLERRLKRSLDESKREVERLERENRRVLEEVEKKVRADNVDEERLREIKRVVDEAKESLRELVRRMRKVLEDSTREIEELRRRLREVLKEIRKEVKEMRDRGESEETVKRIIEKIERILRKLKRDAERILDKDRKLLKKLEEESRKHIEDVKRLLEELERRTR

SEQ ID NO: 7435 - protein, 181 aa, Artificial Sequence; identical to SEQ ID NO: 7434
  Synthetic

SEQ ID NO: 7436 - protein, 181 aa, Artificial Sequence
  Synthetic
ELEEKLKRSLEDSRRRVEELRRTNEEVLREVEEEIRRLIKENEDSLRESKKRVDDRNVEREKLEKAKKVLEDSERSLRKLAKEARDVLREMRETLRKLEEKMERVLRESEKEIRRVATRGESKETVDKILEDDKELLRRLEEESKRHIDEVRKILEDLERRSRRHIEEDKKLITELEKETK

SEQ ID NO: 7437 - protein, 181 aa, Artificial Sequence; identical to SEQ ID NO: 7436
  Synthetic

SEQ ID NO: 7438 - protein, 181 aa, Artificial Sequence
  Synthetic
DLDERLRRSLKRSKEEVERLRKENEEVLRRSKETTKELIKTNEKVLEDVERLVRESNVDEERLRKAKEVLDRLRESLKKLAEESRRLNKRLEETLRKLVRDMEEVLRRSEEKIKEVDTRGESRETVEKIIKEDEDLLRKLKEESDRHIKDVERVARENERESKRHIEEVRKVLDELREETR

SEQ ID NO: 7439 - protein, 181 aa, Artificial Sequence; identical to SEQ ID NO: 7438
  Synthetic

SEQ ID NO: 7440 - protein, 181 aa, Artificial Sequence
  Synthetic
SAEEKLEEVLKRVAERIEELIRRNRRVLDRVREEIKRLVEENRKSLDESERRVRERNVSREKLERAKELLDRSKDSLRRLEEELRERLKDLERTLKELEERAKRKLEEIKKEVKDVADRGESEETIERIIKKIEDILRKLEEESERHIRRVEEELKEMEKRSREHIEEDKRLLEELERRTK

SEQ ID NO: 7441 - protein, 181 aa, Artificial Sequence; identical to SEQ ID NO: 7440
  Synthetic

SEQ ID NO: 7442 - protein, 181 aa, Artificial Sequence
  Synthetic
SAEDELRKVLEKVREDIDRLADENRKVLKRSKDETKRLIKENREVLERVEEIIRRDNVDRKDLEEARRVLEEARRSLEELVERSKRLNDRLEETLRELIKEAKRVLEEAEREVREVATRGESEEAIERIIRRIREILERLRKKSEEHIRRVEDVARRNEEESREHIKTVEKILEELKRKAD

SEQ ID NO: 7443 - protein, 181 aa, Artificial Sequence; identical to SEQ ID NO: 7442
  Synthetic

SEQ ID NO: 7444 - protein, 179 aa, Artificial Sequence
  Synthetic
SEVEELIKRLKKVLKELVDKVRKVIEDTKELLERLKRRSEDHIRKLREVLKEAKDQPIDDEELKEILDRLRKTLEELEEELKKALEDDREEAKRLVDDARRVLKELEEEVREIRERRKEVEELDRRIEKVLKEIEEKIREVIKEWERVHREVNELLKRLIDENRKVLDEIRKLLEEKSK

SEQ ID NO: 7445 - protein, 179 aa, Artificial Sequence; identical to SEQ ID NO: 7444
  Synthetic

SEQ ID NO: 7446 - protein, 179 aa, Artificial Sequence
  Synthetic
SEAEDLIRRLKEVLDELKKKADDLIRDTKRLLDEIRKKSEDHIKRDKELLKDLKRRDTRKDEAKRVLEESERTLRELERDLERLLEKDRRDMEEMVKELRRVLEELRREVERLKEERKEVDRALREIEKVLKEIKELIEKVIRDWKRVHDEVNEELRRLIEKNRKSLKETADELDRKRK

SEQ ID NO: 7447 - protein, 179 aa, Artificial Sequence; identical to SEQ ID NO: 7446
  Synthetic

SEQ ID NO: 7448 - protein, 179 aa, Artificial Sequence
  Synthetic
SEVEKLIKEDKELLERLKRDVERLIEELRRTLKELKKESEKHIEDDKRLLDDLRDRDTDDKVAKDALRRSKETLEELVEKLKRVLDELRKKVKELMDRARRVLEESRKRVEELKERRKEMDKLITDIRRSLDETRRRIEKLIREIEKVLREIEETLRELEKRNRESLERTRETLERKSK

SEQ ID NO: 7449 - protein, 179 aa, Artificial Sequence; identical to SEQ ID NO: 7448
  Synthetic

SEQ ID NO: 7450 - protein, 183 aa, Artificial Sequence
  Synthetic
SEVDELIERDKKLLRDVERDVRRLNKEVRDILDEIRKDVEDALKENKELLDRLREMVKRGEADERTAEELRKTSEDLLRELEKRAREIEERLRRTLEELAKRLERVIRESRKLLEDLRRRRREMREVLKRLEDSSKDTTDKLRELLRSHKKVIDEVREKLKELLDRYRKVSDEIREEIDRARK

SEQ ID NO: 7451 - protein, 183 aa, Artificial Sequence; identical to SEQ ID NO: 7450
  Synthetic

SEQ ID NO: 7452 - protein, 183 aa, Artificial Sequence
  Synthetic
SEVEKLIEDDRKLLEDAEEEVRRNNREIERILDKAREDVKRIIKEIEDLLREADEAAKRGEVDEDVVREVAKRIRDLLEELRRRAEEIKRRLDRSHEELRRALEEVDKRSKELLDDLRRRKKDAEEAKRRIKKSIDDSRRELKRLLESNRKVIEEVKKTLEELIRTLEEVVRRVEDRLKKLAD

SEQ ID NO: 7453 - protein, 183 aa, Artificial Sequence; identical to SEQ ID NO: 7452
  Synthetic

SEQ ID NO: 7454 - protein, 185 aa, Artificial Sequence
  Synthetic
DSVEELLKRLRDLLEESKRRAERLIREIERLLRESEKRVRELNRRLEELLREAEDRVRKEGPTERLEELVEELKRRLKRSSDELKKHLDESRKRLKEIIEEVERHIERSVREMRRILEELRKEGAPEDALRKLEKVIREIEREHRRLLEEIRRVLKEVDKRHDEVRKSHEDVIRRIEERLERLKK

SEQ ID NO: 7455 - protein, 185 aa, Artificial Sequence; identical to SEQ ID NO: 7454
  Synthetic

SEQ ID NO: 7456 - protein, 185 aa, Artificial Sequence
  Synthetic
DSVERLIEEIRRLLKRSEEIARKLIRDAEKLLEEHRRRVEELNREIERKLEELDEKARRRGPTEELKDTVRKLREDLDRSLEDLRRHSERLKEELDRLLKELEEHIERSKKRLDEIEEEVRKEGVPREALEKIRKVIKEVKDTHRDLLRRVRDVIRRIREASKETERSHREVIERVRKRLDELTK

SEQ ID NO: 7457 - protein, 185 aa, Artificial Sequence; identical to SEQ ID NO: 7456
  Synthetic

SEQ ID NO: 7458 - protein, 185 aa, Artificial Sequence
  Synthetic
KSVDDIIREIRKLLEDHKRRVDELLERLKKLLEDHRRTVDKLIKDLERLLEELARRVKREGPTERVRKLVKEAEDRMRELTKRLEEHSKKLKDDLRRILEDLRKHSDDLRRRLEKLLREVEEEGVPREALERIREEVRRVEEASERTLRELEKVVRRIERESEKLKRELEKVVEDAKRTLEKLIE

SEQ ID NO: 7459 - protein, 185 aa, Artificial Sequence; identical to SEQ ID NO: 7458
  Synthetic

SEQ ID NO: 7460 - protein, 185 aa, Artificial Sequence
  Synthetic
SSIEKLLEELKELAKRHEDEVKKLIRELEDLARKHKERSEKLNEEIKKLLKELADRVRERGTTEEVEEMIKEVRERLERSHDDHRRHSERLERELRRLLKELREHSDRLRRELERILKEVDEEGADERVRRRLRKVVEEIKERSDRTIREMEKVIREIKEESRRLNKSHEEVIRDVKRRADELRK

SEQ ID NO: 7461 - protein, 185 aa, Artificial Sequence; identical to SEQ ID NO: 7460
  Synthetic

SEQ ID NO: 7462 - protein, 185 aa, Artificial Sequence
  Synthetic
SEVEDLLRDLERLLEEHRERVERLIKRLRELLERHKRTVEKLNRDVKEKLRKLKKEAEDKGPTEELEELVKRVEEDLRRSLKELREHSERLKRELKELLDRLRDHSRELEERLRRILKKLEEDGAPEEALRRLKRVVEEIKRRSDRLIEKAEEVIRDIEEKSEETLKSHREVLERVKKILTDLRK

SEQ ID NO: 7463 - protein, 185 aa, Artificial Sequence; identical to SEQ ID NO: 7462
  Synthetic

SEQ ID NO: 7464 - protein, 185 aa, Artificial Sequence
  Synthetic
DEIDRLLEDLRRLLEEAERRVTEIIKRIKKLLEEHERRVRELNKDLRRLLEEAEDVVRRKGPTEELEDLARKLKETLEESLRRLEEHSRRLEKELRDLIDELRKLIKEVKDRLEEILREVEKRGVPEKARRDLERVVTEIDRELKRLEEDIRRVLEEVKRRSEDLRRSHRRVIEDIKRRLEELRR

SEQ ID NO: 7465 - protein, 185 aa, Artificial Sequence; identical to SEQ ID NO: 7464
  Synthetic

SEQ ID NO: 7466 - protein, 185 aa, Artificial Sequence
  Synthetic
KEVEDIIREIRKLLEDHERKVKELIDEIRRLLEEHERTVRDLNRRIKKLLEEAKEFADRKGPTEEADKLIKELTERLKKSLEDLKRHSDELKKTLEEILERVREDSERLEKRLREIEDKIRRDGVPKEMIDRVRKVVEEVKKRSRETLERIRKVIEEVKARSKELIESHEEVIKRVEETLKRLKD

SEQ ID NO: 7467 - protein, 185 aa, Artificial Sequence; identical to SEQ ID NO: 7466
  Synthetic

SEQ ID NO: 7468 - protein, 177 aa, Artificial Sequence
  Synthetic
SLEEEIKKLLKEVRDVNDRLKETIEDLAEKIERLAKRMIERIEEILREVDRLVKEVNLPEEMKKRVRDLLERIRRELEELLKELRKLLKRIRERHDELKKRSEENIKRIEDELRKTGEEDVIREILKEIRKHLRDSEEENKKTLDTLRKILEDLTKAAEDILEEIRRELDRLRKEAT

SEQ ID NO: 7469 - protein, 177 aa, Artificial Sequence; identical to SEQ ID NO: 7468
  Synthetic

SEQ ID NO: 7470 - protein, 179 aa, Artificial Sequence
  Synthetic
SELEDILRRLREEVKRLREESRKLLEDNRRLVEEVKRESDKVLKRLKDKADRLKELAERGDLDEEMAERVERELRRILEEHKRKSKEIEDESEKLDREHKESTREVVERIKKELDDARRRGIPTREIKTVIDELTRELERLNREHEDLTRKLREELKKLNKRIKDLIDTLKKLLEDLKK

SEQ ID NO: 7471 - protein, 179 aa, Artificial Sequence; identical to SEQ ID NO: 7470
  Synthetic

SEQ ID NO: 7472 - protein, 171 aa, Artificial Sequence
  Synthetic
SEEEKLRELVKEVEKRTRELNENLRRSIEEVERDTEELDKNLEKSIREVKKVLDDLNLSDDDVRKVEEDLRRLHEEHRRHVERSRRRLEELYRRHERHARESKKELKELEDRGEPAEDVLRRIRELLERNEEVNRRLDEASKRLLEENRRKNKKLDDDSKELLKRLTERAK

SEQ ID NO: 7473 - protein, 171 aa, Artificial Sequence; identical to SEQ ID NO: 7472
  Synthetic

SEQ ID NO: 7474 - protein, 171 aa, Artificial Sequence
  Synthetic
REKERLEKVIRELETKARELNKNLKKSIDDVRRETERLNENLKRSVDELRKRLKDLNLSRDDVERLDEELRKLEREHHEHVERSDRELKKLYDRHEETIREVEERARELKERDEPAEEVLKELRKLVEELERRNRELDKRSKDLLRENRELNKDLDRKSRELMERVERKTR

SEQ ID NO: 7475 - protein, 171 aa, Artificial Sequence; identical to SEQ ID NO: 7474
  Synthetic

SEQ ID NO: 7476 - protein, 171 aa, Artificial Sequence
  Synthetic
SEEEKLERLIEDLERKLKELNDNLKESIDRVRKRTEELNRNLRESIKRVKEELERQNLREDTVRDLEEKLRELHKRHEDHARRSDKRLKELHKEHEDLIREVEKRLRELRRRGEPAEEVLRELEKLVEDLERENRRLDKESKDLLEENKKVNKDLDDESKRLLEEVSKEAK

SEQ ID NO: 7477 - protein, 171 aa, Artificial Sequence; identical to SEQ ID NO: 7476
  Synthetic

SEQ ID NO: 7478 - protein, 178 aa, Artificial Sequence
  Synthetic
SDKEDVTRLLEEVSRASERSRKRWKDSSDEVKRTSEESIRRLRELLERLRERIERVIREKKDDDLRRKLERLLERLERIIRELEKRSKELNDKNEEDAERVTRESKELNDRLKKEIDRDITDVDELRKKIEEIVKRDEDLVRRLLEDSKRLAEEDRRLLEEVKREIDEIRKRIDEEVK

SEQ ID NO: 7479 - protein, 178 aa, Artificial Sequence; identical to SEQ ID NO: 7478
  Synthetic

SEQ ID NO: 7480 - protein, 182 aa, Artificial Sequence
  Synthetic
DEIDELVRRIEELAERHHRRVDEIVKRNEEVLKELDERARRLVRENEEVLKRLEETVRREGPRDELAERVEEHLRDSERRVRELERRLEEHIKRSEEELDESTKRLEDELRKVAEELKRRNMEERAEKRLRDVLEKLRRDVERNREEIKKSAEDVRREVKRVTDELKESIERVRKRVKELKD

SEQ ID NO: 7481 - protein, 182 aa, Artificial Sequence; identical to SEQ ID NO: 7480
  Synthetic

SEQ ID NO: 7482 - protein, 181 aa, Artificial Sequence
  Synthetic
EAERKVKTVVDELRRIVDELAKELEESLKRTDETIKRLARELERVDRELEEIIKELERKGLSEEEVRKLRETLKKLHEENRRVIEELEREVRESEETLRRVIEEIKKRLEDLRRKLDKLAKDGRVDDEVVRKVEEEAERIKKRIKDLVRRDEKLVEDMRRRIKRLVEKNRKVAEKMRTDTD

SEQ ID NO: 7483 - protein, 181 aa, Artificial Sequence; identical to SEQ ID NO: 7482
  Synthetic

SEQ ID NO: 7484 - protein, 185 aa, Artificial Sequence
  Synthetic
DLEELLRKVLEELRKIVEDARRENEKSLRESEKIVREVEELNKKVLEEVEKKIREVIEEKKEDKELVDEMRRVLKELEDRSRKLTDETRKKLKESEEKSRKLTEETKKVLEDLRRKLKEVADRGESEETIKRIVDEIRKEAERLLRRHRKSVKEDKDLAKKIREDHKKSVEDIERTLEELEKRAK

SEQ ID NO: 7485 - protein, 185 aa, Artificial Sequence; identical to SEQ ID NO: 7484
  Synthetic

SEQ ID NO: 7486 - protein, 175 aa, Artificial Sequence
  Synthetic
SEIEELVKEIKKVADEVRRRHEKSVREIERKLEELDKKVKDLVDEDKKLADELRRRNEDKETLDRVLKESEEKVRRLARDLERVLRESREESRRLVEDTRRLLEELEDKVRRINAGDRVRRELERVLRDVERIIRDVKRTNKRVDDDVERRIRELRKELEDSLRRSKRIVDEVRR

SEQ ID NO: 7487 - protein, 175 aa, Artificial Sequence; identical to SEQ ID NO: 7486
  Synthetic

SEQ ID NO: 7488 - protein, 175 aa, Artificial Sequence
  Synthetic
SEIERLVEEIEKLLRKMAEEHKRSVERDERLARKLKRENEEHIKTDEELVDRLRRRNEDEKRLKEVLDRSEKSMKELKDRNKKVLDESKKESEDIKRRTEKLLEEIEERIRRINAGDRVLRELKRVLDEVKKIIEDVAKENEDSDRRSKKIIEDVVRENKESLDRSREEIERVRK

SEQ ID NO: 7489 - protein, 175 aa, Artificial Sequence; identical to SEQ ID NO: 7488
  Synthetic

SEQ ID NO: 7490 - protein, 175 aa, Artificial Sequence
  Synthetic
KEIEELVKRIEDEARRLKEEHKKSVREIEELLKRLTEEVRKLVERDKKLAEDLKDRNEDEKRLTEVLRESEERIRELVKRAKEVLEESRKRSEDLARENRKVLEDLRREVERINVDDEMLRLLEKVLRDWEEIVRRVKEANDDVNRRVEETLRDLKRKLDRSLEDSERIIREVAT

SEQ ID NO: 7491 - protein, 175 aa, Artificial Sequence; identical to SEQ ID NO: 7490
  Synthetic

SEQ ID NO: 7492 - protein, 184 aa, Artificial Sequence
  Synthetic
SVEDELRKVIKENEDVLREVEERVETVIKRNREVIEEVAREVERVIEETRRLLKEIEKAGVDEDELRKVEERVRKHAEELRKILEDLRRSSRKLAEEARDILRDLKRTSDELRKEAEKVTKDGDSEESIKRLLEKIRKHSEEVKETIRRLLEKIEEHTERVKREIDKMLRSNEDLMRRIKEEAE

SEQ ID NO: 7493 - protein, 184 aa, Artificial Sequence; identical to SEQ ID NO: 7492
  Synthetic

SEQ ID NO: 7494 - protein, 184 aa, Artificial Sequence
  Synthetic
SIKEKLDEAIERNERVLRRVEEEVRKSNEKNKEVLRRVSEEVRKVIEELEDLLRKIAEKGVEEEKLKRLRDELDKIRRELEKRLEDLERSTRDLVRKLERILEELKRTSDELRKEVEEVDKRGTSDETAERLLRKIEKHSREVDETIRRMLEEDERHIKEVEDTIREMLERLKRLIDEAEKDAK

SEQ ID NO: 7495 - protein, 184 aa, Artificial Sequence; identical to SEQ ID NO: 7494
  Synthetic

SEQ ID NO: 7496 - protein, 182 aa, Artificial Sequence
  Synthetic
DEVREVLKKIRELIKTNREHVTRLLRTIEELSRRSEEMIRRILEEIEKLIKDVRRLTEEGELTEEKAEKLRRDVEEIVKEAEKRLRDSNEEVKRLVDEHREVNKDLERRLEDEKRRLKEENLPEEMEKLLEEAIKEAREDSRRSDREVEEVLRKHKKVNDRVREEIERVLRKLEELLKKDRT

SEQ ID NO: 7497 - protein, 182 aa, Artificial Sequence; identical to SEQ ID NO: 7496
  Synthetic

SEQ ID NO: 7498 - protein, 182 aa, Artificial Sequence
  Synthetic
SEVDEIVRRLEELIRRNTEKVERLLERHERLIRELKERVKELLRKHEELAKEITELTKRGESTDEVIEEIRKRSDELNRRLEETLKRIRDDSRRTLEDLKRHSEKSRKDLEELLRDAERKGTGKEARDRIRKVLEELKKKNKELEERIRKVSKELEKVLEDVKRESEKVSKELRERLERSKT

SEQ ID NO: 7499 - protein, 182 aa, Artificial Sequence; identical to SEQ ID NO: 7498
  Synthetic

SEQ ID NO: 7500 - protein, 185 aa, Artificial Sequence
  Synthetic
SELERLEKEARDIVENLKRVLEELAKDVKRLLKESDELLKDLREKVREILERIEELARRNISEELVKEVTKRVRDEVERLRRRLEKVHRDHERTVKRIDEEIRRHVERSEEEVKRVEDEVRRRNMDETAKRELERLVKELRDVHREVEKRLKELAKELREVNKRIKDDLDRLVEALEEVLDRVRR

SEQ ID NO: 7501 - protein, 185 aa, Artificial Sequence; identical to SEQ ID NO: 7500
  Synthetic

SEQ ID NO: 7502 - protein, 184 aa, Artificial Sequence
  Synthetic
SELEELKRRIDELLKENEEILRELEERVRRLNKENRDLLRKLEEEAKRLVEEVRRVAEEGRSEEVLDALRRELERIVEEVRRRIEESLKKVEDLLRRAEEVIRETHEKLRKVAEEVREELKRRRVTEVKERIEKVLKDLERRNRESEKEVRRLLKELKESIDDSRRRVDELVKRLRKVLEDIRR

SEQ ID NO: 7503 - protein, 184 aa, Artificial Sequence; identical to SEQ ID NO: 7502
  Synthetic

SEQ ID NO: 7504 - protein, 177 aa, Artificial Sequence
  Synthetic
SAEETLEKLIRDLEKSIRKSAEDLERLIRELEKSVRDSAKLLRDLIREVRDVVRDVVRAKGDREEVKEIRDRVEKAVEKLERVIKESEDRLKELVDRARKVIEDSKKELDEAVKELERRKADKDVAERVKELDKRNKDLLKRLEEEVRRLIKENERLLRELAKEVKELLERIKRAAG

SEQ ID NO: 7505 - protein, 177 aa, Artificial Sequence; identical to SEQ ID NO: 7504
  Synthetic

SEQ ID NO: 7506 - protein, 177 aa, Artificial Sequence
  Synthetic
SAEDKLRELEKKLRKSIKESADRLRKLNEELRRSVRESAERLKELIREVEEVLRDVVRKRGRTEEVERLEEEVEKLRRELEKVIEDSERELEEHVKRTKEVIDDSKRLLEEMVEELKRRKATEEVEDEVRRLDEENKKLLEDLKRSVDELIERNKRLLEELTKRVKELLDKIRKTAE

SEQ ID NO: 7507 - protein, 177 aa, Artificial Sequence; identical to SEQ ID NO: 7506
  Synthetic

SEQ ID NO: 7508 - protein, 177 aa, Artificial Sequence
  Synthetic
SMEDSLRELIRKLRESVKRSAEELRRLNKRVEDSIRDSARKLRELIRRVEEVVKEVVETRGRTDKVDRIKKKVDDLREKLERLIRESEELLERHVEKTRRVIERSKEELDKVEEDLRRREARERVEDDVRRIDDENRRLLEELKKSVDELDKRNEELLRRAEKEVRDLLREIREAMR

SEQ ID NO: 7509 - protein, 177 aa, Artificial Sequence; identical to SEQ ID NO: 7508
  Synthetic

SEQ ID NO: 7510 - protein, 178 aa, Artificial Sequence
  Synthetic
DAEEELERLLRESERVSRDSARRLRELLKKLRRSVERSRREIDRLLKELEDVIREVIKRKKEVRELVKKLRDDLEDLTRKLKELVKRSEDLLRKLEEDIERLIETSRKRNKELEDRIRERKADKDLAREVEKVVKEDEDILRRAEEEVERLIETNRDLLRKVEREVKELVEKVEEDER

SEQ ID NO: 7511 - protein, 178 aa, Artificial Sequence; identical to SEQ ID NO: 7510
  Synthetic

SEQ ID NO: 7512 - protein, 182 aa, Artificial Sequence
  Synthetic
SELEELKREVDELTEEHKELLKRLTERVKELSERHKELLERLRERSERLVRRIRELAKRGEPKKDLVRELEELLKENNKLLEDVDREMKKTNDELREEIDRVRRRMEKTNKELEKTIKEVNLDDEVLRKAEELLRRNNRVIEEIEKRLRELLKENNDVIKEIRERLEKSNKELRDVAREVAK

SEQ ID NO: 7513 - protein, 182 aa, Artificial Sequence; identical to SEQ ID NO: 7512
  Synthetic

SEQ ID NO: 7514 - protein, 182 aa, Artificial Sequence
  Synthetic
SELEELKKKVDDSIRENERLLRELTEDVKRLSKEHKDLLKRLEDKVEELIRRARELAKRGEPKRDLFDELRKLLEKLRKDIEKAKREMERTNTELEKKIRDALRRTTELDKELEETIRRVNLDDDMLEKAKKVHDEHRKSVEESTERLKELLRRNNEVIKDIARRLDELLRKLEKVVKEIAK

SEQ ID NO: 7515 - protein, 182 aa, Artificial Sequence; identical to SEQ ID NO: 7514
  Synthetic

SEQ ID NO: 7516 - protein, 182 aa, Artificial Sequence
  Synthetic
DELRELEEEVRKSIETNRELLERARERVERLSEEHRKLLEKVKEDSDRLVEEVKDLERRGEPKTDLARRLDDLLRKNNDILRRLKEDMKRTNKELEDLIRELVKTTRDLDRRLKKLIDDLNLDDEVLRRARTLHDEHRRSVEESERRLKELLERNNEVIKDIERKLDKSNKELKDEAEKVKK

SEQ ID NO: 7517 - protein, 182 aa, Artificial Sequence; identical to SEQ ID NO: 7516
  Synthetic

SEQ ID NO: 7518 - protein, 182 aa, Artificial Sequence
  Synthetic
SELEEIEKKVRELTKRHRELVERVRKTVKELIETNRRLLETLTERIKRVLEEVRDLERRGEPKRDLKKRLEDIIRRLAEDIERVKRETDKLLEELKRIIEEVEKEMRETNKELDKEIKDANLDDKALEEAKRVLRENNEVIKDIKRRLDELLKELEKSVRESEERLRRLLEEVKRVIEEVAT

SEQ ID NO: 7519 - protein, 182 aa, Artificial Sequence; identical to SEQ ID NO: 7518
  Synthetic

SEQ ID NO: 7520 - protein, 182 aa, Artificial Sequence
  Synthetic
SSDREVEERVKRLTDRHRELLKRVEEEVKRSIKRNKDLLDELRKESEKLVKEARDLARKGKPKRDLARELRKLLEDNNRKLEEVDRETDELDKRLKERIEELEREAKKTNDELRELIKRLNLDEDVLRLAEKLLKDNNKVIDEIRRRLDRLHEEHKKSVDDSREELKKSNKKLEEVVREIEK

SEQ ID NO: 7521 - protein, 182 aa, Artificial Sequence; identical to SEQ ID NO: 7520
  Synthetic

SEQ ID NO: 7522 - protein, 185 aa, Artificial Sequence
  Synthetic
DDLREVEKEIRRIAEESKKLLEEIERAVEKILRDSRRVLEELARRAKRLLEELDKLKKNGLDKEDLERKLRELERRLEELLEELERISERTKEELKRLEEKLKKFSEDSDRRLRKILEDLERRGVDEDVRREVKRLVDELREVDRKIEEDLRELVRELEKVNREIRKRIEELVRRIKEVADEVRR

SEQ ID NO: 7523 - protein, 185 aa, Artificial Sequence; identical to SEQ ID NO: 7522
  Synthetic

SEQ ID NO: 7524 - protein, 184 aa, Artificial Sequence
  Synthetic
DMEEKMRRITEEWRRVTEEIERRHREVIKKWRDVSREIAETHRRVIDELRRVLERIAERNPSEDLLRKLKKEIEKLERDNRKLIDDDRRLLERVERKNERLIREDRERLKEAEKRIKEVEDRGIDKDIVDKELERLREEIRTSKKESDEVVKENEELIRDSKRKSEKVVRDNKRVIKEAEEKAK

SEQ ID NO: 7525 - protein, 184 aa, Artificial Sequence; identical to SEQ ID NO: 7524
  Synthetic

SEQ ID NO: 7526 - protein, 182 aa, Artificial Sequence
  Synthetic
DEIEELLKEIKKLVDELRKRIEELAREHKRLADELRKKIKKLKDEHDRLVRELEKLAEKGRSDDKVLKKIEDDSKRTREDLERAIREAEDRSRRTSEDLERAIKEAEDRLRKLAEDLKRRGGGKEVKDKLDKLREELKRVADKLRDDLRELHKRLKEVADRLRKLLEDANRTLREVLKETKR

SEQ ID NO: 7527 - protein, 182 aa, Artificial Sequence; identical to SEQ ID NO: 7526
  Synthetic

SEQ ID NO: 7528 - protein, 177 aa, Artificial Sequence
  Synthetic
SAEESAKRLKEELKKSLDRSREELDKLRKDNEKVLRDVEERLRRLIEELKKVLEDIKKDKGRTEEVEKLRKKVEDMARELKERLKDLERSLRELEKKLRRELERSEEEIRKLERDLDREEVREELEKRVEKLLRDDKRRLDELRKESEDHIREIEDTLRRIEEEVKRLLKEMRDKLK

SEQ ID NO: 7529 - protein, 177 aa, Artificial Sequence; identical to SEQ ID NO: 7528
  Synthetic

SEQ ID NO: 7530 - protein, 185 aa, Artificial Sequence
  Synthetic
SELETIARRVEKLNEDVERLLREAKKEADRLIKENEDLLREAERKVREIIERIRRLAERGEPKRDLLKEIEELLRELKETVERLIKTSRDLLKRLAELVEKVKRELEDSLRKLKKEAEDLIRKNDDKEVKEKLTRLLKSHEDVIREVSRRLKELLDRYREVSDRIRKTLEELLKELRRVVEEVRK

SEQ ID NO: 7531 - protein, 185 aa, Artificial Sequence; identical to SEQ ID NO: 7530
  Synthetic

SEQ ID NO: 7532 - protein, 185 aa, Artificial Sequence
  Synthetic
KDLEEIERKVRKLNEDDKKLLDDLRKEVEKALRRNEESLRKSREDAKKIIKEIEDLARRGEPKRDLLRKLEEDLKRVEDEVRKNEKRSRDLLDRLRRILEDLIRESERSADELRRDMKRLIDDKDDKEMKDALRELLRSHRKSSEDTKRELERLLREYEKVSRDVKRDHEKLLREIREVIEEVKK

SEQ ID NO: 7533 - protein, 185 aa, Artificial Sequence; identical to SEQ ID NO: 7532
  Synthetic

SEQ ID NO: 7534 - protein, 185 aa, Artificial Sequence
  Synthetic
SELDEIRRRVEELIETDKDILRRIAEEVRKALEDNKKSLRESEEEVRRLLEEIKKLADRGEPKRELLERLERLLEELRKKVEENERRSKKLARELRERAKEIKKRSDDLNRELRKRMKELIDRIDDEEMKKLLEDLLRKSEDSTRETRKRLKELLDRYEEVSKKIKKRHKELIEELRKVIDDVRR

SEQ ID NO: 7535 - protein, 185 aa, Artificial Sequence; identical to SEQ ID NO: 7534
  Synthetic

SEQ ID NO: 7536 - protein, 182 aa, Artificial Sequence
  Synthetic
RVEETLTRALKEIEEVIRRVDEESKRTIRSHREVIREVDEIHTRLLERLKKVIDDIRRRNVPDDDLRRILRELEEHIKRSKEELEKSLRDLERHSDELRRRLRELLERLRKIVEELDRAKSDDDRLLKEARDEVRKIIEEIRRLLEEHERTVKKLNEDIRKRLEESERTVEELLKRLRDRAR

SEQ ID NO: 7537 - protein, 182 aa, Artificial Sequence; identical to SEQ ID NO: 7536
  Synthetic

SEQ ID NO: 7538 - protein, 182 aa, Artificial Sequence
  Synthetic
SMEEELKRLLESHEKVIREVRKTSEDTLRSHRKVIEEAKEEHKKLLEEIKRVVERVRKRNVPDEDLKRILEEVRRHVEESKKRLRDSFEELRRHSEELERRLRESKKRLERLVRELEREDSRDETVLREARKEVEKLNEDIRRLLEEHKRVVDELNKELRRLLEESRRRVKELIRRIEEEAR

SEQ ID NO: 7539 - protein, 182 aa, Artificial Sequence; identical to SEQ ID NO: 7538
  Synthetic

SEQ ID NO: 7540 - protein, 182 aa, Artificial Sequence
  Synthetic
SVEERLRELIESHRRVIEKVERDSRRTIRSHEEVIKEVKKISEDTLREIRKVIEEAKKRGVPDDELRELLKRLKEHSEELKRRLEESLKDLKRHSDELRKRLEESLRRLKKLIEELRRADSRDETLLRDAERRVEELNEEIRRLLEKHVRDVDRLNKEIRDLAREHKERAEEIIKRIEEKAR

SEQ ID NO: 7541 - protein, 182 aa, Artificial Sequence; identical to SEQ ID NO: 7540
  Synthetic

SEQ ID NO: 7542 - protein, 186 aa, Artificial Sequence
  Synthetic
SEMERLERRARELLRRNEELMDDLRRKAEELLKRNDRLVKEIEKKVREVLRRIEELKRRGEPKREVARKIEEILRRLEETLRRIKEESDRLDEELKRELERVKRESEELDRELRKLIEDVERRVTDSKRLEELLRRLNEEHKRISDELRKLLDEALERHRELSRRLEEELERLLREIERLVEEVTR

SEQ ID NO: 7543 - protein, 186 aa, Artificial Sequence; identical to SEQ ID NO: 7542
  Synthetic

SEQ ID NO: 7544 - protein, 186 aa, Artificial Sequence
  Synthetic
DDMERLEEEIKEILDRLRRLLERNRRVNKEIDERSKELVKRLEEKARRLLEELRRLKDRVTDKETLERRLRELLRELERLIREVEERLKKLHEDHKRHIERSDEEMKRLLDELRKRIEDVKRKLERVKELEKKAEDVLREVKKVIDEVRTDSKRLNENLRESIKDVKREAERVLREVEEAIREVER

SEQ ID NO: 7545 - protein, 186 aa, Artificial Sequence; identical to SEQ ID NO: 7544
  Synthetic

SEQ ID NO: 7546 - protein, 186 aa, Artificial Sequence
  Synthetic
REAEELKKEVDRILEELKKLLKENEDLNRDLDRKSKELLKENREKVERLRKELRELKDKVTDKDKLAKRLEELLKDLADHVERSRKKLEDLHREHEDHIRKSEEELKRLLKEVEDLIRELRERKKDVKELEDEAKRLKDEVEKLIEEIKRKSDELNKNLRDSIRRVEETTRDLLRKIKKLIDEIKK

SEQ ID NO: 7547 - protein, 186 aa, Artificial Sequence; identical to SEQ ID NO: 7546
  Synthetic

SEQ ID NO: 7548 - protein, 171 aa, Artificial Sequence
  Synthetic
SIEEALEDLARRIKKILDDLRREAERLLREVEELLKRVEEANRRLRRTIEEALKRLARDKKKADEIRRRHEELEKRSKENLDKIREDLERLKKRLEDELKRIEEELRKLREEGVEVETAEREIRRILEEIRRLAEEARRRIEEVLKRIKKHLEESKRRNEESLERIEREAR

SEQ ID NO: 7549 - protein, 171 aa, Artificial Sequence; identical to SEQ ID NO: 7548
  Synthetic

SEQ ID NO: 7550 - protein, 179 aa, Artificial Sequence
  Synthetic
SVEETVDELKKRIEKILREIKRVNEELAKRNEDVNEEWRREVDKMIKDIERILRDVLRKEDSEDLRRRVEEVKRHLKRNKDEVEKKSKENKDRVRTSHERLRDLLRRIRERLEELERRLKDLDIEKLKRDAERILEEIKRAVDTSREESERTLKELRDMVKESRKDAEEVLERIDRDKR

SEQ ID NO: 7551 - protein, 179 aa, Artificial Sequence; identical to SEQ ID NO: 7550
  Synthetic

SEQ ID NO: 7552 - protein, 179 aa, Artificial Sequence
  Synthetic
SVKETLEDLIKKIRDLLKRVRDENKRLAEDNERLNREVEKRNRELIKRIEDELEEVRKREDSERVRKIIEDVKRRLDRSHEEVKRISEKNRRDVKRSTEELEKLAEDAERRLDELDKLLKDLDIRDLKREIEKILREIKKALEDSRRKSKETLDRIREVLKTSEEDIKRILKEIREAAR

SEQ ID NO: 7553 - protein, 179 aa, Artificial Sequence; identical to SEQ ID NO: 7552
  Synthetic

SEQ ID NO: 7554 - protein, 178 aa, Artificial Sequence
  Synthetic
SREEVVKEIEKRVEELNRRLEETVRRVIEEMKRLNKESKEVSKKIVDEVRKLLDDVRREKGETEELKRLEERIREAEKTSKKLNDDHERESRKLARRLEELLERHKRETRRIIEEMRRAKLEEDELRRLLERIEKTVRELKREIEKILEDATRTVEDLKRKNEELLRRLKKLADDVKK

SEQ ID NO: 7555 - protein, 178 aa, Artificial Sequence; identical to SEQ ID NO: 7554
  Synthetic

SEQ ID NO: 7556 - protein, 184 aa, Artificial Sequence
  Synthetic
RVEEILRKASKENKEVIDRDRRLAEEATELNKRVVEEDRKVMKEVTKELEDVLRRAREEGLDEEKLRRLEEELRRLTEEWREEIRKDEKTVEELRKKWEDVSRELERRHRELERELKKSLDDGNTDKLLRELEERSKKVLEESKKTSEDLLRESEKHVRDWREKSRKLEEKVKRLVKKVKDTTD

SEQ ID NO: 7557 - protein, 184 aa, Artificial Sequence; identical to SEQ ID NO: 7556
  Synthetic

SEQ ID NO: 7558 - protein, 184 aa, Artificial Sequence
  Synthetic
RAEDIIRELKRRNEEVLERDRELMERAARELREVLERLKDIAREASKELKRVLDELRKRGLDEEDLRRLEKELRDLEREIDRTLKEIEKRLRKLKREWEKVSDDLRKKHEDLIKKLKDDLRRGTSDEVVERLARESERVLRESEETSKDLKRKVDEELRRIEDTIRRLLKRVKDLVKKIEDTSR

SEQ ID NO: 7559 - protein, 184 aa, Artificial Sequence; identical to SEQ ID NO: 7558
  Synthetic

SEQ ID NO: 7560 - protein, 184 aa, Artificial Sequence
  Synthetic
RLREIIEKLRRDNEKVIEEDRRVAEEVRKALEKVLREDRKMADEVTKELERALKELEDRGLDEKKLEELRRRLRKLVEDWKRVSERVEKELRELTEEWEKVSRDLEKRHRDLVRKLEDDLRKGTTDEVIKELEKRSKDVLDESRDESRKLLERVERLLKKIREDSERLLERVEELLREAEETAR

SEQ ID NO: 7561 - protein, 184 aa, Artificial Sequence; identical to SEQ ID NO: 7560
  Synthetic

SEQ ID NO: 7562 - protein, 184 aa, Artificial Sequence
  Synthetic
SVEEIIRKLEEDNRDVLRRDREVAKKVEDENRKVAEEDDRIVRRVAEELKRVLKELEDKGLEKRELDRLRKELKELVERLEDVSRRMKETVKRLRDEWEKRSRELEKTVRELVKKLRDELRKGISEKVIEELKDESRKHLEELEKDSKRLEDESKKHLDDWRRTSEKLLEDVERRVREIEEESR

SEQ ID NO: 7563 - protein, 184 aa, Artificial Sequence; identical to SEQ ID NO: 7562
  Synthetic

SEQ ID NO: 7564 - protein, 179 aa, Artificial Sequence
  Synthetic
SSEEVVRELDKEIRKSIEDLKRIVRENEEENKRSVEDVREKAKRNEERLRKVLKEADERKRDEDLERKLRTVKRELERSIEELEKHIEKSNRDVKKSAKELEDHLRDSKRRMKELAERLKDVDIRELAKRVKRIVDENKRVAEEHHRKVERIVRENEKLLKEHHDRVEELVRRIKEEVE

SEQ ID NO: 7565 - protein, 179 aa, Artificial Sequence; identical to SEQ ID NO: 7564
  Synthetic

SEQ ID NO: 7566 - protein, 179 aa, Artificial Sequence
  Synthetic
SEEEEVRRVLEELEKKVKRLTEEHRRRLDELRKKVKDHSRKNKELLERLREEIKRIKGAPSEDIDRIEEEARRRLEESERSSRELKKDLERTLEKLRRDSKRLVEEMERVLRELRKRGGSEEAKRVLEEVEKRVRELVKTNEDVLREIEEDVRRLVKENEDSIKESKDRLRELLERLKQ

SEQ ID NO: 7567 - protein, 179 aa, Artificial Sequence; identical to SEQ ID NO: 7566
  Synthetic

SEQ ID NO: 7568 - protein, 181 aa, Artificial Sequence
  Synthetic
DEVEEIRKILEELAREAEKVVRETRKLLEDIRKEVEELNDRNRRLLEELERRVRDIKRRGTSEEKLKELEDRVEKAIRESREELKRLEDKIRKRIEEDRRKIEKLERKVKKVIDEIRKRTRRDEIRRVVEDVERRLRELLDRWRKVSEEVEKRLKELIDELRESIERSADRLRKLIEELKR

SEQ ID NO: 7569 - protein, 181 aa, Artificial Sequence; identical to SEQ ID NO: 7568
  Synthetic

SEQ ID NO: 7570 - protein, 181 aa, Artificial Sequence
  Synthetic
REVEEIKKTLEDIRREAKELLDRTRELLDRLRKSVEELNRDNERLLREAKDEVEKVKRDGTSKEVVDELMRKLKRLIEESKRKLDEHVKRTKEVIERDREELKRLKRKLDDTIRKIRSRTREEEIKKVVERVEREIEDLIRRWEEVSRDVEEKLKDLNKKVEESIRRSAKDLRELLREVEE

SEQ ID NO: 7571 - protein, 181 aa, Artificial Sequence; identical to SEQ ID NO: 7570
  Synthetic

SEQ ID NO: 7572 - protein, 175 aa, Artificial Sequence
  Synthetic
SRAEKVLKRVTDLIRELLRTVTELVRRNREVIEELLRRVAKLHRDNRELNKKVLEDVRRDGPDDRLVETLKRHNEEVTKTLERLKRELEKHLEKSARDVEKLKKDLRRVAEEVRRELGDNEVVDELRRRIREVEKTLDRLLEESEERARRVLKELDRLLEESRKSSREVIEEAKR

SEQ ID NO: 7573 - protein, 175 aa, Artificial Sequence; identical to SEQ ID NO: 7572
  Synthetic

SEQ ID NO: 7574 - protein, 180 aa, Artificial Sequence
  Synthetic
SVEELLKKLEKENRDVIREMKKLLDELEEENRRVIEEWRRITKELEDRNRRVREEIPESDELRKLVEELKKHLEDDKRRAEKAARDLKDHLRRLEETIRKMEEELKRHLDKLRRDIERGTDEEIIRRLVKHNKELVDEIRKTIERLREHNRKLVEKVREDVKRSTKHNRDLVKEVRDRAK

SEQ ID NO: 7575 - protein, 180 aa, Artificial Sequence; identical to SEQ ID NO: 7574
  Synthetic

SEQ ID NO: 7576 - protein, 180 aa, Artificial Sequence
  Synthetic
SLEELLDRLRKLNETVIRDMERVLKELEERNRKVIKEDRDVLEELARRNEKVKRDIPPDDELRKLAEDLERHLRDWEDKSRKLEERLRRHLKEVKETIEKIEEELKEHLRDVERKIREGTDEEIAKELVKHNEKKVREIKKTIDDLRKHNEELVKEIRETSERLREHNERLLREALRRAK

SEQ ID NO: 7577 - protein, 180 aa, Artificial Sequence; identical to SEQ ID NO: 7576
  Synthetic

SEQ ID NO: 7578 - protein, 184 aa, Artificial Sequence
  Synthetic
DLEEVVKDLERKLRDVARKDRKLVEDSRKILKDVVDKDRELVERSRRILEEVLERIRRRGTDETTVKDIKRRLDEVLKENDDDSKRATEELRKLLEDNKRKSDEARRRIKKILDEIKDETRKGTSRDTARKLLEDVADELRRWLEDSERLHKENKDTIEKWLRRSRKLHEENRKLIEDLLRTVT

SEQ ID NO: 7579 - protein, 184 aa, Artificial Sequence; identical to SEQ ID NO: 7578
  Synthetic

SEQ ID NO: 7580 - protein, 184 aa, Artificial Sequence
  Synthetic
SLEDVLRELKERLERSHRKLRELVRRLEEDLKRVLRELEKIVDEVRKINEDVRREVERRGVDEDTLRRITKLSEDSLREAEELLEDIRRVVEKIKRELEKMLEEHRRTLEKIEKELDEVRRRGEDEDIVRKLLEDVRKLVEELDRRAKELEERVKKVVDELLEKARRLLEKNRRTVEKILRDVK

SEQ ID NO: 7581 - protein, 184 aa, Artificial Sequence; identical to SEQ ID NO: 7580
  Synthetic

SEQ ID NO: 7582 - protein, 182 aa, Artificial Sequence
  Synthetic
SEVEKLLREVEDRDRRILKKVKELLDEVRRLIEDHLRRSEDALRRVRKRIEELKELVERGDLDEETLKKVKDELRRLIEELRKHAEELKRRLEELERTLKEELDEWKKELDKLLEDLRKDEKSERLEEMLRRLKKSIEDSVREVRKVLKEAKDIARKVIEDTKRLLEELKRIMKKVLDELRK

SEQ ID NO: 7583 - protein, 182 aa, Artificial Sequence; identical to SEQ ID NO: 7582
  Synthetic

SEQ ID NO: 7584 - protein, 182 aa, Artificial Sequence
  Synthetic
SEIEELVERVKARDEKHLRDSEKLLEEVKRRDRKLEEDSKKLLKDVKDLLRELEEVAKRGEVDEETVKDLERRVREMLKESRDRTKKWADELKELVERLRRHIEEWRKELKRELERLEEESDDERLRKLLDDLRKSIEESRKRSEEILREAEDTMRKSVETNERLLEELERELRRVVEELRR

SEQ ID NO: 7585 - protein, 182 aa, Artificial Sequence; identical to SEQ ID NO: 7584
  Synthetic

SEQ ID NO: 7586 - protein, 182 aa, Artificial Sequence
  Synthetic
DEIERVLEEVERIDRELLKRSEDLLREVRERDKELEERSKRLLEKARRLIETLRDMARKGEIDEETAKRVEETLRREVEKSREDTRRWEEELKELLKRSKEETDRWKEELRKKVERLEDKDKKERVKTIIDEARKSIDDSVRENKKVLDELKETIERSKKKNEDILREIEKILEEVREELRK

SEQ ID NO: 7587 - protein, 182 aa, Artificial Sequence; identical to SEQ ID NO: 7586
  Synthetic

SEQ ID NO: 7588 - protein, 182 aa, Artificial Sequence
  Synthetic
KDVDELLERVKRRDEELERKVEKLLKRVRDLIREHDEKVKELEDEVRDRIKKLLEMAERGEVDEETVKDLKRRLKELLDKLRKETEDLKRDLEELIKTLEEEIRRWKEKLEEDAKRLRDKEKSEELERVLRELKRSIETSTRRLRKILEELRRILEESERKVEEVLKELERIAREVEERLRT

SEQ ID NO: 7589 - protein, 182 aa, Artificial Sequence; identical to SEQ ID NO: 7588
  Synthetic

SEQ ID NO: 7590 - protein, 182 aa, Artificial Sequence
  Synthetic
SDIEDVVRKVEEEVRDHNRRVEELLKRVERRDRRLEETVEELLKEIEDKLRRLKEMAERGEVDDKTVKDLKEELERLLRRLEREIREWEKELRRLVRELERETKELEDRLRRLIEELRRRERSERLEKLLRELEETLRRSKERVKEVLEDLKRTITESKRRLKKILDEIRKRLEEVERDLKR

SEQ ID NO: 7591 - protein, 182 aa, Artificial Sequence; identical to SEQ ID NO: 7590
  Synthetic

SEQ ID NO: 7592 - protein, 184 aa, Artificial Sequence
  Synthetic
SLEEVVDKLRRDSEESLKKNETVLRRVTKELTELLKRWREASERLKEELREVLERVRKKGLEEREVRKLEDRLRRLLEEDKRLLDEVKRRIEDLRKKWEDETRKVKERHEDLLRKIEEVRKRGTTEDTLRKLAEEVKRVVRDDEEKVKRLEEEVKEEVKKLEDDLRRSEERVERTIREIEKRAK

SEQ ID NO: 7593 - protein, 184 aa, Artificial Sequence; identical to SEQ ID NO: 7592
  Synthetic

SEQ ID NO: 7594 - protein, 184 aa, Artificial Sequence
  Synthetic
SVEDLVREVERRLKTVLDEDEEVLKRVEDESRESIKENEEVLREVSERLDKVLKDVRRRGLEERLVRDLERKITELRRKWDEDTKRAKEEHEKLTREWRKRSEELRKRIEDLLRELRERLKEGTSEEDLKRLEDRVEEEVRRAKRESDELLKRVRRTVEDDKRRLRELREEVKDLLERIREAEK

SEQ ID NO: 7595 - protein, 184 aa, Artificial Sequence; identical to SEQ ID NO: 7594
  Synthetic

SEQ ID NO: 7596 - protein, 178 aa, Artificial Sequence
  Synthetic
SEVDEVRKRSEKVVEENERRIEESERRIAKLVKEVRDVIEDAKRRVEEILRRLEEEMRKGIDEKTIKDLKEEIKKVLEDLERRIREIEKKLRKVTEDDRRTLKKVREDNKRLLDDIRRKLRSKDVLEEMRKTHERVIKEWERAHKEVNEKLEKIIRELEKVLEEVEDEAREVIRRLET

SEQ ID NO: 7597 - protein, 178 aa, Artificial Sequence; identical to SEQ ID NO: 7596
  Synthetic

SEQ ID NO: 7598 - protein, 179 aa, Artificial Sequence
  Synthetic
SASEDLERVLRELAKEVEKLLRESEKLLKELEDLARELLERDRKLLKELEEKVKRLKERRADEDKIRTLEKEMRDVLRESEERIRRLEETVKRVLDENKKRTDDLKKKLEDILEELERRNSAEERVLDDVRKRIEDLVRELKKVNEDIEKKVRELIERLRRSLEKSKEDIRRLVEELRR

SEQ ID NO: 7599 - protein, 179 aa, Artificial Sequence; identical to SEQ ID NO: 7598
  Synthetic

SEQ ID NO: 7600 - protein, 179 aa, Artificial Sequence
  Synthetic
DMSEELEEILRRLEEESRRHLRTDEELLRELEEKIRRLLREIEEILERLKKRIDEVKTRNTSEETIKKLIEDAKRVLEEIEEKVKRLVDEAREVLDTSRKTLRELVEKMRETLDRARKRNSAEERVLKRVKDRIDELIRRNEESLERTRDEIRKLIEELKKVLDRVKEEIEKLVEALKK

SEQ ID NO: 7601 - protein, 179 aa, Artificial Sequence; identical to SEQ ID NO: 7600
  Synthetic

SEQ ID NO: 7602 - protein, 179 aa, Artificial Sequence
  Synthetic
EMTERLERVLEELKRKSDEHIKTDEELLRRLEKKSRDHLRELEEILRRLEREAREVKRNRTSEEVIKELAKRLRESLERLRKTLDELVKDMERVLRTSERTLEELVRDLERILKELKDADSADREALKKVEDAIDKLRRDNERSLERTKREIERLIRENKDVLDKIEKRIRELIEELER

SEQ ID NO: 7603 - protein, 179 aa, Artificial Sequence; identical to SEQ ID NO: 7602
  Synthetic

SEQ ID NO: 7604 - protein, 179 aa, Artificial Sequence
  Synthetic
SADEKLDKILREMKKRSDDHIREVEKILRDLDREVKEILKKDEKLLRDLDRRVKDVKRRRSSEETIDKLIKEAEKVLRDSEDEVRRVVEKMEKVLRDLERTLKELIERLEEIVKRLKEERSADDEVLKRVEETVRRLVEENKKVLDRVREEIRKLIEELRDSLRRSEKRIRELADELRR

SEQ ID NO: 7605 - protein, 179 aa, Artificial Sequence; identical to SEQ ID NO: 7604
  Synthetic

SEQ ID NO: 7606 - protein, 182 aa, Artificial Sequence
  Synthetic
DLEDILREIARLIERLIDENRKVLEEIARRLKELIEELKKSLKRSEELLRRLEKELKDSGKKTEELTEKLKRILDESRKEIETLEEKLRRVLKKLKESLDKLVEEMKRTLEDLERKIRRDGPDKDLLRTLEKVAEDLKRRSERHIRELRRTLEDLERDVRRLLREDEEKLKRAAEEVKEAIK

SEQ ID NO: 7607 - protein, 182 aa, Artificial Sequence; identical to SEQ ID NO: 7606
  Synthetic

SEQ ID NO: 7608 - protein, 182 aa, Artificial Sequence
  Synthetic
DLEDVLRDIERLLRDLIRRNKEVLDRIRELIKKLIDENRKSLKRSKEELERLIRELAKSGKRDDRVLEKLKKVLDDSRKTLEELAKKAKETLDRIKKSLEELAKKLEDVLRELEREIRRDGPSEELLRRLREVLERLKRESEKHLEELKKILEDLERESRRHIEEDKRLLKELKEEVDERIR

SEQ ID NO: 7609 - protein, 182 aa, Artificial Sequence; identical to SEQ ID NO: 7608
  Synthetic

SEQ ID NO: 7610 - protein, 182 aa, Artificial Sequence
  Synthetic
SLEEVLKRIEDELRRLIEENKESLERSERLIRELKKRLEEVLRRIKKLLEELIRRLEESGKRDDRVRKKLKDVLDDLERRVREAVERLKKVLDDSRRSLEELVKKLKKELDRLRERVKRDGPDKKLLEDLKRTLDELRRESEEHIRRDERLAEELAREVEKLLKDMERILRELAKEVEDRIK

SEQ ID NO: 7611 - protein, 182 aa, Artificial Sequence; identical to SEQ ID NO: 7610
  Synthetic

SEQ ID NO: 7612 - protein, 172 aa, Artificial Sequence
  Synthetic
DASRRVEEKLKEVEERVRKLLEEDRKRLKDSKRKVEELIERDKTELKKVKDRADGGVPKDEARDELRKLKEKSRRDLERLADDLRRLNEKSKEDLKKIKREAEKLLEELEREKGADKKVIDTVRKRLKELLDELKKSVEDTHRENRRVLKELEESHKRTNERLDDLLRELER

SEQ ID NO: 7613 - protein, 172 aa, Artificial Sequence; identical to SEQ ID NO: 7612
  Synthetic

SEQ ID NO: 7614 - protein, 185 aa, Artificial Sequence
  Synthetic
SLEDVVRRVREELERLLRTHEEVIRRVEEELRRLLEEYRKVSKEIEEDLRRLLKEVRDRNIEDEKLRRLEKKLRELIKRSRELLEELRRRAEEIVRRLRDSLRRLKEDIRRIVEKIDKDREDGRPVEDLLREIKKELEDVKRKVDKLNEEVERILKKAKDEVKEAIKENRDRLRRLRDEVRRLKK

SEQ ID NO: 7615 - protein, 185 aa, Artificial Sequence; identical to SEQ ID NO: 7614
  Synthetic

SEQ ID NO: 7616 - protein, 185 aa, Artificial Sequence
  Synthetic
GLEDVVRRVEKRLEDLLRRYKKVSERLEREHRRVLDEYRKVSEEIDKILRDLLKEVRDSNIDEKKLRRLEEELRRAREESKKLLRELEEDIKDNLRKSEKLLEELRREAERLREEIEELRRRGEPVEELLKEIEKLLKDIERTVEKALKENKDSIRRSKEKVDRMIKRNRELAKELEDKVRELKR

SEQ ID NO: 7617 - protein, 185 aa, Artificial Sequence; identical to SEQ ID NO: 7616
  Synthetic

SEQ ID NO: 7618 - protein, 180 aa, Artificial Sequence
  Synthetic
SIEDILRELADTIRRLTEESEKILRKAEELLRRLTEEWRKSLKDLEDLIRKLIEEIRRRGLPEKDVRKIEEELKRLIEENKERLDRITRKLEEILKELRTSSDRLREELEKLLRDLKRLKDRDGEEEIKKLMDEIRKKVEKHLREVEKVLREVEEEVKRELRKSEELARRIEEKIRREKK

SEQ ID NO: 7619 - protein, 180 aa, Artificial Sequence; identical to SEQ ID NO: 7618
  Synthetic

SEQ ID NO: 7620 - protein, 180 aa, Artificial Sequence
  Synthetic
SEVEEALRRMEETIRRVREKLKKSLEDMRREIERIRRELEKSLEEFERDIERITRDIRRRGPGDKELDDIRKELEKKREEHHRRLDEIRRKLEEDLRRHHKDLDDIRRELEKRKEDLRRAKLVSDDALRKIEELVKRLDRELREVNKEIEKVVRELKEELKRVDDEIERLVRELRKEAER

SEQ ID NO: 7621 - protein, 180 aa, Artificial Sequence; identical to SEQ ID NO: 7620
  Synthetic

SEQ ID NO: 7622 - protein, 185 aa, Artificial Sequence
  Synthetic
DEIDEIRKVAERLEKEARELVKENEDDLKRHKERVDEIVKKIEEKVRRLEETARKLKEERRDSEELERVIKRLRDELRKLKEEVRREIKRLEDNHKELRDDNKRKNEELKKKVDDLEREVRRLPETEELKKVLEDLRRVLEKVHKLNREVLDKHREIVKRLSDKIKTVLRKLEEILKRAEEELRR

SEQ ID NO: 7623 - protein, 185 aa, Artificial Sequence; identical to SEQ ID NO: 7622
  Synthetic

SEQ ID NO: 7624 - protein, 179 aa, Artificial Sequence
  Synthetic
SIEELLEEVERVVREVERRLDELLERNRRVIEEVRRRDDKLTKENEDVIRDVRRAGNISDKATDELRRSHEAERRRSEEDKKRLDDSHKELEKEVEKTKRRIREELKKERDKARRSRRPEEDLIREVEKRLEDIKDLLRRMKEEVERHSREVEDRLRRSEERWRDHSKKVKERLDRATT

SEQ ID NO: 7625 - protein, 179 aa, Artificial Sequence; identical to SEQ ID NO: 7624
  Synthetic

SEQ ID NO: 7626 - protein, 173 aa, Artificial Sequence
  Synthetic
SLEEEVRRLLEEIKRLADENRDYVRRSLETNKKTNKDNRDEIRKALERIKRLAREIERIRKEDLDRTIEKLKRELKKLREDNEKRSKENEKSDRDVTEENKRRAKRIRDELRRTGVDEKLLREVEELLRRVEEEHERLHRENRKLNDKDRETLERLIREVDDLLRKLEEEARR

SEQ ID NO: 7627 - protein, 173 aa, Artificial Sequence; identical to SEQ ID NO: 7626
  Synthetic

SEQ ID NO: 7628 - protein, 174 aa, Artificial Sequence
  Synthetic
RVDELLEEVRKLVKDVHDTTEELLKEVERRLDEVKKRVDRSNEEVKELVKEAVKRSGETEEIRRLDEELRKAIEKDKRDLEKIEEDLRREADKIRRENEELKRRLEEEEDKIKKRPTDDTKIEELLRRIEKYMRESKERIDRLLERIDEVLEKNERDVRKLLEDIRRMIEKDDT

SEQ ID NO: 7629 - protein, 174 aa, Artificial Sequence; identical to SEQ ID NO: 7628
  Synthetic

SEQ ID NO: 7630 - protein, 185 aa, Artificial Sequence
  Synthetic
DTIERLLEDIKRILDKNRRDARRVLEEIKRSNEKNREDIKRIEEEIDRLLKEIKKKAEEDRSGEEAKREEEKLKREIERLERELEKIERENRKKMKEIRDDLDRLRRDNERRRREKKKEMDRRITNKDVVKEVEELLKRVEETHRKLNKEVEELLERDERDLRRLIDDVRRLLEEVRKTLEDLRR

SEQ ID NO: 7631 - protein, 185 aa, Artificial Sequence; identical to SEQ ID NO: 7630
  Synthetic

SEQ ID NO: 7632 - protein, 182 aa, Artificial Sequence
  Synthetic
RELEEARERIKELLEEIKDEVRRWREKIKRLLEDSRRKAERLKEDIKRLLEEIKKLSDDGRLDERIEERLRRELERIKRELEKYRKELEEDTRRDEERLRKIKEDLDERMRDIRRELKERVTDEDALRDIERLLREVDDAFRRLVEELRRLNEEVHRTTDELIREVEDMLRKVEEALKREKD

SEQ ID NO: 7633 - protein, 182 aa, Artificial Sequence; identical to SEQ ID NO: 7632
  Synthetic

SEQ ID NO: 7634 - protein, 178 aa, Artificial Sequence
  Synthetic
EEIERVLEEIKRTADEIRKEIERVLEKSKKLLDDHHEEVKRMLERIRDKAKKVTDRGGGSRELDKIKKDLEDELRRLEEKSRREHEEHKKELDKIKKKLRDTERDLERKLKEITDRDGEDKVVEELRKILERLKDLVRDLERKLDELNKRVRDRVEENRKELEKLLREARDRIRELER

SEQ ID NO: 7635 - protein, 178 aa, Artificial Sequence; identical to SEQ ID NO: 7634
  Synthetic

SEQ ID NO: 7636 - protein, 183 aa, Artificial Sequence
  Synthetic
SLEDRLREVLKRYEDRSRDLERELKRVLDEYDDSSRKVAEELKKVLDEIRETVERIKKDVDEKDLRRIKELLKRLEEEVKRTVDENRREAEEIKRKVKKETDENRREADERRRDLERRKGKPRREKEVADLVKKLEDDLRRTSDKVRRVVEEIKRRLEELERRYKALVKKLRDKLREIKEEVR

SEQ ID NO: 7637 - protein, 183 aa, Artificial Sequence; identical to SEQ ID NO: 7636
  Synthetic

SEQ ID NO: 7638 - protein, 181 aa, Artificial Sequence
  Synthetic
DVEEELKKVDDKVEELVRKVIEDIRRALERVRELVERVRRKLEETNKKLKKLVEDIVRKKGRRKELEETLRRNHERLTRATERLKELEERLRKSVEEIERTLKERLDRHHRELDKVREDNGPSEKVEELLRKSEELAKRIEDDVRRVLRKLEDTVRRIKEEIDRLLKDNERIIEEVKRRAD

SEQ ID NO: 7639 - protein, 181 aa, Artificial Sequence; identical to SEQ ID NO: 7638
  Synthetic

SEQ ID NO: 7640 - protein, 181 aa, Artificial Sequence
  Synthetic
SVEEIIEDMLRKVRELVRRVRELLREVDEKLKKLVEDVRRRLEKTNKELKDLVEDIVRRSGERKELKETMKRNHEELTKVDKELEEEKEKHHRELERADKELEDIIRRLEEEVKDLKDKKGGSEEAKRVLDKLRKTAEDIKRTIDELLKRSEETIKKIEDKIDKLVKKNKELVKRIEDEAR

SEQ ID NO: 7641 - protein, 181 aa, Artificial Sequence; identical to SEQ ID NO: 7640
  Synthetic

SEQ ID NO: 7642 - protein, 186 aa, Artificial Sequence
  Synthetic
SLRELLDEVRRAVEESNRELERLLEEVDRSNRESHRELKRLLEKIKKLAEEVERELERKGTSEDEKKKLDDEKEKLDRLLRKLEEESKEAKERNDERMRRLRKESEEVKRTLEEIERRLEKQGDVSEEEVKKAVEDLKRLVDTHKKRVEEVIDELRKHSEKHSEEVRRVITELARRLEELLDEIRR

SEQ ID NO: 7643 - protein, 186 aa, Artificial Sequence; identical to SEQ ID NO: 7642
  Synthetic

SEQ ID NO: 7644 - protein, 179 aa, Artificial Sequence
  Synthetic
SAEEKVEDELRKHHEEVKRLLEEIEKTMRDHHREVEETLKDSRRELKRIEEEARKVKERRVREEELKKIEEDLEREHREHEKRLRDLRRESEKKVRELKEKLDRFRDTSRKRTEDLRREGSASEDILRKLEEEVRRNDKELRDLLEELKDLVRRNDEELRKLNEEVRKRVEELIEELRR

SEQ ID NO: 7645 - protein, 179 aa, Artificial Sequence; identical to SEQ ID NO: 7644
  Synthetic

SEQ ID NO: 7646 - protein, 179 aa, Artificial Sequence
  Synthetic
SIEEMLKRVKEESKRSNDKIRDVLRKVEETSRRSKERIDKLLRDVERTVEEVIRDVKADESIVRDLKRILEKLREDVERTKRRDDERLEKLKRDVKREEDRDREDNERLERETRKSRRPEKDVLDRLRRYVEENRRRVEKLIRDLEDAVRRNEDDARRVAKEIEDVVREIKDRVDKTRT

SEQ ID NO: 7647 - protein, 179 aa, Artificial Sequence; identical to SEQ ID NO: 7646
  Synthetic

SEQ ID NO: 7648 - protein, 178 aa, Artificial Sequence
  Synthetic
SEVDKKLEDIRRRLEKLERETEESLDRVRKELEDLEKESRESLKRLREDLERVKKTKLDERTLDDKIEEMKKRNEEHRKKSEDSARELEKRNREHTKRLEDVERELREELERLDRSGVDKKKADELRRVIEEIIRRLRELDEKHRRLVEEIIRRLEELNREHSKVVEEIARELKKTAK

SEQ ID NO: 7649 - protein, 178 aa, Artificial Sequence; identical to SEQ ID NO: 7648
  Synthetic

SEQ ID NO: 7650 - protein, 177 aa, Artificial Sequence
  Synthetic
SLLEELKRSIEESIRTLKELLDRLEELIRRIAEEIRRLLEEHSRKTEEVIRRAEKAGVPREDLEELADRLRKNNKRLEELVKELIDRLRRLLEDLKRRIEKYAEDLKRELAELRRVKDEKVIEELKRKLEEENKRLKKVVEEIAKTLKDLLDEVRRRIEDSLRKLEELLERVERKTR

SEQ ID NO: 7651 - protein, 177 aa, Artificial Sequence; identical to SEQ ID NO: 7650
  Synthetic

SEQ ID NO: 7652 - protein, 177 aa, Artificial Sequence
  Synthetic
SLLEKLEKLIRDIKRTVDKLLEDNEETIRRIIRDIERLLKRHSDETREVVRTLKERGVPDRRLEEVKRRLEKNNRDLEDEIRRVAEELKRSLKKLKEDIERLAKKLEDDLRELRRVQDKDVIERIERELRELLKKLKEDADRHNEDAERKLRRLRDTIRRSLKKLEEDLRRLSKEAE

SEQ ID NO: 7653 - protein, 177 aa, Artificial Sequence; identical to SEQ ID NO: 7652
  Synthetic

SEQ ID NO: 7654 - protein, 186 aa, Artificial Sequence
  Synthetic
SRVEETLKRLEDELKRIEEEVRKLLDELRRHLEENRRRTEKLLRELREELERVRERVEKGDRSEDELREELERIAKKLDDELRRHNEHLERSKKRLEDILRELEERIREVARRMEKTLEDLRREGVDEKLLRRLERLVREIKRRLEELLKRLADLVRELKKEHERLNRELEELVRRIKERLKEAEK

SEQ ID NO: 7655 - protein, 186 aa, Artificial Sequence; identical to SEQ ID NO: 7654
  Synthetic

SEQ ID NO: 7656 - protein, 178 aa, Artificial Sequence
  Synthetic
EEEERIKERLDRSVEELKKSADKMREEIERSEKKLKESADRVRKEIEDALRRIREEDRDKKELDEEIKRLRDRLREHERETEEENKRLRKRLEEHVRETEKNNERLRRELEKVERNGLEEDVVRRVEELLRRHEEVTKTINREIEELIKTHERSTRELNKEIKELIERLEETIKERTR

SEQ ID NO: 7657 - protein, 178 aa, Artificial Sequence; identical to SEQ ID NO: 7656
  Synthetic

SEQ ID NO: 7658 - protein, 178 aa, Artificial Sequence
  Synthetic
KDAEELERRLRKSAEDLKRSAEEMKKRLDKSREDVKRKVEEAKKIVEDLEEDLKKRDTDDELLERTLKTLEKILDELEKDLRDNNKRLREDVERHKKETEENNRRLRREVEEVERKGLSEEMVKRLRELLRTHEEITERINRKIEKLLREHEEETKRLLDDLRRLLEELRKKIEEEKR

SEQ ID NO: 7659 - protein, 178 aa, Artificial Sequence; identical to SEQ ID NO: 7658
  Synthetic

SEQ ID NO: 7660 - protein, 178 aa, Artificial Sequence
  Synthetic
DEEERIEEELRKSTEKLKESLDRMRRDIEKSAEDLRKSVEDVERDMRRLLEDIEKRDTDESELRDRIRRAEEDVRRHLRETRENNERLREKLEKHVEDTERNNERLRREVEKVERNGLDKDALERVRRLLERHERETRRINEEIERLIRRHVEETKRVNKRIKRLLDELKRRIEEKSK

SEQ ID NO: 7661 - protein, 178 aa, Artificial Sequence; identical to SEQ ID NO: 7660
  Synthetic

SEQ ID NO: 7662 - protein, 178 aa, Artificial Sequence
  Synthetic
SEEEEIKKRIDDARKELEESTREVRERLRDSMRRLDESLKRVEEEIRKLADDIRRREVDEELLKDTIRRARERLKRHERETEKNNKRLKEEVERHVEETKRRIDRLREEVEKLERNGLEEEVVRRVRELLKRLKEEVDRINDEIRKLLEDHKKRTEEVNETIKRLIDRLEEELRRRRE

SEQ ID NO: 7663 - protein, 178 aa, Artificial Sequence; identical to SEQ ID NO: 7662
  Synthetic

SEQ ID NO: 7664 - protein, 186 aa, Artificial Sequence
  Synthetic
SEVEKIIEKIRREEDRNRREVEEKLKRIREHVRRNEEDTRRIIRELRELLKEALDRLRRGDRSKEVLKRLVEKIVEDVKRLLDRHREHSERSVRELRKILEELRKHIKKTVDDLRKILRDVREKGADEKLLRELEELIRRVKKRHDELLKEVADLVKEVEDRHRKLNEELERVAREIEETLKRELD

SEQ ID NO: 7665 - protein, 186 aa, Artificial Sequence; identical to SEQ ID NO: 7664
  Synthetic

SEQ ID NO: 7666 - protein, 179 aa, Artificial Sequence
  Synthetic
SEVETLLDKIRRDNEDLNRRVREELERIRKADEDVNREIEKVLRDIEEAIRKLKRDRLDKDKLKKTLDDLRRRVKEIEDKLREHIKRLEDRLRKIKEDAERHIRELEKRIRDFKERRKEADELVRRLEKILREHEENIKRIVEELERLLEEHKKNLEDLKRRLRDILRKVEEELDRTRK

SEQ ID NO: 7667 - protein, 179 aa, Artificial Sequence; identical to SEQ ID NO: 7666
  Synthetic

SEQ ID NO: 7668 - protein, 179 aa, Artificial Sequence
  Synthetic
SETEELVKKIDKRDKEVKERAKRVVDEIKERDKRVNEEIEKVLRDIERTIKKVREDRLDEDELRRVLEELERRIREIEDRLRRHIEELKRKIDKTKRDLEKHIKDIEDELREVKEKRKEAKEMVDRLRELLERHEKTIRDLVRTLEELLERHRKNIEDLVRELRELLDRAREELKRTAD

SEQ ID NO: 7669 - protein, 179 aa, Artificial Sequence; identical to SEQ ID NO: 7668
  Synthetic

SEQ ID NO: 7670 - protein, 182 aa, Artificial Sequence
  Synthetic
SDIEEALKKIKKMTRELREEIKKTEEESERRAKELEKEVRDYLRKVEEEAKRLKDTKASTEELRRTLERSREESEEILRRLEKTHRDHKRKLDEIKKKLKDVNEKIEREIRKILKDKGEDEDIRRVLEELKKVLEENNRVIEELARRLDELNKKLRELLERIKKTLDDLNKRLEKLIRDTEK

SEQ ID NO: 7671 - protein, 182 aa, Artificial Sequence; identical to SEQ ID NO: 7670
  Synthetic

SEQ ID NO: 7672 - protein, 182 aa, Artificial Sequence
  Synthetic
SKIEKMLRDIEKKTKELEDEIREALKRLREIAEKLKDEVEKYIRELRELLKRLAETKSSDEDLKRELKKSEDRSREIVKKLERVIEKVEREVREIKKKLETTNREIEKEIREILKRDGEDEKIREALERLRKILRENNEVIRELVERLRKVLEDLKRTVKTIEDRLRKVNEDLKRLIEELER

SEQ ID NO: 7673 - protein, 182 aa, Artificial Sequence; identical to SEQ ID NO: 7672
  Synthetic

SEQ ID NO: 7674 - protein, 179 aa, Artificial Sequence
  Synthetic
SEAEKLIEDIKKLIEDHKKRTKELIDEIEEDIKKHREDVERLLRDIERLIEELERENSKDDRVVEEVEDSLRKIKRTLEELVKEHRKKLKEIKEDLKRDLDRVEEVLKRVEDDLRRRDTSEEVERKVREAVKDVRRVLDESRRRLDTAIRKVEEDLRKSREDLERAVKKLRDVLEELKR

SEQ ID NO: 7675 - protein, 179 aa, Artificial Sequence; identical to SEQ ID NO: 7674
  Synthetic

SEQ ID NO: 7676 - protein, 179 aa, Artificial Sequence
  Synthetic
SEVEKLERKTEKILKDLKDEVKRAEEETRRILEELKKMLEDMEKRTREILKRIRDLARDGRSRREDLERILRRHNDEIRKIKERLEEKLERHNRKIKRIDDELKKTDDEHNRELDEAKKRGVSEKKLRELNTELTRLIDEIRKRLEELNERLRKLVEEIEERLRRLNEELKRLVEEIRR

SEQ ID NO: 7677 - protein, 179 aa, Artificial Sequence; identical to SEQ ID NO: 7676
  Synthetic

SEQ ID NO: 7678 - protein, 178 aa, Artificial Sequence
  Synthetic
KELEDTAEESKRELEKIRDEVRKEEEESEKLLRKIEKELREYAEKTRRILEKLRRDQLDKDELRRTLEEHRRETKELRDRLERTLERHEKRSEDIREKLKELLRRHEEKSEDELRKRPDEEVARLLKKLNDELRRLIREIEERLRKLNDDLRELIERVEERLRRLNEELEKVIRELET

SEQ ID NO: 7679 - protein, 178 aa, Artificial Sequence; identical to SEQ ID NO: 7678
  Synthetic

SEQ ID NO: 7680 - protein, 178 aa, Artificial Sequence
  Synthetic
DEVEDTERRSKKKLEELEEELRRTATESKRTLEELKRRLEDEERRSRDALRRLKEANLDEDKLRKVLEEHRKRSKELKERLEEDLRRHRKKSKELKDRAEEALKRHREESKRRLDERPDEEVKRRLERLNEEIEKLIRDIERTNRELNKELEDLIKEIEDRNRKLNEDLRRLIDELRK

SEQ ID NO: 7681 - protein, 178 aa, Artificial Sequence; identical to SEQ ID NO: 7680
  Synthetic

SEQ ID NO: 7682 - protein, 182 aa, Artificial Sequence
  Synthetic
SELEEIAREVKETSKRHEEHVRRSEEEVKKTLKRLKEHVDKSSEDAERTLEELERRLRRDGKDERLEEELDKTIKRLEEHVKDNIRKLRETLDRLRRHIDRNRKESKRLLEELKKRIDEVRKRNVRDDELRRLKEELKENIERAEESHKELADRLRELIKRIKERHEELLRRLRKLLEEIRK

SEQ ID NO: 7683 - protein, 182 aa, Artificial Sequence; identical to SEQ ID NO: 7682
  Synthetic

SEQ ID NO: 7684 - protein, 178 aa, Artificial Sequence
  Synthetic
SAEEDLERLIRALKKVLDDHERLLRELLRRLEEVVRRHKELLKKLNRDLEEVLKDIKEKKRDKRELEEELKRRLERHRRESEKSKERVERALREVKKKLEKSIRKLEEELRKVEEKLRKDGATDETDKEVRDTIRRIRKHSREVAEEVRKIIEELRRHSKKMADDSKRTIDELRERAK

SEQ ID NO: 7685 - protein, 178 aa, Artificial Sequence; identical to SEQ ID NO: 7684
  Synthetic

SEQ ID NO: 7686 - protein, 185 aa, Artificial Sequence
  Synthetic
KVEEELDRLLKEIEKIIEEHRKKNKKLNDDIRRLIEEHERDLRELLKELEKLIRDLKKDLRDVEKLKRELEEILKRLAELIEESKRRLDDELRRHEKRSRDSVEKLERELKKLEDELRRLKEEGIDDRAVEEVRKRIEEILKRIRDNSKRVEEETRELLERIRRNSERLRRDVERLARELEEKKR

SEQ ID NO: 7687 - protein, 185 aa, Artificial Sequence; identical to SEQ ID NO: 7686
  Synthetic

SEQ ID NO: 7688 - protein, 178 aa, Artificial Sequence
  Synthetic
SDEERLEEKLRRVEREVEKKLKRLKEELEEYARRVKEMSDRHREEVERFEEEVRRRGGGGEDLDRRIRTLKKRSEELLRESEKRSEEIIRRLEKTLRDLEREVDKIRRELKEELERKDDDTLRKLMEKIKRALEELLKRLEDLVRRIEEELRRLNEELRKNIREAEERLRKLKEDAER

SEQ ID NO: 7689 - protein, 178 aa, Artificial Sequence; identical to SEQ ID NO: 7688
  Synthetic

SEQ ID NO: 7690 - protein, 180 aa, Artificial Sequence
  Synthetic
SADEILKEIEDTIRKLIEDNKRTLEEHERRTRKLIRELRELLKRHKTESRRLAEELKKDGDKDLSEEIRRIIEKLKKDNEKLERDVRRLEKKMRDDNRKLKEDNKRVAEEMKKTLDKLKKDRVSGEEVRKRLEELKKKVERENRRHREHLKKVAKEVKRTLDEIRRHLEEVKERVKRARD

SEQ ID NO: 7691 - protein, 180 aa, Artificial Sequence; identical to SEQ ID NO: 7690
  Synthetic

SEQ ID NO: 7692 - protein, 172 aa, Artificial Sequence
  Synthetic
SEEEELKRRVDEVRKRTKEIIEELKRHVDRNERTVREIIKRLEEEVRRVAEKVKRGELDREELRELIKRIDEKLKKTLDDVRKHLEDSLRRIEDILRRHEEESKKIEDDMRREVKNSKVVEDVRRTLKRLNDELRKVVKDARELHERLLRDLKRVIDRIRERLKRLLDEAEK

SEQ ID NO: 7693 - protein, 172 aa, Artificial Sequence; identical to SEQ ID NO: 7692
  Synthetic

SEQ ID NO: 7694 - protein, 180 aa, Artificial Sequence
  Synthetic
DEVETLAREVKKSNDDDRRKTKKTADDVEKKLEDLKRRDEEVRERVEEDLKRLREKVKGDELRRIVEEIAREVKELLDRSKDLSRRVAEELRRLLRESKEIVDRVARKTEELLKEVRKDDKKEVLDRVADEIRRLNKETNDVDRDVRRRIDKLVEDVKRVTEEVSKEIKRLAEEVDRRIT

SEQ ID NO: 7695 - protein, 180 aa, Artificial Sequence; identical to SEQ ID NO: 7694
  Synthetic

SEQ ID NO: 7696 - protein, 180 aa, Artificial Sequence
  Synthetic
DEVEELKRKVRESNKRDEDETRRTEERVEREVRRLEEEVKDVKRKVERELERIAREIKGDELRRIVEEVAKRIDDLIRRIDEIIKRVRKEVKRLLDESRKIVKDVARETEKLLRDLERDDKREVVKEVEDRIRKLNRETNEVDKEVRKRVDDLIRDLERVLREVKEEVDRLVRKVEEDAK

SEQ ID NO: 7697 - protein, 180 aa, Artificial Sequence; identical to SEQ ID NO: 7696
  Synthetic

SEQ ID NO: 7698 - protein, 187 aa, Artificial Sequence
  Synthetic
DEVEELVKRAEDILERLKREVDRLIKESEDLNRRIRKHVEDTIKEVRKRLEELRKEVEDRATEEVRKVVDELRKEVERLVRESREVVKRSLEISKRLAEEAKEVLERLRELVKKLVDELRKKKDDERAKDLLKEVVERVTRVAKAVKEKLDEVVRESREVIKRVEEKNRRVLEEVERVARELKKAID

SEQ ID NO: 7699 - protein, 187 aa, Artificial Sequence; identical to SEQ ID NO: 7698
  Synthetic

SEQ ID NO: 7700 - protein, 187 aa, Artificial Sequence
  Synthetic
DEVEELVRRAEEELKRLRKHVEETVERSKKLNDEIKKHVDRTVKEAKDELRRLREEVKKRGDERVEKVVEEVDKLVEELVRTSKEVVRDSLRKSTELAKRSRDLVDEVRRLVEELVKELRDKKDREEAKKLLEDVARRVRKVAEELKKKNKELLETSDRVIEKVRKKNEDLKRTVDEVARRLEEAIK

SEQ ID NO: 7701 - protein, 187 aa, Artificial Sequence; identical to SEQ ID NO: 7700
  Synthetic

SEQ ID NO: 7702 - protein, 178 aa, Artificial Sequence
  Synthetic
SEVDEVVERLRRISEELDRRVKKLVKDARRISKELEEAVRRVVKTAKDANKELRKEVRERRTDESVVRENHKTIEDVVRELEKVLEEDRKTVEEVVRAARKVVEDDEKTVEDIVRLAKAGVDVDTLAEDAKRSARETEEILRRLVKKLEESARDTKRIIDELDKELKDSNEEVRRRLK

SEQ ID NO: 7703 - protein, 178 aa, Artificial Sequence; identical to SEQ ID NO: 7702
  Synthetic

SEQ ID NO: 7704 - protein, 174 aa, Artificial Sequence
  Synthetic
DEAEEVVKDVEREVRRLEKENRDLVERSKRLVERLEKESRDLVRKSREDVKRLREKGVPEDVVRKLEEVSRDSARRLKESNDESRRVSDESKKKLEESLEETRRVVDRVRKLLREGVDEEELRKDVERVVKKDEDITDEVRKENDEVVKKNEDIIDELRKKNEEVLRRVDEEAR

SEQ ID NO: 7705 - protein, 174 aa, Artificial Sequence; identical to SEQ ID NO: 7704
  Synthetic

SEQ ID NO: 7706 - protein, 174 aa, Artificial Sequence
  Synthetic
SEVEDVVRKVRELVKRLRDESRRLVEESRRLVEELEKRSRDLVKTAEDIVRELKEAGVPEEAVDKLRKVVETLKDELRRSNEKSERASRESKDRLKKSNDESERVVREVEKLLRAGVDKDELDKEVKEAVKKNREIIRRLEKRNRDVVEENRKIIEDIEKKVRDVVREVRREAK

SEQ ID NO: 7707 - protein, 174 aa, Artificial Sequence; identical to SEQ ID NO: 7706
  Synthetic

SEQ ID NO: 7708 - protein, 184 aa, Artificial Sequence
  Synthetic
SSLEEVAERVKKLVRELEESTKTVEELVRRLVTELRKSTEKVRRDVDKLVKELEEIIRDVKDKRELERVIREVMKRIEEILERNSRLIDEVMRRLEKILREDEKLIEDVARRAREIAKRLLDERDTREVKRLVEEVEKLIERLRRESRRLIERVRREARELKEESRRLEEEVRKKIEELARRVK

SEQ ID NO: 7709 - protein, 184 aa, Artificial Sequence; identical to SEQ ID NO: 7708
  Synthetic

SEQ ID NO: 7710 - protein, 184 aa, Artificial Sequence
  Synthetic
RDLEEVKKKVDKLVRELEESSKKVRKDVEDLVKELEDTTRDVKRLVEELVTRLKRIIEKVDRKKDLRKVIEDVAEELTRIARRDKELIDRVAEELEEILKRNTDLIKKVADELRRILDELLRKRDTREVKKIIEDVEREMERLERDSRRIVKEVREEADRLRKESKRLEEDVKRKLKELRERVN

SEQ ID NO: 7711 - protein, 184 aa, Artificial Sequence; identical to SEQ ID NO: 7710
  Synthetic

SEQ ID NO: 7712 - protein, 184 aa, Artificial Sequence
  Synthetic
DELERVKEKVDKLVAELEKSTDDVKKKVEDLVRELERSSEKVKKDVDRLVKELEDIIRRVKDKDRLLRTIREVAKTLEKILEDNKRLIREVARRLRRILEEDKKLIEEVMRRLEEILKDVIRKRDTREVKKVVEDVRREAKRLKERSKKLEDEVRDLLRELEKRSDEITKRVREEMKRLEDEVK

SEQ ID NO: 7713 - protein, 184 aa, Artificial Sequence; identical to SEQ ID NO: 7712
  Synthetic

SEQ ID NO: 7714 - protein, 184 aa, Artificial Sequence
  Synthetic
DELEDVKRRVEKLVRELEESSKEVRKRVEDLVRELERTTEEVEKLVRDLVRRLEDIIRRVKDKDDLRRVIERVMKELERILKEDKDRIRKVMEDLKRILEENDRRIKRVAEEIRKILEELLRRRDTEDIKRLEEDVERKLRRLEEESRRIVEEVKKEAERLKERSERLTKEVRELADRLAREVD

SEQ ID NO: 7715 - protein, 184 aa, Artificial Sequence; identical to SEQ ID NO: 7714
  Synthetic

SEQ ID NO: 7716 - protein, 184 aa, Artificial Sequence
  Synthetic
RELEEVKRRVERLVRELEESLRRVRKEVEDLVRDLERVSKEVEDTVRELVRRLDEVIRRVKRKEDLLRLIDKVAKELEKILKKSLDDSRRVMERLEEILERNSRLIKKVMKEAEDILKELIDRRDTREVKTLVEEVRRLLEELERRSRKLVKEVRDEAERLKREDEEIIREVRELLKELERKVR

SEQ ID NO: 7717 - protein, 184 aa, Artificial Sequence; identical to SEQ ID NO: 7716
  Synthetic

SEQ ID NO: 7718 - protein, 181 aa, Artificial Sequence
  Synthetic
DELEEVKRTVEELLERLERVNKDVKRKVKELLDRLREVDDRVKKEVKRLIEEVKNVDTDKKDVEKIVKEVEKTLKDLVRRVEEINRRVAEDLRRLLEEVERINDEVRRRLERLIEELLKDRDTEEIKKLADRVRRELKRSEDHTKRLAEEVRKDLEESRKHTKELEKEVEEELRRLKKEVR

SEQ ID NO: 7719 - protein, 181 aa, Artificial Sequence; identical to SEQ ID NO: 7718
  Synthetic

SEQ ID NO: 7720 - protein, 181 aa, Artificial Sequence
  Synthetic
SELEEAAKAVEKLAREAEKSSEDARRAVERLAREAKRANDEAEKAVRELAERARRADRREEEADRIAEEAAKEAERLAKEAKEINDRAAEEARRLAEEDREVAERAAKEAERLAKELRDTRDAKEAKKLAKEAREIADRLRRESEEIAREAEKIAKELADHTRELAERARRIADKLKKDVK

SEQ ID NO: 7721 - protein, 181 aa, Artificial Sequence; identical to SEQ ID NO: 7720
  Synthetic

SEQ ID NO: 7722 - protein, 178 aa, Artificial Sequence
  Synthetic
SAEDLIREVRRRVKELERKLEEILKRSEDLTRRLREEAERILKESRDRVRKLEEDARREAREDKDLVEKVIRELEKAIRHDEEVVRRVEELLKKVNKEVRDVIRKIRKLLKEVDKELEKRGESKEVIKKIRDILRRLSEELEKVLEDSERILRRLEDELRESLKRTEEILRELRRELK

SEQ ID NO: 7723 - protein, 178 aa, Artificial Sequence; identical to SEQ ID NO: 7722
  Synthetic

SEQ ID NO: 7724 - protein, 176 aa, Artificial Sequence
  Synthetic
SVDEVLKEIEDALRRLKEEVERVLKENEDELRRLEEEVRRVLKEDEELLEELKRKVREIDEVDRVVDEIRKLSREILEKVKKVVKEIRDSLETVKRRVDDVVRRLKELLDEIKRDNDEKKIRDVAKEIRDRLKELEEEIEEVTRRNKKLLDDVEEEIRRVHEKTRRLLETVLRRAT

SEQ ID NO: 7725 - protein, 176 aa, Artificial Sequence; identical to SEQ ID NO: 7724
  Synthetic

SEQ ID NO: 7726 - protein, 175 aa, Artificial Sequence
  Synthetic
RLEEVVEEMERLIRDLEKKVEDARERNERLVRESRKKAEELIKELRKLLRELEEEIRKGSKKVVDEIRRVVEEVVKEIKKLLERNEEVSREVEERLRRLVEEIKRVVEEAIKLLREGIDVETVLKRVREVIRRVEETIKRLDDRNKESSEDVERRLRELLREVREIIKRVREKTR

SEQ ID NO: 7727 - protein, 175 aa, Artificial Sequence; identical to SEQ ID NO: 7726
  Synthetic

SEQ ID NO: 7728 - protein, 175 aa, Artificial Sequence
  Synthetic
RLEDVVRESKKLVEESERRVREAIRRNEELVKDSEREAREVIEELKELLRRLEEELKKGSEEVVEEIRRKIKKVVEDIKRLLDRNREVSEKVVRDLERLIREIREINRRAVELLKRGVSVEDLLREVRRVDKEANEKIEELDRRNKKSSDDVKKKIRDLKREVKKVIDEVRERTR

SEQ ID NO: 7729 - protein, 175 aa, Artificial Sequence; identical to SEQ ID NO: 7728
  Synthetic

SEQ ID NO: 7730 - protein, 181 aa, Artificial Sequence
  Synthetic
SELEKVLTESRDVVRRATKRLREVHKKTKEVVDRLREKLKRVEDEVRKAVRELEEKVRDEDVVRDVARRLEELLKELERVVREIERELERVIRETEEVIKTIDELLKRVNERVRKVIEEKKDKRLEDVLKESKKLTDDLRKDAKRVLDEDRRLVEELKKELDEARKRVEDLVREVKDRARR

SEQ ID NO: 7731 - protein, 181 aa, Artificial Sequence; identical to SEQ ID NO: 7730
  Synthetic

SEQ ID NO: 7732 - protein, 185 aa, Artificial Sequence
  Synthetic
DEVEEVRKRVEEVIRRNEERIEDVRKKVEDVIRRNEKLVDDVRREVKEVLDKLRELLERRKERVKDVVTEVEKRIRKLLDELRRSSEEVKRLIDELLRRAEKSSREVKETIDRLIEDLKRKLKDDKETVDEVAERLKKLLEESERRVKRVLDEARKLVKRSEDRSKKVLDELEELLRRVRKEADK

SEQ ID NO: 7733 - protein, 185 aa, Artificial Sequence; identical to SEQ ID NO: 7732
  Synthetic

SEQ ID NO: 7734 - protein, 188 aa, Artificial Sequence
  Synthetic
RELEELLEEARRSSEEVKKILKKLKKEVDESSERLERIIEKLLRDAKRVADEVRDILEKKREDRDVVRKVIDELRKVIEEIVKRLRDAVRENEKSIRDVIRKAEKVVEENERVIEEIVKKAKRDLKDDEERVKRVIDELRELLRRSREEVKRVVEELKKELERSKREVERVIDELRRLLETVEKEIRD

SEQ ID NO: 7735 - protein, 188 aa, Artificial Sequence; identical to SEQ ID NO: 7734
  Synthetic

SEQ ID NO: 7736 - protein, 188 aa, Artificial Sequence
  Synthetic
SELEDLKRRIRKSSEDSKKSLEDSDRTIEESSRDSSRTARESERKLEKVLREVDDILKKVKDDKDVVRRVLERLRRIIKRLVDENKRSVEENKRSIDELVERNKRSVEENERVIKEIVDRAKRDASSNEEDVERIVRELEELVRKSREDHKRVIDALREKLKKSREEHRRVIDKLRRELKRVEDEIRR

SEQ ID NO: 7737 - protein, 188 aa, Artificial Sequence; identical to SEQ ID NO: 7736
  Synthetic

SEQ ID NO: 7738 - protein, 188 aa, Artificial Sequence
  Synthetic
SILEKLEREVRKSSRESRESAKKSLREIEESSRRVEEELERLLREVRRVAEEVLDILRRKKEERETVKKVLEDLKRIIDKVVEDAKRVVEENRRVIEEAVRKNEESVRENEEVIDRVVKKARRDLDKRREEVKRIIERLRKLLEDSKRDHEEVIKELRKLVEDSRRRVEEVIRRLRELLKRVADELRR

SEQ ID NO: 7739 - protein, 188 aa, Artificial Sequence; identical to SEQ ID NO: 7738
  Synthetic

SEQ ID NO: 7740 - protein, 189 aa, Artificial Sequence
  Synthetic
DELEEALRRLKKIVEDLARRNEELLKELRRDSKRLKDEIKRVVDELRDIVRRLKEELDRVKEREEVARRILERLERVIRRLVEILKALVDHNKKSIERVVEEAERSNEEVERVVREVVDEARKRTRDERLERRVREIIRRAEELLERSRKRSEEIAREAEKSNRELEDAVRRIIRELEELLEKLERDAR

SEQ ID NO: 7741 - protein, 189 aa, Artificial Sequence; identical to SEQ ID NO: 7740
  Synthetic

SEQ ID NO: 7742 - protein, 189 aa, Artificial Sequence
  Synthetic
DEVDKVTRELREIMRKLKEDDKEVLDRLREDSERVERTNREVEKRLEAIIRDLEEKLRRKREDKDLVKRLLDELRRVVEEVRREVEELNEHNERSIRDAVRKSRELVERIRDVVREVDERLKRLTRDERLKEKVDRIREEAKRLLEELEKHVRDSEREAEDSNRRSRETSEEIIRRLRKKVKELEDKVR

SEQ ID NO: 7743 - protein, 189 aa, Artificial Sequence; identical to SEQ ID NO: 7742
  Synthetic

SEQ ID NO: 7744 - protein, 189 aa, Artificial Sequence
  Synthetic
SEVDKVEEELERIVKELKDRDREVLKRLRDDSERLVRELKKVAEELRKIAKDIDERLKEKKEDKDFVEKLVEELKRVIEEVVRRLEELVKHNNRSIEEVVRISERLVEDLERVVRRVEDTLRKLTRDERLKDRVDKIREKARKLLEELKKHVDDSIEEAKRSNEELRKTVEKIIREAEKLLRDLKEAVK

SEQ ID NO: 7745 - protein, 189 aa, Artificial Sequence; identical to SEQ ID NO: 7744
  Synthetic

SEQ ID NO: 7746 - protein, 189 aa, Artificial Sequence
  Synthetic
SEAEKVERELDKIIRELKETDKKVLEDNRRVVEKIEREMERVLRELERIMKELKEELDRKREDKEVLRRLVETIRKVVEEVEETLRRLLEESKRSSEAVERISKKLLEELREVVERVVRRLEELRRDERLKEKVDEIRKRAEELVKELARHVEKSIRESRELDKRLEEKVKEIIRRARELLEDLRRKAE

SEQ ID NO: 7747 - protein, 189 aa, Artificial Sequence; identical to SEQ ID NO: 7746
  Synthetic

SEQ ID NO: 7748 - protein, 179 aa, Artificial Sequence
  Synthetic
SEAEKVRREVEDLIRTLEEVVRKSSEEIKELLRRLREVVERIRDTTRRLIEEIEKKVKSRKADEIRRLVKKAVDEDEEVIRRVEELVRRVLEKNKEVVRRVEELLRRVVEKIEDVRRRGGREDLERVLKEVREIVKRLLKRLEESLRDVRRIAEELREMLKRSLKRSEEIIRKLLEDVR

SEQ ID NO: 7749 - protein, 179 aa, Artificial Sequence; identical to SEQ ID NO: 7748
  Synthetic

SEQ ID NO: 7750 - protein, 180 aa, Artificial Sequence
  Synthetic
DEVDTVDEKVKRLAEELRKRVRESKERTKKLARDLREAVKESLKDSERLAEDLRRKVRDEELKRRVEEVVRESRRLNEEIRRIIEKVVEDMKDSNRRIEEIIEKVVREVKELLKRVRDDDTREKLERVEREIEKLVREVEKILRDIHRDNERVVREVERRLEEITRRSRELAKRVEDETR

SEQ ID NO: 7751 - protein, 180 aa, Artificial Sequence; identical to SEQ ID NO: 7750
  Synthetic

SEQ ID NO: 7752 - protein, 180 aa, Artificial Sequence
  Synthetic
DEVDEVARKVERDAERLEDLNRRSEETSRRLAEELRRLNERSERETERLAEELRREVREERLRKLVEDVVREVRDTNRRSKEISEDVVRKSERLNRESKRITKEVRREVKKLLDEVRKDDDKKKLEDILREIEKLIRRVEEISRRILEESKRLADEVRKITKKLHDDNKRLADRVKEETR

SEQ ID NO: 7753 - protein, 180 aa, Artificial Sequence; identical to SEQ ID NO: 7752
  Synthetic

SEQ ID NO: 7754 - protein, 180 aa, Artificial Sequence
  Synthetic
REIDEIKERVDRLAEKLRRDMERSTRESRKLVEELKERAKRSKEETTKLAEELRRRVRDEEVRRIVEEVVEKVRTTNEEVRRIIEEVVKRLKETNDRVREIIEDVVRRVDRLLKEVRKRDEKEELERILREIKRLMDEVKRILEELLKTNKKLIDEVRKRLEELHKRNRELVEEVARRAN

SEQ ID NO: 7755 - protein, 180 aa, Artificial Sequence; identical to SEQ ID NO: 7754
  Synthetic

SEQ ID NO: 7756 - protein, 183 aa, Artificial Sequence
  Synthetic
SEVEAVEKEARELVREDERRDDEIEEDLRRLLEENRRKDDKVEKEVRELLKRLRDKVDDRADERLRELVEDVARKVKRLLDESRRSSEEVAERLKRLLDESRKTSKEVMEILKELLERLRRVSDKRDVKRVRDTVRDISRKNNRTTEELLKRVRDISRRNKEITEELLRRIREIAEDLARKLD

SEQ ID NO: 7757 - protein, 183 aa, Artificial Sequence; identical to SEQ ID NO: 7756
  Synthetic

SEQ ID NO: 7758 - protein, 183 aa, Artificial Sequence
  Synthetic
SEVEKVEEEVKRLVEENERRVRESSREVEKLLREDAERDERASRELKKLLEKLKRAVDKRADERAEETVRDVARKLEDLVRRSKRSSDEVAKALEKLVRDSDKSSKEVAKRLEDLLRELRKVSDKRAVEKVLRTARKISEDNKRKNDEISERLRRISERNNRESEKLLRDLEKIIEDVERKLE

SEQ ID NO: 7759 - protein, 183 aa, Artificial Sequence; identical to SEQ ID NO: 7758
  Synthetic

SEQ ID NO: 7760 - protein, 183 aa, Artificial Sequence
  Synthetic
REVEEVEKKARELVERDERTDERIRKELEDLVRENKKEVKRVRETIERLLRDLKKAVDERGDEDVRRTVDKVAREVEELIKEVDRTSKEVEELLRRLLKRSEETSREVMEILRRLLEELRRVSREEDVKRVEKTVEDISRKNNEITKRLRDTVRRLSEKNRRDLEKALEDLKRIVDDVRRKIT

SEQ ID NO: 7761 - protein, 183 aa, Artificial Sequence; identical to SEQ ID NO: 7760
  Synthetic

SEQ ID NO: 7762 - protein, 183 aa, Artificial Sequence
  Synthetic
SEVEEVEKEARELVKRDEDRDKEIEDKLRELVERNRRLVRKSSEELKKEIKRLKDEVDRRADERVEDTVRKVMEELKRLVEESRKTSEDIARKLDELVKRSKKTSKEVMKTLRDLLERLRRVTEKEKVEKVLKEVRDISRENNKTTDTLEKEVRRLSEENKRRNEEVTRRVRKILEDVERKAR

SEQ ID NO: 7763 - protein, 183 aa, Artificial Sequence; identical to SEQ ID NO: 7762
  Synthetic

SEQ ID NO: 7764 - protein, 183 aa, Artificial Sequence
  Synthetic
KEVEDVEEEVKKLVEENKKAVDDSREEVRKLLEENKKAVDDSRKEVEKLAKKLKEAVDRRADEDARREVEEVVRRARELLETSRETSDRVAKELKKLVDESEESSKRVADELRRLLRELRDVEGKEKVKRVLDEAKKISDDNKRKNEEVSKELEKISRDNLKLNEDITREIREIVERVDERLE

SEQ ID NO: 7765 - protein, 183 aa, Artificial Sequence; identical to SEQ ID NO: 7764
  Synthetic

SEQ ID NO: 7766 - protein, 183 aa, Artificial Sequence
  Synthetic
SEVEKVEKDLRKLIKDNRDSVRRVKEEAEKLVEENRRSVEEVRRTIKELLERLEKLVRDRGTEEVKKTVEDVMRRVEELLRRVRETSEEVARRLEKLVEDVRRTSEDVMRRLKKLLEELRRVSDKRLVDKVRRELEKILRDDNRIIKEVLDTVRRLSEDNLKKVKDVLEELTRIAEEVRERAR

SEQ ID NO: 7767 - protein, 183 aa, Artificial Sequence; identical to SEQ ID NO: 7766
  Synthetic

SEQ ID NO: 7768 - protein, 178 aa, Artificial Sequence
  Synthetic
SKVEDLLEKLERELEKNRKRTKELLKRAEESSEDIREKVRELRERLERLIEELERRGVPGEVVEEVERVVRRIDRELREVVRKNNEVVRKIVELLKRSDEKVKEVVKRIADLLEEKRDDDKLLEDLERLVRRVLDEARKINEELDKRVKDSVREVEKRLRELEEEVKRIIEEVEKKAQ

SEQ ID NO: 7769 - protein, 178 aa, Artificial Sequence; identical to SEQ ID NO: 7768
  Synthetic

SEQ ID NO: 7770 - protein, 173 aa, Artificial Sequence
  Synthetic
EELERLARIVDEAHKRSRDLLETSKREVEDAIDEIRARLEDSRRLVEEVTDEIRRIDKREDVRRLLEELKDHNRRVVEDVERLLRELERRNEEVVRRSKELLDDLERIIDSLDDSERLKELKKRLRDLIEENDRRAKESTKKIRDLAKELRERARRTEEEIKTLMKELEDRMK

SEQ ID NO: 7771 - protein, 173 aa, Artificial Sequence; identical to SEQ ID NO: 7770
  Synthetic

SEQ ID NO: 7772 - protein, 173 aa, Artificial Sequence
  Synthetic
KELEDLRREVEEIHKTSERLLRESDKLVEEAIRRIEELLERSKDTVTKAADEVRKADKREDAERLAKELLEINEKVVRDAERLVTEVRRHNTEVVERSKELVETIERRIDSLRDDERLKKLKEDVKRLIEENRKRAEDTKRKIEEEIRRLKEEADRTSEEIKKRADDLRRRAD

SEQ ID NO: 7773 - protein, 173 aa, Artificial Sequence; identical to SEQ ID NO: 7772
  Synthetic

SEQ ID NO: 7774 - protein, 177 aa, Artificial Sequence
  Synthetic
DELEEVDKLVKKVHEDSRKLIEDVDRKVREVVERSDRIIETVEELVERVITEVEDMLRKGESDEKVRKLAEELKRILEESMKTSEDLVRKLREIVRKSVEDSKRLVDELRDLIRRLRKDDRLRKVEKRIEDLARENEKRNRDLERKIEKLADESRKKNEDLKKRIEDLAKRLKDEAD

SEQ ID NO: 7775 - protein, 177 aa, Artificial Sequence; identical to SEQ ID NO: 7774
  Synthetic

SEQ ID NO: 7776 - protein, 177 aa, Artificial Sequence
  Synthetic
SSLETVREEVRRVKEESDRIIKEVRDRVEEVHKTSKRIIEEVEERVERVIREVREMLRRGETEEKVEKLVREVEKILEDSRRESERLAEEVRRILKESMDRSDELVRRLEELLRRLEKDERLDRVVEDIRRLAEESRRKNEELRKEVEELVKRNKELNEKLKKKVKELAKELRDEAK

SEQ ID NO: 7777 - protein, 177 aa, Artificial Sequence; identical to SEQ ID NO: 7776
  Synthetic

SEQ ID NO: 7778 - protein, 177 aa, Artificial Sequence
  Synthetic
DDLETVKRLVDEVIRTSEELIDTVRRLVEEVHRESERILKEVKKEVERVIREVEKLRRKGEDETKVRRLVEELEKILEEVVRRSRELVERLERIVRKSLEDSKRLVDDLRRLIAEMRKDKDLERVRKRIEDLAKELERRNRELEEDIKRLAKENEELARELKKEIETLAKRLEDEDR

SEQ ID NO: 7779 - protein, 177 aa, Artificial Sequence; identical to SEQ ID NO: 7778
  Synthetic

SEQ ID NO: 7780 - protein, 177 aa, Artificial Sequence
  Synthetic
SSLEEVDRRVKEVHKESDKIIREVDKRNKEVNRRSEEIIEEVEKTVEEVAKTVDDMLRRGEDERKVEKLVEELERIVEDSVRKSEELARRLKEIHKRSVEESERLAKELRDLIRRLEKSRELKRVKEEIDRLVEEDKEKNERSDKRAKETVDKNKKLNDDLEEKIRRLAEELRRRKK

SEQ ID NO: 7781 - protein, 177 aa, Artificial Sequence; identical to SEQ ID NO: 7780
  Synthetic

SEQ ID NO: 7782 - protein, 184 aa, Artificial Sequence
  Synthetic
SSLKEVERLAKELHEKSERIIREVEKLSRELHKTSEKIIRDVARRVKKLIDDVREVITRSGDEEVVRDVRRLVEEVVKEARDILDESLRVSEDLAEKSRRINRRSLEESKKIAEDMREILRRVEPDEELEKLRKRVEDLVRRNEEENKRTLRESEELVKENRKRNKELRDRVEKLVEELRRELK

SEQ ID NO: 7783 - protein, 184 aa, Artificial Sequence; identical to SEQ ID NO: 7782
  Synthetic

SEQ ID NO: 7784 - protein, 184 aa, Artificial Sequence
  Synthetic
KKLEDVKELVERLHRESEEIIRDVERRSRELAETVKKILEEVRRLSKKLVDEVREVIKRSGTDEVRDDVRRLVEEVADRSRKINKRVEEVVERVVKRSKEINDTSLKRSEEIARELKELLKRVDKDKDVDRVDREVEELVKENRERNKDTKRESERLAEKLRRDVEKSLRDSERLVKELRDRLR

SEQ ID NO: 7785 - protein, 184 aa, Artificial Sequence; identical to SEQ ID NO: 7784
  Synthetic

SEQ ID NO: 7786 - protein, 184 aa, Artificial Sequence
  Synthetic
KKLEDVKRLVDKLVTESEDIIRRVTEESRRLVEESRRVIEEVKKLSEELVRRVEKVIREKGEERVAKDVREEVERVVKTSRDINRETTELSKDIVRRARKINEDSLRVSEEIARELEKLLEDVDKDERVKKVKRDVEKLVRDSRELNKRTREESERLVEESERLNEESRKESERLVRELREKLR

SEQ ID NO: 7787 - protein, 184 aa, Artificial Sequence; identical to SEQ ID NO: 7786
  Synthetic

SEQ ID NO: 7788 - protein, 184 aa, Artificial Sequence
  Synthetic
SKLEDVERKVRELVRRSKRVIKEVERLVRELHKRSEDVLRKVKKDSRDLAREVKDVIRRKGTEEVAKEVRDLVEDVVRKSRKINDDVRKISEEIVKTLEKILKESLDLSEDIADKLRRLVDSVDKDKDVDKVRRDVEDLVRESRELNKRLKREVEELAKENRRRVEESRRESEELAKELRERLK

SEQ ID NO: 7789 - protein, 184 aa, Artificial Sequence; identical to SEQ ID NO: 7788
  Synthetic

SEQ ID NO: 7790 - protein, 187 aa, Artificial Sequence
  Synthetic
SSIEKVLRELEDIVRKIEERNKKSHDEVRRVVEEIKRRVKKSHEDVRRVVEKIDEDIKRKKDDKRVLKELLDTVKRVVERSKETSERLLREAEKAVRESKERSERSLRELEEMVRRATKRLVDERGKDDDEIRRVKERLDELIRRLEELIRRNVTELKRLIDDLRRLVEENVRRLKELIDKLREDVK

SEQ ID NO: 7791 - protein, 187 aa, Artificial Sequence; identical to SEQ ID NO: 7790
  Synthetic

SEQ ID NO: 7792 - protein, 187 aa, Artificial Sequence
  Synthetic
SEIERVLEELKKIVRRIKEKLKESHERVREVVERLKRRNEKSHRDVRRVAERIRREIEKKKSDKDVLDKLLDTIRRVVEESKKDSKKSLDELRRVVKESKETSDTLLEELERAVDKVRKILVRERGKDDKDIREVKKEADRLIKELRDLIETNEREMKKLIDELEELIRDNARRLEELIKRLEEEVR

SEQ ID NO: 7793 - protein, 187 aa, Artificial Sequence; identical to SEQ ID NO: 7792
  Synthetic

SEQ ID NO: 7794 - protein, 187 aa, Artificial Sequence
  Synthetic
SELEKVLEEAKRVVDEIKKKLEESHKDNRRTVEEIKRRNKESHERLKEAVDKLKAEIEKKRSEEEVLRELLKELERVVRTSEELSRRSLDELRKSVERSKRTSKRLLDELRRVVDEVKKILVKKRGKDDDRIREIAEELDKLIRELEKLVKRNADESDKLLDELRKLVEDNEREAERLIKELEDEAR

SEQ ID NO: 7795 - protein, 187 aa, Artificial Sequence; identical to SEQ ID NO: 7794
  Synthetic

SEQ ID NO: 7796 - protein, 187 aa, Artificial Sequence
  Synthetic
SEIERVLRELEKIVEELKRENEDVHRRVREVVKKLKDENRKSHEEVKRMVDKIREEIKRIRKDKEMLRRLLETLKRVVERSERESEESLKELRRVVEESKKRSEESLERLRRVAKRVKERLVEERGKDDDDIRRAAEKVDKLIKELEDLIRRNAEELRKLIEELEELIRRNRERLKRLIEDLKRAVE

SEQ ID NO: 7797 - protein, 187 aa, Artificial Sequence; identical to SEQ ID NO: 7796
  Synthetic

SEQ ID NO: 7798 - protein, 177 aa, Artificial Sequence
  Synthetic
SEMERVEEEIRRLLKELDKKARDVHEADKELVKENRKLADEVERDLRRLLEELRRDVNVEEVLKKVEEVIDKVRKVVEEIEKLSKDSNEKTKRVIEKVKEDLERVLRRVEEIARNNVDKKAIEDVLRKIKKLVEDLKRRIEEVLRESEALNEDTKRLIEEVLRDVRRTIDRLKKEAK

SEQ ID NO: 7799 - protein, 177 aa, Artificial Sequence; identical to SEQ ID NO: 7798
  Synthetic

SEQ ID NO: 7800 - protein, 177 aa, Artificial Sequence
  Synthetic
SDMDRVEKELEELLRENEELAKDIHRRDKELLEENRELVRRAEEELRRLLEELARDVNKEEIKETVERVIRDLKRVAREIEEESRRSNEETKELVKRVLEKTRKVIEEVRKVAKDNVGKEVIKDVLRKVRKINKETKELLRTVLEKSEKLNRDTKKRIKDVLEKIKRLIDELRERAR

SEQ ID NO: 7801 - protein, 177 aa, Artificial Sequence; identical to SEQ ID NO: 7800
  Synthetic

SEQ ID NO: 7802 - protein, 172 aa, Artificial Sequence
  Synthetic
KEREDIEDRVRKLIEELEESVRRSNETVKKLLRELEKLLEDSNRSVEELARDLRRKVKSELMEKVERLVKDLLRLSDTVAKKIRDVVKRLLEKSNESVKEIKKLLEKLEKEIRDDGDEKVLRKVEKVVEDLKRHNRKVNEEIKRVAEKLKRELEEVNKDIRRMARKLEEEVR

SEQ ID NO: 7803 - protein, 172 aa, Artificial Sequence; identical to SEQ ID NO: 7802
  Synthetic

SEQ ID NO: 7804 - protein, 172 aa, Artificial Sequence
  Synthetic
SEAEKIAEDVERLARDLERLLKESNDTVRTLIEDLRRSVEETAKEVRDLIEDLRRRVKSDKARKVEEVVRDLLRIVEESAEEIRRVLERLLEISNTVAKEIRRVVKELKEIVERRGTEEVLKELKKVADELRRILEDVNRRIRKVVDDAREHNKKVVEDVRRVAKEARDRVR

SEQ ID NO: 7805 - protein, 172 aa, Artificial Sequence; identical to SEQ ID NO: 7804
  Synthetic

SEQ ID NO: 7806 - protein, 181 aa, Artificial Sequence
  Synthetic
DEVEELERRIEKLAREVKKEIKDALRRNKRLIDEVKKIIEDVNRENRRLMEEVKRLIDAGVPKEEITEIVERVVEEVRRSDEKVARIVEDVADKIRRTNEDLERIVRKVVDEVRKMLERLPRGDELRRIAKRVEDLAEELKRLLDKSRETSERLVDELRKLLRESNETSKELVKRLDDRRK

SEQ ID NO: 7807 - protein, 181 aa, Artificial Sequence; identical to SEQ ID NO: 7806
  Synthetic

SEQ ID NO: 7808 - protein, 181 aa, Artificial Sequence
  Synthetic
SEAEKLLKEAKRLADEAKKIIKRAHEENKRAADEAKKIIEEANRENEKLAREAKKLIDAGVPKKEAADIAKKAADEARRSDEEADRIAEEAARRAKETDERAEKIARRAAEEAKEAAKKASRSDEAREIEKRVRELAEELKKLARESNEASKELAKELKELAERSNKTSEDLAKELEDRAR

SEQ ID NO: 7809 - protein, 181 aa, Artificial Sequence; identical to SEQ ID NO: 7808
  Synthetic

SEQ ID NO: 7810 - protein, 181 aa, Artificial Sequence
  Synthetic
SEVERLLEEIKELAKRVKDIIKEVNKENKRLVDEVKDRIRKINEDNNRLVETVKELIRKGVPKEEIADIVRRVVKTAEDSNRKILRIAEEVVRTARESDERVREIVRRVVEEVRELLKRLPPGKELERIEREVERLADELRKLLEESNESTERLAEELERLVRESERDSRRLAEELKRRLD

SEQ ID NO: 7811 - protein, 181 aa, Artificial Sequence; identical to SEQ ID NO: 7810
  Synthetic

SEQ ID NO: 7812 - protein, 181 aa, Artificial Sequence
  Synthetic
SELEKLKEEIKKLADDVKRIIKKVLDENRKLVDDVKKIIKKVTEENRKLVREVAELIKAGVPKKDIERIVREVVKKMEKSDKEVAEIVEEVVRRMRTSDREVKRIVEEVVRRVKEILKEAKPGKELEEIDKDVDRLIEELKRLLEDSNRDTERLAKELKDLLDESNKDSRRLAEELKRRTD

SEQ ID NO: 7813 - protein, 181 aa, Artificial Sequence; identical to SEQ ID NO: 7812
  Synthetic

SEQ ID NO: 7814 - protein, 181 aa, Artificial Sequence
  Synthetic
REVDELRKEIRRLAKEVKDIIKKATERNEELVRRVKEIIKEVNRRNRKAAEEVKELIRAGVPKEDIRRIVERVVREVRRTNDDVRRTVEEVVKDAERTDEELKRIVDDVVRRVRELLKELPRGEDLERIRKEVEELARELEKLLEESNRETKRLARELEKLLEDSRRSTEELAKELEEAER

SEQ ID NO: 7815 - protein, 181 aa, Artificial Sequence; identical to SEQ ID NO: 7814
  Synthetic

SEQ ID NO: 7816 - protein, 173 aa, Artificial Sequence
  Synthetic
REAEEVDKEIKKIVRDVRERIRKLNEDNRRIAEKVKREIEELNKRNRDTAKEIEKRGDKDLVDKVVKDVKKSNEDVKEIVKEVAKRAKESNDEAEKIVRDVVRRAKELLRRLPPGDELREIERDVDRLVEELRKLVEDSRRTTKRLVEELDELVETSDRETEKLVRKLRERER

SEQ ID NO: 7817 - protein, 173 aa, Artificial Sequence; identical to SEQ ID NO: 7816
  Synthetic

SEQ ID NO: 7818 - protein, 173 aa, Artificial Sequence
  Synthetic
SDLERVLREIKKEVDDVKRLIRELNERNRTIVEEVKKLIEKLNRDNERIVREVKKRGDEKLVEEVVRTMKKSNDELRKIVEEVARRAKRSNEELEKIVREVVRRVKELLKEVREGEEVKRIEDEVRKLVRELEELLKRSDDDTERLVEELKELLKRSEKKTRELAKELRDRRR

SEQ ID NO: 7819 - protein, 173 aa, Artificial Sequence; identical to SEQ ID NO: 7818
  Synthetic

SEQ ID NO: 7820 - protein, 173 aa, Artificial Sequence
  Synthetic
SEVDEVLKRIKEEVDRVKEEIKRLNKENNDIVRKVKKEDRDIVETIRKIAEDVKRRGDRDFVREVVKEVRRLLRESREIVKEVVKRMEDSNRRARDIVRRVMERAKKLLEDLPEGDELREIDERVEKLVKELEETLRESEKDTKRLVEELEKSLKETEDDVRRLVKELKDRDD

SEQ ID NO: 7821 - protein, 173 aa, Artificial Sequence; identical to SEQ ID NO: 7820
  Synthetic

SEQ ID NO: 7822 - protein, 173 aa, Artificial Sequence
  Synthetic
SKLEEVLRDIRRIVEEVKDEDRRIVEEIRKIAKDVKEKIKELNRENNRIVREVKERGDEDMVRKVAEDAKKSNEDVKRIVDKVVEDVKRLLERSRKIVDDVVKRAKELLERLDPGDELRRIDEEVEKLVKELEKSVEDTKREVDRLAKELEDLVRDSKRDTDRLVKELKDRTD

SEQ ID NO: 7823 - protein, 173 aa, Artificial Sequence; identical to SEQ ID NO: 7822
  Synthetic

SEQ ID NO: 7824 - protein, 174 aa, Artificial Sequence
  Synthetic
REVEEAADDLRRLIEENERSVRESKRTLEELIKENEDSVRRSEKSLRDLIRELEEEGVRERVVEELKRIVEKIVRDSRKSVDELRRIVEEVVKESKKSVEELERIVREVIRLLEEGAPVEELLKRVRDVSEESKRLDRKLNEDVKEVSKDSKRRDRELNERVRKVAEDVKETER

SEQ ID NO: 7825 - protein, 174 aa, Artificial Sequence; identical to SEQ ID NO: 7824
  Synthetic

SEQ ID NO: 7826 - protein, 174 aa, Artificial Sequence
  Synthetic
SEVEEAAERAKRLIDKLKESADRSEKTARDLIRDLNRSTEEIAREARKLIEELKKAGADSKAVKEAAEIAKRAIDAARKSDEDAARIAKRAAEASREAVKRAAEIAERAIRAAEKGADVKKALEEVRRAAEEAEKADRKLNKEVKEAADRARELNKKLADEVRKAAKEAKEKAD

SEQ ID NO: 7827 - protein, 174 aa, Artificial Sequence; identical to SEQ ID NO: 7826
  Synthetic

SEQ ID NO: 7828 - protein, 174 aa, Artificial Sequence
  Synthetic
SEVEEAAKEAKRLIEELNRSTEKIARDAKKLIEELRKSAKESADSARKLIEELKKRGAEEEAVKRAADIAKEAIDRSRKLVKEAEEIAREAIKKAERTDEEAARIAKRAIEAAEEGADVKKALEDVKRAADKAKEDNKKLLKEVEDAAREAKRADRELNKRVKEAADKAKEEAN

SEQ ID NO: 7829 - protein, 174 aa, Artificial Sequence; identical to SEQ ID NO: 7828
  Synthetic

SEQ ID NO: 7830 - protein, 185 aa, Artificial Sequence
  Synthetic
DELEEVRERIERLIRRSEELNKKVEKENKELVDRSREINRRVLDEIRRLIREVERILEEEGGETERVDRMVKEVVKRIEKLLKESKDVTEKIARDMRDTDRKSKEATDRVVTEIKRLLEEISRTVREEEVRKLEEEVRELIKKLERSNRELNKETEKLVEDLKRSNKELEEDVERLARKLEEELR

SEQ ID NO: 7831 - protein, 185 aa, Artificial Sequence; identical to SEQ ID NO: 7830
  Synthetic

SEQ ID NO: 7832 - protein, 185 aa, Artificial Sequence
  Synthetic
KELEEVEKRIEELARRVEERIKKVIEDNRRLVEESEKINEEVRREVKRLIDEVKEIIRRKGGETEEVRRVVEKVVKEIRDLLKRSRDVTREIVERMRRTDERLREEVERVVEDMRRLLEEIRRTVEEREVRRLEERVEELARRLEELLKESNTRSEKLARDLEKSNEDLEREVEELAKRLEEELK

SEQ ID NO: 7833 - protein, 185 aa, Artificial Sequence; identical to SEQ ID NO: 7832
  Synthetic

SEQ ID NO: 7834 - protein, 185 aa, Artificial Sequence
  Synthetic
DSVREVAERIDRLVKESERINREVIETNRRLFKESEKINDKVRKEIEDLIRRVKEIIDRDGGETEEVRKLVEDVVKRLEELVRESKRVTDEIVRRMEKTDEESKRVTDEVVKTAKDLLEELRKTVREEDLRRLKKKVDDLARKLEESNRRSNEDSKRLARELEESNKDLKRRVDELARELEERLK

SEQ ID NO: 7835 - protein, 185 aa, Artificial Sequence; identical to SEQ ID NO: 7834
  Synthetic

SEQ ID NO: 7836 - protein, 185 aa, Artificial Sequence
  Synthetic
DELKEVEERIERLIRESKRVNEEVKETNRRLVRESKEINKRVHDTVRRLVEEVRRIIDERGGETEDVKRVVEEVVRRARELSRRSDEVTKDIARKMRDTDRESEEITRRVVEELRRLVEEIRKRVDEKEVRRLREEVEKLAKELKRSNDESNKESERLVEDLKRSNTENSKAVEDLARELKERLK

SEQ ID NO: 7837 - protein, 185 aa, Artificial Sequence; identical to SEQ ID NO: 7836
  Synthetic

SEQ ID NO: 7838 - protein, 183 aa, Artificial Sequence
  Synthetic
RSVEELKKKVEDLVRKLEELVKDSKRESKELVDDSERLVKELEDDVRRLVRELRERVRRRRGEELEKIVDEVVRRAERLLEEVKKSSKKVADELERTNREVEEIVRKVVEDARKLLEELKRVDDERIIKRIEEEIEELIRRVEEIIRKVIKENRELVERDREIIKTVLERIRELIKEVTDRIE

SEQ ID NO: 7839 - protein, 183 aa, Artificial Sequence; identical to SEQ ID NO: 7838
  Synthetic

SEQ ID NO: 7840 - protein, 183 aa, Artificial Sequence
  Synthetic
SEVEKLEEEVERLVRDSERLNKRLEDRVKKLVEDSERLVRELEKTVRDLVKKLKDDVRRRPGEDLDKIVRKVVREAEELLKEVKKSSEDVADTLRRLLEESKKSSKRVAEEARRLLEELKRVDDERIIRRIRKEIKDLFDDDKRISEEVERRIERLFKEDKKIIEDVEREIRRLIKEVEDRIR

SEQ ID NO: 7841 - protein, 183 aa, Artificial Sequence; identical to SEQ ID NO: 7840
  Synthetic

SEQ ID NO: 7842 - protein, 183 aa, Artificial Sequence
  Synthetic
DDVERLERRVRELIKESEKLVDDLRKDVERLVKKSRDLNERLREDVERLVKELEDRVRKRRGEELEKIVKDVVDRARELLERSRRSSKEVAERLKELLERLKKSSEDVAREMERLLEELKRVDRKEIIDKVRKEIEDLVRKDKEIIDEIRKEIRRLVEEDEEISRRVEETIRRLIREVAERIR

SEQ ID NO: 7843 - protein, 183 aa, Artificial Sequence; identical to SEQ ID NO: 7842
  Synthetic

SEQ ID NO: 7844 - protein, 182 aa, Artificial Sequence
  Synthetic
SEVDELRKRVEELVRRSRKLVEEHRRKVRELVEESRRLVEELRRDVERLVKKLRDELREVREVVKRVEEELEKLVREVKRSVEESKRRLEDLDRRLRETTKEAEDLLRELLKRVEDLKDDERARDLIEEVRERADRVAKKDEDVIRKSEEDTERVVREDKKIIDRVRKDVEEVIRRVEEETR

SEQ ID NO: 7845 - protein, 182 aa, Artificial Sequence; identical to SEQ ID NO: 7844
  Synthetic

SEQ ID NO: 7846 - protein, 184 aa, Artificial Sequence
  Synthetic
STLERLTEDVKRVIREVEEVIKKLKEEVDKSLEDVRRKIEESRKETKRVIDEVKRRIKDKRKDKEVLKELVDRVVRVLEEANRTLEKVVKEHEDSLERVDRTLKKVVDDARKKLERVIERLRDENVSRVEELAKRLEELIRRLEELVDRLRKELKESIEEIRKRVRDHKEESKRLIRELDEEVK

SEQ ID NO: 7847 - protein, 184 aa, Artificial Sequence; identical to SEQ ID NO: 7846
  Synthetic

SEQ ID NO: 7848 - protein, 184 aa, Artificial Sequence
  Synthetic
STLERLDEDVKRVAREDTELIKESEERTKKSADDVRKKIEDSRRTTDKVVTDVEDIIEKKREDKRVLKEVVDELRRRLEELNRRLREVVEEHKDSLRKANRDLEESSRRSEERLRRVIETLRRNNVSRVEELAEKLKELLKDSERRVDEHRRKSEESTREIEELVKRHEDRSRELIKRLDEEVR

SEQ ID NO: 7849 - protein, 184 aa, Artificial Sequence; identical to SEQ ID NO: 7848
  Synthetic

SEQ ID NO: 7850 - protein, 184 aa, Artificial Sequence
  Synthetic
SLLEKLRRRVDEVIKRDDELIEESKRRTDEALKRVEERIRKSLEETKEAVDRVRDIIRRVRDQKEVLAKVVKELERIARELNRRLKEVVEELRRILEKLNRDLKKSSEDSKRELDRVIEALERGNVSRVDELRERLRKLLEDSEEKVKRHKDESDKLIKDIEDKVKRHEDESRRLIRELREELK

SEQ ID NO: 7851 - protein, 184 aa, Artificial Sequence; identical to SEQ ID NO: 7850
  Synthetic

SEQ ID NO: 7852 - protein, 176 aa, Artificial Sequence
  Synthetic
SEADELRKKLEETNKDIKRRVEELKRRLEESNERIEELVRRNEKKSKDLLDDVRRRGVDEKVLKKIEEVVDRNRKLLKEALDVNKKVVDEIEDRLRRVLDKNRKVVEEVERELRDSSEEVLKRLDKKLEDSRRDVERVEKEVEELLRESEERVKRVVETVDKTDEEVKKDVDDKRR

SEQ ID NO: 7853 - protein, 176 aa, Artificial Sequence; identical to SEQ ID NO: 7852
  Synthetic

SEQ ID NO: 7854 - protein, 176 aa, Artificial Sequence
  Synthetic
SEAEDLEKKAEDTNREIKKIAEELKKHAEDTNREIEKKVEDLRREAERILREVARKGVDEDVLRAIEEVIKTIEDLARKVLEDNRKVVEDVERLVEEVLKRNAKVVDEVREKARDSSEEVLERLERKLRESKREVDRLAEKIKKLNDDSRKRVDEVVERVRRLLEDVKRKVDEARR

SEQ ID NO: 7855 - protein, 176 aa, Artificial Sequence; identical to SEQ ID NO: 7854
  Synthetic

SEQ ID NO: 7856 - protein, 178 aa, Artificial Sequence
  Synthetic
DEVERLEEDVERSIRDSEKVVRDSERRVRESNEEIRRLIEESDKDVKRLIDEATKKSGESADLLRELREVVERVKRLNEKLLKENREASEEVRKINEDLVREDRRVVKEVKETVRRVDKREVIRELKERLKEISDRLKKRSEKSVRDLDDISRKIVRRSEDTVRKLREIARRLDERTK

SEQ ID NO: 7857 - protein, 178 aa, Artificial Sequence; identical to SEQ ID NO: 7856
  Synthetic

SEQ ID NO: 7858 - protein, 178 aa, Artificial Sequence
  Synthetic
REKDELEEAVRRSNKRLKDILEKSRKDVEESIKRSEELLKRSDDEARKLIEEMTRKSGEEADVLRTLREVARRAKELNKKLLEDDREVIRRVEEINRELLERNTRVSDRVREIVERTTDRKVIEDVLRELKKITDEIEKESRRSLDELRRISKELEDDSRRTLEELKKIVKELKDRET

SEQ ID NO: 7859 - protein, 178 aa, Artificial Sequence; identical to SEQ ID NO: 7858
  Synthetic

SEQ ID NO: 7860 - protein, 178 aa, Artificial Sequence
  Synthetic
DEDRRLEEEVRKSIEESERVIERSEEEVRRLIEEARTLLEDSRRKVEDLLREMTRRAGDKADLLKELKRVIEEVKRLNEKLLKELEDVIERVIRINKRLLDEDRRVVERVIRIVRRTTDREVIEKVLRELREISERLKRESERSLRELEEIARDLLRRSRRTVEELRRIAEELVKRAK

SEQ ID NO: 7861 - protein, 178 aa, Artificial Sequence; identical to SEQ ID NO: 7860
  Synthetic

SEQ ID NO: 7862 - protein, 187 aa, Artificial Sequence
  Synthetic
DELEEVLERIEREIRRVSERSEELSRRNEKIIREVEEESRRILEEIKREIDEVKKRAERVDKDTLRRIVETVVRRAKELVDRSKKITTKVVEELKRSMEESRKISEEVARRAKKLVDELRDRLRSEEAKKLVREVEETVRKLVEELREMNKRHEDKNRELSDRLREIDKRLEDEVRKLVEELRKKVE

SEQ ID NO: 7863 - protein, 187 aa, Artificial Sequence; identical to SEQ ID NO: 7862
  Synthetic

SEQ ID NO: 7864 - protein, 187 aa, Artificial Sequence
  Synthetic
DELEEVEKEMERIIREVERKLREVNERIKEIIERVIRESKEILDELKRIIDEVKKRAERVRKDELKRDAERVVKRLKDLVDRSRRITEKVVREAEKLNEDLHRDLERVVRTLKKLLDDLRRRLDSEDAERLVRELRKKVEELKRRLEELNRDDKRTIDELVKTLDKIDRELRKTVEDLVRDLERDVK

SEQ ID NO: 7865 - protein, 187 aa, Artificial Sequence; identical to SEQ ID NO: 7864
  Synthetic

SEQ ID NO: 7866 - protein, 173 aa, Artificial Sequence
  Synthetic
SKVDEVLKDVRRISEESERRIRELNDRSRKISKESEDRIRELLRRLEEIVERLKRTNDRDAVRKVVEVLRRVLEEVRRSVDEVRRLLEESLKEIERSVREVEKRAKTVLEEVKDDEKAEELRKEVERLIRENEELVERHRKTVEELRRRNEELVKRLEDTVRKLEKELKEEAD

SEQ ID NO: 7867 - protein, 173 aa, Artificial Sequence; identical to SEQ ID NO: 7866
  Synthetic

SEQ ID NO: 7868 - protein, 173 aa, Artificial Sequence
  Synthetic
SELDRAADRLRKISKRSEEEIRKLNEEVKKISKESEEKIRRLNEEVKRIVEEVKRRNDERVVKEVERRLERSLEEVEKSVREVKEVLERSLRKVEDSVRKVEDVLRKVLEEVKSDEKAKELAEIVEKLIRDNRRLVEEHEESVRRLEDRNRKLVEDHERTVRKLIKELRETRR

SEQ ID NO: 7869 - protein, 173 aa, Artificial Sequence; identical to SEQ ID NO: 7868
  Synthetic

SEQ ID NO: 7870 - protein, 173 aa, Artificial Sequence
  Synthetic
SELEKLLRDLEEIARKVEEEIRTLNEDVKRISKESKERIDRLKEELKKIVDDLKKRRIKEAVDEVKKRLEEVLREVEESVERVEREAKRSLEEIERIVRRLEKDVKKVLEEVKSDERAEDLRREVERLIRELRKLVREHERSVRKLIEENRRIVRELEELVKKLRKELEDTLR

SEQ ID NO: 7871 - protein, 173 aa, Artificial Sequence; identical to SEQ ID NO: 7870
  Synthetic

SEQ ID NO: 7872 - protein, 173 aa, Artificial Sequence
  Synthetic
SELEEAERRLREIVRKVEEDSRKLNEELKREVDEVRRRSEELNKRVRDEAERVRKENKRELVRKLEDEVRRSVEESKKISEDLKRRLEESVKESERISEELRKRLREVLEEVKKDEKAEDLARIVKKLVEDLKRLNKRHKESVDELVRRLEELDREHERTIRRMIEELRETER

SEQ ID NO: 7873 - protein, 173 aa, Artificial Sequence; identical to SEQ ID NO: 7872
  Synthetic

SEQ ID NO: 7874 - protein, 179 aa, Artificial Sequence
  Synthetic
KEVEKLLEDLKEVARRVSEEIKRLLKELKEVSKRSEDRIRTSLERVKKVVEDVLREADEFRSDKERLREVVERLEEILDRANKEVRDSVKDLEKILRDVVKEVEKLVKDLEEIVRKIIEDVKDVRELKEEIEKLLRRLRKLVKELKEEIKKIVDRNRKLVREHEARSEELKEEIRREVE

SEQ ID NO: 7875 - protein, 179 aa, Artificial Sequence; identical to SEQ ID NO: 7874
  Synthetic

SEQ ID NO: 7876 - protein, 179 aa, Artificial Sequence
  Synthetic
SEKEELLKRVAEVSKKSKDRARELNERLKKVVDEVLETIRKLNEDLKRVVERVKEKIKDKKDDKRVVKELVDKLERILERSIEETERLLRELKKILEESNRELEKSVEELKRIADRIIEAVDKVKELRKEAKRNVDENREVVKENKRTTEKLLRDLDRILKENKRTVEKLVRELREEVR

SEQ ID NO: 7877 - protein, 179 aa, Artificial Sequence; identical to SEQ ID NO: 7876
  Synthetic

SEQ ID NO: 7878 - protein, 179 aa, Artificial Sequence
  Synthetic
DEKERLLEDVKRASEDSERRIRELNDRVRRVSEESERRIRKLNKELRDEVEKVLREIDRIRKDKDVLRDLVRRLEEKLRRSNEEVRKSVEELERILRESNERVRKSVKELKERAERVIEAVDKVDELREEIEKNLRRNEELVKKNKKDSEDNKRDNDRLVKENEKTTEDLLRRAKEEVD

SEQ ID NO: 7879 - protein, 179 aa, Artificial Sequence; identical to SEQ ID NO: 7878
  Synthetic

SEQ ID NO: 7880 - protein, 178 aa, Artificial Sequence
  Synthetic
DETETVEKKLRDVLERVKKDSEDSREELKRVHKRSEELSRRSNKELDDVLDEVRRIIERSTDKREVEKVVRELREVAKRIKDKNRKSLKESEDVVRRVTERNAKAVKELEDVLRRAIEEVKDVEELKKRLDEMRKTIEKLLEDTKEELRELIERNKKLLDDTARRAEEIIKEIEDRSK

SEQ ID NO: 7881 - protein, 178 aa, Artificial Sequence; identical to SEQ ID NO: 7880
  Synthetic

SEQ ID NO: 7882 - protein, 178 aa, Artificial Sequence
  Synthetic
SREEKVLEDLDRVLKRVTDLSKESLDEVERVHEESERLIRDSNRVLRDVLEKVREIITKSTDKSTVKKVVEDLKRVLDEVKKKNEESLRRSEEVVRRVIEKNRKAVEELRKVVEEAIRRVKDVKELKDRAREVIRRIEKLVEDTERALRDLIRKNEELLKRTEEELKRAEEDIRRKSK

SEQ ID NO: 7883 - protein, 178 aa, Artificial Sequence; identical to SEQ ID NO: 7882
  Synthetic

SEQ ID NO: 7884 - protein, 186 aa, Artificial Sequence
  Synthetic
SDAERVLREIERLLEELKELVERVVRKSEELLRRAKRVNEEVNREIKKLADELEEVIRRKGGESEEVERTLREVTKEIRRLVRESEKLAEDIVRTSDKLVEDLREMLERVVREARKLVEDVERRGVPKEVVDTLRRVVEEITRELEELLERLRRVSEEIRRTLEELLERTRRLVEEIERKLREALK

SEQ ID NO: 7885 - protein, 186 aa, Artificial Sequence; identical to SEQ ID NO: 7884
  Synthetic

SEQ ID NO: 7886 - protein, 186 aa, Artificial Sequence
  Synthetic
SELDDVRRKIKRLIDELKRVNEKVNKDSEDLVREVERVNRDVNRRVKELLEELKRVIDERGGETEEVRRILKKVVEEARRLVEKSEDLARKVVKRSNELVKESKDLAKEVVERIRRLVEKVERDGVPEEMVERLRREVEKLERELRELLRRTEENSRRAKERLEDLLRRTRELVKRIEERLREELR

SEQ ID NO: 7887 - protein, 186 aa, Artificial Sequence; identical to SEQ ID NO: 7886
  Synthetic

SEQ ID NO: 7888 - protein, 183 aa, Artificial Sequence
  Synthetic
SDVERLKKRVDELAERLKRLDEELKKEVDRIETELRELLKRHEDRNRDISRRLAELLKDARERELEEIVREVVERSERTLREVEEIVRRVVEDARRLVRDSERISKEVEERMKRLVEEVKDVDKKEIVERILEELDRLMEKVERVSREILKTIEKLARDIKKRIEEVTRESERLAREVEEALR

SEQ ID NO: 7889 - protein, 183 aa, Artificial Sequence; identical to SEQ ID NO: 7888
  Synthetic

SEQ ID NO: 7890 - protein, 183 aa, Artificial Sequence
  Synthetic
DEVETLEKRVRELERRLEELNKELREEVRKIVERAKELDKRHKDDNERIEKELRELLRDVRDERLKEIVRKVSDESRKTLEDSRRISDRVKKELDKLVRTSEEISKRVADRMRELVDRIRRVDKDEIAKRILDEIDRLMEEAEKVTRDILRKVEELLRRVEDASRRVTKKSRELLKKVKEDLR

SEQ ID NO: 7891 - protein, 183 aa, Artificial Sequence; identical to SEQ ID NO: 7890
  Synthetic

SEQ ID NO: 7892 - protein, 183 aa, Artificial Sequence
  Synthetic
SEVETLEKAVRDIVERLKDLNRRLEKEVRDAVKRLRDLLREHEKRNREIAKDLTDKLRKATREELKRIVERVVEASKETLEEVDEIVRRVVREAKRLVDESERISREVVKRLEDLVREAKDVDRKEAATDILRKAEELADEVRRATEEIAKEIRRLVKEVEEVIKDVTRKSDELLKRVADAAK

SEQ ID NO: 7893 - protein, 183 aa, Artificial Sequence; identical to SEQ ID NO: 7892
  Synthetic

SEQ ID NO: 7894 - protein, 187 aa, Artificial Sequence
  Synthetic
DELETLADVVRKLIERSRDLLRRHEKRNDEIKKRLDELDRELKERAEEIKKRLEELLRRRDEDEIREVIRELEERLEKLLEDSRRVSKEVAERLDRTVKDVRKTIEESEKLLRELLEEVERKKDDERAEDVVRDVLRKAEKVVEEDERLIRRVTEESDRVLDRVEKETKKIVDEAKRMLREVEERIR

SEQ ID NO: 7895 - protein, 187 aa, Artificial Sequence; identical to SEQ ID NO: 7894
  Synthetic

SEQ ID NO: 7896 - protein, 187 aa, Artificial Sequence
  Synthetic
SLIDELRERVKEIKKRSEELLKRHEDENRRIVKRSRELLKKLRDVVRDIIRELRKELEDDKKEEIERVIRELKKRLEELVKEVERSSKELEKTLKRTLEEVRKTSKEVEETLKRLLKEVDDKKKDERAEEVVRRVLKEAEDLLRKDEKILRDVTRRSEKALREDEELAKRVLDEMRKVLEDVKRKSK

SEQ ID NO: 7897 - protein, 187 aa, Artificial Sequence; identical to SEQ ID NO: 7896
  Synthetic

SEQ ID NO: 7898 - protein, 187 aa, Artificial Sequence
  Synthetic
EELERLAESVRRIKERLKKLDREHEERNKRIVETSRKLLEELEREVRKIEEDLKRLLDERKDDEIRRVVEEVVRRARELVERIDRSSREVEKKLRETVKESRRVTEEVARRADKLLEDLERKKDDERAEEVVRDILRRLEELMRRAEEVTKKLTDDSRRLLKEDEDLVREIEERLRRLLKEVKERVD

SEQ ID NO: 7899 - protein, 187 aa, Artificial Sequence; identical to SEQ ID NO: 7898
  Synthetic

SEQ ID NO: 7900 - protein, 179 aa, Artificial Sequence
  Synthetic
DEDRDVKREVKKVHEDSARTVEKLDREVEKVHEESERTVRKSEKEAKEVLDRVKDIVKKKKDDKKVLKEVVEKLKRDLEELNKELRRSVKELKERLDKVKKDIRDSVRRLDEALKRVVKDNDKVEELKEDLKRILKENEDLVRELEKKLDDIMRENEELVREHEEKSKRIVRELEEEVR

SEQ ID NO: 7901 - protein, 179 aa, Artificial Sequence; identical to SEQ ID NO: 7900
  Synthetic

SEQ ID NO: 7902 - protein, 179 aa, Artificial Sequence
  Synthetic
EEKERADRKLEEVHKESKKTVEDSDEALERVHRESKRTVEESRKTLEDVVREVKRIVEEKREDKDVLRKVLEDLKEIVERLNRELEKSVEKLERVLEKLNRELEESVRRLKELLERVIRENSDVKELRRKVEEILKRNEEEVRKHKEKSKKIVEDNRRLVKRHKEESEEVVRDAAREVK

SEQ ID NO: 7903 - protein, 179 aa, Artificial Sequence; identical to SEQ ID NO: 7902
  Synthetic

SEQ ID NO: 7904 - protein, 179 aa, Artificial Sequence
  Synthetic
DEDREALKEVEDVHRRSEEKVRESRRRAEEVHKESKKIVDELRRRSEESLKRVEDEVRKKRSDKDTLRDLVRRHRDSNRKIIETIRRSVKEVKKLLKELDEELEKSVRELEKTLKRVVDDNDKVEELKDELRKIVETNRELVRRHHETVKKIMEENERLVRELEKRLEEADRKLEEEVR

SEQ ID NO: 7905 - protein, 179 aa, Artificial Sequence; identical to SEQ ID NO: 7904
  Synthetic

SEQ ID NO: 7906 - protein, 184 aa, Artificial Sequence
  Synthetic
SLEEEVRRIVDDIRRTNKELLDRSARRAEEIERRLEELLRRSRERADRIREEMRRMLEKAGDSERVRKLVEDVEKVLKEDIRTNEELLRRVRKVLEEDIKINEDLLRESEEVLKKVIEDVARTTDKKTVDDVLKRLKEENDRSREEIKRSNEESDRVLDEVRKRSEDSNRRLDKIVDEAKKELK

SEQ ID NO: 7907 - protein, 184 aa, Artificial Sequence; identical to SEQ ID NO: 7906
  Synthetic

SEQ ID NO: 7908 - protein, 177 aa, Artificial Sequence
  Synthetic
DELEEVLERLREIAERVIKESKEINDELKRSSERSKRESDKVNKRMREIMKELKDRGDKEVVDRVIKELEELVRRTEEILDRDNKELERLVRRSEEIARRVIEELKKLVEDVERGGIDEEDVRRIRKLVEDIARRLKEIIERNRESVRKSREENKKSIEENRRSVKKIADEAREDAR

SEQ ID NO: 7909 - protein, 177 aa, Artificial Sequence; identical to SEQ ID NO: 7908
  Synthetic

SEQ ID NO: 7910 - protein, 169 aa, Artificial Sequence
  Synthetic
EETERLIEAVKRIAEEVRKTIERLMERVEKTTRESEELNRRLNRELDREVEEVERANKEEAVKRLKEILERVLEESKRIVEEDNEEAKRVVEEVERIVRELKKFAKKVVDDRRSEELEKVVREVAERLDRLLKALRDLVEESARRNKRLIEETDRRIKEIAERLKRTSD

SEQ ID NO: 7911 - protein, 169 aa, Artificial Sequence; identical to SEQ ID NO: 7910
  Synthetic

SEQ ID NO: 7912 - protein, 184 aa, Artificial Sequence
  Synthetic
SEAERLLEELERSTRESAKRIRDLADKLRRSSEESVKDIERLTKELEEAVRRVLDKIRKKKSDKDEVRRLVKELTDILRESHKRVKESIDRDREILEEVIRRVKESIKEDKRRLDDVLAKLRKAPEEVVRRLAKVVEESRRTNEKLLRDLEKLVEDSKRRNDELLEKNARRIKEVEDELKRETK

SEQ ID NO: 7913 - protein, 184 aa, Artificial Sequence; identical to SEQ ID NO: 7912
  Synthetic

SEQ ID NO: 7914 - protein, 184 aa, Artificial Sequence
  Synthetic
KDAEDLLRRLRESTKRSEDLVRKLLEELERSSRESEKLIRELTDRLDKVVKDVERRIREKREDKEAVERLVRTLREILERSHRDVERSIREDRKIVEKVIEDAERLVREDKEELRRVLEEIRRVPEEVVKRLEKAVKESEDRNKELLDRLRKRVEDSKRRNDKLLKENRKRIEEIKRRLDELLR

SEQ ID NO: 7915 - protein, 184 aa, Artificial Sequence; identical to SEQ ID NO: 7914
  Synthetic

SEQ ID NO: 7916 - protein, 184 aa, Artificial Sequence
  Synthetic
SKAEKLLRDLEKSTEDSERRIRELLERLRESSRTSEELAKRLEEEVERATREVADKIRKKREDEKTVRELVEELRKILEEVIKDAKRLVEEDKRILEEVIRAVERSIKEDRDILEKVLEDIREVPKEVVDRLREIVERSREKNRKLLEDLRRAVEESKKRNEEVLRKLKKKVEEIEEELKERLR

SEQ ID NO: 7917 - protein, 184 aa, Artificial Sequence; identical to SEQ ID NO: 7916
  Synthetic

SEQ ID NO: 7918 - protein, 184 aa, Artificial Sequence
  Synthetic
SEIEELLKTLKRSTEKSEEDARRLLEELTRSSEESVKRLRDLTERLKEVAKEVIERIRRRKEEKETVEELIKELEKRLRDSHEEVRRLIEEDRKELDRVIEAVDRSVKRDKRILEEVLKEVRRADKKVVDRLKRMVDESRKRNEELLKRLEKRVRESRKRNDELLEENKRVIDKIREELERLRK

SEQ ID NO: 7919 - protein, 184 aa, Artificial Sequence; identical to SEQ ID NO: 7918
  Synthetic

SEQ ID NO: 7920 - protein, 188 aa, Artificial Sequence
  Synthetic
SLLEEIEELVRRAIDTVRRSSEELKRLVDRVNETNKRSTEELRELAERVDRRLDKLLKEIKEGKMVDKLRKLIETIRRVAEEVIRLSEEADRRDSELAKRVLDESRKLLREIERVAEEVRRVVTENDKSRELVEKLKRELRRILEEVRRLNEELMKEIRDTNRKSEKLNRDLKEEIKKILEDVEREVR

SEQ ID NO: 7921 - protein, 188 aa, Artificial Sequence; identical to SEQ ID NO: 7920
  Synthetic

SEQ ID NO: 7922 - protein, 183 aa, Artificial Sequence
  Synthetic
DEAEKLKERLKRVLRRVREINRKLLDELRKSNEKVRRINKRLKEELKRVLDEVEKRVREDKNKSRVKEVLKELEEVLRTVDEMSKRSLKENERSLKEVIKRSEKSLKELEDVLRKVEKDVESIDEKLVREIEEMVRRLKEEAEKLSEEIRKIVRESRETLKKLSDEVRRLVERAEEKARKDTK

SEQ ID NO: 7923 - protein, 183 aa, Artificial Sequence; identical to SEQ ID NO: 7922
  Synthetic

SEQ ID NO: 7924 - protein, 178 aa, Artificial Sequence
  Synthetic
KEDDDLRREIERLLRELEKMNRKVLEDARRLLEELRRVNKEVAERIKDLERRLKDVVEKKGGKTEEVERILRTVLKEIRDLVRRVAEENKRAVKEIEDLVRRVEELNKEVVRRIEDLVRKRLDERVKEEVDEIRDRLRKSNETLREIVRRIEEDLRKSDRELEELVERIEKRLRELVR

SEQ ID NO: 7925 - protein, 178 aa, Artificial Sequence; identical to SEQ ID NO: 7924
  Synthetic

SEQ ID NO: 7926 - protein, 188 aa, Artificial Sequence
  Synthetic
KLVEEVKRLIEESARKNEELIKEVEKEIRRSRKRDKELIEEIERLIREVKKRLEELLTEKKDDDRVREVVRRLEERLKRLLEEVEEVARRNNEILERLLKEVEDVVRTNRERMKELLEEVKTKKDREEAEELVRRVKEEIKRSTTESEKLVKEVKDRARKSHEDSERLAREVLKEIRRLLEEVEKDVR

SEQ ID NO: 7927 - protein, 188 aa, Artificial Sequence; identical to SEQ ID NO: 7926
  Synthetic

SEQ ID NO: 7928 - protein, 178 aa, Artificial Sequence
  Synthetic
KEVEDVKELIKKVNEEIKKIHERSNEEIKRVNEELRKIIKKVKDDLRRVLEEIERLSREGTDEKEARKLLERVERIVRKVKDELKKLNDELDETVKDVARKSKELNDRLREIVKKLVKGEDLLREAEKLVEDSRRSSEELVRRDKKLVKESRETSERLVRDLERLLREIEKRVREEAT

SEQ ID NO: 7929 - protein, 178 aa, Artificial Sequence; identical to SEQ ID NO: 7928
  Synthetic

SEQ ID NO: 7930 - protein, 178 aa, Artificial Sequence
  Synthetic
SEVETVAELIKDVNRRIREEVEEVKRRIEELNDRNRKIAEEVKERIRRVEDEIREARKRGESEERAKRLLEELRKIVKEVMRRVTESNRRLEETVRRVVERLKRLNDTLRDIVRRLVKGDELLTRIDRLVKDSERSSRKLVRELEELVRRSEEETEKLVRELERLVTEVARKVDEEAT

SEQ ID NO: 7931 - protein, 178 aa, Artificial Sequence; identical to SEQ ID NO: 7930
  Synthetic

SEQ ID NO: 7932 - protein, 184 aa, Artificial Sequence
  Synthetic
KDVEEALETLKRILDRVAKDNEDLIRELRDINRKITKENEDLIRDLERILREVEEEVKRRRDEEVLRELVKEVRRVLREILERSKESVKRSEDALREVLKRSRDSVKEVERVLEEIKRILDKSGGDELRRRLEALVEDVRRTLKELIEKTEKVVKEVEDNLRRLLKRTEEVVREVEKKLEEDRR

SEQ ID NO: 7933 - protein, 184 aa, Artificial Sequence; identical to SEQ ID NO: 7932
  Synthetic

SEQ ID NO: 7934 - protein, 184 aa, Artificial Sequence
  Synthetic
SEVEKVLEDLKRILEEIARRNEELNERLERINEEITRRNEKSNEETKRVLDKLADDVRKRKDKEVLEELVKDAERVLREDEKRSRESVERSEEALEEVKKRSEDSVREAKKALDEIRKIVKKRGGEELERTLEKLVDEVRKRLKELLDRSRELVKRVRENLERLEEDTRRLVERVRRELEKLRK

SEQ ID NO: 7935 - protein, 184 aa, Artificial Sequence; identical to SEQ ID NO: 7934
  Synthetic

SEQ ID NO: 7936 - protein, 185 aa, Artificial Sequence
  Synthetic
DEAEKVKRDIEEILKRVAEELKRVLEEIRRSSEEVERRNKEVLETLKRILEEVKERLKRIDKRRAAEELKRVLEEVERLVEELHRINRESIKRTKELLERVKRKLEAVIEEVRRLVEEVVKRRGEEAELVRELRELVRRIEEELRKLTEEARKLLEDNRRRLEELDRELKELVDRIREELERARK

SEQ ID NO: 7937 - protein, 185 aa, Artificial Sequence; identical to SEQ ID NO: 7936
  Synthetic

SEQ ID NO: 7938 - protein, 185 aa, Artificial Sequence
  Synthetic
DEAEKVLEDIKRSSEEVTRRNEKVARDSRKLSEDVEKKNRDVAERIKEIVDKVRRDLSRIDKKEAEKKLREVLKKVEELVKRLHEENRRSLEKSRELVERLHEINRKSEEDIRELVKDVVRKRGREAELVERARELVETNKKRLEDLDRELEELVKENEERLKRLDERLKELVDDIRRRAEEARK

SEQ ID NO: 7939 - protein, 185 aa, Artificial Sequence; identical to SEQ ID NO: 7938
  Synthetic

SEQ ID NO: 7940 - protein, 184 aa, Artificial Sequence
  Synthetic
REAEELLKDLERSSEEVDRRVKESNKESEKVSRDVEKKVKDSNKELREITREVAERAKRTDKDMVREIVERLRRTVEDVLRRNREIVDRSRKRSEDLLRRNRKIARENERLLETVLKKVTDDGIDEKMIKRAAELLKTSEDRLRKLIKESEDSIRENEKKLRELIRESEETLREIRKRLEDLER

SEQ ID NO: 7941 - protein, 184 aa, Artificial Sequence; identical to SEQ ID NO: 7940
  Synthetic

SEQ ID NO: 7942 - protein, 184 aa, Artificial Sequence
  Synthetic
KEAEDLMEELKKSSEDVERRVRESNKRSKEVSDRVAEEVKKLLERLKKILEEAARKRDRVDKEVLTKIAEDVVREVERVLREVEKILRESVRLSEKLMKENEEIVRKNKELLDRVLEEIKRRGVDEKVIRTIERLVRTSEKKLRKLLDDSRKSVEENRKRVTDLKKEARDLVEDIKRRLEEERR

SEQ ID NO: 7943 - protein, 184 aa, Artificial Sequence; identical to SEQ ID NO: 7942
  Synthetic

SEQ ID NO: 7944 - protein, 178 aa, Artificial Sequence
  Synthetic
REEEKVLKDLDDVLKEVTERVREDLRTNEDVVRRAEEEVTRLHEELKRSNDRAKEEVDRKKEDKDVLKKVVEENRRSLERILRRTEEVVERIKKVSEENRRSVEEIVKRLEEVLKEAIRRNDTEEVRKLVRELKEMLKRLEEDARRLVETTKKRLEDLKRTTDKLVKELEKTLEELRR

SEQ ID NO: 7945 - protein, 178 aa, Artificial Sequence; identical to SEQ ID NO: 7944
  Synthetic

SEQ ID NO: 7946 - protein, 178 aa, Artificial Sequence
  Synthetic
SDRERVAKKLRDVLKEVDEEAKKDHDTNKTVVKKVREDIERILRRLKEVLRKVKEEAERKKKDKEVLDRVLKELEKVLRDARRDVRRIIEEAKDVSRKNLDSSRKVVEKLKKVLDEVLEENDVEELRKLVKELRDRLRELEESSRKLVEDTRRDLERLREEIDRLVEELERRLEELRR

SEQ ID NO: 7947 - protein, 178 aa, Artificial Sequence; identical to SEQ ID NO: 7946
  Synthetic

SEQ ID NO: 7948 - protein, 187 aa, Artificial Sequence
  Synthetic
SDAETVLREIRKLNKEVNDASRETLERIEELNRRVERIVREVLKDIERLAREVEEVVRREGGKSDRVVKIAKDVLREVKELVERVVRVLRKVNKDVRRLVEELKRLAKEVNERVRRLVEEVARRLKGKEELIRRLEEIVKESEDNSKENVDRNDRIVRESERSSKELEDELRRIVKKLAREVDELIR

SEQ ID NO: 7949 - protein, 187 aa, Artificial Sequence; identical to SEQ ID NO: 7948
  Synthetic

SEQ ID NO: 7950 - protein, 187 aa, Artificial Sequence
  Synthetic
DDVERVLERIKELNRRVEEIVRRVLKTSRDLNKELNDISREVLKRIKDLMREVEEVVRRDGGESKDVEDILRRVLEEVKRLVDEVERLAREINEESRRLSERVKRTAEEVNKEVKRLVERVVEKLKGKEELIRELERIVEESKRTSDKLAKELDKLNEDSERNSRKNIEDLRRLVEELARKAEELIK

SEQ ID NO: 7951 - protein, 187 aa, Artificial Sequence; identical to SEQ ID NO: 7950
  Synthetic

SEQ ID NO: 7952 - protein, 188 aa, Artificial Sequence
  Synthetic
SLVEELEKLVEENERNMRELDKENRDIVEKNRENVERNERELRKLVERLERRIREVVRTKSDSEELKRIAEEVIRRVRELVKEVKRIAEKSIRDTDRLVKEVSEVNKKSIEDVKRLVDTVRRVTSDERLEEIVREVKERIKRSNDEANKENKRTLDEIRDSNRDVNRVSKEVLDEIRRLLKELEDAAK

SEQ ID NO: 7953 - protein, 188 aa, Artificial Sequence; identical to SEQ ID NO: 7952
  Synthetic

SEQ ID NO: 7954 - protein, 188 aa, Artificial Sequence
  Synthetic
SLIETLEELVDRNRRNLEKLDEENKDMLRKNEEDVEKNERDLRKLVKELRDEIRKLIEEKDKVEDLKRIAEEVIKEVDELVKRVTDILRESIKETERLIREVSKVNEDSIRTVEDLVRRVAEVKDDERLEDIVREVIKRIEESNRRVNKRNRETLERSKKSNKDVNEASERVLRRIKELLDELRERAK

SEQ ID NO: 7955 - protein, 188 aa, Artificial Sequence; identical to SEQ ID NO: 7954
  Synthetic

SEQ ID NO: 7956 - protein, 188 aa, Artificial Sequence
  Synthetic
SLEEELRRLVEELEKRLRELDKRNKDLLRENERNVEKLARDLEELVKKVRRVVEDVVTKKPDSEELKRIAEDVERRVEKLVRDVRRILEESIRDTKRLIDEVSDVNRKVIKEVEELVREVSKVTSDERLEDIVREVLKRVKDLLERAEEENKKTLDDSRKSNEEVNREVEKVIRRIEELVKRLEEAAK

SEQ ID NO: 7957 - protein, 188 aa, Artificial Sequence; identical to SEQ ID NO: 7956
  Synthetic

SEQ ID NO: 7958 - protein, 188 aa, Artificial Sequence
  Synthetic
DLVERLEELLKKIKRELEENIKRNRELLKKLEENLRRNEEKNRKLLEEIRKRLEDLLREKSDVEEVRKVAKEVEDKVRKVLEDSKRVVDTLRELAREHLKHSEDVVRELEERLKELLDEVRRKKDREEAEELVRRVEERMKEMVKRVHEVSEKNLRDIKKWLEDVNRISKETLDRLRELLKEAERRVR

SEQ ID NO: 7959 - protein, 188 aa, Artificial Sequence; identical to SEQ ID NO: 7958
  Synthetic

SEQ ID NO: 7960 - protein, 188 aa, Artificial Sequence
  Synthetic
SLREELEELLKRIKERLKRLIEENRRLLEDLRRNLEENIRRNERTVEELKRDVKRLLDEKSDVDKVREVIKELEKRLEEILRRSREVVEELRRRVEEHLRHSERVVKELEKRVTELLREVERKKDEERAEELVRRVKEEMERAVEEVKKTSEENLKAIKTWLEEVNRISEETLRRMREVLKELREDAK

SEQ ID NO: 7961 - protein, 188 aa, Artificial Sequence; identical to SEQ ID NO: 7960
  Synthetic

SEQ ID NO: 7962 - protein, 188 aa, Artificial Sequence
  Synthetic
RLVEELEKLLKDSHDKDRKLIRENEELLKELKRNLDENIKTNEELVDRIRKRVEDLLREKSDVDEVRKVIEDVERTVRRLVEESKRVVETLRELARRHLEHSRKVARENNERLKRLLEEVRRKKDEERAEDLVRRVEKEARDSSDESRRISEENLKEIKKWLDEVNEISKRTLEDAKRLLEDLERKAT

SEQ ID NO: 7963 - protein, 188 aa, Artificial Sequence; identical to SEQ ID NO: 7962
  Synthetic

SEQ ID NO: 7964 - protein, 184 aa, Artificial Sequence
  Synthetic
DLEEELKTVLDRARKDVKRLKEELERILEEVKRMVEELDKRLEDLDEEVREKVKRLIDEKKDVEEARKKLKEVLEDSRRLSEEAHRINRKVLKDVEKLIRDVERILEEVIRRVEKLIEEVKRITDERDVKRVLREAEELLKRVRDLVEKVLREIKRILEEVEELNRRIIRTSREILKRVEEEVK

SEQ ID NO: 7965 - protein, 184 aa, Artificial Sequence; identical to SEQ ID NO: 7964
  Synthetic

SEQ ID NO: 7966 - protein, 184 aa, Artificial Sequence
  Synthetic
SLEERLDKVRRRVEEEIKRLEDRLEELDRRVAETVKRLDDEARKLDEELRERVKDIIRKKDKVDDARRMLEEVIKRSEELSKKAHDINKRVLDESKRLSDEVRKILEEVRERVRELIERVKRITEEEKVKRVIEEMEEIVKEVRKRVDEVIKTSEEILRRVRELNKEILKESEDLAEEVRKKAT

SEQ ID NO: 7967 - protein, 184 aa, Artificial Sequence; identical to SEQ ID NO: 7966
  Synthetic

SEQ ID NO: 7968 - protein, 184 aa, Artificial Sequence
  Synthetic
KLEDELRKILEENRRIVKELEERMKRLDEAVRKAVEDLARSNEESNKRVKEVVDDLIRKKPDDEDAKRMLERVLRESKRLSDDSKRILERVLEESKRLSERVKRILERSIREAERLVEEVKRIDKEEDVKKVLDDIKESSDRVRREIEEVLKESEERLRRVEKKNEDIDRRSEEILDDVRRKAK

SEQ ID NO: 7969 - protein, 184 aa, Artificial Sequence; identical to SEQ ID NO: 7968
  Synthetic

SEQ ID NO: 7970 - protein, 183 aa, Artificial Sequence
  Synthetic
SLEEKARDVLRRSKELNDENRERAERMLDTNRRIADKLREEVERILREVEETVRRLIDEKKDSKRVRDLLRKLEEDVRKVLEDIERILKKSIEVSRRILEDSDKILKENLDLAREVLERVRRVSEDVVERLLKEVEDSSRRVHKRSEELLRESREISERVRETVKKLLEDVERLLRKVTKEVK

SEQ ID NO: 7971 - protein, 183 aa, Artificial Sequence; identical to SEQ ID NO: 7970
  Synthetic

SEQ ID NO: 7972 - protein, 183 aa, Artificial Sequence
  Synthetic
SLEDELREVLERSREKNERLRREAKKLLDTDRERVREILREAEKVLEEVKRTVEDLVREKDKVDEVRELLKRLEEAVRDVLRRLAELLERSLRVSEEVLRDVERILKENLELVKRVLERVRRVEEKVVEELLKRVEDSSKKVEDDVRRLLKEVEKISTELEELAKELVEEVRRIVKEVADRVK

SEQ ID NO: 7973 - protein, 183 aa, Artificial Sequence; identical to SEQ ID NO: 7972
  Synthetic

SEQ ID NO: 7974 - protein, 183 aa, Artificial Sequence
  Synthetic
SLEERAEKILRDSKRTNEKNEEDVRRLLERNERRVRKIEEEAKKVLEDVRREVERLIREKKDDKRVRDILARVIEEVERVLDEVRKLLEESLEMSERVLRESKKILKENLDLVKKALDDLRRVEEDVVRKLLDEVRESSERVHRKSEELLRRVEEISRTVEREVKKLLDRVRRVLEEAEKEVR

SEQ ID NO: 7975 - protein, 183 aa, Artificial Sequence; identical to SEQ ID NO: 7974
  Synthetic

SEQ ID NO: 7976 - protein, 179 aa, Artificial Sequence
  Synthetic
DESRELVERVERVVRKVEKDHERLDRANKESTDRVREAVRRLDEENREVVRKVEDEVKKVQDKKEVVKELVRDLERLSREVLRRVEELLRRNDEISRRLLEESRRLVKELEKILEDVLRAVPDSKEAERLLDDVRRKLEELVRNAERSLEESRKTNEELEKRVRESLKEVERVLRELEK

SEQ ID NO: 7977 - protein, 179 aa, Artificial Sequence; identical to SEQ ID NO: 7976
  Synthetic

SEQ ID NO: 7978 - protein, 179 aa, Artificial Sequence
  Synthetic
RETEEVIKTLEEVVKEVEERVRRLDEENKESTERVKKTVDDLDEENKRVVREVERRVKEVQDKKEVVTDLVRRLEEISRRVLREVEKLLKRNDEISKEVLERVKELVRRLKKIVKEVLDRAPDSKRMEEVLKRVDERLKELERKVTDSLRRSREVNKRLRDKVEKSLREVEKVLEDLKR

SEQ ID NO: 7979 - protein, 179 aa, Artificial Sequence; identical to SEQ ID NO: 7978
  Synthetic

SEQ ID NO: 7980 - protein, 184 aa, Artificial Sequence
  Synthetic
SLEERLREILKRNKEDVEDIRRRLEEILKRNKEEIDRLREELRRILEEVKREVKELIKRKSTDERLIRIAEDVIRRVKKLVDEVDDIARKSHERVRRLVEEVKRILKESHDTLRRLVRKVREDNDEKTAEEVIERIKKLTEDVRRDVERVIREIEKSSDDLRKVVKDVIDDIKRLLKELREEIN

SEQ ID NO: 7981 - protein, 184 aa, Artificial Sequence; identical to SEQ ID NO: 7980
  Synthetic

SEQ ID NO: 7982 - protein, 184 aa, Artificial Sequence
  Synthetic
SLEERLRKILTENERVIRKLERDLEENLERNKKTVKEIEDRLRKLDEDVERLVRELLRRKSTSKDLKKEVEDVLRKSRKLTREVEEILRRSIKRSAELVKRVRDIVRESHKELRRLVEEVRKDNDKDTAEEVIKEIEELTRRLEEEVRRVNERSDKSNEDVRRRVKEVEDESRDLARRLAERVN

SEQ ID NO: 7983 - protein, 184 aa, Artificial Sequence; identical to SEQ ID NO: 7982
  Synthetic

SEQ ID NO: 7984 - protein, 188 aa, Artificial Sequence
  Synthetic
SLEERLRKILEKVKRTVDESRKRSKRLLEENRETMDRLREEAEEILERVKEKIKELVDRKKDSERVKEVVRRVLEEVERLLEEVERVLRESIKTSEDLLRENEEMLKKLEDRAKKLVDEVRTKKDREEAEKLVEEVIRDLDRVADELRELSKRLSDRSRESNERVRRTVKEVIKEIKRVLKELEEKVK

SEQ ID NO: 7985 - protein, 188 aa, Artificial Sequence; identical to SEQ ID NO: 7984
  Synthetic

SEQ ID NO: 7986 - protein, 188 aa, Artificial Sequence
  Synthetic
DLRERMEKLLKEVKDEIDKSEKKSEDNLRTNKKDVDEIRKRLKRILDEVKEELRKLIDEKRDSERVKEVLKRVIETVADLLRRVDEVLRRSIKISKELLEENKKVLEEAKEEVDRLLKEVEDKESDERAEELVDRVAKRIRRVVEDVKRKSEDLNRKSNESNKRVRDLVERVKEEIDKVRDELRKSVK

SEQ ID NO: 7987 - protein, 188 aa, Artificial Sequence; identical to SEQ ID NO: 7986
  Synthetic

SEQ ID NO: 7988 - protein, 181 aa, Artificial Sequence
  Synthetic
SEEERIRELLERVRRRLEESKKKSKDVADEVKETNDESRERSEKLLREVEERLRELLRELDEERVKKLLKELKDRVKELLERDDKVLRENEKSVRDVLRTDEDVVRKLEEKLERVLDVVRKGEKDVEELRKEVEEVVERVRRISERLTEELRRSSERVKRISERLLEDLERVVRDVARRVK

SEQ ID NO: 7989 - protein, 181 aa, Artificial Sequence; identical to SEQ ID NO: 7988
  Synthetic

SEQ ID NO: 7990 - protein, 181 aa, Artificial Sequence
  Synthetic
SEEERIRELLERVDRRLKESEKRSTDVARRVREENKELEKAARKILEDARRELEKLLREIDDEEVRRVLRELEKIVREVLRRVEELLKRNEESVERVLREDKKVADDLRRELKKVLDVVRRGEKDVEELIKRVEDMVREVEKTSRKLIEELKRSSDEVRKMVEELLRRLERVLEEVKKRVK

SEQ ID NO: 7991 - protein, 181 aa, Artificial Sequence; identical to SEQ ID NO: 7990
  Synthetic

SEQ ID NO: 7992 - protein, 181 aa, Artificial Sequence
  Synthetic
KDEETVTKLLEDVERKNRESEKDSRKIVEDVKDENRKLEDEARKSLEDSERKLERLERDVDEERVRTVVRDLERISEEILRKIKEVVERNRKSLEDVLKKDKEVADRNRKTLKDVVELLKRGEVDVRELAKRLRESTERVEEISRRLIKELEDSSDKVRKVVEDLLRENKEAVRRVAEEAT

SEQ ID NO: 7993 - protein, 181 aa, Artificial Sequence; identical to SEQ ID NO: 7992
  Synthetic

SEQ ID NO: 7994 - protein, 186 aa, Artificial Sequence
  Synthetic
SELEKVEEDIRRLVERVKKIAEDVERLTRELVKEVRKSTEDSVRDIERLMKELREIARDVSDKEELIRRLEEVVKRVEESVRRDVDLLKRVVERSEDISRELRKEAEEVVKTVRRIVEELIRRRDKDKDAKKRLEDLLDTLRKIVEDVSRRLKELNDRLRKLVEDSKRRNEELLRRLREIVKEIAK

SEQ ID NO: 7995 - protein, 186 aa, Artificial Sequence; identical to SEQ ID NO: 7994
  Synthetic

SEQ ID NO: 7996 - protein, 186 aa, Artificial Sequence
  Synthetic
DSDKEVEKRIRELMKEVKDSTKESEDKIRESNERVKESSKRSEDEIRKLMEELDEIAKRVKDKKDLEELLRRVEETVKKLVDDDKETLRKVLEENRKSVEDDDRRLREVVERVERIVRELIRERDKDEDATRRLKKLLDDLKKEVDDSRRRNDELIKETERLIRESAKRNDKLLEDLKKRVDEIRK

SEQ ID NO: 7997 - protein, 186 aa, Artificial Sequence; identical to SEQ ID NO: 7996
  Synthetic

SEQ ID NO: 7998 - protein, 186 aa, Artificial Sequence
  Synthetic
DEREEVEKRIRDLAEEVRRIVKRVEDETRRLVEEVKKSSDDSRRTIEKLARELKEITRRVKDKRTLIEILRRVVEEVEELVRDDVDKLRRVVEESERISRRLEEKLEEVVKRVEEIVRRLIKRRKDDKEAKDRLEDLLRRLREEVKRVKEKLKKLNDDLRREVEKSKEDNERLLKKLRDEVRKSAT

SEQ ID NO: 7999 - protein, 186 aa, Artificial Sequence; identical to SEQ ID NO: 7998
  Synthetic

SEQ ID NO: 8000 - protein, 171 aa, Artificial Sequence
  Synthetic
DEVEKVLREIEKLIKEIREINKRINDRIEELIRRLRERVKKVSRESEELIRDLRRDGKEELVKEVLKRSEDLARRVKEEVKRVLEEVRELVERSVRIAEEVLREVRELVRKKLKDERKAREIIKRVEKVLEEVRRSLETSEKRVRDALREIEERLKENKRRVREVLEEIRK

SEQ ID NO: 8001 - protein, 171 aa, Artificial Sequence; identical to SEQ ID NO: 8000
  Synthetic

SEQ ID NO: 8002 - protein, 179 aa, Artificial Sequence
  Synthetic
DEKEKLIKEVEDSTETVKRLVEELSRRSKKITEDVERLVKKLSDESKKILDEVRDLVRKRGGRAKDVEEILKRVTRISEELVKRVEEILRKSNKVSRDIVKEVREILKEDEDLVRDVVRKLRNSEEADKLRKRSEDMVRRIEEHLKKNLKENKDALDKIRKELRENIETTKKTVDDIRK

SEQ ID NO: 8003 - protein, 179 aa, Artificial Sequence; identical to SEQ ID NO: 8002
  Synthetic

SEQ ID NO: 8004 - protein, 179 aa, Artificial Sequence
  Synthetic
DEKDKLIEELDKILEDVRRRVEELSRRSKEITETVKELVKRLSDESERILREVDDVVRKRGGRAEDVDRILKEVLRFSKRIVEEIERILRESNKVSKEIVDEVRKILEKLERDVEDVVRKLRDSEKAREVRRKVKETVERIEEELRRNIEENREMVERVEREARKNIKDTRKRVEEIRK

SEQ ID NO: 8005 - protein, 179 aa, Artificial Sequence; identical to SEQ ID NO: 8004
  Synthetic

SEQ ID NO: 8006 - protein, 187 aa, Artificial Sequence
  Synthetic
RVEEKLEKIKRDIEKLVEDMKESNTRSKRKLEKLVEEMRRNNEELTRRVEELVKKIEDDVRGKKLEEVKRLAKELREIAERSRKLSEELARELEKSVKDSLDESRRLARELEEVVRDVLRKIRKERENEDLVRRLLEEIRRILEEVRRTDKELLDENERILREVEKLNRDLVKEIEEILKKVEDDVR

SEQ ID NO: 8007 - protein, 187 aa, Artificial Sequence; identical to SEQ ID NO: 8006
  Synthetic

SEQ ID NO: 8008 - protein, 182 aa, Artificial Sequence
  Synthetic
SEVEKAIEEIEKVIKEVRDKNRRVLEESKKLIRTVEETNKRNIEEIEKWIKTLDELTDRNSDKKVIEKVLKELEDEVRRHVEHSERVLREAIKISEELVRRSEEVLKEVTERVERIVRKVVRTEDAAKKAKEIIDKLRTLVEEVKRTNDKSLRDTREVVRRVEETLRRVEEKVKKRVDEIRK

SEQ ID NO: 8009 - protein, 182 aa, Artificial Sequence; identical to SEQ ID NO: 8008
  Synthetic

SEQ ID NO: 8010 - protein, 182 aa, Artificial Sequence
  Synthetic
SEVEEVIRRIEEVLKELRRKNEEVLRESERANDEVRRVNEKNIRDIKKWLEDVKREVDNNRDKREIEKVLRELEKRVREHVEHSKRVLDELRETSRRLVERSEELLRRVRKEVKELVDKVVRSEDARRRAEELERRVDKVVREVEKTNKESEEESKKLVDDVRRTLREITERVKDAVEKTLR

SEQ ID NO: 8011 - protein, 182 aa, Artificial Sequence; identical to SEQ ID NO: 8010
  Synthetic

SEQ ID NO: 8012 - protein, 186 aa, Artificial Sequence
  Synthetic
SRDEEVARRVERVLEESEKLSKEVAEENEKVLREAREILEDVRKKVEDVARTLRELAKKVEDKDDLVRKVKKLVDEVEEILKDVIRRVRKLVKDLHDKNRRSLEESRRLVEEVEEILKDVIREEDKNEEAKRRLEDLRRKLEELVKRNEKKLRDLDERLKELVERIERAAEKLLRDLRDLVRKITK

SEQ ID NO: 8013 - protein, 186 aa, Artificial Sequence; identical to SEQ ID NO: 8012
  Synthetic

SEQ ID NO: 8014 - protein, 186 aa, Artificial Sequence
  Synthetic
RELEKVEKEVEDVLRDIERSSDEVRRENKRVAREMEESSRKVAEDVERVLRTLEELAKKVSDKDDLLRRVKKLVDEVRRRLEESIKRSEDLVRELHEINKRSIEETEKLLRDVEEILKDVIRKKDKNEEAKKRAEELVRRLEELLERNRETLERLDKELKDLVEKNKRTAEKLVKELEELVERIRK

SEQ ID NO: 8015 - protein, 186 aa, Artificial Sequence; identical to SEQ ID NO: 8014
  Synthetic

SEQ ID NO: 8016 - protein, 189 aa, Artificial Sequence
  Synthetic
DELERVRREVKRLADESEKVSREVEERVRDTNRKSEEISRRVEKLARELLKKVEEVERRSGTEEALRDVIRELKKVLETVKKIVEDSVRTSEKLLKENERIVEESRKTSEDIVRRIREIVEELVRRRDKDEDLKRTLDELRKTIEKLVKDNRETLERLIRESEETIKRNREKLEELKRRLETLLRRVRK

SEQ ID NO: 8017 - protein, 189 aa, Artificial Sequence; identical to SEQ ID NO: 8016
  Synthetic

SEQ ID NO: 8018 - protein, 189 aa, Artificial Sequence
  Synthetic
DELEDVRRRVDELVEELERVSRRVAELVKRIIDESRDISRRVARRVEELLRRLREVTKRSGTEEAREEVERTVERVLEEVERILRESVEISRRLVERIREIVRESLERSREVVKTIREIVKRLLEKRKDDDELRKRLEDLKRKIERLLEDNRRKLEELIRRAEKVVEENERTMRKLKEDAKRLLEEIRK

SEQ ID NO: 8019 - protein, 189 aa, Artificial Sequence; identical to SEQ ID NO: 8018
  Synthetic

SEQ ID NO: 8020 - protein, 177 aa, Artificial Sequence
  Synthetic
SVEDLVREVEERVRKVEKDLRELLDRLRRENEDAVRRSRESLRRNEEENKRVVDELRKDGVPESLVRELEESVKRVKEISDELLKRSKRSLEEVEEIIRRLEEDLKRVLDEIRKVATDGDGREEVVKKVREVLERVKETVKRVVDRNREVVKRLEDENRKVSEENKRVVEKVKEDAR

SEQ ID NO: 8021 - protein, 177 aa, Artificial Sequence; identical to SEQ ID NO: 8020
  Synthetic

SEQ ID NO: 8022 - protein, 177 aa, Artificial Sequence
  Synthetic
SVEELVRRIAEKLRKVLDEIERLVDELRKENEEVVRDIERLVEDNEREVRDVLRKLEKDGAPRSLLKTLEESSREVRKRIKKLVEDSRRSVKEVEERIRKLKEELKRVLEKIKKLAEDGDGSEDLVRDAERVLKRVTDEVRRVVKENKDVVRKVREEVERVSEENKRVLEKVTRDTK

SEQ ID NO: 8023 - protein, 177 aa, Artificial Sequence; identical to SEQ ID NO: 8022
  Synthetic

SEQ ID NO: 8024 - protein, 185 aa, Artificial Sequence
  Synthetic
DEVETLKREVERLNKEVLDRVRKVIKEIKELDDRVRRENERVIREVERLIEEVRDRVRKNSDVKELVKRLADELRRVVKESKRLTEELVRLSEEVNKRLEEEVRRLVEESKRVLREAKRVLDEDRDRRAEKIVKELREHSDEVVREMRELVERSKRHSTKVVEELKKSNKELEEKVRKVVRELEK

SEQ ID NO: 8025 - protein, 185 aa, Artificial Sequence; identical to SEQ ID NO: 8024
  Synthetic

SEQ ID NO: 8026 - protein, 185 aa, Artificial Sequence
  Synthetic
SEVEELRERIKELNKRVLDTVRRVLERVKELNEEVDRRNKEVIKEVERLLEEVKREVTREKDSKKLIDDLAKRLEDIVRKSKKDTRELVKRSKRINDEAEKLVRKLVEESRKVLEDAAEVLKKDRDRRAEKIVDDIRRHSEDVVRRMRKLVEDSRRHSKRVVEEMERSNRELEERVKRVVEELKR

SEQ ID NO: 8027 - protein, 185 aa, Artificial Sequence; identical to SEQ ID NO: 8026
  Synthetic

SEQ ID NO: 8028 - protein, 185 aa, Artificial Sequence
  Synthetic
SEVEELIKEIRRLNEEVRRRNKKVIEEVKKLNEDVKRKNDKVIEDVERLLREVKKRVEDESDSKELIKKLAKELEDVVRESEKETRRLADESRKINKESRDRTKKLVEESKEVVDRAARVIEKDRDRRVEEIVRTIEKHSRDVVREMERSNDESEKHSRKVVREMEKSNKELKKKVEKIVRDLEK

SEQ ID NO: 8029 - protein, 185 aa, Artificial Sequence; identical to SEQ ID NO: 8028
  Synthetic

SEQ ID NO: 8030 - protein, 185 aa, Artificial Sequence
  Synthetic
SEVEKLKREVERLNEEVLRRVRKVIEDSKRLNEEVRKRNEDVLKELKDLIREVKRRVEEEDKVKELVKKLARRLEEVVKDSKRRTKKLVEDSKKVNDEIRKLVRELAEESKTVLEEVRKVLKKDPDDRMRKIVEDLRRHSEEVVREAEDLVRRSEEDSRRVAREMEKSNEEIEKEARDVVRELER

SEQ ID NO: 8031 - protein, 185 aa, Artificial Sequence; identical to SEQ ID NO: 8030
  Synthetic

SEQ ID NO: 8032 - protein, 185 aa, Artificial Sequence
  Synthetic
SEVERVVKEAEDLSRENNKRVKEVVRRAEDTNRRVEDENRKLLKEIKDLLREVKETVKRIPKREAVKIAEKVLREVRELVKRSREIAKKVLEDNADLVRRVKESSEKVLKDVEDLVRELLDRKRDVERVRRLLEEVLRRVAEDVRRSEEELDKVLRDSAESLKRSDKSLRDIVREVEKVLDEIRK

SEQ ID NO: 8033 - protein, 185 aa, Artificial Sequence; identical to SEQ ID NO: 8032
  Synthetic

SEQ ID NO: 8034 - protein, 176 aa, Artificial Sequence
  Synthetic
SAEDLLRKLREDVERVMRELRKSNEESRKRVEEVVEEAERILKESRERSEELVRRLNVDRLAEELRDVDRRIDKDVKKAVEDLRRSVDRSLKDTEDLVRELREVLKRVADVVRKTRVEEVLRKLAEDVKRVLDKVKEENKRLLEENDRMLEEVRRLLKKLLEESEKVLEEVERKAR

SEQ ID NO: 8035 - protein, 176 aa, Artificial Sequence; identical to SEQ ID NO: 8034
  Synthetic

SEQ ID NO: 8036 - protein, 183 aa, Artificial Sequence
  Synthetic
DLREEIRKLREDAKRVIDESRKSVKENEKRNKKLLDESEKSVRENEERNKELIKRVKDRGVPEDIVREVKELLDRSIKKLREVTEEIERTLKDSIKKLKDVTREIERLAREVIKRLEEVERANVREVLRKVKEELRRVLEKLRRLNEEASRENERILRELRKKNRDMNEDNRRILEELDEKAR

SEQ ID NO: 8037 - protein, 183 aa, Artificial Sequence; identical to SEQ ID NO: 8036
  Synthetic

SEQ ID NO: 8038 - protein, 183 aa, Artificial Sequence
  Synthetic
DMEREVEKLERELRELIKRIRKIVDENRRRNEELLERSRESVRRNEEENRKLLEEVKKSGVPEEIVERIRKLLEDSIRKLRKVTKEIEEELRRSIEKAERVVEEVERLAEEAIRRLRDVLKANVEKVLREVKEEVRKLLEEIEKTVRDVSRENKRILDELRKKNKRADEENREILKKLREDVR

SEQ ID NO: 8039 - protein, 183 aa, Artificial Sequence; identical to SEQ ID NO: 8038
  Synthetic

SEQ ID NO: 8040 - protein, 183 aa, Artificial Sequence
  Synthetic
SMEEEIRRLEEDVRRLVDKSRKSVKENEERNRKLLEESKESVRDNARRNEKLIRDVRRKGVPEDIVREVEELLRDSIRDLKRVTDEIRKKLEESIKKLREVTERIERLLRKLITEAREVLRANVREMLEEVLRRLEDALRRLEEENKRVSEDNERILEELRRKNEEADKRNRDILDDLRRRAD

SEQ ID NO: 8041 - protein, 183 aa, Artificial Sequence; identical to SEQ ID NO: 8040
  Synthetic

SEQ ID NO: 8042 - protein, 183 aa, Artificial Sequence
  Synthetic
DMEDKVRKLERDVRELIKEVEKIVRDNADENRRVVEESEKSVRELADRARRLIDEIRKGGVPDEIVRRVEKALREVIKRLRDVTDEIRKLAKDSIDRLKKVVEDIRRELERAVKLLREVLSANSEDVLREVKERVEEVLDRVRKKVEKVSRENKEIVKEVRKKNEDAVREAEELLKKIREEVR

SEQ ID NO: 8043 - protein, 183 aa, Artificial Sequence; identical to SEQ ID NO: 8042
  Synthetic

SEQ ID NO: 8044 - protein, 186 aa, Artificial Sequence
  Synthetic
DEVEEVVRRIEELIKEVEDVDRDIERRVKELDEELRRVDDEIRRRAKKLLDDLEKRVREISDKETVVRIAREVLKEVKRLVEESRKIATDVLRENERLAKESTDIVREVKRRVEDLVKKLTDTKKDSERVRRILTELRKRVEKVVRDSEKTLRESVERSARLLKESKESLEELERRAREVVERIKK

SEQ ID NO: 8045 - protein, 186 aa, Artificial Sequence; identical to SEQ ID NO: 8044
  Synthetic

SEQ ID NO: 8046 - protein, 186 aa, Artificial Sequence
  Synthetic
DELEEAEKKVRDLIRRLREMNERALRESERLIRRLREVDEEIVRRIEDLLKKLREEVEREKDKETVKRIVEKVREDVRRLVKTSEEIVRRVLEEDKRLIKESKDIADRMLEEVRRLLREVLETKKDSREVRKTLKDLEDTVKRVLEESEESARESEKRSRDVLRESERSLRELEKKVRKLLEEVKK

SEQ ID NO: 8047 - protein, 186 aa, Artificial Sequence; identical to SEQ ID NO: 8046
  Synthetic

SEQ ID NO: 8048 - protein, 181 aa, Artificial Sequence
  Synthetic
SDVDKVAKEIDDALKDVRRKVDKVRKDNERVNREVEERVRRVTERNRDVIEEVKRRVEEVKEDKDRLDELLKEVKRSTDRVEETVKRLLERSEESVKEVVEILRKLLKDLERVVKEVRDRIGEKVSELVREIERRLEELVKELRKILDELRKRNEDTRRRLEEALKRNREEAERLEREIRK

SEQ ID NO: 8049 - protein, 181 aa, Artificial Sequence; identical to SEQ ID NO: 8048
  Synthetic

SEQ ID NO: 8050 - protein, 181 aa, Artificial Sequence
  Synthetic
KDVDEIATELDEVIDRIRKKVKEVVERDEKVNRDVNDEVDKLTERNRRVLDKVLKDVTRRKEEREVVEELLERLKKSTDDVRKTVKKLLRESEESVERVRETLERLLEEVDRVLKEVEERIGRKVDRLVDELRKRVEDAKREIREILEKLKRDNDESKKRLERLLKENEDALREILERLRK

SEQ ID NO: 8051 - protein, 181 aa, Artificial Sequence; identical to SEQ ID NO: 8050
  Synthetic

SEQ ID NO: 8052 - protein, 181 aa, Artificial Sequence
  Synthetic
DDVEKAVREVEEMLKRVDKEVERVSRENKRVSDEVRKKVKEVERKIKEVLDRIKDEVDRVKDDKEVLRELVERARDVVRKVREELRKLLKEDRESSEDVDRIVTELLRRLEEVLDDVRRRIGEKVDELVKRLEDKMRRVKEKLKRLLEKNREDSERSERELREILKKITREVEELAKELEK

SEQ ID NO: 8053 - protein, 181 aa, Artificial Sequence; identical to SEQ ID NO: 8052
  Synthetic

SEQ ID NO: 8054 - protein, 172 aa, Artificial Sequence
  Synthetic
EEVKKLLEEVRDLLRRVLEEVERSSDEDRKLNERVNEAIEKSIREVEELLRRIDREVDGGEEAVRRLRKVVKESRDLSEELVRRLEESLRDSRRRSKELVERLEKIVEDAERAGVREELVEELKRRVDEVKRRAEEINRENDERNKESKRRLEELNERLEERVRRLEEKLKK

SEQ ID NO: 8055 - protein, 172 aa, Artificial Sequence; identical to SEQ ID NO: 8054
  Synthetic

SEQ ID NO: 8056 - protein, 172 aa, Artificial Sequence
  Synthetic
DEVEDLRRRVEKILEDVKRTVETASKRDRELNEEVNRLLRESVERVDRLLDRIRREADGGEEVVRDAERIVKESEKLSTDLVRRLRDSLRRLEELVERLVRELERVVKEAEEAGVRKEIVDRLRKAVEEVSREARKILDENRRRNEESEKRMREINKRLEDKVREVKKELEK

SEQ ID NO: 8057 - protein, 172 aa, Artificial Sequence; identical to SEQ ID NO: 8056
  Synthetic

SEQ ID NO: 8058 - protein, 172 aa, Artificial Sequence
  Synthetic
REVDKLREDVRRLLEELLRALRESSKEDEKLNRKVNREVDRVLKEVDDLLEDIKKRVDGGKEAVEELERVVRKVEDLVRRLVEELEKSLRDSERLSREVVKKLEKIVEDAERAGVREEIVKRLEEEVREIVKEIKEINDKNRKKNEDSARKADEKVKELEERVRRVVKELRD

SEQ ID NO: 8059 - protein, 172 aa, Artificial Sequence; identical to SEQ ID NO: 8058
  Synthetic

SEQ ID NO: 8060 - protein, 172 aa, Artificial Sequence
  Synthetic
KEVEDLVRRVEKLLRDIDRELKRSSDEDRELNERVNREVDRVLREVDRLLKEIRETVRGGKEAKETLERVVEKVERLARKLVEELRRSVEKSRKLSEKVMRDLEKVVDDARKAGVEERIVRTLEKRIRDLVRKAEEIDRENEKRNKESSDRMERLVRELRKRVKRLVEELER

SEQ ID NO: 8061 - protein, 172 aa, Artificial Sequence; identical to SEQ ID NO: 8060
  Synthetic

SEQ ID NO: 8062 - protein, 172 aa, Artificial Sequence
  Synthetic
DEMRRLLREVERILEEVERVLEKSVRDDERVNREVNRRLDEVLRRVEDLLRRIEKEVRGGREAVELLKEVVDRVRRLVEELVKLMEDTLRRSRELSERLVREARRVVEELRAGGVEERLLERVRREVEKVRERADRIDKRLEDTNRRSKDRAEELVRELEKRVEDLKEKAEK

SEQ ID NO: 8063 - protein, 172 aa, Artificial Sequence; identical to SEQ ID NO: 8062
  Synthetic

SEQ ID NO: 8064 - protein, 172 aa, Artificial Sequence
  Synthetic
DEVRKLEEEVDRILREVKEMVEDSIRRHKEVNDEIRRRVERVLEEVKTLLDLIREKDRGGKEAVDRLRKVVTDVERTARELVRRSEKTVRESEELSRRLVERLEKVVEDAERAGVRKEIVDELRKRVEDVSREAKKLDDDLRENVKRLSEEMKKLVDDLRREVDRLEKERRK

SEQ ID NO: 8065 - protein, 172 aa, Artificial Sequence; identical to SEQ ID NO: 8064
  Synthetic

SEQ ID NO: 8066 - protein, 172 aa, Artificial Sequence
  Synthetic
DEVEELRRKVEEILRRIREDVRKSIEDHRDVNRRVLEAVRRSTKRNKDVVDRLRDEDRGGEEAARTLERTLKRSEELSRELVERSRKTVEESRRRSKRLVDELKRVVKEVKDGGVEERIVKRLEDEVRKLVDEMRKLDEELTRNVDEVRREAERLDKENRDENRKLKEELKK

SEQ ID NO: 8067 - protein, 172 aa, Artificial Sequence; identical to SEQ ID NO: 8066
  Synthetic

SEQ ID NO: 8068 - protein, 179 aa, Artificial Sequence
  Synthetic
SEMEKVVTDAKELLERLDRELERVIRESDKILDELRRKIEEVIKRSDELLEELDRRIKENKESKDLVEEIVRAAEESDKDVERVVDEIRKEVEKVNDEVRRLIKEIVDRLKDMLKKVRDAGVREELIERVRRLVEELIEKAKKLLEESERKSARLIEDLERLLEESRRKSDKLIKKARK

SEQ ID NO: 8069 - protein, 179 aa, Artificial Sequence; identical to SEQ ID NO: 8068
  Synthetic

SEQ ID NO: 8070 - protein, 179 aa, Artificial Sequence
  Synthetic
DEVEEIRKEIEDILRRLRDLLRRVIEDSRRLLDELRERNERVIKESEDLLRDLEDKIRKRKESEDLVREIVKRARESDDKSRRVSKESADRARRSDEKVERVIREVVERLRRVVKKAEDAGVDKEIVDRLRDEVRKLEEEAKELLRESNELTRELIDRLEKLNRDSNRKSRELIERLRK

SEQ ID NO: 8071 - protein, 179 aa, Artificial Sequence; identical to SEQ ID NO: 8070
  Synthetic

SEQ ID NO: 8072 - protein, 185 aa, Artificial Sequence
  Synthetic
SELEEVEERIKKELDRLEKKMEESIKRDKEINRELNEMLKKSIKDSDDILRELRKEIEDDKDSKDVVERVKRRLEELIKRDREVIEEVERRLDELIRHNEEVVREVKEELDRLIEEARDVLRKEQDKRAEEIVKKLEKEVEDLVRKAKKLVDELRKENEESKKRARELLRRSEEKVKKLVREAEK

SEQ ID NO: 8073 - protein, 185 aa, Artificial Sequence; identical to SEQ ID NO: 8072
  Synthetic

SEQ ID NO: 8074 - protein, 169 aa, Artificial Sequence
  Synthetic
DSEELVRTVKKELEDIIRESRKLVEDVARALEKIEKEIEEIVRTTDKELRKLIEEAKDVEELKKLVDDLRRENERVLRELKKTLTDLKRKLEESTRRSEDVVRKLIKELEDRGTEEVVKKVKDLLRELEKHNRTVLEEVKKALDELRRRLEEVHRRSKETLDRIRRDAT

SEQ ID NO: 8075 - protein, 169 aa, Artificial Sequence; identical to SEQ ID NO: 8074
  Synthetic

SEQ ID NO: 8076 - protein, 169 aa, Artificial Sequence
  Synthetic
REDELVDTVRKRLKELIEESERLLEEVKKKLEEIKRRVEKILRETEKELRDIIRKNKDVDELRRVLTELEKRNREVLERLEKLVRELLKEAERSLEKSRRAVTRLLEELRRDGDDKVLEKVRKVLEDLKRENKEVVERVDRVLEDAKRKLEKVHKDSRDALKKLDEDAK

SEQ ID NO: 8077 - protein, 169 aa, Artificial Sequence; identical to SEQ ID NO: 8076
  Synthetic

SEQ ID NO: 8078 - protein, 169 aa, Artificial Sequence
  Synthetic
SEKELLDRVKEKLKKIIDDVEEILRRSKKELEKIIRESEKLVEEVKRDLRRLIEENREVDELERLVRDLERILKESTEKSRRAVEELERINREVLERLRDALRKLEERARREGSEKVVEEVERVLEKLLRDVERVHRRTKEVLDELRKENKKVVEDVRDVLEKARERAR

SEQ ID NO: 8079 - protein, 169 aa, Artificial Sequence; identical to SEQ ID NO: 8078
  Synthetic

SEQ ID NO: 8080 - protein, 179 aa, Artificial Sequence
  Synthetic
EEVEDVARKIEKLLEDVRRIDKEISDRNRELLKEVRKIDEKILREIEKLLEELRDTATKDSDKRAVTEIVTRVVERVEKLLKESEDIVREVEERVRRSLKESRRILEEVVRRVKELLERKLGNTEEAERIKRELDRIRKESEETVKENEERLRRIKEESRRSVERARTELKRIEDEVRK

SEQ ID NO: 8081 - protein, 179 aa, Artificial Sequence; identical to SEQ ID NO: 8080
  Synthetic

SEQ ID NO: 8082 - protein, 182 aa, Artificial Sequence
  Synthetic
KVEDELRKLREEVRRSKEEVEKKVKELDEEVKRSKRESEKKLRDLREEVKRLEDDAERSNDDEVRKIVKEVKDRVEKLLKEVEESSKEVEERVKKLLDEVRKSSDRVREEVERLLKEVADENREKFLEEVRERVRKLLDENHKILKEAERRVEELLRRNHKILKEALDRVRKLLKELRDRTR

SEQ ID NO: 8083 - protein, 182 aa, Artificial Sequence; identical to SEQ ID NO: 8082
  Synthetic

SEQ ID NO: 8084 - protein, 186 aa, Artificial Sequence
  Synthetic
SIEEILRELREHVKENMERSEEIVRDLTRKVDESTRDSERILEKLKKDVDKLEEDAKRANSERVKKVIKEAKKRVKELLEELKKSSDDVRRTVEELVKEAKESSKRVKDEVERLLEDLERKKDREEAEELLREVRERVERVSRRNEELLKRVERDVERVLRENHELLKRVAEEVERVLKEVRERTK

SEQ ID NO: 8085 - protein, 186 aa, Artificial Sequence; identical to SEQ ID NO: 8084
  Synthetic

SEQ ID NO: 8086 - protein, 186 aa, Artificial Sequence
  Synthetic
SIEEILEKLRREVEESEKDSRRSAEELRKHVRENEKRSEDIVRKLTEDVERLERKARSRNDRRVEDLVRRVKRLVTELVKKAKESSDKLREDVERHIRHSEDSSRRVKETVERLLKRLEEKKDREEAKELVREVAERVEDVLRKNHEINKTNAEAVKKWSEDNRKLLEDVRREVERVLKELEKEMT

SEQ ID NO: 8087 - protein, 186 aa, Artificial Sequence; identical to SEQ ID NO: 8086
  Synthetic

SEQ ID NO: 8088 - protein, 177 aa, Artificial Sequence
  Synthetic
DEVRKLVEELRKINEDDKRRSDKNFDDNRKLAEDVKRVLERNVEENRKMAKRLEEVLRNNSPSKDLAELIKRWEELIKKSEDDLRRLLKEWEELIRRSAEDSKRSLDDLRRLLERIRRDGLDEKLLKEAEERIRRNAEENRKLLERSKKALEEVERRARKLLEESRRALEELKKRAD

SEQ ID NO: 8089 - protein, 177 aa, Artificial Sequence; identical to SEQ ID NO: 8088
  Synthetic

SEQ ID NO: 8090 - protein, 177 aa, Artificial Sequence
  Synthetic
DEVRELVKELRELNKRDKKRSKELRDKLEEANREDEEKTRKNKEDNERMAREVERVLRDDSPSEVVRKLLEDWKKLIKDSEDDSRKSLEELKKLLRELAEDSKRSLEELRDLLRKIAEAGLEERLLKEAEELIRRNEEENRRILREVEERIKKNEDDNRRVLKRSREELERVEREAR

SEQ ID NO: 8091 - protein, 177 aa, Artificial Sequence; identical to SEQ ID NO: 8090
  Synthetic

SEQ ID NO: 8092 - protein, 177 aa, Artificial Sequence
  Synthetic
DEVDKLRKELEDANARDREKSKENKDENDKALKELEEVLEKLKRELEEIVRRVKEVLDKNSPSEVVKRLLDDARRVLKKLADDLRRLLDEWRKLLRKSAEDSRRSLEELERLVKRIAEAGLEEEILKKIEKEIRTNREENERLLKESEDELKRLEDEMREILERIKRLIEEVEERAR

SEQ ID NO: 8093 - protein, 177 aa, Artificial Sequence; identical to SEQ ID NO: 8092
  Synthetic

SEQ ID NO: 8094 - protein, 177 aa, Artificial Sequence
  Synthetic
DEVRELVKELERINKEDRDKSRENFKRNADIAKEVEDNLERNEEENRKVEEEVRKVLRDNSPSKVIRELEEDWKRLIKESEDDLRRMLKRWEELIEESRKDSEDSLRALERLLEEIARAGLEEDLLRDAKRKIDENKEENERLLKESRKLLERVRKRAEELLRKSRKALEDLKEEAK

SEQ ID NO: 8095 - protein, 177 aa, Artificial Sequence; identical to SEQ ID NO: 8094
  Synthetic

SEQ ID NO: 8096 - protein, 177 aa, Artificial Sequence
  Synthetic
SEVDKLEKEVRDANERDRRNSERNRKENEEMLRRVERVLRELKKKLEEAIRRARKVLDDDSPSEVIKELLKELKRLLEEIARTLKRLLDEWKKLLDDSAEDSKRSLDELRRLLEKIRRDGLDERILERIEELIRDNAKRNEDLLRRSKEMLDELRKKAKEILDRIRKLIKEVEDKAR

SEQ ID NO: 8097 - protein, 177 aa, Artificial Sequence; identical to SEQ ID NO: 8096
  Synthetic

SEQ ID NO: 8098 - protein, 178 aa, Artificial Sequence
  Synthetic
DEVERVVEKLKTLIEEWKRLTEEIEKKNEELIRRIEKVLEDLFRENEKLARDIKREIDELRTDKKMVDDLRRRLEESLRRSEEAIRKLDEDLERSLRETEELSRRMLERLKRILDEARERNVDEELLRRIEEDIERLERTDREVLKRSEKKIRELRERAKELLKRSEEIIKKLEDEAR

SEQ ID NO: 8099 - protein, 178 aa, Artificial Sequence; identical to SEQ ID NO: 8098
  Synthetic

SEQ ID NO: 8100 - protein, 178 aa, Artificial Sequence
  Synthetic
SKDDELKRKIDELIDRWRRLTEEIKKKNDELVKKWEKLTKEVTDHSRDLNRKIREELERLRTSREVLKKLLEDLRDDLRRAEELSEKMTRELERSLEETRKLSEEARKRADEILDEIRKNRLDERLLEEIEERIEKLERDDKKVLDDSRKKIDDLRKRDEEVIRRNRESIDRLRREAD

SEQ ID NO: 8101 - protein, 178 aa, Artificial Sequence; identical to SEQ ID NO: 8100
  Synthetic

SEQ ID NO: 8102 - protein, 179 aa, Artificial Sequence
  Synthetic
DEVETVDDRVKKVIRKLEELLRELAKLNKDIVDDIRRRLKEVEERNRKLAEDIERLLEEGGEDTKRLLREVEEIARRLHEENERVLREIEKLARELHKLNEKVLRDIDRLLRELEEELRRTGVDEDVIKKVRDEAERIRREVRRLDEESRKTVKRLLDEVRELNRRSEEELRELRRRIE

SEQ ID NO: 8103 - protein, 179 aa, Artificial Sequence; identical to SEQ ID NO: 8102
  Synthetic

SEQ ID NO: 8104 - protein, 178 aa, Artificial Sequence
  Synthetic
SELEEVRERLRKLIEDLKRLNEESLKENREIIKALRELNERSLRENKELIKRLEDSNLTSEDAKRLVKRVEDESRKSAKRNEDVVRESRERSKRSAERNKRVVREVEERVKKLAEDIDEGDEARTIIEEIKRRVDELRKHIEESIKEVKKLNDEVEKHIRESIKESEEDLKRLKDRID

SEQ ID NO: 8105 - protein, 178 aa, Artificial Sequence; identical to SEQ ID NO: 8104
  Synthetic

SEQ ID NO: 8106 - protein, 177 aa, Artificial Sequence
  Synthetic
KDDEDVDEKIRRAIKKNEELSREIEDKIRRILKKHEDLTRDLAREIREVVRKLRELSKRGGGKEMADKVLKEAKEVIEKIERTSRKSLKEVKDLIDRLAERSKKSLDELREVIERLRERGVSEELLRKVEELLRRLEEENRKILKEVDERLKDLEKKDRDLLEEAKKLLEDVERELR

SEQ ID NO: 8107 - protein, 177 aa, Artificial Sequence; identical to SEQ ID NO: 8106
  Synthetic

SEQ ID NO: 8108 - protein, 182 aa, Artificial Sequence
  Synthetic
SELEKLIKELRDLVRESEERLRELVRKVKELIKRSEDEVERLLDRSRELAKELEEEIRRKGLEERLLREIEKELRELLKRNRDSLRRLKELYRELLRRIRKLLEDIRRKYEEVLRRLEEAPDRREVLDKLKKDAKRVNDDSERIIKRADEEVKRVNEESKRMLEENEKMNRDLVRRIRERIK

SEQ ID NO: 8109 - protein, 182 aa, Artificial Sequence; identical to SEQ ID NO: 8108
  Synthetic

SEQ ID NO: 8110 - protein, 177 aa, Artificial Sequence
  Synthetic
DLEEMLTEVERLARELEEESKKIRKEVERLARELEEESKEINKRIKDKADDLKEKLKDVREVDKLLKEIEEELRRVTEESRKVLDDVRRDLDRVHEETRRKLEELKKRAEEVRRSNVDREIIKRLVDEVKKVIDELMKKNRKLLEDVERILTELSERNRDLARKVDKLIRDLEKRAR

SEQ ID NO: 8111 - protein, 177 aa, Artificial Sequence; identical to SEQ ID NO: 8110
  Synthetic

SEQ ID NO: 8112 - protein, 182 aa, Artificial Sequence
  Synthetic
SKLEEVKERVKKLSKRNLDVAKRVLDEIDKLIKEDLKKTEDALRRIKELLDRLREMKRRGEIREEEVKRVIDDVRRLLEDIERHNREVRKRVEELLKRLKEHTEEVARRVERLLEELKKDDDDERIRRIVKEVRELVRRNDEEVDKIVEEVKRLLERSSRENEKVVREVEELLKRLEEEARK

SEQ ID NO: 8113 - protein, 182 aa, Artificial Sequence; identical to SEQ ID NO: 8112
  Synthetic

SEQ ID NO: 8114 - protein, 182 aa, Artificial Sequence
  Synthetic
DDVERLLKRVKELIDDDLRKTEKALREIEKLSRDNKKRTEDVLREIEERLRRLEEATRRGEIREEEVEKVIREVRELLKDSTRHTEELVRRVRRLLEEIKRHNTELRKEVRELLDDVRRKEDSERVRKIIRDVERLLEESTRRNEEAVKRVERLLEENKKRNEDVVREVEKELRRLREEARK

SEQ ID NO: 8115 - protein, 182 aa, Artificial Sequence; identical to SEQ ID NO: 8114
  Synthetic

SEQ ID NO: 8116 - protein, 182 aa, Artificial Sequence
  Synthetic
SDIEKVLEDIRRLSKKNVDDSKRVLDEIRELSKRNLELVKEVLERIRRLLKKLEEARRRGEVRKEAVRTVEEDIRRLLEELKRHTEEVDKRVRELLERSTRHTEEVAEEVRRLLEKLKERTDTERIRKIVEDVKELLDRNREENERIVREVEKLLDENRKEVEKILREVERLLEELEKRERD

SEQ ID NO: 8117 - protein, 182 aa, Artificial Sequence; identical to SEQ ID NO: 8116
  Synthetic

SEQ ID NO: 8118 - protein, 182 aa, Artificial Sequence
  Synthetic
KEVEDLLKRIRDLLKRVEETSREVLEEIKRLIDRDRKHSKEVLDEIKELLKRLIEAAKRGEIREEDVKRVARKVEKLLERNKKHNRDVEERVKELLKDSTRVLKEVEKRIRELLEDVRRREDSERVRTIIREVEKLLKELEDKNDEIVRRVEELLRKSHEDNRRIAEEVREMLKRLEDEMRR

SEQ ID NO: 8119 - protein, 182 aa, Artificial Sequence; identical to SEQ ID NO: 8118
  Synthetic

SEQ ID NO: 8120 - protein, 185 aa, Artificial Sequence
  Synthetic
SSLEKVEKDIRKLNDDSKKEAKRVTEENRKSNEDVERELRKIVEEVRRLIKDVEDKIRKDGTDEDVKRLVDEVKKRVEDLERKAKELIDRDDKKSEDLARKLRELLKDDARKVDKLIRDMDRETRTERVKRIVDELRKSLRKLEEDVKELIKENKESNDRLRERVERILKELRELLRELEEKVKT

SEQ ID NO: 8121 - protein, 185 aa, Artificial Sequence; identical to SEQ ID NO: 8120
  Synthetic

SEQ ID NO: 8122 - protein, 185 aa, Artificial Sequence
  Synthetic
SEVERLVEEVRKSNKKWEEESRELTERNKKLNRETTKRAEDLLERVRELVRTVTEIIKREGTDEKVEELVRRVKKALRELIETLKDLVRRDDEKSRKLIEDDRKILKEDEERVEELIKDLDRKRRDERLKRIVEEIRDSVRRLKEKSEELVRRNEESNDRLRRRVEEIAKEARDLVRRLEEEVRR

SEQ ID NO: 8123 - protein, 185 aa, Artificial Sequence; identical to SEQ ID NO: 8122
  Synthetic

SEQ ID NO: 8124 - protein, 185 aa, Artificial Sequence
  Synthetic
SEAERVLEEVRRLNDKSKKTAEKLTEENKRLNKRTTDFLKEVLERIEELVRRVEDRIRKEGTSREVKELVDRLKDRVRELIKEARKMVKEDDRRSEELVERLKEIIERDRRTVEKLIEDLKRKSDDKRVKDIVREIRDSVRKLEEEVRKLIRENEKSNKDLRRRVRKIEEDIKRIIRELEERVRK

SEQ ID NO: 8125 - protein, 185 aa, Artificial Sequence; identical to SEQ ID NO: 8124
  Synthetic

SEQ ID NO: 8126 - protein, 185 aa, Artificial Sequence
  Synthetic
SELEKILKDIEDLVRKWLEESKDLLRKLKKLNEDTTERLRRLLDELRKLIKDLLDKIRKDGTDDRVRKLVEDITRKLEELIKEARELVREDKRRVDELIRRDEEIAKEVEKEVRRLIRDMKEKRDDKRVKDIVKKIEELVKKAKEESKKIVEEVRRSVKRLEEEVRKIEKDIKDLIDELRKKVTT

SEQ ID NO: 8127 - protein, 185 aa, Artificial Sequence; identical to SEQ ID NO: 8126
  Synthetic

SEQ ID NO: 8128 - protein, 175 aa, Artificial Sequence
  Synthetic
SEVEDLRRELEEINKEWNKRTKDLVKEVEEVNRDINKKIRDLLREARRLVDEIRRLIEKGEPKEELIKTLRRVVEEIEKDIRRLEERLAAIHKKVKDDDKKLADELREMHKRVEDRVKNEEVIKELRKLLEESERRAREMNKRLDRLLEESKKDVDRVREEIKRLVDEIEDRARK

SEQ ID NO: 8129 - protein, 175 aa, Artificial Sequence; identical to SEQ ID NO: 8128
  Synthetic

SEQ ID NO: 8130 - protein, 175 aa, Artificial Sequence
  Synthetic
DEIEEVLKRLEEIVKTWDERTKRLTERVRTVNREVNERHKKLTRDLRELAREVLDLVRQGKDKDRLIKRLEDMIRDIVRRAREINKRLAEIHKRVEDEDRKLAEELRDVLDKVRRKLRSREMLRELEERIRTVEDKVRRVNEELRELLKTSNRRSEEIEKELEKILREIRERARK

SEQ ID NO: 8131 - protein, 175 aa, Artificial Sequence; identical to SEQ ID NO: 8130
  Synthetic

SEQ ID NO: 8132 - protein, 175 aa, Artificial Sequence
  Synthetic
DEVRKVLEDLRKIVREWEERTERLLRDLKRINEEINRRVEKLTEELRRLVKEIKKLTDDGKDKKKLITELEEVARRIVETLKDLLRRLAEVHKKVVREDEKLLEDLKRFLEDLKRKMKNEDVLREADKIIEDVEREARRVNKELKDLLDESAERIERIIREIERLVEKIKRDADR

SEQ ID NO: 8133 - protein, 175 aa, Artificial Sequence; identical to SEQ ID NO: 8132
  Synthetic

SEQ ID NO: 8134 - protein, 175 aa, Artificial Sequence
  Synthetic
SEIEKVLDELREINRRINETAKEILRRLKEINERTKKEIDRLLDELRKLLRRVEELRKEGRDTEELIKRLRERVDEIRRDIKRLIDEDRKRVEDVERELERLAEELRRMHEDAKRKMKSEEALKDLERLLRESEKRIREIIKRIRESVEKLERDVRRVIDEIRRRLEEIERRLRK

SEQ ID NO: 8135 - protein, 175 aa, Artificial Sequence; identical to SEQ ID NO: 8134
  Synthetic

SEQ ID NO: 8136 - protein, 171 aa, Artificial Sequence
  Synthetic
KEVEEALEELRRILREWEEVTKRLEERVEEINRRSLEELRRLKEEVEEIAKRIRDTDKADTLLKELRRLLEEIRKRSEDSLRRDEELFERIHRTDERAARELKKVLEDIARKIDRKEVLEELDKLVKDIKRKVDEVNEKWKESSKRLEDEHRKVIKELEELVKRVEEELRR

SEQ ID NO: 8137 - protein, 171 aa, Artificial Sequence; identical to SEQ ID NO: 8136
  Synthetic

SEQ ID NO: 8138 - protein, 171 aa, Artificial Sequence
  Synthetic
KEVEDALKKAEDILRRWEEVTKKLKDEARKINEDSRRKLKRLKEESREIVERIKKTDPSDELLKRLRDLNRRIAEESKKSLRRDEEVFRRIHEIDKEMADRLAELLKEIADKIDREEVLRRLEKLVEDIKRKVAKVNDEWRKSSEDLEREHRKVHRESEKLIRDVEDRLRK

SEQ ID NO: 8139 - protein, 171 aa, Artificial Sequence; identical to SEQ ID NO: 8138
  Synthetic

SEQ ID NO: 8140 - protein, 171 aa, Artificial Sequence
  Synthetic
SEVEEVRREVKRVVDDWRRVTKKLLDDIRRISEESKKIIRDLKEAAKTMIREVERTRPDETLLDRLRRLLERIAREAKRSIEDIRRLLEELHKTDKKIAEELKRLLDRIAEEIDREEVLKELEKLLEDLRREVEEVNERLKRLLDENEKRIREVLRELKKLLRDLDEKLRR

SEQ ID NO: 8141 - protein, 171 aa, Artificial Sequence; identical to SEQ ID NO: 8140
  Synthetic

SEQ ID NO: 8142 - protein, 184 aa, Artificial Sequence
  Synthetic
DELERVREEVKKLSDTSREKLERALKKARDLLEENERRLRELKKEVEELIRRIEEKLKDRKDEDLIRKIERDLDRVLRKVEKLVEEVRRRHEKVLRELAKLVKESKEELDKVLRDVEKLIRDRESEELRKVLTDIERLLRENKKELDEVLKEVEKLSREADDKNRKVLKEIKELLDELKKRAKD

SEQ ID NO: 8143 - protein, 184 aa, Artificial Sequence; identical to SEQ ID NO: 8142
  Synthetic

SEQ ID NO: 8144 - protein, 178 aa, Artificial Sequence
  Synthetic
SEVERMLEEVERISEESKRKLEEVLRRVEEIIKAIERTLEKVLKDDEEIIRRIEDTLRRRNTEEVSKRIEELSERSRRKIAKVLRDIDELLKEAERELDKLKKESRKLAEDVRRALKEINVRREVVKTIDDLLRENERRVDEALEEIEKRARDLREKVKELEERLDRTNRKLKKKVED

SEQ ID NO: 8145 - protein, 178 aa, Artificial Sequence; identical to SEQ ID NO: 8144
  Synthetic

SEQ ID NO: 8146 - protein, 182 aa, Artificial Sequence
  Synthetic
KEVEDIIEESRKLDKELEDEIRRIIEESRRLNEELEEIARRIDEEIKELLERLKRRDKDARELLRELEEVVKEVRKRMEELLKRSRDVSREHEKTLRKLLEESRRMTEKHRDDLRKLEERNGVKEDVERLVRSNREVARDVREKLKRLLEHNKEVVDRVREELKRLLDEARRVIEEVRKKAD

SEQ ID NO: 8147 - protein, 182 aa, Artificial Sequence; identical to SEQ ID NO: 8146
  Synthetic

SEQ ID NO: 8148 - protein, 184 aa, Artificial Sequence
  Synthetic
DELERIDEKIKRDVEEHKRETKRILDESERLNREVKKRLEEIRERIRRLAEEIRKEIERDKGKERLEKKVRDLEKTVRDLIRELEELVREVHERDRRLIKELREHLRRLEEDLRRLIDELRREVEERKLEKVMEDVKRLIDEARKENEDVARRMERSNKELKRKLDEIRREVEELIKELRERTK

SEQ ID NO: 8149 - protein, 184 aa, Artificial Sequence; identical to SEQ ID NO: 8148
  Synthetic

SEQ ID NO: 8150 - protein, 184 aa, Artificial Sequence
  Synthetic
DDLERAREEVADLIRKHEEKTRRILEESRRLNERHRELSKRILDEIRKLAERIEELIKRERGKDELRRKVEDLERRVEDLIRRLEEHLRRVHDKDRRLIEDLRRHLKRVVEELKRLIDELRRKVPKEELDRIEEELKRLIDTLREKNREVEKRARDSNRDLKRTNDEIAKEVRELIKKLREDLK

SEQ ID NO: 8151 - protein, 184 aa, Artificial Sequence; identical to SEQ ID NO: 8150
  Synthetic

SEQ ID NO: 8152 - protein, 184 aa, Artificial Sequence
  Synthetic
RELETIADRIRKLSRENSEVLKEIARRIERLVEEHRKESERILKEIKELADDITRLIREDKGKERLKRKVEELEKRLRELIERLKEHLKEVVKELERLIKEMRDHSERVVEEAKELIDRLRSKVPKEELDKVEEEVRRLIRTNREILRTIEKRVRDLIEELKRRNDEIARRVEELIKRLRRETD

SEQ ID NO: 8153 - protein, 184 aa, Artificial Sequence; identical to SEQ ID NO: 8152
  Synthetic

SEQ ID NO: 8154 - protein, 184 aa, Artificial Sequence
  Synthetic
SELEKVADELRKLIKDDNDLLDEILDRIRKLSKENEKRLREILKEIRKLMDEISKLIKKDRGKERLKKKVDELRETVERLIKEARDHSREVAKEIKELIREAEEHTKDIARKLRKLIEELRRRVPKEELDKIREELERLIKRNKEKLDEIRREVDELIKKNEETLKRIEEEVRKLIEDLKEELR

SEQ ID NO: 8155 - protein, 184 aa, Artificial Sequence; identical to SEQ ID NO: 8154
  Synthetic

SEQ ID NO: 8156 - protein, 184 aa, Artificial Sequence
  Synthetic
SDLEKIEKEIEDLVKRDNEVDKKVMREIRELSKENKERLRKILEDLRREAKKIKDDIERETGKEELEKKVREIEKRARELIKEAKRHSEELAKTAKDLIRRTTKHTKDVEEELRRLIEELDRTVDKEKLKRVEKKVRELIKRNRDHNERTREDVEKLIRDNEDTLRRIEEEIERLIEKLKRDTK

SEQ ID NO: 8157 - protein, 184 aa, Artificial Sequence; identical to SEQ ID NO: 8156
  Synthetic

SEQ ID NO: 8158 - protein, 174 aa, Artificial Sequence
  Synthetic
KEVEDAVKELEDLLRKNEDKTRKIVEDMRRSNKDLEDHSRKSEEEVRKLLDDLRRAGVPRDSLKRLAEDVERVTRESRELLERVHRADRELIERLKESNERLRRAIEEIRKAIKAGKDIKTLLDRVRKLAEEDNERLDRLRRESEELNERVRRVDKKLLEEIRRKAKKVEDDTR

SEQ ID NO: 8159 - protein, 174 aa, Artificial Sequence; identical to SEQ ID NO: 8158
  Synthetic

SEQ ID NO: 8160 - protein, 174 aa, Artificial Sequence
  Synthetic
DEVREVDRRLKELLRRLKETIDEIRRRMEESNRRLEDHSRKSEEEARKLLEELERKGVPRDTLERLREEIERVIEESRRLLEEVHRRDRKLIRDLEKLLEDVRRTVEEVRKKIDDGSDLEELLRRLEELAERAERKLEKALRDSEDLNRKVTEVDRRLLKEIRDLVEKVERERR

SEQ ID NO: 8161 - protein, 174 aa, Artificial Sequence; identical to SEQ ID NO: 8160
  Synthetic

SEQ ID NO: 8162 - protein, 174 aa, Artificial Sequence
  Synthetic
SEDEKVRKEAEDLLRELEKHSRDTERRARKSNRDNNEHSKESVKDLRRLLERLRKAGVPRDTLKTLEDMIRRIIEESERSNERLHREDKKLVEESRKLVKDVLKRLEDIERAIKAGSDIRKLLEEVRKLVDDLRKRDEEIMKTSERLNEEDNRKDRRLVEDVKRLADEVEKKTR

SEQ ID NO: 8163 - protein, 174 aa, Artificial Sequence; identical to SEQ ID NO: 8162
  Synthetic

SEQ ID NO: 8164 - protein, 174 aa, Artificial Sequence
  Synthetic
SKVDDVKRRIRKLLEDSKKRSRESIERVERSNRRLEKHSRDSARRAKELLDKLREEGADERVIKELEEIVREIKKRSEELLEKDKKDSEEIVRRSRKLNDELREVIRKVEEMLRGGSDIDELLERLKELAKRIKELDDRLLRELEEINKTTEKLDRDLLKEIKERIDELRKREK

SEQ ID NO: 8165 - protein, 174 aa, Artificial Sequence; identical to SEQ ID NO: 8164
  Synthetic

SEQ ID NO: 8166 - protein, 174 aa, Artificial Sequence
  Synthetic
DKVERVKKEVRDLLRRLEKHSEDSVREIDTSNKRLEEHSRRSKEELKRLLRKLKEAGLRREVIEEVEKRIRDVERESEKLLEDDKRKSERIKEESKRILKEVRDRIREIEKLLDSGADIDRVLEEVRKIIRRIEEEDRRLLKEIRDINETTERLDRKLLDELRKVVKDIEDRER

SEQ ID NO: 8167 - protein, 174 aa, Artificial Sequence; identical to SEQ ID NO: 8166
  Synthetic

SEQ ID NO: 8168 - protein, 188 aa, Artificial Sequence
  Synthetic
SELEEVKKKVEKLIRDVEKVSEDTRREVERLIREVEEATKEHLDRVRRLIEELREVRKAGSRKEELRELLKRVADKVKRLIETNREVLKEIEDRVRKLIEENRRVIEEVAKTLKKIIDDLRRRLREDRLRERLERLAKEIEDLLRRLREISRTIEERARRLLEELKKRSEDLRKTAEELLKEIDEELK

SEQ ID NO: 8169 - protein, 188 aa, Artificial Sequence; identical to SEQ ID NO: 8168
  Synthetic

SEQ ID NO: 8170 - protein, 175 aa, Artificial Sequence
  Synthetic
DEVETIKKKAEDLLRDSKRKTDELTKRMEELLERSKEDSERLIRRLRELLERLRRRGLPEEVLTRIEKTIRDIERELEKVDRDLKREIERLKKELEEVNRRLEEEIRKLVELLRRGDVREEDVDREVKRLVDESKKIIERVEEDVKRLIRESEKKSRDVERRVEELERKAREDER

SEQ ID NO: 8171 - protein, 175 aa, Artificial Sequence; identical to SEQ ID NO: 8170
  Synthetic

SEQ ID NO: 8172 - protein, 181 aa, Artificial Sequence
  Synthetic
SEVEKIKREMEKLLEEHKKLVDDIRREAERLHEEHRRLSDKIREDLKRLLEELRRSGIDKKLLDEIEEVVKEVDERSKKLDKELREIIRKVVEDSRKLHEELERIIRTVERRMEELEKRGGDRKELDRLRREVEKVVRELKERNKELLKRLEEAVEELKRRNRKLLEDARRVVEEIKERAR

SEQ ID NO: 8173 - protein, 181 aa, Artificial Sequence; identical to SEQ ID NO: 8172
  Synthetic

SEQ ID NO: 8174 - protein, 181 aa, Artificial Sequence
  Synthetic
STVERIDEELKRLHTEHKKLSDDIKREAERLHEEHRRLSEEIRERLERLLEELRRRGIDERLLREIERVVEEVERTSEKLDRDLEEVIKRVEDTSRDLNRRLKEVIDEVRERLKRLEDKNGVEEDLDKILRDLERTAKELKDRNRRLLEEVERVVRELKRRNKELLKTVERVAREIERRAE

SEQ ID NO: 8175 - protein, 181 aa, Artificial Sequence; identical to SEQ ID NO: 8174
  Synthetic

SEQ ID NO: 8176 - protein, 181 aa, Artificial Sequence
  Synthetic
REVEEIDKELRRLHEEHRRLVEDIRRKLKKLHDEHRRLSEEIKRRLEELIRKLREDGASEKLLKELEDALERVKETSEKLDEDLKRIIDTIERRSRESNRELKEVLDDVRRRMEDLERKNGVREELTKLLEEVKRVVDRLKEENKRLLKEVKEVAERLKRENERLLEELRRVAEEVRERTR

SEQ ID NO: 8177 - protein, 181 aa, Artificial Sequence; identical to SEQ ID NO: 8176
  Synthetic

SEQ ID NO: 8178 - protein, 181 aa, Artificial Sequence
  Synthetic
KEVEEIREEAKRLHEEHRRLSKRIDDELKRLHDEHKRLSDEIRKELERLIEELKKGGVSEELLDRLRRELEKVDRESKKLNEDLKRILDDVRRRSERLDRELRKVIETVSRLLEDLERKGGDRDKARKLLEEVRRMVKRLKEENKRLLEEVRKVVEDLKRRNKELLEKLKREAERVKEEAK

SEQ ID NO: 8179 - protein, 181 aa, Artificial Sequence; identical to SEQ ID NO: 8178
  Synthetic

SEQ ID NO: 8180 - protein, 181 aa, Artificial Sequence
  Synthetic
SEVDEIRKRLEDLHREHRELSREIEERLKKLHDEHRRLVEEIIRRARELLEDLRREGIDKSLLDRIREVVEKVRKESEDSNRDLKRVIDEVRDTSRKLDEDLKKVIEEVERELKKLEDNGGDRDKVERLLREVKKVVDKLKKDNEKLLRDLKRVVDELKEKNKRLLEEVKRVVDDIRRRAK

SEQ ID NO: 8181 - protein, 181 aa, Artificial Sequence; identical to SEQ ID NO: 8180
  Synthetic

SEQ ID NO: 8182 - protein, 177 aa, Artificial Sequence
  Synthetic
DEVREVERKIDKLAKDLKDELRRLLKEYEELVERLEELLERILRESEKLAEELKEELKRRKTEDVVRKIEKELRESHEAIKELIKRIDELHERANRKIDELDKRIEEVLRRVKEEVDRKNLDDKVRKRIEELVKELKDILEEIKRRVEELDERSKRILKEIADRNRKLVDELRKTLE

SEQ ID NO: 8183 - protein, 177 aa, Artificial Sequence; identical to SEQ ID NO: 8182
  Synthetic

SEQ ID NO: 8184 - protein, 177 aa, Artificial Sequence
  Synthetic
SEVEKALEDVRRLVEELKKELKEILERYKRLVDKLKKENREDHERSKELAERLKDLLRKSRTEDVVREIEKELRKSHKHSRDLARRVEKLHKELNEELDELVRRIRRVLEEILRDLDRRNVDEKVRDTLRKLLEELDDLVRRIKTTLRKLVEESRRSLRKNEEDNRKLVEELREEAR

SEQ ID NO: 8185 - protein, 177 aa, Artificial Sequence; identical to SEQ ID NO: 8184
  Synthetic

SEQ ID NO: 8186 - protein, 177 aa, Artificial Sequence
  Synthetic
DEVREVLREAREVVKRLKDRLRRILEESRRVVDELRDKNRKDHETYRKVVEELKKRLEERKTEDVMRDIRRVHEELNRHSEELAKEAEEVARETHKKIEKLAREIRKVLKELLKKVDEANLPEEVRKDIERLFKELEDILKEIKEDNRRLVEDIKRSLEKNKRDLEKLVKESEDEER

SEQ ID NO: 8187 - protein, 177 aa, Artificial Sequence; identical to SEQ ID NO: 8186
  Synthetic

SEQ ID NO: 8188 - protein, 177 aa, Artificial Sequence
  Synthetic
DEVRKVLEDARRLVEKLERDLEKVLEDYKRLVDELKERNERSHRESRRLAEELKKELERERSREVVETIRETVERILRKNEELARRAEDLHRRVNEELERLVEEIKRRADDLRRRVEEAKLDDEVKERIDRLVKRLEDLARRIKEELDKLVKESRESLERNKTEVKKLIRELEETVR

SEQ ID NO: 8189 - protein, 177 aa, Artificial Sequence; identical to SEQ ID NO: 8188
  Synthetic

SEQ ID NO: 8190 - protein, 177 aa, Artificial Sequence
  Synthetic
SEVEDVLTKIEDVVRKLEEENKRSHDESRKLADELKKENKEDHDRYRKEVERLKKELEERRTKDVVTRIREVHKKLNKHSEELVRRIEDVLRRMLEKNRELVERIKETLKRLKEEVDKANLDDKVRKRVEELVKEIEKSARDNEEAVKRLAEELRDSARRNKEELEKLVKESDDELK

SEQ ID NO: 8191 - protein, 177 aa, Artificial Sequence; identical to SEQ ID NO: 8190
  Synthetic

SEQ ID NO: 8192 - protein, 177 aa, Artificial Sequence
  Synthetic
RETEEIEKEIRRLVKELRELNDEVEDRVRKLIKELKELNDRSERTLRELADELRRSGAPEEDVRRVIDRARKLHRRNKEHSKRVMTEIDKLIKTNRRHTERVERELEDLLRKLRRSTDDDVVRKVLERAERLVREDKKHTKEVLERIKELVDRDKKHTRDVNEEVKRLVEEIKKKTK

SEQ ID NO: 8193 - protein, 177 aa, Artificial Sequence; identical to SEQ ID NO: 8192
  Synthetic

SEQ ID NO: 8194 - protein, 177 aa, Artificial Sequence
  Synthetic
SEIEEIEKRIEDLARELKELNKEVEERVKKLIEDLRRLNEESRESTDRLMDELRKAGAPREELEEMIKRLKRLNDENTRHSEEVMDTARRLIERNKEHTERVIRRIEELLEKLRRSDKDEVVRRVLEEIERLVRRDKEHTERVLRTIEKLVREDEEHTKRVNEEIRKLAKEIEERAR

SEQ ID NO: 8195 - protein, 177 aa, Artificial Sequence; identical to SEQ ID NO: 8194
  Synthetic

SEQ ID NO: 8196 - protein, 177 aa, Artificial Sequence
  Synthetic
REIEELRKEIETLIRENEELNRRSKETSEELIRRLKKLNRDVEEEVRRLVKDLRDRGAPEEDVRRAEERVKKLIEDNKRHSDEVAKTDKKLNEDSERHTRRVEERLRELLDRLSRSDKDEVVRRVAEEARRLSKRNKDAIREVNETSRRLATRDAKHTRDVLREIKRLADEIRERTR

SEQ ID NO: 8197 - protein, 177 aa, Artificial Sequence; identical to SEQ ID NO: 8196
  Synthetic

SEQ ID NO: 8198 - protein, 177 aa, Artificial Sequence
  Synthetic
SEIEKAEEDVKRLIKENEELNRRSEETSRKLVEENERLNKEVEDRVRKLIKELEDNGAPEEKLRRAMERIKKLVEDSKEHSRKVAKEDRDLNEESKRHTDRVAEEIKRLIDDLRRSTDDDVVRRILKRIEDLSRKNKRDIEEVNKESERLSRENKKKIKDVLEEIRRLVERIEREVR

SEQ ID NO: 8199 - protein, 177 aa, Artificial Sequence; identical to SEQ ID NO: 8198
  Synthetic

SEQ ID NO: 8200 - protein, 181 aa, Artificial Sequence
  Synthetic
SEIEKVLEDLRRLADRHRKRVEEILREAEDSNRKTKKKHREVEKEVKELADKLKDEIRRDRNKEELTKKVKELMDRLRELNDETRRVLEEVARRNRELLERSRRHLDEVRKTVDDILRKLEKDRRLDEVEKDLRRLIRELKRLNEEVEKRVRDLIKENEELNKRIHDDLRRLIKELEDETR

SEQ ID NO: 8201 - protein, 181 aa, Artificial Sequence; identical to SEQ ID NO: 8200
  Synthetic

SEQ ID NO: 8202 - protein, 181 aa, Artificial Sequence
  Synthetic
SDIEKVLDDLRKLAEEIERAHEEVAREVRELSKRNKEVIKDILRRAKELAERIKELIDRSDRKEELRKKIEELARELEKLLKELEDHSRDVVRRLRELNDETRKMVEDLERRVRDILRKLRPDDDLRKVEETLRELIRKIRKKNEEIRRDLRRLIEENKELLERVRREVERLIEDIKRKLK

SEQ ID NO: 8203 - protein, 181 aa, Artificial Sequence; identical to SEQ ID NO: 8202
  Synthetic

SEQ ID NO: 8204 - protein, 181 aa, Artificial Sequence
  Synthetic
SEIEKMLEELRRLSERNKRTTEEIEKRLRDSNRDTKRKHEEALRTIKELIDRIKRAIREEKDKEKLRKKVEDIERKARRINEETRRTLARAERTNEKLNKDNSDHSRKVEREMEEILRKLRPDDKLRKAADDVRRLIEENRRLDERLHEEVKKLIEENRKLNEDINERVRRLIEELRRETK

SEQ ID NO: 8205 - protein, 181 aa, Artificial Sequence; identical to SEQ ID NO: 8204
  Synthetic

SEQ ID NO: 8206 - protein, 181 aa, Artificial Sequence
  Synthetic
EEIERALREMRELSRTHKELVEKILRDIAELAKTHERINEDILRKIKKLIDEIADEIRKEDKKEELKRKIDELRRRAEELLKESKEHLKRLEDTVRELIERLKETLKKVEEDLKRILEKLEKSRELDEIAKDVKRLIDENRELLKRVEDEVRRLIRKLEELNRRTEEEVKKLIKKLEDDLK

SEQ ID NO: 8207 - protein, 181 aa, Artificial Sequence; identical to SEQ ID NO: 8206
  Synthetic

SEQ ID NO: 8208 - protein, 174 aa, Artificial Sequence
  Synthetic
RELEELEKELRELLRELRRLSEESRKELKKLLDELEELSRRSAKKLKDLLDDLRRRGVPEDELRRVAKRVEDLIRTSKRLNDETRRKVEEVERESKKLNEDTEETLRRVTELLKAGKDIDEVRERLRELIERDKKLNKKLTDDLRRLAERDKRENEKLSKELEDLARKLREDAR

SEQ ID NO: 8209 - protein, 174 aa, Artificial Sequence; identical to SEQ ID NO: 8208
  Synthetic

SEQ ID NO: 8210 - protein, 174 aa, Artificial Sequence
  Synthetic
SEIEELEKRIDELLKELRDLSRRIAEEVKRLLEELKKLSKDSEDKLRELLERLKRKGVPEEELRRVEEEVERVVRESRKLNKETEDELRRLLEEIKESNDRVEKRARELKKLLRDGKDVEEVLRRLEKLVREDKERLKKVLKDARDLIKKDKDLNEKLSRELEKLVRELEERAR

SEQ ID NO: 8211 - protein, 174 aa, Artificial Sequence; identical to SEQ ID NO: 8210
  Synthetic

SEQ ID NO: 8212 - protein, 174 aa, Artificial Sequence
  Synthetic
SEIEDLERRIRKLLEENRKLVDDVAKKLRELLRELRKLSEESRKRLEDLLRKLRKDGVPEEILRRVAEEVRRLEEESKRLNDETEKELRRLLEELKRSTEDLEKKADDVRKLLRAGKDVEEVLRRLEKLSRENKDLIRRIDERIEKLIRDDKRRNREISERARELARKLEDEAR

SEQ ID NO: 8213 - protein, 174 aa, Artificial Sequence; identical to SEQ ID NO: 8212
  Synthetic

SEQ ID NO: 8214 - protein, 174 aa, Artificial Sequence
  Synthetic
KESEELEKEIRRLLRELREISRKIEEDARRLIEELRRLTEESERELEELLEKLKRDGVPEEELREVLKDLKRLIEESRRSNEEVERRVREVLKRARDSNKKVEDRAREVKKLLEDGKDVREVLERLKKLVEEDKRRLKELLDRIRELMERDKRKNKEISERVRKLIKELEDKAR

SEQ ID NO: 8215 - protein, 174 aa, Artificial Sequence; identical to SEQ ID NO: 8214
  Synthetic

SEQ ID NO: 8216 - protein, 174 aa, Artificial Sequence
  Synthetic
DEEDRLREELRRLLEELRELSERSRDEVKKLLEDLERLTRESEEKVRRLLEKLKRDGVPDEELKKVIDKLRKLIKESRDSNRRVKEELKKLIDDSKRSNDRVEEAVREIDKLLRAGKDVKRVLEELRRLVEEDKKLNEEITEDARRLIEEDRRLNKKISDEAEKLARELRERAR

SEQ ID NO: 8217 - protein, 174 aa, Artificial Sequence; identical to SEQ ID NO: 8216
  Synthetic

SEQ ID NO: 8218 - protein, 174 aa, Artificial Sequence
  Synthetic
DELRDVKRELDRLLRENEEIVERIAETVRRLLEELKKLTKELAEELRKLLEELRKRGVPEKELKEVADTLRKLLKDIERSNKEVEDRLRKLLEEIKESTDRLREELEEVEKLLRGGKDVETVLRRVRELSRDNKRRMRRVLEEAKRLAKEDKERIDKIRKEIEELIKRLKDKAT

SEQ ID NO: 8219 - protein, 174 aa, Artificial Sequence; identical to SEQ ID NO: 8218
  Synthetic

SEQ ID NO: 8220 - protein, 174 aa, Artificial Sequence
  Synthetic
DEEEDLERRIKKLLDENRELLKRIAEELRRLLEELRRLTEESADRLRRLLKELKDRGVPEKDLRDVAEKVKKVLKESEDSNRDVKRKLEKLLRDLERSTERLEREARKVRKLLRDGKDIETLLRELEKLSRDNKELLKKIEKEIRDLIKEDKERNRELSERLRKLVEELKKKAT

SEQ ID NO: 8221 - protein, 174 aa, Artificial Sequence; identical to SEQ ID NO: 8220
  Synthetic

SEQ ID NO: 8222 - protein, 174 aa, Artificial Sequence
  Synthetic
REIEEAAKDLDRLLEENKKLVKEVEEELRRLLKENRDLVKESEDRIRKLLEELRRRGVPEEELKEVEERARRVIEESRRSSKELEKRLRELLEELRRSTKELEDRLREIKKLLRNGKDVEEVLRRVRKLSRENKEKIRKILEDVKKLSEDNKRRNEELSRRVKTLVDEIKKRAT

SEQ ID NO: 8223 - protein, 174 aa, Artificial Sequence; identical to SEQ ID NO: 8222
  Synthetic

SEQ ID NO: 8224 - protein, 174 aa, Artificial Sequence
  Synthetic
SRIEELEKRIRELLKENRDLVKESEDRVEELLRRNEELVRRSKEKVERLLEELRRKGVPDEELRRVEERLRRLLEESKRSSDELRERAEKLVRDSRRSTEELEERAKRVLELLRAGKDVDEVLRRLKKLSDDNKELNERLTRTLEELSRRNADINKKLSDEAEKLIRDLEKRAT

SEQ ID NO: 8225 - protein, 174 aa, Artificial Sequence; identical to SEQ ID NO: 8224
  Synthetic

SEQ ID NO: 8226 - protein, 174 aa, Artificial Sequence
  Synthetic
KEIEDAERELRRLLEELKRLLDDVAREVKRLLDENKRLVEKSEEDVKRLLDELREEGVDEKILRDVAREVKRVVEDSRRSSKELEERAKRLLDELKKLVDKIREKLERVRKLLRAGKDVEEVLRRVRETVERVKKKIKDVLKEIEDLSRENKKLNRDLSERLKKLADDLREKAR

SEQ ID NO: 8227 - protein, 174 aa, Artificial Sequence; identical to SEQ ID NO: 8226
  Synthetic

SEQ ID NO: 8228 - protein, 174 aa, Artificial Sequence
  Synthetic
DELEELSREIKKLLEENRRLVRESEEDLRRLNEENRKLVEDSERRVRELLKDLRDRGVPEELLRKLEEDLRRLIEESRELLDRLTKRDEELTKRSRDSTKELEDRAKEVREKLKAGSDIEEVRERLRKLSKENKDLNRELTKRSRELNARTKERNEEISRRAEELARKIREDAR

SEQ ID NO: 8229 - protein, 174 aa, Artificial Sequence; identical to SEQ ID NO: 8228
  Synthetic

SEQ ID NO: 8230 - protein, 174 aa, Artificial Sequence
  Synthetic
DEKETLARKLDELLRELEKLVRDSAREVEKLNEENRRRLEESRDRLRKLLEKLKRDGVPEKDLREVKKEVEKVEEESKKLLKELHDEDRRLIEESRRLLKELADEVRRVRKLLEDGKDIERVDRELKRLAEEIKELNKRITDESRKLNEDTKRVNDKLSRDLEELARDLERRAT

SEQ ID NO: 8231 - protein, 174 aa, Artificial Sequence; identical to SEQ ID NO: 8230
  Synthetic

SEQ ID NO: 8232 - protein, 178 aa, Artificial Sequence
  Synthetic
SEIERIERENDRLNEENKKITEDIERELKRLLEENRELSRTIEEELERLLRELRKRNGGREEVLKEVEDRLRRIVEEIRRSDKRLEDIAREVKKRIRESDEELRRVSEEITRRLRKVRDEKTLRELLKRSEELSKENKDRLKKLLDDLREVSKKNKEDLKRLLREVREVARKVKERAN

SEQ ID NO: 8233 - protein, 178 aa, Artificial Sequence; identical to SEQ ID NO: 8232
  Synthetic

SEQ ID NO: 8234 - protein, 178 aa, Artificial Sequence
  Synthetic
DDIERILREMERLLEENKEISDEIRKELKRLLDENRKLSEDVVKALEDLLRDLERRKGVEEEVLKRVREVLERIKRELDRSDDELRKVAERILRDAERSNDELRKVIEEIEEELRKVRDKDTLRELARKIRKLSEENKERLKELLRELKKLSDENKERIKKLLKDAEKIIEDVRRRAK

SEQ ID NO: 8235 - protein, 178 aa, Artificial Sequence; identical to SEQ ID NO: 8234
  Synthetic

SEQ ID NO: 8236 - protein, 178 aa, Artificial Sequence
  Synthetic
SEIERIDEDNKRLNDENRKLSDRVRRENERLNKENRELSKRVEETLKRLLDELRRRGGGDDRVIKTVEDIAREIKKRLDDSDDRLRRESKRILEAAKESNEELRDFSRRIVDTMRKTRDKRTLTELLKESRELSKRNKDKIRELLRRSEKLSRENKKRIEDLLRELRRVVEKIKREAD

SEQ ID NO: 8237 - protein, 178 aa, Artificial Sequence; identical to SEQ ID NO: 8236
  Synthetic

SEQ ID NO: 8238 - protein, 178 aa, Artificial Sequence
  Synthetic
KEIEDLRRDLDRLLRENRELTREVKEELEKLNRELEELVRRIKRTLDELLKDLERRNGADKKLLDTIRRALEEATKEIKELLDDHKRLTDEVVKELEDSDRELEKRLREVKRELERTRDREEIERLREELRKLSEDNKDRIRRILERLRKTVEEIKKRLEDILRRLTEIAKEIEERAR

SEQ ID NO: 8239 - protein, 178 aa, Artificial Sequence; identical to SEQ ID NO: 8238
  Synthetic

SEQ ID NO: 8240 - protein, 182 aa, Artificial Sequence
  Synthetic
SELEKLLEDLRRLSERSERELRRLRKELEEIIREIKKKMEENLERNRKVIDEIDKVIKDDSKSKELEELLRRLEKLIEESKRDLERLLRELEELIRRIDDDLRKSLKELRDLIEDIRRKLGDESEEAKRLKEDAERLLRENERRIDELRKEADELIKELKKRIEDLVKESRRLLEELDRRAK

SEQ ID NO: 8241 - protein, 182 aa, Artificial Sequence; identical to SEQ ID NO: 8240
  Synthetic

SEQ ID NO: 8242 - protein, 182 aa, Artificial Sequence
  Synthetic
EELERLEERLDRLIEEAERRLKDNLKKNEDMARKWEEDTKRNEKRNRDLIRRIRKVIKDDSKSEELERLLEELRRLIEESKRDNERLLRELRELVERSDRDLRRLLREIEKLIKEITDRLGEEDRKVKELKRRARELLERLARLIDELRRRSEDLIRRLAEKSERLERESRKLLRDIAEKTT

SEQ ID NO: 8243 - protein, 182 aa, Artificial Sequence; identical to SEQ ID NO: 8242
  Synthetic

SEQ ID NO: 8244 - protein, 184 aa, Artificial Sequence
  Synthetic
RELEELKKEAEKVSKESKDLIEKVIRDNEDVSRRSEELIRELMREVKEVIDRLRELIERRNDEEVKKRVEDVLRELREKIKKIEKDSRELLERLKELNKRLEETSRDLARRLREKLKRLEEAGVPEDKVRRIKEELERLIEENEKLLEESKKRSEDNARRNEELLERLRRELERLARELEEELR

SEQ ID NO: 8245 - protein, 184 aa, Artificial Sequence; identical to SEQ ID NO: 8244
  Synthetic

SEQ ID NO: 8246 - protein, 176 aa, Artificial Sequence
  Synthetic
REKEELKKDIERMVEELKKLNKESRDRTRKLIKELEDLVKESDDDTERLARKLEKEVKDDEDLLRKVKKIIDELKKSNEDVERTVRTIAEDLKRSNDEDHRRIEEIIRRIEKLLREGGDRVEDLLREARKLIEELKRHTEEVIKRNKKLIDELKEIIEDVIRRNRKLVKELEDTAK

SEQ ID NO: 8247 - protein, 176 aa, Artificial Sequence; identical to SEQ ID NO: 8246
  Synthetic

SEQ ID NO: 8248 - protein, 176 aa, Artificial Sequence
  Synthetic
SEKEDLKRRLDKLAEDLRRLNKEVDDEVKELARRLRKLNKDSRKRTEDLIRELEKRVKDNKELLEKVKKIAEDMKRSNDEDHKLIEEIIRRIKKLLKEDHDLIEEIIKRAEDLIRKGGDRVDELREEIKELIDRLRKHTEEIIRRIRRLFEELRKHSKKVIDDNKRLFDELEKTAR

SEQ ID NO: 8249 - protein, 176 aa, Artificial Sequence; identical to SEQ ID NO: 8248
  Synthetic

SEQ ID NO: 8250 - protein, 176 aa, Artificial Sequence
  Synthetic
KEKEDLKRKVDELDKELKKLNEDSRRKTKELIKRLKDINKRLREELEKLADELRKKVKDDEDLVKKVEDIIREAEKLLEEDHELIERIAERMRRSNDRDHELIKRIREEIERLLREGGDRVEELDREITELIKELRRHTEEVIRRNEKLARELEKHSRDIMETIRELIRDLERTAK

SEQ ID NO: 8251 - protein, 176 aa, Artificial Sequence; identical to SEQ ID NO: 8250
  Synthetic

SEQ ID NO: 8252 - protein, 176 aa, Artificial Sequence
  Synthetic
SEKERLEKRLREVVRELEKLNEDLDRRLEELARDLERLNEESRRESRKLAEDLKREVKDDEELLEKVKRIIDEDRRLNDEDHKLIRDIIRRAKELLEEDHKRIREIIKRAKELIDRGGDRVEEVEERIERLIRDLKRHTEEIKKTIEELMKELREHSREIIKRSRDLFKELKDTTK

SEQ ID NO: 8253 - protein, 176 aa, Artificial Sequence; identical to SEQ ID NO: 8252
  Synthetic

SEQ ID NO: 8254 - protein, 182 aa, Artificial Sequence
  Synthetic
SELEKVIEEIREISERSLEKIKRLMEKIKELSDRTAERLRRVLEEIRKIIEEIKELRDRGELRREKVKKLVEELERKLDELRKESEKVIETIRRLIETLMKESEDLIRELEERLRDLLRKKDKKELAKKITEDLKRNEERNRRAIEELERTLRKLEEENRRLIREAEDTLRRLVEELEKKDE

SEQ ID NO: 8255 - protein, 182 aa, Artificial Sequence; identical to SEQ ID NO: 8254
  Synthetic

SEQ ID NO: 8256 - protein, 185 aa, Artificial Sequence
  Synthetic
SELEEVLKEAKRLIDEIRKHTRDVSERSKRLLEEDLKHTEEVIKEIRKLIKEILDRIRARETSEDLRRDIERATREIRKLLEDNTRESRRVIEESERLARDNKEKSKRVIDELRELVKDIARRDKSEDDLRRLKETIERLAKDLERLNREHDETNKKLAKDSEDLNRELKKRVEELEEELRRALK

SEQ ID NO: 8257 - protein, 185 aa, Artificial Sequence; identical to SEQ ID NO: 8256
  Synthetic

SEQ ID NO: 8258 - protein, 185 aa, Artificial Sequence
  Synthetic
KELEDVLKEIRDLARRIEEHSKKVLREIEELIRRLEEENREVLRRMREEIKKIKEDIRNREPDKELEKKIEDVIRRLKELVDTLHERNRRVIKEIEDLLRDNSRKTEEAIERVRRLVEDVARRDRDKRKLDELRRDVRRLERRLERLNETLKERIDRLAERLEEVDRRLDEELKRLAEELKEELR

SEQ ID NO: 8259 - protein, 185 aa, Artificial Sequence; identical to SEQ ID NO: 8258
  Synthetic

SEQ ID NO: 8260 - protein, 186 aa, Artificial Sequence
  Synthetic
DKLDEIKERIERLVETDLRVIKRILEEADELIKENEKLIEKILRDNRRLIEEVEEIIRRDRDKRRLERIVEEVERRLDESTKELKKSSDRLTERLEELLERSRRHSERIDRTAKRLTEELRDKVVQDEKKLRELKKRVDELREESKDLNDKLEKRIRDLKRELKKLNDRHEEELRKLKERLRRATK

SEQ ID NO: 8261 - protein, 186 aa, Artificial Sequence; identical to SEQ ID NO: 8260
  Synthetic

SEQ ID NO: 8262 - protein, 186 aa, Artificial Sequence
  Synthetic
DELDEILKTADKLAEDDLDTIRRLLEEVRDLVRKDKEVIKRILEEIDRLIKEVEDIIRRDRDKERLKEIVREVVERARELLRRSKKHSKEVAETLDELLKRLREHSREVVEELKRLLEELRRRVVQDEKKLKELEDRVRELKRRSEELLKKVEETLRRLKEESRRLNEELERTIRELEERLRRATK

SEQ ID NO: 8263 - protein, 186 aa, Artificial Sequence; identical to SEQ ID NO: 8262
  Synthetic

SEQ ID NO: 8264 - protein, 174 aa, Artificial Sequence
  Synthetic
SKEDRAREELKRLKEELEKLLEEHRKTLEDLNRELKRLVDEHEKSIRELRKELKDSNVEERVVREIARDAERSLKELRDLVREVHERDRKTHEDLRRLIKRVKEKLEEVEKLIRDGEDIDDVIRRVRETIDEVVRRIEELLEENRKLIEDLEEKIRRLNERLKRLVEEIKERDR

SEQ ID NO: 8265 - protein, 174 aa, Artificial Sequence; identical to SEQ ID NO: 8264
  Synthetic

SEQ ID NO: 8266 - protein, 174 aa, Artificial Sequence
  Synthetic
SERERVREEVRKLLERLRELLERHRRKLEKLNRELEKVLEDHRRTLERLKEELERSNVDEKVVREAKRRLDETHKKLRRLIEEVKERDKRSHDELRELIREVEEKLREILELLERGKDIDTVLEEARKLIEKAERDIRRLAKENEKTIEEVKERLKKLMEENKRLIEEIKERTR

SEQ ID NO: 8267 - protein, 174 aa, Artificial Sequence; identical to SEQ ID NO: 8266
  Synthetic

SEQ ID NO: 8268 - protein, 185 aa, Artificial Sequence
  Synthetic
SEIEDLLRRLKEVADEIKERLKKLSEESEELVRRVKRRIEELNKENREVMKEIKRRIDSGQPEESLERLVREADKRLRDSIKEVEDLLRELEEMLRRTNEKARRLVDEIRRRLERVLEEVKKRGAPEEDVRRLAEDIRRLLEEIEKLLKEHEEKNRKLKKELEDLVRRHRKSVEDLKREIRERSR

SEQ ID NO: 8269 - protein, 185 aa, Artificial Sequence; identical to SEQ ID NO: 8268
  Synthetic

SEQ ID NO: 8270 - protein, 177 aa, Artificial Sequence
  Synthetic
DDEERLEETLERLERELKKIADEHRRRNEELRDTLRRIAEELRKTHKDLLERLEEENIPEEARKRVEDHVRESDRLLRELKKELEELHERVDRVAKDLLKKLKDIVREVRKLLKETKEKRVVEEVERKLRRLMDRIREELKRLTDESEDLVTKILDTVRRIVESIKKLVDELREERK

SEQ ID NO: 8271 - protein, 177 aa, Artificial Sequence; identical to SEQ ID NO: 8270
  Synthetic

SEQ ID NO: 8272 - protein, 181 aa, Artificial Sequence
  Synthetic
DEAERLLERVDKAHERSEELLDRVLKENRKVLEEIRKLADDLRKLLDDIMRRIEDLVRKENSEEVVKEARRLLEELKEMIDRLVRRVEELLRDTNRKNKRVVEESKKLLDEVREEIKKLNVNDRDLREIERRLKEIEEENRKLVKRLEDENRKIAREVEKLVERLERRLREIARRVEESVR

SEQ ID NO: 8273 - protein, 181 aa, Artificial Sequence; identical to SEQ ID NO: 8272
  Synthetic

SEQ ID NO: 8274 - protein, 174 aa, Artificial Sequence
  Synthetic
REKEELKKSIERVKRELERLLEEHRKRSEELKRRLEELLKDHKRRTDEVLKEAKDKNVPEDLLRDIKRRLDELNKRLAEILKDWTDKSRKLNEDLERIIRKVAKELDKILKDLEAGKDVDTLEEEIKDIIRDVKRAVKESLEEDDRLAKEVEDMVRKSKEEVERLIEKVKRDTD

SEQ ID NO: 8275 - protein, 174 aa, Artificial Sequence; identical to SEQ ID NO: 8274
  Synthetic

SEQ ID NO: 8276 - protein, 174 aa, Artificial Sequence
  Synthetic
REKEELEKEIERIKREIKKMLDELKRHSEELKRRAERLLEEHRRETERIIREMRESNVQREILEEVEKKLRRLNEELARILEDWERKSRRLLEDLKRVVEEVERRLDEILKLLEAGSDVKTLLEEIRKILKEVEDRIREILREDKRLADELEKAVRDSLREVKRILDEVREAVR

SEQ ID NO: 8277 - protein, 174 aa, Artificial Sequence; identical to SEQ ID NO: 8276
  Synthetic

SEQ ID NO: 8278 - protein, 174 aa, Artificial Sequence
  Synthetic
DEDKRLADEIKRVLDELKKSVKEHRDHSEELLRRAKELLKRHEDETRKIEEEARRNRVPEDLLREIVKRLRKLNEELKEILKRWKKRSDELDEENRRIVDDIRRKLEEILKLLKAGKDVETLKREIEELIRRAKKVNKESKEDDRRLADEVRKVVERSEETVKRLRDEVTERVR

SEQ ID NO: 8279 - protein, 174 aa, Artificial Sequence; identical to SEQ ID NO: 8278
  Synthetic

SEQ ID NO: 8280 - protein, 174 aa, Artificial Sequence
  Synthetic
REKEELEKELRRIKRELEKILEEVRKRSKELLDRLRELLRRHEAETEKAIEEMERANVRKELLEEIKRRLEELNERLRKIIEDWERKSEELNEELKRIVDEITRRLEEILRRLEAGKDVDKLLRDVREIAREAKRVIRRILKTDEDLARELEEIVRRSLKKVEDLIRKVKEDAR

SEQ ID NO: 8281 - protein, 174 aa, Artificial Sequence; identical to SEQ ID NO: 8280
  Synthetic

SEQ ID NO: 8282 - protein, 180 aa, Artificial Sequence
  Synthetic
SEEEKLEEIIRRSRKRLKELIDRLRELVKKIDDDLKRLLDEHRRRLEESERRAEELLKKVRDERIKDLVRRHREELRKSHEELEELAREVRRRLERLLRELEKILERHAEELDEIRKMIRAGKDVEKVLKELEESSRRVVELIKKLMRELEKLLRDVEERAKDLLRKNTRSSEELEKRIE

SEQ ID NO: 8283 - protein, 180 aa, Artificial Sequence; identical to SEQ ID NO: 8282
  Synthetic

SEQ ID NO: 8284 - protein, 180 aa, Artificial Sequence
  Synthetic
SEEEKLKKLLDESEKRLREILKRHEEIVRDIKRRLEELLKRHKELLDRSLKRLEELLKENRDEELERLIREHKRKLDESHKTLARIVTTLKKKLDETHRRLEELVRRHKRLLDEIRKLVRAGADVEELLERVKKSSEDVAREIRKLARDNERLLEEVKRLIRKLLEENRESSKDVEDKIR

SEQ ID NO: 8285 - protein, 180 aa, Artificial Sequence; identical to SEQ ID NO: 8284
  Synthetic

SEQ ID NO: 8286 - protein, 180 aa, Artificial Sequence
  Synthetic
SKEEELRDKLRKIRKRLEELLERLAREIDRIRRALEDLLRRHKEELDRSRKRAEELLKEIRDEDLRRLIKKHEEDLRKSHKELEDLARRVKEEADRILRRVEELVRTLEERLREIEKLVRDGSDVDRVLEELDRLLKEVEETIRDLARKLRELLKRVEDTLRKLLKENKDSSRRLEEEIR

SEQ ID NO: 8287 - protein, 180 aa, Artificial Sequence; identical to SEQ ID NO: 8286
  Synthetic

SEQ ID NO: 8288 - protein, 180 aa, Artificial Sequence
  Synthetic
SKEEELARMIEESVKRLKKLLDDLRKVIKESKDRLKELIDDHRRILEEIRRELEELLKKKRDERLEKVIRELEKRLRDSHEELKRIVEEHVREAEKVLREVEKLLRDHRKELEDILKLVRDGADVDKLLKEIEDSSRKLAEEIKKLIDEIRESSKEVIERVRRLLERNKELVRKVKEEIR

SEQ ID NO: 8289 - protein, 180 aa, Artificial Sequence; identical to SEQ ID NO: 8288
  Synthetic

SEQ ID NO: 8290 - protein, 184 aa, Artificial Sequence
  Synthetic
SEVEKLEEEIKKINDEIRRLSDKNLEDLKRILEEIEDLSRRNLKKTKDILREIEEEAKRRRTEEVVRRVRELIRRSKEHSRRVAEEIKKLIKESKDHSREVSERAEKLNREMEERVRRVIERTRLDEFAERLKRSLEDSKRTSKELVDENRKLNEELERTVRKLIEDNKRLNDRVEKRVKELAD

SEQ ID NO: 8291 - protein, 184 aa, Artificial Sequence; identical to SEQ ID NO: 8290
  Synthetic

SEQ ID NO: 8292 - protein, 176 aa, Artificial Sequence
  Synthetic
SLEDEIRRLIEEIKRKLKELLERLKEEIDRIREELKKSNRKLDELSRRIEEEARKRVGDDKEVEKVLTESKRSLDENRELDKRSLERIEDLLRKLEKIAREVERRLERLLEALKDGDEEKIERVLREMEKLLRELERIAREVLKEIEKILRENKKHNEEVMERNKRLAKELKEKAD

SEQ ID NO: 8293 - protein, 176 aa, Artificial Sequence; identical to SEQ ID NO: 8292
  Synthetic

SEQ ID NO: 8294 - protein, 176 aa, Artificial Sequence
  Synthetic
DLEREIDELIKDIARRLEESNRELEKLVRRIEEELRRSNKELEDLSRRIKTELRKEVGDQKEVEEVERDSRRSLEENKKLDKESLDRIRELLERNRELDERSKDRLRKLLEALKDGDEEKAKRVADEIRKILRENEEHNEEVARRIEEILRRNKKHNKEVADKNRELLKKLKEEAR

SEQ ID NO: 8295 - protein, 176 aa, Artificial Sequence; identical to SEQ ID NO: 8294
  Synthetic

SEQ ID NO: 8296 - protein, 178 aa, Artificial Sequence
  Synthetic
KLVEEIRKSAEDNRRRLEKLVRESKKSLDDNERENRKLVDELRKIATKIKEDLERDNIDEEVKRRLDRLIEEIRRVLKESHDHTRELAKRIKEVHERLNEHSKRLVDRLEEVLERLKNVKEAVDKLEEENKRDHDEYKKVVDELKKENKEDHERSRKLAEDLKRLLEDIRRRIKETRR

SEQ ID NO: 8297 - protein, 178 aa, Artificial Sequence; identical to SEQ ID NO: 8296
  Synthetic

SEQ ID NO: 8298 - protein, 182 aa, Artificial Sequence
  Synthetic
DEVEKLIEDLKEVTKKHAKRVEETNRHNEDVLRKVAKEVKRILDDVKRVVDEVKKVVDAGGPIDELMKRLEEVLKEVEERLDRLVEEAERVSKEHEDDNKRLADHNEEVLREAKERLERKGVDDKAKKKLEDVLKRSREEIERLKDDSRKSVDETRERLKKLKEDLKRLLEEVRKEVEKLKR

SEQ ID NO: 8299 - protein, 182 aa, Artificial Sequence; identical to SEQ ID NO: 8298
  Synthetic

SEQ ID NO: 8300 - protein, 182 aa, Artificial Sequence
  Synthetic
SEVEKLIKELRDVLKKVAEDVEKTNRDLEEVSKRSAEKVKKLEDELEKVLREVEELVKNGEDIDRLLEKLKEDLKRVRETIEDLIRENERVLREVKERNKKLVKELEDVLKEVEDRLRERGVDRKAEEDLRKVLTEIRKRAEELRRESDESVKRSRKELERLLREIEKRVEEIEDRARKAKK

SEQ ID NO: 8301 - protein, 182 aa, Artificial Sequence; identical to SEQ ID NO: 8300
  Synthetic

SEQ ID NO: 8302 - protein, 172 aa, Artificial Sequence
  Synthetic
EEVERIIEEIRDEVKKAAEKVEKVLKESREISKRAEDEVRRVLDEIRKLDETLRDARRSDEELKRVLDRIREEIKKLAEEMDRLNEESKRLTKTLAEELEEILRRIKEKIERVNGDREKLRKVLDEIRREIERLKERLDRLDEESDRKSEKLKEDLERLLREIEKRIRDERR

SEQ ID NO: 8303 - protein, 172 aa, Artificial Sequence; identical to SEQ ID NO: 8302
  Synthetic

SEQ ID NO: 8304 - protein, 172 aa, Artificial Sequence
  Synthetic
DEVRKVLEEIKELLKRLAEKVKKLIKESREISKRAAEKVKRLIEKSRRLLDTLEKANLDKDELRKALEDSKRETEEVVEELKRLNEDSKRKTEELERELREALKELERKIREINGDKDTLKTVLDTIKKKIEELVKELREVDEESKKRSKELKEEMDKVDEDIKRAIERRTR

SEQ ID NO: 8305 - protein, 172 aa, Artificial Sequence; identical to SEQ ID NO: 8304
  Synthetic

SEQ ID NO: 8306 - protein, 172 aa, Artificial Sequence
  Synthetic
DEVRKVLEDIKRDLDRLAKRVKDVLREIEELTKEAARTVKKVIEESRRLLRKLKEANLEEKDLRRALEESKKKSKEAKEKLDKIDRDIERKIRKLKEELERLLRELEKRIRTINGRREDLTELLKRIEEKIKRLVEELERLLKRSREESKRLVEEMEKVNREIEEEIKKRAT

SEQ ID NO: 8307 - protein, 172 aa, Artificial Sequence; identical to SEQ ID NO: 8306
  Synthetic

SEQ ID NO: 8308 - protein, 186 aa, Artificial Sequence
  Synthetic
EEVERLLKEIKDLLDEVARENKEALKRSKELLEEVAEDNKRVLREIEKLLEDVERKVKDEKGDEEVERKLKKVIEEIDKLVKEVHEKNRRLHERSEELIRRLHERNRRVIERMEKLIRDLKERKKEAKELLKELEDLLRKARKTVEDLDRELEELNEEIRKALEELDKELERLVREIRKRLEDARR

SEQ ID NO: 8309 - protein, 186 aa, Artificial Sequence; identical to SEQ ID NO: 8308
  Synthetic

SEQ ID NO: 8310 - protein, 186 aa, Artificial Sequence
  Synthetic
REAEELLKEIERLLREVERENKKALEDSRRLLEEVAEEVKKVLREIEELLKTLEELVRKEKGDKEVAERLDKVLKDVEKLIKDVTDRLRDMHRRSAELIKELHDRNRKVIEEVEKLIREVKERKKEMEELLRELKRLLEEIERRVRELDEELRKLNEDIKRELERLIRELEELLKRAEETLRRLKD

SEQ ID NO: 8311 - protein, 186 aa, Artificial Sequence; identical to SEQ ID NO: 8310
  Synthetic

SEQ ID NO: 8312 - protein, 186 aa, Artificial Sequence
  Synthetic
SEVEDALRRLKELLRRVAEENRKVLEESKKLVEDARRKNEEVLKEIEKLLEDVAREVKDRKGDDEVLERLKEVLKRIEDLIRKVTRDNEELHKRSKKLIEEVHKRNRELIERAEKIIREIKERNKEMEELLRELKKLLEEIKKSVEDLDRELKKLNDEIRDESRKSKEELERLLEDIERALRELAR

SEQ ID NO: 8313 - protein, 186 aa, Artificial Sequence; identical to SEQ ID NO: 8312
  Synthetic

SEQ ID NO: 8314 - protein, 186 aa, Artificial Sequence
  Synthetic
SEAEEVLRRIEELVERATRTVEKLAEESKRLLEKLAEENKRVLEEIKRLLDEVADKVRKKKGDKEVLEELKKVLDEIRELLERVHRENKRAHDESKKLIDDLKKELDRVREEIKRLIDEVRERLKEMKELLDELKTLLDEITKRLKDLTDKLERLNDKIRRELERLDEELRELLERIREEMEKLTR

SEQ ID NO: 8315 - protein, 186 aa, Artificial Sequence; identical to SEQ ID NO: 8314
  Synthetic

SEQ ID NO: 8316 - protein, 183 aa, Artificial Sequence
  Synthetic
DLEEELKELLERIRKAHEELIKELEDLTEKIERDHEKLIKRLEDLLKRIEDEMRKLLEEIDRDELKKLLEEVLREAEELVKRLRKTSEDNIRESRESNKEARKTSEDNIRDIARLLEELKRRTDSRTVKEILKRIEDSLRRAAKKVKDLAEENKDSLRRVAEKVERILEELKRLLEEIARRVK

SEQ ID NO: 8317 - protein, 183 aa, Artificial Sequence; identical to SEQ ID NO: 8316
  Synthetic

SEQ ID NO: 8318 - protein, 183 aa, Artificial Sequence
  Synthetic
SLEEKLEDLIRRLKESNERLKRELERLIEELRKNNERLLKELDDLVEEIERALRDLLREKDDEELRRLAEEVKREVERVKREVKKLSDDDKKILDDLLREVERLSREDERTLDKLKKDVSRLTDSRKVEKILKDAKDSNKKVADTVREILKRARDSNKRVAERVKDLLRRLRELLKELAERVK

SEQ ID NO: 8319 - protein, 183 aa, Artificial Sequence; identical to SEQ ID NO: 8318
  Synthetic

SEQ ID NO: 8320 - protein, 183 aa, Artificial Sequence
  Synthetic
DLEEELKELIKRIRDAHRELKERLDKLVEEIKRNNEKLSDDVRRLVREIEKELRRLLEEIKDERLKRLADDVRRKVEELLRRLRKLSEEDKTRVDEIRKELEEISRRNEEELKKLEEDLRRLTDKEKVKKLLKELEESLKRVADEVKRLLEELERSNREVEKRVRELLEEARRLLKDLADKVR

SEQ ID NO: 8321 - protein, 183 aa, Artificial Sequence; identical to SEQ ID NO: 8320
  Synthetic

SEQ ID NO: 8322 - protein, 185 aa, Artificial Sequence
  Synthetic
DLERELRELIKRIEDDIRKNVKRNEESIRKTEDELRKNVRENERLIEEMRKELEKLRRRNRDKELVRRVEELVDTVMKESRRIIEEAEKRVRDSAKRSKEVIERVKRELERVVKKIEDLVRKLDKVEEVARKLLDELREIKKRINDTSRTTLEDNKRLAKEIHDSSKESLKRLKKILDDIREEAR

SEQ ID NO: 8323 - protein, 185 aa, Artificial Sequence; identical to SEQ ID NO: 8322
  Synthetic

SEQ ID NO: 8324 - protein, 185 aa, Artificial Sequence
  Synthetic
RLAEELRKLIDKVRRDLDRNRETNRELIKRAKDELRKNEEENRRIIDEIRRALEDLTRKNKDEELVKRVEREVEKVEEESRRLIEDLKRKVDEVKERSDRVIRELEERVKKAEKKVEDLIRELDKVEEAVRKVKKEIEDIVREIHKLSKRTLEELERIVEKIHEDSKRMLERVKKLLDKIRRDAE

SEQ ID NO: 8325 - protein, 185 aa, Artificial Sequence; identical to SEQ ID NO: 8324
  Synthetic

SEQ ID NO: 8326 - protein, 185 aa, Artificial Sequence
  Synthetic
SLAEELRKLIKRVEDEIRRLAEENKDLIRKARETIRKNEETNREVITRIRREIEKLEKDNRDRKKVEEVKKELEELADRSRRVIKEVKEKLERLMRKSEELIERVERLLEEVRRKVEELIRDLDKVEEVVRELLKEIRKVLEDIRRESKTSLDDIRRLLKEINDLSEETIREAEELLDRIRKKAT

SEQ ID NO: 8327 - protein, 185 aa, Artificial Sequence; identical to SEQ ID NO: 8326
  Synthetic

SEQ ID NO: 8328 - protein, 185 aa, Artificial Sequence
  Synthetic
SLREELKRLIDESRKSLRENEERNKKSIDDTRRLLRENERRNRETIKELKKTLDELRRRSKDKDLLRTIEKLIREAERESRELIKKIEEDIRRSEERSKRAIDDLRRKNDELEKEVRTLVRDLDKVKEAVDRLLERIRRINEEINRTSEKTLEENDRLVKELHERSERLLRKLEELLRKIDETIR

SEQ ID NO: 8329 - protein, 185 aa, Artificial Sequence; identical to SEQ ID NO: 8328
  Synthetic

SEQ ID NO: 8330 - protein, 185 aa, Artificial Sequence
  Synthetic
SLAEELRRLIEEVKKRLKELEDRNRKLIKEARDELKENEETNRKTIEDIERTLEKLERDNKDKELVRRIREEIDKVREESERLIKRVREKVKKVEEESEELIKEIRKEIKRLEDEVEELIKRLDKVEEAVRDLLRRIRELLRDLERLSEESLRKLKEIVEDIHRKSKTMLDKLRKMLEELRREAT

SEQ ID NO: 8331 - protein, 185 aa, Artificial Sequence; identical to SEQ ID NO: 8330
  Synthetic

SEQ ID NO: 8332 - protein, 185 aa, Artificial Sequence
  Synthetic
SLAEELKRLIEESRKSVEELERRNRKLIEDARRDLERLARENRKLIEEIRRRLKDLAKDNKDERLVRRVARLVDKAMKESEEVLDRIRRKIDKVAKESEKIIRDIKRENDDLERKVKELIDRLSDVEEVVRRLLEEIKRLNDEAKRKSKESLDRLREILKEIRKTSERTLEKLKRILDRIREEAT

SEQ ID NO: 8333 - protein, 185 aa, Artificial Sequence; identical to SEQ ID NO: 8332
  Synthetic

SEQ ID NO: 8334 - protein, 188 aa, Artificial Sequence
  Synthetic
SEIEELLERIRDLMRRINKKSEDHLRELEKILREIRRLAEKSNEEIERLLRELEDLAEKRRTDEVRKEVRRILEEIERRSKEVIDEIRRLLDDLRKTVDKVEREVREILKRIEEEVRDLTRKLKDDKDMKDLKKTLDDLLDELRKDIERNVKENRDTLKRIEDDIRRLAEENKKLLEEVRKKIEELET

SEQ ID NO: 8335 - protein, 188 aa, Artificial Sequence; identical to SEQ ID NO: 8334
  Synthetic

SEQ ID NO: 8336 - protein, 188 aa, Artificial Sequence
  Synthetic
SEIEELLRRLEDILRRIEELIRKVLKELRDLVEKSNDLSRRHLEDAKRILKEIEEEVKRRNTEEVRTRIRKLLEDIKRTLDEVTKEDRELLDRARELAERIIRRIRKLLDDARREVEKLARELKDDERVEELRRRLRKILEDIRKRIEELVEELRRLLKEWEEESKKNDETNREVLKRIEDRIRELER

SEQ ID NO: 8337 - protein, 188 aa, Artificial Sequence; identical to SEQ ID NO: 8336
  Synthetic

SEQ ID NO: 8338 - protein, 177 aa, Artificial Sequence
  Synthetic
DEAEEIKERIKKVVEDLERKVRELLRRSEKLAEDLHELSKENIERMKRLLEELEDLVRKRRTEEVIKTAEKVLRDSRRSSKEVADRADRVLEESKRLTREVTEEMRRVLEKLRDEVRRANLDEEIEDLLRKVEERIRELEEELRRLNKKIEEEVRRNKDENRRVNEEIERRIRELAR

SEQ ID NO: 8339 - protein, 177 aa, Artificial Sequence; identical to SEQ ID NO: 8338
  Synthetic

SEQ ID NO: 8340 - protein, 177 aa, Artificial Sequence
  Synthetic
DESKEILDRIRKVNEDLRRLAEELLKDSRRVVEEAHKLSEDNIRRLEELLKEIEKEVRRRRTEEVIRRLEEVLKRSRESSEEVVRRLERLLERSRRLTEEVAERVREVNERLKEEVDRANLDDKIRKLLEDSKKTSDELKEELDRLNEEIERSVRDNKRRNEEVNKRIEDEIRKLAT

SEQ ID NO: 8341 - protein, 177 aa, Artificial Sequence; identical to SEQ ID NO: 8340
  Synthetic

SEQ ID NO: 8342 - protein, 177 aa, Artificial Sequence
  Synthetic
SEAETILEKIRRANEELNRLSEENIRKSRKVVKELHELSKENIKRARDLLREVKKLVEKRQDERVIKTLEDVIRDSKRSSKKVAEELEKVLEDSKRSSERVAREMERVLRELEEEVRRANLDESIKELLKEVEDDVRKNKEENKKVNKEAEDEVRENKERNTRVNKEMEEEIKRLAK

SEQ ID NO: 8343 - protein, 177 aa, Artificial Sequence; identical to SEQ ID NO: 8342
  Synthetic

SEQ ID NO: 8344 - protein, 182 aa, Artificial Sequence
  Synthetic
SERERLERLVREAAKELKRLLEELERLHKKIDEDLKRSNDRLRELHERIKKDIERLLRRIGDDEKLERLRRIAEEVKKRSRESLEEHRKRNEDSKRRSRKSLEDVERTMREVRRRIEDLLRKGGDRVEEILKEIEDILRKVKEDVKRVLDENRRVLEENKEHAERILRENKRMLEELRREAK

SEQ ID NO: 8345 - protein, 182 aa, Artificial Sequence; identical to SEQ ID NO: 8344
  Synthetic

SEQ ID NO: 8346 - protein, 182 aa, Artificial Sequence
  Synthetic
DSEERLRKLMREAREELKELLRRLRELHEEIRKRVEELLRRLEELSDKLRRDLERLLREIGKDEKLKDLAKLVKEVLERSRESNDRLRKIIEKVLTDSKKSLDDVARIADEVIRRIEKLLRDGGSRVEELLKTIKELVDRLRRIVEKVLDENRRLLKRLEEEIKRVLDENREMLDRLRKAAE

SEQ ID NO: 8347 - protein, 182 aa, Artificial Sequence; identical to SEQ ID NO: 8346
  Synthetic

SEQ ID NO: 8348 - protein, 182 aa, Artificial Sequence
  Synthetic
SKEETLEKLVREVKDRLKKLLEEVRRLTEELERELKKLREELEELSKELEKDLRRLKKRVGDDEKVKDLDRRLREVLRRSKKSLDDLRRIAEDVIRRSRKSNRELEEEARRVIEEIEDILRRGGERVEELLKRIKELLEELERRVEEVLRRNRELLKRLEETIRKVLEENKKLLKEVREDAK

SEQ ID NO: 8349 - protein, 182 aa, Artificial Sequence; identical to SEQ ID NO: 8348
  Synthetic

SEQ ID NO: 8350 - protein, 182 aa, Artificial Sequence
  Synthetic
DKEEELRRLVEEVEKRLRELEKELEDLTDKIEKRLRESNERIKKLSDDIRRRLEDLLRKVGDDSRLDDLRRDLKRVLDESEKSMRDHAERNKKSLERSKRSLDELRDIARRVLETIKRILEKGGERVEELLKRIRDILKRVEEIVKEVLERNRKVLEDNERHAEEVLRRNKRLLEELEKRAT

SEQ ID NO: 8351 - protein, 182 aa, Artificial Sequence; identical to SEQ ID NO: 8350
  Synthetic

SEQ ID NO: 8352 - protein, 182 aa, Artificial Sequence
  Synthetic
SKEDDLRKIVKEIEEEVRKLLKELEELTKELEDRLRESNKTLKELNERIKRRLEELLRRIGKDEKAEELKRSVEDVERKSKETLDRHEKKNRDSLKTSRDLNERLREILREVLETIRDILRRGGSRVEEVKKELEDLLRRLREEVKRVLDDHRRILKENEDHAREVLKRNKELLRKLEEEAK

SEQ ID NO: 8353 - protein, 182 aa, Artificial Sequence; identical to SEQ ID NO: 8352
  Synthetic

SEQ ID NO: 8354 - protein, 182 aa, Artificial Sequence
  Synthetic
SKEERLKKLVDDVRKTAEKLKRDLERLTKEAEETLERLKRELDRLNREIAEEIKKILDRVSEDEKVKELKKLADDVLRKSKETLDELKRILERVLEESKRLNDELRKDLERVLKDIERILREGGEDVETLLEEIERKLREVEKRIREVLKRHRELLRRLRETIKRVLERNKELLDRLREAAR

SEQ ID NO: 8355 - protein, 182 aa, Artificial Sequence; identical to SEQ ID NO: 8354
  Synthetic

SEQ ID NO: 8356 - protein, 182 aa, Artificial Sequence
  Synthetic
SKEETLKKLMDRAEEELRRLKRELEELNDRIREALKKLNEDLRRLHEKIKEDIRKLLEEVDKDEKFEELKRLAEDVLRRSRENLRDHERVNKESLEESEKSLRELEKTLDKVRKDIRKILEDGGERVEELLETIERILEEVRRRIEKVLEENKRLLDENKKHAEESLKKNKELLKRLRDAVK

SEQ ID NO: 8357 - protein, 182 aa, Artificial Sequence; identical to SEQ ID NO: 8356
  Synthetic

SEQ ID NO: 8358 - protein, 185 aa, Artificial Sequence
  Synthetic
SEVDEVRERLERLLRTVERVVERILRELKRLNDELRKIAEDLLRENKDLLRELAERVRKGLEKRELERLLKELRKRSKESNEELRRVAEKAKEDHRRLLDELRKILKTIEDEIRRLLEDLRRRGVPSEALKDIEKLVRKIKEELKRLLKEVAETLERSERSLDKLIEDHRRLVEDIERALKELRK

SEQ ID NO: 8359 - protein, 185 aa, Artificial Sequence; identical to SEQ ID NO: 8358
  Synthetic

SEQ ID NO: 8360 - protein, 185 aa, Artificial Sequence
  Synthetic
SEVEKVLETIKDLLRKLEEIVKKILDEDRKLMEKVTKIVEDLLEENKRLLEELERLAREGQPKEELTKLAEELERRSTKSNEDLKRVVEDWERRSEELLRRAEDVLRKIERTVRELLKELEKRGMPSELLKRIRELVKEVKDRLRRLREELEESVRRARKTLEDLERRHRKLLKDIRETIKELIR

SEQ ID NO: 8361 - protein, 185 aa, Artificial Sequence; identical to SEQ ID NO: 8360
  Synthetic

SEQ ID NO: 8362 - protein, 181 aa, Artificial Sequence
  Synthetic
DLDREIERLVEELERRLRELLRRNEELVKRVEDELEKLKRESEKLLRELRKKLEEAKKSKELDDLKKRLEDLADKIRRVHERLNRELKELVERSRRLLKKVEEELKRLVEEIRKVLERLKNVKEAVDKLLKELKDILKKLEELSRKSMEDIKDILRRYEKLVKELLDELKKILDELDRADK

SEQ ID NO: 8363 - protein, 181 aa, Artificial Sequence; identical to SEQ ID NO: 8362
  Synthetic

SEQ ID NO: 8364 - protein, 181 aa, Artificial Sequence
  Synthetic
DLKDEIEELVKRARERLERLREESEEIVKELEKVLRDLEKENRDLARRLRDELRKIEPSDKLRELRKRLEELLKESEKLLRKIAEEVKRLVDDIRRVHEELNKRLEELVRDIRRVLEELKDSEEAVRRLKDELRRILEEYERVVEELKKRLKDLLREAERLSKESLDELKRILRKLKEDAK

SEQ ID NO: 8365 - protein, 181 aa, Artificial Sequence; identical to SEQ ID NO: 8364
  Synthetic

SEQ ID NO: 8366 - protein, 184 aa, Artificial Sequence
  Synthetic
SLEDELRRLVEEDERNIRKLNDENRKSVRKLEELLRRLNKRNRETIERIKRLLDRLREESTDEDLLRKIEERIDDVRRKLEELDRRLEEVIRRLEKKVKDLDDKWRRLSEEIKKELERLAREGADKEEIDRILRKVERLSRKAHEDVRRINEELEKLLEKLKREVKRENDRVEEEAKRLADEVK

SEQ ID NO: 8367 - protein, 184 aa, Artificial Sequence; identical to SEQ ID NO: 8366
  Synthetic

SEQ ID NO: 8368 - protein, 182 aa, Artificial Sequence
  Synthetic
REVDELVKRIEELLREMKKKNDESLKDSRDLLRELEKRVERVIEEIEKLLRDLEELVRKEKGDDEVRKKLEDVLRKIEKLVRDLARELEEALRRSKELSDRNRKDNEDLLRDVERLVDKAKKDGLDEKRLKKLLDELRDMSRKADRALRELNKDVARKIEELRRRLKKLLDEVKERADELTK

SEQ ID NO: 8369 - protein, 182 aa, Artificial Sequence; identical to SEQ ID NO: 8368
  Synthetic

SEQ ID NO: 8370 - protein, 186 aa, Artificial Sequence
  Synthetic
SEAEKLLEDLKRLVEDLRRKNKKLNDDNERLTTELEKTSRKLLEELKRLLEKVADDVRRTRDKKRLKELAKELRDRVRKVEKDNRDLLRELEERSRRLLEESKRLLKELLDRARKLVRELERDNKEEGELKERLDRLLEEVKKTIRELEKRNRESHKRTKDVARRSAEETKRVLEKIEDDLRKLDK

SEQ ID NO: 8371 - protein, 186 aa, Artificial Sequence; identical to SEQ ID NO: 8370
  Synthetic

SEQ ID NO: 8372 - protein, 186 aa, Artificial Sequence
  Synthetic
SEAEKLLKEIKDLVDELRKRSKELIDENKRLTEEVEERARRLLTELRKLLKRLEELVRREEGKEKLDELLKDVDRKVKEVLKELEDLAEELRRRSRELLKRNDDLLRELEKRVKELLDELKERNKEEGELEERIRRLLREIEKEAKRSRDRSREVHRRTDEELRRLEREIKEILKEIKRKLDELRR

SEQ ID NO: 8373 - protein, 186 aa, Artificial Sequence; identical to SEQ ID NO: 8372
  Synthetic

SEQ ID NO: 8374 - protein, 182 aa, Artificial Sequence
  Synthetic
SDVDRLLKENRDVSKKVEDDVRRLLEELKRISEEIARRVKRLLEELRRILREIEELVKKGEDIDELLTRLEEALRRVEETLKRLVDESRKVSKEVLTDLRRLIEESKEISRRLLERLERRGISDELRRRAEKSIEDNERKLRKLEEDAKRIIDDNERILRDLERRAKDVIREVRKALEDLKR

SEQ ID NO: 8375 - protein, 182 aa, Artificial Sequence; identical to SEQ ID NO: 8374
  Synthetic

SEQ ID NO: 8376 - protein, 183 aa, Artificial Sequence
  Synthetic
DEAEKLLEEVKEENRRVNEDIKRVIEEIKKLIDESRRLMEKIIRDVEALLTRIRDVVEKLKTSEEVLERLKREIEDIDRRAKELLDDSRRKTRELIERVRERIEELRRRHDDLIRRLEERLKDDEDVRREIERIMRELKKNLDRLEEEIRRIADELRRVNTRLEEEIKRVIDEARKTLEELRR

SEQ ID NO: 8377 - protein, 183 aa, Artificial Sequence; identical to SEQ ID NO: 8376
  Synthetic

SEQ ID NO: 8378 - protein, 178 aa, Artificial Sequence
  Synthetic
SKEERLEEILRRHKKSLDEIRKELRKLLEDHRKSIEDLIRKLRELLERLKELLERLERSGVSDEARKRLEEIIDEVRRLVEKITKELEDTLKELEDLVRTITRELEKTLRELEDLVRKGGEDVDRLITEIKRINEELRESVRRLLERAKRIDEELRRTAEELVKTIEKLAKELEETVR

SEQ ID NO: 8379 - protein, 178 aa, Artificial Sequence; identical to SEQ ID NO: 8378
  Synthetic

SEQ ID NO: 8380 - protein, 187 aa, Artificial Sequence
  Synthetic
DEIEEVVERIRRIDKELNKRAEEVIRRNKELDERLNREIERVKEEIRRLIKRLEEVTRRDLKDKETLDRTARRVLEEIEKLVRDLERKMRESLKRSRETVKRVKDRLDETRERVRRLLDELRKRNTDLEEAKKKLEDLLEEHERNLRKIERDLEELNERHERNLRKLKRELEEILKRAKEVLDELRK

SEQ ID NO: 8381 - protein, 187 aa, Artificial Sequence; identical to SEQ ID NO: 8380
  Synthetic

SEQ ID NO: 8382 - protein, 187 aa, Artificial Sequence
  Synthetic
SEIEKVLREIEEIDKRLNKEVEDVLRENRRVDEELNRHSERVREEIERLVKRLDDVAREELKDKETLRRTLDEARRRIEKIVRDNKRELERSIKRSRETLDTLERRAERTKEEVKRLVEDLRRKKQDKEEMKKTLEKLLREHEENIKELKRRLEELNEEHERNIRRSEETLKKLLKEAEDRLREIKK

SEQ ID NO: 8383 - protein, 187 aa, Artificial Sequence; identical to SEQ ID NO: 8382
  Synthetic

SEQ ID NO: 8384 - protein, 182 aa, Artificial Sequence
  Synthetic
EEAERVLKRIADLIEELKRHSEEVSRRSKKLLDDLSRHTEKVSKESEDLLRRLEELARRGEIRDEVLKTVLEDSKRLSKEDKERLEKVTRESKKLSDDDRKKVEEVEREIEKLARDVKRKRDEREIEERLRTLRRRLERMVEEIERLNEENLRRVEKRVRELEKENEDNLREAKKLLDEIRR

SEQ ID NO: 8385 - protein, 182 aa, Artificial Sequence; identical to SEQ ID NO: 8384
  Synthetic

SEQ ID NO: 8386 - protein, 182 aa, Artificial Sequence
  Synthetic
SEVEEVLKDIERLIKELREENKRSLDRSRRLAEDLERRNRESLRRIEKLLRELEKIARDLRDKDELRRILKELREEVERISEEDERLAEEVLREHEKINDEDRKKLRALLDTVRKLIEDVIRTEEVRKRAEDVLRRLEEVIKELEKTNEDAKRELKRLIDELRRTNEEVNKRLEERLDKIRE

SEQ ID NO: 8387 - protein, 182 aa, Artificial Sequence; identical to SEQ ID NO: 8386
  Synthetic

SEQ ID NO: 8388 - protein, 182 aa, Artificial Sequence
  Synthetic
SEVERVLKDIERLLKELEERNRRSLEESAKSTRKVEEDNKRSLDKSTELLKRLEEDAKDDRDKDRLRKRADELLETHRKINRDDDELLKKNHEDHERINRRDDELLRDVERKIRDIIRRVIRDEEVRKRAEDVRRRLEEILKRLKETNEDMKRENKRVLDELRKTNEDAEKKLRDLIRKLRE

SEQ ID NO: 8389 - protein, 182 aa, Artificial Sequence; identical to SEQ ID NO: 8388
  Synthetic

SEQ ID NO: 8390 - protein, 182 aa, Artificial Sequence
  Synthetic
SEVEKVLKEIDELIKDVERTNRESLEESERLLEKLKRENERTVERSERLAEELERLARELKDKDSLEKLLEEVERTHRKLNEDDRRKLEDILRRHKKINEDDERLLREVLKRVEDIIRRVIRTEEVKDRADKLLRRLEEMVEKIRRTNETLLRALEKLIRDLKRNNEEVEKRLREIAKKIRD

SEQ ID NO: 8391 - protein, 182 aa, Artificial Sequence; identical to SEQ ID NO: 8390
  Synthetic

SEQ ID NO: 8392 - protein, 186 aa, Artificial Sequence
  Synthetic
SEVDELLKRLKKLLEDDKRLAEELLKTIEKVNDDTRKRSEELLRRLERALEELEKLVRKVRGREELEKVLKDIEEELRTLLEDNERLLREDDKVVKDLIREVEKLNRETEEEVRRVVEEVKKKLKDVEEVKRRLEEVLREIKRLVDETRKELRRIDEESKRLAEKSRRDSRRVEERLRTLLEELRK

SEQ ID NO: 8393 - protein, 186 aa, Artificial Sequence; identical to SEQ ID NO: 8392
  Synthetic

SEQ ID NO: 8394 - protein, 186 aa, Artificial Sequence
  Synthetic
SEVEKLLEDMERLLKEDEELVRRLSKRSEEIVRDDRRRNKEILDEIRKLLEELKRLADRLEGREELEKLLKELEDRVDKLIKESEELNEESERRNKKLLDDLERLNRDTERKIEEIVKKVRDRLDKVKDVEERLRRAEERIRRAVERTRDHARRNHEKLKELVKETRESNDRLKKEIRKLLEELRK

SEQ ID NO: 8395 - protein, 186 aa, Artificial Sequence; identical to SEQ ID NO: 8394
  Synthetic

SEQ ID NO: 8396 - protein, 180 aa, Artificial Sequence
  Synthetic
EEEERIREVKKRSEDLLEELKRSNERVERESDKLAEEIRRKLEELARRADEVIRRLRARKETEELKKLADELRKLVDEVRKRAERLIREDKRMVEEVKRRSRELIERDKRVVETIERLLRAGEPTEKLLEDLKRINKETERLNRELLRDLERINEETRERIDRLLRELERMIDELRKRVD

SEQ ID NO: 8397 - protein, 180 aa, Artificial Sequence; identical to SEQ ID NO: 8396
  Synthetic

SEQ ID NO: 8398 - protein, 180 aa, Artificial Sequence
  Synthetic
SERERAEEIRKRSEDVVREMRESNKDVSRKSEELAKKLREDLKRVEKKVRELLEEIKREKRTEDIERLIEELKRVVEEVAKTLEELIKEDRKVVEDIIRRSEKIIRDNEKLVREVIELVKAGEPTEELLKRLEEISRRSRELNRRLLEDLKRINKETKERADKLLEDLERLLEDIKRRVD

SEQ ID NO: 8399 - protein, 180 aa, Artificial Sequence; identical to SEQ ID NO: 8398
  Synthetic

SEQ ID NO: 8400 - protein, 180 aa, Artificial Sequence
  Synthetic
DEDERLKEVEEESKKVADELRDRLRRLMEESRRRLKRLREEAEEIKRELDTIAEDLKREKDTEEIKKIITDLKRIIEKVRRDLERLIREDEEASKELKDRLEKIIEDNERVVREVKKLIKKGEPTEEILRRLEEISEESERRVEKLLRENKEINEETDRRVKELLERLKEVLERIERRVK

SEQ ID NO: 8401 - protein, 180 aa, Artificial Sequence; identical to SEQ ID NO: 8400
  Synthetic

SEQ ID NO: 8402 - protein, 180 aa, Artificial Sequence
  Synthetic
DERERLREVLERSRKLAEDLRRSNEELERRSRELAKELRKTNKELEKRLKDKADDLRREKNTKEIEDIIRRLEEELERVIRDSEDLIKKDEDISEEIKRRSEEIIRRNEKFVKEVEELIEAGEPTERLLEELERISEESKRRNDELLEKNERVNEETRRRNEELLDELRRLLEEVERRVK

SEQ ID NO: 8403 - protein, 180 aa, Artificial Sequence; identical to SEQ ID NO: 8402
  Synthetic

SEQ ID NO: 8404 - protein, 187 aa, Artificial Sequence
  Synthetic
DIEERIREVLRKARRVLERSEERSRELVERLRRVLEDSRRRTKRLTEEAKELLDEVRKRLDKDEAREKLRKLEELIKRLKEKLDEVDKRLADKVRRLSEMAKEVNDRLRKKIEDVERKLDEVRRRGGDKKLVEDLLREIEKIIKEIEDTTKRVVDELRRLLEEIKRTSDELEKEVRKLLEEIKRATD

SEQ ID NO: 8405 - protein, 187 aa, Artificial Sequence; identical to SEQ ID NO: 8404
  Synthetic

SEQ ID NO: 8406 - protein, 177 aa, Artificial Sequence
  Synthetic
STREALKELIDRLRDLVRRIRDKHRKLLEEIKRVLDESERRHRELIKRVEELLRDLARRVSEDILRELKRVLEELTKLSKKNIDDIRDVVRRLEELLRDNIRRIDEVLKRIRELAERGGEDVETIIRRAEEALKRLEDSSRKVEETIRKVLEDLRRSSEEVAERVRRVLERLEEKAQ

SEQ ID NO: 8407 - protein, 177 aa, Artificial Sequence; identical to SEQ ID NO: 8406
  Synthetic

SEQ ID NO: 8408 - protein, 177 aa, Artificial Sequence
  Synthetic
SSEERLRKVIEDLKRLAEESRKRHKELIDELRKAVERIERRHKKLLDEIKKVVDDIRRRVSEELLKRIEEVLDEIRKELEENIKRIRKVLDELRRTSEENIRRIEKVLRELEDLVRKGGEDVDTIIEEVKRVLEELKRSTEEVEKRVRDAIEELERSSEELARRIKEVLKRLEEETR

SEQ ID NO: 8409 - protein, 177 aa, Artificial Sequence; identical to SEQ ID NO: 8408
  Synthetic

SEQ ID NO: 8410 - protein, 181 aa, Artificial Sequence
  Synthetic
SAEEKLDRLRKEVERLSDETRKELERILKKVEDVIRETRRRAKELEEELRRLIRDIEEKLKDDERLKEALRRISEELRKLLEDLERINEKTRRDVERLIRELEKINEETKRRVDDIIRLVEAGVDIETVIREIERLLEEDRKAVEEILRRIEKLIEDDKRAVDRIVKEIKDILDKLREETR

SEQ ID NO: 8411 - protein, 181 aa, Artificial Sequence; identical to SEQ ID NO: 8410
  Synthetic

SEQ ID NO: 8412 - protein, 188 aa, Artificial Sequence
  Synthetic
DIEDELRKLEEEIRRVIEKWKRLTEENRRENERVIRKWDKLSKDLADEIRRVIEDARRKLKDERLKRKLEKLVRDLERILKKDKETVDKVRKELDDLDRRDEETMRRLEKELRDILKEVKRVIEEKKDIKELVKELVDRVKRLIREIEKEARRTSEENKDLLKKIEDDAKRSEDELRELIKEIKKRID

SEQ ID NO: 8413 - protein, 188 aa, Artificial Sequence; identical to SEQ ID NO: 8412
  Synthetic

SEQ ID NO: 8414 - protein, 188 aa, Artificial Sequence
  Synthetic
DIEDTLRKLAEDIKKVERDMEESNRRNREKNREVIEKWKKLSDDLERELEEVIEDARRKLKSRDATRKLEELVKELKDILREDRETVKKVKEELDKLDRESEELVRELVERLRKILEDVRREIEKKDKIRELVRKLIEDVRRLIEEIRRENKESSDRNKRLVEEIDERAKRSADELKRLLKEIRDRID

SEQ ID NO: 8415 - protein, 188 aa, Artificial Sequence; identical to SEQ ID NO: 8414
  Synthetic

SEQ ID NO: 8416 - protein, 188 aa, Artificial Sequence
  Synthetic
DIEEALDEVRKEIEEVIRRWKKLTRENEEENRKVIEDIRRRLDELRREIEKVIRDARRKLKSRDAKEKLDRLEEELRRILKDVERVIRELEERLKKLDEDDRREMERVVRELKRALDEMRKVIRDKTDIRELVKKLIDDIRKLIDEIRRDAERTSRDNKRLVEEIERTIEKLIREVKELLERIKEEID

SEQ ID NO: 8417 - protein, 188 aa, Artificial Sequence; identical to SEQ ID NO: 8416
  Synthetic

SEQ ID NO: 8418 - protein, 188 aa, Artificial Sequence
  Synthetic
DIEEILKKVEDDAREVIKEMRKSNEDNKRKNKKVIEEIERTLKKIEDDARRVIDEIEKKLKREELKKRVEELREELKEILDRMRREIEKLAEELKKLDEESDRLVKKLEDELKKVIDELEETIRRKDKSRELVKKLDDELKELIKKIRTDNKRSSERNDELVKEIRKRIEKLVREAKELLKRIREDID

SEQ ID NO: 8419 - protein, 188 aa, Artificial Sequence; identical to SEQ ID NO: 8418
  Synthetic

SEQ ID NO: 8420 - protein, 188 aa, Artificial Sequence
  Synthetic
SIEETLDELRKKIEEVIRRMKKSNDDNEKENREVIDRIRRTNEEIRKRAERVIEDARRKLKSEELTRVLKKLAERLEKILRESEKRVRELAEELKRLDEESKRLVEELVRELETILRELEKEIRRKRDVKERVDKLIREVEDLIRRIEEENKKSSEENKRLVRRIEKDNEDSIRELEKLIEDIRRTID

SEQ ID NO: 8421 - protein, 188 aa, Artificial Sequence; identical to SEQ ID NO: 8420
  Synthetic

SEQ ID NO: 8422 - protein, 185 aa, Artificial Sequence
  Synthetic
SLEELLEKVKREIDKVLERIERIVRKNAKENERVIREDERLLRELVKEIKEVEDRIRKRGLDKKDVDKLKEDLKRIIEEWKRLSEKLKRDSEKSLEELKELLKRIAETLKRVIDELRRVLREKKEDGDLMRKLLEEVKELIKRLEEEIEKASREDRRLVEEAKEKSKELAKRIKEELKRIEDEVR

SEQ ID NO: 8423 - protein, 185 aa, Artificial Sequence; identical to SEQ ID NO: 8422
  Synthetic

SEQ ID NO: 8424 - protein, 186 aa, Artificial Sequence
  Synthetic
DEVDDIIRKLKELIKELREKSKRISEENKRLVRRLEELSRRIIKEIKDLLEELKDRARKDRDKETLRKILREIEERVKRLAEESRRLSKTVTDESKKLMDKSRETSRRLEETVERLIRDLEEKLKDVEEVKDKLRRIKEEADKAIKDNEDLLRRNERENREAVKRNEELLKEVRREVEEVIRRTRK

SEQ ID NO: 8425 - protein, 186 aa, Artificial Sequence; identical to SEQ ID NO: 8424
  Synthetic

SEQ ID NO: 8426 - protein, 186 aa, Artificial Sequence
  Synthetic
SEVEEVIKRIKKLNKETEDAVREVIKRIEDSNEKLLRDVEELIKKIEKALRDLEDKARRVREREELERLLRELEEALEEIERRIRRLLEEDKRRLEELVRRVEKMLDDDRREVERLEKEVRERLKNVREVEELLRRVKRHTEEVVRRVERELRRIAEHVKEVEKTVRELVRRIREKIREVVERVRK

SEQ ID NO: 8427 - protein, 186 aa, Artificial Sequence; identical to SEQ ID NO: 8426
  Synthetic

SEQ ID NO: 8428 - protein, 178 aa, Artificial Sequence
  Synthetic
DEARELVKELEDLIREITKTVRRLLEESEELIKRIDDAVDDLRRRDEDLNREIKEEIEKRKRKEKLEKLIERLKESLERVKRTIEKLIRDLERLNEKLRRDVERLVAELEKILKKIKDAGLEERILRELEERVKELEKEAREILKRSEDETDKLREKAERILEDLERKNRRTMDEARR

SEQ ID NO: 8429 - protein, 178 aa, Artificial Sequence; identical to SEQ ID NO: 8428
  Synthetic

SEQ ID NO: 8430 - protein, 178 aa, Artificial Sequence
  Synthetic
SEVEELVERVKRLIDEIRKRVTDSVEESKRLIKEIKEEVDRLAEEDKRLNERIKETIRRRKEKEILERLREELDKSLERVEREIEKLIRRLEKLNKESKDRSEELVRELEKLLEKVKTDGLEERIVKKLEEEIRKIIKEIRELNKRSEDETKKIVDEARKILEDLRRENEDTKRKITE

SEQ ID NO: 8431 - protein, 178 aa, Artificial Sequence; identical to SEQ ID NO: 8430
  Synthetic

SEQ ID NO: 8432 - protein, 178 aa, Artificial Sequence
  Synthetic
SEVEDLAKRIEDLIRRILRENERSLEESKRLIDEIRKRIEDLLRRSKELIDRIREEVRERKREELLRKLKEDLDRANREVEERIKKLIKDLEDLNKRSKDESRRLIEELERILEELERRGLEKRILDELRKAVKKLEDDSRRLNRESEERTKKLKKELDELLKKSKDETKKLVEDLRT

SEQ ID NO: 8433 - protein, 178 aa, Artificial Sequence; identical to SEQ ID NO: 8432
  Synthetic

SEQ ID NO: 8434 - protein, 172 aa, Artificial Sequence
  Synthetic
SEVEKLLRELEDVIRRLREDVKRIVEEDERLNKRLNDELRRLSEKNDRLNDRIRREVTDKDKAMKALDDSNKELEKVIREILELLKRSLDKARKVLEDIEKTLRDILRELEKRLEDKEKVKRLRELVKKVIEDMERILRRLEKANRESAERAKDVLRRNHKKDEDSKRELER

SEQ ID NO: 8435 - protein, 172 aa, Artificial Sequence; identical to SEQ ID NO: 8434
  Synthetic

SEQ ID NO: 8436 - protein, 172 aa, Artificial Sequence
  Synthetic
DRVREIVERVERVIRDILRTVEKLSEENKDLNRRLTEKIRDLERRDRELNKRLRDEVTDKDEAKKRLEDSLKRAREVVERIRKTLEDSNEKIRKVIEDLVRRLEELLDRARKELSVKEIVEDLRRKVEKVKRDAEKLLEDNHRRDRRNLREIEKIVEELKRRNEKTLRDLTK

SEQ ID NO: 8437 - protein, 172 aa, Artificial Sequence; identical to SEQ ID NO: 8436
  Synthetic

SEQ ID NO: 8438 - protein, 172 aa, Artificial Sequence
  Synthetic
SEVEKLEEEVKEVIERLLRTVRDLSRRNEELNKRLTEDNERILKEDEDLNEELERRVTDADDAERLLRDSIRRWRELSKRIKDKLDRSNEELRRVIEEIKRELERILEELRKRVEDKDVLRKLKKEAEDAIKEAEDILRENHEKDKKNKEDSEKLLRDLERRNEETLRRLRK

SEQ ID NO: 8439 - protein, 172 aa, Artificial Sequence; identical to SEQ ID NO: 8438
  Synthetic

SEQ ID NO: 8440 - protein, 182 aa, Artificial Sequence
  Synthetic
RIEEILETLREELRTVLKKSKEILDELRKENKESIDRSKEILDRLRDEIRRILREIREKRVSRADEIERKLREAIKRAERLHEESKKRSEKSIRELEKLHEETRRRLKEAADELEKLAREGIDDEELKRAADKVKKLIKELDEENKKARDDDKRLNKKLNKDNDDLRREVEELLKRLRDEAE

SEQ ID NO: 8441 - protein, 182 aa, Artificial Sequence; identical to SEQ ID NO: 8440
  Synthetic

SEQ ID NO: 8442 - protein, 184 aa, Artificial Sequence
  Synthetic
RIEDLVRDNKRKNDENTKRHERIVERLEEELRELVKRHEEDVRRLRKELEDLKRDAERKGIDERVLRKIEKLIREIEERLRRSNETLRKLAEDLIRELEKSNRDLRTLSERLKERLDELRRNNADDKKVEDLDRDNERLNRELTRHLEDLVRRVKELLRRMEEHLRELAERVKKLLDELRKEAT

SEQ ID NO: 8443 - protein, 184 aa, Artificial Sequence; identical to SEQ ID NO: 8442
  Synthetic

SEQ ID NO: 8444 - protein, 185 aa, Artificial Sequence
  Synthetic
SDVEELAERVRRLSEEHAELVKRIVETSKRLNDDLRRMVKEIADRVRRLLEDIERKVREDRDKDTLKKLVDELEERIRRLIDELRRLVRKVEELDRRLAEELRRTLEELIRRVRELLEDLKRRVDTEDVRKIIEDLRRHLEENRERVERIIRELRRLTEKTKKELEDIARELEKLVDELREEVRR

SEQ ID NO: 8445 - protein, 185 aa, Artificial Sequence; identical to SEQ ID NO: 8444
  Synthetic

SEQ ID NO: 8446 - protein, 185 aa, Artificial Sequence
  Synthetic
SEVEKAEEDIRRLLKEVKDMDKKIVDDDERLNRELERTVRELAKEIEKLIRDLEERVRKERDKRTLDDVLRKLEERLREILERIKKAVEDVKRASEKLERESKELVDRLRKEVERIVKEIRDRVDDKDVKKIIKELEEELEKIAKESEESIKRLRKENRDSEERLRKILEKLKKDLEDVKRELER

SEQ ID NO: 8447 - protein, 185 aa, Artificial Sequence; identical to SEQ ID NO: 8446
  Synthetic

SEQ ID NO: 8448 - protein, 185 aa, Artificial Sequence
  Synthetic
SDVEDVVRKIRELIRENLKRSKEIADENRRLNTENRERSKTLEEEVRRLLEEVKERAERLRGREEIKRLVDELRKAVEDVVKRIEDIDRRSEEESKKLEERIRRLDEESERRLRTLIEELKKREDREEVRRILEKLRDDLRKLNETNRRIIKELRERNEKSNRDNRKILEELKDRLKKLEDELRR

SEQ ID NO: 8449 - protein, 185 aa, Artificial Sequence; identical to SEQ ID NO: 8448
  Synthetic

SEQ ID NO: 8450 - protein, 179 aa, Artificial Sequence
  Synthetic
DEVDEVDKRSKETLKKIEDDARRVLEEYERTLEKIKRDVDRVLKESEETVRKLRADGRLKEEVADTVRRVHEKAKRKIEEAKKDSERVLEEVKRTIERLKEELEREHTRVREEIKAGRSEKELEDLVRELEEINKRLEEELRKLVEELRRHLEELRDELRKLVEELRKINEELEDRLTK

SEQ ID NO: 8451 - protein, 179 aa, Artificial Sequence; identical to SEQ ID NO: 8450
  Synthetic

SEQ ID NO: 8452 - protein, 188 aa, Artificial Sequence
  Synthetic
SEMEDLKRVSDEVKKELEDLNRKSAKVSKEVEEEAKRLNRESREVVRRLKEELEKLERDRASEEELKRVIDKVKEVLDDLKRKHEDLNRRNRELLRKLEKEHRDLNEKNKELLERLDRKVKEGNLKKEVADELKKILDTHRKVDKEAKDRSEKLVRDHREVDKDVKRESDEILKRAKDTLDEIRERLR

SEQ ID NO: 8453 - protein, 188 aa, Artificial Sequence; identical to SEQ ID NO: 8452
  Synthetic

SEQ ID NO: 8454 - protein, 176 aa, Artificial Sequence
  Synthetic
SELEKILKEIEEELKRVKERLERLHREHERLLRDVTRKLRKLLRDHREVLERVREELRRRRKDVREVEERNRKTHEDLEREVRKAERELEERNERLKRELDDIARKLEEELEDLKRRNLPREDLERTLRRIKEEVRKVERKAKEVLRETREKLKRLLERAREVLDENKKRLDDVAT

SEQ ID NO: 8455 - protein, 176 aa, Artificial Sequence; identical to SEQ ID NO: 8454
  Synthetic

SEQ ID NO: 8456 - protein, 184 aa, Artificial Sequence
  Synthetic
SLEDIRRRLRELVRRLEEELRRSHEELERLVRDLERRLRESLRKLEELVDRLKKEIEKRGRDRRELEKIERDIKKILDEYRERLKELVTRLRDLLRRHRERLEELRKRIEELLRRIEEELRRGTDDDTARRLLEEAKKELDRIKEENERALRKIKDVIRKIDEESKRLNKEVADLVKKIEDRIR

SEQ ID NO: 8457 - protein, 184 aa, Artificial Sequence; identical to SEQ ID NO: 8456
  Synthetic

SEQ ID NO: 8458 - protein, 184 aa, Artificial Sequence
  Synthetic
DLEDIVREIEKLLRDLERKAREIHERDERLARDLERKHRDIIREIERLLDELRERVERLPVDDELRKEIRKRLEDIKDLLRRSTEKLKKLKRESEEKNKKLIRELKKVLDDIRREVEDIRRKPVDRKKVEEELERVRRIIKELERRLRELHKENKKLLDEILEESKRLAEEVRKTIEDIKRKIK

SEQ ID NO: 8459 - protein, 184 aa, Artificial Sequence; identical to SEQ ID NO: 8458
  Synthetic

SEQ ID NO: 8460 - protein, 183 aa, Artificial Sequence
  Synthetic
SEVEDLLRRDRELNREHKRLLEEASKKNKEELERVLEKVKELLERVKKRLDEAKEALERGEVDDEVLKALEEELRKLLKELKDTLRKLNDDTKKLIDKLKEHNKELEERSRELEKRLRDKTGDDERLERVLRESRKLNKESHETLKELIDRNRKLNKELEEAVKKIEEEIKKLLKELKEEKDR

SEQ ID NO: 8461 - protein, 183 aa, Artificial Sequence; identical to SEQ ID NO: 8460
  Synthetic

SEQ ID NO: 8462 - protein, 183 aa, Artificial Sequence
  Synthetic
SEVEKLLREDRELNKRHVEKVRELSERNKELLERHEEKLKKVAKEIEDRLRRLEEMLRRGEADEKVLKDLAKRIRDLLRDLTRHNKELNEETERLLRELEDHNRRLKETSDRLRERLRRKTGDTDRLKRVEEESEELNKRSHETLRRLVEENKKRNKELHERVERIKRRLEKLLRELEEEIRK

SEQ ID NO: 8463 - protein, 183 aa, Artificial Sequence; identical to SEQ ID NO: 8462
  Synthetic

SEQ ID NO: 8464 - protein, 183 aa, Artificial Sequence
  Synthetic
SEVEELLDEDRKLNEELTKSAKRLTDENKKLLEDMKRKAEELKKRVDELLKEVTDVLRRGELDEEKLKTLADEIKKLLDKLREDLKRLDERSEELLKRLREEVERLERRSKELAKRLEDKTGKTDRLERVLRESRKLNEDSKKRLEELIKENKDDNDRLREDLERIVRELEKRLDKLRKDTET

SEQ ID NO: 8465 - protein, 183 aa, Artificial Sequence; identical to SEQ ID NO: 8464
  Synthetic

SEQ ID NO: 8466 - protein, 184 aa, Artificial Sequence
  Synthetic
KELEDLLRRIKRLIDENRRLSKEVLEEVRKLSEKHKKEVEDILKEIKELIEEALRRIERDGPREELLRRLAERVRKLTEELRRSLKELRKRIEDLERDLDRLDKESEKELRKIEEKARRDNSVPKERLDRILKTLRELLRKLREDNERIRREIREIVKRNSDELARIEEELRKLLDDLAKKAEE

SEQ ID NO: 8467 - protein, 184 aa, Artificial Sequence; identical to SEQ ID NO: 8466
  Synthetic

SEQ ID NO: 8468 - protein, 184 aa, Artificial Sequence
  Synthetic
KELEDVLKEVEELSRRHKRRAERVSEENRKLLRRLKEEARKILEDIRRLLKKLEERVRRDGPRKEELDEARKRLKDLARRLKELLDRLDRTTEELARDLERTLRELEERIRRIAEDLRRRQSVDRERLKRILDEIRRIVEKNKRDLERLLRENEELNKRLREELRRILEEIEELLRELEERLRK

SEQ ID NO: 8469 - protein, 184 aa, Artificial Sequence; identical to SEQ ID NO: 8468
  Synthetic

SEQ ID NO: 8470 - protein, 176 aa, Artificial Sequence
  Synthetic
SEAEEALKELKETSDRHKEDLDRLHEEDRRTNEEVEKELRKLVDEAKKKLDRVREIVEEGRGREELLKKLREDLRRIEEEIKRTLDELKRKSEEIEERVKRTTRELEKKLEDLERANLVDEELLRRLEEIVRDNKRRVEEILERNRRLNEESEKKVRDIIKKLRDDLERLARELEK

SEQ ID NO: 8471 - protein, 176 aa, Artificial Sequence; identical to SEQ ID NO: 8470
  Synthetic

SEQ ID NO: 8472 - protein, 176 aa, Artificial Sequence
  Synthetic
SEAEEALKELKRTSDEHRKRLEDLHRRDKKLNDDSKRRLDELLKRDEDTNRTVLDIARQGKAREELLKELKERTRRLHEDNKRLLRELEKRSKEIEDEIRDTLEKLKRKLDELRKANVVDEELLRTLEKIVEDNAREVTEIIKKNRKLNDDSRREHERINDESRRLNEETEKRLRD

SEQ ID NO: 8473 - protein, 176 aa, Artificial Sequence; identical to SEQ ID NO: 8472
  Synthetic

SEQ ID NO: 8474 - protein, 183 aa, Artificial Sequence
  Synthetic
DELEEILRRVDELIKTIEEELKKIEKRVKELLETHRELNKRLLDDHRRLAEEVKKANLDRRDAERLMREMEKKNEEVRKRLEESLERVKDTLRKIEKKLRELAERLRRELEKLRDDLRRRGSDRDRVEDVLRKIAEKIKRLEDRIKEVLDKLRKLAKELEDESRKVLDDSNKLIERVKRELKR

SEQ ID NO: 8475 - protein, 183 aa, Artificial Sequence; identical to SEQ ID NO: 8474
  Synthetic

SEQ ID NO: 8476 - protein, 185 aa, Artificial Sequence
  Synthetic
DTERVVTEIKKTNDELKRRHEKVVEDDRRLLEELRRRHERVVREVERLLRELKERVDRRAKDKRELKKRLKELKDRIRKELEDLTRKHEDLDRRVEDEHRKLSEEHEKVHREIRERLEDIRRKKVPREVLKKLLDDNRKIIEDLTRKNEKLHEDSKRIIEKIDDENREILRRVEEIVRRIEEELN

SEQ ID NO: 8477 - protein, 185 aa, Artificial Sequence; identical to SEQ ID NO: 8476
  Synthetic

SEQ ID NO: 8478 - protein, 180 aa, Artificial Sequence
  Synthetic
SAEDVKRRIKESADRIRKRLREALERAKKLHTDNEEENKRVNDEIKKRVEEIRRRIPDGEKAKELEDRLRKLLEDSKRDDDRSRKESRELIERTREVLERLARLLDELERRLDEVRKKPTDEKLLRELERDVRRLEREITEVVKRLEDEHKRASERNKRLLEEIKDRVRKLIEEAEERRK

SEQ ID NO: 8479 - protein, 180 aa, Artificial Sequence; identical to SEQ ID NO: 8478
  Synthetic

SEQ ID NO: 8480 - protein, 178 aa, Artificial Sequence
  Synthetic
EEVERVRRTIDELSKENEKALKEVEERIKKLSDENEKAVRKAEEDNERLNRTAERLKRSNVSEDTLRRILEEVRRATEDLRRKLEDINRELRERVKRLIEEIREINKRLDDELRRIEEEGVDEKVLRDIRKKIKENHEKNERVIREIERLLKENEERNEEVIRRIKESNRKTEKDLTD

SEQ ID NO: 8481 - protein, 178 aa, Artificial Sequence; identical to SEQ ID NO: 8480
  Synthetic

SEQ ID NO: 8482 - protein, 178 aa, Artificial Sequence
  Synthetic
SEVEEVERRIDRLSKENRRVLEEAKRRIKKLSDENKRMLEEARKRNEKLNREVKKLKKSNVDEETLRRKLKEVKERTDKLRKEIKEINEKLAEDVKRIEDEIREINERLDRSLKKIEDDGVDEKVLRDIREKAKRNHDANEKVIREIRDILRRNNEENKRVIEEIDKSNKDTEDELRK

SEQ ID NO: 8483 - protein, 178 aa, Artificial Sequence; identical to SEQ ID NO: 8482
  Synthetic

SEQ ID NO: 8484 - protein, 178 aa, Artificial Sequence
  Synthetic
REVEEVKKEIKKLSDENKEVLERARKRIEDLSRENEDVLRRLKERNEDLNRRVRELKERNVSEDELEKILRELEKKTEELADEIRRINEDLDRKLREIEKEIEEINEKLKKKLEEIERRGVDEEVLRDIRRELKENHDENRKVIEDVRRIAEENHRRNKRVIDEIRRSNKETVDELRK

SEQ ID NO: 8485 - protein, 178 aa, Artificial Sequence; identical to SEQ ID NO: 8484
  Synthetic

SEQ ID NO: 8486 - protein, 184 aa, Artificial Sequence
  Synthetic
RAEELRKEIEEIIKKNKKENEDVLREDRRRLKELKEEIEKVVREDRRTLEELEERLRRSGLPEEEVERIIRELRDEHRRVEERAEELRRKLDERHKEVEEESERLRKEVRDDKRRLDERLKRNSTEEVLKEIRERVEKLSEKNKRALEKWKRDSERLSREVERELEEWKKRSKRLAEEVEEATR

SEQ ID NO: 8487 - protein, 184 aa, Artificial Sequence; identical to SEQ ID NO: 8486
  Synthetic

SEQ ID NO: 8488 - protein, 186 aa, Artificial Sequence
  Synthetic
DLEELEREVEKKLKELEDRVRKVIEESKTELKKLEEELRENSREVRDILRRLEEDVRRKVKDDEDLKRKLRKLKEDMERVNEEVEKRFRDLARELRKHARDLEREAKRLKEEVEETLRRVRKKNVEDKRLLEELRRRLDRVRKEVERLIKEHRETTDELRKRVEKLSEDHRREVEKLAKTVKDELK

SEQ ID NO: 8489 - protein, 186 aa, Artificial Sequence; identical to SEQ ID NO: 8488
  Synthetic

SEQ ID NO: 8490 - protein, 178 aa, Artificial Sequence
  Synthetic
SRAEKIREDIRRLRKENEDRIKEIEDEFRKLLEEHERKNKEIEERVRRLVKRIEDEIRRKNVPKDEVKRIRDDIRRLEKRAKEVHERSKRRLDELRERFKRLEKRLREIHEEIERELRKRGLTDELAKRVREVSEDVNRRLDKIMKDLRRVIKELDEESKRLLEEIKRRMEEILEELR

SEQ ID NO: 8491 - protein, 178 aa, Artificial Sequence; identical to SEQ ID NO: 8490
  Synthetic

SEQ ID NO: 8492 - protein, 180 aa, Artificial Sequence
  Synthetic
SEEEKLAKDNERLVREHEEESKKLLKTIRDLSEEHKRDLKRAMEENKEKVDRLRDMLKRGEVDDRVIEELKRDSERLLEELRKRSKELKDEIKKRLEDLKKHLDDLKRDSRRLLKELVDKKKRRPEEIATKSEELHKELEETNERIAREVEKLEKENDEILEEIADRSRRLHEDLDRERK

SEQ ID NO: 8493 - protein, 180 aa, Artificial Sequence; identical to SEQ ID NO: 8492
  Synthetic

SEQ ID NO: 8494 - protein, 178 aa, Artificial Sequence
  Synthetic
DELEEVLRTIEKLVEDHNRELERVLRRVKELADRHREESERVAREIKKLVDDARRLVEERGPDEEVLRDLERRVRELVDRLRRHLEELEKELDKLKKDLKRSLEELERRVKEIADRLPETDEVRRIRERVKELLDRNRERLERIEREIDRLLEDLKRKNEKIEREVRRLLAKLKEEAR

SEQ ID NO: 8495 - protein, 178 aa, Artificial Sequence; identical to SEQ ID NO: 8494
  Synthetic

SEQ ID NO: 8496 - protein, 178 aa, Artificial Sequence
  Synthetic
SELEKIVEENRRLVKEHNERLKRILDELRELAKRHEDRSRKAMKENEELVRTVLELMKRDGPDERVLRELRKRSKDIVDDLRRHLKELSDTARKLIEEIRKSLEELERRTKKLADDLPETEKVRKIREESKRLHETNRRRVEKIEEEIRRLLKRLEDTNRDIERRSKKLHEDLEREAR

SEQ ID NO: 8497 - protein, 178 aa, Artificial Sequence; identical to SEQ ID NO: 8496
  Synthetic

SEQ ID NO: 8498 - protein, 178 aa, Artificial Sequence
  Synthetic
SELDKVMRDNDRLVKEHAEVSKELLDRLKKLAEDHKKRSEEVLRENKRLVDEVRRLAKERGPRDEVLDTLRKESKKIKEELEKHLEELSREAEKLIRELEEHLKKLREETKRLRDALPETEKVRKIARRSDDLHRELKERNDRIKREIERLLEELKRTNDKIVEDSKRLHDDLEREAR

SEQ ID NO: 8499 - protein, 178 aa, Artificial Sequence; identical to SEQ ID NO: 8498
  Synthetic

SEQ ID NO: 8500 - protein, 178 aa, Artificial Sequence
  Synthetic
DELEEIRKTIEELSKENKKKLEEVMKEVEELARRHEKRSRDLLRRLKKLVDELRDRVEKTGPDKDDLKRLEDELRRLKEDLKRHLTELEKRLRRLSEEMKKHHEELEKRVRDLERALREEERVRKISEDVRKLLEDNKRIAERIDERIKELLKRLEDTNRRIEEEIDRLLEELKREAD

SEQ ID NO: 8501 - protein, 178 aa, Artificial Sequence; identical to SEQ ID NO: 8500
  Synthetic

SEQ ID NO: 8502 - protein, 179 aa, Artificial Sequence
  Synthetic
DELDDLLRRAKETSDRHKETLKKILDEMREEVKRHNRDLERILEEVKRLIDEVRKANSKDETLIRELRKRIEELRERIERSLRELRRKLEELERRIRDTLRKLEETLRRLEEELDRRGVPREDVKRIKETMKKLLDENRTEVEKIKREADRLLEENRRLVKEIEDTIRELLKRLEDERR

SEQ ID NO: 8503 - protein, 179 aa, Artificial Sequence; identical to SEQ ID NO: 8502
  Synthetic

SEQ ID NO: 8504 - protein, 178 aa, Artificial Sequence
  Synthetic
SKKETIKKDAEEALKRSKKKLDELKERLRKVMRETEERLRRLEKELRDLAREIREKIKKRRVDEDKVKKIEERLKRLEDKLREVEKRLREKYRELEKEVDKVVEKLERDYRRLKDKLEKEPADDRLRKEVEDLNRETDKVIEKLREDIDRLDKESEEVIRRLKDEIRRLFEEIDRRLR

SEQ ID NO: 8505 - protein, 178 aa, Artificial Sequence; identical to SEQ ID NO: 8504
  Synthetic

SEQ ID NO: 8506 - protein, 183 aa, Artificial Sequence
  Synthetic
SELEEVKERVDRLIREVEKMNRDSERRVKKLIDDVRRENRRTEEDVRRLVKRAEEIVRKDGKIDEKVLRELEERLRRLKEENDKLLTELEKRLRKLKRENDELLRELKKRLEDLKRELDKDGLEKEKVDRLKKEADDLLRKIKEDNERITEKVKELLERLRKNNEEIKREADRLLEELRRRVK

SEQ ID NO: 8507 - protein, 183 aa, Artificial Sequence; identical to SEQ ID NO: 8506
  Synthetic

SEQ ID NO: 8508 - protein, 176 aa, Artificial Sequence
  Synthetic
SELEELDKRITELSEEIKRRLEELLRRNEDLSRRIEEAIRRILKRNEDVIRDIKRKNKKDERLLRELKKLSDENRKRLEELHRRHAEHVKRTEDELRELHREHKEAVDDIRRRMGREDKKVRDIEEKIERLNRELEKIAKEIRERTERLNKRLEELIREVDERNRDLLRRLEEEVK

SEQ ID NO: 8509 - protein, 176 aa, Artificial Sequence; identical to SEQ ID NO: 8508
  Synthetic

SEQ ID NO: 8510 - protein, 182 aa, Artificial Sequence
  Synthetic
KDEEDARRKLEELRELARRDIERNKRELERLRREIEKDEEDNEEVIKRLRERVEELRRRQTDKDRAREVLEELKRLIDELRRRNEETKEKLKRIIDEIRKRNEEMEERLRRIIEEIEKKLGREDESLKRLKEELEKLLRDYKKKLDDSDKELRDLLAEYDDRLTRSDKRLRDLLKEAREKSK

SEQ ID NO: 8511 - protein, 182 aa, Artificial Sequence; identical to SEQ ID NO: 8510
  Synthetic

SEQ ID NO: 8512 - protein, 186 aa, Artificial Sequence
  Synthetic
DTAERAEEELERSDRELKETLRRAEEELKRSHKELERIVERARRELRRLAEELEEVIRRKKLDEKEVRKLEEILKDVERRVDELLDTLRKISKELEDRMRELDKELKKDSDDIRRRLDELKKREKEEETLRRKLERLLERHKKVVDDVERTLRDLLERHKEVVERVREKLTDLLRKLKKVIDDVRR

SEQ ID NO: 8513 - protein, 186 aa, Artificial Sequence; identical to SEQ ID NO: 8512
  Synthetic

SEQ ID NO: 8514 - protein, 179 aa, Artificial Sequence
  Synthetic
SELETIKKRAEELSKESEDILRDIERKLRKLSEESKDILRRLKEELEKLHKELVDKKGRETERIRELKKRNRENLERLRDELRKLNEELERKLREIEERLKELNRKLEKKEEELRRRPTDEELEKELEEVLTEYREVVERLADELRRLLKKYEDDVRRLEEHARRDLEKLDRDIKEEER

SEQ ID NO: 8515 - protein, 179 aa, Artificial Sequence; identical to SEQ ID NO: 8514
  Synthetic

SEQ ID NO: 8516 - protein, 179 aa, Artificial Sequence
  Synthetic
SKLDDLLRKIERLVTESLRRLRKTNEDAKRLLERSVRELEKSNKEIRDLVKEIKERNSKDERLLREAERVLDELRKRHEENHRRLEEELRKLLEDHEKNHRELKKVLDKIDEDVKADGVDKKKVDELRERLRELLKRHRDAVEKNRRDLEKLREDHRRLVEKNKRDLDKLKEELDRTKK

SEQ ID NO: 8517 - protein, 179 aa, Artificial Sequence; identical to SEQ ID NO: 8516
  Synthetic

SEQ ID NO: 8518 - protein, 179 aa, Artificial Sequence
  Synthetic
SELDELLKRLEELVREIIKRLRDSNRRAKEVVDRSVKRLEESNRTLRELIKDVKDKNEEDERLDRELEERVRELEEEHKENHKRLEETLRKLEKEHRDLLREAKEMLKKLEEELKKRGAPEEKLRRIKRRIDELEKTLRKIIKDNTDNLRKLTEDHRRLVEKNKRDLEKLEEELKRRRK

SEQ ID NO: 8519 - protein, 179 aa, Artificial Sequence; identical to SEQ ID NO: 8518
  Synthetic

SEQ ID NO: 8520 - protein, 179 aa, Artificial Sequence
  Synthetic
SKLDELLERIREEVKRSVKRLEDSNKEIKRLMEESADELRRSNKELRDAVRDLKRKNSKDETLTRRLEKLIEDLERRHKRNHEELKRVLDELAEEHKRNHKELERVLREIKERVKADGAPEEKVRRLDKVLEDLRREHEKIVRDNEENLRRLLERHKRLVDKNKEDAERLLRELRETVR

SEQ ID NO: 8521 - protein, 179 aa, Artificial Sequence; identical to SEQ ID NO: 8520
  Synthetic

SEQ ID NO: 8522 - protein, 183 aa, Artificial Sequence
  Synthetic
SELEELLKRLRDLIERIVKRLRELSKESEDLIRRIERTIEKLSEDSERAIEEILRRIDKGTSEDTARRLLERFKELNKRSEDELEKLKRELEKLDKRSDDELREIKEELRRMVREVRERVRKVTEDRLREVEEEAKKLEKRIEDMIRKHKETNKRLKEELDKLVKEHKDRNRKLLEELKKRAT

SEQ ID NO: 8523 - protein, 183 aa, Artificial Sequence; identical to SEQ ID NO: 8522
  Synthetic

SEQ ID NO: 8524 - protein, 178 aa, Artificial Sequence
  Synthetic
SEIEEVIERLDDTMRRIEERIRDTNRRLKKVIDDSKRRNERTNREVRKTIEKLTRELERDGRGGELAKRIREVLEELKRRSEELEKENRRLLDELRKESEDLADEIRKTERKLEDDLRKADAREEVKRRLEELRRRIEKMLEEHRESLRRLEEELEESHKRHKDTLRKLSKELEEKLK

SEQ ID NO: 8525 - protein, 178 aa, Artificial Sequence; identical to SEQ ID NO: 8524
  Synthetic

SEQ ID NO: 8526 - protein, 182 aa, Artificial Sequence
  Synthetic
DEVDEVLKRVDELLKRHEETNKRLEEEIRKIHEENKRTIEELLKEVRKRAEEVERLVRRDGPREEEIRKIEEALKRLLRELEKHLDRSRKRLKKLLDENRRHLRELERELDKIEEDLRRNRVPEEELKRVKERLKEIRKRAKESHDRLRETVKELIDRNRKLLRELEEELRKIEEKIREDAR

SEQ ID NO: 8527 - protein, 182 aa, Artificial Sequence; identical to SEQ ID NO: 8526
  Synthetic

SEQ ID NO: 8528 - protein, 173 aa, Artificial Sequence
  Synthetic
SEEDELRETAKRIREEVKKSIEENRELAKRITDEVRELLERNKRRIEEVKERLERSGVDERVLREAERVLRELKKRHEDLLEELKKAIKRLEDKHRKVLKELEDEIRELERLSKRKDEDDLRRRLEELLKRLRDESRKVNEDLKRLVDELRRLSKEMNEELKELEDRVREKER

SEQ ID NO: 8529 - protein, 173 aa, Artificial Sequence; identical to SEQ ID NO: 8528
  Synthetic

SEQ ID NO: 8530 - protein, 182 aa, Artificial Sequence
  Synthetic
SEEDEVREDNKRIVEEVERLLKEIEDNNREITREAEELLKRLEEEARRLMEEIRRSKSGDKRLLEELIERLKEVLTELERRLRELKEENEEVLTRLRREVEKIKRENKELLDRVRELRKKVRDEELLRRLRDMNRRSKERADRLIEEAKKENDRSSKRVRDLIREVDEILKEVKKRVEDVTT

SEQ ID NO: 8531 - protein, 182 aa, Artificial Sequence; identical to SEQ ID NO: 8530
  Synthetic

SEQ ID NO: 8532 - protein, 177 aa, Artificial Sequence
  Synthetic
SEAEKVVEELKKLLREVEKKIRDHTEDVKRILEELERRLRKHSEEVRRTAKELKDKNSDDDTVRKVKEELDRSHEKLREELRKVAKELKESNEELERDLKRLVEEAEDRLRRLKDRVSEKVLRELEKILEDIKRTLDKLLRENRETLKRIEDRLRELLEENRKLLEKIERELRERSR

SEQ ID NO: 8533 - protein, 177 aa, Artificial Sequence; identical to SEQ ID NO: 8532
  Synthetic

SEQ ID NO: 8534 - protein, 177 aa, Artificial Sequence
  Synthetic
SEVEDVIRKLRRKAEDLTRRLKEHTDDVKRLMEELSKDIKDHTREVKRIAREAKEKNRDRETLRRILEELRRSNEELKRRLDEALEELRKSNEELRERLERVLRDMRRLLEELKDRVDEEVLRDLERVLRDIERRLRELLRRNEEVLDRIRRTLEDLHRKNEEVLREIERDLRERER

SEQ ID NO: 8535 - protein, 177 aa, Artificial Sequence; identical to SEQ ID NO: 8534
  Synthetic

SEQ ID NO: 8536 - protein, 177 aa, Artificial Sequence
  Synthetic
SEVEDVIRRLKKKLRELVERIREHTKRVRDLARKLEEEIKRHTEEVKRIADEAKKRRSDEETLRRIEEELKKSNEKLERKLRKVVKELAESNKRLREELKKVVDELRKEVESLRDRVSDELLKRLEDVLRKIRKDLEELLRKNNRDLEEIKKRLEELHRRNRETLERIRKDLEEDER

SEQ ID NO: 8537 - protein, 177 aa, Artificial Sequence; identical to SEQ ID NO: 8536
  Synthetic

SEQ ID NO: 8538 - protein, 182 aa, Artificial Sequence
  Synthetic
SEIEEVLERIKKLLDELRKESRKLLEDHKKRAEELEEKARRLSERHKELLDRLKEVVDRDGPRDETLERLRRESEKTKKEMEDTIRRVEEESEETIRRHRRSVREVRERLKELRRELDKANLPEEMLKRAEDLLRRIDEELKRSHEELKELSDRIRERLERLLRTLEELSKEIDKRADDLRK

SEQ ID NO: 8539 - protein, 182 aa, Artificial Sequence; identical to SEQ ID NO: 8538
  Synthetic

SEQ ID NO: 8540 - protein, 182 aa, Artificial Sequence
  Synthetic
SEIERVLEELRKLLEELRRESKKLLDELRKLLEDARRESEKLLRELKDLLRRAEELVKRDGPDKDTLDKVRKRMEELHRTHEKILRELKRRADELREDHRRKLETIEKRLKEIEDELRKANLPEKVLDELRRELDKIREDLKKSHRELEELIKKIRTELDKSNRKLEELLKRIEERLDEMRR

SEQ ID NO: 8541 - protein, 182 aa, Artificial Sequence; identical to SEQ ID NO: 8540
  Synthetic

SEQ ID NO: 8542 - protein, 182 aa, Artificial Sequence
  Synthetic
SEAEKVLEELKKLLRDLEETSKRVLREIRELLKEAREKSKRLLDRLRKLARDLKELVRRDGPVDEAIRRVKEELERLSREHRKMVEEIKRRLEELHKRHKKKLEDIRKTLDDIKKELERTNLPKEVLDRIKRLLEEIERELERSNKELEDLLRKIEEDLERSHRELEKLIREILKELEDARK

SEQ ID NO: 8543 - protein, 182 aa, Artificial Sequence; identical to SEQ ID NO: 8542
  Synthetic

SEQ ID NO: 8544 - protein, 177 aa, Artificial Sequence
  Synthetic
DAEERLRKLLDDIRRELKRLTEETRKSLEKIKRDNDELEKKLRKLNEDSDRRLKEANVDERIKEEMERSRRELEEKNRRSRKRIEDMARRVEETHKRIEDDLRRLAERIKELEARGIDEKTIEDLLRELEKALRDLEKEVREINKELKRVLDEIAKTHEDLLKKHEELLRRVEERAR

SEQ ID NO: 8545 - protein, 177 aa, Artificial Sequence; identical to SEQ ID NO: 8544
  Synthetic

SEQ ID NO: 8546 - protein, 178 aa, Artificial Sequence
  Synthetic
DLERELEKLLKDIKEELDKLIRTNEETLKEIEREVRKLLKRNKELLDRIREEVRKTGTDEDEAEKLLRDLKRSVEKLEREHREVRREIEEKLERLRRLHEEIRKRIRDLLEDAKRRKVPKEVVDRILKEARELLERIREENRRTLEDLRRILEDLRRRNKRHLDELRRVLKELRDKRK

SEQ ID NO: 8547 - protein, 178 aa, Artificial Sequence; identical to SEQ ID NO: 8546
  Synthetic

SEQ ID NO: 8548 - protein, 178 aa, Artificial Sequence
  Synthetic
SLEERLEKLLKEIRETVKKNIEENRDLLRRVEEDLRRLTERNKRLLEKIRDALRKAGSGKDRVRKLDEDMERTLRELRRRVEEVRKKLEESLRRLEEELKRILERIERLIERIRREKVPEEVARRLMDDLRRLLEKIDRLSREHLERVRKILEDLRRLSEKHLKELEDLLREAEEEAR

SEQ ID NO: 8549 - protein, 178 aa, Artificial Sequence; identical to SEQ ID NO: 8548
  Synthetic

SEQ ID NO: 8550 - protein, 178 aa, Artificial Sequence
  Synthetic
SLEERLEELLDEIRKMLKRLEDENRRLLKEIEKRVRENTRTNRELLKRIEDRIRKAGSDEKDADEVRRRLEKTVEDLERELRRLLEEIRRSLDKLRRDLERLEEKIERLIEEIKRRKVPEEVVRTLLRELEKILAEAEDLSRRHLERLRDILREAEDLSRKHLEELKKVLEELERRAK

SEQ ID NO: 8551 - protein, 178 aa, Artificial Sequence; identical to SEQ ID NO: 8550
  Synthetic

SEQ ID NO: 8552 - protein, 179 aa, Artificial Sequence
  Synthetic
SDVERLLRELEDLLRRLEERIRELNKRHEELVRRLKEEVKRLSREHNEVVADVARKNDKDEKLDRDLRRLNEKVRRDVEKLIEDAKRVNDEVRKTVERLKEEAKRTLDEVKDRIDKRRVPKELRDRLRDVVRRLEDELRRLDDELRKNSEEVKKVLDDLRRHLEENSKRAEDTLRELRR

SEQ ID NO: 8553 - protein, 179 aa, Artificial Sequence; identical to SEQ ID NO: 8552
  Synthetic

SEQ ID NO: 8554 - protein, 179 aa, Artificial Sequence
  Synthetic
SEVEKLLRELEKALEDLRRTNEKLDREHDAVVKEVKKIAKDLSREHRDVVEDVKRKNSKDETLERDVRRRTERIREEVKRLADDVKRRNDELKKRLDELKKRLEELLREAERRIDENRVPEELRDELRRVVEDVEKKLDDLRKRNEENSRKVKEVLEKLTRELDKNREEVERTLEELRR

SEQ ID NO: 8555 - protein, 179 aa, Artificial Sequence; identical to SEQ ID NO: 8554
  Synthetic

SEQ ID NO: 8556 - protein, 179 aa, Artificial Sequence
  Synthetic
SEIEKLLEEIKESLERLKKTAEDLLEELRRLLEELERRVKELSDEHRRLVKELKDRNSKDDTVVERVRKRSTEIRKELRELLEDVRRKLEKIREELEELSKRHKETLEEIDKEMDRRNISEELKKRVEDVLREIKRAHDDLRRRLEKILRDIEKTIEDLERHMKENHDDAERVIEELKR

SEQ ID NO: 8557 - protein, 179 aa, Artificial Sequence; identical to SEQ ID NO: 8556
  Synthetic

SEQ ID NO: 8558 - protein, 176 aa, Artificial Sequence
  Synthetic
SEEEALERVLRELRRSLEELEEELRRAIRKLEDNLRRLREALETILKKLDDLLDDLRRRKPRETLEEIRRRLEELKEKIKKILTDLEKAYRDLKKKLDEILKRLEERYRELEEKVRRNGFDDKLKKEADDLDRRSRKTIKEVLDEIKELDDRSNERIEEVIREIEDEARRLAREVD

SEQ ID NO: 8559 - protein, 176 aa, Artificial Sequence; identical to SEQ ID NO: 8558
  Synthetic

SEQ ID NO: 8560 - protein, 176 aa, Artificial Sequence
  Synthetic
SEEERLREIRERLKKSLEDLKRELEEILRELERSLDKLRRDLERLLEDLRRLLDELRRRKDTESLEEIERRVRELEEELKKIDKDLEDEYRRLEEELKKVTKELKREYDELEKEVRKRGVREELEKKARELNERSKEKIKRLLEKLRKLDKESKDEIKRVLDKLRELAKRIKEEMD

SEQ ID NO: 8561 - protein, 176 aa, Artificial Sequence; identical to SEQ ID NO: 8560
  Synthetic

SEQ ID NO: 8562 - protein, 176 aa, Artificial Sequence
  Synthetic
SEEERLRRVIEEYKRVLDELSERLKRLLDELRRSLKKLEEDLKRLLDELKRTLDELIRRVEDDRLRELREEVKKAAEEIKKILKKLRELYTELEKELDRAHKENEKELRKLEEEVRRKGFSEELEKKLREALDTVRRLYEALIKKARELDKRSKDEIKRVVDKLKKLVRDIEERVR

SEQ ID NO: 8563 - protein, 176 aa, Artificial Sequence; identical to SEQ ID NO: 8562
  Synthetic

SEQ ID NO: 8564 - protein, 182 aa, Artificial Sequence
  Synthetic
DDIEDVLRRIEKLIRDLRDHSRKLVEEIEKLIEDHTRHSRKLERDIKELLKRLRELRRRGDLTEELLRKAKEELKDLLRRHEEVSERLKRRLDKLETDHDRVIKELEDRLRRIAEELERRDTSEEVKKRLDEARRKAEKVVKESRDTLRELKDKVRENLDRSRKELKKLEEELEEVLREARE

SEQ ID NO: 8565 - protein, 182 aa, Artificial Sequence; identical to SEQ ID NO: 8564
  Synthetic

SEQ ID NO: 8566 - protein, 182 aa, Artificial Sequence
  Synthetic
SDVERVAKTIEDLIREHTEHVKRSAERVERLIKEHTDHVRRSLTRIEDLLRRLEEMRRRGDSTEEVLDTVRRELRKLLKENEDRSRELEKELRELLERNEKKTKELEDELKKILRELERKPTSEDVERKARELERKVRENVRKVRDDHRKLEEKFRDNLRKVKREHEEAERKMRDLLREARR

SEQ ID NO: 8567 - protein, 182 aa, Artificial Sequence; identical to SEQ ID NO: 8566
  Synthetic

SEQ ID NO: 8568 - protein, 182 aa, Artificial Sequence
  Synthetic
KDVDKVEEDIERLLADLRRHNEKLHRDIERLLEELRRHNDKLRKTLEDLLKKLKELAERGDNEERELKRAKEEVDKLIRDHEEVLRRVEEEIEKLIRDHEKKLEDVRRTLRDILRKLEKKPTSEDVKRRLEDLERKARRVLEESRKDLEEAKKKVDELMKRARDSLRELTRRLEELVRRIRK

SEQ ID NO: 8569 - protein, 182 aa, Artificial Sequence; identical to SEQ ID NO: 8568
  Synthetic

SEQ ID NO: 8570 - protein, 182 aa, Artificial Sequence
  Synthetic
SEVEEVMKEIERLIEELRRHNEELARRLEELIKDHTRHNEELHKTIEDLIKELEDLARRGDLDEETLKRVARDLDELLERHERRSREIEERIRRLLERHEEELERIAREVKKILDELKRKPTSEEVEKRLRELKEKLDKVLDELRETLKRLEEKARENLKRSRDDLETIKRKLKKVMDEARR

SEQ ID NO: 8571 - protein, 182 aa, Artificial Sequence; identical to SEQ ID NO: 8570
  Synthetic

SEQ ID NO: 8572 - protein, 185 aa, Artificial Sequence
  Synthetic
SDVERLIEELERLLDELRKKTEEIIRRIKKLIDELRRKTEEVIKRLEKLARDLTRLTERGSDKEEVDRILDEIKKRVEKIERELEETHKKVRRRLEELETEMEKLHKELKERIEKLSKELEDKGTSEEARRRIDEIRKKAEEVNKESRDRLRRLKEEVDKVDKDSKRRLDELREELRRLMEESKR

SEQ ID NO: 8573 - protein, 185 aa, Artificial Sequence; identical to SEQ ID NO: 8572
  Synthetic

SEQ ID NO: 8574 - protein, 176 aa, Artificial Sequence
  Synthetic
DAARELRERLKKAIEDHRRLLERAARDVERLNKELEDILRRMAEDMKRSIEELKRVSEEGRVDDEIARRHEEDNKRLEEELREVAKRLEDKHRKVKEENDRSAEELKRRIDKLRKDKLLDEKDLRRLEEEIRKEIRRSNETLKKLKKKTEDSLRTIKRRLEELHEEAKKVLDDLRR

SEQ ID NO: 8575 - protein, 176 aa, Artificial Sequence; identical to SEQ ID NO: 8574
  Synthetic

SEQ ID NO: 8576 - protein, 178 aa, Artificial Sequence
  Synthetic
REDETLKRLEEENEEVNKRSEETLRKLLEDNRRLLERIEERLRELLEELRRLLEKIRKDRRLPEEMIKRLRDLLRRLEEELRKALEEAEKSLRELEREIEELRRRSRESSKKVKDELRERRDKDELTERVKRHIEENKKLTEDVARKSEKHLRDLEELLERLRKLVEDLLRRLEEEAR

SEQ ID NO: 8577 - protein, 178 aa, Artificial Sequence; identical to SEQ ID NO: 8576
  Synthetic

SEQ ID NO: 8578 - protein, 185 aa, Artificial Sequence
  Synthetic
SELEKVRKESERNLRSNEKLLRELDELSERNLDKLRRFVEEVRELVREMLERLDSVRRRNVSEDELRKLAREVEEILKRIKERLERLAKESEDLLRELKKRLEKHEEDSKELAKRLRDELRDRRVSEEVKRDVERNEKENKELLDRTRRKVEENAKRNKKLLEDIREDLKRLATELRRKLEEIRR

SEQ ID NO: 8579 - protein, 185 aa, Artificial Sequence; identical to SEQ ID NO: 8578
  Synthetic

SEQ ID NO: 8580 - protein, 177 aa, Artificial Sequence
  Synthetic
DKEETVKDLERRYRDLLREIEKRLRELVRRNDKLLEEIKKAIEDLIRENEKKIKEIKERRGRTKEVEEIEKSLEELRKEHERVVREAEKSVEELRKRHEKAIRDSRRHLEELKDELEKRRIDDELRRRAEEALERNKRLLEELKKENDDHLKRLKELLEELKKRNEDHLRRLDEEER

SEQ ID NO: 8581 - protein, 177 aa, Artificial Sequence; identical to SEQ ID NO: 8580
  Synthetic

SEQ ID NO: 8582 - protein, 182 aa, Artificial Sequence
  Synthetic
KELEEIKRAVDESLKRAKELMDRHRREVEKSLEEMKRLAEDHKRRADRLLKELKRLADEGRPREDLERKLDELKRDLERHSTELKKELEKNHRELEEHSKKLKEDLKRNHEELDRLVKSRKKSDEVRRAVKELKDRHKELLDRIERESERLREEHRRLLEKIERTSEDLIRRLEKLIRDIRR

SEQ ID NO: 8583 - protein, 182 aa, Artificial Sequence; identical to SEQ ID NO: 8582
  Synthetic

SEQ ID NO: 8584 - protein, 182 aa, Artificial Sequence
  Synthetic
DEVETVEEEVKKSLEELRDLARKHEKKVRESLKRLEESLRRSEEKVKDIIRRLEELKKRGEPKKDLERDIDELKKRLDETAEKNDEEMRRNHRELEEHSRRLKKKLEDNHKELEDRLRSEKKSEEVKKRLEDLRKEHEDTLRDIERRSRELLKRHKDKVDEIRKAHERLIRELEEIARRIKK

SEQ ID NO: 8585 - protein, 182 aa, Artificial Sequence; identical to SEQ ID NO: 8584
  Synthetic

SEQ ID NO: 8586 - protein, 182 aa, Artificial Sequence
  Synthetic
SEEEELKKKLEKSLDELRRSLKKSAEDVRRILEELKELMKRHKEVVEEIARELDELRKRGEPEEDLERRLRKLLEEARRHSRELEKRLRELEEEVRRIAKENRDRMKRNHEELEKELRSTKKSEDVERSLRDLRRKHKELVDRIDEEHKRLEKELRDIIEEIERRSRKLLKELEDIIRETRR

SEQ ID NO: 8587 - protein, 182 aa, Artificial Sequence; identical to SEQ ID NO: 8586
  Synthetic

SEQ ID NO: 8588 - protein, 184 aa, Artificial Sequence
  Synthetic
SLEEELKRVMKEVRDLAKEHSDRSRDVMREIRELSEENERRLRRVLEEAKRLADDLRRDRRKELLEDLERKLRKLVEDARRHHKKLEDDVKRITDELEKHLRELEKRLRDLTRRLEELLRREKVEERLKDILRRIREDIERLLDELRKLNEKIKRDVDRLLKENKETLDDIERRIRKLLDDERR

SEQ ID NO: 8589 - protein, 184 aa, Artificial Sequence; identical to SEQ ID NO: 8588
  Synthetic

SEQ ID NO: 8590 - protein, 181 aa, Artificial Sequence
  Synthetic
SVEELITRVERENERVARRDEELLRENEKRNRDVTREDRDLLKKLKEEVEEVLKRIREEGKEREEIAKRLKEILDRLKKESDDVEERSKELLEELERSSREAKARMDEHLRDLRRRVKGGVSEETVKELVKHNEDLLRKWEKKSEDLSRKNEEALERWRRKSKKLAEELKKTLEDIRREVT

SEQ ID NO: 8591 - protein, 181 aa, Artificial Sequence; identical to SEQ ID NO: 8590
  Synthetic

SEQ ID NO: 8592 - protein, 179 aa, Artificial Sequence
  Synthetic
DVEDKIRRLKERIKEVTERDRKLLEELKREAEEVLRRDKKSLEEVEREIEEILKDAERKGKRDERIEKTLRDLVERYRREHKRAAEDVERLKEEYERKHRDAKRKIDELERKLEDKLRDKKRGGDELIREVEKVLEDWKRKVDELNRRLKKVLKEWEDTVRKLNEELKDVLDKLREELD

SEQ ID NO: 8593 - protein, 179 aa, Artificial Sequence; identical to SEQ ID NO: 8592
  Synthetic

SEQ ID NO: 8594 - protein, 174 aa, Artificial Sequence
  Synthetic
DMEDKLRKIKEAIKKVLDEIRKLLEDIRRRLKRVREEIEEIHKRNEEENDRVKKELNVTEDLLREIEEVDKKLKEDSEDHKKKVDEVRKRLEDKLETLRKRAEDLAKKIDDDLRKDGVTDELIKKIRELLEELKDELRKLLEEAEEVLERLKRSVEELSRRNKKLVEDLDRKTR

SEQ ID NO: 8595 - protein, 174 aa, Artificial Sequence; identical to SEQ ID NO: 8594
  Synthetic

SEQ ID NO: 8596 - protein, 174 aa, Artificial Sequence
  Synthetic
SVEEKARDILEKLKRVVEKIKEIADRNRRENEDADREIKRLIEENKKRNEDLLRRLNVTEDLLRELEEADKESEKTFKRLDEDVETKNRDSDKKVRDIEEKIRDVLRKIKDELDKKGVTDELIKRIKEIIETLEKEVEDLSRENKKKVEEILDKVRKVSTRNREKLDELDKKVR

SEQ ID NO: 8597 - protein, 174 aa, Artificial Sequence; identical to SEQ ID NO: 8596
  Synthetic

SEQ ID NO: 8598 - protein, 182 aa, Artificial Sequence
  Synthetic
SDEEILRELEKRLEENVRRVEKRHEELEREVRDNLRRAEEKHRELEERVKRVIEEVIRTKGDEGEEARELSKTLRRLSEKHRRDTEKLLRDLKELSDRHRDRTRKIREELRRKLEEARRANSSEEMVRKLVEDVDRLITDHTRSLEDVDRKVKDVIRRHTDSLRKVEEDVKRIIEELRKKAE

SEQ ID NO: 8599 - protein, 182 aa, Artificial Sequence; identical to SEQ ID NO: 8598
  Synthetic

SEQ ID NO: 8600 - protein, 182 aa, Artificial Sequence
  Synthetic
DDEEILKKLREDVERVIKKIEDSLRELRKRLKDNVDRAEELHRRLEERAKKLIDEIIKKRGDRGERLDELRRRLEELSDRHRKETTKLERELEELMKRLREELKKALEELEKLLEDIRRAKLDREFVRRLAERVKKLLKELEDRLRELEERVKEVITRHTRSLEEIVRRVERVLEEMERAAK

SEQ ID NO: 8601 - protein, 182 aa, Artificial Sequence; identical to SEQ ID NO: 8600
  Synthetic

SEQ ID NO: 8602 - protein, 178 aa, Artificial Sequence
  Synthetic
SETEEAKKEIDEIIKRIEEETKRLRETYKRIIEEIERVSKRLEDEYRKLIEELERAKREGRSEKELTDLEKRLKEEDDRTREDSRRLEEEVKEKNKKSKKESDDLARKVREDLDRLRKGGVKTEELDKLRRRLEEILKRHEESNKKLSEDLERILEEHRRENERLHRELREILERLRR

SEQ ID NO: 8603 - protein, 178 aa, Artificial Sequence; identical to SEQ ID NO: 8602
  Synthetic

SEQ ID NO: 8604 - protein, 178 aa, Artificial Sequence
  Synthetic
SIEDILRELEKELRESSKRSREILERLREELRDSSRRSEEILERLKRKVKRVKEEIEPRESVERVEEELRRLEKELKDLNEKLERDHRRLEEELERLNKELKDEHEKLVRRLEEEGNVDDKRVREVAERLRRLNERYNREVKRLEKEARRLNEEYNRLVERLAREVEKLIRDLKEEAR

SEQ ID NO: 8605 - protein, 178 aa, Artificial Sequence; identical to SEQ ID NO: 8604
  Synthetic

SEQ ID NO: 8606 - protein, 184 aa, Artificial Sequence
  Synthetic
SLEDLVREIRKRLDDMEREVKKVDDESRKRLDEARKRVEKINRESEKRLKEVADELSELKDDELKKRLEDLRRELRKLHERADRELEELTRRLEEKHKEAKRELDELKRRMEEILRDIERKNSSDEKLARDLRREVRKLEKRLEELLKELKETTEKILRELERLLKKLEDDTRRVLEEIKELKR

SEQ ID NO: 8607 - protein, 184 aa, Artificial Sequence; identical to SEQ ID NO: 8606
  Synthetic

SEQ ID NO: 8608 - protein, 173 aa, Artificial Sequence
  Synthetic
DEEREVKRKYREDLDDIRRHSEEVLKRYDEAVKKLDEDLKKVVEEYERALEEIVRRAGEDEELRREVEENRKRNEDKARTKREDHKRNSKRYKDEHDRLEKEHRENEKRKDDENSSEEEMSKDLERELRRSRRENERLAKELEDALRKSEEDIRRLVEENKERLERLERELSR

SEQ ID NO: 8609 - protein, 173 aa, Artificial Sequence; identical to SEQ ID NO: 8608
  Synthetic

SEQ ID NO: 8610 - protein, 186 aa, Artificial Sequence
  Synthetic
SEAEKVEEEVKELVKRNREKHDEIRRRIEKLKEDLKRTSERSERKIKRLVEKIDDTLRKKGPDTDKLKRIRKRLEDKERKMKEDHRRLEEELERADKERKERTDKSDKKLRDDTEKTKDDLRKRGPGEDELKRMADTIRDEIRKDNERLRRTLEKAKREADEYRERDKRKLEDFEREIRRIEEETR

SEQ ID NO: 8611 - protein, 186 aa, Artificial Sequence; identical to SEQ ID NO: 8610
  Synthetic

SEQ ID NO: 8612 - protein, 178 aa, Artificial Sequence
  Synthetic
DEREEIEKTIRELMRENDDLVRKIRREIEESLRENRRTLEKIKKEIEELTRKAKRDVRPDEELDRDAKKIREEMERRERRYEEEAKKIRDRDREKKERSEEEKRETEEREEDLKRKNADEETLRKRLEEVKRKSDEHKKELEERLREVRRRSERVNEELKKTLEEVRKKIRELIERDR

SEQ ID NO: 8613 - protein, 178 aa, Artificial Sequence; identical to SEQ ID NO: 8612
  Synthetic

SEQ ID NO: 8614 - protein, 174 aa, Artificial Sequence
  Synthetic
SEEEVARRVEERVEELDRRLREIVKDLRDHNRRMKEKLEEAVERVRRRDKELDDILRETSLDERVEKEHRDRHKKEDDETRKDDEDNKEKEDRVKKEEDDLRKETEEERKRLEEDRSTSEELRKKLEDLRRKIDEKVKKVTKEHRDSAKKIRDDVRRVKEENKKANRELAEKRR

SEQ ID NO: 8615 - protein, 174 aa, Artificial Sequence; identical to SEQ ID NO: 8614
  Synthetic

SEQ ID NO: 8616 - protein, 173 aa, Artificial Sequence
  Synthetic
SREEEVEEEYERLLEEIRRRVKEVEKEYRDLLKKIEDDVREVRKEYEKLVEDLSRKAGRVEDEERKLEKNRRDNDKKEEDKRRRHERNADDFRRRADEMEKRHKRNRDEERKRNVEDEDASRRLRDIARRSREELEEEVKRLRTEIEKSERELRETTKENRKIIEDVRRRLEK

SEQ ID NO: 8617 - protein, 173 aa, Artificial Sequence; identical to SEQ ID NO: 8616
  Synthetic

SEQ ID NO: 8618 - protein, 173 aa, Artificial Sequence
  Synthetic
SEKEEVEREYRELLKEIEKRIDEVIKEYRDLLRDIRREVKRVLREYAELVKELKKTTGPVREEKKKLEDNDRKNKEEAKRLEDEHKENDERNKRRKDTLKKEHDENEKRERDEDRERDEAARELRKKAEDSKRELEKLEEENRRIIKRSRERLKKIEEDNRRIIKEVLDRARK

SEQ ID NO: 8619 - protein, 173 aa, Artificial Sequence; identical to SEQ ID NO: 8618
  Synthetic

SEQ ID NO: 8620 - protein, 174 aa, Artificial Sequence
  Synthetic
SKEELVKKARDELRRVLEELKRAVDELRKRDEDYERKSEDVVRRLRKIDKDVREVLRRGELDERTLEEIERRLREIHRRVREDSKRTEDELKERHDALRDRMKKLKEKLREERERLDLDEEVEEEIRREAKRIDDELEKVEEENKRTLDRAKKHNEEVEKENRDTLREIDKERE

SEQ ID NO: 8621 - protein, 174 aa, Artificial Sequence; identical to SEQ ID NO: 8620
  Synthetic

SEQ ID NO: 8622 - protein, 180 aa, Artificial Sequence
  Synthetic
SIEEEAKEIIDKVRKEVEDIVRRLKETNDEVRERLERILRRLEEVDEEAKRRVEELRERKRTLEKKTVKDIEDKLERDSERVKRETREETKELEDRSRDLTRRTREELERIRRELEDRDRRLRIDDRLREELEKLARDVERRTRELEKHHRELMKRAKEETERLERHHDELAKRVREKLK

SEQ ID NO: 8623 - protein, 180 aa, Artificial Sequence; identical to SEQ ID NO: 8622
  Synthetic

SEQ ID NO: 8624 - protein, 182 aa, Artificial Sequence
  Synthetic
DEIETVLDEVRRLHEDAKRRLEEMIDEVRKLNEESVRELARVVEEVERLLRTVKEEVERAGLDKGKLEELEERLERVREDVERILREIKRRNEKTLEDSERILEENKERNRTVLKKLKELRDRGSDAREALKESRKVVEESRESVRRVLEKNRRVVEESKRLAEELLRRVKKVVDEIRKRVE

SEQ ID NO: 8625 - protein, 182 aa, Artificial Sequence; identical to SEQ ID NO: 8624
  Synthetic

SEQ ID NO: 8626 - protein, 182 aa, Artificial Sequence
  Synthetic
DELEEVVRRVRELSRTVKEELREVIERVRELSERVKKKLRKVLREVAELHREVMKRVRDSGLDKSKLEKLEDESRRVLDKSREILRKNEEDNRRLNKELEEILKKNEDDNEDVRRKVDEVTRKGKDAEEVLREVEKVVEDSRRSAKDALKRVEDRVRESDKSVRELLEENRKVVEDIKRRVD

SEQ ID NO: 8627 - protein, 182 aa, Artificial Sequence; identical to SEQ ID NO: 8626
  Synthetic

SEQ ID NO: 8628 - protein, 174 aa, Artificial Sequence
  Synthetic
EELERILDKVRKVIEEVRKRLRDDLRTVEKVLKETEEVLRRAAERAKRALERVEEAARRGRDRREIKEELKKVLDDLRELLRALEEKNRRVNKENEDSLRKIEEDLRDVLRKLEEEIKGREVLRKVRELLRTIREEVERVLRKSNELSTRIKKRIDDVLETLERLLKELDDKLR

SEQ ID NO: 8629 - protein, 174 aa, Artificial Sequence; identical to SEQ ID NO: 8628
  Synthetic

SEQ ID NO: 8630 - protein, 174 aa, Artificial Sequence
  Synthetic
KDVEDVEREVDEVVKRSDDTVEENLRRAEDVVRDTDRIVKEMKERIDRVVERVEEVVRRGRDKREIEDELRRVLEELKRLADEVEKKNRDVNRRSEKLLRDDEKELRDVERELRKKIRGEEVLRKVTRLLREAKRRTEESHKKVNDLSRRVKERVDEVLERVKRLLEEVKRKVK

SEQ ID NO: 8631 - protein, 174 aa, Artificial Sequence; identical to SEQ ID NO: 8630
  Synthetic

SEQ ID NO: 8632 - protein, 176 aa, Artificial Sequence
  Synthetic
DEAEKVLKESKDTVDKIRRDVERLVDESRKTVDRIRELVDKAVKDSKDSVDRLRDVMRRNTNDKKELEKISRDDRKRLDEVRKRLKDLLREDNERLKKVLKEMRELLKRDNERLKRANVDEEVLRRIEKVNRDVARRVEEVFREAKEVNKKVDREVEDVIRKVKRVNEKVDEELKK

SEQ ID NO: 8633 - protein, 176 aa, Artificial Sequence; identical to SEQ ID NO: 8632
  Synthetic

SEQ ID NO: 8634 - protein, 176 aa, Artificial Sequence
  Synthetic
SEAEEVVRRSRETVTRNVRMLEKVVRDSEETVKKIVRDVERLLEESKKSVDDLRRLKEENRVDDRELKRISEKDEEDLRRALKDLEEKLKRDNERLEKVLEDSKRTLDEDNKRLDEANADEKVLREVKEVNERVRETSRDIADRVREVNEDVKRKVKKVIDDIRRVNEKVKRELEK

SEQ ID NO: 8635 - protein, 176 aa, Artificial Sequence; identical to SEQ ID NO: 8634
  Synthetic

SEQ ID NO: 8636 - protein, 182 aa, Artificial Sequence
  Synthetic
DEAREVVKRVKDLVRRLRRLSEKSLEDDKRLIEEVNKRSKDILDKVKKLVDDLRDMVRRTRDKDTLRKLVKEVKDRADDLLRRLEEIDKRIRDRSEENLRRNKEISEDVKRRAKELLDDARRRKLEEEVIKEIERVVRKVLEESREVHERIRETVKEVNDRNRKVLREIREVVKKVFEDARR

SEQ ID NO: 8637 - protein, 182 aa, Artificial Sequence; identical to SEQ ID NO: 8636
  Synthetic

SEQ ID NO: 8638 - protein, 179 aa, Artificial Sequence
  Synthetic
SDAEEVVRENRELVERIVREVEKILRDNEELVKRLVELVETSLRRNEKMVDELKKLVDRNKDKERLLEDAKRRSEKNERELEEILERLKRESDKSLKRIKEVLDELRKESKRLDDELRARRVDSRVIKEIRDTSKDAVRKVEEVLRRIEETVRDAERKVKEVIKRIRETSKEVLDRVRK

SEQ ID NO: 8639 - protein, 179 aa, Artificial Sequence; identical to SEQ ID NO: 8638
  Synthetic

SEQ ID NO: 8640 - protein, 179 aa, Artificial Sequence
  Synthetic
DAAERALRRSEEVVRESVEEVKTWVDENRRSVERLREELRKDEERVRRVVERIRKLVEDGEDKRELRKDLTRVLEESKESVRRIKEDLKRDTDKTEKLLDENRRKNEKSRRELEEIVRKGLVSEEVLKRVRKTNDDSDKEVKRLIDEARKLNDDVRKEVEEVLERTTRILDRVRKEVEK

SEQ ID NO: 8641 - protein, 179 aa, Artificial Sequence; identical to SEQ ID NO: 8640
  Synthetic

SEQ ID NO: 8642 - protein, 178 aa, Artificial Sequence
  Synthetic
DEAREVERRVREMVKELKRRLEEDVKESDKSVKDLERIAKEDVDRSRESVKELRDRVRRRRDEDVRRELREKLKKDNDESRKSKKELDDISREDEKRSRDSLRDLERLLRELERELREAKVEEEAVRRVKRIIEEVRKVLEDVFRESERLNREVREKLKRMFETSKELNKRVEEALRE

SEQ ID NO: 8643 - protein, 178 aa, Artificial Sequence; identical to SEQ ID NO: 8642
  Synthetic

SEQ ID NO: 8644 - protein, 179 aa, Artificial Sequence
  Synthetic
DSRRELEDDVRRIVETNRRLLEELERRVKKILEENRRLVEELRKENERIVRELTDRVRRDGKDDDLRRKLKEILDEIRKRNEDVLRESRKSLKDLARLIEEVRERSRESLEEIKKRLREANVEEDVVRTVEKLIRDLEEESRRVLEEVRRLLDEVRKESEEVHKRVNEIVKRVEDEIRR

SEQ ID NO: 8645 - protein, 179 aa, Artificial Sequence; identical to SEQ ID NO: 8644
  Synthetic

SEQ ID NO: 8646 - protein, 178 aa, Artificial Sequence
  Synthetic
SSKDEIRRRVEEVVERSDEIVKRSREHVKTVVDELDRVVKELERKVREVVKKLDKIRKDGGSEETLKRVLDELREILKELKEEVKKVKRKLEKVVKENRDTIREVEERNRKILDELRKRGVEERALREVEEISRKSEEKLRRVLKESEDIAKEAEDRLKTVLERVERIADEVLKRLTK

SEQ ID NO: 8647 - protein, 178 aa, Artificial Sequence; identical to SEQ ID NO: 8646
  Synthetic

SEQ ID NO: 8648 - protein, 178 aa, Artificial Sequence
  Synthetic
SKVKEVEDRVREVVKESERVARESLEHVRRVVRKTEDVVRRLKEKVRKAVEDLKEIKRRGGSEETLEEVERRLKKILDELRKEVDDVEKDNERALRDNRRKIEKVERENRDELEKLKKSGIGEEVLKKVEEISERSRRELRRALKESDKISEESLRRLRKVLREVEEIVRRVLEELRR

SEQ ID NO: 8649 - protein, 178 aa, Artificial Sequence; identical to SEQ ID NO: 8648
  Synthetic

SEQ ID NO: 8650 - protein, 178 aa, Artificial Sequence
  Synthetic
SKVEKLEEEIARLVERSRRLVEELKKEVTKVKEKVDEIVERSRRHVKKVVEKLRDIKRRGGSEEVLRRVTEELKKVLEDNRRVIEEVLRDLERILEELKRKAEEVTKRNRDDLKRLRDSGVDEEVLRRVEETSDRSEKELRTVLRDVTEDIKRIAEELKKALEDSTEIIRRAEDELRT

SEQ ID NO: 8651 - protein, 178 aa, Artificial Sequence; identical to SEQ ID NO: 8650
  Synthetic

SEQ ID NO: 8652 - protein, 176 aa, Artificial Sequence
  Synthetic
DSDRKIDDEVRKVVETSERSLRENIKRIEKVVRKLEEEVRKDLEEVRRVVKELREIVKRNKEKKEDLERLIREVKKKSEKSLEDLRREIKKVEDESRKNLEENKRLLEKVKERLDRANVDEEALRKVEEDLRRLDRRVEEVVTRSKEILDEARKSVEEVVRRSDEILRRVEEDLRR

SEQ ID NO: 8653 - protein, 176 aa, Artificial Sequence; identical to SEQ ID NO: 8652
  Synthetic

SEQ ID NO: 8654 - protein, 177 aa, Artificial Sequence
  Synthetic
DEVEDILRKVEEIVKKSITDARRLLKEAREIVEESIKTAEELLRRNEDIVRKLSEDVKRTTDEEKKKKLEEESRRVLEKTKRDLDRTKDDNRKALEKIRKRVKETEEENREVVDRVRKAGVDKRVLEKIKKVVDDSVRVNREVLKRVEEVLEESKRVNEKVEEDVRRVHEEVRKEIK

SEQ ID NO: 8655 - protein, 177 aa, Artificial Sequence; identical to SEQ ID NO: 8654
  Synthetic

SEQ ID NO: 8656 - protein, 177 aa, Artificial Sequence
  Synthetic
DRVEKLLEDAKKIVEDSKRTAEKLLRENEKIVEKIKREADKILEDNKKIVDELAEAVKRTTDKDKKEELKRRSEKVNKESEDLVRRLRKESEEVLERTERVVRETEKRNDEMRKRIEEGGVDRRVLEEVKRVIDESRRVNKRVEEEIRKVHRDVERRLEEVLKRVRDTSEDVRRKIK

SEQ ID NO: 8657 - protein, 177 aa, Artificial Sequence; identical to SEQ ID NO: 8656
  Synthetic

SEQ ID NO: 8658 - protein, 177 aa, Artificial Sequence
  Synthetic
SEAEKLLRDVEREVERVIEDADKLLREIEEIVKRSEDKAREILKENEKIVRELKEAVRRTTDERKKEELKRRSEKVNRKSRKLVEDTKKENEDVLREIEKRLRDLDRRLKEVEDRIRKAGVDEEVLRRIKKVVDDVRERLREVEKRIRDVIDRSRRVNERVLREAERTSREVERAID

SEQ ID NO: 8659 - protein, 177 aa, Artificial Sequence; identical to SEQ ID NO: 8658
  Synthetic

SEQ ID NO: 8660 - protein, 175 aa, Artificial Sequence
  Synthetic
DEAEDVLRKVRERVKESERHVEKVLEDVRRVVKKSIDHARDVLRKVKEVIDRVRELVERNERDKKELEEDLKRLRERVEEMIRTNEKENRDLERDVERAIEENRRRNDKVEDDVRKSNIDERVEREIRRVLKRSKERLEEVVKEIRELSEKSRRVLEEVKKRIREVLERVRKDVE

SEQ ID NO: 8661 - protein, 175 aa, Artificial Sequence; identical to SEQ ID NO: 8660
  Synthetic

SEQ ID NO: 8662 - protein, 175 aa, Artificial Sequence
  Synthetic
REAEEVLKEVRKAVEDSIRHVEEVLEEVKKVVEESIRHIRDSLRDVRRVIEEVDRLVKRNERDKKELKERLERALRKDERVVEENEDTNRRLIEKVEKAIRENEKRNDDVKRKVDELNVDKRVKEEIDRVLDESKRVLEEVVTRIRKVSDDSEKEVRRVHKESKRVVEEVERTVD

SEQ ID NO: 8663 - protein, 175 aa, Artificial Sequence; identical to SEQ ID NO: 8662
  Synthetic

SEQ ID NO: 8664 - protein, 175 aa, Artificial Sequence
  Synthetic
DEAEDVLRRVREMVERSIEHVRRVLKEVEDVVRESIKHVEDVVREVREVIREVEELVDRNEVDKKELRKRLKELEDKVEKRTRENEERNKELNKKVKDADDENRKRNEKVRRDVRRSNIDKRVEEEIDKLLRESKRELDEVRKRIEDLSRESERRLREAVEEIRRLVKKVAEKVN

SEQ ID NO: 8665 - protein, 175 aa, Artificial Sequence; identical to SEQ ID NO: 8664
  Synthetic

SEQ ID NO: 8666 - protein, 175 aa, Artificial Sequence
  Synthetic
KEAEDVLDEVRKAVEESIKHVKRVLEEVEEIVRRSIKHARDSLRKVKEVIDKVRTLVRRNEVDKKELEEELKRLEDEDRKMVKDNRDDNREANRKVDKMVKENEDRNRRVEEKVRELNIDERVRREIKRLLDESREVLKEVTKRIRKVSRDSERVVEKVHRDSKDVLDKVREDVR

SEQ ID NO: 8667 - protein, 175 aa, Artificial Sequence; identical to SEQ ID NO: 8666
  Synthetic

SEQ ID NO: 8668 - protein, 178 aa, Artificial Sequence
  Synthetic
SSLEKAEDEVRELLRDVERVLKEVRDRIEELNRKVNEVLRRVIEESERLLREVLERVRGRREVTELLKEVKKRNDKVRKDIRKESEEDKKKVEETVAEIKKELDDLRRDVRRVAEENGPSEKVRRLVDKVRETVTDIVRRVTRLLEESEESVRRLIEKVKKLNEESRRIVEKIEKDAR

SEQ ID NO: 8669 - protein, 178 aa, Artificial Sequence; identical to SEQ ID NO: 8668
  Synthetic

SEQ ID NO: 8670 - protein, 178 aa, Artificial Sequence
  Synthetic
SELERVEEDVKRVNKEVNDTLEKVIRDSKRVLDEVEERTRKVKRDSERLLERVERAVEGLKELKELLDRLREENREVVKDSERLLREWERENREVKKRIEDESEEDKRRLEEVARRNGPEEVVERVLEESRRSVETLIRDVERVNKKSREAVERNIRRSTAANERSKKIVKEIIDTAK

SEQ ID NO: 8671 - protein, 178 aa, Artificial Sequence; identical to SEQ ID NO: 8670
  Synthetic

SEQ ID NO: 8672 - protein, 174 aa, Artificial Sequence
  Synthetic
DEAEDVVRRVREEVERLIRRSREVAEESKRTVDKLRRELEELLRRSRETVERIKKLIDEGVDRREIEKLNRDNEEEVRRMEEKARRINTENRDRVRKVHEESKRELERIKEEVRRVDIDDKVREDIERVLREVEEVDKEVKERVRKVDEDSKKEIKEVKDEIRRVDEESRERAE

SEQ ID NO: 8673 - protein, 174 aa, Artificial Sequence; identical to SEQ ID NO: 8672
  Synthetic

SEQ ID NO: 8674 - protein, 177 aa, Artificial Sequence
  Synthetic
DEAEKVLEKARDLVRRNIERSRRVLEENKKSVDDLIRRNEETNRRNEKSVDEVKKLVDNGGSEEAVRTVAERDEKSLEENREENERILKRDEDTLEKAKRESDKSLAELKKLLDDAKRKGVDDDVLREVKRVLDEARRVSEEVEKESRRVLEEAKRVAEEVHKRSKKVVDDVKERAR

SEQ ID NO: 8675 - protein, 177 aa, Artificial Sequence; identical to SEQ ID NO: 8674
  Synthetic

SEQ ID NO: 8676 - protein, 180 aa, Artificial Sequence
  Synthetic
SELEDVKRRIDKVVREVEEVVREVSERSKKVLEEVRRSAERVNREIERVLREAKDEVRRRTRDDKIRKKVEEVERRVRKLIEDNRRINEEVERRVERLNEELRRLVEKVRKELEELKKDIKDKDAKRVLEEARKIVDRLRKIVEEVVRRSEELIRRLKKINEDSLRRVEELVKDLIREVS

SEQ ID NO: 8677 - protein, 180 aa, Artificial Sequence; identical to SEQ ID NO: 8676
  Synthetic

SEQ ID NO: 8678 - protein, 181 aa, Artificial Sequence
  Synthetic
KEAEEVVERVRELIERLRRRVTEMLRESKRLVEENIKRSEDALKESERLVDKLRELVKRTRDKETLKKLLEEIEREIKKINKRTEDILRESARRVEEINKRTKDILEEIARRITRIREEARRRNVDDKVLRTIEKLLDDVKKEVEKVNEDSKRLLRDVERVSKEVNDESRRVLEEVKREAK

SEQ ID NO: 8679 - protein, 181 aa, Artificial Sequence; identical to SEQ ID NO: 8678
  Synthetic

SEQ ID NO: 8680 - protein, 181 aa, Artificial Sequence
  Synthetic
SELEKIVEKIKRIIDESRRTVEESVRKSEKIVEEVKKRLEELVEEVRKIVEEIVRIIRNGDRREEVEEKARRTAEELRRRLEELRKRLEDLVRKDLRENEENLKRTEDLVREVKDELEKLPRNEELEKVKRMVDKVVDDVRKVNDTSRKRSKETLEEARRKVEEVKRRIDKVLRDVKREID

SEQ ID NO: 8681 - protein, 181 aa, Artificial Sequence; identical to SEQ ID NO: 8680
  Synthetic

SEQ ID NO: 8682 - protein, 177 aa, Artificial Sequence
  Synthetic
DEVEEVVKRVKEVVEKIVRELEKLVEESKKIVEDAVREDERLVEKIERVVRRLVEEVRRSTDEKKLEDLEKELEDVRKDIERVLEDNKRKLEEAHEKSKDKARRLREELERALREVEETGVSEEVKKLVDEVVKEVEEVIKRVEDLDRRVLEENRESTRDVERRVREVVKRVREALK

SEQ ID NO: 8683 - protein, 177 aa, Artificial Sequence; identical to SEQ ID NO: 8682
  Synthetic

SEQ ID NO: 8684 - protein, 176 aa, Artificial Sequence
  Synthetic
SDAERVVREVERLVDTTRKLVKKVVEDIRRVVETAKRDLDRVVKRSEDVVREVKKLIEEGVREEEIKKILDEIRKETKDVERKIKKILDDIRKKVEKVTEEIKDVNRKTKEIVDRAKDRIDDRVIKLVRKLNKDSERKLREVRDRVERVIEEVEKRLREVKERSKETIEDVERARK

SEQ ID NO: 8685 - protein, 176 aa, Artificial Sequence; identical to SEQ ID NO: 8684
  Synthetic

SEQ ID NO: 8686 - protein, 177 aa, Artificial Sequence
  Synthetic
DEAEKVVEEAKRRVKEVVERLREVADRNRRSIEELVKELRAVVEDSRKSVEDLVRRVRNGGSKETVEEIDRRNEDKLRELEKRVRKIIEENKRSLEKLKRDIERIERRLEELLERVDRNNVSEEVKKLVEDVIEEVRKVVKEVEDISRRVIEDLKRVLEEVEKRSRKLIKEARDETR

SEQ ID NO: 8687 - protein, 177 aa, Artificial Sequence; identical to SEQ ID NO: 8686
  Synthetic

SEQ ID NO: 8688 - protein, 181 aa, Artificial Sequence
  Synthetic
DELREVVKRVRRLIEEVRRLVKELVDRVRKVIEELKRRSEDSARESERVVREIKKLVEERKDKEELLKEAEKKVEKIHRDNKKLLRELEEKIERIREELDRVLRDLERRLRELKEELKRGPKNEELEDVDRDIERVREEVKRVVDEVRKRIRDVLEDARRESKRVLDRSRESLREVREAVR

SEQ ID NO: 8689 - protein, 181 aa, Artificial Sequence; identical to SEQ ID NO: 8688
  Synthetic

SEQ ID NO: 8690 - protein, 181 aa, Artificial Sequence
  Synthetic
DELEELVKRVEDVIREIEERVRRLVRESERVVKEILKKSRKSVEKVKEVVDRAVDLVRKRKDDKRALEELRRVAEEIKEENERLLRDAEEKVKKLDRELEKLLEDLRREIRRLLEELRRGPDDERLKDVEREIRRVLRRAEKVVDEALKRSRDTLREVRKVSKEVREDIERVVKEADEAAR

SEQ ID NO: 8691 - protein, 181 aa, Artificial Sequence; identical to SEQ ID NO: 8690
  Synthetic

SEQ ID NO: 8692 - protein, 177 aa, Artificial Sequence
  Synthetic
SVVDRVREELEKVLRHSKKVVEDVKREIDKVLKRSEDALRRVEEESKRVLEEVERDGISEELEERLRRIHRESRERLKRLKEENERIAEELRKRLEDLTRENEKIIRDLDRELKKTRDKDTLKKLVEEARKVSEDSRRRLERIVEEMRRVSEDSRRRLEEIVRENRKVVEEVRRRAT

SEQ ID NO: 8693 - protein, 177 aa, Artificial Sequence; identical to SEQ ID NO: 8692
  Synthetic

SEQ ID NO: 8694 - protein, 177 aa, Artificial Sequence
  Synthetic
SVVERVREEIKRVLENSKRAVDKVREDIKRVLDESRKAIKEVEDEIRKVLEEVERGGIDEELRKELKRIVDELRAELKKLLDENEEAVKELEERLKKLTRDNEEIVERLERRLKKTTDSDTVRRIVEEIEKVSRESVKRLEDIVREMKKISEESKETVDRIVEKIREVVKRLLEAAK

SEQ ID NO: 8695 - protein, 177 aa, Artificial Sequence; identical to SEQ ID NO: 8694
  Synthetic

SEQ ID NO: 8696 - protein, 177 aa, Artificial Sequence
  Synthetic
SAVETVRKTIEDVLRNSERVLKKVREDSKKVLENSERVLKEVEDRSKEVLKEVEDGGIDERLREELEDIHRRSKKRLDELREENKRIHDRTEEELKRLLRENEKIVEDLARRLDKTTDKKELDEIAEEIKRVSEDSVRKARELAERNKKVSDESVKRVKKIVRENEKVVEELLKAKK

SEQ ID NO: 8697 - protein, 177 aa, Artificial Sequence; identical to SEQ ID NO: 8696
  Synthetic

SEQ ID NO: 8698 - protein, 177 aa, Artificial Sequence
  Synthetic
SEVDEIVRRIKEISKRSVDDLEKLARDNKKAVEEVLEELRKLLEENEKMVREVLEEVRRSTDEDRLAKLRKRVEDVNRRTRRVLDEIRKKVEEVHDRTRRRLEELKRRNDEVLRKIASKPIDERLDRMLKEVIKHSEKVVRDVEETSKTVLKEIEDALKKVEEASKRVVDRLEEATR

SEQ ID NO: 8699 - protein, 177 aa, Artificial Sequence; identical to SEQ ID NO: 8698
  Synthetic

SEQ ID NO: 8700 - protein, 177 aa, Artificial Sequence
  Synthetic
RRVDEIAKKIKRISEESVKTLDKIMEDARKIVKDVLDELRKLAEDNKRVVREVLERVRRSTDEDTLKKLDDKLRDVHRRTKEVLDKLTDEVRDVKRRIDELLEKLKEENERVLREIESEDIDERLRRTVERVIRHSREAVKRVKDEVEKVVKELEDVVRKVKEDSERVVKEVEEAKR

SEQ ID NO: 8701 - protein, 177 aa, Artificial Sequence; identical to SEQ ID NO: 8700
  Synthetic

SEQ ID NO: 8702 - protein, 181 aa, Artificial Sequence
  Synthetic
SEAEDVVRRSKRSVERLKKELDDVVRESKESVERLVRRNDEVVKRSRESVDELTEAVKRGLRREDIERILRENRRLLEEAHKENKKILEENKKLLDDLRRRVREILERNKRLLEELKRRLKDKDLVERVERTVRTTLKELEDALREVKRMVEDTLKKAEDVNRRVAEEVKKSEKRLRDVAK

SEQ ID NO: 8703 - protein, 181 aa, Artificial Sequence; identical to SEQ ID NO: 8702
  Synthetic

SEQ ID NO: 8704 - protein, 181 aa, Artificial Sequence
  Synthetic
DEVDDVVRKSEKSVEELVRKLETVVKRSEESVRELLEKNREVVERNERSVRELLERLEKGLSEKEVEDILREDEESLKKLHEDNKRILKENRDLLRRLEEEVRRINRENERLLDDLRKKLTDKDLLKRVEDTARRVNREIEEALDRVRKAVEKTLKKLKDVNDEVRKESEKVLKELRDATK

SEQ ID NO: 8705 - protein, 181 aa, Artificial Sequence; identical to SEQ ID NO: 8704
  Synthetic

SEQ ID NO: 8706 - protein, 177 aa, Artificial Sequence
  Synthetic
SDEDRVREMVRTVIEKLDRVLEEVERDSAKTDRDNKKSAEDVRRESKRTDDELKDVVRKAGRELEKIRDVVDKNRRLVEKLDKENRKTLEENRRLLEELKKLADEVKEELERLRKEIKDKDVDEVVERAKKLVKRLEDRLREVVKESRRLVRRVVERNREVAERSKDLVRRLVEDTR

SEQ ID NO: 8707 - protein, 177 aa, Artificial Sequence; identical to SEQ ID NO: 8706
  Synthetic

SEQ ID NO: 8708 - protein, 177 aa, Artificial Sequence
  Synthetic
SKEEEVERRVEEVIKELEEVLRRVEEEIKRVIDDNRRSARDVEEKSKRTDEELKDVVRKAGRRLEEIERIEEENKKLVDELRKSNEKTEEELKKLLEELREMVREVKERLKDLLDKIKDRDVDEVARRVKEMVERLRKLAEEVVREAERVVREVVDENRKVVEESKRLVKELLERVK

SEQ ID NO: 8709 - protein, 177 aa, Artificial Sequence; identical to SEQ ID NO: 8708
  Synthetic

SEQ ID NO: 8710 - protein, 177 aa, Artificial Sequence
  Synthetic
SDEERVDEEIKTVIEELKRSLKEVEDTIRKVIKENKDSAKRVKETSEKTDREIEDVVRKAGRELEDIKKVKRDNKELVKRLDERNRETEKELRELLDRLRKENKESEDRLRKLRDEIKDKDVDTVAKEVRDLVRENVERNKEVVKRAKKVVDDVVRENRKVAEDSKKLVKEVKDRVR

SEQ ID NO: 8711 - protein, 177 aa, Artificial Sequence; identical to SEQ ID NO: 8710
  Synthetic

SEQ ID NO: 8712 - protein, 177 aa, Artificial Sequence
  Synthetic
DDEERVKELIKEVIRELEESLRRVKEDSKRTDEKNKKSMEDVERKIERVRRRLDEVVKEAGRDLEDIKRIDKELEELLRKLREENERTRETNEELVRKLDEENRKSKKELEKLLREVKDKDVDEVAKRATDIVKRNAELNKEVVDESRRLVEEVVDRNEKVAKRAEEIVDELERRTR

SEQ ID NO: 8713 - protein, 177 aa, Artificial Sequence; identical to SEQ ID NO: 8712
  Synthetic

SEQ ID NO: 8714 - protein, 185 aa, Artificial Sequence
  Synthetic
DEFKEVVDRVKRLVTENVRENRRVVEESERLVKEALKRLEDLVRRAKEIVDRLDDLVRKIRDEDTLREVVDRIEKILRELEEEAKRVARRIKEESKRLNDEVKEINDRSRRKLTELLKRLDESRVPKDLLKRVRDSIETVKKELDDSMKKVSDDDERSKKELEDVLEEVRKRIEKVMKELRDTSR

SEQ ID NO: 8715 - protein, 185 aa, Artificial Sequence; identical to SEQ ID NO: 8714
  Synthetic

SEQ ID NO: 8716 - protein, 185 aa, Artificial Sequence
  Synthetic
DEVREIVREVKRLVEENVRRNDDVARKSRKLVKENKDRNKEVVDRLRELVKRALDEVRRIKEEEELRRVVKEIRDELRRLRKKLKDINDDSERKSRELNKLVKDINKKSEEELEKLRDRVRRLRVPEKLLKEVEDMIRTVKKELKDSARRVSEEDKRSKEDLKRSAKEVEETIKDVLRKLDTETT

SEQ ID NO: 8717 - protein, 185 aa, Artificial Sequence; identical to SEQ ID NO: 8716
  Synthetic

SEQ ID NO: 8718 - protein, 185 aa, Artificial Sequence
  Synthetic
DEAEEVVRRVERLVKENVKLNKEIVKRSRDLVKELEERLREIVKRVEEIVKRAKDLVEEIKDKDTLKEVVDRIRRELERLLEEVERIARKIIEESKELNKRMREINKKSKEDLKRLLDELDKSRVPKDLLKRVREVIERVDRELDKSMKEVHDENEKSVRRLREVLERVKKRIKDVTKELEDRTR

SEQ ID NO: 8719 - protein, 185 aa, Artificial Sequence; identical to SEQ ID NO: 8718
  Synthetic

SEQ ID NO: 8720 - protein, 185 aa, Artificial Sequence
  Synthetic
SLVEEVVRRVEDLVRKNVRLNEEIVRRSEDLVRRNVELNEELVRRAEDLVRRIEELVKKIKDRRELERVLREIRRTLRELKRELEEINKRSKDESRRLNDEVRRINEKSEEELKRLLDELRKRPVDEELLRKVEKMIERVVRELKKSAKRVHDENRRSDEDAERSMERVERVIERVERDIDRRLR

SEQ ID NO: 8721 - protein, 185 aa, Artificial Sequence; identical to SEQ ID NO: 8720
  Synthetic

SEQ ID NO: 8722 - protein, 185 aa, Artificial Sequence
  Synthetic
DEAREVVTEVKRLVRENEERNKEVVKRSKKLVEDLKDLARKLVDRAKKLVDTLRDLVRKIRDKDTLKEVVERIRRELDKLRKELEEILKRVHEEDKRLRDEVDEINKRSEDELRKLEDELRKSRVEERLLEDVERKIETVIRELRKSMEEVKESSRRSNEELKKVADDVERTIRKVERELEKEST

SEQ ID NO: 8723 - protein, 185 aa, Artificial Sequence; identical to SEQ ID NO: 8722
  Synthetic

SEQ ID NO: 8724 - protein, 175 aa, Artificial Sequence
  Synthetic
SDAERVVDDLERRVRENLEDLRRAVREVREVVKKNLETITRVLEEVERVVDRLSKLVKEGTDRKDLEKELRDLEEKIKRISEESRRHLDELRRKVEEINKRSRDHLRDLARRLKEEIGRVREVDKVLKDVARKVEEANEKSRRVLEEVEELVERVNRELHETLKRVAERVKRDAT

SEQ ID NO: 8725 - protein, 175 aa, Artificial Sequence; identical to SEQ ID NO: 8724
  Synthetic

SEQ ID NO: 8726 - protein, 177 aa, Artificial Sequence
  Synthetic
SDEERVTKVLEEVKERIERANRTLEKRVREVTDRVREVNERSDKVNRDSERKIREIIKRLTDKDLVRKLEKLLEEDRRRSEEALEESDRLVKEAKRRIDKALKESEDSLRDMEREVRERPKLEKLVRDLRKIVEENERKNRDLLRKIEKIVEEIERRNRDVVRRSKESVERLREEVR

SEQ ID NO: 8727 - protein, 177 aa, Artificial Sequence; identical to SEQ ID NO: 8726
  Synthetic

SEQ ID NO: 8728 - protein, 181 aa, Artificial Sequence
  Synthetic
DADRELRRVAKEVTDRSRRVLEDSERVVRESHEKSKRVLEDLRRVVKEVAERIDEVLKRVRGEDLERLERIKERIKEEVDRVDERSKRTVEENKRRVDEVRKESKKIVDDMRELLERAKDLTEEVARDVVRKLKRIVTENLKKNTKVVRDSEDLVRRDLEEVDRVVKKVKKDVDEIERDVK

SEQ ID NO: 8729 - protein, 181 aa, Artificial Sequence; identical to SEQ ID NO: 8728
  Synthetic

SEQ ID NO: 8730 - protein, 181 aa, Artificial Sequence
  Synthetic
DEVREVVKELKRIVDELLDELRKVVEELEKIVTDDLRRIEEAVKRSKDSVEDLERRLKSGGSEEMVKKIKDENKELLKKVREESKRSNDRSKEVLDRVKKRVEDIIERLRRELKRVTKDIEDKDLLRELEEVARRVEEKIKKAVRELEKVMREVNRKSTEVLKRLEKVVRDSEKRIDDATR

SEQ ID NO: 8731 - protein, 181 aa, Artificial Sequence; identical to SEQ ID NO: 8730
  Synthetic

SEQ ID NO: 8732 - protein, 181 aa, Artificial Sequence
  Synthetic
SDVDEVVKEVKAIADDSTRLNKESAEKSRELVDRDTKKNKRSVEELRRLVTEILKVVESGGPGKVVEEAKKRLDRLLERDEETNRDSERKDRELLRTDEELNRETDKRLKDLLDRVRRRISNDELLRKLEEVVEKVRRDDERSHRESERVSRESTKRSRDSHRESREVVTEVKKEVDRAAK

SEQ ID NO: 8733 - protein, 181 aa, Artificial Sequence; identical to SEQ ID NO: 8732
  Synthetic

SEQ ID NO: 8734 - protein, 185 aa, Artificial Sequence
  Synthetic
DEAEEVVDRARKLVKESEDLNRRSVEESEKLVTTSTELNKRTVDRLREIVEEVKDLVRKTRDEDTLRELVRRIEERLEKLLRDDREINKETNKESRRLNEEDKRINDESRKKLDELKKEIDKRGLPEDVLRKVKKTLEEVKRRDDEAMRRSHKKDDDSRKRDEESMRRSDEVVREVIEEVREAER

SEQ ID NO: 8735 - protein, 185 aa, Artificial Sequence; identical to SEQ ID NO: 8734
  Synthetic

SEQ ID NO: 8736 - protein, 187 aa, Artificial Sequence
  Synthetic
DEIEDVVRKVEEMVKESKDRVDRNVEESRRIVTESREKVKDSVRRVEEVVKEIKKLAEQGRSEEELKRILDEAEKTLRENRRRNKKVHEETRRRLEESDRHLKKVHEDTKRLLDALKEELKRLKEKIDDKVVKKVDDALKRVEKKDRDAIREVERVNREVEKDDERVLRDSERVLEEVRKRVEEVTT

SEQ ID NO: 8737 - protein, 187 aa, Artificial Sequence; identical to SEQ ID NO: 8736
  Synthetic

SEQ ID NO: 8738 - protein, 187 aa, Artificial Sequence
  Synthetic
SEIDEVVERVRKAVEDSRKVVEDLIKTVEDAVREHERLVRRVVEEVDKLVEDIRKLLERGESEEMLKRILEDAERRLKELKEELKRSNEDIERILRELKKELKKVHDRTRKILEELKRRLDELRKDIDERMLRKVDEVIKRVAREDERVVKKLEDVLRDVKRRVDEASKEVDRRLKEVKKRVEKEAE

SEQ ID NO: 8739 - protein, 187 aa, Artificial Sequence; identical to SEQ ID NO: 8738
  Synthetic

SEQ ID NO: 8740 - protein, 187 aa, Artificial Sequence
  Synthetic
KEAEEAAKRAEEAAKRHEDLAREAAKEAKRAADESRKAAEEAAKRAEKAARDIADLARKGLDEEALDRAAKRAKELLDELRKELEKVHRDTERLLDELRRRLERSDEEIEEILRRLKDELDKARERIDEKAARKAEDALRRAREIAKKASEDAKRALDEARKADEDAARKAEKALKEAEDAAREARR

SEQ ID NO: 8741 - protein, 187 aa, Artificial Sequence; identical to SEQ ID NO: 8740
  Synthetic

SEQ ID NO: 8742 - protein, 184 aa, Artificial Sequence
  Synthetic
DEEEELKEVVREVAERVEEVNRKSERELDKARKDSERALEKLERVLREVAERVKRVLDEASKRVPEELIKRIKEELEKMKREIEKILTDNRRKTEEMEKKIRKINEDSRDHLRKVEREVERVKDEGKDVKDVIRELEEVVRRNTDLVRKVEEEIRKVVEESKRSIEEVIKRLRKLVDDIRKAIK

SEQ ID NO: 8743 - protein, 184 aa, Artificial Sequence; identical to SEQ ID NO: 8742
  Synthetic

SEQ ID NO: 8744 - protein, 184 aa, Artificial Sequence
  Synthetic
DEREKLAEVVKRVAEDVKRMNKESREALKRVKEEVKRVNEKSEKVTREVKKEVERVIEEAKRTIPEELLKRIRDKLKKVEEDSRRTNEESKRHLKEAEDRIREINKRSEDHLREVIKKVEEVMTRGKDVEDVIRELEKVVEDNKRLVEKVVRDARKVVEDNKELVDRNVKRLEEVVREITKEIK

SEQ ID NO: 8745 - protein, 184 aa, Artificial Sequence; identical to SEQ ID NO: 8744
  Synthetic

SEQ ID NO: 8746 - protein, 186 aa, Artificial Sequence
  Synthetic
RDVDELVRELRDVVRKVLETARDSVRELKRIVTESLRRAEDLVKEITDVVREVLDAVRRARDKDTLKKLKDDAERVLERLERRIRELHERSRRVSEESEKLVRKLEEDAERVIRKVEDALRKRLKDNREVVKKLRDVIREVKEDVERVLKEVRDVNREVNKIDKEAVERIRRVLDEVRKRVDEAAR

SEQ ID NO: 8747 - protein, 186 aa, Artificial Sequence; identical to SEQ ID NO: 8746
  Synthetic

SEQ ID NO: 8748 - protein, 174 aa, Artificial Sequence
  Synthetic
KEIDDVVRELKEIAKRDEDKVRRVVEDLERVAREDLRKVREVVKELRRVVKTLLDLVRRGVDKRELKKILEELEKRVREVHDESRRTLEELDKKIKKVKEESERTLREAEKRARDIEKDKRLDDVLREVADIIRRSIRDLERVLEEVKRIIETSNDELRKVLKEVRETITEAER

SEQ ID NO: 8749 - protein, 174 aa, Artificial Sequence; identical to SEQ ID NO: 8748
  Synthetic

SEQ ID NO: 8750 - protein, 174 aa, Artificial Sequence
  Synthetic
SEIDEMVRKLKEMARRDLETVRRVVERLRKLAEDDLRRVRKVVKKLKELAKDIVRLVEEGSREEELEEILKRIEEEVRKVEEESKKSLREIREEVEKVKRESERTLEDIERKAEEIEESERLRKVLKEVKDIIRKSNKELDEVLRDVERIIRESIEELRRVLEEVKKIIKEARD

SEQ ID NO: 8751 - protein, 174 aa, Artificial Sequence; identical to SEQ ID NO: 8750
  Synthetic

SEQ ID NO: 8752 - protein, 181 aa, Artificial Sequence
  Synthetic
DEVDEAVRRLEEIVTRIEKDVDDVARRSEESAKEVEKAVRKVVEEHKKVAEDIRKLVEDGGDERELRKILEDLRKTSREVERALEEILRENDRLLTEVRRKLERILERLDELAEDVKRRVRGREVKERLKKVLDKVRKRIKRVVERLEEAARKSRKIIRDAKEELERVSREVEKVIRDVRR

SEQ ID NO: 8753 - protein, 181 aa, Artificial Sequence; identical to SEQ ID NO: 8752
  Synthetic

SEQ ID NO: 8754 - protein, 186 aa, Artificial Sequence
  Synthetic
EEVKELVERLRDLVRESEKRVDEVVKRLEDLVRRNEELNRELVTRLRDLVRKLEEKVKDTKDEETLRRLAEEVRKRLDELRREMEKINRDSERELDRLDREVERISETTERRLRELEKKAKDDIKDDKEMVREIKRVVDEVRKRDKEALDRLKKVIEEVRRKVKRSEDEARRVVEEVKRIVDRVET

SEQ ID NO: 8755 - protein, 186 aa, Artificial Sequence; identical to SEQ ID NO: 8754
  Synthetic

SEQ ID NO: 8756 - protein, 186 aa, Artificial Sequence
  Synthetic
REVDDLVRRLEELVRRNEKKNEDVVRESKELADRSRKLVKELVKRLRELVKTVVRLVEETKDEDTLRRLIEEVEKRLRDLKREIEEISKETKKRDEELLRKAEKINKDSKDRIEDLLREAKRRIKDDKELVRKLKKVVDEVRERIDRSTEEVRRVSKESKDIDKRAKEEIEEVLRDVEKKLRETAT

SEQ ID NO: 8757 - protein, 186 aa, Artificial Sequence; identical to SEQ ID NO: 8756
  Synthetic

SEQ ID NO: 8758 - protein, 186 aa, Artificial Sequence
  Synthetic
DEFRDVVRKLEKLVEDITREAEEVVKISKALAEENKRLNDELVDRLRRLVEEVRKKVEDTKDEETLDEELRRVKETLKRLLEEVERINKESREKDRKLKEEVRKRIEEVEERLRTLLEEVKKRLKDDKEVVKRVKDVVDRVRDEVRRVAEKVDRVSKESKRIIDESTKRAREVLERVRKRVEDERK

SEQ ID NO: 8759 - protein, 186 aa, Artificial Sequence; identical to SEQ ID NO: 8758
  Synthetic

SEQ ID NO: 8760 - protein, 186 aa, Artificial Sequence
  Synthetic
SEVDDIARKLRDLVRRNKELNDEVVRRSEKLVKENKELNEELVRRLKELVDRLEDEVRRTKDKDRLREIIREVRERLKRLLDTIKRINDESRKEDKRLLDEAERINRESRKKIDKLEKDAEKDIKDDKEMVKKLRKVVEEVRREIDDSMRKVKKVSEDSKRRIERSTEEIEEVAKRVADKVTDVER

SEQ ID NO: 8761 - protein, 186 aa, Artificial Sequence; identical to SEQ ID NO: 8760
  Synthetic

SEQ ID NO: 8762 - protein, 178 aa, Artificial Sequence
  Synthetic
RELEEVVRELRKLVTEDLDRVRKSVEESERVVREDERRVDESVKRTREIADEVRRLKEEGVDESRLRELLKRVEDMNRESLKRSEDSLKRLHERNRKSLKESRDSLEEAERRVEDVRRRGVDEEELKKVLKEVRKVVTDSERRDKEANRKVEEVIRRSKKKDEDAHREVRKVVEDVRT

SEQ ID NO: 8763 - protein, 178 aa, Artificial Sequence; identical to SEQ ID NO: 8762
  Synthetic

SEQ ID NO: 8764 - protein, 176 aa, Artificial Sequence
  Synthetic
SKDEKLEKVIREVKRVIERVSKESEDVLRKVRKVIEDVSRESRRVLEDSRRVLERVAREGKRDERIKEVEDRSRRTLERLEELNDTVRRLLEEVVRRLRELNKDVERRLRDLARKLKDLDVDEVVDRARRIVDDVDRLNREVVKRLKDLVEDLRRLNEEVVRRNKELADTVRKDVR

SEQ ID NO: 8765 - protein, 176 aa, Artificial Sequence; identical to SEQ ID NO: 8764
  Synthetic

SEQ ID NO: 8766 - protein, 176 aa, Artificial Sequence
  Synthetic
SEDEKLKEVVDEARKILEDADRELKRVVKEVEDVIRDVSKKSTEVRKEVKEILKEAADKGDEDERIREVEKTVEDLLRKLEEMNRRIEETLKKLAEEVHRRNREVEKEVEDLARRVKELDVDKVVDDLRKLAEDLLRENKEVVDKLRELVERVKKLNEDVVREARRLADEVLKRVT

SEQ ID NO: 8767 - protein, 176 aa, Artificial Sequence; identical to SEQ ID NO: 8766
  Synthetic

SEQ ID NO: 8768 - protein, 179 aa, Artificial Sequence
  Synthetic
SEVERLEERLKRIVEDIKRLVKKSVEDSRKIVEEIRKLVKDSVEKNKRSVEEVEDIVRKDKDVKERLEELVRRDEEVNKKTKEDIKELLDRVREINERTNEKIERLLRELKKEIDDVRRRGVDEERVKRVLREVEERVKEVKKENEKAHEEVRKDVERVLEDDDRALRESRERAERVKK

SEQ ID NO: 8769 - protein, 179 aa, Artificial Sequence; identical to SEQ ID NO: 8768
  Synthetic

SEQ ID NO: 8770 - protein, 179 aa, Artificial Sequence
  Synthetic
TEVDELLDSLRKIVTEIEKLVEESEKRLREIVKTIEKLVKDSVRTLKKIAREIEELAKDRKEVEDAIRKLLKEVEDIVRETNKTSEELARRIRKLVKEVNERTDKLRREVEREVEEVKKNGVNEERVEKVLREVRDRVKKVNKRNEDALREVDKKVKDVNKENEDVLEEARRVVEEVRR

SEQ ID NO: 8771 - protein, 179 aa, Artificial Sequence; identical to SEQ ID NO: 8770
  Synthetic

SEQ ID NO: 8772 - protein, 174 aa, Artificial Sequence
  Synthetic
REDEKIKKVVEEVRKKLEDVDKNSRDAIEDDKRVNKEVDRNSERAFKENEDEIRKVKEAGVDEKKLKESRDNSKRVLDRSKELLKRSEENTRRLAKESKELLKEVRDRLEDLRRRVKNADEVVKELERIVAEVEKLSREVVKRLKENVKRVRDLSKRVVEYLKEDADRLKEDVR

SEQ ID NO: 8773 - protein, 174 aa, Artificial Sequence; identical to SEQ ID NO: 8772
  Synthetic

SEQ ID NO: 8774 - protein, 174 aa, Artificial Sequence
  Synthetic
DEERKIRKAVEDVRRVIKEVEENSKRVFDENKKVIDDVRKEVEKVLKENRDVIKEVRDKGVDEKLLDESRRNSERVVTKITKLLKDSEDNSRRLLEESKRLAEDVRRRLEELRKDVSNADEVLKELKKLVEELEKLSREVVKYLREDAKRLKDLVRKVVEYLKEDARRLDEEVR

SEQ ID NO: 8775 - protein, 174 aa, Artificial Sequence; identical to SEQ ID NO: 8774
  Synthetic

SEQ ID NO: 8776 - protein, 186 aa, Artificial Sequence
  Synthetic
SVVEKLLEDARRVVEKVREAVERNLKKVRDLVKKLREDVKRSKDHLEEVVRKLEEAKKTTDEKVLRDLKREVEEVLKRNEDLTRKLKEEAERINKESKDHLERLREEIERIIEDLRRKLEEAKDRVSEEVERRVEEVIRDLERVLREVRERVRRINEESRRMLEDVERESRKALRDLEEVLDRVRR

SEQ ID NO: 8777 - protein, 186 aa, Artificial Sequence; identical to SEQ ID NO: 8776
  Synthetic

SEQ ID NO: 8778 - protein, 186 aa, Artificial Sequence
  Synthetic
SVVEELRKRVEDVVDEVREVVERNRDLMRRVAEESKKIVDDSLRHIKEVVDEVRRAKNTTDEKVLDDLRKKVEEMLRRNEETTKRVSEKSEKINKESEDHLRELRKKIKKIIEDLEDRLRKAKDTVDERVKKRVRDVLRKLREVLERVAEEVKKVNKRSREVNKRVEEKSEEVLRDLERVLREVET

SEQ ID NO: 8779 - protein, 186 aa, Artificial Sequence; identical to SEQ ID NO: 8778
  Synthetic

SEQ ID NO: 8780 - protein, 178 aa, Artificial Sequence
  Synthetic
SEVEEVVERLRRKAEEDLRRVEEAVKEHRRVVKEDLDRVRDAVERHREVVETIRKLKEDGGDEKELKKIEEDLERSSRKVKEESDRTLERLEETSRKVDKESKETLDRLREEVKDVARRGGDDEKLKRVLKEVEEVVRESKERLREVHEEVRKVIEDSKRILKTVHDDVRRVIEEVKK

SEQ ID NO: 8781 - protein, 178 aa, Artificial Sequence; identical to SEQ ID NO: 8780
  Synthetic

SEQ ID NO: 8782 - protein, 178 aa, Artificial Sequence
  Synthetic
DDVERVLKELDELLKRDETEVREVEKRHREVLETIERRVREVIERHKEMLRRLAELVRSGGSEETLKEILDRLRRTSEELKKELEKILRDLERTSREVEERSERTLREIEKRIEDLRRKGGDVEELKKVRDKVRRVIEESKRRLEELHEEIRRLITELKRRLEEVTEEIKRAIDELRR

SEQ ID NO: 8783 - protein, 178 aa, Artificial Sequence; identical to SEQ ID NO: 8782
  Synthetic

SEQ ID NO: 8784 - protein, 178 aa, Artificial Sequence
  Synthetic
DEVEDVVRRLRKIVEDIRRDVERVVEEHDRVVRKLKRRVEEAVEEHRKVLEEIKKVKENGGSERELEEIAKKMEESSRRVEEEIERIARELDRTSEEVKKRLEKLLRDVREEVKKVAKDGGDREDLKRVLKEVEDVVREVDKILTDATERVKRVITEVKDILRRVHEEVREVIKRVKE

SEQ ID NO: 8785 - protein, 178 aa, Artificial Sequence; identical to SEQ ID NO: 8784
  Synthetic

SEQ ID NO: 8786 - protein, 178 aa, Artificial Sequence
  Synthetic
DEVEEVVRELREILKRDLDEVRKAVEDHERLLREITKDVKRVADRHRDLLRKIRELKENGGDEKLLKKIEDELRRTSEEVKRRLDEILKRIRDTSEEVKERSKETLKRLEDRVREVAREGGDDEKLKRVLKELEDVIRESEEILERVTRKAERVIERVRKILEEATKEVERVIREVRR

SEQ ID NO: 8787 - protein, 178 aa, Artificial Sequence; identical to SEQ ID NO: 8786
  Synthetic

SEQ ID NO: 8788 - protein, 172 aa, Artificial Sequence
  Synthetic
EEDERIEKVTEEVKKVIEDVTRLTETVMRESEKVIEDVTRDSDRVRKEVKKVLEKVRKSEELDDVARKLEKLFRDLARTNKKVKDDSKRTIERLREKNEKVKRDVDRLRKKVKSEDVDEVVKRLKELVTRLAEENKRAVDTNRKLAEDLKELNRKAVEELKELLRRVDERDR

SEQ ID NO: 8789 - protein, 172 aa, Artificial Sequence; identical to SEQ ID NO: 8788
  Synthetic

SEQ ID NO: 8790 - protein, 172 aa, Artificial Sequence
  Synthetic
SEDEEIDRVDKDVKRVSDTSNKILDDVEKEVDKVIREVTAESKKVLDEAKKVLDKVREDERLKEVATRVKELFDRLREENKRVRRRLREIVKRVRELNRRSEEEIRRIKEEAKDRDVEEVVRRLEKLVDDDRKLVEKVVKELRELLKELRDKNKEVVDELRRLAKTVDEEDR

SEQ ID NO: 8791 - protein, 172 aa, Artificial Sequence; identical to SEQ ID NO: 8790
  Synthetic

SEQ ID NO: 8792 - protein, 177 aa, Artificial Sequence
  Synthetic
SAEEIAERVLRELRKVTKEVAEEDERVLREDEKVTDEVRKEDKRVLDEARKVIDDVRKKGIPEEVLRRAEEVLERLRRKSEEILKESKKSTETSRRESEKVLRDSEDSIRELEERAKKTKVDEEVVKRVRENVKRTRELSKRSVEKNEENVRRTREMSKRTVKEIRDVVKELRDRVK

SEQ ID NO: 8793 - protein, 177 aa, Artificial Sequence; identical to SEQ ID NO: 8792
  Synthetic

SEQ ID NO: 8794 - protein, 177 aa, Artificial Sequence
  Synthetic
SKREKAEEVLKEAKKVIDDVREKDRRALEEDKRVTDEVARIAEKVLKDLRDVIEEVRERGIDKRVLDTIKELLERLEKELRDVLKRSKESTEESKRKSEEILRRAEEVLKRLEEELERTRADEEVVRRVRKVVTELEELSRRSVEENRRNAEETERLIREIVERARRVVETLKETVR

SEQ ID NO: 8795 - protein, 177 aa, Artificial Sequence; identical to SEQ ID NO: 8794
  Synthetic

SEQ ID NO: 8796 - protein, 181 aa, Artificial Sequence
  Synthetic
SVEDILRKVAKEAEDVAREVTRILEEANRRVEEVVKRVKEENERANEKVERVVREVKARGLNREELEKILRKIHEENKKMKKRHEDILKRIHEENKRVLEELKRILEEVKELLKEVAKRVRDEEVVRRVVETVKDIVKRLRDIVREVLKKNERIVEELKKTSDESKKRNDDIVRELDERAR

SEQ ID NO: 8797 - protein, 181 aa, Artificial Sequence; identical to SEQ ID NO: 8796
  Synthetic

SEQ ID NO: 8798 - protein, 181 aa, Artificial Sequence
  Synthetic
SVEEILEEVLRRAEKIVKEVKDLDRRALEENKKAIKEVADELRKVDEEVKKVVDEVRREGFNDETLDDILRRIHESNKRVKEKSDESLKRSAEKSEDSRRRLEKITKEVRDTLREVRKRVRDEDVVRKVVRDVEDIVRRMREEVRRSVEDLKRNADENRDEVRKVVKENKDIVREMRERVR

SEQ ID NO: 8799 - protein, 181 aa, Artificial Sequence; identical to SEQ ID NO: 8798
  Synthetic

SEQ ID NO: 8800 - protein, 174 aa, Artificial Sequence
  Synthetic
REKEKLEKAVRDARRVIERVERKDREALKEVERVVRESHKTLEDVLREIRKVATEVRREGLDREKLKKLLDDVEDVIRKAHELSERILREVEDVSRRSKEALKRIEEEIEDLVRKLDDVDKLMKTIEDLLRRVEELVDRSVKELKRLLDENRKLVKRVLEEIRRILKELRDEVK

SEQ ID NO: 8801 - protein, 174 aa, Artificial Sequence; identical to SEQ ID NO: 8800
  Synthetic

SEQ ID NO: 8802 - protein, 174 aa, Artificial Sequence
  Synthetic
DEEEKLRKVKKEADDVIRRSHEEDERVLREVEKVVRESHEELKRVADEIRRVVEEVKTRGMDREELERLREEVRRLLEEVHEKSKEIEEEIKRRSEESHRRSKELKERVADLERKLSDVDKVMETIRRLVTKNRELVKRSVDELRDLVDKNRKLVERVVERIEEIAKKARDDVK

SEQ ID NO: 8803 - protein, 174 aa, Artificial Sequence; identical to SEQ ID NO: 8802
  Synthetic

SEQ ID NO: 8804 - protein, 182 aa, Artificial Sequence
  Synthetic
KVVEEIEKEVRRSVEELERLVTEDLRKVKEVVKRAEEVAEEDERKVDEVVKELKRAAKEGRDKRELEEEVRRVHEDSKRTLEELRRDIKRVNEDSRRSLEEIDKLSRDVKKRLDEMVRDLVRTEEMERRVREVLKRNEDVTDEVKKKIEESNRDLEDALRKVEKKIRESNERLRRVLEEVRK

SEQ ID NO: 8805 - protein, 182 aa, Artificial Sequence; identical to SEQ ID NO: 8804
  Synthetic

SEQ ID NO: 8806 - protein, 175 aa, Artificial Sequence
  Synthetic
KEVEDVLDDVRRVVEKLEREVKKVEDTNERVVETLDEIVKEIRDRNRKVVETLKEIMKSNKESKDELKRILDEVHEDNRRILEELKDLLRKVHTENRDIKRRLDKELDEVRRRIEKVGTSDKLRKAEKDLRDVAKEVRDKIRRADERLKRVIERVADEIRKVNTDLKRVADEVRK

SEQ ID NO: 8807 - protein, 175 aa, Artificial Sequence; identical to SEQ ID NO: 8806
  Synthetic

SEQ ID NO: 8808 - protein, 174 aa, Artificial Sequence
  Synthetic
SEVEDVEREIEEVVEELRKIAEDDLRRNDTVVKEVRELVKRDREKNRKSAEELKKLKEEGRDKTKLEEIFRRDEEENERSRRELKKLLDDVERENRKTLRDLERILRRVKKRLDEFRDSEELKRVMEKITRVVEKVKEDVDRSKKKAEEVIREVEERLKRSLDESRKVLEEVKK

SEQ ID NO: 8809 - protein, 174 aa, Artificial Sequence; identical to SEQ ID NO: 8808
  Synthetic

SEQ ID NO: 8810 - protein, 174 aa, Artificial Sequence
  Synthetic
REVEEVKKRVDEVVKRLRKLAEDDDRKNKESADRLRAIVDRDKKENTRSMETLRRLRERGEDRDELRKIVKDDREKNERSEKELKDILREDHKENKKSEDTLEELLRRAAEELKAVDRSERLEDAKKKLEDVIDEVRRRLEESNKRSRDVMEEVRKEVRRSLRESEEVVKDVEK

SEQ ID NO: 8811 - protein, 174 aa, Artificial Sequence; identical to SEQ ID NO: 8810
  Synthetic

SEQ ID NO: 8812 - protein, 174 aa, Artificial Sequence
  Synthetic
DEVREIKRLVDELVKRLKELAERSRRLVDEVAKRSKELAKENLDLNEDIVRRLDEVAKRGEDRKVLEELRDRIRKINEESKRRDDRLLEEIRRISEETKRRLKKLRDEIRELIERIRDTKELKDVAREIERVLKEVEEEDDDALRKIEEVSKRSKEIIDESMEKVKKVMEDVTR

SEQ ID NO: 8813 - protein, 174 aa, Artificial Sequence; identical to SEQ ID NO: 8812
  Synthetic

SEQ ID NO: 8814 - protein, 174 aa, Artificial Sequence
  Synthetic
SEVETVKKLIEDIVRESRRLVRENEELNKDVIRRSEELVRRSKEAVKRLVDKLDELRKRGSPEDDLERLLREIERISEETKRRDKKLLDEIEEINERSKREDDKLLTTVREIVKAVRRARELERAVEEIERVSRDSKREIKRSTEEVRKASERSRKEDEELERRARRVVEEVKR

SEQ ID NO: 8815 - protein, 174 aa, Artificial Sequence; identical to SEQ ID NO: 8814
  Synthetic

SEQ ID NO: 8816 - protein, 175 aa, Artificial Sequence
  Synthetic
SELEKVVEEVEEIVRRSERHVTEVVKTSKKSVEDSNRHVAKVVEDVKKKVTELIEAARENRVDKRELTREAERVEEELRKVLRTNEKLAEEDKRRLEKVARDNERLIDEVRRELDKVRKDKVLERVKRELKKAADRSRDIIRRVARETEEALRTSREIAKRVEDELRRVLEEVRK

SEQ ID NO: 8817 - protein, 175 aa, Artificial Sequence; identical to SEQ ID NO: 8816
  Synthetic

SEQ ID NO: 8818 - protein, 175 aa, Artificial Sequence
  Synthetic
KELEDVVKRVREEVRRSLEHVAKAVKESEDSVRELKEEVDRVVKESEDIVRELEKLKRENRVDEKELEKIAKENVDRNDTVREELERRVEEDERRLEKILRENEEEVERVERELRKVRDDKRLKEVDKELKRALEESRKIIKKVKEETKDVLRRVRDILRRSVRTSEKVLKEVKD

SEQ ID NO: 8819 - protein, 175 aa, Artificial Sequence; identical to SEQ ID NO: 8818
  Synthetic

SEQ ID NO: 8820 - protein, 178 aa, Artificial Sequence
  Synthetic
SKVERVVEESRENAKRDLDRVDKVVKDSRRSVEEDLKEVRDVVKEVDDMLREAEELMRRGEDEREIERILEEIERRLREVEKKSEKSFREDEERLKRVREESERNLREDRKRLEEVRKDNVDEKVIREVAKESEDAFRESERRLREVLKRSAEALKRSRDILKTVRERVKRVIDEVRR

SEQ ID NO: 8821 - protein, 178 aa, Artificial Sequence; identical to SEQ ID NO: 8820
  Synthetic

SEQ ID NO: 8822 - protein, 178 aa, Artificial Sequence
  Synthetic
REVEEVVKRSEKSVKEMEDKSRETVKKSRKSAKEDIDKVEEVVRRVEKVLREAKKLADDGEDRRTIEKILRDIEEELRRVEEESRRSLKKDREDNKKSLKELEELFDRDRRELEEVAKRNVDKDVIEEVRKKSDEVLKRVRKINKEVTEESERAFDESRRILETVAREVKRVIDEVRR

SEQ ID NO: 8823 - protein, 178 aa, Artificial Sequence; identical to SEQ ID NO: 8822
  Synthetic

SEQ ID NO: 8824 - protein, 179 aa, Artificial Sequence
  Synthetic
DAVEREVRKAEKIVEDDLRRVAKVVDESRKSVEKNEEDVRRVVEELRKILEEIDRLKRNGGDDESLERIARELEDLIRRVKERSDENVEENERLLRRVEEESKDSLKKLREALKRIRDNNVVDERVLRRVKKKLEDAVEDSRRILTELAEEVKTVVERSKRILDTVRDELKKALERVKK

SEQ ID NO: 8825 - protein, 179 aa, Artificial Sequence; identical to SEQ ID NO: 8824
  Synthetic

SEQ ID NO: 8826 - protein, 182 aa, Artificial Sequence
  Synthetic
DEVDEVVEKLRRLLEDTIRLVREAVDYLRRNLEDLRRKIREIVERLKRLLEELRKLVKDTRDEETLKKIIEDVRRTVEELLKELEEILRRSEENVKRVLKRLEEILKKSSDDLRKELKRVREAGLDEKRVRDAADEVRRMNEEVKKIIDDARKELERVHRDVKREIDRVARELDEEIRRVEK

SEQ ID NO: 8827 - protein, 182 aa, Artificial Sequence; identical to SEQ ID NO: 8826
  Synthetic

SEQ ID NO: 8828 - protein, 182 aa, Artificial Sequence
  Synthetic
DEVREMVKTLTDLLRRNRELVKRVVEELRKLLEETRKLVEDMVKELEDLLRELEKLARDTEDKDTLRELIERAKRKVEELRKRLEEILRRSHEELRRLEERVRKIDEESKKRLRELEEEAKRAGLDEKVVEEVARKVARANEDSNRILDEARKEVEKVNEEVRRIIKEVTDRLEKKVREVEK

SEQ ID NO: 8829 - protein, 182 aa, Artificial Sequence; identical to SEQ ID NO: 8828
  Synthetic

SEQ ID NO: 8830 - protein, 178 aa, Artificial Sequence
  Synthetic
SKAERLDEEVDKIVRDLRRLVDELEKRIEKIVRDNRELVKRVRESNKRIVETLRRLKENRGDKRVLDKIARDIHEENKRALERSEKSAEDVERELKKVKDELKEIVDRVKKTLDEARRAGVDKREVDKIEKKLRDVVREVEEIVTRVDKRLKDVLKESREILKEVNDETKKVLDEVKT

SEQ ID NO: 8831 - protein, 178 aa, Artificial Sequence; identical to SEQ ID NO: 8830
  Synthetic

SEQ ID NO: 8832 - protein, 178 aa, Artificial Sequence
  Synthetic
SEAEKVVRDVREIVERLRDIVRKVVEENEEIVKRLRKLVTDLVEENKRTVEALRDLKRRRGREEELEKIAEDDKRRNEEVRKDLERIAKEVHDRNREVLKTIKRILDEVKERLDDVRRRGVDEEILRRVEEEARRAAKEVEERIRTVNRRTEKVLEEVRKIVKDATDTSEKALREVRE

SEQ ID NO: 8833 - protein, 178 aa, Artificial Sequence; identical to SEQ ID NO: 8832
  Synthetic

SEQ ID NO: 8834 - protein, 176 aa, Artificial Sequence
  Synthetic
SRVEEVLRKVEEIVKRNEDLARKVVDESRKTVDKLRTLVEKVLRESRETVKRLIDLVRRNEVDKRRIEELAERDKERLKRVLEEIEREAREDERRLTDVVRRSEESIRRLKEDLDRANAREDLLTRVTDVLRKLRDRSREIIKRVVDETRRVLEEVKELIKRVLEETERVLREVRR

SEQ ID NO: 8835 - protein, 176 aa, Artificial Sequence; identical to SEQ ID NO: 8834
  Synthetic

SEQ ID NO: 8836 - protein, 178 aa, Artificial Sequence
  Synthetic
SEVDEVVDRSRKTVKKMIDDVREVLERSRKNVKEDIERVRKVVRESEETVKTARRLKEEGADDREIKRLIDEDRERLRKVLKESEDNLRENKRENDDMRRRIEKLKRDDERRLDRVEEEGVDEEVLRRVREVTERATREVEELLKRSDEESERALKTSTDVLREVLERSDKVEEEVKT

SEQ ID NO: 8837 - protein, 178 aa, Artificial Sequence; identical to SEQ ID NO: 8836
  Synthetic

SEQ ID NO: 8838 - protein, 182 aa, Artificial Sequence
  Synthetic
KEVEEAVRRVEESVRRLEEEVDRVVKENRKLVKDLIELAEEVVRRVKELVDRLRETVRRAKDKDTLDKLIREVADRARRLVERIDEILKEIKKRSEESLERIRDSLRKHHEELKRLIKEAEDRGLDKDVVTEVKKRAEDVDRRVERVIEEAEEVSREALKRVRDIIDTVRKVAETVLKEVKD

SEQ ID NO: 8839 - protein, 182 aa, Artificial Sequence; identical to SEQ ID NO: 8838
  Synthetic

SEQ ID NO: 8840 - protein, 177 aa, Artificial Sequence
  Synthetic
KEKEVMDEVERVLEKVKEDNRRVVREVEDVLRRVEKENKEIVDEVKDVARKVLEEVRRRGIPEEVLKELEDILRELDKKVRESNKRTRDIIERLRRDVERSNKELKDIVRELRKELRDTRVDERVLEKVKDVVRRSRDIVRRILEDAKDVVRKSREIAKKILEEVTEVVKRAREKVK

SEQ ID NO: 8841 - protein, 177 aa, Artificial Sequence; identical to SEQ ID NO: 8840
  Synthetic

SEQ ID NO: 8842 - protein, 175 aa, Artificial Sequence
  Synthetic
SKLEELLKRSEKSVREAKRLVEELKRRSEETVRRNKELAERLEDESRKTVELLKRIVDSNKEVRETIEDIVRRDREKLEEMRRRSEKSLDEDRRRLEEMRKRIEELLRRDEEDLRRVEPDKLLEEVEKESRKVVEDVRRVIEDVKRRSDEALKESEDIIRDVRRKSEKALRDVEK

SEQ ID NO: 8843 - protein, 175 aa, Artificial Sequence; identical to SEQ ID NO: 8842
  Synthetic

SEQ ID NO: 8844 - protein, 175 aa, Artificial Sequence
  Synthetic
SELEDLLRRSKESVDRLRELIRRLEDESRKTVETLRDIVKKLKEENKKTVDDLRDIVRRRKDDEETIEKIFKEDKERNEEATRRIETILTRDREKLEKVLREAEKLIRDDKRRLKEIEKDELLERVREVSDKVLEELKKIIDEIRKRSEKVAEEVKDVIRKVNELSKKVLKDVKK

SEQ ID NO: 8845 - protein, 175 aa, Artificial Sequence; identical to SEQ ID NO: 8844
  Synthetic

SEQ ID NO: 8846 - protein, 175 aa, Artificial Sequence
  Synthetic
RKLEELLKRSERSVEELRRKVTRLLEENDDTVRRLRELVTKLTDDSRKTVTRLRDIVRKDKDVTEEIKRIVEEDRRRLEKVKRDIDKLLREDRKRNRDVEEELRELLERDRDELRKVEPDKLLEEVTKVSEKVAEEVRRVIKTVNDKSTEVLREVKRVIETVRRESEDVLEKVEK

SEQ ID NO: 8847 - protein, 175 aa, Artificial Sequence; identical to SEQ ID NO: 8846
  Synthetic

SEQ ID NO: 8848 - protein, 175 aa, Artificial Sequence
  Synthetic
SKLEDLLRRVTEIVKRLEEIVRKLEERSRRTVKRLEELVDTLRKENEDTVRRLEKIVRDRKDDTDKIRDIAEKDRRRNKEVKDRVKKLLDDDRELLERVRREIEEIVERVREELDRVEPDELLKEVRDVLETVVKRVREIIEKVRKESEDALRKVDKDIREVNRRSEKALEDVKT

SEQ ID NO: 8849 - protein, 175 aa, Artificial Sequence; identical to SEQ ID NO: 8848
  Synthetic

SEQ ID NO: 8850 - protein, 175 aa, Artificial Sequence
  Synthetic
SEAEKIEREVDKVVEDHRRLVRADLERVERVVEEHRRLVKEDLDRVDEVVKRLRKLKEDGTPKEEIRRLIEEVERRSRESLKEIKRTTDEVRKESKKSADRLRETTERAKKRLDEANVREDVLRRVRELLKTVHEEVKKVIKTSDDILRTVHDEVRKVIKTSEKILREVAEEVER

SEQ ID NO: 8851 - protein, 175 aa, Artificial Sequence; identical to SEQ ID NO: 8850
  Synthetic

SEQ ID NO: 8852 - protein, 175 aa, Artificial Sequence
  Synthetic
KELEDATREVETVADEHRRVLEEDKRDVKEVVERHRRLLEDLRRKLEKVVRDLRKLLKDGVPKEELKKLVDDLKRTIDRLLREAEKTTREVDKKSERSVRELERTSKEMKERLDRLNLREDVLRRIEKKLKDVTDDLRRVIKESKDRLTKLHKEVEDALRRLRDRLRELEDEIRR

SEQ ID NO: 8853 - protein, 175 aa, Artificial Sequence; identical to SEQ ID NO: 8852
  Synthetic

SEQ ID NO: 8854 - protein, 182 aa, Artificial Sequence
  Synthetic
RELEEAVKEVEKKIRELRERLKEVVERSTKKMDDLRKENEKVMRESSELVTELVKEIKDRASDKDKARRVIEELEKVNRELKKEHDKTVKELEDVNRRIERKAREVERELEEVLRDIERLIREGVDLKDLRKKVDDVARKVDKILEDLERESDTVLDRVKKVLERSRRDSEDVARRVEEKVR

SEQ ID NO: 8855 - protein, 182 aa, Artificial Sequence; identical to SEQ ID NO: 8854
  Synthetic

SEQ ID NO: 8856 - protein, 183 aa, Artificial Sequence
  Synthetic
SELDELRKMVKEVLDRVRDLLKKLEDEARKVAEDNKRLLERNKREIEAALRRVEEIIRRRRTEDVRREVEKILEELIRESERSVRESKKHLDDVKRRVEEIVRRIKKELDDLLREAKRIVDEKEDKRVREVLREVEKRIKELEDLVRKVLDKIRELIERLKRETDKVLEESKKLIKELSERLE

SEQ ID NO: 8857 - protein, 183 aa, Artificial Sequence; identical to SEQ ID NO: 8856
  Synthetic

SEQ ID NO: 8858 - protein, 183 aa, Artificial Sequence
  Synthetic
DELEDVRKEIEDVRKENEDTVRESKDEIRRLEDTNRKTLKESRDDIEKARERVKKERRDSDKRVLERVAEELRRIVKRIREKDKEVIERSRKILDENRRRNEEVIKKTEKRLEEIRDRLSRVENEKDVRKVLKEVEEEARELVKLNRDVLEELRRRVRKLVEDNKDVTREVEDILKKLEEELK

SEQ ID NO: 8859 - protein, 183 aa, Artificial Sequence; identical to SEQ ID NO: 8858
  Synthetic

SEQ ID NO: 8860 - protein, 176 aa, Artificial Sequence
  Synthetic
SMDETIRKLAEDNRRRSDETVERIERLAKKLDEDNRRVVEKSERLAKEVADKVRRVKNTTDERELKEVMEELERILKRIAEDHEKVIRDSEDILRRIEKLVERSIRESRKSLKRIRELKVDERVIKEVEDISRDLERKNKEVVERARRIVEKVKETNKRVLEEVEKIVRKLKEELK

SEQ ID NO: 8861 - protein, 176 aa, Artificial Sequence; identical to SEQ ID NO: 8860
  Synthetic

SEQ ID NO: 8862 - protein, 184 aa, Artificial Sequence
  Synthetic
SVEEVVEEVRRVAEKVEEDVTRVIKEDEDIARELEKRIDDVIKESKTVADELLERLRRAGADRRLLEEVRRLMEEVTRRHEELRREVEERVKDSKRRHDESRKELEDLLREVEERARDVRRRGGIEEELERLLREVEELIERVKERHKRLVEDSKRLLDEVDKRLKDSNREVRERIEEIKRRVD

SEQ ID NO: 8863 - protein, 184 aa, Artificial Sequence; identical to SEQ ID NO: 8862
  Synthetic

SEQ ID NO: 8864 - protein, 175 aa, Artificial Sequence
  Synthetic
DELEKIREEVREIVERSKREAKELLDRNKEIVKDLERKAREILRENRDRVRRLAEKTNEDEKTVRELLERNKKVARDVEDKVRKLIEDNERVARESEKRIRESEKKNRDVLRELEKRVDSEVLDELRRIIETSEKLNRDVLRESKEVNRDLTRKLEEVLRRSKEDNKRLSEKIKE

SEQ ID NO: 8865 - protein, 175 aa, Artificial Sequence; identical to SEQ ID NO: 8864
  Synthetic

SEQ ID NO: 8866 - protein, 175 aa, Artificial Sequence
  Synthetic
DELEAIKDEVRRIVRESEERAKKILRDVERMLDEIRKKLKEILDRNREVVDELKRQINEDKETVERLLRDNKRVLDRVEDSARRLEEELKRVLDEVEERVKRSLDRNDEVLKELEKRVDSEVLKELRRIIEESKRRNKRVLDEIRKRAEDLRRVIKEVLDRSREINKRLSDEIRK

SEQ ID NO: 8867 - protein, 175 aa, Artificial Sequence; identical to SEQ ID NO: 8866
  Synthetic

SEQ ID NO: 8868 - protein, 175 aa, Artificial Sequence
  Synthetic
DELEKIVREVREIVKESKEEARRILEENKKIVEELRRRLRKILEENEDMVRKLEKKTNEDKDTVRRLLEENKRVAKEVEDKVRKLIKENEDVMREVEKKVEKSLRDNKRVLDDVRRRVDSRVLEELERIIRESEEANKKVLEDSRRVNKKLSEELKRVLDESRRRNEELSKRIKD

SEQ ID NO: 8869 - protein, 175 aa, Artificial Sequence; identical to SEQ ID NO: 8868
  Synthetic

SEQ ID NO: 8870 - protein, 185 aa, Artificial Sequence
  Synthetic
DELRDLEREIRRIVEESERHLKEVLERNHEASKRNRDDLKRMVDDIRRKVEEVRKLREEGTDKEKLKEELERALRKVEKIARDSERHLDKVLKESREAIERNERENRRLLEEVKRTIEELRRRTDAETVDRVLEKLKRIVEDSERRVKEVLKELEENSKRIKDETKDVLRKVEEIVERLRKEIER

SEQ ID NO: 8871 - protein, 185 aa, Artificial Sequence; identical to SEQ ID NO: 8870
  Synthetic

SEQ ID NO: 8872 - protein, 185 aa, Artificial Sequence
  Synthetic
DELEELKEEVKRAVDENRETNKRALDRNHEISKDSEDHLRESSERIRRRIEELARLVEAGEDKRRLEEDVKRLLEESKKLIKENKDRNREVVRRSEKIAEDSKRHLDAVLEKVERTIRKLREETDRETVKKVLKELREEIERVKRESEKVVKAVRDNSKRSEEKVEEVLERNKRIVDDVLRKIKK

SEQ ID NO: 8873 - protein, 185 aa, Artificial Sequence; identical to SEQ ID NO: 8872
  Synthetic

SEQ ID NO: 8874 - protein, 185 aa, Artificial Sequence
  Synthetic
DELKEAEDRVREVVRENEERLRKALEENHKISRDSEKHLRDLERTIKEIVKRVRDLRRRGTDKEELKKELERVLDKVRKDITDNLRTNEEVLKRSERIAEESERHLDKVLKDLEDIARKLKDKTDKDTVEKVLRDLRRIIKEVKERSREVLKRVRENSDRSLKKVEEVLKRLEDIIRTVKEEIKK

SEQ ID NO: 8875 - protein, 185 aa, Artificial Sequence; identical to SEQ ID NO: 8874
  Synthetic

SEQ ID NO: 8876 - protein, 179 aa, Artificial Sequence
  Synthetic
EDAERALKKIEEIVRRLTEELKRVLDANRESVDRLRRELEEVLKRNRELVRKLEKILEERKDDQDTARKVIEDSERHIKELEERVERVIRENKKTVDDALKRVKDVVERLKEEVKRLEDRGVDREVVERLKKIIADLDRVVEEVIRTSRKVIKELEDTVRRVIEELKRVSDELKKKVED

SEQ ID NO: 8877 - protein, 179 aa, Artificial Sequence; identical to SEQ ID NO: 8876
  Synthetic

SEQ ID NO: 8878 - protein, 178 aa, Artificial Sequence
  Synthetic
DKLEELLKRVEELVERLKEESERVLRRNHELSEKLRRILEEILKRNHDLSRDLEDRLRKLKDKKEVDDLVREVLKRSKETVETLRRIVEEIKKRSEDSSEENRRRVKEALDELDRLVKRIEGDEVVKRVEDIIEKVREDLERSDEKLNDNVRRLEREVREVLKAVEDNARRLAEKTKT

SEQ ID NO: 8879 - protein, 178 aa, Artificial Sequence; identical to SEQ ID NO: 8878
  Synthetic

SEQ ID NO: 8880 - protein, 178 aa, Artificial Sequence
  Synthetic
SEAEKLLEEVKDLVRRLKKDLERVLRDNHRLSEELRRRLREILEENKKLIDTLREIREKLSDRDKLEKIVEEIVRRSEETVRRIKRVVEEVEKRSKESVEDLRRRVKTVLDRLKELVDRADGKEVAEKMRKIVEELRKEVEEVLKALKENLDRLRREVEKVVERIEDTLRELKKRATD

SEQ ID NO: 8881 - protein, 178 aa, Artificial Sequence; identical to SEQ ID NO: 8880
  Synthetic

SEQ ID NO: 8882 - protein, 182 aa, Artificial Sequence
  Synthetic
SEAEKVLEEVKRLVEDIERKLREMLRRDNEISRKVRDDLRKILEENNELSRRVEEEIRRIKDKDTLKKVVDEVRRELERTLERVRKLVEEVKRTSRKTLEDIKRIVETIKREMDRLLKEIEDRGLREEVVEALEKVVRDVARRLEDVIRRVAENAKRLEDDLRKVEEELKENADRLEERAKK

SEQ ID NO: 8883 - protein, 182 aa, Artificial Sequence; identical to SEQ ID NO: 8882
  Synthetic

SEQ ID NO: 8884 - protein, 175 aa, Artificial Sequence
  Synthetic
SEVEKLLEKLRELVERVEREARRILEENKELIKESLKRIRDLLEDNKRLIREVKEILRRGDKDERLLKDVRRRVKESKEELKKLLETNHRLARETVKKLEDVVRKLEELIRDIERKIDDKDVVKRIRDIAEKVRRDLKRVIDAVRDTSRESDRRLRDVIREVDESSRELVREIER

SEQ ID NO: 8885 - protein, 175 aa, Artificial Sequence; identical to SEQ ID NO: 8884
  Synthetic

SEQ ID NO: 8886 - protein, 175 aa, Artificial Sequence
  Synthetic
SDMERLLRELEELVKELRERLRRLLEENKDLIRRSLDRARKLVRRIEELVRKVKEDLDRGDNDERLLRKLEEDARRVLDELRRLLEENHELMKETIRKLEELLKEVTERAKDIRRKVEDEDVLRKIEETARRLVKEIEDVIREVERTSRESDKKLEDVIDKLRKIVRKVLEELRT

SEQ ID NO: 8887 - protein, 175 aa, Artificial Sequence; identical to SEQ ID NO: 8886
  Synthetic

SEQ ID NO: 8888 - protein, 175 aa, Artificial Sequence
  Synthetic
SEVEDLVRELERLVREAKKALDDLRRKLEELVRDSLRKAEELLKENHDLSREVKKLLEDGANDERLLREATERVKRSLERLKRLLEENHKLVRTVIKEIRELLDRVRKKARDIEEKIKDKKVADELRRIAKRLVEELERVIRELEKIAKESDERLKEVIDRLRENVERLVRELRR

SEQ ID NO: 8889 - protein, 175 aa, Artificial Sequence; identical to SEQ ID NO: 8888
  Synthetic

SEQ ID NO: 8890 - protein, 188 aa, Artificial Sequence
  Synthetic
KELEDLDRDVRRVVEELREELRRLEEEDKRSVEENEERLERLERRLRKKVKELEEKRKRIREKEKKEELKEEIKKVLREAEKIIEDSKRHIDENLKKSEEEIKRLKRKVEELEKKVEDIARELAEKRDREEVRRVLEELREKIKRVLEEIEEVLRRSREINKRLRDRTRTVAKRLKEIVDDVLRKVET

SEQ ID NO: 8891 - protein, 188 aa, Artificial Sequence; identical to SEQ ID NO: 8890
  Synthetic

SEQ ID NO: 8892 - protein, 188 aa, Artificial Sequence
  Synthetic
RELEELLKEVEKAVRENTKLLKDLLDKDKKSVKENEETLRDLERKLREVVERLKRELKDIRDDRMKKKLADKIETVRRDIKRIIDESEDHIRKNLEESKKIADDSRKHLDRVLEKAEDLIRKLKDKRDEKRVRDVLKRLREIIDTVKKVTKEVMERSEEINRRLLKRTKDVLRELEKIVKTVLDEVRK

SEQ ID NO: 8893 - protein, 188 aa, Artificial Sequence; identical to SEQ ID NO: 8892
  Synthetic

SEQ ID NO: 8894 - protein, 177 aa, Artificial Sequence
  Synthetic
SEVDKVREDVKRLIEDAERVSDDVDRRVKRLAEALKETSDKVKEDVERLVRDIKREIDKEEVKRRVDDALREIKEILERSKRHIDEVLKRVKDRLRESKRHLEEVLRRVKEILDRTTDEETLRRVLRKVEDVIRRNKEDNEKVLKDAKRVVEEDKRENEKALERIERIVRKLKEDTR

SEQ ID NO: 8895 - protein, 177 aa, Artificial Sequence; identical to SEQ ID NO: 8894
  Synthetic

SEQ ID NO: 8896 - protein, 177 aa, Artificial Sequence
  Synthetic
SEAEEVVRRVEKLAEDIKRVIDKSLEDVERLVRDAKRRSREVLREVEKLVEDITRRIRDEEVKRRVEKVLREIRRIIRESEKHLDKVLDDIEKILRKSKKHIDDVLREVKEIIDRVRDEEILRRALEKVERVITENKKENEDALRDAKRKIDKDKEDNKKVLDDVRRIIEELKEETR

SEQ ID NO: 8897 - protein, 177 aa, Artificial Sequence; identical to SEQ ID NO: 8896
  Synthetic

SEQ ID NO: 8898 - protein, 183 aa, Artificial Sequence
  Synthetic
DEVDRVAEEVKKLIDDVKRVSDEMLKRSEDLIREVKKTSDDVLETVERLIRDVERKVEERVDKEKARRLRKKLRELLEEVRKAIERSRKNLEDLLRKSKRSVERSREDLERIRREVEEVRKMKDDEVLKRLLDKIREDAKRNKDDNKRNLDESKKEVDRNKDENRRVLEKVKETVKRLKDEVK

SEQ ID NO: 8899 - protein, 183 aa, Artificial Sequence; identical to SEQ ID NO: 8898
  Synthetic

SEQ ID NO: 8900 - protein, 183 aa, Artificial Sequence
  Synthetic
KEVEEMLKEVKKLIEKVKRRSDDVLRRSEELARDLKKMSDDVLREVKKLIDDVKRTVDERVDKEKARRLREDLKRVLDEVREVVRESREDIERILRESKRSVEESRKNLEKLKTDVERASSVKDREFLKEVLDRVRERVEENERRNDENLKKSKKRIDENKEKNERVLRKIREIARRLKEELR

SEQ ID NO: 8901 - protein, 183 aa, Artificial Sequence; identical to SEQ ID NO: 8900
  Synthetic

SEQ ID NO: 8902 - protein, 183 aa, Artificial Sequence
  Synthetic
SEVDRVLKTVEELIRRVKRISDRVLTEVKKLVDDVRRVVEKSRRDVEELVKEVKRSVDERVDSTDAERLRRKLEKLVREVEEVAKRSEDDLERILRRVEEVIKRSRDNLEKLLRKVEEVSKIKDKEMLERALKEIKEEVKRNEDDNRRMLREIEELAKRNKEENKRVLDEVRDIVRRLAEEVK

SEQ ID NO: 8903 - protein, 183 aa, Artificial Sequence; identical to SEQ ID NO: 8902
  Synthetic

SEQ ID NO: 8904 - protein, 183 aa, Artificial Sequence
  Synthetic
EEVERVREEVDKLLKTLKEVSDRVLKASKDLLDRVKEIVEKSLRDVKRLIDDVKRKVDERVDKEEARRLREELEKVLREVEKVVEESKKDLERILEKSKRSVERSRKNIEELREEIERASRVERKEVLERLLKKAEEIIRKNKKENDDNLEESRKEIEKNEEDNRELVKRIEDEVRRLKKEVE

SEQ ID NO: 8905 - protein, 183 aa, Artificial Sequence; identical to SEQ ID NO: 8904
  Synthetic

SEQ ID NO: 8906 - protein, 183 aa, Artificial Sequence
  Synthetic
SEVEEVLRRVRELIERVKRIVDESEKEVRRLIEEVKKIVEESLKRVEELLRDVKRRVDERVDSTDAERLRRKLEKLLREVEEVVERSKRDLERLVRKVEEVVKRSRKNLEDVRREVERMSRVEDRKMLREVLEKIKKIVKDNEDDNRRALTEVRERVRENVEENKKVVDRVRKIAEDLRKEVE

SEQ ID NO: 8907 - protein, 183 aa, Artificial Sequence; identical to SEQ ID NO: 8906
  Synthetic

SEQ ID NO: 8908 - protein, 183 aa, Artificial Sequence
  Synthetic
SEVERVLEEVKKLIEDVKRVVKESEEEVEKLIRDVEREVERSKRTVDELVKDVKRAVDRDVDKEKAERLRRKLEELKREVEKVAERSKENLKRLLTRVREVVRESREDLERLLKKVEEMSRVKDREVLTKVLREVEEAVRRNKERNKRALEEVKKTVDRNREDNKRMVDKVRETAKRLKDEVR

SEQ ID NO: 8909 - protein, 183 aa, Artificial Sequence; identical to SEQ ID NO: 8908
  Synthetic

SEQ ID NO: 8910 - protein, 176 aa, Artificial Sequence
  Synthetic
SSIEKVREDVKELIRDVERAVKRVKEESKKLVDDLRRAVKRVEEESRKLLKDLERNKRREEVDKILKDNEKSLKELKDEVERILKENEDLLEKLEREVKRILDELKKRLDDADKIEGDDDVRRVLREIERIVKEVKDDLKRVLEESERSIRRVKEELRRVLEDNRRLLKEVKDRAR

SEQ ID NO: 8911 - protein, 176 aa, Artificial Sequence; identical to SEQ ID NO: 8910
  Synthetic

SEQ ID NO: 8912 - protein, 178 aa, Artificial Sequence
  Synthetic
SEVEAVLREVEERVDRVRKESEKTLREVERLVREAKRRSKKSLDDVKKKVEEVKKKIRDIKDEETLRRLIKRIEEELKEIVERNKKTVEEILRRLEEIIARDRRRIDKIVKDLRRIVEEVKDAEEVKREIEKLVEDVRRVSDRVVEEIKELVKDVERMSRKVVEDIKRLAEDVRREAE

SEQ ID NO: 8913 - protein, 178 aa, Artificial Sequence; identical to SEQ ID NO: 8912
  Synthetic

SEQ ID NO: 8914 - protein, 178 aa, Artificial Sequence
  Synthetic
DEVERVLEEVKERVDRVKRESEKSLKEVEKLVRTNERLSERTLKEVRDLVEDAKKKIDDIKDKETLKRLVDEIVKRLEDILRENREIVERVLKKLEEIVEKNERDITEIVERLRRIVEEVKDAEEVRREIEKLVEDVKRVSDKVVEDIRRLAEKLRRDNKRAEDEIRKLVRDVERRAK

SEQ ID NO: 8915 - protein, 178 aa, Artificial Sequence; identical to SEQ ID NO: 8914
  Synthetic

SEQ ID NO: 8916 - protein, 178 aa, Artificial Sequence
  Synthetic
DDLERVLEEVRKLVKELKERSRKSLEDVRRSNERNETESRRTLREVRELVKKVKEVIDRTKDKETLKKRVEEIVRELDKIAKRNKELVERVLEVNKKLVRDNTEEVRRILKELEDIVRSVKDAEKVKEDIRRLVEEVERVSREVVERIKKLADESRKKNKKVIDEIKELVKRVRDRAK

SEQ ID NO: 8917 - protein, 178 aa, Artificial Sequence; identical to SEQ ID NO: 8916
  Synthetic

SEQ ID NO: 8918 - protein, 178 aa, Artificial Sequence
  Synthetic
REMEEVLKEVEKRVRDIEDESRKTLERVDKLVKKNKRDSERTLKEVEDLVREVKKEIRRIKDKKTLKERIDKILEDLKRIADRNRRLMKKVLDELRKIIEEDRERIKEILKRLEDIVREVKDAEEVKREIKKLADRVREVSERVVREIEKLVRDIKRRNEEVIDEIRKLVEDVKREAK

SEQ ID NO: 8919 - protein, 178 aa, Artificial Sequence; identical to SEQ ID NO: 8918
  Synthetic

SEQ ID NO: 8920 - protein, 178 aa, Artificial Sequence
  Synthetic
KEVEDVLEEVKELVKELKRVSEETLRRVEKSNRENEEKSKTTLKEVEDRVERVKEEIKKTKDKETLKRLADDIVERLKAIVEKNKRILEEVERTNRELVEEDKRMVEEILRRLKKIVEEVKDAEEVKREIKKLVEEVRRVSEEVVREIKKLVDKSRRVNEKVIEDIKELAKEVEEAAR

SEQ ID NO: 8921 - protein, 178 aa, Artificial Sequence; identical to SEQ ID NO: 8920
  Synthetic

SEQ ID NO: 8922 - protein, 186 aa, Artificial Sequence
  Synthetic
SELEEILERVRKMAEDAERISEETLRRSEELIRRVKDLSRESLERVERLIRKVKKEIEEIKDDDTLRRLLEEVEKEIRKILKEDEEALEDVARKVKKINRDNERLLEELRKIAETLLKDILTKKGEESEEVLRVIKAIEDLLRRVERVSREASKTSEELLKDITRVSEKSKEDIKRLLDDVRRKVK

SEQ ID NO: 8923 - protein, 186 aa, Artificial Sequence; identical to SEQ ID NO: 8922
  Synthetic

SEQ ID NO: 8924 - protein, 186 aa, Artificial Sequence
  Synthetic
SELDEVLKTVEELVRRIKEKLKEILDRSRKLVEEARKLSEDSLREVKRVIDEIKREAERQKDDETLRKILEDVERIIRELLKRDDEVVRRVVEELRKLNDDIRRLVTEIKDRIRKIEEDIKTKKGESSEEVLKLVEDVRRLVEDVDRTVERMSRESKKLAEDIKRVSEKSKRDIERLLADVERTVR

SEQ ID NO: 8925 - protein, 186 aa, Artificial Sequence; identical to SEQ ID NO: 8924
  Synthetic

SEQ ID NO: 8926 - protein, 186 aa, Artificial Sequence
  Synthetic
DELDEVLKEVEELIKRVKRESERTLKENRDMVREIKRRSEESLREVRELIERVKDELRRTKDDDTLRRILERVRRRIKELLDRDKKLLKDARETSRKTIEDNERLLREVRRRIEEILKDIKRKKGESSERVARVVRRVEELLEDVERRSREVLKEMDKTAKEVKKASEKSEEDIKRLLEDVERTVR

SEQ ID NO: 8927 - protein, 186 aa, Artificial Sequence; identical to SEQ ID NO: 8926
  Synthetic

SEQ ID NO: 8928 - protein, 186 aa, Artificial Sequence
  Synthetic
KEAEDILKEVEDIIREAKKLSERTLDENRKVIRKAKEDSRRSLEEVRKIIEDVKEELDRIKDKETLDRILERVRKEIKELLDRDRDLLRKVEEISKKTIDEDREVLKKVTEEIDRLLKDLLRKKGESSERVLRVIREIEKLLEDVKRVSERSVKEMKKTLDDVRRASKRSEEEIERLLRDVERRVT

SEQ ID NO: 8929 - protein, 186 aa, Artificial Sequence; identical to SEQ ID NO: 8928
  Synthetic

SEQ ID NO: 8930 - protein, 186 aa, Artificial Sequence
  Synthetic
RSLEEVLKEVEELIRRAKEESKRTLDDVRKLIEEVKRESERSLRDVREMIERAKDRIRRIKDEETLRRILEEIKRIVEKLLEEDRKLLEDVTEEIKRILEENRKVLKEIKDRIARILERIKEEKGKDSEEVRKVVEDVERLLRDVERMSKEVEKRIRELLDDIRRVSERSRREIERLLEDVERTAR

SEQ ID NO: 8931 - protein, 186 aa, Artificial Sequence; identical to SEQ ID NO: 8930
  Synthetic

SEQ ID NO: 8932 - protein, 186 aa, Artificial Sequence
  Synthetic
DELEEILKRIEDRIREIKERSKKTLDDIRKVAERVEERSRESLKEVREVVEEIKDRIRRIKDDETLKRLAERARERIKELLDRDRKILEEVRKTVEKLLREDKRLLEEIAREVTELLKDILRKKGEESREVLKVIRDIEELLREVAEVSERSRREIEKLLEDVERVSREAIKRIKDLLRDVERTVK

SEQ ID NO: 8933 - protein, 186 aa, Artificial Sequence; identical to SEQ ID NO: 8932
  Synthetic

SEQ ID NO: 8934 - protein, 177 aa, Artificial Sequence
  Synthetic
KEIEELLDEIRRLMERSKENVRRSLKKSKDLIEEAKRRLEKSLEDSRELIRRIEDRIRRIKERDALKRVLDEIKKRVEEDIKRNEEILEEIRKLVEEDIKYNKDNLKRSEDLVRELEERVKSKEVLEEIRRLLEDLRRMNEKSIEDSKRLLEDVARAVKRSIDESRKLLEKIERDVD

SEQ ID NO: 8935 - protein, 177 aa, Artificial Sequence; identical to SEQ ID NO: 8934
  Synthetic

SEQ ID NO: 8936 - protein, 177 aa, Artificial Sequence
  Synthetic
KEMEDLLREAEELIRRSVENVKRSLEESEKLIRESKKNVERSLRRSEELAKEIKDEIRRIKERDEIKRVLDEAEELVRRDIDYNRRNLEETEKRVREDIKYNKDNLDESRDRVRKLEERVKSERVLREIRRLLRELEEINEKSIRDSKRLLEEIERVNRDSIRRSKELLEDVERTVR

SEQ ID NO: 8937 - protein, 177 aa, Artificial Sequence; identical to SEQ ID NO: 8936
  Synthetic

SEQ ID NO: 8938 - protein, 177 aa, Artificial Sequence
  Synthetic
SEVEDLLRRAEELIRRAKERLERSLRRVEKLIDDVRRKLERNNETVKRLVEEIKEKIKRIKERDMLKKVLEEAKKLAKESEEHLRKLLDDIRKKIEKDIEDNKKILEEIRRLVEDIRRKLDKEEMLKEIERLLEDIERVVRETIDTTRRLLEKIEREVREVIKSNRELVADLERTVT

SEQ ID NO: 8939 - protein, 177 aa, Artificial Sequence; identical to SEQ ID NO: 8938
  Synthetic

SEQ ID NO: 8940 - protein, 177 aa, Artificial Sequence
  Synthetic
DEVERLLEEVKRLIDRAREELKKSLDRVRRLVRENEEAVRKNNEDVADLIRKIKEKIEKIKEDEMIKKVLEEIKRRVEESLKHNKDLLREIRERAKKDIDDNKALLDEITELIKRVEDRVKMKKVLDDIRRLLKDIKDIVDKTIRDTKELLRDIEEKNRRATKSNKDLLEEIRETVR

SEQ ID NO: 8941 - protein, 177 aa, Artificial Sequence; identical to SEQ ID NO: 8940
  Synthetic

SEQ ID NO: 8942 - protein, 181 aa, Artificial Sequence
  Synthetic
DEVEKLLRRVEKEVDRIKRELEDNLRRVEKLVKEIHEENEKLMRKARKLVEDIKRIIDRGDKDSRVLDEVRKLIRTVEEEIKESVERAERLIRESEEHLKRVLEEAKETIRRLEEKVRRDVKSEEVKKAEKEIRRLLDELRRVVEEVTKKTKELLRRLKKSSDELRKTIKELLRELEEKVR

SEQ ID NO: 8943 - protein, 181 aa, Artificial Sequence; identical to SEQ ID NO: 8942
  Synthetic

SEQ ID NO: 8944 - protein, 181 aa, Artificial Sequence
  Synthetic
KEVDEILRELEELVKEIKKRLEELTREVKRLVDKIHKDNEDNLRDMARLVEEIKEIIRRGNKSSDVLKDIEKKAEESKKHLDESMKEARDLIRELEEKVKEILKEAERLIRRVKDLIRKTVKSKEVERVERDVERLLDELRRVVKEVLDRIRRLLEELERSSKRVKEETERLVKEVREAAK

SEQ ID NO: 8945 - protein, 181 aa, Artificial Sequence; identical to SEQ ID NO: 8944
  Synthetic

SEQ ID NO: 8946 - protein, 181 aa, Artificial Sequence
  Synthetic
SEVDKILEDLRELVERIHKKNKRIVEEDRELVKEIHRKNEENLKTMERLVEEIEKIIRRGDKSSKVLEDARRLAEESKKHLDRSMEEATKLVRESEERLDETVREAKKLIDEVREVIKRDVKSEEVKRVRKDVDRLLKELEDSSREVKERSRRTLEELERSSREVKERTERLLRKLEKAVE

SEQ ID NO: 8947 - protein, 181 aa, Artificial Sequence; identical to SEQ ID NO: 8946
  Synthetic

SEQ ID NO: 8948 - protein, 181 aa, Artificial Sequence
  Synthetic
DRLEEILKELRELVETIHRRNEEIVRKVAELVKRIHDHNEENTRRVEELVRRIKDIIRRGNKSSEVLKRAEELIKRSEEDLRRSVRDAERLIRELKEEVKKTVEDAKRLAKRVKEMLDRTVDSEDVERAKRDVDRLLKELEESSERVLRTIEKLLKELRESSKRVRDETKRLLDELREAVR

SEQ ID NO: 8949 - protein, 181 aa, Artificial Sequence; identical to SEQ ID NO: 8948
  Synthetic

SEQ ID NO: 8950 - protein, 181 aa, Artificial Sequence
  Synthetic
SELDEILKRLEKLVEDIKRKLEKLVRDLERLVKRIHDHNEENLKTVKKLVDEIKDIIRRGNKSSKVLEDARRLIEESKRDLDRSVEEVKEEAERVRREVERILREAEKLIRDVKKELDETVKSREVDRVREDVRRLLEDLKRVAERVKRDIERLLKELKESSDEVKKRTEELLEELERAVR

SEQ ID NO: 8951 - protein, 181 aa, Artificial Sequence; identical to SEQ ID NO: 8950
  Synthetic

SEQ ID NO: 8952 - protein, 181 aa, Artificial Sequence
  Synthetic
DEVDDILRRLRELVERIKKHLEDNLRELEELVKRIHDHNKRNVEEVKKLVEEIKKIIADGRKSDKVLRDARRLIKESKDDLDRSERKIERLVTESLKDLDDLLREAEKLIEDVKRELDKRVKSEEVRRVKEEVERLLEEVRRVVRKVKEESKRLLEELRRSSDRVKKETERLLEELERAVK

SEQ ID NO: 8953 - protein, 181 aa, Artificial Sequence; identical to SEQ ID NO: 8952
  Synthetic

SEQ ID NO: 8954 - protein, 174 aa, Artificial Sequence
  Synthetic
SEAEALVEEVKRIVEESKRRLEKVVEESRKLVEEVKKRLRDMLKTIEDLVKEVKELLDNGADEETVDRMIKRLKRLLEELRREVEEAIKTNEELLRRLKRESERTIKELEDLLRELKDNEEVKRKVERLLEEDRRVLEEVKESAKRTSKEVRDELREVSKRVEKLLKDVRDAAR

SEQ ID NO: 8955 - protein, 174 aa, Artificial Sequence; identical to SEQ ID NO: 8954
  Synthetic

SEQ ID NO: 8956 - protein, 174 aa, Artificial Sequence
  Synthetic
DEAEDLVRRVRDIVRKSREELKRVVEESDRLVEEVKRRLKKVVEDSKRLVDEVRKLREGGADERVVKRVIDENRRLLKELKETVKRVIETDRKLLEDLRDTSRRTIEELKELLDRLKDNEEVKREVERLLEDDERVLREVAKRSRETLETVRKVLEEVERRSRKTLEEVEKTAR

SEQ ID NO: 8957 - protein, 174 aa, Artificial Sequence; identical to SEQ ID NO: 8956
  Synthetic

SEQ ID NO: 8958 - protein, 174 aa, Artificial Sequence
  Synthetic
SEMDELVDRARRIVEESRRLLEEVVKRSKDLVKDVKKKLEDALRRVEEIVRRLDEELKGGADEERVKKIIRDLKELLKKLREEVAKVIRDNERLLRELDERSRKTLKELEDLLRSLKDNEEVKDEVRKLIEEDKKVLDDVRRKSERTLREVEDVLRRVEEEVEKLLRKVEESAK

SEQ ID NO: 8959 - protein, 174 aa, Artificial Sequence; identical to SEQ ID NO: 8958
  Synthetic

SEQ ID NO: 8960 - protein, 174 aa, Artificial Sequence
  Synthetic
DEAEKLVEDVRRIVEKIRKELEDVVEESRELVERIRRELERVVEESERLVEELRKELEKGGDEEIVKEIERLNKRLLDELKKRVEEAIREDKKLLEDLEERVRRVIERLKELLDRLKDNEEVKEEVKKLLEEVRDVLRKVKKASEETLRDVRRVLEEVKRRSEETLKRVREEAT

SEQ ID NO: 8961 - protein, 174 aa, Artificial Sequence; identical to SEQ ID NO: 8960
  Synthetic

SEQ ID NO: 8962 - protein, 182 aa, Artificial Sequence
  Synthetic
SEVEDIVRDVKRLVEENHRRNEEIVRRDEDLVRRNNELNKRILEEVEELVRRLEDVARKIRDKEELKRRVDEIERRLEDLLRKVEEANRKSLEDSKRLVRTVTELNRESVETLKKLVDDLRKDRSDVEEALRTAEELIKRLEDSLREVKDRSKRSLDEMKKSADDVRREIERLIKRVRDTTK

SEQ ID NO: 8963 - protein, 182 aa, Artificial Sequence; identical to SEQ ID NO: 8962
  Synthetic

SEQ ID NO: 8964 - protein, 177 aa, Artificial Sequence
  Synthetic
SEVEKIVREVEEVVERIRKKSEDSLREVRRLVEEIKRRSEKTVEDDEKLVKDAKDELRRIKDKETLARLVEEILDRSRKSLEKNKRLLDEIRRRLETILKRNEDLLRRAEEELKRLREELDKEDAKRRIEELMKEVRDVSRRALKEIKDLLREVEEVSKKALKRSKDTVDEVREEVR

SEQ ID NO: 8965 - protein, 177 aa, Artificial Sequence; identical to SEQ ID NO: 8964
  Synthetic

SEQ ID NO: 8966 - protein, 177 aa, Artificial Sequence
  Synthetic
DEVEEIVKEVARVVDEIRRLSKESLDRVRKLVEDIERELRKIVKTDRDLVEEAKRVLKDIKDKDTLREVLERIKRLSEESLREADRLVTEIVEDLKRILDENRRLLEEILKRAKDLLDRVEKREVEKEIRRLVEEVKEVSRKVRKEIEELMRRVEEVVKTVKEESKKTVREVEETAR

SEQ ID NO: 8967 - protein, 177 aa, Artificial Sequence; identical to SEQ ID NO: 8966
  Synthetic

SEQ ID NO: 8968 - protein, 177 aa, Artificial Sequence
  Synthetic
DEADEIVKRVEEVVRRAKETLERILKRVEEMLDRIRKESEKTVREDEKLVEEVKDRLRKIKDKDTLRKLLDEVKKRSEESLERNKRLLEEIKRIAEKLLREVRELLERIRRTLDKLLKEVDSERLLREIKRLLKEVEDEVRRVEKAIKELVDRVKEVSDRALERSKRTVREVEERVR

SEQ ID NO: 8969 - protein, 177 aa, Artificial Sequence; identical to SEQ ID NO: 8968
  Synthetic

SEQ ID NO: 8970 - protein, 181 aa, Artificial Sequence
  Synthetic
SEVEEVKEDSKRTLKELKDVAKKVDDDSKRLLEELERVARKSIEDSKRLLDELRERGVPEDILRRAEKLVEEDIRRNEEIVRRIADRIREMNEDNRRLLDEVAKEVEKSIREVDEAAKRGVDEKELRRLVEDDRRLVEEVKRDSERLLDEIRKLVEEIKERLRRSVEELRRRVEEIKKTTT

SEQ ID NO: 8971 - protein, 181 aa, Artificial Sequence; identical to SEQ ID NO: 8970
  Synthetic

SEQ ID NO: 8972 - protein, 181 aa, Artificial Sequence
  Synthetic
SSVEKVKRDSERTLREVEKVIEKVDRDSERLLRDVERVITEADERSKDLLRRLEESGVPKDIVDRARRLIEELNRRNKALAEEIRELVERVNERNKRLLETIEKLVRDSIRRVDELAKRNVDDTDLRRLVEEDRKLVTRVKEESKRLLEELRRLVETVRKRSEDLLREIKKRVDEILRRTK

SEQ ID NO: 8973 - protein, 181 aa, Artificial Sequence; identical to SEQ ID NO: 8972
  Synthetic

SEQ ID NO: 8974 - protein, 174 aa, Artificial Sequence
  Synthetic
DEIKEVIDRITKVLEDNERVVRKLSEENKKVLDDIRRRAEEIIRRNEEVLRRIKELAKRNTDRRKALEELRKISEESKKDLDRLLKEVEEISRRSEKENRRLNKESEDVARELKKRIDNEELKKALDDILRRLEESNRKNIEDSRRILEDVERIVRRVVEVSKDIVRKAEEDVR

SEQ ID NO: 8975 - protein, 174 aa, Artificial Sequence; identical to SEQ ID NO: 8974
  Synthetic

SEQ ID NO: 8976 - protein, 174 aa, Artificial Sequence
  Synthetic
SEVEEVIDELRKVLEENKRRVEELSRENDDVLRRIEERLKKIEDELEKILKDVRDLKDNNVDSKTLLERVAERVKEAATRLRELLRELEEISEKSIRENDRLNKESEDMARDLRRRVDNERLKEEITRILEELTRINEENKRRSEEILDRVRKDVERVLKRVEDILKEIEDELR

SEQ ID NO: 8977 - protein, 174 aa, Artificial Sequence; identical to SEQ ID NO: 8976
  Synthetic

SEQ ID NO: 8978 - protein, 185 aa, Artificial Sequence
  Synthetic
SSVEELEERLRRVLERSERHLRKLEKKVEEVLDESRKNLTRLLRDVERVLRDVEETVRREKSKSVADEIRKEVKRLLDKVKKILKENRDKTKRMLEEVKEVLDRNEEETKRLEERVDKALRDEIKDERKARELKRTVKRLAEESRKILREVEEKVRKVAEDSERILEEVERTVKRVVEEIDRTVR

SEQ ID NO: 8979 - protein, 185 aa, Artificial Sequence; identical to SEQ ID NO: 8978
  Synthetic

SEQ ID NO: 8980 - protein, 185 aa, Artificial Sequence
  Synthetic
SKVEKLLRELEEVLKDSERHVREDSDRLRRVLEDSERHVRKVLRDVEKVLREVEDMVRKRKDRDVIDKIRDKVERLREKVERALERNKRKLDKALEDSNRSDKKNEDKLRELKRRVDEVLRDDIKDEEKARRLEERVEEIVRESERTSRENNKKSRDIIKTSEDILREAADRVREVVERIRRTLT

SEQ ID NO: 8981 - protein, 185 aa, Artificial Sequence; identical to SEQ ID NO: 8980
  Synthetic

SEQ ID NO: 8982 - protein, 184 aa, Artificial Sequence
  Synthetic
KEVEEVIERSKKSNEENERRLRKILEEARRINEENEKLLRKILEEAKRVVEEVRRILKDNKEKKERIKELLERLEELLRKVKEDVERSVRELAKLLKKVAEEVRKSLEDNKRTADRVVERIGEEKKEELDKLREESKKILRHSERLLKEVEEEVKRILEHSEELLRRVEDKVRRLLKEIEDALR

SEQ ID NO: 8983 - protein, 184 aa, Artificial Sequence; identical to SEQ ID NO: 8982
  Synthetic

SEQ ID NO: 8984 - protein, 184 aa, Artificial Sequence
  Synthetic
DEVEEVEKKVDKIDKENEDLLRKVIRDAERINEENTRLLEDILRKAKKMVDDVREILKDRKDAKEDIDRLLKELKKLLEEVAEEVKKSLEKLKELLEKVKREVDESLKRLEDELRDVVRKIGKDLEEEVRRVAERVKEVVKHSRELLKRVEDMVRRIVEHSKRLLDEVRERVKDLLRKIAEARK

SEQ ID NO: 8985 - protein, 184 aa, Artificial Sequence; identical to SEQ ID NO: 8984
  Synthetic

SEQ ID NO: 8986 - protein, 181 aa, Artificial Sequence
  Synthetic
DEVREVVRRLEEIVRDVNKKNRESVREAERLVDRLREILEETSRRLKELVDRVKELIKGGTDSRDVRRVDRELEKIITDSDDTVRKIREELKRKVEDDLRRTAEIIKKLKDTVARVSERISNEKEARELEDAVRKLIERLKRSAEEVKKRVEELDEEIRRVVEEDRRTIKELKEEIDRADK

SEQ ID NO: 8987 - protein, 181 aa, Artificial Sequence; identical to SEQ ID NO: 8986
  Synthetic

SEQ ID NO: 8988 - protein, 181 aa, Artificial Sequence
  Synthetic
DEVEEAVKRIEDLVERLRELLEKTSREIEKILKESEDKLRESSDRIRRLLDELKKLIENGADDELVRKMLKDIKDILEESERTSKETLDRIREILKKSEDLVREVLERIERLLEDVARRITDEEKLRKAEDTVRRVIKDVRKMLEDDRRTVEEVIRRDREALEKDRKTVDDVIEDVKRVAK

SEQ ID NO: 8989 - protein, 181 aa, Artificial Sequence; identical to SEQ ID NO: 8988
  Synthetic

SEQ ID NO: 8990 - protein, 181 aa, Artificial Sequence
  Synthetic
SEVDEAVEEIKRILEESKKRLDETSEEIKRILEDSERRLRESSKRIRELVKELKKRIDGGTDDREVEKVEKEIEDILRESEEISKDTEDKIREILKRSREISETTIREIRRLLEDIERRITDKDKLTRIREVVDKVVKEDEDALREDERTVREVIKRDRDLLEEDRRTVEDVIRKVRETAR

SEQ ID NO: 8991 - protein, 181 aa, Artificial Sequence; identical to SEQ ID NO: 8990
  Synthetic

SEQ ID NO: 8992 - protein, 181 aa, Artificial Sequence
  Synthetic
SDAEKVVKRIKEIVEDSTRKVRDTSRDIRRILDESRKMLEDVVREIKDLVRRLEELIRGGVSEETVEKVLREIEELLKELKKTSERTLKEIEDILRRSEEESRRTIREIEELLRRLEERITDKDTLDKVREDAERVLEEDKKVADDDRKTVEDVIREDKRLLKRVEEEVKRVIKEVDDAAK

SEQ ID NO: 8993 - protein, 181 aa, Artificial Sequence; identical to SEQ ID NO: 8992
  Synthetic

SEQ ID NO: 8994 - protein, 181 aa, Artificial Sequence
  Synthetic
SEVDRAVETIRRILEESEKIIRKVVREIEEILDRSRRLLEKSSEEIEDLVRRLKELIEGGTDETSVEEVLRRIEEILKESERTSTETLKTIEDLLRELERISRKTLEEIRRLLEDVKRRITDERLLREAEKDVRRVVEEDEKVLRDVARRVEEVIKADKKLLREDEKTVREVIERVKETAR

SEQ ID NO: 8995 - protein, 181 aa, Artificial Sequence; identical to SEQ ID NO: 8994
  Synthetic

SEQ ID NO: 8996 - protein, 181 aa, Artificial Sequence
  Synthetic
DEFREAVRRIKEIIDDSRRKLEKNVKENEELLKRSDDELRKSSEDIKKLLEELRRLIEGGADERIVKRILEEIEDILRKSEKRSRETLEESKESLRRSEKTSRETEKRIKELLEELAKRIKDEKSLREVEERVERLLEDDRRLLEENARRVEDLIRKDKEALDRDRKTVEDVKREVEKDAR

SEQ ID NO: 8997 - protein, 181 aa, Artificial Sequence; identical to SEQ ID NO: 8996
  Synthetic

SEQ ID NO: 8998 - protein, 181 aa, Artificial Sequence
  Synthetic
SEVDEVVKRIAEIVKTSKDELREAVKRIEDIVRRSEKMVRDNLRENERLVRELDKLAKGGADERVVEEIKRRSEDSLRKSEELSKKTLDEIRKLLDDVRKRSKETLDRIRELLERIKKKIKDKEKLDRVTETVRRLIEEDKRALEDVERKVEDVIRRDREVLERNRREVERLIKEIEDKRR

SEQ ID NO: 8999 - protein, 181 aa, Artificial Sequence; identical to SEQ ID NO: 8998
  Synthetic

SEQ ID NO: 9000 - protein, 181 aa, Artificial Sequence
  Synthetic
KDAERAVEEIRKILEDSKEKMERNVRENEKLVRDSRRKLEENVERNEKLVRDLKRLKEGGADDEIVRRIKEESKKSLKESEKTSKKTLEESERSLRESEKVSKKTIDEIRRLLKEIRERITDKDTLKRVTDEVRRVVEEDKRVLEENRRRVEKLIEEDKRALDENRERVRKLIEDIDKDAT

SEQ ID NO: 9001 - protein, 181 aa, Artificial Sequence; identical to SEQ ID NO: 9000
  Synthetic

SEQ ID NO: 9002 - protein, 181 aa, Artificial Sequence
  Synthetic
DEVEDAVEKLKRLVDELERLLREAVRRIEKILEDSTRKVRKNLEENKELVKRLRELIKNGVPEDSVRKVLRESKESLRRSEETSKETLERIKRLLDEVRELVERVKRELDRLLRELEKRIKDKDLLRKVAEVVRRLEEEIRRLLEEAKRVVDEVIKKDRTVMERNREEVERLIREIEETAR

SEQ ID NO: 9003 - protein, 181 aa, Artificial Sequence; identical to SEQ ID NO: 9002
  Synthetic

SEQ ID NO: 9004 - protein, 181 aa, Artificial Sequence
  Synthetic
SEVDEVVERIRRIIKKSKEELDKAVRDIEEILRRLEKELRDNVRENEKLVEDVRRAIEGGMDRKDVKRVLKESEDSLRESEKRVEEVLRDIKRRLKEVRETSRRTIEEIERLLREIARRITDKDKLERVSREAKRVLKEDEEALRDVEKKVTDVIEAVKKMLEDNRDRVRRLIEEIKRRAT

SEQ ID NO: 9005 - protein, 181 aa, Artificial Sequence; identical to SEQ ID NO: 9004
  Synthetic

SEQ ID NO: 9006 - protein, 184 aa, Artificial Sequence
  Synthetic
DEIREAVKRIRRLLEESHRENKEIVDRLRKLVEESHRKNEKLKRELEELVKKLKEIIDKDKDKDTLTKIVEDIKRRLDEILKRADEENERINRKLREILEEVRRRNEEVNKEIKDLLDDIRRRVDSEDLKRAEEEIRKVSEDNKRSVDRVREVVKRLSDENRRSLEEVREVVKRLIREVEEARR

SEQ ID NO: 9007 - protein, 184 aa, Artificial Sequence; identical to SEQ ID NO: 9006
  Synthetic

SEQ ID NO: 9008 - protein, 184 aa, Artificial Sequence
  Synthetic
DEIRKVVKEITDLLKKSNDKNRKVVEEIRDLLRKSKKLADELVERLRKLVEDLRRRIDKLSDKRTAEDIVRRIIEELKRILKEIEDLARRINREIERLVEEVERDNRDVNRKIEELLKDIARRVDSEDLKRVEERAREVSRRNEESMRRVKEDADRVSEKNKEVLDRVREEVKRLIEEVRETLR

SEQ ID NO: 9009 - protein, 184 aa, Artificial Sequence; identical to SEQ ID NO: 9008
  Synthetic

SEQ ID NO: 9010 - protein, 184 aa, Artificial Sequence
  Synthetic
DRIRDVAREIRELLKRSNDENRKVVEEVRRLLKESNDTNKRVVDEVRELLERLKEIARRLKDKDTLKKEVDKIIRELERVMEDVKRKNDEINERLKKLLEDVKRKNDDVNRKIDELLKTIEREVDSEDLKRIRREVEKVSEDNKRSAKEVEDEARKVSEDNERSVRDVKEKADRVIKEVEDEDR

SEQ ID NO: 9011 - protein, 184 aa, Artificial Sequence; identical to SEQ ID NO: 9010
  Synthetic

SEQ ID NO: 9012 - protein, 178 aa, Artificial Sequence
  Synthetic
DEERKIKRVLDEVDKHSKRVIAEAKRVVDEVLREVEKVVRRNKEVLDEILREVKRILDEGKITEEVLKEAEKRLRDNKRRLEELLRDAERRLRDIKRELERLLEESRKVVEDVERKVRKDGAREELIKTIRKVNKEIEDRVRDLIKTVRDILRRIEEEVRKSIEDSKRLLRELEARAE

SEQ ID NO: 9013 - protein, 178 aa, Artificial Sequence; identical to SEQ ID NO: 9012
  Synthetic

SEQ ID NO: 9014 - protein, 176 aa, Artificial Sequence
  Synthetic
SVVEDLKRTVEEVVKKSEEILKEDRKTVEKVVEEVKKSDKEDRDDVDRVVKEVRKRIRDKRLEDELKKALDTNRKLVRESTEKLKKLLEDNERANKRNKEELDRLLDEVREVLRMDKKDLADKVKKDAEEVLKRSKEHVDRSIDRTREILKRLRETNEESIKRTRDILRKIAEEAR

SEQ ID NO: 9015 - protein, 176 aa, Artificial Sequence; identical to SEQ ID NO: 9014
  Synthetic

SEQ ID NO: 9016 - protein, 176 aa, Artificial Sequence
  Synthetic
SVSEELKKKVEKVARDVERSLERDATEVTKVVEEVKKSDRKDEETVKRVVKRVDELIRDERLKEELERALRDNERLVRESTKNLEDVKRKNEKILREIRKKLRELLEEVAKALRSDKREVAEKVIRDAEKVLDDIRRMNEESIRDTRRVLEENKRKNEESIRKTEEILRRIEEESR

SEQ ID NO: 9017 - protein, 176 aa, Artificial Sequence; identical to SEQ ID NO: 9016
  Synthetic

SEQ ID NO: 9018 - protein, 184 aa, Artificial Sequence
  Synthetic
SEVDEVLKELERINRENHREVEELLRRLERILRESKKHIKEVIEDLRRRLKELEDEVRRRKDEDVRRRLRELVERIEREVERVIRRNDKLVKEAEERVKEAVKRLERSAEELRKKVTRVVERLSDEKKVRELEEEARRVKRSTEEVIKRLRDSVEKLVKDSERVLRELKKEVERVVEEIDKMIK

SEQ ID NO: 9019 - protein, 184 aa, Artificial Sequence; identical to SEQ ID NO: 9018
  Synthetic

SEQ ID NO: 9020 - protein, 183 aa, Artificial Sequence
  Synthetic
DEVEKALEESKKSNEENHRKVKKVLESAKDINRRNHDLVRDVIRKLEEILRRIEKVVREGRDKREIKRIEEEIKKTVKKVVEDLRKSLDDLRKEVTKVLEDLKESLKRNEDRMRDVVEKIGRDFDKEVTELRESSRRSIESTREAVRTLEEAVREVIKSTDEAVKRLEATVKRIEEEIRKSMK

SEQ ID NO: 9021 - protein, 183 aa, Artificial Sequence; identical to SEQ ID NO: 9020
  Synthetic

SEQ ID NO: 9022 - protein, 183 aa, Artificial Sequence
  Synthetic
DDVERVLKKSRDSNRENHEKVKRVIEKSDRSNEDNHRLVEDAIRKAEEILEEVERLVTAGEDKRKAEEIVKELRDLVREVKRRLDESLKRNEEEIRKVVEELERSLDKNRKEIREVLERIGRDFKEEVDELRKSSEDSIRSTEDVVRKLEETSKRSIRSTEDVARKLEEAVRRIERRIRERTR

SEQ ID NO: 9023 - protein, 183 aa, Artificial Sequence; identical to SEQ ID NO: 9022
  Synthetic

SEQ ID NO: 9024 - protein, 183 aa, Artificial Sequence
  Synthetic
SEVEEVLKRSKESVERVDRDVRRVLRELEDLNRKNHKRVEEVIRDAERILREVEDMVRRGVEKEKLEKIVRDLRRTVEKVLKELRDSLREIKRKVDEVLERLERIIRENEELIRRALERIGRDLDKEVDELRKSSEKSVEDIKRVVDRLRDSARKIIKSTEDVVKELERRVREVIKRIKEEAT

SEQ ID NO: 9025 - protein, 183 aa, Artificial Sequence; identical to SEQ ID NO: 9024
  Synthetic

SEQ ID NO: 9026 - protein, 187 aa, Artificial Sequence
  Synthetic
SEIEEIIKRIEKLLRDDEKKIRDSIKRSEDLLREANRENKESIDRVRELLEKVKRLRERIDSEEVRERVERVLREIERLLEEDRKRNEDISRKNEKLLRETEDESRKSIETIKRLLEKVRTDSGDKKAEEEVRRLEKRVRDVLRELEKTLKRVTEVHKETTKENEKSARRVKREVEKVIEEVERTRT

SEQ ID NO: 9027 - protein, 187 aa, Artificial Sequence; identical to SEQ ID NO: 9026
  Synthetic

SEQ ID NO: 9028 - protein, 187 aa, Artificial Sequence
  Synthetic
SEIEEIIRRIEELEERLKRELDRSIRTSEKLLEDAREINKESIRRVEKLLEEIRRVVDKIDSEEVTRLVEKVLRDIERLVTEDEERNKRMTKRNEDLLKRIEEEVKRIIREIEETLRKVKEDSGDKKAEERVRALEKAVKDVLESLKRLLDEVRKRHKESSEDNERSLKRSKEEAEKVIKAVEDERR

SEQ ID NO: 9029 - protein, 187 aa, Artificial Sequence; identical to SEQ ID NO: 9028
  Synthetic

SEQ ID NO: 9030 - protein, 187 aa, Artificial Sequence
  Synthetic
SEIEDIIRRIRKLLEEDKEKIERSIRESRRLLEEAKRINEKSIEDVKRLLREIEDVVDKIDSREVEDLVRKIEEEVKRLVDEDRKRNEDMTRKNEELLKDVTEKSKKSIRDIEKLLEEAARRSGDEKMREKVERLREDVDRVRKELEKTLETVTRSHKRSSEENKRSLEESERTARKVIEDIRRRDR

SEQ ID NO: 9031 - protein, 187 aa, Artificial Sequence; identical to SEQ ID NO: 9030
  Synthetic

SEQ ID NO: 9032 - protein, 187 aa, Artificial Sequence
  Synthetic
KDIEEVLKRIKDLLEDIRRRLKESEERSRKLLEEAREINERSIERVRRLLEEIRRLKEEIDSKDVRELIEKVLKEIEDLLRDDKRKNEDMTRKNEELLKKLKKEIEDVLREIKELLDRARKRSGREEMERKVRELERAVREVIKEVEKLLTDVARKHKKVSRDNKESLRRSEEEARRVIRAVEETDR

SEQ ID NO: 9033 - protein, 187 aa, Artificial Sequence; identical to SEQ ID NO: 9032
  Synthetic

SEQ ID NO: 9034 - protein, 176 aa, Artificial Sequence
  Synthetic
STLETVEKKVEEVIRENEKSMRESEEKVDRSTKRIEDVLRRLEETIRKTSDDIAKDVKGERVKEVLEENRRLLEEAKKLVDEVLETNKKLLEDDKRLNEEVSKTLKKLLEEIKRVDTREDATRVIEEAKRILDEARKLNEETIRRSEELVRRIERVIEEIIKRSEKLLEDVRRESK

SEQ ID NO: 9035 - protein, 176 aa, Artificial Sequence; identical to SEQ ID NO: 9034
  Synthetic

SEQ ID NO: 9036 - protein, 176 aa, Artificial Sequence
  Synthetic
SVLDDVRKKVEEVLDRNRELADRSRRTVEEVLRENERVMEESKRTVDEVIKRVAEKLKGEKVEEVIRRLEKLAEEDRRRNKEVTEELKRLLEELRRKNEEVTERLKRLEEEIKRVDVREDAERMIERLKRILDRVEEENRRAIEELREVLERVRDDNRRTIEELERILKRVEEESR

SEQ ID NO: 9037 - protein, 176 aa, Artificial Sequence; identical to SEQ ID NO: 9036
  Synthetic

SEQ ID NO: 9038 - protein, 176 aa, Artificial Sequence
  Synthetic
STVETVREEVERVLKHSDDLIKEVEDVNRRVEEEIKRVIRELEEENERLVREVRKKVKGEILKEIEKRLRDNSEKVREVAERAKKLLEENTRRVKDILRESRKLVKDLLDEVERVTREEEAREIIKRLREVNKRTKEKLDELIKHSEEVLERVKRLIDELRKHSEEVLEDLRRRAK

SEQ ID NO: 9039 - protein, 176 aa, Artificial Sequence; identical to SEQ ID NO: 9038
  Synthetic

SEQ ID NO: 9040 - protein, 176 aa, Artificial Sequence
  Synthetic
DEVERVAKEVEDVLREVEKLIRDVRRKVEEVLKHSEEVAKRVRDTNRELVKEVERDIKSEELKEARKALEDNSRKVKEILDESEKLVRELLRRVEELLKKVRKEIEDLLRKVKDVKDEKELRDIIRRLKEVLDKLKKDLEDIIRRLEEVNRESERLAREAIRHSEEVLDKLRKDSK

SEQ ID NO: 9041 - protein, 176 aa, Artificial Sequence; identical to SEQ ID NO: 9040
  Synthetic

SEQ ID NO: 9042 - protein, 175 aa, Artificial Sequence
  Synthetic
REVEEVKKRIREALEESERVIRENKKKNEELLDRVRKEIERNKKKNEEVLKRAKEVTKAGRPKSRVLEEIRRIVEESRRHLDKVLEDVERILRDSKRHVDEVNRKSETIARELKKKVKDVEDVKRKIDRMVEESRKLVEDLKRESDRVEEEVRKLVKTIKDEITRSLDEVRKDAE

SEQ ID NO: 9043 - protein, 175 aa, Artificial Sequence; identical to SEQ ID NO: 9042
  Synthetic

SEQ ID NO: 9044 - protein, 175 aa, Artificial Sequence
  Synthetic
SEVDEVRKDIERILRKSERDIRRNKEENKRLLDEVRRRIEENRKENEDLLKRIEELRRAGRPESEVDEEVRKIIEKSKEHVDRVLEEIEEELRRSKEHLKRVNEESEEIAKELKKRVKDVEEVKKEIDKAVEDSKRLVEDAERVSDEVRERVRRLVERLKEESDRVEREVEKRTT

SEQ ID NO: 9045 - protein, 175 aa, Artificial Sequence; identical to SEQ ID NO: 9044
  Synthetic

SEQ ID NO: 9046 - protein, 185 aa, Artificial Sequence
  Synthetic
SEVEEVLRRAEKLSEDNKRENDESLERLRRIVEKVREENEESVKTLEKILKEVEEVVRRNKEVQEELRKIVEELRDLIDKDLRRTDDIIRELRKRIEEDLKRSKDIVKEIRDTIREVVERLKKDDKKEVIKRLEDEVRRLEEDNKRSIKKSEDEIRKLVERLKRSAERSDEVIRKLEKDAEDLIR

SEQ ID NO: 9047 - protein, 185 aa, Artificial Sequence; identical to SEQ ID NO: 9046
  Synthetic

SEQ ID NO: 9048 - protein, 181 aa, Artificial Sequence
  Synthetic
DEVERILEDSKRLVDELRERVERVIEESKRLLDDLRRKVEEVVRRLEKIVEDLKRMIEGGVDREVVRKVERDLKELVREVERRIEKVSKENTELLDRVEKEIRKVVRTNSELAKEALRRIGDEDKVRELKETADRSNEEIKRVLEKIKRMIEDTNRKIKKLLEEIRDVARRVLEEVREVAR

SEQ ID NO: 9049 - protein, 181 aa, Artificial Sequence; identical to SEQ ID NO: 9048
  Synthetic

SEQ ID NO: 9050 - protein, 181 aa, Artificial Sequence
  Synthetic
KEVEDVLRESKRLVEDLERRSERSIEESKRLLKELEDLVEEVIRRSEESIDRLRELIKGGTSEEAIKEVKKTNERLIKEVERLIREVSKRNTDLVEENRKLVEKVVRDNSRLLEELARRIGDEKKVRDAEREARDSNDKIRRSLEKVERVVRETNRRIKELLEKIERVIRDTDRKIAEEAK

SEQ ID NO: 9051 - protein, 181 aa, Artificial Sequence; identical to SEQ ID NO: 9050
  Synthetic

SEQ ID NO: 9052 - protein, 181 aa, Artificial Sequence
  Synthetic
SEVEKIVRDSEKLLEDLKRELEKVIKDSDDLVRELKKRVTEVLERLRRIVEELRKLIEGGASEEVLERVLRRLEELIRRVEEEIRRVVEENSKLVEELKRRIEEVSRRNTELVKDAARKIGDEEKVRRLEKEARRTNEEIRKLLEKVDEVARRSNERIKAVLEEIKREIEKLKREVEKDAK

SEQ ID NO: 9053 - protein, 181 aa, Artificial Sequence; identical to SEQ ID NO: 9052
  Synthetic

SEQ ID NO: 9054 - protein, 181 aa, Artificial Sequence
  Synthetic
SEIEEVLKKSKKLVDDLRKEVEETIRESKKTVDDLDKEIKEVVRRSEESLDRLKKLIDGGSSEETIKKVVRDNERLVKEVLKSIEEVLKRNKKLNDDSNERAKRVSDTNTRLVEEVVRRIGDERKVDEIRRAVEETNEEIKRVVDEDNKAVKRSLEEIERVAEEIKRVAEETLKAIEDARR

SEQ ID NO: 9055 - protein, 181 aa, Artificial Sequence; identical to SEQ ID NO: 9054
  Synthetic

SEQ ID NO: 9056 - protein, 182 aa, Artificial Sequence
  Synthetic
DEVEELVRRLEELVKRSRDTNRKIIKEIRELSERLKRELEKIARELEKLVEDLKEEVKRLKDKDTLRKMIRDVEEKIRRLLEKVERLVRESLRRHEKLLDDVRRTNKEISDRLKTLLDEIRRRNVDVEKIEDVVRRLLEENERVLRRTEEEARRVLETNRDLLRKIREVVDRLEKEIREAEK

SEQ ID NO: 9057 - protein, 182 aa, Artificial Sequence; identical to SEQ ID NO: 9056
  Synthetic

SEQ ID NO: 9058 - protein, 182 aa, Artificial Sequence
  Synthetic
SDADRVAEELKKLVEDSRRENERVIEESKRLVKENEDRNRELIERLKKLVDKLRDILEKEKDKKTLDDIVREILERLKRLLEKVEDENRKSHEENKRLLEDVKRKNKRISDELKRLLEEIERRNVDVDKVRETVKRLLEENKRVMEKTEEVAKKSSEDIKRVADETRRRAEELLKEVDELRK

SEQ ID NO: 9059 - protein, 182 aa, Artificial Sequence; identical to SEQ ID NO: 9058
  Synthetic

SEQ ID NO: 9060 - protein, 182 aa, Artificial Sequence
  Synthetic
SEADEMLRRLKELVDRSRDTNRKILKRSEDLVRDSKKKNDDIIRELRRLLEELRELARRLKDKDTLRKIVEEVKERIRRLLEEVERTNREVTERNRELLREVEERNRRISKELKDLLREAEERNVKTDDVRREVERLLRDNKRVLDETRKAAEESTRRNKKVLEESREVVKDVLKKIEDTDR

SEQ ID NO: 9061 - protein, 182 aa, Artificial Sequence; identical to SEQ ID NO: 9060
  Synthetic

SEQ ID NO: 9062 - protein, 182 aa, Artificial Sequence
  Synthetic
DEVREVAERLRRLVDESRKRNEEVIKESEALVDRVRKTNEEVMKRLRELIDKLEKDIRRLKDKKTVEKIIREVLKKIDELLKRVERTNREISKENKRLLDEVRKTNEEISRRLKKLLEDIRRRNVDVETIERVVRELLEENKEVLRKTEEMVKRSTETNKRLLERSKEVADRLRERIKEAAK

SEQ ID NO: 9063 - protein, 182 aa, Artificial Sequence; identical to SEQ ID NO: 9062
  Synthetic

SEQ ID NO: 9064 - protein, 182 aa, Artificial Sequence
  Synthetic
DEVDELLKRLRKLVDEVRKENDKMVKESKRLVEDLKRKIDEIIERIERLLEELEKILKDTEDKDTLRKIVEEIKRRLRRLLEELKRIIEKALRDNKKLLDEVRKRNKEISDELRRLLEEIRRRNVRVEDIEREAERLLRENEELLRRSEEVIRRSTEKIKKVLRDAEERAREILKRVEDAAK

SEQ ID NO: 9065 - protein, 182 aa, Artificial Sequence; identical to SEQ ID NO: 9064
  Synthetic

SEQ ID NO: 9066 - protein, 184 aa, Artificial Sequence
  Synthetic
DEVEEVKKKLREIVKRDRDLIERVREELKEILDRNREINRRAIEDLKRILEEVDELVKRGTDKKDLEKILRDIERLVEEVRRRSRELVERAKRLIEKVVTDSKKTVERIRRDVEKVLDDLRRKNKEELIRDVERVVREVLRRIEKSIRDLDRVIRDVLDKSRELIKRSEDVAKRVVDTLREKAR

SEQ ID NO: 9067 - protein, 184 aa, Artificial Sequence; identical to SEQ ID NO: 9066
  Synthetic

SEQ ID NO: 9068 - protein, 186 aa, Artificial Sequence
  Synthetic
DEVETVKKELKELADEVKERNERSIRDSERLLEEVKRRNEKSIRDLERLVEELEDVLRKRGSEDEDVKRKVEEVDRRIDKLAEDDKRINEKVLKENSDLVKRDEDINRKILEDVRRLVEKVRREIGDEKKVKEVTDEVKKVLDEIRELDKRSRDAVRRTNEEIKRLDKESKDVVDRVKKKVEDAVR

SEQ ID NO: 9069 - protein, 186 aa, Artificial Sequence; identical to SEQ ID NO: 9068
  Synthetic

SEQ ID NO: 9070 - protein, 186 aa, Artificial Sequence
  Synthetic
REVEEIIERLKKLLKEIAERNTESIKELEELVRRIAEDNKRIIEELRRLLEELADVVRKKGSESREVEEKVREVLRRLEKLLEDVRRINEDALRKIEELVKRDADENRTVLKRLEELVRDVARRIGDEKKVREVRKVAEEVLRAIEELDKRSRDAVRRVTKRVKDLDEETKRVVEDVLRRIEELMK

SEQ ID NO: 9071 - protein, 186 aa, Artificial Sequence; identical to SEQ ID NO: 9070
  Synthetic

SEQ ID NO: 9072 - protein, 186 aa, Artificial Sequence
  Synthetic
SRVEEIIEDLRRLLEEIRKENEDSIRRSKELLDRVKEINDTIIKELERLLKDIEKEVREKGSESEEVKKALRRVLEELEKLLRRVAEINEEVLRRNSKLVEEDERRNREVLKELKRLVEELMREIGDEDKVRKVREVAEKVLRDIDKLDRESKEAFRRTNEEIRKLDEDTRRVAERVKKAIEDLAK

SEQ ID NO: 9073 - protein, 186 aa, Artificial Sequence; identical to SEQ ID NO: 9072
  Synthetic

SEQ ID NO: 9074 - protein, 186 aa, Artificial Sequence
  Synthetic
SEVEEIIRRLEELVREVAKRNEDIIKRSRDLIRKVKEDNRRSEEELRDLSRRIADIVRKKGSESEEVKRELDKALRRLEELIKRDAEINEKVLRENSTLARRVEEINERILRELKKLVDDIARKIGDERKVREVRRVAKKVLEDVKTLDDKTREVARRTNEDIKRLDEKSRKVIEEVRREIEELKR

SEQ ID NO: 9075 - protein, 186 aa, Artificial Sequence; identical to SEQ ID NO: 9074
  Synthetic

SEQ ID NO: 9076 - protein, 186 aa, Artificial Sequence
  Synthetic
SEVDEIIKELERLLREIARENERIIRESRKLADEVRKRNEDAIRKLEELVRRLADMVRRKGSESEEVKKLIEDVLREIERLLKRIEEENREVVKRNSELVERVRRINEEILRRVKELVEKIARDIGDKDKVTKVKKVADDVLREIKKLDDETRRVIEDTNKKIKDLDKKTRDVVRKVLEEVKKLEK

SEQ ID NO: 9077 - protein, 186 aa, Artificial Sequence; identical to SEQ ID NO: 9076
  Synthetic

SEQ ID NO: 9078 - protein, 186 aa, Artificial Sequence
  Synthetic
SDVEDVIRKLETLVDDLRRKVERIKERSRELIKRIAEENRKVIEELERLLEELADVVRRKGSESEEVDRTAEEVRKKVKELLDRVARSNEEILKENSKLLDDIRREIEEVERRIKELAKDIARKIGDEKKVRDVRRVAEKVLREVRRLMEEVERVARKTNRDIERLDEETRRVVEKVRKEIEDLRR

SEQ ID NO: 9079 - protein, 186 aa, Artificial Sequence; identical to SEQ ID NO: 9078
  Synthetic

SEQ ID NO: 9080 - protein, 176 aa, Artificial Sequence
  Synthetic
SAKDKIAEVAKRVLTENKKLLEESEEVARRTSEESKRLLKESEDVVRRVLDEIRREIKGEKAKKVLDTLKEILDRDRKLNEESHERNKRLLDEVRRMNEEVSKELRRLLEEVREIRDERLIEEVIRRLEELLKEVKKKNEEVIRRSKELIDRDRDLNRRSIEELERLIREVRKESK

SEQ ID NO: 9081 - protein, 176 aa, Artificial Sequence; identical to SEQ ID NO: 9080
  Synthetic

SEQ ID NO: 9082 - protein, 176 aa, Artificial Sequence
  Synthetic
SAKEKIKEVAERVEKRNKELLEESERVIKEVSERSERLLDESRKVVKRSTEEIRDKIKGEEAEKVLRDNEDLLREDEELNKTSHERNKRLLDEVRKRNKRVSDELRKLLEEVSRIDDEELIREVIERLKELVDRVEKENRKAIETSRRLLKEDEDLNRESIKRSEELVKDVRRRST

SEQ ID NO: 9083 - protein, 176 aa, Artificial Sequence; identical to SEQ ID NO: 9082
  Synthetic

SEQ ID NO: 9084 - protein, 176 aa, Artificial Sequence
  Synthetic
DARKELEEVVRRVEEEIRRLLKDIEDVAREVNRRSEKLLRETEEVIRRSTEEIKRDVKSELVKEILERNEELLRRVKKLNEEVNEELRRILDEIRRLVEEVEERIKKLLEEAKRVNERERVKEIIERLRRLVEELKKLVDEVRKRLEDVVRELKERNKKVIDDSKDLVRRAREESR

SEQ ID NO: 9085 - protein, 176 aa, Artificial Sequence; identical to SEQ ID NO: 9084
  Synthetic

SEQ ID NO: 9086 - protein, 182 aa, Artificial Sequence
  Synthetic
DFSERLDEVLRKVRTDIKKLVEKVRRVVEDSRRRVEKLVEDVRRSSEEVLKTVKELLDRGLIEERVVEDVKRIIEETKEKLDRALEKAERDLRDSERHLDEVLKEIEKIIEEIREEVERLGGTDEVVRRLEKRLRDALKEAEDKVRRDEERNREVLERLEKIVRDLHRENEKAVEDVADRAR

SEQ ID NO: 9087 - protein, 182 aa, Artificial Sequence; identical to SEQ ID NO: 9086
  Synthetic

SEQ ID NO: 9088 - protein, 182 aa, Artificial Sequence
  Synthetic
DLSEEVKRVIEEVRKRIEELVDEVRKSTEEVIKRVRRLVEEVERVVEDSRRKVDKLLKEGRITEEVVKRAEKILRDSKKHLEEVERKVRDDLRRSEEEIRRVLKEIEDRLRELKKKIDKLGGTEEVVRRLKEELEKALRDAERIVKELHEENRKVLEDVKRMVDEDKKKNERVVDEVRRDAK

SEQ ID NO: 9089 - protein, 182 aa, Artificial Sequence; identical to SEQ ID NO: 9088
  Synthetic

SEQ ID NO: 9090 - protein, 182 aa, Artificial Sequence
  Synthetic
SLSEEVKKVIREVEEDVKRLVRELRESSERVLKEIKKLVDEVRRVLEESKERVKKLEREGKITDEVVREVEEEVKKSKENLDRVLEEIRKILERTKEKVDRVLEEIRKILKDIEDRIEELGGTDEVVRRLKKRLKEALDRLRDIARKLDKENKEALDEARRIVEENKRRNEKVVEDVERRAE

SEQ ID NO: 9091 - protein, 182 aa, Artificial Sequence; identical to SEQ ID NO: 9090
  Synthetic

SEQ ID NO: 9092 - protein, 185 aa, Artificial Sequence
  Synthetic
DEVEELKKDLKRVLEEVRKIVEDIHRTNEEVLREVEKIVEDIHRENKEVLEKVEKIMRELKDVDEALRRLKEEVERVLKRSEDKIKDLLDKVEKVLEESERRVRRLLREVERALRRVAEEVRKIDDEELVREVKRVVDELEKEVRDLLRRLKESTDKLREDVRRLAERLRDSLREMERDVREKTR

SEQ ID NO: 9093 - protein, 185 aa, Artificial Sequence; identical to SEQ ID NO: 9092
  Synthetic

SEQ ID NO: 9094 - protein, 185 aa, Artificial Sequence
  Synthetic
DEVERLKRELETVLRDVERIVEEIHRENKKNLDKVKKIVEEIHKENREVLEKVRKIMEELKDDDETLRRLLEEVDEMLDRSRRKIEELLRESKESADRSRKKVRDLLERVKEVADRVREEVKRIDDKKLVEEVEEVVKRVEEAVEELARRLEKSTRDVVEESKKLARELEKSLEEVKEEVRKLIT

SEQ ID NO: 9095 - protein, 185 aa, Artificial Sequence; identical to SEQ ID NO: 9094
  Synthetic

SEQ ID NO: 9096 - protein, 185 aa, Artificial Sequence
  Synthetic
KELEELIKRLKRVLEENRDIVRKIHEDNERNLDELRKIVERIHKENKRVLEEVKKIFEELKDDDKVLRELLEKVKRVADESRERVKRALERSKESVRESEERVKEALERSKKMLDDVREDVRRIDDERVVREVERVIKKLEDDSRKTVRDLEESTKEVEKRSKELADELEKSIEDLERRVDEDTK

SEQ ID NO: 9097 - protein, 185 aa, Artificial Sequence; identical to SEQ ID NO: 9096
  Synthetic

SEQ ID NO: 9098 - protein, 185 aa, Artificial Sequence
  Synthetic
REVEELKKELERVLKKVADLVEENERRNRKNLEDLRRIAEEIHRRNEEVVKRVRDTLERLRDVDEVLKRLLDEVEEVLKESEKRVRDALRRSEESVKKSEEDVKRILDEVKERLDRVREKLKRIDDEKLVRDVERVVEKVERDVKRLADRVREVLKESSDRSRELVERLRESLRKAREEVRKAIE

SEQ ID NO: 9099 - protein, 185 aa, Artificial Sequence; identical to SEQ ID NO: 9098
  Synthetic

SEQ ID NO: 9100 - protein, 186 aa, Artificial Sequence
  Synthetic
KDVDEVLKRLRELIDELRKTNERVKRELKKLVEDLERKNKDVERRLRELIRTLEEIARKTKDKETLRKILKEILDRIEKLLREAEETNRRAKEEIERLLKKAHDKNRKIEKEIDKLLKDITRRAKDDKDMVKKVRDVIEDLKREVERLDRETKEVVERVKRKIEKTNRDSKKVIDDLRREVERLRK

SEQ ID NO: 9101 - protein, 186 aa, Artificial Sequence; identical to SEQ ID NO: 9100
  Synthetic

SEQ ID NO: 9102 - protein, 186 aa, Artificial Sequence
  Synthetic
SEAERIVEELRKLIEDLRRKNEEVKERLKRLVREDEKRNEEVLKELEDRADELRKLVEKLSDKDTLKKILERAREEIKRLVKEIREENKRSVEKIEELLKRARDTNETILRRIEEEVRKAEKDLKDDKDVVDRLRRVIEDLKRTVEKSNEDSDRVIKEVKKRIDDSLKRVEDVIRRVKETIDRLEK

SEQ ID NO: 9103 - protein, 186 aa, Artificial Sequence; identical to SEQ ID NO: 9102
  Synthetic

SEQ ID NO: 9104 - protein, 186 aa, Artificial Sequence
  Synthetic
SDVDRVAKDLEKLIRDLEKINRDVSRENKELIEKDKKINEDVLRELDRLVEELERLVRELSDKETLKKILEDAVKEIRRLLEEIKERNDRSLERSKELLRRAEETNRDIERKIKDLLKRITDRIKDKKEMLEKIRKVAERLRREVERSNEESKKSADEAEKTIRKSLKEVEERIREVEKKIRDLKR

SEQ ID NO: 9105 - protein, 186 aa, Artificial Sequence; identical to SEQ ID NO: 9104
  Synthetic

SEQ ID NO: 9106 - protein, 186 aa, Artificial Sequence
  Synthetic
SEVDRVLKELDELIRTLEELNKKVSRENRELIKEDKKRNDEVVKRLEDLIRELKERVDKLKDKKTLKDMLRRMKEEIDKLLKEIRERNEESLKESDRLLREVHKLNRDIKKEIEDLLRDIERKIKDDKDALKKVREVIERLKEEVERLDRETKKSADEAKEAIKRSLEEVEDVVRKIREKIKKAEE

SEQ ID NO: 9107 - protein, 186 aa, Artificial Sequence; identical to SEQ ID NO: 9106
  Synthetic

SEQ ID NO: 9108 - protein, 186 aa, Artificial Sequence
  Synthetic
DEVERAKEELEKLVRKDEEDNDRVRKRLEELIRRLKEENDRVLEELRRLSEELDRLAKELKDKDTLRRRLEEARKEIEKLMREAHEENKRILEEIEKLLRDIEERNRESVERIERLLKKIEKDIKDDKEALDEVRRVIEEVKREIERSLRESREVIKELKERVKELDERTREVVRKVKEEIDELER

SEQ ID NO: 9109 - protein, 186 aa, Artificial Sequence; identical to SEQ ID NO: 9108
  Synthetic

SEQ ID NO: 9110 - protein, 186 aa, Artificial Sequence
  Synthetic
SEVDDVLRRLDKLVKDDKRTNDRIVTRDRETVKRVKEVNREIVERLERLVDRVREIVERLKDKDTLKKLVDEARKDIERLLKEAHDMNRESIERNRESVREVREINEDSVRKIRKLLREIETRVKDDEDALRKVREVIRRVEEDIKRSLRDSERVIEEVVTRNEKVDRETKKVVDEAKREIDERAK

SEQ ID NO: 9111 - protein, 186 aa, Artificial Sequence; identical to SEQ ID NO: 9110
  Synthetic

SEQ ID NO: 9112 - protein, 185 aa, Artificial Sequence
  Synthetic
SELEKLIEELERVLKRIEEVSRELDKELETVLDEIRRASKRLNDELRRALEEIARAATENKDIKELLEKLLREAKRVLDEVRKRSEELLRKLEEVLERVRKKSDDLLKELEEVLDRVKRTIERDIKSKLLERAEDVIRRVREALEELVRTNRESLERVERAARELNRRNEESLERARREVEKLRR

SEQ ID NO: 9113 - protein, 185 aa, Artificial Sequence; identical to SEQ ID NO: 9112
  Synthetic

SEQ ID NO: 9114 - protein, 185 aa, Artificial Sequence
  Synthetic
DEVRELIDRLRKALEEITRESRRLDEELRKVLEEVERRVEELSRRNKEMLDRVREKVTRRKDDTELLKEIERELKEILKRSDDEAKRILREVEEILRRVEEDSRRLLEKVRRVLKEVEERARRDVKSRLLEELKRVIDEVRREVERLNKKNKESLDRARRRVEDLLRRLEESVRRVEEELKKLST

SEQ ID NO: 9115 - protein, 185 aa, Artificial Sequence; identical to SEQ ID NO: 9114
  Synthetic

SEQ ID NO: 9116 - protein, 181 aa, Artificial Sequence
  Synthetic
SELERVIRESERTVEESHKHVREVIRKLRDIVRRSHEHVREVIERSKESVERVRDLVRRGVPREELKRILDEDKKRVDDVLRTNEELVRRIKEDVKRVLDENRKLLDEDRKRVKEVIDRITDEELVRRLKKVLDESEKAVTRNIEEIKKVLEDVVRKAEKNIREIAEVLERSTRAAKKDTD

SEQ ID NO: 9117 - protein, 181 aa, Artificial Sequence; identical to SEQ ID NO: 9116
  Synthetic

SEQ ID NO: 9118 - protein, 185 aa, Artificial Sequence
  Synthetic
ELEKRIDEVLKRVEDEIRKSIRENEEVLKDVERAVKELIKENERVLEEVREEVRKIIERVKEDKDLVRRLEEVAERIKRRVERTSRELDRMLKEVRKEVRRSSEESKRSLEEIRRKVEEAKRRIRSEDIVREVEKELEDILRDNRRLVRESIESLKDVVRRVAELVERSIRELKKMVDEIRKEAE

SEQ ID NO: 9119 - protein, 185 aa, Artificial Sequence; identical to SEQ ID NO: 9118
  Synthetic

SEQ ID NO: 9120 - protein, 185 aa, Artificial Sequence
  Synthetic
KLEERIEKVLEDAERDVRRSEEEIRRVLKEVEDRVRRLLRENEDALRRVEEEVKKIIDRVKDDERLVRDLKRTLDEIRERVKESNKRLEELLRRVEKTVREVLKRSRDSLRKVRTLVEEAKKRVRDEKIVKRVIETLRELLKENRKLVKDVIEDLKRIVKEVEELVRESIERLKDMVRRISEKAK

SEQ ID NO: 9121 - protein, 185 aa, Artificial Sequence; identical to SEQ ID NO: 9120
  Synthetic

SEQ ID NO: 9122 - protein, 180 aa, Artificial Sequence
  Synthetic
KEVEEIIETLKRLSEDLERKVREIIERLKRLSERLERENKEVIKELERLIDELRKLVEDGEDSSMVRRVEKKLEELLRRVKKLNEDVKEESKRLVEEARKVIEKVLRESKELADDARKKVDSEDLRKLDRVVKESERTIRDLLRKLDEVAKRSDDTIERVNDETAKVIERVKRKIEELEK

SEQ ID NO: 9123 - protein, 180 aa, Artificial Sequence; identical to SEQ ID NO: 9122
  Synthetic

SEQ ID NO: 9124 - protein, 180 aa, Artificial Sequence
  Synthetic
REVEEMIKELEELLKDLKEKNERASKRNRELVRRLEEENKRVIEELKKLVKELEDLVRSGEDEKVLREVLKRLEEVLERVRKLNERVLEKIEKSLEEVKRSNERVKRRLKELLEEAERRVDSEKLKELRDVIKEVKKRIDELDEYTRESIRRAKKEIERLNRETKKVIEEVVKRIEEERK

SEQ ID NO: 9125 - protein, 180 aa, Artificial Sequence; identical to SEQ ID NO: 9124
  Synthetic

SEQ ID NO: 9126 - protein, 174 aa, Artificial Sequence
  Synthetic
SEKEEVRRVIEELRRILKRVLEDLRRVVKENEDRLRELKKENEKSLRELEERARRIDIDEKVLRRIEKMIKDSEENVRESVRRNERLLEESKKHMKEVADRVEKILRELRDLVEKGVDVEDLKREIDRVAKEVEEVLEENRRRNEKSVEELRRDSKRNHERNEEVVKEAEDAAR

SEQ ID NO: 9127 - protein, 174 aa, Artificial Sequence; identical to SEQ ID NO: 9126
  Synthetic

SEQ ID NO: 9128 - protein, 174 aa, Artificial Sequence
  Synthetic
SEEERVRKALEELKRELDKVHENNKRSLRENEETLKKLLEDNERSLRELEEEMRRVDIDEKVLREAKRKLDESRKNVERSAKENKDLVDESRKHSDKVRREVEKILRDLEELVRRGVDVEELIKTLRRVAKEVRERSEENDRRNKKSVDELREDSKRNHDENDKVLKKLEKAAE

SEQ ID NO: 9129 - protein, 174 aa, Artificial Sequence; identical to SEQ ID NO: 9128
  Synthetic

SEQ ID NO: 9130 - protein, 178 aa, Artificial Sequence
  Synthetic
DEVEKLEEDSERSLEELRKTVEEVKKRSEDSLRDLERKSRENEKESRRTLRELREKDQDKRLIEELMRRDVEHIKRSLREHERILEEDLRRLKKVLEDLERRIREDLRRLEEVLKRQTDERVRKRVKDAAEKSRRVIEDLLREIKRVADDSRREAKRLLDRNKEVLERSKETADREKK

SEQ ID NO: 9131 - protein, 178 aa, Artificial Sequence; identical to SEQ ID NO: 9130
  Synthetic

SEQ ID NO: 9132 - protein, 178 aa, Artificial Sequence
  Synthetic
DEVEKLAEDSKRSLEKLRREVEKVKRESRESLKRLKEESEKNVRDLRRLLEELRRRPEDKKIIREEVEKALRHLEDSLRRHEEEMRKDVRRLEKVLEKLKKIITEDLRRLEEVLKRLTDERLLKRVKDVMDESRKVIRELLELIKEVIRESKETVKRLLDENKRVADEVRKVVDELRK

SEQ ID NO: 9133 - protein, 178 aa, Artificial Sequence; identical to SEQ ID NO: 9132
  Synthetic

SEQ ID NO: 9134 - protein, 184 aa, Artificial Sequence
  Synthetic
SEVEEVEREVKEVIEELDEIVKRVKEENDDSVRKSKRSLDEIEAEVRRVLKELTDRVTKRKTEDVRRELEKEIDRVRRKLEKILEDNRKKAEEDLTRTRKIAEELRKKIEDVVRRLEEIVKRLDKEEVLERLTRLIEKLKDVIRRLRERLKKSADDSRDVIRRTLEAIKEIIERLKEVIDRLDK

SEQ ID NO: 9135 - protein, 184 aa, Artificial Sequence; identical to SEQ ID NO: 9134
  Synthetic

SEQ ID NO: 9136 - protein, 181 aa, Artificial Sequence
  Synthetic
DEIEKLREDVKKTLEESRKSVEDLERRSEDSIRRSRESVERLKREVKEVIDRLRDARRRGTPEEKIEELLKRVRDRIEEVLRRNERLVEENKKEITRVLDTNRRLNEESNRELKRVLDKTRDKRVLDEIKKLADEDNKTVTDSLKRIRDSAKKVDEVVRESLERIRKVAEEITKVVEDVKR

SEQ ID NO: 9137 - protein, 181 aa, Artificial Sequence; identical to SEQ ID NO: 9136
  Synthetic

SEQ ID NO: 9138 - protein, 181 aa, Artificial Sequence
  Synthetic
SELETLEKSLRDVLKESRDSVEKLRKEVEDTIKESEDSVTKLLKEIEDVIRRLEDLRRRGVPEEAIKKLVREVAEAVKEVLRRNRELNKRSNERAKEVVDRNRKLAEDLLDEIRKVLAKVTDEDVLRRIRRAAEEVRKVAKESVDRIRDLAARDNEVVERSLKKIEEVLRRIKKVADDVAR

SEQ ID NO: 9139 - protein, 181 aa, Artificial Sequence; identical to SEQ ID NO: 9138
  Synthetic

SEQ ID NO: 9140 - protein, 181 aa, Artificial Sequence
  Synthetic
SEIERLEREVREVIKESEESVRRLKKRVDDTVRENEELVKRLEDRVRRMKERLEDARRRGRPEKDIEELLKTIAKEIKDVLEESRESNERSNTDIKRVLEENTKLVKDVLRRIERVLDKSTDDDVKRKIRKVMEEIKKRADDSRRKIEDVARKDNKAVERSLRRIERLLEEITRVVEEIKK

SEQ ID NO: 9141 - protein, 181 aa, Artificial Sequence; identical to SEQ ID NO: 9140
  Synthetic

SEQ ID NO: 9142 - protein, 181 aa, Artificial Sequence
  Synthetic
SELEKLDKESRDSIRKSEDSVRRLEEESEESIERSKRLVEELKRLADEVIRRLEDMARRGTDKTKIRELIKRLKELAEEVVKRNSELVERNRRRIEEVERTNEELVRRNEETIKEVLKKTRDEDVLRAIEESMKRARKAVEDSLRRIRESLEKVKEEVRRSNEKIKKIVKEVREVVERIAD

SEQ ID NO: 9143 - protein, 181 aa, Artificial Sequence; identical to SEQ ID NO: 9142
  Synthetic

SEQ ID NO: 9144 - protein, 181 aa, Artificial Sequence
  Synthetic
DELEDLEREVREVIEESKRLLEELEKRVKEVIKTSRDSVRRLKERVDRVIKELRDAKRRGEPREKIRELVERLKREVEKVERENDDLLRRVAEEIERVVEENSRLLEEVKRRIEEVLARTRDEDVLRKIRELLEEIRRVIEETNRRIKKLLEEIKRVADDSRRRIRKVAREVEEEAKEIEK

SEQ ID NO: 9145 - protein, 181 aa, Artificial Sequence; identical to SEQ ID NO: 9144
  Synthetic

SEQ ID NO: 9146 - protein, 181 aa, Artificial Sequence
  Synthetic
SVRERIDELEKKIKRVVEKVLKENKDSLKRVEERVRRLLEENKRSLDEVREAVERVLSEVRDKRELLEKLRRILRENEKRNTESLREHERILEENKRRNEESLKRHKDLLDEVKELIDRARDLEDVEKLERDVEKVIEDARRTSEEVKRENDKALKDLDRLSEEVEKENRKALEDLKRTSD

SEQ ID NO: 9147 - protein, 181 aa, Artificial Sequence; identical to SEQ ID NO: 9146
  Synthetic

SEQ ID NO: 9148 - protein, 181 aa, Artificial Sequence
  Synthetic
SVRETIDKALKKIRDVAEDLKRRNDELLKEIEEVARDSSEKIRRALEEVERRVREVLKRVKDRRELLRTIEELLKEIRKEVEDVHRRNKRLLEEIRKIVKRSKDEHERLLKEVKETVDRMRDLEDVEKLKKDIERIIRELEELSDRLKKIIEEVIKKSEDLVRRLRESLERVLREIDKTTK

SEQ ID NO: 9149 - protein, 181 aa, Artificial Sequence; identical to SEQ ID NO: 9148
  Synthetic

SEQ ID NO: 9150 - protein, 181 aa, Artificial Sequence
  Synthetic
SVREEIDRILREIEEVVKTSSERIKRLLEKIEEVVKRLIEENRRVLKRTDEEADRLLKEVKDDKDLLRELRDLLKKARELNTEITERLKRLLDRIRELIEKVHRENEKLLREIRERIKEARELEDVDTLRKEVKEVIDTSEDLVRRLEEEVRKAAKRLKDLVDDSRRLNTEILRTLRERRR

SEQ ID NO: 9151 - protein, 181 aa, Artificial Sequence; identical to SEQ ID NO: 9150
  Synthetic

SEQ ID NO: 9152 - protein, 177 aa, Artificial Sequence
  Synthetic
DDLKRLEEDVRRIIEENDRIVKDIAEKSKKSIEDNRRLLKRLRDESERTIDDIRRLKEEGQDRRRLEEVLEEDHRLVKEINERSKKILDEDHKLIEEINKRSKDLLDRIRRLAEKAAEKRDVEEIRRLLKEITDVVRESNRRIKRINETAHEVVRRSNTETTKVNKKAHDVVEEVKR

SEQ ID NO: 9153 - protein, 177 aa, Artificial Sequence; identical to SEQ ID NO: 9152
  Synthetic

SEQ ID NO: 9154 - protein, 181 aa, Artificial Sequence
  Synthetic
SLIEKIREIVKEIIKRSDDSVEEVKRRNEESIRRSEESVKDNRRRIEDIIRKLKRLKEEGRDRRDVEDLVRRIVEESKKTLRENEKLLEDDRRINEKILEDNKRLLKKAREDLKRVLEKTTDDDMLRKIEALAREVTEVSKRALEEIRKLMEESTEVSKRALERIEASVEEVRRVAEEVKR

SEQ ID NO: 9155 - protein, 181 aa, Artificial Sequence; identical to SEQ ID NO: 9154
  Synthetic

SEQ ID NO: 9156 - protein, 181 aa, Artificial Sequence
  Synthetic
SLLEEIEKEVREIIKRSRKSLEEVKRRNDDSIRKSEKLVEDNKREIEEVKERARKLKEDGTDRKRIRELMERIERSSEETLKENSRLVTRDREINEEVLRRNRKLLEEIRRRLEEVLRRTTDKRVLEEIDRLAKDVKRVSDEVLEEIKRLAKESKEMADRSNEEIKKSVEEVRRVVEEVEK

SEQ ID NO: 9157 - protein, 181 aa, Artificial Sequence; identical to SEQ ID NO: 9156
  Synthetic

SEQ ID NO: 9158 - protein, 181 aa, Artificial Sequence
  Synthetic
DEIEELEKLIRKAIKDSRDLVRKLEEENKRSIDTSRELLKELERMLDEVRRRLEDLKRKNGSSEELRDLLRRIKERAKRVHEKNEELLRRDDKRNRDVHRRNEELLREVEKLVRDVARKIDKEELLREIKKLLDTIRRVIEESSERIKKLAEDSREVVKESSTEIKRLLETITEVVDRVTK

SEQ ID NO: 9159 - protein, 181 aa, Artificial Sequence; identical to SEQ ID NO: 9158
  Synthetic

SEQ ID NO: 9160 - protein, 181 aa, Artificial Sequence
  Synthetic
DEVEEAEKLIRKVIKDSEKLLRDLADLNRKSIRRSEKLVEDDRRANEDVIRKLEELRRNNGSEEELRRLLKEVEDTNRRSHETNKRLLDEDRRLNKEVHDRNEKLLRDIKRLVEEVEKRIDKEELLRRIKKLLDEIKKAIEDSSREIKRLLEESERVAKRSSEDIKRTLDDTRRVVEEVRR

SEQ ID NO: 9161 - protein, 181 aa, Artificial Sequence; identical to SEQ ID NO: 9160
  Synthetic

SEQ ID NO: 9162 - protein, 183 aa, Artificial Sequence
  Synthetic
DVEETVRKLIEDVKRVMERVRKSNTDLIRRSKEVLKDARRLHEELTKEVKDVLRRLEEEVKDEDTLREIRKKITELLKENERVLRDVERNVREDVKRLKENLDDNKRKAEEVIKDLERVMSSDKREVVKRVEEDVRKKLEESTKDSKRVERESEENLRRAKEKSKRVLKKLKDDLRRLEEESR

SEQ ID NO: 9163 - protein, 183 aa, Artificial Sequence; identical to SEQ ID NO: 9162
  Synthetic

SEQ ID NO: 9164 - protein, 183 aa, Artificial Sequence
  Synthetic
SVKETVKDLEREVREVLKKLRDDVRKLIEESDKALKRLKKIHDDLSRDVRRVLEDLRRRVKDEDTVREIERKARELDKKNRDVARDVERNVREDIKRLEDELRKLEDEIRRLEEELREVSKIEDKKMIDDVVRRVRKKLKEIDEKVKDVERKSRENLKRLKEKSDRVAEDLKKILDELREEVR

SEQ ID NO: 9165 - protein, 183 aa, Artificial Sequence; identical to SEQ ID NO: 9164
  Synthetic

SEQ ID NO: 9166 - protein, 183 aa, Artificial Sequence
  Synthetic
SVEETITELIKEVRKVAEEVKKSNKEVIEESEEALKELERTHTELSEEVRKVLRELEEEVKDEDTLRRIRKAIRDLDEENKRVLERVRKNVKEDIERLRENLKRNEELARRVIRELEKVMRVDKKEVVTEVVKEVKKRLEESKDDSRRVMEESRRNLKKLREESKRVVEELRRELRRLKEEVR

SEQ ID NO: 9167 - protein, 183 aa, Artificial Sequence; identical to SEQ ID NO: 9166
  Synthetic

SEQ ID NO: 9168 - protein, 183 aa, Artificial Sequence
  Synthetic
DVEETVRKLIEKVKRVLERLEEEHKRLSDDSRRVVKKLKDDVEDLIRRVEEVLKELERRVKDEKTLKDIRKKIEELIRELREVAKRLEDNAREDDKENREVLKRVREEIRRLIEKLKDMMRVEDRKAVDEVRKEVDRRLEELKRDSERVVKKSEENLRRLEEEVRKVEEKVRRTLKRLKEEAK

SEQ ID NO: 9169 - protein, 183 aa, Artificial Sequence; identical to SEQ ID NO: 9168
  Synthetic

SEQ ID NO: 9170 - protein, 178 aa, Artificial Sequence
  Synthetic
DKLEKVLEEIKRRLEENERLLRKVERDLKRLSKENEDRLRKMLEDLRKLSEDLLRSVEKDKDLKEEIRDVIEKLRRLNDELRKDTERSLKRLRELNEEARKRSEDSARRLRELIKELKRDRDVEKVDELLKEVEEIIDRSRKEIDRTRKDNERSVKRSEDAIRKTLDENEKSLREATR

SEQ ID NO: 9171 - protein, 178 aa, Artificial Sequence; identical to SEQ ID NO: 9170
  Synthetic

SEQ ID NO: 9172 - protein, 178 aa, Artificial Sequence
  Synthetic
SDVEEMEKRIRDRLRENRRIVEDVAKKLRDLSRRLEEEVKKVAEELRRLSDELRKRVTRRKELRRDIEEVLKRLRELNKRLREDVDRAMRELRELNKELDKRSEESLKRLEELARDLARRKDVERVKDLLREVKRVIDESKKTIRDTLEENEDSIRRLRERIDETLKENEKSIKELKD

SEQ ID NO: 9173 - protein, 178 aa, Artificial Sequence; identical to SEQ ID NO: 9172
  Synthetic

SEQ ID NO: 9174 - protein, 178 aa, Artificial Sequence
  Synthetic
SSVEEVKKELDKILEELKEKSERSKEEVERVLKKLREKSDRVEREVRKAEERLRRKVKDIREDELKEELTKEVKEVLEKNEEIAKELTREVKEVNRKNEKILDELRREVERVEEKIRRRLEDDETVERLLKKLKDVLEELRRRHEEVSKRLEKVLKELVDRHKKVTEDLKRVLDELRK

SEQ ID NO: 9175 - protein, 178 aa, Artificial Sequence; identical to SEQ ID NO: 9174
  Synthetic

SEQ ID NO: 9176 - protein, 184 aa, Artificial Sequence
  Synthetic
SLEETLKKLIEEVEEVLRRSEEIAREAIRRSERVLEELERRHKKVTDEIKEMLRELRERIDDKDTLKKVTDKIRELLRENEDVLRRVREEVRRDVEELRRALEDNKRKVERVIEELEEVLKKLKREELVERVLDKVRRDLEDSRRHLEEVKRKSEESLKKLKKETKDALDTIREKLKRIADELR

SEQ ID NO: 9177 - protein, 184 aa, Artificial Sequence; identical to SEQ ID NO: 9176
  Synthetic

SEQ ID NO: 9178 - protein, 184 aa, Artificial Sequence
  Synthetic
SMEEKVKRIIKKVDDVLKDSERRITELIKKSRDVLRELEKRHEELTKRVKDVLDDLRRKIRDKDTAKKVEDDVRRLLEENKRVLEEVRESVKRDIERLEEVLRRSRKHIEEVKERLDRVLKKVTDDRAVDTVRKEVEKALEENRKTVRDVEEESDRSLRRLREKTDEVRRRVEEILKRLKERVD

SEQ ID NO: 9179 - protein, 184 aa, Artificial Sequence; identical to SEQ ID NO: 9178
  Synthetic

SEQ ID NO: 9180 - protein, 184 aa, Artificial Sequence
  Synthetic
ELEERIKELIKKVRDVLRKSKEEVDKVIRKSEEVVRETEKLVEDIIRRVEKVLDEVRKRIKDKDTLKEVKELAETVIRKLEKILRDNKELVDRDIERLKKVARESEKHIREVERELEEVLKKLKTKELVRTLERRVEEVLRRNEELVKRVREESDRSIDRSRRSLERAEEDVDRVLKEVKDRTT

SEQ ID NO: 9181 - protein, 184 aa, Artificial Sequence; identical to SEQ ID NO: 9180
  Synthetic

SEQ ID NO: 9182 - protein, 184 aa, Artificial Sequence
  Synthetic
DLEKKVEDVIREVEKVLRELRRRHEELTKRSEDAVKETKDRVKEIEDEVRRVVDKVRKDIKDKDTLERVERKAEEVIRRLRRILEENKKSADRDVRRNEDMLRRVEKTVRDVKRKLERVLKDLKTDELVKELKRDVERVLKRLKERSDEVRKESEKSIKKSKDSLEKAEREVREMLRDLDRETK

SEQ ID NO: 9183 - protein, 184 aa, Artificial Sequence; identical to SEQ ID NO: 9182
  Synthetic

SEQ ID NO: 9184 - protein, 184 aa, Artificial Sequence
  Synthetic
SMEERVKELIRRVRKVLEDTERRAKEIIEDVERVLEELKKRHEDLTRKVDKVLKELKKEIRDEDTLREVEKTVRDVLRKNETVLREVEETVRRVIKRLEEILRRNRKKIEDVERELDKVLKKVTDEKLVTKVEEDAERALRESEESLRKVEREVKRVLEELKRKTEKVARELDKILKELKDRTR

SEQ ID NO: 9185 - protein, 184 aa, Artificial Sequence; identical to SEQ ID NO: 9184
  Synthetic

SEQ ID NO: 9186 - protein, 184 aa, Artificial Sequence
  Synthetic
SLEDELRKLIEDVKRVAKETEDRVREILKRSKDVLDELKKEHDKLTREVERVLDELAKEIKDKDTLREVKKRVDDLLKRNEDVVREVEKIVEEDLDRLRRILEENKRLAEEVIRRLEEVMKKLKTEELVKKVKKEVEDVLRRSKESLKKAEEDSRKSLEELKKKTEDLKREVKEILDRLKERVR

SEQ ID NO: 9187 - protein, 184 aa, Artificial Sequence; identical to SEQ ID NO: 9186
  Synthetic

SEQ ID NO: 9188 - protein, 184 aa, Artificial Sequence
  Synthetic
SELEKLKREVDEVLKRNKELVDELRKRVRKALEESRRSVEEVERRVEEVLKRLEDDLRREKSKEVIDKLRKLVEDLIRELEDLLRKNKEKAERLLEELKKLLDESRRHIEELEKELKKLLDRLDKEELKEKVRRILKEVRRVLDESRRDVERVLREVEKVMRESIKKARDAIRKVEEVLRELER

SEQ ID NO: 9189 - protein, 184 aa, Artificial Sequence; identical to SEQ ID NO: 9188
  Synthetic

SEQ ID NO: 9190 - protein, 184 aa, Artificial Sequence
  Synthetic
RELDDARRKVEEVLKTNKDLVDKIRKEVEETLERLDRSSRKVREIVRRVLEELTRRATERKTEDVERELAEVVDRVIKELRRIVEENRKLSEKSIKELRELLERSERHIKRVIDELKSLLDRIRTEELKRLVEKLIKEVEDVLEESRKAVEDVIREDKRRMEESKREADELIREVKKVLDDLRK

SEQ ID NO: 9191 - protein, 184 aa, Artificial Sequence; identical to SEQ ID NO: 9190
  Synthetic

SEQ ID NO: 9192 - protein, 184 aa, Artificial Sequence
  Synthetic
KELEDLEREVREVLKRSDESLKRLEEEVRRVLDENDKEVKRVKEKVKKVLDELREIVTRRKTEDVKRKVKEDVTRLLDELEKELRRSEDHIRRLIERLEKELRKNRERIKELKERLKSLLSRLDKEELKREVERLIREVEEVLKKSEEAVRRLIEEVDRALKRSREEFTKAREEVKKVLEDART

SEQ ID NO: 9193 - protein, 184 aa, Artificial Sequence; identical to SEQ ID NO: 9192
  Synthetic

SEQ ID NO: 9194 - protein, 182 aa, Artificial Sequence
  Synthetic
DEIDKARKDIEDMLRRLRDLVRKLEDLNRKVVEELKDLVRKDRKLNEDIVRRLERLVRERPDVQEDIERLLKEVRKMNKDTLRKIRELLEKIKDLNRRIEEEIKRLLKEARELVRDVEKRIDDEEVKRRIEELLRRVDKVADEVRREVERTNRESEEVVREVEEDVRRSLEEIDKVIKDVRT

SEQ ID NO: 9195 - protein, 182 aa, Artificial Sequence; identical to SEQ ID NO: 9194
  Synthetic

SEQ ID NO: 9196 - protein, 182 aa, Artificial Sequence
  Synthetic
SEIDELRKRVEEVLRRLDELVKRLKEENDRVVKKAEDLIRRLEETNREILKKLRKLVKDDKDNQEAIDKLAKDAHKTNRDILREIRELLKRIHEKNREMVERIRKLLRDVERMLRKVEKEIDDRDVLEKIKDLLRRVKEVADEVEKKIRELNKKTEDVVRELEERVRKLDEDVKRVIEEVKR

SEQ ID NO: 9197 - protein, 182 aa, Artificial Sequence; identical to SEQ ID NO: 9196
  Synthetic

SEQ ID NO: 9198 - protein, 182 aa, Artificial Sequence
  Synthetic
SELDEIRERIERIEKDLERLVEEVKRVNDTIVERIKKLIDEVRKENEKVIKTLRDLVREVPELKEKIRELLKRAHEVNRRVEKTIEDLLREVEKVNDEIRREIEKLLETATRLLDEIRRRIDDEKVEREIRRLLERVKEVIERVKDRVRRVDKKSRDVVREARRAIEEVDRRVRKVVREAEK

SEQ ID NO: 9199 - protein, 182 aa, Artificial Sequence; identical to SEQ ID NO: 9198
  Synthetic

SEQ ID NO: 9200 - protein, 182 aa, Artificial Sequence
  Synthetic
DEIKKLEDEVKKILDDLRELIRKLEETNRDVERRLRELIAELRKRNDEVVKRLRDLVRRSKDSKEEIDRLAEEIKKENEDILRKIEKLLEEARETNERILRRIDELLKEAKRLIDDVLRKIDDEDVKRKIEEILRRVEEEIRRLKKEVERLDRESKRVIRELREDVKRTNTDVKRVVDEVRK

SEQ ID NO: 9201 - protein, 182 aa, Artificial Sequence; identical to SEQ ID NO: 9200
  Synthetic

SEQ ID NO: 9202 - protein, 181 aa, Artificial Sequence
  Synthetic
SLVERLEERVKRIIDELRRILEENRRRVKKVSDENRDLLRRLEEENKKIIEDLRDLKRKGRDRKEVKRLVDRVRKTNERVLETVDRTATRLREKSKESLERLRKTVREVVEEIRDVMRKVDDEKAKDKLRRLEEEIRKVAKEVEDELRRSTEYVKKSLEDAKRKLEELTKRTEDVAEEVER

SEQ ID NO: 9203 - protein, 181 aa, Artificial Sequence; identical to SEQ ID NO: 9202
  Synthetic

SEQ ID NO: 9204 - protein, 181 aa, Artificial Sequence
  Synthetic
DLVERVEEKVEDIKRKLRRILEEVDRRNKEVSKENKELLDRLEEENERIIRELEKAKRDGTDRRKLKELIDRLRRINEDVRRKVDRTVKELKKINKKILEELEELVRRVKEEIKRVMDEVQDDRAREKLKRLVEDIDRVAEEVKRTLEELSRYTDKSLEDAERSLERLTKETDEVLKRVTT

SEQ ID NO: 9205 - protein, 181 aa, Artificial Sequence; identical to SEQ ID NO: 9204
  Synthetic

SEQ ID NO: 9206 - protein, 178 aa, Artificial Sequence
  Synthetic
SIVERLKKLAEDVIRRLERLSKELAKRNKEVIERLKELSKRLEDKNRRVIEELRRTKDEEEIKRLLEEARRTNKKVLDDSKKLLDEVRETNRTVAETSKDILREIEEVVKRVLDEVRELEEVKRAIEELRDRIRKVIEDSERTIRKLNDDTRKVVEDSRRTIEELNRTTDKVIEEVRR

SEQ ID NO: 9207 - protein, 178 aa, Artificial Sequence; identical to SEQ ID NO: 9206
  Synthetic

SEQ ID NO: 9208 - protein, 178 aa, Artificial Sequence
  Synthetic
RKVDELRKEVKRVIDELRELSERLRKENERVIKTLEDLVRRLEKLLERVERELERTKGKEEVRKIMKRIEDVARKVLRELEELLRRAEKINKDVLDRSREIAKRARDILKKVLDDVKDLEEVKKEIDRLRRELDRVIKESEDTIRRLNDETRKVIEKVRRAIEELLRRIEEVIKKVEK

SEQ ID NO: 9209 - protein, 178 aa, Artificial Sequence; identical to SEQ ID NO: 9208
  Synthetic

SEQ ID NO: 9210 - protein, 178 aa, Artificial Sequence
  Synthetic
SIVEELRELVKEAIKRLKKLSDDLRRKNEEVIRTLKELLDRLKRKNEEVIKRLEDTKGKEEVDRLMEEAKELNKRVEDTLRELMDRARRTNEEVERRSKELLKEIEKVLRDVLRRVSTLEEVKREIEKLKRDVERVIEDSRRTIEELNRKTEEVIERVRRTIERLNEETKKVIDRVRT

SEQ ID NO: 9211 - protein, 178 aa, Artificial Sequence; identical to SEQ ID NO: 9210
  Synthetic

SEQ ID NO: 9212 - protein, 178 aa, Artificial Sequence
  Synthetic
REVDELRKRVEEVIRELEKLSEDLAERNRRVSERNKELVETLARLNKRVIDELRRTKDKEEVDKLLKEVRELNKRVEEEIDKSLEEARRVNEEVVERSKRILERAEKILEDVLRKVKDLEEVKKAIDDLRRELEEVIKRSKKTIDDLNRYTKKSIEDVREAIKKLNKETDDVAREVKK

SEQ ID NO: 9213 - protein, 178 aa, Artificial Sequence; identical to SEQ ID NO: 9212
  Synthetic

SEQ ID NO: 9214 - protein, 178 aa, Artificial Sequence
  Synthetic
SIVEELKKLVEEAIRKLEKLLEELEEKNRDAIRRLKELSDELRKKNEEVIERLKRTKDKRELERLADEARRTNEEVVRRSDKLLEEIKRTNEKVKRELDELLRRIEKIVKDVLDRVRELEEVKRMIEKLRRDVEKVIREVRDEIRRLNDTTRRVIDKSRKTIEELNRTTEEVIERVKR

SEQ ID NO: 9215 - protein, 178 aa, Artificial Sequence; identical to SEQ ID NO: 9214
  Synthetic

SEQ ID NO: 9216 - protein, 176 aa, Artificial Sequence
  Synthetic
DEEEVMRELKKEIDEALERSKEINDRLRKEIRDVLEKLERIVREVKERSERVLEDVRRKVDSKKLERVEKIIRESEKHVDEARKEIEKRIKELEDRVRENTERVKRIIEELRDRVRKLGGVKEAVDEIRRILREALEEDKKSVEDIRRDLDKIEKDVKKVLEDNERLLKRLREEVK

SEQ ID NO: 9217 - protein, 176 aa, Artificial Sequence; identical to SEQ ID NO: 9216
  Synthetic

SEQ ID NO: 9218 - protein, 176 aa, Artificial Sequence
  Synthetic
DEEEVMKELEDRIREVDKKIEDRLRELKERSDRVLDRSRRINKKLKDEIEDALRRVRRDVDSKDARDVDRIIEELKRRVEENSRRVEEIIRRSRKHVEDLLRRAKEIIKKLEDEVRKLGGIKEAVDTIERKLRKLEEDLKKVERDNKKLLDDMERDDRRSLEEIKRILDELLEKVR

SEQ ID NO: 9219 - protein, 176 aa, Artificial Sequence; identical to SEQ ID NO: 9218
  Synthetic

SEQ ID NO: 9220 - protein, 176 aa, Artificial Sequence
  Synthetic
REEEVMKELDREIEEVLERSREIVERLRREIEEVLKENKKIVETLKREIKKVLREVREKVDSKDARRAEEIIERLERRVEENEKRVKEIIDELRKLVKRALEESEKSIRELKDRVRKLGGSEEAVKRIRDILEKDERDVREVVRRIREILKASLEDSERSVEEIRRILDELRKEVE

SEQ ID NO: 9221 - protein, 176 aa, Artificial Sequence; identical to SEQ ID NO: 9220
  Synthetic

SEQ ID NO: 9222 - protein, 176 aa, Artificial Sequence
  Synthetic
REEEVMERLRREIEKALRESHEIDDRLRKRIEDVLRDSERKLEELRRRIKKVMDDVRRDVDSERLREVEKIIKELEERVDDLRKKSRDSARRLKELVDESNKRSRDIARRLKEEVDRLGGSEEAVRKIREELERMKEENDRVLKEIDKDLKDDDRKIEEVVERIERILRELRERVR

SEQ ID NO: 9223 - protein, 176 aa, Artificial Sequence; identical to SEQ ID NO: 9222
  Synthetic

SEQ ID NO: 9224 - protein, 176 aa, Artificial Sequence
  Synthetic
DEKEVADELERKIDEALKESHEIDKRSDDHDKEVLKKSEKRLRELDEEIKDVLRKLEKKVDSELLKRVRDIITKLEKEVRDLLEESRKSIEDLHKHNRESNKDSRDIIRELRDRVRKLGGSREAVETIERILKRMIERNRAVVETNKKLNKEDEDKIREVVKRIREKLRKADEEVR

SEQ ID NO: 9225 - protein, 176 aa, Artificial Sequence; identical to SEQ ID NO: 9224
  Synthetic

SEQ ID NO: 9226 - protein, 181 aa, Artificial Sequence
  Synthetic
ETEDKVRELLKRIRDVAEKAREKVEELVRRNEEVLKRARETVERLVRKNEEVLREVAERARSRKLDEIRREIEKTIRDHKRIVEEVRKEIKRSIEEHRRKVEKVIRELEEVLKTIERIMRRKERDKKELEDTVRKVLEDLERKLERLEEESREVERRVKKVLDELKRKSEESEKRLEEAAR

SEQ ID NO: 9227 - protein, 181 aa, Artificial Sequence; identical to SEQ ID NO: 9226
  Synthetic

SEQ ID NO: 9228 - protein, 181 aa, Artificial Sequence
  Synthetic
DAEEVVRKLEEELKRLIDKLRKVMEESLKRVKESMDRSRKRIEELVRRLEKILRDLKRDREEIEEVIRELREIIERLKDKIKKDLDTSRRIADENRKDIEDVVRDLERIAEELRRIAARDGREDVLRKLKETVERVRRKVEEVIKKSRESVKRVEETNTRSLRELEETVREVEKRVREESR

SEQ ID NO: 9229 - protein, 181 aa, Artificial Sequence; identical to SEQ ID NO: 9228
  Synthetic

SEQ ID NO: 9230 - protein, 182 aa, Artificial Sequence
  Synthetic
SEVEKLLKDLKELLEEVKRRAEESHRDLRRLLEEVRKRVEDSNRELERELRRAEDLVRRGNKSSDLVEELRKIIEEMEKKHKDLVDELRELIKKVIDDHEKLIRDLERLIRRVEEELERKTRDRKMERVVEEIRREVKKVLEDLRRILKESEDAARKVLRDLERLVKHSKDTAREVLKRLKK

SEQ ID NO: 9231 - protein, 182 aa, Artificial Sequence; identical to SEQ ID NO: 9230
  Synthetic

SEQ ID NO: 9232 - protein, 182 aa, Artificial Sequence
  Synthetic
SEIEKLLRDLERLLEEVKRKAEKTNRDLEKLLEEVKRKVEDSHRKLKKVLDEVKDLVRRGDKSSELVRRLEEIVRRAREEHERLVRELEELIKEVERRHEEIIRELEELIREVDDRMRRTTKDERVKRLVEDVRRRVKEVLDDLRRIIEHSRRRAEKVLRELEKLVRESETKAREVLKDLKK

SEQ ID NO: 9233 - protein, 182 aa, Artificial Sequence; identical to SEQ ID NO: 9232
  Synthetic

SEQ ID NO: 9234 - protein, 176 aa, Artificial Sequence
  Synthetic
SEAERLLEDSKRVLDEIREDLKRLLKESEDVMREIEKTLEKLVRDVERVLDEVRKSRDDKKKVLDELRKILEEVEKRAKDLNEENKRIMDKVRREVEELIKRNEDIMREVEERAKRDNVDERVLRTIKDLHRRLSEEVKRVLDEAEELHRRLSERVREVLEDIRRLVEELIEEVRK

SEQ ID NO: 9235 - protein, 176 aa, Artificial Sequence; identical to SEQ ID NO: 9234
  Synthetic

SEQ ID NO: 9236 - protein, 176 aa, Artificial Sequence
  Synthetic
SEAEDLLRRSKERLDEVRKRLDELRRRSERVVEEIRRLLKELLDDVERVRKEVKEARDDKKKVLEELRRILKRVEDEVRDILRKNEDAAREVAKEVKRIDDDNERILRRVADKARKDKIDDRVLRTIEDTHRRLSEDVKRVLKEAEELHRRVTEEVKDVLRKIRETAERLEEEVKK

SEQ ID NO: 9237 - protein, 176 aa, Artificial Sequence; identical to SEQ ID NO: 9236
  Synthetic

SEQ ID NO: 9238 - protein, 176 aa, Artificial Sequence
  Synthetic
KEAEELLDTSRRVSEEVEKRLEKLLRESERVAEEIRKRLEELLRRVEKVLDELRKARDDKRKVLEEVTRALEDVERRVEEINRENKEEADRVRRDVERIDEENKRAAEEVKERARKRGIDEKVLKTIEDEHRRLSESVERVLRTAKRLHDEVSKEVRDVLEEIRRTVEKIIREVRT

SEQ ID NO: 9239 - protein, 176 aa, Artificial Sequence; identical to SEQ ID NO: 9238
  Synthetic

SEQ ID NO: 9240 - protein, 184 aa, Artificial Sequence
  Synthetic
SVEEVLKTLEDLARESSEEVRRVAEEIERSNRRVVKEVEKVLREIEELNRKILEEVERDLDSKDVDRLRREIERSLDESRKIIEKLRRDIEEVNKKSRKTIKDLEKENRDVVRKVRDIARKEDKMEEVLRELLKEVAKVVEDTRRKLEELLKENEEMDRDLKRKLDELLERNREVLERLKRKVD

SEQ ID NO: 9241 - protein, 184 aa, Artificial Sequence; identical to SEQ ID NO: 9240
  Synthetic

SEQ ID NO: 9242 - protein, 184 aa, Artificial Sequence
  Synthetic
SVEEVLKELEKLVRDSSREIKKVLEEIDKSNTDLLREVEDALRRIEERVKEALESVDRTVRSEDARRLKEELEELLKRVREIIERIKREIERVNERSREIIERLREDNDRVRKEVKKIIDKEDRVREMLERLLDTLRRRLEETRKELERLLTENKKKDDEVKEKLKRAEEELEDVRRRLEEKLR

SEQ ID NO: 9243 - protein, 184 aa, Artificial Sequence; identical to SEQ ID NO: 9242
  Synthetic

SEQ ID NO: 9244 - protein, 185 aa, Artificial Sequence
  Synthetic
SAEEVLRRLKEAIKRLIRDSERVLEEIRRTNEELIKRTEEVLRRVREKAERLIDDVRRRLSDDKRVKEVIDELKEMLERLEKKIREDIEELERNLRRNEKRVRDDIRRLEEMLKELERKISEVRGIDEALRRIEKEVRDVEKRSKETLEDSKRDSERVRKKSEDTLREIETRVEDVRRKAEEEVR

SEQ ID NO: 9245 - protein, 185 aa, Artificial Sequence; identical to SEQ ID NO: 9244
  Synthetic

SEQ ID NO: 9246 - protein, 176 aa, Artificial Sequence
  Synthetic
SESDRIRAIVKKVVDESKESLKRLKEETERVKRELDRVLKENKDKVRRLKEKAEEMKKLEDRKALKKVVDELRDALRESEEHIRKVLEDNERVLRRVEKEVKDDIRRLEKILEDIERELRSDVLREVAERVTRLIRDSERVLEELAREHEKASRKVKKVLDESKKIVDDVIRRVDR

SEQ ID NO: 9247 - protein, 176 aa, Artificial Sequence; identical to SEQ ID NO: 9246
  Synthetic

SEQ ID NO: 9248 - protein, 176 aa, Artificial Sequence
  Synthetic
SESEEIERTVEDVKRKSDKSLEESRRNVERLKEESEESLERNKDLVRRVAEKVEEVKRDSREEALRKVVRELEEALKRSEDHVRTDIKRLKDNLDRNRKKIEDDIDRLRRILEDIERRIRSEAADRVREEVTKVIKKSEDVLRDSERLHREVIKTSRDVLDKSRRLVEEIIRRVRR

SEQ ID NO: 9249 - protein, 176 aa, Artificial Sequence; identical to SEQ ID NO: 9248
  Synthetic

SEQ ID NO: 9250 - protein, 181 aa, Artificial Sequence
  Synthetic
SDVERVLREVEEIIRKARDRSREWLERVKKIIEKVKEDSKRWLDEVRKLIRDVEDIRRRGKADDKTVEKITREARKRDEEHKREVEKVAKTIEDLNRKHEEEVKDILRRVKELLEDLRRRSDTERVREVIDRIRKLLKDIIDEARDVNKKVRDLLKRIVEEVTEVNKRVKELVEEIVRRIK

SEQ ID NO: 9251 - protein, 181 aa, Artificial Sequence; identical to SEQ ID NO: 9250
  Synthetic

SEQ ID NO: 9252 - protein, 181 aa, Artificial Sequence
  Synthetic
DELREALKRVADIVRTIEEAVRKSLEDSKRIVDDIRRASKEALEEVEKIVRTLVEIVRNGRADEKVVRKIATDAEDLSRKHKEALDRILDELKKLNEENRRALEEILRRVKRLLEELKKDVDRKEVRDVIREVEKLLREVEKIVRDVNRESERLAKEVRDDATEVNERVKELLKRAEAAVR

SEQ ID NO: 9253 - protein, 181 aa, Artificial Sequence; identical to SEQ ID NO: 9252
  Synthetic

SEQ ID NO: 9254 - protein, 179 aa, Artificial Sequence
  Synthetic
SVVEELRRTVKELLDEIKRRDDRLLKEVEEVAREVERKDDELRKKVEEILRRIKELRDRGRVDKRDIDRIVEELRRISEEHKKEVERLKDDIRRRSREHEKEVRRLLEEAKEVLKRAKEENRVDDRVLKELKELMDEAKKNSERVNKKVEDLLRRLDESSRRVNEEIEKRLTELLKAVE

SEQ ID NO: 9255 - protein, 179 aa, Artificial Sequence; identical to SEQ ID NO: 9254
  Synthetic

SEQ ID NO: 9256 - protein, 179 aa, Artificial Sequence
  Synthetic
SVVEELLKRVRERLEDVDRVLRTWLEEVERLAEEVKRLDRELEKDVKRILDTIEELKRQGRVREEDIKRILTEAEKRSREHEKRVRDLLERLKREDDRVNEELKRLLEELKDELRKAKEENNVDDKALEDIKRLLEELRKRVEDVSRRVNKLLRDLEENSKRVNDELRKRVETLVERVR

SEQ ID NO: 9257 - protein, 179 aa, Artificial Sequence; identical to SEQ ID NO: 9256
  Synthetic

SEQ ID NO: 9258 - protein, 175 aa, Artificial Sequence
  Synthetic
REIEKVLKELRDIVRELEKLLEDVVRKIRKIVEETRKLLEDVVRESDKIHRDAKELMERAGVDERLVRRLDKHAKDHKKDVEDIIRENEENLKKLDKEVRDIIRELRELLKELEKANIREDELRKRIAELAERVKRMVKKLDEHAKRDFRRVEEEVRRLRENVKRVKDEVDEAVR

SEQ ID NO: 9259 - protein, 175 aa, Artificial Sequence; identical to SEQ ID NO: 9258
  Synthetic

SEQ ID NO: 9260 - protein, 175 aa, Artificial Sequence
  Synthetic
SEIEKVLEELRRRVEELEERLKTVVDELKKIARRTEEKLDKVREEIERIYREAKDLLRRAGVDERLLKRLDEDLKRLEKKVRDVKKENRDNLKRLEDRIREIIEELRRRAKRLEEANVRSDELRKAIAELERRVDKMLKELRDHITRDEDRVRRILEELRRHVERSLKRVREEVN

SEQ ID NO: 9261 - protein, 175 aa, Artificial Sequence; identical to SEQ ID NO: 9260
  Synthetic

SEQ ID NO: 9262 - protein, 181 aa, Artificial Sequence
  Synthetic
SELEKVLEDVERRLRELKERNDRVLEEITKIHEDAKRENDEVLKEISRAHKEATEELERKIGDKKRLEELKKELEKHNKEIEDSVRELKKKLRKHNEDLRKSVEEMKEELERALKEVREVIRDSSLEELRRKLKELEERSERHLEELRRSAETVLRESREHLRRLEDSLRRVRKKVKEETD

SEQ ID NO: 9263 - protein, 181 aa, Artificial Sequence; identical to SEQ ID NO: 9262
  Synthetic

SEQ ID NO: 9264 - protein, 181 aa, Artificial Sequence
  Synthetic
SEIETVLRDVKDKLEKLKRDNDKVLDEITKIHEEAMRRNDKVLEDIRRALEELKKRLEEKIGDKEELKELKKELDDALRRLKESVDKVKKELRDHNKTLEESVRRVKEKLDRVLEEVRKVAETARLEELKKELKKLEDESRKHLEELRRSLEEVTRRSDKHLKELKDRLEELRRKVEAATD

SEQ ID NO: 9265 - protein, 181 aa, Artificial Sequence; identical to SEQ ID NO: 9264
  Synthetic

SEQ ID NO: 9266 - protein, 181 aa, Artificial Sequence
  Synthetic
SELEKVLEEIRRELEKLERANKKVLDDAKRIHDKAKEDLRRVLEEIKRRLEELEKRLEEAIGDDKRLEELRKKLRKVLEELEKRARDVERELDEHNDRLRDSVRRMKRRLEEALKRIARVIETSRVEELRKELEDLRRESEEHLERLRDSARRVLEKVRRILKELRDRLRELAEEVKRATD

SEQ ID NO: 9267 - protein, 181 aa, Artificial Sequence; identical to SEQ ID NO: 9266
  Synthetic

SEQ ID NO: 9268 - protein, 181 aa, Artificial Sequence
  Synthetic
DELETVLKRVEDLLRRLAEELRRVLEEARETLERLKAANEKVLEEITRTHEEAKRRLDRDIGDKKELEELKKKLDRHNEEIRRSVEEVKKRNEEMLDTIRRKVETVKRKLDEALKRVAELIKTSRVEELDKEAKDLVKEVDEILKRIREELKKLKEDNDKHLEELKESLKRVKDEVDEARR

SEQ ID NO: 9269 - protein, 181 aa, Artificial Sequence; identical to SEQ ID NO: 9268
  Synthetic

SEQ ID NO: 9270 - protein, 181 aa, Artificial Sequence
  Synthetic
SELEDVLRDAERIIREAKEDNERVLRRLKETVEKLIKDNDEVLKKLTESHKKLTKELKDAIGDKKRLEELKKKLDEHNRRLKESVERVKRKNKKVLDELRRSVEEAKKENDRALDRLRRAIETSRVEELKEEIKDILRRNREHLEELKRRIDELRKENEKHLRDLEESIKEVEKEVRESRR

SEQ ID NO: 9271 - protein, 181 aa, Artificial Sequence; identical to SEQ ID NO: 9270
  Synthetic

SEQ ID NO: 9272 - protein, 181 aa, Artificial Sequence
  Synthetic
SEIETVLEDAERKIRELKKRLEDVLRRLAEIYTRAKELLKRVLDELRKIYEDLKKKLEEKVRDEKRLRELKRKLDEALRRHEKNIRDISKRLDDELRRHEEHIKDIMRKLDEILEELRRLAEKVRVEELKKRLDEVARRVEKVLRENEEEIKESLKEVEKMLRRNRKEIKDSEKEVDDEVK

SEQ ID NO: 9273 - protein, 181 aa, Artificial Sequence; identical to SEQ ID NO: 9272
  Synthetic

SEQ ID NO: 9274 - protein, 181 aa, Artificial Sequence
  Synthetic
DELERVLEDAETKIRDLKRKLKEVLDKLRRIYEELEERLKRVLEEIEEIYRRAAEALRRKVKDEDKLRELVKELKRMLDEHRDNIRRIKEDLRRRLKEHEDDIERAKEELDRILERLRRLIDKVRVEELKRELEEVAKRVEEILRRNEEEIKKSEEKIRKVLRDNREKAKRSLDRVREALK

SEQ ID NO: 9275 - protein, 181 aa, Artificial Sequence; identical to SEQ ID NO: 9274
  Synthetic

SEQ ID NO: 9276 - protein, 181 aa, Artificial Sequence
  Synthetic
DELKKVLDDARETSDRLKKENETVFRELEEIYRRLEKELRRVLRELEEIYRRAEDKLTKSVRDEDKLRDLRRRLKEELDRHRDNARRIVEKLKEMLDRHREDLERIREENDRLLEELERLIDDVDVSELDKRIRELERRNRESVKENRDRLKESADDVKRALDRNREELEESERRVKKAVD

SEQ ID NO: 9277 - protein, 181 aa, Artificial Sequence; identical to SEQ ID NO: 9276
  Synthetic

SEQ ID NO: 9278 - protein, 181 aa, Artificial Sequence
  Synthetic
SELEKALRDAEEIIKKAKKLLKEALDEAEKIYREAAKLLDDALREAEKIYREAADALDKKVKDEKRAREAKEELKRALKEHRDDAKRAKDELRKALEDHRRNIDKARRELDEIAKELRKLIKDADAKELRDRAKEAADRAKRAAEENRKKARESLERAKRAAEDNRKKAEESLKRAEETAR

SEQ ID NO: 9279 - protein, 181 aa, Artificial Sequence; identical to SEQ ID NO: 9278
  Synthetic

SEQ ID NO: 9280 - protein, 181 aa, Artificial Sequence
  Synthetic
SEIEDVLRRAKEISDRLKRENDRVLDELRRSYEDLERELEEVLRKLEETYRRAKEELRKKVRDKDKLKEIMKRLDEELKRHEEDIRRIVEELRERLDRHRRNIDKLKKENDDMLRELEKLVDKVDVSELRERIERLKERNRKSLEKNKRDIARSEEEVRKALERNEDEIRRSEEEVKKALK

SEQ ID NO: 9281 - protein, 181 aa, Artificial Sequence; identical to SEQ ID NO: 9280
  Synthetic

SEQ ID NO: 9282 - protein, 181 aa, Artificial Sequence
  Synthetic
RELEKVLEDIREISERLEKRNRDVLKELEDIYREAKKRLDDVLRKLKETYDRAEEELRRKVRDEKKLRDIVRELRDLLRRHEEDIRRIKKELDDELRRHEEDIERIRRRNEEALRELTKLIDKVDVSELRKDLRKLAEDNRRSLEENKKEITESLKEVEKVLERNKDEIRKSKERVDKALE

SEQ ID NO: 9283 - protein, 181 aa, Artificial Sequence; identical to SEQ ID NO: 9282
  Synthetic

SEQ ID NO: 9284 - protein, 181 aa, Artificial Sequence
  Synthetic
SELERVLDEMRKIIERLEEELRKVLEDLRRIYEELKRKLDDSLRESERRVRELKEELDRKVRDKDKLREVKERIDDALRRSRKRIEDIKRKLDDALRRHAEDIERIIKELRDILEELRKLIDKVRVEELKDTIDKVKKRVEDALEKNRRDIDESRKEVDDELRKDEEKAERLAREVEKAKE

SEQ ID NO: 9285 - protein, 181 aa, Artificial Sequence; identical to SEQ ID NO: 9284
  Synthetic

SEQ ID NO: 9286 - protein, 178 aa, Artificial Sequence
  Synthetic
SSDETVKEKVKKVARDVDRHVEKLRKALEEMEREVREHVKRLEDELRRMDEEVKRVREEPVDEERLKRITDRLREELRKLHEDSKDTIRKLREKLEKLKKETEDTKRRLRKKLEDLRREKGADEKVLRDAERIVRELERKLDKVDTEIAETVKRLEDTIRDVNRKIKDRVDKLRKELE

SEQ ID NO: 9287 - protein, 178 aa, Artificial Sequence; identical to SEQ ID NO: 9286
  Synthetic

SEQ ID NO: 9288 - protein, 178 aa, Artificial Sequence
  Synthetic
DSDEKVKRVLEELRKEVKEHVERLRARAEDMSREVKDHVRKLKEDLERMERDVERVKRKPTDEKTLKEIADRLRKILEDLERETEETKKRLEEKLRKLHKETEESKKRLEDKVDTIRKEKGASEEVLERVRTEVERLKRELDKVNEDIRKRVEELKKELDEVDDEIRKEVDRLEEALK

SEQ ID NO: 9289 - protein, 178 aa, Artificial Sequence; identical to SEQ ID NO: 9288
  Synthetic

SEQ ID NO: 9290 - protein, 178 aa, Artificial Sequence
  Synthetic
SSDEEVKKKLEEVKEEVKRHVERLKRALEKADRDVKDHVRRLKEVLKRMADEVEKVRREPVDEDRLEKVVRDLERKAEKLKRETEETAKRLRDILKELKDRTEKTKKRLRDKVREIRKEKGADEKVLKDVEEKIRRLEKELDEVNEDIERKVRELEKELRAVDEEIKRIVDRLRKELE

SEQ ID NO: 9291 - protein, 178 aa, Artificial Sequence; identical to SEQ ID NO: 9290
  Synthetic

SEQ ID NO: 9292 - protein, 178 aa, Artificial Sequence
  Synthetic
SSSERVKTELDRMRKEVKRHVEELEKELKRLTEKVKRHVEESKKNAEEITRKVEDVRRKPTSEEDLKRIIEDLRRNLKENRDRTERTKEDLRREVERLKKETEDTKRELERKLKRLREEKGASEEVLREVTREVTRLREELDEVNKRVEKRLEELERELDRSDEEVTRIVEELVDELR

SEQ ID NO: 9293 - protein, 178 aa, Artificial Sequence; identical to SEQ ID NO: 9292
  Synthetic

SEQ ID NO: 9294 - protein, 178 aa, Artificial Sequence
  Synthetic
SSEEDVRRKLEKMRKEVDEHVRKLEEDLKRLAEEVKRHVEDLERVAKEVADRVEEVRRQPTDKDELRKIVEELRDTLKKLRDRTEESKKRLEKLLRDLKKETEETKKRLRESLRKLEEDKGADKKVLDTARDILRKLEKKLDDVDEKIERIVEKLKRELDEVNKRATETVERLIRELK

SEQ ID NO: 9295 - protein, 178 aa, Artificial Sequence; identical to SEQ ID NO: 9294
  Synthetic

SEQ ID NO: 9296 - protein, 178 aa, Artificial Sequence
  Synthetic
RSDEELEKKLKELKEEVDEHVKRLEETARRLDKEVRRHVEESKRNLEEMDREVKEVRRRPTSEDELREIVKKLEDNLRRNRERTERSKERLERELDRLRRETEETKKRLRDKVKEIRDEKGADDKLLERAERTVRELERRLDEVNDRIRRIVEELKRKLDRSNEEVTRKVRELSKELE

SEQ ID NO: 9297 - protein, 178 aa, Artificial Sequence; identical to SEQ ID NO: 9296
  Synthetic

SEQ ID NO: 9298 - protein, 178 aa, Artificial Sequence
  Synthetic
DELERVVEEVRKRIERLKEELRRVHERSREIVDRLRKELEKSLEEVRRIVEDLKRKLRERGVPEEMLTRLERKLEEDEKRVKDIIRELERKLEEIAKTDKEIIDRLDEKLRELEERLKRGLREEDLERMADKLRKDVERAVRKNETDADKLRREVEEVVRRNKKTAKELEDEVRKELT

SEQ ID NO: 9299 - protein, 178 aa, Artificial Sequence; identical to SEQ ID NO: 9298
  Synthetic

SEQ ID NO: 9300 - protein, 178 aa, Artificial Sequence
  Synthetic
SEREKVAKEATDIVEELKKTLKDVHRRSKEIVERLVKKLADVNKDSRDKAEELKKRLDDRGVDKRVKKELEDRLRKLHRDDERIIKRLRDELKRIEKEDRDIIRRLDKELKDLARLLDKGLREEDVKRIAKKLEEDVRRVVRKNEEEIKKLAEEVDRVVEDNKRLVEELKRRVDEALK

SEQ ID NO: 9301 - protein, 178 aa, Artificial Sequence; identical to SEQ ID NO: 9300
  Synthetic

SEQ ID NO: 9302 - protein, 181 aa, Artificial Sequence
  Synthetic
DADDELRKIVEEADRRSKESVREIEELLRKLEREVEDIVRRIKKLSDDTRKRIDDLRKEGKTEELKKRVEKELRDNKEELKKILEEVRDRARRAREVLKEMEDRSREVVERIRKVLEDLRRKGVVSEEVLKRVEEIIKRLEEENRKVLEELERSVRKLEEDIRKVLEDNDRVVKELARRID

SEQ ID NO: 9303 - protein, 181 aa, Artificial Sequence; identical to SEQ ID NO: 9302
  Synthetic

SEQ ID NO: 9304 - protein, 181 aa, Artificial Sequence
  Synthetic
SAVEKLEELVERVARRIDELVKKIKELLDDVERKSEKTVRDLERLSEETKRSIDDLRREGKTEELLERVRREAKKNREKVKRVEERSRDLVRRVREMLKKIKREVDELLREAEESLKELKDRGVVSEEVLKRVRETLERLERKIKKVLDELKKRVEELRKKNEDVVRRNEEVVKKLVEDIR

SEQ ID NO: 9305 - protein, 181 aa, Artificial Sequence; identical to SEQ ID NO: 9304
  Synthetic

SEQ ID NO: 9306 - protein, 184 aa, Artificial Sequence
  Synthetic
SVEDVIRDLRRVITESRELSERVLERIEETTRRSKEESKRVADKVKKSSDDLREAVERIRTPEEEKDRLEKELRKLVEENRKSLEESKRDLDDLLRRNRKTVEESRRELDELRDRVEKVLKRGVSDEKAKELLRRVKEVVDRNKEKLDRDLERNKRRIDENRRKLEEDLRRNRKVVEELRKRLE

SEQ ID NO: 9307 - protein, 184 aa, Artificial Sequence; identical to SEQ ID NO: 9306
  Synthetic

SEQ ID NO: 9308 - protein, 184 aa, Artificial Sequence
  Synthetic
SVEDVAREIREVLRRLEESVRKVAEDNRRNNEELRRLVEEVLKRIRDSSDRLRKVVEDIDVPEEKKKELDKRLKKLIEDNEDSIRRLREKIERSIRENEERLKRITDRLRKLRKEVEDVLRRGVSDEVLERLLRRVREAVKELEDELERSSREDNRRSRELEEELKKDLKRNEDEIRDVERALK

SEQ ID NO: 9309 - protein, 184 aa, Artificial Sequence; identical to SEQ ID NO: 9308
  Synthetic

SEQ ID NO: 9310 - protein, 184 aa, Artificial Sequence
  Synthetic
SVEEVLRRAEEILTRSKEESRRVFEEIRETTERSKEVSKDVARRNKEILDDLKRKIEEVDVPKKDLERLEKRLRELEEHLERFLRESKRELDELLRKNEDTLRKSKRKLDELRKEVKEMADRGVSDDVLRRLLEKIEEVVRDNERELKEDLDRNRKVIEENRKKLEDHLRRTEEEVDDIRRKLK

SEQ ID NO: 9311 - protein, 184 aa, Artificial Sequence; identical to SEQ ID NO: 9310
  Synthetic

SEQ ID NO: 9312 - protein, 184 aa, Artificial Sequence
  Synthetic
KVEEVSKKLKDVLRELEELVERVLERNRENNERLRDKVRKVLEENKEVLDRLKKEVDDIDVEERKLRKIKRELEELERHLRETARRLEKKIRDSIEKNERDAERLRRDLKRLDEELKEVEARGVDEEDLRRLLEKIKREIDRLAKELEDSSRDDNRISRELDEELKRHLEETRRAVREISEKLR

SEQ ID NO: 9313 - protein, 184 aa, Artificial Sequence; identical to SEQ ID NO: 9312
  Synthetic

SEQ ID NO: 9314 - protein, 172 aa, Artificial Sequence
  Synthetic
SRAEEVLKKVEEEVKKLEDELRRSSERNNRESRRLEDELKKVLDKNRKLVEDLRRARLDEEDVRRTLEESEEENREIDKRARDELRKMEEENKDVLRKAREKLERIRKEIEEANLPKEVVDELRRVLERLRRVIEDVIRRNKEDTDRLEREIERVRKELKDINKKLEEDVRR

SEQ ID NO: 9315 - protein, 172 aa, Artificial Sequence; identical to SEQ ID NO: 9314
  Synthetic

SEQ ID NO: 9316 - protein, 179 aa, Artificial Sequence
  Synthetic
DEAETLLRDVERKVEELKRRSEKLLRDVEELVRRLLRSNEESLKKVKEDLKRLKDLVRRGDVDEETVKEVKKRLKEILDEDKKELREVIERAKEISKRHKEEVEKAVEDLKRILEDMARKGVRDEVLREVDRVIDDVRRALKKVNEEIEEVIRRLKRESERVNKEAEEIIRTLEDALRK

SEQ ID NO: 9317 - protein, 179 aa, Artificial Sequence; identical to SEQ ID NO: 9316
  Synthetic

SEQ ID NO: 9318 - protein, 172 aa, Artificial Sequence
  Synthetic
DDLERVLEEIRREIERIRRELEESNEENKDIVRRIEEELKELLKDNKRIVETVTKANLDRDDVRRVLEESKRKNRRVLERLERLIRESERRNKELLDRAREKIDRLRKRLEEANLDREVLERLEKELDRLRKDIERVADENRKINDTLRKRIEEVMARLDEINTDLKDRVET

SEQ ID NO: 9319 - protein, 172 aa, Artificial Sequence; identical to SEQ ID NO: 9318
  Synthetic

SEQ ID NO: 9320 - protein, 177 aa, Artificial Sequence
  Synthetic
SSDEVLKEIEEIIRRLEEEVRRVNKEVNKSTEDLRREVEEVLRRTNELIEELERRVTRTEELKRVIDELRDRDRKVRRRVERVIEESKKRDDESRKRLTRAVEKLRKDLKKLADDNVPEEALRKAIKDVRDIVKKVKDELKEWRDRNKELVDRLSEELKEWLKDVERVLKELTDKDR

SEQ ID NO: 9321 - protein, 177 aa, Artificial Sequence; identical to SEQ ID NO: 9320
  Synthetic

SEQ ID NO: 9322 - protein, 177 aa, Artificial Sequence
  Synthetic
SLEEVLERIKRIIDELKREAKRVLDETNTLIREVKKRLEDVNRDVNRLIEELRERVTDTEELKRVIERLRREDEKSKREIEREVETLKKRDDEVRKKLDDVAKKLRDDLKEAAERNVPEDMVRDLERRIREVVKRLKEDLERWKKEVEDEIKRLEDRLKEWLDRVREMLEKLREEDR

SEQ ID NO: 9323 - protein, 177 aa, Artificial Sequence; identical to SEQ ID NO: 9322
  Synthetic

SEQ ID NO: 9324 - protein, 177 aa, Artificial Sequence
  Synthetic
SSEEVLKTIKDIIDELRKEAEEVLRRTNESTKELEERAEEVNKRVNDSTRELAKKVTDTEELKRIIEESKKKDEDSRREVKKVLDESRKRDEEVRRSLKKIIEDLEKELRDLARKNVPEEMLDEVKKRAEKVVEDLRRELRKWLEDNKRLVEKLEKELRDWLKENKELVKELEDRDR

SEQ ID NO: 9325 - protein, 177 aa, Artificial Sequence; identical to SEQ ID NO: 9324
  Synthetic

SEQ ID NO: 9326 - protein, 177 aa, Artificial Sequence
  Synthetic
SSEEVLDTLRKLIEDLRRRAEEVLERTNRSTDELRKRVEKVLEETNRLIKKVEDDITRTEEAKTIIDKLREDDERVKRRIERVLEESKRKDEEVRKRVKDVLDRLREELKRLREENVPEDMLREALERIKEIIDRLERELEEWIKTNEDLVRRLTEDLERWLRTVAEILKRLKDEDD

SEQ ID NO: 9327 - protein, 177 aa, Artificial Sequence; identical to SEQ ID NO: 9326
  Synthetic

SEQ ID NO: 9328 - protein, 181 aa, Artificial Sequence
  Synthetic
DELERVEEEIKKLSDDSRRVIEEVRRRLEESNKDLERRLREVEKRLKELTDDIKRTAERNNVDKTLEKKLRELNERNRKSKEDLKRRSDETRERNDETIRESRKENDELERRVEEASRRGLDRELLRKLLDDVRRVVERNKRKLRKDLEDNKREIERVKREADKDLEDHERVIRKLKEDIR

SEQ ID NO: 9329 - protein, 181 aa, Artificial Sequence; identical to SEQ ID NO: 9328
  Synthetic

SEQ ID NO: 9330 - protein, 181 aa, Artificial Sequence
  Synthetic
DELERVVEEIRELSRDSERAIEEVRRELKRTNDENRESAKRVAEELKKLTDKIKEEADRNNVREDLDRELRRLNEDNKRSIRENEERLKKTKRENERTIEESKKRNKELEDEVEKAIKDGLDRELLRELLKEVRRVVEENKRRLEEDLKKNRKKIDDSNKELRKDLEDHRRVIEKLEREIR

SEQ ID NO: 9331 - protein, 181 aa, Artificial Sequence; identical to SEQ ID NO: 9330
  Synthetic

SEQ ID NO: 9332 - protein, 175 aa, Artificial Sequence
  Synthetic
DELEKVKEDIKRLLDDVRREVEKVNRDSRRLLEDLRRVVKEVSDRSKELAEDLERKVGRDEDVERVKRELEKLNRELERILEEAAREVKRLNKEHDDKLKKAEDDVRKLLEELERDNLPVEDVLREVKRLAEEVKKETKRVLDEIKKLVEDVARELERILEDSERLIREVEKRAT

SEQ ID NO: 9333 - protein, 175 aa, Artificial Sequence; identical to SEQ ID NO: 9332
  Synthetic

SEQ ID NO: 9334 - protein, 175 aa, Artificial Sequence
  Synthetic
DEIEDVLRRAKKLLDDLRRVVKKANDDSRRLLKKLKDKVEEVSRRSRRLAEDLERTVGRDEDVERVARELERLNRKLEDELRRVATEVRDLNDKHRRLLEKAEREVKRLIDELRERKLPVEDVLREVRKIIEDVKRASEKILEESRKLIEDVERRLEEILKRSEDLIRTVKERKR

SEQ ID NO: 9335 - protein, 175 aa, Artificial Sequence; identical to SEQ ID NO: 9334
  Synthetic

SEQ ID NO: 9336 - protein, 185 aa, Artificial Sequence
  Synthetic
DELERVLEEIKRLLDDVHRESKRVNEESERLVKKLHDDSRRVLTEIKKLLDDVRRVVEELPKTDELRRKLEEAERRIRELLEELKRRDKELEERAKRLNEKTKEDDKDAARKVEDLLRRLKDENGTREKVEEILRRVRELVKKWKTELERALEENEREVERWKRDLDRILEEVRRVVERVEREIR

SEQ ID NO: 9337 - protein, 185 aa, Artificial Sequence; identical to SEQ ID NO: 9336
  Synthetic

SEQ ID NO: 9338 - protein, 180 aa, Artificial Sequence
  Synthetic
DELEKLLEDIRRELKRVREDDKRHNDKVKETLDRVRELIKRLLELIKKVADEIRSLKRRVPREEIRKRLKELEKRLEDLRRTIDKLLKDLEDTSRRWNEESKKRLEELRRRLEKAERDVPRTREVEEVKRRIEEILKEAEETNRRSHEKAKRVLEELKDIVRKVLEELRRLLRELEEEVR

SEQ ID NO: 9339 - protein, 180 aa, Artificial Sequence; identical to SEQ ID NO: 9338
  Synthetic

SEQ ID NO: 9340 - protein, 180 aa, Artificial Sequence
  Synthetic
EELERLREEIKKILDEARERDETLLREIRREHEKNKRADEEHNRRVEETLERIERLAERVPREEIKKRLEELKRRSEKWNRDSERSLDEIRRRLKKWNDESRERLERAKRRLEKARRDVPDTEEVRAVERELRKILDEIRKTNKEVHDRIRELLERSKRSNDESHKKVEDVLRELKKRVD

SEQ ID NO: 9341 - protein, 180 aa, Artificial Sequence; identical to SEQ ID NO: 9340
  Synthetic

SEQ ID NO: 9342 - protein, 181 aa, Artificial Sequence
  Synthetic
SETDEVRKELRKLLEDSRRAVEEVKKKLDDSNKEVRDRVRRIREELKKLEKEVREIKRKNSDEKELADVVRRIREKAKELKKELRKILEDLDKKYKDLKKENKDILDDLDRRAEELKDRLRKNNVEEELLKELEEVLKRLRELHKRTIDEVEKSAREVKDEIRRLEEELDRVLKKLEDALR

SEQ ID NO: 9343 - protein, 181 aa, Artificial Sequence; identical to SEQ ID NO: 9342
  Synthetic

SEQ ID NO: 9344 - protein, 181 aa, Artificial Sequence
  Synthetic
SLDEDVERLIKELKDEARKLNEEMKEYVRDSERKVRRLNEEIRRLIEELKRKAEELKRGNLRRDDLKRRLDELREEVKEIKRRIEKVSEDLKKENDEAKRRLEEVSEELKKKVEEIKEELERRNVDDRVKERLERVLDEAEKSNEETLRELDDVSRRIEESNRRTLAELEKVLRDIEKDVT

SEQ ID NO: 9345 - protein, 181 aa, Artificial Sequence; identical to SEQ ID NO: 9344
  Synthetic

SEQ ID NO: 9346 - protein, 173 aa, Artificial Sequence
  Synthetic
SELEKLVEDLRRAAKESHERNEKLLDESRKTVEDVKRKLEEILRRSEEVVREIKKKKKDIDKEKVKRDLDELHKRTRDLLEKLKRELDELHKRSKEELEDNKRRLEELLEKVERDGADEEVRRRVEKLIEENRRSSRRVEEEDKRLLKELKDAIKRVEEEDKKLVEELRRSEK

SEQ ID NO: 9347 - protein, 173 aa, Artificial Sequence; identical to SEQ ID NO: 9346
  Synthetic

SEQ ID NO: 9348 - protein, 173 aa, Artificial Sequence
  Synthetic
KEVEDLVKEVKERIEESHKENKRILDKARRVVERVETDLRRILEESKRTVEDIERRKERIDEREVEKRLEELHRETKKLADKLRDELRKLLEDIERELRENEERLRRLLEKVERDGVDEEMKKAVDELIERNKRSSDRVREEAKKLIDRLEEVIEKVERDDEKLVRDLEEELR

SEQ ID NO: 9349 - protein, 173 aa, Artificial Sequence; identical to SEQ ID NO: 9348
  Synthetic

SEQ ID NO: 9350 - protein, 185 aa, Artificial Sequence
  Synthetic
SSLETLEKIARDLLREVKETLDRVREESRRLLEEVRRVAEESRKEVERLLKELEEVIRREVRDEKKVEELKRKLEELKRRVDEEHKKSDKRLKEILEENERTLKEVEDRLRELEKRVEDDLRRGLDDELLRELAERVRRVVKKIKDELRDDLRRTREEVERLKERHKELVKRVKEAVDKIREEIR

SEQ ID NO: 9351 - protein, 185 aa, Artificial Sequence; identical to SEQ ID NO: 9350
  Synthetic

SEQ ID NO: 9352 - protein, 179 aa, Artificial Sequence
  Synthetic
KEVEEILRDVARLVEDNRRVLERILREVEKLIRDNEERLKEILERSKDLVRRIEELIRRGEVDEDTVREIIERSEELNRRLEKHARDSERRLEKLAEDLRRHAKRSLDELKRLLDELEKRRSDVEEVRRAIEELLKDVERAYEEVVRRIEKLLDDLRRKYEEVKKENERLNRRVEEAAR

SEQ ID NO: 9353 - protein, 179 aa, Artificial Sequence; identical to SEQ ID NO: 9352
  Synthetic

SEQ ID NO: 9354 - protein, 179 aa, Artificial Sequence
  Synthetic
DDVEDILRDVERLVEENRRRLEEIVRESEDKVRKNDETLKKILEDVKREVERVERAIERGEVDEETVERIKKKLEELLEELRKHMRKSREESKDLNRRLREHAERSLRTLEELVRDLKRRRSDVKDVVRAIEELLKDVEEKYRRVSERNKELNKRVEDTYREVMKEIRRLLERVDRRAR

SEQ ID NO: 9355 - protein, 179 aa, Artificial Sequence; identical to SEQ ID NO: 9354
  Synthetic

SEQ ID NO: 9356 - protein, 175 aa, Artificial Sequence
  Synthetic
TEVERLVERVKEIVEEHRKKLEELARRSEELVERHEKKLRDLLRESRELVERAKKENSKDRTVLKELRDLVRELNKRSKELSEETRRRVAKTNDDSRKTSKRTREEIERLLRELERDDARDEIKERLKELLREAEEVSRRVNKRNEDLLRRLEKVSREVNERNEDLLEELDRTVN

SEQ ID NO: 9357 - protein, 175 aa, Artificial Sequence; identical to SEQ ID NO: 9356
  Synthetic

SEQ ID NO: 9358 - protein, 175 aa, Artificial Sequence
  Synthetic
DEVERLVEEVEKLVEEWIRDLERILDESRRTVEEWKKELKRLLDRSKRLVEDAKRKNSKDERVLRELDERVRRINEESKRRNDEAKKESERSLREIEKRNKEVADRVRDILEELRRKDAKKDIERRLERLMEELHRVSKEVLDADRELLKELHDVSREVNKRNEELLDELRKTVT

SEQ ID NO: 9359 - protein, 175 aa, Artificial Sequence; identical to SEQ ID NO: 9358
  Synthetic

SEQ ID NO: 9360 - protein, 175 aa, Artificial Sequence
  Synthetic
DEVEETVKRVREEVERWKEELKRIADEVRRLVEKVKDDLRRLLDESRKLVEEVRRENSRDDTVLKRVRDEVRKINEDSKRLLEEAKRRVEKIRREIKKRNDELEERARRILRELDRRDAKSEIKRRLEELLKELHKVSKDLDKILEELLREVEEVVRRVNETNKKLLKELDETVR

SEQ ID NO: 9361 - protein, 175 aa, Artificial Sequence; identical to SEQ ID NO: 9360
  Synthetic

SEQ ID NO: 9362 - protein, 175 aa, Artificial Sequence
  Synthetic
SEVEELVKRAAELADEARKRLERIMEEVKRLVDEWEKELKKLLDESKELVEKVRRENSKDERVLREVKKKIEEINKRSREENKKVAEKVREIEERIERLLEELKELIKRIEDKARREDLKEKVREDLRRLLDTLRKVVEELKRRLRELLKKLHDVSRKVNEENERLLRELEETVR

SEQ ID NO: 9363 - protein, 175 aa, Artificial Sequence; identical to SEQ ID NO: 9362
  Synthetic

SEQ ID NO: 9364 - protein, 175 aa, Artificial Sequence
  Synthetic
DEAEKLVDEVRELVRRHKETLKEILERVKELVKRWKDTLDKLLRDSEELVRRVKEENSKDERVLRKARKEVRDINEESKERNKELEKRMRRLEREIERVDRETEERIRRILDDARRKDLRDRVKEELKRLLKELKEMSKRLTEELRRLLKELHDRSREVNERNKRLLEEVDRTVK

SEQ ID NO: 9365 - protein, 175 aa, Artificial Sequence; identical to SEQ ID NO: 9364
  Synthetic

SEQ ID NO: 9366 - protein, 181 aa, Artificial Sequence
  Synthetic
DEIREVEERNRRSNEEMKKAVREVEKDIERVAREIRKRAEEVSKRNEDINREIRKTLRDKKKLTDILRESKELNRKLEELVKRIKDELDKLLEDLRREVRKIEEESKRTNEDLKKKAKDGTSDETLRRVIRKSEELLKRLKDRLDEVRKRVEEILKRAEERLREVIKRSEELLEEVKRESD

SEQ ID NO: 9367 - protein, 181 aa, Artificial Sequence; identical to SEQ ID NO: 9366
  Synthetic

SEQ ID NO: 9368 - protein, 177 aa, Artificial Sequence
  Synthetic
SLLEEVEKTLRKIVEDSDREIKRVSKKNKETVKRLEELMREVNRRSTEIVKRIRDSDLRTEELKRLEEEARKLNDESREILERVTRESERLDRELKKHADESRERAKDLIRRLKKLGDKEMLDRIIEEAKRLHEENKRKLEEVERRSEELLKELKRRLEELIKRNDDLLREVEERKR

SEQ ID NO: 9369 - protein, 177 aa, Artificial Sequence; identical to SEQ ID NO: 9368
  Synthetic

SEQ ID NO: 9370 - protein, 181 aa, Artificial Sequence
  Synthetic
DEVEEVIRRAEELVKEVKKRLEELIRESEALLERVKRRLERLIEESRRRLEEVKKKVSSGLDEKTLKEVLDRLRRDVERINEESKRVLDEVEKEIRRTNKKIKEILDRIRKKVEDLEKELRDRGAKDEIKKRLRKLLEEIKKVVDDVRETNKRTLERLEELARRVNEENKKILDDLEEAVR

SEQ ID NO: 9371 - protein, 181 aa, Artificial Sequence; identical to SEQ ID NO: 9370
  Synthetic

SEQ ID NO: 9372 - protein, 181 aa, Artificial Sequence
  Synthetic
KEVDEVVKRAEDLLREVKKRLDEVIEDSERLLREVRKRLEEIIRESEKLLEDVRKVVERGLREDELKKLLDDIRKKIRETDEKLKKTLEDLRRAADEINRRTEDILRRIEEKVKRLRDELRTRGAKKEIEKRLEEILREIKKLVEEVNRRNEDILRRLEREVEKVRRVNEKTLERIEETVR

SEQ ID NO: 9373 - protein, 181 aa, Artificial Sequence; identical to SEQ ID NO: 9372
  Synthetic

SEQ ID NO: 9374 - protein, 185 aa, Artificial Sequence
  Synthetic
SLVEDIRRDVKRILKEIDKLVKDIEEENRRASRESERLVETIRREVKEVLDRIRKLVRDVPLDEKTLRRIEERIERLRDSIEKMERRMEELNKEHERRVEKILREIEKLLRELDKELEDVAKEPGDRKLIEEIRRRLKKALEDIRRLIEESRKRVEESLTRSRKLAEDIRRELEDVLRKVDEDAK

SEQ ID NO: 9375 - protein, 185 aa, Artificial Sequence; identical to SEQ ID NO: 9374
  Synthetic

SEQ ID NO: 9376 - protein, 177 aa, Artificial Sequence
  Synthetic
SRVKEVADRVRDIVRRIKDEIKEHVDRLRDVIRRIKEKLEEHSRRLREIVERIRASNLDKDEVKDKLDKMKKNAEEVHEDIKRKLEDAKRRTEKTKRDIERKLEKLERDVRRAADTVDEELLKRLEDIIRKLLEDIKRVVKELEEVSRTLLREIEELLEENRKSMEKLLRDIEEEAR

SEQ ID NO: 9377 - protein, 177 aa, Artificial Sequence; identical to SEQ ID NO: 9376
  Synthetic

SEQ ID NO: 9378 - protein, 177 aa, Artificial Sequence
  Synthetic
SKVDEVVKRLEDAVREIKKEIDKHSKELADEVEKIKKELKDVSDRNREVVRRIREANLSEKDVTETVKEAEKRNRDIEKRIREELKRLEDNVRDMHRKLDKKLKELKRTVEEMRRSVDEKKAEELRKRVDDLLEEIRRLLEENKRTVDKLLDEIKRVLEDHRRSVEELLREIDKDAK

SEQ ID NO: 9379 - protein, 177 aa, Artificial Sequence; identical to SEQ ID NO: 9378
  Synthetic

SEQ ID NO: 9380 - protein, 175 aa, Artificial Sequence
  Synthetic
SEVDEVLREAKRIVDEVHKDNERATEESRRLVKKVHEENEEMVKDIERIVKEVKDANIDEKLVTEILKEIEEALKEAARRNKEVKDRLRELSRRVSERNREILEELKERLDRVRERRKDVKELEREVEKLLKRIEESLRRHRKENKRLLEELDRSLRELAKIVKEVLDEIRERTR

SEQ ID NO: 9381 - protein, 175 aa, Artificial Sequence; identical to SEQ ID NO: 9380
  Synthetic

SEQ ID NO: 9382 - protein, 175 aa, Artificial Sequence
  Synthetic
SEIEDAVRRIEKRVEEVHRENKKLTDESRKLVREVDEENKKVSRESKKLVEDARRRNADEDIIRELLKELKRRSEEVSKRNEKILKELDDKSKEVAKRNKRVLDEIKRTLKEVLDRRKDARELSEKVREVLEKIKKSLEDHRKANEDLLREIRDSLKKHRDENRRLLKELEETRK

SEQ ID NO: 9383 - protein, 175 aa, Artificial Sequence; identical to SEQ ID NO: 9382
  Synthetic

SEQ ID NO: 9384 - protein, 175 aa, Artificial Sequence
  Synthetic
SDLDRVAKELTEIVERIIRELERLTEKSRDIVRKVHKENEDAVRKIRKIVEEVKRKKIDEDTVREILRRIREELKRLKERNEEILERIKEESERVERTIRKVLEEMKRKLDRVRERRPDARELEKRVRDLLRRVEEALRRHKEENRKLLEDIKRSLEEVAKEVERVLKEIKDTAR

SEQ ID NO: 9385 - protein, 175 aa, Artificial Sequence; identical to SEQ ID NO: 9384
  Synthetic

SEQ ID NO: 9386 - protein, 175 aa, Artificial Sequence
  Synthetic
SEMDDVLKKLAETVKRIIERLKKLTDDSRRLVEEVHRRNDKLSKESREAVRKAEERNIDEKDVRKLLEDLKKKSEEVAERNKRILDTLREISKRAEDEVRKVLKELEKTLKELEDRRPDVRELSEEVKKLLDEVRKALKRHKDENDKLLKEIEDSLRRHKEENDRLLEKLKESTR

SEQ ID NO: 9387 - protein, 175 aa, Artificial Sequence; identical to SEQ ID NO: 9386
  Synthetic

SEQ ID NO: 9388 - protein, 175 aa, Artificial Sequence
  Synthetic
DEAREILKEIRDIADELRKRLERLTERSERIVREVDKENRRVVEEIREIVERVKKAKIDEDTVRKILREIEEKLDRVAKRNEKILKKIEDDSRRVAKEVREILKKIEDILDDARRKRKDVRELKKEVERVLEEIRRLLEEHERANRKLLKEIRDSLRELKKRVEEVLREIKEATK

SEQ ID NO: 9389 - protein, 175 aa, Artificial Sequence; identical to SEQ ID NO: 9388
  Synthetic

SEQ ID NO: 9390 - protein, 175 aa, Artificial Sequence
  Synthetic
SEAEEMLERIKRRVEEVNKENKKMTDESKKIAEDVDRDNREVLREIKRIVDEVRKRNIDEDTVRKIEREIEKTLEDVRRRNDEILKDIRRLSEEASRRNKEILDTIRETLKRVRERRKDVKELEKEVERVLKEIKDSLRRHRKENEDILREIKESLDELDKEVKRVLKEIRDTAR

SEQ ID NO: 9391 - protein, 175 aa, Artificial Sequence; identical to SEQ ID NO: 9390
  Synthetic

SEQ ID NO: 9392 - protein, 175 aa, Artificial Sequence
  Synthetic
SELEEVAKELRKTLEDSTRENKKHTDDVRRIVDEVDKRNRKAVEDIRKIVDEVRKRKIDEDLVREILRRIAEKLRRLREENRRILEEIKKSLRDMERRNEKINRETKEKLDRVKERRKDARELEEIVKRLNERDKEVLEKDAEDVKRVLEEIKESLERVARDVERVLEDIKRATD

SEQ ID NO: 9393 - protein, 175 aa, Artificial Sequence; identical to SEQ ID NO: 9392
  Synthetic

SEQ ID NO: 9394 - protein, 181 aa, Artificial Sequence
  Synthetic
SALEDLERKVEELIRRLDELLREHRETLERLIRELDKLLTDHHRRNRELLERIKDVVRKAGRELEDIREILERLKKLNEESADIVRRVKEELKRILEKSEKEVRELKETLRRTVEEVKRVKDEDKLRKIVEELERLVDEVRRSLEKASKRLKDLVKEVKKRLEDITRESEELVRRVEERTR

SEQ ID NO: 9395 - protein, 181 aa, Artificial Sequence; identical to SEQ ID NO: 9394
  Synthetic

SEQ ID NO: 9396 - protein, 181 aa, Artificial Sequence
  Synthetic
SALEELKKEIKRVIEELKRALERHHKENEELRKRIDEVLKEHHDANRRLLEEIKELVRRAGRDLEEIRRIEEELKELDKESEERVRKIKEELKKLNEDSRKKVEDLKKELEDDLKRVDKVKDEEKLKEIVKEIRKKVEELKDDLRRMSEESRRLVEELEERLRRLTERSKRLVEDVRRRVT

SEQ ID NO: 9397 - protein, 181 aa, Artificial Sequence; identical to SEQ ID NO: 9396
  Synthetic

SEQ ID NO: 9398 - protein, 172 aa, Artificial Sequence
  Synthetic
SEKEELDRKIEDVRKKVEETSRKLKRVNDESKKEVKRTSDELRKKSKEVNEAVEREGVREEILKEITDLSREMEERSEKLNREVDRLVKESRKRSKELNDEAERLLRDLARKKELDVEEAIRRLKETLDRHREEVEDLIRKSREVLKRHEERVRELIKRHEDTLRELKKRAK

SEQ ID NO: 9399 - protein, 172 aa, Artificial Sequence; identical to SEQ ID NO: 9398
  Synthetic

SEQ ID NO: 9400 - protein, 178 aa, Artificial Sequence
  Synthetic
SEVDELMKRLKDEAEDIKEKVERLIREWEEAARKIAERVEKLVRDWERVIETLRDLKKRVDKEELKKRLKDLEEEVKREDKKSKDDLRRLEERVERENKKSEDRLEELRKRVKDNENEDKDLAERLRRVLREVERLVRTVNKKHREVLEEIRKEVERVNDEHRRVLEEIKRRVEKDVK

SEQ ID NO: 9401 - protein, 178 aa, Artificial Sequence; identical to SEQ ID NO: 9400
  Synthetic

SEQ ID NO: 9402 - protein, 184 aa, Artificial Sequence
  Synthetic
SAEEKLDTEVRRIAEEVKRIIDELRKVTEEVEKRIREINKTSEDTSREVKKTIREVLKRLTDEETVRRVEEKLRKLDKESRDTLRRSEETLRELKRRSDETIRRLERILEKLEEEVEDMKRKPLDEDTVEEVLERLRRALEKADKLVKDHIKRLKDVLRAIEEDHRRHLERLRRMLEEIKKEVT

SEQ ID NO: 9403 - protein, 184 aa, Artificial Sequence; identical to SEQ ID NO: 9402
  Synthetic

SEQ ID NO: 9404 - protein, 184 aa, Artificial Sequence
  Synthetic
SVEEKLTREAERLLKRIEEVIRRLRDANRRSADRIRRIDEKTRREVEKLKKKIRELAKRVKDEEVLRRIEKLLRDLKREVEEVSRRNEEILRESNKRLREVEEKLREILRRLKERLDRVREKGIREDLVEKVIKTMRKIVEDLERDVRKVIRDDEELVERLRRENEEVIKKLREIVKRLEDETR

SEQ ID NO: 9405 - protein, 184 aa, Artificial Sequence; identical to SEQ ID NO: 9404
  Synthetic

SEQ ID NO: 9406 - protein, 184 aa, Artificial Sequence
  Synthetic
SLIERLREVAEDLKRRIRKVLEDLRRANEESAKRIRDIDRRTREANRESNERIKEIAKRVDDKRVLDELKKIVEDSNDEVRRVSERNEEILKRSNEDLKRVEDDIKRVLDELEKTLEEVDRKDIKEEKVKKVIDDMERIVREIEEKIKRVIERDKKLVKKLEEDNRRVIKKDKDLVRRLEERTR

SEQ ID NO: 9407 - protein, 184 aa, Artificial Sequence; identical to SEQ ID NO: 9406
  Synthetic

SEQ ID NO: 9408 - protein, 177 aa, Artificial Sequence
  Synthetic
SLKERLRDDAKRLLDEDRKVLEDLERRAKEINDRNEEIVKKLRDKVREILERIDREVRDKDEVTRVKRKIEEILRTLEDRIKKVNDRTREILDRVRKKSEDSLRELKRLLDEVRRVDKEEVIRRILEELRELVERSERTVRDIERELDELIDKSRRDVEEIIKDLERELEELKRKTK

SEQ ID NO: 9409 - protein, 177 aa, Artificial Sequence; identical to SEQ ID NO: 9408
  Synthetic

SEQ ID NO: 9410 - protein, 177 aa, Artificial Sequence
  Synthetic
RVREELEKAAEEVRRRDRRVLEELEKEVRRINEDNKRVHETSREVVERILETIDRRVRDKDKVREVKRDVERILEELEEINKKVNEDTKRIRDTVEKISEESERRLKRLTDEVRRVTDEDVIRKIVRELEELVRESKETVDDIIRRLEELIRKSREDNRKIVEELKKLLDDLTREEK

SEQ ID NO: 9411 - protein, 177 aa, Artificial Sequence; identical to SEQ ID NO: 9410
  Synthetic

SEQ ID NO: 9412 - protein, 177 aa, Artificial Sequence
  Synthetic
SLKETLEEVVKRVLETDKRLLEKNDRTVREVNERNRRVHEESRRAVERILEEIDREVRDDKRVREAKTRVREILRRLEEENREVNKRTKRSLEESRKTSKKSLDDLKRLLDEVRRVTDEDTIRRIAKEADDLLEDSRRKVEDNSRRLKRLLEESKKSNEEIVRRLEDLLRRLKKESE

SEQ ID NO: 9413 - protein, 177 aa, Artificial Sequence; identical to SEQ ID NO: 9412
  Synthetic

SEQ ID NO: 9414 - protein, 177 aa, Artificial Sequence
  Synthetic
SLKEELEEDVKRINDRNEEVLKRLREVAKKLLDDDRKLLKELKKVVEDVLRDVDREVRDKDKVKEVKERIKKILKEAEEMSRRSLEELKRILAEVERRVAELNKETKRILDEARRVKDAEVIKKILEELEKLIKDSEDTAREIIKELKELVERSKRKVEEILKELEDLLEELKRRAD

SEQ ID NO: 9415 - protein, 177 aa, Artificial Sequence; identical to SEQ ID NO: 9414
  Synthetic

SEQ ID NO: 9416 - protein, 178 aa, Artificial Sequence
  Synthetic
SMEEKAEEVIKEVDEENKRLIEEAEKVIEDVEREDRRLVDELRKVIEKVERTIERDLKDLKELLEEARKRLREVEDRLRRLHERTRREVEEVRKRLKELLDESKRNLDKVREDLERTGDKDVIEEIIERLRRHVEDSEEKIRRIIRRLEEVLKRSKEDIERIIEELERLLDEMRERAR

SEQ ID NO: 9417 - protein, 178 aa, Artificial Sequence; identical to SEQ ID NO: 9416
  Synthetic

SEQ ID NO: 9418 - protein, 178 aa, Artificial Sequence
  Synthetic
DMDRKLKEEIKRAERRDKELVKDIERVIEEVLRANKELIERIEKVIDDVRREIEKRLKDLKELLKRAKDELDKVRKDLKRLLEESKKNADRVREELKKLHEKSKEDMERIKRELDETGDKDVIEEIIERIKDILRESEREIRRIIKELREHLKKSADRIEKIRRELERLLEKLEDDAR

SEQ ID NO: 9419 - protein, 178 aa, Artificial Sequence; identical to SEQ ID NO: 9418
  Synthetic

SEQ ID NO: 9420 - protein, 182 aa, Artificial Sequence
  Synthetic
SEIEKILRELEEHIKDSEREHRELVERLRDHIRRSKEEHRDLIRKLEERIREVERRVRKDGKADERLREDVERLLRDIRRELKRNEDNVKEVNDRIRKRVEDNERDVDRENKRIKDELARSDNKELKDRLKRVSEEHKRRIEDLLRRTKRVSERHREEIRKLLETTERAIKKARETIERLRK

SEQ ID NO: 9421 - protein, 182 aa, Artificial Sequence; identical to SEQ ID NO: 9420
  Synthetic

SEQ ID NO: 9422 - protein, 182 aa, Artificial Sequence
  Synthetic
SEIDRLLERLEDHIRKSAKRHRDLVEELREHAERLKRDIERLLEELEKTVRDIEKEVRERGKVDKRIEDRMREVLKRLEDRLRELREDVRRVNEEIKREVRDNEEDVKRVNRELRERLKDSDDEDMKRKLEKVSEEHERKIKELLDRTKRASEEHDERVKRLLDELRRVLKEAEERLRELKR

SEQ ID NO: 9423 - protein, 182 aa, Artificial Sequence; identical to SEQ ID NO: 9422
  Synthetic

SEQ ID NO: 9424 - protein, 182 aa, Artificial Sequence
  Synthetic
ERIDRIIKELEDLVDESRKRNDDLVRELKKHIKESKDEHDRLVEELDRFVEEVRKRVEKDGKLDDRMEKEVEELLREVEDRLRRNKKNVDEVNTKIKEDLERNREEAERALKRLEDDLKDSDDEDAIRKLEDVLRKVRETHERLLDKSRDVSRKHREDIKELLKKTKTVIDRVRKRIKELRK

SEQ ID NO: 9425 - protein, 182 aa, Artificial Sequence; identical to SEQ ID NO: 9424
  Synthetic

SEQ ID NO: 9426 - protein, 182 aa, Artificial Sequence
  Synthetic
SEVERIEEELRREIEKVDRDNKKIVDEARRSIDELRKDVEDILRDLRRLVDEVEKMARRGEVDEETVKEIERRLEKLLREIEEKSRRHLERLEERLRKVHKENREVEKRLKERLEEVRRRGLSEELLKRVEDVVDEVRKRLERIDEKTRKAVKEVTDRNDELLKRVREVVKEVRARLEEIRR

SEQ ID NO: 9427 - protein, 182 aa, Artificial Sequence; identical to SEQ ID NO: 9426
  Synthetic

SEQ ID NO: 9428 - protein, 173 aa, Artificial Sequence
  Synthetic
SEKEKVDKVVKKVAKRIKDLLDEIKRVADESNERLERLLRRLEEASKRSKKKLKDDNLPEDLLKEVTERNERLLREARKVIKRVKEENKRLADEVKEEIDRVRETLKTLRDLVDERDVDTLIKELEDRIDEVEKRIRELIERDKRLVEEVERRIAELIRRDERLVEELKKREE

SEQ ID NO: 9429 - protein, 173 aa, Artificial Sequence; identical to SEQ ID NO: 9428
  Synthetic

SEQ ID NO: 9430 - protein, 173 aa, Artificial Sequence
  Synthetic
SEKEKLKDVVRDVERLIKELMERLERVHERTNREITRLLEDARRAMERSNKKLTDLNLDEDELREARKRNKELLREVERIIEEVRRRDEELRRRNKKTIDDVRRELKRIEEEADEKDVDDLLRRLKELIERVRKLIEDSIKELRDIVKEVKDRIKTLIERDKELVKRLEDRAR

SEQ ID NO: 9431 - protein, 173 aa, Artificial Sequence; identical to SEQ ID NO: 9430
  Synthetic

SEQ ID NO: 9432 - protein, 180 aa, Artificial Sequence
  Synthetic
SEVDKLVRDLERHIEEAKRRVEELLKEIKKLVEDTKREAKKLLDTLRKKVEDVERENSKDRKDVKKVEEDLARVREEIEKLLRDDERLLREIEERAKKEVDKVRKDNERLREDVERRLKDLEEMLRKMREVSERHKKTIDELRKELKKVLDEWRRRSEKIFEELDEVLKRVEERVKEVER

SEQ ID NO: 9433 - protein, 180 aa, Artificial Sequence; identical to SEQ ID NO: 9432
  Synthetic

SEQ ID NO: 9434 - protein, 180 aa, Artificial Sequence
  Synthetic
SEVDELVRRLREHIRRAKERVEELIKRIKTLAKETTDRARKLIEDLKRHIDDARRKNSKDERVLARVREDNDRLEEEIKRLLKEDRDRLEEIKREIDKDVKKVKDDNDELEKRVRKDLKDLREVLKKIKEVSDEHRKEIERLRKRLEEVLREWEDTSREVLERLKEVSKRHRDEIREVAR

SEQ ID NO: 9435 - protein, 180 aa, Artificial Sequence; identical to SEQ ID NO: 9434
  Synthetic

SEQ ID NO: 9436 - protein, 180 aa, Artificial Sequence
  Synthetic
SEMEDLIRRLREHIEDVRRKVEELIRELEDHIRRAEESVKKREDDLRRHIEEVRKRNSKDEDDRKKVEEDNRRLDEDIKREVRKVEEDNRRLMKRVEDLVREVEKNNEELRKRVEDRLKDLKEVLDEARRVSKEHKDTLEKLLRKAEEASERHKREIERLLKELKEVSEEHRRRIDEVRR

SEQ ID NO: 9437 - protein, 180 aa, Artificial Sequence; identical to SEQ ID NO: 9436
  Synthetic

SEQ ID NO: 9438 - protein, 178 aa, Artificial Sequence
  Synthetic
SEVEELIEDLKRHLKEVADRVEELERELRKHLEEHHRRVREIIRRLEDLLRKAEETRTDEKLKEDLERMLREVEREVRDSERHAKEVNKRVREKVRRIEEHVKRRNKDVEEKVERDVRREDLKRRIEKVSRDHERTVEKLVRDLERVSREHERTVKENKERIKKVLDDARKRVDEVKK

SEQ ID NO: 9439 - protein, 178 aa, Artificial Sequence; identical to SEQ ID NO: 9438
  Synthetic

SEQ ID NO: 9440 - protein, 173 aa, Artificial Sequence
  Synthetic
SEVEKLVRELEDVLRKIERKVRELSKDNKRVLDENKKRVEDVSRDNERAMREIEELRRKVDAKDIRERLKEIRDKNRRINEESKRLLRELEKKNEKMLREIEEDLRRLADEARKKTRDEELKKVLEDVKREVEKLLEEIKRSLEEARKTVKESNDEIRESLERLEEKVRRIEK

SEQ ID NO: 9441 - protein, 173 aa, Artificial Sequence; identical to SEQ ID NO: 9440
  Synthetic

SEQ ID NO: 9442 - protein, 173 aa, Artificial Sequence
  Synthetic
DEVKDLVKRLEEVIKRIDEVVKEVDRRNREVLERNRELVERSIRELREVLDRIRRRKKDVDRKDIEKILKELEDKSRKINEESKELLDRLRKENEKILREIEERLRELEDEARKKRRDSELDKVLEDVKRKVEEILRRIKRSLDEVERDVRRSNEENKKVTKEVREAAEEIKR

SEQ ID NO: 9443 - protein, 173 aa, Artificial Sequence; identical to SEQ ID NO: 9442
  Synthetic

SEQ ID NO: 9444 - protein, 173 aa, Artificial Sequence
  Synthetic
DEVEELVRRLREVLEEIRELVERVNDRNRRVLEENRELVTRSIEELRRALERIERLSKDVRREEIRKILEELEKRSRDINRESEELLRRLAKENKEILDRIKKILDDLREEAKRKTRDEKLKKVLEEVERRAKKLLRDIEESLRRVAREVERSNEENKKVTKEVADAVREIER

SEQ ID NO: 9445 - protein, 173 aa, Artificial Sequence; identical to SEQ ID NO: 9444
  Synthetic

SEQ ID NO: 9446 - protein, 174 aa, Artificial Sequence
  Synthetic
DEEKKARDVLERWRKRSEDLLRKAEDVLREWRERSERSFKRLRDVLEEARKRVEELNVPEEILREIRRRLEEMKREIEKLLKEDRDALKELADRIRKIVEDDRRKLRRIEKIVRETKIDDELVREIEEVVKETEKRVEELIKEIREMVKKNEREVREIERRLEETLEKIDRDRK

SEQ ID NO: 9447 - protein, 174 aa, Artificial Sequence; identical to SEQ ID NO: 9446
  Synthetic

SEQ ID NO: 9448 - protein, 171 aa, Artificial Sequence
  Synthetic
SEEEEIEKALRDWREELKRLLETIERLLREWKRRVEELKKRIEEALKELKKILDDKGVPEEVRKEIEERIRRLRRRVEEDEETVDREIRKIEEHVKRDATEVDKLIRELKKRREDVEEVKKKLEKEIKKNRENVDRLRRRLEEEVKRNERSVEEIKRRLDEIARELDERKK

SEQ ID NO: 9449 - protein, 171 aa, Artificial Sequence; identical to SEQ ID NO: 9448
  Synthetic

SEQ ID NO: 9450 - protein, 171 aa, Artificial Sequence
  Synthetic
SEDEEIKEALKEWRDEVRRLEEKIRRVLEKWERDVRRLKEEIKKSNEDLRRRLEEKGVPEEVRERIKERSERDKKKVKEDEEEVRRRKREIEEHLERDKRRVEKLIDDLRKRRDDVEEVKKRLKRLIEENRKNVKRLEERIREAVKKNEKSVEDSERENRDIARELDEKRK

SEQ ID NO: 9451 - protein, 171 aa, Artificial Sequence; identical to SEQ ID NO: 9450
  Synthetic

SEQ ID NO: 9452 - protein, 182 aa, Artificial Sequence
  Synthetic
EEVERLKERLERLSERSKEIAKRVHEENKKLSEESRKLVEDVHRENEEAAKRLEDVARRNELPEEVLRKELDDVRKRNKEILDTLREISKEVEKRNRKILEEIRKRSEEVRREVEEVERRLRGRELLERLRRVLEEHREVNERILEEIKRSLDEHKDTNRKLLEEIEKSLRDLEEIVRRLEK

SEQ ID NO: 9453 - protein, 182 aa, Artificial Sequence; identical to SEQ ID NO: 9452
  Synthetic

SEQ ID NO: 9454 - protein, 182 aa, Artificial Sequence
  Synthetic
REIEEIEKEVRDVSKESEDIVRTVHDENRRASERSRELVKRVDEENRKAVEDLERVARENREPKEALDKRLEDLKRRNEEIEKRLEEISREVSRRNEEIKKTIEKLSREVAKRLKEAEDRLKGDELLRRVRKLLEDHKRVNERLLEEIEKSLKRHREENERLLEEIRKSLEDVERVVEEIKR

SEQ ID NO: 9455 - protein, 182 aa, Artificial Sequence; identical to SEQ ID NO: 9454
  Synthetic

SEQ ID NO: 9456 - protein, 182 aa, Artificial Sequence
  Synthetic
SELEELEKRLRKAVRDLEEIVDRVRKDLERASDDSRRIVEEVHRENRKVAKELKEVRDRNEEDRTVLRDKLRRVAKRNEDILRKIKEDSKDVKRRARKILKEMADLLDTVRKEIEEVAKDLKGEELLEALERLLRELEKIVRKLLRELEEMLRRHEKTNRELLERIRRSLEELAKIVEDLET

SEQ ID NO: 9457 - protein, 182 aa, Artificial Sequence; identical to SEQ ID NO: 9456
  Synthetic

SEQ ID NO: 9458 - protein, 182 aa, Artificial Sequence
  Synthetic
DEIEEIKKELDELSKRSEKIVRDLERELREASKESERLVRKVHDDNRKALEELRDVRRRNDEDDKVLEDRLRKVEEENKRIKDELKKRSEDVAKRIEDILRDIERRSKEVAERAKEMEDRLKGDELLKEVRRALEEHERVNRELLERIRRVLEEHKRVNEELMREIDRSLKELAEIVKRLKD

SEQ ID NO: 9459 - protein, 182 aa, Artificial Sequence; identical to SEQ ID NO: 9458
  Synthetic

SEQ ID NO: 9460 - protein, 182 aa, Artificial Sequence
  Synthetic
DELEELRKELKKMVDEIEEIVRRVDKENRDASRESEELVERIVEEVRKAVTELKELKKRNESDRKELEKKLKEVAKRIKDLLRRLKEISDRVAEKNKRILEEIEKRLRDVEERIKRIEDELEGDELLKEVRKALERLKEEVKRVLEDIRRSLEEHRKVNERALRRIEEVLRDLERIVEEVKT

SEQ ID NO: 9461 - protein, 182 aa, Artificial Sequence; identical to SEQ ID NO: 9460
  Synthetic

SEQ ID NO: 9462 - protein, 182 aa, Artificial Sequence
  Synthetic
SEVERLKDELRKASEELKKEVEEIEKRLREMSERSRKLVEELKRTLKEIEKELKDIVRKDKEKKEELKRIVEEADRLVKEIEDRLRRLNEKSEEDAKEVDDRLKRKLDESRKRIKEVEKDLKGDRLKEEVERVLREHEKSLERLRERLKELLERHHKTNEELLREIKEALERLEKIVKDLTD

SEQ ID NO: 9463 - protein, 182 aa, Artificial Sequence; identical to SEQ ID NO: 9462
  Synthetic

SEQ ID NO: 9464 - protein, 182 aa, Artificial Sequence
  Synthetic
DEVEDAERRLREMSERIEDLVRRVEERLRRMSEESKKLVEDVKRENDKSVEELDRIVRRDKEKKEALRKIVEDDERRVKEVKERLEELNRRSEEDVRRVKEEAKRLLEESDRIAKKLRDDLKGDRLKERLEKLLRDHRRSVEEVIKKLDRLLKEHHKVNEKLLRDIDKSAKEVKKVVEDKTR

SEQ ID NO: 9465 - protein, 182 aa, Artificial Sequence; identical to SEQ ID NO: 9464
  Synthetic

SEQ ID NO: 9466 - protein, 182 aa, Artificial Sequence
  Synthetic
SEVEEAEKELREMSKTSTRLVEELEERLRRASETLKKLVDDVKRELDKRLEDIDRRVARNKEKKEELDKELEEVDDRARKVKRTLEDILRESKRLVEKIEEDLKKLDEDSRRSVDDVRRRLKGDRLKERVDRLLEEHHKVNKRLLERIEEVLRRHETTLRELIKEIDKLLRDLKKRIDDVKK

SEQ ID NO: 9467 - protein, 182 aa, Artificial Sequence; identical to SEQ ID NO: 9466
  Synthetic

SEQ ID NO: 9468 - protein, 182 aa, Artificial Sequence
  Synthetic
DEVREVKKELKKIAEELRKLIEEVREELRKMSKRSEELVRELKKRNEKSVRDLERIVRKDKEKKEELDKIVKEDKDDVRRIKKELKDLNDESRKRAEEAKRELERIVDRVRERVEDVRRKLEGDKLKEELKEALKDLERELKELIEELKRLLDEHHKRNEDLLREIDKSVRKVEEDVRRLKK

SEQ ID NO: 9469 - protein, 182 aa, Artificial Sequence; identical to SEQ ID NO: 9468
  Synthetic

SEQ ID NO: 9470 - protein, 185 aa, Artificial Sequence
  Synthetic
SEVDEVRKELERLVREIKKLVEDSKRNLDRLSKELEERVRDLERDARRLVKELRDLLKENRDEKTVKELIETLKDRVRRTLERIKREVDENRRYLERNKRELERLIRELKKRLEKLLRDVEREIKDKEVRDDVRRLIREVDEELKKAKEDLDRAHEEHEKSTERLRERIKEVVDRVREDIERTKN

SEQ ID NO: 9471 - protein, 185 aa, Artificial Sequence; identical to SEQ ID NO: 9470
  Synthetic

SEQ ID NO: 9472 - protein, 171 aa, Artificial Sequence
  Synthetic
DEERRIEKVLKEWEKRTRDLARELERVNREHKKTSEDVLKKLEEINREVRRVVKEENLPEDALRELEKRLEEDHERIEREFRKDKKRLEEDHRRVREEVERSRKKLEELRRRVKDVEKLRRLIEEVIREDERRVERVKRNNKRLSEETEKLVEDVRRNNERLVKEVRDRSR

SEQ ID NO: 9473 - protein, 171 aa, Artificial Sequence; identical to SEQ ID NO: 9472
  Synthetic

SEQ ID NO: 9474 - protein, 171 aa, Artificial Sequence
  Synthetic
SEEEEIKKVLDEWRRRTEELRKDLDRVLEEDRRSVEEVKRRLDKVNEELRRRIDELNLPEEEVRRLRDTLKKDHDRIREEIKRSRDNTRRLREEVEREVKKSRDRLEELRKRVTDVERAKEEIKKVIKEDEDLVRRVRKYIEENSDELRRLVEEARKNNTRIAKEAEDTSR

SEQ ID NO: 9475 - protein, 171 aa, Artificial Sequence; identical to SEQ ID NO: 9474
  Synthetic

SEQ ID NO: 9476 - protein, 171 aa, Artificial Sequence
  Synthetic
SEKEEIDKVLKEWEEMTRRLVEELKKSHDEDRESVKRLLERLRDVNRELKEIIDRANLPEESVRRLEEKLRRDHKRVERAVDESRKNTERSEEEVRRAVERSKEKLEDLRRRVTDVEKAKETVRKVIKEDRDLVREFKKYNEENSDRMRKLVKDIKENNRRIVEEARERSR

SEQ ID NO: 9477 - protein, 171 aa, Artificial Sequence; identical to SEQ ID NO: 9476
  Synthetic

SEQ ID NO: 9478 - protein, 174 aa, Artificial Sequence
  Synthetic
SKEEKLREALKKVRKDVKDLERHIDRSVKRNKEEVDKAKRELERSLEELRRRLEELRRTEELDRELKRLEEKNKEMLKRIDESLKESKKRNDKVKRELREELKRLEEEIRDAERKGLPVEELLERLERTLRRMREKVRKLDKENKDHTEKVKEDVKRVHDENDKVREDVDRKDK

SEQ ID NO: 9479 - protein, 174 aa, Artificial Sequence; identical to SEQ ID NO: 9478
  Synthetic

SEQ ID NO: 9480 - protein, 185 aa, Artificial Sequence
  Synthetic
REVEELVKEIERVLEETKKRSEDTKREVEKVLEDTKRLVERLRKTLEELLRELDKRVRSGLDEETLERVLREVRKKLKELADEARRVSEEDEKRLRKLEEDSKRLSDEDRKKLEKLEDEARKKVDGEELRRTLEKVLREWRDVNRKVNDTDRKVLEDWERVNRTVNEELKEVLERAKEDIDRVAT

SEQ ID NO: 9481 - protein, 185 aa, Artificial Sequence; identical to SEQ ID NO: 9480
  Synthetic

SEQ ID NO: 9482 - protein, 185 aa, Artificial Sequence
  Synthetic
DEVERLVEEIKKRIDETRKLLEELKKRIRKVLEETKDLVRRLLKRLRELLKELEERRRRGLREDELKRVLDDARRKIRKIEEDAKKMSREDRKKLRDLAEEAKDINRKDEEDLRRTEEELRRRVDGEELRRELKRVLDEWKKANDEVRRAMEEILKEWEEVNRKVNKDLRDVLEEVKERLREVAK

SEQ ID NO: 9483 - protein, 185 aa, Artificial Sequence; identical to SEQ ID NO: 9482
  Synthetic

SEQ ID NO: 9484 - protein, 185 aa, Artificial Sequence
  Synthetic
SEVEKLKKRLRDLLEELKRLSRRTKEDVRRVIKETRDRSKKTKEELEKLLREIRELRKRGLREKELKEVLDDARRKIEELARRSEELNRRDEDKLRKLAKESEELLRRAEERLRRLKKEVEEKVKGEDLRTEIKKILEEVKREIDRVRETDEKVLRDWKKANDEVRETDREVLRKIREDLKEVAR

SEQ ID NO: 9485 - protein, 185 aa, Artificial Sequence; identical to SEQ ID NO: 9484
  Synthetic

SEQ ID NO: 9486 - protein, 174 aa, Artificial Sequence
  Synthetic
RERETIEKVLDENRKSLEEVTETVKRVLDRWDETLKRLEEEVRRVNDKTRKVLEDLLREDKDLARRVKEELEKNLREVEDDKRRAEERMRELKRDVERVRKENEEELKKLRELLEKIDVKELKKRVKELSEKLREVLEELERRVREIVKRNKETVDESRKRNEELIKRAEDAAK

SEQ ID NO: 9487 - protein, 174 aa, Artificial Sequence; identical to SEQ ID NO: 9486
  Synthetic

SEQ ID NO: 9488 - protein, 182 aa, Artificial Sequence
  Synthetic
SEIDEVRKRVEKHSRDAKRLVDELREKNDRAIKTLERLLRELEKRNKKVIRDLEDVRTKNTEPEESLRRILKTVHDENRKVEEELRDILRRVEEENRRVIEELDRSLRESRKDLAEIEKRITDEDMVRELRRVLKENDESVRRLKREIEEVHKETERVVKEVLEEIRRVDEELKDVARKVET

SEQ ID NO: 9489 - protein, 182 aa, Artificial Sequence; identical to SEQ ID NO: 9488
  Synthetic

SEQ ID NO: 9490 - protein, 182 aa, Artificial Sequence
  Synthetic
REIEEVIKELKRHSEELEKELDRLRRENKEAIRTSKKLVEDLRRENTRAKEELEDVKRENRRDRTELRKLLERVHKRNEEVRETNRRLTERVARRNEEVKERLKRSLDESRRRVREVERRITDERALERLRRVVRENEESVERVLKKIDDIHEETKRVSDRSEKEIEDVDRDLKRKVEEVEK

SEQ ID NO: 9491 - protein, 182 aa, Artificial Sequence; identical to SEQ ID NO: 9490
  Synthetic

SEQ ID NO: 9492 - protein, 184 aa, Artificial Sequence
  Synthetic
REREKIKRILDELRKRVEELNRRNEELLRRLDKVVRDVNRTNKRLLEKLRKVADDVRRKLKDEPEEVLRTLDEILKKVEKEIKDTNDKTRKILEDARRLAEEVNRTSKKILEEVEREVKEVERENDREVDKVERTVEEIEKELTRLVEESEKEVKRIIEELKELLERSRKSVEDIIREVRKLAE

SEQ ID NO: 9493 - protein, 184 aa, Artificial Sequence; identical to SEQ ID NO: 9492
  Synthetic

SEQ ID NO: 9494 - protein, 184 aa, Artificial Sequence
  Synthetic
SEEEKLDRLLEELKKVAEEVNRENEKLLEDLERVVRDLNEKNKAALKKLEDAVRRLKEAIKDKPEDVLRTLEDDLRKVRKKVEDVNRESKEILDRVRKEIKETNEESKRILDRVEREADRIRRDKDDSVDRVEERLREIIKTLRKLLEDSKESVRKIIEELKRLVDRSIEDLERIIKELEDKVR

SEQ ID NO: 9495 - protein, 184 aa, Artificial Sequence; identical to SEQ ID NO: 9494
  Synthetic

SEQ ID NO: 9496 - protein, 184 aa, Artificial Sequence
  Synthetic
DRERRIETVLRKLKKVVEEVNRRNEKLLDDLRKVVTRLLEEDRRLLEKLRRAAERLKEELKDGPEEVLRTLEKILRDVERRSRESLKRLKEILDRAEREVREVNRTSREILERVKKEAERVKRDQDDDVTRVKEKIEKIIEELKKLLKDSKKRVEEIIRELEKLVDDSRREVEEIIKELKDRSR

SEQ ID NO: 9497 - protein, 184 aa, Artificial Sequence; identical to SEQ ID NO: 9496
  Synthetic

SEQ ID NO: 9498 - protein, 185 aa, Artificial Sequence
  Synthetic
DMREELERILKTLRDVSRESRRELKRLLDENEKTIREVKKRVDEILEKLRKVIDDVRRQGNDERAEDELRKILERVKKIADELKDRLRDSLKKSKEDIDRVARENEKLLRDAEDRIRRVAEADSRSKKVVDEVDKEIRELIRKDEEIVKEVAERVKKNSEDLRRLLEKARREIEEIIKELEERRR

SEQ ID NO: 9499 - protein, 185 aa, Artificial Sequence; identical to SEQ ID NO: 9498
  Synthetic

SEQ ID NO: 9500 - protein, 181 aa, Artificial Sequence
  Synthetic
DEDEIVRDVIRRLDEVLKKLEKTNTELDEELKRVVEELRKVNRTVDEELKRVLDELAKRIEDEDKVRRLEDRATKLIKKNEDHLRELEKAVEELEERNKRHLDRLREEAEKLKEEVRKVREDGRANDKLVKDLKRVLDKLEESSRRMLKKLSDALRELEKSSDKVVKDLRKVLKELREEVK

SEQ ID NO: 9501 - protein, 181 aa, Artificial Sequence; identical to SEQ ID NO: 9500
  Synthetic

SEQ ID NO: 9502 - protein, 181 aa, Artificial Sequence
  Synthetic
DEDERVEELLRELEEVLDRLAKLNKKLDERNKEVAEESKRLNETVDRELKEVLKRLEEKLEDKDKLRELKKKAEKLVRENRKHLEESERRHRKTAEDNKRHLERLEESARKLLEDLRKVKEDGRANSELVERIRRELERLKRSSEEVVKKLTEELKKDKKSSEEVVKDLRRALRELERAVD

SEQ ID NO: 9503 - protein, 181 aa, Artificial Sequence; identical to SEQ ID NO: 9502
  Synthetic

SEQ ID NO: 9504 - protein, 174 aa, Artificial Sequence
  Synthetic
SELEKVKEDIRRLLKRLKEDIKRIKDEIDRLLEELKRHLKEVEEEVDRILEELKDLKRRGTTEDTLRRVREEIKRLIKESEEALEKVKREIEEIKKRSEEKLKRARTEIKKIKDNVPRREKLERVKEDVERVLEEYRKRSEDLARRVEKVLREYKKRSDELEKRVEDVIKEVAD

SEQ ID NO: 9505 - protein, 174 aa, Artificial Sequence; identical to SEQ ID NO: 9504
  Synthetic

SEQ ID NO: 9506 - protein, 174 aa, Artificial Sequence
  Synthetic
KELEEVARKIDEELKKLDKNIRDIADEIRRILEELEKDLREIEKRIRDILRRLEDLKRRGTDERTVKRAEREIREIAKDSRRKLEEVRERIERIMRRSKKTLDDVKRRIEEEAKNVPRTDELKTVEDKVRKALREYEEKTRKVKKDVDEVIKKYKTDSDRVLDEVEKALREVER

SEQ ID NO: 9507 - protein, 174 aa, Artificial Sequence; identical to SEQ ID NO: 9506
  Synthetic

SEQ ID NO: 9508 - protein, 181 aa, Artificial Sequence
  Synthetic
RVEEKLKRVSDELKRAVDESNKKIEELLERLKRVHDETNKEITEILRELKEVVDKAREDGLDDERLKRILDEARDVIRRVRETDDDLRRRNKEMVDRLKDLNRKLEKRAEELIREVKDKIRTDELVEDIERKIEELIRRDDDLVRRAEEEVEKSIRELRRLVDEVRKEIKKIVKKIEDDVR

SEQ ID NO: 9509 - protein, 181 aa, Artificial Sequence; identical to SEQ ID NO: 9508
  Synthetic

SEQ ID NO: 9510 - protein, 181 aa, Artificial Sequence
  Synthetic
SREDKARELLRELEKVDDDHRRRVRELLERLKKVLEDHRRAVKDIIKRLDDELKRIKEEDDKGDKIEEILRRVRKKIRELEEHVKKTNEDIRRKIEELRRHLDETNKETNRKIERLRRELKEKKIDEEVAKEVKDIVREVEDHLRRVEEEVRRIIREVEEHIRDLERRVRELLEELKRRSK

SEQ ID NO: 9511 - protein, 181 aa, Artificial Sequence; identical to SEQ ID NO: 9510
  Synthetic

SEQ ID NO: 9512 - protein, 181 aa, Artificial Sequence
  Synthetic
SEEEKVRRLKEELRRVIEKHKKDVKEIEDRLREVDDRHRREVKKLIEELKKVLEDAKRRKREGKDMEKRLDELREIIKKLMRHAEKFNRETNKKIEEEKRHLEEANKELEKEIRDLEREVKETKIDEEVAKRVKEIIEKVERHITEVKKRAEELVEEVERHIRELKKRVEDLVEEIERDTK

SEQ ID NO: 9513 - protein, 181 aa, Artificial Sequence; identical to SEQ ID NO: 9512
  Synthetic

SEQ ID NO: 9514 - protein, 180 aa, Artificial Sequence
  Synthetic
DEKETAEELLRRIEKVIKRLEDTMRKLNKKLKEAIERHHRTAKKLLDDIERVIREVEKDRGDDRDVRRVLEDIKRKLDELRKRIEDVDKEVEDHLKRNHDKVRKILEDLKKLLDELRRLLDELRREELEDDVRRIIEEIDRLLRESEEDHEDLIRRLKRSLEELKRLAEDIIRKLSEDRK

SEQ ID NO: 9515 - protein, 180 aa, Artificial Sequence; identical to SEQ ID NO: 9514
  Synthetic

SEQ ID NO: 9516 - protein, 180 aa, Artificial Sequence
  Synthetic
REKEAAKRILDRIEKVIRDHHREAKRLNDELEKVIREHHETVKELLKRIKEVIDKFKKDKGDDRDVERIRKRLEELLKKLEDDARRVDKRLRDVLRRNHKEVREVNEEMRELLKRLADLLDELSVEELEETARRIIEKLKKSLEDSKRDHERLKKEIEDSLKRLTELVKKIIEEIERDRK

SEQ ID NO: 9517 - protein, 180 aa, Artificial Sequence; identical to SEQ ID NO: 9516
  Synthetic

SEQ ID NO: 9518 - protein, 180 aa, Artificial Sequence
  Synthetic
DEDEEARRLLEEIRKVIEEAEEEAKRLNERLRRVIKEHHRKVKELLDEIERVIEKVLRARGDDRDVRRIIKEIRERLERLREEAERVDRKLKEHLERNEKKVEEMRKRITKLLDDLRKRLKELSVDELRERVREIKEKLRKDLKDSEDDHRRMEEEIKKSLERLERLVREIIKDLEEKLR

SEQ ID NO: 9519 - protein, 180 aa, Artificial Sequence; identical to SEQ ID NO: 9518
  Synthetic

SEQ ID NO: 9520 - protein, 180 aa, Artificial Sequence
  Synthetic
KDEERAKRLLDEIERVIRRHHKTARDLNRELERVLKEHHDTARKLLEDIKKAIDDLKRTRGDDRDVDRILRDLERLLRELEKKIREVDKRAKEHIKENERRVKKVNDELRELLERLARLLRELDAKELEDKVKEIIDRIEKSLEESDKNHKKLIRELEKSLDDLRREAKEIIDDAREKAK

SEQ ID NO: 9521 - protein, 180 aa, Artificial Sequence; identical to SEQ ID NO: 9520
  Synthetic

SEQ ID NO: 9522 - protein, 179 aa, Artificial Sequence
  Synthetic
SAAERAEEVLRKLRESLERHKKVNKDLLEEIERSLREVAKDVDRVLKDIKRVLDELKRRRRDLEEVEERVRRILRTIEKLLKELEDDNRRILEELKRKSEEVAKRNEDIARELKDRLRKDKGARDEVEELVRRVHRENEKFSKESEDLVREVHERNKELVKRIRKILEDATRELEKAAK

SEQ ID NO: 9523 - protein, 179 aa, Artificial Sequence; identical to SEQ ID NO: 9522
  Synthetic

SEQ ID NO: 9524 - protein, 179 aa, Artificial Sequence
  Synthetic
DMKEEAEEVLKEIEEVLKEHRDINRRLLEEIKKSLEDLSREVERVLDEIRRLLKRAVEERPDVEELEEDVRRILREIEERLKDVRRRNREILERIKEESKRVSEEVKKILEEIKKRVTETQGADEEVRKIVEDLKKRLKELSEKSERIVRKVHRDNERVVREIRDIVRRLKKRLEDATR

SEQ ID NO: 9525 - protein, 179 aa, Artificial Sequence; identical to SEQ ID NO: 9524
  Synthetic

SEQ ID NO: 9526 - protein, 179 aa, Artificial Sequence
  Synthetic
SAKEKVDEVLRRIKELLDRHKKVNEEILEEIRRSLEEHREVNERLLETIDRLLKELKRSRKDLEEVEKRVRDILRRIKELSDEVAEENKEILKELRERSERVEKRVREILKEIKDRVTKDKGAREEVEEIMRRAEEELRKLSKESRELVKRLHERNEEMSRRSKKIVDEAKKELEDAER

SEQ ID NO: 9527 - protein, 179 aa, Artificial Sequence; identical to SEQ ID NO: 9526
  Synthetic

SEQ ID NO: 9528 - protein, 182 aa, Artificial Sequence
  Synthetic
SAEEELDRLEKELDKLLKEHHEENKRLLEEIDRVLKEHEETLRRLIKELREVLKEVKEKLRDKRKVDELDKRMRELEERLKAILEDSKRKVREIKERLKELNRESEKRVKEVKDTLRDLLRRNSEKVEKLREDVERVKRELEDLTRKSEELVKRLKDTLRRVSEELKRRVDEAKKEAREVER

SEQ ID NO: 9529 - protein, 182 aa, Artificial Sequence; identical to SEQ ID NO: 9528
  Synthetic

SEQ ID NO: 9530 - protein, 182 aa, Artificial Sequence
  Synthetic
SAEEELKRLLEENERVTEEHHKRNRDLLRRIDEALRRHEKTLEDLIRELDRVLRELERRLKDKEKVDRIRREVEKVKEELKRILEESRDIVRRAKETLKKLNEDSERESEKVLKRLREIVDKVSEKVDDLRRIIEESRRRHEELTKESEKLVREVEDILRRLSEELAELVKRVKDKLDEDAK

SEQ ID NO: 9531 - protein, 182 aa, Artificial Sequence; identical to SEQ ID NO: 9530
  Synthetic

SEQ ID NO: 9532 - protein, 182 aa, Artificial Sequence
  Synthetic
SAEETLKRLAERIRKLLEEHRETVKRVIDRLDKVLRDHHRENKRLLEDIDRVLRRLEESLKDEEKVKEIRRRVEEIKDTLRRLDERSRDRVRRVKKEAEDRLRRSEEEIRRILRELEEIVRRNKEKVEDLDRRVKEVERRLREMSKTIEKLVKDIERELKEASEESRELVERMKRELTEAEK

SEQ ID NO: 9533 - protein, 182 aa, Artificial Sequence; identical to SEQ ID NO: 9532
  Synthetic

SEQ ID NO: 9534 - protein, 182 aa, Artificial Sequence
  Synthetic
REIEEILKEIEKSLRDLEEEVRRILEEIKKSLEDLRESMERIVEEVDRRLRTLKEVFDRGELDEEKIKRVEDTMKKILDDVKEEIKRHHEDLRRILKEAEERIKEHHDRLRETLERLKDKTTDDRVRRIIEKLEEDLRRVNKKIKETLEEAAKRLEDADREIEKILRDLARKIRKVLEEIKK

SEQ ID NO: 9535 - protein, 182 aa, Artificial Sequence; identical to SEQ ID NO: 9534
  Synthetic

SEQ ID NO: 9536 - protein, 182 aa, Artificial Sequence
  Synthetic
SEVEEIERRIEKSLKELRERLEEAEKRHEELLERLEREIDRIEKELRKDLKRLRDMTRRGEVDEKTIDEEEERLRRKLEELKKIVEKVRKENEDLLRKWKRDIDEHHRELRETLKRAKDKTKTERVKKEIDRLEKRLEEVNEEIKKRLKELAERSRRVLERIKDRIRRAAEELKRVLDEVRT

SEQ ID NO: 9537 - protein, 182 aa, Artificial Sequence; identical to SEQ ID NO: 9536
  Synthetic

SEQ ID NO: 9538 - protein, 182 aa, Artificial Sequence
  Synthetic
SEIEEILKRLKELLKELKERNEDILRRVEKSLKDLRKKLEEIVRDLRRLLEELREMVKRGEVDEETIKKVMRDAEKILEDLRREIEEHHKKLRKILEDSKKENEDLEKRLREELKRVKDKTTDDRVREIIKTAEKELEKALRTSEDIDRRLEERLEKVNKEIREELRRAEEEIKRVLEEVKR

SEQ ID NO: 9539 - protein, 182 aa, Artificial Sequence; identical to SEQ ID NO: 9538
  Synthetic

SEQ ID NO: 9540 - protein, 185 aa, Artificial Sequence
  Synthetic
DELDRIRKEVKRISDKNRRHVERLDEEVRKLLEELRKHLEDLTREVERLLRELKEVKKEGKDEETVRRVLRELEERIRRLKKHADEANKELKDKIDELEKHIKKANEDSKKEIDELEEDLKRKTRTEEMRTKVEELRKRLEESLEEHKRAADELRKRLKKVLEEHEKRVRELEEELRRVLKEAED

SEQ ID NO: 9541 - protein, 185 aa, Artificial Sequence; identical to SEQ ID NO: 9540
  Synthetic

SEQ ID NO: 9542 - protein, 185 aa, Artificial Sequence
  Synthetic
DELEELRKLVEEISRENREHLKKLKKLVEDLSRENEKHLRDVDKRVKELLEDLERLTRRGLDEETVRRVLERVEEEIRRTKEHLDKFNEDSERKARELKRHAEKFNEESKKKIDDLEDDARRKTRTEDVERELRRLKKELDKSLKEHRTTLERLEEELRKSNKEHRDRVKELREELEKVLRDAKR

SEQ ID NO: 9543 - protein, 185 aa, Artificial Sequence; identical to SEQ ID NO: 9542
  Synthetic

SEQ ID NO: 9544 - protein, 182 aa, Artificial Sequence
  Synthetic
SMLDEARKEVKELKDRVERASEKLEDNARRNVEKLERVSEELEREVKRLLDEIEEVKRRNGDEELLERVVRRLKRELEKLKEKSDEISKDSERNLDEIRKESERIKKELEKALRDLKKRADDDLIDEETLKELERRIREVLKKHDKTLRDLERRIREVNKRHKDVSDRLAERIKKVIRELER

SEQ ID NO: 9545 - protein, 182 aa, Artificial Sequence; identical to SEQ ID NO: 9544
  Synthetic

SEQ ID NO: 9546 - protein, 182 aa, Artificial Sequence
  Synthetic
DKEKELEREVDELLKRLEEHSKRVDKTVEDVHRRNEEALRDMERKVREVVEKLKEVKERTKTEEVMRRLERDVEKIKEDLRREVERVKEENKRVLDEIRRSLEESEKRVRDIEKKLDEEVRKAGRRLEEVDRLRRELREVLKRNRESVERAEEKLKKSVKELDERVKELEEELDRALDELRK

SEQ ID NO: 9547 - protein, 182 aa, Artificial Sequence; identical to SEQ ID NO: 9546
  Synthetic

SEQ ID NO: 9548 - protein, 182 aa, Artificial Sequence
  Synthetic
SEVEKLERDVRELHKDNKRHSDELDREVKKLLEELRRALEELKEKVERLTRRLEEVKRRTRTEEVLKRLEDEAREMIEELKKSLRELEKRVEDVEKRLEESLKRSREKNEKMKEDLDRELKKAGRRLKEVEELKRRIDRSVEENEDSIRRLKEEIKRIVDEVRRVVEKLIKEIKDAVKKLRD

SEQ ID NO: 9549 - protein, 182 aa, Artificial Sequence; identical to SEQ ID NO: 9548
  Synthetic

SEQ ID NO: 9550 - protein, 182 aa, Artificial Sequence
  Synthetic
DELEELKRRVEELEERNKDHSRKMRETVERVKERLDRHSKEMEKEVRKVVEDIKDVKRKTKTEEVLKRLKEKIEKIKEDLRRSLDESRKEVEKIKEDLRDSARKSHEENKDVKRKLEDDLRKAGRELREVDELKKEIERADKENKDSIEELERELDRVLKENEKSIRELEKELDDVLDEADK

SEQ ID NO: 9551 - protein, 182 aa, Artificial Sequence; identical to SEQ ID NO: 9550
  Synthetic

SEQ ID NO: 9552 - protein, 176 aa, Artificial Sequence
  Synthetic
SEAEKLLEENRRELEKVKRDAERLNDEIRERLKEIEDKLKTLNDEIRKLVKEMEDRNDRDKTVEEELRELIETLRRRYEELKRELEELIKELKRRYEELLDRLRRLSEESKERADRDLIDEEILRTIADDNRRVLEEIKKIIKHSRDELERVKRDIDRIVKHSVKLLEDVLRRLRK

SEQ ID NO: 9553 - protein, 176 aa, Artificial Sequence; identical to SEQ ID NO: 9552
  Synthetic

SEQ ID NO: 9554 - protein, 177 aa, Artificial Sequence
  Synthetic
DEEEIVKRIEDDARRIIEEVKEVLRRIRDLNERILREAEEVLKEIREINRKVLEDLRRDGLPSDEIRKAEEESEKNLRELEEIIKTVEKRSRESVEEIKELIKRAEDLLRELIRELRETRVDERVLKRLRDELDKLREDLERILRRNKKLLDELRELLERSRRENEKLVEELKRKAK

SEQ ID NO: 9555 - protein, 177 aa, Artificial Sequence; identical to SEQ ID NO: 9554
  Synthetic

SEQ ID NO: 9556 - protein, 178 aa, Artificial Sequence
  Synthetic
SEAERIEEEVKKLLKDVKKKLEELKESSKRVVEELDKVLKELKESSDRLAKEIKKALDDNRSEEDIKRLLRENKEHLRELDERVRELKKKNKKHLDDLKREVDELRKRLEDALRRIEERVRVKDVLEKLRELVKRLIDDLRRVVEELEETNERLDRKLEDVLKKLRETNEKTLRELRK

SEQ ID NO: 9557 - protein, 178 aa, Artificial Sequence; identical to SEQ ID NO: 9556
  Synthetic

SEQ ID NO: 9558 - protein, 181 aa, Artificial Sequence
  Synthetic
SVREDLKRVVEDIRRIVKEVHERNREASKRSEDLVREVHERNERIARELKKIVDDLRRVKEEEKLKEIEKKLEEDLERAARENRRILEELKKISEDVARENKEVLDRIKERLDRLAKDVEDRNAERRVLEEVRKEVEKVLREIEKSLRDHERENKRLLEDIERSLRELEKTVEKLKRDIRR

SEQ ID NO: 9559 - protein, 181 aa, Artificial Sequence; identical to SEQ ID NO: 9558
  Synthetic

SEQ ID NO: 9560 - protein, 181 aa, Artificial Sequence
  Synthetic
SAREALKEAVKEIERIVREVHDRNRRASERSEKIVRDVHRRNKKLTDESKDLVDKARRIKEKEKLDELLKELEERSKKVAKENEDIRREIEKLSEDVSRENEKVLEKIRRDLERLRKDVRDRNVDKRVLEEVAKRVEEVLKRIKDSLEEHRRVNDKLLKDIEKSLRDHERANEKLLEDLRK

SEQ ID NO: 9561 - protein, 181 aa, Artificial Sequence; identical to SEQ ID NO: 9560
  Synthetic

SEQ ID NO: 9562 - protein, 179 aa, Artificial Sequence
  Synthetic
DELEELLKRIEDVIRRVEELLDELLERHRKVSKESNERLEELLRRHEKVSEEVKRENAGDERFKRTVDRLNDELRKKVKKLKEDDEKRNKELADDVKRLKEELRETLDRIRKEVEKLEPTEEVEKRVREVLKEIEDRAREVEKRARDSVRRNREELERLERDVRRSLKKLRDDLERMRR

SEQ ID NO: 9563 - protein, 179 aa, Artificial Sequence; identical to SEQ ID NO: 9562
  Synthetic

SEQ ID NO: 9564 - protein, 183 aa, Artificial Sequence
  Synthetic
SKVEKLLEDIKKLVKEVSDKIEELLKRLHEVVREIAKAVRDLIRENKRVVDDIVKKVRERGVPEEDLKRLEDRVEKSIRDLEEKLRDLKRRHDESTKRLKERLERAERRVKKLLDKLERRGDNGKEAEDDARRIIEEIERLLREVKKYIEEHIKRLRTVLKKLAEDSKKHLDELRELLRRLEK

SEQ ID NO: 9565 - protein, 183 aa, Artificial Sequence; identical to SEQ ID NO: 9564
  Synthetic

SEQ ID NO: 9566 - protein, 186 aa, Artificial Sequence
  Synthetic
SELETLLTDVERLLDESRRVAERVLKEVKELLDEWEKRHKELADRIRELLRRVEEEMKRANLDEEMKKRLEDELRRVDEKIKERDEDVKREKRRIEEKLERIKERSDREEKRVRKRLEDLRRRDLKDEEVRREATDLRREIKEHTDEVEKKLEELAREIEELLERSERSAEELRKEIEKLLEEIRR

SEQ ID NO: 9567 - protein, 186 aa, Artificial Sequence; identical to SEQ ID NO: 9566
  Synthetic

SEQ ID NO: 9568 - protein, 178 aa, Artificial Sequence
  Synthetic
SEIEKLLEDFKKRIEDIKRRLERYLEEVRKRVEKVKRELERALEESKRTVDEVKKEIDRAPPTEELRERLRRLKEEHRRRIRELEERLKEENRKNEERNRELEKELEDEARKVEEAEKRANASDEVRKEIRKLLDDIRRVVEKVKRDNERLNRDLNRRVREVIRESEKLNKRLEEAVR

SEQ ID NO: 9569 - protein, 178 aa, Artificial Sequence; identical to SEQ ID NO: 9568
  Synthetic

SEQ ID NO: 9570 - protein, 174 aa, Artificial Sequence
  Synthetic
SESETLEKELKELKEEADKLIEDIRRRLEEVARRVERNVTESERTLEELLRRAREKKKRRPQDREVEKELTEYRKELEKNREKSERDIRRVKEKLDEIEDRLRERLKRVKDRLDKVDVDRRVKEEVKRVLEEIERALRTVLKEVRDLLKRLEELHREVLDKNRRVLKAISDEAK

SEQ ID NO: 9571 - protein, 174 aa, Artificial Sequence; identical to SEQ ID NO: 9570
  Synthetic

SEQ ID NO: 9572 - protein, 174 aa, Artificial Sequence
  Synthetic
SEDEKVKKDLDELRDRVRKNIERIRRKLKKLLDEARDNVRRSEETLRRLARRVEKIKKDKPRDEEVREELERYEEELKRNKEESDRKLEKVREDLKKNLEESERRVRDFERRLRELDIDRSVKEELRRVLEDLKRLHEEVSKRVEDALREMKELHDRVLKRNKDVLRELKERAQ

SEQ ID NO: 9573 - protein, 174 aa, Artificial Sequence; identical to SEQ ID NO: 9572
  Synthetic

SEQ ID NO: 9574 - protein, 178 aa, Artificial Sequence
  Synthetic
SLEEIVKDILRRIKTKADEIKEKVDRSLREIEELVKEIKKEVDDSLRDIERVAEELRREGREDEKMRRKLEKDEERNKRTLDEIERKVRKLNRDNEEKNRETKEEVDELEKEVREIERKANLDERLLRDVRRILEELRDLVRRLHEDNKRLDEDLNRKVEKLKRDNEDLNKKMRDRAE

SEQ ID NO: 9575 - protein, 178 aa, Artificial Sequence; identical to SEQ ID NO: 9574
  Synthetic

SEQ ID NO: 9576 - protein, 179 aa, Artificial Sequence
  Synthetic
SEKEEADKKLKKVMDDLREILRRLLETLKRVIERSEEVLKRLDDRNREVLEEIKRAIERLDRREDEIRTVEEELRRNDERVKEDLTRHKRELEETEKEVRRTLTKVDEELKKIEDEIRRGDRDEKEAEETVRRMKELVDRIRKKAEEDVKKLREDSKRTADRSKKNVEDLKRRLDELAK

SEQ ID NO: 9577 - protein, 179 aa, Artificial Sequence; identical to SEQ ID NO: 9576
  Synthetic

SEQ ID NO: 9578 - protein, 178 aa, Artificial Sequence
  Synthetic
SEIEELVRRLERKLEEHKKMVDKYREDLKRTLDRVNELSKDYIKKLRDILEKAERLVRRGELKEEVVKKIEDELKKLNEEYEKRVRDVERELRKLNDDVRKLHEELEKDLRREEEDVERKGTSEDLRRIAERVLREAHRTAKDLHRDSERVREEIKKSVDRVHEESERVLREIRKLKK

SEQ ID NO: 9579 - protein, 178 aa, Artificial Sequence; identical to SEQ ID NO: 9578
  Synthetic

SEQ ID NO: 9580 - protein, 183 aa, Artificial Sequence
  Synthetic
SIEEEVRKIVDDIRRSSEELEKSVKRVVEEIAESSKEEKDRVKRNIEEIRKEIDKLRRDGADERVKEKLDRNLEESRRRLEEYEKKLRDELRKAKKELDDYKRDLDRRLKEAEERLRDVKDRIDKDVLEKLKRLLDKVVRDSEDVIRKLEERLKKVVDESKEVLKELEELHERVMREVEETIR

SEQ ID NO: 9581 - protein, 183 aa, Artificial Sequence; identical to SEQ ID NO: 9580
  Synthetic

SEQ ID NO: 9582 - protein, 183 aa, Artificial Sequence
  Synthetic
KIEEDIRRELTKILDKLRKLLEKAKKNVEDIERSSRDLKRRVDETIEKIKDELRKLERDGDTDEMERRLRKKLREVEEELKKYEEELRENLKRSEEELRKVKKDLEDELRELEDRLEKIRDRIDEEVLERAERELRRVMKEVEKVLREIEELHRRVAETSKRVIDELRRLLEKVFKEFEDAVR

SEQ ID NO: 9583 - protein, 183 aa, Artificial Sequence; identical to SEQ ID NO: 9582
  Synthetic

SEQ ID NO: 9584 - protein, 182 aa, Artificial Sequence
  Synthetic
SEVDEDLKRLEDRVREYEDRVREDIRRLEEDLKRLRKRIEDSIEEMRRTLEEVKEDVRREGPDDRLREELRERNERHRDELRREAERVEKKLRDMKRKLERSHEEVKKELEEVRKKAKKDNLDRDRLTKLREVLERLEKRIREIDEEIKRVLERVEKEIRDALRKIEKVNEDVEKALRDILR

SEQ ID NO: 9585 - protein, 182 aa, Artificial Sequence; identical to SEQ ID NO: 9584
  Synthetic

SEQ ID NO: 9586 - protein, 181 aa, Artificial Sequence
  Synthetic
SLEEEIEKVIRKLKEVVERINERNKRALDKLRKVVEEVKDALRRTNEELKKVVKEVERRGAVDERVREETKREEERSEDKLREEDEKLKRVEETNRRDDKRTRDELKRVRERLEEKKRRGGDKDDVRRLKREIEELIKRIDDKIRKLIRRHEELVREIREELKKHEERVKDVLRKLEKLAE

SEQ ID NO: 9587 - protein, 181 aa, Artificial Sequence; identical to SEQ ID NO: 9586
  Synthetic

SEQ ID NO: 9588 - protein, 171 aa, Artificial Sequence
  Synthetic
SEVEKLKKEADEESERNKDEVRKLEKESKENADRIRRHLEEHLKRSDENVKRVKDAKLPKERAREELERHLRRTEDNLRRIKEHLKRHLKKSEEDLRRSDKRLRELKKELEDRIKSEEMLRRLEELLRENKKRNKEVLDRDRELLRELDEEVDDVLRRDKELLEELERRLK

SEQ ID NO: 9589 - protein, 171 aa, Artificial Sequence; identical to SEQ ID NO: 9588
  Synthetic

SEQ ID NO: 9590 - protein, 182 aa, Artificial Sequence
  Synthetic
SEVDEVLERIERLADDNRRKAETVLRKIARLLEELKKHSEDVNRKIKELVKELEDEVRRAGVPRDDVERVLREIEELSKRHREEVKRNEERIRRELEKLERETRKLLEEIRRELDKLKKRNLDRELLERVLRRVEKKSEDHKRKLEEAERRVDKNREDHERRNEELLRRVEERVEDVKRRIK

SEQ ID NO: 9591 - protein, 182 aa, Artificial Sequence; identical to SEQ ID NO: 9590
  Synthetic

SEQ ID NO: 9592 - protein, 185 aa, Artificial Sequence
  Synthetic
DEVKEVLKRIKDLLDELRRHSEKVNRDVERLLEELARNSEKVNREIRRLLDDLRRLVEEKSTDEEVEDELRRAEKEVEEKNKRHKEELERNRETVKRKNEKHRDEVRKVEEDVRRTLEKIERDQLGRDDLERILREVDKKIKDLKRENERMLEEVERNAKEHKDRDREELKRVKEDLDRLRERLR

SEQ ID NO: 9593 - protein, 185 aa, Artificial Sequence; identical to SEQ ID NO: 9592
  Synthetic

SEQ ID NO: 9594 - protein, 178 aa, Artificial Sequence
  Synthetic
KDAEELEKEVERESRKNEESIRRIREEVDKLSKDNDRKLKEIEKEVEDLRRRVDERRKRPGGEEFARKLIKELRDRLKEIAERIEKTNRELKEKLERIAKEIEDLKKRNREELKRLEEEKRGDEKLLDKIRKVVKENEERMDKLLEDIERVVRENIKKNKEVLERARRVIERLEEKIK

SEQ ID NO: 9595 - protein, 178 aa, Artificial Sequence; identical to SEQ ID NO: 9594
  Synthetic

SEQ ID NO: 9596 - protein, 178 aa, Artificial Sequence
  Synthetic
DEDKKLEKDVRDKSEDNKRRLEEIKKKVEDASRENERKIEEIKRRVEEKAEEVDRARKRPGGEKRLKDLIDDLRKTLKEIEEEIEKLKRDNEERLKDIRREIEEINKKLEDDLERIRRAKKGSEELLKTATELVTRNRTENERVLREAERVVKENLRRMDELLKDIRRVIEELERRIK

SEQ ID NO: 9597 - protein, 178 aa, Artificial Sequence; identical to SEQ ID NO: 9596
  Synthetic

SEQ ID NO: 9598 - protein, 175 aa, Artificial Sequence
  Synthetic
EEVERSLKKLEDDIRRIERELEEMVRKSKREIDKLVRDLEEMLKDSRRKLEKLRKDNITSEEARRSLEKHNRELEKVLEDLERRSRRHKEEVDKLLKDLKKKLDDLRREIEELRRRGVSEEAIRELERLLEELLRKIEEVIKDLRRLNKELDEEIKRVIDEARRLNKELEDDLRR

SEQ ID NO: 9599 - protein, 175 aa, Artificial Sequence; identical to SEQ ID NO: 9598
  Synthetic

SEQ ID NO: 9600 - protein, 178 aa, Artificial Sequence
  Synthetic
SKVEKILKDIKRLLDELRKKLKEVKDRLDEINEELRETLKRSLDRNRKINEELKDKLRRRNAPEDVDEESKKHLEDVKRKIDEIRKRSEEHRKRVEDEIRELEERLKELLKRARDVVREGRVGDEVLKRVEEEIRRLEEELDRTLERSKREVEKIKREIERTNRESERAVKEIDDRER

SEQ ID NO: 9601 - protein, 178 aa, Artificial Sequence; identical to SEQ ID NO: 9600
  Synthetic

SEQ ID NO: 9602 - protein, 178 aa, Artificial Sequence
  Synthetic
SKDEEVLKTLRRILEELRDVHRRNLEDNKRITDRLREIHERNLRDNRRITKELEEVARRDGASKEEVDRLRERSEEYLRRLEEHLKRLEEKSKRYLDDLKRHLEEVDKRVRELEREIEREGAGDEKREEVKKEVDETRERNERKNRRSREDVKRVEDRNRDANRKSRKEAEDVKRRLT

SEQ ID NO: 9603 - protein, 178 aa, Artificial Sequence; identical to SEQ ID NO: 9602
  Synthetic

SEQ ID NO: 9604 - protein, 178 aa, Artificial Sequence
  Synthetic
SKVEEVLKRLREILKELEEVHKENKDDVKRILRDLEKTHKDNLDDNRRITEKLKRVVERDGLGEEVKEDLERRSREYLEDLERHLRELKRRIEEYEKELDEHLERLREEVKRIEEEIKRRGAGDEEREKVERRAKEARDRNKRKNERVKEEVKRVKDRNKKKNDESKETVRKIEEDAT

SEQ ID NO: 9605 - protein, 178 aa, Artificial Sequence; identical to SEQ ID NO: 9604
  Synthetic

SEQ ID NO: 9606 - protein, 175 aa, Artificial Sequence
  Synthetic
SDSERILKDIEDKLREIKKRSDDNRRRLEKENREVEKRVREILRRIEEENKDVEREDKRRDEVLRRLERRYDDLRREIRETLERLEKRYRDNEEELERLLEEVERRVKKILKELDEKGVEEKVKRDLEEALKTLRKVAEDNKKSLRESLETVKKLLEDLERELRKSAESVRRKMK

SEQ ID NO: 9607 - protein, 175 aa, Artificial Sequence; identical to SEQ ID NO: 9606
  Synthetic

SEQ ID NO: 9608 - protein, 175 aa, Artificial Sequence
  Synthetic
SESEELLKRAEDEVRKVEKKSRDNERRLREKLKKAKEDLDRIDEDIKRLNKELEDRNDKDSRVLKRARDEYRRIRREIEKLLEDLERDVKRNEDDLKRDLDRLEESIRKLKEDMDKAGLEERLRRELERILEELRELVRRNEEELKKIMKRVREEVEKLLRKLEKSLESVDRKVT

SEQ ID NO: 9609 - protein, 175 aa, Artificial Sequence; identical to SEQ ID NO: 9608
  Synthetic

SEQ ID NO: 9610 - protein, 180 aa, Artificial Sequence
  Synthetic
SRDEKAERMVREVEKKIKELIDRNRRVTEKVKEDIKRLIEDLERVTRDVSRAIKELARRLRDTDLRRLEEELRRIEKSSRDVLRKLEEELRRLSRTSEEYLRRLKERLDELRKEVEDIKRKKDIKEEDDKRIEEDLRKLEEDSRRYDEDLKRELERLRKEVEEYKKRMREELRRLKEEAD

SEQ ID NO: 9611 - protein, 180 aa, Artificial Sequence; identical to SEQ ID NO: 9610
  Synthetic

SEQ ID NO: 9612 - protein, 180 aa, Artificial Sequence
  Synthetic
SELERATKVVKRVADRIAELIRENARVTKRVADESRKLLEETETVTREVMRAIEELLKRLRGERAKKLKKLLEDIRRSSEEVLRKNKKDSEELKRTSDEYLERLRRKLEKLKDEVRKIKAENSIREEDLKKLEDDLKRAADESKKYDDDLRRKLDELRRRHEEYKERLKEMLKRLEDETR

SEQ ID NO: 9613 - protein, 180 aa, Artificial Sequence; identical to SEQ ID NO: 9612
  Synthetic

SEQ ID NO: 9614 - protein, 180 aa, Artificial Sequence
  Synthetic
SELEDARRVVKRVADRIKRLIEENERVTKEVKEASEKLLKDTKDATRRLAKEVKELVKRLRGKDVEELKRRLEEIKRSSDKVEEDNRRESERLRKTSEEYVDELRKELERLEREVKEIEERNNIDEKDKKRLEEELERLRESSERYDERLKRELERLEEEHRRYIRRLKEELDKLREDTD

SEQ ID NO: 9615 - protein, 180 aa, Artificial Sequence; identical to SEQ ID NO: 9614
  Synthetic

SEQ ID NO: 9616 - protein, 184 aa, Artificial Sequence
  Synthetic
SEVEELIKDIRRHNTRLEKRMREILEDLKRHLKRSEDKMRKLVKELKELLDRLRDIARDGELKEEVLRRVREELRRVEEELKRTLERNKEKLEKVREDLERELRRDRKKNEELRKEIEKVRKDIDEKLLKELEDVIRENEKRSRDIARTLEKALEELRKASKELIDTARDILRKVLEDVDRLRQ

SEQ ID NO: 9617 - protein, 184 aa, Artificial Sequence; identical to SEQ ID NO: 9616
  Synthetic

SEQ ID NO: 9618 - protein, 179 aa, Artificial Sequence
  Synthetic
SEVETSAERLKREVEKHHKEVEEYIRRLEEELKKMTRDVERALEKIKEDVDRLRKEQKSKDELDETVRDLERKIEELKRKLEKKLEDIERSSREVLDRTRRKLEELEREVKKLEDEINTDEELLKRLRDVLEEVSRRIKDNLEELKKVSERLKRRIEELIRRLEKVMRDVRRSAEEIKR

SEQ ID NO: 9619 - protein, 179 aa, Artificial Sequence; identical to SEQ ID NO: 9618
  Synthetic

SEQ ID NO: 9620 - protein, 179 aa, Artificial Sequence
  Synthetic
KEVEEDIERLKRILEKHHKDIERAIRRLEEKLKRLEDKLRKYKRDLEEEVARLKDEQRSEELLKRSVEKIKRSSEELKKEIRRLLEEIRKEIEDLKRKTKEVLDRIRREVEDLERRINSDEKVLRRLKEVLREIEERIRRNKEELDKALERVKRTIERLIRELEKLSERLKRIADEIAR

SEQ ID NO: 9621 - protein, 179 aa, Artificial Sequence; identical to SEQ ID NO: 9620
  Synthetic

SEQ ID NO: 9622 - protein, 179 aa, Artificial Sequence
  Synthetic
DEVDEIVRRLRETVDRHHKRIKEAIEKLKEEVKKHHREIEEYIRRLEEEVKRLADEQKDKDSLTEELKRIEKSSKELEDKSRDKLRKVREEIEEMKKRTEDTLKRLKEEVEDAKRRINTDRKLLEKLDRVLKKLEEDIRRNKEALDRALREAEKSLTDNIKELRDVSREIAERIKEITR

SEQ ID NO: 9623 - protein, 179 aa, Artificial Sequence; identical to SEQ ID NO: 9622
  Synthetic

SEQ ID NO: 9624 - protein, 175 aa, Artificial Sequence
  Synthetic
DEKEKVIEDIKELLKELEKKLEDIIREIEKELKRNDEENEESRRRIEDMLRRLEELKRRSDVEERVKKEVEDTLRKLKREYDERDRENRERLKRILEEMREDVKDLREKLRKLRKDLKGTEDVDRVLREAERRVREILKELEEVLRRAEERSEENLRSAEKVLREVEKRLKELTD

SEQ ID NO: 9625 - protein, 175 aa, Artificial Sequence; identical to SEQ ID NO: 9624
  Synthetic

SEQ ID NO: 9626 - protein, 175 aa, Artificial Sequence
  Synthetic
SEEERIIKRIKETLEDLKRKLDRIREEIERDIRRNNKKNEDSIRDIERMLRELRRLFEESEVKEKVVEDVRRRLKRLKEEYRKTDEENKERLKRILEEMEELVKRLRDELEDLRRKIRGTKELKEVLEEAKKTVDKILRDLEELLRRAEEESRRNLREAEEVLKKVREDLERLAT

SEQ ID NO: 9627 - protein, 175 aa, Artificial Sequence; identical to SEQ ID NO: 9626
  Synthetic

SEQ ID NO: 9628 - protein, 175 aa, Artificial Sequence
  Synthetic
SEEEEVIKEIKDALRDLRRRAEELMKELRELIRENNERNKESEREIRRLLDRLRDLKRRSEVKEEVVKTVRKELEKLKREYEKLNEDNERKLREVAEAVRKLREDLERILDRLRKELEGTEEVKRVLDDAKRAVEEILARIKELLDEVRKASKENLERAEELLRDVERELDRLTK

SEQ ID NO: 9629 - protein, 175 aa, Artificial Sequence; identical to SEQ ID NO: 9628
  Synthetic

SEQ ID NO: 9630 - protein, 178 aa, Artificial Sequence
  Synthetic
SEVERLIEDIRRANEELNRKSERKSRESKKENDRLNRESDKKSRDSERVLEELRRRNITSKDLRKKARELREDHRRYLERLKRALEELARDHERYLRELDEALRRLLTRVRETERRITDEELVRRLDELLKESETNVRDNKRRVRDNLRRTEENARRNLEKVKKNVRKIDKVIKEIET

SEQ ID NO: 9631 - protein, 178 aa, Artificial Sequence; identical to SEQ ID NO: 9630
  Synthetic

SEQ ID NO: 9632 - protein, 178 aa, Artificial Sequence
  Synthetic
SEVDETARKLDEDLKRLEEEVRRTSKESEDENRKLNETSKRESDESKRRLDELRRKNITDKDLREDLKRLEDRHRKYKEDLDRELRRLEEKHKEIIKKLRRSAEELERRMRELARRITDERVLRKLKDLVEKVKRVIEKLVKELEDNVKKTKDNARRNKREIEENARRIREEIKKLED

SEQ ID NO: 9633 - protein, 178 aa, Artificial Sequence; identical to SEQ ID NO: 9632
  Synthetic

SEQ ID NO: 9634 - protein, 178 aa, Artificial Sequence
  Synthetic
SEVEKEADEVRRTNEELNRRSEETSRRSEEDLRRLEEKVRRASKKSEDDLRRLKRENITDKELDKSLDELRKEHEKIIKELEDTARRLKEEHRKYIEELDKALKELDDRAKESERRITDEEMVKRLRDVVKRSRENIEENKRRIEDNLRRIDEVIRRLIEELRRNMRRIEEEIERIRR

SEQ ID NO: 9635 - protein, 178 aa, Artificial Sequence; identical to SEQ ID NO: 9634
  Synthetic

SEQ ID NO: 9636 - protein, 184 aa, Artificial Sequence
  Synthetic
SEVEREIERLEEDLDRLRREVDEAHKRSKKKLEELRKEVEDYEERVKEELRRLEKLVREGRVDERDLKRVRDELHESSKRVLDRLKRALEKLEEEYKKLLEKLRRSLDKIREEVERLERELKDSPEEVRERLERALRKAEKDVKRLEDELKRSLKEVRETVRELEERLREVNERVEELLDRLRK

SEQ ID NO: 9637 - protein, 184 aa, Artificial Sequence; identical to SEQ ID NO: 9636
  Synthetic

SEQ ID NO: 9638 - protein, 186 aa, Artificial Sequence
  Synthetic
RVEDRVRDLIRKHDETSREIEKRIRDSIKRLADVLDKIRKAIDDLIRKLREAVEDLLRKIGKDDEDKARELKEEVDRAIERLRRELERLKREVERIIEKNEEILRRLREESERVKRELDEARRRKLSEKEVEDLARKIEKLNEDLRRRLEKLDKENKDVIRRLEDALRRLAEEIKRLIDELRERAR

SEQ ID NO: 9639 - protein, 186 aa, Artificial Sequence; identical to SEQ ID NO: 9638
  Synthetic

SEQ ID NO: 9640 - protein, 171 aa, Artificial Sequence
  Synthetic
KDEDRLRDDIRRAIEEIEEKLKRLKDRNKEHIERLKKRNEDLNRRNRDVVRRLRERDTDEKEIEEAMRRTRKEHKKALDDNRKSLKESEDELRKAEEDLRKTLEDLDRKLRAEPRTEELEKLREDLRRVIERVEREIRRSSEENRRVVKKSVDNIRDSLRKNEDVIRKLRK

SEQ ID NO: 9641 - protein, 171 aa, Artificial Sequence; identical to SEQ ID NO: 9640
  Synthetic

SEQ ID NO: 9642 - protein, 181 aa, Artificial Sequence
  Synthetic
DVEKKIKDLARELREVIDDARRKNRKLHEDAREVSERHEKAVRDLTEELKRVIDELRKRNIDEDTLRERRKRIEEEIRKVEKDNEDILREIKEDNEEIDRKLDEELKKLEEDIKDLERRKVPEDMLREVEKRVKEEIKRIKDDLDEVRKRHEKKVRDIRKHLKELEDRIKKTEKDLREEAR

SEQ ID NO: 9643 - protein, 181 aa, Artificial Sequence; identical to SEQ ID NO: 9642
  Synthetic

SEQ ID NO: 9644 - protein, 181 aa, Artificial Sequence
  Synthetic
RVEEEIERLSRDLKRVIEKAKRDNDRLHKEVRKASEDHKRENKRLHEDVKRVIEELRKRNIDEETLRKTMEDIERKNREVDKRNEERLREIERENREIDERLKEKEERIRRRIDDARRRKVEERMLKKLEDEIEETKKDIEREIREIDKRHKDAVKELRDHIRELAREHEEEKKRLEETAR

SEQ ID NO: 9645 - protein, 181 aa, Artificial Sequence; identical to SEQ ID NO: 9644
  Synthetic

SEQ ID NO: 9646 - protein, 181 aa, Artificial Sequence
  Synthetic
RVEEEIRRLLEESERVHKELEDINRRLHEKVDRVSKKHREENKRLHEKLKRAIDRLREKNIDEDTLRRKEREIKKRNDRVDEENRRTKKEITDKNRRIDEEIKRNLDENRKRIEDVKRRNIPEEALKKLEKEVKDNERKLREEARRVEEEHEKTVRDLKKHLDELREEHDRILEELERTRK

SEQ ID NO: 9647 - protein, 181 aa, Artificial Sequence; identical to SEQ ID NO: 9646
  Synthetic

SEQ ID NO: 9648 - protein, 173 aa, Artificial Sequence
  Synthetic
SDMEKRKRDIKRKLDESNKKSEEAVREVERKLDESNKEVKKKEERVEDELRKLEEKRRRGSGEELLRRVKELEDDLRRKLKEVRDRHDRLRRELEKILEKLKEDHKRIVDELKKGPDDEKLKDIERELRENLKRNEDIVREILKKLEDNLRRVEKLAEDIRRKLEKVADDLRK

SEQ ID NO: 9649 - protein, 173 aa, Artificial Sequence; identical to SEQ ID NO: 9648
  Synthetic

SEQ ID NO: 9650 - protein, 171 aa, Artificial Sequence
  Synthetic
SELEEDKKRIEETLRRLEETAKEYHRRSREELRRLEEEAKRYHEESKETLDRLRRENITSEELRDTIRRLEDRNKKLLEKLKKDIDEHKRRNEELMRRLRKTIEDLKRELDKGPDDKKLKDIKEEVERVMKKLEDLVRRDNEESEKVLEKLKRLVERNNEDIKRALEELRK

SEQ ID NO: 9651 - protein, 171 aa, Artificial Sequence; identical to SEQ ID NO: 9650
  Synthetic

SEQ ID NO: 9652 - protein, 171 aa, Artificial Sequence
  Synthetic
SEDEERLRRIEEELRRLEEEAREYHERSREELKKLREKAKEYHERSRRELEELRRRNITSEELRKKIEEHRKRNEDLLRELKRTIEELEKRNRELLKKLREDIKRLRDELRKGPDDKRLKEITRKVEEVMKKLEKLVRDNNEEIRKVMEELKKLVEDDNEESDRALKELET

SEQ ID NO: 9653 - protein, 171 aa, Artificial Sequence; identical to SEQ ID NO: 9652
  Synthetic

SEQ ID NO: 9654 - protein, 171 aa, Artificial Sequence
  Synthetic
DEMETRLEDVRKKLDDSRRETRKVEEDIRRTLEELRREAKKYHEDSKEELDDLRRRNITSEELKETIKRLEDRNRKLLEDLERKIREIEKTLEDYLRRLEERIDKLRRELDKGPKDEKLKEIKERIEKVLRENRDVVKKIKEDVRRALKELEELVRKNNEDIKRLLDELRR

SEQ ID NO: 9655 - protein, 171 aa, Artificial Sequence; identical to SEQ ID NO: 9654
  Synthetic

SEQ ID NO: 9656 - protein, 172 aa, Artificial Sequence
  Synthetic
SRVEEVERRVRDKSRKSKEKLRKLEEDVRRESETSRDRLRKLAEEVKTKVKELKDKRVPKEEVEERVRRIERRLEETLKDLRRRYEEVERRLKKALEDLRREHEKVKDELRRGEIDSEDLKRLAKEIEDNLEELERKIREIRKELRRSLEEVEKTVEDLKRELKKVLDELRK

SEQ ID NO: 9657 - protein, 172 aa, Artificial Sequence; identical to SEQ ID NO: 9656
  Synthetic

SEQ ID NO: 9658 - protein, 179 aa, Artificial Sequence
  Synthetic
SDIEEAKERLERKLEKLLRKVEEYLKEIADEIRRLEEELEEYNRRSKERIDRVLEVKERGEADRRVIEEEIRRMKRRNEDLERKVEKKLRELEKRNEEVKRDLEEAKKKIKKEIDELRERGVDESVLKELEELLKELEDRIRKILTESTELLRRLEKRVRDSLRRNTEELDELLDRLEK

SEQ ID NO: 9659 - protein, 179 aa, Artificial Sequence; identical to SEQ ID NO: 9658
  Synthetic

SEQ ID NO: 9660 - protein, 179 aa, Artificial Sequence
  Synthetic
SEVEKSEKKLRDEIERLVRENEKYLERIKELVEELLRELEKAVRELEKEVTEIEEVKRQGNVDKRLIEDLIRRIRKKIEDLRRKVKKAVTDLKRANDEVRRKSEEDLRRIEEEIKRLEDRGVEERVLKKLRDLVKEVVDRSKRSLDESTKVLDTLEKEVRKVLEALKDILREALERLDK

SEQ ID NO: 9661 - protein, 179 aa, Artificial Sequence; identical to SEQ ID NO: 9660
  Synthetic

SEQ ID NO: 9662 - protein, 181 aa, Artificial Sequence
  Synthetic
SREEIIKKLKEEVERLLRESAKVLEELKRRLEALLRESEEILRELRELVRTLLEKLERDGLDRRDIDKIRRDIERREREWEKETEDTRREIEELERRWRRRLEETRKRLEDIEERLKKEEISEKDLKKTEDDLKREADEHRKAVEDELRKVKKRLEEHRERVRKRLEDIEKTLRDIDREVR

SEQ ID NO: 9663 - protein, 181 aa, Artificial Sequence; identical to SEQ ID NO: 9662
  Synthetic

SEQ ID NO: 9664 - protein, 181 aa, Artificial Sequence
  Synthetic
SSVEDLLRKAEEVVRRAEEKSRDSHEKTKDVLRKVKRKSEELNKHNRESIKKVEEVRRRTDDKRVLEKVLEDIERNSRDAVRKHKRVLEELREVVRRSEETNRKILKEVRRVVEEVIRRLREEGAPEEVLKTIEDLLRKLERKVRETIETDRRLLRKVEEELKRSIEDSRRLVDELKKRVT

SEQ ID NO: 9665 - protein, 181 aa, Artificial Sequence; identical to SEQ ID NO: 9664
  Synthetic

SEQ ID NO: 9666 - protein, 181 aa, Artificial Sequence
  Synthetic
SSKDRLRDEIRRVVERVREISERVNKHNRDSVKRVEEESRRINKEIRKVVEDVDRMRRRVTDERVVKELVKTLRDVVRKVVEKHKKAVKEVRDNSKEAEEIHKKALDELREVARRVIEMLRKDGVPEEVLREIEKLVRDVEREVRESIERSKRLVKELEERVKKSIDEIKKEVDDVERKLK

SEQ ID NO: 9667 - protein, 181 aa, Artificial Sequence; identical to SEQ ID NO: 9666
  Synthetic

SEQ ID NO: 9668 - protein, 181 aa, Artificial Sequence
  Synthetic
KEVEDLKEKVKRVVEEVEKISRELNKHNRDSVRRAEKTSKELNDHNKDSIRKVREVLKRTTDKRLLEKVLRDIKENSDDMVRKHEKVLDEVRRNSDDVVTKHKKALEDLKRMAEEVERELEKAGAPDKVLKDIKKLLKDVEKKVRESIKESKELVKRLKDKLEESIRRSKKDVEDLKREVD

SEQ ID NO: 9669 - protein, 181 aa, Artificial Sequence; identical to SEQ ID NO: 9668
  Synthetic

SEQ ID NO: 9670 - protein, 181 aa, Artificial Sequence
  Synthetic
SSVDKLRKEIREVLRRVERISEESHKHNEESVRKVKERSERLNKHNRDSARDVERVLREVTDERILRTILRKVTENSKRAVEDHERALEEVRRNSEDVERKNRKALKELEDVVREIEDRLRKEGAPEEVLEEIRRRLEEVEERVRRDLEESKKLVDELRKRVEKSIRESRKLVDDLRKRVT

SEQ ID NO: 9671 - protein, 181 aa, Artificial Sequence; identical to SEQ ID NO: 9670
  Synthetic

SEQ ID NO: 9672 - protein, 181 aa, Artificial Sequence
  Synthetic
SSVDKLKDEVRKVVETVKDLSRRLNETAKRVADRVRKISRETHEEVRKVVEDVKDVRRRTNDKRKLEKVLDELREVIKEAHKKNEEVLDELRRVVKRLEDEHRKALEDLERVIRRVIKELRREGADETVLEELKRLLDKVREDVRRSIEEIRELLKTVEKEVRDDSRDLERLLKRVEEETK

SEQ ID NO: 9673 - protein, 181 aa, Artificial Sequence; identical to SEQ ID NO: 9672
  Synthetic

SEQ ID NO: 9674 - protein, 181 aa, Artificial Sequence
  Synthetic
SSVDRVREEIERVARRVRKLSEDSHREVEKVLKEVEEISKRTHEEIDKVVKEVEKVIRDTTDKRELRKVVDDLRKVAEEAHKKNEDALRKLEKVVREVMTKNRKVLEELRKVVKEVIEKLEREGAPEEVLEEIRRLLETVEREVKTDIDRLREELRRVEEAVKKDSEDIRRKLKRVEDDVK

SEQ ID NO: 9675 - protein, 181 aa, Artificial Sequence; identical to SEQ ID NO: 9674
  Synthetic

SEQ ID NO: 9676 - protein, 183 aa, Artificial Sequence
  Synthetic
REAEDIVRRSHELVERAREKLRRLNKDSERLVDEVEKELREVVERVAELIKRAKDEIGTEDDKVRKAVELLERVLREVKKVVEELLRKIRKVLRDDHESVREVKERVDDADRKVKKVVDEVGSVEEVLEKVLRDSERVLKELEEKLRKSLEDVKRVIDEVKKVLEDVKRKVEEVLKRVRDKRR

SEQ ID NO: 9677 - protein, 183 aa, Artificial Sequence; identical to SEQ ID NO: 9676
  Synthetic

SEQ ID NO: 9678 - protein, 183 aa, Artificial Sequence
  Synthetic
SRAEKVERESHELVRTLKEELDRVVEKVERLVRRVEEELKRVNKESAELVKELKDRIGTEDEKAVEIVKRVEELLKEDHDTVRDLLRELREVLERVRELIDRLRRRVETVDDEVRKLVRDVGELDEVLTKLVKSSRDVIEEIREDLKRVLKEAEEVIRRVKKRLEDSLEKVKEVLRELLRAAK

SEQ ID NO: 9679 - protein, 183 aa, Artificial Sequence; identical to SEQ ID NO: 9678
  Synthetic

SEQ ID NO: 9680 - protein, 183 aa, Artificial Sequence
  Synthetic
SSAEDVVRRSHELVRRLEEELDKVNEDSERLVREVEERLKRANEESKRRVEDAKRRIGTEDEKVKRLVELLEKVLREDTDTVRRLREDLRRVLEKDTRSVEDIKRKLRTVDKEVKKFVRDVGSLEEVLEEVLRRSREVLKKLKEDLKRSLDDAERVIRRVREDLKRSLKRVREVLEEVRRRTK

SEQ ID NO: 9681 - protein, 183 aa, Artificial Sequence; identical to SEQ ID NO: 9680
  Synthetic

SEQ ID NO: 9682 - protein, 183 aa, Artificial Sequence
  Synthetic
SSVDRIVEESHTRVRKLMKDLEDVNDESRRRVERLRERLEEVVKEVEKLVEELRRRIGEERREARRIVERVERALERVRDVVKKLLEELERVLKKDTESVERLKEELDKVDKEVKDLLRRVGSLEEVLKTILERSREVLDRIRKELERSLKEVEDVLRRIEKDLKKVLDEAREIIKRLLDEAK

SEQ ID NO: 9683 - protein, 183 aa, Artificial Sequence; identical to SEQ ID NO: 9682
  Synthetic

SEQ ID NO: 9684 - protein, 184 aa, Artificial Sequence
  Synthetic
SRLETVLERAKELIDRIRKLLEDVRRKVKELIDRIRRLNEEANRESEELIRRIEEELRKGKDAEEVVREVKERLERLLRRSEEVSKKSRKDLEDLVREAEKVIRDLARLLREVVREVEEVVRRDNTEDARRILEEVRKLVKELEEELRRALKEVRDLAKEVDEDSKRALDRNEKLIRDLDRKVE

SEQ ID NO: 9685 - protein, 184 aa, Artificial Sequence; identical to SEQ ID NO: 9684
  Synthetic

SEQ ID NO: 9686 - protein, 184 aa, Artificial Sequence
  Synthetic
RELEEAKKKVEDLLRRILEENERAHEESKKLIEEIRRLLKKMNEESEELRERIRKKLEENSTSDKVVREVRKEIDRLVERSERVAKRLKEELDRLLERSKKVSDDSRRKLKELLEEVEKVIRTLNSEDVERALDDVRRLLREVERRSEELLRTDEEAIRTLKKEIDKVLKENKDKADRLKEEVN

SEQ ID NO: 9687 - protein, 184 aa, Artificial Sequence; identical to SEQ ID NO: 9686
  Synthetic

SEQ ID NO: 9688 - protein, 184 aa, Artificial Sequence
  Synthetic
DELETVERRVEKLIEDIKRELRKVHEESKKLIREIKKELEDANRESERVIEEIKRELDRDKDSERVVERLEEKLRKLVRRSEEVIKELKKKLDELVKESERVARELRRKLEELVREVERVVREVNSEDARKMLEDVKKRAKDVEDEIEEVLRRDRELIKELKRELDEALRENRRLIEDLKRKIK

SEQ ID NO: 9689 - protein, 184 aa, Artificial Sequence; identical to SEQ ID NO: 9688
  Synthetic

SEQ ID NO: 9690 - protein, 184 aa, Artificial Sequence
  Synthetic
SEAEEALKRVKKAIDDARKLLEEANRKDKKSIEEAEKLLREAHERSKKAIKEAEDALDKAKTDEKAVERAREKADRAVKESEDAARRAKEIADKSLEDSERAAREAKKLADEAVDEARDAARKANSEDAEKALRDAKRLADDLKRTADEVLKENKRTAEDLKRKADEVLERDKKLAKELKEKAT

SEQ ID NO: 9691 - protein, 184 aa, Artificial Sequence; identical to SEQ ID NO: 9690
  Synthetic

SEQ ID NO: 9692 - protein, 184 aa, Artificial Sequence
  Synthetic
SELEDVKRKVKRLIEDIERALTEANKEDEKSIEETERLNRTVHEESKELVERLKDELRKRSTDKKVVEKVKKKLDDVLRRSKEVSERSKKILKDSVRRSAKVAEELKRRIDKLVEDAEKVIRDLNTEDVDEALKEVRDRAKKLKDKIKKVLDDNRRTVEDNERKSDELLKTDKELVREVKERTE

SEQ ID NO: 9693 - protein, 184 aa, Artificial Sequence; identical to SEQ ID NO: 9692
  Synthetic

SEQ ID NO: 9694 - protein, 183 aa, Artificial Sequence
  Synthetic
RELEKVRKEVERLIKEIKDLNKRAHDETKTRIDRIREKNEKVHEESKRLIREIEELLRRKGGESEEVVREIEKILDRIRRESERASEESRKELEDIKRRSKEASDRSRKILEEIRRTIEEVLREGAVTEEVIKEVEKRLDELRKESKKLLDDDRRLIEKLKEESRRLLEEDRRLIKELKEKVK

SEQ ID NO: 9695 - protein, 183 aa, Artificial Sequence; identical to SEQ ID NO: 9694
  Synthetic

SEQ ID NO: 9696 - protein, 183 aa, Artificial Sequence
  Synthetic
SAAERAAEEVKKLIDEARKLLERAHRETKKLIDEARKLNKRALDEVRRLIEEADRLLRRDGGEADEALKRAEEIAKRALDLAKRASEESERIAREAIKLSEDAARKAREIAKRALDLARKALKDGAAREEVAERARRLAEELKKEADDVLRKDRDLARRAREESEEALKEAEKLARDLRRRAK

SEQ ID NO: 9697 - protein, 183 aa, Artificial Sequence; identical to SEQ ID NO: 9696
  Synthetic

SEQ ID NO: 9698 - protein, 178 aa, Artificial Sequence
  Synthetic
KEAEDIKRKVEKVAREITEKSRKSHEELRKVVKEARDKSEKSLRDVERVLREIEELLRRRRKEDVLREVKERIEEILRTNKKVLEEVKERVKRIVDKNRRMLEEVEKRVREILKELKRDRPDSKDLIEEIKRRLDEVRRRSEDNLKKMEEELKKVEEDSRRVVERIRTELKRVEDEAR

SEQ ID NO: 9699 - protein, 178 aa, Artificial Sequence; identical to SEQ ID NO: 9698
  Synthetic

SEQ ID NO: 9700 - protein, 178 aa, Artificial Sequence
  Synthetic
SEAEKIRKDVEKVIREVREDSKRTLERSRKVDEEIRRKSETSHRLVEEVIRRAEELLRRERREEVVEEVKRRIKEIVDRNKEALDEVRKRNEDILRENDRVLERIKRLVEKILRDLKRDRDKDEELIEEIKKALEDVKRESEKVKEESRKSLEDVERDSDRNLKDMERLLREVTERAK

SEQ ID NO: 9701 - protein, 178 aa, Artificial Sequence; identical to SEQ ID NO: 9700
  Synthetic

SEQ ID NO: 9702 - protein, 178 aa, Artificial Sequence
  Synthetic
DEVEEIRKEVERVIREVEEKSKETLRRSEKVDREAKKKSDDSRRKVEKVADEIRRLLETRRDDRVLEEVARRVEAILRENEEVAREVEKRNREILKTNADVLDEIRKRVEEILKELKRDRPDDKDVIEEIRRLLDEVRRRSEKVIRDSERSAEEVKERSERVIEELKRLLEKVAREVK

SEQ ID NO: 9703 - protein, 178 aa, Artificial Sequence; identical to SEQ ID NO: 9702
  Synthetic

SEQ ID NO: 9704 - protein, 178 aa, Artificial Sequence
  Synthetic
SSVERVERDVARVAREIRKISRDTKEESKEVDRRIDEISKRTNEDVRRVAEEIKRLKEKRRRDEMLREISRKAEEIVRENEEVLEKVKRLNEEILKKNEDVLRKVAKDVTDILRRLKRERPDDKDVIKEIEDRLREVEEESKKAIEESKTSLKRVKEKSEKNVEDMKKLLEKVREDVR

SEQ ID NO: 9705 - protein, 178 aa, Artificial Sequence; identical to SEQ ID NO: 9704
  Synthetic

SEQ ID NO: 9706 - protein, 181 aa, Artificial Sequence
  Synthetic
SEVEKVLDEIRRLLKEVEERSKENNDRNEELARRNTRRSEENIRRIEELLRRVREEARKDRVPREVLKELEDRVREVLERNKEVLERLRRLHEEISRKNEEVLREVKREVEKVLEKLRRIDDEKFLREVRREIEEIIRRIKEASEKTHKEAKEVVDRINELSRKSHETIKEIIKRVRDRAK

SEQ ID NO: 9707 - protein, 181 aa, Artificial Sequence; identical to SEQ ID NO: 9706
  Synthetic

SEQ ID NO: 9708 - protein, 181 aa, Artificial Sequence
  Synthetic
REVDEVLDEIRRLLERVREESEKNNRDNEKLMRDNEDRSRKVIETIKRLLEDVKDRATKKNVPEKVLKEIEDLVREVLEENKRVLDTLRELHKEVSDKNKKVLEEVERLVTEVLKKLRDIDDEKFLREVRREIEEIIRRIRELSERTHREAKEIVDRINELSKRTLDKAKEMLDRAEEKAK

SEQ ID NO: 9709 - protein, 181 aa, Artificial Sequence; identical to SEQ ID NO: 9708
  Synthetic

SEQ ID NO: 9710 - protein, 181 aa, Artificial Sequence
  Synthetic
DEVEKVLRDIEKKLEDVERRSKEVIDEIRKLLKEVEEESRRNVKKIREELKKVVDDVRRKNVEREVLEEVKRLVDEILKKNEDVLREVTDLVRKVLRKNEEVLRTVKELIERVLDELRKIDDEKFLRDVKRMVDEILDTARELSRRTLEEIKRIIARIRERSEKSHEEARKALRDVEEKAR

SEQ ID NO: 9711 - protein, 181 aa, Artificial Sequence; identical to SEQ ID NO: 9710
  Synthetic

SEQ ID NO: 9712 - protein, 181 aa, Artificial Sequence
  Synthetic
DSVREVLKKIEDELERVKRDNKDVNRKNEELMRRNEERSRRVVEDIKRKLKELVDDVRRNNVPDDVLRELKELVERILRKNERVLEELKKLHKEVSDKNEDVLRRIEELVREILRKLREIDDEEVLKRVDEEAEKVLRENEKLSKKSLDEAREIVREINRLSEDTRREADEILERVKEKVR

SEQ ID NO: 9713 - protein, 181 aa, Artificial Sequence; identical to SEQ ID NO: 9712
  Synthetic

SEQ ID NO: 9714 - protein, 181 aa, Artificial Sequence
  Synthetic
DEVETVLEKIERLLRKLEKDSREVIKKIKRLLDEAKKESRKNIEEIKKLLEEVKREVDRRNVDDRVLDDVRRRVTEVLEENKRVLDELEKLVKRVLEENKRVLDEARKLVKEILDKLREIDDERFLREVEKELEDMLRRVRKLSEDTERKIREILERIKRLSDDSNRKAKEILREIRKRAE

SEQ ID NO: 9715 - protein, 181 aa, Artificial Sequence; identical to SEQ ID NO: 9714
  Synthetic

SEQ ID NO: 9716 - protein, 172 aa, Artificial Sequence
  Synthetic
DELEKVKEEIRRLLRRIEEDVKRSEERNKELLRRITEEVKRSERRNEELLKEIKDKVDSEILRKVEKAVEDSLRRLREVLRKVKEVVERVLETNRRILEEIKEVVERVEKLLDERDLKKVREDLERMLRRVEEELKRSNEESERAIEEVRRELEDIDRESRKAIEDVLREEK

SEQ ID NO: 9717 - protein, 172 aa, Artificial Sequence; identical to SEQ ID NO: 9716
  Synthetic

SEQ ID NO: 9718 - protein, 185 aa, Artificial Sequence
  Synthetic
SEIDEVLTRLRKISKDLNETSDRVNERARKIIDDIKKESKRVNDEAREIVERLKREIDKTRDRDVLRRILKEIEDVARRVKEINEELLRRVEKVVREVEEINRELVKRSREAVERVKRLLDERVSDKDKVERVVREVEKLHEEDRKRLEESTRSVRKLLEELKRELEKSTRSVKKLVDELRERVR

SEQ ID NO: 9719 - protein, 185 aa, Artificial Sequence; identical to SEQ ID NO: 9718
  Synthetic

SEQ ID NO: 9720 - protein, 185 aa, Artificial Sequence
  Synthetic
DEVDEMLKRAEDRIREISDTSRKVNEDARKIVEDLKRDSERVLRELRKRIEELRREIERDRDEDVVRRVERKVEKVVREVHERNKELLDRVRKVVEDVEDINRRLAEEVRRVAEEVRRALRRDADDEKRVREVAEEVKRLVKELEERLRRSTESVKRLLEDVERAVKESSDEVEKLLRRLREELE

SEQ ID NO: 9721 - protein, 185 aa, Artificial Sequence; identical to SEQ ID NO: 9720
  Synthetic

SEQ ID NO: 9722 - protein, 185 aa, Artificial Sequence
  Synthetic
DEIEEVLRDAKRISDELNRRSEEVNRELREIIKELTKRSRKVLEELKKIVRDLEKKIKDTRDKKDLDRIREEVTDVVRKVHEINKRLLEEVRRVVEEVKRINDKLVRDSERAVEKVRRLLERDVDDREKAERVLRTVEELHKEDRDRMKESTDSVKRLLEELKRRAEKSSRTVEELLRRLEEKIR

SEQ ID NO: 9723 - protein, 185 aa, Artificial Sequence; identical to SEQ ID NO: 9722
  Synthetic

SEQ ID NO: 9724 - protein, 185 aa, Artificial Sequence
  Synthetic
SEIDELLERAKKRSKELNDTSKEVLDRARRIIEEISKTSEEVNKDLERIIRELAEEIKRTRDRRVLDRIRREVRRVVKEVKEINERLLREAERVARDVHRINEELVRRSEEVVKEVEDVLRRKVDDEKRVREVLKEVRRLHEEDRKRMKESSEDVERLLTELRKRMKESTDSVEKLLKELEDRVR

SEQ ID NO: 9725 - protein, 185 aa, Artificial Sequence; identical to SEQ ID NO: 9724
  Synthetic

SEQ ID NO: 9726 - protein, 185 aa, Artificial Sequence
  Synthetic
SSLEKLLEDVRRRSEELNRRSRKVLEDLKDIIRRLKEESKRVLDEAKKKVDDVERKIDKDRRRETVKEVLERVEKVVTDVHRINEELLRRITEVVKEVHERNKRLVEESRRVVKEAEEVLRRDVDDSDKVRKALEDVRRLHEEDKRRVDESSKEVERLLRELREDMKRSSEEVERLVKRVRDRLK

SEQ ID NO: 9727 - protein, 185 aa, Artificial Sequence; identical to SEQ ID NO: 9726
  Synthetic

SEQ ID NO: 9728 - protein, 185 aa, Artificial Sequence
  Synthetic
SEADELLKEVKRISDELNDTSRRVLEELREISRRLNEDSKRVLKELEDILEEIRERIDRTRDREVLKRLLERVAKVVKEVHDINRDLVRRSREAVKRVHDINRRLVEESRKVVKKAEEMLRERVSDEERVRELVERVKELHEEDKRRMDDSSRDVERLHKEDADSARDSSRKVRELLEELRRRVE

SEQ ID NO: 9729 - protein, 185 aa, Artificial Sequence; identical to SEQ ID NO: 9728
  Synthetic

SEQ ID NO: 9730 - protein, 182 aa, Artificial Sequence
  Synthetic
KELEDVLRELKRILEELEKLSREADERSKEIVKRLVEETTRSLKEVKEIVERLKELDDAGKDRREVEKRLRDAHRKNEDTLRRSSEKLDRVLKESERVVRDSSTKLRKVLKDAEDVVRDKVEDEKRAREVRETVRKLVEDVKKKNEESERRNRELVKEVRKRNKEVRDRSRKLVKELEDKLR

SEQ ID NO: 9731 - protein, 182 aa, Artificial Sequence; identical to SEQ ID NO: 9730
  Synthetic

SEQ ID NO: 9732 - protein, 182 aa, Artificial Sequence
  Synthetic
SSLEKVLKDLRKILEDLRREIKTVLDDLRRILEELKRETERVDKKSKEIIETLSELRKAGTDSRDVDRRVKEVLEESRRAVERSSRKVKKVLEDAREVVRRIEEAADKVLKDARRVLREKVEDKKKVDEAIREVEKLIEELRRDLDRVRKTVEKLVRDLERRNEESKRRNEKLVRKLEEELR

SEQ ID NO: 9733 - protein, 182 aa, Artificial Sequence; identical to SEQ ID NO: 9732
  Synthetic

SEQ ID NO: 9734 - protein, 182 aa, Artificial Sequence
  Synthetic
DELETVLRKLEKLVRDLKKRSTDVLRRLEEIVKELTDETKRVDDESRDILRRLKELRDRGVDSREITKRVREALKESRRVIKKSSEDVERAIDEVRKMIEKSSRDVDEVLREVREVLRDKVENKEEADRVITTVEELVKELRRRNEEVKERVEKLARELRRRNEESIKTNEKEVRELEKRLK

SEQ ID NO: 9735 - protein, 182 aa, Artificial Sequence; identical to SEQ ID NO: 9734
  Synthetic

SEQ ID NO: 9736 - protein, 182 aa, Artificial Sequence
  Synthetic
STLKKVLDENRKSIKELLDMSRRVLEKLREILRRLEEETREVDEKSERIVTTLEELIKAGTDKRRIKEELDRALKESEDMVRDSSRKLEEVLEEARRVVEDSSRKLRRSLEELKKVVRDKVEDEDKAKKVIDEVRKSVKRLEEENERVLRDVERLVREVEKKNRESEKRNRKLVEELRRKLK

SEQ ID NO: 9737 - protein, 182 aa, Artificial Sequence; identical to SEQ ID NO: 9736
  Synthetic

SEQ ID NO: 9738 - protein, 182 aa, Artificial Sequence
  Synthetic
SVLEEVLKKLEKILRELKREIEEVLKKLRRILEELVRETEKSLEKVDRIIKELEKLIEAGRDKRDVEREVRRVHRENEETLRRSSEKVDRVLKEVEDVVRRIDRRVKEALREAREVVRDKVEDEKKAREVTKTVEKLIRELRKTLEDVKREVRKLVEEVKRRNKDVERKSRELVKKLEERLR

SEQ ID NO: 9739 - protein, 182 aa, Artificial Sequence; identical to SEQ ID NO: 9738
  Synthetic

SEQ ID NO: 9740 - protein, 182 aa, Artificial Sequence
  Synthetic
STLEEVLERNKESIERLRKESEDSHRKLKEIMERLKRETERSLEEVEEIVKRLKELTDEGRDKREVRKRLEEVHRKNEKTVRESSEKVERVLKENKESVERIVEKAEESLRRLAEVLRDKVDDKEKVKRVIEKAKKSVEDLERRLREDEEAAREWVKKLRTENEKVRKRSEELVRELEERLR

SEQ ID NO: 9741 - protein, 182 aa, Artificial Sequence; identical to SEQ ID NO: 9740
  Synthetic

SEQ ID NO: 9742 - protein, 182 aa, Artificial Sequence
  Synthetic
STLEKVLRDLRKILEELLRMSKKVLEELKRLADRLKEEIKKSLDKVKKIIDELRDLTRKGKDKREVEERVKRVHDENEKTLRKVIEDVRRVLKEVRDVIKESSDRLREVLERARRVVRDKVEDEDKARKVIEEVTREVRRVEEENKKVERTVEKLVEELEETVREARERSERLVRTLEEELR

SEQ ID NO: 9743 - protein, 182 aa, Artificial Sequence; identical to SEQ ID NO: 9742
  Synthetic

SEQ ID NO: 9744 - protein, 182 aa, Artificial Sequence
  Synthetic
SDAERVEKEIREVLKRVEDLLRRVNEETKKVAKEVRELLKEVDDRSREIMKRVAEKLRRISDKKTAKEEVDRVLKEIEKTLRDLKRTVEEVLKRIEDLSKKLHEDVRRVLEEVEELLRRLLERRKDDKDVAREVEKLLRELEKKLEEVNRHDKKLLEELEERLKESEERNRRLLEELKRRLD

SEQ ID NO: 9745 - protein, 182 aa, Artificial Sequence; identical to SEQ ID NO: 9744
  Synthetic

SEQ ID NO: 9746 - protein, 182 aa, Artificial Sequence
  Synthetic
REVEEVLKRIEELIRRSEEETREVNERTKKLAEDVRRLLEEVDRRSKKIADEVRELLERIDDKDTARELVDRVVKKIERTARELRKTVEDVLREIKRLSEELHKRNRTSVEDIRRLLKDVVDKRKDSKDLVRTVEELLKRNEEDLRRVNEHDKKLLEDLTRSLERSEERNKTILEKLKEDLR

SEQ ID NO: 9747 - protein, 182 aa, Artificial Sequence; identical to SEQ ID NO: 9746
  Synthetic

SEQ ID NO: 9748 - protein, 182 aa, Artificial Sequence
  Synthetic
SDAEKVLDEIRKRIEESEKRTKEVNDRTREVLDRVRKLLEKVNKESRKVAEDVREAAERIKDKEELRKTVEEVLEEIKRISERLHERVRRVLEEIKRLSDELHKRNRESVKEIRELLRELLERRKDDEEVRKDVERLLRENERSLREVNRHDEALLRELEKRLEEVNRHDDKLVKDLRERER

SEQ ID NO: 9749 - protein, 182 aa, Artificial Sequence; identical to SEQ ID NO: 9748
  Synthetic

SEQ ID NO: 9750 - protein, 178 aa, Artificial Sequence
  Synthetic
DEVREILEDVKRINKEVEDELRKIEEEIREIVKTVRDESRKTLEELERILRKVEDDLRKDRREEILKTVKELVKKIIDDDRRIVERVLRELERLVEEIKKVVDEVKRLNKELIDRLKTRNPEVEEAVKDNERLAKETEDKVREVVKRIRKIIEEVERTARESERRLRKLLKEVEDRAR

SEQ ID NO: 9751 - protein, 178 aa, Artificial Sequence; identical to SEQ ID NO: 9750
  Synthetic

SEQ ID NO: 9752 - protein, 178 aa, Artificial Sequence
  Synthetic
EEIERILEELRRIAKKVEEDSRRTLETVRRLNEEVKRRLREILEEIRRVAEDVRRKLDEKRSDEEAVRRVLEDVKKKVEDVKRRLEEVLREVEKKNRDVTETNKKILRDLEKKVRDVIRRVKSEDVKRELERILEEVRKKSREALEKNKRLLEDTRRVVEEVKRELEKILRDVKRKVD

SEQ ID NO: 9753 - protein, 178 aa, Artificial Sequence; identical to SEQ ID NO: 9752
  Synthetic

SEQ ID NO: 9754 - protein, 182 aa, Artificial Sequence
  Synthetic
SVVEELRDELRRAEEENRKIVEDTTRRLEDMIRRDEKINEEVERRLEEVTRRVEELRKQGRDKDEIVDELRRVVEELEKILRDALKDSTRVVDELRKVNEDATRISREVVRRLRKLLKDRVDDERKAREMEKEVTEILRRLEEENKRDLDRIKKLLDELRKKNEDTLRRIRRLLEEVRERLR

SEQ ID NO: 9755 - protein, 182 aa, Artificial Sequence; identical to SEQ ID NO: 9754
  Synthetic

SEQ ID NO: 9756 - protein, 177 aa, Artificial Sequence
  Synthetic
SSLDEVLERLRKLLKEIEDKVRRINEEVKKSSEDVERELKRVVDELKRRVERLKEEVRLERLIRELERILDEIKKKLDRLAEENRKILKRVNDESKRILDELRKILRELEERLRRITDERELEKILRDAERVVREIEKRHRDLLEELKKANEDTRRALDEIRKEAERVLERVREEAK

SEQ ID NO: 9757 - protein, 177 aa, Artificial Sequence; identical to SEQ ID NO: 9756
  Synthetic

SEQ ID NO: 9758 - protein, 177 aa, Artificial Sequence
  Synthetic
DEVEEVLKRLRESSEESKRRADDVTRRAEESSRRVHKRSREVVERLKKLVEEVERRVRLRELLETLRRILERLKERLEKLNEENKRILEKVKRDIEKLKRDNEEILREVEERAKRLRDRRELEKLEREMRDVDRRTDEALERLLRTLEEVNKRTDEENKKILEDLKRVVEEVEERDR

SEQ ID NO: 9759 - protein, 177 aa, Artificial Sequence; identical to SEQ ID NO: 9758
  Synthetic

SEQ ID NO: 9760 - protein, 177 aa, Artificial Sequence
  Synthetic
SEIEKVIEELRRSSEESHKRSRKVEEDARRSSDEVHRRSREMLRKLREEVKDVERKVRLEDLLRKLREILKRVEDDARRLNEENRRILKELEERLEKLNRDNKKILEDVERRLRRITDRRDLRRLREEMRRVDERTTRENEKILRELEEVNKETIKENERLLRDLKRVVDRVREEDR

SEQ ID NO: 9761 - protein, 177 aa, Artificial Sequence; identical to SEQ ID NO: 9760
  Synthetic

SEQ ID NO: 9762 - protein, 177 aa, Artificial Sequence
  Synthetic
RRIEEVIKEARKSSRESHEESKEVMERLKRSSDDSHRKSEEVLRRLRKLVEDVERRVRLRELLEELRKILKRLEEKARRLNEENKKILERVKRLLEELNDRNERILRRVEDDLRRITDDRELKKLRDELKRVDDETRKANEEILREMEEVDKRSKEANDRLLEELAKVVKRVDDEDR

SEQ ID NO: 9763 - protein, 177 aa, Artificial Sequence; identical to SEQ ID NO: 9762
  Synthetic

SEQ ID NO: 9764 - protein, 177 aa, Artificial Sequence
  Synthetic
KDIEEVIRRLRESSKESTKRLRDVVEDLKRSSKEVHDESEDVLRRLEELVRRLKKKVRLRELVKRLEEILEELRRRAKELNRRNKEITEELVKELEELVRRNEEILRDVERKLRRITDKRLLKELEDRMRRVDERTDEELEKIRKRMKEVDDRSRDVNRKLAEDLKRAIKRVDDEEK

SEQ ID NO: 9765 - protein, 177 aa, Artificial Sequence; identical to SEQ ID NO: 9764
  Synthetic

SEQ ID NO: 9766 - protein, 182 aa, Artificial Sequence
  Synthetic
DEVREVLRRDEELHRELKERIDRILEELERLHRDLKRKIDRVLEELKRLHEDVKRELDKRGGIEELKERSDRVLTKSARIAEELKKTSDDVLRKTREIVKEIKRKLDDNLRRVREIVEKLKNVEEALRKLHEESKKSVRDVEKELEELRRENKKVIEDLEDELRRLLEENKRAADELRKRAE

SEQ ID NO: 9767 - protein, 182 aa, Artificial Sequence; identical to SEQ ID NO: 9766
  Synthetic

SEQ ID NO: 9768 - protein, 182 aa, Artificial Sequence
  Synthetic
DEVEKVKDDVRKLVEKVKRDAKRAHEDNERKHRKLKKELDDALRELKKRHEELKRRIDDRGGDKDLKKRSDDVLRKSEEIVRRIKKELDENLRRHRERVERIKRKLDELLKKIDDIVEKLKDVDEALRRLKEELDKMIEDVRKELRKLNEDSDDSIRRVKKRLKELRDENEKVIRDIRRETE

SEQ ID NO: 9769 - protein, 182 aa, Artificial Sequence; identical to SEQ ID NO: 9768
  Synthetic

SEQ ID NO: 9770 - protein, 181 aa, Artificial Sequence
  Synthetic
SELEKVRKKVEDISRESEKHLREVKKENDRIIKEIEDELRKLLTDVEREIREVEKRIREERSEKVREEIKKRLERLLEEVRKAIEDLKRKSDEVVKETEKAVRENEEKLEDLRREVAEADDRREKAKRVFEEIERIVRRNKEELRRILKELRELHEEVKEKIKKVLEDVKRLVDELLERAK

SEQ ID NO: 9771 - protein, 181 aa, Artificial Sequence; identical to SEQ ID NO: 9770
  Synthetic

SEQ ID NO: 9772 - protein, 181 aa, Artificial Sequence
  Synthetic
SELEKVLRDVREAIKRNEDLLRRVHEESRRISEESEKNLRRVHERSRRIAEDVRRVLRERRDEDVVRKLRKKLEDLLEESTRAVKENVDELRRALERSEEVVKRSEEHLRDVLRRVEEADDRREEAEKVAREAKKLVDDLKRKNDEVLDEDRKEVERNERELERVLREDKKLLEDLEREIK

SEQ ID NO: 9773 - protein, 181 aa, Artificial Sequence; identical to SEQ ID NO: 9772
  Synthetic

SEQ ID NO: 9774 - protein, 181 aa, Artificial Sequence
  Synthetic
DFAKKLEDEARRVSEESRRHLEDLLRRSKESIDALKRKLEDMLRRVREVIKRIEDELRRERSESVAKSVRDLLREVRDEVRRVRETLKKESEEDRKRVEEVLRRNEELLKRVDERLKEVLRRGEISERVIERIKELLDRNRKELEDVARDAERLNRELNERVDRVLKEVEERLKELEDRVK

SEQ ID NO: 9775 - protein, 181 aa, Artificial Sequence; identical to SEQ ID NO: 9774
  Synthetic

SEQ ID NO: 9776 - protein, 181 aa, Artificial Sequence
  Synthetic
DKAKELEEEIRKIIREIEELLRRMEETSRKSSKESEKHLRDAHEDSRRIAERIKDLLRKEKSEKVREEVERLLRDLERRTREVIKTNRKLSEDDKRRVDEVLKRATELLEELRKKIREVLERGEVSEDVIRELERLLRELKKRIEDVVRRIKELNEDNNRKVEKIREDDERLLEKVRRDVK

SEQ ID NO: 9777 - protein, 181 aa, Artificial Sequence; identical to SEQ ID NO: 9776
  Synthetic

SEQ ID NO: 9778 - protein, 181 aa, Artificial Sequence
  Synthetic
SAAEDVLRKVEKIIKEIEELLKRALEESRKSVKELEKILRDAHEKSRKIAREIEDALRKRKDEDVARKVEDLLRRLKEDTERVIREIERLSEEDKRRVEDVLRKAEELLERLRKAVREARERGEVSDEVVEEIKRLLEELRKKIEDVADEIRRLNEEVNKKLDDLVKTDTKLLEDVDRKVK

SEQ ID NO: 9779 - protein, 181 aa, Artificial Sequence; identical to SEQ ID NO: 9778
  Synthetic

SEQ ID NO: 9780 - protein, 181 aa, Artificial Sequence
  Synthetic
SAAEEVRKKNEKISRELEKLNRKALEDSRDSIRKLKKILDDAHKDSREIIKEIEDLLRKRRDEDVRKRVEELLRRLEERTRKVIKEIRERSKEDEERVKEVHEENKKISEDVKREVKEVRDRGEVSDEVVEEIKRSNDENNERSKKVLDEIKKLNKEVNDRVEELLERDKRELERVKRDVD

SEQ ID NO: 9781 - protein, 181 aa, Artificial Sequence; identical to SEQ ID NO: 9780
  Synthetic

SEQ ID NO: 9782 - protein, 181 aa, Artificial Sequence
  Synthetic
DEFRDIEERAKELAEENETINRRVLTEHKKLIDELREILERVLREHEKRLKDLKDLVRKIDSEEVKKTITDALKRLRETSKELADEVKRVEDELRKTTEELERENKKLLDEVRELLKKVKRDGVVSEEILERIRKLLEDVEEKVKKSVEDSRRLLKTIREEVERVLDTSRKLLKRLEDDVR

SEQ ID NO: 9783 - protein, 181 aa, Artificial Sequence; identical to SEQ ID NO: 9782
  Synthetic

SEQ ID NO: 9784 - protein, 184 aa, Artificial Sequence
  Synthetic
SDLEEVEKRAEEIIRRNKEELEKVLRESKDIIDKNRKLNKESLDEVKRIIERLEDLLRKDGRSERVEELVRKVDREIREVIKRNRELNERSVRELEKLNRESEKLDRESKKELDDLIRDLERRSDTEEVRKVAKKIRDEAKKSHDESKKLNDTSRDLVRKSKEEAERIDEEMKKLLKEIKDKVR

SEQ ID NO: 9785 - protein, 184 aa, Artificial Sequence; identical to SEQ ID NO: 9784
  Synthetic

SEQ ID NO: 9786 - protein, 181 aa, Artificial Sequence
  Synthetic
SEVEEILKRIEDLARTLLKLNEDSLRRNEEIIRTIKELNEKTLKENKEIIDRLRELLRRTRDKDTLEELLKKVEEELRRSNEEDKKLLETAARLVKRSNEEDKRLLEEAAKRVEELLDEARKRNLDERVLKEIEDLLREVADRSRKFNERSERLLREVEERSREVNDRSKKLMDTIAKEVK

SEQ ID NO: 9787 - protein, 181 aa, Artificial Sequence; identical to SEQ ID NO: 9786
  Synthetic

SEQ ID NO: 9788 - protein, 181 aa, Artificial Sequence
  Synthetic
SEVEKALERVKKLAEDLERLDKESLERVEKVIRDAERLDKTSREEVKKIADEADDLRRRAKDKDTLRKLLEDLKRRAEELNRKNEELLRRVAEAIRRISEDNRRLLEEVARRVEDLLREARERNVDEEVLRRIRRLLEEVRKKVEDSNRELKRRLDELEKRVRDSNKEIRELVKEVERKVN

SEQ ID NO: 9789 - protein, 181 aa, Artificial Sequence; identical to SEQ ID NO: 9788
  Synthetic

SEQ ID NO: 9790 - protein, 181 aa, Artificial Sequence
  Synthetic
SRLEEVLRRIRKLLRDNKETAKRVLEEIERLLREADKRNREALKEIEKRMREVEDKLRKARLPEDVVRELRRRITELLRRLEEITRRSRERVKEILERLKEVVERTERKIRKIERELSEIKREKDLEELRRRVKEVSDESRKLLEDLLDEARKVLEENRKLVEEILREAKKVIDEIEEKLR

SEQ ID NO: 9791 - protein, 181 aa, Artificial Sequence; identical to SEQ ID NO: 9790
  Synthetic

SEQ ID NO: 9792 - protein, 181 aa, Artificial Sequence
  Synthetic
SELEKVLREIRRLLDEARKRNEEFLRRIEELLRRNEEEVRRVLEKIERKVERVKRDLERRRVPEEVVRDAERRIDEIRRKIEEILERTKRDVERLLKELRDITRETERRVKELEDELSRVRREEKLERILRTARKVVEDNERLVREVLKKVKRVSDESRRLLEEIDREVDEVIKRLEERAK

SEQ ID NO: 9793 - protein, 181 aa, Artificial Sequence; identical to SEQ ID NO: 9792
  Synthetic

SEQ ID NO: 9794 - protein, 175 aa, Artificial Sequence
  Synthetic
SEAEEIRRRLEEISRRSVEHLRKVLEEIKRISERSKRHLDRVLEENKRRLEELRELLERGRDKRELLEDLKRVHDESRKVIEKNKEENDRALKRAKEVIDENRERNKRVLDEVRKGGLPEEVLRELEELLKESEERIKRIEEEIKKIIDKSREDIKRVLEEIERLNKKAADDLRK

SEQ ID NO: 9795 - protein, 175 aa, Artificial Sequence; identical to SEQ ID NO: 9794
  Synthetic

SEQ ID NO: 9796 - protein, 175 aa, Artificial Sequence
  Synthetic
DEVREVLEELKRISDDSIRHLEEVLRRLREIIERLKATNDDVLRELEEIIRTLLDLDRQGVDKEELKKALDDVLRRIEDIHRETKRRLDEVLKEAEEAADRNRERNERAVEKVRRGGLPKEALDTLERTVEESKKRIKEILDRVKELIDKAREDSKRSVEEVRRRIEKARRDLDR

SEQ ID NO: 9797 - protein, 175 aa, Artificial Sequence; identical to SEQ ID NO: 9796
  Synthetic

SEQ ID NO: 9798 - protein, 175 aa, Artificial Sequence
  Synthetic
SKVDELLKRLEDIIRKLDKENEKVLRELEEISKRSVDHLKRVLEENRRILEELERLLEGGTDKEELLRRLEEVHRRSRRMVEENKKRNDDVLRRVTEVHKETKDRLEKALKDVKDGGLEERVLRDLKRLVDEARRRSERSLEEVKRIADESRKEIERILREIEEENRRAKDKLRR

SEQ ID NO: 9799 - protein, 175 aa, Artificial Sequence; identical to SEQ ID NO: 9798
  Synthetic

SEQ ID NO: 9800 - protein, 175 aa, Artificial Sequence
  Synthetic
SRAEDLLRRLEKIIRDSLRHLREVLKRLERIIDELRKTNERVKEELERIIDTLRKLKDNGVDKRRLEDELRKVDERIKRIHKKTVEDLERVLKEVEDVARENKKRNDEVLKEVEDGGLPEEILRRARELVDESRRRLEKVVKEVRDVIRTLKKDSDKSLRDLEEEVRKAEEDLRK

SEQ ID NO: 9801 - protein, 175 aa, Artificial Sequence; identical to SEQ ID NO: 9800
  Synthetic

SEQ ID NO: 9802 - protein, 175 aa, Artificial Sequence
  Synthetic
DEVRELLDTLRRIIERSVKHLEDVLRDLKRIIDKLREDNRRVLEENRRRLEELDKLRKEGTDKEELKRRLDEVHKESRDIHRDTRRRLKEVLDRVKEVAKRNREENDKATDDVRKAGLPEEFLRDVERLAEESRRRLEAVEREVERLITEAEKESKKSLDEVERLNRELKERLKK

SEQ ID NO: 9803 - protein, 175 aa, Artificial Sequence; identical to SEQ ID NO: 9802
  Synthetic

SEQ ID NO: 9804 - protein, 183 aa, Artificial Sequence
  Synthetic
DVEDILRTIRDLIRRVDEKSRKTLEENRRAIEEVLRRSDETLRRNKKLIEDVEEEVRRTVKDEKLLREVKRRLEELLKENKEMADRTREKLERLLRENERVVKETKRTLKEILDRAEEAARVERREFMETVLRKIKEDIERLEERNREVHEKSREEIRKLEEENEEVHRKSRKEIDEIRKELK

SEQ ID NO: 9805 - protein, 183 aa, Artificial Sequence; identical to SEQ ID NO: 9804
  Synthetic

SEQ ID NO: 9806 - protein, 183 aa, Artificial Sequence
  Synthetic
DVEEILKEIRKRIEDVKRESEKTLKEIRDLIKKVAEDIERSVKENRELIDKVRRELERDVRDEDLLRRLKEKLDRLLKRSEEVAERLRRKLKRLAEEVERVAEDTKRKLEKLLDDAEKMSRMDDRKVLTDVLKEIERRIDELRRRNEEVVEKIKREIKKLEDESKRVNDESREIIKRIKEEVD

SEQ ID NO: 9807 - protein, 183 aa, Artificial Sequence; identical to SEQ ID NO: 9806
  Synthetic

SEQ ID NO: 9808 - protein, 183 aa, Artificial Sequence
  Synthetic
DVEEIIREIRKLIEKVLRDVRRSAEENKKLIDEVKRRVEEMLKRNRDMIKKVLDDVRREVRDERKLDEVRKELEELLKENERVAEKVDRRLRELLERSKRAIRELERKLEELLKKVEEAKKVERREFLKKVLDEIREIIERLRRESEKVNEDSKREIKDIERELREVHKKSRRIIRRIEEKLR

SEQ ID NO: 9809 - protein, 183 aa, Artificial Sequence; identical to SEQ ID NO: 9808
  Synthetic

SEQ ID NO: 9810 - protein, 183 aa, Artificial Sequence
  Synthetic
DEAREVLERLKKISEEDKRRSDKVNEETRRIIKEAEERSRKVNEETKRIIEKLEEDLRDRPKTKELLDELRDILRRAKERSDEVLKRLREILDRIRKRSEKVFKESREINEELRRRVEDVVRKGVISEEILRELREILRENTERVERSLRDNRRLLDELRKKVERSAEENERLLREAEEKLRK

SEQ ID NO: 9811 - protein, 183 aa, Artificial Sequence; identical to SEQ ID NO: 9810
  Synthetic

SEQ ID NO: 9812 - protein, 175 aa, Artificial Sequence
  Synthetic
SEVDKVLDDSRKSAEDLRREIETVLKRNKELIDENRKRLKEVLDRNAKLADDLRRERKKGTDEKMVEDVDRTSKKTIEDLKRESEKSLRDSEESIRRLRERARENIERNRKLVEDVRIEERVVRTLEKLIEEWRKAVEDVLRTLEKLTEEAKRESERILEELKRITKELRDEERR

SEQ ID NO: 9813 - protein, 175 aa, Artificial Sequence; identical to SEQ ID NO: 9812
  Synthetic

SEQ ID NO: 9814 - protein, 183 aa, Artificial Sequence
  Synthetic
SEVEDVLRRLEELLRRLEKKSRESLEELRRRLDEVRKDSERSNEDSERLIRELEEIRRKLEDEETVRRIVERVLEELERINRENHEKAKRVVEELEKIIEENHREAKRVTETLEELIKRLKERNPELKEFLDTMRRIVEELKKRLKEVNDRIKDIVRRAEEELKRSNDENKERIERAEKKVRD

SEQ ID NO: 9815 - protein, 183 aa, Artificial Sequence; identical to SEQ ID NO: 9814
  Synthetic

SEQ ID NO: 9816 - protein, 183 aa, Artificial Sequence
  Synthetic
SELEKVLEELKKLLEELERESDTSVKELRTLLERLEEESKESNERSKRLAEELERRLKDEKDEDTVDKIVRDVLTKLDKLNKDNEKRAREVLKRMDEIIKRNHKRARDVIKRLREIIDDVRRRNPEAREFLETMERIIEELEKRLREVNEDLKRIVRTVAERLKKSNRDNRELIRTLKDRVRT

SEQ ID NO: 9817 - protein, 183 aa, Artificial Sequence; identical to SEQ ID NO: 9816
  Synthetic

SEQ ID NO: 9818 - protein, 183 aa, Artificial Sequence
  Synthetic
SEVEDVLRRLEELLRRLKEKSKKSNEESKKLIKELKEESDKSRRDLERLLEKLDRDLKRLKDKETVKKIVDEAEKRLRRIIEENHRTAEEALRELKKINERNREMAEEVVKRLRELIDELRKRNPEVREVLERMRELVEKLKEDLERSNKENKDLIDKVKRDLEEVNRRLEKIVREVKERVRT

SEQ ID NO: 9819 - protein, 183 aa, Artificial Sequence; identical to SEQ ID NO: 9818
  Synthetic

SEQ ID NO: 9820 - protein, 183 aa, Artificial Sequence
  Synthetic
SEVEDVLRRLRELIEELRERSERSNEESKRLADELEKRSEESLRRLAELLRKLEEDLRRLEDKDTVDKIVEDVKRKLDKIIKDDHDTAREMEKRLEKINEENKREAERVLREAKRLIDELRKDNPEMREVLTTIAKIVTDLERELRKSNEENKKLIDELRKRLEDSNKRVKEIVKRLEEEVRR

SEQ ID NO: 9821 - protein, 183 aa, Artificial Sequence; identical to SEQ ID NO: 9820
  Synthetic

SEQ ID NO: 9822 - protein, 182 aa, Artificial Sequence
  Synthetic
KDVEEALKELERVLEELKRLSKELLDRLRELADRIRRISKELLEELKRLLKDIKETVDRIKDKDTLEEVVRRLVKELEDILRTHKRLVDDIIERLKKILEDHRRLVERAREELERLLKELEDRGVDEDVLRRLRELIEKVKRDLDRTDETLKELIKTLEDELRKSNETIEDLIRRLEEALRK

SEQ ID NO: 9823 - protein, 182 aa, Artificial Sequence; identical to SEQ ID NO: 9822
  Synthetic

SEQ ID NO: 9824 - protein, 182 aa, Artificial Sequence
  Synthetic
SDLERLLDELRKLLDDLRRKSEELLRRLDTLAKKIEREAEKITKDNKELIDRLRDRLRRIRDEDTLREVVKEAVKRLRESLRDHERLVDEIRRRLEKILEDHRDLKRRIEETAKKILDDLRRRGVEERMLRTLERLIEKLKEELKRTDKELERLIRELKKRLDDNNRRNEELIKRVEDELRK

SEQ ID NO: 9825 - protein, 182 aa, Artificial Sequence; identical to SEQ ID NO: 9824
  Synthetic

SEQ ID NO: 9826 - protein, 179 aa, Artificial Sequence
  Synthetic
SEAETVLEEMKEVSKRTEEKNKKVEDDDKRSIDELRKKLEKVLREDRRSIEDLERRLKENKGSDKVLRELKERLRRNKDRSEKVVEDLKRELDKNLEDSKKISEETKRENERALEKARRANVEEEVLRTIERLSRENKKKDEDTLRKSKEEHERVREELERVLETSRREHEKVKKRLED

SEQ ID NO: 9827 - protein, 179 aa, Artificial Sequence; identical to SEQ ID NO: 9826
  Synthetic

SEQ ID NO: 9828 - protein, 180 aa, Artificial Sequence
  Synthetic
RVEEMLERLRRLHEEVKRRIDEVLRELEEESKRNEERIRRVLERLRDEHRKLKETLDRRNADDDLRRTLEENRRKVEEIIRRLEELNERARKELKKIVDELRKKLEENLKRVEDVIREPVDEEELERLERKSRESIERLKDTLRELKERLKRISDRSDEKLREAEKRSRESIEEVKKRAK

SEQ ID NO: 9829 - protein, 180 aa, Artificial Sequence; identical to SEQ ID NO: 9828
  Synthetic

SEQ ID NO: 9830 - protein, 180 aa, Artificial Sequence
  Synthetic
EVEDVMREARKLHKELEDKIRDAARRIRETIDRVKKEDDDSLRKLRKLHEDLKRELEKRNVDRTLEEKLRRNLDEVEKASKESRRHLEELERDVERIIEALKETLRRNLKKVEDVVKKPVDRDELRKLLEDSKRSIEKVEDDLRKLEEKIKRVIDDNRRKNKELEEKSRKSIRDLEEEVR

SEQ ID NO: 9831 - protein, 180 aa, Artificial Sequence; identical to SEQ ID NO: 9830
  Synthetic

SEQ ID NO: 9832 - protein, 180 aa, Artificial Sequence
  Synthetic
EVEDVLRELRKEHDDLRKEITDVLRRLEKLHRELDEEDERSVKRIRELIEEVMRELRKRNAEERLEEELKRALEDVERVSKESKDHLRENLRRVEEIAKRLRDLLKENLKKVEEVLREPVDRKDLKALKEDSKRSIDDIRRKLEEARRRSERSIDENRKLNKRVIEKIREIIRRLEEKTK

SEQ ID NO: 9833 - protein, 180 aa, Artificial Sequence; identical to SEQ ID NO: 9832
  Synthetic

SEQ ID NO: 9834 - protein, 180 aa, Artificial Sequence
  Synthetic
EVEDVLREAERLHRTLLKEIRDALRRLRKLIEDVKRKDDESLKRLREKLERLKESLERNKVEEDLKRTLEKVREELERASERSKRHLEKVLRELEKIIKELEDRLRENLDRVRRVVDKPVDREELKKLLEDSKRSLDELRRRLKEVEDRVREAIKKNEDENRKLERRLDKIIEDLERRVK

SEQ ID NO: 9835 - protein, 180 aa, Artificial Sequence; identical to SEQ ID NO: 9834
  Synthetic

SEQ ID NO: 9836 - protein, 181 aa, Artificial Sequence
  Synthetic
SEAEKILKEIRDISDRTREELKKVKDEHKTLIDRLREILERALREHDRLAKELEDIKRKIDSEDLRREAERVLETLKRTSEELDEIVKKVERELEDTTRRMEESLRDMNRRLRELLDKLRKDGVPEEVLREISKIIKDNHDEVTEVLKESEELIRRLRKEVEDVRRTSEKLIRELEERVRE

SEQ ID NO: 9837 - protein, 181 aa, Artificial Sequence; identical to SEQ ID NO: 9836
  Synthetic

SEQ ID NO: 9838 - protein, 181 aa, Artificial Sequence
  Synthetic
SEVDDVLRRLEELIKTLEDINRKSLEDIKKLIDDLRKILEDALRKHEKLIRELREMKKRIDSREAEEIAKRVLEELKRTSDDLRKKVERVDEDLRRLLRENHERNKKILRDLERLLRDAARRGVPKEFLDRMREEIRRLEEESRKSDETIERLIRELRRRVEEVLKTSTDLIRELEEEVKK

SEQ ID NO: 9839 - protein, 181 aa, Artificial Sequence; identical to SEQ ID NO: 9838
  Synthetic

SEQ ID NO: 9840 - protein, 182 aa, Artificial Sequence
  Synthetic
SSVERVLEAVKELAKKLAEDIRRSLEHIRRLLEEVEKKHRDSKEHVRKLLKDLRDIAREKGAGEELVRDADRLAEEIKKYHDENVDRIRRAVEELAEAHKRLLEEAEKLVRTIEDRLRKVGSDDKELKKILDELRKLIRKVLEALRELNKRAKEILDRVAENVKEVNERLERLVRRIAEEIR

SEQ ID NO: 9841 - protein, 182 aa, Artificial Sequence; identical to SEQ ID NO: 9840
  Synthetic

SEQ ID NO: 9842 - protein, 182 aa, Artificial Sequence
  Synthetic
SSVERVKEEVEKLLEKLEREIRKSLKTIRELLRELKRKHEESKEHVRRLLEKAEREARRRGVDERLVRELRKLVEDIERYHDDNLRRAEEVVRKVEEDHRRLLEDARKLVEEIKRRLEEVRSDDKKLEEILRRAKELIDRVLEELKKLNEELRRIIEEIVRNVKRVNEKLEKLLRDIKRRID

SEQ ID NO: 9843 - protein, 182 aa, Artificial Sequence; identical to SEQ ID NO: 9842
  Synthetic

SEQ ID NO: 9844 - protein, 182 aa, Artificial Sequence
  Synthetic
SSVEEVLRRVKELLKTLKKKHEDSKRTVKELLDDLRKKHEDSKRHVRKLLEELEKRARERGVDKRLVDELRELMKRIEEYHDRNLKRVEDLIKEIERYHDRNLAELEKLARRIEERLKTVRSDDKELKRILEEVKELVKRVLENVERVNREVRERLKEVSRNVERVNKEAKELVDEVEERAR

SEQ ID NO: 9845 - protein, 182 aa, Artificial Sequence; identical to SEQ ID NO: 9844
  Synthetic

SEQ ID NO: 9846 - protein, 182 aa, Artificial Sequence
  Synthetic
SSVEEVRKRVRDLIKRYREEVEKIKKDVRRLLDELREEVKRSLDHVRKLMEELRRKIKRDGVDRRLVEEADELVKTIEDRHEKVKRTAEKLVEDVEREHDELKRKVEELVKEIERRLEEVRSDDKELKRILDELKERLERAKRENEDSVRKLRKLIEEILREIRRLNKEAEDLIREIEERAR

SEQ ID NO: 9847 - protein, 182 aa, Artificial Sequence; identical to SEQ ID NO: 9846
  Synthetic

SEQ ID NO: 9848 - protein, 182 aa, Artificial Sequence
  Synthetic
KDVEEVLTRVRELLRRVEEEIRRSEEHIRRLLEELRRKHEESKDSIRKLLEDLEEKVRRRGADERLLREAKRLVEEVERYHEKNLRDAEEMVRRVEEKHRRLLEEIRRLAKRIVDDLRRVRSDRKDLEEILREVEKLVEEVERRLRKLNEELKEILRTIVENVERVNRRLEELIRDIKRRVK

SEQ ID NO: 9849 - protein, 182 aa, Artificial Sequence; identical to SEQ ID NO: 9848
  Synthetic

SEQ ID NO: 9850 - protein, 175 aa, Artificial Sequence
  Synthetic
SEVEKIVEEVKKIVEEVERLHRKLLEDLRRVVEEVEDRSRRINEEAKKIVEDLKRRGNEDEDTVRKILEDAERVLDRLRKEHERLLRELEEVLRRLHEESKKIIRRLDRVLEEVRRAGVDEEVLKEIEDRLERLRRRAEEVNDTARKIVREVEESLKRSVESLKKLVDELRETLR

SEQ ID NO: 9851 - protein, 175 aa, Artificial Sequence; identical to SEQ ID NO: 9850
  Synthetic

SEQ ID NO: 9852 - protein, 175 aa, Artificial Sequence
  Synthetic
DEVERLLEEAKKIVEEMKRLHEEILREVEEIVRELDEKHDKLLRDAEEIVKELKKEGNEDKRTVEEILRRLEKVLKELREEIEKINREIKKVVEEARKKSEDIIRRADKVLEDLDRAGVREEMRRRLEKLVRDLREKSREVNERIDKLLEELHEKSERVKKTIDDLVEEVKDTLT

SEQ ID NO: 9853 - protein, 175 aa, Artificial Sequence; identical to SEQ ID NO: 9852
  Synthetic

SEQ ID NO: 9854 - protein, 175 aa, Artificial Sequence
  Synthetic
KEVEDILREVKKIVDELLRRHRELLERARRIIKRLKEEHDRLLKELEEIVRDLTRKGNEDEDTVREISKRAKEVIERLETESRKLIRTIDEVLKELHKESRKIIKELEEVVKRVREAGVSEEILRRIEELLKRLRDDAKRVNDELKRLVEELRKRSKEVNDELRRLLKELEDRLR

SEQ ID NO: 9855 - protein, 175 aa, Artificial Sequence; identical to SEQ ID NO: 9854
  Synthetic

SEQ ID NO: 9856 - protein, 175 aa, Artificial Sequence
  Synthetic
SEVEEILKEVERRVDELTRRHEELLRKADEIVKDIRRKLEEINKRLKDIADDVRRKGNEDERTVRELLEELREAVKRARELHKRLLEEVKEVLERLREESKKIIEELRRVLEKVRRAGVDEEILRRIETLLEELERRSKRVNDELEKLVRELKEELERSKRSIDEILKKVSKDLK

SEQ ID NO: 9857 - protein, 175 aa, Artificial Sequence; identical to SEQ ID NO: 9856
  Synthetic

SEQ ID NO: 9858 - protein, 175 aa, Artificial Sequence
  Synthetic
DEVERLLEDLREKVKRLVKKHEDILREVEKEVRRILRTSEEINREAEEIIRELDKRGNEDEETVRRILRTIEEVLKELEKRHRDLLKELEEVAKRVKEKSDELIKTIDRVIEKLRRDGVDEDVLRDVDRLLRELREKSKEVNKRIKELLDKLKTDLERSKEHLERLVKTLKDKLR

SEQ ID NO: 9859 - protein, 175 aa, Artificial Sequence; identical to SEQ ID NO: 9858
  Synthetic

SEQ ID NO: 9860 - protein, 175 aa, Artificial Sequence
  Synthetic
DEVEDLVRKLKKRVDDLLAEHKRLLDEAEKIVREVLKKSRESNERNKKVSKEVRERGNEDKDTVKRLTDELEKVMRDNKETHDRLARELEEAVKRLKEESEKIKRDLDRVLEKIRRDGVSEEVLKTLDRLVEELRKASEDVNRELDKLLKDLEKKLRDSIRHLEENHKDVRRALE

SEQ ID NO: 9861 - protein, 175 aa, Artificial Sequence; identical to SEQ ID NO: 9860
  Synthetic

SEQ ID NO: 9862 - protein, 178 aa, Artificial Sequence
  Synthetic
DEVEKVLKEIRKRVEDSLRHLEKVNKEAREIVEKVREELRESNERLREIVKTIRDRLEKLKGNDEMLKRLKDELDEALRRHREILDRLRRELDKVRRRLEELHRENKEDNRRVLKKAEEDGVEEDVRRTVEELVRRSEKAIEDSRRSIEDLVRRLKEDIERSLRSVEKLVEELTEAIR

SEQ ID NO: 9863 - protein, 178 aa, Artificial Sequence; identical to SEQ ID NO: 9862
  Synthetic

SEQ ID NO: 9864 - protein, 178 aa, Artificial Sequence
  Synthetic
SEVEKVLEELRRIVTKSARHLDESNERLKEIIRRLDEKNKEALKRAEDIIRDIDDKLKKLKGDKRVLDELARRIEEVLRRLRRIVEESRKELDEALKEHDRALRENERENREALRDAEEKGVDKKVKDEVKKLIDDSREKIKRSRESVKRLVEEHRRRSEEVRKTLEKLAREITERIR

SEQ ID NO: 9865 - protein, 178 aa, Artificial Sequence; identical to SEQ ID NO: 9864
  Synthetic

SEQ ID NO: 9866 - protein, 177 aa, Artificial Sequence
  Synthetic
DELEEVADEVRKIIEDLERRLREVVKTSEKLNKENRRRTEDVEKEVEKILRELEEKLRGDEKVRKIIEDLRRELKKAKDESEKSNREIRETTRRLEEEVKKIEDELRKILEEAKDIRADEDIRKVLKELREIIKEVEDMLKEVLDRNRKLIEDNLRRLKEVLDRLRKKVREIEEEAR

SEQ ID NO: 9867 - protein, 177 aa, Artificial Sequence; identical to SEQ ID NO: 9866
  Synthetic

SEQ ID NO: 9868 - protein, 177 aa, Artificial Sequence
  Synthetic
SEIEEAEERVRRLIERNKRETDRVAEEVKRINDENRRATEKVKRDVKRILDDLRRKLEGLDEVREILDRIRRRLEKLERDSKKSNEELERRLKKAIDRSRKTDEDLKEILKKAKDLEKDKLLRDVLRDLERLVRKNLEELKRVLDELKRLMEDNLRRLEKVLEELERLVREIVERAR

SEQ ID NO: 9869 - protein, 177 aa, Artificial Sequence; identical to SEQ ID NO: 9868
  Synthetic

SEQ ID NO: 9870 - protein, 177 aa, Artificial Sequence
  Synthetic
EELERVAKKVRDINRRNKEETKRVEDEVRRLIKENEDTSREVVRRNEEILKDLERKLGGLDEVRKILKELEEETRRLLKRSEDSNRRLEELLRRAKKESEDTNKRLEEILKEAERLEKRDVVREVLERLKELVKRNLDKLKRVLDEIRRLIEENLDELRRAHEEHRRIAEDIRRKAK

SEQ ID NO: 9871 - protein, 177 aa, Artificial Sequence; identical to SEQ ID NO: 9870
  Synthetic

SEQ ID NO: 9872 - protein, 177 aa, Artificial Sequence
  Synthetic
ESLERVKEEVKKILEKNRRTSEEVARRVKELIDRNREKSKDVARKNEKILEDLERKLRGDKDVKKILDELEKRTRDLLRDSERSNEELRDLLRKLLEESKRTNDEIKKILDEMDKLRSEEEVERVLRRLRELVRENEKRLKEVLDEIRRLIRENEEKLEKAHREHKKLAEEVERRKR

SEQ ID NO: 9873 - protein, 177 aa, Artificial Sequence; identical to SEQ ID NO: 9872
  Synthetic

SEQ ID NO: 9874 - protein, 181 aa, Artificial Sequence
  Synthetic
DDVERVLKEVRELVERANEEIRKVLERDRKSNEDANRKIREVLRRVEELVDRIDKIRRELSDKKTVRETVEDILRRIEELLKELKRISDETLKRNEDSARELRERSERTLRRIEDLLRELKKRKASDEVVKKIKELLDRHRKTTEEVLERIRRSLEKHRRDSEEVMKELRRLVKELEDRTR

SEQ ID NO: 9875 - protein, 181 aa, Artificial Sequence; identical to SEQ ID NO: 9874
  Synthetic

SEQ ID NO: 9876 - protein, 181 aa, Artificial Sequence
  Synthetic
DEVRELLRTIEELVRDANRKIKEVLDRDRESNDRANKTLEEILKRDKRSNEDVEEKLKKLTDKSKVKEIVDRVRKENEDSLRKLEETSRKTLEDNKESLKELKKLSEKTRREIERLIDEARKRNVDKKVEKKIRDLLKKHEEDSRKALEDIKRSLERHRERSEEVLKRIRDSLRELDKKTK

SEQ ID NO: 9877 - protein, 181 aa, Artificial Sequence; identical to SEQ ID NO: 9876
  Synthetic

SEQ ID NO: 9878 - protein, 181 aa, Artificial Sequence
  Synthetic
DSVEEILKRVKELVDKANEKIKEVEERVRRSDEELKKILEEILREIEKLVREVEEIARRLSDKETVRERVERIEKRLRELADTIRRIVERVLRENERLLRELKKLSDKTLEDIKRLLDKADKDKVSDEVKKKIKDLLEKHERDSRKVLRKLEESSKETEDRAKEVLERIEKLLEDLRRETK

SEQ ID NO: 9879 - protein, 181 aa, Artificial Sequence; identical to SEQ ID NO: 9878
  Synthetic

SEQ ID NO: 9880 - protein, 178 aa, Artificial Sequence
  Synthetic
KDAEELLKRVRDLLKRSLESLEKILRDSKELADRWRKKLEDLLRESEELVDRAEKILRRGDNDKRVLDKIAEEVRRTNDDSRRLDEELHRLSRDTLRKLEENLRRTEKEVREMDKRAAERGVDERVREELKKLLTRVEEEHRKVLETDKKLLKELHKESKEVNDRDRELLERLEESVR

SEQ ID NO: 9881 - protein, 178 aa, Artificial Sequence; identical to SEQ ID NO: 9880
  Synthetic

SEQ ID NO: 9882 - protein, 178 aa, Artificial Sequence
  Synthetic
KDAERLLRELKKLLEESLKSLKELTDRIRDEVRRVKKRLRDLLRESEELVKRAEDILRRGDNDKRVLDELRKEVERTNRKSEDILREAKELIEKVERELERNLEETEKLIKRIREEMKRRGVREEVEETAKKLLDEVRRAHEEVLKEIRELLRDLERTVREVNEEDKKLLRKLEEDVR

SEQ ID NO: 9883 - protein, 178 aa, Artificial Sequence; identical to SEQ ID NO: 9882
  Synthetic

SEQ ID NO: 9884 - protein, 174 aa, Artificial Sequence
  Synthetic
SEAEKVRKDLKDIADDLHRVSERVLREDERLLKRLHDVSRDVRERDREIVEDLRRGGISKTLLKEVERLSEESKRKLDKLNEEVRRLSEESRKRLKDLNDELREIVRRVKETVDSGDDREEVLDRARKEVDEIKKKHKKVLDESRKLVAEAERKHEEILKESEDLAREIKERER

SEQ ID NO: 9885 - protein, 174 aa, Artificial Sequence; identical to SEQ ID NO: 9884
  Synthetic

SEQ ID NO: 9886 - protein, 174 aa, Artificial Sequence
  Synthetic
SRAEKVREDLDRIEEDLRRVHREVLKEVERILKELHDTSKRVRDEVEKIVRDLRRAGIPKDLLKRAEDLIKEIKDKLDRLNERAEEIFRDIRRYIEENEERSKRLVDEVRKRVDDGDDREKVLEDARKLVRESKENIRRVLEDLKRIVKKLKEDHKRILDELKKLVDKIKEDAR

SEQ ID NO: 9887 - protein, 174 aa, Artificial Sequence; identical to SEQ ID NO: 9886
  Synthetic

SEQ ID NO: 9888 - protein, 174 aa, Artificial Sequence
  Synthetic
SRAERVREEIDKILEDLHRVSERIKRELTKLMEDLERTHERIKKAIREILADLRRRGVPKSLLKKAEDLVKRVEDYVRKNLEDSRDDIRKVREEVEELNKRAEDLVREVKKIVDSGDDREEVLKEAKKLVDDLKEKHKEVLTRVERLVEESKKNLKRVLDELRDLVRRVKEEAK

SEQ ID NO: 9889 - protein, 174 aa, Artificial Sequence; identical to SEQ ID NO: 9888
  Synthetic

SEQ ID NO: 9890 - protein, 174 aa, Artificial Sequence
  Synthetic
SEAERVREELDKIVEDLHRTSEDVKRRDEELLKDLERRHKEVKEEDEKILKDLRDSGIPKDLLREITKLSRDSKKYLEENLRRSRKLSRDSKEKLEELNRRARDVIRRVRETVDSGDDRERVLEELRKTVTEMKKRHRDILRESEELARESKENVDRVLEESRRRAEEIKRRAK

SEQ ID NO: 9891 - protein, 174 aa, Artificial Sequence; identical to SEQ ID NO: 9890
  Synthetic

SEQ ID NO: 9892 - protein, 174 aa, Artificial Sequence
  Synthetic
DERERVKEELDKLLRDLERVHDKVREDDKRLLDDLRRVHEKARRDDKRILDELKRAGIPEDLLREVEKLSRESKRYLDENLRRSEELSERSRKYLDDNLERSRRLMEDVKRKVESGDDREEVLERAKELVKRSKENVERVLRDSERLAKESKENVRRVLEESKRRVEEIEERAR

SEQ ID NO: 9893 - protein, 174 aa, Artificial Sequence; identical to SEQ ID NO: 9892
  Synthetic

SEQ ID NO: 9894 - protein, 174 aa, Artificial Sequence
  Synthetic
SEAERVREELKRILEDLERVHREVEEAIERIVEELEDVHRRARERVERILRELERRGIPKDLLERARKLIEDIKRYLDENLKESRRLAEDVKRKIRENLKRSREIVERVIRIVDSGDDREEVLKEIEKMVKESRDTVRRILEELRELVERSKRNVEKVLRDLERAVEKIERDAK

SEQ ID NO: 9895 - protein, 174 aa, Artificial Sequence; identical to SEQ ID NO: 9894
  Synthetic

SEQ ID NO: 9896 - protein, 174 aa, Artificial Sequence
  Synthetic
KEAEDARRRVDEILEELRKLHDEVRKTDKELLDDLEREHERVKREDDKILDTLRRQGIPKSLLEEIKRLSEDSKRYLEENRKESRRLSEESKRKLDENLERSERLAKEIRERIDSGDDREKVLEDLERLVETSRKTVRDILEESKELVKRSKENVRRVLERSKELVKRVSERAK

SEQ ID NO: 9897 - protein, 174 aa, Artificial Sequence; identical to SEQ ID NO: 9896
  Synthetic

SEQ ID NO: 9898 - protein, 184 aa, Artificial Sequence
  Synthetic
SDVDEARKTVKKILDESEETLERVRRELERILRDSERTLKRVEERVRRILRDLERELRKLPEDDKLKELERRVREATKDVERMLDEDRKRNDKARRELKKVLDENRRKNKKVMDDAEKILRETTDREEIDKVLKEIRERVERSKKHLEDVLDRLRKIIEESKRHVEKVLEKLEKIVKELKDELK

SEQ ID NO: 9899 - protein, 184 aa, Artificial Sequence; identical to SEQ ID NO: 9898
  Synthetic

SEQ ID NO: 9900 - protein, 184 aa, Artificial Sequence
  Synthetic
KDIEEVEKRVREILEDSRRMSKKDEESTRRILEESRRVSEEDKKSTEEILKELKDELRKLPERDKLERLRREIEKVVEENRDVNRRDNRRNEEAIRENKELNKEDNDDNEKVLEDAKRILDETTDRDTIKKMLEEIKRRVDESKRHLRESNKRIRDIAEESKKHLEDSNKKVRDRADELKKRLK

SEQ ID NO: 9901 - protein, 184 aa, Artificial Sequence; identical to SEQ ID NO: 9900
  Synthetic

SEQ ID NO: 9902 - protein, 184 aa, Artificial Sequence
  Synthetic
SDLERVKKAVEDILRDSERTLRRARERLKRLLEELRRTSEEDKKSTDEILERLKRELEKLPPDRKLERLDDLIRRLVKRNKEINDRVNEVVERMMREAEDRLRRDKERNDRVVREAEEIIRRVTDRDELRKLLEEIRRRAEESKRHIEEVLKRLEEIVKRLKEELKRSNDEIREIVRRLEEELK

SEQ ID NO: 9903 - protein, 184 aa, Artificial Sequence; identical to SEQ ID NO: 9902
  Synthetic

SEQ ID NO: 9904 - protein, 180 aa, Artificial Sequence
  Synthetic
STLEEMEKEVEKLNRDSRRTLREVAERVEELNRDNERTSKRVEDAVRELNKRLRDEVRRREVEKVIKESRDSLERLKERSKRSNEESKRTLDELKKKVEDVNKRSKESLDRLREAVKNKAPEEELRKVLKENEELARELKKELERALEENRRLHEENKEDLRRVLEENERLHRKLRKDAK

SEQ ID NO: 9905 - protein, 180 aa, Artificial Sequence; identical to SEQ ID NO: 9904
  Synthetic

SEQ ID NO: 9906 - protein, 180 aa, Artificial Sequence
  Synthetic
DTLERVAEAIRRLNEDLKRTLEKVERAVREILKRLAETLKRAEEEVRRLNRDLERKVRRDEVEEVIRRSRESLRRLKEEVKRALDRIKRLLDELKKRVREVNERSKRSLEDLKRLVENNASEEEIKKVLDDNKKLAEDLKRELKRVLEEIRKLVKELEDIVREVLKTNKELHERLKRRAD

SEQ ID NO: 9907 - protein, 180 aa, Artificial Sequence; identical to SEQ ID NO: 9906
  Synthetic

SEQ ID NO: 9908 - protein, 180 aa, Artificial Sequence
  Synthetic
DTLERAAEEVKKLNEDNKRTSKRVEDEVRRLNRENEEMSKRVKDTVKKILDDLRRKVDRDEVDEVLRRIEELLERLERESEKSNERSRETLRRLKRRSEESNKRLEELLRELDKLVKDNADEKEIERVLRELERIARENKKELEKVLRENRELHERNKKLLEKVLRDIKRLAKTLRDRTR

SEQ ID NO: 9909 - protein, 180 aa, Artificial Sequence; identical to SEQ ID NO: 9908
  Synthetic

SEQ ID NO: 9910 - protein, 180 aa, Artificial Sequence
  Synthetic
RELEEARERVKRLNEENKEFSRRVAEEVKKLNEENERTSKKVEDEVRKLNEDLRKKVDRRDVKRAIERSKELLKRLKEKSEESNKTSEKTLRDLERKSRESNKELKRLLEELEELVKNNADEETIKRVLEELTRIMDRNRKDLRRVLEENKKLHDENRKELKRVLDENRRLHEEVKKRAK

SEQ ID NO: 9911 - protein, 180 aa, Artificial Sequence; identical to SEQ ID NO: 9910
  Synthetic

SEQ ID NO: 9912 - protein, 180 aa, Artificial Sequence
  Synthetic
SELERVKTEVEKLNRRNREATERVKEEVKKLDEENKKSSKRVEDEVRKILDELRKKVDRDRVEKALREIEKLLEDLKRTSDKSNRESEELLKELEERSKRSNDTTKKLLEELEELVKNNADREELERMLKRLKEIIERNEERLKEVLDRIRELIERNKELLRRVLKRIRDLVKELKERAD

SEQ ID NO: 9913 - protein, 180 aa, Artificial Sequence; identical to SEQ ID NO: 9912
  Synthetic

SEQ ID NO: 9914 - protein, 180 aa, Artificial Sequence
  Synthetic
RELEEVERRVRELNEDNRRKTEEVKREVKRIDDDNRRASERAAREVKKLNKDLKDKVDDDEVDRVIEESRRLLRELEDKSKRSNDTSKRLLEELEKRSKDSNRRTKELLERLKELVDRNADEKTLEDMLRRLKEIIKRNKDELEKVLRDIKKLVDDNKRDLERVLRRNEELHRELLERAR

SEQ ID NO: 9915 - protein, 180 aa, Artificial Sequence; identical to SEQ ID NO: 9914
  Synthetic

SEQ ID NO: 9916 - protein, 180 aa, Artificial Sequence
  Synthetic
DELERAKEEIERLNDELKKSLEEVEKEVEKLDDDNRRTSRRVSEEVKRLNKELEDEVRRDDVERAIRESEELLRRLEESSERSNEESRRLLKELAKTVREVSKTSKKSLEELEKLVRDNADRDTIRKVLKENEDLIRKLEEILKKVLDEIRRLIEDNKRELEDMLRKNKELHDRLRERAR

SEQ ID NO: 9917 - protein, 180 aa, Artificial Sequence; identical to SEQ ID NO: 9916
  Synthetic

SEQ ID NO: 9918 - protein, 180 aa, Artificial Sequence
  Synthetic
SELEEVKKEVEKLDERNKRLSKRVEEEVRKLNEENKRATERIKREVEKILEDLRRKVRRDDVDRVLDTIRRLLKRIEEESRKSNKETRKLLEELKEDSKRSNEETKKLLEDLEKLVKDKADREELKRMLDRLRRIIEENERKLKEVLDRLRDIIRKNKEDLKRALERIKKLVEDLKRRAT

SEQ ID NO: 9919 - protein, 180 aa, Artificial Sequence; identical to SEQ ID NO: 9918
  Synthetic

SEQ ID NO: 9920 - protein, 185 aa, Artificial Sequence
  Synthetic
SDLERVLDEIRRLAKEVKDTLRRMLEKNEELSKRDEDKTREMLKEIERLVKELEEIADKLSDEKTVREIVRRIEEDIKRLLEEVKEKNERSIRKSKKTLDDAKRIVDKILEEIRRLLEELRKRVKDDDRLRKAEEEIKEIERDLKRTLDEVAKEVKRTIDRNRETSKRAAREVEKLLEKLREKTR

SEQ ID NO: 9921 - protein, 185 aa, Artificial Sequence; identical to SEQ ID NO: 9920
  Synthetic

SEQ ID NO: 9922 - protein, 185 aa, Artificial Sequence
  Synthetic
SDLERMLREIRKLVEDDKRRTREMLRDNERLSREDKKKTDDVLRRLEELVRRLEEILKKLKDKDTVRKIVKEIIEELEKILKELEDTNRKSIEDSRRTLREVREINKDSIKKLEDLLKEVAERVDDDKRLDDIRRAIEEIIRDLRRASKKASEDVERTIERNERTSEEAKRRIEELIERLRRTDK

SEQ ID NO: 9923 - protein, 185 aa, Artificial Sequence; identical to SEQ ID NO: 9922
  Synthetic

SEQ ID NO: 9924 - protein, 185 aa, Artificial Sequence
  Synthetic
SDLEEALKRVEKLVRDDKEKTKRMLERNRELVKRNKEKNKRMLDEIRRLVEELEDILRRDKDRDTVRRIVEDIKRRIKKLLDDIRETNERSIRESEETLKRVEDLNRESLRTIEELLREIKERVEDDKRLKEVEDAVREILKDLKRTSERAKEEIERTIRDNERVVRRLEEEARKILEDLERRDK

SEQ ID NO: 9925 - protein, 185 aa, Artificial Sequence; identical to SEQ ID NO: 9924
  Synthetic

SEQ ID NO: 9926 - protein, 182 aa, Artificial Sequence
  Synthetic
SRIEELLKTVEKLVDEVKKALRKLLEENKDLARKSKESLERLLDEVRDLVRRLEEILDRGDNDERVLREIEKRVKDAKDRVRDNLREVHRLDEESKRRLEDLLRRVKELAEDVKKKLKDDVDDKDKLERVMRTLDEILKDLERTVERVKRALDESNRDLRREHERIKKELDKILDRLREKAR

SEQ ID NO: 9927 - protein, 182 aa, Artificial Sequence; identical to SEQ ID NO: 9926
  Synthetic

SEQ ID NO: 9928 - protein, 178 aa, Artificial Sequence
  Synthetic
SEVERLKEELDKLHKENREVLEDSKRSLDKILDDVRKLAEDVKKRLDDILKELRDRGVPEEALKEAEKVITDLKRRIDELLDRVRKIVEELKRRHDRLLEEHKRIIDDIKDKLEKNKTDRDLLRRLLREAERVSEETKKESKKLNDEIRKVLERLRDELRKIEDEIRKVVRRIRERAN

SEQ ID NO: 9929 - protein, 178 aa, Artificial Sequence; identical to SEQ ID NO: 9928
  Synthetic

SEQ ID NO: 9930 - protein, 178 aa, Artificial Sequence
  Synthetic
DEVETLKKRLDKLHEDNKRDLERSKRSLEELLKELEEVVRRSEKTLDELLKKVEDQGAPRELLEELKRIMDELKRKHRELLKRAKEMLEEVKRRHDRLLEEHKEIVERIKREVERNKDDRKLLKELEDTIRKVSDDTRRKSEELNEELKTVAEEIKKRSRELNEEAKDVLEKVERRTT

SEQ ID NO: 9931 - protein, 178 aa, Artificial Sequence; identical to SEQ ID NO: 9930
  Synthetic

SEQ ID NO: 9932 - protein, 178 aa, Artificial Sequence
  Synthetic
DEVERAKEKLDKILEDLRDVVRRSKENLDRLHEENRETLERSKKNLDRLLEKVKKDGVPEELLKELERIIRDLKRKHRKLLEDHRKIIEELKREHDRLLKEAEEIVRRIKDELEKRKDDRRDIERILRELEKVLKKLTDESERLNREVERVSRDTKKKSKELNEELKRVLDEVKRKAD

SEQ ID NO: 9933 - protein, 178 aa, Artificial Sequence; identical to SEQ ID NO: 9932
  Synthetic

SEQ ID NO: 9934 - protein, 182 aa, Artificial Sequence
  Synthetic
DEVREVLRELKKVVDDSKRDLDRVLREAERVVKESKDDIKRLLEETERVARDVERKIRENKGNKEVVDRIRKEVKEVHERSERILKRNEEKNRTVLKKAEDMIERNLRENKKVADKIKRVVEELKIDETLDKEVKRLLKESKRAADELRERIKRLIEESKRLLDTVRREDKKILEKIERDLK

SEQ ID NO: 9935 - protein, 182 aa, Artificial Sequence; identical to SEQ ID NO: 9934
  Synthetic

SEQ ID NO: 9936 - protein, 183 aa, Artificial Sequence
  Synthetic
DEIEKILEDLRRISEDTKRKHEEILRELEEILRELEERHRRILREVEEVARRLEERLNEDKRVVEELKKEAEEAIDEVRKRSRRINEELKRVLEEVRRKSEELNKRTEKVVRDVKRKIEETVTDEEKVKEVEREIRRLLKENEDASREVERLIEELKRRLDKISEDVERVLKKILERIDRATK

SEQ ID NO: 9937 - protein, 183 aa, Artificial Sequence; identical to SEQ ID NO: 9936
  Synthetic

SEQ ID NO: 9938 - protein, 177 aa, Artificial Sequence
  Synthetic
RSVEEAEKVLEELKRRNERLNEEHRREVEKVREKNERLNKRHREDVERIKRELDKEPVPEEVKRKLEEAIKKLERIDEESEEETKRVIDRLREMDEDTRRKTEKAIRELRKFLEDTTDDETIKDVLRKIKKISDETRKTLEDTLRELREISEKTRRRLDESLKELEEILRRLKEETR

SEQ ID NO: 9939 - protein, 177 aa, Artificial Sequence; identical to SEQ ID NO: 9938
  Synthetic

SEQ ID NO: 9940 - protein, 177 aa, Artificial Sequence
  Synthetic
REAEEIRKEVEKLLRDLKRALDEHRETSRRLVEELKDILRKNREEVERLVREIREVIKRVKDREVVEEVKKRLEDLVRDIEKVLRDTERIIEKLKEDSEDVLRRLDKIAKDIERDVERREPTRELIEEITRIVEKAKKELREVSKRLREIVKKIKEDNDRSNKRLREIAKEIKDRLT

SEQ ID NO: 9941 - protein, 177 aa, Artificial Sequence; identical to SEQ ID NO: 9940
  Synthetic

SEQ ID NO: 9942 - protein, 177 aa, Artificial Sequence
  Synthetic
SEREEARERVKDLSRKLKEINERSEKHLRDLAKENRDANRRTREEVERLLDKIRKVIKDVKDREVVEKVRELVERLREEVERVNEKSERILREVEKRVRDVLDETRKIVRKMEEEVERREPTEELIRELEKIVRDAEKKNRDVNREVRKILEDSKRELEKVLRDLERKVREIEKELK

SEQ ID NO: 9943 - protein, 177 aa, Artificial Sequence; identical to SEQ ID NO: 9942
  Synthetic

SEQ ID NO: 9944 - protein, 178 aa, Artificial Sequence
  Synthetic
RELEEVLKKLKEDAERLKRILEEATRELEKILERLHRLNEKSTEELRRIVKDLKEELKRRGRDEEVDKKVKDIIRELEKKSTKNLEDSRRIAEELRKTSRETVERVRKDLEELRKRVEELTRSEEVEKTVRKLEEDLKRAIEKHEEDSRRLVKRLKESNDEHEKESRRLVRELEKEIE

SEQ ID NO: 9945 - protein, 178 aa, Artificial Sequence; identical to SEQ ID NO: 9944
  Synthetic

SEQ ID NO: 9946 - protein, 185 aa, Artificial Sequence
  Synthetic
DEVREVIKTVRKLLEDLHRTNREVIERVKRTSEETHRKNEDMLRRLRKLVEDLKETLDRLEDKDTLRRIAEEIEKRIRKLLEEAEKINREALEEHKDLLRKLEEENKRILEELKRLLDKLRKDVEDEKSLRDAEREVKKLLEELKRSLDKLREDVERLLRENKESLDRLREEVKKIERELREKTR

SEQ ID NO: 9947 - protein, 185 aa, Artificial Sequence; identical to SEQ ID NO: 9946
  Synthetic

SEQ ID NO: 9948 - protein, 185 aa, Artificial Sequence
  Synthetic
SDVDRVLEELRKLVEELHRRNRKIIEDLRRASEKTHRKNRDLLEKAKKLADELREIAERLEDREKLREIAREILERLKKLLEDVAKTNTDALREHEEALRRLKEENDDIKEKIKRLVDRVRERIKDKDELRRLEEAAKKILDDLEDSLRKLEEAVKDLKRKNKKSLDDLAEAAKDILRRLAETAR

SEQ ID NO: 9949 - protein, 185 aa, Artificial Sequence; identical to SEQ ID NO: 9948
  Synthetic

SEQ ID NO: 9950 - protein, 185 aa, Artificial Sequence
  Synthetic
DEAEEVIKTVKRLLDELHRRNEEAIKEDRRLVEELHRTNEKVLREVEELVKRLAEILRRLKDKDTVRKIVEDIKRELDRLLDELRKTNEEIRKRSDDLNRKINRENEEILRRLDDLLRDLEAKIRDKETLDRLRERAEELKRRLEKSLRDLNRDNERTKRELRESLRKLEETARRLKEEIDRRTK

SEQ ID NO: 9951 - protein, 185 aa, Artificial Sequence; identical to SEQ ID NO: 9950
  Synthetic

SEQ ID NO: 9952 - protein, 184 aa, Artificial Sequence
  Synthetic
DEADDLIRRVRELVKRVKEALEDLLRRNKDVLRKVKEELEKITRRNRDKVRRVEEELKRIKDRETLRRLVEKVKRELDESHKEVERLIEKVNEISKKTLRDVEKLVTEVKKRLDDIKDELDKRVKSRKLEELRKEVEKLKEELDRVLEEARKEVEKSNRELKEVLERHAEDNERIKRRLDEARR

SEQ ID NO: 9953 - protein, 184 aa, Artificial Sequence; identical to SEQ ID NO: 9952
  Synthetic

SEQ ID NO: 9954 - protein, 185 aa, Artificial Sequence
  Synthetic
SELERLLDEVDRIVREIEERLRDILRKNRELSEDSERKLRELLREVRDLVRRIMDELRRTKERDVIEEVVRRIRELLKRIEDRLRKIADDSHKLDEESVRRLEDIARRIKKRVDEILEEVKRSGVPREKLEEARRRIDEIRRRLEELLKRAREDSDRSNKRNKDLLREIEEELKKLKRELDEETR

SEQ ID NO: 9955 - protein, 185 aa, Artificial Sequence; identical to SEQ ID NO: 9954
  Synthetic

SEQ ID NO: 9956 - protein, 181 aa, Artificial Sequence
  Synthetic
SLKEKVKKVIEDLKRAIDDLLRKVREESKKSNDHIRKLLEDSERTLRDLARRIKKLKDDGDLDERLLKEAKELLEELKRRSEEIIKEVEKLNEESDRVIDKLLEDLARLLKRIDDRIEKITDARLIKEVIEEAERLLREIAKRIRKVIEEDRDLNRRIAKKLDELNRRAEELLKRIADRAK

SEQ ID NO: 9957 - protein, 181 aa, Artificial Sequence; identical to SEQ ID NO: 9956
  Synthetic

SEQ ID NO: 9958 - protein, 181 aa, Artificial Sequence
  Synthetic
SSKETVKDVLRKITKRIRDLVRESKKTSDESNKHIKELLERSKKTIDELERRIEDLRRRGDLDDDLLREAKELLERIERESRRVFKEAEELNKRSDDETRRIVKEAEDLIRTVEERLKRIEDEELLRRLIKELEDLMREIERKLRELNERDKRLNEEIAKKLEKLNRDARKLVEEIERRAR

SEQ ID NO: 9959 - protein, 181 aa, Artificial Sequence; identical to SEQ ID NO: 9958
  Synthetic

SEQ ID NO: 9960 - protein, 181 aa, Artificial Sequence
  Synthetic
KLREDLEEMLRRSEKHIRDLVKRSEETSRDSNRHIEKLLKDSRKTIEDLKRKIEDLARKGKLDEKLLEEVRRLLEEIRKRSEKVIEDARRLNKRSDEETKRIVREADELNKEVKDRADRIRKRELLERLIRELKRLNEEIAKKLEDLNREDRRLNEEIAKRLRDLNEELKKLVEDIERRAR

SEQ ID NO: 9961 - protein, 181 aa, Artificial Sequence; identical to SEQ ID NO: 9960
  Synthetic

SEQ ID NO: 9962 - protein, 181 aa, Artificial Sequence
  Synthetic
RSKEEVDKMLERLRERIEKLVEESRKTSKESNEHLEKLFRESEETIKELKKRIEDLRRKGLLSDELLEEVKRLLDRIREESKKVLDEARRLNEESNRKTEEIVKEVRKLLEEVKRRADEIRDEDLLEKLIRELEELIRRIEKKLRDLNREDRELNKRIADEIERLNREARRLIEEIRKRAE

SEQ ID NO: 9963 - protein, 181 aa, Artificial Sequence; identical to SEQ ID NO: 9962
  Synthetic

SEQ ID NO: 9964 - protein, 181 aa, Artificial Sequence
  Synthetic
SLEEEVRREIERSRRHIEKLVRDSERTSKESNKHIKKLLDESKRTLDEIRKRIEDLARKGKLDEDLLKEARDLIREIEKKSRDVIREAKKLNEESNKRTEDIVREARELNERVKRRVDEIREREVLKELIRELRRLNEEIRKKLEKLNDEDRRLNEEIRRKLEEINEELRRLVREIEERAR

SEQ ID NO: 9965 - protein, 181 aa, Artificial Sequence; identical to SEQ ID NO: 9964
  Synthetic

SEQ ID NO: 9966 - protein, 181 aa, Artificial Sequence
  Synthetic
SLEETVEEVLRRLRRKIEKLVTESEETIRRSKKHIEEVLEKSKRTLDKIKEDIDRLRKEGTLSDEILTELDKLIKDVEKKSKELIDEARKLLEDTKRETDRIRREVEELLRRLEKEVKRIREREVLKELIDRARELIERIARKLTELNKENRKLNEEIARRVEELNKELKRLLKEIEDRAR

SEQ ID NO: 9967 - protein, 181 aa, Artificial Sequence; identical to SEQ ID NO: 9966
  Synthetic

SEQ ID NO: 9968 - protein, 181 aa, Artificial Sequence
  Synthetic
STKETVARELERSRKHLEDSFREAERAIKESEEHIRELLERSRRTLKEIEDRIRDLRRRGDLDDRLLEEVKELIDRVRKRSEDIFRRAEELLRRTRERVKRSLDRARKLNDDVERRMREITDERLLRELIEELRRLNRKIHEDNRRLIEDNKRLNEEIKRELDKLNRELERETEEIKKRAD

SEQ ID NO: 9969 - protein, 181 aa, Artificial Sequence; identical to SEQ ID NO: 9968
  Synthetic

SEQ ID NO: 9970 - protein, 178 aa, Artificial Sequence
  Synthetic
SVRETLREVLKESKKHLDDLVRRVKEEIERSKKHIDDLIRRNKESLDDIRRTVEEKIKGREILRKIEEALKRNEDELRRIATEAEKVHRDVEKTIREIVKELRDVHREIEDAIRKKQDDSDLVRELIKRLKEINDRVAERIKDIIRKVREANKDLERKLRELNKRSRDVLEEVVRAEE

SEQ ID NO: 9971 - protein, 178 aa, Artificial Sequence; identical to SEQ ID NO: 9970
  Synthetic

SEQ ID NO: 9972 - protein, 178 aa, Artificial Sequence
  Synthetic
SAAEEAEKASKDSEKHIKDLIRRLREVSEESRRHLRRLIEENKRSLEEIEKEVRKKVKGEEIRREIEEALRRNEDKLKKIEDEMEEVNKKSEEDVRRLEKEVKDVNDRSSDTIRDNKDDTELIKRIIDRNREINRRVAEAIKKIIKDNRDINEDLERKLRKLNEESKRVLDDVVRREK

SEQ ID NO: 9973 - protein, 178 aa, Artificial Sequence; identical to SEQ ID NO: 9972
  Synthetic

SEQ ID NO: 9974 - protein, 178 aa, Artificial Sequence
  Synthetic
SVEERLKDELRKSEEHLRRLIRELEKALEDSKRHADRLIKENRDSLRRIEDKARKKIRGDEILDTIRKALKDNRDELEKILREVEEVDKESKRRLEEILRTMREVNEESKDRLRKKDKDDETVKRIIEENRRINEDLARKIKEIIRDNKRFNEEVEEKLKRLNDTSEEILRRLVRRDE

SEQ ID NO: 9975 - protein, 178 aa, Artificial Sequence; identical to SEQ ID NO: 9974
  Synthetic

SEQ ID NO: 9976 - protein, 178 aa, Artificial Sequence
  Synthetic
SVDKELEEVIRRSKDHLEKLIKEAEDALKRSEEHLRKLIEEVKRRLEEVEKRVREKVRGEEILREIEKVLKEVEESLERILKELEDVNRRSREELKRILREMERVDEETKRELDRRTDDSELIKRLIKENKEINEKLAREIEEIIKENKRINDELKKRLEELIERLERILEEVERRER

SEQ ID NO: 9977 - protein, 178 aa, Artificial Sequence; identical to SEQ ID NO: 9976
  Synthetic

SEQ ID NO: 9978 - protein, 178 aa, Artificial Sequence
  Synthetic
SVDRTLEEVIKDSRRHVKELIDRLEKVIKESEENVKRTVDDNERSLKEIADTVRREIKGREILEEIKRVLDDNRRAVEELEKEAREVHRDVREKLKRILEELKRADDETERRLRERTDDSEDIKRLIDTNRKINRDVAETIKEIIKEVRKINKEIDDKARELNKESRRVLEEVVRAER

SEQ ID NO: 9979 - protein, 178 aa, Artificial Sequence; identical to SEQ ID NO: 9978
  Synthetic

SEQ ID NO: 9980 - protein, 178 aa, Artificial Sequence
  Synthetic
SVAETLRKVLKESEENVKRTVDRAEEELKKSEEHLRRLVERLKEVLEDVRRRVEEEVKGRELLREMDEVLKRIEEEIRKILRRLEEADKRSREALDKLEKDAKRVHDEVRDRLEKRTDDDERVERIIRELREVNERLDREVERLIRENREINRRLAEEIKDLIRRLREILREVVERAK

SEQ ID NO: 9981 - protein, 178 aa, Artificial Sequence; identical to SEQ ID NO: 9980
  Synthetic

SEQ ID NO: 9982 - protein, 178 aa, Artificial Sequence
  Synthetic
SIAEKVEKVLKESKENLDETIRRAEEDLKRSRDHLRKLIEENKRSLDRIKEEVDRRIKGREILKEIEEMLKRNDDRLKEILREVEEADRRSREELKRILDEAREVHKEIRRKIDERRDDSDAIEKLITDLRKINEEADRKVKEIIKRNRDINKKVEDDLRELNKESTTVLREVVERER

SEQ ID NO: 9983 - protein, 178 aa, Artificial Sequence; identical to SEQ ID NO: 9982
  Synthetic

SEQ ID NO: 9984 - protein, 178 aa, Artificial Sequence
  Synthetic
SELEKIIEDARRVLEEDERRNREVNRKLRKILEDNERLNREVNKRLREILKRLKEELKRLKGDKKAVEEVRKKVEEALRDVERVLEESRRDIERVLREVEEMLERSRKHIEDVLRELERRDLDEEAKRALDKIREDVRKILEDTKRELEDVRRRVEEILRETREELKRVEDDVKRAED

SEQ ID NO: 9985 - protein, 178 aa, Artificial Sequence; identical to SEQ ID NO: 9984
  Synthetic

SEQ ID NO: 9986 - protein, 178 aa, Artificial Sequence
  Synthetic
SELEDIIRKLDEILKRNEEENRRVIRRLRELLEEDERRNRKAIEDLERIITKLKDDVRKLKGDEKVLRELEETVEKVIRELRKILEDSRRHIEKVLREIEKILRESERNARKVVEDLRSKPLDRDAERRIREVEEEVKRILEETEEVLRDVKRRVDEILKTTEDRIREIEEEIKRTVK

SEQ ID NO: 9987 - protein, 178 aa, Artificial Sequence; identical to SEQ ID NO: 9986
  Synthetic

SEQ ID NO: 9988 - protein, 178 aa, Artificial Sequence
  Synthetic
DELRDIIRELRDILRENKKRNEDAIRKLRKILKENEKKNRDAIRELEDILEKLRKEIEDLKGDERVLREITKRVRDALERIKRILEESEDDIRRVLEEIEEILRRSKKNIDDAVRKLRSKDLDRKVEEDIKRVEEEVKKILDKTDEELKEVERRVRKILRETEEELKRVEDEVRRAKT

SEQ ID NO: 9989 - protein, 178 aa, Artificial Sequence; identical to SEQ ID NO: 9988
  Synthetic

SEQ ID NO: 9990 - protein, 177 aa, Artificial Sequence
  Synthetic
REEEKARRVMEKLKRDVDRINTRHRDILKKIEDEVRRIDEEHKTEVKKIKDRAEEIIRRIDDEKTVREARDIVRKIEEEVRRSNKTTEEVLRRAEDRVRKSNETTRRLLEKLERELREREPDKDLIREVEKILKDIEDLVRESERELREILKDIKRMVDESLKRLEDILRELEERTR

SEQ ID NO: 9991 - protein, 177 aa, Artificial Sequence; identical to SEQ ID NO: 9990
  Synthetic

SEQ ID NO: 9992 - protein, 177 aa, Artificial Sequence
  Synthetic
REEEEMRKVVKDLEDAARELDRDHETKLRRIEEEVKKLNEEHKRELERIARRIKEIIDRIEDEKVVREIRKILEEVRKRAEDSNKETEDILRDVRRRAKESNDRSREVVREARKEVREKRPDKDLIRRLEEILRRIARELEDSLRKLEKILEEIKEIVKKSLDELRRIVDELEKRVR

SEQ ID NO: 9993 - protein, 177 aa, Artificial Sequence; identical to SEQ ID NO: 9992
  Synthetic

SEQ ID NO: 9994 - protein, 177 aa, Artificial Sequence
  Synthetic
SEEEEVRRVLKRIAEEVKRLDEDHRRILEEIRKKVEKSSRDHKRELDKIKRDADEIIRRISDEKVVREIKRIVEKIEKDAEKVNRETKRILDELARRVEESNKRSEDVLRELEKEVRDKEPSKDLIKKLEEILEEIRRLLEESLRELEDILKKVHDRNARTLERLREILKEIEDRAR

SEQ ID NO: 9995 - protein, 177 aa, Artificial Sequence; identical to SEQ ID NO: 9994
  Synthetic

SEQ ID NO: 9996 - protein, 177 aa, Artificial Sequence
  Synthetic
DEKRKVDKRLKEIEETIRRLLEEHRRELDEIRKRIEEISRRHRKELEDIEREVRKIISRIDDERTVERIREELKRVKEDADEVNRKLKEILERIEKRARESDEKVKRILDEIRKKVRDREPSEDLIRDVERVMREVKRDLERSLEELRDVVRRAEEEVRATLRKLREILKKVEDETR

SEQ ID NO: 9997 - protein, 177 aa, Artificial Sequence; identical to SEQ ID NO: 9996
  Synthetic

SEQ ID NO: 9998 - protein, 177 aa, Artificial Sequence
  Synthetic
SEEETMRKVVKEIREKVRRISERHKEELERITDALRRSSKRHEDELREIEKAVREIIRRIDDDKTVKEIKKILDDARDRVKKVNDKTDDDLKKIKKDAERVNRELERELRKAEEDARRREPSDKLIRELEEILERLEREVRKSLDRLRKILEDIHRTNKDTLDRLREILKKVEDRTR

SEQ ID NO: 9999 - protein, 177 aa, Artificial Sequence; identical to SEQ ID NO: 9998
  Synthetic

SEQ ID NO: 10000 - protein, 185 aa, Artificial Sequence
  Synthetic
SEVEEVIRRLEELVDRLHKINKRAIEENERLNRELHEKNRDIIRKLKELVERLRDIKEKLSDKETLRRILEEIKTRIEDLTRRARETNEEIKRRSDKTLKDIRKINRDIKEEIKKLVREIEERITDKETADRARDEVRRIEKELDDSLRELEKRVRDSKRHLDRSLEELEKVVDEIRKELEDLAK

SEQ ID NO: 10001 - protein, 185 aa, Artificial Sequence; identical to SEQ ID NO: 10000
  Synthetic

SEQ ID NO: 10002 - protein, 185 aa, Artificial Sequence
  Synthetic
KEVEEVIKRLRELVDRLEKENRDVNEDNKRLNEELHDRNRKMIEELRRLVTELEDIRRKLKDKDTLEEIIREILKRIEDLLKRIREINKKILEESRRTLEEAKKRNEEIRREIKRLLDELRKRITDKDLLKRVEDEARKIEEKLKRIHEETKKVADDSERHLRKSLRELEKVAREIKKRLEEERK

SEQ ID NO: 10003 - protein, 185 aa, Artificial Sequence; identical to SEQ ID NO: 10002
  Synthetic

SEQ ID NO: 10004 - protein, 185 aa, Artificial Sequence
  Synthetic
DEVREIIKDLRRLLKELEERNREINDRNKKLNDTLRKELEDIKRRLEKLLRELEKIVRELSDEDTLREIVERIKKRIRDLLEEVRKRIEEIKRRSRETLKRIKEINEEIKKRIRELLEEIARRITDEEVLRRVEEEVRDIERRLDKIHEDTRDTAEKSERHLDALLRDLERVAREIEEALDRLKD

SEQ ID NO: 10005 - protein, 185 aa, Artificial Sequence; identical to SEQ ID NO: 10004
  Synthetic

SEQ ID NO: 10006 - protein, 185 aa, Artificial Sequence
  Synthetic
SEVEEVIRRLRELLRTLEEENRKMIRENERLLEELKKRNEDIERELRKLVTELAKIADKTRDKDTLEKILREIEREIDRLLDEIHKINREIIKRSRDSLREAHKRNKEIKERIEKLLRDLEARITDEKLARELREVAERIKKRLDEIDETTRRMVTESIKRLEEIDKRTTERAREIKKELRDRAT

SEQ ID NO: 10007 - protein, 185 aa, Artificial Sequence; identical to SEQ ID NO: 10006
  Synthetic

SEQ ID NO: 10008 - protein, 185 aa, Artificial Sequence
  Synthetic
SEVEDLIRRLEELLDRIRRDNERIIKELEELLRELEETNKRLIERIRKLLEDLRDTVRKLSDKDTLRKILEEIRRTIDKLLKEIHDTNKRIKDEIERLLREIHRDNERIKDEIRRLLEDIARRITDEKLMREAKEAVDRIKKRLDEINKRTEDVARRIRKRLDEIDERTKEEAKRIKEELDKEEK

SEQ ID NO: 10009 - protein, 185 aa, Artificial Sequence; identical to SEQ ID NO: 10008
  Synthetic

SEQ ID NO: 10010 - protein, 185 aa, Artificial Sequence
  Synthetic
SEVEELIERLKELLERLEELNRRVNEENRRLNEELERRIRKAIEDLKDLLRRLDDIRRRLKDKDTLRKILEKIKRDLEDLIRKLRETLRRIKEESERTLKEIAEMNKKIKDELERLVREIEERITDEKKLRELKEVVDRLKKEIKRIDEETRKEAERSKRNLEKILRDLEREAKRLKEEIDKKAR

SEQ ID NO: 10011 - protein, 185 aa, Artificial Sequence; identical to SEQ ID NO: 10010
  Synthetic

SEQ ID NO: 10012 - protein, 182 aa, Artificial Sequence
  Synthetic
DEIRDLLRRLRELNKRIADRIRKLNEENKKLNKEVADKIRKLNREAREIIKTIAEIIKSGNRDRRVIETIEKLLRDVLKRSEDLLREAEKLDKDSLDRSKKIIKEAEDLNREILERIKKAGVPKEVLDRAKEEVDRSRKHLKELLDRSRETSDRSRRHLKDLMRRSRETIRKLDEELKRLEK

SEQ ID NO: 10013 - protein, 182 aa, Artificial Sequence; identical to SEQ ID NO: 10012
  Synthetic

SEQ ID NO: 10014 - protein, 182 aa, Artificial Sequence
  Synthetic
SEIEKLIREAERIIEEIAKEIKDLNEENERLNREVDKRLTDLNRRAKELLEEVKRIIDRGDRDKRVVDEVRKRLEDLLEESKRLIKEARDLDRETLEKSERIIDRIRELLRDVLRRVEEAGVDEEKLRDARREIERLRRELEKLLEDSRRTSEESRRNLERSLDESRKTIEELIKRLDDAER

SEQ ID NO: 10015 - protein, 182 aa, Artificial Sequence; identical to SEQ ID NO: 10014
  Synthetic

SEQ ID NO: 10016 - protein, 182 aa, Artificial Sequence
  Synthetic
SEIEKLIEDAKRILEEVARRLKKINEDNDRLVRKIADELRRLIEEAKKILDEIKKIIEDGDRDDRVIREAEELLKRILERVKKVIEDARRLDEETLRRSKKLVEEVEELLKKALDDVEKAGAPEDVLREVRKVIKKLRDELEELARRSRKTSEDSRKRLDDLLKRAREVIEELKKRLEDLRR

SEQ ID NO: 10017 - protein, 182 aa, Artificial Sequence; identical to SEQ ID NO: 10016
  Synthetic

SEQ ID NO: 10018 - protein, 182 aa, Artificial Sequence
  Synthetic
KDIEKLIKDLEKLNRDIAKRIRDLNETNKKLVRDVAEEIKRLNEELKKLLEDIRRIIERGDRDRRVTETARELLERVRKESRRLFEEIRKLDEDTLRESERIIKEAKDLNEEVRERLERRGAPEEVLKRAREMVKRSKEHLDELLKRSEDTSRESKRRLEKLLKESEDTIRRLEEELKKAEK

SEQ ID NO: 10019 - protein, 182 aa, Artificial Sequence; identical to SEQ ID NO: 10018
  Synthetic

SEQ ID NO: 10020 - protein, 182 aa, Artificial Sequence
  Synthetic
KEIEELLEEIERILREIKKDLERINKENEKLNREVKKKIEDLIREVRKIIEEIRRIIERGDRDKRVFDEIRKLLEEILKRAEDLLRRARELDKKTLDESEEVIDRVRKLLERILKTVEDAGVEERKLKEVRDTIEELKKRLEKLAKESRDTSRRSRENLERLAREFREEIKRLKKELEEART

SEQ ID NO: 10021 - protein, 182 aa, Artificial Sequence; identical to SEQ ID NO: 10020
  Synthetic

SEQ ID NO: 10022 - protein, 182 aa, Artificial Sequence
  Synthetic
SEIEKLIRDAEKILEEIAELIKRLNEENKELNERVAKRIKDLNEELRRLLKEIADIIRRGDRDERVIRTAEKLIEDVLRRSERLFEEAKKLDEDTLKKSKDIIRRAEELLRKILKELEDAGVPREELEKVRKVIDKLREELKRLERESERTSEESRRNLERLLRESRKTVEEIKKRLDELRK

SEQ ID NO: 10023 - protein, 182 aa, Artificial Sequence; identical to SEQ ID NO: 10022
  Synthetic

SEQ ID NO: 10024 - protein, 182 aa, Artificial Sequence
  Synthetic
SDIERLIAELEKLNKEIEDKIRELNRENRRLNKEIDEEIERLIEEARKIIEDIREIIRRGDRDDRVIKKIRDLLEDILDKVEKLLRELEELDKRTLDESERIIDEAKKLNKEVEDELERRGVDRKKVEEARKKIEDSKRHLEELLRDSRRTVKESNDNLRRSAEKARREIKRLEEALKELRR

SEQ ID NO: 10025 - protein, 182 aa, Artificial Sequence; identical to SEQ ID NO: 10024
  Synthetic

SEQ ID NO: 10026 - protein, 181 aa, Artificial Sequence
  Synthetic
DEVEKVVRELEEVLRRNKELLEKTKKETKEALDRNRELLEDTKRKTREILERLKKVIKEGRDRREVRETVKKAEKENEEANRRSRKHVREVKERNKRMNEESRKHVDRVVRKIAEVEKRLTDEEVVKRLRDILRRVKEAAEELHRDDERELRRVEKELEELHKDDRRVVEEVKDDVRKAEK

SEQ ID NO: 10027 - protein, 181 aa, Artificial Sequence; identical to SEQ ID NO: 10026
  Synthetic

SEQ ID NO: 10028 - protein, 181 aa, Artificial Sequence
  Synthetic
SDAERVVRELRKILKEIEDTIRKSKKETKEMLDRNRELARKVKEELKEILRRLEKMKRDGKPDEEVEKLVREAKKRVEDVIEESRKHVEEVEKRNRDINDDTRRKLETVERKLREVEKRLDDERLLRELRRIVEEVKRAVEELNRDDRRTLERVKREAKKIHEDLRRVVEKLERDVEEARR

SEQ ID NO: 10029 - protein, 181 aa, Artificial Sequence; identical to SEQ ID NO: 10028
  Synthetic

SEQ ID NO: 10030 - protein, 185 aa, Artificial Sequence
  Synthetic
DEVEKLKRELDKILEDLERLHRRLEEELRRIHEENRDLSRRTKEELDRILKRIEELLRERRDKSVVDEVRELLKRAEERVRKANEDSKRLSKEVADTVREASRRSKEILDELKKRVEKAEKDLTDDEKVLEELRRILRRVEEAVRRLNERSEEVLRDVERRDEELNEDNKRRLEEVKKRVEDLLR

SEQ ID NO: 10031 - protein, 185 aa, Artificial Sequence; identical to SEQ ID NO: 10030
  Synthetic

SEQ ID NO: 10032 - protein, 185 aa, Artificial Sequence
  Synthetic
SELDELKKSLEEIHRRDREKNRKLKEDLKRILDEIRKRLEESKKRLEEILREIERLLRERKDDSVRREIKKLLEEIKERVKKVDKETEDLLREAKKEVRRLEEDDKRSLKELTDEVRDAERRLTDDEKALKELRKILEDVARANEELNRDTRRTLERVEEEVEKLNRDHKRVLEKVERDVRRLTK

SEQ ID NO: 10033 - protein, 185 aa, Artificial Sequence; identical to SEQ ID NO: 10032
  Synthetic

SEQ ID NO: 10034 - protein, 185 aa, Artificial Sequence
  Synthetic
SEVERLKEELKRILEEIKKLVDDSKKDLERIHREDKKKNEDLKKRAEEILREIRDLLTKRRDKDVRKRIRELLEKLAREVEDMSRKDKESLDELEKRARDVNRRLKELLKRAAERIRKAEEDLTDDEKLLRDLRRVLEEVKRAVDEISKDHKRMLDAVKKANEELNDDSRRVLERVDREVKKAEK

SEQ ID NO: 10035 - protein, 185 aa, Artificial Sequence; identical to SEQ ID NO: 10034
  Synthetic

SEQ ID NO: 10036 - protein, 185 aa, Artificial Sequence
  Synthetic
SELDRVREEAKRIDDENRKRSEDSVRDSERLLREIEELHRETKERSEELLKRVEEIVRDRGNDEEVTKDLKRILDELRETHKRVLEESKRLLEEARRRHEEVIRRLEESLERLKRKVDEVKKRLKGDRLLEELEKVLRESARRNERIITENRRTMKRVSEEVEKLNRDDKRRMEELEKRAREIIT

SEQ ID NO: 10037 - protein, 185 aa, Artificial Sequence; identical to SEQ ID NO: 10036
  Synthetic

SEQ ID NO: 10038 - protein, 185 aa, Artificial Sequence
  Synthetic
SELERAVEELEKLLKELEDLHRKSKEDSKDMLRRVEELHRRTKEKSKRILEEIERRITEEGRDEDVERKIREVVERARKLHEEVLKRSKDILEEIKKLHEDVERRSKKLLDDLRKRVEDVKRRLTGDELMRKLEEILKRVAEAIKRLIDDDRRVLKRVAEEVKKLNEDDKRVADEVSERIKERLT

SEQ ID NO: 10039 - protein, 185 aa, Artificial Sequence; identical to SEQ ID NO: 10038
  Synthetic

SEQ ID NO: 10040 - protein, 185 aa, Artificial Sequence
  Synthetic
DELEEAEERLREIDKRNEDLHEESRKESKRLLDELRKLVEDVKRELEKILEEAKDIVRKRGKDKDVEKTLEDILREVETRVKEVIKDIERILKEIRETHRRVIERSKRSLEAVKDLVRRVEKDLTGKEKLEKLRDVLRESERRNRELIEEDKEVMRRVSEEVKKLIDDLRRALEKAARDVEKIRR

SEQ ID NO: 10041 - protein, 185 aa, Artificial Sequence; identical to SEQ ID NO: 10040
  Synthetic

SEQ ID NO: 10042 - protein, 185 aa, Artificial Sequence
  Synthetic
SELEDAERRAEEIDRRNKRTVERVEEELEKILREVEELHRRTEEKSKRILDEIRRKIRDRGKDEDVKREIREMVERAKKLHKDVIDESRKILEDIRRKVEKVIRDLERSLEELKKEVKEVEDRLKGKELADKLRDVLRRSAEENKKIIDRLRKILEDVARAVEELIKRDKRVMEEVKKEIDKLLT

SEQ ID NO: 10043 - protein, 185 aa, Artificial Sequence; identical to SEQ ID NO: 10042
  Synthetic

SEQ ID NO: 10044 - protein, 184 aa, Artificial Sequence
  Synthetic
SEVEEIKKRARKLLEEVREIVDRVKKLHERLLREIEKTNREAKREHKRVLDTIRDIFRRIDSEDVKRILRELEERLDKTTKDLEEINRRALEKVDETSKRVKRELERILEELDRLAKDIKAKLDEAETVADLDREIRRLKDELRRILEDLRRVSEEVKKELEKLTRDTRRVSKEVKDELKKVEK

SEQ ID NO: 10045 - protein, 184 aa, Artificial Sequence; identical to SEQ ID NO: 10044
  Synthetic

SEQ ID NO: 10046 - protein, 184 aa, Artificial Sequence
  Synthetic
REVDEIKKRLTEMLETVRKIVEEIRRELEKLLEDVREINERVKEEHERILKDIRDVARKIDSEDARKILTDALRDLDRTTRDLERKNREILKRLDDLVKEIRRRLTEILDRARKLVEDIERKLDDGETMEDLKRRVREVEKRLEEILRRLDDVVRKIKEELKKLTDDTRRVSKRVKDDLERTRT

SEQ ID NO: 10047 - protein, 184 aa, Artificial Sequence; identical to SEQ ID NO: 10046
  Synthetic

SEQ ID NO: 10048 - protein, 184 aa, Artificial Sequence
  Synthetic
SRVEEIKKELRRLLEEVRKKNEESKERDRRLNDTIRRELEEIIRRLRKLLEEIRRLRERIDSEEVRKILRDLLKRLDDLVRTITERLKRINEESNRLAEEDVRTLEKILRDLEELAERVERELDEARTVEDLRRVVEKVLRDIKRSIDDVRRENKKSNEDARRWLEELKREVKRLKDELREIEK

SEQ ID NO: 10049 - protein, 184 aa, Artificial Sequence; identical to SEQ ID NO: 10048
  Synthetic

SEQ ID NO: 10050 - protein, 181 aa, Artificial Sequence
  Synthetic
SEVERIKRELERLLKEVKDANKRVKDTLRKLLRDVEEMNRRVKRENHELLRRLDELVKAGRDEETIKKVKRESRELLRELAKVNRDVKERIEELLREVKKLNEDVKRKLRELLKELEERIRDEELLKDVRKVAKEVEEELKKLHDDTKRVADKVKEDLDRLHRDSERNARRSEEEMDKRRK

SEQ ID NO: 10051 - protein, 181 aa, Artificial Sequence; identical to SEQ ID NO: 10050
  Synthetic

SEQ ID NO: 10052 - protein, 181 aa, Artificial Sequence
  Synthetic
DRVREVKERLKKLLEEVERTNREVMERNHRLLEDVERKNRRVKEENHRLLEELKRLREDGKGDEAVKRVLEESKKLLDDLSEENKRVKEESDKLLDEIRKKNEDVKRKIRELLDRIRKEIEDERLLEDVERTAERVERELDRLHEETKRNADRSREELEKLHRDSEKNARDSAKELEKIRR

SEQ ID NO: 10053 - protein, 181 aa, Artificial Sequence; identical to SEQ ID NO: 10052
  Synthetic

SEQ ID NO: 10054 - protein, 181 aa, Artificial Sequence
  Synthetic
DEVERAEEELERLLRELKKLHEDAKERARELLKRIEDVNRKVKEELKRLLDTIRKLREAGRDESTVKEVKDRIEELLKELERLNREVKERIRRLLEEIHKLDEEVNREIERLLREVTRRIKDKDLLEKVKRVVEEVHKRSRELNEDTRRVIDKVEKDLDELHRDSRRVVETVKEELEKLRK

SEQ ID NO: 10055 - protein, 181 aa, Artificial Sequence; identical to SEQ ID NO: 10054
  Synthetic

SEQ ID NO: 10056 - protein, 181 aa, Artificial Sequence
  Synthetic
KEVEEVKRRLREVLKRLKEMHERVKRELEKLLKKVEDFNRDVKRKNHDLLRRLEELKKAGEDEKALKEVIDTSRKLLKDLAEVNEEVRKEIEELLKEAHRVDREVNEELRKLLEDITRRIRDKDLLEDVEREARRLHDESRKLNEDTKRVVDTVTEELKKLHRDSERNAKRSEEEMDKRRK

SEQ ID NO: 10057 - protein, 181 aa, Artificial Sequence; identical to SEQ ID NO: 10056
  Synthetic

SEQ ID NO: 10058 - protein, 181 aa, Artificial Sequence
  Synthetic
DEVERVKETLDKLLDDVRKLNEEVKKRLEELLEKVERDNRKVKEDNHRLLEEVKDLKRRGKDESALEEVKRRSDKLLEDVHRVNRTVEEEIKRLLDEVRKLNEDVKRKIRKLLEDIRRKIKDKDLLEDVERRAKRVEEELDKLHEDTRREADRVRRDLRRLDEDTKRNVDESRKELEKTRK

SEQ ID NO: 10059 - protein, 181 aa, Artificial Sequence; identical to SEQ ID NO: 10058
  Synthetic

SEQ ID NO: 10060 - protein, 185 aa, Artificial Sequence
  Synthetic
SEVEEVIRRIRALVEEIARKNEDILRKNRKLLEDLRELVERVIKEIKELIDRLADEVRRVKDKETVKKLIDDIRKRVEKLAEDLTRLIKEIKDRSRKTLEEAHKLNRDIIRDIRRLLEELRKRVKDDRVRKEVEEVLRDVEERIRRLDEEVRRRAEESERELERLREKVEDMIEKVKRALEELRR

SEQ ID NO: 10061 - protein, 185 aa, Artificial Sequence; identical to SEQ ID NO: 10060
  Synthetic

SEQ ID NO: 10062 - protein, 185 aa, Artificial Sequence
  Synthetic
SELEEIIKKLRKLVEDVARRNEELIKKLEETNKRLEDEVRELIEEIKKLIDELAETVKRIEDRRTLEDLIRKIKEEVEELLRRIRERVKEVDKEDKDLIKRIHDDNREILKRLEELLRRAEDKVKDEEMKKRLRDVAEKLKEDVRDLDRKVKKVAKESHERNRRILKELEEVAARVTERLEELRR

SEQ ID NO: 10063 - protein, 185 aa, Artificial Sequence; identical to SEQ ID NO: 10062
  Synthetic

SEQ ID NO: 10064 - protein, 173 aa, Artificial Sequence
  Synthetic
DEDERVDEVIKKVREDLRKLLEDSERVVKRSKEELDRWRKKVEDVMRDSDRRLEELRRDKRLEEIKRRSEKTLKEAEDLIRTIKRISEKTLEEDRELIKRAEEEVTRIEEEAKRGDNREEVIKELKKLIDKLREDSKKTIEENKKMNKDAADEIEKIIEDNRRLIKRIEEEDR

SEQ ID NO: 10065 - protein, 173 aa, Artificial Sequence; identical to SEQ ID NO: 10064
  Synthetic

SEQ ID NO: 10066 - protein, 173 aa, Artificial Sequence
  Synthetic
SEDERVEEVVKRIEDKLRRLLEESKRVVDDSKRRLDEWRKEVEKVVKKSTDDLEKLRRDKVLEEVKKISKETLDEARKLIDDARKRSDETLKRDERVIREADKKVKEITKRARDGDNREEVIKELEELIERLARISKKTIEEDRRVNKELAERIKEIIERNRRVIEEARERLR

SEQ ID NO: 10067 - protein, 173 aa, Artificial Sequence; identical to SEQ ID NO: 10066
  Synthetic

SEQ ID NO: 10068 - protein, 182 aa, Artificial Sequence
  Synthetic
KELEELIEELERLNREINERAKELIKKLRKLNEEVARRHERLIEELRRILEELKELLERGNRSDELLKRIRTMVEKVRKDNEDSLRELKELTDRVMRELTELLKEAKKLTDEIADRLRRIPLDEELRRRAKRVLEESKRNIEKVAEDVTRVLRESEESLERLRERSERVLREVEKTIRDMAR

SEQ ID NO: 10069 - protein, 182 aa, Artificial Sequence; identical to SEQ ID NO: 10068
  Synthetic

SEQ ID NO: 10070 - protein, 182 aa, Artificial Sequence
  Synthetic
SEVERLIEELDELNRRINEKHKKLRRELEELNKRVAERHEELIRRLRKLLEDLERLARRGNRSSKLLEDIKRLVDEVRERNRESLDELRRLTRTVAERNKRSLEEARELTERVRKKAEDVPLSEELRKRVEDALRRSKENIKRLEEESREVLRRSEKSIDELRRESERVLKEVKEEIERVRK

SEQ ID NO: 10071 - protein, 182 aa, Artificial Sequence; identical to SEQ ID NO: 10070
  Synthetic

SEQ ID NO: 10072 - protein, 182 aa, Artificial Sequence
  Synthetic
SELEELIKELRDLNRRINKRVDDLADELRRLNERINRRHEELIKELRRLLEDLKRKFDRGDRSSDLIREARELLKRIEERNRDSLRELEELSRRVEEDARRLLDELRRLTEEVKKRAEDVPLSEELKKRADDVLRESKENIERVERKIRRVLEESEENIEDLRRRSKEVLDEVRKRIEDIRR

SEQ ID NO: 10073 - protein, 182 aa, Artificial Sequence; identical to SEQ ID NO: 10072
  Synthetic

SEQ ID NO: 10074 - protein, 182 aa, Artificial Sequence
  Synthetic
SELEELIRRLKELNKDVNEKHKRLIEELEKLNRDINERHKELIEELERLLRRLEKLLRDGNRSSELMERIRRLIERVRDENRKSLETLKRLSDDIERKNRESLKRLKELTDEARKRLEDIPLSEDLRREAERVLRESEENIKELEDRSRDALRRSEENIRRLKKESEDVLREARREVERLER

SEQ ID NO: 10075 - protein, 182 aa, Artificial Sequence; identical to SEQ ID NO: 10074
  Synthetic

SEQ ID NO: 10076 - protein, 183 aa, Artificial Sequence
  Synthetic
SLEEELDKVLKESRDNVRRVEEELEEVMEKSERAAEKLRRDLDRVLEELEKMIRDLKRRGVPKDEVDRVLEELRRLADKLREDLDRVLKESKESIDRLRERVKEVKEESEELARRLKEKSRDIDREDIKRVIDTLRKLNERLNREVKEVIKRNEELVRRLAERVKKVVEDLRRLVKRLDDEVR

SEQ ID NO: 10077 - protein, 183 aa, Artificial Sequence; identical to SEQ ID NO: 10076
  Synthetic

SEQ ID NO: 10078 - protein, 183 aa, Artificial Sequence
  Synthetic
SLEETLKEVLRKSEENAERLKRELEKVLRKLEEDLRRLDERLDEVLKRSRDEARKLREADVPKDDVDRVVEESERSIRELKKEIKKVEDDLRKLATDLERRLEEVKERSRELVDRLRKKAKDIDREVIKRVIEDLDRLNDELNKEVEEVIRRLEDIVRELEKKIREVIKRNKELVDRLEEKVR

SEQ ID NO: 10079 - protein, 183 aa, Artificial Sequence; identical to SEQ ID NO: 10078
  Synthetic

SEQ ID NO: 10080 - protein, 183 aa, Artificial Sequence
  Synthetic
DLEKRLRDVLKESDENIEELRRELREVLKESEDNVKKLAEENKEVTDRLREEIKRLKEEDVRKDLVEEVRRRLERISEENKKTLDDVKKESKKLVDEVEKTLRDVKRESERLARDLERKKDKISKEEIERVIRELKDLNRRLNEELKRAIKRIKELNKRLNELSKRSIDELRRLVEELERRVK

SEQ ID NO: 10081 - protein, 183 aa, Artificial Sequence; identical to SEQ ID NO: 10080
  Synthetic

SEQ ID NO: 10082 - protein, 183 aa, Artificial Sequence
  Synthetic
SLKEKLEEVLRRSEENVERLRKENEDVAKKNREAIEEIKKRLDDVLRELRERIERLKKEGVPGKDVERVREELEKLVTELRERVKKVAKELEELHRRLDRELEKVKETSKRLVEDLDRKSKDIPEEVIDRAVEELKKLNDDLNRTVKKVIRESEELTETLRKDVKRVVDDLRRLVEELARRVK

SEQ ID NO: 10083 - protein, 183 aa, Artificial Sequence; identical to SEQ ID NO: 10082
  Synthetic

SEQ ID NO: 10084 - protein, 183 aa, Artificial Sequence
  Synthetic
DLEEELKEVLKESEENIERLKRENDRVVEKNKKAVDDLRERNKRVTERLREEIERLKRRGVPGKEVDDVRRRLEEISKRNKETLDDVLRKLEKLHRDLDEDLKEVKKTSRKLVEELRRKRKDIDKKDIKRVIDELRKLNEDLNRRVKEAIKTSEKITDDLRRMSEESEKELRELVRRLEERVR

SEQ ID NO: 10085 - protein, 183 aa, Artificial Sequence; identical to SEQ ID NO: 10084
  Synthetic

SEQ ID NO: 10086 - protein, 186 aa, Artificial Sequence
  Synthetic
SEVEEIIRRIDELIKRLAETVKEIVDRLRKLNKKLNDENREIIKEIRDLIRELAKEVKRIKDRDTLEKVLEDIEREVEKLMKRSRDLNEEVLRTSEKLADDARRTLKEIEDRVRELVKEAEDRIRSIEEVRERLERVLRRVEEVIKRLKEELKKVLDESRKNVEDVTRENEKVLDEVRKTIDELRR

SEQ ID NO: 10087 - protein, 186 aa, Artificial Sequence; identical to SEQ ID NO: 10086
  Synthetic

SEQ ID NO: 10088 - protein, 186 aa, Artificial Sequence
  Synthetic
SEVEELIKTIERLIKELEKLNEEIIKRLRDLNKRLNERNEEIERTLRKLITDLARMVREVKDRETVERVLDEIRKEIERLVKESKDENDRALDRSDELVRRSERKNEKIEDEVRKLAKDITDKVKDIEEVLRRLEEVLDRVKKKIKTLTDKNREVLERSRENVKKVTEDNERVLRKLKEDIERLRK

SEQ ID NO: 10089 - protein, 186 aa, Artificial Sequence; identical to SEQ ID NO: 10088
  Synthetic

SEQ ID NO: 10090 - protein, 186 aa, Artificial Sequence
  Synthetic
SELEEALKDIKRLIDKLRKDNEDIIRRLRETNDELRKLNKKIIDEIRDLIRRLEEVAKRIKDEKTLEEVLKRILDEVRKLAEESKRLNDKVREENERLVEKSRRTNKEILERVERLAREITRRIKDDKDLKKRLEDVVKRVREEIEKLTRDNERVLEESRRTLEKLTRENEKVLREVKKKIDDLRK

SEQ ID NO: 10091 - protein, 186 aa, Artificial Sequence; identical to SEQ ID NO: 10090
  Synthetic

SEQ ID NO: 10092 - protein, 186 aa, Artificial Sequence
  Synthetic
SELEDVEEKIKRLIDRLRELNKKIEDDLRKLAKELADLNKKIIREIEELIRRLAEVVKRISDKDTVRRVLREILKRVERLVRESKKKNDDVRRELEELVKRSEDANKEVLKRVRELAEEVRRRIKDVEELKRRLRKVLERVKREVEKSSERNREVVERLRKELERLTRENEEVLKRVKKEIERLEK

SEQ ID NO: 10093 - protein, 186 aa, Artificial Sequence; identical to SEQ ID NO: 10092
  Synthetic

SEQ ID NO: 10094 - protein, 186 aa, Artificial Sequence
  Synthetic
SEVDEVIKRLDELIEELRKRNDDIIREIEKLIKRLEEENKEIVDRIRELIKRLEDMVRRLKDKKTVDDVLKEIEDRVRELAKRSRERNEEVLRRVERLVRESRKTNERILRRIEELFDRIRRRMKDDKDVLDRLREVLDRLRKEIERLTRKNEEVLKDVRRRVKRSSEENEKVLKEVRERIERLKK

SEQ ID NO: 10095 - protein, 186 aa, Artificial Sequence; identical to SEQ ID NO: 10094
  Synthetic

SEQ ID NO: 10096 - protein, 186 aa, Artificial Sequence
  Synthetic
SDVDEVIKRLRELIRENHKRNKKIVDEIRELIRELKERNKKIVDEIRELIKRLKDIVRRLKDRDTVRRVLKEILDRVEKLVRKSKKDNERMLERVEKLADDSRKINRDSLRKIEKLIKELEDRIRKDEEVLRRVEEVLRELREAIKRDDEENKKVLEEARKTVEDSSRENKRVLEEVRRRLDEERR

SEQ ID NO: 10097 - protein, 186 aa, Artificial Sequence; identical to SEQ ID NO: 10096
  Synthetic

SEQ ID NO: 10098 - protein, 175 aa, Artificial Sequence
  Synthetic
SEKERAEEVFRESKKNIDDVKRKLERVLEDSKRTLDELRKEVEKVLKESEDELRKLARSEGEEVKRIVDDLRRLSEKSFEEVRELLERIERVSRKIARDLEEILKDAKRKTDELRKEGMTEELIREIRELNKRLNDTIEDVIRRMKDLNRRLAEVIKEIIERNKKLIEDAARRIK

SEQ ID NO: 10099 - protein, 175 aa, Artificial Sequence; identical to SEQ ID NO: 10098
  Synthetic

SEQ ID NO: 10100 - protein, 175 aa, Artificial Sequence
  Synthetic
REKERLKEVVEKSRRNLEKLREDSERVLEKSRRTLERLKKEVEEVLKESEERLRELARSEKEEVEKIVRELKRLSEESMDEIRRLLDTARKLSEKIFEENARILKRLDELTKELEKEGVTEELIKTIEDINRRANEESKRTEKELEDINRKLEEDIKRIIDRNRKMIEDAARKIK

SEQ ID NO: 10101 - protein, 175 aa, Artificial Sequence; identical to SEQ ID NO: 10100
  Synthetic

SEQ ID NO: 10102 - protein, 175 aa, Artificial Sequence
  Synthetic
REEERLEEVLRRAEEILKRLEDEVRKVVEDSKKNIEDVRREVEEVLKKSEDRLRKLARDSGEEVKKIVTELTERSKKSVEDVKKLLDDLRELTKELERRARELLKELRERIKRLEDEGVTEELEKRLKEILDRAAEEIRRIIRELEELNKEANDRIRKIIKENEDLIREAEERTR

SEQ ID NO: 10103 - protein, 175 aa, Artificial Sequence; identical to SEQ ID NO: 10102
  Synthetic

SEQ ID NO: 10104 - protein, 180 aa, Artificial Sequence
  Synthetic
ELEERIKKANEDSKRTLRELMERVRKANEDSKRKLEEIREKVERANRESKKILDELRKAGIDKRLEEELRKVNEETRRTLERLAEKVEAVNDKTRKILAELEKEVREVNKKIRDDLSKPVDEKVIRELIKELKDVNRALEKKAKELIDELEEVDKDLEDKVRELIRKLKEVNEDLKRKAD

SEQ ID NO: 10105 - protein, 180 aa, Artificial Sequence; identical to SEQ ID NO: 10104
  Synthetic

SEQ ID NO: 10106 - protein, 180 aa, Artificial Sequence
  Synthetic
SLKERVKKVLEESERNLEENKKDAKRVNDETRKKLKELEDRADRVNRETERALRELEDNGVSDEIKERMKEVNKKHREILERISREVKRVNEEHKEEVDRLEKEMRDVNKKVKEELSEDRDEKVVREVIEELKRVNDKLNDASRRLNERLKRVVEDVERRVRDLNKELEDVVEELKERTR

SEQ ID NO: 10107 - protein, 180 aa, Artificial Sequence; identical to SEQ ID NO: 10106
  Synthetic

SEQ ID NO: 10108 - protein, 180 aa, Artificial Sequence
  Synthetic
ELEERIKRVIDELRRRLEELRRELKRVNDKTEEDLRRLEDNARRVNDTSRKMLERLEDGGVDEKIAKEVRDVNEKHKEDVKRISDEVREVNKRHKEIADRIEEKVRRAEEEIRKKLSKPTDETVVREIIRELEKVIEELEREVRELNRELREVVERVAKKVRDLNRELEEVIRDVKRKVD

SEQ ID NO: 10109 - protein, 180 aa, Artificial Sequence; identical to SEQ ID NO: 10108
  Synthetic

SEQ ID NO: 10110 - protein, 181 aa, Artificial Sequence
  Synthetic
SLEDEARELRRKSEKTNDELRRAIEELEKKVRDMIRRSEEHVRDLVRKVKRVIEKLEEDGAPRELLEELRKLLRDVEERAKELHKTLKDLLETVKRRAEDILRKNKELLERISREVERVNSDRKDLEELIKELKKLNDESREEIERLIRELEELLKEIEDRNRKLAETLKRLLEEVEKRAR

SEQ ID NO: 10111 - protein, 181 aa, Artificial Sequence; identical to SEQ ID NO: 10110
  Synthetic

SEQ ID NO: 10112 - protein, 181 aa, Artificial Sequence
  Synthetic
SIEEEIKELKDRSKKTNEELKKEIDELKEDSERTNRESRKHVKEVLDRLREILERLRREGAPEELLRELEKLIRDIKDRAEELHKRNEELIRRVEKKAREILKENEDLVREIERRMKEVNSDRKEIKRLIDELTELNKRSKELIKRLIEELKKLNDDSRKENKRLVREVERLAEEVDRRVK

SEQ ID NO: 10113 - protein, 181 aa, Artificial Sequence; identical to SEQ ID NO: 10112
  Synthetic

SEQ ID NO: 10114 - protein, 181 aa, Artificial Sequence
  Synthetic
SLEEKAKRLKEESDKTNKKLRELIERLERESRRTNEELRKKIRELLEDARRELDRLRKEGAPEELLRELDELIKTIVRRLEKILKENADLLKEVKDRLEEILKENEDLVRRVERELRKVNSDEKKVEELRRDLERLDRESEKKIRDLIKTLDELNKESDRKIRKLEEELKRLLEEVEKRVR

SEQ ID NO: 10115 - protein, 181 aa, Artificial Sequence; identical to SEQ ID NO: 10114
  Synthetic

SEQ ID NO: 10116 - protein, 181 aa, Artificial Sequence
  Synthetic
DIEKKIEDLRRKAKKVIDDLRKRSDELKKRSKDTNDRLREELKKLEEDVRRVIEDLRRRGAPEELLDELRRLLDEVKKRAEELLRRNKKLMEEIDRRNKKSLEDLKRLLDEVEEEAKRVNSDDKDIEKLIRDLEKLLRDVEERHEDLRRKAEELDRDTKEKVDRLIKELKDLLKEVRDRVR

SEQ ID NO: 10117 - protein, 181 aa, Artificial Sequence; identical to SEQ ID NO: 10116
  Synthetic

SEQ ID NO: 10118 - protein, 181 aa, Artificial Sequence
  Synthetic
SLKEKLDDLVRKSDDTNKDLEEKARRLVEDAKRVLKELEDKSRRLVEEARKVLKRLEEEGIDKRLLEELERLIDEVRKKNKESLDRLRKLIDDVRKRLEEILERNRRLVKEVEDRARTVNSDDKKIKELIEELEDLDRRSKKAVEDLIKELKKLIDEVREIHDRLEEELRRLIKTVRDKAR

SEQ ID NO: 10119 - protein, 181 aa, Artificial Sequence; identical to SEQ ID NO: 10118
  Synthetic

SEQ ID NO: 10120 - protein, 182 aa, Artificial Sequence
  Synthetic
SLEDKVRKLEEEIKKVLKEIREEVERLLEEDRRTLEDLKRRHRESDRESKEVLDEIAKKVDSEKLKRLEEEVEKLNRENKEAVKRLEEKHRRTLEKLRKVLRELEEEARRLLEELRDMSRMRDDKVIKEVIDTLRKRLEELKRRLEDVIREVRKANEDSERESRDVIRKLKELLERLKEKVK

SEQ ID NO: 10121 - protein, 182 aa, Artificial Sequence; identical to SEQ ID NO: 10120
  Synthetic

SEQ ID NO: 10122 - protein, 178 aa, Artificial Sequence
  Synthetic
SEEEKLKEVKDRIREVLRKLEEHTDKVKKEVEKVLRDIRRTTDELKKEVRAMLERLRRKKKDAEDLLRELEKIIEEIERELDRVLEENDKMAEEWKKLLDKVLDDNRKSIRDIEKELDDREPTDELVTEVEKLLRDDEETNRDVVKKVREAVKKDADTNRKVIEEVKKVLEDAARRLD

SEQ ID NO: 10123 - protein, 178 aa, Artificial Sequence; identical to SEQ ID NO: 10122
  Synthetic

SEQ ID NO: 10124 - protein, 178 aa, Artificial Sequence
  Synthetic
SEEEKLERVERRLEKVLDEIRRHTEDVKRKDEENLDRLRKKIEKLKRELEKVLRDLEEKRKDAEDELRKLRRRAEEAKRRLDEVKKRLEEISRRTKELLDDVLRRNKESVDRIRREIREKRPTDELVKKLEELLEEDKDTNRKVVKEIEDANRRVNEELDRVIEELKRILEELERRLR

SEQ ID NO: 10125 - protein, 178 aa, Artificial Sequence; identical to SEQ ID NO: 10124
  Synthetic

SEQ ID NO: 10126 - protein, 186 aa, Artificial Sequence
  Synthetic
SEVDEVRKTLEDLLRRLDEENKDIIRRNKELLDDLDRKVREAIERLKRLLDELRKILEKLKDRETLTRIIEEIEKRARELIKRLRDEIRKIEEESKKSIEDSRKRNDEIRKRLEELIKDLRDKIKDSEELARRITELEKRVREVIERLKEKNKRLEDDSRRVITELRKKLKDLEDRVREEIEELRK

SEQ ID NO: 10127 - protein, 186 aa, Artificial Sequence; identical to SEQ ID NO: 10126
  Synthetic

SEQ ID NO: 10128 - protein, 186 aa, Artificial Sequence
  Synthetic
SEVERVKEELKRLLEDLDRKNKRMIDEDERLNKELNEENERLIRELEELLKRLKEIRDKLTDRDTLKKIIDEIDKRLKELIERSRRRNREILEESKKLIEESKRTNREIERRAKKLIDDLRRRVREKEEVKREIDKLREEIREVIERLDKKNEDVLRKSEKNVRDLNRENEEVLRRATEAVRELER

SEQ ID NO: 10129 - protein, 186 aa, Artificial Sequence; identical to SEQ ID NO: 10128
  Synthetic

SEQ ID NO: 10130 - protein, 186 aa, Artificial Sequence
  Synthetic
DEVDKVTRTLEELLKRLEEENRKMIEDDKRLNEELNKENRRVEETLRKLLKELEDIRKDLKDKKTLDEIIKRIKERVDKLIRDSERLNDEIKKRSKKLIDDSRERNEDILRKAEELIKRLREKVREKKEVKEKIDRLEKRIRDAIRELNERNKKALDDSERNVRELNKRNERLREEVERKIRELER

SEQ ID NO: 10131 - protein, 186 aa, Artificial Sequence; identical to SEQ ID NO: 10130
  Synthetic

SEQ ID NO: 10132 - protein, 186 aa, Artificial Sequence
  Synthetic
SEVDEVAKRLRDLLRELEEKLKRAEDRDRKLNDDLNKTNKKLIKELEDLLRKLEEIARRLKDKDTLKKIIDEIERELKRLIDESRRTNKEILDESRKLVEEIEETLRRAKKEAEDLIRRLRERFKDDDEVRRKIDELEREIKEVVDRLRRRLEELLRRSKENVDRLNRENDRVLEEAKRKIRELEK

SEQ ID NO: 10133 - protein, 186 aa, Artificial Sequence; identical to SEQ ID NO: 10132
  Synthetic

SEQ ID NO: 10134 - protein, 186 aa, Artificial Sequence
  Synthetic
SEVDEVADRLEKRLKENRDKNKRVEDEDKRLNKELNDTNRRMEEELKRLLTEIDDIRRKLKDKDTLDRIIERIRREAERLIDESRKSNKRIVEESEKLIRRSRRINEETLERLKKLIKDLRARFKDDEEVRKKIDELERRLKEVIDDSKRRNDELERESRENVRELNRRNKELEDEARKEVERAKK

SEQ ID NO: 10135 - protein, 186 aa, Artificial Sequence; identical to SEQ ID NO: 10134
  Synthetic

SEQ ID NO: 10136 - protein, 186 aa, Artificial Sequence
  Synthetic
SRVDEVIERLERLLRELDKINRDMIEDDKRLNTELNKENKEVEDRLRRLLEELEEIRKKLSDEKTLEEIIERVERRLEELIERSKRRNREILERSKELIERSKKTNEEILRRAEELIKRLREEVKDIKEALDKIRRLEERARRVIEELDEKNRRALERSKENVKRLDERNERLRKELEEKVRRLRK

SEQ ID NO: 10137 - protein, 186 aa, Artificial Sequence; identical to SEQ ID NO: 10136
  Synthetic

SEQ ID NO: 10138 - protein, 185 aa, Artificial Sequence
  Synthetic
DVEEKVKKVIRELREVLKEIEERVRRVLERNKRSLEDLKRKHKESIDRAKEVLDEIRKDRVDEEKLRRIAEKVKRVIDENERIAKEIKEEIKRVNEKSREILERIADELRKVEEEIKDILAKLRDVEEALKRLEDKLREKLRDLRRKLDELRKENEKVNRDLEDKTRRVIEKLKRVITKLKEEVK

SEQ ID NO: 10139 - protein, 185 aa, Artificial Sequence; identical to SEQ ID NO: 10138
  Synthetic

SEQ ID NO: 10140 - protein, 181 aa, Artificial Sequence
  Synthetic
SEIEEVEKRLEDVLRKVNKKTEDLMRSVKEIIKRSREHLEKVIRDLEEILKELRELRKRGKDKKELEDRARKALEDLDRALKRNKEMHDKSDDESREVNERLNRTHKEVLDRLREILKRVKDEDVKRRIEEVEERLKRDNERNNKKIEDVNRDNRRVAEELRRRVEDVKRKIEKVLRELKK

SEQ ID NO: 10141 - protein, 181 aa, Artificial Sequence; identical to SEQ ID NO: 10140
  Synthetic

SEQ ID NO: 10142 - protein, 183 aa, Artificial Sequence
  Synthetic
DVEELLDRVTKRVEKALRELRKKVRELKEENRKSVEELEETSKRLKKEVDDVERRLEAGNVDEEVLKRLRDILRDIRRKLKEVTDRNRDSARRSREELERVLEDVERIIREAKRRLEEVRRIKDREKLKKVLEEIEKILKEIEDKVRRVIEKSRRINEENKETNRRVIEDVRRLLKKAEEDLR

SEQ ID NO: 10143 - protein, 183 aa, Artificial Sequence; identical to SEQ ID NO: 10142
  Synthetic

SEQ ID NO: 10144 - protein, 183 aa, Artificial Sequence
  Synthetic
RVEERLDEVRKKIDEVLKRLRDTTKELEDENEESLRKLKKEVDEVRKKIEEVLKRLEDANAPKEVLDELRRIVEDIKRRLEEVLEELKRIIDRSKEELKKVLRENEDSARRLKERLKEVERIKDEEKLEKVDREIEEILRRNKRTNEKVAEESRKINREAEERLRRVIEELEKILKEIEDRLK

SEQ ID NO: 10145 - protein, 183 aa, Artificial Sequence; identical to SEQ ID NO: 10144
  Synthetic

SEQ ID NO: 10146 - protein, 183 aa, Artificial Sequence
  Synthetic
SVEKKLKDVEDEIRKVLRELEETSKKLDKEVDDMLKKLKDSTEEVKKEIDEMLKRLEERRLPERVLTELKKIADEARRRLEEVNRRNEESAKEIKKELEKVTKENRDSIEDIKRKLEEVARIKDDEKLDKVVKDLRKLLEDDKRTNKEVIDRVRRKLEENKETNEKVIKELRDILREIEERAR

SEQ ID NO: 10147 - protein, 183 aa, Artificial Sequence; identical to SEQ ID NO: 10146
  Synthetic

SEQ ID NO: 10148 - protein, 185 aa, Artificial Sequence
  Synthetic
SEIEDVARRIRKLLEELRRRIRKIAEDSRRLNRRLEERNTEMEKEIKDRLRKLEEELKRKEDGETVTREIKEAADRLRELLKESKDENEDVARRSEKLLRDAEETLREITERLKDLLKKLRDRTRTEEVKEKIDRLEKEIRDMLKELRERIKRLKDENEKSLEDLRRRNTELEEEVRRVIRELEK

SEQ ID NO: 10149 - protein, 185 aa, Artificial Sequence; identical to SEQ ID NO: 10148
  Synthetic

SEQ ID NO: 10150 - protein, 185 aa, Artificial Sequence
  Synthetic
SELEKVAEDIRRLLKRNEEINREMIKRSRELNEELRERNREVTERIRRLLERLKEERKRTTDGETVERRIREVARRARELLKRSEEMNKEVARRSKKLLDDSKKINDDSRRRLKRLLDELRKRRRTDELEKKLRDLEREIRKVLREAKRLNDELRKENKESLERLKRENDKLRKEVETVIREAEK

SEQ ID NO: 10151 - protein, 185 aa, Artificial Sequence; identical to SEQ ID NO: 10150
  Synthetic

SEQ ID NO: 10152 - protein, 185 aa, Artificial Sequence
  Synthetic
DEIEEVIRRIKRLLDENRKKNEEMSDRSRKLNERLRKIIKKIIDEITELLKRLEDRARTVTDGETLRREIKEIADRAKRLLDEIRKILEDIRKELEELNRRSEEMNKESKEEADRLLEELRKRSRDRKVDKKIEDLRKEIEDVLKELAERNKENKDRNKKSADELRKEIEDLERKVREVIRELTR

SEQ ID NO: 10153 - protein, 185 aa, Artificial Sequence; identical to SEQ ID NO: 10152
  Synthetic

SEQ ID NO: 10154 - protein, 180 aa, Artificial Sequence
  Synthetic
RVEDEIRRLEEEARRVLRELEDLLRRLKKKNDESNKEIRERIERVRRKAEKVLRELERRGVPDEVIRELEERLRRMEKRAEELNKRSKELSDDIVRRLRELIERLKRLIEDVLRKLDRVRDERVIERLIRELRRLLEDVKRKAEDLIRKSEDLNEKWRKELKKLEREIERLLKEVADRVK

SEQ ID NO: 10155 - protein, 180 aa, Artificial Sequence; identical to SEQ ID NO: 10154
  Synthetic

SEQ ID NO: 10156 - protein, 179 aa, Artificial Sequence
  Synthetic
EAEKELKRVEDRDKESNDRTKDILRRIEKEVRESNKRSKEILDEIRKRVRDVIEELRRKRSDLEEVIRELEKILREVEEAVDRINRDNERILEELAERAKRLNDENKKISDDVRRRMNEDEETVRRLKDELEEVNERTERAVRDLLRKARKVDDESRRRVEALLRKVEEVLREIKRRVD

SEQ ID NO: 10157 - protein, 179 aa, Artificial Sequence; identical to SEQ ID NO: 10156
  Synthetic

SEQ ID NO: 10158 - protein, 181 aa, Artificial Sequence
  Synthetic
SFKETLDEIRKRVKEVLDKLEKILRDIARRVEKVNKENEDRLREINRRNEEVLRRLKKKGVDETLLERNRRANERTNREVKKSNDETREVLKEAKKAIEKLLEELRRVLKEVEDRADKKRDDEDKLRELLERLERLLRELERRVEKIEEDLKRILDEVRKRTKELLERNERILEKLERDAD

SEQ ID NO: 10159 - protein, 181 aa, Artificial Sequence; identical to SEQ ID NO: 10158
  Synthetic

SEQ ID NO: 10160 - protein, 183 aa, Artificial Sequence
  Synthetic
SIEDIVREIRERNKDAKRKVEDIVRRNREEIDKVLKRVEKILRDNEKRIREVKEELKERVKSRDLERVEEKLERLLRESKEVFKEVEDRLRDLMRKSDEVARRAEENIKENIRRVEDVARKRLDEKDLDKVRKESEDNLREILRTLKEVHERSKETLKRIEDTLRRVHKKSEDELRRLREEVR

SEQ ID NO: 10161 - protein, 183 aa, Artificial Sequence; identical to SEQ ID NO: 10160
  Synthetic

SEQ ID NO: 10162 - protein, 183 aa, Artificial Sequence
  Synthetic
SIEEIAKTIKEEIKEVMDRVREIVERDEREIKKVKEEVDRIAKRNEDEIRKVKDELDKKVKSDRLERLRDKLRKVEEDSRESLKDVRRKLEEVRRESDEVVRDVERRLEEVLREVEDVLRKRLPEEAMKEVADRVRKKLEEIERTLEEVHRKSRKVLTEIIKKLKENHDRSKELLDRIREEVK

SEQ ID NO: 10163 - protein, 183 aa, Artificial Sequence; identical to SEQ ID NO: 10162
  Synthetic

SEQ ID NO: 10164 - protein, 182 aa, Artificial Sequence
  Synthetic
SEVEEVLKEIKDLLRRLEEIVRRVLKENRRLLEEDVRRTEEILEELERLLDELRKDIKRLDDRDKVEEIVRRAIKELEDLLRESEERNKRSREESEKLLRDLRETIERIRRRLEELLKRLKDRGAPEELLKRIEDEVRRVEDKLRKLIKRSKEESDKVAEELERLNREARKRIRDVMEELKR

SEQ ID NO: 10165 - protein, 182 aa, Artificial Sequence; identical to SEQ ID NO: 10164
  Synthetic

SEQ ID NO: 10166 - protein, 182 aa, Artificial Sequence
  Synthetic
DEAEEILRRLKKLLEDAKRISDRTVEKNREMLKKIEEDSKRSLERNRELLKRIKELAKDIRDDKTLEEMLRELKERLDRSHDENRRLVDRIRDISRRTNEENRRVIKEVEDRLRELLEEAERRGLPREIIERLKEEVDRLLKELRDSNRELKRESDEVVEKLRELNKRSKEEADKVEKDLRR

SEQ ID NO: 10167 - protein, 182 aa, Artificial Sequence; identical to SEQ ID NO: 10166
  Synthetic

SEQ ID NO: 10168 - protein, 182 aa, Artificial Sequence
  Synthetic
SEVDEVLKRLRKDLDKVRKDSKKSLEELRRVLEEVERLSDESVKRLEEVLKRLEDLIKDIKDDESLRRLVDEARKELEAINKRNEELIRRVEEELKEILKRNEEIIRRVEEKLRRILREAERRGVPREIIKKLADEVREVLERLKELNRRLEKEARDAKRRLEESNDRLRRKVEEVIKELRR

SEQ ID NO: 10169 - protein, 182 aa, Artificial Sequence; identical to SEQ ID NO: 10168
  Synthetic

SEQ ID NO: 10170 - protein, 179 aa, Artificial Sequence
  Synthetic
SEVEKLLDESRRVVEENRRANKKLAEESRKAVRRNREESKRLNEELREVVERARRKVTERDKDKDLLRRIIKELRDILERVAEDHRRLIEEHRKIADEVREKVKDLNRRHKEIMERVAREVKKEESLRRIKRTHEETEKESEKTLRDLEDEHRKTIEELERSLKELRDRIKKVLDELRK

SEQ ID NO: 10171 - protein, 179 aa, Artificial Sequence; identical to SEQ ID NO: 10170
  Synthetic

SEQ ID NO: 10172 - protein, 171 aa, Artificial Sequence
  Synthetic
DEVEEVLKKARKDIERWREETRKVKEENKRNIDRIRKKLEEVLRDLKRAIDEIRKSNLDREEVDRVLERLEEKLREMKRRLDENDKRDKERLKKKNKEMEEERRKIEKELEDAGARREVLEEIRKLLRDIKETDRKVHEELERSNEKLRREIEKILRDLEDELRKLRRERE

SEQ ID NO: 10173 - protein, 171 aa, Artificial Sequence; identical to SEQ ID NO: 10172
  Synthetic

SEQ ID NO: 10174 - protein, 171 aa, Artificial Sequence
  Synthetic
SEVEEVLRRAEKAIREWEEETRRAKEENEKNIKKVADDLRRLLEDARRTIEEIEKRRADEKTVEKVLTDLEKKVRDVAKRLKENNDEDRRRLEDINRKVEERLEKLRDELRKAGASEEVLKEIKKLIDTARRKDEKVHKELEDTNRDLDRAIEEVIREIKKLLDDLREKAR

SEQ ID NO: 10175 - protein, 171 aa, Artificial Sequence; identical to SEQ ID NO: 10174
  Synthetic

SEQ ID NO: 10176 - protein, 181 aa, Artificial Sequence
  Synthetic
SEKEDVLRRIKELLERLHEENREVLTRIEKLLKDNKERNDDVLRRITELLKEVTKRAKDRGKPRDDLERLIRELERTLKELAERVKKLDEDLKKTVDDLRREVERLNEELERMLRELTKLADRVGTEEVRKRVEDVVRKNKEVARELLDRVRKLSERNKRAIDKLLEEVKRVLEEVERALK

SEQ ID NO: 10177 - protein, 181 aa, Artificial Sequence; identical to SEQ ID NO: 10176
  Synthetic

SEQ ID NO: 10178 - protein, 171 aa, Artificial Sequence
  Synthetic
DEERDVRREIRKLLRDAEEHSKKLNEESKKTNKRNEEENRKALEDNKRLLKEVEDRIPKTKDLERIKRRNKELNERHKRTLERLKEESRRLNEKHKEDLKKLAEDVERLERAGLPVTELRERIKRLIEEIERLNREFKKKNEELSKKNKELVERSRTESKKLVDEARERAR

SEQ ID NO: 10179 - protein, 171 aa, Artificial Sequence; identical to SEQ ID NO: 10178
  Synthetic

SEQ ID NO: 10180 - protein, 178 aa, Artificial Sequence
  Synthetic
DSEEEVRKRVKDLSEENKRLVKTAEKRVRELSKENKELVERLKREVDRIKKEIEELKRRGTTEDADRELRERLEKLKRELEDLNRTLNRRATELEKEVKRLSDELRKRAEELEKKVRRENKVDEKVLREIREIVKKNKRENEEVLRRIRELVKENNDENKRVLDEIEKLLKEIEDESR

SEQ ID NO: 10181 - protein, 178 aa, Artificial Sequence; identical to SEQ ID NO: 10180
  Synthetic

SEQ ID NO: 10182 - protein, 185 aa, Artificial Sequence
  Synthetic
SEMDEVRKKLRELVERLKKEAERSRKSHREILKKVRDDLKRSEESHKELLDRLEEVLKRTVRDERKVREIRKELDEHHKRYREELKRLEEELRKHHEKYKEVLEDLKRRLDKLLRELEEVLKKKVSEDKLRRLLEEAAEVIKRLLDEVKRLNEHAKRMAEKILEDVKRLNKHAEDKVRDVEEKVK

SEQ ID NO: 10183 - protein, 185 aa, Artificial Sequence; identical to SEQ ID NO: 10182
  Synthetic

SEQ ID NO: 10184 - protein, 185 aa, Artificial Sequence
  Synthetic
RELEEVARRLERLLDELRKKLRESERSVRRLLEELKKELEKLRKRHEDLLRTVKKKLDDTVTDERKLEELTRRLEKHHREVKKRLEDLDRELEKLDEEYKRVLEKLERELEELRRRLEEVRKRNISEEELKRLLEEVEKAIRELLERVERLNRRLEEEIRRVLEDLERIIRHAEEDLRRIEEEVK

SEQ ID NO: 10185 - protein, 185 aa, Artificial Sequence; identical to SEQ ID NO: 10184
  Synthetic

SEQ ID NO: 10186 - protein, 185 aa, Artificial Sequence
  Synthetic
RELEEVKKKLEKLAKDLRDTLERSARSVEELIKRLEDELRRSEESHKELLERLEDTLRKRATDEEKVRRLKRRLEKHHEEYRRTLDRIRKELKRLRDEYERELRRIEKELEDLERRLEEVLKRNISEEELRKLLKDATEEVRRIAEEVKKLNDELRRAVEEVLKEVRETNKHVREMIETVREEVE

SEQ ID NO: 10187 - protein, 185 aa, Artificial Sequence; identical to SEQ ID NO: 10186
  Synthetic

SEQ ID NO: 10188 - protein, 185 aa, Artificial Sequence
  Synthetic
SELEEVAKRLKELVDDVRRALKESDDSHKELLKRLKEKLDEVRKRLKKLVDDLEETLKRTLRDEDKMRDIKRRLDEETERLKRKLEKIEKELRDHHKRYKETLDRLEEELERLLRELEKVLRKNISEEELERLVREVERVIRKLKEDVKRLNDHAREKVKRVEEELRREEKRVRDEVERVKEEVR

SEQ ID NO: 10189 - protein, 185 aa, Artificial Sequence; identical to SEQ ID NO: 10188
  Synthetic

SEQ ID NO: 10190 - protein, 185 aa, Artificial Sequence
  Synthetic
SELERVEDEARKLADDLRRMLEESRRSHEKILREVEEELKKSEESVRRILERVKEVLDRKLTDEETLRRLERRLAELLRRYEEELTRLREELRRHHEEYEKRLRELEERLRKLEEDLKRVLDKNISEDELRELLDRLRKAIKKLLDDVKRLNDHVKELIERIRDEVRRLNRRLEEEARDVERRVE

SEQ ID NO: 10191 - protein, 185 aa, Artificial Sequence; identical to SEQ ID NO: 10190
  Synthetic

SEQ ID NO: 10192 - protein, 185 aa, Artificial Sequence
  Synthetic
DELETVREEIERLARELEKELKKSEDSVEKLLRELKERLKEVRKRHKELLDRLRDRLRKTVKDKDKLEKLERELKKHHEDVDKLLRELEDKLRELRERYKRTLDKIREDLEKLKRDAEEVLKRNISEEELRRLVEDVKRVVDEVLERVKELNKRLEEAIRRILEELKKIEKNVKDFIEDIDRRVK

SEQ ID NO: 10193 - protein, 185 aa, Artificial Sequence; identical to SEQ ID NO: 10192
  Synthetic

SEQ ID NO: 10194 - protein, 185 aa, Artificial Sequence
  Synthetic
RELEEVKRRLEELLERLRKELERSDKSHKELAKKLRDELERVEREHERLLRELEDTLRKTLTDKKKADELRRELEKHHEEVKELLKKIEEDLRRHHKRYRERLKEIKERLEKLRRELDEVAKKNISEKELTDLLREAKRRVEEVLKEVRDLNRNVKETVDRVLKELEDILRNVEEMIKEIKDKVR

SEQ ID NO: 10195 - protein, 185 aa, Artificial Sequence; identical to SEQ ID NO: 10194
  Synthetic

SEQ ID NO: 10196 - protein, 172 aa, Artificial Sequence
  Synthetic
SDAEDILRKVEDLIRRLAEKHRDLLRRSKENAERIKREHDDHHRDIRRVIKEIEDNNLSEEEVKRLLDELKRKSEETHRRSRKNLEEDKRRVEKIHEDSRRDLERIERDVRKKIKDDRELLKTVRDLLETLREINDRVREELRKIHEDVERRNKEVLDRNKKLLEELERKRR

SEQ ID NO: 10197 - protein, 172 aa, Artificial Sequence; identical to SEQ ID NO: 10196
  Synthetic

SEQ ID NO: 10198 - protein, 181 aa, Artificial Sequence
  Synthetic
SELEDIERKLKELEDEDRELNRKLNDDTRRLDERNRRLNEELTKKLREVEEEAKELRKRDNDERTVEKIKDRLRRIADELRKELEKITKELEDMSERVKRELEKIRKRTEDVERELRREMEENRVDERVREKIERIAKKLEDDNKESEDRHRRINEENRRRNDKNREDIERILRRLDEELR

SEQ ID NO: 10199 - protein, 181 aa, Artificial Sequence; identical to SEQ ID NO: 10198
  Synthetic

SEQ ID NO: 10200 - protein, 181 aa, Artificial Sequence
  Synthetic
KELEEVDDEVRKEAEEVKRYIKESKEKLDRLRREDERLNDRVREKVEDVRRRVEERRSEDNDEETVRELLERLRREAEKLERELEEIKKKTEDMLRRLRKENREMERRLRERSRKLKEKAKKDRVDERVKRKVDKIERELEDAIRRANEEHTKIEEDLRRRNKESKDEIRRILEELEERTR

SEQ ID NO: 10201 - protein, 181 aa, Artificial Sequence; identical to SEQ ID NO: 10200
  Synthetic

SEQ ID NO: 10202 - protein, 181 aa, Artificial Sequence
  Synthetic
REIETVRREIEKILDDLRRTVKRIEDEVRKIHEDLRRSLEDSKRNIEEILKDLERAARRDNLDKKVEDDMRKLVEDLKRKHDKLRRDNERVTKELKDRLKKLEDDLRRAIEELRRRLDKGLDKKDIDKLLKELRDLVEKIKKDLKELLERYEEIVRRIKELLKDLNREAEEVVRRLKEELR

SEQ ID NO: 10203 - protein, 181 aa, Artificial Sequence; identical to SEQ ID NO: 10202
  Synthetic

SEQ ID NO: 10204 - protein, 182 aa, Artificial Sequence
  Synthetic
DEEERAEREIKKLLDDLRRTLEEVKEAIRRILEDNRRTTKRINDEDRKINDDLRRTLERRNISEDLERDVRRIHKENKELNEKLNEDNKRIMDEIEEKAKRLEDRIREIIKRIKKLLEEMRRDGLDVDKVLKEVEETIDRVKKDIRRALREVEETSKEDKKRLREVLERSKDLARRLKEKLK

SEQ ID NO: 10205 - protein, 182 aa, Artificial Sequence; identical to SEQ ID NO: 10204
  Synthetic

SEQ ID NO: 10206 - protein, 182 aa, Artificial Sequence
  Synthetic
SREEEAERRIEKLLRELEKTNRDIHEEIRKILERLRRTLKKVNDEDEKLNRDLEDTLRRRNVSEELADEARKLHEENRRVNERLNREVEEIIERIKRLVDELHKRTEEIKETIKRIVDEMRREGRPVEDVLRRVKEIIDRVKEEHKRMLEEVRKIAKDLEEKIRAVLEESKKLAEDIKRRLT

SEQ ID NO: 10207 - protein, 182 aa, Artificial Sequence; identical to SEQ ID NO: 10206
  Synthetic

SEQ ID NO: 10208 - protein, 182 aa, Artificial Sequence
  Synthetic
REEEKAEEDIRRILRDLKETNRRIHEEIKKLLDDNERTLRRINEEDKKLNEDLRRTLEESRADEELRRKVREVHERNRKKNEDLNRRNERIKEELKRKVDELHERTKEIMERIKRLIEEMKREGRPVEEVLKTVEDIVRKVKREHEELLKEIEDLSRENKKDNERMLEESRRLARKLKEELR

SEQ ID NO: 10209 - protein, 182 aa, Artificial Sequence; identical to SEQ ID NO: 10208
  Synthetic

SEQ ID NO: 10210 - protein, 182 aa, Artificial Sequence
  Synthetic
SEEEKMEEDIERLLDRLRRINKRLHDEHKKLNEDNERTVRRIDEEDKRINEDLERTLRESNVDEELKKELEEAHRRNRKLNEDLRRRNKRIHDENRKRVRELHERTKEIIERIRKLLEEARREGRDVRKVLEDVERIIRRLEEEHRRALEESRKRSEENKRENEEMLERSKELAERIKRRLK

SEQ ID NO: 10211 - protein, 182 aa, Artificial Sequence; identical to SEQ ID NO: 10210
  Synthetic

SEQ ID NO: 10212 - protein, 182 aa, Artificial Sequence
  Synthetic
SEEEKAREDIKRLLEDLRRTNKKIHEDIEDILRELKETLKRVNDDDKRINDDLDRTLKERNIDEELKKRVDEAHRRNRRKNEELDRRAKRLLEEIRRLVEELHRRTERIEREIKRLLDEMSREGRDVEEVLRTVEKIIEDVKKEHEDLLKRVKDIVKKIKEEIEKVLRESEKLAREIKEELR

SEQ ID NO: 10213 - protein, 182 aa, Artificial Sequence; identical to SEQ ID NO: 10212
  Synthetic

SEQ ID NO: 10214 - protein, 182 aa, Artificial Sequence
  Synthetic
SEEDELRKRVADILKRLREVNKRLHDEVKRLLKENRDALKEVKDKIRESNRELDEVLKRRRIDEDLERRAREINERDKKMLEELEKESRDLLKELEDILRELHKRVREIEKELEDTLRKVERDREPVEEVLERLKEIVRKAEEEHKDVLRRLKEISDRHKRRLEEAERRNEKLLRDLKEELR

SEQ ID NO: 10215 - protein, 182 aa, Artificial Sequence; identical to SEQ ID NO: 10214
  Synthetic

SEQ ID NO: 10216 - protein, 182 aa, Artificial Sequence
  Synthetic
SRLEEMLKRAEDLSRESEELLRRVLEEVKDLSRKHEEALREILKRVKDLVDTVRDLLRRGKADEKVLRRIKEELRKLKEEAKRISDELEDRLRKLKERIDEILERLERRYRKLKKEIEDELPETEEVRKLEEELKRLLEENRRLAKELRDELRRLTKRNKDVVREVERRLEEIMKEIDKEVR

SEQ ID NO: 10217 - protein, 182 aa, Artificial Sequence; identical to SEQ ID NO: 10216
  Synthetic

SEQ ID NO: 10218 - protein, 177 aa, Artificial Sequence
  Synthetic
SEDERIKKELRKVEREVDKLLKEHEKILEDLKREVDKLIETHRKILEELKRRVDELKRRGSDKRDFKRLKDENKEALDKTREDADKLRRDNERKLEETKRRARELEEKVKREKEELDREGSKERIRRELEEVLKDIRRKLKELKERNDKVNRDIEELLRELEERNTEVDKEIKKKAD

SEQ ID NO: 10219 - protein, 177 aa, Artificial Sequence; identical to SEQ ID NO: 10218
  Synthetic

SEQ ID NO: 10220 - protein, 171 aa, Artificial Sequence
  Synthetic
DEEKEAEDLIEEHRRRSEEIARRADKLSEDHKRKVDEIAKTVEKLIRTLKEIVDRKPPDDELRKILEDVRRRAEDLDREVRKTNEEMRRRLRKIEADVEREMRETERRVREKIKDNKELKDRVERVLEESRELLERLRKKLEDNSKEVEDILRKLRKEVEDVVRKIRKRAE

SEQ ID NO: 10221 - protein, 171 aa, Artificial Sequence; identical to SEQ ID NO: 10220
  Synthetic

SEQ ID NO: 10222 - protein, 171 aa, Artificial Sequence
  Synthetic
RDEDEVRKLITRHEKLSRDIAERLKRESKKHRDDVERIAKENEELNRRLREIVKKKPPDKELEDILREARERTERLKERVRKINRELKKRVKEIEDTVERLMDETREEVERKIERNKELKDDVRRVLKKSRDELKRLREELKRNSEEVERILKKLDEDNRRVLKEIRERLT

SEQ ID NO: 10223 - protein, 171 aa, Artificial Sequence; identical to SEQ ID NO: 10222
  Synthetic

SEQ ID NO: 10224 - protein, 180 aa, Artificial Sequence
  Synthetic
DKEREVRRRVEELKKDSEDVLRRNREEVEKLHDENRKVNEESDRTAKELVEEAERMLREARKKIPEELLRRVREILKKLEDEVRRVKKTNEDEDEKLKREVEKVEEEHERKLRELDEEVKRRKKTEELLKELKKELDRLREENERSNRRLRKMLEELKRKNEEVNRELRKKLREIKERLR

SEQ ID NO: 10225 - protein, 180 aa, Artificial Sequence; identical to SEQ ID NO: 10224
  Synthetic

SEQ ID NO: 10226 - protein, 178 aa, Artificial Sequence
  Synthetic
SEEERLERTVEEVEKALKKLADDLRRDMDRSRKSHEDLLDKLRKELDRVLEEIRKKTTPEEDAKRLLERVEREIRRIKEELRRHHEEYKKRLEDIEKELKDLEDEMRRRLKELRDRIRREGVTEEVEKRLRELLDEARREVERILKDLRELNEHVRRRVDEVRRRLEELLERLDRETR

SEQ ID NO: 10227 - protein, 178 aa, Artificial Sequence; identical to SEQ ID NO: 10226
  Synthetic

SEQ ID NO: 10228 - protein, 174 aa, Artificial Sequence
  Synthetic
DEKREVEKELKRVDDEIKRLLRELEEALRRDKEEVDRLDKEVKDALDEVRERIERAGLDKELLERAEKALRENEDRHREAAKKYEKALRELKKRVDDEAERLERALRKIREDLDKTDVGEKVKEDLKRLLEEVEKAVRKVVEDSKRLHDEAKEAVDRNKEHLRRLLEDAKRRAK

SEQ ID NO: 10229 - protein, 174 aa, Artificial Sequence; identical to SEQ ID NO: 10228
  Synthetic

SEQ ID NO: 10230 - protein, 175 aa, Artificial Sequence
  Synthetic
SEKERAEEEIERSKRNLERLLEEAKREIDRSRENLKRTLTKVEEVLRKIKEDLKRLNVREDLVKKIDELLKDLERKLRELKKKAEDLHEEVDRALKELVRRARELHKRVEERIEEEKKAVEKLIRELRELNKRLAEEIKRLIDELRKLNKELDDEVEKIIRRAEDLLRDLERETR

SEQ ID NO: 10231 - protein, 175 aa, Artificial Sequence; identical to SEQ ID NO: 10230
  Synthetic

SEQ ID NO: 10232 - protein, 179 aa, Artificial Sequence
  Synthetic
SEVEKVIRDLEEINKRLLEEIKRSIEENKRTNEEAERKVKEVIDRLRKLLEDLKRTNSKDDRVVEEVKRRLKRIDEELKKLLRDVERKDEENKRKLEELDRRVKEEHRKIEEDLRRANVDEDRLKRVEDVLRESVKNLKRLVDEVRKANRESNEHLKDLARKVEKVIREIEEEVDRTRT

SEQ ID NO: 10233 - protein, 179 aa, Artificial Sequence; identical to SEQ ID NO: 10232
  Synthetic

SEQ ID NO: 10234 - protein, 186 aa, Artificial Sequence
  Synthetic
SELERLVEELRRALEKHKRRLEELKKELKKALDDHRREVKRLIDELKKTLDDVRKASRIDDEEALKKIEEDLKKLLRDIKERLKESTRRMEELLRRVKKDIRESHERLRELLKKIEKELKDLKKDQDERLLEDVKRILDEVRREVEKLDTDADRRLREVKEEVERINREVEKTLRDVEEDLDRLKK

SEQ ID NO: 10235 - protein, 186 aa, Artificial Sequence; identical to SEQ ID NO: 10234
  Synthetic

SEQ ID NO: 10236 - protein, 186 aa, Artificial Sequence
  Synthetic
SEVEKLKEDLKRALDEHRKRLEELKKELEDVLRRHEEKVRRLKEKLKRILDEIRRLSRIRDEEALRKIVEDARRLLEEIERRMRESHKEVERLLKRVEDDIERSTRELRKLLEEIRDRLDKLRKDLDERLLEDLDRALDEVRKEVEKLNRDAKRTLDKVREDVKRLDDDLRRTLKRVKEEIDKLTK

SEQ ID NO: 10237 - protein, 186 aa, Artificial Sequence; identical to SEQ ID NO: 10236
  Synthetic

SEQ ID NO: 10238 - protein, 186 aa, Artificial Sequence
  Synthetic
DEIEELKKRLRKILEEHRKRVEDLKKENEDLNRRAEETLERLKRELEEMLREIAERSRIRDDKKLEELVDRARELLKRVRDELERLFKELEDRHRRIEEDLKRSTEELERLIREVEDELDKLRKDQDERILEDLKRVIERVEREVRRLNKDLKRALDESRKRIEDWLKELDDVIKRVKREVEKIRT

SEQ ID NO: 10239 - protein, 186 aa, Artificial Sequence; identical to SEQ ID NO: 10238
  Synthetic

SEQ ID NO: 10240 - protein, 186 aa, Artificial Sequence
  Synthetic
SEAEKLKKELEEVLERARRRLTELKEENKDANRRHRRRLEELKKRLEDVLKKVKDDADIRDEEMLERLREELERLLREVEEDIRESTKRLRDLHRRIREEIEKLREELEKRLKEVEEELDRLRKDLDERILRRLEEVIRRVDRDIKELIKDAREVLERSKRDVERWNREMKKVLDEVRKRVEEIRT

SEQ ID NO: 10241 - protein, 186 aa, Artificial Sequence; identical to SEQ ID NO: 10240
  Synthetic

SEQ ID NO: 10242 - protein, 174 aa, Artificial Sequence
  Synthetic
SEDEDAKRELRRVKEEVDKTLEDSKRVHDESRKRAREWLEDSKRVHREVKERLKELDVTEDLLRDIERLIKESEEKNKRIEEEYRKLLRESEKRNKENKERVEKILRELDDRLRKEGATEELKRELERVLEEHRRSLEKNKRDVERINEELKRRLDRNKEELRKILEDVERRRR

SEQ ID NO: 10243 - protein, 174 aa, Artificial Sequence; identical to SEQ ID NO: 10242
  Synthetic

SEQ ID NO: 10244 - protein, 174 aa, Artificial Sequence
  Synthetic
SEEERLRREVKRVEDENRKLLERLREIAERVHRENKRLLDESRRIADKVRRDLDRLPKTEELKKLIDDLRRSLEELERRNRKVDKEIKDRLKRVEEENRKVDKELKDRVKEFEDRKEPLEEVLEELERVLKRLEEEHRRVVKELRDLLRRIKEDHDRLVEEAEEILREIDERAK

SEQ ID NO: 10245 - protein, 174 aa, Artificial Sequence; identical to SEQ ID NO: 10244
  Synthetic

SEQ ID NO: 10246 - protein, 174 aa, Artificial Sequence
  Synthetic
SEEEEADKAIRTIAKAIEDLVRDLERALKESKRNIEELAKDLKRANDRIEEELEKANVPEETLRELRKRSEDSNREIEKALRELTKAHEDIEREIRRTLEELRRRLKELREEARKTRVDKELADRLRDLLRDAKRVVDRIKRALEELNKEAKKLVERAKKKHDDLLEDVKRDTK

SEQ ID NO: 10247 - protein, 174 aa, Artificial Sequence; identical to SEQ ID NO: 10246
  Synthetic

SEQ ID NO: 10248 - protein, 174 aa, Artificial Sequence
  Synthetic
SEEEDAKRVLDEIREELKKLNDDVRRALKESKENIDRIIEDLDRTNKRIEEELDRLNLDEEELRRLKEKSRTSNEELRRLLKELEDRHRENKRTHEEVEKELEKELRRLAREARETRVDEELKERLKRLLERVREEVKRNKEHLERLNKKVKEDVDRLKKRHKDTLDEVDERRK

SEQ ID NO: 10249 - protein, 174 aa, Artificial Sequence; identical to SEQ ID NO: 10248
  Synthetic

SEQ ID NO: 10250 - protein, 183 aa, Artificial Sequence
  Synthetic
KLDEDLEKVIKEVKERLKESLDRHKEVAKRLEEEVKRSEEEHRKVLEEAKRKLEEIKTKTRKDEEMKRVEEELDEIARRSEDILRRIREELKRIHEESERELRDVEREIDKRTEDLRRLRKDIDDRTVRKVERELRDLIRRLEKRNEELIRRVKEIVERMEKTNRDLIRRIRELIKKVEDDVR

SEQ ID NO: 10251 - protein, 183 aa, Artificial Sequence; identical to SEQ ID NO: 10250
  Synthetic

SEQ ID NO: 10252 - protein, 180 aa, Artificial Sequence
  Synthetic
SEEEKLKRVLDEFRRAVKELLEDLERANERAKDEVRRLLEDLDRAHERIRRAVEKLKERVKDKGPEKVLEELDRELKKLAEENEKSKEEVERTVRRVHEKNEKIKEDLRRTVERVEEEVRKTRPDKDLEKRIRDTLREIKKRVEDVKRDNKRVLDELRKKIEENKKRNEDVLKEMEDKTE

SEQ ID NO: 10253 - protein, 180 aa, Artificial Sequence; identical to SEQ ID NO: 10252
  Synthetic

SEQ ID NO: 10254 - protein, 185 aa, Artificial Sequence
  Synthetic
SDAERVKKESKDLLDTTKRLADRLKELLERLNKETRDRVREVIKEIERLVDEVEKEARKGLDEETKKRVIDKIRKTLEDIKRKLDKLLEEHKTENDRIKKEADELLKEHRDRLEELRRKLDERNLREDIRTDLEDVLRRNKEALEEIRKDIERVNRKDREELREIARTLEKVLRDARRRLEELRR

SEQ ID NO: 10255 - protein, 185 aa, Artificial Sequence; identical to SEQ ID NO: 10254
  Synthetic

SEQ ID NO: 10256 - protein, 181 aa, Artificial Sequence
  Synthetic
SIEDDLRRVLERSKRSLEELKRKADRVLEESKKNVRDLERELKRVLEKIKETIDKLRKDGRLDEKLKKEIEDLLREAKERVDRLKKELRDLHEEVKKALEDLERRARDTHRRLKERVDKGLDKEEVERLIRELDRVNEELAREVERLIRELEEVNRRVNEDLKRLIRELERALKELDERVR

SEQ ID NO: 10257 - protein, 181 aa, Artificial Sequence; identical to SEQ ID NO: 10256
  Synthetic

SEQ ID NO: 10258 - protein, 178 aa, Artificial Sequence
  Synthetic
DEVDELIKRLEERNEELNRKAKRIIEKLKKENDDLNRKLDEIVRKAREDIEDAERRVNDDKVIEEIKKLIEELRKRIEEELKKAKEAHERIEEEIKEALKRARELNKKLEEELRRRVRGKDLEDKLEEVLRRSKKNIEDVEKELRDVLRAAKKNLDDLRRKLEDVLRRLRDEIRRKKK

SEQ ID NO: 10259 - protein, 178 aa, Artificial Sequence; identical to SEQ ID NO: 10258
  Synthetic

SEQ ID NO: 10260 - protein, 178 aa, Artificial Sequence
  Synthetic
SDVDRIITELRDINREVNRRVKRLIEELEELNRRLNEKAKRDMDEIRRLIEEAAKKLRDDRKLEELEKRLEEIRKRLEEELEKAKRLNEELKKRLDDEARDVERKHKELEDELRRRVRGEDLKRKLEKVLKEARDNLEEVKKRLKEVLERSEENLRRLEEELRRVLEEVREMLKRKKD

SEQ ID NO: 10261 - protein, 178 aa, Artificial Sequence; identical to SEQ ID NO: 10260
  Synthetic

SEQ ID NO: 10262 - protein, 173 aa, Artificial Sequence
  Synthetic
KDEEKIKRVLDDVERVLKENEDRNRELLKRVRERLEESRDHLRRVLEDVKRVLEELKLDEKTAKELEDTIRRIADELRKILKRTEDELRKIEKKSREKLKRAREELRKLEKKSKDVDVDELVKRIKDLLKRLNEISRRIAEEIKELLRTHDELNERVVRKLRDLLRKAREKRR

SEQ ID NO: 10263 - protein, 173 aa, Artificial Sequence; identical to SEQ ID NO: 10262
  Synthetic

SEQ ID NO: 10264 - protein, 173 aa, Artificial Sequence
  Synthetic
SEEEKLKRVLEDVERDLRRNKRENEKSLEESKKVNDDNRRRNKEALDEVKKVLEDLNLPEDTLTDLEDKLRKIKRDSERENERHKEELDRSEEESRRTLKRAREKLEELRKTSKDKSDEELVDEIRKLLERLNEISERIHRRNKELDDELNEISKRIRERIEDLKRRAEERAR

SEQ ID NO: 10265 - protein, 173 aa, Artificial Sequence; identical to SEQ ID NO: 10264
  Synthetic

SEQ ID NO: 10266 - protein, 177 aa, Artificial Sequence
  Synthetic
SEEDEIRRLLKENEDSTRRVEEDNKRLNDENEKSTKRVEDDIRRILERVRRELDDLRRRGAVDEELDKEVERVEREIEETLKRLRERNEESKKRNEEKVKKMKEENKKTKDDIRDLKDRVRREEIEREVREDNKRLEELLERSEREVREDNKRLDEALKKIEKEARELVKRMREKAK

SEQ ID NO: 10267 - protein, 177 aa, Artificial Sequence; identical to SEQ ID NO: 10266
  Synthetic

SEQ ID NO: 10268 - protein, 177 aa, Artificial Sequence
  Synthetic
REEEEIRRLLKENEESTRKVEEDNKRLNDENRRSTEKVSRDLEDLNRDTRRVMEEAERRGAVDEDLKREVEEVERRNKELLKELRERNRESLERNRKKVEDLKRRNTETRERIKDLARRVRLEEIKREVEEDNERLKELLKRSEKEVREDNKRLRDVLEKSREEHERLKKRLEEAAK

SEQ ID NO: 10269 - protein, 177 aa, Artificial Sequence; identical to SEQ ID NO: 10268
  Synthetic

SEQ ID NO: 10270 - protein, 177 aa, Artificial Sequence
  Synthetic
SEEDEIRKLLEKNEKSTEDVERENERLNDENRKSTEDVKREIDRLLKELREVLDEARKKGAVDEDLDRRVKKIEEDIKRRKDELRKRNEESLERNKRKLDDLRRRNEESKRRIEDLKDRVRLDEIRKTVEEDDKRLKDALERSKREVDDDNRRLKKVLDEIRKTVRTMIEEIKKAEK

SEQ ID NO: 10271 - protein, 177 aa, Artificial Sequence; identical to SEQ ID NO: 10270
  Synthetic

SEQ ID NO: 10272 - protein, 181 aa, Artificial Sequence
  Synthetic
SEKEKADDLRRKSKESNDTLRKRLDELKKRSEKNNEELERRLRALLKRLEDVLREITKRTGRDTELDKLKDEARELLERLEKRARDLLKEHEDLKREVEEKARRLLKEHEDLERELERRVRKDGVTDELVKEVEDLNRELEEKVKRLIEEMEELNKRLNDKVKELIEEVERLIKELEDRVR

SEQ ID NO: 10273 - protein, 181 aa, Artificial Sequence; identical to SEQ ID NO: 10272
  Synthetic

SEQ ID NO: 10274 - protein, 185 aa, Artificial Sequence
  Synthetic
KDIDELIKRSEDLTRDLERKNKEVVDKIEELLREHEKTNREVVKELRRLLDEVRERVERRGRTREAKEELRRLRELLEEIVRRLEELLRRTRETLTRIKERLDELHEEYKRKLEEIKREVDRRPTSEDLERKVRKAEEDNKRAVERSKTHVDEVRKEVERVLRESKRHAEKLAEDVERMIRELER

SEQ ID NO: 10275 - protein, 185 aa, Artificial Sequence; identical to SEQ ID NO: 10274
  Synthetic

SEQ ID NO: 10276 - protein, 175 aa, Artificial Sequence
  Synthetic
STLEKLKKDLDDIDRDLERILDELRRRVERIDEELRKIVERLHRRNKEIIERLRKAKLPREELRKVAEKSRKELEEVKRELEDMHRRSREELERVRKRLEEVHKESKERIDEAIRRDGETREIREAEKKHKKVLDDLRRKLEEVEKRHREVEKELRDRLEESRREHEKVIREETE

SEQ ID NO: 10277 - protein, 175 aa, Artificial Sequence; identical to SEQ ID NO: 10276
  Synthetic

SEQ ID NO: 10278 - protein, 178 aa, Artificial Sequence
  Synthetic
RELEELEKEVRKRLKEAEERVRDLAKKSRDLNRELKDRLRRIVEENRDVNRKVKEKKDVDKEKLARELEDINRRTEDRFRRLDEELRRVNKDLKRRIRELVEELKEILKRLRDKVRRDKAGRDEDLRRVEEEIRRVIERLKRLLERVEEENRKSRKELRETLERLHRENEKSLREKET

SEQ ID NO: 10279 - protein, 178 aa, Artificial Sequence; identical to SEQ ID NO: 10278
  Synthetic

SEQ ID NO: 10280 - protein, 184 aa, Artificial Sequence
  Synthetic
SLKERLDRVEEKIRKVLEELDRSTSRVEKKVEEVLRELKRSNDEVRKEIKKVLDELRKRGLDEEMKRRLEEIAKELEKILRENEERIKRIADELKELLKRARDRHRRIAEELKKELRKIEKRNIDEKVVDEVAKRMTEELKKLDKENKEIEKEVDDILKRLKDEDKKTVDTLRKILKELDDDAR

SEQ ID NO: 10281 - protein, 184 aa, Artificial Sequence; identical to SEQ ID NO: 10280
  Synthetic

SEQ ID NO: 10282 - protein, 183 aa, Artificial Sequence
  Synthetic
SEIEEVEKEMDKLAEESNKLNEEALRRVRKLLRDSNELVRELERRVRELIKRAKDLKREGDKDEEKILEDLERSIKRLMDEARKLLEEYKRRLDELKKELDKLHEEYEREVERIIRKLEREPNSEEVRRKIKEIKDRSEENIKRSRDSVREIKKESDENIKRLKRELERIKKRLEEVLRDLKR

SEQ ID NO: 10283 - protein, 183 aa, Artificial Sequence; identical to SEQ ID NO: 10282
  Synthetic

SEQ ID NO: 10284 - protein, 179 aa, Artificial Sequence
  Synthetic
KDEEDLAREVKRVIDELEKLNEELNRAAEELIKRAEEINERVNRKVEKVERDLDKLKKRGELDDELLKEIKKRLEEEEKKAEDAHRKLREELKRALDTAREKNKEIEKRLEEVLKDAKDKTGESETLRKLRDDLRKALKKSEDNIEDVRRRLEEVLERARRNLERVRRRLEEVLRKLKE

SEQ ID NO: 10285 - protein, 179 aa, Artificial Sequence; identical to SEQ ID NO: 10284
  Synthetic

SEQ ID NO: 10286 - protein, 179 aa, Artificial Sequence
  Synthetic
SAAERLEKAVRDLIEELKRLNEELNKAVKEIIRRLRELNKKLNEDAERLIRKADELKRRGSSEEVLERLRREAERLAREADKLDRKVKRELEKLEEDIRKLNEEVRKKLRKLEEDARRENKVDKEILDKLREELKRALEESEENLRRLRRELTEVLRESRENLERLKEEVERVLKRLAD

SEQ ID NO: 10287 - protein, 179 aa, Artificial Sequence; identical to SEQ ID NO: 10286
  Synthetic

SEQ ID NO: 10288 - protein, 180 aa, Artificial Sequence
  Synthetic
SVVEDLEEKVKRLIERIERENRRLNKDADRLVRELDELNERLNRAIRRLIRKAEEARKRDLDEKDKRKTLKEIRDEIEELKRRAEEDHKRLEEAIKRLVEEARRANEDLRRKLKELEERAQGVEERELERLKRELEKVLRESEKNLEDLERKLKEVLDRSRENAKRLEDELREVLERLRK

SEQ ID NO: 10289 - protein, 180 aa, Artificial Sequence; identical to SEQ ID NO: 10288
  Synthetic

SEQ ID NO: 10290 - protein, 180 aa, Artificial Sequence
  Synthetic
SVVEDLAKKVEELIRRLEELNKELNKRVRDLIEKLRDINRKLKREVERLIEEAEEVRRRDLDEKDKRRVLRRLEEVLKDLVRRAKKVNRDVAEEMKKLVEDVKRSNEEVKKTLEKLKEDAKGVDKDELKKLEERAREVLRKSEENLKRVEDELREVLRESEETLKRLEEELRRVLDELRK

SEQ ID NO: 10291 - protein, 180 aa, Artificial Sequence; identical to SEQ ID NO: 10290
  Synthetic

SEQ ID NO: 10292 - protein, 178 aa, Artificial Sequence
  Synthetic
DEEKKAEDDIRRIHRRNEDLLRRHREITEEIEKRIRELLREHREITKRLERRLRELKKEGSDERVLDKIRKEMEKRLEDSERKLEKIEREARKTLEDTKRELKKSEEEAKKTIDDVRRKTGDTEELKRIKKRLDESLREVEEDLKRSEKRLRELLKRVKEDLDRSRKRLKEILDELRR

SEQ ID NO: 10293 - protein, 178 aa, Artificial Sequence; identical to SEQ ID NO: 10292
  Synthetic

SEQ ID NO: 10294 - protein, 178 aa, Artificial Sequence
  Synthetic
DEVRKLEEDVERLRREVEEENRRLEEEVERLRKEVKERNRELNERVKTLIETAKRLKEAGSSEDVLKKLEETVRKLNEDHKKLTKELEDRARALLEDHRRKLEELKERMDRLREDVRAKRLPEEMLRELEKRLKRLADETRRSNKELKERLERLKDESRDNNRELKERADRLLEKLKE

SEQ ID NO: 10295 - protein, 178 aa, Artificial Sequence; identical to SEQ ID NO: 10294
  Synthetic

SEQ ID NO: 10296 - protein, 175 aa, Artificial Sequence
  Synthetic
SEEEELRKLERRLEELMKEYKEALDKLREEHEKTLREYEKRVEDLEREHKKVLKKLVDDRGREDDKVRRYKEEVDRLKDHSRKAKETYEKKVRDLVRHSKEFLDELRRKVKELKDRLTDLDDLRRKVDKLRKEVEDHVRELEKKSRKLVEELKDHLRKLEEESRRLNRELEERSR

SEQ ID NO: 10297 - protein, 175 aa, Artificial Sequence; identical to SEQ ID NO: 10296
  Synthetic

SEQ ID NO: 10298 - protein, 175 aa, Artificial Sequence
  Synthetic
SKEDLRRELDRVNEESKKHLDKLRKEAEEVLERLDRANKKIIEDAEEILRRIEKKVRTREDERRKTEEDARRAKEDNDDANRRRKEDAKRRRDKEREDEKRDEDDKRRSDKESKDDTQTRERIKREIEENRKRNEEIARKIKEDIERARRDLERLRKKHEEELEKLKKRVEDADR

SEQ ID NO: 10299 - protein, 175 aa, Artificial Sequence; identical to SEQ ID NO: 10298
  Synthetic

SEQ ID NO: 10300 - protein, 178 aa, Artificial Sequence
  Synthetic
DEDRIRKELEKAHKETREESEKLNRDVERVLREVRKASKDLNDKFEEELRKLREKVERDLPPDDEERRDEEEAKKTRDEARREHEKTEEEARRLREEAERRHRRYTEKEKRIRDKIRKDGVDRDKVEEDLRRSRKELEDYARDLEDAIRRIEDRLRRYARKLEEDIKRLARKLEERER

SEQ ID NO: 10301 - protein, 178 aa, Artificial Sequence; identical to SEQ ID NO: 10300
  Synthetic

SEQ ID NO: 10302 - protein, 183 aa, Artificial Sequence
  Synthetic
SRTERVKEELKRLVEEYKKRSDDSRRRNEKLTRDYREDSRRVEEELKRIKEDVERELRRRDVERKEELKETEKRMKELEERLREEKKKSKEREDRLRKRNEEEDRRSEKETREIEKETRDRGLRDEEAKKDLKRVRDALDRLTKRNEEKDKENEDRLRKMLRENRERLKEVRERAKRIKEELK

SEQ ID NO: 10303 - protein, 183 aa, Artificial Sequence; identical to SEQ ID NO: 10302
  Synthetic

SEQ ID NO: 10304 - protein, 181 aa, Artificial Sequence
  Synthetic
KEKEEIRKALKELLDDLERTLERLKREYDKLRKDLEDTDERIAREHKKIADDLDRTLKEARKKLDERELDKLRKEVEEHNKRVKRRRDEIRKETEKNTKRNEDEERKKREELERKKRDLERKDSESERVLEEVKREVDRIKEELRRTLEENRRRIEEIKKRLEDILRESRERARELKEKLR

SEQ ID NO: 10305 - protein, 181 aa, Artificial Sequence; identical to SEQ ID NO: 10304
  Synthetic

SEQ ID NO: 10306 - protein, 172 aa, Artificial Sequence
  Synthetic
SEAETILRRVRRRVEEILDRIRRKLEESKREVEKHRRDVKKVLDDVRRTVKRIKERGRTEERVEKEVEKMMREIKKELDDRHRETKKRSEEFERDLKRTEERVREEEDDTRKKVPNREEVDTRLKEISKELEETLRRVTEEHKRLNRELEEVDRRAEKEVRKILKELRDTTK

SEQ ID NO: 10307 - protein, 172 aa, Artificial Sequence; identical to SEQ ID NO: 10306
  Synthetic

SEQ ID NO: 10308 - protein, 187 aa, Artificial Sequence
  Synthetic
SKEEELREVLRRIERELERVNEELREENKRIDKELEEVNRELEERNKRINDTVEDLVRERGDNSKEVEDEARDERRRNDEKNKKYKEEDDRNRKRNDDENKRYEEEVKENKRRLDEEEKEVEARGDVKREELRKIAEKLKKNLEEHKKRVREYLKRLEENLKRHRERVEKYARDLKRDLDRLRERLR

SEQ ID NO: 10309 - protein, 187 aa, Artificial Sequence; identical to SEQ ID NO: 10308
  Synthetic

SEQ ID NO: 10310 - protein, 187 aa, Artificial Sequence
  Synthetic
SEEEKLEKKAREIEEALRRVNEELKRRNKEIDERLEEVNRRLEKDLKKIEEDARKLVKDKGDTSEEDKRRLEEIRRELRKREKDYRDDAKRNRDENEEANRRYEKEAEDNDRELKKEEEETRRKGEVDEDELREIIERLERNLERHKRRVDKYLRDLEKNMRDHKRKVDEVVKTLEETLRRLEEEVR

SEQ ID NO: 10311 - protein, 187 aa, Artificial Sequence; identical to SEQ ID NO: 10310
  Synthetic

SEQ ID NO: 10312 - protein, 179 aa, Artificial Sequence
  Synthetic
SEEERLREKVKRVEDDLRRLNEEYKEKHKRSEERNKKLLKDLKEVHDRVKKAVEDILRDTPLEEEKLRTIREDLKRVHEENKEAEERIRKRHEELNEESRRDHKRHKEKLDRLKEEEEKSDRPEEEVEERIRRALKESREEIDRLERRNEEEDKKSEETVRRMMERNDRVLKEVEERAR

SEQ ID NO: 10313 - protein, 179 aa, Artificial Sequence; identical to SEQ ID NO: 10312
  Synthetic

SEQ ID NO: 10314 - protein, 179 aa, Artificial Sequence
  Synthetic
REEEELRRLVKTVEDEVEKLLRRYRDESEKVKRTLEELNKDLERKHKEVLDRIRDILRKVPLDEEKLRRLDKKLKDLHERNRDEHRKHEKETRDLDEDSKRAERETRKKLKEVRDKRRDSDRPREDVERELEETLRDVARKIERLLEKNKRDLDRSKKRVEEMVRRNEKALKDVEDEIR

SEQ ID NO: 10315 - protein, 179 aa, Artificial Sequence; identical to SEQ ID NO: 10314
  Synthetic

SEQ ID NO: 10316 - protein, 179 aa, Artificial Sequence
  Synthetic
SEREDLKRTVDEVKKRLEELIDDYRKTSEEVERRLEELLRRLREDHKRVAETIDDILRRVPLDEKKLTRLREELEELHERNKRKEEKIKKEIDDLREKSERDEKRIRDEIKKLEEEEKRSDRPTEEVKERIRRDLERVKRKIEELKKKNEEDLRRADKKVKDMLEENRRTLEKAKRKAD

SEQ ID NO: 10317 - protein, 179 aa, Artificial Sequence; identical to SEQ ID NO: 10316
  Synthetic

SEQ ID NO: 10318 - protein, 178 aa, Artificial Sequence
  Synthetic
SKEDEARKEIKRIEDEIERLRKELEDAHRKLREDLKRLRDENKKVLEDIKRRLKELEKDTDVREEDLRRLRKEVRELDEKSKEEEKRTEKRARDLHETNKRDDKRAEDETRKLKKEADDEPVDDRVRKKLEDELRRLKRTVDELKKRNEKALRDVKRDSERHKEELRRALRKAEEDAR

SEQ ID NO: 10319 - protein, 178 aa, Artificial Sequence; identical to SEQ ID NO: 10318
  Synthetic

SEQ ID NO: 10320 - protein, 186 aa, Artificial Sequence
  Synthetic
SLKEELDKAIRELKERHKRINEDLERVVRESRKNHEDINRRLKKLLEELEKRVEEIVRREQTDRDRTEEIKREEDKTRKSDKDKEKKSRDEKREYDRREEEDRRKSERDEERVDEEARDFERKNREEDRVIREIKKRLEDLLRRTEERAKEVKDENRKRNEDTREEVRRVEEELKELLRRIEERER

SEQ ID NO: 10321 - protein, 186 aa, Artificial Sequence; identical to SEQ ID NO: 10320
  Synthetic

SEQ ID NO: 10322 - protein, 181 aa, Artificial Sequence
  Synthetic
DEVREIIRELKERIDKIAKEIDDENREHRERLKEIAREVKELIKENRKELKRIADERKDRDRSELKKRVDELRDKNRRDNERTKERAKKIKDDNRERNERTDERVKRIRDETKKRKDDIDLEEEIRKRLDEATKRAEDELRKLKEKNKEVLKELDDRLRKLEDEHRRVREEVDKRLDELRK

SEQ ID NO: 10323 - protein, 181 aa, Artificial Sequence; identical to SEQ ID NO: 10322
  Synthetic

SEQ ID NO: 10324 - protein, 182 aa, Artificial Sequence
  Synthetic
DEREKIEKRIRELLKEDKEHTRRNEEKIRRLLDTNRRLLEEIAKKIEEIARELKERKKENRTRETKDRKRRETRKKIEDLREEIERLSRKAEKDTERLERENKDASRRNEERLRELEKRIRDKGLNLEEIRKLVEDYRREHEKLKRRNDELLERYRRAHEEIKKRIDELVERLEEILRKLAE

SEQ ID NO: 10325 - protein, 182 aa, Artificial Sequence; identical to SEQ ID NO: 10324
  Synthetic

SEQ ID NO: 10326 - protein, 182 aa, Artificial Sequence
  Synthetic
SEKETIEKRIRDKLKDDEDHTKRNEERIRRALKEDEDRLRKIEEEIRRTLEELEREKRSNRTREEKEERRRRREDRDRRRRERIKRESDKNKRREDERKKKNEEKSRRNDKERREERKDIKRRGLDAEDIERLEERYRREHERLKRRNEDLSREYEERHERLKREIDKLEEDLKRETERAAR

SEQ ID NO: 10327 - protein, 182 aa, Artificial Sequence; identical to SEQ ID NO: 10326
  Synthetic

SEQ ID NO: 10328 - protein, 182 aa, Artificial Sequence
  Synthetic
SEKEKIKKEIEDARREDEKHTEKNKRDIERDERRDEETLKEIEERIRRTLRELEKDRESNRTREEKKKKREETERRRRKLREDIERKKEENKKKEREREERNKEFNRENKRRAEERKRDIERRGLNAEDIERLEREYEKDHKRLKDENDDLTEKYRRRHREIDERIKDLERELDRRIKEIDR

SEQ ID NO: 10329 - protein, 182 aa, Artificial Sequence; identical to SEQ ID NO: 10328
  Synthetic

SEQ ID NO: 10330 - protein, 187 aa, Artificial Sequence
  Synthetic
DVRDRVRELRRRLEEETKKVDDENRKIHEELKRVADESRKNNERLNRELRKEIRRVEKDLGEVREEKRRRVKKTTDDTEKEDEDRNREYDREEKEVEERDRKKNKERKDRKEEVDRRTEEEERRRKPDEEALRRLEETLKEVKDELKTELDDSRREVEEVKRSNKEKNERSERRLKEVRDRLREERK

SEQ ID NO: 10331 - protein, 187 aa, Artificial Sequence; identical to SEQ ID NO: 10330
  Synthetic

SEQ ID NO: 10332 - protein, 183 aa, Artificial Sequence
  Synthetic
SLEDSAREIEKRLRDLHRRYREDHERIREDLERLKTEYEKAHRDIKRELDRLREELERANRVREKEKEDTKREEEERHREVEEDKKRKDEELRRAHEEVKKKEDENKERDDRFKEETKRSDRPEKEMLDRLEEHVDRNEKDIKKALDENRKRLDDIRRKIKKALDENREELKRIERRIRELKK

SEQ ID NO: 10333 - protein, 183 aa, Artificial Sequence; identical to SEQ ID NO: 10332
  Synthetic

SEQ ID NO: 10334 - protein, 180 aa, Artificial Sequence
  Synthetic
SAEETTEDLKRRLKELDEKVKEVLKRNEDRVRELEEDVRRNLKKNEDDAREVEERLKTSGGGDEEELRKRSEEYKKRMEEVKKRLEDESKKYKDEVRDVKRRLEEERKEVEDRTRTTDVKGEELLKEVEDRVREIIKRIEEKLKRLNDRTREFIERIRRELRKVNEETKKMIKELKEEED

SEQ ID NO: 10335 - protein, 180 aa, Artificial Sequence; identical to SEQ ID NO: 10334
  Synthetic

SEQ ID NO: 10336 - protein, 175 aa, Artificial Sequence
  Synthetic
SKAEKVLEKAREVVETIKRLVEEVLRHSEDVVRRITDLVRRLLEENERVVREIKRLADEGSRGESEVKKLSDDMRKRNRDVEREVRELSERDREELRKVKEEIKERLDRIREELERSEVDERVIKKIEDLLKKVDDEAKKMLEEVERLNKEVNDRLKRVLEEAERLHEEVNRRVK

SEQ ID NO: 10337 - protein, 175 aa, Artificial Sequence; identical to SEQ ID NO: 10336
  Synthetic

SEQ ID NO: 10338 - protein, 174 aa, Artificial Sequence
  Synthetic
KELEDVIEEVKKLLKTVNEESRRVAEEVRKLIREVSEELTEVIRRVERLVEEVATRVDRKEDLDRVRKRIEELVRRVEEVNRRSKRRIEELEDELRKVDEESRETIERLIDLLRRGLDLDTVLRRAEDIVRKNRKLAEEVLRRVKKIVEENRKIAKEVLDDVRKLVEDVLRRAT

SEQ ID NO: 10339 - protein, 174 aa, Artificial Sequence; identical to SEQ ID NO: 10338
  Synthetic

SEQ ID NO: 10340 - protein, 174 aa, Artificial Sequence
  Synthetic
EELERVIEEVRKLVEEAEKKSREVIKTVKELMDDVNRKSKKVLDDVRRLIEKVRREVTNEEELRKLTETIRKLIEDLKRMDEKSEDEIRRLVEELRRLNEKSKRDIERLIELLKRGLDADDALRRVKEIVERNEEVVKELLKRAEDIVRTNEKLVKDVLDTVRKLVKKVKDDED

SEQ ID NO: 10341 - protein, 174 aa, Artificial Sequence; identical to SEQ ID NO: 10340
  Synthetic

SEQ ID NO: 10342 - protein, 177 aa, Artificial Sequence
  Synthetic
SEAEDALRKAKRLADEDRKAAKRALEEAKKSAEEVKKAAKRALEEAKRIAEDVKRAADEGRDEEDARRILEEARRAIEELAKRLKKILDDNERETKRLAEELRKINEDTKREIERLEKDARGEEAAREAKKLAKDAADVSRKAAKDAKDLSKEAADVARKAAEDARRLAEEAARKAK

SEQ ID NO: 10343 - protein, 177 aa, Artificial Sequence; identical to SEQ ID NO: 10342
  Synthetic

SEQ ID NO: 10344 - protein, 182 aa, Artificial Sequence
  Synthetic
SDAEDVVRKVKRLVDELRRHSKELLKEVEDLVRDLVRHSEEVVKRVEDLVRRLEELVRRGDAREEVLRKVEEDVKRLNKEDKDRVEELRRRVKKLSEDNEKLLEEARERVTRLIEDLRRRSDTEEVRRVLREIREVLKKVAEDSRKVNEDIRRVLEEAKKTSDKVNTDSEEVLRTVARRFED

SEQ ID NO: 10345 - protein, 182 aa, Artificial Sequence; identical to SEQ ID NO: 10344
  Synthetic

SEQ ID NO: 10346 - protein, 182 aa, Artificial Sequence
  Synthetic
SRAERLLEDVRRLLEESLRNSERVLEEVRKLIEENLRHSRKVVDEVRRLLEEVLRVVERGDIRREDVKRAEKEVEDLNDENRRHSDDVRKTVEKLDEDNKKLLKEVKERVEKLIKDLKDEVDREDVRRVLEAIKEDLKRVEDANREINRRSEELLREAEKRSRDIDKESRDLVRKVKKDLEK

SEQ ID NO: 10347 - protein, 182 aa, Artificial Sequence; identical to SEQ ID NO: 10346
  Synthetic

SEQ ID NO: 10348 - protein, 182 aa, Artificial Sequence
  Synthetic
SRAEEVLKDVKRLVDENRRHSERVVEEVRKLVTENKRHSERVVEEVRRLVEELERARRRGDIREEDLERVKREVEKLNRDNKDHSRKLKRRVDELNKRDKEHSDDLKRRVERLLDELRKESDDKDVRKVLKDIREVLERVEEDSERVNRESKKVLDDVKKESDEADDESRRVLEEVDRKARK

SEQ ID NO: 10349 - protein, 182 aa, Artificial Sequence; identical to SEQ ID NO: 10348
  Synthetic

SEQ ID NO: 10350 - protein, 182 aa, Artificial Sequence
  Synthetic
DRVEELLKTVEKLVRDNEKHSRDVVKEVRRLAEENERHSERVVREVRRLVKELEDMKRRGDIREEELKDAERKVKELNKRNKEHSDDLRRRVEELNRDNRRHSEELEETVRRLLEELRKESDRREVREVLKRIEEILKDVKRKSEEVNRESERVLREVEKRSEDADRESKKVLDDVKEKARR

SEQ ID NO: 10351 - protein, 182 aa, Artificial Sequence; identical to SEQ ID NO: 10350
  Synthetic

SEQ ID NO: 10352 - protein, 177 aa, Artificial Sequence
  Synthetic
SEEEVLKEIDEVSRDLERKNKTINEEIKKVSDRVAEEVRRVLEDIKRTSKDAVDDVRTRGLDETDIERHRRTSKRLLDELRRLLEEHKRKSERISREDKKILDEHRKFSEEVRKLIKDGADLEKVVREVEESVKESEERSRRLLEEVRRSVKKLEEDVTRLLEENKKSVDDIKERAR

SEQ ID NO: 10353 - protein, 177 aa, Artificial Sequence; identical to SEQ ID NO: 10352
  Synthetic

SEQ ID NO: 10354 - protein, 177 aa, Artificial Sequence
  Synthetic
REEEVLEEIRRVVEEVRRENERINKEIRERSEDLRRKVKRILEKAKKVLDDVDERAKREGLDEKVIRDLRRRVEELLDRLRKRVEEHEKFSREISKRDRDIIEELKKTVERIEKLLKDGMDVDEVLKEVEDLVRESVRLSEDLLREVRESVERLVDEARKLVREIERLVKEAVDTVR

SEQ ID NO: 10355 - protein, 177 aa, Artificial Sequence; identical to SEQ ID NO: 10354
  Synthetic

SEQ ID NO: 10356 - protein, 177 aa, Artificial Sequence
  Synthetic
KEEEVLKEAEEVSRRAEEKNRRINDEVRRVVRRVEETVTRVLEDVERTSKEAKERVERAGLDRKDIRRHEELSKKLMEDLKELLRDARRKVTRLSEEDKEIIDRHRDKSRKIRKMIKDGSDLDTVVEEIKDSVRKSVERSRELLERVERIVTELEKRVDELVRENEDSVRRIDERVR

SEQ ID NO: 10357 - protein, 177 aa, Artificial Sequence; identical to SEQ ID NO: 10356
  Synthetic

SEQ ID NO: 10358 - protein, 178 aa, Artificial Sequence
  Synthetic
SEAEKIVEEAKRLADKARELAERSVRHSEKLARDSEKAAREAVKEAKDLADKARDLAAKRRDEDLLRKIKEDLERAARKIKRLLEELKKRHERDNRESKKLLDKIREDLERALEKAERRAKAKEALDTARKILRDAEEAAKEAHKEANRLNKEAEEAAKRAADEARKILKKAEEDARR

SEQ ID NO: 10359 - protein, 178 aa, Artificial Sequence; identical to SEQ ID NO: 10358
  Synthetic

SEQ ID NO: 10360 - protein, 184 aa, Artificial Sequence
  Synthetic
DDLEEIVKRVRRIVEEIRRLVEELVRRDKRIVDEIKRLLEEDKRKVDEIVKEIEEVVRRGGDDKDKLKRRVEELLKDVERHTEELRKEVERLLDESRKLNKEVRDTVEKLLEDVRREIETISREEEEVRRVLKEVKDILKTVRDEVEEANEDAKRLNEEVREEAERVLRDTKRILDEVRKEADK

SEQ ID NO: 10361 - protein, 184 aa, Artificial Sequence; identical to SEQ ID NO: 10360
  Synthetic

SEQ ID NO: 10362 - protein, 178 aa, Artificial Sequence
  Synthetic
REKEVLEEVRDIVRRASERSKEALDESREILKTVDDEVRRVLEDSRRLLEEVRKRVEDNNVDEDIRRRVKEVEDRIRESLERTKRTVDKVKEEIRKSLEDTKRANEEIVRRIEELIKRREGDAREIVERVRRLVDTSRRLVEEDVRRVREVVKELRKLLREDVKRVRDVVEELAKEAT

SEQ ID NO: 10363 - protein, 178 aa, Artificial Sequence; identical to SEQ ID NO: 10362
  Synthetic

SEQ ID NO: 10364 - protein, 176 aa, Artificial Sequence
  Synthetic
SEMEDAKRKIEDLVRRVKDSLRDAERRIREVVERVERSLKEVEDRSRELLEDVKREGDTEEVKKLVRESERLIDELRRRNEDIKRRIKELIDELRKRNDDIVRRIEKLIEDLKRSTDDESVRDAVREVEDLIRRLTEDNKRLVEEVKRLVDRASEENKKLNDTSKKVVDEIREREK

SEQ ID NO: 10365 - protein, 176 aa, Artificial Sequence; identical to SEQ ID NO: 10364
  Synthetic

SEQ ID NO: 10366 - protein, 176 aa, Artificial Sequence
  Synthetic
EELERVKEEIDKLVKEVRRSLKDVERRSAELLKEVEKSLEEVERESKKVLDEVRKAGQTEEVKKLVDRSKKLIDDLRDKNRKIVDTSRKLIEDLKRRNEEIEKEIRDRIRKLSRTTDDKAVKTLLEDVRRLVREATEDNKRVNDESRELVERASRDNRRVNKESRDIVRRLEERTK

SEQ ID NO: 10367 - protein, 176 aa, Artificial Sequence; identical to SEQ ID NO: 10366
  Synthetic

SEQ ID NO: 10368 - protein, 176 aa, Artificial Sequence
  Synthetic
SELEEVERRVEKVVKEVRDSLKKVKEDIEKVLRESHKRLRDVEREVRRVLEKVRRRGDTEEVRKLEKEIRELLDELRKKNEEIRKEIEELIKTVKRINEEIEKEIRKLLEDLKDSTDDKTVRDVLRRVRKLVEDATRANEKALDDVRKLVEKSRKLVEDVLERVRRLVKELEERTT

SEQ ID NO: 10369 - protein, 176 aa, Artificial Sequence; identical to SEQ ID NO: 10368
  Synthetic

SEQ ID NO: 10370 - protein, 186 aa, Artificial Sequence
  Synthetic
DEVEDVVRKVRDLVRRVREAVRRLLEENRDLVRKLIEDSERLVREVEKLIKEVEDTVKDRKDDEELTRILEELKRRVDKLVEDDKKINKEIDDESKRLVEELEELLREVRREVEELVEDLRRKGGEEREELERVIKEIKDVVREVTKVVEKVIREAEKLNEDVNRRSEEVNKRIKKLVEDVARRVE

SEQ ID NO: 10371 - protein, 186 aa, Artificial Sequence; identical to SEQ ID NO: 10370
  Synthetic

SEQ ID NO: 10372 - protein, 174 aa, Artificial Sequence
  Synthetic
DEAEEVKKLIDKVLREVEEVVRRVNKRDKDLLREVEKVVRDVNREDKRVLEEVERSGVSEEVVKELRKLSKETHDESRRLLKELKELSEKTHKESRDLLRTAEEIVRRLKKVLDDGGPVEEIVREIEKVAEDIMRRNEELVKESEDVVRKIVRDNERLAEDSKRVVEEAVRREK

SEQ ID NO: 10373 - protein, 174 aa, Artificial Sequence; identical to SEQ ID NO: 10372
  Synthetic

SEQ ID NO: 10374 - protein, 182 aa, Artificial Sequence
  Synthetic
SAIDRVRKTLEKLVERLERVLEESSKAVEDVKEKVERLLRELRERTKRIVDEVEDMVRKANKPDDEVRDRIRRVEKENEDLVREVEDIIRKLEEKNRRLNEEIRRLIEEIRRELKELADRGVDEEELDRLVKKVEDLVRRLEELARKSLKDIKKLLKDIEDRLRKSVEKSRRLAEEIKERLR

SEQ ID NO: 10375 - protein, 182 aa, Artificial Sequence; identical to SEQ ID NO: 10374
  Synthetic

SEQ ID NO: 10376 - protein, 179 aa, Artificial Sequence
  Synthetic
DKADEAVKRVKDLIDDLKRRIDEVVKRSREVVRDIEKHAEDVVKESRRVVDEIKKLVTRGDIREEDVRRLVKRLEELNRRHEERSRRLVEELKRLNDKLNEEVRRIKRRIEDLVRRLREEGVIREEVEERVREVLRRVEKRVKEVNEESERTIRELERVSRRVNEESRRSIEEAKRAAD

SEQ ID NO: 10377 - protein, 179 aa, Artificial Sequence; identical to SEQ ID NO: 10376
  Synthetic

SEQ ID NO: 10378 - protein, 181 aa, Artificial Sequence
  Synthetic
DAVERAKEESKRVLEDAERVVRRVEEEVRKMERKAEESLKDVRRKSEEVIRKVEEVVRRKGAPREDIKEVEDRNRKLIEDNERHLREVVRELRELLKRLRDELERMKRRNKKLLDELDRVESDKEVREVVEDSRRSVRRVEELVEKVVRDVKKLIEDHERRNRESVRESERSIKELEEKVR

SEQ ID NO: 10379 - protein, 181 aa, Artificial Sequence; identical to SEQ ID NO: 10378
  Synthetic

SEQ ID NO: 10380 - protein, 185 aa, Artificial Sequence
  Synthetic
DDLERVLREVKRLVEENEKKVRRIVEESRELVERNKELLRRVVEEVRRLVKEVRDILRNVRGDDELERVLRRVEEEIRRLLTDLRRSNKRVAEELKRLNEELERSNREVERRIRELEERLREKVRDEDKLREVRERIKRLLDRSHEAVRRASEKSKRSLEESHRAVREVEKRLKELLEDVREDVR

SEQ ID NO: 10381 - protein, 185 aa, Artificial Sequence; identical to SEQ ID NO: 10380
  Synthetic

SEQ ID NO: 10382 - protein, 185 aa, Artificial Sequence
  Synthetic
DRLEEVVERVERLVRENVKRLEKVAEENRELVERNKRRLEEIVRRVRELIERAKRIVRDNTGDEELREVLRRVADEIRRLLEELDRSNKEVAKRSKESIEDLRRSNKKVEEDIRRLLEKLRRDVRDEDKLRDVERRAKELLEESHRVIRTVEERSKTVLADSHRVIEDVRRRLEELLREVAEEVR

SEQ ID NO: 10383 - protein, 185 aa, Artificial Sequence; identical to SEQ ID NO: 10382
  Synthetic

SEQ ID NO: 10384 - protein, 181 aa, Artificial Sequence
  Synthetic
DEADEVVKEVEDRVRKLVRRLEESAKKSKELVERILKRVEDSVRRSEELVERIKREVERRRDEELKKRVKELLKKSTEDNDRLRKDVERLLRESNKENRDLVRDIERELEEIKRTLEDLRRRGKVTEKVEEMLRRVLEEVRRAVRKSSEDNKRSVEEVKRVLEKAEEDNRRVVEEVDRELK

SEQ ID NO: 10385 - protein, 181 aa, Artificial Sequence; identical to SEQ ID NO: 10384
  Synthetic

SEQ ID NO: 10386 - protein, 183 aa, Artificial Sequence
  Synthetic
SKLEEVEKMVRKVIEDSRRVNEEVNRRSEEVVRELEKVHREVNDASRRVVEKARRVLKEGEDERLRREVERIIEEIRELNERDRKRVEEIRKEIEDLNRDLNRRSKESEDRLRKLLEDATRNNVTKEADEVVERAERISEENKRRVEDVARKSKELVEDVRRHSEEVVRRVEELVKEVEERVR

SEQ ID NO: 10387 - protein, 183 aa, Artificial Sequence; identical to SEQ ID NO: 10386
  Synthetic

SEQ ID NO: 10388 - protein, 183 aa, Artificial Sequence
  Synthetic
SLLEDVKRTVREVVRESRRVHKEVNDDSRRVLKRSDEAHERVNRDSRRVIERIREVLSRGEEERLKKKVEDVEREIKKLNDEDRKTVEDSKRRIEELNKRDKEKVEDSERKLRRLLEEIERRNVTEEVRELAEDARRISEDNRRNSKRVVDRVREISKENEDNSRRVVDRVRKLAEEVEREVR

SEQ ID NO: 10389 - protein, 183 aa, Artificial Sequence; identical to SEQ ID NO: 10388
  Synthetic

SEQ ID NO: 10390 - protein, 183 aa, Artificial Sequence
  Synthetic
DDLERVKETVKKVIKRSRDSTKKVADTLREVVRESERVHREVNETSRRVEEEAKRVASRGDDERLKEDLKRVVDRIRKLNKEDKDRVDKSRRDIEKLLKDLEDKNRELEREMRKLLEEIERRNVTEEVDKLADRARRLVAKSEEDNKRVMKEVTDISKENEDNSRRVVDEVRKLVEEVRRRLE

SEQ ID NO: 10391 - protein, 183 aa, Artificial Sequence; identical to SEQ ID NO: 10390
  Synthetic

SEQ ID NO: 10392 - protein, 177 aa, Artificial Sequence
  Synthetic
DKVERVVEEIRDLMRRVEELIKKAADDNRKLVKEVEDLIRDAVRDSERLVAEVEKLLTKERSEDLVRTIRELLKRNHDRLRKLEEEIKEMLKRLNEETRTLVEKIERDLKRVEEKVERTGVSDEVRKEVKRVIKAVEKVIEDVERTSEEARRRVEKVIKEVEEKNREVIKRVEDRIR

SEQ ID NO: 10393 - protein, 177 aa, Artificial Sequence; identical to SEQ ID NO: 10392
  Synthetic

SEQ ID NO: 10394 - protein, 178 aa, Artificial Sequence
  Synthetic
SEADKLVEEVKDVVREDKRRVKEIVETVRELVRRSRETVRRIVETVEEVVRRLLELLRKGEPKEELEREARELLEELRERLERLHKRSKEVLKRLRDRLRKSLRETEELLRRIKEELEKRNLEEKVEEVLRRVKRESEKVIEDVERELKRVEDDDRRVIEEVKKRLKRVLERVRTESK

SEQ ID NO: 10395 - protein, 178 aa, Artificial Sequence; identical to SEQ ID NO: 10394
  Synthetic

SEQ ID NO: 10396 - protein, 178 aa, Artificial Sequence
  Synthetic
READELVDRVKKVVEEDKRLSKELVDEIERVVDELEKVSRELVERVRDLVRRLLEVAAKGEPREELLDRAKKVLDKNREDDKRLNDEARKVLDDNRKKDKKSNDDTKRTLDKIRKDLEDRNAEDKVEKVLKRVEEESREASERNERVIERVERRVDEASKRNEDEIDKVRKEVERVAT

SEQ ID NO: 10397 - protein, 178 aa, Artificial Sequence; identical to SEQ ID NO: 10396
  Synthetic

SEQ ID NO: 10398 - protein, 178 aa, Artificial Sequence
  Synthetic
EEVKELVERVRRVVDDLRKKLEKIVEEVRDVVRKDEERSRKLVEDVKDLVRKILEVLRKGEPREELKERVDRELKKNREDDKRSNEDTERLLREIKERLDRLLEDARRLLKEIEDEARKDNLDDDLRRVLKEVDEEVRKVIEDVARVLEEVKRRSDRASRENEEVIKRVTEEVKRVVK

SEQ ID NO: 10399 - protein, 178 aa, Artificial Sequence; identical to SEQ ID NO: 10398
  Synthetic

SEQ ID NO: 10400 - protein, 184 aa, Artificial Sequence
  Synthetic
DRVEKLVEEVKRHVTEVLKTVEDLARRIRDHVRKVEDTSRELVKEIKRLVEEILDRVRKKKDKRELLKELLDRLKKAVKKIRDTNRELNKSNEKLVRDIRDTLRKLTDSNRRLLEDIDKKLEEAPEDVVRELRRVLRESNEKLKEVVDRLRKVLEESTKRVEDASRRVERVLEKVEEDVKREAT

SEQ ID NO: 10401 - protein, 184 aa, Artificial Sequence; identical to SEQ ID NO: 10400
  Synthetic

SEQ ID NO: 10402 - protein, 184 aa, Artificial Sequence
  Synthetic
SEVEELKERIREIVERIEETVRRLAKRVEDHVREVEKDSKRLADEIRDFVRRITDEVRKKKDDKDRLDKLKKDLDRLLEEIRRRNEELNKSNEDLLREIKERLDKLREELKETVKEIEKKLKDVEKRLVDKLRKVLEEVREEVERVVRELEEVLRRSTKRVEDASRELERVLKEVKETLEREVR

SEQ ID NO: 10403 - protein, 184 aa, Artificial Sequence; identical to SEQ ID NO: 10402
  Synthetic

SEQ ID NO: 10404 - protein, 184 aa, Artificial Sequence
  Synthetic
DRVEALVDEVKRHVTELLKTAERLADEVREHVDDVRKKSKELVDEIRRVVEKILDEVRKKKDDKDRLKKLKEDLKRLVEEIRRTNKELNESNKKLLDRIRETAKKMEESNRRLLEEIEKKLKDAPEEVVRELRRVLRESNEELKKVVTELEERLKDSNEEVKKASAEVRKVLEEVRADVDREVK

SEQ ID NO: 10405 - protein, 184 aa, Artificial Sequence; identical to SEQ ID NO: 10404
  Synthetic

SEQ ID NO: 10406 - protein, 178 aa, Artificial Sequence
  Synthetic
SLVEKLRRVLEEVRRTSEKVIRDVKEVNKRSEDKTREIVRRLEEVNKESKERLDRAGVPEKLKKDLTDLIRKSEKLLRENEKRNRDLIRESERLIEKNKRDNDRLIKEVEDVIERKKDKKELAEKLAREVKRLVDESKKNMDKSVEDSRRLVRESEENVRKSVEDSRRLVKRAVEETK

SEQ ID NO: 10407 - protein, 178 aa, Artificial Sequence; identical to SEQ ID NO: 10406
  Synthetic

SEQ ID NO: 10408 - protein, 183 aa, Artificial Sequence
  Synthetic
RVDEDLRRVLKEVKERNEEVVRRSKEETDRVEEDIERVIRDSERVSEEVKRRVDKAKKDVDEEEARKLEKEMKDIIDEDKELLDRLREALERLKKEDEDLIEESERKTKELEREVKKLEDEGISEELAKEVVKRVRELVDRSRRLMTESVRKVRELVEDIRRRVRESVEKLRRLVEEIERRIR

SEQ ID NO: 10409 - protein, 183 aa, Artificial Sequence; identical to SEQ ID NO: 10408
  Synthetic

SEQ ID NO: 10410 - protein, 184 aa, Artificial Sequence
  Synthetic
KEVEKLVKDVERMVEESLKENERLVKKSDELVKESEKRNKELAERSRRLVKEITDRLAEERTEEVEKRIRELLKRSHEEVRRLVETDEKLLRDSHKEARDLVRTDERLAKRVREEVDKLAKKISDEDVLRDLRRVVEEVTEKIKEVNRRSEEANKRSKDRIEEVNRRSEKVNEDVEREIERALR

SEQ ID NO: 10411 - protein, 184 aa, Artificial Sequence; identical to SEQ ID NO: 10410
  Synthetic

SEQ ID NO: 10412 - protein, 184 aa, Artificial Sequence
  Synthetic
DELEKAVERVKDIVRKSLELLKRLADRVRDIVREILDEVRRNVEEVRRIVKEIVEEVRRRKDEEVRRKVEEVLKRVRESNEELERRVREKLRKVEEEVKRIKERSDKLLRDVERELEDVRRRLDDEEALKRLERVVREVAEESDRANKELDRVVEEVKERVERVLRESNKVVKEVEDRVREETR

SEQ ID NO: 10413 - protein, 184 aa, Artificial Sequence; identical to SEQ ID NO: 10412
  Synthetic

SEQ ID NO: 10414 - protein, 177 aa, Artificial Sequence
  Synthetic
SVKETVEEEVRRVSDEDRRINRDVERVSEESNRRLDKVHKELEEVVKEVLKELDDTGLQRDLVERVKEILKRLLDEDREKVKKVKREDEELLKRLREFSKRVNDTLKELLDRLRRSTDEETARRVVEEARRIVAESKELVKEVVRRSDELVRDVEKHSRDVAKTVRKIVTDVARRTR

SEQ ID NO: 10415 - protein, 177 aa, Artificial Sequence; identical to SEQ ID NO: 10414
  Synthetic

SEQ ID NO: 10416 - protein, 181 aa, Artificial Sequence
  Synthetic
SAEETLEKVIRDVEEEDKKAHEDSRRVIETVKEEIDRVHKDSKRKIDEVKERIRREVRDEETMKKVEEELEKLLKEDRDIIKEIKERLDELLKDDKRISDESRKRLKELLDRLREVSRRENLEERVRRIVKEVREIVKRSKERSDEIVKEVKRIVKEALDLSREIVERVERIVREVVERAR

SEQ ID NO: 10417 - protein, 181 aa, Artificial Sequence; identical to SEQ ID NO: 10416
  Synthetic

SEQ ID NO: 10418 - protein, 181 aa, Artificial Sequence
  Synthetic
EADERLRKRLKEVNERDKKAHEDSKRAIDRVREEDKRVLDTVREEIKRVKDEIRRALRDEEMVKKVEEELDRLLRELERLSEKSDKDLRELLETDRRISEESHRRSRELIRRVEEVSREPELERLVREVVRENEELVTRSEELSRRIVEEVKRIVDESRKRAKEIVDEVRKRVKELVDTDK

SEQ ID NO: 10419 - protein, 181 aa, Artificial Sequence; identical to SEQ ID NO: 10418
  Synthetic

SEQ ID NO: 10420 - protein, 181 aa, Artificial Sequence
  Synthetic
DVREKLEKVLREVERRVEKASRESKETLDRVRKRLKDVSDESKRELERVKKRVDDADKRREELRRIVEEAEKKLRELLKRDKDSNDELEKRLRDLLEKDKESLKELEKRLRDLKRRADEIDDKKVIEELVEEVRRLVTEHERLSRELVDRVEKLVARHEELSKKLVTDAERIVKEVEERAK

SEQ ID NO: 10421 - protein, 181 aa, Artificial Sequence; identical to SEQ ID NO: 10420
  Synthetic

SEQ ID NO: 10422 - protein, 181 aa, Artificial Sequence
  Synthetic
SALERLREVLERVLRRVKKVTDDARRVNERVNRKVDRVSEDSERELRRVLKRVREASKDREELRKIVKKVEEDLKRLLEEDRRSNKELRERSKKTLDDLRRSDKKLEDDLKRLKEEAERVDDEEVLRELVERAKKLVDDHLELVERLVRESEKLVEDHLRRSKKIVEDVKRIVEDVERRVK

SEQ ID NO: 10423 - protein, 181 aa, Artificial Sequence; identical to SEQ ID NO: 10422
  Synthetic

SEQ ID NO: 10424 - protein, 181 aa, Artificial Sequence
  Synthetic
DEVDKARKEVDRVVKESRKLVEKNVREVEEVVKTVEKLVEDVIRRVEDVVREVKELVTRGDGREERLTRIKEELRDLLRRLKETIDKLKEELERSNEELKRRLDDLNRKLKELLEDLSKRVDEELLDRVRKVVEDVSRKSKKALDESHEVVKRVKDRADEVLDKVRRAVEEVERRIETEAR

SEQ ID NO: 10425 - protein, 181 aa, Artificial Sequence; identical to SEQ ID NO: 10424
  Synthetic

SEQ ID NO: 10426 - protein, 181 aa, Artificial Sequence
  Synthetic
DEVEKAVKEVERVVREVKELVDRNIDEVRKVVEDSKRLIDELVEDAKRVVKRVKELRDRGDGREEELRDIIRRLRKKLKELAERLEKLNRDLEKSNRELKKRIDELKRRLDELLKDLAKRVEEELLDRVRRVVEEVKKEADRLLEESHRVVREVSERSKRALEEVKRVVDEVTERIKKDKD

SEQ ID NO: 10427 - protein, 181 aa, Artificial Sequence; identical to SEQ ID NO: 10426
  Synthetic

SEQ ID NO: 10428 - protein, 175 aa, Artificial Sequence
  Synthetic
STKEKLDDVLRRVEEKAREVVEDNRRADRDVHRKARKVVEELRRVDEEVHETVKRVDAKEELRRELKKLLEDSNRLTKEVEDRIEKLLRDSNRSTKENEKRIRELEKEMRDLAREGGRRVDEVVDRLRRLVEEVLRHSKKNSRESDEMVRRVTEEVREVVKESKERVDDVLKRVE

SEQ ID NO: 10429 - protein, 175 aa, Artificial Sequence; identical to SEQ ID NO: 10428
  Synthetic

SEQ ID NO: 10430 - protein, 181 aa, Artificial Sequence
  Synthetic
KKVEEIMERLRRVAKEIKERVDRLVEKNRKSAKDLLDTIEDIVRKNRDLAEKIKDLARRRRDEKLKREVEEILKELHDRNRKLLEDVRKKLRENEEETEELKKRIEDILRRVADEIRKIEEDGVDKEKLRRVLREVEEVVRRVKKKLDDSVRELREIIRRAERELREVDEEVRKVVEDVKR

SEQ ID NO: 10431 - protein, 181 aa, Artificial Sequence; identical to SEQ ID NO: 10430
  Synthetic

SEQ ID NO: 10432 - protein, 180 aa, Artificial Sequence
  Synthetic
RVREELKKVEEEVREVVRRAKEKTRRVLEEMRKVVKDVDDESKRVVDEVKKVLEEVRARGLDTEELKEIEERIKRKLEEINERNRDLLRRVERLVREDERRIDEILTEIKRTVDEIRDLTEEEVVKKVVDDIRKLAKDMDDHSKEVVDRIREVARRIEELNRELVRDLKDEVRRVKEKAK

SEQ ID NO: 10433 - protein, 180 aa, Artificial Sequence; identical to SEQ ID NO: 10432
  Synthetic

SEQ ID NO: 10434 - protein, 180 aa, Artificial Sequence
  Synthetic
SVRETLKTVEEEVKRVIDRARKRDERVVREVERVLRDAMRKDEDVNRDVERVLRDVVRRGLDTEKLKRIKEEIDKLSTENRKRIEDLLREIRKLSEESDRRLKEVEKEIRERVEEIRRRTDKDVFKRVVEELRRLVKRVEELVTRTVEEIDRIAKEVTRHSEETVRRLKKLVKTVTDEAN

SEQ ID NO: 10435 - protein, 180 aa, Artificial Sequence; identical to SEQ ID NO: 10434
  Synthetic

SEQ ID NO: 10436 - protein, 185 aa, Artificial Sequence
  Synthetic
SSVREVVKEARDIAKENLERVKKTVKENRDLARKVAEDVKKSVEELRKLAEDVEEIARKATGDEDLERVLREVEERIEDLHRRSEEIAREVRKRSRESHERTKEITTDSRRRIEELLKKVKDEGVEEELEKELRTVVREVEEVLRRSEEDDRRVHKEAEDVIKKVEEDDKEVVDRVKKVIRDVRT

SEQ ID NO: 10437 - protein, 185 aa, Artificial Sequence; identical to SEQ ID NO: 10436
  Synthetic

SEQ ID NO: 10438 - protein, 185 aa, Artificial Sequence
  Synthetic
SEVEKIVKEAEDLVREVKRRVEDTVRKNRELADRVRKEVDKSVRELRELVKRVLDIAKDLTGDEELERVLRTVRERIKELHERSKKIIEDVRRKSEDSHRKTKKIADDVRRKLDKLRRDIERRGVSEELRRELERVIKKVEEVIRKAEEDDRTVHRELNKIIKDVEDKDRTVVEEVERVIEEAER

SEQ ID NO: 10439 - protein, 185 aa, Artificial Sequence; identical to SEQ ID NO: 10438
  Synthetic

SEQ ID NO: 10440 - protein, 185 aa, Artificial Sequence
  Synthetic
SEVDEVVERARRIAKENLDRVKKIVRENRELVEKVRKDVEDSVRTLKKLVDDVTEIARKLTGDEELKRVLDEARERIKRLHDESKKIAEEVRKRSRDSHETLRKITDDSRREIERLLRKVEEDGVSDDMRRKLETVVKEVEDILRRSREEIRTVNEEVEKVIEEAEREDERVVREVEEVIKRVEK

SEQ ID NO: 10441 - protein, 185 aa, Artificial Sequence; identical to SEQ ID NO: 10440
  Synthetic

SEQ ID NO: 10442 - protein, 185 aa, Artificial Sequence
  Synthetic
SSVEDVVRKMRKIVEDNKREVEKIVRENRKMAKDNEDLVKESVKDLKRLAKELEDLAKDDTGDETLERIAREVRKRVEELHRRSKEITDRTEERSRRSKRRLDEITKESRREIERLREEVEREGVSEDLERTLRTVVKEVKEVLDRSRDLVRRVNEEVKRVLDRSREEDERVVREVEEVIRRVET

SEQ ID NO: 10443 - protein, 185 aa, Artificial Sequence; identical to SEQ ID NO: 10442
  Synthetic

SEQ ID NO: 10444 - protein, 185 aa, Artificial Sequence
  Synthetic
REVDEIVDRLRRIAKENKDRVRELVERNRKLAEEVRRRVEESVKRLRDLVRTIEELARRETGDKRLEDIVRDLREKLRRLHETSKRILEELEERSRRSNDELREITERSKKRVDDLLEDLKRKGVEEDLERKIREVVREAEEVLRESKREMDTVNKEVREVIEDVRKRDEDVIREVEKVIREVEQ

SEQ ID NO: 10445 - protein, 185 aa, Artificial Sequence; identical to SEQ ID NO: 10444
  Synthetic

SEQ ID NO: 10446 - protein, 185 aa, Artificial Sequence
  Synthetic
SEVDEIVKEIREIARKNKEDVRRTVEDLRRLVKEVEKRVEDSVRTMRDLVRRLEETARRVTGDEELTKVIEDVRRKIEELHRRSKKILDEVREKIEELHRRTKKITEESRERLKKLEKDIRDRGVSEELERKLKTVIDEAEKVLRESEEDDRRVVEEVERVIKKVEEEDRKAVREVEKVLEDVRK

SEQ ID NO: 10447 - protein, 185 aa, Artificial Sequence; identical to SEQ ID NO: 10446
  Synthetic

SEQ ID NO: 10448 - protein, 181 aa, Artificial Sequence
  Synthetic
REVDELLKRIKEVADDIKRLSDENVKEIEKLAREVEKLVRDVVRENEEVAKEIEDLARRRKDEDVERRAEELLERVHRANEEIKKRIEELLRRVNERSKEIVRRIEDLLRRVAEEIKRAEEAGVDKKKLRDVLRELEKVVRDVAKEDEDANRRLKEVAERVKREIDEVDKKLKKVLDDVRK

SEQ ID NO: 10449 - protein, 181 aa, Artificial Sequence; identical to SEQ ID NO: 10448
  Synthetic

SEQ ID NO: 10450 - protein, 179 aa, Artificial Sequence
  Synthetic
REEEKLRKVLEDAKKVSKEVNEEDDRVNKEVEDVLREVKKEIDEVLKRATETVERVKRENKDSEELKKTIDDIRRKIKKEIDDVKREIDELLKDARRHSKEVKDEDKRINDEIREILRRRELPVDEIVKRIKELVDRSRKLSEENVRRLKKIVKRVKERVKELLDRIKEMAKEIEDRVR

SEQ ID NO: 10451 - protein, 179 aa, Artificial Sequence; identical to SEQ ID NO: 10450
  Synthetic

SEQ ID NO: 10452 - protein, 179 aa, Artificial Sequence
  Synthetic
DEEKKLKEVLDRATKVVKDVAEELDRVLEDVERVSRDVNRRDEKVNRDADRVLREVKDENKDSEKLKREIDEIKKDVERHSREVSEEDRRINKEIREKLRTVKEILEDLRRKIEETLRRKELPVEEIVRRIEEVAKTLREIVRRVLEELKEVVKESERLSRENVRRIEKLAEEIRRRVK

SEQ ID NO: 10453 - protein, 179 aa, Artificial Sequence; identical to SEQ ID NO: 10452
  Synthetic

SEQ ID NO: 10454 - protein, 179 aa, Artificial Sequence
  Synthetic
DEDEKLRKVLEELRRVVEEVKRRSDKALEDAERVLRRVKKEDRDANKKAEDELRRVIDENKESEELIREIERLLKEVREHSKEVEDRIDELLKRIEEHSRKVKKDIERLLEEIDREVKRKERPVDEILKRIEELMKEIRKLVKEDVDRIRDLVRRIDEESKENVKEIERVADEIRERIR

SEQ ID NO: 10455 - protein, 179 aa, Artificial Sequence; identical to SEQ ID NO: 10454
  Synthetic

SEQ ID NO: 10456 - protein, 180 aa, Artificial Sequence
  Synthetic
KEVEDVLREVEKVVEKIKRDVEKIVKDSKELAKRVEELVKESEDRSKEIVDRVEKLRREGTKDVERIIDRLLEDDKRLSDKTKEDLDRIAREDEKLLDELRRRIDEILKRLEELVKELRRAGAEEEKVEKVLRKVRDVVRRVKEKVEEVHRRSREMLKRVEDRDREAHERSRKVAEDVKR

SEQ ID NO: 10457 - protein, 180 aa, Artificial Sequence; identical to SEQ ID NO: 10456
  Synthetic

SEQ ID NO: 10458 - protein, 180 aa, Artificial Sequence
  Synthetic
SEVDEVLETIERIVREVKKLVKRSVEESERLVDEVEKLVEKSVREIKEIVDRIRDMKTKGGKDLEKLLDTMLEKVERLSRKTETEIEKIERDDRELSERTKRELEKLRETVKRLVDELRRAGAEREKVERVLEEARRVIEEVEREDDDAHRKSKEVLKRVLEKDRKALEDAKKVVEEVKR

SEQ ID NO: 10459 - protein, 180 aa, Artificial Sequence; identical to SEQ ID NO: 10458
  Synthetic

SEQ ID NO: 10460 - protein, 183 aa, Artificial Sequence
  Synthetic
KEVEDLERRNKELVERVDKLSRENVERNKKLAKELKEISEENVRRNRKLAEELKEVADRGDSRLEELIRRIEEESKDSDRKSEELLRRIKKESEESDRESKDTLEKILRTSEELLRDMERKGLDEDLRRRVKKSHDEVERELRRVDREDETSHEELRRVLEKVKREDRKSHEEVKRRLDEVRR

SEQ ID NO: 10461 - protein, 183 aa, Artificial Sequence; identical to SEQ ID NO: 10460
  Synthetic

SEQ ID NO: 10462 - protein, 183 aa, Artificial Sequence
  Synthetic
SEVDEIVKRNDDLAKEVKRLSTENVKRNKELADRVKRLSTENVKTNEKLAKDLERVVRRGVSRLKDLIRKIETDSRKSDEESERRLREIEKESRRSDEESRKRLKEILDRSKKLLEELERRNLDERLRRKVEKSHRDLREVLERVRREDERSHEEANKVLEDVKREDEKSHRDVKKRLDDVRR

SEQ ID NO: 10463 - protein, 183 aa, Artificial Sequence; identical to SEQ ID NO: 10462
  Synthetic

SEQ ID NO: 10464 - protein, 183 aa, Artificial Sequence
  Synthetic
SEVDRLLEKLEELVRKVRRDVEENVKKNDELAKEVERLSKRNVERNEELAKEIEDLARRGDSRLEDLIKEIEKESRDSDRRSKEELRRIKEESKRSDDESEKKLKEIEDEVRKLLKDADDRGLSEELKEKVKRVMEKVKRVLDRVREEDEKSHRKADRVLREVEKRDRDSHERLRKVLDDVRR

SEQ ID NO: 10465 - protein, 183 aa, Artificial Sequence; identical to SEQ ID NO: 10464
  Synthetic

SEQ ID NO: 10466 - protein, 183 aa, Artificial Sequence
  Synthetic
DEVREIVERNERLAREDKKIAEENVRRNEDLVRRLRELSRKNVEDNRRLAKELEEVAARGDSRLDELIEEIERRSEESDRESRKRLDEIREESERSDRRSKEESDKINEDSKKLLEEADRRGLSEELKKRVKDSHDKLREVSKRSEELDRKSHEDLKEVLKEVRERDDRSHEELRRVLEEVKR

SEQ ID NO: 10467 - protein, 183 aa, Artificial Sequence; identical to SEQ ID NO: 10466
  Synthetic

SEQ ID NO: 10468 - protein, 183 aa, Artificial Sequence
  Synthetic
DEVERILERIDELVKRVKELSRRNVERNKELVERVDRLVKDNVDRNRRLAEEVDRLKKEGDSRLKDLIREIERESRESDKRSEELLKRIEDESRESDRDSERKLKEIDDEVEELLKRARERGLEEELTKKVEKVVKDAKKTLEEVKREDEDSHKKANDVLRRVRELDKRSHDELKRVLDEVER

SEQ ID NO: 10469 - protein, 183 aa, Artificial Sequence; identical to SEQ ID NO: 10468
  Synthetic

SEQ ID NO: 10470 - protein, 183 aa, Artificial Sequence
  Synthetic
SEVEDVLKKLDDIAKEVTERVKRVLDRNEEIVDEVEKLVEEVVRRNKEIVKEVKRLKDEGLSRLDEALDRVKKESKKSHDTAKDVLDKVRRKDEESRREVEKRLRELEKKLKDLLDEVRKRGINGDLEREVRRVIREVEKVIDDVRREVERSIRKSEKDIREVEKRVEDVNREVEEAIRRVRT

SEQ ID NO: 10471 - protein, 183 aa, Artificial Sequence; identical to SEQ ID NO: 10470
  Synthetic

SEQ ID NO: 10472 - protein, 184 aa, Artificial Sequence
  Synthetic
REVEELVKKLKELAERSLTAVERIVEENERLLKRLEDESKRNVDDIERLARELLRRVEEEKTKEVKDTARELVERLKRHSERLIKEIRRLLEELNRKNRKLVEDSNRKTDEVRKEVEDLRQKIDDERVERILTKVIEDLERVDKAAHDILREVNERLREVMERVEKTNRTVNRRLEEVLKEIER

SEQ ID NO: 10473 - protein, 184 aa, Artificial Sequence; identical to SEQ ID NO: 10472
  Synthetic

SEQ ID NO: 10474 - protein, 185 aa, Artificial Sequence
  Synthetic
DEVEEIAREMREIVDRVLKLSEKTVRENRESVERLLRLSEETVRRIRDLVRRLEELARDDTGDKDLKKVLDEIRKRVEELLERSKRVSDENRERSERSLRESERIIKELKERVDELVERLERRGTSEEMKEKVERAVEEVKRVLDRVRETDKRVNEEVRKVNEEAERIDEKVVREAREVLKRVRD

SEQ ID NO: 10475 - protein, 185 aa, Artificial Sequence; identical to SEQ ID NO: 10474
  Synthetic

SEQ ID NO: 10476 - protein, 185 aa, Artificial Sequence
  Synthetic
RVAERLEDVLRELDRTLKDVARKLEEANRDNKRVLEEVAEILKRVLDDLRRVLDEVAKRLKDEEKLRELKKRAEELERDIERLLREAEKSSREDSKRSKKLLDELERRVRELKKKIKKLLDDKKNVEKVVDDIVKEVRELAERIKEVVTESVKHSKKNVDEMRKLVDDVVKKVKKLVEDVRREIK

SEQ ID NO: 10477 - protein, 185 aa, Artificial Sequence; identical to SEQ ID NO: 10476
  Synthetic

SEQ ID NO: 10478 - protein, 185 aa, Artificial Sequence
  Synthetic
SVAEKLRKVLEELRDVLRRVKEISRRSLERLKKVLKELADRLKELNDKLRKTLEELRKDVDDKDLLADITRKAKELSDRSRKLLEDAEKEVRDAAEKNRRLDTELEKAARDLEKKVRELLKDKKDVEELVEEIVKEIKKLAKEVAETVDKVAKENEKLAKEAKEKVEESERDVERLLEELKREAD

SEQ ID NO: 10479 - protein, 185 aa, Artificial Sequence; identical to SEQ ID NO: 10478
  Synthetic

SEQ ID NO: 10480 - protein, 175 aa, Artificial Sequence
  Synthetic
DEEKILEDVLRELKKVLDEVRKTNEDANKRLKDVDDKSHEILKRVEERLREVVKRVNVDSEKFKRIKKLVEDAKRELKEIVDDSNRKTKKVNEESRRDIRRLEELVRTVEEELRRRDVRVEDVVRRVRKVAEDVRRSSEETVKRIEDVVRRSEETVRELVKRVEDLVREMEEEAK

SEQ ID NO: 10481 - protein, 175 aa, Artificial Sequence; identical to SEQ ID NO: 10480
  Synthetic

SEQ ID NO: 10482 - protein, 175 aa, Artificial Sequence
  Synthetic
SDEEKLRKVERELEEADKESHEINRTVNEDLRRVDRESKEILDRVRKELEEVKDKINVDSDKMRKVEELVRRLEKELERIREESNRLTKKVNEESRRDLEESNKLTDEVREELKRREVRVEDLVRRVRKVAEDSRRSSEDTVRRVERVVRESKRLVDDLVRRARRVVEEIKRTAK

SEQ ID NO: 10483 - protein, 175 aa, Artificial Sequence; identical to SEQ ID NO: 10482
  Synthetic

SEQ ID NO: 10484 - protein, 175 aa, Artificial Sequence
  Synthetic
KEDEILKTVVDELRDALREVEERNRTVNEELRRADKESEDRLRKVVRELTEVMKRVNVDSRKMEEIKKLVKEVRERLKKILEESNKLTEDVNRESREDIERLRKLARDVEDELRRRTVPVEELVRRVREVVKRVRDSSRETVERVKRVVERSRRLVERLVRKVEEVVREVEERAR

SEQ ID NO: 10485 - protein, 175 aa, Artificial Sequence; identical to SEQ ID NO: 10484
  Synthetic

SEQ ID NO: 10486 - protein, 183 aa, Artificial Sequence
  Synthetic
SDVDRFLREVERLVERARKLSERDERETRKVVKEVRDSSRKSVEDSKRVVEKLEEEARRGGDDKETLKRRVETLLKEVEDMHRRDKEEIDRLLEEVKRNHERSKKEIEDLLDDVRRKLEEIRKKGVEKEKLDKVLEDLRRVVEEVKRRNDEVLKRLKEVVDEVTKRNRKALEDAKERLKKVTE

SEQ ID NO: 10487 - protein, 183 aa, Artificial Sequence; identical to SEQ ID NO: 10486
  Synthetic

SEQ ID NO: 10488 - protein, 183 aa, Artificial Sequence
  Synthetic
SEVDEVAKRVREIVERLRDLVRKVVEDNERIAREVKRSSDETLKEIRDIVRKAKEVADRGGDDEDRLREELERLLREVHKKSEDDRRRLEKLLRDVHEKNKEVKKELKRLLDEVRKEVERIKERGVDERKIDKVLKELEEVITDVRRTLDDVDRKLREVVKKVEEINRRANEELERVIREVRR

SEQ ID NO: 10489 - protein, 183 aa, Artificial Sequence; identical to SEQ ID NO: 10488
  Synthetic

SEQ ID NO: 10490 - protein, 183 aa, Artificial Sequence
  Synthetic
DDVERLLKKVEDIVRELRESSRKSVEEIKRIVKEVKRLVDEVVKENERIVEEAEDVMRRGGDDKDKLRRRLERLLEEVHRRNKDVKDRIRELLKEVHDRSKRDKEEIRKLLEELERDIREIKKKGVEREKLDEVLKRARDVLREVEKENDKANKELEEVAERVKKTLDDVDKKLEDVMRKVTK

SEQ ID NO: 10491 - protein, 183 aa, Artificial Sequence; identical to SEQ ID NO: 10490
  Synthetic

SEQ ID NO: 10492 - protein, 181 aa, Artificial Sequence
  Synthetic
KEEEIVERVREKIKRVLDEVREIDKRAHDELRRVLKEVEDIVRKVHEDLKRVLEEVRREVKGDKRIDDELREIEERSRRSVEDAKRLLKEIEKRSRDSEKRSEDVLREIEERITRLEDLLRRGLDVKTVVETVDKIAKEVRDLSRRSVEENRKLAREVREVVRKVVEDNRRLAREVRERVR

SEQ ID NO: 10493 - protein, 181 aa, Artificial Sequence; identical to SEQ ID NO: 10492
  Synthetic

SEQ ID NO: 10494 - protein, 181 aa, Artificial Sequence
  Synthetic
DEDEKVEKVTREVEKALDEVRKIDEEAHRRLKRVLDEVRRIDETVHRDLKRVLDEVRERVRGVRELEERLKRIEEESRESLRRSEELLKEIEDRSRESLERSKKLLRDVERTIDRLRELLKRGLDVETVVERLRRLVEDIRRKSRESVERNRELVKEAKDVSRKSVEENKKLVRDITREAT

SEQ ID NO: 10495 - protein, 181 aa, Artificial Sequence; identical to SEQ ID NO: 10494
  Synthetic

SEQ ID NO: 10496 - protein, 184 aa, Artificial Sequence
  Synthetic
SVDEIVERVERELKRVLDEVREIHDRARDELRRMHERSERIIRKVEEELERALKEVRDRGVPREVLKRIEEIVKRVKDKLRELLKRSKELVERIERENREVLRKIEETARKVEEELERLRREGVDDKVVREAVREVERVVTELLEESRRSVEKTERLVRRSEELIRKIVKEVKKVAREIREEVR

SEQ ID NO: 10497 - protein, 184 aa, Artificial Sequence; identical to SEQ ID NO: 10496
  Synthetic

SEQ ID NO: 10498 - protein, 184 aa, Artificial Sequence
  Synthetic
SVDEILRKVKEELDRVLEEVTEIHRKAKEELDRAHDTSERIHREVKRELDRVREEVERQGVPEEVLRRIEEIVRKLKEENDKVLDDSRKKVEKLKRENDRVLEEIKEIVDEVKKRLDELRERGIDEKVVKEVVDEVRKVVEEIRKKSKDSVDKTKRVVEESIRTSDEVVKKTEKLVREIEKEVR

SEQ ID NO: 10499 - protein, 184 aa, Artificial Sequence; identical to SEQ ID NO: 10498
  Synthetic

SEQ ID NO: 10500 - protein, 184 aa, Artificial Sequence
  Synthetic
SVEEIVRKVTKELRDAHRRTEKILRDVDKELKEVLDRVRKIHRDVKERLEKVLDDVRKRGVPKEVLDEIRKLVEDVKRENDKLLKEIKKIVEDLHRKNRDLKRKSEELVRRVEEELRELRRRGVDEEVVTRAVERVKRAVKKSEDDVRRIVDENRKLVKEIEDRSRESVKKTEELIERIRKRVE

SEQ ID NO: 10501 - protein, 184 aa, Artificial Sequence; identical to SEQ ID NO: 10500
  Synthetic

SEQ ID NO: 10502 - protein, 183 aa, Artificial Sequence
  Synthetic
NVEDILRKAEEEVRRMLAENERIVEEAKERAKRMLDESRKRLEEVLRRAREVLEEVDKRKKDERLKETIKEVEDRVEKLLREVEKHSKDVKREVEELLRRNKKKLDELRDEVRKLLEEVKRSTSEDVVRAVVEELRRLLEESIRHVRKVVREIEKLLREDIELVKEVVRRIERLLRELDKEVR

SEQ ID NO: 10503 - protein, 183 aa, Artificial Sequence; identical to SEQ ID NO: 10502
  Synthetic

SEQ ID NO: 10504 - protein, 181 aa, Artificial Sequence
  Synthetic
RKVDELRKEVRRVVKESRDKAKRVVEEVKRLVEKSRRDVKRVVDENRRVVEEMRRKVKDRRTEDVKREIRETLEDLERKNRKLLEDSEREARDLKRRIDELLERSREEVKRLKDEIKELRDRGLGDKEVKDAEDELDKAHEDTKKILDEVKKELDDAHDETRRILEEVNKESETVLEEVER

SEQ ID NO: 10505 - protein, 181 aa, Artificial Sequence; identical to SEQ ID NO: 10504
  Synthetic

SEQ ID NO: 10506 - protein, 181 aa, Artificial Sequence
  Synthetic
SLARRVEEEVKRVVDESEEKVRRVVKVNKEMVDDVRRLVKEVVDENEEVVKEVRDTVTKRKTEEVKERIERLIREVRKKNEEILRRIERLVEDVERKNREILRDSERTVRELEKRIKELEDNGLGREDVRRVEEELKKAHDDTKKILDDVDERSREALDEVRKELDRVNKRSDKALKDVRK

SEQ ID NO: 10507 - protein, 181 aa, Artificial Sequence; identical to SEQ ID NO: 10506
  Synthetic

SEQ ID NO: 10508 - protein, 181 aa, Artificial Sequence
  Synthetic
SKAEELVKRVKEVVDKVRKLVEEIEEKVKRVVEKSRRDVTEVVKKNREVVKRVKDTVRRRKTEEVKTRIKKEVDDVRKENEDLLRESKKRLDEVKDEIRRVEEEVEELVRRLEKRIDELRKNGLGEEIVRRAREELERVLDEAKRILEKVTRELDEAHKETEKILRDVNRESDKALEEVER

SEQ ID NO: 10509 - protein, 181 aa, Artificial Sequence; identical to SEQ ID NO: 10508
  Synthetic

SEQ ID NO: 10510 - protein, 178 aa, Artificial Sequence
  Synthetic
SEDEKLDKVRKRLERAHEESKKISDKSEKDTRDAHRKTEEILDRVRKEMEEVLKRVRDRGISEELLDRADKVVEDVRRTLKKVLDDSRELLKKLEKLNRDVEDRSRRLLERVKEKLDRKEEPAEEIVKDVERVVKESEDLVRRIVEINERIVRESERLVKEVKDRVRDMVRRLAEEAR

SEQ ID NO: 10511 - protein, 178 aa, Artificial Sequence; identical to SEQ ID NO: 10510
  Synthetic

SEQ ID NO: 10512 - protein, 182 aa, Artificial Sequence
  Synthetic
SVEDIIRKVEKEVEEVVEKVERILDTVRRRSEKVLRENKEILEEVKRRADKVLRDVERNSKDKDLERVLEEVKRRVEELLDRNRKVLEEIEKRNRDLLREVEESIRRLKKEVDDLSEEVRNKPEEVAKRLEDRVREIVRTLEDLVREIVRRSEESVRRSRESAKRVVDTVKRIVDELEKRVR

SEQ ID NO: 10513 - protein, 182 aa, Artificial Sequence; identical to SEQ ID NO: 10512
  Synthetic

SEQ ID NO: 10514 - protein, 182 aa, Artificial Sequence
  Synthetic
DVEEIIRRVSDKARKVLDRNRKILEDVKRRSEEVLEENKRIVDEVDEIIDEVLKRVKKRSKDERLEKLLEDIRREVRRLKEENRKVLEEIKRTNEKLLEENDRKLKRIEEEVRELEERVRDKPREVVDRAVKRVEELVKRSERSADEVRKRSTESVKESKRSAKKVVEDVRRLVEELERRVR

SEQ ID NO: 10515 - protein, 182 aa, Artificial Sequence; identical to SEQ ID NO: 10514
  Synthetic

SEQ ID NO: 10516 - protein, 180 aa, Artificial Sequence
  Synthetic
SEEDIIREAERIAREALKRARKIAEDARRISEKALEDARRIAKEAHDISKKALEDAARKRRREDVERALEDVERKDRKLLRELEEALKRVARESEESLKELKRLLEKVEEDIRRLADAARRGLDAKRAAEEAKRLAEEAEEAAKRVADRNRKLAKEAADLAREVAKRSEELAREAAKKAQ

SEQ ID NO: 10517 - protein, 180 aa, Artificial Sequence; identical to SEQ ID NO: 10516
  Synthetic

SEQ ID NO: 10518 - protein, 180 aa, Artificial Sequence
  Synthetic
REDEKIEEVKRRAEEVLKESKKIIEDVLKKSEEVIKEVREILEKAHRISAKVLDEVRKTRDDKSVEDILREVEKRDKDLERELERVIEEVKRRSDTSVERVKRENDRSKREIEKLDDLVKRGLDVDEVVERVERIVTKNLRLAERVVEENEKLVEDLRRLVADVVRTSKKLVDDVRERVR

SEQ ID NO: 10519 - protein, 180 aa, Artificial Sequence; identical to SEQ ID NO: 10518
  Synthetic

SEQ ID NO: 10520 - protein, 180 aa, Artificial Sequence
  Synthetic
SEDEKVDEATKEAERVLREVRKIIKRAHDRSRDAEREVKRTLDEVRRETKRVLEDVDRTRRDETIRKLLEEVERRSRKSAEDLKRVLERLRREDEKLVKDLEDALRELKERIDRLRDLLKRGLDVDEVVRRVKEIVRRLEELAKEIERRSDEIVEEIRRLVKKVVDENRKIVKKAEEDAR

SEQ ID NO: 10521 - protein, 180 aa, Artificial Sequence; identical to SEQ ID NO: 10520
  Synthetic

SEQ ID NO: 10522 - protein, 180 aa, Artificial Sequence
  Synthetic
DEDEIIDEAKKRADEVLKRSEDILRRAREEVEKVLEEVRKIIEDVHRRSRKVLEDVRRKAKREDVEKAIEDVEREDKRLVEELKKVLEEIRRTIERLAEELKRVNDESRDRIRKLEELVKRGLDVETVVRRVDEIVKRNEELARRLVEEAKKIVDDLRRLAEEIVKRSEDLVEKLKEDAR

SEQ ID NO: 10523 - protein, 180 aa, Artificial Sequence; identical to SEQ ID NO: 10522
  Synthetic

SEQ ID NO: 10524 - protein, 177 aa, Artificial Sequence
  Synthetic
SIEDVLRDVARKLRTVVDEARKILDEVDKATEKVLREAERVIREVAKRDKKVVDEVRKGGLPEDVVRRIEKLSEDNAERLTRLLKRVEELVREINKRNRDIAREIEELVRKVEEELERKKVAEDLLKLVEDVVRRIRKLAEDVKRENDKLVERIREVAEDVLRHSEETVEEARKAAE

SEQ ID NO: 10525 - protein, 177 aa, Artificial Sequence; identical to SEQ ID NO: 10524
  Synthetic

SEQ ID NO: 10526 - protein, 177 aa, Artificial Sequence
  Synthetic
SSEEALKEVERRLEDVRREVKRVAEEIKKKDDKVNDDAREKLERVNRETKRVLEELAREGLPEEVVKELKELVDKINTDNRRIEKRIKELSDENKRDIDRLEKRAEELLARIKEELEKRDVVEELKDKVRRLLEELKRLLEELDKHSARTIKEIRDLIETLRRINEKVIEDMKRRRD

SEQ ID NO: 10527 - protein, 177 aa, Artificial Sequence; identical to SEQ ID NO: 10526
  Synthetic

SEQ ID NO: 10528 - protein, 184 aa, Artificial Sequence
  Synthetic
SELDEAKRLVDEVVRRLEELLREDKKLVAEVEREVRELLERNARLLKEVADRIRRLKEEGGDNREELTRRLEKLVRDVEEHSKEVKKRIERLIREVEKHTDEVLERVKKLVEDVKRELEKLRNEDEKVVREIERLLRELEKALEDVERELRRSKDRLRKLAEEVKKVLDDSRRELERLREELRT

SEQ ID NO: 10529 - protein, 184 aa, Artificial Sequence; identical to SEQ ID NO: 10528
  Synthetic

SEQ ID NO: 10530 - protein, 179 aa, Artificial Sequence
  Synthetic
KDIEDAVRDVRRKVKELIENSERVVRTVEKLVRELIDHSRKVVREVEKLAKELIELKRRGDIREEDLKRVKKRVRDLNERNKEEVEKLKRTVKKLNDDDKRKVETLKEDVDREKKRLRERGVDEEVLKEVDRVLREAEKRSKEINEESKRVLDKAERDSRRIDRKSEEVVKRAEEEVRT

SEQ ID NO: 10531 - protein, 179 aa, Artificial Sequence; identical to SEQ ID NO: 10530
  Synthetic

SEQ ID NO: 10532 - protein, 179 aa, Artificial Sequence
  Synthetic
EEIERVLRRVTERLKELERHSEEVLREVERLVKEDEDLAREVVKRVEELIRTLRELKKRGDAREKVLKEVKETVKKLLDELEEHTRRVKEKVERLNRDNERVVRELRKEVEELLDELRKRGVDRRVLEEVREVVDRAEKKIKELDDRSREVLKEVEKRSRDIIREIEEKLKDVEERVKD

SEQ ID NO: 10533 - protein, 179 aa, Artificial Sequence; identical to SEQ ID NO: 10532
  Synthetic

SEQ ID NO: 10534 - protein, 179 aa, Artificial Sequence
  Synthetic
SKAEEVAKRVEDLAREDIKLAERAAREVERLARENIKLAREVAKRVEELARRLIEAARRGDAREEVAKRAADTVRKLLEELRRENKKSAERAKELAERARKHTEEALREVKKLLEDARREGADEKALKDAEDAARKAAEDSERAIERAERAAKDALKKSEDAAEEAKRAADKALEDAAR

SEQ ID NO: 10535 - protein, 179 aa, Artificial Sequence; identical to SEQ ID NO: 10534
  Synthetic

SEQ ID NO: 10536 - protein, 182 aa, Artificial Sequence
  Synthetic
DEVRDLVRRVRELSEELIRRVRTLLREVEELSRRLIEESERLLREVRKIVEELIRRVERREPEEVLRELIDRARRKLEKLAEDVKELNKRHEDRLRELEKRIKDLNKKHKDALDEIKKRVREAGVEERVVKEAEEVVERANRESEKLLEDVKRVVEEANKTSEDILRAVEEIVRRVLEELKK

SEQ ID NO: 10537 - protein, 182 aa, Artificial Sequence; identical to SEQ ID NO: 10536
  Synthetic

SEQ ID NO: 10538 - protein, 182 aa, Artificial Sequence
  Synthetic
SSKEVLERVAEKLKEVNERLKDVLRRVAEKLKRANEENKKVLERVRDILREVLRRLREKVTDKDKIRELETRIKKLLDDLERSSKDDSRRSKDLLRKLEELVRDLSKRSKELLKELEDLVRRGDGSVEEAERVVEKSVEEARRLAERVKEEVDRSVKHSEDNVREMRRLVEEIVKRVEEAAK

SEQ ID NO: 10539 - protein, 182 aa, Artificial Sequence; identical to SEQ ID NO: 10538
  Synthetic

SEQ ID NO: 10540 - protein, 182 aa, Artificial Sequence
  Synthetic
REKEVLDRVEEILRDANRRNEKVLREVAEIIRTVIEDNKRVLKEVADELRRVLEELRDKVKDKDRIKKLEEEIRKLLDELRRSSDKVTKESEELLRRLEESSRRDSEKSKRLLDRLEELVRRGDGRVEEMEDVVRRSLDHSRRNVEEAKKAVTKVVEDNKDNVRRIKEVVARVVEKAREEAR

SEQ ID NO: 10541 - protein, 182 aa, Artificial Sequence; identical to SEQ ID NO: 10540
  Synthetic

SEQ ID NO: 10542 - protein, 181 aa, Artificial Sequence
  Synthetic
SEVEEVLRRSRESAKKSKEHSRELLEKVKRIIDDVKRLVREVLKRSRDSIKRVEDLTRRGDIDEDTVRDVVRRNKRLLDELRRAVEDAVRKIDEELKRNERDVERVVRENEELLKDLLRRRDTEKVKEAVKESRDLLRKVEETNRRVNDEVRKLLEDIRRDVERAVEESERLLEDIVRKVK

SEQ ID NO: 10543 - protein, 181 aa, Artificial Sequence; identical to SEQ ID NO: 10542
  Synthetic

SEQ ID NO: 10544 - protein, 175 aa, Artificial Sequence
  Synthetic
SDVERVLTEIRKLVEDIKRDVERVVDESRKLVEEAERDVERVITEVEKLVERIKREVRDDDLRRLAEEVAERVKRIVDKNRENVRKSAEDNKELIKENRRHAKEVEDRVREALERGGERARELLKRVRELIKEHNRLNRESLKTSRKNIEDHHEDNKRSLEEARRIIEEVREAAR

SEQ ID NO: 10545 - protein, 175 aa, Artificial Sequence; identical to SEQ ID NO: 10544
  Synthetic

SEQ ID NO: 10546 - protein, 180 aa, Artificial Sequence
  Synthetic
KELEDVEKEVEEVAKRVEDSIRRNREVVEKVKDEVRRLLDRNDELVDRVAKEITEAIKKGKDDREVEKRVTEVKKHSEDLLRDVERLVEEVKRHSREVTKRNRDLVTDVRRKLEEVVRRRDEEKVKKVLEDVRRRLEELIKRSEDSAREVEKRLEDLRREVEESLERVERTLEDLVRRVK

SEQ ID NO: 10547 - protein, 180 aa, Artificial Sequence; identical to SEQ ID NO: 10546
  Synthetic

SEQ ID NO: 10548 - protein, 186 aa, Artificial Sequence
  Synthetic
SELERLEERVRRIEEEVKRLLEEHREVSDRVAKENRRSNEESKREVRRIEEEVKDLSRKGGDDRRRILEEVKRLVRELEKLLEEDITKSRKSVEDVRKHAEELLRTVRKLVRDLEKLLKEVLDRMGNSEEVKKVVEDVKRRLDDLIRKAEKVVRDSERELKKLVDHSKEVVDRVRERLKELIEEAR

SEQ ID NO: 10549 - protein, 186 aa, Artificial Sequence; identical to SEQ ID NO: 10548
  Synthetic

SEQ ID NO: 10550 - protein, 186 aa, Artificial Sequence
  Synthetic
SEVEDLERRVKRILEESDELVKRHEEKSRKIVKDLEDLLRRNEDTVEKILRELEKRIRDGGDDKETLLRTVRERVKDLERHSKEVRDRVRELLERLDRDAKRVEEEDDRLVDELEKDLRRVLEEMGNSERVTRVVEKVRRLLEESKRRSKEVVKRSKDLLKEAEDRADESVRELRRKLKELEEKAE

SEQ ID NO: 10551 - protein, 186 aa, Artificial Sequence; identical to SEQ ID NO: 10550
  Synthetic

SEQ ID NO: 10552 - protein, 180 aa, Artificial Sequence
  Synthetic
SELEDIRRLLEKLDREVKELLKRSRDLAKEMEERVRKLVKESEDELRKLAEKVDRIKKNGGSEEMVEKLIREAEKLVEDSRKKSKDLIDELRELVRKSRRDSERLIKRARDLVREIAKRVTEDEAREVLKDVRRKVEELRKELTKVDKEIEEIVRELEKRLREVNERVRTIVDELAKRLK

SEQ ID NO: 10553 - protein, 180 aa, Artificial Sequence; identical to SEQ ID NO: 10552
  Synthetic

SEQ ID NO: 10554 - protein, 176 aa, Artificial Sequence
  Synthetic
SMLEELDKEARELLKEVRRLVEDNDRLLEELLRRARELLERNDRISEKVADEVRKIDDEKRVRELADESRKISREILEEVRRLVKELKDDSKRILDEVRKRVTDLDERVRRLLAERPTERMREVAKKVKDILKRAEEEVRESLERVRRELERVIRELEDSLRRNDKTLRDLIEERR

SEQ ID NO: 10555 - protein, 176 aa, Artificial Sequence; identical to SEQ ID NO: 10554
  Synthetic

SEQ ID NO: 10556 - protein, 176 aa, Artificial Sequence
  Synthetic
SDLERLDELLKRVLEKARKLVKENDEHSEEVRKTVEKVVRDNDKLAEDLADKVEKIRDEDTVRKLAEDLKRISEKLLREVEELVRRNDELSKKILDDVRKLVERLIREAEDLLRKKDEERVKEVLDRVDEILKRVIKAAEESLKRSHEINRRLIKAAEDSLRRVKKILDELEERVR

SEQ ID NO: 10557 - protein, 176 aa, Artificial Sequence; identical to SEQ ID NO: 10556
  Synthetic

SEQ ID NO: 10558 - protein, 176 aa, Artificial Sequence
  Synthetic
STLDKLRELLRRVEETVREVLERNDEHSKEVKRRVDKLLRENDEHSKELADLVRKIKDEDTVKKLVEENKRRSEELLKTVEELVRRNDELSKKLEEDVRRLVRELEERAKRALDRRPTREMEKVLTDARRSLRRLEERVRESLERSHRINRKLRKDVRESLERSKRILDKLREEVR

SEQ ID NO: 10559 - protein, 176 aa, Artificial Sequence; identical to SEQ ID NO: 10558
  Synthetic

SEQ ID NO: 10560 - protein, 176 aa, Artificial Sequence
  Synthetic
SVLEELRKLVEKVLREVDKLLKDNNRHSEEVEKTVKRLLDENDRLLEELADRVEKIKDEDTVRKLVKELDDRSKDILREVKKLLKENDDLSKRLLDEVKKLVDRLEERVRDALRKDDKEEAKKVLTEVRRTLEELERRVRKSLKDSHDINRKLEKEVRDSLKRVKDRLDELIKRVR

SEQ ID NO: 10561 - protein, 176 aa, Artificial Sequence; identical to SEQ ID NO: 10560
  Synthetic

SEQ ID NO: 10562 - protein, 177 aa, Artificial Sequence
  Synthetic
RKAEEVLKRAKKIVDEVDKKNRESLERTRKIVEDVNEENREVLDRLRRRAEELKKEVDDERVKRMLDEILKEVKKRIEEVVRRNEAVIEESRRLVEELSERNRELVKRLEEVVRREDSDDVVRRIEEVIEKARRENDESVRRDEKLMKEVKDENKKTVDDIRRLLKDIEDKVREAKR

SEQ ID NO: 10563 - protein, 177 aa, Artificial Sequence; identical to SEQ ID NO: 10562
  Synthetic

SEQ ID NO: 10564 - protein, 177 aa, Artificial Sequence
  Synthetic
SKLEEVVKRLEEIVRRVKRADEESLKRTRKIVEEVNRDNRRSLKESRDRVDELKKRVDDDDVVRRLDRLIEESEKLVRDVERDNKRIIEESEELVRRSAEMNRKTLEEVKDLVRKSDTDEVVKRIEEVAKRNEELNRETVKRDEDLVREAKRRNEETVERDKRLVEKITKEVDETKK

SEQ ID NO: 10565 - protein, 177 aa, Artificial Sequence; identical to SEQ ID NO: 10564
  Synthetic

SEQ ID NO: 10566 - protein, 176 aa, Artificial Sequence
  Synthetic
SLIETIRDLAKKLKEESDKSVETDKRLVEELRRRSKKTVDDIDELVKRLERMVEDDKRKEALKKKLEDLIRTIETILEKSRRDLKELIDRSRRLLEESRRLVEEVERRVRELLKDKDTEDAKRVLEELKRIIEDLLRKNKKSLDDTEREVRRLIKENETVVRKLEEIVKRLEEKIR

SEQ ID NO: 10567 - protein, 176 aa, Artificial Sequence; identical to SEQ ID NO: 10566
  Synthetic

SEQ ID NO: 10568 - protein, 176 aa, Artificial Sequence
  Synthetic
SLLEEIAELVERLRRESKESVKRDEELVDELKKRSEETVKEDKRLAEELDRLAKKIPDKDTLKEKADRVREESKRLVKESRDLLEEVRRRSEDLIRRSRKLVTDVIREVERLLAERPVEEMKKVLDDLRREIKKLEEENERSLERTRDIVRKLDRTNEESARESEKIIREVVKEVK

SEQ ID NO: 10569 - protein, 176 aa, Artificial Sequence; identical to SEQ ID NO: 10568
  Synthetic

SEQ ID NO: 10570 - protein, 176 aa, Artificial Sequence
  Synthetic
SLLERIKEEVEKLRKESEESVETDERLVEELKKEVKDLVEKDRKLAEDLKDEVDKDKRTEALDKRLKEVIRESEEILKRLREKLKELIRRSEKLLEDSRRLLDKLRREVEELLKERDEERAKEVLRDLRRTVKELTDENEKSLERTRREVEKLIRELEESLRESRRRVKRLLEKVK

SEQ ID NO: 10571 - protein, 176 aa, Artificial Sequence; identical to SEQ ID NO: 10570
  Synthetic

SEQ ID NO: 10572 - protein, 176 aa, Artificial Sequence
  Synthetic
SLLEEIERRVEELEDRSRKSVERDKELAKEVDDRNEESVRTDEELAKRLADLVRKRDRDEELRKKLEEVIRESERLLEELHRENERVIRESKRLIEESKRLLEKLDRDVARLLEERPTERMEEVLKRLKEIVKELEERNRESLERTRRILEEVDRKNEESLKRSREIVRELDERVR

SEQ ID NO: 10573 - protein, 176 aa, Artificial Sequence; identical to SEQ ID NO: 10572
  Synthetic

SEQ ID NO: 10574 - protein, 176 aa, Artificial Sequence
  Synthetic
SLVEEIERRVEKLAEEVKRLVERDRKEVEKLEKESRDTVREIEELADRLRDAVEKERDEDSLRKKLEELIRTIEEILKESRRLLEELIRTSTEILKRLKEKLEELIRRVEELLKRNPDDEMRKVLTRLREEVRRLLDELRRSLEDTKRTVEDLERKNKTVVDELRKTVAELERRAR

SEQ ID NO: 10575 - protein, 176 aa, Artificial Sequence; identical to SEQ ID NO: 10574
  Synthetic

SEQ ID NO: 10576 - protein, 188 aa, Artificial Sequence
  Synthetic
SIDEVLKRIREISDDAKRKIKEVVEEIKKNADRLRREIERVLDEIRKVIRELLERIKRVEAPEEKVREILRRVERILEEVEKEIDRIRKRVEELTKRHVDEAEKLVKHNEEVLRDVERRIKELKDRGGVDEDLERLLREVERRTRRHEEELERLLRHNNKVSKEVREELKRLLDRVREMLEDVDRKLK

SEQ ID NO: 10577 - protein, 188 aa, Artificial Sequence; identical to SEQ ID NO: 10576
  Synthetic

SEQ ID NO: 10578 - protein, 188 aa, Artificial Sequence
  Synthetic
SVEEVRKEVKRISDEAREEIERVLERIKENAKRLIEDIRRVLEEIEEIIRRLEDEIRRVELPEERVRELLERVRDILRRVAEEIEKIEEEVKELTKRHEDEIRRLLKENKDVLDEIEERADDLRKKGGVDEDLEELLRRLERISRESRKRLEELLKHNNKESEEVRKRLKELLDDVRRVVEEVRRKLK

SEQ ID NO: 10579 - protein, 188 aa, Artificial Sequence; identical to SEQ ID NO: 10578
  Synthetic

SEQ ID NO: 10580 - protein, 188 aa, Artificial Sequence
  Synthetic
SIDEVLEELKRISTEAVERIRRVAERNRKSVEEVRKRIEEVAKRIREIATRLLERIRRVELPEKDVERLLREVEEEVRRVEDTIERLLEENEEIMRDSVRKIEKLVEDNRRVLEELTRRIERLKDNGGIDEELKKLLDELEKISRDSDERLKESTKKVRDVNRESDKKLKELLKRVEDVLEKVDRELK

SEQ ID NO: 10581 - protein, 188 aa, Artificial Sequence; identical to SEQ ID NO: 10580
  Synthetic

SEQ ID NO: 10582 - protein, 188 aa, Artificial Sequence
  Synthetic
SVDEVLERIRESAETILEEIRRVLERNKRSAETILEEIRDVARKIEKRIRDVLKKIEDVELPEEKVRELLEELREILERVKKAIEDLLRRNEEVMRDSKRKIEKLLKDNKDIMERVTREIKRLKDEGGVDEELRKLLEEVKKINDDSRRKLEKSTRDVKKVNDDSRRELERLLRKVEEVIRRVDEELR

SEQ ID NO: 10583 - protein, 188 aa, Artificial Sequence; identical to SEQ ID NO: 10582
  Synthetic

SEQ ID NO: 10584 - protein, 184 aa, Artificial Sequence
  Synthetic
KLEELVEEVEKVVREVKKELEDVVRTVREVVKRSKDDLREVVKEVERINRELEERLRRLATDERVEKTIRELIKRSRDSLRRAKDEVKKNLDENERLLREVEKRVEKLMRELEELLRRVREVVERNRDLTELLERVKTLIKEIRDRLRRLLEEVKRLVEESKKDLKRLLDENKRLVDEATKTAK

SEQ ID NO: 10585 - protein, 184 aa, Artificial Sequence; identical to SEQ ID NO: 10584
  Synthetic

SEQ ID NO: 10586 - protein, 184 aa, Artificial Sequence
  Synthetic
SLEELLKEVEKVIRDVKRELEKVVRDIEENVRRSAKRLREAEEEVERINRRLEEELKKKTTREEIKELVRKLIEDSRRSLEKARRDIAENEKRNKESLDRAKRTVEKLLEDLERLLREVEKVARNNRDLTELLKRVRDLIRRIRETLEKLLKENHDLSKRSKEDVERLLKENADLVKELTDRAE

SEQ ID NO: 10587 - protein, 184 aa, Artificial Sequence; identical to SEQ ID NO: 10586
  Synthetic

SEQ ID NO: 10588 - protein, 184 aa, Artificial Sequence
  Synthetic
SLEDLLREVKRVIEEVKRELEEVVRRVKEIVERSVRDLRRVVDEVRRINTELEERLRRLTTEDRVRDKAEKLIRESEESLRRAEKRVRENIRENERLLEKVKRTVEKLLRDLEELLKRVKEVADRNRDLTELLRRVEELIKEIRKELKRLLDEVKDLVDKSKENAKKLLEDNKRLVEKIARDAT

SEQ ID NO: 10589 - protein, 184 aa, Artificial Sequence; identical to SEQ ID NO: 10588
  Synthetic

SEQ ID NO: 10590 - protein, 184 aa, Artificial Sequence
  Synthetic
KLEELVREVEKVVDDIRKELEEVVRRVEEVVRRSKRTLEDVVRRVKKINDDLEKELRERSKDEEVRRKVEELIRESKKSLDEVRRNAERNAEENRRLLREVEETVKRLLEELEKLLDKVRKVVANNRDLTELLEDVKRVLDEIRETLERLLRKVEELVERSKRNAEELLKRNEDLAKKVRDDAK

SEQ ID NO: 10591 - protein, 184 aa, Artificial Sequence; identical to SEQ ID NO: 10590
  Synthetic

SEQ ID NO: 10592 - protein, 178 aa, Artificial Sequence
  Synthetic
DVEDVLRKIEEIIRRVLEEIKTVLDEIRKNNEKLKEDVDRVLAEIEKDSEDLKRKIKDIEDLIRELDESTDRVRKLAKRIKEKSEKSLRDAERLVKRLEEELKRILEEVEDLVRKKKESGELAETILRRVEELVEEIRRRLKEILDRDHELSKRLKEELKKILDDNHKLSRDAAERAR

SEQ ID NO: 10593 - protein, 178 aa, Artificial Sequence; identical to SEQ ID NO: 10592
  Synthetic

SEQ ID NO: 10594 - protein, 178 aa, Artificial Sequence
  Synthetic
SVEDVLREIKETSDDAARKADEVLKEIEKNNRRLKKEIDRVHEHTKEDSRRLKEEIKDIEELIRELDKSTDKDRKLVEKAKRDSEESLRDVERLAREVKEKLKRSTDDVRRLVEEKKESGDLMREMLERNRKLIEDLKRELEDILRRDHRLSKELLARLKESNEENHRLSKEIRERRK

SEQ ID NO: 10595 - protein, 178 aa, Artificial Sequence; identical to SEQ ID NO: 10594
  Synthetic

SEQ ID NO: 10596 - protein, 178 aa, Artificial Sequence
  Synthetic
RVEDVLRKVEEIIRRLKEEIDRVLEKIRETSERAVKDIRDVLRRIREDSKRLKEDIKDAKDAIRTLDRSTEEVEKLVKEAEKELKRSSDEVEKLARDLKRKLKEILDRARRLVREKRESGEDAERIVEEVRKLVEEIRKELEDILRKNEKLIEDLKRELKKILEENHRLSREIRERRR

SEQ ID NO: 10597 - protein, 178 aa, Artificial Sequence; identical to SEQ ID NO: 10596
  Synthetic

SEQ ID NO: 10598 - protein, 178 aa, Artificial Sequence
  Synthetic
SAEDVLREITKTSERAREDIKRVLDEIKRTSDEAVKTVTDIHEHTRKTSEDLKRKIKDIRELIRRLEESTDKDRRLVEEVKRRLEDSSRRAEELARRAEKRLKESTEKVKDLVDKKKEAGEVLRKILEENRELIERLKKELKELLDRNRKLIEDLLREAEKSNEDNKELIKKAEEDAR

SEQ ID NO: 10599 - protein, 178 aa, Artificial Sequence; identical to SEQ ID NO: 10598
  Synthetic

SEQ ID NO: 10600 - protein, 177 aa, Artificial Sequence
  Synthetic
SVEKVLEDITRELRRADEESKRALDHSAEVLKDLERRVKEVLDESREIIKELERRLRELKEVKDVLRRLEEENKELVRDIRRLLEEAIKENTELSKRSRETLDKIEKDVKKIVDDGVSDEEAKRVLDEVEKLVRELKKRNDELNEKTERLVRDLRRRLKDSLDKSRDLVRRLEEKAK

SEQ ID NO: 10601 - protein, 177 aa, Artificial Sequence; identical to SEQ ID NO: 10600
  Synthetic

SEQ ID NO: 10602 - protein, 177 aa, Artificial Sequence
  Synthetic
SVEEVLDEVRRIIEELLRLSEEMLRHSEEVIRDLERVSREVLERSKRIIDELLRELKDLDEVRKTLEDLIRKNTELSKTSKKVLDDARRENKKLSDDSRRVLRKLEEDIRRLVEEGVSDEVAKRAVEDVRRVVEDLERRNRTLNEKTKRLVEKLTRDNERSLKESKKVVDELREEAR

SEQ ID NO: 10603 - protein, 177 aa, Artificial Sequence; identical to SEQ ID NO: 10602
  Synthetic

SEQ ID NO: 10604 - protein, 177 aa, Artificial Sequence
  Synthetic
SVEEVLDEIRKRIEDLKREVDEVLDRSRRIIETLKERVDRVLKHSRELIKRLKDKLRELEEVKKTLDEIIRKNEELVRDIRKELKRALDKNKELVKEIRRELKEIIEEVKKLVDKGARDEEMKRALEEVKKLLDRLREELKRSLDESRKLVEELERRLRESNEESERLIRKLEREAD

SEQ ID NO: 10605 - protein, 177 aa, Artificial Sequence; identical to SEQ ID NO: 10604
  Synthetic

SEQ ID NO: 10606 - protein, 177 aa, Artificial Sequence
  Synthetic
SVEDVLREVEKIIRELDRKSEKVLEDSKRVIEDLKRKVEEVLRHSETLIRDLERRLKELEEVKRVLDKLRRDNERLVEDVKRELDEIIRKNKELSERSKRELERLRKAIEDLVRAGASDELAKEMVDRVRELVKKLEEENRRSLEESKKLVEELARRLERSNTESKRLIDKLREEAR

SEQ ID NO: 10607 - protein, 177 aa, Artificial Sequence; identical to SEQ ID NO: 10606
  Synthetic

SEQ ID NO: 10608 - protein, 177 aa, Artificial Sequence
  Synthetic
SVEEVLKDIEKKIRDLDRKVKEALRHSEEVIRRLEEEVKRVLDDSERILRDLKEKLRDLEDVKRELDRLLEENKRLVDDIRRVLEELERRNRELVDRIREVLKRIIEEVEKLVRDGASEELMRRIVEKVEELVKELDKRLRESNEDSKRLVEDLSRRAKKSLEESRELVRELKKRAK

SEQ ID NO: 10609 - protein, 177 aa, Artificial Sequence; identical to SEQ ID NO: 10608
  Synthetic

SEQ ID NO: 10610 - protein, 177 aa, Artificial Sequence
  Synthetic
SVEEVLDRIRKIIKELLDRSEEALRHSEEVIKDLERKVEEVLERSREVIRELLERLKELREVKKVLEELLRRNKELVDRIRKDLKKAIDENKKLSDESRRVLEEVRKKAKKLVDDGVDDEELKTMLEEVKKVVEELLRRNRKSNEDSKELVKELTRRLRKSLEDSKELVRKLEEEAR

SEQ ID NO: 10611 - protein, 177 aa, Artificial Sequence; identical to SEQ ID NO: 10610
  Synthetic

SEQ ID NO: 10612 - protein, 177 aa, Artificial Sequence
  Synthetic
SVEDVLREIEEILRRLEKESDDALEHSRRVIKRLEEESDRVLEESRRVIEELERKLRDLEEVKRELEKLIRKNEKLSKDSKDVLKKLIEENRRLSETSKEVLRELRKRVEDLVRAGADDEEMKKLLEDVKRLVDDLRRKNEESNRRSKELVDKLDKENKDSLKESRELVEKLEREAR

SEQ ID NO: 10613 - protein, 177 aa, Artificial Sequence; identical to SEQ ID NO: 10612
  Synthetic

SEQ ID NO: 10614 - protein, 180 aa, Artificial Sequence
  Synthetic
SVEEVVREVEEKLRKLIDDVRRVVEENRRNTERLRKRVTEVVKRNEDILRRLEEDIRRVERAEEAKEVLKRLKEETDRLLERVEEVVRRTKKKTEDLLRDVERLLREIKKELEDLLRNNVSEEVAKTALRKVEDLLKKLKERAEDSSRDNHRISKELTEELEESSKRVKTLVDELRKTVK

SEQ ID NO: 10615 - protein, 180 aa, Artificial Sequence; identical to SEQ ID NO: 10614
  Synthetic

SEQ ID NO: 10616 - protein, 178 aa, Artificial Sequence
  Synthetic
SVEEVLKESREISTRLAEEVKRVLDEIRRILERVKRINEKVNKDIEEILRRVKKTVGEKKRELVKKLEDEVRKILETNKRLSEELEERVRRLLEELERLLRKVVKENEDTVRDLARIEDERVAEKILKEDRDTVERLRKRVEDLLRDVRRLVEDSERKSRDLLRRVEELVRELKKRVD

SEQ ID NO: 10617 - protein, 178 aa, Artificial Sequence; identical to SEQ ID NO: 10616
  Synthetic

SEQ ID NO: 10618 - protein, 178 aa, Artificial Sequence
  Synthetic
SVEEVLKESKRVSEELNELNKKVNDDIRKILEKVNRENKKVNEDIERELRKLEEEVGRKKEELLREVVKEVRRLLKENERLSEKLRKEVEELLKRNEELSKRVVDDNKRTVDEARRIDDEEVAREILRDDKRTVEESKRESKRLLERVKKLVDRSAEESKKLLEDVKRLLEELRERAR

SEQ ID NO: 10619 - protein, 178 aa, Artificial Sequence; identical to SEQ ID NO: 10618
  Synthetic

SEQ ID NO: 10620 - protein, 178 aa, Artificial Sequence
  Synthetic
RVDEVLDESKKVSDRLHESIRRVLEKIEEILRRVNEENRRVNEEMKRILDELARTVGEKIREELEKVKKRAEDLVKTNEELSEDLKRRVRKLLKELEDLLRKVNEENKESLDRLKRIEDERVAREILKADRETVRRLEKRAKDLLDEVRDLVRESEKRSRELLKEVEDLVRKLTEEAR

SEQ ID NO: 10621 - protein, 178 aa, Artificial Sequence; identical to SEQ ID NO: 10620
  Synthetic

SEQ ID NO: 10622 - protein, 178 aa, Artificial Sequence
  Synthetic
RVEEVLKRMRDILRRVNEINRRVNRELERSSREILERIREILDRIRRILERLEERVGDKKKEEVDRVKDEARKLLRDLEETLKRDHDRDRKMLKENEDLSREVEKRVEELVRDLARIEDEKVARDLLREVEELVKESEELSEELLRRSRRSNEESLRKAEKLLETVRRLVEELEKKTT

SEQ ID NO: 10623 - protein, 178 aa, Artificial Sequence; identical to SEQ ID NO: 10622
  Synthetic

SEQ ID NO: 10624 - protein, 182 aa, Artificial Sequence
  Synthetic
SEAEAVEEEVRRLVEESEKRSKELLEDVERLVEESERRSKKLLDDVRKLVDDLKKELRRVRDRETMKKLLKELEDRVRRIIERLAELSKEVEDRVREIIKTNEEISDRLRKKVDELLEELKRRGVDDRVIERLKRILKEAHDKNKEVSDRIRKILEELHRKNRKVLEDIKRILDDVRREVER

SEQ ID NO: 10625 - protein, 182 aa, Artificial Sequence; identical to SEQ ID NO: 10624
  Synthetic

SEQ ID NO: 10626 - protein, 182 aa, Artificial Sequence
  Synthetic
KEAEDLLREVEKLVRESKKLSEDLLREVRKSNERSKRESERLLREVERLVRELKDLRDKVRDRRTLEKLLEDLERTAREIIKEIEKISRDDKKDVERIIRENERISEELEKRVREILEKIKRDGLDDRIIERIKRILEKVHKINREASKRIKESLDRAHETNKRVLDRIRKIVDDVRREVER

SEQ ID NO: 10627 - protein, 182 aa, Artificial Sequence; identical to SEQ ID NO: 10626
  Synthetic

SEQ ID NO: 10628 - protein, 173 aa, Artificial Sequence
  Synthetic
RLEEVKEELKRIATKLKEEIKENIRRLEESVEKIAKELAENIKRLEDILRDVKRKLRDERIVKTVEDIARRVVEDNERIMEEDKDVVRRLVERNEEIVRRVDETVKKIVELIDRGEPGEELVERLRRVVEEVRERLKDSSRELRKINEDSRKKVEDSSREVKKVVEELERRDT

SEQ ID NO: 10629 - protein, 173 aa, Artificial Sequence; identical to SEQ ID NO: 10628
  Synthetic

SEQ ID NO: 10630 - protein, 174 aa, Artificial Sequence
  Synthetic
KELEDVARKVEDLLRRIEKTNRDAIRESERLVRELKREVEKVEEESRRLLEEVERRIRDEDVIRRLREISERSKRELKKLLETITRISDKSVKDNEKLLRDTREVVRRVDEVLKNNGDAKKLLDEVRKVIEDNRKRSEELLEENRKVVEDVSRTLERILRENERVADEVDKEER

SEQ ID NO: 10631 - protein, 174 aa, Artificial Sequence; identical to SEQ ID NO: 10630
  Synthetic

SEQ ID NO: 10632 - protein, 174 aa, Artificial Sequence
  Synthetic
DELERVTEEIDKLSKDLERRVREVLEESRRLVEDVERVVREVLEEARRTAKDIADKVKNERILDEVREMTKRHEEELRRLLEELKRISEESKEELKRLLKENREAVEKVRRELENKGDVDKLLEEVRKISEDSKERLKEILKRNEEVARRVKRELKRLLETNREIIRRVEERER

SEQ ID NO: 10633 - protein, 174 aa, Artificial Sequence; identical to SEQ ID NO: 10632
  Synthetic

SEQ ID NO: 10634 - protein, 178 aa, Artificial Sequence
  Synthetic
RELEELLDKVRKIVEESKKRNEDLLREVREIVERSKEKIKKVLDEVRKIIETVRKSRLSDEKVRRLLEELRRKVEKLLDDDRKLAKELRDRLRELKKTNEDLARRLREELERILRDKPDVKEVEKVLRDVEELIRDSERASDRVLKDVEELIKDSERMSKKAEEDVDRLLRELDKDVR

SEQ ID NO: 10635 - protein, 178 aa, Artificial Sequence; identical to SEQ ID NO: 10634
  Synthetic

SEQ ID NO: 10636 - protein, 183 aa, Artificial Sequence
  Synthetic
DSVERVAEEVRKLLEDIKRVSDEVTKRLRDLLEDLKRVSDKVRKDIERLLEDLEREVRRKGGEELKKKVDKVTRELEELLRRNEEKVKEVERRVRDLLRRNNEKVKRAVKELRDLLESLRRIEEDRVLEEALRRVEELARRIKEHSKRVLETVRRLVEEIKKHSRKVLEEVRERIKRIKDELR

SEQ ID NO: 10637 - protein, 183 aa, Artificial Sequence; identical to SEQ ID NO: 10636
  Synthetic

SEQ ID NO: 10638 - protein, 183 aa, Artificial Sequence
  Synthetic
SEVEKAEKDVRDLLKDLRRVSEKVKRAVEDLLRDLKRTSDKASEDAKRLLDDLRRKVEERGGDRLRDEVREAEKEVEKLLRENNTEVDKVRKELEDELRRNEEMVRTVERRLRELLERIKRIEEDRVVKEILDEVEKLIREIKKHSEDLLRKVRKDIKRVKDHTKRVLDRIRKLIEDIKRRLE

SEQ ID NO: 10639 - protein, 183 aa, Artificial Sequence; identical to SEQ ID NO: 10638
  Synthetic

SEQ ID NO: 10640 - protein, 181 aa, Artificial Sequence
  Synthetic
DEVKELLDRVREEIRRDKERVKKLLEDSKRLNERDKREVKRLLEEVRELIKRLEDIIRKSDKDDELEKIVREIERRLRRVIEESEEHVKRTVDTDRKLLEDSKRHAEESARRLKEVLEDAKRKGLEEEVVKDLERLLRDLERVNDEVEKRLRDLTEDSKRFNDEVAREIEKLLEDVARTVK

SEQ ID NO: 10641 - protein, 181 aa, Artificial Sequence; identical to SEQ ID NO: 10640
  Synthetic

SEQ ID NO: 10642 - protein, 181 aa, Artificial Sequence
  Synthetic
REAEELLKRVEDLIRRLKDMIRKLLEDSKRLNERDVETVKRLLEDVERTIREIKDEVRRDKDKDRLRDLVRRVEERLRELLERSKDHVRRTAETDRELLDRLRRLVEKVERELRDMLRELEERGADERIVREVEKLLEKIKRDVDRVRRELERLTEESKRINDKAVRDIEELLEDLKRAVK

SEQ ID NO: 10643 - protein, 181 aa, Artificial Sequence; identical to SEQ ID NO: 10642
  Synthetic

SEQ ID NO: 10644 - protein, 185 aa, Artificial Sequence
  Synthetic
DELERLLEDVERVSRETKKLLKKLLDDAKRVIDKNREDSRRSLEEVERVIREAKELLKDGQEKEKLLRDVERIVKEVIEKNREVVDRVRDIVREIVERIERLVRKNKEDVDRVRREAEKRSRTKDTERRVRDVVKKIRELSEDVEREAKKVIDRLKELLEDIERENRRVEEEIKKLLEDVERTAR

SEQ ID NO: 10645 - protein, 185 aa, Artificial Sequence; identical to SEQ ID NO: 10644
  Synthetic

SEQ ID NO: 10646 - protein, 182 aa, Artificial Sequence
  Synthetic
KLVERLVKEAEDLTEEHKERLDRLLKENEKISRESKKRLKEILEENERVVEEVKKLLRDGQPKEELVKTVRKISEDSKRRLEELVRRNRKVSKESKERLDEILKTNEDMVREVEERLKREVDDRKKVDEVRRRLEELHKELEKVVRDVKRTSEKLVRDSEDMARKVVKTSEDLLRELEEEAR

SEQ ID NO: 10647 - protein, 182 aa, Artificial Sequence; identical to SEQ ID NO: 10646
  Synthetic

SEQ ID NO: 10648 - protein, 182 aa, Artificial Sequence
  Synthetic
SRAEDLVRRVEEMTRKHKKDLDDLLRENEEVSRRSKERIRKLLKDIKDVVDDVERVLRAGDDKKRLVEEAEKVARDVERDLRRLVKENRDISRTSKERLDDILRTNREVIERVDDALRREVSDRDKVEEVRERLKKLHTELEKRVREVKRDSERLVEDSERTVEELLRRVRKLLKEVRDSVK

SEQ ID NO: 10649 - protein, 182 aa, Artificial Sequence; identical to SEQ ID NO: 10648
  Synthetic

SEQ ID NO: 10650 - protein, 182 aa, Artificial Sequence
  Synthetic
SEAERLVEEAERVTREHKKRLDDLLKEVRRVSEDSKRKLEKILKENEDVVEEVKELLKAGDDKDKLLEKVRKISEDSRRRLEKLVEENKEMADRVRKALDDILDTNRRVVEEVKRRLEREVSDKEKVDRVRRELDRLHKELAEVVERVKRAVDKLLRDSEEEVKRVEERSERLLKEVADALR

SEQ ID NO: 10651 - protein, 182 aa, Artificial Sequence; identical to SEQ ID NO: 10650
  Synthetic

SEQ ID NO: 10652 - protein, 182 aa, Artificial Sequence
  Synthetic
SDVDKLVDDVRRETEKHKKTARDLLDELRKVSEESRRRLKRLLEEITEVVERIKRVLEAGRDKDELLERIEKVVREVREKLKELVKRNEDVVREVKRRLEELLRTNKKIVDEVKRMLDERVSDEEEVRRAKEELDRLHKEVEDVVRDVTRELDRLLKRSREVVERVREEADRLLEEVERTLK

SEQ ID NO: 10653 - protein, 182 aa, Artificial Sequence; identical to SEQ ID NO: 10652
  Synthetic

SEQ ID NO: 10654 - protein, 182 aa, Artificial Sequence
  Synthetic
SEVDELVERAERISRESKKTIKKILEDNERVSKRHKDELKKLLDELKRVVDEVRKVLERGTPKEELVKEVEEVVRRVKETLKRLLDTNHKISKESKERLRKLVEDNKRVVETVKKLLEDRVSDKEKVERALRELDRLLEESKRVVDEAEKTSDKLNKEVEEMARRVEEEVDRLLKEVRDDAK

SEQ ID NO: 10655 - protein, 182 aa, Artificial Sequence; identical to SEQ ID NO: 10654
  Synthetic

SEQ ID NO: 10656 - protein, 182 aa, Artificial Sequence
  Synthetic
SEADELVKEIEDVSRRSKEELTRLLEEAEKVSREHKKTLEELLRRIEKVVRDIKEVLRGGTPREELLKTIRKLVEDVRRELERLLRTNHEVVRRVEDRLRKLVEDNERVARKVKDELRRRVSDEKKVREVEKLLDKLLEESRKRAKEVLRALRELNREVAEVVRRVEERLRRLLKEVEEAVR

SEQ ID NO: 10657 - protein, 182 aa, Artificial Sequence; identical to SEQ ID NO: 10656
  Synthetic

SEQ ID NO: 10658 - protein, 182 aa, Artificial Sequence
  Synthetic
SDVDKIVEEIERISRDSERRIREIVERNKKVSEDHKRELERLLKEMEKVVEDVKKVLKDGDDKKKLKDEARRVVERVKDDLRKLLETNHEISKRSREELRKLVEDNERVVRKAEKDLKDRVSDKKKVDEARKKLRDLLERSKEVVKEAERRLEKSNRDVRREAERVRKALDDLLKEVDEAVR

SEQ ID NO: 10659 - protein, 182 aa, Artificial Sequence; identical to SEQ ID NO: 10658
  Synthetic

SEQ ID NO: 10660 - protein, 182 aa, Artificial Sequence
  Synthetic
SRADELVERAKRMTDEHKKTAEDILRENKRVSDEHKKTLEKILRENEKIVDEVAKLLEEGRDKEELVRRVEKVSRDSKRRLKELLETNHRISEESERRLRELLRTNREVVEEVRKRLKDEVSDKDKVREVEEELKRLHKEVEDVVDTVRRTSEKLNDEVRKVVETVTRRSEELLEELRRRAK

SEQ ID NO: 10661 - protein, 182 aa, Artificial Sequence; identical to SEQ ID NO: 10660
  Synthetic

SEQ ID NO: 10662 - protein, 182 aa, Artificial Sequence
  Synthetic
KEVEKLVTEIREMTERHKRTLEELLKEAEEVSRRHKEDLKRLLDENRKIVEEVARVLEKGEPKEELEKRVREVSKRSEETLRTLLETNHRVVKRVEDELKRLLETNRRMVETVKDLLRKTVSDKDKVERVLREADRLHEEVRKVVEKVREELRRLNEEVRKVVEEVRRDSERLVREVEERAR

SEQ ID NO: 10663 - protein, 182 aa, Artificial Sequence; identical to SEQ ID NO: 10662
  Synthetic

SEQ ID NO: 10664 - protein, 182 aa, Artificial Sequence
  Synthetic
SRVDELVDRARKMTEKHKEELKRIVEENRRVSKEHKERLEDILRRNAEIVERVKEVLKRGTPREKLVKDVREVSRDSKRRLDDLLRTNHKISEESKRRLRELLRTNEEFVRTVEDLLRREVSDEDKVRRALEELKKLHDELAKEAKRVEELLDKSNEEVEKVVRDVREASERLLEELERTAK

SEQ ID NO: 10665 - protein, 182 aa, Artificial Sequence; identical to SEQ ID NO: 10664
  Synthetic

SEQ ID NO: 10666 - protein, 182 aa, Artificial Sequence
  Synthetic
DEVKKLVDDARRLTEKHKTDLERLLDEARKVSEEHKKRLEELLREIAEVAKEILKVLRKGEDRERLVKEIEKVVRDVKRKLDELLKTNHDVVRRVEDELRRLLKTNKEVVDTVRDELERRVDDREKVKRVEETLERLHKEVEEVVRRVKKALRDLNDEVRRVVDEVRRRLEELLKRVEEEAR

SEQ ID NO: 10667 - protein, 182 aa, Artificial Sequence; identical to SEQ ID NO: 10666
  Synthetic

SEQ ID NO: 10668 - protein, 187 aa, Artificial Sequence
  Synthetic
REVDEVEERVTRLLKKVRDVAEESRRRSEELLKKSRDVVEEVKKEVDKLLEEVRDMVRRVKDKGVEEKLRKLIRDAEKILKELRKRLEENIRENEELLRRNEERLERLIRELEDLLTKLRKMLKDNAEGRVLKKLVEEVKKLADEIERELERTSKEIEELSRRSEEDLRRLVRKLREVVRKIEEDLR

SEQ ID NO: 10669 - protein, 187 aa, Artificial Sequence; identical to SEQ ID NO: 10668
  Synthetic

SEQ ID NO: 10670 - protein, 187 aa, Artificial Sequence
  Synthetic
REVERVERELERLLEEVREVAERSERESKKLLEDTRRVVRKVKEDVRRLLEEVRDVVRKVKDKGVEEELRKLIKELEDLLRRLDETLEKNIRDNERVLEDNRRILEELIRELEEMLRRLKKSLEDNAEGDVIRRMVEEVEKLARRIKETLERTVRRLEELVRRSEKNLRTLVEEVRKAVERIKETLR

SEQ ID NO: 10671 - protein, 187 aa, Artificial Sequence; identical to SEQ ID NO: 10670
  Synthetic

SEQ ID NO: 10672 - protein, 187 aa, Artificial Sequence
  Synthetic
SEAERVEEDVRRLLKRVEEVIKRSEERSRELLKKTEDVVREVRKRVKKLLDEVKDTLDKVRDKGVEEEARRLIEELKEILERLERNLRKHIKDNRTLLRKNKEDVTRLKEELEKIVEDLKRLLDDNVGGEVLDRLVEELRKLVEEIERDLERTVREIEKLVKDSDRNLEDMVRELRRVAERIKEELR

SEQ ID NO: 10673 - protein, 187 aa, Artificial Sequence; identical to SEQ ID NO: 10672
  Synthetic

SEQ ID NO: 10674 - protein, 187 aa, Artificial Sequence
  Synthetic
REVDEVRRRAEELLKEVRDVVTESEKESRRLLEDTRRVVEDVKRRVDRLLEEVRDLLREVSEKKVEEEARKLIRELERIVEDLERKLDRDIRENERLLEENKRRLEKLIRELEEILRDLDRKLRDNAEGDVLRELVKRLEDVAREIKKRLEDTLRKLEEVSRRSKENLRELVERLRRIADEIRERLR

SEQ ID NO: 10675 - protein, 187 aa, Artificial Sequence; identical to SEQ ID NO: 10674
  Synthetic

SEQ ID NO: 10676 - protein, 186 aa, Artificial Sequence
  Synthetic
DEVDRVREEIERLLREVEEVLERSERESRRLLREVEEMLERSDEEVRRLLKEVEEVLRDELTDEDLMRKIRETLKKILEDNEELVRRIKRRAEEALERDREVVEEIRKRAEKVLEEVERLLRDKKESGEVLEEILRRAKEEVEKLKRELERTVERLAELVEELKRELERSTREVRKTVEELKRRIK

SEQ ID NO: 10677 - protein, 186 aa, Artificial Sequence; identical to SEQ ID NO: 10676
  Synthetic

SEQ ID NO: 10678 - protein, 186 aa, Artificial Sequence
  Synthetic
DEAEDLERRARELLEEVERVLEESIRRSEETVKEVEDMLRRSTEEVERLLKRVEDVLREELSDEKRLEEIKRKMEEILKRNRELVEEIRKELEESLRRNRELVERAKRTLERIVRKVEKVIREKKDDGELLKRLIDEVRRLAEKIKEELKESSKRDEEKVEKLKKELKDSTDAVRELVERLEREIK

SEQ ID NO: 10679 - protein, 186 aa, Artificial Sequence; identical to SEQ ID NO: 10678
  Synthetic

SEQ ID NO: 10680 - protein, 174 aa, Artificial Sequence
  Synthetic
DEVEELVKEVEERIKKVHKENEDVLRESEELMKRLHEENERLLREVEELVRRIRELRKRGDLREEDVKRVLKRIEELVERARRENKKASDRNRDLIRRVKKTNDDVLREIEELVKEIDVREARERIRRLLTESRKSVEEVEKRLRELSKRSEESVERVERTARRLLKELEDMTR

SEQ ID NO: 10681 - protein, 174 aa, Artificial Sequence; identical to SEQ ID NO: 10680
  Synthetic

SEQ ID NO: 10682 - protein, 174 aa, Artificial Sequence
  Synthetic
EEVKRLVEKVRKLIEDSKRRNRDVLRRVEELVRRVHRRNEEVLRRVEKLVEDIKELLRRGDLREEEVEKIKRRLRELAREVEEENRRVAEDIRRLLDEVRRENERVLREIRELLKEIPVEEAEREIERLLEESKRSVEEVEERIRRLIRESEESVREVKERIDELLKDADRATK

SEQ ID NO: 10683 - protein, 174 aa, Artificial Sequence; identical to SEQ ID NO: 10682
  Synthetic

SEQ ID NO: 10684 - protein, 174 aa, Artificial Sequence
  Synthetic
REVEELVKDVERLMREVHRRNEKVVEEVEALIRKSKEDNERVAREVERLVREVEKMLRRGDIREEDIKRVLKEIEDLLEEVERRNRRVLEEIERLLREVTEDNREVVRKLERLAEEIPDREAKERIKDLVRKSRDSVREVRERIRRLLEDSKRSVDDLARRIRELLRKAAEKAR

SEQ ID NO: 10685 - protein, 174 aa, Artificial Sequence; identical to SEQ ID NO: 10684
  Synthetic

SEQ ID NO: 10686 - protein, 174 aa, Artificial Sequence
  Synthetic
DEAEELVDRVRKLAEDVHKKNEDVLRESDALVKDSDRRNREALRRVEKLVEDVEELLRRGEIREEEIDKVLKEIARLLDELRKENKDLSRRNEELIERVERENRRVLTEIDKLVKEIPVEEVKRRIKELLKRVEESVRTVEEELRRLSKESEESVKRVEDRIRELLKRLRDAAR

SEQ ID NO: 10687 - protein, 174 aa, Artificial Sequence; identical to SEQ ID NO: 10686
  Synthetic

SEQ ID NO: 10688 - protein, 174 aa, Artificial Sequence
  Synthetic
DEAEDLVRKVRKLIEESKKENEDLLREVRELVARVHEENERVLREVEKLVEDIRRLLRRGDLRREDVRRVEEEIKELLKEVRRINKEVLEEVKRLVDEVKRRNEDVLRKIEDLVRRIPVREVKKAIEDLLKESEDSVREVEEEIRKLLKDLEKSVRDVERAIEKLLDELRKDTK

SEQ ID NO: 10689 - protein, 174 aa, Artificial Sequence; identical to SEQ ID NO: 10688
  Synthetic

SEQ ID NO: 10690 - protein, 174 aa, Artificial Sequence
  Synthetic
REVEELVREAEELVRRVHKRNEDALRRSKKLVEDVHRKNEEVLKRVERLVERIEELLRRGDLREEDVERVLREIKKLIEEVEEDNERVSRENKELVDRIREENERVAKRLEDLVREIPDKEAAERIKRLIDEVRKSVEEVERRAEELSRELRRSVKEVRDALKRLLDDLRRATT

SEQ ID NO: 10691 - protein, 174 aa, Artificial Sequence; identical to SEQ ID NO: 10690
  Synthetic

SEQ ID NO: 10692 - protein, 174 aa, Artificial Sequence
  Synthetic
REVEELVKEVRRRVREVHERNRRVLEDSERLVREVHKRNEEALRRSEELIKRVEDMRRRGDLREKDIERISETNEKLVKEIKDENEEVSRRNEKLVDEVRRRNEEVLKELEKLLRDIPDERAEREIRRLLEEVKKSVEDLTRKARKLSRDLERSVREVEERARDLSRRLREKTR

SEQ ID NO: 10693 - protein, 174 aa, Artificial Sequence; identical to SEQ ID NO: 10692
  Synthetic

SEQ ID NO: 10694 - protein, 174 aa, Artificial Sequence
  Synthetic
SEVEKLVKDVEDLAREVHKRNKELVDEVRDRVRRVEERNKRVVDEVREEVKKLIDLLRRGDLREKDIRRMLERAKELIDRVKEDNDRVARTLEDLVRKVKEENEKVLTDIERLVEEIPDEEAKDRIRELLKRVEESVEKVKRDIERLIERSKESVRRLEERIKELLRELEEAAR

SEQ ID NO: 10695 - protein, 174 aa, Artificial Sequence; identical to SEQ ID NO: 10694
  Synthetic

SEQ ID NO: 10696 - protein, 174 aa, Artificial Sequence
  Synthetic
SEVEDLVRKVKKLMEDSDRENKRLVDEVRERVEEVKKRNKEVVDEVRERVKRLEEMLRRGDLREEDIKRVEKEIEDLVKEVKDTNKRVADELRKLVEEVKKRNRDVAERIKELVKEIPDKDAAEAIKDLIRKSEKSVDEVRREIERLIKESEDSVKRVTDEIRKLLKRLRDTTT

SEQ ID NO: 10697 - protein, 174 aa, Artificial Sequence; identical to SEQ ID NO: 10696
  Synthetic

SEQ ID NO: 10698 - protein, 181 aa, Artificial Sequence
  Synthetic
SELEEILKTVKKLVDDHKRLSEEILRRVRKLVEEHKRKSEEILKRVTDLAEDVKDKIRKDRSKEDLERIVREARERVRRMLEEDRENLERIVRTIEKVLRDDKEHLKDVERRIRKLLEDARRRGLPREVEKELDRLLKELERVSRESEKELRRLLKELEEASRESEERLRRLLRDVEEALK

SEQ ID NO: 10699 - protein, 181 aa, Artificial Sequence; identical to SEQ ID NO: 10698
  Synthetic

SEQ ID NO: 10700 - protein, 175 aa, Artificial Sequence
  Synthetic
DEIETVKEELKKLLERLEESSRKVERDLEDLLRRSEESTREVEKRLKELLEDVRRKLREKKELVREVEEEVRKLLEESRRSLEENRRLIEKLAKESRDSLREVEKRVRELLKKLDDGADVKEVLDRVRELARTHHELNRELLREAEESSREHHRLNEELVDRVRKLVKEVEDRAR

SEQ ID NO: 10701 - protein, 175 aa, Artificial Sequence; identical to SEQ ID NO: 10700
  Synthetic

SEQ ID NO: 10702 - protein, 175 aa, Artificial Sequence
  Synthetic
SEIERVKKALRKLLEDSRKSSEDLARELKRLLEESRKSTEKVERDLTDLLREIEEKLRDAKETVEEAKREVDRLLEESRKSLRDNERLVERLIRESERSLRENEDEVRRLEELLDRGKDLDTILERVERSSREHHKLNERLLETLRRSSEEHHKRNEELVRRVERLLEEVERRRK

SEQ ID NO: 10703 - protein, 175 aa, Artificial Sequence; identical to SEQ ID NO: 10702
  Synthetic

SEQ ID NO: 10704 - protein, 175 aa, Artificial Sequence
  Synthetic
SKIERVKEEIRRLLDTLKKSSETVIREIEKILKESRESSKKVEDDLRRLVREVEKKVREKKELVEKLKRVVDKLAEESRRSLEDNERRLTELIRDSERSLEEVKRRAEEVEKLLEDGKDVDKVLRDLEDLVRRHHERNKELLDRVRKSSEEHNRTNEELLKEVERLARKVIKDTT

SEQ ID NO: 10705 - protein, 175 aa, Artificial Sequence; identical to SEQ ID NO: 10704
  Synthetic

SEQ ID NO: 10706 - protein, 175 aa, Artificial Sequence
  Synthetic
DEIEEVKRRARELLREATESSKEVAKALDELLERDRDSSRRVKEDLKRLLEEVRRKLRKDKKTVEEVERRVKKLADESDKISEENERRVDKLKKESEESLRRLRDKVRKLEKKLEDGKDLEKVLRDVEKLMREHHELNRELLKRVEDSSRTSHELNKRLVDTVRKLVTDAAEKAK

SEQ ID NO: 10707 - protein, 175 aa, Artificial Sequence; identical to SEQ ID NO: 10706
  Synthetic

SEQ ID NO: 10708 - protein, 175 aa, Artificial Sequence
  Synthetic
SEIEEVDERIKALLKRSTESSKRVEDEARRLMKEDKDSSKEVEDRLRDLLRKVREKLRDSKETVEEVERRVTELAERSRRISRENAERLKDLLRKSKESLERNRRDAERVRKLLRDGMDLKKVLDDLKRSSEEHHRLNEELLKRAEDSSRTSHRLNRKLVEEVRRLVEKVLEEVR

SEQ ID NO: 10709 - protein, 175 aa, Artificial Sequence; identical to SEQ ID NO: 10708
  Synthetic

SEQ ID NO: 10710 - protein, 175 aa, Artificial Sequence
  Synthetic
DEIEEVKKTLKKLVEELEESTRRVEEELKKLLKESEDSTRRVEDELRRLLEEVERKLRDDKKTVRDVEEKVRRLAEESRESLRRNREEVKRLLEESRKSLEDVKRTIERILKLLDDGKDLDEVLKDVERLVKEHEDLNKELLKKVEKSSRDHHELNKELVRRVEELVREAIKKTT

SEQ ID NO: 10711 - protein, 175 aa, Artificial Sequence; identical to SEQ ID NO: 10710
  Synthetic

SEQ ID NO: 10712 - protein, 175 aa, Artificial Sequence
  Synthetic
DEVEKVKEEIRRLLKRLEDSTRDVERRLEELLRESTESSKEVEERLKRLLDEVRKKLKDKKDDVRRVEEEVRKLAERSRESLERNRRRVEKLMKESRDSLREVEKRAKEVEKLLDDGKDVKKVLEELRELVRKHEELNRKLLEEVRESSERHKKLNKELVDEVKRLAEKITEEAR

SEQ ID NO: 10713 - protein, 175 aa, Artificial Sequence; identical to SEQ ID NO: 10712
  Synthetic

SEQ ID NO: 10714 - protein, 175 aa, Artificial Sequence
  Synthetic
KEIEDVKRALEKLLEDDKRSTEELKDRLARLLEDSKRSSDKVIEDLDRLLKEVRDKLREREESVKEVEDRVRKLAEESRDSLRKNEDLVRKLLEESKKISDDNRKKVKRALELLERGADLDEILKRVEDSSRESHKKNEELLRRVRRSSEEHKRLNEELLREVEELVKEIVKEAK

SEQ ID NO: 10715 - protein, 175 aa, Artificial Sequence; identical to SEQ ID NO: 10714
  Synthetic

SEQ ID NO: 10716 - protein, 175 aa, Artificial Sequence
  Synthetic
SKIEEVKKALRRLLEDLKRSTDRVKEEAKKLLDESRKSSEEVKRELERLLEEVTRKLRDKKEVVKEVRERVKRLMEESERSLRENEETVKRLLEESEKSLRRVEEEVRRLEKKLEDGADADKMLRDIERLVEEHKRLNEKLLREVRESSKRHNEKNEELVKTVKKLVEDAEERAK

SEQ ID NO: 10717 - protein, 175 aa, Artificial Sequence; identical to SEQ ID NO: 10716
  Synthetic

SEQ ID NO: 10718 - protein, 175 aa, Artificial Sequence
  Synthetic
SEIETVKKELERLLDESRRSTETVEREVEDILRKSTESSEEVKDRLDKLLKEVRDKLRELKETVKKVEDEVRKLAEESKDSLRKNRETAKELLRRSRESLDKNRRDVEKAKKLLEDGKDLREVLERVRKSSEDHKELNKELLERLRRSSKEHNDKNKRLVDEVRRLVEEVIRRAT

SEQ ID NO: 10719 - protein, 175 aa, Artificial Sequence; identical to SEQ ID NO: 10718
  Synthetic

SEQ ID NO: 10720 - protein, 175 aa, Artificial Sequence
  Synthetic
REIEEVKERLKKLLKDVTDSTDKVRKDLEKLLEDDRRSSRKVEEDLRRLLKDVRDKLREEKELVKRVEEDVRRLLEESKDISRENEKTVKRLAEESRRSLEDLRRRIEEIIKKLDDGMDLEKVLREAEKLAREHERTNEKLLKDVEKSSRDSHKRNKEIVDRVKKLAEDIIRKTK

SEQ ID NO: 10721 - protein, 175 aa, Artificial Sequence; identical to SEQ ID NO: 10720
  Synthetic

SEQ ID NO: 10722 - protein, 175 aa, Artificial Sequence
  Synthetic
SEIERVKKRLEELLREVEESTRRLEERLKRLLEEAKRSSEEVEKELRRLLEEVRRRLRRDKKLVRELERRVKELLEDSRRSLEELKKRVRKLAEDSKRLLEEVKREVEKLKKKLDDGMDLDDVLRRVEELAKRAHDENERLIREVEELVRRHNKRNKELVDEVKRLVEKVIEEER

SEQ ID NO: 10723 - protein, 175 aa, Artificial Sequence; identical to SEQ ID NO: 10722
  Synthetic

SEQ ID NO: 10724 - protein, 175 aa, Artificial Sequence
  Synthetic
DEIERVKEELERLAKEDKDSTDTVKRELERLLEESKRSSDKLREDVERLLREVRERLRDKKEKVRDVEEKVKRLLEESEESLRENEKTVRKLAEDSERISRENERRIRDALRLLDAGADLKRILEEVKRSSEESHKLNEELLDEVRKSSEEHNKLNEKLLRDVERLVRKVLTETK

SEQ ID NO: 10725 - protein, 175 aa, Artificial Sequence; identical to SEQ ID NO: 10724
  Synthetic

SEQ ID NO: 10726 - protein, 188 aa, Artificial Sequence
  Synthetic
DELDKLLRDAEEVVRRVKEENKRLVKRDEEVVRRIHELNRKLLEDIRKVVEDVKEEIKEGRPDKELKRLLDDLKRKAEEVVRRSRELLKELEKLSRDVIRTSRELLERVKKIVEDLIKKLEDDMTSEDAKRKVKRVKDELKRLVEEVEEVSRRSEERSRKTLEDVRDSSRRLEEELRKLVKEVEEAVR

SEQ ID NO: 10727 - protein, 188 aa, Artificial Sequence; identical to SEQ ID NO: 10726
  Synthetic

SEQ ID NO: 10728 - protein, 188 aa, Artificial Sequence
  Synthetic
DELEKLLEDIRDVVRRIKETLEKLVKEDRDVVEKVKEDNKRLLKEMEDVVRKVKEEIRSGLPREVLERVLERVRRIAEEIIRRSRKIVKDVEKKSTDLKRRLDEILKEAKERVEEIAKEVKKKVTEERLERRAEEMEERLRRLVEEVREVVERVKEESDRTVEEVRRSSDRVEKEVERLVREVEDKVR

SEQ ID NO: 10729 - protein, 188 aa, Artificial Sequence; identical to SEQ ID NO: 10728
  Synthetic

SEQ ID NO: 10730 - protein, 178 aa, Artificial Sequence
  Synthetic
EELERLMRRSEESLKRSEDTVRELIREAREILKRIKEELKRLLEEAERILEEVKKTVRDLRDKKEVLRKLLEDLRRLVEEIERRLKKLLDELREVVREIKERLKKLNDDHRELIKEVAAEVDSKDLIKTARDTLRESERVSKELEERLKKIVEEVERLVEEVKKELERIVKDAERDVK

SEQ ID NO: 10731 - protein, 178 aa, Artificial Sequence; identical to SEQ ID NO: 10730
  Synthetic

SEQ ID NO: 10732 - protein, 178 aa, Artificial Sequence
  Synthetic
DELRKLARDAEEILKRSEEEVRKLKKRSDDSLRRSREEVKKLEDEIREIVDRIKKRVEERPEAKEELRKLLKELEDLVREIEERLETLNREHKKLIEEIERRLEKLNEDLDRVVKDLARKVDVEELKRTLEEIVERSKRVSDRLRERLKRTLDDSRRISDDLRRRLKKLVDDIRREVK

SEQ ID NO: 10733 - protein, 178 aa, Artificial Sequence; identical to SEQ ID NO: 10732
  Synthetic

SEQ ID NO: 10734 - protein, 177 aa, Artificial Sequence
  Synthetic
KEIEDVKEELKKVLEEDRDSLRKVEKEHRRLAEEVKRKVRELEESLKRIVEEVERIAREAKKGEVLKELRKRIRDLLEELKRVLKEVEDRARESIERNRRVSEKSERDIEKIMKELEDGKDLETVIREVRRILEESKRLNDKSREEVRKLVEELKDIVRRIEETVRRLLEEAKERLR

SEQ ID NO: 10735 - protein, 177 aa, Artificial Sequence; identical to SEQ ID NO: 10734
  Synthetic

SEQ ID NO: 10736 - protein, 183 aa, Artificial Sequence
  Synthetic
DSVDRLRRRVDEVLKTVEDALRRNKKDAEDLLRRIEEVLERLERRSEKLLKEIDEVLKRVPEKLVRDARRRLEELREHSKRLVDDLRRDLRRILEKNRELNDKIRKDLKRLKDKVEKLAKDGVSDEILTRAVEEIDELLRKLKRELDESTKESRKRVEELEKRLRDNTKRVKKDVDDLKRRVS

SEQ ID NO: 10737 - protein, 183 aa, Artificial Sequence; identical to SEQ ID NO: 10736
  Synthetic

SEQ ID NO: 10738 - protein, 178 aa, Artificial Sequence
  Synthetic
SSIERLEEESRKNIKELEDSVKELKEEVDRLVEELERSVRELAKIVEDVVRELKKRARKREKEVKEVVERARKLIDEVRRENERVIEEMRRLLKEVEDDNRRVVEESKKLIEEVKNGDDDEEVKRVLEESHRLVREVHERNKRVAERVRDLVRRVHEENERVAEEIRDLVRRVEEEVR

SEQ ID NO: 10739 - protein, 178 aa, Artificial Sequence; identical to SEQ ID NO: 10738
  Synthetic

SEQ ID NO: 10740 - protein, 186 aa, Artificial Sequence
  Synthetic
SEIEDVVKKLRDLSERNVRDIDRLVKEIDELLKRDKEEIKRVVDDIKRRVREIKKIIEEDRDKEKLRELVRKVEEDLEEIVKEVKRHSDELAKRLREIVERVKRHSEEVIKTLRELVDRVRKRVREEKEMLDRLRKVVDELVKENKKAVEDLKKRVEDVIRESKRVVEEARRVVDELKKELRDELK

SEQ ID NO: 10741 - protein, 186 aa, Artificial Sequence; identical to SEQ ID NO: 10740
  Synthetic

SEQ ID NO: 10742 - protein, 188 aa, Artificial Sequence
  Synthetic
SEIEKLVEEAKRLVKEAEDRLRKLSKESEESVRRVVKTLKDLVRELERLVEEVRKIIERNEGKEELEELVDRAKRKLEEVLKRVTELVKRHHEKNEKSLRDVEDLARRVKRKLEDILREVRERVTSDEMRKRVKELEEAVKELTKEIKEVVDRHRETVERSSRKVKTVLDDLRRVVEEILRRVEDAAR

SEQ ID NO: 10743 - protein, 188 aa, Artificial Sequence; identical to SEQ ID NO: 10742
  Synthetic

SEQ ID NO: 10744 - protein, 188 aa, Artificial Sequence
  Synthetic
KKIEDLVEEIKRLSDENRRRVERLSEDSKRSLEENKKKLKELVERIKKLLEEVSDKIRKDEDKDRLRELVKRLKEKLRELLEEARESSERHHRENEKSLKEVEDSSREVRKTLEKLVEDVRRDSTSEEAEERLRRAEDTVRRLVERNREVLEEHERTLRRSSEESKRALKEVERVVREVLKRVDEELQ

SEQ ID NO: 10745 - protein, 188 aa, Artificial Sequence; identical to SEQ ID NO: 10744
  Synthetic

SEQ ID NO: 10746 - protein, 188 aa, Artificial Sequence
  Synthetic
DELEKLVRDLEKRVKEVKDELKRSSEESERSLDEVRKTLKKLVEEMRELLKEVKRIIERNEDRDELKKLVEEAERRLREVLERVRKLVEEHHRRNEELVRRSRELVDDLRRELEELEKDVRDKSTSEEARERLERLRKRVEELLREVEKALEDDEKTVRESSKRIKKVLKELEDTARELVKEVRETAR

SEQ ID NO: 10747 - protein, 188 aa, Artificial Sequence; identical to SEQ ID NO: 10746
  Synthetic

SEQ ID NO: 10748 - protein, 188 aa, Artificial Sequence
  Synthetic
SELEKLVRDLERLSEDNKRRLKESSKESKESLDRVRETIKRLVEEAEELLKRVVDTIRRTEDKEKLDKLVEELKRRLEKLVRELKELVDRHHKRNEELLERSRRSSEDVKKKLKEVLEDVARKSTSEEARERLERLREKVEELARDNERALREDERTVRESSERLRKVLEEAKDRIDKLVKAVEDAAR

SEQ ID NO: 10749 - protein, 188 aa, Artificial Sequence; identical to SEQ ID NO: 10748
  Synthetic

SEQ ID NO: 10750 - protein, 188 aa, Artificial Sequence
  Synthetic
SELEKLVEEAKRLSDKNEEDLRRSSRESRESLKENKERIERAVKRLADLVRDVKEKIKRTESKEDLKRLVDELRERLKRLLEKVRKSSEEHHRENERLLRESTKSSEDVVRRLDEIAEEVARRSTTEEMKERLERLRDTLKKLKERNKEVLREDRETVTDSSRRSEEVVREAEERVERLLREVEEAAR

SEQ ID NO: 10751 - protein, 188 aa, Artificial Sequence; identical to SEQ ID NO: 10750
  Synthetic

SEQ ID NO: 10752 - protein, 188 aa, Artificial Sequence
  Synthetic
DELEKLVRELEELVKRVKEELERSSKESEDSLRDVKKKIEDLERKLDKLLKEVTDEIRRNESREDLKRLVEEARRTLEKVLDDIRKLVEEHEKKNKKLLDDSRELVERLKERLEEVEKDVRDKSTDDEMRKRLEDLERKVRDLARRVEKALEEDERTVRESSKRIRELLKRLEDKVRKIEKDVDDARR

SEQ ID NO: 10753 - protein, 188 aa, Artificial Sequence; identical to SEQ ID NO: 10752
  Synthetic

SEQ ID NO: 10754 - protein, 188 aa, Artificial Sequence
  Synthetic
SELERLVREVRELSDDNRRKLERSSRESERSAKEVERTLEKLVKELRELVERVKRDIERVRDESRLKELVDRARKTLEDVLRDVKRLVDEHRERNRELLERSEKSSRDVEERLKDVVRDVREKSTTEEMKERLKELEKEADDLRRENEELLDRDRRTVEESSKRVEKALRDLEREVRRILREVEETMR

SEQ ID NO: 10755 - protein, 188 aa, Artificial Sequence; identical to SEQ ID NO: 10754
  Synthetic

SEQ ID NO: 10756 - protein, 188 aa, Artificial Sequence
  Synthetic
SKLERLVEELKRLSDENVKDLERSSRESEESLKRNKEEIERVVERLRELLEKVVRDIKDDEGRERLDKLVRDLEEALKELVKRVRKSSEDHKRRNEELLRRSEESSRRVEEVLRRVLEEVTRDVTSEEAKERLDRLREAVEKLREDNKRALDRDRETVERSSKKSEDAVRRAEEDVRRLTETVRRAKK

SEQ ID NO: 10757 - protein, 188 aa, Artificial Sequence; identical to SEQ ID NO: 10756
  Synthetic

SEQ ID NO: 10758 - protein, 188 aa, Artificial Sequence
  Synthetic
SEIEDLVRKLRELLRDVKKKLKESSKRSEDSLRRVKEEIDKLVEELKKLLDEVKKEIERTEDKDELRKLVEEAARTLKRELDRIEEEVRRHDELNKKLLDESRKLVEDAARELEKLVEEVRRRSTTEEAEKKMRELEEEVKKLLEEVDRALKDDERTLRKSSKDIKKVLDDLRRTVKKLKEDVEETMR

SEQ ID NO: 10759 - protein, 188 aa, Artificial Sequence; identical to SEQ ID NO: 10758
  Synthetic

SEQ ID NO: 10760 - protein, 188 aa, Artificial Sequence
  Synthetic
DEIERLVEELRKLSERNKRELDRSSEESRESLKRVKEELKKIVEELRRLLEEVKDRIRKDESREDLERLVKELEERLRKLLDEVRELVERHDERNKKLLDESRKSSKEVKDELRKLLEDVERKTTSEEARERAKRLEKEVRDLAKENEKALEEDERTVRRSSEEIADLLRKVEKVVRELLEEVRRAAK

SEQ ID NO: 10761 - protein, 188 aa, Artificial Sequence; identical to SEQ ID NO: 10760
  Synthetic

SEQ ID NO: 10762 - protein, 188 aa, Artificial Sequence
  Synthetic
SSLEDLVRRARELSDRNREKLKRSSDESRESLKRNEEEIRRLVEELRELLERVRDLIRKLEDKDTLTELVERLKRELERVLEEVKKSSEEHDRRNRKLLEESRRSSKRVKEELKKLVEDADKEVTSEDAKRDLDRLRREVERLIRDNERLAEEDARTVEKSSRDSKKLVEDLEREVEKLRREVERDRK

SEQ ID NO: 10763 - protein, 188 aa, Artificial Sequence; identical to SEQ ID NO: 10762
  Synthetic

SEQ ID NO: 10764 - protein, 188 aa, Artificial Sequence
  Synthetic
SSIEDLVRRLRELSKRNTEELKRSSEESEDSVREVEDRVRELVKRLRELLKRVEDLIRKIEGKEELEKLVRDAKKTLDDVLKEITDLVKEHNDRNRRLLEESEESSRRVKEKLKKVLEDVRRESTSEEMEKRAKELEEEVRDLTRRNEDALRRDRDTVKRSTERVDKVLKDLEREVRDIKRRVDEATK

SEQ ID NO: 10765 - protein, 188 aa, Artificial Sequence; identical to SEQ ID NO: 10764
  Synthetic

SEQ ID NO: 10766 - protein, 188 aa, Artificial Sequence
  Synthetic
RELDELVKELRKLVEEVKDELRKSSKTSKELVEEIKERLERLVRELKRLVDEVRKTIRRLEGEKELRDLVRKAKKRLEDLTREVEKLVREAHERNKKLLEESERLVDRLRERLEELARDVATKSTSEDARRKLEELKETVRELLREVEKALDEDRETVKRSSEEVEEMLKDLRRRVTELDERVEREAT

SEQ ID NO: 10767 - protein, 188 aa, Artificial Sequence; identical to SEQ ID NO: 10766
  Synthetic

SEQ ID NO: 10768 - protein, 188 aa, Artificial Sequence
  Synthetic
DEIEKLVEDAERLSRENEKRVRKSSEESKKLVKEALDELKKLVEELEKTVRDVDREIERNEDRDELRRLVEDVRRRLEELLRDVRRLLEEVHRTNEKLLEDSERSSREVKKDLKRLVEDVRRKSTTEEAKKRMEDMERRVRELEKRNKKVLDEDRETVRKSSKDLEDAVRELEERVRRLAKKVKESAD

SEQ ID NO: 10769 - protein, 188 aa, Artificial Sequence; identical to SEQ ID NO: 10768
  Synthetic

SEQ ID NO: 10770 - protein, 188 aa, Artificial Sequence
  Synthetic
RELEELVKRLRELSRENEERLRRSSDESRKLLERNKERVKKVVDDLRRLVEEVKKEIERDRDRKRLEELVRRAKEVLERLLRDVRKSSEEVHDRNRKLLEDSRRSSKRVKEDLERVRRDVAEKSTSDDARRRLKELEEEVKRLAKRNEDLLREDERTVRESSRRSEDVVRRAEEMVRRLLEEVERARK

SEQ ID NO: 10771 - protein, 188 aa, Artificial Sequence; identical to SEQ ID NO: 10770
  Synthetic

SEQ ID NO: 10772 - protein, 188 aa, Artificial Sequence
  Synthetic
SELEKLVDELRKLSDENRRRLEKSSRDIEKLLKEIRDRIEELKKEIEDLLKEVKERIERLEGRDELRRLVDELRDRLRRLLEEIKRLVEEARKRLKEVLDRSEKSSRDVKRTLRKVLEDARRRSTTEEAEELLRRLEKRVEELARENEEMLKRDEDTVEEVRKRVTDVLRELKRVVEEVRRKVEEEAK

SEQ ID NO: 10773 - protein, 188 aa, Artificial Sequence; identical to SEQ ID NO: 10772
  Synthetic

SEQ ID NO: 10774 - protein, 188 aa, Artificial Sequence
  Synthetic
SKLEKLVKDAEELSRRNEEELRRSSDESRKLLEKNKRRVERLVEELRKLVKKVRDDIRRERDEEKLRKLVEDVKRRLRELLEEVRRSSEEVKKRNRELLERSTKSSKEVEDVLRKVLEDAARDSTTREAEELLRRLEEMLRRLTKKNRELLRRDEETVRRSSKRSEEVVRRAEEEVERLVKDVEDTRT

SEQ ID NO: 10775 - protein, 188 aa, Artificial Sequence; identical to SEQ ID NO: 10774
  Synthetic

SEQ ID NO: 10776 - protein, 174 aa, Artificial Sequence
  Synthetic
KDEERAKKVVEEIKKRVTEIVRRHHKTNEDLVRRVRESSEKHHRRNEELKERVTRKIRKEELLRKLKKLLDESSERSKRLVDELEKEVRKSSEDLRELLKRLTDRLEEVKKLIEDGADIETLVRELEELLKRLEDEVRRLTKRSKEVIDRIHKLNEDLTRESERVLKEVEDRDR

SEQ ID NO: 10777 - protein, 174 aa, Artificial Sequence; identical to SEQ ID NO: 10776
  Synthetic

SEQ ID NO: 10778 - protein, 174 aa, Artificial Sequence
  Synthetic
RETEEVKKELDKLVEEAERAVREHHKENDRLVKRLEEVIRRHEKSVRELVEKVRREVRDESVVRELEEVAKESLERLRKLLEELVKRAEDSSREVEKLLRDLRRDVEELKKMVENGVDLEKIVRRARELVERLKERLKELTRRSEELVKDLERKIERLSRELARIVKEVLDRDK

SEQ ID NO: 10779 - protein, 174 aa, Artificial Sequence; identical to SEQ ID NO: 10778
  Synthetic

SEQ ID NO: 10780 - protein, 174 aa, Artificial Sequence
  Synthetic
SREEEAKKRLEELLREVEKVVRDHHRENEKIREEVERVVEKHKKRNRELVEAVRKRIRDKDVVKEAEDLLRKSSKDLEELLRTLEELIRRASERLREILERVERVVRELKKLVESGMDVREAVERLKEIVERVRRKVEKLTEDSRRVLEELKRRIEKLTRDSERVLKEIEDRTR

SEQ ID NO: 10781 - protein, 174 aa, Artificial Sequence; identical to SEQ ID NO: 10780
  Synthetic

SEQ ID NO: 10782 - protein, 174 aa, Artificial Sequence
  Synthetic
SDKEEVKKEIKKLKEDIKRAVDEHRKVNKRILEEAEKSSREHEKENRDIVRRVREEVEKREVVRTLEERIRRSSDTSRELLRELKERLEDSTRKVEELLRRAEKVLDEALKLIEAGEDIKEVVKELKKILEKLKRELEDLSRKSEDVLRRLHELNKRLTDDSRRVLDEVREDTK

SEQ ID NO: 10783 - protein, 174 aa, Artificial Sequence; identical to SEQ ID NO: 10782
  Synthetic

SEQ ID NO: 10784 - protein, 185 aa, Artificial Sequence
  Synthetic
SEVDRLLKELEDVLKKVEDDIRRHIKRNEDILRESKKLADKLITEIEDMLRKVEEMIRNNSSEDTLRELLERLRDLVKKIRDRVEESDDRLRKLVEESRRNLEELLERLKRLVEKIKEDLERTVDDEEAVKRLEDTARRVEEEVRRLIRELEDTSRRVLEESRKISKELDERLRRVIEEVEKAAK

SEQ ID NO: 10785 - protein, 185 aa, Artificial Sequence; identical to SEQ ID NO: 10784
  Synthetic

SEQ ID NO: 10786 - protein, 185 aa, Artificial Sequence
  Synthetic
SELEKLIKEIRDILKESEDAIKENLDRNEEALKRVAEEIKRLIDELRKMLEDVKRMIRDDSSEETLKKLLDDLRKLVEEIRRRLKRLLDELRRLVEESREDLERLDEELKRIVDRIDKDAEEKVDDRRAVERVREELEKVIRDSRKLSRDLEEASRRVEEDVRRLIEELERRLKEVIKAVEDAAR

SEQ ID NO: 10787 - protein, 185 aa, Artificial Sequence; identical to SEQ ID NO: 10786
  Synthetic

SEQ ID NO: 10788 - protein, 185 aa, Artificial Sequence
  Synthetic
DEVEKLAEELREILKRSEEMIRENLKRNRDLLRRSKEEVDKLKDELEEMLRRVRRVIEDNSSEETLKRLLEELKDLVRRIREELKRSDDELRKLVKESKDNLRDLDRRLREVVEEIRKRLEDEVDDRELVKDLERKAREVIRTSEELSRRLAKTSEEVLEESERVVEELERRAERVEEEITKAAK

SEQ ID NO: 10789 - protein, 185 aa, Artificial Sequence; identical to SEQ ID NO: 10788
  Synthetic

SEQ ID NO: 10790 - protein, 185 aa, Artificial Sequence
  Synthetic
SEVEDLLRKLEEILRRSKENVERNVRENREMLKKVEKTIRDLIRRAEKLLREVEEAIRNNSSEETAKKLLEDLEREVKKIRDTLKKLLDDLKKLVEDSKRDLEEVDKRLEDVVRKIKDELRRRVDDEDAVRRLEKELERVIKTSRDISERLERESRRVEEEVRKLIEELSRRLEEVRERVKEATR

SEQ ID NO: 10791 - protein, 185 aa, Artificial Sequence; identical to SEQ ID NO: 10790
  Synthetic

SEQ ID NO: 10792 - protein, 185 aa, Artificial Sequence
  Synthetic
REVEEALKDLERILKESEDNVRRNIKKNEDLLRRVEERIRELLDEARRLLERVKEVKKDNSSEDELRELLERLKKAVEDIERELKKLLEDLDKAVRESIEDLKKSDRDLEEVVKKIKEDLRDRVDDKDLVERLKEELERVTRDSRRVVDELRKRSEKVREDVRRLIEDLRRRLEKVIRDVEEDAR

SEQ ID NO: 10793 - protein, 185 aa, Artificial Sequence; identical to SEQ ID NO: 10792
  Synthetic

SEQ ID NO: 10794 - protein, 178 aa, Artificial Sequence
  Synthetic
DETERIIRDLERVLEEIARLAKKNIDDSRRVLKELAEKLKRDSERAKKLLEDVEEIIRRNEKDKRDVVREVEKVLKESKKSSEDVARELKDVLRKSRKSAKDLERTVKKVLEDMKEKVDRRLDEDVDRVVRKVLEDLRRLLEEVKKVNDDSEKEVRRLLEENERKNRRVEEEVKKLLK

SEQ ID NO: 10795 - protein, 178 aa, Artificial Sequence; identical to SEQ ID NO: 10794
  Synthetic

SEQ ID NO: 10796 - protein, 178 aa, Artificial Sequence
  Synthetic
SELEDIIRRIEEVLKRNEELNRKNIKESRDLLEEIRRKAKEDSDRVKEVLRRLEDEVRRNELPKEELERKLKEVLDRSKRSSEELKRDVERVLEDSERSVREVVKRDEDSLREIEKLVKERADEEVKRKVDKVVEDIKRVSEESTRANDESRRALEKVVKENEDTNREVVKRVRDAEK

SEQ ID NO: 10797 - protein, 178 aa, Artificial Sequence; identical to SEQ ID NO: 10796
  Synthetic

SEQ ID NO: 10798 - protein, 178 aa, Artificial Sequence
  Synthetic
SELEEIIDRIRTVLERNRELNERNIRESKRLLDEIKKRVEDDNERSKDIVRRVETEVRERRLPEEELRRKLAEALERSKDSSRKLAETLRRLLEDSKRSAREVVERDRKSLEDIKKLVEDRADERVDEVVEKVLDEMRKVSRTSEESNRKSEEEVRKVLKENNDMNRESVERLRRTEE

SEQ ID NO: 10799 - protein, 178 aa, Artificial Sequence; identical to SEQ ID NO: 10798
  Synthetic

SEQ ID NO: 10800 - protein, 186 aa, Artificial Sequence
  Synthetic
DEVRRVIEELERLLEENRRHSKEDNERSKKINKENHDHSKESTDRAEKLLREVEKLIRETEDKDTIKKIIEEIIRTAEDLVRRNERKAERSIEELERSLRRNATLSEKIIRDARRLIEELVKRKGKDTDRVRDVDRTVKRVVKESRRSTRENEKTNTDVVRSTDESLKEDKKEVDRVIEELDRAVR

SEQ ID NO: 10801 - protein, 186 aa, Artificial Sequence; identical to SEQ ID NO: 10800
  Synthetic

SEQ ID NO: 10802 - protein, 186 aa, Artificial Sequence
  Synthetic
SEAEKVIEDAKRLLKENEDHSKEDNDRVRELLEEVKRHSEESTRRAEKILEEIRELVEKVSEKDKISEEVERVIEELRKLVDENRRRIEKIIRDSEKSVERNRRLSEEIIRRLEELIRDLIRKKGKDTEEVKRVEDEVRKLVKASRESTERNERTNREVAERLKKSLEEDRERVRKVVEDLRRAEK

SEQ ID NO: 10803 - protein, 186 aa, Artificial Sequence; identical to SEQ ID NO: 10802
  Synthetic

SEQ ID NO: 10804 - protein, 183 aa, Artificial Sequence
  Synthetic
DELRKVLKESEDSLERLRRTLEESIKRSRDSLRENTELVKDSLRRSEESLERVEKSNTDSEEAKKIADDVVRENRELVKRVRKHSKDVVDTNRKLVDDVRKIVDRVVRENEKVLREVRRDMRENKEMLKRLEDEIRRSIEELRKALRRVEEEHRKVIEASKDLVRRLEEAHKEVIDRLKEKLR

SEQ ID NO: 10805 - protein, 183 aa, Artificial Sequence; identical to SEQ ID NO: 10804
  Synthetic

SEQ ID NO: 10806 - protein, 183 aa, Artificial Sequence
  Synthetic
DEIERVIEESRKSLDDLRRKAEESIRRSEESLREVEERLKRSIREAEESLKKVENSNKDSKELKDLVEKVVRDNRKLVEEVKRIVEKVVRDNERVVDEVRRRVEEVVKENRKRLEEVRRELKDNDEVVRELKKMIDKSERDLEELLDRVRRKHERVIEELKKLLKRVKDAHERVIRELEKTRK

SEQ ID NO: 10807 - protein, 183 aa, Artificial Sequence; identical to SEQ ID NO: 10806
  Synthetic

SEQ ID NO: 10808 - protein, 185 aa, Artificial Sequence
  Synthetic
SEVEDLIRRVRKSNKESEDVLRESIERSEESNERSERTARRIIEEAERILEEMEESLKKGLPEKDLKKIADELRERLKRLLERVKRVVDEDRRTNEELVRRVEKIVKEDEDRLKELLDEVRRLDLPEEVVRRLEEEVKRVAEHTRKLLKDVRKKHEESIRHSEEVLDRLEKKLREIMKRVTERTK

SEQ ID NO: 10809 - protein, 185 aa, Artificial Sequence; identical to SEQ ID NO: 10808
  Synthetic

SEQ ID NO: 10810 - protein, 185 aa, Artificial Sequence
  Synthetic
KEVEDIIEDVKRSLEESKRMADKSITDSRRSNEESKRIVEEIKRKIDEILERIERKARKGEPKEDLDRIVKELKEELKRLLEEVTRVLEEDADRNRKLLKEVEKIVKEDRERLEKLLDEVRKLDLDEKVVRELEKRVKEVVKTTEDVLREVERTHRESIKHSEDLVRRLEERLRRVAKEVERTRK

SEQ ID NO: 10811 - protein, 185 aa, Artificial Sequence; identical to SEQ ID NO: 10810
  Synthetic

SEQ ID NO: 10812 - protein, 185 aa, Artificial Sequence
  Synthetic
SEVEKAIKEARDSLRESKRLLEESIKRSEDSLEESRRVVEEIKKRLEELLREVKESVDQGQPEDDLRKIVEEAKRRLKELLDRVREIVERDERRNRELVKEVRKIVEEDLKRLEDLLRRIRNLDLDEKKVRDLERMVKRVMEETEKALEDVERRHEKSIRDTRRVLKELEDTVRKVLKEVDRERQ

SEQ ID NO: 10813 - protein, 185 aa, Artificial Sequence; identical to SEQ ID NO: 10812
  Synthetic

SEQ ID NO: 10814 - protein, 185 aa, Artificial Sequence
  Synthetic
SKLEKVITEVRDSLRRSRKMAEDSIRRSEELLKELEDLLKKVRDTLRKILKDIEDLARKGLPKEELTRIVDELEKRLKRLLDEVDKALKRLVKENERLVEEVREIVERDKKTLDKLLEDIERLDLPKELVDDVRREVEKVVEDTRRVLEEVERTHKESIDRLRKLVERVRREIEEIARRVKETRD

SEQ ID NO: 10815 - protein, 185 aa, Artificial Sequence; identical to SEQ ID NO: 10814
  Synthetic

SEQ ID NO: 10816 - protein, 183 aa, Artificial Sequence
  Synthetic
SVVEKLKDEADKLVKRNEDLARRLEEVSKDTIDRLEDVLRKLREVLKRLRRRLEEVLKRVDREELKRDVEEVEKELEELVRKIEKEVKDVVRTSRELVERVKRTLEDDIRRMEDLARKLSRLTDREKFEEVIKRLRDSSKRSEDKIRKVLKDSRDLLEDVRRKIEDVIRRMEKLIKEVEDRVR

SEQ ID NO: 10817 - protein, 183 aa, Artificial Sequence; identical to SEQ ID NO: 10816
  Synthetic

SEQ ID NO: 10818 - protein, 181 aa, Artificial Sequence
  Synthetic
SVVEELERVMRELKKRNEELSRENHESVKEAEKRNKRLSEELEKVSRDVIKDLERVVEEVEEVKDEVKRVIDESKRSLEEVKRHSERVVKRLRDLNKDSEDHSREIVRTMEKLLEDARRLTDEREIRRIIEELKRLSDENEERIRRISEEIKDLSRRNEETVRRVIEENRKLLEDATRRTK

SEQ ID NO: 10819 - protein, 181 aa, Artificial Sequence; identical to SEQ ID NO: 10818
  Synthetic

SEQ ID NO: 10820 - protein, 181 aa, Artificial Sequence
  Synthetic
SLREKLKEVIRRLEEENRRVSEENHRSVREVEEENRKVSDELRKVAEELKRRLEEVVRRVREVEELVRELVERMERILRRVEDHSRRVVEELRKLNEESERHSRDVIRKLRELLERAKRLTDSREIEDIIRRVKKLSKENKETIERISREIRELSKRNEEEVRRVIRRLEELLEELERTAK

SEQ ID NO: 10821 - protein, 181 aa, Artificial Sequence; identical to SEQ ID NO: 10820
  Synthetic

SEQ ID NO: 10822 - protein, 181 aa, Artificial Sequence
  Synthetic
RVIEKAEEVVDRLKKRNKEVLKENHDSVREVEKENRELLEKAEKVVRELEERLKEVVEEVSEVTEDIRRVREELKKILEDVARHSKETIDLLRKLNKESEKHSEKTMRDLEKLLEELRRLTDEREIERIIKEAEELSKRNEEVIDEISKRIKELSERNRERVEKVIEEAKELVKRVTDKVK

SEQ ID NO: 10823 - protein, 181 aa, Artificial Sequence; identical to SEQ ID NO: 10822
  Synthetic

SEQ ID NO: 10824 - protein, 178 aa, Artificial Sequence
  Synthetic
KDEEKAEDVVRRLTEEVRRVHEKTRDVVRRVTERSNDVSRRSKEEVRELLERADDLARKGKISEELVRRVKEELERVVREDEELNEDLKRKLDDLLRRDEKLVREIERRLEEVVKLVRDGMSVEDLIRELKRLVDELRERSEDLIRKAERVLERLEEESRRLLKELRDLLEDVTRKAE

SEQ ID NO: 10825 - protein, 178 aa, Artificial Sequence; identical to SEQ ID NO: 10824
  Synthetic

SEQ ID NO: 10826 - protein, 178 aa, Artificial Sequence
  Synthetic
SETEKAREVVRELEKRNDEVHKETRDVVRRLEETSDEVSKDSERKVDRLREEVKKVRDDGKVDDKLVKDVEDKLKKVTDEDRRLNEEAKKELRRVVEEDRRSVEESRKRLEEVVRLVEDGKDVEELIRRMEKLTEDNERRSRKLIEELKRLLEDLREKSERLIRELERLVKELRDRAE

SEQ ID NO: 10827 - protein, 178 aa, Artificial Sequence; identical to SEQ ID NO: 10826
  Synthetic

SEQ ID NO: 10828 - protein, 178 aa, Artificial Sequence
  Synthetic
SEKEKAREVVKKLKKRVDEAHKKTKDVVEELRKRNRDVHRTTREVVRDLLKKVKDVERRGEVSEEVVRRVEERLREVVEEDEKSVRESERVLDEVEKDDRRLVEEIRRRLEDVVRMVEAGKDVETLIERLRELIDELRRRSEKLIKELREVTKRNKERSDRLIKELEDLVKKLKDDAT

SEQ ID NO: 10829 - protein, 178 aa, Artificial Sequence; identical to SEQ ID NO: 10828
  Synthetic

SEQ ID NO: 10830 - protein, 186 aa, Artificial Sequence
  Synthetic
DEVEKLIEDLKRIVERDEREIRELIKELDDHVRKDEKIARDLERRLKEILDEVRKMVTDNSSEETVTRLLREVEELVRKIEKDARDSLESNRELAERIKERAERSLRELEKRVTEIEERLKERLREKKELLEKVKRVLEEVRRRSRETLERLREVLERSIRDSERTLEKVREMLERVRKEIEKLRK

SEQ ID NO: 10831 - protein, 186 aa, Artificial Sequence; identical to SEQ ID NO: 10830
  Synthetic

SEQ ID NO: 10832 - protein, 186 aa, Artificial Sequence
  Synthetic
SEVEELDKRLRDHVRRDEEIVERLIRELKRHVERDREEARRLIEELRRLLEEVKRMMEDDSREDDVRRLLEEVRELVARIIERAEDSLRSNEDLVRKIEERLRRSLKSNRDLVKEIKKILDRDLREDRKLVRDVEKSLEESIRRSEETLKTVKDVLDKSKEDSKRTVEDVERVLREAEKEAKRATD

SEQ ID NO: 10833 - protein, 186 aa, Artificial Sequence; identical to SEQ ID NO: 10832
  Synthetic

SEQ ID NO: 10834 - protein, 186 aa, Artificial Sequence
  Synthetic
SEAEKLIKELEDHVKRVEDRARELIDELRKHVEEDERRARKLIEELRRLLKEVKRMVDDNSSEEVVKRLLEEVRRLVEEIERRARKSLESNKELVKEIRERVTRLLESNRELVRRIEEVLDRDLREDEDLVRRVRKVLRRSEEDVRRLIEEVERVLKRSEEESRRTIREVEEVLKEVERAVEELAR

SEQ ID NO: 10835 - protein, 186 aa, Artificial Sequence; identical to SEQ ID NO: 10834
  Synthetic

SEQ ID NO: 10836 - protein, 180 aa, Artificial Sequence
  Synthetic
SLEDRVREVVERSERDLRRSTDEIRRVVEEAEKALRRLVREVEEVVREVKERLERVVREGRVDRETVRRVIEDIERALDEVRETVRKIIEDLRKILEDVRRHSERVIRENRKLLEAARNGDEDTVRKVIEDSDRSLEENKRLVKKVIDEIKERLKEMKKRAEEIIERLKKLLEEVEERAR

SEQ ID NO: 10837 - protein, 180 aa, Artificial Sequence; identical to SEQ ID NO: 10836
  Synthetic

SEQ ID NO: 10838 - protein, 180 aa, Artificial Sequence
  Synthetic
DLTKRVEEVVRRSRERLERSTRDIKRKAEEVKERLKKSSKEVEKVIREVETELERLRREGKVDEDTVREVLERIRRLLEEVKEHSKRVLDDIERLLRDLEEHSKEVVRRNERLLREIKDGDEKKVEEVLRRSEKSVRDNKKRVEEVAETLKKILTDNRRLVKRVKEELDKLIRDVEERAR

SEQ ID NO: 10839 - protein, 180 aa, Artificial Sequence; identical to SEQ ID NO: 10838
  Synthetic

SEQ ID NO: 10840 - protein, 179 aa, Artificial Sequence
  Synthetic
SEKEDVERVVERVKREADELLKENHKSVKDVDERVKETVERNHRSVRKAEEDVKRVEREDKRLKELVEELRRRLKELNDRSKKLSRESAERLKKLNKESEEVIREVKRRAEEIVEMVKRGDVEVREVAKELEDIVRRIKELVERSNRELKKIVEDNERVVEESDRRIKEILERITEASR

SEQ ID NO: 10841 - protein, 179 aa, Artificial Sequence; identical to SEQ ID NO: 10840
  Synthetic

SEQ ID NO: 10842 - protein, 179 aa, Artificial Sequence
  Synthetic
SEKETVEEVVDKVRRDLDKSLEDNHKSVEEVRRRVEKTLRENHESVERARKRARDLEREDRELKEMVERAEEELEKLNRESADISRRSEERLEELNRRSKRLTDESKRKLEEIKDVVRRGDIEVREVVERAKRILEDNKKKIDESNERLERIVRENKEMVERSDRRIEEIVERIERETR

SEQ ID NO: 10843 - protein, 179 aa, Artificial Sequence; identical to SEQ ID NO: 10842
  Synthetic

SEQ ID NO: 10844 - protein, 179 aa, Artificial Sequence
  Synthetic
DEKEEVEKRAEEVRKKVDKLLKENHESVEDARRRVDKTLRENHESVEEVKRRVDEVRREDERLERVVREIKKRLKKLNDESKKLSDDSKERLKRLNEESEKVARDIKRELKRIVELVRRGDVRAEDVMEELDRLVEDLRRKVEDSNRKIKRIVDENKREVEKSNRKLRELLKELEDRAR

SEQ ID NO: 10845 - protein, 179 aa, Artificial Sequence; identical to SEQ ID NO: 10844
  Synthetic

SEQ ID NO: 10846 - protein, 179 aa, Artificial Sequence
  Synthetic
SKKEDAERVVREVTREVRRLLKENHDSVREVLKRVDETVERNSRSVKEVLRKVREVEREDRRLREVVKEIEKRLRDLNERSKKLSKESKEELKKLNDESRKVVEEIERRLKELVDLVRRGEVDLKEVVDRARDLIRDLTRKVKESNERLEEIVERNEREVRKSDEDLKRLADDLERKAT

SEQ ID NO: 10847 - protein, 179 aa, Artificial Sequence; identical to SEQ ID NO: 10846
  Synthetic

SEQ ID NO: 10848 - protein, 179 aa, Artificial Sequence
  Synthetic
REKEEVERVVEDVRRRLDESLERNHKSVRDALREVDRTVEENSRSVEKVRKRLKEVEREDKELEDLVRKIKEDLDRLNEESRRLSEDSKRRLKDLNRKSAKITRDSKEELRRIVEAVRRGDVEVREVKKELEKIVRDNERVVEDSNDKIRRIVTKNTEDVKRSDETLERIVEEIERRAR

SEQ ID NO: 10849 - protein, 179 aa, Artificial Sequence; identical to SEQ ID NO: 10848
  Synthetic

SEQ ID NO: 10850 - protein, 179 aa, Artificial Sequence
  Synthetic
KEKEDVERKVEDVKRDVDRVLEENHRSLKEAEERSNKLSDTSRRVAKRVVDDVRRLKREDERLVRLVEELKKELKRLVEEDKKINDEIREELRRLNEDSKRVVDDLKRRLKEIVDAVRRGDIDVKEVVDRLEKIVRDIRKEIERSNRDVERLVRTLEEVSKRIIDTLERIIDKIREDTK

SEQ ID NO: 10851 - protein, 179 aa, Artificial Sequence; identical to SEQ ID NO: 10850
  Synthetic

SEQ ID NO: 10852 - protein, 178 aa, Artificial Sequence
  Synthetic
SEAEELIEELERIAEEDRKLVEDSIRKLRKILDEDRKIMKRLAEELDRILEDVKRKVDKGLSEKELKDVVKEVEDKLREVLRRAEESVRESEERLRENEERNKESVERSRERLDRVIEDVDKVKELEEVVRKVKRESDRTLEKSKKVVDEVRRRSEETLEKLRRVVERVRKRVDEASK

SEQ ID NO: 10853 - protein, 178 aa, Artificial Sequence; identical to SEQ ID NO: 10852
  Synthetic

SEQ ID NO: 10854 - protein, 178 aa, Artificial Sequence
  Synthetic
DRADELRERLKEIMERDRRIMKELEDELRELVERDERIIRELERRLEEIVKDVERKAKSGQDEESLKRVVEEAERVVEEVEKRVRESVKKTKDALDELIRRAEDSVRRSREELEDLIRKVSDVDELRRVVEEVEKDSERTLKELRRVVKEVEERVEKTLRDLEEVLERVKERVKRLKD

SEQ ID NO: 10855 - protein, 178 aa, Artificial Sequence; identical to SEQ ID NO: 10854
  Synthetic

SEQ ID NO: 10856 - protein, 178 aa, Artificial Sequence
  Synthetic
KEAEDLMREVEELVRRDEEIIKRLADELEEIVDDNRRKVEDLVRRLEEILRRVEESMRKGLSEEELRRVVEDVERRLRELIREAKRSVEESRRRLEEVRKRVEESVERTKRELDRLIEEVKDVKELREVIERARKRVEETLRELERKLEEVRKTSEDLLRRLEEVVKRVKEEVEKLEK

SEQ ID NO: 10857 - protein, 178 aa, Artificial Sequence; identical to SEQ ID NO: 10856
  Synthetic

SEQ ID NO: 10858 - protein, 178 aa, Artificial Sequence
  Synthetic
SEMDELRKELEDLARDDKRRVEESIRRLEKIAEDNERLARESIKRLRRLVTELEKLARKGLSEEELERVVRRIDEELKRNEEENRRSVEKSERDLRRNEEENKRSVDETEEVLRRLIEEVKDVKELKEVVDRVREIVKKTLEESREVVKKVREDSKRLLEESKRVVEEVKKRVEELKK

SEQ ID NO: 10859 - protein, 178 aa, Artificial Sequence; identical to SEQ ID NO: 10858
  Synthetic

SEQ ID NO: 10860 - protein, 175 aa, Artificial Sequence
  Synthetic
DEVEEVKEELKRTSRDDERKVEEIRKRLEESTRRLRELAEELKDELRKSSRDLERLRRENKDLTDVLRKNEELVKRIDDKLKKVLEDNKRLVDEIRKTAEKSVRDNEEVVRRIKEELKDVREVERALERSLKRSDETVKEVEELLRRSLEDSKKLLEEVREALERSKKRSDELRR

SEQ ID NO: 10861 - protein, 175 aa, Artificial Sequence; identical to SEQ ID NO: 10860
  Synthetic

SEQ ID NO: 10862 - protein, 175 aa, Artificial Sequence
  Synthetic
KEVEDVKEELRRSSKKLRELAERLKKLLEDILDEDRKLAEEIKKRLEDSSRKIEELKRRNRDLTDILRENRELVERARRRAEESLKKVKELLDKIREAIREVLERNKELVDEIRKRLKDVDEVERMLKESDKESKRLLEEVDRMLKEVIKASKKSLDDVDRVLRRSERESEKRRK

SEQ ID NO: 10863 - protein, 175 aa, Artificial Sequence; identical to SEQ ID NO: 10862
  Synthetic

SEQ ID NO: 10864 - protein, 175 aa, Artificial Sequence
  Synthetic
SEVEKVKEELRESSRALRKLVEKIRRILRETSERDRDTVREIADRLRKSSRRVEELKRNNKDLTDVLRDNDRLVKEIEKRLKDSLDENKRVVDKLREEAKRALEENKKLVTRIEKDLKDVDEVRRVLEESERRSKKLLDEVEELLRRSERTSRESLKEVKERLRKSLEESERRAR

SEQ ID NO: 10865 - protein, 175 aa, Artificial Sequence; identical to SEQ ID NO: 10864
  Synthetic

SEQ ID NO: 10866 - protein, 183 aa, Artificial Sequence
  Synthetic
SLVERLKKVVEDAERELRRLTKETEDVLREAEETIKRLSERLKKANEDTERKIRRLAKENRDEKVIKKLEDVVRRSTKLVEDVHRDNERVLDEVRKLVDEVRKTNEDVLREVRRLMEELARLTDEKKIDDAIKRIRDLIERVEEINKEVVDRIKELIERVEEINETVIRDSERLIKEVEDEVR

SEQ ID NO: 10867 - protein, 183 aa, Artificial Sequence; identical to SEQ ID NO: 10866
  Synthetic

SEQ ID NO: 10868 - protein, 183 aa, Artificial Sequence
  Synthetic
SLEEDLRRVLEEVKRELKELSKRSKEVNRKTEETARRLSEKSEKVNRETKKRVEDLMRENRDEKVIRELRDAVRESTRLLEELKEDNRRVVERSTDLVRKVDRINREILKEVEELVRRLSRLTDEKAIRDAIRRLKELVERVKRTNEEVVKESEELIERVRERNDDAVRKSRRLIERLTEKVK

SEQ ID NO: 10869 - protein, 183 aa, Artificial Sequence; identical to SEQ ID NO: 10868
  Synthetic

SEQ ID NO: 10870 - protein, 183 aa, Artificial Sequence
  Synthetic
SLKETLEEVLKEVKRRIEDLSRRLEEVLRRAREELKRLSDDSRRVVEEAEERVRRLMEENRDEDVIRKLREALKEVRRLLEEVERRNRALMKEVEDLVRKVNKDNRRVLEEIKRIVEKLSRLDKKEEIKRVIDELRRLIEEVEKRNREVVEEIKRLIKEVADDNRRALERIRRLIRKLEEEVK

SEQ ID NO: 10871 - protein, 183 aa, Artificial Sequence; identical to SEQ ID NO: 10870
  Synthetic

SEQ ID NO: 10872 - protein, 183 aa, Artificial Sequence
  Synthetic
SLTERLREVLKKVEDTLRKLSERLRDVLRKAEKTIEEISRRSEEANRETKERAERLMEENRDERVIRKLEEVVRRSTKLVRDVDRRNKKVLRDVRELVKKVNEENKKVLKEAREKVDELSRLTDKDRIEDVIRELDRLLEEVRRINEEVLRRIEELIKRVKEENDRVMETSRRLIETVKEEVK

SEQ ID NO: 10873 - protein, 183 aa, Artificial Sequence; identical to SEQ ID NO: 10872
  Synthetic

SEQ ID NO: 10874 - protein, 183 aa, Artificial Sequence
  Synthetic
DKVRKILKEMRDLVRRNKEEIDRSIRKIEELIERNKREIDKSIEELKRLLDEVRKIVKDERDKEKLRRIVEEVDKRIEKIHKENEDHSRRSSEEVEKIHRENKEHSDRSSEDIRRLLEELRKDGLEMVRDVARVVKEVHDDNRRLTEKSERVVREAHRRNEEIVKASEEAVREAKRRLEELRR

SEQ ID NO: 10875 - protein, 183 aa, Artificial Sequence; identical to SEQ ID NO: 10874
  Synthetic

SEQ ID NO: 10876 - protein, 183 aa, Artificial Sequence
  Synthetic
DKVREILKRLEDLVRTNKERIDESIEELERLADENRRRIKKSIDDLRRLIEEVERIVKDRRDDRTLDKIVTEAKETVKRIHEENERNSKRSSETVKKIHDENREHSKRSSEEAKRLIDELRKDGLEVVRDVERVLEEVDRANRDLVRRSKEVVDKVHETNKKLVEESKEAVDRVTELLERARK

SEQ ID NO: 10877 - protein, 183 aa, Artificial Sequence; identical to SEQ ID NO: 10876
  Synthetic

SEQ ID NO: 10878 - protein, 183 aa, Artificial Sequence
  Synthetic
DEVEELVKKLEKVLREIEEMSERLSDENRKVLEKIKEDSKRLNEELERVLRRIREASRDKREEVLRKLVEELKKVLEEVRERSEDLLKEAKDIARESRKRSEELVRRLEEVLREVKRAAERDVKSELLERLREVLEDVKRKLDEIHRRNEESLERLEREVKRLNEDNRRSLKTVDDRLRETKR

SEQ ID NO: 10879 - protein, 183 aa, Artificial Sequence; identical to SEQ ID NO: 10878
  Synthetic

SEQ ID NO: 10880 - protein, 179 aa, Artificial Sequence
  Synthetic
SEKEKLDAVLREVEEAAKKNIDKNRRSLEEVAEVVRELVKENRKSLEEVKEMIERIIREIRNKEDLVRKAREVLKEIERLVRESIKELERLLKEIEKLVEESVRRSRKLVKEIEELVKKGGDDVEKIVEDLKRVLEESHKLSEDVDRLIKRVVEEAKKLSRDVNEDVKRVVKEVKDEAD

SEQ ID NO: 10881 - protein, 179 aa, Artificial Sequence; identical to SEQ ID NO: 10880
  Synthetic

SEQ ID NO: 10882 - protein, 179 aa, Artificial Sequence
  Synthetic
SEKEKLDDVLRKVKDTLAENIKNNKESLDRVREEIERNIRRNEESLDRARRTVEKIIEEIREDEDLVRRAEEMVRRVADLVRKSVERSRELLKRLEDLVRKSVEDSKDLLRRVEKLVREGGDDVEKLVEELRRLLKESHELSREVNDRLRRALEESHELSKEVNETLRKLLEDIRREAK

SEQ ID NO: 10883 - protein, 179 aa, Artificial Sequence; identical to SEQ ID NO: 10882
  Synthetic

SEQ ID NO: 10884 - protein, 179 aa, Artificial Sequence
  Synthetic
KDEERLKKVIDEVRKRVEENIRTNEDSLRKAEETLKRNIRKNEKSLEDARREIEELIREISDDEDLVRELEDVVRKIAELVKRSVEESERLAKELRDLVKESVDRSRKILEDLERDVERGGKDVEKLIKKLRDLLEESHRLSEEVNRTLKRALDESHERSKEVDKRIEEMVERVRRKVK

SEQ ID NO: 10885 - protein, 179 aa, Artificial Sequence; identical to SEQ ID NO: 10884
  Synthetic

SEQ ID NO: 10886 - protein, 179 aa, Artificial Sequence
  Synthetic
SEREKLEKVLEEARREIERLAEENRRSLDRARKEVKRLIDNNRKSLDDVRKRVDKLVKDISDDERLIRELERVVKDIEELVRDSERKAREMVKRVERLVRESIRRLEDVVRRLEDLVRKGGDDVEKLVEELKKVLDDVRKESERVNRTLKKLLEDIERLSREVNKRIKEMVRKATEDVR

SEQ ID NO: 10887 - protein, 179 aa, Artificial Sequence; identical to SEQ ID NO: 10886
  Synthetic

SEQ ID NO: 10888 - protein, 179 aa, Artificial Sequence
  Synthetic
SEKEELDKVLKEAEDKIEENIRDNERSLRDVERAVRRIIENNRESLEELDKAVKEIVRRISDRKELITRLDKAVKDVKRLVDRSVEEAKRIVDEARELVRRSVEESRRLVERLKKLVDDGGDDVKTLVEELRRALEESHKLSEDVNRALKKVLEEIADLSRKVNDKLRELLKRLEEEAR

SEQ ID NO: 10889 - protein, 179 aa, Artificial Sequence; identical to SEQ ID NO: 10888
  Synthetic

SEQ ID NO: 10890 - protein, 179 aa, Artificial Sequence
  Synthetic
SKEEKLDKKLKEAERTIRENIKENRESLERARKTLEENIRNNEDSLRRVEEEVRRIIEEIRDDEELVRRAEDVVRKLRKLVEDSVRDSERIMEEIERLVRDSVRKSEELVERIKRLVEEGGEDVDDILRRIEEILRRSHRLSKEVNKRIKELLDRSHELSKRVNDELDKVLKEIRREAK

SEQ ID NO: 10891 - protein, 179 aa, Artificial Sequence; identical to SEQ ID NO: 10890
  Synthetic

SEQ ID NO: 10892 - protein, 179 aa, Artificial Sequence
  Synthetic
DEDEELKKVLDRAKKRVDELVRNNEESLERVKRAVDRLIEKNERSLERAEDELRKLVKEISDDEDLIKKIRDAVEEVRRLVEESRRRAEEVVKRAKELVERSIRELERVVKRLADLVREGGDDVEKLKKELDDMLRKLEELSRRVNRTLEELLRRIEELSREVDERIKKVLKEIKDRVK

SEQ ID NO: 10893 - protein, 179 aa, Artificial Sequence; identical to SEQ ID NO: 10892
  Synthetic

SEQ ID NO: 10894 - protein, 179 aa, Artificial Sequence
  Synthetic
SEKEELDDVLRRVEEKVRRNVRKNEDSLKKVEDEVRRNIRNNEKSLEDAERDVRKLAKDVSDDEDLIRRLKEVVDEIRKLVEESVRRSKRLLEEIRKLVEESIRRSEDLVRTVEDLVRKGGDDVKKLLKELEDLARESHKLSRDVDRKLEDALRRSHRLSREVNRKIEEMVRKLREDTR

SEQ ID NO: 10895 - protein, 179 aa, Artificial Sequence; identical to SEQ ID NO: 10894
  Synthetic

SEQ ID NO: 10896 - protein, 179 aa, Artificial Sequence
  Synthetic
KEEERVTDALRRVRETAKKNIEYNRRSVERVERTLKELVKNNTRSLERVRKAVKELVERIRDKEELIRELERVVKELEKEVRDSIKRIEEAVKRSKDSSETHVKTSEDVVRRLEDEVRKGGDDVDKLIERLERVLEKSHRDLRRNSKDNKRILDEIKKESEEVNRRLEEVLRKIKEDVE

SEQ ID NO: 10897 - protein, 179 aa, Artificial Sequence; identical to SEQ ID NO: 10896
  Synthetic

SEQ ID NO: 10898 - protein, 186 aa, Artificial Sequence
  Synthetic
DKVRELEKTLRDLLRENHRISEDLNKKLKDMARRNKKHSEDVIEKIKRLLDRLREIVKRDGGEDKRVVEELRRIVEEVRRLLREDEKENERSLEEVEKLVRESEKRSKKILEDAKKLVEDLERDNIDDELVRRVREVLREVEERLRDNIKDNRRSLDDHRRVIEETRRESKRAVERAEDEVKKLED

SEQ ID NO: 10899 - protein, 186 aa, Artificial Sequence; identical to SEQ ID NO: 10898
  Synthetic

SEQ ID NO: 10900 - protein, 186 aa, Artificial Sequence
  Synthetic
SKVEDLIRRLKTLLDDLRRISREVDEKIKEILKEVERHSKEVIDRIKDILRRVEEIVRRKGGEDEEVVEELRRVVEEVERLLREDVKEIDRVVKEVRDLLRRSVEIIEEIVKRVRDLVEEIKRDNIDKRLVERVEKVAREVEEAVRKLIEKNKESVERAEETARRLIERSKRAVDEARRKIEELRR

SEQ ID NO: 10901 - protein, 186 aa, Artificial Sequence; identical to SEQ ID NO: 10900
  Synthetic

SEQ ID NO: 10902 - protein, 186 aa, Artificial Sequence
  Synthetic
SKVEELIERIERLLEEVRRISDKVDEDLERLIRENEKHSKKIIKELEKLLKELEDIVRREGGEARRVVEILKKIVEDVRDLVRRDEKLNRDSAKTAEDLVRTSEEDLKRVLEEVKRLLEEIERDNIDKRLVERLRKVVEDAEREIRRLIEKNKRSLERHKRELERTIKESRDVLKKVEDRVRELAR

SEQ ID NO: 10903 - protein, 186 aa, Artificial Sequence; identical to SEQ ID NO: 10902
  Synthetic

SEQ ID NO: 10904 - protein, 186 aa, Artificial Sequence
  Synthetic
SKVEDLERRIRKILREVEEISERVNRALKRLLDENRKHSEKIIRELEELLRRLEEEVRTKGGEAREVVEAIKEIVERAKRLVDEDRRLNEESRKRAKELVDESRKTLEEVVKEVRKLAEELEKDNIDKSLVDRVRKAVEEAEERIRRLIENNERSLRRHEEAIKKTIEESDKVLEDVRRRAEELLK

SEQ ID NO: 10905 - protein, 186 aa, Artificial Sequence; identical to SEQ ID NO: 10904
  Synthetic

SEQ ID NO: 10906 - protein, 186 aa, Artificial Sequence
  Synthetic
SKVERLIERLKELLDENHKISERVNKELERLARENDKHSKDLIRDIERILREVEEIVRRDGGEAEEVVRRLREVVKEVRDLLKEDADRNRESAKEAEKLVKDSEDTSRDILREATELVERIERDNIDRRLVEEVRRVLREVREAAKENIRNNRESLKRHKDALRKTIEDSARVVKRAEERIRELER

SEQ ID NO: 10907 - protein, 186 aa, Artificial Sequence; identical to SEQ ID NO: 10906
  Synthetic

SEQ ID NO: 10908 - protein, 186 aa, Artificial Sequence
  Synthetic
SKVDELVERIERLLRELTKHSKEIIDRLKKLLEDNERINRDVIRRIEEILKEVKRIVERDGGEDERVVRTIEEMVKRLAELVKRVEEINDESAKTVTKLVEDDMRELRRIVEEVEKLAEDLERDNIEEELVRKVREVVDRARERVEELIRRTEDVLKKHREELKKLIEESRRVLEEAKKTADELKK

SEQ ID NO: 10909 - protein, 186 aa, Artificial Sequence; identical to SEQ ID NO: 10908
  Synthetic

SEQ ID NO: 10910 - protein, 185 aa, Artificial Sequence
  Synthetic
DEVRKLKEDLRRLLKENKEKVEKVIRENEKLLRENKKMVEDAERDLRRLLKELEDLVRKRGTDEDLAETAKRVKEEVDRILEELRRHSKRSSEESRRSVEEVERHSRESSERVDKIIRDAEARGLPKELVDEVRRVARRVKEENKRLLDEVRKVSEEVERTNRELVRRVEEVVREVRERIDELLR

SEQ ID NO: 10911 - protein, 185 aa, Artificial Sequence; identical to SEQ ID NO: 10910
  Synthetic

SEQ ID NO: 10912 - protein, 185 aa, Artificial Sequence
  Synthetic
SEAEDLERRIEKLLEDNTRLVERVIEENEKLLRDNAEHSKEVEDRLRDLLRRLEEVVRKRGTDEELKKLADEVVKRVRDILRENKKHSDDSSRRSEKSVDDVRKHSKESSDEVKRILDDIRRRGLPEELIKRVEEVVRKAKKTNEDLLREVEKVSREVKKANEDLLRRSKEVVDEVEKDIERLKR

SEQ ID NO: 10913 - protein, 185 aa, Artificial Sequence; identical to SEQ ID NO: 10912
  Synthetic

SEQ ID NO: 10914 - protein, 185 aa, Artificial Sequence
  Synthetic
DDIERIIEKLKELLERNKRHTEEVIKELERLLRENERHSREVKKRLEELLKRLEDVVRREGTDERLKKLAEDVLREVRDILRRNEEHSRDSSEKVREIIERNEEHSRRSSDTVDKILEEVRRKGLPEEVIRRIEEAVREVKEANKDLVRESRRVARRVEEENKRLVEESRRVVEKVEKRIRDLLR

SEQ ID NO: 10915 - protein, 185 aa, Artificial Sequence; identical to SEQ ID NO: 10914
  Synthetic

SEQ ID NO: 10916 - protein, 185 aa, Artificial Sequence
  Synthetic
DEIDEARKELEEILRENREKVDEVRKRLEKLLRENEEVVKEIIRRLKELLKELERVMREEGTDERLKELVREVMDRVRKILEEAEKHSRDSSREVDKILKEVEKHSRDLVRRVREIIRRLEAKGLPEKLVREVRKDAERAERELRRSVEDIRRVVERVKRENERLLREVEKVVEEVKEELRKIET

SEQ ID NO: 10917 - protein, 185 aa, Artificial Sequence; identical to SEQ ID NO: 10916
  Synthetic

SEQ ID NO: 10918 - protein, 185 aa, Artificial Sequence
  Synthetic
DEIERVIEELKKRLDENRRVLEEIIRRLEELAKRNKRHSEELEKRLREELDKVRKRLEETGTDEEVEKILRTVKREVDKILRENEEHSRKSSEDVKKILDEARKHSEDVVRTVEDILRDVARRGLPRELIERMREVVEEVERALRKSLKDVEDVVREVEKKNKELLEKSKKVVEDVRRTLEKLRE

SEQ ID NO: 10919 - protein, 185 aa, Artificial Sequence; identical to SEQ ID NO: 10918
  Synthetic

SEQ ID NO: 10920 - protein, 185 aa, Artificial Sequence
  Synthetic
SEVEEAIKTLKKLLDDNKRHTEEVIRRIEELLKRNEEHSRKVIEDLERLLRKLEKMVRDRGNDERLKKLVRDVLERVKELLKRNEEHSRRSSKRVEEILRENEEHSRRSSRTVKEILKDVRRKGLPEEVVRRMEEAVRRAEETNKDLVRRSREVVRRANETNKKLLEDSKRVVERVEKRLEELLR

SEQ ID NO: 10921 - protein, 185 aa, Artificial Sequence; identical to SEQ ID NO: 10920
  Synthetic

SEQ ID NO: 10922 - protein, 185 aa, Artificial Sequence
  Synthetic
SELEEIERELEELLRENKKLVDRVREELKKLLDELRKHSERVIREIERLLEELERVVRKRGTDERLKELVEKVKEDVKKILRENEALAEEVDRRVDKILRDVEEHSRDSSRRVEELLKDARDRGLPEELIKRLTDVVRKVKEDNKRLVEEARRVVEEVKREIKRLLEESREVVRRAERRLEELRR

SEQ ID NO: 10923 - protein, 185 aa, Artificial Sequence; identical to SEQ ID NO: 10922
  Synthetic

SEQ ID NO: 10924 - protein, 185 aa, Artificial Sequence
  Synthetic
SEIEDAERKLKKLLEDNTDMARRLIERLRKILEENKRHSERVKRELEEILKELEDLLRRKGTDEDVARKVEDIERRVRDLLRRNREHSRRVLEEVRKILEEAERHSRESSREVKRILDDLRAKGLPEELVKRVEDVVRKVDEDNKRLVEEVRRVVEEVRKTLEDSLRESERVVREVKKRLEDLKR

SEQ ID NO: 10925 - protein, 185 aa, Artificial Sequence; identical to SEQ ID NO: 10924
  Synthetic

SEQ ID NO: 10926 - protein, 178 aa, Artificial Sequence
  Synthetic
SEREKMEKVVREAKKDLDRSLKRVKEVAEEVKKELDRSLEEVKRVSEENKKEVDRIRKKGDVDDEILRRNKERSDRSLEEAKEITDRTKRKVEELLKTIEEVSRRSKRKVDRISEEVDRGKDVDTLVRRLEKILEENRRIVKEIEDRLRKLLEDNKRVVDEIIKRNEDSVRDVERRAK

SEQ ID NO: 10927 - protein, 178 aa, Artificial Sequence; identical to SEQ ID NO: 10926
  Synthetic

SEQ ID NO: 10928 - protein, 178 aa, Artificial Sequence
  Synthetic
SEREKVEEVVREAKERLDESVKRVEEVSRENKKEIDRLLEEVKKVIEEAKRRLEELRRRGLVDEKVVREVEEELKRLLEEIRKVVEENKEESDRSLKEVEDISRESKERVDRILKRVDDGSDVDEVLKELRRILRDNERMVKEVIERNRKSVEDLERIARRIIEEIERLLKELTDRAR

SEQ ID NO: 10929 - protein, 178 aa, Artificial Sequence; identical to SEQ ID NO: 10928
  Synthetic

SEQ ID NO: 10930 - protein, 176 aa, Artificial Sequence
  Synthetic
SEDEEVEEAADRHRRSVEDSSRDLKKVLDEDRRTVAESSRKLKEILREVEREVKRVEDDGSVSDEEVRRMLDELRKLVERHHRENERLLRESEKLVKKHHDDNERSLDEVRKLVEDREGDVEELKKRLKELSDESRKSLERVKRKLEETSRRSEESLRRVKKDAERLVREIEKRAK

SEQ ID NO: 10931 - protein, 176 aa, Artificial Sequence; identical to SEQ ID NO: 10930
  Synthetic

SEQ ID NO: 10932 - protein, 176 aa, Artificial Sequence
  Synthetic
SEDEKVKKVLDDVRRKAEDSSRRITEVLRRHEETVRRSSEKLKKLLDELREDADRVRRAGKVDEETVRKLVEDVDELVERHHRRNEESLKRVKELVEEHHKLNEDLLRRVEELVRAKKGDVKDLERKARDIVRKSEESLERVVRELERLSRDSERSLKKVKEDLERVVEEIRRRAD

SEQ ID NO: 10933 - protein, 176 aa, Artificial Sequence; identical to SEQ ID NO: 10932
  Synthetic

SEQ ID NO: 10934 - protein, 176 aa, Artificial Sequence
  Synthetic
SEDEEVEKVLREDEESVKRSSDEIRKLLEDHERTVRESSDELKKALDEVRKRLDELKRRGQVSEETVRELVRRVEELVKDHHRKNEESLKRAEDLVREHHKENERLLEESRELVRRREGDVEDLKREAERTSEESRRSLEEVRRRLEELSERSRESLKRVKDELKRVVEEIEERAR

SEQ ID NO: 10935 - protein, 176 aa, Artificial Sequence; identical to SEQ ID NO: 10934
  Synthetic

SEQ ID NO: 10936 - protein, 176 aa, Artificial Sequence
  Synthetic
SEDEEVKRVLDELRKRLKESSDRLREVLKRDKRTLEKSSEDIDRALKKVERALTEVLKEGKVDEEAVDRVLRDVRRLVREHHELNRKLLEESKKLVEDHHRLNEKLLRDVEELVRRREGDVKELLDTLRKLVEESEESLREVVERLDKTSEDSKESLRRVIETLDRLVKDIDEKAK

SEQ ID NO: 10937 - protein, 176 aa, Artificial Sequence; identical to SEQ ID NO: 10936
  Synthetic

SEQ ID NO: 10938 - protein, 185 aa, Artificial Sequence
  Synthetic
SELEKLKKEIDDLSRDLDRILKELKKRVEELTRRSEKVLEDLRKTLEDIVKTLEDLARGGLDKEELRRRIKEVKDRVEEELKRLTEEIRRVSEELERLLREVEKVVEKSKRDLDELLKRLEERGLPSELVKRAADVVEKHRRSLERLLRTVTKIVKDHHERNEEIVDEVRKVVERAKERLEEIRK

SEQ ID NO: 10939 - protein, 185 aa, Artificial Sequence; identical to SEQ ID NO: 10938
  Synthetic

SEQ ID NO: 10940 - protein, 185 aa, Artificial Sequence
  Synthetic
SEVDELRRRVKKLSDDSKRVLDELSRRLKELSERLAEIVKEVHRRNEELVDRLRRLKDKGEPKEDLDRMVRELLKTSKKILDEVTKRLRDSLEEVKKLLEDLRRLIEESSRTLEKLLEDLERRGLPSELVEEVKRVVEKHHEDNKRIVEALAEMVKDHKRTIDELRRRLEESVKDAEKKLRDVSR

SEQ ID NO: 10941 - protein, 185 aa, Artificial Sequence; identical to SEQ ID NO: 10940
  Synthetic

SEQ ID NO: 10942 - protein, 185 aa, Artificial Sequence
  Synthetic
SELEELERRLKELSDESRRVLRELLERLKELSKDLERILEDLKEKVKKIEKDLRELKKRGLPKEELKREIDKLVKDVRDLLRRAKKRLEDSLREVEDLLRELEKRITEVSDEVRKLLEDLRARGLPSDLVREVARVVKEHHDENEDIVRRVKEAVDEHRETIERLRRAVERVVKEVERRLKEEAR

SEQ ID NO: 10943 - protein, 185 aa, Artificial Sequence; identical to SEQ ID NO: 10942
  Synthetic

SEQ ID NO: 10944 - protein, 177 aa, Artificial Sequence
  Synthetic
SKDEELERVVKEVREVLDDVNREVTKVSDDVKKRLDELLEEVRRVSDEVRKRLDEVLRERDEEEIRKILEEVRETSKRLNEEIDRAIRTVDKRSKELNETNKRAVDEVKKTVDRLRKEVKDVEEAKRRLEKLVRDIRRLTEEHKKRHEDLVREVEEIVKKLKDDHRRLVEDIERAIR

SEQ ID NO: 10945 - protein, 177 aa, Artificial Sequence; identical to SEQ ID NO: 10944
  Synthetic

SEQ ID NO: 10946 - protein, 184 aa, Artificial Sequence
  Synthetic
SVLDELREKAKKNIKESEELLRRNEDHSRRDTERSKKLLEDLERRVKEVVREAERIKKKGMPEEEVRERLERLLRELREDIKRIIEELRRSLDENRKLSEEIIRRLKKSAEDLTRDVRELLKRLDKDVVRDLERVVKEVEDSNRKVADDSRRSTEDNKRKNEKVERDARELLKEIEEIVRRLEK

SEQ ID NO: 10947 - protein, 184 aa, Artificial Sequence; identical to SEQ ID NO: 10946
  Synthetic

SEQ ID NO: 10948 - protein, 184 aa, Artificial Sequence
  Synthetic
DSLERLREIVERIVREARRLLRENEEHSERDTREVERLLEEVERRLRRVVEEAEKIKKRGSPKEEAMKRLDDLLRRVKEEIDRIVRESKESVDRNRRLSEEIIKTLEKLIEDMEREVDKLVKRLEEDVVREARRIVDELRKEVKEIVERSRKSTEDNERRNRKVIEDLKRLVKELEDRIREIKK

SEQ ID NO: 10949 - protein, 184 aa, Artificial Sequence; identical to SEQ ID NO: 10948
  Synthetic

SEQ ID NO: 10950 - protein, 184 aa, Artificial Sequence
  Synthetic
DFEERLKEVLKDAERVVDENKKENKKVLDKAKKVVDENRDRNRRVLEEVEREIRRLIDEIRKDKDLVDRLRRVLEEIEEKHRDAVRRTEELLRKVKEDHERVVRESERLLEEIRRKLDDLRRKGLTKEVEEVLKEIKDILRESSKTSKDLVRRTEEILEESSRDSDRVAKESKKLLEEVKEEVR

SEQ ID NO: 10951 - protein, 184 aa, Artificial Sequence; identical to SEQ ID NO: 10950
  Synthetic

SEQ ID NO: 10952 - protein, 184 aa, Artificial Sequence
  Synthetic
SFEEKLDKVVREVEDKIRRLVKRNRDAVKRVADEIRKLKDRNEEVVDRAREKIKRLIDEIRRDEDLVRRLKKVLEEVERRHKELVRRAEKALEEIRRSHERNIRELERVLEEIKKEIEDVKRKRVTKEVEEVLTRLKEKLKRVEESSEKVVRDSERLLEKIKKLSKDVEDESRKLLERVEREVR

SEQ ID NO: 10953 - protein, 184 aa, Artificial Sequence; identical to SEQ ID NO: 10952
  Synthetic

SEQ ID NO: 10954 - protein, 183 aa, Artificial Sequence
  Synthetic
SEVERLLKELKELLEELKKKVDDVLKDLEELLKRLEDHTREVVKRSEDLLRELEEMKRRGDLREELLKRAVEESSKLVRDDRERLRKALEEVEKRIRDVKRELEKAVKEIEEKVRDLERKLKDKEEVVRELRRVLEEVRRTAERLLEKLDTVLKKVEDKIRELLKESTRVNKDAKREIDRLRK

SEQ ID NO: 10955 - protein, 183 aa, Artificial Sequence; identical to SEQ ID NO: 10954
  Synthetic

SEQ ID NO: 10956 - protein, 183 aa, Artificial Sequence
  Synthetic
SEVETILEDLRRLLEELKKHSDEVVKEIKDLLREIEKHTREVVKTSKKLLKELEELRKRGDLREEELERAVEESSKLVEDDEREIRKMLKRIEDLVRENKDKLRRAVEEVERKVRELKRRLKDKEELVRKIEKVLKEVRETIKKIAEDSDRVLEEAKEVAKRLKDESDRVNEEVRKRIEELKK

SEQ ID NO: 10957 - protein, 183 aa, Artificial Sequence; identical to SEQ ID NO: 10956
  Synthetic

SEQ ID NO: 10958 - protein, 183 aa, Artificial Sequence
  Synthetic
SDVDRVLEEIRKLLEDLKRHSEKVSEENEDLLRKNTELNKRVSEDNERLLEELKRLRERGDIREEDLKRALDRVRKTVETVKEENKRSLEDVRRTVETNKRKLERVVEEIKKLIEDAKRRLKDKEELKKKLDEVLERAKRTIDRLLETSDRSLEKVERDLRRLNEELDRSLERAERTIRELAK

SEQ ID NO: 10959 - protein, 183 aa, Artificial Sequence; identical to SEQ ID NO: 10958
  Synthetic

SEQ ID NO: 10960 - protein, 183 aa, Artificial Sequence
  Synthetic
SEVDEVLERIKRLLERLAEHSDKVVRDIEKLLDDNRKENERLLDKLRRELKRLEEMRRRGDLREELLERVVREVEKEIRDIKRKNKRSVETVEKLVRDDRKELKRALEDVERLIRELETRLKDKEELRRKLEKVLREAEKVIDELLKKTDEVLKRARETIEDLNRKLDKVLKEVRDKLDRLRD

SEQ ID NO: 10961 - protein, 183 aa, Artificial Sequence; identical to SEQ ID NO: 10960
  Synthetic

SEQ ID NO: 10962 - protein, 185 aa, Artificial Sequence
  Synthetic
SSIEKVKREVDEVIKTSKKSSEDSEKLVRDVEERLRKLVKDVRDRVKRVIEEMERLVRERKDKDVRKELRELVRDVEREVKRVEDEMEKLLRDIEEEVRRDIKRSRELVDEVRRRVADVIRKDGEESELVERLKEVLKRLEEVSEESERRNREVVRRLEDTARKLTEELRRVLTELRDVLRRLEK

SEQ ID NO: 10963 - protein, 185 aa, Artificial Sequence; identical to SEQ ID NO: 10962
  Synthetic

SEQ ID NO: 10964 - protein, 179 aa, Artificial Sequence
  Synthetic
KDEETLKRLLEKAKEVVDRLKDENEKVTRDNHESVKKAKDANKRSNEKSERVARDAIRRVREAKEVVDTAEKLLRDNHEHSRDTVKKARELNETSRRHSERIVEKIEEILEEVERTLRENRGDVRELAKKVEKAIRELEELSRENREAVKRISDEIKRLSDENAKDSERIIKEIDDRVR

SEQ ID NO: 10965 - protein, 179 aa, Artificial Sequence; identical to SEQ ID NO: 10964
  Synthetic

SEQ ID NO: 10966 - protein, 179 aa, Artificial Sequence
  Synthetic
SDDETVTKLLKEAEKVVRELTKRNKELLRKNHESVREAKKRNEDLSRKLEEVVRRLIEEIREREDVVRELEKLLEDAKRHSERIVREMEDLNRKSKKHSKETVDRLKDLLRKVEETARARKGDVKDLAKKIEDVIREMEELTRRNEKRIEEISDEIRRLSDTNRREIERIREELRRRAK

SEQ ID NO: 10967 - protein, 179 aa, Artificial Sequence; identical to SEQ ID NO: 10966
  Synthetic

SEQ ID NO: 10968 - protein, 179 aa, Artificial Sequence
  Synthetic
REDERLEEIARKIKKVVDELVERNKKLTEDNHESVRRAEKRNRELSRELEEVAKRAIERIRSDKKVVDEVKKLLEDAKKHSKEVIDELRRLNEESKRSSEDTIRRMRKLLRELEETVKAKKGDVEDIERKVEDIIRRLEDLSRRNEEKVRRISEEIKKLSKDNERTIKEIIKEIEERVK

SEQ ID NO: 10969 - protein, 179 aa, Artificial Sequence; identical to SEQ ID NO: 10968
  Synthetic

SEQ ID NO: 10970 - protein, 185 aa, Artificial Sequence
  Synthetic
DELDRLREEIKALIKESRESLKRLEEESRRLAEELRKLIRELKERIERIIEEARRLAKEIKDKDELRKRLEDLLRRVERLVEEVRRRLKEVVDRDRKLVEDNRRLLEELVRRVEELVRDLDAKITDDDVRKKVEDVLEEARRRITDDEDKTKKVHDESRRVVEEVRERVKRLLDKARTVVKEIEK

SEQ ID NO: 10971 - protein, 185 aa, Artificial Sequence; identical to SEQ ID NO: 10970
  Synthetic

SEQ ID NO: 10972 - protein, 185 aa, Artificial Sequence
  Synthetic
SEVEDLERKIEELIERAKRLVEELEERSRRLIRELEELSKKNEEDIERLIKEAKKLAEDIKDKETLRKLLDEVLKRVRDSVERSKEELERVVREDRELNKRVKDTLRKVLEDVERLVRDIEKKLTDEEMRRRVRELLKKAEEVVRRLEKDSDRVSKESEDMVRELLRRNEEALRKAEEVVREIKR

SEQ ID NO: 10973 - protein, 185 aa, Artificial Sequence; identical to SEQ ID NO: 10972
  Synthetic

SEQ ID NO: 10974 - protein, 185 aa, Artificial Sequence
  Synthetic
KDIDELRKRIETLIREAKKLVDDVRKRSEDLIERLKKLSEDNARDIERLLREAEDLARKIKDKEELERRLRKVLKEVEDSVRRSRKELEDVVREDEELNRRVKRALEEVLKTVEKLVRELEKKIDKREVKERVRRLLEKAADVVRRLIEESNRVSDDSRRVVKELLDRNKELLDRARKRVEEIRK

SEQ ID NO: 10975 - protein, 185 aa, Artificial Sequence; identical to SEQ ID NO: 10974
  Synthetic

SEQ ID NO: 10976 - protein, 185 aa, Artificial Sequence
  Synthetic
DDIERLKREIERLLKEAEKISRDNEERSKELLDRLRKLSEDNKRKIDKLVEELKRLADKIKDKEELTRRLKEVVDRVEKSVRDSERMLREVVREDEESVRRSKTKLEDLLRKVEELVRRLEKKVTDEKVKRDAREALRKAKKKVDELKRKNDEVHRRSREEVKRLLEENRKLLEDLRRMVREITQ

SEQ ID NO: 10977 - protein, 185 aa, Artificial Sequence; identical to SEQ ID NO: 10976
  Synthetic

SEQ ID NO: 10978 - protein, 176 aa, Artificial Sequence
  Synthetic
RKVEEVEKHSRESIKEIERLVEEVRKHSKDSIRRIEKLVEDVERHSRKVIEELERDKIDEKAKRLLEEDEKLVREIKERIKKLSRENEERVKDIARRIRELSKRNEETVRAIARKIDKDMVRRLEKILKEDKEVVKKAEEELRELLKEDREVVKRAEEELERLLKETEDVVRKVET

SEQ ID NO: 10979 - protein, 176 aa, Artificial Sequence; identical to SEQ ID NO: 10978
  Synthetic

SEQ ID NO: 10980 - protein, 176 aa, Artificial Sequence
  Synthetic
SALEEVKRHSEESIKAIEELVRRVEKHSRESSKRNEELIREVEDHSRRVIEELKRKKADREARELVKEDERRVKEVAEESRRLSKRNEELVRRIAREIERLSEENERLVKAVLRTLSEDVVRAAEKLLEEDRDAVRRAKEKLDELLKRDRDSSREAIRELERLLKETRDVLREVER

SEQ ID NO: 10981 - protein, 176 aa, Artificial Sequence; identical to SEQ ID NO: 10980
  Synthetic

SEQ ID NO: 10982 - protein, 184 aa, Artificial Sequence
  Synthetic
SEIEKILKDVDKKLKDSSRESEESVKESRDLLRESSERSERSVRETRKRVDDLLRLVDERKDEKLIREIEERARRIADKNRRIVEESKRLVEEAVRKNEDIVRKSAELVERIIRELEDLLRKRNEEDMKREIDKLVEKLKKVLRDNKRLHEKVIRELEEVVTRNEELHRRVIKEAKEVVDRVRK

SEQ ID NO: 10983 - protein, 184 aa, Artificial Sequence; identical to SEQ ID NO: 10982
  Synthetic

SEQ ID NO: 10984 - protein, 183 aa, Artificial Sequence
  Synthetic
SEVEEVLRRIEELLREDKRHVEEVVREIRELLKRNKDMVDEVLKRIEDLLREIDEARKRGDLREKAVEDLLRTVEELVRRAEEHTERLLERVERLLERNKEHSERVLEEVKRLIDDVKRKVKDVEEVIRKLDDILRKVKRVSEDNKRETDKVREEVAEVVKRSKDKLDKVRKDVKRVIERVRT

SEQ ID NO: 10985 - protein, 183 aa, Artificial Sequence; identical to SEQ ID NO: 10984
  Synthetic

SEQ ID NO: 10986 - protein, 183 aa, Artificial Sequence
  Synthetic
DEVEKAAEDVERRLREDEDHARKVVKRIRELLEEDTRTVDKVLREIEKLLKDITDLRRRGDIREEDIDRILRKVERDIERIEEHSKRVLEEVKRLVDRNRKHSKDLLDEVRERAKDVKRKVKDKKELTEKLDRLLERVEEVSKRNEDATRTVEKEVEEVVRRTKKKLDDILERVERVARELKR

SEQ ID NO: 10987 - protein, 183 aa, Artificial Sequence; identical to SEQ ID NO: 10986
  Synthetic

SEQ ID NO: 10988 - protein, 184 aa, Artificial Sequence
  Synthetic
ELIKKARKDVEEVRERSERLVDELRKRNKKLADESRRLIDKLRKDVEKVLREIEDLLRKRRTKDVLKEIEDLVRELERELRRVVKESSDKVRKLIRENEKVVEESSRLFRDLVEKLRRVVEERNDKKLMEEVERLIKRLEDVNEKSERDVREINKESERVNEETEREVEDAIRKLREVLRRAKK

SEQ ID NO: 10989 - protein, 184 aa, Artificial Sequence; identical to SEQ ID NO: 10988
  Synthetic

SEQ ID NO: 10990 - protein, 186 aa, Artificial Sequence
  Synthetic
KEVEDLERRVKEILDRMKRLIDENRKKIEKSIRELERLIDENRKEVERVKKELKDLKREGGDDARTLRERVRKIIEDVEEHSRRSTEEVRRIHKENKEHSERSSDEIRELLRRVEELIEEVKRRLRDKEMEKKLEDIVRRVREVVRRAHETNERLVDRSRKAVEKAERTNRRLVEEIRKVAEEVRK

SEQ ID NO: 10991 - protein, 186 aa, Artificial Sequence; identical to SEQ ID NO: 10990
  Synthetic

SEQ ID NO: 10992 - protein, 186 aa, Artificial Sequence
  Synthetic
DEIRELEERVRRILDELRRLVERNREVIERSIRELEKLLDRNRRKVEEILRRIDDLTRRGGDDKKTMLDDVRRLLREAEDHSRRSSETAKRIHRENEEHSKDSSRKVRKLIEELRELAKKVEKEITDERVKEAIKELVKDVDRVMREVDRANRELTKTSKKVLEDVDRTNRRLVKEVRDVVERARK

SEQ ID NO: 10993 - protein, 186 aa, Artificial Sequence; identical to SEQ ID NO: 10992
  Synthetic

SEQ ID NO: 10994 - protein, 186 aa, Artificial Sequence
  Synthetic
KEVEDLERTVRTILKRMRELITRNEEEIRRSIEELKKLLKENKDTVRRILEEMKELKKEGGDDKKRLVEEIKRLLDELRENSKRSSDRAKEIHERNKRHSEESSRTIEKLLKELRDLVRDVERKLRDEDAKRKLDELTKRVEKVVREADERNKRLTKRSKEVLDEVHRANEEALKEVEEVVRRVTK

SEQ ID NO: 10995 - protein, 186 aa, Artificial Sequence; identical to SEQ ID NO: 10994
  Synthetic

SEQ ID NO: 10996 - protein, 186 aa, Artificial Sequence
  Synthetic
DEIEELRKKAEEIIRRMEDLVRRNTETIKRSIETLKKLIDENRRRVRKIIETMKELKRRGGEDKETLLRRIDELLRRVEKHSKDSSDTVKRIHEENEKHSRDSSRKIEELLKTLRDLAEDVKRKIDKEEVKEAIERLVRRVEEVVRKVREENKRLNEESEEVVRRADRTNREILKRVRDAVREVRR

SEQ ID NO: 10997 - protein, 186 aa, Artificial Sequence; identical to SEQ ID NO: 10996
  Synthetic

SEQ ID NO: 10998 - protein, 181 aa, Artificial Sequence
  Synthetic
DAEDTLRDITRKVRKVLEEHRETIERTIRKNRESLERVKRAIEELIERSRRALEEVTRSGIEERVVKKAEDLVRRDEKTLRKVVDELKKLVDESEEINKDSLRKVEKLVRDAEDTLRKVPPRDEMLKRVEDIVKKLIEDLREMAKRNRDISKEVDDRLKKILDEVRKHSEEVIKRLKDEER

SEQ ID NO: 10999 - protein, 181 aa, Artificial Sequence; identical to SEQ ID NO: 10998
  Synthetic

SEQ ID NO: 11000 - protein, 181 aa, Artificial Sequence
  Synthetic
SAEETLERLAREVRKVLEEHARKIKKTIDDSRRVLEEHRKTIKRTIDESRKVIKDVRDDGIEEEAVKRADELLRRDEKLNKESLDTVRELVKRDVEENEKSLRDVERLVEEIKERLERVPPDEEVLRRVTEEVKELIERIERLLKENRKHSKKIIDRLRELLEENRRHSEELRKRLEDERR

SEQ ID NO: 11001 - protein, 181 aa, Artificial Sequence; identical to SEQ ID NO: 11000
  Synthetic

SEQ ID NO: 11002 - protein, 182 aa, Artificial Sequence
  Synthetic
SSLDEIRRKVREAIERLERLLEENRRKVEEVKRRNERLLDRNREVVDEVIKRLEEMRKDDEAVKRVRKILEEVRKHSRESTEESKKTVDEVRKHSEESSKRVKEILDELRKSAEDIERKNREKREVDEELKRLVEEVKKVVDDVRRENKRLLEEVERVSEEVKKTNEKLLERVKRVVEEAER

SEQ ID NO: 11003 - protein, 182 aa, Artificial Sequence; identical to SEQ ID NO: 11002
  Synthetic

SEQ ID NO: 11004 - protein, 182 aa, Artificial Sequence
  Synthetic
SSLDTAREHTRDVIKKIDDILRRNEKLVDDVIRELERLLRENAEVVERVIDRLRRLKKDKEALEEVEKILREVEKHSRDSTREVRRILREVEEHSRKLLEEVKKILDDNRKLIEDIKRKNREKREVVEELKELRKRSEEVVDRAEKALRRSVRKAEKVVEEVERANKRLLERVKKVVDDMRR

SEQ ID NO: 11005 - protein, 182 aa, Artificial Sequence; identical to SEQ ID NO: 11004
  Synthetic

SEQ ID NO: 11006 - protein, 185 aa, Artificial Sequence
  Synthetic
EVRERVKEVIERSEKSVRELERIVEELARRLRESVEDLERKIRELSKELRRVVEELVRTRGESSEEIKKVEETVREVDKELKELVERVREENERAIKRMRELLERVERENRRVVKEAKDLVDKRGDEEVVRRIEELLKEVHKENKRVADELKKLVEDLHDRNRRVKEEVKRRVDEVRRKAEEVAR

SEQ ID NO: 11007 - protein, 185 aa, Artificial Sequence; identical to SEQ ID NO: 11006
  Synthetic

SEQ ID NO: 11008 - protein, 185 aa, Artificial Sequence
  Synthetic
EVDERIRRLVEESRKSVEDLARIVDELVERLRRSVRDLEEKSKRNKEELEKVLRDLARTRGDKSEKVKRIADIIRRVEEESEKLIDRVRKENKKVIEDMRRLIRKVEEENKRVIDDLRRLVKERGTEEVVERVERLIEKVHRDNRRVAEKLREDVRRVHEDNKDVARKSHKLVKEVRDTVREVRR

SEQ ID NO: 11009 - protein, 185 aa, Artificial Sequence; identical to SEQ ID NO: 11008
  Synthetic

SEQ ID NO: 11010 - protein, 178 aa, Artificial Sequence
  Synthetic
DVLKEVEEDSRRNHERNRRVAEKVTDDSRRNVKRLEEVAEEIKDDSRKNKERLDKLRGDDEVVRRLAENVKRSARKLEEELKRLTRNVERTVKEVEEIIRRSRKNVDDTRKKLETEITDKEIEKILRDVLKENEDSLRELKEILERLLEENRKAVEKLKRILEELLRRNDEMLKRVRT

SEQ ID NO: 11011 - protein, 178 aa, Artificial Sequence; identical to SEQ ID NO: 11010
  Synthetic

SEQ ID NO: 11012 - protein, 178 aa, Artificial Sequence
  Synthetic
SVDEEVRRDSKKNKEDLDRVAEKVKRDSEENMRRLEEVARKVTEDVKRNKKTLEDLRGDEDVLRRLKENVERSREELEEIIERLERNVRRTVEEVERIVKKLRENVERTKKEVEERITDEEIRRILKELLERNERALEELKKRLRKVLEENKTVLEELRRRLEELLRRNKRMVDEARR

SEQ ID NO: 11013 - protein, 178 aa, Artificial Sequence; identical to SEQ ID NO: 11012
  Synthetic

SEQ ID NO: 11014 - protein, 179 aa, Artificial Sequence
  Synthetic
DEVEKLVEDVARVNKKSLDEVRRLLEELEKVSRDHRREVERSLREAEKVLEDLKREAEKTRDKDTLKKLLDELKRILEEIKDRHRRLTEHNKKVLDEVRETIRRIIERNKEVLDELLKRIGEEDDEIRKVKKHNEDVLRKVRKILKDAERISKRALDENERILKEVEKRVRDVIRELER

SEQ ID NO: 11015 - protein, 179 aa, Artificial Sequence; identical to SEQ ID NO: 11014
  Synthetic

SEQ ID NO: 11016 - protein, 179 aa, Artificial Sequence
  Synthetic
DEVDDVVRRLEEENRKSEERAKDTLRKAKKVLDELKKRVKESEDRVKEVLDDVEERVRRTTDKETLRKLLEELRKILKKVEEDHKRLTKTLRDLLKRVKEEHDKLTDENRKLLEEVLRRLGKDDKRVRDALRHNEDVLRRNDEIVDELRKRVEDVLKKNEDDVRRVAEEVRRVIEELRK

SEQ ID NO: 11017 - protein, 179 aa, Artificial Sequence; identical to SEQ ID NO: 11016
  Synthetic

SEQ ID NO: 11018 - protein, 179 aa, Artificial Sequence
  Synthetic
DRVEEVVKRAKDENRKSEEEVKKSLKDLEDLSREHEKRIRDLLKEVKEILDRIREEVEKKRDRKTLEEIVKKLADVLKRVDDEVKELLKHNKEMLEELRKRHKKLTKDNRDVLEELRREIGEEDDEIRKLERHNEEVLKKNETIARDLEKRSREVVKRLEDILRKVEREVEKALEEVRT

SEQ ID NO: 11019 - protein, 179 aa, Artificial Sequence; identical to SEQ ID NO: 11018
  Synthetic

SEQ ID NO: 11020 - protein, 182 aa, Artificial Sequence
  Synthetic
SVEEELRKLKEEIDRVLEENKKIIDDIRKELDDVNRENKKIIDDIRKEIDDVLERVRGEDKDRMREIEEVARRAKEKLDRLLEKSTRLIEKLKEELDDLVRRSAELAKEMKDRLKELKDNNVDEKDLKKLLEEVRELLERSRRASEELLREVKRLLDESRKESKRLADDVRRLLEELERRTK

SEQ ID NO: 11021 - protein, 182 aa, Artificial Sequence; identical to SEQ ID NO: 11020
  Synthetic

SEQ ID NO: 11022 - protein, 182 aa, Artificial Sequence
  Synthetic
SVEDIIRKIEKELDDVNRENEEIIRRIKKELDDVNRRNEKIARDSKKRVDDVLRKVTGEDKDKVDEIRRIAEEAKRSTDELLKESTELIERLKKRLEELLRESSRLIEELKKRLEDLLRNNVPEEVVKKIREEVRKLLEESKRRSDELAKEVRELLKRSEDKSRRNLEEVEKLLKEVEDRTR

SEQ ID NO: 11023 - protein, 182 aa, Artificial Sequence; identical to SEQ ID NO: 11022
  Synthetic

SEQ ID NO: 11024 - protein, 179 aa, Artificial Sequence
  Synthetic
KDLEDVLDKVRKDLERSKKHSDDVVKTIRELLKESEKHSEELVKRVEKLLEELRRMTTRGDAREEKVDRVLEEVDKLLKENRDESRRVKDEVRKLAKRNRDVSKELLDRVKEEIERLRRRGVDESILRELERRVKKVVEENDEITRRVEREVEKVDKKNKDITDTLRTRVKKAVDEARK

SEQ ID NO: 11025 - protein, 179 aa, Artificial Sequence; identical to SEQ ID NO: 11024
  Synthetic

SEQ ID NO: 11026 - protein, 190 aa, Artificial Sequence
  Synthetic
SDIERLLREVEKVIRDSEEETRKLLEEVEKALKDSRDSSEDVKRKVDDILRKLRELRRRNELPKEELTRRAEEEVRKIDRLLEENYKRSKEVVDEIKKKLDEVIKRSDELVRRLEEELRRVLERVKEREDMERIERLLREVRKRVEEAAKRNKDVIKEIEERVRTVHDENRRLLEEIAKRVRDVLEEVRT

SEQ ID NO: 11027 - protein, 190 aa, Artificial Sequence; identical to SEQ ID NO: 11026
  Synthetic

SEQ ID NO: 11028 - protein, 171 aa, Artificial Sequence
  Synthetic
KVEEELEKEVRRALEESKRLLDRLTEHSKRVLDELRELLERVERDVRRVLEELKRERDDEKATRIIEEVRKRLKDVVDRIRELVERNKRELDKAVKDSTRLVEEIKELLREKLEDKDVVDRLEKELKKVNDEARKRIEELLRESDRVLEEVKKKMRELERELKKVLKEVRD

SEQ ID NO: 11029 - protein, 171 aa, Artificial Sequence; identical to SEQ ID NO: 11028
  Synthetic

SEQ ID NO: 11030 - protein, 171 aa, Artificial Sequence
  Synthetic
DEVEDADRKVRTVLEDLRRRLEELKKHSDDVSRRNEKLLRELKEHSDRLVEEIKRDKKVERVEELVRRNEKKLEDAVREVEKTVRDNKEKLKRVVEKIEEDIRRVEEELKRDVRDKRVVDELLKKLRDVLEEVRRTVDELVKRSEESLRRAREVIRRLLEKTREVLEEVRT

SEQ ID NO: 11031 - protein, 171 aa, Artificial Sequence; identical to SEQ ID NO: 11030
  Synthetic

SEQ ID NO: 11032 - protein, 173 aa, Artificial Sequence
  Synthetic
STEDVLRKIKEDVKRVIDDNRRILDEVRRTSKRVLDDLRRNLKHIAEEVERVLREVDKEEVVRELKKILDEIREEHRRLIRTNEKVLEDIERDHRRISEELKRILDEVDELLRAGKPSKELLEKAKRVVDEIKRLAEESLKRLEDLSRDHKRRAKELNDEIRKVVDELRKRAT

SEQ ID NO: 11033 - protein, 173 aa, Artificial Sequence; identical to SEQ ID NO: 11032
  Synthetic

SEQ ID NO: 11034 - protein, 173 aa, Artificial Sequence
  Synthetic
SLEEVLDEIRKLVERALRDLERNLRHVTRTSEEVLRRNEEILRRIEEKVDRVVRNVKTEEVVREMRKILKELRERHKRLTETNREALKRIAERHKRLIEEVKRILDEVAEVIKKGEPSKELLDEIRRVLEEVKRRVEELNKELKDLSDKHKEKAKRTDETITDVLRKAEERER

SEQ ID NO: 11035 - protein, 173 aa, Artificial Sequence; identical to SEQ ID NO: 11034
  Synthetic

SEQ ID NO: 11036 - protein, 180 aa, Artificial Sequence
  Synthetic
SVEELLREVAELVKRVDEDLRRLLEEVRRSNEEVIRRLEEILKRIEEENRKVVEELRRRGVSEDLVRESKRLVDESRRVIEKLVKESRDSVERTRETVDRLREELKRLVEEIKKMVEDNSSEETVKRLLDELRELLERLKRTIEELLKRNRDLLRDAEEKARRLLEENRKLLKKARDTAT

SEQ ID NO: 11037 - protein, 180 aa, Artificial Sequence; identical to SEQ ID NO: 11036
  Synthetic

SEQ ID NO: 11038 - protein, 180 aa, Artificial Sequence
  Synthetic
SLEELVRDVERLVKESIEELERVVEDVRRLNTELKEKLERVAREIKKRNDDLVRELRTAGTEDRLIKESRELVRRSEDTVRRLIERSEEIARRTEKNVKRHVKENKDVVEKIREVVTKNSSEEVIDRLRKELEDIIRESRKNLEDLLRENKRLVEEVERTLRELLRTNKELLERIREEVR

SEQ ID NO: 11039 - protein, 180 aa, Artificial Sequence; identical to SEQ ID NO: 11038
  Synthetic

SEQ ID NO: 11040 - protein, 180 aa, Artificial Sequence
  Synthetic
SVEEMLEKIRRRATESVKRLRKILKEIKERNEKAIRDDRRLLEEIERRIREVVKRLRDAGVSEDLVRRLEEILKRVKEAVEKSVRESKKLVDDTKRNVEKHIEDNKRVVDRVEEAVRRNSSEETVKRLEEEVEKIVRDSERNAREMLERNRRLIEESKKRTKDLLKEVEDEVRKLEEEVR

SEQ ID NO: 11041 - protein, 180 aa, Artificial Sequence; identical to SEQ ID NO: 11040
  Synthetic

SEQ ID NO: 11042 - protein, 184 aa, Artificial Sequence
  Synthetic
SVEEIVRRIREELKKVEEDSERIVRTVEDVLRKVLETVERIVRESEKRSRDAVRRIREKLSDKEKLKEIEDEARKSVEELRKLLEDVERRVRELVKKARDLHRRSKEVVDEIRKKVEKLLKDGGSDEVATRLLKEVKEELDRLREENERLLRELKETVEKLKRDAEKVVEDDERLVRELEKRVD

SEQ ID NO: 11043 - protein, 184 aa, Artificial Sequence; identical to SEQ ID NO: 11042
  Synthetic

SEQ ID NO: 11044 - protein, 183 aa, Artificial Sequence
  Synthetic
DIEELLEEIRRRAEEAHRRNEDLLRKIKELVKKARKDNEKVVRDIERRLREVLERVRKKITDDRLREEIERLVDEVRKLLEDVKRESEKLVREAEKLLKDLERRSKEVLDRIEKLLRDVSRSTDREEVKEVLKRVEDLLRTSEEETKELLKRVEDELRRSKEDSEDVLRKVEELLERIDRRVT

SEQ ID NO: 11045 - protein, 183 aa, Artificial Sequence; identical to SEQ ID NO: 11044
  Synthetic

SEQ ID NO: 11046 - protein, 182 aa, Artificial Sequence
  Synthetic
KEIEEILEEVKRLLDKLKEDSDRILERVRELLERSKEKSREILKRVEDLLRELEKLVRDDRDEDTLRDLLRELEERVKELLKELDKTSKDVLDEVRKLLEENNRLLDELTKRVDELLRRISEDEELRRVLEEIRRLLEEVRRKIEEASRRLKEDADRVHRKNEEILKRIEELIEEVKRRVEK

SEQ ID NO: 11047 - protein, 182 aa, Artificial Sequence; identical to SEQ ID NO: 11046
  Synthetic

SEQ ID NO: 11048 - protein, 182 aa, Artificial Sequence
  Synthetic
KEVEDILREVDKLLKESKRKSEEALKRVKRLLDELKKTSKRILREVEKLLERLRRLKKDDRDKDRLREELKKLLKTVEDLLRDNDRLLREVEERAKKILKDVRETSERLLRTVKKLLEEIPKDKDLKKIVDDIRRKIDKVDKDNERLIKELEDRVRKAREDIRDISRRIRELVKRVVDEVEK

SEQ ID NO: 11049 - protein, 182 aa, Artificial Sequence; identical to SEQ ID NO: 11048
  Synthetic

SEQ ID NO: 11050 - protein, 182 aa, Artificial Sequence
  Synthetic
DEVETILRDVKRLLEESRRESERVLEEVRRLIEELKKRSRDIMEEVKKLLEELREIVRRDRDKETLRKLLEELEREVRKLLKRNNELLEELLRRARKLIEEVERTSRELFKTVEELVRRIEPDEEARRLLEEADRLVREVDKENEDILRRIEESVREVEERIRRISRAIEESIRRVKEEVER

SEQ ID NO: 11051 - protein, 182 aa, Artificial Sequence; identical to SEQ ID NO: 11050
  Synthetic

SEQ ID NO: 11052 - protein, 182 aa, Artificial Sequence
  Synthetic
KEVEDLLREIERLLKESRERTKKVEEDVKRLLDESRKTSEDVLREVERLIRELEKIVREDRDKDRLEELLRRLKETAKELLRKVEELSRRLKETVDKLLRDLEEDSKKLLEDVKELLDRIPPDDKARKLVEEAKRRLDTVNEENKDVVRKIKEDLERVDEENRDVLRRIKRIVERVEEEVRR

SEQ ID NO: 11053 - protein, 182 aa, Artificial Sequence; identical to SEQ ID NO: 11052
  Synthetic

SEQ ID NO: 11054 - protein, 180 aa, Artificial Sequence
  Synthetic
DEAERLLRRIEEILKRSKDVSDKLLEDNEKLVRDVKRRLDEHLRKNREALKKLREELKRNRDERDLERLIRESKKLLDDSEKNIRKLVKESDRLLEETERENRRLIKELRDIVKEIAERIGKDDDEVVRRIEELVKKLEEDNKRVVEEIKKLNDDLRREVKRVLDEARKLNKEIVDELRK

SEQ ID NO: 11055 - protein, 180 aa, Artificial Sequence; identical to SEQ ID NO: 11054
  Synthetic

SEQ ID NO: 11056 - protein, 180 aa, Artificial Sequence
  Synthetic
SEVDELRRRVEEVERRSEENSRKHLEDNEKMVDDLRKNLERHLKENKELVERVRRVVEDNTSEELLKRLIDESEDLVRRSEENIRDMIRRSRELAKRSKDNNEEVIRRLKKLIEDIVRTIGKDVDRVVEDLKRRADELVRRNERAAEEVRRLNEEVVEDLKRVVKEVKDLNDELVKEVRR

SEQ ID NO: 11057 - protein, 180 aa, Artificial Sequence; identical to SEQ ID NO: 11056
  Synthetic

SEQ ID NO: 11058 - protein, 183 aa, Artificial Sequence
  Synthetic
SVEEVLKEIEKEHRRSEEEVKDVLRKARKINEEVERRVKEVVDRIRETIARVRKEVKDRNGERLEELERRLERILREVERLAKELIDRLRRTVEDSERLVKRLVEENRRVLEDVRRLVRELDKVKDVLKKLLDRSRRLVEKVRDDLRKAEEKNRRVAEEIKETLKRMEDRVREELKEIKKKAK

SEQ ID NO: 11059 - protein, 183 aa, Artificial Sequence; identical to SEQ ID NO: 11058
  Synthetic

SEQ ID NO: 11060 - protein, 183 aa, Artificial Sequence
  Synthetic
SVEEVLKEIEDLHKKSIDEVREVLKEAEDLNRRAVKEVEDALRESEELNRRVTKEVRDENGKDLEELEKELRENVRRVRETVRDLKRKLEETVRESREDVERLVRENERVVKEVRDLVRKLDKVKEVLDRLLEKSEKLARDVRKRLKEVLDKNRKVVEEIRKVLEELLRHSERKLERIRERLK

SEQ ID NO: 11061 - protein, 183 aa, Artificial Sequence; identical to SEQ ID NO: 11060
  Synthetic

SEQ ID NO: 11062 - protein, 184 aa, Artificial Sequence
  Synthetic
DVEDVVRELKKLLDEITRRSEEVVKRLHDRNEEAKEEVRRVVKEVRERLKKVVDDVRRELKDSEKLERVEEKIEEAVRRLDEELRRLEEELDRSSDRLRKLHETTRRLIEEAKRRIKELLDRNGDREVLRKLKKEIKDLLDRIEELNKKVLDESEKLIKEIREDLRRVKEEIKEELKRIREEVR

SEQ ID NO: 11063 - protein, 184 aa, Artificial Sequence; identical to SEQ ID NO: 11062
  Synthetic

SEQ ID NO: 11064 - protein, 184 aa, Artificial Sequence
  Synthetic
SVEEVVRRIKEKLETVVDESRRVVKDLHDKNKEIVEESRKVLRESEKVDEDVVEEVRRRLGNSEKLREAEKKIEKSTEENRRLHKKTADEIKESSERLRELHERTRREIEKAMERVERVLRKGGSDEELEKLLREIEDLLRKIRKLNKEVLDRSRKLLEDIRRLNKRALERNRKIAKEIRDEVK

SEQ ID NO: 11065 - protein, 184 aa, Artificial Sequence; identical to SEQ ID NO: 11064
  Synthetic

SEQ ID NO: 11066 - protein, 172 aa, Artificial Sequence
  Synthetic
DSAEKLERDVRRALERIRKRLEENDRRVEEILERIRRRLREDLETSREVLERLRKENVREDEVRDLARRVKENTDRTLEEVKRLIEEAKKHSKDVLDDVKRDAERLKEEIRRVPVDESVIEKLERLLDELLEEVKRVVETSEKKLDELLEEVKRVVEESKKALDDLLREVEK

SEQ ID NO: 11067 - protein, 172 aa, Artificial Sequence; identical to SEQ ID NO: 11066
  Synthetic

SEQ ID NO: 11068 - protein, 183 aa, Artificial Sequence
  Synthetic
DKVDEVLRRVRELLERLRKLLEDNKKTTDELLEELRRILKEDEDRTRKLLKRLRDVKREEIKDKDTLTKTAEEIAKRLEDSNRTSKEIVERIVKELRESNERLERIADEIRERVERLLKKAKEEGVDDRMMKRLKEELERIRKKVREVLERSSRAVERIEREVDEVVKRSSDTVKRILDEVRK

SEQ ID NO: 11069 - protein, 183 aa, Artificial Sequence; identical to SEQ ID NO: 11068
  Synthetic

SEQ ID NO: 11070 - protein, 183 aa, Artificial Sequence
  Synthetic
SEAERVRRRVEELLRELREHSRRVLEEVKRLLEKLREDNERSLRRIKKLLDELRRVRERDLQDKDELRKLLRELKEDVKRIIEENDKIVKKLLEDAERLARENEEMLKRLKEEAERLIRDLRRKGVEEEVLRDIERRVREIEKEVREVTRAIEESVKKIEKESRDVLRAIAETIRKIEEEVKK

SEQ ID NO: 11071 - protein, 183 aa, Artificial Sequence; identical to SEQ ID NO: 11070
  Synthetic

SEQ ID NO: 11072 - protein, 183 aa, Artificial Sequence
  Synthetic
DEAEEVLKTVKKLLDDLRRRNEDSLRRIEELLKRLRDHSKRVLEEVRRLLEELRRVKERDLKDKEELERLLERVLREAERLLKENEDLLEELERRVRDILRRNREMVEELRRRAKRLLERLRERGVREEVLRKIKKDVEKIVRDSERVIKTIEEKIDRIKKEVKRVTDEIRKRVEEIAEEVRR

SEQ ID NO: 11073 - protein, 183 aa, Artificial Sequence; identical to SEQ ID NO: 11072
  Synthetic

SEQ ID NO: 11074 - protein, 181 aa, Artificial Sequence
  Synthetic
SELEDVLRRSRDLLRRLKELLERLLETVRKLIEEAKELLKKILEDSRKLIREVEEMVRRGDIDDDTLRRIKEENRRLNKELRDRVKKLEEDIRRLIKKLEDEVRKAKEDNERLLKKLRDDEDSEEIRRVIKESKDLSRALEETVRRVERKIEDLLRRIKEEAERVIKESEKLIEDAERATK

SEQ ID NO: 11075 - protein, 181 aa, Artificial Sequence; identical to SEQ ID NO: 11074
  Synthetic

SEQ ID NO: 11076 - protein, 177 aa, Artificial Sequence
  Synthetic
DEDEEVERELKKIKDKSKKVLDKSRKTIDELRKEVERTLRRWTKRSKDLLDKVEAAKRRNVREEELKRLVDEWRKEVDKVREEVERLKKKLKDELRRLEREHRELVREIEEELKRLAERGVPEEVLRKVDTILKEIKRRNEKVLKELRDIIDDLAKKLDEVLRRDEELAKKVTEELK

SEQ ID NO: 11077 - protein, 177 aa, Artificial Sequence; identical to SEQ ID NO: 11076
  Synthetic

SEQ ID NO: 11078 - protein, 177 aa, Artificial Sequence
  Synthetic
SEDEDARRTLREMLEESRKHLKEWEDTSRELEKKSREVLKETRKTIAKLADRVRKAKENNVDEKSLEDLTREAEETLRKLAEDHKRLVKEWREVIERLRKTVEDLVRKIREILKRLAEKGVSEEVLEDIRRKVEKLEEDNRRVMKKDEDAVRRVEEENRKVLKELKERIDRLAEELK

SEQ ID NO: 11079 - protein, 177 aa, Artificial Sequence; identical to SEQ ID NO: 11078
  Synthetic

SEQ ID NO: 11080 - protein, 177 aa, Artificial Sequence
  Synthetic
DEDREAEETIKRLLDRSRKTLEESRKTSEDLRRKSEKVLRETRKSLEDSLRKVREMKKRNVSEELLEKLRKELEDNLRRLERKHRELVKEWRKVTEDLERKHRELIKEIERILKELREKGLDEKVLRDLEEIVRRAAKANKDVLDEDRRVMEEAREENKRVIDEYRKILKEATDELR

SEQ ID NO: 11081 - protein, 177 aa, Artificial Sequence; identical to SEQ ID NO: 11080
  Synthetic

SEQ ID NO: 11082 - protein, 177 aa, Artificial Sequence
  Synthetic
SEDEEAKKTLDELLKKAEELVKKIKETSERLLRKSDKLLEETKKTIKELDDEVKEVKKRNVSEEDLKRLAEKLREILKRLEDRHRKLVEEWEKVTRELAKELEDLRREVKRILDELRKRGVSEEVLRRIEEIIRRVTELLKKVLKEDREVVEEARKKNEEVLDRLKKIIEEAEERLR

SEQ ID NO: 11083 - protein, 177 aa, Artificial Sequence; identical to SEQ ID NO: 11082
  Synthetic

SEQ ID NO: 11084 - protein, 177 aa, Artificial Sequence
  Synthetic
DEDEKAKRMLEEAEKKSKKHVDEVRETSKRLLEESKKLLEETDRSLRKSLERVDRVKKNNVDEKDLKRLLEELEKNLRDLARRHEKLKRDWEEVTRRLEETAKKLVEEIRRILEELRKEGVDKRVLDDIKTKVERLEERNKKVLDDDREMVTRAEEENRRVIKKYRDILEEARKRLK

SEQ ID NO: 11085 - protein, 177 aa, Artificial Sequence; identical to SEQ ID NO: 11084
  Synthetic

SEQ ID NO: 11086 - protein, 177 aa, Artificial Sequence
  Synthetic
SEDEDLDRVAEKLKREHKKSVEEIKRVLKRADEESKKLVRDTERVIEEIKREVEEARRRNIDEELVERLKKKIEDILRTLEERHKKLIKELREILKRLSDESRRLAEETEKVLEDLERKGVDEEVLKKLREIVRRVKEENRKVNEEVEKRLRELEEENKKVIEDLKKTVEELVERLR

SEQ ID NO: 11087 - protein, 177 aa, Artificial Sequence; identical to SEQ ID NO: 11086
  Synthetic

SEQ ID NO: 11088 - protein, 188 aa, Artificial Sequence
  Synthetic
DDLEDIKRRLDEMREEVKRHVKRLKEVAKEIEDEHKETVRRNKEVAKKLAREIDDARRRNRNEEELERIIRRLRETLKRLTDRNKEVIDRSREKLKRLKERSEETIRRLRRKLEEIRKDIERVKKAGADKDKVDKVLREVTEEVKRLEEEIKKVDKEIEEIVRRVERENEEVVRDIARIVEELERKLR

SEQ ID NO: 11089 - protein, 188 aa, Artificial Sequence; identical to SEQ ID NO: 11088
  Synthetic

SEQ ID NO: 11090 - protein, 188 aa, Artificial Sequence
  Synthetic
RELEEVIKRIEKTVTDNERANKESVDRIREIVDRLKKEIEESVRRMRDSVKKLEEEIRRRGASEEVKETVERLMRELEKHIRESEREIEKLAREAEEHIKRSNERVKKSVKELRDLLETVKRLKERGNEEELIRRLEKVLKEHHKRVEEIVKENEDVARDLDRRIKEIVERNRKVLEDLRRRIKELKK

SEQ ID NO: 11091 - protein, 188 aa, Artificial Sequence; identical to SEQ ID NO: 11090
  Synthetic

SEQ ID NO: 11092 - protein, 179 aa, Artificial Sequence
  Synthetic
SEIEDALRRAERVSRESAKKLEDALRKYEKVSRDLKRRLDEVLKRYEDTSRKIAKDLRDNGVDEETVRRLVETSKEDLKRLERELRELARRSDEDLKRLDRELKELVERSKELLKEVERRNIDEETIERLIEKNKREVDKLLKKIEEVIKRNKDEVDKLLKKIEEVIDRNRRAMEEIAR

SEQ ID NO: 11093 - protein, 179 aa, Artificial Sequence; identical to SEQ ID NO: 11092
  Synthetic

SEQ ID NO: 11094 - protein, 184 aa, Artificial Sequence
  Synthetic
SIEDELRKIVEDIEREIKKLEDDLRRVSKDHRDEVRRILEKLKEHIERLEEDADRLKKAKEPKEKLDERVERLKEHSKKVVKEARDRLRELEERNRKIDRELEEELKKLEKRVREEVKKVRTRKDTETVREMIKRLEELVRRVKRRIEDVIRRNREVVDESRRRIEKAIEDNERVLKKIEEEVK

SEQ ID NO: 11095 - protein, 184 aa, Artificial Sequence; identical to SEQ ID NO: 11094
  Synthetic

SEQ ID NO: 11096 - protein, 184 aa, Artificial Sequence
  Synthetic
SIEEEIKKVVKELEDEARKLLKKIEEHSEDLKRKLEDLLRKVEDHIRRLREEIERIKRENLDEERVKRALDKLEESSRRVVEELKKKVKELRDSSEELKKEVRKKVEELRDRVEKEIEEVKKRKKTETVKKAIKELRDLVDKIEEDLKRVLDENERVLREIARKIDEIIEKNERELRRVLEEIR

SEQ ID NO: 11097 - protein, 184 aa, Artificial Sequence; identical to SEQ ID NO: 11096
  Synthetic

SEQ ID NO: 11098 - protein, 172 aa, Artificial Sequence
  Synthetic
DEAEELERRLREEVKRVETDLRRTTRELEREVEEVRRRLEKTSRENNDRSEKAEREDSRDKRLEEELKRESDRLEKEHRDLIKKLRDSLEKMRRDHKRLIDELRKRLEDLERKIKDKEVVDRLREIITDLVRKLEENVKRLEEIIKRLEEELKRNVDRLRENSKRLAERLRT

SEQ ID NO: 11099 - protein, 172 aa, Artificial Sequence; identical to SEQ ID NO: 11098
  Synthetic

SEQ ID NO: 11100 - protein, 172 aa, Artificial Sequence
  Synthetic
SEAEKVLEEVRRLIEEIRRRLKETTDDVRRLVRELKEEAKRLLEEDKRLVDDLRRRNAKDETLTRRLRRHAEETKKTIEELIRALEEALDRLRKRHEELLRELDETLRRLEERIEVKEVVDKIRKVAEELKKELKDNADRVRRIAERLKEELKRVAEKSDRIIRTLEEELKR

SEQ ID NO: 11101 - protein, 172 aa, Artificial Sequence; identical to SEQ ID NO: 11100
  Synthetic

SEQ ID NO: 11102 - protein, 172 aa, Artificial Sequence
  Synthetic
SEVERLVREVEKDLERERRRLEKTVRDSERLVRELKETLDRLLKRDKDVVDDARRKNSKDERLRKRLEEHLRRTKEELRRLKEENRDVARKLREEHKRTEERLDERLEDLERKISDKSVVDRLREIVKELKDRNRKVVKELEDIHRDSDRELDDVVRRSDEIIRELVERLKT

SEQ ID NO: 11103 - protein, 172 aa, Artificial Sequence; identical to SEQ ID NO: 11102
  Synthetic

SEQ ID NO: 11104 - protein, 181 aa, Artificial Sequence
  Synthetic
DLEEIIKTIREINERLNRRVREVEERLRRTSRELEERIRDVVRKLREINDRLRKEVEARGLDKGKLEEAERESERTERENEKLLKRIEDSLRKSEEEIRRVIKKLEDESRELEKRLEDLLREGRVDERLVRENEEAVKRLTKELDDLLRKNEELIRRLEEEAKRVLERNEKIARDVREELK

SEQ ID NO: 11105 - protein, 181 aa, Artificial Sequence; identical to SEQ ID NO: 11104
  Synthetic

SEQ ID NO: 11106 - protein, 181 aa, Artificial Sequence
  Synthetic
DLEEIIRKIREINRELNETVKKVVRELEEDTRRVKRRIEEIVKELERTTRELDKRVKDSGLDKSELDRIRKELRDSEEELKELLKEIEERLRRSNDKLRRVEEKIRKRSEELKKRLEEALREGRVDEKLVEDNRKEVRDLEEEARKLLRENHELTKRLIEEAERILKKNEELIRKIEEEER

SEQ ID NO: 11107 - protein, 181 aa, Artificial Sequence; identical to SEQ ID NO: 11106
  Synthetic

SEQ ID NO: 11108 - protein, 181 aa, Artificial Sequence
  Synthetic
SLEELLEELERILREVEERIKEVVRRLEEDTRRVEEEIRRIVEELKRINRELEELVRRTGLDKSELDRLRRESEETEKRNRRLEEEIKKRLEESNRRIKELLDRAKERLKKIADDIKKVFDDGRVDERLVKEVRDTVKELEDELKELLDRNHELTRRLEEEAKRLLEENKKRADDVKEELR

SEQ ID NO: 11109 - protein, 181 aa, Artificial Sequence; identical to SEQ ID NO: 11108
  Synthetic

SEQ ID NO: 11110 - protein, 184 aa, Artificial Sequence
  Synthetic
RLDEVIRRVEEVIRDVERRVAEVVKRLRDSSKTVKEKIETVIRRNKEINKRLEDLIRESGVPEEVKRKAEEVLERSDRENEKLLREADRRLRESEKKLDDLRKEIEDTVRRLRERLKDVARRGVPEDDLRRTLEEVKRTIDKLKEDAERLLEENKDLIRRLEEELKESSKRNDTLVKKLKKELK

SEQ ID NO: 11111 - protein, 184 aa, Artificial Sequence; identical to SEQ ID NO: 11110
  Synthetic

SEQ ID NO: 11112 - protein, 182 aa, Artificial Sequence
  Synthetic
REMEEALKRNNELSERLRRELKRVLEENHRLSRDLEKKLRDLLERVRELVERLDRMKEEGKADEDTLDKLRREVEDLLRRLEELLREIKRKSEELLERLKRLLDELRKESRKLLEDLRRKSDTEEVRRVLEEIRRDTEELEKDARRVLTELRRNLERLRRKVEKVLEEIRRILEELERRVRK

SEQ ID NO: 11113 - protein, 182 aa, Artificial Sequence; identical to SEQ ID NO: 11112
  Synthetic

SEQ ID NO: 11114 - protein, 175 aa, Artificial Sequence
  Synthetic
DKLEKLEEKLEKDVRRWDDELRRDLEDSKRLVDTIRKRLEKLLRDHRELVRRIRELLRDGRVPEKLMKELEDFNRRVAEEVKKLRDDLRRKLRESAERHKKIAEELRRELKRIEDEVGRNEVVRRLEEEVRRLEEKVKEVLRRNEEEVRRLEKDIERVLRESTKIVEDLKDEVRK

SEQ ID NO: 11115 - protein, 175 aa, Artificial Sequence; identical to SEQ ID NO: 11114
  Synthetic

SEQ ID NO: 11116 - protein, 184 aa, Artificial Sequence
  Synthetic
SVEEVVEELERIHREVKREIDEVVDRLREINEEVRREIKEVLDKIREDLERLKEEIDRDLKDKKTADRLKEEIDRLLREVEETVERLERRHEDAKRRTRERVEELKRRHDKVLDEIRELIRRGVSDDILREMLRKSEELVRESREDLKRLLEEHRKLVEESRRELERLKKEVKDAVEEVRRRLK

SEQ ID NO: 11117 - protein, 184 aa, Artificial Sequence; identical to SEQ ID NO: 11116
  Synthetic

SEQ ID NO: 11118 - protein, 184 aa, Artificial Sequence
  Synthetic
SVEEVVEELKKIHEDVKRKIDEVLKRLKRINDELRKRIREVLERLRREAEKLMEAIRRDARDRDTVKKLEEELRRLLKRLEDTARELVKRSDKLLEDTERTARKLKEDHDRVRKKIEDLVREGVSDDILREMLKESKELVKRSEKTLRELEKRHRDLVREVEETLKELEREVERKVREVERRVR

SEQ ID NO: 11119 - protein, 184 aa, Artificial Sequence; identical to SEQ ID NO: 11118
  Synthetic

SEQ ID NO: 11120 - protein, 184 aa, Artificial Sequence
  Synthetic
SVKEVLDEIRKINDDARRRLEEVLKDLKRINDELKERVDRVHDRNRRLLEELKKEIRTKLKDKRKADELERRLKELLEESKKLADEMKKRSDDVLRETERTARELTERHRKLLEEVKRLVEAGVSDDILREMLERNKELVKESKKVLEELEREHRELVREVKKRLDDSTEKIKTEVDKVKKELD

SEQ ID NO: 11121 - protein, 184 aa, Artificial Sequence; identical to SEQ ID NO: 11120
  Synthetic

SEQ ID NO: 11122 - protein, 184 aa, Artificial Sequence
  Synthetic
SVEEVIKEIEKIIRDLKEELKKVLTELEKRNEELKRRVEEVHEESRRLLDTIRKEIERKLKDKKEADRLEEELRRALKKDEELVREVIKRSEDLLRETRKRAKELSDRLEELRKRVEDVARAGISDEVLEELLRRVKKTVKEVREDLDRLRKEHEELVDRVREELERSLREIKERLERIKRRLD

SEQ ID NO: 11123 - protein, 184 aa, Artificial Sequence; identical to SEQ ID NO: 11122
  Synthetic

SEQ ID NO: 11124 - protein, 180 aa, Artificial Sequence
  Synthetic
KEAEELLEKVRKLVKEIEDRLRKSSEENRELVKRVEDELRETTKKNKKLVDEIKERREKSDKDKKKVDDDIRKELEDVSRENKEILKRIEDESRKSEEKNKKLADDVKRELDEMRREVREKVKDEDVLRRIEEILERVERAVREVLRRNKEINDRLRERVEDVVRKNEDILRRVLDEVRK

SEQ ID NO: 11125 - protein, 180 aa, Artificial Sequence; identical to SEQ ID NO: 11124
  Synthetic

SEQ ID NO: 11126 - protein, 180 aa, Artificial Sequence
  Synthetic
DEVERLIEEVDKLVKTIEEELRRSSEKNKDAVRRVKRRLEKSNEDNREVVRRVDKERRDSDKDRKKVRDEIEERSRRTEEENKRLLKELKEESERLEEENRRLLEEVERRLERMEEEVRKKVKDEDVLRTIKEILRELRERVEEVAKRNKEINDRLNEDVERVVRENKELNDRLRERVDR

SEQ ID NO: 11127 - protein, 180 aa, Artificial Sequence; identical to SEQ ID NO: 11126
  Synthetic

SEQ ID NO: 11128 - protein, 180 aa, Artificial Sequence
  Synthetic
DEAEKLIEEVKRLVEDLERKLDESSRRNEETVKRIDKELKDSNKKNRDTVKKVTDTAKDSDKDREEVLRRLKKRSEETKEENKELLKRVRERLEKVKEDNDRLLEEITRALRELEDKARKTIKDEDVLRTIKKILDDLERRVEEVVRRNREILKDLERKVRRVFEENEKLNRELEERVKT

SEQ ID NO: 11129 - protein, 180 aa, Artificial Sequence; identical to SEQ ID NO: 11128
  Synthetic

SEQ ID NO: 11130 - protein, 178 aa, Artificial Sequence
  Synthetic
SKADEVEKDVDRKLKEVKKRLDETRESVRRKLEEVRRELEESEKSVETVLREVKKTKDRGTSEEALKDIKRRLREHNKRLTEKHEKIKRELDKHNKELTDDHERIKEELKEKVRKLEEDGLEEEVLKKLKDIATELRERLDRNNKELTDIHRELKERLDRNNTKLSEIHKRLEEELDK

SEQ ID NO: 11131 - protein, 178 aa, Artificial Sequence; identical to SEQ ID NO: 11130
  Synthetic

SEQ ID NO: 11132 - protein, 178 aa, Artificial Sequence
  Synthetic
SEVDEARKRVRDVLEEVRKALEETEKSVRRTLEEVEKRLKESEDSVRKVLEDVRRELERGTSEEVLKKIEEDLRRHNKRLTETHKEIEDRLRDHNRKLTDLHRRLKKELDRLLKELKDKGLDEEALRELEEIARRLERELEKNNKDLTDIHETLRRRLEDNNRKLSKIHEDLARELRK

SEQ ID NO: 11133 - protein, 178 aa, Artificial Sequence; identical to SEQ ID NO: 11132
  Synthetic

SEQ ID NO: 11134 - protein, 182 aa, Artificial Sequence
  Synthetic
KEAEDMLREVKRLIDRIKKVLEDVLKAIEELIRRLEDIHRKVNEDSERLTEDLKRTIGTERDEAREVLKRLEDLNREIRKRSEEVKRELRKVLEDARKRLEEIERELEEMLRRLEREVEKGTSKEKIEELLRRVEELIRRIEEEVRKLLEDVERKIRESVKEAEELLRRSKKEIERVKREDT

SEQ ID NO: 11135 - protein, 182 aa, Artificial Sequence; identical to SEQ ID NO: 11134
  Synthetic

SEQ ID NO: 11136 - protein, 182 aa, Artificial Sequence
  Synthetic
SEAERVIRESERLTDELRKELEKALRRSKKLSDELRKIHEDANREVRKLIEDLKRTIGTESEEARDVLRKLEKELDRLRRESERVEKESEDLNREIKRRLDELLRRSEELNERIRDLLRKGTREEILKKLLDESRDTVRRVEDTVRKLVRRSEEFVRKSKERVKRLLDDVRRKIEDVKRKTK

SEQ ID NO: 11137 - protein, 182 aa, Artificial Sequence; identical to SEQ ID NO: 11136
  Synthetic

SEQ ID NO: 11138 - protein, 178 aa, Artificial Sequence
  Synthetic
DEEERLLREAEEMHERNKRLIDKLRREVEESLKEVEREIRRLLTDIARLVRRVEELKKNNIDRKEVEDLLRRIEEELEKIERELRKILRDDERKLKEAEDRLRRMLEENKRVLRRIKEENKEAEEVLREIRKLVEESRKILEKVIRDWRRITEELKDRLRRVLEELKKLVDELRKTLT

SEQ ID NO: 11139 - protein, 178 aa, Artificial Sequence; identical to SEQ ID NO: 11138
  Synthetic

SEQ ID NO: 11140 - protein, 178 aa, Artificial Sequence
  Synthetic
SDRERLLEEIKDLNRRNKEILERILRRSEELLKKAEDLLDKIKRDSDRAARKVEELKRRNISEELVKELLKELEDINRELKKEIERLLKEWEKDSRELEDEIRRVLEENRKKLRDVKEENKELEEVLRRLEKIVRDSERELRRVREEDKKVADEIREKLKRVHDESERIVRELKETLR

SEQ ID NO: 11141 - protein, 178 aa, Artificial Sequence; identical to SEQ ID NO: 11140
  Synthetic

SEQ ID NO: 11142 - protein, 181 aa, Artificial Sequence
  Synthetic
KELEDVKKRVDDLLRENERVVRELLESSKRLNEENEEAVRRLDESSKELAKRVKEIKDRGTSEDAVRKVDEELKEHLKEVKKRLEDLVRKNEEHLRRVKETSDRMKKKNDEELDRLRTKDGDDRDVRRVLEFVKEVIKEIERIHKKVNDDNRKLIEESIRRLKKVLDDNKRVIDELRKTLK

SEQ ID NO: 11143 - protein, 181 aa, Artificial Sequence; identical to SEQ ID NO: 11142
  Synthetic

SEQ ID NO: 11144 - protein, 179 aa, Artificial Sequence
  Synthetic
DEEEEVKKRVEELLDELRKSIKKSVDDSKRVLDEARKSVERSREELEKLLRALEDILRKGNKTGELLERLKRLLDKLREDADRWRKELEKLVEDLKRHADEWTKELDRLIRELRKRLEAREDDLRRLEEEAKRLVEEVRRRDEEHLKRSEELLKEVEERDRELLKRARDLFEDVRRKIE

SEQ ID NO: 11145 - protein, 179 aa, Artificial Sequence; identical to SEQ ID NO: 11144
  Synthetic

SEQ ID NO: 11146 - protein, 179 aa, Artificial Sequence
  Synthetic
SEKEEVAKRLEEALKRLEDTIRKVSEENERVLRTLEDRARKSAEKVERLLEELRKRLEDSNNQGELLETLERLIERLRRETEDLKRKLKELVTDSRRRTKELEDKLKERAKELRKEIKADKLDLEELKKRVEELTREVEEEIRRLKETSKRLEEEVKRLIEDHDRRVRELKDEVERRIR

SEQ ID NO: 11147 - protein, 179 aa, Artificial Sequence; identical to SEQ ID NO: 11146
  Synthetic

SEQ ID NO: 11148 - protein, 177 aa, Artificial Sequence
  Synthetic
DEAREVIKTLRKLLRDSAEILTRVTEEDREVLRELAEIIKKVTDEDRRVLEEARRELDDERVLDELEKLSRDIEKELEKLLRDLTKRSEDIRRDVERLLTDTERDIRRLIRELERRQGDRILEELLERIKRLHEENKKAVDRWREESKKLKEEVKKKVKEWKDTSEELLRRVKERAR

SEQ ID NO: 11149 - protein, 177 aa, Artificial Sequence; identical to SEQ ID NO: 11148
  Synthetic

SEQ ID NO: 11150 - protein, 177 aa, Artificial Sequence
  Synthetic
KEVEEVIKTLRRLSEKLAREHKKVIDELRDLLRRSEEELKRVAKADEDLLDEIRRKVQDRSVLEELRKKSETMKRELKKLLDDTRKKIEDIERTNERVLREHRKKTEDLIRELDKRRGEEILEEVKERIDRLVKENKEIVDRSRELAKELHDRNREMLTKWLEDSKRLVEEAEKKAR

SEQ ID NO: 11151 - protein, 177 aa, Artificial Sequence; identical to SEQ ID NO: 11150
  Synthetic

SEQ ID NO: 11152 - protein, 177 aa, Artificial Sequence
  Synthetic
DKEKEVTDELRKAKRDNDEVVKEIEKESRRLLEEVKETVKRDKKVLRELEEEVKEAKKKNVSEDLVEKLLRKWEKVSKELKDRHRRLIEEWDKVTKELEKKSRKIIDENRKILKRIADRGVDKKVLDEIRKVLTEAKKMHDDVLRRDREVLETARKLSEDSKKENEDVLRKVAEELR

SEQ ID NO: 11153 - protein, 177 aa, Artificial Sequence; identical to SEQ ID NO: 11152
  Synthetic

SEQ ID NO: 11154 - protein, 176 aa, Artificial Sequence
  Synthetic
DEERDLERKLEEVIRRAKETSERLNRELERVIEEVRRRHEEAKRRAEEVIRRILKRLGTEREEAKDVVRRLEEILRELDDHVRRSEETAKEILDRSRKKSEELERKLREVLRTLREARLDKDEVDELVERLKRDIDRWAEDVKKLIEDLRRMVERNLREIDKLLKDLKRVVDETKK

SEQ ID NO: 11155 - protein, 176 aa, Artificial Sequence; identical to SEQ ID NO: 11154
  Synthetic

SEQ ID NO: 11156 - protein, 179 aa, Artificial Sequence
  Synthetic
SEADKLLDEVRKRVEDMERRLEELVREDRKLVEDHHRDNKRLLDRVKKLAEDMERLIDRGEVDEEVIKRLEEELKKLLEDNKRHLDELKRRSTELLRELRKLLEELEKTLKDLLREKSGRSEKAEDVRRRLKELAERVRRVVRRVEEESKRTLKELEKSSKELAKKLRDLVETVERRLR

SEQ ID NO: 11157 - protein, 179 aa, Artificial Sequence; identical to SEQ ID NO: 11156
  Synthetic

SEQ ID NO: 11158 - protein, 179 aa, Artificial Sequence
  Synthetic
SRVDDLLREAERLAEEHHRLNKKLVDEDRELVRRHHETNRRVLEEVKRLVEEAEKLIRRGDVDERVIRELKERLRDLLRKNREHLRRLEETSKDLLRRNEEHLKRLEETLEDLLKRFSGRSEEAKRVAERVRRLLERLRESSKRVKETSKETLERLRRSSEKVEEDLRKLIEDVERAAR

SEQ ID NO: 11159 - protein, 179 aa, Artificial Sequence; identical to SEQ ID NO: 11158
  Synthetic

SEQ ID NO: 11160 - protein, 179 aa, Artificial Sequence
  Synthetic
RELEELVKRDREEVRKHHELNKELLDRARKLVRDHHERNKRLVREDEELVREAKELIERGEVTEEKIEELMRRSKDLLRDNRRHLRELEDTLRRLLEENKRHLDDVRRRSEELLRDKSGRSDEARKAKRESERTLKELEESSREVEKELRRLLKELRESSKKVEDDSRKSLERVERALR

SEQ ID NO: 11161 - protein, 179 aa, Artificial Sequence; identical to SEQ ID NO: 11160
  Synthetic

SEQ ID NO: 11162 - protein, 179 aa, Artificial Sequence
  Synthetic
SKADELVKKDREKVEEMERRLRKILREVEELVKEHHERNKRVLDEVKKRVDDAKELIKRGEVTEEVIRKLEEELKDLLRRNEKHLRELEETLKKLLEEATRLVKKLEDDSRRLLKDDSGRSRKAEEVEKDSRRTLERVKDVLRKVEETLRELLDRLRESSERVTEALKRLMEEVREALR

SEQ ID NO: 11163 - protein, 179 aa, Artificial Sequence; identical to SEQ ID NO: 11162
  Synthetic

SEQ ID NO: 11164 - protein, 185 aa, Artificial Sequence
  Synthetic
SKLEALVKEVEELVKKAKKDLDRLVEEDKKLAEEHHDRNRKLVDTVRELVERAKEDIDRRGKTEELEELLRRLAEEIERLKRENEKHLRELERTSRELVRRLEELLKRLAERIKKIIDDAERDVSDKKELEEVVKELRRLLKELEEVVRRVARESEKSLEEVRRSSEEVKKALDKLLKELEDAVR

SEQ ID NO: 11165 - protein, 185 aa, Artificial Sequence; identical to SEQ ID NO: 11164
  Synthetic

SEQ ID NO: 11166 - protein, 183 aa, Artificial Sequence
  Synthetic
SELERIVEEVKKLVEDHKKKLKDIVEEVEELVRRHEKKLEDILRRNEKRVRELKEEVRRRGKLEEELVKDAERESRKNKEEIRRSNEEIHRRLKELKERIKESNDKLHEDLKRLTDDIDRRVRDRKKAEEVKRRLEELLKEANKASEEVKRTLDKLLEDVNRESERVERASDELLKRLRDDAR

SEQ ID NO: 11167 - protein, 183 aa, Artificial Sequence; identical to SEQ ID NO: 11166
  Synthetic

SEQ ID NO: 11168 - protein, 183 aa, Artificial Sequence
  Synthetic
SELEELVKTVKKLVEDHKRRLKELLERARRSTEDLKRKLEKLVRDVRKLVEDAKDAIRKSGKADERLLETIKRALEELKRRARDLLRRHKEEIDRLIKDIRRSNEELHRAAERLRDELRKRVRDKDELKKVEDALRRLLEELNEVSEEVERALRELHREVEEAIRRVEKELDRLLKEVEDAAR

SEQ ID NO: 11169 - protein, 183 aa, Artificial Sequence; identical to SEQ ID NO: 11168
  Synthetic

SEQ ID NO: 11170 - protein, 182 aa, Artificial Sequence
  Synthetic
RELEEILKESEKSVEDIKRELEKIKKKSKTDLEKWKDDLRKIRKEIADLVRKVTREVEDGRSDSRLRDLERRLREVVRRIEEELERMIKTHEDRVRELEERLRKIIDDHRRKVEDLLRKIGSEDEKVKRVLDELKRSLEEVRRALEEVREVLRESLKRLRDLAEDLKRELRELLKELEERAR

SEQ ID NO: 11171 - protein, 182 aa, Artificial Sequence; identical to SEQ ID NO: 11170
  Synthetic

SEQ ID NO: 11172 - protein, 177 aa, Artificial Sequence
  Synthetic
SEKEDVERRIRRLIERLRRMIEELRRRNTDILRKVRELVEEVKKADERSIREVEKLLRDVDEELKKRIKTLIDRSREETEEMDRDVEKLIRESEKRTDELEEELRRLARELEKVVTRDVTDLDELIERAERLVREIERKLRKAIEDSKDLLRRIEERLRRLIEKSEKLLRDIKREVD

SEQ ID NO: 11173 - protein, 177 aa, Artificial Sequence; identical to SEQ ID NO: 11172
  Synthetic

SEQ ID NO: 11174 - protein, 182 aa, Artificial Sequence
  Synthetic
SEIEKLVKEIEDHLRRLKEEIEKSSRELKKHLDELERRADKIVRDLRRLVEEIKDTIRREGPRDELLRRLEEALRRIEETLERLRRDHKRLLDRSEDKLRELEEDHDRLLEEVRERLRKSELPREAVERLRKALKESKERLKKALEDNRRTLKKSEEDLKKVMEEVKETLDRVKKEVERALD

SEQ ID NO: 11175 - protein, 182 aa, Artificial Sequence; identical to SEQ ID NO: 11174
  Synthetic

SEQ ID NO: 11176 - protein, 182 aa, Artificial Sequence
  Synthetic
SEIEKLARDAEEHLRRLLEELRKSSDDLRRHLEELKKKLKEIVDRLKELVDRIKDTIRREGDAREIEKALEKVLREVEETLRRLLEDHKRLLEESKKRLKELLKNHEDLLRKLEDDLRKAELDKKVIDDLRRILEESARRLKRAAERNDETLKESADRLRRAIDRLREVAEKLSRDVRRAAK

SEQ ID NO: 11177 - protein, 182 aa, Artificial Sequence; identical to SEQ ID NO: 11176
  Synthetic

SEQ ID NO: 11178 - protein, 182 aa, Artificial Sequence
  Synthetic
SEIEDIARRLREHLEDLKKKIKDSSDELRKHLEEVKRRIERTSEKLTDDVRKIEEKIRKDGPREKIEEDLKEALTRSRTELKKLLDDHRRLLKRSDELLKKLLENHKRTLDRIKEELDRSELPEERIRDLEKILEDSERELRDMARKNRETAERSERELRKVLRENDRTAKKLTDDVRRTAK

SEQ ID NO: 11179 - protein, 182 aa, Artificial Sequence; identical to SEQ ID NO: 11178
  Synthetic

SEQ ID NO: 11180 - protein, 182 aa, Artificial Sequence
  Synthetic
DEIDKLVEDVERHLEKLLREIERSSEELKKHVEDLREKLRDLVRRLKEVVDEIRKTVRDKGPREEILEDLKRILEEIDDTLRKLLANHDELLKRSDDLLRELIADHERLLKRVEEELKRSELPKEDVDRLREMLERSRRRLKRAADENRRTAEKSRKELKEVAERVRRALERMRREVEEELR

SEQ ID NO: 11181 - protein, 182 aa, Artificial Sequence; identical to SEQ ID NO: 11180
  Synthetic

SEQ ID NO: 11182 - protein, 182 aa, Artificial Sequence
  Synthetic
SEIEEIAKKLEEHVKRVVEEIRKSSEEAKRHVEDVKRKIEELVRELARLVKEIKEAIRRDGPRDELEERLKKVLDEVRKRLEELLRNHEELLKRSDDRLKELLKNHEEELRRVEDELRRIELPKERIDELREIAKRSRDKLKKVADENRRTLEKSLRDLARAVEELRRRAKRLEEEVRRERT

SEQ ID NO: 11183 - protein, 182 aa, Artificial Sequence; identical to SEQ ID NO: 11182
  Synthetic

SEQ ID NO: 11184 - protein, 182 aa, Artificial Sequence
  Synthetic
SDIERLVEEVEKHLKELEDEIRKSSEELKRLAEEISRDIRRTSEELKKLIEDIKDTIRRDGTRDEIERRLEEAIRRSRERLERLKERLDRSVKESRKKLKRLEENHRELLKRLEDRLREIELPKEKIDRLRKILEESEKRLEELARENERTVKEVKKEIDDMVRENEETAKRLLDEVRETLR

SEQ ID NO: 11185 - protein, 182 aa, Artificial Sequence; identical to SEQ ID NO: 11184
  Synthetic

SEQ ID NO: 11186 - protein, 172 aa, Artificial Sequence
  Synthetic
DELEKLLEDLRRKIRKIKEDLRKTSKENRDELRKSKKRLEDLVREVRRLVEEIRKLKEQDRREVEKTLRDLRKKIEDAIRESEERSKKLLDDNKKTADDIRRDLKRTEERLRKEGISEEVEKTLRELIKEIEKVLEDDERTVRELIERNKELLDRLAKEVDRLIEEIKREAD

SEQ ID NO: 11187 - protein, 172 aa, Artificial Sequence; identical to SEQ ID NO: 11186
  Synthetic

SEQ ID NO: 11188 - protein, 175 aa, Artificial Sequence
  Synthetic
SEADKVRKELDDVRRRVKKALDDIRRELEKLVKEVEDALRDHERSNEELVREVREKLKDDKDVERTVEKSHRDSRRLVEEIKREVEKLRERLERVLRKIEEDVKRLKEKLERLIEEGNVDDRVVEEIRDMMRKLKRELERIVEEAKKVVEDLKRRLEEVSRRSADLVRRLKERAR

SEQ ID NO: 11189 - protein, 175 aa, Artificial Sequence; identical to SEQ ID NO: 11188
  Synthetic

SEQ ID NO: 11190 - protein, 175 aa, Artificial Sequence
  Synthetic
SDLERVKKDLEDVVRRVEEVLREHKRTNDEIIREIERLIEELRKENERLAREVRDKLKDVDDVRRAVKKSHEDVREVLRRLKEEADESHEKSKEVIKEIEKRVKKLLEDLDRLIKEGRVDERVVDEIRKVVKELEERLRRLSEESRKLVKDIKEKLDKLAEDSRRLVEKLERDAK

SEQ ID NO: 11191 - protein, 175 aa, Artificial Sequence; identical to SEQ ID NO: 11190
  Synthetic

SEQ ID NO: 11192 - protein, 182 aa, Artificial Sequence
  Synthetic
REFEELVERVKRVVEELTRRLRETSEETKTVLEKLRKELEEASRRIEDVLRRLTEKIRKDGRGGELKEEVERELKRLRDESEELVRRVEEVVDRLRRRHEELKKRAEDVLRKLREELKEMRDRGKGTEELEETLERLVEAIRDALRKDEETMRRVAEAIRRLLEDHRRSLEEVLEKIRDALR

SEQ ID NO: 11193 - protein, 182 aa, Artificial Sequence; identical to SEQ ID NO: 11192
  Synthetic

SEQ ID NO: 11194 - protein, 182 aa, Artificial Sequence
  Synthetic
SEAEKIVEDIRRVIRELKEKLKKTSEDTEDTVRKLSRRLRELAKRSAELVERVTREIRKDGPGGELVRKVRELLKKSSKEIEDLVREVEEKVEELKRRHDKVVKEAEEVLRELEKRVDEVRKKGLGTEELEETLRRVAEEIRRLLEEDRETLRRVERKIREMLKELEEINRRLIKEVDEEVK

SEQ ID NO: 11195 - protein, 182 aa, Artificial Sequence; identical to SEQ ID NO: 11194
  Synthetic

SEQ ID NO: 11196 - protein, 182 aa, Artificial Sequence
  Synthetic
DEVEEIVRRIEEVLKDLRRRLETLARESRDLVRKIKEELRRHSDESRRLLERIKERIRRDGSGGELVRDVERLLKESSDTLEELKRRVRELLERSSKKVEDLVREAEKVLKKLEEDVKRMRDKGKGTDELKKEADRVKKEIRDMLRKLKKINDDLIREIEEALKDNERTNREIIRRIEEELR

SEQ ID NO: 11197 - protein, 182 aa, Artificial Sequence; identical to SEQ ID NO: 11196
  Synthetic

SEQ ID NO: 11198 - protein, 182 aa, Artificial Sequence
  Synthetic
DEAEKIVRDIEETVRRLARELEKHSEDSRRLVERIKEELTRHSKKVADVVRELKKRIKRDGSGGELVEDAKRVLRTLEETIEKLKRDVERLVKESSDSIRELEERVRKVLEDLRREVEEARRRGKGTEELEKRMRRLVKEIERMLEENKRTNEELVREIEEALKKNEETLRRLKREIEEALR

SEQ ID NO: 11199 - protein, 182 aa, Artificial Sequence; identical to SEQ ID NO: 11198
  Synthetic

SEQ ID NO: 11200 - protein, 175 aa, Artificial Sequence
  Synthetic
SEAEELVKDAERVVEELERRLRKVSEDIDREVKKIKRELDEHSKRVKETVDDVRRRNLPEEDVRRIVEELKDSLEKLREKLERKREEIRRRSEKLKREADKVLEELKKKLDEIRKKGLGTEELKKRVEDLIRTIKELIKRHDDSVKEVEKRIREMLERNRKSVEEVIEELKRTSK

SEQ ID NO: 11201 - protein, 175 aa, Artificial Sequence; identical to SEQ ID NO: 11200
  Synthetic

SEQ ID NO: 11202 - protein, 182 aa, Artificial Sequence
  Synthetic
SELEELVKEVKELVDRSKEELKKLSEELKKLLDDLIKRIEDLSRRSKRLVEELRRRVEERGRRKDLLRRAREELRKSDEELDEIEKRAEKRVRDSKRRVREIHKESERRLREIRREIEERVRGEEEMKRVEEELKRLREEDREAVERHDESIRKLREDLRRAVETHKKSNRDLLREVEETVR

SEQ ID NO: 11203 - protein, 182 aa, Artificial Sequence; identical to SEQ ID NO: 11202
  Synthetic

SEQ ID NO: 11204 - protein, 179 aa, Artificial Sequence
  Synthetic
DEVEELIRKIEDLLRRIEEKVTKAIRKSERLLEEIKKKIKEMIDKSERLVEEVERRTRNSDKDKEEVVRRLKKEAEDSHRELEDLIRRVEEELRRSHDELRRLVEAVRKEIKDLEREVEESRASEDVKRVLKKVADDVERLLRDLERRNRKVREDVKRVLEELRKSNERSIRRIDETLR

SEQ ID NO: 11205 - protein, 179 aa, Artificial Sequence; identical to SEQ ID NO: 11204
  Synthetic

SEQ ID NO: 11206 - protein, 179 aa, Artificial Sequence
  Synthetic
REIEEIIKRARELLEEVEEEWRRLIEKSRRLLEELKKRWDKLIEKSKDLLRKIEKTTKDSDKDKEEVVRRLEEEAKKSHEEVKKAVDDSRKETKESHEEVKRVIEESKKRTEELKERLERNNIDDELRKILKRVEDENRRLVEEVERSNRRSMEENERLAEEVRRSNKDVIDKIRERLR

SEQ ID NO: 11207 - protein, 179 aa, Artificial Sequence; identical to SEQ ID NO: 11206
  Synthetic

SEQ ID NO: 11208 - protein, 184 aa, Artificial Sequence
  Synthetic
DELERLSESVKKAERRIERLNEELNERVKEVTKAIDDLNKRLNDESKRVKEELRKVLARSDREEVERKLRKLEEELDRENKRLNDESEKLKRELEERNKKVNERSKRLVERLRRVLEEIRRRKVPEEVIKRVLDDVERAVDEVRKLIEDVLKEHEDILREVKKELDKAIERHKEILKRVREDIK

SEQ ID NO: 11209 - protein, 184 aa, Artificial Sequence; identical to SEQ ID NO: 11208
  Synthetic

SEQ ID NO: 11210 - protein, 184 aa, Artificial Sequence
  Synthetic
SVLEDLARKVERVIREAKKVNEELNRRSEEVRRRADEVVADLNRESKKVDDELKKVLARSTREEVARDLERLRRELEELNKRLNDRIEEIKERLERLNERVNRETDELVRELKKRLKEVEDRQVPEEVARRVVEELKKVLKEIEDEIRRVIERHKEALDEVRRLVKELKDRHDKILREVREKIR

SEQ ID NO: 11211 - protein, 184 aa, Artificial Sequence; identical to SEQ ID NO: 11210
  Synthetic

SEQ ID NO: 11212 - protein, 184 aa, Artificial Sequence
  Synthetic
SSEDRLRETVEDVIRRARDANRELNKASRDVEEESKKLNKELNDRSRKVERDLEEVLRRSTDEELARRLEELRKELRKLNEDANRRSKKLIEELREKNKEINKRTDKVVKELKRKLEEVEKRKVPEEVIERLIRDLRRVLEEIKREIEEALRDHERVLKENEDMVREILRRHEEILKRMTDEIR

SEQ ID NO: 11213 - protein, 184 aa, Artificial Sequence; identical to SEQ ID NO: 11212
  Synthetic

SEQ ID NO: 11214 - protein, 184 aa, Artificial Sequence
  Synthetic
SVLERVADELRKVEEAIDRLNKELNDAVERVERESRRVNKELNDASERVERELDEVLKRTRRKEVADRLEKLKEDLRRTNEDVNRRSKELIDRLREENKRVNEESERIKDKIRRDLEDIKRRKVPEEVAKELIDRIRKLLDDIRRKLEEVLKRHEEVLKRNEDTIRKVLKRHEEILEKVKRDIK

SEQ ID NO: 11215 - protein, 184 aa, Artificial Sequence; identical to SEQ ID NO: 11214
  Synthetic

SEQ ID NO: 11216 - protein, 184 aa, Artificial Sequence
  Synthetic
SSKERLREAVERVERESDKVNKELNDKSRRVTEELRKLAEELNRRSKEVEEELDKLLARSTRKEVADRLEDLKRRLRELNKDLNRRLRELEEELRRLNEKLKRESEELKERLRRLLEEVEKRDVPEEVIRRLIEELDRLLEENDRRIKKAIEDHKRILEKAEREVREILRRHEKILEDVREEIR

SEQ ID NO: 11217 - protein, 184 aa, Artificial Sequence; identical to SEQ ID NO: 11216
  Synthetic

SEQ ID NO: 11218 - protein, 171 aa, Artificial Sequence
  Synthetic
DEEEDLRRAIERVIETVRRLVERVEEESKRVADELRKLTKRLEEVVRKVDEDARKEVKKKDLLDKVRKELEEILRDLRRHTEELERESKKSIDELRELLKTLRRELEEIRKRGERVEDVKRRLEELLKRAKEVLDELIKRHRDLLRRHEEKVRRLIKRIEDLLRELSKKAK

SEQ ID NO: 11219 - protein, 171 aa, Artificial Sequence; identical to SEQ ID NO: 11218
  Synthetic

SEQ ID NO: 11220 - protein, 171 aa, Artificial Sequence
  Synthetic
SKEEELEKIVRKIREDLRRAVKEVEDESKRVLESTKKALDTIRRVSEKVIEDLRRELRDEEVLKDLERRSKETIKKLEEHVKRSEEESRDSIRELRRLLEELERRLEDLKRRGEPVDELVRRLEELLKELRKRLEDLIRRHEDINRRNHELIRRAIEEHRRLLREAREREK

SEQ ID NO: 11221 - protein, 171 aa, Artificial Sequence; identical to SEQ ID NO: 11220
  Synthetic

SEQ ID NO: 11222 - protein, 179 aa, Artificial Sequence
  Synthetic
DEIEELIKKLREDLDRSRREVEKNSEDLKELIKRSEERIEKLIEDLERMVDDARRKNSKDSTLKETIKKLAEELRRELKKLHEDTKRKLDESRERTERIHKRTEEILRDLRDKLKRIDVDEKLLKKLEDVIDDVRRRDEDVVRKNEESLKRIEKRDEELIRKIEEVIRRAERKVDEVMR

SEQ ID NO: 11223 - protein, 179 aa, Artificial Sequence; identical to SEQ ID NO: 11222
  Synthetic

SEQ ID NO: 11224 - protein, 179 aa, Artificial Sequence
  Synthetic
SKIEELIKELEKLSRTNEELVKRVLEELTRLVEESAKRIEDIIRRLKEVVDKARRENSRDERLLREVEKELRRVEEELEELHRRTKKKLDDVRKEAEDSLRKSKDDMRKVEEELRRTDVDKKLLDKIKKAIEDLERENERALKELEKRLRELLRTDRELIRKIEEEIKKLRREVEEVLR

SEQ ID NO: 11225 - protein, 179 aa, Artificial Sequence; identical to SEQ ID NO: 11224
  Synthetic

SEQ ID NO: 11226 - protein, 184 aa, Artificial Sequence
  Synthetic
SIKERLTEVLKRLAEEIRKVIEENKRTVDRAREEVERVIRKNREVLKRIKERADEVIKRISDERLVREIEDRLEKLKKTSEDLVRDVERIVEEMERSSRELEKDIRRILDELAKKVEKVKKDGSDERVVEELIREAKKIVEDIVRRVKRHSREVERIVEEIRRRAEEHIERLKRSLEEVEKKVD

SEQ ID NO: 11227 - protein, 184 aa, Artificial Sequence; identical to SEQ ID NO: 11226
  Synthetic

SEQ ID NO: 11228 - protein, 184 aa, Artificial Sequence
  Synthetic
RIMEKLEEVLKELRKKIKKLNKDNEETVRRIKKEVDKVIKKNRDVNERIRKRLEEVISRISDERLVRDIERLARENSRTSEELEREVRKIVREAEESSKRLIEKNEDLLRRLTEEVKRVKDRGESEEVVEKLIEDMERVVAESAKENKKHSDDVKRILDEIRRKAEDHIRKTEELLRRIEERTR

SEQ ID NO: 11229 - protein, 184 aa, Artificial Sequence; identical to SEQ ID NO: 11228
  Synthetic

SEQ ID NO: 11230 - protein, 184 aa, Artificial Sequence
  Synthetic
SIKEKLTEELERLAKRIREANEDNKRTVEEVEKRIREVIKKNRDSNKEIKDDVERVLSRIDDEEVVRKIKELVERNSETSERLRRKVEEELKRLRESSRKLIEDNKKLLEDLRREVEEAKRRGEDEEVVERLLKKMREAVKKSEDENREHSERVKRIIEKIAREAEEHSKRTKELLDRIREEVR

SEQ ID NO: 11231 - protein, 184 aa, Artificial Sequence; identical to SEQ ID NO: 11230
  Synthetic

SEQ ID NO: 11232 - protein, 184 aa, Artificial Sequence
  Synthetic
RVDEDLKRVLDELKKRVEDLNEENKKTVEDISRRVREVIKRNEDMLREVKKRAREAISRISDERLVRRIEELLKRLEETSRKLARDVEEIVKDIERSSEELIRDNERLVRELAREVEEVSRRGESEEVVRELIKKMRDVVRKSEKDNKDHSERVKRILKRIEERAREHTRRLEEVLRKVEEDVR

SEQ ID NO: 11233 - protein, 184 aa, Artificial Sequence; identical to SEQ ID NO: 11232
  Synthetic

SEQ ID NO: 11234 - protein, 183 aa, Artificial Sequence
  Synthetic
RVKEKLREVLERLEREIRKILKDNKETVKRIEEEARRAVEKNKEALKRLEDRVRELLEDKDQEDRKKVKDVVDELRKSSKKLTDKIRKILEDIKKTSEDLERRVKEVLDKLREDVKRIEEKPVDEEKVERLAEELRKIVRKIIEDVRKHSEDVRKILEDVKKEVDDHVREMEEIVKRLEDEIR

SEQ ID NO: 11235 - protein, 183 aa, Artificial Sequence; identical to SEQ ID NO: 11234
  Synthetic

SEQ ID NO: 11236 - protein, 180 aa, Artificial Sequence
  Synthetic
SELEEIVKEIKRILDEHEKKVRRNSEEMKRIVDRHAERVEKLIREIEELLRRLDELVKRGEVDEETAERIKDRIRKLLEEAKKHSKRIKDELDRSNKELDDHSEKVKREIDKLVKDVRRKGVEGEEDLERMAREIKDRLDKIDEENKKSSEELKRELDRLDEKLRDVARRIMEAIDERTR

SEQ ID NO: 11237 - protein, 180 aa, Artificial Sequence; identical to SEQ ID NO: 11236
  Synthetic

SEQ ID NO: 11238 - protein, 180 aa, Artificial Sequence
  Synthetic
DELREIVRRIEKILEDHARTIEEVIERIRDILRKHEKLVEEVLRRIEKLLKELEEMVRRGELDEETVRRVEREIEDLLRRAKEHSEEVKKRIEELLERLRRHSRDVERAIDELVKKVRERGVEGTEDLERMAERVKRELERLNKKAEDALREVKRALDDLDRDLKRVLEEIKERIRRATT

SEQ ID NO: 11239 - protein, 180 aa, Artificial Sequence; identical to SEQ ID NO: 11238
  Synthetic

SEQ ID NO: 11240 - protein, 180 aa, Artificial Sequence
  Synthetic
SELERILTEIEKRIEEHERRIKENSKRMKEIVDDHERKVEEVLRRIRKLLRDLEEMVKRGELDEDTAEKVKRDIDKLLEEARRHSERVKRELDKSNEDLRRHSKKVIDDIRRLVEEVRRRGVERREDLEKVARDVEKRLEDANRENEKSSRELKRRLDELDKKLEEEARRIKKAIDDKTR

SEQ ID NO: 11241 - protein, 180 aa, Artificial Sequence; identical to SEQ ID NO: 11240
  Synthetic

SEQ ID NO: 11242 - protein, 180 aa, Artificial Sequence
  Synthetic
SEVDEVAKEIRRILEEHEEEIRRNSEEAKRILDEHREKLKRNSDDMRRIVKEIEDMRRRGELDEETAKKIKEELERSNRKLEKHSEDVIRRLRKSNTDLKRHSEEVKKEIEKLVKRLEDKGVEREEDLREVAERVKKDLDRLNRENDESSKEIEKDLKRLDDRNRDVSEKLKKEIDELTK

SEQ ID NO: 11243 - protein, 180 aa, Artificial Sequence; identical to SEQ ID NO: 11242
  Synthetic

SEQ ID NO: 11244 - protein, 180 aa, Artificial Sequence
  Synthetic
DRLREIVKRIRDILKEHEDRIRENSKRARDILREHKRKIEEVLRRIEKLVEDLERLKRRGELDEETAKKVKEDIRRLVRTVEEHSRRVIEELDRSNDELRKHSEDVKREIEKLVEDVEREGVEGEEDLRRAAEEVKKKLDELNEENERSSEDVKRTLKKLNDELREKVRRVMERIDEAVR

SEQ ID NO: 11245 - protein, 180 aa, Artificial Sequence; identical to SEQ ID NO: 11244
  Synthetic

SEQ ID NO: 11246 - protein, 180 aa, Artificial Sequence
  Synthetic
DEVEDVLRKIEKILDDHRKRIEKNSRDMARIIDEHRRKVEENSREMKKLVDDLKKAVDRGEADEETAEDVKRKLEKSNRELEKHSEEVKRRLDESNEDLRRHSEEVKERIERLVKKLREDGVEREEELKEVADRVKEKLDRLNRENEKSSEELKRELDKINDENRETSERLKREIDETTR

SEQ ID NO: 11247 - protein, 180 aa, Artificial Sequence; identical to SEQ ID NO: 11246
  Synthetic

SEQ ID NO: 11248 - protein, 180 aa, Artificial Sequence
  Synthetic
DELREVVKTIEEILRDHERKVRDNSRRMKEIIKRVKEELERVIKEAKELVERLKEAVRRGEVDEDTARKIKKELRDLLRELKKRLEEIKKRLDESNDRLRRHSEEVKERIDRLVDKVRRDGVEREEDLRKMAEDVKRALDKINRDNEESSRRLKKELDDVLRKVEEVIRRLEEEIDRLTT

SEQ ID NO: 11249 - protein, 180 aa, Artificial Sequence; identical to SEQ ID NO: 11248
  Synthetic

SEQ ID NO: 11250 - protein, 180 aa, Artificial Sequence
  Synthetic
SELEKIEEDIRRILKEHKDTVRKNSEDIDRSVKEVKERIDKILKEIDDLLKELRELVERGELDERTVEEVKRRIEELLREVEKLSEKHKRDLDRSNDELRKHSEEVKKEIDDLLEEVERRGVEKREDLERVVREVKKELDDINRENRKSSEEAKKKNDDVLAELEKRIREIKRRIDEDAT

SEQ ID NO: 11251 - protein, 180 aa, Artificial Sequence; identical to SEQ ID NO: 11250
  Synthetic

SEQ ID NO: 11252 - protein, 180 aa, Artificial Sequence
  Synthetic
SDLEKLVEEIKRLLKELKERVTKNSEDMKREVERHKELVKKLKKRIEDLLRELEDAVRKGELDEKKVKELKDEIRKLVKELRDHSREVKKRLDDSNRKVEEEVRKLKEDIDKLVKEVRDKGVEKREDLERVVEEVKKEIDKIVEENRDSSRKLKERLDEANEELERRVEEIERRIDEKAR

SEQ ID NO: 11253 - protein, 180 aa, Artificial Sequence; identical to SEQ ID NO: 11252
  Synthetic

SEQ ID NO: 11254 - protein, 180 aa, Artificial Sequence
  Synthetic
DELREIVTRADETLKRVADKIEENSRRMEEIVREHERKVRELLKRIEKLVRDLSAMVRRGELDEESLKRLKDEIEKLLEEAERHSRDVKRKLDESNKRLEDDSRRHEEDLDRLVTEVEKRGVEGEEDLRRVVKRVKETNRRLLEKNKDSSRKLKKRLDEANKTLADALEEVKRRIDERRK

SEQ ID NO: 11255 - protein, 180 aa, Artificial Sequence; identical to SEQ ID NO: 11254
  Synthetic

SEQ ID NO: 11256 - protein, 180 aa, Artificial Sequence
  Synthetic
DELDEIVKRAKETVEKVKREVDANSKDIERILREHRKKVDKNSKDMEDLVRKLEELVRRGELDEETAKDVKRRLDESNDRVRRHSDEVKKKLDKSNEELRRKSDEHKKDLDRLLDEVRRRGVEREDELREAVERLERENRKVLEENRRSSEKVKRDLDRVNRENEEVSERLKKRIDEAAT

SEQ ID NO: 11257 - protein, 180 aa, Artificial Sequence; identical to SEQ ID NO: 11256
  Synthetic

SEQ ID NO: 11258 - protein, 174 aa, Artificial Sequence
  Synthetic
SEIEKIIKELDDLVKEDEDTIRRLEEELRELLKEIDREAKKSDEELEKTLEELAKIARDGKLDEELLERVERTLEKSERRMRRLKEELKRELDRIREDLERSKRDLDRKIKKLLDEIDDEELRRVLERVAEDSKRTLDRLERVLKEVERRVDEALKRNKTVLDKVREDVKRLKD

SEQ ID NO: 11259 - protein, 174 aa, Artificial Sequence; identical to SEQ ID NO: 11258
  Synthetic

SEQ ID NO: 11260 - protein, 180 aa, Artificial Sequence
  Synthetic
REIEEMIKRNEKLLEDDKRKVKRIIEKLDKVLEDDRKRAEDLIRKLEKVAEEIARLRDKVEERDVARKIKELKDEVEKLVRESKKLNEELREEVRRMKEESKELIKESHKEVRDVERKLKVEELLDTLRKVNERVARESEKTIRELEKVLERVNRESKKTIEEVEKALKEVADRVTEVRR

SEQ ID NO: 11261 - protein, 180 aa, Artificial Sequence; identical to SEQ ID NO: 11260
  Synthetic

SEQ ID NO: 11262 - protein, 180 aa, Artificial Sequence
  Synthetic
SEIEKLIKENKDLLEEDKRRVEEVIEKLERVIEEDKRRVDEAIKRLDDVAREIERLRKDSDDKDVERDIRRLEKEVREVVEKSKDLIRRLKEEVERVERTSRELIKESHKKVREAKERLKDEDLLRRLERVNEEVARRSEDTIRRLREVLKKIEDDSRRTIDELREVLKRVKTRVTEVRR

SEQ ID NO: 11263 - protein, 180 aa, Artificial Sequence; identical to SEQ ID NO: 11262
  Synthetic

SEQ ID NO: 11264 - protein, 180 aa, Artificial Sequence
  Synthetic
DDIERLIKRNKDLLDRIREEARKLIERLKKVLEDDRRKVERAIERLEEVVDEVRKLKKDTDDKDVERLLERLKEEVKKIEEESKKLIDDLRKEVEDLVKRIEESIKTSHDEVREVERRLRNEEVLRKLKKANEDVEREVRKMIEEVRRVLRKVEEDSKRTIKKLKDVLKKVAEEMEKVRR

SEQ ID NO: 11265 - protein, 180 aa, Artificial Sequence; identical to SEQ ID NO: 11264
  Synthetic

SEQ ID NO: 11266 - protein, 180 aa, Artificial Sequence
  Synthetic
DEVEEAIKELEDALRKDREAVERMIRDLERLADEDRREVEDHVKKIEELIAAVERMSRDVDEKDLRRTLKELEDSSRELVERSKDINRRLTEKVKELLERSKELNERLKRKIEDIERKLDKREVLEKLKEVLKRVEKASRKTNEDVKRVLDEVRRISEETNRRNERVVEEAKERVERVAK

SEQ ID NO: 11267 - protein, 180 aa, Artificial Sequence; identical to SEQ ID NO: 11266
  Synthetic

SEQ ID NO: 11268 - protein, 179 aa, Artificial Sequence
  Synthetic
SEVDEVIKRLEELVERHRRKVEEVIRRLEKLAEDHERKVRELEKRLRELIKRIEELARRDGPREEKVRDVRRKLRTLLKELRDTTEELKKTIRELEKELNETTKKIVDEIRRLRERVNVTSRDFDRLEDVARRVKEDLERTDEEVRRVAEEVRKRVEKTTRDVERVVREVERAIEERRR

SEQ ID NO: 11269 - protein, 179 aa, Artificial Sequence; identical to SEQ ID NO: 11268
  Synthetic

SEQ ID NO: 11270 - protein, 179 aa, Artificial Sequence
  Synthetic
DEAREVIKTLEKLLEEHERRVREVIKRLEELIKRHEDRVREVIETLKRLLEEAEKIVRRDGPSDKTVKKLRDDLEEIRKELNKTTKTIKEDLDRTIKELDEITEDIKRKLDDLRRRINVTSEDMRRLEEVIRKVKEALKRTNDRLREVVDEVKKRLDKTDEDATRVVEEVKKRIDEAAK

SEQ ID NO: 11271 - protein, 179 aa, Artificial Sequence; identical to SEQ ID NO: 11270
  Synthetic

SEQ ID NO: 11272 - protein, 179 aa, Artificial Sequence
  Synthetic
DEVETVIRRLEELIREHKEKVDRIIKELEKLLRKHEEKVKKVIEELRRLAKEAADIVRRDGPSEEVVDRLRRRLEEILKDLERHSEDVKRRLREVLKELNDETKRLKDDLRRTRKDANVRSRDMERLERVIRKVEEDLDRTNREVEEVIRRVEEEVERLDREAEEVVRDVKEKIDRLKK

SEQ ID NO: 11273 - protein, 179 aa, Artificial Sequence; identical to SEQ ID NO: 11272
  Synthetic

SEQ ID NO: 11274 - protein, 179 aa, Artificial Sequence
  Synthetic
SEAEKVIKELRDIVKRNDEVVKEIIRRLEELVKEHKRLVEEIIKRLRELLKRIEEVVRRDGPSEDKVEKVERDIERLLEELERHSRRVEEELKRLLEELEKHARESKREIKEREDKINVTSEDLKRLKDVLDEVIKKTDELLREVERKAREVTKRLRDLDRRVKEVADEVRRRIREATK

SEQ ID NO: 11275 - protein, 179 aa, Artificial Sequence; identical to SEQ ID NO: 11274
  Synthetic

SEQ ID NO: 11276 - protein, 180 aa, Artificial Sequence
  Synthetic
EEEERVKEFLDRVDTEDKKLVEELRKVVERVKRENEKLIKESEDMSKKVEDDARRLIAELRREVDETVMREIEEEVRRLKEKNERLIEKSRRDSRRLEEEVRKVIDKSRKDITKIKREVEEEPADKEVVRKLEEYLRRSRKLVDELKKKLRELLERSREKVERSKEELKRILEEVRKKAK

SEQ ID NO: 11277 - protein, 180 aa, Artificial Sequence; identical to SEQ ID NO: 11276
  Synthetic

SEQ ID NO: 11278 - protein, 185 aa, Artificial Sequence
  Synthetic
SVSERLRRVLERVAREVKRLIDEDRKVNEEAEREVRKLIKKDEDALKRVAEEVERLIREASDDDKLIREIEEILKKLAEDSRKVVEESKKVLDDINKESEDVVKESEDTLRRAAEELKEVERRGESEEIIEELIRRLEEIVKRLEEKHRTTVKKIEDIIRELKKTHDKTIEDLRRIIEEIEERVR

SEQ ID NO: 11279 - protein, 185 aa, Artificial Sequence; identical to SEQ ID NO: 11278
  Synthetic

SEQ ID NO: 11280 - protein, 181 aa, Artificial Sequence
  Synthetic
RVREELRKVLKRAAEAVERVLRKNEEVLRRAEERIRRLLEENEKSLEKVERDVTRILEGGIDSREVTELLRRLRKSSDDLKRRLRKVLEDIERSSRDLVRRVRKLLEELERRVREIEKKPVDEEKVKKLIREIEEVIDRLRRESEKHIEEIKEIITRLDKEVKDHDERLKREVDKLEERAR

SEQ ID NO: 11281 - protein, 181 aa, Artificial Sequence; identical to SEQ ID NO: 11280
  Synthetic

SEQ ID NO: 11282 - protein, 181 aa, Artificial Sequence
  Synthetic
SVEERLRKVLEEVRRLLEKIIKDNREVLKRAEEKVRELIKRDKDVLDRIAEEVERLKEKGIDKKKVDDLLEDLRRESKEVIEETEDVLRRIKDSSEKLVRELEKLLEDIERKVRDLERKPVDEEKVDRLIEELKKLIDDAREKNERHIEEIERIIDDLRRKHEETARRLKEAIDRLREEAQ

SEQ ID NO: 11283 - protein, 181 aa, Artificial Sequence; identical to SEQ ID NO: 11282
  Synthetic

SEQ ID NO: 11284 - protein, 181 aa, Artificial Sequence
  Synthetic
DKEERIERVLKRVEEELKKLKERIEEVLKKVEDMVRKNLEEIRKVSEDHERTVREIRKRGDITDELVDKLREENERVEEAVRRSVEEAKRELEKVETDVKRLEEEVKRTLDEVRKRVKDTGDEKVVEEIIKELERLLEDLKRRADELIKRLEKLVEEHHRKVEELVRRLEESLDKVRRDAK

SEQ ID NO: 11285 - protein, 181 aa, Artificial Sequence; identical to SEQ ID NO: 11284
  Synthetic

SEQ ID NO: 11286 - protein, 177 aa, Artificial Sequence
  Synthetic
SEDEKVKRVVEKVKEESDRLNEELKRVVDEVRKELERLIEKIKRSVERMDRTVRELLKRISDRKTLEEIREEVERAKRRNEEVIERMRRTLEKLERDVRDVLRRDRETLERLRKEVERDGADDRVVEKLKKALDESRKTHKKLIDDLRRALEELEKRVEDLNRENERLLDEIKKRVD

SEQ ID NO: 11287 - protein, 177 aa, Artificial Sequence; identical to SEQ ID NO: 11286
  Synthetic

SEQ ID NO: 11288 - protein, 181 aa, Artificial Sequence
  Synthetic
DVERKIEEVVRDVKRELDRLLEENRRSVERVERALDKLLEDSRRVVEEVKKALDDLRRRGLDERTIRELKKEIEELHKRNEKLVRELKKEIRDLLRENEERIRKLKREIDKILEELKRDKVPETDVKKIIEDLRRLVREVEEHSRRTNRRLEELVKDLARHAKRSIDRLKELVDRARERAR

SEQ ID NO: 11289 - protein, 181 aa, Artificial Sequence; identical to SEQ ID NO: 11288
  Synthetic

SEQ ID NO: 11290 - protein, 181 aa, Artificial Sequence
  Synthetic
DVEKDIERVVEDVKRELRRLLKEDRDVSKKVKDDLDKLLKESEEVVRRVKKELDRLREEGLDEKKIRELKKEIDELHKENEDLVRDLKRKIDRLNEENEEVVKRLEDEIKKLLDEARRDRIPKSAVDEIIRRLKELVKEMKRHVDKSIKDLEELVRRLEEHIRRSIERLKKLVEEAREDAR

SEQ ID NO: 11291 - protein, 181 aa, Artificial Sequence; identical to SEQ ID NO: 11290
  Synthetic

SEQ ID NO: 11292 - protein, 181 aa, Artificial Sequence
  Synthetic
SVEEEVDKVVKKLEEDLDRLLEESKEVVERVEKALDDLLKRDEDVSEEVRRELERLKEEGLDDKKVRDLEKEIEDLNRENKELLERLKRRIRKLHEDNERMLRELKKEVRKRLEDVRRRRIPESMVKKLLDELRKLVEDAREHVERSIRELEKLVKEADDHVRKSIEDLKRLVEEVRETAR

SEQ ID NO: 11293 - protein, 181 aa, Artificial Sequence; identical to SEQ ID NO: 11292
  Synthetic

SEQ ID NO: 11294 - protein, 181 aa, Artificial Sequence
  Synthetic
DVEKEIKDVVDKAKRELDRLLREDREVSREVKEALDKLLEDNRRSVERVERELDDLRRRGLDEDEIRKLKDRIKKLLDENKKRVEDLKREIDRLNKENEDELRRLKRELDKILREVERDKIPESVVKEILKRLEKLVEDAKRHVEDSIRKLKKLVDDMRKHSERSNRDLERLVREAREKAR

SEQ ID NO: 11295 - protein, 181 aa, Artificial Sequence; identical to SEQ ID NO: 11294
  Synthetic

SEQ ID NO: 11296 - protein, 181 aa, Artificial Sequence
  Synthetic
SVEEEIRKVVEEVKRELDRLLEKNDRSVKEAKKELDRLLEENRRAVEEVKKALDELEKNGLDKDRVRKLKEDIDARLEENERLVRKLKRDLDERLRENEKRLRELKKEVDDLLRRLATEKVPESEAKRLIDRLRELVKRVAEHSERSDRELKKLVDDLREHSKRSNDDLRRLVEEAEREVR

SEQ ID NO: 11297 - protein, 181 aa, Artificial Sequence; identical to SEQ ID NO: 11296
  Synthetic

SEQ ID NO: 11298 - protein, 181 aa, Artificial Sequence
  Synthetic
SVEDKVREAVRRAKEALKKLVEDDRRVVKEVEEMLDTLLDKNRDSVRRAKEKLEDLKRKGLDDDTVRKLLEDLKRLLDRNEEEVRRLKEEIRRENKKNEEVVERLEREVKKLLDELERDKVPESDAERLIETLERLVKELEDHVRRSIRKLRELVEEMRDHSRRSDEELKKRLKEVEDRVR

SEQ ID NO: 11299 - protein, 181 aa, Artificial Sequence; identical to SEQ ID NO: 11298
  Synthetic

SEQ ID NO: 11300 - protein, 181 aa, Artificial Sequence
  Synthetic
DVEEEIKRVVKKVEEELDKLLEDDERVVREVEEMLDRLLKKNEKVVRDAKRKLDDLRRKGLDEKRIRDLKRELDELLKENERRIRELKKRIRKLHEETRRRLEELKKEARDRLKEVEDRKIPKDVVDKIIETLRRLVKEVAKEVKRSIDELKKTVEEVRKHSEETDRRIEKLAKEAEEEVR

SEQ ID NO: 11301 - protein, 181 aa, Artificial Sequence; identical to SEQ ID NO: 11300
  Synthetic

SEQ ID NO: 11302 - protein, 181 aa, Artificial Sequence
  Synthetic
SVEEKIREVVERVRRMLEKLLEDNDRSVKEASKALDDLLRESRRVVEEVKKALDDLRRKGLDDRTVEKLKTEIRKILKDNEDLVRELKKELKRLLEENEKEVRRLEDEIRRIMEEAERRKIPESEVRRIIRELEELVKRATDHVRRSDKRLRELVDELRKHIRKSIEDLKRLVDEARRRKD

SEQ ID NO: 11303 - protein, 181 aa, Artificial Sequence; identical to SEQ ID NO: 11302
  Synthetic

SEQ ID NO: 11304 - protein, 182 aa, Artificial Sequence
  Synthetic
DEVEEIRKELEKLLEEVRRKLEKIIKDIRDLLREDKRKSERIDRELEKLLRRLEEIVRDRGPDERVLRDLEEKIKELLDDSRRHADESEKRLRKLLEDARRTLERAKKDIDKLEEEVRRRGLPEEMLREVKRVLEEVRRDIERLLEEIRKVVEEWRKRLEDLKKKNEDSAREVKRRIDELRK

SEQ ID NO: 11305 - protein, 182 aa, Artificial Sequence; identical to SEQ ID NO: 11304
  Synthetic

SEQ ID NO: 11306 - protein, 182 aa, Artificial Sequence
  Synthetic
SEVEDIIRRLRELLERHREVSKRINDELRKLLREVEEDSRRLDKEIEDLLRRIREKVTRDGPDDDTLRRVKETLEKLLRESERTIREVKRRIEELLKRSREHSKRVKEEIDKLREEVDRRGLPEDARRRVERVLREVEDTLRKLDKENEDSARRVKEALDRLLKKNEESIRRAEREIDELRR

SEQ ID NO: 11307 - protein, 182 aa, Artificial Sequence; identical to SEQ ID NO: 11306
  Synthetic

SEQ ID NO: 11308 - protein, 182 aa, Artificial Sequence
  Synthetic
DDVEELKKEIKKLLDDHKKLSKELNEDIERLLREHRKLSEEIDRRLEKLLKELEELVRREGPVEESLRKAKEDIDRLLEESKRHSEDLRRRLKELLDRSKKHSEEVKERLERLLREVERKGLPKELLDEVERVVREAKKTLDRVDEENKKSIEDAERELERMDRKNEKSVEDVRRTAKELLR

SEQ ID NO: 11309 - protein, 182 aa, Artificial Sequence; identical to SEQ ID NO: 11308
  Synthetic

SEQ ID NO: 11310 - protein, 182 aa, Artificial Sequence
  Synthetic
SEAEEIIRRLEELLKKLKKDSDRLDEEIKRLLDENRRNSKDINRRLKKLLDDLRRLVRERGPRRELIKELREKLKKLEDDSRKDIKRVEDELRRLEEESEELIRELKRRLETLKEDVERRGLPEDVLRRVEEALRRAEEDLKRLKEKNDRSLKEWRDTIRELKRENEESLRRVKEEADRLSK

SEQ ID NO: 11311 - protein, 182 aa, Artificial Sequence; identical to SEQ ID NO: 11310
  Synthetic

SEQ ID NO: 11312 - protein, 182 aa, Artificial Sequence
  Synthetic
SDVERIIEELERLLEDLERRSKRIDEELKRAADRNRRNVEEIIRRLEDLLRRLEELVRRDGPAREVIRELEEALKRLEKRVDEDVRDVERKATDLARRSDDLARKADKRIKEIEKEVDEAGLDKDVLREVRRVAEKVRRSIKELKERNEKSLRDWKREVDKLLKDIKKVLDEVRKAADDLRK

SEQ ID NO: 11313 - protein, 182 aa, Artificial Sequence; identical to SEQ ID NO: 11312
  Synthetic

SEQ ID NO: 11314 - protein, 182 aa, Artificial Sequence
  Synthetic
REVDEIRRRLEKEVERNRRNSKRIDDELKEMADRNRENVKRSIEEIKELLKRLKELVDRDGPDERVIRELEERLRRLDRRLEEDAKRAEEVIDRLRRRSEKDVRDVKEKIKDDEDRVRKRGLPEDVRREVERVLKEWEDDVRRLLRKNEDSLREWREKLKKLVREHREVTKKAEEVLRELLR

SEQ ID NO: 11315 - protein, 182 aa, Artificial Sequence; identical to SEQ ID NO: 11314
  Synthetic

SEQ ID NO: 11316 - protein, 182 aa, Artificial Sequence
  Synthetic
KDAEDIIRKLDELLDELAKAAREIIERLRDAARENEENSREINRRLEELLKRLEDAVRRDGPRDEVIKRLEEELKKIKEESERDVRRVEDAAEKLARTVEKLIEDLRRRLKKLDEDVERRGLPEDVKRKVEEVARRVRKAIDDLLRDIKRVLDDWKRKVDKLLEDNRKSLEDVKREAERLRK

SEQ ID NO: 11317 - protein, 182 aa, Artificial Sequence; identical to SEQ ID NO: 11316
  Synthetic

SEQ ID NO: 11318 - protein, 183 aa, Artificial Sequence
  Synthetic
SEVERLIKELEDVSRDIKREVTELKRDLKRLAEESKRLVEELEETIRKIVKDIEDTKRRGDDEKTLTELRRKVEEVVRRIEDRVKKSHEKVREVIERIRRRVEELEKRSREKLEEIRKEVKNGDKELVDRVEEALRDHERTLRKVVKEVDKALKDLERDNTELVKRVKKVLDELRRDVEEKAK

SEQ ID NO: 11319 - protein, 183 aa, Artificial Sequence; identical to SEQ ID NO: 11318
  Synthetic

SEQ ID NO: 11320 - protein, 186 aa, Artificial Sequence
  Synthetic
DMERKLDTVLEEVRRVVTRAKEANDRVLKDAKRVVEELSDRNRRVLEDAKRVVDELKEKRKDVDELLRRIEETVKELERTARELNKRIEDSLREIAKKHEDLKRRLEEIVKRLAEEIERLKRDLREEDEVVDKLLKKLKETLRRMEKESEELLRETEKILRELEKEVEDHLRTVEKTLEDLRREVE

SEQ ID NO: 11321 - protein, 186 aa, Artificial Sequence; identical to SEQ ID NO: 11320
  Synthetic

SEQ ID NO: 11322 - protein, 178 aa, Artificial Sequence
  Synthetic
SEVDKILEDSKRKLEEVEEMVRRLLKKSRDLLEKLERDVERLIRDSERRLEEVARAKRPDELLDKVLKEDKEKVDDLRRKLEEVYRDNEREIRRAEKELEKLLRDDERDLREAERRVKDKDLRRKLKEVHDRSRRVIEKLREELEKVHDEARKVVEKITEKIERAHDKSRRLLEEIKR

SEQ ID NO: 11323 - protein, 178 aa, Artificial Sequence; identical to SEQ ID NO: 11322
  Synthetic

SEQ ID NO: 11324 - protein, 178 aa, Artificial Sequence
  Synthetic
SEVDEFVKRSEDLLKKLEEDVRRIVRESERLLEEVERRVRKILRDLEKKLEDAERERREDRDLDRMLREVEEEIRKIEKELDDLLREDKRKLDDAVRKLEEVYRRNEEELRKIEKKVKDKELRDKLEEAHRKVKEKVERLMEDLKRAHDESEKKIRDLKRKLREVLERLRKRVEEIKK

SEQ ID NO: 11325 - protein, 178 aa, Artificial Sequence; identical to SEQ ID NO: 11324
  Synthetic

SEQ ID NO: 11326 - protein, 181 aa, Artificial Sequence
  Synthetic
DLEKRLEEAIRENRDTIRRLAKELERVIEDNKRRLEELKKEIKKVIEELERELRRVRKDGRVKERIEEKVEKMVRDVERTLAELEKRSRELVREIEEIIKRLKDSSEKLVREVEKVVEDGTTREIVDELVRRLKKHSDEARKTVEDLRRKSKKSLREAEETVKRLVEEIERLLEEIKETMR

SEQ ID NO: 11327 - protein, 181 aa, Artificial Sequence; identical to SEQ ID NO: 11326
  Synthetic

SEQ ID NO: 11328 - protein, 183 aa, Artificial Sequence
  Synthetic
SEVDELVKKIEDSERRIEEKVKRIEDELKESEERIRTKVRELHKENEKLLEEIRRKKKDSDKDKKKVIEEVRRRVEEVRKKNERVLKEMDKHSKEVVKKLREMLDRLRDHSRRLKEEIERLDNKDELRKTLKDALKRHEEVLKRVEERIRRVLKRHEEVLREAEERIRRSLEKLKRDADRVAK

SEQ ID NO: 11329 - protein, 183 aa, Artificial Sequence; identical to SEQ ID NO: 11328
  Synthetic

SEQ ID NO: 11330 - protein, 183 aa, Artificial Sequence
  Synthetic
DEVEELVKELRDSLKRIREVAKELHDRNKELLDRIKRLVDELLKEIEKVLKEIEETKKDSDKDKDKVSKEVRERVKEIVKRVRDALRELEKRVRDVIEENKDMLKKLEDHSRRLKEKVDRTDDKEEVRRKLEEAVREHERELERMAREIRKSLEDLKRVLEEVAERIKEVLRRLEKRVKEVED

SEQ ID NO: 11331 - protein, 183 aa, Artificial Sequence; identical to SEQ ID NO: 11330
  Synthetic

SEQ ID NO: 11332 - protein, 183 aa, Artificial Sequence
  Synthetic
DEVEELVERLRRSLEKIRDRVRRLLERIKRLAEKIKRDIERLHKKNEDLAREMRKSERKSDKDRKEVLDRLRRRVEEVKKENKEVLEKAERDVKRIADEIKKVLDDLRKHSRDLEEEVRRLDGKEELRKKLRKVVEDHKRVLEEVKDRLTKVLRELEEVLEKVKRDIKKSLEDLEKVLRELEK

SEQ ID NO: 11333 - protein, 183 aa, Artificial Sequence; identical to SEQ ID NO: 11332
  Synthetic

SEQ ID NO: 11334 - protein, 183 aa, Artificial Sequence
  Synthetic
SDVERLLTKLKEVAKDLARIVKRLDEENEKLSEKAEREIRKLDRDNERLLEELEERKRRSDKDKEEVTRRAREEVKRVEEENKEMTDRLRRESDELRKKNEEALKRMEERVRRLEEEVERRNGEDRLRKKLKEVLDDLRRVLEELKDHIRRSLDKNRRSLEELEEHIRRSLTELRRRLEELAK

SEQ ID NO: 11335 - protein, 183 aa, Artificial Sequence; identical to SEQ ID NO: 11334
  Synthetic

SEQ ID NO: 11336 - protein, 183 aa, Artificial Sequence
  Synthetic
DEVRELLERIEDEIRRIREEIKKLDEDNKKLAEDIRRKIEELDKENKELLKRIEDKKRESDKDKEEVTRRVRKEVEEVEKKNKDVLRDLKRKVEDAERRNEEVLRRLEERVRELEERIARLDGDDEVRDRLRTILKKLREMLKEVKDRIDDSLRRLREVLDEVAKHIERSLKELKDRVREVEK

SEQ ID NO: 11337 - protein, 183 aa, Artificial Sequence; identical to SEQ ID NO: 11336
  Synthetic

SEQ ID NO: 11338 - protein, 178 aa, Artificial Sequence
  Synthetic
SDKEEIKKVVDDVRRDIRRLEKELRDLNERFRKRVEELKKRLEEVNDRARREVERLKSRITDERLRRRLDEVLKRDEDKSDKLRKELDELLEEVNRRTRTLEKRLRDLLDEIEKVSRRDLEDVDTLKRRLEDVLRKAREEVEKWKEDLERLLREAERRVREYEEDTRRLLKELEDETR

SEQ ID NO: 11339 - protein, 178 aa, Artificial Sequence; identical to SEQ ID NO: 11338
  Synthetic

SEQ ID NO: 11340 - protein, 182 aa, Artificial Sequence
  Synthetic
NVEDEVRRVVTELEKTLREVLKRSKEALDRLRETLERLLKELEDVHREANEDLTRLEREDERLLRRLKELKEESKKILDDLEEILRRILERVKEIHRRNREFLERIREEVRELLRELRRNNVPESVVKRLVRELERLLREVEKHLEDSKRELEDLLRRLRERLEELKKRHEDLLREAREETR

SEQ ID NO: 11341 - protein, 182 aa, Artificial Sequence; identical to SEQ ID NO: 11340
  Synthetic

SEQ ID NO: 11342 - protein, 182 aa, Artificial Sequence
  Synthetic
SLEETIEEVVRRNKETLDRARKKSEDVLRELERVLRELKRRTDEVARKLKEELDKLDREDEDLKRKIKRIEERLRELLETNRRMLERILEEAEKIHRRNERRLRELKKRTEKLLRDLKRDQVPEDVVRRLLEELERLSRDLERHVKRSEEEARDLLRKAREHVERSVKEIEDLLEDLKREAT

SEQ ID NO: 11343 - protein, 182 aa, Artificial Sequence; identical to SEQ ID NO: 11342
  Synthetic

SEQ ID NO: 11344 - protein, 182 aa, Artificial Sequence
  Synthetic
SLEETVRKAVRRNRETLRRLKRESEEAVKEAKEVLDRLREETERVLRKLEKRLRELRREDEELERLIEEIRRRLEELLKENEDLLKKIDDEVKKLLRENEDALRKLLEETERLVREAETKKLPKSMVDELLRTLEKLSDEIRRHVEKSKEDLERLLRELKKHVKRSVEEIEKLLEKLDKEAN

SEQ ID NO: 11345 - protein, 182 aa, Artificial Sequence; identical to SEQ ID NO: 11344
  Synthetic

SEQ ID NO: 11346 - protein, 180 aa, Artificial Sequence
  Synthetic
SEVDEILKRIKEVLKRNKENVERIKKRIKEELDRNRKNVERILRTIEKLLKELEDIARREGPRREVAERLRRELEKLLRDVEEDLRRVDERAEELKREVDEDLRRSEEEIRKLEEDVRGNDEELRKKVKEVMDRWRETLDRLREEVERVLEDWRRKLEELRRRVEKVLRDAERVIKKVEE

SEQ ID NO: 11347 - protein, 180 aa, Artificial Sequence; identical to SEQ ID NO: 11346
  Synthetic

SEQ ID NO: 11348 - protein, 174 aa, Artificial Sequence
  Synthetic
SEREEIERVLDENRRSLEELEREVEDALRTWEEELKKVEEAVRKVLEDVRRELEKDLKDAKELVKRVEKILRELEEEVREDKRRSKEAADKLRREVEKASEDNKRELDRLREALDRAEVEKIKTEVDDLSRKLRETVERLKTELKKVIDRNRKTLEDLERRARKLIKEARDAAK

SEQ ID NO: 11349 - protein, 174 aa, Artificial Sequence; identical to SEQ ID NO: 11348
  Synthetic

SEQ ID NO: 11350 - protein, 174 aa, Artificial Sequence
  Synthetic
REREKIEDLLRRNEKSLRDVARAVERILEEWRKVVEDLTERNKELLKEVEKVVRELLKDDKDLLRRIKEMLDRSREKTKRDKERSKEVADKLRDELRRLVKENRDRLRDLRRLLERLDVDEIAKELKRLSDKLREMLKRLTDKAKRLIERNEKTSRDNERELRKLIKEAEDAAT

SEQ ID NO: 11351 - protein, 174 aa, Artificial Sequence; identical to SEQ ID NO: 11350
  Synthetic

SEQ ID NO: 11352 - protein, 176 aa, Artificial Sequence
  Synthetic
SKEERLERLIEENKKSLDELSKRVEEVIKENKDVLKRLKEKIERLIEKNRRELERLKKDVDEDKARRLEESSERLETRARKIVEDMKKTSDELSEELKRVVEEMERSSRDLEREAKEREAREELERELRDHSRRLKEIVERIERKVREHIRELEKIVKEVEREVEEHIEKLERTVR

SEQ ID NO: 11353 - protein, 176 aa, Artificial Sequence; identical to SEQ ID NO: 11352
  Synthetic

SEQ ID NO: 11354 - protein, 176 aa, Artificial Sequence
  Synthetic
SDEDRLRELLKKNRESLKRLSDEIRRLIEENRDALRRVKETIKELLRKLKEVVERVRKDVDDDKVREIKKEVDKIEDKVRKILEEMERTSRELEKRLRKLLKEMDESSRRLADELRKRKADEEVRKTLEEHSRDLRRKVEELAREVKRHIRELEKILKEVKDEIEEVIRRIEETAR

SEQ ID NO: 11355 - protein, 176 aa, Artificial Sequence; identical to SEQ ID NO: 11354
  Synthetic

SEQ ID NO: 11356 - protein, 185 aa, Artificial Sequence
  Synthetic
SEIEDAAEKVRRNSEEAKRILDEHRERVKRVLEEIERLVKRAEERIEELIRTIERLRKDGRPTEDLAREIKRIVDEVRKALEEIKKRIEDLLREAEEHSKKVKKDLDRSNEELARTAEELKKRITDEEVRKKLEDILRKNEETSREIKKRLDRIDDDLRRVLEKAAKRLRDLLEKLREAVRRVET

SEQ ID NO: 11357 - protein, 185 aa, Artificial Sequence; identical to SEQ ID NO: 11356
  Synthetic

SEQ ID NO: 11358 - protein, 185 aa, Artificial Sequence
  Synthetic
SEIEKVKKEVEENSREAKRIVDEHKRLVEENSKEMEKLLKEAEDTIRKLLKEIKELKDRGLPKEELAREIRDILRRVEEKLRDIERRLDESNERLRRHSEKVKRDLDRSNEELEKRVRELEKRITDERMREKLRRALEENRRTSERLKRKLDDIDRDNERTSREVKEKLKRILEELKRTLEEVER

SEQ ID NO: 11359 - protein, 185 aa, Artificial Sequence; identical to SEQ ID NO: 11358
  Synthetic

SEQ ID NO: 11360 - protein, 185 aa, Artificial Sequence
  Synthetic
SEIDKARDEVRKNSDEMRKIIERHREKVEDNSRRMKETVRRVEEEIERIIREIEELKKRGLPKEELRRRIEELVKEVEDRSEEHKRDLDRSNEELRRHSEEVKRRLDESNKRLDDKLRELERRITDRRLREELRRIAEENKKTSDDLKKRLDRIDKENERTSEELKEENDRLLEKLRRAADRVKR

SEQ ID NO: 11361 - protein, 185 aa, Artificial Sequence; identical to SEQ ID NO: 11360
  Synthetic

SEQ ID NO: 11362 - protein, 185 aa, Artificial Sequence
  Synthetic
REIEEFEKDVRRNSEDMERIAREHEKLVRDLLRELKRLVDDLKRRLEELAEEIKSLREQGLPREELTKRIKEIVDKVRRELEELKKRIDDLLREARKHSEDVKRRLDKSNEDLERKLRELEKRITDERLRERLKRILDKNKETSDRIKKRLEDLNRELERVARELKKTIDELLRELEEVVERVRK

SEQ ID NO: 11363 - protein, 185 aa, Artificial Sequence; identical to SEQ ID NO: 11362
  Synthetic

SEQ ID NO: 11364 - protein, 185 aa, Artificial Sequence
  Synthetic
SLEEEVKKLLEELKKVADKLTKEVREADKKLEEVLRRVKRRLDEVDRRLEEEIKKVKSRITDERLRRRLDELLERVREHSKRLKERLDKILEDVNRRTKEMEERLRRIVKEVEELVEEVKRRKSDREELLERLKRRIDRLIEEARRLVEKWRDELKKLIDEVRKLVEDHERKVRDIEKKVRDESR

SEQ ID NO: 11365 - protein, 185 aa, Artificial Sequence; identical to SEQ ID NO: 11364
  Synthetic

SEQ ID NO: 11366 - protein, 181 aa, Artificial Sequence
  Synthetic
DAEEKARRVLEELDEALKRLAKKIKESIDKLKDVLRKLAEIIKRSLDELDEVLKRLASKLDKKDLDRIREELEKLKEDNKRDLDKIARELEELVRRNEDKLREIARDLERLKEELKRVLDRDGGVGEEILEELRRALEELKREVDELDRRNEEALERLKERVKRLNEDNRRTLERLEREVD

SEQ ID NO: 11367 - protein, 181 aa, Artificial Sequence; identical to SEQ ID NO: 11366
  Synthetic

SEQ ID NO: 11368 - protein, 184 aa, Artificial Sequence
  Synthetic
DVEELLRRLLEELRRVVKEVEDINRRSLEEARRVLKRLEDDHRRVLKELEDVLERLRRQGLPEDVVRTLTREIREMAEKHKKLLERIREAVKRSEEEHKRHTDDVRRTLETIERELEKVERRGVSRETIEELLRKVDRDLKRIRTTSEDLVRKNEELLEKLERESRRVVEESRKRLKEAEERTR

SEQ ID NO: 11369 - protein, 184 aa, Artificial Sequence; identical to SEQ ID NO: 11368
  Synthetic

SEQ ID NO: 11370 - protein, 184 aa, Artificial Sequence
  Synthetic
SVEEKLKDLEKENKDSLDEIRKLNEDSLEEAKRVLKKLEDTHRTVLRKLEKVLDELRKRGVPREDVERLKKIMEDAARKHKELLDDLRRKVKESEDRHRDHTRRVEEKSKELRRELEDVRRRGEDDDAIRKLRKKVEDTSRDLKRTSDDLVRRNRKLLKELEEESRKVVKESDEILRKMKEEVR

SEQ ID NO: 11371 - protein, 184 aa, Artificial Sequence; identical to SEQ ID NO: 11370
  Synthetic

SEQ ID NO: 11372 - protein, 184 aa, Artificial Sequence
  Synthetic
SVEEKLDELEKRIKEVLERIERINEESLRRAEEVLRDLEETNRRALERVRDVLRRLEERGVPEKDVDKLRRIVEKLERDHRDLIRRLRELVKRSKERHEEHTERVRRTIKRIREELEDIKRKGVDDDAIRKLLETVDRRLKELTETSKRLVEENRDLLRRAKEESKRLVDESEKVLEEMDRETR

SEQ ID NO: 11373 - protein, 184 aa, Artificial Sequence; identical to SEQ ID NO: 11372
  Synthetic

SEQ ID NO: 11374 - protein, 184 aa, Artificial Sequence
  Synthetic
SADETLEELEKELRRVVDEVRRTNEEANKRLREVLRKLEKKNDDVLRDLERVLKELEDRGVPEEVVRRLRKIVEDLKREHEKLIKKLREEIKRIIDDSRRHIRDVERILEKIRKELKDIRDKGVSEETIKKLREDVKRELDRIKTSSKKLVDDIERRLRRMEEESRKLAEDSRRILEEMRKEVT

SEQ ID NO: 11375 - protein, 184 aa, Artificial Sequence; identical to SEQ ID NO: 11374
  Synthetic

SEQ ID NO: 11376 - protein, 175 aa, Artificial Sequence
  Synthetic
SEVEKLVDEIKKELKRLRETSKKLLDEIRELLERLKRSSKKLVDDIKRILEELKRRNLPREDVERLLREIRKRVEEHKKRLREALERVERRVRDHNRELRRVLEEVERKVREIEKRGVDKDKLEKALRDARKVVEDIERTNREILKRVRDMVERIREDNDTVLEEVERMAEEVRK

SEQ ID NO: 11377 - protein, 175 aa, Artificial Sequence; identical to SEQ ID NO: 11376
  Synthetic

SEQ ID NO: 11378 - protein, 185 aa, Artificial Sequence
  Synthetic
REIEELKKKVEKVLRELRKSSEEMKRRVEDLIRRLKKSSKDLERKVKDLLKKAEEKVRRDGTTDELKRRLEKEARDLERELRKHDEDVERKVRKLKEELKRHNEEVEDIIRRVEEELKRVADKIDDEEARRRLEEVVRRLRKVLDDVRKINKEVVDRLKKALDEVKRTNEDVVRDLRKVLEELKT

SEQ ID NO: 11379 - protein, 185 aa, Artificial Sequence; identical to SEQ ID NO: 11378
  Synthetic

SEQ ID NO: 11380 - protein, 177 aa, Artificial Sequence
  Synthetic
SEIEKLKEEIRRLLEEIKRHAEENKRRVETALRDIERHVEENTRRVAKVEEEIKKLKDRVRREELDEILKRVKDHLEEAKRRIKEILRRVEEHVKRSKRRIDELLRRLKEKVARIKEAGVDKDELDKVEEEAKRVAEEVKEIHDRVLEEVRRVVDRVLKAHDEVLRRLERVVREVKR

SEQ ID NO: 11381 - protein, 177 aa, Artificial Sequence; identical to SEQ ID NO: 11380
  Synthetic

SEQ ID NO: 11382 - protein, 177 aa, Artificial Sequence
  Synthetic
EEEKRLRELEKRNEDVIRKAAEDVREILRKNEEVLKEAEDRIKRLIDEDRRVLEEVKRDDSRDDKLRKVTEESKKLVRETERVLEELKDSSRKLKEELKKLLDELRDSSEKLKDDLRKRRVDEELEREVRKHDKEVKEVIDRLREKSERHIREIERIVDELRKKHEATVRKLKKDVK

SEQ ID NO: 11383 - protein, 177 aa, Artificial Sequence; identical to SEQ ID NO: 11382
  Synthetic

SEQ ID NO: 11384 - protein, 177 aa, Artificial Sequence
  Synthetic
DEDETLRELEKKNDKALDDARRTIEEVIRRNEEVLKRAAEEIEKLERKNKRVLEEVKRRDSRDDVLRKIEDSSRKLKEDLRRVLEDLKRTSEELKRKLREVLKRLEDSSRRLKDELRKRRVTEELAEEVKRHDDRVRKEIEKLKREVEKHDREVKETIDRLAKKVDDHLKELRDTTR

SEQ ID NO: 11385 - protein, 177 aa, Artificial Sequence; identical to SEQ ID NO: 11384
  Synthetic

SEQ ID NO: 11386 - protein, 189 aa, Artificial Sequence
  Synthetic
DEIKEIEETVERLVEELKRIVEEWREESKRNVDELEKRIRDIKRRIDEAIKTLEELKRRGLPKEELSERIKRILEKLKREIDKVKEEVRRSHKDLDRKSKEIETRIRKLLEDLERKIREAKKRMKDDSRVEELRRALDELLEKARKVVEEVEKMIKEVNDRNKKVVDELKRTLDKILKDLEEVAREVDR

SEQ ID NO: 11387 - protein, 189 aa, Artificial Sequence; identical to SEQ ID NO: 11386
  Synthetic

SEQ ID NO: 11388 - protein, 189 aa, Artificial Sequence
  Synthetic
SEIEKMKRDSDENIKRMEEIARKWEKESRDNIREIEKRVEDLKRRIEKVIREIEKLRRDGRPDEDLKRKLDDDLRKLKEEVEKLKEDLRRSHEDLDRRSKEIKREIRESHRKVEEDIRRIEEELRDDKDLEEAKRKLEEVLDKNRRVVEKVERRIDRINDRNREVLERAEKELDDILRKLEEVVRRAEK

SEQ ID NO: 11389 - protein, 189 aa, Artificial Sequence; identical to SEQ ID NO: 11388
  Synthetic

SEQ ID NO: 11390 - protein, 182 aa, Artificial Sequence
  Synthetic
DEIREAKKRLDDIVTELRDHIRRSKERHERLVKELERHIRELEKKVRELIKRLDDAVRRDGKVDEELLRRLRETAKRDAENVEDVNRRLEEELKKNKEDVDRMNDTLRKRLEEIAKEVSRMDKEEVKREITRLLEDLKRVSREHREEIRKLLETTREVSKRHREKVEDLLRKLEEVLERVRT

SEQ ID NO: 11391 - protein, 182 aa, Artificial Sequence; identical to SEQ ID NO: 11390
  Synthetic

SEQ ID NO: 11392 - protein, 182 aa, Artificial Sequence
  Synthetic
SELEEIARLAEEIERKLRESLRESDKMHKKLNKENEDLLEKIRKEVEDIIKKLRDLKGTSEKILKDLAKEVEDVIRKIEELVKDAERRNREALERDRRKNEELRREVRKVIEDIKERVRRVRDERVEEAVRRVVEKIKDVVEKHSDASRRLNEELKESVDRLRREVEKLVEKIRKVVEDLRK

SEQ ID NO: 11393 - protein, 182 aa, Artificial Sequence; identical to SEQ ID NO: 11392
  Synthetic

SEQ ID NO: 11394 - protein, 185 aa, Artificial Sequence
  Synthetic
SDLERVEKESRDHIDTLRRIVERVEEHVRRSIKTLDELVDRARRSVERLIEELEEMKRKDKDKEKMTRKIEKLLKDAEDEIRKLKKEIRELHKRNEDEVRRVKEEIRKSLKEVEDRIKEIRDKTTDRRVEEELRRLLEENRRVVEEVEKELDRLLKESEDAVRRVEEALDRLLKELERVAKEVKD

SEQ ID NO: 11395 - protein, 185 aa, Artificial Sequence; identical to SEQ ID NO: 11394
  Synthetic

SEQ ID NO: 11396 - protein, 185 aa, Artificial Sequence
  Synthetic
SDLEKVKKDSDDHIRELERLVRRAEEHVRDSVRRLREIVEELDRDVRRLIEELKDLKRKIRDKEKLIRTIRRLLEELERKVREIKKRIREENEKNEREIRKLKEEIRRSLEEVERRLREIKKKTTDEDVKKKLDDLLRENREAVKRVERALDKLLTDDRRVVEEVERALDELLKRIEKVAREVEK

SEQ ID NO: 11397 - protein, 185 aa, Artificial Sequence; identical to SEQ ID NO: 11396
  Synthetic

SEQ ID NO: 11398 - protein, 185 aa, Artificial Sequence
  Synthetic
RDVDELRKESEDHIRELRKLVEDVRRHVKRTNDDLERLVKEVDDTLKELIKEVKELKRRVTDKEELVRRLEKLLRDLEKKARELKEEVKRLLERNRETLEKLERELKKSLDELEKRADDIRRKTTDEDVKKKIKDLLDTNREVVERVLRTLRDLLRRNKEVIDRILETLDELLERVKREIEKDAK

SEQ ID NO: 11399 - protein, 185 aa, Artificial Sequence; identical to SEQ ID NO: 11398
  Synthetic

SEQ ID NO: 11400 - protein, 185 aa, Artificial Sequence
  Synthetic
DDAERAKEESERHIKRLKDLVEELRKHSERTDEEIKELLRRLEKTVRDLIRELERLKEEIKDKDTVTRRIDKLLRDLEEKVRDLKRRLKKLLEDNKARVDELREDIKRSLEELERRVREIKEKTTDEDVKRKLDKLLKENEDVVREVDRALKELLRKNAEMLERAKERLDRLLEEVKKVADEVRR

SEQ ID NO: 11401 - protein, 185 aa, Artificial Sequence; identical to SEQ ID NO: 11400
  Synthetic

SEQ ID NO: 11402 - protein, 182 aa, Artificial Sequence
  Synthetic
SIEEELERLLRKNEDSLRRVRDEIRRLEEEIRRVLKKWRDEARKLLREIERVLKEVAERKGKREELDEILERVERDIEKSERDLRRLEEEVKKLVTDIEKAIKDIEDESRKAIEEVRRKRSTDETLLRDLERKSKEVDERLEELLRRAKERVEELIREIEALLDRNRRNVERLIRELERRTD

SEQ ID NO: 11403 - protein, 182 aa, Artificial Sequence; identical to SEQ ID NO: 11402
  Synthetic

SEQ ID NO: 11404 - protein, 179 aa, Artificial Sequence
  Synthetic
EELERLLEDVKRTLKELRDRAKEVLDRVRKTLEELKRELKRVLDEVTELLERLRRIVKREGKVEETLKRVEEELRRLAEEVKRLNEEHRRKLERLAREVRKLNEEHRRRLEELTKRAEDKGLDKRIIKEARERVETVNRETKKILEEIARTVEKVDEESRRILEKVKRDAERVLREIKK

SEQ ID NO: 11405 - protein, 179 aa, Artificial Sequence; identical to SEQ ID NO: 11404
  Synthetic

SEQ ID NO: 11406 - protein, 180 aa, Artificial Sequence
  Synthetic
DELEEVEKEVKRILEESRRLLEELEREVRELLERSKRILEELEEEVRRLLEKLKRVRTRGEKDLEELIKTEVRRLEKKIKDLLDKDREMLKRATERLEKVYRENRELIERVKRKLDDLARRKRKDEELERLKRELDKVHEEVREKVERAKRELERVHKRSEEEARRLKEEVDKVLDELRK

SEQ ID NO: 11407 - protein, 180 aa, Artificial Sequence; identical to SEQ ID NO: 11406
  Synthetic

SEQ ID NO: 11408 - protein, 186 aa, Artificial Sequence
  Synthetic
SELDELRKRVEEIVEENDRVLRELEKRVRELSERNKKTLKELTKRVREILERLKELKDRGEDKDTLDKAIRRVEEEVKELVERVTRHDEESKKEVRKLVDEARKHLEESKKRVDDLKRKVEKRLGQLEEVKEVVRRLEEKVKESLDRAEKVLRRLEREARESNRRHEEEVRRLKEEIDRVVTELRR

SEQ ID NO: 11409 - protein, 186 aa, Artificial Sequence; identical to SEQ ID NO: 11408
  Synthetic

SEQ ID NO: 11410 - protein, 186 aa, Artificial Sequence
  Synthetic
SLEDVLREVEERIRKSLEEHRKVTDEAEKELRRIVEDHKRVLEEVKKEIEDVIKELKKESVDEEEVRKLVRELREALKRLEKHSKDLEEEVKRVVEEMRKRSKELKERNDKVLDELRKKVKDSDDEKEKVAREIRETVKKLHEDNRRMSEEIKKTVERLLDKLRRSLERIRREAKDLVRKIEDLRR

SEQ ID NO: 11411 - protein, 186 aa, Artificial Sequence; identical to SEQ ID NO: 11410
  Synthetic

SEQ ID NO: 11412 - protein, 186 aa, Artificial Sequence
  Synthetic
KLEEVLRKVAEDIKRSLEDLKRVLKEVADHIRRSLEELRRVLERVKKEIEDVLRELENSELDKRAVDKIVKEVKEALDELEEAVRRVAKENEDALRKLAKDVEDVARRNKEAVDRARERVDKSDDDADKVAEDIRRDVRRLDEENRELAERIKRAIEELDRKNKDLARRIEDAVRRLLEKIKEAVR

SEQ ID NO: 11413 - protein, 186 aa, Artificial Sequence; identical to SEQ ID NO: 11412
  Synthetic

SEQ ID NO: 11414 - protein, 186 aa, Artificial Sequence
  Synthetic
DLEEVLKEVEKRIRDSLKDLKRVLDEVLDHIRRSLKENRDSLRKLEEDLRRVLEELRRTDLDERVVKKIEDEIDKVVKRMEKVSRDLEEDNRRVLEELEEEVRRVMKENKDVLDRLRDEVTRSDDDEKKVAEKIRKEVKELDEKNKELARRIRDVAKKLDERNKDVSRRLAEEVERLLRKIKEKVR

SEQ ID NO: 11415 - protein, 186 aa, Artificial Sequence; identical to SEQ ID NO: 11414
  Synthetic

SEQ ID NO: 11416 - protein, 186 aa, Artificial Sequence
  Synthetic
DLERVLEKVARDIEESLRRNKESLKRLKEHVEESLKENRKSLEDLRKKLKDVLDELKKTELDESEVKEIEERVKKVEEDLERKSKKLEDENRKAVDELRKLSEDLERKNRKVLKELKDEVKDSDDEKKKVADKIREEAKRLDKENREASDRARDVVRRLDEKNKKLSEEMKRTVERLLETLDRKMR

SEQ ID NO: 11417 - protein, 186 aa, Artificial Sequence; identical to SEQ ID NO: 11416
  Synthetic

SEQ ID NO: 11418 - protein, 186 aa, Artificial Sequence
  Synthetic
DLERFLEEVARKIEKSLEELRRVLEEVRDRIRRSLEENTKSLERLTEEVRRVLERLKDTDLDKKEVEDIEREVRRVERTMRELSKKARRDNTEMLRDLARKVDEVEKENKRVLERLREKVKDSDDDEDKVAKEIEDEVRRLDEKNRKLAKEIRDEIRKLDKENKDLSKELRDRVEELLRKIEETVR

SEQ ID NO: 11419 - protein, 186 aa, Artificial Sequence; identical to SEQ ID NO: 11418
  Synthetic

SEQ ID NO: 11420 - protein, 178 aa, Artificial Sequence
  Synthetic
KAAEEIRKKVEDYKRESEKILEEVEDHSRRSKETLKRLLDDLRRAVEELKRRLEELKRRPRTEEIAKRAEEAVRRAAERIKKVIDDVERHIRENAKELKRLLEEDREASRRLEDEIDKEVKAREVADELKKRLKRANEESERVLRELAERNKTALEEAERVLRRLKEEIEKVLRKLKK

SEQ ID NO: 11421 - protein, 178 aa, Artificial Sequence; identical to SEQ ID NO: 11420
  Synthetic

SEQ ID NO: 11422 - protein, 182 aa, Artificial Sequence
  Synthetic
SEVEDLRRRVEEIKRRVEEILRENKEVSEKSIRELERLLEELKRLVDELLKRLEELKREGRDKKEELKKLLEDAERLLRKVEEEIERLKRESEDHLRRSNEEVDELVKRMEELLKEIEKRSRDDDLRRALKDVVDEVKKVVDELREENDRLRKENKRAVDEVRKELERLLRDVERVIRRAEK

SEQ ID NO: 11423 - protein, 182 aa, Artificial Sequence; identical to SEQ ID NO: 11422
  Synthetic

SEQ ID NO: 11424 - protein, 182 aa, Artificial Sequence
  Synthetic
EELDRLRRHADESRKRAEEILKRNEEEIRRLVEELKRILKTNEDVLRDLEKKLEDLKRRGERREEDLRKLLEDAKKHLTDSNKRLEELKERIERHLRRSNKELEDILETNRETLKELEKRSRDDKLRTTIDEVRRRSKKVLDDLRDRNRRLLEEVDRAIKEVRETNEELLRRLKRVIDEVRR

SEQ ID NO: 11425 - protein, 182 aa, Artificial Sequence; identical to SEQ ID NO: 11424
  Synthetic

SEQ ID NO: 11426 - protein, 185 aa, Artificial Sequence
  Synthetic
SAEELLRTIEKRIEDNHRRLEEILEEIARLIEDMLRTDERIVREIKELLKEVLDRVRRAGVPEEVLERVRRELERLKKELEELRRRSEEKVKELKRRLEEIRRKLEEEHRDLRRKLEELRRDLGDKEEVVKKLVEDVERELERSLREAEDLLRRVEEVIRTSKKESKDVLEKIERLLRDLERRTR

SEQ ID NO: 11427 - protein, 185 aa, Artificial Sequence; identical to SEQ ID NO: 11426
  Synthetic

SEQ ID NO: 11428 - protein, 180 aa, Artificial Sequence
  Synthetic
SVAEELKKEVDDLLRDLKKKLDDVRRDHERLLRELEEHLERSRERVERLLRTLEDVARKGRVEEELLKELKKRIDEIAKENRDLLKELEERSRDTLRKLRETLKKLKKRVDDLIRKVEEEKKIDRKVIEKIERDIRKILKEVEEVLRTLKKKSDEILERAKRVTEKIERDVTEILERIKK

SEQ ID NO: 11429 - protein, 180 aa, Artificial Sequence; identical to SEQ ID NO: 11428
  Synthetic

SEQ ID NO: 11430 - protein, 180 aa, Artificial Sequence
  Synthetic
SVADELRKTAEELLKRLREHLDTSRRRVEDLLRRNEKKLRDVLREVKKLLDELRELKERGRVDDEVLKELKKRVDDLIRELEETNRKTREDIRRILEENRKLLEDLRDEIRKLEEKVRRDNKAPEDVIREIKDRVRRILDEARRVSEKLRRDVEKINRESREVLERIKELIKRILKEAKD

SEQ ID NO: 11431 - protein, 180 aa, Artificial Sequence; identical to SEQ ID NO: 11430
  Synthetic

SEQ ID NO: 11432 - protein, 178 aa, Artificial Sequence
  Synthetic
SELEELLREVDDSLKKLETEAKKLLDEVRDSLRKLEETLRRVLREVEEELKELEKENSKDDRTLERVKEMLDRVAKRIKDMNREHRKKVKELEDRVRELNKRHRDKLEELAREVSKNSDKRVEDVLREIRRRAREINERLKKILKEAKEVAEKVNEETRRVLKEIKELIERVLRELRK

SEQ ID NO: 11433 - protein, 178 aa, Artificial Sequence; identical to SEQ ID NO: 11432
  Synthetic

SEQ ID NO: 11434 - protein, 176 aa, Artificial Sequence
  Synthetic
REAEEAKEEVEELNRRNKKELDDARRRVDELDKRNKDRLKESSDRVKRLVEELERVKEEGRSDDRLREKIERMLKTSADELERLKEENKRALRDLAERLRELIERNRRKLEEITRRTVPDKDVLKRLAELIKESIRELERVLEELAEKIDRSLKELDDVLRKNETDLKRVIEDLKR

SEQ ID NO: 11435 - protein, 176 aa, Artificial Sequence; identical to SEQ ID NO: 11434
  Synthetic

SEQ ID NO: 11436 - protein, 179 aa, Artificial Sequence
  Synthetic
DEAEKAKRDSEKVVEDNRKMLEDSTRRAERLNEENKKELKKSTEEAEKILREIDETKRRGTDDEVVKDLIRRVEELLERSRKKLEDLTRDNERVLDESRRRLEKLIRDNERIVKDLTDRVVRVDEVLKRLKEEHRRLIEELEEVLRRNEEIIRRSIEDLERVLDRNRRELEDVIRRLKE

SEQ ID NO: 11437 - protein, 179 aa, Artificial Sequence; identical to SEQ ID NO: 11436
  Synthetic

SEQ ID NO: 11438 - protein, 179 aa, Artificial Sequence
  Synthetic
REAEEVERKVEELNRRNRKVLDDARKESEEVVRRNREFLRRLEERVRTILRELDKRKRDGTSEEVIKRLIDRVRKILEDIRRLVDELIKRNERIVEKLTRIVEELIRRNKKLLEDIRRELVKVDEVLRRLAEDIERSIRELEKVLRELERIHRELIKELKEVLKRLEKDAKEVIERLRT

SEQ ID NO: 11439 - protein, 179 aa, Artificial Sequence; identical to SEQ ID NO: 11438
  Synthetic

SEQ ID NO: 11440 - protein, 186 aa, Artificial Sequence
  Synthetic
SLAEEIDKTIRELAKRHEKTVEDIKKIITELEKKHRDTAEELERIVREIEKKIRELKKRLKDDKDKLRELKDELRRILEDAARKSKRVVEETEEVNREINKRSEEVVRDTERVLRKIADDLRRRIRREELERVLREAEETLRRLIEKDEKVNREADEKSERLIREDEKVLEDVAREVERLLRELDK

SEQ ID NO: 11441 - protein, 186 aa, Artificial Sequence; identical to SEQ ID NO: 11440
  Synthetic

SEQ ID NO: 11442 - protein, 186 aa, Artificial Sequence
  Synthetic
DEDREARELVERLREEHRRTAEEIKKIIEDLERKHRETMERLKRIIEKIERDIRRLKRDLKDDKEMVERLKKKIKDILKKLAEESKKVVEETEKVNEDINRKSKEVIDRSRKLLEDLRRKLEERSRDKELERVLEKVARDLKKLVDDDRRVNETANRRSRKLIEDDKRVLEEAAKEVKRLLDELDK

SEQ ID NO: 11443 - protein, 186 aa, Artificial Sequence; identical to SEQ ID NO: 11442
  Synthetic

SEQ ID NO: 11444 - protein, 171 aa, Artificial Sequence
  Synthetic
DTERTVKEKIRKWKEDVERVERRLEELVDRARKLSKENVDRMRELVRRLEDRVRKDPDKDKLRKEVERLERRIEESHREVKELVERIKKEIKELVDELHRRSEDIKRDLEEKVRVREVLEDARRKIDELNERVERVAETVRRKLDKILEDNKRVVERVKEEIRRVLEELER

SEQ ID NO: 11445 - protein, 171 aa, Artificial Sequence; identical to SEQ ID NO: 11444
  Synthetic

SEQ ID NO: 11446 - protein, 174 aa, Artificial Sequence
  Synthetic
SEEEVLREAAKTVEKLLDEIRRSLEKVSKRVEDSNRELKESLDRVRERVRELLEELRKNNVDRTLLEDVRRKLERIEERNEEMNDRSRRKLEELRERNRKILEDIRRTLEDLKRRQLPKDDVERTLREIAKLVDEVDKENKRALRENEERVKTLNRENEEMLKRIEEEVRRATK

SEQ ID NO: 11447 - protein, 174 aa, Artificial Sequence; identical to SEQ ID NO: 11446
  Synthetic

SEQ ID NO: 11448 - protein, 185 aa, Artificial Sequence
  Synthetic
DLEEVAKEVKKALDELLKRNEDSARRVKEAIRELLKRINDVTREVEETLDRLLKEVEDGGVPEEDLKRAEDEVRRLKEDLKRRDERLERAARTLEREIDKLLDENRRKVERLKEEIDDLARKGQPAERVVKRLEELLREAAEHSKRSNDELERLLDRLRREVERYERELEKRKKEAKELADKLRK

SEQ ID NO: 11449 - protein, 185 aa, Artificial Sequence; identical to SEQ ID NO: 11448
  Synthetic

SEQ ID NO: 11450 - protein, 182 aa, Artificial Sequence
  Synthetic
DLERRLDELLKRIEDRVRELVRTLEESLRELERRVREIIRRLEEHLRRIEKMVRDLKRANKPDKAVKDDVRRLRENADRLNKRVREELKKLREDVKRVNEDVKRELDKLAEEAKDMLRKLREAGIDERVIKKAEEDVRRLLREIEEVSERHKREVDRLEREIEEVSREHKERVEKLLREIER

SEQ ID NO: 11451 - protein, 182 aa, Artificial Sequence; identical to SEQ ID NO: 11450
  Synthetic

SEQ ID NO: 11452 - protein, 182 aa, Artificial Sequence
  Synthetic
KLEEDLKRILDELRRMAKEIIDRLEDHLRKIKKDVDKLSKENKDHLKEIEDTVRELKRNNLRREDVKRKAKELEKNVKRANEETERKLRELEKNVKEMNTDVKRRIDELVKRAKDILDRLREEGIDERVIKRVDEEVKKLAEEIRKVSEEHEKRVKKLLKEIEKSSEDHRRRVEELLREIDR

SEQ ID NO: 11453 - protein, 182 aa, Artificial Sequence; identical to SEQ ID NO: 11452
  Synthetic

SEQ ID NO: 11454 - protein, 177 aa, Artificial Sequence
  Synthetic
SEEEEVEEELERHHRDVEEYVKRLKELLDKLRRKNETTVRDIARLAKKHHDDVDELKKRNIDEETKDRLREKTEELKRRLEEVKRRLEEEHKRAEDKAREDNERKKRESDRKEEELRRRNVSREVLKRFKDKVKENRDESERVHREIKERLEELKRKNEDVLRKVKKILDDNEERLR

SEQ ID NO: 11455 - protein, 177 aa, Artificial Sequence; identical to SEQ ID NO: 11454
  Synthetic

SEQ ID NO: 11456 - protein, 180 aa, Artificial Sequence
  Synthetic
KDLEKLVEDIRRLLEELKKTVEDNKREIKELLDRLREKVKENLKRHKELNKRLRDTGAVSEDELRETEKKSRELEKRSRDLLKKLEERVEEIERRSDEELKRLEDRVRKIEDDLRREGDRGKEVKDRIEEVLRELREAVRRHHEKVKEVLRELKEALDKHHKDVTDSLRDVERLVEEARR

SEQ ID NO: 11457 - protein, 180 aa, Artificial Sequence; identical to SEQ ID NO: 11456
  Synthetic

SEQ ID NO: 11458 - protein, 174 aa, Artificial Sequence
  Synthetic
SEKEILDEIRDRIRKLLEEIKDYLEKSKKKIRDLLEKIKKVLEDNKERVDRLLDVIRKNRIRDEDLKKAIEEDERRLEKIRRELEKAKRDIEKANEELEEKLRRAATKIKEDLDRKNIDDDVRREAKRLLEEVAEAVRRIHETSKRLLERVDEEMKRVEETIRKTNKEVEDAKR

SEQ ID NO: 11459 - protein, 174 aa, Artificial Sequence; identical to SEQ ID NO: 11458
  Synthetic

SEQ ID NO: 11460 - protein, 176 aa, Artificial Sequence
  Synthetic
SDVEKLIRDAEKKMDDFRKDSERLVRELEEKLKRHEERVRDLLRELKELLEEVRRKDSRDEELRRLEEEIDKKLEEVDRRTEELKRRIDKELEDHRRKLEKLREELDRTLEDLVRKKGRSSEKIKEAVDRIKKALRDSHKELAEVVERIKRKLDETNRELKDEARKIKEELRRVEK

SEQ ID NO: 11461 - protein, 176 aa, Artificial Sequence; identical to SEQ ID NO: 11460
  Synthetic

SEQ ID NO: 11462 - protein, 182 aa, Artificial Sequence
  Synthetic
SEVETVKKRLEDSTKESEDTVRKVKRELERLIERSEDTLRRIKKRLDDLIRTIEDLKRRGNSDDRMEKRLEDELKKIEDELRKYHEEVKRKLDELRKELRREDERVTREHDTLREELTRREGGKELLDTLRRLLEENKRRHKETVDEIERLIKEVERANREILTRIKKALDDVRRAVEEIKR

SEQ ID NO: 11463 - protein, 182 aa, Artificial Sequence; identical to SEQ ID NO: 11462
  Synthetic

SEQ ID NO: 11464 - protein, 174 aa, Artificial Sequence
  Synthetic
REVEEVLRKVREDSKRNKDELKRLLDEARKESEDNKRDLEKLLKEVREEVRRVEEILRKTRIDDEELERLKKRVREAEKRVEDRTRELEKRVREVEKEVKKRNRDMEETVKDIRRKLKDEDVLREIETLLDKNHKDNKKVLDDIRELLKENADRNRRVLEEIKKLVEDVERKVK

SEQ ID NO: 11465 - protein, 174 aa, Artificial Sequence; identical to SEQ ID NO: 11464
  Synthetic

SEQ ID NO: 11466 - protein, 179 aa, Artificial Sequence
  Synthetic
DEDEKALREIKKLIEDNERLNREVNERIERLIDRARRLMERVNREIERLIKEVRERLGEEDKRAREILRRLKEELKKHKKESDDLLEKLKRRLDEHRKDSKRSKDDLKRELDRVAAKRLRGEELEKTLRDIRKRSKEDADKVKKSLEEVEEEIRRIEKRLRESLKKVEDDIERIRREAT

SEQ ID NO: 11467 - protein, 179 aa, Artificial Sequence; identical to SEQ ID NO: 11466
  Synthetic

SEQ ID NO: 11468 - protein, 176 aa, Artificial Sequence
  Synthetic
SEIEKLTKEIRDLIRTSREEIKKLMEELERNVREAEESIKRLLEKAEELIRRIAEENKDVRELLKKLEDDLRELAKELKKVVEDSRKKLKELIDELKKYIEDLDEELRRLEDVLRRNQTRKEDVKRELERIKKSSDDVRKKVEDESRKHREEVERLERELDRKLEDIRRKVEETKT

SEQ ID NO: 11469 - protein, 176 aa, Artificial Sequence; identical to SEQ ID NO: 11468
  Synthetic

SEQ ID NO: 11470 - protein, 186 aa, Artificial Sequence
  Synthetic
SEIEKLAEDVERIAKKIEDVVRELRKANEDIIKEVRDINKELRDKVEEILRRIEKIVRDRLKDDKDEIDKVERDIERIRDEIRKSSKRVEDTIRRSERETDKLAREVEDTIERIREELEEVKRRQVDKEILDRIRKKLRETLERVRDRLRKYLEDLERRLEELRREHRKTLEELKEKLKRLADRVK

SEQ ID NO: 11471 - protein, 186 aa, Artificial Sequence; identical to SEQ ID NO: 11470
  Synthetic

SEQ ID NO: 11472 - protein, 178 aa, Artificial Sequence
  Synthetic
SEVEDLERRAREVNKRIKDLIDRLRERVRKIEEDIRRLNKELKEEVDKIIEEIRKDGGENREEVRRLEEEIKKKIEESNRDVERVIKEIREKIRELKKRADDLSEESKRKIEEVRRVRDGKLIEELLREHEKMLKEIEDRIRKIERELDELLKTLEDKHREILDELEKELRKAKERRR

SEQ ID NO: 11473 - protein, 178 aa, Artificial Sequence; identical to SEQ ID NO: 11472
  Synthetic

SEQ ID NO: 11474 - protein, 182 aa, Artificial Sequence
  Synthetic
SDIERILEENEKTNRENRKRIEDIRRELEERLDRNRRRIEEILRRAEKMLEEIEDIFRRSDISEDIVREAEKTLRDIKRELDENLRRNEETARRIEEELRENLRRNEEKHRRIEKRLDEKVRDEDKLRDLKKKLRDSLRTLEELHRKLKKDLDEILRRLEELHRKLKEDLDRILKAVRDTAK

SEQ ID NO: 11475 - protein, 182 aa, Artificial Sequence; identical to SEQ ID NO: 11474
  Synthetic

SEQ ID NO: 11476 - protein, 182 aa, Artificial Sequence
  Synthetic
SEIEDIKRRNEENNRRNKKRIDDILEELKRRVEENRRRLEDIERKLREDKERLKDIFRRSRIDDKAVEEAKRRLERIKEELEKNLTRNKDDAERIKRELDENLKRNEELHRRIREDLRRRVTDEDKLRKLEEDLRRSLETLREIHRKLKEELDRILEELKRLHERLKRRLDEIADEVARTAR

SEQ ID NO: 11477 - protein, 182 aa, Artificial Sequence; identical to SEQ ID NO: 11476
  Synthetic

SEQ ID NO: 11478 - protein, 182 aa, Artificial Sequence
  Synthetic
SDIEEIERRNRENNERNKRRIEEIEKRNREENKENEKDIERILRRAEELLKRAKEILRESDISEEVLKEMEERIKRIKERLERNLRRNAERHKEIKKELRENLERNRELHKRIADELRRRVRDEKKLRELKKKLDDSLRTLEELHRELMKRLDESLKTLKELHDELKERLDRILKEIRDDAK

SEQ ID NO: 11479 - protein, 182 aa, Artificial Sequence; identical to SEQ ID NO: 11478
  Synthetic

SEQ ID NO: 11480 - protein, 182 aa, Artificial Sequence
  Synthetic
SELEKTLEDLKRHSEENKKKLEEDLRDMERNLKENKDRLKKILEEAEKTLKDLERRFREGDIDERELERVRRKMEEIKKRLDENVERNRRKAEDIKRKLDENVKRSEDRVKEIKEDIRRRVRDKDKAEELERRLDELVKENREIHERVKKALDDIVKELEELHERLKRRLEEILRRIAETVR

SEQ ID NO: 11481 - protein, 182 aa, Artificial Sequence; identical to SEQ ID NO: 11480
  Synthetic

SEQ ID NO: 11482 - protein, 175 aa, Artificial Sequence
  Synthetic
SSVERFEKAVKESIENIRRLLEELEREIRESMKHLRELVKELKEALDRIVERLRRTVRDEDELRELIKELEDIVRRAEEKLERYRKRLEDLIDEARRTVEDVERRHREKIEEVRRRNRVEEEDLKRLDKENKDIEKKIRDLVKEARDENRKLKRDIERTLRELEERLKEVEDRET

SEQ ID NO: 11483 - protein, 175 aa, Artificial Sequence; identical to SEQ ID NO: 11482
  Synthetic

SEQ ID NO: 11484 - protein, 179 aa, Artificial Sequence
  Synthetic
SDIEKRLEENERHNERSEERIRELLKELEDHLRRTKREIEKKLEDLKRLLDRLREEDVKREEALRDLAEKVKKIKRELREHHERNRRKVEEIKEELRKHHEDNKETHERIKRDLDRKIRGNEELKRVKDELDKSLKHSRELIERAKERLEEIKKRSKELVDRAEKRLDEILKEVKDDFD

SEQ ID NO: 11485 - protein, 179 aa, Artificial Sequence; identical to SEQ ID NO: 11484
  Synthetic

SEQ ID NO: 11486 - protein, 179 aa, Artificial Sequence
  Synthetic
DEIKEREDDVKRHLDRTREEIEKLLKEMEEHTERSRRKIKKVAEDAEERLRKVEEENSKDRRVLTKLKEDVERLKEELKEHLRRNKKTVEDIKRELREHLKRNKKRVEDIKRELDRDIRGNKELEEVKRKLDRILEESEKLVREAEKRLDELLKDNKRLVEELEKELDRILEELRKRVD

SEQ ID NO: 11487 - protein, 179 aa, Artificial Sequence; identical to SEQ ID NO: 11486
  Synthetic

SEQ ID NO: 11488 - protein, 176 aa, Artificial Sequence
  Synthetic
DSIEDLERRAKESDDHLEKLIRELRDELRRSLETVRRNIEDLRRTLEEVLRRLEEDGADKDLLKDLADKVDTIRKELERSLEEHRKRIEEIEERLKDLHRRHRERIEKIKKDLKDVGEEMLREIKKELEETNKRAEDDVRKIREELREHNERHKERSKRIKEELKRTLDELKKKRK

SEQ ID NO: 11489 - protein, 176 aa, Artificial Sequence; identical to SEQ ID NO: 11488
  Synthetic

SEQ ID NO: 11490 - protein, 186 aa, Artificial Sequence
  Synthetic
SRIETLVRRMKELLKEVEDKSEKSKRRWEDRLKKVAEDSKRRVEEMDRELDEVRRKRERGDRDRKEFSDELRKIKEELDKKLREHHERIKEIEKELEDENRKHHEEIKKIKKELDDIVKEAAEEGADERLLRELKRIVDEVKKELDRLDTEHNKAIEDVKRELRKLDEEVRRIVERVKRELDRLEK

SEQ ID NO: 11491 - protein, 186 aa, Artificial Sequence; identical to SEQ ID NO: 11490
  Synthetic

(The sequence listing continues in the following parts.)
